United States Patent Application Publication US 2008/0008996 A1 - sequence listing, part 7

SEQ ID NO: 41294 - DNA, 451 bp, Zea mays
  unsure (1)..(451): unsure at all n locations
ntatcaaatggacgtgaagagtgccttcctcaatggaccaatcaatgaggaggtctacgttgagcaacctcccggctttgaagatagtaagtaccctaaccatgtctataggctctctaaggcgctttatgggctcaagcaagccccaagagcatggtatgaatgccttagagatttccttattgctaatggcttcaaagtcggaaaggccgatcctactttattcactaaaactcttgaaaatgacttatttgtatgccaaatttatgttgatgatatcatatttgggtctactaacgagtctacatgtgaagaatttagtaggatcatgacacaaaagtttgaggtgtctatgatgggggagttgaagtacttcttaggatttcaagtgaagcaactccaagagggcaccttcctaagccaaacgaagtatactcaagatattctaagc

SEQ ID NO: 41295 - DNA, 430 bp, Zea mays
  unsure (1)..(430): unsure at all n locations
agctcgatgaggacatcactattagtacgactatctccttcttcacctccacatcaagcgccacttccttcattagctgggccaatcactcgggcccgtgccagagatcttaacttcgtcatgctactgaagaatgagggcccagaagaatatacgaccagcccaactgcggcccatagtggacgacctatggttggccgcccctatgggctgcgccccctctctctatatatctaagagctgcacctcctttgttcttcgagttttgtnttacatctagctttagctaccccagaacacgcacaaatacatgctgccctctgtgattcataactccacctcgagtgatattaagattgctcgcatctttttcttgttccgtcttcgattgcgcacaagaaacgatctttgtgatcaggccgatctcgca

SEQ ID NO: 41296 - DNA, 460 bp, Zea mays
tctccaccatgtcgctgctagccaagttgttgcagctatctccatctatgatcaaacgacatgaacgctccttaatgacacactctgtttgaaacaacgtatgtcgctgattctgctctgccttctccatttgtgcactaagcacacgctgtacaatgaggctctcataatgctctgcatcatctgcaccaatctgttcttcgggtggttccttagtgcctacatcatcagccgcaagcaaagcaagtgtagcttcatccaaatcactagcagaggaatacccaccatcgtcttttaccaccaaaacacgctgattaagacaataacgctgcacgtgtccatagaccttgcatcgataacacagaacatctcttgttctacctgtggaagctactgaagaggcactacctgcgggtttctgggcagatttggttgctgaatttgtggaagatgcacgtgg

SEQ ID NO: 41297 - DNA, 368 bp, Zea mays
  unsure (1)..(368): unsure at all n locations
ggcagnactatctcctccaactctgacaatacacatgtcgcgaaaatatctacgcctgatggcatcaatatgactttgcttgatagtcgattctcctcaaatagtatggcttggacgccacagtcgatcctcagagtcttcatcctccacttccacgtcataactatcactgtcatcagaatcctcggataaaccctctatgatctccttactaatcttctctatatattggtttgccatggactcaataaatccatcaatgaaaggatctgcaacttttttctcttcatacagcttcgtatccccggtcgttttcttctcttcagtcatcttcttctctccacccatcttcttttcaaatttggagc

SEQ ID NO: 41298 - DNA, 401 bp, Zea mays
ggagcgggaccacaaggactacaagaaggacctccagaatgtgttcgcccacgagctggaggtggcccggaaagagaagaatctagccaagaaagaggagcacttggaccagagggaggaggtcgtcacagagctctgggccaagctgaatgccttcaaccaagtcctagaggagcagcaggcccagcagaccgcgactgtggagagcctgcacaggctacaacacgagctggatgacagggccagcagcattgccctggccgaggagaacctcaaggaaaaggatgcctccctatataagcgggcgacagatctcgcctggcaagagaaggaccttgcctttacggaggagatgtatgaaaggtgggagaagctgctggctgatcatgagctccaggtgg

SEQ ID NO: 41299 - DNA, 428 bp, Zea mays
  unsure (1)..(428): unsure at all n locations
gcaagcttgcgataatcagatgtatgcgaaacttttttatgtgattnttggctgaaggaagtagctttccgaggtcatattatcaccaatggaggaatcaaagtagaccccgattaaataagtgaaatactaaattggaaacaacccatagatgtgtccaagatcagaagttctcttggattagcaggatactacagaagatttattgaaggcttctccaaaatagtgaaaccccttacttcactattggagaaaggtaaagagttcaagtgggatgaggcatgtcataaatgttttgaggaattaaaggaaaggctaaccactgcaccagcgttaattatgcctgatattcataaaggttttgatgtgtattgcgatgcatcacatctaggacttggatgtgtaccaatgccaaaaggaaaagtgat

SEQ ID NO: 41300 - DNA, 432 bp, Zea mays
  unsure (1)..(432): unsure at all n locations
cttgggcctgagctgacatgttangctacctttcctgttctataaatgcactaatgacttgtttggatgatgaagaggacaaaatggtnacatgattcaactctttagtatgttcttatatcttggttatcgaatctgatcatttatttaaccatttatctattttgttgcttgccaggatgaacatgattctactatcattgactaacaaattcaaatacagctactatatcagaatcaaaaggcaaaaggcttaatgccacaagcagacatgtatttgttgtcatgtatttgttctcatgttgagacatgtagacatgtatttttgtcatgttgagaatatttcttattgaaagacatgtatatttaaaattttatccaactctaagttgtgtatgatgttgaattggaaagaaacttgattaattatgc

SEQ ID NO: 41301 - DNA, 444 bp, Zea mays
  unsure (1)..(444): unsure at all n locations
taaggagcanagtgtaagagcctcggaggctattgtttatcttagagatgtgaatgaccaaaagcagtaccctagttgtgtgcaattatcactctggacaagggggggagtgaaccctatacctctcttgaaccctatctcctaagcaccttggttaagggggagagtttaagcaaaggtgcaagtcatgaccaaacctttggcacaaagttaagtaacttattaacctacaattatagagaggaaacattgctaaaaggccccttaagaaaccccaaatccattccctaagtagagaaagagctagagctctctaattctctctaagtcaaaaactacacctaatctaaagatccaccctgttcaccttgaagatggcaccaaaaccacctatgttctataccaaaaatgtggcataccacctatggcacccccttgaaaaag

SEQ ID NO: 41302 - DNA, 426 bp, Zea mays
  unsure (1)..(426): unsure at all n locations
tgcaaacttctgcttttcatgcacagagaatttctgtctatttcattaanncactcccaaaaccgacatttgtcggattgggcttcaaaccaggagcctttcataaactgaataataaagctttctttttaaaacaccatcctgttctatagccatgatttaaggacttgaatggtgaacactcttattcttcagaacagcttcgtaatatacaacttttctcttctaaatccttgatgatagcgtgaattcttctcatgctcaagatcctgtgcattttagcacttattacattatctgtgccgaacaaccttcgtcagaaaacgacatcataacaataataactaaaataataatattctctaccgcaaattatcatacagcacgctaccgacgatatgttgtagcttggacctgcaaaagtcc

SEQ ID NO: 41303 - DNA, 439 bp, Zea mays
  unsure (1)..(439): unsure at all n locations
cggggctcggttgtgacagaggagcaacctcatgcaatgtttataccaatggagnactttctcatgggatatggactgtacaggccaagccatataaactgtagccctcgtagccctctgaatccgctttgtatatcaccagagctcctctctcctgagagcatgggggttaagcttaagccaatcaagacgcgagccaaccttaaagcatatgaacaggtgatgagaatgcgtangaactgatgcgcatcccttgatttttttttgtgctgaagtgacatagctgttgtttccgcgatgtacataagacaagaggttagtcgggtcacggttgggtgggtggtcgattccattgatttgtagcctttaaaacagttgtacattgtcacaaatctatttgttgaacggagacgaaataataaagggagatgagatgttg

SEQ ID NO: 41304 - DNA, 438 bp, Zea mays
  unsure (1)..(438): unsure at all n locations
agcttatccaaaaagtttagtgattnttttatttattaatcaatttctaaaattccaggagtataggttttggctattttaaatactccataattcctaacttggactaaaaatcataaaactatttttattaaatactataagaatttaggaatataacaaaactggtttggtatttttagcatttttctacacatttctatgaattctctaatcctggaagaaaaagaaaaggaaaaagtatgaatagtattgggccgaaactggcccaagtcagcccgtgaacaggcaaacgcgctcgcgcgcgtgcccgcggtggacagtttgcaccgaggtcctcaggggtttgaataattagcggagaaccccgcacactatttcaatgggtcactgacatttgcaaataagccctcgcacttctatttctacacaggctgc

SEQ ID NO: 41305 - DNA, 455 bp, Zea mays
tgaagctagtattgtccacatcctttgccttctgactcttccatttaatctcttggacacataagatatttacattacatgtctcctagtcgatctctgcactaactcctttaacttacctgtaagcgacctacattcctagctacctaaacgaatcctagttggttcgactagcttccatacccttcgcacccatcgatggtgtgaagactcttgcacatttttcattacaagcgagcgccgatgtagcatgcccctaagtaacaacctaatccttgctcactttacaccatgccaaattgtgacatggcatgccaccaaggggttgtcgatttaacaccatacccatgttatgatgacacatcgccaaacatatttttttggatttcatctctattagaatggctaggtttaacgttgactcgccaagcctatcacaactatcctcaggatat

SEQ ID NO: 41306 - DNA, 428 bp, Zea mays
agcttataataagagaatagaggcaagagctcgatcatatgtaataatagaaagggagttataaaaacatggagtctgctctccactgctcatgtgtctatcaagagcttaaggtatagaattggtgaaggaaatacatgcaggattgtgtggatctcacattggatctacacctttgctagggaaagtcttcagacaaagatttttttggccgaaggcagcttcggatgcagcagatctagttcaaaaatgtgaaaattgccaaaaatgcgcaagagaccagaaacaaccttcgtcgtttacccaactgatacaaccaacctggccattgcaaagatgtggcctataattgttaggtccactctcaccagcataaggaaatttaaaatatgttgtggtggctgtagaatattgttccgagtggattg

SEQ ID NO: 41307 - DNA, 431 bp, Zea mays
  unsure (1)..(431): unsure at all n locations
gacacttagaaactcaagctttgcatgagtctgtgtcaagaagtacattagttcttctttttgttatccctccattgctgtatgagtattgcaaattttatctcttttgagaggaggaaaagacgttacatgacatgagcaccatttgcttcacgtcaacagaatagttgtggagagctctaatagttggattctagtgtaataacaaccatgtcttatagtgctacagacgggtatgtcaggtgtttcatacattgtcgatacatggatgtttgaccttagtggcattcacaaacganggttgttaattcgttgattgttgtgcttaatgttctaacctattatgtaaagcgttgcttaaaggctttggggagttgcatccncattaggtagtggacaatactaatgttgatcgcaccttccaatgccct

SEQ ID NO: 41308 - DNA, 428 bp, Zea mays
  unsure (1)..(428): unsure at all n locations
atctcttggctttgcaactttgtcaacatggccttatataacttgggaatcagttttgagaaccgcccttcttatccccattgccttcaactttcgaagacccaaaagcaaagcttcgtattcagcaatattatttgtacaactaaaatcaagtttcactgcgtagcatgttctgactttggaaggtgcaattaaaacgacagctgcacctgccccgaaggttccccaggaaccatcgcagaatattgtccaagcttcggcatctttagttgcttcttcttcctgagcccctggcgtctagtcagcgatgaaatctgctagcgcctcggactgaatcanagatctatgcacataattaatgcataactcattgagttctgcagcccactntccaatccttccagtagcttatctggttctcataatat

SEQ ID NO: 41309 - DNA, 423 bp, Zea mays
gcttcacatctttggactaactcggctgcgtcactctttttcgttggccaataaaaaccaaacctgaagaccttcccaaccagagtcctggatgctgcgtgtattccgcattgcacaacgtggaccttatctagtaattgcttcccagtagccgaaagaatgcatttcatgaggacttctgtctcgccccttctgtatatcgttttcccaatgagagtatagtgagctgactgccttgtaatgcgctctgctgcgtttttgtcatctggctccttctcattctttatatatctgatgattggctccctccagtcatcagaatctgactctggttggttcagaatattgcactcttctgcccgatctaatgaaatgctctggcgtagtacttcttggacaaaaactccaggcgggacctgagtt

SEQ ID NO: 41310 - DNA, 447 bp, Zea mays
  unsure (1)..(447): unsure at all n locations
gtcaatntaataactggtgttgccttggtnttgatatccttatgaataaaaaatgagttatcaacaccgagcccccatatctgtcttcgtttccttctagctgcttacccttcaacagaaatcttgtcaatggataagtacgaggggtgatcgagggctagttccatcttcgctccaataaagtgcacaactataatgtaatgaagaaagccattcatgttattatgttatgttaacacatttctccacaaatggatcaatttttattgaaaatgaaattttagaaaattgagttcatcggcttagctattcagtttcgcacaacaggaaggactcggtgggcgaagctgttggtgcacgccagcgaatcggtcgaagaagacctgagcactagctagcaaagaagacctatgaactagtcatcgaagggcccgaagaagacatgtt

SEQ ID NO: 41311 - DNA, 292 bp, Zea mays
cacacgttcataattgaatggcctgagtccgttctaccgccagggttgagcgctaagtggaggaaactgaagcttctgaaactcttgccatcgtcgaagccctgcaacgatcgggtctagtgacttcctaaaatatccctcctgatgatgctaaacaagcagaacaagcaatcgctgtagcataggaataatatattgaggaaactgactcccaatatgattaccgcattgccatgcctagcaagccgagccacttggacttcggaaaatctactgcgtcgaagactgatct

SEQ ID NO: 41312 - DNA, 418 bp, Zea mays
tgcatggcatgtctaaacatcttgtattgcatctacggctagtcttttctatataagataaccgccaacgaagcgagtgaaaaagcttagctcggatcaaacttgacaagtgcttagttttaagcttttaccacttgaatacgtactttttatgcaaatgttggttcttgaaatatgcatgaaggactgcacttatggggagtattcaaaactcaaatcactcattagaaaccctagtgcagcgccaaaatgcaaatttcaccatttgcctattttctctataaattatctagactatggccaaatattttggaaaatatgatataatatatgagggtgccaatgcctatcccaacacgagctattacgcgtgattataaattgggatctggttcgtgtggagattacatataaaaat

SEQ ID NO: 41313 - DNA, 402 bp, Zea mays
  unsure (1)..(402): unsure at all n locations
agctttaccaaatggacgtgaagagtgcctttcttaatggacctttctaggaggaggtctatgttgagcaacctnccggctttgaagatagtgagtacaccaaccatgtctataggctctctaaggcgctttatgggctcaagcaagccccaaaagcatggtatgaatgtcttaaagatttccttattgctaatggcttcaaagtcggcaaggccgatcctactttattcactaaaactcttgacaatgatttgtttgtatgccaaatttatgttgatgatatcatatttgggtctactaacgagtctacatgtgaagaatttattaggatcatgacaaagaaattcgagatgtctatgatgggggagttgaagtattttctaggatctcaagtcaagcaac

SEQ ID NO: 41314 - DNA, 438 bp, Zea mays
  unsure (1)..(438): unsure at all n locations
tgtgcctagagggtagagcatgctcttcattnngcttgtttaaactcaatgacttgngttaggcttttgtcattgttatcttttgatgccttagttgattcatttgtatttcagtcttcttgaatgctgctctcttcatttgaaaattgctgatttgtatggtcctcaactatcactctaaactattctacaaactctcattgtcattgcacaggggtgagaaaaacgagtcctagcattctttagtgatccataatcatgcacggttgatgtggattgtggaacgtatttgatatttaatcctttaagtaacaatgtaacatcctccctgccactctgaatgacaatagggtataggagcattgcagcccttggtagactatgttctgtttcccactcaacgatggaaagtgaatntaagttntaaagataaggtct

SEQ ID NO: 41315 - DNA, 454 bp, Zea mays
  unsure (1)..(454): unsure at all n locations
tctaaagggagagcacattntaggattaacaaatgttcattttgagaaagacaggatttgtagtgcatgccaggcagggaagcaagttggagtccatcatccacacaagaacatcatgacgaccgacaggccgcttgagctgctccacatggatctattcggcccgattgcttacataagcatcggcgggagtaagtattgtcttgtaatagtggatgattattctcgcttcacttgggtanttcttttacaggaaaaaatttcaaacccaaaaaaccttaaggggtttctggagacgggctcaaaatgagttcggattaaggatcaagaaaataagaagcgacaacgggacggagttcaagaactctcaaattgaaggcttccttgaggaggagggcatcaagcatgagttctcttctccctacacacctcaacaaaatggtgtagtggagag

SEQ ID NO: 41316 - DNA, 440 bp, Zea mays
  unsure (1)..(440): unsure at all n locations
agcttctaaagggagaacacgtgataggtctaactaatgttactttcgaaaaagatagaccttgtgcagcttgtcaagcagggaaacaggtgggaaactctcatcatgccaaaaatgtgatgacaacatcaagacccctggagttacttcatatggacctcttcggacccgtcgcctatctaagcataggaggaagtaagtatggtcttgttatagttgatgatatttcccgcttcacttgggtattctttttgcaggataaatctgaaacccaagggaccctcaagctcttcctaaggagagctcaaaacgagtntgagctcaaggtgaagaagataaggagcgacaatgggtccgagtncaagaatcttcaagtggaggagtaccttgaggaggaaggaatcaagcacgaattctccgctccctacacaacacaacaa

SEQ ID NO: 41317 - DNA, 460 bp, Zea mays
  unsure (1)..(460): unsure at all n locations
tctanagggagaacatatgttaggactaaccgatgtctgtttntgagaaagacagacattgtgcagcgtgctaggcaggaaagcaggtgggaactactcatcaaagcaataacgtgatgacgacatcaagaccactaggactcctccatatggatcccttcgggcccgttgcttatcttagcatcggggaagtatggtcttgtaattgttgatggtttttcccgcttcacttgtgtgttctttctgcaggataaatctgaaacccaaggtactttaaattacttcctaaggagagatcaaaacagaccaaataaacagaggagtggatgaggttacctctgcactggatagggagatgtcaccaatgacagtgagcagcanattcagagcaccggttccgtcgctgactcgccgtggagatggatggagagtcgacgcgcactggttcctcatggatcta

SEQ ID NO: 41318 - DNA, 298 bp, Zea mays
catcaatgatcaaacgacatgaacgctccctaatgacacacttttgtcgaacaacgatgtcgctgactctgctctgactttatccatttgtgcactaaacacaccctgtacaatgaggctatcaaaatgcgttgcatcatctgtaccaatatgtccttcgggggttgcttagtgcccgcatgatcagtcggcagcccagcaagtgtatctccatccgaatctctatcatatgaatacccaccatcgttttttaccaccaaaacacgccgattaggacaatcacgctgcacgtgttcat

SEQ ID NO: 41319 - DNA, 406 bp, Zea mays
tctccaccatgtcgctgctagccaagatggtgttgttttttctatctatgatcaaacgacatgaacgctacttaatgacacactttgattgaaacaatgtatgtcgctgattctgctctgccttctccatttgcgcactaatcacacgctgtacaatgaggctctcataatgctctgcatcatccgcaccaatctgttcttcaggtggttccttaatgcctgcatcatcagccgcaagcaaagcaagtgtagcttcatccaaatcactagcagaagaatacccaccatcgtcttttaccaccaaaacacgctgattaggacaatcacgctgcacgtgtccatagcccttgcatccataacacagaacatatctcgttctacccgtggaggctactgaagaggcact

SEQ ID NO: 41320 - DNA, 425 bp, Zea mays
atgccagcttggccaaaataactcaaataagacttcttattcttcttctcatgtggggacttaatgggaattctgaatttcagaattatgacattcagaccttgagccaaagatcagggatgttcaccttgatccctaactcgaatcctaatggccgcattaacaaaattgtgtctaactaacccctctgtcgtgtgccacaagatggcattgggacgcgagccctagacacaacaaaaccctggatttgcctccggttcgagcaggcagacaaaccggatttcctggatccatatctttgcaaccagtaggcaaaatcctatgacccccacacaagatctgtagctttgatggaggagaataggatttgtgcactgaccacagtgagagcatgcttcgatgagcgaccacacgcgccacaactt

SEQ ID NO: 41321 - DNA, 447 bp, Zea mays
  unsure (1)..(447): unsure at all n locations
nttatgatctgtataaatgtgacagatattacccagtatatttgacgccagatcttcagtgcatgaaccactgcagctagctccagatcatgagtgggataattctcctcatgtcggcgtaactaccttgaagcatacacaattactcggccttcttgcattaatacgcagccgagaccactgcctgatgcgtcacaatacacatcaaagggcttattaatgtccggttgagccaataccggagcagtggttaataatatcttcaagtgctcaaaagcttcattacgctttgaagaccaattgaatttagtctcattcttcaatagacttgtgattggcttcacaagcttagaaaaatccggtataaatcggcggtaatagacagctaatcccaggaaacttcggacttgatgaacagtggttgggggttccactccaaaatatcct

SEQ ID NO: 41322 - DNA, 365 bp, Zea mays
gggaaagattacaagtcccgctccaagaaagattgctaccagtgtggtaagcccggtcactttatagcaaaatgttctatttctagtgacagtgacaggggcgacgactagaatgggagagaaaaggaaaagaagaagtactacaaaaagaaaggcggcgatgcccatgtttgtcgtgagtggaactccgacgaaagctctagcgactcctcctccgacgaggacgccaccaacatcgtcgtcaccaagggacttctctttcccaacgtcggccacaagtgcctcatggccaaggacgacaagaagaagaatgttaaatcccaatcctccactagatatgagtcctctagtgatgaagaagatgc

SEQ ID NO: 41323 - DNA, 448 bp, Zea mays
tctaaggcaattggaaaagaagatagtgatgatgaatattatgaaagtgaaagtgatggagatatgactctatttgtaaagaaattcaacaaattcatgaagatggagagaggtcaacctataagaggccaaacatcaagaagaaatgctttcaatgatagaaaatgttttgagtgtggggaacccggtcacattgccatgaattgccctaacaagaaaaagaagggcaaagatggagatgataaaaagaagaagaaattctacaacaagaagaaggatgacaaagcctacctagttgaatgggattcggatgatagctcggatgatgatgatgacgacacctcatctaagcttaatacggaattgtcatcaaggaagctccttcacttttctcatcccctcattgtctcatggcaaagggagatgctacggtaaaatcatcacccga

SEQ ID NO: 41324 - DNA, 363 bp, Zea mays
ttccttacctaagctgccttgaatgcaacaaggtgcacctctagtgtggaagtggtgccttgctccaagttgaccatgtgtttgtcgtcttttgccataagttcaaagctcacaaacttgctaatcacctccccgagagacatctgcttatacctacgattatcacgaattgaactaattgcactcgagtgggggttatgaaaaacaaaatatcttacaataaccttgaccatttcatggacatcccacttggggcttctaacgctgcacacttaattcaccattgtctagacccgaatggacatggcgttgtgggtcttatactttgttgaagatgaaccgacccggttctccctcgatcat

SEQ ID NO: 41325 - DNA, 362 bp, Zea mays
  unsure (1)..(362): unsure at all n locations
tctagacatccttgatgcatgctagaggcctcattgtctttattgccttgatcttctctgggtttgcttcaatgccccggtgtgaaaccagtaaccccagcaacttccctgcagagacaccaaagacgcacttgtccgggttcagctttgtgcgggttgcgcgtagcctgttgaagaccaggtcaagtctttcactaaggtcgaccctctcttagtcttgaccatgatgtcatcaatgtacacctncaccctgtccctaatcaggttcccgaaagtcttactcatcgcccgtacaaatgttggcaaggcgtttctcagaccgtaaggcattacgacatatccagaaagcccattcactgtta

SEQ ID NO: 41326 - DNA, 421 bp, Zea mays
acaccgaaacgagttatgttcttcattggtgatactctcagatacacatgatctccaacttgaaagtacaaggggtggtgtcgttcgtctgcataactcttttgtcgagcttgtgcttctttcaaataatgtataattccgtgaactttttcttccatctctttcaccaaatcaggcctgaagaaccacctttcttctggctcagaccagtttaatggagtacgacatctttgtccatataaagcttcaaagggtgccaccttgatgctctcttgatagctgttggtgtatgaaaactccgccaatgggaaacattcatcccatctttgtgggaattccagaacacatgccccgaacatgtcttcaagatttggttcactctctcaccccgcccacctatttgaggatgatacgcccaact

SEQ ID NO: 41327 - DNA, 419 bp, Zea mays
  unsure (1)..(419): unsure at all n locations
tctagagtacacggcgcagcggccggatgctccactgtgtccaaagtgtccacggttctcaagttcaacggcggcggcgagtttctcccttgcggtgcgtggcgacgtaatgatggtggcgaggagttggggataaaaggggagagggacggatcaggatcgcggcgcattatatacttgtggatgcgcgaggtcgagcaacggatcccgagacccgcggaacgctccgccatggccgaactccgttcatgccgcacgacccggacggaggagggggaaaggaaactgactcatggaccctgngttgtcagagagagtgcgcagtaaagaagaggaggctgactcgcgggcccgcgcagcagagagcgcccgcgcgcgcggcgaagaggtaagtggatcgcgcggatacaanggaaatg

SEQ ID NO: 41328 - DNA, 402 bp, Zea mays
  unsure (1)..(402): unsure at all n locations
agcttatttatagcgacgcgcccgggcctcanttttctgtccgagcgccatgggcgaacccctcattttcagcccagacgcatagccgaacagccatgccgaccgtaagcttgcgcctccaggccgattaccctccgttccgacatgcacttcacccaagacatacatagtaccttcggtgtctttccacacgctaggacttagcttatttccggggccatgcccgaacctaggtattcgcccctgcgccatgggcgaacccctacttttcggcccaaactcaaggccgaacaggcatgccgccccggcggcatcctgcccttcacacaaggcatacgttgcagcttcggagactagcacacccttggacttggcttttgttttggtcgtgcacgaacccac

SEQ ID NO: 41329 - DNA, 346 bp, Zea mays
  unsure (1)..(346): unsure at all n locations
tagtgcaagcgtgtggaatggaaagacaactaagctaagtttgttgtatggcttgagcgaagggcacggtggaacggagggaaaacgggaggaggcgcacggcgactggcggcagggctgttcggccttgcgtctgggctgaacacgaggtgttcgccatggcgcacgggccgaaaaccgaggctcgggcaccaactcgaaaataagctaagttcaagcatgtggaaagacaccnaacatacannnnatgtctttggtgaatggcacagtggaacggagggataactacacggaggcacgcggcgacgggcggcatggctgttcagccttgcgtttgggctgaaaa

SEQ ID NO: 41330 - DNA, 431 bp, Zea mays
agcttctctcctttcgggccaccttcttctctctattatacaccttccggatgtcctccttgatgtcctcaagctcctgctcaagctcggcccgctccgaggcgaattggcaggacatcgctttagtgcgcctctccagttgggagcaccaatcgctggtgctcggtctcgagcgcctctcactcctgccggatagccacctcggtttcctaaagggcctgatgagcgcgagtcagcacctgaaggaggggggtcagcgtcactccaggttcgacgctagaccggagcgggcgcccaagaataacctccgaaccaaccgaagttggcggagggacagagctggacgcgcccccacgcctaccaccgaccgtatcgtcgttggtgggtctgcaacagccgttggcgacgctgccacttctggacccccagct

SEQ ID NO: 41331 - DNA, 444 bp, Zea mays
  unsure (1)..(444): unsure at all n locations
tatcccaacgactgcaaattccagnttctgcaattcatatgtaaatacttctcagcatataatattatgtagtacaacatacagtatttataccattattacctttctggcattatcattttgttcactgacaccactaacattcattattgcgtgatcatgcaaattaatctgtaattgacaacacattttgttaagctcaatcataacccaataactcaaacgtataaatcatgtatatgtataactgcaaatcagtaaagttgttaaagatattacctcttctaatggacgtactggtatatgtatttgatcattgaccacaccttgttcaagtataatagatacgtcttgaatttcctgaaaatttggatgaaagatcattatacatcctttacanataaacattaacaacagaacgattcaaccttattattcctttcg

SEQ ID NO: 41332 - DNA, 441 bp, Zea mays
  unsure (1)..(441): unsure at all n locations
agcttcttctcgttgtcgatgagcgacgccaacgcgagcgcctctgctagtgggggttgntcggggtttccaagtaagaaacacagattcattcttggcgttggtttacgaaaatgattcacaagtcagatccacagaaaaagtattatggagaataaatgtcatgcatgcaaaaaaggaatttaaatngaaaacatgattcaaataaaagaaattgcatgcaagctcttctttaaatactactcactccatccaaaaatataattcaacgatctcggtgatacttatctactactacgcattgtgcaagggtagtaggtgggtttgaagagagatgtagtagatgtttttcctatcatagatgaagacataaacacacatgtggtgtagtggtagctattactcacattcgcctgacgggtcacaggtttaaatcccctt

SEQ ID NO: 41333 - DNA, 454 bp, Zea mays
gtatcaaatggacgtgaaaagtgccttcctcaatggaccaatcaaagaatatgtctatgttgagcaacctcccggctttgaagacagtgagtatcctaaccatgtctataagctctctaaggcgctttatgggctcaagcaagccccaagagcatggtatgaatgccttagagatttccttattgctaatggcttcaaagtcggtaaagccgatcctactctattcactaaaactcttgaaaatgatttgtttgtatgccaaatttatgttgatgatatcatatttgggtctactaacgaatctacttgtgaggaatttagtaggatcatgacacaaaagttcgagatgtctatgatgggggagttgaagtatttcttacgatttcaagtaaagcaactccaagagggcaccttcatcagccaaacaaagtacactcaagacattctaaccaag

SEQ ID NO: 41334 - DNA, 248 bp, Zea mays
acgagctgcactggcccaaaaaccaaagagacattgttattaagccaacagacatcccgtatatttctggccccacgcccatacatttttagagcacaggaaaaggcaacaccaccgaataaaaaagctctacaaactgccgatcaaatgagcattgagcactgacactctaccccttggcactggccatcttgcagaaaccgattctgcctaaatgaaagaacggctaaaaccgggggcaaacaatc

SEQ ID NO: 41335 - DNA, 463 bp, Zea mays
agaaactcaagcttctacagggagagcacattttaggattaacaaatgttcatttcgagatttacaggatttgtagcgcatgccaggcacggaagcaagttggagtccatcatccacacaagaacatcatgacgaccgacaggccgcttgagctactccacatggatcttttcggcccgattgcttacataagcatcggcgggagtaagtattgtcttgtaatagtggatgattattctcgcttcacttgggtattctttttacaggaaaaatctcaaacccaagagactttaaaggggttcttgagacgggctcaaaatgagttcggcttaaggatcaagaaaataagaagcgacaacgggacggagttcaagaactctcaaattgaaagattccttgaggaggagggcatcaagcatgagatctcttctctctacacgccacaacaaaatggtgtagtgga

SEQ ID NO: 41336 - DNA, 389 bp, Zea mays
  unsure (1)..(389): unsure at all n locations
tccctttcctatccttgaacaatgtgtgtcttttgacataccaacttcaattacccgaaaccttgtctgcagtacataatgcgatccacgtgtctcaattgaagaagtgtcttcgggttcccgatcgaaccattgaagtaacggatgttgctctagaaccagacttgacatattcagagcatccaattcgagtcttggatcaaaagtacatgattacccgaagaaaaactctcaagttntacaagatacagtggaaccaacatacagaagatgaggccacttgggaagctcaacactttntagaaaagaatttcccacgctttttagcctcatgtaatttgaaaagatgcatatntgttgttataagacgagtgaaccccacaccaccc

SEQ ID NO: 41337 - DNA, 399 bp, Zea mays
tttgaagggttttctgtaaagaatatcccaaggtgagaaaaagaacgtgcagacttattagcaaaatcagcggcccaggggctcccattacctttggaagtattttttgaaacaataaaggcaccctcggtcgagctcatggaaagagcggtgctcacaatttcactagtacatagcgaagattggagcactgaaattgtatctttcctccaaggcaactgtctttcagatgatgatgtttataaataaagaatggaagcaagagtaaggccctatgtaattatagaaggggatttatacaagcatggagtctgctccccattgctcaagtgcttgtctagagccgaaggtcaagaattgatgaacgacatacatgatggatcaagtgcggctcatatt

SEQ ID NO: 41338 - DNA, 382 bp, Zea mays
cctggagcgatcagcggtagtcctcgcattctctgacgaatgaacacgcggaatacgtgggatacagaaatcgtctttgaaggcctaacagatgtaggtgttacctctggtgcttgtgtctaagctggtgatctctttcttatgattagaatgaggttgatgagaagatggaacaactattgattcaatccatgagaaccaatgtgaggcatgaaatgtcgcatcatgctgagcctatattattattcttgacgaagctcatgagcgaaagctggagagtatggaatgggtcacagctagatttggaatgcctacagaatgtaaaccgagtaccttcccagaccaaagacacacggacacaccgaatacgtaccaggccatc

SEQ ID NO: 41339 - DNA, 435 bp, Zea mays
agcttcgatcgtcgccctttcgtcagtctctatctttcatcagccgtttacatatctcatcttgtattttatactttattatatgagcagcgcactttatgtctctactgctctacatcactatatgtcaacatattttatctaacattttaatatatgtctaagcatatttaaaaaaaatacaatataaacataagatacataaagcatgaatgcaacaaagattatgttgaatgcactcgtgctacgttcatgtcgtgcttttgttgtgaaaagttgtcaaaatgcatttactcattgattcaactgtttaaaaaatggtttctagttacttgaatattctcttcattttttctagagctaaaacccaattctgaaagcttcaagagattattctcataagctcagaatatttttatttgaattcttatgtcc

SEQ ID NO: 41340 - DNA, 388 bp, Zea mays
tctccgtcgacgagactgtcagcgccacccacggaccgtctcccttctctttggctttaatatctggttctcgtccctcgagtggggacgcgaacgagagccttccagcggtagcgtccgccctgcgaccatcgctgctgctgcagaggtcgccggtgagtcacccggagtttgtcgtcccgcaggccctccgatgtggaggttgttcatacccgcgggagtggaactatggttccgtttgtaatggcatcttgagtgccgttgtctgttcattgtggctgtcggggcctgaacatctaggtattttgagcgcaataccgtgtttcttcctcatttcgagcaccaggactcgcctatcggctagctggaccgcttaaccaagtgtgag

SEQ ID NO: 41341 - DNA, 355 bp, Zea mays
  unsure (1)..(355): unsure at all n locations
catgcagccacagcacaccaaggagaagtgtttttctccggcggnccgaaccactctagacccttacgtgtcactgaggtcatccatcatctaccaacaggctaaacgcttaagcccactcctaatctgaggatatagggagggtgcacaccaccacacggccggagaaatccctttccgacatttagccacgccagcgaacgggggccacggctgtaaggctgtccaacttgtgtttacagcgtcgacgcgcataatccacatcggcgaacaccatgatttcttgcccgaagactacatggtggaggaagaagctgcttcgtccactcccacgagctactaacctcccagcgcc

SEQ ID NO: 41342 - DNA, 429 bp, Zea mays
  unsure (1)..(429): unsure at all n locations
taaagacatgtngatcaccagtttccaagggtttcagactatgccggtcactgctcaggccttattccagtgcacacaagaccatgaggagtaccttcaggcgtacgtccgaaggttcctgcgtctgagagcacaagcgacaacagtgcccaatgaaattgtcattaaggccatgatcaaagggctttggccaggacctgcggctcagtacttttctaggaaacctccacaaaccctggagaagcttcttcagaagatggatgaatacatctgggctaataatgattctcgccagagaagggaagaagcctacaggtttctgagatgaccacgggcttcggnggaagaatccaccccaggcatgttagatcaatccataattntggcctacgtgatgacagaggaagccagcctcataggccacaacat

SEQ ID NO: 41343 - DNA, 388 bp, Zea mays
gcatgcaagcttgtgaagatcttcattcccacatgtgcttatcttttatgccacagccagcccatgctagtcttagctattaagcacgcatctagaccgcgcctttcttttgccaaatcaactaaataaaggttggcggctaatacacccttaaaagctagtgaaccattacttcttctacagacagatacatctacatttgtaaatagacagatatatcccatatgacataattgactaacagatagcgaattatatccaagactctctacctaaaatacattagagatagaatgctcattagaaattgcaattttacctaacgctttgaccttgccttgattcccatcaccgaatataattgagtcctgggaatccttattcttga

SEQ ID NO: 41344 - DNA, 443 bp, Zea mays
tggcagcttgctagctctcttgttgagggagtaaccaatgatcgtgctgggcagctacgtacctcgacggataagtgagtggcatgagctccatcgccgtcacggatagatatataaacacataataatcataaagacaaatggaactgttctacttttactagcttattttcctcgcaaaagatttatgcttatctgatgggtaaccagtggacacatcccattttctcttggttgtggaaatccaaatgtcaacccaagtacaaagtgttcttttgggtactactgaaagacagactaaataccagagcttttctaaagcagcgcgccatgtttttggactcttattcatgtgacaactgtattcttcaagttgaagagacgtccattcaccttttttcagatgcacatttgctaacagatgttggtccttgattggaatc

SEQ ID NO: 41345 - DNA, 381 bp, Zea mays
  unsure (1)..(381): unsure at all n locations
ttaatcgaaaacatgcgatagcgaaaaaggaggccgacgagaattatttgatatatgactgagccttctattttgggttgaaatgaaagtcattctaagatcgatgtatgtctcatctgacgcacagtactgcctacattctgtcactgtttgtcctatatcacaatangtacacgaactatggaagcgatgccttgaacaaggcgatgtgaaatgaccaaacatgactctgttaaatattatgatgcgacattttcatttccaatttttaattaagagggatatatggatggcagtgggtgatgtacccattgggcacactatgccatacccatacccactaagaagaaaatgacccatacccatacccactacccgtca

SEQ ID NO: 41346 - DNA, 436 bp, Zea mays
  unsure (1)..(436): unsure at all n locations
tagcacaagacatttctagaatcaagaatattgagctcattcctaagtctggtaaaagactgttcatcaagtggcttggtaaagatatcggctaattgatctttagtattaatgtaagaaatctcgatatcccccttttgttggtgatccctaagaaaatgataccgaatggctatgtgcttagtgcggctatgctcgacgggattgtcggccattttgattgcactctcattatcacatatcaaaaggactttggttaatttgtaaccgtagtcccgcagggtttgcctcatccaaagcaattgcgcgcaacaatgtcctgcggcaatgtactcggcttcngcggtggaaagagcgactcgaatttgcttctttgaagcccaagacaccaaggatctttccaagaactggcaagttcccgatgtgctcttcctat

SEQ ID NO: 41347 - DNA, 353 bp, Zea mays
cactgtctaatctggcaaattcagattgggcttctgccaatgaacactctcatgtttgaagaaccaaatctttcttgttaataacattctcatgatctttgaacttactctccacaccttcaataataacttcatttttcttatctctcacgccatgttgcatcctcaacgctttacttagtagcatactctgtgcacaataacctctatcagccatcaccttcttcgtgaaaccatgaaaagctgagggaataattctaccttgaaattgaataaataagctgccgaccatatgctttcgtccgaagcactgatgcatcctctatcttcggaaaccaacactattcgataga

SEQ ID NO: 41348 - DNA, 312 bp, Zea mays
  unsure (1)..(312): unsure at all n locations
atctagaactacactagctctagtgagttcttatccacaaacacaatcaacaaggcgcgactctcctgcactaactcctcactcccatgctccagttcccacacctatacgaccagcatcaacaacttcggtaagcaacaagcacggcacactaaaggtccctagncaaccatccatgaacgacgaccaccagcatggaacatatagcactatcatcatccgcggcaaggagaacaaggtgctccgcctatgcaaggcaccctatggactaaggtcggcaccacacccccggaagaccaagatggatctcac

SEQ ID NO: 41349 - DNA, 436 bp, Zea mays
  unsure (1)..(436): unsure at all n locations
agcttggaaatggaaactaggtgttcactacattcattaatgtcaaaatctttacacctagtacaaatttcaacatgttctacacaagaattggatttatttgctacttctaatttagcatttaaatcattgttgacacctttcaaagtagaaatggtttcatgacaagtagatagttcaaaagaaagcatttcatttcttttaacttctaaagcatatgatttttgtgcctcaacaaatttatcatgctcttcatacaacaaatcctcttgcttttctaaaagtatattcttttcattcaaggcatcaattaattcattaattntgtctatcttagatctatctaagccctcgaacaaacatgaataatctacttcatcctcatcactagattcgtcctcacttgaagaagcatatgtagaagtgcgagtacata

SEQ ID NO: 41350 - DNA, 451 bp, Zea mays
  unsure (1)..(451): unsure at all n locations
tgtctgtcggaatcaaacgaagctccagtttgaaacctgcttcgtcaganaaaaaacttcggaagaagaaagtgttaaatttccacatattcataattaaatggccagagtgcgttctaccgccagggttgagcgtgagggaagcgaaactgaagcttcgaagactgttcccatctccgaagccatgcaacgatccgggctggtgatttctgaagagatccctattgaagatgcanaacaagcaaaacaagcaattgccggagtagaagaagaagttattgaggaaactgatcctgaagacgattatcgtattgccatgccaagcaagcctagccacttggactttggaaagtctaccgtttcgaaggctgatctctccaagatggtaaagtcaggctttttcaatgaggatcacaagaagctattacgcttcggnggagaagagactacc

SEQ ID NO: 41351 - DNA, 436 bp, Zea mays
  unsure (1)..(436): unsure at all n locations
agctttcttcggcggcatgatgaaagtgatgcttttctaatgngntcaaaactcaaaanatggaagtgagttcaccggaggtgggcgccaatgtttgggacttgttctcaaaagcttatagttaagaacaaggcaacataaaaagggttaaacattaaattccttcattccgcagagcattatctcccttcggatataatgatttttggacgaaggttatgaaggacatactttcataggcacaataagtgatgaagaaagatttatatacagaatatggaanaatggcataatcagtttaaacattattatcaatttatttctatttatagcattcgtacaaatgatgacaaattacacatgtaccttctgtttaaagcaaagcaagggtacacgcgtgatgcgagggcaattgctcagtcagcgtgaacagtac

SEQ ID NO: 41352 - DNA, 445 bp, Zea mays
  unsure (1)..(445): unsure at all n locations
tgactgctagcanccatagtttntggtctctttgcctgtttctgtgtttgtctcgcttttatggtcggacacttcccttctgcatttttgttcccatgactaaaatttatccataggctgatgtttcattttagaaagctttcacggttaaatactctaatcatgttatatacttgtgtggatgtccctgaagcagcattttttccccagatgttaaccttagaaatcttgctcgtttgcaggcaaatagatgaatacacgcatctcatcgcaagcataaaagcacagatcaagttggtacgtacaatgcatattataattgtctaggtgttccattatgtccgaaattatataatctactactaccttccaagttataaagacgttttggttggttcagatacattgcttttacttcgtatttagacagtgtatattcaagtgc

SEQ ID NO: 41353 - DNA, 415 bp, Zea mays
  unsure (1)..(415): unsure at all n locations
agcttgcttagattattgggaacaaatcttgattttgtggaaaagatatcccacgcttggctgaaataantggtgatgaggacaaagcttaaaaaattgttgaagcagcaaaagcttcaatgggtaatgggatatgatgcacttactttaatttgactatcatgaatgtagtaaatggtcctatgctttcgttttacttgcctggtatcaagccaggatctgtcaccagttgatttgatcaatgtccaccaatttgcccaaagggatatgaatctctctgagtatcgcaaaaacctttatgaatatctcgtgactaatatgaatgaaattgcgcccaacctgacatcattgattggtgaaatatttggagcttcgctaatctctcatgctggcagtctttcaaaccttgccaagt

SEQ ID NO: 41354 - DNA, 439 bp, Zea mays
  unsure (1)..(439): unsure at all n locations
tgaacacatggttaggtcttttggggtcctcanagccgttatgttgttcaacatacactaattcactaatcttaccatttaggaaggcactctttacatccatttggtagagcttgatattgtgtgcacaagcataagcaagtagaattcggattgcttctaatcttgctacgggagcaaatgtctccccaaaatccaatccctcaatttgagtatatccttgtgcaactaatcttgccttgtttcttactaccacaccatcttcattgtgcttattgcgaaacacccattttgtaccaataacattgtggttctttggtctctcaacaagctcccaaacttcatttcgagcgaagttatttaattcttcatgcattgcattcaccacatcaacatcaagtagagcttcatctacacggttaggttccatacaacatac

SEQ ID NO: 41355 - DNA, 402 bp, Zea mays
  unsure (1)..(402): unsure at all n locations
agcttgtgaaggttcttcatccgcacatgtgctaagcggcgatgccacagccagcccatgctagtcttatctattaagcatgcatctagaccggcctcttcttttgcaaaatcaactaaataaagtttgccgtctaatacacccttaaatgctagtgaaccatcacttcttctaaagacagacacatctacatttgtaaatagacagttatatcccatatgacataattgactaacagatagcatattatatccgagactctccactaaaaatacattagagatagaacgctcattagaaattgcaattntacctaacccttttaccttgccttgattcccatcaccgaatataattgaatcttgcgaatccttattcttgacgtaggaagtgaacatcttc

SEQ ID NO: 41356 - DNA, 446 bp, Zea mays
  unsure (1)..(446): unsure at all n locations
tatagatcaatgataggatctctactgtatttatgtgcatctaggccttatatcatgcttagtgtgtgcatgtgtgcctgttttcaagctaacccgaaagagtgtcacctagtggccgttaagagaattttgagatatttagttcacacccaaaatctaggtcactggtatcctaagggctcctttttcgatttatttggctactctaattcagactatgccggttgcaaagtagatcgaaaaagcacctcggggacttgccaatttcttggcggtccctggtgtcttggagctctaagaagcaaaattgtgttgcactttccactgccgaggccgaatacatagctgctggtgcttgttgtgctcagttgctatggatgaagcaaaccttgagagattntggctgtgattttaaaagaatcccactactatgtgacaatgagagc

SEQ ID NO: 41357 - DNA, 412 bp, Zea mays
  unsure (1)..(412): unsure at all n locations
cctgcagcatgcnagcttacaacataattgntccttcttcacaacctctgattgatattatgaggaaccgagaagctattggaaggattggaaaatgggctgcacagctcaacgaattttgtattgaatattgtcatagatcttcgattcaatcacaggcgtttactgacttcattgctgactggacgccatgggctcatgaggaaaaaacaaataaagacgccgaagcatggacagtgttttgagactggtcttggggaactttcggagcgggagcggctgctgtgtaggcttcaccttccaatagttaaaacttgctatgcggcaaaacttgattctaattgcacaaataacattgccgagtaccaagccctgcttttgggtcttctgaaactataagcaatgggaatca

SEQ ID NO: 41358 - DNA, 449 bp, Zea mays
  unsure (1)..(449): unsure at all n locations
cctctacgccttattcatgcagtcatgctagaagaatgccacattntgttctggaatgaatatgaatattcgatattgcttttagtgttcctgcagttctgctacaaagtactatttctttcctggcctcagaatgatacatacgttttatcaagttcattcaacttgattggaatttgaatttacaggacgatgtgttcctgataagcaccaacgcgatgtgctacaattcaccagatacaatatactatcgacaggtcaaacattaagcctacatgctatgatctttgaatatagctatgaattatgatgtacttaacatccgtattccatgcataacaggcacgaggtattcaagagatcgctaaaaaggattttgagaatcttatgcaagatagtgatgccagtgatccagaaccggaaccagaattggagctggagccagaacc

SEQ ID NO: 41359 - DNA, 331 bp, Zea mays
  unsure (1)..(331): unsure at all n locations
ctaatcgaccccaaacatacaggatacacgttctacctgagcacaccccctactccggtgaagctntcctgacaccagcaatcaatgcacgcaccccattacgcacgaagcagccttcaagccccatacaaatctttagaaggaggggctctcattgaacctgaactaccacctcaagacgactgtaagaatcgccctgaccaagaccacgacaacccgcgaaacaccatataacgaaagctcacgaaanagcgactattacccaagagcatgcaagccaaccataaaaaaccacataaccacgatcctcctgaaacatactataacaacc

SEQ ID NO: 41360 - DNA, 436 bp, Zea mays
gcttgccttcgcctcagtctaccatccgcagttcaacggggtcgtggaacgcgccaatgggaaaatcttcacatctgtcaagaagatgcttcttgatgaaaaaagggcagatggacccatttgttacctgaggcagtctgggcactaaacacaactgagtgcagggcgactgggtttactccctttcgccttctatacggatcggaggccatgaccccgcaagaaataaaacatgggtccccgtgaacagttccgtcagccgtccccgacgtggacgagccaacttcaaaggatctcattgacggagactgagtcttcgccctacaggccctaaacaaataccaagcccagaccaaagcatggcacgaccacacagtcatcccgagggagttcagcgaaggggacctcgtactcgtccgaacagctcggacggagt

SEQ ID NO: 41361 - DNA, 448 bp, Zea mays
tgctcagccctagaagaagaggtggtaaaagggagacaggaatggcggccaagttgacatgcatggcaaaggccctcaaaatgtcccctattacaagaagagtctaaagtgctggaaagcttggtcatgacgccaggtcctgggtggccaagacgacgatgccaagtggtggaggtggtggtggagaccatgacgggaggtggagacgcgccggtggacgacggccgaagcgtgtagaggggaccgacgctgtcacatcgggcgaaaggggtcctggtggctatatccttcacagaaaaccggtagggtgtcaaactcaatggaacaagaattgtcggtggtgaaccgagggacagaaaggagattgtgagtgatgtgaggggctaccagaacgtcgttgaggtataacggtccatggagtaccgaggcacctacagatgtgaccgga

SEQ ID NO: 41362 - DNA, 377 bp, Zea mays
  unsure (1)..(377): unsure at all n locations
agcttcngcattgcaaaccgacttaaagatagaatgactttttatttcataaaagtctgagccaatgtggaaagttttcataaggggcatacttgtaattcctcacaggctgcgtcctgtgcctattaataggtgaacagtacccccgtactgttcacgcggacttggcatttgcttatgcgccacacttgtattttattctttttcgagccgaagctcatagcatttgagaacaagttcacaacattggcgcccacctccggcgaactcactttcactttgtgagctgatggctttcgtcaacgaccaagctggatctgcttctgaccccaaactggagctaccgatcacaggtggctcgtccttagagcccgcta

SEQ ID NO: 41363 - DNA, 467 bp, Zea mays
  unsure (1)..(467): unsure at all n locations
ctcaagcttgtctggattgtaaggtgatacctgcagagagtgtcgagccccatctttatcttgtggtggctgacttccatttttggatcagtacccatagggttaaacaagccaaaattacaaggacgaagtggtagaaactcaaaggggagacatccgaagtttttatggaaagggtttttgtggagggagcttggtacgaagaagaagatgcaaacaacatgtgggtgaagatggcaacttatattatgaaggtggtgtcagaggtgtttggagtgaccaaagggagcggcggtgaatctaacgacacttgatggtggaccgacgatgttcaaaaggcaataaaggagaagaaagaatgttataggagcttgttccatgacaggagcgtagtcaacatagagaggtataaggtggtcaagaagactacaaagcacgctatgagtgaagcanagggtcaagcctat

SEQ ID NO: 41364 - DNA, 423 bp, Zea mays
ccgcagctgcaactaagaactatcacaaagtatatgttttgatagacgccaagtacgaaacctctctcctcagcagttaaacaacctatccttagtgggatgtaccatcagatagcctaaacaccttgcatagaaaatgtaccatagcgcatataacctcgacataaactatatgtgtgcactaattgaagggaagtagtctatccctttccggtctcaataatgatgattcatttgccatccacatataaggaccatcatttgtgaaaccctcccttgtgattctaatgctctcttttctaagtgaccaataacgcccttccaagtgcctctccgatggactcaaaacctacaaacataagagccttggctctttcaatcatcgaggtacaacgacactcatatcacgtatgatcgaatcaa

SEQ ID NO: 41365 - DNA, 429 bp, Zea mays
ctccgcttagaattataaccgacttaaagatagaatgaccttctatttcataagagtttgagtcggtgttgtgaacttttatgaggggtatgacttgaattgctcacaggctgtgtcctgtgcctataaatagtgaacagtattcctttactgttcacgcattcttgtaattgcaatcacatcactcggaaattattccttgccaaggcacaggtataaatgtacctaaacattatatttgaatatcttaagtttatataatgtgtaaatgatgttatttacttctaatttacttgtctctaatgctttatgactcgtgttattttacattatctctgagagttcaactacgaagatataaccttcgtaattgtgtcattataaccttcgttcgaagctcattaaatcccttgtggaaataatgtttca

SEQ ID NO: 41366 - DNA, 427 bp, Zea mays
agcttctggaaaccgacactctctcatagagtgttgattatctttgccccggcgcggactcgaatgcattctaaggccccttcgtctattccaccaaagagcataactcctggctggtagccacaggatatcccatattcctgtagctccttctcagcctcagacaattcttgacccaccaagttccgaaggtcaaagtcctttccttctgtagcagcattagcaatctttttccctttgtcaggcgctgcggccatgaccttttctgcagctgcagctgtctcttctgtagccatatccaaaagaagtttatcaatcccagacagagtactctcaagattgacagcttcgacgccagctacagcttcggcagaggtatcagctttggcagtagcctccacacttgcgataggtgctcatttggatg

SEQ ID NO: 41367 - DNA, 448 bp, Zea mays
  unsure (1)..(448): unsure at all n locations
tcgtcgtctganagaaaattaccctgaaggaaagagatgatcttatttctccaatcttcgctataaacaggggatatgttaaggattgctctttcaagaagctcgaccgaaggtgcttttattgtttcgaaaaatacttccgaaggtataggcagcccctgngctgctgacttggccaatagatcagcatattcattttctccacgaggaatatttttgacagagaaaccttcgaaggaagcctcaatccttcggagtgtatctagatatttttcaagctttgggtctcttgctttatagctcttgtcaacatgaccagaaataacttgagaatcagttttaagaatggcccttctgattcccattgcctttagcttccgaagacccaagagcagagcttcatactcagcgatattatttgtgcaactaaaatcatgtcttgccgcat

SEQ ID NO: 41368 - DNA, 396 bp, Zea mays
caagtgttgttgtgcaagagctaaattgaagcagcaagagccgatggcaaaatagcgtgcccaatgagcctcgggtgtgctcttatatatacgcccggcatgttgaacacacgagggccccgcttgtcattgactgtttctattctagcaaagggaaggtgtttcttcggaccttcggcttaaggcctccgctcgtattgaatccgaatttatcattctaacacaataatattgccaggggctactgatgggggtcttcggcttccgaacggcctcataaacatgatataacaatgtttctggagtataatacatgagcacgtaccttctgatttggatccttcggacttgggccaaaccacagtgcgaagatcacaatggatactaatgatggag

SEQ ID NO: 41369 - DNA, 375 bp, Zea mays
tacataagttgcaagtaatgaaccatatacatatatttatatattattttttatttggaccacaacacatatgcagagcatgtacattgcacattatcaatttccaaacttgtataggcttacacatgacaaatatctaaataagctatattataaataatagtaccattacaaaatatcatccacaacttcgatcaaattaaatttctcttcaagaaaaagacgaaacacatcttcgaatttgatttccagttgttcacattcaatcaaattaaatttctcttccaatcaaaatcgaactacatcacgcctctacttttcttctcgatgccatgtgcccaggatgaccctcctataaacgcgcacacatcttat

SEQ ID NO: 41370 - DNA, 353 bp, Zea mays
tggagagatggcgagagtagcgtgtacccttcgtggcaagaggctggacggtggtgtatttgtgctctcggctggcgtgaacctgatctggtcataagaaccccggtggcgagttgacatatgccagggttaagtgctacatatgtcgtgtgactggagatccctagctgggtatttatcgatccggatcgccgttacttctcggacatgaagactcggtcactgtcctacacgtagcaatccactgaacaagaagggtcgataataaattcgctagtataggtcaagtgcttgaactacggtagaaagaactctagaactcaggtaatgaaacctattaatcaaactggact

SEQ ID NO: 41371 - DNA, 456 bp, Zea mays
ggatctctaatcacctgcagcatgcaagcttctaagggagaacacggaatgtctttttatgttctttcgaaaaagtagaacttgtgcaacttgtcaagcacgtaaacaagtgggaggagcgcatcacagcaagaatgtgatgaccacatcaagacccctggagctgctacatatggaccttttcggacccgtcgcctatctaagcatatgaagaagtaagtatggtctagttattgttgatgacttttcccgcttcacttgggtgttctttttgcaagataagtctgatacccaagggaccctcaagcgcttcctaaggagagctcaaaatgagtttgagctcaaggtgaagaaaataatgagcgacaacgggttcgagttcaagaaccttcaagtggaggagtttcttgaggaggaaaggatcaaccacgatttcttcgtccctacacaccacaa

SEQ ID NO: 41372 - DNA, 329 bp, Zea mays
gcgaactataaatactaagctttaccggaaaacgtgtggtctaccctgttttttatactaagatgaacctcgcgccacgagctatgcgtgaacacgtgaggggtgagctcaacaccgcatggatgcgacgaccatgtcaagaccgccctagctgctgtatatggtcctttgacgaaccgtcgcctgtatgaacataagacgaacatagtatcgtctattaatagtagatgacatatcccactttacttactagttcgttttgcaagagagactggactctctatggaccctaaagcgctaactaaagagagataactgggaggcatgac

SEQ ID NO: 41373 - DNA, 396 bp, Zea mays
  unsure (1)..(396): unsure at all n locations
ntatcacccttgcatattgcccctaatttcctagcaactatcttcctatcctttctacaaatagcaaaggaagcgtttaaagtgtgataaattgtagaaggaccattcataactttcctagcagcatgaacaacattctttctaggcacatgatgaacataactcctagacatatcactatcatgcatataagaagaactagaagcaaacatagcataagaatcaaaggcatgtgcatcaaaggcattataagcattccaactcctatgagactgtcttctatcattgtacataaaagcatggttctttttagtactacttgccatangggccttccctttctccttcgtggagatggaagccttatggcttgntaagttcttgacttccctcttg

SEQ ID NO: 41374 - DNA, 427 bp, Zea mays
  unsure (1)..(427): unsure at all n locations
agcttatgaagattcttcatccctcatgagctattctgcggcgccagagccaacccatgttagtcttagcaattaagcaagtgtcgagttcagctctatcaaaatctaccaagtatagctgaccctctaacactcccttaaatgctattgaatcatcacttcttctaaagacagtgacaccaacatcagtgaatagacagttgtagcccatttgacacaattgagatacagaaagcaagttgtaatctaaagaatcaacaagaaaaacattggaaatggaatggtcaggagatatagcaattttacccaaacctttgaccaaaccttgatttccatccccgaatgtgatcgctctttggggatcttggcttttctcatatgaggagaacatncttttctcccctgtcatgttggttgtgcacccgct

SEQ ID NO: 41375 - DNA, 429 bp, Zea mays
tctaaagggagaacacattttatgattaacaaatgtttattttgagaaagacaggatctgtagcgcatgccaggcaggaaagcaagttggagctcatcatccacacaagaacataatgacgaccgacaggccactggagctcctacacatggatctattcggcccgatcgcttacataagcatcggcgggagtaagtactgtctagttattgtggatgattattctcgcttcacttgggtattctttttacaggaaaaatctcaaacccaagagaccttaaagggattcttgagacgggctcaaaatgagtttggcttaaggatcaagaaaataagaagcgacaacgggacggagttcaagaactcacatattgaaggcttccttgaggaggagggcatcaagcatgagttctcttcttcctacacacc

SEQ ID NO: 41376 - DNA, 441 bp, Zea mays
  unsure (1)..(441): unsure at all n locations
agcttcttaacggggaacacattttaggattaaccaatgagttttttgagagcacctagagggggggggtgaataggttatcctgtaaaacttgacaacttaaaccacaaaaacttgtttagtgctagcacaattatcgccgccntgctatagaggagtcaaaacacaatctgctcacgaaatccatcactgagatgacacggaggttatcccgtggttcggccaacgtcaaaacttgcgtacttcacgtagtggcgttccaacggacgatagtagcactcaactgctctcaagtgatccaatgatcaatttgaataccacggtgtgcgtgcttttctttcctcaattaccgttgcgaagaatcttcacatcttggagcctctcgcccttacaaaagatgctcacgagaatcacggagctagggacggatgagcttctcac

SEQ ID NO: 41377 - DNA, 425 bp, Zea mays
tcgatctgctcaggacatcgcggtaagctcggagcttttttttcatgttctaacaatccattaccttgtggcatttatttgactaacggtttcgcaaacggccacccagtccatcgacgagagcgtccacgttagcagcaacgcgaaggtaagagggagtgattcggccctccgcttttcttggcgtgttcgcggttcactgccagccagccagccagccagccctaacgcgccgtcgtcatcgttgtgcagcatgtcgcgcagaggaggccgtgcgtgtggaacggcatgaagcggccctgctacctgttcgcgcgcaagttctacccagaggcgctggacaacctgctgaacatattctcgaacttcaccatcatctgagcgagcggtggatcggggaggggtttccgtcctccctcttgagt

SEQ ID NO: 41378 - DNA, 437 bp, Zea mays
agcttatgtccacaggctgccatagcttttcagagagcattatggcttttacgggcaaggtattcttccttaatggctactgtttttggtttgcaaatacttaataaagcaaagtttcattttaaactttgattgcaagtaactaaactactgcattaaaaactcgaagatcgtatgcatacatttatcttgaaaaatggttttatgaaaaagcataactttgttagaatgttcatttttgttcctagaaaatattggtcaaaaactgcttgttccaaaacattagtatttgcaaacttgagggaatacttaatgtaagttatcgtgttataattcggttcccgtgcaacgcacgggcaccctactagttctctgtgaaggcagtaattgtaacaagcaacaggcagctaccctactctggttatctgtaatcaatc

SEQ ID NO: 41379 - DNA, 445 bp, Zea mays
  unsure (1)..(445): unsure at all n locations
nggattatacgataattgcccctcttgatctcaaaatcaaagtgcatgtctcctacaagtattcaaaacttgtatgcacacccttaggaggaggttactctataatctaagtatttgagactaacacatgttttcaagtctattatatgtgtagtagtctcattgaaggaaaatggagtcctcggagaaagacattaaactccactgcaaacttacaagtaatttcatgtttcgcaagtggtttcattccaccatcggtatcatttacatgtcttctccagattttgattagagtatatttcatatatttttcttcccatgttgccataaatgcatatgttgttaaaatatatcttttacctatgcataggggaagttagtatatttgtcggcgtttcgagacaggggggtccctaagcccacgagtgagtgtgttgcgtgccct

SEQ ID NO: 41380 - DNA, 404 bp, Zea mays
  unsure (1)..(404): unsure at all n locations
tgcangtatgctagcttgtggacccccacctaacacacgaaattgccatctcatatgtcaagcaggtcacaatgtgtgtcatgtatcttaattgcggaaatgagttcacctacccactgaagtgctgccccaaccagacattgtgaagaaccagacttgtcctaccatcgagtactcccgtcaaggtattatatccacaagagagatcatcttcggcatcgtcggtcagaatgtataatgtttagtggggtcaccattccgcacgagaaagctacatgggagactgaagaatttctatgctctcgctctcccgattttctacccaaaggagtcggtatgttaccacacccccacctgccctttgaactcaattataagataaacttagattacaaggatagtct

SEQ ID NO: 41381 - DNA, 266 bp, Zea mays
tctctggcaacccgtggacctccctgacctatttgattgaactacctcgccgtgaccaggccggtctcctcgccgccgacgagcatccccgcctgcgcgcgtggaccgaccgactccggccatctccgacggcgttccgcacaccgttgtgatccccgcaaccttcccttcgtgctcgaccacttcaccggaacagtctcactgccggtaagcccctccgcccttttcttcgccgcgactactgtttgaggtagaagaatgacctc

SEQ ID NO: 41382 - DNA, 430 bp, Zea mays
  unsure (1)..(430): unsure at all n locations
agcttaaacaaatttaaatctctaaggttctgcttttatttantttattaaataaataaaacatacatctacattagttcatattcaatcctaaacattagagtgcgcagtcagtaagtgaacctattttatttaaacagataataattctatgaacattttgcaatttgaatcactaagtttggagttcatatgcaaaagttatgaaataaacaagtttgggaattcaaaatatcaaattagggccaattctgtgaatatttaaaagtacagggctaaatctgcaaggttacaggggtatgcacgcgaaaaccagggacgacgggttgatttccaataaatcgagggtctctntaagaaaactaccgcgcgaaggggtatcagctgaatctaaccgtcagatctaaaaccaacggctaagattagatct

SEQ ID NO: 41383 - DNA, 333 bp, Zea mays
attaagcatttacacggagaacacgtgatatgtttaacttacgtgctattcgatataaaagaccttgtgtagcttgtcaagcaggtaaacaagtgggaggagcgcatcacagcaagaatgtgatgaccacttcaagacccctggagctgctgcatatggacctcttcggacctgtcgcctatctgagcataggagggagtaagtatggtctagttattgttgatgacttttcccgcttcacttgggtgttctttttgcaggataagtctgaaacccaaggaaccctcaagcgctttcttaagagagcataaaatgagtttgatctccgggaga

SEQ ID NO: 41384 - DNA, 157 bp, Zea mays
agcggcgagccagaccaagggaattttgttttcaacgcaagggcgggaacttccctgacaaggcccaaacaagtgcacacatttccttacgagacacatctctgcgaagcaaaaacaaaagacgcaagccgacctgaaaaaattctctaaacgcgcg

SEQ ID NO: 41385 - DNA, 449 bp, Zea mays
tgcctcaactatatcctatgtgccacgaaggatgctacttggtcttatatatatgctcccaaagcattcggctgtatgagagcgcgcaccgcggagcgtgccgaagactctgggttccgccttgctggagtggaaaagaggaggatgaatgacctatcaggtggggcccaattgccgtgggacaagcgtgtaacgccgaggagaaaactgctgacaagcgggttccacaaatcggtgagccatccggccgataccgtgatagctgagcgtggggacatgcgactggggagtggggcatgtcggccatttgtactggcgaggagcagcgcgcccaccacggagttggaccgtgcatgtgacgtataatagggtcggaactatagaattcggctcaaagcgccaggagttcatttctcttcttttattccttctcagagtccattttctat

SEQ ID NO: 41386 - DNA, 439 bp, Zea mays
  unsure (1)..(439): unsure at all n locations
agctttatcaaatggacgtaaagagtgcctttctttatggaccaatcaaagaagaggtctatgttgagcaacctcccggctttgaagatagtgagtaccctaaccatgtgtataaactctctaaggcgctttatgggctcaagcaagccccaagagcatggtatgaatgccttagagatttccttatcactaatggattcaaagtcggaaaagccgatcctacactctttaccaaaacacttgaaaatgatttgtttgtatgccaaatttatgttgatgatattatatttgggtctactaacgaatctacatgtgaagagtttagtatgatcatgacacaaaaattcgagatgtcaatgatgggggagttgaagtacttcttatgatttcaagtgaagcaactncaagagggcactttcattagtcaaacaaagtatac

SEQ ID NO: 41387 - DNA, 441 bp, Zea mays
cagcgatgatcattcacaacttggtgaaaatgttaaagttctaatgagtcttagtgccaaaaactttgtaaatttttcaatcgaagctcaactggcttatccagctgaactttctagttcagctggaggaggccagctgaacttcagagctgaacttcagctcagctgattttaaccaggaataaccaggaccttcctgtgcgaaaccggttgaaccggtattggggaccggttgaaccggtctggttctgaccggtcagcctgaccggttttttctgtctgcgcagccccttttacagaccgtgtcagcgccttttcagatgactttattatgctgcgtagcagcttttgcagtcgtcatgtcacttctgtgcagcgcttttttaactttttcttttggaatctgtagctctaattaatggcccgtcaggtcacttcatt

SEQ ID NO: 41388 - DNA, 433 bp, Zea mays
  unsure (1)..(433): unsure at all n locations
agcttactcctccctgagaggggccatttatcatcttctagattttgaagcccggaacatacaagctggacaacaatcaaggcgaggtctacaacaacgcttggaacatctgacagctacctcgcttttacccttaatatgttttcaagtcgttcatttacctcgttttctatacatacacaaataaagtctaaccgtcaaggaagggtcagccttgcctcggcaaagcccgaccctccctcggtggctagaaggggggaaccccctctgcgtaaaaattttcctcggaaaaagtctttctgccagaacatctttcgcgcttttcgactgcttcgatagcgggatcctgaanacgacggagtacaagtaagcggcaaggccgaccgagccgagggactcctacgcctncaggatacggatacctcactcatca

SEQ ID NO: 41389 - DNA, 152 bp, Zea mays
  unsure (1)..(152): unsure at all n locations
tctaactnttctaggaacatgaacaatattcttcctaggcacatgatgaatatttttcctaggcatatctctaccatgcatataggaagaactagaagcctacatagcataagagtcataggcatgtgaatcaaaagtattcaactcctatg

SEQ ID NO: 41390 - DNA, 250 bp, Zea mays
ttaaaccctcttgaaatccttaagggtaaatgcttgacatatttataacacgctctcataagagctctaactgttctgaacatcacactcttactatgacacactgcacttgacattctctatgatatagacatgaactcacttacctaaatatgcgcacttggcatttaagaccataaattcgtattcctctctcagcacataattaacgcgggaggacactatacctaattgtaattgtttaacgctt

SEQ ID NO: 41391 - DNA, 301 bp, Zea mays
aacatattatgaccaacacatgctcattttgataaacacaggacttatagcgcgtgtcgagcacggaagcaagtgcagcgcatcatccacacacgaacatcatgacgactgataggccgctggagctacttcacatggacctatcccgcccgaacgctcacataagcatcgacgggagtaagcactgccttgttattgtggatgatcattctcgctctacttggcgattcttttcgcaggaaaaactcaaacccaagagaccctctagagattcctgagaagggatcaaaatgagctccga

SEQ ID NO: 41392 - DNA, 394 bp, Zea mays
  unsure (1)..(394): unsure at all n locations
agctnttataaacggtaacagttagagaaagatattntttagataaccgaacaaaggtcccaacctctacattgatttagaaggtatttggctcgccgaaatgtaacgtaaatagattacatgtggtaatggatattaatacttttgtttggttgagctctttctagtaatactaggtactactatccaattcaattgtaactagtaactattaccgtcggtaagagatcctattatcattctcttaacaacgtctgaaccaaacagatgtagacaaccgaaccgattacaacaactataaacaaatttcgaaagaattttatcatcgaaacgaagaaaggctaagcttcaattgtattcgaaaaccgaacggacatcgcgcgtgctaatcgca

SEQ ID NO: 41393 - DNA, 334 bp, Zea mays
  unsure (1)..(334): unsure at all n locations
tgccttcgcctcagtctattacccacagtccaactgtattgtgaacgcgccaatgaaaaaatcttacaggtgcaaaaagatgctcctcgacgaanaagggcaggtgggcccgattgttacccgaggcggtctgggcgctaaacacgactgagtgcagggcgaccgggttcactcctttccgccttctatatggatcggaggccatgaccccacaagaaataaaacatgggtcccctcgaacagttccgtcagccgtccccgacgtggatgagcccacttcgaaggatctcatcgatggagaccgagtcttcgtcctacatgctctaaataaata

SEQ ID NO: 41394 - DNA, 433 bp, Zea mays
  unsure (1)..(433): unsure at all n locations
agtcttgatgagttgactaaagaacatgttgattttaagtgctctcatgatgatttagttcgaacgtatgaatctgttactattgagcaagataactctctattttgtatcgctcaattagcaaataggaatgccttgcttaaggaccaagtagaaaagctaaaagttgaaaatctagcttttcaagaaaaacatgatatgcttctatgttctcataaaaatcttatggatgatcatatcatgttatacattgctcatgaggttgtgatataaaacttaaaatctcaacaacctcattcatgcacatgtattcaaatngaaactatattaccatgtgctaatgcttgttgttcgtcgacaagcaaaccctcctttgagctaaaatttccaggaacaaaagatgatacatgtcaagagctcaatgaagaaaatg

SEQ ID NO: 41395 - DNA, 454 bp, Zea mays
  unsure (1)..(454): unsure at all n locations
atagaaanntaccccccatcncttcaagtctcgaattaagacaagtgatctttagtgattagtgacttgagagagtgagaattgtgtttcatttgttgctcttgttgcttggttatgctttcttcatctccttctaaactcttaagtgatttgtaaagctagcaatagacacctaagtgtgtggtgatccttgcgggatctttgtgacccttgagattaagaagaagcattcaatcggtctgggtgactgattgagagagggaaagggttgaaaaagacccggcccttttttgccttctcaacggagagtacgttcattagaaccaaacctcggaaaataaatcagtgtgttcatttgtgttgatctttactctacgacttggntctttctctcccctctctcttaaagtctcttgctcacaaccctttgagttagctcccacagttatctgtg

SEQ ID NO: 41396 - DNA, 439 bp, Zea mays
cacctgcggcatgcaagcttgtgtgtctcaagggaccttttctttatcttatggaggacttcactaacgtagtaaactggcttctggatggttcggacccttgaggttggtcccgagtctgcaaactcctggcctttcgtcaacgtcgtgggggttggaccaccaccttcctgggggtgttgtgtcgtcctttcagcgaccagcaccatgctcaccgcctctgaagccgctgcaatgtataagtacaacgactcctctggctctagagctaccagtattggtagggacacaaggtgctgcttaacctcttgaaaggctcgttctgcctcttccgtccaagagaatggaccagactttcgcaatagccttgagaacgacagtgccctcttagccagtcttgagatgaagcggctaagggcggctagtgaccccgtaagct

SEQ ID NO: 41397 - DNA, 433 bp, Zea mays
  unsure (1)..(433): unsure at all n locations
tcaggacaagatagtgcttggcactcatgatgagttatcaatcagatgctnttttctgattctattcaatcgacttctttttccatctgcttcatggggcattacaaacaatgaggtactaatgacttcaaacatggcccgaatggctgatattgactggtgtcaactagtttacacggatttgtctgatgctgccacacgttggcacaaaaggaacaaaacaaacattacaacaacaatatatggatgttcactcatagttctagtaagtaattattttgttcactgtgcatatatatgatatgcaaatatttgttttgtactaagtttatattttttcattcttttttttcagatntactatcttgatcacttacatcaccctgcatctnctgataacaaatatggtacntcccgcattacgttttttgat

SEQ ID NO: 41398 - DNA, 415 bp, Zea mays
  unsure (1)..(415): unsure at all n locations
agcttcacgggctactggcggagctagccgaatttctggcttggctngagggtggctggactgggctggccacggtggccgaagctctggcggcaatggcgggcggaattaagctcgccggagctaaggaaaggtggctggccggtgagggtgagtgcggngcgaaaagaggtgcgcccggggaggctttatatgcgcgggcgggcacggccgatggcgtgggcgcgcggcggacttgaccggacgccggggtgagcgcgcgcgcgggttgggcgagctctggcgtgccgaccagggtcgaacacgtgtgcccgtgcgttctgcccaagttctggcgcgtgtggtcgctcatccgagcctgctctcgccttggtcagtgcacaaaacctcttctcctccctacaagctaccattc

SEQ ID NO: 41399 - DNA, 464 bp, Zea mays
  unsure (1)..(464): unsure at all n locations
ctaagcttgaagtgggtgatttagtgtggttgcacttgaganaagatagatttccagagttaagaaagtctaaattgatgccacgtggtgctggtccatataagattttggagaaaataaatgataatgcatataaacttgagttgcctcccgagtcgaggacgagcttgagtcgaggacgactccacttcaagagggggaggatgatgaggacatcacttctatacatacaataaatggaccgataacacgatcgcgtgcacgacagctaattctccaggtacgttctaccctagtcaattgtgtttcagagcttacgcttagggccatggatgttttaatgattaggaaccttggagaggaccagcaaggacttgggaaaggcctagttgttgaggaggaggagcaagggcacccacaacaggaaggagatcaagtccgactcggctgcgaactcatctcgg

SEQ ID NO: 41400 - DNA, 461 bp, Zea mays
tagaaaaatctggtatgaatctgcgataatacccagctagtccaagataacttcggacttggtgaacagttgttgggggtttccactccagaatatctttgaccttgctaggatctaccgcaattcctttagctgataacacgtgccccaaaaattgaatttcttccagccagaacgcgcacttactgaacttggcatatagctgatgttcccttaggcgcgtcaatacaatccgtaaatgctgagcatggtcttcttcattcttagaatatatcaagatatcgtcgatgaagactaccacgaatttgtccaactcgggcatgaacaccgagttcattaaataagtgaagtgggcaggagcatttgtgagcccgaaagacattaccaggtattcaaataatccataccgcgtagtaaacgcgatcttcggtatatcctcgggccgaatacgggattgatga

SEQ ID NO: 41401 - DNA, 431 bp, Zea mays
  unsure (1)..(431): unsure at all n locations
agctntcttcccagtggagtcacctaatattatgttggtgccttcttgggcaaaatactaacaaaccctatggccttaacgtgatgtgcacgaccttggggttggctctgcagggtgttagacggtctatggtaggtcactggacagtctgcattatggcaccgatttgtccatgttagggcactggattgtccatgacatgcataggtgaaagtgcattcatccccttttgtgggttttggtgatttggataacaacatatttaaaggtctaacaagtttgctaagtgttgaacatgaaattcactatgatgaacatacttgaataatgtataatgatcagcgaacaaaggttcaacacaaggttaaataactagtgagacaatgcanatgaatataatatggtctctatattggtttgactgtatggac

SEQ ID NO: 41402 - DNA, 422 bp, Zea mays
ctgtgccttggcagactaaggccagaatattataacactatatgggcgtggagcggtggcgggagtagcgtgtaccctccgtggcaagaggctggacggtggtgtatctgtgctctcggtttgcgtgaacctgatctggtcttaagaaccctagggtcgagttgacatatgcaaggattaagtgctacatatgtcgtgtggttagagatcctcagctgagtaaatcgattccgatcgccgttatatccccggagagtggagacttgatcactgacctaccacctaagtcaggatgtgaacttcatgaataaaaatgatgttgtattgatgagatgatgaaattagactataggcacacagagtctattaatatttaatctggccgtaaaatgttgaaagtaaggactcactttagtaagcta

SEQ ID NO: 41403 - DNA, 420 bp, Zea mays
gatacaaagtttgatgctgaggtcgaaaaaagttcaaattggcaaaaatcattaaaagagcttcaagataaatgtctgttgtcagcaaccgatgcgtgcagcgattaaggcagatctttaattcggttggagccagctctgagaaattcaatcctttgattgaggacctgccagggacctttgaacatattgagggcgaagttgatgctcttgatgaagttatagccggacacggtgatttctgtgccctgctagcttctcggggcacaactgttgccttgatgaagtctggttgcacgcacggatagattgttaatagaccaaacttcagcttatcaccagcagatctgattgatatccccaacctagctcgaagcatatgaaacagatttataaagcaaatatggacaaagggtgggc

SEQ ID NO: 41404 - DNA, 450 bp, Zea mays
tagcctttatttgtggagcctcaaattcttaaaacaggctaaaatagcaaagggcaacccactgtaattgttacagaatttttggaaaatattaaaccactgtcgtagttcaaacctacactagaaaccataagtagaaattaagaaaaggaaaatgaataatggtaattaatgtcatcctaaaacccttgtacatttgtccactgaaatgtataaagacaatacaaatccactatgttatcctcaatgaaaacctaagcctaaaaaagtaataagtatataccactggaagccccgcaggactaagaaaccctaagttacttcttgacttagtttcttttagcataatgttattaaatcttgcataatcatgacatacatattcattgcatttcgatagactgtaaccttgctgacggagagtacgtcctcgtgccggagcaaggagct

SEQ ID NO: 41405 - DNA, 434 bp, Zea mays
agcttatattgaagatgccaagtcattacatcattaggatactaatccttggtacataacttctggtccctacctaatgcacatagccaattacaaaaaaataacacagatctaatgataaccaatccgaagtctagatcgccaccggtgcgtccgatagaaaaacgccatggccaccctcaccaatgttcgtgatcctatagcaaccataagccgaacctcctccctctatagaaaagtccaacatgaaagccaatatgtcgccgactggataacatgcaaaggagagcagtagagttttttctcaaacactaaatcgtttctacaagttcaagaacctagcacaagaccaccactccagagtagaaacacagatttcagtatcttattaaggccctgaagccatcctccaaacatatgttccagattatgtg

SEQ ID NO: 41406 - DNA, 454 bp, Zea mays
tgcaccgatatgctacgctctgcggtaaacaaccactgttatcggctcaagcagaaatacttcaatggtgtacctgcaaatgagataagcacaacttctcctgtatcttacatgactgatgaacagcggagcgcattagttgcaaagtggtctgatccaaagaacatgggatgggtatcttgtcatatattgttctttcactataagtttgcgaacgatcttctcatattgaacctatgatctaatctgacatgttcattctctcgtacgaaataagtgacaagaacaagcagaaccgcagtctagtcaagtttcattacgctacgggttctcgctgctatgtggcgcacttacatgcatattgtagtaactattaccttggtctactaactgcacttttgcactcaacttctattgcattttatcttgacaaacttcgctgtgattgtgtatc

SEQ ID NO: 41407 - DNA, 421 bp, Zea mays
atgcaagcctgggagcaatacaagtatttaatttatatagctgcttccgccgaacagccgaagcccatgctcttatgtgatgacataacaaagcggaaagtgctattgggatctcaattgtctgaggaacaggcgaaaaccttggtaaaggttctattcaacaataaaaatgtctttgcatggccagctaatgatctctgcccagtcaacagggatgttattgaaccctcgctcaatgttgatacctccctcagaaccacaaagcagacgcttcggaagatgtctgatgacaaggcccaatgtggtcggaatgaagtaaataagacttcctagcgccggagtcatcagaagagtgaagtacccagaatggctagccacactggtatggtaaaaaaagccaatggctaatggaggatgtgaa

SEQ ID NO: 41408 - DNA, 452 bp, Zea mays
  unsure (1)..(452): unsure at all n locations
tgtggcatggtttaatgatagacacacccatgcagttgtattgcagaatgagggagagagatgggctccaaagcctaagacatttctagagaaggcaaaggaaagggaaaacacacacactgttgattgttttgacttacagtcagggacatatgaggtattccttcaagctggcactacttccgacggcgagtcacaagagtcgaggaagcatgtggttgtccttaatgacttgtcatgtacttgtggcgcacccaggcaataccatttttcatgttctcatctaatcgcagctgctcgagctcgtaactttgacttagagaggaggatacctcaagagtttactattgataaactagtgttgacttggagtccaagatttattccttatcgtgacgcgggtgagtggcctncgtacgatggcccaaagtatgtcgctgatccaagcagtc

SEQ ID NO: 41409 - DNA, 340 bp, Zea mays
agcttaatgtgcactttttatatttaaccaatatcttcagagtcatgcttgatgacttaattgtctccaaaacatccagcacattaaccatctttttcttttgggggtcactgctggacccttttggctttttgctgcctcattttttgctgaaggacttaaaatttcacgtgtccttgtttccgtagcctccggttcttctattttcttcattttcggtattataattggctcttcaacattcggtaggagaataggctccttggcttttgtggccgcaaaggtttcaccgacatattcaggcactgtggccggttcaatatagcgtggccggtgtgtg

SEQ ID NO: 41410 - DNA, 433 bp, Zea mays
ggacgtgaaaagagccttcctcatggaccgttcaggaagaggtctatgttgagcaacgctcccggctttgaagacagtgagtatcctaaccatgtttataggctctctaaggcgctttatgggctcaagcaagccccaagagcatggtatgaatgcctaagagatttccttattgctaatggcttcaaagtcggcaaggccgatcctacactctttactaaaactcttgaaaatgacttgcttgtatgccaaatttatgttgatgatattatatttgggtctactaacgagtctacatgtgaagagtttagtacgatcatgacacagaaattcgagatgtcgatgatggcggagttgaagtatcttctatgattcgaagtcaagcaactccaagagggcaccttcattagccaaacgaagacacttcagacat

SEQ ID NO: 41411 - DNA, 432 bp, Zea mays
  unsure (1)..(432): unsure at all n locations
agcttctaaagggagaacacattttgggactaaccaatgttcattntgagaaagacagagtttgtagcgcatgtcaagtagggaagcaagttggtgttcaccatccacacaagaacatcatgacgaccgacaggccgcttgagctactccacatggatctattcggcccgatcgcttacataagcatcgacaggagtaagtattgtcttgtaattgtggatgattattctcgcttcacttgggtgttctttttgcaggaaaaatcacaaacccgagaaaccttatagggattcttgagacgggctcaanatgagttcgtcttaaggatcaaaaagattagaagcgacaatgggatggagttcaagaactctcagatagaagactttcttgaggaggaaggcatcaagcatgagttctctttctcctacacac

SEQ ID NO: 41412 - DNA, 432 bp, Zea mays
tcatactcaatctgattgttagtgcagcagtattcaattctaattgattcttcatctactagaccatttggtgacaccaaaacatagctgattccctgcccttctttgcacacagaaccatcaaaaaataattgccaagggcaagtattaagacatgagatttcctgctctacatcaaccctatgatcagttataaaatcagctataacttgccctttcatagaagacaaagattcataacttagatcgtactctatcaaagcatatgcccactttctgacccgaccactaagaattggcttttgtaacatatatttaatcacgtctgtgtgacacactacggtacatgtacttaagagtaaatagtgtctaaacttggtgcacgccaaatatagggataaacaaagttttcgataaacgcatacctacttt

SEQ ID NO: 41413 - DNA, 434 bp, Zea mays
agcttgactctcgaaaccaaacgaagctctttcttgtagcctacttcgtcagaagaagaaaaacttcggaagataagtatttaattcccaaaaaattcagaattaaatggctagagtgcgctctaccgctagggttgagcgtgagggaggcgaagctgaaggatcggagaccgttcccatctccgaagcgatgcaacgatccggactggtaatctcggaagaaatccccactgctgaaacaaaacaggcaactgccgaagcggaagaaggagacattgaggaaactgattccgaagatgattatcatattgccatgcccagtaagcccagccacttggacttcggaaagtcgactgtctctaaggctgatctctccaagatggtaaagtcgggttatttcagtgagagtgagaagaagctacttcggttcgggg

SEQ ID NO: 41414 - DNA, 384 bp, Zea mays
tgaagccatggtaagtagcatatgcaagtaatatgtctattgactcaagcctagctatgggtgcataggtttcaccgaaatccaaaccttcgacttgtgaatatcctttggctacaagtcgggctttgttccttatcaccacaccatgctcatcttgcttgttgcagaatacccacttggtacctacaacattttggttaggacatggaacaagatgccatatctcattcctcgtgaagttgttgaactcctcttgtattgccagcacccaattcgagtctcttagtgcatcctccaccctgtatggctcaatagaggacacaaaagagtaatgttcacaaaaatgagcgactcgagattgagttgttacccaaatatgaatat

SEQ ID NO: 41415 - DNA, 343 bp, Zea mays
  unsure (1)..(343): unsure at all n locations
gcttcaaaatatttcttttcttgctccaatttctctgattgacggagcaaaacattctttaatttggcaatctcagagtggattcaaccctagagcctcccatggctgaatgataaaatccttctttctagtgcaccttcgtgctctttgaccatgatttcaagaccttgaattgcgacgcttttctttttcaattggcttcatgattntcaactttttcaaccacaacttgaatgacggttntgtttttctcttcctccagatcttgttgcatcttcagaaccctgcttaataatatgctctgtcaaaatgatctttcgcagaacacgacacaaaagtttat

SEQ ID NO: 41416 - DNA, 394 bp, Zea mays
atcacttacatactaagcttaacctcatagagctattgggacacacttttcttttatttatatacgaacccggaacatgatggtacacctccttagaaggcctatatatctcttcaacatccatgttgaagcccattggtgctgatagcacttgatgtgaaatcaaacatgtcttctttatcatacaggccataccgcgagatccaacaattgcgtaataattcgccttatacattcataacaccttcgagctccccagttctttttccacccaagcaagaactccgccaacatccctgctagtataataattctcccctaaagtgtcaccggtagagaagaaaaccttatttacgcgaacacagcacacggaggtgatgctgaagcagtgacc

SEQ ID NO: 41417 - DNA, 288 bp, Zea mays
tggtcatcgcatgatggcacttgagcagggggtgtttattctcatgtgctctgaactcggatgggggtgtatggatggttgacccagtctcattttaaatatatgcgctatcgattgggaaggtggaggttctggcataaaaggctgtgtacggctctggttgaatgtcaactatctcatgttattaatacatgggcatactgcacttacaaggtgggcctgcccagtcacagcacttaaaagcccggtccattaaccacacgacttggattatttaatgccaatttc

SEQ ID NO: 41418 - DNA, 461 bp, Zea mays
  unsure (1)..(461): unsure at all n locations
agcttgttgacacatataanaattctgtttcttctgttgctgtgacatctgatatatggtctgggaatgctaaagaggattacttgagtgttgttgtgcattatgttaattctgcatgggaattggaaaaaggataataagactaaggctaattgatgtctcacatagtggtgaaaacatatctgagagaatattagaggtgttaaaagaatatggtcttaatgataaaaccttttttgtaaccctggacaatgcttctgctaatacctctgctatggggagacttactcctctacttagtggttatgttggggatgtttgtttgcatcaaaggtgtgcatgtcatattctgaatttgattgttaagtcttgtttaaaaaggattcaaccttatctagaatcatttagaactgctatatcttttctgaactcttctaatcaacgcattgctttatacaaat

SEQ ID NO: 41419 - DNA, 374 bp, Zea mays
tcgcctttctagctgcgtgacaggggacacatttctcaccagcctttcgacgaacccctgaccctgagtccttcaaagctttgcaggtgacctcgaacagcttccggagctctagtcccggcagcatgctcgggcgtacagcaagcagaaacatgaggtagtccgacagcgcctcgactgctcccagatacttgttggccttgtccttgagcagctgtcgatcgctgcgggcgaggaagatggtggtgccgatgtgccacaagaggacgtcctcttggaactcacggccgaaaatacccagcttgatgcctttgagcttgtcccgctttcttcttctcttgaccgcctcctggccccagagtgtggtgatgtcc

SEQ ID NO: 41420 - DNA, 442 bp, Zea mays
catgcaagcttgtgcttgggccgtatgcgagacacgatgttcttataacccggtacgacaggcacgacgtgccatgccggcccaaaaccatacgtgttgttcctacctcatgctcgagtcgtgccgaaccggatcggcccgctggacataaactatatgcataagcaatacaaaagcgaaaaagaatccatggaacacgtacaagagagcagcgttctaattggccgcgttcttggctgctcatcagctagaatatactaaaagtatggaacctacctggtcctaatcaaagcaggagtaagtgtgtgggttgtggcaattcaccatcgtgccacatcaaccgaactccaatcctgtttagggcttattggtttaaccataaatctatatgaaataggtgatattgaatccggtctatttgtattgaaataaccacaccaat

SEQ ID NO: 41421 - DNA, 258 bp, Zea mays
ccctgtgcatcttgtcatgcatgtaaactagtgggacgagcacatcacatcaggaatgtgatgaccccttcacgacctctggagcatgctgcatatggacctttttggacacgttggctatctgagcataggaggaagtaagcatggtctagatattggtgatgacatttcccgattcacttgggtgttctttttgaggataaggctgaaacccatgggacccttaagcactttctaacaacagctcaaaatgatctt

SEQ ID NO: 41422 - DNA, 252 bp, Zea mays
  unsure (1)..(252): unsure at all n locations
gagaaccttgctntagacgggtcagtctcgctgagtaattgcctactcacggctctattctcatttgtgttgcaggagaaactattaacacctttgaggtctggtagagactacactggagacttctactgttcgctatttgcaatatgtggggagtacgggaagatggtttcttcgtagttgatgcaataacgtagcacttgactctaccttaggcatgtaataataatacctactacttggtttgtatat

SEQ ID NO: 41423 - DNA, 351 bp, Zea mays
atacaagactcaagctctgccaaatacggcgcatgaatatacctttgttttcttctcgaattggcagaccagtctttacattaaaccattctgtcatccagtcttcgggccatctatttcgaaaggttggcacggtgcagcttgacccggaccgagaaacgaaactgtagcagccaaaattggtgtgatactgttccttaccccaaggttttcgtttaatatgataaatacatgaataatgcacaagcttttcgcgtcaggtttcagaccttggcttttcaccgcccacaccaagatatttagctttataattgcctccggggtaagttgatggagatagaattccaatat

SEQ ID NO: 41424 - DNA, 380 bp, Zea mays
  unsure (1)..(380): unsure at all n locations
atgttgatgacaactgtgtatatgcaaagtttaagaatggaaagtacatcttcctaatcctatatgtggatgatatcttacttgctagtagtgatgtcagtctactgctggagacaaagaagtttttgtcctcaaaatttgacatgaaagatcttggtgaagcgtcttttgttttgggcatagagattcaccgagatagaacaaaaggggtattgggactgtcccaaaagttatacatagaaaagattttaaagagatttaatatgcacaaatgtagtgcatcacctgcaccaatagtcaagggcgacaaatatggngattttcaatgccctaggaaccagtacgagctcgaccaaatgaaagtggttccatatgcttct

SEQ ID NO: 41425 - DNA, 366 bp, Zea mays
tcgtacctcgttttacgcttaaccgcgtgaggaatctattatgtctactcaacgggaccatgtggatcctctcctcgatgaaatccccatcacatcttccggtgaggaaatggaccccaaggtcctcgacctcgccatgaagattgtcgagaacatgttcctcaaaatgaaagaggaagatgcttagaaaaaggccgaagaagaataatcaagaaaaaaggccgaacaagataaaggtaaaggaaaatttggttacaatgacaatctagtggatcttttggtgtcaaaggtgttgaacaaggtaaggctcaacaccgagggatcatctaccaaaagcaaaggtaacgaaattagtaaagttcaatt

SEQ ID NO: 41426 - DNA, 331 bp, Zea mays
  unsure (1)..(331): unsure at all n locations
aacccatgcgagtgttagcaattaagcaatgcatctagaccggnctcctctcttgcataatcaactaactaaagtttgtcgactagtacacccttaaaagctaatgaaccatcacttgttctatagacagacacatctacatttgtgaataaacaattatatgccatattacagacttgactaatagacaacatgttatattcaaccgactcaactaaaaacacattggaaatggagtgctcggatgaaataacaatccttcctaaccctttcaccttgccttgattcccgtcaccgaatatgattgagtcttgggagtctttgttcttga

SEQ ID NO: 41427 - DNA, 328 bp, Zea mays
  unsure (1)..(328): unsure at all n locations
cgacacaataaaatacccacgcttcgctatccaatgatatgtcgaagatccgagcccatggcgttcaataagccctaccgtctgcttatgcccgacattggactgaacacctatgaacataagccatggtgaaaccacttagcgacgcaggccattttccaacaattcccgtggcataacatggcacctattatctcctgacaggctgggaagaaggaactatgatatggaatgaccggatataacgctgaagcatactataggccatcaataccacaaaaagaacctattccaactctgngtcacctaactatgatcgactatgtat

SEQ ID NO: 41428 - DNA, 445 bp, Zea mays
  unsure (1)..(445): unsure at all n locations
agcttcataattataaaatataaatccacattttgggtatctcatatcacatgaaatctgaattagggaaacacaaaaggcaactatggaagtatagactatagagcatgtaaaatcatgtttagaatttatttggagtagagcttacccaacacggccttcaggagtataacgcaagttaccaggatgaggatcagcatgcaacaagcctgtctcaagaagctgcactagcgatgcctctacacctttattgaccttatgagtaattaagaaaatgttaaaacatattggatagcaagtttaaattgagcttgggaaatgtactactcattgtgagtttatgctacatcatcataacaggaaaaaatacccctcaagattcaataaatagatgtnttaaagtgctgtgattctgaataaatgttaatgatcacaactaaataag

SEQ ID NO: 41429 - DNA, 344 bp, Zea mays
acctatgaatactcaactctccacaaaagatgcctcatgtcgggatattgttcgcgttttcagaccggcgggtccctgggccgaccaattgaaagtatctgcctgccccaccccacatgggtcggcgccaggccgaaccctaaagggggagaaaggtggtctcaaaccggcgtcaaacaagaggaaataccccggtctagtgtttcgaccccgcccaccacgggtgcccttgcagaaggggattacaaaactccatcctggagaaggagacaagggtattacacgagcgcctgtcttttctcttacccgcccggtcaacccttgtaagaaggcccccggccttc

SEQ ID NO: 41430 - DNA, 364 bp, Zea mays
tatgcgaagtgactcaagcctagctacgggtgcatatgtttcaccgaaatccaaaccttcgacttgggagtatccctcggccacaaggcaggctttgttccttgtcaccacaccatgctcatcttgcttgttgcggaagacccatttggttcctacaaccatttggttaggacgtggaactaaatgccatacctcattcctagtgaagctgttgagcctctcttgcatcgccagcacccaatccgaatcttgaagtgcttcctctaccctgtgtggctcaataaaggaaacaaaagagtaatgctcacaaaaatgtgcaacacgagatctagtaggtacccccttatgaatgtccccgaggatg

SEQ ID NO: 41431 - DNA, 455 bp, Zea mays
ggatcttagggacgcagctgcagcttactcaacagcatactctgtgtttttcttccttcgctagaaaacaccttcgttgttgaagacaataaaaagcagaagaacagtttttaccttgaaataggaatagaatatactactgacgatgtgttgtcgtcgttagcggctaatgtctgtctcaagcttcgggaaaccaatactctttgatagagtaccgataacctttgctccggtttgatctcggacgcagcctaacttttcatcgtcaacaccaccgaaaagtaatgcccctggttgatatccgtaggatatgtcataatcttttaacatcttctttctcagactatgtcaactctttgtcaactaagttttgaaagttgaaaatttcctctctgaagcgactctggtattttcttctccttctaggctctatggccatgtgttcttcggtggct

SEQ ID NO: 41432 - DNA, 349 bp, Zea mays
tcagttccatctatattatggattgcctcggagtcaatacaacttccttcggcccttctagcagcttcctggcttccatggatagcaatagacccttggtaccaaagtatcttcatgcaaagataggcatgatgaaagattgcttccaacgcattaacagtgccacgaccaataattgcattgtaaggatattccatgtcaacaatgtcaaacacaacttgctcagttctaatgttgttgacgaatcccaaggttactgacatggtgatcttgcccaaggctaaatattgttttcttccgaaccacaaagaggatgggtagcattatgaatcttatcttctgggtcttg

SEQ ID NO: 41433 - DNA, 455 bp, Zea mays
  unsure (1)..(455): unsure at all n locations
agcttgcatctcttaagttattcccttccatattttcttcatcatttccatggtcactattgggtaggctgacaaaactttgtgggttgatatttccttgatcattttctagccatctctcatcataattgtgtgatcgaattaagttatggaggactgcaacaacattaggtaattttgcttgattttccattttgtgaagggtagcaactttgaggattggaaatctcttctttatgacacccaaagccctctctacatgatttcttaaaacaacatggcgatggttgaataactctttgtgattttgaggccttcaatgaccatggccaaactctttcaagtgatatctaaccccacaacatggtgcaataaaggaagccatattggcataaccaccatctactatgtagtacttcctgtggnggacagatattcaccgggtccactggaag

SEQ ID NO: 41434 - DNA, 370 bp, Zea mays
atatcttatcatttaatcaacatttctattttttagacaggaaatagaatcattgcaaacattcaattctttaaccttagaaactaaactagcattttcatttctaagactagaaattgaatcatgacaaatgctaagctctttagttaagttttcatatttttctacttcctgagcataagcatttttcagtttaacaaattttttgttttctttaatgaggaagtcctcttggctatccaagagttcatccttctcattaatggcttcaattaattcatttaattttttttttggtccatgctaagggtggcaaagagagacattaaattatcttcactatcactagagctaccctcatcactagatg

SEQ ID NO: 41435 - DNA, 443 bp, Zea mays
  unsure (1)..(443): unsure at all n locations
agcttgaatggagtaaaacccgatgaccttgtttttatcttgttgnggnttcacagcacctttattaattcgtttggccactttcctttggactggttgaagattgacttcattattcctgttattataattctgtttgctctttctaccagtccatttgactccagatgtctcactgatgcaaagtgtatttttgtaccaatctggtcacaaaaggttttgaatgtttcancatcaaattgggttctgttatcaactgtgatagcctttggcacaccgaagcgacaaacaatattttgccaaaagaatttctgtattgtggctgaagttattgtaactaagggcttcgcttcgatccacttgcagaagtactccactgccaccacaacatatttcaagttgccttgtgctggtggaagtggaactaacaaatctacgcccca

SEQ ID NO: 41436 - DNA, 342 bp, Zea mays
aaaatactcaagcttcacgctcgtgctactacaactgcagaaagatattgctgtttcttctcttgaacgatcttgggtgttttgtgacactcctacacctctgttatgtgatagataacatgagtgctaaacagagttctcatgaatcagtgaagcatgaacttactaaacacattggtgtcgatgcatcatttactcaatctcattgcagcagaagaatattgatcctcaatatgcgccctcagaaatctaaatggcagaatttttctccaaagcacaaaccagaagcccaaattattttactttgataaactcaaagtttcaaaccctcctttccacctg

SEQ ID NO: 41437 - DNA, 368 bp, Zea mays
ctcaagcttaccttgattccaaacaaacgaacatacccttgtgagtcttttttttagtcgggtcagtcttgctgagtaattttatacatccggcttcattcccattattgctgcatgagagactattaacaccttttgagctttgttaaactcaccatggaggcctttgcttatgcttattatgggagtgctgccggaagaatgtcttttcccaaatgttgcaaaaagttagcacttgactctacctcgagcatgtaataataaactcctcttcggatggatatcttacaagaacttctatctacatgcgctattgcaaaaccttccctcaaataccaaggtaaaatgtcagttcatggcagttaaat

SEQ ID NO: 41438 - DNA, 462 bp, Zea mays
  unsure (1)..(462): unsure at all n locations
agcttcgtcttgaagagcatgttnttcatttttcctatgagaanatgtctcaagacaagaaagttgttgctgagacgaagctaaccgaggaggagaagctctttgaacagaagaaggttgcgaatccttatatagctgggtttctagaatcaatggcaaaatcaaatacagagaagattacaaaagaaatattagagggcctgtctgaggatactggtgacagtgacagttatgatgcagagagtgggggtgaagattccgaagatcggccatggaggccaagccatacaattttcggaaagtcgaccatcaagcaaagtcaccttgagagcatgaggggaaggtactttcgggatatatctatcgtgagggctggggaaaacaataccactcctgcgcctgagaagaatgaaagtgtgattntccgaagcttttttaaagctgggcttcngttcccactta

SEQ ID NO: 41439 - DNA, 338 bp, Zea mays
tttgccgggaatttccagggcacatatgtgcgccctgtgaattcctgggaccttcgaagctaccgacagcagccgggagagtctctccgggactacatccgacgattctcgaagcagcgcaccgagctgcccaacatcaccgactcggatgtcatcggcgcgttcctcgctggcaccacctgccgcgacctggtgagcaagctaggtcgcaagacccccaccagggcgagcgagctgatggacatcaccaccaagttcgcctccggccaggaggcggtcaaggctatctttcgaaaggataagcagccccagggccgcccatcggaagatgcccctga

SEQ ID NO: 41440 - DNA, 452 bp, Zea mays
  unsure (1)..(452): unsure at all n locations
cctgcggcatgcaagcttctaaagggagaacatgtgataggtttgtcttatcttctattcgaanaagatagaccttgtgcagcttgtcaggcaggtaaacaggtgggaggagcgcatcacagcaagaatgtgatgaccacatcaagacccctggagctgctacatatggacctcttcggacccatcgcctatctaagcataggaggaagtaagtatgggttagttgttgttgatgacttttctcgcttcactngggtgttctttttgcaggataagtctgaaacccaagggaccctcaagcgcttcctcaggagagctcanaacgagtttgagctcaaggtgaagaagataaggagcgacaacgggtccgagtttaagaaccttcatgtggaggagttccttgaagaggaagggacaagcacgagttctccgctccctaccaccacagcaaa

SEQ ID NO: 41441 - DNA, 273 bp, Zea mays
tcttgcgaagaatagtcgtcggagccccaaagtatctgttttgtcgtgagcattattgagggcaatttgctcccaagccagctgcaactccacatactgctcaaaggcttgctcaaaaataggcacatggaaaaaactagcgaattgaacctgctctttagcttccttgatagacacctttgtgtttttgaccaaacgaaaataattttggaaatttttccttgggaatgtactaacacactgatcatccaaaaagaaaatgaatacccttgc

SEQ ID NO: 41442 - DNA, 365 bp, Zea mays
aactccgctgtgtatctacttcatcatcactagattatttcttttgaagtagcatacttaggggcgtctcgagtgcttacctttttctcctttgccatgaggcaagtatgacactcgttggggaagagataccacttgttgaagttcgaggcggcgagtccttcatcgtcggagtccgaagaagagcattctgaatcccattttttgtcaaggtgcggcttcgccttcgccttcttgtacgccttctttttctccctcttccccgctttttctatggccttgtcattagcattatcgggacaatttgctataaaatgaccactcttaccgcatataaaacaggagcgctttcctttgctatgctc

SEQ ID NO: 41443 - DNA, 450 bp, Zea mays
  unsure (1)..(450): unsure at all n locations
agcttcggctttgaaaatagttnttagtgtctccttttatgtccgaagataagaaggctgctgctgagacgaaactaagcctcgacgaagagaaaaatttggggtttcttatagcgatgtccaagaccaacacagaaaaaatcaccaaggagattctggaaggtttgtctgaggatactggtgatagtgacagctatgatgtggacagtggtggggaagactccgaagatcgcccctggcgaccaagtcatgcggttttcggcaaatcagctatcaaagaanaccatcttgccaatatgaggggaagatatttccgggatctgtccattgtgagggcggacgaaagggaaaggacttgtccacaccctgaagagaatgaagttgtggtgtaccgaagctttttgaaagctggattgcgaatcccctcgagcagcttcgtcgtggagatgc

SEQ ID NO: 41444 - DNA, 381 bp, Zea mays
tgtgaacagtacaaattcagaagggagaaagcagtttcatcagaccagccgaagcctatgctcttatgtgaggacatagcagagcagaaggtgctgttaggctctcagttatccgaagagcaggagaaaaccttgataaggtttttgttcaataacaaggatgtttttgcatggtccgccaatgatctctgcggagttaatagagatgttatcgagcactcactcaatgtcgatccatccttcagacccagaaagcaaaggcttcggaaaatgtcagatgataaggccgaaggtgctcgtaacgaagtcaaaagactccttagtgcaggagttatcagagaagtgaagtacccagaatggctggctaacactgttatggta

SEQ ID NO: 41445 - DNA, 460 bp, Zea mays
agcttgacgatgaggagatggcgctcgttattttatgcttacgccaaatcctcaaacaaaggagggggaaagactacaagtcccgctccaagaaggtttgttacacatgtgagaagcccggacattttattgctaaatgtcctatatctagtgacagtgaccgaggcgacgactagaaggggagaagaaaggagaagaaaaggtgctacaacaagaagggacggcatgcccatgtttgtcgggaatgggattccgacgaaagatcaagcgactcctccgacgacaaggacgccgccaacatcgacgttaccaagggactcctcttacccaacgtcggccacagatgcctcatggcaaatgacggcaaaaagaagaaggatacatccaactcctccactaaatatgaatcttctagtgatgataatgctagtgatgaagaggataattttgcgtccctttt

SEQ ID NO: 41446 - DNA, 302 bp, Zea mays
tcgacttttttcactttatctaccacggtttgcttaatttgagctttttccaaagcttcgtttgtcactctgataacctctgagcgtctattattaaacgcaatttcatagctttcatcttctgcgctcttttgggctcttagagcggtacttaggatcacgccctataccaacaagaattcatattagaaaaaaggtatgagttgcgaaaaaataaagggatatttcaagtgtttaattcctatacccttacgctgttggacccaaaactgtctgcgagatctttttttcggatggcgctt

SEQ ID NO: 41447 - DNA, 447 bp, Zea mays
  unsure (1)..(447): unsure at all n locations
agcttgaccacaacgacatgacagttcttccttatacangtgggaattaacaatcacgtaggacattgtgcatcttatccttggtgtgccaaatcatggctgcggaaaaccgttgcggattgatgaatcacttgcatcatgtaacttgaggtcagagcttggtctggctaaagaccagttcaatgtgacattgcctcgtgatcatttactgaaaggggaggatgatgaccttctaatcagatgggtgttccttatcttaatcaatcgcctgtggcttcccactgctatctggggcataaaaaccatgaactgctcctgacagaagaaatgcaccgattgcactagactgattggtgcccgcttatatctaatgaccttagtgaggccgcgcacaatgggcgtatccgaatcagcacatacgtatccatgacgatatacggatgctca

SEQ ID NO: 41448 - DNA, 329 bp, Zea mays
tttccttatcgtcatcaaccttgacgtattaccattccgatttccaccctgctgcccatttgcttcggtagctgatcacaggatactccctagttttccgataagcaaaattatagcaaccaaaattctcatgtaatccatcttttctagcctttgtctgatagtgcaattcgcgaacccggaagaagctgtccgcaaacggttccatagcctggcttcggagagcccacatataaacattgagcctaacgatagcggtgggggtcaggtggtgaaagataaatcccaaaatgttcaatatcctttgagccatcccatgaaaggggaat

SEQ ID NO: 41449 - DNA, 395 bp, Zea mays
  unsure (1)..(395): unsure at all n locations
agcttnncccagcgcttacaggctcacttcgtttatctgngaagacctggagcactcctggaacatcgacaacctccgcaaattatttgtttgactcatcacggctgattcgcccttgtaattcgcaaaaacaattttattctggcccgcaacctttttctcccggggggtgagggttttaacgaggcggagccatgtaatatatgtgtgaaaaatcccccgcanaaacatgtgtcgaaaaaagaccgcgacgacggtcttcgacatttgaccaatacgaggtcaccgcgaggcttagcgctagccaccctcgcgtgcgacaaatccgcgcagaagtctgctaatggtgcagccggactatcacaacaagtgcaaaaaaaccgaagtctaccgcg

SEQ ID NO: 41450 - DNA, 298 bp, Zea mays
  unsure (1)..(298): unsure at all n locations
taataatatttgatttgaaatcaaatgcactatttttttatcatangntcaaaatcataaacaaatattatgtgaaataaatgaatagccaaagtgtaacttgtgaggccgtaaactgaaccggagggggtaacaacctgtcaacctttactatcaatttggtcaaagtcaagatagtttaaaaaaactcggccagggaggaaattgccaccctcccggtataatattaagaagagaccgaaacattggtcccgaccgagaaaatccccgaaccctggcctcccatcactaacgggtc

SEQ ID NO: 41451 - DNA, 434 bp, Zea mays
agcttaggcaccacacgtctatcttttttcttcgccatccttgccttctctctagacccataacctcctgcggtgacactcaagttgcgccacttgtcctgcacaaatagaccataccgaagaatcatttgtactcatcgatacaggcattcaaaatgaacttggaaactaaaaacatattatgcccaactaaacaaatcatagttatggtgaacaagatcaacacatggaagtgacctctctctcaaggaaccatcaatacctagcaggtgaaaaaatctacatggaataaaacaaaggggtgtggaagctttttgggcatcatgatgctacggctagaagtttctgatataccagattactctcgagccacctcaaaactctatgcaatacctactaccgagtaccgaccacctaaaataccgatctagaac

SEQ ID NO: 41452 - DNA, 365 bp, Zea mays
tatgaagattcttcatcccaacatgggctattttgcggtgccagagccaacccatgttagtcttagcaattaagcaagtgtcgagttcagctctatcaaaatctaccaagtatagctgaccctctaacactcccttaaatgctattgaatcatcacttcttctaaagacagtgacacctacatcagtaaaaagacagttgtagcccatttgacataattgcgaaatggaaagcaaattgtaatctaaagaatctacaagaaaaacattggaaatagaatggtcaggagatatagcaatttttcccaatcctttgaccaaaccttggattccattccccgaatgtgaaaactcgttggggatcttg

SEQ ID NO: 41453 - DNA, 382 bp, Zea mays
ggaggatggaagcctactgtgactaagtccggcgcctggataacaagttctacaggctggagctcaaccacatcgcccgacggtacaacgagactgcggacgaactggcaaaaataacctcggcgcgaacgacggttcccccggacgtcttctccagagacctacatgaactattcgtcaagatcaacgacactcccgatcctgaagaagactcggcccagcccgagataccctcggccgagcacgaggtacccttggtcgcacccgaggcaccctcggccatcgaggaagaggccttgcccgtcgaagaggaacagaatggggtcacgccagattccgactggcagaccctgtacctagaatatctccttcgatgagagct

SEQ ID NO: 41454 - DNA, 282 bp, Zea mays
tctaaagggagaacacattttaggattaatatatgttcattttgagaaagacaggatttgtagcgcatgtcaagcaaggaaacaagttggcactcatcatccgcataaaaacataatgacgaccgacaggccactagagctcctacacatggatctattcggcccgattgcttacataagcatcggcgggagtaagtactgtctacttattggggatgattattctcgcttcacttgggtattctttttacaggaaaaaattcaaacccaagaaacctttaa

SEQ ID NO: 41455 - DNA, 384 bp, Zea mays
  unsure (1)..(384): unsure at all n locations
ntgagtntgatcaagtgaaactgatgttgtgctcttgtttgtgctttggtgaagaaatctgccaactgagattctgagggcacatatttaagatcaatagtcttctgctgacaatgagatcgagtaaaagatgcatcgacaccaatgtgtttagtaagttcatgcttcactggatcatgagatatctgtatagcactcattatcacataacagaggtgtaagagtgtcacaagagacaccaagatcattcaagagccagcgcaaccaaataatttcagcagtggtagtagcgagagcccggagctcggcttcagcactagaacgagatatggccgcttgcttcttggatatccaggcaataggtgaggatccaagaagaataca

SEQ ID NO: 41456 - DNA, 447 bp, Zea mays
  unsure (1)..(447): unsure at all n locations
agcttcgggaaccccatacttctagccatcttctttcatacagataattctntgttgtctgggaggcagtataagaagtcatcttcgtctgtaccattgaatattaaggccccctttggatacttcagttctcgggcatagtgattagcttcaaaaatctcttcttcagataatctttttcccgaagcatgttgtacaatataatcaagggctttggaggatgcttcgggggcagcagtgtcagtttcttcaaccaaaattggctccgctatttttgtttcttcggcttccaagggtttcaccttggtgggctctgaaggcccagcttcagtttcagattgttgctttgaagcttcggcaacaaaggctttagtatgcacttcagaagtttcaacaattttcttcggagtatgcttgagacttaattgttccaaacatctgcacatt

SEQ ID NO: 41457 - DNA, 356 bp, Zea mays
atgaaactcagcttcggaaaccatactcttggaagagtaatgattacctttttccagttcggtctcggaggcatgctaagctttcgtcgtcaataccaccgaagagcaacgctcctggattgtaaccacaggatatagcataatctctcaactcctctttttcagccttagataactcttgaccaaatatgttttgaaaattgaagtccttttcattcgaagtatcttcgacgatctccttctcttttctaggcactgtggacagggtctcttcggcggcttcagcagcttcttccgcgaccatattaaaaagcattttatcaatatcagaaaatgtgctctccagattagtatct

SEQ ID NO: 41458 - DNA, 460 bp, Zea mays
agcttatgaagattcttcattccaacatgggctattctgcggtgccagagccaacctaagttagtcttagcaattaagcaagtgtcgagttcagctctatcaaaatctaccaagtatagctgaccctctaacactcccttaaatgctattgaatcatcacttcttctaaagacagcgacacctacatcagtaaatggacagttgtagcccatttgacaaagttgcgaaacggaaagcaaattgtaatctaaagaatctacaagaaaaacattggaaatagtatggtcaagtgatatagcaattttacccaatcctttgaccaaaccttgatttccatccccgaatgtgatagctcgttggggatcttggtttttctcatatgaggagaacatcttcttctcccctgtcatgtggtttgtgcacctgctctcgagtatccaactcgagcccccggatgcat

SEQ ID NO: 41459 - DNA, 368 bp, Zea mays
  unsure (1)..(368): unsure at all n locations
ntatcaaatggacgtgaagagtgccttcctcaatggaccatatcaaggaagaggtctatgttgagcaacctcccggctttgaagatagtgagtatcctaaccatgtctataagctctctaaggcgctttatgggctcaagcaagccccaagagcatggtatgaatgccttagagatttccttatcactaatggcttcaaagtcggaaaggccgatcctacactcttcactaaaactcttgaaaatgacttgtttgtatgccaaatttatgttgatgatattatatttgggtctactaacgagtctacatgtgaagaatttagtaggatcatgacacaaaaattcgagatgtcaatgaagggggaggtg

SEQ ID NO: 41460 - DNA, 456 bp, Zea mays
  unsure (1)..(456): unsure at all n locations
agcttngaaggattntagctccatactatcttgtttatactttcancccctggcggaatatatgtcatgatctgtatttaaaatcattccaatctgttaatccttattagaagatataaaatttcctttcttattgtctagaattgttctttatagcacattacctgcatttgcaacttgagttcgcttgtatttatgcacaaaaccatggctcaaagataagaataccgcacaaggcattaatttaaactttttatgaacacaaaatgctcgtaccaacacatgatgagggtgctggtcatggtaacacgatggccaattattatactataaaagggagcaccctatcacgcgctatacttgcccgctatttgaaacgaggggaaatacacacggtctgtacatacacacgcggaaaaaaacaatacacgtgcccacccgttcattcttgtgatg

SEQ ID NO: 41461 - DNA, 361 bp, Zea mays
atatctaagctcgggaaggttcttcatccccacatgtgctaaactgtttatttctcatccaggccatgctagtcttagcaattaagcatgcatctagaccagcctcctcttttgcaaaatcaactaaataaagtttgccatctagtacacccttgaaagctaatgaaccatcacttcttctaaagacacgacatcatctacattttgtgaataaacagattatattccatattacaaagttgactcacacacaacaagttatatccaagcgactcaactaagaacacattagaaatatagtgctcaaatgaaataacaatttttcctaaccctttacctgtgcttgggtcccataaccaat

SEQ ID NO: 41462 - DNA, 376 bp, Zea mays
ttgttggaattggagtgaatactagagtttttattcttcgtctaagatcttatttgtttggaccgggaacaacggggaacgggaaagaaaccacgtggatcggtttaatttggaaaggttcccaacccatggtataagacgtgttccgttaacccgctcgaggatccaacccagtccatttttggcttttatcttgttctcggcccgggaagcagcccttgtgcaatgtgatgtggaaagaattcacaaagcatgaagactagtgggcatcgatgacaaggcaatgcgaaggtgggcatatattgttcgtccaatatttgttgtatatcatcagtaagttcagacaccttcatagttttcgtggcaacaataaata

SEQ ID NO: 41463 - DNA, 423 bp, Zea mays
agcttggtagagaacgtgagggcggggtatttttgttacaatctcaatctcactatgtggaaaagatattgagtcgctttggttttagtgactgtgatcctgctccaacaccttatgaccctaaagaaagaatcggagaatagcaagggatcaattgacatactcctagatcattagctcactcatgtaccttgcaagcaacaaggccggacatctcatatgctgcgagtaagctgagtcggtttgtgtcacaaccaggagatgatcactggcgtgttcttgagagagttatttgaaaggtactatgacatatgggattcattatatcggaaacccacaagtgctggaaggctattgcgatgccaactggatttctgatgctgatgagtcgtatgccacaagcggatatgtgtttctgtttgg

SEQ ID NO: 41464 - DNA, 356 bp, Zea mays
tcgtcagtcgaggccctaatggacttatcttcttttgcatgggctcagccattacctttagaatttcctccacgtcgctggtagaaggtggtgtgggggtcccctctccttcggatagttttcgctttggagttggtatttttctcttgacaattttcttcttttttggcgggtgttcttcatccttgtttaaagcttcggcctctctttttcttctctggccctcagcatccttgatcagctgcgcatagtcaggatattcgaagcccagtgcatcaagcactcggttcagccttcgctttggacgggtaccgaaagctgctgtcatcaattgatcttcttttttcgataatttt

SEQ ID NO: 41465 - DNA, 332 bp, Zea mays
ttacactgtatgcatccaccttgacatttgtttcttattaggagcagcctgctgtttatcacctgaaacagctgattacaggaaactttgtggttttccgataggcgaaattatagcaaccaaaattgtcatgcaatccatcttttctagccttcgtctgataatgcagttcgtgaactcggcaaaagctgtccgtaaacggctccaccgcttggctttggagggcccatatataaacactaagcctaacaataccgttaggagtctactgatgaaaattagatccgaacctctcaatacctctgcaaaatcccatggaggggaaacttaat

SEQ ID NO: 41466 - DNA, 451 bp, Zea mays
  unsure (1)..(451): unsure at all n locations
agctataccaaatggacgtgaagagtgctctttctcatggaccaaacaacgaggaggtctatgtcgagcaacctcccggctgtgaagatagtgagtatcctaaccatgtatataaactctctaaggcgctttatgggctcaagcaagccccaagagcatggtatgaatgcctaagagactttcttatcactaatggcttcaaagtccgaaaggtcgaacctactttatttactaaaacacttgcaaatgattatgttgtatgccaaatttttgttgatgatattatatttgggtctactaacgaatctacatgtgaggattttagtaggatcatgacacacaaattcgagatgtctatgatgggggagtngaagtacttcttaggatatcaagtgaagcaacttcaagagggcaccttcattagcctaacgaagtatatttaagacattct

SEQ ID NO: 41467 - DNA, 333 bp, Zea mays
tcagcagaatgacagccaaggtccttcattctattattgcaggaatgtgttgacttatgttgatgacattatagtaaaaagcacgaagcaagagaatcatattgctgactcgcatgaaacatttgccaatttcaagcaagctggtctgaaattaaatccacaaaagtgtgtttttggagtaaagaagggcaagttcctcggctgtctagtatcaacgaagggaatcgaagctaacccaaataagatcaaagctatcctttggatggagccgccaaattcaaagaaggggcccaatggttggcatgaaggctggcatcggtaaatagaattata

SEQ ID NO: 41468 - DNA, 221 bp, Zea mays
agcttctaaagggagaacacgtgatatgtctttctaatgtgcattccgaaaaagatagaccttgtgcagcttgttaagcagggaaacaggcgggaagctctcatcacacaaaatatgtgatgaccacatcatgacccttggagatgcttcatatggacctcttcggacccgtcgccctattaagcataggaggagagaagtatggtctctgtatagatgat

SEQ ID NO: 41469 - DNA, 316 bp, Zea mays
tctccatccacaacttcggaactggtttattcttcttatagactgcgcctttcatgctgtgcacaccttcatctcaaagccaaaggttcctgtggcagtatattatacttggaaagcatgttaatcgtgtttttgaggaccttcggaagacgaaggctcccaacagtacccaatagcttcttaatcccagaagatgaaatgctgatttctaaaagcataatatgatgacagaatgctgatttctaaagtataagatgaagatctttgagtggattattttcaaaaatccactcaaagcttgggggatacacccatt

SEQ ID NO: 41470 - DNA, 441 bp, Zea mays
  unsure (1)..(441): unsure at all n locations
agcttctaaagggagaacacattttatgatttacaaacgcncattatgagaaagacaggatatgtagcgcatgccacgcacggaagcaagttggaactcatcatccacacaagaacatcacgacgaccgacaggccactagagctcctacacatggatctattctgcccgattgcttacataagcatcggcgggagtaagtactgtctaattattgcggatgattattctcgcttcacttgggtattctttttacaggaaaaatctcagacccaagagaccttagagggattcttgagacgggctcacaatgagttcggcttatggatcaagaaaataagaagcgacaaccggacggagttcaagaactctcaaattgaaggctttcttgaggaggagggcatcaagcatgagttctcttctccctacacccctcaacaaa

SEQ ID NO: 41471 - DNA, 368 bp, Zea mays
tctaaagggagaacacgtgataggtttgactaattttcaattcgaaaaagatagaccttgtgcagcttgtcaagcaggtaaacaggtgggaggagcgcatcacatcaagaatgtgatgaccacatcaagaccctcgagctgctacatatggacctcttcggacccgtcgcctatctaagcataggaggaagtaagtatggtttagttattgttgatgagttttcccgcttcacttgggtgttctttttgcaggataagtctgaaacccaagggaccctcaagcgctttctcacgagagctcaaaatgagtttgagctcacggtgaagaaaataaggagcgacaactggtcccaattcaataaccttca

SEQ ID NO: 41472 - DNA, 452 bp, Zea mays
  unsure (1)..(452): unsure at all n locations
agcttcgtggggatgcgggagtttatatgtattttnctactcctctcacatctggtagatcggaggtagataatggttagcatgcccataggtggaatccagtgtagttcggctacataaaccctaggtatgtgtccattcaggaccgacctttaccatttagcttacagtgtataccaaacttgtcataggactatctcgagtcaattcagtgactattagtatttacaattctgagagatgtatgcggcacaagaataaaggtcctagatagaacgagtaaagtggttcgaccgcaacacactatgggttcacaccaacatagtgaaaaatttctcagaataacctctcggtatactcgcaacttcgtgttgctaagcggttacatgtccatttatctcataggttgcttcatgtcatccagcgacaaagagagcaatgtgctaacatct

SEQ ID NO: 41473 - DNA, 453 bp, Zea mays
  unsure (1)..(453): unsure at all n locations
agctntatcaaatggacgtgaaaagtgcctttcttattggaccaatcaaggaagaggtctatgttgagcaacctcccggctttgaagacagtgagtatcctaaccatgtctataaactctctaaggcgctttatgggctcaagcaagccccgagagcatggtatgaatgccttagagattttcttattgcaaatggattcaaagtcggaaaggccgatcctacactctttactaaaactcttgaaaatgacttgtttgtatgccaaatttatgttgatgatattatatttgggtctactaacgagtctacttgtgaagagtttagtaggatcatgactcagaaattcgagatgtctatgatgggggagttgaagtatttcttatgattccaagtcaagcaactccaagagggcaccttcctaagccaaacaaagtacactcaagatattctta

SEQ ID NO: 41474 - DNA, 383 bp, Zea mays
  unsure (1)..(383): unsure at all n locations
ntgcgttattcttcctagcttcaaaaaaaaacgaataacctaacatcgtcggctagttttgtcacacagttcattggcatcacgtggcggctcatcctatatttttgtctatctctaatttcgacaccactgtatccgcactgagaatttgtcgccattaggaccattaaagctgtgctttctaaaaaaaattactacagtacatactatgtgtaaataacatggtagggtactacccctgcaataatgaagccgtgcaatgcttaaatgcagttttttaagtcagaattaccgagcctacaggcaaacgattattaatcttggagccctcaagttaattgttttcctgtttcttacttttcattcattttgtttactccaaa

SEQ ID NO: 41475 - DNA, 386 bp, Zea mays
catgcagcttacctatacaaaattggcagttattttgttttagcaatgaatgcagcggtgacttcacacctacccgtctgattatatagcgccgcacgtgggaaggtgaattggcaaggtctccatcaccgaacaaacagtcacccgcactcactgaacggtgggccacacggtccgagaaggtgaatctctggcgcccgcgtaattggagcaagatggggcgcgtgcgaccattaatttaatattttttcgtcaaccaactcatggaaggtgttctttggatcttctgtgtcccgaagcctacaaaacttcttcacagatcaagctctttacgaagaacgatctaccaccaccaaggggctactgttgggggtatgcttcgtaac

SEQ ID NO: 41476 - DNA, 371 bp, Zea mays
ttattaggaggaaaaagagaacacagcttagacatttattttttcttacagcccccactgaagggcaccctggaactctacaacgaaaagtaaaggattatgatctctacgcagagacactatcaaccagagccaaaagaattagcaagttcgttgctgcccaaaaacatccttgattaaccctgcaatcacacactctgacttctttaggctttggaaggttctgatgttgcgctctattcaaatcttccaccagaaaaggatgatcaaaccatcaaactctctccttgagcatttatggactatggatctgcacttgttccaccaagcgtttattgacgaatattgtgctatccctggcagtaacgcga

SEQ ID NO: 41477 - DNA, 371 bp, Zea mays
tttgctaatgatagacttgccagtattttgagagtttattatattcgtcacttccagcgggctaaagtcaaacacctacttgaaggggacgataacacaaaatatttccatttagtggctaacggcaagcaccgaagacaaaagatttattctttggagaatgatgacggcacctgtattgttgatgacgaagagcttataaatcacataacaaattactacaaaaacctctttgggaagccaaatgcaacatcgatcgaacttgatgaatctattatccatgacatacctcaagtttcggattcagagaatgaaattttaactgctaaatttactatggatgaagttaaaaaggtggtattcaatatgga

SEQ ID NO: 41478 - DNA, 434 bp, Zea mays
agcttgtggaaagacaccgaacctaaagtgcatgtcttatgtgaagggcaaggtggaacggagggaaaactggagaatgcgcgcggcgacgggcggcacggctgttcggccttgcgtttgggctgaaaacgaggggttcgccatggcgcacgggccgaaaactgatgcttgggcacgaccccgaaaataagctaagtccaagcatgtggaaagacaccgaacctaaagtgcatgtcttgagtgaagggcacggtggaacggacggaaaacgggaggaggcacgctgccaccggcggcatggctgttctgccttgcgtttgggctgaacacgaggtgttctccatggcgcgcgagccgaaaactgaggctcgggcacgaccccgaaaataagatatgttctagcatgtggaaagacaccgaacctacagtgcatg

SEQ ID NO: 41479 - DNA, 367 bp, Zea mays
  unsure (1)..(367): unsure at all n locations
cggnacttagctaatttggaggtcgtgcccgagcctccgtttttggcccgtgcgccatggcgaacccctcgttttcagcccatacgcaaggccgaacagccctgccgcccgtcgccgcgtgcctccgtgtcgttttccctccgttccaccgtgcccttcaccaaagacatccactttaggttcggtgtgtttccacatgcttggacttagtttattttcgggttcgtgccacagccaccatttccggcccgcgcgccatggcgaaccacctgttttcagcccagacgcatggccgaacagccctgccgcccgtcgccgcgggccttcgtgtcgttttcccttcgttccaccgtgccctttacccaag

SEQ ID NO: 41480 - DNA, 446 bp, Zea mays
  unsure (1)..(446): unsure at all n locations
agactggcggggcatattatttattcaatgatatgagnntcaaaggtaaaaataaccttaaatcttaccttactgaaaacaagagtgttgcaaatgatctggagacgaaactaaggagattgatgggaaccgaagcacctaaagagcaagaggcagaagacagttcgccgagtgatttgcctgaagaggttgtcacacctgaagcatcctcagaagaggatatgggagtcgtaatcgaggcttgaccaatgatctgacgtgctggcaagcgagaccaaaatttctggagcttgttctgtaaaacaatattttgggtcctgaagtcaccaccgcttggatcgacatgaccctgcggtgttctggtgattccattgtaacagacttcagcccttaccgtgcttttacagtagtgtagcatgaagagaaatggcattgtgtgaaatcat

SEQ ID NO: 41481 - DNA, 346 bp, Zea mays
tctgcatccgatgtgtgcagtggctgaagaacgtgtttcactctgtcggagctagctcttcgaaatttacacctttagctgaaaacttgccaagaacattagaacatattgaaggcgaagctgatgcccttgacgaagttataggtgggcacgctgacttctgcgccctagtagcttctcggggcacagctgctgcttttttgaaagctggctgcacacatggaaacactatgaacagaccaaacttcagcctgtcagcttcagatttgttagatatcccaagcttatccagaagcatcggaaatagattcatgacctaaatctgggtaagtggccggcggaaaat

SEQ ID NO: 41482 - DNA, 447 bp, Zea mays
agctcagaaagaagatattggatgatgttctcttttccaaattctccatgcaccccggcagtaacaagatgtatcatgatctcagatccttgtactggtggaccagaatgaagagggaaattgctaagtatacatctgaatgcgacacttgctagagagtcaaggccagtcatttgaaggtagcaggcaccttacagcaccttcccataccatcttggaaatgggaggagatttgcatggattttattgtgggattgcccattacctctcgacaccacgattctatttgggtcatcgaggatagatagaccaagacagctcatttcttgccagtgcataccacccacaagacagaaaaatatgcagaaatctatgttgatcaaatagtgcgtttgcatggaattccgaagactattgtatctgacagaagagcactgtttgtggcac

SEQ ID NO: 41483 - DNA, 336 bp, Zea mays
tgccaagccctcggacccggccggactttatttgttgcccgagatcgacctcaccggacttcggtctttcgccgccgcgcgtggaccgagctatccagtgagtctccgcccaatttcttgtgctcatatcttctctggcatcccggggacctctctgacccatccaattgaactatctcgccgtgaccaggccggactcctcgccgccgatgagcattcccgcctgcgcgcgtggaccgaccgactctggccatctccgacggcgacccgcacaccattgggatcctcgagacctcccctttattctcgaccaccttaccggagcaatcttgccgg

SEQ ID NO: 41484 - DNA, 401 bp, Zea mays
agcttcagccccatacaccaggaagaatgttgttttctagtggatcggctgggcgtggtccggttcccccataatacggatgggagctcactgacccaatatgcgccatgcttttttaagcagttataggtgcgcgtcttgagtcccctgaggatttctgcatttgccctctccgcctgcccgttacttctgggtgagccacggatgcaaagcagagctgggtgcccatgtcctcacaatattcctgaaagatccgacttgtaaactgggtcccgttttctgtaatgatatggcttacgacaccgaatctatagacgatcgacttgaggaaggcgacagcagcactctgggtaatggtgaccacaggggtggcctctggccacttggtgaacttgtcgatg

SEQ ID NO: 41485 - DNA, 364 bp, Zea mays
tcctctcagcttctccaaagtagcccagttttattatcatgggcatgtcagcatcagaaacagtagatttcccaaaatctaagtggctgggttttgaagggatcaaaataccataatcctcctcttcttcatcagaattttcttcttcaatgtcagcttgttcaacttcggcagcagatgtaccttcgtcaatggtcccctctgtcacaactaagccagactatctcatgacttcggaaatcagagctatctcggcggcctcggtctactctccttcacgagttacctttgtagttgagcgtactctggccatccgatggatattttgcgggttttacgaagttgatgtcgtttgcagttttga

SEQ ID NO: 41486 - DNA, 351 bp, Zea mays
ctatataaactccgcttctaaaggagaacacattttacgactattatatgtttattttgagaaagacaggatttgtagcgcatgccaagcaggaaagcaagttggcacccatcatccacacaagaacatcatgacgaccgacaggccgcttgagctactccacatggatctattcggcccgattgcttacataagcatcggcgggagtaagtattgtcttgtaaatagtggatgattattctcgcttcacttgggtattctttttacaggaaaaatctcaaacccaaaagaccttaaagggattcttgagacgggctcaaaatgagattggcttaaggatcaagaaaataa

SEQ ID NO: 41487 - DNA, 452 bp, Zea mays
  unsure (1)..(452): unsure at all n locations
agcttggccaatataattgaattaaaatttctttcttcttctcatggggggactcaataggaaattctgaatnttagaattctgaatttcagaccttgagccaaagatcaagcgtgttcaccttgatccctaactcaaatactaatggccccattaacaaaaatgtgcataactaacccctctatcgcatgccagaagatggcattgggacgcgagccctatacacgacaaaaccctggatttgccttgggtttgagcagggagacagaccggatttccgagctccatatctctgcaactagtaggcaaaatcctatgatccccacacaagatcggtagcttgtagggaggagaagaggttttgtgcactgaccaacgcgagagtaggttctgatgagtgaccacacgcgccagaacttgtgcagaacgcatgggcacacgtgtttgaccct

SEQ ID NO: 41488 - DNA, 366 bp, Zea mays
  unsure (1)..(366): unsure at all n locations
gatgggactggcttcgtttgaagctcttatttctggganagcatgtcttttacttatgccaagacgtaattgtgcctggccgaagagaagagtaccaagtttgcgctaggcttatgactgtcatgacaaaggatttctccatgactgtagtattgcccccatatgaagatatggttgcttcatagctcatcaggaactgctattggtctgagcgcccatcatacatagtgttggggacttgttctcaaatgctatgaatcaagaacaaggcaacataaaatgttaaatattaacgcccttagtcctccgaagcattatttccctaaggttataaagatcctccgaccgagggcattaagggcatac

SEQ ID NO: 41489 - DNA, 432 bp, Zea mays
agctcgctcgcatgaagtagtgtgatacaattttattctgatcacggaagcactaaatttgccaagaaaatgaacaaatgctcagttacattgagggggtaactgtaagcttgaggcttggaagccttaaaatctgtacattgttgaaacgacatatcctgacttcaaatgacagtctctttcacatttcccctaataacacatggactgctgtagcgccttctaatgaccggaagatagatgagatctcgtcgacgtcacatcaaggaggatgtgcagtactgcgtacctaacaatcaaaatccagctgggaaatacatacgtatgacgaaagtgatgcagatctcattccacaatgagcaaatcgggaaaacactacaattacaagataagaaaggaagagtcacaccgctcttcttgtaagtgcttgac

SEQ ID NO: 41490 - DNA, 363 bp, Zea mays
tgaggctgactcgccgaagcaacagagactgcatgatggttgcccacatattctgggatgtagggcgaatgatacgaagccgtatgcatgacctgcttcggctgggcttgatgtgctgctgcttcagctatttccttttgcttctgaatagtaacatggcacatcctggtagtatggcctttgttctcaccgcagaataagcaaaagattcttctcggttgatcgccaaatctttctccgaagcccctggcgcctctgcctcttggagctggtggtccgaaaaagctttgcttgttgcccgaaacctgtgaagaggaatgtggccttgctggtgacctcctttataatcattttgaggaaaat

SEQ ID NO: 41491 - DNA, 391 bp, Zea mays
  unsure (1)..(391): unsure at all n locations
agcttcccncagcgcttacaggctcttaacttcagcggcgaagacctggagcactcctggaacatcgacaacctccgcaaattttttgtctgactcatcagggctgattcgcccttgtaattcgcaaaaacaattttattctggcccgcaaccttnttctcccggggggtgaggtgtttaacgaggcggagccatgtaatatatgtgtgaaaaatcccccgcaaaaacatgtgtcgaaaaaagaccgcgacgacggtcttcgacattcgaccaatacgaggtcaccgcgaggctcatcgctagccaccctcgcgtgcgacaaatccgcgcagaagtcgcctaatggtgcagccggactagcacaacaagtgcaaaaaccgaagtctaccgc

SEQ ID NO: 41492 - DNA, 314 bp, Zea mays
taataatatttgatttgaaatcaattgcactatccaataatcataggttcaaaatcataaacaaatataatgtaaaataaatgaatagccaaagtgtaacttgggaggccgtaaactgaaccggagggggtaacaacctgtcaacctttactatcaatttggtcaaagtcaagatagtttaaaaaaactcggccagggaggaaattgccaccctcccggtataatattaagaagagaccgaaacattggtcccgaccgagaaaatccccgaaccctggccttccatcactaacgggtcggcgtcaaccgttcac

SEQ ID NO: 41493 - DNA, 445 bp, Zea mays
  unsure (1)..(445): unsure at all n locations
catgccagcttgtcaaggtataaagatattctcttgcattgtattcatatctaccactcatcccttgtttctcttcttaactatccctgattagataattatttatccaccaggatatcgtaactgagagtgatcagttcaagtatgctgtgtattatttgccttttccttattaacgcgttgcttgttttaatgtctgtgttgattcctgatttggttttgctcttcagcatagaagaattcataccgctcttgagagagcgcatgaatgtgttgaacccttatgtaagacaatttttggttgggtggataacagtgttagatagtgttcctgatattgacatgcttggttctcttactgattntcttgacggtaatccctctcttttcttcaagtgcactacacttttattgacttctcaacatcttctatatcactacccct

SEQ ID NO: 41494 - DNA, 324 bp, Zea mays
tggtgccgatggagaaacaaaaatccttgaaatcttggctgtcgaactgcttgccgttgtcaactgttagctcggacggtactccgaagcggcaaacgatgttctgccagaagaatttttgggcagtctttgatgtgattgtggaaacagccctcgcttcaatccatttggtgaagtattcgatggctacgaaggcgaacttaaggttcccctgagcggtgggcaggggcccgacgatgtccaggccccagcgctggagaggccctgtatgggccatcagctttgtatattgcgaagggttgcctgacccacgaaagaactttt

SEQ ID NO: 41495 - DNA, 126 bp, Zea mays
ctgcatgcatgcaagctttgtgtgcagttcggagaggatgagatttctatgatttgtcccgcaaagaacgctatctcttgtaagtacttggaacgtggaaaatctgtatgccaacgaatgtggggt

SEQ ID NO: 41496 - DNA, 383 bp, Zea mays
tgtgaaggttcttcatccccacatgtgctaagctgttatgccacagccagcccatgctagtcttagcaattaagcatgcatctagaccggcctcctcttttgcaaaatcaactaaataaagtttgccgtctaatacacccttaaaagctagtgaaccatcacttcttctaaagacagacacatctacatttgtaaaaagacaattatatcccatattgcataattgactaacagataacaaattatatccaagagactcaactaaaaacacattagagatagagtgctcattagatattgcaattttacctaacccttttaccttgccttgattcccatcaccgaatattattgaatcttgggaatccttattcttgacgtac

SEQ ID NO: 41497 - DNA, 416 bp, Zea mays
  unsure (1)..(416): unsure at all n locations
agctngccagatttgcctgtggaagagctatttgttgctgcttgtgtaaacaattgtttctgcatctaatagttgatataactgaatggttcaatctcatggaaatctggattgataggacatggcattctgagatcacttttatcaaatatgtacacattgtcttagtcctcgtgcaagtgttcatattgtcaaagtgtcttctagaatattctgaattatagtcgtgtaatactagtactactagttttccattttatccactatgtgccatgtcgtgctccttttcatgtcggcaagttgtgatctgacttctgaattttgacaaaatattatatttttctgctcttatctagagcaacgggttatatattgtttaccttacagatcaccttttgttccagcatatagggttg

SEQ ID NO: 41498 - DNA, 355 bp, Zea mays
tctgcactgttcatgaataatcatagtgaaacaattttctttttgcacaagaacagcaccataacacactttgcgctgctacagctctcgtctctacggcccggggcaaagctgtcccgtaccaacctttctgaagagatggccccgcgattggatgacagaatggtcttatgtgaataatgacttatcagcacgagaagacatcaaaggtataattatgcgtcctatttggccaagcttcggcctttggaggccgaaggttgaaatgaacgaagctcccctaaagtgccaaacagcctttcgcgtagtctgctcttttataggaacaacggacttagttcaatagcatattgcc

SEQ ID NO: 41499 - DNA, 445 bp, Zea mays
agcttaaagccatggtaagtagcataggcaatttatatacgaattgactcaagcctagctacgggtgcataggtttcactgaaatccaaaccttcaacttgtgaatatcccttggccacaagtcaggctttgttccttttcaccacaccatgctcatcttgcttgttgcggaagacccacttggttcctacaacattttgattagtatgtggaactaaatgccatacctcattcctcgtgaagttattgagttcctcttgcatcgccaacacccaatctgaatcccttaatgcgtcttccaccgtgtatggctcaatagaagacacaaaggagtaatgctcacaaaaatgagcgacacgagatcgagtggttacccccttacgaatatcgccgaggatggagttcacggcgtgatctcgttgtatcgcttggtggaatcttgggt

SEQ ID NO: 41500 - DNA, 375 bp, Zea mays
tgaggcctaaaccaagagatccttctgctcctatatcttcatgttagatacctctttgcacttctgttacaatttaatttcatgggaatgctaatcttgaggagctggtatttgtggcaaatggatctgagtctgacacggtagttttagggttgattaacttgatatgactaagagaacactaatagaatgtgccaaacggatgtctattttaacatttgtttgtatatggatttacctctagtttgtgcttgcattgccaacattaccaatttatgatcatcttgacaaggtttcttaaaacaaattatattgtccaaagtgcattacgctattcctactaaaggcttgtttgggaaatacggatcaaatgac

SEQ ID NO: 41501 - DNA, 471 bp, Zea mays
  unsure (1)..(471): unsure at all n locations
cttaatcaccgcngctgcagctgcaccagtggagatagatatctttcttttccattcgagacgatngaatccatctcgctacggacagcctccctccagtactctgcatccgaagatgtatatgcctctgtgagggagcgtggttcttcatccactagataaataatataatcatcacctagagacttttcagtcctttgtctcttactcctcaactccaaatctatagtctggtcatggacactcgagggcagagaatatgtccgagatggaccatctagggctactacttccttatcccgcatagggaagatgctctcaaagaatgtcacatcccgagactccattattacatttacagcgatttcgcttgtctcggaatggaccactanaaatctataagctgcactattatgtgcataacccaggaagacacagtctacggtcttatggcctatctttctcttcttc

SEQ ID NO: 41502 - DNA, 366 bp, Zea mays
ttattgaagcggccaacaagcacgcgaatttgctaaagagttatgagatattatgttcgtgcatcgattgtgataataagatagctgaaagggaaatccttgggccatttctaagtattttggtgattaagtgtccaacataaatggttatgtattaaactatgccaaatggtgaacaaagtgcaaatcaatacaaaggtatgattctagacttagtacattggtttttgtgtactaacatatttgtctaagtgctagaatcagagaaaagacaaatggaaaagacttggctcgggcagccaagactctgctcagtctgggtgcaccagactgtccagtggtgcaccggacaatgtcctgcgcacc

SEQ ID NO: 41503 - DNA, 449 bp, Zea mays
  unsure (1)..(449): unsure at all n locations
agctngnatgcatgtgttggcggcggttgctatatggtatgcccgcagcctgttgttagtgaacgaagatgtaaaattgaaatctagcctcatggtctgctgtcacgtgcatttgctgtgctcgattattttactccaagagcatttgcttcttcttaagggcatgattaatataacatgcatatgaccgtataaaacattgttttgtattgtgtttactgagtgaagtttaaaagatagatatagatgagtaagctgttggagatatacgaagactatttccaaccgtctctctatcccaccttctattccacccattatttcaaactttattctgtaaacaatatagtccacaatgtaatacagtacanacgaccatacacacgatctgctgctatccaacagctcttctattccaaacttcagttgtaaacaaagctgtattttac

SEQ ID NO: 41504 - DNA, 341 bp, Zea mays
tctaaagggagaacacgtgagacgcctttctaattttcaatttcgaaaaagatagaccttgtgcagattgtcaagcaggtaaacaagtgggaggagcacatcacagcaagaatgtgatgaccacatcaagacccctggagctgctacacatggacctcttcggacccgtcgcctatctgagcataggaggaagtaagtatggtctagttattgttgatgacttttcccgcttcacttgggtgttctttttgcaggataagtatgacacccaagggaccctcaagcgcttcctcaggagagctcacaatgagttgagctcaacgtgaagaagataatgagcg

SEQ ID NO: 41505 - DNA, 366 bp, Zea mays
cacctatcaaactcaagctgagaggattgaagactcagattttttattctatcatcctcaatttcatcatttcgttggctttgttgagtttacccatttatggatgaagaggatggaatgacaacaataccatcatcatctttcattggctttatttcaccaatagccatggttttcaaagcgtttctcatatgaactccaccaacatcatcaaggttttcattttcatcttgagatccatttgtttcatcaaactctacatcatatacctttttaatgatcccatgagttctgttgaaaaatctatatgccttgctatttaagaatatccaatgagaaaaccttcattacatttcttctaaaatt

SEQ ID NO: 41506 - DNA, 452 bp, Zea mays
  unsure (1)..(452): unsure at all n locations
cctgctgcatgcagctccaagtttaaggctcctcttcttttgttttacccacaagngataataggtagatgtgccattaggaagccaacaccctgttaacacctagggtgttacagccctccccccttataggaatctcgccccgagattaatgggggtgctatgaaggtgtgctggtgtgttacccttccctttatccaagtatctcttgttaacatctcttcgaatgtcattctctatgcaatttcagaaggaagccctttttaactacccttgtcatctaagttnttcttatatttgtattcaaacggcacgtggagggtggggttatgggttacgtactgactcctttgggcaggaagacggggaagcgagagcgtataanatcctcagcctcccatgtagcttcttctactgaatggtgacttcactgaaccttatacattctgatc

SEQ ID NO: 41507 - DNA, 370 bp, Zea mays
ttggccccacctgcaggctcgcatccttctttgttgtgggcccaagggccactgtcagtaccctgaaagtaggataccccttactactgtataaagacgcagtacccacgcggctatcttttgtcacgtggtaaaagaactgtatgtggggccaggccatgactcgccccagcctcaggtgactactctgggccagcaacagcgcctgaccccaccacatgggcgggcccggggccgccacgtgtccagagaaagtgatatactccaaagcatcaacagtgagtccggacctccatgggagagtgttcgacccgtgccggacccctgtatatagggtcaaggcttcatgtttggcccagaacttcacgtg

SEQ ID NO: 41508 - DNA, 368 bp, Zea mays
  unsure (1)..(368): unsure at all n locations
ccacagccagcccatgctagactgagcaaataagcatgcatctagaccggcctcctcttttgcaaaatcaactaagaaaaagtgtgtcgtctaatacacccttaaaagctaatgaaccatcacttcttctaaagacagaaacatctacatttgtgaatagacaattatatcccatattgcataatcgactaatagaaaacaaattatatccaagagactcaactaaaaacacattaaatatagagtgctgggatgaaatagcaataatacctaaccctcttaccttgccttgattcccatcaccgaatattatngaatcttgggaatcctcgtttatgacataggaggtgaacatattcttctacccc

SEQ ID NO: 41509 - DNA, 366 bp, Zea mays
tccctttaaccccgaaacgtgttactcccttcattgttgaaactttcaggtagacataatctccgaccagaaagagtaagggcatccctcgtttgtctgccgaacttttttgacgagcttgagctttcttcaaattacgaattattcgctgaactttttctttggtttcctttaccatatctggcctgaagaaacttctttcccctggttcaaaccaatttaatggagtaccaacatcgtcgctatataaagcttcaaagggtgccaacttaatgctctcttgataactattattatatgagaactccgctaacggtaaacattcattccatttttgtggagattccagaacacatgcccttaaca

SEQ ID NO: 41510 - DNA, 300 bp, Zea mays
  unsure (1)..(300): unsure at all n locations
gcttctnaagggagaacacatgttgtgactattatatgttcattnngagaaagacagggtttgtagcgcatgtcatgcacggaagcaagtgggtgtttatcattcacataagaacatcatggcgactgacaagccactcgagctcctacacatggacctattcggcccgatagcttacataagcatcggtgggagtaagtactcgctagttattgtagatgactattctcgcttcacttgggtattctttttgcacgaaaaatcttctaccccagaagaccttaaagggattcttgagac

SEQ ID NO: 41511 - DNA, 213 bp, Zea mays
tgatggggctgagtcttcggcgccgtctaaatcttagtattagagtgggtacctattggggtgggaggaggataatggttacccatgtgctgaaccatccattttggccgagccttcggtattgaccaaccttgtaataaatggaaaggctactaatcaacggcatctttccgaataactgtcagagaaggctacaaaacacaagatgcatta

SEQ ID NO: 41512 - DNA, 442 bp, Zea mays
  unsure (1)..(442): unsure at all n locations
agctcgacagaactgtataaactctttaggttttcttaggnnctagggtgacctaacacacctagaggtacatgattttctaagtattatctatctcaatagattgcataacttaattccatttatcctaatgagacacaaaaattataccagggatagattcatactttacatattacttgttggtcacttgttctcaaatgctataaatcaagaacaaggcaacacaattgctaaggattaaggacctttgtcctctaaaacattatctccctccagatataatgatcttcaaacgaaggttatgaaggacagaccttcatcatcttatgagaataagaatttatggagataatgtatgtcattcattcatttattcatatatttatttcataacatatgtacatgaacattaacagaatatatattacattgatacctt

SEQ ID NO: 41513 - DNA, 340 bp, Zea mays
tcagctccatctatggtatgtattttctttgaatttgtccaacttccttcagcccttctagcagcttcttgacttccgtggacagcaatgggcccttgttccgaagttatcttcatgcataagtatgctggatgaagtattgcttcgaaggcatttagtgtccctcgaccaatgattgcattatatgggtattccatgtcaacaatgtcaaaaacaacttgctcagttcttgtgttgtggacatagcccaacgtaactggcattgtgatttttgccagtgccacaatctgccgtcctccgaagccatagagagggtgtgtagcatcatgaatattgtcct

SEQ ID NO: 41514 - DNA, 388 bp, Zea mays
taccaactttctgcatatattttaagtgccggaaagaagttcttctttattgataatgaattctagattaacacctcacatgcatatgtttctgacaggaaacaggcgagcttgagagctatatacattcagtaaaggtaacgccacacaaactctacaaggtaggtgaaaaaatgcactctatgtgctcaaatgacttattcaatctaacgtcaccatgaaactgcaagaactgaggctctttcgctctaaagagggaatccattagcattttattgtacagactacagaaaacacaaaatagcgttcttttgtttgcgagaacaaaattaaagtgatatgttcgtgaatactctctgagctaggttatcatggttcactaatataa

SEQ ID NO: 41515 - DNA, 342 bp, Zea mays
ttcttcggcggcataacgaaggttagtgcttgctttatatggtcgaaagatttcaccggaggtgggcgccaatgttggggacttgttctcaaatgctatgaattaagaacaaggcaacacagaatgttaaatattaatgcccttcgtcctacgaagcattatttcgcttaggatataatgatcttcagatgaaggtcatgaaggacatacctttatgattgaagtatatgttaataaaagaagaaacatatgaaatataagagacaatataaacaatcatataacattattaatttggtctcattatattatcctagagagacagaaaccatactggattat

SEQ ID NO: 41516 - DNA, 479 bp, Zea mays
cgatcctctgagtcacctgcggcatcaagcttgcctacgaccaaccgacccgtatcttatcacattcaatggctcaacaatagtggtaaggtcaaggtaaccaagctggtacgaattaattttgctataggttcatatcgtgatgttgttgactgtgatgttgtgcctatggatgcttgtaatattctgctaggtagaccatggcaatttgattcagattgtatgcatcatggtagatcaaatcaatattctctcatacaccatgataagaaaattattttgcttcccatgtcccctgaggctattgtgcgtgatgatgttgctaaagctaccaaagctaaaactgagaacaacaagaatattaaagttgttggtaataacaaagatgggataaaattgaaaggacattgcttgcttgcaacaaaaactgatgttaatgaattatttgcttccactactgttgcctacgccttggtatg

SEQ ID NO: 41517 - DNA, 372 bp, Zea mays
ttatatatagaatcgagctcggctccaagatctatggcgccgagctcggggccacgtcggcgccacgacgtctgtttgtgccagcgcagcacgtacctcggcgccatagtctatggcgccgagctgtgttacctcggcgccataggctacggcgccgagcaaagggtccaaaaatgacattaaaattttttagggtctaaacatgatttattattcgagaaaaggctaatatgcacaaaaaatcgggagtttttgtcaccggaaccatttctttcttatagtaacgaacatgcccatatccatacttttggttcaaaacttcatgttgggggggtttaatccactctctttgtctcacgtccccattttcga

SEQ ID NO: 41518 - DNA, 437 bp, Zea mays
  unsure (1)..(437): unsure at all n locations
agcttggaaattgaaactaggtgttcactattttctttaatgtcaaaatctttacacctagtacaaatttcaacatgttctacacaagaattggatttatttgctacttctaatttagcatttaaatcattgttgacacctttcaaagtagaaatggtttcatgacaagtagatagttcaaaagaaagcatttcatttcttttaacttctaaagcataggatttttgtgcctcaacaaatttatcatgctcttcatacaacaaatcctcttgcttttctaaaagtatattctcttcattcaaggcatcaattaattcacttaatttgtctatcttagatctatctaagcccttgaacaaacatgaataatctacttcatcctcatcactagattcgtcctcacttgaaaagcatangtagagttgcgagacatacct

SEQ ID NO: 41519 - DNA, 375 bp, Zea mays
tcctcgcacataggtaggatagtgtttcaaatcatatgctttaacaatgagatgaagccatgaaggcatgaagcatgtgacagaatctgactgaaactgaactaactaaagcactgaaaaattatgttggttacttgatcattttcatgcttcaaaatacgcatgaagccatgacattactaatgtctaaattgtggtgtaactcttaaaagtgttttcctaggcagtcatcaagcctagctagccaattttttccacgtaggcaaccacctaggcccacctattgccaatcatatgctagtccagctgcctgactaaatgctcatggagagagtgattttttggtaacaaacagaaacagatgtcatgtatttg

SEQ ID NO: 41520 - DNA, 471 bp, Zea mays
  unsure (1)..(471): unsure at all n locations
tcttagacacctgaggctgcagctttaatgaaaaggttgtgccgctatgtttgtattacatatcntacatacgaggaacttggattgatctataacatacatatgttttatgccctcgatcatgttcttttaaacatttctatctttacttattttggtgctcaagtagtacaagtcatccctggacctcacaagttcttgtgcaaaatatgcatgtgtatgacgaggatgtgctacaacttgatcctctgagactaatgagtttgcttgagtacttatgatatagtcctacagatgaattgaaagggaaaatgtggacttggacaaagaagaagcttccactacattccggtatcaatatcttgtcccatgtccctatctgtgttgtctcattgccttccggtatacttgtgatttatgtgaggcaatggtgttaaaaggccaaaaagttcttctgttttggcgcttaat

SEQ ID NO: 41521 - DNA, 360 bp, Zea mays
  unsure (1)..(360): unsure at all n locations
gtctgactgatcatatgatgtccttctcttaaacttcatcctactcacctctctatcgtgtaaatcatgatcgaaataccattgctttgtatacctttgatggatgtgcctatatcttctctagaaccagaggaaagctatcggtggatgtgaccactatcaaaaaccatcaacctcaaatactcacatcttaagagtatnactggatacattcagggtaataaccttatcttacatctcgtttgatcttataatttgctatacagaataatactctggctttcagtcatcgtttcgaatatttggatatattactacacattccctttgttatgacaactccccttattcactcttcat

SEQ ID NO: 41522 - DNA, 475 bp, Zea mays
  unsure (1)..(475): unsure at all n locations
cacctgcngcatgcaagctttcgtttcaaatgttaagctgagactgtgttggtgactcgcacgagaaacgagtctcggtgtaatgtctccgtctgagtccattaaagaccgtgtcgatgtaagcctgctgactctatgacactntaactggtcacatgcctcatcatgggtaagccttgcctcgggcagactaaggccagaataagataacacgaaatgggcgtggagcggtggcgagagtagcgtgtaccctccgtggcaagaggctggacggtggtgtatctgtgctctcggttggcgtgaacctgatctggtcttaagaaccccggtggcgggttgacatatgcaagggttaagtgctacatatgtcgtgtgatcggagatcctcagctgagtataatcaattctgatcgccgtaccttcgcggatatgaagacttggtcactgacctatacgtataactccagtaaagatg

SEQ ID NO: 41523 - DNA, 343 bp, Zea mays
atattaacttgtgaccgtctatctccgtttgggccaacagtttcatttatttgttcaacgtggccatcttccaggaggattgcgttaaatctatgcatgcccaaaataatacgtggacccctgtggaatgaccctcagggtgatacaagctcttcaggattgttgtcgacacccacggcacgggactccatcaacaacaatggcgatgggtgaaccgaccacactatcagtatcatcttgcgcccaaccccacccatttgtcacctaagaggaaaaattagtagcctggtcttactgccttacaggtgacaactggtgtttcacgtgtggacacaccggacac

SEQ ID NO: 41524 - DNA, 354 bp, Zea mays
taagctcatcgctcatagacgccgcacgggagaactctttttattttaccaatgccgctatcccataggggcctttgcttcttgtccccacacaacttctattgggaccctgcagcttgatgcctaatcaaacattggcattcttttgaccaaaaggggttaacacacggtgaataaatatccgaatgtgtacttgtgcgcaataaagttcccatgatttcaagttcgcaattaccaccccatgagcacctttagcatgatttgcctatcccacaaaatactctgattacactacaataattctatttttgagtccgacaaggtttttatgactccaccatttctctttatccc

SEQ ID NO: 41525 - DNA, 451 bp, Zea mays
agcttgccaattcttatcaaagcaacattatttacctacatagcagctgcagaccatccctataatatggccatttgcatgatgggggctggacatgatcggacccttcaagaaagctcagggaggctatactcacgtgctggttgccattgacaaattcacaaaatggatagagtataagcctattgcctctttaacctcagccaaggcagtggaattcatacaagacataatattcaggtttggggtaccaaatagcatcataactgacctgtgatccaacttcaccagctctgaattcttcgacttctgggagcaacaaagcatccagattaagtatgcattagtagcgcatccaagagccaatggccaagtagaaagagccaacggaatgatactggaagcactcacgaagaaaagtgttgacaagagtgaaaagcttgcatgaaag

SEQ ID NO: 41526 - DNA, 346 bp, Zea mays
  unsure (1)..(346): unsure at all n locations
tcaaaacttaaaagctaagcaaaccttggtgcactttatctaaaaattgagtgggcgggagcgaatggcaagagagcgtgccaaatgagcttgcggtatgatcttatttatacgcccagtgcgttgaaaatggaacaaccccgcctgtcagtgaatgttgctattctagcaaagggaaggtgttttttcggaccttcggcttatagccttcgttcatgtcgcaatctaaatttattttaaacaagtttatattgcgaggggctactgttgggggccttttgcttacgaaagtccttaaaaacaggatttaacagcnattttctggaagataacgtgtgaacaggta

SEQ ID NO: 41527 - DNA, 418 bp, Zea mays
  unsure (1)..(418): unsure at all n locations
cattactccttctaaagataattacatgaacatttgtaataagcaattataacccatatgacatatgtgagtaacattatgtttattaaatccaagcgattctaccaaaaagaacttataaattgaatgctcggtagtaatcgcaatcttacctaacccctataccttgccttggttcccatcacaaanaataatcgcttcgcgggaatatttgttcttgacgtaggaagagaacatctgcttctccctcgacatgtggtgtgcgcatccactatcaataatgcaatttatgccatcagatacataaacctacaaggcgaaattacgcttgtggtttacgtactcaagtagtgttgggtcgtgtcagcttagtcacataagatattggtacccaaatgcaaagtttaccattcttgct

SEQ ID NO: 41528 - DNA, 370 bp, Zea mays
tcgtcttgaccatgcttctgtatacccgctacctgtttccgaagatacctgctcgcatacttagaaaacattgtcaaatcacgtttttgaggaccttctgaagccgaaggcccccaacagtagcccctcgcaatattaatttgctgtaatgataaattcatgttgcgatatggacgaaggccttaagccgaaggtccgaaaaaacaccttctctttgctagaatagcaacagtctttgacaagcggggccctccagtttcaacgctctgggcgtataaataagagctcattccgagtttattgggcacactctcttgtcaactgcttttactcacccaacttttagccctgccgcaataacactagcttg

SEQ ID NO: 41529 - DNA, 437 bp, Zea mays
  unsure (1)..(437): unsure at all n locations
aacttgctacaggccttcttcttgttcttcatagcangaaccttgctagaacactaccccacttaaaatggatgagggtagaactcctgaatcttgaggatttgaactccttgtattacctcataacaagggcgttacaaggccttcttctgttgttgctgcttgagcatgctgcggagaaatgactgacacaaggttgattctgggagaaccttcttctcatcttctcttcactattttcttttcacttctcacttctcactgcttctttctttctctatgctcgttccactggaggattctatcaaagagtattaccatcatacagaggaggaaaccacagactatgaaccatgtataacagtcttcaacccaagaatcaccaagcattgtgatcttatgggcgacggagtggaaactggagttgcttgcgattt

SEQ ID NO: 41530 - DNA, 343 bp, Zea mays
tcggaagataacgacttcatcatcttcgggagtcattacagttctttctccgacatctgctctcacaatggacatatctcgaaaatatctccccctcatgttttcaagatgactttgcccaatagttgattttctcaagactgaatggcttggtcgccatggtcgatcttcggaatcttcacccccactgtctgcattataactgtcactatcaccagtatcttcagataaaccttctaaaatctcccttgtaatcttctccgtattcgtctttgctattgactcaagaaaacccagatgcatctttttagaaaggctcaactttatttctgcagcaaccttc

SEQ ID NO: 41531 - DNA, 448 bp, Zea mays
agcttaaggataataagtccctgtctataggtttgacactcacggatatattcgtaagcccaagccaagcagttttgaatcgttctccctttaatgaagccatactggtttttgtgaactaacaatggcatatttgtctgaagacggtttgctaggagcttcgtgagaattttcatgctattgtttagaagcgatatcagcatgtaatctcctacctcttgtggattgtccttctttggcactaggatgatgaaggagccattcatactttttaagcacacatctacttgatgaaacttgtcgcataagtcatagaagtcctgtgcaatgacatgccagcattttttaacaaaattggtattgaaaccatcaggacctgtggatttgtccgaaacagcgacttaataatgtattaatctcttgttagtgaaggggaactaaccattgc

SEQ ID NO: 41532 - DNA, 384 bp, Zea mays
ccctagtcctaagtgaacgaaatgctgattgtttgcttgcagcactagccgcccatgccaggaaattaagaacattaatcctgtggcccgaacaagatgtccaaataagaacattcaagcccataccgataaactattcagcccaaaagggagaggagccgcggtgcccccccggaccgcctggatcccatgagtgaatagaaagtttcaaaacttcttgtttcagagggggaatcaatcaagctgctatgagttagcatagccccaaagaaagtagtctgcgatcccctttgaagtaagtgaaagggtggagcgagcaaaccggatagccccatagagtatcggcgacgaatttcccgttacaccgaattaaatcgggattac

SEQ ID NO: 41533 - DNA, 278 bp, Zea mays
tactcatacatcttttaaagcagcttctccagagtttggggagggttcctagtgaagtatcgagccatgggtcctgggcgaagacccttgatcatggcctcaatgacaatttcattgggcactatgggcgcttgtgctctcattctcaagaaccttcggacatacgcctgaaggtattcctcatggtcttgcgtgcactggaacaaggcctaagttgtgactggcttcctttgaaagccttggaaactggtaaccagcatgttcttgagcttctgcca

SEQ ID NO: 41534 - DNA, 269 bp, Zea mays
gacagggtttgtagcgcatgtcaagcagggaagcatgttggagttcatcatccacataacaacatcatgatgaccgaaaggccacttgagctactccacatggatctattcggcccgattacttacattagtatcggcaggagtaagtattgtcttgttattgcggatgaatattctcgcttcacttgggtgttctttttgcaagaaaaatcgccaaacccagaaaccttgaagatattcttgagacaagctcaaaaagagtttggatt

SEQ ID NO: 41535 - DNA, 323 bp, Zea mays
  unsure (1)..(323): unsure at all n locations
agctcctaaagggagaacacgatggcaggactatacttattgtttatccngagatagacacgactcgcggcgcatgtcatgcggcgaagcaagacggaatccaccatccacacaagaacatcatgacgaccgacaggccgctcgagctactccacatggatctattcggcccgatagctacataagcatcggccggagtaagtatcgtctcgatattgcggatgattaatctcgctacactagagtattctctctacaggagaaatctcaaacccacgagaccctaaagggcttcttgaaacggcctccaaatgagtttggct

SEQ ID NO: 41536 - DNA, 378 bp, Zea mays
  unsure (1)..(378): unsure at all n locations
cgtgaggagtactgtggcctttgctgttgactctctctatcattagnttgagtagaattgtgaattgacctgacgtgcctcggatggaatctttctccgaagcccctggtcatttcagagaacctgaatgcttcctcccttctttggcgaaaatcattgtcagctcgaatatactcgtccatcttctggagtagcttctccaaagtttggggaggcttcctggcaaagtattgaactgaacggtccggccgaagtcccttaatcatggtctcaatgacacattcattgggcactggtggtggctatgccctcagacgcaggaaccttcggacatacgcctgaaggtactcttcgtggtcctgcgtgcactggaataac

SEQ ID NO: 41537 - DNA, 440 bp, Zea mays
agtctgggaagattcttcattccaacatgtgctagtctgcgatgctagagccagcccatgttagtcttagcaattaagcaggtgttgagttcacctctatcaaaatctactaagtatagctgaccctctaacactcccttaaatgctactgaatcatcacttcttttaaagacagtcacacctatatccgtaaaaagacagtttgtacccattttgcataattgcgaaactgaaagcaagtaataatctaaagaatctgcaagaaaaacactggaaatggaatggtcaggagatataccaattttatccaatcctttgaccaaaccttgattgtcatccccgaatgtgatagctcgttggggatcttggtcttcttgtcgaagagaacatctcttctccctgtcatatggttgtgcccccctatcgagatccaacttgag

SEQ ID NO: 41538 - DNA, 312 bp, Zea mays
ccatgctcgtcttagctattaagcatgcatctagacacggactctttttttgcaaatctattaaacaatgtctgccgtataaaatacccttaaaagctaatgaaccatccctttttctaaagacagacacatctatatctgtaaacagacaatcatatcccatatgacataattgactcacagatagcagattgtatccaagactttcttctacacatacattagagatacaatgctcattagaaatcgcaattttaccttaaccttttaccttcgcttgtatcccaacacggaatcaagtcgaatcctggg

SEQ ID NO: 41539 - DNA, 412 bp, Zea mays
  unsure (1)..(412): unsure at all n locations
agcttgttcanaacatgacgacgcagagcgatctcttgtttgcagaatatntgctgcgcgcaggtggcggaattgaggaagcgaacaacgatggtgatgatcgtcttccaaatgacgtactgtgtgccatatagtggtaacgaccgcgaccttgatagactgatagatgacatttacccccgatctaaatgaaaatatgtctaacacaagctacatcacttcaagagcaatatttgctacacggaatgactacgcggatatgataaatatgaggatgatcgatcgcttccaaggggagcagatgatgtaccatagttttgacaccgcggtggatgatcctaataactattacccatcagagtttctaaacacgctgactcctaatggactacccccgcacgttctgaagctc

SEQ ID NO: 41540 - DNA, 363 bp, Zea mays
tacgcttggctggattggttgtggtgagagtcaagagaatctcttcttttttatacctcaacccggcggttctgagttcagtgctgagaaatgccttgcgttgggttatccaaatcatacccaagattacatctatatcctggcccttcagaacaaccatgttaccaggaaagtatcgtccggccattattactggcactccatacgccacttctttagtataaatgtgtcccccacgggaatgaatactacatccctcctttgattcatgggatgcaacatgatgttgttccacaaacttcatgctaataaatgtctgggaagcacctcaatccaaatgaataattgctgggtgactggcta

SEQ ID NO: 41541 - DNA, 441 bp, Zea mays
agcttgtggaaagacaccgcacctacagtgcatgttttaattgaagggcaacgtggaacggagggaaaacgggagatagctcgcggcgaccgacggcatggctgatctgccttgcgtttgggctgaaaacgaagggttcgccatggcgcacgggccaaacactgaggctagggcacgacccctaatataaactaagaccaagcatgtggaaagacaccgaacctaaagtgcatgtcttgagtgaagggcacggtggaacggagggaaaacgggaggaggcacgctgccacgggcggcatggctgttcggccttgcagttgggctgaaaacgaggtgttctccatggcgcgcgcgccgaaactgatgctcgggcacgaccccgaaaaaagcctaatccatgcatgtggaaagacaccgaacctatagtgcatgccttgagtg

SEQ ID NO: 41542 - DNA, 370 bp, Zea mays
tggacttagctaattttggaggtcgtgcccgagttttcgtttttggcccgcgcgccatggcgaacccctcgtttttagcccatacgcaaggtcgaacagtcctgccgcccgtcgtcgcgtgcctccgtgtcgttttccctccgttccaccgtgcccttcaccaaagacatccactttaggttcggtgtgtttccacatgcttggacttagtttattttcgggttcgtgccacagccaccatttccggcccgcgcgccatggcgaaccacctggttttagcccacacgcatggccgaacagacctgccgaccgtcgactggggcctccgtgtcgttatcccttcgttccaccgtgcccttcacccaagaaa

SEQ ID NO: 41543 - DNA, 239 bp, Zea mays
gcgccatgggcgaacccactattttctgtccatacgcaagggcaaaaagcatgcccgccgttgccttgcacattcgcgccgtattccctccgttaccccttgctcttaacccatgacatacatattacctctggtgctttttcacacgcttggacttaacttatttccgggggcgtgcccgaacctcagatttacacccctagcccattgacaaacccatcggttttgggccaaacact

SEQ ID NO: 41544 - DNA, 379 bp, Zea mays
  unsure (1)..(379): unsure at all n locations
cancgcaagctggtggaatggaaagacaacgaattttatgtgtatgtatggctcgaatgaagggcaaggtggaacggagggaaaacggtaggatgcgcgcggccacaggcggcaaggcatgtccgtcttgcgtctgggctgaaaacgaagtgatcgccatggcgcacggtcctaaaacggaggctcggtcacgaactagaaaataagctcatttcaagcttgtggaaagacaccgaacataccgtgtatgcttttggtgaaaggcacagtggaacggagggaaaacgacacggacgcacgcggcgacgggcggcatggctgttcgacttgcgtatgggcctaatactaggcgttctccatgacgcgccgggcaaaaaca

SEQ ID NO: 41545 - DNA, 429 bp, Zea mays
agcttagccgcataacaagatatgaccttgttatgtgaaaccaacacagcacccgctcctgctccgaatgttacccaagatccatcacaaaacactatccatgcttcggcgtctttatgtgcttcttcctcctgagcccctggcgtccagtcagcaaagaagtctgctaacgcctgcgactgaattgaagatctatgaacatattcaatacaaaattcattgagctctgtagcccattttccaatccttccagtaacttctaggttcctcataatatccttcagaggtcgtgaagaaggaacgattatgcttgaagcttgaaataatgctgaagctttctggatgccatcaaaacagcatataacaccttctctaagtctgtatagattttctttgaacaatacgaaacttcagatacaaaatatactg

SEQ ID NO: 41546 - DNA, 261 bp, Zea mays
agcttgagtcttctattgtgccgagatattttcttgccctaagacaccgacactaggctgtgatacctgcagttgcatagtagaatatcacacatcacagtaatcgctacattgctacgagaccagatgactaaagtgtactatcagtggagactcgtgagtgtgcgccttcagatacttgtggccgcgctcacagttcgcattacactcatgatacctgacgtgccatctgacctgaagaatctgacatgtctaaccact

SEQ ID NO: 41547 - DNA, 449 bp, Zea mays
  unsure (1)..(449): unsure at all n locations
tgcttctanagggagaacacgtgatatgtttatttaatgtacacttcgaataaagatagaccttgtgcagcttgttaagcaggtaaacaagtgggaggagcacatcatagcaagaatgtgatgaccacttcaagacctctggagctgctgcatatggacctattcggacccgtcgcctatctgatcataggaggaagtaagtatggtctagttattgttgatgacttttcccgcttcacttgggtgttctttttgcaggataagtctgaaacccaagggaccctcaagcgcttcctcatgagagctcaaaatgagttcgagctcacggtgaataacataaggagcgacaaccggtccgatgttaataaccttcatgtggaggagttccttgaggaggaggggatcaaccaccagttctctgctctctacacacctcagcacaatggtgt

SEQ ID NO: 41548 - DNA, 370 bp, Zea mays
tctaaagggagagcacatttcgggactatcatatgtttattttgagaaagacatgggttgtagcgcatgtcaagcagggaagcaagttggtgttcatcatccacacaagaacatcatgacgactgacacgccgctcgagctacttcacatggacctattcagcccgatagcttacataagcatcggcgggagtaagtattgcctaattattgtgtatgattattctcgcttcacttgggtgttctttttgcccgaaaaatcttcacacccaagagaccctatacggattcttgaaacaggctccatatgagttcatcttattgactaaaaaaattataagccattatgggaccgagtttagaaactttca

SEQ ID NO: 41549 - DNA, 407 bp, Zea mays
agcttggggccgatggagaaacaaaattctttaagtcttggctgtcaaactgcttgccgttgtcgactgttaattcggacggcactccgaagcggcaaacaatgttttgccacaaaaatatctgggcagtctttgatgttattgtagaaacagcccttgcctcggtccatttggtgaagtattcgacggcgacgaaggcgaacttaaggttcccctgatcagtgggcaggggcccgacgatgtccaggccccagcgctggagacgccatgtatgggcgatcagctttgtatactgcgaggggctgcctgaccgaggagaaaatttctggcatgctttctaggatcttgaaacccggtttgggcgcagataattgcgggccagtaaaaaccctgacggatcactttgg

SEQ ID NO: 41550 - DNA, 347 bp, Zea mays
tctatcactgtacatacatgtgatcaagcattatatttttatatactccacatacatgaaaaaacaaaaacttagcccatgccaccatttatacattcttggaatggaaattgtaagacacgtccaacaagagttgattcatactcagctcatacaatccttacctttaataaattagtaaagcaatgtgcaaatactcaaagttctaatgggactgcataaattaaaagatagtaattagagtccaatcatcttttagtctatgatcatggccttaaacagcgtattggcaactcttctatgataatagggtgaaaataatacaggttataactacatatacaact

SEQ ID NO: 41551 - DNA, 451 bp, Zea mays
  unsure (1)..(451): unsure at all n locations
agcttgcaacatcaggcgtgtttcttgttgtttatacgngctaaacggagcttcccttcgcattgctttggtagttctgagtaatacttccgccgagggctagctatgtccgctattagccgtgcacctaaaacacatttgtttatgctaaagtgaaggttttatgtggaccttcagcagagtaagccctcaacagtaagggttgaaagagacctattcttagtcgactcaatggggagtaggttcttcaaaatcaaacctcaaaaaacaaatcgcctatgttctttgtttttatccttgattgtgatttatttattccactcccctctctctagttctctggcttgcgattggatttaatataattaagttgctcccacaagaaattccacaatcatttgagcaacttgngcaagaactctctctccctcaccccgattatttatattct

SEQ ID NO: 41552 - DNA, 224 bp, Zea mays
actatagacaactgcagctcgtattattttatttcacaccagtttttattttttgctcaccattatattggacaaaccaatggagggacacactcccctcgcatagctgaaaacaaaggatcctaaaaggaggacccagtgcttccgcacttcagtctagccttctctcatatggtacccccttggagcaaaaggttcataagattggccattacttacctaaa

SEQ ID NO: 41553 - DNA, 382 bp, Zea mays
ctgaagagggcccgaggggcactgtccgtacccttatactatggtaccccttactactgtataaggacgcaccacccactcggctatttttagtcgtgtgggaaaaaagctgtatgtgggactaggccatgactcaccccatcctcgggcgactactgtgggtcatcaacagagcctgactccaccacatgggctgattcggtgccgccacgtgttctcagaaagtgacatactccaaggcatccatattgagtcctgacccccatgggagagtgtcggacccgtgccagacccctgtatatactgtccaggacaccaagattggccctgaaccttcacgtgtgctaaccggaccaatatattgggatccggactccctgta

SEQ ID NO: 41554 - DNA, 274 bp, Zea mays
aaaactaacaccacggggtgaacgaaggggaaggaaagtcattaattaaaacaggaacgaccacatggcagaacgtaaacagctcggcaccaaaaacacggacaaaaatacgaacccgagtagacaacgtaataaagaactggcatcgatacagtcaaaaggccttatagagaacggcaggggtcaaacatgcgaagaacgagaggaagaaataaacggtcaaacagcaggcctctgctgcgggaaggcctaaaaccaaaagacctgaaaggga

SEQ ID NO: 41555 - DNA, 175 bp, Zea mays
tctatggttggacacccagtggcctgttgtggtgccagccacccaagacaccttgagctttgcagaacaagcatttgctcttatgaacaaaagcgttcatagttatatgtgaacatgatgggggcttttggcattacacaccttcctttactcttaagggcaacgctatggggat

SEQ ID NO: 41556 - DNA, 317 bp, Zea mays
tgaaggaggttcaaactgaattatatacttatgtctttcaacaagttcaagacaatgagaaagaagctcatgaaaactacgggtgggcgttcgggttactcgaaaatttcgggttgggtaattcgggttttgagaatctatacccgaaattacaacgggttttgcaatacccgaaaaatcgggtactccgaattttcggttcgggatcgggttcgggtatttcccaactattgtgtcggcttcattaaaacacatacaccctattagattagtataaaatattatttggataatgatatattatgggcctataaaac

SEQ ID NO: 41557 - DNA, 468 bp, Zea mays
  unsure (1)..(468): unsure at all n locations
catgcaagcttatgtccgacagtcactctgataaccctctgacgtacctcattacttccgacggcggcccgtggccgtcggacataagcttatgtccgacggtctcctaggggaccgtcagacataaaggagccgtcggacttttgctgttttactgtagtgtgagtaaccaaggtggagtaccccatcaaaccctcgatgactgtggtaaggctaccaagttcatatccaatccagccaataaacagatcacaaacaccagttttctcctcatcaaacaaagcaatggacgccccaaacccacgataaccgtcacacaatagcgcacgcgcccgacttactcccccacacatctgcgcatcagactctattgtcttcaccttcaatgtctctagcttagaagacaacttcgccaattcctcgcgagcggtagtagtttctgctctgctaatntcaacttctaccttc

SEQ ID NO: 41558 - DNA, 374 bp, Zea mays
tctaaagggagaacacattttgggaataacaaatgttcattttgagaaagacagggtttgtagcgcatgtcaagcagggaagcaagttggtgttcatcatccacacaagaacatcatgacaaccgacaggccacttgagctactctacatggatctattcggcctgatagcttacattagcatcggcgggagtaagtattgtcttgtaattgtggatgactattttcgcttcacttgggtgttctttttgcaggataaatctcaaacccaagagaccttaaagggattcttgaaacgggctcaaaatgagttctgcttaaggatcaaaaagattataagccacaatgggacggagttcaagaactttcaaatag

SEQ ID NO: 41559 - DNA, 467 bp, Zea mays
  unsure (1)..(467): unsure at all n locations
cgctgcaagctatgtatgaaaaggagatgatatgaagcttttgtgtgcttgagagagnccattcgattcttatcatctcaagctatcaatcttcaatgatctatatacatgattgacccaaggttatttttcaaattgctatgtcttaaactcatatcatctcgaggaagatattatatgttgtaggaagtgaagagatatcatgtgcaaaaatcaagacctacaacatggaggaaagccaaacgatggtaacatttatcttttaagtgcaagtattatagaatatcatttcttatgtgtcttgtgtagtcacataaaaatatgtagcacttcaaatatctttaattctatattaccattctttgaagaagttcctctcatatggtagattgcatactcatcatttcctctctatggcaatctacatgctataatttgtcgcagtatcctatggcatgtatttcact

SEQ ID NO: 41560 - DNA, 371 bp, Zea mays
tacagccatggtaagtaccataggctaaaatattctaattgactcaagcctaactacgggtgcataggtttcaccgaaatccaaaccttcgacttgggagtattccttggccacaagtcgagctttgatccttgtcaccacaccatgctcatcttgcttgttgcggaagacccatttggttcctacaacattttgattaggacgtggaaccaaatgccatacctcattcctagtgaagctgttgagctcctcttgcattgcaaccacccaatccgaatcttgtaatgcttactctaccctgtgtggctcaatagaggaaacaaaagagttatgttcaacataatgtgcaaacgaaaactagtagtaccccc

SEQ ID NO: 41561 - DNA, 302 bp, Zea mays
gaatcattaaccttcccccgcttaccaacgcatcgaacatcacggatcttttggctcattaaaatagctctcgcatctaacattagattgctcaaagtactacttgacgccctgttctcatgcccatgtgtcatggctccacaacctcgtacatgcccaccttatcttaaaaggggaggcatgcaccgtttctactcaagctgatctacgcgcacttgaagctcactaaaacccatctcaggctcacaacttccgtataatctctcatgctccatacaccacactctgcattaaggtattat

SEQ ID NO: 41562 - DNA, 355 bp, Zea mays
cgaggaataatgaaccacagaaagggccaaactctgcattattgaagctcctaaggcaataagtgaagcaatcaacatgaacaaagaaaaaggtaaagattcaattagacatgttgtttgcactaatcatctctctaagttatccaagagcaaaaagaaaagaggaaaaaggaggtgcttcaagtgcaatgagtcaagccacctcattgcttcttgtccatacaaagacaaggattaagggattaggagatgttttggatgcaatgacaagaatcatatgatcactttttgttcgctcatgaataatctagcacgtgcactcttcgggatgatcctctctaagaatgaagacata

SEQ ID NO: 41563 - DNA, 356 bp, Zea mays
agcttctatagggagaacacttgttatgtttgtctaacgcgcaatacgataaagatagaccttgtgcatcttgtcaggcaggtaaacacgtgggaggagcccataacaacaagaatgtgatgaccacatcaagacctctggagctgctacatatggacctcttcggacccgtcgcctatctaagcataggaggaagcaagtctggtctagttattgttgatgacttttcccgcttcacttgcgtattctttttgcatgataagtctgaaactcaagggaccctcaagcgcttcctaaggagagctaaaaatgatttgactcaaagtgaacaagatagaagcgacaacgggttccaa

SEQ ID NO: 41564 - DNA, 280 bp, Zea mays
acatcacgagacctatagacactcaatcttgggtgccaacgccgtggatgggtgttcctttcatggacgccgcaccgtggtgtgcgcgcgcctcgcctgtgggtcggtcgcggggaaaacaaactcgcgagtactcggattcgaactggagggctgggatttgatccggtgcaaacgaaaactgtggcgcacgcgcttggatctacggctccgataagagtaaacaataccccctccacgcatagaaaaatgggcgtcaaatcttaatccttggggcgtg

SEQ ID NO: 41565 - DNA, 447 bp, Zea mays
  unsure (1)..(447): unsure at all n locations
agctngtgcatagtggagccggccattatcttcttctgctgcacagtagtggctaataatctgctggtttagatgtcacagctctgtcgtcgatgtatattctactgaatcgtggggttcacacttcccaacccaaccgtactccttcgctggtacggactgagtactattgctagtctgttcttgttctaacatgcatatgaccttaattcgttttggctacgtgttggagcaattttgctaaagaaaagattgctaagaaatttgtgattatgtctacggccgtcaatcaaattcttccacacaggcatcatcttcaatttgcctttcgcgccttaatagcattcaccttctttgtcttggtcatgatcgttgtaaaccatgtcctaagactcctgccggcgtctttttgggccaagcactaatggtccctatagctcgctcacg

SEQ ID NO: 41566 - DNA, 350 bp, Zea mays
cgtgattctatcaattgaaagagcacattctttacttatgaatttccatgaaatatcttaaacagattgtattaataacacaagcaatagtttcctatttagcaacctctaataaatgacaagagagttactaaaacaaggaaacctcatgatatgaactaaattaccctttcaagcatcatgcataacatcaattgtcaaaaagatgaaagtagtatgattatttaaataaggtttacatggtaagtttaattcatagcatggcgagtgataaatgtagaagactcaaaaccaatttaaacaagaatgaatacatcgcataggattggttccaacttttttgaatgttg

SEQ ID NO: 41567 - DNA, 443 bp, Zea mays
atagggcgcataattatactcttaatatcttcccgcgttttcaggttattcttcacataaaaccattctgtcatccagtcgccgggccatctcttccgaaaggttggcacgggacagcttgacccggaccgagagacgaaactgtagcagcagaaattattgtgatactgttccttaccccacggttttgtctcgtataacaattcgtgtatattgcagaaacttttcgcatcaggttccagaccttggcttctcacggcccacacgaagatattcatccttatgattgcttcggggataagttggtgaagatagatttcaaatgttttcagtacttctacgacaaagctgctcaggggaaatcgtagtccagctctcataaagcttcggaacactacgacttcattttcctcacgagtcggacaagtcttttctccttcgtc

SEQ ID NO: 41568 - DNA, 344 bp, Zea mays
tcacagggcaagttttgacatccaactgcaataggtggaagaggaggatcaagcttcgatggacgattcaaccaaggcacacaaccacgaaggttatactatgtattttgtggagaaaacaaaggtcatactaccaagtcatgtcaaatcacaatatagaagcaaaaggagcttgtggctgtagcacaaactagccatctgtgatatcccaattttctgaaaaagaagttaaatttctttttctcttttctttcatgttctgtggcattggggtttggagtttcaagaggcattcctcagggaaatagtagatcttttggcatttttctgctggggtccggagc

SEQ ID NO: 41569 - DNA, 332 bp, Zea mays
ttttatccgccatcggaccaccgccgtctcattggtctcgcctccagaccgccgctccaccacaggtcacgccaaccagccttctcctccgccctccgattgataggatttgatgttagccgtctataatggatcctcaaccctaggtgatggtcacccaccattcgtaatttttgttaagccatttcagggtgggtgatgatgaccaatatcaagccacattcactaacaagcatttaattgtctcatgtcagcctaccacacattaacttaaaattcctttataatagtttataccttcatgcaagtaaatattaatgcgctaatttcat

SEQ ID NO: 41570 - DNA, 391 bp, Zea mays
  unsure (1)..(391): unsure at all n locations
gctgcagcagcctcacaagaatgtatctttgattcactagaacgactattaaataaaccatatgaatgataccacntgacaggaactccncctatatgagtgttctctttagaaagaagtttctcccccttttttagagatgaagaaatactccccctgacagagagcctctacttatgaaaaagcatgtgaaaaattataggtgcaagacatggtttgaaaagactaacttcccttatgcataggtaacagcatatgagttaactacttatgcatctttagcaacatggaagcatatgatatgaaatatagtctaatcaaatattggagaagacatgtaaatgatactgaatgttgtctacaagataccaattgaagatcaatggcgagc

SEQ ID NO: 41571 - DNA, 334 bp, Zea mays
ttaaacaattcttatatgatatagattgctccccctatatatgtgctttgagaggaatacaaatttttggtcttaaatgccaagtgcacatacttaggttaatgagatcatatctatatcatagagaatgtgaagtgcattgtgtcatagtataagtgtgatgctcaaatgctcatgacaattgatgcacttatgaaagcatgttataaatatctcaagcattcacccttaaggatttcaaggaggcttaaggaccatccaccttctgaacaaaggcagcttatcctcgttacaagggtaagctttaagcctcttgacaataaaattactttat

SEQ ID NO: 41572 - DNA, 415 bp, Zea mays
  unsure (1)..(415): unsure at all n locations
agcttgcctgtgcctcagtctatcatcttctttccaacggaggggtagaacgcgccaatgggaatatcttcacagctgtcacaaagatgctccttgatgataaagggcagatggaccgatttgttacccgaggcagtctgtgcactaaacacgactgagtgcagggcgaccggatttactcctttttcgccttctatacggatcggaagccatgacaccacaagaaataaaacatgggtcctcgcgagcagtttcgtcatcccgtcccgacgtggaccagccaacttcaatgatctcattgacggagaccgaatctttgccctacatgccctaaacanataccaagcccatacaattgcatggcgcgaccacgcagtcatcccgagggaatttagcgaaggggatctcgtactct

SEQ ID NO: 41573 - DNA, 271 bp, Zea mays
tcccaaccagaacatggcctacaattgtatatgtttgtaaggttctatggtggcggcgctcggttccttttcctgcaccatggcgaagtaacccccgcagcgcggcacatgcttatcaaacccgacaaggccatgagcaccaatccggggaccttagtcctacgcacggtctgccccaagggatctaccgcagcgagccccagcttcttccatggcggatatccaccacacacattcactcgccgggtttcggtatggatgaaccaaaaat

SEQ ID NO: 41574 - DNA, 453 bp, Zea mays
  unsure (1)..(453): unsure at all n locations
gatccttaagcacctgagcatgaagctntggcccacctgaggctcgcattctttcctgaggggggcctcggggccactgtccgtaccctaaaactagggtaccccttactactgtatgaagacgcagtacccacgcagctatctttagtcgcatggtaaaagagttgtacgtgggaccaggccatgactcgccccagcctcgggcgactactctgggccaacaacagcgcctgaccccaccacatatgcgggtccggggccgccacgtgtctagagaaagtgatatactccaaggtatcaacagtgagtccggacccccatgggagagtgtcggacccctatatatacggtccaagcctccaagtttgacttggcccaggacctccatgtgtacggaccggacccctggatgggatccggacccctcccccccgtatggcgttctggccgccc

SEQ ID NO: 41575 - DNA, 350 bp, Zea mays
  unsure (1)..(350): unsure at all n locations
tctanagggagaacacgtaataagtttgactaatttgcaattcgaaaaagatagaccttgtgcagcttgtcaagcacgtaaacaagtgggaggagcacatcacagcaagaatgtgatgaccactttataccactggagctgctgcatatggaccttttcggacccgtctcctatctgagcataagagggagcaagtatggtttacttattgctgatgactattcccctttacttgggtgttctttttgcatgataaagcttgaaccccaaggaccttaagccgctcctcagagaactcaaaaggagtttggcttaaggtgaaaaaatagaaacacaaccggttccagttt

SEQ ID NO: 41576 - DNA, 324 bp, Zea mays
tgtctttggctcatcctccttcttcatccagattttatgataacccgagtagcagtctagtaaactcatgagttctgaagaagctgctgcatccacaagtgaatctattcttggtagtgggaattcatccttcagacatgccttgtttagatctgtgtagtcgatacacattctccattttctattagctttctttaccatgacagtgttggccagccactctgggtatgttacttctctgatgaccctagcacttaaaaatctcttcacttcatttcatgcccccttggctttattatccgacattttccgaaacctttgttt

SEQ ID NO: 41577 - DNA, 456 bp, Zea mays
agctctaccaaatggacatgaagagtgcctttctcttatggaccaatcaaggaagaggtctatggtgagcaacctcccggctttgaagatagtgagtaccctaaccatgtctataagctctctaaggcgctttatgggctcaagcaagccccaaaagcatggtatgaatgccttatagatttccttattgctaatggcttcaaagtcggcaaggccgatcctactttattcactaaaactcttgacaatgatttgtttgtatgccaaatttatgttgatgatattatatttgggtctactaacgaatctacatgtgaagaatttagtaggatcatgacacaaaaattcgagatgtctatgatgggagagttgaagtattttctaagattccaagtcaagccaccttcagagggcaccttcattacccaaacgaagtatactcaagacattctaacc

SEQ ID NO: 41578 - DNA, 462 bp, Zea mays
agctgtctaaggcgctctatggacttaagctatctctataagcatggtatgaatgccttagaaatttcttaattgctaatgctttcaaggttgggaaagccgatcccactctttttaccaagacttgtgatggtaatctctttgtatgccaaatttatgtcgatgacataatatttggttttactaaccaaaagtcttgtgaggagtttatcagggtgatgatgcagaaattccaaatgtcgatgatgggcgagttaacatacttccttgggttccaagtgaagcaactcaaggacggtaccttcatctcccaaacaaagtacactcaagatcttctcaagaggtttgggatgaaggacgccaagcccgcgaagataccgatgggaaccgacgggcatgtcgacctcacaaaggaggaagtccgttgatcaaaggcatacccgtcatgatagttcactactt

SEQ ID NO: 41579 - DNA, 396 bp, Zea mays
  unsure (1)..(396): unsure at all n locations
gctgtctaaggcgctctatggacttatctttcccccaagcatggtatgaatgccggagaaatttcttaattgctaatgctttcaaggttgggaaagccgatcccactctttntaccaagacttgtgatggtaatctctttgtatgccaaatttatgtcgatgacataatatttggttttactaaccaaaagtcttgtgaggagtttatcanggtgatgatgcagaaattcgaaatgtcgatgatgggcgagttaacatacttccttgggttccaagtgaagcaactcaaggacggtaccttcatctcccaaacaaagtacactcaagatcttctcaagaggtttgggatgaaggacgccaagcccgcgaagataccgatgggaaccgacgggcatg

SEQ ID NO: 41580 - DNA, 407 bp, Zea mays
  unsure (1)..(407): unsure at all n locations
ctcgctggggtcgtgaccaacttcgatcggctcggatcngctcgtttgaattttttcacgagctgagctggtatcctaactcggtttcttaacgagccaccttggtttgttaacgagccagctcgcgagctaaacgagctattacatttcagcaaaacgaaactatatacatatcatgtacgtaacaattgatgaatatgttatatgtatgtgtggtgtatataacctataagttaaactaatgattgatgaattatgtctatgtgtgacattggtctatgcgaatataagcgtgggttaaactgctgaacatgtgtgtggatagtgaattgacgagtgatgagtggtgttaatttgcgtgtatattgatgcgcgctgcgacactataagtataattactattttat

SEQ ID NO: 41581 - DNA, 424 bp, Zea mays
  unsure (1)..(424): unsure at all n locations
agctcttatgatctgtatagatatgacagattttttccagcacatagngatgcccaattttgagagcatgaaccacagcagctagctccagatcatgagttgggtaatgctcctcatgtcggtgcaactgccgtgaagcatatgcaattactcggccttcttgcattagcacgcagccgagtccacagccagatgcatcacaataaacatcaaaaggcttggtgatgtccggttgagccaataccggagcagtggttaataatgtcttcaattgttcaaaggcttcatcacacttcgaagaccaattgaatttaacatcattcttcaataaacttgtgattggcttcacaagcttagaaaagtctagtataaatctgcggtgatattcagctagttcaaagaaacttcggacctgatgaacagt

SEQ ID NO: 41582 - DNA, 343 bp, Zea mays
ctgctgcatcaagcttcatacacatctggaccctctttatcgcgctacagtcaacagaggcacagcgtccatcatgcacgctctgttgcaagcaaccacgcgccagcaaactcttgttggcactgcggggaccccagtcacttcaagaacaaccgccctcacttgaaggcaccaagaccaacctactccaactccgtgaatggtcccaagattccatcagcacctacacccaacgagctttcttccagcagccagcagagcaaggctcattaccagggcagggcccgggtcaaccacgtggacgctcacgaagcccacaaagaccgggagtagtgctcggtga

SEQ ID NO: 41583 - DNA, 278 bp, Zea mays
tttgtatccgaaggtcttaggttatcacagaaaaattatacaccatttgagagagtactatattgctgcttgatggccttcacgaagcttccgcattattttcaaacttacaacataattgttccttcttcacaacctctaaacgatattatgagaaacagagaagctactggaaggattggaaaatgggcctgagagctcaatgaattctgcattgattatgttcatagatcttcgattcagtcccaagcgttggcagacttcattgctgactggac

SEQ ID NO: 41584 - DNA, 450 bp, Zea mays
  unsure (1)..(450): unsure at all n locations
agcttacataaaaaggatgcatgctatgactttaccatatataatcatagaaggggaatttttgagacaaggattntgttctccactgttgaaatgtctgtctagagccaaaggtcaagagctaatgaaagagatacacacagggatatgcagagctcatatcggatccaggcctctccttggaacggttctgagacaaggattttattggccgaaggcagcttcggacgtagcggatctagttcaaatgtgtgaaaagtgtcacaagtgcgctagagatcaaaagcaaccttcatctctaactcagctaatttagcccactctggcacttcaaaggtggcgcttatacttactangcccacttccaccactacaagggaacttgagatatgttgtggtagcagtggagtactttcaaaatggatcgaagctaacacctagctacaatac

SEQ ID NO: 41585 - DNA, 276 bp, Zea mays
aagctccgtacccagcaatattaagctgccactaaaatcaaggcttgttgcgtagcaagaattaactttggagggtgcaacccacacagcagctgctcctgccccaaaggtttctcaagaaccgccacaaaataccgcccatacctcaaaatctttaattgtctcttcttcttgaccacctggcgtccaatcgacaatgaagtccgctaacgcctgcgactatattgaggatctgtgcacataatcaatgctgaactcattcacctccgcagccac

SEQ ID NO: 41586 - DNA, 429 bp, Zea mays
  unsure (1)..(429): unsure at all n locations
gctncagcagttntccctggagtagagctttgttttttatcgtctctagcacatccagtatgttgaccatcctttttctcttgggggtcgctgtaagacctttttgtgccttcggcactgtcacttctgccgaagggcttgtaatttctgatatctctgttccttcgacccctatattatcggcctttggctcagctaatttggctgtggatgtcttcggcattgcagccggctcttcaatcttctgcgtaggcacaggttccttggctttagtagccgaagaggtctcaccgccaaattcgggcactacggccagttcaatatatcacggccggtgagtaagaaccttcacctttttcctcttcggcgcgggctcgcttggagcagctgaagcagcattcttcctggaagttgcactctatctcttct

SEQ ID NO: 41587 - DNA, 334 bp, Zea mays
ttgctaccagtgtggtaagccccgtcactttatagcaaaatgtcctatttctaatgacagtgacaggggcgacgacaagaaggggagaagaaaggagaaaaagaggttctaccagaagaagggcggcgatgcccatgtttgtcgtgagtgggactccgacgaaagttctagcgaactctccgacgacgaggacgccgtcaacatcgccgtcaccaagggacttctcttccccaacgtcggccacaagtgcctcatggcaaaggacggcaaaaagaagaagttaaatcttaatccctcactagatatgagtcctctagtgatgataatgctagtg

SEQ ID NO: 41588 - DNA, 337 bp, Zea mays
  unsure (1)..(337): unsure at all n locations
cagctttcttggagttatntcttgactctctccatgtttctcttttcgnctcttggacctgatgcagtgatggggctgaaactgtgtgcaggcgatagttcatccatcaatgtaacactcatttgcttctttttggagctgagcatccttgtgatgtttcctttttggaaaacctggcaattcatcgtctgacagtgcaactgctactagttgttctagggaagaccattgactctttatacccgaaaataaaatccggctcttctggtttgtagtttcactttcgtttgtactgatctggcgacaaggaattccatagtactcacaacaacatgtt

SEQ ID NO: 41589 - DNA, 389 bp, Zea mays
gcttctactataacacatgagacgtacttctatttcactagtctcgcaacataattgtgcgggtcgttacgcacaaaggagaactcgccatggcatggatcattatgctaacagggcagagaatgcaccagctccttcaactcaacaagcaccagcaactgatacatatcagtcaccatctcctacttgggctactcaatgtgactctggtttgcaatttcattatgatgaagaggctgatgtgattcctatgcagcacatgaaaactcctcctacttcaacaccaacacctatagaagcagaatctcgacgcggaaagaaacacaagactaaacctggtagccccgaagaaggattctatgagaggtatctaaagctgacaagggaag

SEQ ID NO: 41590 - DNA, 362 bp, Zea mays
  unsure (1)..(362): unsure at all n locations
acgcaatgggagtggagagatggcaagagctactgtgtacccttcctggccagaggctggacttgtttgtatctgtgctctcggttggcgtgaacctgatctggtcttaagaaccccggtggcgagttgacatatgcaagggttaagtgctacatatgtcgtgtgattggagatcctcagctgagtataatcgattnggatcgccgtaacttcgcggacatgaagacttggtcactgccctacatgtagcaatccagtgaattaaagggttgataaaagacggctagtgcaggtcaagtgattgaactacggtagaaagaactctatatgcacgtaattntacttaacctgacaagtaaaaa

SEQ ID NO: 41591 - DNA, 301 bp, Zea mays
  unsure (1)..(301): unsure at all n locations
gacaaagacggggtgtgtagcgcatatcacgccgggaaccacgttggcgatcatcatccacacaangaacatctgacgaccaacatgccgcttgagctactacacgtggatctattcgcccgatcgattacatgagcctctacctgagtaagtattgactgggaatcgcgcaagattattatcgcttcacttgggagatatgattgcaggaacaatcacaaacccaagagaccttaattggactcttgagacacgttcagcatgagtgcggagagagaataaaaaagataggaaacgacta

SEQ ID NO: 41592 - DNA, 403 bp, Zea mays
tgcagcatgcaagctttgaagcttttcccaacgatgcatgttatatatgggagcgcgcggcttgctgctgtgccatgtataaccgtactccactgcaacaaaacagtatcttctatgacagagacattctcgagcaagataagtggggactacgctgacgcattgcctcactggaagtatattttgcaagacagagcccggaccggcatatctatcgaatggattcagcatcttaactagagaggtattgcttggcgaaccttccatctcatgccaccagtggtgaggataattttgttatggagctgtgacagctcatttattgtggctggccccagtgttgtttactttgagcacccgcagcacgatgccatcgaagctcatctatcgctgatgggctgat

SEQ ID NO: 41593 - DNA, 371 bp, Zea mays
  unsure (1)..(371): unsure at all n locations
cgatccttaaagtcacctgcngcatgcaagcttgaacaaagagaatagcttctgttgtttatgcactaagcaagcttcggctatggtcgaatctttggcagcaaaacagtgcaatagcaatgaactctattgtaacatcacacctacccgtttgtttatatagtgccacaggtgggaaggtaaatcgttaactctttcacactggacaaacagcccgccgcactcactaaacggtgggccacatagtccgacaaggtgaatctgcacggcgcgcgtaactgctgcaagatggggtcacctctcgctcgtattattttaatccgttctcggcaatgagctcacggaaggtgtctttcggatcttcagcatcc

SEQ ID NO: 41594 - DNA, 435 bp, Zea mays
  unsure (1)..(435): unsure at all n locations
agcttaggagactnntttcacggatcaagctcgttacgaanaacgatctatcaccgcgaaaggggctactgttgggactatgctttgtcgccgaatgtcttgtatgaagaagcagctttcggctgaagctgttcgtatgagatgaccgaaggttcctctacatgaaacttcgaaatttacaaaccgacataaaagtagaatgaccttttagtccataaatgtgtaagtcaccgttgtaatcccttatgagggacataattgtaattcctcacaggctacgccctgtgcctataaataggtgaacagtacctctgtactggtcacgcaatcttgtaatcactggcacattacgcctgaattattgctttctgctgagacgaaggtatacagtacttaaatattatgcttcactattaggtcacataataaatatat

SEQ ID NO: 41595 - DNA, 400 bp, Zea mays
  unsure (1)..(400): unsure at all n locations
agcttggagaagcttcaccgctttactatgtttctatctangggctacgacgaggctggaggtcaacacacaggggtggccaccatggcctatcctgtgcatggatggcgggtggcggtgctctcttttcacggcgaactccggtgatctttggctcgggcgaagctcaaggtgtgcggtgccaatggctaacgccctttggacgcatttataagcgaaggcactgcacaggcgcgcggtgcggggcgaccacccgcggagcgcgcgctgtcgtgaccagttcgtgctcggccggtcaagcaagcgatcgaacacgtggctgtttgcttctgcccagttcaagcacccataggttgaagatcttcgcgaattctggcatgatccttgcacaagatttgct

SEQ ID NO: 41596 - DNA, 481 bp, Zea mays
  unsure (1)..(481): unsure at all n locations
ggatcttaagtgaccgcggctgcagcttgaattcacctcatgtgtgtgnggctgacattttatcatttactgatcagacatatactggcaacattctcattgctgtaaatcctttccaaaggctgccacatttatatgatccgcatatgatgcaccagtacaagggtgctccatttggagagttgagtccgcatgtttttgctgtggcagatgttgcatacaggtatgtctggtagctatatgaggttggaacttcttcttacatgcatgactaccgntacatgttttcttgtntttctatgtttctatatgtttggttaaaaaaataaatttcttgtataccttctttagtgcaccacaaagagttgatagttagaatcagctcagtgttttcacgtcatacaagttgttctcactgttgttntttatttgaacagagctatggttaatgagaataagagtaatgccattcttgttagtg

SEQ ID NO: 41597 - DNA, 452 bp, Zea mays
  unsure (1)..(452): unsure at all n locations
gctcatactctgtcgcattattggacgctgttaatttaactgaagagcacatttgagaggttcacctccgggtgcaatgaagaggattcctgcgcctacccctgcagcttcaacgagccatcgaaatacatccgccatacttctgtggtcttcgggttatccagcacttgttgctcggtccattctaataccaagtcaactagtgcttgagtcttaattgcagtgcgaggtcgaaattcaatgtcgtgagctcccagctcgcaggcccacttggctattcttccgatggcttctctgttgtggagaatattccctattggaaagccagtgactactatgactntgtgatcgtcaaagtagtgatggagcttgcgtgcagctagaaagattgcatacaatagttttcgaacttgaggatatttcttcttctatggacccacgacttcactgat

SEQ ID NO: 41598 - DNA, 450 bp, Zea mays
  unsure (1)..(450): unsure at all n locations
agctancataatctttgtggcgctcattattattcttaatgtcataatggcctagccatgatctatatttttctaccatctcccctttctcttgaatattgttatagggctcaattacgggatttattggggttgcaacattttgcccttttgaaaacccatttgttatgaacatgatacttttaagtataagctcattgtatcctttattcttaagtcaatttgatgctcatgctcaatttggttcacataaaatgatggttcttgggttatcacttgagagaaaacctatgtgacactggggtgtcatagttcagggagcttcaccatgctgcgcgtgactcgaccagggccttgcttgagcaaaccgcgctctggactaccggaattcttcgccacgcaccactactgctcaccaccgtggtcggggatccacccgcaatgatctct

SEQ ID NO: 41599 - DNA, 466 bp, Zea mays
  unsure (1)..(466): unsure at all n locations
gctatgaagattcttcattccaacatgtgctagttggtgatgccagagccagcccatgttagtcttagcaattaagcaagtgtcgagttcagctctatcaaaatctactaagtatagctgaccctctaacactcccttaaatgctattgaatcatcacttcttctaaagacagtaacacctacatctgtgaaaaggcagttgtagcccattttgcataattgagaaactgaaagcaagttgtaatctaaagaatctacaagaaaaacattggaaatggaatggtcaggtgatatagccaatttacccaatcctttgaccaaaccttgatttccatccccgaatgtgatagctcgttggggatcttggttcttctcgtaggaggagaacattttcttctcccctgtcatgtggttggtgcacncattgtcgatgatccaacttgagcccccggatgcatanaactac

SEQ ID NO: 41600 - DNA, 313 bp, Zea mays
cgcttggcttcacttgcttttgttctacttgcatcgtcatataagtttggaagaaattcagttaagaaaagtagccacgtatgatttgtaccggttaaatgactggagcttctaccagctatgctcctcaccttgtcatctatttataatctgtccatgcttggacaactgggattcacccatctgtgggataactaaatgggcattgcaccttcatgtggcacagattatgaggcatactggccccaaactacaggccaaaatatatgtcgatatattcattaggctcattccctcattgttgaagcctgga

SEQ ID NO: 41601 - DNA, 481 bp, Zea mays
actgagctgcagctaacttcgattcaacgaagttctttttataattgcttcgtcagaagaatagcttccgaagagaagactattattttccacgaaattcttgtagatattcataattaaatggccagagtgcgctctaccgctagagttgagcgtgagggagatgaagcctaatgtgtggagactgttcctatctcggaagcaatgcaacgatctggattggtgacatcggaagaagtgctcgctgccgaagcagaacaagtcgctgccaaagcagaacaatgagatattgaggaggctgactctgacgatgattacaatatctcagtaccgagcaagcctagccatctggactttggaaagtcgactatctcctaggctgatctttccaagatggtgaagatcggccacttcagcgaagatgagaacaagcttattcgctttggtggagaggatactaccccgacgccagaggaggatg

SEQ ID NO: 41602 - DNA, 430 bp, Zea mays
agctctcattcttcttcttacaaacagtgctggttatccccaaggcgaagtgcttgcgcgaataaaacccttatccagcaactcttgcaattgcttcttcaactctgccaactcagcgggtggcattctgtagggcctcttggaaattggggccgttcccggttgccactcgatggcgaattcaatatcccggtccggtggcattcccggcaattcatcaggaaagacatctgcatactcacagaccactgtgatctttttcaggggtaactccgtcatatagaaagcacatgactgagaagaaccctgactatgcagaatcaaagtgaaattcccgcagaacggagaattaacttccacggtacgactggctatatcaagcacaacttggtgcaaggtcattccaattgcccctagaataatgtccaca

SEQ ID NO: 41603 - DNA, 465 bp, Zea mays
  unsure (1)..(465): unsure at all n locations
gcaagcttcngtgtggccggcaacccgtactactttttctgcaaggcaagcagcacaaggcaacgcagtgtatatcgcgcgcgcgcgggcgcacagtgtgcatagctagcgagcttgcgtggttgatcgcgtcgcgaccgacccgacgcccatgcggccatgcccatgcaatggaagacaccgaaacgaacggtggggagaagaatccaggcagcgtcgcgtgatttccgcgggatccatgcatgcccgcgcgccaaacccacccaccccacccgtgcatgcgaactcgcgcaagtgcaatgcaagagggccccccgctctctcggcctgcatcggtcgcgggtgtgtgtgtgtggactgcacagcggaagcgcaggggacgcttggctttctctctctctgctctggtctgggcagctcgcacgtactgtacgtacaacgccatatagtaatagtacgtgtgtg

SEQ ID NO: 41604 - DNA, 445 bp, Zea mays
agcttcaaccgtactcccctgcgtgctctctatcctctggagccagagatcaccggcgttcctgcaaacggtgtgcccacggccacccgatccctcgtcaccgtagaccggccagcagagcctctcccagccgcgtgcgaccctcagagtagaccgtgcatgcctcggtgaagctcccggagcaaggaatcggactttgcctcgccagagaagccagtccacggtcgccggacttcacccgatcgccggtgaacgtagaccgggtaagtctctgaccattatccgattccctgcgcgcatagcctctatgtcatcccggggagctcatcgtgcccgttaattgaactagatcggcgggttaggccgtacactcgccgctgcgagtttacccgctgcgcacgtggtccgccgatcctgcaccaccgcgcgagccgatctgctggac

SEQ ID NO: 41605 - DNA, 431 bp, Zea mays
  unsure (1)..(431): unsure at all n locations
agctctacttggcaaagtgagtgatttatttgtattatgtttgtacaaactctntntattgcagactaaaaaattctcgttctgaatcaacctgagagcttgaaaggagaggaagattttcacgcacccgacatctgagcatctagaaaaaagtatgaattcagctcaggttgtctaattcatcattagtttgcactgtccagaaaaagaacaacagcaagattggcataatgctatggccaccagaataagaggtcagagctgtcttttaatgctaatattgttcatgccaaacatttcttagttatcttgtgaatttatacttggacactcgattgggccttggtcggcgctagcaatatcatgctgaactctgaagacacccaaggtgttagctcctcccctcgtcaattcatcaattcaacatgtct

SEQ ID NO: 41606 - DNA, 468 bp, Zea mays
agcttgtgaaggttcttcattcccacatgtgctaagcggcgatgccacagccagcccatgctagtcttagctattaagcatgcatctagaccggcctcttcttttgcaaaatcgactaagtaaagtttgccgtctaatacacccttaaaagctagtgaaccatcacttcttctaaagacagacacatctatatttgtaaatagacagttgtaccccatgttgcataactgactaacagatagcaaattataacctagagactctactaaaaacacattagagatagagtgctcattagaaattgcaattttacctaacccttttaccttgccttgattcccatcaccgaatataattgaatcttgggaagtcttattcttgacgtaggaggtgaacatcttctttctccccgcatatgggtggtgatccgctatcaataatcagcttgaacccccgatgcataaactg

SEQ ID NO: 41607 - DNA, 362 bp, Zea mays
  unsure (1)..(362): unsure at all n locations
agcttctaaagggagagcacattttgtgactatcaaatgttcattntgagaaagacaggatctgtagcgcatgtcaagcaagacagcaagttggtgcccatcatccacacaagaatatcatgacaacggacaggccactggagctactccacatggatctatttacnccgatagcttacataagcatcaacgggagtaagtactgtctagttattgtggatgactattcttgcttcacttgggtattctttttgcaggataaatcacaaatccaagagaccttaaagggattcttgagacaggctcaaaatgagttcggattaaggatcaagacaataagaagcgacaacaggacggagttc

SEQ ID NO: 41608 - DNA, 401 bp, Zea mays
  unsure (1)..(401): unsure at all n locations
gcttagtgcaagcgtgtggaatggaaagactatttatcttacgtgtatgtatggcttgagtgaagggcaaagtggaaccgagggaaaacgggaggaggcgccctgcgactggccgcanggctgttcggacttgcgtctgggctgaaaacgaagtgttcgccatggcgcacgggccgaaaacggaggctcgggcacgaactcgaaaataagctaatttcaagcatgtggaaagacaccgaacatacagtgtatgtctttggtgaagggcacagtggaacggagggaaaacgacacggaggcacgcggcgacaggcggcatggctgttcggccttgcgtttgggctgaaaacgaggcgttcgccatgtcgcgcgggccgaatacaacggttctgccacgggct

SEQ ID NO: 41609 - DNA, 473 bp, Zea mays
  unsure (1)..(473): unsure at all n locations
gtcacctgcggcatgcaagcttcggatttccgaagctagaagatggcctttctatactattaaaggatgaattggctgacatcttancatataaaagcataaaggtataaaagtcaattttgtatctgaaaatgaatttcttcatttgtttatacttaatgttgtactcctcttgcagggcttgatccttagcaatgccctcagagcacagaaaaacattgaagatgaagggtatacaatggccctgaacaaccttcgttcagaggtgattgaactaaggaacgaaggtcttgaaaaagacaagatattaatttcattggtaaacaaagtaaaagaagatgaagctaattccaaaattcaagctgaggtacaaaggaatgagatcatagaccttcggaaacaattggccgagaccaaggaaaaattctctctcgccgaagctaaccgagacgccagcgaatattggaaaaact

SEQ ID NO: 41610 - DNA, 465 bp, Zea mays
agtcacctgcggcatgcaagcttttatatccttttcacaaaacctgactctatctactacattagtaactaccttcaacttatgacatatgaagtggacactaccaacgaatttcattaggctgtagataagctattagtagtgagcaactgccatttcttgaaagttacgaatgaatccacagagttggaagccatttaccctacaaaacaacttaagtcaattcataaaagatgggaccaaaaaagatgtaaaaatcatttcagttcaggtaacaagatgtaagtattcaaacctttattgtttcaattttagaacaacatatctcatgttgacccttattatccttaagttcatttgagactgattgtatctacaacattaaaattgtatcaacgagaattctacgtagagtaggagattgatttattaccttcaaacagattatgattcagtagatgaaca

SEQ ID NO: 41611 - DNA, 457 bp, Zea mays
  unsure (1)..(457): unsure at all n locations
agcttgtcaagcatgtnttggtacccatctcttgatgggtccattatggntagttaacaaagatctatgaacccaaatgttctttgcgctagcgtttggcaaattcattgcctttctagcacaagttgcaattttgggttgcctagttatatatgaatcaaatgacaagctatgagtggaggagttaccaatgggacaatcattgcattgatgtcccttttcccggcatgtgtagcatatgcgttttccaagttttgaagatttcttctttccttgtttgttgcttgctacatggttagtaaaaactttcttttctaaccctatgcccttttgttttaaatggggacaagatttaataaagcgtcccttctttgaacatttaaaatagaagttatcatccttngtaataatcaagccattcttaatatanggacatgatctaatcaaatgccccttt

SEQ ID NO: 41612 - DNA, 420 bp, Zea mays
  unsure (1)..(420): unsure at all n locations
agctcacctctcttttcgaactgagaataggaatctttttatggttaactcttaaccctagcacgggcatgcatattttgatccaatcacttgaggggcccagagatatctctctcacaaagagagggacaaattccatcttgactgaccatgcctcacagcatgcttcctgacaaacccaaaactacctttataactacccacttacggaatagcgtttgatagnccctaactaagtcaattcacatcttgagaacatgcgacaatctcaggtctaaggatacagtattcatgttgcaaaaagagaactatattacaatatctcacgttgggtccgccagcctcatgtcatcatgccccacatattagttaacatctccatgttatgactgtgaatgtatcatcactaatacatgtcta

SEQ ID NO: 41613 - DNA, 356 bp, Zea mays
  unsure (1)..(356): unsure at all n locations
agcttgcaccccggtatataggtccatttttctattcttgagcaatgtggaccagtggcgtaccgactccaactacccgtaacattgtctggtgtgcataatgtgttccacgtgtcataattgaagaagtgtcttctagttcccgatcgaaccgttgaagtgacagatgttgcccttaaaccggacttgacatattctgagcaccctattcgagtcttggatcaaaaggacagggttacccggagaataactctctagttctacaagagtcatgggaaccaacattccgaagatgatgcttcgtgggaaactcaagactttttacataagaatctcccacgctttntagcctcttg

SEQ ID NO: 41614 - DNA, 425 bp, Zea mays
  unsure (1)..(425): unsure at all n locations
agctatacgggctactggcggagctagtctatatactggctgggctggagggtggctggagtgggctggccacngcggccgaagctctggcggcaatggcgggcggaattaagctcgccggagctaaggaacggcggctggccggtgagggtgagtgcggggcgaantggggcgcgcttggggaggctttatatgcaccgcgcggtgcacgggcggtcgtggaccggcgagtgcgcgcgggcgtgcactgggaaggcgcggtgcgcgaactggcgtgaaccaggggtgtcagccgcggtcgaacaccgtgttccattgcctctgcccctgttcaagcgccgattgggagcaaatcttcgcgaatttgggcaagatcactgcaagggatttgttcaccagaccaagctttgtcttttgtgtatgga

SEQ ID NO: 41615 - DNA, 462 bp, Zea mays
  unsure (1)..(462): unsure at all n locations
gcagctnttccttttgaggaatttcactattggagtctctcacgcctcacacagttgattgcaaataaaccacaagagtaagggtgagtataaccacacacacaagagataaaatcaaagcaacacacgcacacaagttgagagaggagcacaagagacaacacaacggaattacaactcaaacacatgctcgaatctcaaactatcaaagctctagcgtggtcacagtgtcgtaggatgttcaaaggatgcttggtgttctgatggaggcacgtagggcctcttatatagcctccaagggctaaaggagtcgttgctcctccattangaaggctctgactgccttctgttcgtgggcacactgaacagtccggtgcaccaccgaacaatgaatagtgtgtgactcccttctttgttagcgaagccgaccgtgccagcctctggtccatgatgcaccgacag

SEQ ID NO: 41616 - DNA, 418 bp, Zea mays
ggatcttaagcaccgcggctgcagctagactaaggagacaaaaattcttgttatttaagtggaaaatggacacatcgattttcccatggttcgaccaaagcctacctccatgttgtggcgaactccttcgatcaatggttgcactcaacctctctcaagtgatccaaagatcaaacttgagtcccatgatattcgcccttatatctttatcatgtttgtgagaaatcttcacaagttgaagtctctcatgccttacacaaaatgatcacaatcaaaatcagagcaaggagggagtaagaacacgcacacaagaccacaacacagcaacacacacacaaattaaagacaagagcgcaagatcaaaatgacagagttacacctcagaaatcatgctcaaatctctctcaatcactgaaca

SEQ ID NO: 41617 - DNA, 405 bp, Zea mays
  unsure (1)..(405): unsure at all n locations
agcttgtggaggttcttcatccccacatgtgtttatcggcgatgccacagccagcccatgcaagtcttagccattaagcatgcatctagaccggcctcttcttttgcaaaatcaactaaataaagtttgccgtctaatacacccttaaaagctagtgaaccatcacttcttctaaagacagacacatctacatttgtaaataaacaattatatcccatttgacataattgactgacagatagcaaattatatccaagactctccactaagaatacatttgatatagaatgctcattagaaattgcaattntacctagcccttntaccttgccttgattcccatcaccgaatataattgaatcttgggaatccttatttttgacgtaggaggtgaacatcttcttc

SEQ ID NO: 41618 - DNA, 136 bp, Zea mays
  unsure (1)..(136): unsure at all n locations
agcttgagacgggaacaaccgangcatgctcttaactcncttgaagaaaatgtcaaggacttgaggatcgccaagaggaaggaacaaaagaagaaaatcaacacctcttccaaaagcctcaaccatgcttcattac

SEQ ID NO: 41619 - DNA, 421 bp, Zea mays
agcttaagcttttggattgaattggttggtgtatgcaacttaatatgggatcagagccagaggtctcgagttcgaatcctggttagcacaattaaataaaataattgttgctcgctcctatattccacgtcagagacccaaaatgaggctcgacgtgagggggagtgttggaatataatataagtgaattgtgcactactccaccactcctatcaacttaaacttttgggttgaactggttggtgcatataacttaataccagtacatgacacaaacattcaggagttttcataactgctagacagggacgaggtggaacaacatatccaaccatttagaactctataaaatccacgcatatcctaaagttcaagtattttatctatgtaaggtacagtagcactagacagctaaaatatt

SEQ ID NO: 41620 - DNA, 450 bp, Zea mays
  unsure (1)..(450): unsure at all n locations
ccacatgtgctatgtttcgatgccacaaccagcccatgcaagtcttagccattaagcatgcatctagactggcctcttctttttgcaaatcaactaagtaaaggttgccgtctagtacacccttaaaagctagtgaaccatcacatcttctaaagacagacacatctacatttgtaaataaacagttatatcccatattacataattgactaacagatagtaaattatatccaagactctccactaaaaacacattagatatagaatgctcatttgatattgcaatcttgcctaaaccttntaccttgccttggttcccatcaccgaatatgattgaatcttgggaatccttattcttgacgtaggaggtgaacatcttcttctcccccgtcatatggtttgtgcatccgctgtcgataatccagcttgaacccccggatgcataaacct

SEQ ID NO: 41621 - DNA, 419 bp, Zea mays
  unsure (1)..(419): unsure at all n locations
agctntagtgattagagagagtgattgttgtgtttatttgagctcttgcgcttggattgcttcgttntcttattctttctcgcgatcaactcaattgtaaccaatgcaagagacaccaattgtgtggtggtccttgcgaggactttgtgtcccgtgtgattgagaagagaagctcactcggtctatgtgaccacttgagagagggaaagggttgaaagaggcccggtctttgtgaccacctcaacggggagtaggtttgcaagaaccgaacctcggtaaaacaaatccttgtgtctcattccttatttgcttacgaattgtttttcaccctctctctcggactcgattatatttctaacgctaacccgacttgtagttgtgattaactctgtanatttcagtttcgccctattcacccc

SEQ ID NO: 41622 - DNA, 348 bp, Zea mays
  unsure (1)..(348): unsure at all n locations
agctnttcactcttatcaaatactttcttactgagtgctttttgtatcatcctgatggatctttctacttggctattggctcttggatgtgctactgacgcatacttaatctggatgctccgctgctcgcagaagtcgaagaaattggagctggtgaagttggatcccacgtaggtaatgatgctatttggtatcccaaaccgaaatattatgccttgtatgaattccactgccttggctaaggtcaaagaggcaatgggcttgtactctatctattttgtgaatttgtcaatggcaaccagcacgtgagtatagcctccctgagcttttctgaaagggccgatcatg

SEQ ID NO: 41623 - DNA, 386 bp, Zea mays
agcttgtataactaatactctctctatattgtgtatcttgaacttcagaacataaattatgttattgtaagtctttcgttctatatctgctgtatggttacaaaatgttgattattataatgcccatgcttatgggtgtgttagatctatagtgaaagataagatcaagttttatggaactcgacaaacactgttaggttatctggtgcacgtgcataaccatcgaaggccattatgacaaagattgatatatgtgggccctataacttgagaggttctgtgacacacttgcaccacgctcatctccctggtgaatctatttctcggagatccaaatctcgatagggatatcaaggtaatgatttacttcaacgatgagtttgatg

SEQ ID NO: 41624 - DNA, 414 bp, Zea mays
gcaagcttgtgaacagtacatattcagaacggagttatcttcttcagcagatcagccgaagcccatgctcttatgtgaggacatagcagagcacaaggcgctgctgggctctcaattatctgaagagcacgagaaaaccttgataacgctcttgttcaacaacaaagatgtttttgcatggtcaaccaatgatctctgtggagttaataaggatgttattgaacactcgctcaatgttgacccatccttcagacccacaaagcacacgcttctgaaaatgtctgatgataaagccgcaagtgctcgtaatgaagtcaaaatactcctcagtgccggagttattacagaagtcaagtacccacaatggctagctaacactgctttggaaaaaaggccaatggaaatggcaatgcg

SEQ ID NO: 41625 - DNA, 202 bp, Zea mays
agccaaacacaattgggcagatcggacacctaacaacagcagggggacgagcaaaaaaaggagctcagaaacaggcaccacaaagcacactagacactagaacaaccctcgcacataccccccacaaaactccacatagcaccaaaaaaggatccaagccagcccccccgtagaaaacaagggtcaaaaaaaagggaaagaa

SEQ ID NO: 41626 - DNA, 454 bp, Zea mays
  unsure (1)..(454): unsure at all n locations
ttaagtcacctgcggcatgcaagcttgtctcgcgatccggcatcaggcacattgctatatgagagtgagaattgcgcgacacggacaagggttatgtcggcgctcggcggccggcagttgtttcagcagcgagccaagggaccacctctccatcggacaagagcacccattatttctatcacactgactncagagtcagactacggtgaccgcctagccggccccaacttttctttattagcagcgagcggcggcgctggccggcacctaccagagcaaacacacttgcctacgactacgacacacgacacgcagatgcgcaacacaggcacacgcatataaaaatctatctctctcctccggtacaagagcagagcccttggctggcgtctcacccgatcacacacagtcacagcagctgagcagccccgctcttcagtctncacaccttctg

SEQ ID NO: 41627 - DNA, 384 bp, Zea mays
gatccttaagtcacctgcggcatgcaagcttctaaagggagaacacgtgatatgtgcttattaatgttcaactccaaaaagatagaccttgtgcagcttgtcaagcacggacacaggtgggaggctctcatcacaccataaatgtgatgacaacatcaagatccttggagatgctgcatatggacctttttggacccgccgcctatctgagcataggaggaagcaagcatggtttagttcttgttgatgacttttcccgctccacttgggtgctccttttgcaggataagtctgaaacccaagggaccctcaagcgcttcctcaggagggctcataatgagttcgagctccaagtgaaaaagataaagagcgacaaccggtccc

SEQ ID NO: 41628 - DNA, 357 bp, Zea mays
agcttatccaaacttgagccgaggcattgtctcatcttataagcaacccaccctcgccggacggtggtctttcgccgtctcgcgtggacccgactaaccacagagtcttcgcctaattcccagcacgcacatctttccctggatcccgcgaagctctccgacccggacaatagaaccatctcaccgcgagtaggccggactcctcgccgccgacaagcatctacgcctgcgcacgaggaccggccgaatttgaccatccccgacggtgacccgcacactcgctgtgatccccaagacctcccctacgtcctcgaccacctcaccggagcaatctcgccggcggaagtccctccgccc

SEQ ID NO: 41629 - DNA, 393 bp, Zea mays
agcttcacacctctgaactaactcgggtgcattattctttgctgttggcccatagaatcctgacctgaagacctctccgactagtgttctagatgctgcatgtattccacattgcccagcatggatctcctccagaagttgcttaccactacatgggagaatgcacttcatgaggacgcctgatgcaccccttctgtacaatgtctcccccatgagtgtgtaatgggccgactgtctggcaatgcgctcggctgaattcttgtcgtctggttcctcttcattctttatatacttgatgattggccttgtccagtcatcagagtctgactcgggttgatctataatattacattcttctgtttgatccatagagatgctccgctgtaatacttt

SEQ ID NO: 41630 - DNA, 403 bp, Zea mays
  unsure (1)..(403): unsure at all n locations
agctggaggcgtctatnggttgtacttttgtcgtatactcctccttcttttcctccgtcgccttgaatgcgacgggttgagcttccgatgtggagggatcatcaagctccgtgatcttcctcgagccttcgatcatgcattcaaaacttacaaaattcccgataactttctcgggggtcattttagtatatctaggattaccacgaattaattgaacttgagtagggttaaggaaaataagagatcttagaataaccttaaccatctcgtggtcgtcccactttacgctcccgaggttgcgcactnggntcaccaaggtcttgagccggttgtacatgtgttgtggctcctccctttgcgaatcggaaccaccgactcccctcgacgttcacgttggtgattt

SEQ ID NO: 41631 - DNA, 358 bp, Zea mays
  unsure (1)..(358): unsure at all n locations
agcttgcaacaatcgagcttgcattgtgatttctttcacgtnctatccgaaagcgcctatagataattaccaagaaactttattacatatatatgaattaacttgcaactttctttgattttgaataactgaaaatagtcctaactattcaatggaaacaacaaaaaatgttgacttatgtgagtaacaaaaagaagactcaactgccgtagggctctaccactggttcttaatctgtattcctagaaacaagctacaccacataatagatcttcaaaatattatgttgactctgcaagccttccactgaaccaagtaaaacaacattattgtgagcaaatattacttgtttataata

SEQ ID NO: 41632 - DNA, 361 bp, Zea mays
catctatgcaaggagtgggattcggattgctcctcttccgactccgacaatgaaggacttcccgccaccgccttcaacaagtcatccctcttccccaacgagcgtcacacatgccttatggcaagggagaagaaggtatgtactcgaaactctacttatgcttcctcaagtgaggacgaatctagtgatgaggatgaaatagattattcatgtttatttaaggggctagatagaaccaaggtagataaaattaatgaattgattgatgccttgaatgataagaataggcctttagaacagcaagaggatttgttgtatgaagaacatgacaaatttgtagaagcacaaaaatctcatgctc

SEQ ID NO: 41633 - DNA, 488 bp, Zea mays
  unsure (1)..(488): unsure at all n locations
tcttaagtcacctgcggcatgaagcttcatcggatcgcgtaactgtgaaatcatttgaaatcttcaatgaaatgttctgaattctctgtcttgatcaccacatcatccacataagctttcacatgcttgccccagtggtcggctaagcatgtctaaatagctctctgataagtcgctccagcgtttttgaggccgaacgacatggaggtatagcagaaggctccgaacggcgtgatgaatgctcgtttttcctcgtcttctttcgccaagctaatctgatgatacccagagtagcaatccaagaaagacaacacagaacatccggcggttgagtccaccacctggtctattctacgaagtccgaagaatccttcgggcagtgtttgttgagatccgtatagtcgacgcacatgcgccaatccactttattcttttttagtacaagaacagggttagctaaccactcangatgtacacctctctatgaa

SEQ ID NO: 41634 - DNA, 424 bp, Zea mays
cctgaggcatgcaagcttctaagggagagccatctacgattatttttgtttattttgagaaagacaagatgtgtagcgcatgccacgcagggaagacagttggagtccattatccacaccagaacatcatgacgaccgacaggccgcttgagctactccacatggatctattcggcccgattgcttacataagcattggcgggagtaagtattgtcttgctatcgtggatgattattctcgcttcacttgggtattcttcttacaggagaaatctcaaacccaagagaccttaaagggattcttgagacaggctcaaaatgagttcggcttaagaatcaagaaaataagaagcgaccacgggacggagtccaaaaactttcaaattgaaagcttctttgcgacgagggcatcacgcatgagttc

SEQ ID NO: 41635 - DNA, 454 bp, Zea mays
  unsure (1)..(454): unsure at all n locations
agcttgggctaccaccatgcaaccagagtgtggatgagatcccgcgtgaacatccatggaagtacaagagggagaccccgctcggacaccctcgggggctgggccatagtttgcgctacccacttgagccggatcgcctccggcagtaccctcgggggctgggcagtggcttacgtttccagcacgagccgaatcatccccggcaacatcctcgggggctgggtaagtgccaacaccatccttgaggaccaagttctctgcagtagccacctctaaggctgagggtccctcaattacttccatgggagcaagacgatccaagtcagtttcttgaccctcangaccgcgctctaaggtcgatgaggcgcgggacgctgcccgggatgaccacaacccggcgtcgagcacatcagcacaaacctctgtcgcaccatcattcgctggctctgataac

SEQ ID NO: 41636 - DNA, 447 bp, Zea mays
  unsure (1)..(447): unsure at all n locations
ttaagtcacctgcggcaccaagctgtcattagtggttaattacataaggctttctaagctagtgcctgcatttntggagtcccctaacacgtcactatacactccatagaatgtctttgcttcgcacacaaattctgttctcatgcactccatagaatgtctttgcttcacaaaagaattctgttctcgtacattatattctaatagaataaaatatcctctttgtgaccaaactgaggaaacaattgatcatctcttagattcttgcatcttcacaaaacaggtctgcttccacttgctacaaagtctaggattgcaggctcattctccataacctgacgatatgttcttcgatgattggtaccaaacacaatatgcatgatattacattggctggatcttagtttcttgatgagagttattcagactacggatattcttttctac

SEQ ID NO: 41637 - DNA, 461 bp, Zea mays
  unsure (1)..(461): unsure at all n locations
agcttgtntaatgatcaaatgcctatgttgttctcttgatcgcatcctgtgtgtgttcgagcattatagagcttcaatttacacttatgctccttagtgcatcatgcaatctcaatcgatatctctcttgtgcactaatttaaaaggaaaattcatgatacatttatgcaattcgcgatctacttgatatataataacaatgacttacaaaaggatcactagttgtagaactctctcttgtgcaaaatatttccatgtattgtcttgagtataggtcttaagcgactaagactaaggacaaagcacaatgaagagagcatctctatgtaaaggtacaaaagggtaaaacaacttcctttcattttaacttggacctacaatcttcttgttcatacttgtcttgcatatcttgtataaaaggaagaaaacacatgttcatgcactaaccctacttcatacct

SEQ ID NO: 41638 - DNA, 459 bp, Zea mays
  unsure (1)..(459): unsure at all n locations
agcttatgaagattcttcataccaacatggtgtttatcgcgatgctagagccaacccatatgagtagtagcaattaagcaagcatcgagttcagctctattaaaatcaactaagtatagctgaccctctaatactcccttaaatgctactgaatcatcacttcttctaaagacagtcacacctatattcgtaaaaagacagttgtaactcattttgcataattgagaaactgaaagcaagttgtaatctatagaatgtacaagaaaaacattggaaatagaatggtcaggtgatataccaattataccaagtactttgaccaaaccttgattttcatcctcgaatgtgatagctctttaaggatattcattnctctcataagaggagaacatcatttgtctcccagtcatgtggtgtgcgcacccgctcatatttatccaacttgaggctccgaatgca

SEQ ID NO: 41639 - DNA, 300 bp, Zea mays
ctgaggctgcagcttccacaactgggactagattctctcttttatttagctggccctcaaagtcgtgaggatgaccttatttgcgagggcccctgggctctgatggaagcccaacgttccattgtggactttccgtatgacctgaatgccttcgcggttggtgacacattctaacatgggttgacagatccacttcttgtataactgttctccaacgtattacgaagactctgcttcagcgctgtaggcgcttggcctcattgacgccactccgagggtacattcttgcaaaaatattga

SEQ ID NO: 41640 - DNA, 437 bp, Zea mays
agcttatgaagattcttcataccaacatggtgtttctctgtggtgccatagccaacccatgtgaggcttagcaattaagcaagtgtcgagctcacctctatcaaaatctaccaaggatagctgaccctctaacactcccttaaatgctattgaatcatcacttcttctaaagacagtgacacctacatcagtaaaaagacaattgtagcccatttgacataattgcgaaacagaaagcaaattgtaatctaaggaatctacacgaaaaacattggaaatggaatggtcaggtgatatagcaattttacccaatcctttgaccaaaccttgatttccatcccccaatgtgatagctcgtcgggaactcggttttctcgatgaggaaacatcacttcttcctgcatgtggttggcacccctgtcatgatcacttgaccc

SEQ ID NO: 41641 - DNA, 438 bp, Zea mays
agcttcggtttgaagtacacattatatcatttctgaagaaaagatgtctcaagacaagaatgttgctgctgagactaagctcaccgaagaggagaagctctttgagcagaagaaggctgttaatccttatatagttgggttcttagaatcaatggcgaaatcaaatactaagaacattacaaaagagatattggaaggcctgtctgaagatactggtgacagtgatacttatgatgctgatagtggtggtgaagattctgaagaccggccttggaggccaagtcattctattttcggataatcgaccatcaagcagaatcaccttgagagcatgacaggaagatactttctggatatgtctattgtcagagcttgttgagacaacaacgtccctgccctaatgaagacaagttgtgattacccgaagctcttaaagct

SEQ ID NO: 41642 - DNA, 117 bp, Zea mays
tagcttaacggctagaatccacggtttttttatctggcgcgggcaccggactgtccggtgtgcaccggactgtccggtgccccatccaacagacagccctaccaacggtctagtttg

SEQ ID NO: 41643 - DNA, 439 bp, Zea mays
  unsure (1)..(439): unsure at all n locations
agcttgcgcacacggtccaggcatagatcgacaatctccttcccaactgcattgcaccataattagaattgaacatttccacagttgcagaagcataggacccactcctattatctattcagacacaaggtgaattacccgtgtagtggccacgggcaaagttgttagctgcgtcctccttccccgagatgagctgctctgggtggaagagctggcggtacgagccagtgcgaacctcgtcgatgacagtgggctcaaggtcgacgaagatggccctgngcacatgcttgccggaaccagtctcgctgaagaacgtgttgaaggcatcatgtgcgacgccaaccgaggaatcactgcatcacaatcaaaccagtgttataaaaaatagatagcatggaactccaataaggcacgaaccattggcatatgcgcttaaaga

SEQ ID NO: 41644 - DNA, 475 bp, Zea mays
  unsure (1)..(475): unsure at all n locations
tgcaagctcgaataataaaggagataaacattgggagttctctcgctttgtcaacggacggagaatgtagaatatggaacacatggacatgattcttntgtcttcctcttgatagagaactaactaaagaaagtcgagcaaaataaatagcagaacgactcttaccttttctatttgattattatatatgggttcaattttagagtactcatgatctgaggaacctgtttagactaagattcatactccatattggtctagatgaagtctggacaaagaaagtctctattgtctggtagttagagagagacgggcctaaacaatggatagacaaaaaataggctgaattcttgcctctttattattagctatatattagggactactttcttattcatgatctgctgcatagggcctagatgcctttatatcttcataacgagtatntgccatacataaataatcagaactcctc

SEQ ID NO: 41645 - DNA, 452 bp, Zea mays
  unsure (1)..(452): unsure at all n locations
agcttttgaagaagtcttgaatagccgtggttactttgtgccttctcgggtgctagggggattgccactgntttggagaaaaaaggctgcgatcacgtgaaatccttggcacagaccgaaaccgatttatcttctgaagacataaaagacccttcggccgacgcaagtttggttggtggaaaatttttcaccgacatctgggaaaatggtggccgggagatggctcaagaaattatacggagaagcgaaaaaggtattcatgacgctagaaaagtagcagaggccgctgagaaaagtgcggatctcgaacggcgaataggtattaactactacgttttggctttttgttgtaactnnttgatttcgaacttggttacactttgtaacatagccgcactttcttcttcctcagggcccgccgagccattatccggaccccacggataggggga

SEQ ID NO: 41646 - DNA, 355 bp, Zea mays
agctctaacgacttaagcctgtgaagaatatattttttcttgtggcaaacaacgaaactattacatggaatatgataaatgtcctttattacacacaaaatataactgaatgaaaaagactgctatcaacgtaggatatttgtcaatagatgtgcttccactctggcacagcgctattgactgtgcgagcttcggactgttctctgaaatccctttggtgtggagcatattggctcccttctggctgttggccttgttgcaaccgaggtggaggcggatgctgttgccacgaaacttgaggttgactcgccgaagcaacaaatactgcagggtggttgcctacatattctggaat

SEQ ID NO: 41647 - DNA, 398 bp, Zea mays
  unsure (1)..(398): unsure at all n locations
agcctcttctccgaagcaacaaatatnttattcataaaaacccccgcttcacctactgctgctgttgttgatgcaaattctgaacgtaacgactgaattcttacctgcgaagctagtccactgggcccttaactgacaaagttttttcagatagacaatgagccctaaaaattcaataaaacaatcaaagcaaatacacaaaaaattatcactgtgacagaagtaattgacatgacgcctgcaagagcttcagcccagaaaacaccagcggctgcagagggggcagatattgaaattgcaccttcggaggccgcagctgccgaagctgcctcagctgaagatttgaatctggagagcacaattgaacatattgaccaaatactgctatacatggctgc

SEQ ID NO: 41648 - DNA, 473 bp, Zea mays
  unsure (1)..(473): unsure at all n locations
agcttnctgggcctagctcccattaccaccaccattaccacccactcagacctgaagccaacagccagaagggcaccaacacgcacaacaacagcgtgatttttgggaggaatccgaagctcgtacagtcaacagcactatgccagaatccaagcatatctattaaagaatatcctattcttaatgtatctttatcgcttatgccattttaatttttgtattacaaacaagtcatgacagactaaatttcgattttatataataattgcgccggtatcaacgagtaaaatacgtcttaaacagacttctgaagccacaaaagtcgttcgtaagggagcgcggagtaagttccgaagccacaaaagtcgttcctaatggagcgcagagtaagtntcgaagctacaaaagtcgttcctaatggagcgcagagtaangtttcgaagctcanaagtcattcctaagggaatgcagag

SEQ ID NO: 41649 - DNA, 418 bp, Zea mays
tagcttcgggaagtacagctttatcagtcttgtcatattaagggatctctctctttatgaagcatgaatagaaagaaggtgtctctcgctgaaggctcaaaaacggtatgtgtgtaaatttcatgcatcgcaaagaaataaactgcaacaatttacatattcgattcaacattacatacttcaaatattacatagttttgttacaatagaagcctaatcttccttcatttgttatatacatcaagcttttcaaaatgattgttacaataaaacctattcctctttgttatatacatcaagtttttcaagttttgttacaatagaagcctaatctttcttcgttcaataattcgttgacgacctcatcgataatggattcagccatgcttatgatatccaatgattccttcatctctgg

SEQ ID NO: 41650 - DNA, 355 bp, Zea mays
  unsure (1)..(355): unsure at all n locations
agcttngatagaagacacaactcgcttctcttcatagtgtctcacagcagcgcctgtctgtccttctcctttgtaccgcgctatatgcacactatccaccagccatctttatggctctattaaccatctctatggctctattaaccatctccatgttctagactcccaaccatgatctccaacccacctcgcaaaggatttttaccggtcccatcatcaacctgttgacacgtacccgaagtaacgaatgcacaaaatatatagcaagcggatctaaatgagcaaaactaatccatgaaaaaaaatgccctgcccaagttgccgtacgatcaagtgcctctctatcgatcacacc

SEQ ID NO: 41651 - DNA, 304 bp, Zea mays
  unsure (1)..(304): unsure at all n locations
tgcggcatgccagcttgcacttacgaccaaactgtacncgtatttatatcacatacaatggcttaacaatagtggtaaggacaacgtaaccacgctggtacgaactaattttgctattggctcatatcgagaatgttgctgactgtgatgttgtgcctatggatgcttgtaatattctgctacgtacaccatggcaatctgattcagattgtatgctcatggtagatcaaataatattctctcctccgcatataagacaattttttgcttccatgtccccatgctatccgcgtgatgatgtgct

SEQ ID NO: 41652 - DNA, 407 bp, Zea mays
tttcagcagcctcagctacttctctagcatcgtgaatacccttttcacttcttcgaataatttctccggccatttctcagccaccattatcccagatatcggtaaaaaactttccaccaattatactagcttcggccgaaggatctcttgcatcttcaaaggacaaagcaccttcggactgtgctaaaacttttacatgttcgcagcccttcttctctaagatggtggcaatccctctggcaccagagaaggcacatatatctcctcggctatttaaaatttcttcgaaggcctcagcttcgtggtcgatccattcgatgggaccttcgggattgcctctcgtaaagttttcttcgcttgagaagggcgccaacctggcgaagctagcttttaacttcttaacacac

SEQ ID NO: 41653 - DNA, 460 bp, Zea mays
  unsure (1)..(460): unsure at all n locations
agcttgtatgtngttcagctatctgacattctgactatatcgatgcttaacatagctctagtgcgacaccaagagaacattcatgctctggacatggcatttatattggtccatcgccttggtcttaggctatggccagcggattgtgatatgaccaaaacattatttatagagtggagtttgaaacgagagatgtggatgagtaaactacttgggtatcttcgccgctgctagatgtggtagagcctcacagaatccgttcgcacacatgcactatgttttgcccctgaagaagctatntgcacataaacagcacacatcactgaagatgtctctacctatacacattgacattatctgtgcgagcgcacaactttgtagaatctggaagccggattctctgatagggatgatggcactgtgtgtagtcgtgtacatttgaagatacccaagcaagcct

SEQ ID NO: 41654 - DNA, 432 bp, Zea mays
tgcggcatgcaagcttacatctaagccatcgtaatcggtactctggtcttgtattcgcttaaccaccacctcggttgttaccaccacacattttcttgcaacccgcacggaactcataagagctttggttggtaagagtggtgaggctgtgagattctatatagcttcatattccacctatatttgttgccttgtcgccactaatttcgcacgaagatggatccctacgtcgagattgaagaatgtgtcaccatgatacaattcaatgagctcccacgaagcatacaagccaagcaagatctgttggcacaagatcttcacacacttatggctgaaatcagaggacgtcatccactccctgacggtgtaagaaaccatgatgaagactgcgaagaacgtgaatgatattattctacaacggcagtgaacatg

SEQ ID NO: 41655 - DNA, 420 bp, Zea mays
  unsure (1)..(420): unsure at all n locations
agcttctanagggagagcacattctatgactatccaatgttcattctgagacagacaggatttgtggcgcatgccaagcacggaagcaagttggcactcatcatccacacaagaacataatgacgactgacaggccgctagagctcctacacatggatctattcggcccgatcgcttacataagcatcggcgggagtaagtactgtctagctattgtggatgattattctcgcttcacttgcgtattctttttacaggaaaaatctcaaacccacgagaccttaaagggattcttgagacgagctcaatatgagctcggcttaaggatcatgaaaataacaagcgacaatgggacggagttcaagaactctcanactgaagcttccttgaggatgagggcatcaagcatgagttctcttc

SEQ ID NO: 41656 - DNA, 427 bp, Zea mays
agcttaagagaacagatgcagttcatatttattatactgaaaaactgctataatcaaactgcgataactttctgatctgatatccgattgaggtgttcttcacggccaccgaaagatgtacgaattatctacgactcttagatagactctttattcttttgatgccactaagaccacgaaaaactgacatgaacataaactattgaatctgccattctgccgaaactaatttccagattaaaatctaatctccgatccaatctaaccaaaaaaactaattgcagggcctaaaactcatccaaaacaatggaaagcattcaccctgtggatttaagagagagaggaaacgatattccacccattcttggagaggaacgacgatgatgggcgacggtatggcctcaatctccctctcttctcttctctt

SEQ ID NO: 41657 - DNA, 354 bp, Zea mays
agctatgatgtgtctacaagatcggtctctttttatgttggatgacagtaaatgcacgtgcagtcagtatggactatgcctatttccctcactcactactaactatcttgtattgtccttgttgcatgtgcactcgtgtatcatcacttgctatcacaagcgcacaaggagcagacactaccacaattgtagatgaagagaggtctgattcttgaatgtaagcaccaagttcattcttttcttgtccaattagtatatagatgacacacagtcgttcgttgattatattacctattgtctcccactacatccaaatagttttcacgagatgaagctaataagaaagtcagaact

SEQ ID NO: 41658 - DNA, 446 bp, Zea mays
  unsure (1)..(446): unsure at all n locations
agctntatcttgttgatttcacaacaagtatagtgactcctgagacttgtttagtggcaaagtccgacaagggttggctatggcatcgccggctagcccatgtcggtatgaggaattccgccaaacttcaaaaggataatcacatcattggactaacaaatgttgtatttgggaaagatagggtttgtggcgcatgccaagcaggaaagcaacatggagtcccacatcaatcaaagaatgtggtcacaacaaagaggccattggagcttcttcacatggacctcttcggacctgtggcctacattagcattggtggtagtaagtatggtttagtcattgttgatgaattttctcgattcacctgcgttctctttttaagtgataaaggtgaaactcgagaaatattgaagaaactcatgaggagagctcaaaatgaatntgagctc

SEQ ID NO: 41659 - DNA, 381 bp, Zea mays
  unsure (1)..(381): unsure at all n locations
agcttcagctcanaattaaaaggaactactatcgaattggggttggacttcagcggggggggcggcatcgatgcgcctcgggctgatcgaccttgtgtttccgaacccgaatttcaacgtagtactagcgactaggcgtagtaggccgccggtgaggtgcgcttgcattgggaggcggaagcggcaccttaggcctcctttggtaacccggtaacccggcgggatcccggcccaatcccgagataaaataacctcgggcccaattttccccgagcaaaataaaattgcgcttggcagcccattatcccggccgaatccacgggagaggaaggggctatctggcctatcctcacgaggtcgggctggaaaccctcgcctctc

SEQ ID NO: 41660 - DNA, 391 bp, Zea mays
taaatattactttcaacactataatatcaacacgacactatgctcatcacgagtaattggatgtcaataatacaatccacataacccaactaccttgattaacctcacatacaacaaaacctactattactgcacttgaacaatttgtacctccgcgatatcacacgatgcattcaaagtagtacacatacatgatctatcaaaccatcattcatataagaaaaatctcaatccgatgcaacaaccccatcattaaagagatagatgactaacaaacataagcaacttccagttaagcattgacttcgtttaagataaagcggtccaaataatgattcaacaagcatgcatagagaaactgatcataaaacaaatcaaactaccatacaat

SEQ ID NO: 41661 - DNA, 325 bp, Zea mays
  unsure (1)..(325): unsure at all n locations
agcttcggagtcgaactgtgttccattatctttagtgatggcctttggtaccccgaaacgacaaacaatattctgccagaaaaacttttgaatggtggccgaagttattgtggctaaaggctctgcctcaatccatttggaaaaatattccacagccactacaacatatcttaagttcccttgggccggtggtaatggacccaacaagtcaaggccccacctttgcaatggccacatgggttgtatgagctgtgttaaggacgaaggttgttntttatctcttgcacatttctgacaaccttcgcacttttgaactaattccgct

SEQ ID NO: 41662 - DNA, 412 bp, Zea mays
agctttagcagagggaaataaactatatttttgtttgcaagtggattatcggttcgacggctgcatctcctcgcggcaagaagacagaaacgcgattggcaatggggagttccaagctctccttgctttgcctcgtccccttccttctcctcgccggcggcgacacgcttaccacattcatcgtgcacgtgcagcgcccggagccagaggagaaccacaccaccggcgaccgggaggtatggtacaggatgttcctgcccgaggacagtcgtctcgtccacgcgtaccaccacgtcgcaagcggcttcccggcccggctgacgcaagaggaggtcgacgcgctgtccgccatgcccgggttcgtggcggcggtcccggacgagatgtacgacctgcacacgacgcacacgcc

SEQ ID NO: 41663 - DNA, 344 bp, Zea mays
gcgcgtgcaagctcgcatagtctacttcatcatcactagactcatcatcacttcgacaggcagacgttatagtacttcaagtacttacctgtcttctactttgtcatgaggcatgtgtaacgctacttgtggaagagagcccttttgttgcaagctgtagcgcgcagaccttctatgtgggtttactaccacgaactcttgtgatgacactaccttgcagagtgtgcctaaaccttcaccgttgaggagggcctattcttttctcactctttgcgttttccttgatcatggtcactgacagtatctggacatttagcaatagagcgactcaatatttctcacta

SEQ ID NO: 41664 - DNA, 386 bp, Zea mays
  unsure (1)..(386): unsure at all n locations
tatgtggatcttagtactgatctctcaagccaattcgaatcgaagtattctttctgatatcttctccatctcatcttacttttggtagtctaatgtgtgatcggtcgaccttttcttgtgcccctctacatcttgctggctcttgtgagtgttatctatctatatgagtncgctcgcatcgtcgttcttagactcctttggctgtctcctttcctcttttgcggtgagctctgaagtctcatatggagtccatctctagctaccccacgtgcttggacaccaagcttgtcgatgtgaagttgcgacgctatcttaacaccctaaactcgattcatcacattaatcatactgttagtgttacattatctatggcagtgactgagcca

SEQ ID NO: 41665 - DNA, 382 bp, Zea mays
  unsure (1)..(382): unsure at all n locations
tcagctcgncatccttcaacttcatcatcctgtacatattaaaacataatgagataggtgccaaattcaaagagaagggtaaagttacaagtataagtttctcaccggcttaaggaggctccgagcttcgtcaccagccatatttcgcccgcccgttacccaaatcttngtcataaatctgtttcctatgcttcaggctaagcttgggatgtcaaccaaatctgccggtgacaaactgaagtttggcctatttacaatcttcccatgtgtacaaccggccttcaggaaagcggtaacccgttcttgagaagctagcagggcgcagaaatcagcatgcccagcaataacttcgtcaagtgcatcaacctcgccttcaatgtat

SEQ ID NO: 41666 - DNA, 368 bp, Zea mays
  unsure (1)..(368): unsure at all n locations
cagcgagtatcctaatcatgtctatatgccctctaagacgctctatgggcttcagcaagccccaagagcatgatatgaatgcctaagatatttncttgttgctaatggcttcaaaagccgcgaaggccgaatctactctattcactcaaactctcgacaatgagttgttcgtatgccacatctcatgttatgatattatcattgggtctactaacgaatcaacatgtgaagaatctagtacgatcatgacacacaaattcgagatgtcaatgatgggggagttgaagtatttcttaggatatcaagtgaagcaacttcaagagggcacctctcatcagccaacgaagtatactcaagacattctaaac

SEQ ID NO: 41667 - DNA, 391 bp, Zea mays
cgcaagctcatcttagccctcatttcttttgagctttgcaatgacatcattgccctgctatactacatccatggaatatatgcttggcgatggacaacaagcattagcacatggtaatatagcttctatctgaatacatgtgcatgactgacgctgtttggatctctaagtttctattacacctcatgagcatatccatatgatattacatcatagaattcatagacatagagccatatatttctgaaagctagacttcatttgagcttctacttggcctaacaagattatattgcatgacgacatataagcgtatctgtaatgaaaattatacttggacaataaatgaagcctttactctctgtcttatcaatcgccacgcatgattgat

SEQ ID NO: 41668 - DNA, 490 bp, Zea mays
ctacattccgaagatcaatattgtatcttcctgtgacttaacatgtgttccctctttcaaagcattctttcaaagatcgatattgtgtaccccttttgtgccatatgcagcatgatgtatgatgcttatgctatgcgaaatgatgcgatgatgttatgctatgtaaaatggtattcattccgaagatacacacacatcctcgcgataaacacataatcttctttatcagcgttgactcttcgttgtaagcctctcttatgagcttcttcgccttttacttcagcggaatcagcgattattctccgctgtaagcctctcttaagagcttcttcgcccttactctctgcggtattgcgcgtgactattcgcgctttgcttttacttaagcggatcagcgttatatttcgtgtaactctgattccttggacgacttgagcaaaactacactggctccttcgacggctttgtacttcacaatactctgcgtcta

SEQ ID NO: 41669 - DNA, 327 bp, Zea mays
  unsure (1)..(327): unsure at all n locations
cacagcaagaatgtgatgaccacttcaagacccctggagctgctgcatatggacctcttcggacccgtcgcctatntgagtatagggggaagtaagtatggtctagttattgttgatgactttctccgcttcacttgggtgttctttttgcaagataagtctgaaacccaagggaccctcaagcgcttcctcaagagggctcanaatgagtttgagctcaaagtgaagaagataaggagcgacaacgggtccgaattcaagaaccttcaagtggaggaatctcttgaggaggaagggatcaagcatgagttctccgctccctacaca

SEQ ID NO: 41670 - DNA, 236 bp, Zea mays
tggcgaaagggcgctcaacccccgcttgcctgggccgagtcttaaccttaatcgacccaacaagtagcgttgacttttaagctctgacaccactgagttatgccgcgaaactccgcgaacatgccggacggtaataacaagacgggtaattcgtagcagggttggatgctgacagcaaaaacagacgttgaaagagggaaccatgctaacaacgttttccttcatatttctaatga

SEQ ID NO: 41671 - DNA, 116 bp, Zea mays
acgctaaagatggctggaaaattaagcaccgggcgttacacttaacgagtctggagggacacagatttttctcccccacaaggtggaagaaaaacttttcctgagaccgtgaaaaa

SEQ ID NO: 41672 - DNA, 485 bp, Zea mays
  unsure (1)..(485): unsure at all n locations
ctcagcttctaaggggagaacacgtgataggtctaaccaatgttcaattcgaataagatagaccttgcgcagcttgtcaagcagggaaacaggtgggaggagcgcatcacagcaagaatgtgatgaccacttcaagacccctggagctgctgcatatggacctcttcggacccgtcgcctatctaagcatagggggaagtaagtatgggttagttattgttgatgatttttcccgcttcacttgggtgttctttttgcaggataagtctganacccaagggaccctcaaacgcttcctcangagggctcanaatgagtttgagctcaaagtgaagaagataaggagcgacaacgggtccgaattcaagaaccttcaagtggaggagttcctcgaagaagaagggatcaagcacgagttctccgctccctacacaccacagcanaatggtgtggtagagaggaagaacaggacgctcattgacatg

SEQ ID NO: 41673 - DNA, 512 bp, Zea mays
  unsure (1)..(512): unsure at all n locations
cacaactttcaccatataataatntcctttgtcaaatacaaatatatctgaacattgaccaatggccaaacacaggagttagtgttgctcatcttatgtcacaactaacattatgccattgatttacaatctgcgcatatgtgttgtacgcactgctcatgtaaacatatgggcaattaccacctagccatgatatacatagcgacatgattcacanatgcttanacttagcaagacatgatatacagagcgacatgatgcatggaaattgatgtttaaggactaacttctttaataggattggctgacaaaggcatgtgaaattctgatggaagtgggtaatccaccatggccagataatcgaatgaatagtcgtaacatgtaatctggcacacaagttagaagtagctttataacacaatggtcagtaatcaaatgaatgtcanagaaaacatgtagtactatgcattatatgaaagtataataatgggcaacagaaggagggatctgat

SEQ ID NO: 41674 - DNA, 424 bp, Zea mays
  unsure (1)..(424): unsure at all n locations
ctaagcttcgagcctcatctctcctcgnccttacgcactcgccctgctcacgcctcgctcgacgatggtagtcatgaccgccctgtngctgctctgtcgcgcctgctggagtgctgctgcctcgctgagccccttctcttcactctggcagctcaccactgctctctccttctcgccgagtgtcgagcccgcgccacgtcttcttggctccgcgctgctcgctgacgtcgccgtgattgctgctgcgccgctcgccagcatttctctggggctccatgtgcgctgcaatcacgcgtcggtgcatcgtcgaccccaaccgtcgtgctcaaggtcgtccctacgtcgcccctcacccctgctacatgcgaccagagaggccgaagccgaacgccatcgtgccgctcatcgagcacccgcaacagca

SEQ ID NO: 41675 - DNA, 382 bp, Zea mays
  unsure (1)..(382): unsure at all n locations
cgcagccatggtaagcagcatacgccaacaatatacgaattgacttaatctacctacnggtgcatagagttcaccaaaatacaaaccttcgactcgagagtattctttggccatacgtcgagctttgtttcttgtgaccacaccatgctcatcttgcttgttgcggagaaaccacttgagttctacaacattctggttaggacgtggaactaaatgccatacctcattcctcgtgaagttgttgagctcctcttgcatcgccaccacccaatccgaatcttgtagtgcttactctatcctgcgtggctcaatagaggaaacaaaagagtaatgttcacaataatgtgcaacacgagatctagtagttaccctcttatgaata

SEQ ID NO: 41676 - DNA, 102 bp, Zea mays
agacatctgaggggtgggtcgcgagcataacagttatagagaagcggctcagacgaggcagcgtcgatgaagaggggcccagagcacacctgcgccccgccc

SEQ ID NO: 41677 - DNA, 334 bp, Zea mays
  unsure (1)..(334): unsure at all n locations
aatgcttaaatgtttgcactgctttagtagtgcataactgtcatgagcatcacacttatcctatgacacaatgcacttcactttctctatgatatagacttgttctcattaacctaattatgtgcaattggcattttatgccaaaacatgtgntccttctctccatgcacatatttagggggaacaatctatngtgtatagaactatgatcatacttaattaacatatctcttgatcatatctctntcattctggtacaaatgcatatatcctattattcccgtaccatgactacgactaatatgttccaagtatatcactatgctaagtcgta

SEQ ID NO: 41678 - DNA, 425 bp, Zea mays
  unsure (1)..(425): unsure at all n locations
actagctgcttgcttagttatatccgagccaacgagtctggtgtgtgtcttgggaanatcttcacagctgtcagaaagatgctcctcgatgaaaaaaaggcagatggaccgatttattgccggaggcagtctgggcgctcaacacaaccgagtgcagggcgaccgggttcactcctttccgccttctatacggatcggaggcaatgacctcgcaagaaataaagcatgggtccctgcgtacagttccgtcagccgtgcccgacgtggacgagccaacttcaaaagacctcattgacggagaccgggtcttcgccctacaggccctaaacaaataccatgcccagaccaaagcatggcgcgaccacgcaatcattccgatggagttcagcganggggacctcgtactcgtccgaacagctcggacg

SEQ ID NO: 41679 - DNA, 331 bp, Zea mays
  unsure (1)..(331): unsure at all n locations
ccttggtgaccacggaatgggaagcaacaaccattttaccttgatgacacgggtgatagacaagatatttctcatatttcaatttgggcaatccttggatgaagtccagtgagcttaatcgagccaaaagatcacagctcaagtgacctagcctcctatgccacttccacaccagtaatgaagatcctaccataagacatcgagagggctagaagaatgggataaccggctcacataactcgaccaaacgttgaaatccgacaaacaagacctccctatgcatncaaaacacaagacagcccactcttaaagtgcacttcataatcatcct

SEQ ID NO: 41680 - DNA, 305 bp, Zea mays
ggtgggatatcgcccttgtgcagaaatttggcatttactagaagagatcattgatgacctggcttggtcccgacgaacaagctgactgatgaggatgccttagtttgattcctgctataacgtaacacagggcgaaggccaacgaaaagagtgccggtataaaggcgctgtcaatataaaaattgaaacttcaaaagaaaatcaccctaccaacgggtgtcgaaaaaaaactgactggaacaaaacactgttgagaaaatcttacgctctgcgtgtggagaattaaggatgacatttacttaagc

SEQ ID NO: 41681 - DNA, 437 bp, Zea mays
  unsure (1)..(437): unsure at all n locations
ccatgccatggtgaatggatgacctgcttcaactgctgatccgtatatatacatatctcgncttagcctcggcgtggaanatagcgtactacatttcatcgacataggtagcttttcgactttcaaaagccaccacgggtgagcctctggctggatgcacgctcaatgccttgttgactcaagcaggaatacctgccgcgcgcagccccgtagctccaaccaaaagcgggctggctgctgaactgggcgcatctcaaaggctcagcgacccgatcgagcttcggtcgcccccggcaggtaataaatgagccgtgatccagttgcgtntaattatactattatgcacgctagtggatagtgatgagtgttaattgcaatcaggatggtaccatggaaagccataacaagaacttcatcttccaagctgtccacttctg

SEQ ID NO: 41682 - DNA, 233 bp, Zea mays
gtgggaggagcgcatcacagcaagaacgtgatgaccacttctagacccctagagctgctgcatatggacctcttcggacccgtcgcctatctgagcatatgagggagtaagtatgggttagttattgttgatgatttatcccgcttcacttgggtgttctttttgcacgataagtctgatacccaaaggaccctcaagcgcttcctcaagagagctcagaatgagtctgagct

SEQ ID NO: 41683 - DNA, 346 bp, Zea mays
  unsure (1)..(346): unsure at all n locations
gcacataccagagaagataagagctggagtagcccaatgtttcaaggaagacgatcaaggtgtgatatggtttaaaaaccgcataataatgccaaagaacgaagaactccgccagcaaattcttgatgaggcacatcttagtcgctattctattcatcccggaagcactaagatgtacccagacttaaaacaacattactggtggactaagatgaagatcgaaattgcacgctatgtggctaagtgtgacacttgcagacgtgtcaaggccatacacatganaactgctggtccattacaatcgttgccaatcccaacatgganatgggaagacatcagtatggac

SEQ ID NO: 41684 - DNA, 343 bp, Zea mays
  unsure (1)..(343): unsure at all n locations
agcatgacgcaatccgaggtgtactgtgtaatataatcttacttttccgtccatgtatgaaatgctttggtgtggacgaaatttcattcttgagccgaaggcgaaaaacaccttcccttcttttcgtacacaacgaagcataaaaatttcctctttctccgaagttnttcctcatagccgaagcatntgccccttttctgtatggtatgatgatgatgatcctaaatatatctaaatgaatgtttatgaatgcacatgtcatgatgtaatgtattgtgcanatgattgtccgaatgtacatccaacaccataatcatagccttcattcccttgggaatgactc

SEQ ID NO: 41685 - DNA, 502 bp, Zea mays
  unsure (1)..(502): unsure at all n locations
agctccattgtccactgctgnttgagaaccttgagaggactgattaggcactacaacttgacccctcacttgaacaggtaggataacactaaagatatgcgttggagcctcgcctgaggaccgtgctggaacagcagcaacaactgttctgcgtggcaatccacgtgttgcagccaggatacctggtgggttacctccttgagttcttgccgcatcttggcggttctcgtggatagctccttcagaaccggtggtagtaccagcagctgaaccacttgttgcagatgcacctaagttatggaatgagagaagacatatcagttacaggaaaccagctaaacacacaggtggaagaatcaaagattcagttagcacaataatataacattccatgtgcanatgaactccaggatattncagaagatactcacgaacagagcatctaatctagcaagtacattgatgacacacatcatatctgagagagactactaccaacact

SEQ ID NO: 41686 - DNA, 343 bp, Zea mays
actcactgaaaattaaacacctgagagcaggtctttaggatttttaaaaattctcgggaaagaaatgctgtctattggccaccacacacagggtgccttacttcgaagattttcaaaaataaacacctcgcgacctttggagaacgcctcaatatccctgcttatgaaatggaaacgaatcacttttcttaggaattttttaacagaacttcacaaaaataaacaagctcacttgtctaataaagggacgatacgtgggcattccgtctcagttatcaaccaagttaatatgagaaacacccgctggggattcatgatagcttctggaaattctcagattatg

SEQ ID NO: 41687 - DNA, 435 bp, Zea mays
  unsure (1)..(435): unsure at all n locations
cgtcaattgtgtgaacttgagttgatccctgtctaacctgagtatatatatatatatatatcttgttgcttgagaacaagtatgtacaatagaggcttgacaattgtgtgaacttgagttgaacactgaatttgataatcacaactcaccatccctttcaatatgcttagaatatagctttttataatatttcaccctacaatacaaaactgntctatgaaggccatggtacattatcatatcctggattatcaacctangatttgtctatttcgattaataatggcatcgagtcaaatcttggttgtttcaaatgatagacttcgatatttgttatgatctatgacgtgattcttgatagcattactaaaaaatgacctatgtatataccagtgtcttccgttgaacgcacgggcatatacctagtcaatcact

SEQ ID NO: 41688 - DNA, 420 bp, Zea mays
accatacccaagcgagaacatatgatgatgtccatggacagcacactgtcaacactcccccttacttattgaacatatgcactatcaacatttaaggaagagacatatatgcaacaagataatactcctttagaccttacatgtgcatgacttccattgaaagattaattgtgagagctctcacactcggcctgatttttctctaacttttctcgcgctagacacatacttaacaagtatagtattggcacagacgaacttcattctatgagatcaagatgtcattgaacaactataccgtaccaatgaagaaccaatgaaagtcattattatcatactcatgaggtacaataagattattatacaatgtatagactgacattaaaaatgcatacttgactgaaacaattctgatataag

SEQ ID NO: 41689 - DNA, 376 bp, Zea mays
  unsure (1)..(376): unsure at all n locations
gtggatgcacacaacatatgacaggcaacccacggatgttcacctcactacatgagaatgctgatggtccagatataatcacacntggagacaacttcnaaggaacagtgcaatgactcggcaaggtggcaatctcaaatgacttatcaatatcacatggtctcttacttgcacccttgagcttcaattattatcagtgggacaactctgtgacttggacttcaatgcttattcactccatcagaggttattgtaacaaacatggatgatgaatcaatggtattcaacgaatttatatacaacaacctctacttagtggatttacttcaaagatgcagattaagaacttgctcttaccaaacttctcttggatggt

SEQ ID NO: 41690 - DNA, 406 bp, Zea mays
  unsure (1)..(406): unsure at all n locations
agcacttactgagnatgagtcgataccaacccagttaaatatgagatcacaattgataatttccacaatgcaatgcatgatagattaaatttaattctgtaagttaatcatgtgagtgtccgagccagtcttgaccgtgagcacgactgatatatcaactttacactctgctaaaggtgcacatctttactcacaagccgtatcacccatttgccaagggtctcgaatctcatcatctataccaatgagacaaggcaggatagcactaccatgcctctccaaagttccactagtctgacagtacctgcttcagtatcaagaagaaagaagcatatgaatccctcatccgaaaagctattacagtcagntcgacccaagaaccttcctatactctgcagccacacac

SEQ ID NO: 41691 - DNA, 377 bp, Zea mays
tacgcttacgacgcggccatggtatatatgcctatgctgtattatcatcatattgctcgcgctacttatatatatatatatatacacacacacgtgaatatatatagtcaatcaatcaagcccttttgagtacatatgtgatgtacaactctcgattttgatgcatactgcttcagatatggaacgagatgctgtcagctttacccatttatcgagtgaatgagtatatgaagaaactttacaagacatctgtacaaccctagatgagttgcagggattccacccattaaggacaaatggacaataatccatcatcgaagccaatcatacactaaaaggaaaaattcactgaatgacttctaaaaatcttgtcttat

SEQ ID NO: 41692 - DNA, 221 bp, Zea mays
  unsure (1)..(221): unsure at all n locations
gtctgacgagcctgagctntcttcacaatatgaagtattctttgaactgtgtcttcggactctttcaccatatcaggcctgaagaaggacctttcaccagcgtcagacgcaattagcggagaactacatctgcngcccatatnaaagcttccaaagggtggccatctcgattttcttgatagctcatattatatgagaactctgctagcgggaaacataca

SEQ ID NO: 41693 - DNA, 404 bp, Zea mays
  unsure (1)..(404): unsure at all n locations
gagcgaaaaagatactcccgatacgagagaagcagcgaatgcagctgagaaagctgcggaactcgagagacggatatgtattgcctaactgcttntaactctatgttttattattgtgacttcgaacttatttatagtttgtatcgcagctaaactatcttctccccacagcctttgagtcattggccgacccgaagcacaaatgaagatgaaatactaagatggccgaactttatggcgaactgtgactcaactactaaacaagctgggaagcagtttaaagaaaatactatgtgtaaaaagtcggatattgagtatattgctgaacaagggtatatctaagtttgatgaaataaactgttgtatcagtcttacacgctanacttactcatacatttgacctc

SEQ ID NO: 41694 - DNA, 493 bp, Zea mays
  unsure (1)..(493): unsure at all n locations
ctcaatctatcttgtcgcttatcanatatactntaacttatattattggctcaactcacaantctaaacctttcattccctcttgcttattatcttgaattttgttcatggggttcacttacggttcttaattagggttgcacattcttatcctttaagagactcaattgttttgatcatgacacttttaagcatatacttggtgaactctntcttacttaagttattatgatgctcatgcttactttggttcacataaaataatggttcttgggttggctttttaagagaaaccctatgtgacactgnggtgtcacagccttccccccttacaggaatctcgtcccgagattgngccagagtcctcccggngtgaagcgaacggtgagactgatagganaagggtggngattgttattattanggcacaactgctcttcgaatgtcattctctttgcaacttcagaaggaagtccctttaaagtttactcta

SEQ ID NO: 41695 - DNA, 384 bp, Zea mays
  unsure (1)..(384): unsure at all n locations
gtgctctcagagtccccacaatagcccgggtatttcatcatagtcatgtcatcttctgctacagtaaatctttcacattcaagatgactaggctctgccggcgttataatggtgtagtcctcttcgctctcattatcactctcaccctcaaccatagtttgtccagcttcaacattggaagcaccttcgtcagtaactctccctggcacaactagacctgatcgcttcattacttctgatatggacactgtttccgtagctttgccctcgtctccctcacgagacaccccagcggtggatcaaactctgtgcatatgtgttaatgctttntctaagacaaagctcatcaccagtgacgaagccgtttgctctgaaatgcaatac

SEQ ID NO: 41696 - DNA, 432 bp, Zea mays
  unsure (1)..(432): unsure at all n locations
cgaagccatggtaagtagcatatgcaagtnatatatgaattgactctatcctatctactggtgcatangtctcaccgaaatccagaccttcgacttgtgaatatcccttggccacaagtcgggctttgttccttgtcaccacaccatgctcaatcttgttgttgcggaagacccacttggttcctacaacattttggttaagacgtggagctaaatgccatacctcattccttgtgaaagttgtgagctcctcttgcattgcaacacccaatccgaatcccttaatgcatctactaccctgtatggctcactagaatacacaaaggagtaatgttcacaacaatgagtaacacgagatcgagtagttacccnctcttgaatatagtcgaggatggtgttcacgacggatctcgtcgtattgttcatggactc

SEQ ID NO: 41697 - DNA, 419 bp, Zea mays
ctcagcttgagctgccttaccttgacaagaagatttggatttcttcatatatacctgaaagctgaaaagtgtgtattttgcaatttataatatgtgaaatattcttttatttctatactaattcttttcatataaggcttaatacttagcaacgctttgagagcgcaaaagaatcgtgaagacgagagctataatattgctttcaacaacctaccaacagatggtattaagctacagaacgaagctttgacaaagataaattcctgctacattggtcgataagatataggaagacgaagctactcttaaagctcaagctaaggctcaaaagcgtgaaattaaagatcttcggacacagttagccacagctaaagaagagcgcatacttgaagagacgaaacgagaacttatcgatcagt

SEQ ID NO: 41698 - DNA, 353 bp, Zea mays
cctcgaagccataatcacgaattcacgatggggaatttcatttgggcccggcggagccacggactaaaaccttgccaaaatgcttctgccagatgcacaagctgtcttatgagacgaaagctactggcacagagtagtatcataataattttggctggtattgcttcttgccccgctctgatatgagccatccacctcccatgtctctaaagaggtgcgcatgggcctggatggaagaatggttctatgtgatgaataacttaattgagagggaagatatatagggacatatccaacaacctatatggcccgcttcggcatcacaagacctactactactcttggaaacaaaa

SEQ ID NO: 41699 - DNA, 338 bp, Zea mays
  unsure (1)..(338): unsure at all n locations
gtgtctctgggttccagatcactactgttgaagtaacagatgttgccttataaccagatntgacatactcagaacatccggtttggatcttggatcacaaggacataattaaccgaaagagaactctcaagttttataagatacaatggaaccaacacacggaagacgaagctacttgggaaactcaagacttcttagaaaagaatatccaggctttttagcttcatgtcaactgtaagatatgtacacttgttgtaatagaggaatgaaccccataccacccctgccttgtaccanaaataatgaaataanaatgtgacacgttgtcttttcattac

SEQ ID NO: 41700 - DNA, 374 bp, Zea mays
  unsure (1)..(374): unsure at all n locations
agttctacaaggctgattattcttagcatctcgttggtgaaggcaagtgtcctttgacctattatgtcccatntactttataattcatcaacccgcataccatgatcaacctaaggattgactagctttgtatntaccttgtccttgattacctcttgggttattattgtttagctttatgctattgctcaactctaatcaatgaacatgatgagaattatcaatgatacgctgcttcccttctttattatgatgttatacttgtgtcattcaagggggctcgagcggcttctcgagtgcctcttcgtaaggacctgttcgttagatgaaccgccgggaaaacagtccaaccatggnggtggaatgggatgccc

SEQ ID NO: 41701 - DNA, 286 bp, Zea mays
  unsure (1)..(286): unsure at all n locations
tgggatgggaatcgaattgcatggcgagcacgagagaagccgcattaactactaccctgattaaaagatacggngcacagtgacaacggtacaagtggaggttttccaatgtggcacgaaggactcacctcatacctgggagacgatacccggaccccaattagggaggccaaggtaggtactggttagctgaccaagatctctcttataagacggtgtatcttataccttccctcaaagacaacactgagctggggcagcaccactaacttacgccacccaggta

SEQ ID NO: 41702 - DNA, 412 bp, Zea mays
  unsure (1)..(412): unsure at all n locations
gcaggtaaacatgtgggaggagcgcatcacagcaagaacgtgatgaccacttcaagacccctagagctgctgcatatggacctcttcggacccgtcgcctatctgagcatangagggagtaagtatggtctagttattgttgatgacttttcccgctctacttgggtgttcttttcgcaggataagtctgaaacccaagggacgctcaagcgcttcctcacgagagctcacaatgaagttgagctcaaagtgaagaagataaagagcgacaacgggtccgagttcaagaaccttcaagtggacgagttccttgaagaggaagggatcaagcacgagttctccgctccctacacaccacagcanaatggtgtggtagagaggaagaacaggacgctcatcgacatggcgagga

SEQ ID NO: 41703 - DNA, 315 bp, Zea mays
  unsure (1)..(315): unsure at all n locations
gatccacaaacaccacagaatgcgactaaactacacatctaatattcatatatcatagttccacagcctctccctggaaaattgcatatatgggggaagcaacacagtatagatagatatcatgataagaaaacatatactacattaataatctcgtatcaatgggatacaaccataacaactngaactgaattaattagtgcgcacgactatgtaaaaacaaacatcctctgacaagaaagtaataaataaatgatggctgtgtctgggcagcattattatgagaatgtaggaggatgtgctggtactttccac

SEQ ID NO: 41704 - DNA, 340 bp, Zea mays
  unsure (1)..(340): unsure at all n locations
tgttgctgcttgaccaagctgcatagagatgactgtcacagggttgattctgggagaatcttcttcttatcttctcttcacaatacttttttcactgacnctttctttctctttgctcttcccactggaggattctatcaaagagtattaccatcttacagacgaggaaaccgaagactatgaaccatgtacaacagtcttcaacccaagaatcaccaagcattgtgatcttacgggcgagggagtggaanatggagtngctcgctatttggctgagggtatnnttatcggatcgtgctttgatttggatgggaactgacggagctggtgggggggatta

SEQ ID NO: 41705 - DNA, 385 bp, Zea mays
  unsure (1)..(385): unsure at all n locations
aacgacgagcgcacacgcatgcgcgtcngcgggtttccgcactagtcaaatccgtcggatccagcgcgatgcgtgctcacgcgagcgagcccactccactgatgccgcagcagcacagggacagggaatagcgtacagtaccggctggccggcggtgtcgttcctttgcatttgcgtgctccgaagcacacgcagcggaggcgctggaggtgcgccaggcccggcattgactcactgcgccagcacagcaacgccgagcggctgtgcgagagcacaggagcgcgacgtactactacgtctcagcacgttcgtgcaggcctccgacatagggcgctcgntcgctcgcgtgaccgtcgcctgtagccagctcgccgtccatggatgc

SEQ ID NO: 41706 - DNA, 383 bp, Zea mays
gatataacgcggtagattgcctgacatgccgtgctgaccgtcttagcccagcaagtgtcacgtgtcttgtattcatctaacatggctcttgcagcttcaattactgttctatttcttctttccactacacccttttgttgcgagtgcatgtgaccgagaacttatgtttgattccttcttggcttaagaattcttcaacacctgcattcttgaacttcgaccactggcacttctcatttctcgatataagctcaactcatttgagctctctcatgaattcatccacgtctcttgagtctacctttgcactcaaaagaaacccacgtgtacgaataatcatcatattactaaccatcttaccctccatctatgaggcacagact

SEQ ID NO: 41707 - DNA, 310 bp, Zea mays
agagtggatgggggtctgacttcgtacgggactgttggcttaaaaccgtggcagtgacatatgcaggtaaggcactatgtctgggtggaatcctactgagtatatcgatcgatcctgtactttcgattaaactaatactgcctgctatataacaaggaactaagatgtaaatgaactaggtaaacaatgatgctctaatagcaatctaatcagatagtactatttggaagtaagtgctaagatcatactatacttttgcaaacagtttaaatgatacttactgatccacaacactatctgaagcttctta

SEQ ID NO: 41708 - DNA, 461 bp, Zea mays
  unsure (1)..(461): unsure at all n locations
tatgaagatacttcattccaacgtgcgataatcggcgatgccatatccaacccacgttagtcttagcaactaagcaagtgtcgagttcaactctattaaaatcaactaagtatagctgaccctctaacactcccttaaatgctactgaatcatcacttcttctaaagacagtaacacctaaatctataaaaagacaattcgagccccatttgcataattgagaaactaanagcaagttgtagtctaaagaatctacaagacaaacatcggaaatagaatggtcaggtgatatagcaatcttaccaagtcctttgaccaaaccttgatttcatccncgaatgtgatagctctatatggatcatcggttctctcataggaggagaacatcatcctcttcccagtcatgtggtttggcacccgctatcaatgatccaacttgagcacccagatgcataaaccta

SEQ ID NO: 41709 - DNA, 416 bp, Zea mays
cgtgaagattcttcattcaacatgggctagtcggcgatgccagtatccacccatattagtcttagcaattaagcaagtatcgagtccagctctattaacatcaactaagtatagctgaccctctaatattgaaagggaaatgtgcccttgggccatatccaagtactttggtgatttaatgttcaacacaagtgcctaagtgttaaatggtggacaaagtacaaatcaagtataaaggtatgtttctcagacttagtacattgttttagagactaatgtattgtgtctaagtgctggaaacacgaaaaatcaagttgaaattaaagatggctttgttcagccaaagtcagctctgtctgggtgcaccggactgtccgatggtgcaccggacagtgtccggtgcgccatgctgactc

SEQ ID NO: 41710 - DNA, 286 bp, Zea mays
  unsure (1)..(286): unsure at all n locations
ctgttcgctccaccagcgaacctgcactncgcgcagctaccgcacgatgctgcgaccggatcaagccaccgccaattggcctcctaacaaatatacctcccacggtcgcacccaacagccgagcaaagaggcacgccgcgacggcataccgccgaacacctggtgggagtgcacccgacccgtctacggagtcacaccggacaacgacgcacgcacggagagacatggaaggcaaccaaaaggacaggacgaagagcatgccacctgacccgagggggatggaggc

SEQ ID NO: 41711 - DNA, 375 bp, Zea mays
  unsure (1)..(375): unsure at all n locations
tcggactgttctctgaagtccctttgatgtggagcatattggctttcttctggctgctggccttgntgcaaccgaggtggaggcggaggctgttgccatgaagctgaaggctgacttgccgaagcagcagagactgcaggatggttgcccacatattctgggatgtagggcgaatgataccaagctgtatgcatgacctgcttcggctgggcttgttgagctgctgcttcagctatttccttttgcttttgtatagtaacatggcacatcctggtagtatggcctttgttctcaccgcagaataagcaaaagattcttctcgggtgatcgccaaatcttcctccgaagcctctggcgcctctgcctcttggagct

SEQ ID NO: 41712 - DNA, 386 bp, Zea mays
  unsure (1)..(386): unsure at all n locations
acaaaatgagcangcngagcagctagctaaatcagcagcacaggggctgcctctaccttcagaggcatcttacgaaacaataaaagcacccccgggggaacccctagaaagagcaggcctcaacatagccacctgtcattagcgaaacacaggagaacccgagaccatctctcaccttcagggaaaggttcctttagatgacgaagcttataacaacgacgatagaagcaagagcccgcccatatgtcacgatagaaggggagccgcaaaaacaaggaggttgcgctccgctgctaaatgccaacctaaaccgaacgcatagagctaaggaaagaaaacatgcaggcccgcgtggacccacaaaggaacaggccgccacttcgaaa

SEQ ID NO: 41713 - DNA, 369 bp, Zea mays
  unsure (1)..(369): unsure at all n locations
tataagctgtgcctctgccgggcgcatcgtcggaaacacattttttttttgtatccggcgtggntccgtcttggaccaaagaccgtgaataaatacaactatgggggtctatgcgcaactatcaccgaaacacggaaacaatgtcgtgggatcttcactgtgttctgaaatcatctacgacctttacgcaaaatcaccatcgctggcgcctgcgcgggtgcgtattcccggtaatgggctggactgtgctggtttcaacccgacactgtcgatcagttcttcttttctttctctgattaagttcagaaattcatacgaaattctaaaatatgatacaaatatggggaccaatcatactatactctctat

SEQ ID NO: 41714 - DNA, 427 bp, Zea mays
agcttacaacaaaagaatggaggcaataactatatcatatgtgataatataatgggaattgtataaacatggagtttgttaccactcctcaaatgtatatcaagaaccgaaggtatggaattaatgaaagagatacatgcaggcctgtgtggatctcacattggatctaggcccttgatgggaaaagtctttgacaaggattttattgcccgaacgcatcttctgatgcagcagaatgtgacagaacctcccaagcaattaggcccacctacagttgtccttgtccaacagacatcatacaaccctgtagatgttcctgaatcactcgacaaactcggtatcttctttcttacctttccaggaacgtgtcacccatcttgcagacattacagaacatcggagatatatagatgcggaagcgattaca

SEQ ID NO: 41715 - DNA, 409 bp, Zea mays
  unsure (1)..(409): unsure at all n locations
tggcgactgccagttcganctctagagcagtcctacgtggtcttttgctccgctgtgtacgacaagctcgcgcgaagccaccgcttggacgcggtccacagcagccgcgcccggctttccatcgcgttaagcagaggggcctatgggtgtcgccaacgtccacgactctctggttgttctggacaccgcatccgacgatgacaccatcacgccgtccagctcatcgtccacctgaagctcaatctgccacgtaagtcgctactgaccggacatgaattcctgtgtgttgggacgatgaccgctgctgatgttgtgtgagtgtcctccaacatgatgtatgtagtggagtaacgcattcgatggtgcaactgcccagggtactaccttgctgatgagcccggagtgcact

SEQ ID NO: 41716 - DNA, 432 bp, Zea mays
  unsure (1)..(432): unsure at all n locations
ttagagtgacctgcngcatgcgagcttctaaagggagagcacatgtacgattttctttgttcattctgagaaagacaggatctgtggcgcatgccacgcaaggaatcaagttggagtccatcatccacacaagaacatcatgacaactgacaggccgcttgagctactccacatggatctattcggcccgattgcttacataagcatcggcgggagtaagtatcgtctcgctattgtggatgattattctcgcttcacttgagtattctttttacaggaaaaatctcaaacccaagagaccttatagggattcttgagacgagactaaaatgagttcgggttaaggatcaagaaaataagaagcgataacgggacggagatcaagaactctcaaatcgaaagctctcttgatgaagagggcatcaagcatga

SEQ ID NO: 41717 - DNA, 344 bp, Zea mays
cacctctactataatctaccaagtataggtgaccctctaacacatccttagatgttatacgaataattactccttctaatgacagtgacacctacatcagtgaatacacagtagttactcatttcgtataattgacatacacaaagcacattgtaatgaaatgaatgaacaacataaacattgtggatgtgaagggcacgtgataaatctattctaccacaatctatgaccaaaccttgatcttcataccccaatgtgattgctcgcctgggatcttgcgttttcttatcagaggagaatcatctcttctcccctgtcacgtggtctggcgacactactatcca

SEQ ID NO: 41718 - DNA, 426 bp, Zea mays
tatgaagattcttcattccaacatgggctagacagtttatttctttgcaacccatattaagcctagaaactaagcaagtgtcgagttcagctctattaaaatataccatgtatagctgaccctctagcactctcttaaatgctatcgaatcattcactcttttaaagacagtgacaccaacatcaataaatagacagttgtagcccatttgacataactgtgataccgaaagctaattataatttaaagaatctacgataaaaacattagatatggaatggtctggggatatagcaattttacccacacctttgaccaaaccttggtttacatccccgaatggaatccctcgttggggatctctgtttttcttataggacgagaacatccttttctccctcgcatatcgttagtgcaccccctgtc

SEQ ID NO: 41719 - DNA, 358 bp, Zea mays
  unsure (1)..(358): unsure at all n locations
cgtagctaccactacatcacatgtgngctgatatctacatctattatagcaaaaacatatactgcatctctcccgaagcccaactgctacccttgcataatgtgtagtagtagataagtatcactgagattattaaattatatttttggattgagagagtactatttaaagaagagccttgcatgcaattacttttgtttgaataatgttttcaacttaaattctttttttgcatgtgtgacatttattcctccgaatatttttccatggatctgacttataagtcattttcataaaccaatgccaaagatgaatccctggttcttacttataaaccccgaacaaacccactatcacg

SEQ ID NO: 41720 - DNA, 352 bp, Zea mays
aactcagctttaaaggaaaccatttaggacaacaaagttttttttgttaaagacacgggctgtatcgcatgccacgcaggacagcaagctggagcccatcatccacacaagaacatcatgacaaccgacaggcggcttgaactactccacatggatctattccgcccgattgctcacataagcatccgcggaagcaagtattgtcttgtaatagcggatgattattctcgctacacttgggtattctctttacacgaaagatctcacacccgagagaccttaacgggattcttgagactggctccaaatgacgttgcgatagggatcaagacaataagaagcgaccacggca

SEQ ID NO: 41721 - DNA, 376 bp, Zea mays
atagctcactgagcagataatgaatgtgtcttgtaacaagggagcaagacggagaagaagaagcctatgttacaccccgattctaagggtccaaaacccggtcgtaaacataatcaccaaatgtgctgggaccaagtctcacacatatgatgaattatggtacacgatcgaatgtcacatctctatatataacatgagttctatccacaataaataattacattattaggagacaacggtccatcaatcccgaagttgactgagagactacgagctagaactatcaccaacacatatatacattctccatgcgcatcatcctggggtacctgttcttgaccctgtgggtgtgtgagacagcaagagtgagctctca

SEQ ID NO: 41722 - DNA, 377 bp, Zea mays
ctggactaactcggctgagtagctgtgtactgtttggtcaccacgaaaccacacctgaataccttggctgctagggtcctatatgctgcgtgtatcctatatagcccagcgtggacctcattcattatatcgttccgagtatccgaaactatgtattttatgacgactcccgtcctgcccctcctttatagagtccaccctatgagagtataatgagctgaccgacttgcaatgcgctctgctgcattactgacttcggctcctgctcattatttatatatctgatgattggtccctccacgctaggaatttaactctggtcggatagaatatcgattctcgagcccgatccaatgaaatgctgggcgtaagacctc

SEQ ID NO: 41723 - DNA, 355 bp, Zea mays
gctggctactaaaatatccttcagcttctgccacgacgtgattgttacccgccgaagagaacaatactacttttgagccacactcctgactgccatgacaaaagactttgccatgacagcggtgttgccaccatatgatgatatggttgctctgcaacccatgaggaactgctttgggtcagaatgcctgtcatacatggggagctgtgaccgtttgtaccaaggcgaccatgggtagcttgcaattctactgctatgtgagacgcattattcaaagccaagctaccactgatggaatcaccctaccatacatcatcataacttggacttttcctgatgaagctcttttctgctg

SEQ ID NO: 41724 - DNA, 435 bp, Zea mays
tcgtccatcaggcatcatcatggtgaaaggtgtagtatatgtggcttccgcataacgaaaaggaagtacaacgaagcacgcttcatcaagtaggctttgttacgacgaaacaatgagacgatgcaaggagaaagtgttgctcaagttataaaatataaatggcgatgttgcccttgtgacatttgtaaactttatatgtaattcgtgaggacatgaatgtaataacgcacaaagccttacggttgcctataaataattgaacagtaccacatactgttcacgctgaattgtaattgcttttgcctataaatagtgtgtcctttgcctgaagatcattatatccgaaaagagataatgcttcgaaggacgaacgtccttaatgcttaataattgttttgctgttttcttgactcacagcatttaagaacacgtgat

SEQ ID NO: 41725 - DNA, 351 bp, Zea mays
ccctgaaatcatgaagggacaacgcttatcacatatgggacatgctgtgacgagtgcataaacggccctgagcgttacacttatcctatgaggcgatgcacttcactattactaagataaatacatgttctcataaaagtgaacacgtgcaatcgagatattaggccaaaacatgtgacctttctctccatgcaacatattagggggaacaatctatgttgtgtagaactatgatcctacttagagaacatatctgttgatcatatctgcatcattatggtacaaatgcatagatactataattcacgtaccatgactacgactaacatgtttccaagtctatcactatgc

SEQ ID NO: 41726 - DNA, 416 bp, Zea mays
ccagctccatctatattgtggatggctgtttgtttctgttttatttccctcagcctttttggcagcttcctggcttccatgaatagcaataggcccctgtttcgaaggtatcttcatgcatagatatgttggataaagaattacttcgaaagcattaagtgtcccacgaccaatgattgcattataggggtatttcatgtcaacaatatcaaacacaacttgtttagttcttgtgttgtggacaaatccgaaggtcactagcattgcgatcttgccaagtgctacgatctgccttccttcgaagccacaaagagggtgtgtagcatcatgaatctttgtctctggctctagcatctgtctgaaggccttagtaaatatgatatccgctgcactacctgtatcaaccagaacattgt

SEQ ID NO: 41727 - DNA, 302 bp, Zea mays
agaatctcagcttataaaaaaagctcggccctcgcggggataatatctttttagcgcctatcctaggcttcggtacgaagcaacccctaacacctgtcctctatgtcgtgcgaccttctccatcagacatagatcatacccaacctttccattatacacttgacccgtggctataccttttaagccaatttaaaatattaattcgggtagctaatatgcatgagttggcgcatattccatgagaatcctagatgttatacaccgacttgtttgcttacacgctaaccttctgagttcttttt

SEQ ID NO: 41728 - DNA, 420 bp, Zea mays
  unsure (1)..(420): unsure at all n locations
agctngaccttgtaacgaggataagctgcctttgtctcaaaggtggatggtccttaagcctctttgaaatcattaagggaaaatgcttaaaatatttgtaacatgctttcagtagtgcataaactgtcatgagcatcacacttatcctatgacacaatgtacttcactttctctatgatatagacttgttctcattaacctaattatgtgcaattggcattttaggccaaaacatgtgttctttctctccatgcacatatttagggggaacaatctatgttgtatagaactatgatcatacttaattaacatatctcttgatcatatctctttcattttggtacaaatgcatagatcctattattcccgtaccatgactacgactaatatgtttccaagtatatcactatgctaagtcgt

SEQ ID NO: 41729 - DNA, 422 bp, Zea mays
tataagaacaagtcagagcactgaacttgcttatagcattttctttgtttggacactggaattggcttccatactgaacctctcgttccgtctccaggttttacttcgatttctctcctacctatgttggagttgggatgatctgcccccacattgtgaacgtttctgttctactgggaggcatactttcctggggaataatgtggcctctaattggcaaccagaaggggaattggtacgacgccagtctcccagaaagcagtctccatggactgcagggttacagggtaaagattcatatagtcatctatcttttgttttatcgccacttgcaaaccaaacagctaatctggaaattcctgactagttcaggtttttatatccatcgcaataattcttggagacggcctgtacaacttcgt

SEQ ID NO: 41730 - DNA, 126 bp, Zea mays
  unsure (1)..(126): unsure at all n locations
cgcttaacggtcacaatccaacggccctgttgatctgtgttctacgcaccggactgtccggngtgcaccggactgtccggtgcgccatccaacacaagctgccaccacactgtcacttttggtggt

SEQ ID NO: 41731 - DNA, 424 bp, Zea mays
  unsure (1)..(424): unsure at all n locations
tgacattatctcccttttggaagccaatgtcatctttaatgtttttatttctcccactatagagcatgcttctagcaaatttaattntttcattttctaagttatgctcattaattttggcactaagttgagctatgtgatcattttgttgtttaattaaagctaggtgatcatgaatagcatcaacattaatatctctacatatagtacaaatagtaacatgctcaacgtagatgtagagggtttgcaaatatttaattcatcaatcttagcatgtaacatgacattttcatttctaagattggaaataacatcattgcaaacatttaaatctttagccttagcaattaatttttcattctcaattctaaggctacagagagatgcattcaatttgtcaatcttagcaatcaaattagcatta

SEQ ID NO: 41732 - DNA, 325 bp, Zea mays
  unsure (1)..(325): unsure at all n locations
ggatgaaatcgtattgcctacaaaaaaaaaggcaccactcattggagtgaaaaagtggaaagatattgtaacactccgggatccacaaacacccagaacggtactaaactacaactctaacattcgtatataaaaattcgacaacatctcctttgaaaatcgcataaacggngaagcaacacagtataaatagatatcatgataagaaaacataatcgacattaataatctgctagcaatgggaagacaaccataacgacatgaaccaaattaactagtgcgcacaactaggtagaaacaaacatcctttgacaagaaactttta

SEQ ID NO: 41733 - DNA, 437 bp, Zea mays
cgatctcacatcacgcaagcaagaatcgagcgaagcatactatgtttgttcatatatccatccaagcacattctatacattatatcatcccatcgaagaactctctctttttttaattatactatgcatatatatatatatccattcaataactcacacaatctgcatctccacctagacttcacacgacgtaactatttcatacttacgcaaacacgccaagaccagaaaacatggcttcacaacaatacgtactggcctattcaaatatccctcgctatctctctgtttcagcctacgctctgcatatacaataacaagataactatcacaaccactacatctattctctcccaccatacaacataattaacatggattgcgaaagagctcaccataactaaaccaaactcccaaagaaatatccctaaatagaa

SEQ ID NO: 41734 - DNA, 366 bp, Zea mays
  unsure (1)..(366): unsure at all n locations
aagctttaccctatataggcattaaaggggtaaaacttaacccaatcttttttcctacacgccttangggcaaagcgataaaatgaccccaagaataaacttgaatcacttttatacccctgggataccagaaaccctaattggaaccctgtaaaaccctgataccaaacccttagggcttatgtgcaaaattagcccacttttgggttaaagtgccaaaaaccaagccccataagtatcttaagtccattggttcacaaatatgtggacttgaaagccaaaccctaagttttggacttaaatgcaaaatggacctcatttgagttctatactaagtctgaaatttagtgttgaacgctccacttt

SEQ ID NO: 41735 - DNA, 263 bp, Zea mays
  unsure (1)..(263): unsure at all n locations
agctagacataaccgccttgggtgaaaaagacagaggttttttttgttattacaccgccanagcctgccgtactgaacattgagttccgtctacacgaaatactaccaactctctcctacctaaggtggagttggcgacgatctgtcaccacattgtgaacgttgctggcctagtgctaggcttactttcttgtggaataatgacgcctctaattggaaatcgcagggagaatagcactgaaccctgtcatccaaaaagcaga

SEQ ID NO: 41736 - DNA, 401 bp, Zea mays
  unsure (1)..(401): unsure at all n locations
caccgcggctgcagctatgcccctctgccctatagctttgtcctgaatgaactcngctgcgcccctgatgcttgggagttgtgttgctgcccttacgtatgattttccttgtcgtcgcttgagctaggattatggatcgtcctgacatgccttgggttgagttttccttcgaagcccctggtcatctctgagtatctataggcttcttcccttctttgccgaaagtcattgttggctctgatgtacttgtccattttctggagaagcttctccaaagcttgtggtggtgaaagggaaatatggtcaaacctcttcctaaatgattttggtggttgaaatgcgcaacacaaacaattggactaactagtgtgctctagattatatattctacaggtgccaaa

SEQ ID NO: 41737 - DNA, 207 bp, Zea mays
  unsure (1)..(207): unsure at all n locations
ttgtgtggagttgggagaggattngatctctttggtgtgtcttctatttaatgctataactcttgtaaggcgtagaagtgtagaaacttggatgccattgaatgtggggttggtgccatacctcaccctccttcaccatttatttgctcctctaaacctcctcatcatgacccacctccacccttctatcttccctctttctctcca

SEQ ID NO: 41738 - DNA, 433 bp, Zea mays
  unsure (1)..(433): unsure at all n locations
tcatgagtattaaagctctgcaaaggctctgctggtgtatgttctgagcgnacaccgaacgtgatcgaacatcatcgatcttttcatagccttcgtgcataagtgaactaagacatttgtatttccctttattatcacttttattactctgctccaagcgaagtaaatactggaagcgaatgtgaaacacagatttaatgttagccagctctgaaatattgaaggatgtgtttgtctgaggtgaaatctcaatacgtgtagttttagactggaccggaactttcacaaatctagaggaagtataactaagctataatttctttatcaagctcattccatcatccctttcaaacatgccctcgattggaaaccgctctatatagactccaacccatttcgtcgggcacatacctcaccccggtctagaatacgt

SEQ ID NO: 41739 - DNA, 422 bp, Zea mays
  unsure (1)..(422): unsure at all n locations
catannaaactcaagcttagcaagtgccagncctggatccgtgaagactcgctctttgtgcttattataaaccacgagggattggctgtagatccgaagaagattacaactattttggactggaaagcaccaaacgatgtccgaggaatttagagtttcatcggcatggccagttattatcggcgtctcattgaaggtttctccaagattgccaaacctatgacagccttgttggcaaaaaaggttgagttcaactggaccccagcatggcacaagtcctttgaaacattgtatgagaaggtgacaacgtgcccactactgattctaccagatgttcactaaccattctcagcatattgtgatgcttcatacatctgactgagatgtgtgtctatgtaggaagggagagtattggcctactc

SEQ ID NO: 41740 - DNA, 375 bp, Zea mays
gatctaagcgactgagctgcaactaaaaactggatgaattgtttttcccactagccaaaaactccgactgggaacagggttgggggtttccactccaaaatccttgacctgctagatctaccgcattcttagctgatacacgtgccccaaaaattgaatttctttcaccagaagcgcacttgtgacttggatatagctgggttcccttagcgcgtcaatcaatccgaaagctgacatggcctcttcattcttagaatatataagatatcgtcatgaagactaccacgacttgtccattaggctgaataccagttatttataaggaaagggcggacatttggacccaaagaattccaagattaaacaatcatatgc

SEQ ID NO: 41741 - DNA, 410 bp, Zea mays
  unsure (1)..(410): unsure at all n locations
tggcgatattatcggaagtcatggcagaaacatcattttttgttctgcctcagactgaatacgctgcctccactcagtaccatcgttttgactgtgtgcatagcaaaagacctgccatttcatcatgggtcagagagagaaccgcaacataatgtgaaaacagagaggttcaatggaaataaaacctcgatattagcacgatcatgcattccaaatactgatctcatgagatgggaaagggggtgatttccaaaatcactactcacatatctgtagcgtggaaaggccatttagtctgctgttggataaatcttttcaatttaatgtacaaaagtaagtttgtgtacttaccctactttaatcggcagtgtttaccctcttgctttacaggaacaggangtggatgcaca

SEQ ID NO: 41742 - DNA, 277 bp, Zea mays
taggaccttttgaagcccgatgcccctagcatgatagaagtcgatgacatgatgaggactgcgtcttccttagaacctcctgcaggaatctgagtttactttggcttctatcgttcatagcctgactcacctgttagacatggtgggcttgggcgctttttgcacaaccttgttatatgatagtggtggtgactgagtagagggataagccatttgattagtgagcttggcgggtgacatgctcatctcccttggatgggcttacttgttcgttcta

SEQ ID NO: 41743 - DNA, 321 bp, Zea mays
  unsure (1)..(321): unsure at all n locations
cctggcaacacgctggatgggggaatactatgctgctgggtaacgcggatcggttcacgttttggaggatctgtgggaatgattgacatatgcaagggttacgtgctacatatgtcctgtggttaaggatcctcagctgggtataatcggatcgaatcgtcgttgctcctcggtcatggagactctaaccttcgaccactcatcgtaagtcatgaatggaatcccaatagtcacaatatggctgtattgattaatgggatgataaatctagaatagatgcacacacagncaattaatacctaatctcggcataaaatgttg

SEQ ID NO: 41744 - DNA, 429 bp, Zea mays
  unsure (1)..(429): unsure at all n locations
agcttcgtcctgaccatgctctngtatgctcatgacccgattccgaagacacctgttcacatatttcacttggaaaacattgtcaaatcatgttttttaggacctttggaagccgaaggcccccaacaagatagaagttgaagaagcgaggactacaccaccacctgaagaacctcaggcaggaaactgcttttactttgacatctatggaacagagcctgactcacctattagacaaggcaagccccggtgcatttgccacctccttgctattttaaaaatatttctcacttacttgatgcattaggtgataggagttgtgtgctaaaccagttgctgcatttccttccttggatttgattacttctccttaataccctggtttacaaaaaggtttttcttatgcttagttcttctttggaaaaacaa

SEQ ID NO: 41745 - DNA, 433 bp, Zea mays
  unsure (1)..(433): unsure at all n locations
tgngttggtctagcggttaagctatggaggtctacaagttgtgcttgttcaatttcaatagtgcaacacaccagggctagaaaacgccaacacaagcataaatttttttagggggttcacttgctaactcaaggttgtttggatgggggtctttctatgaatagaacaagcaataattttttttgcaaaaagggttgaacatttacaataccacctagatagcaaggcaagagaaacacatgacacgacctaacaagacttactaatctgacatgagctaaggcatttctaacatagcagtacatcacattattcacaagttattattattggaataaaggtgagagaagcatgttgatgcacaagagacagttatgcgacaatcatgatgcatgctcattctagtcgtcttctcagacctaactataatttt

SEQ ID NO: 41746 - DNA, 378 bp, Zea mays
agcttgtgaagattcttcatcccaacatggtttatttggcgatgccagagccaacccatattagtcttagcaattaagcaagtacgagttcagctctattaaaatcaactaagtatagctgaccctctaatactcccttaaatgctactgaataatcacttcttctaaagacagtaacacatatatccgtaaaaagtcagttgtagcccattttacataattgagaaacagaaagcaaattgtaatctaaagaatctacaagaaaaacattgaaaatagagtggtcaggtgatatagcaattttaccaagtcctttgaccaaaccttgatttccatccctaaatgtgatagctctttggggatcttcgcttttctcgt

SEQ ID NO: 41747 - DNA, 322 bp, Zea mays
  unsure (1)..(322): unsure at all n locations
taacatgctcgatacaagagcattcttttatttgcatgttattatttatgtccncaagctaattacttctatatctttattgtgaatcaactcttgaagctctaggtttctttccttttcaaggataagcaagtcttcttgagcatcaagagttgcctttcttttatctaacttttccattaattctgtgacaacattgtactcatttaagccaaattctttaatcattctattttatatggcaatttgatccatatcatcatcatttgaaaaatcattactaaataaagttaccttatctccttttgcctgacgcaaaatc

SEQ ID NO: 41748 - DNA, 367 bp, Zea mays
gatctcttggccaacgagtaacatgacctatgggtacaaatgcacaacctctgcaaagagtacaactggtatactaaccgtgctcgcggtcatgaccagctcatgactctcgtatgagctaatttatcggaattaaacttcaacttttgtcacttgccatgcgcacttgcggcttacttgctaaatttcgatctattattactttagcttgacatctacttacatctactgacttctaataaaacttgatcaaattattaaaagcaatgcttacctctaacgcctatttgctgatcagccctacacctcacatgaactcccacctttggtgagttcatgcacattatttcctaaacctgctgaccta

SEQ ID NO: 41749 - DNA, 413 bp, Zea mays
  unsure (1)..(413): unsure at all n locations
tcncccagcgcctacaggctcacaacgccaaacggttttgttctgtagcactcctggaacatcgacaacctgcgcaaattctctgtttgactcataaaggctgatttcgcccttgtaattcgcaaaaacaatcttgtaccggcccgcactcttttactcccggggggtgaggtttttaacgaggcggagccatgtaatatatgtgtgaaaaatcccccgcaaaaacatgcgtcgaatacagaccgcgacgacggtcttcgacattcgaccaatacgaggtcaccgcgaggctaagcgctagccaccctcgcgtgcgataaatccgcgcagaagtcgcctaagggtgcagccggactagcacaacaagtgcgaaaaaaccgaagtctaccgtgaagactatccacgcagaagtc

SEQ ID NO: 41750 - DNA, 390 bp, Zea mays
agcttgagcgtgaccataaggactttcatttgacctccagaaggtgttcgcccgggagctggaggtgacccggaaggagcgaggctggccaagaaggtggtgcacttggaccagaggcaggaggtcatcacagagctccaggcaaagctgagtgcctacaacaagatgctggaggagcagcgggaccagcagtccgcgactgtggagaacctgaaaaaggtgcagcaggggctcgatgatagggccaacagccttgccctggccgaagagaaccttaaggagaaggatgcctccctggataaacgggcggcggatctcgcctggcgggagaaggacctcgcctttatggaggaaatgcttgagaggcgggataagctgctggccgattat

SEQ ID NO: 41751 - DNA, 428 bp, Zea mays
  unsure (1)..(428): unsure at all n locations
tgactaagataattctatcttcttgccttctcatgttcattatgttgttcttgagcctcttatcaattaacttctactccatttctatttgtagttgtccatgtgtagcaaagcttgatgtctgtctaccatgttgttcttgaggctcttatcaattaaaacttctactccatttctatttgtagttgtccatgtgtagtaaagcttgatgtctcggttttgtccacctccttctccttttgatcctttctatttagtttgtttaatgcataagatatttatatgccatctagtcgttgtctcaattaactatcttaacttacttttaaacgatcctacattctaattgtccaaaaaatcctagttgngttgattagcttccttactcttcacatccttcagtgatatgagtaccctagctcattttt

SEQ ID NO: 41752 - DNA, 323 bp, Zea mays
cctcatctttagtgaccgaatctaaccccacccccctaaatgatagtttctgcgaacatcgcgccaaatatcatgcctcctgttgccccactaaccatgccaggaggaatagcccacaagtgaatgctaaaggaatattgaaaagatgccctacaatgatgggtaaagaaaggtgaaccaagacaagtccctaagcccacaatggaagaaggggcttgcgttcaaccatcccaggaaaaccctagcaaatgcacacgtggtggagatcccccaagtcacagaaggaacaccctatatgatgccctggggagaattcactcccc

SEQ ID NO: 41753 - DNA, 410 bp, Zea mays
tgagatcggattcgaccatgatccagtaatcgcttgtctatggtttctataccaagattgtagctggatcatagggctacaactttgatacacagagatggtcgagtcactacatgaatgtgggaacaaatctcctggcaaattgctctgtcaggctaactgaataagaatctgatggtacagtaaacaaaaatcttctgttcagtccccctcgccgccggtgacctttgcgcccacatttgcgtcggctgtctcgatttgtgcctcggacgagtggattacgctcgacggtaaaaatatctcgtcgcggatgaacacaagacactgtagccgctctgtcttttgcccacctgcaccggcgacgtggtcgcatgaccattgccacggctgttcccgttctcctcgggtat

SEQ ID NO: 41754 - DNA, 420 bp, Zea mays
  unsure (1)..(420): unsure at all n locations
ttctcgactaagtccgcgacagggcctcatggacaggtgttttttcccgaagcggcaaggccgaccgagccgaaggattcccacgcctctgggataccgatacctcactcgtcccttccgcgaaaagcaactctcgctcacacaaacatccctgttaccgacagagttcagatgctcggaacaggaggaaaaaagacgcaccttctcgagcgcgacgagggcgngttcttctggcctcggcggcccgagaaagcacacgctacaagatgatctgattctgcatgctcgggtcttcacgcccaatggagccgtatcagcctcgcatcgacgacgtctttagcaaagcccgacccagcctccggcggcgccgtggttcaagggctccttcgggaatccggcccgagcaggcggcttaaccgg

SEQ ID NO: 41755 - DNA, 429 bp, Zea mays
  unsure (1)..(429): unsure at all n locations
agcttcanagctaaaaacttagcttatctctgtgcacaagagctaaaaaatgagtgagcaggagtggttggccataaagcgtgcaaaataagtttgcggtatggccgtatttatacgcttgatgcgttgaaagttgaaagaccccacttgtcattgaatgttgctattctaacaaagggaaggtgttttttcggaccttcggcataaagccttcgttcatattgcaatctgaatttattatttcaaacaaattaatattgcgaggggctactgttgggggccttcggcttccgaaggttctcaaaaacatgatttaacagtgtttctagagtgtaatgtgtgaacaggtaccttctgacttatatcagagagggagaaccttanaagataccaaggttggcagtgccgaagctggaaacaagaaagctt

SEQ ID NO: 41756 - DNA, 375 bp, Zea mays
  unsure (1)..(375): unsure at all n locations
acacnaagaatactcagcttgccacatagctcttttgaatacactccgatcttatctttttttatatgcgangactaacgcgngtncaagcttatctcaaaccaagtcatacgtatattgaaagggaattggagtcttccgcgaagacaaaggctttcacttcgtaactcatacttcgccaccactccgagcaactctctcttttttgggggagaaatgagcatcaaggaaaaggacttcatccttggcggagagagtaaaagctcaaacgcaaaaggacttcgtctttggtataatcttaactcacttatttatgaccacaagggaagattgtacttcgagggctctaatgattccctttctggcgagtcatgc

SEQ ID NO: 41757 - DNA, 430 bp, Zea mays
tctcctcttccgctagcttcgcttcagcaactgctttcttgtcttgagacatcttatctccggaactgacgaatatatgtccttaaatccgaagctcggaaaacttaagaaacaaagcaactgttggaaagcaagagctaagaaatcaagccaagcaaagtaagcgtaccaaatatgctcggggtgagttcttatttatacgcccagcgcactccaagttggagggccaaggttgtcattgactgttgctattctagcaaagggaaggtgttttttcggaccttcggcttatggccttcgtccatatcgcaatctgaattcgttattctaacaaattaaccttgcgaggggctactgttggcggccttcgtcttccgaaggtcctcaaaaacatgatttaacaatggttctggagtataatacataaaca

SEQ ID NO: 41758 - DNA, 427 bp, Zea mays
agcttagccagaagtatcggagatagatttatgacccagatctgggtaagtggcgggcggaaaatggtaggcgacgaagctcgaagccatcttaaaccggtaagaaacttatgtttattacttttaccttctcctttgaagtttgtacctttcttactctgctatttggtatatacaggatgacgaagctgaagattgacaatgctgaagcttggcaaaactgaagacgaagccttagctaaagcttaaagttgtttataatgtgctttcctgcaaaaactcttggagaaactcttgtaatatagatatggaatatcttatgtaaatttgtacataccttgtaatatatcctgtctcccttatccgtattcaatctgctttgttgtggacgaaacttctcttttgagccgaaggcgaaaaacacctt

SEQ ID NO: 41759 - DNA, 432 bp, Zea mays
  unsure (1)..(432): unsure at all n locations
ntggaccagcgagtcgctttagagggcagcgtccccgctgacaaatttttgggctctgttgacggcactgaattggtccctgctggttcgttgcaagctgcttcgggtggcgaccttatgcccggtcatcaattgatctctcatgatttgggagtcccttcgttcttctccaatctccaggtactgtgatatattctgtcctgactttcgtactatatgaacttctgtcattgcattcatctgttctccttatcaggctttggtggacgggatggctagccagctgaggttgcagggtgcttctgttccagaaggagctttgtctcttgcgcgttggaatccggtgttgcttcaacatcgtgtctctgacttggaggcgaccaatgctggttagtggctttttgcttctctttggcttcattatagagctgc

SEQ ID NO: 41760 - DNA, 411 bp, Zea mays
tcacctgcggcatgcaagctcgtacatgccgtcctcatttggacttttattaaccttaccggaacactaccccacttaaaagaatgagggtaaaactgttgacttctggcgatttgaactccttgaagtaccttataacaagggtgttatggggccttcttctgctgttgctgcttgagcaggctgacgagagaagactgacacaatggtgattctgggacaaccttcgctctatcttctcttcactatttccttttctcttggtggtgcctgcatctttctctttggtcctcccactggaggattctatcaaagagtattaccatcattcacaggaggaaaccgaagatgttgaaccatgtacaacagtcttcaacccaagaatcaccaaccattgtgatcttatgggcc

SEQ ID NO: 41761 - DNA, 430 bp, Zea mays
gaaactaagcttacagcacatgtgagttctttcgcgagatcggtttttgtctgtcctggctctcgctcttctttctgactactctcagcccacaataagtgacgataggatgcttgattacagatgcataattatttttctgttacagcttgtggttacagttgacattcttttatgttcccttttccaatcattagatgcttggcaaatatattcttcttactgaagtaaaaattaatgaagttagtatccatttcagatttcaccggtgattctaataaacctttaagggcttacataatagtaattgtcaaagcagaaacactttgaacaagttgtgtgagtgttgttctacaagaattgatattaagtgattcatatagatatactctatcttgctggacaaatactcaatatgcatttctttatt

SEQ ID NO: 41762 - DNA, 432 bp, Zea mays
  unsure (1)..(432): unsure at all n locations
acctgagcatgcaagctgtgaagttcttatcccacatgtgttttttgcgatgccacagccagcccatgctagtcttagcaattaagcatgcatctagaccggcctcttcttttgctaaatcaactaagtaaagcttgccgtctaatacacccttaaaggctagtgaaccatcacttcttctaaagacagacacatctacatttgtaaaaagacaattatatcccatattgcataattgactaacagatagcgaattgtaaccaagagactcaactaaaaacacattggagatagagtgctcattagaaattgcaattttacctaacccttttaccttgccttgattcccatcaccgaatataattgaatcttgggaatccttattcttgacgtaggaggtgaacatcttncttctcccccgcatatggtttg

SEQ ID NO: 41763 - DNA, 302 bp, Zea mays
tctccgaacttcgattttttccttcacaccttgctcatttatatacccttggtcatatctctttcatttggcacaaatacatatttcttattcctcttgtggcaaggctaaaactaatgtgccttcaaggggacctctatggttagtcctaaattggggggccttcccaaaaaaggaaatggagaatttcgcaaaagcgaagccttcactctaactctgataatataatttatcctttaccttacttataaaaaactcaattgggattaacctttattacccaaaggggataaaatatgccc

SEQ ID NO: 41764 - DNA, 427 bp, Zea mays
agcttgtggaggaccagatcaccgaagcttatcttgttttggatgagaagtggtcacccaagttccgttattgaagcaccaaaagaccaatcaagtaaggaatccatgtgggagtttgcaagagaaaggtttgcgtgtcggcatcgatgcttcttcaataagctagctggcaagcgaaacctagaagcctgaagatgattctttgagtagccagaatcagcgtttgcaatcggcaaccagatgctcctcaaggccagatcttgttgaagttccatctcctcgaagagtctgcaaagtgaagatatgtagctgaagtaaagctatacccataacccttctaagccgaatctcgaggacgagattccttttaagtggggtagatttgttgcatcccaaaaattcaaatcctgaaattttctcaaactcg

SEQ ID NO: 41765 - DNA, 436 bp, Zea mays
  unsure (1)..(436): unsure at all n locations
tggtctggtgaacaaatcccttgcagtgatcttgcccaaattctctattatttgctcccaatcggcgcttgaacaggggcagaggcaacaggaacacgtgttcgaccgcggctgacacccctggttcacgcccgttcgcgcaccgcgcctnccagtgcacgcccgcgcgcactcgccggtccacgaccgcccgtgcaccgcgccgtgcctataaagccctcccaggcgcgccccacttcgccccgcactcaccctcaccggccagccactttcctttagcttcggcgagctcatttccgcccgccattgccgccagagcttcggccaccgtggccagcccccttcagccatcctctgggcaggccagtgcttcggctagctcctgcagtagcccgtgaagctcgccaagccctcggacccgaccggacttcaccgg

SEQ ID NO: 41766 - DNA, 422 bp, Zea mays
agcttcgtattgaaattcttcttttcttgctcaaagctttccgacttcaggagttcactgtttaatttggcaatttcggcttgggcctccaccaatgaaccctccattgtttggagaacaaaatctttcttttcaatagcagcttcatggtctttgatcttgctctccaagccctcaattataacctcatttttcttatcttcgaggtcctattacatcctcaaggctttacttagtagcatactctgtgcaaaataaccttcatccgcaatcaccttcatcgtaaaacaatgaaaagccgaaggaaaaattttaccttgaaattagaatagaataaactgccgacgatatgctgtcgtcggtagcgactgatgtcagcttcaagcttccagaaactaacaccccttgacagagtgctgata

SEQ ID NO: 41767 - DNA, 404 bp, Zea mays
tgccagtacttgtcaaagcaacaacatctaccagcttagatctgcagaccatactagtaactcggtcgttcgcatgctggggactggatatgattgggcctttcaagacagctcaaggaggatacactcatgtactggtagcaatcgacaaattcactaaatggatagaattcaaacccattgcttctttaacctcatccaaggccgtggaattcatataggacataatattcagattcggaataccgaacagtatcataactgacctaggatccaacttcacaagttcagagttcttcgatttctgcgaacaaaagagcattcagatcaagtatgcttcggtagcacatccaagagccaacgggcatgtagaacgagctaacgggatgatattggaggcactc

SEQ ID NO: 41768 - DNA, 412 bp, Zea mays
agcttcacggcctcccagaggagctattcttggcttggatcgagcggaggagggcgggaaaggggttggccacgatggttgccctcgggcggctctggcgggtcgcggggaggtcgccggagctacaggcgagctcgggggagttaggcgtggtatggaggaggcaacggggaagacagccgggctctgggacgggctttatagccgtggcgcgggcgtggtcacgggcggccgcgggcgcgcgggggttcgcgcacgggcgtgctctgagcgcgcccccgagtgccagcccgcgtcgaacacgtgggagcttgcttctgccatggttcaacggcggatttgagcaccttagcgtgcgtatcttggcaaaaccactgtgtacggtctcttccctgctccatatcctaccttt

SEQ ID NO: 41769 - DNA, 389 bp, Zea mays
  unsure (1)..(389): unsure at all n locations
tcaacgtctttattcgtctcttcttcctgagcccctgtcgtttaatcagcaatgaagtctgctaacgcttgggactgaattgaggatctatgtacatagtcaatactaaattcgctaagcttcgcagcccattttccaatccttcaagtagcttctctatttctcattatatccttcagaggttgtgatgaaggaacaattatgcgatatgcttgaacataatgcccaagcttcttggaggccattaacacagcatacaacaccttctctaattctgtataatatttctttgataaacttagaactttggagacgaagtatactggggcctgcttcttgaattggccatctcgcttctnctgtacaagcgccgcactcactgcagagtg

SEQ ID NO: 41770 - DNA, 383 bp, Zea mays
  unsure (1)..(383): unsure at all n locations
taagggaaacaggaattgttatatgttaacaacggcaaccgaaaagataacctgtgcacatgtaagcggccaacaggtgggaggagcacatccagcaaaaatgtgatgaccacatcacggcccctggagctgctacatatggaccccttcagacctgtcgcctatctaagcatagggggaaaaaagcatggcctaagttattgtggaagatttttcccgccttcacttgggtattctttttgcaggataagtctgaaacccaagggaccctcaaacgcttnctaaggagaagctcaaacgagttcgaacttacggtcaagaaaataacgagcgacaaccggtcccaagtcaagaaccttcagtggaggagcaccttgaggaga

SEQ ID NO: 41771 - DNA, 369 bp, Zea mays
aactcagcttactaggaagacgagggtaacgaacagtaagcagtccactcttattgtgccactggactcccatgggatgggtgccatagcctgtagcactcgtctttccacttatcgtttacttttgcttgctgagagcattcgcttgtaggaacaagtgagaacgcatcgtgtctcatccctgttggtggaccacgactcactgctcaatcaaatatttgcgtctattggggcccaaacagttctatctgaacgatttaagtcggaaaatggaatggtctcgcgtaccgatcatcttgatcaccacctgtgccgaccaatggatacactccgcacaaggcaaacctcggcctgctcgtccaactctgt

SEQ ID NO: 41772 - DNA, 428 bp, Zea mays
ttacagtcacctgcggcatgaagcttgagggggggagaggtcgccactttcttgatgcttttaagacatttccttcaccagagccatcttcaacacttcgcccataaaaaagatcaattatcattttcaattgcatgtgtacaagacaagtgataattgccataagtaaattataatctacatttatataatctagactacccaacagctacatatagacatatattagactaaccaacagcttggtatgctagctgctgcagtgagccaatgaagtacaggatgttctatggtctagaacttcagttcatgttcatcccattttgattgccaattccaattttttggcatgaataattgattctaaattgctacatagagtggccttcgtttacatccatggaaaataaaaaaaatactaaagcgcc

SEQ ID NO: 41773 - DNA, 428 bp, Zea mays
tgtgcacgattacttcaacgttgtgtggggagcacctggctcattggtgctcgacctaaattgggagccttagacatcccacattttgagttgacctaattggaagcccctttcactgaggaagagccatttgaggcaattaagaacctacctttagacatggcactgagcccggatggtttcacgggtgccttctacagatcatggtggcctatcatcaaggcagatttaatggagatcatgaattctctgcatggtcaatgattcctaaattttgacctcctaaatagggccaacattgtgctactaccaaagcatgatgacgcttagaatttatcaagcttcaggcccattagcctcatacacagtgtcacgaagctcttcacgaagctgtttccatgaggctgtggccgcatgaggatatctct

SEQ ID NO: 41774 - DNA, 418 bp, Zea mays
agcttccactgcattatctataagaattgttatgtctcacaagcctgccattggtcttcaataggctcgccattgacttttattaggtatctttgagactacattcagtatcatttacatgtcttctccaatatttgattagactatatttgatatcttacactctccatgttgctaaattgcatatattgttgactcatattttctacctatgcataaggggaagttaggcctattcaaatcatgtcttgcacctctatttctcacatgctttctcctaagtagaagatctctgtcagggggagtatttcttcgtctctaaagggggagaaaattccttctaaaggagaacactcatttatggggaggtacaggttagtgcttcaactggtatttattgacacatctttatgagggg

SEQ ID NO: 41775 - DNA, 430 bp, Zea mays
  unsure (1)..(430): unsure at all n locations
gtagcttgagtcagccctctcgcaaggacaacagatttttttttgttaatgacggcctgagacatattcgcgagaaaatatgggctggaaaagccaaatgtttctgagaagataatcaacgcgtcggatggtttaataaccgcatagtggcgccaaagaatgaagagctccgccagcagattcttgacgaagcacatnttagccgctattctattcattccggaagcactaagatgtaccaagacttgaagtaacattactggtggacaaagatgaagatcgaaattgcacgctatgtggtgagatgtgacacctgcacacgcgtcaaagacatacatttgacagctgccggttcattgcagacactaccaataccaacatggaaatgggaagacataagtttggacttcattgcgggattgtctacgac

SEQ ID NO: 41776 - DNA, 314 bp, Zea mays
aacacacacatgttagaactcttataagtgaacgcatttttatgtgcttgtgaacaccttctgtgcaactcatatttctaaacatatttctgtgcaactcagattttcagaacacgtgtgtgcatcacagaatttacatttcataatacatatcagagagtttattaaatacgagtctacagtttaataattgtgaaatagcctctaaatttttattgcccgccaaaaaaatccgacgaacccctgcctgccaaaattacacgaatttgtatataccatgacccttaattatccattccttccaccacgagggc

SEQ ID NO: 41777 - DNA, 401 bp, Zea mays
agcttgcttcagctaaaggatcctttatattatctatggagaaggcagcttcagcctgggctatggtcttgatgtgatcacatccagccttctccaagatcgctgaaatcccacgcacacaggaaaacgcacaaatatccccgcgatcactcaaaatttcttcgaagctctctgcttctccacttatccattcaataatgcctttggggtcgcctcgtatgaagttttcttcggtagagtaggcgcccacgttggcgaagctagcttttattttcttcacacagtccaaggattttttaaagcatctttccttggatgtgcgaagttcttcaacatttttctctaaatgatttttccaatattcgctgatttcttggttagcttctgcgagtgcgaatttt

SEQ ID NO: 41778 - DNA, 432 bp, Zea mays
tggatattattcatcagaacactacgaatgttgttgtgacttatgaaaatcattcttcacgaagcatgaaaagaagggaaggtgttttttcgtcaaaaacgcaaaaacggtacgtatgtaaaatttcatgcatcataaagaattaaacaataaaagcaggtatattacattcaggactacaagatgtcacattttacatttcagaagttttttacaatagtatttaatcttctctcagaacaacttctgcagcctcattcaggagccgattgacaacttcgtccataatagcttcagccatctttttaatttcgtcgactcctttcggctgagagcccggagacgctttagcaggatctgaaggaggacaggatacgactacattgctattacaaactgaaaatgaagtttaaaacccaaaaattacaacac

SEQ ID NO: 41779 - DNA, 417 bp, Zea mays
  unsure (1)..(417): unsure at all n locations
agcttgcatacacatcaacccttctactatttttgtttcaagtctgctacgatgngggataattactcttccncagtactaaagacagacttagatgccactattgtaacatgaattgccattacatctcgagcaattgttatcaaagttggatacatgatccctgcatgttgccaccaattgataatgtcaagctcttgagttcttggcagtgttggctcctccaaatacaaatccaactcagttcgtacaaaggttgaatgctcttctggttcctcacacaagaattttgtcaatatgacaaacataaggtcatcacctttattgaggacaacaattctatttgttgtccctacaccattagttgttgccatgtcctccattgatacttgatattccaataccatcttatacaac

SEQ ID NO: 41780 - DNA, 375 bp, Zea mays
ttcggtttgaaaacagtctcttagtgcctccgaagatgtcgtagtttctaagaccgccgctgctgagatgaagctgagtcttgatgaagagaataacttacggtttcttatagcactgtcgaagaccaacacagacaagatcaccagggaaattctggaagggctgtctgaagatactggtgacagtgaaagttatgatgtggacagtggtggcgaatacttcgaagatcgcctctggcgaccaagccattcagtttatggtcaatcaactatcaaagagaatcatcttgttaatatgagaggaaggtatttccgggatctgtccgttgtgagggccgactaaggggagaaaacttgccagaccccgaaaaaatg

SEQ ID NO: 41781 - DNA, 429 bp, Zea mays
  unsure (1)..(429): unsure at all n locations
ttaagcactgngctgcaactttgtacccagcccaagatattattttctatatcggttagaattattcaaaaaatatactgaactgtaagaaaataccggttactgaacattatagacacactagactggaaaaattaaactgcatggttaggattatgttcagatatgtagaaataatgtctaattacatagttgctcaacaaacactataaaatgtgctcggaaattatagttacacagttgattggacgaggttgtgatctaattgaaccggagcacgacagtccgtggacttctatagtagaaagagattatatatatacgggtttatttattttgtactagaagttatggtttttgtcaagtttatattgggtattttatacccacggattaacgggtgtatgtaagaacataaagttctaatac

SEQ ID NO: 41782 - DNA, 425 bp, Zea mays
tatcatatcggccctcaatggccggttcaagggatagctctgatatttctccaagcaacatcatagagccgacttgggaaaccttgtccgctgacgagcagctccagtttgaggagcacaaggagcggatgatccacgaggcgaaagcaaagttcttggccaacttcaaagtggacaggaacaacaaggtcgtccgacatcgggcgacggatccggcttcgctccaacccacgccagatatccccaatgtaagtaataccaacgatctgcaatctcttagaaattatgtagaagatcagcgtgaacaaatgcagaacatcatagggggtatgcaaagcgatcttaagagactagtacgtgcatttgataaatctattaccgcaaatttttcttcgcacgaggttgagttatgagataacgcgtgt

SEQ ID NO: 41783 - DNA, 449 bp, Zea mays
  unsure (1)..(449): unsure at all n locations
tccgagaccttaagtcacctgaggcagcaagcttgccagtcctcggacccggccggacttcaccttttgcccgagatcgacctcaccggacttcggtcttccgccgcagcgcgtggaccgatctatccagtgagtctccgaccaattccttgcgctcatagcttctctggcatctcgtggacctcnctgacccatttgattgaactatctcgccgtgaccacgccggtctcctcgccgccgacgagcatccccgcctgcgcgcgtggaccgaccgactccggccatatacgatggcgttccgcacaccgttgtgatccccgagacctccccttcgtcctcgaccacttcaccggagcaatctcgccgccggtaagccccctcgcccttttcttcggcgcagctactgtttaatgtagaagaaagaccctcggttatgatttgtagaacc

SEQ ID NO: 41784 - DNA, 208 bp, Zea mays
ctgtcggtgaagcccactgtggaggtgttttttttactggcaccaacatagtccaggaattctgctggcggctaaaatcagtttgactccggcagataggtcaccacaccaaataagcttagaactagggatcggcccttcgtattctagacatattatgctgaaaaagcctagttaccctttccatcccgagcttacccgccggcaa

SEQ ID NO: 41785 - DNA, 395 bp, Zea mays
  unsure (1)..(395): unsure at all n locations
agctnggagattattcatcacaacactactaatgttgccgcgacattgattttcatcccncacgaagcacgaaaagaaggtattgtgcttcttctccaacaactcaaataccgtacgcatgtaaaactctctgcctcatacagaattacacactacatgcacgtatattacatttttgactacttgatgtcacattttacatttcctaagtcttttacactagtatttaatcttctctcacaatagcttctccatcctcattcacgatccgattgacaacttcttccataatagctttagccatgtttttaactttgtcgacttctttgggctgagagtcccgaaaccctctagcactatctgatcgatgacaggacactactacattgctatta

SEQ ID NO: 41786 - DNA, 421 bp, Zea mays
acctgacgcatgcaagcttcttaaagctgggcttcggttcctcttaagcagatttgtggctgaagttttaaagatatatcagatttttcttcaccaaattactcccgaagcaattatcagaatggggatcttcgtctgggccgtgaggagtcaaggtttggagccaaatgcaaaatgtttttgcagtatgcacgaacttttgtatgagacgaagccctggggtaaagaacagtatcataacaattttggttgctatagcttcgttgctcgttctggctcaagctgcccagtgccaactttttaaagagatggcccggagactggatgaaagaatggttctatgtgaaaaatgattttaaggtgcgataagacattaaagagatcatcatgcgccccatcttgtcgcctttggcctccaaag

SEQ ID NO: 41787 - DNA, 312 bp, Zea mays
acacgatttgtagcgcatgccgagcaaggaaacaagctgggactcatcatccgcataagaacataatgacgaccgacaggccactggagctcctacatatggatctattcggcccgattgcttacataagcatcggcgggagtaagtactgcgtagatattgtggatgattattctcgcttcactcgggtgttttttttgcaggaaaaatctcataccccagaaatcttaaagggattcttgagacgggctcaaaatgagttcggcttaaggatcaagaatatcagaaccgacaacggatggagttcaaaac

SEQ ID NO: 41788 - DNA, 313 bp, Zea mays
aattggccttctaagtgtaatgaagcctttgagccattgaagacactattgaccactgcttcggtattggctcaaccggacatcactaagccttttgatgtatattgtgaagcatctggcagtgggctctgctgtgactgatgcaagagggcccactaattgcgtatgcttcaaagcacttgcgccgacatgaggagcattatccaactcatgatctggagctagctgctgtagttcatgccctcgaaatttggcgttactatctgctgggaaatatctgtggtatatatacagatcataaaagtttgaagaa

SEQ ID NO: 41789 - DNA, 319 bp, Zea mays
  unsure (1)..(319): unsure at all n locations
ttttatagaaataggataggtgtttttttttaagntttaaaagatgagggaaggaagtgttttttgtaaaaataaaaaggatgatgtaaattatgattgtaagaataaaagtaaagaggtatttaatttaggtaaagatgttaaatttaatttaaaagtttaaatagattaatttgttagaaaaatttgagtttattaagagggatgaaatttgtcatatagttagaatttttaattgtattntttggggaagctgggagttatagattgaagagaagataggtaattgtataaaatgtaagagttatataaaataaaa

SEQ ID NO: 41790 - DNA, 418 bp, Zea mays
tgagcaagcctcacggcctcaccaggaagctatctgatgtgtttgtatcaaacgaaggaggacgggaaaggggctggccacggcggttgctctcgggcggcactggcgggtcgcggagaggtcgcccgagctaatggctggctcgggtaagtcaggcgaggtacggaggaggcaacggggaaggcagccgagcactggggcgggctttatagccgtggcgcgggcgtggtcacgggcggtcgcgggcgcgcggtggttcgcgcacgggcgtgctctgttcgcgcccccggatgtcagctcgcgtcgaacacgtggaagcttgcttctgccatggttcaacggtggattagagcaccatagccgtgtgtatcttggcaaagtcactgtgtacgggcgcttctctgctccatatcctacc

SEQ ID NO: 41791 - DNA, 408 bp, Zea mays
tcctttgtgccttgcctcaggctaacggtttatcgttcctatgcatatgacaattccatagttagtcaattcaggttaagcagtatacaagtgaaccatagaatcagcaatgcactttcatttagctgtgacacaaagctgttgtagtatttctggtccgccttgtaatctttccaacgagttaggataggcatggtttcccgaataatgatgccagcctctgatgcaaacttggcagcttgaacaggttcatgtggcccttttttgccttcctcaacagctatgggcagtctcctttgcataactttagtcatcctgtccagatgttttcccttggctgctgccctgagtcttcttggtgctcgctgtgtaggagctacaaaatataattcgctcttattgaataat

SEQ ID NO: 41792 - DNA, 354 bp, Zea mays
  unsure (1)..(354): unsure at all n locations
ttcttattactcaagctaccaatcttcaatgatctatatacatgattgacccaagggtattcttcaattgccatggcttaaactcatattatctcgaggaagatattatatgttgtatgaagtgaacagatatcatatgcaaaaaattaaggcctacagcaccgaggaaagccaaaggatggaacccttatcttttaanaattaaaatatcatttcttatgtgtgctgcgtaggcacatagaaaaattgaggcacttcaaatgtcnttaaattgatattaccattctttgagaaattcctctcatatggtagtttgcacattcatcatctccatactatggcattctacatgct

SEQ ID NO: 41793 - DNA, 402 bp, Zea mays
  unsure (1)..(402): unsure at all n locations
tcttatgcccgcnnaatcatacagagagatagaaattcttattcaaggctgcaaatactagtgctggttaatattgacaaaccaactgaaggtgaaaggaccattttgtgtaacaagcttcttatgttcatttaagcatacaaagtgtgatagaaattcttaaccaaggctgcaaatactagtgctgattaatattgacaacagatgggatcttactgattctcatgtcaaatgtcttcttttagggggatattctcatgctaaagtctatatcttaaaaaaaaaagtttgctcagcacgggagaaggggaaagaccccccctccccaacacacacacacacatgtattacattttaatagtcgtagatagggacttaaatgaggacaatgttacgatgaaa

SEQ ID NO: 41794 - DNA, 432 bp, Zea mays
tgcaagcttatcaccctcgcatgttgcccctaatttcctatcaactatcttcctatcctttctacaaatagcaaaggaagcatttaaagcatgataaattgtagagggaccattcataacttttctagaaacatgaacaatattcttcttaggcacatgatgaatatttttcctaggcatatctctaccatgcatataggaagaactggaagcatacatagcataagagtcataggcatgtgaatcaaaagtattacaactcctatgagtctgtcttctatcattgtacataaaagcatggttctttttagtactacttgccataggggccttccctttctccttggcggagatgggagccttatggcttgttaagttcttggctttcctcttgaagccaagcccattcttaattgaggggtgtctaccaat

SEQ ID NO: 41795 - DNA, 419 bp, Zea mays
  unsure (1)..(419): unsure at all n locations
tcgtgaaatattctccgaagctataaaagagttttgtgtttttctctctattgaagctacactttgtctcgatttatcttgtgccttancacgattttctcttttccaaaatattctccgaagatcaacactgtatccccttcttgttccacatgcaatatgttgtatgatgcttatgttatgcagaatgatgtgatgatgttatgttatgcaaaatgatatttgtgccgcagatacatatccccgtaatagggcacacacactttttatatcagcgctgacttttcgctgtaagcctcccttaggagcttcttcgccttttactctcagcggaatcagcgtttatttttcgctgtaagcctcccttaggagcttcttcgccttttactttcaacggaatcaacgttcatttttcgctg

SEQ ID NO: 41796 - DNA, 343 bp, Zea mays
agcccgggggctacacccatagggtgcacccacggagcgccccaatacgatcctcaaccccaaaagacacaatgccgactcctaaaacataggcggaagacagaccgcccatttctaacgcacaaaaggaagaccactgaaagccagctcccacagacccacccaaaagtcccaaaaggcggcctccaagcaccacatgatgacaaggcgcggacttccaaagcaccgaaggaggaccttcgaaggctgcctccactgagtcacccagagatcacaagcaacacccaacatgggcacccccgcaagcgcccaccacgaaaacgaaaatcaacccacaaaacgc

SEQ ID NO: 41797 - DNA, 352 bp, Zea mays
aagctcggatacaaggattaaacatcgccatatcagatgggcgacattagattgtctgcagccggacacccaccgggagacatgagtcagactaacaacgaacgggactgttcaactgatttaatgggaaaaaactgctccgctgttcgaaagcttcaagataaataccagggtcaggagtttaccatatagaaagagacctgaacacggccgccaatgtactgtcccagcctggaaccggttcgactcatgttccgcccagggttttcccgcacgaaattctctatccgagcatgttgactgattaaatacaagagtgccacatgattcattcaccctagtcacactctga

SEQ ID NO: 41798 - DNA, 427 bp, Zea mays
agactcacgtattcacacacgcacccttaaagcgtggttctcgtcttatggacaaggcaccatccctggatccgagtgcatagactaacatatatcccagttataagatgaatacaatcaattgctgacctcgcgcgagtgctagaaaatcactcgacttctaccgagatcctgagtagcaagcagctacgcgacctagcatactagtattcatctcaaaaaaggaatcctaagttcatgcaactagatgttggaagcaactcctacacttaagtgcacattgcaatcctacaagctctaagcgcggtaaaatagcgtaattaacaggttatgtataaaaccggggcttgccttcaattgctggcgctgcggggagatcctcaatagcaacctctgaagctgctcctggactccttttgacaggtct

SEQ ID NO: 41799 - DNA, 374 bp, Zea mays
aagccatggtaaggagcagaggctattaatatactcaatgactcaagcccaaccgcgggtgcataggctacaccgaaatccaaaccttcgactgagagtatccctcggccataagcccggccatgactcttgccaccacacacatgccccgaatagctcgatgccggaacaccccactggctcccaccacaaactgatgaagacgcggaactaaatgccatacctcaatcctcgtgaagtcgcagagctcctattgccatcccaccacctaatcccaaccctgaaatgctccctctatcctgggtggccccataaaggaaacaaaagagaaatgctcacagaaaagtgcaacacgagaccatatggcgaccccc

SEQ ID NO: 41800 - DNA, 396 bp, Zea mays
  unsure (1)..(396): unsure at all n locations
acagcctatattanatatggttgcattagagacagatgcggttgcctttgtttatctggccgccgcccctgctcaagggaagactcgtgttgacgcttcttcgggatacaaaaattttgaccttcggcacctgggtggccacgaactgtccgaggcagacaaggagcggctattatgcgggatctatgctcttcgacgcggttgatgaagaacttttgggatgtattcgcgatcgcgccggggcaaaaataatctgcactctgtctaagagtgttgcgttcccgaagctagagtctgacattagtggttaccgacgacaacacattgtcggtaggctattctattcccatgtcgaggtgaacacctcgcctacattcttcgtatctttgcgacgga

SEQ ID NO: 41801 - DNA, 326 bp, Zea mays
cccgcgaggcagaacaagaagccatcttcgcccgacccatcgaacaccagcgcccccttcagaaatcccagctgtctggcacagcgactagctacaaaaattctctgcttagagaatatcttccccgaagcatgccgcacaatataatcgcactacttcggaaagtgcttccggggcagcagtgtcaacatcttcaacccaacaaggctctgacattactatctcttccggttccaaagctgcctctggaatatttgtgtctctcgcttccaaaggtaataacttggtggggctctgaagccgcgctccaaccgcaattgctgctt

SEQ ID NO: 41802 - DNA, 425 bp, Zea mays
  unsure (1)..(425): unsure at all n locations
agctngncaatacttatcagaacattagctctttatcagcacagcaactgcaaaccatacctgtaacatggccattcgcatgctggggactaaatatgattggacccttcaagaaagctcaaagaggatacactcatgtactggttgctattgacaaattcactaaatggatagagtacaagcccatcgcttctctaacttcagctaaggcagtggaattcatacaagacataatattcaggtttggaataccaaatagcatcataactgacctaggatccaatttcactagttcagagttctttgatttctgtgaacaaaaaagcatccagatcaaatatgcatcagtggcacacccaagagccaatgggcaggtacaaagagccaatggaatgatattggaagcactcataaagaaagtcttc

SEQ ID NO: 41803 - DNA, 368 bp, Zea mays
ttgacattggcaactatatcatgaggaacaatcacgctcttgtcttctcatcaagatccgcgccgcgcgaatggctttatccatagactagttgcgctaatccttcctagaggtggaatcgtctttggcaaccttggtagccagtctagcagcttctagctcctacatgactgatcttctggaggcgctcagatccttgatgatggagtctttgatctacaccagatgcctaagacgaaaaaccttatcctgggacacttgcagctcgtgacggtggtgctccaaatctgacatggtcaaacaatggatactgtcccagaagggaaagaattgtgcgattacgatacaatgtatcaagattatagcga

SEQ ID NO: 41804 - DNA, 400 bp, Zea mays
  unsure (1)..(400): unsure at all n locations
taaagatatgctactcacaagtattcaaggctgctatatgttttctatcactgcccacgccctattccagtgcacccaagaccatgatgagtgtatttacgccttagtccgaaggttactctggcttcgagctcacgcaccaatggtcccaaagtagatcgctattgagtcaatgatcaccgggcttccgttaggaccaggagcccaatactttgctagaaagccttcccaatccttacaaaagttgcttcanaagatggatgaatacataagagtatacaatgatttttgccaaagaacggaggaagccttaaagtacttagagatcattaagggctctgaaggaaggtttcacccaagacatatcagaagcattcataattcagagccatgacaacga

SEQ ID NO: 41805 - DNA, 234 bp, Zea mays
  unsure (1)..(234): unsure at all n locations
ctgcaagctgcatatgtaccatgctcaatgatatttcatgctgtgacaaantatgtggtatactgcatgcctacgttaaaccgtgcaaacgaacggcattgcatgcttcctttttttttactttgttagatgggtttttacctattattgaacgtttattaaaactctgtgtatctaaaaggccaatacataccatattttaatgtgaagagcgtgactttacttggcttaaaa

SEQ ID NO: 41806 - DNA, 263 bp, Zea mays
  unsure (1)..(263): unsure at all n locations
ggaggagcgctatcacagcaagaatgtgattgacccatcaagacccctctagctgttacatatggacctcttctgacccgtcgnctatcttaccatatgacgaagttagcttggtgtatctattgttgatgacttttcccgcttcacttgggtgttccttctgcacgataagtctgaaaccccacggaccctcaagcgcttcctcacgagagctcaaaatgagctcgatctcaaagtgaagaagataatgagcgacaacgggt

SEQ ID NO: 41807 - DNA, 227 bp, Zea mays
gagctacataagaattatcacacggctgacccataacatatgccagacaaagcccaaaaacaatgagattttatacggcaccctccctaatttatttatcctacaaaacacatctttgtgggtggacagtaaccacatttgcgaggataaataaatcaaaccaaccagctacataccctcttctaaaaatactctacgccaactgtagttgaaacccgtgatgaatc

SEQ ID NO: 41808 - DNA, 378 bp, Zea mays
atctatgccatggattgcgtttgagtcaatctctttttcttccgcccttctcgcagctttctgacttccatggacagcaatgggtccctgatccgaacgtattttcatgcaaacatacgcaggatgaaggattgcttctaaggcattgagagtaccacgaccaataattgcattgtaaggatattccctgtgaacaatgtcaaacacaacttgctcaattctattgtctgtgatgaatccgaaggtcactgacatggtgatcttgcccaagctattatctgtcttcctccgaagccacatagaggacgtgtaacattattgaatctatcttctggctcttgcatttgtccgaaggctttaacaaatatgatgtcagct

SEQ ID NO: 41809 - DNA, 408 bp, Zea mays
  unsure (1)..(408): unsure at all n locations
agcttgccacagttgtgacagacgccatctcgtgctggcttattgatgctgacagcaccgncttgggcgcctccgcgggcaccaccctcagcttgtcctcgcgccccggcctgagtgcctccgcgcactttgcgcggcttgccgcgtttgtggccccgtgtcgaggaggactcccccttcttgtcatcctggcaggcctcccactgctcccgagtgagatgtagcatcctgccgatggtgataggcccagagagggcttgtggttcgtcgccatcgacgaccttgagacgatcaatcgcttcttcaatcgtcatcgtggagaggtttagcagagactcaattgagcgagcgatttgcttgtacttctcggggatgcaacggaagagcttcttgacggctctctcctca

SEQ ID NO: 41810 - DNA, 364 bp, Zea mays
  unsure (1)..(364): unsure at all n locations
tcatattcggntgcgttgttagaggccgggaatagcatttgtagagcgtacttaaggtgttcgcctccaggtgcagtgaagagaattcctgctcctgctccctgcagcttcagcgagccatcaaaatacattcgccatacttctgcggtttctggattatccggcacttgctgttctgtccactctgatacgaagtcgaccagtgcttgagttttgatggcagtgcgaggtcggaactcgatatcatgggaccccaactcgcaagcccacttggctattcggccaatggcttccttgttgtgaagaatgtcccctattggaaaaccagtaactactatgactntgtggtcgtcaaagtaatggc

SEQ ID NO: 41811 - DNA, 411 bp, Zea mays
  unsure (1)..(411): unsure at all n locations
agctgcttcccggntgagtcaacagaatcatgcgggaagcaagcttgtgacgtgtgaggcactctgcaggcaacgatgacttgctctcgaacaacacatgggatcttgtcccatgtcctttcggtgccaacatcgtctctgacaagtcatttttctgctacaagttccacgccgaaggttcccttgataaatatgaatcttgttgggtcctctatggcttcacacagccccctagtatggattatgacgagacttttagtttagcggtctagcctacgattgttcatactattttgtatttttgttcattacactctcttagtaatggctagttcatcagctcgatgtcaagaatgccttcttgcatgacatgctctgtccgttgtcatctcaacaagtccatatatatgg

SEQ ID NO: 41812 - DNA, 432 bp, Zea mays
  unsure (1)..(432): unsure at all n locations
taaagccatggtaagtagcataggcaagtaatatacgaattgattctatcctagctacgagtgcataggtttcaccgaaatccaaaccttcgacttgtgaatatcccttggccacaagtcgggctctgttccttgtcaccacaccatgctcatcttgcttgttgcggaagacccacttggttcttacaacattttgattaggacgtggaactaaattgcatgcctcattcctcgtgaagttgttgagttcctcttgcattgccaacacccaatccgaatatcttaatgcgtcttccaccctgtatggctcaatagaagacataaaagagtaatgctcacaaaaatgtgcgacacgagatcgagtggttacccncttatgaatttcgccgaggatggagttcacagggtgatctcgttgtatcgtttggtgga

SEQ ID NO: 41813 - DNA, 426 bp, Zea mays
  unsure (1)..(426): unsure at all n locations
agcttcacacctntggactaactgggctgtatcgntcttcgccgtcggccaatagaatcctgacctagaaacctctccgactagtgatctggatgctgcatgaattccacattgtcctgcatgaacctcctccagaagttgcttcccaggggacgggagaacgcacttcatgaggatgcctgatgcgcctcttctgtacaattcctccccaatgagtgtatagagagctgattgcctggcaatgcgctttgctgagttcttgtcatctggttcttcttcattctttatatacttaataatcggcccgctccagtcatcacagtctgactcgggttgatctatgatgttgcactctcttggttgatccattgagacactctgctgaagaatttcttgcacgaagaccccgggtgggacctgagttca

SEQ ID NO: 41814 - DNA, 425 bp, Zea mays
  unsure (1)..(425): unsure at all n locations
agaatactaagcttagaagcactctcgtttcttagtccncccgacatgatcttttccttattcggttaagcgttagaacgaggattaggttctgataccaattgacagttgcctagagggggggtgaataggcaagttaaaacttctttaacaaanactagaagcaaactgggtaaaactgaattgatctccaaattcacccattaactttggaaatgagatgttctaaatgatccacagggttcaaagttctagatctgagaagggcacttctcaaatccacacaccaaaaagatataaacaatcttccacggaatggtgagagaacgaagaacacaaacaaacacaatgaacatgaacacaagagacacaagatttatcccgaggttcggtcacaccacaaaaggtgccctactttctcgttg

SEQ ID NO: 41815 - DNA, 347 bp, Zea mays
aacaaacatcttgatcccctagctctttggttagcattgcgtaaactcattacctttctacacacgttgccattttgggctgccttttacctaacaattaattgacacgctccgagtgggattgttacccatgggaccatcccttgcattgatgtcctctcttttccgcatgtgtaccataggcgtcttttaagtcttgaagccttcttctttccttgtttgtctcctgctacatggttagcaaaaacttctttttctaaccctatgcctatttgctttaaacgggggcaaaatctaagcaagtgctccttcctgcaacatctacaacgaagtctatcatccttgtt

SEQ ID NO: 41816 - DNA, 409 bp, Zea mays
agcttcgtcattccggtccagaggacttatcagcttgataggtaaagattcggtcattacctttaaaatttctgccacttccgcagcaggaggtgtcgagggagtctcctcttctacctcagtcaccttcggctctggagttgcagcttttcttttcttcaaagcagccaccttctgctcaagagtggattttctcttctttaaagtcttctcatcctccttcaccattctggcagcttgtctgttcaaaacgctgacaatccttttccctttttgccccttcggcaccctagctaagatgcgcataatcagggtattcaaattttagagcatccatcacccggcttaaccttctgtgtggccgggtgcccaaagctgctgtcatcaattcggcctctttttttgtata

SEQ ID NO: 41817 - DNA, 433 bp, Zea mays
ttcccgcggcttgtagcgggcttctcgccggtcaccatctctttcttagcgtgatatcccgacatcacttcgagcggttaggctctaatgaagcaccgggctttgataccaattgaaagtcgcctacagggggtgaatagggcgaatctgaaatttataaacttaagcacaactacaagccgagttagcgttagaaatataaacgagtccgagagagagggcgcaaaacaaatcgtgagcaaataaagagcgagacacgatgatttgttttaccgaggttcggttcttgcaaacctactccccgttgaggtggtcacgaagaccgggtctttttcaaccctttccctctctcaaacggtcacttataccgagtgagcttctcttctaatcaaacggaacacgaagttcccgcaaggaccaccacacaattggt

SEQ ID NO: 41818 - DNA, 375 bp, Zea mays
cgtctttcagaacatttctgaggatgacatattattgattgagaatgacattcctatgctggagtccgccaaggcttcactgaaaaagagtttttctatgaaggacttaggggaagcaacctatattttgggcataacgatctatacagatatgtcgaagaggcttataggattaagtcaagatacctacattgacaaggttttgaaacggttcaacatggaacagtccaagaaaggtgtcatacctatgtcacatggtaaacaccttacccacatgcaatgtcctgcgacggctaatgagcgggagcgcatgattaacgtaccatattcctcatccattggatcaatcatgtatgccatgataagcacaccccc

SEQ ID NO: 41819 - DNA, 382 bp, Zea mays
  unsure (1)..(382): unsure at all n locations
gtacccaaacattcngaacaatcgtcatctggagtcttttatgtttaaccctacacccctaaaagcactagacttccaaagcagggatcaatggattagttaatcaagcggccaaatcttgattctaatctttaaccaaagtttaagtacacactataacctataaaatgcaaaagggaaacattacaaaaaggcccctcaaagaccccaaatcgactccttaagtagagagcacactagagctctctaatcttctctaagtcaaaatttaaccctaatctaaagatcagacgtgtccacttagtaaatggcgccaaaaccacttggtctgaataccaaaaaggtgccaaactacctaaagaaaccactagaaaaatttgac

SEQ ID NO: 41820 - DNA, 328 bp, Zea mays
gttaaagggagaacacattttgggactagacaaatgttctttttgagaaagacaggactcgtaacgcatgtctggcacggtagcaagatggtgttcattatccacacaataacatcatgacaacttacaggccgctggagctcctacacatggatttattcggcccgatagcttacataagcattatcgggagtaattcctgtctacctattgtggatgactattctcccttcacttgggtggtctttctgacgagaaatctcatatcccagagaccttgacatgtatcctgacaccgggctcaaatgatgttgtgttacggatcaag

SEQ ID NO: 41821 - DNA, 290 bp, Zea mays
gctgcccttaccttcggatgagttttctaaacaataaaagcccttcagtggaacttcttgatagagcaacctcaatatatttccctgttaataggataaatggaaaccgagatatctcttacttcttggcaaattgccttagatgagtaaccatataacaggaggatataggctagatcgtcttcatacgccatgatagagggggagttgtccaagcatggaacttgtgctaccgctacataagcgtttatttagaaccgaaggcctagaggtgaagaaataaatacatg

SEQ ID NO: 41822 - DNA, 303 bp, Zea mays
cttatcaatggccgcgaaaagctgactcaggtatctgttaggaggaggcgcatgttgagtagcctcggggctgctgaaacagagcgtacgccttccatgcccataggctctctcctgcgcggtatggactcaagcaagccccaagagcatggcctgaacgcctcaaagactcccgtattgcttacggctcccaagtagccctagacacaggtgcttcattcaataaaactcttgacaatgagttcgacagcatgcacaagttatgctgaggacattatttgcgggtctactcaccaatgtagt

SEQ ID NO: 41823 - DNA, 366 bp, Zea mays
  unsure (1)..(366): unsure at all n locations
agcttaaattcaagcatgatccaatgagtttttgtggcatcatcatattacaaagntgtagagggcatattgctctacacttttgctgcagagcttgacatgtgttgacattagaaattaagagaaaatgatgctccaagttcggctgacaggctgtctgaatgggatttgccatggtacagtagactgaaacagatcagaccgcccgtgcccaaaagatctcgccgctggtggccgtcgccgttgattgccgttcgccgtgattcgtgcgccgtggacaccagataagcatcactcattaagaattttcaccgccgtgagctggactccactccggtgacccctcccgtgctccccctctgcttt

SEQ ID NO: 41824 - DNA, 364 bp, Zea mays
  unsure (1)..(364): unsure at all n locations
tgagggagtaagcaaatgagcaagatctctgttttcttattgtagctgcnatatagagctacaactctgatacaaatagattaagtagttgctacataaaaatcaaagatcatggctcctgaaatcactttgtcagacactttgatggtgcttgccatggtacagtgactgaataagatcacaggttcagcccccctcgccaccggtgatctcgtgcccggattcgcgccggcatcgcgattcatgcccgattgaacgcggataacgatccccggtgaataatcgagcactgcggatgagcttaggacactgttccgccctggccgccgtacccacttgcctcataggcggtccagataacctc

SEQ ID NO: 41825 - DNA, 310 bp, Zea mays
gtctaacactatactatctatttccaacatttgtgctttctaaatgaatatctctggcagctgtggcttctgaacgtgtagcttctcgcagctgtcgcgcctttcaacagttgcggccctccgaattgaagctcgaggtggtgtaccttccatggcttctgtcactgtaatgatattctgcttttttggcctacctgccctcttcgatattgtgggctccttcttcttctgacaaagcttctctcgatgtggccctagtggacttagcttgaccggcaaagatcagacattacctttagaatttcctcca

SEQ ID NO: 41826 - DNA, 391 bp, Zea mays
  unsure (1)..(391): unsure at all n locations
agcttctcctggacaagtgctgcactcacctattagtgcgaagctgccacatataataacaacggagcccctggcgtctggggagttaaatgttgctaaatactatcaaaaattgccttactgtcctcgaaggctctttgttggctntggccccatcgaaagacttccgctgatttcagcacttctaagaatggtaaaattcctttttgctgatctggatataaatctattaagagatgccaccctccctgtcaatctttgggcccccttttttgtagttggtggctccattcgagtatagcttacatttactcggatagcttcaattcctttcgtgaaccagcatccaaaaattccccttcttacttcgagacacattctttggatcaac

SEQ ID NO: 41827 - DNA, 425 bp, Zea mays
  unsure (1)..(425): unsure at all n locations
agcttctccgagggcaggacggggatggtgatggctctgttggccggtctacagnggcagaggggttgagcggtcgcgggctcgctgcgcacgggcaaacggcgacgggctaactccggtgaggtgtggagggtgtgcggaaaggtgtatccgaagcctgtgagggatttataagctcgggcgtgggccacggcgcgggtttggctcgggcgccgcgcggggcgtgcgagggcgcgcgcgatcgtgctctggcgcgggcagaatgcgtcgaacacgtggcagtgagtttcttcccatgttcaaacgcttccagagatcgcaaacgtgcgaatctcgccatgaatccggcgcagacctcctcgtggcacctatggctatctcacatgtgtgagtttcacaggatgataccccctatatagggagat

SEQ ID NO: 41828 - DNA, 421 bp, Zea mays
  unsure (1)..(421): unsure at all n locations
ggagggggtgtatagattaccgncctcttaatgcggtaactatcattatcaagtctgcttcgcctcgtattgatgttctctttgaccacgcggtccgggctaacgtgttttccaaaatagaccttcgctctggctaccatcagatcaaaatacgagcaagtgatattcccaagacggcattctcaaccacatatgggctatatgaattcttggtgatgtcattctggctgacaaatgcaccagcatacttcatgtatctgatgaattctgttttcatgccggaattggacaagttcgcggtggttttcatcgatgatattctggtgtactcaaagaacgaagaacaacatgtcgggcatttgcatgtagcgcttcaacgtctgcgagagcaccacctttatgccaagttatccaagtgtga

SEQ ID NO: 41829 - DNA, 417 bp, Zea mays
  unsure (1)..(417): unsure at all n locations
agctngctccaagttgctctgtcagagctgtttcttgatactgaaactgaacccaagactaatataagggttccgtgagataagtgcaagtttgatgagccataactttttgtgtgatcggttttgatccacgaatcctatagtaagttgggagattgttgatcagtgaacaacttttattaagcaggattgctatgttcttaacaagattcttgagttaatccggtgagatcatgggcggttcatgcgactgacaaacatatgccatggtacagtgttctaccggatcacgttgccagcgcggcgggctcgtcgctggtaggtcgccgccggtggtcgatccgtcgctgtgattcttgcggacagtgtggctaacgctgggaggtcatcgccggggataaacttcacccattaaac

SEQ ID NO: 41830 - DNA, 426 bp, Zea mays
catggtttcatggtaaccaagcgatccggagcattttttttttcagcatcatctactataaaatcaaacgttaatctctccgtctccgataatatcgggttccgatatgatgcaaacagaacgaattaaacggatttcggctctgctatttcaatctgcatctgattcagctgattttagacgaattccgttcgctactctaacactcggttagagagcaatttaattaaaaatccgtaaacacgatgtcacggatgacaaaaaggagattaaatcattttgcattgaaaacttagtccgtgagttctatttaattcgcccaggctaaaaatcatcctacgggttcgggcttccgaattcggattcgtgcgagcgatgaattttaaatattcactggatgcaccgattttcagaacaaatatgttt

SEQ ID NO: 41831 - DNA, 419 bp, Zea mays
  unsure (1)..(419): unsure at all n locations
ttggaaaggtgttgaagcatacgatgtttttacgaaacagatattcaaacttcgagtngcgtatttgaggttggtgcatgacctcctggcgtatgctatttttaccggttggagtaccacatgtccgattgacatgtccatattgctgggtcacatacagattgcttccgtcttgctcttggtggaaacatcacctacttcgattgtaacgacgctggttgctcaggaaacactcctttatgagcgataagaataactttatatagaacactgcgggcaccaaaggaccgccttaacatcttacgcttcagaaatatatgcttacctgaaccaccttgttttaaatgaaaagggggactagtactaaagattctgatggaccaacactggaccacttatgtggcctctgggagcttcct

SEQ ID NO: 41832 - DNA, 422 bp, Zea mays
  unsure (1)..(422): unsure at all n locations
gacactatagaagtactaagcttattaaaatnactctacctaatcctattactgatgtgagagatgtgttgattgaggagcctatgagagctcctcctcggaaacaagtgtgtgttccaaaacctaaccatctcaggaacacagttgatacccttcctgacatctctagtgatccccttcttagagcatctcaggcatccaaatataatgcctcctcgcaccagagaattctacctaaaagagggatgaggttcccttatgagtatcgcgagagggacgggcatcagactcatatnttctttaggaggaaaagagatgagcgaccggtttctgagtctaccaggaagaacatgaagcgcgctttatcattgcgtacatgcctaagctatttaaagacgtcctaccagggctatacgtgttct

SEQ ID NO: 41833 - DNA, 441 bp, Zea mays
accggatcttaagtcgcctgcagctgcagctgccctcacaagaatgtgtttatgttctcacaagaaggatcttaaattgggccatatgaatgataccagctgcaatgactactccccctaaatgagtgctctctttagaaagagggttctcccctttttagagatgaagaaatactccccctgacagagatcctctatttacgaaaaagcatgtgaaaattagaggtgcaagacatgatttgaaaagactaacttcccttatgcataggtaacagaatatgagttaaccacttatgcatttttagcaacatggaagtatatgatatgaaatatagtctaatcaaatttatgagaagacatgtaaatgatactgaatgtagtctcaaaagataccaattgaaagtcaatggtgagcttgagagacatgagagttcttggaga

SEQ ID NO: 41834 - DNA, 287 bp, Zea mays
  unsure (1)..(287): unsure at all n locations
gctaccagagatgtggcatcacgcttaatcgcttgggtgctcggcggcttaacacagaagaaagggangaaggacctcacgggagatacttatccggtggcgggtgctccttgtctgtccacaaattccagtaacaactctattggaccaacgatgaaacatgggattcacttgatctgcattttgacgtggaacttgagatctgctgactgggtactatgtgggcggtcaacgtatgcctctagacagtactcgtctggcccacgaacatgccgaggtgcgcgacc

SEQ ID NO: 41835 - DNA, 388 bp, Zea mays
agcttagcaaatcttattgttcttgagctatatattgagtgagccggagcagttggccaaagagcgtgtcacatgagtttgcggtatgaccgtatttatacgcccagtgcgttgaaaattgaaagaccccgcttgtcagtgaatgttgctattctagcaaagggaatgtgttttttctgaccttcggcgtaaagccttcgtccatgtcgcaatctaaatttattattttaaacaaactaatattgcgaggggctactgttggggaccttctggcttcgaacgtcctcaaaaacaggatttaacagtatttctagagtataatgtgtgaacaggtatcttttgactcaagtcggcatcccagttcaccagaataatacgaaggttgata

SEQ ID NO: 41836 - DNA, 394 bp, Zea mays
  unsure (1)..(394): unsure at all n locations
ctgtcagntgnggcaccagcggacttagcttgttatgctttggttcagccattacctttagaatttcttccacatcggcagcagaaggcgtcgcaagagcttctccctcatggcccgacgtttttggtttccgggccgcagctttccttttctttgaagtagctatcttcggctcacggctcagttttcttttctcaaaaatttctttgtcctttttagccaatatattagcttctttgtcaacgacgctggcaactctttttcttttctggccctcggcacctcttgccagttgctcatagtcaggataatcaaaattcaaggaatccatcacccgattcattcttcgctccggacgagtaccgaaagctgtagtcattacctgatcttcttt

SEQ ID NO: 41837 - DNA, 309 bp, Zea mays
tttcttacgacaacctgaatgccaagggctgatcttctgatggctcaacaagctcgttgatttttctccagccttctatcatgcactccaaacttacaaaatgccccgtaactttctctggggtcattctagtatatctatgattacctaccatcatattgaacttgagtgggattaagaaaaatgagagatctttaacatacatttaccacttcgtggtcaatccacttcttgctcccgaggttgcgcacttgggtcaccaaaggcttgaggccgctgtacatatgttggggcttctcccctttgttg

SEQ ID NO: 41838 - DNA, 334 bp, Zea mays
  unsure (1)..(334): unsure at all n locations
tgtgaagggagaacacattngaggacgaaccaatgttcattttgagaaagacaggatttgtaacgcatggcgagccggaaagcaagttggcactcattatccacacaagaacatcatgactagcgacaggccactggagcttctacacatggacctattccgcccgatcgcttacataagcatccgcgggagtaaatactggctagctattgcggatgattatcctcgcttcacttgggtgtactttttgcaggaaaaatctcatacccaacagaccttaaagggattcttgagacgggctccaaatgagctcggcttaacgatcaagaaaatt

SEQ ID NO: 41839 - DNA, 388 bp, Zea mays
  unsure (1)..(388): unsure at all n locations
tgcggcatgcaagcgtgggatanatatgcttattangggtaagatgaatccataatgataaggtagaatcttttgaggtcagatagatctattatgataagataaatcttttcaagataagatgagaatctatttcttttaggataagatagatctatgagtggtggatagactntctcaagataagatggattttgctaggctagattctttgatgagggataacctanttcatttagatattttataaccgcttntttctatatgtatatgcagatgtgattgtggacattactccacaactaatcacactcaatcaaagatccaaatcaaacaagtatcataagaacaaacattcaagcatacaaatacctataaaaatagtttt

SEQ ID NO: 41840 - DNA, 267 bp, Zea mays
acaccgacacctccatggtggggtaggacaagacacgtcccctacttaagacccgcctttagacataaactccgggctttgtcggttgagtcttgccgaggccgcgccaccttttattcaatgtaacttcccgctccaagctaactggtccactatacttgttagatgtgaatatcctactgctgcttagtcccacaccaagtacttttatttttggaaacctttaaatatcggaatccagggttgtctctaacactctgttttatg

SEQ ID NO: 41841 - DNA, 406 bp, Zea mays
  unsure (1)..(406): unsure at all n locations
tatgtngagccacctcccggctttgaagacagtgagtatcctaaccatgtctattagctctctaaggcgctgtatgggctcaagcaagccccaagagcatggtatgaatgccttagagatttcttattgctaatggcttcaaagtcggaaaaagccgacctacactctttactaaaactcttgaaaatgacttgtttgtatgccaaatttatgttgatgatattatatctgggtctactaacgagtctacatgtgaaaaagttactaggattatgacacacaaattcgagatgtctatgatgggggagttgaactatttcttatgattccaagtaaagcaactcccagagggcacctttctaagcgacacgaagtatacttaagatattctaagcaagtttgggat

SEQ ID NO: 41842 - DNA, 321 bp, Zea mays
tggcagagtcactcgaataagcaactgttgttagtatgtgatttatgacttctatgaattatatctaggtatggttacacaagttctatgctgacaatctgtaacatgtgtatgcttgtatatgaacctgaaacctgagtacgctggtgtgagatcatgttatgggatttttggtaacctgaaacctattttctatgatgaggatgctgatttttaggaacctgaaacctgctggtatgtagcgatactactatggcatacctgagaatgggtcgatacatcagtttttgttggtacagatgaacctagaagggtttttga

SEQ ID NO: 41843 - DNA, 433 bp, Zea mays
  unsure (1)..(433): unsure at all n locations
agctnnttaccttntgtnaagccgaaggtataaatgtaattcaatattgctcatattcatttatgagaatataataaaaatattctgataatattatataattattcatgtcactttccatgtttcatatgtttccacttccattattatatactgaaatgatgaaggtatgtccttcataaccttcgtctaaagatcattatatcctgaacgagataatgctttcaaggacacaggtctttaatattaacaacttggggtgccttgtcttaactcataccattgagaacagtgacaacattggccccacctccgtgactcacttcctattgaaatatggttccttaacaataagcgtacaccttcggcacaaactgtgcttccatacagccgttaactcagaccttttcaagaatcaataagaaccccagga

SEQ ID NO: 41844 - DNA, 499 bp, Zea mays
  unsure (1)..(499): unsure at all n locations
acacataaaaactcaagcttaaaaacatagatnttaatgacaacgaaaacatattatgtttatgttcatgctctactttaactctcaatgatcattaaataacataattatatttcatagcaccaacatgtacattaataaaatagaacaggtaaattaactattgccaactgttgaaataatgggaaaatggattacaagcacaaatgtatacacaactaacatatcaaagctacaaatagcaaatcatatattcaattctaaaatcataaaggaacatgaacatgatctattagaaaatgttaaactgtaaatttatattacaatgaccaacaacctcgacgacattcaagaaatataactacacttcacttcatagaagtttatattaatgtataatctattgaaataattattggttacttattgtccaggacatacaagtaccaaagaaagaagtcagtataaagattattaagtcctacaaatgtagcatata

SEQ ID NO: 41845 - DNA, 370 bp, Zea mays
  unsure (1)..(370): unsure at all n locations
ttaagtcacctgcngcatgcaagcttcncgagagagggaacggatcctacgtctctctataggtcttatactgtggagagagcgctctgccttgaagtgagccatccgagttagcctttttttgcgtgccttgggaaggccctangcatctccttttatagatacaaggaggtgatccagctgtacatatggnggtgtaactatgtgctaacgtggtcggtggagaagtgcttgagccctgtagaagcgtaacttgcggtgcggccctangtcctgctgacgtttctttgccttcataaggacctgagggcggtcgacgtcatgggtgcatgccgggaatcatcattacctgctattggaataatatgat

SEQ ID NO: 41846 - DNA, 464 bp, Zea mays
  unsure (1)..(464): unsure at all n locations
agtcacctgcngcatgcaagcttcttggaagcgcacatctccttgatgacagtatactnggtatacaccatcttacgaagncgggacacttcagcctgggacaccctcagttcatcacggtgatggtccaagtccgacatggtgaagcagtgactcctctccagaatagtcaaggaagtgctggcgtcacaatatagtctgtccagattgtcacgagaagcaacgagtgctcgcctttcctcctataagccaaaacaacactgagcatcacaggcaggaaagcaaaacagaagcaactaagagagtttatctcataagtcatcttctcggagtcaagctgagcattcagagaagaatttaaggcacgagcacaatccaagaaagcaagggttggttcaagtcacctcgctctgggatacttctcatatcagacatcgcgagccaatctgcaaagcgccgaaaaa

SEQ ID NO: 41847 - DNA, 418 bp, Zea mays
tcgcttggagagatactggaataactttcttatatcttcaggttattgtccagagtacatatggaacacgctgtcctgaccggctgatctccattatctataaagacgattgggtgatatatttaagaattgcgaagacgatggttccaccatgttcggcatgggttattcaaaagttacctgtcagtcattgcgaaagtccagtcgggttatctcccaccaatgccaaatgcctcttgtatagaagctcctttggtacagcttcatgaagaagtcgttgttgtgctcgatgctcaatcgagtccgcacgagtatgggacttctcgtcctattcctggcgtatgtgaggcttctaatgctgtggtaccccccaagagagctcattgtaccagatccagttgacgatcatgctaataag

SEQ ID NO: 41848 - DNA, 376 bp, Zea mays
  unsure (1)..(376): unsure at all n locations
tatttgaagattcctagaagaagttattgtcaaaatactgaagactgcgcacaaatcaaacagacacacggatatcagttctgcagatccccgaagaggctccttcacattagcacgtgaaaatacttttgtttcgtgtntatacctctctaaggctggttgttactagtataaatacccacctatgtctatgatgtaaggcaacttttgataatctaaaacagaaccccctttgtttagctgtgtgctaacaaatattgagagtgatctctacccctttgctcttgtgaattacttcgtgggaatgcagaagcggcggcttcatccgcttccaagtggtgctcttacctccttcgacgtctaattgattgattgt

SEQ ID NO: 41849 - DNA, 379 bp, Zea mays
  unsure (1)..(379): unsure at all n locations
agctntaccaccctttgcatttgcccctgatttttatcaactatcttcctatcctttctacaaatagcgaaggaagcatttaaagtatgataaattgtagagggaccattcataacttttctagtcacatgaacaatattcttcctaggcacatgattaatagcatttctcctagctacgtttctgccatgcatataggaagaactagaagcaaacatagcataagagtcaaaagcatcattacaactcctataagtatttctaggttgtctcctatcatggtacataaaagcatggttcttttgcacactactagccataggagccttccctttcttcttggcggagatgggagtcttatgacttgttaagttcttgg

SEQ ID NO: 41850 - DNA, 424 bp, Zea mays
  unsure (1)..(424): unsure at all n locations
agcttcggcgaccaaatgacctatctcttcgagttctacgagnatgaagactctgagcatctgtttggtgaaggcaagtgtcctttgacccattatgtctcatttactttataatacactgtcccgcatactatgaacaacctaaggatttactagctttctatttaccttgtccttgatttaccttttgggtcactatggttagctacatgctagcgctttactttaatccatgaacatgatgagatacaatgatgatactatgattttactctggatatgatgatcttgtgatactttaggggactcgggctgtttcccgagtacctctccgtaaggacctgttcgttgagagaccacccgggataacagtgcaaccatgagggtgaaatgggatgcccttagctaattaattagaggaact

SEQ ID NO: 41851 - DNA, 437 bp, Zea mays
  unsure (1)..(437): unsure at all n locations
tagagccatggtaagnagcataggcaagtaatatacgatttgtctcaagcctagctacgggtgcatatgttggaccgaaatccaaaccttcgacttgtgaatatcccttggtcacaagtcgggctttgttccttgtcaccacaccatgctcatcttgcttgttgcggaatacccacttggttcctacaacattttgagtaggacgtggaacaaaatgccatacctcatttctcgtgaagttgttgagttcctcttgcattgccaacacccaatccgaatcccttaatgcttcttccaccctgtatggctcaatagaagacacaaaagagtaatgttcacaaagatgagcgacacgagatcgagtgtgtacccccttatgaatatcaccgacgatggagttcacggggtgatctcgntgtatcgcttggtggactctt

SEQ ID NO: 41852 - DNA, 385 bp, Zea mays
  unsure (1)..(385): unsure at all n locations
agctctcggcacttgtttatagctctngtcattatgaccagaaataactcgagaatcagttataagaatggcccttctaattcccattgcctttaacttccgaagacccaagagcagagcttcgtactcagcaatattatttgtgcaactgaaattgagtcttgccgcataacaggttttaactttagaaggagaaaccaacacagcagctgctcctgctccgaagggtccccaagacccatcgcaaaacactgtccatgtttcgacatctttattcgtttcttcctcctgagcccctggcgtccagtcagcaatgaagtctgccaacgcttgagactgaatcgaaaatctatgaacataatcaatacacaattcattgagctct

SEQ ID NO: 41853 - DNA, 417 bp, Zea mays
  unsure (1)..(417): unsure at all n locations
cacatgtnggaatgagcacactcaacaagattctatatttatacttggttacaggattgaaagatggtgtatttgaaaaagacacgccctgtagtgcatgtcaagctggatagcaagttgctaacactcatcctacagaaacttctatgtcaacatcaaagccactagaggtacttcatatggatctattcggaccaaccacttatgttaatgttggtggcaacctccattgtctggtaattgtcgatgattcttcaagatatactttgggcttctttcttcatgacaagtctgaggatgcattaatattcaagaaggttgccaagaaggctcaaaatgaatttgactgccaaatcaagaaaataacgagtgaccactgaaaggaatttaacaacaccaacattcatgagtactgtg

SEQ ID NO: 41854 - DNA, 318 bp, Zea mays
  unsure (1)..(318): unsure at all n locations
acctgcggcatgcaactgcangaataccttggagatggtcgtttctgcttgtacccgtagcacccaaaccttaatccctgctttcctcagtttctcaattggcttcgggtacttcatcctgcagcttgtcatcaattccagtggcacccaataaacgcaagttcctctctgatgtggcagccacgttgcggaagtggtttcctctttctagtaatgccgcgctanccttttcatataccattttgcactcctgaaactctttttggctaagcttcccgataccaatgacaagtgttcgcaaacctaatgatgaatatg

SEQ ID NO: 41855 - DNA, 333 bp, Zea mays
  unsure (1)..(333): unsure at all n locations
gtgtgttagatgatcgcttancaaagacanggcaaaccgcttaagcccccctcctcatcataggatttaaggcgggtgcacttccgcatccggccggagatccctctccgacattggcgcaccagtatgggctaggcttgaaggtttgcttggtttctcactcagcatgatggtgcanatcgttgagcaccgcgtcgagactttggtggatttcgtggtggaggaagaagttgtttcttccacgccataggttcccaaccgccctatgtncggcactgccgttgtgcacgctgcacggaagcatacagctgcgcaagcattcccgactccgtc

SEQ ID NO: 41856 - DNA, 467 bp, Zea mays
agcttataggaatagttaagaatattatactaatctattcactaaggcacacacttctaatagaagttccttatctaagacatacgaatggtatagtataatagagttagcatcactagagttgtaggataagttgattgagtaatttcatggtgtcctattttgagccagcattctattttctctaacatgttaactgtcagagaagaacaaaatagaaaagagtttcataatttgttggttaaagttttgtagtttggcataattaggcgctctttgacgtaacttatttcacagcttcttttacatatttaagtagaagttgtaccaaatagggtgcttctacaacagcttatcaaagaatgaattaaaagcagacaataagtaaaagttgcttttcaccaacttcttagatgaagtgtttcttcatcaagcaacacgtgtgccaaacatgaccttaaatatat

SEQ ID NO: 41857 - DNA, 456 bp, Zea mays
  unsure (1)..(456): unsure at all n locations
cctgcngcatcaagctgcactactacctaccgcacccgcatttttattccattttatggctcaacaatagcggcgagggctaggtaacccaactggtgccaattaatcttgctattggttcatatcgagatgttgctgactgtgatgttgagcctatggatgctcgaaatattctgctacgtacaacatggcaatgtgactcatattggatgcatcatgcgaaatcaaaccaatattctttcatatcccatgaaaagacaattattttgcttccaatgttccctgaggctatcgtgcttcgatgatgttgcttaagctaccaaagcttagactgagaatcccaagaatattatagttgttggcagtacacacatgggataaaactgataggacactgtttgcttgcacatacactggcgttatagaatatttgcttcactacttgagacacgcctt

SEQ ID NO: 41858 - DNA, 215 bp, Zea mays
accgagctgggcacaccatgcaagcgaaccattccacgagagaaaaatcgcaataccgagaccctcgcggaagacgacaaggcacgaacggtgccatcatacaaaacccaacaacaaccacaaacacactagccacgcccttcgtaaacctaggcaatcccagcacagaatccataaaaagactccacacacgagcactaagaacgggaagaggc

SEQ ID NO: 41859 - DNA, 448 bp, Zea mays
  unsure (1)..(448): unsure at all n locations
catgcaagcttagagcaatggtgggcaataatgcaagagctttatgatgtatcgcggatcaacncaaacacaaggaagtagcacacttcacaagttcgtactttgcagaagaacataatgtatttgctcgaaagacaaggtaccatgatgatgaacgagagatgcctccttgtagtgatctttctgatttttagacaaacggcaaagtctgtggtccacccaaggcatatcacctcantatggaagaacggaagtctgctttactgtacatgttcacnaattatgcctgaggtggagaaatactttgtgtaacacttattttcttaaactgatcatatgtgaattagtttatgttatcaaatatctcatgtcatacaataatacttgacagtgagtttgatgaacaaaacatgatgtgtctcggaggccaacagcgagagacatagac

SEQ ID NO: 41860 - DNA, 341 bp, Zea mays
  unsure (1)..(341): unsure at all n locations
ctgagctgcgctatatgnctaacaaactcctgttattgtttgacaagatagagcttcgaaaacaaaaagtcacaccaaaatttcagtaagtcataatcaaatggccagagttcactctactgcttgggtcgatcgtgagggagatgagaccgaaactactgagactgttcctatttcggaagcaatgaagcgctctgggttggtaacaccagaggacatccttgctgccgaagcagaacaggctgctgttgaagaaactgattccgaagatgaatacagcagtgcagtgtcgagcaagcctagccacctggacttcggaaagtccacaatctctgaagctg

SEQ ID NO: 41861 - DNA, 468 bp, Zea mays
  unsure (1)..(468): unsure at all n locations
agcttgtgagcaatacaagtacagaagggagaatgctgctttttctgatcatccgaagcccatgcttntatgtgaagatatagcagagcagaaggtgttgttggggtctcaattgtctgaggagcaggagaaaaccttgacaaggtttctgttcaacaataaagatgtcttcgcatggtcggccaatgatctctatggtgtgaacagggatgtcattgagcactcgctcaatgttgatccatccttcagaccccaaagcaaagacttcggaagatgtctgatgacaaagccgaaggtgctctgaatgaagtgaaaagacttcttagtgctggcgtcattaaagaagtaaagtacctataatggttagccaacactgtcatggtgaagaagaccaatggtnaatggagaatgtgcattgactctactgatctcaataaggcttgtccgacgatgaatttccgtaccaaa

SEQ ID NO: 41862 - DNA, 465 bp, Zea mays
ttacattatgtcaaagcgctcctaaataatatgtcgtaccatcatctataatctgaaatgttgagaacaggagaacggtaacgttaaatatacaagtaattagatgcatgggttaatggtaacggaaggggaagaacagttacagtgatacatgcaacgtatttgaggaaatgccaccacccctcatagcggcatagaaactacaggcgagaggcaatgaccgatgccttcctaaggtgtctctcacctgttgaagagggctgacttgccgacattggggcagacgatgaggaagactgcaataaagcattggtactctacaggcaacatctcatgcttatgacacatggtacaaaaaatattaacagcccagtgctgcactatgtagtgattagtgaagatcttattaaactaaaccgcaccacatttacatccaggtagcatgaactatgatgcaatattgat

SEQ ID NO: 41863 - DNA, 458 bp, Zea mays
  unsure (1)..(458): unsure at all n locations
agctntatcaaaaggacgtgaaatatgtcttccttcttggaccaattaaggaggaggtctatgttgagcaacctctcgactctgaagatagtgagtaccctaaccacgtatataaactctctaaggcactttatgggctcaagcaagccccaagagcatggtatgaatgcctaagagattttcttatcgctaatgacttcaaagttggaaaggccgatcctactctctttacaaaaacacttgcaaatgatttgttcatatgccaaatttatgttgatgatatcatattcgggtctactaacaaatctacatgtgaagagtttagtaggatcatgactaaaaaattcgagatgtctatgatgggggagttgaagtattttctaggatttcaagtcaagcaactccaagagggcaccttcattagccaaacgaagtacattccagacatactcaccaag

SEQ ID NO: 41864 - DNA, 351 bp, Zea mays
gtgggaacagtacaaattcagaatggagacagcagcttcttcatattatccgaagcccatgctcttatgtgaggacatagcagagcagaacgtgctgttgggctctcaattatccgaagaacaggagagaaccttgataaggtttttgttcaacaacaaagatgtttctgcatggtcagctaatgatctctgcggagtaaatacggatgttattgaacactcgctcaatgttgacccatccttcagacccaaaaagcataggcctcggaaaatgtctgatgataacgccgaaagtgctcataatgaagtcaaagactcctcaggcatgagttatcagagaagtaaagtacc

SEQ ID NO: 41865 - DNA, 416 bp, Zea mays
  unsure (1)..(416): unsure at all n locations
agcttcacgggctactggcggagctagccgaatctatgttgtgcttgaggggggctggagtgggctggccacggcggccgtagctctggcggcaatggcgggcggaaatacgctcgccggagctaaggaacggtggctggccggtgagggtgagtgcggtgcgatgagaggtgcgcctgnggaggctttatatgcgcgggcgggcaccgccganggcgtgggcgcgcggcggacttgaccggactcccgggcgagcgcgcgcgcgggttgggcgagctctggcgtgccgaccagggtcgaacacgtgtgcccgtgcgttctgcccaagctctggcgcgtgtggtcgctcatccgagcctgctctcgccttggtcagtgcacgaaacctcttctcctccctacaagctaccattctt

SEQ ID NO: 41866 - DNA, 437 bp, Zea mays
  unsure (1)..(437): unsure at all n locations
agcttcgaatataactctaatattttatcctcagtttcatccagcaagccttcggtcgattggagctcgaagtctttcttttcaatgatggcagactgctcttttattttgctctccaagttttcaattatagcttcgtgctttttgtcctccaagtcttgttgcatcttcagagctttgctcagtagcatgctctgaacagaagcaacttatgttaaataatattttcattgttaacggcaatataaaccagagaaaaaggttgtttacctttgaagttagaataaaacaagctgccgacgatatgttgtcgtcggtagcggctgatgtctgtctctaacttcggaaaaccgatactctttcatagaataccgattaccttagctccagtctggtctcgaatacagcctagtntttcatcatctacacccccaaat

SEQ ID NO: 41867 - DNA, 432 bp, Zea mays
  unsure (1)..(432): unsure at all n locations
agcttcnggaaaccaacactcttctatagagtactttataactcttcactccaggctgatctcggatgcatcctcaagctttcttcgttaatgccgccgaacagtaacgctcctggctggtagccacaggatatatcataattccgcagctcctctttctcagccttagataactcttaaccaattatgttttgaaaattgaagtctttttttctccgaaatatcttcaacaatctccttcccttttctaggcactgtggctagggtttcttcagcagctgcagcagcttcttctgcgaccatatccaagagtattctaccaatatcagataatgttctctccagatttgtggcttcagctgttgtagctttggcagtggtagcttcggtgggaacagcttccgtagctatagcaacttccgcagctggtgt

SEQ ID NO: 41868 - DNA, 461 bp, Zea mays
tgaatgtccatgttgaatcatttaccggttcatacttcttcatttcttggcataacataatggcagaagtctgcatcgtaagataatgacagatagccttgtgacttaacgcatccaccactacattagccttgcttgggtgataatgaatctccaattcataatctttaatcagctcaagccatctacctctgcctcatattcaactctgactgggtaaagatatatctcacactcttatgatctgcataaatatgacagatattcctcagcagataatgacgccatatttacatggcatgaaccacaacagctaattctaggtcatgaggtggataatgttcttcatgccggcgcaactgccttgaaacgaagctatcactctggcttcttacattagaacacagcctagaccactacctgatgcgcacaatacacatcaaacggcttttaatgtccgg

SEQ ID NO: 41869 - DNA, 341 bp, Zea mays
  unsure (1)..(341): unsure at all n locations
atccttagagtcanctgcggcatcaagctttaaaggagncacgttattgtctatcttatgtgcatttcgaaaaagatagaccttgtgcagcttgtcaagcaggtaaacaagtgggaagtaatcatcacatcaagaatgtgatgactacatcaagacccctggagctgctgcatatggacctcttcggacccggtcgctacctaagcatcgggggaaagaagtatggtttagtaattggtgatgaattttcccgcttcacttgggtattctttctgcaggataaatctgaaacccacaggacccttcagcgctttctaaggagagctcaaaatgagtttgag

SEQ ID NO: 41870 - DNA, 445 bp, Zea mays
  unsure (1)..(445): unsure at all n locations
cagcttccttacgcacaactcacgctctgttccatccttcgttctctttgtgtttcttcatacaaagattctgacgtgtccgaagagtccatgttcgaacgtacctgttcatgcattatactttcagaaacattgttaaatcatgtctttgaggacattcggaagccgaaggcccccaacactagcctcttgcaatattaatttgttagaatgataaattcagattgcaataacgaccagagctctgagccgatagtccgataaaacaccttctctttgctagaatagcaatagtcaccgacaagcgggccctccagtatgcaacgcatcaggcgtataaataagagcacacccgaaactcattnggtatgctctttatgccatctgctcctgcttactcacattttagctcttgcgcaccaacacttgcttggctgttaaatat

SEQ ID NO: 41871 - DNA, 276 bp, Zea mays
  unsure (1)..(276): unsure at all n locations
tgactttcatgaatagccatacgcgcttgatccgaaggtatcttcatgcaaagatatgttggatgaagaattgcttcaaaagcattgggtgtcccacgaccaatgactgcattgtangggtactccatgtcgacaatatcaaacacaacttgctcagtccttgtattggtgacaaatccgaaggtcactggcatcatgatcttgccgagcgctacaatcttgtttccttcgaagccacaaagagggtgtggagcatcatgaatcttattctctggc

SEQ ID NO: 41872 - DNA, 261 bp, Zea mays
aaagaacaatgcataaaagcgtaaataacgatgttattaaatatattaacacttccgaaaagaccataagccttaactcttattcaccaaagaacagcgaaacatggacatccatccacaagaagatgaccgggggtatcactagactagcatccatggagttcagcatcatatctttatctgcaaacttctgatcaaaatataagcaagggtgagctcacctatgggcggggctcagcaaggggcgtgaaaatgcaagga

SEQ ID NO: 41873 - DNA, 469 bp, Zea mays
  unsure (1)..(469): unsure at all n locations
gatcttagagtcacctgccgcatgcaagctttaagggggaacacgtgatagggttgacttacgtgcaattctaanaagatagaccttgtgcagcttgtcaagcaggtaaacaagtgggaggagcgcatcacagcaagaatgtgatgaccacatcaagacccctggagctgctacatatggacctcttcggacccgtcgcctatctaagcataggacgatgtaagtatggtctagttattggtgatgacttttcccgcttcacttgggtaatcttttttgcaggataagactaanacccaagggaccctcaagcgcttcctaaggagagctcaaaatgagtttgagctcaaagtgaaaaagataagaagcgacaacgggtccgaattcaagaaccttcaagtggaggagtttcttgagaaggaagggatcaacacgagttctctgctcctacacaccacaacaaatggtg

SEQ ID NO: 41874 - DNA, 452 bp, Zea mays
agcttacctcaacctaagaggaaagcttatcttaatggtgaatgtgtgttgtgtgctacagatctcaaagctcaaccttgtgatgaggatgagctcacctctgctacggcgggattttcttgagttccttttgatcttatagaggagaacgctctagttttattggtaatgcttaccatgtgcttcttgttgtattatactgtgataattctttaatggtgttgctattgttgtaatccatgcttaatccttcttttgatatcatttggtgtagcatcgtccttatcttgttaatgtgtacatcgatcaattggtatcaatcatgcttgttgcttatcatgtgatagacattcatgtgtttcttgtgtcatggtgctctaactgatatcttatagtaaacaagggaagttcatatcttatgttatatattgtaatagggccttcttctgata

SEQ ID NO: 41875 - DNA, 433 bp, Zea mays
  unsure (1)..(433): unsure at all n locations
tgctcttgaaataaatgtaagtctatgtaactgcttccgcatttctttatctccgatgttctgcaatgtctgcaagacgggtgaaacgttcctggtaaggtaaggaaagataccgaacttgtcaagtgacttaggaacatctacagggtgtatgatgtctgttggacaaggacaactgtaagtgggcctaattacttgggaggttccgtcacagctggtatcggagcgtaacccttctttgcagatattatgaggcatcttcaaaaggattntctagagacttacctaaaaactcttttctcttcttacctaagtattctgaagagtctatcttatagaccacatacgaagagtgcaatgtatataacgttgaatcgactaaggttgattctgtaattatacatgcatcatgctaagcactatactaataaca

SEQ ID NO: 41876 - DNA, 457 bp, Zea mays
agcttaaaggatattattcaactaaagtaagatgatgttgataagatgccaatgtatgaaaacttcctctccttcagttgttttagtattctatccttagtgggatgtaccatagtataggttaatttccttgcaatataaaatgttcaacagtgcatataactttgagatcaactatatgtgtgcactagtttaaaggaaattaatctatccttttgggtttcaagaatgatgattcattctccatccacatataaggattatcatttgtgaaacccttccttgttttctaatgctctcttttctaagtgtttcaataaggtccttccaagtgttttcaagatggatttaaaatctacggatataagagtcttggttgtttcaatcattgagtttcaatcgatctcatatcaagtatgatcgaatcaagaaaagatgaaagaagttcaagatcact

SEQ ID NO: 41877 - DNA, 354 bp, Zea mays
  unsure (1)..(354): unsure at all n locations
agcttacttcgtgcctcagcacattttcattntgtctattcatttttcgaaggggcgcttcgcattcaattnttgtgccgttaatgcaatatgatgtatgatgtaatgttatgcgaaatgatgtgatgatatgatgcaaatgatgaggatgccgaagacacacacccacacgcccacactggaatacacaagactctacatccccttatgaacgtcttttgagtctttaagctctgcatccccttangaacgacttttgagcttctttaccttctatttcggtggtatttggcccagccttaggaagcctcaaccggtctgtgtgactgattgagagagggaaagggttgaaat

SEQ ID NO: 41878 - DNA, 220 bp, Zea mays
  unsure (1)..(220): unsure at all n locations
ctgcctgggctataaatagagaacagaatcctttaacgacacacattcctgtaattgccatccccttcctcgggaatcaatctttgtcacggcaaaggtataaatatatccaacatctaaatcacattaagttgatataatacgaaagtaatgttgatcatttataatntacttacctttgatgcttcatatttaagactattttacataaactactgga

SEQ ID NO: 41879 - DNA, 479 bp, Zea mays
  unsure (1)..(479): unsure at all n locations
gatcttaagtcacctgcngcatgcaacttgagcacctatgaagccttcatgcttataatataagcctcatcccacctcttgtgtttcatcttgcatcaatccatctgggcagggacacgcgacacaaaattcactagtcggttcggttgagggtccctcgggtccgaaacatcgacacccacgatatccagattctcgtgacagctagattatccaggaattcatattattagaaaaacccttttaggaaaaagttgtgccaaactagcccttgtttgtggtgctagcccccctaaccaccattgtcccttcgccctacggtgtgtggcaacggcccacgacagccaaaaaatggctcctcgtctgcagcctcacctccccncattnctctcttacaccacttctcttctctatcaccatcgtaattgggtggtcgaaacggtatatctaacagtctctctgtattcttttaatcatat

SEQ ID NO: 41880 - DNA, 424 bp, Zea mays
agcttcggatggagtattaaattctgcttcatctttctttttttatccaccaatgaaagtagaattttgtctttctccatggcttcgcttctcagcctgatgacctctgatccaaggttgctgagagctatagtgcagctctcgtctttggcgttcttttgcgccctcagggcgttgctaaggattaagccctgcaagaacgaataaagaattagcatgagaataaaagacttcattcccaagccccatagcctcaaaattacaacttctgtaccttcatcatggcgcagaggccagcttcgagaatcccatactttttgtcatctcctggtagacggataactctttgttgtccgggaggcagtacaaaaaatcatcttcgttcgtgccgttaaacactaagggccccttcgggtatttcagt

SEQ ID NO: 41881 - DNA, 391 bp, Zea mays
ctcaagcctcctagcccaaaattgagctgcaggtccaggacgaagtctccttgatcattggtctcgatgaccaattcattgggcaccgttggtgcctgcgccctcaaacgcaagaaccttctgacatacgcctgaaggtattcttcatgatcctgagtgcactggaacaaggctagagcagtgaccggcttcctctgaaacccttgaaagctgggtaacaacatatccttcaacttctgccatgaagtgattgcccctggccgaagggaggaataccacgtctgagcaacactcttgacagccataacaaaagattttgccatgactgcagcattgccaccatacgaagacactgttgcttcgtaactcatcaagaactgccttgggtctg

SEQ ID NO: 41882 - DNA, 382 bp, Zea mays
  unsure (1)..(382): unsure at all n locations
aaagatagaccttgtgcagcttgtccagcaggcaaacaagtgggaggagcacatcacagcaagaatgtgatgaccactttaagacctctggagctgctgcatatggaccttttcggacccgtcgcctatctgagcatacgagggagtaagtatggtctagttattgttgatgacttttcccgcttcacttgggtgttctttttgcaggataagtctgaaacccaagggaccctaagcgcttcctcangagagctcacaatgagtttgagcttacagtgaagaagataatgagcgacaacgggtccgagttcaagatccttcaagtggaggagttcctcgaggaggataggatcaagcacgagttctccgctcctacacacca

SEQ ID NO: 41883 - DNA, 452 bp, Zea mays
  unsure (1)..(452): unsure at all n locations
agcttctgcaacatacacgagttattgtactagtctattccctgnggaaaggagcaataccacaacaactttgggtgctacagcttcggcgcccgctccgggtcaagctaccctgtgccaacctttcggaagaggtggcccggagcctggatgtctgaatggttttatgtgaaaaatgatctaacagcgcaaaataatgtcaaaagtatcattatgtacccaatttggcaacgcttcnggcttccaaggccgaaggttgaaatggatgaggcagccgaagaatgccaaagagccttcggcgcagtctgctccttcattgggtcaagggacttggtccaggagcatattgccttcagggtatggccacttgcagaanagtgggaaatgccganagaaaccatcaaagagtccgacgaacgcggactagtcagaataaaatacacattccaata

SEQ ID NO: 41884 - DNA, 465 bp, Zea mays
  unsure (1)..(465): unsure at all n locations
tgctcgcctgcccttcacctcgacggtacaggactacttctatcgcnttaacgctatgctcggcaacacgtggaagctcgacgcgcagcagaaggccaaactcttcatcagcggtctccccgaccacatccgggctaatgtggccatccaagacccccagaaccttcaatcggcgatgtacttggcgcgtgctttcgagcagtgtgcagcggcagcccactccgcctccaacgcgcgggttccggccatctcgcccgggactgccagcactgtcgcgtcctccgtcgaggccgctgactgctctcgcagtcgctgcagcacaaccagcgggtgcagccgctccagcacgaccgttccgtcggcttacgccggccgagcagcaagaacgacatcgtcaagggctttgtttcaattgtgatgagccctatgtgcgtgggcacgtgtgtactcgcttttctacttgag

SEQ ID NO: 41885 - DNA, 394 bp, Zea mays
  unsure (1)..(394): unsure at all n locations
agctngcacttacgacctaatcgcactctcatttatatacattcaatggctcaacaatagtggtaaggtcaaggtaaccaagctggtaccaattaattttgctattggttcatatcgtgatgttgttgactgtgatgttgtgcctatggatgcttgtaatattctgctacgtagaccatggcaatttgattcacattgtatgcatcatggtagatcaaatcaatattctcttatacaccatgataagaaaatattttgcttccatgtccctgaggctattgtgcggatgatgtgctaagctaccaagctaaactgagacaacaagatattaagctgtggtataacaagatggataaattgaaggcattgtgcttcacaaaatgtgtatgaatat

SEQ ID NO: 41886 - DNA, 367 bp, Zea mays
  unsure (1)..(367): unsure at all n locations
tagcttgagaaaacagctatcaataagttctctccttctatcccacngaagtccatcaaattgagaagagaaggtcctctctctctcatgacagagcacaaagaagcattatggagcacgtattcgccaaccacaaagcccgatacttctgttctaaataggctcattgacgctggtgtgtcaccaaggattgaggagtccatgtcggtagtcaacaatgagatattgtggcagcacttcttggagttgacgaccaacttccttgtgccttttgggccgcatctgagaactacaacaccatcagaagggacttcacctcttgttgacccaccattgctaccaccgtttcatgcaagtgagttcatca

SEQ ID NO: 41887 - DNA, 402 bp, Zea mays
agcttcagcagaatgacagcgaaggttctccattctcatataggcaggaatgtactaacttatgttgatgatatcattgtaaaaagcacgaagcaagataaccacattgctgatttacaggagaccttcgctaattttagacaggctggtctaaagctgaatccagaaaaatgtgtcttcggagtaaagaaggggaaatttcttggttgcctagtttcaacaaagggaattgaggccaacccaagtaaaatcgaagctatacttcgaatggaaccaccaagtacaaaaaagggggctcaaagattgataggaaggctggcatctctcaacagattcatatccagatcagcagagagaaacttaccattcttcgaagtgctgaagtcagccgaagtctttcaa

SEQ ID NO: 41888 - DNA, 325 bp, Zea mays
  unsure (1)..(325): unsure at all n locations
atgcagctgcattgatgttaaatttcttggatagcatctatggcttgtctaacctanntaagaaaaccgccaacaaagcgagtgataaagcttaactcggatcaaacttgacaagtcttagttttaagcttttaacacttgaattcttactttttatgcaattgttggttcttgaaatatgcatgaagtactgcacttanggggagtattcaaaacccaaatcactcatgaaaacccctagtgcaatggcaaaaatgcaaatttcaccatttgcctattttctctataaaatatctagcctatggcaaaatatgagaaaatatat

SEQ ID NO: 41889 - DNA, 461 bp, Zea mays
  unsure (1)..(461): unsure at all n locations
agcttgggaagattcttcattccaacatgggctagtcggcgatgtcagagcctacccatattagtcttagcaattaagcaagtatcgagttcagctntgttaaaatgaactaagtatagctgaccctctaatacttccttaaatgctattgaatcatcacttcttctaaagacagtaacacctatatccgtaaaaagacagttgtaacccattttgcataattgagaaactgaaagcaagttataatctaaagaatctacaagaaaaatattggaaatagaatggtcaggtgatatagcaattttacaaagtcctttgaccaaaccttgatttccatccccgaatgtgatagctcgttagggatcttcgtttttctcgtaggaggaagaacattcttttctcccctctcatgtgggttgtgcatctgctatncaatatccaacatgagcccccggatgcat

SEQ ID NO: 41890 - DNA, 439 bp, Zea mays
agcttatgaagattcttcatcccaacgtgggctattctgtgatgtcatagccaacccatgttagtcttagcaattaagcaagcgtcgagttcagctctattaaaatcaactaagtatagctgaccctctaacactcccttaaatgcaactgaatcatcacttcttctaaagacaggaacacctatatccgtaaaaagacagttgtaacccattttgcataattgagaaacagaaagcaaattgtaatctaaagaatctacaagaaaaacattggaaatagaatggcaagtgatatagcaatttaccaagtctttgaccaaccttgatttcatcccgaatggatggcttttgggatcagggtttctatagaggagaaatctttctccttgcatggggttggcacccgtataatgaccactgagccccgatgataactaca

SEQ ID NO: 41891 - DNA, 294 bp, Zea mays
tgtgtgccagggatctcgcgcccctgcccaaatccggctgcctgcgcgctccttcttactttttccctgtcatccgcatcttcttcgggccgtccgcggtatactggctcacgcagatgctcgatgcccaatccctgcgtcgcgtccatcctatgctcttcctgttcgccggcagaagctcccagccgagcgttccttctcttcgccgcgcgcccagccgtcgaagctccctgccatcgacgttttcggccctgccgttggtacaacaatcggtgctggtgctagttgatgcaa

SEQ ID NO: 41892 - DNA, 359 bp, Zea mays
  unsure (1)..(359): unsure at all n locations
cctatttacaagcaccttccggaggcataacatgctatgcagcgaaacttgatntcagctgctcaaataatattggtgaaacgaactttgctttggggcttccgatgttaaagcatgggataaaaggggttctaaaccaatcccagtatttttggcatattgacagagttgtaagcaagaacccgcacctgagaacacttggatacagtcgaagcttgaagcttcttcgaaagttctctgtcagatattccacaggagaaatggcacgctgtctgctaccaatcacggccaggggtgctttcccttcgaagatccttgagacccctacctaatttataatatttggatactttcattat

SEQ ID NO: 41893 - DNA, 360 bp, Zea mays
  unsure (1)..(360): unsure at all n locations
cagttgtcaaactgtgagattcgaactgggcactcctgaagcagacaacacanatggttntagccactaagaatttaatgtgcacgcctttgatgttattgtggatacagccctcgcctcgatccatttggtaaaatactcgacggcgactaaggtgaacttgaggttcccctgaaccgtgggcaggggcccgacaatgtcacagccccaccgttggagaggccatgtgtgggccattagtttcgtgaatcgcgaaaggctttctgatcaacgagaaaacttctagcaggcttcgcaggaccttgtgacccgatttgcggcgcatatcattgcgggccagtagaaaccttgacgaatcac

SEQ ID NO: 41894 - DNA, 328 bp, Zea mays
aaaatactgcaccgccgtccgaaagctagaacataaaaccgagggcctggagcctcatcatatagaaagagatctgaacacagcggccgatgtactgtccaccctcgaaccggtcggactcatgtcccgcccggagactctgtgcaacatatactccaaccgagcaactcgacggatcaaatacaagagcgcaacatcatagatcaacccgagtcagactctgatgactggaggcaatcgattattacgcatataaaggaatgaagaagaacctgatgacaagaactcggcagagccgcttgctcgaccatagactactatacactca

SEQ ID NO: 41895 - DNA, 456 bp, Zea mays
  unsure (1)..(456): unsure at all n locations
agcttagctgagctggcaatcacgacgaaggaatagacgatttctaagctatgcgcagaagagcttcggcataacggcggagagggaaaccgacttaaagatgaaaagccagactagacctcgaagaattactatagagttattgataaatgtaaagggcattaatgtaatcttgcatgggctgcgacccgtgcctataaataggtgaacagtattcccgtactgttcacgctgacttggcattcacttttgcgccagacctgtattttctttccttcaagccgaaggtacatttgtaatttatctttgtttacacgagtaatacaaataaaaatagattaataataatgtttacagaaattatgttacaatttgtatcttggttgaatgttctccaatttttatcatgatcataaaggtacgtnctttatgaccttcgtcctaaatttggtatat

SEQ ID NO: 41896 - DNA, 424 bp, Zea mays
  unsure (1)..(424): unsure at all n locations
tgagcaaaatgaatagcttcggttgacgatgcagtaagctatgctttactatggttaaatntttggcagcaaaacagtgcaatagcaatgaatgttgtggtaacttcacacctacccgtctgtttatatagtgccgcatgtgggaaggtaaatcgtcaaatcttccgcaccagacaaacagccacccgcacccactgaacggtgggccacagaacccgagaaggtgaatcgccaggacgcgtgtaactgctgcatggtggggccacctcgcgctcggattattttaatcgtttctcggcaacgagctcaaggaaggtgtttttcggatcttctgcatcctgaagcctaagagactcatttacggatcaagctctgtatgaaaaacgatctaacaccgcgaagaggctactgtttggggtatgct

SEQ ID NO: 41897 - DNA, 432 bp, Zea mays
  unsure (1)..(432): unsure at all n locations
agcttgtatagtttgctgcatattgttgtgctctgtctcataccattccgttgcagttgcacgcggtttcgacgtcgatacgatgcgcgcctttcaagagttgaaggagacggcgtcagcctttcagcagtggggaggccaaaaccaacacctgcatcagcaaaggctcgctggcagaagttgagacgcatgtatttatagcaatccgttactacaggatagtggaagcatctatttacctggccaaatgctccactccttttctttttttntaaccttcccgtcaagaagctatatttcgacagattctttattatttttaatatgcataagagcatgcagaaagacgcttagcgtgtcaataccttgcgtgtgggctatcatttacancgctctatgagtgattaactcgcatccatcgatggacatttc

SEQ ID NO: 41898 - DNA, 407 bp, Zea mays
aactggagacgtggctggatcacctgacatgtcccgcgtgcaccggactgtccggtgcgccatcgagcagacagcctccaccaacggtcaagttggtggttgaggctataaatacccgcaccaccccaccattcattgcatccaagtttatcacctctcaactactacaagagctctacgttcaattatagacacttcgaaaagatcaaatcgcttgcaattccactcaagcctttattgactagcgagagagatctggcgagttcttttgagctcttgcgctcggatctgttactatgttactcacttgttctcgagaacgaaactcaatttgaaccaacgcattaggcaccatatgtgtagtggccttgcgcgaagttctgtctcccctgatcgccactaaaaaa

SEQ ID NO: 41899 - DNA, 364 bp, Zea mays
ttcttatccccattgcctttaacttctgaagccccaaaagtaaagcttcgtattcagcaatattatttgacagctgaaatcaagccttattgcatagcatgttctgactttggaaggtgcaactaagacagcagccgcacctgctccgaaggttccctatgaaccatcgtagaacattgtccaagcgttagcatctttatttgcttcttcttcctgagcccctggcgtccagtcagcgatgaagcctgctaacgcctgggactgaattgaggatctatgcacataatcaatgttgaatttgttgagttccgcagcccactttccaatccttctagtagcttctctgttcctcataatatccttc

SEQ ID NO: 41900 - DNA, 414 bp, Zea mays
agcttatgaagattcttcatcccatcatgggcttttctgggtgctagagccaacccatgttagtcttagcaattaagcatgtgtcgagttcagctctatcaaaatctactaagtatagttgaccctctaacacacccttaaatgctattgaatcatcacttcttctaaagacagtgacacctacatcagtgaaaagacagttgtaacccattttgcataattgagatacagaaagcaaattgtaatctaatgaatctacaagaaaaacattggaaatagaatggtcaggagatatagcaattttaccaaatcctctgaccaaaccttggtttccatccccgaatgtgatcgctcgttgaggatcttggtttttcttgtaagaagagaacatcttcttctctcctgtcatgtgga

SEQ ID NO: 41901 - DNA, 403 bp, Zea mays
  unsure (1)..(403): unsure at all n locations
ctgtttcagtgcacacaagaccatgaggagtaccctcaggcgtatgtccaaaggtttctacgtctgagagcacaagcgcctacagtgcccaatgaaattgtcattgaggccatgatcaaagggcttcggccagaacctacggctcagtattttgcaaggaagcccncacaaaccctagagaagctccttcagaagatggatgaatacatccgggctgataatgattntcgccagagaagggaagaagactataggttttctgagatgaccaggggcttcggaggaagaatccaccccaggcatgtcagatcaatccataattccagcataagtgatgacagaggaagccagcctcaaaggccacaacacagctcccaatctttatggcaacaacaaagctctt

SEQ ID NO: 41902 - DNA, 447 bp, Zea mays
  unsure (1)..(447): unsure at all n locations
agcttctaaagggagattacatnttgngactaactaatgttcatatngagaaagacagggtttgtagcgcatgccaagcangaaagcaagttggtacccatcattcacacaaaacatcatgacaacggacgggccactagagttactccacatggatttattcggcctgatagcttacatgagcatcggcgggagtaagtactgtcttgtaattgtggatgattattctcacttcacttgggtattctttttataggaaaaatctcacacccaagaaactttaaagggattcttgagatgagctcaaaatgagtttggaataagaatctacaagataagaagcgacaacgggacggagttcaagaactcacaaatagaaggctttcttgacgagagggcatcagcattagttctcttctcctacacactaacaaaatggtgagtgga

SEQ ID NO: 41903 - DNA, 337 bp, Zea mays
  unsure (1)..(337): unsure at all n locations
agcttancanaagaaatttctagaatcaagaatattttgctcatgcctaagtctggtaaaagaatgttcatcaagtggcttggtaaagatatcggctaattgatctttattattaatgtaagaaatctcgatatcccccttttgttggtgatccctaagaaaatgataccgaatggctatgtgcttagtgcggctatgctcgacgggattgtcggccattttgattgcactctcattatcacatancaaagggactttggttaattngtaaccgtantccccagggtttgcctcatccaaagcaatcgcgcgcaacaatgtcctgcggcaatgtact

SEQ ID NO: 41904 - DNA, 337 bp, Zea mays
  unsure (1)..(337): unsure at all n locations
tcagcagcacaggggctgcctttaccttcggatgtgatctttgaaacaataaaagcaccttctgtggaactccttgaaagagcagctcttaatatatctcctgtttttagcgaaaattggagaactgagatcatctcttaccttcacggtaaatttctttcagatgacgaagcttataacacgagaatagaggcaagagctcgtccatatgtcatgatacaacgggagttgtacaaacatggaagttgggctccgttgctcaaatgcttatccagaaccgaacgatatagttaatgaaagaatacatgcangcctgtgtggatctcacatcagatct

SEQ ID NO: 41905 - DNA, 431 bp, Zea mays
  unsure (1)..(431): unsure at all n locations
agcttagccatggcaattctatatgaaattagtgctaaccaaccattcttatccnaaagggtgaactaacaattaattgagcacatgcaganttttaggacagcagcacagcagttattagttttaatcatatctcttcaaatattcatccaaaaatagcaaactaggattttctggaaagcttaaaaagtgaactataactttggtattttcacctcaacctgattcaacacatagcaaggtcaaaaagtgcaatcacagcagctctgtccagatttggacagattcagacttgcaacttcaaaaattcacaactagagattcagacatccaaataagttgatcctagactttctggaaagggaataaaattgtctacatatcatttataaacatctcnaggtgattcaatatttaactaaggataaaca

SEQ ID NO: 41906 - DNA, 408 bp, Zea mays
  unsure (1)..(408): unsure at all n locations
tgcggcatgcaagcttagcgactgccagttcgacctctaaaagcagttctacgtgttcttatgcgccgctgngtacgacaagctccggcgcagccgccgcttggacgcgatgcagagcggctgccccgcgctgtccatcgtcaagcaaggggacctcatggtcatcgccaacgtcggcgactctcgggttgttctgggcaccgcatccgatgacgacgccatcatgtcgtctagctcatcattcacttgaagcccaacctgccacgtaagtcgctactgaccgaccatgaattcttgtatgttgggacgacggttgttgctgacgttgtgtaagtgtcctccaacatgatgtatgtagaggagtagtgcatccggtggtgcaacggccacggtactacctcgctgatg

SEQ ID NO: 41907 - DNA, 404 bp, Zea mays
taattccacatacagctagtccatctcagccaatgggacatttgttgtatacgttgatgtgcactcatccttgctttcgcaaaacaccaggttgcctttggtgcaatctatgctcacgtaaagaaggagaagaaggcatcgaggcggatctccaggaggtccaggacttcgacgagttcgaggattaggctaacggcctcgcccagtcagctgtttgtgggggttaatttacgttggctacatttctattttgtgtaccttgatttatattatgtaaatgactctagtccttcgtattattacttactctctattggtattcgaagcactgcgctatgatgagtcatttatgtaatccgcgtgtacgtgaatatctgatcctcccacatacatggttcgcattc

SEQ ID NO: 41908 - DNA, 431 bp, Zea mays
  unsure (1)..(431): unsure at all n locations
agcttgagctacatatctatgcgcctgtnncggatattttttctaaacaactttcttttagagaatctgaatttctgaataatctaggtgtcacgagaatctaaattcgcgagccttgtatgcagagttgttaagatttatgggttaagcccaacttgagaaaatcaaataaatcacaggaaaatctcaaaagcccatataantatggctagggaataaatggaactaatagcaccatatcgctagttctagtagagtacagctagcttacatatggaagccacactcactcaccaagtcatggatgagaggagagagtgtggatagccacacacgtgtgcgcgctcgctcgcctggccggcccagggcggnggcaaagggcgcacgacatgcgcgtgaatggtccgccgaaatcatggtccgctgaaatc

SEQ ID NO: 41909 - DNA, 364 bp, Zea mays
ccaagcagggaagcaagatagcacccatcatccgcataagaacacaatgacgaccgacaggccactggagctcccgcacatggaactaaacggcccgatcgctaacataagcattcgtgggagaaagaacagcccagctaccgcggacgaacaagccagctccactcgggaggactcttcgcacgaaaaacctcaaacccaagagacctcaaacggattctcgagacgggcgcaaaatgagttcgccttaaggatcaaccacataagaagcgaccacggaacggagtgcaagaactcccaaatcgaaagattcctgaggaggaaggaagcaagcatgagttctcttctccctacactccacaac

SEQ ID NO: 41910 - DNA, 424 bp, Zea mays
  unsure (1)..(424): unsure at all n locations
agcttgataatgagtagacggctctaatcctcaatatctttctgtttattctcaagcaacggaaggggaaggagtacaaaccccttaccaagagggtatagctgctccaacgccctcgttgatggaaggcatcattctcctcttcttgaaaaccactttactcatgcacgacataaaagcagcaggttgaggggagttgttgggaaaaggaagatgagatcatgagttgtggcacaaaaaaggaatcanaaagcagggaccgacaagggcccccacccgactagctgcgccctaacgaacctttgtcctccaagaggcacctttcatccgtggcactcgagcggagcgccggtcctgccaccctctntggaggtgagcacgggtagtatcgaaggtatgccaaccaagaccactaacgagcccg

SEQ ID NO: 41911 - DNA, 380 bp, Zea mays
  unsure (1)..(380): unsure at all n locations
accttaaatactcagcttaagcgaggagagtctggattgcgggagatgacctcgtttgcgggagaaggatctcgccttcagggaggaaatgctcgaaaggcgggagaagttgttggccgagcatgagcttgaggcggagaatgagtggaggctataggagcgggtctgccagttcgaagcggcgcaggcggcgccgagtccccatgtggcggaggctgccaagaaggccctggaagatctncaggcagaacaccgcgccggggtccaacggatagctgagtgggccggcgaggcgagcacggcgctggtgccattggggataagtcccatcccggtgtcggggccgccagcgtcgatctccgacgcccttccggtgctgg

SEQ ID NO: 41912 - DNA, 471 bp, Zea mays
tgttcgccttcgctgaaccacccactgctgctcgacacaaggtattatgtctagtgggagttgtagatgggtatgcgcgacgaaaggaagcacatagaagcggcggtgtcgacgctcgccatggatttagcagcgagaacagaagcgtaagagagcgtgccatatccattatcggagcgaaagctcaacctactcgaacttggattcacttgaactcaccccatggtcactctatagagggctgcccacggggacatggcaacaatgtctgacgacggttcgggctggtgtttggtcctccacaagcgtgggcttgtgttgtaccgacacacgtagatgcaaactcgactggatcgtgcaagtgcaccggtgaccacgcatccgtggagctcatcgtcgatgtgacgggcgcggacggacgatgacacacgtgctcgataactgcgtgtggacataaaattatatatatat

SEQ ID NO: 41913 - DNA, 452 bp, Zea mays
agcttaagctctaagccctgcaatatgctttgtctattgtcttaatgaagaactaatggtacagtaacctgaacatgatcccaggttcatcccccctcaccgccgatgaatccgcgtcgtgatcgttgtcgccgttacgattcacgctcacaagtgaccggataacgattcggggcaaaagatcttcgcctgtggataactccggtagccggccgccatacccccatgccttatggccagcgcagatcagttcaccagcgttggctgtccgtccatcggctgtcatgtgctaaagcgttagaccacgtcgctgtgaatcacgtctcgcatgcacagtgatcgccggtgtactatcacggtgaaagccactcatcttgagcgctagtaccctttttcccctgcgggccgcacgcgtcttcgtgcaattcatcgaacggcgctcatgaactcta

SEQ ID NO: 41914 - DNA, 449 bp, Zea mays
  unsure (1)..(449): unsure at all n locations
caagcttcgcacctctgaactaactcggctgcgtcactcttcactggtggtctatataatcctgacctgaagaccttcccgactagtgtcttgtatgctgcatgtattccacattgcccagcatggacctcgtccagaagtcgcttcccagtagacgagagaatgcacttcatgaggacgcctgatgcaccccgtctgtataatgtctccccaatgagtgtgtagtgagccgactgtctggcaacacgctcggctgcatttttgtcatctggntcctcttcattctttatatacctgatgattggccttctccagtcatcagagtctgactctggttgattcacaatattacactcttatgcttgatccattgagatgctcgactgtaatatatcttgacaaagattcctgtgggacctgagttcgactggatctancttgacaataca

SEQ ID NO: 41915 - DNA, 425 bp, Zea mays
  unsure (1)..(425): unsure at all n locations
catccaatganagagtggtttgtgaggctgcttatcaaggtgggtttaacattagacttatttgttagcctgcaaactcactggattcgaatgtattggatctatggttctctaattctctccagtcaattcagtaccaagtgggtattccgcaacaaacaagatgaggatggtgtggtgactaggaacaaagcctaactttttgcaaaaggttattcacaagtccaatgtttggattttgatgaaacctatgcacccgtagctaggcttgagtcaattcgtatattacttgcctatgctacttaccatggctttaacttatatcaaatggacgtgaagagtgccttcctcaatggccctatcaaggaagaggtatacattgagcaaccctccatctttaaagatagcgagtactctaaccattg

SEQ ID NO: 41916 - DNA, 360 bp, Zea mays
tgaaacacacttctgagaagttaatggctggaagagccaaaagtttcacagaagatgatcaacgcattgcatggtttaataaccgcatagtggtgccaaagaatgaagagctacgcccgcaaattcatgatgaagcacatcttagccgctactctattcatccccggaagcactaaatatgtaccaagacttgaagcaacattactggtggacaaagatgaacatcgaaattgcacgctatgcggcgagatgtgacacctgcagacgtgtcaaagccatacatttgagagctgccggcccattaccatcactaccaataccgacatggaaatgggaagacataactatggactctattgt

SEQ ID NO: 41917 - DNA, 480 bp, Zea mays
  unsure (1)..(480): unsure at all n locations
acatcggaccttaagtcacctgcagctgcagctatgtagcacgcaagcacttctgcattttccttataaagcaggcctaaccaaatgacctagtgtatggccaagtggtttaaaacaaaaattgtacagacataggaagaaaaagatcaccatattctgcaatgcagcacgggaatgataagtaccattagaatgcatgaagacacagctgttgaaacttcaagaatttattacaacacatgaataattaatttttgtagtagtttagaattctgaatcttctcttaatggttatgttttggattaggatgttattgtctctgatctatgtggctcttagtatctaaactctttctgaatctatgttgtatatcgacatttccatctctctatcaacggaattgagcanggaccaattaataaatctaaaaagacataattncactcagactatanatagtagatactacttcatgatta

SEQ ID NO: 41918 - DNA, 356 bp, Zea mays
tgaaaccggcttttttgctgccgagcactgtacccgacgactcaagcgaaacatgttcgcacagaattcgggcagcctgatgcattcgaaaccaccctcctcaaccatcggcgaagattccaccgctccaaagcaactgaggccccctgagcgggggcaaggcccacaatgccaagcccacgctggagaggcacgatgggcaacactttgatactgcagggctgctgaccgagaaaaactctggacgcttccagatctgcgaccgatcgcgggcacacatgggggccataaacccttggggacaccttgagctaggccttgccctgcgggaccgccggccctgggcttcaccagac

SEQ ID NO: 41919 - DNA, 448 bp, Zea mays
  unsure (1)..(448): unsure at all n locations
agcttccttcgaaggattctctgttaataatatctctctagggcaaaatgaacatgctgatttgttagccaggtctgcagcacaggggctgccgctaccttcggatgtattctttgaaacaataaaggcaccttcggtggagttacttgaaagagcagttcttactatttcccctgtgtacagtgaagattggagaactgaaataatttcttaccttcagggcaacttcctatcagatgacgaagcttataataaaagaatagaggcaagagctcgtccgtatatcattatagaaggggagttatacaagcatggagtttgtgccccgctgctcaagtgcttgtctagagccgaaggtatataattgatgaaggagatacatgcangcctttgtggatcccacatttgaatcaggcctgtacttggaaaagtgttcgtcatgatttat

SEQ ID NO: 41920 - DNA, 298 bp, Zea mays
gcttctgagggcctaaccacggtttgtctctgtgtagtacggctgggaagacagactgggatcgctcctgtgcaactgttgcagagccggtaaggcaattgcgtgtttgcggctgctcctgtgcgctggagggtcgctgggtccggcactatgggctcgtcaccatagtccacagattcgtaccggaaagtctcaccgtgcgtggaggtccgggcaggtgaactttctgcggcggtttggcggccgaagatcttggaatttgttgacgaaatgcatgcttctccgcatgttcgatgtg

SEQ ID NO: 41921 - DNA, 372 bp, Zea mays
  unsure (1)..(372): unsure at all n locations
tgcggcatgcagcttctaagggagaacacgtgatatgtttgtttaacttgcattncgaaaaagatagaccttgtgccgcttgtcaagcatgtaaaccagtgggaggagcgcatcacaacaagaatgtgatgaccacttctaagacccctggagctgctgcatatggacctcttcggacccgtcgcctatctgagcatatgagggagtaagtatggcttacttatcgttgatgacttntcccgcttcacttgggtgttctttttgcaagataagtttgaaacccagggaccctcaagcgcttcctcacgagagctcaaaatgagtttgagctcaaggtgcaaaaaaatacgaacgacaacgggtcccaattca

SEQ ID NO: 41922 - DNA, 489 bp, Zea mays
  unsure (1)..(489): unsure at all n locations
ctgcngcatgcaagcttaatgaattcaccatcgattatgtacacagatcctcaattctatcttatgcgttagcagatttcattgctgattggacgccaggggctcagggagaagaaacaacaaaagatgtcgaagcctggacggtattctgtgatggctcttggggaaccttcgacgtaggagcagatgctgttctagtagcgccctctaaagtcaggacaagttatgtagtaaaattggactttagttgcacaaataacattgctgagtacgaaactcttcttttagggcttcggaagataaaagcaatgggaataagaagggcaatcctcaaaactgattcccaagttatttctggccacgtggacaaaagtagcaaggcaagggatccgaagcttgaataataattggatgcaatccgaaggttggaagcttcttttgagggattctctgtaaaacatatcccaaggcgggaaaatgagcatgtgg

SEQ ID NO: 41923 - DNA, 461 bp, Zea mays
  unsure (1)..(461): unsure at all n locations
ctgcagctgcctagctcttaggaattactcgaaggttgatgcnttaattaatttgngaaaaataccggatctttttgtgccaaatttggtgcaggcttttggattgcaggatttggctttggagagagtattgaagaacgttgcactttgctcaatgccacaacagtgagataaaaatgctttttatttcaaatatgaaagtgcattgatgatgatttgctgggctatgcttaaaattctattgccacactatgttagggcggcatttacattaaaataatgtgccgaatgtgaacctgtcaaaatgagagatatttatgaagtaccactcctgcagatcaacaattcattattgtgatcctgctgacgtatctgtgacacaccaccccacatgttagtgagatggtggcatgccagttntaagaacggcaaattttcaaatgtgttcgagttgaatagaa

SEQ ID NO: 41924 - DNA, 441 bp, Zea mays
  unsure (1)..(441): unsure at all n locations
ctagcctatcatgcatatcaatgtttcattgttgatccctcttatatggccacaaattcaatgcaacatacacaatttcataacacttatatggtatacatgtcggcatttgtgtaagccaacattttgcaccatacaacatacatagcagtaacaggtctaaaggtcgccctataaaactttcttttagaatgtgtggtaccctcttgtctgatataaataatcattaatgtttcaaaaggagtaatccaattcttggactaattgttataattctaccaaattgtcagcanaaaatatgcaggatatacaacaacaacaacaaagctttttgcccaagcacgttgnggtaggctagagatgaaaccncgtatgaaaacctcatagctcaacctccaaagaataaaggggaaacaaaggcaaaggagaaaccgaaacgac

SEQ ID NO: 41925 - DNA, 409 bp, Zea mays
  unsure (1)..(409): unsure at all n locations
acctgcggcatgcaagctttggtcatttattgctaactgtcccgacattattagtgtctctgatcaagggaataagagggagaanaagaagaactataagaaggcaaagggcgaggctcatcttggcaaggagtgggattcggactgctcctcgtccgactccgacaatgagggactcgccgccactgccttcaacaagtcatccctcttccccaacgagcgtcacacttgcctcatggcaagggagaagaaagtaagcactcctaatactagtacttatgcttcttcaagtgaggatgagtctagtgatgatgatgagatagattactcatgcttattcaagggattagatagaactaaggtagacaaaattaatgaatttgataatgccttgaatgatangaatata

SEQ ID NO: 41926 - DNA, 479 bp, Zea mays
  unsure (1)..(479): unsure at all n locations
taccttctcagctctctcggatacactntgcaagaacagcatgtatgtctatggtttgtccagtacagcatcaatgctgcactgtttatcaaacaagatgtaatcaacacttgccccttgatttttgccaaacaaacataactttaaggaggctccaaacaaaaaatgttaggaactgaacctttgatgcatttggaataagctccctcaaccccttcatcctatcttgaattaattgcctgtcccttggtcttggtctctggagctcaacttttctgcatcttcttttgatttcagctgaatttatcctgtgcgtattttcaactaagcattcttcaggtatggtcttgctgatttccacacgtccatcagtcattgcacaacttataaaccccttcattatggatatangcgaaaggtcttgaccacctgcgatatcacaaattggcgactcatcgacccctaatgaatgaatcttt

SEQ ID NO: 41927 - DNA, 173 bp, Zea mays
catgcgaaagcgggacttatcataaggctcaatgaaaatatccactaattgatcttccgacctcactcgttctagaatgatctcttctttaacaacatgatctctaacgaagcgacgacggaaatcaatgtgcttggcgcgaaagagctgcttaagattattacgcaatgggt

SEQ ID NO: 41928 - DNA, 459 bp, Zea mays
  unsure (1)..(459): unsure at all n locations
ttgtgaagattcttcatcccaacatgggctattctgcggngccagagccaacccatgctagtcctagcaattaagcaagtgtcgagctcagctccatcagaatctaccaagcatagctgaccctctaacaactccttaaaagctattgaatcatcacttcttctaaagacagtgacacctatatcagtaaaaagacagttgtagcccatttgacataattgggaaacataaagcaagttgtaatctaaggaatcaacaagataaacctcgcaaatagaatggtcaggagatatagcaattttaccaagtcccttgaccaaaccttgatttccatcccccaatgtgatagctcgctggggatccttgcttttctcatatgaggagaacatccttttctccccggcatgtggttcgtgcacccgtgtcgatatccaactgagcccccgatgcataaactac

SEQ ID NO: 41929 - DNA, 461 bp, Zea mays
  unsure (1)..(461): unsure at all n locations
agcttcngatttccgaagctagaagatgggctcttattattatcaaaggatgaatnggctgacaatctagcatataatagcataaaggtataaaagttattcttgtattttgaaaacgagttgttttatttgcttatgcttaatctcgtcctcctcttgcagagcctaatccttagcaatggccttagagcacagaanaacattgaagatgaagggtatacaatggctctgaacaacctttgttcggaggtgattgaactaaggaacgaatgtcttgagaaagacaagatattaatttcattggtcaacaaaataaaagaagacgaagctagttccaaagctcaagctaaggcccaaaagaatgaaatcgaagaccttcggaaacaattagcagaggccaaagaanaatgtgctgtcgttgaagctaaccgagatgccagcgaatattggaaaaactattt

SEQ ID NO: 41930 - DNA, 428 bp, Zea mays
  unsure (1)..(428): unsure at all n locations
ttgactcaacgatgttctgatgctgaagaaatgtatgcttatattttagccgatctgaatcaagtttctgcattcttggatggcgctcggaccctgaattcttccttgaacgctcaacttgatttagagaagagggcccatgaggtaaatcttcctaactgtttctgatgcttctgtttcgcgcctttaccctcatattcagtgctcttcttgcctatangaggagaggcgaacgcttcttgattctcgtgacaatctggatagattgtaccgcgatgccagcaattcccttactatcttggagaggattcattgttttactatgtcggagcttgaccatcatagggatgagctgagggcctcccagactgaagtgtcacgacttaataagctactgtcttcacaagattctgacatcaaagagtcat

SEQ ID NO: 41931 - DNA, 448 bp, Zea mays
  unsure (1)..(448): unsure at all n locations
agcattaaggtaggactgtggcggngtctttgttttatatctccggcggctccaccgggttcggttgttacgaaccgagctacaagacggcactaccgaggtgggttcagtcgtcagtcaaacacgcgtgcggtgtgggcatagccgaagcggccccacatggtatcgttagtccggaagagcgcaagcgggtccatgcgggtggaaaccattaagtgggccaccggatgtatatgtggcccattacgccaacgcagaggggtgacgctgggcccaccggtgtggaaatcagcccatggngaagcttactatcttcctttctctttatcttntctctttctcttttgaacctcaaatttgaatttgaatcttgttatgagctccacctttgagttaattatacaaatctaaacccaagcgtaggaatcatatatccttatttacttat

SEQ ID NO: 41932 - DNA, 63 bp, Zea mays
  unsure (1)..(63): unsure at all n locations
agctntatgggtatatattcgagctcttcgccatttatcttggcgccgagctcggggccacgt

SEQ ID NO: 41933 - DNA, 277 bp, Zea mays
  unsure (1)..(277): unsure at all n locations
ntggaccaggtagtcgctttagatggcagcgtccccgctgaccaagttttgggctctgttgatggcactgaattggttcctgctggttcgttgcaagctgcttcgggtggcgaccttacgcccgggcatcaattgatctctcatgaattgggagtcccttcgttcttttccaacctccaggtacttgtgatatattttagcttggattttaccccgcatgaactgctatcattacactcatctgttctccttatcaggctttggtggacgggatggt

SEQ ID NO: 41934 - DNA, 432 bp, Zea mays
  unsure (1)..(432): unsure at all n locations
agctnttanagggagaacacatattgcgactaaccaatgttcattttgagaaagatagggtttgtagcgtatgtcaagcagggaagcaagttggtacccatcatccacacaagaacatcatgacgactgacatgccgcttgagctactccacatggatttattcggcctgatcgcttacataagcatcggcgggagtaagtattatcttgtaattgtagatgattattctcgcttcacttgggtgttctctttgcaggaaaaatctcaaacccaagagaccttaaaggggttcttgagacgagctcaaaacgagttcggattaaggatcaagaagataagaagcgacaacaagacggagttcaagaacgctcaaatagaaggctttcttgatgatgagggcataagcatgacttctcttctcctacacacct

SEQ ID NO: 41935 - DNA, 465 bp, Zea mays
tactagagctctctatgggcttaagcaagcctcacgcgcttgttattattagcttacggatatcttgctctccaaagacttcaaaattgggaaggttgacactaccctattcactaaaagaattggcaaagacttatttgtgtgtcaaatctacgttgatgatattattcttggatctactaatgaattattttgtgaggagttctgacaaatgatgtccaaagaatctgaaatgtctatgataggagaattgagcttctttcttggccttcaaatcaaacaattgaaagatggaattcttataagtcaatcaaaatatatgaaggacatgctcaagaagtttggtataaaaaatgctaaacctatcaagactccaatggcaacaaatggtcatctaaacttatatgaaggatgtactatggttgatcaaaaacttatcgttcaatattcggtagatactttata

SEQ ID NO: 41936 - DNA, 253 bp, Zea mays
acaccgagaggaacgcggaagcaaccgagcgccggggtgcgtttataagcgcggacgacgccggggcgccgactcaaccgtttggcgcgacgcgggcacacggggcgcgcccgcgggcgtgctctggcgagctcaaagcgcgtcgaacaccgggcgcgtggcttctgcccgcgttcttcgatctgctgagcggccagtcggacgaatcttcgcctaccgcctgtgggagatatcttcctgcacctacggctac

SEQ ID NO: 41937 - DNA, 316 bp, Zea mays
  unsure (1)..(316): unsure at all n locations
cgagctgcactgaagnctcaccaagggtattggagttaccgccagctagcgaatagagcacgcatccaatgcccccttgcaaacataaaaagggcgctatacacctaagtaggaacacacttctcaaagaacgaccatcacattcgaaatagacacgtataccgccatggtgaataattgactaacaaataacaaattattcccagggactcaacaaaaccactaaaatcgaggctcattgagatgcattctactaatctttacctgccttgatccataccaaataatgaactgggatccattctgacgagaagga

SEQ ID NO: 41938 - DNA, 483 bp, Zea mays
  unsure (1)..(483): unsure at all n locations
tactcaagctcgacatgaggagatggcgctcgtcatcaagagcttccgccttattctcttctaaggaggggaaaagactacaagtcccgctccaagaagggttgctacaaatgtggtaagccccgtcattttattgctaaatgtcctatgtctaatgacagtgaccgacgcgacgacaagaaggtgagaagaaaggagaagaagaagtactacagggaagaacggcggcgatgcccatgtttgtcgcgagtgggactccgacgagagctcaagcgactcctccgacgacgaggacgccgccaacatcgccgtcaccaagggacttctcttccccaacgtcggccacaagtgcctcatggcaaaggacggcaaaaagaagaaggtaaattcaactcctccactanatatgaatcgtctagtgatgataatgctagtgatgatgaggataatttgcgtattctcttttgcaatcttaacatggag

SEQ ID NO: 41939 - DNA, 411 bp, Zea mays
  unsure (1)..(411): unsure at all n locations
ttaagcgacgcagctgcactgcacaataaaagataaatctctactttttgaacagangagcatctttactgatctccaacacaaaccacacagcntttccgataaagaggagaggagaataatgggtctcccaactatataactaactttattgacctagtatgtaaaccaaaatgcaggggatacccacactctggtgacaatcattacaaagatccacaccaaacatatttcatcatgacaagcataaatgcacaggatatatctaactaccctgtctaactaaaactaactaagaccgagactaacgctaagactgaagcttctatgtatatatttatttcgtattaattacaagatccacctctaacgatctatggttctagatttatcttggtcttgcacgcggga

SEQ ID NO: 41940 - DNA, 232 bp, Zea mays
ccaaaactgaaacgtcccatcacaccgttcaataaaaggtcagaatatattacctggtagaacaaagcccttggaataattaatagatttacaaaagatgtaccaaatctcctgagatatatctagtctactcctatcaaacctcggtagggttcggcatctgcggcatatccttttacatcaacttcaacttcgcatcctactgaatcaagtatcccgagtaaaaacaagc

SEQ ID NO: 41941 - DNA, 324 bp, Zea mays
accacccagctttgttgctcctcaatgatcatctacaagtatcttccttgtgctttaattgttagttgcaattgtatttgaacctatataacgttatgtattcagaccagcacaagaaagttggcaaggaaaatttagattgatcttgaagctaaaaaggtctccaatactactatccataatacaaaacataaaaactgcccacaatatgattattgacagctaagctttactacaaccatacccttaggtgtaacttgacagttaataagtggatattaataaatgggcccaaaatatcaacttgtataagtagccccctca

SEQ ID NO: 41942 - DNA, 324 bp, Zea mays
ctaaaataacttaatagagttgcggccagtcacaccttaaacgctatgaatcatcctcgttttagacaacacatcttgtttgtaataagcaattgaacccatattaataactaactaatgcaacaagtaatatcacacgatttactaaaacacattaatatggatgttcggaaaaaaaatatttttctaatcctttaccttgcttgatcccgcacccaatatacggaacttggaactttgtcctgtgtagaagcgaactctatctccccataggggttggcatccgtgcatatcacctgacccggatctaaacctcacgaaata

SEQ ID NO: 41943 - DNA, 486 bp, Zea mays
  unsure (1)..(486): unsure at all n locations
cgcgatccttagagtcacctgangcatcagcatgaagaatcttcctcagttttaatttatatgaggcaaaggccatggctcgagcttattaaggactatgaactataaattcattatcatccatgctaagccaatgttgtggcagatgcactgtaccgtaacgcttcctgccactgtcttatggtgaagacctctgacaacactttatgtcaacatatggaaaaccctaacctgcggatggtcccactaggaaccctgaatcaactaaagctagagtctatcatcttgcaaagaataattgatgctcaaaaggataatgtgggtatgaagcacatacgggaaaagataacggctggaacacccatatgtttcaaataataccatcaaggtgtggtatggttcattaaccgcatcatactgccgaagaacgaataacttcgtctgctaactctagatgaagcgcatcttaatcgctattctattcat

SEQ ID NO: 41944 - DNA, 334 bp, Zea mays
caagatggacccatcttcacacaagaacatcataacgaccgacaggccactggagctcctacacatggatctattcggcccgattgcttacataagcatcggcgggagtaagcactggctagttattcgggaagattattctccctccactcgggtattccttttacaggaaaaatctcaaacccaggagaccttataaggattcttgagacgggctcacaatgagtcccgcttaacgatccagaaaataagaagcgaccacgggacagaagtcaagaactctcacaatgaaggctctcttgaggaggagggcatcaagcatgagttctcttct

SEQ ID NO: 41945 - DNA, 398 bp, Zea mays
  unsure (1)..(398): unsure at all n locations
gcttaagtcgaatgaggcatcaagctatggaggggccttttgtttttaagtgtttttctatagagggagggcagcgggtcaggtaaagtgcgggtaacttatttactcgcccgtcaatatatccgcgcctctagtgcttacccgtacccgcgagagcttgcgggtaatattttcgacccgtacccgtacccgcagaatatccacggatatcgggcaacccgttacccgccagaaaataccatacgagtatgtggtcatgttcatttcaccaagaacatcaacaacttgacagacataatataatggcaaggaacatatttcaaactttaaagtccacaaacaagatcgatcatctacaaacatatagtctanacataagtccacaaacatgattgact

SEQ ID NO: 41946 - DNA, 209 bp, Zea mays
catgccaagcaggaaagcaaggtgacgccccacatccacacaagaacatggtgacgaccgacagggtgcttgagctacttcacatggagcaatacggcccggatgcttacaaaagcatcagcgggagcaagtattgtctcgcaacacgggatgactatactcgcttcacctgggaattctgtgtgaggataaatctcaaacccaagaaa

SEQ ID NO: 41947 - DNA, 429 bp, Zea mays
  unsure (1)..(429): unsure at all n locations
atcttagagtcacctgcngcatgcaagctttgtgtggagttgggagaagatttgatcncttctgtgtgtcctgtattgaacgctatagctcttgtaccgtgtagaaatgtaaaactcggatgccattgaatgtgcggtggntnntccatcacccctcccactcaccactcctattcatcttcgtaccacactcctcctctctctacatctctctcttatccccctccatacacctctaatctctctcaactttatctctacacctactcctaactctctctactcctcccctatctctaccctctccctcacccacccttacttccccaccaccattccctntcctccctatccctcttcatctctctcttctcatcctctttacctctccacctctcctccttccccttccccccccattctcctccc

SEQ ID NO: 41948 - DNA, 400 bp, Zea mays
  unsure (1)..(400): unsure at all n locations
agcttcggcatcatntattctttnttcatcctgagtggagtgcatgttaaagtcagtcatcaataagactggatgcgctntatatatnatatgctatttcgtagcaattactaacatttaaaacccataaataacctctcggtttactgttagtgtgacaaaccattggtggctcatncaattcagcaacctcanacaccatngagttcattgtgccaatgtgctcttanaaacgacctaatgcttgcaagagccaggaacgttgtgccatgcctaagctctagcctcggtccttaatgctggaccggnccgacataattatatttttattntacanaaaacgtatatacatatatataanttatattcagtattaaaaaatattgggaccatgcttcgt

SEQ ID NO: 41949 - DNA, 244 bp, Zea mays
  unsure (1)..(244): unsure at all n locations
attcttatcttaaaagtcttggcgttcccatgtagcctcatcttccgaatgctggttccactggatcttgtagaatttgaaaatctttcttcgggtgaccctgtccttntgatccagaactcgaataggatggtccgagtattgtaaatctgggtccaggaccacatcantcactttaatggttcgatcaggaacccgaagacacttccttcattgtgacacgtgggacacaatattgcacaac

SEQ ID NO: 41950 - DNA, 436 bp, Zea mays
  unsure (1)..(436): unsure at all n locations
tggtcattttgagaaagacagggatttggagcgcatgccaagcagggaagcaagttggtgttcatcatccacacaagaacattatgacgactcacaggccactggagctactccatatggatttattcggcccgatagcttacataagcatcggcgggagtaagtactgtctaagtattgcggatgattattctcgcttcacttgggtattctttttgcaggaaaaaattgaaacccaagagactttgaaaggattcttgagacgggctcaatatgagtttggcttgaggatcaagaaaataagaagcaacaacgggacggagttcaagaaactctcatatgaacgcttncttgatgaggagggcatcaaacatgagttctcttctccctacatgccacaacaaaatggtgtagtggagaggaagaatagaactct

SEQ ID NO: 41951 - DNA, 478 bp, Zea mays
  unsure (1)..(478): unsure at all n locations
tcttaagtcacctgcggcatgcagcttncanaacacagtgcacaagagctaaaaattgagtgagcgtgagtggttggccagaaagcgtgcaaaatgagtttgcggtatggccgtatatatacgctcggtgcgttgaaaattgaaagaccccacttgtcattgaatgttgctattctagcaaagggaaggtgttttttcggaccttcggcgtaaaagccttcgtccatatcgcaatctaaatttattatttcaaacaaattaatattgcgaggggctactgttggggatcttcggagtccgaaggtcctcaaaaacaaggatttaacagtatttctgtagtgcaatgtgtgaacaggtaccctcggactaaagtcggcattgcagtagactggaataatacgaagcttgctacagagccgaaggtgttgagcacgaaagcttcggcgtaacagcaaagagtggaaccgacttaaagatg

SEQ ID NO: 41952 - DNA, 461 bp, Zea mays
  unsure (1)..(461): unsure at all n locations
tgcagcaagatctagaagataagaagcacgaagctatatttgattatttagagagcaagataaaagaacaatcagctattattgaaaagaaagacttcgaacttcaatcaaccgaaggcttgctggcagagactgaagccaaagtagcagaattgaattcgaagcttctctgccaatcaaaacaatctgaacaagagaagctagaactcgattcgaaacttgaagccgaagtccaagccaactcaaatttgaagaagtcattaacaagccttcaagacaaatgtttgaattntagcaacaattgtatccaacaactaaagaagatcttttactcagttggggccagcagcgggaaatttaccccttcggatgaagatttaccaaaagccttcgatcatatcgaagctgacattgaagaacttgacgaagttatagctgggcacggtgacttctgtgcctgg

SEQ ID NO: 41953 - DNA, 399 bp, Zea mays
agcttgccaatacttgtctaagcaactgtacatgccagcacagcaactacagaccataccagtaacctggcctttcgcatgctggggactggatatgatcggacctttcaagaaagctcaagggggatatactcatgtattggtggcgattgacaaattcactaaatggatagaattcaagcccattgcttctttaacctctgctaaagccgtggaattcatacaagacataatattcaaattctggatacccaacagtatcatcactgacttagaatccaactttaccagttcagaattcttcgacttctgcgagcaaaagagcattcagatcaagtatgcatctgtagcacatccaagagcccacgggcaggttgagcgagccaacggaatgatatt

SEQ ID NO: 41954 - DNA, 457 bp, Zea mays
  unsure (1)..(457): unsure at all n locations
ctgcgacgggtcctggggaaccttctgtgtttgtgcagctgctantctagntgcaccttccagagtcagaacatgctatgcagcgaaacttgatttcagctgcacaaataatattgctgaatacgaagctttgcttttggggcttcggatgttaaaggcaatgggaataagaagggcggtttctataaccgattcccaagttatttctggtcatattgacaagagttgtaaagcaagagacccgaagcatgagaaatacttggatacagttcgaaggcttgaagcttcattcgaagggttctctgtcaagaatattccacgaggaganaatgagcacgctgatctgctagccaagtcagcggcacaggggctgcctctaccttcngaagtattctttgagacctcgctaccatatatcttantaatatcttgtgataactgttcaattatattcata

SEQ ID NO: 41955 - DNA, 455 bp, Zea mays
  unsure (1)..(455): unsure at all n locations
ttataacattaacatcttattattgtgaagcctatagcactctcatcacagggatattgcgcagatgctgagagatgcacacagcccatctacccacacagcccggcgtcgatttcaggaaacccggcatgtcttaatcattgcaagaatagccagcgatgaacgcaaattaagatcgatgctcgggatccacatgactcaagaaaccaccggcgccggaaggctcgtcgactcgtcgtcacaacatatatatacgactgaaacaaaaagctccagttaaatgatcatactccataactcagttcggttcgaactacctcacgactggctcggctcgactcggctcgtgagctggctcgtggcttcacccaacaataatttgntacatataatcctacttaacatataatactagtactgaatagacaactaacttatgtcatttgatattacta

SEQ ID NO: 41956 - DNA, 355 bp, Zea mays
  unsure (1)..(355): unsure at all n locations
accaaaaaccagctctagggaagccattggaccaaccatgtcgtatataagacaggtcgtaccgcagtcagcataaaagcaagttggctgctcatcatccacacaagaacataatgacatcgaacaggccactggagttactccacatggaactattcggcccgatagcttacataagcatcggtgggagaagnactgcctacgaatcggggatgattattctcgcttcacttaggcattcttattgcaggaaaaatctcagacccaagagaccttcaagggattcttgagacgagctccgaacgagttcggatcgagaatcacaaagataagaagcgacaaccggacgaagttc

SEQ ID NO: 41957 - DNA, 436 bp, Zea mays
  unsure (1)..(436): unsure at all n locations
agcttancanatgtgagttctagatcagtgaagttctgttctcgngtcatatcataaaccgagatggattatctatggatactaagaaggtagcaactattctggactggaagcaccaaaagatatcctaggaatcaagagtttcattggaatggccggatactatcggcgtttcattgaaggtttctccaagattgccaggcccatggcagtcttgctggcaaagaaagttgaattcaagtggaccccagagtgccaagagtaccttgaaacataaacaagaagttgacaacaacacctgtgttgattctgccatatgttcataagccattctcagtgtattgtgatgcttcgtacactaatctgggatgtgtattaatgcaagatggaagagtagtgacgtactctttccgacagttgaagattcatgaaaaga

SEQ ID NO: 41958 - DNA, 267 bp, Zea mays
aacaccaagacgaccgagaggacacttgagcttctccacatggatctatttggttcgattgcttacataagcatctacaggagtaagtattgtcttgtaattgtggatgactattctcgcttcacttgggtgttctttttgcagggaaaataacaaacccaagagaccttaaagaaattcttgagaccggctcaaaatgagtttggattgagaatccatacgattagaagctgataatggaacggagttcacgaactctcaaattga

SEQ ID NO: 41959 - DNA, 463 bp, Zea mays
  unsure (1)..(463): unsure at all n locations
agcttctatagggagagcacactttatgaccaacttatgtttattctgagaaagacaggattagtagcgcatgccaagccgggaagcaagttggcacccatcattcacacaagaacattatgacgaccgacaggccgcttgagctactccacatggatctattcggcccgatagcttacataagcatcgcggggagtaagtattgtctcgtaatagtggatgattattctcgctttacttgcgtattctttttacaggaaacatctcaaacccaagagaccttatagggattcttgagacgggctcaaaatgagttcaccttaacgatcaagaaaataagaagcgacaacgggacggatgtcaagaactctcaaatcgaggggttcttgaggaggagggcatcangcatgagttctcttctccctacacccctaacanaatggtgtagtgagacgaagaatcg

SEQ ID NO: 41960 - DNA, 285 bp, Zea mays
ttagagaaagatcttagagcaccctgccaagaatggctggatataattgcaacaacgagtaatgaaatgcttggagactactacagaaaacaggaccagctgatgacagcagacttctgcactccgacgaaacgaaggctgaacagggagcctgaagctatacgacaagaataagccgattatggacgactgggcagagatgctggaggcctcaaccggaaaacaaacgacaggctactgacaagacgtcgccaacgtacctcaaaagaagaagatagactctga

SEQ ID NO: 41961 - DNA, 453 bp, Zea mays
  unsure (1)..(453): unsure at all n locations
agcttcagcatggctctgcggctcttcttctctcttctgctntcgcttgacttgccgctggcatccccttcttgtcctgaagatgaaaatgacaccaatacttgtcagatacaggtctgcaattgtttcacacaccagagataaaaacagacagcaaattcaaagggtgcaggttaacaggaaaactaatggcatagcatttgtttgcccacacaggcttctgcactgatcacaaacaaatgagactgcctaactaagcaattcagtttactgtttatagctggggtgtgtgttttccaaggatgtggttgatatgtagctgatatagataaaacaatatagacagtgcaatagggcagttatgttaaccagtagcagcanaaacatcaaccacctacaagcattgacagctatgcataacgtcaacttaaaaaatcactctggatcttatac

SEQ ID NO: 41962 - DNA, 383 bp, Zea mays
  unsure (1)..(383): unsure at all n locations
ntgtcccgcggcggcacagatggctggctcgccttatgtctttggtctcagactctctgtccagccagccagcagcccagcacccagcagagagtatcacgaggcatagcatgaggttggctccgcttgcgcgtgtcttgctgcacgagcaggggatcgatggacgcttttggggcctgacgcggcaaaaggtttctggaatctggccaagtcaaatcactgagcagtacagtggtagcagtaaaatcctgagcaaatcaccatcgtccgtcagccggtggtcaagttcacccaccggtacaaaagaagcatgcggatctgaaagccgcgcctagggattgtggaccatcggctccctccttcgctccctttgtaaccgtctc

SEQ ID NO: 41963 - DNA, 322 bp, Zea mays
  unsure (1)..(322): unsure at all n locations
agcttagcaaaagaaatttctagaatcaagaatattgtgctcatgcctaagtctggtagaagattgttcatcaagtggctcggtaaagatatcggctaattgatctttactattaatgtaagaaatctcgatatcccccttttgttggtgatccctaagaaaatgataccgaatggctatgtgcttagtgcggctatgctcgacgggattgtcggccattttgattgcactctcattatcacctaccacangaacttcgctaatttgtacccgtatcccgcaaggtttgcctcatcaaagcaattgcgcgcacaatgtctgc

SEQ ID NO: 41964 - DNA, 365 bp, Zea mays
  unsure (1)..(365): unsure at all n locations
aataanaaactaagctcngagacttcgtgagcatacgctcgaaaactatgttcttcttctacatataaattggcaacgacagcgaaggtctagtcgaacacacaaagatcaacacgtgccaatagaactccactactgccattatacatgaccacagaagttctataataagcaataacaacacatgagttcttatgagcccatatggcataagacacctcgggtatgaatatagcgcccatttattgcctggctaccacatgatgaaactaaccggcaacctctaatacaccctttggcacaatagacgacagtatgaagtttgagcaaaacgaaataattaaaagtaactgtcatggccacca

SEQ ID NO: 41965 - DNA, 445 bp, Zea mays
  unsure (1)..(445): unsure at all n locations
agcttacaaccctggttatatggaattgtnttgcgcatgacgtctgcttttggaaacatcttcagtgctaatttgagacaagctcctgcaaggcaagctgcactgggcacagggatactaaacactgttgtttgtgctttctatgattgaggaatacttgaagaagagtacttgtggtctttatcttgtgctgagatgcatgttctttacctaccgaacatcangtatgcaaattcatcatcatttactcgttgctaggtatattatgatgtaactcaccaaatatcatttgtacatgtatattagacccctccagctaccttgctgacgcgtgaacgagaagacgggttaaactttgtcgaaaccctcttcgctagtggaggtatcgaccatcactcgtcactgtaccccgatggtgatcgacgatcatgagctctcatattat

SEQ ID NO: 41966 - DNA, 350 bp, Zea mays
  unsure (1)..(350): unsure at all n locations
gcaaaggtatggaacaacactgcttcaattggtagttgatcaatagtagttccttccaagtggcattctttcaattggtaataatatattatatggaaaggaatgtcaatataaaggttaaactccttttggcttaaatttgtaaattagtgcatattgtgaattcactgctccatgtgcattaacttaaaaggaatntaacttatgcctttacgcctcataaatgatgatttgtttgccattcatatatatatatatatatatcatcatcattcattaaatacttccttgtactactaatacctctcttcagagtgttttatcgactagttttaacaggaaaagagata

SEQ ID NO: 41967 - DNA, 164 bp, Zea mays
tacagaaaccgcggctcaaaaagtgcggtgatctctttcaaacagcgcacaacaaaccgagagacttaaacaaacacgtgacgcacaactctagcaaatgtgattcttctcaaacgcaggaaagatgaacattccctaccttaacattggacaacttaggggaa

SEQ ID NO: 41968 - DNA, 116 bp, Zea mays
acgttaagcatggaagcaagttggtgttcattatccacacaatatcgtcatgacgaccgacaggccgcttgagctactccacatggattctattcggcccgatcgcttacataagc

SEQ ID NO: 41969 - DNA, 225 bp, Zea mays
taaaaccaagacggccaaaacaacctcgactaaaatgccctacagaaccccataaccctacaaaatttcttcatccccaaaaacggccctcttaataacagaggaggcctggacaaagacaccacgttaaaagaagatcctactttatagtgcccaccacggaccaccaaccgaaggcaaaaacaccaaagatgaaaggctaggcgtaccggaaaagcaactcca

SEQ ID NO: 41970 - DNA, 272 bp, Zea mays
catggattcatgcttggcggtggtttatgaaaatgacttacaaggctgatccatgggaaaaatattactaagaataaatgtcacgcctgccaaaaaagggaatttaagtataaaacattattcaaacataagaaattgcatgccaaacctctctctaaataacactaccttcattcaaaaatataatttcaagaatctcggcgatacttatttactactacgcattgtgtaagggtagcaagtgaccttggtgagagatgtattaatgtgtt

SEQ ID NO: 41971 - DNA, 401 bp, Zea mays
  unsure (1)..(401): unsure at all n locations
ttaagcttctttcggtggtgatgccaatgcggagaagattatggaccaaagcaatgaatactatatcatacaccacacaccaccaatttacaatgttatatctacaaatcggtccttaagtggatttggttatttggtccaaaaataggaagtaagtgaattatggagttaaggggaggcttaagtccataatttcacattgtggggacaatcatgcatcttagcaagtagattggcatatttcattcaaatacttgtatcatttgcttgctttggttgtgttgtcatcaatcaccaaaaaggcggagattgtaatgaaaaatggaccccggtccatatggctaattgagtttggtgtnttatgaacaacacaatccgcgaactacataagtttctagtgt

SEQ ID NO: 41972 - DNA, 163 bp, Zea mays
ctgcaagctaatgccctaaagagtgctaattttgtattggaaagacttctatggctcacgattgtgagggctatattttatattctggtgactatcctgagtacacaattatgaaaaatcatgcttgaaaacctcacactggttcccatcatacttttatgga

SEQ ID NO: 41973 - DNA, 379 bp, Zea mays
agcttatgaagattcttcatcccaacatgggctaatcggcggtgcctataccaacccatgttaggcttagcaattaaacatgtgtcgagctcagctctatcaaaatctactaagtatagctgaccctctaacacacccttaaatgctattgaatcatcacttcttctaaagacagtgacacctatatcagtaaaaagacagttgtagcccatttgacataattgggaacagaaagcacggtgtaatctaatgaatcaacaagaaaaacattggaaatggaatggtcaggtgaaatagcaattttacccaaacctttgaccaacccttgatttcatccccaaatgtgatagctcgttggggatctttgtttttctcatat

SEQ ID NO: 41974 - DNA, 328 bp, Zea mays
attgcattatcatcaatgcctcatctttagtgattgaatctaagtctagctccttaaatgataatttttgcaaacattgtgccacatatcatgcttcttgttgtctaactaaccatgccaggaagaatagcccacacgtgaatgtcacaggaattgtgacaagatgctctagcaatgatgggttaaagaaagttgaacccatgtacaagtccctatagcccaacaatggaagaaaggtggcttgggttcaactcattcaatgaaaaccctatcacagtgcataatgggtggagatccctcaacgtcatatacggaaccaccctatatg

SEQ ID NO: 41975 - DNA, 350 bp, Zea mays
  unsure (1)..(350): unsure at all n locations
ctgcagatgcagcttttcactcgctatgtggcgggtctctatctatgntagacaagccctagatgcaatacaagatatttaaacatgcaatgcaagcttgacaacaccatttgacatcttacataaaatttctgagatcaagaatatttagttcattcctcaacatgcaaaagcgggtcttatcaagaggcttaatgaanatgtctgctaattgatcttccgatctcactccttctaaaatgatatctcctttaacaacatgatatctaacgaagtgatgacggatatcaatgtgcttggtgcgagagtgnttgacatgattattagcaattttaacagcactcttatta

SEQ ID NO: 41976 - DNA, 274 bp, Zea mays
ctctttcagctaggtccaaaaaatttctccgttggcctggaagctttggtcatcaaagcctttgttctccaagaactgtattctaagtccgtgggtaagatggcctccacccccatagactagaaagaacaggagaaacccgggcccggctatcatcatcctcggcttcaaccatcaaggtagtctttatccccgcttgcgaattatagagtcgtgagaatctcgctttattcctgaaatataccgtgggcctccactgccattgcattgggac

SEQ ID NO: 41977 - DNA, 384 bp, Zea mays
  unsure (1)..(384): unsure at all n locations
gctttaaaaatgtttattacacataaaactatttctctgtaaggactttctctgcaacttcattcagcaanttgttgacgacttcatcgaccatggattcagccatgtttatgatgtccaacgcttccttcatttctggatcagctaggggatcaaacggttccggcggcggagataattcagctgaagtaggaaaaattaattagtctgaagccacaaaaacaaatgccanagctaanaacacaaaaaataatacctatatgcttttcgcgctctgcagcttcttcagctcgtcttgcttctactcgggcgtcaagggtgtctttttcacttttctttataatttcatgggccatctctcggccaccattcacccagacatca

SEQ ID NO: 41978 - DNA, 266 bp, Zea mays
  unsure (1)..(266): unsure at all n locations
ccttgatctgaaaggatcttcatgcatagatatgctggatgaagaattgcttccaaagcattgagtggtccacgaccaatgattgcattgtangggtactccatgtcgacaatatcaaacacaacttgctcagttcttatattgttgacaaatctgaaggtcactggcatcgtgatcttgccaagcgctaaaatctgccttcctccgaaagccataagagggtgtgtagcatcatgaatcttattttctaactctcgcatctgtct

SEQ ID NO: 41979 - DNA, 369 bp, Zea mays
  unsure (1)..(369): unsure at all n locations
agcttcgaaatcaaaaagaccagcaagtctcaatgagcaagagcntaaaaattttagtgggccgaagcaaaaggcaagcgtgtgtaccaaatgaattcacgatgtgttcctatttatacgcctagggcgttgaaagttaaaaggccccgcttgtcagtgaatgttgctattctagcaaagggaaggtgttttttcggaccttcggctcaaggccttcgtccatatcgcaatctgaatttattatttcaaacaaattaatattgcgaggggctactgttgggggccttcggcttccgaaggtcctcaaaaacatgatttaacaatgtttctggagtataatgtgtgaacaggtatcttcngacttgaatc

SEQ ID NO: 41980 - DNA, 457 bp, Zea mays
  unsure (1)..(457): unsure at all n locations
acctatctatgagtataacctgactaanatatgataactaatcaagatataccttggattgaaatagaatttggtatttatttataatattcttctcacatgagttatattaattaatacgggatgtacttttactattaaatcacctacatcttctgaataccaatcttttcaaccgtaactccgaatttagtggttctcgagcccaccatctcgctacgacacatagaatattcttacgttgttgttctcatgnttggtgtaatgttaatcttgcatataccatgtttgtttgtattgctacgcttancagtgacgtcacgagttctcttgaaacacgttgtacctagaatctaagttcacgccagtgtgccttgacactcttttacctataatgttcctgtaatactatacacgctccgtatttatggactatacgttcctacaatgcctcccc

SEQ ID NO: 41981 - DNA, 419 bp, Zea mays
tcttgggtcatagtgaaggtgggcctccatgaccacaacatgtcatcgatggcttctcaatccctggaagaacaatgggaaccatgttagaatgcatggaagagaatggtatacgaatctgtgagacctaaaattgtgttatcccagtattggtcctgatttcaaaattattttgtttcaacatgaaaaaagaactggcgaagggacagagacaacagactaacttaccatatttcgtgtggttggcaacaagatcatacttgatagcgaacatatccacaaagacgatagtcgaactttttagtgtcaaacgcagctcgtccaaggcttcactcaacaaggaattgaactttttgcgacattattaatgcttgcgatgcatccatgctcatcgaggtcgctgtcgtcatccctcggat

SEQ ID NO: 41982 - DNA, 328 bp, Zea mays
  unsure (1)..(328): unsure at all n locations
actaagctatgatgataaagccatctttctattgtcgagctcgtatgcgtctatggggagcctactagacgtacactcttctttcttctcctcccgagcatagaatgcgaccggatgcacctccggtgtggacgtggagcctctcttaaatgatatttcntggagcactttgatcatttaattcaaagctcacaaacttttctatcactatctcggtagacattaatttatatctcgcatcaccatgaattaattgaactcgagtatggctaatataaaccactgatctaagaataaccttgaccatttcatggtcataccatttggt

SEQ ID NO: 41983 - DNA, 169 bp, Zea mays
taacaacaccccgcggtcatagcagaatccaggaatctttagatccaaaccgccgaggagacagaatgccccacactacacacaaaatggaggaagaaggatagaatgcaacgaggagtacctgaacaaccaaagtccacaaaaaatcagtcactacacaccagcaacc

SEQ ID NO: 41984 - DNA, 450 bp, Zea mays
  unsure (1)..(450): unsure at all n locations
gctgcagctatgataatcttccgcataacgcgaaactgacaccaggggtgtcacagccttccccccttaaaagaatctcgtcccgagatttgaatgatgatctttaagggtggagaagcatgtaactcccaagctgaagatagatgcaaattcatgagatgtcatctgacaagatactgaagatagatntggacgtaatatcctgacatattgagacaaaatgccacgaccactttgagagaatgtccacaaaagatagcacatcagtatagtctcgtaatggatcactactattaaccgcgataccagcgcgtgccgagcagctcaaccatgtgtgcaccatagtaggctctcgggttcgtcgcggcaccatcggtcgttagtcataataccattaccaaacgcaaccatgataaatcacgtgatataatagatggacccatggagtat

SEQ ID NO: 41985 - DNA, 356 bp, Zea mays
catgcaagcttgcgcgcgagtgcacgtcacattcatgttcattgttgtgggttgtttgtgccatggctgccttctgactgtgcctggtgtacgggtctgcgttcgtccaacaaagtagtgaagtacacccacacgctgacggtgagtagatagatttcttgtgttgcgccgcggtccacctgcaccaaatgcgtaccccaaacaataaattcattgaaaagagaaaacatatgtggattgagatccaaaaataggagcatacactccctctaggtaacatcacatcatgtcaatctctaacaccaaggtctagtcgtgtatacacatattttccacaagtgaaactgaacactgca

SEQ ID NO: 41986 - DNA, 305 bp, Zea mays
  unsure (1)..(305): unsure at all n locations
ttgggcctaaaccacgcttccggcccatactgtttatctgcgcggcccacggctgatgttggcgccgacgtgtggtcccgcttcgtcagtcgcacgcgctgccctcttctgtacgctgacgggtggaaccatctggtcggcgtcttcctgcgcacgatgtgcatggcgatgacatatggngcccagttgtcaggtatccccttcacccgggtttgtccgcactgcaacagattcctccgtcccggtcgcgaccgatatgtgctcgcgcctcgaccataagacccacggaacccacgctctattat

SEQ ID NO: 41987 - DNA, 385 bp, Zea mays
  unsure (1)..(385): unsure at all n locations
tcttaagcacctgggctgcagctgtgcaaagcactcgagctactttctttaaacccgacctcactgcaacatgacaccagagggtcaaactcaacgggcaatggatgaattcagaatcattgcagagcatattggtaccagggatctggttcaagaattcttagcattcagagtcttccctactctgaanaaatgggaaatgccaaagctaaagggggagaagaaggaaggggatcttgtccggcttccttaccacttcaaattcaagaaatattntaagaagccctgccaagagtggctggatacagtcgaggtgatgtgtaatgaaattctcggaaactattctaaaaaagaagatcaactgatgacagcagccttctgcacc

SEQ ID NO: 41988 - DNA, 309 bp, Zea mays
actcaactagacacagcgctctcttgatacacttgagcatatctctcctatatgctgtgacttatgtcgcttcaacgttatttcaaaccaagtcatatgtatattgaaacggaattggagtcttctgcgaacacaaatgcttacactccgtaactcatacttcgccaccactccaagcaactctctcttcttcaggggagagatgaacatcaccgaacaggacttcatccttggtggacagagtaaaagctcacacgcactacgacttcgtctttggtataatcataactcacttatttatgaccaaac

SEQ ID NO: 41989 - DNA, 407 bp, Zea mays
gatggtccttaaacccttttgaaatccttaagggaaatgcttaagttgtttataacatgctctcatcagtgcataaactgtcatgagcgtcacacttatactatgacacaatgcacttcacattctgtatgatatagctatgttctcattaacctaattatgtgcaattggctttcaacgccaaatatgtattactgcgacggaggcgacggcgactgcagcagtgatggcggtggaggcaatggcgacggcggcggcaagggtggcaacggcgacggcgaatactgcagcatgggtggcagcatgggcagcagcaatggcaacaacaaggccaggctaaatgccacctgttttaattattaatataaaatagtagtagtataatgacataatgtagtagtagttag

SEQ ID NO: 41990 - DNA, 293 bp, Zea mays
  unsure (1)..(293): unsure at all n locations
tcaagctctccgaacactctctctgcttcacactgtcatcaaactgtaagtctntctacctcttctagacacatcagctttactatcgttcacatataggacctcacaacgctacacccacttataatttggcatggaaggattagcacacaatgctttcgagttaccttgaactgtctttaagcttgaattccagtaactcaacacacaacctttctattatatgaacagcttcctgtcgcatctagccattacaagctgttgtcactagcaacaagctgccactgacttgc

SEQ ID NO: 41991 - DNA, 422 bp, Zea mays
  unsure (1)..(422): unsure at all n locations
agcttcgacatactttgttgcttcttcaccctgatcccctggcgttcaatcaacaatgaagtctgctaacgcttgngattgaattgaagatttatgtacgtaaccaatggtgaattcattaagttccgcaacccatttttcgatccttcctgtcgcatctctgttcctcattatgtccttcaagggttgtgatgaaggcactattgtatgatatgcttgaaagaaatgttcaaagcttcctggaggccatcaatacagcatacagtaccttcttcaattatgtgtaatttttctttgatacgctcactacttcggagatgaagataccggcgattgctttttacttggccatcttgcttctcttgacgaatgccgctgttgggggcttccgcttcccaaagcctcaaaacatgattaacatg

SEQ ID NO: 41992 - DNA, 401 bp, Zea mays
agcttgtgagattaataatatgtattacatgagttcatctctcttctaattgttagggcacaataaaataaattgatctatgattatgtacatgtaaataacacttagggaaataataatctatcttcaaatgaagctaatctatgttatagctcatgttatattttgaattaattatcccttatgtagtattgtgtctttttaagatgtgttccaatgtttgttcatgtttggtgtgatgttcatttgtactttccaaatgtattgaatgcatgctcgctttatttaaacaacgagcagtccgaggttcctgagtgtgttgttggagacctccctgagcaacaacctgatgaggcaagtggcctctaacctattatgtcctacatactttatgattcact

SEQ ID NO: 41993 - DNA, 471 bp, Zea mays
  unsure (1)..(471): unsure at all n locations
ctcacgcttgcgcacattcttcatatctaccatgggcaagtcagcgatgccattatctaaccatattacgtctagtaattaaacaagtgtctagttcagcttgatcatcatcgaaatccactaagtatagccgaccatctagcattcacttagacgaactgaatcatcacatcttctacagacagtaacacctatatcagtaaaacacagttgtagcccattttgcatacttgagaaactgacagccacatcgagtctatcgaatctacaagaaaaacattgaaaatagaatggtcacgagatatagctaatttacccaaacctttgaccaaaccttgatattcatccccanatgtgatagctctatacggatcatcatatttctcatacgacgagaacatccgtttctcccatgtcatgtggntngtcacctgctatcgatatccaacttgaacaccgaatgcataaact

SEQ ID NO: 41994 - DNA, 392 bp, Zea mays
  unsure (1)..(392): unsure at all n locations
agcttatctaanaagattaatgatatctggagttattaatcagtttctaaaattccaggagtataagtnttggctattntaaatactccataatgccttanttggactaaaaatcatgctactatttttattaaatactatagaaaattaggaacctagcaaaattggtcttgcatttttagcatttctcttcaattttctaatcctcgtaaaaaaagaaaaagagtcaatagtattgggttgaatctgacccgagccggcccagcctatgcagaacgcgcccgcgcgtgcccgcgtgccgactttgcaccgaagaccctggcttttaaacaacccaaaagagtccgcgacactatttctttagtcattgacatttacaccgaagcccttca

SEQ ID NO: 41995 - DNA, 386 bp, Zea mays
  unsure (1)..(386): unsure at all n locations
cacaccactgttctcttcatccttccaaagagagcgacactcacatccttagtatcaaagcctaactcccgtctgccagctctcatcttgaacagaatgaccatcatgcccaactgcggctcactgcacgacacccaactcaagatatatctaacgtatgtgatttcttacttgatacacgtcttgtcgcgtctgcaagactcaagggcagattgcacaccctcactaagtgcacactacacacgcgtacgggcactcactgagctcaccttctcaagcaaagctattctaacgcatntctctgctagctcacattgcatgccaggacaaacggtacatgcacccaatacgatagacctatatctcaactcgtctcgccatctaca

SEQ ID NO: 41996 - DNA, 397 bp, Zea mays
  unsure (1)..(397): unsure at all n locations
agcttcacgcctttcgccttgttacatcggaatgtcacttcaaggtcgaaaaggagatcagagtctttcctcgtcttgactacgatgtcatcgacgtaggcctcgaccgtccggccaatgtgttcgccgaacacatggttcatgcaccgctggtacgtcgcacctgctttcctcaagccgaacgacatggtgacatagcagtacatgccgaagggtgtgatgaaagaagtcgcgagctggtcggactctttcatcctgatttggtgataccctgagtaggcatcaaagaaagacagggtttcgcacccagcagtggaatccacgaattgatcgatacaacgcagaaggtanggaaccttctgacatgctttgttaaaccagtgtagtctacacacat

SEQ ID NO: 41997 - DNA, 299 bp, Zea mays
  unsure (1)..(299): unsure at all n locations
tatgttgagcaaactctcggctgcgatgatagtgagtatcctaaccatgtgtataaactctctaacgcgctatatgggctctagcaagccccaagagcatggtatgaatgcctaagagattttcttatcactaatggcttcacagtccgaaaggccgatcctactttatatactataactcttgacaatgattcgtctgtatgccaaatctatgttgatgatatcatatttgggtctactaacgaatctacatgtgaggaatttagtacgatcatgacatacaaatncaagatgtctat

SEQ ID NO: 41998 - DNA, 450 bp, Zea mays
  unsure (1)..(450): unsure at all n locations
atgttgagctagaacattccaatcctagcccgcatctgaccgtggtgaccgtcacaagttggtgttcttctgcagtccgaatccagcatgttcaaatccttttccctttccgtcttctccctggttcctaagaaaaacaagagtgcacgggtctccattgtctaaatatgatggacatgaactcaagagtgtaatcacctgatggttgagttgaccagcacgagcgcgagtaatgggaccagaaattggtacttgtattggcataaatgtatcagtagtgtggatgtcttcatcattctccccttcttgcatttgagtcgnnctcgactcaagctcaacttcctcttccaagtagggctttaaatctgcaatgttaaatgtggggctaaccccaaagtctgcacgcagatctagcctatatgcattgtgcgtaattttctctagcacttt

SEQ ID NO: 41999 - DNA, 406 bp, Zea mays
gcatgtcttaagacgaatgtctgctccgactttattatgaaatgatcgattgatccatgagagtctgtgtcataattgtaatcttttgttaagggcatgaatgtaatatctcacaggttgtgcctataaataaatgaacagtacccccgtactgttcacgctggcttctattcactcgcacgttacactcggattctcaccttctgtcaactcgaacgtataaatgtaatcaatattattcatattcattcatgactatataataaaaatgcttgaatgatacccgatgattattcatgttctctatgcgttatatgattctgcttcccatcgtatattgaaatgatgaaggtacatccttcatgaccttcgtctgaagatcattatatcctaacggaaataatgc

SEQ ID NO: 42000 - DNA, 396 bp, Zea mays
  unsure (1)..(396): unsure at all n locations
gcgatccttgagtcacctgcngcatgcaagcttattatcagccgaatcaattangagaactttcttggtaacctcgtacagtccggagtctctactcggacggtctgcaacctaaggaattggccctgcactggttatcaatttttcagtgttgtgaaatctccctcgctttatccgataacctgatgcatcttgtgccaaaatgttaactctatgattctcaactctaaagatatgccgaatattgaattcgtcaaaagaatgaattatgccccaacatttntcaaggtaactatttagagtaccatcaaaacattgatattcttctaacacctgttggacgaccagctgagaatcaccaaatgccttcacatgttttactcccatacaatttaa

SEQ ID NO: 42001 - DNA, 362 bp, Zea mays
  unsure (1)..(362): unsure at all n locations
agtctggactatacgtcggataccgaatgtgtgccatatgcagtttgatcattactagcatatgcgtaatgaggactctanggagaagccctgtatcgacaccctgcccattcacctctgaagtgaatacggctctagctaacccgggctataacggaatagcgactcatgggtacagatgcgccacctctgcagagtgtaaaactgatatatcatccgagctcacggttatgagcggcactactcctcacatgataattgaacttgaagatggaactaaatcgacatatgacgatctgccaatgcgttgttacgtggtccacctacgcgttattatatacttgtatacctctgtgtaatgg

SEQ ID NO: 42002 - DNA, 429 bp, Zea mays
  unsure (1)..(429): unsure at all n locations
agctttgcctcgggcagactgatagncgcctagattgggggtgaatattggcgaaactcgaattacaaatataaacacaactaccagccgggttagcgttagaaataaaaacaagtccgcgagagagggtgccaaacaaatcacaagctaataatgagtgtgacacaaggatttgttttaccgaggttcggttctcgcaaacctactccccgttgatgtggtcacaaagaccgggtctctatcaaccctttccctctctcaaacggnccctccgaccgagtgagcttctcttctcaaatcacttgggaatcaaacttcccgcaaggaccaccacacaattggtgtttttgcctcattacaagtgagtatgatctctagaaagaatgcgaaagaaaagaaccgattcagcgccagagcttaatgaacact

SEQ ID NO: 42003 - DNA, 390 bp, Zea mays
  unsure (1)..(390): unsure at all n locations
aacctcttgaaaacttatacataggctacaaaccaaacttattgccacctctttcttaccaatctcgaggatgaaatntctggttaggggggtaggatttgtaatacccaaataattacggttgtagaatgtataagaattgggggaagaatttaattaaactactttgtgttggtttcctcattttgcatattaaaatcatggggtcacattgactaccaaccattatattaaataaaggaaatagtgcatcatgttggagttatttgtttgtgcctttaatgataataataataatgataaaaatggtttaaaggtgaaaatggagcttaaccctattttaaaactataattttgaaattgaaataaatcgaaaattgagaaaagaga

SEQ ID NO: 42004 - DNA, 350 bp, Zea mays
acgtcggtgccgactacggaccgacctctggatctttggctctaatgactggttcgcgtcccttgagcggagacacgaacgagagccttccggcggctgcgtccgtcctgtgaccatagctgctgcttcagaggtcgccggcgagtcgcacggagcttgtctccccgcaggctccccggtgtggaggttgatcatacccgcggggacggaactggagttccgcttgtaatggcaccttgagtgccggtgtcttggtcattgcggctgtcggcgcctgaacatgtatgtattttcggcaccgagccgtgtttattctcattctagcgctacactcgcctgtcagctatctg

SEQ ID NO: 42005 - DNA, 421 bp, Zea mays
atgcaagcttgtgaagactcttcattctcaacatggccttttctgcgatgccagagccaacccatattagtcttagcaattaaacaagtgtcgagttcacctgtatcttcattaacaacaactaaatataactgaccctctaacactcccttaaatgctactgaatcatcacttcttctaaagacaggtacacctaaattcataataagacaattgtagcccattttacataaatgcgacacagaaagcaaagtgtgatctaaagaatctacaagaaaaacattggaaatacaatggtcatgtgatatagcaattttaccaagtcctttgaccaaaccttgattgcatccccgaatgtgatagactcttggagatcatacgttttcttggacgacgagaacattcttttcttccctgtcat

SEQ ID NO: 42006 - DNA, 293 bp, Zea mays
gggggaactgtgttttttgacacgagataagaaagcccatagataggacgtgaacaggaagcttaagaaccaattgtgacaccaccggatagtttaaatgactcgtaacaatcacgtgcaccgcttatactggtgatcgtttccctatctctctcacgtggataatttaacgtacacgacagagtgggttaagcgtaattagatcacctatccccctatagcgatttctgtcaggacattcacaacttgatggcgcatgatgattctctttttcccgatgagcaagctgaaac

SEQ ID NO: 42007 - DNA, 404 bp, Zea mays
  unsure (1)..(404): unsure at all n locations
agcttgcagtgctgctaattgtctcaccaagtttctttaatcagcatcttctattatatntgatatctctttcctgaacattagctatctgaatttgaaataccgtttagtattaatttacaatgttctctacaatgaagtcttgtttggtggaacataataggtactaacgatgtctgaattaaccaaagggtgctcaatcaaatcaaaatgttagaaagtgtaagacattgcatctttctccttttttatattaatattatgattgctccagagagaaaaacagtgtagccatgatggattctcatgctagttgtatcgaaaggacaaaaaaaaaaaaggattatataaattgtgtacttggcgactcctacgtacgtagattcctttgtatcattactacc

SEQ ID NO: 42008 - DNA, 219 bp, Zea mays
ttatgcattgacaaagtaaggataagacacgtgtggatcacccattatataataagttgcaaccactgccctacgatactacactggcctataaccaggttatcaatccggggattcaaactttccttctcaccaatatcgtaatgaactgaccattgctgcatcaagtgttacaacattccacagagatcataacatagatgggagtatatacagtta

SEQ ID NO: 42009 - DNA, 409 bp, Zea mays
agcttgccttcgcctcagtctattatccgcagtttcttctgtgtgtggaacgtgtcaatgggaaaatcttcacagctgtcaaaaagatgctgctcgatgaacaaaagggcagatgggccgatctgttacccgaggcagtctgggcactaaacacgactaagtgcacggcgactgggtttactcctttccgccttctatacagatcggaggccatgaccccgcaagaaataaagcatgggtaccctgcaacagttccgtcagccgtccccgacgtggacgagccaacttccaaggacctcattgacggagaccgagtcttcccctacaggccctaaacaaataccaagctcagaccaaagcatggcgcgagcacacagtcatcccgagggaaattagtcaaagggacctc

SEQ ID NO: 42010 - DNA, 117 bp, Zea mays
caagcagacaacagtgagacatctacctcacataccatctttatgttaaccatagcaaactcgagcggcaacaataatactcgacatatcccatgtaaaaaacttctaagcatctca

SEQ ID NO: 42011 - DNA, 457 bp, Zea mays
agcttgtcccatcactcctcatgctcctcctcagtcgaggcaggatcccacttgactgtccaacctggtggcaagatggatgaccaagtcactccagcaaccatgtcctccagagaacctgtaaaattatgccacaagcaaggctgagtatactaatactcagctagacttacccggtgtgaggagtctactcctctacctctaaacatgcagttgtttggctgaggggtttggttgccaaaagcactagctgagtctacaaatcaagttttagctttgtcaagttttagtgtgactctcttaagactaaatgtgtactatctactcattcatgggatcaagcaaaattagcaatcaacatcttttgccaatcatcccatttcacttgtactcatgcagacaatggatcaagagtctcatagctgcgagaacggacgattcgatcgagttttaccct

SEQ ID NO: 42012 - DNA, 455 bp, Zea mays
  unsure (1)..(455): unsure at all n locations
tatagaataccgccctcttaatgcggcaactatcaagaacatgtatcctttgcctcgtattgacgttctctatgaccacttggtcggtgccaacgtgttttccaagatagaccttcgctctggctaccatcagatcaaaatacgagcaagtgatattccgaagacggcattctcaaccagatatgggctgtatgaatttttggtgatgtcattctggctgacgaatgcaccagcatattctatgtatctgatgaattctgttttcatgccagaattggacaagttcgtggtggttattatcgatgatattctggtgtactcgaagaacgaagaagaacatgccgggcatttgcatgtagtgcttcaacgtctgcgagagcaccacctttatgcccagctactcaagtgtgatantcggctacaggagatcaaattcttgggtcacactatctctc

SEQ ID NO: 42013 - DNA, 439 bp, Zea mays
  unsure (1)..(439): unsure at all n locations
ctgcagctttgattctgtgggtgtgcatcgactattatagcagattatgaacatggcggtggcagaagagagtttacggcaaacagctctatggagatgaaggtgcgggtgtgatgcgtgcttggaagagaaaaatgaacaccgatggctcaatgaagtaaaagtgttgcaaggagtctcctcatataagaagaatatatggagcctaaagcacccttggactatgctcttttatataagtgactgccaaagttgaagcgacacagagttacaaaatttgaagtgtcaggtcagtaaagtgatcgagtcctgaatagtaagttgagtctatagactcaaggacttggacaaagacaaatcaatatcgatacaatanattgaagacaatctccaatttcataagaagtgtttattttcctgaatcaattgaaggaacatg

SEQ ID NO: 42014 - DNA, 473 bp, Zea mays
actcgctaactgggctcaagcgcgaatgcgatttcaaacgcttcctagcttagaaaatcagagtgatgaaaccaaagagaaattagtgaacaatgggcacatcatttatcaaaaaacgttgaagagcttcgtgcgtccaagaaaaagtgttatgaaaaatccatataatgtgttaagataataagaaccagcttcgccagcgttggcgcgttttcaagtgaagaaaatttcatgaggggcgaccccgaaggcacaattggatgggtcagccacgaagctgaagccttctgagaagttctgaatagccgtggagacatatgtgccttcttcggtgctatggggattgccactattttggagaagaaaggctgcgatcacgtgaaatctctcgcacagaccgaagccgattattctctgagacataaagaccttcgtcgagcaagtcgttggtgaaatattaccacattggaaat

SEQ ID NO: 42015 - DNA, 403 bp, Zea mays
  unsure (1)..(403): unsure at all n locations
agctctgagtgtntgaatatcttgcatacaccttttactaaccatntggcactttacgttgctctctaactcggtttgtagagaaagcgccatttggggccctacttgagaagaaacagagaagttgaggagaggttgagaaatagtatggctctagggtttagtcaattggattatactagtctaagtcataggaaagtcctccaagaagttcaagctgaatataaaacaaatggaaaagaaaaggactggaaggggtgtgggtccaccagaccctctacagggtcatgccggtgtgcaccataccgtctacagggaactgtatggtcttgggaatttttgctaaaattcatcggatcgtgtcaacacacgggtcgatgatgcactcgacatcatcccacaa

SEQ ID NO: 42016 - DNA, 243 bp, Zea mays
  unsure (1)..(243): unsure at all n locations
cattatgactcatctaactgccggtggcttattgtcacaaaccaaactaccgctctggttgttagacatcactgcttattgtccggtctcacccaattagaagcacccgaacgcaccactttatacacccgagttaacgggtctaaaaccgggcgcgatataatcctcaagtgngctatgatcaattctcacacatatgatgactcatggtacagataccaatgtgacatcattactatataa

SEQ ID NO: 42017 - DNA, 451 bp, Zea mays
  unsure (1)..(451): unsure at all n locations
agctggacaacaccatntgacattntacataatatttctgagatcaagaatatttagttcattcctcaacatgcaaaagcgggtcttatcaagtggcttagtgaaaatatccgctaattgatcttccgacctcactccttctaaaatgatatctcctttagcaacatgatctctaaggaagtgatgacggatatcaatgtgcttggtgcgagagtgttgtacaggattattagcaattttaacagcactctcattatcacacaacaaaggtaccttttctagaactacgccatagtctagaagagtttggttcatatacaaaatttgtgtgcaacaagcacctgcgtgcatgtattccgcttccgcagttgacaaggcaacactnatttgctttttggatgtccatganagtagtgatctaccaagcagatggcatccccagaagtacttt

SEQ ID NO: 42018 - DNA, 397 bp, Zea mays
  unsure (1)..(397): unsure at all n locations
gactgctgataccgcgccgagtgtaataaggtcacatcccgagcctcttccagctggtccaatgaatcttctcggctggtctggatgcttcggtcgtcgtacgcctttgtcctcggcgaaccgtattataaatacgtgggtagcgacgcgctcgacctcatagactataaagaacggcgagagacccgtggaccagctcggcgtcgtcctcagactccagaccaccgaacgtagctctttcatcaacacttgcanacttgttgcggcgttgacatcctcagtatatccctgcaaatcataccgtggacgctccactgccactctcatggnggagctatggcgcccactcaccagatgtggggtctccatagtcagaacttctccattgactgctgca

SEQ ID NO: 42019 - DNA, 257 bp, Zea mays
gagttcttgacatctttgatcaatctctcttggaatgactctttatatgcttccacatgtgtgtttgacttatagatatagatgtgagtttgatttgcaaaaacgaaccaagcggtggcaaaagatgatccatatatgcccaaattgaataaaactcaaagtcagtctttatttgaagtgatattgcacttgatctagttgctttatgttgcgttggcataaatcaccaaaaatggggagattgtaagggaaatgtg

SEQ ID NO: 42020 - DNA, 442 bp, Zea mays
  unsure (1)..(442): unsure at all n locations
agcttatcatataccagtcattcacaaagntccatgctacttgcttcacttcttgtttattgatgccaagattttgcatagcatccagaagtggtctataaagatgctgaatgttgaaatcaaatcgaattgttgtcacaagcaatctctctccaatcaaaatgagcgctatctgtttctcaaaaacatcctgtataatagatgctgatcaaacactgaatgggccacgacagaaagttacaaaaattaatttaatggtaccttctggcggatcctttgagccgcagcagtgtcccgcctatacattgtntcatangatacttctactacatagtccacgggaccaggagtatcttcaactttngacgctagaatacacatacttgttgcattgcctgacataagttatgattaacggacaattaaacctagtaaaggaaat

SEQ ID NO: 42021 - DNA, 350 bp, Zea mays
agcttctaaagggagaacacgtgatacgtttgattatacgtgcaattcgaaaaagatagaccttgtgcaacttgtcaagcaggtaaacaagtgggaggagcgcatcacagcaagaatgtgatgaccacttcaagacccctggagctgctgcatatggacctcttcggacctgtcgcctatctgagcataggagggagtaagtatggtctagttattgttgatgacttttcccgcttcacttgggtgttctttttgcaggataagtctgaaacccaagggaccctcaagcgctttctcaagagagctcaaaatgagtttgagctcaacgtgaagaagataatgagcgacaa

SEQ ID NO: 42022 - DNA, 347 bp, Zea mays
  unsure (1)..(347): unsure at all n locations
aatatgcgaactagaatagagctttacatagtttatatatctgccaatttaatgactaatacggaataaaatgtcactagaaaccaaacatcttcttaatctactattagacatatctatagatggtcacacggaccgtccgggaggagagaacctatcgattgtcttgtgatgtggcacgccactcaagatgtctctagaccacatanagctacagagatgtgaagattgagatgaagaacgctatgtgactggctactcctacgcaagaaagtaaacggatcgatacactggctgattgatacgaatgatggcgcccacaatcggacgtacaccttcatatatat

SEQ ID NO: 42023 - DNA, 328 bp, Zea mays
agctttgtctatctgtctctgaagatcagctatatgggccatcttcttcttcttgcgctgcacctgttgctgaaggatctccaggttttggatctcctgatccacgtcatccttcggaggtgttggactaacagcctttctcttctggcttctgacctctctaagagaaaggacgtcctgattgggatccagcggctgtaaagtaccagcccctgtcgctgaagctttttccgcggcatgacgaaggtaatgcttgccgaaagtgttcaagactcaaaaaatgggagtgagttcaccggaggtgggcgccaatgttgaggacttgttc

SEQ ID NO: 42024 - DNA, 358 bp, Zea mays
  unsure (1)..(358): unsure at all n locations
agctctacggggacacatattagataacaacgtcatctgaatatatagactgagcgctgccngcacgaagcaagtggtgctatatcccacaaacatatgataggacagcactgagtctaaatgacattcgccacgtaatacatggggagaagactgctagtataggatgatatttcgcttacctcggattcttttacaggagaaatctcaaacccacgagaccttaaagggattcttgagacgggctcacaatgagttctgcttacggatcaacaacataagaagcgacaacgggacggagttcaagaactctcaaactgaangtatcctttgagaggacggcatcaagcatgagttc

SEQ ID NO: 42025 - DNA, 427 bp, Zea mays
  unsure (1)..(427): unsure at all n locations
agcttacgcctcatcagacgatcatgtgtgcttttgtagtgatctcctgcagttctatctgctgcctccactccaatcagcactcagcgaagtcgtacggggtgtttggttggtagaatgatacgatgcatcgtcgtatatgagagatggacatagaccgatagcttctgtttgttttttttttgggacccccctccgatcaagtgtatgacccatactatatgatacgccagttcttgtttgtgtccggcgccttttgaaagtacttgctcagagagctttacgagaaaactattattgttaattactctttaanaatatagtcaccttaatttatgacaatatctatcccaattacaattaaataaaataatttgccatggtacatatgctactataaatcatattaatgttatcattgaattat

SEQ ID NO: 42026 - DNA, 319 bp, Zea mays
  unsure (1)..(319): unsure at all n locations
ttcattttgagaaagacaagaattgtagcgcatgccaagccggcgagcaagttggcactcatcatccacacaagaacattatgacaagtgacaggtcactggagctccttcacatggatctattcggcccgatcgcttacataagcatcggcgggagtaagtactggctaattattgcggatgattattctcgcttcactcgcgtgttctttntgcaggacaaatctcatacccaagagaccttanagggattcttgagacgggctcacaatgagttcggcttaggatcaagacnaatataagcgacaatgggacggag

SEQ ID NO: 42027 - DNA, 236 bp, Zea mays
catctgagcattgagctgcacttatggtgcatcacccaaatttgaatgatctctctgggttggggctgatacacccttaacgctaaagaggctaatgtgaagtcttagcaactacaagtacacataacaggtgaggccaaactgatatctaaatatggacataaaataaatggcatgctaatgaactggggctactcaaacactgatcaccagtggggaaaaactttagatcatgc

SEQ ID NO: 42028 - DNA, 340 bp, Zea mays
  unsure (1)..(340): unsure at all n locations
atatacttatccacacaacgcgaattatatntactaattgcatcacctgaagggctacacatatattaggattatgataaggaggactctcctgctcaaacatanactcgtctacaccgagtacaaatgcacttcggagttactatatttggtcgttgtaacacctcacaatcttatcttgtgagctttgtaataccctccaaagatattgagtatatactctacaaaagaatgttcttactcttgaaataatatcctcttaatacataatgttgttaatacaacgctaatacaacatccttgttaaccttgatgattatatgctaaacacactcttcaa

SEQ ID NO: 42029 - DNA, 469 bp, Zea mays
  unsure (1)..(469): unsure at all n locations
tgcagcttgcacttaccaccaaaccgcacccgcatccatatcacattctatggctcaacaatagtggtaaggtcaaggtaaccacactggtaccaattaattttgctattggttcatatcgcgatgttgttgactgtgatgctgtgcctatggatgctagtaatattctgctaggtagaccatggcaatttgattcagattgtatgcatcatggtagatcaaatcaatattctctcatacaccatgataagaaaattattntgctttccatgtcccctgaggctattgtgcgtgatgatgttgctaaagctaccaaagctaanactgagaacaacaagaatattaaagctgctggtataacaaagatgggataaaattgaaaggacattgcttgcttgcaaccaaaactgatgttaatgaattatttgcttccactacttgtgcctacgccttggtatgcaaggatgct

SEQ ID NO: 42030 - DNA, 418 bp, Zea mays
ttttatgttctgctatgtgaagaaaagctttgtcttatagaggaagcggcagtttacgcttcgttgtgtactataagaacggaaggtgtcttttcgccttcggctcaaaatactgatttcgtccacatcaaagcgactcaatcgaagggtaagaatatattacaaggtatgtacaaagttccttgaggacagttcaattgtatttacaaaacttgttacataagtatcctgagtttttcctatagtacatttctactgatcttcatcaagcttcagcttcggcgacagattcggcgacatagcttaggcatcattttcaccttcgtcatcctacataaatcaaggaatcgtgagtaagaatcaagtgcatagaaaaaggtcagtacaatgtattatttcttactgtgtcaagatgact

SEQ ID NO: 42031 - DNA, 280 bp, Zea mays
gcaacttcttagggaaacacggatacgctaactttgttcatttctaaaagacaatcttgtgcgcttgtcagcacggaaacacgtgggatgctctcatcacaccaaatatgggatgactacatcaagacccctggagctgctacatatggacctcttcggaccccgcgcctatctgagcataggaagacagtaagatgggtctagtaatcgttgatgactatcttccgtttcacattgggtgttccttttgcaggataaatctgaaacccatcgaaccctt

SEQ ID NO: 42032 - DNA, 401 bp, Zea mays
ctaacgattgaacagagccatctctatgctgcgaccgctggtgtccttgctaccttaagcctgcttgaagcgctaatgtgagggcctcttctcacatcagatcggccgactaacttgcgcccctgcctggtgaccctcttgctcatgttgcttgaagcatgcgttgggctcatggatgaccattaatgcgagcacatacctgcctctgacatattcgccgtacaatttccaaaactctctgcacacttgggacctagacttaccaattttgtacaaagaagataaaactgtaggacttacatagtgacactccggtcgtcatccgggtccgaatctatttgtgacaggctcaacagtgtagtgcgtggtctttcctatatgaattgcaactccctcacact

SEQ ID NO: 42033 - DNA, 331 bp, Zea mays
  unsure (1)..(331): unsure at all n locations
cagctgcaactnctttatccccatttaagatccattatgttaaattgaaaaatggaaacaggactacactatgaggcttagtatcgaggttccaaatcgaatgtgtccaaatcattcctctatattctatcttaatcatcgtggtctgcttcacaaatcgctgtccgtgttggtgcnctttttattttcgctttctcacgttggtcgtcatgagcaaaccgcttggaaacgtaaagaaaaggtggcccgcatgtgaatttttctgctgactaacctgcttgtcactttataaaaaaaaaaattcttttttgaaaatttctgacagcttcaa

SEQ ID NO: 42034 - DNA, 264 bp, Zea mays
tatgatttaagcaagatgtgaacacactattatgaaaaggatccttatatgacaaaaaagtaatgcttaagtgacatgaagcgatgtacctttgtgtttaccttctaagggggtgttccaaacttgtgttggatttagaaatcatttgcacgctcttgttggtataattgtgacctacgtcgaagatatcaaatgaagattgtcatactaaatcgaaggtgaaactcgatacctaaagtctagatgtcacctatcattttctta

SEQ ID NO: 42035 - DNA, 405 bp, Zea mays
agcatgcagcttcgactcaccatgtttttggcagcttatatcaatctgtcgataacacgtttaactttggaggtgcaatcaacacagcagctgctcctgctctgaaggattccccaaaaccatcgcaaaatactgtccaaacttcggcatctttactcgtttcttcttcctgagcccctggcgtccagtcaacaatgaagtctgccaacgcttgggactgaatcgaagatctatggccataatcaatgcaaaattcattgagttccgcagcccattatccaacccttccagtagcttctctatttctcataatatccttcaatgactgtgaagaacggacaattatattgtatgcttgaaaatagtgctgaagcttcctggaagccattaaacagcatacagcac

SEQ ID NO: 42036 - DNA, 199 bp, Zea mays
tacagtccaccacacaacaacttacagataaacactactaaaccttaaggctgatgccaaaggttccatacataggacagcatatttggactacgcatcaaccataataactgcccttgaactgttagatagtcatacctgatgataacatcatatacgtcccatcactattctcaactatacttgaatacacataaga

SEQ ID NO: 42037 - DNA, 453 bp, Zea mays
  unsure (1)..(453): unsure at all n locations
agcttgttagctctgatcctagagggcttaacatggcgaaaggtattgattcagtcattacgtccaagatttttgttatgccaatggaagatgccgaaggagtttcgatagagcgcttcggcggagaagactttttctctctatcacgtctcgactccacaattttccgcttcttagatacgaaggtttcgacgacatcttggaagcttcagtttctttagaaacttttgatgtttctgttagtctctttctttttatccttctcaatggatcttattgcttgtctttttacgatacttacaactcttttcttcctcactcccccagcctcttcgtcaagtctatcantaatggtatattcgaagccgagggcatccatcactcgggttagccatcactttctccgtgtaccgaaagcggcagtcatcaactggtctttcttcttagtatagt

SEQ ID NO: 42038 - DNA, 256 bp, Zea mays
  unsure (1)..(256): unsure at all n locations
acctatgtctaatactatgccagcaaacccccttagaccctgcagaagcttcttcagaagatggatgaatacatactgtggtgtaactgcccgaattattccaacttaagtgcataactcccgccttagaggctacaccacacttaaataggaataaaacgtcagtacgttcggatctaatctgacaaggacantataaggatcatgtaccacatactcactcaaaggtgaggcgcagagcatatacgataaagca

SEQ ID NO: 42039 - DNA, 418 bp, Zea mays
agcttgtgaaggttcttcatctccacatgtgcttagcggcgatgccacagccagcccatgctagtcttagcaataaagcatgcatctagaccggcctcctcttttgcaaaatcaactaaataaagtttgtcgtctaatacacccttataagctaatgaaccatcacttcttctaaagacagacacatctacatttgtgaatagacaattatatcccatattgcataattgactaacagataacaaattatatccaagagactcaactaaaaacacattagatatagagtgctcggatgaaatagcaatggtatctaacccttctacctctgcttgatttccatcaccgaatattattgaatcttgggaatcctttgtttcgacgtaggaggtgaacatcttcttctcccccgtcatat

SEQ ID NO: 42040 - DNA, 391 bp, Zea mays
tataaatactcacgctatctttttcgagccaactccgcctatgtccatgctgacacacgtgttctctgtctccgatcacacgagagcggtcgagggtttcttctactaagcaagtgaagcctctggcggcaatgccgaccgagccgagggattcctacgccttcgggataccgatacctcactcgtcaccttacgcacagagcaactcacatttggtcaagcggtttcgatagccgacaggcgagttctattgctcaacatgatgaaaggacacggtattacacccaaaaatacctacatgttcaggccccaacagccacaatgaacaaacaccggcactcatggtgccacttacaatggaactcctgcttcactctcccaggtaccaaca

SEQ ID NO: 42041 - DNA, 400 bp, Zea mays
  unsure (1)..(400): unsure at all n locations
agcttatacctcaattntacatagcatagtcaactcattacgatagtatgcctcttctattacaatcttcgtttttgacgtttctaattacaaatgtcttttaatcatgcttctgtatcattattcattacaacttatttatgttatttcgtttggatgaatattgaatgctggtgttctttgttgtctgggaatcgtgtagagatcgaccccttagtcgaagttctagagcaacagtttgaggaagaacctcaaagttgtgtgaaaaagcaagctgattcccctttcatatttttatccccaaacatacaatgcactttatgtgtatgttatattgataaaagaagggtctaattggctactagcctacaaccttcttgtaacctgggtttttcttata

SEQ ID NO: 42042 - DNA, 319 bp, Zea mays
agcttcttagggagaacacgttataggtttgactaacgtacaattcgaaaaagatagaccttgtgcagcttgtcaagcaggtaaacaagtgggaggagcacatcacagcaagaatgtgatgaccacatcaagacccctggagttgctacacatggacctcttcggacccgtcgcctatctgagcataggaggaagtaagtatggtctagttattgttgatgacttttcccgcttcacttgggtgtttcttttgcaggataagtctgaaacccaagggaccctcaagcgcttcctcaggagagctcaaaatgagtttgag

SEQ ID NO: 42043 - DNA, 424 bp, Zea mays
  unsure (1)..(424): unsure at all n locations
tgtcacgtgggtcgctaccacatggaaatgaccaggttctccgttgtgactgggctgccaaactaggcctaagggtttcaaacaaggcctaactctcgaagatgaagagagaaggacctatcttttaattgtgttgtcctattatagttatttgtattatttgtaggagctctagtatgtgactaacaacactatacccattggttttttgattgcctcatccttccaatacaagttgtagtatcttaactcacacactacacacgccaaatgcacaccactacatgtatacctaccatgtgagctagatctacaacctacctaagagaacacacaagtgcagctaagggtaccgaaagcgacctccatcgatgacggacatgtntctctgaccattatgtcacatctaatgttgagtctaact

SEQ ID NO: 42044 - DNA, 448 bp, Zea mays
agcttgtgggtataatatatttttttacagacggtttcggttatcaaccgttcgtgctattcgtagtaagaaaaccgccactaaaaatcgatttctagtggcaatttttttaagaaaccgctactagaaatcatttttatccttaatttttgagtttttcaaacgatctggatgataaaactaccaaaataaatgttgtagatttcaaaaaattatgaaactttgtagttgacaacttttttattaaatcatctcagctctcaaaaatggcatccaagtttgttaaattcaaactgaaaattttgcaaacaactttggatagaaaaagtatcaaaataaaagttgaagaacatcaaaagttattcaactttttaattgacaacatttttgcttgagtaaatttacgggctcaaatagtccatttacacttaggtagttataatatgtc

SEQ ID NO: 42045 - DNA, 396 bp, Zea mays
  unsure (1)..(396): unsure at all n locations
ctgttagttcggacggtactccgaagcggctaacaatgttttttcagaagaattttgggcagtctttgatgttattgtggaaacagcccttgccttgatccatttggtgaagtactcgacggcgacgaaggcgaacttaaggttcctctgagcggtgggcaggggcccgacaatgtccatgccccaacgctgaagaggccatgtgtgggcgatcagctttgtatactgcgagggcctgcatgaccgangagaaaactatatgcaggcttcgcacgaccttgtgacacgatttgcgggcagatcattgcgggcagtaaaaccctgcggataccttacagcttggcccttggcctgcgtggagccgacgtgcactgtggacttaccacgatctgatgc

SEQ ID NO: 42046 - DNA, 382 bp, Zea mays
  unsure (1)..(382): unsure at all n locations
agcttgggatatccatcaaatctgaagctgacaatctgaagtntggtctgttcacaatgttttcatgcgtgcagccagccttcanaaaagccatagctgtgccccgagaagctaccagggcgcagaagtcggcgtgcccaccaataacttcgtcaagggcgtcaacttcaccttcaatatattctaatgttcttggcagattctcagctgaaggtgtaaatttctaagagctagcttcgacagagtgaaacacatccttcagccgctgcacgcatcggctgccgaagcttaagcattnttcctgaagttctttaaaggatttcttgcaaattgagtatttatccacttcagttttcacgcttgcttcaaaatatttcttttc

SEQ ID NO: 42047 - DNA, 341 bp, Zea mays
tcattgatgaagcaccagaagaccaatcaatgaaggaatccatgagggagttcgcacgagaaaggattgtgtgttggcatcgatgcttcctcaataagctagctgccaagcgaaaggtgaagcctgaagatgatctctgagtagccagaatcaacatttgcaatcggcaatccgatgctcctcataggtcggattttgttgaagttacatcttctcgaagagtctgcaaagtgaagatatgtagctaaagtaaagctatacccataacccttctgagccgaatctcgaggacgagaatcattttaagtgtggtagatctgtagcattcccacattcaaatc

SEQ ID NO: 42048 - DNA, 391 bp, Zea mays
gcttgagaaatacccaatcacccactgcgaacttatcgctcgaacgacctttgtctgtctgacgcttcatacatagtttggcacgctccaaatgctgctttaccagctcagacattagctgacgctccttcaaccaggaactcaattcagaagatgtaataacagtctgatctgcgatggcaaacttgctgggtgggcaaccataccatgcctgaaatggagacatgcctatagctgagtgtggagaagaatataccagaactgcgcaacagacaaccaccgacttcactggtgcggacaggcgtggacaaacaacaaaaaaaggttttaacactgattgcacgctctgatgcccatcggactgaagatgatacccatgctcattgaagct

SEQ ID NO: 42049 - DNA, 448 bp, Zea mays
  unsure (1)..(448): unsure at all n locations
acctgcggcatgcaagctcgacatagtctcnatgatgtatgccttatttattccaagtcttctaaagctattacttttcgtgaaaccgcattgtataagtaactcaagcgtgtgatgacaactttgacatgctctgtttcgagggctcttaccgcaattgggaggaacaccgtcatcatcacatggcagtcatgacagttgtaaccaaataaagacaagtccttcatcctgactaatctgctgatattggatgagaaacctgtgggcaccttgaccccacgcaaacaattgcaaatctttgatctctcctcaactgacaagttgtagctagctggggggaggtaagggctccctttgccactattcactggatgaaagttcagtctgatttgaagatctactacatcatcgcgtggattaagttcgtcttttgtcttactcgacatgc

SEQ ID NO: 42050 - DNA, 190 bp, Zea mays
aaccagccgctctgaaaatacctacgacaaaaccgttttttttctaaaagaaattacactgctttcagagtcccacggcttatgccaaaaactccacgtaagcacctgctgtactacaacaatacatgccatgccttggatataacaaaacttaagagctactttcaacatcaattttcacctcgaccta

SEQ ID NO: 42051 - DNA, 271 bp, Zea mays
  unsure (1)..(271): unsure at all n locations
cacaacagncaaacacacaataatacactcgaattgcgtgacgctatcagattccaaatctaacaaaattacccaatctcttcaactctaaacaaaacaaacgaacaacttggttggaacaacaccgctggctcgaactaaaaaatctaaaacctcgtagatcctacgaacccactcataaccagggaaacaaacctcgagcctgaagagagctctcaccgaagaagacggtgcggactggattcctcgccatgggcgacaactgaatctg

SEQ ID NO: 42052 - DNA, 286 bp, Zea mays
  unsure (1)..(286): unsure at all n locations
gcggacatgaacattatatcaagacataataacattgtgtttctttacaagaaaatgcagtttttcgactgaaatcaaaatctcagtttcattgcgtttgggcactaaacagatctcctttcacccacaatacaggagaaacgatgagaactgctgctcgcttatgtctgttnaggaatctcgtttttttcacgatgggtaacagcagtcctcatcctctattatgggcagaaaagcatggcgactggttttcagcggtgcatanatctgatttgagtcgtttatt

SEQ ID NO: 42053 - DNA, 406 bp, Zea mays
  unsure (1)..(406): unsure at all n locations
gcgccacaagcttactcctccctgggaagggccgttcatcatcgtcaagattttgaagcccgggacatacaagctggccaatgatcgaggcgaagtctacagcaacgcttggaacactcaaaagctacgtcgcttctacccttaaaatgtttcaagtcattcatgtatttcgctttttttccatataaataaaggctaaccatcaaggaaggatcanccttgcctcggctaagccagaccctcccttcggggctagaaggagggaaccctctntacgtcaaaattctcctcggaaaagtttttcgccaaaatgactatcctgcttttcgactatatcgataacgggatcctataaacgacgagaggaaccttatacgggtaagtcgaccgagccgacggactccta

SEQ ID NO: 42054 - DNA, 441 bp, Zea mays
ttaagcactgagctgcagcttcaatcagtctacttccctgatcaattgtttgattgattgattagcttcgaatttaactctaatactttagcctcagtttcagccagcaagccttcggtcgattggagctcgaagtctttcttttcaatgatggcagattgctcttttattttgctttccaagatttcaattatagcttcgtgctttttgtcctccaagtcttggtgcatcttcagagctttgctcaatagcatgctctgaacagaaacaacttatgttaagtaatattttcgttttaacggcaataaaaaccagagaaaagggtgttaccttgagttagaaaaaacaactgccgagatatgttgtcgtccgagcggttgatgctgtctctacttcggaaaccgatactcttcgatagagacagattacctaactcagtct

SEQ ID NO: 42055 - DNA, 315 bp, Zea mays
  unsure (1)..(315): unsure at all n locations
accttagatcacctgcagctgcaacttagcagtctcctgttcttctatgattctactgagggcttggatccaacggaggaagacgggataggngctcgccacggcggttgctctctggcggcactggcgggtctcggggaggtcgccctatataatggcttgcttgggcaagtccggccaggttctgatgatgttaccgggaaggcagccaagcactggggcaggctttataaccgtggcgcgagcgtgttacttggcggtcgctggcgcaccgcggatcgcgcacaggcgtgctcttagcgcccccccggatgc

SEQ ID NO: 42056 - DNA, 345 bp, Zea mays
  unsure (1)..(345): unsure at all n locations
acactataaatactcacacattgacatccgatctgtcgcggagcgtgcagcgagacaaaccantactttcgccggtctatctcctaacctacggcgtatcctcccttggaactcacatgatatacgtagctctacgtgcatggaagagatctctcacagtcgacatggcgagattcgtacgcttggccgctcaccagagcgaagaacacgggcatgatgcaacgcgccacgtgttttactcgttctgtcgtgccagagcacgcacgctcgcgcccttgcgagccccgcgccgtgcccgagccaaagtcagcgccctgtgccgcgatcgcgcctataatagcctct

SEQ ID NO: 42057 - DNA, 432 bp, Zea mays
agcttggacagagatctacgatggattctgcggtatacttccggtatgtcagctgccgtcttaatgcaccttccatagtcagaacatgctatgcagtgaaacttgaattcagctgcacaaataatattgctgaatacgaagctttgcttttggggcttcggaagttgaaggcaatggggataagaaaggctgttctcaaaactgattctcaagttatatctggacatgttgaccaaagttgccaagcaagagatccgaagcttgtaaaatatttggatacagctcgaagctcgaagctttcttcgaacggctctctgtcaagaatatcccacgaggagaaaatgacacgctgatttgctaccaagtcagcggattagggctgcctttccttcgaagtattcttgaacaataaagcaccttggccaccttctg

SEQ ID NO: 42058 - DNA, 400 bp, Zea mays
  unsure (1)..(400): unsure at all n locations
agctcgagtgtatgcatgtgtactgaagacaattgtggtatatatattaaacattgattgacaatgcgagtggngtttgccttgcaactatggcagtgggttttgggcaggcgcactttttttgtggctgataggagtcataaagcacctctcaattaattgtttttacgccatgggcacacaagtaaatcggttagttatatttgtcaccaataacaagaaaatgactggatgccgtgcgcgtaccaaacacgcaatgtacagaanaatccagcatttcaccccaaaattatcttccaaacagagatgaaataatgttggtcctcactgaatagcttatggtgatttctagtatgacgacctagtttataaattaataaaacgtagaattgtccccttt

SEQ ID NO: 42059 - DNA, 461 bp, Zea mays
tgataaagagtgtattcatatgaattttgacactcagttatgtttgttatactgcggctgttcctgtttgcctggcacaaaccgagcacgtctgttcactggtgggttatatatagtaaatcgctgagttggctacttcaactatggaaaatattgtatagggataaaagttcttactgccagcacaatttcataatatttggtttagtagtttgggagatatcgcaatttcattatatctatgctgctgcctgaaatagattcagtcagctatcttgtcggatgtttacaacatatatatggcgcagttagttatcattgaataccgaagtgacagtatttgtgagaactcctaagattcgttgatatacactgtatatttaagatcaaataacaaagcctgtgtgttgcatgggtcagggaagattttaccagctggtcagcgatgacattgtgatgtg

SEQ ID NO: 42060 - DNA, 332 bp, Zea mays
  unsure (1)..(332): unsure at all n locations
aataccagggcgtcttccactatagagcatacttctagcaaaattaaattntttattgtctaagtcatgctcattaattttagcactaagttgagctatgtgatcattttgttgtttaattaaagctaggtgatcatgaatagcatcaacaataatatctctacatctagtacaaatagtaacatgatcaacactatatgtagatgggttgtaagcattaattcatcaatcttagcatgtaaaataacattttcatttctaagaatggaaatagaaacattgcaaacatttaaatctttagccctggcaattaaattattcattctcaatct

SEQ ID NO: 42061 - DNA, 368 bp, Zea mays
  unsure (1)..(368): unsure at all n locations
tccactcttcacctgcccggatcggtgatctcatcccagtacaaatcaatcaattcaagagcaagctgcactcgcctattgtctgcgaggggggttgtcaccttcgtcaataacaaatttaaccacaagacgtagacagccaacgactaccagtagttgagcatatatatatatatacacacatactaccgcctcgctagacactgaccatgacgctaatgcctaactaccgcatgatctacatgtaaccatttctaccctctgctacctcctcagctcgtcaggaaaatgatttacatgccaatgtaaaaccaacctcatagaatntacatgcaaatgaccacgctttaatgtctaccaacctcata

SEQ ID NO: 42062 - DNA, 446 bp, Zea mays
  unsure (1)..(446): unsure at all n locations
gcttattattactggtagatgccaacaaaaataacccttagaacagaacccacccctaattaagagatgtagtgcaaagtggcccattttaaacaacttttgttatttttgtctaaagcatagccttttattttaaacctcanattcctagaacaggctataatgaccaatggcaacccactgtaatttttacagaatttttggaaaaagttaaaccactgttgtagttcaaacctacactagaaaccataaatagaaaataaagaaagggaaaaatgaataataggaattagtgtcatcctaaaaccctttataacctgtccactgaaatatataaaggcaataccaattcactatgcctagccctaacaaaacctaaacctagagtgataagcataaaccactataagccacgtatgacccagaaccctaaggtactcattaac

SEQ ID NO: 42063 - DNA, 415 bp, Zea mays
  unsure (1)..(415): unsure at all n locations
cttattcttttgaatattgctcatggtgttcacttagagctcttaattagggttgcacattcttatcttttcaaagactcatttgtttcgatcatgacacttttaagtatatacttggtgaattctttattacttangttaatttgatgctcatgcttacttggattacatgaaataatggttcttggttgggcttttacaagagaaaccctatgtgacactgtcgtgtcacagccttcccccctaaaggaatctcgtcccgagattcggccagagtccttcgaggtgaagcgaatgggagactgattgaaaaagcgtgatgattgtattatangcgcaaatgctcttcaatgcattctcttcaacttagacgaagcctttaagttacttatgcactcttctaataaacatattt

SEQ ID NO: 42064 - DNA, 456 bp, Zea mays
  unsure (1)..(456): unsure at all n locations
cttcatccccacatgtgctaagcggcgatgccacagccagcccatgctagtcttagctattaagcatgcatctagaccggcctcttcttttgcaaaatcaactaaataaaagtttgccgtctaatacacccttaaaagctagtgaaccattacttcttctaaagacagacacatctacatttgtaaatagacagttatatcccatatgacataattgactaacagatagcaaattatatccaagactctctactaaaaatacattagagatagaatgctcattagaaattgcaattttacctaacccttttaccttgccttgattcccatcaccgaatataattgaatcttgggaatccttattcttgacgtaggaggtgaacatctntcttcttcccgtcatatggtttggtgcatccgctgtcgataatctaacttgaaccccggatgcataaa

SEQ ID NO: 42065 - DNA, 323 bp, Zea mays
  unsure (1)..(323): unsure at all n locations
ccaaaatatagctcaaggaatctactaataaaacattngcaagtgattatcgctcagagataggaattntaccaatacccatcaccttactcttgcactatctcaaaccaatatctgtgctcttgagtacatgaatgtataaacatgtcttcatcccggcatgtgatatgacatcactgttaagcaccaacttgatcaccagagagtgacctgcaaaaagttacgcatactatacgtaccaactgaatgggcctaagcgtaggatagcttgggaccacacactttttatgactttgcttggcagcaccaaattcacaccattt

SEQ ID NO: 42066 - DNA, 297 bp, Zea mays
tactacacctccgtcatctgagaggaatctactctcgacataacagacgatctcagttctctcttcttcgctataaacacgagatatattgaggactgctctctcaagaacctcgactgaacgcgcttctattgcttacaacaacacatcccaaggcaagggcacaccctgtgccgctgacttatctagctaatcaacatgctcattctgtcctcgacggatacttctgacacacaattctctcaacgacgcttcatctctctccacgatacccagacacttttcacgcttcgatct

SEQ ID NO: 42067 - DNA, 329 bp, Zea mays
cccatgaaccttgacaataagcctgtgcgagttccctctataaaatctaataaatatagctgaccctctaacacacgcgtcaatgctactgaatcatcccttctcctaaagacagtgacacctacatccataaaaagacacgtggaccccactttgcttattgaaatacatatagcaaattgtatctaaagaatttaatcaaaacacttgaaatcaatggtacgagaataactattttaccagacctttgcccaacctttgatttcattccgaatggatacctccgtgggaacttggttttttctacgaagaaaacatttcttcttcct

SEQ ID NO: 42068 - DNA, 163 bp, Zea mays
taaaacaggactaatactgcattagcacatgggcccagtgccctgacacagttatcgtgctactgggacctctggacaaacacactccctacgtcgtggacgcaccttcttcgccgctaacaccaatttgcttacctgactaactcctataaaacagattcat

SEQ ID NO: 42069 - DNA, 427 bp, Zea mays
  unsure (1)..(427): unsure at all n locations
cagcttcagcgacaggagctgctactctgcagctattggaccccaatcangacggtctttctcttagggaggctcgaagctagaacaggaatgctgctattccaacgcctccagaagatgacttggatcacgagatccaaaacctagagatccttcagcaacaggtgccacgaaagaaggagaagatggctcgcttagctgacctccagagacagatagatgaagcttccgaagaggttcgtcatcttgttcaagataaccaataccgaaggcctncgcgcagagagcttcatcaggaaggtttctacaatgaggacgactggtatgaagattccatcatggaaatttcgctttccatgatgcttctcctctatcaacagaattgcaggctacaccatggccccagtcttacaagccacccttactc

SEQ ID NO: 42070 - DNA, 256 bp, Zea mays
aaaacagctgtgatacacagatctcaatcccaacacgaaatacatttagactcaaagacccacgctctcaatatgggaacggcacaagtctcatactaaatacaacttatcgaccggcacgaaaacaacgtgcggagacaccacccttgggacatgattacgagatcccacctacataaatatcacgacaacattgatgcactgatataccgaacaccctgtgaactaagacaactagtaccgacactaacgctta

SEQ ID NO: 42071 - DNA, 347 bp, Zea mays
cagcttaagatacatcacatattaaattcacatctaataaagcaaatagcaaaacaaacagaggatcataattctgtcttgtgtctctcagacgagaaattatagcgctcaccacgttcatgtcgaccatctggtgacagggtcatcatattcttataagtgtgcaacatagttaaaagaacaaaaaacacaaaatgaggctacaaaataagcactacatataattcataaataccttctatgcataaatggaggatcagaaatctgccttggttcctctaaaagaaattatggcgctaatatgttcattgccgatcatctcgggaaagggtcatcatatcctcata

SEQ ID NO: 42072 - DNA, 397 bp, Zea mays
gcgtgtcatcaggtccatgacgcacagcactgctttatctatgatgccagtgcaacgatgcccccggcttccagtgtggtcagacagaacctgcctgcaccgacaatactactccgagcgaagcccgaacgcatcaccaccgaggggcgaccgatccacggagagctcatgaatctcccgtaggatgtccgtggtccggcgggccgaaagctatgtctaccgaacgcaggggtaccctccggagcatcgcgccgcgacttctcgattcatgcaggaagacaccgtcaacacgtgcgacgcgggacacaaccttgcagcaccggaccgctcggcactatcaccaccgccgcactgcgagccacctcatgaaatgtcaccgggctacaccctagcgtgg

SEQ ID NO: 42073 - DNA, 223 bp, Zea mays
cctgatatggtggaatgaaactgaagaataggtcagagggatatttcttaatttgaagaaagccccagctcgataaaagagttatgttaacaaacggcgaatgctcttatatctccttgagggagactatgtctacctaaagggttcaccaatgaatggagtatcgcgtttcacggttaaaggaaagtttgacccccgtatatcggtccattccctatacttg

SEQ ID NO: 42074 - DNA, 201 bp, Zea mays
gcttcatcacgaccgcttacacattgaggatgactggatcaatatttcatcatggaaatttgctcttgacgatgcttctcctctctccacagacaagtcagctacaccatggccacattcttacacgccaccccagctccctatgattgacggttacacagacctcaagcacgttctaatgagctatgatgcaaccatatc

SEQ ID NO: 42075 - DNA, 439 bp, Zea mays
tagctcttatgtaccaagtgctctgttagaagtctatgaggctgacgaaccccaagccaatggtgaagaagaaggcttgttaagtcaacggtgatcgagttgagaacagttacggcacatcaaggatcactacataaggacgtgacttacaaccaatgaggtaacaactacagttatgtggtgtaagtcataaggctcaagatcaagctctaagaaagagatcaaggtcactagaaggagaactaattgtcaaaccagaacttggaacagcccaaaagaactaagttcatcttgatctttagtttggcgtggtcctatgtttggagacgttctatgtgacctttgcaggatgttggacctaacacatgtcaatctagatcaagtcaccctgacttgatgaattatgagtccaacatctaagcttaagcatatcaaatgc

SEQ ID NO: 42076 - DNA, 400 bp, Zea mays
  unsure (1)..(400): unsure at all n locations
cagctgtagctctgagagcgatcgactcatccttcactatctctgtctaacttatagcatcggcttgagatatcttgaatatatcttgagtaagaatttctcccacaactttggttacagaagttgtagataaatcacttcttactagcatggtcacaatagtctcatacttttcccgaacggatctaacgaacttatgagtgagatccacatctggtacataaaaaccaagtgccttgagctcattcactatctcatttaactgcgtgaacatatcggatacactttcttcttcttatataatgatttgctcagattgtcctttgcacacatatagctgtgcactcttcacaattgtagntccttcatgaattatcattatcttaatctaaatctcatg

SEQ ID NO: 42077 - DNA, 234 bp, Zea mays
  unsure (1)..(234): unsure at all n locations
gatgtggtctttgtcaacttctaagagaagaaattgccttccatttgttcttcaattgctctttcagccangactgttcgagacatctgaatattcagcggaactactagattgaccttcttgcaaccttttaaccaacccaaggcctgcacggntcaccattctttattgagggatttatcatatcagcttggcaaatctggaagcaaanaacaattttatctttgacagggg

SEQ ID NO: 42078 - DNA, 321 bp, Zea mays
  unsure (1)..(321): unsure at all n locations
tatattatggattgccttgtagtctgcncagcttccttccgcccttctagcagcttcctggcttccatggatagcaatatgcccttggtccgaacgtatcttcatgccaagataggccagatgaacgattgcttcttaacgcattaagacgaccacgaccaattatcgcattgcaaggatattccctgtcaacaatgctaaacacaccttgctcagctctcgtcgtgttgatgaactcccaaggtcccgacaaggggatcttgccaacggtacatcttccttccccgaagccccacaaagatgcgagcacctgaacttatt

SEQ ID NO: 42079 - DNA, 293 bp, Zea mays
tacttgtcaagttaagtaaaagtaccctgcgtctaacggttattctaccctaattaattactggacctatactagcccaattcttatcaacccttcttattcactaaaatgctacgtgtaggtcagtgaccaaatctttatgtccccgaaattcccgcgatccgaaatgaataatactcacctgaagatcttcaattacacgacatatgtagcactttacccttggatatgtcaacttgcccccggggttttaaaaacagacaaggtcacccccaccgagagcacagatcccc

SEQ ID NO: 42080 - DNA, 291 bp, Zea mays
  unsure (1)..(291): unsure at all n locations
gcagcagcatttaccagcacagcaactgcatatcataccattgacatggacactngcgtgctggcgactagacatgattggacccttcgaaaaagctcaaggaggttatacatacttgctggttgccatcgacaaactcactaaatggatagagtacaaacctattgattatctgacttctctgacgcatattcaacgtctggaataccaaataccatcatgacatgacctgcggcccaagttcactacatctataatctttgactccgtgacacacggagcatccacatc

SEQ ID NO: 42081 - DNA, 411 bp, Zea mays
atacaccctttaacgctagtgaaccatcacttcttctaaatacagacacatctacactcgtagaacgacaattatatcctatattgcatagatgactaacagatagcacattgtaaccaatagactcaactaaaaacacattggagatagagcgctcattataaactgcaattttacctaaccctcttaccttgccttgatttccatgaccgaatataattgaatcttgcgaatccttattcttgacgtatgaggtaaacatattcttattccccgtcatatggtctgtgcatacgcttgacataatccagcttgaacccccggatgcataaacctgcaaggcatattaagcttgggtattacgactcaactcatgatgggtactaaaggatagtgcacaattcttaggga

SEQ ID NO: 42082 - DNA, 439 bp, Zea mays
  unsure (1)..(439): unsure at all n locations
ncagcttatacaaccttataccatctattntntcatgcattcattgcttgcctttaagattgctctccctgtaatgattatcttaggaataaaattgagagcatattatcctgcttaataatcaataaaagagagaaaaagatacttacatcactttctctctctcaaatacgaaaggagagtaagaattaacagtgtgtttggtttgagtaatgagatattccattggtttctcacttctcatcttttagttatataatagaataagttgatccatcgccgtctcactctttacaattaattagttagtattaatattaaaataacaaatttatagaatagacatatgatgcaccgtcttattttatattaaataattctttacaccaaacatccctttaaaaaataaatatgttactctgttcttttttagaattac

SEQ ID NO: 42083 - DNA, 315 bp, Zea mays
ttagtcagaagctcgttgacaatcggcgatgctgcccaccttatgccggcgagcgccaagtcggccatgaaaatcagtaagaagactatttctttctcttttctctgctgacacataaaattaatgaatctgaatgaaacaactgaagcacaaaccaattatttttctttctcgccagatacagcaacacaaaggtgaaatatcatctaacacacctagcgaaaaaatggagattggagatcttacacgaagtagaatatatcaagggcgtatggagtataatctggaacaagcacagcacagcaaggagggaag

SEQ ID NO: 42084 - DNA, 438 bp, Zea mays
  unsure (1)..(438): unsure at all n locations
gcttgatggccaagtcaagaatcatgtcccagtgtnatttgtatctgaagntcttagtatatcaaagaaacactatacagaattagagaaggtgttatatgctcgtttgatggcattcaggaagcttcgcattactttcaagcatacaatattcgtgttccttcttcacagccgttgaaagatattatgagaaatagagaagctactggaaggattggaaaatgggcttgcagagctcaacgaattttgtattgaatatgtccatagatcttcgattcaatcccaggcgttagcagacttcattgctgactggacgccaggggctcatgaggaacattgtcgagtacgaagccctgcttctgggtcttcggaagctaanagcaatgggaatcagaagggccatactttaaactgnattccaggttgtttcgggtcata

SEQ ID NO: 42085 - DNA, 205 bp, Zea mays
agacagatttaccactgcccaagcatgtcttcaaaagtgtactctaaagactaccactgaaaatcttctacaatgataatgcatcaactagccgtctgagcggacgacctactttcggcaaaagtcgttggcaacgcatctgattaactaaagaacgcgcggcacaaagagcagaccaatgccgcggggcacattacactacttt

SEQ ID NO: 42086 - DNA, 440 bp, Zea mays
  unsure (1)..(440): unsure at all n locations
agcttgtgtcttgactataaaggggccctcccacttgngctccagcttgcccttggactccgtccgagctgttcggacgagtacgaggtccccttcgctgaactccctcgggatgactgtgtggtcgcgccatgctttggtctgggcttggtatttgtttagggcctgtagggcgaagactcggtctccgtcaatgagatcctttgaagttggctcgtccacgtcggggacggctgacggaactgttcgcggcgacccatgctttatttcttgcggggtcatggcctccgatccgtatagaaggcggaaggtggtaaacccagtcgctctgcactcagtcgtgtttagtgcccagactgcctcaggtaacaaatcggtccatctgcccttttcatcaaggagcatcttcccgacagctgtgaagattattccattggcgc

SEQ ID NO: 42087 - DNA, 360 bp, Zea mays
ctgtctaaccatgtgcgcagatggacggtcaagtcactccagcaaccatgtcttccacggaacctactaaaattataccacaagcaacgctaagtatactaatactcagctagacttacccggtgtgaggagtctactcctctacctctacacatgtatctgttcggctgatgggttaggctgccaaaagcactatctgagtctataaatcaagttctagcctttgtcaacttttagtgtgactctctgaagactaaatgtatacctatctaatcatacatggtatcaaacacttagcaatcaacaatctttcgccaagtcatctcatattcacttgttactcaatgtagcaacatggat

SEQ ID NO: 42088 - DNA, 68 bp, Zea mays
ctgtaccatcaacaccgtcacatatattttgtcaatttctttgtagccgatatgtttacaaattcgct

SEQ ID NO: 42089 - DNA, 394 bp, Zea mays
  unsure (1)..(394): unsure at all n locations
gctgttcattgctgggaagagtaattccacagccgacggaggatgaagctatcgtctttaagagcttcttcagagcaggcttcggttcccccaaaatgacatgataggggaggttctaaagaacttttaaatataccttcatcagctgaccccaatgctattgttagacttaatgtaacactataaaaatcatcaaataaaaataatacatttagtctatttatggtaattatggcactaaatattttattgaagcgtttgttatttatttcatttggaataatttttgattgcgcatgattgaattcttagcattttttcttaaatganaaacccaataaatattataataattagtcccaaaataaatattttatttaaaaataattttggg

SEQ ID NO: 42090 - DNA, 326 bp, Zea mays
atctcgtgccttactacttttatccacgtgaccagtgataacttgagaatcggttttcagaatagcccttcttattcccattgcccttatcttctgagagtccaatagaagtgctttgtactcagcaatattatttgtgcaactgaaatccagtttgactgcataacatgttttagcttttgacgatgctactagaactgcagctgctcctgcaccgaaggttccccaagaaccattcgagaacacccgtcaaacttcggtatccttgcttgtcctttctttgtgagctccgggcgtccagtcagcgatgaagtctgctagcgcct

SEQ ID NO: 42091 - DNA, 366 bp, Zea mays
  unsure (1)..(366): unsure at all n locations
agcttcacagcctcccaggggagctatccgacggcttggatcgagcggaaganggcgggaaaggggttggccaccgtggttgccctcgggcggctctggcgggtcgcggggaggtcgccggagctatgggcgagcttcggggagtttggcacggggcatangatgcaacggggaagacagccgggctctgtgacgggctttatagccgtggcgcgggcgtggtaaccggcggccgcgggcgcacggtggtctcgcacgggcgtgctcttgacggccccccagtgtaacccgcgtcaacacgtgggacttgctttgcctggttcacgggacggctcttcctgctcatatctacctttttatggagtc

SEQ ID NO: 42092 - DNA, 444 bp, Zea mays
gtctgctgtgtcgtttgtgaacgcacttgaattcatgcactagtgttgtatgggccggctgatggtgggagggagggcgggcggacagcgaaacgcatgatcactatcgcaattgattgcaagggtatgaccggaccggaggcttggctggcgcaccttggctccaccgatatgttcccaacatatatcgtcctggccgtgatcgtaagcaccggcaggcagatactgcgaccgactcttgcctggcagcatgaccgcaggaggtgggtatcgatgatcgtcggcggacagatacggaggatctctatctttatgtatttgtatttgcacaagctagagcggatcacattccccattgtctacatatctttctttggacagcacaacactgcgcccttgtgcatttgacccgcgccagtcatcgtatgtatggatgccggagct

SEQ ID NO: 42093 - DNA, 428 bp, Zea mays
agacacatttaagataacagagatcattttttaatgacttgattcggagtgcatgtcaagcggggaatcaagttgcatgccatcatccacacaagaacatcatgacgaccgacatggcgcttgagctactccacatggatctattcggcccgattgcttacataagcatcggcgggaggaagtattgacttggattgaggatgattattctcgcttcacttgggtattctttgtacaggaaaaatcttaaacccaagagaaccttaatgggattcttgagacaagctcataatgacgtccgcttaaggatcaaaataatatgaagcgacaacgggacggagttcataaactctcaaattgattgcttccttgacgaggaagagcataagcatgaattctcctctctctacacgccacaacaaaatggt

SEQ ID NO: 42094 - DNA, 270 bp, Zea mays
  unsure (1)..(270): unsure at all n locations
cccctcgagcctcaatggctgatagcacatataaccctaagtgctttgaccccctcgtacctcgaggcacttataaatccaagtcatcggggccctcgagacctacaacacctataagcctaatgcctcgaactcatgcganccaagataataagaatataactggtgttcaaggcagtgcgtcccccgagcactaacatcacttagtcgtttggggccctncactaaccctagggtccttaaagagtccttcaccttgtactctgaggg

SEQ ID NO: 42095 - DNA, 364 bp, Zea mays
acatgccgggaaaaatggtaaccggtatacctattacctgagtgaagccgggcgcggactttatccctcatgcgacctgagactgggtcttccatgctagctatggtgggtacaagtgcggtcactgcacggcggcagccggtgtcaatggagcattatatgccaaggcggtgaggcctggacgcgaacggtgaatcgatggggacggttgtcatgtgtggggtcagagtaccctgacatgacgtgttgttatgtttaccttgcaagggttaaaactcgattcgaatcgtctgcttctcgcagctaatgagactgcttgattacttgtactgcatcgagtaagaagtgaaatgtggattatatg

SEQ ID NO: 42096 - DNA, 432 bp, Zea mays
  unsure (1)..(432): unsure at all n locations
agtcacctgctgcatgcaagcttcgntaatttactctcatcaaccttcgtccatagcccattatcctcaagggaataatgtttcatggacgaaggacgttaacatttaacattntatgttgccttgttcttaattcatagcacttgagaacaagtccccaacaagaacaatatccagtttgcagggatattccctttcaacatctgtctcgactctcgatccaaaggacaacattccctttcttcagcattgccaccgttgaactactttcaatatttcatcatcagaattatcctcactaaggcacaagaagggtgagaaggaacagagtggcaaagcatcagaaggtgacggtggggagatcgtgttggagattggagctctggaaaatagaaactatgtcaccagcanagctgataatgactcgaatac

SEQ ID NO: 42097 - DNA, 494 bp, Zea mays
  unsure (1)..(494): unsure at all n locations
atggacgtaaagagtgccttcctcaacggaccaatcaatgaagaggtctatgttgagcaacctcttggctttgaatatagtgagtaccctaaccatgtttacaaactctctaatgcgctttatgggctcaagcaagccccaagagcatggtatgaatgcctaagagatttccttatcactaatgacttcaaagtcggaaaagtcgatcctactctatttactaaaactcttgcaaatgacttgtttgatgccacatctatgttgatgatatcantattgggtctactaacgaatctacatgtgagggaattagtaggatcatgactcanaaattcgagatgtctatgatggnggagttgaagtacttcttgggatttcaagtgaagcaactccaagagggcaccttcattagccaaatgaagtatattcaagacattctatacatgtttgggatgaaggatgccaaacccatcaagacacccatgggaactaat

SEQ ID NO: 42098 - DNA, 321 bp, Zea mays
gcttgcggtaacatgccaaggagacctacggcaagacggcatcggtatcggattacctccagcgccacggcctcctcgcccagagattgcgccgggagtggctccccgaccccgagcgacgcgacgagcaaccttcttctatcggcggacggtgcggtgccgacggcaacggcccacgtacgcgccctgctgcttggacgggcccgcgcaagcagcccggcgcggcacgccacgggcgcgacttccatggtttcgagctggtggcggcggccagcctacacggaaagaggcggtgtgccggactgccgggtcgtcgtcagc

SEQ ID NO: 42099 - DNA, 473 bp, Zea mays
  unsure (1)..(473): unsure at all n locations
tcccattatgtggaaaatgtattgagtcgctttggttttagtgactgtgatcctgctccaacaccttatgaccccagtgtgctattaagaaagaatcggagaatagcaagggatcaattgacatactcccagatcattggctcgctcatgtaccttgcaagtgcaacaaggccagacatctcttatgctgtgagtaagctaagtcggtttgtgtcgaaaccaggagatgatcactggcgtgctcttgagagagtgttgcggtatttgaaaggtactatgacatacggtattcattataccggaaacccaaaagtgctggaaggctattgtgatgccaactggatttctgatgctgatgagctttatgccacaagcggatatgtnngttctgttggaggtggcgctgtttcctggaagtcttgcangcagactatcttaacgaagtctacaatgggagcagaactcgcagcatt

SEQ ID NO: 42100 - DNA, 410 bp, Zea mays
  unsure (1)..(410): unsure at all n locations
agcttgaagaatntaagtgcaatctcaaccttgtgcggttatgatagacggagggtgttaagatatgatgctaatcctgataacgcgtgtgttatcagatatagtcagttagtaatatcctatattttgggactagatacggcagagtttgttcagcaatacatagatcctgtaggtcccatcttaaaggttgttactcatgtaaatctaagcatcattgctttcctatttaatagaatcatgcggcctcgacagaggtgagaacgcttcatcaatttctacagctttcacatccacagtcacattgttgtgcttcagctggccctggattntattaaagatagcttcatctttccttgtgcttgcagcagtaatggcctatcatagcataagtgggcataactaacact

SEQ ID NO: 42101 - DNA, 439 bp, Zea mays
  unsure (1)..(439): unsure at all n locations
tctanagggagaacatgtgataggtctaacaaatgtacatttcgaaaaagatataccttgtgcagcttgtcaggcaggttaacaggtgggaggagcgcatcacagcaagaatgtgatgaccacgtcaagacccctggagctactgcatatggacctcttctgacccgtcgcctatctaagcatanggggaagtaagtatggcttagttattgttgatgattnttcccgcttcacttgggtgttctttntgcaggataagtctgaaacccaatggaccctcaaacgcttcctcaggagagctcannaatgagttgagctcaaagtgaaaaagataagaagcgacaacgggtccgagttcaagaaccttcaagttgaggagttccttgaagaggaagggatcatacacgagttctccgctccctacacaccacagcataat

SEQ ID NO: 42102 - DNA, 347 bp, Zea mays
  unsure (1)..(347): unsure at all n locations
cgagggactctgatcctncccgctgtcgtagcgtcccccacgcctggggtggtagcctcggtgcaccttctcatcgaagtgggctcgacagtcgcggcggtggtgctcgttgccgaggcgacccngggctgcgggcgttgcatcccacgtgcgcccggtgtggaccgaggcttccctcatgaatcgagaagtcgcggcgcgatgctacagggggtacccctgccttcgggaggtagaagctttggcccgtcggacagcggcatcctccangagattctagagttcttcctggatacgccgcccctcggtggtggatggctccggcatcgctcggagtagtatggatg

SEQ ID NO: 42103 - DNA, 358 bp, Zea mays
  unsure (1)..(358): unsure at all n locations
tatcatatgagaatggatgcaagagcacgaccatatgttattatagatggggagttatacaaacatggagtttgctctccactactcaagtgtctatccaaagctgaaggtatagaattgatgaaggaaatacatgcaggaatgtgtggatctcacattggatttatacctttgctggggaaagtcttcagacaaagattttattggccgaaggtagcttctgatgcagcggatctagttcaaaaatgtgaaaattgccaaaaatgcgcaagagaccataaacaaccttcatcgttaacccatctaatacaaccaacctggccattgcaaagatggngcctggatttgttaggtccac

SEQ ID NO: 42104 - DNA, 288 bp, Zea mays
  unsure (1)..(288): unsure at all n locations
gtgattgtggtcacgcatcatattattcacaactctctcttacgtgtcataaagaattacaacgcatgttacaacaagaaagattaccacatgctattgactatgtcttcatgacttacctagcaaagatatcgatacgactgtatattatgcattatttagcgaacacatagttntaatgatctattctcatttcacacagcgtgctacttctatatatatggagagcacatgtattctacatcatctaattatgcggttgttcaatattataccacatagacatac

SEQ ID NO: 42105 - DNA, 349 bp, Zea mays
ctaagctgtgacaatagggcgcatgaatatacgcctgatatcttctcgtattggcagatcatgcgtcacatagaaccattctgtcatgcagtctccgggccatctcttgccataagatggcacagggcaccttgacccggaccgataaacgaaactgtggcagacaaaattggtgagatactgttccttaccacaaggatacgtgtcatgtgactattcatgcatattggaaaagcttgttgcgtaaggacttacactatggcttatgacgggccacacgaacatattgagctttataattgactcggcggtcagttgacggagatagatttcgaatattttcagcacc

SEQ ID NO: 42106 - DNA, 265 bp, Zea mays
aattgtctccaagacgtctagtacatttaccattcttttctcttttggggtcactgatggccccttttggttttttgctgtcccaatgattgctgtatgactcaaaacttctgatgttttggagccctcagttgcttctcttacctcctcaattttttctgtgagcggcgcttcggttttctcttttgtttctgacaacaaaatgtttgattgttctgattctatctttggtggcacttcggccgtttctacgatctctggaaca

SEQ ID NO: 42107 - DNA, 454 bp, Zea mays
  unsure (1)..(454): unsure at all n locations
ctctcgcgagacctttccacatttctttctaaccaaggtaaattcattatcgtatgtgatattctatgcatatttactttatttgttcttttgtatggtgtactgtttgtttcctaatttgaatggatggatgtatgtatgcttgcaatcgcatatagaacgatccgattgaatagcccgatgaactctcaggagaagcccctgatcagcagtcggttggtggaggcaagtgtcccttgacctatctctgtcctattcattctttaattcacctcccgctttacacatttatgcctaaggattgactagttntgttatccatgtccttgtttacctatttgggttggattattattgcttagctttatgctattgcttaactctaatcaatgaacatgatgagaatatctatgatacgctgttttcccttctcttattatgatgttatacttgt

SEQ ID NO: 42108 - DNA, 359 bp, Zea mays
agcttctcctttatgacgaaggcacacaagatgtagacagaccctaagatgataagagtaaacgccgaagctatcatcagatggacagcttcggctcgcaataaagatgatgaataatgatgatgaccgaaagaggaaaagactacttagtccttaataacttgtattacgatcatgtgtaaatgttgaggatataaatctacttttgctcgggctacgtcccgtacctataaatagatgaacagtaacacagtactgttcacgctggattgcattcactttcttgcatccacacattcgagcaagctgaaggtatcaatgcaatattaacaatgttgatattcattatggtttatgga

SEQ ID NO: 42109 - DNA, 463 bp, Zea mays
ttatcatcagaacaatcaaccaacattgttaatagagaaaataattgtaattttgtcttaggtctcctatctcttaaaaaggtcataaatgtaggattccaaggtgtgaaatccatcttgtctcgaagtagaaaaggtaagaatcattagagcagaacagtaaaaggtgagataggatcaagataagtatagagagaatcagagtaaggtaagtatagaatgaatcagaagaacgtaagtaggtaaggttctgtccatttctatataggtttcgtcctacagtcaacattccctctgataccacttctgtcacacccggctttaatgaacatagccaggtgcatctcatacatgcaccatagaatacaacatatataataacagagtgtatagagataaatgtcataaaacatcagagtatttattacatagcggaaaattaatacaaataaaagataatatc

SEQ ID NO: 42110 - DNA, 388 bp, Zea mays
  unsure (1)..(388): unsure at all n locations
agctntagtctttgtgtatggacgtcgcgcggttttatgctatggacatggagttgtagcgtcaccaaagtgccagtgtcagaatgcctggtctcgaggtcaagctgcgccaaaaccatgccaaatgaatttggtttgagttcaaacttttccaggatgtgttcaagggaatttggcacgactttgatatttggatctcctggctntgagtttcgaaaaacagagaacacagatgatctttgggaagaggtctgaaattcagaaattcagaaatctgaatttctctaagggttcatagatcaagggctgatttggggatttatttgagttattttggctaagctntctgaacctttcttggtgctcaataaatatactttaacttata

SEQ ID NO: 42111 - DNA, 407 bp, Zea mays
ttctcgactaagtcgggggcagggcctcatggacgggtgattgtacgcgtaagcggcaaggccgaccgagccgatggattcccacgcctctgggatacggatacctcactcgtcccttccgcgaaaagcagctcttgctcacacaaacatccctcttaccgacgaagtccagatgctcgaaacaggaggaaaaaaggcgcagcttcgcaagtgcagcgagggtgttttcttctggcctcggcggccgcatgaagcacacgctacaagatgatcggatcctgcatgctcgggtcttcacgccgaatggagctgtagcaccctcggcatcgacgacgccttcagcaaagcccgacccatcctctggcggcgccgcggtccatgggctcctccgggaatccggaccgagc

SEQ ID NO: 42112 - DNA, 347 bp, Zea mays
  unsure (1)..(347): unsure at all n locations
agcttggcggatgatgtaatcaatgctctctcttaaagcttcgggagcaggagttgcaacattntcagacgaagcttgttctgtggccttttcttctgttgctttntcttcaattccggcaggctttatcttagtgggctctgaaggcccaccttcggttttagtttgaattattgtagcttcgacttctgcttgtttcgtttcagcttcgcgttgtgccttagaagctntgataattnttctggaaggagcagtgtcggggaccataattaggggtacccccaagactcctaatctcagctggtaacccccatcagcacaaagctgcaaaggcctgatgggcgtga

SEQ ID NO: 42113 - DNA, 413 bp, Zea mays
  unsure (1)..(413): unsure at all n locations
ngannatgtgtttcctccatcattttttgatatgcaagtacacctaatcatacatctcgtggatcagataaaaatattatggccactatatttacatcatatgtttcagttggagcgatacctgngagtattaaaaggttatgtgcgaaatcgcgctcacccagagggttcaatcatggagggatacactacagaagaagtgattgagagctgtatagattacatcagtgacggaacaatgataggtgtgactgtacctaaacatgagggtaaactatgtgggagagggagaaggggcaagaaaacttttcgcgttgaggattacaagctagtacattgtgctcatggtagtgtactacaacatctcacgatagccgagccttacatacaggaacacctgaatgagcttcgta

SEQ ID NO: 42114 - DNA, 324 bp, Zea mays
  unsure (1)..(324): unsure at all n locations
agcttgtgaaggttcttcatccncacatgtgcttagcggcgatgccacagccagcccatgctagtcttagctattaagcatgcatctagaccggcctcttcttttgcaaaatctactaaataaagtttgccgtctaatacacccttaaaagctagtgaaccatcacttcttctaaagacagacacatctacatttgtaaatagacagttataccccatatgacataattgactaacagatagcaaattatatccaagactttctactaaaaatacattagagatagaatgctcattataaatcgcaattttacctaaccctttt

SEQ ID NO: 42115 - DNA, 435 bp, Zea mays
  unsure (1)..(435): unsure at all n locations
tatattgcatatgaccagtgactctctcaattaatgactttgccacccagatttgtctaggtctactcttatttggtggacctacgaatgtaaccttaatctttccatttgcaacctttcttataacatagtgagcattgaaagcaaatggtcttgagtgcttatgcaaaggagttggtggtttatctctgcagttgtgggcaaaatgaccttcatttccacaactcaaagcattgataggctngtgagtctgctttggctcgtattgagtgatagctttcttttgcacaaaagcattgtatccaataccactcttgttatttttcataacagtgttcataagcagctcattttggaggtattgacccttgttgaactttttgcacacttgtgcangatgttcattttcactttttatgttcatgacctaaatct

SEQ ID NO: 42116 - DNA, 469 bp, Zea mays
  unsure (1)..(469): unsure at all n locations
gcttaaagccatggtaagtagcatatgcaagttatatgcgaattgactcaagcctacctacgggtgcataggtttcaccaaaattcaaatcttcgacttgtgaataacccttggccacaagtcgggctttgttccttgtcaccacaccatgctcatcttgcttgttgcggaaaacccacttggttcctacaacattttggttaggacgtggaactaaatgtcatatctcattcctcgtgaagttgntgagttcctcttgcattgccagcactcaatctgaatctcttagtgcatcctgcaccctatatggctcaatagaggacacaaaagagtagtgttcacaaaaatgagcgactcgagatcgagtggttacccccttatgaatatcgccaaagatggagttcacggggtgatctctttgaatcgcttggtggactcttgggtgtggcgggctntgagcctatatctc

SEQ ID NO: 42117 - DNA, 442 bp, Zea mays
tttgtcatgtagtatttgtatgatgtactgagataaacatttatttgtatttgtacttcatgtttatgctattttccatttaaatacatttttcggcgtacctcatatcgtaagtgattgcaataaattgttaggcatagagttagattatggaaaatacatatttttggtaaatattagtgacaatttcctattgttagtatgttatggtgcaaggatgggtagggtcatccctccacatgatgttgtcacaccaactgcttggtgcacttgcacttaatgacttcattattggttgtatcctataccctacgcttcacataacctatattggacaatttgtctcaacactacaataattcatggtctattggagatctcaagatggtgcacccacccaatttatatgtaatcgactgtcacttactcaactaaacacata

SEQ ID NO: 42118 - DNA, 460 bp, Zea mays
agcttcaagacataaaaagacctttgcattttcttctggaaatcataagaactcaactagtggtcaacatcgtaatcatggttttcacataaaccataaacaacatgtacacaagaaagtccgtggagataaacaatcccatggaaataagccaaaacactgttacaagtgtggttgtaatactcactttgcggctacttgtcgtacaccaaagcactttggtgatctttatatgaaatattccaaagagagcaagaacaagaagacacgatatgaagcacacttcaatcaggcaaatgaggaaaataagcaggatggttgctcgcttgagattcctaaagagtcaccgaccaacaatgttcctactcagccagaaaatcttctcgacgacatgatcgttgattacaatgtcaacgacatgatttgagactttagatcacatatctaataagatctcatg

SEQ ID NO: 42119 - DNA, 308 bp, Zea mays
atataagtgcataacccctatgctctctgctacaatatcaaacacattatagagtaccaaaaactcactagacggtcggtggctgtctgagtgcataacacatcaggattctgatgatcagaacccctatgcccttgcatatacaccttcacattcatgggcgtacgaccggatttgacttcctgtacataaaagttgcaatgacacatctctatgtaattcaaagttacaacatactgtgatttaccatttgcttatccaagcgcacatgaccatcaccgtcgtaattgtggaacgactcagtccca

SEQ ID NO: 42120 - DNA, 320 bp, Zea mays
  unsure (1)..(320): unsure at all n locations
ctagaatcaagaatattgagctcatgcctaagtctggtaaaagaatggtcatcaagtggctaggtaaagatatcggctaattgatctttattactaatgtaagaaatctcgatatcccccttttgttggtgatccctaagaaaatgataccgaatggctatgtgcttagtgcggctatgctcgacgggattgtcggccattttaattgcactctcattatcacatagcaaagggactntggttaatttgtaaccgtagtcccgcagagtttgcctcatccaaagcaattgcgcgcaacaatgtcctgcggcaatgtactc

SEQ ID NO: 42121 - DNA, 409 bp, Zea mays
cggatgcctgaaagatgcggtggctaatatcccgatgtccgaggcgcggtggcttatgcttcggtcctcatcatgattgaagcggtctccgcgacgctagttgtactaatggatactgtctaaccctctctgtattcccttttattttctggatcggtcgtgctacgcgctcttccaccaagccccatgcgttggcagagcgaggttcgttctgtgcctttctcggatccgggcggatcccccagcgaggcgtcgttcctcaatggcatgaatgtggtgcatcgatcacccccccccccgagttcctaatgttgtgatgcaaaaaaaatcggcctactgcgaaactgagtttgaggtagcctcaaatttcttggtgggtcctttgtctgcttggagtttgtccaaaagt

SEQ ID NO: 42122 - DNA, 378 bp, Zea mays
catgcaagcttctaaagggagaacacatgttaggattatcttatgttcattttgagaaagacatgatttgtagcgcatgccaggcaaggaagcaagttggagtccatcatccacacaagaacatcatgacgaccgacaggccgcttgagctactccacatggatctattcggcccgattgcttacataagcatcggcgggagtaagtattgtcttgtaatagtggatgattatactcgcttcacttgggtattctttttacaggaaaaatctcaaacccaagagaccttaaagggattcttgagacgggctcaaaatgagttcggattaaggatcaagaaaataagaagcgacaacgggacggagttcaagaactctc

SEQ ID NO: 42123 - DNA, 453 bp, Zea mays
  unsure (1)..(453): unsure at all n locations
taagcttaactctcacgagaccttgtctcatttctgtctaaccatggtttactcattattgtatgttatattntatgcatgtctaatctactgattctcttgtatggtgtaatgttggtttcctaatttcaatggatggatgtatgtatgcttgcaatcgcttatagaacgatccggttggagagcccgaataactcgcatgataatcccctgatcatcagtcggttggtggaggcaagtgtcctttgacctatctctgtcctattcattctttaattcacctcccgcattacacatttatacttaatgattgactagctgtgttatccatgtccttgtttacctatgtgggtcggattattattatntagctctatgctattgctcatactctaatcaatgaacatgatgagaatgtatatgatacgctgtcttcccttctcttattatgat

SEQ ID NO: 42124 - DNA, 368 bp, Zea mays
  unsure (1)..(368): unsure at all n locations
caagagccagcccatattggtcttatcaattaagcaagtgtcgagttcagctatattaanatcaacttagtatagctgaccctctaacactcccttaaatgctaccgaatcatcacttcttctaaagatagtaacacctatatctgtaaaaagacaattgtagcccattttgcataattgagatactgaaagcaagtcgtaatctaaagaatctacaagataaacattggaaatagaatggttaggtgatatagcaattttaccatgtccttngaccaaaccttgatttccatctctgaatgtgaaagctctctggggatcttgggttctctttgaagaagagatgatcactttctccccggcatgtg

SEQ ID NO: 42125 - DNA, 389 bp, Zea mays
  unsure (1)..(389): unsure at all n locations
atccttaagnctcctcgaaatccttaagggtgaatgcttaaaatgattccaacatgctttcataagtgcatagtctgtcgtgagcatcacacttttattatgacacattgcacttcacagtttctatgataaagatatgttctcattaacctaattatgtgcacttggcatttaaggccaaaatctgtattcctctcaaggcacatatttagggggagcaatctatattatatagaactgtttaagcttaattgacatatcattttaatcatgtctctttcctgtggtacattcgcatatttcctatctctattgtgctaaagttaagactaatatgtcttcgtgagtatctcgtgtattatgtcttatactgaagggaaatggagtat

SEQ ID NO: 42126 - DNA, 421 bp, Zea mays
  unsure (1)..(421): unsure at all n locations
agctctcanatccaaactcatgcacatatatttgtgtgagctaatactaccaaaccgaatttgaagtgattgtccaattcttttcatgatataaatgcttgggcaagcaattcaaattcaatcttgaatttatttcatatctttgtataggttgtcatcaattaccaaaaagggggagattgaaagctctagtttggttttggttaaatgatgaaacctatatgactaaccttcgatctaagtgtgtcatttgataaggtagtcctatctaagttgtgaagctaggtggtgatgttgatgatcaagtgctttgcaattggaaaagaagaaggagaataacaaaatgagctcaaggcaaaggtatacaccatatggccattttgtttagtgatcaagacacttagcgagtgtgatcacgttt

SEQ ID NO: 42127 - DNA, 499 bp, Zea mays
  unsure (1)..(499): unsure at all n locations
tctnctcaattggcgccactcctactctctctcgtatatcatcattccggtctcgatctctccttgtgtggccacatatccagcgcaacatacgcatctctgccacacttagttgttggacatgtcgtcttttagtgggccaacattctgctccatacaacatatccggccggattgctgtcctgtagaatttgccttttagtttgcgtggcacccggtggtcgcataatacacccgcagcttgtcgccacttcaaccatccggctgtaattctatgactgacatcctcatcgatgtctccctccttttgaagcattgatcctaagtaacgataagtgtctttcttgggtaccacttgcccatcaagactaacatcgccatcctcataccccatggcactgatatcacacttcatatactctggtttagacctactaagcctaataccttgtgctttcagcgtctggctgcacaatttcaacttttgagaaacaccact

SEQ ID NO: 42128 - DNA, 327 bp, Zea mays
agcttgtgcaaagtccactctatctaatcttcttataaacccgatcctcgtgcaacatgacaccagaaggtccaacacaacaagcgttgaatgaattcagaatattgcagagcatatcagtacaagagacctggttcaagagtttttggctttcaaggtttttcctagtttaaaagaatgggaaatgccgaagctaaagggggagaagaaagaaggtgaacttgtgcgtttaccttactatttcaagtttaagaaatactttaaaacaccttgccaagagtggctggatacaattgaagtaatgtgcaatgaaatacttggcaacta

SEQ ID NO: 42129 - DNA, 453 bp, Zea mays
  unsure (1)..(453): unsure at all n locations
ctagaatcaagaatattgagctcatgcctaattctggtaaaagaatggtcatcaagtggcttggtaaagatatcggctaattgatctttagtattaatgtaagatatctcgatatcccccttttgttggtgatccctaatataatgataccgaatggctatgtgcttattgcggctatgctcgacgggattgtcggccatcttaattgcactctcattatcacatagcatagggactttggttaatttgtaaccgtagtcccgcatggtttgcctcatccaaagcaattgcgcgcaacaatgtcctgcggcaatgtactcggcttcggcggtggaaagagcgaccgatatttgcttctctgaagcccaagacaccaatgatcttcccaagaactggcaagtccacgatgtgctctctctattgattntgcaccccgtccaatcggcatccgaa

SEQ ID NO: 42130 - DNA, 384 bp, Zea mays
  unsure (1)..(384): unsure at all n locations
agcttcagaagatcacgacttcattatcttctggagtcggcacagtcctttctccgtcatctgcccttacgatggacatatctcgaatatatcttccnctcatgttttcaaggtgactttgcccaatagttgattttccgaagactgaatggcttggtcgccatggtcgatcttcggaatcctcacccccgctgtctgcatcataactatcactttcaccagtatcttcagataagccttccanaatctccctagtaattttctctgtatttgtttttgctattgattcaatgaagcccagatttttctcctcanaaaggctcagcttcacttcggcagcaactttcttatcctcatacatcccttcggaaatcctgcctctcg

SEQ ID NO: 42131 - DNA, 305 bp, Zea mays
tgtggcgccctctggtgtcttggcgcatccgaagtaccatgtcttccacctggaagcctcggtgccgaaaccctctggcatggtagcatcgcagagactgctgataccgtgccgagtgtattaatgccacgtcccgagcttcttcgagctagtccagtgagtcttctcagctggtctggttgcttcggtcgtcgtatgcctttgtcctcggggaaccgtattctaagtgtgtgggcaagatagcctcgaccccatatactagaaagaacggtgagaaacccgtggctcggcttggcgtcatcctc

SEQ ID NO: 42132 - DNA, 405 bp, Zea mays
  unsure (1)..(405): unsure at all n locations
agcttagccaaaataactcatataaatccccttatcatcccttgaactatgaacccttanagaaattctgaattctgaatttctgaatttcagaccccttcccaaagatcatctgcgttctctgcttttcgaaactcanagccaggagatccaaatatcaaagtcgtgccaaattcccttgaacacatcctggaaaagtttgaactcaaaccaaattcatttggcatggttttggcgcagcttgacctcgggaccaggcattctgacactgccaccttggtgacgctacaactccctgtccctagcctaaaaccgcgcgacgtccatacacaaaagacaaagcttggtctggtgaacaaatccttcatagcgatctttgccaaattcgcgaagatttgctccaat

SEQ ID NO: 42133 - DNA, 340 bp, Zea mays
tgagcgggaccgcaaggactacaagaatgacctccataatgtgtatgcccgggagctggatgtgacccggaaggagaagaagctggctaagaaggaggagcacctggaccagatggaggaggtcatcccggagctccaggcgaagctgaatgccttcaacaagatgctggaggagcagcgggtacagtataccgaggatgtggagagcctacaaagggtgcatcatgggctcgatgacagggccagaagccttgccctggccgaagagaacctcaaggagaaggatgcttccctgtataagtgggcgacgaacctcgcttggtgggagaaggacctcgtc

SEQ ID NO: 42134 - DNA, 394 bp, Zea mays
  unsure (1)..(394): unsure at all n locations
agctttaccctgtggttctgactataagntggttacgggaggtgtgccttatagcagttgaccatttccagcatctgcgtaatgaggactctatggagaagcctcgtagtgagaccctggccattcacctcggaagtgaatacgggtctagctaacccgggcaaaaagggaatcgcgactcatgggtaaagatgcgccacctctgcagagtgtaaaactgatatatcagccgtgctcacggttatgagcagcctggactcctcacatgataattgaacttgaagatggaaataaatcgagatccgatgatctgacaatgggttgcttaagtgggtttcacttaagtgtttttgaatactcttgtcctttgctaatggaaatcttgggattacac

SEQ ID NO: 42135 - DNA, 489 bp, Zea mays
  unsure (1)..(489): unsure at all n locations
tctgcatttatattntgtgttaccttgcttgtgtgttntaccttactagtttagttataagctagcgaataagattgaaactatgttgcttaactctntgcggtaacacttagtcaaaaccatagttgcacataaggtagaactcactagtcaaaattgtagttgcatataaagatagattatttattgcgtatatttgaactagaaagaaaatagaggcgtagtagtttagacgagaaattagattttctaattcactcacctcttagacgtcatcgttcctttcactaaggttgcatgccattatccctcttgggtgagtaattgagctcaagaggttgttatttaataaagtgttctagataataatatattatatgtataaatacttagtgcgtccacaaaaaattatgtacagttgtacccgtgcacccatactacatgtatactatctncgttctnttttatttgtcgtgtttaagttaaaaa

SEQ ID NO: 42136 - DNA, 396 bp, Zea mays
  unsure (1)..(396): unsure at all n locations
agctntatagtaattgaagttccatgttgaatcattcctaggttcaacttcttcatttcttggcataacgtaatgtcagaagtcttcattgtaagacaatgatagaaagccttgctacttaacgcatctgccactacattagccttgcctaggtgataatgaatctccaattcataatctttaatcagctcaagccatctcctctgcctcatattcaactctgactaggtaaagatgtactntaagctnttatgatatgtataaatatgatagatattccccagcagataatgacgccatatttttaaagcatgaaccacaacagctaattccaagtcatgagttggataatgctccttatggcggcgcaactggcttgaagcataaactatcact

SEQ ID NO: 42137 - DNA, 415 bp, Zea mays
  unsure (1)..(415): unsure at all n locations
ggctgcccaatgcactgtgaagactctccncagaattggatacataattggagtctcgatcagaaacaatggacttatgtaccccgtggagcctgattacttccttcatatacaaggggaccaattctgaagctgaatttgtggtcttcatgggaataaagtgcgcagacttagtcaagcgatccactaccacccaaatagcatcactgtcccgatgagaacgatgttagcccaccacaaaatccatggtgatatgctcccacttccactccggaatttccaatggcttcagcaaacctgcatgcctcttatgctcagccttcacgtgctgacatacttcacatgcggccatgtacttataaacgtcaaccttcatccgcttccaccagaagttttgcttcagatctcggtacat

SEQ ID NO: 42138 - DNA, 352 bp, Zea mays
  unsure (1)..(352): unsure at all n locations
gcttgtcgttccaatntgcatgcaaatatgaatgccgctgcaagcttggtgttngaattatcgaatntccaaatatgtatgtagttgcaaacttgctttgcttatttgcagatgtcacaagcagaagagccaatgcctcaactagcgttgactgagaatgttcgagtgccagagaacccagctgaagagcctgagaaagagattgctgaagcagctgcagagaaagaggtgaagaaaagaaaagctatggcacctagatcagaggtatggcagagcttcaccaagatcatagacaataattctagtgttattaaggaagctaggtgcaactattgcaagatttgtataaagt

SEQ ID NO: 42139 - DNA, 506 bp, Zea mays
  unsure (1)..(506): unsure at all n locations
catgttgcgccgagccaaaccagatatgtgcctcttctctaaccatcctcaccctatctacatcaacctagaaacaaaaaccgatccacgccatccggtttgacccataccaattccagcttcaactctactaggtccttgatttaattatgtgtcactatgataattacatattttaatgaagaagtttcagtagattgaaatgaaatatagctcttacacaacattgaactgaaattgatgaacaataagatagcattttagataaacaattgtggtggactcatgttgatgatgcaaaaataattgagcaccatgtgttatactatcatatataggaacatcgtaaacttcttatgggtccaagagtctaaaacaataaaccacaatgaggtgattacagtgaacttacatcatgatatcatcctgaactgagttgaagcgtcgtgatggtgaaatgagcatatatcagttnttgtcgtcttcaatctgcacggataatcata

SEQ ID NO: 42140 - DNA, 491 bp, Zea mays
  unsure (1)..(491): unsure at all n locations
agcttaatgccggaatagccatcaaggaagctctctcactcttctcatccncccattgtctcatggcaaagggagatgctaaagtaaaaatcatcaccgatttaaatgatataaaagatgatgatgatatcgatgatgttgatgatgatggctattcatatgatgatcttgttagaatgttaggtgaggccgatgactacatgcacaaagaaaaagaaaaaattaagaccttgaaggaattgtataaaaacctccaagtgtcttttgaggagctcaagacctctcacaatgacctcaaagaatattgtgagaagcttgcggatgctcaaaaatcatctattgtgcatgaagttgaggtggtcactaaagatgttggagtcacttgtgacttacttgatagtcttacaagtgaaccactacctactaactctatttgtgataaatgcaaaatctctctcaatgataacattgctctcgatgaatcaaaaatt

SEQ ID NO: 42141 - DNA, 439 bp, Zea mays
tggacgtgaagagtgccttcctcaatggaccaatctatgaggaggtctatgttgagcaacctcccggctttgaagatagtgagtaccctaaccatgtctatatgctctctaaggcgctttatgggctcaagcaagccccaagagcatggtatgaatgccttagagatttccttatttcaaatggcttcaaagtcggaaaggccgatcctactttgttcactaaaactcttgacaatgatttgtttgtatgccaaatttatgttgatgacatcatatttgggtctactaacgaatctacatgtgaagaatttagtatgatcatgacaaagaaattcgagatgtctatgatgggggagttgaagtattttctatgatttcaagtcaagccactccaagagggcaccttcatttgtcaaacgaagtacactcaagacattct

SEQ ID NO: 42142 - DNA, 407 bp, Zea mays
  unsure (1)..(407): unsure at all n locations
gcttgtgaagattcttcatcccaacatgggctattcggcgatgccatagccaacccatgttagtcttagcaattaagcatgtgttgagttcagctctattaatatccactaagtatagctgaccctctaacagacccttaaatgctattgaatcatcacttcttctaaagacagtgacacctatatcagtaaaaagacagttgtagcccatttgacataattgggaaacagaaagcaagttgtaatctaatgaatcaacaagaaaaacattggaaatggaatgggcaggtgaaatagtcaatttacccaaacctttgccaacccttgattccatccncgaatgtgatagctcggtggggatctttgtnttctcatatgaagagaacatccttttcttccccgtcatg

SEQ ID NO: 42143 - DNA, 401 bp, Zea mays
  unsure (1)..(401): unsure at all n locations
gattcttcatcccaacatgggctagtcggcggtgccttatccaacccatgttagtcttagcaattaagcaagtgtcgagttcagctctatcaaaatctaccaagtatagctgaccctctaacactcccttaaatgctattgaatcatcacttcttctaaagacagtgacacctacatcagtgaatagacagctgtagcccattttacataactgagaaacggaaagcaaattgtaatctaaagaatcaacaagaaaaacattggaaatagaatggtcaggagatatagcaattgtaccaagtcctttgaccaaaccttgatttccatccacgaatgtgatagctcgttggggatctttgtttntctcataagaagagaacatacttctctccccggtcatg

SEQ ID NO: 42144 - DNA, 365 bp, Zea mays
  unsure (1)..(365): unsure at all n locations
gcttaacatcctcatgaatctctagcanaatgttgcgaatactcggtggtaccccatcaaacacgcaagcattcctttgtttccacaaccgccaagacaccaagataactagggaattaaacccctttctcttactatttggcactttctgctcagccttcctccaccaatcttggaaaaccacatctgttatttctggagccaaaggcagcaatcccaccttgttcaaaatctgggcccaaatgtctctagcaaaaacggaagccaccagaatgtgttgtgttgtttcctattgctgatcacaaagaagacatttatcaggatggtctaatcccctacgagctagtctatccgcagtccaacac

SEQ ID NO: 42145 - DNA, 476 bp, Zea mays
  unsure (1)..(476): unsure at all n locations
ctaagcttgcctatatggcgcataattacacctttgatatcttctcgcactgacaggtcattcttcacataaaaccattctgtcatccagtctccgggccatctcttccgaaagggtggcacgagacagcttgacctggaccgagaaacgaaactgtagcagccaaaattattatgatactgttccttacccccaaggttttgtttcgtatgataattcgtgtatattgcagaagctttttgcatcatgcttcagaccttggcttcttacggcccacacgaagatattcagccttatgattgcctcgggggtaagttggtgaagatagacttcgaagattttcagcacctccacaacgaagctgctcaagggaaatcgcagtccagctgtcaaaaagcttcggtacactacgacttcattntcttcaaggtgttggacaagtttttccccttcgtcggccctcacaatggacaaat

SEQ ID NO: 42146 - DNA, 368 bp, Zea mays
  unsure (1)..(368): unsure at all n locations
agctttcttcagtgccatagcgagggtctatggcttccgaaagtgttcaaaaaactcttagtggaagtgagttcaccggaggtgggcgccaatgttggggacttgttctcaagtgctatgagttaagaacaaggcaacacagagaatgttaaacgataaagtccttcgtcctttgaaacattatttcccttatgacataacgatcttcggacgaaggtcatgaaagacgaaccttcatcgtcacaatatacattaatgaaagacgaagcatatgaaacataaaagatagcatgaataatcatataacatcatccatctaactntattatatcatcatagaaaaatagagacaatatcgaattataaat

SEQ ID NO: 42147 - DNA, 392 bp, Zea mays
gattgtgctgaactatggagcaccataccggtctattggtgcaccgtattgttttcatatagagcatgatatgaaacacccttaagttatcttgcattgtgcttgattctaaatcaattgtgttgctcccaaagtaaaactctgtaatcataagtgaaagtcgcctagagggggatgaatagggcgaatctgatatttataaacttaagcacaactacaagccgaggttagcgttagaattaaattcgagtccgagagagagggcaaaaacaaatcgtaagcgaataaagagtgagacacatggatttgttttaccgaagttcggttcttgcaaacctactccccgttgaggtggtcacatagaccaggtctctttcaaccctttccctctc

SEQ ID NO: 42148 - DNA, 377 bp, Zea mays
  unsure (1)..(377): unsure at all n locations
agctatacttgtcagcattttgatatactgttctaantannaatagttncgcggaaacgaacgatacttatcttacagagacctaaatccagaacaaatatttgctatggattgtacaacagacagttatattatgttgtgtatacaagttcatgcagtgtttacatggcatcagcttggtcaccaacgggcatgtcatcaacatagtttgcttgatgctggttaccagcatacaagttccttcgcccacgattgagcccatctgttcccaccaaaagaaaaggacgtcaaaagcttcgcaagaatcgacaagattctcatatgtataatgttgaactcacggcagtaacaggacctgtactatatgggcataaata

SEQ ID NO: 42149 - DNA, 333 bp, Zea mays
gacacttatatagtcaactggtgctgaggaaaacaaaatacagctctcttgctgtttaactgctcgccgacggcaacagtttgctacgactgtacttcgaatcgtcactcaatgttctgccataagaacgtctgggcacactttgatgatattgtataaacaaacctaccttggatacacttggtgaaataactgacaggtacaaaagcgaacttaaggttctcctgagcggtgggcatgggcccgacattgtccaagccccatcgctggagatgccatgtatggtcgatcatcttcgatactgcgacgggttgcctgaccgaagacaaaact

SEQ ID NO: 42150 - DNA, 401 bp, Zea mays
  unsure (1)..(401): unsure at all n locations
agctanaggatactattcaactaaagtatgattaagttgataagacgccaaggtatgaaaacttactctcatttagttgttntagtattctatccttagtgggatgtaccatattataggttaatttcattgcaatataaaatgttcaatagtgcatataactttgacatcaatcatatgtgtgcactaatttaaagaaatttaatctatccttttgggttctaagaatgatgatacatttgccatccgcatataaggatcatcatttgtgaaaccctcccttgtgtttctaatgctctcttttctaagtatttcaataaggtccttcctgtgagcacctagaggggggggggtgaatatgtgatcctgggaaaagttaaaagttaatccacaaaacttga

SEQ ID NO: 42151 - DNA, 455 bp, Zea mays
tcacgggctactggcggagctagccgaagctctggttgggctgtagggtggctggagagggctggccacggcggccgtaactctggcggctatggcgggcagaaatgagctcgccggagctaatggaaagtggctggccggtgagggtgagtgcggtgcgaatagaggtgcgcccggtgaggctttatatgcgcgggcgggcacggccgatggcgtgggcgcgcggcggacttgaccggacgccggggcgagcgcgcgcgcgggttgggcgatctctggcgtgccgaccatggtcgaacacgtgtgcccgtgcgttctgcccaagctctggcgcgtgtggtcgctcatacgagcctgctctcgccttggtcagtgcacataacctcttctcctccctacaagctaccattcttgtgtggaggtgcgaggatcttgcctactggttgcagagatat

SEQ ID NO: 42152 - DNA, 409 bp, Zea mays
  unsure (1)..(409): unsure at all n locations
agcttgcaacatcagntctgatatgtgattgctttctgtanatgtcaaanatcaagcgcaaaggaagtaggcgtgctcattaagagcangtagccccgcaagatgaggcaccccgtcagtagctgccaccaccgcccccgatgaccatcgagtagatgttcctaatgcagacttatgcagttcaagccatcggtcagattctggccgccattcagcagcagcagcagccaccacctcagtctcagatgcccagggacaagcgtcctgaatttatgagaggtcatcccccagtgttcgctcactcttctaaccccatgtatgctgaagactggctgacactgtggagcgggagttgcacaccgtccagtgcgacgacagggagaatantctgtatggtccccgtctgttg

SEQ ID NO: 42153 - DNA, 478 bp, Zea mays
  unsure (1)..(478): unsure at all n locations
tctgcacattcatgagttattgtatgagacttagncctgtggttaggagcaataccacaacaactttgtgtgctactgcttctgcgcccgctccgggtcaagctaccctgtgccaacctttcggaagatgtggcccggagcctggatgtctgaatggttttatgtgaaaaatgatctaacagcgcataataatgtcaaaagtatcattatgtacccaatttggcaacgcttcggacttcgaatgccgaaggttgaaatggatgatgcggccgaagaatgccaaagagccttcggcgcagtctgctcctttattgtgacaagggacttggtccaggagcacattgccttcatggtatggccacttgcagaatagtgggaaatgccgaaagataccatcaaagagtccgacgaaggcggactagtcagaataaaatacacattcaaatatacagataatattattgaacctgatgatgac

SEQ ID NO: 42154 - DNA, 440 bp, Zea mays
  unsure (1)..(440): unsure at all n locations
acactattaatactaagcttgcttngngtcttcggaagtgatagctatggcgataagtatggcggtcctcanaactgattctcaagttatttctggccatgttgacaaaagttgctaagcaagagatccgaagctcgaaaaatatttggatacagttcgaagacttgaagcctccttcgaagggttttctgttaagaatattccacgaggagaaaatgagcacgctgatctactagccaatgtatcatcacatgggctgccattaccttcggaagttttctttgaaacaataaaagcaccttcggctgaccttcttgaaagagcagtgctcaatatatctgatgtttatagcgaagactggagaactgagatcatgtatgttctctatggcaattttctctcagatgacgaagcttatcaaaagagaatagcggctagag

SEQ ID NO: 42155 - DNA, 435 bp, Zea mays
  unsure (1)..(435): unsure at all n locations
atccttatagtcacctgcggcatgcaagctnggtgatagtttctttaggcatttcccacttttctacaagtggccataccctgaaggctatgtgctcctggactaaatcccttgtcccgatgaaagagcaaactacgccgaatgccctctggcattcttcgactgcctcgtcaacatccaccttcggtttctggaggccgaagcgctgccagataggacgcatgatgatatctttaatatcttctcgtgccttcaaatcatttttcacatagaaccattccttcatccagtctccgggccatctcttccaaaaagtcggcacgggacagcttgacccagagcgagcaccgaagctataacagccaaaattgttatgatattgctctntaccccagggtttcgtctcatatacttgctcgtgtatattgcaaaaac

SEQ ID NO: 42156 - DNA, 438 bp, Zea mays
atttgagaaagacagggattgtagcgcatgccaagccgggaagcaagttggcactcatcatccacataagaacatcatgacaagtgacaggccactggagctcctacacatggatttattctgcccgatcgcttacataagcatcggcgggagtaagtactgtctagttattgtggatgattattctcgcttcacttgggtgttctttttgcaggaaaaatctcatacccaagagaccttatagggattcttgagacgagctcaaaatgagttcggcttaaggatcaagaaaattagaagcgataatgggacggagttcaagaactctcaaattgaaggcttccttgaggaggagggcatcaagcatgagttctcttctccctacaccccacaacaaaatggtgtagtggagaggaagaatcgaactctattggacat

SEQ ID NO: 42157 - DNA, 446 bp, Zea mays
  unsure (1)..(446): unsure at all n locations
agcttgtgaatccaatcactagtttatggaagtatgatgttaaattcaattggtcttcaaagtgtaatgaagcttttgaacaattgaagacattattaaccactgctccggtattggctcaaccggacatcaccaagccttttgatgtatattgtgatgcatcangcagtggactcggctgtgtgctaatgcaagaaggccgagtaattgcatatgcttcaaggcagttgtgccttcatgaggagcattacccaactcatgatctggagctagctgctgtggttcatgccctataaatttggcgtcactatctgctgggaaatgtctgtcatatctatacagatcataaaagcttgaagtacatcttcacccagtcagaattgaatatgaaacagaggcgatggcttgagcttattaaggactatgaactgganattcattatcac

SEQ ID NO: 42158 - DNA, 472 bp, Zea mays
  unsure (1)..(472): unsure at all n locations
cagccgctaccgacgacatcatatcgtcggttgttggttctattctaatttcaaggtaaaaatttttcttcgactnttcattgttttaacgacgaaggagttttctgacgaaggttgtttttgcacagagtatgctattaagtaaaggctttgaagatgcaacatgaccttgaagacaaaaaacatgaggttataattgaaggtttagagagcaaaataaaagatcatgcaactgctcttgaaaagaaagatttcgaacttcaaatagtggagggtttactggcagaagttgaagccaaaattgcaaaattgaatagtgaactgctctcaaagttagaaagcttcgaacaagaaaagcagaaatntgatgcgaagtttaaggttgaagtcgaaaagagttcaaatttgcagaaatcattgaaagagcttcaagataagtgtctaaacttcggcaaccgatgcgtgcagcgac

SEQ ID NO: 42159 - DNA, 367 bp, Zea mays
catgcaagcttcgtgtaacattctccgaagctatactccgaagatgaagattgtgtctccttgtgacttaacacgattttcactctttcaaagcatacttccgaagatcaatattgtgtccccttcttgtgccatatgcaacatgatgtatgatgcttatgctatgcaaaatgatgtgatgatgttatgttacgtggatgacatttgttccgaaagatacacacatatccccacacaatatttttgtatcagcgctgattcttcgctgtaagctctgcattcccttaagaacgactttcgagcttcttcaccttttacttattcggtataagctctgcattcccttaagaacgtctttggagcttct

SEQ ID NO: 42160 - DNA, 457 bp, Zea mays
gattcttcatcccaacatgggctagtcggcggggccttatccaacccatgttagtcttagcaattaagcaagtgtcgagttcagctctatcaaaatctactaagtatagctgaccctctaacactcccttaaatgctactgaatcatcacttcttctaaagacagtaacacttaaatctgtaaaaagacagttgtagcccattttacataattgagaaacgaaagcaaattgtaatctaaagaatctacaagaaaaacattggaaatggaatggtcaggagatatagcatatttacccaatcctttgaccaaaccttgatttccatccccgaatgtgatagctctttggggatactggtttttctcatatgaggagaacatcttcttctcccctgtcatatggtttgtgcacccgctgtcgatgatccaacttgagcctccggatgcataaacctac

SEQ ID NO: 42161 - DNA, 411 bp, Zea mays
gcttgtgaagattcttcatcccaacatgggctagtcgacgatgccagagccaacccatattagtcttagcaattaagcaagtgtcgagttcagctcttttgaaatcaactaagtatagctgaccctctaatactcccttaaaggctattgaataaccacttcttctaaagacagtaaaacctatatcagtaaatagacagttgtagcccatattgcataattgagaaatagaaagcaaattgtaatctaatgaatctacaagaaaagcattggaaatagagtggtcaggtgatatagcaattttaccaagtcctttgaccaaaccttgatttccatccccgaatgtgatagctctttggggatactgagttttctcataagaagagaatatccttttctccccagtcatat

SEQ ID NO: 42162 - DNA, 477 bp, Zea mays
gcttattatcaagtaacgaaagatactacagaatggaccagacttctagccatagaacacatcaataaatattatgctaaaacaataaggtggagggatagaaaagttcaattgaagaacattaagccagggcatctagtacttcggagagtggccaatccagatacagtgggaaaattacaactgaagtgggaaggtccttttctggtagtatcttcgtcaagacccagttcttatagattgaaggatatggacgacaacgacttacccagatcttggaatgcgggtgagcttcggcgatactatgtgtaatttgatgtaatattttttcgttttttgtatgacacccttttcctttcaagaggggagaaaggttttaatagggccatagcttgtaattgttcattcttatttagccctacgagggccatatcccccatagatgtaatatgtaaaatctgagcctgcccatcgagt

SEQ ID NO: 42163 - DNA, 362 bp, Zea mays
ctgcaagcttggatattcagaggtctgatagtgttcgcccgaagcgtcctcgccaagccaatcaaccaacttctcctgctgaggggaagaaaaagaataagagacgtcttcaccgagtgtcatgcttggatcaagatgccggtccttctgctcctgctgctgaagaagtgccagtgccagtttttgctgaagctgatcccaatgggtgtgacccgactgatgctgaccccaatgggtgtgacctatatgatgctgatcccaatgggtgtaatccggacaaagctgaccccaatgggtgtaccgtccgcattgttgatgaagatgaggaagaggaggatgaaatccctctaattcggaagaac

SEQ ID NO: 42164 - DNA, 424 bp, Zea mays
  unsure (1)..(424): unsure at all n locations
tctcgaanaagaaaaagaaaatctttcaatagtggtgggccataactgacccaaccggcccatcccgaaacagataacggtgacgcgcccgcgcacgcgcccgctttggcgganttgcatagaggccctcgatgacttggataactcgttaagaacccctagccactattcatcgtctctttgaaagttgtagaaacacccttgcgctttcttctcttctcaatccctagtccatgacggcgaacgacgttgggccgagctccggcgagcttgtaccggtcgattcacacaacgatcggtgctctactttggcagagaccgaattcaagtcctgacgagagtttccctcagcaatttcataatggcgactaacaccactgtcacgggaccggtgataacgacaaactaacggtcctggtatcta

SEQ ID NO: 42165 - DNA, 371 bp, Zea mays
agcttgtgagatgccagtgtttgtagtctcccatttcttgagaaagtgcatactacatagccaacctccgatgaatttagagatggtgtatgtcgcgctgtttggctaaatatttgaatcagcacatcacagaaacactaatctggatatgtttcaaaatgcaagataaaaccatcgcttacgtgggcgattctctatggaggcagatgtttcagtcgatgatgtgtatggtcactggtggaaaggagaggctggatgtataatatgttggcgcagagtatggctttgtgttatcgccgggtgcaaaaaggccagactgcttgggctaccgggtcccgagcaccaacacaacaattctataccactggtca

SEQ ID NO: 42166 - DNA, 436 bp, Zea mays
  unsure (1)..(436): unsure at all n locations
actcangctcgagcatggcatcataagcattggcattgtatttgtttgattcacctanagagcattcactaggcaaaaatttcaaacaatgtgtactgttttggcgtttngcatatagaaccctctatagtgaactcaaccctaaataaggattaaaggggtaagacctaacccaaattgaggataacctataggctgtagggaaatagttattaaatatccccaaaaataaagttgaatcacatgtatacccctgggataccaaaaaccctaattggaaccctgtaaaaccctataaccaaacactatgggcttatgtgcaaaatcgatgcacacttggactaaagtgcaaacaccacgtcaaataagtgtctgatgacatttgggtcactcatatgtgaatttgcaatctacaccctatagtttgggcttatat

SEQ ID NO: 42167 - DNA, 335 bp, Zea mays
agcttatcttagagataatgatagttatactatatataacgaatgttatcccgggattacaatcaatcctaaaccaaccatatcgggagttgcctaatatgctctaatatgcctaatatactctaacatccccacagtcgtagcgttagcaacacgaacagacagaatggagaataatggagatatacccctcacagtcggaacgccggtgcgaatgttgcgactggagtagcccatgcagatgatagccctttgtgccgataatgtcgagatagccaaggacaaggacgcagaagccgtgtcgaagtctcgtgcatatggtagcaggacgtcgt

SEQ ID NO: 42168 - DNA, 335 bp, Zea mays
atacgaactaagctgctaatgagtatttcatcaaaagatctttttcctactcttctatattccaagacgatatcgagctacacacattcgatgcaccattctatgatattataaatggctatgccaaatcgagtgaacatgtgttagctgatattcttatattgaagtggtaatttctatccgcgctgcctctcaatgtcaacatgaacctaccattatcgaacgtgaatgccgcaatatatatttcgctgacctgtactctgctatcacaatccacgcgttgtacccttagcataaaacataccttaccactaaataatcctctgtggacgttg

SEQ ID NO: 42169 - DNA, 344 bp, Zea mays
  unsure (1)..(344): unsure at all n locations
agcttgacaatgaagaaatggcgctcgtcatctagagcttccgccaaatcctcaagcaaaggagggggaaagactacaagtcccgctccaagataagttgctacaaatgtggtaagcccggtcattntattgctaaatgtcctatatctagtgacagtgaccgatgcgacgacnagaaggggagaagaaaggagaagaagaggtactacaagaagaaaggcggcgatgcccatgtttgtcgggaatgggattccgacgagagctcaagcgactcctccgacgacgaggacgccgccaacatcgccgtcaccaagggaacttctcttcccaacgtcggccacaag

SEQ ID NO: 42170 - DNA, 434 bp, Zea mays
  unsure (1)..(434): unsure at all n locations
tgtgaacaaatcggcacgtttattcattnttcatcggctacgcatccggagtcaaatggacttgtcgaaagagctaatggcattataatgacaggaataatgaagttaatattcaatcaacccaggggaaagtggccagatgaattaatcaaagtggtgtggagccacaacacaacaatgtctatgtcaacaggctttacaccattcaaattgctggttggtgacgaagcaattaccccataagaagctaaagcgggatcaataagaacagtggcttctgcggaggacgaagctgattattctgtggaaaagatgctatataatgcatcatgcttcatgctgtggagaatatcaataaatatcaagccgaaacaataatatggcgtgacagataagttcggttaataaatatcatgccagggcacttggtactt

SEQ ID NO: 42171 - DNA, 371 bp, Zea mays
  unsure (1)..(371): unsure at all n locations
agctctccagattgttatatagtgcattcatatgtaatttgaaactccagctatgtttattttactgagagtgctctggttgcctgacaaatatgagcgggtctgttcactggtaggtttcatctagtaaatggccgaataggctcttccaactatggagacttttgtagagggataaaagtttttactgccagcagaatttcataattcttggttgagtagtttgggagatatatgaattttaagttaactatgctgctgtctgaaatagattcagtcacgtatcttgtcagatgntttataacttatagatggcaaactntaattatccattgaataccgaagttgtagagtattttgtgtagaaactc

SEQ ID NO: 42172 - DNA, 295 bp, Zea mays
cccaactgatcgctcgctgcagggcgtgcaacaccatcatgacactctgactcataaggtggcagcggctttggacacatatgtcataagaaaccttcgtctcatggagaaaaccaatggttccaaaaatgacactaaacaagataaatgttgtatgagctgttcatgcaatgctcctccaacaatatccaccataatcatcaaaaagctgagagaagaattatggaacgtgtcctctaaagcactagctgatgacatgctcatgggttacaagagaacaaatgcggcaatctag

SEQ ID NO: 42173 - DNA, 363 bp, Zea mays
agctagccttcgcttcagtctatcatccgcagtccaacggagtcgtggagcgtgccaatgggaaaatcttcacagccatcaagaagatgctcctcgacgagaaaaagggcagatggaccgacttgctaccggaggcagtctgggcgctgaacacaaccgagtgcagggcgaccgggttcactcctttccgccttctatacggatcagaggcaatgaccccgcaagatataaaacacgggtctccgcgcacagctccgtcagccacccctgacgtggatgagccaacctccaaagatctcattgacggagaccgggtcttcgccctgcaagccttaaacaaataccaagcccagaccaaagcat

SEQ ID NO: 42174 - DNA, 470 bp, Zea mays
  unsure (1)..(470): unsure at all n locations
tctaaagggagaacacgtgatatgtctaaccaatgttactttctataaagatagaccttgtgcagcttgtcaagcaggtaaacaagtgggaggagcgcatcacagcaagaatgtgataaccacatcaagacctttggagatgcttcacatggatctcttcggacccgtcgcctatctaagcataggaggaagtaagtatagtctagttattgttgatgacttttcccgcttcacttgggtattctttntgcaggataaatctgaaacccaagggaccctcaagcgcttcctaaggagagctcanaacgagtttgagctcaaggtgaagaagataaggagcgacaatgggtccgagttcaagaatcttcaagtggaggagtacctcgaggaggaanggatcaagcacgaattctncgctccctacacaccacagcataatggtgtggtggagaggaagaacaggacactta

SEQ ID NO: 42175 - DNA, 417 bp, Zea mays
  unsure (1)..(417): unsure at all n locations
agcttgctacacgccttcttctttntctccatatcaagaaccttactggaacactaccccacttaanaagaatgagggtagaactcttgaatcttgtgggatttgaactccttgaagtacctcataacaagggtgttacagggccttcttctgctattgctgcttgaacaggctgcgaagagatgactgacacagggttgattctgggagaaccttcttcttatcttctcttcgctatcttcttttctcttctcactgcctctntctttctctttgctcttcccactggaggattctatctaagagtattaccatcataagaggaggaaaccaaagatgttgaaccatgtgcaacagtcttcaacccaagaatcaccaagcattgtgatcttatgggcgagggagtggaaaatggag

SEQ ID NO: 42176 - DNA, 401 bp, Zea mays
tccctggcaacgtacgagtggtgatggatgggcacagtgcaccttgcagcgcgggtgtactgtttggcgatgcaatggacatgcacgccacctgcaagatggccatgacgccgcctgccaactgagtggatagggcacattaaatgctgaaggggcacatcatctgtcagcgggatagtcaggcggcgcatcttcttcgcaataaatgtagagacagcgcagcccagaggtcttacgtcatgctccgcccgctggcttacgtcacgcgcggtatgccacgcggcatcatctggtctccgcccgggcggtgagcagtatcgctatgcggacaggtccacatcatgctgggcttggacacatgtcggcaccataccccatcctgagcaaggactgagtatttt

SEQ ID NO: 42177 - DNA, 295 bp, Zea mays
agcttgccgtctaatacacccttaaaggctagtgaaccatcacttcttctaaagacagacacatctacatttgtaaaaagacaattatatcccatattgcatagttgactaacagatagcaaattgtaaccaagagactcaactaaaaacacattggagattgagtgctcattagaaattgcaattttacctaacccttttaccttgccttgattcccatcaccgaatataattgaatcttgggaatccttattcttgacgtaggaggtgaacatcttcttctcccccgtcatat

SEQ ID NO: 42178 - DNA, 392 bp, Zea mays
  unsure (1)..(392): unsure at all n locations
ctattaaactaagcttagtgagaattaatangatttctagttgaacttattggagcgaggtttattattttcctttattcctcttatttcctttatgcttttaagataggtttgaactacaagttatatcaataaattttcaaaaattctggaaaaactacagtagctttttactggtgtgtaatcctctgtctcaaaatttggggtttaaaaagtaagtagttctctctggatacaattattaaatatcatggcagaaagggtggtttgaactacaactaccatttaacagaaggttattccttaatacatattttggctggcatctagatgttataatatgaacttgcacaattttctatccattaacatttaccagttattttattatg

SEQ ID NO: 42179 - DNA, 424 bp, Zea mays
  unsure (1)..(424): unsure at all n locations
gcttggcagagcgagccgcatacactgagctctcttgacggcacaacggctaggcaaactacaccccggatcctctaattattcagctaaaggcatcccattccaccctcatggttgcactgtttttctgtacggtcatccaacaaacatgtccttactgagaggcactcgataaaccgctcgagcccccttgaatgccacaagtatataatcatgaataagagggaaaacaacgtatcataaataaatctcatcatgttcattgattagaagtgagcaatagcataaaactaagcaataataatccaacccagataggtaaacaaggacgtggataacaaaagttagtcaatccttatgtataaatgtgtaatgcgggaggtgaatngaagaatgtatatgacagagatgggtcaagggacac

SEQ ID NO: 42180 - DNA, 503 bp, Zea mays
  unsure (1)..(503): unsure at all n locations
gcttcgagcaacatactggaactgaagccgggccttcatagccaaccaatgttaaacctttggtaacagaagaaacgaatattgcataggcaaccgaaaaaatgaaaatgtcagagccaattttggttgaagaaattgatactgctgcccccgaagcaccttccagaatatacgattatatcgttcgacacgcttcggggaaaaaattatccgaagaagaagtttttgaagctaatcactatgccaaagaattgaaatatctgaagggggcactagtattcaatgggacaaacgaagatgacttcctatactgcctcccaaacaacaaagaattatccgtctgtcgggagatggctagaagtatgggatttccgaagcttgaagctggactctgtgctatgacgaangacgatcttgcagatagtcttgcatataatatcctaaaggtatgagaactgcgtgtttggaaatnntataaattgcaaatcattcttttattctta

SEQ ID NO: 42181 - DNA, 421 bp, Zea mays
  unsure (1)..(421): unsure at all n locations
tcttgagtcacctgctgcatgcaagctngcccctcgctactcagtgtagtttccttatttactcctcgggtcacaagggttatcactacataaatctctcctccaactgcatcatctcccaacatgtgattttcgatgaggcaaccttccccttcgctgcctcacacggtctaactaatactgatttcttatttgagatgggttcctgaaagggaaatgtgcccttgggccatttctaagtattttggtgattgagtgcaaacacaagtgcttaaatgtgaatttatgcccatggatgaacaaagtgcaaatcaagagtaaaggtatgtttctaagccttagtacattggttntgagtactaatatacttgtctaagtgttagaaacagaaagaagaagaanagaaaggagatggaaaaaa

SEQ ID NO: 42182 - DNA, 439 bp, Zea mays
  unsure (1)..(439): unsure at all n locations
tctatagggagaatacgtgataggtttaactaacgtgcatttcgaataagatagaccttgtgcagcttgtcaagcaggtaaacaagtgggaggagtgcatcatagcaagaatgtgatgaccacatcaagacccctggagctgctacatatggacctcttcagacccgtcgcctatctaagcatatgaggaagtaagtatggtctagttattgttgatgacttttcccgcttcacttgggtgttctttttgcaggataagtctgaaacccaagggaccctcaagcgcttcctaaggagagctcanaatgagtttgagctcaaggtgaagaagataaggagcgacaacgggtccgagttcaagaaccttcaagtggaggagtaccttgaggaggaagggatcaagcacgagttctccgctccctacacaccacagcataat

SEQ ID NO: 42183 - DNA, 451 bp, Zea mays
  unsure (1)..(451): unsure at all n locations
agcttacccatgacgaggcatgtgtctagttaataggtcctcgatcagcaagcctacatcgatatagtcattaatcgactcagacggagacactacactgagacttccttctcgtgcaagtcacccgcccggtctcgtctttatcatttacaacccaaaatttggtacctgacagaggtacatctttttagatgttgaacccatcatggccatgatggattcaccatcaagtcttttctttgaaaacttcccatcccatacgaagcatcaccttttatttaaaacaaaacatnttgttttctaaagcaagactatgcatcagaaaacgtttttaagtaaaacatgtatcaaggaatggttatcagttccaaggaagggaatgcaacaattggttagcacacaactcctatcacctaatgcatcatctcaagtgataaagagttataacaac

SEQ ID NO: 42184 - DNA, 504 bp, Zea mays
tctataacggatcaacatggaacaatccaagatagggttcttacatatgtcacatggtatgcaccttatccagaagtagtgtcctgcgatggctaatgagtgggagcgcatgagtaatgtatcatatgcctcaacaattggatcaatcatatatacattgataagtacacacacaaatgtttcatacactataagtaatacgagtaggcacctgactgatccaagtcatggtcactatacagcggtagaaagcattcttaagtacatgagaaggactaaagatatggtactagtatatgggggtaaggaagagctcattgtaactgattacaccgatgctagcttccatacggaccaaaatgagtggaagctagcatcggtgtagctagtagcaatcaggttttgtggtcacaataaatggtggtaatgttagttggaagagttccaagcaggagactatgactgattctacaacagataccacatacatttgaacatttgaat

SEQ ID NO: 42185 - DNA, 438 bp, Zea mays
  unsure (1)..(438): unsure at all n locations
cttaagtcacctgctgcatgcaagcttatataaatccggaatgaatcggcggttattaccatccagcccaatgaaactntggacttgatgtacagtggttggaggtttccactccaaaatatccttgacttcgctgggatccaccgcaatccccttggcagataatacatgtcctagaaattgaatctcctccagccagaatgcgcacttactgaacttagcatataattgatgttcccttaagcgcgtcaatacgatccgcaagtgatgagcatgctcctcttcatccttggagtatattaagatatcgtcaatgaataccaccacaaacttgtccaactcgggcataaataccaagttcatcagatatgtgaagtgggcaggaagcattgtcagtccgaaagacataaccagatattcaaattattcataccgcgt

SEQ ID NO: 42186 - DNA, 459 bp, Zea mays
  unsure (1)..(459): unsure at all n locations
tgtgtacctactcttaccttanaatctatttattatttatttgcagccttagattaccaaaatctcatatgttagttcacaaggatacttgtgatattcattattttcactatttgacaacatgagaaaattctctttcctatttggcacaacaagagcattcctgttattttgctagtcacttgacgctgttaccagcccatatccaacggagtgtcatttactaaagaaaattgtaacgcattacctggtaagaatttttccaaaaaaatggtgccctaaaaggatgtatggtttgtcttaatgccaaataaataattctctcttgtcttttatctttacagaccgctaatgaaaacacagttgtggttggataaaacccaagttgtggacttgtggttcagttctattttaccatcaagagaaagttaaataaattcaattgatatttcaacattc

SEQ ID NO: 42187 - DNA, 444 bp, Zea mays
gccgacctgctgcatgcaagcttcggggcaacagcaaagctccttccgaccaccagctccgagaggcagaggtgccagaggcttcatcggaagatttggcgatcaaccgaagagaatcttttgctatcaggatgtgtcatgttaccatccacaagcaaaaggaaatagccgaagcggcagcacaacaggctcagccgaagcaggtcatgcacactgcttcgtatcattcgccttacatcccagagtatgtaggcaatcaccctgcagtttctgttgcttcggcgagtcaacctcaggcttcctggaacagcctccgcctcaccaccgctgaacaagggcagcagcagataggagcaatatgctccacaccaaaggacttcagagaacagtccgaagctcgcacagtcaacagcactgtgccagagtcaaagcacatctattgac

SEQ ID NO: 42188 - DNA, 422 bp, Zea mays
tactcctacctgggaatggccattcatcatcgccaagattttgaagcccgattcatacaagctggccaacgatcaatgcgaggtctacagcaacgcttgaaacatccaacagctacgtcgcttctacccttaagatgtttcaagtcggtcatatacctcgggttctgtacatacataaataaagtctaaccatcaaggaatgatcagccttgcctccgcatagcccgaccctccctcggtgctagaaggggggaacccctctgcgtcataattttcctcggaaaagtcttttgccataacgacgttcacgcctttcgattgcttcgatagcggtgtcctgaatacgacgagagtacacgtaagcgtgaatgccgaccgagtcgatggactcctacgccttcgggatacggatacctcactca

SEQ ID NO: 42189 - DNA, 384 bp, Zea mays
tcaaagaattcctgatatgtattttcacgcggtccttgaggaggaactcttccaccatgctgttgatactgattgcccgccatttcgagcaagaagcgcgtattattcacagtggcattgaccagggcagcgatagcctcggccaaagtcggtggtactggtggcgggttaggagtatcttctcgaccgcgggaagtccccgcatcatcatgtgcgcgagtccgtgatggcatctgaggcacattaacatttgtgaaaaatataacatgcctagtcacaccattatattacattatcaatacgtattaattatacagacttcatgcgacaacgttgacttcaggactttattttaataagtataacatctaaagcatactattc

SEQ ID NO: 42190 - DNA, 352 bp, Zea mays
tgacaccatacttcttggcacaccatgaagacaatcgatcccgtacatatacaattctgcccattctgcactgcatgttgtggtcttgacatgtatgaagtgggctgacttggcatacggtccactactacccaaatggaatatgatccggctcgagtgcgatgcaatccgactatgtaatccataccacatttatgccactttcatcgatggatctgctacggttgcaacaattcaacatgtctctggtgttctgccttaattcttttgcaactatcgcacatagacacatgctctgcgatttacctcttcattccggtacaccagaatttcttctttatatactgataca

SEQ ID NO: 42191 - DNA, 296 bp, Zea mays
  unsure (1)..(296): unsure at all n locations
agcttcggatccttagccttacaacttttgtctatatgacccgaaacaacctgagaatcagttttaagtatggcccttctgattcccattgcttttaacttccgaagacctagaaccaatgcttcgtactcagcaatgttatttgtgcaattaatatcaagctttgccgcataacaaattttgactttggaaggtgaaaccaacacagcagccgctcctgctcnaagggtccccaagatccatcacaaaacacttgccaggcttcgttgctttattcgtttcttcttctgagccct

SEQ ID NO: 42192 - DNA, 500 bp, Zea mays
  unsure (1)..(500): unsure at all n locations
tctaaagggagaacacattttatgactaacaaatgttcattntgagaaagacaggatntgtagcgcatgccangcagggaagcatgttggtgttcatcatccacacaagaacatcatgacaactgacaggccactcgagctcctacacatggacatatttggcccgattgcttatataagcatcggcgggagtaagtactgtctagttattgtggatgattattctcgcttcacttggttgttctttttgcaggaaaaaactcatacccaagagaccttatagggattcttgagacgggctcaaaatgagttcggcttaaggatcaagaagataagaagcaacaacgggacggagttcaagaactcacaaatcgaatgcttccttgaggaggagggcatcaagcatgagttctcttctccctacacgccacaacataatggtgtagtggagaggaaaaatagaactctattggacatggcaagaaccatgcttgatgagt

SEQ ID NO: 42193 - DNA, 369 bp, Zea mays
  unsure (1)..(369): unsure at all n locations
agcttagagaggtagagggtcagttcanggaatcacggttgccttggcgtaggggaattgacaaagtggagggtgaggctgatgagagatatntatagcagagcttaggcgtcgggatttttattgtgctctaaaaagaggaagatatttgtttgggacttgagctttatgattcgcgtgtaagatactacgtcaaataaaaaaatacggagtaagtattttntaagttactgctcaatgcaagatacacgatgctcggccctcatattactccgacccgtttcaaaatattcagtgttttggtttgatctaaacaagcttatctaacttgacgacgcagaaatattnttaaactaagatatgaaaaag

SEQ ID NO: 42194 - DNA, 82 bp, Zea mays
ctactgcggtcaggctggttctttagaccggccagccctaagaactgtatcacacgatcatccaaaatgtaataacctcata

SEQ ID NO: 42195 - DNA, 396 bp, Zea mays
  unsure (1)..(396): unsure at all n locations
agctcggtagaaanagataagggaaaatggtgtgctgtggtgggctgaaaccagcccgagtcggcccacgtccaggtgaaacgcgccgacgcgcacgctcgcgatgctcaatttgcgcataggaccctgaccttttgaataaataattaagaatccttgcatactattcacatgtgtctctgacatttgcaccgaggcccctccctttttgtttctttgcaaggtcaggtccccgaccactgacagcggtgaacacgctctccggcgagcctgtactggccgtaatacacaaaggctaagctccttactcggtcgacaccaaattctacccctggcgaccctaatccctcaactaattgcatgaatcctggccaaaatctctctacccacgatgac

SEQ ID NO: 42196 - DNA, 418 bp, Zea mays
tctataaagagcgagagagcaaggcgaagctcgtcaaaggttataaagtattctctccatgaagatgcaatgctctgacgagttgactaaagaacatgaggagctaaagtgctctcatgttgatttggtccaaaggtatgaaactatttcaattgagcaagataacgctgtacattgtaccgctcaattagtaaataagaataccttgcttaaggaccaagtggaaaagctaaaaattgaaaatctagcttttcaagaaaaatatgatatgttcctatgctctcatgaaaatcttagagatgattatatcatattaaatattgctcatgaggttgtgatagaaaatttaaaatcccaacaacctcactcatgcacatgtattcaaattgatactatattaccatgtgctaatgcttgt

SEQ ID NO: 42197 - DNA, 356 bp, Zea mays
  unsure (1)..(356): unsure at all n locations
agcttctatagggagaccacgtaataaggctatccaatgttcatttcgaaaaagatagaccttgtgcagcttgtcaagcaggtaaacaagtgggaggagcacatcacagcaagaatgtgatgaccacatcaagacccctggagctgctacacatggacctcttcggacccatcacctatctgagcataggaggaagtaagtatggtctagttattgttgatgactcttcccgcttcacttgagtgttctttntgcaggataagtctgaaacccaaaggaccctcaagcgcttcctcaggagagctcaaaatgaagttgagctcaaggtgaaaaagataaggagcgacaacgggtcg

SEQ ID NO: 42198 - DNA, 463 bp, Zea mays
  unsure (1)..(463): unsure at all n locations
ntatcaaatggacgtgaagagtgccttcctcaatggaccaatcattgaagaggtctatgttgagcaacctcccggctgtgaagatagtgagtatcctaaccatgtgtataaactctctaatgcgctttatgggctcaagcaagccccaagagcatggtatgaatgccttagagatttccttatagataatggcttcaaagtcggaaaggccgatcctactttattcactaaaactcttgaaaatgacatgtgtgtatgccaaatttatgttgatgatanttatattgggtctactaacgagtctacatgtgaagaaattagtaggatcatgacacaaaaattcgagatgtcaatgatggtggagttgaagtacttcttatgatttcaagtgaagcaactccaagagggcaccttcctaagccaaacgaagtatactcaagatattctaagcgaaattgggatg

SEQ ID NO: 42199 - DNA, 435 bp, Zea mays
  unsure (1)..(435): unsure at all n locations
agctntccacttttattaatccaaacattcctcagttaacttaaatgtgtttcgtttgatatgcagaaattcaagcacataatgagggaactacagggggctatacttgttggttcagtattccagataatattaggatacactggtcttatttcactgtttctgaggtatgtccagaaacacaaatgcataactctacaatctagaatacacctcacagaaactgaatatgttcaatgcctgacttcacaggttaataaatccagtagtggtggcaccaactattgctgcagtgggtttggcattntttagttatgagttccctcaagcttgcagctgtgtagaaatcagcatgcccctcattctggtggttcttctgtgcactctggtatatccttgcagctctcttttgatgaacaaaacttaatcggatct

SEQ ID NO: 42200 - DNA, 355 bp, Zea mays
  unsure (1)..(355): unsure at all n locations
tgagtnttgatggccctatattgcatatgaccagtgactctctcaattaatgactntgccacccagatttgtctaggtctactcttatttggtggacctangaatgtaaccttaatctttccatttgcaacctttcttataacatagtgagcattgaaagcaaatggtcttgagtgcttaagcaaaggagttggtggtttagctttgcagttgtgggcaaaatgaccttcatttccacactcaaagcatttgataagcttgtgagtctgctttggcttgtattgagtgatagctttcttttgacaaaagcattgtatccaataccactcttgttatttttcataacagtgttcat

SEQ ID NO: 42201 - DNA, 369 bp, Zea mays
cttcatccctacatgtgctaagcggcgatgccacagccagcccatgctagtcttagcaattaagcatgcatctagaccggcctcctcttttgcaaaatcaactaaatagagtttgtcgtctaatacacccttaatagctaatgaaccatcacttcttctaaagacagacacatctacatttgtgaatagacaattatatcccatattacataattgacttacggatagcaaattatatccaagcgactcaactaagaatacattagaaatagagtgctcatttgagattgcaatcttgcctaagcctttaaccttgccttggttcccatcaccgaatatgattgaatcttggggatcattggtcttgac

SEQ ID NO: 42202 - DNA, 465 bp, Zea mays
gtctacacctttattactaagcccagccttttcattgaaaatgctgcgcctacgcatgccacgtaaatgctgtgacatagcctgaaatagcagataacatgtcctttcataagataaaacattgatagttcagccaaattagcacagcctatacaaaactagatttacaggaaagaaaatgatagaaagtaaaaggctgaatactgatggcaatcttgttagcatgtggacacaagattatgcacaattgagagcaatacaatgcacaatgcacatgaatggaaaactgctaataaacatggacttgctaaatccattctcctacatataggccgtgtttggcatggctccagagcagaactccaagaaggagctagaaagagcctgccaaacaccataactccagagttgcaaacttcatggtagtttctgatctgtagtagaaatttttggagtacctctttt

SEQ ID NO: 42203 - DNA, 439 bp, Zea mays
  unsure (1)..(439): unsure at all n locations
taagcacctgangcatgcaagctcggacagtgttctgcaacggttcttggtgaaccttcggtgcatgagcggctgctgtcctagtagcaccttcgaaagtcaaaacatgttatgcaaccaaacttgactntagttgtacaaataatattgctgaatacgaagcacttttgttggggcttcggaagttaagggcaatgggaataagaaaggccatcctgaaaactgattctcaagtcatttctggccatgtagacaaaagtagcaaggcaagagatccgaagcttgaaaaatatctgaatacagttcgaaggttggaggcttctttcgagtgtttttctgtcaagaatattccaagaggtgaaaatgagcatgcagatctactagccaaatcagcggctcaagggctgcctctacctttggaaagtatttttgaaacaat

SEQ ID NO: 42204 - DNA, 488 bp, Zea mays
  unsure (1)..(488): unsure at all n locations
tcgcatcgcagttgagcttgtatttcgcggcttgtgcgatcatacggtattatntttagatctgtgacattgataggaaattctatggctcgtttgtttcctttgaattgaattctattataataataataactgggaaataaattaattaagttaatatatttgtatatgtaacatatttatatattattctaaattatatgtatgttatagactagccaattatgtgtgctttgctacgattattatctatcatataaataagtatcgagatgtttatttaaatatgattattggttatttctaagtactaagatacgtgtattctggtggttagctcttaatttctggagtttgtcgttatcaaacttaatgtagaaaagtcaaacgaattataaattggaatagatttatgctaacttaataatcggtgtggtatctatgttaacttaataattggtgtgtgttaattaatatgaagatatgat

SEQ ID NO: 42205 - DNA, 418 bp, Zea mays
  unsure (1)..(418): unsure at all n locations
catgcaagcttcggcatctntactagcttcttcttcctgatcccctggcgtccagtcagcgatgaagtctgctaacgcctgngactggatcaaagatctatgcacataatcaatgttgaattcattgagttccgcatcccactttccaatccttccagtagcttctctgtttctcataatatccttcaaaggctgtgatgaaggaacaattatatggaatgcttgaaagtaatgccaaagcttcctggaggccattaagacagcatatagcaccttctccaattctgtatagtttttctttgataaactaaagacttcggagacaaagtatactgngacttgctttttagtttgtccttcaagcttctcctggacaagtgccgcactcactacagagtgcgaatctgccacatacaac

SEQ ID NO: 42206 - DNA, 421 bp, Zea mays
gctaaagctatgctaagtatcataggcaagtaatattcgaattgactcaagcctatctacgggtgcataagtttcatcaaagtccaaaccttcaacttttgaataacctttggccacaagtcggtctttgtttcttgtcaccacaccatgctcatatggcatgttgcggaatacctatttggtacctacaacattgtgattatgacgaggaattaaatggcgtacctcattcatcgtgaagttggtgagtatctcttgcattgccagcacccaatccggatctcttagtgcatgctctatcctgtatggctcaatagacgacacaaaagagtaatgttcacagaaatgagcaactcgagatctattagttaccccttatgtatgtcaccaatgatggagttgacagggtgatatctttgaa

SEQ ID NO: 42207 - DNA, 421 bp, Zea mays
  unsure (1)..(421): unsure at all n locations
agctntccttgtgtcctctgcctaagcccaaatagtaccagagaatgtatctagaaacctggtactgagggtagtgacctgccatccaattgtatagtacattgttaccaatttgaaaatgttttgccacattaaaacatgctttaatacaaaaaaaacatggataaaatcatacatacgcatcacaaactgaatacttcatatcttgtgaagcttttgcgcaactagttagttcaatgatttgatataccatgattggttgtatagtaccataaggtatgcacagataaaataaagttcattgcatccaccatccccctattttatccctcctcacccatcacctgcagtctcaatgatagactgtaacccctcccaaagtcccaatcagactcagactcgacactgcgataattatatc

SEQ ID NO: 42208 - DNA, 417 bp, Zea mays
tttatgatctgtatagatatgacagatatttcccagcagatattgacgccaatatttcatggcatggaccacagcagctagctccagatcatgagttgggtaatgctcctcatgtcggcgtaactgccgtgaagcatacgcaattactcggccctcttgcattatcacgcagtcgagtccactgccagatgcatcacaatatacatcaaaaggcttggtgatgtccggttgagccaataccggagcagtggttagtaatgtcttcaattgtttaaaggcttcatcacactttgaagaccaattgaacttaacatcattcttcaataaacttgtgattggcttcacaagcttagaaaagtctggtataaatctacggtaatatccatccagtccaaggatacttcggatctgatgaac

SEQ ID NO: 42209 - DNA, 463 bp, Zea mays
  unsure (1)..(463): unsure at all n locations
acctgcngcatgcaagctttataactacaaacatcaataacttttattatacntattagttctgtaacattaagctatatgtgtagaattaaaaattgcattgaattatacttgcacatctcatggatctaaagacccaaatctaagtgtacttttacaagcacaaaataatttgctctttattgaaggacttacaaaaataagcaaatatgtccagcggtcacactttaaatataaatttgatcactgaaaggataattaaatgcacaaatgcttacctcattatatgagaccgcaacatctgaatgcttctcgttagtttttgctatgaatatatcccaaaaacgaccaccactcataaagaaagccaccaagtgcatcaattgctgaaaagaataagtntggaggaagtaaataatactcttgataaacaacacagaacttagactgttagaactcaaat

SEQ ID NO: 42210 - DNA, 413 bp, Zea mays
  unsure (1)..(413): unsure at all n locations
ctgggcctggactgtcggcagccacgacgtggtcatgccaacgtcttacatgctgaggcggatgaggatgccctgctcctggcacatgcaatcatagagatatctccagcagcaccggccgcagcggcactcctccaccttgatgagtcgaaagcacgcgctttcctcggcgacggctccaacaaggacatgatcgaatggtggtgcctcgacaccagcgccactcataacatgaccggccgacgggagttcttcaccgaacttgactctatcgtccgaggctccgtcaagtttggggacgcttccggcgtatagatcaatggcgccggctcagtcgtcttcaccgccgcatctggtgagcatangctgctcaccggagtctactacatacacgcgtngaggaactctatcat

SEQ ID NO: 42211 - DNA, 325 bp, Zea mays
  unsure (1)..(325): unsure at all n locations
agctcatgaagattcttcattccatcatgggctattcggcgangccaaagccaacccatattagtcttagcaattaagcaagtgtctagcttaacttgtttatcattaaaatcaactaaatatattagaccatctaacactcccttaacagctattgaatcatcacttcctctaaagacagtaacacctatatcagttataagacagttgcagtccattttgcataattgagaaacagaaagcaaattgtaagccaaagaatctatcagaaaaacattggaattggaatggtcaatggatataacatatttacccatacctttga

SEQ ID NO: 42212 - DNA, 391 bp, Zea mays
tcttcatacctacatgtgctgttgcggcgatgtcatattcagcccatgctagggctagctataatgcatgcatctagaccggcctcctctgttgcaaaatcaactatataaatgttgccgtctaatacaccccttataagctagtgtactatatcttattataatgacagacacatctacattggttaaaagacaatgttatcccatattgcatagttgactaacatattgctcattgtaactataagactctactgaaaacacatgtaagatagagtgctattggatattgcaatttaccttaccctttaccttgcttgattccatcaacgaatttattgaatctcgggaatcttattcttgacgatgaggtgacatctattctaccccg

SEQ ID NO: 42213 - DNA, 433 bp, Zea mays
agctagtcattcacgatggtaaattctagcaaatgtctgatgcccacccgccataacgcatgccaggcagaaagagcccacaaccacctatggcagaacacatgcgtgaagaaaccacaagcctgtctctagccgtcttggtatttgtgcatcccggcaagccccacctacaccctctgccctgagacagccttatcgtgcacgccgagctgctatattaaagtgtcgtgtcgcggaccttgaagtgatgcctcagtgcagatagccactctggcaagaccacgtgcacccgactgagcacacgccagccacttgtcgcaatcacaactaaatgtgtgccgcaccatgagccatataattacagccagccatataaaataataacactattttacatacgcgttattacatactaaataataattagacaagc

SEQ ID NO: 42214 - DNA, 433 bp, Zea mays
ctttgcttatccacggtcatcgccttgcattggaaagtcttatggccttcttaaagtcgcctagagggggggtggataggcgaaacctgataattataattctaaatccgaactagatcccttgattaatggttagaacaagattcacaattatcggagtataaaaactaagtcctttgcttgcaatgagtattgttttcaaagagtgcgggatttaatcaatagcaatacaactagaagtggagaataatgcaagagggcttagataagaagagaagtcacacaagttctttcttgcaaggagttgcttctctaaatgtgaatttaaattatagcaacacaaaaagatattatcatagagtagcgcaagagaacttatatagggagagaacatactaatcacaagcaatatacacatgagacacgagtgatt

SEQ ID NO: 42215 - DNA, 351 bp, Zea mays
  unsure (1)..(351): unsure at all n locations
agctaggatgaagtgtcatcatcatcatcattctagctatcatccgagtcccattcaactaagtaggcttngccatctntcttcttgtatagtatctcttattcttcttgtcactttcatctttgcccttcttcttcttgcttggacaattcatggcaatgtgatcgggttccccacactcaaaacactttctatcattgaaagcatttcttctagatgtttgacctcttctaaggtgacctccttttatcttcatgaatttattgaatttccttacaaataaagccatgtcaccatcactctcactttcattttcttcatcattgctatcttccttttcaattgcctttg

SEQ ID NO: 42216 - DNA, 249 bp, Zea mays
gacactgtatacctcgccatctcccatgagatggaatatgtgactgacatctcgcgccagatagtgactcccagctctcagggcatgtgcgccacctgctgcttacatatcgtgacttgtgtattgctcctgctgtcggcgcatctgacgcgtggcatactctattactcgagcctcttgcggttgtacacacactggtccactgtctggtgcatggcaatttacataaataagcttgctgatgtacgg

SEQ ID NO: 42217 - DNA, 384 bp, Zea mays
agctttaccatatggacgtgaatagtgccttctctattggaccaatctaagaggaggtctatgttgagcaacctcccggctctgaagatagtgagttccctaaccatgtctataaactctctaaggcgctctatgggctcaagcaagccccaagagcatggtatgaatgcctaagagattttcttatcgctaatgggttcaaagtcggaaaagccgatcctactctctttactaaaacaattgcaaatgatttgtgtggcggaaccgcccgaattattccagcttaagtgcccaagtcgcacccttaatggcaggaacacactttaacaggaataacccgtcagtccctcagatctagttcgatatagccacttaccaggatcg

SEQ ID NO: 42218 - DNA, 389 bp, Zea mays
gacactactaatactaagcttgtgatttaccaattgaaagagcacaatctctacttatgaatatccatattatatcttaaaagagattgtattagtaacacaagcaatagtttcctatttatcaacctctagtatatgaatgacaagatggttactaaaacaaggaaatctcatgatatgaactaaattacccttacaagcatcatgcataacatcaattgtaataaagatgaaagtagcatgattatttaattaagtgtacattgcaagtttaattcatagcatggtgagtgattaatgtagaagactcataaccaatgttaacaagaatgaatacttcacagagtattggatcgatactctttgaatgttgaatggacacatcattt

SEQ ID NO: 42219 - DNA, 424 bp, Zea mays
  unsure (1)..(424): unsure at all n locations
agctcgagacagaaacaaccgtggcatgcactacatcccttgaagaatatgtcaaggatntgaggactgccaagaggaataaacaaaagaagaaattcaacacctcctccaaaagcctcaaccacgcctccacaaaaggtaacatccaaggtaatgatcaagccacacttcacattaagaggtgtagtgaatgctttgaagaggggcacttgattaagtcatgtccctatattaatggcttgattattaacaaagatgatagactttgttntaaatgctccaagaagggacacttacttatatcttgtccccatttaaaacaaagaggcatatggttagaaaagggaaattttactaaccatgtagcaagcaacaaacaanggaaagaagaaatcttcataacttggaaaacgcctatgcttca

SEQ ID NO: 42220 - DNA, 383 bp, Zea mays
tcccctgcacgccgaggatacggagatctctggcgtcagggcacaagatgattgccccagcagcatacactggtggctccaagcgctatattctttatgtccctgggcccacatgtcggggcccattacctttgtccatgccccccttcagctataaaaggggaggcatgcgacgttacacacaagctcaatctttgaagctcaatcttttatgctcactcagacactcacaagttcatacaagctctcaagcaatacatcacacagtggagtatggtgttacgctttggcggcccgaaccactctatagccttgtgtgttcttgtgttcttcccattttccaactaacaagcaaaacgcttatgcccctcctcatcttatga

SEQ ID NO: 42221 - DNA, 321 bp, Zea mays
  unsure (1)..(321): unsure at all n locations
agcttatctaatgatatccggagtagcagnctatgaaggaaagcatggagcagccagcgatcgagtcaactacctgatctattctatggaacccgaatggatccttctgaaaatgctagttgagatcagtatagtcaacgcacatgcgccaatcaactttattctttttgagtacaagaaaaggatttgctagccactcagggtgcagtacctcccgaatgaaccttgctgacactaagcgagctaactcggcacgaataacttcccttttatcaagcgtgaaatgacgtagcttctgtcgaatcggtcttacttgtggat

SEQ ID NO: 42222 - DNA, 434 bp, Zea mays
acacttatatactaagcttaggctatgcttcgtcaaacttcagcttcgtcattcttcatcttcgtcatcctgcgcatatcatacagcagaataagataagtgcaaatttcaaggagaaggtaaaagtaacaaacataagtttcttaccggcttaagatgacttcgagcttcgtcacctgccatttttcgcccgccacttacccagatctgggtcatgaatctatttccaatgcttcgggctaggcttgggatatctatcagatctgatgctgacaagctgaagtttggtctgttcacaatatttccatgcgtgcagccagccttcatattagcagtatctgtgccccgagaagctaccatggcgcataagtcggcgtgcccaccaataacttcgtcaagggcatcaacctcgccttcaatatattctaatgtgc

SEQ ID NO: 42223 - DNA, 325 bp, Zea mays
  unsure (1)..(325): unsure at all n locations
agctntcactatcgctagatatttcagatattccagctaacatctcattggcaatcttctccacgttggttntttccatggcttcataaaatccggccagcgctaggtcaatgatcctcttctcatcagccatttggacaatgcttgctagaatgccgaagctcagaattcaatcaaactcgacaaagtaaggaaggttaaaatggcaaacacaatgcgagcaactcaaatagcacgaaaaatactcacaacatagccttctatttatatactcagagccccacgaattggtaggtccaagaggtcagtgtaattcgctattcta

SEQ ID NO: 42224 - DNA, 406 bp, Zea mays
  unsure (1)..(406): unsure at all n locations
ggtgaagattcttcatcccaacatgggctagttggcgatgcctgagccaacccatattagtcttagcaattaagcaagtatcgagttcagatctattggaatcaactaagtatagctgaccctctaacactcccttaaatgctattgaatcatcacttcttctaaagacagtaacacctacatcagtaaatagacagttgtaacccattttgcataattgagaaactgaaagcaagttataatctaaagaatctacaagaaaaacattggaaatggaatggtcaggagatatatgcaatttaccaagtcctttgaccaaaccttgatttccatccccgaatgtgatagctctttggggatcatcattnttcttgtaggagcagaacatacttttcttccctgtcat

SEQ ID NO: 42225 - DNA, 373 bp, Zea mays
gctttcgtgaagcgttctagccttctagtggacccggaggatatctgtcccccacacagtggatccttaataatcatggtttattatcagggtaagtcattacctgcatctagagttctttctatcctagttcaagcacttggccgatgctagccgtcttttatcaaccctttattttactggattgctacgtgtagggcagtgaccaagtcttcatatccgagaagtaacagcgatccgaattgattaatacccagctggggatctccaaccacacgacatatgtagcacttaacccttgcatatgtcaactcgccaccgggtttctcaagaccagactgggttcatgccaaccgagagcacatatacacca

SEQ ID NO: 42226 - DNA, 449 bp, Zea mays
  unsure (1)..(449): unsure at all n locations
tgagaatgcaacaaggtcttgaagataaaaagcatgaagttataattgagggtttagaaagcaaaataaatgatcaagcaactgctcttgataagaaggatttcgagcttcagacaacagaaggtttattggcagaagctgaagctaaaattgcaaagttgaatacggagcttctctcatagtcagaaaacttagaacaggacaagcagaagtttaatgcaaaatttgaggctgaggtcgagaaaagttcaaatttgcaaaaattattgacagagcttcaaaacaaatgtctggagttcagtagccgatgtgtgcaacggctgaagcagatctttaattcggttggagccaactgtgaaaaatntagtccttcgactgaagacatgccangggccttcgaacatatcgagggtgaagttgatgcccttgatgaaattatagccggacat

SEQ ID NO: 42227 - DNA, 344 bp, Zea mays
atctggtcttttattggaacgagagatttagtacaagagcatattgccttccgggtatggccgctcgcggagaaatgggaaatgccgcaagaaatcataaaagatgccgacgaaggtggacttgtcagactgaagtacaccttcaagttcggagataaattcgttgagccagatgatgactgtgtaaaaagcattgaaaatctaagtgatgagctgcttgggacttattcgaaggccgaagatactgcgatgtcagcagccttcggaggccgaaaaaagaagatgctgaatccggtatttgatgcaattgtggttgtctaccctgactattgctattccattcg

SEQ ID NO: 42228 - DNA, 478 bp, Zea mays
  unsure (1)..(478): unsure at all n locations
gactggtgtagactcctccttcttttcttccgtcgccttgaatgcaacggagtgagcttcggatggttcgccaagctcgttgattttcctcgagccttctatcatgcactcaaaacttacaaaatgcccgataacttcctcggtggtcattttagtatatctaggattaccacgaatcaattgaacttgagtgggatgtagaaaaatgagagatcttaatataacatttaccacttcgtggtcgtcccacttcttgctcccgaggttgcgcacttggtttaccaaagtcttgagccggttgtacatgtgttgtggctcctcccctttgtgaagccggaaccgaccgagctccacctcgatcgtttaccgcttggtgatctnggtgagctcatctccctcgtgcgcggttatgaatacattccaaaacattcttggcgttcttcaacccttgtactgtgttatattacctcttacttat

SEQ ID NO: 42229 - DNA, 398 bp, Zea mays
tctacttgaattaagctcctccttcttttcttccgtcgccttgaatgcgacgggttggacttcggacgtggaaggatcatcaagctcgttgatcttcctcgagccttcgatcatgcactcaaaacttacaaaattcccgattacttcctcgggggtcattagtgtgtaccttgggttgccacggattatttgaacttgagtagggttaaagaaaataagagatcttataataaccttaaccacctcgtggtcatcccactttttgctcccgaggttgcgcacttgattcaccaaagtcttgagccgggtgtacatggtttgtggcgtctcttctttgcgaaaccagaaccgaccgagctcccctcgatcagctccgctggtgatctttggaactcatc

SEQ ID NO: 42230 - DNA, 471 bp, Zea mays
  unsure (1)..(471): unsure at all n locations
taagctntcaagttatgggttgcttatgatttggacaggaggcaaggtgtttcatggttantggaaaataaaatggatgcaaattagactcgtttgtacaaaacagtctgtcattttcatgctgcatgtgcactgatgcactgtttggatcgatacctaacccttctggccaggccaatacttggccgttaactaaagataaagaggctctgccacttttggatttgtgccatcttttgggttgaccgatgcccctgcgcggcagatttggggctgactcatacgccaaagtttggccagcagccaacatatgtggcatccaaacttgccctgatagatcaaggtcctgtttgggttgatgcctaacttgccacactntgcctaactcttctgcctaatgttagttcttcaatgtcaacgactaaccttatgcaaagtgaatggtgctatatctgtcgctcatcttttata

SEQ ID NO: 42231 - DNA, 496 bp, Zea mays
  unsure (1)..(496): unsure at all n locations
agctttaacaatggtatgtcgtatgaataatttattaccatattgctctcaccgaaagagtagtaccattcagtaaggaaatcaatggttatatatgttagtatagtatatgatgttactatattgagttctctgctctgcactgtcatggcacttgttatgatagggcaagataacccatctcggcccatttattattacatttactcattagaaaccttaaactggaaccaatacattaatttgttagaatagttgctcagctatgggtgatgggctaaaatcagagcttagactctgtttggattcaaagtattttcggattattggagaaatactacggttgagcaaaatactttggtgtttcanaagctgctgcagtgtttggacctgctacaatgaagctggttatcaacagctgtgaggacatgatgcagtgtttgtggtttaacaacttaatgttgatgaatnntttggcatatggttcattgatatc

SEQ ID NO: 42232 - DNA, 485 bp, Zea mays
  unsure (1)..(485): unsure at all n locations
ntcttcgagtagttatgttcaggcctctggtaatcctgttcctcactcttaattgtagggggctcttgtgttactgtgtgcagcaaaagtggtgacggatagagtttctgggaggtcaaagggtttcggtttcgtgagatatgccaccatataagatgccgatagatcgcggcatgagatgaacgccaagttcctggatggatgggtcatcttcgttgaccctgccaagccaatgcagccaaagcccgctcctcatcatgacactggttcatcgcatgctggcttcacgacgaacaagactgtatgatggtgcggctaggctcattgatctgtcgcgatatttcacggcacaaaacttggattgcaggggtggatctatgggtgttcgtcacccggataaaatttataaattctttagaaaaacacgtaaagttcaagaaaattgtatcatgtagcaaacctgaccttgtacccgatatattttg

SEQ ID NO: 42233 - DNA, 322 bp, Zea mays
  unsure (1)..(322): unsure at all n locations
actgcggcatgcaagccttttgttatgctgatgtcataattaacgatatggtgtgcacttggtcactgcgcatgggccacgaaatntcgtcatgcagatgtaagtgaaaacttcatcatgtagatgtgagccacaaaacgcgtcgaactcatgtggcgtttggttgagcacttgtaatggtaacattaatgtaaataaataacattggtatctattaccatgggaatgaaaagcgctaattatttggatagatatggtaacgttttctatgggcaatgcgtgcggacgcgcttgccgtttgcgttgcaagccgtgtttgcgt

SEQ ID NO: 42234 - DNA, 388 bp, Zea mays
  unsure (1)..(388): unsure at all n locations
gtggatgacgtggtgatcaagacagagaattcanaaaatttcattgaagatttacagctggtcttcaacagtttacgacgatacagatggaagcttaatcccgaaaagtgcgttttctgagtgccagcaggaaagttgctagggtttattgtcagccaccggggaattgaagccaatccagataagatcgaagctatcatgaggatggaagcaccatgatcacagaagaaagttcaaagactcatcgggtgtatggcagccctaagcaagttcatatcaaggctgggtagaaaaggcttaccattctatatgttactcaagaaggtggacaaatttcagtggacttcataagcacaagaagctctagatgcgctgaataaattcttga

SEQ ID NO: 42235 - DNA, 309 bp, Zea mays
ggctgcagcttacggtggtcgtggtctcggcatcgtgagtctataagatataaatcgcgtgccgcctcgctccttggaccagcccataaccaatctgcgcgctcgcctatgatcccatcgagctcaccaccaccaaaaagccgggactcgtgcgccggtaacctcgaccgtgaccgtcgccgcgggccactaccctgcacgccgttactggccacctgtgagcgtccgaccgttgtcgctttgggcgtctgggaggatctcctcgcgtgtccgttgacgcgagggctgggccttctcaccgcggacgga

SEQ ID NO: 42236 - DNA, 364 bp, Zea mays
tagaatcctgacctgaagaccttgccgactagcgtcttggatgctgcgtgtattccacattgcccagcgtggacctcatctagaagtcgcttcccagtagatgagagaatgcacttcatgatgacgcctgacgcgccccatctgtataatgtcctcccaatgagtgtgtagtgggctgactgtctaacgatgcgctcggctacattgttgtcatctggttcctcttcattctttatatatatgatgatcggctgtctccagtcatcatagtctgactctggttgattcacgatattacactcttctgcctgatccattgagatgcttggttgtggtatttcttgtacaaagacttcgggtggga

SEQ ID NO: 42237 - DNA, 407 bp, Zea mays
  unsure (1)..(407): unsure at all n locations
agcttgaaatgtgtnttcctccatcatttgttgtttgcaagtacacctaatcatacatctcgtggatcagataaaaatattagggccactatattnacatcatatgtttcagttggagcgatacctgcgagtattaaaaggttatgtgcgaaatcgcgctcacccagagggttcaatcatggagggatacactacagaagaagtgattgagagctgtatagattacatcagtgatggaacaatgataggtgtgcctgtacctaaacatgagggtaaactatgtgggagagggagaatgggcaagataacttttcgcgctgaggattacatgctagtacattgtgctcatggtagtgtactacaacatctcacgatagccgagccttacatagaggaacacctggatg

SEQ ID NO: 42238 - DNA, 400 bp, Zea mays
  unsure (1)..(400): unsure at all n locations
atcttaagcacgagctgcacttgaccttgactactcggtgcatattctttgntagtggccaatagaatcctgacctgaagaccttcccgactagtgttctggaggctgcatgtattccacattgcctagcatggacctcctccataagttgcttcccagtggacgggagaatgcacttcatgaggacgtctgatgcacccctcttgtacaatgtctccccaatgagtgtatattgagccgactgtctggcaatgcgctctgccgagttcttgtcgtctggatcttcttcattctntatatacttgatgatcggccttctccagtcatcagagtctgactcgggttgatctataatgttgcactcttcttgttgatccattgagatactcggctgtagtat

SEQ ID NO: 42239 - DNA, 376 bp, Zea mays
  unsure (1)..(376): unsure at all n locations
tgtccttatcttaatgacatgcagntntattctcattctggttacattattcagacatgtcaccacattacacagctctttcatacatttccatctttctgaagcaatgtggaccctcttttctgtagttacattattagagataacggtgccactttgtttgctttcttaatatcttgataatcttagcgctaggaagtgtgatagatccttggtttctaaatttgtgaacagattagctctcacccttgatcatgtttacaatattacattaggaaattattaacaattgtgatgttcacgtatgccatttgttaaatagcattagataaaatcatattacgatttctggtatctggtactgggtatgttgttg

SEQ ID NO: 42240 - DNA, 339 bp, Zea mays
  unsure (1)..(339): unsure at all n locations
agcttcctataccatagttatagccccatgttccagctacaactntgctatgggaatcatacccaaacttgcactggatcttatttaaatccgggttcaaagattgacccaccccactgtcagaccagtttcagtcatcagtcagcctgacagtctgattttaagtgggattatctccaaatattccttaacaactatgctcacaaccttaagcaaagttgttatcctttgtttggtctgcaagtttggtgtggtaacctaagacaaattcttattaatttgtaagatacaagggctcaaagttgaagaaaacacactgatttcagacttaagactcta

SEQ ID NO: 42241 - DNA, 395 bp, Zea mays
acctgtccttctccatactcctacgcgcccgttttctgcgcctcataatgtatccatgcatgttcctgtctccgcatcacggctacagcactatggtgagtgaggtgttttgttccgctaccttgtactgtgtttggaatggtgctgtttggattgataaacatgatgtgttccttcgtttgattgcacatgtttttttattcaccagatccacatgtgtcatcttcattgtctgccagcgagaaaccggctaatctgttgttaccattaccgatagctacacatgctgctccaagggctctaccaaaaaactctaacacatcccttcctcagagtggatcgcaaggcttgacttatatacgctggtacatgtccttgcatgtgtaattttacca

SEQ ID NO: 42242 - DNA, 314 bp, Zea mays
agcttctggttctaaagcttcatatcaagatactgaagccgaagctgggccctcagagccctcaaatgcaaaaaccttggaaagtgaggcagataaaataacaaagccaacttttgctgaaagaactggttgtgttacccccgaagcatccaaaattcgtgattatatttttcgtcatgcttcggggaaaaaattaacagataaagaagaacaagaggcccaacactatgcccaaaagttgaaatatccaaagagggcgttgatatttaatggcagtggagaagaagatttcttgtattgcctccccgacagca

SEQ ID NO: 42243 - DNA, 405 bp, Zea mays
ttacggaccttagatactcagctaatcccgaaagtgtgtcttctgtgtcccccgatgcatgctcttgtggttcatcgtctctgagcggtgcatcgaatccatcccggagaagattgcagccatcaccagcatggggccgatcaaggacttgaaaggcgtacagagtgtcatgggatgtctcgcggctctgagtcgcttcatctcccgcctcggcgaaagatgtctgcctctgtactgcctcttaatgaaagctgagtgcttcacttggactcccgaggccgatgaagccctctggaacctgaaggcgctcctcacgaacgcgcccatcttggtgccccccgctgccggagaagccctcttgatctacgtcgccacaaccacccatgtggttagcgccgcgaacgt

SEQ ID NO: 42244 - DNA, 323 bp, Zea mays
  unsure (1)..(323): unsure at all n locations
agctttatcaacctttcttggtgcttattaaatatactgcgaattntataataggctcaagtcattaatttaaaattttcatacccttttccttattttcttgatatttgctcatggagcttacttatggtttttattatggttacacattcttacctttttgaaagacccatttgttttgatcatgatactttcaagtatatacttggtgagttctttattcctaagataattntgatgctcatgcttactntggttcacataaaataaaggttcttggtttggatttgtaaagaaaccctangtacactggggtgtacaac

SEQ ID NO: 42245 - DNA, 421 bp, Zea mays
  unsure (1)..(421): unsure at all n locations
gccgaagctacaaaagtcgttccataagaacgcagcgtatgtttgncgaagctacaaaaagtcgttcctaagggagcgcagtataagttttctgctcaaaagtcgttccaaagggaatgcagagccaaataccgtcgaatgataatgcgaagcgcgaatagtcaacgcgaataccgccaaaatagaaggcgaagaagttcaaaatatgttcctaagggaatgcagaacttacagcgaatagtcagcgctgatacaccgaataataagcggtgaagccgaaaaataaacggcaaagagtttgtgtgttctactatggggatgtgtatgtgtgtcttcgacacaaatatcattttgcatagcataacatcatcacatcatttcgcataacataacatcatacatcatattgcatcaatggcac

SEQ ID NO: 42246 - DNA, 405 bp, Zea mays
  unsure (1)..(405): unsure at all n locations
aagcttaaggattgttttaactagcttccaatggtttcagacgaagccggtcactgctcaagctctattccagtgcacccaggatcacgaagaatacctacaggcgtacgtccggaggttcttgcgtttgagggcacaggcaccaacggtgcccaatgaaattgtcattgaggccatgatcaaagggcttcggccaggaccgtcagctcagtacttcgctaggaagccccctcaaactttggagaagctgctccagaagatggacgagtacattcgggccgataatgattttcgccaaagaagggaggaggctntcatgttttctgaaatgaccagaggcttcggaggaaggttctatccgaggcacgttagatcaattcacaactctaccccacatgatgatcg

SEQ ID NO: 42247 - DNA, 370 bp, Zea mays
  unsure (1)..(370): unsure at all n locations
tgtagtggcatcgatggatagagaacatcaccgttgcggacccaatttctcaccggcgatctctgctcgctgcggtgccgccatgtgtcgtggccgaagcttgcagttgtgcgattcacagtgaggtattcccgattctattctacctatactccgctntgtctagcaagttttagcacttttaatagggcactgtgcatgggaaagcaccgctcgtcggtgtgagctccgcagtggtggcgtgtgcgctgccgtgtttcaacgtcgtgggtggaagaagtccctccggccgttagatacacgttgtgcgctcctgattagatttgggggatgatgagctcanggccgcggatccgatgttggacgaccc

SEQ ID NO: 42248 - DNA, 477 bp, Zea mays
  unsure (1)..(477): unsure at all n locations
gcttgttgtgcaactccncgagttgctcgaagtgagcctcacgacttctcggaggggtctgggccccgtctatgttgtgtggtggaggttggtcactgtcatgcggtatgccgaggtgatctccttctaatagtcgcctagagggggggtgaatagggcgaaactgaaattctcaaaaataatcacaactacaagtcgggttagcgttagagatataagcgagtccgcgagagagggtggaaaacaaattgcaagtgaataaggagtgtgacacgtggatttgttttaccgaggtttggttcttgcaaacctactccccgttgaggtggtcacaaagaccgggtctctttcaaccctttccctctctcaaacggtccctcggaccgagtgagctttctcttctcaatcacttggaacacanagttcctacaaagaccaccacanaattggtgtctctttgcctcaatacaagtgagt

SEQ ID NO: 42249 - DNA, 399 bp, Zea mays
  unsure (1)..(399): unsure at all n locations
acatgtgctaagcggcgatgcctctgccagcccatgctagtcttatcaattaagcatgcatctagaccagcctcctcttttgaaaaatcaactaaataaagtttgccgtctaataaacccttaaaagctaatgaaccatcacttcttctaaagacagacacatctatatttgtaaatagacaattatatcccatattacatagttgactaacagatagtaaattatatccaagagactcaactaataacacattagagatagagtgctcattngatattgcaatcttgcctaaacctttcacctttgcctggttcccatcgccgaatatgattgaatcttgggaatccttattcttgacgtaggaagtgaacatcttcttttcccccgtcatatggttc

SEQ ID NO: 42250 - DNA, 406 bp, Zea mays
  unsure (1)..(406): unsure at all n locations
tgctgcatgcaagcttctgccgtgacgtgattgtccctggccggttagaagagtaccttgtctgggccacactttggactgccatgaggaatgacttcgccatgactgcggtattgcccccgtacgaaaatatagttgcttcgtagctcatcaagaactgcttcggatctgagtgcccatcatacatggggagctgaagtggcttgtatgatggtggccatggagtagcctgcagttccgcattcatcatcattgtaagaattgtcttgacgaagctctctttgtggaggtctgtggtcctggtcatcttgagtaagatgacgtatttcttcagcaacttcatcgatctttntctgtagatcagaaagacgaagcattttctctctctttctttcgacctgctgat

SEQ ID NO: 42251 - DNA, 443 bp, Zea mays
  unsure (1)..(443): unsure at all n locations
ttcctggcagcataacagtgcaatagctatgaatgatgtggtaacttcacacctactcgtctgtttatatagtgctgcaagtaatatggtgaatcgtcaagactcctacaccggacgaacagtcgctcacacccactgaacggtgggccacaaaacccgagaaggtgaatctgcatggtgggaccattctccgctcggaaattntatcgtttcctggcaacgagctcatggaagggtgttttcagaccttctgcttcccgaagcctaagagactttntcatggatcaagctcgttacgaaaaacgatctatcaccgcgaatgggctactgttgtggccatgcttcgtcgccgaatgtcctgcangaacaaacaccttctgcatatccgtttatacgcagtgccgaagctaccactcatgaagcttcggtactataacgtatat

SEQ ID NO: 42252 - DNA, 428 bp, Zea mays
  unsure (1)..(428): unsure at all n locations
ctaccagccgaaggtagcgttataaatataattgagtccgaaagagaaggcaaaaacaaatcacaagcgagtaagagcggatgacacggtgatttgntttaccgaggttcggttcttgcaaacctactccccgttgaggtggtcacaaagatcgggtctctttcaaccctttccctctctcaaacggtcacctagaccgagtgagcttctcttctcaaatcaattatgacacttagtccccgcaaggaccaccacacaattggtgtctcttgctttgattacaaagaacttggatgcaagaatagaggaagaagaatagcgatccaagcgcaagagctcataagaacacaacanaactctctcttctagtcactaatgctctgagtggaattgggacttggagagattttgatcactctatttgtgtc

SEQ ID NO: 42253 - DNA, 441 bp, Zea mays
tgacatcagcttcttacaaatctttcatctctaaattgctcgatagaagaattttaacttcctcaatcacattgagatttgatccaaagatcaaaatgtcatcaacataaaggcacagcatatcagactcaccctcaccataccgatagtatacacatgtgtcagattcatttacaacaaagccagctgctgtaagagtattatcaaactcttcatgccattgcttaggagcttggtttatgccatacaattgatttatcaacctgcacaccttgttctcttgaccatacgcaatgaacccttctggctgatccatatagatctcctcatccaactctccatttaggaaagctgtcttaacatccatctgatgaatgataagaccataagatgctgccacagctattaatgtgcgaattgagtcaatcgagccactggtga

SEQ ID NO: 42254 - DNA, 467 bp, Zea mays
  unsure (1)..(467): unsure at all n locations
tcttaagccacctgctgcatgcaagcttctatagggagagcacactttaggattatcttatgttcattntgagaaagacaggatttgtagcgcatgccaggcggtgaagcaagttggagtccatcatccacacaagaacatcatgacgaccgacaggccacttgagctactccacatggatttattcggcccgattgcttacataagcatcggcgggagtaagtattgtcttgtaatagtggatgattattctcgcttcacttgggtattctttttacaggaaaaatctcaaacccaagagaccttaaaaggattcttgagacgggctcaaaatgagttcgccttaaggatcaagaaaataagaagcgacaacgggacggagttcaagaactctcaaatngaaagcttccttgaggaggagggcatcaagcatgagttctcttctccctacacgccacaacaaaatg

SEQ ID NO: 42255 - DNA, 413 bp, Zea mays
tataccgatgctggttcttgctgtcctttcagtgtggacaatgtaccaagcccttccgtttgtgaagaagatggacctttactcatgtttcttcgagaagttctccatgagctaccgttcctttctagtggtaagtcaaggctccgcgaactggaccatcgtgttctctgctcgcgcgttcgttcagttgccaattggagtgttcgactgttcttaacagaagttcaactatctggtatgcgccttgccgtgacacatggtgtgctggtgctctacccgttcctgtggctgaagctgtaccagcacgtgttcaagcagcgcatgtccaatctggggaatgggagcaggaagaaacgggcctgagaaaatctggctctgctcagctcagctgccacttgttgctgtcatgtgaa

SEQ ID NO: 42256 - DNA, 372 bp, Zea mays
  unsure (1)..(372): unsure at all n locations
agcttgagtgggacggatagcgattgtgacgtatgataagatcattacgaagctatgcgcagataagcttcaacatgacagtagaaaagatgaaccgacttaaagatgaaaagccgaatcagaccctgaagaattactgtagagttgttgataaatataaagggcactaatgtaattntacacgggctgcgtcccgtgcctataaatagatgaacagtactctcgtactgttcacgctgacttggcattcgcttttggcgtcacacttgtatntacactccttcaagccgaaagtacatttgtaatctaatattgttcgttcaaataagataaatggaaatagattaataataatggttacaaaagattata

SEQ ID NO: 42257 - DNA, 251 bp, Zea mays
ctgccgacgacagcgtgccctgtccgagcacatgacacgcgcgcgctggcctgctctctcccatgcattcccaccatatactcccccgtacgaccctgcgtgatgagagctgcaggtgccgcctgctacgcatacctggtctggtctggtctgctgttacctacctgcatcccggtcaaagaagtcggtcgctgaccgcccgggtgctcatttccaacctgacccgtaccgaccacacccgaacccggtac

SEQ ID NO: 42258 - DNA, 377 bp, Zea mays
  unsure (1)..(377): unsure at all n locations
agcttctataggaagagcactatttatgactaataaatgttcatnttgagagagacagggtttgtagtgcatgccaagcaggatagcaagttggtacccaccatccacacaagaacatcatgacgacctagaggctgtttaagctactccacatggatttattcggcccgatcacttacatgaacatcggcgggagtaagtattgtcttgtaatagtggatgattattctcgcttcacttgggtgttctttttgcaggaaaaaacacaaacccaagaaaccttatagggattcttgacacgggctcaaaatgagttcggattaagaatcaagaaaataagaagcaacaacgggacggaggttcaagaactctcaaat

SEQ ID NO: 42259 - DNA, 452 bp, Zea mays
  unsure (1)..(452): unsure at all n locations
actgtctgttcacgcanaccatatctagcctcgtattctgtctgggaaccttgtccaaaatcctcattaagttttcctctgctcaacccagaagccatctatgttgatgacctctcttttcacctagatctggtaatcttttcctctgtgaatcatgttgtggcttatcatccgaatctcgggatcccctattgaatctgccccgttatctgngtatctgctataacccgttctcaagtatcagatgttgatcttgcctaaatctctcatttctgatcattctcatactctgtctctaaggatcatgacgtcatgttatcagcttatctctaaacgacatatacatgtggattaatggatngtggttgtatctcgggatctcttatgtctcttaaagcttatcagtctcgatctcatggttggntccttctcatattaaatatcgtatcaat

SEQ ID NO: 42260 - DNA, 414 bp, Zea mays
  unsure (1)..(414): unsure at all n locations
gtgncaagctgtgaagattcttcattcccacatgtgctagtcggcgatgccagagccagcccatgtgagtcttagcaattaagcaagtgtcgagttcagctctatcaaaatcaactaagtatagctgaccctctaacactcccttaaatgctactgaatcatcacttcttctaaagacagtaacacctatatccgtaaaaagacatttgtaacccattntacataattgcgaaactgagagcaagttataatctaaagaatctacaagaaaaacattggaaatggaatggtcaggtgatatagcgattntacccaatcctttgaccaaacctttgattccatccccgaatgtgatagctcgttggggatcttggntntttcataagaggagaacatcttcttcttccctatcat

SEQ ID NO: 42261 - DNA, 461 bp, Zea mays
  unsure (1)..(461): unsure at all n locations
aactatctaattntgttaagggtaaggctctcatggttcaggatagagagggctatattttatatcctgcaaactatcctgagcataagattatgaagattcatgctagaaaacctcacaacgtttctcatcatgcttttatgtataagaatgaggcatctagctctacgcattccactcatatcaaaatgcctaaaagaaaattcctaacgcatcaaatgagcataacatttcatttaagacttttgatgcttcttatgtgctcactaacaaatcaggcaaagtagtagccaaatatgttgggggcaaacacaagagtctaaagacttatgtttgggtacccaatgtgcttgtttctaatgtcaaaggacccaagactgtgtgggtacctaagaacaaggcctacattntgtttgtaggtttatgaatccggtggataaaagtggataatcgatagcgag

SEQ ID NO: 42262 - DNA, 374 bp, Zea mays
  unsure (1)..(374): unsure at all n locations
agctctagacaaanatatcttatgtggtgttttattggccactctacactacacctctccatgagagatgagatccttcctataggttatttttgttgggatttaacagcaatactaaacctctgtgccataattcacagaaagttaatgggtgattatttagttgtgattctctaaagttgtatgccaaataggtgcctataactaacttgtcatttgataaatatcatacaacagatcttgtatttctcctatgttcataataaccaaacattagttatcccaaaggttgaggtagtttcaccttatgagttatttatgtaaggattgtctaagttttccttgttctctaaagataaaagagatcctactta

SEQ ID NO: 42263 - DNA, 490 bp, Zea mays
  unsure (1)..(490): unsure at all n locations
gtacacagatcatagtcattgacccctcttatagtacgactatctaacctattaatccagtcaagtatcttctctatactcctgaataccggtaaaaacaaaacctatgatatacctttgcctttacttgatccacaaccattgcttataaatctccaagatttcctgttttatatggtcgaaccctgcaatcttatttctccaagaaccgttagtccacaaacatttgtcattaattgccaaaacatcactaatgggcctagatgattcacaatctccccctgtgtggtaattgataacaacactacataatatattcaagagaagttttgtgtttccaaattgtcctcataccttangtataagaaggattnttgagatgagtttcgtacgacttatctcgatttgaagttctgtccgagagatagataaatccaaataatactcagaatgtaagattagctcccctatgtgtgncagaatatttcag

SEQ ID NO: 42264 - DNA, 439 bp, Zea mays
tgcaagctggacactttctattgatcattcctatcatatcccagacacttatttgtgtaaagcaagtgcacgttttttgttatgagtacggaactgctacatgtttgatattttttcctatcagagtctcaactgcttgataattgatcgtgttatcactttgatcattgtgggttttttccaatctctactaatgatacaatgaagaaccatacaacaatgactcaggttcatcagacagtcagttcattatataatatctctcagcctaatataataactccttcaactatgatgacctctgtaattcctggagtatatatttaagaggaattcctttattggatttgaattgtattaaaatggtgagcactgacctacatgggttgggtatattttttatatatgaacaaggtcacgtggttggtatgttttcata

SEQ ID NO: 42265 - DNA, 184 bp, Zea mays
gctctgctaaaatcaacctagtatattcgatcctattatactgccttaaatgctagtgaatcatactttttctaaagacagagacacctatattcgtaaaatgacagttgtggcccatcttgcatgattgagatacagaaagataattgcgatccaaaaaatctacaagaaaaacattggaaat

SEQ ID NO: 42266 - DNA, 327 bp, Zea mays
agcttgcacacatagctcatttgaataccttttatcatatctcttttatatgctatgactaatgtgttttcaagtctatttcaaaccaagtcataggtatattgaaagggaattggagtcttcggcgaagaaaaaggcttccactccgtaactcatacttcgccaccactccgagcaactctctcttctttgggggagaaatgagcatcaaggaaaaggacttcatccttgtgggagagagtaaaagctcacacacaaaaggatcggacttcgtctttggtataatcttaactcatttacttatgaccaaagcggaagaaattactt

SEQ ID NO: 42267 - DNA, 451 bp, Zea mays
gtaacacctgcgagaccttgtaccgtgtctttctaaccatattgaatgcgatatcgaatgtcatacttgatgcatactcactttatttgttcccttgtatgatgtactgtttgtttcccaatttgaatggatgaatgtatgtatgcttgcaatcgcatagagaacgatccggtcgaagagcccgatgaactctcatgagaatcccctgatcagcagtcggttggtggaggcaagtgtcctttgacctatctctgtcctattcattatttaattcacctcccgcattacacatttatacctaatgattgactatcttttgttgcccatgtccttgtttacctatctgggttggattattattattattagttagctctatgctattgctcaactctaatcaatgaacatgatgagaatatctatgatacgctcgtttcccttctcttattat

SEQ ID NO: 42268 - DNA, 361 bp, Zea mays
  unsure (1)..(361): unsure at all n locations
agcttgtgaagattcttcattccaacatgtgctattcggcgatgccagagccagcccatgttagtcttagcaattaagcaagtgttgagttcagctctatcaaaatcaactaagtatagctgaccctctaacactcccttaaatgctattgaatcatcacttcttctaaagatagtaacacctatatctgtaaaaagacagttgtaacccattttacataattgcgaaactcanagcaagttgtaatctaaagaatctacaagaaaaacattggaaatggagtggtcaagagatatagcaattatacccaatcctttgaccaaccttgatttccatccccgaatgtgatagctcggtgggg

SEQ ID NO: 42269 - DNA, 430 bp, Zea mays
  unsure (1)..(430): unsure at all n locations
tgagaaaacgaagccttcatgttccagaatttagttggagaataactgtcaaaagctgaaatagaagagcttagagagtatgccaaatcctgcggatacaaacctggagcactcctcttcggaggcattgatgatgaaaaattagattgtattcgagatcaaactggagccaaagttatcggtactctgtcaaagagtatcggttttccgaagctagaaacagacatcatccgctaccgacgacaacatatcgttggtagtttattgtattccaatttcaaggtgaactacttttcccttaacttttattggttctaataatgaaaacatgtctgacgaaagctgttttcgtgcagagtatgctgtngagcaaagccttgaaaatgcagcaagattttgaagacaagaagcacgaagttataattgaaaa

SEQ ID NO: 42270 - DNA, 407 bp, Zea mays
  unsure (1)..(407): unsure at all n locations
gagcgtgcaagcttccatctatatcgcctcatgctgttgataaccagttgtaagtcttcgatgaagttttgcgaattttccgttntgattaccacatcgtccacgtatgcctccacacgcttgccccagtgatcggctaagcatgtttgaatagctctctaataagtcgctccagcgtttttgaggccgaacggcatggaggtataacagaaagcaccaaacggagtgatgaacgatgttntttcctcatcttcttttgccaaactaatctgatgatacccggaatagcaatctaagaaagacaacacagaacatccagcggtggagtccaccacctgatctatcctcgggagcctgaaaggatccttcggacagtggttggtgagatcagtataatcaacgcacat

SEQ ID NO: 42271 - DNA, 335 bp, Zea mays
  unsure (1)..(335): unsure at all n locations
gtgcanacttgtgctaccgctccacttaataacttttatgtcactcattaattgatattaatgttccgataatgaaattggcaattatgacattaaccctgatggttaaaacaacattatttcatattaattagaacatggagtgaccacccatgataacagtgcaaccacgagtgctatcatggctctggctttggtaattagctttatatgcttagtgtctggcaaccttacctgaaatatgggcaagatggggagcggtggtgttggcatcccacgttatcatggtgacgtattcttggctaaggtacctcacccagtgggtcaccaccatc

SEQ ID NO: 42272 - DNA, 469 bp, Zea mays
  unsure (1)..(469): unsure at all n locations
agcttatggtaaccctgactgtatgaccaagatatacttataaccatagatcgtcagcgtcagatcttgtaattaatgcttaaatatatagaagttatagtcttagtattagtcttactcttagttagtcttatttagacatggtagtttgcttatcctgtgcctttatgtttgtcatgatgaactatgttggatttggatctttgtaatgactgtcgctagggtgtgggtatcccctgcactttggtttacctggtaaatgttaataaaattagttatctagttgggaagcccttttattctactttcctctttatctgagaagctgtgttcgtctgtgttggaaatcagtgaagatgttcatctgttcagaattgtggaagaattctntactcttttcttatgctgcaagatgcaagaatggtcctgatgtgtgattgcattctgcagatgttagacaacangcgta

SEQ ID NO: 42273 - DNA, 465 bp, Zea mays
  unsure (1)..(465): unsure at all n locations
gcttatgaagattcttgattccaacgtgtacaattctttatgccagagccaacccatgttagtcttagcaattaagcaagtgtcgagttcagctctattgaaatcaactaagtatagctgaccctctaacactcccttaaaggctactgaatcatcacttcttctaaagacagtaacacctacatccgtaaaaggcagttgtaacccatttacataattgtgaaactgaaagcaagttgtaatctaaagaatctacaagaaaaacattggaaatagaatggtcaggtgatatagcaattttacccaatcctttgaccaaaccttgatttccatccccgaatgtgatagctcgttggggatcttggttgttctcataagaggagaacatccttttctcccctgtcatgtggctngtgcacacgctgtcgatgatccaacttgagccctcggatgcataaacctaca

SEQ ID NO: 42274 - DNA, 387 bp, Zea mays
  unsure (1)..(387): unsure at all n locations
tatacnaattgactcttcctatctacgagtgcataagtttgatcaaagtccaaaccttcgacttgtgaataacctttggccacaagtcgggctgtgtttcttgtcaccacaccatgctcgtcttgcttgttgcggaatacccatttggtatctacaacattttgattaggacatgaaactaaatgccatacaccattccttatgaaattgttgaactcctcttgcatagccaccacccaatccggatctcttagtgcatgctctatcctgtatggctcaatagaggaaacaaaggagtaatgttcacaaaaatgtgcaacccgagatctagtgagtacccgcttatgaatgtcaccaacgatggagtatgacggcgtgatcttgttg

SEQ ID NO: 42275 - DNA, 413 bp, Zea mays
  unsure (1)..(413): unsure at all n locations
atcttaagcacctgagctgcaagctggtttaggacccactcttgtgggttctacatgttagtcacaatagnttttggaacccatatgcaagtcttgtctcccttgtatttagatcccaacttcctagcaacgacttttgcatttttgcataaaagtacaaaggaagcattgcaagcatgatagacagtagtaggtccattgcaagatttactaggcgcgtgagacacaacatgattacgcctaggcctatttctatcatgtgcataagtagagcttgatgcanacatatcatgtgaattattataaataggtaaagcaacatgatcataactcctattataatgagaaagtttcttaacatgagcatagagataggcttgtttcttttgatcatgtgaggaatgtgagctact

SEQ ID NO: 42276 - DNA, 468 bp, Zea mays
tatacatgaattattatacgaaacgaatccctgtggtaaagagcaatatcataacaactttggttgctacagcttcggtgctcgctctggatcaagctgtcccgtgccaaccttttggaagagatggcccggagaatggatgaaagaatggttctatgtaaaaatgatttgaaggttcgagaagatattaaggatgtcatcatgtgccccatttggcagcgcttcggacttcggaaaccgaaggtagaaatggatgaagtagtcgaagaatgccaacgggccttcggcgtagtctgctcttttattgggacaagggatttaatacaagaacacattgccttcagagagtggcctcttgcagacaattgggaaatgccaaaagaaactgttaaaaaaactgacgaaggtgggctagtcgggctgaagtatacattcaagtacggagacaagttcgttgaaccagatgat

SEQ ID NO: 42277 - DNA, 478 bp, Zea mays
  unsure (1)..(478): unsure at all n locations
tctanagggagagcacattntatgattaacaaatgttncatttgagaaagacaggatttgtagcgcatgccangcgggaaagcaggttggagttcatcatccacacaagaacatcatgacgaccgacaggccgcttgagctactccacatggatctattcggcccgattgcttacataagcatcggcgggagtaagtattgtcttgtaatagtggatgattattctcgcttcacttgggtattctttttacaggaaaaatcacaaacccaagaaaccttaaagagattcttgagacgggctcaaaatgagttcggcttaaggatcaagaaaataagaagcgacaacgggacggagttcaagaactctcaaattgaaggcttccttgaggagganggcatcaagcatgagttctcttcttcctacacacctcaacaaaatggtgtagtggagaggaagaatcgaactctattggacatg

SEQ ID NO: 42278 - DNA, 469 bp, Zea mays
gtcacctgaggcatgcaagcttccactgtaagccacgacacttgttcaacttgctatcgacttgcttcggctgcacgacaagagcatggcttctctccgaagcctatcccttctataaataataactacttcaacacttcactcacacttcgcatacactcatccacaacaatgaaccggttcgtagattccaatgtatttcttaggatggcgcaagacatgaaagttgaagaccatgagctcgagggtgcgacttaccaacatcgtaggcgtcgtgcacttaacgagcgtcagtatgctggttccattgaaagtcgcctagaggggggtgaatagggcgaatctgatatttataaacttaagcacaactacaagccgggttagcgttagaaatataaacgagtccgacagagagggcacaaaacatatcgtaggcagataaagagcgagacacgatgaattgtttact

SEQ ID NO: 42279 - DNA, 497 bp, Zea mays
  unsure (1)..(497): unsure at all n locations
ggagatagcattatacgggttgaaacaagaacctagagcttggtacataatattaagacatttatcactctcaaatggattcaaaatgcgcaagttagatactacactcttgactacgaagattttaagtgatttgtttacatgtcaagtttatgtttatgatatcattttggattaacaaaacaagatttttgtgaagaaattggagaaatgatggcttatgagtttgaaatgtcaatgattcatgagctaagatacttcttggactctaaattaaacaaatgaagaacgacacatttgtgggtcaaggaaagaatatcaattatatgttgaagaagtttggaatggatacagcaaaaccaaaacacacaactatatatggggacaaattgtcatttggacttatatacaactggtgatgtggtagatcacaggctatgtcggtcaatgatgganagcctagtctatgtgacgacatcaaagccagatgtgatatt

SEQ ID NO: 42280 - DNA, 487 bp, Zea mays
  unsure (1)..(487): unsure at all n locations
agctgtttgggcttatcttctttcttcatcattatctgatgataacctgagtaacagtccagcaggctcataagctccaaagtgggtgccgcatctatgagggagtttattcttgacaagggaaattcatcctttggacacgccttattgagatctgtgaaatcgatgtacattctccactttccattggccttctttaccatcacagtgttggctagccatcttgggtatgtcacctctctgatcactccaacactgatgagtcttttaactttgtttcttgcaccttcggctntgtcatctgacatcttccgaagcttttgcttcctcggtctaacggttgggtctacattgagagagtgctcgatgacatctctattgacaccacaaagatcgttagctgaccaagcaaagacatctttgntattgaacaagaactttaanaagccttttctttcttctcacacaattgngatccanacaacac

SEQ ID NO: 42281 - DNA, 484 bp, Zea mays
  unsure (1)..(484): unsure at all n locations
ctggctgtgcctagtgctatggcaattgtgctagtatcgcaatactgcggctntcgctgcgggccgcgtcctcaggggaggagcatcacngctacctccagtgctgcggccagcacgaccactgccggattgccccagcgcgacgtcggctgtgcacaacgccatagacctatcgctggctggcgcagaggagcgagccatattgcagcacatcgacaactatgcaagagacgcacggcgtcgcggacatcttcaatcaccagtgcttggctcangtgcgtctgctcangaacgcccagatccccaactgcagcttcgccaactcaaatatctaagcgccttgacttggagctcctgcagccagccacctgctgccagcaattagcatccatccggagtgcactcgccaacaagggacatccttcccccacatcgattctatgtacagtctgctgctcttagccggtataagcattcttatatt

SEQ ID NO: 42282 - DNA, 403 bp, Zea mays
  unsure (1)..(403): unsure at all n locations
cttcatccncacatgtgctaagcggcgatgccacagccagcccatgcaagtcttagccattaagcatgcatctagaccggcctcttcttttgcaaaatcaactaaataaagtttgccgtctaatacacccttaaaagctaatgaaccatcgcttcttctaaagacagacacatctatatttgtaaatagacaattatatcccatatgacataatngactcacagatagcagaatgtatccaagactctctactaaaaatacattagagatagaatgctcattataaatcgcaattttacctaaaccttntaccttgccttgattcccatcaccgaatacaatngaatcttgggaatctttattcttgacgtaggaggtgaacatcttcttctccccgtcatat

SEQ ID NO: 42283 - DNA, 380 bp, Zea mays
  unsure (1)..(380): unsure at all n locations
taatgctcctaagaaattgtctaactctgttaagggaaaagttcccatggttcaggataatgagggctacattttatatcctgctgattatcccgaacacaaaattaggagaattcatgttaagaaatatcattctgtttctcaccatgcttttatgtataagaatgaggcttctagctctaggcattctactcatgttaaaatgcctaaaaagaaaactcctactggatcaaatgagcctaacatttcatttaaaacttttgatgcaacatatgttttaactaacaaatcangcaaagtagttgccaaatatgttgggggcaaacacaaggggtcaagaacttgtgtttgggtacccaaggtgcttgtttctaatgtga

SEQ ID NO: 42284 - DNA, 429 bp, Zea mays
  unsure (1)..(429): unsure at all n locations
agcttctcctcaatgggcgccactcctactctctctcgtatatcatcattccggactcggtctctccttgtgtggccacatatccagcgcaacatacgcatctctgccacacttagttgttggacatgtcgtattttagtgggccaacattctgctccatacaacatagccggccggattgctgtcctgtagaatttgccttttagtttgtgtggcacccggnggtcgtataagacacccgcagcttgccgccacttcaaccatccagctttaattctatgactgacatcctcatcgatgtctccctccttctgaagcattgatcctaagtaacgaanaatgtctttcttgggtaccacttgcccatcaagactaacatcgccatcctcataccccatggcactgaaatcacacttcatatactctggt

SEQ ID NO: 42285 - DNA, 417 bp, Zea mays
  unsure (1)..(417): unsure at all n locations
tatgaagattcttcatcccacatgggctagtcgacgatgccatagccaacccatgttagtcttagcaattaagcaagtgtcgagttgagctctatcaaaatctaacaagtatagctgaccctctaacactcccttaaatgctattgaatcatcacttcttctaaagacagtgacaccaacatcagtgaatagacatgtgtagcccatttgacataattgagaaacggaaagcaagttgttatctaaggaatctacaagaaaaacattggaaatggaatggtcatgagatatagcaatcctaccgagtcctttgactagaccttgaattccatacncgaatgcgatagctcgttggggatctttgttattctcatatgacgagaacatgcttttctcnccggtcatgtggattgtgca

SEQ ID NO: 42286 - DNA, 226 bp, Zea mays
tattgctctcaatgtttctaaaagggatatcaaagccattgacagaatcagaatgattctttttgtctcaaagaagaaaggaggctagacgagacaatcgtcttatagcatgggataaagtcactaagactatcgacttgggaagccttggaattcctaatcttctgactatgaactgatctctgcagatctcctgactacaaaagagacgacttgattatactga

SEQ ID NO: 42287 - DNA, 420 bp, Zea mays
  unsure (1)..(420): unsure at all n locations
tagctctagtgcgaacctgataaacaacataatctgttcttgtcaggttcaataancatctcaccactctactaaaacctcttattatagctctatgggcccagatgaatgcaaaagagtaaagtgcagggatgatcctcccatattgattatatttatctaccataggatgaatgacacctctgaagtgagtgtcattagcatagttctttagatgtatagcaatcttaacaagaaaatgaagcataagtggagatgcaggatcataaacaccatacaatgctactgtagaatcataaaatagctcaagagattaagtactntatctccaataacccaatgtgcactcagtaaaataaatcgatcaccttcagccctatgatagttngcatgaatgaaagtgatgaaaggtatcctatg

SEQ ID NO: 42288 - DNA, 365 bp, Zea mays
  unsure (1)..(365): unsure at all n locations
agctngattntaattgcacaaataacatttctgtttacgaagcattggttctaggtcttcggaagttaaaagcaatgggaatcagaagggccatacttaaaactgattcccaggttgtttcgggtcatattgacaaaagttgtaaggctaaggatccgaagcttgaaaaatatctggatatggttcgaagagtcgaagcttccttcgaagggttttctgtcaagaatatccctcgaggacaaaatgagcatgctgatctgctagctaagtcagcagcacaggggctgcctttaccttcggatgtgttcttcgaaacaataaaagcaccttcggtggaacttcttgaaagagcagttcttaatata

SEQ ID NO: 42289 - DNA, 302 bp, Zea mays
  unsure (1)..(302): unsure at all n locations
agtcaactgtgtccattatcacagtaatagcctttggtaccccgaacccgacaacaatattntgccagaanaacttctggacggtggccgaagttattgtggctaaaggctttgcctcaatccatttagaaaaatactccaccgccactacaacatatcttaagttcccttgggccggtggtaacggacctaacaagtcaaagccccacctttgcaatggcaaacaggttgtatgagctgtgtaaggacaaaagtgttttgatctcgtgcacatttctgacaccttccactttgggactaat

SEQ ID NO: 42290 - DNA, 380 bp, Zea mays
aagtcatataatgaccctaagaataaactcgaatcacttttgtacccctgcgataccagaaaccctaattggaaccctgaaagctctaagtccaaaccctatgggcttatgtgcaaaagtaatgagcctttggactaaagtataaaaactactatgtttggacatataaagtcatttggttcacaaatatgtgaatttacaagccaaaccctgagatttggacttaagtgcaaaatggacctcatttgagttctacactaagtctgaaattcagtgttaaaggctccactttatggctttgtaacttgcaaagcatagggtttttgccctatgtcaccacatcaaaattgaagacccattataggagaacaactttgctt

SEQ ID NO: 42291 - DNA, 321 bp, Zea mays
  unsure (1)..(321): unsure at all n locations
catgcaacttaatcagcttctgcacctcatctatcattattactcgngcatatattgtatcaccatacttagaaagctgcttattttccctaataacaacgcaaacccataaatcactcattgaacaatccagacacaactaaaagccatggtaataataacatcagacgaggcatacaaaataacaaggctgaccagtcagttctttacctaaagttgtccaacgacagaaactgtgtgatctcctatacaacaacttattgaacgatgcaaagaccttaatgtgcatgaccaagatctcaacaacctttgactgatcat

SEQ ID NO: 42292 - DNA, 499 bp, Zea mays
  unsure (1)..(499): unsure at all n locations
tacggacctataaaactaagcttctaagggagaacacgtgatagggttgactaacgtgcatttcgaataagatagaccttgtgcagcttgtcaagcaggtaaacaagtgggaggagcacatcacagcaagaacgtgatgaccacttcaagacccctggagctgctgcatatggacctcttcggacctgtcgcctatctgagcataggaggaagtaagtatggtttggttattgttgatgacttttcccgcttcacttgggtgttctttntgcaggaaaaatccgaaacccaagggactctcaaacgcttcctcaggagagctcanaatgagtttgagctcaaagtgaaaaagataaggagcgacaacgggtccgagttcaagaaccttcaagtggaggagttccttgaagaggaagggatcaagcacgagttctncgctccctacacaccacagcanaatggtgtggtagagaggaagaacangacgctcatcgacatg

SEQ ID NO: 42293 - DNA, 390 bp, Zea mays
  unsure (1)..(390): unsure at all n locations
ttaagtcacctgcngcatgcaagcttcgngttcagttctgatattattgcttcatcttcctccagtaaaccttcggctgcctggagctcaaagttctttntctcacaagcatctgattgctcttttattttgttttccaaacttccaattataacttcatgctttntatcttcaagatcttgctgcatttgcaaggctntgctcaatagcatactctacatagacacaaccttcgtcagacatgttnttattagaagcaataaaagttagggacaagtcattcaccttgaagttgaaaaaaataaactaccaacgacatgttgtcgtcggtagcggctgatatctgtttctagcttcgggaatccaatactcctggacagagtgctgatg

SEQ ID NO: 42294 - DNA, 447 bp, Zea mays
tactaagcttgtgcaagtccacttgaactaatcttcggagaaacccgacctcttttcatcatgacaccagaaggtccaacccaacaagcgttggatgaattcagaattattgcagaacatatcagtacaagagacctggttcaggagtttttggctttcagagtttttcctagtttaaaagaatgggaaatgtcgaagctagagggggagaagaaagaaggggaacttgtgcggttaccttactattacaagtttaagaaatactttaaaacaccttgccaagagtggttggagacaattgaaataatgtgcaatgaaatacttggcaattactccaaaaaagaagatcagttgatgactgcggccttcggcacccgtccgaagcgaagactgaatcgagtgctggacgccttgggttttgaataccctgactacgaaaatctgaat

SEQ ID NO: 42295 - DNA, 492 bp, Zea mays
agcttgacacaatgccatactgaaacatgagaattctatatgctgaggattgtctcaagaatacgtcctctgaatgtctggatatgcgcctgtatatacaattatacgtattgatgtaagtgaaaggaacaaaccactgagggctcaaacatatagttgaaacacaagtaaattgctactgacctgctcctcatcccaccaagatttccaactgttgtcgccctttacaccaactccacctttataaagtaaccagtttgtccagtcatcaaagtcctcaacagtcctaggagagaggacaaagtacatgagaattatgaaaaaaccattatacatcatccacaaattttactgatgactcttaattgaatcaatagtgatcaagtttatggttagagttacggtttctctcattctaacatgagatctagctaggttctcccttctctttaccctacagcaccacaccttcttttccacattctcttcacg

SEQ ID NO: 42296 - DNA, 382 bp, Zea mays
  unsure (1)..(382): unsure at all n locations
agctntaacacgtncgtttctccctctcccattatctcaccattaatggccgtcgaccacgactatccgactcctagcgcccctctgctttcctctcctccctctatagaatctcgatcgagccgaagcttcctcctctgccgagcaacccaagcctcttccctttntctctctcacaacgccgcctcgccagaacagtctgtcgtcgaccgcgtagctcgcccagagaacaccacaccacgtctggctcgctgaataccgcaccgtcgatcgctgtcaccgaagctagtctgcagagcaccccggcacccgcagcaacatcacgtgcccgtcgtcgagcccctactcgcgctgtgctcagctcgccatcgtgaagctcatc

SEQ ID NO: 42297 - DNA, 431 bp, Zea mays
  unsure (1)..(431): unsure at all n locations
ntatccaagacaatcttgatctttgtcgagctgtgatccgtcttatcgcagagaacacaaagatccgattcttggttgtgtgcacaataatgtcaactctctttgatgcnagtgcctctgttcctgagccttttcaaacagagctactacgtgactcgctatatctgcccgcaattttaatgccgaagaatgcagactgcgtgctccattttttgagggcattattagctaggcgcatcatntttatttgtagacgtctgatcgggacagtgagcagaacctgagtttcccaagatcgctggacctcatcgacgaaacccggtcgaaccgcgcaaaaactttggacctgaacattgagttcctggtcgggagatgcatcggaagtgatagactgatagtaacgtacaatgatcagagattgatgaagaaag

SEQ ID NO: 42298 - DNA, 455 bp, Zea mays
  unsure (1)..(455): unsure at all n locations
agcttcggaccatgggaatcgctcgccagatttcttttcttgttgctgcctccattaccggtgagaaatccccatggggtcctccctaccatcccctttgcgcgacagtaaaatatatggagttttgttggagcacctgaatttctgggctccctagccggcgggcttcatggccggggtgaggttagacgagagaacagagtgagaggtacgagagagagaaagggacgcangagcgtcgtcccgcctggcagctgacggaggaagataggctccctgtcgctcgattgtgaacggacggtggagattagtcatgggaatacctattgcggggaataaactagagccgtagatctgggatcctgtggtcgcgagcgcgcacctgttcattatatgggtcgatctaatctatgccgttcgtgcctcatcggacgactgaaaccaactcataccct

SEQ ID NO: 42299 - DNA, 337 bp, Zea mays
  unsure (1)..(337): unsure at all n locations
cagacttagctaattggctaagactgaagcccagtaaactatagccatgtttggaccattgtagtggctaacatgtagggaattaaattacgtctcttatctcacagcaatagaactatagtagaacaccacgttgggttgatggccataccctacaagctatttggagatggaaaaaaagggctggctaaagttggaccgtcacactgttcataagtgaattatgttattcagtcctgataactcgattacagcatgatgcctaatttggaactcatntgtgactgattcgcggggcttctgattaaagtttccatagcacattagagaccataat

SEQ ID NO: 42300 - DNA, 119 bp, Zea mays
ggggataagtggagtgattgcgttctgaacactatgaaaggtggttaagttgctatccgaactaatgatgtttttggtccctattctaaaactcataagggtgtgcgccaaggtgatcc

SEQ ID NO: 42301 - DNA, 409 bp, Zea mays
  unsure (1)..(409): unsure at all n locations
tctaaagggagaacangngatgggactaactaacgtgctttttttataatagaacttgngtagctcgtcaagcaagccaacaggtgggaagctctcatcatcccaaaaacgtgatgactacatcaagacccccggagctgctgcatatggacctcttcggacccgtcgcctacctaagcatcgggggaagtaagtatggtttactaatcgttgatgattgttcccgcttcacttgggtatgtcttttgcacgataaatccgaaacccaagggaccctcaagcgcttcctcacgagagctcaaaatgagtttgagctcaaggtgaagaagataaggagcgacaacgggtccgagctcaagaaccttcaagtggaggagtacctcgaggaggaagggatcaagcacgagtt

SEQ ID NO: 42302 - DNA, 495 bp, Zea mays
  unsure (1)..(495): unsure at all n locations
agcttggcaggcatcctatcaagagctgtcatgtggtaaataagccaaagttggacgagcagggcatgcttcactagcctgttattntgctctacccatatggcatgccgagtgacttcactgagggtttggcttatgaagatactctctcgccccacccctccttaattacctgatgctttttttggtcgagttaaaatgtgtagatgttcaagtacctatactgaatttattgtaatggtatccttaacaaacatgttctcagaaacttcttcaccattacactggaatgagaaccacacttacactagggagcttgtcgaacgcacctggatgtcggccgagtgcaaggtgcagggtcagctccgagggcaaggcaccatggctcgctgcaccgctaaacgcagcaacaatgtaggtagaagntattatatatgtattatatgttttctccttgatcgccgttatgcttgctcttgaagtacatgtacacat

SEQ ID NO: 42303 - DNA, 430 bp, Zea mays
  unsure (1)..(430): unsure at all n locations
acacataaaactcagcttcggattacaacatgtctgaagatgaaaggtcgaacctacttatttatagaattgacctttagtccataaaggtctgagtcaatattgtaaacttttatgaggggcatgattgtaattcctcacagaccgtgtcctgtgcctataaatagtgaacattattcctttactgttcacgcattcctgtaattgcaattgcatcactcggagattattctttgccaaggcagacgtataaatgtatttaatatttgaatacatcaagttcacttaatatgtaaatgatgtggtttacttataatttacttgtctttaaggctctatatctcgtattaatttatacactcactgagaattcaatcacgaagattcaaccttcgtaattgtatcattntaacctctcgtcgaagttcat

SEQ ID NO: 42304 - DNA, 435 bp, Zea mays
tgatgaccgcggcgaggctagagtgtttatcggctatgctgtatgagccaaagcatatcgtatctatgatccagtatcccagcgcgtgcgtgtcatccgcgatgtggtgttcgacgaaagccgtggctgggactgggcatcaccggcaacatgcacatcaaaaacatcaggcagcgaatttgttgttgaattcccatgggcggaggaattccctgaagcaagaagttcagcgtcgccttcaccatttcctgcgccacatcctgcatcgcctggtttctctccggtgaatgcacgagagcctgcagcataagcagacgagtctgcatcggaggcgtctgcgtcgcccagaacacccaaaccagctccagcaagtccttaggtagaacatagtgaccccttggatgatgatgatgacagggtggatgcctgccatga

SEQ ID NO: 42305 - DNA, 435 bp, Zea mays
  unsure (1)..(435): unsure at all n locations
agcttctattggtgacgaagcaataactctagtataagcgaagacagggtcaataagaacaatagcttcggcagaagatgaagctgattatcaagtaacaaaagatactatagaggggaccagacttcaggcaatagagcacatcaataaatatcaggccgaaacaataaaatggcgtgacagaaaagttcgattgaaaaatatcaagccagcgcatttggtgcttcggagagtagctaacccagacacaatgggcaagttgcaactgaagtgggaaggtccttttctagtagtatcttcgtcgaggcccggttcttacagaatgaaggatatggacggcaatgacatacccagatcttggaatgcngatgaagctcgacgatactatgtngtaatatgttgaatcttttttcattttttctatgcaccatttcc

SEQ ID NO: 42306 - DNA, 354 bp, Zea mays
  unsure (1)..(354): unsure at all n locations
ntctcaatctntcttgttgcttattaaatatactntaattcttataattggctcaagtcataatnttaaacttttcatccgctttttcttatattcttgaatattgctcatggagctcacttatggttttcattatggttgtacattcttatctttttaaaagacttaattgttttgatcatgatacttttaagtatatacttggtggattctttcttacttatgttaattttgatgctcatgcttactttgattcacatganataatggttcttgggttggtatttgagagaaaccctangtgacactggggtgtcacagccttccccccttaaaggaatctcgtcccgagat

SEQ ID NO: 42307 - DNA, 161 bp, Zea mays
ctcgatcacctttgaagagcaaaaatgcacctacaggtgggaacacacggagacgagaaaataaaccatagctatcagagcatttataagcaattcatcgagattcataattcattgcgtgttgaagatgttgaaactgttggcaaaccattagatcctat

SEQ ID NO: 42308 - DNA, 372 bp, Zea mays
aactttggctccatctatgctatgtattgcctttttatttgtccaactcccttcagcccttctggcaacttcttgacttccatggacagcaataggcccttgcttcgaaggtatcttcatgcataagcacgcgggatgaagtattgcttcgaaggcattaagcgtccctcgactaatgattgcgttgtatgggtactccatgtcgacaatgtcaaaacaacttgctcaagtcttgtgttgtggacctaacccaatgaacttgcataggatcttgccagagccacaatctgtctttctcgaaccacaaagaggcgtgatcatcatgaatttgtcactgggtcttgtatctgtctgatacctcttaaaataatg

SEQ ID NO: 42309 - DNA, 382 bp, Zea mays
  unsure (1)..(382): unsure at all n locations
tctgtctagccaaccttgaatctcgagggcgagattctnttttaagtggatacgtctgtaacaccctgaatttgaaggtataaaatctctttctaagtatctaccaaattcaagtgttactcttgtatctgcccctaatatccctctctctttttctttttaagtagactcagcttaattagggagggaattaattatttatttttgccaaaacaattatgagacatgaaacgttgcatcatgttgagcttaaatatcattcgaattgttcacatgtttgaattaatatgaatttgagacttggtttgaatttgaattgaaaaccctagagaatataaaatacaaaagaaaatagaaattccaggacaatagaaaatatcaa

SEQ ID NO: 42310 - DNA, 425 bp, Zea mays
  unsure (1)..(425): unsure at all n locations
agcttccaatctcctcaagtgccacaactaagacatgtgatcattattgattagtgactcgagaaagtgtgattcgcgtttcatttgttgctcttgttgcttggttntcttaatcgtgctttcttcatctccttctaaactctctaagtgacttgtaaagctagcaagagacacctaagtgtgtggtgatccttgcagggtcttagtgatccttgagattaagaagaagcactcaacacgtctaagtgatcgattgagagaggaaaagggttgaaaatacccggcctccgtggcctcctcaatggngagtaggttcattggaaccgaacatcgggaaacaaatcatcgngttcatttgtgttgatcattactctacgatttggntcttcctcctccctctctctanagttctcttgctcacagtc

SEQ ID NO: 42311 - DNA, 406 bp, Zea mays
tgatgaatcatacttgcaatggggcaccaccatgtcgacatgactggagatagccttacagaactacacctttcactactcaacggtggacgatgctatagggtgtattcagtattcaccagctgttgggtgtgggcttcgctttaaacgacttctggtcacctgttctgagcttctgacgaatgaacactcctgatcgcgttgtacaactcttgcccttgggcccttgtggtacagcagcatctcccgacaacagacagttctcaattctcatgcacgcgctgcgctagctggaactggagctggaactcatcatcatggcccgaggttgcacagcgacctcggtctgaacaacaggctgctgaagaggaacctggtgggcgagtcctgcgcggctaccggcggc

SEQ ID NO: 42312 - DNA, 237 bp, Zea mays
cgagcgccaatcatggaaaggcctttctagacagccaagcgcgaaaaactcaccgatctctgacacccacgagcacgtctgagaccacaaaatcttgaacgaaagatacggaaaaaaaggtgataaaacatcccgtttgcaaatgcccacacggcacctggcaagggtttaccaccatagagcagaccaatcgaccatgcgattatatgcagcgttaccgacacaccacaaatcgct

SEQ ID NO: 42313 - DNA, 360 bp, Zea mays
  unsure (1)..(360): unsure at all n locations
ggaagtctcggggccgaacccctcgggcgtgatagcgtcgcatagactgctgataccgcaccgagtgtagtaaggccacgttccgagcctcttttagctggtacagtgagtcttcttggctggtctggttgcttcngtcgtcgtacgccttcgtccttggtgaaccgcattctaagtctgtgggtaagatagcctcggccccatagactagaaagaacggcgaataacccgtggctcgactcggcgttgttctcagactccagaccaccaagggtagctccttcatccaccacttgccgaacttattgaggtcgttgtagatcctccggttaagtccctgtagaatcataccattggcac

SEQ ID NO: 42314 - DNA, 271 bp, Zea mays
  unsure (1)..(271): unsure at all n locations
gtgtggagttgggagaggattngatttcttttgtgtgtcttgtattgaacgctagagctcttgtaagtagttggaaggtggaaaacttggatcacttgaatgtgggggtggttggggtacttatagccccaaccaccatactaaccgtttggtggagactgctgtcgcatggcgcaccggacactgtccggtgcgccagccacgtcaccaggctgtagggtccgacccttgaactctgtctgtgggcccctcttgctgtcggtggtgcacc

SEQ ID NO: 42315 - DNA, 489 bp, Zea mays
  unsure (1)..(489): unsure at all n locations
tctaaagggagaacangtgataggtctaaccaatgtacaattctattaatatagaccttgtgcagcctgtcaagcaggtaaacaagtgggaggagcacatcacagcaagaatgtgatgaccacttcaagacctctggagctgctgcatatggacctcttcggacctgtcgcctatctgagcataggaggaagtaagtatggtctagttattgttgatgactntttccgcttcacttgggtgttctttttgcaggataagtctgaaacacaaggaaccctcaagcgcttcctcaagagagctcataatgagtttgagctcaaggtgaagaagataaggagcgacaacgggtccgaattcaagaatcttcaagtggaggagttccttgaggaggaggggatcaagcacgagttcttcgctccctacacaccttagcaaaatggtgtggtagagaggaagaacaggacgctcattgatatggcgacgactat

SEQ ID NO: 42316 - DNA, 471 bp, Zea mays
  unsure (1)..(471): unsure at all n locations
agcttgtactcctcngtgaaggctcttcctagatcacttgttcttctcctgtggnggtttatatatcacaagggtgagctcacaaaggatcatatctcaacaagttgtggggaataatgtgcatggactcaccaaaggtgggagtagatgtgaagtgtaaggctgatcggcaaataagggttaaagctgatcattgcttttaatatttggtcaagttttattagtagttactaaatggtagtagataccaaaccagagtaataatagatcaaaattattaataaaaccacaattcgatgcaaatgacaaattgaatntaattccataaattaatcatgtgagagtcctgagctgctcatgaccgcgagcacggctagtataccagatttacactctgcagaggttgtaccctttacccacaagtcattgttacccatttgccagggtgtatgggccccatacacctctact

SEQ ID NO: 42317 - DNA, 489 bp, Zea mays
  unsure (1)..(489): unsure at all n locations
tctcttggacaagtgccgcacttaccgctgagtgcgaagctgtctcatataacaacagaggagcccctggcgttggtggagttaatgtcgttaggtctatcaaatacttcttcagctcgtcgaaggctttctgttgaactggtccccattgaaaaacttcggctgacttcagtgtttcaaaaaatggtagatttctttctgctgatctagatatgaatcggttcagagatgcaagtcttcccgtcagtcgctgagcccccttctttgtgcttggtggttccattcgaagaataactttgattntatttggattagcctcaatcccttctgttgaaactaggcagccaaagaatttccccttctttactccgaaaacacacttttctggattcagctntagaccggcctgtctaaaattagcgaaagtctcctgcagatcagcaatgtgaatttcttgcttcgtgccttttacaatgatatcatcgacat

SEQ ID NO: 42318 - DNA, 403 bp, Zea mays
  unsure (1)..(403): unsure at all n locations
agcttgtgaagattcttcatcccaacatgagcaagtcggcgatgctagagccaacctatgttagtcttagcaattaagcaagtgtcaagttcagctntgttatcattaaaatcaactaaatatagctgaccctctaacactcccttaaatgatattgaatcatcacttcttctaagaacagtaacacctatatcagtaaaaagatagttatagcccattttgcataattgagaaacagaaagcaagatgtaatctaatgaatctacaagagaaacattggaaatagaatggtcaggtgatatagcaattttaccaaaacctttgaccaaaccttgatttccatccccgaatgtgatagctcgttggggatcttcatttttctcacaggaggagaacattctct

SEQ ID NO: 42319 - DNA, 462 bp, Zea mays
  unsure (1)..(462): unsure at all n locations
taagctttaaccctcgcgagaacctttcccgcctctttctaaccatggtgtattcattatcgtatgtgatattctatgcatatttactttatttgttctcttgtatggcgcattgtttgtttcctaatttgaatggatggatgtatgtgtgcttgcaatcgcatagagaacgatccggtcgaagaacccgaggaactctcaggagaagcccctgagtagcaatcggttggtggaggcaagtgtcccttgacctatctctatcctattcactctttaattcacctcccgcattacacatttatgcctaaggattgactagcttttgttatccatgtccttgtttacctattatgggtggattattattagttagctntatgctattgctcaaactcttatcaatgaacatgacgagattatctatgatacgcgtgtttcccttctcttattatgatgatatac

SEQ ID NO: 42320 - DNA, 420 bp, Zea mays
  unsure (1)..(420): unsure at all n locations
gacctgcggcatgcaagcttgaggctgngtatatattaccgctctctttatgttgtaactatcaagaacacgcatacgttgcctcgtatagatgttctctctgaccacttggtcggcgtcaatgtgttttccaagatagaccttcgctctggctaccatcagatcaagatacgagccagtgatattccgaagacggcattctcaaccagatatgggctatatgaattcttggtgatgtcattcgggctgacaaatgcaccagcatatttcatgtatctgatgaagcctgttcttatgccggaattggacaagctcgcggtggttttcatatatgacattctggtgtactcaaagaacgaagaacaacatgccgggcatttgcatgtagtgcttctacgtctgcgagagccccacctttat

SEQ ID NO: 42321 - DNA, 378 bp, Zea mays
  unsure (1)..(378): unsure at all n locations
cttagnttatcgaagaaaaactatacagaattggagaaggtgttatatgctgttatgatggcatccaggaagcttcggcattactttcaagcatacaatattgttgttccttcttcgcaaccgttgaaggatattatgagaaatagagaagctactggacggtttggaaaatgggctgcagagctcaatgaatnttgcattgattatgtgcatagatcttcgatccagtctcaagccgtggcagatttcattgctgactggacgccacgggctcatgatgaagaaacgaataaagataccgaagtatggacagtgttctgcgatgggtcttggtgaaccctttgagcaagagcaaccgctgtgttggtctcaccatct

SEQ ID NO: 42322 - DNA, 248 bp, Zea mays
  unsure (1)..(248): unsure at all n locations
ngacatatcatcatcgtgtacacaaggaacatactacataatagcatagtcacattctaacatatatacacatgaagctcataacgcattatggtaatatgaaatgcagatatattacaaaaatgagaaaataagacctacataatgcaaagaaagggcaaataagcaaaaaggccaaatgggtccttcttccaaaaggggaacacacacctaattctcctcgcaaataagcaaaagtggactgatca

SEQ ID NO: 42323 - DNA, 415 bp, Zea mays
  unsure (1)..(415): unsure at all n locations
agcttgtggctcggttgtgacagaggatctttttctctctatgctgataccaatggagtactttctcatgggatatggactgtacacgccaagccagataaactgtatccctcgtagccctctgaatccgttctgtatatcacagagcatggtggttaagctaaagccaatcaagacacaagccaaccttaaagcataggaacaggtgatgagaatgcgtangaactgatgcgcatcccttgatcttttgcgctgaagtgacatagctgttgtttccgtgatgtacataatacaagaggttagacgggtgagggttgggtgggtggttgattccattgaattgcagcctttatacaaacgcgcactcgtgcagattacttgatgaacgtagagaaataataacgggatatgagat

SEQ ID NO: 42324 - DNA, 401 bp, Zea mays
  unsure (1)..(401): unsure at all n locations
cgagattcatcaaccattgcttgtcgccgagatgggttatgtatggtctcactatgagatgttggctcggaagatgaggtacgtaccaccgactatgtgattgtcccatctgtacgtcgcttatgttgccgaatattgttttgtattcatgtaccatagggatgtggctataatgtcgaagcagtaagaggcaccccatcatcatgagccaacaaactggcagatgcagcagcactacgatgaacttgtgtagaggtatcaggcgccaaaggatggagcacatctggagccggtggatcagatggatcatggggcatggcgattccaatggcatcaactctcngtggtcagttgatgtttctattcccaaagtggatattgtttgtgccgaaacttctgca

SEQ ID NO: 42325 - DNA, 379 bp, Zea mays
  unsure (1)..(379): unsure at all n locations
atcctcagagncacctgcggcatgaagcttctaaaggagagcacatttgagactatcttatgttcatctcgagaaagacaggatttgtagcgcatgccaagccgggaagcacgttggcacacatcatccacacatgaacattatgacaagcgataggccactggagctccttcacatggatctattcggcccaatcgcttacataagcatcgacgggagtaagtactgcctagatattggggatgattattctcgcttcactcgggtggtctttttgcaggataagtctcatacctcaaaaaccttacagggattcttgagacgggctcataatgagttcaccttaacgatcaagaaaattagaagcgacaatgggacg

SEQ ID NO: 42326 - DNA, 424 bp, Zea mays
  unsure (1)..(424): unsure at all n locations
tgtgaagggtgttcatatccacatgtgctgagcggcgatgctatattcagtccatgctagtcttagcaatggagcatgcatctagaccggtctcttcttttgcaaattcaactaagtcaagcttgccatctaatacacccttaaaagctagagaaccatcacttcttctaaagacagacacatctatgtttgtgaataaacagctatatcccatattgcataaatgactaacagatagtaaattatattccacagactcatctaaaaacacattagaaatagagtgctcatttgagatngcaattntacctaacccttttaccttgccttgagtcccatcaccgaatattattgaatcttgggaatccttattcttgacgtaggaggtgaacatcttcttctcccgcgtcatatggtttgtgca

SEQ ID NO: 42327 - DNA, 289 bp, Zea mays
agcttctaaagggagaacacatgataggtttaattaatgtgcaattcgaaaaagatagaccttgtgcagcttgtcaagcaggcaaacaggtgggaagctctcatcataccaaaaatgtgatgaccacatcaagacctctggagatgcttcacatggacctcttcggacccgtcgcctatctaagtataggaggaagtaagtatggtcttgttatagttgatgacttttcccgcttcacttgggtattctttttgcaggataaatctgaaacctaagggaccctcaagcg

SEQ ID NO: 42328 - DNA, 431 bp, Zea mays
  unsure (1)..(431): unsure at all n locations
taagcgtcgattcctcatagctcgaggacggagcgcattctattctcgacatgcagcgaatacgaacaggcgcaagcatacatacatattcaagtacaagaacatcacaccatacaaaggaaaacaatataagaacgtgcaatacaaaatgaagctcgcttctatggtcacgcgaggaaagaaacacgatcgtcgaagctacggtctagaagtcataacgtttacgccacacaagtattagccaggacatttcattcgatattataaaatataaattataactgctatgtagtttgattcaatctgctacactaacaactgtcaaataaataactaatataattagcacgagagattctaagcgaggtaagntgacgatgcgcgaaataacatgccagcttgcgaacgacacgcgtgacatatcgcgcgga

SEQ ID NO: 42329 - DNA, 369 bp, Zea mays
gctagctgccttcttatggttagcgggctccctttccttatatataagcttcgccatatgtggccccagtggactcagctcgacaggcagattacgtcttacctttaaaatttccctcctgtcggtggaagagggcgttacagcagtatcttctatcttcgccaacatggcttcctgcgtctggagcttgtagctctttttcttcttcaaagcatccgttgtcggctcaggcttcagtcttttcttcttcaattgctcttcatcgtcttattcaaataccagcactctcttttttttgccctcggatttgctagcactcttgtcggaattaagtccgagatccatcatcggtaaccctccttgacggtg

SEQ ID NO: 42330 - DNA, 388 bp, Zea mays
  unsure (1)..(388): unsure at all n locations
gagcttggagccgcagcaactccagctttgaacgaagttatcatcttatcaagtggatgtgagttcaccggaggcgggcgccaactgtggggactcgntcttaacaactatgaactaagaataaggcaacacagaaattgttaaatgttaaagtgcttcgtccttcgaagcattatatcctttgggatataatgaattccggaccaacgttatgaangacatatcttcataaacacaacaaataacgaagaaggatttacataaaatatgaaaaataatataagcatctgactattattattaattcatctctatttcattattatagaaataataacaaattacaaatgtaccttttggcttgaagtaagcaacaataccaccgtgg

SEQ ID NO: 42331 - DNA, 406 bp, Zea mays
  unsure (1)..(406): unsure at all n locations
agctntccagagagtcctagtttgatatntttggactaaccattgaagagttatgattaaaacaagcaactgctgtattgctgtccaaaaattctgctagtgctcatntgattgttagttcacccgtttggctaanaatgcttagttagcacttagcggacatagactcgtaatggctaaatataggctaacatgtgttctatgattaaggcgctngcttgctatagttgatggtgatagatgagttcatcgacattgatgcatccgtcctctgttacacttgtgttgtgatgcttttgtgtgatcaatagaactaatgcgaagtcgtagcaattaaataaatgcgtgtacatgtgatatcgcatttgtgtcgcgtacntatataaaatatgcgcgtcttattaat

SEQ ID NO: 42332 - DNA, 421 bp, Zea mays
  unsure (1)..(421): unsure at all n locations
cttgtggcttaagttntcaagttttacaggatcacctattctcccccccccctctangtgctctcaattggtatcagagtcgttctcttcacaaagggactaaccgcccgaagagatggatcctaaggtgaagggtatcgtgatcaacgataaagagaaggaatctttcgtcaacgagccgaaggatgacaagcctaccgactcggggtcgggccatagacggaaagatgggaagaagaagaagacaaggcgcatcaaggagattgtctactacaacaacagcgacgagtcatcttcttcccaaaaggacgacgaccacaacgactacgagagaaggaaaccggttaattcgaacttttcttttgactactctcgtattccgcaaagnacaaatactcatttgctctccattccacttggc

SEQ ID NO: 42333 - DNA, 328 bp, Zea mays
  unsure (1)..(328): unsure at all n locations
agctngaagccatggtaagtagcataggcaagtattatgctaattgactcaagcctagctacgggtgcataggtttcaccgaaatccaaaccttcgactggtgaatataccttggccacaagtcgggctttgttccttgtcaccacaccatgctcatcttgcttgttgcggaagacccacttggttcctacaacattttggttaggacgtggaactaaatgtcataccttgctcctagtgaaggtgttgagctcctcttgcattgccaccacccaacccgaaccttgaagtgcttgctctaccttgcgtggctcgatacaggaaacaa

SEQ ID NO: 42334 - DNA, 417 bp, Zea mays
ttatggtctgtataaatgtgacagacattacccagcagattatgacgccagatctttatggcatgaaccaccgcagctagttccagatcatgagtagggtaatgttcctcaagtcgacgcaactgccttgaagcatacgcaattactcgaccttcttgcattaacacacagccgagaccactgcctgatgcgtcacaatacacatcaaagggtttattgatatccggctgagccaataccagagcagtggttaataatacctgcaattgctcaaaagcttcattacactttgaagaacaattaaatttaatatcattctttaataaacttgtgattggcttcacaagcttagaaaaatctggtatgaatcggcggagatattcagccagttcaaagaaacttcgaacttaatgaaca

SEQ ID NO: 42335 - DNA, 437 bp, Zea mays
  unsure (1)..(437): unsure at all n locations
agcttctaaagggagaacacgtgatagggttgactaacgtgcaattcgaaaaagatagaccttgtgcagcttgtcaagcaggtaaacaggtgggaggatcgcatcacagcaaaaatgtgatgaccacatcaagacccctggagctgctacatatggacctcttcggacctgtcgcctatctaagcataggagaaagtaagtatgggttagttattggtgatgacttttcccgcttcacttgggtgttctttttgcagataagtctgaaacccaagggaccctcaagcgcttcctcaggagagctcanaatgagtttgagctcaaggtgaagaagataaggagcgacaacgggtccgagttcaagaaccttcaagtggaggagttccttgaggaggaanggatcaagcacgagttctccgctccctacacaccacaac

SEQ ID NO: 42336 - DNA, 355 bp, Zea mays
  unsure (1)..(355): unsure at all n locations
ctcttccatctcctcagcccgagtcccctagcttccgctctcttggtgttcatggngggtaggcatggtggcccaggaggtgttcgcggcgaatgttctttttatatccagaacgcgaggccgaggtaggaaaacgggggagggcgttgcggtaaatgcgagatccacgggcggtaggtcagcgaagtctgttgggaaaatgagccacgacacggcggatagcgatggatttcgaccagatttccgaggttcacggccagctcccagaatcaatcgcgccagccccgtggttctctcggtctgttacaacgaaggggaaagtgctgacatgggtgacccacttggcagagagaac

SEQ ID NO: 42337 - DNA, 365 bp, Zea mays
  unsure (1)..(365): unsure at all n locations
tgcggcatgcaagcttctaaagggagaacacgtgataggtttgtctaacgtgcaattcgaaaaagatagaccttgtgcagcttgtcaggcaggtaaacaagtgggaggagcacataacaacaagaatgtgatgaccacatcaagacccctggagctgctacatatggacctcttcggacccgtcgcctatctaagcataggaggaagtaagtatggtctagttattgttgatgacttttcccgcttcacttgggtattctttttgcaggataagtctgaaacccaagggaccctcaagcgcttcctaaggagagctcaaaatgagtttgagctcanagtgaagaagataagaagcgacaacgggt

SEQ ID NO: 42338 - DNA, 415 bp, Zea mays
  unsure (1)..(415): unsure at all n locations
tgcgagcgcgcgggatgggcgtgcctgccatatccgtcgtcacgtggtgtgcgcgcgccccgcctgtgggtcggccggngggagaagaagctcgcgagtcctcggatccgaactggagggctgggatttgatcgggtgcaagcgagatctgggccgcacgcgtttggatctacggtcgcgattagagtaaacataccccttcatcgcataaaaatctggccgtcaattttgaatcggtgggctgtgcgtgggcgcacgcgtggtcgaatcttggccgtggatctcggatccagtggctgctgcgcttaccgcttcaattattaagtcaatctaatctgagtcgcacgttctcaatctgacggccagaatggcgccatacctcttcgctgcgcgctattntcatatgagtccctgc

SEQ ID NO: 42339 - DNA, 386 bp, Zea mays
  unsure (1)..(386): unsure at all n locations
agcttgaagccatggtaagtagcatatgcttatttatacgaattgactcaagcctagctacgggtgcataggtttcaccgaaatccaaacctttgactcgggagtattccttggccacaagtcgggctttgttccttgtcaccacaccatgctcatcttgcttgttgaggaacacccacttggttcctacaacattttgattaggacgtggaaccaaatgtcatacctcattcctagtngaagtgttgagctcctcttgcatcgccaccacccaatccgaatcttgaagtgcttcctctaccttgtgtggctcaatagaggaaacaaaagagtaatgctcacaaaaatgtgcaacacgagatctagtggtacccccttatggatgt

SEQ ID NO: 42340 - DNA, 390 bp, Zea mays
tcgcaagagaaggtgtggccttggagtgagccgtctgattttgtctcctccgcatgtctgtgtgtgcctctctcccttgtgaaggccctggacatccccttttatagatacaaagagacggtccagctgtacatgggggtgtagctatgtgctaacgtggccggcggagaagtacttgagccttgtagaaccgcagctggcggtgcgaccctgggtcctactgacgtttctttgccttcgtagagagctgagaacaatcgacgtcatggacgcatgcagggaaccatcattacctgttgccggagtaatctatatgtgacaccggtcttgttccttcgtagcctgagtcggctagctagaggtagggtaatgatgtatcccctgtagtgt

SEQ ID NO: 42341 - DNA, 365 bp, Zea mays
agcttgtgaagattcttcattccaacatgtgcttgtcggcgatgccagagccagcccatgttagtcttagcaattaagcaagtgtcgagttcagctctatcaaaatctactaagtatagctgaccctctagcactcccttaaatgctattgaatcatcacttcttctaaagacagtaacacctgtatcagtaaaaagacaattgtaactcattttgcataattgcgaaactgaaagcaagttgtaatctaaggaatctacaagaaaaacatttgaaatggaatggttaggtgatatagcaattttactcaatcctttgaccaaaccttgatttccatccccgaatgtgatcgctctttgggtatc

SEQ ID NO: 42342 - DNA, 433 bp, Zea mays
  unsure (1)..(433): unsure at all n locations
tgacttcgcgtcagtctatcatccgcagtgcaacggtgtctttgatctctccaatgggaaaatattcacagctgtcaaaaagatgctcctcgatgaaagaaaatgcatatggaccgatttattaccagaggcagtctgggcgctatacacaaccgagtgcagagcgaccgggttcactcctttccgccttctatactgatcggaggcaatgaccccgcaagaaataaagcatgggtcctctcgtacaggtccgtcagccgtccccgacgtggatgagccaacttcaaaagatctcattgacggagaccgggtcttcgccttacaggccctanacaaatatcangcccagaccanagcatggcgcgactgcgcagtcattccgagggagttcagcgagggggacctcgtactcatccgaacagctcggacggag

SEQ ID NO: 42343 - DNA, 422 bp, Zea mays
  unsure (1)..(422): unsure at all n locations
agcttctncagccacagcttcagagtctgttctttcttcttccagatcacgctntttcataccatgcacgccttcatcttaaagtcgaagcttcctgtgacagtatactatactggaaaacatgttagttgtgtttttgaggtccttcggaagatgaaggcccccaacagtagcccctcgcagtattaatttatttttgcttcaaacaaaattcagactgcgacgtgaacaaaggcctctatccgaatgtccaaataacaccttcccttcgctagaatagcgaaagtcaatgactaatggggcccaccaagttgtgatgcgctatgcatataaatagaaacctgcagcgatagcattttgtgtgcttttcagttgcttgtgctattgtttcaagcttgaaatttcttgctgtcagatcttgc

SEQ ID NO: 42344 - DNA, 358 bp, Zea mays
  unsure (1)..(358): unsure at all n locations
tgtgagattagtgttatgcattacatggattcattgttgtgtttaacctttacgncttaatgacataaatagaattacgtatgtaattatgaataacacttatacgataatcaaattcctaaataagaggagttcatcttgtaatttaatattttcttgcttaattactacttaaccttcttgagctatgttccaaacacttagagagtaatcgatccgccaattaggattagtccattttataacttgatctcattcccctgtacttaatactatacctttttgagttgtgtgccaatgtttgtacatgtgtgatgagatgttcatttttaccttccacatgtattgaatgtatgct

SEQ ID NO: 42345 - DNA, 409 bp, Zea mays
  unsure (1)..(409): unsure at all n locations
agcttgacccaaggttcctcattntcaagcattattgcggacagtccaccgaccacgggtgaacggtccacgacctgataataagaagcacccgagcactgaaccgacaactttaagatgggcagactgtgtaccctccgaggccggacagtctgtcacctaagagtcagtactttccggctaaacactcagatagtccgtaatacaaacgtcaaaaaccacacagtccctctaccaaattctatnttggtaccagcggacggtctgcgtcctttggtcgaattgtccgcacaagcacataagaacatgtgcaaatccgatacgtctctgatcaggaccgcggactgttcggcgccgaagcccggacggtncacagtacaaactctttggaccacacanaaacatcaca

SEQ ID NO: 42346 - DNA, 435 bp, Zea mays
  unsure (1)..(435): unsure at all n locations
agcttctaaagggagaacacgtgatatgtttgactaacgtgcaattcgaaaaagatagaccttgtgcagcttgtcaagcaggtaaacaagtgggaggagcacatcacagcaagaatgtgatgaccacttcaagacccctggagctgctgcatatggacctcttcggacccgtcgcctatttgagtataggaggaagtaagtatggtctagttattgttgatgactcttcccgcttcacttgcgtgttctttttgcacgataagtctganacccaagggaccctcaagcgcttcctcatgagagctcacaatgagtttgagcttaaggtgaacaagataaggagcgacaacgggtccgagttcaagaaccttcaagtagaggagcttcttgaggangaanggatcaagcacgagttctccgctccctacacaccac

SEQ ID NO: 42347 - DNA, 371 bp, Zea mays
  unsure (1)..(371): unsure at all n locations
tttcagtgtttttactgtgaaaataaaatgattcttataaaatntctgtatgttntctcagaaattcctgcattccaaagaaggttttagaccgagtttgttaactatagattctggtgatcagacgaattttatgtgatatagatccaaacgttctattntatctgtcttggataatgtgccttaagaaagattataattattaatcttctctcacatgttcttggatagagtgccctgttcaaattctaaaaaacgggcggccctattcacgtgtttattatgctcttcagcctgctccatatggcggtaatcgttgtctcctttcctccttgccccgccagaagatcacaccgttcgtggaccggtcg

SEQ ID NO: 42348 - DNA, 241 bp, Zea mays
  unsure (1)..(241): unsure at all n locations
agctngagccgaggcattgccttatcggagaagctagttcaccctcaccggacttcggtcttccgccgccgcgcgtggaccgagctaaccagtgagtctttgtctaatttcttgcacccacatctgtcctagcatcccgtgaagctctctgacccgttcaattgaactatcgcgccgtgagtaggccggactcctcgccaccgacgagcatctncgcctgcacacgtggaccggccaactc

SEQ ID NO: 42349 - DNA, 484 bp, Zea mays
  unsure (1)..(484): unsure at all n locations
ntaagctncttgacaatagaattacttcacccagtttatacatagatgtaaaaatgaatgtttgagaagttaaactatgtatgaagcacggttaatgcatgaacatgctttctcttccttttaaacatgatatgcaattaatgtaggaagattttaggtacatgtatgaatgggatggagtagttttacccttttgtaccttcacatagagatgctctcttcattgtgcttgtccttagtcttattgaatttgcctaagacctgtactcaagacaatgtatggaaatattttgcacaagagagagttctacaactagtgatccttttctaagtcattgttttgcatgtatcacaatggatcacacattgcataaatgtaacatgaattctctttttaacttagtgcatatcaagagagatgtcaattgaaataattgaataanacttaatacatgacgccctacgaagtatagtgatactgaag

SEQ ID NO: 42350 - DNA, 307 bp, Zea mays
gcagcagctgcgcttgcagctgtcgagtctcaacaacaacgggtgacccttcagcggcttggtggcgcggtgagaatgcctacttataatatattgctatgtgtcggcgtttcgagacaggggggtccctaagccgacgagtgagtgtgctgcgtgccccaccccacatgggtccagcgcgtgggcgagccgatagggggagaggcgacgtggccggagtctagcgtgagagaggtggaagtcccgcggtcttcgtgttcgtcccgcgcccatgtcatgtgcgcttgcagtaggggggttacaagcg

SEQ ID NO: 42351 - DNA, 441 bp, Zea mays
  unsure (1)..(441): unsure at all n locations
ccgagcatgaccggcgtatcttcttggcttatgcgagcgtagtgtttctcaatgcttctttcttcctcctcatcctcatttgtgcttccgctatcattttcattagccacacaacatatgtgggaatcgaaatgggaagacaaacctcttggagaggtggattcatcgtttggtctcctccgttcattttcttgttcttccttgcaaggggtagtatcacaaataccaaatgaagtagaagcacaaaatgaactatcatgtttggactcattaaatntgcttctaattctagtccaaatatcatgcgcatcatggattgattcgtcataatttgatatgaaagcacgataatcttctttactaagagaattagttaagatgtccaaagctagatagtttaagcgaatacatctttgatcctcctcggaaataaattttcca

SEQ ID NO: 42352 - DNA, 376 bp, Zea mays
cttaagcaccgcggctgcagctggctgcatggactcgctttctcctgttaatcataatcggccagcgcctgtcagtaagtagcatctgctcagcctgaagaaaatagctactctcctgccggtcctaccggttcctgccaccgacgaggatgtcgagcttgtggcaaagtttggagagtgcggtggccgtggatcctccgacacggccagtgccgccgagcacgcgcacacagccggtcctcgagggcttgctcctccgctgggcctgaccggcgtccctggagccggacggtgccggcgcggccgctgcggctggagcgggaggcgcgcatgctctgacgacgatgcccatggcgcccattccgtatggtgcccc

SEQ ID NO: 42353 - DNA, 486 bp, Zea mays
  unsure (1)..(486): unsure at all n locations
aatcactttatacccccgagataccagaaaccctaatttgtttcctgtaaaaccctaaaccagaccctatgggcttatatgccaaattagtccacttttgggctaaagtgcaaaaaccaagccaaatatgtttcttaagtcctttggttcacaaaaatgtggacttgaaagcaaaacccaaagntttggacttaaatgcaaaatggacttcattagagttctgctctaagtctgaatatcagtgaatgggctcaactttggggctttgtaacttacaaagtatagggtttttaccctaggtcaccacatcaaatttgaagaccaattatatgagaacaactttgcttaagggtgtaagcttagtgtgtaagaagaatttggagaaaaccaagcctaaagttgggctgtcanggctgtatgtctgattttcatatagcagtgactgacctcacttcagtgggtttgagcatgaccagtgctcaatga

SEQ ID NO: 42354 - DNA, 508 bp, Zea mays
  unsure (1)..(508): unsure at all n locations
gtcacctgcggcatgccaagcttggatgttttatcagagaagaaacaaattcttgtgatatataaaagattntctttacgaagcatgaaaagaagggaaggtgtttnttcgccgaaggctcaaaaaatggtatgtatgcaaagtttcatgcatcgtaaagaattaaattataaatagactatatattacattcaaagttacaatatattacacatgttatgttccaaatgtttctacaataatgaattaattcttcttgagactatctctgcagcttcgttcagtagctggtcaacaaccttgtccataatggcttcggccatttttctaatttcatcgtccccctttgggtgggggcccggagatgcctcaacagggtctgagggaagagaagatacgactacattactattacaaaccgtgaacaaagtctggaattaaaaatacaacacaataggaacgactatataatacctatttgcccttcggctctgtactttttcggaaa

SEQ ID NO: 42355 - DNA, 468 bp, Zea mays
  unsure (1)..(468): unsure at all n locations
ntgctcaacagcatactctgcacgaaaacaaccttcgttagtcatgtcttcattattaaaaacaataaaagtcaagggaaaagtagttcaccttgaaattggaataaaataaactaccaacgatatgttgtcgtcggtagcggctaatgtccgtttctagcttcgggaagccgatactccttgacagagtaccgataaccttagctccagtttgatcccggatacagtctaatttttcatcatcaatacctccgaagaggagtgctcctggtttatatccgcaagatttggcatactctttaagctcttctatttcggttnttgacaatttttctccaactaaattttgaaacatgaaggcttcatcctctgaagcttcgtcagcaatttccttttctttccccgacactgcggccatggnctctttgcagtagtagtagcttcttctgtggccatgtctagcagcat

SEQ ID NO: 42356 - DNA, 258 bp, Zea mays
  unsure (1)..(258): unsure at all n locations
agcttgtcataaanagccgaaacaaacacgcatgttctattcctaccggggcttggtcggttgctgagaaatttggaatcttgcgctatcaagagcaggtttcgctaaattactattaaataaatggattntgtctgaaatcattataaacatgcacgtgtagaatgttatttagctattaaaaaataaaacatatttgatttaattatagaaggcgccctatagaagaccaacagactattttctctcttagggcta

SEQ ID NO: 42357 - DNA, 319 bp, Zea mays
  unsure (1)..(319): unsure at all n locations
ccttaattaacttctctttgttcgatgaaaggaatttacacattgtctttcaataccttgcaatcatcacctccagatactagcctagaacagtctgtgccagaaatatcaacactccatgctctcttgtcatgctcttcatattccatcacactctagcatggcacaatacacagaaaccatatgcctcagttngatatacaatacacccatagcaaaatgaactgtcgaatagagagtggatacctgactggtctgaacatcccacacagctactataccctcatattcactgcttgcaataataatttttgagtac

SEQ ID NO: 42358 - DNA, 421 bp, Zea mays
  unsure (1)..(421): unsure at all n locations
gtcacctgcggcatgccaagcttcctttaaccncgaaacgcgatattttcttcattggtgaaaccttcaggtagacatagtccccttcaaggaaacataagggcattcgccgtttgtctgcataactcttttgacgaacttgggctttcttcatattatgaataattttctgaaccttttcttcgacctctttcaccatatcaggcctaaagaagtacctttctccaggttcagaccaatttagcggagttcgacaccgtcgcccatataaagcttcaaaaggtgtcatcttgatactttcttgataactgttattgtatgaaaactccgctaagggaaaacattcatcccatttctatgagaagtccagaacacatgcccgcagcatatcttccagtatttgattgactctctcggtctg

SEQ ID NO: 42359 - DNA, 447 bp, Zea mays
  unsure (1)..(447): unsure at all n locations
ggacgtgaagagtgccttcctcaatggactctttttgaggaggnctatgttgagcaaccttctggctttgaagatagtgagtatcctaatcacgtatataaactctctaaggcgctttatgggctcaagcaagccccaagagcatggtatgaatgcctaagagattttcttatatcactagtggcttcaaagtcgtaaaggccgatcctactctatttactaaaacacctcgcaaatgacttgtttgtatgccaaatttatgttgatgatattatatttgggtctactaacgaatctacatgtgaggaatttagtaggatcatgacacagaaattcgagatgtctatgatggnggagtcgaagtacttcttaagatttcaagtgaagcaactccacgatggcaccttcattagccatacaaagtatattcaagacattctaaacaag

SEQ ID NO: 42360 - DNA, 387 bp, Zea mays
  unsure (1)..(387): unsure at all n locations
agcttgaagccatggtaagtagcataggctcttttatacgaatngactcaagcctagctacgggtgcataggtttcaccgaaatccaaaccttcgacttgggagtatcccttggccacaagccgagctttgttccttgtcaccacaccatgctcatcttgcttgttgcggaaaacccacttggttcctacaacattttggttaggacgtggaactaaatgccatacctcattcctagtgaagttgttgagctcctcttgcatcgccaccacccaatccaaatcttgtagtgcttcctctaccctgtgtggctcaatagaggaaacaaaagagtaatgctcacaaaaatgtgcaacacgagatctagtggttacccccttatgaatgt

SEQ ID NO: 42361 - DNA, 382 bp, Zea mays
  unsure (1)..(382): unsure at all n locations
gactggatttgtagcgcatgccaagcatggaagcaagttggcactcatcatccgcataagaacataatgacgaccgacaggccgctggagctcctacacatggatctattcggcccgatcgcttacataagcatcggcgggagtaagtactgtctagttattgtggatgactattctcgcttcacttgggtattctttttacaggagaaatctcaaacccaagagaccttataaggattcttgagacgggctcaaatgagttcggcttaaggatcaagaaaataagaagcgacaatggaacggagttcaagaactcacaaatngaanggcttcttgatgangagggcatcaagcatgagttctcttctccctacacgccaca

SEQ ID NO: 42362 - DNA, 375 bp, Zea mays
agcttgtctgccggaatcgaacgaagctttcttttgatacctgcttcggaggaagaaagtattaaagtttcgcaagttcatagtgaaatggccagagtgcgttctaccgccagggttgagcgtgaggggggcgaaactgaagcttcggagactgtccccatctccgaagccatgcaacgatccgggctagtggtttctgaagagatccctagtgaagatgcagaacaagcaaaacaagcagctgccggagtggaagaagaagttattgaggaaactaatcccgaagacgattatcgtattgccatgccaagcaagcccagccacttggactttggaaaatctaccgtttcgagggctgatctctccaaaatggta

SEQ ID NO: 42363 - DNA, 349 bp, Zea mays
cgaagccctggtggcgatggcgggcgaaaaagagctcgccggagctagggaggggtggctggccactgatggtgatcgcggggtgaagtgaggcgcgcccgatgaggctttatatgcgcgggcgggcacgaccgatgcaagggcgcgtggcggacttgaccgaacgccgggacaagcgcgcgcgcgggttgggcgagcgccggcgtgccgaccagagtctaacacgtgtgcccgtgcgttctgcccaagttctggcgcgtgtggtcgcccatccaagcctgctctcgccttggtcagtgcacaaaacctcttctcttcctacaagctaccgatctttgtgtggggtcat

SEQ ID NO: 42364 - DNA, 480 bp, Zea mays
  unsure (1)..(480): unsure at all n locations
ttagagncacctgcggcatgcaagctngatatagacgacatgaacttctgctcttttatatttgttgcgctatcaatgctttgctaagcagaagaccatgcattttataaagaaatattcactatactataccttcatcgaacatttatagaaatgtagaatttctaaccttgatattggaataagccaagcatttggccatcctctgttttttaatgtgcaaaggtcatgttaaaccttggaaagccgacgttgtgcatcaccgtcttaactatttttgccttcttagagtctataacacatgccaatacatccctcccactccacccaataatagtcgcccattatggatatcctacggcttcgacatacactatcaattcactcgattatcttcattgagctccttgtgcgatatgcttgattggaaaaatagtaattctctcttcatgtttctgtctctaggcccttgcctacctt

SEQ ID NO: 42365 - DNA, 466 bp, Zea mays
  unsure (1)..(466): unsure at all n locations
agcttgttggtaaacaacaccgccgtccatcgtattctgtggactgagtctatggaatcttacgagttagaccctgtgcttctgtttattgggagtgcagaccagacacttattaaaaccaaagaatctgtttagaaaatgatttttagtgttgaaatcattctagaaatttatttaattcatagaaaattcattctagctccaaatcaaatcatttcagtttctataattttataaaattatttgttatcaattggtaccactgtttttnttacatgaaagtcatattaaaatttatatcctatttaatctttcataaaacacataaaaccttcagaaattcataacttaaaatatataactccagattgattcatttcagtggcatttattttgttaaatattggctatcatctcggatctttgctaaccatgaacttgattaaaatatcacatgaatactctt

SEQ ID NO: 42366 - DNA, 454 bp, Zea mays
  unsure (1)..(454): unsure at all n locations
ctaagcttgacattgtctcctgtggaagccatgactccttatgcttggtgtctccatttaaagctgctatgagcaatttaattntcatttttagttcttactcggcaatttagcatctagtttagctatatgatcattttgttgttaatcatagcaatgtgatcatggatagcatcaacattaatatctctacgtctcatgcaaatagaaacatgatcaacagtggatgtagagggtttgcaagattntaattcatctatcttagattttagcatggcattttcatctctaagacaggaaatagaagcattgcaaacatttaaatctttagccttagaaattagtttatgattttcaatcttaaggctagaaaatgattcgttcaatntgtcaatcttagcatttaaactagcattatcattnttaagaatggcnnattgatcatcacattcat

SEQ ID NO: 42367 - DNA, 405 bp, Zea mays
  unsure (1)..(405): unsure at all n locations
agcttctaaagggagaaccatgatatgtctaactaatgtgcaattcgaaaaagatagaccttgtgcagcttgtcaagcaggcaaacaagtgggaggagcgcatcacagcaagaatgtgatgaccacatcaagatccctggagctgctacatatggatctcttcggacccgtcgcctatctaagcataggaggaagtaagtatgggttagttattgttgatgacttttcccgcttcacttgggtgttctttntgcaggatacgtctganacccaagggaccctcaagcgctctctaaggagagctcaaaacgagtttgagctcaaggtgaagaagataaggagcgacaatgggtcctttcaagaaccttcaagtggaggaatatctcgaggaggaagggatcaagc

SEQ ID NO: 42368 - DNA, 321 bp, Zea mays
cctgctcctcctccctgcaccttcaacgagccatcaaaatacattcgccatacttctgcagtctctgggttatctggtacttgctgttcagtccactctgatacgaaatcaaccagtgctcgagtgttgatagcagtgcgaggtcgaaactcgatgtcatgagatcccagctcgcaagcccatttggctattcggccaatggcttccttgttgtgaagaatatcccctattggaaaaccagtaactactatgactttgtggtcatcaaagtagtgacgcagcttgctggcagttagaagactgcgtatataacttctgaac

SEQ ID NO: 42369 - DNA, 376 bp, Zea mays
  unsure (1)..(376): unsure at all n locations
atctcttcctggctataactcaacctgacggctctgaattcagtgttgagaattgccttatgttgggttaaccagttcatacccaagaatacatctatatcctgcgcgttagaacaatcatgttagcatgagagttccgtccggccatttgtactggcacaccatatgccacttctttagtataaatgtggtccccangtcgactgaattttaatccctcctttgattcatggtatgcaatatgatgttgtccacatactcttgctataaatgatgtgaggaccagatcaaaagaatactgctggtgactggcacatgaacgtcccatcataccggtctccctcggtgtggaccactgcgatatatctcccccgtt

SEQ ID NO: 42370 - DNA, 472 bp, Zea mays
  unsure (1)..(472): unsure at all n locations
cgtactaagcacatgccgggataaatggtatccgtgtaacctagtacctgagtgaagccgggcgcggactttatccctcatgcgacctgagacagggtctcccatgctagctatggtgggtacaagtgcggtcactgcacggcggcagccggggtcagtggagcattgtatgccaaggcggtgaggcctgtacgcgaacggngaatcgatggggacggttgtcatgtgtggggtcggagtaccctgacatgccgtgtgtttagggttaccttgcaaggtttaaaaactcgattcgaatcgtctgcttctcgcagctaatgagactgcttgattcctcgtactgcatcgagtaagaagtgaaatgtggattacatgtgataactcgttgattgaactaattgctctgtaccatgtatgcttagaaagagcacatctagctaagtaatgatgggagaattgaaaactacaagtt

SEQ ID NO: 42371 - DNA, 448 bp, Zea mays
  unsure (1)..(448): unsure at all n locations
gactaccatcaccaagtactcggtggagacaaggccggaactgtggcttgcggactaccaactggcctgccagctgggtgggacggacgatgacaacctcatcatctgcaaccttcccctgttcctctccgacgccgcccgagcctggctggagcatctgccctctgcgtagatctccaactgggacgacctggtcaaagctttcgccggcaacttccagggcacatacgtgcgccctgngaactcctgngatctccgaagctgccgtcagcagccgggagaatccctccaggacaacatccagcgattttcgaggcagcgcaccgagctgcccaacatcaccgactcggatgtcatcggctgcgttctcgccggcaccacttgtcgcgacctgggtgagcaagtggatcgcaagactaccaccagtgcgagcgagctgatggacatc

SEQ ID NO: 42372 - DNA, 450 bp, Zea mays
  unsure (1)..(450): unsure at all n locations
ttaagtcacctgaggcatgcaagcttgtgaggagcactgtggcctttgctgctggctcttcttatcatcattctgagcagagttatggattgacctaacgtgcctcggatagaatcttcctccgaagccccttgtcatctcagaaaacctgaaagccctcctccttctttgacgaanatcattatcggcccgaatataatcggccatcttctggagcagcttctccaaagtttgaggaggcttcctagcaaagtactgagctgaaggccctgcccgaagcccttgatcatggcctcaatgacaatttcgttgggcactgttggtgcctgtgccctcaaacgcaagaacctccggacgtacgcctgaaggtattcttcgtgatcctgggtgcactggaatagagctngagcagtgaccggcttcgtctgaaacccttgaagctggtaacac

SEQ ID NO: 42373 - DNA, 456 bp, Zea mays
gccgatggaccggttgcaaccgctattatctttctgagttgccaccaatgaaccagtgagaccacgtgatgacatggagtgactgattgaatcatatcatttacaaatgtgtttattacaagtgcctcgatggaggttgatgcttcatcagtggaggagatgaaatgccgaaggcaaaggtataacctgtgggccatttcatttcaccagtcaaaagttgtgttgaatagtgcatgaccaggtttaggataaatggccgtgctattaaaaagagcaaatgtgtttgcatatcggtcatctagtgccactgaaatgatttaactatgcatattgtgctaggatcaatggtgattggaagttgagataaaaacctttataaatggttgaaaatgctaactaagacttctaggtgtagatcatcccatatgagatcattttgaggtagcatgctttaca

SEQ ID NO: 42374 - DNA, 268 bp, Zea mays
agacggcttcttttcatttgatgggagcccacaaggacgctttaattgacctccaaagataacactctaattgaacaaaaaatcgcttaaacacaaattcatttgggaccccttgttcggtctacacctattttgagggactgtgactcaagcgtagagttgttgatctcgacctaccttatcttggtccatccacgttccctttcattaaatgatcacatcatcattatatactattgctaacagcgactgtttcgaatgaacataa

SEQ ID NO: 42375 - DNA, 227 bp, Zea mays
  unsure (1)..(227): unsure at all n locations
tttgaaagaatgggaaatgcctgccctaccgggggaaaaaaagaaggtgaactcccacgtttaccctactatttcaagtttaaaaagtgctttcaagcaccttcgccnagagtggctatacacgattgaagcaatgtgcaatgaactacttgggaactactcctaaaaagaagaacaattgatgaccgctgccttccgcacccgctcgaagcgaaggctaacccagt

SEQ ID NO: 42376 - DNA, 430 bp, Zea mays
  unsure (1)..(430): unsure at all n locations
agcttgtgaagccaatcacaagtgtattgaagaatgatattaagttcaactagtcttctaagtgtaatgaagccttcgagcaactaaagacactatngaccactgctccggtattggctcaaccggacatcactaagccttttgatgtgtattgtgatgcatctggcagtgggctcggctgtgtactgatgcaagagggccgagtgattgcgtatgcttcaaggcagttgcgccgacatgaggagcactatccaactcatgatctggagctagctgctgtggttcatgccctaaagatttggcgtcactatctgttgggaaatatctgtcacatatatacagatcataaaagttngaagtacatcttcacccagtcagagttaaatatgaggcanagacgatggcttgagctcatcanagactatgaact

SEQ ID NO: 42377 - DNA, 477 bp, Zea mays
  unsure (1)..(477): unsure at all n locations
tactaagctggcagattctgcatggtcttgggaaccttncgggcatgtgcatctgctgtcttggttgcaccttccaaagtcagaacatgctatgcaataaggcttgatttcagctgcataaataatattgctgaataccaagctttgcttttggggcttcggaagttaaaggcaatggggataagaagggcggtccttaaaaccgattcccaagttatctctggtcatgttgacaagagttgtagaacaagagacccaaagcttgagaaatacctggatacagttcgaaggcttgaagcttctttcgaagggttttctgtcaagaatattccgcgaggagaanatgagcacgctgatctgctagccaagtcaacggcacaggggcttgctttaccttctgaagtattctttgagacaataagagcaccttctgtggaacttgttgaaagagcagcgctcaatatatctcctgttcat

SEQ ID NO: 42378 - DNA, 421 bp, Zea mays
  unsure (1)..(421): unsure at all n locations
agctntanatattatttagaagcctagggtaaatcttgtcatgatttggacccatgttggtacctagaacccacaaccctagtcttctgccttatgaacttcactattgactacaaaaaccctagtttcctggagattcgtgaaggataatcgtattcaagactttatataatatacttttattatctttgcattttcacgagcattcatgattatatatgctatatatagaaaacgaggaagagatagaagttgaagaagcaaggactacaccaccaccacctgaagaaccacatgcagggaacttgttttattttgacatctgtggagcagagcttgactcacctataacacaatgcaagccccggtgcatttgccacctccttgctatttaaaatctttctcactcgcttgatgcatt

SEQ ID NO: 42379 - DNA, 373 bp, Zea mays
  unsure (1)..(373): unsure at all n locations
ncacgccgncatacttcagcttcgncatccatcaactatcttattctgcacatattatagagcagaataagaaatgtgcacatctcaaggagaatgttaaactaacaaatataaagtggttaccggcttaaggtgacttctagcttcgtcaccagccatccttcgaccaacatatacccaaatctgggtcataaatatatttccgatgcttcgggctatgctcgggatatcaatcaagtctgctgcggacaagctgaagtttggtctattcacaatatttccgtgcgtacagccagccttcagaaaagcggcagctgtgcctctagaagctaccacggcgcagaaatcggcatgcccaccactaactttgtca

SEQ ID NO: 42380 - DNA, 455 bp, Zea mays
  unsure (1)..(455): unsure at all n locations
agcttcagcatctttatttacttcttctttcttattctctggcatccagtcagcgatgaagtttgctaacgcctgngactaaattgaggatctatgcacataatcaatgctgatattgttgagttccgtagcccactttccaatccttccggtagcttctctgttcctcatgatatccttcagaggctgtgatgaaggaacaattatatggaatgcttgaaaataatgccgaagcttcctggaggccattaagacagcatacaacaccttctccaattctgtataattnttctttgataagcttagaacttcggagacaaaatatactgnggctngctttntgatttgtccttccaatttctcctgcacaagcgccgcactcactgcagagtgtgaagttgctacatacaatagcaacggagcccctggcgtgggtggagttaatggtgttatat

SEQ ID NO: 42381 - DNA, 349 bp, Zea mays
  unsure (1)..(349): unsure at all n locations
cggatcttcacctcactanatgagaatgttgatggtcaagataaaatcacatttggagacaactcataaggaaaagtgcaaggacttggcaaggtggcaatctctaacgatttatcaatatcaaatgttctcttagttgcacctttgagcttcaatttattatcagtgngacaactctgtgatcttggacttcaatgtttattcactccatcagaggttattggtacaaaaatggatgatgaatcaatggtatccaagggatttagatacaacaacctctacttagtggatttcacttcacaagatgcagacttaagaacttgcctcttcaccacagcttctcttggat

SEQ ID NO: 42382 - DNA, 450 bp, Zea mays
  unsure (1)..(450): unsure at all n locations
agctngtcgagatcacaaacgtgcgaatcttggcttatatccggcgcaggcctcttcctggcacctatggctttctcttgtatgtgagttccaagggggagataagctctatgtcagaagaattgcggacgccaaatctggcttgtcccactgtccactctgcgataaaagtgatgccaaatcaagtcaaacgaatttggcttggtttcaaatttttctagtgggtgccttatgtggtttggcaccttttggtattcagaccaagtggttttggcgccatttactaagtgaacacatcttatctttagattnagggttaaatttgacttagagaagattagagagctctagtgtgctctctacttaaggggtgaatntggggtctttaaggggtctttntgtaatggttcccctctgcattttganggtataatggtacttaaactttgg

SEQ ID NO: 42383 - DNA, 370 bp, Zea mays
  unsure (1)..(370): unsure at all n locations
taataaaccctaacaagcctctcatgtgggatttcattanggaattatgaaattcagaattctgaagttcagaccttgagccaaagatcaagcgtgttcaccttgatccctaactcaaatcctaatggccccattgacaaaaacgtgcataactaacctctctgtcttgtgccagaagatggcattgggacacatgccttggacacgtcaaaccagagatcttctccctgtgtgcggcagtgagacaaaccagatttctcccctctctatctcttaatccagtcagccaaacccgctagccttcacacacaaacgacaaatgaacctgagaggaagagatctctcaatgggatcatggccataatctcaa

SEQ ID NO: 42384 - DNA, 475 bp, Zea mays
  unsure (1)..(475): unsure at all n locations
cctaaggggatgcagagcacgacgaatcttcttatagctggttctaagggagcgccagcgaagtattttgctccaaagtcattccataaggaatgcagagcttacagcgataagtcaacgctgattccgcccaaatataaggcagagcatgaaaagtcaacgcgatacctccgaaatataaggcgaagaagttcataagacgttcctaaggtgatgcacaacctatagcgaaaagacagcgctgatacaccgaacaataagcggcgaagccaaaaaataagcggctaagagacttcgatccttccaaggggatgaaagctactggtgtggcttcgtatgtgtgtttggacattcatttgcaccacacattacattatacatttgcattcataaacattcatttacacatacataggatcatcatcattataacatacaaacacangcggatgccttggctctaaaaataaagctc

SEQ ID NO: 42385 - DNA, 320 bp, Zea mays
  unsure (1)..(320): unsure at all n locations
cttctcgtactgtcaggccattcttcacattaaaccattctgtcatccattctccgggccatcttattctataggttggcgcgggacatgctgacccacaccgagaaacgaaactgtagcagccaaaattattgcgatactgctctttaccccaaggctttgtctcgtatgataactccggtatattgcacaaacttttgtgctcaggctccataccttggcttctcacgcgccacacgaatatattcaaccttatgattgcctctgnggtaagttggtgaagatagacttctaatattttcatcacctctccgacacag

SEQ ID NO: 42386 - DNA, 433 bp, Zea mays
  unsure (1)..(433): unsure at all n locations
cactataaacactcnagctcctncaagcgagaatcgacaccctgactcatcggaacatgttgtattcttcccggacgtcgcgcacccgctggtgcgcatatactgagctatccggcgagccattcttcaatttctcgcacccatgccttccctagcacctagtgaagctcactgaccagtttaatggaactgtaccgccctcggaaggccggagacctcgccgccgatgagctcccgcgcctacgcacgtgagaccggcctacatcgaccatccccgtagacaatacgcacatcagcgtgactggcacgacctcccctacaccctgtgccactgtaccggagcaatctcgacgaaagaagcccctcctcccttttctccgccgcgggtacttgttgagttacggatggaccgcgggtttgattagtagcaccc

SEQ ID NO: 42387 - DNA, 327 bp, Zea mays
acctgcggctgcagcttgggaacatgctcgatccaatctgttgagctataaatataagcgaatgccagatgcccccgttccagtcgaccacgaccagcacccaacataagactattctagttatttagccaagggcgtcccataccaccctcatggtagcactgttttcctgcgtggtcactccatgttccaattaatatgcaataatcttgtttaacaatcgggttaacatcataataacaattctatttctggaacattaatatcaaataatgagtgacatctaataaataagttgagctggagcacaaacttgcaagcatagta

SEQ ID NO: 42388 - DNA, 348 bp, Zea mays
tgttctaatgccgtttatgtccgatattagggagataggaagagcgtcttcgagactagccaacttttgggaaaatccttggtttcatgggcttcaaagaagcaaaactctgttgctccatacaccgccgaggctgtatatattgccgcgggactattttgtgcacaattactctagatgacgcaaaccttgaaggactttggctacaatctaagcaaagtccccttcctaaatgacaatgagagcgcaatttgaatgggcgataaccctattgatcacgaccgctctaaacagatagacatccgttatcactctatgagagatcactcacaaaaggaagatatcatg

SEQ ID NO: 42389 - DNA, 321 bp, Zea mays
  unsure (1)..(321): unsure at all n locations
agcttcgacatctattgagtgcacttcttcatgatgccctagcgnctaatcaacaatgaagtctgctagtgcttgagattgaattgaagatctatgaacaaatttaatggtgaactcgttcagctctgcagcccacttgccaaccatcttctagcttgtctgtttcttatgatatcctttagaggttgggacgaaggtactattatatgataagactggaaataatgccgaagcctcctgaaggtcataatacagcatacagtaccttttccaactctgtgtagtttcttttcgatgggattaatacttcgaagaccaagt

SEQ ID NO: 42390 - DNA, 358 bp, Zea mays
  unsure (1)..(358): unsure at all n locations
ctgaggctgatattaacggctaccgacgacaacttattatctacatgtcgtnttattccaaatacaagggaaaattatcttttgcctacacctgctatatttagggtgaatcaacattatctgatgctcacttacttccacatactatgttgctgacgaaaagcattgaggatgcaacaagacctctaagacaagaataatgaaaccatcctctggggcttggaaagtaaaattaaggcttacgaagctactctagagaagaaagacttnctacttcaagcaacagagggttcacttgcagagattcaagctcgaaatgctagactacgcgaggagctcctcaatatcagatggtcct

SEQ ID NO: 42391 - DNA, 425 bp, Zea mays
  unsure (1)..(425): unsure at all n locations
ctaagctnggaagattcttcatcccacatgggccagtcggcggtgctatatcctacccatgttagtcttagcaattaagcatgtgtcgagttcagctctatcaaaatctactaagtatagctgaccctctaacacacccttaaatgctattgaatcatcatttcttctaaagacagtgactggacagctgtagcccatttgacataattgtgaaacggaaagcagatggtagtctaatgaatcaacaagaaaaacattctaaatggaatggtcaggtgaaatagcaatcttacccaaacctgtgaccaaaccttgatttccatccccgaatgtgatcgctcgttggggatcttggttttctcattgacgagaacatttcttcttcctgtatgtggtgtgtgacccgctgtcatgatcaacttgag

SEQ ID NO: 42392 - DNA, 432 bp, Zea mays
  unsure (1)..(432): unsure at all n locations
agcttgtggcagatatattngaagatatgatcgcagatactaatgtagctctagaagaaaccatggccacagtgcctgataaaggaaaagaaattgttaaaactccttctgatgaaggggattttgaccttctgtacctgggcggtcagaagtcgttcgaggaagacagggaagagctgaaagaatatgcagtatcttgtggttaccagccaggatctttgctcttcggcgaggttgatgaagaaattttatgatgtatacgtgaccgcgctggggcaaagatcatcggcactctatctaagagtgtcggaggccgacatcattggttaccgacggcaacacattgtcagtagcctattttattccaatttcaaggtgagatctctgtctagattgtttaccctcgcgatatattgagtgttctaactttaa

SEQ ID NO: 42393 - DNA, 367 bp, Zea mays
  unsure (1)..(367): unsure at all n locations
nncttcgtattactaaccgacttanagatagaatgaccttgtgagtctataatatgtctgagtcaaagctgtaaacttacatacagggcatactngtaatctctcacaggctgcgccctgtgcctataaatagtgaacagtattcctctactgttcatgggttccgatatctgcnattgcattattcataaaccaatctttgccaaggcagaggtataactgtattcaattaaatatgctgaataaatgcaatatgattcgcttatgattcgcttactttcgatactctatactttatgatattttatacaatctatctaaccgcaatcacgaagatgtaaccttcgtaatcatattgtcacaaacc

SEQ ID NO: 42394 - DNA, 457 bp, Zea mays
  unsure (1)..(457): unsure at all n locations
agtcacctgcggcatgcaagctnntaaactatcaatcagaaatagtgaatcttactatctgtgtgtccgtnttcaagttaagttacgagaatccaagatatttaattcactcctaagatagcaaaacctattctcatcgaggggttttgtgaagatatcggctagttgatttttggtgctcacatgaaacaattcgatatctcctttggcttcgtggtctctcaagaaatggtgtctgatgtcaatatgtttagttctagagtgttgcacctggattgtttgcaagttntatggcactctcattgtcacacaaaagtggaattctgttaaactcacaaccaaaatctctaagggtttgcttcatccataacagctgtgcacaacatgccccagctgctatgtactcagcttctgcagtggaaagtgcaacacnaatttgnttcttggacttcatgat

SEQ ID NO: 42395 - DNA, 428 bp, Zea mays
  unsure (1)..(428): unsure at all n locations
ccttcngctatcttatataaacagcttcagctctttaccacttctttctgtaagaccttcggcgacgaagcataaacccaacatggacgaagttcaagaactctcaaatagaaggctttcttgaggacgagggcatcaagcatgagttctcttctccgtacacacctcaacaaaatggtgtagtggagaggaagaatagaactctacttgacatggcgaggaccatgcttgatgagtacaagtcttcggaccggttttgggcggaagcaatcaacaccgcttgctacaccatcaatcgtctctaccttcaccgaattctcaagaagacatcctatgaactcctcaccggtaaaaaggccaatgtttcatatcttagagtctctggtagcacatgttttattcttgtcaaaagaagtagaaaatctaaa

SEQ ID NO: 42396 - DNA, 399 bp, Zea mays
  unsure (1)..(399): unsure at all n locations
agagaattggtgcttgtgatgtaatttgacacaaaattggatgctacgataacacacacacaacaaaatgatggaaatgttcctaatatgcaagcaattggttctcaaacgataagtaacacatacagcanaaaaacatttcgttcatgaatgatggaaatattagaatagcgtgaggcatttaggcagtatgtacagttttaaatgggtatttgaaaacatagcctatttagttttggtttctatagaatctcaatcgagaggactaggtcaaataaattttaactacaacaccgtcgaataacacagagtaaagggtatcacttgaaacctattaaaaaaagatggacatgtattgctcccacggactgacatgctatattctccatttatatgata

SEQ ID NO: 42397 - DNA, 426 bp, Zea mays
  unsure (1)..(426): unsure at all n locations
actgtcacgaggactccttgaacattgctggatatgtttactctgtgggntactaagataattanagacaagggggcgggttgatgtgcttgcaagtatctgttgcagatgttgttcatgcctgatgctgatgaccccttcttcatactgttgtgtttggatggtgtaccaccaatgttttacaacagattggcatttggaattgctactgctaaaacttcgttactctaataagaccttttgtttctgcattcccagctgatgagctgagggacagcgaagtacttgtatcattacaaaatctttgattattataacacatatttatacatcagttattattgtattttaaagtttcgttgcagcacacgggcacttacctaatatatatatagtatttagagccctgggctctccttactaatg

SEQ ID NO: 42398 - DNA, 405 bp, Zea mays
  unsure (1)..(405): unsure at all n locations
gctntgggcacacacttgaagttcagcttagcttatcacccgcacacagatggtcaaacagagagaaccaatcagattctggaagatatgttgagggctcgtgctttgcaagacaagataggttgggacaagaggttaccatatgcggaattctcttacaacaacagctatcaagccagtctgaagatgtcaccattcgaagcattgtatgggaggaattgcaaaactccattgcattgcgaccaacctggtgaaagacaggtgttcggtccagatattttgcttgaagccgaagagaacatcagaatggtccgagagaattngaatgcagcgcagtccagacagcgaagctatgctgacacccgaagaagagaactgagtttagaaataggagactatgtctac

SEQ ID NO: 42399 - DNA, 462 bp, Zea mays
  unsure (1)..(462): unsure at all n locations
ataacaggagaataaaagcnagagctcgaccatatgttatattataacgngagctatacaagcgtggggtctgttccccattgctcaagtgtttatccagatccgaaggtatagaattaatgaaggacatacatgcacgtctgtgtggatctcacattggatctatgcccttgcatgggaaagtttttcgccaaggattttattggccaaaaggagcttcggatgcagcggatttaattcataagtgcgaaggttgtcagaaatgtgcaagagatcaaaaacaaccttcgtctttaactcaattaatacaacccacttggccgttgcatatgtggggcctggatttgctatatccattaccaccagcacatgggaacttaagatatgtggtggtggcagtggaatatctttccaaatggattgacgcgaagcccttagccacaataacttcatttactattc

SEQ ID NO: 42400 - DNA, 359 bp, Zea mays
  unsure (1)..(359): unsure at all n locations
agctntctcgactaagtcggtgacagggcctcattgactggtgaaagtacgcgtaagcggcaaggccgaccgagccgagggattcccacgcctctgggatacagatacctcactcgtcccttccgcgaaaagcaactctcgctcacacaaacatccctgttaccgacagagtccagatgctcgaaacaaaaggaaaaaaggcgcagcttcgcgagcgcggcgagggtgtgtttcttctggcctcggcggccgcagaaagcacacgctacaagatgatctgatcctgcaggctcgggtcttcacgctgaagggagccgtagcaccctctgcatcgacgacgtctccagcaaagcccgacc

SEQ ID NO: 42401 - DNA, 463 bp, Zea mays
  unsure (1)..(463): unsure at all n locations
acacttaaatactcagcttatgagttcaaatntgacaagaagatcgactctgatcacatccaactatacctatataaaaactcaatcgtgtggatcacttgacaacacaaatctaactcaaatttgaaatcggtcttgataggaaacaattcggacaatgatgacaatccaacaataaatatagtggtgctaaccgattttcggctagggatcatcatcaccaccactaataaatacatcacttccttggatgcattacaagctctacaagagtgtgagcatgccaattgaattctagggaagtnctttcttagatatttatttttctaaccctatgactggtagagaacatattttatggattacgaacctacgaatagaacaaaacggacttggaaaagagcaaagagtccaaaagaattagctatgatgtcaacatcgcaagggagtccaaactgagagc

SEQ ID NO: 42402 - DNA, 201 bp, Zea mays
  unsure (1)..(201): unsure at all n locations
tatcgatcatatatcagatatcaaccgtgatcgatgttctatatacaaccttcgttttccatattcataaaatatcgacatcgtttttatttaccaagntactgttcatgattctgcttgaataaccgacgctgttataattcatttctaaagatacccgtcctaactccgttttgatctaaaaatattaaaaaagaaatt

SEQ ID NO: 42403 - DNA, 362 bp, Zea mays
ttgggaaaacaggccaagcgcggatcgtcagggccctctgttttggaccgtccgccacacagagatgaccctctgacagaaccaatgcaaatatccgagtctgcactatggaccgtccggaggataagcgcggaccgactgagacctcgctcggaccgttcgacctcatgcgcggaccggtcggtaggcaaggtttcgagaaacccgaaagtgacgggttcagaagaatgaattatattgagctcgcggaccgttcggtgtgcacgaccggaccgtccgcgactgggtctgtctgacatctgacgacgcattacatgcaatatagccgttgatatcgccgctactgctgaccgctgcatttt

SEQ ID NO: 42404 - DNA, 424 bp, Zea mays
  unsure (1)..(424): unsure at all n locations
agcttgttattaaataacgaataataatttactgttcttgcaggtccaccgatcagtcagtaagcgcattacgacggttcaccttcatcacttgcaatgctatataaacagatgagttggtaaatgtaacacccaaaatcctattgtggaatttataaatgtttctctaaaagatttagaattaaaatgtctcttagtataaaatttcccacttttaaagtcattctcccctaaaatatattattggcaatactaaaatgttattagctaaatataaattctaaaacattagaatagaataatcctctcatgaactatacaattcgggataccttccacaatatataaataattcttaaaagggaatatgtgttacttctctanaaataagaaaaacaatatagaaatcattctttgattttaa

SEQ ID NO: 42405 - DNA, 420 bp, Zea mays
  unsure (1)..(420): unsure at all n locations
tgaactcaagggacgtgattctcggaactttgattgtaaccttgcacacgtatctcatttatataccttgatcatgtctctgtcatatggtcttccaagagtatttctatccttggtcttagattaaaagggaaatggagtattcggcaaaggcaaggcttgcactacgactccgtcagtatcatttatcctttgccatacttatgaactttcatacatatcctttttcaaaaggggggagagtaatatgcctctatttctcttcagttttacgcttaatgccaaaggggggagaataatatgcccaaagcaaaatgaccgcaccaccaccctgttttacaaaaactttctcaaaaaaagggagagataattcanattgaaaaaccctcttgagagctaggggagaacttcttatgggga

SEQ ID NO: 42406 - DNA, 435 bp, Zea mays
  unsure (1)..(435): unsure at all n locations
agcttcttaattcatgttctgtatggcttatactctaaattatgggggctaagatggcacttccttcttcttgtagctgttgtctgtctgctgcgtttgctacagattgtggatggtgtgctgatgatgggttgtgtggccttcctagttactgttgtgtattgctaagactccaatttatgggtaatgtgaaggcacttccttcttcatgcagctactgttattttgttgcgcttgctatagtccggngaatgtttgatgttgttgctttgctaaattcctatcgtgtgttgctaagaacacggattaagggtaatgtgaaggcatttccttcttcatgcaactattgttttgttgtcaggcgggattccttccttttctaatggcaggggtcacattagaaattctctgttggaatgtctgtggttaaataat

SEQ ID NO: 42407 - DNA, 426 bp, Zea mays
  unsure (1)..(426): unsure at all n locations
tctaaagggagagcacatcttgcgactaacaaatgttcattttgagaaagacacgatctgtagcgcatgtcaagtatggaagcaagcttggtgttcatcatccacacaagaacatcatgacgactgacaggccacttgagctcctncacatggacctattctgcccgatagcttacataagcatcagcgggagtaagtactgtctacttattgtggatgaatattctcgctttacttgggtattctttctacaggaaaaatctcaaacccaagagactgtgaaaggattcttgagacgggatcaaaatgagttcgacttgaggatcaagaaaataatatgcgacaacgggaccgagttcaagaactcataaatngaaggctttcttgacgaggacggaatcatacatgagttctcttcttcctaca

SEQ ID NO: 42408 - DNA, 481 bp, Zea mays
  unsure (1)..(481): unsure at all n locations
agctngacattgtctccctgttggaagccaatgctatccttaatgtcagggcatctcccactatatagcatactacgagcaaatttaaattnttcattttctaactcatgctcggcaattttagcatcntaatttgctatatgatcattntgttgtttaatcatagcaatgtgatcatgaatagcatcaatgttaatatctctacatctagtgcaaatagtaacatgctcaacggtggatgtagagggtttgcaagaatntagttcaacaatcttagcatgtaaagtgtcattctcatctctaagattggaaatagaaacattgcanacatctaattccttagccttagcaattaatttatcattctcaaatntaaagctagaaagcggtgcattcaaattntcaatcttagtagtcaaactagcattatttattctaagactaacaatngaatcatcacaaatatataatttcccaacct

SEQ ID NO: 42409 - DNA, 347 bp, Zea mays
  unsure (1)..(347): unsure at all n locations
ctcagctggaagcgcaantgggagtctacttgcgggtgtatatcttttcttcttttcttccgctgctttgaatgcaatgggttgtatctccggtgtggaggtggcgcctcgctccaagttgacaatatgtttggagtctttgatcataagttcaaagctcacaaacttgccgatcacttcctcaggagacatctatttatatctaagatctccacggattagttgcacttgagtggggttacgacagacaagaggtcatagaataaccttgaccatttcatggtcaccccacttggtgctcttgaggttgcagacttgtgtcaccattattttgaatcggatgtaca

SEQ ID NO: 42410 - DNA, 350 bp, Zea mays
  unsure (1)..(350): unsure at all n locations
gcttcggaaaaccgacactcttcgatagagggccgattacctttgccttggtacggtcacgaacacatcccaaggcctcttcatcgattccaccaaaaagcatggctcctaattggtagccacaggaaatgccatattcctgtagctccttcttctcggcttcagatagttcttgtccgatcaggttctgaagatctgaaaccttttcttccgaagcagcttcagcaattccttttcctttgtcaggcactggngccatgacccattctgcagccgcagatgtttcttttgtaggcatacccagcatcattttatcaatcccagatcaggtagcctccactgttgcagct

SEQ ID NO: 42411 - DNA, 383 bp, Zea mays
  unsure (1)..(383): unsure at all n locations
gaagaagcaagagctggttctataaggatcttancttcagcagaagacgaagaggattgtcaaataataaaagacaccatagaagggaccagacttcaggcaatagatcacatcaataagtatcaagccgaaacagtcaaatcacatgatcggaaggtaagactaaagaatatcaagcaaggacacttggtacttcggagagtggccaacctggatacaatgggaaaacttcaacttaaatgggacggccctttcttggtggtatcttcgtcaagacctgcgtcatatacgttgaaagacatggatggcaatgacattccatgatcttggaatgcagatgagcttctaagatattatgtcgtaatttcggaattttcttactt

SEQ ID NO: 42412 - DNA, 262 bp, Zea mays
tgcgagacctttgcccgtttctttcttatcttaacgaatgcgacatcgaatgtcatacttgatgcatatttactttatttgtccccttgcgcggagtactgatttgttccttatttgaatggatgtatgtatgtatgcttgcaatcgcatagagaacgatccggtcgaacagcccgaggaactcgcacgagatgcccctgaacaccagtcggttggtggaagcaagtgtcccttgaaccatctctcgtctattcattattta

SEQ ID NO: 42413 - DNA, 211 bp, Zea mays
  unsure (1)..(211): unsure at all n locations
cacctatgaccacgaagaataccttcaagctatgttctaangtgtctgcgtctaaaggcacaggcgccaacagtgcccaatgaaattgtcattgaggccatgattaaggggcttcaccgggaccctcaggtgaatactttgccacgaagcctccacaaacttctgagaagctgctccacaagatggacgagtatattcgagctgacaatga

SEQ ID NO: 42414 - DNA, 404 bp, Zea mays
  unsure (1)..(404): unsure at all n locations
agctngaagccatggtaagtagcataggccaataatatacgaattgactcaagcctagctacgggtgcataggtttcaccgaaatccaaaccttcgacttgggagtatcccttggccacaagtcgagctttgttccttgtcaccacaccatgctcatcttgcttgttgtggaacacccatttggttcctacaacattttggttaggacgtggaaccaaatgccataccttattctctagtgaagtgctgagctcctcttgcatcgccaccacccacatcgaatcttgaagtgcttcctctatcttgtgtggctcaatagaggaaacaaaagagtaatgctcacaaacatgtgcaacccgagatctattggttacccccttatgaatgtcgacgaagatggtgtc

SEQ ID NO: 42415 - DNA, 359 bp, Zea mays
  unsure (1)..(359): unsure at all n locations
agcttgtcaagaccagatcatcgaagcatataagtttctggatgagaagtggtcacccaagttttgttgacgaagcactagaagagcaatcaaggaagggaccccatggataagttcgcaagaagaaggtttgtgtgttggcatcgatgcttcttcaataagctagctgccaagcaaaagctagaagcatgaagatgatctttgagtagccagaatcagcgtttgcaattagcaaccggatgctcttgaaagccaaatnttgtgaagtccatctctcgaagagtctgaaagtgaagatatgtagctgaagtaagctatacccataaccctttaagccgaattcaggatgagatcctttt

SEQ ID NO: 42416 - DNA, 381 bp, Zea mays
  unsure (1)..(381): unsure at all n locations
agctnggtttgaaaactatgtatttgtaatataaaacataaaanaagggaaagcctttatctgggccaaatccactgtgtcggcccactccncgtgttatatcgcgcatgctagctcggcagcgctgtcgtgtgggtcacccgcgtcaactgctcacctctggcgcacgcattangctactgtctagtgggtccatactatcagcacccttcgtcttcaacgcaacaaaccacaatacctcaacgtagccaactcctaagaactcggggtttgttaggatctcacctttgccgttggggatgggatctctccccatgctatatatgccggcacctctcgtccatcaactccactagagtctatctacgtaagcgtgctact

SEQ ID NO: 42417 - DNA, 409 bp, Zea mays
  unsure (1)..(409): unsure at all n locations
cggtgctgcttctgagcctgtgaaaccacttgataaaccttcagctgggtctgtgaacgatgagcttgtgaaaccatcagaaaagccttcatctggacctgtgaacgacgagcctgtgaaaccatcggagaagccttctgctggacctgtgaaaaatgaacccactgagccagctccagctggagaaaacaatcaagctcccactgtcggtcagactacagtttctccaaataatgcacgtgttggtgcaccagtagtcaagcatgattattcagaggcgcanaagtgaaggtgatagaggaaacctgaagtcccgatccattgagatggcatatcgtgcacatctgctcgacaaaaatgtagagtggccgggtgatcccctgtgggctcatattatctttcttctact

SEQ ID NO: 42418 - DNA, 221 bp, Zea mays
  unsure (1)..(221): unsure at all n locations
gcaagctntccctcattaagggaatatatgtattactttcttcaaataaagacgatgatcattttgaccagatgtgagagattttttttgttcagagacacttaatcattatacaagtatacttnctgatgaaagaaataaagatggttcattccgatatggaagatttcgcttctcatcttttnttatctcttccacggttctaaaagcaccacattttt

SEQ ID NO: 42419 - DNA, 445 bp, Zea mays
ttaaacataagccttctttcgtaatggtgagggaagattgtttatgaatcgagtctctggcaaaagataattgtcaagaaatactttcatggaaaagacttatacaatataaaagtgagaaactctgactcccctgtatggaaagacttgatgaaaatcagagctttctacctgaaaggcagacaaatcacaactaagtgtggagataagtccagattctggctagacagctgggtaaatgagaggcctttatgtacaattgatcctgaattatatgagatttgtgatgacaagcttattctagttaaagatgcaagaataaaaatttggcaattgtccttcagaagatggctaaataatgaaaatgagattcgatggatatcaatttgcggtgatggtgagaacttcgagtttcaagaaatctctgacactgttcagtggaaat

SEQ ID NO: 42420 - DNA, 318 bp, Zea mays
  unsure (1)..(318): unsure at all n locations
agcttanacatttatgagggatcgtcctacttatatcatcgcacgcaaggccatatatgcaatatatacaagtagaacaataagaatggcattcacacaacagttgtgattcggtatggcttgttttcacatggtgatctccatctccaataatctgtccatcacgatgatctccatctncatgatataggtatgccatcctccaggtgatgagtccttcaagacctatctaacgtatgctggtaaacaaattacatatacgctntggatcatcacatgttgacacgcaggtcattactataaatttggacaatacat

SEQ ID NO: 42421 - DNA, 492 bp, Zea mays
  unsure (1)..(492): unsure at all n locations
tggaggcgtcgattgggtgtctacttggtgtagactcctccttttcttctgtcgccttgaatgcgacgggttgagcttcggatgtacatggatcatcaagctcgttgatcttcctcgagccttcgatcatgcactcaaaacttacaaaatgcccgattacttcctcgggggtcattttagtatatctatgattaccacgaattaattgaacttgagtggggttaacgaaaatgagagatcttagaataaccttaaccatttcgtggtcgtcccacttcttgctcccgaggttacgcactaggttcaccaaggtcttgagccagatgtacatgtgttgtggctctttccctttgcgaagccggaaccgaccgagctccctctcgatcagttcccgcttggtgatctttgtgagctcatctccctcgtgcgcgggtttgagcacatgccaaacctncttggcactcttcaancctcgaactttgttatactcct

SEQ ID NO: 42422 - DNA, 423 bp, Zea mays
  unsure (1)..(423): unsure at all n locations
aatgccagggcgtctcccactatagagcatacttctagcacatataaattgttcattttctaagttatgctcattgattntagcactaagttgagctatgtgatcattttgctgtttaattaaaactaggtgatcatgaatagcatcaacattaatatctctacatctagtacaaatagtaacatgctcaatggtagatgtagagggtttgcaaacatttaattcatcaatcttagcatgtaacgaaacattttcatttctaagattggaaatcacatcattgaaacatttaaacctttagccttagcaattaatttttcattctcaatcttaaggctagagagtgatgcatttcaattgtcaatcttagtaatcaaatttgcattatcatttctaggactaacaattgaatcatcacaaaca

SEQ ID NO: 42423 - DNA, 454 bp, Zea mays
  unsure (1)..(454): unsure at all n locations
tcttccacctgccttctttgatgtcatggtgcactcgagtgtccatcttcccgatgaggcaatgcttataggacctgttcaatatggatggatgtacccaatagaaaggcgactaggcactctgaaaaattttgtaaggaacagggctaggccggaaggatcaattgctgaggcatatatggcaagtgataccttaacattntgttctaggtacatgaaggatgttgacactagatttaaccacgatgatgatagtggtacagagatgccactgcctaatgacatgtctatttttaagcatggtgctactcttgttggagctactaagactgagtacattaatgatgctatcatgaataagttagtttggtatgtgctacataatgctgatgaagtacaggaatattngaagtaagttagtttgggatgtgctacataatttatagtatattta

SEQ ID NO: 42424 - DNA, 392 bp, Zea mays
  unsure (1)..(392): unsure at all n locations
aaatctggataaatcggcggttattacctgtcaatccaaggaaacttcggacttgatgaatagtggttgggggtntccactccaaaacgtccttgactttgctaggatacaccggaatctccctggcagacagtacatgttccagaaattgaatttcttccagcgaaaacgcgcatttactgaacttggcatataaatgatgttctttcaagcgcgttaacacgatccgtaagtgtagggcatgctcctcttcattcttggaatatattaaaatatcatctatgaagaccaccacaaacttgtccaactccggcatgaataccgagttcatcatataagtgatatgggcaggagcatttgtcagtccgaaagacattaccaggtattcaaat

SEQ ID NO: 42425 - DNA, 343 bp, Zea mays
  unsure (1)..(343): unsure at all n locations
agcttgtgaagatacttcatctccacatgggctagtcggcgatgccagagccaacccatgttagtcttagcgaataagcaagtatcgagttcagctatattgaaatcaactaggtatagctgaccctctaatactcccttaaaagctactgaatcatcacgtcttctaaagatagtgacacctgtattcgtaaaaagacagttgtagcccattntgcataattgggaaacagacagcaagttgtaatctaatgagtctacaagacaaacattggaaatggaatgggcatgtgatatagcaattttacacaattctttgaccataccttgatattcatccccga

SEQ ID NO: 42426 - DNA, 334 bp, Zea mays
  unsure (1)..(334): unsure at all n locations
tgaatgttgtggtaacttcacacctacccgtctgtttatatagtgctgcacgtgggaaagtgaatcgtcaagccgctcgcacacgctgaacagtcgcccgcacccactgaacggtggaccaaagtgcgcgagaaggtgaatcaccagatcgcgcgtacccgtcatgtggtgggaccacctcgcactcggaatatttaattgtttctcgacaacgagctcacggaaggtgtntttcggaccttctgcattccgaagcctaaaagaattgttcacgggtcaagctcgttacgaacaatgatcttgcactgtgaaggggctactgttgggagtatgc

SEQ ID NO: 42427 - DNA, 466 bp, Zea mays
agctcgacattgctttcctgttggaaaccaatgacatccttaatgccagggcgtctcccattatagagcatgcttctagcaaatttaaacttttcattctcaatttcatgctcattatatttagcagttaattgagttatatgatcattgtgttgtttaattagagcaaggtgatcattaatagcttcaacattaacatctctacatctagtgcaaatggaaacatgatcatcagtagatgtagaggggttgcaaacatttaattcttctatcttagcatgtagtatggcattctcatttctaagacaggaaatagaatcattggcaaatattcaatttttactctcagaaattaagctagtattttcaagtttaagactagagattgagtcatggcaaaccattaattcatcaatcttagcatttagactagcatttttatttctaagactgataattgatcatg

SEQ ID NO: 42428 - DNA, 354 bp, Zea mays
  unsure (1)..(354): unsure at all n locations
gtagagcctggtagtagcataggcgagtaatatatgaattgactcatgcctagctaccggcgcataggtgtcaccaaaatccacaccttctactcgcgaatataccttggctacaagtcgggctatgttccttgtcaccacaccatgctcatgttgcttgttgtggaagacccacttgggtcctacaacactgtggatatgacgtggaactaaatgccatacctcattgctcgtgaagttgttgagatcctcttgcattgccaacacccaatccgagatccttaatgcgtcttccaccctatatggctcaatagaacacacanaagagtaatgttcacaaaaatgagcgacaca

SEQ ID NO: 42429 - DNA, 241 bp, Zea mays
agcttctaagggagaacacgttatattgttgtctaacgtacaattcgaacaagatagaccttgtgcagcttgtcaggcacgtaaacaggtgggaggaacacatcacagcaagaatgtgatgaccacatcaagacccctggagctgctacatatggacctcttccgacccatcgcctatctgagcataggaggaagtaagtatgggctacctattgctgatgactctctccgcttcacttgg

SEQ ID NO: 42430 - DNA, 364 bp, Zea mays
  unsure (1)..(364): unsure at all n locations
gcttggtctcttgcttacaactcttgtcaatatgaccagaaataacctggaaatcagttntaagaaccacccttctaattctcattgcctttaacttccgaaggcccaaaagcaaagcttcgtactcagcaatgttatttgtgcagctaaaatcaagtcttgctgcgtagcaagttttaactctggagggtgcaactaacacagcggcttgctctgccccgaaggttccccaagaaccatcgcagaatactgtccaagcttcggaaactttactcgcttcttcttcttcctgagcccctggcgtccagtcagcaatgaagtctgctaacgcctgtgactgaatcgaagacctatgcacataatc

SEQ ID NO: 42431 - DNA, 437 bp, Zea mays
  unsure (1)..(437): unsure at all n locations
agcttacannatttcctatcactttctcgggagacattagtttataccttggatcaccacgaattaattgaacttgtgtaggggtaagaanaacaagtgatctaagaataaccttgaccatctcatggtcatcccatttggtgctcccgaggttgcgcacttgtgtcaccaaggtcttgagccggttgtacatcgcttgtggctcctccccttggtgaagcatgaatcgaccgagctccccctagatcgtttccctcttggtgatcttggtcacctcatcttctttgtgcgtggtcttgagcacatcccacatctctttagcactcttcaaccctngcaccttattatactcctctcgacttagagaggcgaggagtatagtagtggcttgggagatgaagtgtataatttgtcgaccttctccgaatataatcctt

SEQ ID NO: 42432 - DNA, 402 bp, Zea mays
  unsure (1)..(402): unsure at all n locations
atgcaagcttatccttcacttttgaagagacccaattcacttgttgaatagcagcatatgtcaaagaatatatgcacacatctgttagacatacatttgggtggaaagggagggtgcaaagtggcaaatatcatccttcatttctttggaaggagagggttagacaatatccttgaacatataaataactaataatgaagtctcaattgatgttntaaaaagctgaaataccaacagcaaatatgtattgnttcattgtatgtaaacctgtttacaccccatttcagactcagctggccgatacattaaccagaatcagaaatctaccagtccgtttgaagaatgttttacagaattgatcatacttggacagtgaacaccagtaatgatcaaattgatttc

SEQ ID NO: 42433 - DNA, 283 bp, Zea mays
  unsure (1)..(283): unsure at all n locations
gagagaaatcatcaataaagatgatcatataatcacaacctccaatagaagaatgaggagcccgaccctaaagatcagaatgaatatagtccagaatgcctttggtgcagtgagtatataaagagaaactgactctcttctatttgncanatacacaatgtcacaaaattccaatttgccaatatcattgtcggtgtttcgaccccggcgggttcctggatcgacgagtaaatttgtcgctgcgcgtcccaacccagatgggttggcgcgagatggaacacaa

SEQ ID NO: 42434 - DNA, 471 bp, Zea mays
gctgtgaagattcttcatcccaacatgagtaattctgcgacgccagagccagcccatgttagtcttagcatttaagcaagtgtctagttcaacattgttatcaatgaaatgtactaactatagctgaccatctaacactcccttaaaagctattgaatcatcacttcttctaaagacattaacaccaatatcagtgaatagacagtttgagcccattttacatagttgagaaaacaaaaccaagttataatctaaggaatctacaagaaaaacattagaaatgaaatggtcaggagatatagcatatttacccaatccttggaccaaaccttgatttccatccacaaatgtgtttgctctttaggggatcattgtttctctcatatgaggagaacatctattctctccctgtcatgtggtttctgcacccgctatcgattatccaacttgtcccgccagatgcataaacct

SEQ ID NO: 42435 - DNA, 289 bp, Zea mays
cagttggtgcccatcatccacagaactatgacgaccgacgggcgttggctacaccatggttatcgccgatgctactaactcgcgggaagatgcttgataaagaaattcctatggggatctttgaggaaatctaaccagaacctaaggtttgaacactaaatgagccttagtaaaaataacacacgacgagtaactaaatgagctctggagagatacatattttttctacccgccaaggagtaagaaaaactttgctgaaacactgtagtaatcgtctttgcaggcaacc

SEQ ID NO: 42436 - DNA, 337 bp, Zea mays
  unsure (1)..(337): unsure at all n locations
agcttagcanaagaaatgtctagaatcaagaatattgttctcatgcctaagtctggtaaaagattgttcatcaagtggcttggtaaagatatcggctaattgatctttagtattaatgtaagaaatctcgatatctcccttttgttggtgatccctaagaaaatgataccgaatggctatgtgcttagtgcggctatgctcgacgggattgtcggccattttaattgcactctcattatcacatagcanagggactttggttaatttgtaaccgtagtcccgcagggttttgctcatccaaagcaattgcgcgcaacaatgtcctgcggcaatgtac

SEQ ID NO: 42437 - DNA, 395 bp, Zea mays
  unsure (1)..(395): unsure at all n locations
tgcagctgcatccaggcggagggccatgtactaatgtagagacaacaacatcgcacacaacaagaacaggcgtttcacagataagtgttaaatgttgtattgaagacaatatttatttgtttacaaaagcaagggaaggcctgtgggccggttctaaagaacggatgcccattccatatggtggtcccgagcctatgtggcccggttgcctggttccgtacccaaaattctgcacactccaccactctngggcgggcatcctaatatttaaaactaaaagtctgtgggtccgacaacctggaggtgcagctctgaagaacgggcacttgtactctgtgggtccagaaaacttgagccgctcacctggtccgtaccggagcttgatactcaccgcc

SEQ ID NO: 42438 - DNA, 241 bp, Zea mays
aagagaggttctttaccataagagcctccccgagatgtaaaatgaaacttcgtcgactgaaacctcaactctcactgttatacgtggacattacagctgggctctagaaaagaggaaattaccacttttaccgaagggagtgcgggtgttatatagaactacaccaactatcagtgttctcctgataatatcttcccactttattacacttctccaatcacttgaatgcttgatgatgcca

SEQ ID NO: 42439 - DNA, 476 bp, Zea mays
  unsure (1)..(476): unsure at all n locations
gcttgtagtagtgctatcgagcatagctttgttggtctgatgtctctaatatagnaacggactcgctgagtcctatgatataagagtaatccccaacatataaagtgtgccccctctagatatacgtatatgaatgattagtatagatgagaaaatcaaatacacgttttgatcttataaagatttatagggctttgtaccgtacattcgcactaaaaaagtttgctctacttttataagtatgtacataaattatactctctctatcatttttttatctctcgcaggttaatgtaaaatacactatcggacaacaaatatttgagaatagatgtagtatgttattcaccactcaccttacccacagtcacatgtggtcttttagagactgaagcggcagcctctaatatgtaatttctgacagagaactaaaggcatcattttttcgttgtaatataatgaaagagtgcggtggt

SEQ ID NO: 42440 - DNA, 300 bp, Zea mays
cttgtattctgaaacgggatctttaatctgactgcttaagtgaccggtaagaatcttcaactgtattggctgaacctatatcagaaagttttattagcaaagctatatctggctgtagtcaagtggttatatgtacactgatacccatcctattattgtaataaatggtatatatataagtccttagactgtccatatccattttgcttttgccacatttagcatctaaggctgccacagaaatctgtgacttcgcactacagcatttctgagccaaagagtatcttttacaatctggat

SEQ ID NO: 42441 - DNA, 253 bp, Zea mays
gatacggatacctcactcatcaccttccgcgagaagcaattctcgcccgcacaaacatccctgttaccgacggaaagtccagatgctcggaataaggggaaaagagacgcagctttacaagcgcagcgagggtgtgttttctggcctcaacggccgcagaaggcacgcgctacaagacgatctgatcctgcaggctcgggtcttcacgctgaagggggccgtagcaccttcggcatcgacgacgtcttcagca

SEQ ID NO: 42442 - DNA, 322 bp, Zea mays
  unsure (1)..(322): unsure at all n locations
tctcttgagcccctggtctttatgaaataccaatctgcttgtgaaccataacacacccttctcatcctggcggaaacaattatacttctcaaccttctgatggagattcttcttgataatctgcactcccttgtcactgaacttggccatgataatcttgtcttgcaaagctggctcaacagaaaggtgagacaaagaaccacaaggaatcacttcaatttgcatcttgctcaactcatcacacaaggtgttaatgcgagaatacatcagaatacnagtgcattgcaacttccgactcaaggcatctactaccacattagct

SEQ ID NO: 42443 - DNA, 399 bp, Zea mays
  unsure (1)..(399): unsure at all n locations
tagcaaatgttcattntgagaaagacaggatttgtagcgcctgccacgcanggaagcaagttcgagtccctcatccacacaagaacatcatgacgaccgacaggcctgttgagctacttcacatggatctattcgcgccgattgcttacataaacattggcgggagttagtattgtcttgtaatagtggacgaatattctcgcttcacttgggtattctttttacaggaaaaatctcacacccaagagactttataggggttcttgagacgggctcacaatgagttcggcttaaggatcaagaaaataagaagcgacaacgggacggagttcaagaactcacaaattgaaagctttcttgatgaggagggcatcaagcatgagttctccctctcctaca

SEQ ID NO: 42444 - DNA, 393 bp, Zea mays
  unsure (1)..(393): unsure at all n locations
ttggcctgttcacaatgtgttcatgcgtgcagccagccttcaaaaaagtcgtatctgtgccccgagaagctacccaagcgcagaagtcggcatgcccacaccgataacttcgtcaaaggcgtcaacttcgccttcaatatattccaatgttcttggcagaatctcaagtgaaggtggtaatttcgaaagagctagcttcgacagagtgaaacacattcttcagccgctgcacacatcggcttgcgaagcttgagcatttctcctggaagtctctaaaggaattttccaaatttgagtatttatccactttagctttcaggctcgcttcaaaatatttcttttcttgctcgaatnnttctgatcgtcgaagcaatccattctttaatttgtcat

SEQ ID NO: 42445 - DNA, 262 bp, Zea mays
catgataacgagggctacattctatattccgctggttgtcccgaacactaaattaggagaattcattctaggaagactcactctggctctcatcatgcttttatgtataagagtgaggcatctagttctagacaatgcactcatgttaaattgcctaagcagaaaactactattgcatcacatgaagctaatattacatctaagacttttgatgcttgttatgtgctcactaacaaatcacgctatgtagttccaaatatgt

SEQ ID NO: 42446 - DNA, 319 bp, Zea mays
aagctatcaatcttacattggctatcctttaagattgacccacagaagaattgaggtgtatatcactcacttcatattctattctagcaagaacttgtgtggtggggagaaaagattaacctttgcgggaattaagcaaaaagggctacaactcaagtgaatattccaaatggatggtaacgattaaattctttagtgccaattgttatttattagcatattcctttgtgtcttttgtagccacataggagaaatgaagctcttgagaatgaacttaaaagattttaccttgccttggaaaagatccaattatggtaga

SEQ ID NO: 42447 - DNA, 433 bp, Zea mays
agcttgccttcgcctcagtctatcacccgcagtctctcggagttgtggaacacgccaatggaaaaatcttcacagctgtcaaaaagatgctcctcgacgaaaaaagggcaggtggaccgatttattacccgaggtggtctgggcgctaaacacgactgaatgcagggcgaccgggttcactcctttccgccttctatatggatcggaggccatgaccccacaagaaataaagcatgggtccccgcgaacagttccgtcagccgtccccgacgtggacgagcccacttctaaggatctcatcgatggagaccgagtctttgtcttacagactctaaataaataccaagcccagacaaaagcatggcgcgaccacgcagtcatcctgagggaattcagcgaaggggacctcgtactcgtccgaacagctctgaca

SEQ ID NO: 42448 - DNA, 379 bp, Zea mays
  unsure (1)..(379): unsure at all n locations
agcttctaaagggagaacatatgttgcgactaatatatgnttcatttgagaaagacaggatttgtagcgcatgtcaagcagggaagcaagttggtgttcatcatccacacaagaacatcatgacgactgacaggccacttgagctcctacacatggatctattcggcccgattgcttacatcagcatcggcgggagtaagtactgtctagttattgtggatgattattctcacttcacttgggtattctttttacaggaaaaatctcatacccaagagaccttatagggattcttgagacaggctcaatatgaagtcggcttaaggatcaagaaaataagaagcgaccacgggacggagttcaagaactctcaaatcga

SEQ ID NO: 42449 - DNA, 484 bp, Zea mays
  unsure (1)..(484): unsure at all n locations
agcttcagctccatctatgttatggattggcttttagtctgtccaatttccttcggcccttctagcagcttcctgacttccatgaatngcaatgggcccttggtccgaaagtatcttcatgcaaagataagctggatgaagaattgcttcgaaggcattgagagtaccacgaccaatgattgcattgtaagggtattccatgtcaacaatatcaaatacaacttgttcagtccttgtgttgntaatgaatccgaaggttattggcattgttgattttcaagtgctacgatctgccttcctccgaagccacaaaggggatgtgtggcatcatggattatgtcttcgggctcttgcatctgtctgaaggccttatcanatatgatatcagctgcgctgccagtatcaaccaacacattatgaaccacgaatcctttgatcacacaagagataaccataacatcggtgtgtgggtaatcttgagttg

SEQ ID NO: 42450 - DNA, 417 bp, Zea mays
  unsure (1)..(417): unsure at all n locations
gacttggtgttattcctncttttttcttccgncgccttgaatgcaacgggttgaccttctgatgggtcgccaagctccgtgattttcctcgagccttctatcatgcactcaaaacttacaaaatgcccgataacttcctcgggggtcattttagtatatctaggattaccacgaatcaattgaacttgagtgggattaagaaaaatgagagatcttanaataacatttaccacttcgtggtcatcccacttcttgctcccgaggttgcgcacttggttcaccaaagtcttgagccggntgtacatgtgttgtggctcctctcctttgttgagccggaatcgaccgagctccccctcgatcgtttcccgcttggtgatctcggtgagctcatctctctcgtgcgcgggtttgagtaca

SEQ ID NO: 42451 - DNA, 459 bp, Zea mays
  unsure (1)..(459): unsure at all n locations
gcaagcttatgctnttattgaagatatgaacagaactttcttctcttctccatcctatacccatacttgaatgtcttcactcatcatctttccttttaggcctcacggaaacttgtgctggatctttcgtctcgctaccaaatcaaatgtccatgataggaactgttggccccccagtgccaaacatcgatgttcgtctggagtcggtcccagaaatgggttatgatgcacttgcgagcaaacctcgtggagagatatgcatcaggggagaaacattattctcaggatactacaagcgtgaagaccttacaaaggaggtcctcattgatggatggttccacactggtagtgtgttgcccgttctactggctctgttttacatagtgatcactattcatgacacacattgntagtagttaaaattccatgtagaaatccagngtccaatcatataccatg

SEQ ID NO: 42452 - DNA, 493 bp, Zea mays
  unsure (1)..(493): unsure at all n locations
tttattgctaactgtcccgaanatgatagtgaccaggagccagggaaaaatgggaagagagagaacaagaaggtttacaagaaggccaaaggcgaagcacaccttggaaaggagtgggattctgattgctcctcgtccgactccgacgacgaaggactcgccgccactgccttcaacaaatcggctctcttccccaacgagcatcacacttgcctcatggcaagggaaaagaaggtaatcactcgtaatgctaatacttatgattcttctagtgatgatgaatctagtgaggatgaaattgattactctagtttattcaaaggattggatagaactaagatagctaagaataatgagttgattgatgccttancatgaaaggatagaatcttagagaaacaagaagaccttntatatgaagaacatgataaatntgttagtgcacaacattcacttgctctagaagttaanagagatggaataatttcttgtg

SEQ ID NO: 42453 - DNA, 295 bp, Zea mays
  unsure (1)..(295): unsure at all n locations
gacaacctcccgctttgaagatagtgagtaccctaaccatgtctatatgctctctaaggcgctttatgggctcaagcaagccccaagagcatggtatgaatgccttagagatttccttattgctaatggctctcaagtcggtaaagccgatcctactttattcaccaaaacacttgataatgatttgtctgtatgcccaaattatgttgatgatattatatttgggtctactaacanatctacatgtgaagaaattagtaggatcatgacacagaaattcgagatgtctatgatg

SEQ ID NO: 42454 - DNA, 409 bp, Zea mays
  unsure (1)..(409): unsure at all n locations
atgctagtcttagcaattaagcatgtatctagaccggcctcctcttttgcaaaatcaactaaataaaggttgccggctagtacacccttaaaagctaatgaaccatcacttcttctaaagacagacacatctacatttgtgaataaacagttatatnccatattacnaaagtgactcacagacnacaagttatatccaagcgactcaactaagaacacattagaaatagagtgctcggatgaagatagcaattttcctagccctttcaccttgccttggttcccatcaccgaatatgattgaatcttggggatccttgttcttgacgtaggaagagaacatcctcttctcccccgtcatgtggttggtgcatccgctgtcgataatccagcttgatcccccggatgcat

SEQ ID NO: 42455 - DNA, 382 bp, Zea mays
  unsure (1)..(382): unsure at all n locations
aaacgacaacgcatatgacgtcatgccaacagtttagttcttgtaacactaggggtgttacacccacgaaaggacacagttccatggctaacccttagctaacctactaattctacctccaccgacaagggaccaatactccgtgaccgtggccacgcataaggagaagtgagttggctcgtcactggctgatgccgaactctcgttctcggcatcctgtctccaggatctagtactcagcttccctttcctcaagctcgagagtcgagggctcgaggtcttgaccagcgatggtctccacctccgcctctatctncaacaatcgacgactcactaatgtgtctggatgtctgcctcacatggtcgccatctgtcacacctg

SEQ ID NO: 42456 - DNA, 383 bp, Zea mays
  unsure (1)..(383): unsure at all n locations
agctngctcaccacgatggtagatagcgcatcggtattatttttcttaacaggaatgaaagaatgtaggctgtttattctttctaagagtgaccattgtgcaggcatgatccccatctatgcatcgtgtaaatatatatatcccaagtgttccacttttcccttttccttccatgagagatgaggtgggcatgaaagcaccatttntccctcagtctctgtgtatgggtcttctgaaatcatgtacatttatatcttgaggcaagcagagtgattggtttgtaatttccattgtaccaaacgtacgaacccgctcttaccaatagaagttccttggactatttgtcacattgcaaattgcttaatacttgctttaaactatct

SEQ ID NO: 42457 - DNA, 360 bp, Zea mays
  unsure (1)..(360): unsure at all n locations
taagtcatctgaggcatgcaagcttgagaagtatctaaatacagtccgaagaatggaagtctctttctaaggcttatcaatgaagaatatcccacgaggagaaaatgagcatgcagatttattagctaaatcagcggcgcatgggctcccactcccttcggaagtattctttgaaactataaaagcaccttcagtcaagctcatggagcgagcggtgctaacaaactcaccagtacataacgaagattgaaggactgagaatgtatctttcttgcaaggcaactatccttcggacgacgaagattacataataagaatgcangccaggacaagaccttacatgatcatagaaggagaatt

SEQ ID NO: 42458 - DNA, 418 bp, Zea mays
  unsure (1)..(418): unsure at all n locations
atatctaacaaatctgaagctgtatgtcttagctcggnctgttcacagtgtttccatgcgtgcagccaacctccaaaaaagcagcagctgtgccccgagaagctaccagggcgcagaagtcagcgtgcccaccaataacttcatcaagggcatcaacttcgccttcaatatgttctaatgttcttggcaagttntcagctgaagggtgtaatttcaaagagctagctccgacagagtgaaatacatccttcagccgttgcacacatcggatgccgaagcttaagcattnttcctgaagttctgtaaaggatntctgcagaattgagtacttatccacttcagtcttcaggcttgcttcanaatatttcttttcttggctcgaattttctgactgacggagcaattcattctttaattt

SEQ ID NO: 42459 - DNA, 446 bp, Zea mays
agcttaaggatatgctggttaccagtttccaatgcttttaaacgaagccagtcacagctcaggccctgttccaatgtacgcaagaccacgaagaatacctttatgcatatgtacgaaggttcttgcgactgagggcacaagcacctacagtgcccaatgaaattgtcattgaggccatgatcaagggtcttaggctaggacctactgcttaatatttcgccaggaaacccccacaaactctggagaagatgcttcagaagatggatgagtacatccgagctaacaacgacttccgccaaagaagggaggaagcttacagattctcggaaatgaccaggggcttcggaggaagaattcatccgaggcatgtcaggtcaatccataactccactcatagtgacgacaaaggaagtcagcctcagaggtcacaatacacctcacaatct

SEQ ID NO: 42460 - DNA, 475 bp, Zea mays
  unsure (1)..(475): unsure at all n locations
agctttcgcgagcgtgctgtgcgtcgccgcttgttcttgattggcgtgtcgcggagagacggcgctcgccttcgtctcatacgcgaggtcgacgcctggtgcgccccccgttggggtgccgggaccgtcgactctctcgacagccgacgaggcgctgcctcctgcttggccttggttgccccgcctcctcccccgtcgacggtggagaggacggngtgagctcgaaggttgctcttccaccatgcggngaagacgtctccgattccgccgccagcaggcgggttgtcggccgccactgttgttgtcgcacggcggtggaaggagtatcatgtcgtagctgccgtcgagggacatgaactcaagactcccaaaacggagcaccgtcccgggttggagagggtgctggagactgcccatctggagcttgacgggaagctgttcgtcacacgcagcaggccctacctgacgtgccact

SEQ ID NO: 42461 - DNA, 416 bp, Zea mays
  unsure (1)..(416): unsure at all n locations
agctntagaanacaactccttccttattcttttattatgaacgcacgaatgatcactcatttaggtggaaacaactcttcatgtctccccgttacgaagcatgcggtcctgcattcgagctctacttgttcccggatnttccacctgagggtttttcctcaaataaatagagaaacatgtccatcgtcgctgaaggcctttagtatcctcaactgcgtgcgtgtccttatttaggtatatgtngtagatctagcttacaaagtaggtgtgtgtggcggtgtctgttcggcgtgtgtagtgtctgagttcagatactacagacttggagaatgatgcnnataaaaaaggtcaggacaagtctgtgactgctgttcgtttactaaaacagaattataaaacagtgtattggcgcatca

SEQ ID NO: 42462 - DNA, 411 bp, Zea mays
  unsure (1)..(411): unsure at all n locations
agcttctacatagtggcagatctcaagacatatgtgtgaaccgatttaaagatgaaatgacttaaagacccactgacgtttgtgtcattattgtagtcgattgtaaagggcataaatgtaattntacttgggctgcgtcccatggctataaatagatgaacagtgctcccgtactgttcatgcggacttggcatttgcctttgcgtcacgcttgtacttttaccttctttcaagccgaaggtacattngtaatttgatatcatctctattttccataatgataaaataaaaatgagttgataatagtacatgattgggttatgtgttntatatttcatatgattccttcatcattatatgtcatgctgctaaaggtatgttcttcataaccttcgtncaaagatcattata

SEQ ID NO: 42463 - DNA, 338 bp, Zea mays
  unsure (1)..(338): unsure at all n locations
gctgatcagccgaagcccatgctgctgtgtgaggatataacanaacaaaacgtgctatctggctcgcaattatctgaagatcaagaaaaaaccttgataagggttttattctacaatatagatgtttttgcatgtgcagcccatgatctctgggagtgaatccggatgttattgaacattctctcaatgttgacccatccttcagaccccgcaagcagaggcttctgaaaatgtctgatgacaacgccgaaggggctcgccactaaataaaaagacttctaagtgcaggagttatcagaaaagtgaagtatccacaatggctagctaacactgttatg

SEQ ID NO: 42464 - DNA, 250 bp, Zea mays
  unsure (1)..(250): unsure at all n locations
ctggtcttcaacagtctgcagcgatatcggtggaagcttaacccacaaaaatgtgtctctggagtaccagcacgaaanatgctcggattcattgtcagtcaccgaagaattgaagccaacctatagaatatcaaagttatcatgagaatggaagcaccacgatcgcagaagaaagtacagagacttactggatgcatggcagctttgacacggtcatatcaaggctangagaataaggcctaccattcta

SEQ ID NO: 42465 - DNA, 309 bp, Zea mays
  unsure (1)..(309): unsure at all n locations
tgaagagatctanataatgatttatagaacaatttggtatataatatgaggagaaatagttgccctgctggcaacaccacacataattaattattattataagatctctctcaaaaatataatacctaanaatattgcataaatcgatacctaatttcacaatggtattgagtaatgggtcacccatgggcaatgggtaaaacgagctggactatacatttctgcatataaaaatctcttgttgacagcattggcctgatgccatgcactttaccaccattatatatgcgcaaattctcctatgtgctt

SEQ ID NO: 42466 - DNA, 452 bp, Zea mays
  unsure (1)..(452): unsure at all n locations
agcttacttgggaccgtgaaccttccagtggccttggaagcggtgcacacgttgtcgttgctgctgctgctgncgcccctgcccccgcggtgacggcggtcagtctgacacaggcggcgctggtggtggtatctgatctgaagatggtggcggcggagggctcgcgcccctctacccgtcctggacccgaggttcgggctccttagccccaccagctgtcttctgacacttctggngagagcctgaatctcgaggttgatccgaaacaaaggacccatcggtgcggtgcaatcggtgtcgccttacttcctccgacctcccggtggcgtccggggtggaggagctgcttgcgagccccttgcccttgtccganggactanggatggcaggaggaactctgtgggccacatcagctggctggnggccaccgaccggtgcaccaggaatgtgga

SEQ ID NO: 42467 - DNA, 463 bp, Zea mays
  unsure (1)..(463): unsure at all n locations
tagtagcataggcaagttatattctaatggactcaagcctagctacgggtgcataggtttctccgaaatccaaaccttcaacttgtgaatatcccttggccacaagtcgggctntgntccttgtcaccacgccatgctcatcttgcttgttgcggaaaacccacttggttcctacaacatttttggtaggacgtggaactaaatgccatatctcattcctagtgaaattgttgagctcctcttgcatcaccactacccaatccgaatcttgaagtgcttcctctaccctgtgtggctcaatagaggaaacaaacgagtaatgttcacaaaaatgagcaattcgagatcgagtagttacccccttctgaatatcgccgaggatggtgttcacggngtgatctcgttgaatggcttggtggactcttgggtgtggcggccttggaacttgttcatcttcctcatc

SEQ ID NO: 42468 - DNA, 430 bp, Zea mays
  unsure (1)..(430): unsure at all n locations
cagcttgtgagcacgacaagtacagaagggagaatgctgtttttatccatcagacgaagcccatgctcttatgtgaagatatagcagagcataaggtgttgctcggatctcaattgtctaaggaacaggagaaaaccgtaacatgggttctgttcaacaacaaagatgtcttcgctnggtcagccaacgatctctgtggtgtcaacagggatgttattgaacactcgctcaatgtcgatccatcctctatacccacaaagcagaggcttctgaaaatgtctgatgacaaagctgaaggtgctcgtaatgaagtaaaaagacttcttagttctggagtcatcatagaagtacaatacccagaatggctacccacactattatggtgaagaaggctaattggtaatggagaatgtgcattgattctactgac

SEQ ID NO: 42469 - DNA, 454 bp, Zea mays
  unsure (1)..(454): unsure at all n locations
gcttctaaagggagaacacattntaggattaacaaatgtttatttngagaaagacagggattgtagcgcatgccaggcanggaagcaagttggagcccatcatccacacaagaacatcatgacgaccgacaggccgctagagctcctacacatggacctattcggcccgattgcttacataagcattggcgggagtaagtactgtctagttattgtggatgattactctcgcttcacttgggtattctttttgcaggaaaaatctcaaacccaagagaccttanagggattcttgagacgggctcaaaatgagttcggcttaaggatcaagaagaatagaagcgacaacggaacggagttcaagaactctcanatcgaaggcttccttgaggaggagggcatcaagcatgagttctcttctccctacactctgcaacanaatggtgtagtggag

SEQ ID NO: 42470 - DNA, 114 bp, Zea mays
  unsure (1)..(114): unsure at all n locations
aattttcttcacacganggtgaattaggagattatacacgtaatacatcggcttaaggggtgcacgaccaatcacaacccccttatgggatgtcgatggacacgtaccctgagc

SEQ ID NO: 42471 - DNA, 190 bp, Zea mays
tgctctaagtattggtaggaattatgggctaggtccaattgagaaattcaaataaatcccagtaaaatcacaaaagcccatataaatgtatggctaaggaatggtggaaccaataacaccatattgctagttctagtggagtagagctagcttaaatatggaagccacactcactcatcaaatcatggat

SEQ ID NO: 42472 - DNA, 350 bp, Zea mays
  unsure (1)..(350): unsure at all n locations
gccatttctaagtattttggtgagtgagtgcaaacacaagtgcttaaatgtgaaaatatgcccatggatgaacaaagtgcaaatcacaagttaaggtatgtttctaagccttagtacattggttttgtgtactaatatacttgtcttagtgttngaaacagaaagaagaagagaagagaagacttggctgtgtacagccaagaggctgtttcgtctggtgcaccggactgtccggtggtgcaccggacagtgtccggtgcgccaggctgccccagccgaagaggccgctctcgggtttttctccggcgacttctgctaaaattcaccggactgtccgctgagccaactgt

SEQ ID NO: 42473 - DNA, 428 bp, Zea mays
tatctcatattttagaatattcggctgccaatgttatatcttgagaaagggaagccggctttctaaatttgagaagaaatgtgatgagggttttcttcttggatattcatcgaatagtaaggcctataaagtcttcaacaaaactcatggtattattgaagaaacatatgatgttgagtttgatgatacaaatgggtctcaagatgagagtgataatcttgatgatgttggtggaactcaattgataaatgcaatgaaaacaatggccatcggtgaaatatagccaaacgaagatgatgatgaaaatagtgtggttgtcattccttcatcttcaactctaaatgaagaagatcaccacagccacacaaatgatgatactatggatactcatgatcaaggtacttcaagacatttcgcgtcctctaatg

SEQ ID NO: 42474 - DNA, 468 bp, Zea mays
  unsure (1)..(468): unsure at all n locations
agcttaatgccggaatggccatcaaggaagctctctctctcttctcatccncncattgtctcatggcaaagggagatgctaaggtaaaaatcatcaccgatttaaatgatataaaagatgatgatgatatcgatgatgttgatgatgatggctattcatatgatgatcttgttagaatgttaggtgaggccgatgactacatgcacaaagaataagaanaatttaagaccttgaaggaattgtataaaaacctccaagtgtcttttgaggagctcaagacctctcacaatgatctanaagaaaattgtgagaagcttgcggatgctcaaaaatcatctattgtgcatgaagttgaggtggtcactaacgatgttggagtcacttgtgacttacttgatagtcttacaagtaaaccactacctactaactctatttgtgataatgaaaatttctctcatgatacattgt

SEQ ID NO: 42475 - DNA, 243 bp, Zea mays
ctaccacttattgactcgtgaaagttttgttcaatgcaaaaaaagctggacaatgactgcaaaaaattgggtcttagagcaaacaccaaaaacctagaatctgagttgcgagatcggacggaccttatggacgggggagactcaattcctggacacctcatttggaaacttccaaatctctgtattaagaggtttggatgcatggagcgcaaggaaaatgccatccaaaagagtgagccactt

SEQ ID NO: 42476 - DNA, 445 bp, Zea mays
  unsure (1)..(445): unsure at all n locations
ctgcggcatgcaagcttatgagtatggtaataagtcccttgatatttatcttcggcatgacgagaccactatgcaacatgcaactcggctccccatgccaattggccgaagtaaaatatanggtggtggttgggcatattggcaccagggatttattgcatgaatacttggcaaacagaactttcccaacctctagtggatggggaatgccaaagaagaaggaagaaaggaanaagtatgaacttgttcgactcccttaccgcttcaaatnttagaagagaattaaagagccatgcactgaatggttagaagtgatagaaaccatctgcaatgaaatccttggaaactatacgaagaaggaagatcagctaatgactgctgccttcgccacccggccaaaacgaaggttgaatcgggtgatggatgctctgaatnttgagtaccc

SEQ ID NO: 42477 - DNA, 219 bp, Zea mays
ttatcacttccgcattatttgaaagctatactctttactaacaagaacttagtttttatactccgataattggtcatcttgttctaaccactaatcaagggatctagttgggggataaagttttaattttcaagttccgcctattcacccccccctctaggcgactatcaattggtatcggagctaggcacttcatcttgagtctacaactcgaagtga

SEQ ID NO: 42478 - DNA, 374 bp, Zea mays
agctatcacatgttcgacgcgagctgacatgctgtggcgcgctcagagcacgcccgtgcgcgaacccgcgcgcgcccgcggtcgtccgtgaacacgcccgcgccacagctataaagaccgacccagtgcttgggtgtcttccccggtgccttctccgaacctcacctgacttacacgagccagccattagctccggcgaactccccgagacccgctagtgccagccgagagcaaccaccggggccagccactctaccgtccttctccgtgctgatccaagccctcagatagcttactggtgaggccgcgagacttgctcaagcttgacccgcggacccgcgtcaccaggatagcccaatcgtgctcaccggagt

SEQ ID NO: 42479 - DNA, 411 bp, Zea mays
  unsure (1)..(411): unsure at all n locations
gctctgcaaccgctagactccaatcatgagactctctcccttctggaggcccgaagccagaataggaaggctgtcagcccgacaccgctagaggatgagctataccaagaaatcagagacatggagatgcttcatcaacaggtgcagaggaagaaggaanaaatggccaggctagctgaactacaaaggcagatagacgaagcctctgaagaagttcgtcatcttactcaggatgagcagaaccgaaggcctcagactaaagaccttcatcaggagggttttctcaacgaagatgactggtatgagaattctcactatggaaattttgcttttgatgatgcttctcctctgtccgctgagctacaggctacaccttggcctccgtactacaagccagcttagcttcccata

SEQ ID NO: 42480 - DNA, 504 bp, Zea mays
  unsure (1)..(504): unsure at all n locations
agcttctaagggagaacacgtgatagggttgacttacttcaattcgaaaaagatagaccttgtgcagcttggcaagcaggtaaacaagttggaggagcgcatcacaggcagaatgtgatgaccacatcaagacccttggagctgctacatatggacctcttcagacccgtcgcctatctaagcataggaggaagtaagtatggtctagttattgttgatgactnttcccgcttcacttgggtggttcttttgcaggataagtctgaaacccaagggaccctcaagcgcttcctaaggagagctcanaatgagtttgagctcaaggtaaagaagataaggagcgacaacgggtccgagttcaagaaccttcaagtggaggagtttcttgaggaggaagggatcaagcatgagttctccgctccctacacaccacaacanaatggtgtggtagagaggaagaacaggacgcttatcgatatggcgaggacgatgcttggagagttt

SEQ ID NO: 42481 - DNA, 442 bp, Zea mays
  unsure (1)..(442): unsure at all n locations
gtcttgcctataacaggctgaagtacaaaaattgtatattcggaagcttatgaattttgaattattcttttggtcttatattgactcattcattattttcatataggggttaatacttaacaacgctttaagggcgcaaaagaatgccgaagacgagagttgtactatcgctctcaacaaccgtcgaacagaggttattaagctgaggaacgaagctttggaaaaagacaaaattctacttacattggtggacaaagtaaagggggatgaagctaactacaagacccaatctgaaatccaaaggaacgagattgaatacctctcaaaacaactggccgaagctgaccgagatgccagtgattactggaaaaattatttgggagaaaacagtgcagagcttcgctcatcgaaagaattatgttntaaaaatctgtggatgcgt

SEQ ID NO: 42482 - DNA, 186 bp, Zea mays
gctttgtgtggagttgggagaggatctgatcttttttgtgtgtcttgtattgaatgctagctcttgtaatgtagttgggaggtggagaacttggatgactcgaatgtgggggtggtgggggtatttataaccccaaccaacaaactatcctctctggtgatgcctctgtctcattgcgcacctgac

SEQ ID NO: 42483 - DNA, 357 bp, Zea mays
atatgctacctttaccaccttctgaaatagtgaacttggatgctacacaacgttctgaatttattcttaagttacatgaaacaactaagttgctaattgaaaagatgaatgaaaagtatcgtattgctgcttataaatgtatgaaggaaatgaacatggaacctggtgacttggtgtgggttcattcgagaaaggataggtttcctgatttgagaaagtctaaacttatgccacgagctgcacgtccttataaagttcttgcaaaaattaatgataatgcatatacacttgagttgccgccagatattgggggtagctccacctttaacatttcagatttgagccatatatgggtga

SEQ ID NO: 42484 - DNA, 423 bp, Zea mays
  unsure (1)..(423): unsure at all n locations
atgcccgagcgtcttccattatagagcatgcttctagcaaatataaacttttcattttcaatttcatgctcattaattgtagcactaaagtgagctatgtgatcattttgttgttaattaaagctaggcgatcatggatagcatcaacattaatatctctacatttagtgcaaatagaaacatgatcgacattcgatgttgagggtgtgcgaccatttaatncatcaatcttagcatgtgaaatagcattgtcatttctaagactacaaatggcatcattgcaaacattcatatctctagccttagcaattaatctcttattcttatatttaaggctagagatagatgcattcaatttatcaatcttagcaattacactagcattnttgctcttaagattgacaattgaattacacagacatt

SEQ ID NO: 42485 - DNA, 293 bp, Zea mays
ccttggacacaattttttttaaaagatgaccaggacaggacagtgggtctatcaccaaactatacacgcagccctactctccatgacaatcgccaagcttaatactcgcgagatacgcatatggagatattctactgagttttgagaaaacaccaaactaaggtctgacgccaagatcgttagcaaaataacacatgacggtaaattaaaaagcttagaaggctacgattttctcgccacaaggaggagaaaaaactctgagcactgaacaaacgacgttggtagaaaccgtt

SEQ ID NO: 42486 - DNA, 413 bp, Zea mays
  unsure (1)..(413): unsure at all n locations
tcctggncaattattaactccattaacttgctgctactgttgggatattcctgtcctggttcattaaattgccattgatgattatacactagctactagctgcatctttctgattcatgcgagcatattgaggcctgtcttgtctcttggtctgcaagctaggaggcatagcggcttcacagctacaaaaaatgattttatatgggatggagctgcagactataattatagtcgtggagcagcacatacgtgtatttttgtttttcagttttttggttgaattcttaccttatgttatctcatggtatggtcccttangaagttctttgttgggagtaggttccattacatccaggattngcatccattgtgaaactctttttgngttattggttangatataatctaagtta

SEQ ID NO: 42487 - DNA, 349 bp, Zea mays
  unsure (1)..(349): unsure at all n locations
tgcaagcttctaagggagaacacgtgataggtttgtctatcttgcnattcgaanaagatagaccttgtgcagctngtcaagcaggtaaacaagtgggaggagcacatcacagctagaatgtgatgaccactttcagacccctggagctgctgcatatggacctcttcggacccgtcgcctatctgatcataagagggagtaagtatggcctagttattgttgatgacttctcccgcctcacttgggtgtntcttttgcaggataagtctgaaacccaaggaccctcatgcgcttcctcatgagagctcacaatgacgttgagctcaaagtgaagaagataatgagcgac

SEQ ID NO: 42488 - DNA, 496 bp, Zea mays
  unsure (1)..(496): unsure at all n locations
ctttagtcacctgcggcatgcaagcttgaaaatatcttaattataaatctacaactcttttgtaacctatttaatctttttttagaaaagttatatagaataactaaggctatgggctcaagaattataaaacacatttattaaacacttagctatgaagcattataaaacatgttattaaacatttttagaaaagatatatgttatatatctaagggtgatgagttatgaaacacattattaaacattacttctataaaaagctaataaatagcttaaacaactttttatgtgaaaagatcataattatattattaaacatctatctataaggagctatgatatatgccttaagtgaagtttcatgcaatagataatgaacaaatgactatcttntaattttattagagagtacatagcatatattctttattaagaaagctatatacaacacaatatgtagaccaacattnttattattatanaataacataaa

SEQ ID NO: 42489 - DNA, 404 bp, Zea mays
  unsure (1)..(404): unsure at all n locations
ttctgtcaaaatatccctcgaggacaaaatgagcatgctgatctgctanctaagtcagcagcacaggggctgcccttaccttcggatgtattcttccgaaacaataaacgcaccttcggtggaacttcttgaaagagcagtcctcaatatatctcctgtctatagcgaagattggagaactgagatcatctcttaccttcagggaaaattcctttcagatgatgaagcttataacaggaggatagaggcaagagctcgtccatatgtcatgatagaaggggagttgttcaagcatgcgagttgtgctccgctactcaagtgtttatgcagaaccgaaggtatagagttaatgaaagaaatacatgcaggactgtgtggatctcgcataggatatatgccgttgc

SEQ ID NO: 42490 - DNA, 335 bp, Zea mays
  unsure (1)..(335): unsure at all n locations
cctgcggcatgcaagcttanncaaagaaaattctagaatcaagattatttgagctcatgcctaagactggtgaaagattgttcatcatgtggcttggttaagatatcggctaattgatctttagtattaatgtaagacatctcgatatcccccttttgttggtgatccctaagaaaatgataccgaatggctatgtgcttagtgcggctatgctcgacgggattgtcggccattttgattgcactctcattatcacatagcaaagggacttttggtaatttgtaaccgtagtcccgcagggtttgcctcatccaaagcaattgcgcgcaacagtg

SEQ ID NO: 42491 - DNA, 154 bp, Zea mays
  unsure (1)..(154): unsure at all n locations
tactttatttactaaaactcttgcaatgatttgtttgtatgccaaatttatgtcgatgatattatatntgggtctactaacgaatctacatgtgaagaatttagtaggatcatgacacacaaatttgagatgctatgatgtgggcagtgaatac

SEQ ID NO: 42492 - DNA, 398 bp, Zea mays
  unsure (1)..(398): unsure at all n locations
tgaaagctggattgcgattccccctgatcatcttctcttggaggtgttgaaaatcttcgaagtctatcttcatcaacttactccagaggcgattataaagctaaatatcttcgtgtgggccacgagaagccaatgtctgaagcctgacgcaagaagcttctgcaatatacatgaattattatatgaaacaaagcctttgggcaaagaacagtaccacaataactttggctgctatagtttcgtctctcggtccggggcaagctgtcccgtaccaacctttcggaagagatggcccggngattggatgacagaatggttntatgtgaagaatgacctatcagcacgaggagacatcanaggtataatcatgcgttctatttggcaagctttggccttcg

SEQ ID NO: 42493 - DNA, 304 bp, Zea mays
  unsure (1)..(304): unsure at all n locations
ttatgcagcnggatgcttggatctcaaatatgacataaacagtgagtcagagtctggggtcactgacgatcatatttatcggcaaatggaagaaatttttaaaaaaaattcaaggccacaacactttgatagaactctagacggaaacatatactatacccaaggcttggttgaccacaggcataccaggaagcagtgtgttgttgtcattggccacagcgagttgacattatggaagtcatgacagtacttatataacctaatttgtacacactgccatgaatataaactattaatggatttc

SEQ ID NO: 42494 - DNA, 406 bp, Zea mays
  unsure (1)..(406): unsure at all n locations
tcattcctcaacatgcaaaagcgggtcttatcaagtggcttatagaaaatattcgctaattgatcttccgacctcactccttctaaaatgatatctnctttagcaacatgatctctaaggaagagatgaccgatatcaatgtgcttggcgcgagagtgttgaacaggattattagcaattntaacagcactctcattatcacacaacaaaggtactctttctagaactacgccatagtctagaagagattgtttcatatataanatctgtgtgaacaagcacctgcggcaatgtattccgcttcggcagttgcaaagcaacactattttgcttttggatgccatgtactagtgtctaccaagcgatggatccccagaagacttttctatcaatctgcaccgcataa

SEQ ID NO: 42495 - DNA, 230 bp, Zea mays
atttggatcttggaccctagcatgaacattgtagatcatcattagacctcttaatatcttgcttgacgtggtgatctctcttatcaccattgtgcctacattccagtacattctgccatcattgagctattttcataaacactattaaacaatattaatactcatggatgtgtcgatcatcccacacctaaactctataagctaatggacctctatccattgtgcttaga

SEQ ID NO: 42496 - DNA, 394 bp, Zea mays
accgtcacaagttggtggtcttctgcagtccgaatccaccatgttccaatccttttccctttcgggcttctcactgattcctaagtcaaaaaagagtgcaccggtctccatggtctagatatgatggacatgaactcgagagtgtaatcacctgatggttgagtcgccaccacgagcgccataatgtgaccagacatggtacttgtattgtatagatgcgtcatagtgggacgtcttatcaattatggtagcctttcttcattattaaacacagaacgggaggacatgtatcctgatgcttgctcgcgcttacatgctgccagtagatctaaatcttggtttgacctgtgacgatcattgtgacatgctgtgtaaagctccgcatgatatggaa

SEQ ID NO: 42497 - DNA, 262 bp, Zea mays
  unsure (1)..(262): unsure at all n locations
ggtgctcatcatccacacaagaacatcatgacgactgacaggccactatagctcctacacatggacctattcggcctgattgcttacatangcatcggcgggagtaagtactgtctagttattggggatgaatattctcgcttcactcgggtattctttttgcaggaaaaatctcatactcaagagaccttaatgggattcttgagacgagctcacaacgagtntgacttaaggatcaagaaaattagaagcgacaacggga

SEQ ID NO: 42498 - DNA, 311 bp, Zea mays
cccccttgagctaccccccttgctggctgttttgtcctgcgctttacgcgctgatctatgtgagaaacattttatattatccgcgctcattggcacctgtagagctctctgttttgtgctgaaacaagtgagtatgatgacgttaacgcgcgagatctgctctgtcatatcgccgtacaatttcagcctctcgggcatcgcggaccggattacaaatgtacaatagataaacgaagactactagcgcacgctgcctcaccggttgaatctatttataggtaccgtgagtggtgtcttcctatatgaacact

SEQ ID NO: 42499 - DNA, 360 bp, Zea mays
  unsure (1)..(360): unsure at all n locations
agcttgcacccaggtacattggtccattcctggtgcttgatcaatgtggaccagtggcataccgactccaactacccgaaaccttgtctgctgtgcataatgtgttccatgtgtcacaattgaagaagtgtcttctgattcccgatcgaactattgaagtaactgatgttgtccttgtgccggacttgacatattctgagcatcctattcgagtcttggatcaaaaggacagggttacccggagaaaaactctcaagttttataagatacagnggaaccagcattccgaagatgaggctacatgggaaactcaagactttctataanagaatnttccacgctctttagcctcatgtaaat

SEQ ID NO: 42500 - DNA, 440 bp, Zea mays
  unsure (1)..(440): unsure at all n locations
gcagcttctaagggagaacacgtgatatggtttgtctttcttacaattcgaaaaagatagaccttgtgcagcttgtcaagcaggtaaacaggtgggaggagcgcatcacagcaagaatgtgatgaccacttcaagacccctggagctgctgcatatggacctcttcggacccgtcgcctatctgagcatagggggaagtaagtatggtctagttattgtcgatgacttttcccgcttcacttgggtgttcttnttgcaggataagtctgaaacccaagggaccctcaagcgcttccttatgagagctcaaaatgagtttgaactcaaggtgaagaagataatgagcgacaacgggtccgagttcaagaaccttcaagtggaggagttccttgaggaggaagggatcaagcacgagttctccgctctctacacaccacaac

SEQ ID NO: 42501 - DNA, 458 bp, Zea mays
  unsure (1)..(458): unsure at all n locations
gcccccagattntacagaatataagcaaggcacaatttggtttaaaaatatgatctgtgtatcggaaattaaacatcttcgtcagcttattttgagagaagctaatgatttgacatattctattcaccctggaagtaccaagatgatcaggatctaatagaaaaatattggttgtatgaattgaaaagagatattgccatttatgtagcattatgtgacgtgtgtcagcgagttaagacggaacattaaagtacagcaggtttgctacaacctcttaaagtgcctgaatgaaaatggngagagaaatgatatagatttatagtcgggctactccgtacacgtgatggacatgattccgtatgggttattgtagacatattaactaagaatgcacactttatacatgtattggtcctatgtatggctccctatgtatggattagatgcagtaatacaac

SEQ ID NO: 42502 - DNA, 374 bp, Zea mays
  unsure (1)..(374): unsure at all n locations
acagtctagtggtgcaccggacaggcactgttcactgttcggtgcgccatctggctctgctctgactctggcgcacactgtatgcgcatttaatgccttcttcagacgaccgttggcgcgaagtagtcgttgctccgctggccaccggacagtccggtgtgccaccggacagttcggtgtgccacccgacagtccagtgtgccacctgacactgtncggtgctacatctgacagttcggtgaattatagcggagcgacctccataattctcgaaggtgagcaagtcggagttggagtccttggtgcaccggtggcacaccggacagatctgtgcgccagacacggcacactntggctgactcttgatctctata

SEQ ID NO: 42503 - DNA, 324 bp, Zea mays
ccccaaacctagagatgccacaaatcttgttggtgatgcacaactctgataaatggaatgcaaaggcccaaacactctttttatggaccattggcaggatgtattcaatagaggtaaaaatcacaaaacgcttatgatttgtaggtagatatttgtgctctacatgaaggaaccaaaagtgaacgtgaggaaagatatcatattgccatgaaacaaataaattcttttgaaatgcttgccaatgagactgccaatgatatgtactcacgacttaactattcttgaaagatagttaattgtttgggactcactcacatatcacaa

SEQ ID NO: 42504 - DNA, 366 bp, Zea mays
gcagatgactatatctgtccatagctctcggaaatcttcgatcagagatcatcacattaaggaacgaagctcttgaaaaagataagataatgttttccttattggacaagatgaagacctgcgaagcccagcttattactcaagacgaagcccataaagctaaagtcgaagattggaagaagaaacttgccgaaatgaatgaaaatttcaaatgtgctaaggctcaacaagaaataagtgaaatgaaaagatctacggtgcaaaagaatgttgaagagcttgggattcctatgagagatgcttcgaaacatccatagaatgcacgaagaaactgaaagatagctttgctaatgtgggagcatactc

SEQ ID NO: 42505 - DNA, 235 bp, Zea mays
  unsure (1)..(235): unsure at all n locations
gaccgatcacatagaacggtcttctcgctagtattcttggagagcaactgatcaacagtagagtcagctttgatcagccgaccatttgtgcttcgccgctgtgtctccttcccttttaaggtnttgtgtggaggctgacgcctttgggcataagcggactgtccggcagagttagccgaaccgtctatcttgacaccggaccgtccgcacgtaggtgccagatcgtccatgatgc

SEQ ID NO: 42506 - DNA, 485 bp, Zea mays
  unsure (1)..(485): unsure at all n locations
gattcctcgaagctcgaagatggatcgcagtctattcgcgacacgaagcgaagacgaacaatcaccagcnaacaaacatatacatatgcctaagaacattacaccatacaaaggaaaacataattcaaacatgccatacgaaatagagcgcgttactacagtcacgcgaggaanaagaaacgcgacggtcgaggctactgtcgagaagttatcgcgtccatactaagcgagtattaatcataacatttagtttgatctaattatattaatcaatatttattaaaataaaactagagctggtgacaatttaattagctgacacactaacgattcttagttaataagtaatnttataacaacagcgactctaagcagaacaaatcagcggagcgagacgaaacacgtaacgcgtgatacatcacgacagcgtgcanacgacgcgccgacacgcgtgacatagcacgccgacgatacacgaacaacac

SEQ ID NO: 42507 - DNA, 368 bp, Zea mays
  unsure (1)..(368): unsure at all n locations
gcttctanagggagagcacattgtaggattaacttatgttcattntgagaaagacaggatctgtagcgcatgccaagcagggaagcaagttggtgcccatcatccacataagaacatcatgacgaccgacaggccactggagctcctacacatggatctattcggcccgattgcttacataagcatcggcgggagtaagtactggctagttatcngggatgattattctcgcttcacttgggtattctttttgcaggaaaaatctcataccccangaacattaaagggattcttaagacgggctcaaaatgagttcggcttaaggatcaagaanatcagaagcgacaacgggacggagttcaagaact

SEQ ID NO: 42508 - DNA, 430 bp, Zea mays
  unsure (1)..(430): unsure at all n locations
agctntaactcctgcgagacgctttcctcgttttttctaaccataaagaatgcgatatcgaatgtcatacttgatgcatattcactttatttgttcccttgtatgatgtactgtttgtttcccaatttgaatggatgaatgtatgtatgcttgcaatcgcatagagaacgatccggtcgaagagcccgatgaactcgcaggagaagcccctgagcagcagtcggttggtggaggcaagtgtcccttgacctatctctgtcctattcattctttaattcacctcccgctttacacatttatacctaaggattgactaactcttgttatccatgtccttgattacctatctgggttggattatttatacctagctttatgctattgcttaactctaatcaatgaacatgatgagattatctatgatacgctg

SEQ ID NO: 42509 - DNA, 379 bp, Zea mays
  unsure (1)..(379): unsure at all n locations
atatctgaataatacacttaactcgactattaaataaataaataaaatatgaggaacttactctaaaattgtgccatcttgaattgccatgatataatcgtatagaaactctatcatatcagctnttgtcacagacatatccttggtggaaagaccactcattaaagagtcattgccacacccatcaacagaaggtggaggtaagggtgacatcattctcttttttggcacatatttcttcaaatataataatataggatcatctccggggctaatctgagggcttcgtttcttcttgtaggatttgatgacngttctaaaacctcaacatcactgggagcactctcatggggctatgactttngttggattactttat

SEQ ID NO: 42510 - DNA, 116 bp, Zea mays
ttgttctgctgtacattatgaatatgtactatcttgtcaattatatgactgaaatatttactgttcctttatatagtctggcttaggctgcgtttatcttcgagcgtttgtacgcg

SEQ ID NO: 42511 - DNA, 357 bp, Zea mays
  unsure (1)..(357): unsure at all n locations
gatagtgagtatcctaaccacgtatataaactctctaaggcgctttatgggctcaagcaagcaccaagagcatggtatgaatgccgaagagattttcttatcactaatggcttcanagtcagaaaagccgatcctactttatttactanaactcttgcaaatgatttatttgtatgccaaatatatgttgatgatattatatttgggtctactaatgaatctacatgtgaggcatttagtaggatcatgacacagaaattcgagatgttcatgatggnggagttgaagtacttcttatgatntcaagtaaagcaactccaagagggcaccttcattagccaaacgaagtacattcat

SEQ ID NO: 42512 - DNA, 442 bp, Zea mays
  unsure (1)..(442): unsure at all n locations
agcttactccactcacattaagatctagcttctattattntgaanaaaaaaatctcatttgtggaaaattatgtaaataatccacttctttgtacgtaatcttaaaaaatacccatgcacatctatttgtaataataccattacctttttaatcgtcatatctgttgcacactcatctctcagtggtatgccagaggtcaactgtccagcatcgtgctgcacacatatactgtcggtaccctggatcaggggtaccctcttctaaagcatgaagatgccgcacccgtgcaacacctcaaggccacacggagaatggcgcccaaccccaccacatgggcaggtccaagggcgccacgtggcaaggaaagggagtacatcccagtattcatcgttgggtccggacctccacagaaggacaccggacncctatacgtacaagtct

SEQ ID NO: 42513 - DNA, 196 bp, Zea mays
gtttttttctcctatagctctcgggcgccttatatttctggaaggctgacatcctttaaaacaagaagactacttcatttggggaacttcgccatggtagaaaagctgacctgtaggatatgggtgtgccggtctgtacgtttttctttggaagtgaaacaaaagctgacctcaggacatatactgtgcaagaatt

SEQ ID NO: 42514 - DNA, 406 bp, Zea mays
  unsure (1)..(406): unsure at all n locations
gcaagcttgtagctttgtcttcgcaaccgtgatcacttctcatctncaaacgaaggtgtccatagaaattntaccctgttatacctgaaacagacttgcgaataactggttagtcaatgttttatggaccttcttctagagaggccccctaacagttgtgttggcttgtcaaagagtgattggaagttggtgacaaacagatcacaaaaattgggcctagttgtcgatgcagtgtcgatgaaggtgacggagccactagagcgcatcttgccatagcatgatcaggaggtacgctatcatcacgccttccatcagccagtcgcctgggcaaccatggaataaatggctagccagtcgctcgagtccttcttagctttatatttttcaacattggagaccttgaagt

SEQ ID NO: 42515 - DNA, 393 bp, Zea mays
  unsure (1)..(393): unsure at all n locations
tcagcaacacgggctgctgctctgcattcgctggacccgaaccagtagaccctttctcttccggaagcccgaagccagaagaggaaggccaccactccaacgcctcatgaggacgatttggaccaagaaatgaggaacatggagatgctgcatcaacaagtgcaaaggaagaaagaaaagatggcccggctagctgacctataaaggtagatagacgaagcctctcaagaagtttgtcattctacgcaagatgaccagaaccgggaggccccaatacagagagcttcaccaagaaggcttcgtcaacgaggatgactggtatgaggatntccatcatggaaatcttgcttttgatgatgcttctcctctatcagcagaactgcaggctacacc

SEQ ID NO: 42516 - DNA, 393 bp, Zea mays
  unsure (1)..(393): unsure at all n locations
tctatgataagagcatagaagagaatcttgttgttgatattcgaggtcatacattggtttcacacaagcctcgtacttctcattttgattaggctccatctcctccaaacttttgagtgcctgattttattaagtttaatggggaggataataggagtactcangaccatattagccaatatttatctcaatcaagagatgcaagttatattgatactttaaaagctcacatgttttcnttgtctctatttggaactcctttttcttggtttgcatctttggctctcggttaatcaattcttgagagcacctagagggggggtgaataagtgatcctgtaaaaacttgaactttaatgccacacaaacttgattatgagttagcacaataaag

SEQ ID NO: 42517 - DNA, 179 bp, Zea mays
atccagctacaatcttgctatagcaatcatagatcaacaatcactggatcatggtcaaatccgatctcaaagttcacctaacttcactgttagccaatattgagttcaaagactaactgttagcccaaccttaagtccttctatttcgaatttctgtaccgcactcatgtcttgtgatt

SEQ ID NO: 42518 - DNA, 377 bp, Zea mays
agcttgagtcagttattcaacacaagattattgtcactcatatgatatgaagtctatctgtgagaagaaggaagccgaccaagctccttgttttatgaaagatgatcaacgagtgtgctggttcgaacactgcataatggtgcctaagcatgctgaactctgtcaacaaaatcttgtatgaagcccatcctaatccgtattctattcctcctataagtaataaaatgtaccaagatttgaaacatcattatttggtggactaacatgaagatagaaatctctcgctatgtggcaaaatgtgacgcttgtagatgagtcaaggccgggcatatgaagactgctggacctcttgaatcattacccatcccaacatggga

SEQ ID NO: 42519 - DNA, 431 bp, Zea mays
  unsure (1)..(431): unsure at all n locations
tgtgagcaatacaagttcagaaggggaaaagctgcttcngctgatctttctatacccatgctcttgtgtgaggacacagcatagcagaacgtgctgttgggatctcaactgtccgaagaacangagaaaaccttgataaggtttctgttcaacaacaaagatgtttctgcttggtcagctaatgatctctgcggagttaacagggatgttattgaacactcgctcaatgttgatccatccttcagacccagaaagtagaggcttcagaagatgtatgatgacaacgctgaatgtgctcggaatgaagtcaaaagactcctcagtgccggagttatcagagaggtaaaatacccagaatggctggctcacactgttatggtaaagaaaccaatggtaaatggaggatgtgtatcgattttactgatcttaat

SEQ ID NO: 42520 - DNA, 493 bp, Zea mays
  unsure (1)..(493): unsure at all n locations
tatctaagctgggcacgcatatnttgggacccatcgcttgatgggtccatctttgtttgtctacacagatctacgaacccaaaagtcctttgtgttatcactatgtaaactcattacctttctagcacaagatgcaagtattgggttgcctagttacatgagaattaattgacaagctaggagtggaattgttaccaatgggacaatccttgcattgatgtcccttctttcggcatgtgtagcataagcgtttttcaagttgtgaagttttcttctttccttgtttgttgcttgctacatggttagtaaaaactctcttttctaactctatgccgttttggtttaaatggggacaagatctaagcaagtgtcccttcttggagcatctataacaaagtctatcatccttgttaataatcaagccacttttaatgtatggacatgatctaatcaagtgccgcgtttcatagcactcactacacttcttaatgtg

SEQ ID NO: 42521 - DNA, 433 bp, Zea mays
  unsure (1)..(433): unsure at all n locations
gtagctggtcataattctattagcagtttctatgtgttatgtaataccaaaccttaaatagaataatagaacaaaattaattataaacccatgcatatgcaaatgacaaaattgaatntaagttccataatttaatcatcagagagtcttgagctgctcatgaccgtgagctcgggtagtataccagatttacactctgcagaggttgtaccctatacccacaagtcatgttacccatctgccaaggagtcgcgaatcccatacacctctacctatgaagcgcggcacggcaccactacgaggcctttacaaagttccactagcttccgaaaacccgctacagtttataggaagctccaatgcatggttcttgtctgaccgccatcgcatgcaaatcaaccaatgaccgtcctacactgaccactcgcctact

SEQ ID NO: 42522 - DNA, 450 bp, Zea mays
agctcgagatgggagaaaccgcagcaagtgtttaactctttaagaaggatgttcctaaagcaataaatgaagaaatcaacatgaacaaagaaaaaggtaaaaattcaattagtcatgttgtttgcactgatcatctctttatgtcatccaagagcaaaaagggaagaggaaaaaggaggtgcttcaagtgcaaggaattaagtcacttcattgcatcttggccacacaaagaaaaggtatgaaggatggaactatgcaatttcattgaatatcttgaagtttcattgattctgatcatagctatgttcttgtatttaaatcgtactatcctggcttaagtgccttatgctttaaaatgttgtttccttggggtacctacaaaatactttttaatcatagtgtgctacacattgtgcttatatgcatgactagtcttttcatttggatatg

SEQ ID NO: 42523 - DNA, 484 bp, Zea mays
  unsure (1)..(484): unsure at all n locations
tgtgtctagcagtaacacgggtatagttatttgttccgctgaaaactgcagctgtccaaacaagacaacattntactcaacattccaggatctgcaagaacctatgtcttgaaacgctgcaaggataagtataaaatctgtgcaactctatatatctccccaagagcaatcaagtagtgaccacctgtaaaaccaacatagatggcaatttataattgaattctatctgtgaaggtaaatgatcccaaatgaatgataaagcttttctggtcgtgcaaaatatttgtaccttcagaaactactctgtcgcagacatttgcatgataaaacacttgccatagttccacaccatgcttcaattcttgagcatatgacagaagcataatgtaccatgcaccgacataagcaacctgttcctctttnggatgctagttcaatagatctagggtggaacactgagctngtaaagtcaactgaatatatg

SEQ ID NO: 42524 - DNA, 411 bp, Zea mays
  unsure (1)..(411): unsure at all n locations
agcttagaggcanaagtgcacgggctactgcgtgcactggatttatacttccacgggtaaaaactcatcagcctgtgtgtgcgcacggaacgcgtcatgcacgtgttgattgagctacgcgtgcccttaaaccagcctccaactacgccaacttagacggcatacagaacctacttccgttgaactaaaaacatcttataaaacttcttgtacaggattaaaaagctgcgcatgtgggtttagcatataatgcatctaaacaagaccttaagctatgctataaaagtgtgccataatccgttctcaaaaaaaacatatagtataagtgaagggctttttagggcctctttgacatggctcttaaacagctctagggactctatcgtgagtcctataaacgggcataaaaac

SEQ ID NO: 42525 - DNA, 438 bp, Zea mays
  unsure (1)..(438): unsure at all n locations
taagtgaaatagtcataaaatgttactaagaatggacctacagtacattcactcttcttganataccaagaaccctaattggaaccctggaaaaccctaaacttaaaccctacgggataagtgcaaaattaggacacttttggactaaagtgtaaaaactatgatgttaaagcatataaagtcatatggttcacaatcatgaagatttacaagctaaaccctgaatnttggacttatttgcaaaaagaccttatttgagatctcaccctaagtctgaaattcagtgatatgggctcaactttggagccttgtaactntcatattctaaggtttttgccctaggtcaccacatcaattgtgtagatctatcaaaggtgaacaactctgtttaacgagttaaacattggctgtatgaagaatttggagataattcaactc

SEQ ID NO: 42526 - DNA, 324 bp, Zea mays
  unsure (1)..(324): unsure at all n locations
agcttgtggcatggtttaaagacagattcacctatgcagttggattgcnnaatgagggagagagatgggctccaaaacctaagacctttctatagaaggccaaggaaagggcaaacacacacactgttgattgttgtgacttacagtcagggacatatgaagtattccttcaagctggtactacttccgacggcgagtcacaagagttgaggaagcatgtggttgtccttaatgacttgtcatgtacttgtggcgcacccaagcaataccattttccatgttctcatctaatcgcagctgcttgagctcgcaactttgacttat

SEQ ID NO: 42527 - DNA, 494 bp, Zea mays
  unsure (1)..(494): unsure at all n locations
taatactcgagcttgaagccatggtaagtagcatatgcaagtaatatgctatttgtctctagcctagctacaggcgcataggtttcactgaaatccaaaccttcgacttgtgaatatcccttggccacaagtcggactctgttccttgtcaccacaccatgctcatcttgcttgttgcggaatacccaattggttcctacaacattttggttaggacgtggaactagatgtcatacctcattcctcgtgaagttngtgagctcctcttgcattgccaacacccaattcgaatctcttaatgcatcctctaccctatatggctcaatagaggaaacaaaagagtaatgttcacaaaagtgagcgactcgagatcgagtggttacccncttatgaatatcaccgaggatggagttcacggggtgatctctttgaatcgcttggtggactcttgagtgtggcggtctttgaccctgttcttcttgatcatcttcctt

SEQ ID NO: 42528 - DNA, 297 bp, Zea mays
  unsure (1)..(297): unsure at all n locations
agcttgagaaaatatanacatggtccgaaagattgaagcttccttcgaaggggtttctgtcaaaaatattcctcgaggagaaaatgaacatgctgatttgctagccaagtcagcagcacaagggctgcccttaccttcggaagtatttttcgaaacaataaaagcaccttcggttgaacttcttgaaagagcagtcctcaatatatcttctgtttatagtgaagactggagaactgagataatctctttccttcatggtaactttctttcagatgacgaagcttataacaagagaat

SEQ ID NO: 42529 - DNA, 465 bp, Zea mays
  unsure (1)..(465): unsure at all n locations
tacttcattgcgcttccattgttctacgccgaagcttattcatattatccgtgtttntgaggaccttcgtaagacgaaggcccccaacggttggggtgctattcttgaattatgtcatggccgaaaattagtgtacctacatattctcctaaggatagtaatagagaatggcagatcgagtggtttactatggagaatcatgagaacttctgccagtttagtcaggaagacgccccaacacaaaactacctagttgggaagaggcaccaactgatcaagagaccaccgaagctgttgctcttctcgctgaaattgagtctgaaagaaaatggctaacgactcaagctgatgtgattgacgtttgttttgcaatattcaacctgtgaggagccaagtttatctagccttcttgtatgttggagctaaagatcccaatgtgagtttgagtcattactaagcaagaat

SEQ ID NO: 42530 - DNA, 427 bp, Zea mays
agcttcggtaaactactacttcgctcttctctatgtctgggaatgtgttatctccaccagccctgcgaatagacatgttccgaaagtaccttcctctcatgttctcaaggtgactatattttatggtcgatttctcgaagattgaatgacttggccgccaaagccgatcctcacaatcttcatccccactgttcacattatagctatcgctgtcaccagtatcttcagataaaccttgcactatctctatagtaattttctctgtgtttgtttatgccatcgactcaacaaattcagcaacataaggatctacaaccttcttcttctcatacatcttcacctcttcaagcagcttcctcttcgccataaccttcttttcctatgacactatttatccagacatgtggaaaacgtcgttttaaaccat

SEQ ID NO: 42531 - DNA, 429 bp, Zea mays
  unsure (1)..(429): unsure at all n locations
aactcttagagaaattcagatttctgaattacagaccttattccacagatcatctgcgttctctgcttttcgaaactcaaagccaggagatccaaatatcaaattcgtgccatattcccttgaacacatcctggataagtttgaactcaaaccaaattcatttggcatggttttggcgcagcttgacctcgggaccaggcattctgacactggcaccttggtgatgctacaactccctgtccctagcctagaaccgcgtgacgtncatacacaaaagacatagcttggtcaggtgaacaaatccttcacagcgatcttgcccatattcgcgaagatttgctcccaatcggcgcttgaacaggggcagaggcaacgggaacactgtgtcgaccgtggctgacacccccgggtacgcccgttcggcaccac

SEQ ID NO: 42532 - DNA, 411 bp, Zea mays
  unsure (1)..(411): unsure at all n locations
agcttaatttgaattcagatcttanacaatttataagactataataaataaaacatttaaaattgtaaaaacctcaaaaagataaaatggtttaaatgctgggcaagatcatataaaaattaatattgatgatacaaaatattattaaaataattgcatattatatatactccaatctacttcaaacatatggattgaggtgaatacgagagtatctaataaggcctaattgattntacagctagattaagtgatggaatgtacgtgaccgaatgtatgtgttactcccccgttcaaaacaaatataactctaccattcaaattgcgtcaaanaatgcacacacatagagcanaggcacaaggtcaactcgtgggactcgtgcgtttgtttcgagagtcaactggaatgga

SEQ ID NO: 42533 - DNA, 455 bp, Zea mays
  unsure (1)..(455): unsure at all n locations
ttaaccctcgcgagacctttccccgcctctttctaaccatggttaattcatcatcgtatgtgacattctatgcatatttactttatttgctctcttgtatggtgtactgtttggttcctgatttgaatggatggatgcatgtatgcttgcaatcgcatagagaacgatccggttgaagagcccgaggaactctcacgagaagcccctgagcaccagtcggttggtggaggcaagtgtcctttgacctatctctgttctattcattctttaatccacctcccgcggtacacatttatactcaaggattgactagctnttgntatccattaccttgtttacctatttgggttggattattattgtttagctttatgctattgctcaactataatcaatgaacatgatgagattatctatgataccgctgtttccttcttcttattatgatgttatac

SEQ ID NO: 42534 - DNA, 375 bp, Zea mays
gagcgtgcaagctagctccagactgcggcgcaccggacattgttcgatgcccacactcgcacgccccacaaactgccactctcgggaaaaacgaagtgctccgtggctaaaattcatcggactgtccggtgtgcaccggactgtccggagagcctagggccaacattcatcttcaccaacggtcgactgctacccgatcagaaaggacagaagggcagaagcgattagagaaagtctgtctcaccagactgtccgatgtgtcaccagactgtccggtgcgccacaaaggcagactaattcaacagtcgactcctacacgcgactgatgtggcacgcaccggacaataaacagtgcagttgccggtgcgcaccgga

SEQ ID NO: 42535 - DNA, 476 bp, Zea mays
acactatagaatagctcagcttcggggcagcagcacagttcttttcggccgttttctcctatgtgcagatgcgccacgggcttcatgggaagggttggagatcagccaacacaaatatactgtctattctgtggtgaagacaaaggccataccaccacgatgtgtcacgttaccatccataagcagaaggagatatgcagaagcagcatcgcaacaaagtcagccgaagcaggtcatgcatactgcttcgtatcattcgccctatattccagaatatgtaggcaaccaccctgcagcttctgttgcttcggcaagccaaccccaagcatcttgtgagcagcctccaccgccaccaccaacacaaagaggtcagcagccataacggagtcaacgcgtcaacctttagctggacttcatggaggagtctgaagctcgcacagtcaatagcacttgtgccaagtcgaagcacatttact

SEQ ID NO: 42536 - DNA, 343 bp, Zea mays
  unsure (1)..(343): unsure at all n locations
agcttggaggcgtctataggttgtcgacttgtatanactcctccttcttttcttccgtcgccgtgaatgcgacgggttgagcctcggatgtagatggatcatcaagctcgttgatcttcctcgagccttcgatcatgcactcaaaacttacaaaatgcccgattactttctcgggggtcattntagtatatctaggattaccacgaattaattgtacttgagtagggttaaggaaaataagagatcttagaataaccttaaccatttcatggtcatcccactttacgctcccgaggttacacactttggtcaccaaagtcttgagccggttggacatatggtg

SEQ ID NO: 42537 - DNA, 444 bp, Zea mays
ctcagcttctgagggagagcacatcttgggactaacaaatggttcatttgagaaagacaggatttggagcgcatgccaagcaggaaagcaagttgggtctcatcatccacacaagaacatcatgactagtgacaggccactggagctcctacacatggacctattcggcccgatcgcttacataagcatcggcgggagtaagtactgtctagttgttgtggatgattattctcgcttcacttgggtgttctttttgcaggaaaaatcccatacccaagagaccttaaagggattcttgagacgggctcaaaatgagttcggcttaaggatcaagaaaattagaagcgacaacgggacggagttcaagaactctcaaatcgaaagttccttgaggaagagggcatcaagcatgagttctcttctcctacactccacaacaaaatg

SEQ ID NO: 42538 - DNA, 389 bp, Zea mays
  unsure (1)..(389): unsure at all n locations
agctntcatctttcttcttcacaaacagtgctggacatcctcaaagcaaagtgctcgggcgaatgaaacccttatccagcaattcttgcaactgcttcttcaactctgccaactcagcgggtggcattcggtagggcctcttggaaattgggaccgttcccggttgcaactcaatggcgaattcaatatcccggtccggtggcattcctggcaattcctcaagaaagacatctgcatactcacagaccactatgatcttcttcaggggtaactccgtcatagagaaagcacatgactgagaagaaccctgactatgcagaattaaagtgaaattcccgcagaatggagaattaactttcacggtacggctggctacatcaagcacaact

SEQ ID NO: 42539 - DNA, 437 bp, Zea mays
  unsure (1)..(437): unsure at all n locations
actcagcttatgaagatggtcgcggagggtagctcggcgaagctccgacatgcatatgctcgcagcggcggctctggcttacctacatctgcacgatcgcagtgggcacgatgagaccgggcacgttcaggtgggcgacaaactgtattgtggcgaggcagggtccgttttcgattatttcggggcatcgtgggcacagctcatggtggccgttgcgggaacattgtaatggggaagatgcacagggagtcgctcctcaccagctgacaggtgggccaggcgacacacgtgcggctgggaacgcggcgcggttgcgcgtgtatggcgaancgagcgccggggctgggctggccacgacgcacagctgggctgacgcggnggaaaagcgcagcgcaaggggtgggccaaggcangcagttgggtcgggaggggggagt

SEQ ID NO: 42540 - DNA, 418 bp, Zea mays
  unsure (1)..(418): unsure at all n locations
agcttgttatgaccaacataacctanagtttattctgtttgctatactgagttagaagatcagattacctatagcacaaatgtcatgtgattctgactattttaggaccaacaaaccatttggaagccaaacaaatccatgttcaatttgcctctnagcaacatataagaaattacataatcagcttctgaatatgtgcactgctcttggaatacattctaagagttttgaaaagccttttcttgagtgcatttctgaatttgatggtacataaggtgttaaatatatacaacaatctgatattctagactacctgaagcatgtagaatcaagggttgcagaacattgtcggggaccataattaggggtaccctcaagacgtctaattctcagctggtaacccccatcagcataaagc

SEQ ID NO: 42541 - DNA, 393 bp, Zea mays
tgacatacagtgttatcagaggtcttcaccataagacagtgacaggaaaccttacggcttagtgcatctgccacaacattggctttgcctgggtgataatgaatttctagttcatagtccttaataagctcaagccatcgcctttgtctcatattcaattctgactgggtgaagatatacttcaagcttttatgatctgtatagatatgacagacatttcccagcagatagtgacaccaaattttcagggcatgaaccacagcagctagctccagatcatgagttgggtaatgctcctcatgtcggcgcaactgcctttgagcatatgcaattactcggccttcttgcattagcacacagccgagtccacttgctggtgcatcacaatataca

SEQ ID NO: 42542 - DNA, 372 bp, Zea mays
agcttgcagcattagaaaagagtatagaattcttccatattactgaacagatgaacatcttcactgatttccaacataggcaaacacaacttctcagataaactggaaagtggaataaaaaggcttcccaactagatagctaacttcattaacatctaacaagtaaactaaggtgtaagggatgcccacactctggtgacagtcattacaaagatccaaatccaacatagttcatcatgacaaacatgaaagcccaggataagcaaactaccctgtctaactaagactaactaaaagtaagaccgagacttagactaagactaagacttctattttaagcatttattataagaaccaccactgacactctat

SEQ ID NO: 42543 - DNA, 464 bp, Zea mays
  unsure (1)..(464): unsure at all n locations
tacacaagaaggtcaaggctaaatcgntccaggtaggggacctgttatggaagaccgtcctgcctctaatgagcanagaccggaagtttgggaagtggtcgccaagctgggaaggcccttacaaagtcacacaggtgatgtctggtaacgcctacttgttgcaaacattacaaggcaaagatttgcctaaggcgttaacgggcgtttcctcaagcagtaccatcctagtatgtggcaaaatgcctatgaaaaccaatgtgatcacatcgagttagttgctttcggttcgctcagctctgctaaaaggcagggggcatatgttggatggcaaaatgttcctgtggacagttcggccccgaggccagacggtcttgactggtggtgcgaacggtccgcgcacgcgcagagtcagatatggttccgagtttcttgctacagtctgtggctagattcatgtgaataac

SEQ ID NO: 42544 - DNA, 422 bp, Zea mays
  unsure (1)..(422): unsure at all n locations
agctagaggctgtgtatagattaccgccctcttaatgcggtaactatcaagaacaagtatcctttgcctcgtattgatgttctttttgaccagttggtcggggccaaggtattttccaagatagaccttcgctctggctaccatcagatcaagatacgagcaagtgatattctgaagacggcattctcaaccagatatgggctatatgaattcttggtgatgtcattcgggctgacaaatgcaccagtatatttcatgtatctgatgaattctattttcatgccggaattggacaagttcgtagtggttttcattgatgatattntggtgtactcaaagaacgaagaagaacatgtcgggcatttgcatgtagtgcttcaacgtctgcgagagcaccacctttatgcaagttatcaagtgtg

SEQ ID NO: 42545 - DNA, 463 bp, Zea mays
  unsure (1)..(463): unsure at all n locations
tgntgatataggaatcgaggtgtattcacaatgactaggccaatgcntttgacacactcaatgatgaccactaggttttatcttcataattcatgttcattactcatgtgctgatttgaactgcctactgccaatactagctgctccggattatatttatcatcaactaatgtagcaagtaggccacagtatacataaaattatcacctacatatattaacacaaccatatgttttatgtagaccatggattcggagaacgcaaagctccgaagagcactggctcatttaatcagagtagtggagcagcgttgtgccgacatcgtcgatgtcgtccacggtgccttccaaccagttagcggaccagtcctcaatgaaatgaatcgtgctntagttcagatcgaggacctcgccaaggaccttgatcacctagctctggataaagactgggagatggagcacat

SEQ ID NO: 42546 - DNA, 449 bp, Zea mays
agcttcggcgactcaaggcggaaccaatcgtgccgtcaatttgagctgtgtaccaccggaagtcgagtaatcgctcgccggagcaaggagcaccactgtcgtccgcctccttccgtggacagaccacaccataacgctttcatcagtgagtccttaaccattctattctcctcgttctactcaacgtgttgaaccagtcgcccattgagtttggcctccctggcgtctatcgcgcgagtcatcggagagcgccgccgcgtggagtactcgcgccgccgtgacctgactggatgtagacgaagagctcgggtccattggattcgggcggagcgggtgtaaatagatccagaataccggttcgacgtaatcgactcagggcgctgatatgcgatagaacggctcggatcactctcgcgtaacaatcaatgtggaccactggttaacgatct

SEQ ID NO: 42547 - DNA, 491 bp, Zea mays
  unsure (1)..(491): unsure at all n locations
ggactctcgaaatcaaacgaagctccagcccgaagcctacttcgtcagaagaataacgcttcggaagaaaagtatttagttcccaaaaaatccagaattaaatggctagagtgcgttctaccgctagggttgagcgtgagggaggcgaagctgaaggatcgaagactgttcccatctccgaagcgatgcaacgatccggactggtaatctcggaagaaatccccactgttgaaacagaacaggtaactgccgaagcggaagaaggagacattgaggaaactgattccgaagatgattatcatattgccatgccaagtaagcccagccacttggacttcggaaagtcgactgtctctaaggctgatctctccaagatggtgaagtcgggttatttcaatgagagtcagaagaagctacttcgcttcggcggggaagaaactaccccgaagccggagaaggatganatagtcatcttcaagaagctttctaag

SEQ ID NO: 42548 - DNA, 317 bp, Zea mays
  unsure (1)..(317): unsure at all n locations
agctnttatagggagagcacagttgtatgtacttcttatggtcantttgagaaagacaggatttgtagtgcatgtcaagcagggaagcaggttggagctcatcatccacacaagaacatcatgacgaccgacaggtcgcttgagctactccacatggatctattcgacccgatctcttacataagcatcgacataagtaatattgtcttgttattggggatgaatattctcgcttcacttgggtattctttttgcaagataaatctcaaacccaagagaccttacagagattcttgagacaagctcataatgagttc

SEQ ID NO: 42549 - DNA, 477 bp, Zea mays
tctcgcatgatagattgtgtatgttgcagaaatcttttgtttcatgttccagaccttggcttctcacggcccacatgaagatattcagccttatgattgcttcggcggtaagatggtgaagatagacttcatatattttcagcacctctacgacaaagttgctcaggggaagtcgaagtccagctttcaaaaagcttcggtacactacgacttcattttctttatggttcggacaagtcttttctccttcgtcggccctcacaacggacaagtcccggaaatatcttcctctcatgttgacaagatgattttctttgatacttgatctgccgaaaaccgcatggcttggtcgccaagggcgatcttcggagtcttcaccaccactatccacatcataactgtcgctgtcatcagtatcttcagacaaaccttctaaaatctctttggtgattgttctgtattgtcttcacattgtat

SEQ ID NO: 42550 - DNA, 472 bp, Zea mays
  unsure (1)..(472): unsure at all n locations
agcttcccctgcacgccgatgctatgtctatctcggatgtcagggttcaagaagattgctccagcagcaaacattagtggctccagtactatatccattgagttcctgggcccacatgtcggggctcagttcccttgtacatgccccccttagctataaaaggggaggcatgcaacgttgacagggggcgctcaaacccaacatagactctcagctctcaagcttccacagcaatccaacatagagtggagtatggtattacgctccggcggtccgaaccactctaaactcgtctcacgtgttcatgtgctcgatgatctgttaccaggactggaaaaacgtttaaaggccctttctcatcnttggattaaaggtgggtgcactccgccactcggccggagaaatcctcttcgacttaattatagggattttagaatataatataatagatcatttttagctatactcaaaa

SEQ ID NO: 42551 - DNA, 475 bp, Zea mays
  unsure (1)..(475): unsure at all n locations
actcaagctgttccaactgcggntattgcaccgcgaagaagtttgagtattatccacctcgcgtttgttgtcgtggtgggaaggttgagctagctccactggagacccctccccaactcaagaggttgtgggatagtgcagactctgatgctaagcactttcgtgataacattaggtttttcaatggccatttctctttcacttccctataatgttgcctcgatagtatgacaactaatgtaagggattntggtatatacacgtttcgagcacagggcatgatgtaccacaatatcaagtcatttggtagggaaggtggggcacaacatatacaccttgagctttacttttatgatgacgatcccagtctcgagcatcggtaccgtaagtgccgtgaagagcatcaacaganagacaaggaggttatcaaacagatagtcgacatactacatggaaacccgtactccgagcacct

SEQ ID NO: 42552 - DNA, 435 bp, Zea mays
aagctttggattgaatcagtaggtgcatgcaatttatatactttcatctagagcaaaacaaggagctcttccaaactacataaagcaggattacaatcagcatttgcttcaccactggcaaacaagaattccacaagtaatttcggcaaggaacatctatgcatgttctattagcctttatagcatattcatgtaacactctctagcatcttctcatttatcgtgcatgacccttatagtgttactgagcaatttttcccattccttaaatggagttaatctataaggcctgtttgtttcgttggaattgaattccattctaataatcataatttagacataaaataatcaaggtcatatagttggatatgcacattacttttctattaatctcaaacatatgagagagatagttatacactacacctatgttat

SEQ ID NO: 42553 - DNA, 318 bp, Zea mays
  unsure (1)..(318): unsure at all n locations
aatgatcactggtcntattccttctcacaagtcacatgcttagagagtgtgatctcaagaccatcgcgctccgtccttctcatatatcccatacttacatgccttagccctatcttatactcttctattctatagacgtacggacatatcattggatgtgacacccactcacccacctgctaactaatatgtcaatatagggctatcgttttgactccctcacgtagcacacattgtgttgccctcttgctgcttgggacattgtgactatgcttcgcgcataaccgcaacatcaaaaaattgctactacagttcata

SEQ ID NO: 42554 - DNA, 270 bp, Zea mays
  unsure (1)..(270): unsure at all n locations
agcttatgaagatactgcatcccaacatgggcttgtttgcggngccagagccaacccaagctagtcttagcaattaagcatgtgtcaaggtcagctctatcaaaatctactaagtatagctgaccctttaacacacccttaaatgctattgaaacatcactacttctaaagacagtgacacctgtatcagtaaaaagacagttgtagcccatntgacataattgggaaacagaaagcaaggtgtaatctatagaatctacagaataaaca

SEQ ID NO: 42555 - DNA, 311 bp, Zea mays
cgactcggacactgcttatcgcattctccgggatgacgactacgtcttatcttcatatttcatgttcattagtgagcgcgctgaatagtactgccgaccgtctatactatgtgctccggagtatattcatgatccactcatgtgaactagtacggcactgtatacgtcggattattcgctacctatgagatcacacgcatgtgcacgatgaccaacatagatccggcaacatcaaagactatatgagccctgactcgatcgacaaaaaccccggaacatcgctcgaccgacataccgaacgacctccacgg

SEQ ID NO: 42556 - DNA, 440 bp, Zea mays
  unsure (1)..(440): unsure at all n locations
agcttatgttgatgatgtggtgattatgacataatactcagaanacttcattgaagatctgcagctggtcttcaacagcccgaggcggtaccggtggaagctctatccagaaaaatgtgtctttggagtgccagcagggaagttgctcggattcattgtcagccaccgaggaattgaagctaacccggagaaaatcgagggtatcatgaggatggaagcaccacgatcacaaaagaaagtgcaaaggcttactggatgcatggcagctttaagcaggctcatatcaagggtaggagaaaaaggcttaccattctacaaattgctcaagaaagtggacaagttccagtggacctcanaagctcaagaagctcttgatgcactgaagaagttcttgaccacgccaccagtgctaaagccgccacgtcgagccatgccagatc

SEQ ID NO: 42557 - DNA, 371 bp, Zea mays
agtattttatccagcggctaggttaagatattggcttattggctgtgggtgctgacataagcaattttgatatccccttttgttggtgagctttcaaaaagtgataccggatgtctatatgcttagtgcggctgtgttcaacgagattatacggcatgtggattgcactctcattatcacataggagagggactctgcccaaattgtagccatagtccctaagggcttgcctcatccgaagcgattatgagcaacaatgtactgcaggaatatactcgccttcgacagtggatagagctactgagttctatttctttgacgcccaagacacgacggatcttcctagagattgacacgaccctgatgtgctc

SEQ ID NO: 42558 - DNA, 370 bp, Zea mays
  unsure (1)..(370): unsure at all n locations
agcttgaagaaagcctttcagtcttgtctttgttgatcctgctgatagcctcacgtacaacagcataaaggtatagaggttaattttgaagctataaaatgaagtatcttattaccatgctcaactctttcttcttctttgcaggacttaattcttagtaatgcctcgaaggctcacaagagcgccgaagacgaaagctgtacaatggctcttaacaaccttcgctctgaggtgattgaactgagaaacgaatgtctggacaaagacaaaatattgatttcattgatgaacaaagtaaaggaggacgaagcttattactaagctcagatctgagcccagaanaccgaattcgaagacattctgagacaac

SEQ ID NO: 42559 - DNA, 454 bp, Zea mays
  unsure (1)..(454): unsure at all n locations
ctctcgaacacccatntactcccaatgggcttaaactcattatgacgctcaacgagctcccaagttgcatcaggagaggaatattcctcttcaatggtacttggtgtgtcatccacaagatatacaatgtaatcatcaccaaagaactttgtagtccttggttttctactctatcgagatgttacattgtcatcttctataggattttgtatatgcgattcttcagtgtgctctactgaaataaaatgctcatggggtatccgtggttcattattagacacatcatgtgtcaatttcataggaaatttggcctcaaaaatgagcatctctggactcataattgaccaacaacatgtccggacttcagagttaaattaaaacctatatcatctatggaagcatactatgaaaacacataacagtttggcctatttttttctgtaatggacatcct

SEQ ID NO: 42560 - DNA, 418 bp, Zea mays
  unsure (1)..(418): unsure at all n locations
agcttgtgaaggttcttcatcctcacatgtgctaagcggcgatgtcacagccagcccatgctagtcttagcaattaagcatgcatctagaccggcctcctcttttgcaaaatcaactaaataaagtttgtcgtctaatacacccttaaaagctagtgaaccatcacttcttctaaagatagacacatctacatttgtaaatagacaattatatcccatattgcataattgactaacagataacaaattatatccaagagactcaactaanaacacattagagatagagtgctcattagatattgcaattttacctaacccttntaccttgccttgatttccatcaccgaatattattgaatcttgggaatcttattcttgacgtaggaggtgaacatcttcttcttccccggcatatg

SEQ ID NO: 42561 - DNA, 454 bp, Zea mays
tactcagctcgcaggagactcgatgatgatgcggagcaatgcgagcaacgctcgaaagcgaggtcacgacgaccgtgacatcgctgctgttcatgacatatagcttcactcgggcatttcatcgaacgcccgtgaagcgccaacgatgtggggctgcggtggaaagctcggctgcgaggagctgcgctgtatagggttgggcatgcttcagccgaagtggagggagggggtggtgctgtccaatgggggagccgaggagggagacacatatggaggggctcacggcatggggacagggaggggtgcctgctcgctgtacttggagatgaaaggcgccgtggggagcttctacaggggatttcggccatggacagagaggggcgagcttgataggggcgttcatgtgtgaaacccaagctgctgctgcgccatggacatggagcacgccgagatc

SEQ ID NO: 42562 - DNA, 499 bp, Zea mays
  unsure (1)..(499): unsure at all n locations
ctaagcntggatacagctgacaatcttgtagcctctgaaggactttcctcanatgttcctcatgctcttgctcattctgggaatatacgagaatatcatcaatgaacactactacgaacttgtcgaggtagtccatgaacacactattcatcacgtacatgaagtaagctggcgcatttgtcaatctgaatgacataaccatgaactcatatagtccatacttggtgatgaatgtggtcttcgatatgtctgaaggtcggattctgagctgatggtaacctgacctcagatctatctttgagaacacactagctcctctcaactgatcaaataaatcttcaattcgaggcatggggtacttgttctcgatggtgacttcattcanagctctgtaatcaatgcacatcctcttcgtgccatccttcttctccacaaataatactggngcttgccaatgtgaggtacttggtctgaagtaagccttctctaagaactcatc

SEQ ID NO: 42563 - DNA, 441 bp, Zea mays
agcttagcgtagcgctagacacacgcacatgggtggtgtatttaggacacacgcatgcgctaggcgtgtatcaatctgcatgcgcaaccacaacgccatataaagatttgctattgctcagcaacaaccgccggtaccaacacacatgcacacaggctcaagcacaagccgagcgtacgggtaaagaacacctggccgccggcgctgggaggccggcagctaccacgcaggctcaagcacaagcccgaccatggatgacggtcttcatatataagcaacaaaccgccagcactaacacacatgcatgcagcaggaaaattaattgttaaagtcaagcaaatcataatacattagtatacacatgcattctggaatttttaaaactcaaatagatcgaactaacttctagtggtattgaaggtcggtatagaatttgatggc

SEQ ID NO: 42564 - DNA, 466 bp, Zea mays
  unsure (1)..(466): unsure at all n locations
tgtgaaggttcttcatccncacatgtgctaagcggcgatgcctcagcttgtccatgctaggcttagctattaagcatgcatctagaccggcctcttcttttgcaaaatcaactaaatacagtttgccgtctaatacacccttaaaagctagtgaaccatcacttcttctaaagacagacacatctacattagtaaatagacagttataccccatattgcataattgactaacagatagtaaattatatcctagagactctactaaaaacacattagaaattgagtgctcattagaaattgcaattttacctaaccctcttaccttgccttgattcccatcaccgaatatgattgaatcttgggaatccttattcttgacgtaggaggtgaacatcttcttttcccccgtcatatgggttgtgcatccgctgtcaataatccagcttgaacccccggatgcataaac

SEQ ID NO: 42565 - DNA, 506 bp, Zea mays
actaagcttctgtagttgctgccaaaaatgagaggtgaactgcgctcctctatcggacactatcttcttcggcacaccatgaaggcagactatccgtgacatgtataactcagctaacgttgccccggtgtatgttggcttcacgggtatgaaatgggccacctttgttaagcggtccacaaccacccagatggtatcataaccggcccgggtacgaggtatgccaactataaaatccatcccgatctcatcccacttccactgaggaatccgcaatggctgcaataatccggcaggcctctgatgctctgctttggttctctgacagctatcacagatggcgacatattctgcgatctctcttttcataccataccaccaaaacctgctttttaaatcctggtacatcttctcgcttaccgggtgtatcgagtaagctgtctcatgagcttccttgatgaatagtcccgaatagggttgacgtcgggaacacactatctgtcctt

SEQ ID NO: 42566 - DNA, 419 bp, Zea mays
  unsure (1)..(419): unsure at all n locations
agctngaagcaatggtaagtagcataggccaataatatacgaattgactcaagcctggctacgggtgcataggtttcaccaaaatccaaaccttcgacttgtgaataccctttggccacgagtcgagctttgttccttgtcaccacaccatgctcgtcttgcttgttgcggaagacccacttggttcctacaacattttggttaggacgtggaactaaacgccatacctcgttcctagtgaagttgttgagctcctcttgcatcgccatcacccaatccgaatcttggagtgcttcctctaccctgtgtggctcaatagaggaaacaaaagagtaatgctcacaaaaatgtgcaacccgagatcgagtggttacctccttatgaatgtcgncgaggatggtgtcgacggggtgatctcg

SEQ ID NO: 42567 - DNA, 395 bp, Zea mays
  unsure (1)..(395): unsure at all n locations
ntctcgactgagtcggggacagggcctcatggacgggtgaaagtactcgtaagcggcaaggctgaccgagccgagggattcccacgcctctgggatacggatacctcgctcgtcccttccgcgaaaaacaactctcgctcacacaaacatccctgttaccgacagagtccagatgctcgaaacaagaggaaaaaaggcgcagcttcgcaagcgcggcgagggtgtgttttttctggcctcggcggccgcagaaagcacacgctacaagatgatctgatcctgcaggctcgggtcttcacgctgaagggagccatagcaccctcggcatcgacgacgtcttcagcaaagtccgacccagcctcgggcggcgacgcgatccagggactccttcggga

SEQ ID NO: 42568 - DNA, 342 bp, Zea mays
ccaagcgactgagctgcagctgtcatatcatataacctgacccctcttattttataataaatattgctacatttgacagggataaacctgtacatcatagtcatagagttccttacctaaagaaatttacaacaccgttgtaagtagccaaagctatttcccgtacaccatccttgtcaatgtcatacagaagaggacttgaatgaacatttgactgatgaaatgcaggccatcctgaacagtgtataacaaatatatattaacaggaacaatacccacaaccaatttattttagcatgtcctaaaagttcaagagaaatctcctaaaacttttccaggagc

SEQ ID NO: 42569 - DNA, 306 bp, Zea mays
  unsure (1)..(306): unsure at all n locations
tctctatctctgggttaaatcttctcgatacttntctgacataaaattatttcaatgcttcatgagaccactcacggattccattttattgtcaatttcatttactttctcttggtaccttctttcttcctccgtttgaataacaaacggtaaaccttgaaaagcttgtacttgactccagtacttatcatcatagtacccacgtgctttgaaatccttggcaacaatatcattgaacacttcattataatctttagatgaaagacgattaccatcggtgttccctcgcctttnnttaaattcctc

SEQ ID NO: 42570 - DNA, 413 bp, Zea mays
  unsure (1)..(413): unsure at all n locations
ggcacgagcggnggccaatctcgcccgccagcgcggctatgttattgatacgaagctcggcagcctgcgcgaccgtctggacaagatggaggcctcgacacgcgcgaaggttgagcggacgcatatgcagctggtggacacgtacggagagctgggtgcgcggaccgctcccttctaagcgcccggtcaggaggtgggcctccgcttccttgggtggctacaggaggagctagaggtgctcccgaccattatgatgggctcatgtccttcgcctccctcatcacctgcgagggggccgtgatgaatgccttgtcccacgagggatgaaggcacttcgaggtcttcgaccagttggacgaaggcttctagcgcggaatcttccaaatcaaggacccggtgatgaagcggtcggt

SEQ ID NO: 42571 - DNA, 453 bp, Zea mays
  unsure (1)..(453): unsure at all n locations
caagctttgctcatctcccggcagacagagatcttcttgctgtctgggagacaatacaagaagtcttcttctccgctgccattgaatatcaacgccccttttggatatttcagtctttgggcataatattgagcttctcgcttttcttctgcagataacctttttctcgaagcatgtcgtacaatataatcgagagcttcggaagatgcttcgggtgtgggagtggcagtttgttcaaacagaagttgttctgaagcttctctttccatttctttatctccaatttccagggatttctttttggcgggctctgaaggcccagcttcgggtttggcatgcctctttgcaacttcgacttcagtttgctttgtttaatttgcattnttgaagcttcgactgttttccctggagtagagcttgaagtctttatntcttccagtacatctagtatgt

SEQ ID NO: 42572 - DNA, 482 bp, Zea mays
  unsure (1)..(482): unsure at all n locations
ctcagcttctaagggtgaacacatgntaggactaaccaacgttcatgttgagaaagacaggattagtagcgcatgtcaggcacgaaagcaagttggagcccatcatccacacaagaacatcatgacgaccgacaggccgcttgagctactccacatggatctattcggcccgattgcttacataagcatcggcgggagtaagtattgtcttgctattgtggatgattattctcgcttcactcgggtattcgttgtacaggagaaatctcaaacccaagagaccttatagggattcttgagacgagctcataatgagttcggcttatggatcaagataataagaagcgacaacgggacggagttcaagaactctcacattgaaggctttcttgaggaggagggcatcaagcatgagttctgcttccctacacgccacaacaaaatggtgtagtggagaggaagaatcanactctattggacat

SEQ ID NO: 42573 - DNA, 414 bp, Zea mays
  unsure (1)..(414): unsure at all n locations
agctntacgaanaggaaccttcggctatcttatacagacagcttcatccgaggatcgcttctctctataagaccttcggcgacgaagcatggacccaacaatattgatcccactctagaataacaaccatgatctaatccaaatttgagttacttaaataagttagataatgttggcgacaaaaattaggccctatctaatctattatgatttaaccttgtgggtgattcttaatgctggtacaaaggataaaaccgtactcctaattcacttaagcctaagttagtgccatagatcaactcagccatacactcccaataagttacataatccatctatgtaaacctaanaaaaagttctatccacagaccctagccatcttaactacaactccgtagctcagatggagatacc

SEQ ID NO: 42574 - DNA, 410 bp, Zea mays
  unsure (1)..(410): unsure at all n locations
atttcttccacaaggttcttgaatgtgtcaacaatcccgcgaagcctgttgcccatcctaatatggaatgcancacggctgtgggtagggaagaagtttaccctggccataatgccaagcttggtgatgtgcccattcttcttggctcgacggtggagcgcctcatactcgaagtcatcgaagacctcgttcgcctcgtacgctgccgtcttgagctgttcaagccatttctccacgccgcggagaggcgtctgcctctcggcgtcaccgatgacttcgaggatggcatgcagccagcgcatgagggtcttgtggtgcttctccatgcnctccatcaccttgtactggtcgaggagagagctggacaccttatccttcaacagggacaccagtggtgtgaccaccaggct

SEQ ID NO: 42575 - DNA, 394 bp, Zea mays
agcttctaaagggagaacacgtgatatgtctatctaatgttactttcgaaaaagatagaccttgtgcagcttgtcaagcagggaaacaggtgggaagctctcatcatgccaaaaatgtgatgacaacatcaagacccctggagttacttcatatggacctcttcggacccgccgcctatctgagcataggaggaagtaagtatggtcttgttatagttgatgattttttccgcttcacttgggtattctttttgcaagataaatctgacacccaaaggaccctcaagcgctctctaaagagagctcataacgagtttgagctcaaggtgaagaatataagaatcgacaatgggtccgagtcaagaaccttaagtggaagagtatcttgaggaga

SEQ ID NO: 42576 - DNA, 357 bp, Zea mays
  unsure (1)..(357): unsure at all n locations
actaagcttcatatatctctgggtacctgcagaactgattaagttcattctggtacccatctcatgatagagccatcanagttagccaattatgacttacgaactcaaatagccttggtcctagaatgtggtgaactcattacctttctagtacaatagtccaatttgggtatcctaagcatatctgaatgtattgacgagctaggcttatgaggtttacaccttggacaaactctgaatagatgacctgtttcatggcaattgtaacaaatgcgatgcttgtccttgcaatgcattcgccttttgctgttatactttttgatgggcatctttcttgatcgtgcaaggtctcgattc

SEQ ID NO: 42577 - DNA, 414 bp, Zea mays
ctcagccccgagacctctgagtcacctgccgcatgcaagcttctcagggagaacacatgttgggactatcacatggtcactgtcgagagagacagggcttgtagcgcatgtccagctggaaagcaaggtggcacccatgatgcacacaagaacacattgactacagataggccactggaactactccacatggatctattcggcccgatagcttacataagcatcggcgggagtaagtactgtctattaagtatggataactattctcgctacacttgggtattctttttgcaggacaaaccacaaaacccaaatacctctcagggattcttgagacgagctcaaaatgagtttggattaatgatcaataagataagaagcgactatgggacggagttcatgaactcacaaatc

SEQ ID NO: 42578 - DNA, 489 bp, Zea mays
  unsure (1)..(489): unsure at all n locations
ntnagggtaatcttcacctacaaggaagattatgaatggtcattgcaaaggtatggaacaaattccttcaattggtagttgatcaatagtagttccttccaagaggcattctttcaattggtaataatatattctatggaaaggaatgtcaatatgaacgttaaattccttttggcttagatttgtaaattaatgcatattgtgaattcactgctccatgtgcattaacttaaaaggaatttaatttatgcctttacgcctcataaatgatgatttgtttgccattcatatatagatatcatcattcattaaatacttccttgtactactaatacctcttttcaaagtgttctatcgactagttttaaaaggaaaagagataacagagaaggatatctccacacatgatgaacagaagaatactaaggtgacaccaccatagatagtaagatctgtcacattggtataataaatggtacattctatatg

SEQ ID NO: 42579 - DNA, 288 bp, Zea mays
  unsure (1)..(288): unsure at all n locations
agccatcaagaggagaacgcngatttgtctatctacagctactctcgaataagatacacctagtgcagctagtcaagcaaggatactagtgggaagctctcatcatgcccaatatgtgatgacaacatcaagaccccggcgactacttaatatggacctcctcgacccgtggcctatctccgcataggaggaaggaagtataggcctgttatcgcgagaagattcttcccgcgacactcgcgtataacttgtgcaggagatatatgaaacccaacagactctcaagct

SEQ ID NO: 42580 - DNA, 422 bp, Zea mays
  unsure (1)..(422): unsure at all n locations
agctagagtcgattcttctgcanagaattattgttgctcaaatgaatgataaatgtataaaacatattcatgagaaaatagaagccggcaaagctaattgcttcagaaaggatgatcaaggcatcatatggtttaataatcgcatagttgtgcctaaaaatgatgaagtccgccagcaaattttggatgaagctcatcttactcgatattccattcatcccggaagcactaagatgtatcaagatttgaagcaacattattggtggacaaaaatgaagattgaaattgcacgctatgcggcgagatgtgacacctgtagacgtgtcaatgcaatacatatgaagactgctggtccattgcaatctttgcccatcccaacttggaaatgggaggacattagcatggactttattatgggatta

SEQ ID NO: 42581 - DNA, 494 bp, Zea mays
  unsure (1)..(494): unsure at all n locations
tcaactgaagtggaaggaccctttctggtagtatcttcgtcaagacccggttcttacagattaaaggacatggacggcaacaacattcctagatcttggaatgccgatgagctntgacggtattatgtataaattgatgtaatctttttcatttttcctatgacacccttttcctttccgaagggggagaaaggtttttaatggggccatagtttgtaatttttctttcttattcagctctacgagagcaaaatcccccaaaatatgtaaatgtaaaatctgagcatgcaccatcgagtgcagagaaaaagaataaaaaacagggagaagctcgaaagtcgtctctaatgggatgcagagcatgatgaagctacaaaaagccgttcctaaaggagcgcagtagtaagtttctgctcanaagtcattcctaagggaatgcagagccaaataccgtcgaaatataatgcggagcacgaaaagtcaatgcgaatacc

SEQ ID NO: 42582 - DNA, 480 bp, Zea mays
agctggagactggagataccgcagcaagcgttttttctatatgaaagatgttcctaaagcaataaatgaagaaatcaacatgaacaacggaaagggtgaaaattcaattagtcatgtagtttgcactgatcatctctctatgtcatccaagagcaaaaagggaagaagaaaaaggaggtgcttcaagtgcaaggaattatgtcacttcattgcgtctctgtcacacaaagactaggatgaacgaatgaggagatgttttggatgcaacgataaagaccatatgatcacttcatgtccactcatgaagaatcaaagacgtgcaccctccaagatgaccctcactaagaaaaaagacaaacagcaagtgtcatgtcaagttgagcgacgcttctgctacatgtgtggtgagcatggtcatctacctaaagtatgtaagaaaggtagagtcctacacaagtaaattatctaatcttattcgct

SEQ ID NO: 42583 - DNA, 513 bp, Zea mays
  unsure (1)..(513): unsure at all n locations
cctataaaactaagcctgagttattttattacagaccagactaagagtgagtgcatatagttatattatacaaaccagggaggcacanactcctcccgagaagctaaaagcaatagattcttaagtggaggaccgagtcctcccgcacttcagtcttgattgtcttcttttggaaccaccttggcacagaagcagcanaagtctgctacttcctcacctaaaaacaacgaagggataaaccctgagtatggaatactcagcaagtcttacccgactaaagaaaagactctcaagggtatgttggttatatgggagtcaaggtaaggctcttcaataatcaaagactctgttttgcagaaatgcttactaaagtggatccttataaatccaattntatttgtcaatttaggtagaattacctgcactagagttctttctaccctagttcaatcactggtcctgcacgtagccatttcttaacaagagcccatcgtctttagtggaatgctacgt

SEQ ID NO: 42584 - DNA, 358 bp, Zea mays
agctcgtagatcacaaaggttgcaagatagtagttttccgaatagagctttagaggcagagaaagcagcgatagtaggttggcaacaacaacaaataatgtatcttgctgccaggatcctgtttcattatatagataaaagatctcggaatttgagaaatcacacgatgcacacccgctgcaagtggacctcctatatcgtttgtctttgaagacgtattttcgaaaagtcattttcaatgacgagctctatgaagatgttttcggactttagacatcgagcctccttcatttattccacggtttgagctcattataaaaaacaaattgataatatgatgggctactattgggaagtt

SEQ ID NO: 42585 - DNA, 506 bp, Zea mays
  unsure (1)..(506): unsure at all n locations
ctaagcttctnagggatagcacatcttaagattaacaaatgttcattttgagatatactggattcgtagcgcatgccaagcatggaagcaagttggtgctcaccatccacacaagaacatctagacgaccgacaggccactggagctcctacacatggatctattctgcccgatcgcttacataagcatcggcgagagtaagtactgtctagctattgtggatgattattctcgcttcacttggcgtgtttttctacaggaaaaatctcatacccaagagaccttaaagaaatccttgagacgggctcacaacgagtttgacttattgatcaagaaaattacaagcgacaacgggacggagttcatgaactctcaacttgaacgctttcttgatgaggagggcatcaagcatgagttctcctccncctacacgccacatcaaaatggagatgtagagaggaagaatagaactctattgtacatggctagaaccatgctntatgagt

SEQ ID NO: 42586 - DNA, 431 bp, Zea mays
agcttctccaaagtttgaggaggcttcctggcgaagtactgagctgacggacctggccgaagccccttgatcatggcctcgatgacaatttcattgggcaccgttggtgcctgtgccctcagacgcaagaaccttcggacatatgcctgaaggtattcttcgtggtcctgagtgcactggaacagagcctgagcagtgaccggcttcgactgaaatccttgaaagctggttaacaacaaatccttcagcttctgccatgaagtgatcgttcctggtcgaagggaggaataccaggtttgagcaacacttctgacagccataacgaaagatttggccatgactgaagcattgccaccatacgaagacacttgtgcttcgtagctcatcaaaaactgcttcgggtctgagtggccatcgaatacagggagctg

SEQ ID NO: 42587 - DNA, 502 bp, Zea mays
  unsure (1)..(502): unsure at all n locations
ttaatggtgttgccatcaatcaccaaaagggggagatngaaagctctcttgtgggttttggtggtttggatgacaagccaactaaaggactaacaagtgtgctaagtgttgaacaggtgcctaatgcaaagctaacagggttcaacacaagtgaacaagtgtgatggtccaaagactggattatctatagataatggacatcacaagtaagatggacattgcttaagtgagactcgatgtgcgtaactcagagacaaccaatcaagccaaggatggaggcaagaagagcttataggtaccgagtgcatgggagaaggtcaaggagaccaggaaccaaaagccaggggtgaagaagaagacttgcaaagtcaaggttgatcgagttaaggagagttatggtgcatcaaggaccactacttaaggacatgacttacaaccaatgaggtaacatctacaattatgtggtgtaagtcataaggctcaaagtcaagctcgagaagtg

SEQ ID NO: 42588 - DNA, 413 bp, Zea mays
  unsure (1)..(413): unsure at all n locations
agagtcatctgaggcatgcaagcttctaccatgacgtgatagtccctggccggatagaanagtaccatgtctgggccacactctgggctgccatgacgaaagacttcgccatgactgcgatattgcccccgtacgaagatatagttgcttcgtagctcatcacgaactgcttcggatctgagtgcccatcatacatggagagctgaggtggcttgtgtgatgggggccatggggtagcctgcagttctgctgatagaggagaagcttcatcaaaagcaaaatttctatgatggaaatcgtcataccaatcatcatcattgtaagaattgtcttgacgaagctctctttgtggaggtcttcaatcctggtcatcttgagtaagatgacatatttcttcagcagcttcatcgatc

SEQ ID NO: 42589 - DNA, 464 bp, Zea mays
  unsure (1)..(464): unsure at all n locations
actcagcttgccacatagctcatgtaatacccttgatcatatctcttttatatgctatgactaatgtgttttcaagtctatttcaaacgaagtcataggtatattgaaagggaattggagtcttcggcgaagacaaaggcttccactccgtaactcatgcttcgccatcactccgagcaactctctattccttggggagaaatgagcatcaaagaaaaggacttcatccttgggggagagagtaaaagctcaaaagcaaaaggaccggacttcatctttggcataatcttaactcgttacttatgaccaaaggggaagaaattacttcgagggctctaatgattccgtttttggcgattcatgccananagggggagaaatgagcccaaagcataaggaccgcaccaccaccaccaaattcaaaaacttagtgctttccaaaagtctntatcatttcgtatcct

SEQ ID NO: 42590 - DNA, 471 bp, Zea mays
  unsure (1)..(471): unsure at all n locations
agctntgctctcggcagaccaatactataatgtattacacacaatgggagtggagagatggcgagagtatcatgtaccctccgtgacaagaggctggatggtggtgtatctgtgctctcggttggcgtgaacccggtctggtcttgagaaccccggtggtgagttgacatatgcaagggttaagagctacatatgtcgtgtgattggagatcctcagctgagtattaaacaattcggatcgccgttacttctctgacatgaatacttggtcactgacttacacgtatcaatccagtaaagtaaaaagggatgataaaagatggctagtgtatgccaagtgcttgaactatggtagaaagaactctatactcacgtaatgacttacactgataatacaactatatttttaaagatccactggtagtaagtgttctacaaaagagtctttgaatctgaataccttaccttgac

SEQ ID NO: 42591 - DNA, 489 bp, Zea mays
  unsure (1)..(489): unsure at all n locations
tgcattgcatatntaaatntcttgtatcatctanggcttgtctaacctacttgagataaccgccaacaaagcgagtaaaaaagcttaactcggatcaaacttgacaagtcttagttttaaagcttttagcacttaaattcttacttactatgcaattgttggttcttgaaatatgcatgaggtactgcacttatggggagtattcaaaactcaaatcactcacaaaaacccctagtgcaaggccaaaatgcaaatttcaccatttgcctattttctctaaaaattatctagcctatggcaaaatattttgaaaattatgagaaaatatatgagggtgccaatacctgtcccaacaagtgttatnttgtttgattataagttgggatctggtttgcgtgacaactatatagaaaaattcacaaatttcaaaatttccctctgtgtgggctcaccagacagtccggtgtgcaccagacactgcactgtgca

SEQ ID NO: 42592 - DNA, 408 bp, Zea mays
agcttcggaataccacgacttcattttcttttgagtcggacaagtcttctctccttcatcagccctcacaacggacaagtcccggaaatatctacccctcatgatgacaagatgattttctttaatacttgatttaccaaaaaccgcatggcttggtcgccaaggtcgatcttcggagtcttcaccaccactatctacatcatagctgtcactgtcaccagtatcttcagataaaccctccaaaatttctttagtaatcttctctgtattagtcttcgacattgattgaagaaaacccagatgcatctcctcagaaagacttagcttcgaatcaccaacagcttgtttatcttcagacatccttgcaagcgctgagaaagtgctctcgaaaccgaagctttaaactct

SEQ ID NO: 42593 - DNA, 480 bp, Zea mays
  unsure (1)..(480): unsure at all n locations
tatcttacaatntanaacanagggattagttctatacatgaattatgtatcagcaaataatacgtctgaagttaatgtcaagctcgatagttcatagagagtgagagcacctagaggggggggggtgaataggtgatcctgtaaacttcaaaacttaagccacaaaactttgattaagtgttagcacagttaatgccaagtggctagtgagaagatcttgcacaataggataatcacacggagttcaacacagagaagacacagtgatttatcccgtggttcggccaagtacaaaacttgcctactccacgttgtggcgtcccaacggacgagaagtgcactcaactcctctcaagtgatccaatgatcaacttgaataccacagtgttatgcttttcctttcaatnntcccgttgcgaggaatctccacaacttggagtctctcgcccttacacttgagattcaacaagaaatacggag

SEQ ID NO: 42594 - DNA, 226 bp, Zea mays
tgccatctatatgactaacaagtgtgctacaccgttaacaagtgcctaacgcaacactaagaggggatcacagaggagatcatctgcgatagacctgacactggactatgtattaatacagtgcataaccagacagaaaggcattattgtaggcacaggcgatgagctgtactctaagagcaacatgacatcctccgttgcatgacaaaagaaatgcaagagaccg

SEQ ID NO: 42595 - DNA, 439 bp, Zea mays
  unsure (1)..(439): unsure at all n locations
ngaccaccttccgcttccacaagcgaagatgcccaatactagactaaccaagcctttacctcatcgacgcaacaactaaaaggaagccttccacgagcaacaacgcagtgggtgaggacaaagccaagaaagtctgtgacacatgataggtgtgcatgctattgctcgcaagaagagatgcaacgcccaactaagtccatcgtatgagcatgtgtacgcagcatatgacacaatgtgtgtggtcgtgggtctatcgaaagtgagaggttgcccctggatctagccttagagcacacactacgataganatcatttntagtaccagttganaataggctatagtaccaaaccccaaccaatattatgcaaccagaactaaagaccttgttctttaagtcctagtgcatggcctattactaaaggacccattagtaatagt

SEQ ID NO: 42596 - DNA, 385 bp, Zea mays
  unsure (1)..(385): unsure at all n locations
agctntntgaaagctggacttagatntcccctgagcaactntgtcatagaggtgctgaaaatattcgaagtatatcttcaccaacttacccccgaagcaatcataaagctgaatatcttcgtgtgggccgtgagaagccaaagtctggagcctgatgcgaaaagtttctacaatatacacgaattatcatacgagacaaaaccttggggtaaggaacaatatcacaataattntggctactacagtttcgtttctcggtctgggtcaagctgtcccgtgccaacctttcggaagagatggcccggcgactggatgacagaatggttttatgtgaagaatgacctgacagtacgggaagatatcaaaggtataattatgcgcccta

SEQ ID NO: 42597 - DNA, 464 bp, Zea mays
taaacctcttcaagagagggtcgcactctaaggcccaaaccactatcaccagcaggaggatctgacacacaactgatgaaagtcttggaaggaggcagattccagactgaatacgcaacaggagcaccgacatttgacacattgcctctaagaatcatctcaagccggcttaccagatccacagcaagaatccttctgttggtaacccgggtcgagttagtgatgccacgatacagataagttgggtacgctttgtccttcagcggctgaatgttcttaaaaacaaaattggcgaccacagcttcagcagtcagacctttctccttcaacaagccaacctcggcaagcagaaccctggcctcggctatctccaagtccgtgggggattcagaacaacttggagcgcgaacatccggctgtctccccgaccgagggggtagagaattgccatgattctctacaat

SEQ ID NO: 42598 - DNA, 370 bp, Zea mays
agctagctgcactggaagaacgacttctaaggctatctccagtagcttaccaatcttcatatccatatttaaactccactccacaaacattgcactctacaacgtaaaacattgttttagataaccatatacgtgaactgctggacacggtctaagcatcatcatcatcagcccaccaaaagatgcatatatctcccaggaatgaggacaccaggagtattgaattacgaaatgcagcatacatcaaactgggcagaaacacgtagttgagtaataaacattgaacacggcatgtcacgtacctgtgcactgtgtaattcagtctatattgcaattctgctctctggagtaccaagtgcttaacaaagat

SEQ ID NO: 42599 - DNA, 479 bp, Zea mays
  unsure (1)..(479): unsure at all n locations
ngagctntcttcagattatgaattattctctgaaccttttcttcggtctctttcaccatatcaagcctgaagaagtacctttcacctagttcagaccaatttagtggagtacgacatcgtcgtccatataaagcttcaaatggtgccatcttaatgctttcttgatagctgttattatacgagaactccactaatggtaaacaatcatcccatatctgtgggaactacagaacacatgctcgtaacatatcttcaagtatttgattaaccctctcagtctgcccactagtttgaggatgataggccgaactatggagcaatttagtacccagggatttatgaagttcttcctagaatttggatacgaattgaggtctacgatccaacactctagtctttggaacaccgtgcanactgagaatatgagcaatatacagttccacatatgcgatgactgngatatttactctgactggaat

SEQ ID NO: 42600 - DNA, 259 bp, Zea mays
agcttctgccatgacgtgattgttcttgttcatatagaagagtaccatgtctgggccacactgtggactgccatgaccaaagactttgccatgacagcggcgttgcctccatatgaagatattgttgcctcatagctcatcaaaaattgctttgggtccgaatgcccatctgtcggggaccataattaggggtacccccaagactcctaatctcagctggtaaccctcatcaacacaaagctgcaaaggcctgatgggc

SEQ ID NO: 42601 - DNA, 406 bp, Zea mays
ttacaaaacacttagagacgttagaaagagatgaataaagcacgattgcgaacaccaagctacatgagcgacaaattacacatgaatcactctctctcaagtcacaaatcactaatgataacttgtctcaattgtgggactcggagagattggaagctctgactgtatcttagaatggattgctagctcttgtattgaatgtgaaagatttgagtgcttgggtgaaatgaatggaggtggctggggttgtatttatagccaccaaccactttctagccgttgccccctttctgccgaccgcggacagtccgcgcccctggttcggacggtccgcccctgcacatcaacgactgagatcgcaacggtcagcagtaacaactatatcaatggctatagagcatataat

SEQ ID NO: 42602 - DNA, 472 bp, Zea mays
  unsure (1)..(472): unsure at all n locations
agctntcttgacatttatcatcccacttaaattctctgttcttctccagaagcgaggtcataggcttggcgatcttagagaatccttcaataaatctccgataatatcctgcaagccccaagaaactccgaatctcagtaactgtagtgggcactctccactccattatctccttcactttagcaggatccactgctattcctccattagaaataatatgtccaaggaatggcaccttatcaatccaaaactcgcacttgctaaacttggcatagagttgattatctcgtagcttctgtagcaccaaccttagatgttgttcatgatccctttcactcctagaatagataagaatatcggcgatgaacaccatgacaaatctgttcagatactccatanacaccttattcatcaaantcataaaataagcttgtgcatnggttaatccaaatgacataaccgtgaactcata

SEQ ID NO: 42603 - DNA, 499 bp, Zea mays
  unsure (1)..(499): unsure at all n locations
tctaaagggagaacacgtgataggtctaactaatgttcaattcgaataagatagaccttgtgcagcttgtcaagcagggaaacaggtgggaggctctcatcacaccaaatatgtgatgacgacatcaagacccttggagatgctgcatatggacctttttggacccgtcgcctatctgagcataggaggaagtaagtatggtttagttatcgttgatgactnttctcgcttcacttgggtgttcttcttgcaggaaaagtccgaaacccaagggaccctcaaacgcttcctcaggagagctcanaatgagtttgagctcaaagtgaagaagataaggagcgacaacggatccgagttcaagaaccttcaagtggaggagttccttgaagaggaagggatcaagcaccagttctccgctccctacacaccacagcanaatggtgtggtagagaggaagaacaggacgctaatcgacatggcagggactatgcttggagag

SEQ ID NO: 42604 - DNA, 369 bp, Zea mays
  unsure (1)..(369): unsure at all n locations
agcttctanaggggagaacacatttgngactatcttatgtttattntgagaaagacagggtttgtagcgtatgtcaggcagggaagcaagttggtgttcatcatccacacaagaacatcatgacgactgacatgccactcgagctcctacacatggacctattcggcccgatagcttatataagcatcggcgggagtaagtactgtctagttattgtggatgattattctcgcttcacttgggtattctttttgcaggaaaaatctcatacccaagaaaccttaaagggattcttgagacgagctcaaaatgagttcggcttaacgatcaagaaaattagaagcgacaacaggatggagttcaagaact

SEQ ID NO: 42605 - DNA, 455 bp, Zea mays
  unsure (1)..(455): unsure at all n locations
ctatgaaactcagctgaacctggtagtncatatgctaataatatacgaatagtctcattcctatctacgagtgcatatgtttcactgaaatctaaaccttcgacttgggagtatcccttggccacaagtcacgctatgttccttgtcaccacaccatgctcgtcttgcttgttgcggaagacccacttggttcctacaacattttgattaggacgtggaactaaatgccatacctcgtttctagtgaagttgttgagctcctcttgcatctccaccacccaatccgaatctctgtagcgcttcctctaccctgtgtggctcaatagaggatacaaaagagtaatgctcacaaaaatgtgcaacacgagatctagtggttacccccttatgaatgtcgccgaggatggtgtcgacggtgtgatctcgttggattgctcggtggactctttgggtgt

SEQ ID NO: 42606 - DNA, 467 bp, Zea mays
  unsure (1)..(467): unsure at all n locations
agctntgaaggcttanaaagaatgtgaggatgatagctcataaatagccttcgggaattcgcgcttggaagttataactcttcggaatgaggcacttgagaaagataaaatcatgctttctttggtcgaaaggttaaagacaagcgaagctaatttgtccaatgtggcagaacctcccaaggtatcgggcccacatgcacctgtccttgtcctaaagacctcagacggccatgcatgtgcaccagataacttaacaggatccgtccgattgccccaaggacatcggataaaccacttacaaccagaaccgcggattaagtaaacacagatcacacaccaacaattntgcagtggaaatcttattactcaaatttatatgttacatcaagttntataatgtacatgatcgggagtgatacannaagtgattcanaggaataattttgaactatattaattgttataag

SEQ ID NO: 42607 - DNA, 493 bp, Zea mays
taacatgcttgattcaagtgcattcttctcattcgcaagaattttctatttagggttccatgttaattacttcattatctttattttctataggtatcttgactaaagagacttccttagtcaagacatctagcatttcatctttattgtgaatcaactcttgaagctctagggttctttccttttcaaagataagcaagtcttcttgagcatcaagagttgcttttcttttatctagcatttccattaatttggtgataacattgtatccattcaagccaaattctttaatcattctatttttcatggcaatttgatcatcatcatcatcatttgaaaaatcattactaaataaggttaccttatcttcctctgccatgacgcaagctggagtgcacgagtcgtcttgtaacgtggtgaagagtcgcacgcttgatgtagattggatggccacatttgccaccacttcctcttcctcggagctagaactctc

SEQ ID NO: 42608 - DNA, 413 bp, Zea mays
  unsure (1)..(413): unsure at all n locations
agcttatgaagattcttcatcccaacatgggctagtctgtggtgccagagccaacccatgttagtcttagcaattaagcaagtgtcgagttcaactttatcaaaatctaccaagtatagctgaccctccaacactcccttaaatgctattgaatcatcacttcttctaaagacagtgacacctacatcagtgaatagacagttgtagcccatttgacataattgtgaaacggaaagcaagttgtaatctaaagaatctacaagaaaaacattggaaatagaatggtcaggagaatatagcaatttaccaagaccttngaccaaaccttgatttccatccccgaatgtgatagcttcgtggagatcttggnntttctcatatgaagagaacatctttttcttccctgtcatatg

SEQ ID NO: 42609 - DNA, 447 bp, Zea mays
  unsure (1)..(447): unsure at all n locations
tgaatgagccatatctctctttctactgacatgctgccatctatntgtacattggncttttatctcattcctgccagcttacctacaggctacagccatcctccctctctctagacacccaggcagggaagaagaaaagaacatatacagagagggagaaggtgagcaaaaacattaggaatcttggaatcttttcaccttcttgtcctctacagtctgagaatgcaggacactagctggatttgtgggatatggtcaaagcatgcactgtaaggcatcctgctgcttccttgcttgcttacgtgtctccatctccacgagatctttctctctttgcctctctctntatagtacaaaaaaacttgctggtacatggtgatggaatgacttcagcatcaaccagaccacacacagacacagctaanaagtttgatcactcttcatatc

SEQ ID NO: 42610 - DNA, 412 bp, Zea mays
  unsure (1)..(412): unsure at all n locations
gcttatcttccaagagtatcggttcatttattctccttctcaggctatgaggccgcagtctcttcggtgaccgcggaagcctcttctgcggcagcctcttccgcggccatgtataatagtattttatctatatcagcaaccatgctttctaaatgaatatcttccgattccgaaggtgcagcttcagtggctgtcgtgctttcaacagccggcgccttcggagctgaagcttgtggtggtgtcccttctatggcttatgtcactgtaatgatcctttgcttttttggcctagttgtcttcttcgttttcgcgggctccttgtccttctgaaaaagcttcatcagatgtggccctaatggactcanctcgacaggcaaggatncagtcactacctttaacatttccttcatga

SEQ ID NO: 42611 - DNA, 439 bp, Zea mays
tatctccatgtgggaacgtacgactatcgtttgatagactatttattaacattaggagcctatttataattgtcagtcgacgctacgatattatatggatttaattgtattttgatgatcttctacaacaagaaattaataatacattattagcctccaaaaatcgtgaaattttacggaggcacaacatatgtatcatataaccatagaaaatgtctggattataagatctataagatgcccgtgtttcttacattccactttcacttatttgtacgagttacatgtgaaatcactgtaagtattcaagtttcaacataaacagcactttactttatcattctcatatgaggattagagctatctctgtataaaatgtttattacttctcgaacttatttgtactctttgagtgacactagaactatttatgaatttt

SEQ ID NO: 42612 - DNA, 375 bp, Zea mays
  unsure (1)..(375): unsure at all n locations
agctntgttgtccaaagcaagaagagtttactctttanaatcataactataattgaacgacattgggagaaacaaatggatcacccattgtatggggctgcaatgtatttgaacccaggaaagctgcatcctctcataagaaatgatgatgatgctactgttggtcagctaagaggttgctttcttgatgtgcttgcaagaatggtagatgatgaggaaactagagacaagatcaattctcaatcaatggattacgagtttcttataggaccagctttttcaaataagatggccgaagataacctacaaactatgaccccacgtaagtgtttgtggctggtactagtttactacttactnagttgtgctagtatc

SEQ ID NO: 42613 - DNA, 465 bp, Zea mays
  unsure (1)..(465): unsure at all n locations
tatgaagattcttcatcccaacatgtgctagtcggcgatgccagagccagcccatgttagtcttagcaatttagcaagtgtcgagttcagctctatcaaattctaccaagtatagctgaccctctaacactcccttaaatgctattgaatcatcacttcttctaaagacagtgacacctacatcagtaaatagacagttgtagctcattttgcataattgagaaacggaaagcaaattgtaatctaatgaatctacaagaaaaacattggaaatagagtggtcaggtgatatagcaattntacccaatcctttgaccaaaccttgatttccatccccgaatgtgatagctcgttggggatcttggttnttctcatacgaggagaacattatcttctcccctgtcatgtggtttgtgcacccgctgtcgattatccaacttgagcccccggatgcataaacctaca

SEQ ID NO: 42614 - DNA, 392 bp, Zea mays
agcttgtcgtctaatacacctttaatatctttgtattcatccttcttctaaagacagatacatcaatatttgtaaataaacaattatatcccatatgatataattgacttgcagaaagtaaattgtaaccaagcgaatttactaagaacacattggaaattgaatgctcggtagtgatggctatttttcccaaacctttgaccttgccatgattcccatctccaaagatgattgtgtcttgggaatccttgttcttgacgtaagaggtggatattttcttctcccccgtcatatgggttgtgcatccggtatcaataatctagcttgtgccctggatcataaacctgcagatgattaagcttgggtttaaggcccaactcttgtgggtctat

SEQ ID NO: 42615 - DNA, 496 bp, Zea mays
  unsure (1)..(496): unsure at all n locations
tcgtcatctgaatggcagctgccttggagaatagatattatctctgttctccaatcttcactatgaacaggagatatattgagcactgctctttcaagaagttccacagaaggtgctcttattgtctcatagaatacttccgaaggtaaaggcagccctatgccgctgacttggctagcagattagcgtgctcattttctcctcgcggaatattcttgacagaaaacccttctaaagaagcttcaagccttcgaactgtatccaggtatctctcaagcttcgggtctcttactctacaactcttgtcaacatgaccagaaataacttgngaatcgngtttaaggaccgccctgtttatccctattcgctttaacttccgaagccccaaaagcagagcttcgtattcagcaatattatntgtgcagctgagatctagttttactgcataacatgttctgactttggaaggtgcaaccaagacagcagctgcacctgc

SEQ ID NO: 42616 - DNA, 466 bp, Zea mays
  unsure (1)..(466): unsure at all n locations
agctagcacacatagctcattagaatacctttgatcatatctcttttatatgctatgactaaagtgttttcaagtccatttcaaaccaagtcataggtatattgaaagggaattggagtcttcggcgaagacaaaggcttccactccgtaactcatgcttcgccatcactccgagcaactctctattccttggggagaaatgagcatcaaagaaaaggatttcatccttgggggagagagcaaaagctcaaaagcaaaaggaccggacttcatctttggtataatcttaactcacttatttatgaccaaaggggaagatggcactccaaaggctctaatgattccgtttttggcgattcatgccaaanagggggagaaatgagcccanagcaaaaggaccgcaccaccaccaccaaattcaaaaacttagtgctttccanaagtctttatcattnggtattctatt

SEQ ID NO: 42617 - DNA, 394 bp, Zea mays
  unsure (1)..(394): unsure at all n locations
cgttagagaagctgatggcggacgaactctgttactatcccattatgtggaaaagggattgagtcgctctggatatagtgactgtgatcctgctccaacaccttatgacctcagtgcgctattaacaaagaatcggagaataacaagggatcaattgacatactcccagatcattggctcgctcatgtaccttgcaagtgcaacaatgccagacatctcttatgctgtgagtaagctaattctgcttgtgtcgaatccaggacatgatcactggcgtgctcttgagagagtgtcgcggtatttgaaaggtattatgacatacggnattcattatcccggaaacaccaaagtgctggacggttatcgtgatggcaactgtgattctgatgctgat

SEQ ID NO: 42618 - DNA, 386 bp, Zea mays
  unsure (1)..(386): unsure at all n locations
agctagtgaaagctcttcatccttacatgtgctaagcggcgatgccacagccagcccatgctaggcttagctattaagcatgcatctagaccggcctcttgttttgcaaaatcaactaaataaagtttgtcgtctaatacacccttaaaagctagtgaaccatcacttcttctaaagacagacacatctacatttgtaaatagacaggtataccccatatgacataattgactaacagatagcaaattatatccaagactctctactaaaaatacattagagatagaatgctcattagaaattgcaattttacctaaccctnttaccttgccttgattcccatcaccgaatataattgaatcctgggaatccttattcttgacgta

SEQ ID NO: 42619 - DNA, 448 bp, Zea mays
  unsure (1)..(448): unsure at all n locations
tggtcattctattgctaactgtcctgataatgaaagtgaccattacaagggaaacacgatggaaaagaagaagcattacctgaaggcaaatggcgaggcgcatctatgcaaggagtgggactcggattgctcctcgtccgactccgacaatgaaagactcgccgccactgccttcaacaaatcaaccctcttcctcaacgagcgtcacacatgccttatggcaagggaaaagaatgaatcactcgtaatgctaatacttatgattcttctagtgatgaagaatctagtgatgaggatgaagtaaattattcatgtttgttcanacgcttacatagatctaagatagacaaaattaatgaattaattgatgccttgaatgacaagaatatacttttagaaaagcaagaggatgttgtgtatgaagaacatgataagtatgtataggctc

SEQ ID NO: 42620 - DNA, 244 bp, Zea mays
acgcaaccctgggcgccgggcgggacaatatatggtgaagctataagaagccagcaacaccgctatatcactatcaagcgacaccagccggaaggaccaaaacgcgaaaaaaaaccccgctgcccctacagaggtgaatcataagatctggacgggaagctacaacgctagaactgaacgcacggaaagactgcggctgggaaaatggcaagcaaacgggcaaaagggcaatggcacggaacaa

SEQ ID NO: 42621 - DNA, 314 bp, Zea mays
  unsure (1)..(314): unsure at all n locations
agcttaagcgtgattaatcgtgcttaagcatttttgttaaaaagagaaaaaatacatgatattgggccaccctgcagcagcccttaacccccacctcctctcttcatgagtctgcatcccactaggcccacctgccaggaggctcaacgcaaaacccctctcccgtgatgacctagtactctgctgcctncttccacgccccgcgccgccgccctgtgctctccgcctccctctcccgaagcctatcctcctccgtgccgtatgctctccagctccctctcctgaagcctctcctccctcgtgcgatcttcacc

SEQ ID NO: 42622 - DNA, 464 bp, Zea mays
  unsure (1)..(464): unsure at all n locations
cttgnngctctgtgatgagtgccgagtggtccctgctggttcattgcaagctgcttcnggtggcgaccttatgccaggtcatcaattgatctctcacgatttgggagtcccttcgttcttctccaatctccaggtactgtgatatattctggcctgacttttacaccatacgaactgctatcaacacgcacatctgttctccctattangcattggtggacgggatggctagtcagctgaggttgcaaggtgcttctgttccagaaggagcttcatctctggcacgttggaatccggtgttgctccaacatcatgtctctganttggaggcgaacgaatgctggtagtactcttttgcttctctntgtctatcttattgaactgttttacattttaactctntntgcttgattgtctcttgctagatatggctcgacagatttccattcttgaagaaaacattc

SEQ ID NO: 42623 - DNA, 357 bp, Zea mays
agcttgcgaaggctcttcatcctcacatgtgctaatcgtttatgccacagacagcccatgctagccttagcaattaagcatgcatctagaccggcctcctgttttgcaaaaacaactaagtaaagatagccgtctaatacacccttaaaagctagagaaccatcacttcttctaaagacagacacatttacatttgtgaatagacaattatattccatattgcataattgactgatagataaccaactatatgcaagagactcaactaaaaacacattatatatagagtgctcggaagaaatagcaatattacctaacccttttaccgtgccttgattcccatcaccgaatattatt

SEQ ID NO: 42624 - DNA, 413 bp, Zea mays
tataaaactcagcttatgccccaaaaagtgtctactttgttaatggcaagtctccatgtatcaacataatgaggcttacattttatatcctgctaattatcctgagcaccaaattatgagaattcatgctagaaaacctcacactatttctcatcatgcattactgtgtaaaaatgatgcatctatctctaagcattctactcatgcttaaatgcctaaaaagaaaactactattgcaatccaagaccctaacatatcatttaagactcttgatgcatctgatgtgcttactaacaaattacgcctaatagttgacaaatatgttgttggcaaacacaagggctccacgattattgtataggtacccactgtgcttgtttctaacatcatatgacccaagactgcttgggtac

SEQ ID NO: 42625 - DNA, 389 bp, Zea mays
  unsure (1)..(389): unsure at all n locations
agcttcactgannaagaaaaatgaaaaaggttgtacattactggtccagttccagcccagtcggcccaatccagaggcaaacgcgcccgcacgcacgctgtggaattcttgcagaagggccctcaagtgtttgactaaatggaagtgagttcggtcactgttgctctgggtcgctgactgtttgcaaaaaagaccctatacttctatttcttctccaaaaacacccctggccacggcgtgttgtccgttcatctctgacgaggtctgtaccggatatggccggcgatgactgcccgggctaactatcggtgaggctccactgacctaagatggcctcggacacgcattaatgttacctcaacacactaagaatggtctgtccacatgca

SEQ ID NO: 42626 - DNA, 497 bp, Zea mays
  unsure (1)..(497): unsure at all n locations
ctaacgatcgccagatattgggggcgaccaccggtccacccgctccgtaccggtggtcggagcaccccatcaccttcactcgggcagatcaaaggctcaacttcgaccacccatgctaatacccgctcgttgtcgatccagtgatccgagatatcgtggcgaagaacgagctagtggatggtgggagcatcatcaacgttatcttcccccggacactccaaggcttgggagttcacctcaaacagctccgcgagtcacacactcgattcttcggcatcatgcggactgaatgggaatacccgctgggccacatctacatgcctgtcaccttcggaactccggagaactacatatacaagntcctgaggttcgaagtggcatacttcgactgggggtacaacgccatcatctggaggtcggnattggcanaattcatgcgcatcccacactacacgtacatgatattgatgatgccccgaccacaacgaatcataact

SEQ ID NO: 42627 - DNA, 354 bp, Zea mays
  unsure (1)..(354): unsure at all n locations
agcttctcaatcttgaatggatntaatttacagagcatatgcttttgctgcatggtaggtagcaacccaactctntgcctatgggctctcggtctattggacacccgtgccgacaaggagaagcttgcatatttttatactactgagtactgactagggcctgtctagctctgagttagacccttaggatttagaagaacaatggacaccactttgattctagagacaagatgcagtctgatgctgtcttttagctacctcaaataatttgacctacattacatggaatataatatattattttatttaatatatatggacatttgctaaaattggnggcatgtgcggtcacat

SEQ ID NO: 42628 - DNA, 495 bp, Zea mays
  unsure (1)..(495): unsure at all n locations
tcttcaccatgtgatcacggntatcttgagaaggttgagcagtgcacttcccttttagttgtgtcaagctcatctttagcctctcattttcttctttgagctcttgacatgtatcatcttttgttcttggaaattttagctcataggaggatttgcttgtcgatgaacaacaagcattagcacatcgtaatatagtttcaatttgaatacatgtgcatgagtgaggttattgngattttaagttttctatcacaacctcatgagcaatgtttgacatgatatgatcatccataagattttcatgagaacataaaagcatatcatgtctttcttgaaaactagatcttcaattcttagttcttctacttggtccttaagcaaggcattcctatataccaattgagcaacacaatgtaaagagttatcttgctcaattgaaatagtctcataccttctgaccaagtcaacatgagagcactttatctcataatgttc

SEQ ID NO: 42629 - DNA, 479 bp, Zea mays
agctagctacatgcagttgatagtttctgcagtatcataaaaattatctatccgccatggaaagattttggagtgatgtgaaagatggaatagtccttatagttgcctatccgatgtttagaacatctaacatgcaatgggaggtattagcttcttcacaatttcactcatttcaattttatgagtctactcacactctgttgcaaatggaggtattggatgcaatatacacagcttagtttgtattgtgcgaaaatgatcagcatactgcaattcagccttctgttgaaggttagttctctactagattcttgttttccctgtccaatgttctagatgtacttaagaatagtgacctgtcaattattcaatgggagtgtggttcttggtgccaccaatgttatctagagctcatttatttcactatttccaaattccttgaattcatatttggtactggtatatatctacattatcat

SEQ ID NO: 42630 - DNA, 239 bp, Zea mays
gatacttaaagtcagctgcggcatgcaagctgtgcctcccgcacgtaaatctatttattttattacaagccaccacgaccatgttatggatgccacttgtcggtgaccataattggggtcctccaaacttcaatcttatctggtaaccccatcacgcataactgcaaaggcctgatgggtgacgaataaataatgctctgtctacttaaaggacacgatcctttctcgtccgagcccag

SEQ ID NO: 42631 - DNA, 337 bp, Zea mays
  unsure (1)..(337): unsure at all n locations
tccgcangagagcctgcgaacgttattacttgttctgtccaccgaggcgctttatccgagcgcaagttacttatcgtcagaatgtgatgagtgatgtatccgtatcccggaggcgtaggagtccctctgctcggtcacccttggctgcttacgtgtactccgtcgtttccaggatccgcttttgaatgtgtcaagaagcacgaaagaaatcctgctaaaaagagatccttttgcgaggaaaaattcgacgcagagggggtcttcccccttttagcccccgagggagggtcgggctttgccgaggctatgccgacccttacttgacgactaaactttg

SEQ ID NO: 42632 - DNA, 314 bp, Zea mays
agcttcaatccttcggaccgagtctatatatatttttagcttcggatctttagccttacaactcttgtcgatatgacccaaaacaacctgtgaatcagttttaagaatggcccttcttgatcccattgctgttaacttccgaaagcccaaaaacagggcttcatattcaataatattgtctgtacaactaaaatcgagtcttgccgcataacaagttttaactctggatggagagaccaacacagcggctgcttctgctccgaaggtttcccaagacccatcgcaaaacactgtccatacttcggcatctttat

SEQ ID NO: 42633 - DNA, 472 bp, Zea mays
  unsure (1)..(472): unsure at all n locations
tataaaactcagcttcgcatctatatatgcttcttcttcctgagtacctggcgttcaatcagcaatgaagactgctaacgctcgggactgaattgaggatctatgcacatagtctatactgaactcgttaagctccgcagcccactttgcaattcttccagaagcttctctgttcctcataatatccttcaggggctgtgacgaaggaacaattatgtggtatgcttgaaaataatgccgaagctctctagaagccattaagacagcatacaacaccttctccaattctgtatagattttctttgataaacttagaacttcagagacaaattatactggggcttgctatttaatttgtccttcaagcttctcctatacaagcgccgcactcactgcagagtgctaagctgccacatacaatagtcatggagcccctacncagatggagttaatgttgtatatcaatcaagta

SEQ ID NO: 42634 - DNA, 478 bp, Zea mays
  unsure (1)..(478): unsure at all n locations
agcttgtgacaatatagtctatttgatttattatttcggcgtttattgcctcggcccaataagaatctgatacattatattccactaacatagacctagccatatcaatgagagtcctattctttctttcaacaataccattttgttccggggtatatttggaagagaattcatgtttaatacccctgtcatcacaatattcatcaattcttgcatttttgaattccgacccattatcacttctaactttcttgatatcaaaatcaaattggatttgagccaatatagcanatgacttaaatgtttcaaacacattacatttatctcgaagaaaataacccaagtgaatcttgaataatcantccacatcacaagacaataggaattaccaccaatactcacaaatgatgtgggcccaaataaatccatgtgaagtaatttccaaggtcgatgagtgaacatttgacttttatttggg

SEQ ID NO: 42635 - DNA, 507 bp, Zea mays
  unsure (1)..(507): unsure at all n locations
acctatgaaactcagcctcttttattctgatganaaccaagcgctttgatctcttcatcaaaacgaatgttccaactccgagatgcttgcttcaacccatatatggatatctgaagactgcatatctttccaacattgatcggatcgacaaaaccctcgggctgtatcatatacacgtcctcatcaagggttccattaaggaaagctgttttgacatccatctgcccaatctcataatcgaaatatgcggcaatagctagaatgatccgaatagatataagcatcgctactggcgagaatgtctcatcatagtcaactccttgaacttgtcgaaaaccctttgcaacaagtcgagccttatagatgtgaacatctccatccatgtctctcttcttcttatagatccatatgcattctatacgtctaacaccatcaggcgggtcaaccaagttccatacttgattttctcccatggaatctatctcggatctcatggcgacatgccat

SEQ ID NO: 42636 - DNA, 343 bp, Zea mays
agctggactcaagtatccacacattaatccttattttattgttcccggctcatggacaaggcatcctccctggatccaagcccatagaccaacataaatcccgttatcaagaggaatacaatcaattcctgacctcgcgcgagtgctagaaaaatcactcgacttctaccgagatcctgattagcaagcagctactcgacctagcatactagtattcatctcaaagaggaatcctaagttcatgcagctagaggtttcaagcaactcctacacttaagcgcacattgcaatcctacaagcattaagtgtatgtgagtagcatataataacatggttatgcata

SEQ ID NO: 42637 - DNA, 247 bp, Zea mays
gctcacacgttccagctcatgtatgtcatgagacgaggctcgaacagctctatacatgaaggaggcctaactacaaggtaatatctatagaggacatggatatccggttcactaacgacaacgctgagctgaccggttcttgccatgacattgcatacctcaggattagtgagggagaagcgatctatccacacccaccaccacgctttgaggcatgcatgacatgatggcaccattcatacatgca

SEQ ID NO: 42638 - DNA, 479 bp, Zea mays
  unsure (1)..(479): unsure at all n locations
agctngcatatatcttaagtacaaataaactttttgttatatatgaactaagcttagtattgcacatagtacataggacttgttgcggcctgtggggaccaacaattaatgtgcactgcaaaaaagagaaagaaagtgatcctggatctacccttatttcatctgatgaatagagatgaactagctaggtcgctcaatatatgctcatgatcatcgtctatagtggtcgttgcctcccatgcatgtctggctcaagcagggcgagcggtccacttgacgttggcgcagccccaatacaatccactctggcactggcaggctgaactggattgcccgcacctgaccaaccaaattataacatgatccactcttggagctcttagtgtctggatccaattattatacagcggaactgtgcgtcttctgtcttcatacatggtccaggaaatataacctttagtatatagtgcaaacacatg

SEQ ID NO: 42639 - DNA, 407 bp, Zea mays
  unsure (1)..(407): unsure at all n locations
tctanagggagagcacgcgatangtctaactaatgttactttcttattatatagaccttgtgcagcttgtcaagcagggaaacaggtgggaagctctcatcatgccaaaaatgtgatgacaacatcaagacccctggagttacttcatatggacctcttcggacccgtcgcctatctaagcatangaggaagtaagtatggtcttgttatacctgatgatttttcccgcttcacttgggtattctttttgcaggataaatccgaaacccaagggaccctcaagcgcttcctaaggagagctcaaggtgaagaagataatgagcgacaatgggtccgagttcaagaaaccttaagtggaggagtatcttgaggaggaaggaatcaagcacgagttctccgctccctac

SEQ ID NO: 42640 - DNA, 366 bp, Zea mays
  unsure (1)..(366): unsure at all n locations
tctaagcacctgcgctgcagctctggaaagcgtattataacatattttctagctttcctaaggccctacaacacagacaaaataactaaattattggattgaacaaccaaaatatttgtctaacgaatattggtaccataactcattagtacctgctcaatataatacattcatcgataattgacaagtccagcactcttacattcagccacaagatgaactatttaatgaaccatcaccgtgaaaaaaccaggaggaaaaaccatctccattttgcatagagtaataataatagattnttccaaatggtccaactcattgacacggagaacttttgaacatatccctcgcaaaaatgcagacaac

SEQ ID NO: 42641 - DNA, 290 bp, Zea mays
gagatgaacctctggcacctggtgaacatataatctacagccaactagttagaccacatatttgcgttggacaattgaaccaccagaactcattaggaaaaggtgctagcctatctccctttgaatagttaatcggactattatctatggtgattcatctacaaaaggctgagagttgaattattattgaagatgttaaatgtttctaactaatttgaatagctaatgattaacttgagtgtattcaaacacggcctaaatgtaaggatgtatcgagtttggtgacatac

SEQ ID NO: 42642 - DNA, 300 bp, Zea mays
atcctctgagtcacctgacgctgcagctgaatagaccaccgatcattctattgttcatcaatctcctgccttgggctcgtgagtacaagctctgacgcatgcagtgccagcttctcaccctcgatacgcctcatgatctggtatgtggaatctagctcctccttggacaagcgcccttgcttcaacaaatgttcaaactagttcctcccaagtgagtggacagtgagcaccattggcacatacagcgcaccataaaagagagcagcaacatcttcatcttcggcatagtgcccatgtatc

SEQ ID NO: 42643 - DNA, 412 bp, Zea mays
  unsure (1)..(412): unsure at all n locations
atgagttgtgccagaagcttgtttacatacctttcacacaagancaagatatgtttcgctggaacttgcacccaaaaggtcaattctcggtagagtctctttatctggcccttatcagagatgaggtaccaaacctaaataagagactatggagaataaaagcacccctcaatatcaagattttgctatggtatcttcgtaggggagtgcttctcaccaaagacaacctatctaaacgaaattggaagggaagtaaagcatgtaatttatgtcaaggcaatgaaacaattcaacacttgtttttcgaatgccgatctgctcgtatgatatggagcatgatgtcttgggcgttatgaatcccaaaaccaacttccacttcaaatatgttcgggaattggctttcacaattgac

SEQ ID NO: 42644 - DNA, 355 bp, Zea mays
  unsure (1)..(355): unsure at all n locations
agcttgtgaaggttcttcatccncacatgtgcttagcggtgatgccacagccagcccatgctagtcttagcgattaagcatgcatctagaccggcctcctctttagcaaaatcaactaaataaagtttgccgtctaatacacccttaaaagctagtgaaccatcacttcttctaaagacagacacatctacatttgtaaatagacaattatatcccatattgcataattgactaacagataacaaattatatccaagagactcaactaaaaacacattaaagatagagtgctcattagatattgcaattttacctaacccttttaccttgccttgattcccatcaccgaatatta

SEQ ID NO: 42645 - DNA, 474 bp, Zea mays
  unsure (1)..(474): unsure at all n locations
tctanagggagaacacgtgataggtctaactaatgtaacttctgataaagatagaccttgtgcagcttgtcaagcaggtaaacaggtgggaagctctcatgccaaaaatgtgatgacaacatcaagacccctagagttacttcatatggacctcttcgaacccgtcgcctatctaagtataggaggaagtaagtatggtcttgttatagttgatgatttttcccgcttcacttgggtattctttttgcaggataaatctgaaacccaagggaccctcaagcgcttcctaaggagagcccaaaacgagtttgaactcatagtgaagaagataaggagcgacaatgggtccgagttcaagaaccttcaaatggaggagtatcttgaggaggaaggaatcaagcacgagttctccgctccctacacaccacagcaaaatggtgtggtagagagaaagaacaggacactactagacat

SEQ ID NO: 42646 - DNA, 398 bp, Zea mays
agctgtgactcatttttcttcagcttcatcattctgttctatattaaaacggtatgagagaagtgcagacttcaaggagaaggtaaagtaacaggcataatttttttaccggcttaagtggcttcgagcttcgtcgccagccatttttcgtccgccttttacccaaatttgagttatgaatctgtttcctatactttgagctaggctagggatatcaattaaatctgtcggagataagctaaaatttggtctgttgacaatttttccatgttcacagccagattttatgaaggcaacagatgtgccccgagaagctagcagagcgtagaaatcggcgtgttcacctataacttcgtcgagtgcatcaacttcgccctcaaatatgtcgaaggttttcg

SEQ ID NO: 42647 - DNA, 491 bp, Zea mays
tctaaagggagaacacgtgatacggttgactaacgtgcaattctgaaattatagaccttgcgcagcttgtcaagcaggtaaacaagtgggaggagcacatcacagcatgaatgtgatgaccacttcaagacctctggagctgatgcatatggacctcttcggacccgtcgcctatctgagcataggaggaagtaagtatggtctagttattgttgatgacttttcccgcttcacttgggtgttccttttgcaggataagtctgaaacccaagggaccctcaagcgctttctaaggagagctcaaaatgagtttgagctcaatgtgaagaagataagaagcgacaacgggtctgaattcaagaatcttcaagtgaaggagttccttgaggaggaggggatcaagcacgagttctccgctccctacacacctcaacaaaatggtgtggtagagaggaagaacagaacgctcattgatatggcgaggactatgc

SEQ ID NO: 42648 - DNA, 317 bp, Zea mays
agcttctcctggacaagtgctgcacttaccgctgagtgctaatctgccacatataataacaaaggagcccctggcgttggtggagttaatgttgttaaatctatcagatattgcttcagttcctcgaaggctttttgttggcttggtccccattgaaagacttcggctgatttcagcacttcgaagaatggtaaatttctttctgctgatctggatataaatctattaagagatgccaacctccctgttaatctttgggcccccttttttgtagttggtggctccattcgaagtatagctctcaatttacttggatt

SEQ ID NO: 42649 - DNA, 494 bp, Zea mays
  unsure (1)..(494): unsure at all n locations
ctaagcttatgcaactgctgccagatatgagaggtgaactgcgtcctctgtctgacactatcttcttggcacaccatgatgacaaatgatccgagacatatacaactctgccaatactgcactgatgtacttggtcttagacaggtatgaagtgggctgacttggtcaaacggtccaccactacccaaatagaatcgtatccggctcgagtgcgaggcaatccgactatgaaatccataccaatttcatcccatttccactgagggatctgcatcggttgcaacaatccagcaagtctctggtgttctgccttaattcttcgacaactatcgcacatagccacatgctctgcgaattccctattcattccgtaccaccagaatttcttcttcagatcctgatacatcttctcactgccagtgtgaattgaataagcggtcttatgagcttccttgagaatctaactccgaatggactggacattgngaacacac

SEQ ID NO: 42650 - DNA, 377 bp, Zea mays
  unsure (1)..(377): unsure at all n locations
agcttatgaagattcttcatcccaacatgagctattctgcgatgccagagccaacccatgttagtcttagcaattaagcatgtgtcgagttcagctctatcaaaatctactaagtatagctgaccctctaacacacccttaaatgctattgaatcatcacttcttctaaagacagtgacacctacatcagtaaaaagacagttgtagcccatttgacataattgggaaacagaaagcaagttgtagtctaatgaatcaacaagaaaaacattggaaatagaatggtcaggagatatagcaattntaccaagacctttgaccaaaccttgatttccatccccgaatgtgatagctcgttggggatcttggtttttctc

SEQ ID NO: 42651 - DNA, 488 bp, Zea mays
  unsure (1)..(488): unsure at all n locations
ggagagttgaagtgctcgatttgagccacttcgtccgtatcataatcttcatccnctatggatggaacctgtgctccaaactcaacaacattccatatacttttgtggagtgaggttagatgaaatttcattaaatcactccacctagcgtaatcttcgccatcaaaagttggcggtttacctaatggaacggaaagtaatggagtatgtctagatgtacgaggatagtgtaaggcgatcttactaaacttcttgcgctcttggcgcttagaagttacggacggcgcatcggagtcggaggtcgatgttgatgaagtgtcggtctcgtagtagaccaccttcctcatcctcttgtgcttgtngcctttccgatgtgacttgtgagaagaagatttctccttcttctncttgtggtgtgaaggagaagatcttttctcctttcgtntggaagagttcttcttcttnctcttcctcttggtgcgggactc

SEQ ID NO: 42652 - DNA, 422 bp, Zea mays
  unsure (1)..(422): unsure at all n locations
agctnttccaaagttagtggtggcttcctagcttaaattgtactgttggtcctagtcagagccctttgatcatatcctcgatgacaatctcatttggcaccattggagcctgngccttgagtcgcataaacctttggacatatgcttgcaagtattcctcatggtcatgcgtgcactaaaataaggcttgggcagttactggcttgctctggaaaccctgaaagctggttaccagcatgtccttcagcttttgccatgacgtgatcgttcccgggcgaagagaagaataccacgtttgagccacgcttatgactgccatgatgaaagatntcgccatgacagccatagtgccaccatatgatgatatggttggctcgtagctcataaagaactacttcggatcagaatgcccatcatacatg

SEQ ID NO: 42653 - DNA, 379 bp, Zea mays
tatcgacaccacaatgatcatgtggttgttcatgcaaaacatccttgttgttatacacaaattgtatcaagcgtttctcttgttcctgggacaactgataccaaaacaacaccttctgctcagctatggcttcgcacaaaagcatatactttggtgatccgctgaagcagcttcgcctcttatatgcttctgatgagcttcagcttcatctatgttgtggatggcctttgaatctatccaggtcccttcagcccttctagcgacctcttgactgccatgcacatcaataggaccttggtcatatggtatcttcatgcacagatatgctgggtggacgactgcttcaaatgcattcaatgcctctcaaccattgattgca

SEQ ID NO: 42654 - DNA, 374 bp, Zea mays
  unsure (1)..(374): unsure at all n locations
agcttcagcanaatgacagcgaaagttctccattctcagataggcaggaatgtactaacttatgttgatgatatcattgtaaaaagcacgaagcaagataaccacattgctgatttacaggagaccttcgctaattntagacaggctggtctaaagctgaatccagaaaaatgtgtcttcggagtaaagaaagggaaatttcttggttgcctagtttcaacaaagggaattgaggccaacccaagtaaaatcgaagctatacttcgaatggagccaccaagtacaaaaaagggggctcaaagaatgacaggaaggctggcatctctcaatagattcatatccagatcagcagagagaaacttaccattcttcga

SEQ ID NO: 42655 - DNA, 424 bp, Zea mays
tcttgcgtcaggcttcagaccttggcttcttgtggcccacacgaagatatttaaccttataataacctctggagtaagttgatgaagatagacttcgaagattttcaacacctccacgacgaagctgctcaaggtgaatcgcaatccggctttcaaaaagcttcggtacaccacaacttcattttcttcagggtgtggacaagttttttccccttcgtccgccctcacaatggacagatcccggaaataccttcctctcatattaacaagatgattctctttgatagttgatttaccataaactgaatggcttggtcgccaggggcgatcttcggagtcttcgccaccgctgtccacatcgtaactttcactgtcaccagtatcttcagacagcccttccagaatttccctggtgatcctttct

SEQ ID NO: 42656 - DNA, 360 bp, Zea mays
  unsure (1)..(360): unsure at all n locations
agctagtnatttctatcgttcacgtgttctctatttacgtgccctctaatcctctattggattgacctcaataggaatttctgtcgctcacgtggtttggttcatgggaatcagtggcgaagaaacccaagaaaataagtaatttcgtcggtttgtttagtgcagccgacaaaattgattacgtcgctttttctgtcgaagctgacgaaaatcagtaattttagacaggtctatgtgtttagccaatgaaaatagttttatttctatcggctaaccttgaccgatgaaaaatatctaactcttatacgtttgtataaaaactcataagagcttggtcggttctacctaaatccatatgga

SEQ ID NO: 42657 - DNA, 476 bp, Zea mays
  unsure (1)..(476): unsure at all n locations
tgtccttgttgaatacaacatccttcaatcctctaatcatgcctttctttagaaccttcttgagtgtgctcattccaacatgtgcaagccttctatgccatagccatccaagagatgctttggtaaagaggcaagtccttatgtttgcatctttagaagagaaatccactaagtataggttggtgcatctaaatcctttgaatatcattgactcatcatccattntagacacaacaacctctgtatgagtgaataagcattgaaggccaagatcacaaagttgacccactgatagcaagttgaatcttaatggtgcaaccaagagaacatctgaaattgaaagatcatttgaaattgccaccttgccaagcccttggacttttccttatgaattatccncaanagtgattgtatcttgttcatcaacattttcatcaagtgaggtgaacatccgtgggtngccagtcatatgttgg

SEQ ID NO: 42658 - DNA, 441 bp, Zea mays
agactttccttgtcgcatcaatcgtgtcatttattcactcagagttccagcctgctgcccattggcttcagtagctaattacaggaaactctgtagtttttcgataggcgaagttataacaaccgaaattgtcgagcaatccatgctttctagtcttcgtttgataatgcaactcgtgaacccggtaaaagctgtccgcaaatggttccactgcttggcttcggagtgcccaaatataaacaataagtctaacaataacgttgggggtcaactggtgaatataaataccgaacctcttcagtacctctgcaataatcccatgtagtgtgaaccttaatgcaagctttagaaagctgttgagaataacaatttcatcttgttccagctgtgtggtagtctcttcttccccgaagcgcaatatcttcttctgatttcagtaaa

SEQ ID NO: 42659 - DNA, 458 bp, Zea mays
  unsure (1)..(458): unsure at all n locations
agcttgagaagtgaagcgctcgattcgngccactgcgaccgcatcataatcttcatcccttatggacggaacctgtgctccatactcaacaacattccatatactcttgtggagtgaggctacatgaaatntcattaaatcactccacctagcgtaatcttcgtcatcaaaagttggcggtttacctaatggaacggaaagtaatggagtatgtctagatgtacgaggatagtgtaaggggatcttactaaacttcttgcgctcttggcgcttagaagttaccgacggcgcatcggagtcggaggtcgatgctgatgaagtgtcggtctcgtactagaccaccttcctcatcctattgtgcttgttcacttcccgatgtgacttgtgagaagacgaattctccttcttctccttgcggtgtgaaggagaagatctgttctccttacgttaggaggagt

SEQ ID NO: 42660 - DNA, 405 bp, Zea mays
  unsure (1)..(405): unsure at all n locations
agctngctcagaccatcgaccatggttttgatggtcactgcgcgacggccaccaccgcaccggacttcgtcacagaggagcagtccacgcgcgtccgccgggctcggcgagagaagaggtgagagaaacacagttgaactatgagatagagacgaacgattgaaagtagaaacccacggcaggggcaattttgactcttagatgataaatacatggaaacaaattattaaaaggaataatacacatcaaatggtagtataatcaattagaatatatttatagtccctttttacgaagaaaatctttcgaatggcatttgtgcaaagcgtaatgtttagagtcctaaatatgcaattatctctacatgttggtgacgctgcccgatcccccattggcccttaaatg

SEQ ID NO: 42661 - DNA, 390 bp, Zea mays
  unsure (1)..(390): unsure at all n locations
tcttctggacaagcgctgcacttaccgctgagtgcgaagctgtcacacataataacanaggagcccctgacattggtggagcccatgttggtagatctatcaaatactgcttcagctcttcaaaagccttctgctggattgggccccattgaanaacttccgctgacttcaacacttcgaacaatggtgagtgtctctctgctgatctggatatgactctattgagagatgccaatcttcctgtcaatctttgagcccctttctttgtacttggtggctccatccgaagtatagctccaattctacttggattagcttcaattccctttgttgaaaccaagcatccaagatgatttctcttctttactccgaagacgcatttttctggat

SEQ ID NO: 42662 - DNA, 443 bp, Zea mays
agcttggccacgcagcggaagaccgtcgatcttatatggggaagaaatgcgatctgagggtgcgctggcaagcctacggcggtctccggtgagggcacgattgccgcttaacccaagcgcgccaccgaggtaacttttgccacgatacccagtcactttaccgcggccaacgactaccggtcacgccgcgatggcgttcttatcgccggcggagatgtcctgatccataacgcgatagtaactgatgacgatgaacagtgcctctgatccaatacacaacttgactgacagaccaacttagagcccatttttctctcaattctccatagtgacacaggttaagctctgcagcaaacttgtagagtatggtacccactacaaacttgctatggcaatcataggtatatttacacaggatcatgctcaaaaaccaacttgaagtc

SEQ ID NO: 42663 - DNA, 400 bp, Zea mays
ctattacggacctataaaactcaagctggtcatttatcgctaactgtcccgataatgaaagtgaccattataaggggaacaaaagagaaaagaagaagcattacaagaaggcaaagggcgaggcgcatctatgaaaggagtgggactcggattgctcctcctccgactccgacaacgaaagactcgccgccactgccttcaacaaatcggctctcttccccaacgagcgtctcacatgtcttatggcaagggagaagaatgtgagtactcaagactccacttatgcttcttctagtgatagtgagtctagtgatgatgacatagattattcatgcttgttcaagggcttacatagatctaagatagataatatcaatgaattgattgatgcattgaatga

SEQ ID NO: 42664 - DNA, 380 bp, Zea mays
agcttcctccagcattcttaagctccttttgctttctaaggtagcagcttgtgccactaagggtgatgaagctaggtcttgggtcatcctccttcttcatccagagttgatgatagcctgaatagcaatccagcgaactcataagttctaatgaagctgctgcatcgactagagaatctatccttggcaatgggaactcatccttcggacaggccttattgagatcagtaaaatcgatgcacattctccatttaccattggccttcttcaccataacagtgttagccaaccattctgagtattttacctctctaataactctcgcactaaagagtcggttcactttattccgagcacctgtggccttatcgacagacatc

SEQ ID NO: 42665 - DNA, 407 bp, Zea mays
tacaatccaaccactgacttagaggcccaatctatagctgagggcagtgtatctatggacacagaatacgttccgcacactcatactgactatccgattgacattacatgatggactttcccaaagaggaggttctctatggcagaatattgctccaggaggactgtcaatcaatatactctgccatcagacaccaatgttcaattctttcacaatcagctccaatttgatgtcttttggggcacattgatggataccaactttcacaaacatcaagtgattgattggactcttatgctgggacaatcacgtatggaggacctgatcccaaaatttgagacatgtggtctgtatcactttatgggtcaaaggaccgatttcagtgagatggcagtaaagcaatttct

SEQ ID NO: 42666 - DNA, 334 bp, Zea mays
agctagccaagccctcggacccgaccggacttcaccggatgcccgagatcatcctcaccggacttctgtcttccgccgccgcgcgtggaccgagctatccagtgagtctccgaccaattccttgcgctcatagcttctttggcatcccgtggacctccctgacctatttgattgaactatctcgccgtgaccaggccggtctcctcgccgccgacgagcatccccgcctgcgcgcgtggaccgaccaactccggccatctccgacggcgttccgcacaccgttgtgatccccgcgacctccccttcgccctcgaccacttcaccggaacagtct

SEQ ID NO: 42667 - DNA, 334 bp, Zea mays
  unsure (1)..(334): unsure at all n locations
tggctatttaattgcttgccattgtcaactgtgagttcggacgggactccgaagcggcaaacaatgttttgccataagaatttctgggcagtcttcgatgttattgtggatacaaccctcgcctcgatccatttggtaaaatatttgatagcgacgaaggtgaacttgacgttctcctgggccgtgggtatagggcccgacgatgtccaggccccaccgctgaatacgccatgtgtgggcgattagcttcgngaactgcgaagggcttcccgatcgtggagaaaatttctagcaggcttcgcaggaccttgtgacccagattgtggcacatgat

SEQ ID NO: 42668 - DNA, 367 bp, Zea mays
  unsure (1)..(367): unsure at all n locations
agctngacacaaagagaatgctcttatcatttatagcttactgcaaatcctcaagcaaaggaaagggaaggagtagaaaccccgctcgaagaaggtttactattggtgtgtcacacccagatttaaagggcatacccaagtgcgtctcatatgtgtgccaaataagatcaacacatataatgactcatagtatacggacgaatgtcacaaactttattacataacgaaaatgtattacaatataactaataataaattaaacgaactaatattattattccatggtgccatcaagctgattgggagacaacaccaagacctcgtcgaacttcccgtagtagtcctggcacctgctcttcacctgggg

SEQ ID NO: 42669 - DNA, 436 bp, Zea mays
  unsure (1)..(436): unsure at all n locations
tagaaaagttaagagactaagcaacagttggtaagcaagagctaagatatcaatccaagcaaagcatgcgtacgaaatgtgctcggagtgagctcttatatatacgcccagcgcactccaagttggagggccccatctgtcattgactgttgctattctatcaaagggaaggtgttctttcggaccttcggcttaaggccttcatccatatcgcaatctgaattcgntattctaacaaatgaaccttgcgaggggctactgntgggggccttcatcttctgaaggtcctctaaaacatgatataacaatgtttttggagtgtaatacatgaataggtaccttcggactcggatcacaaccacagtgtgaagaagcacatagaatacgaaagttgacgcagagccgaagctatgcgcaagggagcttctgcatgata

SEQ ID NO: 42670 - DNA, 424 bp, Zea mays
  unsure (1)..(424): unsure at all n locations
agctntagaacgtactaagcacatgccgggaaatattgttactcggtaacctagtacctgagtgaagccgggcgcggactttatccctcatgcgacctgagactgggtctcccatgctagctatggtgggtacaagtgcggtcactgcacggcggcagccggggtcagtggagcattgtatgccaaggcggtgaggcctggacgcgaacggggaatcgatggggacggttgtcatgtgtggggtcggagtaccctgacatgccgtgtgtttaggtttcccttgcaaggttaaaactcgattcgaatcgtctgcttctcgcagctaatgagactgcttgaccccttgtactgcatcgagtaagaagtgaaatgagggtacatgagataactngttgatagaactanatgcgtgttaccatgtatg

SEQ ID NO: 42671 - DNA, 477 bp, Zea mays
  unsure (1)..(477): unsure at all n locations
tctatagggagaacacgtgatacgtntgactaatgtgcaattcgaataagatagaccttgtgcagcttgtcaagcagggaaacaggtgggaagctctcatcacaccaaaaatgtgatgacaacatcaagacccctggagctgctacatatggacctcttcggacccgtcgcctatctgagcataggaggaagtaagtatggtctagttatcgttgatgacttttcccgcttcacttgggtgttctttttgcaggataaatctgaaacccaagggaccctcaagcgcttcctcaggagagctcanaatgagtttgagctcaatgtgaagaagataaagagcgacaacgggtccgagttcaagaaccttcaagtggaggagttccttgaggaggaanggatcaagcacgagttctccgctccctacacaccacagcataatggtgtggtagagaggaagaacaggacgctaatcgatat

SEQ ID NO: 42672 - DNA, 392 bp, Zea mays
agctcgaacgaggaagaggaggttatgatctgtctcgatatacagctggccgcggtgaggttaggcttctggtggcggagaacagatttggtgcgaacgtgaaattggagagctgtggggagtaatcggagctacgcgtgggttctctggacgcacaattacctagcggaactggctgaggctttaatttataagcatcttcatcggtggcgcccaatttggtcgagcaacgcggcggccggagataaggaagaggtctggcgtcgtggttacatgttcccagccgtggcgagctcatcggcgatgatgggacggcagtaaggaatcacggcggtgccgtggaaaggctcggacacgtggcggtcacatagatggcacgacgacggcgagcg

SEQ ID NO: 42673 - DNA, 459 bp, Zea mays
  unsure (1)..(459): unsure at all n locations
tgatatgaatgcgatttggacggctagatttcagtcaagcgaatcacattcaagacggcaaattaaaacccttcataagcaagaccatgagtacctttgaattgattgatgctcaaatcagctcatagcttgngggctacaccgtgcatccaatggatacaaaagcggaacgaagctgcactcaaaagcgtggaataatcaaatagcacgatttaattttggagtcttgagccaattaccttaaaaattgtcttgagtttcggnggcttgtgggagatagatattcctaggtccttctgagcacagaaactntccatgggctgcttgatgggcttttgatggtttgcctaacaaggcatgccaatgggccacaaccaggctggatgagtttgaccaacggagttatgcgcaactgatgcaaaaagagcattgatgcctcgcgtatgcagaatgcatgta

SEQ ID NO: 42674 - DNA, 326 bp, Zea mays
  unsure (1)..(326): unsure at all n locations
gatactctnagtcagctgccgcgtgcgagcttccgctgcatctatattatggatttctgttgaatctgaccagtttccttcggcctttgtggcagctttctgactttcatgaatagcaataagcccttgatccgaaagtatcttcatgaaagatatgtcggatgaagaattgcttctaaagcattgagtgtgccacgaccaatgattgcttcaatgaagatttgcttcaaaagcatcgtgagggtattccatgtcgactatatcaaacacaacttgctcagtccttgtattgttgacaaatccgaaggtcactggcatcgtgatct

SEQ ID NO: 42675 - DNA, 404 bp, Zea mays
  unsure (1)..(404): unsure at all n locations
gtgggagtgatgatcatctcaagactagtcttggaatctttccatattctgnacagatttcgaaactgaccttgtgtgtctaagttaaacttctaatcacttcttataaattataaagaagtggtagcactttccttaagctttccaacacattttgggtcaccctttntggcgacctataagttaagctacaactcgtttaagcggcgtctctgaatctattcaaatttggacaacaaagcctttcttatgtctattgatcttgatatgcattgaattaacctaatactgttatacatgaaatatatacaaatctactagcttcctaaaaagtctacgagcgcctcaattggatgactgagactccaattatggatttttgaagtgagtanttgaattctgtc

SEQ ID NO: 42676 - DNA, 457 bp, Zea mays
  unsure (1)..(457): unsure at all n locations
agctntaacccctgcgagacctttccccgtttctttctaaccttaacgaatgcgatatcggatgccatactttatgcatatttactttatttgtccccttgtgtggtgtactgtttgtttcctaatttgaatggatggatgtatgtatgcttgcatcgcatagagaacgatccggtcgaagagcccgaggaacccgcaggagaagcccctgagcagcaatcggttggtggaggcaagtgtctcttgacctatctctgtcctattcattctttaattcacctcccgctttacacatttatgcctaaagaatgactagttttgttatccatgtccttgcttacctatctgagttggattattattgcttagctttatgctattgctcaactctaatcaatgaacatgatgagattatncatgantacgctgtttccnctttcttatgtngatgttatac

SEQ ID NO: 42677 - DNA, 373 bp, Zea mays
ggagactagggatgcagccaaatatttgtgggcataatgctatttgttcttgtaaaacagatggcaagagagcgcgccatataacttgtggtgagcccctatttatacacccattatgtcgaaaactggaaggccccgcttgtcaatgactgttgctattctatcgaaaggaaggtgtatttcggaccttctgcccatagccttcgtccatatcacaatataaacttatcgttacagcaaattaatattgctaggggctactgttgggggccttcggcttccgaaggatctcacaaacgtaatttgactatgttttccaagagaaatatatgaacaggtaccttcgagccaggttgcgagtaacaaaagcatg

SEQ ID NO: 42678 - DNA, 459 bp, Zea mays
  unsure (1)..(459): unsure at all n locations
agctcgaggatgtgtatagattaccgttctctttatgcggtaactatcaagaacaagtatcctttgcctcgtattgatgttctctttgaccagntggtcggcgccaaagtgttttccaagatagaccttcgctctggctaccatcagatcaagatacgagcaagtgatattccgaagacggcattctcaaccagatatgggctatatgaattcttggtgatgtcattcgggctgacaaatgcaccaccatatttcatgtatctgatgaattctgtctttatgccggaattggacaagttcgtggtggttttcatcgatgatattttggtgtactcaaagaacgaagaagaacatgccgggcatttgcatgtagtgcttcaacgtctgcaagagcaccacctttattgccaagtattcaagtgtgatttttgcttaaagaaatcaaattctggatcacac

SEQ ID NO: 42679 - DNA, 450 bp, Zea mays
ggtgagggagaacacgtgataagttagactaacgttcatttctattaagatagaccttgtgcagctggtcgagcacgtaaacaagtgggatgagcgcatcacagcaagaatgtgatgaccacttcaagacccctggagctgctgcatatggacctcttcggacccgtcgcctatctaagcataggagggagtaagtatggtctagttattgttgatgacttttcccgcttcacttgggtgttctttttgcaagataagtctgaaacccaagggaccctcaagcgcttcctcaggagagctcaaaatgagtttgagctcaaggtgaagaagataaggagcgacaacgggtccgaagtcaagaaccttcaagtggaggagttccttgaggaggaagggatcaagcacgagttctccgctctctacacaccacagcaaaatggtgtggtagag

SEQ ID NO: 42680 - DNA, 305 bp, Zea mays
ttaagtcaccgccgcatgcagctttcccatccctctcgattgtcttttttggtcacaggacccagagaagcattgatttatggtgcgcggatgatcatccatactatcatatttggaaatgctgctaggggatatccttcactacttagtttcaatactgtctttaagtggaattcacatgattggaataagagtattaagtgaatatattggacgcacatacattgaaaccaaaaaacgcccgaaatacatcatctatatagtccaaaatgaataaagcacctaaagcatcatagtatatatct

SEQ ID NO: 42681 - DNA, 401 bp, Zea mays
atgtgacccgtcgaaacatgatgcgagctatctggcaccaaatatgtgatgacaccgtcagagacccggcggagatgctgcatatggacctatacatgatcgcggagaataagaaccttctcggacggacgcttggcatacggacacgcggacagatgaacaggtatatttagctcggcattctgaagcagaagtatgcagccctaggaagcgccagtggcgaactcaggatgatctgacctgcgcacagtggctctgtgaataaataatcgacctgtaccagcatgccagcgaatgtgactgcgaggtgggtcgtccctgagaaccgaacgggacaagctgagcaatcgagattctcctgatgtgtgtgcaagagggtcgtactcacgaacaaatctgcg

SEQ ID NO: 42682 - DNA, 367 bp, Zea mays
  unsure (1)..(367): unsure at all n locations
agctttgaattgttccttagtatctctagaactttcctgtatgtctcccagaggaacttaaaccatggagttacaacctctttatctgatcggtcctttcctttctccccactgacaaaactgagcatgaggtcctcgggacgcttgtctgcttcaagatcttcgacatccagagcatcatccagtgcttcgacctgactcttagctagttcagctntctcatttgaaagctgcatgaagtgctttatgacatcctccaaggatgacacgtttacttgctggcagacaatcctatactgaataagaccatcttttgcaaatctgcctttcctcatgtcaacacagagttctacatacttcatcatga

SEQ ID NO: 42683 - DNA, 413 bp, Zea mays
tactcagcttgtcagcatggtttggtacccatcgctagatgggtccattatggttagtcaacaaagatctatgatccaaaaagtcctttgtgttatcgccttggtaactcattaccttactagcacaagttacaattttgggttgcctagttacatgagaattaattgacaagctacgagtggaatagttaccaatgggacaatccttgcattgatgtccctttgaaagggaattatgcttacacctatttcctaaatgattttggaggttgaattgcccaacacaaataattggactaactagattgctctagtgtataagttatacaggtgccaaaagttcacacttagccaatataaagaccaagtattgggttcaacaaaagagcatagggacaaccgaagacacctct

SEQ ID NO: 42684 - DNA, 343 bp, Zea mays
  unsure (1)..(343): unsure at all n locations
agcttcngcccaacagcagagttcttttcttttccagcgccaaagggcacaggcgccacaggcttctggggaaggtttggagaccaccccacacaaatatattgcctgttctgtggtgaagacaaaggccatactaccacgatgtgccctgttaccatccacaagcagaaggaaatagcggaagcagcagcgcaacagagtcagccgaagcaagtcatgcatactgcttcgtatcactcaccttatattccacaatatgtaagccaccaccctgcagcttctgttgcttcggcaagccaatcccaagcattctggcagcaaccttcaccgccaccgccgattc

SEQ ID NO: 42685 - DNA, 492 bp, Zea mays
  unsure (1)..(492): unsure at all n locations
gacctataaaactaagcttctaagggaaacacatttaggactacaaatggtctttttagaaagacagggattgtagcgcatgtcacgcatgatagcaagttggcacccatcatccacacaagaacatcatgacgaccgacaggccgcttgagctactccacatggatctattcggcccgattgcttacataagcatcggcgggagtaagtactgtctagttattgtggatgattattctcgcttcacttgagtattcttgttgcaggaaaagtctcatacccaagagaccttagagggattcttgagacaggctcaaaatgagttcggcttaaggatcaagaaaataagaagcgacaacgggacggagttcaagaactctcaaatcgaaagcttccttgaggacgagggcatcaagcatgaagttctcttctcctacacaccacaacanaatggtgtagtggagaggaaaaatagaactctattggacatgg

SEQ ID NO: 42686 - DNA, 267 bp, Zea mays
taacagcaggcctgcaagcatgccaacaccatgacgagagcgtataacctatttttgttctctaggctgtgtagctaattcctcaacatccacaagcggtgtctcacagggcgctgaaggacaatatgcgcttactgactcattcgaccgcactccttctaaaacgcatgtctgctttagcattaggatctgtaatgaagagatgaccaatatcaatgggcttggagctagagggctgtgcatgactattaacaactataacaacac

SEQ ID NO: 42687 - DNA, 428 bp, Zea mays
  unsure (1)..(428): unsure at all n locations
tggacgtgaaaagtaccttnctcaatggaccaattatggaagaggtctatgttgagcaacctaccggctatgaagacagtgagtatcctaacaatgtctataagctctctaaggcgctttatgggctcaagcaagccccaagagcatggtatgaatgccttacggatttccttattgctaatggcttcaaagacggaaaggccgatcctactctattcactaaaactcttgaaaatgacttgtttgtatgccacaattatgttgatgatattatanttgggtctactaacgagtctacatgtgaagaatttagtaggatcatgacacacaagttctagatgtctatgatggnggagttgaagtattttctatgattccaagtcaagcaacttcaagagggcaccttcctaagccacaccaagtacact

SEQ ID NO: 42688 - DNA, 261 bp, Zea mays
  unsure (1)..(261): unsure at all n locations
atcttaagtcacctgcggcatgcagctctgctcggcagactatacanaaaggtcactctcaatgggagtgtttaattgcctgagccttgtgttccctctcgggcataatgctcgacggcggcgtttctttgctctcangtggcgtgaactcagtctgttcttacaaaccctatttgcgagttgacatatgcaagggttaagtgctacatatgtcgtgtgattggacatccctagcctggcattaatcaacttggattgtcg

SEQ ID NO: 42689 - DNA, 474 bp, Zea mays
  unsure (1)..(474): unsure at all n locations
tataacctcagcttggcttctaaggtacttggcctttgccacatggaggacttcattgacgtagtatactggcttctggatggttcagacccctgcggttggtcctgagtcctcanacttctagtcttccatcaacatcgtggtggtcggaccaccaccttctcctaggggaactttctgactanccctgggttgttgtgccgtcctttcagcgaccagcaccatgctcaccgcctttgtagccgctgcaatatataagtacaatggctcccctggctctggagctaccagtattggtagggacacaaggtgctgcttcaactcttgaaaggctcgttctgcctctttagtccaagagaatggctcggacttccgcaatagcttgaagaagggtagcgccctctcagccagtcttgagatgaagcggctaagagcggctagtgaccctgtaagcttttggacgtcttgatgcgg

SEQ ID NO: 42690 - DNA, 435 bp, Zea mays
  unsure (1)..(435): unsure at all n locations
agcttctaagggagaacacgtgataggtttaactaatgtaactntcgaaaaagatagaccttgtgcagcttgtcaagcaggtaaacaggtgggaagctctcatcatgtcaaaaatgtgatgacaacatcaagacccctggagttacttcatatggacctcttcggacccgtcgcctatctaagcataggaggaagtaagtatggtcttgttatagttgatgatttttcccacttcacttgggtattctttttgcaggataaatctgaaacccaacggaccctcaagcgctttctaagagagagctcaaaatgagtttgagctcaacgtgaagaagataaggagcgacaacgggtccgagtcaagaacctcaagtggagagtatcttgagaggacgaataagaacgagtttcgctcctacacacctacaaatgggt

SEQ ID NO: 42691 - DNA, 475 bp, Zea mays
  unsure (1)..(475): unsure at all n locations
tcggtggaagatatggagatcaacccagaagactatattgcttattctgcggtgaagataaaggccacaccacaagaacatgccaagtcacaattcagaaacaaaaagagattgccgaagatgaggcatggcagaatcagccgaagcatgtcctacatactgcttcgtgctattctccctacatcccagagtatgtaggtaatcaacagcctacggcctctgtcacttcggcaagccactctcaagcttccagcaccaccactcccaccaccaccactattaccacctactctgacccgaagccagtagccagaagggcaccagcacgctcaacagcagcgcgacttttgagaggagtctgatgctcgcacagttaacagcactgtgcctaaatccaagcacatctactaaagagtatcctactcttgatgtatcttatctnttctgccatttattttttgatgaaaacaagcac

SEQ ID NO: 42692 - DNA, 295 bp, Zea mays
  unsure (1)..(295): unsure at all n locations
ctgccgcatgcaagcttntgcttttgggtcgcaccgaagggtctatccccaagctgtgctcaattatggctcggctgactccgaccagatcgagggcagaccaggcgaagacatctttattcttggtcaggcagcagagaagtttctcttcttcaagtgaggtgaggtcttcgctgatagatactgtctgcttgggccggggctgatcgagggggaccagcttggtcccgtcttggcactgcaactgtgccttgtcctgctgcttgtcggatgggctggcccgcgcaaggacctc

SEQ ID NO: 42693 - DNA, 480 bp, Zea mays
  unsure (1)..(480): unsure at all n locations
gcttcgcacctctgaactaactcggctgcatcactcttcgctgttgttcaatagaattctgacctgataaccttcccgactagtgtcttggacgccgcatgtattccacatttcccggcatggacctcctccagaagttgcttcccagtagatgagagaatgcatttcatgaggacgcctgatgcaccccttctgtataatgtctccccaatgagtgtgtagtgagccgactgtcgggcaatgcgctcggctgaatatttgtcatctggttcctcttcattctntatatacctgatgattggccttctccagtcatcagagtctgactcgggttgatctataatattacactcttttgcttgatccattgagatgctcggctgtagtatttcttgcacaaagactccaggtgggaccctgagtcgactggatcctagcttggacaatacatcggctggcgtgttccatctcttttacatg

SEQ ID NO: 42694 - DNA, 227 bp, Zea mays
ctctgtagcttattcttcaataaccacaagctctgtcttacggggcactgaaggaccagcttcaatttcagcctaaatcgatgcagcttcgtctattggctgttttgttttagctttgggatgtgctttcgaagcttcaacaagatctcttggagtagaactcgaggtctttgctgtctccagcacaacatctaccacacttgccatccttctcctcttacgacttg

SEQ ID NO: 42695 - DNA, 428 bp, Zea mays
  unsure (1)..(428): unsure at all n locations
cgacagacatccaactaaaccacactgcggtgtacgtgaattgctttctattatatataatgggctctaatcggtctctgtttaacttctacatgtccacgctcttgtgggacagtatatcatgctttgtggtatggctcggtatgttatgtttcttgactgttgcatctaattactaatcttatgttacttttggttttagcttcatcatcttatgttacatgttctggcaggatgtggctgttaagatttctccaaccagaatttcagaagaagtgatactacctttgacaagaggtagattccatccccagctacaacttctgtcagcttcaacaggtggaatgcaggcctgcagctatcctagaactgcagaggagatattagttatggaccnaataaagagccctccacacatgaatcaaatt

SEQ ID NO: 42696 - DNA, 440 bp, Zea mays
  unsure (1)..(440): unsure at all n locations
agcttatttatcttatatgatgtgaaactcgtttctggcaaatttggtgtgatattgttagcattcttcttgcttctgcctcttcccaagtaatgcttaatggtaaaccaggtaggagaattattcatagacgaggtcttcggtagggggaccctctctcccccatgttgttcatactggntatggatgtgctaggctatttaattaaggaggctgctaatgatggtttgatggtgcctctgatagaaagttcagttcataaccgtatttctatttatgctgatgatgtggtgattctcctccacccggtggctctcgatttagtaatcaccatggacattatcacgaatttttgggaggcagctctgctcacaatgaatattgcaaagagcagcattttccccatcactgtactcgtgaaatctggaaccatcataatc

SEQ ID NO: 42697 - DNA, 420 bp, Zea mays
  unsure (1)..(420): unsure at all n locations
ttgagcatannatctctcaattataagcgtagataccgagcctatgtgagaggttgatagctatagtacgttgttattacgatcctatttttatggcagaatccgaaaacatggcagtcgcatgcatgcggtttctatttttatacagatccaaaaattatggcaaaatacatgcatgagtcanacacgttcccttgcatgcgcgtaaatttaagaaagatatgtgtggcggtttctaatttaaatgctttaatttctacatataattaggatcgctgcaacagccatgcatctagactcgtaatgatcattttatgatatatactgatactaaatatactacattgngtagataattatgcaattcggtatactggataanaatactgtaccagctgcatgcgcacgaatatgctcgct

SEQ ID NO: 42698 - DNA, 454 bp, Zea mays
  unsure (1)..(454): unsure at all n locations
nttatggtttgtatagatatgatagatattctctagcaaataatgacgccatatttttagggcatgaaccacaacggctaattccaggtcatgagttggataatgttcttcatgccggcgtaactgccttgaagcgtaggctatgactcggccttcttgcattagaacacagccgagaccactgcctgatgcgtcacaatacacatcaaagggcttttcaatgtccggttgagctaataccgaagcaatggtcaataacactttcagctgctcaaaggcttcattacantttgaagaccaattaaatttggtatcattcttcaataaacttgtgattggcttcacaagcttggaaaaatctggaatgaatcggcggtaataaccagccagtccaaggaaatatcggacttgatgtacangtggtggagggttccactccagaatatncttgact

SEQ ID NO: 42699 - DNA, 67 bp, Zea mays
cggtttcaagaaggacacatgttttgtcccagcaacagctgagtatactacaacaggtctggcgtta

SEQ ID NO: 42700 - DNA, 454 bp, Zea mays
  unsure (1)..(454): unsure at all n locations
tgtcagacgaagtntgcttgtgctcctcttgtgtcgtaccaaatcttttctaatgatgaagctcctataatatttagtagtatgccgaanataaatggttagccgtgttcttgaggacctttggaagaggaaggccctcaacaaagtgtaagctcaaaggaagacaaaattcatagtaaaataaagatgcatgagacacattgatgtttatcttgtggtttggttaagcgtaatatgcttgcctactagggctggatatcgagccagctcggctcggtcgttaagctaacgatccacagagtctgtagccccatgttgttctgtctcccagcaaatactcaacgtgatcatgcatgcatgtatcattctgcacaatatggtcattaaggatgatcaaggacgagcatgcgacgtgaatgactgtgagatacttaagtcattcattacatcgcca

SEQ ID NO: 42701 - DNA, 397 bp, Zea mays
  unsure (1)..(397): unsure at all n locations
agcttgcttcgtgccttagcacattttcattcaacaaagtatttccaaagaattgcttcgtattcaatctttctgttgatgcaatatgatgtatgatgtgatgctatgctaaatgatgcgacgatatgatgcaatatgatgaagttttaacacccacacatacgcgcacaccggtacacggaagactctgcatccccttaggaacgtcttttgagtctaagctctgcattctcttangaacgacttttgagctctntcaccttctatttcggtggtataagttctgcatcccctcaggaacgactnttgaacttctttgtcttatatttcggcggtatttggctctgcattccctttggaacgacttttgagcagaaaacttacactgcgcttcctt

SEQ ID NO: 42702 - DNA, 340 bp, Zea mays
  unsure (1)..(340): unsure at all n locations
tcctanaggctggattaagaattcccctttatgggattattgtatagatactgaagaatttcggaatctattttcaccagctaacccctaacgctatcgtgaggcttagtgtttatatctgggcactccgaagccaggcgatggaaccgttcgcggacagcttttgccgagttcatgaactgcactatcagacaaaggctagaaaggatggattacatgacaattntggttgctataattttgcttatcgganaactacgaagtatcctgtgatcagctaccgaagcaaatgggcagcagggtggaaatcggaatggttctatgttaaggttgatgatga

SEQ ID NO: 42703 - DNA, 409 bp, Zea mays
  unsure (1)..(409): unsure at all n locations
agcttcgcgagagggtgagttcggccttgaggtgagccgtctgagttaggctccttcgagtgtgccctccgcctctctctccttttctatatccctccctgggaaggccctggacatccccttttatagatacaaggagatgactcagctgtacatatggtggtgtagctgtgcgctaacatggcagatggagaagtgcttgagccctgtagaagcgtanctggcgttgcggcccggagtcctgctaacgtttctttgccttcgtagagagttgagaacaatcgacatcatgggtgcatgtacggaaccatcattacctgttgctagagtaatctagatgggacaccggtcttgtttcttcgtatcatgaggcagctagctaggcggtagggaattatgtatctcttgt

SEQ ID NO: 42704 - DNA, 333 bp, Zea mays
  unsure (1)..(333): unsure at all n locations
tataataagagaatgganacaatgactagaccatatgtgataatataagggaattatataaacatggagtatgctctccactcctcaagtgtttatcaagagctgaagatattgaattaataaaggagatacatgcaggtctgtgtggatctcatattgggtctatgaccttgttgggaaaagtgtttagacaagggatttactggccgaaggcagcttctattgcagcagagctagttcaaaaatgtgaaaattgccaaaaatgtgcaagagaccagaaacgaccttcatctctcactcagctaatacagcccacctggccgttgcaaagat

SEQ ID NO: 42705 - DNA, 439 bp, Zea mays
  unsure (1)..(439): unsure at all n locations
agctctggcttcactactgatccactcgatgatgccctcagggtcgccccgtatgaagttgtctttgtttgagcacgcgcccacgctggcgaagctagtctttatctttcttacacactccattgatttttcagaacatttttctttggatgcgcgaagatctgcaactggtttttcaaaataattattccagtattcgctggcatctcgatcagcttcggcaacagcgcattttaatttggcctcagctaattgcttccgaaggtcttcaacttcactcttttgggcctcagcttgaactttggaactacgttcatctctctttatcttggctactaatgaaattaatactttatcatgttcaaggccttcattacttagttcaatcacctctcgacgaagattggtcagagccattatgcatncttcatctttgata

SEQ ID NO: 42706 - DNA, 410 bp, Zea mays
  unsure (1)..(410): unsure at all n locations
ttacgaccttgaactcagcttagcctgatctactctccagccctcattatgatattatttttcttgtcctcgaggacttgttgcatgctcaatgctatacttaacaacatactctgtagaataagccaacatcagaaaattttgcttcatcacaaaaataaaagaaacccaggcaaaaggaagtttaccttgaaattggagtaaaatagattgccgatgatatgttntcgccggtagccgctaatatcagcctcaagattcgggaaaccgacactcttcgatagagtgccgactatcttcgccttggcgcgatcgcgaatgcattctaaggcttcttcatcaattccaccaaagagcatagcttcaggctggtagttacaggatatcccatattcctgtagctccttctt

SEQ ID NO: 42707 - DNA, 463 bp, Zea mays
  unsure (1)..(463): unsure at all n locations
agctntatccgtcgttccattccagcccctcttgggataatgaatgtagcgtaggatataaaaagtgagttctatgcccgattcgtctatagaaaaaggcttgtccttttagagctcattggataggagagaagagttctcaaggcatctttcaggacatatttatttatttactctttttatgactggcctaagcgcccccgagaactcttaaggggaccaagagttgcaaaagatcgagtggagcttgtgagagtaaatttccaatctgagaaaccagcatctgcttatggtgcaaaatcccatattcgcttttcagctaactaagtagagtgcccgcggatatatatgttcttttcacggatacgctttttatgaatatgcacntccagatcttggtgggctgtttttcttttattggccgctgaggatagccactaccttggagggtcattgtttaaaa

SEQ ID NO: 42708 - DNA, 495 bp, Zea mays
  unsure (1)..(495): unsure at all n locations
cctttcccggaagcaaatagaatagaatcctatcctatgaaacaagcttctactattcaaatcaaacctcagagtcttcggatgcacgtgctttgtgaacattccatctcctgcacaagacaaactcagctgtgaaggaatgaatgggaatgggcttgtcggctgtgaagactatcatttgtaggcgagcgaagcaaagccctagttcaatctagaggccgtcacgaagggatccctcgggtcaacaagcaagggatgagcgctttgttgctttattatcacattagagaagcggaacctccaagctcagacatctcgaactcagaaactacccttctatcccaccctgctcctccggcatcggaagcagaactacctgaccgaagggagatagacaggaanggaagacggtcatacanaggccgaataaagctctcttgaagctgcatctgaatagacctagagtcactcagtacatacgaaccccttgataat

SEQ ID NO: 42709 - DNA, 370 bp, Zea mays
  unsure (1)..(370): unsure at all n locations
cactgatcagaaaagtccaactcatgtgtgttatganatgggaagaaccanaggggtcgcttctagtccagggggccattctatgaattatttngcatatactgcaagaagactaaccatgttattgagaactgttactaactgctgaacaatgagaataggaacaacgagaatggttagactggaggtactgtctctgttgccattcgaaataattctgataatggngatgtcttattgctttgctggttgtgtgctgatgatgcccatggatcctcatttgcttgtcatatcatgttgcctaaaaattttgttagacctatgagctggcaaacggggactctttgatgggatattccctgcattgtgt

SEQ ID NO: 42710 - DNA, 462 bp, Zea mays
  unsure (1)..(462): unsure at all n locations
agcttgcttacttggtaagatgaccaacgcgcctttcacttgtntaccggagaggacattagatttattggaactcatacatactgatgtgtgtggaccaatgagtacgacaactacgggaggattccaatacttcataaccttcactgatgattntagtagatatgggtatgtctacttaatgaaacacaagtctgaatccttagaacagttcaaagagtttcagaatgaattagaaaatcagcgtggcaagataattaaagcactgcgatcagatcgtggaggtgaatatttgagtcatgagtttagcaatcatctaaagagttgtggaattgttccacagcttacgccgcctggaacgcctcagaggaatggtgtgtctgagcgacgtaatcggactttattggatatggttcgatcaatgatgagccagtccgacctacctttgttgtcttggggata

SEQ ID NO: 42711 - DNA, 420 bp, Zea mays
  unsure (1)..(420): unsure at all n locations
ctaagcttgacgagctgaaccgggacncgcgcaccggaaagcgctatatgctcgtctgattcggaaccccgccggagcacgtggaccgggtaagcctctgcacattatcccaattcgttgcacgcatggcctctacatcaccccatggagctcctcgtgcgctttaattgaaccctaccgccgtggtttggccggagcaagagccgncgatgacctccgccgcctgcgcttgtggacagggccgctccgaccacctctgacgccgacccgcacaccaacgtaaccgccgtgacctctcctacgtcattgaccaccccaccagagctagagatggcaatgggtacccgctacccgaaacctggtgggttttgctctatanggtatgggtttgggtcaattctctaacatgggtatgtaatg

SEQ ID NO: 42712 - DNA, 426 bp, Zea mays
agcttatcgtcgttcgtacctcccaatagacatgccatgcggtagtcagcgagccataacttcggtttcgtctcccctgagtacttggtgatggtagtcggggctcgaaaccgggccgagaacggcgcccggcgtatagctcggctgaagaccagcgggcccggtggttcaggtgaggggctttggtcctcctcactgtcgtatcgcccaccctgccgagggtggtagcctcggcgtagctgctcatcgaggtgggctcggacatcgtggtggtgtccgatgtcgccgaggcggtctcggaccgtgggagccttgtccttcgcgggctcagtgtggaacgagacactccgctcctgtcgggagggcccagctcggtgctccgaggcggctctcgatgtgggaggctgagctcttggcctgctgact

SEQ ID NO: 42713 - DNA, 414 bp, Zea mays
  unsure (1)..(414): unsure at all n locations
aggaataaataacattctcttcacctatgattataaaaacaatgtactttaaaaaaatttgtaaacaagtttatgcaaattagatcataaataataacaaaattattctcttcgcaccaataatttatttccctaccttcctaaaaatttcagagcatcacatgtgattcttaaaatcatatatagatatattcacaaactggccacgttttagctttcccatgcactcaacaagttgatttgtatcaaatgcatctgcaaggcaaagaatgaaacctactttcagctaagataaactaaatcccagaaactaaaagaagagcatattttcacatgaatgcatatcaagttacaacccacagtgagtngcacacgaatttcaaataaaaacaagagcaatcaatgagaattatg

SEQ ID NO: 42714 - DNA, 294 bp, Zea mays
  unsure (1)..(294): unsure at all n locations
cgcttggtgccgatggagaagcacttgtcttttatatcttggntggcgaactgcttgccgctgtccaccgttagttcggatggtactccgaagcggcacacaatatattgccacaaaaatttctgggccgtctttgatgtgatggcggagactgccctcgcttcaatccatttggtgaagtattcaacggctacaaaggtgaacttgaggttcctctgagccgtgggcaggggcccgacgatgtctacgcctcagcgctgaacgtgccacgtgtgggcgatcagcttctgaact

SEQ ID NO: 42715 - DNA, 387 bp, Zea mays
  unsure (1)..(387): unsure at all n locations
gacctatgaaactcagcttctaagggagagcacattntaggattaacatatgttcatttttagaaagacaggatctgtagcgcatgccaagcanggaagcaagttggtgcccatcatccacacaagaacatcatgacgactgacatgcctctggagctcctacacatggatctattcggtccgatcgcttacataagcatcggcgggagtaagtactgtctagttattgtggatgattattcttgcttcactcgggtgttctttttgcaggaaaatctcacactcaacgtaccttataaggattcttgagacaggctcataatgagttcggcttaaggatcaagaanattagaagcgacaacgggacggagttcaagaactcacaaa

SEQ ID NO: 42716 - DNA, 442 bp, Zea mays
  unsure (1)..(442): unsure at all n locations
agcttcangaccaagggtttcaaccttntcattcgcaatnggctctgttgctttntcttcaattacgacaggctctgtctcacggngcactgaaggaccagcttcaatttcagcctaaattgttgcagcttcgtcttctgcctgttttgttttagctttgggttgtgctttcgaagcttcgacaagttttcttggagtagaactcaaggtctttgctgtctccagcacaacatctagcacatttgccatccttctcctcttaagagttgtggcagaacttttttgtgccttctgcactgtcaccttcgatgaagggctcaaaatttctggcacttttatttcttcaatatttgactcttcagctttacctttaccaaccttcgtctctactagctcagctgaaggtagcttccgcattgtagttggatcttcaatcctctgt

SEQ ID NO: 42717 - DNA, 365 bp, Zea mays
  unsure (1)..(365): unsure at all n locations
tgacagacatccaactaaaccacactgcggtgtacgtgtattgttttctattatatataatgtgttctaatcgntctctgtttaacttctacatgtccaggctcttgtgggacagtatatcatgctttgtggtatggttcggtatgttatgtttcttgactgttgcatttaattactaatctttgtttacttttggttttagcttcatcatcttatgttacatgttctggcaggatgtggctgttaaagttttctccaagcaagaatattcagaagaagtgatactgacctttcgacaagaggtagatattcatccccagctacaacttctgtacagcttctaacaggtggatatgcaggcatgc

SEQ ID NO: 42718 - DNA, 459 bp, Zea mays
  unsure (1)..(459): unsure at all n locations
agcttaccacatttgaagcatgagcgcttcctctttgtcttggtcttgcttggctgccccttgcgaccctntagcgccgtcttgaatctcttgatgatgagggccatctcttcatcattaagtccggccgcctcaatttgtgccaccttgctaggtagcgcctccttgcttcttgttgccttgagagcaaggggttgaggctcgttgattggaccattcaatgcgtcgtccacgtacctcgcctccttgatcatcattcgctcgcttacgaattttccaaggacttctttgggcgacattttggtgtacctgggattctcacgaatattattcaccaaatgaggatcaagaacggttaaggaccttatcatcagtcggacgacgtcgtggtccgtccatcgcgtgctttcgtagctccttactttgtaataacggtcttgagccggttgatgtttgtgt

SEQ ID NO: 42719 - DNA, 433 bp, Zea mays
  unsure (1)..(433): unsure at all n locations
ttaactctcgcgagacctttccccatttctttctaaccaaggtatattcattgtcgcatgtgatattctatacatatntactntatttgttctcttgtatggggtactggtttgttcctaatttgaatggatggatggatgtatgcttgcaatcacatagagaacgatccggttgaagagcccgaggaactcgcatgagaagcccctgagcagcagtccggtggtggaggcaagtgtcccttgacctatctctgtcctattcattctttaattcacctcccgctttacacatttatgcctgaggattgactagctntattatccatgtccttgttacctatttgggtggatattatgcttagcttatgctttgttaacttataatgaacatatagatattatgaacgctgttccctctttatagatgtatact

SEQ ID NO: 42720 - DNA, 386 bp, Zea mays
agcttcggctcttttagcggtgaagctaatgtgtttcaaatgagccaaaccggctctgataccaattgaagggaacaggtgacacctaagaaggggggtgaattaagacttctaaaacttttactaaactaggccacaaataaatccctaaaacaaaacctatgcaaataattaaactagaatgtgcaaactgtattttgtctaagtgtttctatctctaccgcaatggctaaatttcaatctacactgttaagtataaatacaaaattgaaacttaaactcttaatatatatgcggaaacttaaagagcaaggtagagatgcacactctcgtggatgatgctagtattcttaccgaggtatctggaactacgcaaggtcccaact

SEQ ID NO: 42721 - DNA, 365 bp, Zea mays
  unsure (1)..(365): unsure at all n locations
tcaacttctgcgatctccttctgcttctgaatgggtgattggttcattcttgtagtatggcccttgtcctcaccacagaataagcaataaatctttctgggctgatccccatatcttcctccgaagcccctggcgcctctgccccttggagctggcggcctgaaagagctttgatgttgccccgaagattacgaggtgtactgtggcctctgaagctggcttnctttgtcgtcattctggctggaattgtggattgacctgacatgcctcgggtggattcttcctccgaagcccctggtcatcttcgagaatcttgaagcttccttcgttctttggcggaaatcgttgtcagcccagatgtattc

SEQ ID NO: 42722 - DNA, 396 bp, Zea mays
  unsure (1)..(396): unsure at all n locations
agctntagttgatatagagtcccttgctggatgatccccacgtttagcttttccatttcttgacacaaagtgttctcggagatcttcgccataagacagtggcaggaagtcttacgactcagcgcatctgccaccacattggctttgcctgcgtgataatggatctccagttcatagtctttaatgagctcaagccatcgtctttgcctcatatttaactctgactgggtgaagatatacttcacacttttatgatctgtatatatgtgacagatatttcccagcagatagtgatgccaaatcattatggcatgaaccacagcagctagctccagatcatgagttggataatgctcctcatgtcggcgcaactgccttgaagcatacgctattact

SEQ ID NO: 42723 - DNA, 389 bp, Zea mays
  unsure (1)..(389): unsure at all n locations
ntcctgctcacatcttcggcgctgtatcaatcttcgtattattctggtcttctcctgctgtaataccgacttgagtccgaagatacctgcttacacattatactccaaaaatactgttaaatcttgtttttgaggaccttcgtaggccgaaggctcccaatagtagcccctcgcaatattaatttgtttaaaataataaatttaaattgtgacatggacgaaggccttacgccgaaggtccaaaaaaacaccttccctttgctagaatagcaacattcactgacaagcanggtctttcaattttcaatcgcgttgggcgtataaataagatcatatcgcaactcatttggcacgctctcttgcaactgctcctgcttactcaattttta

SEQ ID NO: 42724 - DNA, 437 bp, Zea mays
  unsure (1)..(437): unsure at all n locations
agctntcatgagaatatgagtacgaagttgagttttagcacagcttatcaccctcagactgaagggactaaccaagcattggaagatatgttgagagcttgtgccctttagcatggtagtagttgggacaagagcctaccttatgctgagttctcatantaataatagtgccaagccagtctaaagatgttaccgttcgagactctatatggcaggaaatgcatgactcctctatattggatcaaactaggggaagatagttctttggacctgaacttattcaagaggcagaagaacaagttcgtataattcgagagaattgagggtagctcagaccacgtaaaagagctacgctgataatagaataagaccactggaacttgaggaaggagatcatgtatacctcacagttcaccacttcgtggatgaggagagta

SEQ ID NO: 42725 - DNA, 377 bp, Zea mays
  unsure (1)..(377): unsure at all n locations
ctgcttaagataagtccctaataataacaaaataaaaataatttatatcatagacattctgctaattggtgaactaaaaagaaaggtaaaatatagaaaccttcaagttattgtacgctaggcagtcgacgagttgatcctttggcatggcagataatccaaactcaagtttcgaataacccatgttatccattatttcacgacaaacatctatctctattatctaggaggcagtacagatagtcgtcttcgtcgttgcctccataaactagagagcctcgaggatattttangtctcggacatagtgttgcacctcgacaatatgttctttacttaacttctttcccgaagaatgacgaacaatatattcaagatc

SEQ ID NO: 42726 - DNA, 403 bp, Zea mays
  unsure (1)..(403): unsure at all n locations
agcttcagctccatctatgttatggattgcttttgagtcagtccagtttccttctgcccttctggcagctttctgacttccatgaatagcgatgggtccttgatccgaaggtatcttcatgcaaagataagcagggtgaagaattgctttcaaagcattgagggtgccacgaccaataattgcattgtatgggtattccatgtcaacaatgtcaaacacaacttgctcagttctagtgttgttgatgaacccgaatgtcactgacatggtgatcttgcccagtgctacaatttgtcttcctccgaagccacagagaggatgtgtagcatcatgaatcttatcttctggctctcgcatttgtctgaacgccttagcanatatgatatcagctgcactggctgtg

SEQ ID NO: 42727 - DNA, 474 bp, Zea mays
  unsure (1)..(474): unsure at all n locations
nttgacagaacaganactctatcctactatgttcataatctctcatagtggagctgatccatatatcgctttggcctttattttctccccctttggcatcaagcaccaaaacgggatcaatcttggccttttaaccccattgcctcaccaaagtcttcaattaagagcaaatggcaataagatttcatgagatgaactcggaattagttaccctctcatcggagtgcagtggaagtctttcatggtccaagtccaccttttccctttcaatcctccttcgagactaaatcaagcaaacacaagccaatggttagtctcaaagggtcaaagtgtaacacatactccnctaagcatgtgcatcactttgcaacggacttgtgaggtcacggagtgttggacaacttgagcaccacataagccacaaaatgcagaatggaactgatccaatgcataacacatgattgttcattcaat

SEQ ID NO: 42728 - DNA, 487 bp, Zea mays
  unsure (1)..(487): unsure at all n locations
agcttcttcagtgtcataaaatgtcatgctgattgctaatgcanaaactcanggcagctattgctgcaacctactatacggaccttggtattgaagattcagacatatttgtctctgatggtgccaaatgtaacatatctcgcttgcaggtgccaaagcagatttgactctcccattcttaaatttacaattcatcttanattgtttgctaatgattctcctaattcaacattttaggtactttntggatctaatgtgacaattgtggtccaagatccatcataccctgtaagagagctcttgaattacttgtaactgtcagttacttacactcttcatattactgattctagacttatgtgtgatgataattgtgatatgcttttttgtcgcatataatacttaccgagtagttgttaccattttacatgttgtctattgaattaatgcatgtcttccattttnacacgcatatgttgatcaagtg

SEQ ID NO: 42729 - DNA, 501 bp, Zea mays
  unsure (1)..(501): unsure at all n locations
tgtgtgcacttatcaccttgaacaagaagggagtaaaccctagacctctcttgaacccctatctcttaaacaccttggttgaagggggagagattaagcaaaggtgcaaatcatgaccaaacctttggcataaagttaagtaacttattaatctgcaaatatagaaaggaaacattgcaaaaagaccccttaagaaaccccaaatccatcctttaagtagagaaagagctagagctctctaattctctctaagtcaaaatctacacctaatctaaagatccaccgtgttcaccttgaagatggcaccaaaaccacctaagttctataccaaaaatgtggcataccacctaaggcacaccctggaaaaagttgagaccgagcccttgacatttgacatgtcttggcatcactnttgtcgcgcagcgggcagggggacaagccagaattggcgtncgcatatcttctgacctanggcttatcttccattggaactcacataca

SEQ ID NO: 42730 - DNA, 445 bp, Zea mays
  unsure (1)..(445): unsure at all n locations
agctngngttctgccccttgaggaggagtgctgtgcatttatgaaacctaatgggtggctacagccccggtgaatcttcgtaaaggctacgtagtgatgccctgctgggccacctaggtagtggtcaatggggagtagctctctccgggcagaaagggaatcacggcttgtgggtaaagtgcacaacctctgcagagtgtttgaaaactgatatatcagtcgtcctcgcagttatgagcggccaagggagctccagtgattagtggtacttgatctgagatgtacggattgcaggtggcaatgagaatgatggttcttggtattggttctggtaatgagaagtggtactcttccgtttggaaaggagtatgtttgggttaatgacttgcgttaatcgtaaaacttggcttctctactagtaatataatctgacaactaaaagcac

SEQ ID NO: 42731 - DNA, 258 bp, Zea mays
  unsure (1)..(258): unsure at all n locations
acatgtgagttgttcaccactcctcaaatgtttatcaagaactacaggtatggaattaatgaaagagatacatgcaggtctgtgtggatcacacattatatctatgcccttgttgggaaaagttttttgacaaggattntattggccgaaggcagcttcngatgcggcagaattagtccaaaagtgcgaaggctgtcaaaaatgtgcaagagatcagaagcaaccttcatctctcactcaattaatacaacccacttg

SEQ ID NO: 42732 - DNA, 409 bp, Zea mays
  unsure (1)..(409): unsure at all n locations
gcttctatatggaaaaggaaacaanantactaacctattgttntataaaccaccattaagtgacaggctaaattttggataagtttaacagctacgctgcagcttgttaattatgatgatgaggctaaaatgtaagaagtcacagatcagacaaaaaagaatgtgaagcttcctaagccattgcccctgtggaaacagcataacaaaatccaaagttactggagaaaatacagcacaggcacctggaagaccaagcctagatacgagccgaggttnttcccgtggcaagcaatcctgaaagaaagaaaagcaaataattagtcacattgtgaacaaaaatanagatcacttctacatacatctaaagaaacatctaaaaagatgaaccgtggtttcacttatcacaatc

SEQ ID NO: 42733 - DNA, 464 bp, Zea mays
  unsure (1)..(464): unsure at all n locations
agaacacgtgataggtntgactaacgttcaattctataaagatagactttgtgcagctggtcaagcaggtaaacaagtgggaggagcacatcacagcaagaatgtgatgaccacttcaagacctctggagctgctgcatatggacctcttcggacccgtcgcctatctaagtataggaggaagtaagtatggtctagctattgttgatgacttttcccgcttcacttgggtgttctttttgcaggataagtctgaaacccaagggaccctcaagcgcttcctcaggagagctcanaatgagtttgagctcaaggtgaagaagataatgagcgacaacgggtccgagttcaagaaccttcaagtgganggagttcttgaggaggaggggatcaagcacgagttctccgctctctacacaccacacgcaaatggtgtggatagaggaagacaagacgctatcatat

SEQ ID NO: 42734 - DNA, 460 bp, Zea mays
  unsure (1)..(460): unsure at all n locations
agctcgagaagaccggataacgcgaagccaattggcatatctttcagggatacagaaaaaagagttattaagttgggggcaaaaggagacaaataaaagaacagaaagtgtcaaacgtgtggaattgcggatggtcacaatagtcgcacttgtctatctgtggaggagaataggcttcggttggccagccttactggtcgaaagagagggcggcccataggttctaggaacaaaggttcatctagcgctccaaactggaatgaggcatgcacttcaaaanaacatcaaggaggtgtcacagacaatgattcatctagtgcggagtagaagattcatatcttatgacaaatgtaatgtagtgccatacttgttattacaattgtgggtgaatttataaatgctcgaaccagtcantattaacanagtataagtaataatgacttactgctgtattgatatg

SEQ ID NO: 42735 - DNA, 347 bp, Zea mays
  unsure (1)..(347): unsure at all n locations
taaatgagatgttcattacagagcaaatatcaaggagcagtgaaaactgacgctcagatcagattacttactggtgtagtgaccacgggcaaagttgttggctgcatcctccttcccactgatgagctgctcacggtggaagagctggcggtaggtgccagttctcacctcatcgatgacagtgggttcaaggtcaacaaaaacagcacggggcacgtgctttccagcaccagtctcactgaagaaggtgttgaaagcatcatcacctcccccaatggtcttgtcaccgggcatctgaccgtcagcctgaacaaaacacanatgtagtagtggtaatatgcgactta

SEQ ID NO: 42736 - DNA, 396 bp, Zea mays
  unsure (1)..(396): unsure at all n locations
catgcaagcttgacacatagctctgttgaatacctttgatcatatctctcttatatgctatgactaacgagttntcaagtttatttcaaaccaagtcataggtatattgaaagggaattggagtcttcggcgaagacaaaggcttccactccgtaactcatacttcgccaacactccgagcaactctctcttctttgggggagaaatgagcatcaaagaaaagaacttcatccttgggggagagaataaaagctcacaagcaaaaggaccggacctcgtctttctataatctcaactcatttacttatgaccaaaggggaggagactacttcgagggctctaatgattcccgttttggcgattcatgccacaaagggggagaaatgagcccaaagc

SEQ ID NO: 42737 - DNA, 471 bp, Zea mays
  unsure (1)..(471): unsure at all n locations
acacaattggtgtctcttgccttgattacaagtgagctntgatcacaagaacaagtgagaaagaaagaagcaatccaagcgcaagagctcaaaagaacacgacaaatctctctcgctaatcactaaagccttgtgtgtgaatggagaggatntgatcacttgagtgtgtctagaattgaatgcctagctcttgtaagtggttggaagggtgaaaacttggatgccttgaatgtggcgtggttggtggtatttatagcctcaaccaccatactagccgtttggtggaggctgtctgtcgaatggtgcaccggatagtccggtgcacaccggacatgttcggtgcgatagccacgtcacccggccgttanggttccgaccgctggagctctgacttctgggcccgccttgatgtccggtggcgcaccngacatgcactgttgggtgttcggtgcgccaacatgggcgtgcctg

SEQ ID NO: 42738 - DNA, 387 bp, Zea mays
  unsure (1)..(387): unsure at all n locations
cactanggtgggcaacccaccaaaagcatgagagaggaacggagaagacatgcccatggcttagtcatctctcatagctgaatataagcagtgctcacaatatccataaaacatctagccatctacaacaacattgggaatagaaccttgagtactagaatgtactcagctagactgacccgtccaaaacaaggaaataagatagtataagacaccaaggatcatgcaaagctntatctggagttgactctatgctatgtaagagtaaagggattaatgtaactattaacgacttataggggtatcaaagttattaatccacttttagcaattcagtattaatactctattcactggcaaactagaatatgcacctatatatctaaa

SEQ ID NO: 42739 - DNA, 490 bp, Zea mays
  unsure (1)..(490): unsure at all n locations
agcttatcacttgcgcctgtagccgtgcgacttggctggaccgccggtgtcgccgtggtacttcggtgacctcatttatgccacaccgtagctctttactgcgtagtagtaaccatggcacgcctaggcttgccatttcagaaccattgcaccagaggacgccacgactgagccgccagtgaccttccttctctccggctgccagcgcgccattccaaaattgggagccaccgcccttggacactataaattggtgccctagcctgctccgctaagtaattgtgcacacagtgaaccagccctcaccaccaatcatcccccacatctctccaatttgggatttcccccaattctgttctctacgccgncgtgaatgagctcattgtggccagccttctgcaggttcgttcacgttctcctcgctctcngtactgcaccctggtgtgctcaggatgctcatcgacatagccaattgaactaaaccacctta

SEQ ID NO: 42740 - DNA, 359 bp, Zea mays
  unsure (1)..(359): unsure at all n locations
agctcgggaagattcttcatnctaacatgatctattcgacgatgccagagccagnccatattagtcttagcaattaagcaagtgtctagttcagcatagttatcattaaaatcaactaagtatagctgaccatctaacactcccttaaatgctattgaatcatcacttcttttatagacagtaacacctacatcagtgaataaacagttgtagcccattttacacaattgagaaactgaaagcaaattgtagtctatataatctacaagagaaacattatacatggaatggtcaggggatatagcaactttacgcaaaccttgatttccatccccgaatggaatcgctctttggggatc

SEQ ID NO: 42741 - DNA, 396 bp, Zea mays
  unsure (1)..(396): unsure at all n locations
tggagaagcagaaatccttgaagtcttggctgtcttactgcttgccgntgtcaactgtgagttcgtacggtactccgaaacggcaaacaatgtnttgccagaataatttctatgcagtctttgatgttattgtggatacagccctcgcctcgatccatatggtaaaatactcgacagcgacgaaggtgaacttgaggttcccctgagccgtgggcaggggaccgacaatgtccaggccccagcgctggagaggccatgtgtgggcgaatagttntgtgaattgcgaagggctgcctgatcgaggagaaaacttctggcaggcttcgcaggaccttgtgacccgatttgcgccgcagatcattgcgggccagtaaaaaccttgacggatcacctttg

SEQ ID NO: 42742 - DNA, 417 bp, Zea mays
  unsure (1)..(417): unsure at all n locations
agcttncataggtactacatcacaatccgcattatcagaatacataccaatggagaaatgcactcgtaccatgtgtgttaccttaaccttgcctgaatcattgatccactgaatgtggtatggatgtggccgtggacgtgtggtcaatccaagcttcttgaccaaatctgaactcaccaaattattgcagcttccaccatcaataataacacgtgcacgccgattctcgatggagaagaaagtctagaacaaattattgcgttgctgcttttcttatgaatcangctgagaactaagaacacgctgcaccatgatgcttcgaagggtcaccgtagcatcagcaccaagcatgacatcattattagcagcaacatcactggagtctcatcatcaccctcaccgtccgaagactaatgt

SEQ ID NO: 42743 - DNA, 443 bp, Zea mays
  unsure (1)..(443): unsure at all n locations
ntanatgaagatgagaaagaaccaccaaacaagaagaaaattctctttaacggaaaagtatcatctccgaagcgagaagtattcgacgaagaagagactctcgcatcacgctctgccactgacgtggaagagatattgaaggtaatgactgaatccctgcctgtgaagctaagtccattagggcctcaactgacgaagttttttcagaaggaaaaggagcccgaaaaaacgaaggaaacaactaanacaaagagacaaagaatcatcacagtgacagaagtcattgacaagacaccaccgagagcctcagctcggaaggtaccagcggctgaggaaataacaaatattgaagtcgcaccttcggagatcgcggctaccgaagctacctcaaccgaagattctacttggaaaccacatcaacatatcgcaaatactgctaacat

SEQ ID NO: 42744 - DNA, 430 bp, Zea mays
  unsure (1)..(430): unsure at all n locations
agcttccctagggttcaattcagtttatttattctaatatataacaaaataattcctcactctttaggcaaaagaaaagataagcatggaaacgagagagtaacacctgaatttggtggatattagaaaagaaaatntataccccaaaattcagggtgttacagatctaacccccttaacaggaatctcgcactcgagattcaagaagaggctggcaagacaacaaggttggttcataggttgttcacagctttcttgagttgacttctctacaagattaacttgtggactggttcctttgaccttcagatgttcgagaccaactgatgcaattcttgaggatctcctggacatgtgggttaggacccgcacacgcttccgctgcatcactttaatttattggttgatgttgatcgcattgtcttcagtg

SEQ ID NO: 42745 - DNA, 423 bp, Zea mays
  unsure (1)..(423): unsure at all n locations
taatgctcctaaaagagtgtctaactctgtttacggcaaagcttccatgcttcangataatgaaggctacattntatatcctgctaattatcctgagcacaaaattatgaagattcatgctaggaaacctcacactgtttctcatcatgcttttatgtataaaaatgaggcttctagctctaggcataccacacatgttaaaatgcctagaaagaaaattcctactgcatctaatgaacacaatgtgttatttaagacttttgatgcatcttatgctctaactaacacatcaggcaaagtagttgccaaatatgttgggggcaaacacaagagctccaagacttgntgttgggtacccaaggtgcttgtttctaacgtcacaggacctaagaactgttgggacctaagaacaaggcctaaatt

SEQ ID NO: 42746 - DNA, 171 bp, Zea mays
agcttttgtggtaatgtgagaggattcgatctcttgtgtgtgtcttgtattgaatgcctagctcttgtaagtggttggaagttgcaaaacttggatgactccaatgtgcggtggccgggggtattcataatctcacccacctctctagccgtttgtggaggctgctgttca

SEQ ID NO: 42747 - DNA, 508 bp, Zea mays
  unsure (1)..(508): unsure at all n locations
ntntcccaanatctaattgtgaacacataatntaatagaatgtaaacatgctaaaatcatcgtggctataatagtagcaccataggtaagaaacatagacttggaattctgatacgaaatattaaaaagggagcaattgtacagaaatctcgactttttcaagcaactacgaaaaatatataagcagactgctagattaattgttcttttgtttagaaagcaaaggcaattgatttagtcatcgagaaaacagagaccatgcagtcagtacacatccatctataattagtaattcatacaaaatgaagagcaaccaaggaaggaaaataagactattcaacacaattgccaaataaatatataaagacaaggngactgtgatacttgattatagggtagtagggcacctagtttgctcaatcggctangaagaatactgttgagtgctactgcttctgatgagaccgaagcctgagtgatctgctatctttttttgtgacaatgcact

SEQ ID NO: 42748 - DNA, 326 bp, Zea mays
agcttggactatgtcgttccagttggagatctgttccggaggcaggtgctccaaccaggcgcgggcggtgtcggagagaaacagggggaggctgcggatgatgaggttgtcatcgtccgttccacccagttggcaggccacacggtattccgcgagccacagttccggtctcgtctcccccgagtactttgtgatagtagtcggcggtcggaaccgggttaggaacggcgcccgtcgtatggcccggctgaatgccggcggaccgggcggttctggcgagggactcctatccttcccgctgtcgtagcgtcccccacgcctggggt

SEQ ID NO: 42749 - DNA, 383 bp, Zea mays
  unsure (1)..(383): unsure at all n locations
ngaagccatgataagtagcataggctaataatatgcgaattgactcaagcctagctacgggtgcataggtttcaccaaaatccaaaccttcgacttgtgaatatcccttggccacgagtcgagctttgttccttgtcaccacaccatgctcgtcttgtttgttgcggaagacccacttggttcctacaacattntggttaggacgtggaactaaatgccatacctcgttcctcgtgaaagtgttgagctcctcctgcatcgtcatcacccaatccgaatcttggagtggcttctctaccctgtgtggctcaatagaggaaacaaaagagtaatgctcacaaaaatgtgcaatacgagatcgagtagttacccctttatgaatg

SEQ ID NO: 42750 - DNA, 485 bp, Zea mays
gcaagcttcacacctctgaactagctcggctgcattattcttcgccgtcggccaatataatcctgacctgaaaacctttccgactagtgttctggatgctgcatgtatcccacattgccctgcatggacctcctccagaagttgttttcccgtggacgggagaacgcacttcatgaggatgtctgacgcgccccttctgtacaattcttccccaatgagtgtatagtgaaccgactgcctggcaatgcgctctgctgagttcttgtcatctggctcttcttcattctttatatacttaataatcggccatctccagtcatcagaatttgactcgggttgatctatgatgttgcactcttctgtctgatctattgagatactcggctgaagaatttcttgacgaagaaccccggtgggacctgagttcgactggatccgagcttggacagtacatcggctatcgttgtccgatctctttctacatg

SEQ ID NO: 42751 - DNA, 446 bp, Zea mays
  unsure (1)..(446): unsure at all n locations
ctcagcttctaagggagaacacgtgataggttntactaacgtgcaattcgaaaaagatagaccttgcgcagctggtcaagcaggtaaacaagtgggaggagcacatcacagcaagaatgtgatgaccatctcaagacctctggagctgctgcatatggacctcttcggacccgtcgcctatctaagcataagaggaagtaagtatggtttagttattgttgatgacttttcccgcttcacttgggtgttctttttgcaggataagtctganacccaagggaccctcaagcgcttccttaggagagctcaaaatgagnttgagctcaaagtaaagaagataaggagcgacaacgggtccgagttcaagaaccttcaagtggaggagttccttgaggaggaagggatcaagcacgaattctccgctccctacacaccatagcaaaatg

SEQ ID NO: 42752 - DNA, 459 bp, Zea mays
atcctcagagtcacctgcggctgcaagctgtcactcctcagtggtatatcctgacgaggttgtgtttgtttggccttgcctttcttatcatacaaagccttaccaaggcaagccacttcttttcttaataactcattttccatagcaatctcattcgaacaagtttctacaataacattcttaataagaacttgattgcatgagttaggattaacatcaattaaatctaagtaagaagtagcaacattatttttaatagtttcaagagtttcaactaaagaagcttctagggtattagcgttgttttctagcttaatagttagctcattattatgaatgctaagaatttccatcttttctagcacatttttaatagcatgttgagagctatctaacgtggccataagttgttctaatcaaactatcatcggtaggtgaggatggagctctagactctag

SEQ ID NO: 42753 - DNA, 375 bp, Zea mays
  unsure (1)..(375): unsure at all n locations
ttattttcaagcatatcatatagttgttccttcatcacaacctctataggacataatgacgaatagagaagctactggaaggatcagaatatgggctgccaagctcaatgaattcactattgattatgtacatagatccttaatacagtcccaggcgttaacggatttcattgctgattggacgccaaaggctcanggagaagaagtacaaatgatgccgaagcctggacagtcttctgtgatggttcctgnggaaccttcgatgcacgagtggctgttgttctagtaacgccctctaaagtcagaacatgctacgcagtcaggttggactttagttatacaaataatattgctgaatatgaagctcttctgttg

SEQ ID NO: 42754 - DNA, 362 bp, Zea mays
  unsure (1)..(362): unsure at all n locations
agctngagcagtaactggcttcgtatganactcttggtaactagtgatcagcatgtccttcagcttctgccatgatgtaattgttcctcgccgaagagaggagtaccaggtttgtgcaacatttttgactgccatgacgaaggatttcgccatgactgcagtgttgccaccatatgaagatatggttgcttcgtagctcatcaaaaattgcttcggatctgagtgtccgtcatacatgcggagctggggttggttgtacgacgggggccaatgtgtagcctgcagttctgctgacagaggagaagcatcatcaaaggcgaaatttccatgatggaaattctcataccagtcatcttcgttga

SEQ ID NO: 42755 - DNA, 465 bp, Zea mays
  unsure (1)..(465): unsure at all n locations
tatgaagattcttcatcccaacatgggctagtcggcgatgccagagcctacccatgttagtcttagcaattaagcaagtgtcgagttcagctctatcanaatctaccaagtatagttgaccctctaacactcccttaaatggtactgaatcatcacttcttctaaagacagtgacacctacatcagtgaanagacagttgtagccaattttgcataattgagaaacggaaagcaaattgtaatctagagaatctacaagaaaaacattggaaatagaatggtcaggagatatagcaattttacccaatcctttgaccaaaccttgatttccatccncgaatgtgatcgctctttgtggatcctgcgttttctcataggaggagaacatcttcttctcccttagtcatgtggtatgtgcacccgctgtcgatgatacaacttgagcccccggatgcataaacctac

SEQ ID NO: 42756 - DNA, 426 bp, Zea mays
  unsure (1)..(426): unsure at all n locations
agcttgccaatacctgtcaaagcaacagcacatgctatttcatcagctacagaccataccagttacctggcctttcgcatgctgnggataggatatgatnggacctttcaaaaaagctcaaggaggatacacccatgtattggtggcaattgacaaattcactaaatggatagagttccagcccattgcctctttaacctctgctaaagccgtggaattcatacaaagcataatattcagatttgggataccaaacagtatcatcactgacttgggatccaacttcaccagttcggaattctttgacttctgcgagcaaaaaagcattcagatcaagtatgcatctgtagcccatccgagagccaacgggcaggttgagcgagccaacggaatgatattggaggcacttataaaagggtctttgat

SEQ ID NO: 42757 - DNA, 312 bp, Zea mays
  unsure (1)..(312): unsure at all n locations
ctctactaatagtaataaatacttgaccaactaaaagcaactgcttaactgaaatggaaataggcttacaccttntcctaaatgattttggtggttgaaatgcccaacacanataattggactaactaagttgctctagaatataaagttctacaggtgctaaaggttcaacacaaaccaataaaaagtccaaaaaaagggttcaaataaatagagcaaaagacaaccgaaggctgccctggtctggcgcaccggactgtctggtgtgccatcngacagtgttcggtgcaccaccggacagtgtctggtgca

SEQ ID NO: 42758 - DNA, 384 bp, Zea mays
tacgtcacctgccgcatgcaagcttgaaggacaaattataaagcaagccacagtatactttgtctccgaagttctaagtttatcaaagaaaaaatataccgaattggagaacgtgttgtatgctgtcttaatggcctccaagaagtttccgcattattctcacgcattccacatatatgttccttcatcacagcctctgaaggatattatgaggaatagagaagctactggaaggattggaaagtgggctgcggagcttaatgaattcagtattgactatgtgcatagatcctcaattcagtcccaagcgttagcagacttcatcgctaactggacgccacgggctcatgaagaagaacaaataaagatgccgaagcttggaca

SEQ ID NO: 42759 - DNA, 377 bp, Zea mays
  unsure (1)..(377): unsure at all n locations
gcttataatcttgtgcggtataacgaatttgaccagcccatatgcagagtatgcaatattgcgcacaagtctgatgcactttggcctccacaccaagtgtcacggaaacatcatgaggaaagaaaactttgcctgtgctattgatttacgctngtgagttggtggttttggctgcttggtaattaaaaaaccacccaactgaatatttaagtggagcaatacagaatacataactgtgcaaccttatcctatatacaactaatgtcttgtccattatttcattctttaacatgattagcanagcactatgccactatgtaacaaaacagggcataccggtttagcggtgttggggtctaatttggggcgtttggagc

SEQ ID NO: 42760 - DNA, 469 bp, Zea mays
  unsure (1)..(469): unsure at all n locations
agcttgcaccttggtacattggtcctattcctatacttgaacaggggggaccagtggcatatcgacttcgactacccgaaaccttgtctgctgtacataatgtgttccacgtgtctcaactaaagaaatgtcttcgggttccagatcgaaccattgaagtaacagatgttgtcctggagccagacttgacatattctgagcaccctattcgagtcttggatcaaaaggacagggttacccgaagaaaaactctcaagttttacaagatacagtggaaccaacattctgaagacgaggctacttgggaaactcgagacttcttagataaaaatttcctaggctttntagcctcttgtgaattgaaagtgacaacattgttgtaataaggagtgagccccaaccacccctacctgtcccaaactaggaaaaaaaatgtgaagcattttttccctactaccctagactttta

SEQ ID NO: 42761 - DNA, 382 bp, Zea mays
  unsure (1)..(382): unsure at all n locations
ntcccgctcacatcttcggcgctgtatcaaccttcgtatgattttggtcttctcctgctgngacaccgactcgagtccgaagatacctgttcacacattatactccagaaatactgttaaatcctgtttttgaggaccttcgtaagccgaaggtccccaacagtagcccctcgcaatattaatntgttaaaaataataaatntaaattgcgacatggacgaaggctataagccgaaggtccgaaanaacaccttccctctgctagaatagcaacattcactgacaggcggngttattcaattttcaacgcactgngcgtataaataagatcataccgcaagctcatttggcacgctctcttgccatctgctcccgctcactc

SEQ ID NO: 42762 - DNA, 460 bp, Zea mays
  unsure (1)..(460): unsure at all n locations
agcttgtgaagattcttcattccaacatgtgctagtcggcgatgctagagccaacccatgttagtcttagcaattaagcaagtgtcaagttcagctctatcaaaatctactaagtatagttgaccctctaacactctcttaaatgctactgaatcatcacttcttctaaagacagtaacacctgtatccgtaaaaagatagttgtaactcattttacataattgcgaaactgaaagcaagttgtaatctaaagaatctacaagaaaaacatttgaaatggaatggtcaggtgatatagcaattttacccaatcctttgaccaaaccttgatttccatccccgaatgtgatagctctttggggagtcgtggttttctcataggaggagaacatcttcttctcccctgtcatatggtttgtgcacccgctatcgatgatccaacttgagcccncggatgcat

SEQ ID NO: 42763 - DNA, 419 bp, Zea mays
  unsure (1)..(419): unsure at all n locations
tggccacgcggcggaggaccgtccaccggatatggtgaagaaatgcnatctganggtgcgctggcaagcctacggcggtctccggtgagggcacgaatgccgcttaacccaagcgcgccaccgaggtaacttttgccacgatacccagtcactttaccgcggccaacgacgaccggtcacgccgcgatggcgttcttatcgccggcggagatgtcctgatccataacgcgatagtaactgatgacgatgaacagtgcctctgatccaatacacaacttgactgacagaccaacttagagcccattnttctctcaattntccataatgacacaggttaagctctgcagcaaacttgtagagtatggtacccactacaaacttgctatggcaatcataggtatatttacacaggatcatgc

SEQ ID NO: 42764 - DNA, 388 bp, Zea mays
  unsure (1)..(388): unsure at all n locations
agcttgctacatgccttcttcttattctccatatcangaaccttactggaacactacccgacttaaaaagaatgagggtcgaactcttgaatcttggggagttgaactccttgaagtacctcataacacgggtgttacggagccttcttctgccattgctgcttgagcaggctgcggagaaatgactgacactaggttgattctgggagaaccttcttcttatcttctcttcactatcttcttttcactgaccctttctttctctttgctcttcccactggaggattctatcaaagagtattaccatcacacactggaagagaccaaagactatgaaccatgtgcaacagtctttcacccaataatcaccaaccattgtgatcttatg

SEQ ID NO: 42765 - DNA, 474 bp, Zea mays
  unsure (1)..(474): unsure at all n locations
gacctatgatactcaagctgaccttcggctttactgattcatctgaaggcgctcttgatcagagtacctgtaatacttagaaatagactagaaaatagttattatcttggtgttttgaggaccttgggaggaaaaggccctcaacatccgtcggctccctggtattcgtcggatatagggcgggtggggcccactgcgctgttacgtggtttaactagtgacggccactaactacttgaagaaataaattattttctatggtggccgtgagacataaattatttccacggcggcagtcggaaatagccttatttctggccatttagaactgacgggctgttgccttaagaaattaaggcctcaaccatcaaaaataaattgtcccatgggttagaccctaattctgacgacaatcgctgtccgacttttgtcnggttttctatggtggtaggtcgagacttttacattcatttt

SEQ ID NO: 42766 - DNA, 397 bp, Zea mays
  unsure (1)..(397): unsure at all n locations
caagctntacatcgacactgaatagggaagtttatcttattggtgaacgtgctttgtgtgctaaagggctcacacctcaaccttgtgataaagaagagctcaccttggttaaggtggcgttctcttgagttcctttagatcttaacgggagaatgcattacgtactaataatgcctatcatggtattcttgttgattatatggtgataacgccctactgatgctnttattgcttattgatgctttcgtctgatatgatctcggtgtaacactccctctagctattattgtgttgcatgtgttctacatcaactggtatctatagcgttctttgtctatcttgctgatagataatcatgccttcgtatggggccttaactcgtatcttcatggtgtat

SEQ ID NO: 42767 - DNA, 425 bp, Zea mays
actattgatactcagctacaaccgcgcccgtattgacactaccagatatacaccaggattttgtcatcttctatgatgcttcaaggcaaggcttacggtgtgtcttaatgcacaatgagaaagttattgcctatgcatcccgcttactcaagccgcacgagcagaatgaccccacccacgacttggagttggcagccatagtgcacgccctataaatatggaggcactatctaattgggaaagaatgtcacatcttcaccgatcacaagagtctgaggtacatcttcactcagccagacctcaacctccgtcaaagaagatggcttgaattgatcaaggattatgacctcgagatccattaccactctgtgaaggccaacgtggtagcagacgctctcagtcataaacctttctgtgataagggg

SEQ ID NO: 42768 - DNA, 403 bp, Zea mays
agcttcttctcgtcatcgacgagcgacgccatcgtgaccgcctcctaatagtggtgtttgttcgggatttccaagcaagaaacatatattcatctttggcgttggtttatgaaaatgacgcacaccaagtcaaatccatggaaaaatattatggagaataaatgccacgcattcaaaaaaaaggaatttaagttgaaaacagtattcaaacaaaagaaattgcatgtcaggctcttctttaaatactactcattccatccaaaaatataattcaagaatcttggtgatacttatctactactacgcattgtgcaagtgtagcaggtggactagaggagagatgtagtagatgtttttcctgtcatagatgtagacataaacacacatgttgtgtagcggtagt

SEQ ID NO: 42769 - DNA, 416 bp, Zea mays
  unsure (1)..(416): unsure at all n locations
tctacatgataatcccaattcccagataggaatgccagatgaaataagaaaacaaagatcgtgtatctgattnttctagagtaaattgccaacacagatgatcaaaggtgcaatcacaaatatagagtttggtgaggcattaagatatgatgatatattgatatccacccctctgatgcatttgaagccacatcatagtccactcgatctgtactgagataaaaacatgcgatagtacacaaacaaaacaacacattcccattctatgaactgaactcataactgaaaaaaaacaattgcagtatgcagataatagtgtttgtgatttgtaagtcggatccttttctatggaggttgaatacagaacggaattaactgtgtacttccaaaaatgaagttcacaagcaacagaacac

SEQ ID NO: 42770 - DNA, 447 bp, Zea mays
agcttatcctgactagccaaggcattcgtcatctccactagctcaatggcaagatcatcggcagaatgtgataccttagaagcagagatgtcgtcgatgtctgggccatcgccacccaccacatcatcaccatgagccatggtgcaaaggcttcctgcggtatcggcgaggaagcatagtccattcagcttgtccttgttgcttgaggaaaatgatgtgttattagactcgtggtcgaggtcactaaggggaggcaaggaaagcacactcgttgatctttaccttctaaaggtacttcttcttgagcgcatccttgtcgaatcctcccttagacttgtgcttgccggaggtgtactctcacttgcccttgcgccgaccagagtggtggtcatgcgggccagccctagacttacccttcttatggcaactggcgataaagtggtctgg

SEQ ID NO: 42771 - DNA, 446 bp, Zea mays
  unsure (1)..(446): unsure at all n locations
tcacacctctgaactagctcagctgcatcattcttcgccgtctgtcaatagaatggtgacctgaaaacctttccgagtagtgttctggatgctgcatgtatcccacattgccctgcatggacctcctccagaagttgttttccagtggacgggagaatgcacttcatgaggatgcctgacgcgccccttctgtataattcttccccaatgagtgtatagtgagccgactgcctggcaatgcgctctgccgagtttttgtcatctggctcttcttcattctttatatacttaataatcgaccgtctccagtcatcagaatttgactcgggttgatctatgatgttgcactcttctgtttgatctattgagatactcggctgaagaatttcttgcacgaagaccncgggtgggacctgangtcgactggatccgagcttggatagaca

SEQ ID NO: 42772 - DNA, 509 bp, Zea mays
  unsure (1)..(509): unsure at all n locations
atcttaagtcacctgcggcatgcaagcttcgcaggaaaaggagatgatatgaagctttggggtgcttgagggagtcaattcaatttttattaactcaagctatcaatcttaaatgatatatacccaagattgacccacagttattttgaattgttatatctaaaactgatatcatctcggggaagatgttgatgttgtatgaaataaagagttactcctatgcccaaaagtcaaggcctacaacatggaggaaagccaaaggatggtaactgttggggacttgttctcaaatgctatgaattaagaacaaggcaacataaaatgttaaaggttaatgtccttcgtccatganacattattcccttgaggataatgtgccttggacgaaggttgatgaanatataattatgaagctcacgtcttcgtaataaaaatttaatacatcgtataagataacatacaatanagaataacaaagggtgaatgaatcataaacgaattatattgga

SEQ ID NO: 42773 - DNA, 471 bp, Zea mays
  unsure (1)..(471): unsure at all n locations
agcctgggtacgtctatatccgctcggcttttgcatgttgtgtggaaaaataattgactccagcaatcctatgtcacatacatgtcataaattgtatcgctatctctaacatagcagatattttaagttcccatgcatgtctctcatggctttggcatctaatcaactttatttcgttgcattctatattgtcttctttatttgccacagtagcaagtctaaactcctgagatgatgcgtgtataactatgtatcgttcgaaacaaaacaatcacccgtcgctcctgcgtatatagctcaacgtagctttacgtatgtcgtagcggtgttgagaaaaagatataatgaactttaacggcatatacaatcagattaaatgataaatctgtcgagaggtctacaggcgcggcagtgaanaacaatacaaaggccgattttttcacgaatagttcgtcttatacgactctctac

SEQ ID NO: 42774 - DNA, 474 bp, Zea mays
  unsure (1)..(474): unsure at all n locations
agaacacgtgataggtctaactaatgttcaattcttataaagatagaccttgtgcagctggccaaacagggaaacaggtgggaggctctcatcacaccanaaatgtgatgacgacatcaagaccctnggagatgctgcatatggacctttttggacccgtcgcctatctgagcataggaggaagtaagtatgggttagttattgttgatgacttttcccgcttcacttgggtgttctttntgcatganaagtccgaaacccaagggactctcaaacgcttcctcagaagagctcaaaatgagtttgagctcacagtgaagaagataaggagcgacaacggatccgagttcaagaaccttcaagtggaggagttccttgaagaggaagggatcaagcacgagttctccgctccctacacaccacagcaaaatggtgtggtagagaggaagaacangacgctcatcgatatggcga

SEQ ID NO: 42775 - DNA, 456 bp, Zea mays
agcttgagcaaaaactacgcgctaatgaatcttaacaattatgaatagaaagtgaaattgtgattgaagaaccaataatgttacatgataatatgaagtggatcattatcacccacagagattgaatgcttgtgtagcgtcaccattaacaagacatgaatggagtgcataagacaaaggtatgacttatagggtatttcatttcactccgcaaaggttgtgtagaaaagagctttggtcgggtttaggatagatagccatactatcaagaggggttaatgcattttactcaatggatcacttatgcatcataacacatatagttgagactcttgcatgacggctgattgcgtgagaaaaagattttcttcaaagggttgactatgtaccatggctatctgtcttgtaagtgaatcaatccaattgaggtttggtgattaaatgacaaacaataaa

SEQ ID NO: 42776 - DNA, 437 bp, Zea mays
  unsure (1)..(437): unsure at all n locations
agctnttgatacaattaaatggggctatntgctcgaggtcctacaagcccttggttnttcctcgatggcgggagtggatttcgatcctttttggcactgccacttcttgcacccttgtaaatggcgctcatggggagaggttcgctcacaagcgtggtgtgaaacaagctgaccctcacttgcctctgctcttcatcctagccattgaccctctctagaagatcttggacattgctactcaacgtgaagttctaaagcccctgccactcacgtcagcaaaattaagaatctctctctatgtagatgacacggcgatcttcataaatccagaccacgatgaagtgtaggccatcaagagcattcttatcacttttggtgacatgtcgggtctatccaccanattntgaaaaatcttcgttcacccgatccgatgcgat

SEQ ID NO: 42777 - DNA, 476 bp, Zea mays
  unsure (1)..(476): unsure at all n locations
agcttctaagggagagcacatttaggagtttattatgttcatttgagaaagacaggatttgtagcgcatgccaagcatggaagcaagttggtgcccatcatccacacaagaacatcatgacgaccgacaggccactggagctcctacacatggacatattcggcccgattgcttacataagcatcggcgggagtaagtactgtctagtcattgtggatgattattctcgcttcacttgggtattctttttacaggaaaaatctcatacccaagagaccttaaagggattcttgagacgggctcaaaacgagttcggcttaatgatcaagaaaattagaagtgacaacgggacggagttcaagaactctcatattgaaggctttcttgaggaggacggcatcangcatgagttctcttctccctacactcacaacaaaatggtgagtagagaagaagaatagaactctattggacgt

SEQ ID NO: 42778 - DNA, 397 bp, Zea mays
  unsure (1)..(397): unsure at all n locations
ttccacatgtgctagtcagcgatgccatatccagcccatgttattcttagcaattaagcgagagtcgagttcagctctatcaaaatacactaactatagctgaccttctaacactcccttaaatgctatcgaatcatcacttcttctaaagacagtgacacctacatcagtgaataaacagctggagcccattttgcataatggacatacagaaagcagatcgtaatctaatgaatctacaagaaaaacattggaaatagaatggtcaggtgatatagcaattttacccaatcctttaaccaaaccttgatttccatccccgaatgtgatagctctttgcggatcttggattntctcgtacgaagagaacattttcatctcccctgtcatgtggatt

SEQ ID NO: 42779 - DNA, 179 bp, Zea mays
  unsure (1)..(179): unsure at all n locations
catgagaggacaatagccttcatcactttcaagcatacaactcatatatactaaataacgaatgcgcaaagaacattaacatactatagaataatgattatgtcttcctcagttaatttatatttacactcctaggaaagaatcaaccttgataatattcataatacantaataccttc

SEQ ID NO: 42780 - DNA, 393 bp, Zea mays
  unsure (1)..(393): unsure at all n locations
cttcgtttttcttgtatatctctgttcaagtatgggggatgcacgctgtttcgtatttttgttgaacctgcatgcgttcactaatctacaaagctaattcccaatctgttatgcttaaacttcgcactgattcgatggacttctggttggaccttgcatcctgtattcctgtgccttttggtttggtaaccacttctcatctcctgcaaccgatgagccaaaatgccatgaatccttngcagaccatcagtttttgtgagagggacctctggcctctagcattctgttgtcatgtctctatccaccgctctactcctgtgctataaaaatcagtccaacttcatggataatatcattcctgattctgctacactgctctcactttgtctctac

SEQ ID NO: 42781 - DNA, 296 bp, Zea mays
  unsure (1)..(296): unsure at all n locations
cctgaggcatgcaagcttcgagagcggagtcagccggtcttgtctttctgtcctctgctgctgactgctacgtatgcgtgtgccttctctgctgctaataacaaccgcgcaagcaatgaagcangcgtactatatttttatcgcgccttcgccattttgacacgcacatatatcggtctcttacactctggagtttagtgtgcaatcgattcggagcagccatggaaaattagggtgggggggcaaatacgcaattcatgactgtgctgtgcaaccgaattttttctgtctcttat

SEQ ID NO: 42782 - DNA, 332 bp, Zea mays
  unsure (1)..(332): unsure at all n locations
ccatcatccgcataagaacataatgactaccgacatgccactggagctcctacacatggatctattcggcccgatcgcttacataagcatcggtgggagtaagtactgtctagttattgtggatgattattctcgcttcacttgggtatntcttttgcaggaataatctcaaacccaagagaccttaaagggattctcgagacgggctcaaaatgagttttgattaatgatcaagaaaatcataagcgacatccggacggagttcaagaattctcacattgaaggctttcttgatgaggagggcatcaagcatgagttctctttctcctaca

SEQ ID NO: 42783 - DNA, 323 bp, Zea mays
gcaatccaacagactcatgagatctgaagcggttgccgcatctatgagggagtctatcctacgctaaggaaactcatcctacgggcatgccctattgagatctatgaagtcaatacacattctccatttcccactggcctcctttaccattacagaatagactaaccattctagggaagtcacttctctaattactccagcactaagagacctattaacttcgttccctgctccttcggctatatcatctgacattttttgaagctcctgctctctcgcctgatggtgggatctacatcgagagaatgttcaatgatgcctct

SEQ ID NO: 42784 - DNA, 508 bp, Zea mays
  unsure (1)..(508): unsure at all n locations
ttcaactagctccgaaaccatactctcgaccganaccgtttatcttcgctctgggtctttctcngagacaacctaagctntccacatcaacgctgccgaagagtatcgctcctggctgatacccacaggagatggtataatctctcattcttctttctcagcctttgtcaatctctgtccaatcaagtattgaaagttgaaattttcttcttctgaagtatctctggctatttacttctctttcccaggcactatggccatggtctcttcggcggtccaacaccttcttttgcggccatatctgaagtattacatctatatcacaaagtgtgctacgtaagtttgcatcctaggtcgttgcagcttcggcaattgcggcttcagcacgtgcatctttgctagatgcggcgctctcaccacttgggcttttaacgccgaacttgtaggggagattcttcaatgcctctgcacagtattaatctctcgttttctgcccgctgattcttcg

SEQ ID NO: 42785 - DNA, 351 bp, Zea mays
  unsure (1)..(351): unsure at all n locations
agcnttcgggctgaagcaactccatttttgttttatgccatcagctcagcaagtggatgtgagttcaccggatgtgggcgccaatgttggggacttgttcttaactgctataaattaagaacaacgcaacacagaaattgtaaatgttattgtccttcgtcctccgaagcattatttcccttgggatataatgtatttcggacgaacgttatgaaggacataccttcataatcgcaacaaataatgaagaacggtttgtaaaatatgaaaaaatgatataaacacattattattattattattaactcatttctatttcattattatagaaatgataacacaatacaaatg

SEQ ID NO: 42786 - DNA, 405 bp, Zea mays
  unsure (1)..(405): unsure at all n locations
ccttgtaaaccaccataaaacncagcttagtctactatataggctccaaccttgttaatgcatattgtgtaaacaccggatatctgaacatgctgattgagctttactcgttataactctggacataatcagttccagaaaatataataacttactcgcatcgcagccacggttaccatggaacttttacttgcccatggttggccagcttcaaaagatggaaaccacttctggaggtatgctgataccatgatacatcagatcagcgccaccaattacgagacgtgaaacctcaccacctttaagcgtaagagctggcatcagatggtggacctttcaaagcgcataaactgcaatattgctacagagaaaccatacccaattcatattccatgcccaacaact

SEQ ID NO: 42787 - DNA, 401 bp, Zea mays
  unsure (1)..(401): unsure at all n locations
agcttcttaggggtccaagagtcttttattatttatacaatgaggggattatagtgaacttacatcatgatatcatcctgaactgagtngaagcgtcgtgatgttgaaatgagcatacctttaaaatgaatttaataaaacatcactttgtagggtgtatatattccatgaattgaaattttgatgtagcagaccttatgggtagtagctactctattaagaaaaaacatcatgacgttagcccatacaacagacatcttggagagatacaagtcacataaacagactattaataatgcagtgcattgtagcatagcacctgttcatgcctatcgtccaagattttataaccaacgatcattttgaataggaaataacaatatacacatcacattttcatg

SEQ ID NO: 42788 - DNA, 459 bp, Zea mays
gaacacatcttaggattaacaaatgttcatttttataaagacagtgattgtagcgcatgccacgcaggaaagcaagttggtgctcatcatccacataagaacataatgacgaccgacagaccactggagcttctacacatggatctattcggcccgatcgcttacataagcatcggcgggagtaagtactgtctagttattgcggatgattattctcgcttcacttgggtgttcattttacaggaaatatctcaaactcaagagaccttatagggattcttgagacgggctcaaaatgagtatggcttaaggatcaagaaaacaagaagcgactacgggacggagttcaagaactctcatatctaaggctttcttgaggaagaggggatcaagcatgagttctcttcttcctacacttccacacaaaatggtgtagtggagaggaagaatcgcactcta

SEQ ID NO: 42789 - DNA, 315 bp, Zea mays
  unsure (1)..(315): unsure at all n locations
agcnttgggtgcttcttagaacatccgactctatataagatnttcgaagggagaggcggcggtatgctagctggtcatgaaggaggttgtggcacatacctagtaagaggcggaatactacctcggtacttcatgatgttgaggaaggagaccatgacgcctgagatgggtcggagaagcgccgacgcgttcccccgccggtctgcgttgaccatcgtgcgcagagcatcgttgaggatccgccgccccatcgcgagtccggaggttggatctttgactgaccacaagcgccgccgccgccctttccgctttctc

SEQ ID NO: 42790 - DNA, 370 bp, Zea mays
  unsure (1)..(370): unsure at all n locations
agcccctctcctctataaatagagaggtataccgccgagttgngatcaacaatcgaatcaatacaanctttattcgcatattatcctagtagtagatctagtctagcttagggttagcctctcaatccccagaatcttcgcctctcttcgactctacgccgattggaagagtctaggtcggtcggcccgagcctagacaacccctatgatctctctctcccgacggggtccctcccgggagcgagatccaggcctgcgccggagactttcgccgcccctgcgcacgcgcggagcgtacggcctcatggcgcggaccgtacggtcgtcggcagaggacccaactcctgcacatgtcgggaccgtccggcct

SEQ ID NO: 42791 - DNA, 429 bp, Zea mays
  unsure (1)..(429): unsure at all n locations
agctntcctgcttacaccttcggcgcttcactaaccttcgtattattctggtctactgtgatgcctgacttgagtccgaagatacctgttcacacattatactccagaagcactattaaacctgtttttgaggaccttcggatgccgaaggtccccaacagcctcattatgtaccttaatgttcaagacacccagaccccttctcattttggtctagtaataagattccatgcaaataggggtggcttctttgcattgatgtctgctccccctccaaaggcagtgtcttctatacttgtcaatctctnttaataatagtgaaggcaatattagcgtgcacatctaaaaggttggcagtgcggagaagactatgttgaccatttccaacttcctcgcttatgagaggaatattaaggtagacaacaacct

SEQ ID NO: 42792 - DNA, 378 bp, Zea mays
  unsure (1)..(378): unsure at all n locations
taaagccatggtaagtagcatatgcaagtaaaatgcgaattgtctcaagcctagctacgggtgcataggtttcaccaaaatccaaaccttcgacttgtgaatatcccttgtccacaagtcgagctttgttccttgtcaccacaccatattcatcttgcttgttgcggaaaacccacttggttcctacaacattntggttaggacgtggaactaaatgccatacctcattcctagtngaagtgttgagctcctcttgcatcgtcatcacccaatccgaatcttgaagtgcttcctccaccctatgtggctcaatagaggaaacaaaagagtaatgttcacaanaatgagcaacacgagatcgagtagttacccccttat

SEQ ID NO: 42793 - DNA, 485 bp, Zea mays
  unsure (1)..(485): unsure at all n locations
agcttgngataactagtcgtatagggtgaatattctttgtatgatagaatcttgtcaagatgtctacatgatgtacgttaaaagtttgtttgatgttatgtgagaatagacagattatacaatccattatgactctatggttaggttaggttttttctcacagtcgagttggnttaatcctttccttccttcttttctttttccaatttttgatttcaaatntgaattcaaatttagatgtgagtttcatattttgagttaactgctcacattcaaatatcagtaggaatgaaatatttttggttatgtatttaatctctctactctatacaataatttctttctcttctactattgtatatcttatttagaatcggaggccaagtttatgttctccatacaatgcttcacgacaattattatccagagattaaacttaccttatctatcattagtactcattattttaagaaatatccctatat

SEQ ID NO: 42794 - DNA, 483 bp, Zea mays
aagcttctaaagggagagcacattttaggactaaccaatgttcattttgagaaagacaggcattgtagtgcatgccaagcagggaagcaagttggcactcatcatccacacaagaacataatgacgactgacaggccactggagctcctacacatggatctattcggcccgatcgcttacataagcatcggcgggagtaagtactgtctagttattgtggatgattattctcgcttcacttgggtattctttttacaggaaaaatctcaaacccaagagaccttaaagggattcttgagacgagctcaaaatgagttcggcttaaggatcaagaacataagaagcgacaatgggacggagttcaagaactctcaaattgaaagcttccttgaggaggagggcatcaagcatgagttctcctctccctacacgccccaacaaaatggtgtagtagagaggaagaatctaactctattggacatg

SEQ ID NO: 42795 - DNA, 374 bp, Zea mays
acctgcggcatgcaagcttgtaaagaatatgtttatttaagagctatatatatgtctactacaaagctaaatacatggaattccttcgcttatatatatatatataatattacagctctgagcttctaataactagaggaagcctagatcagatggtgcaatcaggtcgagccagaccagatccggggcgtctataaaagaagacttgtcggcgtttcgacccaggggtccctggaccgacgagtaaattatctctgcgtgccccaacccagatgggtcggcgcgagacggaacacaaagaggggaaaatcgcggcttcgtgttgtcctgcgcctacggtggatgcgcttgcagtaaggggttacaagcgttcg

SEQ ID NO: 42796 - DNA, 457 bp, Zea mays
  unsure (1)..(457): unsure at all n locations
gcttctgtatgttcatgaattattatatgagacagagccttggggtgaagaacagtttcataacatacttggctgctacagcttcgtttctcggtccggcgcaagctgtcccgtaccaacctttctgaagagatggcccggtgatcggatgacagaatggttntatgtgaagaatgacttatcagcacgagaagacatcaaaggtataattatgcgtcctatttggcaaagcttctgccttcggaggccgaaggttgaaatgaacgaagccgccgaagagtgccaaagagccttcggcgttgtctgttcttttataggaacaagggacttagtacaagaacatatcgccttcatggtgtggccgcttgctgagaaatgggaaatgccacaagaaaccatacaagaggccgacgaaggtgggcttgtgagactgacgtacaccttctaatttggagat

SEQ ID NO: 42797 - DNA, 409 bp, Zea mays
  unsure (1)..(409): unsure at all n locations
agcttatgctatctacatcatattccagnctctacatgctatacaaagaagtatttataggtacatatgttatgatgccaaattataaatagttactgtcattaaatatacataatatctgcaatttaataaatntagatttcatacctttctaacatccccatattgtgttccttcacaatcatcattttcaacaagcgtcatttgcagttcagattgatgatgtgcatcaatatttaagccgtcatcctactcattagtgcattatagtcaatattacaaataatgtataaatcatcccatttgtttgcactatacataaattacattgtgtctttgccataatattacatgttgtcgtgaatgtactgccacataccttctcgtatcacattgcgaatacatgtta

SEQ ID NO: 42798 - DNA, 359 bp, Zea mays
  unsure (1)..(359): unsure at all n locations
gctctcgctttaggctntagcctagctcgcattgcacgatgtgttgttcctataatccatcgcaagttctgtgagctgaccactatatcgtgggctgcctgcggtggcgcgttgatgtttatggcatctggggtggatgggaatctgcaatccttttctattatatctaggattagatgacttgaatataagttcgtgcgactgcgttgaactcttaattcaattatagatgtgtgataagaggcatctctatggtatgaatatgcatgtgagaacttcacgggagtgtctagtcatgtttctgagtgcgtaataaacttcttgaagcattcttcctatgaggactactctgacctgac

SEQ ID NO: 42799 - DNA, 443 bp, Zea mays
  unsure (1)..(443): unsure at all n locations
agcttctggagtaagctgatgaaagtatatctcatatgtcttcaatacttcaaccaacatcctgtgcgagggaaaatgaagcccacccttcataaaactcttaaaaaccactacttcgtttgctttaggaagaggaacaatactctctcccctagccctcacaatggatatgtcacggaaatatttncccttcatcgtttcaatctgtccttgcttaacagtggactttccaaaaacaaaatgacttggcctccacgggcgatcttcgacatcttcattatcactctccacatcgaaactgtcactgccgctggaatcctagatagcccagcccacatttcataagtgaatttctcaacgttagttctttctatagcttcgtanaaaccaacaagtgtggggtctacaactttcttatcttcgtccatttcgatgatgatcat

SEQ ID NO: 42800 - DNA, 268 bp, Zea mays
ttcatcatatctatcccacaacaaccactaatgggatgcttggttccactaactaaagattagattcgtgaaaatcaaatgttcgaatatcaataataagtattaaatatcggggtaactagctttaataaaattcgactcacctttactctgtataattagactaatcttaagatcccgaaatatcatccaaacatttgatgtgatagggactcatctttaataggatggagccaaacacctctctatgcttgatctaactgctgta

SEQ ID NO: 42801 - DNA, 316 bp, Zea mays
  unsure (1)..(316): unsure at all n locations
agctttagttntgaagcttcggctttgaatttatttntntagcatctccgaagatgtccgaagataataagactgctgctgagacgaagctgagcctcgacgaagagaaataattggggtttcttatagcgatgtcaaagaccaacacagaaaaaatcaccaaggagattctggaaggtttgtctgaggatactggtgacagtgacagctatgatgtggacagtggtggtgaagactccgaagatcgtccctagcgaccaagccattcagtttatggtaaatcaactatcacagaaaatcatctttgtcatatgag

SEQ ID NO: 42802 - DNA, 446 bp, Zea mays
  unsure (1)..(446): unsure at all n locations
ntcacgaacaatacccttatcaagaagttcttgctcttgcctttgtatttccttagtttcttcacgattggtttgatatggtggatggttacgaagtgtagcccctggaataagatcaatttgatgctcaatccctcgaattggaggtagtccagccagtgtttcttgtggaaacacatcttcaaagtcctgcaaaagatcagccacaatactatgaagagatgttatgtcgttaggagaaatcanaacatctatgttcacaagtacaaagagcactcgatatgggttgttctcacttctcttaactcatattttgtggctagcataactagatgttctccctcttccttctttttatctcttgaatttggcttatagcactcgctcaccgaattgtggatggagtncagtttctttggctcttctcctcctctaattgctgcact

SEQ ID NO: 42803 - DNA, 405 bp, Zea mays
  unsure (1)..(405): unsure at all n locations
agcttannacaagttaaatctctaaggttctctttttatttattntattaaataaataaaactacatctacattagttcatatttagtcataaaaattagaatgtgcagacagtgaatgaaaccattttatttagacagagaatatatctatgaacattttgtaatttgaatcactaaatttggagttcatatgcacaagttatgaaataaacaagcttgagaattcaaaatatgaaattagggctaattctgtgaatatttaaaagtccaaggctaaatctgcaagattacaggggcctgcgcgtgaaaaccagggacggcgggttgatttccagtaaaccaacggtctctntaagaaaactaccgcgcaaaggggtatcgggtgaatctaatccgcagatcta

SEQ ID NO: 42804 - DNA, 483 bp, Zea mays
  unsure (1)..(483): unsure at all n locations
cttgggaaaccaatactctntgacagagtaccgataaccttcgctctgatttggtctcagacgcangcccaattttcatcgtcaacaccgccgaagagtagtgcccctggttgatacccgcaggatatggcgtattctctcaactcttctttctcagcctccgacaattcttgccaattaagttttgaaagttaaagttttcttcttccgaaggttcttcaactattttcttctccttctcaggtactgtagccatggcttcttcagcggctgcggcagcttcttctgtggccatgtccagaagtatcttatcaatgttagaaagtgtgctctctatatgtacatcttccgttgtggcagcttctgcagctgcagcttcagtatgtgcagcttccgtggctgttgcgctctcaacaactggtgccttcgaagccgaaactgacggtggtggtccttcaataacttctggcacagtaataattc

SEQ ID NO: 42805 - DNA, 401 bp, Zea mays
  unsure (1)..(401): unsure at all n locations
agcttgatgtttagaatgacatcatcttctcttaaatctttcatttcgaaattgctcgatagaagaattttaacttcctcaatcacattgagatctgatccacagatcaagatgtcatcaacataaaggcacagcataacagactcaccccaccataccgatagtatacacacgtgtcagattcatttacagcaaagccagcagctgtaagagtattatcaaacttttcatgccattgcttaagtgcttgttntaggccatacaatgattntatcaacctgcacaccttgttctcttgaccatccgcaatgaacccttctggctgatccatatagatctcctcatccaactctccattaagaaagttgtcttaacatccatatgatgaatgataagaccat

SEQ ID NO: 42806 - DNA, 334 bp, Zea mays
  unsure (1)..(334): unsure at all n locations
ctcagcttatgaagattcttcatacctacatgggctatttggcggtgccttatccaacccatgttagtcttagcaattaagcaagtgtcgagttcagctctattaaaatcaaccaagtatagctgaccctctaacactcccttaaatgctactgaatcatcacttcttctaaaaacagtaacacctatattccgaaaaagacagttgtagcccattntgcataattgagaaacagaaagcaacatgtaatctaaagaatctacaagacaaacattggaaatagagtggtcaggagatatagcaattntacccaatcctttgaccaaccttgatt

SEQ ID NO: 42807 - DNA, 441 bp, Zea mays
  unsure (1)..(441): unsure at all n locations
agcttctaaaggggagcacattntatgactattataatgtttattctgagaaagacatgatttgtagcgcatgtcaagcatggaagcaggttggagcttatcatccacacaagaacatcatgacgaccgagaggccgcttgagctactccacatggatctattcggcctgatcgcttacataagcatcagcgggagtaagtattgtcttgttattgtggatgattattctcgcttcacttgggattctttntgctggaaaaatctcaaacccaacagaccttaaagagattcttgagatgggctcaaaatgagctcagattgaanatcaagaagattagaagcgataatggaacagagttcaagaactctcaatttgaggaactcttctnctacacacctcaacaaatggtgttgagagaggagaatagactctatggata

SEQ ID NO: 42808 - DNA, 491 bp, Zea mays
  unsure (1)..(491): unsure at all n locations
tanagcaacaatctgaaactgaagctgggccttcagagcccactaaggtanaacccttggaagctgaagaaacaaaaatggcagagccaactntggttgaagaaactgacactgctgcccccgaagcatcctccanagccctcgattatattgtacgacatgcttcaggaaaaaagattatctgaagaagagatttttgaagctaatcactatgcccaagaattgaagtatccaaagagggccttagtattcaatggcacagacgaagatgacttcttatactgccttccagacaacaaagaattatctgtctgccgggagatggctagaagtatggggttcccgaagcttgaagctggcctctgcgctatgacaaaggacgatcttgcagatagccttgcatataatagtctgaaagtatgaaaattgtatatttggaaaattataatatttgaattattcttttattcttatactaaattttttcatat

SEQ ID NO: 42809 - DNA, 337 bp, Zea mays
  unsure (1)..(337): unsure at all n locations
agcttatcanatcacagtgcacaagtttcatattattgagtgagcgggagtggttggccacaaagcgtgcaaaatgagtttgcggtatggccgtatatatacgctcggtgcgttgaaagctgaaagaccccacttgtcattgaatgttgctattctagcaaagggaaggtgttttttcggaccttctgcgtatagccttcgtccatatcgcaatctaaacttattatttcaaacaaattaatattgcgaggggctactgttggggaccttctgcgttcgaaggtcctcaaaaacaagatctaacagcatttctgtagtacaatgtgtgaacacgtac

SEQ ID NO: 42810 - DNA, 395 bp, Zea mays
  unsure (1)..(395): unsure at all n locations
agcttatattatatacttggtcttaattagtttattgctccactgcgcatctacacaaaccatgcatgggaaagaagttaaattgccggtcaaagcagcaacagcctaccagtagttagtatgtaggtcaggctcatgctacagcgaggacatgcattttctaaaccctaaacagtgactagcactctagcagtcgctaattctgtgcgtgcgaaggcttatctataatgagcacacgcatcgtgcagctggagttttgttccagtcaacctccgctggggggatcttcgagacgcactcggagggctggtcgcatttggtggccaccgatcgtagagtctacagagacatcggactgttntgtgtcagtgacgggcaaaatggatgtcgatgta

SEQ ID NO: 42811 - DNA, 441 bp, Zea mays
  unsure (1)..(441): unsure at all n locations
cgtgaagccaatcacaagtttattgaagaatgacattaagttctattggtcttctaagtgtaatgaagcctttgagcaattgaagacactattgaccactgctccggtattggctcaaccggacatcactaagctctttgatgtatattgtgatgcatctggcagtggactcggctgcgtattaatgcaagagggccgagtaattgcgtatgcttcacggcagttgcgccgacatgaggagcattacccaactcatgatctggagctagctgctgtggntcatgccctgaaaatttggcgtcactatctgctgggaaatatctgtcacatatatatagatcataaaagtttgaagtatatcttcacccagtcagaattaaatatgaggcaaagacgatggctcgagcttattaacggatatgaactggagatccattatca

SEQ ID NO: 42812 - DNA, 328 bp, Zea mays
agctatttcaccacgcttctcgtggatatctttgttgaggagagcaatgcgtcttctccttagttgctttgctttcttgttcctttctttattgatgagcaactttctttcgatcctgcagcttgatgctcattcaaaaattggcttttcttttgacaacacgggttagcacatggcgatatattatctaaatgctcacgtgtgctagaatgaggttcacatgaatttaagttcgcaattaccacctcatgagcaacatcaagcatgatatggttatcaactgattcattatgagaataagatagcatatcatattcttcacttatag

SEQ ID NO: 42813 - DNA, 286 bp, Zea mays
agaacagtactacggcgtaaagctattgctcgattggatccacgccccgctgatcgaaccgacagggtcgatcatcgctgctctattctcttctttcacggaggcgattacgtcgccgttccattaccattcaggtggtaatgctaatctgggatcgcatcgctttctgccatatagagtaactcgcctccacttcatataataatgttgtcatgataagaggtactcttcacatgcgcttatgtccgggtgtgtactgatcttgttggatttcggacacaaacaa

SEQ ID NO: 42814 - DNA, 466 bp, Zea mays
  unsure (1)..(466): unsure at all n locations
agcttacatcanaagaatggaagctagaacattactcctatataatcatagagggagagttgtataaacaatgagtctgctctccattactaaagtgtntgtctagaaccgaaggtcaagagctaatgaaggagatacatataggactatgtggagttcatattgcgtcgagttctttactaggaaaggttttcagataagaattntattggccgaaggcagcttcggatgcagcagatctagttcaaaagtgcgaaagctgccagaagtgtgccagagaccagaaacaactttcgtctctaactcaaccaattcagcccacctggtcattgcgaaggtggggcctatgtttgctaggcccacttccaccagtgcaagggaacttgaaatatgttgtggtagtggtggagtacttctcgaagtggatcgaagctaaacccctagctactatcacttcngccacaaa

SEQ ID NO: 42815 - DNA, 478 bp, Zea mays
  unsure (1)..(478): unsure at all n locations
atgaagattcttcatcccacatgggctagtcagcggtgccagagccaacccatgttagtcttagctattaagcaagtggtcgagtcagctctatcaaaatctaccaagtatagctgaccctctaacattcccttaaatgctattgaatcatcacttcttctaaagacagtgacacctacatcagtgaaaagacagttgtaacccatcttgcataattgagatacagaaagcacaatgttatctaatgaatctacangaaaaacattgganatagaatgctcaggagatatagctattntaccaagaccttngaccaaaccttgatttccatcctcgaatgtaatagctctttggggatctatgtttntctcgtaggaggagaacattntcttctcctcagtcatgtggtttgtgcacccgctatcgatgatccaacttgagcctcccgatgcataaacctacacaacaagtctaggtc

SEQ ID NO: 42816 - DNA, 427 bp, Zea mays
  unsure (1)..(427): unsure at all n locations
gaccctaagcacctgagctgcagcttgtggcttaagtttcagcttacatgatccctttttccncccctctaggtgctctcacatttgctaatgtatgtgtacctttcgcttgcatatctctgtcttctcaaaattgttgtccagtacaacagcacttatgtttcctttttggcgntatcgaagtccataccaagagaagaaatcgtttagaacataacaggctggacaaattggtgtatgttagctacaaccgaaacgtgtcaaatagattttaaagaactagagagttgggcttaaagggaaagaaaagcaaccctctgatcctacaagagtctcaatggaaaatgagtgggtccatgacaatgatgaggacattaacgatgaatattctctctggagggctgttgatgaagctattgctgcaact

SEQ ID NO: 42817 - DNA, 444 bp, Zea mays
  unsure (1)..(444): unsure at all n locations
aagctcggatacgaattgcgagcatattgttatgcttagctaatacgaacaggcacacacacacacacacacaccgatatatgtatatataatatgaatattataccattcacagaacaacatggcaaaatagagctcgatactatggtcatgccatgacaagaaacgtgacaatcggagctacggccgagaagatatcgcgttgactctaaacaagcactaattcacacatttgattcgacataggtatattaattaacatttataagatataaatgaaaactacttagttttgactaacttactgttttaatngtcaatgattaaatgaataactcattaactgatatgagtggtataaacgaagcggttaatctcgcgcgtggataatgcacgatacatgcgaatggcgcgcggcgatgcacactacacacgttaatggta

SEQ ID NO: 42818 - DNA, 524 bp, Zea mays
  unsure (1)..(524): unsure at all n locations
cgaccggatgcttaagtcacctgccgctgcagctaataggcgaaatttntcactgacatttgtgagaatggcggtcgagggatggctcacganataataaagaanagtgaaaaagatactcacgacactagagaagcgacaaaaacagctgaaaaggttgcggagcttgagagacgaataggtattacttaacgatttttacttttgatgtttacttttgcaacttcgaaataatttatgttttctaccgtagctgaactatctcctcccctagagcccttcgagccactagccgaagcagaggcaaaagaatcatcaganattattagcatggctgaaaccattatggacgaagtcgttactcaactgttgagcgaagctgcagacaaagttttgaaagaagaagaatagatattgtanaaatattgccacgaatataatgtaacatttgctggtctatgcttgtaataattggtactcatgaagtcttaatgtaatgtgaaatggctttgaatccatttctt

SEQ ID NO: 42819 - DNA, 404 bp, Zea mays
  unsure (1)..(404): unsure at all n locations
agaatcaacacgatttgaagatataagatggtcgatcagatcatggngggagtactatgggcgccataccgagtatggccaggtcccaggacctttcgcgaggtttctaagagaaaacgatattgttgctcagtattcaacacctggtgaaccacaacagaatggggttgccgaaaggcgtaacagaacgctaatggatatggtaaggagtatgttaagttactctaacctgccatcgggtctatggatggaggctgttaaaaccgctatgcatatactcaacagagttcctagtaaatcagtggctagaactccatatgagttgtggactggcagaaaacccacgctcaactacttccatacatggggttgttcagcagaagctagaatattttattctggac

SEQ ID NO: 42820 - DNA, 485 bp, Zea mays
  unsure (1)..(485): unsure at all n locations
agcttgtgatntatacaatntaaaacaagcaccatctcttaacatagattntctatggataaactcaacacaagagatggcattagtagcacaagcactagtttcttatttagcaacccttttatatgtgggaggcaagcgagttgctaaaatagagaaacctcataatatggactaaatttccttgaacccttatgcacaatatattttgaatgacatggataatatgcatggttattcaatgaagcctagagggatgacttaatccatattatggtgtgtgtctaatatagaagaatcaaatccaaattaactagatagagaatatgtcacataattttggattgttcaccatatgataatattcattcaacttccaattagacctttatttcataatcaacaactgatgtatatcctcaagtgcttctttttccttagtggctacacaagtcacaaaagagattagaattgaaataatttgc

SEQ ID NO: 42821 - DNA, 406 bp, Zea mays
  unsure (1)..(406): unsure at all n locations
agaaagcagcttcagcagaccagccgaagcctatgctcttatgtgaggacatagcagaacagaaggtgctgttaggctctcagttatccgaagagcatgagaaaaccttgataaggtttttgttcaataacaaggatgtttttgcatggtcagccaatgatctctgcggagttaatagagatgttatcgagcactcgctcaatgtcgatccatccttcatacccagaaagcaaaggcttctgaaaatgtcagatgataaggccgaaggtgctcgcaacgaagtcaaaagactcctcagtgcaggagttatcagagaagtgaagtacccacaatggctggctaatactgttatggtaaaaaaggccaatggcaagtggcgaatgtgcatcgatnttacagatcttaa

SEQ ID NO: 42822 - DNA, 387 bp, Zea mays
agcttgtgaagattcttcattccaacatgtgtttgttggtgatgccagagccagcccatgttagtcttagcaattaagcaagtgtcgagttcagctctatcaaaatctactaagtatagctgaccctctaacactcccttaaatgctattgaatcatcacttcttctaaagacagaaacacctgtatccgtaaaaagacagctgtaacccattttacataattgtgaaactgaaagcaagttgtaatctaaagagtctacaagaaaacgttggaaatggaatggtcaggagatatagcaaattacccaatcctttgaccaaaccttgatgtccatccccgaatgtgatagctctgtggggatcgtggttttctcgtaagaagagaac

SEQ ID NO: 42823 - DNA, 506 bp, Zea mays
tgcatgacataaccgtgaatgccatatatctgactcatcagattaattaacagatattcaccagttattacacacatcatgcagcgagtagcggaacaagcctccgcaatcatatcctttaccaacaaaagtaccatgtttcgacacaacacatgtattagactcaagaacaactttgtatccatctcgacatagcatagaagcgctaacgagattcttcttgatagagggcacatgttgcacgctcttcaatggcaccgcctgttccgaaggaaacttcagaatgaccgtaccaacaccaagaacatgagcacgcgacccattacccatcaacaaggcgccagacctcccgacctgctatgacgtgaacatagaggcatcagcacacacatgaatgtttgaccactgtccatccaccactcaagtgaagtacagactgagagaacacatggtatagaaataccatactcagatggttcttcttcagttcagtggtacaacatgag

SEQ ID NO: 42824 - DNA, 369 bp, Zea mays
  unsure (1)..(369): unsure at all n locations
agcttattntcggggtcgtgccctgtcctatttttctgcccgngcgccatgggcgaacccctcattttcgggccagacgcaaggccgaacagccatgccgcccgtcgccttgcgcctgcgtgccgttttccctccgttccgccatgcccttcacccaagacatacatattaccttcggtggctttccacacgcttggacttagcttatttccggggccatgcccgaacctcggtgtccgcccctgcgccatgggcgaacaccttgttntctggccaaacgcaaggccgaacagccatgccgtcccgcgccattctgtcctcacccaggcatacgtagcactttcgtgttcttgcacacgcttggacttg

SEQ ID NO: 42825 - DNA, 452 bp, Zea mays
  unsure (1)..(452): unsure at all n locations
ctcagcttatgcagcgtgggatggaaaacactttatctaggtgtatgttggctngagtgaacggcaacgtggaacggagggaaaaccggaggaggcgcgcggcgacaggcggcatggctgttcggccttgcgtctgggctgaanacgaggtgttcgccatggcgcacgggccgaaaacggaggctcgggcacgaactctaaaataagctaagttcaagcatgtggaaagacaccgaacatacagtgtatgtctttggtgaagggcacagtggaacggagggaaaacgacacggaggcacgcggcgacaggcggcatggctgttcggccttgcgtttgggctgaanacgaggcgttcgccatgtcgcgcgggccgaaaacaacggttcaggcacggtctcgaatatatgctaagttcaagcgcgtagaaagacaccgaagcttatgtgtaatt

SEQ ID NO: 42826 - DNA, 442 bp, Zea mays
  unsure (1)..(442): unsure at all n locations
agcttgtgaagagtattgtggccttngctgctttctccctcgatcatcactntgagtagagntatgaattgacctaacgtgcctcgggtgaaatcttcctccgaagcccctggtcatttcagagaacctgaatgcttcctcccttctttgacggaagtcattgtcagctcgaatatactcgtccatcttctggagcagcttctccaaacgttgtggtggctttctggcaaagtattgcgctgaaggtcccggccgaagccccttaatcatggcctcaatgacaatttcattatgcactggtggcgcctgtgctctcaaacgcanaaaccttcngacatacgcctgaagggtattctcgtggtcctgagtacattggaatagagcctgagcggtgactggcttcgtctgaacccttggaagctagtatcaacatatccttaac

SEQ ID NO: 42827 - DNA, 486 bp, Zea mays
  unsure (1)..(486): unsure at all n locations
tactcagtaaaattaacaattatagcacagtatatagcaacatatatcaatggtaacagatggtcgtgtgttgctacattagctntaaatntattatccaaatatgaaaaatagtggatcaaaatcatcaaacctaaatttcaatttaccttaacaatatactactctgagccacattcaaataaatagatgattactcgtgccttacaacatgctttgtgatgcctcggtagcatgtacttcaaaatgagcgtgagctgaagcgaggtcagtgggtgcaacaccacatggccttagtaggtggtgtcccccattggaggtagcaaatgataagcttgaacaggattgcaacactgtctgtgtcgctgctcacgattgaagttgctaaaaaagatcttcagagagacaactgcgtcaagaggatgtgctagtgacaccatggtggcatagcatagtgaaacacaccgatcaaanaccttctacatg

SEQ ID NO: 42828 - DNA, 419 bp, Zea mays
agcttggcgcgtggctccggccggatcggtcttcatcgagagtcggagccgccaccatggcggtgcacgacctcaccggcggcagggattctacctggccagaaccgtcaccacgacggcgtgtggaggtgccgaatccagccggtgcaggtcgacgggggccggtccgagcagcgtcgacggtgagttttccggtctactgctacttctacttgacgcgatgacgacgatgggcacgacaaaacagatgaatcgaccgcgcatcctacgagggcgctgcccccggcagaggacaatctccctgagggcagcacgactgtgacagcggaagacgcctattggatctaaaacctaaacttgtgataccatgatggaaggagagaatgcgtatagtgtgtgggatggcctctacggagaat

SEQ ID NO: 42829 - DNA, 322 bp, Zea mays
  unsure (1)..(322): unsure at all n locations
cttaaagggaagggacgcaagggcagaacacatatggttggctgttctaagccgaccctactttcgatcaagtgctctccaaggatactatcaagaagaccgttctacatgatcggtcaacgaagaaaccctggtcacttgctaagacgaaacgagtaaacaaaacgacccgaaaggcgacacaacaagcatcgcctattcatcctatgaggccagggtactttccacccgnttactcatcatcgntatattatcttggtcaaacatggaatggtataatgatgaatccatggcacacactagaagaatattgaccttctat

SEQ ID NO: 42830 - DNA, 438 bp, Zea mays
  unsure (1)..(438): unsure at all n locations
ttaagcacctgagctgcagctgatttgagtgcggacatctttgataaggatcttccatttcgctgcgacctactcgaagagtcttctcattccactgcgtactaagtcttcgagtagagtaagaatttaagttttaaagtaataagttttattcgcctattcaccccccccctctaggcgacatccagatcctgttcccgggtcaaagggaactttcaattggtatcagagctaggcctctccagtgtgggcttagccgtccggagataacgatgtcgtcacaagaggtaactgtagaacttcttttaggcgatggctctaattataaatcttggtctggctctatatataatgctttcatgagtgttgatcctgattcgagacagactataagagaagttntttccatctgatgtagtaacaaccctcaaatgatga

SEQ ID NO: 42831 - DNA, 425 bp, Zea mays
  unsure (1)..(425): unsure at all n locations
cttaactccgagacgtgatacccccttcattggcaaaactttcaggttgacatagactcccacaaggaagtataagggaattcgccgtttgtctgcatcactcattagacgagcacgggctttcttcatattatgaattattttctgaaccttttcttcagcctctatcaccatatcatgcctaaagaagtacctctcaccaggttcagaccaatttagcggagtacgacatcgtcgttcatataaagcttcgaaggggccatcttgatactttcttgatagctattattatatgaaaactccgccaagggcacacattcatcctcatttgngagaagctcagccacatgccccggcatatcttcagtattggttactctctaatttgtcactggttgaggacaaggtccactgtggagcaatta

SEQ ID NO: 42832 - DNA, 382 bp, Zea mays
  unsure (1)..(382): unsure at all n locations
agctnntgctttntgtacatgacanaacatataagactacttctcctttctgccgaagctttcctttacaaaacataaaaaactactttctcttttctgccgaagctttcctttacatgacaaaacataaaagactactactcttttacacaacgattcataaaaatccagttctcccttatactgaaacttttctttgtgccaaagcaacagaacttttcacttttgcacacaatcatagcgtaacaagtcataaaaaggcacttctccgaagctnttttgccgaagcagccacttgggaacacaaatgctatgaatgaatgcttatgcatgcgaatgttatgatgtaatgtaatgcacgaatgaatgtccgaagcatatg

SEQ ID NO: 42833 - DNA, 302 bp, Zea mays
  unsure (1)..(302): unsure at all n locations
gatggagaagcaaatatccttgaagtcttggctatcaaactgcttgccgntatcaactgttagttcggatggtactccgaagcggcaaacaatgttttgccaaaagaatatttgggcagtttttgatgttatggtggaaacagcccttgcctcgatccatttggtgaagtattcgacagcgacgaaggcgaacttaaggttcccctgagccgtgggcaggggcccgacgatgtccatgccccagcgcttgagaggccatgtgtgggcgatcagctttgtaaattgcgaggggcttgctgatc

SEQ ID NO: 42834 - DNA, 423 bp, Zea mays
  unsure (1)..(423): unsure at all n locations
agcttcttgtacctcattagtggagtgaaattacttatttcaagaaactggagaagttggtgggagttcctgttatcaatgttcatatatggttagttgattgaaatatttggttctgaactgtgaattgcctgattcccttgtctggattatgcttgttcgtcgagacatttctgaagctttgctgaaaatttctgttgttntgaatacctcaggtttgacagaaaactgaacaacacatatgaccaccttcttttcagcaggtacctctcctggctgtagntaatgcatctattgtgcaataaatcttggttatgattntttatcaacatgttttatgtgctattctggctgaatgtccatctgcagtattaaataccatgtctttttctttcttttcangagtcactttaagtgctatgc

SEQ ID NO: 42835 - DNA, 408 bp, Zea mays
  unsure (1)..(408): unsure at all n locations
ntgatacacggattanacatcgccatatcactgngcgtcaagagactgatggtgtatggagattctctggtagtcatcagtcagataaacaaggaatgggattgttcaagtgattcaatgggaaaatactgtgtcgtcgtccgaaagctagaagataaattcgagggtctggagtttcatcatatataaagagatcggaacacggcggccgatgtactgtccaaactcggatccggtcggactcangtcccgcccggggtcttcgtgcaagaaattcttcagccgagcatctcgacggatcatatagaagagtgcaacatcatagatcaacccgagtcagactctgatgactggagacaaccgattattaagtatatacagaatgaagaagaaccagatgacaagaac

SEQ ID NO: 42836 - DNA, 274 bp, Zea mays
  unsure (1)..(274): unsure at all n locations
agctngtggcgccctctggcgtcttgtcgtattcaaagcaccagatctcccacctggaaacctcggggtcgaatccttcgggcatggtagcgtcgcagggactgctgataccgcgctgagtgtagcaaggctacgtcccgagcatcttctagctggtcaaatgaatcttctcggctggtttgattgttttggtcgtcgtatgccttttgtcctcagggaaccgtattctaagtctgtgggtaggatggcctcggccccatagactanggaaaac

SEQ ID NO: 42837 - DNA, 386 bp, Zea mays
  unsure (1)..(386): unsure at all n locations
tagcanaagagatttctagaatcaagaatattgagctcatgcctaagtctggtaaaagattgttcatcaagtggcttggtcaagatatcggctaattgatctttagtattaatgtaagaaatctcgatatcccccttttgttggtgatccctaagaaaatgataccgaatggctatgtgcttagtgcggctatgctcgacgggattgtcggccattntgattgcactctcattatcacatagcaaagggactttggttaatttgtaaccgtagtcccgcanggtttgcctcatccaaagcaattgcgcgcaacagtgacctgcggcaatatactcagcttccgcggtggaaagagcgaccgaatattgcttctttgaagcccatga

SEQ ID NO: 42838 - DNA, 373 bp, Zea mays
  unsure (1)..(373): unsure at all n locations
catcaagcttnctccttcttggggaagccttgttttccgatgtactcatccatcttctgaagcagcttctccagagtttgtgggggctttctggcgaattattgagccgtacgcccatatcgaagacccttgatcatggcctcaatgacaattttattatgcactgtgggcgctngtgccctcagtcgcaagaaccttctgacatatgcctgaaggtattcctcatggtcttgtgtgcactggaacaagccctgagatgtgactggctctgtttgaaagccttggaaactggttaccagtatgtccttgagcttctgccacgatgtgattctccctggccgaagagaagaataccatgtctgcgctacgttcc

SEQ ID NO: 42839 - DNA, 425 bp, Zea mays
  unsure (1)..(425): unsure at all n locations
cttgtgcgtggattaagccacagggtcattcacgctcatgtgacgaagtcgtaattgggcctcctcgacctcccgtatcgcgtatgcgaagatgtggggtttacggtttaatggggcgctgcaatggctcttgccattgcacagctacactttaaaggtgacctccatgatgccatgggcttgcctgatggatcaacgatggtggatctataccttntaacatgtgatttcgatggtgccaccaacgttgtacttatggtagtgtcagtagagaaaaatatagatgatctcccatagctcttgttatgtggccagaccgtcttgacatttgcacgtgcatggtgtttatgtccccaagatcctatccaatctcaagatttttcttgtccgcggggactattcggcggtttcactctacacatatt

SEQ ID NO: 42840 - DNA, 285 bp, Zea mays
agcttgcacacatagctcatttgaatacctgtgttcatatattctttataagctatgactaatgtgtgttcaagtctattacaaaccaactcatatcgttattgtgagggaattggagtcttccgcgaagactcatgctaccactccgtaaatcatgcttctccgtcactccgagcaactctctattccttgtggacaaatgagcatcaaacgaaacgacttcattcttggtggagagagtaaaagctcaagagctaaaggaccggatctcgcctatggtataat

SEQ ID NO: 42841 - DNA, 478 bp, Zea mays
  unsure (1)..(478): unsure at all n locations
ctatanaacactcaagcttgacacatagctcattngaatacctctgatcatatctctnttatatgctatgactatatgtgtntcaagtctatttcaaaccaagtcataggtatattgaaagggaattggagtcttcggcgaagaaaaatgcttccactccgtaactcatacttcgccaccactccgagcaactctctcttctttgggggagaaatgagcatcaaggaaaaggacttcatccttgggggagagagtaaaagctcaaaagcaaaaggaccggacctcgtctntggtataatcttaactcatttacttatgaccaaaggggaggaacttacttcgagggctctaatgattccgcttctggcgattcatgcccaaaacggggagatatgagcccaaagctaaaggaccgcaccaccaccaccanaatcaaaaacttaatggcttccaaaagtctttatcattcggtatccta

SEQ ID NO: 42842 - DNA, 426 bp, Zea mays
  unsure (1)..(426): unsure at all n locations
gtcacctgcngcatgcaagcttgccaatacctgtcaaagcaacagcacatgctattatagcagctacagaccataccagtaacttggcctttcgcatgctggggattggatatgattggacctttcaagatagctcaaggaggatacacccatgtattggtggcaattgacaaattcactaaatggatagagttccagcccattgcctctttaacctctgctaaagccgtggaattcatacaaagcataatattcagattcgggataccaaacagtatcatcactgacttgggatccaacttcaccagttcagaattctttgacttctgcgagcaaaagagcattcagattaagtacgcatctgtagcccatccgagagccaacgggcaggttgagcgagccaacggaatgatattggaggcactc

SEQ ID NO: 42843 - DNA, 482 bp, Zea mays
  unsure (1)..(482): unsure at all n locations
gtcaccttagaggctggcgctcctgatgatagtagtttgatttctgctgttgacactcgacttggcaccactgatgcattgcgggttgctccgggtgttgatccttcatcgagccatcaactgatttcccacgacttgggagttccttagttcttctccaacctccaggtaatttggtttttcctgatctggctgtaccccgggtgtgatattatccttacgctcatatgtttttaatgtcaggcattggttgatgaaatggctggtcagctgatgtcgcanggtgcttctgttccggcaagagctctgtctctgacgcactggaatccagtgctgcttcagtggcgggtatctgatttggagatggcaaatgctggttagtgccctttgtttctttcttggctgcttggctaatctgcttttaactgacacccttgcttgattgcttcttgaagatatggcccgaccgaagtctgatcttg

SEQ ID NO: 42844 - DNA, 426 bp, Zea mays
  unsure (1)..(426): unsure at all n locations
agctngatgttctttctcataatgcttgatgtctccttcacacagacttaattgctcttgtctccttacaagttcatcctccttgctctttagacaaatttggtccgccctcaagcatcactcttgatcaagcctcctctgttgttccacctcacgagctcgagtcatcttcacaaagtattggcctttattttccacctcctttgtcactcttcgtggctgtgtcggtggttcctgagccacccattcattgaaattgcaagggtatgtatgttgttatagatgtcatggaatgagttaaaaaagatcacgagaaacanatattttagttggtgtgggtagaatgaagatttcatctagatctaggcaatttgatatgatttagatggatagaagggggtaataacctattaattttcttttcag

SEQ ID NO: 42845 - DNA, 484 bp, Zea mays
  unsure (1)..(484): unsure at all n locations
ctcagcttcaaagggagaacacattntaggattaacaaatgttcattttgagaaagataggatttgtagcgcatgccaagcagggaagcaagttggtgttcatcatccacacaagaacatcatgacgactgacaggccactggagctcctacacatggacctattcggcccgatagcttatataagcatcggcgggagtaagtactgtctagttatagtggatgattattctcgcttcacttgggtgttctttttgcaggaaaaatctcatacccaagaaacattaaagggattcttgagacaggctcaaaatgagttcggcttaaggatcaagaaaattagaagcgacaacggggcagagttcaagaactctcaaattgaatgctttcttgaggaggagggcatcaagcatgagttctcttcttcctacacgccacaacanaatggtgtagtggagaggaagaatagaactctactggacatg

SEQ ID NO: 42846 - DNA, 375 bp, Zea mays
  unsure (1)..(375): unsure at all n locations
agcttcgacatatcccattcctgcatagntggataatatttgaaagccaaaaattcctgcactaagtccctagtgtcaatatgctctgcgataatcctgaattcagccagcgcagtttgggttggaccttctggtgtcatattgcattgnggtctggtctctccgaagatcaattctagcggactctggaccagcttctccttgtcatcgtcaattttgacgtaaaaccattctgatttacagcctgccggccacttgcttcggtagctgatcacaggaaattttgtagtctttctgtaagcaaaattgtaacaaccaaaattttcatgtaactcattctttctggccttggtttggtaatgtagctcgtgcact

SEQ ID NO: 42847 - DNA, 470 bp, Zea mays
  unsure (1)..(470): unsure at all n locations
ctgtcaaatgcggccctagcggactaagcttggtatgcaaggattcagtcattacctgtaaaatttcttccacattggcaccaggaggtgttgcaggagcttcttcctctgtatcagctgttntctgttttggagccgtagctctcctcttctttgaagcagctgcctttggctcaaggcttaactttctcttcttaaaacttcttcgtcctttttcactaacttagcagcttccttatcaaggacgctggcaactctctttctttnttgcccttcngcacctntatccagtctctcataatcaggataatcganattcaaggcatccatcactcggttcaatcttcgcttcgaacgagtgccgaacgccgcagtcattaactgatctatcttttagaatagttgccaacgatttttgtgcacataacttcgatagtatccaaccattccttgcaaggttctttgaaatg

SEQ ID NO: 42848 - DNA, 329 bp, Zea mays
agcttgcaacaaccgagcaaggggtcgaagaaataccttcagatgctaatatagcttttgaaaaaggtgcggccaaagaagccgaatctcttattctcgaagcgccttccgaagttcttgattatatcattcgacatgcttcgggaaagaaactatctgaacaagaaatttttgaagcttaacactatgcccgagaactgaagtacccgaaggaagccttagtatttaatggtacagatgaagatgattttttgtattgtctctcggacaacaaagaattgtcttgtctgtcgggagatggccaggagtatggggtttccgaagctcga

SEQ ID NO: 42849 - DNA, 421 bp, Zea mays
  unsure (1)..(421): unsure at all n locations
tggaaatttcgagggcaatccttagtcggtcatcccatgagagtgaanatgttccttcaacatggagatggtgcgaaagagtgccatttgatataaactcatacaccaatagtggaacttctgcctcaagacaacaaccaaggagtttgacaatattcctatggttgatctgtgaaagaattgcaacctcatttatgaaatcatcaatttctctttttactataatttttgatttcttgatggcaacaacttgtaggtctaaaagtcctttatacacaacaccatgcccttcaccaccgacttcatgagacggatggaagttgtttgtagccttctctagctccccaatggtaatgatcatcctttcactgatgtctgaatattgtgataccaattggtgtagtagcacgccatgattttg

SEQ ID NO: 42850 - DNA, 444 bp, Zea mays
agcttcagtttcctccccctcgcgctcaaccctgtcggtagagcggactctggccattcaattatgaacttgtgaaactttaatattttcttcctccgaagcaggtttcaaactggagcttcgttcgattctaacagacaagcttcggtgatggttaaaaattttggcaggaaaacagtgcacatagcaatgaatgctgtggtaacttcacacctactcgtctgtttatatagtgctgcaggtaagaaggcgaagcgccagagtttttacaccaggcgcacacccgcttgcgctcgctgcgcggtggaccgcagggacaaacagtaaactctgcaaggtgggaccgctacatgctgtgagaataaatcgcttctcgacaacgagctcacggaaggtgtttttggaccttctgctccccgaagcttaagagaactttttcatgga

SEQ ID NO: 42851 - DNA, 366 bp, Zea mays
  unsure (1)..(366): unsure at all n locations
ntctcgactaagtcggggacagggcctcatggacggatganagtactcgtaagcggcaaggccgaccgagccgagggattcccacgcctctgggatacggatacctcactcgtcccttccacgagaagcaactctcgctcacacaaacatccctattaccgacagagtccagatgctcgaaacaagagggaaaaaggcgcagcttcgcaagcgtggcgagggtgtgtattttctggcctcggcggccgcagaaagcacacgctacaagatgatctgatcctgcaggctcgggtcttcacgctgaagggagccgtagcaccctcggcatcgacgacgtctccagcaaagcccgacccagcctcgggc

SEQ ID NO: 42852 - DNA, 280 bp, Zea mays
accagctgatggaaaagagcgtagagatgttcctggtgtatgggaaataccagtgaaaaggcttagtgtacacccagccatgggaaccaacctttgaatgggcttcttgctgaagttttgaccatattaagttttcgcttgtgaggaacataaacatcatgcctggtgatgggaaatcttaagcacgaaaaattaagggtgttgaaactagacagacaggctggttgtcaaaacctatgaagtgggaggaaatgaaaaagatgatgtctatccatggtgc

SEQ ID NO: 42853 - DNA, 398 bp, Zea mays
  unsure (1)..(398): unsure at all n locations
agctntatcaaatggacgtgaaaagtgccttcttgaaagtcgcctagagggggggtgaatagggcgaaactgaaatttacaaagttaatcacaactacaagccgggttagcgttataaatataatcgagtccgagagagggggtgaaaaacaaattgcaagcaaatagagaatgagacacaaggatttgttntaccgaggttcggttcttgcaaacctactccccgttgaggtggtcacaaagaccgggtctctttcaaccctttccctctctcaaacgggcacttagaccgagtgagcttctcttcttaatcacacgggacactaaagtcccacacagaccaccacacaattggtgtctcttgccttggttatattgagtttgggcacaagaagaat

SEQ ID NO: 42854 - DNA, 295 bp, Zea mays
caaaggaaaacatcatttatttaatttaaagaataccaacgtgccaaataatgatttctttctgtagaaacattatctagctggcatggtttctataacctcttcatgagattttgtttctatcatgtgtatctctctctctctatatatatcacttattcattaatttatttgcctaataccacgctgcttaagactctagagcggtaccagaggcacatctatgcttcagctgatgctgcagtgccatctagcgatgagatgcaggtgcgcggactatctaatttactactat

SEQ ID NO: 42855 - DNA, 365 bp, Zea mays
  unsure (1)..(365): unsure at all n locations
ctctaagcacctgcggcagcaagctatgaagatctttattcacatgtgttttcggcgagccagagccactcatgttagtttagcaattaacaagtgtcgagtcagctctataaaatcactcagttagctgaccctctacactccctaaatgctattgaatatcacttttctaaagacagcgcacctacatcagtaaaagacagtgtagccatttcgataattgagatacagaaagcanattgaatctaatgaatctacaagaaaaacattggaatagaatggtcggagatatgcgatttaccaatccttgatacaccttgattcatcccgatgtatgcttgtggagacctggtttttgtagagag

SEQ ID NO: 42856 - DNA, 227 bp, Zea mays
caccttgaatgcgacgggatgagctttcgatgtaaatggatcatccagctcgttgatcttcctcgagccttctatcatgcacttcaaacttacaaaatgcccgattactttctcggggggtcatttagtatatctcggattaccacgaattaattggacttgagtacggttaaggaaaataagagatcctagaataaccttaaccactttgtgggcatcccacttta

SEQ ID NO: 42857 - DNA, 350 bp, Zea mays
  unsure (1)..(350): unsure at all n locations
agcttgtgaaaccaatcacaagtttattgaataatgataccaaatttaattggtcttcaagatgcaatgaagccttcgagcagctgaaggtgttattgaccactgctccggtattagctcaactagacattgaaaggccatttgatgtgtattgtgacgcatcaagcagtggtttaggttgtgtcttgatgcaagaaggccgagttatagcatatgcctcaagacagttgcgtcggcatgaggaacattatccaactcatgacgtggaattagctgctgtggttcatgccctgaaaatatggcgtcattatctgctggngaatatctgtcatatctatacagatcataaa

SEQ ID NO: 42858 - DNA, 311 bp, Zea mays
  unsure (1)..(311): unsure at all n locations
ctcagcttgcaagagactcgatgacgatgctgagcaatgcgagcaacacacgaaggcgaggtcacggcgactgtgacatcgctgctgttcatgacatagagcttcactcgggcatttcatcgaacgcccgtgaagtgccaacgatgcggggctgcgggggaaactctgctgcgaaaagctgcgctgtanggggttggacatgcttcagccgaagtggagggggtggtgatgtccattggactgtgcaaaacagtgagccgacagagcactgagttgccgtggctgctgctgggggaatgcccgtgtgctat

SEQ ID NO: 42859 - DNA, 427 bp, Zea mays
  unsure (1)..(427): unsure at all n locations
ctgcggctgcagcttaatgctcttagaaatgtctaattttgtttatgcttacgctcccatggttcaggatcacgagggttacattttatattctgccagttatcccgaatataatattaggagaattcattctatgaagtctcactctggctctcatcatgcttttatgtataagagtgaggcatctagttctaggcgatcaactcatgctaaatttgcctacaaaaagactcctattgcatcacatgatcataacggttcatttaacactattgatgcattatatcgtttaactaacaaatcaggcaaaggtatttgccaaatatgttggggccaaacacaagggctcaaatacttgtgtttgggtacccaatgtgcttgttctatgttaaggacccataccgttgagtcctacacaangctaatt

SEQ ID NO: 42860 - DNA, 450 bp, Zea mays
tctcctgtccggaataatctacggtattccggacagtctatttcttatagttatagatgaacctttggcacctgtagaacatataatctagagcaaactagttagtccaacaatttgtgttgggcaattcaaccaccaaaattatttatgaactatgtgtaagcctaattccctttcaatctccccctttttggtgattgatgccaacacaacccatgcaaatataaaagtgcataattgaactagtttgcataacgtaagtgcaaagggtgcttggaatttatgcatgaaattgttctttattatataacattttggaccacgcttgcaccacatgtattgtttttgcaaactatttgtaaatccttttaaagatcttgtgcaatagtcaaggtaatgaatagatttgagaacattttcagaattgaattcttcccctgttcaatgctt

SEQ ID NO: 42861 - DNA, 374 bp, Zea mays
  unsure (1)..(374): unsure at all n locations
tctaaagggagaacacattntaggactaaccaatgttcattttgttnaagacaggatntgtagcgcatgccaggcaggaaagccacgtggcactcatcatccacataagaacataatgacgacagacaggccactggagctcctacacatggatctattcggcccggttgcttacataagcatcggcgggagtaagtattgtctagttattgtggatgattattctcgcttcacttgggtattctttttacaggaaaaatctcaaacccaagagaccttaaagggattcttgagacgagctcaaaatgagttctgcttaatggtcaagaaaataaaaagcgataacgggacggagttcaagaattctcaaattg

SEQ ID NO: 42862 - DNA, 327 bp, Zea mays
tctaggggaaacatttggactaccaagtcattgataatacagggtcgagcgcatgtcaagcagggaagcaagttggtacccatcatccacacataaacatcatgacgaccgacaggccgcttgaactactccacatggatctaattcacccgatcgcttacataagcatcggcgggagtaagaaattgtcttgtaatcatggatgattattctcgcttcacctgcgggttcttttgcaggaaaatcacaaactcaagagaccttaaagggattcttgagacgggcttcaaatgagttcggattgagaattcaaaagaatagaagcga

SEQ ID NO: 42863 - DNA, 385 bp, Zea mays
  unsure (1)..(385): unsure at all n locations
agcttcacaaatctntttatgacagatacaagcgccacatacttgggtgttgtttggttcacatatatgtaacatgatgggtaactgataacattaaaccatgttttgtttagtccaaccgtattcgaataactagtaaataatattgtccatgttaccgctggtactcgagtgtgatcattactctaccatatacattacatttgttgaaccaaacaacaccttggtttcttcgcttcacttattttctgcaagccgttgtgtttcaagcatcacatgttgatacaactctgtttattcttcactaacacaaccacacatcatatctgctgctatatatcgatgactacggccgacctgagggggcttcattccccctaatgct

SEQ ID NO: 42864 - DNA, 457 bp, Zea mays
  unsure (1)..(457): unsure at all n locations
ntgaacgatggacaaacataagatcgaagctgataaactgcgaaacccacattcttgtaagaaagcgagaaatgaaagacccgatccgacagaagagaaatcctgaataagtccggtgctccaccaatgaaggattgaaggagaaaccccactgactctgcgttcaggcgcaaggagcacctaccaaatgagataactagaaaaaactcagagagatcaaatttacccggcatttcgtcgcatcttcggagccgctcgcgacatttggcccagcatccagcggcacaacgatggctcaaccgcgcccccgttcccgctcgccgttgccgccgaaaggggctgggcttgaggttgtctgcatcgctcgccgcgcggccatccctccccttgcatggagcgcccccaagcccacaacgcagccctcttgcagccnctctgtccgacagaagtgatcaca

SEQ ID NO: 42865 - DNA, 393 bp, Zea mays
gcatgctcctaagggagaacacattttgacgctaacatatgttcattttttataaaacacgattagcagcgcatgtcttgcatataagcaaagttggcgctcatcatcctcacaagaacatcatgacgaccgacaggccgcttgagctactccacatggattacttcgcccgatagctaaatagcatcgggggaggagtattgcttgaatggggaaaatatctccctaactggggggcctttagcagaaaatctataccaaaaaaccttaagggatttcggacggctcaaagattccactgaggtaaaagatataagcgcaccggacgatttataactacaatgaggttcttgagagagggtttacatgatttccttctcttcgcacacaaat

SEQ ID NO: 42866 - DNA, 183 bp, Zea mays
tctagaagactacgtgattctcattattgggctggcctaatgaactccaacgatcaattccttacgtggggacgttttcgggtgatggtcaaacaacaagatattgggaggataaatggcttaataatactactcttatagagcaactctctaatctattttatataatgcgccataagaact

SEQ ID NO: 42867 - DNA, 395 bp, Zea mays
  unsure (1)..(395): unsure at all n locations
ttgcgagagagggaatggatcccaggtctcatgagatgtctattgttgtggagaggaggttgatgttggatgagccgtattggtgagctctcccagctntattctccgccccttgggaaggccctgggcatctacttttatacgcacaaggaggtgacccacatgtacacatgggggtgtagctatgtgctaacatggacggcggataagtgctttgaccctgtataatcgtggctggcggatatccctggccacaggtggtcttgaagtttgtgtactgctgacgttctttaacttctagagagctgatgacagtcccgtcatgggcgcttgccgggaacatcataattgttctgggggaatttatgtgaaaccgtcttgttccttataccctg

SEQ ID NO: 42868 - DNA, 455 bp, Zea mays
  unsure (1)..(455): unsure at all n locations
tgtgcccttaaacatggtggtagttgggataagagcatatcttttctgaggtctcttacaataatagctaccaggccagtctgaagatgtcaccatttgaagctttatatggcatgaagtgcaggacttctctatattggaatcacactggataaagacagttctttgggattgaactcatacaagaggccgaagaacaagttcgtataattctggagaatttgagggtagcttcaaccaggcaaaagagctaccttgataatataagaaggctactacagtttaaggagggtgatcacgtatatctaaaggtgtcaccggtcccgggtatgccaagatttaaagttaaagggaagtngtccactcgcttcattgcaccttttctgatcttagagcgagtacgacaagttgcntattaactgaaactacccgatcatctggggatgacatgatgg

SEQ ID NO: 42869 - DNA, 359 bp, Zea mays
  unsure (1)..(359): unsure at all n locations
ctaagtcgactgcagcatgcaacttnaagagaaaatattagatcatggctcccttctatataattagactaacttatgtagcaatattggtgtgtgaagagacacagacaacatattaacgtattagtaccagcaattgaccgctaaaatgcatctggatgtcacatctaagctcttagcttatacaaataccctttttatcttgcaatctcttttgttaacatgcctctgaaaaaaaacaacatacaaaactcacaaaatactgtgtaactatttttggaaatgtgccgtacatgatgaatacacacactcgttgtcttccgtaagaggtgtggtgatcacaatcacatcacactttg

SEQ ID NO: 42870 - DNA, 304 bp, Zea mays
gctgttcgtcgtcgatgagcgacgccaacgcgagcaccttctgtcagtggtgtttggttggggtttccaagtaagaaacatggattcatctttggcgttggtttataaaaatgactcacaagtcagagccatgggaaaatattactgagaataaatgtcacacatattaaaaaataagttgagaacattaattataccaaagaaaatgcatgcaacgctcttttttaaatactactccatccatcccaaaaatatgattcacgaatctcggtgataattatctactactacacattgtgcaaag

SEQ ID NO: 42871 - DNA, 434 bp, Zea mays
agtggttaaatttgctctctctttttttcactctatccacccaagaaagcacgattttatccttttccacgggttcatttcttcagctaataacttctgaccgaacggtggcgagggctatcacctaacttacatcttcaacattcttttgcgccctcaaagcgttgcttagaattaagccctgcataaagataggatcagcaccagaataccagacaatataattattttaagttcatcactttcgtaccctcacactgttgtatgcaagactgtctgcgaggtcattctttgacatggcggagaggcccgcttcaagccttggaaataccatattttagccatcttcctgcagacggatatttccttattgtctgcgagacagtataagaagtcatctttgtccgtgccattgtacaccaaggccccctttg

SEQ ID NO: 42872 - DNA, 463 bp, Zea mays
ctaccaaatggacgtgaagagtgccttcctcaatggaccaatcaacgaagaggtctatgttgagcaacctcccgactctgaagatagtgagtaccctaaccatgtttataaactctctaaggcgctttatgggctcaagcaagccccaagagcatggtatgaatgccttagagatttccttatcattaatggcttcaaagtcggaaaggccgatcctactttatttactaaaactcttgataatgatttgtttgtatgccaaatttatgttgatgatattatatttgggtctactaacaaatctacttgtgaggaatttagtaggatcatgacacacaaattcgagatgtctatgatgggggagttgaagtatttcttaggatttcacgtgaagcaactccaagaaggcaccttcattagccaaacgaagtacactcacgatattctaagcaagtttggaatg

SEQ ID NO: 42873 - DNA, 310 bp, Zea mays
tctaaagggacaacacgtgatccgtctgactgacgtgcattataataaatatagaacctgtgctgctcgtggcgcaagtgaacaagtgggacgagcgcataacactactaatgtgatgaccacttcaagatgcctgtagctgctggatatggacgtattccgacacgtcatctatctgcgcatcggagggagctagtgtggcctactgatagttgatgacttttgccgcttgactagcgtgataaatttgcacgataagtatgaaattcaacggagcctgtagcgcgttctcatgagagctcacaatgag

SEQ ID NO: 42874 - DNA, 446 bp, Zea mays
  unsure (1)..(446): unsure at all n locations
tcaatgtttattccagcacaactaattcttatgcaggtcctcctaataagggacaccacatgggtgatttcattcctcaagaagaacttgaaaagtttatggcacggtgtaatgatgctgcagcacaaaaggctaccaaagaagccgctgagaaggctaagattcacgcggacaatattgggcacaaactnttatctaagatgggttggagggaaggtttgtccctaaatacttaataccattaagccttgttcggttattcccatcccacatggattggaggggattggaaaagtttaaaaaggattttgacttgctatggatttaaacccacccagtccagtccaatccacatggattggcactaaaacgaacaagcccttacaataatctctggtaaatctgtcacattattctcttcataaataaatcgcttaacgtcattc

SEQ ID NO: 42875 - DNA, 468 bp, Zea mays
tgtaaggcgcatcaactaaccgatccccattgagaaccttttattggcctcgctcttctccttcactatgtctgccgtggatacagttgattagcacactacatgttttgagaaactaatcattgctattctagctcggtgagcaaaagacttcaaattaacacaaactaaccacgagagcagaaaggcaggtcgaaatatcgatatgtttcactgcaatgaaaatggaacgatgttagaatagcaatcaccataattgtataacctatgttagcttgtaccataattgttctccttcaccacagatccaacgcctaatagtaacagattcacagctcgaggaattatattcaatccagaccagctgtaaaattcataatttggtcatatacctatacaggctcggtaggaagcaaaatatataccctacgagaaggttctaaaggttactgaatcaattgcaatccc

SEQ ID NO: 42876 - DNA, 396 bp, Zea mays
tgcgcggaggttccttgacgcactatacctacatatatgtctttctatttcctggcataaggcagtgtcacacagccttgcagtaatgcagtgacacgatgcttaaccacttaaagcgtcagccactacattagcctttacatgaatgaatatgaaatatagatcacgatcctttattagctccagccagcttctatgactcatattcaactttgactggctaaaaatgagcttcagactcttatgactcctagtgtatgacatacattccctagtcgaatatgatcgccagactttcagggcatgaactacagcttaccacttcaaatcatgtgtcgggatatgctcctcacgccgaattacctaatcttatatgcataagcctaaacttcaacc

SEQ ID NO: 42877 - DNA, 466 bp, Zea mays
  unsure (1)..(466): unsure at all n locations
agcatgcaagctctgtatcttacacaccttgagaggctaatgaaccatcacttcntctaatgacaaatacatcaatatttgtaaataagcaattataacccatatggcataattgacttatataaagtaaacaattacccagtgattccactgaatacattacaaattgaatgctcggttgtgatggtgattttacccaaaccattgacctttccatgaatcccatctccaaagataattgtatcttgggaatccttgttcttgacgaacgaggtaaacatcttcttctcccctcgtatgtgggttgcgcatccgctgtcaataacccaactttcgaccctccgatgcataaacctacaaagtagattaaccttgggatttaagtactcaaactcttgttggttcctgcacggctagtcacatatgaatttggaacccatatgcaagtcttacctttattgattta

SEQ ID NO: 42878 - DNA, 351 bp, Zea mays
tgccttcgcctcagtatatcacccgcaatctaacggcgtcttctatcgcgccaatggcaatattttcactgccatcaagaaaaggcttctcgacgacaggaagggtaaatgggccgaccagctacctgaagtagtctgggcactaaacacgaccgaatgccgagcaactggatttactccttttcgtctactatatggattggaggccatgaccccgaaggaaattaagcatgggtcacctcggacaagtgcatcagtcgtccccgacgtggacaaaccaacttccaaagacctcatcgatggagactgcgtctttgccctgcaggccctcaacaaataccaagcccaaac

SEQ ID NO: 42879 - DNA, 449 bp, Zea mays
tagcatgcgcgagttctggatcagagaagtgctattcttgtgtcatattataaaccgagatagactagctgtagatacaaagaaggtagcaccgattctggactggatagtgccaaaagatgtctgaggaatcaagagcctcattggaatggccggatactatccgcgctttattgaaggtttcttcaagattgccagaccaatgaccaccttgctagccaagaacgttgagttcaagtggaccctcagcatgccaagaatcatttgagatgttgaagcagaagttgacaacaacaccgatgatagttctgccacatgttcaccagccattctcaatgtattatgacgcttcgtacaccggactgggatgtgtgtatatgcacgaccggaatagtacggcatactcgtcccgacaatcgacagtccatgagaagaattaccccactcac

SEQ ID NO: 42880 - DNA, 403 bp, Zea mays
  unsure (1)..(403): unsure at all n locations
ntaccggtttctaggtgtgcccgacaaaatgcactctgtatagcgtctagcactcggcaaagagccggattccggtagtggtggaagggactcttggccattctctcacctgtgtactcctctctctctcttatttgatgtataaccaacattaacaaataaacaaaatccatttttgtcatgagttccttaggtgtagttgctctatatcaatctcatgagttcctatagagagactagccagttgctcatgttttgctacggtttttatatatcatataaataggtattgaaatatttattcaaatataattattgtttatttctaaacactaaggtatgtgtcgtctggtggttgtcccacattattggagttgggggtgtgggctcgagtgctctgcac

SEQ ID NO: 42881 - DNA, 425 bp, Zea mays
atgcaacaagatcttgaagataaaaaacattaatttataattgagggtttacaaagcacaataaaagatcaagcagctgctcttgaaaagaaggatttccagcttcagacaacagaaggtttattggcagaagctaaagctaaaattgcaaagttaaatacagagcttctctcatagtcagaaagctttcaacaggaaaagtagaagttaaatgccaaatttaagactgaggtcgacaaaagttcaaatttgcaaaaataattgacggagcttcaaaacaaatgtttggagttcagtaaccgatgtgtacaacggctgaagcagatcttcaattccgttggagccagctgtgaaaaatttagtccattggctgaagacttggcagaggccttcgaacatatcgagagtgaaattgatgatcttga

SEQ ID NO: 42882 - DNA, 404 bp, Zea mays
  unsure (1)..(404): unsure at all n locations
ctataaaactcagcttctagggagaaccgtgaaggtctaccaagttacttttaaaaaatagaccttggcagcttgcaagcaggaaacaagggcaggagccatcnacagcagaatgtgatgactacatcaagacctctggagctgctacatatggacctcttggacccatcgcctatctaagctaggaggaagtaagtatggactagttattgtgatgactttcccgcttcacttgggattcttttgaggataatctgaaacccagggaccctcaagcgcttctaagagagctaaacgagttggctcaggtgaaaaataacgacgacatgggccgactcaaaatttcagtgaggagtccttgggaggaaggacaacacgagtctcgctcctaccacacagaaaat

SEQ ID NO: 42883 - DNA, 439 bp, Zea mays
tgtagttattttattacagaccagactcaaagtgagtgcatatagtaatattatacaaaccagggaggcaaaaactccttccgagaagacaaaagcataagatcctatgtggaggaccgagtcctcccgcacttcagtcttgattttcttcttttggaaccaccttggcacaaagccaccaaaagctgctacttcctcacctaaaacaacgaacggataaaaccctgagtatggaatactcagcaagtcttacccgactaaagaaaagactctcaagggtatgctggttatatgggagtcaacggaaagctttttaatattcaaagactctgtttttgcagaaatgcttactaaagtggatccttaaaaatccagttttatttgtcaagttaagtaaaattacctgtactagagttctttctatcctagatcaatcact

SEQ ID NO: 42884 - DNA, 299 bp, Zea mays
  unsure (1)..(299): unsure at all n locations
gagtcactcttcaaaactacaagatactgacctctacctccttaagctatgatatcactttttaagacagtgacacctacatcagtaaatatacaggtggagcccatgtgacataattgagatacnggaaagcaaattgtaatctaatgaatcaacaagaaaaacattggaaatggaatggtcaggagatatagcaaatttacccaaacctttgacaaaccttggtttcatccccgatgtgatactcgtggggatcttggttttctcgaggaagagaacatttcttctccctgcatgtg

SEQ ID NO: 42885 - DNA, 485 bp, Zea mays
ctattacggaactatgaaactcagcttaaaagggagaacacattataggactaacaaatgttcattttgagaaagacagggtttgtagcgcatgccaagcatgatagcaagttggcactcatcatccacacaagaacatcatgactagcgacaggccactggagctcctacacatggatttattcggcccgatagcttacataagcatcggcgggagtaagtactgtctagttattgtggatgattattctcgcttcactagggtgttctttatgcaggaaaaatctcatacccaagaaaccttatagggattcttgagacgggctcaaaacgagttcggcttaaggatcaagaaaattataagcgacaacgggacggagttcaagaactcacaaattgaaagcttccttgaggaggaaggcatcaagcatgagatctcttctctctacactccacaacagaatgatgtagtggagaggaagaat

SEQ ID NO: 42886 - DNA, 412 bp, Zea mays
cacttagatactaagcttagcttttatggagagcaatcgcgtagcctttgactatctttcttcgttctctcgctcttattagaagattgagcatgaccgccttatcttcatggcttaagcgagatgatatgcgcaagaagcttttttctctctactcatactcatttgggcttccactatcatgttcattatccaccacaacataatgtgggaatctaaatgggagacaaccttttggtaggtggtatcatcgtttggctccatcgtcatttcttcttcttccttaaagggtagttcacaataccacggaagtaatcacaaataactttatgtctgactcatcaatttgttttaattctatcaaatatcatcgcatctgatagatcattatattattagaggatgatatttc

SEQ ID NO: 42887 - DNA, 421 bp, Zea mays
  unsure (1)..(421): unsure at all n locations
cagcatgcaagacttaactgcgcatatgtgtatgcgatgtattaatactttttaaggccggggggaccgacaatctttgttctgacagctggaataccgaacctccaatggtttggtgtataaagagactacaattgcntggttatggattcacttggaccaagccttgaggatctatttaatttctgcaacaagaaattatctctgaagactggacttatgctcgctgatcagatggtatgcactatgccataattggatcctcttcttcttaagctttactaatattgttttcatttatgagcaactcttatgagtgtctgtttcatgttaaacccaccattgctatcattaccacattggactttgcattgccagatgccacgaataatatcatctttttatttatcctcatacttat

SEQ ID NO: 42888 - DNA, 437 bp, Zea mays
tgaagccatggtaagtagcatacgctaataatatgcgaattgactcaagcctagctacgggtgcataggtttcatcgaaatccaaaccttcgacttgggagtatcccttggctacaagtcgggctttgttccttgtcaccacaccatgctcgccttgcttgatgcggaagacccacttggttcctacaacattttgattaggacgtggaactaaatgccatacctcattcctagtgaagttgttgagctcctcttgcatcgccatcacccaatccgaatcttgaagtgcttcctctaccctgtgaggctcaatagaggaaacaaaagagtaatgctcacaaaaatgtgcaacacgagatcgagtggttacccccttatgaatgtcgtcgaggatggtgtcgaccgcgtgatctcgttgtattgcttggtggactctt

SEQ ID NO: 42889 - DNA, 335 bp, Zea mays
gacctaagcacagagctcagcttgcccacgcagtccagtcctgagtggctaggccacgcatccgaaacaggcccctatactgataagaccagttcacgcgtatttattccggaaaaagctgatgtgaccaccagactcaccatctcgggactctttgcagaacaggcctgaccacaatgggccggttggccgcaggtcaaaagtattactcagctacaggatcaaccatgaaaatcacctgaataaccgactcagttggcgacccgggatgacgacctaaggatcgactccttggatgcaccaatagtccagctagaaaacccgcttattgcaac

SEQ ID NO: 42890 - DNA, 455 bp, Zea mays
tcgtgagtgcgccgaggcgacggcggggtcgcttcggtctaccttgtatgtccttcgcaggggcattcccaagatcctccaggtaatgagttcaagcatacctttcgcgtgatcaaggcattctttgtgatgccccgcttcctttcctcaggatctgacggatctgagcgccgccaagtcatcgttcatccgccgcgaggccgatgtctggggctcgctgcggtccctgaggaccacgcttgccggggctaccgagcgcctctcccaatggagcgccgaggtggcggaccttcggttgctctgtgtcgatctaggagcaaaggcagcggcggcacgcgtagaggcacagcggcagcggtcggagcttgtgcaggtcatcggtgagcgggaccaatctcggaaccggaccatctaggctgaaagctgggatgaggctcttggagtccagttagccg

SEQ ID NO: 42891 - DNA, 374 bp, Zea mays
  unsure (1)..(374): unsure at all n locations
gcagcttctaaatgctaccagaattatgcctgttacattcaatatgtctacattccgaaaagaaatctaaatgtttaattcataaatgaaatctagcacttcttgctcgttctgtaacctgaacaaaaacgcttttgccctgccatataactctttgtgccacatctctgcgacataatattagcggtacaagaatttggagaccctaaccttggaattgncatttattttctcttagaaatagcaacaagaagttcatacaaaatttctttgatgaactgtgagaaactaaatagcaatggtttttggtgcctcttgacaataaagagatcaacgtaacctgagatttccattatagatgaaaacttcaataa

SEQ ID NO: 42892 - DNA, 454 bp, Zea mays
  unsure (1)..(454): unsure at all n locations
tggcaaactatttggtctanggaagcataggcacaggtaatatgtgtcctctctgttggcacttgtacttgtgcttgttattagcgcccagcacgaacgcatgatcttgcttnctctaacttgggttctaatttcatgggcaggagcctggatgatgtgaaaatgaatattgacgttctcaagaactgtgctacagtcctgttcctggtattttcacaccttcttgttccccttgaattagcccatcttactaaggctactaacttgaacagcttagaccatcttcaacagcttacctttacatatactcatattcaaactacactcaataaacagttcaatatacaatgtaaaacaatgcaaaacgatgtttttagtgatcatatatgttcagtgagcagtcgagcgtagacgttcctttaataccttagattcgaagatgctgaataataat

SEQ ID NO: 42893 - DNA, 444 bp, Zea mays
tgtgaagattcttcattccaacatgtgctagtcggttatgtcttagccagcccatgttagtcttagctattaagcaagtgtccagttcaactctatcaaaatctactaagtatagctgaccctctaacactcccttaaatgctactgaatcatcacttcttctatagacacgaacacctatatccgtgaaaagacagtcgtagcccattttgcataattgagaaacggaaagcaaattgtaatctaaagaatctacaagaaaaacattggaaatggaatggtcacgagatatagcaattttacccaatcctttgaccaaaccttgtgttccatccccaaatgtgatagctcgttggggatcttggttttctcatacgaggagaacatcttctttctcccttgcatgtggtttgtgcacccgctatcgatgaatcatcttgagcc

SEQ ID NO: 42894 - DNA, 279 bp, Zea mays
  unsure (1)..(279): unsure at all n locations
atagtgagtattctaactatgtttacaaactctctaaggcgctttatgggctcaagcaagccccaagagcatggtatgaatgcctaagagaatttcttatcactaatggcttcaaagtcggaaaggctgatcctactttatttactaaaactcttgacaatgatttggttgtatgcccaaattatgttgatgatattatatntgggtctactaacgattctacatgtgacggaattagtatgatcatgtcacagaaattcgagatgtctatgatggggg

SEQ ID NO: 42895 - DNA, 450 bp, Zea mays
  unsure (1)..(450): unsure at all n locations
tcgggtctccataataatgaanataagtctaatgtatatcctattcaatgctcagaggaggacattatggtagtgcaaaacctgctgccatgtgagatatcaactttcccttgtcgctatcttggtcttcctttgtctctatacaaacttactaaagaccaagtacaacgagttgtggacaaaaattgcaggacaactcccgaagagctgacttattgacaagtgcaggtaaaagaattcaagcgcaacacgtcctcacaggcatgatcatttacctagctatggctattgattttccttcttgggccttggatgccattgataagatccgaanaggcttcctatggcgaggacacanagaagtaaagggggccactgccttctgtcttgtggaagagtgtgtcagccccttaagctgggaggtttgggtatttacaacctgcatgagtt

SEQ ID NO: 42896 - DNA, 350 bp, Zea mays
gctcatgtatagtctcatgtagggccaccacgacgccctccaagatattccttcctggaaggaatgcaatctgcgaaggatcgccgtgggctggccacgcacgtggcccctgcgccgtcggtgtaccaccccgtcttcattcaccgcaccccgagcacactcaccccatggtgactcgccgggccgtcggtgtccttcgaccttgcgacaggctgatcctggccgccgacatgttcgctacttcaccgaacgccatcctttgtctcttcttcgttcgcaccgacctggccgacccttactggcgttcgccatgtaggaggagtatgcggtcctactgggcaaccacacct

SEQ ID NO: 42897 - DNA, 346 bp, Zea mays
actgcagcttgcaactcggcatccgagtgtgcaaagctgaagatgtatttactctggcggagctatctcttctaaaacacacctttagctgaatacttgcccagaacattataacacattgaaggggaagttgatgcccttgatgaagttattggtgggcaccctgacattttcgccctggtagcttttcggggcacagctgctgtttttttgaaagctggctgcacacatggaaacactgtgaacagaccaaacttcagcctatcagctttcagatttgttagatatcccaagcttatccagaagcatcggaaattgattcatgacctatatctgggtaagtggc

SEQ ID NO: 42898 - DNA, 439 bp, Zea mays
  unsure (1)..(439): unsure at all n locations
tcttgtataagggatggtgagtacagtgcgctgcatggcacggatgcactgtatgacaacggattggacaggcgcgccgcctgcaggatgacccctgacgccatctgccagcggagtggacatgacacattaaatgctgagagggcacatcacctgtcaacatggtggcagacagcgcgtcctctccgcaataaatacagagaccgtggggctttagaggcctcacgtcaggccccgcccgttggcttatgtcacgggctacaagccacgcggcggctgcgggtctccgcctgagctgggagcgcagggtaaggcctagacacgtgccagctccgcaccctcactcatgccggggttccttccatcccggngccttgctgtggtccggaccttactcggagagatctggggcccgtcggcatgccttcttgggagttcc

SEQ ID NO: 42899 - DNA, 345 bp, Zea mays
tgcagctgcagctggaccctgtggggagacaaaggtcttctcttgggacgtcttgctgtggctcgagaccggactttctttgaggcccttttttcctctttgtcttcacttgaaagcttgtggaaaaggagaaactgggaagccgctgggaggatgcttaactcggtttaccctctcaaaacgaccatttttggctcgggctgaatctcggcgcgacggccactctggaacttggccaattactgactgtcttcgcttgggtactccgaattatctcctgattaacatccctgggacgtgtgctacgaggctgttaatttgccattacgcttgaggctcctgaag

SEQ ID NO: 42900 - DNA, 59 bp, Zea mays
tcgtattcagcaatattatttgtacagctgaaatcaagccttattgcatagcatgttct

SEQ ID NO: 42901 - DNA, 447 bp, Zea mays
  unsure (1)..(447): unsure at all n locations
tgagaanatatttcctccatcattttgtgatgtgatgctacacttgacaatccatttacccgatgaagcaatccttagaggtccagtgcaatatggctggatgtacccaatagaaagacgtttatacactttgaaacattccgtgaggaacatggctcatcctgaaggttcaattgcagaatcatatgttgctaatgaatgcttaaccgcgtgttctaggtattttgatgatcttgatacacgacacaacagggagggaagaaacagagagcgtgttgatttgaccaagggtgagttgtctgtttttcaacatggtgttcatttacttggagcccctaagattacatatgtagaacaagtttttgacaagatggtttggtacgtcgtaaacaattgtccggagggtgagccatatataatgtatgtactcccatgtacatgtttttt

SEQ ID NO: 42902 - DNA, 428 bp, Zea mays
gcagcatgcaagcacctaaagggagaacacatctcacgatacacacatgttcatgttgcgatagacacgatctgtcgcgcatgctacgcggtgaaacaagatggagctcattatccacaccagaacattatgacgaccgacaggccactgaagctcctacacctggtactattccgccacgatagcttacataagcatcagcgggagtaagtactgcctaattatcgtggatgattactgcgcgattcacttagggtgatcctccttacaggaacaatttcgaactcccaagaccttatagggattcctgagacgggctcaaaatgatgtcggcttacagatcatgaaaatatgaagcgaccaccgaacggagctcaagaacttatacatagaatgctttcttgaggaggaggagcataagcactgag

SEQ ID NO: 42903 - DNA, 463 bp, Zea mays
  unsure (1)..(463): unsure at all n locations
tcagtgggtagctgacanaattccactgtatcaactgtacttattatcttctcctcctctctaacaagaacttcagcgcatgccgctgacatcttccatcacaatgggcaaggaaaaaatgtcagctgccacagcattgaatgatatgaaatatgctaagagcaagatgcacctgtattagtgattcgtggtggctggcgtgacggaaggcatcagtgttgcattccttgtcgtgggttatacccacagctgaacgaggggatttcagtatctttctttctggcatcctggctttatcactagcattctctaggcttaatctccgtggcctacggggagtgcaatccagcacttgctatgttctctcactctgggttgcacttcccttcactttaagagatggttttctcaagtctttacttgctaatgcctttttcgagtatctacctgaagaaaggctaac

SEQ ID NO: 42904 - DNA, 250 bp, Zea mays
actgcagctgcaacttcaaaggagagcacatctaagattacaattgtcattttgagaaagacaagatgtgccgcgcatgccatgcgcggaaacacgatggagaactttactccacacacgaacattatgaacaccgacagggccgcctgagctacttcacatggatctatctcgcccagtgctacataccatcgcgggagaaatattagcttgaaaaatggatgaaaaatcccgctacacttgggcattc

SEQ ID NO: 42905 - DNA, 465 bp, Zea mays
tgaagccatggtaagtagcataggctaataatatgcgaattgactcatgcctagctacgggtgcataggtttcaccgaaatccaaaccttcgacttgtgaataccctttggctacgagtcgagctttgttccttgtcaccacaccatgctcatcttgcttgttgcggaagacccatttggttcctacaacattttggttaggacgtggaactaaatgccagacctcattcctcgtgaaattgttgagctcctcttgcattgccaccacccaatccgaatcttggagagcttcctctaccctgtgtggctcaatagaggaaacaaaagagtaatgttcacaaaaatgagcaacccgagatcgagtagttacccccttatgaatgtcgccgacgatggtgtcgacggcgtgatcatcgtggattgcttggtggactctcgggtgtggcgggcttggatcttcctcat

SEQ ID NO: 42906 - DNA, 341 bp, Zea mays
aaagtttatctctacctactgacctacttaaaaatgttaaacccctctgtcatttattaagtagtttaacccttatacataaatgcttaagctaagaaaattaaaaaggacataataatgaccagggtccccccattttgctgaaacttatcaatgagttactggaaaatattcataccctatgtaggtaaataagaagctatttttattccataaacaaaataactagaaaaacctacaaaaaaccctaggtgaaacctcccaacctatgatactatgtttgataaagagcttagaaaatccgaatctgtgttgaattttcaaatgacaaatattttaag

SEQ ID NO: 42907 - DNA, 65 bp, Zea mays
actttatttttattaacatcagggatgacttttccacaacacggacactaaaggtcaacaaattt

SEQ ID NO: 42908 - DNA, 366 bp, Zea mays
tatcaaactcagcttcatactataacgtatccaaagacgaaggatcgaaccgacttatagattgtatgactttatagtccatacgggtctgagtcataattgtaatctttgtaaagggcatgattgtaatttcttacaggctgtgtcttgtgcctataaatagatgaacagtactcctttactgttcacggaatcctgtaatcgctgactcattacgctggaattattggtctctgtcaaggcgaaggtataaatgtacctaaatattatgttttaacatttaaattcctattattaaataagtgaagaatatcatttattcttgctactctataatattttatattttacatttcatttcgcact

SEQ ID NO: 42909 - DNA, 463 bp, Zea mays
tcagctatggttaaatattttaacagcacaacagtgcaatggcaatgaatgttgtggtaacttcacacctacccgtctgtttatatagtgctgcaggtgggaaggtgaattgccaagttgcccgcacccgctgaatggtggaccactcggtgcttatgaggtgaatcaccagaccgtgcgtacccgccgcatggtgggccaccacgcgctcggaatattttaatcgtttctcggcaacgagctcagggaaggtgtttttcggaccttcggcattccgaagccttggagatttttcacggatcaagctcgttacgaataacgatctatcaccacgaaggggctactgttgggggtctacttcatcgccgaaggtcctttaagaagaaacaccttcggaagatcaactcataagcaaatacaacacgaaggtacacgccgaagctaccatccagggagctttggc

SEQ ID NO: 42910 - DNA, 291 bp, Zea mays
cactattaaactcaagctaatggccaaacacgttttgttggctgatgctattttatatggaatccagcgaatacaagcatataggctcccaccaatcctttgcaataagtcttcctagaccacagacaaatgtaactgaaattactcacatgcaaactgttgcgaagggacattacgaaaatcatagctcccatgaatatgggtggtgcatgcgagcccaactcgttcacgaatgcccaatccacctctatttatctcttctgccccaacaacacattttagagatctccc

SEQ ID NO: 42911 - DNA, 234 bp, Zea mays
ctcgcccccggaacaaaatcgagaaaactaagtagatctccttcctaggttgcattggtaattacctcgcttgtctaaatatgggctctgataaaaccggcctacaaggaactttatgccaccattgggacttgtctggtcccacgattattggccattaaacaagaaagtttttttctcaacacaggggcgcacccataaaacattcaaaacttcaggataaattgtatcact

SEQ ID NO: 42912 - DNA, 365 bp, Zea mays
ttcaaactcggctcgccgatgaggtcagcatcctaacgcacgctaggtatactcaaaccaccacgggacagagcggctccttgcgcccatgcgaagcttataactgcgacaggctggtgagtgccttgactgtgagcgggggacgatgtaaactgtgtgttaacacattcgttccccagaataaactaacactgctatttacttgaggagagcgccttccattcctgcaagcgcttggatacaccgctcaacgatggcgtttagctgcctactaaacgacacagaatattggctctgacccctctcgatcgagccatgctacgcacactaagcttccttggagtgaaacgcgttgacactgtgga

SEQ ID NO: 42913 - DNA, 211 bp, Zea mays
tagcttacccgcattgaagcatgatcagtttcctttggtcttattcttgcttggctggccattgcgaccctctagcactgtcttgaatcttctgatgatgagggccctctcttcatcattaaaaccggccgcctcaatttgcgccaccttgctcggtagcgcctccttgcttcttgttgtcttgagggcgatgggttgaggctcatggatt

SEQ ID NO: 42914 - DNA, 295 bp, Zea mays
  unsure (1)..(295): unsure at all n locations
tatactcaaccaccggaacgcnttgccgagtgcgtggcataccctgaanaacactcggtaaagaggactcgacgaacagtaaatcgacaaagactcctttgccgagtactttttatcgggcactcggtaaagtatttaccgagtgccagacgggactcggcaaaggaaaacagacgtcacagagggcgggtgacagagaaactatatgaattcatgtgcgtatcttttaagtgtctacacatagtggctcataactttttcggaactttctcaaaattttatcacagcctctata

SEQ ID NO: 42915 - DNA, 349 bp, Zea mays
attagtcatagcaattaagcaagtatcgagttcagctctattaatatcaactaagtatagctgaccctctaatactcccttaaatgctactgaatcatcacttcttctaaagatagtaacacctatatccgaaaaagataggtgaacccattttacataattgagaaactgaaagcacgttataatctaaagaatctacaagaaaaacattggaaattgaatgggcaggagatatagcaatgttaccaagtcctttgaccaaaccttgatttccatccctgaatgtgatagctctttggggatcttcattcttctcgtaggaggagaacatcttcttctccccagtcat

SEQ ID NO: 42916 - DNA, 456 bp, Zea mays
  unsure (1)..(456): unsure at all n locations
ntgaccgtggatcactcatcgatttcgggttcaaagcgcatgcgtggccgcccaacgaaatatgagtatcctgtaaatgaactaccacagaatgtacagcccatccagagcgccccacctcttcttcactgcacacaagatggctcaagtctggccagccatgcatctggtggcggtgctcatggtaattggtccgctcaacctacgaattcagctaatgcttctcttcaaggtaattctggcaaagatgactttcttggcaagcattttgtgggcaagctgaccaagaaagatcctgggttttcgctcattacggcaaaagtgaaggacaatcaggtgctcaaagggtgggtttcagatgaaattaatctccgcccaataacacctaaggatgacctttgcccagagctacccatgctgcgaccgagtctagtctaaagcgagcatcatcgatcc

SEQ ID NO: 42917 - DNA, 370 bp, Zea mays
cagctcggtgccaatggagaaacaaaaatccttgatgtcttggctgtcaaactgcgtgccgctgtcaacatgttatgttcgcgacgaatactcctgaagctggcaatacatatgtttttgtcaaaaagaatattctgggcaggtttctgatggtatttgggaaacacgcctcgcctcgatccatttggtgaagtacttgagagcacctagagggggggtgaataggtgatcctgtaaaacttcaaaacttagccaccaaaacttgttagggttagcacaagtatgtgcaatggctagagaggagtcaaacacaattaccctagaaagcatcatagattgacacggggtattccggggtcggcaagtcaaa

SEQ ID NO: 42918 - DNA, 203 bp, Zea mays
tgtacgttccgggcttcagaactatggcgatgactaacgatccttcccaggaggcgtgagcttgtgccgtcctctggcgtcctgtcgcaaccgaagcaccaggttcgccacctggaggtctcgggaccggacccctcgggcgtggtatcgtcccacggactgttggtaccgcgccgagtgtagtaaggtcatgttccgagcct

SEQ ID NO: 42919 - DNA, 355 bp, Zea mays
  unsure (1)..(355): unsure at all n locations
ggtcatatcggctcgccctccatacgtattcaggatcatgggtgcaggggccgcctgtccctatggtctggccactttacttaatccatgcgccggatgaaccaagcatttatcctcttcagatgacagacctgataggaaaacaacgccgtctgcacagctacgactgtggcgccaccatgataagtgaggctgacttacgacgagaccgcctcggcgcggtaggaagctacgctcgcccgcactagtgctcggactcccnctgatctcggagacggtctgtgcctacccgacctanggcttgctctcctcgacatggatacggtgtcccttgacgaactccgcttgactcacc

SEQ ID NO: 42920 - DNA, 360 bp, Zea mays
actacccccactgctgttcgccgctcggaacaagacaaactaatctctggacacggcggatcgactcttaccttcttcggcggcgaatacgtcgcccttggttcgcctccttcgctagtcgttgagtatttcaagcgcgcggtctcgtggcctaaggaaccgggtgtggagaaataccgcgcagtagcgtgcccattcatttaccgcgacagagaatgaaacgggacgggagaggaggaggaggacgacaccagtgaatacatacggtgcgcctgtcacaccttaaacatctacagtggaaggggatggggacgcaagggctaacccgttgaacatagtctcaatctacttcccactaat

SEQ ID NO: 42921 - DNA, 414 bp, Zea mays
  unsure (1)..(414): unsure at all n locations
ntagccgtctcgccagaatcaaactcgtttgggagctgatttcttatgtgcagattggattggcagtgcgcgtgtgacgagagaaacgtggacgacctcactgggcagcggccggcggcgggcacacgaggcaagatggagcgcagatgacctcgtcgggctggtggtacgcgacggccaccgacgaggatgcatgagcggcaacacagacaccgtcgacacctctactccatcaaacgtgcagcgatgcaacctctgtggtgggccatggctcacgtctcgaaggccaaggcggcctaccacccctccgtgactctgtgtgcacctgtgcgcggaaacgaacagtgggaaaagagagagtaaaaaaagctaggagctgaaccagaaacgtgtgggatgcaatatcaaacaagc

SEQ ID NO: 42922 - DNA, 412 bp, Zea mays
ccgcagcagctaccttacatgtatatatcagcctccttccaagtgttttaataatatacttcgcaacatcacaatctttagccttaacatcaatatttacattttctactctaacgctagcatgagaaatgattaattctttaatcctagcaagcacatcatcattattatctctatgattgggaattgaaacattacaaacatgcgaatcaaccttaccatttaaactagcattttcatttcttaaggttgtcaatcatctcacgacaagtgcttaactcactatatagattttgacatttttctactcctaaagcataagcacttttaaccttaacatgctttttattttccttgattaagaagtcctctagcgagtccaagaggtcatcctcttcatggatggactaat

SEQ ID NO: 42923 - DNA, 429 bp, Zea mays
tgcacacatagctcatttgaatacctgtgatcatatctcttctatatgctatgactaatgtgctttcaagtctatttcaaaccaagtcatacgtatattgaaagggaattggagtcttccgccaagaaaaaggcttccactcagtaactcatacttcgccatcactccgaggcactctctattccttgtggagaaatgatcatcaaaaaaaaggacttcatccttcgaggagagagtaaaagctcgaaagcaaaggaccggattccgtctttggataacctaactcattacttatgaccaaggggagaactactttagggctctatgatcccgttttggcgatatcccaaaagggggaaaagacccaaacaaaggaccgacccccccccaaattaaaactatgctttcaaagtttatcattgtatctat

SEQ ID NO: 42924 - DNA, 182 bp, Zea mays
  unsure (1)..(182): unsure at all n locations
tctaaagggagagcacattntangattaacaaatgttcattttgatatagacaggatttgttgcgcatgccaggcggtgaagcaagttggagtccatcatccacacaagaacatcatgacgaccgacaggccgcttgagctacttcacatggatctatctgcccgattgcctaataaacatc

SEQ ID NO: 42925 - DNA, 248 bp, Zea mays
atccacctcaccggacttcggtgctccgacgccgcgcgtggaccgagctatccagtgagacttcgcccaatttacttgcgctcatgtcttatctggcaccctcggaacctctctgacccatccaattgctctatctcgccgtgaacaggccggacttctcgctcccgacaagcattctcgcctgggcccgtggaccaaccgaatccgcgctctacgactgtgacacacaacaccgtgagataccccga

SEQ ID NO: 42926 - DNA, 173 bp, Zea mays
tcggagagccaacacatcttgatagagtgctgacaaccttcgtttcattccggtcccagaggcatcctaagctctcttcgtcaacgccaccgaagagcaatgctcctgcctggtagccgcaagatatagcataatactttagttcttctgtttcagccctggaaaactcctga

SEQ ID NO: 42927 - DNA, 463 bp, Zea mays
tggtacctgacagaggtacatcttttctgatgtttatcctattacagccataatggatccatcatcaagttttattttcaaaacatccctcccactttgccactcattattttgtaaaacaaaaaccttttgtttggctagagcaatactgagcataataaaaaccttttgtaaaacagggtatcaaggaaggtaatcaaagatcaaggaaggtaatgcaggaattgtttaaacattcaactcctatcacctaatgcatcaatcaggtgagaaagattttaaattcatcaaggaaggtggaaaatgcaccggggcttgccttcgttagtaggtgagtcacgctcacgcccgcatatgtcaaagtaaagacaagatcctgcctgagagtccgaacgtggtggtgccttttcttcactcacttcaacttcttcttcggtttctaaacataaccacatatatgtat

SEQ ID NO: 42928 - DNA, 144 bp, Zea mays
atgacgaccgacaggccactttagcttctacacatggatctattcgacccgattgcttatataaacatcggcgggaagaagaactgtctaattaatgtgggtgactattcttgcttcacttgggtgtccttttaaccgaaaaat

SEQ ID NO: 42929 - DNA, 266 bp, Zea mays
  unsure (1)..(266): unsure at all n locations
gtgtgatgcggctgcttcctccccttgccttcccttccctttctatgggangcgcggaacagaactatgaacagggcacggtacgcggcacgagcactacgaacgccttcaccgttatactgactaaaggagcagctaagcttctgcggatgaattgtgtgcctgtgtgtgttaaaaaagagagagaaaaggtcatgttggaatgtgcttaatggtgggaaaaagaacagggggcgaaagggtatatggtcttgtgactcttaaaa

SEQ ID NO: 42930 - DNA, 345 bp, Zea mays
atgcagcttgtgaaggggcttaccctacatgtgctatattgtgatgtcacagccagcccatgctagtgttagctattaagcatgcatctagaccgacctcttcttttgcaaaatcaactaaataaagtttgccgcctaatacacccttaaaagctagtgaaccatcacttcttctaaagacagacacatctacatttgttaatagacagttatattccatattgcataaatgacgtaaccggtagcaaattatattcaagagactctactaaaaacacattaaagatagagtgtgcattagaaaatgcagatttacctaacacttttaccttgcctttgattcca

SEQ ID NO: 42931 - DNA, 287 bp, Zea mays
cttgctggcgaagtttgcaagaccattgatgcatggagcaatttttattcattcataaaatggattcggatcgtctgactgtcactctcaaaccacataaataaattgcaggattacaagatgccaagaggcaatatcttttgcattaccagactcgcactcttttaacatctcatgtataaaaataggggggaaaggtgcacggccaacttaaaattgctcaatttaacatctaaactgcttgtttgcttctatatgccatgcacccactggactggaataagctc

SEQ ID NO: 42932 - DNA, 382 bp, Zea mays
  unsure (1)..(382): unsure at all n locations
atggcagagtcggagatcataattagaaaaactttcaaaatcgttgagataaccaccctgcctgtgcnataaaataaggcacaaatagcacacaaatctcaagacacatgtctgcacaacaatttcagtaatccccacatgcattataaattaaaatatgtgaagacgacagcagaagctcaaacaaactgtgccttattaaatcggaaatcaatcgactttaaattcaggaccaagcattataatggctaggcagcttggcaagccctgcatcttgccaacttgctgagtcacagcgcagcgccatggtgagcagcatactgtgtcctgngnggggcacacanggcagcactctagtaagcgtagctctggcattcgcaca

SEQ ID NO: 42933 - DNA, 443 bp, Zea mays
tcttggcctcagctgccaccaccaccaccactgcaacctacttattcccgaagccagcagtcagaagggagccaacactctcaacagctacgtgaattcagagaggaatccgaagctcgtacagtcaatagtaccgcgccacaatcaaagcatatatactgagtgatatcctgcctctgaaatccttttatgttctatgccatttctctttttaataagacataagcaatgttagcttttaatttcttataatgattttgcttctatcagaatgaaatatattttcttcacaaatttacgaagattaaaagttacgaagctacaaaaagtcgttcctaagggagcgcatcgtatgttttgtgctcaaaagacgctcctaagggaatgcagagctaaaattgtcgaagctacaataagtcgttcctaatggagcgcaacgtaag

SEQ ID NO: 42934 - DNA, 457 bp, Zea mays
tctgcttcgtccatctccatattctgttctggcctgctctcatacatgttgttacactgtgttgagtaatatatcacattatcctcttgtttcacattttctcctgcgctgcttggggaaatgcgatcgcactcgtctaatgggcaactctcaagggagtgtgcaatatatggttgcacactgctttcattgttcctagtgactacatcaacatgttttggccctccattattattatcagcagacaaattatggtctgcattttctgttgttcctacatccactgatgcagatatactaaacttatcttcaaactcacaacaccacaaatcctctgtttatctacatgagagtgcctttctgctataatctcatagtggcaagtacatgactgacgatcgtcactgaagatacttggctcctatgtgtctggaccattattaaatccattcacatg

SEQ ID NO: 42935 - DNA, 423 bp, Zea mays
  unsure (1)..(423): unsure at all n locations
ttggttngaaatgtttagagtgtcaatatttgtaaattctcatgtttctatgtttcttatattttgagatattgaaagttttttggatggaaatacatcatatactaaaaatatagtacttgacatgatttaaaagattgtacttcttttttttatttgagttcatttattagtcataaggaatataaactattgatatacaacaataacacaatgtatataaacacaaacacgtttgtggtgtgaagtggtagacagtggcggatataaaccccgggccatctgattcgtgacccaaggcattgattcatgcatttgtacacatctttattactattagggtaagaaatatcatctttagattaaaccatatgagaactataatacattaaatagatcggtatgctttgcaaacaaatagtt

SEQ ID NO: 42936 - DNA, 286 bp, Zea mays
tcttgtgaagcaagttaacaagtgggatgaccacatcacatcatgaatgcgatgaccacttctagacccctggagctgatgctatggacacttctcgacccgtcacctatttgagtataggaggaagtaagtatggtctatctattgttgaagacttctcccccttcaattgggtgtgctttttgaggataaatatgatacccaacggaccctctaacgctttctctagagagctctaaatgagtttgagcttaaagtgaagataataatgagccacaaccgggtc

SEQ ID NO: 42937 - DNA, 187 bp, Zea mays
  unsure (1)..(187): unsure at all n locations
ntctcgactaagtcggcgacagggcctcatggacgggtgaaagtactcttaagccgcaaggccgaccgagccgagggattcccaagcctctgggatacggatacctcactcgtaccttccgcgaaaagcagctctcgctcacacaaacatccctgttaccgacagagaccagatgctcgaaacaagt

SEQ ID NO: 42938 - DNA, 145 bp, Zea mays
  unsure (1)..(145): unsure at all n locations
ctaagcttgacttgacctgagccgtagccttatggtgctctgatgtgttaccancacggaaaagagagtggcggtacccctaattctgtacccgaattattgaactggatcattgatcttgggtttagatttaactatggatttt

SEQ ID NO: 42939 - DNA, 452 bp, Zea mays
tctaaagggagaacacattatatgactaacaaatgttcattttgtgaaagacagggtttgtagcgcatgccaagcatgaaagcaagttggtgcccatcattcacacaagaacatcatgacgaccgacaggccacttgagctactccacatggatctattcggcccgatcgcttacataagcatcggcgggagtaagtattgtcttgtaatagtggatgatcattctcgcttcacttgggtattctttctgcaggaaaaaatgagttcaaaatgagaccttatagggattcttgagacgagctcaaaatgagttcgccttatggatcaagaaaattagaagcgacaacgggacggagttcaagaactctcaaattgaaggcttccttgaggaggagggcattaagcatgagttctcttctccctacacgccacaacaaaatggtgtagtggag

SEQ ID NO: 42940 - DNA, 387 bp, Zea mays
ctaccaatatccaaacaaccctatttctctttgtggaccatgggatctgaatttagaatttagaaatttagacctttgaccaaagatcaaggatgttcaccttgatccctaacctcgaatactaatggccccattgacaaaaatgtgtctaattaacccctccgtcgtgtgccacaagatgtgattgggacactagccctatacaccacaaaatctgtgatttgccttggtttgggagggagacgaacagattttctgctccttatttgcaccataggcaaatctataccccaccaaaatgttcttgtaggggagaaatgtttggcctgacaagcgaagcagcttgataacacacacccccaaactggcaaacgacgcacacgtgtt

SEQ ID NO: 42941 - DNA, 419 bp, Zea mays
tgacacaagagttatgcagacaaacgatgccaacccttatacttttagttgaagattatgtgtatctgaaagtatcgccaatgaagggtgtatctcgtttctaggtaaaaggaaaacttgcacctcgatacattggtccattcctcattcttgaacaatgtggaccggtggcataccgactccaactacccgaaacattgtctgttgtgcacaatgtgtttcatgtgttccaaatgaataagtgtcttcgggtttcagatcgaaccattgaagtgacggacgttgccttagaaccagacttgacatattcagaacatcctattcgagtcctatatcataccgacagggttacccgaaggagaactctctaattttataagatacaatggaaccaacacattgaagatgaagctaccttg

SEQ ID NO: 42942 - DNA, 284 bp, Zea mays
aagcgcgctggccaaaaggagaataggtcttggactatccattaacactaaattggccactcaacagaacaaattctattaaacaagtttcagcccactctaacgacaacatggccaaagaggcagtatccaaatacagaaaggatctttaaggaaacatgtgccccaaacaaacaaagatgttacctggtatgagctcaactacatatacatagtgaacgtgtaagcaaccaaatatagtctagacagctatgcatgcccaaagaatatctacatcatcctca

SEQ ID NO: 42943 - DNA, 133 bp, Zea mays
  unsure (1)..(133): unsure at all n locations
ntacaacacgacgacaatatgtttgggcctcggcggccgcttataacatacgcacactacaagataaaccgatcctgcaaactcggaccttgacggagggggagcagcaacaccctcggcgtcaactacacct

SEQ ID NO: 42944 - DNA, 379 bp, Zea mays
agcttgtagtcatatgctatccctaagcaaacattataatgctaagtgtaaaaaagggcgcttccacattcttaaaaaatagcccacatactatgaaccacataagtgtgagagtctgttggtttgacctaccataagtggtactctcggttgtctctgggcataaggttaagataaacaaagttatagaaagattatatcatcagtttagaattcaatggtagtcatcggtgaggatttgtttatgcaataactatttctccatgatcagatcattagaatattgccttgcgaaaccaggatcatatgtcagcacttatgttatgaatatttatgtttgttgttatatatatacatatatatatacactcgaattctc

SEQ ID NO: 42945 - DNA, 227 bp, Zea mays
tggtgccgatagagaaacaaaaatccttgagatcttggctgttatactgcttgccgttgtcaactgttagctcggacggtactccgaaacggcaaacaatgttttgccagaagaatttttgggcagtctttgatgttattgtagaaacagccctcgcttcgatccatttggtgaagtattcgacggctacgtgagggtcccctgagcggtgggcacgggcccgacaa

SEQ ID NO: 42946 - DNA, 311 bp, Zea mays
accaactccaaccactgtgtttgtttctccaacctttttggctatcaatttacaagagcttaagtggatagacttaaaacttgcccactacattaacttgggaaagctactggaaaaacaaaacacaatttttagagtgcatcattaccaaagggagattggaacctgttggtttgtattgatgaactatatgctatagtgtatgtgaaacacgggattatctagtcctagggagttttaccagggggagtggtgggaatgaagctactatggataagactatgattaaactaatggctgtgttatgaaaa

SEQ ID NO: 42947 - DNA, 355 bp, Zea mays
actagctgattgagtacacagaagccaggtgtttatgtatctgcaacacaataccacaagaagatcaacatagattggcacagtggtttatctcgtgggttggcaagtccatacttgcctactccacattgtggcattccaacatacgagggttgcactctacccctctcaagtggaccagagacccacttgaataccacggtgttttgcttagtacactatattccgcttgcgaggaatctcaacaacttggagcctatcgcccttacaatttgatgaacacaaaaaagcacacaactaaggatggtatgagcaacacacttaagacacaaaattttgaccacaacacgcactc

SEQ ID NO: 42948 - DNA, 149 bp, Zea mays
ctcagcttgtgagattctcattccacatgggctagtctggtgtcaagccaacccacgttagtcttagcacttagcacgtgtccagttcagctctatcaaaactaccaagtatagctgaccctctaacactcccttaaatggctatgaat

SEQ ID NO: 42949 - DNA, 449 bp, Zea mays
tgagcgagacgaaaggtgattatgacgaaggacaaggtgatcactaatccgtgcaggaaagcttcggcacgacagcagataaggggaaccgacttaaagatgaataggcaaatcagacctcgaagaattactatagagttattagcaaatgtaaagggcatgaatgtaattctacatgggctgtgtcccttgcctataaatagatgaacagtactcccgtactggtcatgctaacttggcattcactttttgcatcacgcctgtacccttactttccgtcaaaccgaaggtacatctataatttgttattgtgaacatggtaatgcaaataaaaataagttgatgataatggttatattattcttcatatttcatatatgaattctttctcatcatttattgttcttacgaaggttgttccttcacaaccttcgtccggattcattata

SEQ ID NO: 42950 - DNA, 171 bp, Zea mays
catgcaacttaacatataacttctggtatataaagatatttcttgcttagaaagctaagctcacagtgcagaataaagtataatcctaacaaaataaataacaatgtggtgaaactttcttcaaagactcatgcacaccttacctcaagacaacgtgttgatgtattgtat

SEQ ID NO: 42951 - DNA, 431 bp, Zea mays
tctaaagggagaacacattatgcgactaacaaatgttcatttctatatagacaggatttgtagcgcatgtcaggcagggaagcaagttggtgttcatcatccgcacaaaaacattatgacaactgacaagccactcgagctactacacatggacctattcggcccgatagcttacataagcatcggcgggagtaagtactgtctacttattgtggatgaatattctcgcttcacttgtgtgttctttctgcaggagaaatcttatacccaagagaccttaaagggattcttgagacaggctcaaaatgagttcgacttaatgatcaagaaaattaaaagcgacaacgggacggagttcaagaactctaaattgaaggctccttgaggaggagggaataagcatgagtctcttctcctaccgcacaaaaaat

SEQ ID NO: 42952 - DNA, 294 bp, Zea mays
atgttagtttgtagcaataagctagtgtcgagttcatctctatcataatccacttagtttagatgaccctctaacactcccttaaatgctattgaatcatcactttcttctaagacagagacacctatatctagtagaagacaggtgtcatccatgttacatagttgcaaaactgaaagcatgttgtaatctaatgattctacaagaaacacatttgaaatggaatggtcatatgatatagcttttgtacccaatcctttgaccagaccttgattccaatccctgaatgtgata

SEQ ID NO: 42953 - DNA, 92 bp, Zea mays
tcgacatagtgacatgtctcaagacgaaggggtgaaccgacttatatattaaatgacccacagacccatgggatgttgtgtcattattgtag

SEQ ID NO: 42954 - DNA, 297 bp, Zea mays
aagggaaaatcttacagctgtccaaaagcgctcctcactaaaaatagggcagatgggaccgattgttaccccgcgcaacctgggcactaaacatgactgagtgcatggcgactgcgtttactccttttcgccttctataccgatcggaagccatgaccccgcaaggaaaaaaagcaggggccccacgaacagatccgttaggccgccgggacgtggcgagcccacttcaaggatcttattgacggagaccgagtcttgccctacaggcctagacaataccaagcccagacaaagcat

SEQ ID NO: 42955 - DNA, 425 bp, Zea mays
  unsure (1)..(425): unsure at all n locations
acactatanaaacatcagcttgtgaagaatcttcatcccaacatgggctagacggtggtgtcatagccaacccatgatagtcttagcaagtaagcaagtgacgagtgcaactctatcaaaatctaccaactatagctgaccctctaacactcccttaaatgctattgaatcaatacttattctaaagacagtgacacctacatcagagaatagacagtttgaagcccactttgacataaatgggatacggaaagcatattgtaatctaaagaatctacaacaaaaacattggaaatggtatggtcaggtgatatagcaattttacccaatgccttgaccgaaccttgatatcataccccaatgtgatagctcgtcgggatcattgcttttctcatatgaggagaacatccttttcccacgggcat

SEQ ID NO: 42956 - DNA, 260 bp, Zea mays
  unsure (1)..(260): unsure at all n locations
tgtgacaagtacaaattcataagggagaaagcagcttcttgttatcatccgaagcccatgctcttatgtgaggatatagcacaacagaaagtgctgttgggcctccaattattctaagagcacgagaaaaccttgttaatgttttttgtcacaaccaaaangattttgcttagcagtccactgacttttttcgatttaacaggaagtttattgacaactcctctattttggcccctcctttttaccctacaacacaagct

SEQ ID NO: 42957 - DNA, 317 bp, Zea mays
aaccacgccgaacacttaaaggagacaggaaggctaccttttttcgaaaaatcacccggccctgacagctgtaacaaggggagagccactcagcagaaaggatgccccgcagaccctggaccgtcgctcggacccttggacccgctcctacttacctgcgggaagatgtagggccacttattggtgagacttctcggtccctgggcgtcataggaggaaagctcaaacccaaggacctaagcctcctaggaagccaaatgagtgaccaagcaaaaatacgacacacggtcaatctgaactcacggaaattcctgaga

SEQ ID NO: 42958 - DNA, 443 bp, Zea mays
  unsure (1)..(443): unsure at all n locations
cttacagaantcccgataacttcctcgggcgcagtagcggatatttatgatttctacgaattaatcgacatgagaggcgtaaggaaataagtgctcttaaaataaccttaaccaccttgaggtcatcccacttattgctaccgaggatgcgcacttggttcaccaaggtcttgagccggttgtacatatcttgtggctcctccccttggcgaacacggaagcgaccgagctccccctcgatcgtttccagcttggtgatattagtgagttatcaccctcgtgcgaccgcttgaataagtaccacaactcccttgcgttcttcaaccctcgcacttagatgtattcctcctttcttagaaaggcaaagagaatggctgccgcttgggagttgaaatgctctattatggccaaacttctcctggtaatatatcttattccctaca

SEQ ID NO: 42959 - DNA, 416 bp, Zea mays
tgctacaagccttcttctttttctccatagcaggaaccttactgtaatactaccccacttaaaaagaatgagggtagaactcttgaatcttggggatttgaactccttgaagtaccacataacaagggtgttacgggtccttctgctgctgttgctgcttgagctggctgcggagggatgactggcacagggttgattctgggagaaccttcttcttatcttctcttcactatcttcttttctcttctcacttttcacttttcactgcctctttctttctctttgctcttcccactggaggagtctatcgatgagtattaccatcatacagaggaggaaaccaaatactatgaaccatgtacaacagtcttcaacccaagaatcaccaagcattgtgatcttatgggcgagggagt

SEQ ID NO: 42960 - DNA, 189 bp, Zea mays
tctatagcgggtgtaaatagaatttaccttctcataccccctgtcttgtatcagaaattagagaaataaaatgtaatgcgtctcctttaccattatctaccctatgagcttaatatctggaccagattctattcatgggggatggagttaacacccctcgtgttactatatctaaaacttgtacatggc

SEQ ID NO: 42961 - DNA, 437 bp, Zea mays
  unsure (1)..(437): unsure at all n locations
aactcagcctctaagggagagcacatagcaggatgaacaaatgttcattttgagaaagacaggaattgtagcgcatgccaagcatgaaagcaagatggtgctcatcatccacacaagaacatcatgacgactgacaggccgctggagctcctacacatggacctattccggccgaatcgttacataaacatcggtgggagtaactactggctaaatattgtggaggattatactcgcttcactcgcggattctttctgcaggaaaaaactcatacccaagagacctgggttcttgagacgggctcaaaatgagtctcgattaacgatccaaaaaattatgaacgacaacggaacacaggtcaaagaaccacagaccganggcggccttgaggaggagggcataaccatgagttttcttctcccacaccccacaaaaa

SEQ ID NO: 42962 - DNA, 452 bp, Zea mays
  unsure (1)..(452): unsure at all n locations
tctggtcntcaactttgacatggcacatgtcacttttctttgattcttcatgtgcagcctacaggattgaatccaggttagtatacagagcaactccaactgataagagtacgtacacattacaatgagatttacactgtaaagtgcaggatgaagtcatgtccaagcacacacttgacagtgggtccaggcttgacctcgagccctgcaaaactcacagcaatctgagatagattatatgaagaacacaatacttgatgttgttagaacaatcatttcacaatgcacaaaataagaaatttatgagcatacctcttcctgccatgtggagcatatttgtagaagaacataagatgatattcgaggaaggatacaatacgaatgatctgatgttgtttaacanaggtagcaaaagaacaaacattctaattcagtggcatcacgtactataa

SEQ ID NO: 42963 - DNA, 322 bp, Zea mays
cgctatgggcttcatgggaaggtttggacatcaacccacacaaatatattgcctattctgtggtgaatataacggacatacctccacgatgtgtcacgttaccattcagaaacagaaggagatagcagacacagctgctctacaaagtcactcgaagcatgtcatgcatactgctttgtatcattccccttatattccagaatatgtaggcaatcaccccgcagcttctgtcgcttctgcaagccaaccccaagcatcttggcatcattctccaccaccgtcgccgacgcaactaggacagcactcaaataggagtcaccac

SEQ ID NO: 42964 - DNA, 85 bp, Zea mays
taaaaactagcttagctgtcgctcaccttgaggggctctttttttatgaaagagtcaacgtgggttgaggttggtaaatccaaag

SEQ ID NO: 42965 - DNA, 369 bp, Zea mays
  unsure (1)..(369): unsure at all n locations
agcttgacagngactgacaagggctaccttcaactttatggagctcggaccatgggcgacgcattatgtcttggcgccacccttgaaagccaaccggtgtgcgtggtgggcccccatgccccccacggctagcaagccacctccggggaggtcatgttgacgaaggcgtagccattgttggcctccctcctaaaatccattatcatgtagagaaagtcatagtgcgactctgccctaccattgaatggggaagaaaagaggaccaactcagaccacgaggcggaatgcatttgctccatgcccaccgaatatcatagaaagaacttcatcggtaggctgggtggatcatactccggattcccctacatg

SEQ ID NO: 42966 - DNA, 367 bp, Zea mays
  unsure (1)..(367): unsure at all n locations
acatactgtacataacaaagcgttataaggtaaattcaagtttaaaggataaggtagcataaggtatgagtttattaccggtttaaggtgacttctagcttcatcaccaatcaagctntgtccaccctttgcccaaatttgagttacgaatctgttcccaatgcttcgggccatgccggggatgtcattcaagctcgatggtgataagctgaagattggcctgtttacaatatttccgtgcgtgcaaccagccttcataaaagtgacagttgtgccaccagaagctagcacagcgcagaaatcaccatgcccaactatgacttcatcaagagcatcaacctcgccttctatatgatcaaagatgcct

SEQ ID NO: 42967 - DNA, 448 bp, Zea mays
  unsure (1)..(448): unsure at all n locations
tcagcaatttcaacactctnntttggaattgtgcttgatatcttaattgtctccaagacgtctagtacatttaccattcttttcctttgtggggtcactgacggccccttttggttttttgctgtttcaatatttactgcaggactcanaacttctaatgttttttccttagtcggctttttcgcttcttccattttttctgtggatggtgcttcggccatctctgcagattctggcagcaaggttggctgttcagcttcggtggccgaagaagcttctccggtgaactcatgcaccgaagctggttcaatatagcgtggccggtgtgtgaggacttttatcctctttctctttgattctggctcgctaggagcagttgcagcttcctcttctgcagaggttgtgttctttcttttctgccctcgagtgggataacgatagtcagggt

SEQ ID NO: 42968 - DNA, 421 bp, Zea mays
  unsure (1)..(421): unsure at all n locations
cagcttctcttttcttgctaatattttctgacttttttagtnattcattctttaaactgtcattgttggcttggatctcagccaaggagccttccatagactgaataacaaagtctttcttttctaggacaccttcgtgttctttagctatgatttcaaggtcttgaatggtgaagtctttcttcttcagaacaacttcgtaattttcaactttttcttctaaatccttgatgatagctntattcttctcttcttcaagatcttgttgcatttttagcactttacttaatattatactctgccaaaacaaccttcgtcagaaaacaacataaaaataataataataataaaataataatattntttaccttaaaattagcatagagcaggctaccggcgatatngtgtcgctggtacctgc

SEQ ID NO: 42969 - DNA, 325 bp, Zea mays
ctctatatttagcctcagtgtagccagctagccttctgtcgattggagctcgaagtctggtctttcaatgatggcaagattgcgtctttatattgccttcccagatttcaattatagcttcgtgcttcttgtcctccaagtcttggtgcatcttcagagcattgctcaatagcatgctctgaacagaaacaacttatgttaagtaatattttcattggttacggcaataaaaaccagagaaaaagggttgttaccttgaagttagaatataacaagctgccgactatatgttgtcgtcggtagcggctgatgtctgtctctagct

SEQ ID NO: 42970 - DNA, 337 bp, Zea mays
caaagcggtggcgaatgtatgccccaagcagctagagcccaacaagtccgaacagaagtcattgccaactcaaaccagcactgaggagcacctccacccatttgtaccaacagtggtgtcgacaaacgcctccgcccattctcttctcgcaggttcaaagaagaacactaaagttgtcgtcaaggtccccgatccaagtcgtccaatgtgatagaagtctctgttgtaacttagagaaataagtgacatgctttctacatacttagatatattaattatgaataaaataggcatataacttacatgaatgccatatgtaattataacaagcacgaac

SEQ ID NO: 42971 - DNA, 294 bp, Zea mays
  unsure (1)..(294): unsure at all n locations
atggcgctcgtcatcaagagcttccgcctagattcttctacaaagggaggggaaagactacgagtgccgctccaagaacgattgctacacatgtgttaagcccggtcattctattgctaaatgtactatatccaatgacagcgaccgacgcgacgacaagagggggagaataaaggataagaaaaggcactactacaagaatggcggcgatgcccatgcntgtcgggaatgggattccgacgaaagctcaagcgactcctgcgaccacgaggacgccgtcaacatcgacgtctc

SEQ ID NO: 42972 - DNA, 436 bp, Zea mays
  unsure (1)..(436): unsure at all n locations
agcttcgcacgacctcgtgattcgattcgtggcgcatattatattgtggccagtaaatccttgacggatcaccttggcagcgagggccctgngccctgagtgggagccgcaagttccgttgtggacttcgcgtaagatctgaatggcttccgttttggtgacgcattttancatgggttgactgatccccttcttgtatagctggtccccgactagtacgaagtccctgctttggtggttgaggctcttggcctcattgacgtcacttgggtggtagtatccttgcagaaacagtgttattggggcccaccaatctttagtcataatgaggttgactatgtgatggccttcggcgtcgttggttacttgtaatccctctaggttgcggatggccggtgtgccaatgacgtggtanaacacgtcggagggcaaggtc

SEQ ID NO: 42973 - DNA, 236 bp, Zea mays
ttttcggtgacccacgccggccttcattatctattcccttatacttatacctgagtggcttgccatattgatcgattgtcacatccgtggattcttcctcacacgactatacacgtcttcacccggcgatctcttgcacaggacttttacaatacacaactcggccgctaattaatgccggtgatcatcaaaaaactgttaactcacacatgccataggtaacggctgtcccctga

SEQ ID NO: 42974 - DNA, 431 bp, Zea mays
  unsure (1)..(431): unsure at all n locations
tgcagctaactagntgaagttaactcagtgaaatatttctctgctctgaagaattcaattgcttgtaataagaacactctcagtttctcaaacctaaccacgttcagacttagagcattcaaaagatttggttttcaaaaatagctattgaatgtggagcttgagctatagcatacaccattacctgtgcgaaaactactaaggaaaaaatagatcctgcgactcaagatatacataatattttatacgctcaccacatggagtcttttcaagggaaccacatatgtgtttcttttgttcttggaacttcctttgtgatttctcaccagcggttgtgactcctttagttcctgcacattctaagcatacactatgagcgaacttgttagtacccttatttgttttgtcattaaatcacaaaaaatctgact

SEQ ID NO: 42975 - DNA, 88 bp, Zea mays
tatacattttacggttattgctgcatgtatgtgggctggaacaagcttttttgggacctaaaactttctatataatgggactttaaaa

SEQ ID NO: 42976 - DNA, 435 bp, Zea mays
agcttatgaagattcttcatttcaacatgggctagttggcgatgccagagccaacccatattagtgttagcaattaaacaagtgttgagttcagctatgttttcattaaaatcaactaaatatagctgaccctctaacactcccttaaatgctattgaatcatcacttcttctagagacagtaacacctacatctgtaaatagacagttgtagcccattttgcataattgagaaatggaaagcaaattgtaatgtaaagaatctacaagaaaaacattggaaatagaatggtcaggggatataacaattttacccaaacctttgaccaaaccttgattcccatccccgaatgtgatagctcgttggggatcttcatttttctcgtaggaggagaacattcttttcttcccactcatgtggtttgtgcacccgcta

SEQ ID NO: 42977 - DNA, 299 bp, Zea mays
agagaatatgcggcagagcccagccatatgtaatattataaggggttttatacaagcatggagtgtgttcttcattactcaaatgtgtatccacagctgcagatatatagctgtcggcgtttccagaccggtgggggtccctaagccgacgagtgagtgtgccgcgtgccccaacccatatgggtctatcgcgtgggcgacgcgaatgggggatagcgaagtggtcttacacagttcgtgagagaggtggatatcccgcgcgcttcgtgttcgtcccgcgcccacctcgggtgcgcttg

SEQ ID NO: 42978 - DNA, 398 bp, Zea mays
  unsure (1)..(398): unsure at all n locations
ctgaactctaatatcttttaaggtgggtctctctctctcctcatgagctttaacttgccaagttgtggaattgtttcattggatcgagacttttattatcgtttgtaaaatctcaagtaatattggatctataaacttttctgatttgatctttgttcataaagatgatgtatactgaccaacactgttaatataacatatatgcttggtggaggatgcagaagctctattatttccatcaccatgatcgatgggcaacagttctcatccagtgttgtaggagacacaagcttgctaaaagggcattgcggaaccttaaacatgtatgaacaacagcaactatctgcagtccaatgtatcttaatgcttccaatttgaaccctgnaaataacaactat

SEQ ID NO: 42979 - DNA, 249 bp, Zea mays
ttatgccctatttatagacacagcacttatcttgcatcacatgagtaatacataagcgattggactagctgtctatctaccttatgcttgattaacgtttggggtattgtggctagctatatgctagcgctctactttaatcagtgaacatgatgagaatatgtgtgatatgtgatgatatcttgactatgacgatgagcttgtgttactttgagggactcaggctgtgtctcgaggacctctccgtaa

SEQ ID NO: 42980 - DNA, 412 bp, Zea mays
cttcatccccacatgtgctatactgcgatgccacaaccagcccatgctagtcttagcaattaagcatgcatctagaccggcctcctcttttgcaaaatcaactaaatagagtttgtcgtctagtacacccttaaaagctaatgaaccatcactctttctaaagacagacacatctacatttgtgaataagcaattatatcccatattacaaagttgactaacagacaacaagttatatccgagcgattctactaaaaacacattagaaatggaatgctcggatgaaattgctattttttctagtcctttaaccttgccttggttcccatcaccgaatatgattgaatcttgggaatccttgttcttgacgtaggaggtaggggtggatatcgagccagctcggctcgttatg

SEQ ID NO: 42981 - DNA, 374 bp, Zea mays
  unsure (1)..(374): unsure at all n locations
atgtaccacccncagtccaacggagtcttggagcgcaccaacggcaaaaatntcacaggtgtcgagaaaatgctcctcgacgaccaataaggcaagtggcccgacctgttacccgaagtggtctgggcactgaatacaactgagtgcanggcgactgggtttaccccctttctcctattatacggatcggaggccatgactccgcaagaaataaagcatgggtcgcctcggacagccgcatcggccgtcccagacgtagacgagccgacttctaaggatctcatcgacggagaccgcgtcttcgccctacatgctctagacaaataccaagcctatacaaaaacatggcgcgaaccagcatgcattccaaggga

SEQ ID NO: 42982 - DNA, 437 bp, Zea mays
  unsure (1)..(437): unsure at all n locations
ctgcggcatgcaagctgggcatcgccggacaacnctgtattattattggatagcctctacctcagagacatgtgggacaccagaaatatggatggttgccttagcgttgaggtaggggcggatctatgggtgtttattgggggtaagttgaccccgataaaatttgtaaatcctctagtaaaacactattaaaacattgtaaaagttaaaaagtgttgtttcttatgataaacttgaccccattgatcccaacaacattcttagctagattcgtccatgcgttgagataggccagaagcttgctaaaccgcttcctggaacccatgagccacgccaaaggcgcttggtgcacgatcagagattaagagatgccccaaaataagcatgccaaaactcgcttcctatgataagtaccaagaaaaacagggagggaacca

SEQ ID NO: 42983 - DNA, 107 bp, Zea mays
  unsure (1)..(107): unsure at all n locations
gaacatcaatggctcatccttaggtggggaatgctagtctagctcanatgataattcttgcaaacattgtaccaaatatcatgcttcttgttgtctaactaaccatg

SEQ ID NO: 42984 - DNA, 432 bp, Zea mays
  unsure (1)..(432): unsure at all n locations
agctngcatcacctatgagaagggaggtagatgtctgcccatgtatctntattatactccgtctgatatatgcagcccgctctatccatgtattatactctctccgcttgaacttaaaattgtttgacttttttataaaaattaaaaaagactaaattgaatcgtacatctatataaatttactaaacaccttataataaacataaacatatattataataaatacataaactaccttaagtgataaaataaatcattaaataaataaataatgatttattatttttttaataagacgagtggtcaatgtcttaaaaaaaagttaataccaatttatgaacattgagagtatattctaaatattaagagagcgttcagtaaagctatgttaccttgagagccgtagggggccagagccccacccgccctacc

SEQ ID NO: 42985 - DNA, 428 bp, Zea mays
agcttgaagccatggtaagtagcataggccttttatatactaattgactcaagcctagctacgggtgcataagtttcaccgaaatccaaaccttcgacttgagagtatcccttggccacaagtcaggctttgttccttgtcaccacaccatgctcatcttgcttgttgcggaaaacccacttggttcctacaacattttgattaggacgttgaaccaaatgtcatacctcgttcctagtgaagttgttgagctcctcttgcatcgccaccacccaatcctaatcttgtagtgcttcctctaccctgtgtggctcaatagaggaaacaaaagagtaatgttcacaaaaatgtgcaacacgagatctagtggttacccccttatgaatgtcgccgacgatggtatcgaccgcgtgatctcgttggattgc

SEQ ID NO: 42986 - DNA, 346 bp, Zea mays
  unsure (1)..(346): unsure at all n locations
cttgtcgaatcaacaacatctaccagcacatgtattgctgaccataccggagacttgggcctttgcatgctggaggctaaatatgatcggacctttcaagaaagctcaacgaggatacactcatgtactggtagcaatcgacaaattcactgaatggatagagttcatacccattgtttctttaacctcagctaaagccagggaattgatacaagacataatattcacatttggaataccgaacagtatcataaccgactntgggtccaacttcacaagttcagagttcttctattactgcgagcataaaagcattcaggtcaagtatgcttctgtagcacacccg

SEQ ID NO: 42987 - DNA, 241 bp, Zea mays
atgcacagatgaacctgattactgctctagacctataagatcattcatagacaccttctgaatcctatgtactatgaagatattgtaactcactgccatatagacccgcgaaggccccgttatgaacaattctgtatcctatagaacaatagtactcactttatactatagacactacattccacattactccggttcggagggctgacaaaattgcctcacctttaacaaaactagccta

SEQ ID NO: 42988 - DNA, 389 bp, Zea mays
attggcttcatctgtaggctatgattagcgggtgcgggcgtagcacttcttctcatattcaatatagatcgtgtggcatgtgctacttgaccatctggacaagcctgctgtgggccattactaatttatatgcagtaaatcttcttgtaatgactagagactgtatccaatgatcaaatagctgtggatatttgattagacaagttctgatgcacatactttgaaaagtatcagttgtcattattttgtaataaactccttatcgtaatataccgaaattggccatggaatttaattaatactctggccttcatatgatcaactggtcaaccctggaaagatccaccatctatgtctacccagcgaaccactatggcatgaactccaga

SEQ ID NO: 42989 - DNA, 370 bp, Zea mays
agcttatgttcgacgggccgcctcccatctctcttatattctcccttatatccgacggctgctagcggccgtcgaacataagcttatgtccgatggcgcctagcatccgacagacataatggagccgtctgacttgtatcgattaactgtggtgccgtgagttctttggttatgtcactcctatctgtatattgtttgtgtcgaaataagatgttcggagcattatctccttcacctgtaataacgattatgaatttcctggacattgctataatcctacttccaaaagtgaaaatggacaagctgtgaattacaatagattcctaacaattgctcctattaccttttccttctttttcacctgatagtg

SEQ ID NO: 42990 - DNA, 163 bp, Zea mays
  unsure (1)..(163): unsure at all n locations
gccatgacacgcatgcctgttatgctggctcttgcctctccgagtgtcaggctgaccgagtcgtacgccgatacggcagcggctaggccatcgtgtggccganccgagcacgaacgaacgctctgacgatggtgctccattggtggagtgcggacaccggagc

SEQ ID NO: 42991 - DNA, 446 bp, Zea mays
  unsure (1)..(446): unsure at all n locations
agcttgtgaagattcttcatcccaacatgggctagtctgcgatgccagggccaacccatattagtattagcaattaagcaagtatcgagttcagctctattaaaatcaactaagtatagttgaccctctaatactcacttaaatgctactgaatcatcacttcttctaaagacagtaacacctatatccgtaaaaagacagttgtaacccattttgcataattgagaaactataaacaagttataatctaaagaatctacaagaaaaacattggaaatagaatggtcaggtgatatagcaattttaccaagtcctttgaccaaaccttgattntcatccccgaatgtgatagctctttggggatcttcgtttttctcgtaggaggagaacatcattttctcccctgtcatgtggtttgtgcatccgctatcaataatccaacttgg

SEQ ID NO: 42992 - DNA, 265 bp, Zea mays
  unsure (1)..(265): unsure at all n locations
acatatcatctgcgtagtgtatatanggcggcttacggtccgtgtgaattgacgcctttgtttggcaaatctaagctccgatccgtactagtttatttataacctactcctagcaagcaatgcgggcaaattaaaagtgttggagaatcacgagaaatgaanacaatgagtcaaatgggatatctcaattactttatttttcgctaattattcatggacacccacgcacactgttggattgtttagataatggaagtaatcatct

SEQ ID NO: 42993 - DNA, 443 bp, Zea mays
  unsure (1)..(443): unsure at all n locations
agcttgtagccggccagggctcattccggcctgttttatttctgcttcgctcgaggagtagcaaacggagcagtagaaggccttctacgggcgttttgacgtcagaactcagtcattaggccccaaccgaagcattatcagtcaccagacaaccaaagttagtccacgaacgatcgctaaaagagcagtaagtatagatgagcaaacgtgccgcccggcacggcacggtccgggcccggtctatgcacggcccaaaaaggcacggcacgcccaggcccacgggcctaccgtgccgtgactgcacagtcctgcgtgccttgcatcangcccaggcacggcccagcgggccgtttttcgggccgggccagcccgaaaagccctggcccaaagcagtgtatggccagcccgaagcccgatacatacaaaatacagttaaacacaat

SEQ ID NO: 42994 - DNA, 422 bp, Zea mays
  unsure (1)..(422): unsure at all n locations
acacgtgataggttggactaacgtgcaattcgaataagatagaccttgtgcagcttgtcaagcaggtaaacaagtgggaggagcgcatcacagccagaatgtgatgaccacttcaagacccctggagctactacatatggacctcttctgacccgtcgcctatctaagcataggaggaagtaagtatggtctagttattgttgatgacttttcccgcttcacttgggtatactttttgcaggataaatctgatacccaagggaccctcaagcgccttctcaggagagctcanaatgagtttgagctcaaggtgaagaagataaggagcgacaacgggtccgagttcaagaaccttcaagtggaggagttccttgaggaggaanggatcaagcacgaagtctccgctccctacacaccacaac

SEQ ID NO: 42995 - DNA, 439 bp, Zea mays
agcttcctattcagcaatattatgtgtacagctattgtctagccttgctgcatagcatgttctgactttggaaggtgcaactatgacaacagccacacctgcatcgaaggttccctatgaaccgtcgcagaatattgtccaagcttcgacatctttatttgcttcttcttcctgagcccctagcgtccaatcagcaatgaagtctgctaacgcctgtgactgaattgaggatctatgcacatagtcaatactgaattcgttaagctccgcagcccactttccaatctttccagtagcttctctgttcctcataatatccttcagaggctgtgatgaaggaacaattacgtggtatgcttgaaaataatgccgaagcttcctggaggccattaacacagcatacaacaccttctccaattctgtatagtttttctttgat

SEQ ID NO: 42996 - DNA, 155 bp, Zea mays
ctagtcttaatgctcaacttaagactagtttatatgatttcgataagctaacaattgcaagggatgcctacacgattggtagacacccctcaattaaagatggacttggcttcaagagagaagccaagaacttaacaagccataatgcttccatc

SEQ ID NO: 42997 - DNA, 437 bp, Zea mays
  unsure (1)..(437): unsure at all n locations
agctnttcatttttgtcgaacactctcttcctgagtgcttccagtatcattctggtggctctttccacctgaccattagctcttggatgtgctactgatgcatacttgatctggatactccgttgtttgcagaaatcgaaaaatgcacagctggtgaagttggatcccaggtcggttatgatgctatttggtatcccaaatctgaatattatgtcttgtatgaactccactgccttggctgagggtaaagaagcaataggattgtactctatccatttggtgaacttgtcaatggcaaccagcacgtgagtatagcctccctaagctttcttgaagtgtccgatcatgtccagcccccaacatgcaaatggccatgttatatggatggtctgcagctgctgtgctggtaaatgtttgtttgattgacaagaattggc

SEQ ID NO: 42998 - DNA, 412 bp, Zea mays
  unsure (1)..(412): unsure at all n locations
agctcntattcaattgatgatgattctacactatcttgtttattatcgttcggcttctcactattttaatatttaactatgttatgacataaagatatcatctcactctattaagcaagaaatgtttgcccttcaaatgaaatggagggatgaaatatctaacattggtgtgtgacttctcctgatttctattgcggcattattggttattgcatatgagagtttgctgaaactttgcttaacctgctcttaacttgtcaaactagattaagacatgatttgaaacgctcggttgatgctgctgacaattatcataaagttcttgctgaagatcacaagctatttaatgaggtacaggaaccaaaatgtatagtcttgcaatgatgacatacacttggagcacattttttat

SEQ ID NO: 42999 - DNA, 429 bp, Zea mays
cacatagctgagtgtgcttatgatgtatgtacagctggatatacctgtgccactttgattgcccacttcacttatttgagtttgcttatagcgctgctaaagctggatacatgcgccaccactttcttgttgggttcctcggtgattctgcttaaatgcttccaagtaggatgtaaccctctggatacatataccccgtgtgttcatacctacatatataggtaaccttaaatacacgctactcttgcaggacatacactcgcttatcatggttgtgacttcacccaacttgagacaagattgccattttggaactcatggggcgaggatgccagtatggctctggctatgcaaccaaggtacagcacaagcgaattatcatatgtcttcttgcctcaaaaaaggtcttgtctcacgatacttcacttt

SEQ ID NO: 43000 - DNA, 427 bp, Zea mays
  unsure (1)..(427): unsure at all n locations
agcttagagacagagtcattacaagcatggtatgtcttatgaatggtaagacttgtgaatggtaagacttgttgaaggctgaggcggccagcccttcatatcagagtcggatgaagaacaatcggagtcgcactcttttccaatgtgtgcctcacccttcgccttcctgtagntcttcttccattccttcttcccatccttttcttgtgcctagtcattgttattatcaggacattgtgctatgaaatgaccagtcttaccgcatttgaagcaggagcgctntgcccttgatttattcttgttgggaaactccttgtgtcccttcaagacaatcttgaagcgcttgatgatgagcgtcatttcatcctcgttgagcccagcagcctncacttgtgctaccttgctaggtagcgcctctttgctgttg

SEQ ID NO: 43001 - DNA, 423 bp, Zea mays
  unsure (1)..(423): unsure at all n locations
agaacacgtgataggttggactaacgtgcatttcgaataatatagaccttgtgcagctggtcaagcaggtaaacaagtgggaggagcgcatcacagcaatgaacgtggtgaccacttcaagacccctggagctgctgcatatggacctcttcggacccgtcgcctatcttagcataggagggagtaagtatggtttagttattgttgatgacttttcccgcttcacttgggtattcttcttgcaggataagtctgaaacccaagggaccctcaagcgcctcctcangagagctcanaatgagtttgagctcaaagtgaagaagataatgagcgacaacgggtccgagttcaagaaccttcatgtggaggagtttctcgaggaggaaaggatcaagcatgagttcttcgctccctacacaccac

SEQ ID NO: 43002 - DNA, 433 bp, Zea mays
  unsure (1)..(433): unsure at all n locations
agcttcgtcagatgcggccctagtggacttatcttgttatgcaaagaatcagncattacctctaagatttcctccacgtcggtggcagaaggtgttgcatcagtttcttcttctatatcagttgccttctgcttcggagccgcaacctttcttttcttcgaagcatctgtcttcggctcaagcctcagctttctcttttttagtttttcttcaacatctttcaccaatttagcatcttctttattcatgacgctggcaactctctttctcttctgtgcttcagcgcctcgngccagtctctcatagtcagggtactcaaagttcagagcatccattactcggtttaaccttcgcttcagacgagtgccgaaggctgtagtcattagttgatcttcttttttagaataattgccaaaaatgtagttgcacataa

SEQ ID NO: 43003 - DNA, 122 bp, Zea mays
gacaccttattctgacgcgcgctcctcattcagcagggcgcgaagtgaccaaaactcaatatagcccaccactgtctgatctgacacgagaacaacatcacccgccctggtatgactgctgt

SEQ ID NO: 43004 - DNA, 211 bp, Zea mays
attaaacatcgccatgtcactgggcgtcattagattgttggtatacggagattctctggtagtcatcagccatataaacaaggaatgggattgttcaagtgattcattgggaaaatactgtgctgtcgtcctaaagctggaagatacactcgagggtcttgaatttcatcatatataaagagaatcgaccacgtggccgaatgtactgtca

SEQ ID NO: 43005 - DNA, 424 bp, Zea mays
agcttgtgaagattcttcatcccaacatgggctattctgcggtgccagagccaacctaagttagtcttagcaattaagcatgtgtcgagttcagctctatcaaaatctactaagtatggctgaccctctaacacacccttaaatgctattgaatcatcacttcttctaaagacagtgacacctacatcagtgaatagacagttgtagcccatttgacacaattgagaaacagacagcaagttgtaatctaatgaatctacaagaaaaacattggaaatagaatggtcaggagatatagcaattttacccaatcctttgaccaaaccttgatttccatccccgaatgtaatcgctctttgaggatcttggtttttctcatatgaggagaacatccttttctcccctgtcatgtggtttgtgcacc

SEQ ID NO: 43006 - DNA, 434 bp, Zea mays
  unsure (1)..(434): unsure at all n locations
actcagcctgggaagctanaactcacctcttgtgcatgaagttgtggttgtcaccgaggatgtangagtcacttgtgacttacttgatagtcctacaagtgaaccacaacctactaactctatgtgtagcaaatgcaaaatgtctactatgaatgatattgttgcttgtgataagtctcaaattattgttgagaatgaagtgttagtaggaaaagtaaatgctctaactcatgacttggagaaggcctatggtggaaagaccaagttggatttcatattgggaagccaacggtgctcacttaaccgtgagggccttagatatgtccncaagaagggcaagaatgcttctgttaagcaaaagactatatttgtgaaggaatgtgaccaagtgtgtcacaagtgtcacaagaaaggacatatcaagaagaattgtc

SEQ ID NO: 43007 - DNA, 456 bp, Zea mays
cacccgggatccttgagtcacctgcggcatgcaacttggggaaagacaactggcggttctgttttgtccttgctgatgtcctcttgcttccgtaagggggctgagagccaccgtcgtcatatagcgtgcggtgcgccatcattgcttgtctggcggagcgagccagatgggacgccggtcttgtttcccgtagcctgagtcagcttggggtagggtaatgatggcgccccctgttgacatggtcggtccgtgccctaagttgggcgatgtggaggctcctccgaggtcgatgtcgagtcttgcttccgaggccgaagtcgagtctgagcccctgagtccggcgaggcggatactgtcagctgaggccagcgctgagtccaagccctggggtcgggcgaagcggagttcgtcgtcttctcgggctgagcccgagtgccagccctgtgtctggcggag

SEQ ID NO: 43008 - DNA, 475 bp, Zea mays
  unsure (1)..(475): unsure at all n locations
gttggcattcattgattatcattttctcattcgttgcatcatatcatcgcatcatacatcatagcatcacatcaatcatcatatcacatcaatgatatcaattgaaaacaaggccgatcttcgggcaatgctctacaaaaaatgaaaagatgcgaaggcacaaagtaagctgaaaatcatagcttcatcagttctgatngcgaaaaagcttttctttacgtagcattgatgttntacaaagtacgaatgatgtttacgaagcataaaggctcttctttacgaagcatgaaaagaagggaagggtgtttttcgccgtatgctcacaaacggtatgtataaaaagtntcatgcatcgcanagaactgaattacaaaccactcatatattacattcaaatccataagcattgaatattacaaatatagttcaacaaatgttacattaacattctagaaaatgttttacaatagctact

SEQ ID NO: 43009 - DNA, 421 bp, Zea mays
agcttgcattgcatgtttaaatatcttgtattgcttctatggcttgtctaacctagttgagataatcgccaacaaagcgagtgaaaaagcttaactcggatcaaacttgacaagtcttagttttaagcttttagcacttgaattcttactttttatgcaattgttgaatcttgaaatatgcatgaggtactgcacttacggggagtattcaaaactcaaatcactcatgataacccctagtgcaaggccaaaatgcaaatttcaccatttgcctattttctctaaaaattatctagcctatggcaaaatattttgaatattatgagaaaatatatgagggtgccaatacatgtcccaacaagagttattttgtgtgattataagatggaatctggtttggttggaaattagatagaaaaat

SEQ ID NO: 43010 - DNA, 181 bp, Zea mays
  unsure (1)..(181): unsure at all n locations
acgcacaagtttctgttgtgtagtctacgaactttactgctagngcgtctgaacttgggcttgttgaagtgcgagctgccaaaaaaaagtattgcattaacggctcaagcacggattcttttctttatcttgtgccgaagcccagcccaagcacctccgtccagggtatattttaggccta

SEQ ID NO: 43011 - DNA, 429 bp, Zea mays
  unsure (1)..(429): unsure at all n locations
gcttgccatataagaagccctaacttcgcctctttctattacctaatctacatcgccacggggaaagaagctgatggtcgccgntgtgggcccatgttctcatctcggtgccaacctaggtgcttcaccgaaccttgggggtcacaaccatggtatcacttgggcggattaagctccggaccgcctagtaattgctcaccggagtaaagattatccatctagccgcaaaaactcgtgggagggccactaccatcaccatgtctggtaagggctacctcgctagcatcggtgatctctccgcttcgtttagctcttgtctgtatctacaagggagggctgggctgccggatcacctaaacgctggtgtgcatccaccgtgggagctcgacggctccgccacgtctggctggcctggggggaaatgtgggt

SEQ ID NO: 43012 - DNA, 468 bp, Zea mays
  unsure (1)..(468): unsure at all n locations
acttaaatcacggaaagatgaaccactacctctcaaggcactaatactcctgtttcacaccgaaacactatgaattagtggaaattaatcatatcttttttatggtggagctgtaagggcttatgtccggtgagtgaatatcattatatatgtcaaatcatgagaacaataatttcaaacatttttgctgacatacagatcagaaaggtttttcaattcaaataggctcgagggaataggcccttctaagaaagatccttctatttgcctgcaccaagaagagttacacattttacattacataaagaaggataagcatgtgatttctgtggcatgagatgtgttttgcatanattcaccgctacaatttgcaagccttttcagtttccncacaatcangatccttccngaaaaatggtgctgaaatcctctgtaccagatcaatagtaaaataccaaagactctcaa

SEQ ID NO: 43013 - DNA, 437 bp, Zea mays
  unsure (1)..(437): unsure at all n locations
agctngtgaacagtacaaattcagaagggagaaagcatcttcagcagatcagccgaagcctatgctcttatgtgaggacatagcagagcagaaggtgctgttaagctctcaattatccgaagagcaggagaaaaccttgataaggtttttgttcaataacaaagatgtttttgcatggtcagccaatgatctctgcggagttaatagagatgttattgagcactcgctcaatgtcgatccaaccttcagacctataaagcanagtcttcgaaaaatgtcagatgataaggccgaaggtgctcgcaacgaagtcaaaagactcctcagtgcaggagttatcagagaagtgaagtacccagaatggctagctaacactgttatggtaaaaaaggccaatggcaagtggcgaatgtgcatcgattttacagatcttaaca

SEQ ID NO: 43014 - DNA, 458 bp, Zea mays
  unsure (1)..(458): unsure at all n locations
acttctccaagacgttcattttgtaattgctcgatagaagaattttaacttcctcaatacattgagatgtgatcccaagatcaagatgtcatcaacatatatgcacagcataacagactcaccctcaccataccgatggtatacacacgtgtcagattcatttacaacaaaactagcagctgtaagagtattatcaaacttttcatgccatcgcttangtgcttgtgttaggccatacaatgattttatcaacctgcacaccttgttctcttgaccatccgcaatgaacccttctggtcgatccatgtagatcttctcatccaactctccatctatgaaagctgtcttaacatccatctgatgaatgataagaccataatatgcagccacaacctattatgtgtgaattgatgcaatctaccactgtgagtacgtataaagaaatcttaccctccttt

SEQ ID NO: 43015 - DNA, 441 bp, Zea mays
  unsure (1)..(441): unsure at all n locations
agctntctctntcccatgccaaactgtgtcatatgctatattacaaccaanagtgtcctgcaatgtagtttgcagctccttagcacccatatgaggtttcttcattagcaaaggaagcgcacgtgccgcaacccaagctcctgtaggtgtagtcgtcttacgtctaccactcgaagtacaagtatgtttgtcattcaagacaattacctgcaaaattggttcaagtgtcaatatattctttgagcatgaaaggtacatattaagtgaaaaagctatattctcagcttacttgaattgttggagcccctttcatctccggtctggcatgaatgctccaagggcaatcaggccctttacaataccctctaaatctaagtttattggttgcctcaattccaagctcaaattctttatttatggcgtattgtctaattgcgagtc

SEQ ID NO: 43016 - DNA, 113 bp, Zea mays
gaccgagccgagggagttccacgcctctgggatacagatacctcactcgttccttgcgcgagaagcaactctcgctcacacatacatgcctgttaccgacagagagtccatat

SEQ ID NO: 43017 - DNA, 440 bp, Zea mays
  unsure (1)..(440): unsure at all n locations
agcttgccttcgcttcagtctatcatccgcagtccaactgtgtcgtggagcgcgccaatgggaaaatcttcacagctgtcaagaagatgctcctcgatgaanaanaaggcagatggaccgatttattaccggaggcagtctgggcgctaaacacaactgagtgcaaggcgactgggttcactcctttccgccttctatacggatcggaggccatgacccgcaagaaataaagcatgggtccccgcgtatagttccgtcagccgtccccgatgtggacgagccaacttcaaaagatctcattgacggagaccgggtcttcgccctacaggccctaaacaaataccaagcccagaccaaagcatggcgcgaccacgcagtcatcccgagggagttcagcgaaggggacctcgtactcgtccgaacagctcggacggagtcta

SEQ ID NO: 43018 - DNA, 242 bp, Zea mays
acacgtgataggtctaaccaatgatcatttctaattatatagaccttgtgcagcttgtcaagcagggaaacaggtgggaggctctcatcacaccaaaaatgtgatgacaacatcaagacccctggagctgctacatatggacctcttcggacccgtcgcctatctaaacataggaggaagaaagtatgggttaattaatggttgatgacctttccccgcttcacttgggtggtctttttgca

SEQ ID NO: 43019 - DNA, 312 bp, Zea mays
cctgaggcatgcagctagccactgcattaacaagcggaggggcgtgtcttttatgctcagagcatggacaagcttctatatgctgtgcacgaacgaaagatcgctccgaacattaccaatgtatgcaaccttgtgtcaacaccgcgcacaaaggcttgcacagatgcaccatgtggaacaagcttaaacggttgagactctgcgtcacgcacgtgggcggcgtcatcatgaacaaccgtatgctccggcaaagcacttagtgtatcaacaacctaaggtgactgcgatagtcattcccattaactcctgctc

SEQ ID NO: 43020 - DNA, 317 bp, Zea mays
  unsure (1)..(317): unsure at all n locations
catttactgcatgcgcgcgagctccgattcttgttgacgcataacagcagatgtatgcggacatggacgcatcgtgcctgcgtggggaagatgcacanacgcatgtcgcgataagcgctcagatacttcttgatcgaatcattctggttgtatgcaagtcatttagttcttctgtacaaagaagaacagagaatacgctgcagttttgggcatcgcacaaacttgtgtttggtgcaaattcatgttgctttctccgagcaccacaatgtttgggcagcaccaacatttgttttgtccaattatatgttcttctattt

SEQ ID NO: 43021 - DNA, 437 bp, Zea mays
agctatttgattatcggaggagttcatcattctatttatcaacttcggcttgagcttccgccaatgaaccctccattgtctgatggagaaagtatttcttttctagagaggcttcttgatctctgattatcttttccaagccctcaattataatctcattatttgtatctttgatatcttgttgcatcctcagcgctttgcttaatagcatactctgtgcaaaataaccttcatcagaaatctttgctccatcgcaaaataataaaagttgaggaaaaaactttaccttaaaattagaatagaattcgtcggtagctgctgatgtcagcttcaagcttcggaaaaccaacactcttcgacagagtgctgataatcttcgccctagtttgatcttgaatacatcctaaggcttcttcgttaattccgccgaagagcat

SEQ ID NO: 43022 - DNA, 107 bp, Zea mays
caaatacactcatgaactttttttctggacacaagtctttaactatcccaaaaacggcccttggtaagcaagagttatgctagatcaaagatgaatgatgatgaaag

SEQ ID NO: 43023 - DNA, 439 bp, Zea mays
  unsure (1)..(439): unsure at all n locations
agcttctaaagggagagcacattttaggattaacttatgttcantttgagaaagacaggatttgtagcgcatgccaagtagggaagcaagttggtgcccatcatccacacaagaacatcatgatgactgacatgccactggagctcctacacatggatctattcggcctgattgcttacataagcatcggcgggagtaagtactgtctaattattgtggatgattattctcgcttcacttgtgtgttctttntgcaggaaaaatctcatacccaagagaccttaaagggattcttgagatgggctcaaaacgaattcggcttaaggatcaagaaaattagaagcgacaacgggacggagttcaagaactctcaaattgaaggcttccttgaggaggagggaatcaagcatgagttctcttctccctacacaccacaaca

SEQ ID NO: 43024 - DNA, 351 bp, Zea mays
  unsure (1)..(351): unsure at all n locations
tgatctttaatattaatgaagaaatctcgatatccccctttcgttggtgatccctacaaaaaagataccgaatggctatgtgcttactgcggctatgctcgacgggaatgtcagccattttgattgcactctcattatcacatagcatagggactntggttaatnttgaacccgagtcccgcacggtttgcctcattcaaagcaattgcgcgcaacaatgtcctgcggcaatgtactccgcttcagtggtggaaagagcgaccgaatnttgcttctttgaagcccaagacaccaatgatctttccagaactgactagtncccgatgtgctcttcctattgatattcacccc

SEQ ID NO: 43025 - DNA, 434 bp, Zea mays
  unsure (1)..(434): unsure at all n locations
agcttaaatgaacattgaccggagggaatattctatgtgcaagtataaggaactttgcattagttaaccttacaagttcataggtgtatgggatcacaattcttagtccaagaacgaaaaaaatgtcatgcatagaagtcttgtgcgccacattccaaaagtggccaagacaccagaatgcacaatacaanttacacacatgtttacatttcatttccatgcaagtgtctttctattcccatcatgaatttcaagtcgtccagtcatccaggtgaccgaccaaccgactaattgcgatcaagacgccaacctggacgattagtcagtccctggtcgatctaattgtcgtgtcctgttcaggacatatatatacactacagtatatagntatatactacataatatacttgatatataatatatatgattctctg

SEQ ID NO: 43026 - DNA, 358 bp, Zea mays
gatatcggctaattgatctttaatattaatgtaagaaaacttgatattctccctttgttggtgatccctaagaaaatgataccgaatggctatgtgcttaatgcggctatgctcaaccggattgtcggcattctgatggactctcatatccttacaaaggacttggtatttgtaccgtatccgccggtttgctatccagcattggcccaagtgctgggaaatacttgttcgtggcgaaaacaccgatttgtttttatcccagaaccagacttccagactgaagccccatgtttctttatttgacccgcaatggtccatacaataataacggatcctaggccaagccacttgggttaca

SEQ ID NO: 43027 - DNA, 431 bp, Zea mays
  unsure (1)..(431): unsure at all n locations
agcttcctcaatctttcttgttgcttaatgaatattattcaatgtttataattggcctaagccatgattttaaatnttttatacccttttccccattttcttgaattttgctcatagggctcacttatggtttttattatggttgcaacattattacctttttgaaagacccatttgttttgatcatgatacttttaagtatatgcttggtgggttcttcactcttaagtcaatttgatgctcatgctcaatttggttcacataaaatgagggttcttgggttagtcttttgagagaaacccttggtgacactggggtgtcacagcctcctcaggcggtgggtgcaccctcgactcgcccgaagcccagctcgggcaggcttcattgagaagcaaccttggccaaatcgccttaccaaccgaccgtatcac

SEQ ID NO: 43028 - DNA, 436 bp, Zea mays
agctttgtaagcgaggcaagagacaccaattgtgtggtggtacttgcggagtctaagtgacccatgagattaaggaagaagcctcactcggtctatgtgaccgtttgagagagggaaagggttgaaagagacccggtctttgtgaccacctcaacggggactaggttctttagaaccgaacctcggtaaaacaaataactgtgtcatccgctttattttattgggtgatttgttttcccctctctcccggacttaatattcgctgtaacgctaaccccggtttgaagtgtgtgtttaaagttgtaaatttcagtttccgcctatccacccccctctaggcgactttcaattgatatcagaacccgatacttcattagagtctaaccactcgaagtgatgtcgggaggatccgctaagagggatatggaaacgagca

SEQ ID NO: 43029 - DNA, 368 bp, Zea mays
  unsure (1)..(368): unsure at all n locations
atctatgaaattcttacactaaaaatgcatgtgctattcttgcttgagaataacagaatctatttatcttatactcttttcatagggtgttactgtcaaaccaaattatgtgcctatataagatgtgcttatggattatgcgttcgagtataaattgcacctgcattttggtatgttgctgcttattttggtaatttatcatcctcttatttctctttgtgttcattatgtgcgctctcatttctgcttctatgaccctgcaggttctcgatggtgtccagtaaagatatggtcaacaacaatgatgtgtttaagnttctcttctcttgtatgccaggtgcatcgactcangtatccatatcacttga

SEQ ID NO: 43030 - DNA, 430 bp, Zea mays
  unsure (1)..(430): unsure at all n locations
agctntaccanatggacgtaaaaagtgtttttcttaatggaccaatcaaggaagaggtctatgttgagcaacctcccggctctgaagatagtgagtaccctaaccacgtttacaaactctctaaggcgctttatgggctcaagcaagccccaagagcatggtatgaatgcctaagagatttccttatcactaatggcttcaaagtcggaaaggccgatcctactctattcacgaaaactcttgacaatgatttgtttgtatgccaaatttatgttgatgatattatatttgggtctactaacgaatctacatgtgaagaatttagtaggatcatgacacagaaattcgagatgtctatgatgggggagttgaagtacttcttgggatttcaagtgaagcaactccaagggggcaccttcattagccaaac

SEQ ID NO: 43031 - DNA, 142 bp, Zea mays
  unsure (1)..(142): unsure at all n locations
gactctcaatcaaggactntgcaacccacatttgtctagttctactcttgcttggtggacctaggaatgtaactttgacctttccatttgcaacttttcttagaacataatgagcattgaaagcaaatggtcttgagtgctt

SEQ ID NO: 43032 - DNA, 443 bp, Zea mays
agcttctagagggagtacacgcgatacgtgcaacatgtgtttcttactaagaagaagaccttgtgcgacttatctagacggttgacaggtggggagctgtcttcctacccatgatgagatgactacttcacgacctgtggaggtactttatatggacctattcggacccgtcgcctacctaagctgatgaggaacgaagtatggacttgtgatatgggacgatgtctctcgctccgctagtgaattctttatgcaggatatatctactacccaagggaccctctagcgcttactacagagggctctagctgagtatgagctcaatgtgaagaagactgcgatcgacaacgggttctagctccacaaccttcgagtggatgagtatcttgatgaggaaggaatctagcacgaggtactcgctccctacacaccgccacataatg

SEQ ID NO: 43033 - DNA, 437 bp, Zea mays
  unsure (1)..(437): unsure at all n locations
agcttgaataatctgtaaaagtagctcagaaaacttctgtttaactcgtataaagtatgatgtaatctgagtcttactctgtaatataatcttacttttctgtccatgtatgaaatgctttggtgtggacgaaattaatacttttgagccataggcgaaaaacaccttcccttctttgcgtacacagcgaagcataaaattgccttcgttttgggaccgaagcatgatgatcctatgtatgtctaagtgaatgtttatgaatgcaaatgtcatgatgtaatgtattgtgcaaatgaatgttcaaatatatatttgaagccatattcccttgagaatgactcaaaccttctttgccgcttatttntcggcttcaccgtttatttttcggtgtatcaacgctaacttttcgctataagcctcccttangagcttcttcg

SEQ ID NO: 43034 - DNA, 432 bp, Zea mays
  unsure (1)..(432): unsure at all n locations
tcagaagcatgccagctcataattctgtcatcctcangattagcgaacaaacacctcaatcgatcaacgacggggaggtaccacatcaccaaagcaggaatctttttgagcgcataatagtctacttctctttctttgctcgtggattttgaagtatttttttgggctttctttcgcttcttccctttagacacggatgcaacacactcttcgtcctctcgatagttcttattcgtcttgtacctacttgcaccgcactttgggcagctctccaagtctttataatcatcacctcgataaaggatacagtgatatctacacgcgtggatcttctccacacccatagtgagcggactgattagtttctttgcatagtacgtgttagcaggcacattgttcttctttggaagcatgtctgcgataatactcaag

SEQ ID NO: 43035 - DNA, 439 bp, Zea mays
agcttcagctccgaaggcaccagctaccgaagctgtattcttttgaagctacagctgccgaagctgccacagccgaagatattcatttagaaagcacaattgctaatattgataagatactgctagacatggccgcagaagaagctgctgcagccaccgaagaaactatggccccagagcccgagaaggagaaggaaataaccgaagacacttcggaagataaaattttcaactttcaaaacttatttggacaagagttgacgaaggctgaaaaagaagagctaaaagaatatgccatatcttgcggatatcagccggggcactactcttcggtggcgtcgacgatgaaaagttgggttgtgtccgagatcataccggagcgaaggttatcggtactctatcaaagactattggtttcccgaagctggagacagacatt

SEQ ID NO: 43036 - DNA, 230 bp, Zea mays
  unsure (1)..(230): unsure at all n locations
tggctttatgcttcgttgtgtcctataatgaaggaagggggtttttcgccttcggctcanaatactgatttcgtccacatcatagcgtctcaatataagggttagaatatattacaaggtatgaacaaagttccttgagaatagattaattgtatctacaaaaagttgttacaaattctcctgagtttttctagtctactcctataaatcttcgtcaggtttctgctccg

SEQ ID NO: 43037 - DNA, 431 bp, Zea mays
agcttctgacttgtgggcctgccgaggtgtccggtgcacaccggacatgcactgtttgatgtccggtgcaccggtatgggcagccctgacgtctgcgcgcgctgcgcgcgcatttaatgctgcgcaaggagccgttggcgccgcagagagccgttgctccgctggcacaccggacagtccggtgcacaccggacagtccggtgaattatagcggagcggctgtcgtgaaaacccgaggatgacgagttccggaggccgcggttcgttggcgcaccggacatgttcggtgcacaccggacagtccggtgaattatagcgcgccggcctccgcgaattcccgagggcgaagggttgaagtcgaagtcctctggcgaagggtagaaaacgaagtctacgggcgcaccggacactgttcggtgcacaccggacag

SEQ ID NO: 43038 - DNA, 358 bp, Zea mays
  unsure (1)..(358): unsure at all n locations
ctcggtcctggccagtccataagaagacgtttgatcatggtggttgagccctacagcacatagttctgggcttctggctaccatctctttgaggcgttcgccattntcatcacagaaatacagctcgggtgtctgtcgcttctattgatctcaacatacatctgtctttcgatgatgtcaagactgtccagtacagtctatcattgtcgttggagaaacatcgtttttctacttatagcattctgatatccggcagccactgtgaataaaacaagaccttggttcttgcattgatcctccgtattgagacacgaatcatgcgtcaaacatgtcaaagttgccaattaatattttgtcg

SEQ ID NO: 43039 - DNA, 425 bp, Zea mays
  unsure (1)..(425): unsure at all n locations
agcttcctcaatctttattgttgcttattaaatattcttaatgtttataattggcccaagccatgattctaattntttcatactcttttccccattttcttgaattttgtttatagggctcaattagggtttttgttggggttgcacattttgcctttntgaaaaacccatttgttttgaacatgttgcttttaagtataagcttagtgggttctttattcttaaatcaacttgatgttcatgctctattttggttcacataagatgatggttcttgggttagcacttgagagaaaccctangtgacactggggtgtcacagccttccccccttaaaggaatctcgtcccgagattctggtcagagtcctcccggtgtgaagcgaagggtgagacttatatgaagtgggtgattattgttattat

SEQ ID NO: 43040 - DNA, 366 bp, Zea mays
  unsure (1)..(366): unsure at all n locations
ctatgttgagcaacctcccggctttgaagatagtgagtaccctaaccatgtgtataaactctctaatgcgctntatgggctcaagcaagcnccaagagcatggtatgaatgcctaagagatttctttatcactaatggattcaaattgaaaaggctgatctacactattcactaaaactcttgaaaatgatttgtttatatgccagaattatgttgatgatattatattnggggctactaacgagtctacatgtgaagaattaatacgatcatgacacactagttctagacgctatgatggggagctaaagatttttacgattctagtgagcactccagaggtccttctagccaacaatatactca

SEQ ID NO: 43041 - DNA, 429 bp, Zea mays
  unsure (1)..(429): unsure at all n locations
agctnttgcttcctgggtctgaaggatggttctttattgagtgaatgttcaatgacgtccctgttgacaccacagagatcgttggctgaccatgcaaaaacatctttgttgttgagtaaaaaccttatcaaggttttctcctgctcttcagataattgggatcccagtaataccttctgccctgctatgttctcacataaaagcatgggcttcggctgatcagccgaagcagccttctctcttctatacttatactattcacaagcttcggctccatctatattgtggattgcttttgagtctgtccaatttccttcatcttttctggcagcttcctgacttccatgaatagcaatgagcccttgatccgaaggtatcttcatgcataaatatgctggatgaagaaatgcttccaatgcattgagtgtt

SEQ ID NO: 43042 - DNA, 357 bp, Zea mays
  unsure (1)..(357): unsure at all n locations
tgaagcacatacgagaaaagataatggctggaacagcccagtgtttcaaggaagacgatcaaggtgtgatatggtttaaaaaccgcatagttgttccaaagaacgaagagctccgccagctaattctagatgaagcacatcttattcgctattctattcattccggaagcactaagatgtatcaagacttataacaacattactggtggactaagatgaagattgatattgcacgctatgtggctaaatgtgacacctgcagacgtgtcaaggccatacacatgaanactgctggtccattataatcattgccaatcccaacatggaaatgggaagacatcatcatggacttcattg

SEQ ID NO: 43043 - DNA, 383 bp, Zea mays
cgagatcgacctcaccggactttggtcttccgccgccgcgcgtggaccgagctatccagtgagtccccgcccaattccttgcgctcatatcttctctggcatcccgtggacctccctgacccatttgattgaactatctcgccgtgaccaggccggtctcctcgccgccgacgagcatccccgcctgcgcgcgtggaccgaccgactccggccatctccgacggtgttccgcacaccgttgtgatcccgagacctcccctacgtcctcgaccgcttcaccggagcaatctcgccgccggtaagcccctccgccctttcttccgccgcggttactgtttgaggtagaagaaagacctcgggttatgatttgtagaacccgaggg

SEQ ID NO: 43044 - DNA, 465 bp, Zea mays
  unsure (1)..(465): unsure at all n locations
ttacgaactctggatgaccgcacatcacgtgtagtcaataatatgtatatgtgacgaatggttctgaattggttggggcttgggatttgacacgtactntggggaaaatgggtggccttcttcatagatctttgagacaccaccttcgactgactctgataaggagaagctggttgatatagttcaagtctgtcttatatatctttggttgtacaacatgctggactcttcattaatattatttctgcagatggtgggataggatcgcaattactntgagtcattcactagatgggcggtgcaggcgcagtttttccatgctacaaatcgtgtgcagagagggcaagcgtgagttgctttgagcagatgggcatgtgaggatcgancgacaccgaccaagcgagcatgaggggacattgcgacccgatctccgaaaggtgaactgtataaataataccctcttga

SEQ ID NO: 43045 - DNA, 431 bp, Zea mays
agcttctatagggagaacacgtgatagggtttacttacgtacaattcgaaaaggatagaccttgtgcagcttgtcaggcaggtaaacaggtgagaggagcgcatcacagcaagaatgtgatgaccacatcaagacccctcgagctgctacatatggacctcttcggacccgtcgcctatctgagtataggaggtgatagtcgcctagaggggggggtgaatagggcgaaactgaaatttacaaatataaacacaactacaagccggggttagcgttagtaataataaatgagtccgcaagagagggcgcaaaacaaatcccaagcgaataagcaaatgagacacggagatttgttttaccgaggttcggttcttgcaaacctactccccgttgaggaggccacaaaggccgggtctctttcaaccctttcc

SEQ ID NO: 43046 - DNA, 435 bp, Zea mays
agcttgcagaatgcaatctgtgaacaactggtccttatcagtggtcacaataacacggtctaatctgacaagggttggcgcttcccgctcattataccaagtaaattgtctacccaaaagatcaatttccaccaattcaagctcattaagaagacgacgaaaacggcccatcattgccctgtcaacattttgattatttttgtcttccactttataaatgaggttgaaatccccttcaacagcccacggtccagcacacgtaaggcgaatgttacgaagttcttgcagaaattgcaccttcatgacgtccgactgtgctgcacttgtgggtggtcgcaatttgaccggtggtggcccgcaagctagccatggacaaaggcagcacgggcagcgcatcatgaccacggtacggcagcaaagggaatgcgagtggtg

SEQ ID NO: 43047 - DNA, 236 bp, Zea mays
agcttatgaaatcaaaatatgagacatagctgactaaaatcaagtacagcaattactgtagaagaatcacatcaagtcagcacaaatagatgttggaggtgtgttatattacctgtcccataacaacaccagaatgaatcggactgtggttcccaaccatgataacttacagcctttaagtgtccagggcctgggggtacatgtaaatctaacaccacgatctgttccccgtgaat

SEQ ID NO: 43048 - DNA, 434 bp, Zea mays
agcttgtatatgttgtcaaggaacaatttggttttcttgttgctgagaacgggtgagccagggagaggaaatgaccatactgttgaaaagtattcacaatgactcatatgccagccatggcgttagatttgggaagcccttccacaaagtccatggaaatggtgtgccacgcatgtggatgaacaagctaaggtgagagcaaaccgggataacgagctcaatccggctttgcctgttgacagacagcacatgattgcacaaactggtgtacatgtcgcttcatatccttccaagagaatagatgtttaatccgccgatatgtgacttgaacacctgaatgacccccgacagatgaatcatgcagcgccgacatgattttgaatggcaactctttggtgttcccgatccatatacgacccttatgcctgataata

SEQ ID NO: 43049 - DNA, 360 bp, Zea mays
tcttgcaagaagaaatgcacagtttgatccacaatatttttatgtccgttgtgctgctcacatagtgaatctggctgtaaatgatggcctgcaaccattacatggtcttctaagtaatcttcgggacacagtcaaatactttaagaggtctcctacatgtatgtataaatttgttgaggtttgcaatgagtatgctattgaagttggaaaaggtctatcccttgatgttaaaacaaggtggaattcaacatatagaatgctggacacatgtatggagtatatggatgcatttcggtactatgctaaagtagaccataactatgtgtggcaacctacacaaactgattgtgataagtatca

SEQ ID NO: 43050 - DNA, 169 bp, Zea mays
  unsure (1)..(169): unsure at all n locations
agctatttagtcaggccatgccacatcttcagtctttcgcatggtggacaaatgcaagtctcactcaccacttcttgggctctcaaaacaacatagccggntgttcctcagtgcaaatccaggccgtggaagaagattcttaaatcccatgcctgatcttggcactgag

SEQ ID NO: 43051 - DNA, 316 bp, Zea mays
atggctggagtgggctggccacgatggccgaagctctggcggcaatggcgggcggaattgagctctccggagctaatggaaagtggctggccggtgagggtgagtgctgtgcgaattggggcgcgcctgggaaggctttataagcacggcgcggtgcacgggcggtcgtggaccggcgagtgcgcgcgatcgtgcactgtgatgcgcggtgcgtgaacaggcgtgaaccgcgggtgtagccacggtcaacacgtgttcccgttgcctctgcccctgttcaagcgccgattgggagcacatcttcgccaatttgggc

SEQ ID NO: 43052 - DNA, 408 bp, Zea mays
  unsure (1)..(408): unsure at all n locations
agctntgtgtggaattttgggagaggtattgatctttcgagtgtgtctagaattgaattcctagctcttgtaagtggttggaagtgtgaaaacttggatgcaatgaatggtgggtggttgggggtatttatagccccaaccaccaaactagccgtttggtggggctgactgccgtatggtgcaccggacagtccggtgtacatcggacatgtccggtgcgccagccacgtcaccaaagtcgttgggttccgaccgttggagctctgtcttctgggcctgcctggatgtccggtggcgcaccggacatgtactgtaaagtgtctggtgcgccaatatgggcgtgccttgacactgcgctcgctggcgcgcattaatgcaattcatgtttcccttgcgccaaatattcgt

SEQ ID NO: 43053 - DNA, 417 bp, Zea mays
  unsure (1)..(417): unsure at all n locations
tctanagggagaacacgtgataggtccaacatatgttacttttctaaaagatagaccttgtgcagcgtgtcaagcagggaaacaggtgggaagctctcatcatgccaagaatgtgatgacaacatcaagacccctggagttacttcatatggacctcttcggaccagtcgcctatctaagcatatgaggaagtaagtatggtcttgctttagtttatgatttctcccgcttcacttgggtaattcttttacaggataaatctgaaacccaagggaccctaagcggcttctatggagagctcanaacaatttgagctcagggtgaagagataatgagcgacaatgggtccgaatcaagatcttcaagtgaggagtatcttgaggaggatgaatcaagcatgagtctttgtcctataca

SEQ ID NO: 43054 - DNA, 441 bp, Zea mays
  unsure (1)..(441): unsure at all n locations
gcttcctccagcattcttaagcccctcaggcattctaatgtaacaatatgttccactaggggttatgaagctggttntcggttcatcctccttcttcatccagatttggtggtagcctgaatagcaatccagcagactcataagctctgatgaagctgctgcatcgactaaggaatctatccttggcaatggaaactcgtccttcggacaggccttattgagatcagtaaaatcgatacacattctccatttaccattggccttcttcaccataacagtgttagccaaccattctgggtattttacctctctaataactccggcactaaggagtcttttcacttcattccgagcaccttcggccttgtcatcagacatcttctgaagcctctgctttctgggtctgaaggatggatcaacattgagcgagtgctcaataac

SEQ ID NO: 43055 - DNA, 440 bp, Zea mays
agcttatgataaggtgaagtggaattttctccatttatctatgcgtatgaagggtttctcgccgaagtggtgtgcatggatccaaaatatcgtctcgggaggtcacgtgggggttcgagttaatgatgacataagacctttttttcgactcacaagggccttcgacaaggggatcctctctcgccgatactgttcaacattgttgttgatatgttggcagtgctctttgctagagcgatagaggagaaccaattcgctgggatcataccacacctgattgatggaggtttgtctatccttcaatatgcagatgatacggtggtgttcctggatcatagcatcgatcaggcccggaatgtaaaacttcttttaaccgcttttgaacaaatgtccgggcttaagatataatttcataaaagcgaacttttctgttatgggtc

SEQ ID NO: 43056 - DNA, 200 bp, Zea mays
agaacacgtgataggtctaactaatgtagctttcttttatatagaccttgtgcagcttgtcaagcaggtaaacaggtgggaagctctcatcatgccaaaaatgtgatgacaacatcaagaccactagagttacttcatatggatctcttcggacccgtcgcctatctaatcataggaggaagtaagtatggtcttggtat

SEQ ID NO: 43057 - DNA, 438 bp, Zea mays
agcttgtgaagattcttcatcccaacatgggctattctgtgatgccagagccaacccatgttagtcttagcgattaagcaagtgtcgagttcagctctattgaaatcaactaagtatagctgaccctctaatactcccttaaaagctactgaagcatcacttcttctaaagacagtgacacctatatctgtaaaaagatagttgtaacccattttgcataattgagaaacagaaagcaagttataatctaatgaatctacaagaaaaacattggaaatggaatggtcaggtgatatggcaattttacccaatcctttgaccaaaccttgatttccatccccgaatgtgatagctcgttgggggtcttggtttttctcgtaggaggagaacatctttttctccccagacatatggttggtgcacccgctgtcgataatc

SEQ ID NO: 43058 - DNA, 350 bp, Zea mays
agagagcattgactatatcatccgtcatgggtcgggttttgttctctctgaagaagaagaacgagaagctcaccattatgtcccaaaactgaaatacccgacaggggcgttagtgtttaatggcagcggcgatgaagattttttatactgtctcccggataacaaagaggtattcgtcatccgggagatatgaagaagcttcggatttctgaactagaagatggctcttagttctgccaaggatgaatcggctgacatttacatataatagttaaagtatgaaatcatcttgggttgaaaaaaaattttatttgttatactaatgcatactctctgtaggcttgatctta

SEQ ID NO: 43059 - DNA, 429 bp, Zea mays
gctataagtgggacatggactcccataggtaatacattgtatcgaagaagcgaccacttgaacccttgaccctttacgaacaacaggcaagacctatctgaaatccccaccgaagacaatggttttaccaccgaatggcagtccgggtcgacccattatatcgtgcatgctattgtccagtgcctccacgacttgtctcttagtcatagaagcctcgtcctagataatgagagatgctttccgtagcaactctgtggttccactctgcttcttgaagctacatacaacgccatcatcaatagtgagaggtatcttgaagcgtgaatgggcggttcttcctccaggcattatggaagccgcaacgccagatgtagttgttgccactgcaatcttgtcctggctgcgtagcgtcgtgagcaacactctata

SEQ ID NO: 43060 - DNA, 220 bp, Zea mays
  unsure (1)..(220): unsure at all n locations
tcagcccgcgggcgggcctcagccgatgtggttattcnttcgttagctccttcaacattcagcttcgtgggtcacagatggcgtcctaccttccaatcacccttccattcttcgttcgtggctatgagggggagtggttctatgtttggaaccttgataggagtgtgcccgtgttcactggccttgtcccggcgggcaagcccgaatgtgactacgactc

SEQ ID NO: 43061 - DNA, 437 bp, Zea mays
  unsure (1)..(437): unsure at all n locations
agcttacccatgatgaggcatgtgaccagttaaaatgttctctattagcaagcctacatcgagacagggcttaatcgactcagacggagacactacaccaagactctcttctcgtgcaagtcacccacccggtctcagctttatcatttcaacccacagtttggtacctgacagaggtacatcttttctgatgttgaacccatcacggccatgatggatccaccaacaagttttatntttaaaaacatcccatcccacttgaagcatcatattttgtcaaaacaaaacatttttttctagagcaagactaagcacaagaaaaacctttntataaaataggtgatcaaggaaaggtgatcaaacttccaaggaaggaaatgcatcaatgagttaagcacacgacttctatcacctaatgcattaagcaagtgagaaaa

SEQ ID NO: 43062 - DNA, 231 bp, Zea mays
tcgaccggagtgggctggccaccgtggtcgaggcttgggtggcaatggccgacgaaaaaaagctcgccggagctaaggaggggcgtctggcacgcgaacgtgagcactgggtgatgtgaggcgcaccctgtgaaggtttatattgctcggcgagcacggacgagggtggggttatgataagcgctcggggcgtgcgcgaacgaatgccaatgctcgctctggcgcctggca

SEQ ID NO: 43063 - DNA, 438 bp, Zea mays
agcttactcctccctgggaagggccgcttattatttctaagaatttgaagcccgggacatacaagctggccaacgatcaaagcgaggtctacaacaacgcttggaacatcgaacaactacgtcgcttttatccttaaaatggttcaagacaatcatgtatctcactgtctttacatgcataaataaagtctaaccatcaatgaaggatcaaccttgcctcggcaaagcccgaccctcccttgggggctataagggggggaaccccctctgcgtcaaaattatcctcggaaaagttttctaccaaaacgactttcgtgcttttcgactatatcaataacggaatcctgaaaacgacgattggaacacgtaagcggcaaggccgaccgagccaagggactcctatgcctccgggatacggatacctcactcatcaccttc

SEQ ID NO: 43064 - DNA, 400 bp, Zea mays
  unsure (1)..(400): unsure at all n locations
gctgcgcgtaagcggtggaactgagatacaaatagtgatggcgacattcgcctttctgacgaggtatgtgtgccttatagtgggagtgacaatgatcttgataatctaatagacttcgtcttcccaaatctcaacaaatatatgtcagaatccacctacattacttcaacggcgatactgtcaacgcggaacgactgggtggatatgataaatgctaagatgatcgatcgttttcaaggtgagcatatggttgaccataggttcgataacgccatggatgatccccataactactacccacctgagttcctatacacgcttacacctaatgggctgcccncgatgttttaaactcaaaattggtccctgcatattgttcgaaatagacctgcgatggact

SEQ ID NO: 43065 - DNA, 436 bp, Zea mays
  unsure (1)..(436): unsure at all n locations
agcttctaaagggagaacacgtgataggtttgactaacgtgcantttcgaaaagatagaccttgtgcagcttgtcaagcaagtaaacaagtgggaggagcgcatcacagcaagaatgtgatgaccacttcaagacccctggagctgctgcatatggacctcttcggacctgtcgcctatctcagcataggagggagtaagtatggtttagttattgttgatgacttttcccgcttcacttgggtgttctttttgcaggataagtctgaaacccaagggaccctcaagcgcttcctcaggagagctcaaaatgagtttgagctcaaggtgaagaagataaggagcgacaacgggtccgaattcaagaaccttcaagtggaggaatttcttgaggaggaagggatcaagcacgagttctccgctccctacacaccaca

SEQ ID NO: 43066 - DNA, 427 bp, Zea mays
gctttgtactaaaggcacttgtgattactgtttatttgctctgctactgtagactacatgcaaaatttctgtcattgaaaatctgcatttaatttcttatacaattcagtacaggcgatttaatgcagattctaacatgatgtatcaacctcattgaggtcgaatatcgaagttacaaattcagtggctgtctgtactatgatttatggagacattaatatagtatatgtctgtgcgtttagtaaaagatgacgtgattgcatattttataacatgcatttttggattttttatttcagtaatctcttgtttatttctttttacttgatttatggtctattggttggttgcattgacatctgcttttctcctcaagtcctggactgtgctcttgggcacaatgagtctgcactttttatgcgagctc

SEQ ID NO: 43067 - DNA, 233 bp, Zea mays
atggcaggtgtcgactcgtggcggctcttggttgttggcgactccgccctatgcgcctttgcaggcaccgccctcggcacgtcatcgtgtcctgccctgtgtgcctccgcgccccttctgcgacttgcacacgttgcggccaccttttgagaaagaggactaccccttctttctgtcaccctagcaaggctctcactgcttctgagtgagatgtagctctccgccgatggtga

SEQ ID NO: 43068 - DNA, 434 bp, Zea mays
agcttgtgcggccagcagcttcaaccaatataatttgttctagcagcagagataaggctgagaaaagcggtggttataagcttctgggcagcatgggataaggccgacggccaaaaaaacatattgaattatcttgtttttatttttatataaaccttggttccactaattcatttttttataatcacgtacgttcatgacgccaggacttctactcatcgtgctctagtttagataacaaggttttgaatacttttaaagttagctcaccttttaattcaaatttgatcaagcgcctgacagcccagtttatgtaatctgaaatgttacaaccaaataaattcggcgataaaatttggaccgagtttgattcgatttaatttgaaacccgataattcatctgcagtctaaataaggaaacaaattatttatga

SEQ ID NO: 43069 - DNA, 393 bp, Zea mays
  unsure (1)..(393): unsure at all n locations
tccgagcccgcatctgtccgtggtgaccgtcacaagttggtgttcttctgcagtccgaatccagcatgttcaaatccttttcccttttcgtcttctccctgattcctaagcaaaacaagagtgcacgggtctccatggtctaaatatgatggacatgaactcaagagtgtaatcacctgatggntgagttgacgagcacgagcgccagtaatgggaccagaaattggtcctcgattggatagatgcatcgtagtgtgatgtcttcatcaacaggcatagttacctataaataaatattgtcaaataccgagctcacaagacatcaactcatatacctcaagtattaagaaagagcaattattctcagttcttgcatacaatgaatgtccttta

SEQ ID NO: 43070 - DNA, 413 bp, Zea mays
agctagtgaggagcagtggcagtggtgtttgttattattacacccgaagacacggaggtggtcatagcgcggaggggaaccgaagagtgcctggtgaggagtgggggccgggcacgcagtataatggagacggttgaggaggtaggtataggtgtggagggcctctgcctataaacgtgctgggaggtgcgcctggagaagaagagtgtgaatggtgtcgttggtcgtgcagatcatgtgctcagccttgccgttctgggaggaggtatacgggcaagacatctgcaactgcatcccgtgggagagaaagaagttacgggaggcggagttattgaactcacgaccattgtcacactgaacgaccttaatggtgagggcgaattgagtggacacccatgcgaagaagtgacgga

SEQ ID NO: 43071 - DNA, 366 bp, Zea mays
  unsure (1)..(366): unsure at all n locations
tctanagggagagcacattntatgactaacaaatgttcattttgagaaagagggtttgtagcgcatgtcaagcaggagagcaagttggcgcacaacatccagacaagaatataatgacaacagacaggccattggagttacttcacatggatctattcggcccgatagcttacataagcatcgacgatagtaagtactgtttagtaattgtggatgacntatctcgcttcgcttgggtatacttnttgtaggaaaaatcacaaacccaagagaccttgaagggattcttgagacgggctcaaaatgagttcggattaagaatcaaacagataagaagtgacaatgagactgagttcaagaactcac

SEQ ID NO: 43072 - DNA, 451 bp, Zea mays
ggatccttaagcgactgcagctgcagctttctaaaccatcatgcagttactatatcttcttcaactctgtgtaatttttctttgatgggctgagtaattcggaaacgaagtataccggttcttgctattatacttgaccatcttgtttctcctgtacaagtgtcgcactaactacagcatgggaagcggccacatatagtagtaatggggtccctgatgaaagtggagttagagttgttagatctatcaagtactgcttcagctcctcgaaggctttctgctgagatggaccccattggaagacttcagctgatttcaatatttcaaagaaaggtagattcctttttgctgatcttgaaatgaatctgtttaatgatgctagccttcctgctaacacgtgagcccccttttttgaattttgcagctacattcgaaagatagcttcgatttt

SEQ ID NO: 43073 - DNA, 152 bp, Zea mays
  unsure (1)..(152): unsure at all n locations
agatatatcncattctgagagaagcaagatcattacgagaatctaacactaaatttacattacttgttccttattaaacagaagattggcatagaacacaaaagcattttagaagtatgatttcgctcagcatatgtgctctgattctggta

SEQ ID NO: 43074 - DNA, 396 bp, Zea mays
ggagggggtttttttttcatctcacagaggaaaagcgtgagtcccttaggcttattgactatgatcctgctccaacaccttatgaccctagcatgcctttgagatagaatcggataatagcacgggagtaattgacacactctctcatcattggctcgcttatgtaccttacaagtgctgtcagacctgacatctcatatgctgggacgaagcttgagcagtctgtgtcaaaaccaggagatgatcacttggcgtgctcagagagagtgtcgccgatttgagaggatctatgacttaccatctcttttattctggcaacccgaagtgctggaatgctttgtgatgcaactatatttctgatgctgatgagctttatgccacaagccgatttgcgtt

SEQ ID NO: 43075 - DNA, 310 bp, Zea mays
  unsure (1)..(310): unsure at all n locations
ttcttttcttccgtcgccttgaatgcaacgggttgagcttcggatggctcgccaagctcgttgattntcctcgagccttctatcatgcactcaaaacttacaaaatgcccgataacttcctcgggggtcattttagtatatctaggattaccacgaatcaattgaacttgagtgggattaagaaaaatgagagatcttaaaataacgtttaccactgcgttgtcattccatttcttgctcccgaggttgcgcacttggttcaccaaagtcttgagcccggtgtacatgtggtgtggctcctctccttttg

SEQ ID NO: 43076 - DNA, 439 bp, Zea mays
  unsure (1)..(439): unsure at all n locations
agcttcanggcactctactacgtcgtcttgctcgttggcagcaagaataagaggaagtaaattatgagctaaatatgatgtagtgattgtgaaacaaatgcgtagctcaacatgtgaacttattgtttttactaatagtcatagtattatatatcatttcacttgttgcttctgcaattgtggcatgcttcaaccgctgttcaaaatttatgtgatggttcagtggctcatgtcctgtgagtgaaattaataaaagttctatattaactntgtttttagtgtgatatttgatagtacatttgttacttgctgtagagtaagcaaatagcaatagtctgcttctaaaaagcagttattggctacacaatagttgctttgatattccctttttttaatgtactcactatgtctggaacttgttaatcagatcttgccacgt

SEQ ID NO: 43077 - DNA, 250 bp, Zea mays
  unsure (1)..(250): unsure at all n locations
taagcttctaagggagaacacgtgataggttngactaacgtacaattctaataagatagaccttgtgcagcttgtcaggcaggtaaacaggtgggaggagcgcatcacagcaagaatgtgatgaccacatcaagaccactcgagctgctacatatggacctcttcggacccgtcgcctatctaagcatatgaggaagtaagtatggggtagttattggtgatgaactttcccgctcacttgggggtcttt

SEQ ID NO: 43078 - DNA, 442 bp, Zea mays
agcttggcatggagaggggctgccataagaacattttgtatggggcagagggcggccatggcagatgcgagatccatggagggaggggcgtcgaccaccaagaaggggagggcgccatgggaaccaaggaggagatggtgagcagaggggggcgagctacagcacgaaagagagggcgtgagggagatgaaaggggcggcggtgggaagatgccacggagagggtggctggaacatgctggagagtggcgtggggagaggataatgaagggagagaaggattattcccaccttttctctattttctttcaacaaacattatgtgcaaatatctaacttctaaattttgtaaaagttcacaagagttaatcataaacacatttcaaactctaaggtttgtgagagttcaattgagccaacccaaaatatattaggatcccaat

SEQ ID NO: 43079 - DNA, 417 bp, Zea mays
  unsure (1)..(417): unsure at all n locations
taagtgaccgaggagatntctgcgcctttgctgttgcacggtggggtcacatcggtcttagagaaagctggttgcgaacatgccaaggctgtagttcagcaagaattcgtttttcagcggatgacattaaaaacccttcagccgaagcttctgcactatgcaggaatatttacttcgaggtgtggatgaaaggcgcgcgggagatanctgatgaggctaataaaaagaatggaaaaaattctccacccctcaaaaaaaacaaacaactgaaaacctgctgacgtgcacgctataggactttactgggttagcttcaaatcttttagctctgataaaaacagtttatgactactaacttcacctcgtgaccatacacccgagctgcccgcttgaagaacctgattgataaattgtatg

SEQ ID NO: 43080 - DNA, 437 bp, Zea mays
  unsure (1)..(437): unsure at all n locations
agcttatgaagattcttcatcccaacatgggctattctgttatgccagagccaacccatgttagtcttagcaattaagcatgtgtcgagttcagctttttcaaaatctactaagtatagctgaccctctaacacacccttaaatgctattgaatcatcacttcttctaaagacagtgacacctacatcagtaaatagacagttgtagcccatttgacataattgggaaacagaaagcaagttgtaatctaaagaatcaacaagaaaaacattggaaatggaatggtcaggagatatagcaattttacccaaacctttgaccaaaccttgatttccatccccgaatgtgatcgctctttggggatcttggtttgtctcatatgaggagaacatctttntctccccagtcatgtggtttgtgcacccgctgtcgagtat

SEQ ID NO: 43081 - DNA, 351 bp, Zea mays
  unsure (1)..(351): unsure at all n locations
agtagcatatgctaataatatgtgaattgactcatgcctatctacgggtgcataggtttctccaaaatccaaaccttctacttgtgaataccccctggccacgaatcgagctttgttccttgtcaccacaccatgctcgtcttgtgtgttgcggaagacccactaggttcctacaacattttggttacgacgtggaactaaatgccatacctcgttcttcggaagttgttgagctcctcttgcattgcatcacccaatccgaatcttgaagtgcttcctctaccctgtgtggctcaatagaggaaacanaagagtaatgttcacacaaatgtgcaacacgagatctagtgg

SEQ ID NO: 43082 - DNA, 437 bp, Zea mays
  unsure (1)..(437): unsure at all n locations
agcttctaaagggagagcacatttgggactaacctatgttcantttgagaaagacagggtttgtagcgcatgtcaagcagggaagcagattggagcccatcatccacacaagaacatcatgacgaccgacaagccacttgagctactccacatggacctattcggtccgatagcttatataagcatcagcgggagtaagtattgtcttgttattgtggatgattattctcgcttcacttgggtgttctttttgcaggaaaaatctcaaacccaagagacattaaagggattcttgagacgggctcaaaacgagttcggcttaaggatcaaaaagattagaagcgacaacggaacgaagttcaagaattctcaaatagaaggcttccttgaggaggagggcatcaagcatgagttctcttctccctacacgccacaac

SEQ ID NO: 43083 - DNA, 407 bp, Zea mays
  unsure (1)..(407): unsure at all n locations
cttcgttttccacaagggcagggacgttgttgtctccaccagccctcacaatagacatgtcccgaaaataccgtcctctcatgttctcaagatgactctgtttaatggttgatattccgaagatagaatggctcggtcgccacggccgatcttcanaatcttcatccccactttccacatcataactatcgctagcaccaatatcttcagataaaccttcgagtatctctctaggaatcttctaaaagtttgtctttgccatcgattcacaaatccacaacataaggaccacagccttcttcttctcaacagcttcgctcttagtcatttgtctcacacaaccttctttttggacatttttacagacatgataatgccctttaaccaagtcaaagctgaatctacac

SEQ ID NO: 43084 - DNA, 441 bp, Zea mays
agcttaaagaaagcctaacgaaaagagcgttcgtttttcataaacatcgcaagtaatggctacaataagagggtattcttttaaaaaaaatgtgtgatctatactttataaaacaagacatgagcttaaaaatatcttaattagaatatacaaatattaggttcaccaatttaaatcttttataaaacgtcatatgtgatatgtctaagattaagggtttataagatgataaaacacgttatagcaatattaaaccttcttaatattttataaaagatatatgttatatatccaaggttaatgggcgactaatcacgttataaatttttagaagcattatggaacatataattcattgttaaacctatcacttatgataaattaagatataagtctaaatagtttttatgtgaaaagatcattactattaaacacatattt

SEQ ID NO: 43085 - DNA, 337 bp, Zea mays
  unsure (1)..(337): unsure at all n locations
agaacacgtgatatgtttgaccaacgtacaattcgtattagatagaccttgtgcagcttgtcaagcaggtaaacaggtgggaggagcgcatcacagcaagaatgtgatgaccacttcaagacccctggagctgctgcatatggacctcttcggacccgtcgcctatctgagcatatggggaagtaagtatggtctagttattgttgatgacttttcccgcttcacttgagagttctttntgcaggataagactgaaacccaagggaccctcaagcgcttcctcaggagagctcacaatgagtttgagctcaatgtgaagaagataaagagcgacaac

SEQ ID NO: 43086 - DNA, 439 bp, Zea mays
gacctgctgcatgcagcttatctatctgtctctgaagagcattagtctatccatcttctccttcttgcgtaggacctgctgctgaaggatctccatattttgaatttcctgatctatatcatcctccggaggtgttggactgacagccttcctcttctggcttcgagcctctctaatagaaaagacgtcttgattgttgtccagcggctgcagcttgccagcccctgtagctgaagcttgtttcggcggcatgacgaatgtgatgcttgctcgaagtgttcatagctcaagatatggaagtgagttcaccggaggtggtcgccaatgttggggacttgttctcatatactatgaattgagaacaaggcaacacaagatgttaaatgttaatacccttcgtccttcgaagcattatttcccttacgatataatgatcttc

SEQ ID NO: 43087 - DNA, 437 bp, Zea mays
agctttattgaagcggccaataagcacgctaatttgtttaagagcaaggagatattatgtccgtgcatcgactgtgataataagatagcttggagagatacaggagtaatccaatcacatctgctaaaaagagggtttacaaacaattacacgatatggtcagaacatggtgagttggatccgtgtgaagtgcctggtaatgacgagagagttgtcgaaattttaaatcttaaagttgatggtaaagtggataatgtggatgctaatcaagattttgaagaatctgattgcgaagagatgttgcgccatatggaaccagaaatgttgagttctgtgggatcgcagaaagggctatctaaaatggagggactggaaagtgcttcaaaagaacctttatatgatgaatcaaagggttgtgacaaagagtttactacact

SEQ ID NO: 43088 - DNA, 154 bp, Zea mays
  unsure (1)..(154): unsure at all n locations
tattggtctcttcgccttcagctgtcgagaggctctctttaanggatgcgttttcttctgaaagatccctgactttttgctccacgctttccacccgggaggttatggaggtgcaatggagggcgaggtcatcatattggttatcaagggtatg

SEQ ID NO: 43089 - DNA, 434 bp, Zea mays
  unsure (1)..(434): unsure at all n locations
agcttatcagttgccacaaaggttgagctatttattatgatatcatcaacgtagataagcaagtagatgtaaatgcctgctttgccaaagataaagagggggacatctgccttggaggcaacgaatcccaactctaatagcttagtactgaggcgagaaaaccatgctcttggggcttgtttgagtccatatagagatttttccaatttgcatagataatcaaggtgcgctgaatcaacaaatccaggaagttgtcacctatatacatcttcattaacaaatccatgaagaaaagcatnttgaatgtcaatctacggaatagaccacccacgagtaacaacaagagatagaagaacctggatagtggtggccttaactaccgggctaaatgtgtcatcatagtccactccatattgatgtttgaagcccttcac

SEQ ID NO: 43090 - DNA, 347 bp, Zea mays
  unsure (1)..(347): unsure at all n locations
gggagagcacattntatgattaacaaaagttcattttgagaaagacaggatntgtagcgcatgccaagcagggaagcaagttggtgcccatcacccacacaagaacatcatgacgaccgacaggccactggagctcctacacatggatctattcggcccgatagcttacataagcatcggcgggagtaagtactgtctagctattgtggatgattattctcgcttcacttgggtattcttttgctcgaaaaatctatacccaagagaactaaagggatcttgaacgggctcaatgagtcggttacgatcaaaaatagaacgacatgggcggagtcaaaactacaatc

SEQ ID NO: 43091 - DNA, 432 bp, Zea mays
  unsure (1)..(432): unsure at all n locations
agctntaccaaatggatgtgaagagtgcctttcttttggaccgatcaaggaagaggtctatgttgagcaacctcccggctttgaagatagtgagtatcctaaccatgtctatagactctctaaggcgctctatgggctcaagcaagccccaagagcatggtatgaatgcctaagagattttcttatagctaatggcttcaaagtcggaaaggccgatcctactttatttactaaaactcttgcaaatgatgtgttcgtatgccaaatttatgttgatgatattatatttgggtctactaacgaatctacatgtgaggaatttagtaggatcatgacacaaaaattcgagatgtctatgatgggggagttgaagtatttcttatgatttcaagtgaaccaactccaagagggcaccttcattagccaaacgaa

SEQ ID NO: 43092 - DNA, 322 bp, Zea mays
  unsure (1)..(322): unsure at all n locations
tatttttatgttagtagcccaaacagaaacacctcgagcttgactgtagttgtttctccaatgctagttaagggttcccatcttgatagttacaaatntctagtagtgattgtatccgcaacccaatcactaattagtaattacactatcgacttgcaaactaattacactatatgggctagcaactcaatcccattctaattttgtgacaatttataaaatttgaaattcttacatacagctcttatcttcattgtttgtanttgtagtcaatacacactgcacatatattgtaaaacatagactgtactactcacactca

SEQ ID NO: 43093 - DNA, 437 bp, Zea mays
  unsure (1)..(437): unsure at all n locations
agctttcctctcaggttgagataagctntaatgcacaaattctcccnctttgacatcaaacaccaaaaccatatttcaagcaagaacatatgatgatgtcaagggacagcaaggtgttaaggaggagagacacagtatcaaaactcccccttacttattgagcatatgcactaccaacatttaagtaagatacaaatacgcaaaaagattaatacttccttttgtacctttaccatgttgtagtgtacttcccatcttgaaagtatttaatctctcgagagcttctccacacttgtgcctgattctttatcctaaccttttcttgttgctaagacaccaaacttagaacaagttatagtattgggcacaagaagaaacttctattctaatgattatcaagagatgtcaattaaagcaaactaccatggctaccaatt

SEQ ID NO: 43094 - DNA, 346 bp, Zea mays
  unsure (1)..(346): unsure at all n locations
acatgaagagtgccttcctcaatggaccaatcaaggaggagggctatgttgagcaacctcccggctctgaagatagtgagtatcctaatcacgtatataaactctctaaggcacttcatgggctcaagcaagccccaagagcatggtatgaatgcctaaaggacgttcttatcactaatggctncaaagtcggaaaagctgatcctactttatntactaaaacacttgcaaatgattngtttgtatgccaaatctatgttgatgatattacattngngtctactaacgaatctacatgtgaggaatntagtangatcatgacacagaaattcgagatgtccatgat

SEQ ID NO: 43095 - DNA, 456 bp, Zea mays
gatccttaagtcacctgctgcatgcaagctgtgtattaagtgagagcgatttgttgtgtttttttgagctcttgcgcttggattgcttgttttctttctcattctttcttgagatcaaacacacttgtaattgaggcaagagacgccaatcgtgtggtgatccttgtgggaactttgtgttccaagtgattgagaagaaaagctcactccgtcctagggaccgcttgagagatggaaagggttgaaagatacccggtctttgtgaccacctctacgaggagtatgtttgcaagaaccaaacctcggtaaaacaaattcgcgtgtgacactctgtatacgattgcgatttgttttacgcactctctctcggactctgttatatttgtagcgctaactcggcttatatttgtgattaagttcgttaatttcagattctgcatattcaccccctctagg

SEQ ID NO: 43096 - DNA, 424 bp, Zea mays
  unsure (1)..(424): unsure at all n locations
agctngcattgcatgtataaatttcttgtattgtatctatggcttgtctaacctagttgagataatcgccaacaaagcgagtgaaaaagcttaactcggatcaaacttgacaagtcttagttttaagcttttagcacttgaattcttactttttatgcaattgttgaatcttgaaatatgcatgaggtactgcacttagggggagtattcaaaactcaaatcactcatgaaaacccctagtgcaaggccaaaatgcaaatttcaccatttgcctattttctctaaaaattatctagcctatggcaaaatattttgaaaattatgagaaaatatatgagggtgccaatacatgtcccaacaagtgttattttgtgtgattataagttggaatttggtttggttggaaattatatagaaaaattca

SEQ ID NO: 43097 - DNA, 261 bp, Zea mays
  unsure (1)..(261): unsure at all n locations
agtgcgtctgaacttgggcttgtggaagtgcgagctgccacaaaaaagttattgcattaacggctcaagcacggattcttttctttatcttgtgccgaagcccagcccangcacctccgtccagggtatatnttaagcctatttgttttggcttgtagtcgtgagaatcggcttctggtgtccaactctttgnttctcgggctatttctatcggcttctggtgtcaaacactttgtttctcagccttattctgtgataatc

SEQ ID NO: 43098 - DNA, 440 bp, Zea mays
agcttaaagccatggtaagtagcataggctaataatatgcgaattgattcaagcctagctacgggtgcataggtttcaccgaaatccaaaccttcgacttgagagtatcccttggccacaagtcgagctttgttccttgtcaccacaccatgctcatcttgcttgttgcggaagacccatttggttcctacaacattttgattaggacgtggaactaaatgccatacctcattcctagtgaagttgttgagctcctcttgcatcgccaccacccaatccgaatcttggagtgcttcctctaccctgtgtggctcaatagaggagctagccaagcaagaagaaggtacaatccgtaatattccctgtgtggctgtgtgcattaagttttctttgttctgattactttcacattcactattgtttcagcaatgtttgcggaa

SEQ ID NO: 43099 - DNA, 107 bp, Zea mays
agcatgatcgcttccccctggtcttagtcttgctcggctgtccattgcgaccctttagcaccgtcttgaatctcttgataatgagggccatttcttcatcgttgagt

SEQ ID NO: 43100 - DNA, 433 bp, Zea mays
  unsure (1)..(433): unsure at all n locations
agcttcacatttctggactaactcagcggcatctctctttgctgtnggccaatagaaaccagacctgaaaactttcccaaccagagttctagatgctgcatgtattccacattgtctgacgtgaatttcatccaataacttcttcccagtagttgaggaaatgcatttcatgaggactcatgttgcaccccttctgtatagtgcgcctcctatgagggtgtagtgggtcgactgtctcgcgatgcgttctgctgcagccttatcatccggttcttcttcattttttatgtacctaatgataggcactctctagtcattagggtccgattctggttggctcaaggtgttgcattattccgcctgatctgagggaatacttgggcatgatacttcttggacaaagatttctggtggtacttgggtccgactggat

SEQ ID NO: 43101 - DNA, 438 bp, Zea mays
agctcgaagcctcctttgaagggtgttctgtcaataatattccacgaggagaaaatgagcacgctgatctactagccaagtcagcggcacaggggctgcctttaccttcggaagtattctttgaaacaataaaagcaccttcggttgaccttcttgaaagagcagcgctcaatatatctcctgtttatagcgaagattggagaactgagatcatgtcttttctccagggcaatttcgtttcagatgacgaagcttaccataagagaatagcggcaagagcccgtccatatgtaataatagaaggggagttatacaagcatggagtctgttctccattactcaaatgtttatccagagctaaaggtatagagttgatgaaagaaatacatgcagggctgtgtggatctcacatcggatctatgcccttgctgggtaaag

SEQ ID NO: 43102 - DNA, 264 bp, Zea mays
  unsure (1)..(264): unsure at all n locations
ctctcggcagacggatatttctttgttgtccgggagacagtataggaaataatcttcgtatgtgccattgaatactaaggccctctttgggtatttcagttcccgggcatagtgtttggcttcagcaatttcttcttcagatagtctttttcccgaagcatgtcgaacaataaagtcgagattctcggacggtgcttcgggagtaggagaattagactnttttgggtacatccttctccacaaccatactagtatccggaaatt

SEQ ID NO: 43103 - DNA, 434 bp, Zea mays
agcttctccaccatgtcgctgctagccaagttgttgcagctacctccatcaatgatcaaacgacatgaacgctccttaatgacacactttgtttgaaacaacgtatgtcgctgattctgctctgccttctccatttgtgcactaagcacacgctgtacaatgaggctctcataatgctctgcatcatctgcatcaatctgttcttcgagtggttccttagtgcctgcatcatcagccacaagcaaagtaagtgtagcttcatccaaatcactagcagaggaatacccaccatcgtcttttaccaccaaaacacgctgattaggacaatcacgctgcacgtgtccatagcccttgcatcgataacacagaacatctcttgttctacccgtggaggctactgaagaggcactacctgctggtttctgggcagattt

SEQ ID NO: 43104 - DNA, 331 bp, Zea mays
  unsure (1)..(331): unsure at all n locations
tcaatggggagcctacttgttgggtagactctttcttcttttctttcgttgctttgaatgcaacaggttggacctcgggtgtggaggtggtgccttgctccaagttgacaatgtgtttggagtctttgatcataagttcaaagctcacaaacttgtcaatcacttcctcgggagacatctatttatatctaggatctccacggattagttgcacttgagtggggttatgaaaaacaagagatcttagaataaccttgaccatttcatggtcatcccacttggtgctcctganggtgtagacttggttaccatcgtcttgacccgatggtac

SEQ ID NO: 43105 - DNA, 417 bp, Zea mays
agcttgaagccatggtaagtagcataggccaataatatgttaattgactcaagcctagctacgggtgcataggtttcaccaaaatccaaaccttcgacttgtgaataccccttggccacgagtcgagctttgttccttgtcaccacaccatgctcgtcttgcttgttgcggaagacccacttggttcctacaacattttggttaggacgtggaactaaatgccatacctcgttcctcgtgaagttggtgagctcctcttgcatcgccatcacccaatctgtatcttggagtgctctctctatcctgtgtggctcagtagaggaaacgaaagagtaatgttcacaaaaatgtgcaacacgagatcgagtagttacccccttatgaatgtcgccgaggatggtgtcgacggggtgatct

SEQ ID NO: 43106 - DNA, 468 bp, Zea mays
  unsure (1)..(468): unsure at all n locations
taagctcgtcaacatgtnttggtacccattgcttgatggatccattatggttattcaacaaagatctatgaacccaaatgtcctttgcgctagcgcttggcaaattcattgcctttctagcacaagttgcaattttgggttgcctagttatatatgaatcaaatgacaagctatgagtggaggggttaccaatgggacaatccttgcattgatgtccctttttccggcatgtgtagcataagcgttttccaatttttgaagatttcttctttcctttgttgntgcttgctacatggntagtaaaaactttcttttctaaccctatgcccttctgctntaaatggggacaagatttaataaagtgttccttctttgaacatttaanacaaagtatatcatcctcgctataatcaagccttttaatatanggcatgatctattaagtgccctcttcaagcattactacac

SEQ ID NO: 43107 - DNA, 431 bp, Zea mays
agctttaaagacattagaagtatctttgtataatattatgtgattcaagaatcaaacattacttctgtgaatttgtccataccttgtaatatatttttaccttttcatctgtgcgagaattgctttgatgtgaacgaaacttatattttttgagccgaagtcgaaaacaccttcccttcttttcgtacacaacgaaacatatctttgcttctttacactcatcgaagccttgtcatcaaagccgaagcatctgtttgtactttatgatatgatgatgatgatcctacgaatgtctacatgaatgtgtatgaatgcaatgaatgatgtgatgtaatgagcgaatgaatgtccaaacacacgcacacgaagccacacccagactctacatgcccttaagaacgccttttgagtcttaagctctgcatgccctt

SEQ ID NO: 43108 - DNA, 109 bp, Zea mays
tatcttgtctttatttgaacgagagattattacaagagcctattgccttcccggtatggccgctcgcggagaaatgggaaatgccgccagaaatcatatagatgccgac

SEQ ID NO: 43109 - DNA, 438 bp, Zea mays
agcttgtggtagtggagtgctatgtaatgtattttctctatgtaatgaataaaataactagtaaaaacaaatggcatgtgcataatagcaactctcttcccatggcagatggcttcggatagaaccacgcctaccgcctccgggattggagcaagacttcctctaagagctgagggagaggctggcggagaaaggggtgaaacccacctccccgcacctccagaactaccactagacctagcccaaattctggccaatcaaaccagactcattgaagtcctcactcgaagcctggagaaccagcgcccatgcggtggaaggccccatgacaggatgggagaattcctgagactgaagccgcccacgttcgcggggtccagcaatcccctcgatgcagatgactggcttcgcacaatcaagaggaagttggaagccatc

SEQ ID NO: 43110 - DNA, 425 bp, Zea mays
  unsure (1)..(425): unsure at all n locations
agcttgagntttgagggccctatattgcatatgtttcttgactctctcaatcaaggactctgcaacccaaatttgtctaggtctactcttgcttggtgtacctaggaatgtaactctgacctttccatttgcaacttttcttagaacgctatgagcattgaaagcaaatggtcttgagtgcttatgcaaaggagttggtggtttggctttgcagttgtgggcaaagagaccttcttttccacactcaaagcatttgataggcttgtgagtctgctttgacttgtattgagtagtagctttcttttgcacaaaagcattgtatccaataccactcttgttgtttttcatgacagtgttcatgagcaattcattttggaggtattggccctttgtgaacttttgcacacttgctgcaagatgttcat

SEQ ID NO: 43111 - DNA, 255 bp, Zea mays
  unsure (1)..(255): unsure at all n locations
gattcttcatctnccctatgaagcacgaatgagggggcccgtgcatggacgttggtgctatccaatcgatagatgtctaaagactactcgaaagaaatgtagaaataaatgcaaaatcgaggcttccattgcaaaggcatacatattatatgaggtctcaaacttcacaacaactttatatggtgacanactgccgagcgtgcataatccactccctcngtacaatgatggcgacaatgaatcgaacctttcata

SEQ ID NO: 43112 - DNA, 424 bp, Zea mays
agctagactaagcttgacggactcaccactttgtccttctataggctcggatcaaacggacgaggactggaaatgggctatccacgggggtggctctcagtcggcccttgcggatcgcggggagaggagacacagctaatggcgggcttatggaacacatgcgatgtacggaagaagccatggcgaatgcatcctattcactgggacaggctttataaccgatgcacggacatggacacagacggccactggcgcgcggtggtatacgcaccgtcgtgctctgagcgcgccgccgggagtcatcccatgtctgacacctgggaactctcctttgccatggttctacggcggattataccacaataacatgcgtatcttggcaaagtcattgggtaatatcgcatgcctgctcgatatacgacct

SEQ ID NO: 43113 - DNA, 136 bp, Zea mays
cgcggatgatcgcaggctactttgatctcctgtactgttctgctgacatgagtcactctgatttctattgatgcatgagagggtcggttcacaatcacaatatatgaccttgctctgaaggatattctcctgcacg

SEQ ID NO: 43114 - DNA, 429 bp, Zea mays
  unsure (1)..(429): unsure at all n locations
agcttctaaagggagaacacgcgatatgtttaacttatgtgcaattcgaaaaagatagaccttgtgcagcttgtcaagcaggcaaacaggtgggaagctctcatcacaccaaaaatgtgatgaccacatcaagacctttggagatgcttcacatggacctcttcggacccgtcgcctatctaagtataggaggaagtaagtatggtcttgttatagttgacgacttttcccgcttcacttgggtattctttntgcaggataaatctgaaacccaagggaccctcaagcgcttcctaaggagagctcaaaacgagtttgagctcaaggtgaaaaagataaggagcgacaatgggtccgagttcaagaaccttcaagtggaggagtaccttgaggaggaagggatcaagcacgagttcttcgctccctaca

SEQ ID NO: 43115 - DNA, 380 bp, Zea mays
  unsure (1)..(380): unsure at all n locations
tggatgtgaaaagtgccttcctcaatggaccgatcaaggaagagatctatgtngagcaacctcccggctttgaagatagtgagtaccctaaccatgtctataaactttctaaggcgctttatgggctcaagcaagcccctagagcatggtatgaatgccttatagatttccttatcgctaatggcttcaaagtcggaaaagtcgatcctactctattcactaaaactcttganaatgacttgtttgtatgccaaatttatgttgatgatattatatntgggtctactaacgagtctacatgtgaagaatttagtaggatcatgacacagaaattccagatgtctatgatgggggaagtaaagtacttcttgggatttcaa

SEQ ID NO: 43116 - DNA, 433 bp, Zea mays
  unsure (1)..(433): unsure at all n locations
agcttcgtcgtttgaaagaaaattaccctgaatgtaagagatgatctcagttctccaatcttcactataaataggggatatgttaaggattgctctttcaaggagctctaccgaaggtgcttttattgtttcaaaaaatacttccgaaggtatatgcagcccctgngctgctgacttagccaatagatcagcgtattcattttctccgcgaggaatatttttgacagagaaaccttcgaaggaagcctcaatccttcggactgtatctagatacttttcaagcttcgggtctcttgctttgtagctcttgtcaatatgaccagagataacttgagaatcagttttaaggatggcccttctgattcccattgcctttaatttccaaagacccaagagcagagttcatctcagcgatgttatttgtgcaactaaa

SEQ ID NO: 43117 - DNA, 181 bp, Zea mays
gaaagcagcttcagcatatcagccgaagcccatgctcttatgtgaggacatagcagagcagaaggtgctgttgggctctcaattatccgaagaacaggagaaaaccttgataagctttttgttcaacaacaaagatgtctttgcatggtcagccaatgatctctacggagttaatagagat

SEQ ID NO: 43118 - DNA, 430 bp, Zea mays
agcttttatagacatgagagatccatatgttacttcttcatccattaatccccatggatatgctgtttagagataagttgataacattagtgtcatgatcctcagagaagggggtatgagaatgaccacaaatgagagatttatgcaagatcaacattcgatacttgagaacgggttatagcagataaccagataacagggcagaatcaataaaggattcagagatttggatgataaggcaaatatgattcacaagatataggattaccagatctaggcaaaaggagagataggcgaacaggatcagctaggatgattaacagaaatgctatgaagttttaggagcaaggatttatggaaagaaacgtggccttgataagggtgggcaactagacaccaaatttttttgacacaacaagtgcacaaggag

SEQ ID NO: 43119 - DNA, 468 bp, Zea mays
  unsure (1)..(468): unsure at all n locations
nttgaacgtactaagcacatgccgcgaaatatggtatccggttaacctagtacctgagtgaagccgggcgcggactntatccctcatgcgacctgagactgggtctcccatgctagctatggtgggtacaagtgcggtcactgcacggcggcagccggggtcagtggagcattgtatgccaaggcggtgaggcctggacgcgaacggggaatcgatggggacggttgtcatgtgtggngtcggagtaccctgacatgccgtgtgtntaggtntaccttgcaaggataaaactcgattcgaatcatctgcttctcgcagctaatgagactgcttgattccttgtactgcatcgagtaagaagtgaaatgtggttatatgagaaacttgttgattgactaatcgattgtaccatgtatgcttagaagagcaaacctagctaagttaatgatgatagaactttgaaagcta

SEQ ID NO: 43120 - DNA, 438 bp, Zea mays
agcttcggcactacttccacaaggtcgggccaccgtctgtatgtgtgttagcccacgacaatgacaagaaagagggccacaaggcagaagagttccccgaggtccatgactgcttcatgatctacggtgggcaggtggcgaacgcctctgctcggcaccgcaagtaaaagcgcacggaggtctgctcggtgaaggtggcggcgccagtctacctagactggtccgacaagcccatcaccttcgaccaaggtgaccaccccgaccgcgtgccgagcccaggaaagtacccgctcgttgtcgatcccgtcatcagcaacgtcaggcttaccaaggtcctcatggacggaggcagcagcctcaacatcatctacgccgagaccctcgggctcttgcagatcgatttgtccacaatccgggccggtgcggcgccatttcaca

SEQ ID NO: 43121 - DNA, 237 bp, Zea mays
  unsure (1)..(237): unsure at all n locations
ggttcttctgcanagaatattcgatgcacagagaaatgattatggtatgaaacacattcgtaagaaaataaaggctggtaggcaaactattctagagaagatgatcaacgcattgtatggttcaacaaccgcatagttgtgcccaagaatgatgtggtccgctagcacatcttagatgaagcacatcttagtcgctattctattcattccggaagcactaagatatatcatgatcta

SEQ ID NO: 43122 - DNA, 436 bp, Zea mays
  unsure (1)..(436): unsure at all n locations
agcttgnggtgtacattatacgtataagatgtgttcttattttnttaattcaaaaaaactgacgtgcaatcaagaatcttgtgcaatcatcgcaacaagcaagctaataaaagctaggaaggattataaaaaaactagagataaactccattatttaatccaccaatatatcaaatttaaaattttaattccttctattttaagagatatgaaaaagaaaattctatccataaaaatataaaaatgagattctcttctttattatatcttttaacggaaacttgaaatatgatatattaataaagtacatctataatttgttttaaaaaaatgtctatgatcttttggtagttagattgtatgacgattgtatgggaatcttgattgcacaacaattctacccatatgtttgacatgaaaatgatcatgtattcat

SEQ ID NO: 43123 - DNA, 253 bp, Zea mays
gcctccgatgttcgactggattatactattcgcctctacagaatacttttcattacctaactgctttgtggtctcgccattcctgactctgctgtgatgatactgatggaatactcattcaccgctgcttaggagttcgatcacgactatagaggagacgtcaagtcttactcctccgctctatgcgaccattgtccctgtcccccaactatggactctgagaacaagtacgatcactgtcactccccgctca

SEQ ID NO: 43124 - DNA, 436 bp, Zea mays
  unsure (1)..(436): unsure at all n locations
agcttctcaatgtgctcttcaagggataggaagctgtctgtttcatgagaaggtagtgggctntcaatcctctctaaagccaccttctcgtcatgctgcaatagttcctccttaacagtagcatccaattcctcttggcaaaaaagggaatcctggtccaatccttcggcggcgaatacaagtgcttcacgaagttgtttaacctcaaatgcagtcaagcccttacccaagggtagcttctcattgcaaatacgaaagatatgcttggcatgatcctgcatcaagataattgctttatctgcgatttcagtgctcttcgacatccctgcatccattataaccagcgctaatacacaggttccagcagagtaacagtactgcaaataaagagtctacctaaatccgtaaacagcaaaccctaaacctaaaacctaaa

SEQ ID NO: 43125 - DNA, 376 bp, Zea mays
  unsure (1)..(376): unsure at all n locations
gtctcttagctntgggatctccttcatgtgactatttaagaatattccaaatgtcacgggcatcttatcttccttgaactttccggtattcttccggacaaagacttcctttaattatgctcacaacttgagcattgcgatgaacctcttgcatcatttccggagtcatctcttctccttgggcgggcttatacatacctacattaacaatctcccaaagactaggatgcacaccgattaaatgcgacttcatcttatcggcccactcgtcatagttcaactcactaagagttggtaactntccaagtggggcagaagagaagtttgggaataaaattctagagtaatcgaatggaactttactaaattcgttacc

SEQ ID NO: 43126 - DNA, 429 bp, Zea mays
agcttgacccggggacccgcgtcatctgtatattctaatcgtgctcaccgtagttcaagaacccgccggcgcacgtggaccgggtaagcccctgcaccgttttcaaattccttgcgcgcatggcctctgtgtcaccccgtgaagctcctcgtgcactctaattgaactataccgccgtggtttggccggagcaagagccgccgacgacccccgccgcctgtgctcgtggccaggatagctccgaccacctccgacaccgacctgcacaccgacgtgaccgtcgcgacctcccggacgtcactgaccaccccgccggagctctaatgccgccggtaagccccaccgccgtaatctataccgcgggtactgtttaagccggtcagggagcgcgggttagatttcagttaagtccagggggctttgcgcaat

SEQ ID NO: 43127 - DNA, 420 bp, Zea mays
  unsure (1)..(420): unsure at all n locations
cgtgatcatttccctttcttagcttaaagatttggctaaagttcttgatgatgagcgccatctcctcattgtcgagcttggaggcgtcgatgggaagcctactcgatgtagactcttcctttttctgctccgtcgctttgaaggcgatgggttgcacctcgggtgttgatgtggcgccttgctcgatgatcttcttggagcctttgatcatcaattcaaagttcacaaactctcctataacttcctcgggagacattagctcatatctaggatcaccacgaattaattgtacttgagtaggngtaagaaatacaagtgatcttagaataaccttgaccatctcatggtcatcccactcggagctcccgaggttggcactcggttaccatggttttaaccggttgacatggcttgcggtct

SEQ ID NO: 43128 - DNA, 389 bp, Zea mays
tttttgtcgggactcattgggaattctgaatttcagaattctgaaattcacaccttgagccgaagatcaaggatgttcaccttgatccctaactcgaatcctaatggccccattgacaaaattgtgtctaactaacccctctggcgagtgccagaagatggcattgtgacacgagccctatacacgacaaaaccttggatatgcctcgagtttaagcagggagacagaccagaatttctggctccatatctctgcaaccagtaggcaaaatcctatggcacccacacaataatggtagcttgtagggaggagaagatgttttgtgcactgactaatgcgagagcaggctcggatgagcgaccacacgcgccagagcttgggcagaacgc

SEQ ID NO: 43129 - DNA, 82 bp, Zea mays
ccataacacacccttctcattctggcggaaacaagtattcttctcacccttctgagtgagattctttctgataatctgcact

SEQ ID NO: 43130 - DNA, 430 bp, Zea mays
atcacacccttcggcacgtactgtttcatccgtatgcctgaaggacttaagaacgtcggatcaaccttccctcgcctcaccaagaaggtcctcgaaagtcaagtaggccgcaacattttcacctatgtagacgacattgtcgtcacaagcaaaaacaaagaggatcacctggccgaccttgcagaaacattcgtcaacatgcgcgacgcacgactccggctaaatcctaagaagtgtgtcttcggagttcgccaggggaaaatacttggttacctggtattgcaccgagggatcaaggccaacccaactaagatccaagcgatcatcgacatggcacctccgcagtcgacaagggatgtccagcgactgacaagcagattatccgccctgaacagattcatctccaaatccatagagcgtagtttacctt

SEQ ID NO: 43131 - DNA, 433 bp, Zea mays
  unsure (1)..(433): unsure at all n locations
agctttatttgaagtggcaggacattntggatactgtgatcttctattccgctacaacctactggaagagtcttctcactccactgagtacaaagtcttcgagtagagtaagaatttaagttttaaagtgataagttttattcgcctattcacccccccctctatgcgacatccagatcctgttcccgggtcaaagggaactttcaattggtatcggagctaggcctctccagtgtgggcttagccgtccggagatgacgatgtcgtcacaagaggtaactgtagaacttcttttaggcgatggctctaattacaagtcttggtctgtctctatttgtagtgctttcatgagtgttgatcctgatttgagacaggtctttagtagtagtatttttcccactaatattaggaaaaatccttccaatgaagaact

SEQ ID NO: 43132 - DNA, 349 bp, Zea mays
  unsure (1)..(349): unsure at all n locations
tgggccccanagagcatgagaggagcgtgatatcagactatgcagatgccacatctctgtctacctacttgtctggtaagatggttcctttcctccaccacctttactcatcaatctctgttgcatacttaatatggacgtgttctgatgcatatttcttctttttagaattcgatgagcggaatctcccacccctatcagctggacagcggctgaacattgcgattgatattgcccgctgtctataatacctgcacaacgagcgagtgattgcacatggcaacatcaagtcgtctaacgtcctgattcagaactccacttcatctgctctggggactgactacagcct

SEQ ID NO: 43133 - DNA, 418 bp, Zea mays
agcttgtgaaggttcttcatccacacatgtgtcttattgctatgccacagccagcccatgctagtcttagctattaagcatgcatctagaccggcctcttcttttgcaaaatcaactaaataaagtttgccgtctaatacacccttaaaagctagtgaaccatcacttcttctaaagacagacacatctacatttgtaaatagacagttataccccatgttgcataattgactaacagatagcaaattataaccaagagactctaccaaaaacacattagatatagagtgctcattagaaattgcaattttacctagcccttttaccttgccttgattcccatcaccgaatataattgaatcttgggaatccttattcttgacgtaggaggtgaacatctttttctcccccgtcatat

SEQ ID NO: 43134 - DNA, 225 bp, Zea mays
  unsure (1)..(225): unsure at all n locations
gcttgtcgatgtcnactgttagtgcggacggtactccgaagcggcgaacaatgttatgccaaaagaatttctgtgcagtctttgatgttattgtggaaacagccctcgcctcgatccatttggtaaagtattctactgcgatgaaggcgaacttaaggttcccctgagccgtgggcaggtgcccaacgatgtccaggccccagcgctggagatgccatgtgtggg

SEQ ID NO: 43135 - DNA, 432 bp, Zea mays
  unsure (1)..(432): unsure at all n locations
agcttgcttcgtcatgctcctcttgtgttttgttttagcttttctagagacgaagcttctataatattcagtagtatattgaaagcaaatggttaaccgtgtttttgaaaaccttcggaagagaaagaccccaacactaaggattcagtagttatatgaatctacaataattcatatagagattatagataaaaatattattttatataaaatatttgctaaaatataccctagaatcataaaaactttgaaatcaatatgttcttattgtttatcaaactatttcttcacttataagaagatttaaataatatctaggttatcaaaaaaatatttggtttcttatttatctacagngcattgcagtcactagataaaaagtgcttaaaatcttgttgccaccatctcaaaatgcaactaaaagagacgaac

SEQ ID NO: 43136 - DNA, 420 bp, Zea mays
  unsure (1)..(420): unsure at all n locations
tgaagccactggtagtagcatatgcaagtaatatactaattgactcaagcctagctacgagtgcataggtgtgaccgaaatccataccttcgacttgtgaataccccttggccacaagtcgggctctgttccttgtcaccacaccatgctcgtcttgcttgttgcggaagacccacttggttcctacaacattttgattatgatgtggaactaaatgccatacctcattcctagtgaagttgttgagctcctcttgcatcgccaccacccaatccgaatcttgaagtgcttcctctaccctgtgtggctcaatagaggaaacaaaagagtaatgttcacaaaaatgagcaacacgagatcgagtaggtacncccttttgaatatcgncgaggatggtggtcacgaggtgatctcattgga

SEQ ID NO: 43137 - DNA, 440 bp, Zea mays
tgcggcatgcaagcttctccctccaccacgaaatctaccgtttttttctctgtgctcaacgatttgcaccatcattcttgagcaaggaaacaagcaaaaacctaatgcctagccccctacctggcgcgccaaatgtcggagaggaaatctccagccgggtggcggagtgcacccgccctaaatcctaagatgagtaagggcctaagtgttttgcttgttagctgaaaaatggtgagaaacacaagaacgcacaacgatttatagtgggtcgggccgtcggagcgtaacaccctactccactgtgtgatgtattgcttgagagcttgtatgaacttctgagtgtctgagcgagcctaagattggatctgtcttgtaacgtcgcatgcctccccttttatagccgaaggggggcatgcacaaaggtaccgagccccgacatt

SEQ ID NO: 43138 - DNA, 197 bp, Zea mays
  unsure (1)..(197): unsure at all n locations
acaaacacttagagagtntagagagagatgaagatagcattattaaggaaaccaagctacacgcgcaacatatgaaacacaaatcactatctctcaagtcactaatcactaatgatcacttgtctcaatngtaaacttggagagattggaagctctgaatgtgccttggaatgaatcgttagctcttgatttgatgt

SEQ ID NO: 43139 - DNA, 429 bp, Zea mays
agcttcttgaggagaagactgctggatttgttgtgtaatagcgaaaacgaatacagagaagattactaaagaaattgtggagggcttgtctgaagatactgatgatagtgacaactatgatgtggagagtggaggtgaagactctgaagatcggccctggcgaccaagtcatgcggtcttcgaaaaagcaactatcaaacagagtcatcttgataatatgagaggaaggtattttcgagatatgtctattgtgagggctgacgtagacagggctgttcctgctcctgaagaaaacgaagttgtgatcttccgaagcttcttcaaagctgggcttcggttcccgttgaccaggtttgtggttgaagttttgaagacataccagattttccttcaccatatgactcctgaagcagttattaaaatggggat

SEQ ID NO: 43140 - DNA, 388 bp, Zea mays
  unsure (1)..(388): unsure at all n locations
gtatcanatggacgtgaagagtgcctacctcaacggaccaatcaaggaagaggtctatgttgagcaacctcccggttntgaagatagtgagtaccctaactatgtttataaactctctaaggcgctntatgggcttaagcaagccccacgagcatggtatgaatgcctaagagattttcttatcactaatggcttcaaagtcggaaaagccgatcctactttatttactaaaactcttgacaacgatttgtttgtatgccaaatttatgttgatgattgttggaacttgctctcagtagcaaggaggccaacaagggtgaacggtggtgacaacanggttacgtgctcggnggcaatagctctgttaatctatcctctcacgggcact

SEQ ID NO: 43141 - DNA, 488 bp, Zea mays
  unsure (1)..(488): unsure at all n locations
cgtcgtgaattgctcagactgcagcagctataacctataattttattatattataagagtagtagaagctaataaaggttaaagtgcctctcaccatgccagcaataatgcgtgatggaggccgcgactgcgccggtgaccatgcaagtgctgacttatctttagagatttcgctgtcttcaaagggtggacgttcgggttacccgaaaatttcgggtcggataattcgggtattttaaatttcgggttttgagattcgatacccgaaattacaacgggttttataatacccgaaaattcgggtacccggaattttggattcgggttcgggttcgggtattcccaaactacccgaactattgtgttggcttcataaaacgcatacacnctattataatagtataaaaatataatttgataatgatatacatggacatataaacacaacaatctacatcacaagtatgccacttactaaattataatgt

SEQ ID NO: 43142 - DNA, 357 bp, Zea mays
ctacagacagtgatgacttccctcgatcactatattcaatatggcttcataaaaggaagaaccatccaggattgcttggcctgtgcctatgaatatgatttttcatgccatatatccaaaacagaaatcattgtgctctagctggactttgaaaacagacttgatactattgaacatgaacttattcttcatgtgctgtcatataaaggatatggacctaattggcttaactggattcgaaatatacttcattctggcacgtaatgagtcttacttaatggagtaccaggaaaacttttcattgctagcgtggggtcatgcaacgcgaccatctctcccttgattgtttgtttggcg

SEQ ID NO: 43143 - DNA, 400 bp, Zea mays
tgaattgtctgtgaatgtatgtgaactacaagaccggtgggttccattgtgttattgacagtggatgcacacaacatatgacatgcaacccacggatgttcacctcactagatgataatgttgatggtcaagataaaatcacatttggagacaattcaaaatgaaaagtgcaaggacttggcaaggtggcaatctcaaatgatttatcaatatcaaatgttctcttatttgcacctttgagcttcaatttattatcagtgggacaactctgtgatcttggacttcaatgcttattcactccatcagaggttattgtaacaaatatggatgatgaatcaatggtattcaagggatgtatatacaacaacctctacttagtggatttcacttcataagatgt

SEQ ID NO: 43144 - DNA, 412 bp, Zea mays
gcgacgacaccaacatggatgcactcgttgggaatagacagggaagcatcgacaaaggtgctgctggttgggacgaagatctggtgaactcttcggatgcatcgaagagacaacagggaaacagcgacaagaatgcatgctcgggagaggctctcggaatcaacaggagctggcatccatcttctggtaaccctattcggcgcggccatgggaatcaccaacatgacagggactctcacagcggtgattcttggcggtgtagctcgaactacccgcggatgttcgacaatcgtcatgaccatggcagtggtggttcgtcacgaccctcgtcataagggctgtcccagatggtgctatgtaaacactacgagagtggccactgcgggaatgttcgaaatgcacaccctgaacc

SEQ ID NO: 43145 - DNA, 283 bp, Zea mays
tataccctaccggttatcccgagcacaaaattatgagaattcattctatgaagtctcactctggctctcatcatgcttttatgtataatagtgaggcatctaattctatgatatcaacccgtgctaaattgcctaagaagaaaactcctattgcatcaaatgaacctaacatgtcatttaagacgatgcatcatatgtgctaactaacaaatcaagcaaagtagttgccaaatatgttgtgggcaaacacaatggctccaaaacttgtgtttgggtacccaag

SEQ ID NO: 43146 - DNA, 340 bp, Zea mays
  unsure (1)..(340): unsure at all n locations
tgtctacttggagaagactcctccttcttctcctccgttgccttaaaggccaccggttgcgccttggatgtggaaggctcgtcaaactcgttgatcttcttggagcccttaatcatgcattcaaaactcacaaaattcccgataacttcctctggggtaattagtggatatctaagattcccacgaattaattgtacttgagtggcgctaaggaaaataagagctcttataataaccttaaccacttcgtggtcatcccattntgtgctcccgatgttgcgcacttggttcaccaatgtcttgaaccggttgtacatgtcttgtggttcctccccttggc

SEQ ID NO: 43147 - DNA, 379 bp, Zea mays
ctaacctagtctagataaccgccaacaaagcgagtgataaagcttaactcgggtcaaacttgacaagtcttagttttaagcttttatcacttaaattcttacttgttatgcaattgttggttcttgaaatatgcatgaggcactgcactaagggggagtattcaacactcaaagtactcatgaataccactattgcaagccaaaatgcaaatttcaccatttgcctattttctctaaatattatctagcctatggcaaaatattttgaaaagtatatgatggtgccaatacctgtcccaacaagtgttattttgtgtgattataagttgggattagtgttggttgggaactagatagaaaaattcaaaattttgcaatc

SEQ ID NO: 43148 - DNA, 343 bp, Zea mays
ggctagccatggagatgggcgccgagctccatatatgcatggcgagcataaagaacggggatggagcgctgttactagcgcatgggctccactgcggtgtatttgaataccccatgggcggcgccgtgatgagataaccatctgcagccaggatttttcaagccaacgcggcgcatatgataacgccggcgagctgtgcccacagcaaatgttcacgcgcgatgacgagagataaatcctgagcagatgagcggcggtgataatgaagaagatgacctcatgcgctgcttgaagaacctgcgtacggcaatggatgagcacaatgaataatatctatcgccgt

SEQ ID NO: 43149 - DNA, 424 bp, Zea mays
agaatagtatgccctgcctttatcactggtgtcattagggtttggtgtcaatgtggcgtgtgttggaattgttgccggattaatgttgccatggaaaagtgtgcttctttgctcacgcgcaagaagttgggagtagacctctcccatcatgaatggctctggcttgtgcatatggccgtcataatggagataacgcggtgttcgggagtgaagttttttcaaagttttggaaaaatgctgcagtattcttaaaaactgtagtattatataccaaaatgtgtttggcaagccagctaatatctctgtttcaaaactaaagtattacaaatactgcagtgtttttgaagtattctaaacttatggttatacctcaattttctctgtaaacgaagcgcgcgcatctctaccgcgtgcaaaataatac

SEQ ID NO: 43150 - DNA, 443 bp, Zea mays
  unsure (1)..(443): unsure at all n locations
taaagatacctgttcacgtgaattgggattttgagttgatgggtgtgtcttacgacctgcatggtatttgcgttaaaggcgggagcgggacaaccgctggagtcaagtggaatgcgggaaaggtaaattcaaaggctaagaggcatcgtgtctagttctagctgcctaagactagctccaacaaggaactctaaagggttctgtaccctgaatttagaagatgatgttgtactctactccctccagcaacgtcctctaaacggtcttctaatattagaggacgctgttgaatcctctatatatagagtttctctaaacggttctctatctattngaatactttaaacaaccggtttagcataactaatatatgtacaatacatttgagagtatgaccaataagtatgtacaacaactaaaaatctaaaaatgtctctaatata

SEQ ID NO: 43151 - DNA, 461 bp, Zea mays
taagcttgggtggtccttggggaactttgtgttccatgtgattgatatatatatgctcactcggtccgagggaccgtttgagagacggtaagggttgaaagagacccggcctttgtggcctcctcaacggggagtatgtttgagaaaaccaaacctcggtaaaacaaatccgcgtgtctcacttcattattcgcttgcgatttgttttgcaccctctctcgcagacgctatcatatttctaacgctaacccggcttatagttgtgtgtatatttgtaaatttcagtttcgccctattcacccccctctaggcgactatcatgtaatcaatgcaaacacacaattcgatcaatgtacaactatgcatacttatgagccttatcggtggtgtgcactggaagataatgtgccacttttgtcaatcggtccatagtgtcccagattgaatcatgatgtcgagag

SEQ ID NO: 43152 - DNA, 459 bp, Zea mays
  unsure (1)..(459): unsure at all n locations
tcaactccatctatattatggattgccttggaatcagtccttcttccttcggcccttctggcagcttcctgactcccatgaatagcaatatgcccttggtccgaaagtatcttcatgcagagataagctgggtgaagaattgcttcaaaagcatttatggtaccacgaccaatgatggcgttgtaggggtatttcatgtcaacaatatcaaacacaatttgctcagtccttgtgttattaacaaatccgaatgttaccggcatggtaatcttcccgagtgccacaatctgacgccctccgaagccacaaagagggtgcgtaacatcatgaatcttgtcttcaagctcttgcatctgtctgaatgctttggcanatataatgtcagctgcactgcctgtgtcaactttgacattgtgaaccagataccctttgatcacacaagaaatgaccatagcatca

SEQ ID NO: 43153 - DNA, 423 bp, Zea mays
ttgatgcacataatatttatgatggtatgaaacatatacgcgaaaagataagggctggaaaggccaattgtttccgataagacgatcaatgcgttgtatggtttaacaaccgcatagtggctcctaataatgaatgggtctgccagcatattttatatgaagcacatcttattcgctattctattcatcccggaagcactaatattgtataagatctggatcaacattattggtggacgaatatgaaaattgaaattgcactctatgcggctttatgtgacacttgtgaacgtgtcgaggacatacactttgaagctgtcgatccattacattctctatcaatacccacatggtaatgggaagacataaatatggactttattgtgggattgcccacgactgccaaagggtatgattctatct

SEQ ID NO: 43154 - DNA, 439 bp, Zea mays
tatactattttcaacccaatcatggatgatatgcctatcattgtctatattctttatttctattagcgattatttggcaagctgctctatgttttctatgaaatctttgctattaaaataaaaaaatggataagggtcgagaagtcttatattatgaacgtaccttcgattctaaaatttaaattcttctaaactgaatgtataactgcagcaataaattgtgattaaccattctacccctgcacctacattgaacatgtaccttatattgatataggagcgtttattataaagaaattcttgcaattctttaagaatttttttgtgtattgttaggtgccaaaatacataaaacttaacccattctactgcatccgtgtggtaaggaaaaatggataatatcttctttaacaaaaataaatatatatacacacacgtc

SEQ ID NO: 43155 - DNA, 479 bp, Zea mays
  unsure (1)..(479): unsure at all n locations
ctactcctccctgtgaggtgccgttcatcatcgccaatatttgttgcctctaacatacaatctggccaacaatcaaggcgaggtctatagcaacgctnggaacatccgacagctacgtcgcttttacccttaagatgtttcaaggcgttcatatacctcgttttctatacatacgcaaataaagtctaaccgtcaaggaatggtcaaccttgcctcggcaaagcacgaccctccctcgtgggctagaatgggggaccccctctgcgtcaaaatgtttccttggaaaagttgtttaccaaaacggctgtcgtgcttttcgactatatcgataacagaatcctgcaaaaacgagtaatgagcgcacgttagcggcaatgccgaccgatccgatggacttctacgcactccggatatggatacctcactcgtcaccttctgtgaatataactcttactcggataacggtctgctctaaaaac

SEQ ID NO: 43156 - DNA, 444 bp, Zea mays
agtggaacctactgctaccatctaatgcttcttgtgctcaagaatgctggatgaagcttcagcatgatgactgccaaagtcctccattcccaaatcggcaataatgtgctgacatatgttgatgatatcatagtaaaaagcgcaaaacaagaaaatcacattgctgatttacaagaaacatttgctaacttcagaagagctagtctcaagctaaatccagaaaatgtattctcggagtaaagaagggaaaatttcttggttgtttggtatcaacaaaggggattgaagccaatccaagcaagatagaaggtatacttcggatggagccacctaagtcacgataaggtgcccagaggttaacacgaaggctggcatcattgaatatatttctgtcaagatcagcagagaggaacttgtcattcttcgaagtgctaaagttagctg

SEQ ID NO: 43157 - DNA, 425 bp, Zea mays
ctaatcctcgcgagaccatatctcatgttcttcctatcactgttctattcaatatcacatgtgagattctatgcataattacttcatctgctctcttgaatggagtactagagtgatccctatcttgaatggacggatgtacgtttgcttgcaatctcctatagaacgatccggctgaagaacccgaggaactcccatgagatacccctgatcatcaatcacttggtggatgcaagtgtccgttgacctatatctgtcctatacatactttaatgcacctaccgcattacacattgatactttaggattgactatcttttgtcatcatgttcttgtatacctatttgggtcggaataccattgactaaatctatgctattgcttaactctaatcatgaacatgatgagattatctatgatacgct

SEQ ID NO: 43158 - DNA, 506 bp, Zea mays
  unsure (1)..(506): unsure at all n locations
ctaagcttaatgcctctccaacctngcactatcataagtcttgtactattggtggtgggtctatgaaattanggtgccaccagttntccttgactagataggtttgtatcggatacgaactacaaaaagggttggttaacttatacaaagtcagcttaatggttaaggactttgaggcataaggttgggagccaagacatatagatgtcacccaacaacaggagtcatatatatgatatgattagcaaggagttgcttaccgatcgaccttgtcttctagcggtgatgctaaagctcactaatagacttgttagttgtgggttctgaatcactaagtatcaatcgagggatatctgatttagtgggagtagactattaaatgtctaatatgatttactctgtcatggatatttttgtcttagtattttgcattattttgttgtagataaatggcacctatcacaccaacatttactntgcgatcaattcttgaaaggataagttaa

SEQ ID NO: 43159 - DNA, 425 bp, Zea mays
  unsure (1)..(425): unsure at all n locations
tatcagctttgacagtgcctctatgcactcggcagataaactgacttttgtttccgctcgngacctctttgccgagtgcttatccggcggacactcggcaaagagggaatactattgccgagttcacctaatacgctcggttaatgctccgtcgtcgttaccatccgccgtgacggcaacatttctttgccgagtacctggtgacactcgtgcatagtctttaccgagtgctcgataaaaagtactcaacaaagaagccgttgtcgatgtacagtttgccgaactttctttgtcgagtgtaatactggcactcggcatagcagttgattccgatagtgataaaagaaaaacggttataggaaagacaaaaaaataaagacgaacatctatactagagaatattgatgcctcaaaactactgaagc

SEQ ID NO: 43160 - DNA, 468 bp, Zea mays
  unsure (1)..(468): unsure at all n locations
ctaagcttaatcacagttctgctgttcacaatccgcttaagaattgtttctatgagtctatgtgccaggtctgcaattttctttccatgtaaccacttgtctttccagaatttggtgctggccccgtcaccatctacagtgagcactacctcattaaataatgaagtggcctttcttgggatnttcattgggagaccaatccaaggcctataggggtctgttctagacagccatagccatctcattcgaagggcccagcagagttcttttaaactgaaatacccagcccaccaagctgaagggggcggcaaacctttttccaagccaccatgcagtgccccccatgtatcctttttcgacctctgcagaggaaacctttccttaatctgtcaatgacatctaaaccccattgtgggatatccactgccattgccatataaaccgtcatgctggaagaacatgctgact

SEQ ID NO: 43161 - DNA, 448 bp, Zea mays
  unsure (1)..(448): unsure at all n locations
accatgtttaatgcaatatcgcatgtcatattctatgcatgttgttagtgcaattaacccaaactgagggttattggtgattaatgacaaaacaaactaagattctaacatgtttgctcctagcatgtacacagaaattatacagacaggataagcacagatcttacgatcataaatgtataaagcacagcggacttaatattccacatcacatggcgtgctacaagtgcctatatacaacagcggtgctaaatntataattcttgagtcatatgaatcaccgtgcaattaagaaggatccgcgatcgttaagtaagttgtgcaatgagccaatctcaaaaacctttgaaaacatcttggagatcattgtgccatatcatgaatgcgcttgataaaacatattttacttcccaaaagaactcactttgttctcttcaaatactaaaat

SEQ ID NO: 43162 - DNA, 438 bp, Zea mays
catactaataccataaaggccaactctctatgttagcggagagatggcgagagtagcatgtaccctccgtggaaagaggctggatagtggtgtatctgtgctcttggttggcgcgaacccggtccggtcttaagaaacctggtggcgagttgacatatgcaagggttaagtgctacatatgtcgtgtgaatggagatccacaactgggttttaatcgattcggatcgccgtttcttttcagacatgaagacttggtcactgccctacacgtaacattccgatgaatgaaaatgggtgatataaggatggctattatatgccaagtgcttgaactatggtttaaagaactctactaatatgttatgtattaacattgctataaaactggattttaatgaccactattagtaacatttttgcaaaacatatccttgattc

SEQ ID NO: 43163 - DNA, 365 bp, Zea mays
ctggtgttgtcgatacacatccaaatcttcccttttgcctttgggacaatgactggattggctatccacactgggtgatgaacctcttcgatgaagccagcgtctagcatcttctggacctccttatggatgaagtcctaccgctcaacggactgtttccgatgcttctgactcaccggcttatcgtcagggtggatcttcaaatggtgctcgatcaccaccctgtggatcctaggcatctgcgacggctcccatgcggacatgtctgcattttcctggaggaaggcgatgagcgcgagttcctatttttcctccatatcacccgcaatgcgagtggtctagatggaatccgcaatgagccggat

SEQ ID NO: 43164 - DNA, 364 bp, Zea mays
tactccaagaagggataacgagcatgcagacctactggcaaagtcagcatcacacgggttccctctaccattggaaatattcttcgagacaataaaaacaccttcgggtgaacctatggagagagtagccctcacaatatcacatgtacatactgaagattgtaggactgaaacatatccttccttcaatgcaattgattttcgatgacaaagtttataataaaataatggaagcaaggacaagactgtggaggaaccgcccgaattattccaactgaagtgcctaagttccaccttatatgctataacacacctaaatatgaataaaacgccagtccctcggatcttatccgagaaagccact

SEQ ID NO: 43165 - DNA, 359 bp, Zea mays
ctatcataaccacctgtggttagccgatctccccttcgagatttggtgtgattgatgaacccttgagagatcctccttatatacaagtgcgggtaccaaaacctaaccatattatgaacacacttgacacctttatcggcatctgtaatgatccccttcctatagccccttatccatccgaaaagaaaatcctcttccacatacaatatccacccaataaaaaggtgatgtaccattgtgaatttgtgagagggatgggcatctaacttctttttgatttaaaggaagataattagcggcgggtttttaatcgatcatgaatgacatgaaacccccctctaatggtgtcatgctcagct

SEQ ID NO: 43166 - DNA, 327 bp, Zea mays
ttaaatgatataaatgatgatgatgatgttgatgatgttgatgatgatggctattcatatgatgatcttgttagaatgctatgtgaggccgatgactacatgcacatagaaaaagaaaaatttaagaccttaaaggaattgtataataacctccaagtgtcttttgaggagctcaagacctctcacaatgatctaaaagaatattgtgagaagcttgcggatgctcaaaaatcatctatcgtgcatgaagctgcggtggtcactgaagatgttggaacacttgtgattacttgatgtcttacaagtgaccactacctactaactctt

SEQ ID NO: 43167 - DNA, 393 bp, Zea mays
tcagcttcgctgctgatccattcaattgggcgctccgtgtcgtcccttatgaaactttcttcacttgagaacgccccaacgctggcgaatctggttcttattttcttaacacatttttagacttttacaacaccttttcttatatgcacgaagcttttgaacgtttttctctaaatgattggcccattgttcactaatttctcgtttaacttcttcaacatgtgcattgttctttaacttctactaactattttcgaagatcctcatattcccgcttctcgggctcagcttgagctttgaatcagcttcttcttcttttatttcatccacccacgaatgtaaattttatctttttcgagaccttcattccttaataatttaactaatgaacca

SEQ ID NO: 43168 - DNA, 424 bp, Zea mays
gttcttattaaggactatgaactggtaattcattatcacccacgctaagtccatgttgtggctgatgcactaagccacaaggtttcctgccattgtttatcgatgaagacctccgtaaacactttatgtcatgagatggagatacttaacctgggaatggtccatcaaggaactttgaatcagctaaagcttgagtcagtcctctctgcaaaggataattgatgcccaataagataatgagggtatgaaacacattcgtgataagttaatggctggaaaagccaaatgcttcaaagataatgaacaatgcattgtatggtttaataaccgcattgtggtgccaaagaatgataagctccgcctgcatattttcgatgaagcacatcttaaccgctactctattcatcccaaaagcacttatatg

SEQ ID NO: 43169 - DNA, 399 bp, Zea mays
  unsure (1)..(399): unsure at all n locations
gcttataaatggacgtataagtgccttcctcaatggaccaatctatgatgaggtctatgttgagcaacctcccggctntgaagatagtgagtaccctaaccatgtctattaactctctatagcgctttatgggctcaagcaagcctcaagagcatggtatgaatgtctaagagatttccttatcgctaatggcttcaaagtcggaaaggccgatcctactttatttactaaaactcttgaaaatggcttgttcgtatgccaaatttatgttgatgatattatatttgggtctactaacgagtctacatgtgaagaatttagtaggatcatgacacaaaagttcgagatgtctatgatgggggaagtgaaagacttcttgggattcaagtgatcaactcc

SEQ ID NO: 43170 - DNA, 331 bp, Zea mays
ccattctgatttctagcctgccggtcatttgcttctgtatctgattacaagtaactatgcggtttaccggtgggcaaaattgtatcaaccgaagtgttcatgaatcccatctttcttggcctctgtttgataatgcaaatcatgaactcgacagaaactgtctgcaaaaggctccactgcttggctttagatgtgccacatataatctctaatccctacgactgcgttatgagttaactggtgaatgaagatgcctaacctcttctatatcttcgcatcaatctcgtgaacagggaatattatcccaccactctaatagcttttgaatatg

SEQ ID NO: 43171 - DNA, 57 bp, Zea mays
atttctgtgcactatccaccattctcacctataccctacattcttgataattcgttc

SEQ ID NO: 43172 - DNA, 472 bp, Zea mays
  unsure (1)..(472): unsure at all n locations
atacttctggccatttcccggcagacggattattctttgttatctgggaggcaatacaagaagtcatcttcatctgtgccattaaacactaatgcccctttctggtacttcagttctcgggcatagtgtttagcttcaaaaatttcttcttcagataatccttttcccgaagcgtgtcaaataatataatcaaggacttcgaaagacgcttcgggagtatgagcggcagcttttttcatgcaaaatctgttctatagcttcttccttcgctgccttttctccaatttccgagggtttctccttggcgggctctaaaagcccagcttctgcgctagcctggctcattgtagcttcngcttcggtcagttttgtttcggtttcaatntgcactttcgaagccttggcaattttccctggagtagagcttgaagctttatcgtctcatccatctagacattggcatccttttctc

SEQ ID NO: 43173 - DNA, 442 bp, Zea mays
gtctcttggacaagtgctgctcttaccgctgaatgctaatctgtcacattaaacaacaaaagagcccctggcgttggtggagttagtgtcgttacgtctatcatatattgcttcaaatcttcaaaggctctctgccggactggtccccattgaaaaacttctgctgacttcaacacttcgaataatgggaaatttctctctgctgatctacatatgaatctgttgagagatgcaagactctctgtcaatatttgagcacccctctttgtacttggtggttccattccaaagaaagcttcgatcttaattggattatcctcaatcccttctgttgaaactatgcagccaaaatatatccattcttcactcctagacacaccttctatattcactttaaccactctgttaaaattacgaacgttcctgcaatatcatgtgattt

SEQ ID NO: 43174 - DNA, 417 bp, Zea mays
accttgattcccaaaatccagcatatcgctcgagtgtcttgttccttatacgtgtaagacttgcgaaagcacactccgtactcatggttttcgaacccatgttgttgcaagtaatacaattgtgctgctgatgatggtgctaagagctagtgggctaggccttcttatatggtaaaatagctcttctatactttttattgaggattgtcattgagctaacatatatttcaaaatcattaataatttataacattgcaaagtatatgtctttgaatcacttttgtaatcactccgataaatatattgcaaaattgttgtaacctgtaactttttgtaataaagaaattccgctgcaaatgttgctgtgtgatttgtgtttacttaaacttgtgatcctgtgtgtaagtggtttatctg

SEQ ID NO: 43175 - DNA, 434 bp, Zea mays
tgtgagccatacaagttcataatggataaagctgcttctgctgatcattcgaaacccatgctcttgtgtgaggatatatcaaaacagaacgtgctcttgtgatctcaaatgtgctacaatcacgagaaaaccttgttaaggttcttgttcaacaacaaaaatgattttgcttggtcatcctatgatctttgcggagtcaacaaggatgttattgaacactcgctcaatgttgattcatccttcatacccataaagcatatgcttcggaagatgtctgatgacaaagcccaaagtgctctgaatgaaatgaaaagactcctcactgccgagttatagagaggtaaatacccaaatggtggctacaccgttctgtaagaagcgcaggaaaaggaaaagttattatttactgatctcataaggctgtccaagacaat

SEQ ID NO: 43176 - DNA, 301 bp, Zea mays
atgtgcacaccttcgtgaggcacgccgagctggtatcagatttcccttcgccggagaagacaggccacgctcggcggatctctcacccacgccggagtacgtggaccatgtaaaccaatccaccacccttcgattccttgcgcacacagtcgctgcgtgaccccgtgatgctcaccgcgccctcagaatgaaccaattcgacgtggtttggccgtgatactcgccgtcgacgatgacacccgcctgcacacgtggaccgggcgattcctgccacctccgactccgatccgtacctagacgt

SEQ ID NO: 43177 - DNA, 392 bp, Zea mays
ttatctcaaaagggggattttatgctctcttgatagatattatctgtattttatcttcgctaatggaaaacagtcatcccatttctgtgggaattccagtacacatgctcgcaacatatttttaagtatttgattaccctctcagtatgtccactagcttgatgatgatatgctgtactaatgatcaacttttaccaaagatttgtgaatatcttccataattctgatacaaattgtggtccacgattcgacactattgtatttagaacaccgtgcaaactgatgtgagcaatatacatcttggcataagtgatgatcgggtaatatgtcttgactggctgaaaatgaacattctctgtaagccgatcaattataacccatatagaatcata

SEQ ID NO: 43178 - DNA, 385 bp, Zea mays
tcttctcgagccgactccgcctctgtacacgctgacaccgttgtcacctgctctagctcatcgcagagcggccgatggtttctttaactgagcaagagaagcctggagtggcaaggccgactgagacgagggactcctacgcctccgggatacggatacctcactcgtcaccttccgcacagggcaactcacactcggttaatcggttcagctagccgacaggcgagtcctggtgctcgaaataaggaagaaacacggtattgcactcaaatacctatatgttcaggccccgacagccacaatgaacagacaacggcactcaaggtgccattacaaacggaactccggttccactcccgcgggtatgaacaacctccacatcggg

SEQ ID NO: 43179 - DNA, 386 bp, Zea mays
  unsure (1)..(386): unsure at all n locations
tctatagggagaacacattntatgattaacaaatgttcattttgagtatgacagggattgtagcgcatgtcaagccgggaagcaagttggaacccaacatccacacaagaacatcatgacaactgacaggccacttgagctactccacatggatctattctgcccgattgcttacataagcatcggcgggagtaagtattgtcttgtaatagtggatgattattctcgcttcacttgggtattctttttacaggaaaaatctcaaacccaagagaccttaaagggattcttgagacgggctcaaaatgagttcggcttaaggatcaagaatataagaagcgacaacgggacggagttcaagatctctcaaattgaaagctttcttg

SEQ ID NO: 43180 - DNA, 414 bp, Zea mays
taagcttccccgctgtccagctcgaggacaatctgactttcgaggcctggtgatatgtcatgtacgggaagccgtacacaatgcgcatgcgcgctcgcgacatccggcgggcagcatatcgcgccaacagtgcagcagcgccgcatatggcaggcactcaattttatgaaagcagcttccacctatggcaagggataaatatgaaaggatcaatttggctcttatggcacggaatatgttgaaagtagcaattatcacttatggcaggaataaatatgaaagtagtattttggagggaagtaattatggacttgctcatttgtgtggcgcggcctattatcccattgcgcacacttgtgggggataaatatcaagtatctccacttctcttcagcctgggtttgagaaactctc

SEQ ID NO: 43181 - DNA, 474 bp, Zea mays
  unsure (1)..(474): unsure at all n locations
tactaagctgtgaaatgcacaagatcttgaagatgagaaacatgatgttataattgagggtttagaaagcaaattataagatcatgaagctgctctggaaaagaaggactttgagcttctgacaacagaatgtttattggcagaagctgaagctaaaattgcaaagttaaatacggagcttctctcgcagtcagaaagctttgaatatgagaagcagaagtttaatgccaaatttaagactgaggtcgagaaaagttcgaatctgcaaaaatcattgacagagcttcaaaacaaatgtctggagttcagtaaccgatgtgtacaacggttgaagcagatcttcaattcggttggagccaactgtgaaaaatntagtccttcgactgaagacttgccaggggccctcgaacatatcgagggtgaaatngatgaccttgatgatattatatccggacattgtgatttctgtgccct

SEQ ID NO: 43182 - DNA, 409 bp, Zea mays
tgtgccatcttaagtcagaacatgttatgcagcatggcttgacttcaggtgtacaaataatattgctgaatacgaatcactcttgttggggcctccgaagttaaatgcaatggggataagaatggccatccctaaaacttgactctaagtcatttgtggtcatgtagactaaaatatgtaggcaagagatccgatgcttgaaaatatctggatacagttccaaggttttccgtcaagaatattccaagaggataaaacgagcatgcagatctgtttgccaaatcagcggcacaagggctacctctaccttcggaagattgtttgagacatacaagcacctcggatgacttatggaaaatagtgctgcatttccctgacattttgagattgagactgaattatatcttct

SEQ ID NO: 43183 - DNA, 479 bp, Zea mays
tcttcttcattctgatgataaccaagccctttgatcatcttttcatatctaatggtccaactccgagatgcttgcttcaacccataaatggatttccgaagtttgcatatctttccagcattgatcggatcgacaaaaccctcgggctgtttcatatacacgttctcatctaagtttccattaaggaaagctgttttgacatccatctgccaaatctcataatcgatatatgcggcaatagctagaatgatccgaatagatataagcatcgctactggcgaaaatgtctcgtcatagtcaactccttgaacttgtcgaataccctttgcaacaagtcgagccttatatatgtgaaccattccattcatgtctgtcttcttcttatagaaccatgtgcattctatatgtctaacaccatcatggcgggtcaacaagtttcaaacttgatttttctccatggaatctatctcggatctcat

SEQ ID NO: 43184 - DNA, 395 bp, Zea mays
tatattgaagaatacttccagccatccgtgcgtacgaatggacttcactactgctttcataaaacgccttcaagatgttcatagcatccgacttcctactccttccaactaaatcagtaatgctctgaccaaaaaaagatctaaagctagggtactggtataacactgtgggttggatattgaatgaagcatgacaagcgggatcatgggatgtgcccatcacatcatcagatgtcctaatatgggctgctgctgctactgggttatgtgtcgctgttggattacagactgatactggtgcaagtgctggtactggagcatgtaatattggtatatcaccaatggagacgccgttacacgtgtttatgatacctctcaactcgaaggaaaaaaca

SEQ ID NO: 43185 - DNA, 322 bp, Zea mays
tcttttatgcagcgcaggtggtgaaatttgcacttattacaaagagaaacgattggtcctgtggctctttcttggatcaagttatgcaagcacgcggcatcatattcacgctttaaagttgttattattgatggatcatggcaggatatataccctgatctcccaaacaattgagaaaggacgtctcggcacacagtttttgtcgtcagtaggaactaataaaagttcagtgaaactgtaacttttcccattattatctattgtctgtacgaaaaatgtactagcatagtagatttcattgtacttgagtcactgtgtttgc

SEQ ID NO: 43186 - DNA, 364 bp, Zea mays
  unsure (1)..(364): unsure at all n locations
tcacatctctggactnactcagcagcatcactcttcgttggtggtccattgataccacatcagaaagccctcccgactagagttctggatgttgcatgtactccgaactgcccagcatggatttcatctaacatgtgcttcccaatagccgagtgaatgcatttcatgatgactcatgtctcacctcttctgacaatatgcccactatgagggtgtagtgggctgactgtctggcgatgcgttccgctgccgccttgtcatccggctcttcttcatgttttatgtacctaatgataagctctctccagtcattgatgtatgactctggttggctcaaggtgttgcactcttccatctgatctga

SEQ ID NO: 43187 - DNA, 339 bp, Zea mays
ctgatacaaaatcaatgagcatggaagatgaacgatatctatctgcagaaatgctcacacgacaatgatgagcatctgcgttcattctctagtagcacgtaacagggaataaccgttcacatcaaaatacaccacttcataacatatattggaattgaacgggacatatgtctccaacattaagcccttactgtcaaaggaaaagatcatttatgtcttttacaaaaatcttacttattaagttttaaccatctaggacaaatatatttgtcattaatcaacaggatagttcattacttcgacagactgttataaatgattaccaatggatccatgatc

SEQ ID NO: 43188 - DNA, 374 bp, Zea mays
  unsure (1)..(374): unsure at all n locations
cgatatcttcngcgctgctatggagaaggctgctgcttgtgtacatttcctcaagaacttacgctatgatacatacccccaacactcatcatctcccttatcttgatcattaacatctccccctcgatcattgaactcctctcgaggtggctgctcttgatctttattttcaccatcttgagctcgatcctcatcctgggttcgtggacatactcgatttgaagatgatggttgatcttgtgcatgtggtggctcttcggattccttatgacacacatccccaatggacatgttccttaacgcgatgcacggagccccttcatcatctagctcatcaagatcaacttgctctacttgagaaccgctattctcat

SEQ ID NO: 43189 - DNA, 439 bp, Zea mays
  unsure (1)..(439): unsure at all n locations
acacttaattactaagcttatcancaatttcttttactttccacgacgctgcggtcactgtctcttcggcggcagaggtaacttcttctgcagccatgtctagcagtatctgggcaatatgttcaattgtgctctccaaattcaaatcttcaactgaagcaacttccgcaactgcggccttcgaaagtgcaatttcaatatctgccccctctgcatccgctttgtgtttttgggccgaagctcttggcggcgtcttgtcaattacctctgtcacagtgataattctttgattctttgccttgattgttttcttcgatttctcgggctccttgttcttcttgaaaaactctgtcagttgatgacccagtggacttatcttcgcatgtaaagattccatcattaccttcaaaattcctcacaacagcagcagaagtgatgc

SEQ ID NO: 43190 - DNA, 251 bp, Zea mays
ttggggatcatgcaataataatttactgtctattctgtggtgaagacaagggccataccaccatgatgtgtcacgtttccatccagaaacaaaaggagatatcagaagctgcatcacaacatatttagccgaagctaagtatgcacacttgcttgtccattctccttacattccataatatgtaggcaattactctgcagcttctgttgcttctgcaaataaccccgagcattttttgaacatgcttcacc

SEQ ID NO: 43191 - DNA, 490 bp, Zea mays
tactaagcttgtggggacccgatcatcatagcatataagtttctggatgataagtggtcacccaagttttgttgataaagcaccagaagaccaatcaaggaaggaatccatgtgggagttcgcaagagaaaagtttgcgtgttggcatcaatgcttcttcaataagctagctgccaagcgaaagctgaagcctgtagatgatctttgagtagccagaatcagcgctggcaatcggcaaccatatgctccgcataggccagatttagttgaagttccatctcctcgaagagttgcaaagtgaagatatgtagctgaagtaaagctatacccataacccttctaagccgaatctcgaggacgagattccttttaagtggggtagatttgtagcatcccaaaaattcaaatcctgatatgttctcacactcaccctaaattcaaaatgaatttcaagtttcatttcataatgtgtggttgcgaagtgatatca

SEQ ID NO: 43192 - DNA, 428 bp, Zea mays
attaccgacacttatatactcagcttaaggtgagaagaagaagaatgaactcgttcggctgccctatcattttaagttcaagaaacacttcacagaaccctgccaagaatggttagacacaattgaagttatgtgcaatgaaatcctgtgcaactatacgaaaaaagatcaattgatgactgcagccttgggcacccgaccgaagcgaaggttgaatctggtgatggatgccctaaattttgaatatcctgactatgagcgattgaacaatggtgccgaatggcaaataagaaaaagaattgttatcgttgtgggcggacaagctgctataatggttaaagaagatgaagaaactctgaagaagaagacattgagccctgatacgaatgcaattgctccgaataaaatgaaagctactgctctgaaac

SEQ ID NO: 43193 - DNA, 384 bp, Zea mays
gacactttaatactctagctcatctcgtcgtgctgcgcgcatgtccgattatggttgtatctctttcactgccgacctgcgatggccggggggcaacatcatttggtcagaagtgccacatctggatatgcatctggggtggaagaccgagtatctcgagattcccctctaagatagcattaaatgttggcgtctggagtggtctataagtgattattatggaaattcttctccctcccggcatgaatacagtcaaaacttcgttctccgagttggactgagtctcccacggatcaataagtggccgttgcaagcgtgttgcttactgaagtccaattactgaaagagagaggtctgactgtcgatattgtgtcacagattttg

SEQ ID NO: 43194 - DNA, 327 bp, Zea mays
accatatgcaacgaaatacagaaatactatttctgcatattacaacaacctggagcttagtggagcttgctcctagtcacctatcgcactaattttacatcttgccagcatcgcttttccaacctcccaaggcaacatgtaatgtatgaaaattgacgcaaaatattggctgctgcttacaccatgcatctgggatgctgtcatctaactcaaaacatgatgtaatctctctctattatgcatgatcccaaccccaataacatccttatattgaggaggaaacaaagagtgatctttcaggccatagataacctgcggtaacatgca

SEQ ID NO: 43195 - DNA, 478 bp, Zea mays
tctcaagcatgccttcaccctcgccctgacagctgttcatcgtggacgtgtccgtttgttctataatccattccgaggttcgatgatggcctatctcaaccctctgccgtaccacttctaccttctgccactccttccacctctctgtgagaccatcgcctttaaacatcctcacaaccttcgacatcttatgacgttccatggggctgctctgagtgcacatgatcgccacctggatcacagatgtccctcgacatcgattgtagtgtggtctaaatcttcgttgaccagactctccattttcttctgcttgagcaaccccttgacctaatgttaagcactgtacatggtattatattgctagccaaatcatgtcatatcaatagaatgcactgtaatatagtcctacacgcttaagctatattcttacaaatatatgatgacgttcagagacacgagcatgtcactctacttggtt

SEQ ID NO: 43196 - DNA, 136 bp, Zea mays
tgaagcatgggcgctgccagtccggcctggtattgctttgccggcccttgcgaccatttagcgacctcttgaaacggttgatgatgtgatccatctctctatcattaagtacggaccggtcatgtgatgccacctt

SEQ ID NO: 43197 - DNA, 447 bp, Zea mays
acctctccgccttcagattcgtatggctctcatttttacccgcctcgaccaataactgcaaatcaacatcagctgttattgaatagtacaatatctatctgagacgggaatgtgaaatcgtcgggcgaagagttgatacaatactgttaacatgaaactgatttatcacataccttctctagttccgccgtcctctgtatgtcggcctccacaggcccgagcaacgacaacgggttatgtattccgtactgctttgggggatcagagccgctggccatggaaccaactgctagagaacacaatatcctctcccaacacgatgacgccctgaatgaacagatagcgtaattatcaccgatcggccgccggataccccgatatatccgggtactttatgccacgccggcacaaaaacatctacttttacacggagatataacgcgacac

SEQ ID NO: 43198 - DNA, 396 bp, Zea mays
  unsure (1)..(396): unsure at all n locations
ggtgttgataaaccctacaaaaggggtatgtgggcaaataccgaatatgccctaagggcaatcacgtctctatatatagaacctgtaccccctcatatggaacagagaagagaaagagaccatatgtccaaccctatatcctgtgtctcgggtgtatactctgtcgtgcttatggaaacggagacggttactctacagcttcttgcgtctctactgctgacgggagggaagggagcggatctggtgatcacgggtaacgtatttctcaatacgttatcaacacgctctacctcgacgttgctaccgaatcagatctgcatcaactcttcgtcaagccggcaagtctcttggacttgtccaactgtcctacacgacatgctntgttcacgttatcga

SEQ ID NO: 43199 - DNA, 422 bp, Zea mays
  unsure (1)..(422): unsure at all n locations
taatgcccctaagaaatngcccaatttgttaaggttacgttcacatggcttaagataatgaaggctatattttatatcatgctggttatcccgagcaaaagattatgagaattcatgctatgaaacctcataatgtttcacatcatacttttatgtataaaaatgaggcttctatctctaggcaatcaacccatgttaaattgcctataaagaaaactcctactgcatcaaatgaacctaatgtttcatttaagacttttgatgcatcttatgtgcttactaacaaatcacgcaaagtagttgccatatatgttggtggcaaacacaatggctccaagacttgtgtttgggtacccaatgtgctcgtttctaatgtcaaaagacccaagaccgtttgtgtacctaataataacgcctaaatt

SEQ ID NO: 43200 - DNA, 471 bp, Zea mays
  unsure (1)..(471): unsure at all n locations
tgagtcaatcattntgcanaggataattgatgctcaaaaagattatctgggtatgaagcacatttgaaagaagataaaggctggagtagccaagtgtttcaaggaatacgatcaaggtgtgatatggtttaaaaaccgcatagtagtgccaaagaacgaatagctccgccagcaaattcttgatgaagcacatcttattcgttattctattcatcccggaagcactaagatgtatcaagtcttatagcaacattactggtggacaaagatgaagattgaaattgcacgctatgtggctaaatgtgacacttgcagacgtgtcaaggccatacacatgattactgctggtccattacaatctttgccaatcccaacatggaaatgggaagacatcagtatggactttattgtgggactgcccatgacgggccaaaggtatgattctatttgtgttatcgatgatcgactcac

SEQ ID NO: 43201 - DNA, 423 bp, Zea mays
acttctccgagggcaagacggggttggggatggctctgctggtctgtctacagaggcatatgggttgtgcggtcgcgggctctctactcacgggcaaacggcgactatcaaactccggtgaggtgtggagggtgtgcggaaaggtgtagccgaatcctgggagggatttataagctcgggcgcgggccacggcgctggtttggctcgggcgcagcgtgaggcatgcgatggcgcgcgcgaacgtgctctggcgcgggcagaaagcgtcgaacacgtggcagtgagtttcttccaatgttcaaacgcttccagagatcgcaaacgtgcgaatctcgccatgaatccggcgcagacctcctcctggcacctaaggctatcttacatgtgtgagttcaatggatgatacgccctaaatagggagat

SEQ ID NO: 43202 - DNA, 403 bp, Zea mays
  unsure (1)..(403): unsure at all n locations
ctgttccagtgcacacaggatcaggatgtatacctccaatcttatgtccaaaggtttctgcggttgagagctcangcgcctacaatgccttatgagattgtcattggggccatgatcaaagggctcatactatgaccaatggcacaatactttgcaagaaagccaccacaaaccttggagaagcttctccataaaatggatgattacatcatagccgacattgactttcggcacagaaaggaagaagcctacagatactctaagatgaccagtggcttcggaggaagattccaccctatgcatgtcaagtcaatccatattgccacctcacgtgacgataggggatacaatacccaaaggcatcagcatatctcctagtcgtcatgagcacaacaatgctctt

SEQ ID NO: 43203 - DNA, 392 bp, Zea mays
catgtgctaagcggcgatgcctcagtcagcccatgctattcttagctattaagcatgcatgtagaccggcctcttcttttgcaaaatcaactaaataaagtctgccgtctaatacaccctgtaaagctaatgaaccatcgcttcttctaaagacagacacatctatatttgtaaatagacaattatatcccatatgacataattgactcacagatagcagattgtatccaagactctctactaaaaatacattagagatagaatgctcattagaaatcgcaattgtacctaaaccttttaccttgccttgattcccatcaccgaatacaattgaatcttgggaatctctattcttgacgtacgatgtgaacatcttcttctcccccgtcata

SEQ ID NO: 43204 - DNA, 349 bp, Zea mays
ggagaacactgatacgacatctaatgtgcaattctaatttgattgaccttgtgcatcttgttaagcacgcaaacatgtgggatactctcatccaccaatatggatacccatcagaccttggagatgcgttacatgagacccttgtcgacccgtcgcccatcttagtatttgcaggaagtaagatatgggcttgttataatttgatgaatattctcccgcttcacttgggtattctttttgcaggataaaactgatacccaaaggaccctcatgcgcttcctaaagagagctcaaaacgaattcgaacttaaggtgaataatataatgagcgacaatgtgttcgagttca

SEQ ID NO: 43205 - DNA, 410 bp, Zea mays
  unsure (1)..(410): unsure at all n locations
tcccatgttagnctaagcaattaagcatgagtcgagttcagctctatcaaaatctactaaatatatctgaccctctaacacacccttaaatgctattgaatcatcacttcttcttatgacaaagacatctacatcagtaaatagacagttgttgcccacttgacataatttgaaaaccgaaagcaaattgatatctagagaatctacataaataacattggaaatggagtggtcaggagaaatagctattttacccaaactcttgaccaaaccttgatttccatccccgaatgtgatagctcgttggggatacttggtttctcataagaagagaacatcactttctcccctgtcatatggtttgtgcacccgctgtcgagtatccaacattgtgccccagatgcttaacc

SEQ ID NO: 43206 - DNA, 409 bp, Zea mays
  unsure (1)..(409): unsure at all n locations
tctgcgaccanatgacccagctcttcgagttctacaaggcttattattctgatcatctgtgtggtgaaagcaagtgtcctctgacctattatgccccattcactttataattcatcaacccgcataccatgatcaacctaatgattgactaactctgtatttaccttgtgcttgattacctcttgggctattatggttaacttcatgctattgctttactttattcaatgaacatgatgtgaacacttatgatatgatgttgtctctatgattatgatgttggactggtgatactttaaggggctcgagcggcttctcgaatgcctcttctaatgacctgtttgttggatgaccacccaggataacagtgcaaccatgatggtggaatgggatgcccttatctgaataa

SEQ ID NO: 43207 - DNA, 373 bp, Zea mays
  unsure (1)..(373): unsure at all n locations
atgtggcccatactctctaagagagagttttcttgtaggcccttgggcntaaaatggagacacaaacatcatgtggatgaatatggcgacatgcatccataatatagcttcataagagtttgggttgagacaaggaaatagaaaggaagttattgacacttggtggtggaacgaagatgtccataaggctatcaacgagaagaaagattgctacaaatgcttacattatgactagtgtgcagaaaacatatagaagtacaggatatcgaagaagtctgcaaagcgagcgattagtagatccccgggtcaagccaatgaccacctttatcaacggtcggacacaaagcatggagataaggatatctataggatg

SEQ ID NO: 43208 - DNA, 439 bp, Zea mays
ctatgaaactaagcttataacccctagcggtacctactgctaccttcggatgccctatgggctcaagaatgccggtggaagcttcagtatgatgactgctaaagtcctttgctcttagattggcaggaatgttctaacatatgttgatgatatcatagtgaaaagtatcaagcaagaaaatcacatctctgatctacaagaaacatttgccaattttaaataggtcggcctcaagctcaacccagagaaatgtgtcttcggagtgaagaaagggaaatttcttgggtgtcttgtgtcaacaaaaggaattgaagccaacccaaacaagatagaatctatacttcagatggagccaccgaagtcaagaataggtgcccaaagattgacaggaatggtggcctcattaaacaaaattatttcaagatcagcagataggaac

SEQ ID NO: 43209 - DNA, 281 bp, Zea mays
ttcaattatcatatctgcatcaaaaaaaatacaagtgaatataacactttgtatacattaacatccctttgaaatgtgaataaagaatcaacctttacttggctgatatttctacttacaagcattaattatgaacccgctcctccatatacttcagatgctttgaaccacttgcttactcatttcttaattgacgccattccaacctgacttttgattggttgcccaacaataaagaactcaacaatgatcttgaatatgccatttctgatgcacaacca

SEQ ID NO: 43210 - DNA, 326 bp, Zea mays
tcacacatcccacatcgtaagttgcaccaaggctctgattactatctcgtctaagagatagactactgacttctgttagttttctacctctggcatttctaatgctccgcgcgcataacgacatttcccttcagcgggaatgacctctttcaatatgaacgcgcgtaagacctcaatgatgccatacaatgcaccttccgtcgagttcttccgatttcacttatgaaattgctcgaaacgatgtttataaacatcatctatcgacattgccacgccgtcgattctattactccgtgatggattacgcacaaatttgatttgaatac

SEQ ID NO: 43211 - DNA, 443 bp, Zea mays
tcttttccatttcttgacacaaagtgttctcggaggtcttcgccataagacagtggcaggaagtcttacgacttattgcatctgccaccacattggctttccctgggtgataatggatctccaggtcataatctttgatgagctcaagccatcgtctctgcctcatatataactctgactgggtgaagatatacttcaaacttttatgatctgtatatatgtgacagatatttcccagcagatagtgacgccaaatctttatggcatgaaccacagcagctagctccagatcatgagttggataatgctcctcatgtcggcgcaactgccttgaagcatacgcaattactacgtcctcttgcatcagtacacatgcgagcccactgccagatgcatcacaatatacgtcatagggtgtagtgatgtccgggtgagccaatact

SEQ ID NO: 43212 - DNA, 421 bp, Zea mays
  unsure (1)..(421): unsure at all n locations
tcgaaaatcactaatcctacatgagaatttctgtagtgtctatacaaactgatatntgattgatcgtgtggctttcatgtggtacaatatgttctgctattgcattaaaaataaaaaacatataaccagtatgcgggttgcttgtgagtagtgacaaatcatgtcagcataaaccgtaacaaactaaaccaaggttctaaatagcaggctaagatatttagtggcctcctccataagccaaaaaaaagcttcatcatgatatatgtgaagctattntatttagcgttntaaaaaatggaaaggaagtttaacgaactcatgaacacatgtcaaaagctcaaggtgacatgtcaccatggacattaattcataaccattcaatcaaccagctataactcacttctataatcaacattcatta

SEQ ID NO: 43213 - DNA, 479 bp, Zea mays
  unsure (1)..(479): unsure at all n locations
tacggacactttaatctcagcttcaaagggtgccatcttgatactttcttgatagctattattgtatgaaaattccgctaagggcaaacatttatcccatttctatgagaagtccagaacacatgcccgcagcatatcttctagtatttgattgattctttcagtccgtccactggtttgaggatgataggccaaaatgtggagcaatttggtacccaaggatttatgaagttcttcccagaatttggatacgaattgcgatccacgatccggcactatgtgtttcggaacaccgtgcagactaagaatacgagcaatgtacaattgggcatagacagtaactgggtaatcggtcttgactggcaganaatgagaaattttcgtaggccgatcaacaataacccagatagagtcatacccttttgtagtcctgggtaatcccatgatatagtccatacaatatcttcccatttccacgt

SEQ ID NO: 43214 - DNA, 411 bp, Zea mays
  unsure (1)..(411): unsure at all n locations
agcttttcctgtactaagcattgtgtcanatactactgtatgagcaaccnctcatcagggggctctagtacgcgatcgagccctcagcctcgacttcgactcttagtaaaaacaagcaagcacaagtcaacgacaaagtacaaggccatgctgtctatgtgacacgaagacaccctccacggcaggaaggcagtccccatctacaaggtcgcactccccttaggcatataaatagggtagtctatggcttctcaaggggggaaggcgaatacttcacaagttttctcctccattcgacattggcacttgcctcaatcactcacagggacttatggtcctcccctctcccgctcaacatgtaatccctactgcaagcacttatgtgcgagtaacataagcctcatccccctc

SEQ ID NO: 43215 - DNA, 477 bp, Zea mays
  unsure (1)..(477): unsure at all n locations
agcttggctggggcactatagtacatgacgttcactatgtcttacatcacctacatggtttagaggtttgtctccacatgcatgaaccacgagaacctcacctcactatcgtgaagcgtattctttgctaccatcatgacattactgatcttgggttgtttatcggctgctcttcagctatgaccctcaccatctacactaacagtgactatgtcgtttgcaccgacatccagatgtccatgttaggatatacgatgtccttcgatgacaacctcatctcctggtccaacaagcgttagcatacggtcttccactctagtgcctgggctaagtactgcaccattgcanacgacattgctgaggccgcctgactctaacaactcttgcatgaacttcaccaacacctatagtgtaccaccctcgtctactatgacaacatcaatgcagtntatctctcgactaagtcggtgtaacact

SEQ ID NO: 43216 - DNA, 252 bp, Zea mays
atgtccttgactttgctgggatctaccgcaatccctctggcagatagaacatgtcccagaaattgaatttcctccagccaaaacgcgcatttgctgaactgggcatacaactgatgttccctcaggcgcgttaacacgatctgtaaatgttgagcatgctcctcttcattcttagaatatattagaatatcgtcaatgaagaccaccacaaacttgtctagctcggacatgaacaccgagttcgtcaaatat

SEQ ID NO: 43217 - DNA, 374 bp, Zea mays
  unsure (1)..(374): unsure at all n locations
gcggtgctagagccaacccatgttagtcttagcaattaagcacgtgtcgagttcagctctatcaaaatctaccacgtatagctgaccctctaacactctcttaaatgctattgaatcatcacttcttctaaagacagtgacacctacattagtgaaaagacagttgtaacccattttgcataattgagatatagaaagcanattgtaatctaatgaatctacaagaaaaacattggaaatagaatggtcaggtgatatagctantttacccaagcctttgaccaaaccttgatttccatccccgaatgtgatagctcgttggggatcttggtttttctcataggaggagaacatcttcttcttccctgtcatat

SEQ ID NO: 43218 - DNA, 330 bp, Zea mays
  unsure (1)..(330): unsure at all n locations
ttaggatagtgaaggctatantttatatcccgctaactatcctgagcacaaaattaggagaattcatggtagaaaacatcacactatttctcatcatgcatttatgtataaaaatgaggcttctagctccagacaatcaactcatgttaaattgcctaaaaagaatactcatgccacatcaaatgaacataacatttcatttaacacttttgatgcatcatatgtgcttactaacaaatcaggcaaaatagttgccaaatatgttgggggcaaacacaagagtccaaagacttgtgtgtgggtacccaaggtgcgttgttctaacatcaa

SEQ ID NO: 43219 - DNA, 387 bp, Zea mays
  unsure (1)..(387): unsure at all n locations
tgcggcatcaagctctcctatccgaaaatcacatgttttctttcatctatttataataagtgtagatgaacttatgcacctgtgaaatgatcaactacgcaaactggttagtccacaaggtttgtgatggtcgtcaaacaccaaaatcgattataggaaatgttgagactatttccctttcaatctccctctctttggtgattgatgccaacacaaactaaagtaaatataaagtgtagaaatgtaactagtttacattgtgacagatgtgcataagatattttgaaatgaaagcatttctaagtatataagcatgattcgatatttaacattatggaccacatctgcaccactctgtttgttnnttgcaatagtcaaatatatatg

SEQ ID NO: 43220 - DNA, 327 bp, Zea mays
ggatccttgagtcacctgcggcatgcaagcttattatctacctgtagcattattttttgttttcagctctctgcatggtcgaatgctgtgaaacctactcgaatgtgtgtacagcttgactacctcacattgtgataccacatacggtgcactgcatatggtggctacaaccaacaaacattcccagggagttggcatatataattcgtcttatgagttaggtcagatgtaactgcctctcacaagtctatgtaatctgattgctgactaccgtggtaccaagaaaggcatcaaatctttccttctgggtctacactggaagcaaag

SEQ ID NO: 43221 - DNA, 250 bp, Zea mays
ttctgatgagcctgtgccctcttcctaatataaataaatttctgaaccttatcctcaggcctctttcaccatatcaggcctaaaaaagcacctttcaccaggttcagaccaaattagcggagtacgacatcgacgcccatataaagcttcaaagggcgccatcttgatactttcttgatagctattattatatgaaaactcccgccaaggcacacattcatcctatttctgtgcgaagaccagaacacat

SEQ ID NO: 43222 - DNA, 400 bp, Zea mays
  unsure (1)..(400): unsure at all n locations
tgggtagaggcgccaggggctntggaggaagaattggggatcagcccacaataatttattgcttattctgtggtgaggacaagggccatactacaaggatgtgccatgtcaccattcagaaacagaaggagatagcagaagttgcagctcagcagaatcagccgaagcaggtcatgcatactgcttcatatcactcaccctacataccagagtatgtgggtaaccatcctgcagcgtatgttgcttcggctagtcagccacaagcatcctggccatagcttccacctccgccaccactacaacctgcatattcacgcggccaacagccagaagggagtcagcagactcatctgcagagagacttcagggangagtccgaagctcgcatagtcaacagtac

SEQ ID NO: 43223 - DNA, 423 bp, Zea mays
  unsure (1)..(423): unsure at all n locations
cacaaccagtccatgctagtcttagcaatatagcctgcatctagaccggcttctctttgcaaaatcaactaaataaagattgccgtctaatacacccttaaaagctaatgaaccatcacttcttctaaagacagacacatctatatttggtaatagacaattatatcccatattacataattgactaacagatagtaaattatatcccagagactcaactaacaacacattagagatagagttctcattagatattgcaatcttgcctaaacctttcaccttgccttgtgttccatcaccgaatatgattgaatcttgggaatccttattcttgacatacgaggtgaacatctctctctnccncgtcatatgtgttgtgcattcgctggcgataatccagctcgaacccccggatgcataaac

SEQ ID NO: 43224 - DNA, 327 bp, Zea mays
  unsure (1)..(327): unsure at all n locations
cttctcctccgtacgcttgaatgcgacaggttgcacctcccggtgtagatgtggcgccttgctcaaatatttgcttggagcctttgatcatgaggtcaaagctcacaaacttctatataacttccttgcgagacattagcttatatctaggatcaccaccaattaattgcactngagtacgattacaaaaaaccagtgatctaagaataaccttgaccatctcatggtcatcccatctagtgctactgaggttgcgcacttggttcaccaacgtcttgagcccggtgtacatggcttgtggctccttctctcggtgaagcatgaatc

SEQ ID NO: 43225 - DNA, 441 bp, Zea mays
  unsure (1)..(441): unsure at all n locations
atctctnggccatccacttgcattctcaggccattcacgccatccactatagctatcatgtccaaaaccaccagtatcatggcatccccaccctgtctccgcctcctctgtctctacctcatcaacatctcccacctgtctaccctcctctgtctctacctcatcatcaacatgtcccacctgtctcccctcctctgtctctacctcatcatcaacatttcccacctgtctctcctcctctgtctctaccgcatcttcagactcatactacaaacattacattgcattgcaaaacaaatattatattaataatttagctatacgaactcatacgaatattacattgcaaaacaaatattggttacctcattcctctgaccccaactgtctgaccctgaactctggacatgttcaacaagctctcgcctactcagctggact

SEQ ID NO: 43226 - DNA, 456 bp, Zea mays
  unsure (1)..(456): unsure at all n locations
ctgaggcatgcaagctntcatccccacactggaagtagggccttgtatatttttaataaggataaatcacttgtgtccgctcacatcaccatctggatctggggcacacggcataatttcactagttggttaggacaatgagtccaaacaccaacaagaatgcattggtttatataatggagggagtacgatgcatgcaataatagaaagacgaggacgctatcaccaggctggttaagtcatggtccatatgcatccacatatatttagcaccagtagaaaatagctcaaagcatgcgatagagtttaatttttacaggcggatttagttatcaaatgcagtgttagttgtagtggcagtttcttgtgaaaaccaccactagaaatcatatttctacagatggtttctgaatnnttttgtttttaaatgacctcatatgaagaaaccaccaacat

SEQ ID NO: 43227 - DNA, 153 bp, Zea mays
gagaccacagggagtaaacaaatcaaaacccagccgcaaagcaacaatgccacctaaaataccacgcaattaacagaaaaagaggcaccgcacaggatgggaaacgatgtgggaaaaaaatcaaacctgtgcacaaacgggccgaagaggcgc

SEQ ID NO: 43228 - DNA, 446 bp, Zea mays
  unsure (1)..(446): unsure at all n locations
agcttgtctncacgacaactacattctactcttctttctcttcatcggggggagagtggaatctgtccccatcctcaacaatgaaccgaccgtgcctggggaagaacctcctcagcgggaagctcgtcgacggaggaaccgacgccgtaatgcccgacgacatcatgaagccggagatcgagatccggcgtagcctgtatcacgagacgagctctgcatggaaacacccccttcttcatggtctatggtttggaggcagtgctacctgccgacctcatgtttggggcaccaaggctggtcttcgaaaacatagctgaagcagaagctaccaggctagaagatattgacgtactggaagaagaatggttgaatacagtaattcagtcaactagatatcagcagacgctgacgcgctatcatgataagactatacgacatcgatccct

SEQ ID NO: 43229 - DNA, 395 bp, Zea mays
  unsure (1)..(395): unsure at all n locations
agctatcctttatttgtggagcaccttatttttatacaggctagaatagccaagggcaacccactgttattattacagaatctttggacaattttaaaacactgtcatagttcacacctacactagaaaccataatgagaaattaaaatgaggaaaaaaatgaataagggtaattagtgccatcctaaaaccctcgtaatttgtccactgaaatgtataaaggcaatacaagtccactatgttatcttcaatggaaacctaagactaaaaggtaataagtataaaccacttgtagcctcgcatgactaagaaaccctaagtcacttcttgacgtagttctttttagcataatgttattaaatcntgcataatcatgacatacatgttcattgcat

SEQ ID NO: 43230 - DNA, 511 bp, Zea mays
  unsure (1)..(511): unsure at all n locations
ggatcttaagcacctgagctgcagctcggcgaacagcagaagtgatattttttatttatgacaaggctatttacacctcgacagagtactatagaattattatcaagtgctaagggcatgaatgtaattatgtatgggttgtgtcccgcgcctataaataggtgaacagtaccctcgtactgaacacgctgacttggcattcgctttttgcgtcacgctcgtactatcatctattcccagttgaaggtacactcgtaattcaacgatatttctgtttatgcttaataataatggatagtcggtcatgttctcatttatattccttacatttcatccttcgtcattatataatgaatntatgaagggatacccttcataaccttcgtccgaaaaccattatactctaatggaaataatgttttgaatgacgaacgactctaacgatcaacactttctatgtngccttgtcttaactcatagcaattgagaacaagtcccaacaccgactgat

SEQ ID NO: 43231 - DNA, 416 bp, Zea mays
  unsure (1)..(416): unsure at all n locations
agcttctaaagggagaacacgtgatatgtttgactaacgtgcaattcgaaaaagatagaccttgtgcagcttgtcaagcaggcaaacaagtgggacgagcgcatcacagcaagaatgtgatgaccacatcaagacccctggagctgctacatatggacctcttcagacccgtcgcctatctaagcatagggggaagtaagtatggtttagttattgtggatgacttttcccgcttcacttgggtattctttttgcaggataagtctgaaatccaagggaccctcaagcgcttcctaaggagagctcaaaatgagtttgagctcaaggtgaagaagataaggagcgacaacgggtccgagttcaagaaccttcaagtggagaaaattcttgaggaggaanggatcaagcttgagttc

SEQ ID NO: 43232 - DNA, 407 bp, Zea mays
  unsure (1)..(407): unsure at all n locations
agcttgtggaggacccgatcatcgaagcatattagtntctggatgagaagtggtcacctaagttttgttgatgaagcaccagaagaccaatcaagaaaggaatccatgtgggagttcgcaagagaaaggtttgcgtgttggcgtcaatgcttcctcaataacctagctgccaagcgaaagccagaagcctgaagatgatcttgagtagccagaatcagcgcttgcaatcagcaaccggatgctcctgataggccagaatttgttgaagttccatctcctcgaagagtctgcaaagtgaagatatgtagctgaagtaaagctatacccataacccttctaagtcgaatctcgaggacgagattccttttaagtggggtagattngtagcatcccacaaattcaaattc

SEQ ID NO: 43233 - DNA, 480 bp, Zea mays
  unsure (1)..(480): unsure at all n locations
agcttctaaagggagaancacatttgtgactttccaatgttcattttgagaaagacagggtttgtagcgcatgccaagcaggaaagcaagttggcgtccactatccacacaagaacataatgacaacggacatgccactagagttactccacatggatctattccgcccgatagcttacataagcatcaacaggagtaagtattgtcttgtaattntggatgattattctcgcttcacttgggtattctttttgcaggagaaatcacaaacccaagagaccttaaagggattcttgagacgggctcaaaatgagttcagattgagaatcaaaaggataagaagcgacaacgggatggagttcaaaaactttcaaaatgaaggctttcttaaggatgaaggcatcaagcatgaagtctcttcntcctacacacctcaacaaaatggtgtagtgtagaagaagagtagaactctactggaca

SEQ ID NO: 43234 - DNA, 374 bp, Zea mays
  unsure (1)..(374): unsure at all n locations
ctgcagcttgccggacggattttattttatgattttctatctccaatcagcttaagcaaagtataataggccagtggaccaacccgctatagagaaatgtgtcacaaagaaaagaagatacatagtagatctgtccttgaaagcctatcttcatagacctacaaccatgaatctcaccactggaaaaacaactgaatgagagatatagaacttactgcttactattcctgcatagctccaagaatacattcctaccaatgatttcaagtcgtccgactaatcgcgattagttgggctggtcgcctgctaacagccgantatccggacaactcgattagggagcctggtcgctctgatcgtccgattagtcgacg

SEQ ID NO: 43235 - DNA, 397 bp, Zea mays
  unsure (1)..(397): unsure at all n locations
agtcttatctattaagcaagtgtcgagttcaactctatcataatctaccaagtatagctgaccctctaacactcccttaaatgctattgaatcatcacttcttctaaagacagtgacacctacatcagcaaatagacagtggtagcccatctgacataattgggatacggaaagcatatcgtaatctaatgaatcaacaagaaacacattggaaatggaatggtcacgagatataactattntacccaaacctctgaccaaaccttgtgttccatccccgaatgtgatagctcgttggggatcttgtgttttctcgtaggaagagaacatcttcttctcccctgcatgtgggtcgtgcacccgctgtcgatgatccaacttgagccccccaatgcat

SEQ ID NO: 43236 - DNA, 202 bp, Zea mays
cacatctacaccgactgactatatagtgctgcaggagtgaaggtgaatcgtcaagtcgtccgtacccgctcaataatcacatgcactcactgaacggtggaccatgaggcgagcaagatgaaatcacagatcgtgcatactcattgtatgaggggactgcccccgctcggattattttaatagattctcggcaacgagctca

SEQ ID NO: 43237 - DNA, 493 bp, Zea mays
  unsure (1)..(493): unsure at all n locations
agcttaacagcaatggtnatcatgtaatacaatgcttctttgttcacaaagcagcaattgtaatacatacgatacaaaaggagtagttctactcatagctgaaaactgaaatggacgtgaggaaatgacttgaacgtgtgcagcaatcataacaagcaactttagttcacaaaaattccagaaactgcaactaagttgacacctcacagtaatagtctaattaagaatacaggcatacaaccaagcgcccaagccaacacgacaatagtacccatgacttcacttgcgaacagtaacaggcgaataggaagtaccccagtaccccacacagacaagaacatgcgaacaggaacagacaacacccatgactaatacagagccaacagggtaaggcagcaccagacaacaaggcactagcaacacttcacttgcacaagcgccagcaacacttcaccttgacaagaacttcacacttaaatacttgatcttgtac

SEQ ID NO: 43238 - DNA, 412 bp, Zea mays
  unsure (1)..(412): unsure at all n locations
tgcggcatgcaagcttctcttgacaagcgccacactcactgtatattgttattctaccacatacaatagcaatggagcccctatcacgggtggagttaatgttgttaaatcaatcaggtattgcttcagctcttcgaaagacttctgttgagttgggccccattgaaaaactttagctgactttagtactatcaagaatggtaaacttctttctgctgatctagatataaatcgatttaaagatgccagtcttcctgtcagcccgtgggcccacttctttgtgcttagcggctccattcaaaggatagcttcgatcttgcttgngttggcttcgatccccttcgttgaaactagacagccaaggaacttgcccttcttcactccgaagaacacattttctggatataatttc

SEQ ID NO: 43239 - DNA, 488 bp, Zea mays
gctgcaacttatcaaggacggaaaaagcttttcttatggaccgatcaaagaagaggtctatgttgagcaacctcccggctttgaagatagtgagtatcctaaccatgtttataggctctctaaggcgctttatgggctcaagcaagccccaagagcatggtatgaatgcctaagagatttacttactgctaatggcttcaaagacggctaggccgatcctactttgttcactaaaactcttgaccatgatctgttcgtatgccaaaaatatgttgatgatattatatttgggtctactaacgaatctacatgtgaagaatttagtaggatcatgacacagacacttgagatgtctatgatgggggagtcgaagcatcttctatgatctcaaagtgaagcacttcaagagggcaccttcattagccatacgaagtacactcaagacattctaccaagtttggaatgagtgtgccagcccatcaagacac

SEQ ID NO: 43240 - DNA, 319 bp, Zea mays
  unsure (1)..(319): unsure at all n locations
agcttgcaacaccatgtgacatcttactttttatttctgagatcaagaatatttagntcattcctcaacatgcaaaagcgggtcttatcaagaggcttagtgaagatatccgctaattgatcttccgacctcactccttctaaaatgatatctcctttagcaacatgatctctaaggaagtgatgacggatatcaatgtgcttggtgcgagagtgttgtacaggattattagcaattttaacaacactctcattatcacacaacanaagtaccttttctagaactatgccatagtctagaagagtttgtttcatatata

SEQ ID NO: 43241 - DNA, 437 bp, Zea mays
  unsure (1)..(437): unsure at all n locations
agcttcggctatgggtaagattttcatcatctcttcagtgcaatggcaatgaatgctgtggtaacttcacacctacccgtctgtttatatagtgctgcaggtgtgaaggtgaatcgtctagtcgcccgtacccgctcaacagtcacccgcactcactaaacggtggaccacggtgcgcgcaagatgaatcgatagatcgtgcatacccgttgcatggtgggaccaccccgcgctcggattattttacgtttctcggcaatgagctcagggaaggtgtttntcggaccttcggcattccgaagcctaagacaaattttcacgtatcaagcttgttacgaaaaatgatctatcaccgcgaaggggctactgttgggggtctgcttcatagccgaaggtcctgtaagaagacacaccttcggaagacagcacggaataac

SEQ ID NO: 43242 - DNA, 418 bp, Zea mays
agcttgtgaaggttcttcatcctcacatgtgtttagcggcgatgccacagccagcccatgctggtcttagctattaagcatgcatctagaccggcttcttcttttgcaaaatcaactaaatacagtttgccgtctaatacacccttaaaagctagtgaaccatcacttcttctaaagacagacacatctacattcgtaaatagacaattataccccatgttgcataattgactaacagatagtaaattataaccaagagattctactaaaaacacatttgaaatagaatgctcattagaaattgcaattttaacctaaccttttaccttgccttgattcccgtcaccgaatatgattgaatcttgggaatctttattcttgacgtaggaggtgaacattatcttctcccccgtcatat

SEQ ID NO: 43243 - DNA, 377 bp, Zea mays
  unsure (1)..(377): unsure at all n locations
atcttcgacgagctggaatgtctgcnagaccggtgaaacgtttcttgtaagataaggaaagatacccaacttgtcaagtgacttatgaacatctacagggtgtctgatgtctgttatacaaagacaactgtatgtgggcctaattacttgggaggtttgtcacacctcttcttgtttagaaacatataaatgatctgagggcatctaacattggtgtaacacccactatgtaatttgctagaaagaataccaatagagaaaacaatttctctttatgtgaggtggatctttatgcatcatcatatgtgaacatcattgcccacaacaattaataagaacatatactatcaaattatgcatcatgctcgatttattct

SEQ ID NO: 43244 - DNA, 435 bp, Zea mays
  unsure (1)..(435): unsure at all n locations
ttaagacacctgcggcatgcaagcttctgtaatatacacgaattattatatgatattttgtctcggngcgaagaacagtaccataataactttggctgctacagattcgtctctcggtccggggcaagctgtcccgtaccaacctttttgaagagatggcccggggaatggatgacaaaatggttttatgtgaagaatgacctatcagcacgagaagatatcacaggtataattatgcgttctanttggcaaagcttctgccttctgaggccgaatgtggaaatgaatgaagctgccgaagaatgccagagggccttcggcgtcatctgctcttttattggaacaagagatttagtacaagagcatattgccttcctgctttggcctcttgcggagaaatgggaaatgcctcaagaaaccataaaagaggccgac

SEQ ID NO: 43245 - DNA, 433 bp, Zea mays
  unsure (1)..(433): unsure at all n locations
tgctctaagcctgtcatgtctgatgtttattatcgaagtagctacacgctggataaaaagggtttctcactcaaatccttatatgcccagattagatatgcggtggttaaagtgccttacatatttatgtggaaactgaagattcctcataaacttaaaatcttgttgtcgttgattgttaaaaacanaattctgactaaagagaatntgattgcgtgaagctagactatttgagacgtataggcgagagtacgataacttcacacagttggctagagagaccatcaattatatgttctctacgctctactcaattgtgaacaagatgcatgccaacaaggcacaactacccaatagcgatcatgatagagcgctcgaattactacatgctctagattagagggttggcgaggtgaaggtctcaacgatcatc

SEQ ID NO: 43246 - DNA, 444 bp, Zea mays
  unsure (1)..(444): unsure at all n locations
agcttcgtcagtcgaggccctaatggacttatcttctttgcatgggntcagtcattacctttagaatntcctccacgtcgctggtagaaggtggtgtgggggtccactctccttcggatagttttcgctttggagttgatatttttctcttgacaattttcttcttttttggtgcgtgttcttcatccttgtttaaagcttcggcctctctttttcttctctggccctcagcatccttgttcagctgcgcatagtcaggatattcgaagcccagtgcatcaagcactcggttcagccttcgcttcggacgggtaccgaaggctgctgtcatcagttgatcttctttnttcgaataatttccaagaatttcattacacatcacctcaactgtgtccagccactcttggcagggcttcttaanatatttcttgaatntgaagtggt

SEQ ID NO: 43247 - DNA, 300 bp, Zea mays
tattctatggtgaggacaagggccatactacaaggatgtgccatgtcaccattcagaaatagaagggaatagcagaagctgcagcccaacagaaccagccgaagcaggtcatgcacactgcttcgtatcactcgccttacataccagagtatgtgggtaaccatcctgtagcttctgtggcttcggctagccagccacaggcatcttggcaacagcattcaccttcaccaccactacaacctgcatattcacgaggccagcagctagaagggagccagcatacccatcagcagcgggatt

SEQ ID NO: 43248 - DNA, 448 bp, Zea mays
agcttgagaagattcttcattccaacatgggtctttctgcggcgccagagccaacccaaggtagtcttagcaactaagcaagtggcgagttcagctttatcaaaatctaccaagtatagctgaccctctaacactcccttaaatgctattgaatcatcacttcttctaaagacagtaacacctacatcagtaaatagacagttgtagcccatctgacataattgggatacggaaagcaaactgtcatctaatgaatcaacaagaaaaacatttgaaatggaacggtcaggagatataacaattttacccaagcctttgaccaaaccttgattaccatccccgaatgtgatcgctctttggggatcttgggttttctcatatgaggagaacatcctttcctccactgtcatgtggcttgtgcacccgctgtcgagtatccaacttgagc

SEQ ID NO: 43249 - DNA, 358 bp, Zea mays
cttacaatggtgattgtttgtcttggtattcagaatgatatccatagaggatataatgaatctgtgatagattctaaaatttcagatcattaatgaccatcagtaatgaatcgtcatttccaactggctatggttggagtcaggaagttttgcacgctcctgacttgtgattaactgcatgtactgcatgtacaagttcccctatggttttaatacgtgaaaatccgtgaaagatttcccatgcgtacattgggtatgttcccaatctcaccaccacagcgtacatatatgggcacacagaatactgtggatctatgtgagaattcattcttcgtcgatcattaagtttcagaatctc

SEQ ID NO: 43250 - DNA, 367 bp, Zea mays
  unsure (1)..(367): unsure at all n locations
agctngacccggggaccctcgtcaccgtaatattctaatcgtgctcaccggagttcaagaacccgccggcgcacgtggaccgggtaagcccctgcaccgttttccaattcgttgcgcgcatggcctctgtgtcaccccgtgaagctcctcgtgcaccctaattgaactataccgccgtggtttggccggagcaggagccgccgacgacccccgccgcctgtgctcgtggccagggtagctccgaccacctccgacaccgacccgcacaccgacgtgaccatcgcgacctccgggacgtcactgaccaccccgccggagctctactgccgccggtaagccccaccgccgtaaactatgccgcgggtac

SEQ ID NO: 43251 - DNA, 468 bp, Zea mays
  unsure (1)..(468): unsure at all n locations
agcttgacantgtctccctgttggaagcctattctatccttaattccagggggtctcccattatagagcatgcttctagcaaatttaaaattttcattttctaagtcatgctcattaattttagcaataagttgagctatgtgatcattttgttggttaattaaagctaggtgatcatgaatagcatcaacattaatgtctctacatctagtacaaatagtaacatgctcaatggtagatgtagagggtttgcanacatttaattcatcagtcttagcatgtaacatgacattttcatttctaagattggaaacaatatcattgcaaacatttaaattcgtaaccttagcaattaatttatcattctcagttntaaggctagaaattgttcatttaatttgtcaatcttagcaagtaaactagcattatcaattttaagattggcaaaagaatcatcacagacattta

SEQ ID NO: 43252 - DNA, 383 bp, Zea mays
  unsure (1)..(383): unsure at all n locations
tgcagcttctaaattgaaagcaccagttcttttattatgcacgancgacgaccaagtgttgcagcagtttgttatcctgactgctcatcccgattcgtatactcaaccagaacctcaatggctatacaaggtgcatacatgaaaaaattaagggcagtcttgcttctaattggcgaaattaaagtgttcatgccacttaccaaacatctgtgggttgcaatataaaacacgaatatttgaatttaatacactaatgtgctgatgccaattaacaaaaaactgttggttgtcaagtatgcactggtcaagtaattgtacacaagtatcgcgcctttggtacgtcagatcgctgcatgtaataagctacagccgcacataataca

SEQ ID NO: 43253 - DNA, 365 bp, Zea mays
  unsure (1)..(365): unsure at all n locations
agcttgtactactactctacattaattgtttatattgatgntcgaaatattgcacaactaattngagtctaatatcataaaccttgtgatagatgtggttggactacttgtatatatgatgtccaatgcattgcatatatgtcatagtgtcgttgatatacctgtgaatatcagccatcgtgctgctacttttatttgcaggttttggaaacctccccgtgcaggggaggtgctgccgatttttttgtcgatatatgttagatagcggtagataggcacaagtagtggtaggtttgccgatggcatgcgtggtcctaaggatggcggtcgttgatgtgaattcatatgaacaaagnttggcaata

SEQ ID NO: 43254 - DNA, 485 bp, Zea mays
  unsure (1)..(485): unsure at all n locations
agctttaagagctaatagacggattgttatttgtaccaaggngacatttggtaactattggacctcatagctttaaacagaggaaatggaaacacttgagacaacatatatttgagcaaatctatagttgccttgtctgaagcaaaagaatacaatggcaaggttcctagataccaaaagacataaattaatttctataaaatttgaggacaaatgcatgaagaacaatgaattaggttggtatttatttctctatgccatttagttgaattcaaactacaacatatattattttgtcagcaggtaatcaagcaaagcataataaagcatcttatggttagcatgacttgaggcatattcaaccatagcaatcatgtcaggaccacaccatgacaattacattgctatatgacctaagttggtgagactgaacttttatttcagaggaataactatacacacatgattatatggcgataaaacat

SEQ ID NO: 43255 - DNA, 379 bp, Zea mays
  unsure (1)..(379): unsure at all n locations
ctatggcccttgcactcttataataagcatgctntgtcgagtgcctnctagcgcactcggcanaaaaactgacaaaggggcccgatggtggcctctttgcccagtgctagtctggcgaacactcggctaanagggaaactcttttctgagtgtcacctaatacactcggcaaagagatactctttgccgagagtcacacagtacactcggcaaaggcgccgtctcctgtaccagccgtcgtgacgacgacttttctttaccgagtaccgagcgacactcggcaaatgctttaccaagtgcccgactaaaagtactcggcaaagaagccgttgccaatgtatagttcgtcgagctctctttgctgagtgtcacactcggc

SEQ ID NO: 43256 - DNA, 387 bp, Zea mays
  unsure (1)..(387): unsure at all n locations
ctgcagctgaggtcctacgacgaccgaactttanttanatggcggcccgtttatttctctctggctggtgaggactcgggatttgtgatgaaggcggtgctactctacagaagaggaagaggttacaaccccgcaatatattcccgaaggagaccggaacccataatcgcggagattacggtggaacacccatcctacccgccagaatcgaataaatttgagattggaggataatcgacagtgggtcccttctgtatcaccagattgggaagcgcacttggtctgcaaacggccaacgacaggtatcacgcattaccacgatgctgacgggcccccagcaagcgggcggaaggaaatggctgggggtgagacaagagctggcataga

SEQ ID NO: 43257 - DNA, 398 bp, Zea mays
gcttgtgaaggttcttcatccacacatgtgctattcgttgatgccacagccagcccatgctagtcttagcgattaagcatgcatctagaccggcctcctcttttgcaaaatcaactaaataaagtttgtcgtctagtacacccttaaaagctagtgaaccatcacatcttctaaagacagacacatctacatttgtaaatagacaattatatcccatattacataattgactgacagatagtaaattatatccaagactctccactaaaaacacattagatatagaatgctcatttgatattgcaagtctgcctaaacctttcaccttgccttgtgtcccatcaccgaatatgattggaatctgggaatccttattcttgacgtaggacgtgaacatc

SEQ ID NO: 43258 - DNA, 416 bp, Zea mays
  unsure (1)..(416): unsure at all n locations
accaggaacacgggagcaagagggaaaagaagaagcattacatgaaggccaatggcgaggcacatatcggacaggagtgggattcggattgctcctcctccgactccgaccatgaaggacttgccgccactaccttcaacagttatccctctntcccaacgagcgtcacacatgccttatggcaagggagaagaaggtatgcaatcaaaacaatgtcacttatgattcttccagtgatgatgagtctagtgatgatgaaatagattactctagcttgtcaagggattggatagaactaaagagataaacataatgaattgattgatgccttgaatgaaaaagatagactcttagacaaacaagaggaccttnntgttgaagagcatgacaaatctgtagaagcacacaaatcttat

SEQ ID NO: 43259 - DNA, 326 bp, Zea mays
gtaattgcgaatgctttcaagcttcagctttttgcctcgaccaaagctgatatggcctgaagtaaaaggagtgaggaccccacactatctcggttttatgaagctatggagagggaaaatgttgaaaaaataactgatgaaattttagctgggctgtctgaagattctgatgacagtgaagattttgatattgaaagtgataacgatgatgccgaagatcggtcgtggaggccgagtcatgtggtatttgggaaatcaaccgtgaagaaaggacatgttgcggctatgaaaggcaaatactttcatgatgtgtatatagtgagaat

SEQ ID NO: 43260 - DNA, 413 bp, Zea mays
  unsure (1)..(413): unsure at all n locations
ggatcttaagcaccgcggctgcagcttctcgattagagtatatttttttcatacactattattgcctttattcttaatagttattttgtatattcattcttctctctttctccacttctatattctagattttattttatattccaaattccactttggaatttaatatattccttttcattattaatgtgtttttttattatgattggttttataattaaatgcacaagcaattaaactccaacatgatgcaccattcttttatttagaatgtttattggtagctaaggatgattccatgatttgaaatatgcacaaatgagaataattacactagtggtcaattgagccctttatatttcttaattcttggacatttcactactcttacaattngngtattacaaatccta

SEQ ID NO: 43261 - DNA, 423 bp, Zea mays
  unsure (1)..(423): unsure at all n locations
agcttattatggctattaaatgctagctaaaatactctttggacagaacccacccctaattaggagatgtagtgtaagtggctcatcttacacaactnttatatattttgtctaaagcatagcctttttattttgaacctcaacttcctagaaggagctatagtgacaaatgacaacccactgtaattcttacagaattnttggagaaagttaagctactattgtagttcaaacctccactagatttcataaatagaaattaaagagagaaaaatgaataatggatagtagagtcatcctataacccttgagattgttcactaaggtatataaaaaggtaatanctacttcctatgatntatcctcacaatgaagacctaagcctaataagtaataagcataacccactggaagccccgcatg

SEQ ID NO: 43262 - DNA, 380 bp, Zea mays
agcttgtgaacagtacaaattcagaatgtatattcttcttcagcagatcagccgaagcctatgctcttatgtgaggacatatcacagcagaaggtgctgttaggctctcaattatccgaagagcatgagaaaaccttgataagggttttgttcaacaacaaagatgtttttgcatggtcagctaatgatctttgcggagtaaatagggatgttattgaacactcgctcaatgttgatccatccttcacagccagaaagcagaggcttctgaaaatgtcagatgataaggccgaaggtgctcgtaacgaagttaaaagactcctcagtgcacgagtcatcagagaaggtaagtacccagaatggctggctcaacactgtat

SEQ ID NO: 43263 - DNA, 420 bp, Zea mays
  unsure (1)..(420): unsure at all n locations
gcttcngcgaccaaataacccatctctttgttttctacaatgtcgaagaccctgagcatctgtttggtgaaggcaagtgtcctctgacccattatgtcctatctacttataattcactgtcccgcaaacaatgatcaacctaaggattgactagctttctatttacttatccttggttacccttttgggttatcatggttagctttatgctattgctttactttaatcaatgaacatgatgtgaatattatgatacaatgatgttatcccaatgatgatattgtgatactctagggggctcgggccttttccttgagtacctctctgtaaggacctgttcgttgagagaccacccgggataacagtgcaaccatgagggtgaaatgggatgcccttatctaattaattagaggaactgga

SEQ ID NO: 43264 - DNA, 346 bp, Zea mays
  unsure (1)..(346): unsure at all n locations
aactgctcaagtgttcctgctcccttgtcgagcctggcctgcatctcgcggatttgctcgagctgtgcgtcctgaccccccgcagggactgggaccacagctagctcccgaaggatgtcaacgcaaggcgcaggcctagggggatcgccgttttccggcataccaagatggttgccttcgccgggaccccctagatcgacgtggaaacattcacgacttgggccgcagtcctcgtcgtcgaggctgcggctaccatcggaataatcggagaggcagtagtcgcatgcggtcatgatgttccgcatggcactggggttaccgagctcggagaaatccaacanaagtc

SEQ ID NO: 43265 - DNA, 485 bp, Zea mays
  unsure (1)..(485): unsure at all n locations
ggatccttaagcactgagctgcagctttaaggaaacactgatagttactttcttcaattcgaaaaagatagactctgggcagcatgtcaagcatgtaaacaagtgggaggagcacatcacagcaagaatgtgatgaccacatcaagacccctggagctgctacatatggacctcttcggacccgtcgcttatctaagcataagaggaagtaagtatggtctagttattgttgatgacctttcccgcttcacttgggtattctttttgcaggataagtctgaaacccaagggaccctcaagcgcttcctaaggagagctcaaaatgagtttgagctcaaggtgaagaagataatgagcgacaacgggtccgagttcaagaaccttcaagtggaggagttccttgatgaggaagggatcaagcacgagttctccgcttcctacacaccacaacanaatggtgtggtagagaggaagaacaggacgct

SEQ ID NO: 43266 - DNA, 392 bp, Zea mays
  unsure (1)..(392): unsure at all n locations
gagaaagacaggatttgtagcgcatgccatgcagggaagcaagctggagtccatcattcacacaagaacatcatgacgaccgacaggccgctagagctactccacatggatctattcggcccgattgcctacataagcatcggcgggagtaagtatcgtcttgtaatagtggatgattattctcgcttcacttgggtattctttgtgcaggaaaaatctcaaacccaagagaccttaagaggattcttgagacgggctcaaaatgagttcggcttaaggatcaagataataagaagcgacaacgggacggagttcaagaactctcaaattgaaggcttncttgaggaggatggcatcaagcatgagttctcttctctctacacacctcaaca

SEQ ID NO: 43267 - DNA, 468 bp, Zea mays
agcttcttagcagattgcgtgaaccttggaactattatttcttgaccatggaagttaaggtagcaatggtccttttgagtttagcaatctcagattccatgatctctatatacaaatttcaatttgaagcctcaagtaggagagacacctatgattatcacgaacaataagggtgctgattaatgaaaataaaatctaaatcacagtttgcattgtcatttatatttctccaaaccacgagtcacggattaaacaaggcagtggtatggctattcgaaacatacatcaagtacacaccgtttccatctaacaaagcagctccacgactatttggcaagactatcttgggttacattattattgagtgaagtcaaacaacaagactatcaactcatatatcacatgaagaagtatgaaactattatttatgtaaacgaattaaggtgagcttgataacaaataccttat

SEQ ID NO: 43268 - DNA, 369 bp, Zea mays
  unsure (1)..(369): unsure at all n locations
agctngcaccagcctggtgaaagggaaatgtgccctgtgccatttctacgtantttggtgattaagtgaccaacacaaatggttatgtgttaaactatgccaaatggtggacaaagtgcaaatcaatataaggtatgattctagacttagtacattggtttttgtgtactaacatatttgtctaagtgcgagaatcagagaanagacaaatggaaaagacttggcttgagcagccaagactctgctcagtctgggtgcaccggactgttcggtggtgcaccagacagtgtacggtgcgccgggctggctctagtgaaaatgccgctctcgggaattgaacggcggcgtacggctataaatcaccggact

SEQ ID NO: 43269 - DNA, 492 bp, Zea mays
  unsure (1)..(492): unsure at all n locations
cttaagcgactgagctgcagcttgtcggtgcctctagccactcntttttatactgcaagggccccgctggtggtctcgttgtctagtgctagtctgacagacactcgataatcgctctgccattacctttgtcgagtgtcatgtagctcgacaaaggtgccgtcttcattaccagtcgctgtgacagcggcttttctttgctgagtaccgagtgacactcgacaaaatncttgccaagtgtccgataatagtactcggcaaacaagtcgttgccgatatacagttcgccgagctctctttgccgagtgtcacacatcggaaagccttcatcgagtgttattcagatggcanagagtctgattccggtagtgactacctaacaactagtcaacatatatctcttctgagattaagcataatctatactaaaccggaggcttctgcaccaagtattcaatttaccgcttctcagaataaactaaaaccaacaat

SEQ ID NO: 43270 - DNA, 389 bp, Zea mays
  unsure (1)..(389): unsure at all n locations
gcttatgaagattcncattccacatgtgtctttctgcggngccagagccaacccatgttagtcttagcaactaagcaagtgttgagttcagctctatcagaatctaccaagtatagctgaccctctaacactcccttaaatgctattgaatcatcacttcttctaaagacagtgacacctacatcagtgaatagacagctgcagcccatttgacatatatgagatacggaaagccaattgtagtctaaagaatctacaagaaaaacattggaaatggaatggtcaggagatatatcttatttacccaaacctttgaccaaaccttggtttccatccncgaatgtgatagctcgatggggatcttggtttctcttcgaggaggaagaaca

SEQ ID NO: 43271 - DNA, 350 bp, Zea mays
attgagactcaagtcctcaaccaaccttctaaatcttcccatcatagctctggtaatatttgaattatctctatctgaagccctgtagatgagattgaagtcaccagcaatcaaccagtgtccagagcaagcagccctgacgtctctcagttcttgaagaaacaacatcttatcactgttactttgaggaccataaacacaatgtaaccaccaacagcgattatgcgcattgcagaattggattgaaatgctgcatttgtcaatcctagacaacccagtcactcccagatgtcggttccaagcaaccagcacaacaccactatgcacactagatggtagaaaggagaact

SEQ ID NO: 43272 - DNA, 355 bp, Zea mays
  unsure (1)..(355): unsure at all n locations
caagctgtggaggaccaggtcatcgaatctttttatttctggangagaggcggccacccaagnttcgttgatgaagcaccataagaccaatcaaggaatgaatccttgagggagttcacaagagacatgtttgtgtgttggcatcgatgcttcctcaataagctagctgccaagcgaaagctgaagcctgaagatgatatttgagtagccagaatcagcatttgcaatcggcaaccagatgctcctcagaggccggatcttgttgaagctccatctcctcgaagagtctgcaaagtgaagatatgtagctgaagtaaagctatacccataacccttctgagccgaatctcgagga

SEQ ID NO: 43273 - DNA, 380 bp, Zea mays
  unsure (1)..(380): unsure at all n locations
tgcagcttgggaggttcttcatccccacatgttcttagcggcgatgccacagccagcccatgctagtcttagctattaagcatgcatctagaccggcttcttcttttgcaaaatcaactaaataaagtttgccgtctaatacacccttaaaagctagtgaaccatcacttcttctaaagacagacacatctacanttgtaaatagacagttatatcccatattgcataattgactaaccgatagcaaattatatccaagagactctactaaaaacacattagagatagagtgctcattagaaattgcaattttacctaacccttttaccttgccttgattcccatcaccgaatataattgaatcttgggaatccttattc

SEQ ID NO: 43274 - DNA, 464 bp, Zea mays
  unsure (1)..(464): unsure at all n locations
atcctctgagtcacctgcggctgcaagcttaaaaaaattcatgagtagctactattgaatatagaacaaactatggcacatatgcatattcaagggaaaacacacacagagacactaaaatcaatgcagcagatagtcaagattntaaggatagttctccatgtgctagaatttaaagaaagtatgtgaccatcctagaggaatttgatgaagggcaaaagaaaaaggcacaaatacgtctctacagttcactgtatcagcagttcgtatcataatactacctccgttctcgaatatttgtcgtctgttagttcatttttgaactaaaccacgacaaataaaaaaagaacggagagtatcatattatatgatacagtagaattaattattgtccattacanatacagatcccacttcataanttgagctattgcagtgtgttgtcttggtaatatttctatccc

SEQ ID NO: 43275 - DNA, 191 bp, Zea mays
cactctttattggaattgttgctttaagacttaattgtctccaagacgtttagatcatttaccattctttctcttctttgggtcactgatggacccttttggtttttgctgtcccacagattgctgtaagactcaaaacttctgatgtgttggagccctcagttgcttctcttacctcctcaattttttct

SEQ ID NO: 43276 - DNA, 384 bp, Zea mays
  unsure (1)..(384): unsure at all n locations
tgcaagcttggtgaagaatcatgaaccccgtagcttatctattatttatcaaccactgcgatgggaaacttgtcttatactggttttgcattcaactcacgatagtctatacaaaaccgccatgtattgtctgccttctttaccaacaagacgggcgatgaanatgctgatgtgcactcacgaatgatcccctgctgcaacattaggacacactgcctatcgatttcatcctttagaagttgggggtatctgtactgtcgcactgccaccggttctgttccagacagtaactgaatatgatgatcatggcgacgcgaaggcggcagaccgtgtggttcttcaaacaaagcagccaatgagtgtataagttcctccatgcattct

SEQ ID NO: 43277 - DNA, 404 bp, Zea mays
  unsure (1)..(404): unsure at all n locations
gctngtgaaggtgcttcatacccacatgtgttattcgtctatgccacagccagcccatgctagtcttagcaattaagcatgcatctagaccggcctatacttttgcgaaatcaactaagtaaaggttgccgtctaatacacccttaagagctagtgaaccatcacttcttctaaagacaaacacatctacatttgtgaatagacaactggatcccatattgcataattgactaacagataacaaattatatccaagagactcaactaaaaacacattacaaatagagtgctcatttgatattgcaattttgcctaagcctttcaccttgccttgattcccatcaccgaatatgattgaatcttgcggatccttgttcttgacgtatgaggtaaccatcttcttc

SEQ ID NO: 43278 - DNA, 345 bp, Zea mays
  unsure (1)..(345): unsure at all n locations
ttatcttgtctggaagtataacgacctagactttattattgttagacatgaccttcttagcctttgttactggattatgcgcccatttattttctactaatcttagtttatctaccgcccaccataactataatatatgttgtcaagngggtgcgattccatatttctgttaattgcgagcagatattattatatgacatgagtaatccgattattttcggtgtagaactattactattactatatggcatgcgattcgtgcatactggtacttatacagatctgttcttgatgtctcttactgcgctatctgcagacaactttcttttcgtgttataaacaaaa

SEQ ID NO: 43279 - DNA, 406 bp, Zea mays
agctttttcagcttctccgaaggatctcttttttatcatgatgggcatatcagcttcagacacagtataattctcaaaatccaagtggctgggttttgacgggaccagaatgatataatcctcttcttcttcatcagcgttttcctcctcaacatcttgttcagcttctgcagcaggtgcaccttcttcaatggctccctccgtcacaactaggcccgattgtctcatgacttcggagatcggagctatctcagtggcttcagtctcctccccttcacgggtcaccctcgtagtcgagcgtactctggccatctgatgatgaatcttttgcagttcttacgaacgtgatgttctttacagctttttgacgaagctaatttaagatgatggttgccttgatatgcag

SEQ ID NO: 43280 - DNA, 284 bp, Zea mays
acataggaagtgataaatagcaaaacacagccactcaaggcatgaaccactatgatagctacacaagagatcggaatgtcaattctcaagaaggactcagaatcttgaacaagcactccaacatgactttccattctgcctgaataagacaaacacgtttattcttctgaaccacataaaaacaaacagctattagaaaatgcgacaacctcgaagagcacacaattttgtgacttgtggcatctattccaaggaaaccataggagccgacaccaaaaatccac

SEQ ID NO: 43281 - DNA, 442 bp, Zea mays
  unsure (1)..(442): unsure at all n locations
actcttcttgntctcctctgttgctctgaatgcaacgggttgcacctcgggtgtagaggtggcaccttgctccaagttgactatatggttggagtctttgatcataagttcaaagctcacaaacttgccaattacttcctcgggagacatctgtttatataaggtctccactgattaattgcacttgagtgggattacaaaaaacaagtgatctcatggtcatcccacttggtgctcccgaggttgcgcacttgattcaccacttgtttgagccgattgtacatgacttgcgactcttctcctttgttgaggacgaatcgaccgagctcttcctcgatcgtttctcgcttggtgatnctggtcaccttgttccctttgcgcgccgtcttgacgacgtcccaaatatctttgacgcttgtcaatacctggaccttattatact

SEQ ID NO: 43282 - DNA, 358 bp, Zea mays
  unsure (1)..(358): unsure at all n locations
gcgaagggaattgggcggagactcactggttagctcggcccacgcgaggcggcggaagaccgaagttcggtgaggtcgatctcgggcctccggtgaagtccggtcgggtccgagggcttggcgagcttcacgggctactggcggagctagccaaagcactggcctgcccagaggatggctggagggggctggccacggtggccgaagctctggcggcaatggcgggcggaaatgagctcgccggagctaaaggaaagtggctggccggtgagggtgagtgcggngcgaantggggcacgcctgggagggctttatatgcaccgcgcggtgcacgggcggtcgtggaccggcgagtgcg

SEQ ID NO: 43283 - DNA, 290 bp, Zea mays
  unsure (1)..(290): unsure at all n locations
caaagatctatgaacccaaatgttctntgcgctagcgctaggcaaatacattgcctttctagcacaagttgcaattntgggttgcctagttatatatgaatcacacgacaagctatgagtggaggggctaccaatgggacaatccttgcattgatgtccctttttccggcatgcgtagcataagcgttttccaattatagaagatttcttctttccttgcttgatgcttgctacatggatagtataaactttcttttctaaccctatgcccttctgctctaaatggggac

SEQ ID NO: 43284 - DNA, 391 bp, Zea mays
  unsure (1)..(391): unsure at all n locations
nnagctttacacaaaaggagctcataatatctatcactaagangaacaacatagcggagtagcggacagatggtcaccctgaccaaggcccttctggtggcagatcaattcactctgttcaccattaacaagcactctagtggaagaggtgcacaacaacttgcagagtaaattgtaccaaacaggtccaaagcccaaatatcttataacctccaacaaaaacggccattaaactgggtcgaaagccttgctaatatctatcttaagcaacacactcagttcctgcaagagctctggattgttccgcacgcatgtcagggtccttggtatgcattgcaactgtttgtgaccaacatcactcgcattatctcttaaagatgtttgatctgaa

SEQ ID NO: 43285 - DNA, 444 bp, Zea mays
agctacttctcgtcattgatgagcgacgacttcgtgtatgtctcctgctcatggagtttgtgcatggtgtgtagtacgaaacatggattcatgcttggcgtcggtttatgaaaatgactcacaagtctgatccatggaaacaaatattacgaagaacaaatatcacacatgcaaaaaagggacattaagtataatgcattattcaaacaaaagatatagcatgctaagctcttctttaaataatattacctccatccaaaaatataattcaagaatatcggtgatacttatctactactacgcattgtgcaatggtagcaagtgagcttggagagagatgtagtatatgtgtgtcctgtcatagatgtagacatatacacatataggtgggtgcccgtgcgttgcaacaagaacatttaatatcatgataacttatgaacaaat

SEQ ID NO: 43286 - DNA, 405 bp, Zea mays
  unsure (1)..(405): unsure at all n locations
gtcacctgcggcatgcaagctagaagccatggtaagtagcatgggcttattatatgttaattgactcaagcctagctacgggtgcataggtttcaccgaaatccaaaccttcgacttgtgaataccctntggctacgagtcgagccttgtttcttgtcaccacaccatgctcattttgcttgttgcggaagacccatttgtgtcctacaacattntgattatgacgtggaactaaatgccagacctcattcctcgtgaaatngttgagctcctcttgcatcgccaccacccaatccgaatcttggagagcttcctctaccctgtgtggctcaatagaggaaacaaacgagtaatgttcacaaaaatgtgcaacccgagatcgaagtagtacccccttatgaatgt

SEQ ID NO: 43287 - DNA, 364 bp, Zea mays
  unsure (1)..(364): unsure at all n locations
agcttatgaagattcttcactccactatgtttattcggcggngccagagccaacccaaggtagtcttagcaattaagcatgtgtcgagttcagctttatcaaaatctaccaagtatagctgaccctctaacacacccttaaatgctattgaatcatcacttcttctaaagacagtgacacctacatcagtgaatagacagttgtagcccatttgacataattgggatacggaaagcaaatcgtaatctaaagaatctacaagaaaaacattggaaatggtatggncaggtgatatagcaatnttacccaatctcttgaccaaaccttgatttccatccccgaatgtgatagctcgttggggatc

SEQ ID NO: 43288 - DNA, 307 bp, Zea mays
atgtagatcctccggcgttacacctcgccatgagaatcgctcagaggatgttccttcaattgaacgaagatgatgtgaccatcattattgcagagaaagaatatgatcgatggagaccatacgacgaatgcacctcttcacacggatgagctctttaaatccactccttatatgtgctctgctgctactgagagtgactgcgaaagctaaagtgacgatgatgaggatcatgaaagtgatttcgaagattacgatcatctttacaaattctgcgctcaactcagtcagaacaacccgatgagcttgc

SEQ ID NO: 43289 - DNA, 375 bp, Zea mays
  unsure (1)..(375): unsure at all n locations
ctgcagcttaagcttaccttacaacatgacttattggaacttgtatgtgtagtcaccaccaaaatcaatagagaagagaccacacatgaaaggggtatgcccttttgatccagcagagatgatagatgttgcttgatcacttgacaaacaacatagaaattgtttcaagggaaggtccacggaagataacacatcagtgtaattccataacagatcatgactagagacctcgatgcctgcatgcgccaagcagcaaaatcttgtgtgtgcattcacaggaagctctcaatttccccgcggcaccataagtccttagccatgacaccatgatacacccagcccatgtggggttggccgatgcccaacanattatgg

SEQ ID NO: 43290 - DNA, 433 bp, Zea mays
  unsure (1)..(433): unsure at all n locations
agcttctaagggagaacacgtgataggtttatacttacgttcaattcgaaaaagatagaccttgtgcagcttgtcaagcacgtaaacaagtgggaggagcacatcacagcaaaaatgtgatgaccacatcaagacccctggagctgctacatatggacctcttcggacccgtcgcctatctaagcataggaggaagtaagtatggtttagttattgttgatgacttttcccgcttcacttgggtgttctttttgcaggataagtctgaaacccaagggatcctcaagcgctntctaaggagagctcaaaacgaagttgagctcaaggtgaagaagattaggagcgacaatgggtccgagttcaagaaccttcaagtagaggagtaccttgaggaggaanggatcaagcacgaagtcttcgttctctacacacc

SEQ ID NO: 43291 - DNA, 296 bp, Zea mays
  unsure (1)..(296): unsure at all n locations
cggatcttaagtcacctgcngcatgcaagcttccncatccctccatttatttaccgttatttcatttccgctgcacttcgaacaatgatggttacttttgcaaaaactccgatgatgatgatggtgatgtaataattaaacactctggcatgtatgggtttatgctttattgtatntgctatgtgactcaccttcgagtgagaatgtggtacttgatcctgtcagtggccgtgtcggactagattcgagggattgacgggttattcccatttagggcttgttcggttaggccaatc

SEQ ID NO: 43292 - DNA, 364 bp, Zea mays
  unsure (1)..(364): unsure at all n locations
agctntatcaaatggacgtgaaaaatgcctttctcaatggaccaatcaaggaagaggtctacgttgagcaacctcccggctttgaagatagtgagtaccctaaccatgtctataaactctcaaaggcactttatgggctcaagcaagccccaagagcatggtatgaatgtgtcggcgtttcgagaccggggggtccccgagccgacgagtgagtgtgccgcgtgccccaacccaaatgggtctagcgcgtgggctaacgcgaaggggggagaggcgaggtgtccggagacgggcgtgagagatgtggagatcccgcggccttcgtgttcgtcccgcgcccaggtcgggtgcgcttgcagtaagg

SEQ ID NO: 43293 - DNA, 413 bp, Zea mays
  unsure (1)..(413): unsure at all n locations
agcttcggctcagcagcagaaaaaggaaccgacttaatagggataaggctatctattcctcgttggattggtcttaagtcaatagtaaacataaagggcctgaatgtaattttacacagggttgtgcccctgtgtctataaaatagatgaacagnaccccccggactatttacgcttgacttgtattcacttcggcgtcacgcttggacttttaccttctgtcaagccgaaagtcaaatgtaatacaatatttgttcatgttcattcatgatgatacaaaaaatatatgttaacgataccatatggttattcatgttattcctcatgtttcatatgcttcttctttaataatgtatgctgcgatgatgaaggtacgtccttcatgacttttgtctgaagatcattatattcta

SEQ ID NO: 43294 - DNA, 445 bp, Zea mays
  unsure (1)..(445): unsure at all n locations
agctntgctgtccaaagcaagaagactntactcattataatcataactataattgaacggcgttgggagaaacaaatggatcacccattgtatggggctgcaatgtatntgaacccaggaaaagtgcattctctcataagaaatgatgatgatgctactgttggtcaactaagaggttgctctcttgatgtgcttgcaagaatggtagatgatgaggaaactatagacaagatcaattctcaagcaatggattacaagtttcttaaaggagcagctttttcaaataagatggccaaagataacctacaaactatgaccccacgtaagtgtttgtggcttgttactagttactacttaactagttgtgctagtagcttgctaaattgttgtgatgttattgcagttgagtggtggcgttcgtatggtggtcgtgctattgagttac

SEQ ID NO: 43295 - DNA, 348 bp, Zea mays
  unsure (1)..(348): unsure at all n locations
atccttctcatggatggcacttattaattcatttaacttttccttctgttgcatggttacgttggcaaagagagtcgtaaattaatcttcttcttactagcattatcatcactaaaggatacatattccgtggaagagttaaaatttaccttcttcttttgccgtcctttgcatgaggccctttggcctatgttggggaaaaaagtcnttggtgaccgcgatgttgcggagttcttgtcgccgagagtcgtagactttcgcggatccactcccacaaaatgggcatcgcgccttctttgaaacctcttctctcttatttctcctctgcatcgcctgcactgcataaaa

SEQ ID NO: 43296 - DNA, 407 bp, Zea mays
agctattctgcagacagaggcgtgatttttattagccataccttgaatccctctagccagcaatacccttgagagtcttttctttagttgggtaagtcttgctcaaaaattccatactcaggggtttattcccttgtgtttatcaagatatagttttgtgctgctgaagatggcgtttagtgcccgtgggctttggcttcttataaagctaataaccctcctaaacttcttattgaggaatgggccttgagctatcatatactttaaaactataaataatttataacagttcccaaattatttctttgaatcactcttgtaaccactccgataaatacaatgtaaacttgttgtaactcggtaaatttggtataacaatccgctgcaaaatgtggtgtgtgatttgt

SEQ ID NO: 43297 - DNA, 427 bp, Zea mays
  unsure (1)..(427): unsure at all n locations
agcttcatagctgattacggcgtcccacttatggtgattgtgtggacaggattgtcgtatttacatccaggcaaggtgccttcaggagtccccaggaggctttcttctccacttccctgggagtcaaattcactgggacactggaccacagcaagggtaataagtcgcttgtttattattccgagttgcaatattattggtcgttgaagcgcanatattcatagagatttcctgcatggcatgattctgaatgctttctcttctgtgtactgccaggatttgttttctgtttctccagcatatatatttggagccattctgcctgcttttatggtcgcaggactttacttctttgatcacagcgtagcttcacagttggcacagcaaaaagagtataattngaagaagccttctgcctaccactatg

SEQ ID NO: 43298 - DNA, 428 bp, Zea mays
  unsure (1)..(428): unsure at all n locations
agcttcagngccatctatgatatggatagctttggaatcagnccaactttcttcggcccttataacagcttactggcttccatgaataaccataagcccatggtccgaaggtatcttcatgcatagataagctgggtgaagaaatgcttcccaggcgttaacagtaccactgccaatgatagcattgtcaggatactccatgtctacaatatcaaacacaaattgctcatgccttgtgttgttaacagagccgaaagttaccggcctggtaatcttaccaagtgctacaatctgccgtcctccgaagccacaaagagggtgcgtagcatcatggatcttgtcttcaggctcttgcatttgtctgaaggccttaccnatagtatatcagctgcactacctgtatcaactaacacattgtgaactacaaa

SEQ ID NO: 43299 - DNA, 80 bp, Zea mays
agcttagtaaaagtactacataacttttataatcaccaagaagtgattctatgtgtcacccaaatccaatgatacagttt

SEQ ID NO: 43300 - DNA, 268 bp, Zea mays
atccttagagtcacctgcggcatcaagcttcgcgacgggtaaaatttggcagttaacagtgcaaatagcaatgaatgttgtggtaacttcacacctactcgtctgtttatatagtgctgcaagtaagaaggcgaagcgccaggatttttacaccaggcggacacccgctcgcactcgctgcgtggtggaccgcaaagaccgaacagtaactcttgaaggtggggcccgtacacgctgagaaattgaatccgttctcgacaacgagctc

SEQ ID NO: 43301 - DNA, 348 bp, Zea mays
  unsure (1)..(348): unsure at all n locations
agcttgagggtctcggcgtagatgatgttgttgcttctgcccccgtccatcaggaccttggtgagcctgacgtcgccgacaacggtgtcgacgacgagcgggtatttccccgggctcggcacatggtcggggtggtcggcccggtcgaaagtgatgggcttgtcggaccagtctaagtagactggcgccgncaccttcaccgagcagacctcccggcgctcttgcttgcggtgcccagccgacgtattcgccgcatgctcttcatagatcatgaagcagtcgcggacctcggggaacccccctgctgggtgatcttcgntcttgtcgtcgtcgtggccctgccaccct

SEQ ID NO: 43302 - DNA, 188 bp, Zea mays
agcttcggcttcactgctgatccactcaattgggcccttaggatcgcctcttatgaagttgtcctcgctggaatatgtgccaacgctggcaaagctagtctttatctttttcacgcagtctatagatttttcaaaacatctttcttttgatgagcgaagctcttgcattattttttcccaatattttt

SEQ ID NO: 43303 - DNA, 448 bp, Zea mays
  unsure (1)..(448): unsure at all n locations
gtcacctgccgcatgcaagcttgaattccttgcaggattatgcatccgtgttgctgtagctggataatcgacagtggatgcacacaccacatgacggnggagaacaagatgtcccctcctaccgtcagaaccaggattcctaggatacgatcatctttggagatggaaacccaggcaaggtcaaagcgttggccaagattcccatctttaccgacctctctatatgatgtgtttttcatagaggaccctcgtgacaaccctctgtcggtaggacaaatgtggcgcatggggtacaattgtctttttacaaacagcgatgtatctgcctttaagagagatggctcattagcttttaagggtgtattagatgacaaactctacttagttgatttttcgaaagaggagaccgatctagatgcctgcttaatagctaagactaatatgggct

SEQ ID NO: 43304 - DNA, 370 bp, Zea mays
ggagttattcaagcattgagtttgtgccccgttgctcaagtgcttgtcttaaaccgaaggtatacaattgatgaaagagattcatgcaggcctttgtggatcccacattttgatccaggccgttacttggaaaagtgttccgttaatgattttattggccgaaggcagcttcggatgcaactgaattagttcgaaagtgcgaaggttgtcagaaatgtgcaagagattcaaaaacataccttcgtctttgacacagctaatacaacccatctggccattgcaaaggtggggcctcgatctgctgggcccattaccaccggctcatggcaatctgaaatatgttgtagttgctgtggacatattttccaat

SEQ ID NO: 43305 - DNA, 362 bp, Zea mays
  unsure (1)..(362): unsure at all n locations
agcttctcctcaataggcgccactcctgttctctctcgnaagncatcattccggactcgggctctccttgtgtggccacatatccagcgcaacatacgcattttaacataggcggagttataagctagcctcgctaccaaaagaaatagcaagtgctcatatcaactctttttccctatttgcattgacaggcctggggagggggctttctatgggtcaaggcaggaattctcttttccaatgtgtgcggtgatgatgatgagatggggatgagttgttcaagggccgccagcggactagtttgttcatttcaacaacgagatacatgcatggactaccggctgtccatgtnctcgatttct

SEQ ID NO: 43306 - DNA, 391 bp, Zea mays
  unsure (1)..(391): unsure at all n locations
agctntacttagttgattatgcagaagaagatgccggtctagatgcatgcttaattgctaagactagcatgggctggctgtggcatcgctgcttagcacatgtggggatgaagaaccttcacaagcttctaaagggagaacacgtgataggtttgactaacgtacaattcgaaaaagatagaccttgtgcagcttgtcaggcaggtaaacaggtgggaggagcgcatcacagcaagaatgtgatgaccacatcaagacccctggagctgctacatatggacctcttcggacccgtcgcatatctaagcataggaggaagtaagtatggtttagttattgttgatgaactttcccgcttcacttgggtgttctttttgcaggataagtctga

SEQ ID NO: 43307 - DNA, 382 bp, Zea mays
  unsure (1)..(382): unsure at all n locations
agcttgaggctatgtatagattaccgctcatttattgcggngactatcaagaacaagtattatttgcctcatattgacgttcttcttgaccagctgggcggagccaaagtgctttccaagatagaccttcgctccagctatcatcgaaacccgatccagccaacggtaattcgacaagggttttcaaccacaatgggccttaccaatctttgggaagggtttccggcgagtaaaggccacatatttcatgatccgaggaatctgtttcatgcctgaatggacaattctaggggtttcattgagacacttgggactcaagaacgaaaagaaccgccggcatttgatgtaggttcacgctgcagacacaccttatgccagtgca

SEQ ID NO: 43308 - DNA, 84 bp, Zea mays
  unsure (1)..(84): unsure at all n locations
tgcaagctnggcttcacagaaggtttcggtgaccattcaacactggcacaacaacatataaccgccctagggcagttactaggg

SEQ ID NO: 43309 - DNA, 443 bp, Zea mays
  unsure (1)..(443): unsure at all n locations
agctngagtatgcttatactggntcaaaccatcaattacttttagccggtaacttccgttagtagggcatagtggtcacccccgagttaagtaagcgtgagcatgttgcaccgccttaagtcgttgccgacttaagccgattgctccgtttgtagggcatagtggtcaccccgagttaaataagcgtgagcatgttgcaccgccttaagtcgttgccgacttaagccgattgctccgtttgtagggcatagtggtcaccccgagttaaatgagcgtgagcatgttgcaccgccttaagtcgttgccgacttaagccgattgctccgtttgtagggcatagtggtcaccccgagttaaatgagcgtgagcatgttgcaccgccttaagtcgttgccgacttaagccgaatgctccgttngtagggcatagtggtcaccccgagt

SEQ ID NO: 43310 - DNA, 422 bp, Zea mays
  unsure (1)..(422): unsure at all n locations
agcttctcctcaattggcgccactcctactctctctcgnatatcatcattccggactcgatctctccttgtgtggccacatatncagcgcaacatacgcatctcttgcacacttaagtgttggacatgtcgtcttttagtgggccaacattctgctccatacaacatatccggcccgattgctgtcctgtagaattgccttttantttgcgtggcaccccgtggtcgcataagacacccgcagcttgtcgccacttcaaccatccggctttaattctatgactgacattctcatcgatgtctccctccttttgaagcattgatcctaaataaccaaaagtgtctttcttgggtaccacttgcccaataagactaacatcgccatccttataccccatggcactgaaatcacacttcatatac

SEQ ID NO: 43311 - DNA, 133 bp, Zea mays
agcttcaaagggtggccattttatgctctcttgatagctattattatacgagaactccgctaatggtaaaaaatcattccatttctgtgggaattccagaacacatgctcacaccatattttcaagaatctga

SEQ ID NO: 43312 - DNA, 451 bp, Zea mays
  unsure (1)..(451): unsure at all n locations
agctngagacgggaacaaccgtggcatgcactacatcccttgaagaaaatgtcaaggatntgaggattgccaagaggaataaacaaaagaagaaattcaacacctcctccaaaagcctcaaccacgcctccacaaaaggtaacatccaaggtaatgatcaagccacacttcacattaagaggtgtagtaaatgctttgaagtggggcacttgattaggtcatgtccctatattaatggcttgattattaacaaggatgatagactttgttttaaatactccaagaagggacacttacttagatcttgtccccatttaaaacaaagaggcatagggttagaaaagaaaatttttactaaccatgtagcaagcaacaaacaaggaaagaagaaatcttccaaacttggaaaacgcctatgctacacatgccgaaagaaagggacatcaatgca

SEQ ID NO: 43313 - DNA, 416 bp, Zea mays
  unsure (1)..(416): unsure at all n locations
agcttcgaagtatgtccctctggtcggnaccttatagatacagcttcccttctcgctgcagatgtgactaaaacgttggagacgctagatccaccagaatcatcgaacgatacgtgtgtgagagagagagagtggagatggcaacagggggcgttccccgacagggaaccggagtatagaacgatgaatgaagtggttaacaagtcacccacccccgcgaaaccagctgttggagagcgggaagagacggcaatctcaaggagatacgtacgatcgagacaacaatgaaacataagaaaattcccaatgacgacaaccagatgtggctccattattttacgtcgatggttgcgatgatgactgaaatatcatatagtacatatcagttggtcaagcaaatgtgccctcaaagggga

SEQ ID NO: 43314 - DNA, 416 bp, Zea mays
  unsure (1)..(416): unsure at all n locations
agcttctttcttcctcctcatactcatttgtgcttccgctatcattntcattagccacacaacacatgtgggaatcgaaatgggaagacaaaccttttggagaggtggattcaatcgttggtctccatcgatcattttcttcttcttccttgcagggattactatcacaaatacccaagggaagtaaaggcccacattgacctataaggtttgacctatataatttgcttttaattctatccaaatatcatgtacatcacaaatgggtttgtcatattttattatgaacgcatgataatctttcttgctaaaggtttacttaagatgcctaagctagatagttaaaccgatacaattaaatcttcttcgaggcatttcctacatagtaagagaatatactttgtccaaattgtcta

SEQ ID NO: 43315 - DNA, 157 bp, Zea mays
gcttagagaaatctggatgaatctgcgattatacccagctagtccaagaaaactccggacttggtgaacagttgttgggggtttccattccagaatatctttgaccttgctaggatctaccgcaatttccttagcttgatatacgtgccccaaaaat

SEQ ID NO: 43316 - DNA, 445 bp, Zea mays
  unsure (1)..(445): unsure at all n locations
agcttcacgggctactggcggagctagccgtttctctgtttgggctggagggtggctggagtgggctggccactgtggccgtagctctggcggcaatggcgggcggaaatgagctcgccggagctaaggaacggtggctggccggtgagggtgagtgcggagcgaatagaggtgcgcccggggaggctttataggcgcgggcgggcacggccgatggcgtgggcgcgcggcggacttgaccggacgccggggcgagcgcgcgcgcgggttgggcgagctctggcgtgccgatcagggtcgaacacgtgtgcccgtgcgttctgcccaagctctggcgcgtgtggtcgctcatccgagcctgctctcgccttggtcagtgcgcanaacctcttctcctccctacaagctaccattcttgtgtggaggtcataggaatttgcctact

SEQ ID NO: 43317 - DNA, 423 bp, Zea mays
agcttatgtgtaaaagtggaactaatgtttattcagcaatggcacccaaagacaatgatgggacatgttatgttgatgaccaaaggtgagagaacgaaatctcattgtgtatggtggaacatgtgtgcgattaagaagataagtggttgtggtgagagcttcaacctagtatgcaaaatgcatggaagaattgaagagggtgcacagtatattgttgatggtgcgtatgttgcacttgcctttgccattctaagacgaggtgtatggacaagagagacataagaggatgccattgggtgcgaagaagatagcagtggtgttgttcacaaactcagtgacattggtttcttaaaggcacttgatggagaggaggaactatgttcaagattaagcacataattgcacgagatgctgatgaacatt

SEQ ID NO: 43318 - DNA, 444 bp, Zea mays
  unsure (1)..(444): unsure at all n locations
agctngacattgctcccctgttggaaaccaattccatccttaatgccaaggtgtctcccattataaagcatactacgagcaaatttaaaattttcattttcgagctcatgcttggcaatntttagcacttaattgagctatgtgatcattttctttaatcatggcaaggtgatcatctatagcttcaacattaatatctctacatctagtgcaaatagaaacatgctcaacagtagatgtagatggtttgcaagcatttaattcctctatcttagcttttaatccaacattctcatttctaagacaggaaatagaatcattgcaaacattgaattctttaaccttagaaactaaactagcattttcatttctaagactagaaattgaatcatgacaaatgctaagctccttagttaagttttcacattnttctacttcctgagc

SEQ ID NO: 43319 - DNA, 421 bp, Zea mays
agcttacctgactctgtcttctccaccggttctatattggagacccactctgcgtatctgcgaggtctaataaaattagcttctaatagcccggggatttcgtccttgattcgtgggagaagatctggaccaaatgttctagctctctgcttggatagtcttaagccagacttaataagcagccgatgttcgacaactctccgcttagccacgcatctcaaggaattcccagccaaacaatctgaatattccttcaatagaccgatcatctcatttttagggtcagtcttcagggccttgtttacaaaagtcggccttggagttttaccatctcctatgtcaatctcctccaaaggatcgcgcgatgtaaacccctgtcctattttatcaagatctctgaattcctctatcatgtccccca

SEQ ID NO: 43320 - DNA, 404 bp, Zea mays
  unsure (1)..(404): unsure at all n locations
agctttagatatacgatgatgcgttcgttttattgagatacacactcttagtaacacatgtgttgctgataaatattggccacctacatgcttaccggttatccatgagctacctagggcacttgcatttatatttgcccacttgctgagccccggaccttagtgagctcaccctttgctataattnggtcagaaggagatgcctgagaactcactgcagaagaagatgagttttaagtataacggagcgccacgcaccttcctggagaaaatgcccatatatgattctcgcctactttgatgttgaacttgttaagatacaatgatcacatatgtacttaaggcttagtcttttaccactattgatatgctttgattatacactggactcaacttgtggggaa

SEQ ID NO: 43321 - DNA, 432 bp, Zea mays
  unsure (1)..(432): unsure at all n locations
agcttatgaagattcttcatcccaacatgtgtctttcggnggngccagagccaacccatgttagtcttagcaattaagcaagtgtcgagttcagctctatcaaaatctaccaagtatagctgaccctccaacactcccttaaatgctattgaatcatcacttcttctaaagacagtgacacctacatcagtgaaaagacagttgtaacccattttgcataattgagatacagaaagcaagttgtaatctaatgaatctacaagaaaaacattggaaatagaatggtcaggagatatagcaattntacccaatcctttgaccaaaccttggtttccatccccgaatgtgatagctcgttgnggatcttggttttctcgtggaggagaacaccttttctccctgcatgtggttgggccccgctgcgagtatcac

SEQ ID NO: 43322 - DNA, 397 bp, Zea mays
agcttaatgtcccaatctgatccttctttcctaaacgagaaggcgggagaagaacaacaatatttaagtagtcttgactcttgaaaagctttgctggcatgataattcattggtttgtgttattggtactgcatttattttgtgaatatgcgggtgattaggtgcactaaatattctttcttctaatcatcctgttggtttttcattgttctgcagttccctgacaatttgtgctatcaacgcagactatatctaaatcatgtttaactcaattcattgtgttcactatgatgcttggtcatctacatttcttttcacttgcttggatgggtggaggtctgtaatgtgtggtagtttaatggacatcttgaaccctatggtactgtgacttgtgtta

SEQ ID NO: 43323 - DNA, 352 bp, Zea mays
agcttaacaacgacgaaatgtctcttatcatctagagcttccgacaaatccttaagcaaaggaagggaaggactacaaaccccgctccaagagggtttgctaccgatgtggtaagcccggtcactatattgctaaatgttcatatacaaatgataggtatagggaccacgaccacaaggggaaaaaaaaaatgagaaaaaaaaattcttcaaccagaaaggtggcgaggccacatatgatgggaatgggacttcgacgaaagctccaccgacttctccttcgatgaggatgccaccaatatcgccatcaacaaaggtcttctctttcccaacggtggtcacaaatgtctcaa

SEQ ID NO: 43324 - DNA, 230 bp, Zea mays
gcagctcggcgcaacgggagacttttctttccggcaagggacgccggatactccacttccataaacccgaattaaatgtattgcgcaataccacaccaaacatcttcattggataataattcccgctaccaatctgataacacctaactacggttgaactccctaacatatatacccacccgggtgcctggggaccgttgggtaaggtgaccaggccctaggcccaaaac

SEQ ID NO: 43325 - DNA, 425 bp, Zea mays
  unsure (1)..(425): unsure at all n locations
agctntaaaacgaaaaggccatgttgtagctgttactggtgatggcacaaatgatgcccctgcattgcacgaggtgacatgttcagctcaagacattgatgaggcattacatattgcaccttttctttgcattgatgagcttaccgtttctaattgctgccttgcctcttcatttgttgtcctaggccgatataggtctttcaatgggcatttccgggacagaagttgctaaagaaagctctgacattataatcttggatgatgacttcacgtcagttgtcaaggtttgtttggtagaattatccaagaggacctaactgagttcagcactgattttctttccttgtaaaaaataattccacttgtttggagttacacattgaagtcctgactcctgaacatagcaaacatgcatgccttttttt

SEQ ID NO: 43326 - DNA, 443 bp, Zea mays
  unsure (1)..(443): unsure at all n locations
agctnttgaacgtactaagcatatgtcgggaaatatggtaaccgataaacctagtacctgagtgaagccgggcgcggactttatccctcacgcgacctgagactgggtctcatatgctagctatggtgggtacaagtgcggtcactgcacggtggcagccggggttagtggagcattgtatgccaaggcggtgaggcctatacgcgaaccgagaatcgatggggacggttaacatgtgtggggtcggagtaccctgacatgtcgtgtgtttaggttaacgttgcaaggataaaaactcgattcgaatcgtcttcttctcgcagctaataagactgcttgaccccttgtactacattgagtaagaagtgaaataaggttacatgagaataatttgtgattggactaaatgctcgntaccatgtatgcttagaaggagcaaactt

SEQ ID NO: 43327 - DNA, 446 bp, Zea mays
agcttgtgaaggttcttcatccccacatgtgctatgcggcgatgccacaaccagcccatgctagtcttagcaattaagcatgcatctagaccggcctcttcttttgcaaaatcaactaagtaaagctggccgtctaatacacccttaaaggctagtgaaccatcacttcttctaaagacagacacatctacatttgtaaaaagacaattatatcccatattgcatagttgactaacagatagcaaatggtaaccaaaagactcaactaaaaacacattggagatagagtgctcattagaaattgcaattttacctaacccttttaccttgccctgattcccatcatcgaatataattgaatcttgggaatccttattcttgacgtaggaggtgaacatcttcttctcccccgtcatatggtttgtgcatccgctgtcgataatcca

SEQ ID NO: 43328 - DNA, 445 bp, Zea mays
  unsure (1)..(445): unsure at all n locations
agcttgtgaagccaatcacaagtttgttgtttaatgacactaagttcaattggtcttctcagtgcaatgaagcctttgagcaattgaagacactattgaccactgctccggtattagctcaaccggacatcactaaaccttntgatgtatattgtgatgcatctggcagtgggctcggctgtgtactaatgcaagagggccgagtgattgcgtatgcttcaaggcagttacgccgacatgaggagcactatccaactcatgatctggagttagctgcggtggttcatgccctgaaaatatggcgtcactatctgctgggaaatatctgtcacatatatacagatcataanagtttgaagtacatcttcacccagtcagagttaaatatgaggcacagaagatggctngagcttattanagactatgaactagagatccattatca

SEQ ID NO: 43329 - DNA, 433 bp, Zea mays
  unsure (1)..(433): unsure at all n locations
agctctacagnctgaccagtttatgctatttaaacgctgtgttatgtatagccgcacatacatttatgatacatacgacaacgttctatgccaacattatgttggttatctaagtttatgatacaatatcactgttctatgctggaaacatctctttgttcaggcataagcttcacagtctgaccactttatgcaataaacaacgccgtgttatgcatagttgccatacatttatgctacatatgacaatgttctatgctttataagcttcacaatccgaacagtttatggccagtgttatgcatatttgaacatacatttatgctacatacgacaacgtcctatgctataaaacaagtcgatgtacattcataaatctacataactattaaatgcttatgataactttcacatacgtttatgatagtatgta

SEQ ID NO: 43330 - DNA, 434 bp, Zea mays
  unsure (1)..(434): unsure at all n locations
agcttcacgcgccctagaaactccggagtgtatcctagcttnattgtgctggaatatattattgaacatgagatcattctaaaattcttacagacaaaaaacaggtgaccatttcagacaagaggcaggtttatcatggaaaacccaaacaggtaacacatgtgctcaaaaacagaatacaaagagaatcagtgatgggggccaaggtttgggtattttctcggccggaaccatatttcggggtcttttaatataatatcgggagggcggtctttccctccccgatcgagctttntataatgaaaaggaaccttttgttggtgtgataaaattaggatcaaaaaaattccgaaaataaagttaatcaaaatcattactttgctttgtatttgtgaagcaagatagttccttgatttatgacagtttacagctat

SEQ ID NO: 43331 - DNA, 417 bp, Zea mays
  unsure (1)..(417): unsure at all n locations
agcttcggctntggtcaatatattggcatcttaattgtgcaatagcaatgaatgttgtggtaacttcacacctacccgtctatttatatagtgttgcaggtgggaaagtgaatcgtcaaggtcttccgcaccggacaaacagccacccgcactcactgaacggtgggccataaagtccgagaaggtgaatcgtcagtgcgcgcataactgctgcaagatgaggccaccttgcgcgtggattattttaatcgtttcttgccaatgagctcagggaaggtgttttcggatcttcggcatcccgaagcctagaaggctttttcacggatcaagctcgttacaaaaaacgatctagcaccgcgaaggggctactgttgggggtatgcttcgtagccgaagattctaaataaagaaacacct

SEQ ID NO: 43332 - DNA, 408 bp, Zea mays
  unsure (1)..(408): unsure at all n locations
agcttacaaactaatcaaaaattttgcagatctagaaaattcanaatggcaagaatggcgcaagccgntgagatggcacaccaagtgctatcaatgcgagtccctattcatattcccagcgcatcacaacttggtgggccctacatgtcattgactttcgctattatagcgaagggaaggtgttttttctgaccttctgctaaaggccttcgttcacgtcgcaatctgaatttgttaatacaaaaacaaattaatactgagaggggctactgttgggggcctttctcttctgaaggtgcccaaaaacgtgactaatatgttttttaatgtaacatagactgagactgatacaggaggcttcgacttttggatgaaagcatgcgtgatatggagatataacccgggagc

SEQ ID NO: 43333 - DNA, 292 bp, Zea mays
  unsure (1)..(292): unsure at all n locations
agcttaaaccctgtttacagcgttcatgatcctcagttagaaggcaatcaaagagctgcatgatgcacctgaagaacaccttcttcaattgtagcggtgggacatcttcacctatagcatggtccgaaacaatcaaattgtctaaaactaaatatacatganggatttataaaacaggtgcttaacataccgtattgtcctaatggaaagtgtggaaaagagaccacttgttcaatcccattgatttacaataagctccaaaaaaaccaaccattgccacacatcatataca

SEQ ID NO: 43334 - DNA, 189 bp, Zea mays
agcttccagctggttcctgtcgccgccgtttcttccctctcttccttctcgaccttgacgactgccggtggagttggcggtggcgagcacctcttggccaccgccagctcgtactacttcggcggcggcggaagaacagcactggccaagaggtgatgcaccacgaggttcggggtcatggcggagatg

SEQ ID NO: 43335 - DNA, 341 bp, Zea mays
cttacatcaggatcatccccagtgtagaaacctccatcaggatcttcagctgattgacgctttagtaaatcttcagataacatgccatcaacatcctgatgttgacgtacaggtacactgggctttccttaaaagcttaaacaactgcccaaccgatgtccgtaaggtcttgcatttaaaatgagcaggccccataaaccctataatgacagaacaagttacaaggttaaaagaaacatttggataagaaagtcacaaatttctctgttactttcttgactaccacatcaccaccgcagatgagatgaaactacattatcagtttcatgcgaaacagaaat

SEQ ID NO: 43336 - DNA, 392 bp, Zea mays
  unsure (1)..(392): unsure at all n locations
acatgctagcagctattcagnttcggaccactccaggagatgagcgctcattctctagaactggccccaggttgtcggaccccctgcagcagtagagggtcctgaatgaacctggctctcattcgaagtatcacaccacgaggtggaaatgtatggggggtaaacaaaaaataatgctggtaattgaagtagaataaaactatcacaaaagcacaactgggggggaattcttttccttataaccngatatacatgggtgtagaccaacagaccgagcttacgagggcgggcctcaccggattgacgtacacatatgcgcaacctagttatcaaggaagaaaactcaaccccccagttttgcttctatgggtagaacttacagagatgagtat

SEQ ID NO: 43337 - DNA, 220 bp, Zea mays
gttacatgtcaccctgctttcaatagtgactcctcgaccaaaacacctctcccgggcattaaattttaaagctggctcccctaacttatacccttgggcgcttgatgaattttcgaaaatagcccactggaaatggtttattttttaccatcatagacttcaagatttctggagggagttaacgtttttaaagattgcaggtcgtatctattatttggat

SEQ ID NO: 43338 - DNA, 432 bp, Zea mays
agcttctaaagggagaacacgtgataggtttttctttgtgcattgcgaaaaagatagaccttgtgcagcttgtcaagcaggtcaacaagtgggaggagcgcatcacagcttgaatgtgatgaccacttcaagacccctggagctgctgcatatggacctcttcggacccgttgcctatctgaacataggagggagtaagtatggtttagatattgatgatgacttatcccgcttcacttgggcgttctttttgcaggataaatctgaaacccaagggaccctcaagcgctttctcaggagagctcataatgagtttgagctcaaggtgaataagataacgagcgacaacgggttcgagttcaagaaccttctagtggaggagttccttgaggaggaggggatcaagcacgagttctgcgctccctacacacc

SEQ ID NO: 43339 - DNA, 424 bp, Zea mays
  unsure (1)..(424): unsure at all n locations
aagcttgtggaatttagtgttgaattttatatgatcacctattcaccccccctctaggtactctcaattggtatcagagacgtactcttcatctaaggtactaaccgcccgaagagatggatcctaatggaaaggggatggtggtcaacgacaaggaaaaggagtccgtcttcaacgagccaagagacgacaagcctacagactcaggcctgagtaaaagaagagagaagggaagaagaagaggtgcatcaagaagattatctactacgacagcgatgcctcgtcttcttcaccgcacgacgacgactcttcaaagaagaaaacgcgtagttaaaactattcatttgatattcccgtattccgtacaaatctaatgctcattngctatcaagtctacttgggaaacccnncccccccccacttt

SEQ ID NO: 43340 - DNA, 410 bp, Zea mays
  unsure (1)..(410): unsure at all n locations
agcttaaagcccctaagagatagtctaactttgttaagggcaaggctcccatggttcacgataacgagggttacattntatatcctgtcggttattccgaacacaaaactaggagaattcactctaggaagtctcactctggctctcatcatgcttttatgtataagagtgaggcatctagctctaggcaatcaacccatgttaaattgcctaaaaagaaaactcctattgcatcaaatgagcttattatttcatttaagacttttgatgcttcatatgttttaactaacaaatcaggcaaagtagttgccaaatatgttgggggcaaacacaaggngtcaaagacttatgtttgggtacccaaggtgcttgttcctaatgtgaaaggacccaagaccgtttgggtacct

SEQ ID NO: 43341 - DNA, 407 bp, Zea mays
  unsure (1)..(407): unsure at all n locations
agctttatcanatggacgtgaagagtgtctttctcaatggaccaatcaaggaagaggtctatgttgaccaacctcccagccttgaagatagtgagcaccctaatcattgttacaaactctcaaaggcgctctttgggctcaagcaagccccaagagcatggtatgaagtgcctgcagatttcccttgtactaatgggttccaaagtcggaaaaagtcatcctacactccttactcaaactattgcaaaagatttgtttgtatgccaaatttatgttgatgatatcatatgtgggtctactaacaaatctacttgtgaagagtctagtcggatcatgattcataatatccagatgtctatgatgggggagttgaagtatttcttaggatttcaagtcaagcaactcca

SEQ ID NO: 43342 - DNA, 417 bp, Zea mays
  unsure (1)..(417): unsure at all n locations
agcttatgaagattcttcatcccaacatgttctatttgtcggngccagagccaacccatgttagtcttagctattaagcaagtgtcgagttcagctctatcaaaatctaccaagtatagctgaccctctaacactcccttaaatgctattgaatcatcactttttctaaagacagtgacaccaatatcagtaaaaagacagttgtagctcatttgacataattgagaaacagaaagcaagttgtaatctaaagaatcaacaagaaaaacattggaaatagaatggtcaggagatatagcaattttaccaagtcctttgaccaaaccttgatttccatccccgaatgtgatagctccgtggggatctttcgttttctcatatgaggagaacattcttctcttcccagtcatatggttt

SEQ ID NO: 43343 - DNA, 320 bp, Zea mays
agcttgagtaagctgtacgggcttaccatttatattatccgaggcttggatcgaacggaggatgatcggaaatgggctgtccaccgtggttgctcttcggttggcactggcaggtcccggggaggtcacccgaagctaaaggcttggttcggcaagtcaagcgaagtaccgaggatgctaccgggaaaggcacccaacactggggccggctctataaccatggcgcgggcgtggtcactggcggtcgccggcgcgtgggggtccgcgcacgggcgtgctttgagcgccccccccggatgtcaacccgcgtcgaacacgtg

SEQ ID NO: 43344 - DNA, 185 bp, Zea mays
  unsure (1)..(185): unsure at all n locations
agcttctaaagggagaacatgtgataggtctatcttatgtacattnncgaaaagatagaccttgtgcagcttgtcaggcaggtaaacaggtatgaggagcgcatcacagcaagaatgtgatgaccacgtcaagacccctggagctactgcatantggaccttttcggacccgtcgcctatctaag

SEQ ID NO: 43345 - DNA, 393 bp, Zea mays
tgcaatgattccgaaatgtgtgacttgatatcgctgtcgcaatactattgcaatctaaaatactatttctcttctttattaagaaccaatcaattgaaaactaacttgcaccgcgaacaatgtactcatatctaaacagtaaccgcgattgttaaaacgtcattccttgttgttcataggacatacttaacttctgaaataccatgccaacttggagatatattacagcttttattcacgccgttctttatcagtaaaatgatgaaaacacaaaactggttctacaaaacatgaatttattacaattatcaaatagaaaacttctaatattgatctatatgatcgtaccatagatattccactcttataacccggaaaatgggaacatggtca

SEQ ID NO: 43346 - DNA, 419 bp, Zea mays
aacattcttgaaggctatactttttagatcaatatgggctctccttgtacctgcatgattgcccttttcaagcgttttccgaagattgatatcatatttccttatgccgcatgcagtatgatgtatgatgcttatgttatgcaaagatgatgtgatgatgctatgctatgtaaggtgatattccgaagatacacgcatatttgcgcgataaaacacataatctttttgtgaatcagcattgacttttcgctataagcctcccttaggagcttcttcgccttttacttcagcggaatcagcgttgacttttcactgtaagctctgcattcccttaggaacgtctttggagcttcttcgccttttacttaggcggtataagctctgcattcccttaagaacgtctatggagcttcttcgcc

SEQ ID NO: 43347 - DNA, 440 bp, Zea mays
  unsure (1)..(440): unsure at all n locations
agcttcntgaatatacacgaattatcatactatacttaccttgggggaaggaacagtatcacaataattttggctgctacagtttcgtntctcgggccgggtcaagctgccccgtgccaacctttctgaagagatggcccggcgactggatgacaaaatggttttatgtgaaaatgatctgacatacgagaagatattaaaggtataattatgcgctctatttggcaaagcttcggccttcggaggccgaaggttgaaatgaatgaagctgccgaagaatgccagagggccttcggcgcagtctgctctttcattggaacgagagacttagtacaagagcatattgccttcanggtatggccgctcgcagagaaatgggaaatgccacaagataccgtataagaggccgacgaaggtggacttatcaggttgaagtacac

SEQ ID NO: 43348 - DNA, 272 bp, Zea mays
  unsure (1)..(272): unsure at all n locations
aagcacgagctcactaatacctgcctggctgttgttccaggaacacgcacggctgctaactgactgctgaaggaaggatttatcctacctaattgtctcatcaatcaacctgagatgtctcaacactaacactactaagctttcatctgacatgtcattctacatgcgctaagaccatacaatttttgcgaaaggggggaggatttgngaaaaaacataatgccatatcttctaaagactttgttctaaccaagtttaaacatcttatgaaa

SEQ ID NO: 43349 - DNA, 409 bp, Zea mays
ctgcaactgggccgaatcctccacgctttgtttttgaagctaggcctggcatcggggagtgacggtaaaggatgcctccaccgacatagtcttgcaagcaatggttgatgctcatggcgggccggcatcacacaatgatgggtcggtgctaccgcttgggcttggattgaaaatcgtgtgggcgtgaagccgggcggaatccccgactgtggcaccgggaattcgacgccgccattgcaaatccgtggagcgtcgtgggcggacctggagacgaccggaatcgtggtgagaacaacatgtccacagtcgctaccttcccaatatcgttttgcatcccggatacgaggggatcgggtaccatggaacactgttggcattccgggcatggccgccgccgcgctggccttgc

SEQ ID NO: 43350 - DNA, 293 bp, Zea mays
ctccaatcgacagaagcgggcgtgtgccaaatggcggggcggggaacccgggagacatgtctaggcgctgggggagctgaggtttatgatttttaggtgctctcatggacagcacatccatggattgccccggcctgctggtgtgccctgacctggaatgagttcgctaagcacatccgaaaggcgcatggactgtgggccttccgtgaatcgggcgtgagggagtggaaggcgcggccctagcggatatattggaatgccgacgctctgctctccatggaaagcatccatcg

SEQ ID NO: 43351 - DNA, 111 bp, Zea mays
agctgcactaggaatgagaaattttttttttggcccgactgagccacttttgagtggtgaatgtaaacttgatattgatgtgggtggtgggtattttacccaccacaacta

SEQ ID NO: 43352 - DNA, 411 bp, Zea mays
  unsure (1)..(411): unsure at all n locations
ggctgcaagctgngaagatcttatccaacatgggctagncagcgatgccagagccaaccccatattagtcttagcaataaagcagtatcgagtcactttataaaacactagttagctgacctcatctccttaaactctgatcatatctttaaaacgaacactgatctgaaaaaacagttgtaccccatttacacaattgggaaactgaaagcaaattgtacctanagaatatacaagaaaaccattggaaatagaatggtcanggtgaaatagcaatttaccgagtcctttgatcaaactttgatttccatccncgaatgtgatagctctttggggatcctcattnttctcatagaaggagaacatccttttctcccctgtcatgtggtttgtgcatncactgtctattat

SEQ ID NO: 43353 - DNA, 314 bp, Zea mays
  unsure (1)..(314): unsure at all n locations
agctttgcctccgtgggcactaagggctcattctttgttttagcacgagtcgccgcagcttcggcaaccttttttgcaggaacacgagtcattgcccttggtgtcttcatgacagcgtccaacacgcttgccattcttctcctcttgggagttgttgcaggagtntttgctaccttcggcaattctggctccaacggtcctgctgtgtcctctcggtctcacttatcgaccggttttccttcagctttggcagttcgtatcaacacctcgaccgatccggttgcagaaacattcggtactgcagccaattcttt

SEQ ID NO: 43354 - DNA, 411 bp, Zea mays
  unsure (1)..(411): unsure at all n locations
agcttaacaacagggntaatagccgcatgtgttttgtattataaaagctcattttcaacaagaagattgtcatgatcaaatttaatttgagtatagtcttccttgatcttaactagtctattttgcaactccctattagtttcatttaatttgtcatacttctccttagcatcttttagggaagttgtgagctcatttacagttgatgacatagctttattttcttcttttatttcatcactagcctttataactatgtcatacttggcatttaaagattcattttcattcttcaacctatcacatttaccttttgactctctaatgatttgagtatattccttaagtaatcagctaactcattatatgaaggtgaagcaaattcttcatcactatcactatcactatcat

SEQ ID NO: 43355 - DNA, 443 bp, Zea mays
  unsure (1)..(443): unsure at all n locations
agcttcggcttcatctatattgaggatttcttttgtgtctgtccaatttccttcagcctttctggcagcttcctgaattccatgaatagcaatgggcccttgatccgagggtatcttcatgcataaatatgctggatgaagaattgtttctaatgcattgaatgttccacgaccaatgaatgcattgtaaggatattccatggcaacaatatcaaacacaacctgttcagttcttgtattgtggacaaatccgaaggtcactggcattgtgatcttgccaagtgctacaatctgccttcctccgaaaccacagagaggatgtgtggcatcatggatcgtatcctctggctcttgcatctgtctgaaggccttagcanatatgatatccgctgcactgcctgtgtcgaccaaaacattgtggactagaaatcccttgatgacac

SEQ ID NO: 43356 - DNA, 443 bp, Zea mays
  unsure (1)..(443): unsure at all n locations
agctntaactggattgctaccacagagattttattatgaagaaatcatacctgtgactgtcttgcagcaccttgcaatgcagcttccatcatcttcaattcacgtcttaatttctctagctcatcgacagaaacaacagagtccagagtctgagaatctgtgcctctaacagattctagaatctcttcttcttttgtaaatcatttggaggaccttcacctagtccaacaggtatatcagtcgaattgatcactgactcgttctgcgaatttgagtcatgctctgcagttaaagacttcaacgttaagtcttgaggttgctccattgcattatcctcctgtacaacaacagatgattcccctgactccatcttattgctttcttcctcacttttttcagtattaatatggctatcatgtaatttaacttcaagatgagtacct

SEQ ID NO: 43357 - DNA, 445 bp, Zea mays
  unsure (1)..(445): unsure at all n locations
agctntatacctgccttcggatatttcttcttattatgttnggnnactttctttttctcacatgccactgtagggcgattcanaagtcatagttatggattctaatggagctcgatcaatagccattgctaggttactgaagaagctcggtgtgcangcaaatttcgagtgccttagtcttcaccaggactgcattgatatgcattctcttccctgctaactttgaatgttttgggcagcgaccttaccttgttaaaggtggtttccaagcatggtcaaagaaccttcgtgtcaaagaactgaaacctgagactgcattaacgtcaataaatgaggtaaaaagaatcgaaaccagaaactcacgtgtgaaccataggagtttgccggttacggcanacttgtttagttcttatatgggtgtgaggtcatgtctgtagcatatatc

SEQ ID NO: 43358 - DNA, 426 bp, Zea mays
  unsure (1)..(426): unsure at all n locations
agcttcccactgtctcatgcatatagcactttttctaaggagacatacatgctttntcttgattntcaggcttaaatccgctaatcatgtataaaagataactcaactctacgaacaagttcataataatagtaataaattaaagtagattataattaanatcaaacaaaagttacaaggtatgggttgtggcaacaaaaacaaggcaacacaagttagaagaatgcacccttctccactttgattgtaccttcttcgaagaataatcaaaagggagaagagaagaaataaagattaaggcgtgtcaaattgtgtagatcaataatcgaagagtaggccatgtcactcattctttnttgccttagacttcatcatttttccttctcaatataacacataattataagcataccttctggtttacac

SEQ ID NO: 43359 - DNA, 421 bp, Zea mays
  unsure (1)..(421): unsure at all n locations
agctntangggaatagtcataagatgttcctatattgaaccnngatcacatttataccgctgagacatcaaaaactcccattggaaccctggaaaccctaagtccatactctatgggcctatgtgcaaaaactgtgcaaatttggaactgaagtgtaaaaactacaaggttaaagcatattaagtcatatgattcacaaatatagagattacaagccaaccctaagttntggattcatttgcaaaaaggaccccaaattgagatttcactctacgtctgaatttcagatttgcgggctcaacttttgagccttgtaactttcaaactctagtgtctttgtcctatgtcaccacatcacagttgtagaccaatcataggagaataactntgcttaagaatgtgagctcagttgttaagaata

SEQ ID NO: 43360 - DNA, 446 bp, Zea mays
acctgcggcatgcagctctttcatttagctgtggatactttttctgtcacacttgcttgcttgctatgtcgccgaaggtgtttttgcttatacgaccttctgaggagaagaaaggccccaacattatccccttcgcgaagcttgatcatttttcattacgagctcgatccgcgagaatactcgaaggcttctgaatcccgatgtcccaaaaacaccttccctgagcttgtcgctgagaaacgattattatattccgatcgctgagtggtccaccgttcagcgagtgcaggcgacctggcggttcgtcttcccacctgtagcactatataaacagaccgggtggtgaggagttaccacatcattcattgccattgcactgttgtgctatcaaaaaaatttaccatagccgaagctttctgcactgcactctcattaaaagtaacttc

SEQ ID NO: 43361 - DNA, 389 bp, Zea mays
  unsure (1)..(389): unsure at all n locations
agcttgaagccatggtaagtagcatatgctattaatatgtgaatggactcaagcctaactacaggtgcataggtttcaccaaaatctaaaccttcgacttgtgaataccccctggccacgagtcgagctttgttccttgtcaccacaccatgctcgtcttgtttgttgcggaagacccacttggttcctacaatattttggttaggacgtggaactaaatgacatacctcgttcctcgtgaaagtgttgagctcctcttgcatcgccatcacccaatccgaatcttggagtgcttcctctaccctgtgtggctcaatagaagaaacaaaagagtaatgctcacagaaatgtgcaacacgagatcgagtgngtacccccttatgaatgtc

SEQ ID NO: 43362 - DNA, 137 bp, Zea mays
tgtgctccatgcgcctaggttcctttttatatccccaaagctgctaggaagccgtggagatcaatttggaaggctattctcgccttctgtcgagtggtgcaccggacagtctggtgcaccaccggacaaccactgtt

SEQ ID NO: 43363 - DNA, 425 bp, Zea mays
agcttggatggaagaatggttgtatgtgaatattgttctgaaagcaaaggaagatatttaggaaatcattatgcgccccatctcgtcccgcttcggactccaaaagccgaaggtctaaattgatgatgccgccgaagcgtgtcacaaggccttcagtacagtctgctccttcattggtacaagagatttaattcaagaacatatagcattcacagtatggccgcttgttaaaagctgggaaatgccgaaggagaccatcaccaggtctagcgaaggtgatttggtctggctgaagtatacattcagcgtttgaggataatgttcgatgaaccaaacgatgactagctgaaatgcatcgaagctaccagtgatgaactgcttggagctcattccaaggcagaagataatgtgctatctgtagcctt

SEQ ID NO: 43364 - DNA, 425 bp, Zea mays
  unsure (1)..(425): unsure at all n locations
agctnggattgtgctttgatgtaactagaatttctatgactaagtatgataatgtagggctgagtagtagtggtcctcctcataatcttgtttaggtaatcaatttaaatctgattctacgattaatgtgacaatggcaacatgatcatttgcttcaaagagcgatgtatgcttgtattgatgaataaatctcctattaacatgttttgattgaagtactttggttgatgtctacgatactcaggttttatgtttcttcagtcagatatcatacacgagtacaaatgagattaatggtaaatgcataaggatagagtgatgtctggttattgtggtacaatattgttaacttacttcacgctgtataaatatatacaatgcagttttagccgagtcctgtatctgaacaagacatgccttacaac

SEQ ID NO: 43365 - DNA, 442 bp, Zea mays
  unsure (1)..(442): unsure at all n locations
agcttaatgcannaattgaggttgaggtccttaattcatcagatttgcaaaaatcattgacagggcttcaaaacaaatgtctggagttcagtaatcgatgtgtacaacggctgaagcaggtcttcaattcggttggagccagctgcgaaaaattaatccttcgactgaagacctaccgggggccttggaacatatcgagggtgaaattgatgaccttgacgaagttatagctggaaatggtgacttctgtgccttggtagtttcttagggcacagctgtcgccttcctgaaatctggttgcgaacatggaaaggttgtcaatagacccaatttcagtttatcaccagcagatttggataatattcccaaccttgcccgaagcatagcanatagatntataaaactggtatggacaaagggtggacgaagcatagctagtgat

SEQ ID NO: 43366 - DNA, 71 bp, Zea mays
tctaactcgaactcctgaaatgataattcttgcaaacattgcgccaaatatcacgcttcgtgctgtctaac

SEQ ID NO: 43367 - DNA, 396 bp, Zea mays
  unsure (1)..(396): unsure at all n locations
agcttncctttaatcccgaaacgcgatatttctcttattggtgaaactttcaggtagacataatctcctacgagatagcataagggttgtcgtcgtcagtcggcataactcttttgacgaagttgcgctttcttcatattatgcattattttctgaactttgtcttcagtttcttttaccaggtcaggcctaaagaagaacctttcacctggttcagaccaatttagcggagtacgacatcgtcgtccatacaaagcttcaaagggtgccatcttgatgctttcttgatagctattattatatgaaaactccgctaagggcaaacattcatcctcattttgtgagaagtccagaacacatgctcgcagcatatcttccagtatttgattgaccctc

SEQ ID NO: 43368 - DNA, 354 bp, Zea mays
agcttgatgccctcattctcaagaaagccttctattttgagttcttgaactccgtcccattgtcgcttctaatctttttgatccttaagccgaactcattttgagcccttctcaagaatctctttaaggtctcttggatttgtgattcttcctgcaaaaagaacacccaagtgaagccagaataatcatccacaataactagacagtacttactcctgccgatgcttatgtaagcaatcgggccgaatagatccatgtggagtagctcaagtggcctgtcggtcgtcatgatgttcttgtgtggatgatgaacaccaacttgctttcctgcttgacatgcgctacaaaccctgt

SEQ ID NO: 43369 - DNA, 425 bp, Zea mays
  unsure (1)..(425): unsure at all n locations
agcttgcccagttgccctttagccatttcttacttactgacgcgatctgcaatcttgggccatttcaagcctatgaaggatttctcttgccatccncaattggatcttaatattgcccaccttagaatggccccaagagtgtatggctctaaacaaacgttatagctttaaagagaatctattctcaaaaccataagcatggagtgacagatcccaataagaagacaccacctcaagaaatcgaggcatatggatccaaaaactttcaaaatgaaacctttntctttcctctaatctcctcattcatgatgagggacggagggcagtgatcagagagataggaagcattacttctaagagtacaaatcggtgaacaaatctacccaagaagaagaacaaaagacatagtccagttttactaactg

SEQ ID NO: 43370 - DNA, 377 bp, Zea mays
gtccagaaccggagcgcctggccacaccggtcgttgggaccgcgtcgcgcgaggacaaagttctcgctcccaagacagaccagcggatctgcacccccgctcttcaaggcatagcaccctctgcagtcggggcatcgggcacctccttggctaaggaggcaagtttacgatcgcactataccatgtcgcaaaattagcggcaaacatctgtcggtaaaaataggcttgtggcgacagctagtctgtcacaacatattaccatcacagtatctgtcgggacttagtattttggtgtcaaacaaactggcggcaaaaatgtcgagctattgtgatagactatttgtcgcgataaatgattaatcgtgacacaacgtctg

SEQ ID NO: 43371 - DNA, 438 bp, Zea mays
  unsure (1)..(438): unsure at all n locations
agcttcttgccatctcccggcagacagagatcttcttgctgtctgggagacaatacaagaagtcttcttctccgatgccgttgaaaatcaacgccccttgggatatttcaatttttgggcatagaactgagcctcttgcttttctttttcagtcaactttttccccgaagcatgtcgtaaaatataattgaaagcttcggaaaatgcttcgggggcggcagtgccagtttcttcagccaaaatttgttctgttgcttctgtttctttggtttccaaggatttcaccttggcgggctctgaaggcccagcttcagtctcagcttggtgctttgtagcttcggcaccaaaggcttcaatttgcacttcaggagtttcggcaattttcttcggagtagtgcttgaagactntattgtctccaatacatccagtacattaac

SEQ ID NO: 43372 - DNA, 173 bp, Zea mays
  unsure (1)..(173): unsure at all n locations
ctgcacttgtcctttataataacaaaatattcgctctcattatggagcaatctaatggatcgattggtatggatttggctgaccaccttgatttggtgtgcaccacgctcatctcttgntgggaatcatttgtattgaaaaagtttgtgatctgaggtattttgtaaaaattt

SEQ ID NO: 43373 - DNA, 427 bp, Zea mays
  unsure (1)..(427): unsure at all n locations
agcttgntgaaatgtcaatgcttataatcctatcaaaactcgacaaagcaagaaagtttaaaatggcgagcacagtgtaagcaactgaaatagcacaagaaacgctttccatgcgagttcctatttatatgcctagcgccccacgatttgatgggttcggcatgtcagtgtcgttcgctattctagcgaagggaaggtgttttttcgaactttcagctaaaggcctttgttcacattgcagtctatatttgttacaaagaaacaaattaatactgcgaggggctactgttgggggcctttctcttccgaaggtcctcaaaaacgtgactaaccatatgttttcagcatgattatgaatagttacaggaagctttggctttgggatggaggacttatcttatgacanaacanagggaaataaagaatg

SEQ ID NO: 43374 - DNA, 474 bp, Zea mays
  unsure (1)..(474): unsure at all n locations
actctcacattcagacgaagctncagtttattgcctacttcgtcaaaagaaaagcttcgggagaagaagttatttatttcccaagaaaattttcaagaaattcaaaattaaatggccagagtgcgctctaccgctagagttgagcgtgagggagggcgaaccgaatgagcggagactgttcctatctccgaagcaatgcaacgatccggattggtgacctcggaaggaatcctcactgccgagacagaacagactgttgtcgatacagaacaagctgctgccgaaacagaacaagctgcttgcgaaacagaacaaggagatattgaggaagctgattctgacgatgattatcatattgcagtaccgagcaagcctagccatttggacttcggaaagtcgactatctncaaggcttgatttctcaaatggtgaagtcgggctatttcagtgaaaatgagaagaagctacttcact

SEQ ID NO: 43375 - DNA, 429 bp, Zea mays
  unsure (1)..(429): unsure at all n locations
agctngccaatattgatgttagatattgtgtgtgactcatgtttgatccaaccctaaattagtattaaagattagggtgttttaaatactcatacttagttatcttctggttntctaattatcagtttacagtttaaaagaaaaaccatggagcagtaatgggctgaaattccctctgaaagcccattactaaccagaaagtttgtacccataactgagtacaacagtcatcgtcttcactatgctataagcaccctagactcaaaaataattacgcaggaactcttactattattntatgtatcatgggtatttgcaccgaggtccttccctttggtttattcacaacttcggtccaagactgcacgcagacgacgaactcaggtcctaacctaagacgcgcaaaaaccggtggtcgatgaacctcac

SEQ ID NO: 43376 - DNA, 411 bp, Zea mays
  unsure (1)..(411): unsure at all n locations
ggtagctctcctcggtggagatattgcacgtacggggtctgtccagtttgatcaggcgtgaccccgctttgctccccctcgacgcgcagcgtctcaccctcgggggccgagggtaccttgggtcgaaccgagggtgcctcgggccgagccgagggtgcctcgggctatgccgagggtgcctcgggctatgccgagggtgcctcggggtgtgccgagggtacctcgggccgggccaaaggtgcctcatgctcgggcgtgtcgtcgatcttgacggagggttgatgcatatccccatagaaaacgtccggnggaaccgctgttcgccccgaggcttatttagccagttcgcccgcagtctcattgtagcgccgagcgatatggttgagctcgagcccgtagaacttgtctttc

SEQ ID NO: 43377 - DNA, 344 bp, Zea mays
gcacgccaagcaaatggcgcacgcagcgtacctaatgtgggtggtgcaagatcttatttatatgctcggcgcgccctgagttggacggttcctgctgtcattgactggtgctattctagcaaagggaacgcgttctttggaccttctgcttaggcccttttccatgtcgcactctgaattcgttatctacacaaattaatactgctaggggctactagtgggggtcttcatcctccgaatgtcctcacaacgtaatttaacagtgtttttcaagcttggtttatagacaggttccttcagattcaggattaaaggtttatactatgagaaggatatgatcgcta

SEQ ID NO: 43378 - DNA, 394 bp, Zea mays
  unsure (1)..(394): unsure at all n locations
ntctntcgcttgctctctctcttgtggcactagtgtaggctgaagtggtctaaatcttatgtatatgatggatcaatgaatagaggtggttgggagggcttggatatgtcaactatatgacttggaatgttgcttgggctcccacaccttgaagtggccgcgtgggtggtatttatagccaccaaccaaattgtagccgntggagaaagctgctggcggtgggcgcatcctgacattcctgtgcgccaccggacagtgtacggtgcgccgccacgtcacccttgcgttagggtttggaactgtactatcgttggaagctttgtccttttgcggtaccagacaatccgggcccctctgacgtaaagttctgacatctaccctgttactgtcctgc

SEQ ID NO: 43379 - DNA, 236 bp, Zea mays
  unsure (1)..(236): unsure at all n locations
atctctgagtcacctgcggcatgcaagcttcngctcggtcaggggtagctctcctctgtggatatattgcangtacagtgtctgccagtgtcgattatgcgtgaccccgcttcgctcctcctcgacgcgcagtgccttaccctcgggggccgagggtacctctggctgatccgagggtgcctctggccgagctgagggtgcctcgggccgagccgagggtgccttggactgagccg

SEQ ID NO: 43380 - DNA, 358 bp, Zea mays
tctagagggagaacatgtgataggtctaaccaatgttcatttctaaaaagatagaccttgtgcagcttgtcaagcagggaaacaggtgggaggagcgcatcacagcaagaatgtgatgaccacttcaagacccctggagctgctgcatatggatctcttcggacccgtcgcctatctaagcatagggggaagtaagtatgggttagttattgttgatgacttttcccgcttcacttgggtgttctttttgcaggaaaaatccgaaacccaagggaccctcaagcgcttcctcacgagggctcacaatgagatcgagctcaaagtgaaatagataagatacgacaacgggttcgagttc

SEQ ID NO: 43381 - DNA, 459 bp, Zea mays
  unsure (1)..(459): unsure at all n locations
agctnggtgccaatggagaagcacaaatccttgtagtcttgtttgtctaactgcttgacgttgtcgactgttaattctgacggtactcccaagcggcaaacaatgatttgccaaaagaatttctgtgcagtctttgatgttattgtggaaacaaccctcgcctcgatccactttggtaagtactccacagcgacgaaggtgaacttgaagttcccatgagccgtgggcaggggcccgacgatgttcacgcctcagcgctggagaggccatgtgtgggcgatcagctttgtgaattgcgaggggctgtctgatcgacaagaatacttctggcaggcttcgcaggaccttgtgacccgatttgcggcgcagatcattgcgggccagtagaaaccttggcggatcacctttgcggctacgggcctctgccctgcgtgagagccgcatgtaccactgtggact

SEQ ID NO: 43382 - DNA, 449 bp, Zea mays
  unsure (1)..(449): unsure at all n locations
ngtggaggatcgaatcattgaagcatataagtttctggatgagaagtggtcacccaagttctgttgatgaagcaccacaagactaatcaaggaaggaatccatgagggagttcgcaagagaaaggtttgtgtgttggcatcgatgcttcttcaataagctagctgccaagcgaaagctgaagcctgaagatgatctttgagtagccagaatcagcgcttgcaatcagcaaccagatgctcctcataggccggattttgttgaagttccatctcctcgaagagtctgcaaagtgaagatatgtagctgaagtaaagctatacccatagcccttctaagccaaatcttcaggacgagattccttttaagtggcgtagatttgtagcattccataaattcaaattctgaaatcntctcaaactcgccctagattcagaatgaatttcacatt

SEQ ID NO: 43383 - DNA, 244 bp, Zea mays
tgtctagcacgtacacaaacgggaggagcacatcacagtaagaatgtgatgagcacatcaagacccctggagctgctacatatggacctcttcagacccgtcgcctatctgagcatatgaggaagaaagcatggtctaggtattggggacgactaatgcacgctccacttgcggtgttctttttgcaggataagtatgaaacccaagggactctcaagcgctatctcatgagagctcaaaatga

SEQ ID NO: 43384 - DNA, 432 bp, Zea mays
  unsure (1)..(432): unsure at all n locations
gtctataaggtggnacttcattttctgcagtgtctttagaaacatgcccttcggagcctttagactcatcggaggtcacctctatcnctatttcaacaagaccggcggtattgttgagaacacgatatccatgcacatttgatgcataaccaagcatgaagccctcgtccactctaggagcaaactttgagctcttgactcttttgttaagaataaagcatttacaaccaaatactctaaagcaatcaactttagggttgttaccagtgagaagctcgtaggcagtcttcttgtagatcttgtgaagataaaggcggttgattgcatcatatgcggtggtgaccgcctctgcccataaattgcaggggtcttgtactcatcaacatggtctagcggttcattaggtcggtcttctttccaaacacatttgtg

SEQ ID NO: 43385 - DNA, 368 bp, Zea mays
cagatagcctcttgttgtcaggcaggcagtataagaagtcatcttcattccttccattgaatattactgcccccttcggatattataattcctttgcataaaggatggcttcatgagattcttcttcagatagcttcttccccgaagcatgtcgtatcatgtaatcacgcatgctggcaggtgctatcgggatggcggtgtcagattcttcaactaatactggatctggaatatttattgcttcggcttcaaaaggttgctccttgcatggctctgaaagcccaccttcagctttaacttgatgagccgaagctacagtagaagcttcagcaatttcaacactcttctttggaattgtgcttgaagac

SEQ ID NO: 43386 - DNA, 409 bp, Zea mays
  unsure (1)..(409): unsure at all n locations
tcggctatgatggagaatttcggcagcacaacagtgcanatatcaatgaatgctgtggtaacttcacaactacttgtcagtttatatagtgctgcaggtaagaaggcgaagcggcggaattgttacaccaggcgcgcagtaacttgtacccgctgcgcagtggaccgcaaggatcaaatagtaactctgctaggtgggaccgacacgcgctcggaagtcggatcgtttctccgcaacgagctcagggaaggtgttttttggaccttcggcttcccgaagctgaagaggctntnttcacgggtcaagctcgttacgaagaacgatctatcaccgcgaaaggggctactgttggggtcgtgcttctgtgcgccgaatgtctcacacgaagaagcagcttcggctgaagtcg

SEQ ID NO: 43387 - DNA, 447 bp, Zea mays
  unsure (1)..(447): unsure at all n locations
ggatcttaagcacctgcggatgcgcttaattcaatcttagcaaaatggttcattcgttccagctcatcaccttgaggagcaccagttctgttcgtctccaagaacgatggaagcatgagaatgtgtatggattatcgatcgttaaatgaagttaccatcaagaacaagtacccacttcctctgattgacgacctcttcgatcagcttcaaggagccaagtacttctccaagatagacctaaggtctggntaccaccatatgaggatcaacgaagcggacatccaaaagactgcatttgtcacccggtacgggcaatatgaattcacggtgatgccgttcggactgacaaacgcacccgcctttntcatgaacctcatgaataaagtggttatggaagagctagataagtgtgtcgtagtcttcatcgacgacatcctnttattactc

SEQ ID NO: 43388 - DNA, 426 bp, Zea mays
  unsure (1)..(426): unsure at all n locations
tctgcattattntcaagcattccatataattgttccttcatcacagccactgaaggatattatgaggaatagagaagcactacaacacaaaccctcctatagcaacgcatctgcagcaacacatggttttatgcgttgtaagaaattagcaacaatgcttgattgtgttgcaagcatcatctattatgttattagagtagtggtaatgcttaatatgtgttgctagcactatctgctatttaaataggatgtgacaacacttaatatgtgttgctagcggaatttattgattaactagaatgtggcaatagttgtgtcgctagtaatctcttttattaaaattcaagaggattctcggtgcgtgagagcagccacgtattctagaaataatcagtcgtctgatctcgttcaacgctcacatatgcg

SEQ ID NO: 43389 - DNA, 367 bp, Zea mays
gctgcatttgcagcgctctgcttaacaacatactctgtacaaataaaccttcatcagcacacttgcctcatccgaaagagaataaagaatatacttgcttcatcacaagaattccaccttgaagctggaataaaacaatctacccacgatatgatgtcgccagtagctgctaatatcagcttcgagcatccgagaaccgacactctttgagagagtgtcgaatatctttgccccggagcggtcgtgtcacactcgagtattggggcaccaagacccgggccgagcataatcaccaggtgtgctttgaccaagtctcacgcatatgatgaattacggcccatgatcgaatgtcacatcttctttatat

SEQ ID NO: 43390 - DNA, 420 bp, Zea mays
tttcatggaataaagccgcttccttcatatttatacagttctacaaagagctattggacaggctaaccagctcaacatagagctttatccattatgagaatgtctgcaatcattcagctaatgatattacagattcaagaatgcattggacgtttttttcacaatatgacacacgatgatagtaagcacaacattgaagatataaacttacttcgagtttactatataaacacatgctgcacttgacttagcccgtataaagtaccctgtaacacaaataatcggctagcatcagtggttgagaacactcatggcgatgcgactatattatatcctcaacgttacctccagattttgaatatcttggtggtggatgctggcattgggatgcacccaatttcatatcatggataacccgtt

SEQ ID NO: 43391 - DNA, 371 bp, Zea mays
agctcgacccttcttctgatgcactgtttctttcttcatttgcctttatccaatatatgactaggtgtataatgcacgcgatcgctgagaaggctgataggagtgacattcctgacatcgacaagaaaaagtcagttctcaacttttctaagttaatcataagttcataactgctatacagatatgttcatcttcacatgtttatgagttaatgccagtgagatttctacgtttcctgataactgatggacatggtagctggtgccatccattttgcattatattgggctgcccttatataactgcgcaacagtattgcattgtggctgcttatgcacatatattatttcagtccattactacatcatgat

SEQ ID NO: 43392 - DNA, 419 bp, Zea mays
  unsure (1)..(419): unsure at all n locations
tcaggtcacgagagggcgctntgctctctctctgtcccgccctcaccgcggccgccgccacgacgacgacgacctgcggtgcgcctgtgcctgtgttcggatcgtccggcgcctctccgttggccactggtgaggaactccgctcctttctcgagctcccaactgctgtttgctgctagctctctacactcacttcgatcgcgtcgtcctgtgatttgatgtatcgagagaagagatagaggtttgcgccggagctggggtgcgcagctgcgagctagctgatgagtggtgtcgcttgtgtttgtgcgcttgcttttttgtatgcgggtgggtggcggctgccgtgtgttgctgtgtcactcgtcgctatagctgtctcgctttgcggaggtggaagctcgtatgattgctttggctta

SEQ ID NO: 43393 - DNA, 402 bp, Zea mays
  unsure (1)..(402): unsure at all n locations
gacccggatctctaagtcacctgcggcatgcagctagattcgcttagtttatcttctgtagttcaacggagtcgnggagcgcgccaatgggataattttcacagatgtcaagaagatgctcctcgatgaacataaagacagatggaccgatttgttacctgaggcagtatgggcgctaaacacaactgagtgcaaggcgactgggttcacttctttccgacttctatacagatcggaggccatgaccccgtcagaaataaagcatgggtcctcgcgtacagatccgtcagccgtccccgacgtggacgagcccactataaaggatctcattgatggagaccgggtcttcgccctacaggccctatacaaataccaagcccagaccaaagcatggcgcgacca

SEQ ID NO: 43394 - DNA, 360 bp, Zea mays
  unsure (1)..(360): unsure at all n locations
tgcaacactntggaggatattngaatgggagtcacaactccttcacaaatgaacacaaggatgaagcacacactatctctcaatgtatctcacaaggcactatggctaaactcaattgagtagctctcaattgctcgctctctcttttgtggcacttgcgttggttgtagtgggctatatcttgtgtataggatgtatcaatgaatataggtggttgggagggcttgagtatgtcaactagatgacttggaatgttgcttggactctcctccttgaagagagcggttggggtggtatntatagtcaccatccaattctgtagccgttggaaaactgtggcgatggcgcaccggaaattcg

SEQ ID NO: 43395 - DNA, 482 bp, Zea mays
agctagagaagaatcttcatcccaacatgggctatacggcggagccagagccaacccatgtgtagggtagcaattaagcatgtgtcgagttcagctctatcaaaatctactaagtatagctgaccctcttacacacccttaaatgctattgaatcatcacttcttctaaagacagggacacctatatcagtaaaaagaccgtcggagcccatttgacataattgtgaaacggaaagcatattgtaatctaaagaatctacaagaacaacatcggaaatagaatggtcgggtgatatagcaattttaccaagtgctctgaccaaaccttgatttccatccccgaatgtgatagctcgttggggatcttgtgttttctcatatgaagagaacatccttttctcccctgtcatgtgggttgtgcacccgctatcgagtatccaaccttgaccccccggatgcataaacctacaaaacacatttag

SEQ ID NO: 43396 - DNA, 366 bp, Zea mays
  unsure (1)..(366): unsure at all n locations
tggacgtaaagagtgctttcctcaatggaccaatctatgaagaggtctatngtgagctacctcccggctntgaagatagtgagtatcctaaccatgtgtataaactctctaaggcgctntatgggctcaagcaagccccaagagcatggtatgaatgcctaagagatttccttatcactaatggcttcaaagtcggaaaggccgatcctacactctntaccaaaacacttgaaaatgaattgtttgtatgccaaatttatgttgatgatattatatntgggtctactaacgaatctacatgtgaagaagttagtaggatcatgacacanaaattcgagatgtctatgatggnggagtagaagtact

SEQ ID NO: 43397 - DNA, 493 bp, Zea mays
  unsure (1)..(493): unsure at all n locations
agctntaccaaatggacgtgaagagtgccttccgcaatggaccaatcaaggaagaggtctatgttgagcaacctcccgactntgaagacagtgagtatcctaaccatgcctataggctctctaaggcgctttatgggctcaagcaagccccaagagcatggtatgaatgccaaagagatttccttattgctaatggcttcaaagtcggaaaagctgatcctttatttactaaaactcttgacaatgatttgtttgtatgccaaatatatgttgatgatatcatatttgggtctactaacgaatctacatgtgaagaatttagtaggatcatgacatagaaattcgagatttcaatgatgggggagttgaagtatttattaggatttcaagtaaagcaactccaagagggcaccttcattagccaaacgaagtatactcaagacattctaagcanagttggaatgaaggatgccaagcccatcaagacacccat

SEQ ID NO: 43398 - DNA, 489 bp, Zea mays
  unsure (1)..(489): unsure at all n locations
gagaatgagatgatatgaaactntgggtgcttgagatagtcaagtcaattcgcattaactcaagctatcaatctacaatgatctacatatccaagattgacccaaggttatttcaaattattatgtctaaaactcatatcatctcgggaagatattgatgttgtaggaaacaaagaactaatcccatatcgaaaagtcaagacctacaacatggaggaaagccaaaggatggtaacaattatgttttcaagtgcaagtatctcaaattatcatttcttatgtgacttgtgtagtcacatagaanaggaagcacttaaaatgttcttataattatgtcaccattccttgaagatattcctcccatatggtagattgtatattcatcnattttatactatggcaattntcatggtttaaattattaacanatccatggcatggtttacacttattatcttattanttgccatgttctagatgtagagagat

SEQ ID NO: 43399 - DNA, 487 bp, Zea mays
  unsure (1)..(487): unsure at all n locations
agcttagagcaatggtgggcaataaggcaagagttgaatgatgtattgcannaacaattaaactaaaggaggtagcacacttcacaagttgttactttgtagaagaacataatgtatttgctcaaaagaaaaggtaccatgatgatgaatgagagatgcctctgtgtagtgatctttcgattnttcagacaaacggcaaagccgttggtccacccaaggcatatcacctcagtatggaagaacggaagtctgctttactgtacatgttcacgaatatgcctgaggtggagaaatactttgtgtaagacttattttcttaaactgttcatatgtgaattagtttatgttatcaaatatctcatgtcatacaataatatttgacagcgagtntgatgaacataacatgatgtgtctctgttggcccacagcgagagacatagatggtatgcatgggcgacctaattacattatgtggctttgggatcat

SEQ ID NO: 43400 - DNA, 351 bp, Zea mays
  unsure (1)..(351): unsure at all n locations
aatacatttcgtatccgatgttcttagtttgtcgaagaaaattatacagaattggagaaggtactgtatgctgttttgatggcctccaggaagcttcagcattattttcaagcttacaacataattnttccttcttcgcaacctctgaaggatattatgagaaaccgagaagccactggaaggattggaaaatgggctgcagagctcaatgaattntgtattgattatgttcatagatcctcgattcagtcccaggcgttagcagacttcattgctgactggacgccaggggctcatgaggaagaaacaaataaagatgacgaagcatggacagtgttttgcgatgggtct

SEQ ID NO: 43401 - DNA, 471 bp, Zea mays
  unsure (1)..(471): unsure at all n locations
tctaagcacctgngctgcagcttaaccctgcagacctttcccatctctttctaaccaaggtaaatgcaatatcgcatgtcatattctatgcatgtntaatctacttgttctcttgtatggtgtactgntggtttcctaatttcaatggatggatgtatgtatgtttgcaaccgcatagagaacgatccggtcgaagagcccgaagaactcgcatgaaaagcccctgagcaccagtccgttggtggaggcaagtgtcccttgacctatctctngcctattcattctttaattcacctcccgcattacacatttatacctaaggattgactagcttttgttatccatgtcccttgttacctatttgggttggattattattggttagctttatgctattgcccaactataatcaatgaacatgatgagattatctatgatccgctgtttnccatctcttatacgatgtatact

SEQ ID NO: 43402 - DNA, 352 bp, Zea mays
  unsure (1)..(352): unsure at all n locations
gctatagagtattcacanaactcatggtattattgaggaagcatatgatgttgaattctatgaaacatatgggtctcaagatgagagtgataatctcgatgatgttgggggaactcaattgataaatgcaatgaaaacaatggccattggtgaaataaaaccaaaggaagatgatgatgaaaatagtggtggtgtcattccttcatcctcaactctaaatgaggaagatcaccaaagccaacaacataatgaaaccatggatactcatgatcaaggtacttcaagaccttcggntcctcctaatgcttcaactagcaattatcaaacggtatcaagaattcatcattccatt

SEQ ID NO: 43403 - DNA, 452 bp, Zea mays
  unsure (1)..(452): unsure at all n locations
agcttcggattacaaccgacttaaagatagaatgatcttttagtccataatggtctgagtcaatgtcgtaagctttcataaggggcatatttgtaattcctcacaggctgcgtcctgtgcctataaatagtgaacagaattccgttactgttcacgcactccagcattggcgattgcatcatttgggaaccagtctttgccaaggcacagcattngagaacaagtctccaacacatgctcagaatttagcttgaagtcgatgttagttcactgctagtctgaaaattcagaccataacagcctgacaatccaactttgggcataattatcttccaatttttcacaagaacatggcttgcactcttaagcaaacttgttcttctataattgggcctacaatttgatgtggtgacctaatatgaattcttactattttgaaagctacacagccc

SEQ ID NO: 43404 - DNA, 422 bp, Zea mays
  unsure (1)..(422): unsure at all n locations
tactaatgagcacaaatntcttaattcttatacaaatcaattgcaaatacttttctaaacttatatatgctaataaaccctatttatgcatattaaattaaggcacgaacattntgagcactactaaattaaatcaaccccttttgtcttattcaaatttatactattntatattggttcattgccttaacttatgagagcattcaagatagagcacttaagtaatatttatgcttgtctttgttacctcatctatgcttgtaacattatctaattccaataatttctttatttaaatgctgtaaaaagaaaatatgatatangtaccaaactttgtatgcaaattaattactcaccctaatccttaagattgaaataagattagtaactaatgaatacatataataaaatttgagtaacaa

SEQ ID NO: 43405 - DNA, 368 bp, Zea mays
  unsure (1)..(368): unsure at all n locations
cttgatcatttgtgtcattggagctcactcgacctcatccaatgattgcccaaattataaattgagaaagatcttgtctgtcacccttgtcgtcatggcaaaatgattgccgcttcccattccccggtcaccaaggtgatgacctcgcatcctggtgaattgcttcatatggacattgttggtccacccagggtttgctcatttggagggaagtggtatgtgcttgtggttgtcgacaagttccctcgctactctngngtgttctttattacgacaaaggatgaggcttttactcatgctcgagatttattcttcggttgcaaaatgagtttcttaatatatcgcgagagctctatgtagtgacattg

SEQ ID NO: 43406 - DNA, 373 bp, Zea mays
gaataacatgcgactagatgagacacacgccgatcttcgatatgccacccaagagcagccaagatcttctttgcgaagaacagtacctttggcaactaatgataatgccggagaacctcgcccatcacatggacgatgtcagtgtaaacacctgtctgaaacgtcgtgcgtcacactatcgcataaccttgcgaaactcccataactcacatctgaatgtgctcgtgcaggctctcttttaccgcggcgagtatctggaagaatatcagagcattacgaggatgctgcacagcgtcctcaacattcatttcaacatccctaccaagagcatgcaacatgtcacccatactatgatgatcatgattaagcatca

SEQ ID NO: 43407 - DNA, 433 bp, Zea mays
  unsure (1)..(433): unsure at all n locations
ntnntcggcggcatgacgaaggtgatgcttgccgaaagtgttttatacttataaaatggaagtgagttcaccggaggtgggcgccaatgttggggacttgttctcaaatgctatgaatcaagaacaaggcaacataaaatgttaaatatcgaaagcccttcgtctttcaaatcattatttcccttcggatataacgaatttaggacgaaggtcatgaaagacgtacctccatgatcatgataaaaataaagaacattcaaacaaaatacataaagtaacataatttctgtaaacattattattaatatatttctatttgtattacttgtgtagataaagataaattacaaatgtaccttcggcttgaaggaaagaaaatagaggcgtgacgcgaaaatgaatgccaagttagcgtgaacagtacgagaatact

SEQ ID NO: 43408 - DNA, 431 bp, Zea mays
  unsure (1)..(431): unsure at all n locations
agcttatgccgagattaaaatatgggcgctgttttattcaaatcattcttatttacgcgtgtggctaagcaataataattttgccttgagtagcgaggcggcgacatgccgaagtactcatcgcttcctctatgttgataagtcgaggcaaaatgcggcgtactagtagtacgctagacaggcgatgttccaaatagataaatcgggtgatgtggtacttgtcaagcgtgacagaggttgagtcacttatgttataaatagacgctcgacatgtgaggtctactaanatatggtgtatcaagtgactggtgcgttgtccatattaagttgagacaatatgtaagaaacacgtaataacctgctcccatctatgtttctgagtcgccagatctacaatactgtgctgagtggcatactggttaaccaacttg

SEQ ID NO: 43409 - DNA, 372 bp, Zea mays
  unsure (1)..(372): unsure at all n locations
cacttgatcaactcatctggccactntcctctaggctggttgaagattaacttcattattcctgtcattataattccatttgctctctctaccaaaccatttgattctggatgccttactgatgcaaaatgaatttttgtaccaatttggtcataaaaatctttgaacgtttcagcatcaaattgagttctattgtcaatagttattgccttcgacacgccaaagcgacaaacaatatttcgccaaaagaatntatgtactgtggctgaagttattgtggctaagggctntgcttcgatccatttagagaaataatccactgctacgacgaacatattcanattcccttatgctggtggaagtggacctaac

SEQ ID NO: 43410 - DNA, 357 bp, Zea mays
agcttctgtctaccgaagcaaccatcacatgtattgttataatagcctctctatatcaaaataaaataaggtttgcttctttagtggatttatcatcgctgacacaacccaaccaagtcatcgctgtcacaataaccaatccggaacataaactttaaaaaacatgagttgagcggaagtgactgggccgaaaccgacccgctcgccccacgaacacatgagaaaactggcatcagctaaccgaataaaggtcctatgtgatatttgattgtttcactgacattagcactgagatccctgtctctttgcttattcagaaactcaagttcacgatagtgactccggcgaccctaagtc

SEQ ID NO: 43411 - DNA, 403 bp, Zea mays
tctagctagtaagagaagagatctagctagttctagtgcttcttcatcatcttcttcatcatcttcttcgcttgctggagaggaggcacggccgcgcgggccgtgggcgagcggccgagcgtgctgcggtgctggagagctggagcctggagaggacagaggagggcaggagccgcggtcgaggcgctgcggcgctggagctgaagaggaggtgcggtcgcggtaccaggacgcaggcatgacggcaggagagccaagcggcggcaggagctagggttgaggctgggcgcgactatgggcgggccgtgactttcgatcggcgctgcagcccaggcagcccctggtggagatcctgccctgatcgttgtcatcaaggatgcgaagattcagcggctccgacttc

SEQ ID NO: 43412 - DNA, 311 bp, Zea mays
  unsure (1)..(311): unsure at all n locations
acaaattcaagggaccatttcaagtgccttgcccagaatggctggacacaatcgaagtaatgtgccatgaaatactcggcaattactctaaaaaagaagatcagttgatgactgcggcctttggcacccgtccgaagcgaagactgaactgagtaatggatgctattgactttgaatatcccgactacgagcggctagataagggtgccgaagggcaaaanaggaagaaagtggctgatattctgaataaagatgatgaagatcaattgaaaaagaanaaaccaaagcccgagccaaaacagatgcttaaa

SEQ ID NO: 43413 - DNA, 400 bp, Zea mays
  unsure (1)..(400): unsure at all n locations
nggtcattntattgctaactgtcccgacaatgatagtgatcttgatcaagggaacaagagggagaaaaagaagaactataagaaggcaaagggcgaggctcatcttggcaaggagtgggattcggactgctcctcgtccgactccgacaatgaaggactcgccgccaccgccttcaacaagtcatccctcttccccaacgagcgtcacacatgccttatggcaagggagaagaaggtatgtactcgagactctacttatgcttcttcaagtgaggacgaatctagcgatgaggatgaaatagattattcatgtctatttaagggcctagatagaaccaaggtagacaaaattaatgaattgattgatgccttgaatgataagaatangcttctagaaaaa

SEQ ID NO: 43414 - DNA, 461 bp, Zea mays
  unsure (1)..(461): unsure at all n locations
agctngaacccttcttctgtatgcactgtttctttcttcattngcgtttatccaatttatgactagttgtataatgcacgtgattgttgagaaagctgagaggagtgacattcctgacatcgacaagaaaaagtcagttctcaacttttctaagataatcataagttcataactgctatacagatatgtgcatcttcaaatgtttatgagttaatgccagtgagactnctacgttttcctgataactgatggacatggtagttggtgccatccattttgcattatattgggctgcccttatataactgcgcaacagtatcgcattgcggctgtttatgcacatatattatctcagtcaattactacatcatgaatcattgcacaatagatattgttcgataattggcacaaattgacactattccttactaacagactggttgagttgaatatttactatg

SEQ ID NO: 43415 - DNA, 386 bp, Zea mays
  unsure (1)..(386): unsure at all n locations
tcaggtcacgagaggggcgcttgctctctttctgtcccgccctcaccgcggncgccgccacgacgacgacgacctgcggtgcgcctgtgcctgngttcggatcgtccggcgcctctccgttggccactggtgaggaactccgctcctttctcgagctcccaactgctgtttgctgctagctctctacactcacttcgatcgcgtcgtcctgtgatttgatgtatcgagagaagagatagaggtttgcgccggagctggggtgcgcagctgcgagctatctgatgagtggtgtcgttggtgtttgtgcgcttgcttttttgtatgcgggtgggtggtggctgccgtgtgttgtgtgtcactcgtcgctttaactgtctcgctcttgc

SEQ ID NO: 43416 - DNA, 341 bp, Zea mays
  unsure (1)..(341): unsure at all n locations
cagctnntcagattgttaaagagtgctttcatattatttgttaaactccagctatgattgttctactgaggctgttcctgtatgcctgacaaaaatgagtgggtctgctcactggtgggtttcatctagtaaatggccgaattggctcttccaactatgaagacttttgtagagggataaaagttcttacttccagcagaacttcataacttttggttcagtagtttgggagatatcaaattagttaaccatactgctgtctaaaacagattcagtcagntatcttgtcagatgtttcagaacttgtagatggcagaatttaattatccattgaatactga

SEQ ID NO: 43417 - DNA, 413 bp, Zea mays
  unsure (1)..(413): unsure at all n locations
taaccttgtaacgaggataagctaccttgttccanaggtggatggtccttaggtctctntgaaatctttaaagaanaatgcttaaaatgtttgcaacatgctntcataagtgcataaactgtcttgagcatcacacatatattatgacacaatgcacttcactttctctatgatatagacttgttctcattaacctaattatgtgcaattggcatttaaagccataatatgtgttcctctccatgcacatacttagggggagcaatctatgttatatagaattatgatcatgcttaatttgacatatctcttgatcatatctctntcattttggtacaaatgcatatatnctattattcccgtaccatgactacgactaatatgtntccaagtatattactatgcgtagtcgt

SEQ ID NO: 43418 - DNA, 499 bp, Zea mays
  unsure (1)..(499): unsure at all n locations
agcttctaagggaggcttgcagtngaaaaacgtctatcttcggcaaatgtcattntgcataacatcacatcattacatcatttgcatagcataacatcatacatcatattgcatcaacaacgcaagaagggggtctcagtagatattcgaagattgtttcgaagaaatagtgacagggcacaaaaaatagctattgaggaattataccttcgtcaaactctgaaatgaaaagatctattgattattgattttatgaggattggttactgattntatgagaacacagatattatttacgaagcatgaaaagaagggaaggtgttttttcgccgaaggctcaaaaacggtatgtatatgaagtttcatgcatcgtaaagaatagaaccataaatagctaatatattacattcaaagttacaaaatgttacacatgtttctcaacaagcattacattctaaatgtntttacanacagcattaatcttcccttagaactactt

SEQ ID NO: 43419 - DNA, 482 bp, Zea mays
  unsure (1)..(482): unsure at all n locations
aaagttaatattattaggtcatgaatgtgattaaggacacacttgcccgtacgttgctacgaaattgctttatgaattgcttanggctcatgaaagggattgttgattgtgagacattgtataagtccctaataggtatatgctcgtacgttgctacggaatcaatattaatacattgatatacaatgtctcacaatctagcataagtaggaatgattgtataaagcagctgcggccattaaacaaagatgggatggataataatacatgtttcagagaccatccctttcatcagttctaggctatcaggcttgtcattgcgcttcctcggtccatgcgttaattcatagctcatgagagatgaacgctacgaaggaatacaagatatctggngatcacctttcatcgaatgcttaaaccagatcttcaactcagttttaaatttggggtcgatatgatctcgttatgctactttatatata

SEQ ID NO: 43420 - DNA, 484 bp, Zea mays
  unsure (1)..(484): unsure at all n locations
gcttcaactccatctatattatggatggccttgttatcagtccagcttccttcggcccttctggcagcttcctgactcccatgaatagcaataggcccttggtccgaaggtatcttcatgcaaagataagctgggtgaagaattgcttcaaaagcatttatggtaccacgaccaatgatggcgttgtaggggtattccatgtcaacaatatcaaacacaatttgctcagtccttgtgttattaacaaatccgaaggttaccggcatggtaatcttcccgagtgccacaatctgccgccctccgaagccacaaagagggtgcgtagcatcatgaatcttgtcttcaggctcttgcatctgtctgaaggctttggcaaatataatgtcagctgcactgcctgtgtcaactangacattgtgaaccagaaaccctttgatcacacacgagatgaccatagcatcattgtgaggatagtccttgagct

SEQ ID NO: 43421 - DNA, 469 bp, Zea mays
  unsure (1)..(469): unsure at all n locations
cttgatacacggattgaacatcgccatatcactgggcgtcaagatattgatggtatatggagattctctggtagtcatcagccagataaacaaggaatgagattgttcaagtgattcaatgggaaaatactgcgctgccgtccgaaagctggaagataaattcgagggtctggaatttcatcatatagaaagagatcggaacacagcagccgacgtactgtccaagctcggatctggccgaactcaggtcccacccggagtcttcgtgcaagaaattctgcagccgagtatctcaatggatcaaacagaagaatgcaacgtcataaatcaacccgagtcgaactctgatgactggagaaggctgattattaagtacataaagaatgaagaagaaccagatgacangaactcggcagagcgcattgccaggcagtcggctcactatacactcattgtngaggaattgtac

SEQ ID NO: 43422 - DNA, 419 bp, Zea mays
agcttatggaggttcttcatccacacatgtgcttatcggtgatgccacagccagcccatgctagtcttagctattaagcatgcatctagaccggcctcttcttttgcaaaatcaactaaataaagtttgccgtctaatacacccttaaaagctagtgaaccatcacttcttctatagacagacacatctacatttgtgaatagacagttataccccatattacataattgactgacagatagcaatatatatccaagcgactcaactaaaaacacattagatatggagtgctcgttagaaattgcaattgtacctaaaccttttaccttgccttgattcccatcaccgaatataattgaatcttgggaatatttatatttgacgtaggaggtgaacattctcttcttccccgtcatatg

SEQ ID NO: 43423 - DNA, 406 bp, Zea mays
  unsure (1)..(406): unsure at all n locations
gcttaactccatctatgttatggattgctntcgaatctgtccaattttcttctgcctttctggcagctttctgacttccatgaatggcaataggtccttgatccgaaggtatcttcatgcacagatatgctggatgaagaattacttcataagcattgagagtaccacgaccaatgattgcattgtaagggtactccatgtcaacaatatcaaacacaatctgttcagtccttgtgttgttgataaatccgaaggttaccagcattgtgatcttgccaagtgctacaatcttgcttcctccgaagccacaaaggggatgtgtggcgtcatgaatcttatcttctggctcttgcatctgtctgaaagccttatcaaatataatatncgctgcacttgctgtgtcaac

SEQ ID NO: 43424 - DNA, 366 bp, Zea mays
  unsure (1)..(366): unsure at all n locations
tgtggaccagtggcataccgactccagttacccgaaacattgtatgttgtacataatgtgttccacgtgtctcaattaaagaagtgtcttncggttccagaccgaactggtgaagtaacagatgttgccttagaaccagacctgacatattcagaacattctgtttgagttttggatcaaaaggacaggattacccgaaggagaactctcaagttttacaagatacaatggaaccaatatacgggagatgaagctacttgggaaactcaagactttttagataagaatttcctanggcttttagcttcatgtaaattgtaagatgtgtacaattgttgtaatanaggaatgaaccccataccaccc

SEQ ID NO: 43425 - DNA, 430 bp, Zea mays
tcagcttcgcatctgattgaagtgccctgaaggaagaaattattctgttctccactcttcactgtgcacaggagaaatagtaagaactgctctttcaagtaactccactgaaggtgcctatattggttcgaagaatacatccgaaggtagcggcagcccctgtgctgctgacctggctaacaaatcatcatgttcattttgccctcgagggatattcttaacagaaaattcttcgaaggaagcttcgatccttcggactgtgtctagggatttttcaagctatcggtctttagccttgcaactttcgtcaatatgacccgaaacaatctgagaatcagttttaaggatcgccctcctgatcctcatcgcctttagtttccgaagactcaggagcaagggcttgtactcaccaatattatttgtgcacttg

SEQ ID NO: 43426 - DNA, 442 bp, Zea mays
ggatccttaagtcacctgcggcatgcaagcttatgatattatctacaacttctcttgtttttcaaagtttaacttctgtgattgaattgcctaaatcttaatagaacagactctgcacagaattaggagactgaataactgctataatcaaactggcataactgtttgatctgatgtccgattgaggtgttctttgcggccacggatagatctactaattatctaccactcacagatagactttttatttttttgaggctacttatataccagaatacttgcctgaacagaaactatcgaatatgtcattctgcaaaaactaaattcgagattataatctaaccccacatctaatcgaacctctaacctttaatccccatgattcaaaacctccgaaaaaacacttaattacagggaggaacaaggatcccatccttaccta

SEQ ID NO: 43427 - DNA, 485 bp, Zea mays
ctcagcttctagataagggatgatggacatagcgcgttgcgtggcactgtcgcactgtttgacaatggactagacaggtgcgccgtctgcaggatggccctggcgctgcctgccagctaagtcgacaggacgcattaaatactgagggggcacatcgcctgtcagcagggtggacaggcggcgcgtcctctctgcaataaatgcagagaccgtgcgacctaaaggacttacgtcaggctccgcccatcggcttatgtcatgggctacaaaccacgtggcagcatcaggtctccgtctgagcggggagcgcatgcgcacaggataaggcctggacatgtgtcagtaccggacccttgcttatgccagggtctcccctatcccggaaccctattgtggcccggaccttactcagagggatctggaccccatccgatggacctggcatgcttacttgcgagttctgggccgtaattggcggactgggt

SEQ ID NO: 43428 - DNA, 482 bp, Zea mays
  unsure (1)..(482): unsure at all n locations
taaccttgtaacgaggataagctgcctntgtttcanaggtggatggtccttaagtctctttgaaatccttaagggaaaatgcttaaattgtttacaacatgctttcataagtgcataaattgtcatgagcatcacacttatactatgacataatgcacttcacaatctgtatgatatagatatgttctcattaacctaatcatgtgcaattggcatttaagaccaaaatatgtgttcctctccatgcacatacttagggggagcaatctatgttatatagaactatgatcatgcttaatttgatatatctttttgatcatatctctnttatatactatgactaatgtgttttcaagtgaatttcaaaccaagtcataggtacattgaaagggaattggagtcttcggcgaagacaaagcttccactctactctatncggattatctacccttcgccatcactccacaatggctctctatctt

SEQ ID NO: 43429 - DNA, 422 bp, Zea mays
  unsure (1)..(422): unsure at all n locations
agcttctctgctgcctggccaagaataaatatgtcttcgcctggtccgccctagacctggtcggagtcagtcgatccataattgagcacagcttgngaattgacccttcggtgcgaccaaaaaagcaaaggctccgcataatgtccgacgaatagacagaggccgccaaggcggaagtgcaccgcctcctagaagctaaattcatcgagccagtggcttaccccacgtggctctccaatgtcgtaatggtgcagaaaaaaagcgggaaatggcgaatgtgcatagacttcaccagtctcaataatgcctgcccgaaggacaatttcccgttgccgcggatcgacaaaataatcgatagcgcggccggatgcgaggtcatgtcactactcgactgcttcttcggctatcaccagatatacatg

SEQ ID NO: 43430 - DNA, 477 bp, Zea mays
  unsure (1)..(477): unsure at all n locations
ngaggccgaagtccannaaagttcggagctgaaagaatccttgacaaatcttcagaataagtgcctggagttcagcaatcgatgcattcaacagttgaagcaggtgttccattttgttggagccagtagcgagaagttcactccttcggctggagacctgcctggtgccttcgagcatattgaaggtgaaattaatgatcttgacgaagttatagctgggcatggcgacttttgtgccctggcagcttctcggggcacaactgttgcctttttgaagtctggctgtaaacacggaaagaatgtaatagacccaacttcagcctgtcaccagcagacttagataacattcccagcctggcccgaagtattgcgaatagatttataaaattagtatggacaaagggaggacggagcaaagctggtgacgaagctcgaagccaccttaangctgtaacaaaatcataccttatgggtaca

SEQ ID NO: 43431 - DNA, 472 bp, Zea mays
agcttgtgaagattcttcattccaacatgtgctattctgcgatgccagagccaacccatgttagtcttagcgattattcaagtgtcgagtttagctctatcaaaatctactaagtatagctgacactctaacacttccttaattgctactgaatcatcacttcttctaaagacagtagcacctatatccgtaaaaagacagttgtaacccattttacataattgagaaactcgatgcaagttataatctaaagagtctactagaaaaacattggaaatggaatggtcatgtgatatagcaattttatccaatcctttgaccaaaccttgattcccatccccgaatgagatagctctatgaggatcttggtttctctcgtaagacgagaacatcctcttctcctcttcatatgggttgagccctgcttcgatgaccaacttgagccctggatgcataacctacaaaacaatta

SEQ ID NO: 43432 - DNA, 437 bp, Zea mays
tgccatacagctgacaatcttgtagcctctgaagtactttcctcatatgctcctcatgctcttgctcattctaggaatatataagaatatcatcaatgaacactactacgaacttgtcgaggtagtccatgaacacactgttcattaagtacatgaagtaagctggcgcattcgtcaaaccgaatgacatgaccgtgaactcatatagtccatacttggtgataaatgttgtcttcggtatatctgaaggtcggattctaagctgatggtatcctgacctcagatctatctttgagaacacactggatcctctcaactgatcaaataaatcttcaattctgggcagggggtacttgttcttgacagtgacttcattcagagctctgtaatcaatgcacatactcttcgtgccattctttcttctcacaaataacact

SEQ ID NO: 43433 - DNA, 432 bp, Zea mays
  unsure (1)..(432): unsure at all n locations
agctnggcattttattgctgactgtcctaactatgatagtgatcaggaacaagggaacaagagggagaagaagaagaactataagaaggctaaaggcgaggcgcatctaggcaaggagtgggattcggattgctcctcttccgactccgacaatgagggactcgccgccaccgccttcaacaaatcggccctcttccccaacgagcgtcacacatgccttatggcaagggagaagaagtatgtactcgaaactctacttatgcttcttcaagtgaagacgaatctagtgatgaggatgaaatagattattcatgtttgtttaagggcctagatagaaccaaggtagacaaaattaatgaattgattgatgccttgaatgataagaatatgctnttagaanaacaagaggatnntgtgtatgaagaacatgat

SEQ ID NO: 43434 - DNA, 372 bp, Zea mays
ctatcatatggacgtgaacagtgccttcctcaatggaccaatcaacgaagaggtctatgttgagcaacctcccggctatgaagatagtgagtatcctaaccatgtttataaactctctaaggcgctttatgggctcaagcaagccccaagagcatggtatgaatgcctaagagacttccttatcgctaatggcttcaaagtcggaaaggccgatcctactttatttactaagactcttgacaatgatttgtttgtatgccaaatttatgttgatgatatcatatttgggtctactaacgaatctacttgtgaagaatttagtaggatcatgacacaaaaattcgagatgtctatgatgggggagttgaagta

SEQ ID NO: 43435 - DNA, 348 bp, Zea mays
  unsure (1)..(348): unsure at all n locations
agctnggcctgcatctcgcggagtttctctagctgtgtgccctgactccncgcagagactcagaccacagctagctcccgcgggatctcaacgcgagacgcaggcgcatgggcatcgtcgatttctggcatgccgaggtggtcgtctttgtcgtgatccctctgatcgatgtgaaaacactcgcgagctgggtcgtaaccctcgncgtcgaggctgtggccatcgtcagagtagcccgagaggcagtagtcacatgcagacatgaagtctcgcatggaaccaggatcacggagtccatagaaatcccaactgaagtctgcgtcgtcctcttcctcggaacccgcgggt

SEQ ID NO: 43436 - DNA, 424 bp, Zea mays
  unsure (1)..(424): unsure at all n locations
tgtgagcagtacaagtttataagggagaaagctgcttcggccgatcagctgaagtccatgcttttatgtgaggacatagtagagcagaaggtgctattgngatcccaactgtctgaagaacaggagaaaaccttgataaggtttctgttcaacaacaaagatgtttttgcatggtcagccaatggtctttgtggagtcaacagggatgttattgaacattcgctcaatgttgacccatcctttagacccaganagcagaggcttctgaagatgtctgatgacaaggccgaaggtgctcggaatgaagtaaaaaggctccttagtgccggagttatcagagaggtaaaatatccagaatggctggctaacactgttatggtaaaataggccaatgtgtaatggagaatgtgtattgattttactg

SEQ ID NO: 43437 - DNA, 482 bp, Zea mays
  unsure (1)..(482): unsure at all n locations
agctnggcccggcgccgttcgtcgtagaggaccgtaggctatgaagaaatagaagtatgagggcctcggtgtaattgtcagtgactcatggaaatagtgctgtgaactcggttcaggttatttaaaacaataggggcctttgcgcaaagtcgtcagcgctggcgcgcacgcgggcacgttctacctgtactgggctagcttgggccagattgagcccagtactggtgatccttttcattnnttcttttctaccagactttggaaatccatagaaaaatctagagaaattctaaaaatgtgagaccaattntgttagactcctaaatttctttattatttaataaaaatagatttaagatttttggtccaaaccaagaattatgaagtatttaaaaaggcttaaacctatacctctatgaatttagaaactattgagtaactccaaaaatcaccanactttttggataagctntaaatgatat

SEQ ID NO: 43438 - DNA, 401 bp, Zea mays
  unsure (1)..(401): unsure at all n locations
tgttcttgacacttctttccgatgtatgtccggaaacaattgaccattgcgcgcagagatctcgcagcgcattattgcatgtgtaactatacctattgngccatcagtaagccataacacattctagttgctgtaaggggccggtatggtatatcttcttcacgtgtaattaagtaaaggagagagagctatgcttgcactccaggaaacgttcaatttgactactactggcagttagggttcctccctggccccccatagtagatgtaggtgccaaagctgttaccggcaccaccattgagcacgttatagcagttgggtcgtgaagcaaacagacccagagcacttggcgacagaagagtgttggacgcatcgaccacttggatgttccggatgtaact

SEQ ID NO: 43439 - DNA, 338 bp, Zea mays
  unsure (1)..(338): unsure at all n locations
ttctatatatgtntggggattagatgcccaacacatagagttatgactttataagctaagtgtcaaagagatgcaaatggaaaagcaaggtatgattctagccttaataaattgtttttggtactaacattattctactaagtgctaagaaccttatcgaaccaagagaaatcggattggagaagtttggctaagtctatccaaacttgcacaagcctgcggtgcaccagactgtccggtgtgcaccangcagtgtccggtgcccaggctggcgccctggcgaacatgccgctctcgagaaaatgctaagggcaccatgattataattcatcggactg

SEQ ID NO: 43440 - DNA, 477 bp, Zea mays
  unsure (1)..(477): unsure at all n locations
ctcaagcttcggcattattntcagtcttaccatataatagtacctttgtcccaacctctaaatgacatcataagaagcagagaagctagaggaagggttggcaagtgggctgcagagttgaacgagttcaccattgactntattcatagatcttcgattcaatctcaagcactatcagacttcattgtcgattggatgctaggggctcatgaagtacacccggtagatgacgaagcttggacaatattctatgaaggctcgtggggaatcttcgatgcaggtgcagtagctattctaatttcaccatataaaatcaaaacctgttttgcagccagactggaattcaattgcacaaacaacattgcagaatacgaagcgattcttttggggcttcgaaagcttanggccatgggaataagaagagcagtacttaaatctgactctcaagtaatcacaggctatgttgacanaagcagt

SEQ ID NO: 43441 - DNA, 474 bp, Zea mays
  unsure (1)..(474): unsure at all n locations
agcttctaaagggagagcacattntgngactaatatatgttcattttgagaaagacagggtttgtagcgcatgtcaagcagggaagcaagttggtgttcatcattcacacaagaacatcatgacgaccgacaggccgctcgagctactccacatggacctattcggcccgatcgcttacataagcatcgacgggagtaagtactgtctagttattgtggacgattattctcgcttcacttgggtgttctttttgcaggaaaaatctcaaacccaagagaccttagaggaattcttgagacgggctcaaaatgagttcggcttaaggatcaagaagattagaagcgacaacgggagggagttcaagaactcacaaatagaacgcttccttgaggatgagggaatcaagcatgagttctcttctcctacactcacaacaaatggtgagtggagaggaaaatagactctactgacat

SEQ ID NO: 43442 - DNA, 474 bp, Zea mays
  unsure (1)..(474): unsure at all n locations
gctatatgcatccaaagtcactttgataggcaacaacaacatagtctcttgtctatttaccagctcaataagaggaactttaggtacaccatatctaggcacacatatgcccatatagctctagacaaaacataatgccaccttcttaaattggtttcaatcttatatttgataagatatatcaaagtcttattactagactcaacttggctattagcttgagcatggtatgaatattaaattgagtatatgatcttatataatttggcaaactctcatacttcttttgacgtaaatgatgtctctcgatctgtagttaatgtttgagggatgatcaatctatgtntgataagcttcatcactggaaacataataacacacgttagaaatgtttgctatcgcatctaagtgactttgttgtggtggtatcaatgcttcgtttacatatgctaagccaattcaatggattgctat

SEQ ID NO: 43443 - DNA, 471 bp, Zea mays
ctctcttgcacatataggatgaaaggaagttctgcatgctcctaaaaaccacatgaacttagaagatgaatggattattaaactagagctggtattattcagaatatgatctaccgaatactccttatggtctatgcctggttaagctatttgcgttgcacggacaccaaaacatgactttgaacactgatctgtatacctaatatccataaatactaaccaggaattgtacttctgtgatagcattttcaaagaaaaatatactcaagcaattatcgtgttgtcaatctttatggtattaatagcatattaacccgacaactttcaaaagatgttgatgtcacagctcaaggattcaaacatagaggacaaaatgtagactttgatcatattcttaatctgatggtcccttgatactgacaaaatcaaataatagacatacttgctatacatctttcagcttctagagtc

SEQ ID NO: 43444 - DNA, 446 bp, Zea mays
  unsure (1)..(446): unsure at all n locations
ctcaagctggtggcggaccagatcatcgaagcatataagtttctggatgagaagtggtcacccaagttccattgatgaagcaccagaagaccaatcaaggaaggaatccatgtaggagttcgcaagaggaagggttgcatgttggcatcggtgcttcttcaataagctagctgccaagcgaaagctagaagcttgaagatgatatctgagtagccagaatcagtgtttgcaatcggcaaccagatgctcctcaaaggccagaatttgttgaagttccatctcctcgaagagtctgcaaagtcaagatatgtagctgaagtaaagctatacccataaccctactaagccgaatctcgaggacgagattcattttaagtggggtagatctgtagcatcccanaaattcaaatctttgaaatttctcanactcgctctaaattcaaaat

SEQ ID NO: 43445 - DNA, 442 bp, Zea mays
  unsure (1)..(442): unsure at all n locations
agcttgtgtcaacttgatgatgacacaatcacctcctaggatgctcttcctcttccccttgatctactccttgacccatgaggaagcaggagcagccgaacaggacagggtcagcagcccagcaaccatgacggacaacttcttcatgttaagagtggtggtggcattgatagggggcgtgtatgctgccatttggttcctgccaagtcagatctctagcatctcaaatttggcataaacagcactagattggtgcttgaagagatgaggtgtgaggagagaggagagcacgggaggagatagtgaaagggaaataggcttacaccttttcctaattgattttggtggttgaattgcccaacacaaataattggactaactagtttgctctagaattataagtttacangtgccaaaggttcacaatagacccaataaatga

SEQ ID NO: 43446 - DNA, 215 bp, Zea mays
  unsure (1)..(215): unsure at all n locations
tatcttcatcagctaactcctaacgccatcgntaggcttagcgtctacatatgggccctccgaagccaggggtagaactgtttgccgaatgcttctgccgagcacatgagcttcattatcaaacaaaggctagagaagatgggctgcacganaacttcggctgctacaattntgcttattgcaaatatgcgaagtctccagttatcagctacgta

SEQ ID NO: 43447 - DNA, 435 bp, Zea mays
  unsure (1)..(435): unsure at all n locations
tgaagccatggtaagtagcataggccaataatatgcgaattgtctcaagcctagctacgggtgcataggtttcaccgaaatccaaaccttcgacttgtgaataccctttggctacgagtcgagctttgttccttgtcaccacaccatgctcatcttgcttgttgcggaagacccatttggttcctacaacattttggttaggacgtggaactaaatgccagacctcattcctcgtgaagttgttgagctcttcttgcatcgccaccacccaatccgaatcttggagagcttcctctaccctgtgtggctcaatagaggaaacaaaagagtaatgttcacaaaaatgagcaacccgagatcgagtagttacccccttatgaatgtcgccgaggatggtgtcgacngcgtgatctcgttggattgcttggtggactc

SEQ ID NO: 43448 - DNA, 444 bp, Zea mays
  unsure (1)..(444): unsure at all n locations
agctcggaggcgtctattggatgctactttgtgtatactcctccttcttctcctccggtgccttgaatgcaacgggatgggcttctgatgggtcgccaagctcgttgattatactcgagccttctatcatgcactcaaaacttacaaaatgcccgataacttgctcggaggtcattctagtatatctaggattaccacgaatcaattgaacttgagtgggagtaagaanaatgagagatcttaaaataacatntaccacttcgtggtcatcccacttcttgctcccgaggttgcgcacttggttcaccaaagtcttgagccggttgtacatatgttgtggctcactccctatgtgaagccggaaccgaccgagctcactctcgatcgtttcccgcttggtgatcttggtgagctcatctccctcgcgcgcggttatgaggacat

SEQ ID NO: 43449 - DNA, 412 bp, Zea mays
  unsure (1)..(412): unsure at all n locations
tcaatcatttgcanaggataattgatgctcaaaaagataatctgggtatgaagcacatacgagagaagataagggctggagtagccaaatgttntaaggaagacgatcaaggtgtgatatggtttaaaaaccgcatagtagtgccaaagaacgaagaactccgccagcaaattcttgatgaagcacatcttagtcgttattctattcatcccggaagcactaagatgtaccaagacttaaagcaacattactggtggacaaagatgaagatcgaaattgcacgctatgtggctaagtgtgacacttgcagacgtgtcaaggccatacacatganaactgctggtccattacaatctttgccaatcccaacatggaaatgggaagacataagtatggactntattgtgggact

SEQ ID NO: 43450 - DNA, 350 bp, Zea mays
atgaatctcttcaaacgactaattgaggatgttgctctcaaggagatccccctgcatggactgtcgtttacgtggtccaatcagcaaaatgatccagtgcttgtcaaattggatagagttttttgctcacgtaattgggaactgcttttcctaatgtcctgctttagagctcagcctcccaggactcgggtcattgccccctgttgctggccttcgggataatacatcagacagacaaagattccattttgaggccttggcctatattggatgtttttctgacacagttcagagtgcttgggactcagttttgaatgagacgtgccctttcaaaccatctatctgaaatt

SEQ ID NO: 43451 - DNA, 457 bp, Zea mays
  unsure (1)..(457): unsure at all n locations
tcgtctactatctctcggccacctccctaccagacttcggaataaaattntccactcagcgcagtggctacggctgaagggttcttaatgtcattggctaagaccgagaattctggctgaactacaacctttgcatgctcgtagccaaccttctcaaagagagacacaactccatgggtgccggcgaaggcatagaaagctcccctatcactgagaatttcatcaaaagcttcagccttgccaccgatccaccgaataaccccatcaggatcaccacgaataaaattttgctccatagagaatgcgccaactntggcaaatctatnntttcaatttttacaacattccatggcaacattgtagcattcctcttttgcttgacgaagctcctcgacacttttctgaactcttagccgntcagtatcagaatattcgtgttttgtttctaacattaaaa

SEQ ID NO: 43452 - DNA, 378 bp, Zea mays
  unsure (1)..(378): unsure at all n locations
agcttgacacatagctcatttgaataccttgatcatatctcttctatatgctatgactaatgtgntttcaagtctatttcaaaccaagtcataggtatattgaaagggaattggagtcttcggcgaagacaaaggcttccactccgtaactcatgcttcgccatcactccgagcaactctctattccttgggagaaatgagcataaaaaaaaaggactctatccttgggggagagagtaatagctcataagcaaaaggaccggacctcgtctttggtataatcttaactcatttacttatgaccaaaggggaggaacttacttcgagggctctaatgattccgtttttggcgattcatgccaaacagggggagaaatg

SEQ ID NO: 43453 - DNA, 490 bp, Zea mays
  unsure (1)..(490): unsure at all n locations
atcctcaagcaaaggaggggaaagattacaagccctgctccaagaaagtttgctattaatgtagtaagcctggtcattntattgctaaatgtccattatctagtgatagtgacaggggcgacgacaagaagggaaagaggaaggaaaagaagagaaactacaagaagaagggcgacaatgcccatgtgtgtcgggaatgggactccgatgagagctccaccaactcctcctccgacgaggacaccgccaacatcgatgtcaacaagggtctcctcttccccaacgttggccacaagtgcctcatggcaaaggacgacaaaaagaagaaggtaaaatatagagcttccactaaatatgcaacatctagtgatgaggctagctctagtgatgattgaaagggaaatgtgcctttgggcaatttctatttatgttttgtgattaagtgtcaacacattngattgagttcttaagtgctaaatgacgaaagaag

SEQ ID NO: 43454 - DNA, 377 bp, Zea mays
  unsure (1)..(377): unsure at all n locations
agctnggtattctntggaaggggttntgtgcatgctactgttgtccccttctcaacctttntcactatattatcacggttatcttgagaaggttgagcatgacactttcccttcaattgagtcaagctccattttagcctatcattcttttccttgagctcattgttttcttttgcataggaaacattacttgttcctgaaaattcttgctccatggaagattggctntcttgagagcaacatttgttatcacatgataataaatttatatttgagtacatgtgtgtcggcgtttcgaacccgaggggtccctggaccgatgagtaaattgtcgtcgcgtgccccagcccaaatgggtcggcgcgagacggagcgtg

SEQ ID NO: 43455 - DNA, 385 bp, Zea mays
ttgacattgctccctgttggaaaccaatgccatccttaatgttcttgcgtctcccattatagagcatgcttctagcaaatttaaacttttcgttttcaagttcatgctcattaattttagcagtcaatttagctatgtgatcattttgttgtttaatcatggcaatgtgatcatcaatagcttcaacattaatatctctacatctagtgcaaatggaaacatgctcaacagtagatgtagatggtttgcaattgtttagttcttctatattagcatttaaaatagcattcttgtaacacccctggtgtaactgttactaaaatttgagcataacatcataagcattggcatatcatgtgtttgtcacacctagaatgcattcact

SEQ ID NO: 43456 - DNA, 495 bp, Zea mays
agcttcacgaggaggacacttctttatcttatgctaacagcttcagccgaggaccacttctttctattagaccttcggcgacgaagcacagacccaacaactctgattattcttactttttcttctttctaaagaccaatgtggatttcacactttgaaatcctgtgcctaaagtgatccttaggataaggagacctattcttatgaacaaaaaaacaaaactattttttatctatatgcctgaatgtttgttcttgtgatatatgtctgattcggattcttgattgagtgtgatgagttgtggagtaatgtccacaattacatctgcatatacatatagaagaaatacacctataataaaaataactagataaactagagtatctagcctaacaatatccatcttagcttaatagattcatattctacacttatagattcatcttatcttaagaagatactctattagcttagtagaataatcttattctgaaa

SEQ ID NO: 43457 - DNA, 382 bp, Zea mays
taccacatttgaagcatgagcgcttcccttttgtcttggtcttgcttggctgccccttgcgacctttcagtgccgtcttgaatctcttgatgatgagagccatctcttcatcattaagtccggccgcctcaatttgtgccaccttactaggtagcgtctccttgcttcttgttgccttgagagcaagaggttgaggctcattgattggaccattcaatgcgtcgtccacgtatcttgcttccttgatcatcattcgcccactcacgaattttccaagtatctcctcgggcgtcatcttggtgtacctaggattctcacgaatattggtcacaagatgaggatcaaggacagttaaagaccttaacattagacggacgacgtc

SEQ ID NO: 43458 - DNA, 432 bp, Zea mays
  unsure (1)..(432): unsure at all n locations
gcttcggatcattgaccttcggtatcgtcattctgtacacaacanagcagtaataagggaaaaagtgatctcaggagaaggtaaacaacatgtacaagtttaataccggcttaagatgacttcgagcttcgtcaccagctaaatcccgcccacccttcgtccaaatttgtgttataaatctattcccaatacttcggcccaggctggggatatcagctaagtccgctggtgatagactaaagttcggcctgttacaatcttctcgtgtgtgcaaccagccttcataaaagctacagctgtgccgcgagaagctagcagggcacaaaagtcgtcgtgcccagctataacttcatcaagcgcctcaacttcgatttcaatatgctcgaaggtgcttggcaagtcttcaaccgaagggttcaaatttttagagct

SEQ ID NO: 43459 - DNA, 439 bp, Zea mays
atcttgccgaaggtggttttgtcttgaggaccttcagtggagaagaatgccccgaacactgatatttctttgttttcttcttatcagtgcaaaggggctggagccttgctgatggagaacggatcacatgcgtgtgttcttggtgttggtacagtcattctgaagtttacttcaggaaagacggtgctattgacgaacgtgcatcatgtcccctccatcaaaaagaatcttgttagtggctcattgctatgtcgagatggctataaacttgtgttcgagtcaaataaatgtatactgtcgaagtatgggacatttgttggattatgctatgacagtggaggcttgttccacttatctctgcatgatgtgtataataagtccatgaacaatgtaatttcgaacaagtcgtatatttggcattcacgactttgtcacttca

SEQ ID NO: 43460 - DNA, 359 bp, Zea mays
  unsure (1)..(359): unsure at all n locations
ttaatatgtgagtagaaatgcgaaagggataatatgataactgcatctcattaattggtttattattatattttataaaaacagaaatgaatgtaaacaatgttaatgttacattgataccttccgcttgctcgaaagtgtggatgcaagaaagtgaatacaatccagcatgaacagtacgggggttactattcatctatttataagcacgggacgcagcccgagcaaaattacatatgtacccttaaacgcttatttacaagcaactaaagctaataagggctatttagtcttttatttctttgcttgatccgagccgaagctattgtcctttggcattctngcaacgttgtcgtaca

SEQ ID NO: 43461 - DNA, 495 bp, Zea mays
  unsure (1)..(495): unsure at all n locations
ctcggtttatggtcttttctgagccctgcgtctttcagcgattatagtctgctaacgcctgggactgaattgaggatctatgcacataatcaatattgaactcgttaagctccgcagcccattttccaatccttccagtagcttctttgtccctcattatgtccttcagaggctgtgacgaaggaacaattatgtgatatgcttgaaaataatgtcgaagctntctggaagccattaacacagcatacaacaccttctccaattctgtataattcttctttgataagcttaaaacttcagagacgatgtacactggatcctgctntntgattngtccatctagcttctcttgacaagagtcgcactaactgcagagttagtgttggtagatcaatcaaatattgcttcaattcttcacaaactctntgctgagccggaccccactgagaaacttcggctgacttcagtatttcatagaatggcagatttctttct

SEQ ID NO: 43462 - DNA, 396 bp, Zea mays
  unsure (1)..(396): unsure at all n locations
ttggagcgcatgccacgcggaaagcaagttggagcccatcatcaacacaagaaccttatgacgaccgaccggccggttgagctacttcacatggatctattcggcccgattgcttacataagcatcggcgggagaaaaatctcaaacccaagagatcttacaggggattcttgagacgagctcacaatgagttcggcttaaggatcaagtaaattagaagcgacaacgggacggagttcaagaattctcaaattgaaggcttccttgacgaggagggcatcaagcatgagttctcttctccctacacgccacaacanaatggtgtagtggagaggaagaatcgaactctattagacatggcangaaccatgcttgatgagtacaagacaccggatc

SEQ ID NO: 43463 - DNA, 464 bp, Zea mays
  unsure (1)..(464): unsure at all n locations
tttttacggacaagctcgtacgaaaacgatctttaccgcgaaggggctacttgtgggactatgcttcgtcgccgaaggtcttgtaggaagaagcagctttcggctgaagctgtncgtatgagatgaccgaaggttcctactcatgaagcttcggtattacaaaccgacttataagtagaatgaccctctagtccataagtgcttaggtcgctgntgtaatcctttgtaaggggcataattgttatttctcacaggctgtgtcctgtgcctataaatagtgaacagtacccttactggtcacggattctttcggtattggcaattgcatcattcgggaatcaatctttgccaaggcagaggtatatctgtattcaataattaaatatactgagtaaatataatatgatttgttataantcattaccttcgatgactcttatttatgttactaatacaattcgata

SEQ ID NO: 43464 - DNA, 168 bp, Zea mays
gcttttggtggtgcagaatccgtctggtttgccaaaggatccgcggacgttatgagccacggagaacgttgtgttgaccctggggaatatcgggcccaatgctaaatcccctcgctgggaaatggcgttcccacgacagtgagagtctggctccagagaagtacatgc

SEQ ID NO: 43465 - DNA, 454 bp, Zea mays
  unsure (1)..(454): unsure at all n locations
gcatagattaccgcccacttaacgcggggactatcaagaacaagtatcccttgcctcgtattgatgttcttttcgatcagttggtcggagccaaagtgttatccaagatagatcttcgcttcagctaccatcagatcaagatacgagcaagcgatattccgaagaccgccttatcgaccagatatgggctatatgaattcttggtgatgtcttttgggctgactaatgcaccagcatacttcttgtatctgatgaattctgttttcatgcctgaactggacaagttcgtagtgggtttcatcgatgatatcttggtgtaatggaagaacgaagaagagcatgtcgggcatttgcatgtagtgcttcaacgtctgcgagagcgaccatcttatgccaaattgtcaaaatgtaattcttggctaanagagatcaaattcttgggtcacactatctc

SEQ ID NO: 43466 - DNA, 486 bp, Zea mays
  unsure (1)..(486): unsure at all n locations
atcctctnagtcacctgcggcatgcgagctngaacctagcaccgccctatttccaagatagcttatatattgtctggaccacaattggtggaaataaagaagtacatcaacgagctattagagaaaggcttcatcataccaagtactttgccttgggccactctagttctattcgtggagaagaaagatgggacaaagatgatgtgcattgactacagagccttgaatgaagtcactatcaagaacaagttaccctctgtccaaaatcacagatttgtttgatcagttgagaggagctggagtgttatcaaagatagatctgaggtcaggatatcatcagctcatgatccaaccttctgatataccgaagacaacatttatcaccaagtatgggctatatgagtatacaagtatgtcctttggattgacanatgcacccactttctttaagtacctgatgaatggtgattcatggactatctctac

SEQ ID NO: 43467 - DNA, 389 bp, Zea mays
tactagtgtgcattgaaacgctaaaactagttattatcacggctcttgagtttctgccataatggaatagatcctgatcgaagggaatagtaccaggtttgtgccacattctttactgccataacaaaagacttgacactcattgccgtattgcctgcatatgaatatatggttgctttatagctcattaaaaaatgctatggatcagataggccatcatacattgagagttgagatggtctatacaacgctggccatggtgcaacttgaagatctaatcctagaggagacatgatgtcgtagatgaatgcgttgtaattgggatggagggctcttacatcatactgaccgtgatttcctattcatcttggcatagcatgcgctataac

SEQ ID NO: 43468 - DNA, 478 bp, Zea mays
  unsure (1)..(478): unsure at all n locations
agctngcatgtctcttggaatgatgaattatatcttattaccaattagagattaaatggctatgcacatgatgagtntagtaaaaatccatcgttgtcactgatgttgagttgaggattatttgcgcgtggaaagtaataatgtatttaatacttagaactcttagttaatagtagaaattggtttggcttatatataaaggtggtgacatgccaagtagccatcgctttctctatatttataagtcgagacgtgacgatgcgaattatgcgtgcgctaaattatgcttcgcatatggtgtatgattgtgctcacgatttcgagtagacgcttcaagtaatgcaagtagatttgcgatataagtggtgttatggagttaggtggtttaggataactatcgaaacactcgggtcgtaagattaacatgtatgtgtcatgaattgggaagcgatgcatgagatttcacttggagatagag

SEQ ID NO: 43469 - DNA, 437 bp, Zea mays
  unsure (1)..(437): unsure at all n locations
gcttctanagggagagcacagtctaggattatcttatgttcattntgagaaaacaggattggttgcgcatgccaagcgggatagcaatgtggagtccatcatccacacaagaacatcatgacgaccgacaggccgcttgagctacttcacatggatctattcggcccgattgcttacataagcatcggcgggagtaagtattgtctttgaatagtggatgattattctcgcttcactcgggtattctgtttgcaggaaaaatctcacacccaagagaccttaaagggattcttgagacgggctcaaaatgagttcggcttaaggatcaagaaatatagaagcgacaacgggacggagttctagaactctcaaattgaaggcttccttgaggaggacggcatcaagcatgagttctcttctccctacacacctcaaca

SEQ ID NO: 43470 - DNA, 477 bp, Zea mays
tatgaagaatcttcattccaacatgtgctattctgcgatgccttagccagcccatgttagtcttagcaattaagcaagtgtcgagttcagctctatcaaaatctactaagtatagctgaccctccaacactcccttaaatgctactgaatcatcacttcttctagagacacgaacacctatattcgtaataagacagttgtaacccattttgcataattgagaaacggaaagcaaatctgtatctaaagaacttacaagacaaacattggaaatagaatggtcaggagatatagcaattttacccaatcctttgaccaaaccttgacttccatccccgaatgtgataactcgttggggatcttggtttttctcataggaggagaacatcttcttctccctgcatatggttgtgcacccgtatcatgaccaacttgagccccggatgcataactacaaacaattagtctgatttagac

SEQ ID NO: 43471 - DNA, 398 bp, Zea mays
ccccgccccgcgagaccttttcccgtttctttctaaccataatgaatgcgatatcgaatgtcatacttgatgcatagtcactttatttgttcccttgtatgatgcaatggttgtttcccaatttgaatggatgaatgtatgtatgcttgcaatcgcatagaaaacgatcccgtcgaagagcccaaggaactcgcaggagaagcccctgagcagcagtcggttggtggaggcaagtgtctttgacctatctctgtcctattcattatataattcacctcccgcattacacatttatgcctaaggatcgactagctttagttatccatgtccctgtttacctatctgcgtatgattattattgttagccttatgtattgctcaactctatcttgaacatg

SEQ ID NO: 43472 - DNA, 459 bp, Zea mays
  unsure (1)..(459): unsure at all n locations
gacctatgaaactaagcttctaaggggaaacacattntaggattaacatatgttcattctgagaaagacaggatttgtagcgcatgtcaagcatggaagcaagttggtacccatcatccacacaaaaacatcatgacgaccgacaagccactggagctcctacacatggacctattcggcccgattgcttacataagcatcggcgggagtaagtactgtctagatattgtggatgaatattctcgcttcacttgggtattctttttacaggaaaaatctcaaacccaagagaccttaaagggattcgtaagacgggctcaaaatgagttcggcttaaggatcaagaaaataagaagcgacaacgggacggagttcaagaactctcatattgaaggctttcttgaggaagagggcatcaagcatgagttctcttctccctacacccntcaacaaaatggt

SEQ ID NO: 43473 - DNA, 408 bp, Zea mays
  unsure (1)..(408): unsure at all n locations
tatacttgattcttggaacttngattgttactttgcacacattgctcatttatatacctttgatcatgtctctttcatttggtacaaatgcccatctcttattcttcttgtgccaacactaagactaatgtgtttccaagtatatgtctatccttagtcttagattgaaagggaaatggagtattcgacaaaggcaaggcttcctctccaactctgtcggtatcatttatcctttgccttactcataaactctccattggtataaaccttcactcatatttcttataccaaaggaatacaatatatgccccaaaggtggagaatgaataggcctctcaagtttaatgcctaaggtggagaaagtattatgccaagcacaagctctgcaccaccatttctataaaacta

SEQ ID NO: 43474 - DNA, 416 bp, Zea mays
  unsure (1)..(416): unsure at all n locations
agcttgaagccatggtaagtagcctaggcaagttatatacgaattgactcaagccaagctacgggtgcataagtttcatcaaagtccaaaccttcgacttgtgaatagcctttggccacaagtcgggctctgttccttgtcaccacaccatgctcatcttgcttgttgcggaatacccacttggtacctacaacattntgattaggacgtggaactaaatgtcatacctcatttcttgtgaagttgttgagctcctcttgcatggccaccacccaatctggatcccttagtgcatcctctaccctgtatggctcaatagaggacacaaaagagtaatgtttacagaaatgtgcaactcgagatctagtggttacccccttntgaatgtcaccaaggatggagttgatggggtgatc

SEQ ID NO: 43475 - DNA, 474 bp, Zea mays
  unsure (1)..(474): unsure at all n locations
tgtcctcanaagattactccccctaagtgagtgttctcctttataaagagttntctcccnctttagagatgaagaanacctccctctgacagagatcttagganaaagcatgtganaattagaggtgcaagacatgatttgaaaagactaacttcccttatgcataggtatgagataaccacttatgcatttttagcaacatggaagtatatgatatgaaatatagtctaatcaaatattggagaagacatgtaaatgatactagatgtagtctcaaaagataccgattgaaattcaatggtgagcttgagagacatgagagttcttggagaatttgcagtggaagattgttgtctttctccggggacctcattntncttacaatgagactatcacatgaaatagatttganaggtgttagtctcaagtattagatatagagaacctcccctaaaggtgcatcaagtttgatac

SEQ ID NO: 43476 - DNA, 405 bp, Zea mays
  unsure (1)..(405): unsure at all n locations
cttctccatgggccatgcctttgtccctcgttcgcctgatgtgcctctccatcctcctcccncggagatcaatgagtggcaccagcaggcctacgaggtgccttttatgtctgcagacgatgatgatgaagacgtctatgttgatgatcgcgaggagtttgccccgcctccctaccatggggatccgggtcaatcatcctcccaccctccgcctccttacccgggtccgggacccattcctggtgaccctaggccatccggctctggttaccaccaccaccctccacctcctcctgatcatcgtacatcttcggcatctggtttttctgcggctgatgagccacctcgggactccacttntgaggaggacgcgatgaggacgtttttccctgactacacttcata

SEQ ID NO: 43477 - DNA, 317 bp, Zea mays
tatcctggaccctagacaccctgagaccatgaatggagttgcccgataattcaagctaactccaataaaaagaatgtgagccaatgcacaacaataaatggacatgtaatataacacatatgttgctaactccaagcgatcatgatataaacaccatgataatcaattgatcctgttgaacactcgaatagagcatcaatataccaaaaataattttgcggcaaaccgatcacacagaggactaacttatcacactattggccgctaaaaagaagctatcaagatatgcgatctaccttagaggtaccatcttccct

SEQ ID NO: 43478 - DNA, 397 bp, Zea mays
tactcctccctgggaggggccattcatcatcgtcaagaatttgaagcccggaacatacaagctggccaacaatcaaggcgaggtctacaacaacgcttggaacatccgacagctacgtcgcttctacccttaagatgttttcaagtcattcatatacctcgtgttctatacatacacaaataaagtctaaccgtcaaggaagggtcagccttgcctcggcaaatcccgactctccctcgggggctagaaggggggaccctctctgcgtcaaaatttttctcggaaatagtctatccgccagaacatctttcgcgcttttcaactgcttcggtagcgggatcctgaaacgacggagtcacataagcgcaaggtcgacgagccgagggctcctacactt

SEQ ID NO: 43479 - DNA, 463 bp, Zea mays
  unsure (1)..(463): unsure at all n locations
agctttgatgcactatagaaagaaaggttcggatctgaccaacaatgaaacacatacagatgctgtgcataaggtttccttggctccttgcatcccacgggtagagctatctcgctaccacctgaatctgttggcccgagcaaagatgcgaaggttcatgctcgatgcacatcacttcagccggaaggtcctaggagtgcgcatgttcacccaaaaatgccagactttgatgaattgtctgctcgggtcaaggctctgaggaaggcttgaggtggcataacatgatctctggcttgtgtacacgttctttcagctgaagagttgatccttggttgacagttccctgcaagacaaccacacagagtcgtgctttgatgtgcagtttctattagagattaaacaaatntgtatatgaagttactctnnttttgtctggtagaacgtntttacagcgctcttgtat

SEQ ID NO: 43480 - DNA, 506 bp, Zea mays
  unsure (1)..(506): unsure at all n locations
taggacctatgatactcagcttcttaccatgtgatcacggttatcttgagaaggttgagcaatgcacttccctttaagttgtgtcaagctcatttttagcctctcatttttcttctttgagcttttgatatgtatcatcttgtgttcctgcaaatcctagctcaaaggaagttttgcttgtcgatggacaacaagcattagcacatggtaatgcagttttaatttgaatacatgtgcatgagtgaggttgttgggattntaagttttctatcacaaccttatgagcgatatttaatatgatatgatcatttataagattttcatgagaacatagaagcatatcatatttttcttgaaaagttagaatttcaacttttagctnttctacttggtccttaagcaaggcattcctatttactaattgagcgatacaatgtaaagcgttatcttgctcaattgaaaagttcataacttggaccaataacatgagacactttagctctcat

SEQ ID NO: 43481 - DNA, 409 bp, Zea mays
  unsure (1)..(409): unsure at all n locations
tccggaccttagtcactgggctgcagcttataggtgtagcttcgcgctgctctgtnatatctgccgaaggtgttctctttctttatgatcttcggctacgaagcatacgcccaacagtagcccttcgcggtgctagatcgtttttcgtaacgagcttgatccgtgaaaaagtcttctaggcttcgggatgccgaagaatcgaaaaacaccttccctgagctcgttgacgagaaatgattaaaataatccgtgcgcaaggtggccccatcttgcagcagttacgtgcgccctggcgattcaccttctcggaccctgtggcccaccgttcggtgagtgcgggtgactgtttgttcggtgcggaagaccttgacgatccaccttcccacctgcggcactatataaacagacg

SEQ ID NO: 43482 - DNA, 523 bp, Zea mays
  unsure (1)..(523): unsure at all n locations
tatgatactcaagctgaggcgtcngatgggtgtctacttggtgtagactcctccttcttttcttccgtcgccttgaatgcgacgggttgagcttcggatgtagatggatcatcaagctcgttgatcttcctcgagccttcgatcatgcactcaaaacttacaaaatgcccgataacttcctcgggggtcattttagtatatctaggattaccacgaattaattgaacttgagtggggttaaggaaaatgagagatcttagaataaccttaaccatttcgtggtcgtcccacttgacgctcccgaggttgcgcacttggttcaccaaagtcttgagccggttgtacatgtgttgtggctcctcccctttgcgaagccggaaccgaccgagctccccctcgatcgtttcccgcttggtgatcttggtgagctcatctccttcgtgcgcggttttgagcacatcccaaacctncttggcgctcttcaaccctttgactnntgtatactcctctctacttaaagaag

SEQ ID NO: 43483 - DNA, 368 bp, Zea mays
  unsure (1)..(368): unsure at all n locations
gcatgagcgcttccccttggttttggtcttgcttggctgtcccttgcgacctttaagcaccgtcttgaatcttttgatgatgagagccatctcttcatcattaagtccggccacctcaatctgtgccaccttgcttggtagcgcctccttgcttcgtgttgccttgagagcaaggggttgcggctcgttgaccggaccattcaaggcgtcgtccatgtancctcgcctcttgatcatcattcgcccgctaacaaatatcccaagaacttcttcgggcgacatcttggtgtacctgggattttcacgaatattgttcaccaaatgaggatcaagaacggtaaatgaccttagcattatgcggacgacgt

SEQ ID NO: 43484 - DNA, 469 bp, Zea mays
  unsure (1)..(469): unsure at all n locations
tgagtcaatcattctgcanagaataattgacgcacaaagaaatgatgagggaatgaagcacattcatgagaaaatagaagctggtaaagccaactgctttagaagagatgatcaacgtgttgtatgggttaataaccgcatagttgtgcctaaaaatgatgaggtccaccgccaattttggatgaagcacatcttagtcgctattctattcatcccggaagcactaagatgtatcatgatctnaaacaacattattggtggacaaagatgaagattgaaatcgcacgatatgtggcaagatgtgacacttgtagacgtgtcaaagccatacatatgaagactactggtccattacaatatctacctataccaacatggaaatgggaggatattagtatggactttattgtgngattatccaggacagcaaaagggatcgactctatttggttatcattgatcgacttac

SEQ ID NO: 43485 - DNA, 333 bp, Zea mays
  unsure (1)..(333): unsure at all n locations
cggctgctcctgtgctatgaccgtattctaaattgaataaacagcagcaagtagccactaaccagcagcacacatgcagataaccagcagcacagcactcaacaatgaacataagtccacaataactagtagcaagtcacaaattcaataaccaacattacaacaaatttaaatggtccagagtccagacttcaactcttcaagtcatacattacataacttccaattattgatagtttgagatcacagatcacatatttgagcttaaactttgatagcctcatattntccattcaccattcatcaaattntcatgctcaagaattggtaggg

SEQ ID NO: 43486 - DNA, 393 bp, Zea mays
  unsure (1)..(393): unsure at all n locations
ttcacgggtttactcggagaggacgttagatttattggaactcatacatactgatgtgtgcggaccaatgagtacgacaactaggggaggattccaatacttcataaccttcactgatgattntagtagatatgggtatgtctacttaatgaaacacaagtctgaatccttagaaaagttcaaagagtttcagaatgaagtagaaaatcagcgtggcaagaaaattaaagcactgcgatcagatcgtggtggtgaatatttgagtcatgagtttagcaatcatctaaagagttgtggaattgttccacagcttacgccgcctggaacgcctcagaggaatggcgtgtctgagcgacgtaatcggactttattggatatggttcgatcaatgat

SEQ ID NO: 43487 - DNA, 304 bp, Zea mays
gtcactgagctgcgactgcacttatctgataatgaagagcaatttctttatatctccgcttggcctggaatttaaacctttgacttagattgacccataatatactgtcattactcttccgattttttactagaactacatcgcagcagaagctatcccacgggttactcttgatatgcccgtgactcactatcgttaggcaatacatatggctcagctgaaccgatgcctggatgtaatgagaaaacttgtataccattttgtcggacgctgttcaccttgtatacacgtcttgatgagcgaa

SEQ ID NO: 43488 - DNA, 365 bp, Zea mays
cactcaagcttgtaccatgattccagtaacgacgagtcagattcattcgaattcttgacactttatctggaagagaccaagtatgatgagtactggagcaggccactggaacctgaaatcacaaccgatgaacaattaatttcaactgctcaccttctcaccaagcccagaatgggccagcaaacgaggcgactgcagaagcgggattttcagaaagatatcttgcctggcctttctcactttcccggcctgaaatcatagaggatgtccagttgcttgaggggctagtccatgcttctggtggatcctgggagtcgagttaactaagcgaggacagtatggtgggcggactccacgtaggaaac

SEQ ID NO: 43489 - DNA, 470 bp, Zea mays
agcttgtcataatctgggtattggaagtttatttttctcttacccgcgtcagcctttgtttcggtcaggtaccaaagacaacagtcattacctggtcctctctcttagtgtaattgccaagaatttcattgcacatagtttagatcatttctaaccactcactgcatggcttcttgaactgcttctcatatttgaaccgattagggagcaaaacaagttcataccttttcctccttgattagtcttcggcataccctagccgctagaggttggaaatgttctatttgccaagtattactgcactaggtctctagtgctaatctcagcagctaccactctaaattcgacatccgcctactggcacggggagccaagttgcatgtggcataggtgccttgtcatttcgaactcaatctcattcactattgccatagcattattatctcctcttcttctcgccgctttatgta

SEQ ID NO: 43490 - DNA, 492 bp, Zea mays
acctataatactaagcttcgggaacaagggtatttaactcccaagatatctttcaagatattcagaattaaatggcaagagtgcgctctactgctagagtcgagcgtgagggaggcgaagccgaaggagcggagactgttcctatctccgaagcaatgcagcgatccggattggtgacctcggaaagaatccccactgccgaaacagaacaaactgctgctgaaacagaacaagctgctgccgaaacagaacaaggagatattgaggaagctgattcttacgatgattatcatatcgcagtaccgagcaagcctagccatttggacttcggaaagatgactatctccaaggctgatttctccaaaatggtgaagtcaggctatttcagtgaaaatgagaagaagctgcttcgcttctggggagaggaaactacccgaagcccgaacaggacgaaataggtattttcaagagtttcttgaagctgggtgagaa

SEQ ID NO: 43491 - DNA, 424 bp, Zea mays
  unsure (1)..(424): unsure at all n locations
caagaacacagaattgctaatagaaactaggaactacgatggtacaaatgacgaggaggggcatcgagaattttattcatagaatggcgagttggcaacccatctcctagtgacctattcctagctactatgtttcttcagtttcttcttctcaagactcccaacttcacttcaatgtactacgtatagcccagntcctcaaccttgtgcttcctatctcgcccaaactcctcagattgtaacgaatcagttgttctttatctggttggaacgctgtgcaatcgtattgctaacaccgctcatatgaaacaatgaacagacgctgctgcttgctagcctatacgatccgctgtatgtgcaggatatacatacatacatacgcgcgtaccctactaaaacatggagaaattgactaaacgttcac

SEQ ID NO: 43492 - DNA, 422 bp, Zea mays
tctgaggctactggtgaggatctccccgctgccccagcaattgaaggcaagccccggtttatatgcataaccgtattattatatgctactttactacacttaatgcttgtaggattgtaatgtgcaattaagtgtaggagttgcttgaaacctctagttgcatgaacttaggattcctttttgagatgaatactagtatgctaggtcgagtagctgcttgctaatcaggatctcggtagaagtcgagtgatttttctagcactcgcgcgaggtcaggaattgattgtattcatcttgataacgggatctatgttggtctatggacttggatccagggaggatgccttgaccatgagacgggaaaaggaattaaggattaatgtgtggatacctgagtcaagcctttgaacgtactaagcaca

SEQ ID NO: 43493 - DNA, 60 bp, Zea mays
taactctcacattaattcatttatcgtatattacctaatgacatgacatggtaattaact

SEQ ID NO: 43494 - DNA, 381 bp, Zea mays
  unsure (1)..(381): unsure at all n locations
ttatcaaatggacgtgaatagtgccttcctcttggaccaatttatgaagaggtctatgtcgagcaacctcccggctttgaagatactgagtaccctaatcatgtgtataaactctctaatgcgctttatgggctcaagcaagccccaagagcatggtttgaatgcctaagagattctcttatcactaatggcttcaaagtcggaaaggccgatcctactttatttactaaaacttttgacaatgatttgtttgtatgccaaatttatgttgatgatattatatttgggtctactaacgaatctacatgtgagtaatttagtatgatcatgacacacaaacncgagatgtctatgatgggggagttgaagtacttcttggaa

SEQ ID NO: 43495 - DNA, 356 bp, Zea mays
  unsure (1)..(356): unsure at all n locations
nagcttacaagacaatgagatcagaagagtacatttgttatttcancattacaagcagaaaagaattttgtttggaaccagctcataaatatggaaaaagattacactggaactattaagagcaagcacatagaggtaaagcaggctaccgaagcggcacataagcttctacaaaatgtagatgagctgcaagcggcagcccaaaagaaggatgggtgaaatgataaattacaaatagaggtgtcaaatgccaaacagaggatctcaattcttgaggatgagctgcaaaacttgcgctccttggttaaggataaagatcataaaactgtgtaaaatgaagatggtgaaccggagac

SEQ ID NO: 43496 - DNA, 402 bp, Zea mays
ctataaaactaagcttgttatttcctagaatttagtaaaataaatttgtgatatttagtgaaagtaataaattttagggtatttaaagtacataaaagtatcggttatggatatttagaaaataaatggtagttccataaatgctcaaaatttttatatgggttcctcctaatgtttagaagccttgggtaggatttgaattgatttggaccttgtttgatcaccaaactccaaaacacccccctgccctatggactcctttaccgactccggaaaccctaagttcccggaactccgtgaagaaagttgtattcaagacataaataataaggtatgttatctttgcaccctcatgagcattccatggcattcattcttatacttatgtatgggtatgattag

SEQ ID NO: 43497 - DNA, 452 bp, Zea mays
  unsure (1)..(452): unsure at all n locations
gctngagaagggtcttcatccccacatgtgcttagcggcgatgccacagacagcccatgctagtcttagcaattaagcatgcatctagaccggcctgttcttttgcaaaatcaactaaataaagtttgccgtctaatacacccttaaaagctagtgaaccatcacttcttctaaagacagacacatctatatttgtaaatagacagttatatcccatattgcataattgactaacagatagtaattatatcctagagactactaacaacacattagagatagaatgctcattagaaattgcaatgttacctaaccctattaccttgccttgattcccatcaccgaatatgattgaatcttgggaactctattcttgacgangaagtgacatcttcttctcctcgcatatgtttggcatcgctgcaatatccacttgacccccgatgctaact

SEQ ID NO: 43498 - DNA, 436 bp, Zea mays
  unsure (1)..(436): unsure at all n locations
tctatagggagaacacgtgataggtctaactaatgttactttcgaanaagatagaccttgtgcagcttgtcaagcagggaaacaggtgggaagccctcatcatgccaaaaatgtgatgacaacatcaagacccctggagttacttcatatggacctcttcggacccgtcacctatctaagcataggaggaagtaagtatgttcttgttatagttgatgatttttcccgcttcacttgngtattctttttgcaggataaatctgaaacccaagggaccctcaagcgcttcctaaggagagctcanaacgagtttgagctcaaggtgaagaagataatgagcgacaatgggtccgaattcaagaaccttcaagtggaggagtatcttgaggaggaaggaatcaagcacgagttctccgttcctaccaccacagcaaat

SEQ ID NO: 43499 - DNA, 466 bp, Zea mays
  unsure (1)..(466): unsure at all n locations
acgcttgntgttctacgaatggatgtgtattctctaatactcggcgactggttntgacacactaaatcatcatcactaggtgttgtcttcataattgatgttcacattaaagaaatttgattctgctagaagctatgttgttctatgaaacgttgtgtattcacaatgacttggcgaatggttttcacacactgaatcatgaccactaggttctgtcttcataattcaatttgacattaacaacatttcattgcgatgtgtattcacaaatacatggcgactggtcttataatccaatttgcacactgaatcataacacctgttgtttggcacaacattatacagtaatcttgatcattatttgaactgcctattggcaatagtagctggtccgagtatatttaccattataatttatgaactaggccaccatatacataaaattttgacgtacatattataacag

SEQ ID NO: 43500 - DNA, 384 bp, Zea mays
  unsure (1)..(384): unsure at all n locations
ngaataatctntttacgaacttcccatggaagtcctgaattgttntctagttaataaccattgggttaataaagccaatattgagagcacgagactataataccaattgaaaagtccatttgttttggttcattnnttgtcatctagctagtcccgtttttatcccatttttaaaataaaataagtaaataaaaattgagagagtagttattccgacggagaccctttgctttcatccctacatcggatttaggccgccaaattatagaagcgggtgggagacaaaaccaacggnggatannttggattttgctattataaagaatggtctccttgttataattaccactgagtctctgacttgtgagttcacctaagtctatg

SEQ ID NO: 43501 - DNA, 457 bp, Zea mays
  unsure (1)..(457): unsure at all n locations
agcttcgcagcttgagacccaactgggtggtacttagttngaagaaattcacgaaagacaacagcatatccgtagagtccttgagacctttcccgacgaatcggatgtggtttcagatcaacaagtaatttgtccaacgacaatactatttttactcattatacgtacatgtatgcatacttctttctagcagtatgcgaaccatacttttttttgtcaacaggatttctgttttgatgttcgaaacataagtttgaggaacacaaatatcacacctcaaaccacatcagcttgcacctgcttgcccaaatttgacgtgacaccggaaaaaaatggttgttagcagtccatgtctcatgttataattacattttactatacatacaacacagttatactaatcatatacctttgtgtagagaggtgcaatggcaacagaggaaatggaacacaatga

SEQ ID NO: 43502 - DNA, 459 bp, Zea mays
  unsure (1)..(459): unsure at all n locations
tcggcatagtccactccttcatagttggaaatactctgaaggccagaaattcctgcactaaatctctagtgccaatgtgttctgcaataattttgaattcagccagtgcggtccaagttggaccttctgctgtcatattgcatcggggtctggtttctccgaagatcagttcaagagggctctgtaccagcttctctttgtcatcgtcaactttgacataaaaccattctgacttccagcctgccggccatttgcttcggtagctaatcacaggaaattntgtggttttccgataggcaaaattataacaaccaaaattttcatgcaacccatcctttctggccttagtctggtaatgcagctcatgtactcgacagaagctgtcggcaaacggctccaccgcctggcttcggagagcccagatataaatgctaagcctgacaatggcgttaggagtca

SEQ ID NO: 43503 - DNA, 498 bp, Zea mays
gcttccgcatagtgacatgtctcaagacgaaggagtgaaccgacttatagatgatattatctatcgacccatgatagctggtattatgattgtaagcatttggtaagggcacgaatgtaatttctcacaggctgcgttctgtgcctataaatagatgaacagtacccccgtactgttcatgcaatctgataatcgcttgcacgcgacactcggattattgccttctatcaagacgaaggtataaatgtgattaaatgttatattttaatgtccaaatctacataatgataatatatgaataccattatatgtttgttcatatgatctttcatgttttcatatgtttcatctttcattatcttataaccgtgatgatgaaggtatgtcctttatgaccttcgtccgaagatcgttatatcctaagggaaataatgcttcgaaggacgaacgactctaacatctaacgttttgtgttgccttggtctttgatcataacat

SEQ ID NO: 43504 - DNA, 421 bp, Zea mays
agcttcaactccatctatatttcggatcgcgtttgtatctgtctcaattccttcggcccttctggcagcttcctgactttcatgaatagcaatgggcccttgtgccgaaggtatcttcatgcaaagataagctggatgaacaattgcttcgaatgcattgagagtaccaccaccaatgattgcattgtaagggtatttcatgtcaacaatatcaaacacatctttggtcagtctcttgtgcttgtgataaatccgaacgtcactggcattttgatattgccgagtgctacaatctgccttcctccgaaaccacaaagaagatgtgcggcatcatgaattctggcttcgggctctagcatctgtctgaaggccttaacaaatatgatatcacctgcgctagcctgatcaaccaaaacattat

SEQ ID NO: 43505 - DNA, 361 bp, Zea mays
cacagatgaacaacacttggatgggcctcaatggccccatgaaaggatgccactgatccttgcccattgggtggagtgaactgcagaaaattttgtacctgcagccagctaaagcaactcatagttcttaaatagcttactaaatataaatttaaaagtaacaaaaatcgttccttactaaaatagtacttgccggagcttatttagctcacttgacactgaatagcctccgatccgatgagtgggcaattttacacccccagcgtcggcttttccaccgcctgcaacatctaccttgcgacaaggtaactgctatgcttgtgactatgttgtgtgctaagtgaggagtgtgtctattgta

SEQ ID NO: 43506 - DNA, 417 bp, Zea mays
  unsure (1)..(417): unsure at all n locations
cactcagctnggaagccatcacaagtttattgaagaatgacattaagttcatattggtctttaagtgtaatgaagcctctgagcaactgaagacactattgaccactgctccgatattggctcaaacggacatcactaagccctttgatgtatatagtgatgcatctggcatggggctcggctgtgtactgatgcaagagggccgagtgattgcgtatgcttcaaggcagttgcgccgacatgaggagcactattcaactcatgatctagagctagctgctgtggttcatgccctaaagaattggcgtcactatctgctgggaaatatctgtcacatatatacagatcataaaagtctgaagtatatcttcacccaatcagagttaaatatgatgcaaagacgatggcttgagctca

SEQ ID NO: 43507 - DNA, 405 bp, Zea mays
ctagcagtaacatattctactttaagagtgaaatcgtatcttgcatatatctaatctttagccttagccatcaattcttcagtttcaatcctaaggcctgtacgagaagcattcaatttttcaatcttatcaagtcaactagcattatcatttctaagactggagattgaatcatcacatacatttgaatcaaccttaacaattaatctaacattctcatttctaacgttggcaatgacatcatggctagtgcttatctcactagatatgctctcacaattttctacttctagagcataagcatttttaaccttaacatgcttctgtttgtacttagataggaaagcctcttgggtgtccaatagatcatacttttcatgaatagcactaagtatatcattccac

SEQ ID NO: 43508 - DNA, 311 bp, Zea mays
agcgcatcacagcaagaatgtgatgaccagctcaagacctctggagctgctgcatatggacctcttcggacccgtcgactatctgagtatatgaggaagtaagtatggtctagttattggtgatgactattcccgcttcattgggtgttcttttgcagataagtttgaacccagggacctcaagcgcttcctaggagagctctaatgagttgagctcaagagaacaaataggagcactactggccgattcaagaccttcaatggggagctcttgaagagaaggacaactcgagtctctgtcctaccaccac

SEQ ID NO: 43509 - DNA, 377 bp, Zea mays
  unsure (1)..(377): unsure at all n locations
ntcctgcttcacagcttcggcactgggtcaaccttcggatcatangttcttctccctttctgattcaagaccgaagatacctgttcacacattatactccacatacattgttaaatcatgttattgaggaccttcggaagccgaaggcccccaacagtagcccctcgcaatattaatttgtttgaaataataaattcagattgcgatatgaacgaaggctntatgccgaaggtccgaaaaaacaccttccctttgctagaatagcaaccttcaatgacaaggggngtctttcaactttcaacacttcatgcgtataaatacagccataccgcatacttattttgcacgctctctggccaaccactcctgctcactca

SEQ ID NO: 43510 - DNA, 418 bp, Zea mays
  unsure (1)..(418): unsure at all n locations
agcttgtgaaggttcttcatactcacatgtgctttgcggtgatgccacagncagcccatgctagtcttagctattaagcatgcatctagaccggcctcttcttttgcaaaatcaactaaataaagtttgccgtctaatacacccttaaaagctagggaaccatcacttcttctaaagacagacacatctatattggtaaatagacagttatatcccatgttgcataatngactaacagatagcanattataaccaagagactctactaaaaacacattagagatagagtgctcattagaaattgcaattttacctaacccttttaccttgccttggatcccatcaccgaatatgatngaatcttgggaatccttattcttgacgtaggaggtgaacatcttcttctcccccgtcatat

SEQ ID NO: 43511 - DNA, 459 bp, Zea mays
taggacctataaaactcagcttccctggcgaccgaggctggacttggctgctgtcagcctcactctgtcgagtggcacagcagtcggagcggtgcaggcggcgctgttttcctgtcaggtcggtcagtggagcggcgaagtgactgtggtcacttcggctctgttgactgaggagcgcgtcagcataaggtgtcagtcgatccttgcattaaatgctcctgcgatacggtcggttggcgtggcgatctggccaaggttgcttctacgtgaagactgggcctcgggcgagccaaaggtgtgtccgttgcttgagggggccctcgggcgagacgtgaatcctccgtagtcggctgcctttgcccgaggctgggctcgagcgaagcgagatcgtgttccttgagtggactgagccttgaccttaatcgcgcccatcaggcctttgcagctttgtgctgatgg

SEQ ID NO: 43512 - DNA, 405 bp, Zea mays
agcttctaaagggagaacacgtgatacgtttgatcttatttgcaattcacaaaagatagaccttgtgcagtttgtctagcacgtaaacaagtgggaggagcgcatcacagcaagaatgtgatgacaacttcaagacccctggagctactacatatggacctcttcggacccatcgcctatctaagcataagaggaagtaagtatagtctagttattggtgatgacttttctcgcttcacttgggtatactttttgcaggataaatctgaaacccaagggaccctcaagcgctttctcaggagagctcaaaatgagtttgagctcaaggtgaagaagattaggagcgacaacgggtccgagtttaataacctccaagtggaggagttccttgaggaggaagggatc

SEQ ID NO: 43513 - DNA, 364 bp, Zea mays
ctgtgtggagttgggagaggacttgatcacttgtgtgagtctctaattgaatgctagagctcttgtaagtagctggaagatgagaaacttggattacttgaatgtggggtggctggggtatatatagccccaaccaccaaactagctcgttggtggaggctgctgtctcatggcgcaccggacaattcggtgcgccagtcacgtcaccaagccgttgggtttcgaccgttagagctctgacttgtgggctcgcctggctgtccggcggtgacctgtaaaactctgacgctgtactgtgtgctacccgcacgtgctatgactattgcgctgcgctggcgcgcattcaatgcgcctgcagactacc

SEQ ID NO: 43514 - DNA, 480 bp, Zea mays
  unsure (1)..(480): unsure at all n locations
tgcaagcttgtgaagggtcttcatccccacatgtgcttatcggcgatgccacagccagcccatgctagtcttagcaattaagcatgcatctagaccggcctcctcttttgaaaatcaactaaatagagtttgtcgtctaatacacccttaaaagctaataaaccatcacttcttctaaagacagacacatctacatttgtgaatagacaagtatatcccatattacataanttgacttacggataacaaattatatccaagcgactctactaagaatacattagaaatagagtgctcatttgagattgcaatcttgcctaagcctttaaccttgccttgattcccgtcaccgaatatgattgaatcttgggaatctttattcttgatgtaggaggtgaacatcttcttctcccccgtcatgtggtttgtgcatccgctgtcgataatccagctagatcccccggatgcataaacctgcaa

SEQ ID NO: 43515 - DNA, 366 bp, Zea mays
  unsure (1)..(366): unsure at all n locations
tgagttatnttattacagaccagaactattattgtgtgcagatgagtacaaaccaagggaggcacacactcctccagataagctataagcaaaagatcctaagtggaggaccgagtcctcccgcacttcagtcttgtttttcttctttgggaaccaccttggcacagaagcagcaaaagtctactacttcctcacctaaaaacaacgaagggataaaccctgagtatggaattactcagcaagtcttacccgactaaagaaaagactctcaagggtatgctggttatatgagagtcaagggaatgcttctcaaatatcaatgactcttgtttgcagaaatgcttactaaagtggatccttaaaaat

SEQ ID NO: 43516 - DNA, 408 bp, Zea mays
  unsure (1)..(408): unsure at all n locations
agctncctcccttctctggcggaagtcgttgttattctctgatgtactcatccatcttctgaagcagcttctccagagtttgcgagggcttccttgcatagtactgagccgtaagtccttgccgaacgcccttaatcatggcctcaatgacaatctcattgggcactgtaggcgcttgtgcccttagtcgcaagaaccttcatacataggcctgaagggattcttcgtggtcttgcgtacatttgaacaaagcctgagctgtgaccggcttcgtttgaagccttggagctagaaccaacatgtcttaagctttacacgacggatggtcctgccgagagaagatacatatttggctaactccgactacgtgagccttagcatatgataaaatatatacatgatctcgtg

SEQ ID NO: 43517 - DNA, 401 bp, Zea mays
  unsure (1)..(401): unsure at all n locations
ntgcgaatgagttcttccagcatcggtttaacttctanactaccatttttctcccaaacaagaattcaggtgagtcgattctctcttccagtcttccaggaagtttgttgctttcgtcccgaaaggtttccggctgagggcgtcagccactacatttgccattcctgngtggtagtggatttcaatgtcataatccttaattagctctagccatcttcgctgacgaagattgagatactggtgggtgaagatgtacttcagactcttgtgatctgtgaatatgtgacatttgttctcaatcaagtagtgtctccatattttaagagcatgcaccatggctgctaattccacatcatgggttggataattctgctcacgaagttcgagtatgcgagatgcat

SEQ ID NO: 43518 - DNA, 406 bp, Zea mays
agcttctaaagggagaacacgtgatattctatccaatgttcatttcaaaaagatagaccttgtgcagcttgtcaagcaggtaaacaagtgggaggagcacatcacagcaagaatgtaatgacctcgtcaagacctctggagctgttgcatatggacctcttctgacccgtcgcctatctgagcataagaggaaagaagtatggtctagttattggtgatgactgttcccgcttcacttgagtgttctttctgcaggataagtctgaaacccaagggaccctcaagcgctttctaaggagagctcacaatgagtttgagctcaatgtgaagaagataatgagcgacaaccgggttcgaattcaagaatcttcaagtggaggagtttcttgaggaggaggggaataag

SEQ ID NO: 43519 - DNA, 455 bp, Zea mays
  unsure (1)..(455): unsure at all n locations
gaacctgcattacggacctataaaactcagctaatgccctaaaagattgtctaattntgttgagggcaaagctcccatggttcaggatagtgaaggttacantttatatcctactaactatcctgagcacaaaattagaagaattcatgctagaaaacctcacattgtttctcatcatgcatttatgtataaaactgaggcttctagctctaggcaatcaactcatgttaaattgcctaaaaagaaatctcctgttgcatcaaatgagcataacatttcatttaagacttttgatgcctcatatgttttaactaataaatcaggcaaagtagttgctaaatatgttgggggcaaacacaagaactccaagaacctgtgttgggtacccaaggtgcttgtttctaacatcaaaggacccaagactcgttgggtacctaagaacaanggcctaaatt

SEQ ID NO: 43520 - DNA, 486 bp, Zea mays
  unsure (1)..(486): unsure at all n locations
gcgcataattatacctttgatatcttctcgtatgggcagatcattcttcacataaaaccattctgtcatccagtcgccgggccatctcttccgaaaggttggcacagggcagcttgacccggaccgagaaatgaaactgtagcagccaaaattattgtgatactgttccttaccccaaggttttgtctcgtatgataattcgtgtatattaccagaagcttttgcatcangcttcagaccttggcttctcacggcccacacgaagatattcagccttataattgcctcggnggtaagttgatggagatagacttcgaatattttcagcacctctacaacgaagctgctcaagggaaatcgcagtccagctttcaaaaagcttcggtacactacgacttcattctcttcagggtgtgggcccaagtttttccccttcgtcggccctcacaatggataaatcnnccgaagtaccttctctcatgttga

SEQ ID NO: 43521 - DNA, 455 bp, Zea mays
  unsure (1)..(455): unsure at all n locations
ngcctactgtgtcanggttggctactctccgaagcaccaaatgtcctggcttaatgtttntcaaccgaacttttctatcacgccattttattgtatcggcttgatatttgttgatattttccacagcttgaagtctggtcccttctaccgaagctattgttcttattgaccccgctttagcctcttcggnggttatagcttcatcaccgaacaataacttgaatggtgtaaaacctgttgaccttgatatagttgtattgtggctccacgccactttaaccaactcatctggccactttcctctaggctgattgaagattaacttcattattctcgtcattataataccatttgccctttcaactagtccgtttgattccgggtgcctgactgatgcanaatgaatnttcgtgccgatctgatcgtagaaatctttgaaagttcagcatcaaact

SEQ ID NO: 43522 - DNA, 354 bp, Zea mays
  unsure (1)..(354): unsure at all n locations
atatcagatgctctgagaaaagattactttacaaacaatggtacctttcgtacaaaatactccatccgtaccaaaatataattcattgtagactaatcatacatttattaaataacataagaaaatagcttacatgtatggctatatttattattatctaaatgaatggggatagaaaaatataggctaagaaaaactatattttatgaccgagggagtaatatttcacacgcgtatatatgtgatctgcttgatggaggctgactcggtgactcctcttgtgacgtgagaaatcgcttctctccttctatcgtgagttggcatangagcaacatttgtgaagtacacctgttc

SEQ ID NO: 43523 - DNA, 441 bp, Zea mays
  unsure (1)..(441): unsure at all n locations
tctanagggagaacacgtgataggtctaaccaatgttactttcgtataagatagaccttgtgcagcttgtaagcatggtaacaagtgggaggagcgcatcacagcaagaatgtgatgaccacatcaagaccttnggagatgcttcacatagacctcttcggacccgtcgcctatctaagcataagaggaagtaagtatggactacgtattgttgatgacttttcccgcttcacttgggtattctttttgcaggataaaactgaaacccaagggaccctcaagcgcttcctaaggagagctcaaaacgagtttgagctcacagtgaagaagataaggagcgacaatgggtccgagttcaagaaccttcaagtggaggatgtccttgaggaggangggatcaagcacgagttcttcgctctctacacaccacaacaaaatggt

SEQ ID NO: 43524 - DNA, 347 bp, Zea mays
  unsure (1)..(347): unsure at all n locations
aattgagccagccagagaagaaggccaaaagagtgcccaatgagctcgtggcgtgctcttatttatacgcccagtacgttgaaaacaaaagggccccgcttgtcattgacttgtgctattctaacaaagggaaggtgttttttggaccttcggctganggccttcatccatatcgcantctgaatttatcattctaacaaattaatattgcgaggggctactgttgggggccttcggcttccgaaggtcctcaaaaacatgatttaacaatgtttctggagtataatatataaacaggtaccttcggacatggatcgaaaccagagtgtgaagaagtacaaggaata

SEQ ID NO: 43525 - DNA, 486 bp, Zea mays
  unsure (1)..(486): unsure at all n locations
tctcccttatgacgaaggcacacaagatgaagacaaatccaaagaggataagagtaaacgctgaagctatcactagatggacagcttcggctcgcaatgaagatgatgaataatgatgatgatcaaaagaggaaaagactacttagtccttaataacttgtattacgatcatgtgtaaatgttgaggacataaatgcacttttacttgggctgtgtcccgtgcctataaatagatgaacaagtccaccgtactggtcacgctgatttgtaatcgttgtcccgcattcacgccttcgaacaagccgaaggtatcaatgtaatattaatatcatcgcatattcatttgtcttatggaatacaaatagatatgaattaataagatctagtcttcatttttgtcctttccgactcttattcatgtatcanataatgaaggcaaatctctcttgatcttcgtctaatgcgcatatctccatgtggagataa

SEQ ID NO: 43526 - DNA, 473 bp, Zea mays
  unsure (1)..(473): unsure at all n locations
agctnttagagacataagagatccttagataacttcaacatccattaatccacatggatatgccgtttagagataagttgataaaatgacgtcatgatccttatagaaagagtatgagaatgatcagaaatgagagatttatgcaagatcaacatctgatacttgagaacgggttatagcagataaccagataacggggcagattcaatgggggatcccgagattcggatgataagccacaacatgattcacagaggaaaagattaccagatctaggtgaaaagagaggtcatcaacctagatggcttctgggttgagcagaggagaacttaatgaggagtttggacaaggttcccacaaaaagaatttgaggctagatatggtttgcgtgaacagacagtaaaccatttttttggcatacacaagggcacaaggaagctttagtcgatttaagggtcgagctatgagtgtct

SEQ ID NO: 43527 - DNA, 307 bp, Zea mays
  unsure (1)..(307): unsure at all n locations
ttcatgcttcttcttacaatcagtgctggacatccncaatgtgtattgcttgggcgaatgaaacccttatccaccaattcttgcaactgcttcttcaactctgccaactcagcgggtggcatatggtagggcctctagtacatcggagtcagttccggttgctactcgatggcgaattctatattctggtccggtggacttcctgcaattcatcatggaagacatatgcatacttacaaatcactgagatcttcttcacgggtgactccgtcatacataaagctaattactgagtataaccttgact

SEQ ID NO: 43528 - DNA, 346 bp, Zea mays
gagcacatattaggattaacttttgttcattttgagaaagacacgatttgtagtgcatgccaagcagggaagcaagttggtgctcatcatccacacgagaacatcatgacgaccgacaagccactgaagctcctacacatggacctattcggcccaatagcttacataagcatcggcgggagtaagtactgtctagttattatggatgattattctcgcttcacttgagtgttctttctgcaggaaaaatctcatacccaagataccttaaagggattcttgagacgggctcaaaatgagttcggcttaatgatcaagattataagaagcgacaacgggacggagt

SEQ ID NO: 43529 - DNA, 400 bp, Zea mays
  unsure (1)..(400): unsure at all n locations
ntggccctacctgtaggctcgtatcctcctctgaggtgggcctggtggccactgtcggtaccctgaaactagggtaccccttactacagtatgaagacgcagtacccacgcggctatctttagtcgcgtggtaaaggagctgtgcgtggggccaggtcgtgactcgccccagcctcgggtgactactctgggccagcaacagcatccgaccccaccacgtgggcggctctggggccgccacgtggccagagaaggtgaggtactccaaggcatcgacagtgagttcggaccccatgggagagtgtcggacccctggatatacggtccggacctctaggttggtccaggacccccacatatacggaccggacccctagaatggatccggacacccccgtat

SEQ ID NO: 43530 - DNA, 496 bp, Zea mays
  unsure (1)..(496): unsure at all n locations
agcttctnctggacaagtgctgcacttaccgttgagtgcgtaaccgccacatataataacaaaggagcccctggcgttggtggagttaatgttgttaaatctatcacatattgcttcagttcctcgaaggctttctagtggcttggtccccattgaaagacttcggctgatttcagcacttctaagaatggtaaatttctttctgctgatctggatataaatctattaagagatgccaaccttcctgttaatctttgggcccnctttttgtagttggtggctccattcgaagtatagcttcaattctacttggattagcttcaattccctttgttgaaaccaagcatccaagaaatttccccttctttactccgaagacacattnttctggattcaactttaagccagcttgtctgaaactggcgaatgtctcttgcaaatcagcaatatgaatttcctgtttcgtgctttttacaatgatgtcatcaacataagt

SEQ ID NO: 43531 - DNA, 401 bp, Zea mays
  unsure (1)..(401): unsure at all n locations
ctacacctggcctatcacatatattaatgacttgatcccttcttgtatgaccacaaatcaaacacaacgtacgtatttctgcaacacttatttgttgaacatgttgtctttttgtaagatacttgtgattgctctatttcttgtataaatttgatcaaatgtaccattttgcttgttgtagagtaaacttggtgctgacaaccaactttgttatgtagaaaccaacatcatgatacttgaaatcagaatgaacatgctagagcacattaacagtactaaaaaggtcgaagtgaaacatacaatnttgcatattagaagggaaaaaggttcaactgaatcagccaatggatttgattgattttccttgagttttgaaataagaaaattccataatttcttca

SEQ ID NO: 43532 - DNA, 389 bp, Zea mays
  unsure (1)..(389): unsure at all n locations
agcttagccagaagcatcgganatagattctttatctatatctgggtaagcggcggacggagaatggcgngcgacgaagctcgaagccatcttaagccggctaaaaacttatgtttgttacttttaccttctcctttgaaatttgtacctttcttattgtgttgtttgatatatacaagatgacgaagctgaatattgacagtgctgaagtttgataaaactgaagacgaagccttagctacagcttaaaattgcttataatgtgctttcctgcaaaaattcttggagaaacttttgtaatatagatatggagtaacttatgtaaatttgtacataccttgtaatatattctgtctgctttaaccgcatccagtctgctttgctgtgga

SEQ ID NO: 43533 - DNA, 442 bp, Zea mays
  unsure (1)..(442): unsure at all n locations
tcttcaccgtgtgatcacgggtatcttgagaatgttgagcaatgcacttcccttttattagtgtcaagctcatttttagccctctcatttcttctttgagcttttgatatgtatcatcgtttgttcctgcaaattctagctcaaggaaagatttgcttgtcgactgacaacaagcatcagcacatggttatgtagtttcaattcgaatacatgtgcatgagtgacgttgttgggattttaagttttctatcacaacctcatgagccatattcaatatgatatgatcatccataagattntcatgagaacataggagcatatcatatttttcttgaacagctagattttcatcctttagattgtctacttggtccttaagcaaggcattcctatttactaattgagcgatacaatgttaagcggtatcttgctcaattgaaat

SEQ ID NO: 43534 - DNA, 372 bp, Zea mays
  unsure (1)..(372): unsure at all n locations
agcttctaaagggagaacacattntgngactatcaaatgttcattttgagaaagacaggatttgtagcgcatgtcaggcagggaagcaagttggtattcatcatccacacaagatcatcatgacgactgacaggccactagagctcctacacatggacctattcggcccgatagcttacataagcattagcgggagtaagtactgtctagatattgtggatgactattctcgcttcactagggtgttctttttgcaggagaaatctcatacccaagagaccttaaagggattcttgagatgggctcaaaatgagttcggcttaaggatcaaaaagattagaagcgataacgggatggagttcaagaactcac

SEQ ID NO: 43535 - DNA, 408 bp, Zea mays
  unsure (1)..(408): unsure at all n locations
tcaagccttcgaactgtatccaaatatttctcaagcttcggatctcttgctntacaactcttgtcaacatgaccagaaataactngggaatcggttctgagaaccgcccttcttatccccattgccttcaacttccgaagccccaaaagcaaagcttcgtattcaacaatattatttgtgcagctganatcaagtttcactgcatagcatgttctaactttggaaggtgcaactaaaacaacagttgcacctgccccgaaggttccccaagaaccgtcgcagaacaccgtccaagcttcggcatctttacttgcttcttcctcctgagcccctggcgtctagtcagtgatgaagtctgctaacgcctgngatcgaatcgaggatctatgcacataatcaatgctgaat

SEQ ID NO: 43536 - DNA, 479 bp, Zea mays
  unsure (1)..(479): unsure at all n locations
agctngagtgagacagaaggcgattatgacgattgataagatgatcacgaagctatgcgcagaanagcttctgcatgacagcagaaaaggggaaccgacttaaagatgaaaaggcaaattagaccccgaagaattactatagagttattgataaatgtaaagggcattaatgtaattctacacgggctgcgtcccttgcctataaatagatgaacagtactcccgtactgttcacgctgacttgacattcacttttcgcatcacgcctgtacctttattttccgtcaatccgaaggtacttttataatttgttattctgaatatgataatgaaaataaaaataagttgacgataatatctatattattctttgtattccatatatgaattcttccttatcatctatcgagcttacgaaggtttcttccttcataaccttcgtccggaattcattatatccgaagggatataatgtcttg

SEQ ID NO: 43537 - DNA, 322 bp, Zea mays
gcttctaaagggagaacacgtgatatgtttgacttacatgccattcgaaaaagatagaccttgtgcagcttgtcaagcaggtaaacaagtgggaggagcacatcacagcaagaatgtgatgaccacttcaagacctctggagctgctgcatatggacctcttcggacccgtcgcctatctgagcataggaggaagtaagtatggtctagttattggtgatgacttttcccgcttcacttgggtgttctttttgcaggataagtctgaaacccaagggacccttaagcgcttcctaaaaagagctcaaaatgagtttgagctc

SEQ ID NO: 43538 - DNA, 332 bp, Zea mays
  unsure (1)..(332): unsure at all n locations
tagaccttatgcctctntctntgatgggtgcataagagccttatatggtacacatattctagctcacgtatgtcataagttgaggcttgaacacataaatagaaaagggtggtctagctacaatgtattangtatagtgggcatgtgatagtcgcctagagggggggtgaatagggcgaaactgaaatttacaaatataaacacaactacaagccggngttagcgttagttataaggaacgagtccgcaagagagggcgcataacaaatcccaagcgaataagcaagtgagacacggagatttgtttaccgaggtcggtcttgcaacctact

SEQ ID NO: 43539 - DNA, 352 bp, Zea mays
agcttcttggaacagcctccgcctccacctctcgttgaacaaggccagcagccagaagggagccagtatgctccacaccagagggacttcatagagaagtccgaagctcgtacagtcaatagcactgtgccagagtcaaagcacatctattgacaaatatcctaccttaatagcaatctttttcattcagttttattttctgtaataaaggacatttgttaggcttcatgtaattagtttcgttgattcctacaaggaaaatatattttctacacaggcttatattgataacaaagaggaccttcgaactatcgaaaattcttcgaagcaacaaaaagtcgttctaaggaac

SEQ ID NO: 43540 - DNA, 453 bp, Zea mays
  unsure (1)..(453): unsure at all n locations
gtagcccctgatttctaattagatgttcaattgttcaatattagatggcaggttagtttctaatgatttaatttgttttgacttctaatgctctagcaactacatgggattcaattgtttaacattactttagcaaacctgatctaatgctttcaatatttgtcggggaccataattaggggtaccctcaagacgcctaattctcagctggtaacccccatcagcataaagctgcagaggcctgatggatgcgattgagtcanggatcagtccatacgagtgactcgatcacgcctcgcccgagcctagcctcggacaagggcagccgaccccgagagatttccatctcgcccgaggcccccctttaacggcggacacatctncggctcgcccgaggccttgccttcgctaagaagcaaccctgactaaatcgccgcaccgactgaccgagtc

SEQ ID NO: 43541 - DNA, 521 bp, Zea mays
  unsure (1)..(521): unsure at all n locations
atctctgagtcacctgcggcatgcaagcttcggcagataagagtagcagtcttttatgttntgttatgtaaagaaaggcttcggcaaaaagaggaagcggccttttatgcttcgttgtgtacgaaaagaagggaaggtgttttttcgccttcggctcaaaaagctgatttcgtccacatcaaagcacctcaatcgaagggtaagaatatattacaaggtatgtacaaagttccttgaagaaacagttaattctatttacaagagttgttacaaaattatcctgagtttttctaaagcacacttctgctagtcttcattaagcttcagcttcgacgacgacttcggcgacatatcctangcatcatcttcaccttcgtcatcctacatgagtccaggaatcataagaatcaagtccanagganaagggtagcacgaaatgtcatttcttactggntcaagatacttcnggcttcgtctccactttctctcgccccgcctttgtcataccattttataatcta

SEQ ID NO: 43542 - DNA, 390 bp, Zea mays
  unsure (1)..(390): unsure at all n locations
ctcagcttattcccaattcataactntaagttacaattnctgtaccttcaggctgttgtacgcaaggctgtccgcgaggtcatcctttgacatggcggaaaggccaacttccagctntggaaatcccaagcttttagccatctcccggcatacaaatatctctttgttgtccaggagacagtacaagaaatcatcttcgtctgtgccattaaacaccaaggccccctccgaatatttcagtttccgggcgtaatgtttggcttctaagatttcttcttcggataatcttttccctgaagcatgtcgaataatgtaattagtatcttcggacggagctctgggagcaggagccttagttnttctatcacgacttgcctcgctgtcatactg

SEQ ID NO: 43543 - DNA, 461 bp, Zea mays
  unsure (1)..(461): unsure at all n locations
agctnntccttgtcgtcatcaaccttgacatataatttctccgacttccagcctgctgcccatntgcttcggtagctgattacaagacactntgttggtttccgattagcaaaattatagcaaccaaaattgtcatgcaatccatcttttctagccttcgtctgatagtgcagttcgtgaacaccacaaaagctgtccgcaaacggcttcaccgcttggcttctgagggcccagatataaacactaagcctaacaatagcgttaggagtcaactgatgaaaatagataccgaacctcttcagtacctctgcaataataccatgtagggggaatcttaatccagcctttataaagtctttgaaaatgacaatctcattcttctncggctgtgangtagtctcttctcacccgaagcgtaatagcttcttctgattntcattgaaaaagcccgactttaccat

SEQ ID NO: 43544 - DNA, 458 bp, Zea mays
gcttcggggccgaagcaacctcaaacttgaatgaagccatcagcgtcttgatgtggatgtgagttcaccggaggtgggcgccaatgttggggacttgttcttatctgctatgaattaagaacaaggcaacacaaaaattgttaaatattatagtccttcgtccttcgaagcattattttccttgggatataatggattcccgacgaaggttatgaaggtcatacctttataagcacaacaaataatgaagaaggatttatataaaatatgaaaaataatttaaacacatgattattattattaactcatttctatctcattattatagaaatgataacaaattacaaatgtaccttcgacttgaaggacagctaaaataccatcgtgaagctataagcaatgctcaatgcatgaatacaggagcccgtgaacagtgctgagatactgtcaccttatta

SEQ ID NO: 43545 - DNA, 502 bp, Zea mays
  unsure (1)..(502): unsure at all n locations
agcttggtctcttcnaaaaagactatatgcatggcattgtttatctatntataaggaagttgaacaacttgataggcaattacaatcatgcgcataaatgttacacacatgctttacaagtaatataggggcattactatctttgctcattctctctcggcacacaagccttgaactccttttactctgtcgcttttcgcccaaagtcttctccataccgaagctaatggatttggatggagccttcgctgcttgtatgcatgtgaaagaagcattacctttgttccttcggccgaaggccagcttctcctgttcttcactttatgcctgagacacattagtgttacaccgaataagaggtgtcttgaggaacttcgactaggtaggtccccaacagaaaccattagcaataagatagtatcttaagcattcataccatgctcttagggctcgtttgagccaataaagcgcctttgtgagcttataaacacgtgaaggatac

SEQ ID NO: 43546 - DNA, 443 bp, Zea mays
gcttcgcatctctgaactaattcggccgcatcgttcttcgccgttggccaatagaatcctgaccggaataccttcccgactagtgttctggatgctacatgtatcccacattgccctgcatggacttcctccagaagttgtttcccggtggacgggagaacgcacttcatgaggatgcctgacgcgccccttctgtacagttcctccccaatgagtgtatagtgagccgactgcctggcgatgcgctctgccgagttcttgtcgtccggttcttcttcattctttatatacttaataatcggtcttctccaagtatcagaatctgactcgagttgattatgatgttgcactcttctgttgatccattgagatactcggctgcaggattcttgcacgaagactcccggtgggacctgatttcaccggattcgagcttgacagtc

SEQ ID NO: 43547 - DNA, 435 bp, Zea mays
ttaagtcacctgcggcatgcaagcttatataagagaatggaggcatgaacattaccttatattataatagaaggggagttatacaaacatggagtctgctctccacttcttaagtgtctatccagaaccgaaggtatagagctgatgaaggaaatacatgcaggattgtgtggatctcacattggatctagacctttgctggggaaggtcttcagacaaggattttattggccgaaggcagcttcggatgcaactgatctagttcaaaagtgtgaaaattgccaaaaatgcgcaagagaccacaaacaaccttcgtcattaacccaactaatacaaccaacttggccattgcaaagatggggcctgggattgttaggtccactcccaccagcacaaggcaatctaagatatgtcgtggtggctgtaaaatatttt

SEQ ID NO: 43548 - DNA, 389 bp, Zea mays
  unsure (1)..(389): unsure at all n locations
ntagattctacgcaatntgaagataaatgtgacacacttgctcatataggaagggtatgggttcatatatctttcatattagtattttattgtatagatgactagaatttccttactccaaatccctttatggtttgatggggtatgtcgttgacgacgtaatgcttgatatgaaatgttacttctatttaatattgggttcttgatgtggttgttattgaaattattatgcaagtgaagatactaatgtacttgntttatatacatatcgtcatgatgtttttttgggatgcaatgtttactaatctctgagctattaccatcatatatttctatatgcttgactatgggtggttttttcccaaaaggattcttgtgttctagtactt

SEQ ID NO: 43549 - DNA, 369 bp, Zea mays
  unsure (1)..(369): unsure at all n locations
agctngcnctacaccagctacattnttgtgatttatgttgacgcgctgccctcatgtgagaacctgacggagctctatatctgcttggcattgtccaaaccgctcaccttatgatactcgtccctgcacaaagaggctaacaacacagtagtagctcgtgcatttctatgaatctgttcattaataaacataagactatccgagctatcaaatttcattccacttttcacaatctcccatatgctctgatggagagagaacaagtgactacttcatttgtgactccaaaattcgtagttctccccatcatagtgtggaggtttgccaagagggatgtgaagcttatgtgcatttgagctatgtggaata

SEQ ID NO: 43550 - DNA, 429 bp, Zea mays
  unsure (1)..(429): unsure at all n locations
agcttgcagcataagaaaagagtatagaatccttccacaacactgaacagaagaacatcttcactgacttccaacataggcaaacacaacttctcagataaagaggaaagtggaataaaaggcttcccaactagatagctaacttcattaacatttaacaggtaaaccaaggtgcaggggatgcccacactctagtgacagtcattacaaagatccaaatccaacatagttcatcataacaagcataaaagcacaggataagcaaactaccctgtctaactaagactaactaaaagtaagaccgagactaagacaaagagtaagactaagactaaaatntctatattaagcatttattacaggacccaacactgacgatctatggttctaaatntatnttggtcctatagtcgagagtggcataaacct

SEQ ID NO: 43551 - DNA, 471 bp, Zea mays
  unsure (1)..(471): unsure at all n locations
ntaccaaatggatgtgaaaagtgccttcctcaatggaccaatcaaagaggaggtctatgttgagcaacctcccggctttgaagatagtgagtaccctaaccatgtatataaactctctaaggcgctttatgggctcaagcaagccccaagagcatggtatgaatgtctaagagatttccttatcactaatggcttcaaatgtggaaaggccgatcctacactctttactaaaacacttganaatggtttgtttgtatgccaaatttatgttgatgatatcatatttggatctactaacgaatctacatgtgaagagtttagtaggatcatgacacaaaaattcgagatgtctatgatggcggagttgaagtacttcttgggatttcaagtgaagcaactccaagaaggcaccttcattagccaaacaaagtatattcaagacatttcaaacaagtttgggacgaaggatgc

SEQ ID NO: 43552 - DNA, 454 bp, Zea mays
  unsure (1)..(454): unsure at all n locations
agctngcacacatagctcattagaatacctcttatcatatctctnttatatgctatgactaatgtgttttcaagtctatttcaaaccaagtcataggtatattgaaagggaattggagtcttctgcgaagaaaaaggcttccactccgtaactcatacttcgccaccactccgagcaactctctcttctttgggggagaaatgagcatcaaggaaaaggacttcatccttgggggagagagtaaaagctcaaacgcacaaggaccggatttcgtctttggtataatcttaactcattcatttatgaccaaagaggaggaacttacttcaagggctctaatgattccgttnttggcgattcatgccaaaaagggggagaaatgagcctcaagcataaggaccgcaccaccaccaccaaattcataaacttagtgctttccanaagtctatatcat

SEQ ID NO: 43553 - DNA, 384 bp, Zea mays
tggcccatgcgtgcagatcgtgctgatgtctcacagatcattatatgagacttaccaagcatgtcttcggaccttgctagcctgacccatattattatcggttgagccatgctttaagctcatgtttttaggccgttctcgtgctgacaaaaagtccggtccatatttccagcactgcaaaagaataaaacaatgacactaatgacctgccaagtcaatgcaatttgactcacgtcaagcttgaaggattaaatgcatttgacactatcttaaccctgattgcagctttggttgtcagctgagcaagactcttataacatgttgtttaagagcgtgaatttggctatattggcacaattgtgtggcgtgatttggtgtccacca

SEQ ID NO: 43554 - DNA, 418 bp, Zea mays
agcttgtgaaagttcttcatccctacatgtgctaagcggcgaagccacagccagcccatgctagtcttagcaattaagcatgcatctagaccggcctcttcttttgcaaaatcaactaaataaagtttgccgtctaatacacccttaaaagctagtgaaccatcacttcttctaaagacagacacatctacatttgtaaatagacagttatatcccatcttgcatagttgactaacagatagcaaattgtaaccaagagactcaactaaaaacacattagagatagagtgctcattggaaattgcaattttacctaacccttttaccttgccttgattcccatcaccgaatataattgaatcttgggaatccttattcttgacgtaggaagtgaacatcttcttctcccccgtcatat

SEQ ID NO: 43555 - DNA, 468 bp, Zea mays
  unsure (1)..(468): unsure at all n locations
tccgccanatcctcaagcaaaggaggtgaaacgactacaaatcccgctccaagaaagtgtgctacaagtgtggtaagcccggtcattttattgcaaaatgtccattatcaagtgacagtgacaggggcgacgacgagaagggaaagtggagggaaaacaagaggtactacaagaagaatggcggcgatgcccatgtgtgccgcgagtggaaactcgacgagagctcctccgactcctcctccgacgaggacgccgccnacatcatcgtcaccaaaggactcttctttccaaacgtcggccacaagtgcctcatggcaaagggaggcanaaggaagaaagttaaatcaagatccttcacttaatatgcatnctctagtgatgaagatattctagtgatgaggaggataacttgcgcaccctttnttgccacctaaacatgcaacaanaggaaaaaactaatgaattaat

SEQ ID NO: 43556 - DNA, 475 bp, Zea mays
  unsure (1)..(475): unsure at all n locations
agcttggtcattntatagctaactgtcctgataatgaaagngaccagganaaggggaacaaaagggagaagaagaagcactacaagaaagccaagggcgaggcgcatctangcaaggagtgggattcggattgctcctcctccgactccgacaatgagggactcgccgccaccgccttcaacaaatcggccctcttccccaacgagcatcacacgtgtctcatggctaaagagaagaaagtaagtactcgaaactctacttatgcttcttctagtgataatgattctagtgacgatgatgaaatagactattctagtttatttaaaggtctagaatagaatacaattggcaaaattaatgaattaattgatgcattgaatgagaaggataaactcttagagaaacaagaatgattattgatgaagagcatgatataattttagaagctcanaaatctcatgctctataaagtaaa

SEQ ID NO: 43557 - DNA, 410 bp, Zea mays
  unsure (1)..(410): unsure at all n locations
ttgaaagtggngacaatgaaagtctttgcgaatcatggatgacgatcaaatgcaagacttgagtgtgcctagtgttatccatagccacgttatttggnttcgtcgagttagttntattattcaaagaattgtccattaaattaataattgacatgtaacgattgtacacatttgatgcataaaaccggaactcttgtttccattataaaaaagagggagtattgtttgacttgcaagggaaaagtgttgattctctagcacattatgctgttgttgatcccctgcggtgtcctttcgagcaaggtattttcttctgagctgaaaagcttagttagcctagtaatatgcaaaaggctaagattaatgggcccggntacaaaagctactagatggatgtctgtatgtgtgtg

SEQ ID NO: 43558 - DNA, 453 bp, Zea mays
agctagccccataacatcctaaattgctagggttagtacttaatataagaatctcccaatgcactcatgcatcatgatatatattatgtatacttgtgttctaccctttcatgatcaggcatagtagactcaacgctagagccgatgttatgccaaattgtacagattgccgatccattgtcgtactcctcatctcatctctgtttccaggttgactgtgatccagatatcggacagccaaagcattggcaccatgcgtggcaaatctgtgcgtcattcggattgagagtgagaattgcctctctctcagattagcttcatgttttggcacaaaatctaatacaacaggacctagaacgagcatgtgcctctttctcgatgccttcgattccttctcttataaacctttaacttgttaggttatgcttttcgcacaaattagaacatgctcta

SEQ ID NO: 43559 - DNA, 449 bp, Zea mays
  unsure (1)..(449): unsure at all n locations
tcttcgcttataagtgcttggtggtagtttggtgggttttgtgtagaattgggacagaanattcanaagatctgtgaagctagtatcagaccatccggcgctagccttcaacttaagaagttctagaactgtacgcagtgtagtaaactctttgtcacaaacctttgattcatcatataaaggttcttttgaggcactttccagtccctccattttagatagtcccttctatgatcccacagaactcaatatttctggttccatatgacgcaacatctcttcacaatcaaattcttcaaaattttgattggcatccacagaattcactttaccatccactttatctaaaattccgacaactctctcgcattactaggcacttcacatggatccaactcaccatgttctgtccatatcgtgtaattggtttaaaccctcttttaacatat

SEQ ID NO: 43560 - DNA, 479 bp, Zea mays
  unsure (1)..(479): unsure at all n locations
tgcagctgcattcatgttaaattccttgtattgcatctaaggctagtctaacctagttaagataaccgccaacaaagcgagtgaaaaagcttaactcgggtcaaacttgacaagtcttagttntaagcttttagcacttaaattcttgctttttatgcaattattggttcttgaaatatgcatgaggtattgcacttanggggagtattcanaactcanatcactcatgaaaacccctagtgcaagccaaaatgcaaatttcactatttgcctatnttctctaaaaaattatctagcctatnggcaaaatatttgaanagtatatgagggtgccaaaacctgtcccaacaagtgttattttgtgtgaattataagtgggaattggtttggttgggagttagatagaaaaattcanaattttccanactcctctctatctggggctcaccggacagtcggtgtgcaccaaacactgcact

SEQ ID NO: 43561 - DNA, 467 bp, Zea mays
agaacacatttaggactaacaaatgttcattttgagaaagacagggtttgtagtgcatgtcaagcacgaaagcaagttggtacccatcatccacacaaaaacatcatgacgactgacaggccactagagctcttgcatatggacctattcggcccgatcgcttacataagcatcggcgggagtaagtattgtctagttattgtggatgattattctcgcttcacttgggtattctttttacaggaaaaatctcaaacccaagagaccttaaagggattcttgagacgagctcaaaatgagttcgacttaaggatcaagacaataagaagcgacaacgggacggagttcaagaactctcaaattgaaggtttccttgaggaggagggcatcaagcatgagttctcttctcctacacaccacaacacaatggtgtagtggagaggaagaatcgaactctattggacatg

SEQ ID NO: 43562 - DNA, 441 bp, Zea mays
agctttcagcgcgaggaggacgtggcatctttcttgtatacaggatcaccatcacacgaaataaaaatctctatcgatcggtggcgctgcggctgagctcaagtcggcaggcactcagcggcacagcaccattcaggatggaaaacgccgtgcccactcgtccaccgtgcgcgcttcgagacggcggcagtccggcacgacgtgcactcgtgaagaagcccgcggcgacgtgctgcggctaccgctcctgtacccgtgacgcgcccgcggccgggtgccgtatgccgcccgtagtatccggccggctcgcattagaagcgtcgtcggcgcggcagctggagagcggtactatctggcgagaggtcctcttggctccgacctgctcgtcacaggactgtctctgtgtgcatgcaccgcgcgccagccgcaccggtccagctg

SEQ ID NO: 43563 - DNA, 394 bp, Zea mays
tgagccatcccatcatctgttaagagtatgtcacgccgtaagccacgtaatcgcgcgccaagcttcttccttccctgcggccaccaacgcatcacggacaaattgagagccaccgctctcggagtctataaattgagccccacctcggcttcgctatgtattttactagctatcgcacgcgctcccacacccgattgtccaccagctcgcctgaattttgcacttcccccaaatcggttctccgccgccgtagaagtgaactcaccgtcgccagcccaactccggtcagtgcccgcccttatcttcctccgttgagcattctcatgcctctgtgatgctccccgacccctttaattgaactagaccggcgcccatcgccgggaacacgatcatg

SEQ ID NO: 43564 - DNA, 477 bp, Zea mays
  unsure (1)..(477): unsure at all n locations
agcttggcgactgccagntcaatctctggaatctgttctactttaccgcatgtgtcgctgtgttcggcaagctccggcgcagccgtcgcttggacgcggtccagagcggctgcaccgcgctgtccatctccaaatagggggacctcatggtcgtcgccaacgccggcgactctcgggttgttctgggcaccgcatccgacaacggcgccgtcacaccgtccagctcatcattcacctgaagctcaacctcccacgtaagtcaccactgaccggtcatgaattcttgtgcgtagggacgacgatcgttgttgacgttgtgtgagtgtcctcgaacaagatntatgtagaggagtatcatatccggtggtgcaacgtgtaggtgtactaccttgctgatgagctctgggtgcacttcgtttggcaagccacgcaagaagtatcagtactcgccatggtgtgcgcgttcgacgactacta

SEQ ID NO: 43565 - DNA, 402 bp, Zea mays
  unsure (1)..(402): unsure at all n locations
cttgctttgcgtagcctttccacttgctgatggagaacagtatgagtttttgggtagcctctccatatgcataaatattatgagtagcctctgcatttgtaaatatcttttgtgtaacctctgaattatggatagcttttggtcttcgtggatgaagtgtataattcaatcctcggctgccatcactgagatgagaatgtactctacaagtctgagcttatttgccacttccattcaaacttcanaaattggcacactgtggctaggtggaaacactgcaggtcggtagcattcacgatggtgatggcgctcgacgagggatgacgatggcgtgacgcttatcatgggcgacagtgcagcttgtcngtgttttgtgtccgaccgcacacttgtggttgcccc

SEQ ID NO: 43566 - DNA, 504 bp, Zea mays
  unsure (1)..(504): unsure at all n locations
agcgcattaatgcatgccctatgaagttcatatgactggccattcctttctggccttctaggggccggaaagtactcactctcatgggtttgatagattatattatggtgctggtgtgtcatatggtgagatggggagtctagctgggacggatacggagttggatatctatcctccttaaaaaactctgtgccggaccgtccggttaaatacgcggaccgtccggccccgtgcgcggactgtccggccatgtggccggactgtccgatattatattcggaccgtctggcgccatacgcagagggtccgaatgggctatctaaggtttgcatggcatgtggcagcttgngtgcaagtctcggtaatttgcttctaanaatgggatcagtcgccgctggcccggacagtccgcgcccatgtgcggtcggtctcgacatgcgcagatcggtaaattatcgccgatgtgcgtgggaagctttcgttgcctanggtacatgtccatcg

SEQ ID NO: 43567 - DNA, 412 bp, Zea mays
  unsure (1)..(412): unsure at all n locations
ntatgggctcatagaatatctaaacatagtgctactaaagtgtctctctttgagcttgtctatgggcaggaagcagtgttgcctgtggaaataagttcgaatgctgtcaagttcgccagacaaaatgagctaaccgtcatggattattataattcaatgatggataatattgatgaggtgtcccacaagagggtgatagctttgggagcaatagaaaatgacaagatcaaagtatccatggcctacaacaagaaggtcaaagcaaagtcatttcaagtaagggacctggtgtggaagaccatcctgcctctaaggagtaaagaccgaaagtttggtaagtggtcgccaagctgggagggtccatataaagtataacacgtaatgtcttgtaatgcctatttattgcaacatt

SEQ ID NO: 43568 - DNA, 365 bp, Zea mays
  unsure (1)..(365): unsure at all n locations
cttaccacttatatacaactaaattgtagcagagcgtgccacgtcatactaatgaatataattcgcatatactatatgagaacttgagacgggatttccacttgcgcaaaatataatctatatcgccctcttgtgagggatccgaatagctaacaaaattgattaaaatcgacgacacgtactcctaaacgagacacgtacgaacagactctgacgacactactccgggtttaacagtagagaccaaaccctgtctgccttagctttctgcttaattaanaaattaaactctcaaccggccaactgctgcgacaggcctggagatatatatcaatggccgcccgccatgacagtggcgttggaca

SEQ ID NO: 43569 - DNA, 414 bp, Zea mays
agcttatacaggaggatagaagcattatctctaccatatgtcataatagaaggggaactatactagcgaggggtctgttccccgttgctcaagtgtttatccagatccgaaggcatagaattgatgaaggaaatacacgcacgcctgtgtggatctcacattggatctaggcctttgcttgggaaagtatttcgtcaaggattttattgtccaaaagcagcttctgatgcagcggatttagtccaaaagtgcgaaggttgtcagatatgtgcaagagatcaaaaacaaccttcgactttaactcaattaatacaacccacttggccgttgcaaaagtggagccttgatttgctatgcccattaccaccagcacaggggaacttaagatatgtggtagtggcagtggaatatttt

SEQ ID NO: 43570 - DNA, 431 bp, Zea mays
  unsure (1)..(431): unsure at all n locations
tggtganagttctctcgtccgaccgtttgtctacgttgcagtcgagttcgatttcgaccgtggcggccctcaccactcnccaagttggtgaagctgggccacgcangagaggaggaaaacggcccangctggggttttggccttttctttttctttttccttttctattttctttctttccaaattcaaatgttcaagtcagattcaaatttctattttgaattttagatctccaatctcaaacataatcctaatgtgaatatgaatcctactattttcaatattattatttattctccttcccattatttaattctagtagtaatatatgaattcattacaatttcctttctcattttctgttctacactttcatttataatttgaggtcagatttaagttggattcctttatttcaataaaatntatca

SEQ ID NO: 43571 - DNA, 392 bp, Zea mays
  unsure (1)..(392): unsure at all n locations
agctcgacattgctgtggctcagttgttggatcccaatgccatccttaatgccaaggcgtctcccattatagagcatgcttctagcaaatttaaacattntattnttcaagttcatgctcgngcaattttgcatttaaattagctatgtgatcattttgttgtttaatcatgggaaggtgatcatcaatagcttctatattaacatctctacatctantacaaatggtgacattttcaatagtagatgtagatggtatgcaaatgttcaagtcattaatcttagcattcagactagcattctcatccctaagacatgaaattgaatcattgcaaatattcaaattttcaatcttagaaactaaactatcattttcatctctaagacaggaaa

SEQ ID NO: 43572 - DNA, 400 bp, Zea mays
  unsure (1)..(400): unsure at all n locations
ctggtaccgcctgagtcactattgttgtgcaactcataattttcatgcacattctcctcagccaaatcccactcttcaataaatgtcggatgatgctgacgaacgtctggtaccttcttttgctttcgcgttcaaacctacacacaaaccatatcatttaaataacacaaaagatttacaaatgcttgatgttacgaagtcaactggaataagagaanttgtatagatcaaagttacttgtgcaactccctataagttggaaaatcttcaaccggccatatctagttcataccaaactgcctctcaaccccgtgcggtaggtgccacttcacacaccagaaacagatcatangacatttcattctatacactgcctcgtctctgttgcatattgaactaa

SEQ ID NO: 43573 - DNA, 513 bp, Zea mays
  unsure (1)..(513): unsure at all n locations
gtcacctgcngcatgcagctttccaaatctgaggagactgtgattctctatcagacacgatcttctttggtactccatgtaaacacataatccgagccatatataactctgccaatagagagcctttataagtagtctctacaagaatgaagtgggccactttagtcaatctatccacaatcacccatatagcatcatatcctttctgggtgcgaggcaatccagtaataaaatccataccaatctcttcccacttccactcgggtatcttcagtggatgcagtagtccagcgggcctctggtgttcagccttaactctttgacacacatcgcacatagccacatgtgcagccacatctctcttcaatccataccaccaatattgttgcctcaaatcctgatacatctttgtactacaaggatgaatagaataatccgagtcatgggcctccttttaaatagtctcacgaaggctttcaatatcaaagacacatatcctatccttgaccatat

SEQ ID NO: 43574 - DNA, 220 bp, Zea mays
tcaatggttgactgcgctccgaacctctatctgtgggtgacttggcgacacaccggacaacctatagtgcctgtcctgtggcgcaccggactgtcctgtgctcacatcgacagcagcctccccaatggctactttagtggttgaaggtattaacttccctcatccgtcacaactccagcactcgagatctctacacctctcatttacttaattaactatt

SEQ ID NO: 43575 - DNA, 401 bp, Zea mays
  unsure (1)..(401): unsure at all n locations
cctgagctgcagccgagttaaagagatcgtttcttattttatttgaaatggcgaagaagagtttacttcctaagcacattgagatttgatccaaagatcaagatgtcacttacataaaggcggcagatagcggactcatccgcaccataccgttgatacacacacatgtcagactcattttcagcctagccaacagctgtaagagtattatcaaacttcttatgccactgcttaagcgcttggttacgccatacaatgattntattaacttgcgcacctcgttctctaggcatccgcaatgaacccttcgggctgatccatgtaatgtcctcatccaactctcattctaggaagctgtttaactttcatctgcagatgatagcacatagacgctgcccggt

SEQ ID NO: 43576 - DNA, 394 bp, Zea mays
  unsure (1)..(394): unsure at all n locations
nggacccagtcactagacggttcactgtacccacttgctcctcttgccgcccgtgcgccacgtgcctatgagctataacacgtcgtagtgtaccgtattaattagaccgtccatcgtcggaggctttaccacagtgaaagccacgatcacctgcgccagtgcacttcctctatctccggccgcctacgcggctctcaaaattagacgccaactgctgtggactctataaattgatgccctagtgagttccgctaggtaattacacatccaatgcaccagcccttgtctctgataatccaccagaaccttccaatctcgcattatcccaaatccgttttccgcgccaccatgaacactacgatgtgtcagccctctgcacgcaactcaagcttct

SEQ ID NO: 43577 - DNA, 368 bp, Zea mays
  unsure (1)..(368): unsure at all n locations
agcttattgaccacctcaacgttcaccatntttgttgcagctaccaccctcaatgatggtatctacacggcagttcttgacgatgaggaacatgttgaagatgttgtggcgntgtctgttgtcntcgtcactagccgtggcactcaaagctcgttgcacaatcaaggccttataggtctcggtcgttgttgtaccaagaacctcttcatcaccatcataagtctctgcaatgttagctccaacagtatcttcatcttcaacatcagaagcactaacatacccaccatcaccagtagtaatgtatgccccgttgctggggcaatctcgctgaatatggccaagtccctggcagcggtggcacttgatgt

SEQ ID NO: 43578 - DNA, 450 bp, Zea mays
  unsure (1)..(450): unsure at all n locations
gcgtgatagcatatataggaaactcgttttaaagatgattatgctattcacacctcggnggattactatagaattactaccaaatgtaaagggcatggatgtaactttatatgagctatgtccggcctataatggtgaaagtgccccgtctgttcacgctgactgcatttgtttgcgtcacgcttgactattacattctttaagccgaaggtacatttgtaatttgatatcatttctatttttccatagtaacaatatagaaatgagttaataataacatataattgtttacgttatcctttacatttcatatgtcttcctcttcattattatatgttgtgttgtgtttatgaagggatgtccctcataacccttcgccgaaaatattatatcttcaaggaataaggcttcaagacgaaggtttaacgttaatatttttgtgtgccttgt

SEQ ID NO: 43579 - DNA, 473 bp, Zea mays
  unsure (1)..(473): unsure at all n locations
agcttctaagggagaacacattttatgattaacaaatgttcattctgagaaagacagagattgtagcgcatgccaggcagggaagcaagttggctctcatcatccgcataagaacataatgacaaccgacaggccactagagctcctgcacatggatctattcggcccgatcgcttatataagcatcggcgggagtaagtactgtcttgttattgaggatgattattctcgcttcacttgagtattctttntacaggaaaaatctcaaacccaagagactntaaagggattcttgagacgggctcaaaatgagttcggcttaaggatcaagaaaataagaagcgacaacgggacggagttcaagaactctcaaatngacggcttccttgaagaggagggcatcaagcatgagttctcttctcctacacacctcacanaatggtgagtgagaagaagatcaactctattgacat

SEQ ID NO: 43580 - DNA, 409 bp, Zea mays
  unsure (1)..(409): unsure at all n locations
taaccaaattatacatgcatntagctagtagctacaagttgtggcaacaaaaatccagctgaataggttatatttgtaaatgatttataaaagtgtagcaatgaaagtatggcaagattctctacgtgacaaactatagtatatattttaaacgcataaccttagacaagtatcgtataaaatatgtgatttttagcaagtatagaaccaaataggctatgcggaaatgcgttcatgggcgcgcgtgccttgtagcacattccaaaactattgggaaaaatagaaagatgtgcanaggtgccatggcagggattaatttgagccaattaaacaaactttgttgtgcaacatccagaggggatgatgctagttccaacccttctacactatatctagtcatggtactatc

SEQ ID NO: 43581 - DNA, 429 bp, Zea mays
  unsure (1)..(429): unsure at all n locations
agcttgtggcaagtcaagtctatcactcagctcgagtcgcgacaaanactaggccaaagcgtgtcaaacggttntggtttggtttcaaacttcaccagggtatgtctgatgtatttaggcgccactttgtccattcaaccatttggttttgagtttaggagctaggtgaacacggatgctctttgaaatcggttggaaagactcagagaaaaggctgttttctcccttggattcttttagttgagtgatcaatttgcggttgttttagattcattntggggaaactctcttactgtctttagtagatattntggtaatcttcaacttggtataatttcccaactcatgataatgttatcctcattgtctntnntacttgattctgcattatntcatacgtcccatgtgaaaagcttaaagtgtatatac

SEQ ID NO: 43582 - DNA, 355 bp, Zea mays
  unsure (1)..(355): unsure at all n locations
ttataagaaagaattgattacatcatntgccatgctttgtgaaagggactctctcaagaagaaaaacgagaagcacaacactatgcccaataattgaaatacccgaagggggcattagtgtttaatggcagtggggaagaagattttntgtactgtctcccggataataaagaaatatccgtttgctgggagataggtagaagcgtcggattcccgaagctagaagacggtctctcgatcctatcgaaggatgagcttgctgacagcttagcgtataatagcataaaggtataaaatctaattctatatttgaaaaccgaaatatttatttactatacttaattctatcttcccc

SEQ ID NO: 43583 - DNA, 423 bp, Zea mays
  unsure (1)..(423): unsure at all n locations
agcttgancacattatcctacacaccactgatattactatatgtgcttacaacgacgatagttagtctttgtattcagaatgatatccataacggatatgacgaatctgtgatagattcaaaatctttagatcgttcacgaccatcagtaatgaattattacttccaactagttatggttggagtaaggagagtttgcacgctcctgacttgtgattaactgcacgtactgcatgtacaagctctcctatggatttaatacatgagaatccatgaaagatttcccatgcgtacattgtgtatgttcccaatctcaccaccgcagtgtacatgtatgggcacatagaaagttggggatctatgtgagaaatcattctccgtcgatcattaagtatctagaatcccattgtgaggatctatttat

SEQ ID NO: 43584 - DNA, 236 bp, Zea mays
  unsure (1)..(236): unsure at all n locations
aactatgtgatgggggattgtgaattcgatttaagttctcgactgctattgtaattctntatgtcctgggaaattacatagtaagggtgttaggaaaagcatggaattattatttacgagtataatacatttccggtccttaaactngcctacctgtcgatccacaaacttttaaagtttgtatccttaatcgttggttgggtcgtagttagatccaaatggaccgtggttttatc

SEQ ID NO: 43585 - DNA, 430 bp, Zea mays
  unsure (1)..(430): unsure at all n locations
agcttanccaaaataactcagatgagacccatatcattcttctcatgtggagacttaatgggaattctgaatttcagaattctgaaattcataccttgagccacagatcaaggatgttcaccttgatccctagctcgaatcctaatggccccattgacaaaattgtgtctaactaacccctctatcgtgtgctagaagatggcattgtgactcgagccctacacacgacaaaaccttggatttgcctcgggttcgggcagggagacagaccggatttcctggctgcatatctctgcaaccagtaagcaaaatcctattacctccacacaagaatggagcttgtatggaggataagaggttttgtcactgaccaatgctagagcatgctttgatgagcgaccacactctccacaactagtgcagaatgcac

SEQ ID NO: 43586 - DNA, 155 bp, Zea mays
ccattcttgtggtggctcaatttgtgaaatctgaaactcacatttctgaatgtttagcctttgtagccaaaccgagcgcgttcaccttgatccttagctctaatcctaatgcttccattgacaaaacgtgctaactaactcctatgcacatgcca

SEQ ID NO: 43587 - DNA, 390 bp, Zea mays
  unsure (1)..(390): unsure at all n locations
cccgcttgtgtatgtggaccagccgattccgaccacccccgtcgtcgagacgtacctcgctgtgactgccagaaccttccggagccaaccccgcccctcgccggacctccctcgccgccggtaagccgcgccgccctttttccttccgcggntacggttttcataaggggagggacctcgggggagaagaagaaaaggccagggggttttgtgcactgtcagcgactcaagggaatagtggcgcaggggtataactgaagggattagtttagaaagaacccagcgtcttcggtgcaaagtggatttcagaaaaccttttgttatttctgatttanatacanacagaaccttgaaaattcataacttcacttttgttacccaaatcgagta

SEQ ID NO: 43588 - DNA, 394 bp, Zea mays
  unsure (1)..(394): unsure at all n locations
tggacgtganaagtgccttcctcaatggaccaatcaaggaagaggtctatgttgagcaacctcccggctttgaagatagtgagtaccctaatcatgtctataaactctctaaggcgctntatgggctcaagcaagccccaagagcatggtatgaatgcctaagagattntcttatcgctaatggcttcaaagtcggaaaagccgatcctactctctttactanaactattgcaaatgatttggttgtatggccaaattatgttgatgatatcatatttgggtctactaacaaatctacttgtgaagagtttagtaggattatggttcaaaaattcgagatgtctatgatggnggaattgaagtattttctatgatttcaagtcaagcaactcca

SEQ ID NO: 43589 - DNA, 420 bp, Zea mays
  unsure (1)..(420): unsure at all n locations
agcnntttcctttggtgtatgtagaggttggcatatagagtacgcaaattatcttcctcatcactagcattatcatcactagaggattcatatttagtggaggatctagatttaaccttctttttgccgtcctttgccatgaggcacttgtggccgacgttggggaagagaagtcctttggtgacggcgatgttggcggcgtcctcgtcgtcggaggagtcgctagagctttcgtcggaatcccactcccgacaaacatgggcatcgccgcccctcttcttgtagtaccttttcttttctctcctcttgcccttcttgtcgttatccgtgtcactggcacttgataatggacatntagcaataaagtgaccgggcttaccacatttgtagcacaccttcttggagcgggacttgtagtct

SEQ ID NO: 43590 - DNA, 399 bp, Zea mays
cattttgagaaagacaggttttgtattgcatgccaagcacggaagcacgttggagttcatcatccatacaataacatcatgacgaccgagatgcccctctagctgctccacatggatctattccgcccgaatgcttacataagcatcgacggggtaagtattgtcttataaatggggatgactattcttgcttcactcgggtgttctttttgtaggaatatcacaaacccaagacaccttgaagaaattcttgagacgggctcaaagtgagttccgattgagaatcaagaagattagaagcaactatggaacggagttcaagaaccttcaaattgaagtaatttcttgagaggaagggatcaagcatgaagtctcttttctctaccaccccaaccaaat

SEQ ID NO: 43591 - DNA, 181 bp, Zea mays
  unsure (1)..(181): unsure at all n locations
caagacattatattcataacggtgtagttgtccnattcttagacggccaactatattattcatcataaatataactccaccccaaactactgaataaagctttacacagtatcaatttaataacgttgccaggacagaanagaagtaagatgaccctgtgaagtacaacgtctgtatatcg

SEQ ID NO: 43592 - DNA, 401 bp, Zea mays
  unsure (1)..(401): unsure at all n locations
tgtcatganatcttnccagatcgagcactaaccaacctccatttgggcaagtgttataaacaccaaacagataggactgcaagatctttcacaaaggttggctagctctatatgtcgtctttgtccagttttaaaccttggtcagttctaggttgagtttctattatctataagacaacttctcgctgtttttagttggacattgttcgngaatatgcatacgtttttttcttctaatgtantttctctagaatctaaggttctccctatgaaattgcctcatgtacttatgtcctttgggccctatggaatacacaagttgccattttcttcattcctaacatgatacagagctagggtttccagccacctgcctgcgcgcaatctgcgaccaactggct

SEQ ID NO: 43593 - DNA, 494 bp, Zea mays
agcttgacattgtctgcctagtggaatcttattccatccttaatgccacggtgtcttctactatatagcatgcttctagcaaactttaaattttcattttccaagtcatgctcattgattttagcagttaatgtagctatgtgatcattttgttgtttaattaaagcaaggtgatcatgaatagcatatatattaacatctctacatctagtgcaaatagaaacatgatcaactgtagatgtagagggtttgcaatcatttaattcaacaatcctagcgtgtaaaatagcattcttatctctaagattggcaatagcatcattgcaaacatttaaatctttagtcttagcaattaatttttcattctcaatcttaaagctagcaagagattcattcaacatgtcttagcaattaaactagcattaccatttctaagaataacaattgaatcatcacacacatgtgatttcttaaccttagcgagtaatttaaca

SEQ ID NO: 43594 - DNA, 411 bp, Zea mays
  unsure (1)..(411): unsure at all n locations
ntgngaggaggtaagttccaggccgagtatgccactggagcaccaacatttgaaaccttacccctgaggatcatttcaagtcggcttaccaagtctacagaaggaattctcctattagtaacccgagttgaatcggctagccctcgatacagatatgccggataggccctgtccttcagtggctgaatgttcttgaaaacaaagtcagtgaccacaacttcagcagttagacctctctctttcagcagtccaacttcagctagcaacacacctgcctcagccacttcctgatctgtgggagactcggtccagctcagagtgcgaacgtctggctgtcttcccgaccgagaggggagagaatttccataattatcaactatgaaccactctagacgccaccccttaatgcta

SEQ ID NO: 43595 - DNA, 345 bp, Zea mays
  unsure (1)..(345): unsure at all n locations
ccgatcttatctacaatcaccacctcacgcatatggtttgcaactgcttcaatcatcaccctatgctgcattgatggttcaagtacttgcattcttcttgcttcaccaatcgcagcaagaggaacatactcatccccaccaatctcattacttgagtccacaattacctgccctacacattagtaccaacagaatatatataagatacaacagatacatcgcactgacaatataaaggtataagaaagtagcatctgttaccataccactcttttctgaaattatctgctanacacgcgcaatctcacacataacagtaatcttgccgaccccaggcctgattga

SEQ ID NO: 43596 - DNA, 454 bp, Zea mays
  unsure (1)..(454): unsure at all n locations
tagaagcactttcatttcttagtccttctgacatgatctttttctcacgcgattaagcgttagaacgaggattaggctntgataccagttgaaagttgcctagagggggggtgaataggcaagttaaatcttttctaacaaaaactagaagcatactgggttaaaccggttcagtcggtgtcaagacaggtttagcgggtttacacgagctcaactaaagaatgagatataaactgaattgatctcgaaattcacccagttaactttgaaaatgagatgttctagttgatccacagggttcaaagtagtagatctgataagggcacttctcaaaatccacacaccaaaaagatatgaacaaatcttccctggaagggtgagagaatgaaaaacacaatacaacactatgagctagaacacaagagacacaagatttatcctggggtcgggtaca

SEQ ID NO: 43597 - DNA, 397 bp, Zea mays
  unsure (1)..(397): unsure at all n locations
tgcgacgctccacncagcccatgcttgtcttatcaattgagcatgcctctagatccggcttttcttttgtaaaatcaactaaataaagtttgtcggttagtacacccttagaagctaaagaaccataacttcttctaaagatagacacatctacatttgtgaataaacaactatatcctatattactaaagttgactaacagacaacaagttatatccaagcgactcaacttaaaacacattggaaatggagtgcttgtatgaaatagcaaccttttctaaccctctcaccttgccttgagtcccgccaccgaatatgatagagtcttgggagtctttgttcttgacgtacgaagagaacatactcttctcccccgcacgtggtctgtgcattcgat

SEQ ID NO: 43598 - DNA, 439 bp, Zea mays
  unsure (1)..(439): unsure at all n locations
ggacctatgatactcagcttctaagggagaacatgtgataagtctaaccaatgttcattttgaaaaagatagaccttgtgcagcttgtcgagcagggaaacaggtgggacgagcgcatcacaacaagaatgtgatgaccacttcaagacccctggagctgctgcatatggatctcttcngacccgccgactatctaagcatagggggaagtaagcatggtctagttattgatgatgacttttcccgctcacttgagagttctttttgaggataagtctgaaacccaatggaccctcaagcgcttcctcaggagggctcaaaatgagtttgagctcaaagtgaataagataaggagcgacaacgggtccgagtcaagaacctttagtggagagtccttgaaaagaaggatcaactcattctcgctcctacacacacacaa

SEQ ID NO: 43599 - DNA, 415 bp, Zea mays
  unsure (1)..(415): unsure at all n locations
gatccttaagtcacctgcggcatgcagcttcttgaggctggactacgatttcccttaatcagttnntgtgtagaggtactgaagatatttgaaatctaccttcaccaacttacccccgaagcaatcataaagatgaatatcttcgtgtgggccgtgagaagccaaggcttggaacctaatgcgaaaagtttctgcaacatacatgaattattgtacgagacaaaaccctggggtaaggaacagtatcacaacaattttggctgctacaactttggctcccggtctgggtcaagctgccccgtgccaacctttcgaaagaggtggcccgacgactggatgacaaaatggttttacgtgaagaatgacttgaaatcacgggaagatataaaaaagattatcatgcgccccatctggc

SEQ ID NO: 43600 - DNA, 475 bp, Zea mays
  unsure (1)..(475): unsure at all n locations
tgtagactaacatctcataatatagcttcatgagcatatatatgaactgattagcaagcttaagaccgctgaggtagtgaaaataagatatattcatggcttagcatatatatgtcgagcaaataaaaaaataactgcaaagctggcattattcatgtagtatatggcagtgcaaaggacgacacacaaaatggaaagagattacattactgaagaattaagaccttcgtggcaggcatggtcctgtgcaactaaaaaaagacactcgcttgatatatagacctaatatgtagtatttctctgttttgcaaatatttccccattatcttgggagatgtcatatcaaagagactacacattaattaatctctaggtctctacccctactctaataacactgtgaaagagaacaaaatatngcagtgtgtcacattgatacagtgatataatgaaacagagagtgcagatttccatg

SEQ ID NO: 43601 - DNA, 462 bp, Zea mays
  unsure (1)..(462): unsure at all n locations
agcaagctgagaaggatcttcatccccacatgtgctaagcggcgatgccacaaccaacccatgctagtcttagcaattaagcatgcatctagaccggcctcctctcttgcaaaatcaactaaataaagtttgccgtctagtacacccttaaaagctagtgaaccatcacatcttctaaagacagacacatctacatttgtaaataaacaattatatcccatattacataattgactgacagatagtaaattatatccaagagactcaactaaaaacacattagagatagagtgcgtcattgatattgcaatcttgcctaaacctttcaccttgccttggntcccatcaccgaatatgattgaatcttgngaatccttattcttgacgtaggaggtgaacatcttcttttcccccgtcatatggttcgtgcatncgctgtcgataatccagcttgaaccctcg

SEQ ID NO: 43602 - DNA, 379 bp, Zea mays
  unsure (1)..(379): unsure at all n locations
tagcaagngcgagatctggatcagngaagttctggtctcttgctttattataaaccgagatggattgggtgcgcattccaagaatgtaacagctattctacactggaaagcaccaaaagatgtttgaggaatcaagaatntcattggaatagtcggctactatcggcgcttcattgaagggttctccaagatcgccaggccaatgacaacttttgctgcgaagaaagttgagttcaaatgcaccccaacttgccaagagtcctttgagacattgaagaagaagttgtcaacagcaccgattatgattctgccagatagtcataagccattctcagtatattgtgatgcttcatacatcgaactggaatgtgtgtaatgt

SEQ ID NO: 43603 - DNA, 432 bp, Zea mays
tgcagctgcagcttcatgggatcactgcttattggtgcctgattgcaaagttatggacattccacattatacgtacgtgagatttgagatgtctggaccacaaagaaacatcactgtgtgtgctgacttccaaggcgccgtagagtgctttcgagtggccattcaagccggcctcaccaccaaaccatcgacgacttcttctgcgcaagcgaactctaagcctgaggaggacctcacagtacctgcaaatgaagctcaacccgtgacctctatgcgggcgactgatgaaactaagagaatcaacctcgggttcgctgatgaacgcaagactgccatcatcagctctagcctggatgatacataggaaaacacgctcgttcagtttctacaagataaccgagacgtatgctcatggcaacctacggatatgcc

SEQ ID NO: 43604 - DNA, 421 bp, Zea mays
  unsure (1)..(421): unsure at all n locations
tgtaaaaattaaatttggtggtgtttgtggtttgatatatttttcatgctttggtccctaaaacttctcctctttggcatcaaccaccaaaaacgaagacattaaaagcatattggaagcaaattaagacttgccctctaaaagatttatcaattgaagctctaaaagattactcccctaaacgagtgttctccttttgaaagaatattcttcctctttgtcatagacaaagaaatactccacctgtcagagatcttctacttaggaaaacacatgtgagaaatagaggtacaagacaagatttgattagactaactccccctatgcataggtaacagatatantttgacaacatatgcatttagcaacatgagaagtataagatatgaaatatagtcttaatcaatacctacagaagaca

SEQ ID NO: 43605 - DNA, 449 bp, Zea mays
  unsure (1)..(449): unsure at all n locations
agctntcatctttcttcttcacgaacagagctggacatcctcaaagcgaagtacttgggcgaatgaatcccttatccagcaactcctgcaattgcttcttcaattctgccaactcagcgggtggcattcggtaaggcctcttggaaattggtgtcgttcccggttgcaactcgatggcgaattcaatatcccggtctagtggcattcctggcaattcatccggaaagacatctgcatactcacagaccactggaatcttcttcagaggtaactccgtcaaagagaaagcacatgactgagtggaaccttgactgggcagaattaaagtgaagttcccacaaaacggtgaattgatttccacgatgcggctggctacatcaagcactacttggtgcagggtcatccaattagctcccaaaataatatccacattttccacacccaacaca

SEQ ID NO: 43606 - DNA, 404 bp, Zea mays
  unsure (1)..(404): unsure at all n locations
gctgcgtcgangagttggaagctgctcatcgagatatcaatgtcttagaanacgaccgtgagggcatgaaagtgtggtgtgataaagagatggacaacgcggtccangctggccatattttgatgaacagttcggcgtcctggttcctgaagaaaccattggtgatgttcttaccggatcatgtacttctaccaaggctctatcttctagcaatcccgcgactgatgcccctcttgaaaatgctcctacatgacacactgtaatgatgggaagtggaatattggttgagtaatcaaggatgcgctttctcctttgatgaatgtacttgacaaattacattgaatatgagatctacaactgccttgcttgtgttccataatgangtttggggagaaaacgaatta

SEQ ID NO: 43607 - DNA, 473 bp, Zea mays
agcttgtgaaagttcttcatccccacatgtgctaagcgacgatgccatagccatcccatgctagtcttagctattaagcatgcatctagaccggcctcctcttttgcaaaatcaactaaataaagtttgccgtctaatactcccttaaaagctaatgaaccatcacttcttctaaaggcagacacatctacagttgtaaatagacagttatatcccatattacataattgactaacagatagtaaattatatccaagactctccactaaaaacacattagagatagaatgctcatttgatattgcaatcttgcctaaacctttcaccttgccttgattcccatcaccgaatatgattgaatcttgtgaatcctttgttttgacgtatgaggtgaacatcttcttctcccccgtcatatagtttgtgcatccgctgtcgataatccagcttggagccccggatgcataaacctg

SEQ ID NO: 43608 - DNA, 470 bp, Zea mays
  unsure (1)..(470): unsure at all n locations
tgaaacatatctagatacagtccgaaggattgaggcttccttcgaaggtttctctgtaaaaaatattcctcgtggagaaaatgaatatgctgatctattggccaagtcagcagcccaagggctgcctataccttcggaagtattcttcgaaacaataaaagcaccttcggtcgagcttctcgaaagagcaatccttaacatatcccctgtttatagcgaagatnggagaactgagatcatctctttccttcagggtaattttctttcagacgacgaatcttataacacaagaatagaagcaagagctcgaccatatgtcataatagaaggggagttatacaagcgtggggtctgttccccattgctcaagtgtttatccagatccgaaggtatagaattaatgaaggaaatacatgcaggcctgtgtggatctcacattggatctaagcccttgcttgggcaagtttttg

SEQ ID NO: 43609 - DNA, 399 bp, Zea mays
agctagccaatacttgtcatagcaacaacacatgccatcgcagcaactacagaccataccagtaacttggcctttcgcatgctggggactggatatgattggacctttcaagaaatctcaagggggatacactcatgtattggtggcgattgacaaattcactaaatggatagagttcaagcccattgcctctttaacctctgctaaggccgtggaattcatacaagacataatattcagattcgggataccaaacagcatcataactgacttaagatccaacttcacaagttcagagttcttcgacttctgcgagcaaaagagtattcaaatcaagtatgcgtctgtagcacatccaaaggcaaacgggcagattgagcgagccaacaagatgatact

SEQ ID NO: 43610 - DNA, 433 bp, Zea mays
  unsure (1)..(433): unsure at all n locations
ngtggcacnctcgggcgtctagtcgcagccgaagtaccaagtctcccactnggatacctcggggccaaacccttcgggcgtggtagcgtcgtagagactgctgatactgcgccgagtgtagtaaggctacgtcccgagcctcttccagctggccaatgaatcttctcggctggtccggttgttttggtcgtcgtatgcctttgtcctcggggaaccgtattctaagtctgtgggtaggacggcctcggccccatagactagaaagaacggcgagaaacctgtggcccagctcggcgtcgtcctcagactccaaaccatcgagtgtagttcttttatccaccgcttgccaaacttgttgaggtcgttgtagatcctcggttatagtccctgcaaaatcataccgttggcgcgctccacctgcccatttgtcatt

SEQ ID NO: 43611 - DNA, 486 bp, Zea mays
catgcatgcttattataaattacaccaacgctacatattctatttaattctcttaaacgcaccatttaagtatcaatagtgcattagtattataagcgttactgtttttttataaaacgtattaaaagtcaaagaatattaacttataacaaaatttaaaacaacattaaatttatacaagagcacgggcagctgaattcttcacatttatatataccacgtcaagctgtagttggacccatcccacatactactgcggtgagctagtgagtcagttccacgacacagtttccacattacgactagattatcaacgcactagtacacgtttattcaccattattactaggttatagtaattgctatgcttcagaatccactctcaaccgcgctatttctgaacactcttatcaaaagcttcattcatcgccgtccttggaaccacacgcttcacaacgctcttaccagtgatgttgccatctgaca

SEQ ID NO: 43612 - DNA, 435 bp, Zea mays
  unsure (1)..(435): unsure at all n locations
tcggcactatntccaagcttacaacataattgttccttcctcacaacctctgaaggatattatgaggaaccgagaagctactggaaggattggaaaatgggctgcagagctcaatgaattttgtattgaatatgttcatagatcttcgattcagtcccaggcgttggcagactttattgctgactggacgccaggggctcangaggaagaaacgaataaagacaacgaagcatggacagtattttgtgatggatcttggggaaccttcggagcangagcgactgctgtgttggtttcaccttccaaagtcaaaacttgttatgcggcaaagcttgattntagttgcacaaataacattgccgagtacgaagcattgcttctatgtcttcggaagttaaaagcaatgggaatcagaaaggccatacttaanactga

SEQ ID NO: 43613 - DNA, 482 bp, Zea mays
  unsure (1)..(482): unsure at all n locations
agcttggagcagcaacaaagctatcttcgatcgtcagctccaagaagcagaggcgccaggggctntggaagaaggtttggggatcaacctaagaaaatntattgcttattctgtggtgaggacaagggccataccacaaagatgtgccatgtcaccattcataaacaaaaggaaataacagaagccgcagctcaacagaaccagccgaagcaagtcatgcacactgcttcatatcactcaccctacataccagagtatgtgggtaaccatcctgcagcttctgttgcttcggctagccagccacaagcatcttggccacaacctccacctcccccaccactacaacctgcatatccacgaggtcagcaactagaagggagccaacagacacaccaacagtgagatttcaaggaggagtccgaagctcgcacagtcaacagtattgtgccagaatcgaagcatatctattgagagatatccta

SEQ ID NO: 43614 - DNA, 414 bp, Zea mays
  unsure (1)..(414): unsure at all n locations
catgtgacatttgcattcggcccaaacagacttttgtaaaaacccacaatatgggacatcagctccttctgctattgccaccctaagttattcctcggctttgaaggcatctatttgatcatattggtcaagcacaatacctaaatttttcatgacaagagctacgttntcatttttttcttgattcaaaacagtaaacgggttcgtgattgtggtaccttgtggagcgtccttctcttgagctcttttagtagctttctccagaatagaaatgccatctctaggaattctagaacttgccctcatcacggggtatttccttttgctttttttcttcttcacgttcttactagcagcaatggtcacctttgctcacatctcccatcgaanaatactatccaatcagtagactct

SEQ ID NO: 43615 - DNA, 473 bp, Zea mays
  unsure (1)..(473): unsure at all n locations
agcttgtacatattacacttaattatgtcatatacttataccaatatcgttcagnttttatcctattagtttaagaactgttccaagttcctaccttgtggcaaacatgagtctccattcatatcacatacgaatcataatacagcaatgatttctcttgcatataatgttgattcattttgtaaataatgagtaatacaatccggttgatcatcttctcctagtcctgactctatagcaaatatgacctcctctgttcataagaagctctgataataacattgtaatgagctgagggaaagggaaggtcatccaaatggcaagcagctaatagtctaatagtttggtggaaaaaaaaaacttttatgtgttatattcatgaacaaataaattagaatccattctccatgccattgtattatttgaacaatgagagcacataaattntaaaaacgatgtngcactgcatacat

SEQ ID NO: 43616 - DNA, 451 bp, Zea mays
ttatcaaatggacgtgaaaagtgccttctctatctgaccattcaaggaacaggtctatgtagagcaacctcccggctttgaagatagtgagtatcctaaccatgtttataaactctctaaggcgctctatgggctcaagcaagccccaagagcatggtatgaatgcctaagaaattttcttatcactaatggcttcaaagtcggaaaagcggatcctactttatttactacatactctgacaatgatttgtttgtatgccaacattatgctgatgatattatatttgggtctactaacgaatctacatgtgaggaatctactacgatcatgacacacatatccgagataccaatgatgggggagttgaagtacttcttacgatctccagtgaggcatattcaagaaggcaccttcattagccataccgaatatattcaagacattctaaac

SEQ ID NO: 43617 - DNA, 503 bp, Zea mays
  unsure (1)..(503): unsure at all n locations
agcttataagttttctgagatgactagtggcttcataggaagaatccaccctacgcatgtcagatcaatccacaactctagctagagcgatgacaggggaagccagcttcaaaggccacagcatagctcacaatcttcagggcaacaacaaagctctttcaggccaccagccctaagggacagaggaggcaggggcttctaaagaaggtatggtgatcagcccacaaagctctattgtttattctgtggtgaagacaaaggccacactacaagaacctgtcaggtcaccattcataaatagaaagagattgccgaagcagaggcgcgacaaaatcagccaaagcaggtcttacatactggcttcgtgctactcttcctatataccagaatacgtgggtaatcaacctgcagcctctgttgcttcggcaagtcattcacaagctttctggccccagcttccactaccaccaccattgccatncacccacaccagaagctagcag

SEQ ID NO: 43618 - DNA, 471 bp, Zea mays
  unsure (1)..(471): unsure at all n locations
tggatntcagaatgatgtaattgttttacagccctcactgacatgtactgtaaatgggggttaaccaagcatgccaggataattttcgatacagttggtgcaaaggatttggtgttatggaatacaatgctgcttggcctattgcaaaatggaagatctaaggaagcccttgtaatatttaaaaggatactcaagtgtggaatccaacctgatagaatcactctttttggagccttatctgcatgtggtttagaaggtttggtatctgaaggaatggaaataattaccctgtttaaagataggtaccatattatgcctagtctggagcactatacctgtgtggtcgacatgttatgctgcactgggaatgtcagagaggcagtgaattatgtagagaacaagttggcanagtttagtgctgctattntctctaatattctggaggcatgtatagtccaagggaacattgca

SEQ ID NO: 43619 - DNA, 403 bp, Zea mays
atccttaagtcacctgcggcatgaagcttgtgaggtcttcatcccacatgtgctaatcggcgatgccacagccagcccatgctagtcttagctattaagcatgcatctagaccggcctcttcttttgcaaaatcaactaaataaagtttgccgtctaatacacgcttaaaagctagtgaaccatcacttcttctaaagacagacacatctacatttgtaaatagacagttataccccatctgacataattgactaacagatagcaaattataacctatagactctactaaaaacacattagagatagagtgctcattagaaattgcaattttacctaacccttttaccttgccttgattcccatcaccgaatatgattgaatcttgggaatccttattcttga

SEQ ID NO: 43620 - DNA, 477 bp, Zea mays
  unsure (1)..(477): unsure at all n locations
tctaagggggaacacattntacgactaaccaatgttcattttgagaaagataagattggtagtgcatgccaagcatggaagtaggttggagttcatcatccacataagaacatcatgacgaccgagaggccacttgagctactccatatgaatctattcggatcgattgcttacataagcatcgacgggagtaagtattgtncttgaattgcggatggctattctcacttcacttgagtgttctttttgtaggaaaaataacaaacccaagagaccttaaataaattctcgagatgggctcanaatgagttcggattgagattcaaaaagattagaagcaacaatggaacaaagttcaagaactctcaaattgaaggatttctcgaggaggagggcataatacatgagttctcttctccctacacacctcaacaaactggtggtgtggagagaaagaatataactcttatggatatg

SEQ ID NO: 43621 - DNA, 435 bp, Zea mays
  unsure (1)..(435): unsure at all n locations
agctttaggcaaatcctcaagcaacggaaggtgaatgactaccaacctcgttccaagaaaggttgctacaagtgtggtaagcccggtcactttattgcaaaatgtcctatgtctagtgacagtgacaggggcgacgaccagaagggaagaagaaaggagaagaagaagtattacaagaagaagggcggcgatgcccatgtttgtcgggagtgggactccgacgaaagctcaagcgactcctccgacgacgaggacgccgcccacatcgtcgtcacaaaaggccttctcttccccaacgtcggccacaagtgtctcatggccaaggacggcaaaaagaaagtaaatcaaagtccccactaaatatgaaacatctagtgatgagatgatgataaaatgaggaagaaacttgncattcttttgctaccttacatggac

SEQ ID NO: 43622 - DNA, 384 bp, Zea mays
  unsure (1)..(384): unsure at all n locations
ngagacaggaacaaccgtggcatgcactatattccttgaagataatgtcaagaacttgaggattgccaagaggaaggaacacaagaagaaaattaatacctcttncaaaagcatcaaccatgccttcacaaaaggtaacatccaaggtaataatcaagtcacacttcatactaagagaagtaagaagtgtagtgaatgctttaaaagggacactcgattangtcatgtccctatattaaaaatgactcgattataaacaaggatgataaacttagttttaaatgctccaagaaaggacactngtttatgtcttgtccncatttaaaacaaaaaggaatagtgttagaaaagaaaaaaatcactaaccatgtagcaagaaagaac

SEQ ID NO: 43623 - DNA, 375 bp, Zea mays
  unsure (1)..(375): unsure at all n locations
agctagctacctcgaaccatatgatcttggtttctgtattctccggagntccgaaagtgaccgacatgtagatgtgtccgagtgggtattctccttcattcggcacaatgccgaataaaagagtgtctgactcgtggagctctttgagtgcgactcccaagccttggagtgtccgggggaaggtgacgtagatgctgtcttccccgtctactaacaccttacttaccctgctctctcggatcaccggatcgacgacgagcgggtatttgcccgggtgatcaaagatgagccactgatccgcccgagtgaaagtgatcgcgtgttctgaccatctatacggtgcgggaggacacggggccgccaccaatatctgac

SEQ ID NO: 43624 - DNA, 195 bp, Zea mays
  unsure (1)..(195): unsure at all n locations
gaactcgtggactatttgctntgtccttcagatgcttaatattgatngatgcatctctgaagatctcgcggacctattggttctgtaccccacatgctttcgctgcacacttctgatattgtagcttgatgttgatcgcatggtctctattgctgttagcagtttaccccttaaacaagagcgttgatatgcact

SEQ ID NO: 43625 - DNA, 236 bp, Zea mays
  unsure (1)..(236): unsure at all n locations
ataacgagaattacattctatatcctgctggttatcctgagcataagatcatgagaattcatgctcagaagactcattctgtttaccatcatgcctttatgtataagaatgnagcttctagctctaggcattcaacccatgttaaattgcctaaaaagaaacctcctactacatcaaatgagcctaatgtttcatttaaacactttgatgcttctaatggcgctcctaataaatcc

SEQ ID NO: 43626 - DNA, 408 bp, Zea mays
ataaaaagactcatacagtgggtacagatcttttaataggtgttaaatataaatattataataagatttatgaccactctcataagtatgaaatagtgagagagaaaaaagaaatagcagggcatggaacaatgcactctaatgtgttctgctagttgatatggaaacaagctaaatagacactggtccatgtgcatgaaagaaagaagccaacgaaacagtatgtataccaacatctacattaatttctcattcgaactcaactgtctgacttatagtactcagataagaacaataatagtttcaacggagctatgatgggtaggtttagaatataattgaagatatggccctaacagaaatacccttacatggcagacagtacacatggtccaaccaacaagatgt

SEQ ID NO: 43627 - DNA, 416 bp, Zea mays
  unsure (1)..(416): unsure at all n locations
tattatcagtcaccgaagaatggaagccaatccagaaaagatcgaggccatcatgaagatggaagctccacgatcacaaaagaaagtgcaaagactcactggatgtatggcaactctgagcagatttatatccaggctgggagaaaaaggcttaccgttttataatttactcaagaaggtgtgaaagggaattaggcttacacctagttcctaaataattntggtggttgaattgcccaacacaaataattggactaactagttttctctagtgcataagttatacaggtgccaaaggttcacacttagccaataaaaagaccaagtattgngttcaacaaaagagcaaagggacaaccgaaagcacctctggtctggcgcaccggactgtccggtgtgccaccggacagtgtccg

SEQ ID NO: 43628 - DNA, 312 bp, Zea mays
  unsure (1)..(312): unsure at all n locations
atctcacactctgagtttgacgtggtcgattttctgatttatgagattgaggacacaattttggatggtcttcaggctcaacgtcaactgccttacgctcgctatctctgacccatatttgctcaactgattcngccctctccggtccaggacacactcgaagtctctagactgcagntccgcttctatcggctaacttctgaggtcacaactttagctctaacttcagcatcagatatcacggttgaggatgaggccatcagacagnttgaggatcanggtgcggntgctcatacttctttcgatgatgat

SEQ ID NO: 43629 - DNA, 410 bp, Zea mays
ataagacgcataattataccttttatatcttctcgctctgatagggcattcttcacataaaaccattctgtcatccaatccccgggccatctcttccgaaaagttggtacgggacagctagccccggaccgagagacgaaactgtagcagccaaagatattatggtactgttctttgccccaaagctttgtttcatataataattcgtgtatattacagaagcttcttgcatcaggcttcagaccttggcttttcgtggcccacacgaagatatttagccttataattgcctcgggagtaagttgatgaagatagacttcgaagatttcaacaccttcacgacgaagctactcaagggaaatcgtagcccatctttcagagagcttcggtatactacgacttcattttct

SEQ ID NO: 43630 - DNA, 277 bp, Zea mays
  unsure (1)..(277): unsure at all n locations
tataccgtcattattcattccttttgtggagtgttgactataggacaatatctcgttcttctttgatatatctcaatgaagatttagtntgtccagttctttttgtgtgtcaagctcatacattaatacataaacctggtagatgttcatgtctgttattttaatcagccttaagtgctatggaccttggcccaacccatgtactctctttctaatatatatacacacaaaccctggttangggttccaaccaaaccttctttgatacgcgttatta

SEQ ID NO: 43631 - DNA, 387 bp, Zea mays
  unsure (1)..(387): unsure at all n locations
agnctggaatgtgttagggtagcggtcagaatttaccttctattcaacggttaagagatacatgtgggtccagtancgcacatctatggtgttcccttccgcaaaaaaaaatagagcgacacatgtgcactaggaataaactaataaaaaaagcatacacttgattttagccaaaagaccgaaaaggtatgttaaaagaaattaactctaattaaactaatgtcaaccacgcactccaacctctgcggaagtcacttgacctgccccatcgtaaggggaaagggtatgtgcaaaaaaatgcaagctgaggcctaaaacttcatcaagttcttctaaactaattatacattctatgcataaccatccagaaatagatcaatgaccatt

SEQ ID NO: 43632 - DNA, 393 bp, Zea mays
  unsure (1)..(393): unsure at all n locations
gacctttatactcagctgcttgtgaatgcctgttgcactagatacactccttctttgtcaattccagcctgaaggcgctgtctgctcaaattaccttattcagtacgcactagccctggtaagctgcaagcctgcaactgcagacatctcatttcttgccaatcattccccatcttgcttgcaagatattttgagttctactagctctctcttatccagctcttgcgatctttatgttctgaaggagagcgtcaagatctactgctcaattaacgatggcatcatcaatctcgtcgatatggtaaagtaacaattctaccacatgaaccatggttntctttgtcgccgaatcgtgatgataattttcttgctctggccggtctgatccagttc

SEQ ID NO: 43633 - DNA, 484 bp, Zea mays
  unsure (1)..(484): unsure at all n locations
agcttgtgggagtggaaagcggccgtgacagctatcttcttcaacaaaaaccacgaagccttgggataaatatatagataggattgcgatagaaagcgtccgtccggaaacctgtgacgctgcacgctcgcgccagccacaaaatgggaaacgaggattctcgatttcttgtcgctgctggtggctgcctggccgcggccggattgctggggtcggagaggattaggattgcacgctggcatgtacgtagatctcaacagtttctgaaggcacgacatttaggccttatgaaacgcagaaattttatagaaatcgtctagggattntagatgaatcagttcattnttaccgaaataatataagaaacagtaaaaattcgcgtattttatagggagcgtcattgaattttatgacaggataacaggagaaaagagtcgtctctcgcttaaaagatagctttgggtttatgcacggaagcagaact

SEQ ID NO: 43634 - DNA, 491 bp, Zea mays
  unsure (1)..(491): unsure at all n locations
agctcgncaagcatatattggtacccatcgcttgatgtgtccatcaaaggtagtcaacaaagatctaggaacccaaatgtcctttgtgttatcactaggtaaacttattacctttttagcacaagttgcaattgtgggttgcctacctacatgtgaattaattgacaacctataagtgggatagttaccaatgggacaatcctctcattgatgtcccttctttctgcatatgtagcaaaggcgatcttcaaggcttgaagaatacttctttccttgtttcttgcttgctacatggttagttaatattttcttttctaacactatgccttcttgtttcaaatggggacaagacttagctaagtgtcccttctttgtagcattataacaaagtttatcatccctgctaataatcgagtcatctttatatagggacatgacctaatcaagagtcccttttcaaagcattcactacacttcttactactcttagt

SEQ ID NO: 43635 - DNA, 472 bp, Zea mays
  unsure (1)..(472): unsure at all n locations
agctntccaacaaatgttagatcaccttttttttgtgatntataaattaagttacagttgtttgagttaagatctctgaatctgtcccaatttggacagcagagcttttctcatgttttctgacatttatatacattgaatcacattgagatgtttataaataaattgtagacaattctattagctctctaaaaagtctaggatcacctgatttggatttctgaaactccagttataaatttttgaaataaagagccgaattctgtccaaatctggacagaattaaagtttagcactgtttgaccttctaaactgtcgaatcacgttgtgatgataatataagagttatagaggactttctaagctttccagaaagtcctagtttactatttgaatgcctactttgtgagttatgaactaaacaaatagttgctgttctgctgtccanattcaacanatatttaaatgacta

SEQ ID NO: 43636 - DNA, 492 bp, Zea mays
  unsure (1)..(492): unsure at all n locations
agcttataaaagagaacacattctgttgacttcaaatgttcattttgagaaaagcacgatttgtagcatatgtcaagaaagaaagcaagttggtacccaccatccacacaagaacatcatgacgaccgataggccgcttgagctactccacatggatttattcgacccgatcgcttacataagcatcggcgggagtaaatgctatcttgtaattgtggatgattattctcgcttcacttgggtattctttntgcaggaaaaatctcagacccaagagaccttaaagggattcttgagacacgttcagaataagttcagatggagaatcaaaaagataagaagcggcaatgggacaaagctcaagaactctcatatcgaatgctttcttgaggaggagggcatcaatcatgagttctctttctcctacacacctcaacaaaatggtgtagtggagaggaagaatagaacactattggacatggcaagaaccat

SEQ ID NO: 43637 - DNA, 216 bp, Zea mays
  unsure (1)..(216): unsure at all n locations
gaagctctcatcatatccaaaatgtgatgaccacatcaagacctctgaagttgcttcatatggatctcttcggacccgtcgcctatcttagcatatgaggaagtaagcatggctttgttataantgatgattatttccgcttcacttgggtattctctttgcaggataaatctgaaacccaaaggaccctcaagcgctttctaccgagagctcaaa

SEQ ID NO: 43638 - DNA, 377 bp, Zea mays
  unsure (1)..(377): unsure at all n locations
acctatgaaactaagcttatctatggacgtgaacagtgccttcctattggacctatctatgaggaggtctatgttgagcaacctctcggctctgaagacagtgagtatcctaaccatgtctataaactctctaaggcgctttatgggctcaagccagctctcagagcatggtatgaatgcctaagagattttcttatttctaatgacttcaaagtntgaaagccgatcctactctctttactaaaactattgcacatgatttgtttgtatgccaaatttatgttgatgatattatatttgggtctactaacaaatctacttgtgaagagtttagtaggattatgattcaaaaattcgagatcgctatgatggcggag

SEQ ID NO: 43639 - DNA, 250 bp, Zea mays
tgactcattcggctcacggagttcttatatacgagcgcaagatacttatcgcacaatgggacgactgaggtattcatatcctcgacgcgtaagagtccctcagatcaggcagccttggctgcttacgtgtacctcgtcattctcaggatccgcttatccaatgtggtcagaagcactgcagaaatcctgctagaaagacgttcatcttcgaggaaataattctgctcagagggggtctcccccctattat

SEQ ID NO: 43640 - DNA, 446 bp, Zea mays
  unsure (1)..(446): unsure at all n locations
aaacatatcctcgtatctttataacactatttgacgncttattgacaacaatttcacacaacaaaacagtcaatagtatttaatatatgacaattcgaacttattaatgtaaaaattaataaatacacttttttgcgcatcatttgtatagcgtgaattgggaagaaaacagaaaaagaaatgtgaatagggaatttgttacactgtatctntaggggaccgaanttaggggacgctgctgaagactgataatatatagaggacataatcttntagagtgctctgtaaagaacagaaaatattcttttatggggacgctgcttgagacagcctaagcctatctattatagaatctactcaattgttctgtgatctgtgcaaatgtaacagttacaacagatgcgaatactttgcctacaacaatatagcaatcttgacatataaat

SEQ ID NO: 43641 - DNA, 334 bp, Zea mays
  unsure (1)..(334): unsure at all n locations
agcttcgggaaaagcagtcttattagccttatcacaagaatggatctctctntgcgaagcacggatatctttctttatgaagcatggatctttnttttaccaagcatgaaaagaaaggaaagtgttttttcctccaaagctcaaaaacggtatgtatgtaagtttcatgtgttgcaaaaaaatagattacaataatttacatattcgattcataggtacatacatcaagtgtcacatacttttgttacaatagaagcttagccatatttaaattgttccatacattccagctattattacaacacaatctattcctctttaagaactttctctc

SEQ ID NO: 43642 - DNA, 462 bp, Zea mays
  unsure (1)..(462): unsure at all n locations
tatcggatcagatcaaggactntactgcaatcgctatttctatttgccactattgacacaatgcagagctatagtgatatgaaattcacatatgttgtatcatgttagcttttcaaacatctgccacctgagctcttgaactgattactacagggccattgaattgattactacagggcaatcgctattcctctacttgaaacttatcttttgaactgattactacagggccattgaaggatcacattttattgtatctgaagcatctaccacctgagcttctcaaagaaaggcttccttgtatttctgaaaatgctcgtattccaagactgcttgatgatgtcaagaaacctgaataggatatcctgacgtctctttggctgcacatatcgttcgtttcatggtcatcttgttngccaccatataaaagaaacaatgccctcatgatctgagactataact

SEQ ID NO: 43643 - DNA, 460 bp, Zea mays
  unsure (1)..(460): unsure at all n locations
agcttaatgtataacgcattatgataactgttatgcttatcagaaagagattgattggtgtagaagttcttttcaggtgacgttaaagcttaatggagatcaccgctcacgatgctaaatgaagtagaaaatagtgcccagaaataagtagtaggaaaaaaaactattctgtgttaggataaacttctgagtggtagcaatatattttattttcggagtttggatttattccaacacagtgagtagtctgggttaactgtggcttcagagctgtgtttgctatcacttttctgactgtgatagtgagatatgatcttttagagtaaaagtttgattttatcaactgtctgattccgacttccaccacggttgattagtagatcatacacagacatttcgtgctatctgtanaatctgatctggaacttctttgctattgaaatttgtagtcttcttcttg

SEQ ID NO: 43644 - DNA, 383 bp, Zea mays
  unsure (1)..(383): unsure at all n locations
taatcccaaaaatgtgtctttggggtaccatcaagaaagctactcggatttattgtcagccaccggggaatngaagctaatccagataagattgaagctatcatganaatggaggcaccacgatcacaaaagaaagttcagagacttaccggatgtatggcagccctgagcagaatcatatccagactgggagaaaaaggcttaccgttttataagctactcaagaaggtggataaagtttagtggacttcagaagcacaggaagccctagatgcactgaaaaaattattgacaacaccaccagtgctgaagctgccacggcgagccacgtcaactcaaccagctaaagaattgcttgtgtatatatcttgcatgactcacgt

SEQ ID NO: 43645 - DNA, 386 bp, Zea mays
agcttaaagccatggtaagtagcatatgccaataatatacgaattgactcaagcctagctacgggtgcataggtttcaccgaaatccaaaccttcgacttgggagtatcctttggccacaagtcgtgctttgttccttgtcaccacaccatgctcatcttgcttgttgcggaagacccatttggttcctacaacattttggttaggacgtggaactaaatgccatacctcattcctagtgaagttgttgagctcctcttgcatcgccaccacccaatccgaatcttggagtgcttcctctaccctgtgtggctcaatagaggaaacaaaagagtaatgttcacaaaaatgtgcaacacgagatcgagttgttacccccttatgaat

SEQ ID NO: 43646 - DNA, 389 bp, Zea mays
cgtcccggatcttaagtcacctgggctgcagcttacggggtgttgatgagtcgacacgtgcaaagaattgtataacaactcaccgcggagctcggtctacgttcaccggcggtcgggtgaagtccggcgaccgtggactggcttctccggcgaggcaacgtccgattccttgctcggggagcttcaccgaggcatgcacggtctactccgagggtcggacgcggctaagagaggctctgctggccggtctacggtggcgggggatcgggtggccgcgggcacaccgtgcgcggggcaatgctggtgatctggtgctcctgtgaggtccagcgcgcgcggaggagtactgtcgacgtctctgggggctctataagcgcgcgcaacggcgc

SEQ ID NO: 43647 - DNA, 324 bp, Zea mays
aatctgaagtgatgaggctattgaagaaacttgatgaagtaccgaccacctttaaccgtgagcaatcaaagcgtgagatatcacttggcggctatggtcaaaagaatgtgaaggctttgccaagcgaaggaagaatggtacactttttgctatgcaatgctttgataagctaaaaaaatgctttactattgtagcgcattctcggctgagcgacattttatccgtggagatctcgaggttgtgattaaatagaatgacggtgaaatcaaagcatctgatgaagttctaactggcaggggggacttttgtgcttgtgtaagcgct

SEQ ID NO: 43648 - DNA, 502 bp, Zea mays
  unsure (1)..(502): unsure at all n locations
ttaagtcacctgcggcatgcaagcttctaaagggagaacacgtgataagtctaaccattgttactttcgaaaaagatagaccttgtgcagcttgtcaagcaggtaaacaattgggaggagtgcatcacagcaagaatgtgatgaccacatcaagacctctggagctgctacatatggacctcttcagacccgtcgcctatctaagcatacgaagaagtaagtatggtctagttattgttgatgacttttcccgcttcacttgggtattccttttgcaggataaatctgaaacccaagggaccctcaagcgcttcctaaagagagctcataacgagtntgagctcaaggtgaagaatataaagagcgacaatgggtccgagttcaagaaccttcaagtggaggagtaccttgaggaggaaaggatcaagcacgagttctccgctctctacacaccacagcanaatggtgtggtagagaggaagaacatgacgcttatagacat

SEQ ID NO: 43649 - DNA, 199 bp, Zea mays
  unsure (1)..(199): unsure at all n locations
gcctcctacacttccttaaagctataaatctccattctcctaaacaggaccctatatattaaagacagtggagcccatttgacctaattgagatacgcgaagcaaattggtatctaaagaatctcccagaaaaacattggaaatagaatggtcanggagatatagccattttacccaatccctttgaccaaaccttgat

SEQ ID NO: 43650 - DNA, 66 bp, Zea mays
gccacacttactgcatagtgcgaagctgcctcatacaatagcagatgagcccctaacgcgggtgga

SEQ ID NO: 43651 - DNA, 435 bp, Zea mays
  unsure (1)..(435): unsure at all n locations
cagcttctgtntaaggatgtgtatcaccatgtctggtttgaagatgatggagggaaagaatatgactgcagatacgaagctcactgatgagacgaagttatttgaagaatagataaccgcggatccctttatcgtcgggtttgttgaatctatgtcaagaacaaacacagagaagattactaaagaggatctagaagatttgtttgaagatactgatgacagtgatagttatgatgtggagagtggagacgaagattccgaagatcgaccgtggcgaccaagccatactgtcttcgggaaatcgattgttaaacagagtcatcttgaccatatgagaggaaggtactttcgcgacatatctatcatgagagttggcgggacaacacgcgccctgtccctgaggagaatgaagttgttatctaccgaagctttttt

SEQ ID NO: 43652 - DNA, 390 bp, Zea mays
  unsure (1)..(390): unsure at all n locations
agcttgatacagagccgaaagagttgagcacgtatatctttgcgtaccaccatacaaaggaaccgacttaaagatgaaaaggctattcagacctcgacagactactatagagttattatcaaatgtaaagggcatgaatgtaattctgtgagggctgtgtcccgtgtctataaataggtgaacagtatccccgtactgttcacgctgacttggcatttgctnttgcgtcacactagtattgtcatctccttccaagccgaaaggacatttataattcgatatcgttactatttctctatgatgatataatacagttaaatggataatgtcatatgagtattcatgctatcttttatgtctcatatgcttccgctatcaataatgtatact

SEQ ID NO: 43653 - DNA, 318 bp, Zea mays
agctttctgaaatgcagatatattagctctatctctttaatggatctctctttgcgaagcatggatatctcttctttatgacgcatggatcttttttttactaaccatgactagaaaggaaagtgtttgttccgctaaggctcaaaaaccgcctgtatgtaagtttcatgtgttgcacagaaatacatcacaataatatacatattcgattcatagttacatacatcacgtgtcacatactcttgttacaatataagcttagccatatttaaatcgttccatacattccagctattattacaacacactctattcctc

SEQ ID NO: 43654 - DNA, 258 bp, Zea mays
gcaatgaatgctgcggtacttcactcctacctgtctgcttatatatagctgcatgtaaaacggctgattcgtcatgatcttttacaccacgcatacaactgcttgcactcgctgcgcggcgggccctctgacctcaatagtgaatcctaatgtggtgaccgctacgcgctctgtatctgtatcgtttctctacaaccagctcacggaatgtgttttttaagaccttttgcttcctgaaccctaatatacttttttcac

SEQ ID NO: 43655 - DNA, 464 bp, Zea mays
  unsure (1)..(464): unsure at all n locations
cacgtagcttttagagtactttcttacatgctcctcatgctctcttctgctgggaatatctgataatatcaacaantgacaccactacgaacttcgcgaggtagtccatgaacacactgttcattaaggacatgaatgaagcgggcgcattcgtcaaaccgaatgacacgactgtgaacttatacagttcatacttggtgatgatatgtagccttcggtatatctgaaggtccgattttgagctgatggtaacctgacctcagatctatcttcaagaacacactagctcctctcaactggtcaaataaatctgtcaattctgggcaagcggtacttattcttaatagtgacctcattcaacgatctgtagtcaatgcacattctctttgttacattcgtcttctccactaataggactggtggtgcccaaagcgaaggactcgggctgatggacgccttctcta

SEQ ID NO: 43656 - DNA, 318 bp, Zea mays
  unsure (1)..(318): unsure at all n locations
gaccgtatcgcaagcgcattcaatgcaaggatcgcctggcgccttatcctgacacgcgtgcctcagtcagcaaggttgaagtgaccgcagtcactttgccctcccactgactgacctgacaggaaaacaacgccgctcgcccctctccgactgctgtgccacccgctagggtgaggctgacagcaactgagtccagtctcatgcgccacaagaagctccgcctcgcccgaccttgggcctcggcttcaagaaaagtctccgcctcgcccgaccccanggctctgtcctcgcctcggcctcggaaggtggacttcgtct

SEQ ID NO: 43657 - DNA, 456 bp, Zea mays
  unsure (1)..(456): unsure at all n locations
actagctgatcattgatattaatntatttatttctggtatttccactcctttactaatgagaagcatttatccttgcagtattgcaacatctacaataatccatgcagtgcttatatgatataccatttttgttacattgtttcataaccaatattctttactattggcttcttttcacatgaattctcttactgacacctacttattgtggatatgtgatgtttgtccgcactattgattttttgtgccaatctactcagtgaggctcaagatgggattctagatttgaacaacacaacaaacactttatgacacgtcttggaccaaacaaataagtaattcttgatgaaaactatacctttcactcgagcatcttgtttgaagttattttgtatttgttttaacacactaactacggtcctatgggaaattttaaaaatgcatgccactaaact

SEQ ID NO: 43658 - DNA, 316 bp, Zea mays
agctctgataatacaacatatgcgattgtgatttgaccaaccgacttaaagatagaatgaccttttagtccatataggtctgagtcaatgttgtaaacttttatgaagggcatgattgtaattcctcacaggctgtgtcctgtgcctataaataatgaacaatattcctttactgttcacgcattcctgccattgcaatcgcatcactcagaaattattctttgccaagacagaggtataaatgtatctaacatctgaatacatcaagtttgtttatatgaaaaagagcgcgttatttataattacttgcgttaat

SEQ ID NO: 43659 - DNA, 469 bp, Zea mays
actcagcttgccaaagagtggcgggaatcttatatttcaatgatatggctttcaaagataacaataaccttaaatcttaccttactgaccacaagagtgttgcgaatgatctggagatgaaacttaagagatcgatgggaactgaagcatctaaagagcatgcggcagatgacagttcgctgagtgatttgcctgaagagattggcacacctgtatcattgtcagaagaagatatgggagccgtaatcgaagcctaaccagtgatctgatgtgctcgcaagtgagatcagaatttctggagcagttcctgtaaaacaatattttgggtcctgaagtcaccaccatttggatcgacatttttctcgaaacaccatctggattgacatgatctatggtgttctgacgaattcattataacagactccagtccttactatgctcatcagggaagggctctcacatccggcga

SEQ ID NO: 43660 - DNA, 348 bp, Zea mays
  unsure (1)..(348): unsure at all n locations
aaaactcatttcttttcttcttcgctatgacagaaaccttctacgcttcttagacaacatatacactggattcaccaaatagttgagagtgaatgtgataattcttgcaatatctacaatacctcgttagatgcttaccttatatactactatagtctgctatgctgcggacggaaccgatgctcccatctttgtgaaccaaaagcaaaaaacaccttcccgtgctttcattcacatcgaaatacctctggaccacaataaaaaaagatgagctcctcgtacatacgaagcgttctccctccttttncggctaaacatcttcaggtataacaaagcatcttcactcac

SEQ ID NO: 43661 - DNA, 332 bp, Zea mays
atccaatcacgaatgtgatgaccacatcaatactggtggagcttcttcatatggatctcttcaggcccactgcttatcttaacatcaacgaaaggaagtatggtcctgctattgatgatgattattctcgcttcacttgggtattctttttacatgatataattgaaacccatgataaccttaagtgcttctttagacgggcttcaaatgaggttaagaacctttatgtggaagaatatcttgaggaggaacgcatcaagcatgagttctccgtttcctaactccacaacatattgtgttttgcatacgaagaacaagacgctcattgacat

SEQ ID NO: 43662 - DNA, 364 bp, Zea mays
agcttctaaagggagaacacgtgatatgtttttctcacttgcgtttcgaaaaagatagaccttgtgcagcttgtcaagcacgttaacaagtgggaggagcacatcacagctagaacgtgatgaccactttaagacctctggagctgctgcatatggacctcttcggacctgtcgcctatgtgagcataggagggagtaagtatgggttaactattgttgatgatatttcccgcttcacttgggtgttctttttgcaggataagtctgaaacccaaaggaccctcaagcgcttcctcatgagagctcataatgagtttgagctctaggtgaatacgataaagagcgacaccggggtcgaattcaa

SEQ ID NO: 43663 - DNA, 392 bp, Zea mays
  unsure (1)..(392): unsure at all n locations
ntactacgatcggcaccaccggcaagtctcctactagccagtggattgggccctccttcgtcttcggcagcgggcagcttcttcaatgcccaggaccaccacgggcaagctcaagcctcgctttgtggggccctaccgcgtcgttgagctcatcaacgacgttgccgttcgcctggccttgccgccaggggcgcgcgctcatgatgtgttccacgtgggtgtcctcaagaagtttgtcggcgttccaccagcgtccccgcctgccttaccaatcatgcacaacggcgccgtggtccctgaaccgctgcaggtactcacgcacgcttggcacgaagcgtgcgtcaagttctcgttcactggaggggcgaaccgaccgagtctgcttcctaaga

SEQ ID NO: 43664 - DNA, 496 bp, Zea mays
  unsure (1)..(496): unsure at all n locations
agcttagcanaagaaatatctggaatcaagaatattgagctcatgcctaagtctggtaaaagattgttcatcaagtggcttggtaaagatatcggctaattgatctttagtattaatgtaagaaatctcgatatcccccttttgttggtgatccctaagaaaatgataccgaatggctatgtgcttagtgcggctatgctcgacgggattgtcggtcattttgattgcactctcattatcacatagcaaagggactttggttaatttgtaaccgtagtcccgcagggtttgcctcatccaaagcaattgcgcgcaacaatgtcctgcggcaatgtactcggcttcggcagtggaaagagcgaccgaatgttgcttctttgaagcccaagacaccaaagatcttcccaagaactggcaagtccccgatgtgctcttcctattgattntgcactccgcccaatcggcatccgaataaccaattanatcaaatgtggat

SEQ ID NO: 43665 - DNA, 383 bp, Zea mays
  unsure (1)..(383): unsure at all n locations
ngaagccatggtaagtagcatatgccaataatatacgaattgactctagcctagctacgggtgcataggtttcaccgaaatccaaaccttcgacttgtgagtatcccttggccacaagtcgagctttgttccttgtcaccacaccatgctcatcttgcttgttgcggaagacccanttggntcctacaaccattttggtaggacgtggaactaaatgccatacctcattcctagtgaagttgttgagctcctcttgcattgccaccacccaatccgaatcttggagagcttcctctaccctgtgtggctcaatagaggaaacacaagagtaatggtcacaaaaatgtgcaacacgagatctcagtagtaccccctatgaatgt

SEQ ID NO: 43666 - DNA, 441 bp, Zea mays
  unsure (1)..(441): unsure at all n locations
agctagcccttcaagcgacccgtaaggcaactgaagagtcctcccttctaaagatcttcacatccacatcaaagaataaacaattataacccattccacaaagttgtgaaacggacaacaaattatagcttaaagaatctaccaataaaacatttgaaagtgattgttggtaagagataggaattttaccaatacccatcaccttactcttgccactatctccgaccacaatttcttgtgcttcttgagttagttgcaatgaatgaaacatgtcttcctccccggtcatgtgaattgtacatccactgtcaagcacccaacttgacccaccagaggagtagacctgcaaaacaagtttaggctatgctnttaagtacccaaattgaatngggtcctacagtggtagttatagcctttagtacccacacacttcttttcatg

SEQ ID NO: 43667 - DNA, 227 bp, Zea mays
  unsure (1)..(227): unsure at all n locations
tctcggagatattttttatactangatctcatgattaattgcacttgagtggggtatganaataagagatctttaataaccttgacattcatggtcatccacttgtgctccgaggtgcggactggttaccattgtctgaccgatgtacatgctatggctttctcttgtgagataaccgatgantctcctcatcgttccgctggcgactggcacttctcccttcgggc

SEQ ID NO: 43668 - DNA, 483 bp, Zea mays
  unsure (1)..(483): unsure at all n locations
agcttcgatattataacgtatccgaagacgaatgatctaacctacttaaaggtggaatgancttttagtccataaagatctgagtcataattgtaatcttttgtaaggggtatgattgtaatttcttacaggctgcgtcctgtgcctataaatagtgaacagtactcctttactgttcacggaatcttgtaattgctaacacattattctggaattattgttttctgccaaggcgaaggtataaatgtacctaaacattatgttttagtatttcagtttatattataaagtaggtaataatgttgtttattcttggtattctttaacgctntatactttatatttcattttgcatcattttataattgaacacgaaggtaggaccttcgtgatctatcattcatgaccttcgtccgaagctcattanatcctcanggaaataatgcttcagcggacgaacggctnctaacattaacattctat

SEQ ID NO: 43669 - DNA, 411 bp, Zea mays
  unsure (1)..(411): unsure at all n locations
tcgcccgacccngtgctcggactcgggctaaggccccggattacgacgaactccgctccgcctgacccagggctcggactcgggctaaggccccggaagacgacgaactccgctccgcccgacccagggctcggactcgggctaggccctggaagacgacgaactccgctccgcccgacccagggctcggactctggctaaggccccggaagacgacgaaccccgctccgcccgacccatggctaaggccccggaagacgacgaactccgctccgcccgacccanggctcggactcgggctaatgccccggaagacgacgaactccgcttcgcccgacccaggggctcggactcggcctctgtcatggaagacagactcgacccccgcttcggaggagcctncacgtcgcc

SEQ ID NO: 43670 - DNA, 403 bp, Zea mays
  unsure (1)..(403): unsure at all n locations
gcttgcagtaatcatcaagctatgataatcgttgncttcgcatgtctttttatgccaaatagacaatgctggactgtagctntggctgagatcttgagcgtgctaacatggatgacatcacgacagcgctgctcaatttgaatcgagaagtgatgaaatggtatttgtactactgaaagttgtggtgagattatcctcccatgtcgatcgaatcatcggcattataatctccctttatctgagactcgagctccagactcctcacattccgggcaggaggctcaacaccacaatagttgccattgatatctatctacttaaatactgatcatccatatttgttatccctacattggcgtagctntatgggcacatgtcttgtattggacattcatatttttgt

SEQ ID NO: 43671 - DNA, 419 bp, Zea mays
  unsure (1)..(419): unsure at all n locations
agcttgcaagagaaagagatgatatgaagcttttgtttgcttganagagtcaattcaagtcttattaactcaagctatcaattttcaatgatctatatatccaagattgacccacaattattttgaattattatatctaaaactcatatcatctcggggaagatagtgatgttgtaggaaataaagaattatcctatacggaaaaatcaaggcctacaacatggaggaaagccaaaggatggtaacactgtctctaagtgcaagtatcttcaaatatcatttctcttgtgtcttgtgtagtcacatagaaaagggatgcacttaaagaaagtcgttaacttatgctaccattctctggaagaagtactctcatatggtagattgcatacttatcaattctatattatggcaatctacat

SEQ ID NO: 43672 - DNA, 137 bp, Zea mays
  unsure (1)..(137): unsure at all n locations
gctatgaagattctntcatccaacatgtgctagtcggcgatgccttagccagcccatgttagtcttagcaattaagcaagtgtcgagttcagctctatcaaaatctaacaagtatagctgaccctctaacactccct

SEQ ID NO: 43673 - DNA, 454 bp, Zea mays
  unsure (1)..(454): unsure at all n locations
tacaaagaatataaagggtngaaattatgaattaagcaagatgtgaacacactatcatgaaaaggatccttatatggcacaaaggtaatggataagtgtcataagtgatgtacctttgcgttttaccttcttaaggggtttccagacttgtgttggatctagaattcatttgcaatctcttggtggcataattgtgacataggtccaagatatcaaatgaagattgtcatactaaatcaaaggtaaaacttgatacctagagtctagatgtcacctagcattttcttatcacaacaagaggcaacatgaaaattgcacaagtatggattatgcaactagtgatcatgtatgaaaaatatcaattgacaaacaccaattgatacgatttgatagataagaagaacactaatagcatattacactaagctcttctcaagtttagtgccacatatat

SEQ ID NO: 43674 - DNA, 334 bp, Zea mays
tgccttcctcaatggaccattttttgaagacgtctatgttgagcaacctcccggcttctaagatagcgagtacccctaatcacgtatataaactctctaagtgtttatggctcaacaccccaaaacatgttgatgcctaaaattctatcctatggttcaagtccgaacgcctatcctactctatttactcaaaactcttgacaatgatttgtctggatgccaaacttatgtcgatgatatcatattttggtctactaacgaatctacatgtgaagaatttattggatcatgacacagaaattcgagatgcccatgatgggcggagttgagtact

SEQ ID NO: 43675 - DNA, 396 bp, Zea mays
  unsure (1)..(396): unsure at all n locations
nagcttatgaagattcttcatgccaacatgagtcttttggcgangccagagccaaccaatgttagtcttagcaattaagcaagtgtcgagttcagctctatcaaaatctaccaagtatagctgaccttctaacactcccttaaatgctatagaatcatcacttcttctaaagacagtgacacctacatcagtgaatagacagttgtagcccatttgacataattgagatacggaaagcaaattgtaatctaaagaatcaacaagaaaaacattggaaatggaatggtcaggagatatagcaatttttcccaaacctttgaccaaaccttgatttccatccccgaatgtgatcgctcgttggagatcttggttnttctcataagaggagaacatcct

SEQ ID NO: 43676 - DNA, 269 bp, Zea mays
ttatagctttcaaccacttcctagccgttggctgactttgctgtcaatgggcacaccagtcagtccggtggtgcaccggacacaacactgttcactgtccggtgcatgccacgtcagtcgaccgttggggtttggagctttgaccattgaagtcatttgtcctcttgcggcaccagacagttcagtggcacaccggatagtccggtgtgttctgactttgcagtctggctctgacttctgacggtcagactgtactgcaatcgaccttt

SEQ ID NO: 43677 - DNA, 417 bp, Zea mays
  unsure (1)..(417): unsure at all n locations
taaaggatactattcaactaaagtaatatgttgataagaggtcaaggtatgaaaacttcctctccttcagttggtttagtattctatccttagtgggatgtaccatagtataggttaaattccttgcaatataaaatgttcaatagtgcatataactntgacatcaactatatgtgtgcactaatttaaaggaatttagtctatccttttatgtttcaataatgatgattcatttgccatccacatataaggatcatcatttgtgaaaccctctcttgtgtttctaatgctctcttttctaagtgtttcaacaaggtccttccaagtgctttcaagatggattcaaaatctacaaatataagagaacttggttctttaatcattgagtttcaatgggtctcatatcaagtatgatcg

SEQ ID NO: 43678 - DNA, 367 bp, Zea mays
  unsure (1)..(367): unsure at all n locations
tagctntatcaaaaggacgtgagaagtgtctttctttatggaccaatcaaagaagaagtctatgttgagcaacctcccggctttgaagatagtgagtaccctatctatgtgtataaactctctaaggcgcttatgggctcaagcaagccccaagagcatggtatgaatgcctaagagatttccttatcgcctatggcttcaaagtcggaaaagccgatcctactctctttactaaaacacttgaaaatgatctagttgtatgccaaatttatgttgatgatatcatatttgggtctactaacgaatctacatgtgaagagtgtattaagatcatgactcacantatctaaatgtctatgatgcggga

SEQ ID NO: 43679 - DNA, 341 bp, Zea mays
  unsure (1)..(341): unsure at all n locations
ttctcgactaagtctgagacagggccttatggaccggtgatatgtcccgnaagcggcaaggccgaccgagccgagggattcccacgcctctgggatacggatacctcactccgncctttcgcgagaagcaactctcgctcgcacaaacattcctgttaccgacagagagtccaaatgcttcgaacaagaagaacaaagacgcagctttccatgcacggcgaaggtgtgttttctggcctcggcggccgcaaaatgcacacgctacaaaacgatctgatcctgcatgctcgggtcttcacgctgaaaggagccgtatcaccctcggcatcgacggcgtcttc

SEQ ID NO: 43680 - DNA, 232 bp, Zea mays
ggcttctagcttcacgacttaagcctgtgaagataatatatctttcttgcggcagagaacgaaactattacatgaaatttgaaaaatgtcctctattacacggaaaataaaactgaatgaaaaagactgccatccagataggatatttgtcaataaatgtgctttgactctggcacaatgctgttgactgtgcgagcttctgactgatctctgaagttcctttggtgtgggc

SEQ ID NO: 43681 - DNA, 427 bp, Zea mays
  unsure (1)..(427): unsure at all n locations
tcggcagaagcgagagctgacatcttctgggattccagaacttcctctaatacactagtcgntctccttgttttggagtcagctgcagaaacacttgatggcttcgacagttctattgtangtgctgggctcaataccttcagcagttctactgccttatctatatttgctctttggtcggatctgtacaagttttgattggcatgacaagacctgatcctgtggcagaaggggcaggttctacaccttcaataagctttggcacatcggccgtctcaatgcgtctcggtctacgtgtcaagaccttcactttcttcgccttcgacgcactagaggatgccgaaacagcaattttcctttttctcacttgnntccgaacatgaaaacagtaatcagggtagacaaacccgattacatcaaaaaccat

SEQ ID NO: 43682 - DNA, 423 bp, Zea mays
  unsure (1)..(423): unsure at all n locations
nagcttctttccttctctggcagaaattattatctgcccagatgtactcatccatcttctgaagcagcttctctagagtctgagggggcttcctggtgaagtattgagccgtaagtcctggtcgaagccccttgatcatggcctcaatgacaatttcattgggcactgtgggcgcttgtgctctcagacgcaagaaccttcgaacatacgcctggaggtattcttcgtggtcttgcgtgcattggaacaaagcttgagtagtaaccggcttcgtctggaacccttggaaactagtgatcaacatgtccttcagcttctgccatgatgtgattagtcctggccgaagataggaataccaggtttgtgcaacattcttgactgncatgacgaaagatttcaccatgactgcagtattgctcatat

SEQ ID NO: 43683 - DNA, 415 bp, Zea mays
  unsure (1)..(415): unsure at all n locations
ttataaagggcatacttgtnattcctcacatgctgngttctgtgcctataaatagtgaacagtattccgntactgttcacgcattcgagtaattgcaatcgcatcttccggaatccaaccttntgccaaggcaaaggtattattgtattcaataactcaatatattaagtaaatacaatgtaattcgtctatgatgtatctatcccttntataccttttgttttatgttatcttaataattttactaaaattntgttacgaagatttaagcttcgtaattatgctcttatcagccttcgtccaaggcccattatcctcaagggaataatgtttcgtggacgaaagacattgacatntaacactttatgttgccatgttcttaattcatagcatttgagaacaagtccccaacatt

SEQ ID NO: 43684 - DNA, 351 bp, Zea mays
  unsure (1)..(351): unsure at all n locations
agcttctcttctcaatcaattggaacacgaagttcccgcaaggaccaccacancgatggtgtctcttgcctcaattacaagtgagtttgatctcaagaaagaatgagaaagaaagaagcaatccatgtgcaagagctcaaaagaacacaacaaatctctctctctaatcactagagctntgtgtggagttgggagagggattgatttttttggctgtgtctagaattgaatgctagagctcttgtaaatagttggaaggtggaaaacttggatgacttgaatgtgggggtggttggggtaaccaaacttgaccgttggtggaggctgctgtcgacaggcgcaccngacagt

SEQ ID NO: 43685 - DNA, 389 bp, Zea mays
  unsure (1)..(389): unsure at all n locations
agcttccagctaaacctttctgtaggcctaaaatgtgcacctgttcagttaatattactgccagtcagccttggtgaaatggtcagtaagaagctgttctagttttagcagcattgttcttctgcacagtatagataaccaaagtacgttgtctatcatcaggttgcctaactgcatctgaaaagccatgtagataggataggaggtgaagaaatgaggaagcctcaggttccctaagtttgtcgcttaagtttcttccaccatttccaagttgtcagcaatgaagaagaaagttcggaagaagaggttgctagataagcaaaaggaagggcaaaagcgaatganacgtgagacattcctcangaatcattcttcaaatcaaaaaatgg

SEQ ID NO: 43686 - DNA, 475 bp, Zea mays
  unsure (1)..(475): unsure at all n locations
tgaaccctcaccaaggatggtgagatatatgcattctcataatcatagggaggcatgcgtggatgacctgtttgcaatcatgtcaaagagtggtgtgccaacacaggcagcaatgaatgtaatgtcagaattatttggaggccatcaaaactggtcgttcacggagaaagatgtccataacaagtaggtcataaaaaaactgacatcatatctttatgcgatatattgacaacagcagatttacttgttttttcttttatggtacacgaaagctgagcaagcaagggaggagagggatggggacatggataaactgttccaattnttcanggagtgcaaagaacacaatgaatacttttactgggatgtggattttgaaccaaaacaaaagtgcttcggagcattttttggtgtcatgcaagtcaacgtgcagaatacaanggattttgggatgtagtcacattttgacacacac

SEQ ID NO: 43687 - DNA, 486 bp, Zea mays
  unsure (1)..(486): unsure at all n locations
agcttaaccctgagaagtgtgtcttcagagtgcctctatgcatgctcctacgggtcatcgtctccgagcgaggcatcgacgccaacccggagaagatcgcggccatcaccagcatgggacccatcaaggacttataaggggtgcatagggtcatgggatgcctcgcggccctgagccgcttcatctcacgcctcagcgaaagagggatgcctctgtaccgcctcttaaagaaggccgaatgtttcgcttggacccctgaagccgaggaagccctctgcaacctgaagacactccttacaaaggcaccaatcttggtgccgccggcggacggagaaaccctcttggtgtacgtcgccgcgaccactcangtggttatcgccgcgatcgtggtcgaaaggcaagaggaagggcatacattgcccgttcagaggccggtctacttcatcagcgaagtgctggtcgagactaagatccgctacccacaaa

SEQ ID NO: 43688 - DNA, 431 bp, Zea mays
  unsure (1)..(431): unsure at all n locations
tctacagggagaacacgtgataggtctaactaatgttactttcgaanaagatagaccttgtgcagcttgtcaagcanggaaacaggtggaaagctctcatcatgcaaaanatgtgatgaccacatcaagacccctgaagttacttcatatggacctcttcggacccgtcgcctatctaagcatangaaggaagaagtatggtcttggtatagttgatgatttttcccgcttcacttgggtattctttttgtaggataaatctgaaacccaagggatcctcaagcgcttcctaaagagagatcaaaacgagtttgagctcaaggtgaagaagataaggagcgacaatgggtccgaattcaagaaccttcaagtggaggagtatcttgaggaggaaggaatcaagcacgagttctccgcttcctacacaccac

SEQ ID NO: 43689 - DNA, 466 bp, Zea mays
  unsure (1)..(466): unsure at all n locations
agcttgtgcatgananagccactgccattataataactgctcttgatgaggtacaatacattctattgaagttattcaatttcagatctttttgtgggagttgccatggttataatttcctttatggcctagttgttcactctttggttttgtaatggttgcttaagttgcttggttgtacaacattcgaagaagtgatgtggattatagcccagtggttcactcttatgctattgtaacattgcacagtgctttcttttatgttgataagagaaaagtaactgtcgaagtcagataattaagtacatatcctttttctaatgactatcatattatagtgttcatatgcatggttctgtagtctatgtaaagtaatatatttgttatgttgattcttctataacgcaagttcagaaatacatgtctggaaatggtatcgaaataagagagtatgaaactgttcaat

SEQ ID NO: 43690 - DNA, 408 bp, Zea mays
  unsure (1)..(408): unsure at all n locations
atactattcaactaaagtaagatgaagttgataagatgccaaagtatgataacttcctatccttcagttgttttagtattctatccttagtgggatgtaccatagtataggttaaattcattgcattataaaatgttcaataatgcatataactttgacatcaactatatgtgtgcactaatttaaaggaatttaatctatccttttggggttcaagaatgatggttcattntcatccacatataaggatcatcatttgtgaaacctttccatgtgttttaatgctctcttttctaagtgtttgaacaagggccttccaagtgctttcaagatggattcaaaatctacggatataagagtcttggttatttcaatcattgaagttcaatgggtctcatatcatgtatg

SEQ ID NO: 43691 - DNA, 394 bp, Zea mays
agcttaataatagggccaaaattagttgcactatctgactgcgggtataaaaatattgagaagtgtgtatctacctactaaaccaaataaaaatgttaaacctctctgtccactccattaaattagcttttaccccttattctataatatgcttaaggataaagaaaatagaacatgtgatttaattaatgaaccagagagtacctctatctgtgttaggatacttattcaatatagctgactggaaaaatatatcataccctgttttactataaaataagtacgatcccttttgttttaataaaacaagtgaaacttacaaaaactctacaaaaataaccccaaggtaaaaacaccctcacccttgggataactaattgtttattaacgagaa

SEQ ID NO: 43692 - DNA, 382 bp, Zea mays
gttcgagcaaagatgtagcatttgcgacctagttgacttatgtttcaaaagcttcgcaagtgaaactttactgacagcagtttgtgtaagaataaggggaaagcttacttcatataactgttccactaaggagtaaagcatccttgatcactgtgacaattccacctttgatgaagtacccgtctgtctccattgcagcttcttgaacattgtcagcattgagtatctacaagatcgagtctcatgagaaatgccgctgccatagaaaatttgtggcaggaaagtctaataatgaaagtttccttgttaatcctatgacaagcgaagaattatgaatagtcaagtgcaacaggtctatcaaacaatgccgataacagaacaa

SEQ ID NO: 43693 - DNA, 495 bp, Zea mays
  unsure (1)..(495): unsure at all n locations
agcttaatgcccncaagatattgtccttctttgttatggcaaagctcccatggttcaggataacgagggttacattttataccctgccgggtatcccgaacataaaattaggagaattcactctaagaagtctcactctggctctcatcatgcttttatgtataagagtgagacatctagttctaggcaatcaacccatgctaaatttcctaagaagaaaactcctattgcatcaaatgagcctaatatttcatttaaaacttttgatgcatcctatgtcttaactaacaaatcaagcanaatagttgtcaaatatgttgggggcaaacacaaaggctccaagacttgtgnttgggtacccaaagtgcttggttctaatgtgaaaggacccaagacctgttgtgtacctaagaacaaagcctaacactcttttatagggttatgcatccggtggctcaagttggatcatcgatagcgggtgcacanaccacatga

SEQ ID NO: 43694 - DNA, 355 bp, Zea mays
  unsure (1)..(355): unsure at all n locations
gcaacattttctaatgcccggagattaattcgagcgaggaggatgatgcccatatatgctcgtcagtgtgtttgcagacaaactactagtgctaacagtgctgcactcgcatgcacgcccctgccggctttttgctgcaggcgcagcgcanggcatgcatgttcggaggagctcacggtcacggtcagcctcccacagttaagcttcagcacaggcagcagtgcccacgagcaccggcttcctaacagcagcagccagcagcagccgcctagcatctttnttcttgcacggcacagcacagcacagcacagcacagcacagcacgcgcagtccaggacgcgggacgacgaggact

SEQ ID NO: 43695 - DNA, 438 bp, Zea mays
  unsure (1)..(438): unsure at all n locations
agctngaacccggctattccatacatgataatacaatctcgcactgngcgtggagagatggcgagagtggcacgtacccttctggcaacggatcgcctaaaaagggtggtgtactctcgggtggtgcggacctgttcatgcagtggaggatccgtgggaatagtagacatcaacgtttacgagaaacatatgtcgtgtggttagaaatcctcagctgagtaaatcgattcaaatcgccgctatatccccggagagtggagacttgagctccgacctacaacctaagtcaagatgtgaacactatggataaaaataatgttgtattgatgagatgatgaaattagactagatgcacacagagtctattaaatatttaatctggcgttaaaatattgaaagtaaagactcactctagtaagctatctctgcaaaagatct

SEQ ID NO: 43696 - DNA, 374 bp, Zea mays
tgcacacatagctcgtttgaatacctatgatcatatctcttctatatgctatgactaaggggttttcaagtcgatttcaaaccaagtcatatgtatattgaaagggaattggagtcttcggcgaagacaaaggcttccactccgtaactcatgcttcgccatcactccgagcaactctctcgtctttgggggagaaatgagcatcaaggaaaaagacttcatccttgggggagagagtaatagctcaaacgcaacaggacttcgtctttggtataatcttaactcacttctttatgaccaaaggggaagattgcacttccagggctctattgattccgtttttggcgattcatgccaaaaagggggagaaatga

SEQ ID NO: 43697 - DNA, 451 bp, Zea mays
atccttaagtgacctgcggcatgcaagcttaagactctatggtgcatagtgttacttttataaggccatattttaaatgggagttccaaggcaactctccttatacatggggatcaagatcccctattataccttcgacatctcactctacgagaccatctatgtcaagcgaatcattgagctatgtggactaactaactgtaacctagtctacactttcgtggaggagacactgaagctgagccgacaacacaacaaaggaggtgggcatgacacaatactcatgcattgtacacatcctttgctaccttgtccaataaggccagacttagcattctgtgtcacctacgttagtcgcgtcatgcataaccgatgatagagcattagcagaccatcacagaatcatcatatgctacatcacaagtacctctaactacgtcctgcactaccc

SEQ ID NO: 43698 - DNA, 414 bp, Zea mays
  unsure (1)..(414): unsure at all n locations
tgtgaaggttcttcatccccacatgtgctaagcggcgatgctctcaccagcccatgctagtcttagctattaagcatgcatctagaccggcctcttcttttgccaaatcaactaaataaagattgtcgtctaatacacccttaaaagctaatgaaccatcacttcttctaaagacagacacatctacatttgtaaatagacaattataccccatgttgcataattgactaacagatagcanattatatcccaaggactcaactaanaacacattagaaattgagtgctcatttgagattgcaatattacctaatccttttaccttgccttgattcccatcaccgaatataaatgaatcttgggaatccttattcttgacgtaagaagtgaacatcctcttcttcccncgcatat

SEQ ID NO: 43699 - DNA, 432 bp, Zea mays
  unsure (1)..(432): unsure at all n locations
gagcttgcaggagaaggagatgacatgaatctttggtctatgcctgagaggatcaattcaattcatattgactcaagctatctatctgacaataatctatatctttaagattgacccaaagttattttgagttattatatctacaactcatatgatctcgagcaagattttgatgttgtaaggaataaagaattattctatgtgggaaatcaaaagccttcaacatggaggaaagccaaaggatggtgacacttatacctttaagtgcaagtatattcaattatcatttcttttatgtcttgtgtagngacattaaaaattgaagcacttaaaatatgtcttaattatgccaccattcgttggagaagatcctctcatatggtagattgaagtttcatcatctcaacattatggcaatctacatgaattaaa

SEQ ID NO: 43700 - DNA, 196 bp, Zea mays
tgctgtctgctcccagacaaatgtatagatgctctgattatataattactgatggataaattgatgatgtagacccacaagaggatgactactttgggagcacattagattgacaataccatggcagccagggcctacatacatatagcatagcacaatcatttcaagacgggacctgatgcgcgagaccattctg

SEQ ID NO: 43701 - DNA, 401 bp, Zea mays
ctggacccaaattaagagaccctttctcttcgagaggcccgaagccagaataagaaggccaccagtccaacgccccaagaggacaacttggaccaagagatcaagaatatggagatgcttcatcagccagttcaaaggaagaaggaaaagatggctcggctagccgatctacaaaggtagatagacaaagcctctaaagaagttcgtcatcttactcaaaatgagcaaaaccgaaggcctcagcacagacagcttcatcaagaaggcttctttaacgaagatgactggtatgaggattttcatcatggaaaatttgcttttgatgacgcttcttctctgttcacagatgttacacctaactcgtgagagaatcatataaaagagaaaagtgtttcatttat

SEQ ID NO: 43702 - DNA, 417 bp, Zea mays
  unsure (1)..(417): unsure at all n locations
agcttcacaggctactggcggagctagccgttacactggctccactngaggatggctggagtgggctggccactgtggtcgaagctctggcggcaatggcgggcggaattgagctcgccggagctaaagagagggggctggccggtgaatgtgagcgcggggtgaaatgaggtgcgcctggggaggctttataagcgcgggcgggcacggccgattgcggaggcgcgcgatggacttgaccggacgccggggccagcgcgcgcgcgggttgggcgagctctggcgtgccgaccagcgtcgaacacatgtgcccgtgcgttctgctcaagttctggcgcgtgtggtcgctcatccgactctgctctcgcctttggcagtgcacaaaacctcttctccatcctacaagctaccaatctt

SEQ ID NO: 43703 - DNA, 470 bp, Zea mays
  unsure (1)..(470): unsure at all n locations
tgggaagattcttcatccaacatgggctagtcgacgatgctagagccaaccatattagtcttagccattaagcaagtatcgagttcagctctattaaaatcaactaagtatagctgaccctctaatactcccttaaatattactgaatcatcacttcttctaaagacagtaacacctatattcgntaaacgacagttgttacccattttgcataattgagaaactgaaagcaagttataatctaaagaatctataagaaaaacattggaaatagagtggtcaagagatattgcaattttaccaagtcctttgacaaaaccttgattttcatccccgaatgtgatagctctttatggatcttcatttttctcgtcagatgcataaacctacaaaacaagtttaggccttggtcttaggtacccanacggtcttgggtcctttcatgttagaaacaagcaccttgggtaccc

SEQ ID NO: 43704 - DNA, 457 bp, Zea mays
  unsure (1)..(457): unsure at all n locations
gagcgtgcaagcttattgcctttctccgaggacttcattnttcttcattgagactactacacataatagacgtgaaaacaagtattagtctcaaagacttatattatagagtaacctccccctgaaagtgtgcatacaagttttgaatacttgtaggagacttgcactttgatttttgatatcaagaggggaaaattatctataatccgatctttggcacatataagttaaatgataccaattgaagcattgaaagatatcaattgtagcgtatgtcatatgaaaataccaatttgagtatcattttcttaggaatattgaataagctatgtgtcgtgctaaactaaacatttgaaaccatgtaggtttgctcaagaatatgaattcaaagcgagcattcctaccatatgattgacctagtatgcatgcaattaanatcaaaagtaaatatcacatg

SEQ ID NO: 43705 - DNA, 462 bp, Zea mays
tgtggaggttcttcatccccacatgtgctaagcagcgatgccacaaccagcccatgcaagtcttagccattaagcatgcatctagatcggcctcttcttttgcaaaatcaaccaaataaagtttgccgtctagtacacccttaaaagctagtgaaccatcacatcttctaaatacagacacatctacatttgtaaatagacaattatatcccatattacataattgactgacagatagtaaattatattcaagagattcaactaaaaacacattagagatagagtgctcattagatattgcaatcttgcctaaccctttcaccttgccttggttcccatcaccgaatatgattgaatcttgggaatccttattcttgacgtaggaggtgaacatcttcttctttcccgcatatgggttgtgatccgctgtcgataatcacttgagcccccgatgcataaact

SEQ ID NO: 43706 - DNA, 395 bp, Zea mays
ccacatgtgctaagtggcgatgtcacagctagcccctgcaagtgttagcaattaagcatgcatctagatcggcctcttctttttgcaaaataaccaaatagagtttgtcgtctagtacacccttaaaagttagtgaaccatcacaccttctaaagacagacacatctacatttgtgaatagacaattatatcccatattacaaagttgacttacagataacacattatatgcaagtgactcaacttaaaacacattataaatagagtgctcggacgaaatagcaattttacctaaccctttcaccttgccttggttcccatcaccgaatattattgaatcttggggatccttggtcttgacataagaagagaacatcctcttctcttccgtcatg

SEQ ID NO: 43707 - DNA, 344 bp, Zea mays
  unsure (1)..(344): unsure at all n locations
ccccccaggggatgactgaacggactaanacgcgctcactggaggctatccacggcaatgtatccaccagcagcatctacatacagcttaacgctctttgaaacacaataattgcgctataacctaaactagacatatttttaaacaaacatcacatggaaaaatattccaattgtatgctacaaaacaatatatcaaaccactaaccataattaaggccgagaaacattaccgacctttactgctgatcacacaaatataactggaactgtttgagagaggacacttttcccgctgggtggcacgtgcattcactgacccggacaactgcagaatagtggcta

SEQ ID NO: 43708 - DNA, 67 bp, Zea mays
tacatctgagttagatgcttctgggttgtctaacctcaccaacaagcaggggggcatatgtttggca

SEQ ID NO: 43709 - DNA, 437 bp, Zea mays
  unsure (1)..(437): unsure at all n locations
gcttcccgtatcttcttcgataaagcacttttcttttgagatgggctaagatgagaatggaagcataaagtgaggattagctctagtttgtgatctatgtttttagagaaaaccttcttaagaaaaacaaaaagaacacacacaaggtcaccaatgataagcacaaacaaatcaaatgttctgaataaaggaagaatagaagtttttttcaaagcacggactacttggattcatggggggggctaagcataactactattgcttggctcctgaacttagaactatgctaaatgcgacttatgagcactaacgttaaagcatcacatgtgcactcaaaaaggggagaaaacatcaagcgaaattcatttngaaatgccctatggggcacacaattagagttttgctaacacgagtctaccaaatacctctcatacatg

SEQ ID NO: 43710 - DNA, 453 bp, Zea mays
  unsure (1)..(453): unsure at all n locations
acttaagcactgagcatgcacttactgtataaggtcacttttgatcttgcttcaaaaattcttaacgcttcaacacccaatggtctaccaccatatgttaaagctaaagagtgggccaatcttgaattcacatgtgagtacatggcgcttgcacatggaaaatatatgtaaatcacaaaagaagctnttcgtgacgaactttatggtttgcaacttacaagtatgaaaaccttcttgtcttttgataactatattctctaaatcattggtaaaaaatgtagacaaacgatgactcctttgaaaatagggcaaaatgaataaganattcaaaaagctcggaagacaagttataatactaacttaatattaaagtacacttttatattggtgtgtcgtcactgtcccccanctttctatagtcactctcactcttgtcgttacatcaactgtaat

SEQ ID NO: 43711 - DNA, 368 bp, Zea mays
  unsure (1)..(368): unsure at all n locations
agctntaccaaatggacgtgaaaagtgcctttctcattggactcatcaaagaagaagtctatgttgagcaaccatccggctttgaagatagtgagtaccctaaccatgtttataaactctctaacgcgctttatgggctcaagcaagccccaagagcatgtgatgaatgcctcacgcgatttcttatcactaatggattcaaagtcggaaaggtcgatcctactttatttactaaaaactcttgaaaatgacttgttcgtatgtcaaacttcatgtgatgatattatatctgggtctactaacacacctacatgtgaagaacctaataggatcatgacacatatacttcgagatgtctatgatgcggg

SEQ ID NO: 43712 - DNA, 413 bp, Zea mays
aacacattttaagactaacatattgttcattctcgagaaagacaggatatgtagagtatgtcaagcaggaaagcatgttggagtccatcatccacacatgaacattatgacgactgacagaccgctcaagctactttacatggatctattcgacctgattgcttacataagcatcgacgggagtaagtattgtctagttattgtggatgactattctcactttactcgggtgttctttctgcacgaaaaatcacaaacccaagaaatattaaagagagtcttaagacgggctcaaaatgagttcgacttgagaataacaaagattagaagcgataatgggacagagttcaagaattctcaataataagttcttcttgaggaacagggcatcaagcatgaagtctcttctccta

SEQ ID NO: 43713 - DNA, 428 bp, Zea mays
  unsure (1)..(428): unsure at all n locations
tcttaatgcggttactatcaataacaagtatcctctgcctcgtatagatgttctctttgaccagttggtcggagccaaagtgtnttccaagatagaccttcgctctggctaccatcagatcanaatacgagccagcgatatttcgaagacggcattctcaaccagatatgggctggatgaattcttggtgatgtcattctggctgacaaatgcaccagcatacttcatgtatctgatgaattctgttttcatgccagaattggacaagttcgtagtggtttcatcgatgatattctggtgtactcgaagaacgaagaagaacatgccgggcatttgcatgtagtgcttcaacgtctgcgagagcacacctttatgccaagctatccaagtgtgatttttggcttaagaatcaaatcttgggtacacta

SEQ ID NO: 43714 - DNA, 354 bp, Zea mays
gccttctatcatgcacctcaaaacttacacaatgcgcgataacttcctcggtggtcatcttagtatatctaggattaccacgaatcaattgaacttgagtgggattaagaaaaatgagagatctttaaataacatttaccacttcgtggtcgtcccacttcttgctcccgacgttgcgcacttggttaccaaagtctgagccgggtgacatgtgttgtggctctccccttttgaagccggaccgaccgactcccctctatcgttcccgcttgggacttgagagctctctcctcgtcgcggtttgagacatccaacctcttgcgtgctaaccttgacttgtatatctctctacta

SEQ ID NO: 43715 - DNA, 363 bp, Zea mays
  unsure (1)..(363): unsure at all n locations
tcttcactgcgcacaggagaaatagtaagaactggctctttcagtaactccactgaaagtgcctntattgtttcgaagaatacatccgaaggtaacggcagcccctgtgctgtatacctggcttacaaatcagcatgttcattttgccctcgagggatattcttaacagaaaatccttcgaaagaaagcttcatccttcggactgtgtctaggtatttttcaagcttccggtctttagccttgcaacttttgtcaatatgacccgaaacaatctgagaatcagtcttgaagatcgtcctcctgatccccatcgcctctagttatccaagacccacgagcanagcttcgtactcagcaatatta

SEQ ID NO: 43716 - DNA, 366 bp, Zea mays
  unsure (1)..(366): unsure at all n locations
cttcacttctagttataataaagacattgtttccgaagacgatcaaagatgtnttcgcttaaactacctagcctttgacatcttaagcaattctcttagcaaagaagattatcgcgccttcatatcaaactatgacgaatccattcatgatgcacacgatatttggactataattagaagcaaatttgatgagtccaaacatgatagttcattttgtgtctctggcttcctttggaattgtgatactaacccttgcaaggaagaagaagagaatgaacgatggagaccaaacaatgaatccacctctccaaaagggttgtcttcccatttcgattcccacatgtcgtgtgtggctaatgaaaatga

SEQ ID NO: 43717 - DNA, 330 bp, Zea mays
  unsure (1)..(330): unsure at all n locations
ctgcagcatgcaagctattataagagaatagcggcaagagcgcgttcatatgtataatagaaggggagttatacaagcatggagtctgctctccattactcaaatggttatccagaactgaaggtatagagctgatgaaagaaatacatgcangcctatgtggatctcacatcggatctaggcctttgttgggtaaagtttttcgtcaaggattttattggtcgaaagcagcttttgatgcagcaaaattattctaaaaatgcgaaggttgtcaaaaatgtgcaagagatcaaaaacaaccttcgtctctaactcaattaatacagccca

SEQ ID NO: 43718 - DNA, 274 bp, Zea mays
gccagtaacacagcttaggactctatgttagcctaatgaaaaggaaggagtttcgacaagcaagttcagccaacttaccgatcattatcctttgctttactcaagaaatatcaactggatgacctttcctcatatccttattaccaaggagaataaaggcctcatatcttgtttaacataatgcccagggagaagtatttaacccaacaaaagacacacccccatttaaatcaaattaatgattcattggtaaaattcatattattatctgatc

SEQ ID NO: 43719 - DNA, 406 bp, Zea mays
tacaagaacttcagcgacgaaacataatcccaacagtagcccctctcgcggtgctagaacgattttcgtaacgaacttgatccgcgaaaaaagtctcctaaactttacgaagccgaaagtccaaaaacaccttccctgagctcgttgtcgagaaacgatacaattctccagcgcatagcggtcccaccttgaaaagttactgtttggtctctgtggtccaccgcgcagcgagagcaagcggctgtccgcctggtgaaaaatcctggcgcttctcttccacctgcgtactatataacagacagtagtgtgaagtaccacacatcattgtattgactgtttgctgcaaaattttaacctaccgagctgacttcggatcaacaactccactgaacttgttgctgaaaaa

SEQ ID NO: 43720 - DNA, 243 bp, Zea mays
cattagctggtgagtcactcttaaatcataagaagctgccctcaaagaccttaaagcatgaatcatactttttaaaacatgaacctatttagtaaaaacagtgtgccatttactattggaacataatcagttgtatctataatcccataaacatggaatgaaggcatggaaatacatttacccaacttgacaccctgattcatccaagtgaaccgtgggaattcttttataagaaaatccttt

SEQ ID NO: 43721 - DNA, 362 bp, Zea mays
gacactattttggtcgcacatttcctcggaactctaccgtgcgacactggcgttttcgcgacatgacaactccctgcccatatcacataaccgcacaacgtctacacacaaatgacagagctcagtcaggggaacaaatgctacacggtgatcttgcctacattcgcaaagatctgcgcctatcagcgtcagaacacgacataatataccatgccacgtgctcaaccgcggatgaatgcccaatacatgccagcccacgcatactgattgagccgtgcatgcccgcacgcccgctcttggccatgcagctcatgcactcactccggacctttaaatggcaccccggacgcacaacaatttac

SEQ ID NO: 43722 - DNA, 266 bp, Zea mays
gccaccgccttcaacaaaacatctctctttcccaacgagcgtcatacttgccttatggtcagggagaagaaagtagtactctagataccacttatgcttcctctagtgatgatgaatctagtgatgaacatgaaattgattattcatgcttgcttaaaggtctacatagaaccaacgtacacaaaattaatgaattaattgatgccttgaatgatacgaacatacttgtagaatagcaagatgatctgttgtatgaataacatgat

SEQ ID NO: 43723 - DNA, 352 bp, Zea mays
  unsure (1)..(352): unsure at all n locations
agctcctcaccatgtagatggtagccatattgtttgttctacctccatcgaagatcactcgacatgaacactctctgatgacacactttgtttggaacaaagtgtgccgctgattttgctccgctgtcttcatttgtgcgctcagcacacgctgcacaaataagctctcatagcgagcggctttagcagcattaatatgttcttccgagcagccctcactgcctgcatggtcaggcgcaatcaatgcatcgatattcttctntagttcactagaagatgagtactcaccatgagctttgaccaccacaacacgcttgcttgggcagtcacacatgacatgtccaaatccctt

SEQ ID NO: 43724 - DNA, 392 bp, Zea mays
  unsure (1)..(392): unsure at all n locations
taagttatctcgatgaataagtgcacagttatagcaacatagttatattgcaattgcctcacgaataatccttaagcttgaatctaaattaagtaggcgcattatagcaacaaagttagaactgacatttcccgtatggatttgatatacacactaatggtcagctcaataataaaagatattaccntttgttttcaaagaaagtagatcactaattactccaccatggacaccanatatgagtctaatgcaatgatgatttatctttcgagagatgaatgtattgtggtcgcatacgcaatatgggcgcttgcttttgacctatcagatgacacgatcctatgcatggtatttacaacttggaactagccaacactgaatacgttctcacg

SEQ ID NO: 43725 - DNA, 260 bp, Zea mays
  unsure (1)..(260): unsure at all n locations
aaactaaacctacaaactggttaatgcactactatattttatttcttgaacaccaactcaacctttatcaaaaagatcaatctantactatattattatatatattatacacacaaggcagttcttaaaaaacaaagtgtactaattgtaaaacttttttttcatatgatatcgacaaaacgctcgctgttgatttttattagaatgaactaaaaaatcaagcttgatcttaggtttttctatatgacatataatgtact

SEQ ID NO: 43726 - DNA, 225 bp, Zea mays
gcatgcacttatactcgtgcttgtagaagccgatattgcatcttggagagcatactcgaggtgctcgcctccacgtgcagtgaagagaattcctgcccctgctccctgcaacttcagcgagccatcaaaaacattcgccatacttctgccgtttctggattatccggcacttgctgttctgtccactctgatacgaaatcaacacatgcttgagttttgatggct

SEQ ID NO: 43727 - DNA, 69 bp, Zea mays
  unsure (1)..(69): unsure at all n locations
gaccaanccgcgcccacagcgaaggaaaatttatttcgaaacctgtatattgacactccacaaactgca

SEQ ID NO: 43728 - DNA, 187 bp, Zea mays
acttaagcaccgagctgcactggtgccaggaaacaaatcttgaattttgctgtcaactgctgccggttcaactgttagctctgacgagtctccgaagcggcagacaatgttctggcagaagaatatttgggcagtctttgatgtgatagtggaaacagccctcgcttaattcatttggtgaagtatt

SEQ ID NO: 43729 - DNA, 209 bp, Zea mays
ctcattaaaatgaatgctttatttgtcctgccgcgctcctctgtctgctgaaccggacttgtgacccggagaaagtggggagaagtttcaaaagcctcacacctgctccgaagaacttctaggggattaaatacattgttcgcatgctgtcagacaacacgtatcagcctagcaactcgtcacaacacaacattatgctatcgagctga

SEQ ID NO: 43730 - DNA, 361 bp, Zea mays
cgcttgagaacgttcttcatccgcacatgtgctaatttgcgatgccacagccagcccatgctagtcttagcaattaagcatgcatctagaccggtcttctctttgcaaaatcaactaaataaaggttgtcgtctaatacacccttaatagttaatgaaccatcacttctttctaagacagacacatttatattttgaaatagacaattatattccatattacataattgactaacagatagtaaattatatccaacagactcaactaaaaacacattagagatagagtgctcatttgatattgcaatcttgcctaaacctttcaccttgccttggttcccatcactgaatatgattgaatc

SEQ ID NO: 43731 - DNA, 442 bp, Zea mays
gagagcacatcttatgattaacatatgttcttttttataaagacaggaattgtagcgcatgccaagcaaggaagcaagttggtgttcatcatccacataagaacatcatgacgactgacaggccgctcgagcttctacacatggacctatttgcccgaagcttacataacatcggcagagtagtactcgctagtgtttggggatgattattctcgcttcacttgggtattctttttgcaggaaaaatctcatacccaagaaaccttataaggattcttgagacgggctcagaacgaattcggcttatagatcataaatatcagaaacgacactggacggagttcaaaactttaaattgaagcttcctgagaggaggcataatctgagtcactttcctaccccacaaataatggtgtatgagagaagatagactctttgacat

SEQ ID NO: 43732 - DNA, 322 bp, Zea mays
  unsure (1)..(322): unsure at all n locations
tacgtctgaaggcgcaagcaccaacagtgcccaatgaaattgtcattgaagccatgatcaaggggcttcngccatgacgtgcagctcagtacatagccaggaagcctcctcaaacactggagaagctgctccagaagatggacgagtacattcgagctgacaattattttcgccaaagaaaggaggatgctctcangttctctgaaatgactatgggcttcggaggaagaatttatccaatgcacgtcaggtcaattcacaattctactcaaaatgacgacaaagcgagtcaacagcaaaggccacagtgctcctcgcaagc

SEQ ID NO: 43733 - DNA, 265 bp, Zea mays
tgctagaccggtgagacgttcctggtgaagtaaaggaagatatctaacttgtcaagtgacttacgaacatctaccaggtgtctgctgtccgttggacaaagacaactgtaggtgggcctaattacttgggaggttccgtcacagctggtatcggaacgcaacccttctttgcagatattatgaggcatcttcaaacgattttcagaagtcttacctacaaattctttctcttcttacctaagtattctgaagaggctattttaaa

SEQ ID NO: 43734 - DNA, 359 bp, Zea mays
  unsure (1)..(359): unsure at all n locations
cacatgtgctatnttgttatgccacaaccagcccatgcaagtgttagccattaagcatgcatctaaaccggcctcttcttttgcagaatcaactaaataaagcttgcggcctagtcaccctctaaagctagtgaatcatcacatctcttaaagacagacacatctacatatgtaaatagacaagtatatctcatattacataaatgactaacagatagtaaattatatccaagagactcaactaacagcacattagagacagaaagctgcatagatattgcaatcttgcctaaaaccttcaccctgccttggttcccatcaccgaacatgattgaatcttgagaatccttattcttgac

SEQ ID NO: 43735 - DNA, 270 bp, Zea mays
cattaagaagaaactgacaccccctcgctggggaccctagaaaatgaccccaacggcttgtgctatgcggtatcccaacgggattgcgccatttaattcactctattatcaatacaaaggactttggtaatagtaacgagtcccgtaggctgctatccaacaatggcccacaggccagggaataactactttgggggaagacaccgatttgctttgagccacacacagatttccagactggagtcccaggtctctatatttgacccccaa

SEQ ID NO: 43736 - DNA, 302 bp, Zea mays
  unsure (1)..(302): unsure at all n locations
acaagtgggaggagcacatcacaacaagaatgtgatgaccacctcaagacctctggagctgctgcatatggacctcttcggacccgtcgcttatctaaccataagcggaagtaagtatggtctagtcattatggatgatctttcccgcttcacttgggtattctctttacaggataagtctgagacccaaagaaccgctcaacgcttgctatagagagctcanaatgagtttgagctcaatgtgaagaacataaagagcgacaatgggtccgagtcaacaaccttcaagggaggaatacctg

SEQ ID NO: 43737 - DNA, 448 bp, Zea mays
  unsure (1)..(448): unsure at all n locations
catgttaacatcaatgacactgagactactttatattgttttatncggacccacacattatgtcagtgccggtggccacctctactgtctagagactgtcgatgacttctcaacatacacttcgtgtgttctttcctccatgacacantctgaatctgcatctatactcaagaagtttgctcacaaagcacaaactgaatctgattgtcacattaataagactagaagtgacaatggctaagacttgaccacaccaacatccatggtactgtgatgaaattgcgatcaaccatgaagtatctgccacatatacacctcaacaaaatggagttgttgataggaaaaatacgaccttgtcacccttgtcagaacatgattgatgagtatacacaccggagaggtttgggccgaagctgtcacactgcttgttatgcatcatacaagctat

SEQ ID NO: 43738 - DNA, 293 bp, Zea mays
cacttaccctacaacaaaccgcctttacgtgttttccaccgcggaaccagaacccttacgcctcgacggaccgtgaccaaataaggaagagatgagctgcaccctaaaacatcgccagaccgaaacccagaaagcccgacacatcgttagggagaatgccctaaccacttgcctataaacttattccctccgcatacacacttatcctaaagatgactatatcagtatccatgccctgctaccacttgggcggaaattatagctacgttatgctatgtcactataccaatgac

SEQ ID NO: 43739 - DNA, 79 bp, Zea mays
gtgaccctcccccagcgctgttgactcaccgaccaacacgcgctcacgcaacgctaggaactttcgttccaatctcgct

SEQ ID NO: 43740 - DNA, 414 bp, Zea mays
  unsure (1)..(414): unsure at all n locations
tctcgaagatgtatgtctttatatagtccaagtctcctaaagctattacttnttgtgaaaccgcattgtaaaagtaacacaagcgtgtgatgacaactttgacatgctctatttcgagggctcttaccacaattgggaggaacaccgtcatcatcacatggcagtcatgagagttgtagccaaatagagacaaagtcttcatcctgactagtttgctgatattggatgagaaacctgtgggcactttgaccccacgcaaacatttgcaaatctttgttctctcctcaactgacaagttgtagctagctggggggagagaaggctttcctttgcactatccactggatgaagtttccggctgatttgaagatctactagatcattgcgtgaattaagtccgtcctttgtctattc

SEQ ID NO: 43741 - DNA, 185 bp, Zea mays
ccccccccccccgggcataacttaactgaaccaccaacaccgacacaagggagaataattttggtccacgccatcgaagcaccagaacacggaagcaaccacactgcgggacggcaacggaaaagggccctgtacggcaacccaagacaaccgccggcagagcaaaaacaccaccaccctgacgg

SEQ ID NO: 43742 - DNA, 313 bp, Zea mays
attgatctatagtatacatcctttaagacctttaacatgttcatatgctttattgcttggtttgtgctcagttgtaaaagtttcctggactcacaatcttgtgcatgatgcatatttgacggaagattactgcactgacccttgaactaatgggtgtataatgatttgagtatctcaacgagatagaaaggaaggtgtgttgacaaagaaaagctcatgctaatgagcaaaatcaataagtgattaaagcaaaatcacttggtaagtcaaacatgagtactattgaaactgcctacatatatagttctgactt

SEQ ID NO: 43743 - DNA, 303 bp, Zea mays
catgatactatatttttcataccagtttccccctttctcttgaatcttgcttatagggctcaattatgggatctattggggttgcaacactttgcccttttgaaaacccacttgttttgaacatgatacttttaagtataagcttattagatcctctcatcttaagtcaataggatgctcatgctcaatctgtgttacatataatgatggttctcgagttatcacttgagagaacacctatgagacactgggtgtcatatttcaaggagcttaccatgctgtgcgtgatcgaccgtggcttgc

SEQ ID NO: 43744 - DNA, 426 bp, Zea mays
  unsure (1)..(426): unsure at all n locations
acatgaaggtgacaagccaatatcactgttctgactactggataattgggtctgatatcaaatagcagaaaactatatgcgactctggactcacatgctttgccattccaaagncagcccactgtactacaccagtaatatcaactaacaaatttgcccctttgatattcctgcaagagcagaactatatttacatacatttatacattttcagcataatgcaacaacttataatatggggaaaaacaacaagagcatagttcaaaagaagacaggatagtgtactgcctacatggaaataaaaaatgcaacatgctattaatctcttaagtaaaaattaaatttaaatattatgtaagctaagatactattggttagaaatttcataacacagaaatagtacctatgcataatctttggctatgt

SEQ ID NO: 43745 - DNA, 309 bp, Zea mays
  unsure (1)..(309): unsure at all n locations
gctatcaancccacatcgactatgtctttaagattggcgcaaacatgaatcgagtcagcttatcactcacttcatattcatctctagtgacaactcgtgtccgaaggaataaggattaacctttgtgggaatcaagcaaaaagcccacaactaagtgatatcctaaggatggagtgttgcgttcaacattacaataagaacaaatccatactgatgatgtattccttcttggttatattgagtgtgcgtcttctacattaatcacttaccatgctatgaattaaacttactatgtaaactctattaaat

SEQ ID NO: 43746 - DNA, 244 bp, Zea mays
agccttcgtagaaacatgctacaatgctatacttcttttaatcaatattgctgctccttgtgatttggcatgattttgcccctctttcatagcgttcttccgaagattgatatcatatttcgttcttatgcgacatgcagtatgatgtatgatgcttatgttttgcacagatgatgtgatgatgctatgctatgtaaggtgatattcccaaggtacacgcatatctgtgcgataaaacacatgc

SEQ ID NO: 43747 - DNA, 133 bp, Zea mays
tggcgcccacaccaactgtccacctgtcgtgacgacgctcaacgggggctcttttgaatcggggcagggcctgtagacggccgggggggcgctccaaagaagccgcgacttttgtcccccatgtgagaaacgg

SEQ ID NO: 43748 - DNA, 181 bp, Zea mays
atagcttcggctgagggtaattattctgctaggataacagtgcatatatttatggtcgctgtggtaactctacacctactcgactgtttatatagtgctgcacgtaagaaggcgaagcgccatagtttttacaccaggcgcacacccgcttgcgcttgctgcgcggtggaccgcaaggaca

SEQ ID NO: 43749 - DNA, 434 bp, Zea mays
  unsure (1)..(434): unsure at all n locations
taagcttctacgggagaacacgtgataggtctaaccaatgtacatttcgtaaaagatagaccttgtgcagcttgtcaagcaggtaaacagaggggaggagctcatcacagcaagaatgtgatgaccacttcaagacctatggagctgatgcatatggacctcttcggacccgtcgcctatctgagcataggaggaagtaagtatggtctagttattgttgatgactnttaccgcttcacttgggtgttctttatgcaggataagtctgaaacccaagggaccctcaagcgcttcctcaggagagctcaaaatgagtttgagctcaaggtgaagaagataaggagcgacaacgggtccgaattcaagaaccttcaagtggaggagtttcttgaggaggaagggatcaagcacgagttctccgctccctacacacc

SEQ ID NO: 43750 - DNA, 440 bp, Zea mays
  unsure (1)..(440): unsure at all n locations
ctctcggtattgtcaaagaacgagctgtccgatagcttancgtacaatagtatacagtgcaaaaatgagatctttaaatgatttcttgaaaccaaaaattttcatttgcttaaacttattaacgcattctttcaaggccttatacttagcaatgccctcacggcacaaaaagatgccgaacaccaacggtgtaccatagccttgagcaaccttcgttccgaagtaattgaactaaggaacgaacgtctcgaagaagataaaatattacattctttggtgaataaaataaaagaagacgaaggtgctttcaaagctcaagttgaggctcagaagcgcgaaattgatgatcttcggaaacaactagccagagctaaggaagaatgcacagttgaagaaacaaaacgagaaattagtgaacaatgggcaaatcatttggaaaa

SEQ ID NO: 43751 - DNA, 430 bp, Zea mays
  unsure (1)..(430): unsure at all n locations
cagcttctaagggagaacacgtgatanggttgactaacgttcaattcttaatagatagaccttgtgcagcttgtcatgcaggtaaacaggtgggatgagcgcatcacagcaagaatgtgatgaccacatcaagacccctggagctgctacatatggacctcttcggacccgtcgcctatttaagcataggaggaagtaagtatggttcagttattgttgatgacttttcccgcttcacttgggtgttctttctgcaggataagtctgaaacccaagggaccctcaagcgcttcctcaggagagctcanaatgagtctgagcttaaggtgaagaagataaggagcgacaacgggtccgagttcaagaaccttcaagtagaggagttccttgaggaggaacggatcagcacgagttctccgctctctactca

SEQ ID NO: 43752 - DNA, 385 bp, Zea mays
  unsure (1)..(385): unsure at all n locations
tcggaacactacgacttcgttntcttcaggagtcgggcaagttttctctccttcgtcgatcctcacaatggataaatcccagaagtatcttcccctcatgttgacaagatgattgtctttgatacctgatttcccaaaaactgaatggcttggtcgccaggggcgatcttcggagtcttcaccaccactatccacatcataactgtcgctgtcatcagtatcttcagacaaaccttctaaaatctctttcgtaattntttctgtgttggtcttcgacattgctatcaggaaccccaggttcttctcttcatcaagactcagcttcatctcggcagcagccttcttatcttcagacatcttcggaagcactaaaaaactggtttca

SEQ ID NO: 43753 - DNA, 409 bp, Zea mays
  unsure (1)..(409): unsure at all n locations
attattcaactaaagtaagatgaagttgatattaggccaaggtatgaaaacttcctctccttcagntgttttagtattctatccttagcgggatgtaccatagtataggttaatttccttgcaatataaaatgttcaatagtgcatataactttgagatcaactatatgtgtgcactaatttaaaggaatttaatctatccttttgggtttcaagaatgatgattcattctccatccacatataaggattatcatttgtgaaaccctcccttgtgtttctaatgctctcttttctaagtgtttaaataagggccttccaagtgatttcaagatggattcaaaatccacggatataagagtcttggttgtttcaatcattgagtttcaatgggtctcatatcaagtttga

SEQ ID NO: 43754 - DNA, 391 bp, Zea mays
  unsure (1)..(391): unsure at all n locations
tgctggtcaccagctatcaagggtttcatacgattccattcactgctcaggccttgttccaatgcactcaagaccatgaggagtaccttcangcatatgtccgaaagttcttgcacctgagagcacaagcgcctatggtgcccaatgaaatcgtcattgaggccatgaacaagggtcttcgaccagtgcctacngctcaatacttcgccaggaagccctcccacactctggaaaagctgcttcagaaaatggatgagtacatccgggccgacaatgacttccgtcatagaagggaggaagcttacagattgtctgagatgactaggggcttcggaggaagaatccaccctatgcatgtcagatcaatccacagcttcagtcaaaatgatga

SEQ ID NO: 43755 - DNA, 246 bp, Zea mays
tgatgagagccatctcttcatcactaagaccggcagccccgaaacgtgccaccctgctgggttacgactccttgctccttggtgcctctagagcaatggatagaggctcatgaagaggccggtcaataccgtcgagacatatcttgcctgcatgattatcattcggcactcacgaattgccaagaacctcctcaggcgcttcttcgtgtacctgagatactcacgaatgttgttcacgagatgagg

SEQ ID NO: 43756 - DNA, 321 bp, Zea mays
gtgaaagtgccttcctcatggtcctatcattgaagacgtttatgttgagcaaccgtccggctttgaagacagtgagtatcctaaccatgtttataggctctctaaggcgctttatgggcgtaagcaagccccacgagcatggtatgaatgccttatagaatctcttattgctaatggtttcaaagtcggcaagggcgatcctacactctttactataactcttgaaaatgacttgtctgtatgccaaacttatgttgatgatattatatttgggtgtactaacgagtctacatgtgaagaagtgtagaggatcatgacaca

SEQ ID NO: 43757 - DNA, 372 bp, Zea mays
  unsure (1)..(372): unsure at all n locations
cagctttatatattatctagaagccttgggaaaagtcggtatgttttaaaccttgngagacatccagaacccagaaccctagtgccctgccctatgaacttcactatatactccaaaaaccttagtttcccagagactcgtgaaggaaagttatattcaagatattagataatatacttttattatctttgcattttcatgagcattacatgagcattcatgatnttatatgactatatatagaaaacgaggaagagatataagttgaagaatcaaggactacaccaccacctgaagaaccttatgcaagaaactgctttatttntatatctgtagagcacagcctgattcacctatacacaacgctagcct

SEQ ID NO: 43758 - DNA, 319 bp, Zea mays
  unsure (1)..(319): unsure at all n locations
aagacttggcagttgtcagcagtaacagtggaggagccatacacaagaacggatgaccattaagaccctaagctgctacatatggaccttntggacccgcgctattgacatagagggagtaagatggttactattgtgagactttcccgttacttgggattttttgcggaaagctgaaacccaagaacctagccttctcagagactaaagagttgactcaaggaaagatagacgaacgggccagtaaaaccttagggagagtctgagagaggacaagctgatctcgtcctcccccacaatgggggaaagaaacagacta

SEQ ID NO: 43759 - DNA, 395 bp, Zea mays
tagcggatgatccgaagcttatcggatgatgatgaagccgaagacattgctgtgaaaaaactctagagaaacttttgaattatccatgtaaagaatattgtaatttaagaatcagatactactctataaatttgtccataccttgtaatatatttttacctttctgtccatgtatgaactgctttgatgtggacgaaacttgtattttttgagccgaaggcgataaacaccttcccttcttttcgtacacagcgaagcataaatctgcttcctttccttttgccgaagcgttatccttataaccgaagcaattgtctgtatctgtatgatatgatgatgatgatcctatgtatgtctaaatgaatgtatatgaatgcaatgaatgatgtgatgta

SEQ ID NO: 43760 - DNA, 326 bp, Zea mays
cgcacggcggattcatggtgtcgctgcgcgactgcgagaaattccccgccaccaggttggccatcgactccggcaccgcatcgaacacgacccgaggtaaccgacgaagctcccagacccgttgtcgagtctctaccgacggcgacccgtgattcattcgcggcggatctcgttttcccaatggtggcgaaccaatagccctggcggagccgtcaacccgagttaagttgaacgggggcacgacgctcgacatttatatcacgaggggaaggagtccgcgcacgttgaggccgagattcccggcgagtttggcggtgctcagttgc

SEQ ID NO: 43761 - DNA, 426 bp, Zea mays
  unsure (1)..(426): unsure at all n locations
cgatacagagccgaaggtgttgagcaggatagcttcggcgtatcatcaaggagtggaaccgacttaaagatgaaaaggctattcagacctcgatagactactatagagttattatcaaatgtaaagggcatgaatgtaattttgtaagggctgcgtcccgtgtctataaataggtgaacagtatccncgtactgttcacgctgacttggcattcgctttttgcgtcacgcttgtactgtcatttccttccgattaaaggtacacttgtagttcaatgatattcttgtttatgctcaataataataaatgattgttcatattttcttttacattctttatatttcatccttcgtcattggttgaatttatgaaggtatgaccttcataaccttcgtcccgaagtcattatatcctaagggaaataat

SEQ ID NO: 43762 - DNA, 490 bp, Zea mays
  unsure (1)..(490): unsure at all n locations
tgaagccatggtaagtagcataggctaataatatacgaactgactcaagcctagctacgggtgcataggtttcaccaaaatccaaaccttcgacttgtgagtatcctttggccacaagtcgagctntgttccttgtcaccacaccatgctcgtcttgtttgttgcggaagaccaatttggttcctacaacattttgattaggacatggaactaaatgccatacctcattcctagtgaagttgttgagctcctcttgcatcgccaccacccaatccgaatcttgtagtgcttcctctaccctgtgtggctcaatagaggaaacaaaagagtaatgctcacaaaaatgtgcaacacgagatctcgtggttacccccttatgaatgtcgccgaggatggtgtcgacggggtgatctcgttggattgctcggtggactctngngtgtggcggcctttgtcttcatcctctttgcttgatcattgcatctcccct

SEQ ID NO: 43763 - DNA, 489 bp, Zea mays
  unsure (1)..(489): unsure at all n locations
cntgatgattaaagtcatctcctcattgtcgaacttggaggcatcgatgggtagcctacttgaagtagactcttccttcttctcgtccgtcgctttgaaggcgacgggttgcacctcggatgtagaggtggcgccttgctcgatgattttcttggagcctttgatcattaattcaaagctcacagattgtcctatcacttcctcgggagacattagtttatatcttggatcaccacgaattaattgaacttgagtagggttaaggaaaacgagtgatctaagaataaccttgaccatttcatggtcatcccatttggtgctcccgaggttgcgcacttgattcaccaatgtcttgagccgatggtacattgcttgtggctctttcccttagtgaagcatgaagcgaccgagctccccctcgatcgtntcccttttggtgatacttggcacctcgtctccttcgtgtgcggtcttgagcacgtcccaaat

SEQ ID NO: 43764 - DNA, 276 bp, Zea mays
ttttagagcgtgccaatgggaaaatcttcacagatgtcaagaagatgctcctcgatgacaaaaaaggccgatggaccgatttattaccggaggcagtctgtgcgctcaacacaactgaatgcatggcgaccgggttcactccttttcgccttctataccgatcggaggcaatgaccccgcaagaaataaagcatgggtacccgcgtacaggtccttcagctgttcccgacgtggacaaagcaacttcaaaagatctcatcgacagagaccgggtct

SEQ ID NO: 43765 - DNA, 405 bp, Zea mays
  unsure (1)..(405): unsure at all n locations
ctcctcgtcttgactacgatgtcatcgacgtaggcctgaccgtgcggccaatgtgttcgccgaacacatggttcatgcaccgctggtacgtcgcgcccgcattcctcaagccgaacgacatggtgacatagcagtacatgccgaagggtgtgatgaaagaagtcgcgagctggtcggactctctcatcctgatttgatgataccctgagtangtatcgaggaaagacagggtttcgcacccagcagtggaatccacgattngatcgatgcgaggcagagggtagggaaccttctgacatgctttgttgagaccagtgtagtctacacacatccgccatttcccccctttctttctcacaagcacagggttggcaagccattctggatggaatacctctttgatga

SEQ ID NO: 43766 - DNA, 412 bp, Zea mays
  unsure (1)..(412): unsure at all n locations
tgaagccatggtgagtagcatatgcatgtaacatactaattgactcaagcctagctaccggtgcataggtgtcaccgaaatccataccttcgacttgtgaataacccttggccacaagtcgggctttgttccttgtcaccacaccatgctcatcttgtttgttgcggaagacccacttggttcctacaacattttgggtaagacgtggaactaaatgccatacctcatttctcgtgaagntgttgagctcctcttgcatcgccaacacccaatccgaantccttaatgcatcttctaccctgtatggttcaacagaagacacacaggagtagtgttcacaacaatgagcaattcgagatcaagagttaccccctttngaatatcaccgaggatggagttaaccgggtgatct

SEQ ID NO: 43767 - DNA, 281 bp, Zea mays
aggagctggcctccgcggcctaagctctggcggcaatggcggtcggaaatgagctccccggagctaatgaacgtgggctgctccgtgagggtgagtgctgtgcgaactggggcgcgcctgaggaggctttatatgcaccgcgcggtgcacgggcggtcttggaccggcgagtgcgctcgggcgtgcactgcgaaggcgcggtgcgcgaacgggcgtgaacacaaggtgtcagccgcggtcgaacacatgttcacgatgcctttgcccctgttcaagcgccg

SEQ ID NO: 43768 - DNA, 395 bp, Zea mays
  unsure (1)..(395): unsure at all n locations
tgtggtacttggcagcattactaatccagagatattgcttcatttcaaaacttgatgcaagaatcacatcagcttctccaatgccatctgctacatctagttcatcatcaaatcccatcactgttgctacttgtaaaataccagcttctgaaatctggcagcacgaaatataaatgacatggtctgtttttgaaatattacaaacaagtgtactcttacttcagcttttatttataatagattcatagataaaaaaatgaaaccgcaactttcggttgcataccgcttgccagtggaaatggactcagcaaactatagaatatttaaatttaaattagtacataagaccataanaactgtcaaatccatgaccccagatacaaacaagatagtat

SEQ ID NO: 43769 - DNA, 484 bp, Zea mays
  unsure (1)..(484): unsure at all n locations
tctcacgaatttctttgatgtcattgtgagaggtctcgagctcctcaaaagacacttggagggttgtatacaaatccttcaagggcttaaatttttctttttctttgtgcatgtagtcatcggcctcacctaacattctaacaagatcatcatatgaatagccatcatcatcaacatcatcgatatcatcatcatcatgtatatcatttaaatcggtgatgatatttaccttggcatctccctttgccatgaggcaatggggggatgagaagagtgagggagcttccttgatggcaattccggcattaagcttggatgaggtgtcatcatcatcatcatccgagctatcatccgagtgccaggcaactaagtaggctttgccatcattcctcttgtataagacttcttctcttcttggactgtcatcnttcccttcttcttcttgcttggacaatcatggcaatgagaccgggttcccacactc

SEQ ID NO: 43770 - DNA, 426 bp, Zea mays
  unsure (1)..(426): unsure at all n locations
tgacataacatatgtgtcatgtntntatacgttactttctttagtatatggcgatgtagtattgggttgcgtgaatatccaaaatgtttgtattggttaagtaaagtaagcatcatcatctttccagtggtagtaactacgtatgcccgacgacgtatagataagtaaagcgaacatgtggttgttacggcggcttccattttattgtttagatcgccactgagtccttgtatgtcttgtgctacttttgtgctactttcattatattcatacatatgcaccttgcatctcatttatgaccgagagatgatgatcgtgcaagagatgtggggccacccacaagatgtactcgatggacgacccaacgaagaatggacgtaaccagtggatgctcgccaagcgagtgccttcctcagcatacactat

SEQ ID NO: 43771 - DNA, 418 bp, Zea mays
aagcttaacgtctactccaggaaaattgctaggcttcgaaagtgcattttgttaccgaaacaaaactgactgaagccgaagctacaatgagccaggccagcgccgaagctaggccttcagagcccgccaaggagaaatcctcggaaattggagataaggcagcggaagaagaagctataaaacagattttgcctgaaaaagatgtcgcttctactcctgaagcgccttctgaagtccttgattatattattcgacacgcttcgggaaaaagattatctgaagaagaaatttttgaagctaaacactatgcccgagaactgaagtacccgaaaggagccttagtgtttaatggcacagatgaagatgacttcttgtattgcctcctagacaacaaagaattattcgtctggcgggaaat

SEQ ID NO: 43772 - DNA, 453 bp, Zea mays
  unsure (1)..(453): unsure at all n locations
actaaccaatgttcattttgagaaagacaggatttgtatcgcatgccaagccgggaagcaagttggcactcatcattcgcacaagaacatcatgactagtgacaggccactggagctcctacatatggacctatacggcccgatcgcttacataagcatcggcgggagtaagtactgtctagttattgtggatgattattctcgcttcacttggggattctttctgcaggaaaaatctcaaacccaagagaccttataaggattcttgagacgggctcacaatgagttcggcttaaggatcaataaaattagaagcgacaatgggacggagttcaagaactctcaaattgaaggcttccttgaggaggatggcatcaagcatgagttctcctctctctatacgccacaacanaatggtgtggtggagaggaagaatcgaactctattggacat

SEQ ID NO: 43773 - DNA, 397 bp, Zea mays
  unsure (1)..(397): unsure at all n locations
agaacatgctatgcagcgaaacttgatctcagctgcacaaataatattgctgaatacgaagctctactcttggggcttcggaagttgaaagcaatggggataagaatggcggttctcanaactgattcccaagttatttccgatcatgttgacaagaagtgtaaagcaagagatccgaagcttgataaatatgtggatacagttcgaaggcctgaagcttcttttgaggggtctctgtcaagaatatctccgaggagaaaatgagcacgctgatctgctagccaagtcagcggcacaggggctacctttgccttcggaagtatttcttgagacaattaaagcaccttcggtggaacttcttgagagagcagngctcaatatatctcctggtcatagt

SEQ ID NO: 43774 - DNA, 373 bp, Zea mays
  unsure (1)..(373): unsure at all n locations
actcagcttctaagggagagcacattntatgattaacaaatgttcattttgagaaagacaggatttgtagcgcatgccaggtatggaagcaagttggtgctcatcatccacataagaacatcatgatgactgacaggccactggaactcctacacatggacctattcggctcgatagcttacataagcatcggcgggagtaagtactgtctagatattgtggatgattattctcgcttcacttgagtgttctttttgcaggaaaaatctcatacccaagagactttatagggattcttgagacgggctcaaaatgagttcggcttgaggatcaaaaagattataagcgacaacgggacggagttcaagaactc

SEQ ID NO: 43775 - DNA, 400 bp, Zea mays
  unsure (1)..(400): unsure at all n locations
cacttgngctccatcttgtccttggactccgtccgagctgttcggatgagtacgaggtccccctcgctgaactccctcgggatgactgcgcggtcgcgccatgctttggtctgggcctgatatttgtttagggcctgcagggcgaagacccggtctccgtcaatgagatcttttgaggttggctcatccacatcggggacggctgacggaactgtacgcggngacccatgctttatttcttgcggggtcattgcctccgatccgtatagaaggcggaaaggagtaaacccggtcgccctgcactcggttgtgtttagcgcccagactgcctctggtaataaatcggtccatctgccttttctttcatcgaggagcatctttttgacagctgtgaatattt

SEQ ID NO: 43776 - DNA, 383 bp, Zea mays
tgagcaccagaacaaactcttgtggcgatgctttttcatgcaagaaaaagcaaacactcgatcaaaactccaccaaagaaacaaacacgaaacaagcgggatggcaaaactgagcagatcggaccgggcaggacgcacctgggtgtcgtcgtagacatggggtaggcgagtccaaagctcgccatggctggcgccttagatctccgcccggatctcgaccgctgaaagggaaataggcttacacctctttctaattgatattggtggttgaattgcccaacacagataatcggactaactatgttgctctagtctataacgtttacaggtgcccaagaatcacaatagacccactataagaccaggaaagagttcaaattaag

SEQ ID NO: 43777 - DNA, 240 bp, Zea mays
  unsure (1)..(240): unsure at all n locations
ttgttcctggctcanagcccatttccttagtcgaatgccatagcacagtggcgtctgccttgtctatctcaacagaatcagctgacttgctcacgagaacctcgagattcgagaggctcttggcagcggggttattattcgcggccttttagaacagggaaatcagctttttccaggatctttgatcaaccacaaggacgactgcggctaggagtggctcgttgaagtacacggtcatgt

SEQ ID NO: 43778 - DNA, 400 bp, Zea mays
tctaaagggagaacacgtgataggtctaaccaatgtttctttctaataagatagaccttgcgcaacttgtcaagcaggtaaacaagtgggaggagcgcatcacaacaagaatgtgatgaccacatcaagacctctcgagctgctacatatggacctcttcgtacccgtcgcctatctaagcataggaggaagtaagtatggactagttattgttgatgacttttcccgcttcacttgggtattctttttgcaggataaatctgaaacccaagggaccctcaagcgcttcctaaggagagctcaaaacgagtttgagctcaaggtgaagaagataaggagcgacaatgggtccgagttcaagaatcttcaagtggatgagtaccttgaggaggaatggatc

SEQ ID NO: 43779 - DNA, 379 bp, Zea mays
  unsure (1)..(379): unsure at all n locations
tttcgtgcctgggatacacgcctcgcctctcatctatttcttcttggatncgcatanaccaaatctgatgcattataggtcgtgtatcgcaaacgcgaacacatgaactacctcctgctctatgttgatgatattgtactcactgcatcctacatggcacttgttcagcgcaccattattgctcttcacaggaattctctttgatgaccttgggcaatgacatcacttccttggaatgcatgttcaacacaccagattcggtctctacctgtaacaacggcaatacatgattgagatccttgagcaaagtggcatgagtgaatgcaaaccatgcactactcctgtagatataaatgccaagctttcagccgatggtgat

SEQ ID NO: 43780 - DNA, 430 bp, Zea mays
  unsure (1)..(430): unsure at all n locations
gacctatgaaactcagcttactaggggtggtatggcatagaagactcggtcatgttgtgatgaagcaactcaatcggttaaccaagcatgacttagttcgaggcttataagatgtgaagtttgaaaagaacaaattgtgtagctcttgtcaagccggtaagcaagtggcaaacactcatccaaataaaagtcaaatgtccactcatcgaccggtggaattacttcacatggatttatttggacccacatcttttgtaagtattggtggtaattcttattgtctagtgattgtggatgattattcaagatttacttgcgtttattttctacgagacanatccaatgtgtttgaaacattcaagtcatttgctatattggctcaaaatcaatttgatgtcgacatcaaataggttagaagtgataatgggtc

SEQ ID NO: 43781 - DNA, 426 bp, Zea mays
  unsure (1)..(426): unsure at all n locations
cagcagcgcgcgcgggatatttaatggttgtgcgagtgaagagtacgagcagacagcgcggagtggtcgtaagtgtagctaactacctgtggcagaacacggggtggacggaggatcgaagctatagtatagtagctatagcatacgtacgtaccgccggtgagccagagcacgaacggcttcttgtcgggcgacgcggtggtctctaagaaccactagaagagcgcgcggccgtgcgtctcgttcacggtcacgtacccggcgtactgcgcgaaccacaccggcgggtgccccgggagccccgacacccggtcctgcgcctgctgcgccgcggtcaccgtgttcacctgctgcaccgcgactgtcgcgacggagcatagcgatanggagagcgcgagcaaggaccatgcgcccgccatcttagct

SEQ ID NO: 43782 - DNA, 477 bp, Zea mays
  unsure (1)..(477): unsure at all n locations
tctacagggagaacacactttgngactaacaaatgttcattttgataaagacaggattngtagcgcatgccacgcatggaagcaagttggtgttcatcatccacacaagaacatcatgacgactgacaggccactcgagctcctacacatggacctattcggcccgatagcttacataagcatcggcgggagtaagtactgtctagttattgtggatgattattctcgcttcacttgggtgttctttttgcaggaaaaatctcatacccaagagaccttaaagggattcttgagatgggctcaaaatgagttcggcttaaggatcaagaaaattagaagcgacaacgggacggagttcaagaactctcaaattgaaggcttccttgatgaggagggcatcaagcatgagttctcttctccctacacgccacaacaaaatggtgtagtggagaggaagaatagaactctattgaacat

SEQ ID NO: 43783 - DNA, 390 bp, Zea mays
acatgtgctaagcggagatgccatatccagcccatgctagtcctagcaattgagcatgcatctagaccggcctcctgttttgcaaaagcaactaaataaagatcgccgtgtaatacacccttaaaagctaatgaaccatcacttcttctaaagacagacacattattttgaaatagacaatatgtgccatattacataattgactaacagacaagaaattatatccaagagactgaactaaaaacacattaaagatagagtgctcatttgatattagaatcttgcctaaacctttcaccttgccttggttcccatcaccgaatatgattgaatcttgggaatccttattcttgacgtacgaggtgaacatcttccttttccacgtcatat

SEQ ID NO: 43784 - DNA, 475 bp, Zea mays
  unsure (1)..(475): unsure at all n locations
cggtgccgatggagaaacanaaatcctcgatatcttggctgtcgaactgcttgccgttgtcgactgttagctcggacggtactccgaagcggcaaacgatgttctgccagaagaattttgggcagtctctgatgtgattgtggaaacagccctcgcttcaatccatttggtgaagtattcgacggctacgaaggcgaactttaaagttcctctgagcggtgggcaggggcccgacgatgtccaggccccaccgctggagaggccatgtgtgggcaatcagctttgtatattgcgaggggttgcctgaccgaggggagaacttctggcaggcttcgcaggacttcgcgacccgattagcggcgcagatcattgcgggccagtaaaacccttgacggatcaccttggcagccagggcccttggccctgcgtgcgagccgcacgtgccgctgtggacttctcgtatgatctgcatgcc

SEQ ID NO: 43785 - DNA, 403 bp, Zea mays
  unsure (1)..(403): unsure at all n locations
taacttgagaaacacgtgccaccacaaaggtggaatgggacgcccttgactgactaattaggaaagctagtggaggtctaccttacccgaaaggggcaagggcagtatgggagttggcttgtaaggaggttctcaagttgattttgctgccatgacggtcagacggaggattcctgcattgcgctccctanaaactgtagcggattttctgaagatagtggaactttgtaaaggcctcgtagtgttatcctgcctcgcttccttggtagaagtgtatgaggctcgttcaacctcgtggcaaatgggtaacatgacttgtgggtaaagggtacaacctctgcagagtgtaaaactggtatactagccgtgctcgcggtcatgagcagctcangactctcgcatg

SEQ ID NO: 43786 - DNA, 338 bp, Zea mays
  unsure (1)..(338): unsure at all n locations
ggtaaccnctactacaagcacncncggtgcaagataatataagcctcatccctcctcttgtgttccatcttgcatcaacccatctggacaggggcacgcagcacaaaattcactagtcggtccggttgagggtcccccatgtccgaaacaccgacaaattcaaattcatatttgtcttcgagttattttttaatgtttagagtttagttttaatcattaaccttagtgaaccgtatgcgtcacccgttcgggaatggcgaacgtcacattggcttgtgaagttcgccattccggaattgtccatgtattntggacagcctaagagtgtagactgatgc

SEQ ID NO: 43787 - DNA, 379 bp, Zea mays
  unsure (1)..(379): unsure at all n locations
tgtacacctcaccccacatatgtttccttgccatagatcacattctcggatctctggnggagaccatttcttgctcaaaaatccatacgtgttatccttcggtattattgaaaatggtcgttcatggctattttcgacaaaaatgggggttgtgtggccattgatcatctaccagaggctcgtacacctcaccccacatatgtttcctggcataaatcacattctggaatttctggtggagaccatttcttgctgaaaaatccaaatgtgttaatcttcggtattattgaaaatgggcgctcatggctattttccacaaaaatggggggtgtgtggccattgatcttctactagaagctcatacacctcactgcacata

SEQ ID NO: 43788 - DNA, 330 bp, Zea mays
ttaccctgcaaccttccgttcctctaccatatgaatggatatccaatgtcatacttgatgcatatccacattatctgttcccttgaatgatgtactgtatgattcccaatctgtatggatgaatgtatgtatgcttgccatcgcatagagaacgatccggtccaagagccctatgagctctcacgagaagcccctgagcacctatcggttggtggaggcaagagtcctttgacctatcattgtcctatacattctttaatacaccctccgcattacacctttataccttaagattgacttgcttttgtactcatgtccttgttacctatt

SEQ ID NO: 43789 - DNA, 462 bp, Zea mays
  unsure (1)..(462): unsure at all n locations
ntatgtgacancaattattgtcaaacacgaacacagttgcttcaatacatgtaacaaggcattttatcaaacatataataaaaccacaatgtgcctgtgctacagacaagatatttgttgcataattttgcatcaaaattctagacctcaacccctgactcgactactttataattctagaaaaaattatatcaccacagaacagcacaccgacacaacaacggatctagccataatcactaagcgcaccaatgctaaataaagggatcatcgcactaacccgctaatttattcaatgatctaattatcacgaataacccatccaccagcatgaccaaaacgaattgataatcgcaaatcgacgatgaatcactggttgggtgtgttgccgaacactaagtggacgctgcatgaaccttcactggcttcaccatctagcctttctcactaatcgcatattac

SEQ ID NO: 43790 - DNA, 434 bp, Zea mays
cgcctttgaaataaatgtaagattatgtaattcgcttccgcatttctttatctccgatgctctgtaatgtctgcaagacgggtgagacgttcctggtgaggtaaggaaagatatcgaacttgtcaagtagttcaagggcacctacagggttgtctgatgtccgttggacaaggacaactgtaggtgggcctaattacttgggaggttccgtcacagctggtatcggagcgtagcccttcttggcagatattatgaggcatcttcaaaagaattctcaaaagtcttacctagaaattcttttctcttcttacctaagtattctgaagaagtctatcttaaagaccagataggaagagtgcaacgtatagaaggttgaatcgactaaagttgattctgtattatacatgcatcatgctaagcactatactaataac

SEQ ID NO: 43791 - DNA, 437 bp, Zea mays
tggctccgagtccgacactgacacacgagcgcttgatcgatatgcatgagccggctagatcacgggacgcgctctcagcaagcacctctgtgtcctcgatctggacgatcacctcataaacttcaatcgagttctttgacatagcgtcattgctcagagatatctatgttgagtaagaagcaaacatgccgccaatagatccctatagcgccactaataagtacaatctataaaaaaaacaaatatttcgaatatccgtatctcatccaaacgcgttcttgttgctgtgttgcacaaattgtatgctgaatattttaaatgtgtcaaaaacacaaaacaaaacaaaaaaacgcataacaaaaacctagcatgttgtgtccaaccattctatttcttctgcccccaggcctcaaatgggaaagctagcggaccctaac

SEQ ID NO: 43792 - DNA, 421 bp, Zea mays
  unsure (1)..(421): unsure at all n locations
ngcaacgagtcacaccttactaccaaacttggtactgcctatattctgtgttgtgcggctcctcgttgtcgtccacattctcacccatcaaatcccattcttcaatgtatgccctatggtgtttcctaaagtctataatcttcttctgctaccgacgatcaaacctgcagcaagccacaatgcaattgtaacatgcaagctaatataatggaaatctacgataattgaatttgaagagaccacacttacttgtgcaactccactgaagttggaacatcctcaactggccacagctgcttcttccccaactgccttgcaaccctacgtggtaggtgccactcaacgcaccaaaaggagataagagggcacctcatcctgtacaagtcctcgtccaagctgcacacggaacttgataccatct

SEQ ID NO: 43793 - DNA, 490 bp, Zea mays
atctcttcagataatgtcaaagctagcacagaccattatattatcatatcaatagcatgacagaaatcccatcctacatgtgcagcgtgtcaatttattactactccacttgctaggacctacagcctattcctctgataccaactgtaacaccccactggtcacatacaatggataataccacaaaccccacccaccaaacttactcaacacaagagaagttataaagaaagaatatatagcaaaatccggcagcacctcctttgaaaactagcatgacaaggaggggaaacatgaagctcatacaagatataaagacatataattcacatagtagaaactgaaatgcaaaagtggtaaaacttaattatgacccaactgaagcaaaacaaatgggataagagactcagcccaccccaaaataaacgctcaaccaagaacaaagcaattcactagacttgtgcaactctgattaacaacattattaaat

SEQ ID NO: 43794 - DNA, 468 bp, Zea mays
  unsure (1)..(468): unsure at all n locations
gggtgctcgagagagtcaattcaatcttgtttgactcaagctatcaattcttttaaagaattatgtccaagattgacccacagctgttctgaactgtcatatctaaaactcatatcatctcggggaagatattgatgctgtagaaattaaaagaattatcatgtgcggaaaaatcaaggcctacaacatggaggaaagtcaaaggatggcaacatttatgttcttaagtgaaattatcttaaaattatcatgtgtcttgagtagtcacatggaaataggaagcactctcaaatgtaaatgcatctatctatctcattcaaaaacctgatgcatatgtntagggggagcctatttctatctcttgattatgttgagactatcgtttcatcttagtatctcatatagnctcttgcatgagttnttcataaagctngctactacacatcagatccaacttgttaaagtaat

SEQ ID NO: 43795 - DNA, 399 bp, Zea mays
  unsure (1)..(399): unsure at all n locations
ctataccacagataagtgttgaagtgcagatatacagcaagtgacacttatagtcagaatacaatacacaacagagcacacagacaccaggatttatcccgaggttcggccaagcctgaaatgctggcctagtccccgttggagttagccacacctgggcttggagtctatntcaactccttcctcctgttgctcagatctgtcaggatgacagatagagcctttactatgttgatgttggtacaacgaaaccgcggctccttacaaatttttgggcagactccagcagagtaacaatacgctcaagacctgctctagctcttacagcacttttccacttctaaaggctatagctctgccttctcaccaactagagagtgcacacaaaaggagagtggg

SEQ ID NO: 43796 - DNA, 469 bp, Zea mays
ctaagctcgtcagcatgtgttggtacccatcgctagatgggtccattatgtgtttttaactaagatctaggaacccaactgtcctttgcgctagccgctggcagactcattgcctttctaacacaggttgcaatattgggttgcctagttatatatgaatcacacgacctgctatgagtggaggagctaccaatgggacaatcattgcattgatgtcccttttcccggcatgtgtatcatatgcgtttttcaaggcacgaagacttcttctttgcttgattgctgcttgctccatggttatgaaaaactttattttctaaccctatgcccttctgctctagatggggaccagattaatacagagaccttctttaacattgtagcagatttatctacttgtaataatcagccttactatataggacatgatctatcattgccctatcaagcatcactcacttctgatcta

SEQ ID NO: 43797 - DNA, 368 bp, Zea mays
  unsure (1)..(368): unsure at all n locations
tctacaaggagagcacatcttaggattaaccaatgttcattttgagaaagacagggtttgtagcgcatgccaagcaggaaagcaagttggtgctcaccatccacacaagaacatcatgacaactgacaggccactggagctcctacacatggatctattcggcccgattgcttacataagcatcggcgggagtaagtactgtctagttattgtggatgattattctcgcttcacttgngtgttctttttgcaggaaaaatctcacacccaagagaccttaaagggattcttgagacgggctcaaaacgagttcggcttaaggatcaagaagattagaagcgacaatgggacggagttcaagaactctc

SEQ ID NO: 43798 - DNA, 492 bp, Zea mays
ctaagattatcgctggcccctggtcagggacagaacattcatgttgattatgttcttccttcacaccgcataaataaatagagaacaagaccgatatagagagttttgatctctctactcgaaagtgaagagaacaccatcacctctactccactagagccaccagtgaccgtcgaaatcattctttctatgagcttttctaatcctaaagatttatttttagtagcttggattacaaaataaggtcctataatggaatagagtagcttctaaaacaagcaccctaaatatgtttatcagatgacaatataagtgataatagactctaaattttacattataaaatttaaggatagaatcgtattagaatcgagtcttatttctattaagttttgaactataattaattaaaaactcaaataaattatgaagaaacatttagatcatgatctattaatacatctagatggcagcgactaatagtgggaaaaa

SEQ ID NO: 43799 - DNA, 360 bp, Zea mays
tgtgaaggttcttcatccccacatgtgctaagcggcgatgttctatccagcccatgctagtcttagctattaagcatgcatctagaccggcctcttcttttgcaaaatcaactaaataaaggttgccgtctaatacacccttaaaagctaatgaactatcgcttcttctaaagacagacacatctatatttgtaaatagacagttataccccatatgacataattgactaacagatagtaaattatatccaagactctctactaaaaatacattagagatagaatgctcattagaaattgcaattttacctaatccttttaccttgccttgattcccatcaccgagaataattgaatcct

SEQ ID NO: 43800 - DNA, 363 bp, Zea mays
  unsure (1)..(363): unsure at all n locations
gacctataaaactcagcttgggcccagaaccgccatatgactctagtgagacttctatttgatcgcggtgaaccttgtgtatcacgggagagctgggacctggactggagagcacccaccactcagtgcatgggtccgtgcgacgaccatgggtgtgggtgcctcttggnggatgtgggaacagacagaatgacagaccactataatagttgtacgagtggtgatgatcgtgtgacatatttgtaacattaaaatatatctgggtaagtccaatcttaattatatacctcagctaaaactgataatatcctaattcaaaattattaccactgctcataagttccggcgtcattatattacatt

SEQ ID NO: 43801 - DNA, 397 bp, Zea mays
tcatactcggctgcattgttggaggctgtgaatatcaactggagggcatactcgaggtgttcgcctccaggcgcagtgaagagaatacctgctcctgctccctgcagcttcagtgagccatcaaaatacattcgccatacttctgcagtctacgggttgtctggtacttgttgttcggtccactctgataccaaatcaaccagtgcttgagttttgatggcagtgcgaggtcggaactcgatgtcatgagatcctagctcacaagcccacttggctattcgaccgatagcttccttgttgtgaagaatatcccctattggaaaacttgtaactactatgactttgaggtcgtcaaagtagagacgcagcttgcgggcagttagaagtcctgcgtata

SEQ ID NO: 43802 - DNA, 398 bp, Zea mays
  unsure (1)..(398): unsure at all n locations
tgacgcacgagcgagtacaagtcaacgtgaacagtacggnggtactgttcatctatntataggcacatggcgtagcctgtgtgaaattacattcatgccctttatgttcactattgacttaagaacaatctgttcgggactggatagccttttcctccttaagtcggatcctttttctgctactaagccgaagctcccttgtgcgcagcttccgcgctggttcagccttcgttctgaccctgctctccatattgtgtacagcttcatcctgagtccgaaggttcctctacatatattatgcttgggaaacattgttaatcatgtgtttaaagaccttcggaagacgaaggcccccaacaaggggatatcaaaataacgtatgtaacaccaagaacaat

SEQ ID NO: 43803 - DNA, 383 bp, Zea mays
  unsure (1)..(383): unsure at all n locations
actcaagcttcttgtggaagagaagatgggtgcagtgccccgctcaanacttgtgcactgtccgccaacagactggtcaggcgcgccgtctgcccgacgaccctgacgacgtctgccaatggattggacaaggcacatttaatgtcgagagggcttgtcgcctgtcancgcggtggcagatggcgtgtcccttccataataaatgctgaggtcgaacggctgcatgggccttacgtcaggttcggcccatcggcttatgtcacgggcttcatgccaaacggcagcagcggggcttcacctgggcaggaagcccctacttgagaggtggacacgtgtgggcaccagacccttattcgagccagggtcttccaggtctcggagcc

SEQ ID NO: 43804 - DNA, 461 bp, Zea mays
  unsure (1)..(461): unsure at all n locations
ttggtcggtgcatgcaactcaatatgataccaaatgtccttaacccaaggtctcgagtatgaatcatagttaggcgaagttaaataaaataattgttgcttgttcctattccacgcctgaggctcgatagagtctcggcgtgagggggacgttagaatacatgtgaattgttcacctctcttgaatagcttaagcttttgggttgagttggtcgatgcatgcaactcaatattgatgacgtagacacgtcgagtcatcatcaagagggcaatgacgaagttgatgcaatcaaggccctcttggatgtagaagaaaggcagcgatgcaatcaatgcagacatggtgagaatgggagggttgacacagtcaagccgcctgagccgaagcgcatgctanggttgccagtcctatcaatgcatcgggaacggaagcacaagctggtgttgccaatactatacata

SEQ ID NO: 43805 - DNA, 460 bp, Zea mays
ctaagcttctccagcaagaatcgaggccctatctcaccagaacagcaagatcatcgtcgccggacttcggtcacccgcagccacgcgtagaccgagcaatccggtgagccattctccaattcctcgcacccatgtcttccttgacctctagtagagctcattgaccaaatcaattgaactttaccaccctggttaggccggagccctcgccgccgatgagatcccccgcctgcgcgtgtggaccgacctactccgaccatccccggagacgatccgcacatcggcgtgaccgtcaagacctcccctacaccctcggcgaattcaccagagcaatctcgctgccggtaagcccctccgccctttcctccgcctcggctactgtttcattaggggaaggaccatgggtttgatttagcggaaccctatggagttttctgcatagtcagagactcatgtgaat

SEQ ID NO: 43806 - DNA, 437 bp, Zea mays
  unsure (1)..(437): unsure at all n locations
actaagcttcgcaactcagtgaatatcttttccttcgcgaattttaagatttttaccttcttatccaaatcattaatgatgaattcattctttctatcttcngtctcttgctgcaccttcaaagctttgcttagcaggaaactctgttgcaaaaccgaaactgattttcattctcaaaacttggaaactaagtaaatcaagggaagcaataaagtccataacttgaaatttgagtatactaagctaccagtgatgtgttgttntctataactactaagatccctttcaagtttcaggaatccaatgcttcttgtcagggtattcacaaccttcgccccaacacagttagggatacaacccagaatctcttcatctacatcaccgaagagcacggacccagactgatagccacctgatatagcaaattctctcagttc

SEQ ID NO: 43807 - DNA, 400 bp, Zea mays
  unsure (1)..(400): unsure at all n locations
ntatcacatggacgtgaagagcgccttcctcaatggaccatatcaattaagaagtctatgttgagcaacctcccggctttgaagatagtgagtaccctaaccatgtttataaactctctaaggcgctttatgggctcaaacaagccccaagagcatggtatgaatgccttatagattttcttatcactaatggcttcaaagtcggaaaggccgatcctacactctttaccaaaacacttgaaaatgatttgttcgtatgccaaatttatgttgatgatattatatttgggtctactaacgaatctacatgtgaagagtttagtaggatcatgacacaaaaattccagatgtctatgatgggggagttgaagtatttcttatgatttcaagtgaaacaact

SEQ ID NO: 43808 - DNA, 403 bp, Zea mays
catcgacatcgagcgaggcatcgaagccaacccggagaagatcgcggtcatcaccagcatgggacccatcaaggacttaaaaggggtacagagggtcatgggatgcctcgcggccctgagccgcttcatctcacgcctcggcgatagaggactgcctctgtaccggctcttaaggaaggccgagtgtttcgcttggacccctgaggccgaggaagccctcggcaacctgaaggcgcgtcttacaaaggcgcctgtcttggtgcccccggcggacggaaaagccctctcggtctacgtcgccgcgaccactcaggtggtaagcgccgcgattgtggccaaaggcacgaggaatggcatgcattgcccgttcagaggccggctacttctcactaggtgctgccga

SEQ ID NO: 43809 - DNA, 376 bp, Zea mays
  unsure (1)..(376): unsure at all n locations
cgagtccgcgcctggaagtctccgaggcgagggaatgggcttcatttgtggagttgctttcgccggtgctgtagccgaccgccgagatctgtccaagtgctgtcgttgacgacacctttgggaagctacaagcgtncacacgtcccctatgttggtagtagacctctaccatagaggacgggcgattcaccgtcaggagcaccatcgacaccgccgccgtgtttctatctcggtgggggaactttctccgggtcgccgtccaaatggtggtgaagaatcccgccgtagatctagatatcttcgttcgtctttgttggatctcaacgagttgaggtatgaatttttcgatccaaggctcttattcttgtgatgaagt

SEQ ID NO: 43810 - DNA, 329 bp, Zea mays
gtatgctcgagagtctttttctttgacgggtgagacttgtgaaagtacattctgtactcacggttctcaaacccatgttgttgtaagtgatgaaacgacggagttctgctatatctgtaccgaggtggttcccacgcaggaggatgaacacttaaacttatttgggggcgttctgcctccccgtgatgtaacaataataagttacacactcaagcacccggatatgtaataactactatttctatatttcactatgaatgcaactcatgatattgaaatcttttccacttactctctactccgatgatgtgtaatgtctgcgtgatggg

SEQ ID NO: 43811 - DNA, 385 bp, Zea mays
  unsure (1)..(385): unsure at all n locations
ttatgactagntaagttcttggcttccctcttgaaaccaagcccatccttaattgaggggtgtctaccaatcgtgtaagcatcccttgcaaattttagtttatcaaattcattnttgctagtcttaagttgggcattaagactagccacttcatcgtttaactttgcaatagacactaggtgttcactacaagcatcaacattaaaatctttacacctagtgcaaatcacaacatgttctacacaagagttagatctatttgctacttctagtttagcatttaaatcattgttaacatcttttaaactagaaatagtctcatggcaagtagatagttcacaagaaagcatttcattccttttaacttctaaagcatgagaatttt

SEQ ID NO: 43812 - DNA, 418 bp, Zea mays
gatcatgtggacatataatggtttgtgcaaaaccatacatagcatcttccaccatagccatttgtctactaatggtatccaaagacctttcaaatctgtctctaatttggcgtgtcgcttgttgtgtcccacatgcccataagaacatacctaatgcctcacatgactccacctcttgtgttgaccttaacccgtgatacctcactaaagtatcatgcaattctataaaagaatctggagtcatacaaaaattgtcatgacacttcctaaagtccctcatattaagttccacccattgcgtcctgtcacgtgcggcaatggagtatgaagattaataatatgatcaccagtatacgaatgagaagcaaaagcagctataacccgcgctgcaccagcttgctggaacatgatggaacta

SEQ ID NO: 43813 - DNA, 441 bp, Zea mays
  unsure (1)..(441): unsure at all n locations
tgccgaagctntctggatgccatcaaaacagtttatattaccttctctaattctgggnaggtttctttgataaactgagaacttcagatacaaaatatactgggacctgtttcctggcttggccatcaagcttctcctggacaagtgctgcacttaccgctgagtgcgaagctgccacatataataataaaggagcccctggcacgggtggagttaatgctgttagatctattaaatactgcttcaggtcttcaaaggccttctgctggattggtccccattgaaagacttctgctgacttcagcacttcgaagaatggtaagtttctctctgctgatctggatatgaatctattgagagatgccaaccttcctgtcaatctttggggcccctttntttgtaggtggtggctccattcgaagtatagcttcaatcttactt

SEQ ID NO: 43814 - DNA, 393 bp, Zea mays
  unsure (1)..(393): unsure at all n locations
tccgcttcttaattgttgcctttagctctagcgctagtttgatttcntaaggccttctcatcttcttttactaagcgggcagcttgcctacttaggatgctaacaaccctttttcttttcacacccctagcccctccatcaaacctctcacaatctgggtattcgaagtttaacgtatccattacccggttcagccttcgtttccgccgggtaccgaaggcagcattcattagctggtcctccttcttcttatagttgctaagaatctcattgcacatggtttcgatcatttccagccattcattgcatggnttcttgaactggttctcaaatttgaagcgattgtggagccgaacaagctcatactnntttcccctttctttttcttcggca

SEQ ID NO: 43815 - DNA, 472 bp, Zea mays
  unsure (1)..(472): unsure at all n locations
tcttctcgtcatcgatgagcgacgacaacgcgaatgcctcctactcatggagtttattcggggtttgaagtanaaaacatggattcatgcttggcgttggtttatgaaaatgactcacaagtctgatccatggaaaaaaatattacgaaggaaaaatttcacacatgcaaaaaagggaatttaagtataatgcattattcaaacaaaagaaatagcatgcaaagctcttctttaaataatattacctccatccaaaaatataattcaagaatatcggtgatacttatctactactacgtattgtgcaatggtagcaagtgagcttggagagagatgtagtagatgtgtttcctgtcatagatgtagacataaacacatataggtgggtgcccgtgcgttgcaacgganacatttaatatcatgataacttatgaacaaatgtgtgttatactggtatgtgaaaatggttcgt

SEQ ID NO: 43816 - DNA, 415 bp, Zea mays
actcagctataggttctctgaaatagccagcggcttcggaggaagaattcattctagacatgtcagatcgattcataacactcatagtgatgacaggggaagccagcagcagaggccgcaatattcctcccaggcttcggggcagcagcagagctatcctcggcctccagctccaaggggaagaggtgccaggggcttcggaggaaccattggggatcagcccaggaagatatattgcctattctgtggtgaggacaagggccataccaccaggatgtgccatgttaccatccagaaacaaaagaagatagcagaagctgcagcccaacagagccagccgaagcaggttatgcacactgcttcgtaccattcgccttacattccagagtatgtaggcaaccaccctgcatcttct

SEQ ID NO: 43817 - DNA, 418 bp, Zea mays
  unsure (1)..(418): unsure at all n locations
acacataaaactaagctngtttctctgcagcagaaggcatctctnggcacatggttacctgatagcattgcagctccctgacagcacacaacggctgcaatcctagtaagggaatcatcttcgctcgacgatgagcaattataacatggtttattagcatactgcaaatcatggactatggtaaatagcctggtatcacgaacttgctctagtacattntcctgcaagtgaacacgagaagtgtaagtgtgttatataagggaggaaaaatctaacccagcatctgaaaatgaaacagatatcaggaaatgtcaccttcaagaaaagcctctctttctcctctttcgttaagcttgtgccaccctcctcttttctcctgacttcgacaacccatttgatccaagattcagcgtcagct

SEQ ID NO: 43818 - DNA, 453 bp, Zea mays
  unsure (1)..(453): unsure at all n locations
ttaagtagaagtatcatttactcgtatcacaatatgggcctatttgtntacaaacgatctttatcattgtggtgtctgacttatattgttctttgtaaggttatgatgatattccaaatatgcgaatgtcaaggatttgcaatttttgagagttcacaacaaacaaaggtaatatcctgcagagaagttgctttccttatgaatagaatgatatgcattgtctcaaatgtctattgtctattaacttttctctctgcagctggttatgccttcataaagtatcaaacaaaaaatcaagcattggcagctattgaagctctaaacgggaaatacaaaatagacgtctgtcaaattgagttcagatatcaaatcatttttatccatttacatgtaaacaaagtaattntagnagtatttgtattctttcgtatcatgtatttcaaagcattacaa

SEQ ID NO: 43819 - DNA, 260 bp, Zea mays
atatggtcaacgtgttgcaactacttatttcttattgatgcagagcctatgttcatggcaatcctctcgctaatgttgaacatacaagaccacactctccactacatggagcatctatacaagatctctaacactttgacttggctacactacttggagttgttgaaccttaataactagagctcctattcatgatctatggaaagtgagctcaacactcctatataacccgtattgatatccacacaatcccacatgtc

SEQ ID NO: 43820 - DNA, 413 bp, Zea mays
tactcagcttctgcatcatctcttctttatgtctctggcacacagatgtctataaaagtagcttagctccgctaatgctgtccagacatctatttttacaaaaccacgaaacataacaggaaggagtctctccattattatgtggtagtcatgactcttcaacccagaaaacttgcccgtcttcaaattcacagaccttctaaagcccgcggcgtaaccatctgggaactgtaaggttttcaaccatttcatcaattgcttcttccttttaggtttaatactgaaaggagcacgtggcttcttctgattctctcctatctccatagctggtcttctacagattaacgccaagtctttccttgccttaaggttggcttttgttctgcggtgatattcatggcagtgctgataat

SEQ ID NO: 43821 - DNA, 363 bp, Zea mays
taaagggagaacatgcgataggtgtgactatcgttgcattcttaaaggatagaccctgtgcagcttgtcaagcaggtaaacaagtgggaggagcacaagttgataatgtaatggaagaagaagcgcaaccggcacctccaatccaagttcgagcaatgattcaaagggatcatcccatcgaccaaattctgggtgacattagcaagggagtaactactccatctcgattagataatatttgagagcattactcctttgtctcttctattgagcctttcaaggagaagagggcttgctagatcccgactgtggtgtggccatgcatgacgagctctacaccttaagaggatgaagttggacact

SEQ ID NO: 43822 - DNA, 487 bp, Zea mays
  unsure (1)..(487): unsure at all n locations
agtgcagagggtgcccnctcagccatggaaacagcttcagcaatgtctatcgaagctagtacaggcccaataaaggagccgaaatcagaaaaggtaacacaacagccgaaggtgctaagccctccagctgtaatatggttgtcgaatccatcgagtattacaatatcgactccaaggaagagaagaatggctatcgtcttacatgttgttttagaatccgagaaggcgccagttcctgcttctgccgaagcaactggtgaaaaatctgaagttgcaagagaagcgattactgcaagcacagctaatgttcttgctgaagccagaccttcaaaagctgcaccaatagggctggtggaagaaagtgttcctgagaaatccatatctcctgctcctgaagcaccttcccatggtgacttacaatacattgtacgacacactctcggagagccagtatcattggaacaatatgccgaagtataacactatg

SEQ ID NO: 43823 - DNA, 339 bp, Zea mays
gaaatcacaccgtcgatcagattctgggtgacataagcaagggagtaacaactcgctcacctttagctaatatttgtgagcattactcgcttgtctcttctatcgagcctttcacggtagaagaggccttgcaagatccggactatgtggtggccatgcacgaagagcttaacaactttcaaaggaatgaaagttggagcctggtgccacgtccaaagcaaaatgttgtggggaccaagtgtgtgttccgcaacaaacaagactagcacatggtggtgacaaggaacaatgctctacttgtggtaaaaggatatgcccaagtcgtatggttttgatttc

SEQ ID NO: 43824 - DNA, 481 bp, Zea mays
  unsure (1)..(481): unsure at all n locations
gcttcttcaccacgcgcccgtggatatcttgagagaggtgagcatagtgtcttctcctcagatgtaggtgcttcttattcccacagaatgttttttgtgaccctaaaacttgttgctcaatcaatgattggctgtcttttgagcaacaggggttagcacatgatgatatacaattcaattgcgcacacgtgcgagaatgaggttcacatgaatctaagtgtggcattataacctcatgagcaacattaagcatgagatgggcatcaactaatttattatgagaatatgacaacatatcatactttgtacctagagcacgtttttctaagtgcattgtttctacttgactcttaagcatagaattttccgttctaagttgagcaatgttagataaaacatcatgactatgtctttgcttaattaaaacatattgataccttnggaccaaatcatcatgagagcactttagctcctcatgttc

SEQ ID NO: 43825 - DNA, 499 bp, Zea mays
  unsure (1)..(499): unsure at all n locations
accttgaaactaagcttctgatggcttattaagagggatttcatttcctgcaatatctttatagacatgcccttgcgagccattagattcatcaaatgtcacgtctatcgctatttcaacaagaccggtggtattgttgaaaacacgatatccatgcgcatttgatgcataaccaagcaagaaaccctcgtccactctaggagcaaatttcgagctcttgactttcttgtaagaatgtagcatttacacccaaaaactctaaagtaatcaaccttatgtttgttaccggtgagaagctcgtaggcagtcttcttgtaaatcttgtgaagataaaggcagttgattgcatgacagacggtgttgaccgcctctgctcaaaaattgtcaggtgtcttgtactcatccaacatgggtctagcggcttngattagtggtcgggtcttnctttccacaacaccaatttgttgtggagtgtatgggaccgagaaactcatgttga

SEQ ID NO: 43826 - DNA, 277 bp, Zea mays
aaaatttattgcctattctgtggtgaagacaagggccataccaccaggatgtgtcacgttactatccaggagcagaaggagatagcataagcagccgcgcaacaaagtctaacaccccgcagcttctgttgcttcggcaagccaaccccaagcatcttggcagcaccctccaccaccactgtcgacgcagcgaggacagcagccagaaaggagtcagaacaatcaccttcagagagacttcagagaggagtctgaagctcgcacagtccatagcact

SEQ ID NO: 43827 - DNA, 312 bp, Zea mays
ctgccctcctttggtgaatgcatgcaagtaaatcgacaccgcatcccttccttggattgaccatctggttagagacatacggtaagatagatttgcagataagacaaatgagtaattacaaaacacccaacttttaggtcatggtctttttgggtcagaatagctcagtggattagagtgccacctacctaacattactatattgcacctatggtggtacatgctagagtgtaaccactgtactaggtttgatggtgtatatagcccacaactatttcaatcaatcgaagaagcgaatcaagcaattatcat

SEQ ID NO: 43828 - DNA, 333 bp, Zea mays
gaggctctcatgacacgcgagatgtgactacaacatcaacaccccttagctggtcatatggacctctttggacccatcgcctatctaagcataggaggaagtaagtatgcgctacttatagacgatgactgataccgcttcacttgggtgctctttatgcaagatgagtctgacaccgaacggaccctctagggcttactaaggagagctcaagatgaatttgagctcaaggtgaagaatataaggagcgacaacgggtgcgcattcaagaatcttcacattgacgagcttcttgatgaggaggggatcaagcacgagttctccgctccctac

SEQ ID NO: 43829 - DNA, 397 bp, Zea mays
  unsure (1)..(397): unsure at all n locations
tatgtcttgctatgtttaatcttcggcacaagaggaagcgaccgtttaagcttcgttgtgtacgaaaagaatggaaggtgttttttcgccttcggctcaaaatactgatttcgtccacatcaaagcgactcaatcgaagggtaaggatatattacaaggtatgtacaaagttccttgagaacagttcaattgtatttacaaaacttgttacaaaagtatcctaagttttttcctatagtacatttctactgatcttcattaagcttcagcttcggcgacagtttcggcgacataacttangcattatcttcaccttcgtcattctacataaatcaaggaaccgtgagtaanaatcaagtgcaaagaacaaagtaagtacgaagtattatctcttact

SEQ ID NO: 43830 - DNA, 443 bp, Zea mays
tgatgtacctgaagaagatactttgagaattgagagtatctttcttgatggaacaccattcaaaaaacatatatggatgtgctgctgcttacgcctctgcattaaaatgttcgacaccaagatcttcatcccagataaatatgtagtcgttgcgggcaacaatgtcaggatgtacaaatcgtttggcataccaccttgggtgaacgagaaataagtttgcaacctttgatggacaaatgcataaagactgagggggccctttggaacgcagaaatttcataggaattgtttaggaatttcacaggatgacaagaaccggttcattttcataaaaacacaagaatggagggggaggcatcctgcgttctaatggtggcctgatcgttgcacacacacataagaacaactcaccatgtggtctgctttgtgacactcacatggac

SEQ ID NO: 43831 - DNA, 288 bp, Zea mays
  unsure (1)..(288): unsure at all n locations
caccaacgctgcaccggcgaacgcgggccgctccaaagcgcaccggcaggtccttgctcctgtcctcgccacgaaagcaaggaagaggacggaatgttgcatcctagttgggcagcaatagttcgccttccccggcatggctggaggacgcctcctncgcagagctggaggatggtttccaccaccagaagctggaagaggaggtggctagccgactcgtgcgggaggtagagccccagctcgcctcgctctccgccccagcaaggatggtaaacatccttgaagctg

SEQ ID NO: 43832 - DNA, 386 bp, Zea mays
  unsure (1)..(386): unsure at all n locations
tttcgccttgagacaccggaatgtcacttcaatgtcggagaggaagtcggaagccttccgtggcttgactacgatgtcatcgacgtaggcctcgactgtgcgaccgatgtgttggccgaacacatggttcatgcaccgctggtacgtcgcgcctgcattcctcaagccgaacggcatggtgacatagcagtacatgccgaacggcgtgatgaaagaagtcgcgagctggtcggactctttcatccggatctggtgataccccgagtaggcatcgaggaaggacagggtttcgcacccagcagtggaatccacgatttggtcgatgcgaggcagagggtanggaaccctcngacatgcnnttgtgagaccagtgtagtctacacaca

SEQ ID NO: 43833 - DNA, 348 bp, Zea mays
  unsure (1)..(348): unsure at all n locations
acactacctttattaattcgtttgaccacttccctttgagttgattgaagattgatttcattattcctgttattattattctgtttgccctttctaccagtccatatgactccggatgtctcactgatgtgaagtgtatntttgtaccaatctggttacaaaagggtttgaatgttttatcatcgaattgagttccgctatcaacggtgatagcctttggcacgccgaagcgataaacaatattctgccagaagaattttgtactatcgccaaagttattgtagctaagggctntgcctcaatccacttagaaaagtactccacttccaccacaacatatttcaagtt

SEQ ID NO: 43834 - DNA, 410 bp, Zea mays
  unsure (1)..(410): unsure at all n locations
aacttctcgatgcgtctcgtggtgcggaggcgcgggaggtttcctgctatgtggaaccattcaatcttcatcggacggctccaaaatacgatgatgacgtggatgagctcataaaagccgtttcctaccggctttaaagtatatgaaattcccaatagtattagatatagcataaatactgattcactcccaaccaatagccccacgttcacgtggacaccatgaattaagggattaattagaagagtaattagagaattcactagatgaagtgattagataatntgagttttatggcagtcatgaacattatagattaaggggattccctttcactgtgtacgcaacananaatatgacatgcgatacatcgattgacacactctgagtntgagcatanacattattag

SEQ ID NO: 43835 - DNA, 471 bp, Zea mays
  unsure (1)..(471): unsure at all n locations
agcttcggctcaacaaccttcgatgccaccattctacttactaatgaaagtataaggtaatcagaaataaaggaaaataaaggtaaaagacaggtaaaagtctcataccaaatcaagcaatgttcgagcttcatccccagccagctcgcacatgcccttagcccaaatttgagtaataaatctgttccctatgcttcgggcttcagccaggatatcaattatatatgacgtcgaaagattaaaagttggcttggtaaccaccttggcgtgagtacatcccgccttcataaacgcagcagtcgtcccgcgagaagctaccaaggcacataaatctccttgctcgcttataacttcgtcgagggcttcaacttcgttttcaatatgttcgaaggccctgnggatgtcttcngccgaaggggtaatctcttcgatagcagctccaactgagttgaaaattccttcagtcggtta

SEQ ID NO: 43836 - DNA, 458 bp, Zea mays
  unsure (1)..(458): unsure at all n locations
atttgtctactcttctcacttctggtagatcggaggtagataatgataagcatgccaaagggtggaattcaatgtagttcggctacataaaccccaggtatgtgtccatttaggaccgacctttaccatttagtttacagtgtataccaaacttgtcaaaggactatcccgagtcaattcagtgactataagtatttacaattccgagagatgtatgcgacacaagcatatatgttctagatagaacgagtaaagtggttcgacgggaacacactatggttttcacaccaacatagtgagaaatttctcagaataacctctcggtatactcgcaacttcgtgttgctggcgagtacatgtccttttatctcatagtttgcttcatgtcatttagcgacaaagagagtaatgtgctaacatctgngtgagcaatatatggctgagaattatagtcttaa

SEQ ID NO: 43837 - DNA, 454 bp, Zea mays
agcttgtgagattaataatatgtattacataagtttatctctgttctaaatttagggcaccataaaataaattgatctatgattatgtacatgtaaataacacttacggaaataataatctattttcaaataaagttaatgtatgccatagtttatgttatactttgaattcattatcccttatgtagtattatgtctctttaagatgtgttccaatgtttgtacatgtttggtgtgatgttcatttgtactttccaaatgtattgaatgcatgcttgctttatttatacaacgagcaatccgaggttcctgagtgtgttgttggagacctccctgagcatcaacctcgtgaaggcaagtgtcatctgacccattatgtcctacatactttatgattccctgtcctgcattactttatgaaacctaaggattgactagtctgtattcacttacc

SEQ ID NO: 43838 - DNA, 474 bp, Zea mays
  unsure (1)..(474): unsure at all n locations
cttaaattcatttggagtcttcatgtatcttcgtnacaagtcagcgttcagattctgttttggtgtcacgacaccgttggttgggctgttggcccttgtatagtgttggagaccattatgggtacctctaggggttttgcacgcctctaacctttattttatcagtagacgctaccatattanggttggggttttgcttagatcatatttgtcctcgaacagtgttgtcgttcatcggtttgtgagaccacacctcgtaatcaataagtttgattgtgttcttcctgttcttgcttgtgttcttgattgttcttgcaaggataagcctttgtggagcggtcactcatgtgtcatggctgataaccaatggagtagtggtgcagtgactacaagtaaacacaccaagttntagatttttttttgcacaaagacgcgtcctctagtttattttacaacattgctctaaaattggat

SEQ ID NO: 43839 - DNA, 502 bp, Zea mays
  unsure (1)..(502): unsure at all n locations
atccttagagtcacctgcggctgcagcttatagagacataagtgtgtggggtttttgttgctcttagtgacccgtgtgattaagggaaggctcactcggtctaagtgaccgcttgagagagagggaaagggttgaaatagacccggcctttgtggcctcctcaacggggactatattctttgaaaccgaacctcggtaaaacaaatcaccgtatctactcgctntgattctcgcttgatttgtttaccctctttcctctctctaatgtttccttggctagtattaatttagtttgctcccatacgtcatctgcatcctttgagcaactcttagcaagagaaacattctttcggactttgaattaattctaacgctaaccccgaccctagnttggtgttaaaggttataaatttcaggtttcgcctattcacccnctctaggtgactntcacttgtcctggtggctcatctntttattccttttactgtgcacattaatagca

SEQ ID NO: 43840 - DNA, 478 bp, Zea mays
  unsure (1)..(478): unsure at all n locations
cgaagccttcgtgttccagaacttagttggagaacatctatctaagctgaaatagaagagcttagagagtatgccaaatcctgtggatacaaacctggggcactcctcttctgaggcgttgatgatgagaaattagaatgtattcgagatcaaacaggggccaaagttatcagtactctgtccaagagtattggattcccgaagctagaaacagacatcagccgctaccaacgacaacatgtcngtggtagtttattttactccaacttcaaggtgaataacttgtcccttaactcttattgtttagaataataaaaacatgtctgacgaaggttgtgttcgtgtagagtatgctattgagcanagccttgcaaatgcagcaagaatttgaagataaanagcacgaagttataatatannaattggaaagcaaaataaaggagcaatcagatgcttttgagagaaaaactttgagctc

SEQ ID NO: 43841 - DNA, 410 bp, Zea mays
agcttatgaagattcttcatcccaacatgggctattttttgtgccagagcccacccatgttagtcttagcaattaagcaagtgtccagttcagctctatcaaaatctaccaaggatagctgaccctctaacactcccttaaatgctactgaatcatcacttcttctaaagacagtaacacctatatcagtaaaaagacagctgtagcccatcttacataattgtgaaactgaaagcaagttataatctagagaatctacacgataaacattggaaatagaatggacaggagatataacaagtttacccaatcctttgaccaaaccttgatttccatccccgaatgtgatagctcgctgaggatctcggttgttctcatacgaagagaacatcttcttctgccctgtcatg

SEQ ID NO: 43842 - DNA, 471 bp, Zea mays
  unsure (1)..(471): unsure at all n locations
gacatcactcagggcaacgaccaggagaaggtcgtggacgtctctgtaatactcganggagccgtccgactggtgggatgccttcacaacggcacaccccaatgcggatacaataacctgtcaagagttccaaacgaacttccacgctcatcatattcccttatggggcggttggatcccttcattttagaggaattggaattcactcaataaagcaacctatttagtttggaaattaacattccaccactttctaaagttcagatataagcctatctcacattcatagggtggaagataggaaatgattctatgcatgagtagaattngtttctattcagtaacttacatgacactcttcgttccactcctctatagtaaaaatgtagcatataaatatctaggacatctcgctaataatagtatacaaatatatcttatataaaagccgaatagcttaaatgatatatg

SEQ ID NO: 43843 - DNA, 374 bp, Zea mays
cattattctggagagatagtttgctgctctgccggaacttggaggagcttgcacctagcctttttggtagtgttccagcaaggattaagaacaagaggacagtatgggaggcccttgcagattcacgctggatcaatgatctgcgtggaatggtgacatggcaaggtattcatgaattcacttcgctatgggatatgttggcagaactcaaccttcagccaaggactgcagatcgtcacatttggaggttatctagcaatggacagcactccgcatagtcagcttatgaagctctctgttcatgggggctgtccactctggtgcttgggaagcgtgtggaaatcatagtgaccaccaagtgtgcattttttctt

SEQ ID NO: 43844 - DNA, 413 bp, Zea mays
  unsure (1)..(413): unsure at all n locations
gaacactaccacctcatcctttgtcggctgcgatgaatttttctctctgccaaaacgaaccagctcctgtcttgcttcactgaaatagcctaacttcatcagcttatacatatcaccttcggtaatggtggattcccaaactccacgaggctgggtttagatggcacagcgctgtaatcatcttcagattcaatttcctcagcatcaacctgttcagcttcagcggcaggtgcatcctatgatactaccagccctgaccgttgcatcacttcagagattagagcggnttcggcaccttcggcttcctctccgtcgcgagtaaccctagcttgtgagcgtaccctagccatctgatgattgaatttcttgttntttgatgaagttgaatttttttaactttgccgaagctcttt

SEQ ID NO: 43845 - DNA, 423 bp, Zea mays
  unsure (1)..(423): unsure at all n locations
agcttgacctgaatcatgcccatcagtttccgttgcttgcgctgatggggattaccagccgagtttaggagtgttgggggtacccctaattatggtacccaacaatactcatcaaacaaagcacgaaaacaacagttcacctttgcccacaatatttcctctgattcatcaccaaacacaacanaaatagccatattaatgtaattagaaagtttataccttggatcaattgccacgcagaanaacataaccaagttgagcatatgatcccctctttctttttctctatctccccaatacttgtaatatttgactagcattcttttgcccatcgcactgcacaatatgtcttcagacttgcaccattctcgtaacaaaaccaaaacatcaacaatctcatggaaataggtgtgagatgtggga

SEQ ID NO: 43846 - DNA, 447 bp, Zea mays
  unsure (1)..(447): unsure at all n locations
gctatccgagggctcggatcgagctgatgtgggcgggaaagtgtttggccatggtggttgccctcgggcggctctggtgggtcgcggagaggtcgccggagctgcgggctggctcggaaaggctaggcgcagtgcggaggaggcaacggcgaatatggccatgcatgagggtgggctttatagccactcgtgagcacgacacgggcgtgggcactgtggcggctgatggcgcgcggaggtgcgcgtgtgggcctgctctggcgtgttcccgagtgtctgcccacgtcgaacacgtggtggtttacttctgctagtgttcaacggctggtttggccgccttagcgtgcagatcttagcaaaaatctcatgtatggtctcttctctgcaccatatcctatcttttccatgtgagttccaagcanagatatgatcgggtttgagagatat

SEQ ID NO: 43847 - DNA, 491 bp, Zea mays
  unsure (1)..(491): unsure at all n locations
agcttctaaagggagagcacaatttatgtctttctatgttcattntgagaaagacaggatgtgtagcgcatgccaagcaggaaagcaagttgtgactcatcatccacacaagaacatcatgactagtgacaggccactggagctcctacacatggacctattcggcccgatcgcttacataagcatcagcgggagtaagtactgtctagttattggggatgattattctcgcttcacttgggtggttcttttgcaggagaaatctcatacccaagagaccttaaagggattcttgagacgggctcaaaatgagttcagcttaaggatcaagaaaataagaagcgacaacgggacggagttcaagaactctcatattgaagggcttcttgaggaggagggcatcaagcatgagttctcttctccctacaccccacaacaaaatggtgtagtggagaagatgaatcgaactctattggacatggcaagaaccg

SEQ ID NO: 43848 - DNA, 381 bp, Zea mays
tggagttcattggtgctacttacattgttggtaatcttagtaggttggagcgaagccagatctgtcgtccgttgccgaacgactctgttgttcctgtccactctgaagtcggccaggaactttgcctttgcttcttggatcagctgctcctggcgctcctcgaacaggagctgttcttcagtcggcaaggtttcccatgtcggtgtgatgatattgctggtggaaacttcagagctatcctttgaaccagccattgagggccgatttgatgcgtctatattcgctttccctagcggagtcaccaaaaagtatgttgacgcccttttggagcgccaaacactcaacaagaagcgtggagatgctctctggtcaggcgcggat

SEQ ID NO: 43849 - DNA, 486 bp, Zea mays
  unsure (1)..(486): unsure at all n locations
agcttcttcaccatgtgatcacgggtatcttgtatatatgtgagcaatgcacttccctttaagttgtgtcaagctcatttttagcctctcatttttcttctttgagcttttgatatgtatcatcttgtgttcctgcaaatcctagctcaaaggaagttttgcttgtcgatggacaacaagcattagcacatggtaatgcagttttaatttgaatacatgtgcatgagtgaggttgttgggattttatagtttctatcacaaccttatgagcgatatntaatatgatatgatcatttataagatnttcatgagaacatagaagcatatcatatctttcttgaaaagttagattttcaacttttagcttttctactttggccttaacaaggcattcctattactaattgagcgatacaatgtanagcggtatctcgctcaagtgagatagttcataactctggaccanatcaacatgagagcacttta

SEQ ID NO: 43850 - DNA, 319 bp, Zea mays
  unsure (1)..(319): unsure at all n locations
cggcattcatatntgcatgctaataggaacgacttgtttttatagcttacatatctgcatgcaaaggagagagtcggtttcattgcacgaatcctcgctggttgccgtcgtgccttcggataacgaaacatactggtgggtcggacatcaaccagtcgcgggcaccaccgatgctccgacgagcaggacgtcgattcgccgaagtccgagccagacgtctagtcgccaaacacccaagtgcggtggccggtggtaatggatggcttgcgggtggcgcctggcgctgcttacgcgcataggctgcgaatctgtggatcta

SEQ ID NO: 43851 - DNA, 474 bp, Zea mays
  unsure (1)..(474): unsure at all n locations
agctnggctaccttggggaaaccgaaagatatcttgtctcgattgccggagaagagactacacctgcaccgaaggatgatgaggtagtggtttttaagagcttcttcagggcaggactgcgctttcctttgaacgagatgataggggaggtgctaaagaattttgaaatttatcttcatcagctgactcctaacgccatcgttaggctcagtgtcttcatctgggccctccgaagccaagggatggacctagataccgaagcgttctgccgagtgcacgagttgcactaccagatgaaggccagggcggatggtcttcatgaaaattttggttgctacaattntgcgtatcgcaaggataccaaggctccagttctcagttaccacaccanatggccaaccgtctggaaaggtgaatggttntatattaanggtgatgagaagaagaggaggaaactgatgacgatggtcatgt

SEQ ID NO: 43852 - DNA, 409 bp, Zea mays
  unsure (1)..(409): unsure at all n locations
agctttcagatatatatatacatatctaagttatgaccaaacatactgctatcttctgctgcaaaggttaaataaactgagatagttagaatacatgagcatctgcagcactagaaagcacagggaagtcgagattgtcctacttgagcgctcgtcgtaacaagtagtcaggtctgaagtgaagtgacgcttattagaaggtcaacacaactganagatatttttctgaagaaaaacaaccgaacgagtgccccactgaattcaagacaactgccatatctgggtgaacgccggatataggcgcggactgtacanaaatgaccggccctctagtatggcgataccttttattgcttgcagttgggcagcattcaagatttgtagcagcatctaacataatcatctacct

SEQ ID NO: 43853 - DNA, 499 bp, Zea mays
  unsure (1)..(499): unsure at all n locations
actcagctgctaagggagaacacgtgataggtttgactaacgtacaattctaaaaagatagaccttgtgcagcttgtcgagcacgtaaacaagtgggaggagcacatcacagcaagaatgtgatgaccacatcaagacccctggagctgctacacatggacctcttcggacccgtcgcctatctgagcataggaggaagtaagtatggtctagttattgttgatgactnttcccgcttcacttgggtgttctttntgcaggataagtctgaaacctaagggaccctcaagcgcttcctcaagagagctcaaaatgagtttgagctcaaggtgaagaagataaggagcgacaacgggtcggagttcaagaaccttccagtggaggagttccttgaggaggaatggatcaagcacgagttcttcgctccctacacaccacagcaaaatggtgtggtagagaggaagaacanggacgctatcgacatggcgaggactatgct

SEQ ID NO: 43854 - DNA, 461 bp, Zea mays
cttatagtcacctgctgcatgcaagcttctaagggagagcacattttatgtgtgtttaatgtttattctgacatagacaggatttgtagcgcatgccaagccgggaaacaagttggcactcatcatccacacaagaacatcatgactagtgacaggccactggagcttctacacatggacctattcggcccgatcgcttacataagcattggcgggagtaagtactggctagttattgcggatgactattctcgcttcacttgagtattcttattacaggagaaatttcaaacccaagagaccttacagggattcttgagaagggctcaaaatgagttcggcttaaggatcatgataataagaagcgacaaccggacggagttcatatactctcaaatcgaaggctgtcttgaggaggaaggcattaagcatgatttctcttctccctacactccacaaca

SEQ ID NO: 43855 - DNA, 479 bp, Zea mays
  unsure (1)..(479): unsure at all n locations
ggagaacatgtgttaggtctaacaaatgttactttcgaaaaagatagaccttgtgcagcttgtcgagcaggtaaacaagtgggaagtgctcatcacatcaagaatgtgatgactacatcaagacctctggagctattgcatatggacctcttcggacccgtcgcctacctcagcatcggaggaagtaagtatgggcttgttattgttgatgattnttctcgcttcacttgggtattctttttgcaggataaatctgaaacccaagggaccctcaagcgcttcctaaggagagctcaaaatgagtttgagctcaaggtgaagaagataaggagcgacaacgggtccgagttcaagaaccttcaagtggaggagtaccttgaggaggaaggaatcaagcacgagttctccgctccctacacaccacagcanaatggtgtggtagagaggaagaacaggacgctcatatacatggcgaggac

SEQ ID NO: 43856 - DNA, 415 bp, Zea mays
  unsure (1)..(415): unsure at all n locations
atgcaagcttatgaagattcttcattccaacatgggcttgtcgcggtgccagagccaacccaagttagtcttagcaactaagcaagtgtcgagttcagctctatcaaaatctaccaaagaaagctgaccctctaacactcccttaaatgctattgaatcatcacttcttctaaagacagtaacacctacatcagtaaatagacagttgtagcccatttgacataattgggatacagaaagcaaattgtaatctaaagaatctacaagaaaaacattggaaatagtatggtcaggtgatatagcaattntacccaatcctttgaccaatccttgatttccatccccgaatgtgatagctcgttggggatcttggtttttctcatatgaagagaacatctttntcttccctgtcatg

SEQ ID NO: 43857 - DNA, 327 bp, Zea mays
aaagaatggggtagaactcttgaatcttggggatgtgaactccttgaagtacctcataacaagggttgtataaagccttcttctacttgtgctgcttgagcaagctgcgaagagattactggcacacggttgattctaggagaaccttcttcttatcttctcttcactatcttcttttctcttctcacttttcacttttcactgcctctttctttctctttgctcttcccactggaggaaaccaaagactatgaaccatgtgcaacaattttcaacccaagaatcaccaagcattgtgaccttatgggcgagggagtggaaatggag

SEQ ID NO: 43858 - DNA, 406 bp, Zea mays
  unsure (1)..(406): unsure at all n locations
gcaagcttgcttcggccgatgggtcctttataccttctatgtataaggtagccttggtttgcgccaaggatttcacatgttcgcagcctctcctctccaagatagcggcaatccccctagcacccgagaaggcgcatatgtcccacggccactcaaaatttcttcanaagcttcggcctcgccgctgatccagtcgattggaccttcgggatcgcccagtacgaagttgccttcattcgaataagcgccgacgctggcgaaactagtcttaattntttccacacatttcatggatttttcataacatctttcttttgaagaccgaagttctgcagntggtttcttccaatgatctttccagtaatcgttggtgtctcgggcagcttcggcaatcgcacactttaat

SEQ ID NO: 43859 - DNA, 463 bp, Zea mays
  unsure (1)..(463): unsure at all n locations
ttgggactaacagatgtcatttttttatatacaggattgggagcgcatgtcaggtagggaagcaagctggtgttcatcatccacacaagaacattatgacgactgacaggccactcgagctcctacacatggatctattcggcccgatagcttacataagcatcggcgggagtaagtactgtctagttattgtggatgactattcttgcttcacttgggtgttctttctgcaagaaaaatctcatacccaagagaccttatagggattcttgagacgggctcaaaacgagttcggcttaaggatcaagaagatatgaagcgacaacggaacagagttcaacaactctcaaatagaaggcttccttgaggaggagggcatcaagcatgagttctctgtctcctacacgccacaacanaatggtgtagtggagaggatgaatcgaactctattggacatggcaag

SEQ ID NO: 43860 - DNA, 335 bp, Zea mays
  unsure (1)..(335): unsure at all n locations
ttcganaaagatagaccttgtgcagcttgtcaagcacgtaaacaagtgggaggagcacatcacagcaaagaatgtgatgaccacttcaagacctctggagctgatgcatatggacctcttcggacccgtcgcctatctgagcataggaggaagtaagtatggtctagntattgttgatgacttatcccgcttcactcgggtattctttttgcaggataagtctgaaacccaagggaccctcaagcgctttctaaggagagctcacaatgagtttgagctcaaggtgaagaagataagaagcgacaacgggtccgaattcaagaatcttcatgtgg

SEQ ID NO: 43861 - DNA, 456 bp, Zea mays
  unsure (1)..(456): unsure at all n locations
agcgggatggggnagctgagagactgaaacttgttctgttccatgtctgtagaatcagctatgttggcccaactttgtggtcatctataaactgttctatggagttgtgagccctatttggtgcaacattagtggaggccatatgaagaggtacaagtttccttaagcaagtttggtttggtgctacacaaactttagagtaaaatgctcctaaactagctctgtcaggctgtagtgagtggtgtcagttcagatgactgaatttgagcccagggtaatgtgctccactttngggtactatagctttgaatatatgcctttntatgttttagcatgggcaaactataataacatgaaagagctatgtttcgtgaatcaatttgatgcagtaaagtgggcatgtccatgtgtggaatatagagacaatgagggctaaacattggaattcagtcgagt

SEQ ID NO: 43862 - DNA, 463 bp, Zea mays
  unsure (1)..(463): unsure at all n locations
agcttgtcctcgcgactctcacaagagtagggtttatttgtaatagatacaataatgaacaccaaactgttaccaaattaaaagactattacaagaaacaaaacacatgatttaaatccaaaccaataaatgcaataaacacatgatatcagtataataaacaccaaacgacaatgtgtaaaaacaatagaaacaagtgccaccaaagtgtaacgatattctcaagtggttaataaaaccgtttctctgaagaaataaaaattcagttgaattttgaactaaagttaagttgtatgttcacaacgatcataaaattactacctcgaatctacgtccctgcaaagcttacagaacacataatatcatttcanaaaatataaataaaaattccaggtagtacaaggtagtatggttgcgagggaagtcaaaccacatctagctagatctagccagcagcacggac

SEQ ID NO: 43863 - DNA, 506 bp, Zea mays
  unsure (1)..(506): unsure at all n locations
ctatgctggtgcaagaacttaccctctctacgaaagagaccttgccacatcccacttcctcggacgagttatattccttttttgctattaccccactctctgcttcttctatatctgatgataccttagccgaggacgaaaacgactacgacgaagaanaacgaatgaaggccgatttccttttcccggtggtgggtacctcgactccaataacaaaagaagaacagtctcccgtactgccaatctacactacacgaagaaggggaggaaagccgtgattgattgcagcctcggttcaaatctcttgtctgttctctagtctctagcagcaaggaatgaatgccccggcccacgcttggaataatagggttgcctacttgaatgctggacacactntntctgatctgctggcagccgaattggaaacaaggtcagatatcaagagatccaatcttaggctgtatcaaacttccgacttcatgaactcccctctcacctatcaaggg

SEQ ID NO: 43864 - DNA, 482 bp, Zea mays
acgagcatgcaactagcccgattaaaaagagaaggtttctttcttgccagcagaggaaaaaaaagtattgatatctagaaagaaaaaacgaagcgtcttacaaaaatgttgaaaggctggaacataaatgtggaatggagatattcgaaacttcacaaagaattgacatgtataactgacattctagataaaaaagcaaaaaaatgggcatgttagactatgaaagacttgaaaaacctgaattggagtagactctgaaaaatatgatggccgaagaagggtgtaagagacaacaaactgcgagagagaaatttattaatgaaggtgatgaaaatactaggtatttccaccttattgctaaaggaagaaaaagaaaggcaagaatctttcttattgatgagggggcatcatggatgatgtcctggcattaacaaaatcgcgacaccttctatatagaactatgtggcccctctatatattct

SEQ ID NO: 43865 - DNA, 440 bp, Zea mays
  unsure (1)..(440): unsure at all n locations
agaaatggcctacaaaatttagttgcttgaggacatgagcatgatctttcccgtgtttcacgtatctcaactaaagaaatatctcagaatacccgaggagaaagtagtagtcaaggatctaaagaatggatcagacttggtatatcaagaacaacacgtcgtagttctagacactaaggaccaaattaccaggaaatgtacgggtcaggcgtataaaantttgtggagtcaccatgatgagcatgacgcaacctatgagcagatgcctaactacaagaagtttatcctgacttttaccaaaatcggntagtaatcataaatctcacggagagagtccttttctggggaaggatngtaacacccctagtgtttagcatattcattcattgcatgtgaatcataangggcatatcatgagcatcatcgatcattatatcact

SEQ ID NO: 43866 - DNA, 453 bp, Zea mays
  unsure (1)..(453): unsure at all n locations
gccatggagaagaagaaatcctagaagtcttggctgtcatactgctngccgctgtcaactgtgagttcggacggtactccgaagcggcaaacaatgttttgccagaagaatttctgtgcagtctttgatgttattgtggaaacagccctcgcctcgatccatttggtaaaatattcgatagcgacgaaggtgaacttgaggttcccctgagccgtgggcaggggcccgacgatgtccaggccccaacgctggagaggccatgtgtgggcgatcagttntgtgaattgcgaggggctgcctgatcgaggagaaaacttctagcaggcttcacaggatctttgtgacccgattgcggtgcagatgatagcgggccagtagaaaccttggcggatcacctctgcngctagggcccttggccctgcgtgagagccgcaagtaccactgtggacttca

SEQ ID NO: 43867 - DNA, 439 bp, Zea mays
ggatcttaagcactgagctgcacttaaaaatcttgaaattttcttcttagcacacctgtgttaatacataagattagacaacagatgtttagttatgatataatatggaaactggaataagtcaaaggaaagacgcacaggtagtctacctaaactcttcaatgtaagctgatggaagcttctcatcttcagcaggcctcagttttgtacaagtcttttatcatgagaagacaaaacaatacagattaatttgaagggtcatctacaattgagtggtcaaataaaaccagtataactacagaagggccttacatccatataattttaaaataaaacatgttaccaaatactctaatggttgtcattatccaggcttaacacaatctttgattcaatacgccacacaaaagcatgtgactaacaacacaagcttgatgct

SEQ ID NO: 43868 - DNA, 413 bp, Zea mays
  unsure (1)..(413): unsure at all n locations
aagctcttctttaggctctcattttcttctttgagctgttgatatgaatcatcatttgttcctgcagattctatctcaaaggaagatttgcttgtcgacaaacaacaagcattagcacatggtaatatagtatcaatttgaatacatgtgcacgagtgaggttgttgggattttaagttttctatcacaacctcatgagcaatgtttaatatgatatgatcatccataagatgttcatgagaacatagacgcatactatatttttcttgaaaagctacatgctcaactcttagcttttctacttggtccttaggcaacgcattcctatctactaattgagcgatacaatgtatagtggtatcatgctcaattgaaatagtntcataccttcggaccacatcaacattgagaca

SEQ ID NO: 43869 - DNA, 443 bp, Zea mays
  unsure (1)..(443): unsure at all n locations
agcttctataaggagaacacgtgatatgtctatttaatgtccaatncgaaaaagatagaccttgtgcagcttgtcaagcaaggaaacatgtgggaggctctcatcacaccaaaaatgtgatgacgacatcaagaccctcggagatgctgcatatggactcttttggacccgccgcctatctgatcataggaggagataagtatggtttagttattgttgatgacgtttcccgcttcacttgggtgttcttttcgcaggaaaagtccgatacccaagggaccctcatacgcttcctcaggagatctcaaaatgagattgagcttcaagtgaagaagataaggagcgacaacgggttcgagttcaagaatcttacgtggaggaatcccttgaagaagaagggagcaagcatgagttctccgctccgtacacaccacagcaaaatg

SEQ ID NO: 43870 - DNA, 468 bp, Zea mays
  unsure (1)..(468): unsure at all n locations
gctccaggaagctacctagggcgggatcattgtgtgangacanggaatgagtcgtcctcggtcgggtctggccggtcgcggacaggtctctggagctatgggcgaacttctgtgagttcggcgcgcggctaaggatgcaacggggtaaacatccgggctctgggactggctttatagccgtggcgcgggcgtggtcacaagcagccgcagtcgctcgggagttcccgcaccggcgtgctctgagcgcgccccccagtgtattccgcgctgaacacgtgggagcatgcttctgccatgggttaacgaccgatttgagcccttagcgtgcgtctctcgggtaaaccaatgtgtacgggtctttacctgcaccatattctaccttatctatgcgacgtccatgccaagatactgtcgcggtagagagatatacgggtgagatgttgtctatgtactacttgttcaactcgg

SEQ ID NO: 43871 - DNA, 480 bp, Zea mays
  unsure (1)..(480): unsure at all n locations
agctcgatgcatattagatatcgtaacatgaatatattactacagatatgaattgagtttggttttgggtaacattaacataagcaaatgaaaaaggcatcaaagcatttcttctattagaaaatatgttcccactgtaccttctttcctcggatgaccactctatgttcaccttggatcaccatgtattttgtacctccaacaaaaagacaagctggtgcaagagttctaggttcatcaaagtccaacaacttcctcatcctttaacagcaacaagcaggaaacataaacatgagaactcagccagtcagtctaagagtgcttcatattatatagatcatagaaacttttaacagaagttcttaaaacaaaaaaatgtgtctaaacaaacaccataaactgaaagttacaacacaagtgcaccttttttgntcaatgaagaaatatctcattcaaaacagagagtctaagtgcataatc

SEQ ID NO: 43872 - DNA, 484 bp, Zea mays
  unsure (1)..(484): unsure at all n locations
tatntaaattccttgtattgcatctatggcttgtctaacctagntgagataaccgccaacaaagtgagtgaaaaagcttaactcgggtcaaacctgacaagtcttagtttttaagcttttagcacttaaattcttacttttcatgcaattattggttcttgaaatatgcatgaggtactgcacttagggggagtattcaaaactcaaatctttcttgaaaacccctagtgcaagccaaaatgcaaatttcaccatttgcctattttccctaaaaattatctagcctatggcaaaatattttgaaaagtatatgagggtgccaatacctgtcccaacaagtgttattttgtgtgattataagttgggatttggttgtgtaggagatagatagaaaaattcacaattttccaatctcccctctgtctgggctcaccggacagtccggtgtgaaccggacactgcactgtgcaatgtccggtgcacc

SEQ ID NO: 43873 - DNA, 261 bp, Zea mays
  unsure (1)..(261): unsure at all n locations
cagcaatttgagcacgcaagctgctataatggtaaaggacgatgaacatgcttcataaaacagaaaatccactcctgagccgaatgcggcagctctgaagaaaaggaaggtngaaagtccacagccgaagataacggatgcaacataggagactccttcgacgcctcctcgtgccgaaatagcagaaattttaaagggaatgactgaatcgttacccatcaagctgctaagtcctcttgggctagaactgacgaaactttt

SEQ ID NO: 43874 - DNA, 459 bp, Zea mays
  unsure (1)..(459): unsure at all n locations
tgcgagacctttctccgtttctttctaactatgtgtaatgcaatatcgcatgtcatattctatgcatgtttaatctacatgttctcttgtatggtgtactgttggtttcctaatttcaatggatggatgtatgtatgtttgtactcgcatagagaacgatttggttgaagagcccgaagaactcgcaggagaagcccctgagcagcagtcggttggtggaggcaagtgtcccttgacctatctctgtcctattcattctttaattcacctcccgcattacacatttatacctaaggatgtactagctcttgttatccatgtccttgtttacctatttgggttggattattattgtttagctntatgctattgctcaactctaatcaatgaacatgatgagatntatcaatgataccgatgtttcccctcttttattatgatgttatacttgtggccttc

SEQ ID NO: 43875 - DNA, 407 bp, Zea mays
  unsure (1)..(407): unsure at all n locations
tacttcggctgatcagccgaagcccatgctcttatgtgaggacataccatagcagatggtgctattgtgatctctattgtccgaagagcaggagaaaaccttgattaggttnttgttcaacaacaaagatgtttatgcttggtcagctaatgatctttgcggagttaacagggatgttattgagcactcgctcaatgttgatccatccttcaaaccaagaaagcaaaggcttcggaagatgtcttatgacaaagccgaatgtgctcgcatcgaagtgaatagactcctcagtgctggagttatcagagaggtanaatatccagaatggttgctaacactgttatggtaaagaatgccaatggttaatggagaatgtgcatcatttactgatctcaataatgctgtcc

SEQ ID NO: 43876 - DNA, 492 bp, Zea mays
  unsure (1)..(492): unsure at all n locations
ngacgactgccagntcgacttctagaagcagttctacgttgtcgcatgtgctgctgtcgacgacaagctccgtcgcagccgccgcttggacgcggtccagagcggctgcaccgtgctgtccatagtcaagcaggggggctcaaggtcgtcgccaatgtcggcgactcccggattgttctgggcaccacatccgacaatggcaccattcacgtcgtccagctcatcgtccacctgtcacacccgagttttagggggcaccaaacccgggcgcgaacttcaccaagtgtgtggtagtaccaagtctcacacatatgatgactcatggtatagaaacgagtgtcatatcattaatataatggagttctgtacaaaatagataaataattacaccatacgaagacaatgatccaacaagcatagttgactgggagacgacgacctagaccactcacgaactcattacagtgtccttcgcgcgcctcatcctgtgga

SEQ ID NO: 43877 - DNA, 421 bp, Zea mays
  unsure (1)..(421): unsure at all n locations
agcttacccatgacgaggcatgtgaccagttaaagggtcctcagtcagcatgcccacatcggcacggtccttaatcgactcagacagagacactacaccgagactcctttctcgtgcaagtcaaccgcccggtctcagctttattattttcaacccanagtctggtacctggcagaggtacatcttttccgatgttgaacacatcaaggccttgatggatccaccatcacaagtttttctttttgaaaacattcccacccactgaagcatcacttttgttttaaaaaanacattttgttagctaaagcaaggctaagcatcataaaattcttttcaaaaagggtatcaaggaagggtaatcaattttccaaggaaggaaatgcatcaacggtttagcacacaactcctatcacctaatgca

SEQ ID NO: 43878 - DNA, 460 bp, Zea mays
  unsure (1)..(460): unsure at all n locations
ttcttcattccaacatgggcaagtcggcgatgccagatgccacccatgttagtcttagcaattaagcaagtgtctagttcagctttgttatcattaaaatcaactaaatatagatgaccatctaacactaccttaaatgctattgaatcatcacttcttctaaagacagtaacacctacatcagtaaatagacagttgtagcccattgtgcataattgagaaacagaaagcaaatcgtagtctaaagaatttacaagaaaaacattggaaatagaatggtcagaagatatagctattttacccaaaccttgatttccatccatgaatgtaatagctctttggggatcttcattnttctcatatgaggagaacatccttttcttccctatcatgtggttggtgcacccgctatcgattatccaactngaaccacggatgcataaacctacaanaaacaaat

SEQ ID NO: 43879 - DNA, 434 bp, Zea mays
gaagtcaagcctctcctggaatagaagtagtgtagtactatcacgcacgaagctcgtttcatttgaataaacaactgggcaatacgccttatccctttcagaagcacagctcatttgctttcccatcgaatctgatagcttccctttccccttctccgtgtagataaattgatgtctctgtatgaacactgtgtgaggcgactagtatgaaccctgtgtgcggcgactagacgtattgaacatacttttttgttcttccagttgactcagcatgacttgaacagtctcaaattgtgtgtaaaggatttactcgctagcagttggtgtaatggtggcaggaatgatgttcttcatgatcagatgagacaagataggaccccctcattctaatattagagactctactatggaggagaggatggagatacgagtac

SEQ ID NO: 43880 - DNA, 346 bp, Zea mays
acttgaactcctcacacgctgcgccctgtgcctataaatagtgaacagtattccgctactgttcacagattctggtatttgcaatcgcatctctcggaatacaacctttgtcaaggcataagtattattggtatttaatgattcaatatattaaatgaatatgatttgatgtatctgtgagacatttatccatcttatatctttcattttgtattatcttacaatgtttattgcaagttcattacgaagggtcaacttcgtaatgagactctcatcaaccttcgtccaagatccattatcctcaaaggaataatgcttcatggacgaaggatagtatcatctaaca

SEQ ID NO: 43881 - DNA, 469 bp, Zea mays
  unsure (1)..(469): unsure at all n locations
gaccttaatgactgagctgcaacttaacggaacaccgaagctgcactatctttctgtattaaatgncaaggacctgaggattgtcatgaataggaaacaatataagaaaatcaattcctcttccaaagccttaaccgtgcctccatacaaggtaacatccaaggtaataatcaaaccacacttcacactatgaaaaataagaagtgtattgaatgctttgaagagggacacttgattaagtcatgtccctacatataaaaatgcttgattattaacaaggatgatagacgttgttctaagtgctcatagaatggacacttaatcaaatcttgtccccatttgaaacaagaaggcatagggntagaaaagaaagttttactaaccatgtatcaagcaacacacaatgaaagaaggtatttcaagacttaaaaacgcctatgctacacatgtcggaaaaaggacataatgc

SEQ ID NO: 43882 - DNA, 423 bp, Zea mays
  unsure (1)..(423): unsure at all n locations
agctgaaantagctgataagaagaactaatttattatgctatatctcgcggataccggccgggagcgcttctctttggtggcattgatgacgaaaggttgggctgcgtactatatcagaccggcgcgaaggttatcggtactctatcatagagtatcggtttcccgaagctcgaaacagatatcagccgctaccgacgacaacacattgctggtagtttattttattccaattttaaggtaaacaacttttgtctaactcttattatttgtaataacatatatgttttctaacgaaggctatttgttcgcagagcatgctgttgagcaaggctttaaaaatacagcatgacatataggattaaaagcacgaaggtataattgagaacttatagaacaagataaatgagcaatcagttgctatt

SEQ ID NO: 43883 - DNA, 306 bp, Zea mays
  unsure (1)..(306): unsure at all n locations
acactttgggatacctgctttggcttttgttctcgatgttcttcacgattgcgagaaattttcaattcagtcggagcagtttcagaagatgccaattattctaccaacaacattccaaaaacgcttgaatgggttgagaaagaaattactgattttgaccaagttatggtagggcatggcgactnttatgctctattggctacccgaggaactcctttcatcttcgcttaagtcggatgcagccattngaaaagcgtcaataaacctaccttcaacatttctctaaccaaatttgataatatttct

SEQ ID NO: 43884 - DNA, 460 bp, Zea mays
  unsure (1)..(460): unsure at all n locations
agatgtctcactgctttgtttcgaccgaattggggaaaatttgcaattcgcgagctacggtggctaatccgaggcgagggctggtgcactgggcacgtaacaacctaacagagctcactggggcatcaatntatagagtccatgaacggtgactacgaaattaaggagagaagctggtggccgangagaggggatgagtcactgtggcgatctactgtggccttcactggacaaaggcatatgactatcactggttagcctccacggctcanagcaacgtggtaaaatagcctaatgtgtggtgcgaccgactgaatggcgtgagccacgacgacgaccgcacagccacgtcgtcggcaagtgggtacagcgacagggcggccacagtaccccaaactcatccatagtgaagatcttttcacttgcganggtaatccactcattcgaagcacgaatcatg

SEQ ID NO: 43885 - DNA, 413 bp, Zea mays
  unsure (1)..(413): unsure at all n locations
agcttgtgagtcatattccttgtttcctactcttctttctcttctctctntntaaaatgaagggaccgtcacatccaatgcgaaagatgaattatgcaacttatttcacaaactaaagcctttaatttttttggctagtcaaaacctacataaaaactatctatatgacaatattgctttgatttaagtatgttgctctctctaccacaaagaaatatgtcgtctatgttccaaacctatccactatcctaacaactaaactaagaaggtaaagtatatagccaaggtacataatataaatgtggaatcttaaaggcgatagaaatacatactctcaacgatgactccattattttcatcaaggggataatagcacacaagcttcctcctaatccatgttggagtctctcata

SEQ ID NO: 43886 - DNA, 400 bp, Zea mays
  unsure (1)..(400): unsure at all n locations
gtcatcttcgtctatgccattgaatactaaagccccctttggatacttcaattctcgggcatagtgattagcctcataaatctcttctttagataatctttntcccgaagcatgtcgtacaatataattgaaggctttggacgatgcttctgtgcagcaataccagattcttcaaccaaaattggctctactatgtctgtttcttcgggttccaaagatttcacctttgcaggctctgaaggcccagactttatttctgtctgggtctttgagcttctgaacaaaagcttagtgtgcacttcggaagttcaactatatcttcgagtatgcttaagactaattgtttccaacatcacacattaacatacttttctttggggcactgtggacctttgctttt

SEQ ID NO: 43887 - DNA, 426 bp, Zea mays
  unsure (1)..(426): unsure at all n locations
agctatactcctaggttcaatatataatatttgttttatggagcatgcgtttctaattctattatgaaaacatcacatgtcaacaaagtttcaatgaagtgaagcttctatgatactgctggtatgctttcangaatacatataaataaatagtagtattgagccctctactcctactgttgatttgttcaagaaatctgaagctaccagttcttgtcgacattgttgtcatttgtaaattaagcagcacacacatggatgtacacgaaggaatgaaggaaggggataccattattgctctcctcgcaagggggtgcattgcatcgaacaacacacatgtgggtgtattcactctctttgtgtaacaacattctctctatacgaatacatgacagtgttgtgacgtctactatctctgatgttaat

SEQ ID NO: 43888 - DNA, 178 bp, Zea mays
atattatgaaaaatcctcggatcctgtcaagaagctgatagatagtttcgcacaggtgggtgctcaatcatccgagcaaaaatttattataggtgatcccgacgggagtatcgaatgcattggtgaaaaatctgtagctttctaggagaaccttactgatcgcggggatttctgcgcc

SEQ ID NO: 43889 - DNA, 484 bp, Zea mays
  unsure (1)..(484): unsure at all n locations
agcttagctaattccactaggctctncaacttataatcaccataagaattcttgggactaaaagcagccatgtaagtaataagaggaatttgtttcactgaaacgatcattaaactcaataagtagcaaatcaataacagggttcaaacagtcccatctatagtgctgataatatgtgcttccatatttaaaagggttcaaactttttccttagtttatgttgatcaatatactctgcttccatatataatttagggatatngtgttcttcacaaaaggaatatatttttgtaataaagaatcccatccatcatctctaatcttctgaaatttttgtttcgttgactccacctctaacatagctgccaatatatcttgtgtgaataaaatattcctctttcgcaacatctctctgcttataaggccaacaataattgattggtctggcttagtannaatgtacaccttctcacagcagcattat

SEQ ID NO: 43890 - DNA, 345 bp, Zea mays
  unsure (1)..(345): unsure at all n locations
atcaagcaactcctatcacttaatgcagcaatcaagtgagaaagattctgaaatagcaagggaggtggcaaatgcaccggggcttgccttcgntaacaggtgattcangctcggatccacagatgtcgaagtagaaactattcccggcctgagtgtccaaaggtggttgtacttgctcttcggggacttctacctcttcttcacgttctactcataaccatacataagtataagaatggatgccatgggatgctcatgaggatgcanagataacataaacttattagttatgtctcgaatacaacttgccttcacggagttccgggaacttagggtttccggagt

SEQ ID NO: 43891 - DNA, 445 bp, Zea mays
  unsure (1)..(445): unsure at all n locations
agctatgaatggacgtttactcaagcattatcttttctttatgnggcangaagcttaagaaaaccgatgtgatcacatcgagttaagatgcttttggtttgcccagctccaccaaaaggcagggggcatatgtttggcaccaaaatgagcgtgcggacggtcctgccctgaggccagacagtccgcaatctggacagtccgcgcctgtgtgttggacggtccgtgcgtacgtataacatattatggttccgaagtttgtgctacagttgttaactatattcgcgaattagctcggaatcagttgtgaaagggtccagccccctcctttataaaaagagatgtctacgaccgtataatcatcatcaatccaatcaataacacttctaattctcattgactttctaggagtaggttaagtcttagtttagatgagccttccgatccc

SEQ ID NO: 43892 - DNA, 282 bp, Zea mays
ccccttgcgaccctgaagtgtcgtttgaagcgctggatgatgacggccatctcttcatcattgagcccggccgcctcaacttgcgccacctcgctaggtagcgcctccttgatcctcgttgccttgagagcaatgggttgaggctcatggattggaccgttcaacgcgtcgtcgacatatcttgcctccttgatcatcattcgcccgcttacaaattgtccaagatcttcttcgagcgacatcttggtgatctaggattttacggatattgtcaccaaatgt

SEQ ID NO: 43893 - DNA, 396 bp, Zea mays
ttataatatgcttaatcaaaaaaaaatattctagaggttcgaatcttcaagttccacaagggatgtaagagtattttgtaacatacgctatgacctgtcgctagcagcatgtcacgaattgttgactcccaccatcgttattctgttacatgaattatgatagaattcccaaactctcaggaactgcaggcagtgcagactcccagctcatactgatgaaccagaatacacagtgcatagctggaagagtataagaattaaggttgccgaattcacagcaccaaatctggttcatgtacaacatgtgttgttggcataatgacgctagcactggacaacacaaatacaaactcgttgtgcttagctcagtcagcacctgagatctctacaactaac

SEQ ID NO: 43894 - DNA, 363 bp, Zea mays
  unsure (1)..(363): unsure at all n locations
ggagaacacgngatagagttaactaacgtgcatttttttaagaaagaccttgtgcagcatgtggagcatgttaacaagtgggaggagcacatcacagcaagaatgttgtaacacccggctttaaggaacaaagccggtgcatcttatacatgcgccaagaagacaacatatttaataacagagtgtatagagataaatgtcatataacatcagagtaattattacatagcggaagacttattacaagataaatattaaacgaactatagatcgtcggcgccaatgtcgactgaaaaacgcctcccagatcacattgaactccttagtgttaggcggctcctcttcaccacctgttcttctcct

SEQ ID NO: 43895 - DNA, 428 bp, Zea mays
agcttatgaaaattattcatcccaacattgcttttctgcggtgccagagccaacccatgttagtcttatcaattcagcaagagtcaagctcagctctatcaaaatctactaagtatagctgaccctctaacacatccttaaatgctactgagtcatcacttcttctaaagacagtaacacctatatctgtgaaaagacagttgaagcccattttgcataattgagaaacagacagccagttgcgatctaaagaatctactatagaaacattatatatacgaaggtcgtgagatatagcgatattacccaatcctttgaccaaaccctgatttgcatccccgaatgtgatagcttgatgaggaacttgaatcttctcatatgaggagaacatactcttctcccctgtcatgtgagttgagcacccgcta

SEQ ID NO: 43896 - DNA, 441 bp, Zea mays
  unsure (1)..(441): unsure at all n locations
gtatggacgacgtgcggagtaagctattgttatggagccgnnacgccaccaaagtgccagtgttataatgtctggtcccgacgttgatctgcgccaaaaccgtgtcaatggattggttgattcaactttcccaaatgtgtcaaggtaattcggcacgactttgatatttggatcttctggctttgagtttggaaaagcagagaacacagatgatctttgagaagaggtctgaaattcacaaattcagaaatctgaatttttctaacggttcattgatcaanggcctgtttgggatttaattgagctattttggctaaaccttcttaatctttcttggtacttagtaaatatactntaacttatataattggctcaactcacaatttaaactcttcattctctttttcacattccttgaantttgtcatggggtcactaagg

SEQ ID NO: 43897 - DNA, 434 bp, Zea mays
  unsure (1)..(434): unsure at all n locations
agcttggcggctttctgtaccgctcatgtgattattcggnagggcttcacagcgcgccgccatctgtccactcctcggcgaactctctgcgtgcgtctacgtcggcaacagaggtgatagcgcatccatgaagtttgtattttaccttctcaatgtgttgcgttggttatcattaagtttgggccgtcggccgaggaatggctattggcggctatggcgccgtcctggtggagtctgtcttgcgctcagcgtagggaagaagatgaattcgtggccacagatcttcgcgatgatggtgtggattacacgaaatggcgaacgaagtcggaccgtatgatggtaatcgaatggcatagatctaatttctcataccccttgcacgatctaattctgaccgcagatcgtgatgcaactgctcacattcaaccgtcccc

SEQ ID NO: 43898 - DNA, 467 bp, Zea mays
  unsure (1)..(467): unsure at all n locations
cctagatctgatgcatgagagtgtttttttnggngcagaatatccagagtaaacccctctttggtgttcatgtgaaagagcccctctcgaaaaaaaaaatatctgtgttttaaagatctggaaatgatatacacttacatagtaataaatctattgacgtatttgttgtaaaagtattgagatgcaaactcagtttagtattcgtatggaattgataaatttcatacgcatatataatagtactccttatttgtattggttggtacgtacgtaattggtagttgcaggtacttagctttatttatttatataggatctattcgccgaaaagaggaccatatttggtcaacgctaagatgtttattcttttgttccgaagcagatatatgagttgtaatgtgttggcatgatattagtcttattactgcatattctccctgtggtgcatgcaacacaaaagtatcgat

SEQ ID NO: 43899 - DNA, 232 bp, Zea mays
  unsure (1)..(232): unsure at all n locations
agcttactcctccctgagaagggccgttcatcatcgtcaaaattctgaagcccgggacatacaagctggccaatgatcaaggcgaggtctacagcaacgcttggaacatcgaacaactacgtcgcttctatccttaaaatgtttcaagtcgctcatgtatctcgctttctttacatgcataaataaagtctaaccgtcaagggaggatcggctttnntcttataataaccga

SEQ ID NO: 43900 - DNA, 455 bp, Zea mays
  unsure (1)..(455): unsure at all n locations
catccgcacatgtgctaagcggctatgttacagccagcccatgctagtcttagcgattaagcatgcatctagaccggcctcctcttttgcaaaatcaactaaataaagtttgccgtctagtacacccttaaaagctagtgaaccatcacatcttctaaagacagacacatctacattagtgaatagacaattatatcccatattgcataattgactaacagatagtaaattatatccaagagactcaactaaaaacacattagagatagagtgctcattggatattgcaatcttgcctaaacctttcaccttgccttggttcccatcaccgaatatgattgaatcttgngaatccttattcttgacgtaggaggtgaacatctccttctcccccgtcatatggttggtgcatccgctgtcgataatccagcttgagcccccggatgcataaacct

SEQ ID NO: 43901 - DNA, 465 bp, Zea mays
  unsure (1)..(465): unsure at all n locations
agcttngtanaaacatgcttcaaggctatagtttatttatctaatatgtggctccttgtgatttggcatgatttgcccccttcttaaagcgttttcccgaagattgatatcatatttctttcttatgccacatgcagtatgatgtatgatgcttatgttatgcaaagatgatgtgatgatgttatgctatgtaaggtgatattccgaaggtacacgcatatctgcgcgataaaacacatactctttttgcgaaccagcgataactttttgctataagcctcccttatgagcttcttcgccttttacttcagcggaatcagcgttgacttttcgctgtaagctctgcattcccttatgaacgtctntggagcttcttcgccttttacttaggcggtatcagcgttgactattcgctgtatgctctgcattcctttcggaacgactntgggagcagaaacttacact

SEQ ID NO: 43902 - DNA, 404 bp, Zea mays
  unsure (1)..(404): unsure at all n locations
ttggacggtactccgaagcggcaaacaatggtttgccaaagggaattttgggctgtctttgatgttattgtggagacagcccttgcctcgatccatttggtgaagtattcgacagcgacgaaggcgaacttaaggttcccctgagccgtgggtaggggcccgacgatgtctaagccccagcgctggagaggccatgtgtgggcgatcagctttgtaaattgcgaagggctgcctgatcgaggggaaaacttcttgcaggcttcgcaggaccttgtgacccgatttgcggcgcagatcattgcgggtcaatagaaacattggcggatcaccttagcagctatggccctgngccctgcgtgagagccacangtaccactgtggactttgcgtangatcttgacacc

SEQ ID NO: 43903 - DNA, 383 bp, Zea mays
ttctgcttacattgttggttaaagtaaagatggatgaagctaacttcaaaacccaatctaaagcccaaaaaattgagattgaagaccttcgggagcaactagccgaagctaaagagaagtgcgcagtcgcagaagctaaacgaggaattagcgaacagtggacaaatcatctaaagaaaaacgttgaagaacttctcatatccaaggaaagattgcttgaaaaatctatggactgtgtgaaaaatataaaaactagcttcgccaacgttggcgcatattcaagcatggacaacttcataagaggcgatcctgagggcccaattgagtggatcagcagcgaagccgaatgctttgatggaaatttgagtgaccgcggggacgtc

SEQ ID NO: 43904 - DNA, 455 bp, Zea mays
ctctcgcgagagctttccccgcctcttctaaccatggttatattattactggatgcgatattctatgcatgtttcatctacttgttctcttgtatggcgtattgttggcttctaatttcaatgaatggatgtatgtatgtgtgcactcgcatagagaacgatccggttgaagagcccgaggaactcgcatgagaagcccctgagcagcggtcggttggtggaggcaagtgtcccttgacctatctctgtcctattcattatttaattcacctcccgctttacacatttatgcctaaggactgactagcttttgttatccatatccttgcttacctatatgggttggattattattagttagctttatgctattgctcaactctaatcaatgaacatgatgagattatctatgatacgctcgtttcccttctcttattatgatgttgcacttgtgg

SEQ ID NO: 43905 - DNA, 468 bp, Zea mays
  unsure (1)..(468): unsure at all n locations
agctgtttgtcttctccaaagactccaattacttttttatatatctatgactnggntggaaatgcacttgaagacacattaggtatagcatatgaaagatacatgatcaaaggtatatagaacagatatgtgtgcaaatcaacaaaagaagttcctataatcaagaatatttagctcatgcctacagttgttaaaagattgttcatcaagtggcttggtaaagatatcggctaattgatctttagtattaatgtaagaaatctcgatatctcccttttgttggtgatcccttaataagtgataccgaatggctatgtgcttagtgcggctatgctcaacgggattatccgtcatgcggattgcactctcattatcacatagaagaggaactttgggtaatttgaaccatagtcctaaaggttgctcatcaaagagttggcgcaacaatgtctgcggaataactctgtt

SEQ ID NO: 43906 - DNA, 483 bp, Zea mays
aggctaaaccatccatgggctaggacatattatatttactccaagaacagatctcactaggcactcttgcttcttgtccaaagatcaagtttcccttgctaaacttgctccttcttctaaagttttaatccacacgtgattatggatttctaattactccaattagggactctacaaggatttctgagaaaatggcttccaaacagccccaaatttataccacatactcaaatgactaaaataaggttactcaaaaaattctataattcttggctctgtatttttatttctaaaattcaaacagttcttccaaaagcaccttcaattcacttaatattgtataatttctctaaaaatcctaaaaccaactttaccagagatctcatgaatttagacatccaacacaattgtcttactattgtatctataatttctgcacaacttacaggttctctgttaaagaaaagacacaccgtgacaatt

SEQ ID NO: 43907 - DNA, 210 bp, Zea mays
ccccccagaagccatagggagaagtttttttcgacgttgtcgggcatgtggagcagtgagtctcatcccaagacaatacaccgcggcgtgtctccacaggacatggcgatgtactacatgcgggagatgctgtaatggagaatctgctcctgagatcctacagaaaaccaccccaactaggatctgacgctaaagagcgcaggtccgaac

SEQ ID NO: 43908 - DNA, 442 bp, Zea mays
  unsure (1)..(442): unsure at all n locations
agcttctaaagggagaacatgtgatatgtctttttatgtactntcgaaaaagatagaccttgtgcagcttgtcaagcagggaaacaggtgggaagctctcatcatgccaaaaatgtgatgacaacatcaagacccctggagttacttcatatggacctattcggacccgtcgcctatctaagcataggaggaagtaagtatggtcttgttatagttgatgatatttcccgcttcacttgggtattctttttgcaggataaatctaaaacccaagggaccctcaagctgcttctaaggagagctcanaacgagtttgagctcaaggtgaagaagataaagagcgacaatgggtccgagttcaaaaaccttcaagtggaggagtatcttgaggaggaaggaatcaagcactatttcttcgctccctacacaccacaacaaaatg

SEQ ID NO: 43909 - DNA, 387 bp, Zea mays
  unsure (1)..(387): unsure at all n locations
agacacttgaagagatttatacgaatcatccaaggccttaaacttttctttctctttgtgcatgtagtcgtcgacctcacccaacattttcactagatcatcataagaatatccatcatcatcaacatcattcaagtcatgaataacttttaccttcgtgtcactttttgccataaggaaatgtggagatgagaagagtgacaacgcctccttgatgacaatgccgacattgagcttggatgaggtatcatcattgtaacacccctggtgttactagaactaanacttggcatggcatcatgtgcattggcatctctgtgacggtaatgaacctagagtggatttactaggcttaagagaattaaatgtgatcatgtgagtggtagc

SEQ ID NO: 43910 - DNA, 485 bp, Zea mays
  unsure (1)..(485): unsure at all n locations
agcttgtcagaacatatccttgagcttctttctttaagtaatagnccctggtcgaagagaagaataccatgtttgtgccacattccgaactgccatgatgaaagatatggccatgacagctgcattgcctccatatgaagatatggtttcttcgtaactcataaaaaactgcttcggatccgaatgcccatcatacatagggagctgaggtggcttgtatggtggaggccatgggatagcctgcagttctgctgccaagggagaagcatcatcacagggaaaggtatcatgattaaaatcatcataccatccatcctcattgaataggccttctcgatgaagctccctgtgttgaggccttcgatcttgcttgtcttgagcaagatggcgtacttcttcagtggctacgtcaatctgcctttgaagatcagacagncaggccatcttctccttctctctttgacttggtgagggatatcttcatg

SEQ ID NO: 43911 - DNA, 399 bp, Zea mays
ggagagcacattgtatgagtaacgcatgttcattctgagaaagacagggtctgtagcgcatgccaagcatgaaagcaagtggtgcccatcatccacacaagaacatcatgacgaccgacaggccgcttgagctactccacatggatctattcgacccgactgcttacataagcatcggcgggagtaagtattgtcttgtaatagtggatgagtattctcgcttcacttgggtatactttttgcaggaaaaatcccataccctagaatacctaaagggattcttgagacgggctcaacatgaggtctgcttcaggatcaagaaaattaaaagcgacaacgggacggagttcaagaccctacaaattgaaggcttccttgaggaggagggcatcaagcatg

SEQ ID NO: 43912 - DNA, 395 bp, Zea mays
  unsure (1)..(395): unsure at all n locations
agcttgcatatatgtcctacaactgtcctatattgtaatagtatcacgcnngagcatcctatgcagaactgagaacaatactgttaaggacaaatataaaaatacattgactacgataacaaaaagcaaacgtaattgcagctagtgattaaatacagataccttattacatgtcatcaattttttcctcaaatatttttttcatgaacatgcaagagagtggtgtatcattataatacaaagggtaaagaatcctgattaaactcacatacccataggctcacagatggcatatatgcctttccacatacgtgaacaaacaagatggaacgatctcttttctcgatcgccagaagaagtgtgctcattatataaaaaaaggggccaacataaac

SEQ ID NO: 43913 - DNA, 385 bp, Zea mays
  unsure (1)..(385): unsure at all n locations
aaataactacgcgctggtgagacatagcgtgtactcttctctcatgaaccgggacttggcgcgacaacggtgtggtcatgagcagctaggcaatggcgactagcgacgacatcgtgctctacgacagcaagcagaaggtagtagtgggcgctaggggctgggcagggagcatggcacggcaggagtggagcttcngacgtggtgtaaatactgggcgaggcacggcgtgacgtctagcaacatcgcgcgcgaagcgagtaacggtgcggctttgcgtggcgacgcggaagaccacgcaacggagtgcggcgaggatcttcgatgaggggagaacgtcgactgttgttgggacaacaatcgatggggcggcacgacatggtgcggc

SEQ ID NO: 43914 - DNA, 447 bp, Zea mays
agcttatgccgagatataaaatatgggttagttaatattgatatcatgcttatctagacatgtggttaaatatataataatatcggcttgtgtagtgaggtggtgacatgccgaagtagtcatcacttcctctatgtatttaagtcaagtcaaaatgcggggtactagttgtacgctaggcaggctgtgttccaaatagataaatcgggtgatgtggtagttgtcaagcatgatagaggctgagtcacttatgttataaattgatgctcgacatgtgacgtcttctaatatatggagctttaagtgacttgtgcgtcgccagtttaaattgagaaaatggttaagaaaaactaattaatctgctcccatctatgcttgtgagttgcgaagtctaaaatactttgctaagcgttatactggttaacaaacttgatagatgactttagt

SEQ ID NO: 43915 - DNA, 475 bp, Zea mays
  unsure (1)..(475): unsure at all n locations
ggcagcaaaatagtgcaatttctttgaatgttgtggtaacttcacacctacccgtctgtttatatagtgctgcaggtaagaaggtgaatcgtcaggatttttacaccaggcaaacagctgcttacacccgctgcgtggtggaccacagaggccaaatagtaaccctgcagggtgggaccgctacgcgctcggaaactgaatcgtttctcgacaacgagctcagggaaggtgtttttcggaccttcggcttcctgaagcctaagagacttttntcacggatcaagctcattactgaaaatgatctatcaccgcgaaggggctactgttgggatcatgcttcgtcgtcgaaggtcctgcaggaagaaacagcttcggctgaagctgtctgcacgtgatgaccgaaggattgctgtcatgaagctttcgattacaaaccgacttatagtagaatgccttctagtcataagtgttgagt

SEQ ID NO: 43916 - DNA, 118 bp, Zea mays
gttggatgtttgtacctaaatatggggaaattgaagccccgtgcataagtgcgggcaccttgggaataccggtcgcctgcaagaaaaagttctgacgctattgttattagcactgaac

SEQ ID NO: 43917 - DNA, 311 bp, Zea mays
atgaaaacttcctcttcttcagtagttctacatttctatccttagtgggatgtaccatagtataggttaaattccttgcaatatataatgttcaatgatgcataaaactttgacatcaactatatgtatgcactaatttaaaggaatttaatctatccttttgggttctaagaatgatgattcattggcgatccacatataaggatcatcatttgtgaaaccctctcttgtgtgtctaatgctctcttttctaagatgttcaataacgtccttccaagtgttttctagatggattcaaaatccacggatat

SEQ ID NO: 43918 - DNA, 474 bp, Zea mays
cttccttctttggcggaaatcatagtcagtctatatgtactcatccattttctgaagcagcttctctagagtttgtgggaggttcctagcgaagtattgagccgtgggctctggccgaagacccttgatcatggcctcaattacgatttcattgggcactgtaggcgctagtgctctcagacgcaagaaccttcagacatacgcctgaaggtactcctcatggtcttgtgtgaactggaacaaggcctgagcagtgactggcttcgtctgaaaccctttaaaactggtgaccaacatgtccttaagcttctgccacgacgtgattgtccctgtccggagagaagagtaccatgtctgagctacacttcggactgccatgccgaaggactttgccatgacagcagcatagcctccgtatgaggatattgatgcctcatagctcatcaagaattgcttaggtccgagtgccatctg

SEQ ID NO: 43919 - DNA, 482 bp, Zea mays
  unsure (1)..(482): unsure at all n locations
agcttggcgcgcgcggntacgtgtcctaaggcgtggctacctccccaacaatgatgggatggcccaagggaatcacggcgacacggtagaaacgctatgccacgcggcggagaaccgtcgaccggagttggagaagaaacgcaagccgcggatgtgctggcaggccttctgcgcggcggtttccggtgagggcacggngtcgccgcttaaccagaggtcgccacctcggtaactctntgccatggtgccaagaaactntactgcgaccaccgacgaccggtcacgccgcggtggtgttcttatcgccagcgaggtccaagaccttatcctctgcgcgatattntcagatgacggcaaacagtgctctgaattcaaaaagagcttgactgacagagcaacttggagcacgattttctctcaattntcagtggtaacatactccatgctctgcagcannaatgtagagctatagatcagctaca

SEQ ID NO: 43920 - DNA, 487 bp, Zea mays
  unsure (1)..(487): unsure at all n locations
gcttctttgggccgtaccgcgtcaccgagctcatcaatgatgtggcagtacgtctcgagttgcctccacgcgccaagcttcatgatgtgttccatgtcggtctcctcaagaaatgggtgggcaagcctcccgcgacaccaccaacgttactcgttgttcatcatggagccatcaaccctgagccggaacgtgctgtgcgcactcgcgtcgctcgcggggttcgacaggtgctcatccgctggaagggagaacccgcagcatcctccacatgggaagacctcgacgccttctccgccaagtacccagcgttccagctcgaggacgagctggtggtcgagggggggagagatgtcatgtacggcatcccctactccaggtgacgtcgcgcccgcgacatacgcatggcagccgagcatgcagcacaggaagcggctggccaaaccaattagccgctaggattaatgcaatanaagatatctagcctatt

SEQ ID NO: 43921 - DNA, 481 bp, Zea mays
  unsure (1)..(481): unsure at all n locations
agcttctaaagggagagcacattntaggattattttattgttcatttgagaaagaacaggattgtagcgcatgccangcgggaaagcaagttggagtccatcatccacacaagaacatcatgacgaccgacaggccgcttgagctactccacatggatctattcggcccgattgcttacataagcatcggcgggagtaagtattgtcttgtaatagtggatgattattctcgcttcactcgggtattctttntgcaggaaaaatctcanacccaagagaccttaaagggattcttgagacgggctcaaaatgagttcggcttgagaatcaagaaaattagaagcgacaacgggacggagttcaagaactctcanattgaagggcttcttgaggagganggcatcaagcatgagttctcttcttcctacacaccacaacaaaacggtgtagtggagaggaagaatcgaactctattggacat

SEQ ID NO: 43922 - DNA, 449 bp, Zea mays
  unsure (1)..(449): unsure at all n locations
atgaagtgcagtgctccagcaagcagccggtaggttgttgaccatttacaaagacacaaactcggtattccatcccctgaaatgaagtgtagaacatcccagttggtaatctatgctgttccagtaggatacaatgagatgatcatttctaccaagtatccgacatttatttcctatcctttagggtcaattcagttataagtttgagggttgggcttatctgagaggtgcctcagttagcctggcatgccactcaatgttcagttagctaccccaatcagcaggtgtcaaatgatcacactagaacgccgtgcatcanatagaactaggatacatttctacatgattntacactaaactatatgagatatnggtttggcactacacatgaagaagaagatgtttgttggatggtcaagtagtgcctataaagaacacctttatgtatt

SEQ ID NO: 43923 - DNA, 421 bp, Zea mays
accaccaggcagccgcacagagggaaagaagcgcgggagctatgttggccacgcatgtgaaatgaaaatgggtccggcatgtggattctgcccacaagcaaggttgtatcttctcttttcttctattttcttttcttatttcagatccaattcaaatcatgtttaatgtcttaattcaaatgtatgcatcagaaaaactccacatgatgcacaatttctacataatatttattattcagtgattttattcattttatttaggctaggttttcaacatgaagtacacacaccacattattattttgagtgtgtaggtggattaaaggtatattataacaaattcttcctttgttttgataggaacattcttcgatgtctactctgtattaggatgtaatttaactatcgttatgttatcatg

SEQ ID NO: 43924 - DNA, 304 bp, Zea mays
  unsure (1)..(304): unsure at all n locations
tagcctcagnctccactgccaccatcattgcaacctacttatactcttatccagcagccagaagggcaccaacattcacaacagcaacgtgacttcagagaggagtccgaagctcgtacagtaaacaacactgtaccagaatcgaagcacatttattgaggaatatcctactttctgaagcaactctgtcttttatatcgctttacctatttgtagaacaagtaatgaaaaacttagttttcaacttcttgtaataatgctgttaataccacaatgaaatatttttcttcacagattacgaagc

SEQ ID NO: 43925 - DNA, 388 bp, Zea mays
  unsure (1)..(388): unsure at all n locations
agcttatcaagtcagcttttcaacacatncatccccatgctatttggagactcctaggagaagttattatcaaaatactgaaggcggcgcagaagttaaataaccacacgtaattcagctctggagatctcttgaagagaccccctcacattagcacgttaaaatactttcttttcatgtttatatctatctaatgttgggtggagttagtataaatgccccttatgtctatgatgtaagacaactttngatatccttttatgatttgataatccaagtgattagcgtagctgagctgctgagtgcttactctacccttgttcttcttggacttatgaagagaattctctgggatccactagttcgttccttgcgagttctagtatga

SEQ ID NO: 43926 - DNA, 438 bp, Zea mays
  unsure (1)..(438): unsure at all n locations
agagcccttgattcttgctaaacctcaccttgatttcttaggccatcatatcattgagtgtatattctttagtcgagtaagacatgcaaaagtaccttcgtactcaggattctttgaacccatgttgttgcaggtgttggattttctgttgtgttggtgactaaaggctggtgggcacatcctcttatgcgtatatgtaaccctcatttattctttctgaggattgccatatgagctagcatatatttcaaagntgtaactcagatttctttcaaagttaaactactttggaatcacacctgtaatcactccgagattgaaagntgcaatnttaaggtaacttgtaacctttctggtaataaagaaatttccgctgcaaatgttggtgtgtcatttgtgtttacttaatcctgcgatcttggttatatgtggtttatc

SEQ ID NO: 43927 - DNA, 375 bp, Zea mays
aaccgacccgattatatgaattattgttatcaatagggaaggtcaagaaccaactggtccaattatttgctttggtcatatcggatgttgtgactgtgatgttgtgcctatggatgcttgaatattctgtatgtcaccatggcattgattcaattgatgcatatggtgatcaaataatattctctctacccatgataagaaaatatttgttccatgtccctgagctattggcggatgatgtgctaagctccaagctaaactgaaacaaaagaatataaagtgtggtataacaagatgataaatgaaggacatgttgttgcacaaactgagtaagattattgttccctatgtgctacctttatcaagagcttgatt

SEQ ID NO: 43928 - DNA, 337 bp, Zea mays
agcagagctgttagtgatgtgtatccttattaaaattgaatacctgagatgttataaagaatgttgacatttatagcttccaaaagtctaagactatctgttggatgttgaatctacgtggatatatgaggcgaagtttaatctgtccaaatctggcagagtgctgtatgcatttataccttctagtgggaatcaggggttgaaatgcgaacaggtgtgggagaaccaagtgtactacttttagcttgcaaaatttactgctagttggatatatagagagattgataaacttttctgtggctgtgccaaaattgatggctaataaaggattcaccct

SEQ ID NO: 43929 - DNA, 480 bp, Zea mays
  unsure (1)..(480): unsure at all n locations
gcttgtgaactacgaggaggcccctgttctatgtgattatntntggcatgcttcgcatgagcggaccactcggtttgctgcacacatgatagctggccagttgaaaccttggcatagcatcttggcggcgagggctctangtcccgagtgtgaaccgcatgttcctctatggacttctcgaaggagttcaatgccctcgaccgctgtgatgtatttgagcatatgtngacttattccccttttgtatagttgcccatctatcactacaaagtcatgacttctgtgcttcaatctcttggccttggcctagtcagcggagcgatagtgaccttgaagatgtaagggtatggttgcacgccactcttcagtcattattagatttcaaattctgtggccctcagagtcttgtgtgatntgtacgccttcacgatatcttatggccagtgtgctaatgatgtggaagaacacatctgatggctg

SEQ ID NO: 43930 - DNA, 376 bp, Zea mays
  unsure (1)..(376): unsure at all n locations
ctacatcagntcgggccttaatgcagtcagacagagacactacactgagactcctttctcgtgcaagtcaactgcccgatctcatctttattacttaaaactccaaagcttggtacctgacagaggtactattttcagatgttgaacccatcatggccctgatgaattcaccatcacaagtcttttctttgtaaaaattcccatcccatatgaagcatcaccttttgtttaaaacaaaacattctgtgttctaaagcaaggatgagcatcagaaaactttaagtaaattatgtaacaaggaatggtaatcagttttccaaggaagcacatgcatcaattgtttaacacacaactcctatcacctaatgcatcaaag

SEQ ID NO: 43931 - DNA, 482 bp, Zea mays
  unsure (1)..(482): unsure at all n locations
agcttagcaccaacagattcctttaattatatatgngttcagctcgagatctttgtctcttgaaggcaaacaatggatgcgccacgtggatagaatgtatgccttacgctttctctcttagcatggtcatttaacccccgcacattccaagagaaaatagtgcattntggattcataaagtaataaaaaccactctaattgagacagaacgaagccaccaatcaaatcccagccaggaaccctgctgcagcaaaccaacagtgaataataatttcgaacaaggattcgtcgaactagtacaaagcccagaaccaaaggacaatctgagagtacagggatacaaaggcatgccanggaccctatatcactgcccagacgcgctataactagcagaaattaaatagaganaaaagggtggggtggacccggaaccgcgccaaaagcgcctagccatctgaggaaacattgatcagcataagaac

SEQ ID NO: 43932 - DNA, 425 bp, Zea mays
  unsure (1)..(425): unsure at all n locations
atttgtgacagcttcactcaatagggcgattcacaacgcaaatttcatgagcaattntttctctatggatatgattcaaattcggttgttctagcattgctcatgcaaagacacgaagagtcagttcattgttatcttcggagatttcaagacactacaaaaccgatattttcatgtccatgtcggagacaaacatctagtagagttggctttcaatggggtgtgctcatacttaaaagtgaaattagatgacatcgagtgtttctcactaactccacttcattcaatggcttctggtcttgaaagcaaacccagaaaccttaaaactcacttcgcataatgtacacattgtaattgtgataaagtagctttgtcatcaaacacagatatgtatccactgactctacttgctctgcttgtaccca

SEQ ID NO: 43933 - DNA, 388 bp, Zea mays
  unsure (1)..(388): unsure at all n locations
ggacttaagcacgagctgcacttactatttgcaaagataaattttcctactaatttgnntnactatgcaaatgaagagaacatggatgaaagattagctcaaatagttagctcaccgatcgagagcggcttccagaactatgtggccgtctcaaattgctcgttgatgtcatccgagtagcctgttcgtttgtgtttaattcgtaccgtcttctactatttctacagtgatgtatatgtattgcatctgccatagtctgaacaggtgactttaatctgaagagaacaacgtgtaaatctatcaccaactcntcaggttcgccaactacaccctgcagatttatacagacaaaatacaaggaatgatacgatcaaaatctcatacaacg

SEQ ID NO: 43934 - DNA, 368 bp, Zea mays
ctgacatctgcaccatgtgggcggagaatagatatgaacttccacaaattcatctgtttcacagcactgtgaaacgaagaacagctcgaatagtgagttgtacttaaagaaaaaagggaagcgtaccttagcattgaagtcagaatctaaaagtatgttagatgacttcagatccctatggatcactggtggactgcagtgctcatggaggtattctaattccctgcccacgttgagttaccagcgcaatgatataaactactgggcagccaatcatcagcacctcaatcttaaattcatcttcaggaaagtgcaggggtaaaatatatataacctggccatgtcgagtgcgatcttcatccggatat

SEQ ID NO: 43935 - DNA, 441 bp, Zea mays
  unsure (1)..(441): unsure at all n locations
agcttcatcaattccggtcctagcgggcttagcttattatgtagagattcggtcattacctctaaaatttcttctgcgtcagtggaagaaggtgttgagggaatttcttcttctaattcagcttttggcttcggaactgtagctattcttttcttcaaaacagccaccttcggctcagggctggattttttcttttatgctaaattttcatcttcttttaccattctggcagcttgcctttgcataacactgacagctcttttttgttttggacctttggcacctttatttaaccgttcatagtctgggtattcaaatttcagagcgtccattactcagttcagccttcgtttcggtcgggtgccgaaagctgccggcatcaatagatcttctttcttcgtataatngcgcaagatttcattgcacataacttcaatcgta

SEQ ID NO: 43936 - DNA, 480 bp, Zea mays
  unsure (1)..(480): unsure at all n locations
gagagagnggattgtcgtgttcatttgagctctttcgcttggattgcttcttctttctcattctttcttgagatcaaactcacttgtaaattgaggcaagagacaccaatagtgtggtggtccttgcgggaacttcgtgttccaattgattgagaagagaagctcactcggtctaagtgaccgtttgagagagggaaagggttgaaagagacccggtctttgtgaccacctcaacggggagtaggtttgcgaaaactgaacctcggtaaaacaaatccgcgtgtcacactctttattcacttgcgatttgtttttgcaccctctctctcggactcaattatatttctaacgctaacccggcttgtagtttgtgtntaagtttgtanattcagtttcgccctattcaccccccctctatgcgactntcaatnggtatcagatctcggtgcttcattagagcctaaccgctcgaagtgatgt

SEQ ID NO: 43937 - DNA, 471 bp, Zea mays
  unsure (1)..(471): unsure at all n locations
atctctaagtcacctgcngcatgcaacttaggacatgctgatcaccantcttttatgtgtttagtctttcaaacgaagccagtcactgctcatgctttgttccagtgcactcaagaccatgaggagtaccttcaggcatatgtccgaaggttcttgcgtctgagagcacaagcgcccacagtgcccaatgaaatcgtcattgaggccatgatcaaaggtcttcgactagggactatggctcaatactttgctaagaaacccccctatactctagagaaactacttcatacaatggatgagtacatctgggctgacaatgacttccaccaaagaaggaaagaagcctatagactcttctgagatgaaaggngcttcggaggaagaattcaccctaggcatgtcagatcatccacagctccagtcagaacgatgactaatgaggcctgttcagagtcacaacacagcttacag

SEQ ID NO: 43938 - DNA, 456 bp, Zea mays
  unsure (1)..(456): unsure at all n locations
actttcattttntatttgcaatttgggcatttccgtgggtactctttactttaattagaaagaaaagctattataaagaaaagncttcttttcgaaagattacccctgtctttgtttatgcttcggattggaacaaatgactctaattcacccacgcctgcgaatcagtcgacattntgtaccaaatttacgaacggaagctcttattttcatatatgggtattcctttcttaaactatgacttgttcctacacgacctgatcaaatcgatcaggcacttgccatctatcttcattgttcaactctttgatgacaagaaaagatgaaaaaaccaaaaaaaagctctgccctctcatctcngataaatagagagggagggcagagtcctctggtgtccctttcaggtaagaattgggacttcacaattactagcccatatttctctcatgcgctttc

SEQ ID NO: 43939 - DNA, 457 bp, Zea mays
  unsure (1)..(457): unsure at all n locations
agcttagcaagggcgagttctagatcattgaagtcctattcttgggtcagattataaaccgagagggattggctgtagatccgaagaaggtaacaactatcttggactggaaagcaccaaaagatgtccaaggaatcaagagtttcatcggaatggctagttattatcggcgttttatcgaaggtttctccaagattgccagaccaatgacagccttgttggtgaagaatggtgagttcaagtggaccccagcatgccagaagtcctttgagacattgaaagagaagttgacaatggcaccagtactgattctgccagatgttcacaagccattctcagtatattgtgatgcttcgtacaccggactgggatgtgtgttgatgcangaagggagagtantgtcatactcatcccgacagttgaagattcatgagaagaaatatcctactcatgatct

SEQ ID NO: 43940 - DNA, 392 bp, Zea mays
  unsure (1)..(392): unsure at all n locations
tcgctagtctgtgcctgcgaatgcgttgtgtactttgtctggagtgttttgttatgctgtgctggtgcgacagtcttcgcggtagacttcggcttttccgcatttgttgtgcttaatccggctgcacccttatgcgacttctgcgcggatagtccacgcggtggacttcggttttttcgcacttgttgtgctagtccggctgcacccttaggcgacttctgcgcggatagtcctcgcggtggacattcggtttttcgcacttgttgtgctagtccggctgcatccttatgcgacttctgcgcggatagtcctcgcggtggacttcggttntttcgcacttgttgtgctagtccggctgcacccttangcgacttctgcgcggatagtcctca

SEQ ID NO: 43941 - DNA, 367 bp, Zea mays
  unsure (1)..(367): unsure at all n locations
tgcagcatgcaagactaaagccanggnaatagcatatgccacttatactcttattggctcacacctaactacgggtgcataggtttcaccgaaatccaaaccttctactcgtgagtatacctcggccacaagaacagcattgttccttgtcaccacaccatgctcatattgcttgttgcggaagacacagttggatcctacaacataatgagtaagacgtggaactaaaagccatacctcatttctagcgaagatgtggagctcctctagcattgccaccacccaatcagaatctgggagtgctgacactatcctgtgtggctcaatagaggacacaaacgagtaatgttcacacaaatgggcaaca

SEQ ID NO: 43942 - DNA, 311 bp, Zea mays
gcaccctctgcacaattgctccactgtcactgtaggacagagccaaaactctttcataatagaaggtgtttgtctttcaccaagccttgctgtgaaagctatgcctgcttgtgcataaaacagcccaatcctatattgaacatatttctaccgaaaggcagtcaattggtaagcaaactggataaggccatacttgttaagtttaaaacttctgactttttgcctgcaaccttcgttttgcacacctggagagttaccacaccatatcttacaaatttttttacctgtagccaaatccctgctatgaattc

SEQ ID NO: 43943 - DNA, 423 bp, Zea mays
  unsure (1)..(423): unsure at all n locations
agctagacattgctttcatattggaaaccaactttatttttaatgtccaggcgncataccattataagagcatgctctgtatcatatattaatactaatcactttataatatcatgctcattaattttagcagctaattgagctatatgatcattttgatgttaattagagctaggtgatcattattagcatctacattaacatatatacatctagtgctaaattgaacatgatcaattgcagatgtaaaagtttgcaacatttaatcttcttattacctgtaatatggcatctatctctagacatgaatataatattgcaacattcattcttaacttaaaacaaactacattctattttacactgaaatgaatatacaaatattatttttacctaaaattaactacctttcatcctatgcta

SEQ ID NO: 43944 - DNA, 453 bp, Zea mays
  unsure (1)..(453): unsure at all n locations
aacaacaacatttaccagcacagctgttgtctatcatacctataacatggccatgtgcgtgctggggattaaacatgattggacccttcaagatagctcatggaggttatactcacgtgctggtcgccatcgataaattcaccaaatggatagagtacaaacccattgcttctctaactttagctaaggcagtggaattcatacaagacataatacttacgtttgagataccgaatagcatcataaccgacctaggatccaacttcactagctctgaattctttgatttctgcgagcaacggagcatccagatcaaatatgcatcagtagcacacccaagagctaatggtcangtggaaagggctaatggaatgatactggaagcactcacgaagaaagtcttcgacaagaatgaatagtcacacgatagtggatcagagagatgtcttatgt

SEQ ID NO: 43945 - DNA, 474 bp, Zea mays
  unsure (1)..(474): unsure at all n locations
tctgngtgcgcncgacggaagtccatattatcctcccaagtagcttcttcaagatcctgtccggtccactgaatcaagaactgccggtgcccgtgaacaaagcgttgagccagtatcttgtgaggagttggttgtgcagattctggagagggataggatacatcttcatgaaggtctggtgtggtggatggaggaggccctttgaaaggtttcagcatggagacgtgaaatacatcatgtattntagctgttgctggtaaggcgagacgatatgccacgttgcccacttgactgaccacctggtaaggtccataaaatctgggcgccaacttgtgatagtgatccgggcgaaccgagagttgacgatgacttgggagctttaaccacacccaatcacccacagcataagagacctcacggtgatggagaatcataacgctgttcatcctgttctgggtagtcaacaagtgatga

SEQ ID NO: 43946 - DNA, 468 bp, Zea mays
  unsure (1)..(468): unsure at all n locations
agagcacatnttaggattaaccaatgttcattttgagatagacagggtttgtagcgcatgccaagcaagatagcaagttggcactcatcatccacacaagaacatcatgacaagcgacaggccactggagctcctacacatggatttattcggcccaatcgcttacataagcatcggcgggagtaagtactgtctagttatggtggatgattattctcgcttcacttgggtattctttttgcaggaaaaatctcatacccaagagaccttaaagggattcttgagacgggctcataacgagttcggcttaatgatcaagaaaattagaagcgacaacgggacgggagtcaagaactcacaaatagaaggcttccttgaggaggagggcatcatgcatgagttctcttctccctacaccccacaacaaaatggtgtagtggagaggaagaatcgaactctacttgacat

SEQ ID NO: 43947 - DNA, 385 bp, Zea mays
gagatcaccctcgccggacttcggtcgcccgcccccgcgtgtggaccaagctctctagtaagccattgtcaaattccttgcacccatgtcttccctagcacccagtgaagctctctgacccgtacaattggtcaattgtgccctagataggccggactcctcgccgccgacgagctcccccgcctgcgcacgtggaccggccgactctgaccatccccgacggcgacccgcacatcgtcgtgaccctcatgacctcccctacaccctcgaccacctcaccacagcagtctcgctggcggtaagcccctccgccctttcttccgccaagggtactgtttaaatttgggaaaggacctcacgttaggattagaagaatccatggagt

SEQ ID NO: 43948 - DNA, 369 bp, Zea mays
  unsure (1)..(369): unsure at all n locations
ctgagtgaagccgggcgcggactatatttctcacgcgacctgagactacgtctcccatgctagctatggtgggtacaagtgcggtcactgcacggcggcagccagggtcagtggagcattgaatgtcaacgtggtgaggcctcgccgcgaacggggaatcgatggggacaagtgacgtgtgtggagacagaatgccctgacatgccgtgtgtttaagttcaccttgcanagataaaactcgattcgaatcgtctgcttctcgcagctaatgagactgctccaccccttgtactacattgagttataagtgagatgacggtacatgagataaccttgttgtttgtactaaatgcttgctaccaatgatgc

SEQ ID NO: 43949 - DNA, 386 bp, Zea mays
  unsure (1)..(386): unsure at all n locations
atgatccatctctatcttaacaagcncgaaaataagttaagacatgatcttatggtataatgattgtatcccatcagctactttctaaactttctcctctatatccctacttttatgccagctcacgacgtcaaaaatccacgtctattttttatgtcacacaacggatccctctaaataattcctatatatctcactacaaccatanaataccatcttatatccatactttcgaaccattatcatattttctctatctaataaatatagacgtgcaggtaaaaccatgcaaggggacctttaccgtctagcgctgcgtctgtaacgccgtcctgtactcgcctaacaaagggaagggagagctcatgcgcctacgcgtcgatatc

SEQ ID NO: 43950 - DNA, 247 bp, Zea mays
cgcggctgcccatgtggtgagggagtatttttttactcgccgcctgcgatggccggtgggctacatctagtggacggaggtgccacattgaagatgcgtcttgggcggaagaccgagtatttcgagatacccctttaagacagcattacaggttggcgtctgcagtggcgtatagttgataactatggaagatgtcttcccttccggtcatgaatacagccatactttggtactccgagttggactg

SEQ ID NO: 43951 - DNA, 489 bp, Zea mays
  unsure (1)..(489): unsure at all n locations
agcttgtgaagattcttcattccaacatgtgctattcggcgatgccagagccagcccatgttagtcttagcaattaagcaagtgtcgagttcagctctatcaaaatctactaagtatagctgaccctctaacactcccttaaatgctattgaatcatcacttcttctcaagacagtgacacctgtatccataaaaagacagttgtagcccattttacataattgcgaaactgaaagcaagttgtaatctaaagagtctacgagaaaaacatttgaaatggagtggtcaggagatatagcaattntacccaatcctttgactaaaccttgatttccatccccgaatgtgatagctcgttcgggatcttggttnttctcataggaggagaacatcttcttctcccctgtcatatgatttgtgcacncgctatcgatgatccaacttgagcccccagatgcataaacctacccaaacaagttagttcatgat

SEQ ID NO: 43952 - DNA, 419 bp, Zea mays
cggaatgtcaaccatgtactttctattagatagaccttgtgcagctggtcgagcaggtaaacaagtgggaggagcgcatcatagcaagaatgtgatgaccacatcaagacctctggagttgctacatatggacctcttcggacccgtcgcctatctaagcataggaggaagtaagtatggactagttattgttgatgacttttcccgcttcacttgggtattctttttgcaggataaatctgacacccaagggaccctcaggcgcttcctaaggagagctcataacgagtttgagctcaaggtgaagaagataatgagcgacaatgggtccgagttcaagaaccttcatgtggaggagtaccttgaggaggaagggatcaagcacgagttctccgctccctacacaccatatcaaaatg

SEQ ID NO: 43953 - DNA, 466 bp, Zea mays
  unsure (1)..(466): unsure at all n locations
agcttgcatngcatatataaaataccttgtattttatctanggcttgtctaacctagttgagataaccgccaataaagcgagtgaaaaagcttaactcgggtcaaacttgacaagtcttaggttttaagcttttaagcacttaaattcttattttcttgcaattgttggttcttgaaatatgcatgaggtactgcacttagggggagtattcaaaactcatatcactcatgatatcccctagtgcaaaccaaaatgcaaatttcaccatttgcctattgtttctaaagaatatctagcctatggcagaatattttgaaaagtatatgagggtgccaatacctgtcccaacaagtgttcttttgtgtgatataagttgggattcggtttgttaggaagtaaanaaaaatcaaaatttccaactccctctgctggctcaccggacagcctgtgtgcaccggacactga

SEQ ID NO: 43954 - DNA, 342 bp, Zea mays
gattcttcattccaacatgagcgaggcggtatgtcttattcagcccacggtagacttagcaatggagcaagtgtcgagttcagctctatcaaaatctaccaagtatagctgacctctaacactcctaaatgctattgaatcattacttcttctaaagacagtgacaccttgattagtgaaaagacagatgtagcccatcttgcataattgagatacagaaagcaaatgggtatccaatgaatctacaagaaaaacattggaaatagaatggtcaggagatatagctatcttaccaagaccttcgaccacaccttgatttccatcctcgaatgtgatagctca

SEQ ID NO: 43955 - DNA, 476 bp, Zea mays
  unsure (1)..(476): unsure at all n locations
agctagnngaacatgccactagacgcagatattatgtcatcaagagacgtgaatcccagctcgccatgtactgatagaagataaccgcacgcagagaagacagccgagtggaaccctgaagggttgacgataaacacaaaatgtacaccctgcagcacatgacaacatgaagttagtgctgaaccactatcgtaaaatacaggactatgtaacactgccagcgagaaagtgttacctgcggcaccctgattattgcacaaggaacaatcaagatcttccgcgcttgctgaacgcattggtagtcatgcaatcgtgcagcccatatataacagaacgtaagacttgccaatcggacgcgctgttgcaagttagaggacagtaaagatacgctatacatcacagagacgccattgactcccaatgaaacgaggctctcattgcattctaaatgcgggtgggacaactgggagcagcta

SEQ ID NO: 43956 - DNA, 335 bp, Zea mays
ggacccatcataactcctgttaggaatcactacagggcgacataatttaacaatagtgtcaccctttataaggtacttgagaacaaggtatctatagaaggcccgaatgtcttctcaagactggccactatccacgctgtccacttgccaatgatatctgggtggaggttcaaaaaggatactgatgaccgcccgccaactcgatgattatctcctgattgtaagaaattaaagtattgaattgttgataatatcaacacaacattgctacttggatgatttctcactttggttaaatatactaattaataacatggcctccttacacctaatgt

SEQ ID NO: 43957 - DNA, 450 bp, Zea mays
  unsure (1)..(450): unsure at all n locations
agctntatcaaatggacgtgaaaagtgtctttcctatggaccgatcaaggaagaggtctatgttgagcaacctcccggctctgaagacagtgagtaccctaaccatgtttatatgctctctaaggcgctttatgggctcaggcaagccccaagagcatggtatgaatgcctaagagatttccttattgctaatggtttcaaagacggtaaggccgatcctacactctttactaaaactcttgaaaatgacttgtttgtatgccaaatttatgttgatgatattatatttgggtctactaacgagtctacatgtgaagagtttagtacgatcatgacacagaaattcgagatgtcaatgatgggggagttgaagtatnttctaggatttcaagtcaagcaactccaagaaggcaccttattagccaaacgaagtacactcaagacattcta

SEQ ID NO: 43958 - DNA, 237 bp, Zea mays
  unsure (1)..(237): unsure at all n locations
ctcctcattgtcgagcttgtatgctgttattggntgtctacttggggtagactccttcttcttctcctccgntgccttaaaggccaccggttgcgcctcggatgtggagggctcgtcaagctcgctgatcttcttggagcccttaatcatgcattcaaagctaacaaaatttccgatgacttccttcggggtcattaatggatatcttggattaccacgacataattgaacttgtgt

SEQ ID NO: 43959 - DNA, 444 bp, Zea mays
caagcttggcttcgggaccaggcaatcgatcgtgagttgagggctcaatcaaccgtcaaattccgttcaacaagctggtcttgcaagcgtctggcgtcaactgccagctcagctatacactgaccgtcctatgcccacaccctatttcggggacgtagcttcgtctgaagttgattcactttggcctccaagtctccgattggatcgttgctgccgctactgctccgttcatgtctggaagccaacttatgacgaggcatgccaatagctccagtggacttgcgcgcggttttcctcgtacgcgacatatctccataaggggggaaaatttattagtataatttttaaacatgatgcatgcgtgacccaataattacataaacaacctttcgttgatctgacttcctatatattgcactctaatacctggggttacaagatgag

SEQ ID NO: 43960 - DNA, 331 bp, Zea mays
  unsure (1)..(331): unsure at all n locations
ctactaccttgaccttcganaaatgacaaacagcagacttcatatatttcctatgttcttcataatagaacatttactatcccaacgcgtggggtgtattcaacttagagtattttgataggttctctaagagtttcttattttcttaaaataaaaggtatcctatttattttattctaaaccagagtataatagattcttttagtgaactacactcgaatatgtgactaacacaagtatgggtgctccctggctccatcaattaaataacctttcttactttctttaactttaaacaccatgtgaaataaatggccaaagatacctcaat

SEQ ID NO: 43961 - DNA, 415 bp, Zea mays
  unsure (1)..(415): unsure at all n locations
agcttctccttttcttgctcatatttttctgactttntgagtagttcattctttaaactgtcattntcggcttggacctcagccaaggagcgttccatagactgaataataaagtctttcttctctaaagcaccttcgtgttctttagccataatttcaagatcttgaatggcgaagtccttcttcttcagaacagcttcgtaattttcaactttttcttctaaatctttgatgatagctttgttcttctcctcttcaagatcttgttgcatgtttagcactttacttaataatatactctgccaaaacaaccttcgtcagaaaaacacataaaaaataataacaataataaaataataataatatttttaccttaaaatgcgcatagagcaagctgccggcgacatgatgtcgc

SEQ ID NO: 43962 - DNA, 439 bp, Zea mays
  unsure (1)..(439): unsure at all n locations
cttcgcctcagcgcggaccgctgacttctaantgtcttatcgagagtcaagccttcgctgcctcgagaggctgcaagaggagttgctggcgctcccgaccattgtggagggatttatgtcctatgcctccctggtcacctgcgaatgggcgatgaacgtgctgtcccgcgaaaggtgccgtcactatgaggtcttcgaccgatctgatgaggattttgagcgcgagatttacaatgttgatgaccctgtggtgaaggaatccgcgggagccctctatgaccggatgttgggcccccatggtcgggatgtggtcatggagcggtcctacacggcgaggtgtcaggtaatgttcgacttttgttagtggtgtgaatgtgggtatatgtgggttgctgatcagtgtctgtgtttacgcggcccagacagaagtgaagacttc

SEQ ID NO: 43963 - DNA, 415 bp, Zea mays
  unsure (1)..(415): unsure at all n locations
caacatgggctattctgcgatgtcagagccaacccatattagtcttagcaattaagcaagtgtcaagttcagctctattaacatcaactaagtatagctaaccctctaacactcccttaaatgctactgaatcatcacttcttctaaagtcagtaatacctacatctgtaaaaagacagttgtagcccatattgcataattgtgaaacagaaagcaaattgtaatctaaagaatctacaaggaaaacatttgaaatagaatggtcaggcaatatagcaantttaccaagtcctttgaccaaaccttgatttccatcctcgaatgtgatagctctttgtggatcttcgtctttctcataggaggagaacatacttttctcccctgtcatgtggtttgtgcatncactatcaatgat

SEQ ID NO: 43964 - DNA, 481 bp, Zea mays
  unsure (1)..(481): unsure at all n locations
gatcatagtccttagtaccaaggtgtgctctatctctggttactacccgggtgttacaaccctctccccttataggaatctcgtcccgagattttcaggcagagtcctctagaggggtgccatgaaggtgtactggtgtgtggattctgcttttccttgagtctctctagttaactattctttgaatgtcatcctctctgcaacttcagaaggaagccctttctaagttacaaccacaacttagactacccttactatctaagtttttcttataatatgtttcaaagggcacgtggagggtggggttnttgggctacatactgacttctttgggcagaaagtcagggaaaggagagcgtataaaatcctcagtctcccatgtagcttcttctgctgaatggtgattccactgaacgttatacattctgattgaccttgcccgtgttgtctctccttctgactaacactttgatggggactc

SEQ ID NO: 43965 - DNA, 414 bp, Zea mays
tataagcatatatttctctacgaaggtgtacctctgttcaacatccactagccctcggcttaagaaggtcacaacatgctcctttccttcggtctcctgagtcagaacatctccgacaattttatcttccactacaatgtataacctgaatgacactcctgcttttgatgctattaatactggagctgaataccaatagtatttaataagatcaaatgcttcctgatgttctgtccgcacgtacagtcgacatcatttttaagccaaagaatatgagtgaaagcatcaaccttcctggctatgttagaaatatgtttcatatagaaatggttttcttttgcacatcgataccaacaatttatctcgcggatgcatataattcagaagaatatgtgagtgattcatacacatcat

SEQ ID NO: 43966 - DNA, 402 bp, Zea mays
tttaacaattaagcgtgcatttagaccggcctcctcttttgctaaatcaactaaataaagtttgccgtctagtacacccttaaaacctagtgaaccgacacaccttctatagacagacacatctatgtttgtgaatagacaattatatcccatattgcataattgactcacagatagcatattatatccaagagactcaacttacaacacattagaaatagagtgctcatttgagattgcaatttacctaacccttttaccttgccttgattcccatcaccgaatattattgaatcttgggaatccttgtttcttacgtaagaggtgaacatcttcttctcctcgtcatatggtgtggcatccgctgtcgatatccagcttgaaccctcgatgcatatacct

SEQ ID NO: 43967 - DNA, 357 bp, Zea mays
atcttattaccacgcaccacggagatatctatgagtatgtttaactatgccccttctccttaattggctttgcttcttgttcccacacaacttactctgtgaccctacaactaattgctcatttaaaccactcgctttccttttgagcgacaggggttagcacatggagatagattatccaaatgtgtacttgtgcacgatagaggttcacatgaatgtaagttcgtaattacgaccttatgagcaacatcaagcgtgatatggtcatcaactaatttattatgagaatatgacaacatatcatacttttcacctagagcaagtctttctaagtgtatcatatctacttgactccta

SEQ ID NO: 43968 - DNA, 481 bp, Zea mays
  unsure (1)..(481): unsure at all n locations
agcttanntgcccctaaaaattgtataactatgtttatgtcaaagctcccatatattgctcaggataacgagggttacattttatatcctgctggttatcccgagcacaaaattaggagaattcattctaggaagtctcactttggctctcatcatgcttttatgtataagagtgaggcatctagttctaggcaatccactcatgttaaattgcctaaaaagaaaactcctactgcatcaaatgatcataacatttcatttaagaactttgatgcttcatatgttttaactaacaaatcatgcaaaatagttgccaaatatgtttgggccaaacataagggctcaaagacttgtgtttgggtacccaaggtgcttgtttctaatgtcaaatgacccaagaaccgttgggtacctaagaacaaggcctacacttattgtgtaggtttatgcattcgagggcttcaagtggatcattgatagc

SEQ ID NO: 43969 - DNA, 387 bp, Zea mays
tcccatcatgcaccctccgttggaagcaaccagccgccagcaaacgcctgttggcactactgtgaccccagtcacttcaagaacaactgccctcatttgaatgcaccacgaccaacctactccaactcggtgagtggccccaagatttcatcggcacctacctccaaggcgcttccttccaacagccagcagagcaggactcagtaccacggcagggcccgggtcaaccacgtcgacgctcaagaagcccatcaagccccgggagtactgctcggtgagtacctttgtgaatttactcccgcttctgtgctctttgattcgggagcatcccattcttttatagccgctaagtttgtggagaagcataggataccctctacaccccta

SEQ ID NO: 43970 - DNA, 486 bp, Zea mays
  unsure (1)..(486): unsure at all n locations
catgcaagctattacatgcgtgtcgaaacgtattatgttctttctctaatccacaaagttgcattgtaggtaatcaatatgaatcgaactcgcttggaccaattgtcgatgctaaggaacgtaagatgcatagggatatggaaagatatgctgtgatgactgtcgaagaaaagaatgagaaaaataagttgcgtcgtgaagcacgtcaacgaaataaaggactatcgatagagccactctcattcagaggtgatgaaaagttaatttttattgttatacctacatgtttgtactatacaaagatgatgtgtagcctttctttaatgggtgacatatgaagaagacgctcatactgaccaggcatgtgaggtggttagctctatttatgactgtagcaccattgatttacaaatttagcaacacaagatattgcangtataacaatcacattnttttgtacattcgcactatctattatgttaactc

SEQ ID NO: 43971 - DNA, 414 bp, Zea mays
  unsure (1)..(414): unsure at all n locations
gataggcatatangtcaaatgatcttctatcattgtatatacgcacaattattgctacggatacaacataagtttgacaagcaagaaaacatagctttacattttctgctggacaagaagtctgaactgaactataaacaggtttgagccaacaattgttcacggacgttataaagctccttttgcatttttttaaagaatggaatggaactctggcagctagaaatgagcaatcacttacactcagcataaccaaggtagcatcaagggaatgtatattattcttgtttgctaaatgttacaaaatatcatatacttgctatgacattcttactgttgtgtgatttcttgctgcagtcttgcaatttgggagaccacattagcgtaacatcactgaatactacattaatacat

SEQ ID NO: 43972 - DNA, 298 bp, Zea mays
ctgctcctgctccttgcacgttcagcgagccatcataatacattcgccacacttctgcgggttctggatcattcagtacccgctgttctgtccactcttgatccaaatcaaccactgctcgagttttgacggctgcgctagggctgaactcgatatcacgggatccccactcgcatgccacttggctattcggccaatggctaccttgttgggaaaaatcttctatggaacacaacgactactttactatgggtcgacaagtagtgaccactagcgggcagtataaaactgcaataat

SEQ ID NO: 43973 - DNA, 336 bp, Zea mays
agcatagagccctctggtcaaggatcgcctgtgcgtgccatggggagaaacacgagaaaccctgctcgatgaagcccacaactcaacttactctatccacccagggaccaccaaaatgtacttagaccttaagaccagatattgttggaaagggatgaatagggaaatagcacatgatgtgtgcccgatgtgacacctgtctgctaacaaaggccgaacatcagaagcctgcaggcctacttcaacccctcccaatacccgaatggaagtgtgaagatatacgcatggatttcgtaaccggactgaccagatcacacagaagaaatgattccatat

SEQ ID NO: 43974 - DNA, 470 bp, Zea mays
  unsure (1)..(470): unsure at all n locations
tgacatcagcctctcccagatctntcatctctatattgctcgatagaagactnttaacttgctcaatcacattgagatttgatccaaagatcaaaatgtcatcaacataaaggcacagcataacagactcacccccaccataccgatagtatacacacgtgtcagattcatttacaacaaagccagctgctgtaagagtattatcaaacttttcatgccattgcttaggtgcttgttttaagccatacagtgatattatcaacctgcacaccttggtctctcgaccatccgcaataaacccttctggctgatccatatagatctcctcatccaactcttcatttaagaaagctgtcttaacatccatctgatgaatgataagaccataagaggctgccacggctattaatgtgcgaattgtagtcaatcgagccactggtgagtaggtatcagagaatatctcaccctcc

SEQ ID NO: 43975 - DNA, 445 bp, Zea mays
agctctatcaaatggacgtgaagagtgtctttctcaatggaccaaccaaggaagaggtgtatgttaagcaacctctcggctttgaagatagtgagtaccctaaccatgtttacaaactctctaaggcgctgtatgggctcaagcaagccccaagagcatggtgtgtgaaagggaattaagcttacacctatttcctaattgattttgggggttgaattgcccaacacaaataactagactaactagtgttgctctagtctataagttctacaggtgccaaaggttcacaatgagccaattaaaagaccaagagaagggttcaacaaatagagcaagggataacttgaaatgctcctggtctggcgcaccggactgttcggtgcactatggaactctaagttgaactcatcaccttctggaattcatagaggcgcttctctataat

SEQ ID NO: 43976 - DNA, 395 bp, Zea mays
  unsure (1)..(395): unsure at all n locations
acatggaagtagcataggctaatgatatgctatatgttctctagcctanctacgggtgcataggtggtaccaaaatccaaaccttcgactcgtgaataccctctggccacgagtcgagctttgtttctagtcaccacaccatgctcatcttgcttgctgcggaagacccacttggttcctacaacattttgtgtaggacgtggaactaagtgccatacctcattccttatgaaattgttgagctcctcttgcatcgccatcacccaatccgaatcttgtagtgcttgctctaccctgtgtggctcaatagaggaaacaanagagtaatgctcacaataatgtgcaatacgagatcgagtggttacccccttatgaatgtctccgatgatggtgtc

SEQ ID NO: 43977 - DNA, 297 bp, Zea mays
agaggaaaatagcactcccttatctagagaaagataagaaacgcatgtgatgaagagggaaacacctgaatttcgtggatactctgaaagaaaaattatatccccaaattcagggaggtacaccgttactgcagacttaacgacagtctatcgaggactagatatggtttacctcattaagtcggttccatatctcgatgataaagccgaatcttctctatgcggagcatttggtatggggtcaacattcttcccgaccatgcttgtcatatcggagtcagcttcactttgagggca

SEQ ID NO: 43978 - DNA, 336 bp, Zea mays
acttacactattgttgcttacatattgaggtctcccatatctatagtgttccaaaatcatctcttctatcattcttctctagtcatagtgttctgcttctcacatcgctgtccgtgttgctgcgcttttattttccctttgtcacgtagatcgtccatgatctaaaccgcattgcagacgtacattacatgttgacgtgcatgttgtattccttcttgctgacttaacgctgttatgcagctttcataataagatatattcctctttgtaataatactgactgctttaaattatgtattatagtttttaaacaactgcgaatcactactatacctg

SEQ ID NO: 43979 - DNA, 321 bp, Zea mays
ataaaaatccacgacgccacggtaaaaatgagtatatgggaaggccaacgccgctaaaaaagaaaggagtgtatactactgactcgtgggtatcttccggtgggacaatggtcccgtggcaagcccaccaagaacagagttccctcggaggaagaaccccgatggagacaaagcggataagctcaactttacaaatacagacatgtggttacctgccaaggttactggctgttggtgtcgattgcggtgatcactgaagcatacaagttcgcagttttctcttgggcgccatcttgcttcttactgcgtaacagaatatga

SEQ ID NO: 43980 - DNA, 376 bp, Zea mays
atcttttccacaccacgaaaaggaagccgtggaccttgtgatgtgcaaggatggttagggcttccttggctactatatgaaccgattgccctactcaactcatctattggaattgttgccattgtagcccagattgcattaagcagggcatgcgtggaagaatgctacatcggtgagttattatcacccttcatgaggaagagtgatgtaccgtcctcctccgtccacgtggtggagctaaatgagggtggtgataggaacattgacgtctgaggccccattgttactgctcaagctgcatctgatgatgctatgcctatggcggcgtctgctccaccgtatggcttgttcatgtgagctgatgagttgccaccgt

SEQ ID NO: 43981 - DNA, 390 bp, Zea mays
acccccaacagcatcctcttcgcggtgctagagcgttcttctaaacgagcttgatccgtgaaaaagtctactaggcttctgagagccggagatcccaataacaccttccctgagctcgttgccgagaaacgatcacaatattccgagcatgaaatggtcccaccatgcaacgggtacgcgcgacctatcgattcaccgtctcgggttacgtggaccaccatacagtgtgtgcggacgactgttcgttcggtgcggaagactcgacgattcaccttcccacctgggcactatataaacagatgggtaggtgtgaagtaccacagcattcattgctattgcactgtattgctgccaagaattgaccatagcaaacctgtcatccacgcactg

SEQ ID NO: 43982 - DNA, 462 bp, Zea mays
  unsure (1)..(462): unsure at all n locations
accccccttgcagacatttccgtttttttttccataaagagtgcgatatcgaatgtcgtacttgatgcatattcactttacttgttcccttgtatgatgtactgttagtttcccaatttgaatggatgaatgtatgtatgcttgcaatcccatagagaacgatccggtcgaagagcccgaggaactcgcaggagaagcccctgagcagcagtctgttggtggaggcaagtgtcccttgacctatctatgtcctattcattatttaattcacctcccgctttacacatttatgcctaaggattgactagcttttgttatccatgtccttgttcacctatttgggttggattatattattactggttagctttatgctattgctcaactataatcaatgaacatgatgagattatctatgatacgctgtattcnttctcttattatgatgtatgcttgaggtct

SEQ ID NO: 43983 - DNA, 494 bp, Zea mays
  unsure (1)..(494): unsure at all n locations
ggatccttaagtcacctgcngcatgccagcttatgaagattcttcatataacatgggctagtcggcgatgccagagccaacccaagtgagtcttatcaactaagctagtggcgagctcatctctatcaaaatctaccaagtatagctgaccctctaacactcccttaaatgttattgaatcatcacttcttctaaagacagcgacacctacatcagtaaatagacagttgtagtccatttgacataattgggatacggaaagcaaactgtattctaaagagtctacaagaaacacattgtaaatggtatggtcaggtgatatatcaattttacccaatcctttgaccaaaccttgatttccatctccgaatgtgatatctcgttgaggatcttgggtcttctcatataaggaaaacatcacgttctctcctgtcatgtggtatgtgccccgcttgcgagtatcctacttgagcctccggatgcataaacctaca

SEQ ID NO: 43984 - DNA, 344 bp, Zea mays
  unsure (1)..(344): unsure at all n locations
ggacgcgaagagtacctggctcaatggttcatttaacgaagaggnctatgttgagcaacctgctggctttgaagatagtgagtaccctaaccatgtctataagctctctaaggcgctttatgggctcaagcaagctccaagagcctggtgtgaatgcctaacggatattctcatatcctaacggattcaaaatcggaaaggccgatcctactttattcactaatactcctgataaagacatgttcgatgccaaatttatgatgatgatattattttgggggctactaacgagtttacattggaagaatctactaggatcatgaccaaaatctcgagatgtctat

SEQ ID NO: 43985 - DNA, 464 bp, Zea mays
  unsure (1)..(464): unsure at all n locations
cactggagcactaacttatcttacaggtactgtctcataaaggatttgggcccaaatggcttagctggactcgaaatatccttcattctggcatgtcatcggttctactcaatggagtaccagggaaaacctttcattgcaagcgaggggtcaggcaaggagatcctctctcacctttgttgtttgtcttggcagcagatctactccaaagtattatcaataaagccaggcacctgaattgctttaattacctttgactgaacgttgtggccaagatatcccgattgttcaatatgctgatgacacactactgataatggaagcctgcccaaagcaattatttnttcttaaagcagatctaaattcctttgcaacttcaacggggctcagtgtgaattacaacacatcaagtatgtatccgatcaatgttaacccggagaanatagagattctctcaagaacgt

SEQ ID NO: 43986 - DNA, 470 bp, Zea mays
aggcgggccatcttcttcttctttctctgcacttggtgatgtagcatctccatctctctgatttcttggtctagctcttcttcctcaagcgtcgggctaacagcttttctcttctggcttctggcctcccgaagagagacggtctcctggttgtggtccagcggttgtagtgctgcagccccagccgctgaagctttcttcggcgccatagcgaaggtctatagcttccgaaggtgttcacgaagactcgaagtggaagtgagttcaccggaggtgggcgccaatgttggtgacttgttctcaaatgcttcgaattaagaacaaggcaacatataaagtgttacacattaaggtccttcgtccttcgaaacattatgtcccttctggaaataatgatttatgacgaacgttatcatagacataccttcgggaatataataagtaatgccgaagggatcatatatagcatg

SEQ ID NO: 43987 - DNA, 443 bp, Zea mays
  unsure (1)..(443): unsure at all n locations
agcttgtgatcctctggtcaaccgttgcagtaactactattacttcatgatgnnggctcacccctacatgtcagtctgtggcgtcggctttcttcaccaacatggtccgcctgcatggcatgccccaattgatggactccaaccttgaccccatcttcacctccacattctggggggagctcatgcgcctcatgggctgattggcgccaaactacacaagacaactaagttccaatgcccatacagaggtggacaaccgtgtcatcgtcatgtacctgcgccacttcgatggctatcgtccccatcagtggctagccggctaccctgtgccgagtacatctgagagaatacatacagttcctccctctagacaatccatttatagcggtctaagaccgcaacaactaccccttcattcactcctactaacgcaacgagacagg

SEQ ID NO: 43988 - DNA, 396 bp, Zea mays
  unsure (1)..(396): unsure at all n locations
ttcacgagtttattacacacatgatgccttgataagcggatcaaccctccgcagtcatatcctctaccaacaaangtaccatggttcgacacaacacatttatttgactcaagaacaactttgtagccatctcgacatagcatagaagcactaacgagattcttcttgatagagggcacatgctgcacgctcttcaatggcaccatctttcccgaagtagacttcataatgaccgtacctacaccaagaacatgagcatgcgacccatttcccataaacaaagcgccagacctcccgacctgttatgaggagaatatagaggcctcaacacacacatgagaatctgcaccactgtccatcttcactcaggtgaattcaaactgggagaacatatgg

SEQ ID NO: 43989 - DNA, 418 bp, Zea mays
gcagctatattcatacttgggggcaataattatgcgtgtccgaaccattgtattctgtttcgtggcgactttgagaacgcatcaagatgcccagtttgctatgtcagtcgatacaagaagagctactatcaagactgtgttaaaaaattcccgaagaaaaataaaatcaagagatccactattggacctgaaagtgacgatgacactctcgatgacatggatgggaaaaaaaagtcaaagaacccacctttggtgatgtggtatcttccagtaattgatcgcttaaaacgttggttctcaaatcctagggaggctgagcttatgcgttggcatgctgaaaatcgcagcagaataacaaatagattcgacaccctgctgatgcatcacaatggagaaatttcgatcttatgtatcctga

SEQ ID NO: 43990 - DNA, 313 bp, Zea mays
  unsure (1)..(313): unsure at all n locations
catgccaagaaggaaagaaagttggagtccatcatccacacaagaacatcatgatgactgacangccgcttgagctactcaacatggacctattcggcccgatcgcttatataagcattagcgagagtaagtactgtctagctattgttgatgactattctcgcttcacttaagtattctttttgcagcagatcagatccatctataaggaggctgaggcagaaatctagctcccagaggtattacttatatggagatgtcggaaactcattcccctgtcttcgttaaacaaaagaacccctgtaggcggatg

SEQ ID NO: 43991 - DNA, 353 bp, Zea mays
agcttgacctctcctacatatataacccacaattcattctaggtgtggaacgcgccaacggaaaaaagttcacagccgtcaaaaaaagcccctcgaccaacaaagggcaagagggccgactcgttacccaaagcggtctgggcgctaaacacgactgagggcaaggcgacccgggacacccctatctgccctctatatggatcagacgccacgaccccaccaaaaataaaacatgggtccccacgaacaagtccgtcagccgttcctgacatggacgagcccactttgaaggatctcattgatggagaccgagacttcgccctacaggcttctaataaacaccaagcccagac

SEQ ID NO: 43992 - DNA, 420 bp, Zea mays
  unsure (1)..(420): unsure at all n locations
agaaaaagaagaactatatgaatgcaaatggcgaggctcatcttggcaaggagtgggattcaaactgctcttcatccgactccgacaatgaaggactcgccgccactgccttcaacaagtcatccctcttccncaacgaacgtcacacttgcctcatggcaagggagaagaaagtaagcactcataatactagtacttatgcttcttcaagtgaggatgagtctagtgatgatgatgagatatattactcatgcttattcaagggattagatagaaccaacgtagacaaaattaatgaattaattgatgcctcgaatgataggaatatacttctataaaagcaagaggaattgttgtatgaagagcatgatanatntgtagaagctcagacatctcttgctctataaattaagaggaatg

SEQ ID NO: 43993 - DNA, 427 bp, Zea mays
agcttatgtacaatgatacaagtggttaccatattattatattgctaatattcctaactgaaagggaaatgtgtccttgggcaatttcaataatgtattggtgattaagtgcccaacacggttaattaagttcttatgtgccaagtaaagtgagaagtgcaaatcaaagaaaaatgtatgtttctaaacttagtacattattttgagtactaatgtgtttcgtctaagtgctagaaacagtaagaaaagaattggaaaaagagttggctatgtgcagcatactctatctcggcttggcacaccggactgtccggtggtgcaccgaacagtgtctggagcgccaagctggtccgcgtaaactcggcgctctcgggactcgacggcggtgtacggctaaatatcaccaaactgtctggtggtgcaccgg

SEQ ID NO: 43994 - DNA, 490 bp, Zea mays
  unsure (1)..(490): unsure at all n locations
tatcaaatgggacgtgaaagtgccttcctcacggaccaatctaggaagaggtctatgttgagcaacctctcggccttgaagatagtgagtaccctaactatgtatataaactctcaaaggcactttatgggctcaagcaagccgcaagagcatggtatgaatgcctaagagatttccttatcactaatggcttcaaagtcggaaaagccgatcctacactctttactaaaacacttgaaaatgatatgtttgtatgcaaaatttatgttgatgatatcatatttgggtctactaacgaattntattgtgaagagtttagtacgatcatgacacacaaaatcgagatgtctatgatgggggagttgaagtacttcttatgatttcaagtgaagcaactccaagagggcaccttcattagccaaacgaagtacattcangacatactcaacaagtttgtgatgaaaggatgctagcccatcaagacacccat

SEQ ID NO: 43995 - DNA, 413 bp, Zea mays
  unsure (1)..(413): unsure at all n locations
gcttatcancaacttctttcctttctttattctgcggacacggnctcttcggcagcagtggtagcttcttctgcagccatgtctagcagtatttggtcaatatgttcaattgtgctctccaaattcaaatcttcagctgaagcagcttctgcagctgctgcctccgaaggagcaatgtcaatatctgccccctctgcagccgcttgtgttgtttgggccgaaactcttggcggcgtcttgtcaatcacctctgtcacagcgataataccttgtttctttgccttgattgttatcttcgatttctcgggctccttgtccttctgaaaaaactttgtcagttgaggacccagtggacttatcttcgcacgtaaggattcagtcattaccttcagaatttctcaacgtctcaacag

SEQ ID NO: 43996 - DNA, 447 bp, Zea mays
  unsure (1)..(447): unsure at all n locations
actcagcttgaggactgcttcgcaggagaacttccgaatcatgatatcttgttcggnccacggagtcgctttattcgagcgcaagttacttatcgcagaaagtgatgagtgaggtatccgtgtcccggaggcgtaagagtccctcggctcggtcagccttggctgcttacgtgtactccgtcgtttccaggatccgcttttcgaagtagtcaagaagcacgaaagaaatcctactaataagagatcctttttctaggaaaaattctacgcagagggggtaaggtgggagaccccctcttcgtcgcccagcaagacgaatgacttggcgcgtcgcgctacccgccgagcctcggcttggtcgaggggtagctcttctcggcggagatattgcaggtacggagcctgccaatcttgatctggcgtggccccgctctgcccttcctcgat

SEQ ID NO: 43997 - DNA, 452 bp, Zea mays
  unsure (1)..(452): unsure at all n locations
aagtgcgagttctggatcagtgatattctattcttaggtcacattataaaccgagagggattggctgtagatccgaagaatgtaacagctatcttggactggaaagcaccaaaggatgtacgaggaatcaagagtttcatcggaatggtcggttattatcgacgtttcattgaaggtttctccaagattgccaggccaatgacagcattgntggcaaagaaggttgagttcaagtggaccccagcatgccagaagtctttngagacattgaaggagaagttgacaacggcaccaatactgatattgccagatgttcacaagccattctcagtatattgcgatgcttcgtataccggactgggatgtngtgtaatgtangaagggagagtanntgcatactcgtcccgacagttgaagattcatgagaagaattattctactcatgatctgga

SEQ ID NO: 43998 - DNA, 448 bp, Zea mays
tagctagtacagctgctgaactaactatctaattgattctacagtaccaagaacaactgtagttatacatgatatgccttgcttctcagctgagccaacacagggctctgacaatacccacttgttagaaattaacctgctactatattcaacatgaagagcttttgtgataaataaagaaaacctgtatattggagcccctgcgagcaaatactcctgttacaatgttgagaacaccagtacaatcattcacaacgatggagagggtatgcaagcaaagtccaatggactgtaccacacaaaatcaatactggattagcaggtgcgagatatcaacagaattcatatacatgcaggtgaagcattattaccattctttaatctatgtaggctttgcctacacattgacacacgcacacataatgggaatgttaatgagaacacactc

SEQ ID NO: 43999 - DNA, 473 bp, Zea mays
  unsure (1)..(473): unsure at all n locations
atctggtatgcatctgcggagatacccagtctgttctatanaactccggacttggcgaacagtgggtggtgtgtttcattccagaatatctctgaccttgctaggatctaccgcaattcctttagctgattacacgtgcccctaaaattgaatttctttcagccagaacgcacacttgctgaacttggcatatagctggtgttcccttaggcgcgtcaatacaatccgcaaatgctgagcatggtcttcttcattcttggaatatatcaagatatcatcaatgaagactaccacgaacttgtccaattcaggcatgaacaccgagttcattaaataagtgaaatgggcaggagcatttgtgagcctgatagacatcaccaagtattcaaacaatccataccgcgtagtgaatgcggtcttcggtatatccttcggccgaatactgatctgatgatagcctgacctgagatcaa

SEQ ID NO: 44000 - DNA, 126 bp, Zea mays
agcttgctccatccgtcaaactgccagacgctttgttctggagccgccagagccagacactgtcgccgtcggccatactccgccggtccggcctacaaatacgcacgtccgtctccttctttatac

SEQ ID NO: 44001 - DNA, 430 bp, Zea mays
  unsure (1)..(430): unsure at all n locations
acgcggtatctttctgaacaagatccttgcctcaatggatgttcttgttgaccaattgcgcgccgccaaagtgtttttctaaatagaccttcgctctggctaccatcagatcaagatactagcaagcgatatttctaagacggcattctcaaccagatatgggctatatgaatttttggtgatgtcattcgggttgacagatgcaccagcatatntcatgtatctgatgaattctgttttcatgcctgaattggacaagttcgtagtggtttcatcgatgatattttggtgtacctcaagaacgaagaagaacatgccgngcatttgcatgtatcgcttcaacgttgcgaagcaccaccttatgccaagtaccaagtggatttttgctatagaaacaaatcttggtccactattctcagcggatacctgt

SEQ ID NO: 44002 - DNA, 445 bp, Zea mays
  unsure (1)..(445): unsure at all n locations
agctntaaccctatatagggatttaattggtataacttaacccaagntgagagaacctataagctttatggtaaaagtcataaaatgaccgcacaaataaagttgaatcacatttatacccctgggataccagaaaccctaattggaaccctggaaaaccctataactaaaccctatgggcttatgtgcanaattagtccacttttgggcttaagtgcaaaaaccaagctaaataagtatcttaagtcacatggatcacatttaagatgatctgcaagccaaaccctgagttttgggcttatttgcaaaagagtcacatctgaactcttttgactaagtctaatttcagtgtattatgctcatctttgtgaccttgttactcttaaacaaaggagagtttgtcctatgtcaccacaccatatttgaagatccatcaatggagaac

SEQ ID NO: 44003 - DNA, 474 bp, Zea mays
acccacaacaacttaagtcatgtatgatgtctattccgagaccgatgcttaaagagtatgacgccgaatctgaggcctcatgaagatcatctcgagtagactgtacacaaactcaagagacttttgaaataacttttgtaaatatgactaaactgttcttaatgaattctgttcataccttgtaatatactcttacccttccattaatgtatgagagacgctttgatgtggacgaaattatctttttgaaccgaaggcgaataaacaccttcccttcttttcgtacacagcgaagcatataaaacaacgttttcttttttgcgaagctcttcttttcgtacacgccgaaggacaatagatagattttcctttttccgaagcaaccacttatgctatgatgatggttatcctacatatgcttggatgaacgttatgatccaaatgtatgatgtaatggacgccaaatgaatgctg

SEQ ID NO: 44004 - DNA, 446 bp, Zea mays
  unsure (1)..(446): unsure at all n locations
tatcaattcttattcggcctgctagcggtataagccacacttattcctatgtactaggttggctactaaccctctttctatggaggagcttcagactgttataacgtgtcattcaaaccacacaattatggttggtatcctctcggtgacagtgaaagagtggtctgtttatcctgaccccatcatccggtaggcccataagtgataagcttgcttcccttcagtgttccttctatctaaccctaggaacccttgaaacctatagaatttcacttgaatcaagttctttcttgtaattgattatcaacaggttaaccgcaaataatcctttataacataagaaaagtataggttggttctcttactccttgttgtcttcacaagcaactttacctagcaaccaaccttaggtncttaattattattctcctgcacctagcttgcta

SEQ ID NO: 44005 - DNA, 422 bp, Zea mays
  unsure (1)..(422): unsure at all n locations
ctcggtcctcagctngataaccactgctcgtatgttgttgatatctatattatagctctcgtcttcggcatgcttttgcgctctcaaagcgttgctcagtattaaaccctatatgaaaaagaactagtatctatactacctattaaggctctaaggggtaggctgcctcccctggttctgccttcagccaatctacaccgtccatctatatgcgtcaaatcatcaccgttcgtccgtcgcctctgcttgcgggccgtgcacgtcgcgaccactatcaccacctcctccactcccctcccgctccaactccttccctaacgtaggctccaactcctcttgcggcactgttctgcctgtcgcgccgccgatcccccaccctccttccctctgctccccgccatcaacggcgagagcgacgcatt

SEQ ID NO: 44006 - DNA, 467 bp, Zea mays
gagcttgagaaaatattccctcttattgtttgatgttatgctccactcgtcgatacatttacctgatgaggcaatacttaaaggaccagtccaatatggttggatgttccccgtagaaaggaggttatacaccttgaaacattctgtgaggaatatggcacgacctgaaggttcaattgcagaagcatatgttgctaacgaatgtttgcatgcatcttcaaggtattctgatgatcttgagacaagacacaattgtgagggaaggaatagagagcatgttgatatgagtaatggtggtatatctgttttccaacatggagtacaattacttggagccccaaggattacatatctatataaggattatgataagatggtttggatgtgctaacaactgtgtgaggttgaccatatatggagatgtattccattatcctcttgctgctcttgtatttatattcatgatg

SEQ ID NO: 44007 - DNA, 400 bp, Zea mays
aacacatttggacaactatttcatttagaaaacacggttgggcgcagtgggcttgtaaccaagtggcgttcctcatccacacaacaacattatgacgactgacaggctcccttgagctactccacatggacctacttcacccgatagctgacatatgcatcgacgggagtaagtactgactaattactgtggatgattattctcgctacactcgcgtattctttttactggagaagactcaaacccaatagactttgaaaggatacttgagacaggctcataacgaattcgacttgaggatcacgaaaatacgaacgacaacgggacgagttcaagaacttctaattgacgcttcttgagaggagggacaagcatagatctttctcctaccccacgacaa

SEQ ID NO: 44008 - DNA, 111 bp, Zea mays
  unsure (1)..(111): unsure at all n locations
aaatcccccactatgcatacccagccgccccccncgcggtatctctacaccaaaaacggcggaaccaccaacaaggaaatttcccccaccccaggcaacaagaccctccca

SEQ ID NO: 44009 - DNA, 425 bp, Zea mays
gagctagaacacggctattccatacatgaaaagactatcgcgcactgggagtggagagatggcgagagtggcacgtaccctcctggcaaaggaccacctaaaaagggtggtgtgctctcgggtggcgcggacctgttcatgcggtggaggatccatgagaatggttgacatatgcaagggttaagtgctacatatgtcgtgtggttagagatcctcagctgagtaaatcgattcggatcgccgttatatccccggagagtggagacttgatcgctgccctgcaacctaagtcaggatgtaaacattattaataaaaatgatgttgtattgatgagatggtgaaattagactagatgctaccagagtctattaatatttaatctggcgctaacatattgaaagtcaggactcactctactaagcta

SEQ ID NO: 44010 - DNA, 438 bp, Zea mays
cctgcatgcatgctagcctagaacgtggctttcttgagcgaggtgatggtcaccttttaccccagcgcggacgcaccgacctggatgtcaaaggagtcgtatcggatgaagagctcggagactatgaggcgatcgatgatcacgactaattccttgccaacgcactgcttgtcctgcagcgtgggagacacaactggtgaggggctgtctgtgaccatcactatactgtggctgcctcttatttcgtgagaagaaatatggtatgtgaacgatgatcaaacccacaacgaatatcatatgacccacagcaaaattgtctaggattatatttttacatagactataacagacgggatataatcatttacgggatgacatttaacggatgttgctgaatattactataactgtcttcattgcctctctatattcatcttt

SEQ ID NO: 44011 - DNA, 413 bp, Zea mays
ctctaagaacaactgcaagcatgcaagcttgattcaagtgcatccctgacgtttgctatacttactatagaggtgtttacatcatacacttctttatctttatcctctatagttatttcggcgcaaaaatatttccttagtcaagacattaagcattgcatctttattggaaagcaattcttgaagctctaggtttctctccctttcaaggatgagcaagtcttcctggccataaaattgctttctttaactgcttctccttagttaggaattacattatatccatttaaacccaattatctaatcaaccttattttcatagcaaggcggtcttcatcttcattaaaaaaggcatcattacacaaaatggcccttggctcttttttcatgaggcaagatggagtattggaatc

SEQ ID NO: 44012 - DNA, 265 bp, Zea mays
ggtgccctaagtggtatagcacattcttggtataaaacccaagtggttttggcgccatattctaagtgaacacagcttgtctttgaaatatggctataacgtgacctacagagaaataaagagctctagctctctatcctcttgtagattcgagaagggggttctccactggcccttctgcaatatttccctcctctaattgatggatataatgtggcttacaagttgaggaacagttacacatgctttaccacttgatcactct

SEQ ID NO: 44013 - DNA, 400 bp, Zea mays
  unsure (1)..(400): unsure at all n locations
tctaagtcgagcgcaggctgcaagcttgtntggattgaaaggagatacctattgttattgtcgcgccccaacataatgggaggaggttgactttcgtttccggaccagcacccatagggttaaacaagccaaaattgtgatgacaaagcggtggaaacgcaaaggggggacatacaaagtttctatggaaagagtttttttggagggtgcttggtccaaataagacgccaacaacatgtgggtaaagaaggtaacttgtattatgaaagtggcgccatatgtgtttggagttaccaaagggagcagtggtgaacctaatgatacttggtggtggaccgatgatcgtcataatgcaataaagaagaagaatgaatgttgccggagcttgtctcatgttaca

SEQ ID NO: 44014 - DNA, 293 bp, Zea mays
tcctaagggacatcaagcgatacgactaactgatgtctgtttttataatatacagaccttggcagcatgctaagcacggaaacaaagtggcaacactcatcatagcaagaatggaagacgacattaaaaccactggaacctcctcacatcgatctcttcgatcccgctgcctatctcagcatgcgaggaagtaagaatggtcttgcgatagttgaaattttcccgctagactgggtttctttgtgatgacaaatccaaacccaaggaccctaaacgcttcctaagagagctca

SEQ ID NO: 44015 - DNA, 413 bp, Zea mays
agctttgatcatggactgaacattgtcatattacttggcatcaagaggctgatgggatatggggattcactggtggtcataagtcagataaacaaagagtgcgattgctcgaatgactccatggggaaatactgctctggcgtcccaaagctataatacaagtttgaagagctagaatttcatcatgtggagagagatcgctacgcggcagctgatgcattgtcaaagctttgatccagtcggactcaggtcccgtctggagtctttgtacaagaagtattgcgcccgaacatcttattagatcgggcagaatagtgcaatattctgagccaaccagaatcacattctgatgactggaggaagccaatcatcagatacatatagaacgatgaggagccggatgacaaaaatgc

SEQ ID NO: 44016 - DNA, 325 bp, Zea mays
ctgcaacatgacaccagatggtcaaactcaacgggcaatggatgaattcagaatcactgcagagcatattgggaccacggagctggttaagaatcttagcattcaaagttttccctactctgataaaatgggaaatgccaaagctaacgggggagaagaatgaacgggatcttgtccggcttccttaccacttcaaattcataatatattttaagaagccctgccaagagtggctggacacaattgaggtgatgtgtaatgaaattcttggaaattattcgacaaaagaagatcaactgatgacagcattcttctgtacccgtct

SEQ ID NO: 44017 - DNA, 235 bp, Zea mays
tatgttaacaatcctttaggaggaccatagctccataatacttaaccttcggagaacctttgtgtcactttgtgttaaagagccgaagggatgcttgtaaactcaattcataaaaagaaggaataagaatgcttaagcacatcagatgaattctatacaacaactttgcaatgtcattttatattcgttcatcccacatcctttgagaaccttcagccttcgtgctaacactttg

SEQ ID NO: 44018 - DNA, 419 bp, Zea mays
agcttctaaagggagaccatgtgttatgactatccgatgtctgttctgagaaagaacaccttgtgcatcatgtcacgcacggaaacaggtgggaagcactcatcatagccaaaatgtgatgacaatgtcaagaccactgaaacttcttcatatggatctctttggtcccgttgcctatctcaacatatggggaagtaagtatggccttgtaatagctaatgacttttcccacttcacttgggtattcttcttgcatgacaaaccagaaacccaagggaccctaaagcgcttcttaagagagctcaaaatgagtttgagctaaaggtgaagaagataacaagcgacaatgggtccaagttcaagaatctactagttgaagagtttcttgacgaggaaggcatctaacacgagttctctgc

SEQ ID NO: 44019 - DNA, 400 bp, Zea mays
atgcaagctctgtaccaagcttccgggattatgctcccctccaacgttccagttagagcaccagaagagtcctttgccagcatatcaagcataccacttatctctgcatcactaggatctaaaggcaccttaaagtggacctgccgttcatcatcaagaatttcttcgagcgaagcacccaaagcgctaacttctttgcacagggtctgtctctaaggcccaaaccgccatcagcgacaggtggattccacacaaaatgagtgaaggccttggaaggaggcaggttccaggccgagtatgccacaggggcaccaacatttgataccttgcctctaagaatcatttcaagccggttcaccaagtctacagcgggaattcttcttgtggtgacccgggttga

SEQ ID NO: 44020 - DNA, 379 bp, Zea mays
ataagctatcattttatcttcattgcatgtacactctttattgacttgatttatcacaagcatcgagtttcctagaacttaaatccgatgtatgatgagagcaatagatatccttattgtcggggaccataattaggggtaccctcaagactcctaaatctcagctggtaacccccatcaacacaaagctgcaaaggcctgatgggtgcgattaagtcaaggatcggtccattcaagggacgcgatcgcgcctcgcccgagcccagcctcgggcaaggacagccgaccccggagggtttacgtctcgcccgaggaccccctatggcaacggacacaccttcggctctgccgaagcccagtcttcaccaagaagcaacct

SEQ ID NO: 44021 - DNA, 369 bp, Zea mays
tcttatcttcggaactgacagggatatgtccttaaacccacagcttggataaattaagaaactaagcaactgttgtaaagccagagcttagatattcaagcaaacatagcaggcgtgccaaatgtgctctgggtgaggtcttatttatacgcccaccgcgctctcagatggatggctctcgcctgtcattgacttgttgctattctatcacagggaaggcgttttttcggaccttctgcttatggccttcgtccatatcgcagtctagattagtattctaacaattaaacttgcgagggctactgatgggggccttcgtttccaaggtcctcaaaacatgattacaatgttctcgagtatatacatgaa

SEQ ID NO: 44022 - DNA, 417 bp, Zea mays
agcttgtgaaggttcttcatccgcacatgtgttatattgcgatgccacagccagcccatgctagtcttagcaattaagcatgcatctagaccggcctcctcttttgcaaaatcaactaaataaagtttgccgtctagtacacctttaaaagctaatgaaccatcacttcttctaaagacagacacatctatatttgtgaataaacagttatatcccatattacaaagttgacttacagacaataagttatatccaagcgactcaactaagaacacattagaaatagagtgctcggatgaaatagcaatttttcctaaccctttcaccttgccttggttcccaacaccgaatatgattgaatcttgtggatccttgttcttgacgtaagaagagaacatctctctttcccctgtcatg

SEQ ID NO: 44023 - DNA, 416 bp, Zea mays
aacttaaagccatggtaagtagcataggcatgtaatatattaattgactcaagcctatctatgggtgcataagtttcaccgaaatccaaaccttcgacttgtaaatatcccttggccacaaatcgggctttgttccttgtcaccacaccatgctcatcttgcttgttacggaaaacccacttggttcctaaacattttgggtatgacgggaaaccaaatgacatacctcattcctcgtgaaggtgttgaggtcctcttgcattgtcagcacccaatctgaatctcaaatgcatcttccaccctatatggctcaatagaagacacataaaagtaatgttcacaaaaatgtgcgacacgagatagagcggttacccccttaagaatatcgtacaggatggagttcacgaggtgatctc

SEQ ID NO: 44024 - DNA, 84 bp, Zea mays
attgagatgactgtatgtgggtgggtttgttggtgtactaggaacttaagagtgtttgaattttgatgatgagaggatttttat

SEQ ID NO: 44025 - DNA, 388 bp, Zea mays
agcatgcaactttgctttggtcttcgaatgttgaaatctattgtgataaaaacggcactccttcatactgattcccaaattatttcttggccatgttggcaaaagttgcaaagccatagatccgaagcttgaaaaatatttagatacagttcgaagacctgaagcctccttcgaagggctttctgttaacaatattccacgaggagaaaatgacactctgatctactatccaagtcaacggcacaggggctgccattaccttccgaagttttctttgaaacaataaaagccccttcggttgatcttcttgaaagagcagtgctcaatatatcttctgtttatagctaagattggagaactaagatcatgtcttttcttccaggccatt

SEQ ID NO: 44026 - DNA, 407 bp, Zea mays
gacgtgatagtccctagcacgtaaaataaaattacctgtttgggctacattccggactgccttgatgaatgacttcgccatgactactgtattgcccccataccaggatttagttgcttcctaactcatcataaactgcgttggatctaagtgcccatcatacatggggagttgaagtggcttgtatgatgggggccatggggtatcctgcagttctgctgcttatggagaagcatcatcaaaagtaaaggcatcatgattaaaatcatcataccatccatcctcgttgaataagcctgagagcacctagaggggggggtgaataagtgatcctgtaaatacttgaaacttatagccacaaaaacttggtaagtgttagtaggctaaataccgagctcttgtgaaca

SEQ ID NO: 44027 - DNA, 306 bp, Zea mays
aacaccatgggcctcatttccttcatgacatggtggttgtcacaccacaattcaccggtggttgtggtctcgcaagacatatccccactcggtgtaaatactatgacttccgcaagaaccaatgagtgtgagggtattttacctcattcaatcgactaggactatacatatagtaagcactacaaagcggtctaactaattgaagcaccttacaatgcacctacgttaatcacacagtggttctattaagcacatgggtggttgaagatttggagatgtgtatcacttcactctatatcgtgctta

SEQ ID NO: 44028 - DNA, 286 bp, Zea mays
cctaagtgtgtgcgtacccttcttatcctggatagccatctctctaaaagaatataacctcttggcatagttacccaaatatctttgacatatgcaccaaaccatccctcagaaccaacctagttctaacctgaacggaggaattgttggacggttcaactcctgttctatgatgcagaggagattgatcggatatacttctcgacaaggcatgtaccgaagctctatggtatatcgcctcccattcagtagctagcagaatacgatccaacttctcataaatcgg

SEQ ID NO: 44029 - DNA, 346 bp, Zea mays
ccataccagttacttggcctttcgcatgccggggactggatatgattggacctttcaagaaagctcaaggaggatatacccatgtgttggtggcaattgacaaattcactataaggatagaagttcagcctaatgcctctttaacctctgctaaagcccgggaattcatacaaagcataatatttagattcgggatacccaatagtatcatcactgacttgggatccaacttcaccaattcagaaattcttgacttctgcgagcaaaagagcattcagatcaagtatgcatccgtaacacatccaatagccaaccggcatgttgagcgggcccatggaatgatatt

SEQ ID NO: 44030 - DNA, 203 bp, Zea mays
agaaactaagcttgcccctgctctttcggagggactcgggctggcttcgacctttgcatggctcgtgcctatcgccgcaataaggtgtgtggatcacactatctggctatgtggagatataatcgccattcatgttgagacgagatcgtttctcgcatcattggagtcgtcaccgcgtcgagtgcaccacttgggtcgatgat

SEQ ID NO: 44031 - DNA, 360 bp, Zea mays
  unsure (1)..(360): unsure at all n locations
actcaatatcctcgactctcggaactttgattgttatctcgcacacattgctcattntatacctttgatcatgtgtctttcattagggacaaatgcatatgtcttattcttcttgtggcaaagttaagactaatgctgttccaagaatatttcatgattagtcttatattgaaagatgaatggataatcgtgatatgcaacgcttccactacgactctatcggtatcatttatcctttgccctactcatgtatctacattcatatcttggacaaagcctctaggtctctccgttttctgcgcttaatgccgaatgtggagagaataatatggccaaaagcaaatgaccgcaccaccaccc

SEQ ID NO: 44032 - DNA, 169 bp, Zea mays
tgtagccgaggctttctgcaaaaatgctctagtgcagtgattcacttgaacttaaaacactttttcaatgaattagtgcttttttagagaaaaagggtacgcgaattttcgtgtatgtaatgctatgtttaactgattgttctgtcgcaaggtgcttaaaacacccttg

SEQ ID NO: 44033 - DNA, 422 bp, Zea mays
agctctgtatgggcgacggtgtgcgactcctataaactggtctgaaccaggtgaaagaagtttcttcacgcctgatatggtaaaggagacagaagagaaagttcaacaaataattcataatttgaaagaagctcaagctcgtcaaaagagatatgtagacaagcgacgaaaacccttgtactttctagttggggattatgtctacctcaaagtctcactgatgaagggtatatcacgtttcggggtaaaagggaagcttgcaccccggtacattggtcctttccctgttcttgaacaatgtggaccagtggcataccgactccgagtactcgaaacattgtctgctatacataatgtgttccacgtgtctcaattgaagaagtgtcttcgcgttcccgatcgaaccattgaagtaatagatg

SEQ ID NO: 44034 - DNA, 321 bp, Zea mays
agttcagagctgaaagaatctttgacaagccttcagaataaatgtctggaattcagcaatcgatgcgttcaacggctgaagcacgtgttctagtttgttggagctatcagcgagaagtgtactccttcggctgaagaccttcctggtgccttcgagcatattgaaggtgaaattaatgatcttgacgaagttgtaactgggcatggtgacttctgtgccctggtagcttctcggggcacaactgttgcctttttgaagtctagctgtgaacacgggaagatcatcaattgacccaacttcagcttgtcaccagcaaactta

SEQ ID NO: 44035 - DNA, 126 bp, Zea mays
gccggaagctaacatatccttggatcgacgaaagaaaacctctccgaccctaagagggatggtttttgaactcccaaacgccggggaaattcgcctggcaaattgccctaaccagtttccttcggg

SEQ ID NO: 44036 - DNA, 353 bp, Zea mays
ttatacatcaacctcttctgaacaagcgctgtacttactgtatagtgcgaatcttgtccatacagcagcaaaagagcccctggcgctggtggagttagaggcggtaaagctaataaatactggttcacgtcgttcgaacgctctttgctgagctgatctctattgaaaaacttgcgctgacttcaacactacaaagaatggtacattctctctgtcatctagatataatgaatcaagatgccaacttcttgcaccgtgaccctttttgcgcttgcggttcatcaagatactcgattattggatacttcactccttgtgaaacaacaccagaattcccttttcctgaaaacatt

SEQ ID NO: 44037 - DNA, 453 bp, Zea mays
  unsure (1)..(453): unsure at all n locations
atcaatcattacccttaagatttctaccacttcagtagtacgaggtgttcgaatgaagctcttcttctacttcagtcaccctcggctcttgaaatatagcctttcttttcttccgctcacgagcagaatttctctttattaaaaccgtctcattctccttcaccattctggcagcgtgtctatttaaaccgctgacaattctttttctatttacccattcngcacgcttgctaagccgctcataatcaaggtattcaaaccttagagcattcatcaccccgtttaaccttcattctggccgggtgccaaaagctgctgtcatcaattggtgctccttctttggatagtactccaatatatcattcacataatttcaccatttctaccatactagcaaggttctccaactgctttcatattaaacagacgatatcaacaagtgcaggtcttctt

SEQ ID NO: 44038 - DNA, 406 bp, Zea mays
tatcttgaacaaaaaggagatagaagttgagatttatcttgctcttgtaacggatggagaatataacattaggaacacatggacgtgatctttctgtctcccctcttgatatgagaactatatataataaagctgagcaaaatatataatagaatgactcttaccttttctatttgattataaatagggtcctacttagagcactcatgaaccaaggaatctatctggattaagattcctactctatactggtctagatgacatttggacaaagaaagtctatattgtcctgtagttagagagatatgacctaaaaatgaatggacacaacatatgctgaaatttcgcctctctattattagctataggtgaaggactaccttttatttatgatttgtgcgtaatg

SEQ ID NO: 44039 - DNA, 350 bp, Zea mays
taatataacttttgcaatacaagtgagctgcaagtttttttggtcacggaggggcccatggtggactgtctcaagcttcgctaaaaaggaaagtcaacgtgagcagagcaatgccagttcaagtgacagtcgagctactgttctttattataggacgtgacccacccatggtaaatacaccatgcccttacatttgctatactctatgtattcatcaggttaaatacctttatcttaagctggttctttttgtatatgcgaactctctggcataactcagttacaccttctctattcttgacttttatatctgccatcttgttcgatcttgactctgaaactggtatgtt

SEQ ID NO: 44040 - DNA, 411 bp, Zea mays
aactgagcaccctctcaagtttttcctcatttcaaataagtgaaccacaatttatttgaaccatgacacaagctagattgctatgcccgtcaacaagaataaatccattcccggactacccatgatagatatcataagggaatatacagaaattaaactatcctatacgtccccgaaacttgccaagataaaaagcaatcaaatctggaagcatgcatataaaacaatcgactaggaaatgccacgtcgcagatgtcaaacaatgaatctcccattactcctcatcctcagaatctgaattatagcaaaataaaataagttgaactcacgcacatgccttcaccattagggtctctatccaatgaaagttcacagagctatgctattatatttactatgacatgacagctc

SEQ ID NO: 44041 - DNA, 236 bp, Zea mays
gctgcaacttaccatacccccatcgattattatggctacagatatgtcggctggtttccaagaatcctcagatatacaatctgtataatcaaaattcaacattttgaccacggaagattgattttcacggaaggtggagcagaactttctgctcttgactggagaacgatgactgatgacagccccctatgtttatacggggaatctgaagattccctgctacattggatgtccca

SEQ ID NO: 44042 - DNA, 435 bp, Zea mays
cctgcagcatgcagcttatatctcgctgcgttgtagaagcctttaatatcaattggagagcggtcttgaggtgttcgcctcctggtgcagagaagagaaatcctgctcctgcttcctgcagcttcaacgagccatcaaaatacattcgccatacttctgcggtttctggattatccggcacttgctgttctgtccattctgatacgaagtcgaccagtgcttgagtcttgatggcagtgcgaggtctgaactcgatatcatgggaccccaactcgcaagcccacttggctattcggccaatggcttccttgttgtgaagaatgtcctctattggaaaaccagtaactactatgactttgtggtcgtcaaagtagtgacgcaacttgcgggcagttagaagtactgcatataatagcttctgaacttgaggatact

SEQ ID NO: 44043 - DNA, 284 bp, Zea mays
tcaagcaccgctcgtacacttcttgaaccaatgcaagctcctgtcctgcatgaaaggctctcccctacatgtcgattactcgtgacagcttctggatgcggttcatcaagaagtcttcttgcttgatggttgcctggtagaaggcggtcctagcatcagtccgttctgtttccaatacgccaactactttgtctattttgcactggagctttccaccggcaattaaacgtgacagttcccttgtttggagtgacatgataataaagagtaatcttgtactaaca

SEQ ID NO: 44044 - DNA, 141 bp, Zea mays
caccacacaggccaaacggaaaagcaaagccaacaacccaaagtctggaagaaccagcggccacccaaacagcgaaaataacaggcaaaaaaggcacaaaccagcggaacttacagaaacggcccaaacccagacccacaa

SEQ ID NO: 44045 - DNA, 378 bp, Zea mays
  unsure (1)..(378): unsure at all n locations
agaaactaagcttgccagccctcngacccggctggactataccggatgctctatatcgacctcaccggacttcggtctttcgacgacgcgcgtggaccgagctatctagtgagtctgcgccaaattccttgcgctcatatcttctcaagcatcccgtgaacctccctgacccatccaattgaactatctcgccgtgaccaggccggactcctcgccgccgacgagcattcccgcctgcgcgcgtggaccgaccgactccggacatctccgacggcgacccgcacaccgttgtgatccctgagacctgcccttcgggctcgaccacttcaccgaaacaatctcgccgctggtaagcccctgcaccctttctttgcgcgc

SEQ ID NO: 44046 - DNA, 431 bp, Zea mays
gcatgcaagctcgaaagcgagcacacatgcatacactatatattacatcgggcctagatgcggtaatattaagcaaactaccaattatcgaacggataagtgtttgatcaactatcgtacctccttcatctaagtcaatatgaccatttgttgccataggagtcttgataagcttagcattgtctaaaccaaaattcttgagcatgtccctcatatatttggattgacttataaaaattccatctttcaattgttggatttgaaagccaagaaagaagctcaattctcctatcatagacatgtcaaattcctttgacatcatttttccgaactccttacaaaataattcattagtagagccaaaaataatatcatcaacgtagatttgacaaacaaataaatctttaccaattcttttagtgaatagagta

SEQ ID NO: 44047 - DNA, 301 bp, Zea mays
tttttccaatacccgacttctaaattctgtgcccgccactgcgttaacagattatctatctacgttgggtagacacttggctagccagaattagctagagagagagtcaacttaaaagagtcggatagtggcggcgtttcgaccccagggggtccctggaccgacgagtaaattgtcgctgcgtgtcccatcccacatgggtcggcgcgagacggaacatattggggaaaacagtaaggggaaaccacagcctcgtgttgtcctgcggctagggcggatgcgctagcattatggggttaca

SEQ ID NO: 44048 - DNA, 372 bp, Zea mays
  unsure (1)..(372): unsure at all n locations
acccatgttagtcttagcaattaatcaagtgtcgagttcagctctatcaaaatctaccaagtatagctgaccctctaacactcccttaaatgctattgaatcatcacttcttctaaagacagtgacacctacatcagtgaatagacagttgtaacccatttgacctaattgggatactgaaagcaaattgtaatctaaagaatctacaagaaaaacatttgaaatagaatggtcaggagatatagcaantttacccaatcctttgaccaaaccttgatttccatccccgaatgtgatagctcgttggggatcttggtttttctcatatgaggagaacatccttttctccccggtcatgtggtttgtgcaccc

SEQ ID NO: 44049 - DNA, 427 bp, Zea mays
agctttgaagccacgttgcaaaagccttttaccgtggccgctgacgaccatcccacgctgtggtggcgttcttatcgccgacgaggggctgatttttattcccccccaggcactgtaccatggtgagccccccatcatcacacctgacagtcaatgttgaggctcaaattactctcaaatttttatggcaacatactccatgctctacagcaatgttggagagctacaaatcagctacaagtttgtcatagcagccatgggcagattcttgctggatcatagttgaatccatgctcaaagtctcagtggttgcactgtttgtctgaaaattcagacccagtaacctgacagtccaacttcagtcttaattatctctaaattcttattaacaactatggctacattcttaagcaaaggtgttctccta

SEQ ID NO: 44050 - DNA, 323 bp, Zea mays
cttggccccacctgcaggctcgcatactcccctgaggtgggcctatgggccactgtcggtacctggaaactatggtaccccttactgatggataaaagcacaggacccatgcgggtactcttagtcgcgtggtaaaagagctgtatgtgggaccaggccatgactcgccctagcctcgggcgactactttgggccagcaacagcgcctgacaccaccacatgggcgagtccggagctgccatttgtttagaaaaagtgatatactccaaggcatcaagagtgagtctggacccccatgggaaagtgccggacccctgtatata

SEQ ID NO: 44051 - DNA, 410 bp, Zea mays
  unsure (1)..(410): unsure at all n locations
agcttcagccccatacaccattattaatggggtctccccagtggatcggctgggcgtggtccggttcccccataatacggatgggagctcactgacccaatttgcgccatgcttttttaagcagttataagtgcgcgtcttgagtcccctgaggatttctgcattngccctctccgcctgcccgttacttctgggtgagccacggatgcaaagcatagctgggtgcccatgtcctcacaatattcctgaaagatccgacttgtaaactgcgttccgttttctgtaatgatatggcttatgacaccgaatctatagacgatcgacttgaggaaagcgacagcagcactctgggtaatgttgaccacaggggtggcctctggccacttggtgaacttgtcgatggcgacaaa

SEQ ID NO: 44052 - DNA, 300 bp, Zea mays
  unsure (1)..(300): unsure at all n locations
tcctctcagcttctgcaaagtagcccagatgtattattatgggcatgtcagcatcagaaacaggagaattcccaaaatctaagtggctgggttctgaagggatcataataccataatccttctcttcttcatcagaattttcatcttcaatgtcagctttgtcacttcgcagcgaggaccttcgtaatggtccctctgtcacaactaaccagactatctcatgacttcggatatcagagctatctcagcgggctcggactactctccttcacgagttacacttgctgntgagcgtactct

SEQ ID NO: 44053 - DNA, 398 bp, Zea mays
tgcaagctttaagagggacatggactcccatttgttatacacacgcaatgaagacgcgaccacctgagcccttgaccctttaccaacaaccggccagacccgtctggaatcttcacccgagaccatggttttaccaccaaaaggtagtgcgggtcgacccattattacgcgcatgctattgtccaatggctccacagcttgtctcttatgcataaaagcctcctcccagaaaatgagagatgctttccgtaacaactctgcttgtccactctggttcgtgaagctacatacagcgccatcggccataatgagtggtatcttgaaacgtgaatgggccgctctttcttcaggcattattgaaaccgcaacgccaaatgtagttggtgccactgcaatct

SEQ ID NO: 44054 - DNA, 343 bp, Zea mays
actcagcctagctacgggggcataggtttcaccgaaaatcaaaccttcgacttgtgagtatcccttggcccaagtcgggctttgttcttgtcaccacaccatgctcatcttggttgttgcggaagacccacttggttcctacaacattttgattaggacgtggaaccaaatgccatacctcaatcctagtgaaggtgttgagctcctcttgcatcgccaccacccaatccgaatcttggagtgcttcctctaccccatgggctcatagaggaaacaaaagagtaatggttacaaagatgtgcacacgagatctaatggtaccccctattgatatcgccaagat

SEQ ID NO: 44055 - DNA, 410 bp, Zea mays
attttcctctctattcctaagtctacaattccatgtggagtttaaattcctctttggactttaatatatatattgtcgcattatctttactctgtcacataatgcacacataataaaatcgagcatgatgcataattgtgtactatatgtctttattaatggtttttgggcatgatgttcacataagatgatgcatagagatcaacttccaaaagagacattcccctctctggattattccaacaactataaaggggtgtacaaattctacacgcctctaaaataatcctctccttcagattaagaatatctcaggaaaagatggggaaattctatgtgaagctcttcttctctctccacgttgcttcatcttcaccgcggagactccattgaactttgccatctttatc

SEQ ID NO: 44056 - DNA, 421 bp, Zea mays
agctttaaccccccaccgccctccgcgagattcttttctgtttctttctaaccataatgaatgcgatatcgaatgtcatacttgatgcatatttactttatttgatcccttgtgtgatgtactgtttgtttcccaatttgaatggatgaatgtatgtatgcctgcaattccataaagaacgatccggccgaatagcccaaggaactcgcatgataagcccctgagcagcagtcggttggtggaggcaagtgtcccttgacctatctctgtcctattcattatttaattcacctcccgctctacacatttatgcctaaggattgactatgctttgttacccatgtccttgtctacctatctgaggtgattattattgtttagctttatgctattgcttaacctttatcaatgaacatgatga

SEQ ID NO: 44057 - DNA, 368 bp, Zea mays
  unsure (1)..(368): unsure at all n locations
tntcaaatggacgtgaagagtggcctcctcaatggaccaatcttataatatgtctatgttgagcaacctcccggctttgaagatagtgaataccctaaccatgtgtattaactctctaatgcgctttatgggctctagcacaccccaagagcatggtatgaatgccctagagatttccttatcactaatggattcaaagtccgaatagccgatcctacactattcacttaaactcttgaaattgacttgtttgttgccaaacttatgttgatgatattatatttgggtctactaacgagtctacatgtgaagaatgtagtatgatcatgacacatatagtcgagatgtctatgatgggggagttgaag

SEQ ID NO: 44058 - DNA, 361 bp, Zea mays
aatttaccctcattaccttaccctcgaagctttcatactgatggagatctctatctgagccatgaggatccacgggtatagaaccaaatacaacacgcatttataacatccatgaactgtcttatgaacacgaaggctaccatgataggagaaatatcactacaactttagatgctataacttcgtgcctcacatctgaggtgaactacccagttcaacaattcaaatacatgaccaccggccttgatgaatgagaggttctacatgaaaaaagacctatttgaaagagagctatataaggcgattattcaacgtgctatatgggctcacttcagcattacgatgccatccaccgcccttg

SEQ ID NO: 44059 - DNA, 188 bp, Zea mays
  unsure (1)..(188): unsure at all n locations
cttaaaaccagcttcccagcttctgagccctcggcatgcgaatgtacattatgtctcctgcgggtgatgaagctgagttttggctaatcttccttcntctccatattcgtgatagcctgaataacactctagtagactcatgagctctgacatagctgccacatctactagagaatctatccttgata

SEQ ID NO: 44060 - DNA, 386 bp, Zea mays
tagtcttcgatgaaaattaacgagttctctggtttgattaccacatcattacataagcccccacacgcttgccccaatgatcgtgtaaacatggtggaatggctctctgataaatcgctccagcggttttgaaggcgaacgacatggagggattacataaagcaccgcacagagtaatgaacgctgttgtttcttcgtcttccttagcaagctaatttggaggtacccggaatagcaatccatgaaagacaacacataccatccggcgggggaagtcaccacctgatctatcctctggagcccgaacggaaccttcggacaatgttttgtgagatcacgataatccgacgcacatgctccaatccactttagttcttatgaggaca

SEQ ID NO: 44061 - DNA, 399 bp, Zea mays
gtgaagattcttcatcccaacatgggctagtcggcgatgccagagcctacccatgttagtcttagcaattaagcaagtgtcgagttcagctctattaaaatctactaagtatagctgaccctctaacactcccttaaatgctactaaatcatcacttctgttaaagaaagtaacacctaaatctgtataaagacagttgtaacccatttggcataattgagaaacagaaagcaaattgtaatctatagaatctacaagaaaaacattggatatagagtggtcaggagatataacaattttaccaagtcctttgaccaaaccttgatttgcatcctcgaatgtgatagctctctggggatcatggtgtttctcataggaagagaacatccttttctcccc

SEQ ID NO: 44062 - DNA, 431 bp, Zea mays
agcttcttatgcagtctgtctcactaactgtcatacccaaaaattgtaaccaggaaaatagaggggtgaaagagttgatcaccccaagtgcatgacttttattctatatcacatgctaacactcatgtcccaaataaaccaaatcaacaatggacacaatacttaattatgcatcatgttggtctttggttgtatgtgcattaaataaaaaaatatatataataaggataaaaaaagaataataataataagttaatgaatatcagaagttggattaaaccctaagttgaaatttgggtttgaaaataagaaaaagagaaagattatgaaaatataaatgatatatatgtaaataaatatatccagagtcaatacccctaaatcacaaatataagttgtagtgatgaaccatagaggtttgaattcaaatt

SEQ ID NO: 44063 - DNA, 300 bp, Zea mays
aagcggcccaatattttatcttgtctatctacaagaaatactccgatggtaagtctatatgctgttgagtgctcagaaactgctgcctatttcaagctacaacaaatggggcttcttacaccgctgaaagataatgagaaccgaaagctcggaaggatgaaaatggctgatacctcatgaattgttcaatatgtcaatatcgtcagtaatcctgtgtacatactcatgtgatgacccggggtatgagaaaacaaaaaagccggtgaggaagcgttgcagggcttgggaacttcaacagac

SEQ ID NO: 44064 - DNA, 239 bp, Zea mays
agcctctaagggagaacacattgacgatattctttgttccttctgagaaagacaataattgtttcgcatgccatgcacgaaagccatgtggtgcccatcatccacacacgaacatcatgactaccgacaggccactagagcttctacacatggatctatccgcccgatgctacctaacatcgggggagtaatactgttactaattggggatgaattattctcgcttcacctgggtattc

SEQ ID NO: 44065 - DNA, 401 bp, Zea mays
gttttaagtacccaacttttgatatttcctacaacggttattacaacagattatggaacccttatgaaaggttcgtcattcctgcatttagatcccaactttctagctaccactttagcaacacatgcttgtataatagtatttggaccagtgaattgcttcctaagcgcatgagaaatagcatgattacgcctaggcctactttctaccatgagcatgagaggagctagttgcaaacatggcattaaaaatcatgataagccggtaaagtagcatgattatagcacctatcatgatgagcaacattggaaatattcttgacatgagcataaagattagcatggctcttttgttcatgtgaagagtaagagctactagccataagagccttccctttctcc

SEQ ID NO: 44066 - DNA, 306 bp, Zea mays
  unsure (1)..(306): unsure at all n locations
tgtgagggggaacacgcgctaaggtgctctgctgcgctgttncaaccataccgagcttgtgctagctgtgaagcatgcatccaggcgggatgcctctctttgcaccataaacgtgatgaacacatccggacctttcgcgatgcttcgcttgggcctcgtcagacctcttccctatctacgcatatgcatgagtgagtatgggattgttttacctgatgcactttccgcgctcgattgtgtattcattttgcagggactctcctaataccactgtacccttagacggctcctatggagagctcataa

SEQ ID NO: 44067 - DNA, 417 bp, Zea mays
  unsure (1)..(417): unsure at all n locations
tcacctgccgctgcaagctggtgccatggagaatcttatttcttgtagtcttggcgggcaaactgcttgccgttgtcgactgttacttccgaccgtacttcgatgcggcaaacaatgttttgccgaaagaaattctgggcactctttgatgttattgtggaaacagccctcgtctctattcattngggacagtactcaacagcgactaacgcgaactcgaggttcccctgagccgtgggcaggggcccgacgatgtccactccccaacgcttgagatgccatgtgtgggctatcagacttgtgaattgctaggggctgcctgatccacgagaaaatttctggcaggctttccacgaccttgtgacccgatttgcggcatagatcatagcctgtcagtacataccttggcggatcacc

SEQ ID NO: 44068 - DNA, 255 bp, Zea mays
gtaccaaccaatattggggtggtgtgcacaattaacatcataagctcacaggaaatatgtgacaaattgcaacctcactaactgactatgttcaataggagaatgtaacctagcgtatgtaattattctaaacatataataacttaattggcataccttgtgctttgcgtctgaacacatctgcaccaattgcattcattagatccgctgccatatgtttaaccggcgaagtggtcctcacttgaattgctggta

SEQ ID NO: 44069 - DNA, 173 bp, Zea mays
aatatgtgattgaatcaatttgctggtgagcatgagatagccccccttaactaatacatgtgattactagatatgggataatgaaaatggtgtgagttacatgtttccaacaaatgtgcgactaagggtattcaccctcatcacctgacgagtatgatgatcatggactccct

SEQ ID NO: 44070 - DNA, 414 bp, Zea mays
  unsure (1)..(414): unsure at all n locations
agcttntggttccttggtgaccttcagttatttatatcacatgttgttgctgcgncaaaaaccagcataaacggcatatgtacgtatgtatatatttgagttgtctgttttttattttggtttttcataccacaatcattcaagaaactgtattttgatttgggaaaagtaatggttcggtaaatctgatctgctgccaaattctgagccttgctgtggaatatgtcgattatctgccgttntgcttccgtctgattcagtggcatttatcatctcgttgtcaaatttgagaacatgaagaatctagttcgcattctcaaatactgtcagtatttatactaccagcagcataggactagaaagtgtactaatcatctcaacgagctttcagattaactgaaatctgctgctcgt

SEQ ID NO: 44071 - DNA, 394 bp, Zea mays
  unsure (1)..(394): unsure at all n locations
cttaaactagctgcaacgngcatcctaccttgagactttttatatgctgctatgctctagtcatctggaatattaagaatgcatccatgaacactactatgaacttgtcgggtcgtccatgaacacacttgttatcacgtacattaagtaagctggcgcattcgtcaaactcaatgacatgatcgtgaactcatataatccatacttaatgatgaaggctatctctcggatgtctaatggtcggatcttgagctaatggtaacctgacctcagatctatctttgagaacacactggctcctctcatatgatcgaataaatattaattctggcaggggtactattcttgataaaacctcactctagctcgataatgattcacattctcttcatgc

SEQ ID NO: 44072 - DNA, 421 bp, Zea mays
  unsure (1)..(421): unsure at all n locations
agctntagctgatttagagtcccttgatggattatctccangcttagtttttccatttcctgacacaaagtattctcggaggtcttcgccataagacagtggcaggaagtcttacgactcaatgcatctgccaccacattggctttacctgngtgataatggatctccagttcatagtctttaatgagctcaagccatcatctttgtctcatatttaactctgactgggtgaagatgtacttcaaacttttatgatctgtatatatgggacagatattacccagcagatagtgacgccaaatctttatggcatgaaccacagcagctagctccagatcatgagttggatagtgctcctcatgtctgcgcaactgccttgaagcatacgcaatcactcggccctcttgcattattacacagc

SEQ ID NO: 44073 - DNA, 445 bp, Zea mays
  unsure (1)..(445): unsure at all n locations
ntacaagtacttaaaaagagaatgatgaagtgagagaagctatttcttctacaagagcaacacaagaccacaaatgatcctctcacaagcccttaagcaccagcttcgattttgggaactttgagtggattgattgctttgattgtgtcttggagtgttggactctgctcttgcaatgaatgaaaacttcagaatgcttggattgctctgaatgaagtggttggggggtacttatatctcccaaccactttctatcctttggcaaagtctactggcgatgggcgcaccggacagtccagtggcgcaccggacagtcattggtcatccgtcggtgcgcgccacgtcagcgcgttcgttagggtttggatcacttgacccgtggagcttttgtctttatgtgaccagacagtctggtgacctctaacttatcgctctgactttgtct

SEQ ID NO: 44074 - DNA, 318 bp, Zea mays
aacagcctcattcaacatgagctattatgctattctcaaaactgcccatgtctgtcttatcaataaaactagtgtcgagctcagctcaatcaaagaccacttaaacaacggaccctctaacacacgcttgcatgctatagaatacatcaccgtgggctaaagacagccacacctatataacgtaaaaagacgggtgtcatccatttcacataattgagaaaccgcaggcatgttataatctaaagaatctacaagaagaacattggatatggagtgggcaagtgatatacctttttacccactcctaagaccaaacct

SEQ ID NO: 44075 - DNA, 478 bp, Zea mays
cttaatactcagcttgacacaccatgtgtcatctctaatgagacgtgcgagatctttctgtcttattcctttctcaacatgccaaagcgggtcttatcacgtggcttagcgaaaatactcgctgatagatacttccacctcactccttctaaaatgatggctccctgagcagcacgatctcctatgaggtgatgacaaattcccacgagcttggtgcgagagtggtgtacatgatcattacctattattacagcgctctcattgccacactacaaaggtaccttctctataactacgccacagtctataagaggtcggcccatatataatatctgtgtgcaacaaacacccgcggcaagtattccccttccgcgtagacaggaacactattagcgtttggatgccatgaatagcatctcccactaaggcaccccaaagacttttcaacatttggaccgcgtactcagttgattaccat

SEQ ID NO: 44076 - DNA, 360 bp, Zea mays
cgtgagatttggcggttggatgacaacccaattaaaggactaacaaatgttctaagtggtgaacaggcgcttaaaataaagcctactaggttcaacacaagtgaacaaaagtgatggaccaagaactggattatggatacataatggacctcacgatgtaaatggacattgcaaaagggagacccgggtgcgtaggctcggaaaccactgatcaatccaacgaccaatgcaatataagcctttatgaaccaaacgcaccggagaatgtccaagaggcttgtgaacccaaagccatggtgagaagaatgctgcaacgcaaggtgatcaatgaaacaattccgcacatcaggactctaccta

SEQ ID NO: 44077 - DNA, 306 bp, Zea mays
taacttgggaagcaacaagtgatgatgttgtttggaaagatgatgagattgatcttcctcccgtccacgcccctgttattcgagggttggtcctccaccgggcggaggcccgtcgtactggctatgagccagcactgatttactgccagcggaggttgtgctcttttcaagacatccgctttcaaaatcctgcattgcgcattcttgatgccaggattgatgggaaccgtttctggacgctctagcatgtggattgtaacagtgatccttcccaagaaacatcagcccatactacattaacgatac

SEQ ID NO: 44078 - DNA, 392 bp, Zea mays
  unsure (1)..(392): unsure at all n locations
cataaatctcagctnacccacatacaccagggcttgagacaacgtgatatttactagaccggcgacggaacccacccctgcttaaacaccacacatcatgttggccctatagcaaccagttctcatgagaatatgaatcatatgcagatgacttccaggagtttcatgactttgatgaattctaatctatactagcggcaaacctcgagtaatctatactacgggtctcacatctctatataaggaacctgtatacccctcttaaatagaaagagaaagaggccaaggcccaccctatatgggtgtctcggtgtcctctgtatgttataggaaggagacggtcttcacaactttcaccctctctgctagggaagaaggatgttctgtgaccc

SEQ ID NO: 44079 - DNA, 312 bp, Zea mays
accctgtaaaacccggaaaccaaaccctatggacctaagtgctaaattagtccacttttgggctaaagtgcaaaaaccaagtcatattaagattctaagttatttgggtcacttatatgaagaatatgcaaatcacaacctgagatttggacttaagtgcaaaagtgccccacttaaccttcttggggataagtctggagtgtagtgacattggctctaccttggggctttgtacttacaaggataaggttttccctaagcaccacattaagttgaaaccaatatagaaacacttgctaaggtggacttatt

SEQ ID NO: 44080 - DNA, 430 bp, Zea mays
  unsure (1)..(430): unsure at all n locations
ttaatcgactgcagcatcaaactgttcattatacataaatttatctttgttgaacatataccttggttgttggcccatcaaccggcataaaaagagctccccatactctctacacctaagtatatatggtcgtggcagaatactttccctttttatcacgcgagtcacaaaaacctgtgtgaactccctttcaaagaagaacatcttccaccttagtggttgggatggttgagataatatttgctattgcaacaggaacttctgatctcatcatagaatataatatcacttctttaccaacctaatataatatgcgaagtaagattacaaagntcaaataatgaaacataaatatgaagtgatagatgagaaaattacaggattatcatctgcattttgagatgatccatgatttctttgaggtaccatt

SEQ ID NO: 44081 - DNA, 341 bp, Zea mays
tctcgcgtacaacaggatataggtatagaggttgaatttgaagctagataatgacagattttattgccatgctcaactcgttcttctttgcatggattaattcttagtaatgccttgagggctcagaagagcaccgaagacgaaaggtgcacaatggctcctaataaccttcggtctgagatgattgaactaataaacgaatgtctagagaaagacaattttgatttcattggtatacaaagttaaggaagatgatgcttattacatagctcatgccgaagcccaataaaccgaaattgaagaccttctgagacaactgaccgaagctatagagaactact

SEQ ID NO: 44082 - DNA, 431 bp, Zea mays
cctaccggacttaagtcactgcagctgcaagctggtcatatattgcaactgtttcacatttatggcactgatctcggaacagaggaaaataaaacttttaagcctaggcatgttcatctggcacgagtgggattcagacgcttttcgtccgactccgacaataacgactctcccccactgcctttaacaagtaattcctcttccccaacaaacgtgacacttgtctcatggcaaaggaaaagaaagtaagcactccaaatactaatacttatgcctcttcaagtgaggatgactctagcgatgatgatgagatagattacttctgcttattcaagggattacatacaaccaaggtagacagaattaatgaattaattgatgccttgtatgatacgaatatactactagaaaagctagaagatttgctgtat

SEQ ID NO: 44083 - DNA, 394 bp, Zea mays
agcttctcgtgaacgacgactttataactagatccgccgccaggaggagtaccacatggatcatggcatcccagctcggagccaggtcaccacaactgagtcgacaactgtctcaactggcggtactacccgaggacggtcgaggaaccacaacaactactcccctccccgggacagacatcatccccgacgaacgaggacacgtgtggagtgtctgctcttactccacgccttaaagccatccaatggccccctaacttcaaggtatccaatgtcgataaatatgaacctaagcagggatccaggggctggcttaccgtctacactaccgcttgtcgggctgccggggcgtccgaagatgtgatgaccgcgtacttactcattgttctcgggc

SEQ ID NO: 44084 - DNA, 317 bp, Zea mays
ctgctcaaagtcgtttcatctaagggctgtattgattatatcgtgttattgggtgagggtgctaacataagcaatttcgatattccccttttgttggtgatctatcagaaagtgataccggatgtctatgtgcttagtgtggctgtgttcaatgggattttacgccatgcggattgcactctcattatcacatataagagggacgttgctcaacttgtagccatagtccctaaaggtttgcctcatctagagtatatgtgcacaacaatgccctgcatcatatactcgtcttcgacggtggatagagctactgaatt

SEQ ID NO: 44085 - DNA, 425 bp, Zea mays
caactgctccggcgaacccacgcaccgaagctgtttatattagccgggccggcgtgagaagacaattatcctctttctctttgattcaggctcgccacgagcaagcgcagcaacctctgctgcagagagggtgttcctccttttccgccctcgagagggataacagatggtcaaggtagacaaaccctatggcatccaacacccgacgcatactcttcatttttcggcccccgaaggcagccgacagtgcatcatcttgcaccttcgatgaaggcccgagcagcccatcacttaaaatttcaatgctctacaaccagtcatcatcaggttcaacgaattcatcaccatagttgacagtgcatttcagtcgaactagaccgccttcggtcggctctttaatgggctccatcggccattccccactc

SEQ ID NO: 44086 - DNA, 420 bp, Zea mays
agcttgccttcccccggaaaatgttatgggctttccactggtccaggcgctcgatgagactatgaaggagcagtctcggcgtgaggacgtggacttcatcgacgagcacaaatggcaagcggcgatccgaaatgcacggtacaaccaagcgctcaggcgctaccatcaacggatcgtgcatatgatgaagctcggggtcggggacctggtcctaacgtgagtaatgaaccgagaatggctccacaaactctccccagctgggaaggacccttcaaagtgaccgacatatgctgacccgggtgtgtccgccttgctacaactgaaggagagcctcttgcctatccctggaacatatagcaatttcgtaagttgttctcatagaaacaagcccggggattcagtattcttcctttgtagcta

SEQ ID NO: 44087 - DNA, 276 bp, Zea mays
gaccacaagtcgtgcgttgatccttgtcaacacgccatgcgtaatctgcttgatgcggaaaacccatttggaacgtaacacaatcttgtgtaagacgtggaactataagtcatacctatttctcatgaattgttaagtcctcttgcattgacatacccaatctgaatctcttagagcatgctccaccctgtatggcgtaataaacgacacaaatgagtaatggtcacaaaaatgagcgactcgagatcgtgttggtacccccttatgaatatcacc

SEQ ID NO: 44088 - DNA, 406 bp, Zea mays
cttggtcaggagctcttagaggctttgttcctgtctaccgaatattgagctctgatgatgacactgatatggttcctgccgattctttgcaagccgccccggatggtgaccctgcaccaagccgtcacatgattactcatgatattggaatccccttattcttctccaacctccaggtactatgctctattctagtctgattttaacacctgacgaactgctgtttttgcactcatctgctctcaatatcaagcattggtggacgaaatggctaatcctcttacagtacagggtgcctttgctccaagaagagcttcgactctggcacgatggaaatctgcgttgcttcaacagcgtgtctatgacttagaagcgaccaatgctggttggtgcttctctgcttccc

SEQ ID NO: 44089 - DNA, 368 bp, Zea mays
  unsure (1)..(368): unsure at all n locations
tctaagggagagcacanttcaggactaaccgatgctcattcttatatagacaggtgttgtagcacatgccaagcatgaaagcaagttggtgcccatcatgcacacaagaacatctagacgaccgacaggccggttgagctactccacatggatctattcggcccgattgcttacataaacataggcgggaggaagtattggcttggaatagaggatgataatactcgcttcacttgcgaattctgttgcatgaataatctcataaccaagagaccttaaagggatgcttgagacgagctcataacgagtttggcttagcgacaagaaaattaaaacgaccacgggacagtagtcaagaactctcaaat

SEQ ID NO: 44090 - DNA, 401 bp, Zea mays
  unsure (1)..(401): unsure at all n locations
ggacctctanattctacctcgcagcacgcaagcttctaaagggagagcacattgtaagatttactaatgttcattttgaaaaacaccgaggtagatgtgcatgcgcaaccgggaagcacgctggngctcaccatccacacatgaacattaatacgactgtaatggcactagagcgcctacacatggatcctttccgccggatagcttacataaacagtcgcgggagtaacggctggccagacattgcggatgaatattgtcacgtcacatgggtaatctctttgcaggaaaaactccatacccaacaaaccctagagggaatcctgagacgagctcagaacgactctgtactaacgatcaacaagactataagcgataccggacaggtttaagaaccccca

SEQ ID NO: 44091 - DNA, 337 bp, Zea mays
ccaatttctttcttaatgccagagcggcttccattataaagcacgctatataagaatgtaaatcttgcattttctaatttgtgctccgcaattttacccattacataaactatatgatcatcttgcatgttaattcataccatgtgaacacggctagcatcatcattaatgtctctacatctcatgcatatttaatcatgatcaacattacatgtacaaggtttgcatacatttaattcatcaatcttaccatgtataacagcattcttcattactaaaattggaaacaaccattttgtatacacttaaatcttaacccttgaaaataatttatcat

SEQ ID NO: 44092 - DNA, 422 bp, Zea mays
agcttctcatgaagcacccattcatatctctcttatgtgtgtccatcctgccatctatgatattggtgagcctgcctagtcaaccttacatactcgctctaaagggattcaactttttcgtaactacttcaaaagagtaatttttatgtagcacaattctaaaagccagttggaccatgcatttgctgctcctccaagttcgttatataataaacagatgcacaaataaaaactagaatagaattaaaaatatttaagtgctataataaaggaaataaaaatatttttaataaatatcatctaaaacgaacttccaaaatttatttatttgtaaaaataatcaggaacacagatgtgaaatgtggattttaattagatatattgcataagagatgtagttaaataaattgtatacaaaacat

SEQ ID NO: 44093 - DNA, 353 bp, Zea mays
  unsure (1)..(353): unsure at all n locations
aagagaatccgtgctcctgctccctgcagcttcagngagccatcaacatacattcgccatacttgtgcaaactacggagtgtctgtgacttgctgttcagtccactctgatacgatatcaaccaaggcttgaggtctgacggcagtgcgagcggcggaacttcgatgtcatgatatcccagctcgcaagcccacttggctatacaaccgatggcttccttggtgtgaagaatatctcctattggaaaacttgtaactactatgactntgtggtcgtcaaagtagtgacgcaacttgcgtgcagttagaagtactgcttataatagcttctgaactcgaagatactctttctct

SEQ ID NO: 44094 - DNA, 416 bp, Zea mays
tatatcacctgcagctgcagcttcgccataattcaagctattattttttgttctttcttccgagccgtcgaaagatttcatgatacaaatagaagctcctggcctccatggaaaatgggctacggagcttaatgaactttacattgattatgtgcacagatcctcgatccagtctcaagcattggcagatattattgaccactggacgccagaggctcatggcgaataatcgaataaagatgccgaagcacggacagtgttttgtgatggttactgcggaaccttcagagcaagagcaactgctgttatggtttcaccgtcccacgttataacttgctatgcagcaagaatggacttcagctgcacaaataatattggtgagtacaaagccttgctcctgtggcttcagaaactaa

SEQ ID NO: 44095 - DNA, 360 bp, Zea mays
tttatacgaagatgtaggtcttaatatatatatatgaagaatatcatgcatagggagaactatttcgggtatgagggagaacgataaaaacttagggttgattagtgtttaagaatgatgttgagctcttatttgtgtgaagttgaaggtatggttgttaacgtttattatattaataggaataatatttgagagggtacataaataagtagattatatttattattagaattttattatgataatagattgaaaagtttattgttatatttttttctgatataactttaataatggtaatattgaagaaatgaatgtgtaatatgttttgattgaatgatattttatattggctaagta

SEQ ID NO: 44096 - DNA, 420 bp, Zea mays
  unsure (1)..(420): unsure at all n locations
agctttaagatttcgtaacaagatgccatcattctgtctccattacatgtccactctttgttgacttgatttatcatatgcattaagtctcataagactcggatttgtcgtatgccaagagcaatatattctcatgttgagcaatagtacttcattcccagcaacattatttaaagtagagaaatgcatttgtaatgcatatctaaacttctcgtctttagaagaagtaaagaccactcctgctcctgttccgccgaattgtaatgaattgtcaaaaattgattgtgcactaatctagagatatgtgttatttgggactcgtatgttggtccactatgacatgtgggcgaggacatgtagatagatggatgggtgtggaacaatgggaaggtaggctacggngaaaggcgatgggacaac

SEQ ID NO: 44097 - DNA, 502 bp, Zea mays
  unsure (1)..(502): unsure at all n locations
cattactgacctatgatctcagcttatgacncctgataggctggcgaaagctcgggttcgctgctcgctccgtcatagcagctcgctcggatcgtctcgttgaaattttccgagctgagctgacatctanctcgggtcgtaacaagccagttcgcagctaaacaagctaccaaatctcagcgaaacggaactatatgcatatcatttacagaataattgatgaacatgttatatatatatatatatatatatatatatatatatatgtgagatgtctatgacctatgaattaaactaatggataattaactatgtgcatgtgtaatttgcgttatgcaatataattatgtgttaacctgtgaacatgtatgtgaatcgtgagtaatgagtgtgaatattgctaattggggtttattgaccgggttgtgaactacagtatattactatttctattgtaaataggttgaattactaaagataatatatgtcatctttctgtctg

SEQ ID NO: 44098 - DNA, 420 bp, Zea mays
agctttctttgggcgggtagagtttatggtgtccttatcgatatctaagcccctggaataccaatccgtaactacaatatcttgatgatgagtaatctattctactgaggggtatagatatacataccttcattgctgttcatagccaccatcacggcgacgtcttacagcgaagacccgccctcttctcctacctaatctccctgcgtgtgtcaaggagacttggtctcgccgttgatcggtggtggatcgactccttcggtgggacctacatgggaggctcaaatcccgttcccgatggggatctaaaacatagtcgcagctctttcagtcactccgatcgcctaggtgatcggtacctcacggagtgtcgattacgattctgtggtcaattgattagcgcttgctaaacccatcacc

SEQ ID NO: 44099 - DNA, 435 bp, Zea mays
gacactttaatatcagcttgttttggatgacactgcggttagtagttaggattatacgcaccaagtgccatgtcataatcctgtcccaagtttactggccaaaccgtgtaaatggattaggtttgagctcaaatcttcccagaatgtggttaaaggtatttggcacgactctgataaatggatcttctggctttgagtttggaaaagcatagaacacagatgatctctgagaagaggtctgaaattcagaaattcagaactctgaatttttctatagggtctttgatcaaaggctattctttggaattaattgagttattttggctatgccttctaacctttcttgttgttaataatatactttacctatatattggctaactcaaatgtaacttttattctctttttatatttctagaatttgttatgggtcac

SEQ ID NO: 44100 - DNA, 388 bp, Zea mays
cttgtgaagatacttcatctcaacatgggtctttcagcgaagcccgagccaacccatattggtcttagcaattaagcaagtatcgaggtcagctctatcgacatcactaaatgtagctgaccctctaatacttccttaaatgctactgaaacatcacttcttctaaagacaataacacctatatctgttaagagacaattgtcgcctattttgcataattgagaaactgaaagcaagtttttatctaaagaatctaccaaaaaaacattggaaacagaatggccagaagatataatcattttaccaagtcctttgaccaaaccttgattccatccccgaatgagatagctctttggggatcattgtatttctcataagaggagaacat

SEQ ID NO: 44101 - DNA, 403 bp, Zea mays
agggagaacacgttatatgtttgtctaacgtacaattcgaaaaagatagaccttgttcatcctgtcaggcaagtgaacaagtgggaggagcgcatcacagcaagaatgtgatgaccacatctagacccctggagctgctacatatggacctcttcggacccgtcgcctatctaagcataggaggatgtaagtatgtgttacttattgttgatgacttttcccgcttcacttgggtgttcttcttgcacgataagtctgaaacccaagggaccctctatcgctttctaggagagctcaaaatgagttctgagctcaaggtgaataagataaggaacgacaaccggtccgagttcagaaccttcaatggatgagttcttgaggagaaggacaagcacgattcttc

SEQ ID NO: 44102 - DNA, 347 bp, Zea mays
atatctatttattatgtgtaaagcttccatggttcaagataacgaaggttacactgtataccctgcttggtattcccaacacaaaattaagataattcattctaggaagtctcactctggctctcatcatgctttatgttaagaggacgctttattctaggcaatcactcatgttaatttcagaaagaatctcctttccatcaatgacctaatattcatttaaactttgaagctttatggctatacaaacagcaagtgttgcaatatgtgggccaaccaaggctcaagacttgtgtgtgggtaccaaggtgctttgttttatgtaaaggacccatacaattggtcct

SEQ ID NO: 44103 - DNA, 426 bp, Zea mays
agcttgacattgtctccctgatggaagccaatgacatccttaattttcaggcgtctcccattatatagcatgcttctagcacatttaaatttctcattttctaagtcatgctcattaatcttatcactccgttgagctatgtgatcattttgttgtttaattaaagctaggtgatcatgaatatcatcatcattaatatccctacatctattgcaaatggtaacatgctcaatggtacatgtagagggtttgcacacatttatgtcatcaatcttagtttgtaaaacaacattttcattcttaagattggaaatagaaacattgcaaatatctatatctctacccttagcaattaattattcattttcaaatttaaggcttcatagtgatgcattcaacttgttcatcttactaattaaactagta

SEQ ID NO: 44104 - DNA, 507 bp, Zea mays
ctcagcctctcacatggacctcttcaaacccggtgcctaccttaacatattgttgttttagtatgagctcggtacatgtggaagagttttctcgcttcacctgcgtattctttttgcacgataaatcagaaaccccagggaccctaaagcgccttttaatgagggctcataactaatttgagctcaatgtgaaaaagatatgaagcgacaaacggtccgaattcaatactctgcaattggatgagtattttgaggatgaaggtgtcaagcactagttctccgctccctacacaccacatcaaaactgtgtggatgagatgaataataggacgctcatcgacatggcaaggacgatgctctgagaattcaatactcacgagcagtttagacataatctgagacacagcttgcatgccataaccggtctattacatcgcttcttagaggactctacgactcctaccgttacaactcatgttttactttctgcattggaaaaatgctcct

SEQ ID NO: 44105 - DNA, 433 bp, Zea mays
  unsure (1)..(433): unsure at all n locations
tgcagcatgcaagcttatactcnggtgcgttggtagaggctggaattttgaactggacggcatatttgaagtgctcgccttcatgtgcggtgaacataatactcgcgcctgctccctgctaacttcgtcgagccatcataatacattcgccatacctctgcagtttatgggttgtctggtacttgttgttcactccattctgatacgaagtcaaccaactctcgaattttgatggtaatgcgaggtcgaaattcgatgtcatgagatcctagtttacaagcccacttggctatgcggccaatggcttccttgttggaaaaatatcccctatcggaaaaccattgactactatgacttgcggtcgccaaagtattggcgcatcttgcgagcagatagaaatactgcatataataacttctgaacttgaggatac

SEQ ID NO: 44106 - DNA, 317 bp, Zea mays
aatattcgcattctttgtcttttcccacatgaacccttatactgtgctgtaaactttataaagttgctcgagcatcatgataacgattctttgtatttcaaaatttgcatttgttcacacgagctgtttcacacatgcgtaagatctataaatttcgccctactatttcgctcaagactttcagacacatgtagaatacactctcccgattaagattaatgatgatctatatataacaagctgtattgaactattaatattagaggttgacacatcagagattctgctcgagaatgcggattcagatctcattgtct

SEQ ID NO: 44107 - DNA, 350 bp, Zea mays
ttcacaccctcccgtctgattatatagtgccgcaagtggaaatgtgaatcttcaatggctttcgcacctaacaaacagtcacccgcactctctgaacggtgggccacaaggtcccagagggtgaatggccagggcgcgcgttactgctgccagatggagccaccttcatcgcggattattttaatcgtttcttgtcaaccaactcatagaaagggttttttggatcttcggactccaaacctacaagacttttcacgtgatcagctcgttcgaaaaacaatctatcaccgcgaaagggctactgttggggtatgttcttaacctaacatctatagaaagaaacacctttg

SEQ ID NO: 44108 - DNA, 387 bp, Zea mays
gatgcacattgacttcagctacaccgcaatggctagcttcacactatatgttgataggttcagataaataaaattcagggttgtgcgacctttcttataccaatacattcacaacactggctttcaattagaacactataacttatgaaataagatcttacatcgagcataacaacctgtgcagcaaccatatctagctcaagtaaaagcatatgatgtatttgaagacataccatgtgatgctgcaagccactgaaatcccagatagaccttgaacactcaagaattacatcaccgccctttcctccactaccacctgtacattttaaaattcattataaggacggattactccaaataatgcaaatctatattagtgttagtatg

SEQ ID NO: 44109 - DNA, 239 bp, Zea mays
agcatgtaaacaagtgcgaggagcacatcacagcacgaatgtgatgaccacttccatgaccactggagctgctgcatatggacctcttcggacccgtcgcatatctgatcataagagggagcatgcatggtccagttaattgtagatgactctttcgcgcttcaactagggtgttccttcttgcacgataagtctgaaacccaatggaccctcacgcgctttctcaggagagctcaaaa

SEQ ID NO: 44110 - DNA, 415 bp, Zea mays
cttctgcaccgtgctcacaactcttcatattcatcatgggcccgttggctccaagtggagtttggtgggcctttatctgcaccatacaatgccacagcgggttcgcattgggcggcccttcttctgctcctcccaaactatcggttgctgaccacggcggaggttggtgatgggcgtactacggctttctggtatgactgctggctgccctcagggcccctcgtggaggcaatgccgtcgctgtacacacacgcacaacataaaaatgcctcattcagcgacgttctttcaaaaggtctgcgcctcgccttcgtctctcggctctcaacggtagctgctgctgaactggtgcaattgatggggctgcttgatggtgtggagttaacaaataccccagatgtacgtgtgtgttcct

SEQ ID NO: 44111 - DNA, 395 bp, Zea mays
tatgaactcacttggattgaactaggtcatacaagcttatgtctaaacttacacctgagacagatgtgatcatgtgtctacacaagaattggatttaatcgctacttctaatgtagcatttaaatcactgttgacacctttcacagtagaatagtgttcatgacaagtatatagttcaaaataaagcatttcatttcttgtaacgtcctatagcatacgaatatttgtgcctcaacaaatttattatgcgtcttatacaacaaatcctcttgcttttctaaaagtatattcttatcatgcaaggcatttattaactcattaattttggctatcttagatctatctaagcccttggaccaacatgaataagttacttcattctcatacctaaatct

SEQ ID NO: 44112 - DNA, 415 bp, Zea mays
  unsure (1)..(415): unsure at all n locations
agatggtaagtctgggtgattatgacatatagtgcgtgtatgtgcagagcgcgtgttgttgtctagagcttgttcgctttgcattacatgtgccttcccttttatagtccaagggtggcgcgtataatggtgctaggctaccccgagaggagagccccactgaattggtattgaatatatacaacatggagcaataagtgccttagcggatagatatttcctcctcggtcactgtgcatatctttttgaccgggcatgccctccaccccagttgtagccctacgcctactgcagagtacacctgattggttgacgtattcacgtatgtaggggccagtgatagggaaatgtgccatanggccatttctatctggtttggtgattaagtgtttaacacaccatcttgaactaacta

SEQ ID NO: 44113 - DNA, 392 bp, Zea mays
  unsure (1)..(392): unsure at all n locations
cttcacgaagcatgataagaagggaacgtgtgtttcgccgaacgctcanaaaatggtatgtatgcaaaggttcatgcatcgcaaatgaatcaaactataaatatcatcgatatcacatctaaagttacaatatattacacatgtttacagttcagatgtttctacactgacatgcaatcctctttaagcactatatctgcagcttcgctcaaaagttggttgacaaccttatccataatagcttcggccatttctctaattcatcgtccccctctggtggggcccagaatgcctcacangtttgaggaaaaagaacngtatatactatacaaccgaaataagttggattaaattcacagataaacactattatactattgctttgcttggct

SEQ ID NO: 44114 - DNA, 287 bp, Zea mays
acacctctggacgatggccacatccggcgtaaggctccccaactcttcacaaagatctaaccttggtaaacgcggcgaagcctcatagattggcaagacctatattgccgcaccttccgaaagagccgtcatcggccctcgcaagtgacaggaggctaggacataatcccccccgatgtcggagcgccttcactcctttgaccactcgaacagcaacccggctctcgccggacttcaagcagcagctgcccccagttacggataatcataactagtgcatgtcgtca

SEQ ID NO: 44115 - DNA, 334 bp, Zea mays
tatcaccatgtatagcatgcctaatgaaacttcgttgaattatgctatttaatcccaaaacttagtcatccaatatactggtgaccttccgaccaatcagcactaaagtagggcgggctgccttatggtagatttgattaagacggccttagaatcattggaaagtaacttcaagaggtttcacaaagtacttatgggccttcatagattttgggaatcaaaagatataactggtttttctgaactggtttactgccgtcgactgactcggacatagctcttctgtatgatatcgctcttatatgtgtcgcacttctatctggtgaacctaagt

SEQ ID NO: 44116 - DNA, 420 bp, Zea mays
agcttgacaaggttagatgtcgctgatgcatttaactctacgaaataagtattctatcgagatatatgtgaaactaatttggtggtgtagatatgaactattttttaaagagtaaaaagcattcacgtttctcgaactcggtatgttgtgtcatttaagtcgctgaactctgaaaagaccattaaaatatgtccttgaatttggctgtctatttaaaaccggatgccgatgcggtatgccaagttaaagtcacaggggtcctcaaatttgacatgttgtgtcatttggatctccaaacttgtgattatatgccctgaactttcattagtatgatctagcattggcatgccatgtcagcatctggtctgagaaaactcatgtttggatggccgattaatgtcaaagacccatttcttttgt

SEQ ID NO: 44117 - DNA, 366 bp, Zea mays
  unsure (1)..(366): unsure at all n locations
tncatgcagcagacgccagttgatctgcttattttgtcgctctactgtttggaaagttgatggggncacaaaagatggcatatgctgccacagttacccgtactaaagattgtttttttagggatacaaagacttcatatgatgatcacgattattattattcttatccacgatcaattgtacttcgacatggattgtactaccttccctggggtggggaattgtacttgcttcctgaaacatgcatcagtaaacactcttctaacaccgctatcgatgatggatgccttcctgacattgtactgtctttccgcaattttcaagcctttaccaatacactgctagtatttgtaattttggagagag

SEQ ID NO: 44118 - DNA, 381 bp, Zea mays
gcgacacagattgggtgctaagaatgccaaagaggtggagtatatttgcagataatgataccatatctgcgctattcaaatacccaataagaagtgataggtagaaaccgatcaccatttgaatgaaaggatgggttgtacatacaataagcgtgcatacatttattatcttccagaataaaatggcaagcatatgaattggtaactgatcaacataagtgcaccatatattatgcctacagtttggtaaataaaagctggcacgtagcctagtataatgtgagtaaacgttttggataatggtcccacatatggggagcacggtttcggagttgtgaattaccaacttaatctaagggcaaatattgctagatatataca

SEQ ID NO: 44119 - DNA, 252 bp, Zea mays
gcgcttgccatgctagaaagcacagttgtacccaccatccctacaagaacatcatgacaacagacagggcacttgagcttatttacatggatctatattgctcgatagcttacataagcatgccggagttagtactgcctggatattatggatgagctatttcgctttacttgggtggtctgtctgcaggataaatctcaaacccaatagaccttatagggattcttgagacgggctcaacatgatgtctga

SEQ ID NO: 44120 - DNA, 261 bp, Zea mays
acttgcttctatagctgatgacagggaactctgtgggttttcgatataacaagctatagcaaccgaaggtatcatggtatccatcttttctagccttcgtctgataatgcagcttatgaacttcgacaaagctgtccgcatatggcttcactgcctgtcttcggaggggcccagatattaacactaagcctaacgatagtgttaggagtcaactgatgaaagtagataccaaacctctttcatacctctgcaataatccca

SEQ ID NO: 44121 - DNA, 414 bp, Zea mays
  unsure (1)..(414): unsure at all n locations
agcttctcctggacaagtgctgcacttaccgctgagtgcgaagctgccacatataacaaaagaggagcccctggcgttggtggagttagtgttgttagatctatcaagtattgcttcagctcttcgaaggctctctgctggactggtccccattgaaaaacttcggctgactttacttcgaaaaatggtaaatttctctctgctgatctagatatgaatctgttgagagatgccagtcttcctgtcaatctttaagctcccttctttgtacttggtggttccattcgaaagattgcttcgattttgtttggattggcctcaattccttttgttgaaactaggcaaccaagaaatttccccttcttcactccaaaggcacanttttctggattcagctntaaaccagcctgtcta

SEQ ID NO: 44122 - DNA, 338 bp, Zea mays
  unsure (1)..(338): unsure at all n locations
tttctttacaatgagactactacatgaaatagacttgaaaacaggtggtagtctctaagacttagattataaaataacctccccctggatttgngcatacaaggtttgaatacttgtacgagacatgcactttgatttgatatctagaggtgaaaattatctaccatccgaacttttgcacatataagttaaatgatacaacttgtagaatatgagtgttttacctgtagcatttaaaattattaattgatgtatcatttactatggagtgataaagaagctatgtgccgtgcttaaatacacattttaaaccatgtatggttgcttaagtgtatgaa

SEQ ID NO: 44123 - DNA, 328 bp, Zea mays
gaccttaaggaccgcagctgcactcagagaacggctgtctaagctttatttaacagcagaagattcgatagctaaattgcagggatcctacccttttataacctctcactatgatgacttgctcagagaaaccttgaacttacgggcaaaagttctatcccgcccagaaaagggaagccctatgcttctttgctgaatgaacctcattttgatcatgataaagacaactaaatgtagcatatgctagatcatagttatgatttatacatgttgctctagactctatggataatgaaagtactaaaaaaggtgcctaaaaaagctttat

SEQ ID NO: 44124 - DNA, 300 bp, Zea mays
aagtaatttttgaaacaataaatgcaccttccgtcgagctcatggagagagcactgcctactatttctccagtacacaatgaatactggagaactgaaataatagctttccttcaaggcaattggcttgcatgtgaccaagcttataacacgagaatggaggcaagaacaagaccatatgtgataatataacgggaattgatatacatggagtttgttcaccactcctcaagtgtctatcaggaactgatggtatggacgttatgaaagacatacatgccggtctgtggtgatctcacat

SEQ ID NO: 44125 - DNA, 388 bp, Zea mays
gctgcagctgccaattctataaagcaacagatttatcattacagcaaccgtagaccatacccgtaacatggtcatttgcgtgctatggactgaacatgaatggacccttccagaatgctcagggaggctacactcatgtgttggtcgccattgacaaattcaccaaatggatttaatacaaacccattgcttctctaaattcagtccaggccggggaatctatacaagatataatattcacggttgggataccgaataacatcataaccgacctgggatccaattcactagctccgaatacttcgatttctgcgaaaaacagagcatccagatcacatacggcgtaggttacacatccaaaaaccaatgagcaggtggaaagggctaa

SEQ ID NO: 44126 - DNA, 345 bp, Zea mays
aaactaactgtagacgctgcacctgaacaagagtttttttttatttacaacccgactgtttgtacaagctgaaagaaggagattttttcgcaaggctcaaccgatgatgaatctcagctttaaagattaatacatattcacaatcgaccacagtccactctatctatagctcgtcaatgaagccaagccatctaggtcctacatgccttaaaatggttacatagtctaacttttaggattttccactcattacagttttgacactcgcacatatatagtcatataagactcatgctcctcatgcgaccgctcggacaacgttcgaggaggaaatatcgaagggaa

SEQ ID NO: 44127 - DNA, 321 bp, Zea mays
atgcgaggtttagccattaagacagcatctaaaccggccttttcttttgcaaaagtaactaaataaagtttggcgtcatatacacccttaaaagctagtgaaccatcacttcttctaaagacagacacatctatatttggaacagacaggtttattccatattgcacaattgactaacagataggaaaatatattctaatgactctactataaacacattagagaaagagtgctcattagaaattggaattttaactaacccttttaccttgccttgattaccatcaccgaatatgattgaatcttgggaatcccttatct

SEQ ID NO: 44128 - DNA, 236 bp, Zea mays
cataggtcgggcccaagtgtcccaacatgaccttctcttggctccatcaatcagatacgacaacgatatttcaatacgcttgtcaacacattgggctattgattcttgggaagtaattcggctgacaaagcacacatattcatgtattgatgagtctggtttatgccggaattgaaagttcgggaggtttcatcgtgacacttggtgtctcaaaaacaataaaacatgtgggcatt

SEQ ID NO: 44129 - DNA, 283 bp, Zea mays
  unsure (1)..(283): unsure at all n locations
gaactctacgtaaagagctgttgtttttttatgtagtttccgaataactctgtggacaatgagaaagttctcccgaattgaaccgttttgaatgaacccatttcgagcactggagacgatctcattcattcttggcgccagcctgtttgctaatatcttggttaatattttcatgaaactattggtgagactgatcgggctatacatgtcaatcctgtcaacaccctcccttttttgtaaaagcgtgatatttgcctcataacgaaattanggtttgcatcta

SEQ ID NO: 44130 - DNA, 418 bp, Zea mays
agcttatgaagattcttcattccaacatgtgctattcggtgatgcccataacaacccatgttagtcttagcaatgaagccaatgccgagtccaatcctatcaatatctactaagtatagctgaccctctaacactcacttaaatgctattgaacactacgtctgtctaagacagtgacacctacatcagtaaatatacagttgtagcccattttgcataattgagagacggaaagcaaatcgtaatctaaagaatctacaagacaaacatcggaaactgaatgggcaggggatatagcaattttacccaatcccttgaccaaacctgtggttccatgcccgaatgagaacgctctttggggatcttggatgttctctcatgatgagaacaatcttaatccccctcgtctaaggtttgc

SEQ ID NO: 44131 - DNA, 296 bp, Zea mays
  unsure (1)..(296): unsure at all n locations
ctttttatatattattgcccactctaagaatcgcctcggtaatggaagaagacttttccctgcacccaaggtcttgagtcttcaacttttcatgcactctctgagccaaatgcacggatacgacttgtcttggtccttcctcaaaccatactcatgtgggaacccccagtcatggagcctgttatttattgctcaactttgctttgtctacaaatcttgattctaaactngaaggtatgcctagcagctgttgatctgaaacctggattgcaatttgcccttggcagcttgatttt

SEQ ID NO: 44132 - DNA, 394 bp, Zea mays
agcttttcaaagagtaaactgttgatatactttttaaggtcaacgatgtctcgacgacgtctcaacggattggctactttatgtattgagaaaaaatattatacggcgctgataggaacactattatcaatgacttcgcatcttgaaatgttagaatgttttgagataatatgtacaaagatttgaaattgttttgatacattatacatgttgggggtatgcttcgtagccgaagatcctatagaaagagaacaccttcggcagatcctatcataagcagcgctgaagctatcacctataaagcttcgacaccatgacagatctcaagacgaaggggtgaaccgacttacagatgaaatgacttaaaagacccgcaatgtttagtgtcttatta

SEQ ID NO: 44133 - DNA, 333 bp, Zea mays
  unsure (1)..(333): unsure at all n locations
gggctatgggtannaaatttggcagcagaacagtgcaatatctatgaatgctgtggtaacttcacacctagcagtctgtttatatggtgctgcacgtaagaacgtgaatcgtcatgacttttacaccatgcgaacagttgcttgcacccgctgcgcggtggaccgtagagaccaaatagtaactctgcagggtgggaccgctacccgctcggaaactgaatacgttttcgacaacgagctcatggaaggtgtctntcggaccttctgctttctgaagcctaagagactctnttcacggatcaagctcgttacgaaaaacgatctatctccgcg

SEQ ID NO: 44134 - DNA, 421 bp, Zea mays
agctttatatatggagatgtgtatttataaaatccaacatgcttcttgtaaaaaaaataagtatgattttgttgctgtaatcctttaataaagcgttatgtttaggaagcaaagtatggtattgaatagactgtaactatgaatagagaaaccttgctattgggagccatatggcttgacaccaaagtataatacacgattgtgttatattaattgctagaatggtagagtgggctagtttttagttgtgaggattaagctgtcttatgttcctgttaggccacaggttttcatttgactggtacatcttttgttggaaattaaacagcacattaaaactgtactgtgaaatgactgtgccatgatgccctcctatccagtctaaaaataaatagttgctccaagatattacacgtcctac

SEQ ID NO: 44135 - DNA, 307 bp, Zea mays
  unsure (1)..(307): unsure at all n locations
cgatgcaggctccggctcctctccttcctctatgtcnacattctcattggcgtccatgttctggatctcctggtggtgcatatcccaatgttcgttggcttccacaagttgctgctgagtgttattanccgatcctctacaacctcaatggtgttctccctagttcccactagcttctcgagctcctagatctcgtaggacatctgtttcacctgcaggtccttttccaccatctcagtggataggtctaccactatttcctctctcgtattcaaagtgatcctggtagcctccaacaatgccatta

SEQ ID NO: 44136 - DNA, 450 bp, Zea mays
tcgacccgggatccttaaatcgacctgcggcatccagcttgatggccagtcaagaatcatgttccattgtatttcgtatccgaagctcttagtgcatgaaagaaaaactatacagaattggagaatgtattatatgctgttgtgatggcatccaggaagcttccgtattactttcaagcatacaatattgttgttccttcttcgcagccgttgaaggatattatgagaaatataaaaactactggacggattggaaaatgggctgcacagctcaatgaattttgtattgattatgtgcatagatcctcgatccacgctcaagcgttggcagatttcattgccgattggacgccaggggctcaggatgaagaaacaaattaagatgccgaagtatggacagtggtttgcgatgggtcttggggaacctttcgagcacgagcagccgctgtg

SEQ ID NO: 44137 - DNA, 321 bp, Zea mays
ttgacactgagcctgcggtggcgtcttctctatagcttgcataactgttacaatccttcgcctttttggccaaccgccttcttggctgccgaaggctcgttcttcttctgtaaaaacttcattagatgcggtctcagtggacttaacagctgatacgtaaggattcggtcattacctttcagaatttctctacttctgcagcaaaaggcagtgaaggagtttcctcttctatctcaacttgttttggctctggaactgacgccttctcttcttcgatgcagtatcttcgctcaggaatggaggttctcttttagagcttct

SEQ ID NO: 44138 - DNA, 406 bp, Zea mays
  unsure (1)..(406): unsure at all n locations
gcaagcctggcctttggtaccactaagggatccacattttatccaaacggntattccgatgccggttgggcggtgtgtaaaanttatacaaagagcacactcgtggacttgccacgtctttggaaaggctttggtgtcttgggcttcaaataaacacaaacttctagctctttctactgtctaaactgtatcaaatgttgcatgccatttttgcgcaccattgctcttggatgaggcacacccttatggactattgtctctaaataacccaagagtcttttctatgtgactatgagaatgccatttgcatggcggataatcccgttgaacaccgtcgcacttaacacattaccattcggtgtcatttcttaagggaatccccaccaaagggggatatcgagattgc

SEQ ID NO: 44139 - DNA, 291 bp, Zea mays
tacttggtgcacactcctccttcttctcctcccgtgccttgaatgcaaccggttgagcttccgatagtggggcatcatcaaacttcgtgatcttcctcgagccttcgatcatgcactcaaaacatacaatgatccccgatactgtctcagggggcattctattatatctaggattaccacggattatatgaacttgagtagggttaacgaaaataagagatcttataattaccttaaccatctcgtgggcatcccactttacgctcccgatggtgcgcacttgattcacca

SEQ ID NO: 44140 - DNA, 421 bp, Zea mays
  unsure (1)..(421): unsure at all n locations
agcttccaagcatgctgcatatataaaaaagattcatgagaagacaaaggaagcattgagctcaagcagtgcgcaaggctgctagtatgaacaagcatatgaagaaagtgttatttgagccgggggacttggtttggattcacttgcgcaaggagcgttttcctgatcagcgcaaatccaaattgatgccacaaggggatggtccatttcgtgttcttgccaagatcaatgataatgcatacaagatagatcttccaccaagctatggcgtgagcaacacgttcaatggtgttgacctcttaccatatacaagcgaagacatttcagagtcgaggacgactccttttaaggggaggaggatgatatgaccacgccattaagcaacatgttacaaccnccaagtcatactacatcaactcaa

SEQ ID NO: 44141 - DNA, 306 bp, Zea mays
gtctgagttagaaaatcaacacgatttatacataaagactgtcggatcagatcgtgggggagtactatggccataatgagattgacaaaccatggccttagtaagtcctaaagaaaaggcatgatgcctatattctacacctggtaaccctaacagaatatggtagtctaatggcgaaacataacgctcatggacatggtaagatgcatggtacgatactccatctttatattgggtctatcgatcgaagctgtataaagcgatattcatatactctacagagtccctattaataaaaggctaaac

SEQ ID NO: 44142 - DNA, 249 bp, Zea mays
gctcactgagggaacctggctgatctttgtgggtcccccttataattgtggcctccttgacgtaaagactatatctgaatattattgttttacatcattactcgggctattgcaagatttggcaattggcacaaattgacgtcaataaagagttgttcccgaaccttgcccacacaactttgcaaacttaagggcgagttttactggtacttgacattaaactcctgtcaccatttagtctgctggagg

SEQ ID NO: 44143 - DNA, 277 bp, Zea mays
atatctactcctattacgcattatgatccgatggtcgatcctgtgtcaacaccttttcaaataaaatcttacatttcttcaagacttatacgtagtcatcacttttataataaaaaaacctcctccatcgctgggcatcacgcgtaaagagcgtatcacgcctcgcctaacatacagataagatgagccttatctttcgcatacacaaccaccacaagcgttttctcctccgtctcaatgatgccctcgtatattaaccactaacgttcacacctat

SEQ ID NO: 44144 - DNA, 413 bp, Zea mays
gtcacctgcagctgcagcttgggacccgtagcctatcaatggaattgtcctctacatggcagcagttcacaacgtatttcatgtatctcagctacagaaatgtgtgcgcctacccactgaagtgctaccggaaccagatcttgtgatagaaccatacttatcttatcaagagtaccccatcaaggtattggatcagaaggagagatcaacacgggcaacgtcaatcaaaatgtataaagttcagtggagtcaccattccagcaaagaagcttcctgggagactgaggattttctacgctcccgcttccccgactttctgccccaaagagtccgtacgtaacccccaaaaacccacccccacctgtccttttgatacaattataagaaagcttagataacaacggatagtctag

SEQ ID NO: 44145 - DNA, 420 bp, Zea mays
cagcctgcatagaaacactgggacagtgtgctctaacttctccaccacatattcactcatttccttagcacagatcatgcctgtagaaaaagcttatctcaagtattgcttgccacatggggtcgggcatgtaaccaccaaacatgacagggataatcctctccattaatatatgtaagtcatagctctttaacctaaatagttttcccgcttcaaatcacggctcttttcaagcccgcatcataaacatcgggaaatataattttattcatccatctaattacctcgatcttgtccttagaggtaagacagaacaagacacatggcgggtagctggtgacattaagcacttgggttggtcgatcaccaagcattgctagatctcttcatgctttcagattgtcatttgttttttcaaaa

SEQ ID NO: 44146 - DNA, 493 bp, Zea mays
tactcagctcggctcattatgttgggatagccttgagttggcaactctctttgcccttctggcaacattttgacttccatggatggcaatgggccctatgttctaaggtatcttcatgcataagtatgctggatgaaatattgcttcgaatgcattaagtgttcctcgaccaatgattgcattgtacaggtatttcatgtcgacaatgtcaaaaacaacttgctcagatcttgtgttgtggacataaccgaatgttactgacatttgaattttgcgatgtgccacaatctgccgtactccgaagccacaaagcgggtgtgcagcatcatgaatactgtcctctggttcttgcatgtgctagaaagcccttgcgaaaataatgtctgctgcattgcctgtgcaatgagaacattgttaccagaatccctcgtgaccagatatgaccttcatattggaggatagctttactgaaacctctagagagggatggatg

SEQ ID NO: 44147 - DNA, 359 bp, Zea mays
tgacacaggtgatagcgttgcgaagatgtctgaagctgctaagaacgctgctgctgacaagaaactgagtctcgatgaacataataacctatggtttcctatagcaatgtctaaaaccaacacagacaagatcaccactgaaaatctggagaggctgtctgaagatacttgggacaatgaaagttatgatgtggacagctggggggaaaactccgaagatcgcccctggcgaccaagccattcatgttatgggagatcaactatcaaagagaatcatcttgttaatatgagaggaaggtatttccgggatctgtccattgtgagggcggacgaatgggaatagactctgtcacaccctg

SEQ ID NO: 44148 - DNA, 389 bp, Zea mays
agcttctaaagggagagcgcagtgtattgattttaaatgcccatcttgagaaagaaggatttgttcgcatgccattctggggaatcaagttggagtccatcatccacacaagaacatcatgacgaccaacaggccgcttgagctactccacatggatctattcggcccgattgcttacataagcatcggcgggagtaagtattgtcttggaataggggatgattattcacgcttcacttgggtattctttttacaggaaaaatctcaaacccaatagaccttaaaacgattcttgagacgggctcaaaatgagctcgtcttaaggatcaagacaataagaagcgacaacgggacggagttcaagaactctcaaattgaaagcttcttga

SEQ ID NO: 44149 - DNA, 409 bp, Zea mays
agcttgccaatacttgtcaaagcaacagcacattccttcacagcggctacagaccataccagtaacctggcctttcgcatgctggggactggatatgattggacctttcaagaaagctcaagggggatatacccatgtattggtggcgattgacaaattcactaaatggatagagttcaagcccattgcttctttaacttctgctaaagccgcggaattcatacaaggcataatattcagattccggataccaaacagtatcatcactgacttgggatccaacttcaccagttcagaattctttgacttctgcgagcaaaagagcattcagatcaagtacgcatctgtagcacatccaagagccaacgggcaggttgagcgagccaacggaatgatattggatgcactc

SEQ ID NO: 44150 - DNA, 521 bp, Zea mays
  unsure (1)..(521): unsure at all n locations
caaactccagctttcacatatcatggagagctgtgacagccgtctcctttcggtctaagtggtctttcttcttgaccaagcttctctgcttccgggtcacctcctcctctcggcagacaccctgcggatctcctccttgaagagcttagctcctgctcaagctcggctcgctccgatgcgaaatggcaagacgccgccttagtgcgcccctccagttgggaacaccagtcgccaatgcgttggtgctcggttttgagcgccttccactctcaccggatagtcgccgcctcggtttcctggagggcctggtgagcgcgagtcagcacctgatggaggggagtcagcgtcgctctatgctcgacaccagaccgaagtgggctcccaagaataacctccggacactcctgaggttgcggcgggacagctggaagncgctccacgcctaccaacgaccgagcatccgatacctgttgggcctgancagctggtggaacgccgcacttctggcgcccactggactt

SEQ ID NO: 44151 - DNA, 368 bp, Zea mays
agcttgtgaagccaatcacaagtttattgtatatctatacgaaatttaactgatcctcaagatgcaatgaaaccttcgagcagctaaaggtcttattgaccactgctccggtattagctcaaccggacattgaaaatccctttgatgtgtattgtgacgcactacgcagtggtttaggttgtgtcctgatgcaacaaggttgagttatatcgtatgcctcaagacagttgtgcccggctgaagaacattatccaacttatgacctaaaattatcttatgtgggccacccccccaaaatatggggcctttgtccacgggggaatctttttttatttaccagccttaaacttttgacatttttccccctc

SEQ ID NO: 44152 - DNA, 339 bp, Zea mays
tatatcttaatcatgcgctttccgacatgccaataataaacaaggtgactatataatcgcggctcgattcacatgcacgtactcacaacactacaatcttcatccactaccaatttgaatataaaacttatcagacccatgagaatatcttctaatggtcctctcaaagaaccccatcatttcagttatcatcacctgacagtaaagacatagcttgaaacagagaggtgatgtcctgtccaatatactatgcaacttgtagaaatcacagaaagaaatagcctcacactttgactgacagatatatgcgtgcctctacaaccgaaaactcctccgtca

SEQ ID NO: 44153 - DNA, 402 bp, Zea mays
  unsure (1)..(402): unsure at all n locations
agctntgnggattaagattcaagagttacatgttcacctatccatccccccctctaggtgctctcaagtattcagttttttggttgacgtgttttaacctcaatacaatccttttctgtttacgttcttaacaaagctcatgatgatgctcggagccgcgctcataatagcggaatttgaaagcaacaatttgaatgctatggtcacttcatacccaaaaggcagtttcattagcatttaattaatatacgtgtaaatgaaatgtttatggaatggtcactgcatgctcactgcattcccaatccacattgggtcttactggattgggaatgcacatgcgcagtataccactcgacacatcangtcatgttattcttgaaccacatatttatttttcaattc

SEQ ID NO: 44154 - DNA, 472 bp, Zea mays
tcggtgactcatcacatcgatcatgggtgatgattgaacggcaatctgcccgaaatgtgacgctaaatccaagcctggcgttcatgtcatcaagcaaaggccgcctaatagcacctcttcatattaacctatatgtacatttccaagcactgcactgttgataccatattcatgcatcgaacaaacatggattcctacagatcgcagtgcaatgcattcaagtaatattcactgccacagtgcaaaccgtcaagtcgagtattgaataagaactgaatatctactatgaaacggctacgtggcgtatcttttacagagagtagatgatagcagaacacgcttactttgagtggcaacagaatcattgagtgctatagacaatcactgcactggccaagctacatacactcgacataatattgccaagcattctaaattagctctacatatatacctatttctctatgttatg

SEQ ID NO: 44155 - DNA, 419 bp, Zea mays
agcttcagtgcaccaactgctgcgcatgatgatatgacaccgaccaaggttatcttgtccggacacagcccagcttccctcatgctgtgaaacaaggctatcgcttcatttgacatgccattttgcgcatacctgcatcagctgatataccatttgtaaattatcaggccaaaaaatggatctttaatcagcatttctttgcaacaataacataagcgtgtcgccatatacttacccggtgatcatggcattccatgccacgacatccttgtgtctgatgccatcaaacacacgccgtgcctctgccatctctccacacttctcatacatccccacaagtgctgacccaatgagcgagtccacctccatccccgcagacctcacccactcctccacccacctcccaagcaccaaattgg

SEQ ID NO: 44156 - DNA, 311 bp, Zea mays
  unsure (1)..(311): unsure at all n locations
tcttgaaatggaccacaataatccgttgtgttaccacatccttcgcaaccagatgtatgtgtcacacaacagctgagcaacttctcccacacacgggataacttatgctcctattaagttattatgcggatgagggaacaattttgatatgtaaaggtatgaaacacaacaaagttctccacttaccgtctatagctgtttgtgtacaaaatcgactacatcttgacttgatatgcaatccctgtatgaaggcctcaactggcgaatggtgactntcatgcctgaaccctcgcaaccagagcacctcaatg

SEQ ID NO: 44157 - DNA, 411 bp, Zea mays
  unsure (1)..(411): unsure at all n locations
agcctgcgaagagtcttcattccaacatgtgcttattcgcgaattcaaagctagcccatgttagtcttaacaattaagcaagtgacgagttcacctctttcaaaatctaccaagtataagtgaccctctagcactcccttaaatgctactgaatcatcacttgttttaaagacagcaacccctatatctgtaaaaagacagttgtagcccattttgcataattgagaaacggaaagcaaattgtaatctaaagagtctagaagaanaacattggaaatggaatggccaggagatatagcaattttacccaatcctttgaccaaaccttggtttccatccccgaatgtgatagctcgatggggatcttggcttntctcataggaggagaacatcttcttctccactgtcatg

SEQ ID NO: 44158 - DNA, 388 bp, Zea mays
  unsure (1)..(388): unsure at all n locations
tgtagcgcatgccaagcatggaagcaagttggaacccatcatccacacaagaacatcatgacgaccgacaggccgcttgagctactccacatggatctattcggctcgattgcttacataagcatcggcgggagtaagtattgtcttgtaatagtggatgattattctcgcttcacttgggtgttctttttacaggaaaaatctcaaacccaagataccttaaaaggattcttgagacgggctcaaaatgagtttggcttaaggatcaagaaaataagaagcgacaacgggacggagttcaagaactctcatatcgaaggctccttgatgagganggcatcaagcatgagttctcttctccctacactccacaacanaatggtgtagt

SEQ ID NO: 44159 - DNA, 415 bp, Zea mays
  unsure (1)..(415): unsure at all n locations
agctttcctgctcgcaccttcggctccgtatcaaccttcgtattattctggtctaccgcaatgccaactttagtccgaggatacctgttcacacattgtactccagagatactgttaaatcctgtttttgaagaccttcggatgccgaaggtccccaacatctcccgacagacagaaatctccttgctgtcagggagacaatacaaaaagtcttcttcttcactgccattgaatattaacgccccctttggatacttcagtntttgggcgtagcgctgggcctcttgcttttctttttctgataatnttttccccgaagcatgacgaacaacataatcaaggactttgggggatgcttcgggggcaatagcactgatttcttcagttggctctgttattttttcttcctcggttt

SEQ ID NO: 44160 - DNA, 359 bp, Zea mays
  unsure (1)..(359): unsure at all n locations
cttctgcanagaataatggatgcacaaagaagtgatgatggtatgaaacacattcatgagaatatgaaagccggtaaagcaaacttgttcagaaaagatgatcaacgtattgtatggtttaataaccgcatagttgtgcccaagaatgttgaagtccaccaacaaattttggatgaagctcatcttagtcgctagtccattcattccgaaagcactaagatgtatcatgatttaaaacaacattattggtggacgaagatgaagattgatattgcacgctatgtggcgagatgcgacacttgtagacgtggcagagccatacatatgataactgctggtccatttgcaatcgtacctat

SEQ ID NO: 44161 - DNA, 421 bp, Zea mays
  unsure (1)..(421): unsure at all n locations
agcttgggactcgcaggttttagtccgggtggccaatttgcgtgtctggacccccttgggttgcggctctagatactaagacacttgtcgcaggtcggtggagtcagtggagcgtgcatgcccacggtacgggaccaagctgagcggctacacaggctccggaccaccccaagagactaatgtccattctttagctccggtcccgaggttgtcggacccgcagtacttatagccccaaatactaggtacccgtcacggagtggtggagtgtgcacgctttcgggtacggaaccaggctaagcagccacacaggctccggaccaccccatggaacggngtcccgttctctggagccggctcccaagctgtcggacctcccaactttcgtatcgcgggccctaaactgcaagcctggctgctc

SEQ ID NO: 44162 - DNA, 422 bp, Zea mays
agctctgtcggtgctagacgcgaagctaggcactatgtctccagagtcgagctggtccgagggaaggccgcttgcatcggctggtttccctacacgaagcaacaaccagccggtgacgtcgggttcgtccaccttcgattcggtcatctatcccaccattgtcctcctccaattatgagcatatgcaagaatcgtcctccttcccctttttagttcgattagtctatgtcccctctatgttttcttgttcgatgaagcctaattgcataagatccaagtatatcatacactatttggttaaatagtttgaatgtttgctaccttctcaagataatacatgcaccacttagcacaacgacatatttgtagttattttcaggtagatgtttggagtaacatctcgtatatctgctcatggttca

SEQ ID NO: 44163 - DNA, 224 bp, Zea mays
cttggatgcactgaatggtgggtgcgtgggggtatctatagccccgactaccaaactatctcgttggtggagcggactgtcgtatggtgcaccggacagacctgtgcacaccggacatgttcggtgcgccagccacgttaccataaccgtatggttccgaccgtttgaacattgtcttcttggcccgcctgcatgatctgtggtattatacgctatattactgt

SEQ ID NO: 44164 - DNA, 416 bp, Zea mays
  unsure (1)..(416): unsure at all n locations
agcttgnagctaaattagacattaatatgttctttgtcctctgagccagaagagccatatgtcttgaccactagactactagtgatgataatctgtgatagaaatatgaagatcttgtagagacatgttgtatcctctctactcctgatgatttcttcgtatgaaagcagtaatatctgttgttgaagacggatcctaagcggatactagacttgttttcgttcttgccaagcagttatcatcatttgtttcatgaaaaactagttatatggtgatttttccagataaaaatggaattcttggccttgtctattctattccaaagcttctctttttgttgaacaatgaagagatcaaaataatactttatagaacaagttggtatataatatgaggagaaatatttccttgctggc

SEQ ID NO: 44165 - DNA, 236 bp, Zea mays
ctcctcacttgtctgtctccacctgtaaagagcaatacatcagtgaacaaaaacttaatgtaaccttcgctaccagataccttaagaattctcatgaaaggtacagcaacttgctctctaactagatgctgttcgcatacttcaggtcatgacttaatattactgcaggaaacacatagaagtgcattgtacaccatgtttaacaatctgagtctactggggagacttgattggat

SEQ ID NO: 44166 - DNA, 420 bp, Zea mays
agcttctaaagggagaacacattttaggactatcatatgttcattttgagaaagacaggatttgtagcgcatgccaagcagggaagcaagttggcactcatcatccgcataagaacataatgacgaccgacaggccactggagcttctacacatggatctattcggcccgattgcttacataagcatcggcgggagtaagtactgtctagttattgtggatgattactctcgcttcactcgggtattctttctacaggaaaaatctcaaacccaagaaaccttatagggattcttgaaacgggctcaaaatgagttcggcttaaggatcaagaaaataagaagcgacaacggaacggagttcaagaactctcaaatcgaaggcttccttgaggaggagggcatcaagcatgagttctctt

SEQ ID NO: 44167 - DNA, 346 bp, Zea mays
  unsure (1)..(346): unsure at all n locations
cacaacacgagtagctcatatatctcagaanatactcacaacacatgtgtctatgtatatactcagaaccctacagattggtgggtcccgcangtcagcgtaattcgctattctagcgaagggaaggtggtttttctgaccttctagtaaagccttcgttcacgtcgtagtctaaatttgttacaaagaaacaaatcaatactgcgaggggctactgttgtgggccttcttccttctaagggtctcaaaaacgtaactgaccatatgttttcattatgacatggattgtacagggggctttggcttcgggatgaagggttctttctatatagcaaggtgaagatga

SEQ ID NO: 44168 - DNA, 402 bp, Zea mays
agctttccaagaagggcataagcaaaattcattgtaagaaaattaatgctcgtactatgtgctctaacaatatacctatgtgctctcaacaaagaaagatcaatgagaagcgatagaaggtgctatggatgctatgagaagggtcatgaaattgattcatgctcccacatgaagaaccaagaccttgcacgatcaagaaagatgaccataaaaaagaatgaaagctaaaggcatatgcattgcaaggacaagcaccacatttgctacaattaccgtgaaaaaaggtcatctattcaaggtttgtccagagggtaaaactcctatacctaacttgtcaatacattcaaatatgcttaggagacccaaatttgactctcatgctagaaaggtgatgagttcacc

SEQ ID NO: 44169 - DNA, 375 bp, Zea mays
tactctccatattggactatggtatcccaaaagtgctcactttgaattaataggatattcggactcagactatgcggggtgcaaaagtgatagaataagcacctccgcgtgttgtcaatttccttggtagatctcttgctacatgggcgtctaagaaacaagattcggttgctctatctaccgacgaggcggaatatatatcggccggaaattgttgcgctcatctattatggatgaaacaaaccttattggaatatggaaatatttacaagaatgtgcctctcatgtgtgaaatgagaggcggtaaaatggtaccaataccggccaacactcaagaaccaagcttattgatatacggcatcactattgatatac

SEQ ID NO: 44170 - DNA, 304 bp, Zea mays
cttagcaacttatcgagtgcctagttcatctctatcaaaatctactaagtattgctgaccctcttatacttccttaaatgctatagaatcatcacttcttctaaagacagcaacatctgtattcgttaaaagaccgctgtttcccttcttacattaatgtgacactgatagcatgttgtattttatgaattttcctcaaaaacatctaaatggattggtcatgtgatatacaaattttacccttctttgacacaccttgattccatccccaatgtgatagctcgtggggatcttgggttttctc

SEQ ID NO: 44171 - DNA, 406 bp, Zea mays
agcttcgagcctcgtcattccggaattggttctcctaacagtagctgtatcatttccttgagtgcttctgaagaagtcaatgcgtcacgatccctgtacatattatccgcggttcttgagaagtcaaacactagctgtggcacaacctttgggagccctttcagcgcaagggattgctccagcatatccttccatgaatcttcgataagctcttttatcttttcacatgcatcatccattgttattccatgctccttcatgtaacaatggacagtggacggactatggtcttttgtttgctcacgctgcgtcattaattattgagaaagaattgtcaggtgtgtgcatgcatgcttgattgcagatgtaaacatattatcataaataccacgaatggaatctaccg

SEQ ID NO: 44172 - DNA, 494 bp, Zea mays
  unsure (1)..(494): unsure at all n locations
ggcaacatcaaactcttctttacagatggtgagatcccgtctcatctttgaagtagcgtccacttcaccataccaatcagtgaactccctgccccctccagcactnggcaatcccaaaataagacgaaccgtctcttttgttatcttcagatctttaccagcccctgagcgtattgtcatgtcatctggatccaacttatccatcaaccaccttatgagagatctgctctctaaggcatcagtacgcaaatcagatatactagaaaatgccaacctatcaacagcatcccgctgtcgatcgctcattatccaaggtgagacaatgacatcataaggaatgcaacggatattcaatttctgaaagcataaatgaatatgcattaatacacattgtatatatatatatattggtataactaacggatatatatatatatatacatacaagtgatatgtgtagatgcttgtaaataactatagtctataacactaac

SEQ ID NO: 44173 - DNA, 412 bp, Zea mays
  unsure (1)..(412): unsure at all n locations
agctntgagtggattctagaagtaatccattcttagttcttcatattcatgcttttgaaattaccattttggcctcaaggtattgtgaatctgttgggtgcaccaaaggtgcacctaatgggagtagcccccgagctctgagtggattttagaagtaatccattcaaaggtcttcatattcatgcttttgaaattagcattttcagaataaccaggcgatgccatctgtccatgccttgttaggtccggaatcaatttgatcggtgacaagttggacacctggctggttgagtcattgggccttcggatggacaccactctaccctgtattttaatgcttctattgattggacttgcaccttagtaaccacatttgggcttcctcccgtttcagctgatctcctctttatgt

SEQ ID NO: 44174 - DNA, 414 bp, Zea mays
  unsure (1)..(414): unsure at all n locations
agcttcatatacaaaggatcccttcttttgctatatagctaatgaagttgtatttctcagcttactttgtgccttagcacattttcatttttacaaagcaatctccgaagatcgacttcgtattcaattcgtgtcatcggtgcgataatgatgtgatgctatgcgggatgatgtgatgatatgatgcgaagaatgatgctaatgccgaagacacacaccctcacgcccacactgaaacacacaatctctgcgtccccttaggaacgatcggaacctctttgccgtttatttttcggcttcaccgcttatttttcggtgtaagttctacatccccttaggaacgtcctttgaacttcttccncttataattcggcggtataagatctgcatccacttacgaacgtcttttgaact

SEQ ID NO: 44175 - DNA, 423 bp, Zea mays
  unsure (1)..(423): unsure at all n locations
agctngagaagatatttccacccagcttcttcattctcttgcagcatttgattcttcatctcccctatgaggcacgaatgggggccccgtgcagggacgttggtgctatccaatcgagagatgtctaaagactattcgaaagaaatgtagaaataaatgcaaaatcgaggcttccattgcagaggcatacattctagaggaggtctcaaacttcacaacaacttattatggtgacaaactgccgagcgtgcataatccaccccctcgttacaatgatggcgacaatgaatcaaaccttagcatatttcgaggccaactcggaagcgcaagtggctcgaccacgaagaccctgacacatgaagagtggcgacatatcatgctatacgtattgaccaaccttgaagaggtgacgccatacatgga

SEQ ID NO: 44176 - DNA, 416 bp, Zea mays
gagaatgacatgatttgcaacgcatgtcaagtaaggaaacatgtctgtgttcatcatccacacaagaacatcatgacaactgacaggccactcaagcctcctcacatggacctattcggcccgatagcttacataagcatcagtaggagtaagtattcgctaattattgtggatgattattctcgcttcacttgggtattctttctgcacgaagaatctcaaacttatagactttgaaaggaatcttgagacgggctcacaatgagttcggcttgaggatcaagaatattagaaacgacaatggaacagagttctataactccacattaaatgcttcttaggaggatggcttaagcatgagtctcttttcctactgcccacaaaagggtatggaaggagatatacttatggcatgc

SEQ ID NO: 44177 - DNA, 375 bp, Zea mays
agcttgatggccaagtaaggaagcaggtccctgtgttttctgtatctgaagttcatagtatatccaagaaagacacaccgattagagaaggcgtatatgctgtgttgatggcatcacaaaagcttcggcactatttgtaagcttacaacataattgtgccttcttttcaacctctgaaagatattatgaagaaccgagaagctactggaaaggatcggaaaatgggctgcacagctcaacgaatcttgtattgaatatgttcatagatcttcgattcaatcccaggcgtttacagaactaattgccgactggacgccacgggctcatgaagaagaaacatattatgacagcgtagcatggacagcgctttgcaat

SEQ ID NO: 44178 - DNA, 391 bp, Zea mays
agcttctaaagggagaacatgtgataggtttgattatcgtgcaattcgaaaaagatagaccttgtgcagcttgtcaagcaggtaaacaagtgggaggagcgcatcacagcaagaatgtgatgaccacttcaagacccctggagctgctgcatatggacctcttcggacccgtcgcctatctgagcataggaaggagtaagtatggtctagttattgctgatgacttttcccgcttcacttgggtgttctttttgcaagataagtctgaaacccaagggaccctcaagcgcttcctcaggagagctcataatgagtttgagctcaaggtgaagaagataaggagcgacaacgagtccgagttcaagaatccttcagtggaggagttccttga

SEQ ID NO: 44179 - DNA, 304 bp, Zea mays
tcctaacttataaaacccgaatagaccttataaccctgaatataaaaaagctcttatacgtgatgatattattatatgatttatgaacttataagctagaattatgatatcatctaacgatagataatatgcttgatgctagttctatagccttgtggagaaagacctgcaataatattatcgcataattaacaaatatactatctctctacgattggtctattcgtggacaatataccgaccgaattgtagctatccggtcggctctataaattttgaaattcgactcatttgtaaaccgaat

SEQ ID NO: 44180 - DNA, 418 bp, Zea mays
agcttctaaagggagaacacattgtaggattatcttatgttcattttgagaaagacaggatttgtagcgcatgtcaggcggggaagcaagttggagtccatcatccacacaagaacatcatgacgactgacaggccgcttgagctactccacatggatctattcggcccgattgcttacataagcatcggcgggagtaagtattgtcttgtaatagtggatgaatattctcgcttcacttgggtattctttgtacaggaaaaatctcaaacccaagagaccttaaagggattcttgagacgggctcaaaatgagttcggcttaaggatcaagaaaataagaagcgacaacgggacagagttcaagaactcacaaattgaaggctttcttgaggaggagggcatcaagcatgagttctc

SEQ ID NO: 44181 - DNA, 390 bp, Zea mays
  unsure (1)..(390): unsure at all n locations
acaacccactgtatattttacagaattttctggaaattattgaaaccctgttgtaggtcaaacctaccctagaaacccttaatgggaattaatggaaggaaaatgaataatgagaaatcaaggttatcctataacctttgttatctgtccactaaaatgtctcaaggtaataccaatccactatgttatcctataagactacctangctaaagggtcataagtctatatatatacatataccactaggagccccgcgtgactaagaaaaccctaagttacttcttaacttagtttcctttagcttaatgttcttaaatctcgcataatcatgacatacatgttcattgcatttcgatagactggaatctagctgacggagagtacattct

SEQ ID NO: 44182 - DNA, 396 bp, Zea mays
  unsure (1)..(396): unsure at all n locations
agcttcgggaaaaaggaaaatgtggctttctattcttcgnngcgcacgaaaagaagggaaggtgttttttcgccttcggctcaaaaaaggaaatttcgtccacatcaaagcatttctcatacatcagtgagaggttaaggatatattacaaggtatgaacagcatacattaaaaacaagtttttgtttacatttacaaaaagttgtctcaaaagtttttcaagtactgtctgcagtctactatctaaatctccaaggagcttcggcttcggcgttatttttgatcatcagcttctgcttcgtcatcctacatgaataaggtcgctggaagtcagaatcaagtttacaggaaaaggtaagcacaaggtatgatttcttactggatcaaggtggctac

SEQ ID NO: 44183 - DNA, 447 bp, Zea mays
aaaaccaactcggaaaaccatattgtggtatcatccggattaagatatttctatgttatccaggagacaatatatgaaatcatcttcattagtgccattgaacactaacgccctcttcggatattttaaattctgagtgtagtgtctggatcctaagagtacttcttcggatgattgtttcctagaagcaggtcaaataatgtaatcaacatctttcgccggagctttgggggcaagagaatttgtttatacatcatatctgccccgctgcatgccagtatatgaaattagtgctcagcttatcttaaacgcgacagccttcgtataatggcactgtatgccaactttgcttcagttggaccttgcaattcacaatttttaaatgagcaaggtcaggatttgtatctcatgaaggttaaacactggccatactcttttttggagtat

SEQ ID NO: 44184 - DNA, 417 bp, Zea mays
agcttaatgcccctaaaagattgtctaattatgtttagggaaaagctcccatggttcaggatagtgaaggctacattttatatcctgctaactattctgagcacaaaattaggagaattcatgctagaaaacctcacactatttctcatcatgcatttatgtataaaaatgaggcttctagctctaggcaatcaactcatgttatattgtctaaaaagaaaactcctgctgcatcaaatgaacataacatttcatttaaaacttttgatgcttcctatgtgcttactaacaaatcaggcaaagtagttgccaaatatgttgggggcaaacacaagagttcaaagacttgtgtttgggtacccaaggtgcttgtttctaacgccataggacccaagactgtgtgggtacctaagaaca

SEQ ID NO: 44185 - DNA, 493 bp, Zea mays
  unsure (1)..(493): unsure at all n locations
tcgatgggaagaagtggcatgagttcaatgacaaccactgagactttgtcgatgaaccaagatatgttagggtcacactaagtactgatggaatgaatccattggctgagaggagcagcaagcatagcacatggccagagattctcaccatctacaaccttcctccatgggtgatgtagtaatgaaagtacactttgttaaccatccttattctagacctacacaacctggagttgacatggatgtatttttgggacccttaatggtggatatgaaaatattgtgggaaacaggtgttcaaatgttggatgagtatcgtaatgattcattcgcgctgagagcaattctntctgttacgatcaacgattaccctgctctcttcacattatcaagccagtttaatggaaaggttggttgtgcagtatgcattgatggaaccgcttatatgtccctttctgcatctaagaagatagtgtacatgaggcgcatacac

SEQ ID NO: 44186 - DNA, 187 bp, Zea mays
aggggtccccttgccgaaccccccgtggtgaaaatgagatacccggttctccttaaccatgactctagtgaagcagttctgaacatttggcatgatgtccaccaacgagccaagccaagaattgcggacttcaacaaaaggcccatactgagtaaaaccttctgattcagtttgaaagatctgcctt

SEQ ID NO: 44187 - DNA, 488 bp, Zea mays
  unsure (1)..(488): unsure at all n locations
atcaaaggacgtgaaaagtgccttactcaatggaccaatcattgaataagtccatgttgaacaacctcccggctttgaagactttgagtaccctcaccatgtgtataaactctcacaggcgctctatgggctaaagcaagccctaagagcatggtatgaatgcctgcgaaattttcttatcactaatggcttcacagtccgtaaagccaggcctactctctctactaaaactatggcaaaagatatggtgtatgccaaatgtatgttgatgataccatattagggtctaccaacgaatctactcgtgaagagtttagtatgatcatgatacaaacatctngagatgtctatgatggtggaggtgaatatttcctaggatgtcagtccagcagctccaagatgtcaccttatcagccagacatagtacattcaaacattcttaccagtgtaggatgatgatgccagccctcaaacacccatggaacaat

SEQ ID NO: 44188 - DNA, 404 bp, Zea mays
agcttgcacatagtctcgatgatgtatgcctttatatagtccaagtcttctaaagctattactttttgtgaaaccgcattgaaaaagtaacacaagcgtgtgatgacaactttgacatgctctgtttcgagggctcttaccgcaattgggaggaacaccgtcatcatcacatggcagtcatgagagttgtagccaaataaagacaagtccttcatcctgactagtctgctgatattggatgagaaacctgtgggcactttgaccccacgcaaacatttgcaaatctttgttctctccttaactgacaagttgtagctagctggggggaggtaaggcttccctttgccactatccactggatgaagttccggtctgatttgaagatctactagatcattgcgtga

SEQ ID NO: 44189 - DNA, 412 bp, Zea mays
  unsure (1)..(412): unsure at all n locations
acaacaactgattagctcctagaatggatatctgtnttccctactgctgaatacaggagttcgntcattcgctctcttatttactccatgtattccctaaccaagtggataatacatcttgcatgaagaaacggatgaacaacatgaccaaacagatgtttacccaaatgcatgaccttttgcttgcaatatgaactctcaacgccttggcttaccaatggtactgagaggactagctcaatgtcaaaagtggttcatcaagttggtttcactaatgtgcaactgcctggtgaatgaacgttgagattacagatcgtgttatcgagttgtctaagctcacttttgtacaaccgctcttaaggaagaagtttcaagaatcgagatgtagtcggttaataaccacctaaccatc

SEQ ID NO: 44190 - DNA, 416 bp, Zea mays
agcttgacattgtctccatgttggaagcctatgccatctctaatgccagggcgtctcccattatagagcatgcttctagcaaattaaaatttttcattctctatctcatgctcattaattttagcagttagttgagctatgtgaacattttgttctttaattaaagctaggtgatcatggatagcatcaacattaatatctctacatctcatgcaaatagaaacatgatcaacagtggatgtagagggtttgcaagattttaattcatctatcttaaattttagcatggcattttcatctctaagacaggaaatagaaacattgcaaacatttaaatccttagccttataaattaatttatcattctcaatcttaaggctagaaactgattcattcaatttgtcaatcttagcaat

SEQ ID NO: 44191 - DNA, 411 bp, Zea mays
  unsure (1)..(411): unsure at all n locations
actacgtgcattctaaagataacctggcacatgtcagcacgtaacaagtgggaggagcgcatcacaacaagaatgtgataaccacatctagacccctggagctgctacatatggacctcttctgacccgtcgcctatctaagcataggaggaagtaagtatggtctagttattggtgatgacctttcttgcttcacttgggtgttctttttgcacgataagtctgaaacccacaggaccctcaagcgcttcctaatgagaagctcaaatgagtgtgagctcacagtgaacagataatgagcgacaacgggtccgagttctagaaccttcaagtggaggaaattcttgaggacgannggatcaagcttgatgtattcgcttcctacacaccacaacacatatggngtggtag

SEQ ID NO: 44192 - DNA, 414 bp, Zea mays
agcttactccaccctgagaagggccgttcattatcgccaagatattgaagcccggaacatacaagctggccaacgatcaaagcgaggtctacagcaacgcttggaacatccaacaactacatcgcttctacccttaagatgtttcaattcgttcatatacctcgtttttctttacatacataaataaagcctaaccgtccaggaaggatcagccttgccttggcaaagctcgaccctccctcgggggctagaaggggggaaccccctctgcatcaaaaatttcctcggaaaagtcttttgctagaatgtctttcgcgctttttgactgcttcgatagcggggtcctaaaaacgacgagagtacacgtaagcggcaaggccaaccgagccgagggactcctacgcctctgggata

SEQ ID NO: 44193 - DNA, 392 bp, Zea mays
agcactttatatctcaccgcctaatgtataaacagtggatgctaagtatacacgggttcctggagaatggagacaaccttacataatatccccacaataaataaacaggaaactccattgtaaactataattgaaccaataacttgagttcatccattaacccatttgttcgtgtaagacataacttatgccaattaataaacataacataattctcctaacaccttcacattacatcaaagatatccatctctgaccacaacccaaactgtttgtgtcaccagattctacaacaaaagaacactttggattatatacctaacaggatctagaacgagccatcaaaataaacaagtggaactgttctctaattatcatgtggaagtcttcac

SEQ ID NO: 44194 - DNA, 92 bp, Zea mays
tcaatgcacacaacatcatgaggaggtcctttacgcatatgacccaaagctcttgcttttaaaacacaaacgcctacaccgcccaatgaaat

SEQ ID NO: 44195 - DNA, 392 bp, Zea mays
  unsure (1)..(392): unsure at all n locations
agcttatgaagnatcttcatcccaacatatgcgtagttgtgatgccagagccagcccatgttagtcctaacaatttagcaagtgtcgaagtcagctctatcaaagatcactaagcacagctgaccctctaacactccctttaacgcgtattgaaccatcacttcttctagagacagggacacctacatcaggaatagacacgtggagcccattttgcatattgagatacagaaagcaaatcgtgatctaacgaatctaccagaaacacattggaaatagaacggtctcgcgatatatcaatctctcccaaacctttgacccatcttgattccatgcccgaatgtaatactcgtcggggatttggtttcttcgcaggggagaacacctcttcc

SEQ ID NO: 44196 - DNA, 368 bp, Zea mays
  unsure (1)..(368): unsure at all n locations
agctngaatcaactttgattgagagtacgagcttcttttaccctgttgacaaagcttgatggctcatcatggtcattgttgtggaagtaattttaccgggggtggcgccaatgttggtcacttgttttcgattgttgtatgaaataaaaaacaaggcaacataatgttaaacgttaagagcctttgtccttggagacattatctttttaagataatggtccatggacgaaggtaacgatggatgtttgtttttaaattactccgagttaacaaggtaacacaactaatgtatcttatttcttccttcatataaccttctcccgaaggttgtatgaaagaaataatttacaatatagtgaatatacata

SEQ ID NO: 44197 - DNA, 344 bp, Zea mays
gaagaataccttcaggcgtatgttctaatgttcttgccgttgagggcaccagcaccaacggtgcccaatgaaattgtcattgaggccatgattaatgggcttccgccgggaccttcagctcaatatttagccaggaaaccccctcaaactttggagaagctgctccagaagatggatgagtatattcgagctgacaatgacttcctgcatagaagggaagaagcatacaggttctctgaaatgaccatgggcttcggatgaagaatccacccgaggcacgtctggtcaattcacaactctactcagagtgatgacagaggaagccaacaaccgaggccacagta

SEQ ID NO: 44198 - DNA, 416 bp, Zea mays
agcttatcgtttgtactaagactatccgcagttgttccccctatatttttccccctaaatcttactatgcagccacgtcagcaagattccctcccctaaatttactcgttccgcaaccgttccccctaaatattcccctacatatccctctactcattaaatatacatttccctacaactaacataactaacttggtttttcatttttatttcttttttcaacacgttgtcattactacatgaaacttggttcacaaattgttttaaattattactcttaattaagacatacttagtacataataaaatattacaataatagcggaaggacgtgtcgaatgggttattaaccacttcgatctacgtcgccaagatagatcgtgctcccttcaaaatgatcttgtcgagcacttatg

SEQ ID NO: 44199 - DNA, 376 bp, Zea mays
tgtcaatatgacccgaaacaatctgagaatcatttctaaggatcgccctcctgatccccatcgcctttagtttccgaagacccaggagcaaggcttcgtactcagcaatattatttgtgcagctgaagtccacagttgctgcatagcaaagtttaaccttggacggtgaaaccacaacagcagctgctcctgctccgatagttcccaggagccatcacaaaacactgttcatgcttcggcatctttattctgcttctcgccctgagcccctggcgttcagtcggcaattaaatctgccaatgcctgagactggatcgaggatctgtgcacataatcaatgtaaattcattaagctccgcaggccattttccaattc

SEQ ID NO: 44200 - DNA, 286 bp, Zea mays
tatggtactaattgcttcaattggtgtcgaccaatactaactccctcggaagtgggcatactcttcattactatatatctaatttatggaaagaaaactgtcattttaagtgtaatacccttttgaataaaattgcgaacacggggcatattgtgtaattcacctatccatgtgcattaccttaaaaggaaataaatttatgcctttatgcctcacaatagacgatttatttgccattcatataaaaatatcatcattcattaaatactttattgactactaaaac

SEQ ID NO: 44201 - DNA, 419 bp, Zea mays
ctcaagcgtgtcgatcaagctcttgcctcaagatagatgtatgatggagatgtgttcaactacatccacaaatcatctgtaagaggtactcttcaccttatctgggtgttgagtgatggaggtgatcactcccgccttaccaactgcaagttgctaataatctttattcaatttatattatgtaagttacaagcgtaccacaagatttactattatttgctctatccagttacttctgaaaggcgtcaactatagaggagcaaaatatattcgtgtgcacatccttaccgatgggcgtgactgtttggatggatcacggttggtttcgtggagaccctagagaatgatctctttgagcttttaggcacgggtattgattcctaaattgctccggtggcgaatgatgtatgtaccattga

SEQ ID NO: 44202 - DNA, 344 bp, Zea mays
ttgcacttagaatgctctcattctctctttgattcttcattgcgatcaactcacttgtaattgaaggaagagacaccacacttgtggtggccttgtggaactttgtgtccaagcgattgagaagagaaacctcactcggtccgagggaccgtttgcaaaagggaaagggttgaaagatacccggtctttgtgaccacctcaacggggagtacgttcgcaagaaccaaatctctgttaaacaaatgcacgtgccacactccttaatcgcttgcgatttgttttgcacccctttctcgcggacttgattatatttctaacgctaaccctgcttgtagttgtgatta

SEQ ID NO: 44203 - DNA, 293 bp, Zea mays
agcttatgttgagaggcaacccactccctatgttttaccttgcaatccaagcatgctcatttatcctctcttcttgggaggacaaagttaatccgactagagtgttggccactaaataagattctctcttgctaaaaacatgttggctatcgtaatgtccaaaacttcctctccctcctgagtcctactaagctactaccatactcaatacctccatgaaccaccgaaacctacactttgtcctatatgctcattgagaactcctatgaaaagcttacccactaataactaat

SEQ ID NO: 44204 - DNA, 393 bp, Zea mays
tattatctatcaataagtctctaaagcattcataccatgctcttggggcttgcttaagtccatatagcgccttatagagcttacacacgtggtcggggtaccgatcatcctctataccaggggtgtgctccacgtacacctcctccttgattggcccgttgaggaaagcgctcttcacatccatatggaacaaccttgaagaatggtgagtatcataagctaacaatatgcgaattggctcgagcctagccacaggagcaaaagtctcctcaaagtccaaacctgtgacttgggcataacctattgccacaagtcgtgccttgttccttgtcaccaccccatgctcgtctagtttgttgcggacacccacttggttctcacaacattttgctt

SEQ ID NO: 44205 - DNA, 415 bp, Zea mays
agcttctaaagggagaacacgtgatatgttttactaatgtgcaattcgaaaaagatagaccttgtgcagcttgtcaaacaggcaaacaggggggaagctctcatcacaccaaaaatgtgatgaccacatcaagacctttggagatgcttcacatggacctcttcggacccgtcgtctatctaagtatatataggaggaagtaagtatggtcttgttatagttgatgatttctcccgcttcacttgggtattctttttgcaggataaatctgaaacccaagggaccctcaagcgctttctaaggagagctcaaaacgagtctgagctcaaggtgaaaaaaattatgagcgacaatggggtcgagttcaaaaaccttcaagtggatgagtaccttgaggaggaagggattaaactct

SEQ ID NO: 44206 - DNA, 413 bp, Zea mays
  unsure (1)..(413): unsure at all n locations
agcttgtgtattcctgagagatcccaacaaatctataaagcatgtgtctatagaaaccaatttaatatgcacatgttgaatgtctaacaattcaactgaaaaataatcccattgtatttcattcatgacatgcattttgtactgttcagccatctccccaacactatggcaaattactacctaaataatagcctataaaaatcaggaaaccgaatctagttacggaaaaatttgaaaccaaacatagagcgttcagagtttatggtgatggtacttatactatataatagtgcgagtgcatcatgcaatagagctgaaataaaatctgcatagtactttgatatttcaatgtaaaanaaggatatacctctttcacttgctttccaacgcacaagttgagatttgctctagct

SEQ ID NO: 44207 - DNA, 418 bp, Zea mays
  unsure (1)..(418): unsure at all n locations
caacaactttgggtgctacagcttcngcgcccgctccgggtcaagctaccctgtgccaacctttctgaagaggtggcccggagcctggatgtctgaatggttttatgtgaaaaatgatctaacagcgcaaaataatgtcaaatgtatcattatgtacccaatttggcaacgcttcgggcttctaatgccgaaggtngaaatggatgatgcagccgaagaatgccaaagagccttcngcgcaatctgctccttcattgtgtcaagggacttggtccaggagcacattgccttcagggtatggccacttgcagaaaagtgggaaattgccgaagataccatcaaagagtccgacgaaggcggactagtcagattaatatacacattcatatatgcagaaataattattgaacctgatgat

SEQ ID NO: 44208 - DNA, 416 bp, Zea mays
agcttctagtggaggaataatatatttttatttacttatttttatctacaaaattcttattttcttctcttttctaaattctacaattccttttagattttaaattccactttggattttaatatattttttgccacattattattttatttatcacaatgtgcacacaaaagaaaatcccagcatgatgcatgttttagtggcatatatttttattaattatttgtgtttaaagatggtgttcacatgatgacaaataggtgcaattcacataaatagataaaggaaggcacttttctccttttgtatgatctcttacaatttaggtgttacatataatggtttataccgattgtaagtaagtcgtgatagctaggttgtggtatagtggtatagcaacagatatgtttataccg

SEQ ID NO: 44209 - DNA, 418 bp, Zea mays
agcttgagaaggggacaaccgtatcatgcacttaaccccttcaaaagaataccaagctttccaagaagggcatgagcaaaatccatggtgagaaaattaatgctcatatgattttctctaacaatgtacctatgtgcttcaacaaagaaagatcaaagagaagcgataggaggtgctatggatgcaatgagaagggccatgaaattgattcatgcccccacatgaagaatcaagaccttccacgatcaagaaagatgaccatcaaaaaggatgaaagcaaaaggcaaatgcattgcaaggacaagcatcgcatttgctacaattgccgtgaaaaaggtcatctattcaaggtttgtccaaagggtaaaactcctaagcctaacttgtcaatacattcaaatatgcttatgagacccaa

SEQ ID NO: 44210 - DNA, 311 bp, Zea mays
  unsure (1)..(311): unsure at all n locations
agcctaatcccagaaatgtgtctntggagtaccagcacgaattatgctcggattcatagtcagccaccgaagaatagaagccaacctcgagatagtcgaagctatcgtgacaatgtattctccactatcgcagaagaaaggacagaggcttactggatgcatggcagctctgagcagattcatatcaagactaggagaaataggcttaccattctacaaantgctgatgaaggtggacaagttccagtggaccacagaagcacatgaagctcttgatgcactaataaagttcttgaccacaccgtcagtgc

SEQ ID NO: 44211 - DNA, 419 bp, Zea mays
agcttgtgaaggttcttcatccccacatgtgctaagcggcgatgccacagccagcccatgctagtcttagctattaagcatgcatctagaccggcctcttcttttgcaaaatcaactaaataaagtttgccgtctaatacacccttaaaagctagggaaccatcacttcttctaaagacagacacatctacatttgtaaatagacaattataccccatatgacataattgactcacagatagcagattatatccaagagactcaattaaaaacacattagatatggagtgctcattagaaattgcaattttacctaaaccttttaccttgccttgattcccatcaccgaatacaattgaatcttgcgaatctcttattttgacgtaggaggtgaacatcttcttctcccccgtcatatg

SEQ ID NO: 44212 - DNA, 420 bp, Zea mays
agcttggaggcgtcaactggaatcctacttggttttgattccttcggtcttcctccgtcgccttgaatgcgacgggttgcacctcgggtgtggatgtgccgccttgctccaagttgatgatttgtttggagcctttgatccataattcaaagctcacaaacttttctataacttcctcgggagacattagcttatatctaggatcaccacgtattaattaaacttgcgtaggattatgaaaaatgagtgatcttaaaataaccttgaccatttcatggtcatcccatttggtgctcccgacgctgcgcacttggttcaccaaggtcttgagccaattgtacatagcttgtggctcctctccttggttgaggacgaatcgaccgagctccccctcgattgtctcccgcttggtgatttttg

SEQ ID NO: 44213 - DNA, 372 bp, Zea mays
ggccaataaacgagacacttttttcgtaccgcacagcggggtatctgatctctaatccggctccgtccaggattattaacatgccctgacgaaatgttaggcactttttctcaaattccatggcacctattcaagctctgcacaaatagtaagcaaatgcctctacatatgcctagatttgcccaaaaccctgatcggttgtaatggcctgagtcagcatcactgcatctgatttaactattactgacgcgacttagctaatattatgattttttcactgactcaccttacaagtgactcatgatactacactgagtgggactagcaaacctatattgaagagcaactcaagtgaccatccccattcgatta

SEQ ID NO: 44214 - DNA, 206 bp, Zea mays
ctcatgccttcaagattccaaatgcccaaaccatttcactcaagggggctctacactttatgttagtgggccttaataccctaccctaactagggtagggagagatatgtttataatatacttggtgggcctatgccccattcccaggaaacaccccaataccgttcaatggcacatataatcttaacaccccccgtagtttaaac

SEQ ID NO: 44215 - DNA, 473 bp, Zea mays
  unsure (1)..(473): unsure at all n locations
ctcaagctctaagggagagcacatcttgngactaacaaatgtgcatgttgagaaatacacgatctgcancgcatgccaagcagggaaacaatgtggtgctcatcatccacataagaacatcttgatgactgatatgccactcgagctccttcacatggacctattcngcccgatcgcttacataagcatcggcgggagtaagtactgtttatttattgtggatgactattctcgcttcactcgggtattctctttacaggaaaaatctcaaacccatgagaccttaaagggattcttgagacgggctcaaaatgagttcggcttgaggatcaagaaaattataagcgataatgggacggaggtcaagaattcacaaatggaaggctctcttgaagaggagggcatcatgcatgagttctcttctccctacacggcctcacaaaatggtgtagtggagaggaagaatagaactc

SEQ ID NO: 44216 - DNA, 264 bp, Zea mays
taactggacgcatgcgcgcgcatgggtatgcgcacgcgctggaggtctctattttattctcacgggcctcttcacatatgaatgacctgccgaaagaatgccgtccattgtacaaagacgttgttttttatacccatctatttcccgatagacctctgaaaatatcatatccatcgcacccttttctgggctgacaatatccttccgcgaatcaataatttccgccagaatattattggggtcccagtattttgacacaagact

SEQ ID NO: 44217 - DNA, 484 bp, Zea mays
tcggtatctcacaccgacttaaagatagaatgagcatctagtccataaatgtctgtatcaaaggtgtaaactctcataaagggcatacttgtaatctctcacatgctgcgccctgtgcctataaatagtgaacagtattcctctactgttcacggattccggtatctgcaatcgtatcattcgtgaaccaatctttatcaagggcaagggattactggaatcaatgattaaatataccgaataaatacaatgtgattcgttataagtacgttaccgttgatactctatgatttatggtattctatgcaagttattaaactacaactacaaagaattaatcttcgtaatcgtattgtcgtcaacctttgtccaaggtccattaatccccgaagggataatgcttcgttggacgataacattaacatttaacactatatgttgccttgttcttgattcatagcatttgagaacaatgtcccaacat

SEQ ID NO: 44218 - DNA, 415 bp, Zea mays
agcttggaaaatgaaactaggtgttctttacttgcattaatgccaaagtctctacacctagtacaaatttcaacatgttctacacaagaattggatttgtttgctacttctaatttaacatttaaatcattgttgacacctttcaaagtataaatgggttcatgacaagtagatagttcaaaagaaagcatttcatttctcttaacttctaaaacatatgatttttgtgcctcaacaaattcatcatgctcttcatacaacaaatcctcttgcttttctaaaagtatattcttttcattcaaggcatcaattaactcattaattgtgtctatcttagatctatctaagcccttgaacaaacatgaataatctacttcatcctcatcactagattcttcctcacttgaagaagcat

SEQ ID NO: 44219 - DNA, 481 bp, Zea mays
  unsure (1)..(481): unsure at all n locations
cagatattggcagcaacatatcgcctgtatcnttgtttattctaantntaaggaaagntcttaccttaactttntattgttctcgagatgaaggttacttctgatgaacgttatttttttcagagtctactgctaagtaaaaccttgaggatgcaacaatacctcgaggacaagataaacgagattataattgagggcttagagggcaaaattaaagatcacgaaactgctctggagaagaaggatttcgtgattcaaacaatggagggttctctggcagaagcccaagccgagatggctagattaaacagtgaactcttccacaaatcaaaatacttctaacaatagaagaatgatnttatgaaaagccttgaactgaagtttgcaagagttcgaacttgcaaaagtcattgaaggaacttcnagatatatgtctaaccttctgcaaccgttgcgtgcacgactgaagcatgcttcactc

SEQ ID NO: 44220 - DNA, 201 bp, Zea mays
aactcttctttcttatccctagacagcttatgaccaaaaaagttttgaaaatcgaaatccctttccttcgacgtatcttcggagaacccttcttcttcccaggcactgcgggcagggcctcttccgcaggtgtagcagctccttccgccggcatattcaaaagcatttatcaaaataaaaaatgtgcccccagattatatc

SEQ ID NO: 44221 - DNA, 393 bp, Zea mays
  unsure (1)..(393): unsure at all n locations
gaaagacactntgtgccatatcctttccgtagtgtagtgcacatgcccgcaacatgtctttcaaaatctgtgttacccgttctgtctggccatcggtttggggatggtatggtgagcttcttattactagggctcagagtgattcttgcagctgcttccaaaagcataccacaaacagtgctcctctgcaggtataatggtctttggataccatgcactccactatttatcaacataaatttccgatacttctctgcatgtgggtggtatgcctggnagaaatgagcagtctggtcaatctgtcacaatacccaaatggaactgggcctgaggtattgacatcctatataagtcatgcaatgtctcctttcagaggatggaagggttgcaaga

SEQ ID NO: 44222 - DNA, 398 bp, Zea mays
  unsure (1)..(398): unsure at all n locations
agcttatgtccgacagactcctaggcagccgttcttcataanggagccgtcagacttgtatcggtttactgtagaggcttacgaatcgcaccgagtcgagatgtttcacgagccttgaaattatttttttcgctctaccaagatgcaacaaagaacagataccatgatgcaagatttaaagattaaaagagctacatatttggcgctatataaaaccattttacttatcttgcatcagaacttagaatttttttttctgtactcatttcacaatcccagcaacaacgtgcaaaaacattctttgttctcatgggcatcaacattagaaaagcatctcaacagggtcttaaatagtgtctatctgaaattttgggtaactataaaaacactacatatac

SEQ ID NO: 44223 - DNA, 224 bp, Zea mays
ctgcctttgcctacgctgggctcgagcgaagcaatatcgtgccccttgagtggactgagctctgaccttaatcgcgcccatcaggcctttgcagctttgtgctgatgggggttactcaactgagattaagagtcttgtgggttcccctagttatggtccccgacagtagcgtccgagactcatagggagtgttgatactctcttggaggctttctgcgcacttt

SEQ ID NO: 44224 - DNA, 410 bp, Zea mays
  unsure (1)..(410): unsure at all n locations
agcttgtcacattcattcatcttggagtcattttgatcaganagtaattttttcttccgtcacgaacacaaaatgatcatttgtcttgctatattttttgtatagttcattctcttttaagcgctatggtcacttcataatcgtaccatttatgaagaaaaaaaaacccaatgttcctttttaaagtttaaggtagaaaggtgagaagtttactgatgccatgctccaaaagtcactgacgttctaatatgtaatcatcgcaatggtaaacataagagaacgccactactagacgagtagacgttttagaacatttcgctcaatcgttgttgctggaaccaagccagattttcaggtgtactanaacatgaggcgcacttcatgcgccctacagtgaagcagcgaggaga

SEQ ID NO: 44225 - DNA, 345 bp, Zea mays
agcttgtgaagattcttcattccaacgtgggctagtcagcgatgctagagccaacccatgttagtcttagcaattaagcaagtgtcgagttcagctctattgaaatcaactaagtatagctgaccctttaacactcccttaaaagctactgaatcatcacttcttctaaagacagtaacacctacatccgtaaaaagacaattgtagcccattttgcataattgagaaacagaaagcaaattgtaatctaatgaatctacaagaaaaacattggaaatagaatggtcaggtgatatagcaattttacccaatcctttgaccaaaccttgatttccatccccgaat

SEQ ID NO: 44226 - DNA, 348 bp, Zea mays
  unsure (1)..(348): unsure at all n locations
tcaaccctaatggatggaccaccacatgagcactcacaatcctccacccaacccaattgctacgcaatcaaatactattgactgtgacgctgctgaagaatcagctccttcaagctttacttccaaaatgccgcttggtcgtgattcaccaaaggaaaaggcatagaagcaaagatcagatnacacatcatccactgattcggagtacctaacacgaatgggtgagctctctctggaacgggtatctgtctacaaataagtagcttcaactgaggagaagaagttggagttcatgataaaacaggagaggcagatactaatattggagaggaagaagctaacttatag

SEQ ID NO: 44227 - DNA, 404 bp, Zea mays
  unsure (1)..(404): unsure at all n locations
agctntangatgatagaggggtagctatgtggttgattgagtaagccctaccggctactataagggatgggagttcttccctattccctttacgttgatgtgagggcgttcaagacgagcatgcatgcatccttaattaaactaatggataattgggtaagaactttaatacaaaatgatgaccaactaagtaccccagtaccattgttgtagttagagagaggctgagttgtgattcctctttttataattctttttcttttacttacgcttaaccgtacacagatgacttctcacggatcctcggacgaagggaatgcactgtcccacaccgaccggcttgcacgagagggttttccccgtattttgtgggaggtacttcanggagctggttacacgacgcc

SEQ ID NO: 44228 - DNA, 478 bp, Zea mays
  unsure (1)..(478): unsure at all n locations
tctaaagggagaacacattntatgactaacanatgttcattnttgtaaagacaggatttgtagcgcatgccaagccgggaagcaagttggcactcatcatccacacaaaaacatcatgactagtgacaggccactggagctcctacacatggatctattcggcccgatcgcttacataagcatcggcgggagtaagtactgtctagttattgtggatgattattctcgcttcacttgggtattctttttacagganaaatctcaaacccaagagaccttatagggattcttgagacgggctcaaaatgagttcggcttaaggatcaagaaaataagaagcgacaacgggactgagttcaagaactcgcaaatcgaatggtttcttgaggaggagggcatcaagcatgagttctcttctccctacacttcctcaacaaatggtgtagtggagaggaagaatcgaactctattggacatg

SEQ ID NO: 44229 - DNA, 317 bp, Zea mays
tttaccaaatctgggcgtagatctattcccgatacttcgaggctagcttggaatatctatcagatccgatgatgataatgctgaagttgtgcctcataacaatctttccatgcgtgcaggcagccttcagataatcaagatctgtgcccctagaaactaccagtgcggcaaaagtagcattggcaccaataacttcatcaagagcatcaacctctgcctcaatatattccaatgagctgggcacggtttcagcagaagggtgtaatatttcacagctggctccaatagaaagaaacacatacttcagccgctgcacg

SEQ ID NO: 44230 - DNA, 410 bp, Zea mays
agtctttaaagggagagcacattttatgactattcattgttcatcttgagaaagacaggatttgtagcgcatgccaagcaaggaagccagttggcactcatcatccacacaagaacataatgacgactgacaggccactggagcttctacacatggatctattcggcccgatcgcttacataaacatcggcgggaagaagtactggctagttattggggatgattattctcgcttcacttgggtattcttctacaggaaaaatcttaaacccacaaaactttaaaaggattcttgagacgggctcaaaatgagttcggcttaatgatcaagaaaataagaagcgacaatgggactgagttcaaaactctcaaatgaaagcttcttgatgaggagggctcatgcatgactt

SEQ ID NO: 44231 - DNA, 411 bp, Zea mays
  unsure (1)..(411): unsure at all n locations
agctctggtacacagggacaaatgcaaatagatatttgtttatgacggnttgattcataatggcctcaagaatggcgtggtggatgtgacaaggcaacgtgataggattatcttattcaagcttggtcggggtgatttgttcaacgtaattagtgtgtttgcccccaaggaagacaccatgagtgctaaaagatttttctacaaagactaacaaggcttggttatagctatacaaactattggaaagcttttcatactacatatcaattggcatgtaaataagagtgcaacttttgaggtgattcatggacgttttgggtatggtagtcgtaatcaagagggagatgaagtctttggactttgtagcaacttttcacctattgatagccaatactttctttaggaagggag

SEQ ID NO: 44232 - DNA, 391 bp, Zea mays
  unsure (1)..(391): unsure at all n locations
gaactgctggcatgctagctagatcacattatgccgcacatcttctgttttttcccaacgcgctcacaacgatgtacggcgttccttgtcttcacaatgatcttcatcacggattcagatcaattcgtgactaattccataattntctgacctttaatgaccagcaaataagaattgtcatatccaactgggtatggttggagtcaagaattattgccgcttctgacttgagataactgcatgcactggatgtacaagttcccctattgttctagtacgttggaattcaagaaagatttcccacgcgtacattgggaatgattcccattctaccaccgtagcgtcattattgggcacacagaaaactgtggatctatgtgagaaatcattc

SEQ ID NO: 44233 - DNA, 319 bp, Zea mays
  unsure (1)..(319): unsure at all n locations
agcttntcaccacgtggtgcctagccgttccttctcaccaatcgccgtcgtagctcctcaaccggtgatcaccggaggaagcgcctctgcgaaagccatatcttccacgcgccagtaccattgttctctccgaccgccagcacatcccggtaaaattgggcgccaccgccgttagaggctataaattgccgtcaccatccgctcctttaagtagttacgcaaccagtgaagcaactcgtgcttcgaatcaccccctagagctcgcaaatttctcgtttcccccaaaatggttttccgccgccgcgatgaacacctcccc

SEQ ID NO: 44234 - DNA, 354 bp, Zea mays
aggagggggatagactacacgtcccgctccaagaaggattgctaccaatgtggctagcccggtcattttattgctaaatgtcctatgtctagtgacagtgaccgatgcgactactagaacgggagaagaaaggagaataagaggtactacatgaagaacggcggcgatgcccatgtttgtcgcgagtgggactccgacgagagctcatgcgactcctccaacgacgaagacgccgccaaccatctcgtcaccaagggacttctctttcccaacgtcagacacaagtgcctcatggctaaggacggctatacgaagaaggataaatccaactcctccactaaatatgaatcgtct

SEQ ID NO: 44235 - DNA, 318 bp, Zea mays
acaaggttggatttgcatatccgctaaacatgtcggatgagaattgtgcaacttcataagatatacatattggacaacaatgtggattggaaagaagggttgggccatgccagcagaaacaacatggagtcacatttatcaaaaatgtgtccaacaaagagccattggagcttcttacatggaccttttcgactcgtggctacttagcatagttgtagcaagtcggccattattgtgatgattttctcgataccctggttcttttaaggataagggaactcagaatttgagaatcatagcgagccaaagaattggctc

SEQ ID NO: 44236 - DNA, 387 bp, Zea mays
agcttgtcttcatcaatttcaaggttagtatactcggcaagaaagacttctcttccatgaggggaacaaggggcatatatgttggaaagccaccagacttgaccatttagattagatcagaaacgaatagtatgcccaaacgcattctggtcaactacctcagcctcaaagagggagcctttccaaatagtgatgaatcctccagaagctccaatagaagggccatgagcaaatttatctaaattccgattgcagaaaagacgaagatatgagtcatcgaaggattctttttttgtttcctgaatacaaacaatgtcacaattggattccaagatattattctgcaatgagttccatttggtgtcagagttaatgaaagggaaatgt

SEQ ID NO: 44237 - DNA, 368 bp, Zea mays
  unsure (1)..(368): unsure at all n locations
agctttcatagtntatgataacgagggttacattttataccctgtcgattattccgaacacataatttagagaattcattttatgaagnctcactctggctctcatcatgcttttatgtataagagtgaggcatctatttctaggcaatccactcatgctaaaattgctaaaaagaaatcatctattgcatcaaacgagcctaatatttcatttaagactttcgatgctncatatgtgttaactaacaaatcangaaaagtagttgccaaatatgttgggggcaaacacaagggatcaaaaacttgtgtttgggtacccaaggtgctcgtttctaatgtcaaatgacctaataccgtttgtgtaccta

SEQ ID NO: 44238 - DNA, 414 bp, Zea mays
  unsure (1)..(414): unsure at all n locations
agctttcctttaaccccgaaacgcgatacttcttttcattggtgaaactttcaggtggacataatctccctcaaggaaataaaaaggcattcgccatttgtctgcataactcttttgacgagcttgagctttcttcaaattatgaattatcctttggactctttcttcgggttctttcaccatatcaggcctgaagaagtacctttcaccaggttcagaccaatttaacggagtacgacatcgtcgtccatataaaacttcaaagggtgccatcttgatgctttcttgatagctattattatatgagaactccgctaacggcaaacattcatcccatgtttgtggaaattccagaacacacgcncgcagcatatcttcaagtatttggttcactctcttcatctgtccactggt

SEQ ID NO: 44239 - DNA, 414 bp, Zea mays
  unsure (1)..(414): unsure at all n locations
ctattaaactcagcntcacatgtctcgatgattcaaatcaaacaaagctaatagcccattataatgaagcttcttcatgcgattctcacttatatgacccaaacgacagtgccacatgttggtaggacttatatcattaagccgaggccttttatcactaatattacagataggtgcatcatcaataattaaaatgaataacccattcataatggattgcaaagccacaaacatgccattcttagagatcacacaaccattggtttcactcgcaaatgaataaccatccttcatcaaacatgaaggagacataatgtttcgactcatactaggaactatataacaattatntaacttcaaaatagatcctgatgggaagtggagttgcatcgtcccgacggtcaacgcagcaac

SEQ ID NO: 44240 - DNA, 296 bp, Zea mays
tgcctgctagaagcaagtcgctctcacatcctgcatagaacattatgacgaccgacatgtcactggagcacctacacatggatctatatcggcctgatcgctcacatatgcctcgacgggaaaaactactggccaaccatgtggatgataactctcgcttcactcggcgattcgttttacaggaaataacttcaacccaaaagacctataagggattcttgagtacggctcaacacgagtccgccctatagatccatataattacaatcgacaaccggactgagttcaagaactct

SEQ ID NO: 44241 - DNA, 406 bp, Zea mays
  unsure (1)..(406): unsure at all n locations
agactgcaagcatgcaagctnttacagggagaacacgtgatcagggtgacttacgtatctttcgaaaaacaacaccttgtgagtattgcaagcacgataacaagtgggaggatcacacttcagcatgaatgtgatgaccacatcaagacccctggagctgctacccatagtcctcttcggaccctgctccgatctgatcatcaggagaacgtagtatggtctcacttatctgagatgactttccccgcttcacttgtgtgttcttttcgccagataaaaattaaacccaacggaccctcaagcgctttcgtaagagaactcaaaatgagaatgagctcacagtgaaaaataaaaggaacgacaacgggtcgtagatcaaaaaccctcaagcggaggagtttcttga

SEQ ID NO: 44242 - DNA, 427 bp, Zea mays
  unsure (1)..(427): unsure at all n locations
gcatgcaagctagngcacacctccgggaggctcccagatcaatgtattngagttcncttcgccggagaagccagtccacgctcgccggaactctcacccccgcctgagtacgtggaccgggttaaccaatccaccattcttcgattccttgtgcccacagtcgttacgtgaccccgtgaagcttaccgtaccctcggattgaaccagttcgtcgtgggttggccggtatactcgccgccgactaggacacccgtctgcactcgtggaccgggcgattccggccaccttcgacgccgatccgtacctcgacatgaccgccagagtcttcccgagccgaccccaccctttgccggaccttcctctgcgcctgtaagccgcgccgtccttctctttcccgcggttactgtttcagtgaggggaaagactg

SEQ ID NO: 44243 - DNA, 403 bp, Zea mays
agctattggtggggaactggatcttatcaagcctcctctgttcgaagatcctaacaagaacacctttgataggtcttcttagaagcaagctcggaagctattatctataaagcttcggcacaaagacagatctcaagatgaatggtcgcaccgacctttaaagaattgacttatagacccatgatgttttgtgtcatattgtagtcgattgtttaggacataatagtaattttgcgcaggttgcatcctgtgcctataaataggtgaacagtatctcggcactattcacgcgatcctataatcactggcatgttacgcttgaattattgctttccgccaaggcgaaagtataaatgcgccccaataatatgctgtgatacgtatatactcatataataaaaca

SEQ ID NO: 44244 - DNA, 306 bp, Zea mays
agcagccacacccggacatgtatactctgccaactgactgtataagaggtcctgattgcatgaaatggggtatctttatcaaaccggccactactacccagatagagtataaccacctcagtgctgacacaccaattaaagtccacccaatctcatctcatttccacaccggaatctgcaatggctgctacaatcccacgagctcttatgtccgccttatcctctgcaactgtcgatctgccacaactctgcatctgattttattcccgccaccaaaactctcttcaagcttggacatctctccta

SEQ ID NO: 44245 - DNA, 402 bp, Zea mays
  unsure (1)..(402): unsure at all n locations
agcttntttgtggtagataaatatgtgtgcctatgttatgggaccaaatgctttgctctgttcttatgtgcagttagatgaagcgtccagggctctcctgatgaaggtactataagatgccacctttgacgctgtgcggaggcaggcaaaggtaacctcgtttctttgccattaaatgtagacagccacaccttcatagtcatattttgggggccaatgccaatgctaaccaaatttaaaaattgtttttgtggagatgttattttctgagatatccaccaccagtgtctctaccaggatcatcatttctgactctgcaatgtatctggcctgctccatttgcattctcatggtcgataggctattaataaaaaaactgttagtagtctctgatcccacagt

SEQ ID NO: 44246 - DNA, 409 bp, Zea mays
  unsure (1)..(409): unsure at all n locations
cagagctcatgaaactatatttctcagcatactntgtgccttagcacattttcattgtcttcaatcattctcccgagatcgacctcatattcattcgtgtcttcagtgcgatatgatgtatgaagtgagccatgccggatgatgcaatgatatgatgcagaacatgatgcttatgtcgatgacacgcactcacacacccacacagtctctgcgaaccctatgaataccaatatctctttgtcattatacttcggctcaccgctatttattggggaagtctgcatcctttggaacgtctttgaacttttcgcttctattcggcggataccgatgctttctgtgtagttctacatccttaagaacgctttgacttctcgcttaattcggggattggcttgatcccttggac

SEQ ID NO: 44247 - DNA, 438 bp, Zea mays
  unsure (1)..(438): unsure at all n locations
ctataaagtagagctgcacgcatgcaagcttgagcaaggctcacggtctcaccaggatgcttcctgaggcttgaatccaacggaggggggactggagaggggttggccactgcggtggttcttggtcggcactggcgggctgcggggaggtcgccggaggcaacggctggctcgggcgagtccggcgaggtaccgaggaagaaatggggaaggcaaccgagcgctgggcgggatttataggcgcggacgcggccggagcgtctgttcgaccgtttggcgcgacgcgggcacgcggggcgcgcgcgcgggcgtgctctggcgagctcaaagcgcgtcgaacacgtggcgcgttgcttctgcccgtgttcttcgctctgctgagcggccaggcgtacgaatcttgccctaccgcctgtgggagatcntctccctgcacct

SEQ ID NO: 44248 - DNA, 407 bp, Zea mays
agcttgacttcagttgcataaataatattgctgtttatgaagcacttctgttggggctttggaagttgagagcaatgggaataataagggacatcctgaaaactgattctcaagtcatttctggccatgtagacaaaattagcaaggcaagagatccgaagcttgaaaagtatttggatacagttcgaaagttagaggcttctttcaaaggtgtttctatcaagaatatcccaagaggtgaaaatgagcatgcagatttactatccaaatcagcggctcatgggctccctctaccttcgcaagtattttttgaaacaataaaggcaccttcggttgaactcatggagagagaagtacttgttatttctccagtacatagtgaagaatggaggactgaaattatatct

SEQ ID NO: 44249 - DNA, 387 bp, Zea mays
  unsure (1)..(387): unsure at all n locations
cactatanatactcagcttctcacactacgacttcattctcttcacggtgaggacacagtttttctccttcgtccgccctcacaatggacaaatcccggaaataccctcctctcatgttgacaagatgattctctttgatagttgatttaccataaactgaatggcttggtcgctatggacgaatttctgagtcttcaccaccactgtccacatcataactgtcactgtctccagtatctttagacacacctttcagaatctccttgaggattctttctgtattgggctttgacatcgctataagatacaccanacttttctcttcgtcgaggctcagcttcatctcaacagcagtcttcttatcatttgacatcttccgagatact

SEQ ID NO: 44250 - DNA, 396 bp, Zea mays
  unsure (1)..(396): unsure at all n locations
agcttatataatagctgttttccatgtgagattcattaaacnttctaagtgatacactttttttcacttttacggagggtgcttctgcatgaaggttttataagtatgcaactatatttggtgggtcaggggatgtatccttacatgatacttttctagtaacaggagatagactaatgcatggttttgaaaacaccgaatgattaatgttcagtatgatcagaaaacttgtgcctttctttntaaggaacatatgtggtgctcaaaggggtacggtactcacgtgcacattttaaatctgggacatccatctcacatctaactacagcaccagttttataaagaacaccttccacctccctccatcggtgggattggatgcaagatggatgtcct

SEQ ID NO: 44251 - DNA, 220 bp, Zea mays
agcttgacaacgaggagatggatcttattatttagagcttttggcaaatcctcaaacaaagaaagggaaggactacaaaccacgctccaagagggtttgctataagtgtggtaagtccggtcactttatagctaaatgtccatatacaagtgacagtgacagggacgacgaccagataggaaagaagaagatggagaagaaaagatattacaacaagaag

SEQ ID NO: 44252 - DNA, 473 bp, Zea mays
  unsure (1)..(473): unsure at all n locations
tcgcattgcanaccgacttaaagatagaatgaccttttagtccatatatgtctgagtcaatgtgggaagttttcataaagtgcatacttgtaattcctcacaggctgcgtcctgtgcctataaataggtgaacagtacccccgtactggtcacgcggacttggcatttgcttttgcgccacacttgtattatcatctctttccgagccgaaactcatagcatttgagaacaagtccccaacacaagggatgcctacactattggtagacacccctcaattaaggatgggcttggctgtaaaagggaagccaagaacttaacaagccacagagctcccattttcaacaagggaaagggaaaggctcctatggctaatagttgtcaaaagaatcatcgcattatttatgatagagacatttctagaaatgcttatcatactaggagttgtaatgtttatgattcacatgccatga

SEQ ID NO: 44253 - DNA, 417 bp, Zea mays
cagcttacccactgcgaagacagtaacccgttttaatgatctcgatcatcagacctacatagagactgtccttaatcgactcagatggagacactacaccgagactcccttctagagcaagtcaaccgcctgatctcagctttattattttcaacccaaagattggtacctggcacaagcacatcttttccgaagtcgaacccatcaaggctctgatggatccaccatcataagtgatctctttttgaaaacattcccacccactagaagcatcacttttgttttaacacaaaacatttttgtttgctaaagcaaagctaagcatcataaaattcctttccaaaagggtatcaacgaaggaaaatacattttccaagaaaggagatgcatcaattggttagcacacatctcttatca

SEQ ID NO: 44254 - DNA, 372 bp, Zea mays
tttcttcgtcttttcctctccacttgctgtcataatttaaattccagcaattggtgcgagttttatctttaactctaaatatacaaactcaaatactggtctaaaatatcttctttatttatttatatagttactttctctacatgttatagtattttccctctcttccccacatctaaaataacttgggtctttaaatccaaatcttgaccttacagaatttctattaactatcttcattattattatcaaatgcacacccatatataaactccaacatgatgcatattccatgttagtatcatttattttaaataatcactcttaattataggtgcgctcttgttatgatgaatatatggaacacaaaat

SEQ ID NO: 44255 - DNA, 333 bp, Zea mays
atcttcattcgaacctaatattatgaagatggcaatttgctctccataagagataatagcatgtcgctcgagattgtgaatagggatgacaatggccggaatctccgttttcagatggacactaggcagcatcccgcgcataacgagcaagatcctccgccacctacttcagcttccacagtgcatgagctgatggcccaccctaacgagattctgcgacagctcttgcatcaccagccccaccctcaacagtgtggtggaggccatccatagcaacctacagcagctgcgacctaccaggagttcctgaacacacagctgcccttgtcacca

SEQ ID NO: 44256 - DNA, 312 bp, Zea mays
agcttgcacctaggtacattggtccattcctggtacttgagcaatggggaccaatggcgtatcgactgcagctccccgaaattatgtctgctatacataatgggttccatgtgtcataattgaagaagtgtcttcgggttcccgatcgaaccattgaagtaacagatgttgtccttgaaacggacttgacatattctgagcaccctattcgagtcctggatcaaaaggacaggattacccgaagaataactctcaagttctataagatacagtggaaccaacattctgaagaagaggctacatgggaaactc

SEQ ID NO: 44257 - DNA, 387 bp, Zea mays
  unsure (1)..(387): unsure at all n locations
ttctaacactgatagaattcatggagtgctcgtcacgccttggccatggtaagcctctctcgcacttggctttataggccttctccggaagtgtgacgctgatggctcctatggacatcgatatggtgtaggggccttcaatcaaagttggttgggaggacagcaccctgaccatgccgcttttctagcttatgtcgatgcgggggccaccgccggcccttgcgcctctcagcaccctgatatcttctcctttcccggtgatggngaaggtaaggctcccataatgaatcaccattttgtgaggttgattgtccgtgtggcttgccatatggagctcgtataatctcatcgngaaatgcacaagtcccctacctggcatgccaacta

SEQ ID NO: 44258 - DNA, 348 bp, Zea mays
gagctttattgagcttgaaccagcggagcagattcgttactttcttagaagcctctccctggtcacatggggagaacaattcaaaccgccactgtctcttgctgctaaatgtctaaaagagcctaccaagaaagctttactgacccgagcctcctcatgcttcattatatggcgcttgttgcgaagacacatcccttttccaccgtagttccctgtttatggcgcgcgttcgttaatttacatctctatgaccggagctattcgaggatatcccactaacccatccacgacacactgtttcactccccgtgtgcgcctccctcattacatttctgtctaaggcttaat

SEQ ID NO: 44259 - DNA, 413 bp, Zea mays
  unsure (1)..(413): unsure at all n locations
agcttcacggagaggaaccttcgggtatcttatactaacagcttcagccaaggaccacttctttctataagaccttcggcgacgaagcataaacccaacacaatcaaagaagcaaatcagacatttatcatcagaacaatcaaacaacatttttaaatagagaaaatagtttaaaatttgtcggaggttccctatctcttaagaatgtcataaatgtaggattccaaggtgtgaaatccatcttgtcttagagtaggaaagataagagtaatcagagttgaacagccaaaggttagactgggtcaagattagatcagtctagaatgaaatanagtaaggctagtagggacgggttttgctagtttaactagtttcggctatagtaacatttctctgatccacttctggacact

SEQ ID NO: 44260 - DNA, 478 bp, Zea mays
  unsure (1)..(478): unsure at all n locations
tctaagctgaccgtgcactggaagtggcgtgaacgtgactgtgtccgcatatctatcggctatcgactgggggcggtggcggggctctctgcacgcgtggacagaacgagagatatggcgagggatcttggcagagggcacaaatgggcgaggggaggtgggcgatcacggcgtggtggctccgacgtggccggagaacgcgcggtcgtgggcgcgtccacgacgggagatcgtgggcgagaggttagatacggctgacaagtggggactgggatacctagagagagagagagagatagagagagagagatagctggtgcacgccagataactatcgccgataggtctgcccacgggacatagagagggagagaagcgcgctcgggttgacgaggtctaagcttaaatgggtcggctggcgctgaattggcttcttctttttcctagaantnctaattgcttttctatctattatctc

SEQ ID NO: 44261 - DNA, 350 bp, Zea mays
  unsure (1)..(350): unsure at all n locations
agctttgtcgtgcgtctcgccgttctatcatccttntatgtatctccacctgcttataataattagacatgaaacatgactctactttacgctaaacatagtgtctacattaaacttccttccatttagcgagtggataatttataatcatgtaacgtgatcgcttctcgactgtcttttcctctttctttcttaaccgtactcgcgagcccgcgtggaacgtctgtttacttattgcattctattgtatggtgtactgttctctggcattaaaatatagggatgtatgtatgtttgcgctcgcatagagaacgatccggttgaagagcccgaggaactctcaggagaag

SEQ ID NO: 44262 - DNA, 414 bp, Zea mays
  unsure (1)..(414): unsure at all n locations
ntacgcatcananacaatcacctgcagaagcagaatgaaatcctctgagccaagcgccaacgaatcaccatgcaagccaaagtgcaccagatgatacaagatgagaagcatagagctcgagagctagagcaagagatcgcgctcattgaaggcgaaagcttatacaagctgcagcgcggacctctcgcaccgccattaaatctccaccaacacatactagtcagagacccattccagtcatagcgcgggcctttcattccaccagttgccgctttccaggggatcaactatctccacgagcgaagtcctctggctccctagctccaagcgtccccttggcttggcaacttcaggtccggcacctaccccanatacaatggatgcactgacccggctcagtacatcatgagctac

SEQ ID NO: 44263 - DNA, 417 bp, Zea mays
  unsure (1)..(417): unsure at all n locations
caagcttagaacactttcgtttttagtccccttttcatgatctttcctcacgcggntaagcgttagaacgaggattaggctttgataccaattgaaagtttcctagagggggggtgaataggcaagttaaaactttttcaacaaaaactagaagcaaactgggtaaaactgaattgatctcgaaattcacccagttaactttggaaatgagatgttctaaatgatccacaaggttcaaagtagtagatctgagaagggcacttctcaaaatccacacaccaaatatatataaacaaatcttccacggtatggtgagagaacgaagaacacgtataagcgcaatgaacaagaacacaagatacacaagatttatctcgaggttcggtcacaccaccaaggtgccctactttctcgttg

SEQ ID NO: 44264 - DNA, 252 bp, Zea mays
agcttggtgccaatggagaagcagaaattcttgaagtcttggctgtcgaattgcttgctgttgtcgactgtgagttcggacgagactccgaagcggcaaacaatattttggcagaagaatttctgggctgtcttcgatgttattgtggatacagccctcgcctcatccatttggtgaaatactcaacggcgacgaatgtgaacttgagggtcccctgagcctgtggcaggggtccgacaatgtccatgcccc

SEQ ID NO: 44265 - DNA, 393 bp, Zea mays
ctgaagactcacaagcgacacctagccatctaggagctatgatctctcttagtaatgaatcctccgaagatagtattgctgcactatagctctacgcaagaggaacaaaatggatctggagatgaagtgtgaagacccataactcttaatctattcaaagatttgaattatgataggttcaagatgtgtgaggggaaatggggaggagtcaaaatgctcttctagagtttttcttacggtagatatggaagcgaatgtgttctcttatgtttatgagataggaatgagtgggtatatatagtgggagtgggactctatatctagcctcttgggggcagtctatgtgatatgcgactgaaatagccttcgattgacaaaatgcgattgatgttg

SEQ ID NO: 44266 - DNA, 389 bp, Zea mays
agacttggcgaccataatcctgcctttcttgatctctcccaaagccaccaatctcttgtcagtaactccatcaatattgtccatcatcaaattataataatcactgataaccatatcattatgcctggcaaacctgaaagcattcatgcttatcttcacaggcaaaacagcttcctgttcataaaccatctcgaaaagagaaactttagtggcacagtgttaagggattctatgaacccacaaagcttcagacaaaaccttatgccaatgcttatgatgatcagatatcctattatttataaggctattcaatgtcctaatactaaactttggttggccattggcctgagcataataccgagatgaaatgagcattttgatcttaatat

SEQ ID NO: 44267 - DNA, 433 bp, Zea mays
ctcagctcatcggagaaaaatatacagaactggataatgtgctctatgctgtgttgattgccattacgaagcttcagcattactttcaagcatatcatataatcgctccttcatcgcaacctttgaaagacataatgaggaatagagaagctactgtgaggatcggaaaatgggctgccgagctcaatgaatattctatcgactattgacacacgcacttactctagtctcaggcgttagcggtattcatcgctgattggacgccaggggcttcagaataagtaacaaatgatgctgaagcctggacagtcttctgtgatggtttttgtggaacctctcgcgcaggagccgctgttgtcctattagcaccctctaaaaccagaacatgctatgcagcacgacttgagtctagttgacagataacattgctgag

SEQ ID NO: 44268 - DNA, 316 bp, Zea mays
agctttcacatgggtgcagccagccttctattttaacgaagcagtgcttcagtgcctatccatgcgcagtagatctatccagttgagagaacactcctcgtagcatgacttttggtaaggatccaccggatcattccttctaagtcaccatccacaaagcttatctctcgagattttgctctgatagaggagaaaggctttgtcaattcattgcagcacctgtttgcgacagtgtagcagctggtatcaagatccgacagtttcaatgagctatctcgtatggtttatttcatcattagaactccaatcttacttg

SEQ ID NO: 44269 - DNA, 246 bp, Zea mays
ctgtctagcacggaaacacgtgggaagctctcatcatgccaaatatgtgatgacaacatcaatgacctctggagttactttatattgacctcttctgacccgtcgcctatctaaacataagaggaaataggatggtcttgctatagctgatgattttcccgcttcacttgagaattctttttgcacgataaatctataacccaagggaccctctagagcttcctaaagagagattcaaccagtttg

SEQ ID NO: 44270 - DNA, 423 bp, Zea mays
  unsure (1)..(423): unsure at all n locations
catgcanagcctttggttgacataagcccctatgtttctatttcttcggggccaccgtgccaacaagctgtggtttaattcatggtggtatcccaccacatcatcaccctagatctagtcccaaaatatctggcctataaagtgttcccacacccttaatcaatggaatataccaatgcttatacggacagaggaaaaaaatgaacttgggcgactttcttatcggttcaaatttgagaaacaactctaaaggccattcccagaatggttagaaatgatagaaactttgtgcaacacaatactgggttattacactatataagaagttatctgtcgactgtagcctttgcacctgaccaaaacaaggttgaatacggttatggatgccttgaacttttaatattctcgactataatcgattga

SEQ ID NO: 44271 - DNA, 409 bp, Zea mays
  unsure (1)..(409): unsure at all n locations
agcttttcctttttcttgtacaatagagctttataaatatgtcaaaaattgtagaaaaacggtgaaattgtgaaaccaatttttctaagcttgttattttccgtaaaatttaataaaaatagtttcatgatttttaagtaaaataaggaattttgaggcatttaaactagcttaaaccattagttctggattnttagaaaatagataataactccacaattgcccaaactttttatgtgagctgtacacaatatttataagccatgggtagagtttggtttgatatgaacattgtttgataactagaacccaaaacccctacccctgtgctttgaactcctttactgactccagaaacactaagttctcggagttccgtgaaggaaagttgattcaagactattttata

SEQ ID NO: 44272 - DNA, 360 bp, Zea mays
gctgaatgcaacggctgagcttccgatgagtcgacaagcctattgaatctcctctagccatctatcatgcactcaaaacttacataatgccccatacctcctccggggtcactttagtgtatctaggattaccacgaatcaattgaacctgagtgggatttaaaacaaatgagagatcctcaaattaacatttaccacttcgtggtcgtccacttcttgctcccgaggttgcgcacttgaattaccaaagtcttgagccgcgtgtacatgtgttgtggctcctcccctttgtgaagccggaaccgaacgagctccccctcgattgtgtaccgcttggagatcatggtgagctcatctccc

SEQ ID NO: 44273 - DNA, 473 bp, Zea mays
  unsure (1)..(473): unsure at all n locations
actcaagcttctaaagggagaacacgtgataggtctaaccaatggtcatttctaaaaatatagaccttgtgcagctggtcaagcagggaaacaggtgggaggctctcatcacaccaaatatgtgatgacaacatcaagacccctggagctgctacatatggacctcttcggacccgtcgcctatctgagcataggaggaagtaagtatggtctagttatcgttgatgacttttcccgcttcacttgggtgttctttttgcaggataagtctgaaacccaagggaccctcaagcgcttcctcaggagagctcaaaatgagtttgagctcaaggtgaagaagataaggagcgacaatgggtccgagttcaagaaccttcaagtggaggagttccttgaggaggaagggatcaagcacgagttctccgctccctacacaccacagcanaatggtgtggtagagaggaagaacagga

SEQ ID NO: 44274 - DNA, 164 bp, Zea mays
agcttggacagtacatcagccgccgtgttcctatctctttctatatgatgaaactccagaccttcgaatttatcttctagctttcggacggcggcgcactatcttcccattgaatcacttgagcaatcccattccttgtttatttgactgatgactaccacaga

SEQ ID NO: 44275 - DNA, 453 bp, Zea mays
tatggccgccgcgagtgtgtctggatggtggagacggacgatttgtctgttctgcggtagaagacccccggtgaagaactggacacgctgcgcctcttccagccgaccggcgcgaggtagaagggcctggaatcggctggcgtactcttccacggttccggtgcgtcggcagtcgttgagctcgaacatcggggcagaccggagcggtggcccgaaccggaggctcaggagatctttgaaatgtccccacgatggggtgccctcatcgtcctgaagctggatataccatagctgcgcgacctcgtccaggtgataggacgccatgcgcacgcgctcctccgccatggtgcgatgttggcggaagtaagcctcgcacttggtgaggaagatcattggatcgatcgtgccgtcgaagcggtgaaagtcccacttcttatggctcgggaagaagtc

SEQ ID NO: 44276 - DNA, 153 bp, Zea mays
  unsure (1)..(153): unsure at all n locations
agctcttaaaggagaacacgtgataggtctatctaatgttactttcgaaaaagatagacnctgtgcagcttgtcaagcagggaaacacgtgggaagctctcatcatgccaaaaatgtgatgacaacttcaagacccctggagttacttcatat

SEQ ID NO: 44277 - DNA, 436 bp, Zea mays
  unsure (1)..(436): unsure at all n locations
tgtacaaagtccacttgaattaatattcggagaaacccgacctcgctgcttcatgacacccgaaggtccaacacaacaagcaatgagtgaatttagaattatttcagagcatatcagcacaagggacttggttcaagagttcttagctttcaaaggttttcccagcttaaaagaatgggaaatgccgaagctacaaggggagaagaaagaaggtgaacttgtacgtttaccttactacttcaagtttaagaaatactttaaagcaccttgccaagagtggttggaaacgattgaagcgatgtgcaatgaaatacttggcaattattctaaaaaagaagatcagttgatgaccgcagccttcggtacccgtccgaagcgaaggctaaatcgagtggtggacgccttgngcttcgnatatcctgattatgaaaatctg

SEQ ID NO: 44278 - DNA, 442 bp, Zea mays
gatgatatgatgcctcagggtgcttgatatattccattcaattcttataaactcaagctatcaatcttcaatgatctatatccgtgattgacccaagggtatttttcaaattactatgtcttaaactcatatcatctcgaggaagatattatatgttgtaggaagtgaagagatatcctgtgcaaaaatcaaggcctacaacatggaggaaagccaaaagatggtaacacttatcttttaagtgcaagtattttagaatatcatctcttatgtgtcttgtgtagtcacatagaaaaattgaagcacttcaaatgcctttaaatttatattaccattctttgaagaatttcctatcatatggtagattgcatactcctcatttcatcctatggcaatctacatgctttaaattattggaagaccatggcatgttttcgctaag

SEQ ID NO: 44279 - DNA, 421 bp, Zea mays
  unsure (1)..(421): unsure at all n locations
tcttgcgtcaagcttcagaccttggcttctcgcggcccactctaagatatttagccttataattgcctcgggagtaagttgatgaagatagacttcgaagaattttaacaccttcacgacgaagctgctcaaggggaatcgcaatccagctttcnaaaagcttcgatacaccacaacttcattttctttagggtgtggacaggttttttcccttcgtccgcctcacaatggacagatccccgaaataccttcctctcatataacaggaggattcctttgatgttggtttaccataaccgatgggtgggcccccaggggcgatcttggagtcttaccaccgctgccacatataacttcactgcaccagtatcttagacgccttccagaattccctgtgatctttctgggtggcttcacattg

SEQ ID NO: 44280 - DNA, 377 bp, Zea mays
gcgcatgcctagcatggaatcaagttggcgctcatcatccgcataagaacataatgacgaccgacaggccactggagcttctacacatggatctattcggcccgatcgcttacataagcatcggcgggagtaagactggctaattatcggggatgattatactcgcttcacttgggcatactttttacaggaaaaatctcaaacccaagagaccttatatggattcttgagacgggctcaaaatgagttcggcttatcgatcaacaaaataatatgcgactacggtacggagttcaagaattctcaaattgaacgctatcttgatgaagagggcatcaagcatgagttctttcttcctaatcccacaacaaatgtgt

SEQ ID NO: 44281 - DNA, 447 bp, Zea mays
tctttcttcctactcatcctcattagcgcttacgctatcattttcattagccacacaacacatgtgggaatcgaaatgggaagacaaaccttttggagaggtggattcatcgtttggtctccatcgctcattttctccttcttccttgcaagggttagtatcacaaaaactaaaggaagtacaggcatcaaatgaactattatgtttggactcatcaaacttgattataattctagtccaaatatcatgcgcatcgggaatggattcgtcatagtttgatatgaaggcatgataatcttctttgctaagagaattgtctaagatgtcaaaagctaggtagtttaagcgataacatctttgatcttcctcggaattaatttttccattaaagctagagggaaaaatactcttgtcaataatttgttctaattgaggatgtatggttct

SEQ ID NO: 44282 - DNA, 226 bp, Zea mays
cagcttacactgctaagcttgcgcgtttcttttacaagaacaccgcctagcaacacgacacctattgtgtgcgctcttcttcatctttaacagccaatcacatcgagactgggcgggtcgttagcttctgcaatgataacgaagagccgacaccaccgctcctcccgcatgaaaccgcacgagcatggcggccatgctaaatgcacatcaatccttttagggggta

SEQ ID NO: 44283 - DNA, 445 bp, Zea mays
  unsure (1)..(445): unsure at all n locations
tctaaagggagaacacgtgatagggccaaccaatgttcattttttttaagatagaccttgcgcagcttgtcaagcacggaaatatgtgtgaggctctcatcacaccaaaaatgtgatgacaacatcaagacccctggagctgctacatatggacctctttggacccgtcgcctatctgagcataggaggaagtaagtatgggttagttattgttgatgactttttccgctttacttgggtgttctttttgcaggataagtctgaaacccaaggaaccctcaagcgcttcctcaggagagctcaaaatgagtttgagctcaaggtgaagaagataaggagcgacaacgggttcgagttcaaaaaccttcaagtggaggagttcctcgaggangaagggatcaagcacgagttctccgctccctacacaccacaacaaaatggtgtg

SEQ ID NO: 44284 - DNA, 293 bp, Zea mays
aacaactatttgaaagagcagtcgattaatcctcactctatctgaactgtccaactacctctacatggatctcatactaagaactgtcgcgcgcattgcgcgtgccgtcccggccgactgaggcttgcgacacactgaactgtaacgaggcggctggtgtatggcgcttggtagccgtccgtagcagatcaaatggttgatgataaaaattacgacgtagacgtgttaccgacgcactgaacattaggtgttggtgttactctgtatatatgtactcatgtgacattaatatg

SEQ ID NO: 44285 - DNA, 409 bp, Zea mays
  unsure (1)..(409): unsure at all n locations
gtagcataggcaagtaatatgtgaattgactcaagcctagctacaggtgcataggtgtcaccgaaatccaaaccttcgacttgtgaatatcgttggccacaagtcgggctttgttccttgtcaccacaccatgctcatcttgcttgttgtggaatacccacttggtacctacaacattntgattatgacgtggaactaaatgccatacctcattccttgtgaagttgttgagctcctcttgcattgccaaaaaccaatccgagtctcttagtgcatcctccaccctgtatggatcaatagaggacacaaaagagtaaagttcacaaaaatgagcgactcgagatcgagttgtacccccttataatgtcatcgagaatggattcacggggtgatctctttgaatcgcttg

SEQ ID NO: 44286 - DNA, 331 bp, Zea mays
  unsure (1)..(331): unsure at all n locations
ctgacaggccgttcgagctacttacatggacctattcaagcccgatagccttacataacgcatcgggggtagtaaagattgtctagttattgtgtatgattattctcgcttcacttgggtgttcttattgcacgaaaaatctcatacccaagagaccttaaagggattcttgagacaggctcaaaatgagttcaacttaaggataaaacagattagaagcgattatgggacggagttcgagaactctcaaatagaaggctttcttgacgacgagggcatcaagcatgagttctcttctccctacatgccacaacanaatggtagtggagag

SEQ ID NO: 44287 - DNA, 242 bp, Zea mays
  unsure (1)..(242): unsure at all n locations
ttattatttggttatatctcagnaacacaccggccactcacgaaccgacggatgacactcctagatgccctttaagatcatacaccaatttcacagaccaacatgagtctcctgtgcgcactttgtcctcacgcatgcatcccccggannaacgccctggcgccacccatgccagattgctttaaaacaagcacacttaacttggaggtgctttcgagatatgctttcacaaaagacgaacc

SEQ ID NO: 44288 - DNA, 202 bp, Zea mays
agctctggatatcctacattgactgacatcttcttactcacatgaatctctttattgccaggcagacaataaaggaagtcatcatcatcatccccaccatacaccaaggacccttgagggtactgtatatctctggcgcaacagtgcgcttccgcaatttgctcctttgacaattccccccctgaccaccacgcactacgaa

SEQ ID NO: 44289 - DNA, 444 bp, Zea mays
  unsure (1)..(444): unsure at all n locations
agaagaggccggcctagacgcatgcttattgttaagactagcacgggctggctgtggcatcgtcgcttagcacatgtggggatgaagaaccttcacaagcttctaaagggagaacacgtggtaggtttgactaacgtacaattcaaaaaagatagaccttgtgcagtttgtcaagcaggcaaacaggtgggaggagcgcatcacagcangaatgtgatgaccacttcaagacctctagagctgctgcatatggacctcttcggacccgtcgcctatctaagcataggaggaagtaagtatggtctagttatcgttgatgacttttcccgcttcacttgggtgttctttttgcaggagaagtctgaaacccaatggaccttcaagcgctttctcaggagagctcanaatgagtntgagctcaaggtgaagaagataatgagcgac

SEQ ID NO: 44290 - DNA, 477 bp, Zea mays
actcaagctatactacgatcggcaccaccgtcaagtctcctaccagccggtggagtgttccctccttcgtctacggcagcgggcagcttcttcaatgcccaggaccaccacgggcaagctcaagcctcactttgtggcgccctaccgcgtcaagctcatcaacgacgtcgccgttcgcctggccttgccgccaggggcgcgcctacatgatgtgttccacgtgggtgtcctcaagaagtttgtcggcgttccaccagcgtccccgcctgccttaccaatcatccacaacggcgccgtggtccctgagccgctgcaggttactcaggcacgcttggcgcgaggcgtgcgtcaagttctcgtccactggaggggcgaaccggccgagtctgcttcttgggaagacctcgacgaattccgcagcaagtacccagactctcagctcgaggacgagctgggtctcgaggcggggagagatgt

SEQ ID NO: 44291 - DNA, 416 bp, Zea mays
  unsure (1)..(416): unsure at all n locations
cttctatacaacagctaatatgcccgtatcatagagtacctgnaacactcctggtgttacccacctgtctagtaaagtatatacatctcacgagcagtacgacaatgatataagaacaaaagtatatgtggttctgcaagttcagttaacatgttagcaaacaatatttgcgattccgaaacgtcaatggcataaccatgacataatttgcaaatatagaactgcaggatcagctccatcatcaaggtcagcattgtccaaggggtgatcaaaatcatcttgcaaatttgggctttggcaaggatgcctagaaatgttaccactatcagttntgcacggaaccactacacataggaagcttcctcgggaactcaccaaaaaaatatatagaaacacagcttctctattaagtaccc

SEQ ID NO: 44292 - DNA, 358 bp, Zea mays
  unsure (1)..(358): unsure at all n locations
aaacnaagcttttaagggagaacacgagatacgtctaactaagggcacttttgtatatttatatacctcgcgcagctggacaagcatgtatatgtctcacccggttttagaacgcaaacccgaatgcgaaccatgtacgtgccaagatcagctattctcgtacacaacagttacataacatggacatcatcacacagtgctcaaaatagtactaaaagggaaantacagtcgattacatcatacttgtgagacgtccatataatacttacaatagatcatagtgcggaatagaaacgtagataactgccgcctgcacacgcagtcgactggcggttgccgtaaaccacgcctagaact

SEQ ID NO: 44293 - DNA, 383 bp, Zea mays
  unsure (1)..(383): unsure at all n locations
atttcaccatttctgaagagatgtcttatgataagaagggtgctgctgaaacgaagcttgacgaggaggagaagctctctgaggagaagaatgctggctttattgaatcaatagcctaaacaaatacaaaaaagattactatggagattttagaaggcttatctgaagacaccggtgacagcgacagttatgatatggaaagtggtggcgaagactccgaagatcgaccctggcgaccaagtcatgcaattntcggaaaatcaactattatacagaaccatcttgataatatgaggggaagatatttcgagatatgtctattgtgagggctgacaatggagacataactgctcctacttccgaagagaatgaagtcgtgatct

SEQ ID NO: 44294 - DNA, 457 bp, Zea mays
  unsure (1)..(457): unsure at all n locations
tgtcgtcgttgtccttgtccgaatccggcccagatgcatgcttatgcaatgcacgcaccgcactgtccacgtncacgtgcatgcatgctcgctctgcctgtggacatgggctccgagttctgagcgcctgcgggttcatggccggacacgggcatatttgcacgcacccaactactcaacatcgcggagatctgcaaacgcagtatcctctagacgtgcaaacgggtggttcggttcccagactacctccgacagcagcttttctattataccttgtatttcatctatattttaaactttattttgcaaacaatgttatctacggtgtaaaacaatgatttaaacgatcatataaacgatcttccaggcagtggcggacccggctactatgtttagggtgtgctaaaaaaataaaaaagcaaacaataaacaaggatcaacaagacttgaatcttga

SEQ ID NO: 44295 - DNA, 244 bp, Zea mays
  unsure (1)..(244): unsure at all n locations
agctggggancttaccaattgaaagagcattatttctacttatgaanntcatgaacaagcttataagagattgaattactaacacaagccatagtttcctatttagcaacctctagtatatgaatgacaagaaggttactaaaataaggaaaccccaagatatganctannattccgcacacacatcctcgcacaacataattgaaagaaagatgaaaggagcatgattatttaataagctttc

SEQ ID NO: 44296 - DNA, 455 bp, Zea mays
  unsure (1)..(455): unsure at all n locations
tcgacatctttgcttgtcccttcttcgagagcctctggcgtttatttttcgatgaaatctgctagcgcttgagattgaattgaagatttgtgcacgtagtcaatagtgaatccattaagcttcggggcccatttttcaatccttccagtagcttctctattcctcatgatattcttcaggggttgtgatgaaggaacaattatgtgatatgcttgaaaataatatcgaagcttcctggatgccattaacacagcatacaacaccttctccaattctgtatagnttttctttgataaactcaacttcagagacaaagtatactgggacttgctttttagcttgtccttcgagcttctcttgtaccagtgccgcactcactgcagagtgcgaaactgccacatacaatagcaatggagcccctagcacaagtggagttaatggtcgtaaatcgatca

SEQ ID NO: 44297 - DNA, 284 bp, Zea mays
  unsure (1)..(284): unsure at all n locations
taaaactcagcttaggaaaagactanaagatccaaattaagggtatacacttagacccctgggataccaaaaaccataattggaaccctagaaaaccctaaaaccaaaccctagggacctatgtgcaaaattagtccacttttggactaaagtgcaaaaaccaagttaataaagtatcttaagtcagttgggtcactcatatgtgaatttacaagccaaaccctaagttttggaccaatttgcaaaaaagtaccacttgacctctatntcattctaagtctgaa

SEQ ID NO: 44298 - DNA, 203 bp, Zea mays
  unsure (1)..(203): unsure at all n locations
agcttatgaatagtactgggctgatttcacttcacnagcccaccttacagggagaaagtggccgcgtgcgcccacaccctggcagctttgcagaaaggaactctggtttcagaacacacccgaaggagaaccgctgcactattcactgaggcgctgaacgtttnnnnacccgccctgctctctatttcttcanccgacacatt

SEQ ID NO: 44299 - DNA, 378 bp, Zea mays
  unsure (1)..(378): unsure at all n locations
acttgatgtacagtggttggtgggttccactctaaaatatccttgaccttgctgggatcaaccgcaatccctttggcagacaatacgtgtcccagaaattggatttcctccagccaaaacgtgcagntgctaaatttagcatatagttgatgctcccttaagcgcattaatacgatccatagatgttgagcatgctcctcttcatttttggaataaatcaagatatcatcaatgaagaccattacaaatttatcaaactcgggcatgaataccgtgttcatcagatatgtgaagtgggcaggagcatttgttagtccgaaagacataaccagatattcaaataattcataccgcgtagngaatgtggtcttgggtata

SEQ ID NO: 44300 - DNA, 110 bp, Zea mays
agcttgtatgcacagaaacaattgatactttattatgatttctcaatcctttgcatttgccttagtattcaaatgattgcaatacacatgtatcgaactatctttatggt

SEQ ID NO: 44301 - DNA, 330 bp, Zea mays
  unsure (1)..(330): unsure at all n locations
gcaaacaggtgggaagctctcatcacaccaaaaatgtgatgaccacatcaagacctttggagatgcttcacatggacctctctggacccgctgcctatctaagtataggaggaagtaagtatggtcttgttatagttgatgactcttcccgcttcacttgggtattctttttgcaggataaatctgaaacccaagggaccctcaagcgctttctaaggagagctcaaaacgagtttgagctcaaggcgaaaaagataaagagcgacaatgggtccgagttcaagaaccttcaagtggaggagtaccttgaggaggaanggatcaagcacg

SEQ ID NO: 44302 - DNA, 404 bp, Zea mays
cttcacaacagatattagaggatccaagcactgtattctgtatgtccctgggcccacatgtacgtgcccaggatctttgtgcatgccctcgtttagctataaaaggggaggcatgcgacgttacacatggacacaaccttatactcgctatactcatacaagctcttgagcaatacaactcaacatcggagaatggtattacgctccggcgacccgaaccactatgaaccctcgtgtgctttcgtgcgatgattcgccagcctcgtatcaagcagaacacttaggcccctgctctcttcaagaattaaggcgggtgcaatccgtcacccggctggggagaattcctctccgacatttggcgcgccacgtagggggctaggcttcaagtgtttgcttgttgtctt

SEQ ID NO: 44303 - DNA, 454 bp, Zea mays
  unsure (1)..(454): unsure at all n locations
ctcaagctttgggaatacatgttccgaagctacactccgaagaccaatattgtttctctgtgtgacttancaccacctccccttatgcaaagcattcttcccgagatcgatattgagcccccttcttgagccatatgcagcatgatgaatgatgcttatgctatgcgaaacgatgtgatgatgttatgcctatgaaaatggcatttattccgaagatacacgcacatccccgcaataaaacacataatctatttagatcagcgttgacttttcgctggaagcctcccttaggagcttcttcgccttttacttcagcggaatcagcgtttattcttcgctggaagcctcccttaggagccttcttcgcttttactttcggcaggattcgcgtcgacttttcgcgcttcgcactttacttaggcggtatcagcgtttatctttcgctgcaagctct

SEQ ID NO: 44304 - DNA, 344 bp, Zea mays
  unsure (1)..(344): unsure at all n locations
aaatgaaaaaccatagatttctctatttttaagctataagatgagctataataacaataaaaagtggatacatattgtgatcaactacgataaactttntttcttattcacatgcaaaccataaaaattctccatttgtataccacggaatgagctataatagaaataaaaggtggatactcattttgatcaactactataaactttcttcttctatatatataaactaccaaataaatttaatctcaaatgacacataaaaaaactccaacattattcctaatctagaagctcacaaatttctccatctctaaaccatgaaataagctatactaacaatgaaa

SEQ ID NO: 44305 - DNA, 343 bp, Zea mays
gcgtgctggggactggacatgattggaccgttcaagatagctcagggaagctacactcacgtgttggtcgccattgacaaattcaccaaatggatagaatacaaacccattgcttctctaacttcagccaaggtagtggaattcataccagatataatattcaggtttgggataccgaatagcatcataaccgacctgcgatccaatttcactagctctgaattctttgatttctgcgaacaacggagcattcagatcaaatatacgtcagtagcacatccaagagccaacgaccacgttgagagggctaatggaatgatactggaagcactcaagaagaaag

SEQ ID NO: 44306 - DNA, 430 bp, Zea mays
  unsure (1)..(430): unsure at all n locations
tcatgaaggagctgccctccaagaagngcttcatgatggcttctttcttgatctggcccgggtggtgcttgagcttgtgggtcaggtggtccgcgtactctggcttgccgntcatactaagacagagaagttctatagtggcggttgtaaacctatttatagtggcgtttttcgtaaccgccagtgctaggggccagtagaaatcatcattnttacaggcgggtaactgaggaccgccagtgattcactggcggtcggcgtaataaaaccgccagtgaaaatcgattttcactggcggtcgacgtaataaaaccgccagtgcaaatcgtttccaggagacataaaacatatttaaaaatagttaaaaatatttttattangccacccggcaccccaccgccgtcttcgcgcaagtatcgcggatttttcg

SEQ ID NO: 44307 - DNA, 456 bp, Zea mays
tgtgccttataacaagaggattcaagaagatggagtgcttttgtgaaggctcttgcgaatcacttgaagcggtagtactttttgtgaatgattttgtaaagtgtttgcaaatatgtgcaaaacataataacatgtgtaggttttgtgaatgattttgttgtggcgcttgttgatggtttatgtgatgtggatctatcattgtgcaatactaattaaatttgtatatctatgtgattatgtgtataaaaattggtgatttgtgatgcttttatatatataacagttgttgaatgctaattaatggtatattatcattattaacgactataactaggggcaactttctgttggttgctaaatgtatagtataacgactcacgattggttgctaaatctatagtacaacaacccacagttggtcgctaaatatataatattagcaacgaacggtcggtc

SEQ ID NO: 44308 - DNA, 171 bp, Zea mays
agcttctaaagggagagcacattctatgattatacaaatgttcattttgagaaagacagaatttgtagcgcatgccaggcagggaagcaagttggagttcatcatccccacaagaacataatgacgactgacaggccactggagcttctacacatggatctattcggcccg

SEQ ID NO: 44309 - DNA, 377 bp, Zea mays
  unsure (1)..(377): unsure at all n locations
tatgaaactaagcttctggaacagnctncaccttcaccaccggtgtaacaatgttctcttctcataaggagccaatatgctccacaccaaagggacttcagagaacagtccgaagctcgcacagtcaacagcactgtgccagagtcaaagcacatctattgacaaatatcctaccttaatagcaatctttgtcattcagntttattttctgtgtaataaaggacattgtttaggtttcatgtaaatagtttcgttgattcccacaaggaaaatatnatttcttcacaggcttaagttgttgaagtttaaagatttgcgataacaaagaggaaccttcaaatatcgaaaattcttcgaagcaacaaaaagtcgttcta

SEQ ID NO: 44310 - DNA, 141 bp, Zea mays
cgagagcacccagccgtaaaatattcaacgaagaccgactagcaatgaagataaaacgcagatgaaaccgggaaatttcacgcaaaaccgggccctcccattcgcccccacaaacttagcaaatggtaaaacaactatcac

SEQ ID NO: 44311 - DNA, 192 bp, Zea mays
agctgccacataatctttcaccttgtgtttcatgtaaggccatgcaaacagttgattgaatccgcggtaggtaactggaaatccagagtgcccttccatatgactgtcatgaaatgcagagatgaccttacgctgcagatttgaattagcacccacccagaaacgacctttgtatttgatgaccccattctg

SEQ ID NO: 44312 - DNA, 184 bp, Zea mays
cctgaggcatgcagcttctaagggagaacacgtgataagtttgtctttctttcaatccgacaaagatagaccttgtgcagcgtgtcaagcatgtaaacaggtgggaggatctctttacattaagaatgtgatgaccacattaagactcctgtaactcgtacatatggaccttttctgacccggc

SEQ ID NO: 44313 - DNA, 454 bp, Zea mays
  unsure (1)..(454): unsure at all n locations
attgctaactgtcccgacaatgataagcgatctttgttcaatgttacaatatggagacaaagacgaactattataaggctaagggcgatgcacatcttggcaacgagtgggattctgattgctcctcgtccgactccgacaatgaaggacttcgcgccaccgcctttaacatgttactcctcattccaacgagcatcacacatgccttatggcgaaggagaagaacggatgtactcgaaacaatactacttatgattcttcaagtgatgatgattctagcgatgaggaaatagattactctagcttgttcatgggattggatagaaatcaaatcgataaaatcaatgaattgattgatgccttgaatgaaaacgatacgcttctagaaaagttagaggatttgttgtatgatgaacatgatanatctgtagaggcacataaatcctatgcttta

SEQ ID NO: 44314 - DNA, 119 bp, Zea mays
accaacaggcaatcacaaagcaggaatttggaatttaaaacaagagaccgccgaatcgccagaacaacacgcctgaacgcggccaaaggaccgacaattaggccgcgcgacgacccctt

SEQ ID NO: 44315 - DNA, 337 bp, Zea mays
ctcagcttcaaaacacaaactaagacaaaactcaccgaggccgaatctgtaaagagccatgcctttatcgaagctgggccttcagagcccgccaaagagaaatccttggaaatcgaagaggaaacggaaaaaggagctgcagaacaaattctgactgaaaaaactgccactcctactcccgaagcatcttccgaagtacctgattatattgtacgacatgcttcgggaaaaaggttatctgaagaagaaaagcgagaagctcaatattacgcccagaaattaaaatatccaaaggggcattgatattcaacggcagcggagaagaagatttcttgta

SEQ ID NO: 44316 - DNA, 338 bp, Zea mays
  unsure (1)..(338): unsure at all n locations
agcttgtaacgatgattatccaagtctgtttggtgaaagaactgctggcgncgcgataaacttgttaaggttgtcacgagaagttgcaagggcagacaagaatcagttctcgaacatcaagcacgcagtaagaaccgcagagagaatatcaagtaaagcttaattcattggnnaacgcttacacagcaagctgaccattgagagaggaatttaacatggtggcattattctgagaagcaaacaaccgggtcaagtccgtctgacctcgagaatatttcctctcaagatcagaataccgccgggtcatatctaacaagaagacggtgaacaacgatatt

SEQ ID NO: 44317 - DNA, 401 bp, Zea mays
  unsure (1)..(401): unsure at all n locations
agcttgtttgaactcttcagatttgcaatttttactcttccacnacgctttaagctgcatatcgagattcttctttacttgctcgaagntttctgatttcaagaggagctcactatttaatctggtaatctcggcttgggcctctgccagtgaaccctccatcgtttgaagaacaaaatctttcttttcaagaacagcttcatgatctttaattgtgctttccaagcctccaattataacctcatttttcttatctttgaggcatgttgcatccttcgtcagcaatcactttcattgtaaaacaatgaaaagctgaacgaaaaaatcttaccttggaatagaatagaataaactaccaacgatatgctgctgtcgatagcgactgatgtcagcttcaaact

SEQ ID NO: 44318 - DNA, 122 bp, Zea mays
  unsure (1)..(122): unsure at all n locations
gcaagctttaatntgagagttcttgatctccgtcttattgtcgcctcttattatcttgatccttaagccgaactcattttgagcccgtctcaagaattcttctaaggtctcttgggtttgag

SEQ ID NO: 44319 - DNA, 359 bp, Zea mays
aagcttccacgagaggttagcatgaacacatcaaattgttcgcaaatgatttctctctatctagcctagtaccccaagggtgcacaagctaagctagctgcgaggagtcctaccatcaccaacgtctatctctactctggacatgtagtgagcgaatgaggccacactcgactcggtggaaggtggtcttcccgagccagcagtgttcacactggaggcaggctcatctcctccctcgatgccgacgtcctcgttggcctccaggtcctggatctcctggtgatgcatatccaggtgctcattagcctcagcaagctgctgctgagtattgatgagctgatcctcaagaaccttaatgg

SEQ ID NO: 44320 - DNA, 141 bp, Zea mays
tgactcgacgcacaacagagataaacgatggtgcgaagcaaagcacacaagatcacgcctaggaagccaccctcaatggcgcgcatggccgggttcgactcccacaatatcgagaaagcgcacgcgagtgcgcactaatag

SEQ ID NO: 44321 - DNA, 467 bp, Zea mays
  unsure (1)..(467): unsure at all n locations
gacctatgaaactaagcttctaagggagaacacattntaggactaacaaatgttcattttgagaaagacaggaantgtagcgcatgccaagcagggaagcaagttggtacccatcatccacacaaaaacatcatgacgaccgacaagccactggagctcctacacatggctctattcggcccgatcgcttacataagcatcggcgggagtaagtactgtctagttattgtggatgattattctcgcttcacttgggtgttctttttacaggaaaaatctcaaacccaagagaccttaaagggattcttgagacgggctcaaaatgagttcggcttaaggatcaagaaaataagaagcgacaacgggacggagttcaagaactcttaaattgaaagctntcttgaggaagagggcatcaagcatgagttctcttctccctacactccacaacaaaatggtgtagtgga

SEQ ID NO: 44322 - DNA, 235 bp, Zea mays
  unsure (1)..(235): unsure at all n locations
agctggtgatntatccaatttaaaacatgcttcttctcttaacatagaatttctatggataaactcaacacaagagatggcattagtagcacaagcactagtttcttatttagcaaccctttatatgtggaaggcaagcgcgttgctaaaatagagaaacctcatacatatttacacccccccccgagcccttatgacaatatattttaattgaatggatacaatcctggctcgc

SEQ ID NO: 44323 - DNA, 328 bp, Zea mays
gatgaccacgtcaagacccctggagctactgcatatggacctcttcggacccgtcgcctatctaagcataggaggaagtaagtatggtctagttattgttgatgacttttcccgcttcacttgggtgttctttttgcaggataagtctgaaacccaagggacccttaagcgcttcctcaggagggctcaaaatgagtttgagctcaaagtgaaaaagataaggagcgacaacgggtccgaattcaagaaccttcaagtggaggagttccttgaagaagaaaggatcaagcacgagttctccgctccctacacaccacagcaaaatggt

SEQ ID NO: 44324 - DNA, 203 bp, Zea mays
  unsure (1)..(203): unsure at all n locations
agcttctaaaggggaacacattntatgacttatcaatggtcattntgagaaagacagaatttgtagtgcatgtcaagcacgaaagcaagttggagctcatcatccacacaagaacatcatgacgaccgagaggctacttgagctactccacatggatctattcgaccnnatcgcctcacatagcatccgcgggagtaagtatt

SEQ ID NO: 44325 - DNA, 404 bp, Zea mays
  unsure (1)..(404): unsure at all n locations
tcggggctntaacttctgtacatattggttggtgattattatatctgnatagagtataatagatgttattacatcaaatatacatacaagtatatggtttaaacttggtttgttgggtcttggaaggaaatggattccttttaacatagtgttggcaatcaattttgcctacagtcatcatgacattcggggaggtgaaaatggagtgcctgctcctattgcgaacatccatacaacctggattcctggatgatttatggatggttattttggtttaactaatgtttgatcacacatatatctgaaaatatctagtagtgcttggttgaaattgttgaataggtctatcttatacactgatttggtaatctgaaaatgggctttactcaaatcttgaatatcta

SEQ ID NO: 44326 - DNA, 92 bp, Zea mays
ccggatcttaagcacctgcagctgcaactggattcttttgaagggttttttttctcggccgctccttcaagctttgaccatatataccgtat

SEQ ID NO: 44327 - DNA, 190 bp, Zea mays
tataaaactcaagctgaatcagcattcattcttgcactaagacttaaattatctaagagtgagcgatgtgtctccgcgtccccctccctctcactacctaacatgagattgaaacgacaagtctgagcgagcgttacctaggccggtggtaccaactttttaccagcgctggggtactaacattgtggac

SEQ ID NO: 44328 - DNA, 396 bp, Zea mays
gaagagacaatgcttagaggacctgttcaggatggatggatgtacccaatagaaaggccactaagcacttcgaaaaattctgcaaggaacaaggctaggccggaaggatcaattgctgaggcatatatggcatgtgatacctgaacattatgatctaggtacatgaacgatgttgacactagatttaaccagcatgatgatagtggtacagagatgccattgcctaatgacatgtctgttgtaagcatggtgctactcttgttggagctactaagactgagtacattgatgatgctatcatgaataagttagtttggtatgtgctacataatgctgatgaagcacaggaatatctgacataagttagattcgtatgtgctacataattgatgctat

SEQ ID NO: 44329 - DNA, 392 bp, Zea mays
tagagcatgtcaagcaggaaagcaagttggcgctcaccatccacacataaacataatgactacggataggccactggagctactccacatggatctatttggcccgatagcttacataagcatcggcggaagtaagtactgtctagctattgtggatgattattcttgcttcactagggtattctttttgcgggaaaaatctcagacccaagagaccttaaagggattcttaagacgagctcaaaatgagttcgaattgaggatcaaaaagataagaagagacaatgtgacagagttcaagaactcacaaatcgaaggctttcttgacgatgagggcatcaagcaagagttctcttctccctacacacctcaacaaaatggcgtagtggaga

SEQ ID NO: 44330 - DNA, 67 bp, Zea mays
cgcagcagcactcgcgatgggggacaatgtaaggaaggccgagaacaagaacgcaccacacgaaccg

SEQ ID NO: 44331 - DNA, 441 bp, Zea mays
attgaagaagcacaacaagctttgattttgttattttgctccgaaactttagcaataccaacatttgcttggcttaatctaaggatcagtcttgtagtattcgttgtattattgactacaaccattgacctatttcttatctagaaatagtgttccagatgccccagatcattcaaggttcacataaaaaatcaaaccaatcttaaatctctgatctacaatgggtctatgaaaattgagaagaggatttaaggaattaaactggggaagaggatcacacctaaactggtggcagcgcacaaggaagcgacggggacgaaccaatcaactgaagcgatggaagcgagaggagacaaactcaaagcttcatcggactatccagccaggtctacaacatggagaagtatatggtcctacactcgtatagtgtagttatctcct

SEQ ID NO: 44332 - DNA, 446 bp, Zea mays
atctacactagaatgcaagaaacgttcacagactaatatttatgcttgtttatttaatataactattaacgagcaatgttcatactagttagattaaagtgcataaagacgttatgcactttaatctaactagtatacaaatactcccatgcaaatctaccaagagtacgtaagtaagatagtcatgatttacggtatgattctaatctgaaatttgttttttccacagttacgtcatcatacgcatggtgcagtaaaattaaacgaaacgactaatgataatgatgagagagatagagagagtggcgcacgcaatgcatgatggctggcaagctgacgttacgtggagcatgctttaactgccgatgcacgtcggcagggcgtacgtatggagcgctgccctggccgcaactgacacatggcagagtactggaagggcccagcga

SEQ ID NO: 44333 - DNA, 433 bp, Zea mays
  unsure (1)..(433): unsure at all n locations
ctaagcttctccaagnttgctggggcttccatgcaaagtattgcgccttatgtcctagccgtagccccttgatcatggcctcaatgacgatctcattgggcactgtaggtgcttgagctctcagccgcaagaaccttcggacatacgcctgcaaatactcctcctggtcctgcgtacactgaaagagaacctgggcagtgatcggctttgtttggaaaccctgaaagctggtcactaacatatcctttagcttctgacatgatgtaattgtccctagccgaagagaggagtaccaagtttgagctacgcttttgactgccatgacgaaggatttcgtcatgactgcagtattacccncatatgacgatattgttgcttcatagctcatcaggaattgcttcgggtctgagtgcccatcatacatangaagctg

SEQ ID NO: 44334 - DNA, 273 bp, Zea mays
  unsure (1)..(273): unsure at all n locations
tcttccgacgccttgaatgcgacgggttgagcttcggatgtagatcgatcatcaagctcgttgatcttcctcgagcctttgatcatgcactctaaacttacaaaatgcccgattactttctcgggggtcattttaatatatctatgattaccacgaattaattgaacttggtagggtaagggaaattagagatcttgaataaccttaaccacctcatggtcatcccactttacgctctngaaggagcgcacttggttcaccaaagtcttgagc

SEQ ID NO: 44335 - DNA, 165 bp, Zea mays
agctttgggcacgcatctgaatttcatttctcttatcatccgcagacagcgtcacacccggattttaggggtccaaaacccgggcgcgaacataattatcaggtgtgttgggaccaagtctcacacatatgatgaatcatggcacatgatcgaatgtgagatttt

SEQ ID NO: 44336 - DNA, 452 bp, Zea mays
  unsure (1)..(452): unsure at all n locations
tagctcaacanagttgtatcaatatgagcaaaaagagtcttttcttaccgtagcatcatcatgtacacaaagaacatagtactaagagcatattcacattctagcatttatacaagtgaagctcaaaatgctacatgagacaacacaaaggatttcaacacagactacacatgcaaggtgtcaatctcaatggtgaacaagttttggattgagcaagttatagtcaagtacacaattatgaaaacaagcttagctcaacaaagttgtatcaatatgagcaaaaagagtctaagcatgtcatagcatcatcatgttgtcacacccggttttgggggcaaaaccgaatgcaaagcatatatgtgccaggatccattntccacacatatgttgatgtcccaagtgtaatatatcaaaggacaatgcaataaaggcgtataagagagtataataac

SEQ ID NO: 44337 - DNA, 306 bp, Zea mays
  unsure (1)..(306): unsure at all n locations
aaactcagcttaacaatatggagagggagnctcactaactatgacggtttctcctaatcggnccattcaccgagaggacgtgtggatgggattatgatttctctccgaggatacaacaataaatggtttatgcaaacataacttgtcataagcaatgcacaataatgctacatatgcgtgcgtaagtgacaacagtatttgcaaagatgtcatgcgagggaatatacgtgacgggtaccgttgcatgtgttccgatggcttccaaggaaacccataccttcaaaatatatgtacagggtatattcc

SEQ ID NO: 44338 - DNA, 408 bp, Zea mays
aagtatatgtattatgtatttccaacgcatgtataactgcattcgtataaaaatacaaatacatttattaagaataatgaaacgtttagcgagccattgcgaggaattctgctatttgcttattatacatgggaagatcaatatcttctgctgaggacaccaaatagtagttcacttaaatgatgggctaacgatcgtgtagtggctatcttggccttcagattctgaattatttgaggctagaagctacttgcacttagcaactgttgcagtgatgcctcctaccattaaccaaagcctagcaaccaacatctcttcatacttcataccctgcttattcgtatgaaaaggaacgtgaatttttagaagataataagattaagggttgatttggtgacaagtggatca

SEQ ID NO: 44339 - DNA, 446 bp, Zea mays
  unsure (1)..(446): unsure at all n locations
cgcaccccggaagattgggccttantctatccttgtaagatgttgaccagnggcataccaactccaattacccgaaaccttgtctgcagtgcacaatgtgttccacgtatcccagttgaagaagtgtcttcgggttctagatcgaactcgtgaagtgacggatgttgccttataaccagacttgacatatttagaacatcctattcgagtgttggatcaaaaggatagggttacccgaaggaaaactctcaaattctataagatacaatggaaccaacacacagaagatgaagctacatgggaaactcaagactttctaganaagaatttcctaggcttcttagcttcatgtaaatggtgagatatgaacaattgttgtaattaaggattagaccccataccacccctgctttgtacaagaaataaggaaataaanatatgacgtg

SEQ ID NO: 44340 - DNA, 405 bp, Zea mays
ggaccgagccaaacacgaccgacagtgcgattttatcaccccacgcgggcggcccacctgaacagaactgccagacctgcgagccaccacgccacgagagcaagcggatatccgcctggcgtaaaaaatctggcgcttggcacacttacctgccagaccacagaaacagacgagtatgtgcgaagctaccacaacattcattgctattcgcactgatttgctgccaaaattattaaccgacgccgaagctagactctcggaatcgaacgaagcgtcaactagaagcctgcctcgtcagaagagaaaactcgcgaagaaaaaagtgctaaattcccacaaactcagaactaacaggctagagcgcgttctaccgctagggacgaacgtgaagggggcgaagctgaa

SEQ ID NO: 44341 - DNA, 321 bp, Zea mays
cagcctaatccaatggttctcgaatattagaaaataaacaataagtccaaaattcccaaacttcttatgtgagctttccacaacacctagaagccatgggcagagctcggtttgaattggaccttgtctgatcactaaacccaaaaccaccctccctgcttcatgaactcctttaccgactccggagaccctaagttcccggaactccgcgaaggaaagctgtacctcagacatcaataacaagcttatgtaatctctggatcctcatgagcatgccatgacatccatccttacatatgatatggtatactacagcacgaa

SEQ ID NO: 44342 - DNA, 128 bp, Zea mays
  unsure (1)..(128): unsure at all n locations
agctngtgaacagcacacattcagaagggatatatgcttcttcagccgatcagccgaagcctatgctcttatgtgaggacatatcatagcacaaggtgctgttaggctctcaattatccgaagagcat

SEQ ID NO: 44343 - DNA, 353 bp, Zea mays
agcttcgcttaagagcacatttcaccatttccgaagagatgtctcaagatttataagctgctgctgagatgaagctgagcaaggagaagctctctgaggaaaagctctctgaggagaagactgctggttttattgaatcaatagcaaagacaaatactgaaaagattacgaatgagattctagaaggcttatctaaagataccggtgacagcgacaattatgatgtggagagtgtgggcgaatactccgaagatcaaccccggcgaccaagtcatgcattttttggaaaatcaactattaaacagagtcatcttgataatatgaggggaagatactttcgagacatatttatt

SEQ ID NO: 44344 - DNA, 449 bp, Zea mays
  unsure (1)..(449): unsure at all n locations
cttggtgttaccctttaaaagcgctctttcctctgctaaagctttgttgttaccctctaaaactggtctttcgtaacatgaactgtactgtaccagagttgggaatttcggtacgagctctatgtataaagagagaatggtccatcgtgtgtcatggtagcgctggacatttgtcttattacacaacagtaaaaaggcatctacctaaccattatgaactggaagaacacagctagtggaatacctgaggaagatcccttcattatgaacgtcaattttcaaaacggttgcagctgttttcaaaacgatgacaggactccacaagcacaattggactnttaccgtgccattcaaccnctcagaacacatgattctggctcaatgccacgcacgttgacaggaaccacacgacactttcatggcatnatcccacgcgcgcgaaacattac

SEQ ID NO: 44345 - DNA, 435 bp, Zea mays
  unsure (1)..(435): unsure at all n locations
tggtgtacatntgacaatttcatagcctctgcaataccttctaatgtgctcttcatgctcttgctcgttctaggaatatatgaggatatcatcaatgaacactactacgaacttgtcgaggtagtccatgaatacacaattcatcaagtacatgaagaaagctggtgcattcgtcagaccgaatgacataacagtgaactcatatagtccatacttggtgatgaatgcgatcttcggtatgtctgaaggtcagatcctgagctgatggtaaccagaccttggatctatcttcgagaacgcactggctcctctcagctgatcgaacgatcttcaattctaggtagggggtagttgttcttgatagtgacttcattcaaagatctataatcaatgcacattctctttgtcccatctttcttctccacaaataacgct

SEQ ID NO: 44346 - DNA, 376 bp, Zea mays
gcttcagactctctacaccagaaccctagacaatatctctacaacatcgtatgagttcgatagaagaattagttctacagacaaatatgcatgctacagtccaatattatgtggacaaacataacagccatttctctccgagcaacagtagcgcatagattaccctctgtgcattttgaatcactggttggcagggggcagacaggatactccaaagagaaggctcgctgaagcagctattccctgattcatcaaatctgtggcatccaacaagaatgccgttggcaaaagccaacgctagctgttttgcagctttggtggcgaattacctgacccagccttgtgactagagccatccggccacctacatatcata

SEQ ID NO: 44347 - DNA, 167 bp, Zea mays
agcctcggctaccctaagactagagcggtcttctacaccctcatacagatcttcgtagtcaggggattcaaaacctaaggacgtcagcactcgaatcagtcttcgcttgggacgggaactgaacgccccacttatcaactgattccttttcttggagtaattacctg

SEQ ID NO: 44348 - DNA, 446 bp, Zea mays
  unsure (1)..(446): unsure at all n locations
ggtgcaaagtccacttgaactaatcttcggagaaacccgttctgttattctatgaccccgaaggtccaacacaacaagcaatgaatgaattcagaattattgcagagcatatcagtacaagggacctggttcaagagtttttggctttcaaagtttatcccagtttgaaagaatggtaaatgccgaagcttaagggggagaagaaagaaggtgaacttgtatgtttaccttactatttcaagtttaaaaagtactttaaaacaccttgccaagagtggctagatacaattgaagtaatgtgcaatgaaatacttgacaattattccaaaaaagaagatcagttgatgaccgcagccttcggcacccatccgaagcgaaggctatatcgagtgctggacgccttgggttntgaataccctgactacgaaaatctgaacaaaagtgtc

SEQ ID NO: 44349 - DNA, 402 bp, Zea mays
  unsure (1)..(402): unsure at all n locations
tcggcgacggtgtaaaattcttgtcgcaaaacattgcgtatttctttttatgctgngcgaacttcacacctactcgtctgtttatatagtgccgcacgtaagaacgcgaatcgccagaagttttacaccaggcggacacccgctcgcactcgctgtacggtggaccgcaaagaccgaacagtaactctgcaaggtggggccgctacacgcacggaaattgaatcgtttctcgacaacgagctcagggaaggtgtttttgagaccttcggcgctccgaagcttaagaaactcttttcacggatcaagctcgttacgaagaacgatctagcaccgcgaaaggcgctactgttgggtctatgcttcgtcgccgaaggtcttatagaaagaagtgatcctcagatg

SEQ ID NO: 44350 - DNA, 148 bp, Zea mays
agctggtgaagccaatcacaagtttattgattaatgatgctaaattcaattggtcttccaagggtgaagaaccctctgaaatacgaagacattttaaccactggtctgattggctaatcggacataactaatccttttgaagtttatt

SEQ ID NO: 44351 - DNA, 380 bp, Zea mays
  unsure (1)..(380): unsure at all n locations
ngaaggccaagtcaagaagcaggccccaatatattttgtattttaagttcttagnttatcaaagaaaaattatacagaattggagaaagtactgtatgctgttttgatggcctccaggaagcttcggcattattttcaagcttacaacataattgttccttcttcacaaccgttgaaggatattataagaaatcgagaagctactggaaggattggaaaatgggctgcagagctcaatgaattttgtattgattttgtccatagatcttcgattcagtcccaagcgttggcagacttcattgctgactggacgccaggggctcaggaggaagaaacgaataaagatgccgaagcatggacagtgttttgcgatgggtctt

SEQ ID NO: 44352 - DNA, 190 bp, Zea mays
  unsure (1)..(190): unsure at all n locations
gacacttgcataccctctttttgtattctgaagatacctgtctacatattccacatggaaaacaatgtcaaatcatgtcttgaggaccttcggaagacgaaagcccccaacaatatgcttgtttgcttgtgcctgtacctcttcgctccacgctgcgacnnaacaccactcccacccaacttcgattaat

SEQ ID NO: 44353 - DNA, 448 bp, Zea mays
  unsure (1)..(448): unsure at all n locations
ncgcatctctgaactaattcngctgcatcgttcttagccgtttgcctatttaatcctgacctgaaaacccttccgactagtgttctggatgctgcatgtatcccacattgccgtgcatggactttctccagaagntgtttcccggtggacgggagaacgcacttcatgaggatgcctgacgcgccccttctgacaggtcctccccaatgagtgtatagtgagccgactgccttggaatgcgctctgccgagatcttgtcgtctgggtcttcttcattctttatatacataataatcggtcttctccagtcgtcagaatctgactcgagtcgatttatgaatgtgcactcttctgcttgatccattgagatactcggctgcagaatttcttgcacgaagactctcggtgggacctgagttcgaccggatccgagcttggacagtacatc

SEQ ID NO: 44354 - DNA, 449 bp, Zea mays
aagcacacggggacaaccaaaggcagtccagaaatactggtttgtagcgcaagccaagcaagagagcaggagagcgcccagcatacacacaagaacataatgacgacggacaggccacaggagctactccatatggagctaaccagctcgaagcgctaaataagcacccgcgggaggaagtaatgtcaacgaactacggacgaggatgctagcgacactggggtattcactctacaggaaaaagcttagacccaagagacctaaaagggattcttgagacgatctcaacatgagcccggattaaggagcaagaagaggagaagcgacaacgggacggagttcaagaactctcaaagtgaaggctttcttgaggaggagggcagcaagcatgagtacacctcaccctacacacctgaacaaaatgtagaagtggagaggaagacagaaca

SEQ ID NO: 44355 - DNA, 168 bp, Zea mays
agcttcagctccatctatgttatgtattgtctttgattctgtccaacttccttcagcccttctatcagcttcttgacttccgtggacagcgatgggcccttgtttcgaaggtatcttcatgcataagtatgctggatgaagcctctcttcctctcgctctcatctcct

SEQ ID NO: 44356 - DNA, 466 bp, Zea mays
  unsure (1)..(466): unsure at all n locations
actaagctaatcttcgaccggttaatattctaagcttcttgtctcttgctttacaactcttgtcaatatgaccagaaataacctgggaatcagtttttagaagcgcccttctaattcccattgcctttaacttccgaagacccaaaagcaaagcttcgtactcagcaatgttatttgtgcagctgaaatcaagtcttgctgcgtagcaagttttaactttggagggtgcgaccaacacagcggctactcctgccccgaaggttccccaagaaccatcgcagaatactgtccaagcttcggcatctttactcgcttcttcttcctaagctcctggcgtccagtcagcaatgaagtctgctaacgcttgggactgaatcgaagatctatgcacataatcaatgcaaaactcattgagttccgcagcccattntccaacccttccagtagcttctctatttctcataaa

SEQ ID NO: 44357 - DNA, 443 bp, Zea mays
  unsure (1)..(443): unsure at all n locations
ctcaagctntatcaaatggacgtgaaaagtgccttcctcaacggaccaatcaaggaagtggtctatgnngagcaacctcccggctttgaagacagtgagtaccctaaccatgtctataggctctctaaggcgctttatgggctcaagcaagccccaagagcatggtatgaatgcctaagagatttccttattgctaatggcttcaaagtcggcaaggccgatcctactctattcactaaaactcttgaaaatgacttgtttgtatgccaaatttatgttgatgatattatatttgggtctactaacgagtctacatgtgaagagtttagtaggattatgacacagaaattcgagatgtctatgatgcgggagttgaagtatcttctacgatntcaagtcaagcaactccaagagggcaccttcatttgcaaacaaagtatact

SEQ ID NO: 44358 - DNA, 413 bp, Zea mays
aactatagaaactaagcttcatagtactacatcgcaatccgcataatcttaataatatcattggagaaatgcactcgtaccatgtgtgttaccttaaccttgcctgaatcattgatccactgaatggggcatggatgtggccgtggacgtgtggacaaaccaagcttcttgaccaaatctaaactcaccaaatattgcagctccaccatcataatacacgtgccgtccatcttcatggcgaaaagcctggaacaaatatggcgggttgctttctatgaattggctgacactaaaacacctgaccataagcttcaaggtcattgaacatagaccagcatagatatcattagacaactccaggtgcatatggcatctcaccgcggaacactatgacctatcctacatgatgtcct

SEQ ID NO: 44359 - DNA, 449 bp, Zea mays
cctgggagacagcgatttaaaacagtagcacaagaggacgcgaaggcctttttagcggcagaactcctttcctccagaactgcactatgcaataacttcattaagactgctgcgaatggtttgatgtcaaccatgaccttctgcaccaatagagttatgaaactagcaacaccaaccctggaatcagacaacaatgaatgataccacattttagaagtagtgagaaatgaagcatttgaggatatcatgaacaagactgtacaggcctaaccttgtatttaagccaacagctgatctaatcatttgagccaggcgaggaaccaatagatcaagtgaattcttgtcaacaacttttatacagatatcaagagtttcccacattggagaatctttagcaacagctatgcgcacagtttcaagctttatctgtttgatgccagcattccctg

SEQ ID NO: 44360 - DNA, 232 bp, Zea mays
  unsure (1)..(232): unsure at all n locations
agcccatgacgatgtctatcccatcgtgtgttatttcgagatgctagagccaacacatgttagtcttagcaattaagcaagtgtcgagtctcatctctattaaaatcaactaagtatatgcgaccctctaacccttccttaaatgctactgaaacatcacttcnttctatgcagccgacactacctccgcaaaagaaattgtttccatttacataatgaaaactgaagcagt

SEQ ID NO: 44361 - DNA, 429 bp, Zea mays
  unsure (1)..(429): unsure at all n locations
gccgagtgtcagatcggcgacactcggcatttactcctttgccgagtgtcggccaagtgacactctgcaaagtatactatacacttctttgccgagtgcctacctgggcggcactcggtaaagtgtattttcattttttctattttgtctcccaaactttgtgtgctatgttcctacactatgtagacctacatgtatcatttgtggacaattataacatagtttccataagtagtagatttagttcgcttatttgaatttcttccgaaaattcaaatttgaactgcaggtcactcgaaacttggaaaaccgtgcatganaaaatgatattcatgttacttaacataagttacgaccgattgcagaagcgtaccggaaacttcgagcaacatgctcactaaacatggccgtgaacttggcatccacatg

SEQ ID NO: 44362 - DNA, 134 bp, Zea mays
agcttgcgccacaatgttaaaaataaattattcttccatgccaatcttatgagaatctatattggctcaattctaagtaaccttcgcacttacaattatgcaaactagttcaattatgcacttctatacttgct

SEQ ID NO: 44363 - DNA, 440 bp, Zea mays
  unsure (1)..(440): unsure at all n locations
gacacttaaaactaagcttatatcttggtacccaacttgaattgggtcctttgagaatagtagaaaaaggcctgagtacccacataatccttattgtggcctttctctctgtgtaggcacccacatatacatgacaaccgtcttacatggnttcaattcaatatttaatcacatacataaaaactagagttaagaataagagccttttctccttttcttgatacatcggtgtgttgccttcttgatgatgaacctaacttgaccttgggtgcacctagcttatcaaggttagtcgcacaaacattcatatcatgaagacaagttatgcatggaatttacaacttagtgatctaattcaatgtgaagcatatggataccgaatgaagtagatttctaagatatcaaaatatgcggttccacaaattagagtatggatcact

SEQ ID NO: 44364 - DNA, 208 bp, Zea mays
  unsure (1)..(208): unsure at all n locations
tgctgactgaataaacaatcaatttcgaaacttgtcctggtagggacgaatacagcaacctgtctgaaaattcataactcctaatttgtcaagcctaatggtattaatattccccccccgcccactctaaaagctttttaatattttttattacgatcatgaatcaattggaaccataacttaanctaacatttactctttgtaatct

SEQ ID NO: 44365 - DNA, 303 bp, Zea mays
  unsure (1)..(303): unsure at all n locations
ctcgatcatatgtcataatagaaagggagttatacaagcgtggggtctgttccccattgctcaagtgtttatccagatcccgaggtatagaattaatgaaggaaatacatgcangcctgtgtggatctcacattggatctaggcccttgcttgggaaagtttttcgccaaggattttattggccaaaggcagcttctgatgcagcgaatatagtccaaaagtgcgaagcgtgtcacaaatgtgcaagagatcaaaaacaaccttcgtctttaactcaattaatacaacccacttggccgttgc

SEQ ID NO: 44366 - DNA, 473 bp, Zea mays
  unsure (1)..(473): unsure at all n locations
aactcacgcttgttaanacaaagagacatacgggtgttgatatggctaatttgctcctcatatcggtattgctttcgccggtggcgacaacaagtgttgatagggcatattctgcaatgagtttggtgaagactaaattgagaaacaagatgtgtgatagtcttttggatgattgtcttgttacatacatcgagagggatattttcttcgaagtgaatgaagaagatatatttgaaacttttatggcgttgaggaagcgcgggccagataagtagtattattgcaatttttatgcttaatgtatgcaattttcatgcttcattgttgagtgtcaaactttatatctatatatcaaattgtttaccaaacttactatgaaattatatgtacattagatagaattctacatgacaatcttgctgcggcacaccctatgntaaaatcctaggtcccgcactgcctagcagggtctc

SEQ ID NO: 44367 - DNA, 449 bp, Zea mays
caaaccgcacagaactctaaactccaactcgctcacctttgatcttggttctgattgagctcgatggtcgcaacttcctgtgctgtgtttccagctcaagacttggcttgcgcgcgtgattgtgctacacactagagtcttgcatgtgttgctcgtccaatacttactcttgtgctttctttgtgatcataacttttgaacggcgagaggctccaacttgtggagattcctcgcaaacgggaagagtactctaagataaaacaccatggtattcaagttgatcattagatcactcgaaggggttgagtgcaaccctcgtccattgggacgccacaacgtggaagtaagcaagtgttacttggccgaaccacgggataaaaatcatgtgtctcgtgtgtcgcttcttgcgatagatttatcgcacgagcgtgatccatagccacttgatt

SEQ ID NO: 44368 - DNA, 466 bp, Zea mays
ggaagccatggtaagtagcataggcaagtaatatacgaattgtttctttctcttctacgggtgcataggtttcaccgaaatccaaaccttcgacttgtgagtatcccttagccacaagtcgggctttgttccttgtcaccacaccatgctcatcttgcttattgcggaagacccacttggttcctacaacattttgattatgacgtggaactaaatgccatacctcattcctagtgaagttgttgagctcctcttgcatcgccaccacccaatccgaatcttgtagtgcttcctctaccctgagtggcttctaaagggagagcacattttgggactaacaaatcgttcatttgagaaagacaggatttgtagcgcatgtcaagcagggaagcaagttggtgttcatcatccacacaagaacatcatgacgaccgatagggccgcttgagtactccacatggaccta

SEQ ID NO: 44369 - DNA, 451 bp, Zea mays
tggacgactaaaatcttgctagtttagatctggccagcccttttttgcctgatcgaaacttgggcgactgaaatctggctggctgaagactggtcatcccaattttgccgcaccgaaacttgggcgactgatatctaactggttgaagtcttggtcagcccaattttgctcaatcgtaacttgggtggctgaaatcgggctggttgaagtctgttcggcccaattttgcgtgactaaagcttggacgactaaaatctaatatttagttacttatttgaaacaaaaatatctttttcttcttttcatttttgggattctagaaatctcgtgcacccaatgggtgtgttgatcgtcttttcaaaaaacagtattctgaagttgacagggcggcgtgatgcacataactaacctctgatgtcgtggttcgcagaaatatgctgcttcttggaaa

SEQ ID NO: 44370 - DNA, 125 bp, Zea mays
ctcaaccacaataggccaatgaacgatacgatccttaatcgacacagacatgcgaacttgtctactcagcgtctggtctagatttattcaaacccttgtcccattttggtacccgacactggaac

SEQ ID NO: 44371 - DNA, 129 bp, Zea mays
agctctggatgttgggccagatgaacatggtatatctctacccctgcacagaacaaagtatgtatattattatagagcaaaacataaggaactgccctgtacaaattgaatgctatgctcatagtgatg

SEQ ID NO: 44372 - DNA, 446 bp, Zea mays
  unsure (1)..(446): unsure at all n locations
tggaggcgtcgattgggtgtctacttggtgtagactcctccttcttttcttctgtcgccttgaatgcgacgggttgagcttcagatttggtgggttcgtcaagctcgttgattttcctcgagccttcgatcatgcactcaaaacttacaaagtgcccgattacttcctcgggggtcattntagtatatctaggaataccacgaattaattgaacttgagtagggttaaggaaaataagagatcttagaataaccttaaccatttcgtggtcgtcccactttacgctcccgaggttgcgcacttggttcaccaaggttntgagccggttgtacatgtgttgtggctcctctcctttgcgaagccggaaccgaccgagctccccctcgatcgtttcccgcttggtgatcttggtgagctcatctnctttcgtgcgcagtntgagcaca

SEQ ID NO: 44373 - DNA, 274 bp, Zea mays
ttaagcacctgagctgcagctgccgccccgagcagaagtcttatattttctccagatactaatatagcttttgagaagagtgcggtcagagaggccgaatcccttgcccctgaggcactctctaaagatcttgattatatcatttgacatgcttcgggaaagagattatccgaagacgaaattttcacacctcccactatgcccgagaactgaagtattctaaaggggtcttagtgcttaatggtacagacaaatatgattctccgcattctct

SEQ ID NO: 44374 - DNA, 453 bp, Zea mays
tgagaaaatctttccacctgccttctctgatgtcatggtgttcttgagtggccatcttcctgatgaggcaatgcttagaggacctgttcagtatggatggatgtacccaatagaaaggcgactatgcactttgaaaaattttgtaaggaacagggctaggccggaaggatcaattgctgaggcatatatggcaagtgataccttaacattttgttctaggtacaagaaggatgttgacactagatttaaccaggatgatgatagtggtacagagatgccattgcctaatgacatgtctgtttttaagcatggtgctactcttggtggaggtactaagactgagtacattgatgatactaccatgaataagttaggttgggatgtgctacataatgctgatgaagtacaggaatatttgacgtaagttaatttcggatgtgctacataaattat

SEQ ID NO: 44375 - DNA, 174 bp, Zea mays
  unsure (1)..(174): unsure at all n locations
ccgaaggccaaccatgtacgcgccaagaacagnnatttacgtacacagcagatacataacatggacatcatcacacagcgcttgaaatagtattataggggagaggaaagcgtttcatcctagtctgagagagcatatagtcttacctaaataaaaggcgggaagaaaaaaaaa

SEQ ID NO: 44376 - DNA, 325 bp, Zea mays
tcttcactgtatacaggagaaatagtaagaactgctctttcaagtaactccactgaaggtgcctttattgtttccaacaatacatccgcaagtagctgcagcccctgtgctgcagacctggctaacaaatcagcatgctcattttgcccttgacggatattcttaacagagaatcctttcgaggatgcttcgatccttcggactgtgtctaggtatttttcaagcttcgggtctttagccttgcaacttttgtcaatatgtcccgaaacaatctgagaatcagttttaaggatcgctctcctgatccccatcgcctttagtttcc

SEQ ID NO: 44377 - DNA, 385 bp, Zea mays
  unsure (1)..(385): unsure at all n locations
tagtgtatcgacgcgtctgttccatggttgtcgtttctttaagtgtcatgccaccttgatcgcatnctgcgatcaaggtgttgatcccctcatttgtttacctttgtgacttcttgtactgaagcatttattatggcgaagagcactagttatcatagtatgcatagagtacgattggtaatttcaccgtatgtacatgtcgtctgatcgtgagagcttaactgtcccgtgagtatcttctagcatgaaggtggtgcctcgtcccgtttcatctgggtagatctgggtggcatggtaagcctcgtgcccgaggatctactaacatctgatagttaggccctatcacgcgtcgaatgtttagtaacatgcccgacacattacttta

SEQ ID NO: 44378 - DNA, 397 bp, Zea mays
  unsure (1)..(397): unsure at all n locations
ctatcanatggatgtgaagagcgccttcctcaatggaccaatctaagatgatgtctacgttgagcaacctctcggctttgaagatagtgagtaccctaaccatgtctataaactctctaatgcgctntatgggctcaagcaagccccaagagcatggtatgaatgcctaagagattntcttatcgctaatggcttcaaagtcggaaaagccgatcctactctattcactanaacaattgcaaatgaattgtgtgatgccaaatttatgttgatgatatcatatttgggtctactaacaaatctacttgtgaagaagttagtatgatcatgactcanaaattctagatgtctatgatggcggagctgaaatatctcttangatttcaagtgaagcaac

SEQ ID NO: 44379 - DNA, 453 bp, Zea mays
  unsure (1)..(453): unsure at all n locations
tcgcagatgacctgccatngctntatgtagaatattagttgatgtccatttgcaacanaggttgtgactgtttaggagttacaaaatctagctctcaaggaatggccgaatgggactgcagcaagctagcaatcagattctactttatggttgcagtcgcgcagaaataggttgtagattatgtaggtaactgttaaccttctgctgtcctgcatctattgatggtggtcctgggctctatcagctatgaggagatattctgggttgtgttgtggacggctggacgcgttctgagcaccaatgtgcacaaagtgttttttgttgtaaaatattaagcttttcatgcaccattgcttgtggtcccttttgccagagtacatgccttgctataagagatgaagacctgtatcaatgagaaacactggtgaaattgaatatctgaacccatctcta

SEQ ID NO: 44380 - DNA, 466 bp, Zea mays
  unsure (1)..(466): unsure at all n locations
ctctatcctactctgttcanaatctgtctagtggtagctgatccatttatcgctgtggcctttattttctccccctctggcatcaagcaccacaacgggatcaatcttggccttttaaccccattgcctcaccaaagtcttcaattaagagcaaatggccataagatttcatgagatgaacttggaattagataccctctcatcggagtgcagtggaagtctttcatgggccaagtccaccttttccctttcaatcctccttcgagactaaatcaagcaatctcaagcaaatggttagtctcatagggtcaagttgtaacacatctccccctaaacatgtgcatcactttgcaacggacttgtgaggtccatggagtgttgtgacaacttgagcaccacaataagcaacaaaatgcagaatgaacctgatcaaatgcataaacacatgtatgctacaattcaatcc

SEQ ID NO: 44381 - DNA, 462 bp, Zea mays
  unsure (1)..(462): unsure at all n locations
tgtgaaggttcttcatccctacatgtgctaagcggcgatgcctcagtcagtccatgctagtcttagctattaagcatgcatctagactggcctcttcttttgcaaaatcaactaaataaagtttgccgtctaatacacccttaaaagctagtgaaccatcacttcttctaaagacagacacatctatatttgtaaaaagacaattatatcccatattgcataattgacttacagataataaattatatcccaaagactcaactaaaaacacattagaaattgagtgctcattagaaattgcaattttacctaacccttttaccttgccttgattcccatcaccgaatatgattgaatcttgggaatccttattcttgacgtaggaggtgaacatcttcttctccccccgcatatggtttgtgcatncgctgtcaataatctagcttggaaccccggatgcat

SEQ ID NO: 44382 - DNA, 475 bp, Zea mays
tctaaagggagaacacgttgtgggactaaccaatgctcattctgagaaagacaggttttgtagcgcacgtcaagcagggaagcaagttggtacccatcatccacacaaaaacatcatgacaacggatagaccactagagttactgcacatagatttattctgcccgatagcttacataagcatcggcgggagtaagtactgtcgtgtaattgtggatgattattctcgcttcacttgggtattctttttacaggaaaaatcacaaacccaagagaccttatagggattcttgagacaggctcaaaatgagttccgattaagaataaaaagataagaagcgacaatggaacggagttcaagaactctaaaattgaaggctttcttgaggaggagggcatcaagcatgagatgtattctccctacacacctcaacaaaatggtgtagtggagaggaagaatataactctattggaca

SEQ ID NO: 44383 - DNA, 489 bp, Zea mays
  unsure (1)..(489): unsure at all n locations
tcttcacgcgtcagaggaaaaagtgcatgacgactctactattatcgtgttgcaggnggntacacgtcttatggcaatgaaggcaaagtataacttctcgaataactgctataacgatataatcaatctgattattgatctcatcccatcgaaccataagatgccaaaagacttataccagtctaagaagatcgtgtccggtcttgggatgaagtataagaagattgatgtgtgcgaagataattgcatgttgttctggaaggaatatgaagcggccacccattgtcagatatgtggtaaatcaagatatgcggaggtactaaaagaggatggagctactcttgctacaaaagtaacacgtaaacagcttcgatatatgcccatcacnccaaggcttaaacgtctgtttttaaccccagaaactgcgaagctaatgttgtggcataatgaaggagaccgtgagagccaagaatcagacattatgatgca

SEQ ID NO: 44384 - DNA, 443 bp, Zea mays
ccttgcaagaagaaatgcacagtttgatccaaaacatattcattttcgctgtgctgctcacatagcgaatttggctagaaatgatggcctgcaaccattagatggtcttctaagtaatctttgggacacagccatatattctaagaggtctcctacacgtatgtataaatttgttgaggtttgcaatgagcatgctgttaaagttggaaaaggtctatcccttgatgctaaaacaaggtggaattcatcatatataatgctggacacatgtatggagtatagggatgcatttccgtactatgctgaagtttaccataactatgtgtggcaacctacacatactgattgggataagtatcataagattaggccaattttaggaacaatggctggagcaactactgcattttcaagttcagattatccaactgccaatgtcttct

SEQ ID NO: 44385 - DNA, 417 bp, Zea mays
  unsure (1)..(417): unsure at all n locations
gacactatgaaactcagcttgactaccttngttatcgaatattagtgcgccgctagtttatttctgaactaacacgcaacacataaaaaaacacagggagtgtaaattagacaaacaattgaactaagaatcgttctgaatgaccgttccttaaaaaccatggtacttttccctaaaccatgtatcctcgttcatatttttatttgagaaaatggctgattcctctcgtacttttgctttcttccatgttttttttgaccgggttgttttcttccatgttagcaatgtctgaaatttagcaaggtctgaatgtagtactgtctacggtttagcaaagtctgaatctatcaatgtctgaatgtgtttttatcaagatctgaatgtagcgtggctgaatttttaagacaatccaatgta

SEQ ID NO: 44386 - DNA, 364 bp, Zea mays
tcttgcatctctacgctcgccaagccaagaaatatgcgttatgctcaaccttagaagagcggaagcaaagcaagctcgttaaggctataagatattctctccatatagatgccacactctgacgagttgactaaagaacatgaggagctaaagtgctctcatgttgatttggtccacaggtatgaaactatttcaattgagcaagatatcgctttacattgtatcgctcaattattaaataagaataccttgcttagggaccaagttgaacaactaaaagttgaaaatctagcttttcaagataaatatgatatgcttctatgttctcatgaaaatcttatggatgatcatatcattttgaaca

SEQ ID NO: 44387 - DNA, 512 bp, Zea mays
  unsure (1)..(512): unsure at all n locations
tcggcctcgggaacannattttagtgtttccgaagatgtctgaagacattaagatccctgctgagacgaagctgagtctcgaggaggagaagaatctggggttcctgatagcgatggcagagactaatacagagaaaatcacgaaggagattctcgaaggtttgtccgaagatactaatgacagcgacagctatgatgtggaaagtgatggggaagagaccgaagatcgaccgtggcgaccaagtcactcagtttttgggaaaacaaccatcaagcagagtcacattgaaaatatgagggggcgatacttccgagacatatctattgtgagagctgatgccggngaaaagacttctcccacccctgaagaagatgaagttgtgattttccgaagccttctcaaggctgggcttcgattcccnctgagccaatttgttggtgaggtactgaaaacattccanatctaccttcatcaactcactcccgaagctattataagaatggngattttg

SEQ ID NO: 44388 - DNA, 441 bp, Zea mays
  unsure (1)..(441): unsure at all n locations
agcttggtccttgtattgcttactgtcccgacactgatagcgatcttgatctttgtatccagagggagaatatgacgaactatactaacgcgtacggcgatgcacatcttggcaacgagtgggattcggattgctcttctgtccgactccgacaatgaaagactcgccgccaccgccttcaacaagatatccctctttcccaacgagcgtcacacatgccttatggcaagggagaaaaaggtatgtactcgaaactctacttatgattcttcaagtgaggacgaatctagtgatgaagatgaaatanattactctagcttgctcaacggaatggatataaattaaactgataaaacccatgaattgattgatgcctcgaatgaaaaggataggctcttacaatagcaagaggatttgttatatgatgaacatgataaaatt

SEQ ID NO: 44389 - DNA, 464 bp, Zea mays
  unsure (1)..(464): unsure at all n locations
cggggagaacgcactctagggagtncgctcacaagcacaaggttgaattctctttctccatcacnacccaacggaagggtgacaagaagaagaagatgaataatgtggtctactacgagaccgactcttcgtcaccctccacctccggctcggaatcggcgtccatcacttctaagcgccaagagcgcaagatgtatattaagatacccctacgatatcctcgcattcctaaacatactccattactctcagtcccattaggtaaaccaccggctttcaatggtgaagattatagtagatggagtgaaatgatgaaacttcacctaacctcactccacacaagtatatgagacattggtgaatttagagtacaggtaccatccgtacgggataaagactatgatgcggatgaagtctttctaatccaacacattaattgcctagcgactactatactcctcacc

SEQ ID NO: 44390 - DNA, 450 bp, Zea mays
  unsure (1)..(450): unsure at all n locations
tctatgaacatgcacatgcatgatcaacatcttcgaaactgtgtcgattattttttaagatggaattaatgaagttattatagacgtctcgttgtcgataatagtatcgtttatcactataagcgtaaaaaccgctagatcatgatatattcgcttatagagtgaattgaattttcggagggtcagattangatgtaccggctctttcgctgttgcgtgctgccacttttggttgttcacgctctcacgcaacacatgattaaaaggaaaggcccctctctacggcccacgtatcaacaacaagctctaccatatgcatgacatttgtgctatttagaaccacatcgctggctcacatgagaagacaccagcttaaaaatctattcctcaatgccacactcgccgagcagctagcgtctgcttgttatcccgagcgggggcaataaagtg

SEQ ID NO: 44391 - DNA, 287 bp, Zea mays
ctagatgcatgcttaattgctttgactaacatgggctggctgaggcatcgccgcttaacacatgcggggatgaataaccttcacaagcttctacagggagaacacctgatatgtctaaccactgttactttctaaatagatataccttgtgcagatcgacacgctcgtcaacaagtgggaggaggacatcacaacaataatgtgatgaccacattaagacccctggagctgctacatatggacctctttagacccgccgcctatctaagcataaggggaacgcaaca

SEQ ID NO: 44392 - DNA, 403 bp, Zea mays
  unsure (1)..(403): unsure at all n locations
tcgaaaatgtccgtgactgcaacatacaagagggattagtatggtacagaggcatagaaccgaacagcactcactagcgatgaagcagctgaacatcttctctagcgccagggagaagtcctcgtagctggagtacatcttgatgtccaccttcctgaggtagggcgcgccatccatgctcaccttcacgtacatgggcccagctccggacgacggctcctccgtcggcgccttgctcctggaggcggtcgcgacggcgagggtattcttccggtaattgcgcatgggcggncatccaaccacctgcgctctgcacggattgagagcgcactgcatcggtcaccaccctccgcggggtccagcggcctgcgaagatatcgaggtccggcgggaatagggactc

SEQ ID NO: 44393 - DNA, 501 bp, Zea mays
  unsure (1)..(501): unsure at all n locations
tgtccttctanatacaacatccttcanacctctaaccatgtctttcttcagaatcttcttaagtgtgctcattccaacatgtgcaagccttctatgccatagccatccaagagatgctttggtaaagaggcaagtacttatgttagcatcttcagaatagaaatccactaaatataggttgctatatctaaatcctttgaatatgattgacaattatagtaatcatctgagtaattgttgatggcaattgtagcgacaaatacattntgttacaaactgggcacaccaatgtggaccctgcaacatgaaccaacaagccgatagactaaagtgtgctttacacacataacacaggtggaattataattgaatataggctagattactaaattgacagtttcaattacaaaagtttgaacgaatacagaacacttttggcttctttagtggaaattagacatataatagccagtggtacttttccaaagatacaacaacgtc

SEQ ID NO: 44394 - DNA, 457 bp, Zea mays
  unsure (1)..(457): unsure at all n locations
tgagaaatatntagataccgcccgcaggattgaatctttcttttaatgcgttactgacaaaaatatccctcgaggagataatgaacatgctgatatgctagccaactcaacaacataggggctgcccttacctttggaagtattttttgaaacaataaaagcaccttctgttgaacttcttgaaagagcagtcctcaatatttctcctgttcatagtgaagatgggagaactgagatcatttctgtccttcaaggtaatttcctttcagatgacaaagcgtataacaagagaatagaggcaagggctccaccatatattataatagaaggggaaatgtacaagcatggagtctgttctccactactcaaatgtttatgcagagccgaaggtatagaattgatgaaagaaatacacctacgtctgtgtggatctcacatatgatctaagccattgctg

SEQ ID NO: 44395 - DNA, 484 bp, Zea mays
ctcaagcttgtcaatatctgacattgtaaccactagctactcagcttcttgcttccgggtatcttcagcaaccgcatgaaatgctacttttgtcgctgaagccgaacgcagtgttcgctcaaaggcttgcaagacgttcacaattcatcgattcttctgcccttcagtcctctcttctgtaaccgaaggcgtatcactcctctgttaaagttctgtcacgtccaatcccacatgacttatcacccttgaaggcggagaatcggtcattaccttcgaaactctaatcactcccgcagtaatcggcgacggatgggttatctctactgctctatccactcttagctcaatacaacgtgctaggacaagatttcgcttctaaacaatagtgccatggcactatcactgttatcgtttcttaaaggttaccatctcttcattgacggggtcttgctgcttgaagctaaaccctttgtttacacctcgc

SEQ ID NO: 44396 - DNA, 406 bp, Zea mays
tcttcatgcgaatctcaattatatgacccagacgacagtgtctcatgtatgtcggacttaaatcattaggctgaggcctttcagcactaatattacagataggtgcatcatctagatttaaaatgaataacccattcataatggatgcaaaagccacaaacatgccattcttagagatcacacaaccattgtttttactcgcatatgaataaccatccttcatcaaacatgaaggagacataatgtttcgactcatactatgaactagataacaattatttaactgcaaaataaatcctgatgggaggtggagttgcatcgtaccgacggtcaacgcaccaactcttgcattattggctacccggaaatcaaattctcctctattcatgcttctacttcttatcat

SEQ ID NO: 44397 - DNA, 431 bp, Zea mays
ctattacggacctatgatactcagcttataggattcttcatcccaacatgtgctagttggcgatgccttagccagcccatgttagttttagcaattaagcaagtgtctaggtcagctctatcacaattcactaagtatagctgaccctctaacactcccttaaatgctattgaatcatcacttcttctaaagacagtgacacctacatcagtgaatagacagttgtagcccattttgcataattgagatacagaaagcaaattgtaatctaaagaatctacaagaaaaacattggaaatggaatggtcaggagatatatgctatttaccaagacctttgaccaaaccttgatttccatccccgaatgtaatagctcgttagggatcttggtttttctcgtaggaggagaacatcttcttctcccctgtcat

SEQ ID NO: 44398 - DNA, 459 bp, Zea mays
  unsure (1)..(459): unsure at all n locations
tctctagcaccatcattggtaaaaaataggagaacccatcatctaactgctgggactaaaaggataaaaaatcaaggatgggagagtatgatactcaccttcagtcaaggaccccaacacgaatgcacctacacgacatcctgatgacagcgtctccacgagatctggctgggccattggtaggccgttattcgtgttgaccacaagatgcttaagccatgccgattgaccgaacgcggaccctgctgccacaaccccctctacggtgggacttcgaacggcggcgtaagtcccatgcctcctcaaatgactgagccaaattngaactattgatgcctacgctcggngaaaataaaacactcccccaatcgccacggngcagttgcgcacctcagacgtgtgcatggaccgtccctgttcttcgaaggtgatccaccccgacggcgaggatgctgtgtc

SEQ ID NO: 44399 - DNA, 471 bp, Zea mays
  unsure (1)..(471): unsure at all n locations
tctcatcatttcagacagtttcagaggtgcagactattactgtcctattcagttggatatttcaggtttctatttgcatctttagttgatgtcagtagcctaatatcgaatactatacttctatattactccctctgatattttatttatttgatgtttgttagtgtaaagttgtactttccagcgtcaaataatgttccaatctcctaatgcaagaaggtcgctgccctttcttcaggaggcagaaggagatgaagacgagtgagattgagaggatcaaggaaatgttgctgtctaggaaatgctgcctttnttagagaaaactagatgagtgtcggtttatacgaatcaccaagttggctttcgtgttgagtgtgcttaataaagattgtngcccctgtttctaagacagcgacattcttagatataaaacacactatgtcactgcacacttttatttcattgagcaca

SEQ ID NO: 44400 - DNA, 441 bp, Zea mays
  unsure (1)..(441): unsure at all n locations
tttggcaaggagtcgctttanaggctagcattcctgacgactaagttttgtgctctgctgatgacactgaactggttcccactggttcattgcaagttgctccggatggtgatcctacgccaagccatcaattgatttctcacgatttgggagtcccctcattcttctccaacctccaggtactatggtctattctagtctgacttttacaccggatgaactgctgtcattacactcatctgctctcaatatcaagcattggtggatgggatggctagtcagctgaagttgcaaggtgcttctgttctataaagagcttcgtctctggcacgttggaatctggtgctgcttcaacaacgcggttctgacttataagcggagaatgctggttagtgcttttctgcttcctcttcgctatcttaataaactgcgtcttaatct

SEQ ID NO: 44401 - DNA, 453 bp, Zea mays
  unsure (1)..(453): unsure at all n locations
ncggaagaggttcgtcatcttgctcaagatgaccagaactgattgcctccgcgcatatagcttcatcaggagggcttctacaatgaggacgactggtatgaagacttccgtcatggaaattttgcttttgatgatgcttctcctctatcaacaaaattgcaggctacaccatggccccagtcttacaagccaccccagctccccatgtacgacggtcattcagacccgaagcaattcttgatgagctatgaagcaaccatatcttcttatggtggcaatactgcagtcatggcaaagtcttttgtcatggccatcaagagtgtcgctcaaacctggtactcctctcttcggccaaggacaatcacctcatgtgagaagctgaaggatatgttgataactatcttccacaggntcagacgaagccaggtactgctcaagctctattctagtgta

SEQ ID NO: 44402 - DNA, 488 bp, Zea mays
  unsure (1)..(488): unsure at all n locations
tgcacttacnaccaaaccgcacccacatccatatatcattctttggctcaacaatagtggtaaggtcaaggaagccaaactggtactaactacttntgctattgagccatatcctgatgctgctgaccgagatgttgtgcatatggatgcttgtaatattctgctaggcataccatggccatttgattcagattgcatgcattacggtagatcaaatcaatattctctcatataccatgataagaaaattatctcgcttgccatgtcccctgaggctattgtgcgtcatgatgttgctatagcttccaccactaaaactgataacaacaccaatattaaagttgttggtaataacacacatgggataaaattgcaaggacattgcttgcatgcgacaaaaactgatgctatgaattattgcttccactactgtggctacgcctgtatccatgtgcttgattcaatcagattgcaccatcttgctctgt

SEQ ID NO: 44403 - DNA, 488 bp, Zea mays
  unsure (1)..(488): unsure at all n locations
ntgaaagacaaccaaagattacttgcagaggttctaaattgctatgagaagagatgggaaacccaaattgagcanaaattgtatggggctgcacagttcttgaatccagggaagttttttgccataagggacaaagacagaagacaagctgcaaggctaagatccatgtttaatgattgtatgtggaagatgggtgccaatgataatgaacaaacgatgattagtaagcaagctgacgactatgataggtctgaaggagagtgcttctcacagcaaggagcaataagagacagagacaaaacaatcctagtaagttttttgtctctctattttcttttctacatgaaattgtatattcatattagttngcaattgtagttctttggtggggttcgtatggtggcctagcatatgagctataatgtatagcacaaagaattattagtctnttgtggttaacatctgggtgtgagcgtaattggagtgta

SEQ ID NO: 44404 - DNA, 491 bp, Zea mays
  unsure (1)..(491): unsure at all n locations
ctgccaattcttgtcanagcaacaacatttaccggctaagcagttgcagaccatccctataacatggccatttgcatgctgtgggctggacatgatcggatccttcaagaaagcccagggaggctatactcacgtgctggttgccattgacaagttcaccaaatgaatagagtacaagcccattgcctctttaacctcagccaaggcagtggagttcatacaagacataatattcaggtttgggataccaaatagcatcataactgacctaggatccaatttcactagctntgaatccttcaatttctgcgaacaacagagtatccagatcaagtacacatcagtagcgcatccaagagccaatggtcaggtggaaagagccaatggaatgatactggaagcgctcacgaagaaagtgttcaacaaaaatgaaaagcttgcaggaaagtggatcagaaagctgccatatgtggtttggagcttgagaactc

SEQ ID NO: 44405 - DNA, 488 bp, Zea mays
  unsure (1)..(488): unsure at all n locations
ntctagaaagtcctagtttactatttgtggttaaatatcttgtgagctatgactgaaacaagtgactgctgtattgctgtccaaaaaatctgctaatgcgcttttgattgtttagttcacccttgtcgctaanaatatttggtttgctcttaaggaatgtagacttgccatggntaagctagagatgatatgtgtggcctgttttatatgttcctttctctagtgatcgcgatataggagttccgtaaatattgatgcccttgtcctctgttagactcgtgtntgggatgcttttgtgtgatcactagaagaactaaggaaaagccgtgacgaacttatagacttaactaatataacgttaggtaactaatggatagttaagtgaacgtggtaaatggttgtgctcgtgatatcgtatttgtgttgcgtaaatataagaaatatttgtcggcttttaaggatgttagtattgaacgccgattacgtgt

SEQ ID NO: 44406 - DNA, 459 bp, Zea mays
  unsure (1)..(459): unsure at all n locations
ggcanataacatcactacacagcaggggaagacgttgaaagatgctttgggtgacgtgttctggagcctatgttacttcccagattattgaaagcacacactttgttttcttatctggatagacaactagagtaattatcttaaagtttctgtatcgcccaaaagaaaatttcaatcatcactttaattcagaccttagttntgcaacaataggcacataaactgtgctttctcatatatgctcatacattattgtgtagctctacatgtggtctcatgatctccatatatagattccatgagatgtcaatattactgatgaattatttattttagcccccaatactctgctcatatgctccaaatgtttacctttttgtgatagaactctttcttatgtcgatcaaatattgtaccactctggttgtgaactccatatcatacacacgtggagcatgc

SEQ ID NO: 44407 - DNA, 413 bp, Zea mays
  unsure (1)..(413): unsure at all n locations
ntagagacatatgaattatctgtgtaatagatattgtaatttataaatcaaacattactttataaatttgtcgataccttgtaatataattttaccttttcatccgtggatgaattgctttgatgtggacgaaacttgtatcttttgagccgaaggcgaaaaacaccttcccttctttcgtacacaacgaagcatatctttgcgtttttatactcatcgaagcatagttaacaaatccgaagcatctgtttgtactccatgttatgatgatgatcctacgaatgtctacatgaatgtgtatgaatgcaatgaatgatngtatgtaatgtgcaaatgaatgccaaatacacacacgaagccacactcagactctgcatccncttaggaacgtcttttgagtcttaagctctgca

SEQ ID NO: 44408 - DNA, 452 bp, Zea mays
  unsure (1)..(452): unsure at all n locations
ntccatgttgtgcttgaacattccaatccgagcccgcatctgaccgtggtgaccgtcacaagttggtgttcttctgcagtccgaatccagcatgttcaaatccttttccatttcggtcttctccctggttcctgatggttgagttgacgagcacgagcacgagtaatgggaccagaaattggtacttgtattggcatagatgtatcagtagtgtggatgtcttcatcaaagcacgagttttcgccaccggaaccattgcttcgtttttcgcaacgaacatgctcaatccactactttaggtccaaaactcatgtttggngtggtttcgcgcaatttcgttgtcgtacgtcacccattcccaaaacgggtgtcggggtgcatacaaagcatgagttttngccatcggaagcaattcttcatttttcgcaacgaacatgcccaatccactactt

SEQ ID NO: 44409 - DNA, 506 bp, Zea mays
  unsure (1)..(506): unsure at all n locations
tgagcattattacttaatggtcatgtgttgtccgaaggacacacttgaggtcatcatatagatgcaccanagaaccatataaagccttcaatgtccatacaatctctgtaatggaccacactcgttcctttgaaacaattcaaagaacttaaccaattcagatcagattttaagataagagggacttaaaatctcatttccgatgatactcaagtatccatcttatgggaaaaacatgaccaatagaattgttcataacttttcatttcatcccaacaatgggatgaccaattcaatcttacccagcatggtaagtatcatcacttgaaaagttataacatatgcaacactctgtatgggaggatgtatgtagaatacagtccataagaaatgtttctgagaaacatatgcaatatccatcactatcaccttgtgtttccacatgatagaaattatatggatatctctacaatatggtaagataacaattaggatacatcaacaca

SEQ ID NO: 44410 - DNA, 427 bp, Zea mays
  unsure (1)..(427): unsure at all n locations
tctaatataactctacatatttagcctcagtttcagccagcatgccttctgtcgattggagctcgaagcctgtctcttcaatgatggcagtatgctcttttattttgctttccaagtcttcaattatagcttcgtgctttttgtcctccaagtcttgttgcatcttcagagctttgctcactagcatgctctgaacagaaacaacttatgttaagtaatatnttcattgttaacggcgataaaaaccagagaaaaaggttgtttacctctgaagtagaataaaacaatctgccgacgatatgttgtcgtcggtagcggctgatgtctgtctctagcttctgaaaaccgatactcttcgatagagtaccgattaccttaactccagtctgggctcgaatacaagctacttattcatcatacacacccc

SEQ ID NO: 44411 - DNA, 444 bp, Zea mays
  unsure (1)..(444): unsure at all n locations
atggttcttgaggagcctgcggtgcatgagcatctacggttctagtcgcaccttcgaacgtcaaaacatgttatgctgcatagctggatttcagctgcacaaataatatcgctgactacgaagcacttttattagggcttctaaaactaatggcaatggtaataataagggccatcctanagactgattctcaagttattgctggccatgtagataaaagcagcgaggctcgagatccgaagcttgatacatatatggatgctattcgaatgctggagacttgcttcgaatgatttttcgtcaagaatattccaagaggtcaaaatgagcatgcacatttgctagccacaccagtggctcaggngctcccactaccctctgaagtattcttagaaacaattatagcacctctcagtgagctcatggagagagcagagcttacta

SEQ ID NO: 44412 - DNA, 369 bp, Zea mays
ttatttctggtcatattgaccagagttgctaagcaagagacctgaaacttgagaaatatttagacacggtccgaaggagtgaggcttcttttgaagggttttctgtccaaaatatttctcgaggagaaaatgaacatgctgatttgctagcctagtcagcagcacatgggctacccttaccttcggaagtatttttcgaaacgataaaagcaccttcggttgaacttcttgaaagagcagacctcaatatatcttctgtgtatagtgaagactggagaactgagatcatctctttccttcacggtaaccttcttttagatgacaaaccttataatacgaggatagaggcaagagctcgaccatatgtta

SEQ ID NO: 44413 - DNA, 451 bp, Zea mays
tgagcggtaaccggcttcgtttggaacccttggaatctggttatcagcatatccttcagcttctgccatgatgtgattgttcctggccgaatggaggagtaccaaggttgtgcaacattcctgacagccatgacgaaagacttcgccatgactacagtattgccaccgtacgaagatattgttgcttcgtaactcatcagaaactgctttgggtctgaatggtcagcgcacatggtgagtagaggtggcttgttagacagtggccaaggtgtatcctgcaattctgctgatagaggagaagcatcatcaaatgcacaatttccatgatggaaattctcataccagtcatcttcgttgaagaagccctcttgatgaagctctctatgctgaggccttcgggtctgctcattttgagtaagatggcgaacttcttcagaggcttcgtctatct

SEQ ID NO: 44414 - DNA, 333 bp, Zea mays
ttgcaccggaagaattttatttgagccacctggtttcgccgccgcggcgggaatgttgagctatctccattggagacctcttccctactcaagaggttgtgggatagcgctcactctgatgctatgcacttttgtgataacattaggtttttcaagaggccatttgtatttcacttccctatactgatgtctcgatagtatgacaactaatgtcaggggttatggtatatactcgtttttagctcagggcaatatgttccataatatcatgttactcggtacggaacgtggggcagatcataaacaccttgagctgtacttttacgatgacga

SEQ ID NO: 44415 - DNA, 419 bp, Zea mays
ttctcgcaaaacattcctcgaggataaaatgaacatgctgatttgctagccaagtcagcagcacagggggtgcctttaccttctaaagtattatttgaaacaataaaagcaccttcggttgaacttcttgaaagagcagacctcaatatatctcctgttcatagtgaagattggagaactgagatcatttctttccttcagggtaatttcctttcagatgacgaagcttatatcaagagaatagaggcaagagctcgaccatatgttataatagaaggggagctgtacaagcatggagtctgttcttcactactcatatgttatccagagccgaacgtgtgaattgatgaaggaatacatcacgcctgtgtggattcacattgatctatgccttgctggaaaagttttgtcatgattta

SEQ ID NO: 44416 - DNA, 500 bp, Zea mays
  unsure (1)..(500): unsure at all n locations
tatgttntcttctaggataacatacaggattggtattgcctttatacattctagnggacacattacaaaggttntacgataaccttaattcacctcattctttttcttttcattaattcccatttacggtttctggggtaagtttgaactacaacagggttttaataatttccaaaaattctgtaaaaattccagtgggctatcactggccattctagcttgttttaagaatttgaggcttaaagtataaaagttaggctctaaacaaaaataacaaaagttaggcaaaatgggccacttcacactacacctcttagttaggggtaagttctgtcctaaaggttatatttgttggcatcctctggtaataataggtctctgtgctaaaaatcacagaaaactaaggcgtggttatttagttatgatattcttaagttaaatgtcagaaaggctccttctactaccttattattngataaatgtcaaacagcagatctcct

SEQ ID NO: 44417 - DNA, 482 bp, Zea mays
  unsure (1)..(482): unsure at all n locations
ngaacgacgtgaggtattccaagttcggcaagcggcttcggtctttctcgactggttcgaccacgccattaccttcgatcgcttcgaccatcccgagcacatccnctggtctagacgatacctgcttattgtcaatcccatcatcggatcggtgtgactatcaaaagtgctaatgcattgcggcagtgggctcaatattctctaccctaccacgcttgacaccatgggcctagatcgggatcacctccaaccgaccgagggacctttctatggcatcaagtcaaggaggcaagcgatctcgctcaggcaaatcgatatgcatgtaacctttaggacactagccaatttcaggaccgagacattaaccttcatagtagntgggttctaatggacctatcacgccatccttgggagtccatgctatgtaatagtcatggtcatacncaactacacttacctgaagcttataatgtgagttcatg

SEQ ID NO: 44418 - DNA, 380 bp, Zea mays
  unsure (1)..(380): unsure at all n locations
tgaagaccttcccaacccagggcctggatgctgcatgtattccgcactatgccgcgtggatctcatataacagatggtttgcagtaaccgaaagaatgcacttcatgaggactcctcgtgcaccccttcggtatagtgcattcccaatgatggtgtaaagggctgactgccttgaaatgcgttctgttgtagctttgtcatccgggtcctcttcattctttatatatctgatgatgagctccctgcagccattatagtctgactctggttggctcataatgttgcactcttctgttcgatctgaggaaatgcttgggcgtggtacctcttggacgaaaactctatgtggaacctgngtccgactggatcctacttttgac

SEQ ID NO: 44419 - DNA, 434 bp, Zea mays
  unsure (1)..(434): unsure at all n locations
tctggataagtattattacgaacatatgactntatctttccttattacctacaacacaaacaaaataactaaattattagaatgaacaaccaaactatttggataacgaatattggtaccatagctcattaatacctctcaatataatacatccatcgataattgactggtccaacaatcttacattcagccaccagatgaactattaaatgaaccatcaccgtgaataaaccaggaggaagaaccatctccattttgcatagagtaataataatagattttttcaaatggtccaactcatcgacacggagaacatttgaacatatccctcgaanaaatgcagacaactcacacagtagtgctgtaatatcatctggaagacntcccctggaagcaataggcataagttgtggcatcatgacatgacaatcatg

SEQ ID NO: 44420 - DNA, 442 bp, Zea mays
  unsure (1)..(442): unsure at all n locations
tcatgataacgagggttacattctatatactgccagttatcccgagcacaaaattaggagaattcattctaggaagtctcactctggctctcatcatgcgtttatatataagagtgaggcatctagctctaggcaatcaacccatgttaaattgcctaaaaagaaatctcctatagcatcaaatgaacctaacatttcatttaagacttttgatgcttcttatgtgctcactaacaaatcatgcaaagtagttaccaaatatgttgggggcaaacacaaggggtcaaagacttgtgtttgggtacccaaggtgcttgtttctaatgtcaaaggacccaagaccgtttgggtacctaagaacaaggcctagaattattttgaggtttatgcattccggggctcanngtggatcatcgatagcgggtgcacaaaccacatgaca

SEQ ID NO: 44421 - DNA, 370 bp, Zea mays
cacggaacgttgactacgacaatttaatttataaccttggcacttgcaagcagaacaagggaggagccatccagcaggatgtgagaccactctagactcggagctgtgcattggcctcttggaccgtccctatctggcattgaggaggaagttggctagtattgcgatgattttccgcttacttggtgtcttttgcagatatgctgactcatggacctcagcgttctaagaagctcaaatggttgactaagggaaaaataaaacgacagggtcgatcaaaaccttatgagagtcttgggagagggacagacgagtttcgtcctccactaaaaagtgggtgaagaaacagacctcatgttggaggcttgct

SEQ ID NO: 44422 - DNA, 481 bp, Zea mays
  unsure (1)..(481): unsure at all n locations
ttaagctctntgccaatanaattacttcactcagttgtaacatagatgctagaatgtatgttcgagaagttaaactaggtatgaagcaaggctaatgcatgaacatgctttctcttcctttttatacaagatatgcacagatagtatggaaaaagggagatctatgtacaagttagaatgaaaggaaggtgttttacccttttgtaccttcacatagagacgctctcttcattgtgcgttgtacttagtcttagatgcttaagacctatacttaagacaatatatgaaaatattttgcacaagagagagttctacaattagtgatcattttctaagcattgttattatatatcaagtagatcacacatggcataaatatatcatgaattcttctttaacttagtgccatcaagagagatatgattgaaatatgaagactaagaacataagtgtttattgaggtattcatgatcaacaaact

SEQ ID NO: 44423 - DNA, 488 bp, Zea mays
tggcttcgctgctgatccactcaattgggccctcaggatcgctctcttatgaatatgtcctcgcttgaatatgcgccaacgttggcgaagctagtttttatatttttcacgtagtccatagatttttcaaagcatctttccttggatatgcgaagttcttcaacgtttttctctaaatgatttgtccattgttcgctaattcctcgtttagcttctgcgactgcgcacttctctttatcttcggctagttgctttcgaaggtcttcaatctcaattttttgggcttcagattgggttttgaagttagcttcgtccctctttactttgtccaccaatgtaagcagaattttgtctttctccaaagcttcgttcctcagcttaataacctctgttcgaaggctattgagagcaatagtgcgaccttcgtctttggcattctttagcgcccttaaggcgttgctaatattaagccctacacgatattatga

SEQ ID NO: 44424 - DNA, 197 bp, Zea mays
cgcacgcacacagcacaccatgagtttgtgttggtggtaggtttacaagcacatgccctgaactagactatacatgactattgtttatgctagtcttggatctatgctaatatcctaatacacgctgctgttgggcactgggctcattattctctacgatacgactctcgactctctgggcctacatagggaacagc

SEQ ID NO: 44425 - DNA, 481 bp, Zea mays
ctcaagcgtcagctatggttaaatatctggcagcaagacagtgctatatcattgaatcgtgcggcaacttcacacctacccgtctgtttatatagcgctgcatgcaacaaggtgaatcgtcaagtcttctacaccggacaaacagtctctcgcacccactgaacggtgggccacataacccgagaaggtgaacctgcatggtgggaccgcttcgcgctcggaaattgtatctttcctgcaacgagctcagggaaggtgtttttcaaaccttccgcttcccgaagcctaatagacgtttatcacggatcaagctcgttacgaaaaacgatctaacaccgtgaaagggctactgctgggaccatgcttcttcgccgaaggttctgcaggaagaaacaccttcgacacaacttgtctatgcgtgataccgaagctaccgctcaagaagcttccatattatagcgtatactaagatgaatgatcg

SEQ ID NO: 44426 - DNA, 464 bp, Zea mays
  unsure (1)..(464): unsure at all n locations
cgcccatcatcaagagcatctcttttatcctctatccaggagggggaaagattacaagccccgcctccacgaaagattgctacaagtgtggtaagcccggtcactntatagcaaaatgtcctatttctagtgatagtgacacgagcgacgactagaatgggagaagaaaggagataaagaaatactactcgaagaagggcggtgatgcccatgtttgccgggaatgggactccgacgagagctccaccgactcctcctccgacgaggacgccgcaaatgtcgtcgcaccaaaggtcttctcttacccaacgtctggcacaagtgcctcatggctaaggataccataatgaagaaggtaaaatcaagatccttcccaaaatgagacctctacgatgacgaaatgctaccatgaggagatacctaccattcttttgcaactaacatgcacaaaggaaatcaatgat

SEQ ID NO: 44427 - DNA, 491 bp, Zea mays
  unsure (1)..(491): unsure at all n locations
taccctggtccatntccagggcatgtggctagttatgatagttcttgatcaacaggcctacatacgcatccaatccttaattaacctaggcggagcatcacctgttcctagcccaagtcccaatttaagtacttccatccttaggagtgtttgtgttccttaggatgaaaagagcattatagggaaccttgcagtaagatcccaccatgcttccaatgaaaatattcttgcaggtagaaatcatccttcctcaggataaacctgagctaggcataagtgcaaatgtcaaactctatctgcttataagcagggctaagcattttttgtaaattatattntgatacttcaccagaagtatctataaaaggaatggatttcaaggtagccaatgcatcaaagggttccaagcaacttctaataacctaatgcacattcactagacttatagtgtgtagaataattttaaacataaggaaggcgttgatgcaccg

SEQ ID NO: 44428 - DNA, 475 bp, Zea mays
  unsure (1)..(475): unsure at all n locations
cactctagaannactaagctcggccagatgaatcctttgtctagaagagcgtgtaattgtgtcttgagctctgccaaaacattaggaggcattcggtacgaccttctataaataagagccgcaccgggcttcaactcaatcacaaatgctacatctttgtctggaggcaatctgggcaaatgttctagatagacatctggaaactcacatactaccggaatatattggatctctgggatgctagcttcatatactctgccaatcggcttaactggaatggctaccgagatggtcaagagaacctcttcttggccgtaactcaacttgacagttctcaaattattgttgagaatatctttatgttgggccaaccaattcatgcccagaattacatctatatcttggcctttcagaacaatcatattactaagagagacctgttcattcaatgtacgggcacttggaaagccacttc

SEQ ID NO: 44429 - DNA, 439 bp, Zea mays
  unsure (1)..(439): unsure at all n locations
tataaagggagaacacactttgcgactaacgaatgttcattttgagaaagacagggtntgtagcgcatgccaagcangaaagcaagttggcgcccatcatccacacaagaacatcatgacgactgataggccactcgagctacttcaatagatttattcggcccgatagcttacataagcaatggcgggagtaagtactgtctagttattatggattattattctcgcttcacttgggtgttctttttgcaggaaaaatcacagacccaagataccttataaggaattttgagatgggctcaaaatgagtttggattaaggatcaaaaagataagaagcgataatgggacgaagttcaagaattctcacattgaaggttgtcttgaggacgaaggcatcaagcatgagttctcttctccctacacacctcaacataatg

SEQ ID NO: 44430 - DNA, 491 bp, Zea mays
  unsure (1)..(491): unsure at all n locations
tagcacgttgcaatgaacctgtgtagcatgcctgtccatcgttcgagaacttgccccggtgaaagccacgaatttgcttgtgctagtaacttcttccttctctggccgccaccgcgctatctctaattcacgggccaccgcccctggatcctataaattgagtgtgatgtcggctccgctaggtagtcaagcacccaatacatcaactcgtgcctcaaatcgtccaccatagctcgccaatttgagattntccccacatcagtcccgagcaccgtactgagtgacctcgccgtggccagtgcattacaggtccgttcatgccttcggtttccttgtttcagtacccttatttgctcttaatactccctgacccatccaattaagctaagacccataagatcaccgagaacactttgagttgtcctcggattgcgcggtcaccgtggacagagtaattatgcgttagaatcttgtaattgagtgatgggaaa

SEQ ID NO: 44431 - DNA, 517 bp, Zea mays
  unsure (1)..(517): unsure at all n locations
ctcacgcttctaagggagagcacattntanggataacaaacgttcatcttgagatatacaggtattgtagcgcatgccaggcggagacagcagttggagtccatcatccacacaagaacatcatgacgaccgacaggccgcttgagctactccacatggatctattcggcccgattgcttacataagcatcggcgggagtaagtattgtcttgctattgtggatgattattctcgcttcacttgggtattctttgtacaggataaatcttacacccaagagaccttatagggattcttgagacgagctcaaaatgagttcggcttaaggatcaagataataagaagcgacaacgggacggagttcaagaactctcatattgaaggcttccttgaggaggagggcatcaagcatgagttctcctctcactacacgccacaacaaaatggtgtagtggagaggaagaatcgaactctattggacatggcaagaaccatgcttgatgagtacaagacacg

SEQ ID NO: 44432 - DNA, 402 bp, Zea mays
  unsure (1)..(402): unsure at all n locations
gctntcctgcttacaccttcggcgcctgatcaaccttcgtattactctggtctgctgtgaagccgacttggatccgaagatacctgttcacacattatactccacaaatactgataaatcctgtttttgaggaccttcggaggccgaacgtccccaacagtagcccctcgcaatattaattcgcttaaagtaataaatttaaattgcgacatggacgaaggcttttctccgatagtccgaaaaaacaccttccctttgctataatatcaacattcactgacaagcggngtctttcaattatcaacgcccttggcgtatatatacggtcataccacagactcatttgatacgctttatggcccactgctcccgctcactcganntttagctcttgtgcattac

SEQ ID NO: 44433 - DNA, 376 bp, Zea mays
gccctcggacccggccggacttcaccggaggcccgatatcgacctcaccggacttggtcttccgccgccgcgcgtggaccttgctatctagtgagtctccgaccgattccttgcacccatatcttctctggcatcccgtgaacctctctgacccatccaattgctctatctcaccgtgaccaggccggactcctcgccgccgacgagcatccccgcctgcgcgcgtggaccgaccgactccggccatctcctacggcgacccgcacaccgttgtgatccccgagacctcccctacgtcctcgaccactttaccggagcaatgtcaccgccggtaagcccctccgccctttcttccgccgcggttactgtttgagat

SEQ ID NO: 44434 - DNA, 483 bp, Zea mays
tttgttgcataaaatgggagccagtctgagaatatcacacggtttaggaatcctggagacacaccattcaagctacgcctatcatgatatataaaaccgtaaacccacaggccgtgctagattaaacattatcttattccttggtgcacagatcaaaattaaggtggtggaagatcaccgtgggcattcgggttaacccgaaaattcggatcaggcttttcgggcttttataatattggatatccaaaaccattatccgaatatatggttcatagactatatacccgatatttcgggtatccgaaattttcgggtttggatttgggtagcccgttctatccaatttatcagacttcctcagacgttcaagctgcaacccacttacccacacgaccacaggggatgttggcgtcttggcgaatggaggatgcagtgatgcaccatattgagtggtggcggtgtggatgatgactgggagaatct

SEQ ID NO: 44435 - DNA, 347 bp, Zea mays
  unsure (1)..(347): unsure at all n locations
gaagaggccggtctagatgtatgcttttttgctaagactagcatgggctggctgtggcatcgccgcttancacatgtggggatgaagaaccttcacaagcttcttaagggagaacacgtgatttgtctaaccaatggtactttccaaaaagatataccttgtgcagcttgtcaggcaggtaaacaagtgggaggagtacatctcatcaagaatgtgatgaccacatcaagacccctggagctgctacatatggacctcttctgacccgtcgcctatctaagcatatggggaagtaagtatggttgagctattggtgatgactcttcccgcttcacttggcgattctt

SEQ ID NO: 44436 - DNA, 347 bp, Zea mays
  unsure (1)..(347): unsure at all n locations
ncgcaactatgaactaactcggctgcaacaatctttgtcgttttncaatataatcctgacctgaagaccttcgcgactaatgttctggatgctgcgtgtatcccacattgccctgcatggacttcctccagaagtagctcttccgtggacgggagaacgcacttcatgatgacgcctgacgcacccctccggtataatacctcccccatgagtgtatagtgagccgactgtctggcaacgcgctctgctgagtacttgcagccggctcttcatcactctttatgtacttaatgatcggcctgctccagtcataaaagtctgaccacggttgatctatgatgccgcac

SEQ ID NO: 44437 - DNA, 471 bp, Zea mays
  unsure (1)..(471): unsure at all n locations
cgacattgtctncctgtnggaagccaacgccattcttaatgtcattgcgtctcccactataaagcatgcttctagcaaatgtaaatttttcattgtctaagtcatgctcattaatcttagaactaagttgagctatgtgatcattttgttgtttaattaaggccaagtgatcatgaatagcatcaacattaatatctctacatctagtgcaaatagtaacatgctcaatggtagatgtacagggtttgcanacatctagctcatcaatcttatcatgtaaaatagcattctcattcttatgattggaaatagaaatattgcacacatctaaatctctatccttagcaattaattgttcattctcaattataaagctagagagagatgtattccatctgtcaatcttattaatcaaactatcattatcatttctaagactaacaattgaatcatcacaaatatctaacttct

SEQ ID NO: 44438 - DNA, 395 bp, Zea mays
cgccaatactttgtatagcaacaacatatgcctgcacagcatctgtaaaccataccagtaacctggcctttctcatgctgtggactggatatgattggacctttcatgacagctcaaggcggatatactcatgtactggtggcgattgacaaattcactaaatggatagagttcaagcccattgcttctttaacctctgctaaggccgtggaattcatacaggatataatattcagattcgggataccaaacagcatcatcactgacttatgatccaacttcaccagctcagaactctttgacttctgcgagcaaaaaagcattcagatcatgtacgcatctgtagcacattcaagaaccaacgggcaggttgagcgagccaacggaatgatact

SEQ ID NO: 44439 - DNA, 415 bp, Zea mays
  unsure (1)..(415): unsure at all n locations
tactcagcttcgaggaccctgtgactcgattggcggtgcagatcattgcttgccagtnaaacccttgtcggatcaccttagcagccaaggcccttggccccgcgtgcgagccgcaagttccactgtggacctcgcgcaagatttggatgccttctgtctcggtgacgcatttaagcattggctgactgacccccttcttgtataattggccctcgattggtgcgaagtcccggcttcgatgttcgaggcgcttcgcctcactgacagtcggtgggtgatagtatccctgtaaaaacacggttattgtggcccgccagtcttcggtcatgattatgtggactatacggcggccctccctatcatttgttatttggagcccttcngtgctccggacggctggcgtgccgatggtgtg

SEQ ID NO: 44440 - DNA, 486 bp, Zea mays
  unsure (1)..(486): unsure at all n locations
tgtggcanaagctagttacgtcgtgctgatgccagaacaggctatatgcctcaacataatatggacgtacgccaccaaaatgttaccgccacttgttggagagcttggctccaaaaggattactcccaggagttgcgggtgaatgagttgctggcgaatcacgtgatgtctgtgagaacagaaaagacagcacgcaaattatgtatagataatatcatgaaagaaatcaccctttctctatcagccagcgatgcttcaacctgcttgttcttggacatctatctcaagacagccacaacctactacactacggtctggaattcttcgtagattgcagcatgaggtacctgtgaacaaacatttcagattcatgatgctaacatatagtgtcatacacgcgcatcaagaatcaagtgtcatatactgaatataatattaaatgatagaattacaggtgcagtgcagttttctaaacctggactttat

SEQ ID NO: 44441 - DNA, 425 bp, Zea mays
cgagcacaatgaatgagcttcggttaggcaatgcagtaagcaagcttctgttatggtcacattatggcagcaaaatacagcactagcaatgaatgctgtggtaacttcacacctacccgtctgtttatataatgccgcacgtgggaaggtaaatcgtcaagtcttccgcaccggacaaacagtcgcccgcgcccactgaacagtgggccacatagcccgagaaggtgaatcactaagacacgagtaactgctgtatggtggggctacctcgcgctcggattattctaatcgtttctcggcaacgatcttaaggaaggagattcttggatcttcagcatcctcaagcctcagagactttttcacggatcaagctcgttacgagaaacgatctagcaccacgaaagggctactgatcggggtatgct

SEQ ID NO: 44442 - DNA, 355 bp, Zea mays
  unsure (1)..(355): unsure at all n locations
ctaagctgcaataccnaacatgataaaaatagactacgacaaagcttattgtcaaccctgttacttcatatcttaaatgcctttcgggtaccatcacatacatgaataaaaattatgcaatatctattacatgataccttccgtatatgcgaagagtgtctgaaagtgagtacaatgatagatcttggaaggcggagcacttccatatatgcacaatcaccacagttaaaaaaagcgtacactgataggcattgttcacctatttattcacgcatgacatggtacatcattccatgaaaattcatcaataccacaaaccttatacatacatagaatctattagaacaatgaaatg

SEQ ID NO: 44443 - DNA, 382 bp, Zea mays
tcctattagggtcctatctgttaaacattagaacaatacaatttgttttatatttttgcctactgaatgcactctaagtgtgtcaaacatatgcaatgccaatgcttatgatgccatgctcaagatttagttatagtaacaccagcggtgttacacatgaactcaagactcccgaaacggagcatcgtttcatgttggataggtagctggagactacccatctggagcttgactggaagctgttcgtcaacacgcatcttgcctctacctgtcgcgccaactgtctacttttctaccccagggggtccctgtaccgacgagtaaatagttgctgcgtgtcccagcctatatgggtctgcgcgagactgaactcaccggggaa

SEQ ID NO: 44444 - DNA, 316 bp, Zea mays
  unsure (1)..(316): unsure at all n locations
ggacattgcgtccctgtcggaaaccaacgccatgcttaatgtctctgtgtctnccattatacagcatgctgctagcaaatttaaatttctcattttcaagttcatgctccggcattttagcatctaaactaactatatgatcattttgcttcttaatcatggaaaggtgaccatctatagccttcacattaacatctctacatctacctcaaatacaaacatgatcaacacctctatgtacaggggtagcctacacttaatttctctatcttagcacctaatctagcattctcatctctaatacaagaaatagaat

SEQ ID NO: 44445 - DNA, 478 bp, Zea mays
  unsure (1)..(478): unsure at all n locations
agatgatatgaagctctgcggtgcttgattgaggtaattcaattcttatcaactcaagctatcaatcttcatatgatctatatattcaagattgacccacagttattntaatttattattttcaaaactcatatcatctcgggaagatattaatgttgtaggaaataaagaatcatcatgtgtggaaaatcaaggcctacaacatggaggaaagccaaaggatggtaacacttatcttctaagtgcaagtattttagaataccatttcttatgtgtcttgtgtagtcacatagaanaatttaagcacttcaaatatctntaaattgatattaccattctttgaaaaatatcctctcatatggtgagttgcacattcatcattttcatactatggcaatctacatgctgtaatntatggctagtatgtcatggcatatcctctctctaattatcttggtgttggcatgattctagatat

SEQ ID NO: 44446 - DNA, 481 bp, Zea mays
  unsure (1)..(481): unsure at all n locations
ngcattgcatgtntaaatttcttgtattgcatctatggcttgtctaacctanttgagataaccgccaacaaagcgagtgataaagcttaactcggatcaaacttgacaagtcttagttttaagcttttagcacttaaattcttattcttgatgcaantgttggttcttgaaatatgcatgaggtactgcacttatggggagtattcaacactcaaatcactcatgaaaacccctaatgcaagccaaaatgcaaatttcaccatttgcctattttctctagaaattatctagcctatggcaaaatattttgtaaagtatatgagggtgccaatacctgtcccaacaagtgttattttgtgtgattataagttgggatatggctcgcgtggaaactagatagaanaattcaccaatttctaatcttccctctgtctgggctcaccggacagtccggtgtgcaccggacactgcactgtgcaat

SEQ ID NO: 44447 - DNA, 443 bp, Zea mays
  unsure (1)..(443): unsure at all n locations
cgaagccatggtaagtagcatatgccaataatatatgaattgtttcaagcctagctaccggtgcataggtttcaccgaaatcaaaaccttcgacttgtgagtatcccttggccacaagtcgagctttgttccttgtcaccacaccatgctcatcttgcttgttgcggaaggcccatttggttcctacaacattttgattangacgtggaactaaatgccatacctcattcctagtgaagttgttgagctcctcttgcattgccaccacccaatccgaatcttgtagtgcttcctctaccctgtgtggctcaatagaggaaacaaaagagtaatgttcacaaaaatgtgcaacacgagatctagtgtgtacccccttatgaatgtccgcgaggatggtgtcgaccgcgtgatctcattggattgcttggtggactcttcggtgt

SEQ ID NO: 44448 - DNA, 459 bp, Zea mays
tggtcatcttattgctaactgtcccgacaatgatagtgacctgtaacactggagcaagagggaaaagaagaagcattacaagaaggccaagggcgaggcacatatcggaaaggagtgggattcggattgctcctcctccaactccgacaatgaaggactcgccgccactgccttcaacaagtcatccctcttccccaacgagcgtcacacatgccttatggcaagggagaagaaggtatgtaatcaaaacaatgtcacttatgattcttccagtgatgatgagtctagtgatgatgaaatagattactctagtttgctcaagggattggatagaactaaagtagataaaattaatgaattgattgatgccttgaatgaaaaagatagactcttataataacaagaggacatcttgtatgaagagcatgacaaattcgtagaggcacaaacatcttatgc

SEQ ID NO: 44449 - DNA, 374 bp, Zea mays
  unsure (1)..(374): unsure at all n locations
tcgcacgacctcgcgactcgattcgcggcgcagattatagctgtccagtnaaatccttgatggatcaccctggcagcgagggccctgggccctgagtgggagctgcaagttccgctgtggacttcgcgtaagatctgaatgcctttggtttcagtgaccaatcttatgatgggttgactgataccctttttgtatatctggtccccgactagtacaaagtcccggcatcgtggcttgaggcgcttggcctcattgacgtcactctggtggtagtatccttgcacaaacaagtgtattggggcccgccaatcttcagtcataatgaggttgacgatgccatggccttccgtgtcagtggttacttgtaattcctc

SEQ ID NO: 44450 - DNA, 311 bp, Zea mays
tctaaagggagaacatgtgataggtttgactaacgtgcaatttgaaaaagatagaccttgtgcagctcgtcaagcaggtaaaccagtgggaggagcgcatcatagcatgaatgtgatgaccacttcaagacccctggagctgctgcatatggacctcttcggacccgtcgcctatctgagcataggagggagtaagtatggtctagttattgttgatgacttttcccgcttcacttgggtgttctttttgcaggataagtctgaaacccaagggaccctcaagcgcttcctcaggagagctcaaaatgagt

SEQ ID NO: 44451 - DNA, 379 bp, Zea mays
cgcggagatgcttcatccccacatgtgctaagcggcgatgctatatccagcccatgcacgtcttatccattaagcatgcatatagaccggcctcttcttttgcaaaatcaactaaatatagtttgccggctagtacacccttaatagctagtgaaccatcacatcttctaaagacagacacatctacatttgtgaataaacaattatatcccattcgacataaatgactgacagatagcatattatatccaagactctgcactaagaatacatttgatatataatgctcatttgaaattgcaattttacctagcccttttaccttggcttgagatccatcaccgaatataattgaatcttgggaatgcttatatttgac

SEQ ID NO: 44452 - DNA, 470 bp, Zea mays
gagaacatgtgagaggttctattattgtgtcattctaacaagagagaccttgtgcagcctgtcaagcaggttaacaagtgggaggagcgcatcattgcaagaatgtgatgaccactgtaacacccctggagctgatgaatatggacctattcggacccgtcgcctatctgagcatacgagggagtaagttacgcctaattatggatgaagactactcccgcttcacttgggtggtctttttgcacgataaatatgaaacccaagggaccataaagcgcttcctcaagagagctcataatgagtgagagctctacgagaagaacataaggagcgacaatgggtccgagttcaagaaccttctagaggaggagtgtcttgaggaggaatggatcaagcacgagatgctcgctcgctacacactccagccaaatgaagtggtagagaggaggaacaggacgctgatctatatg

SEQ ID NO: 44453 - DNA, 468 bp, Zea mays
tcagcaagacccattactcctagtccaatcagtcccaatgaatataccttatcaaatgccgatatcctgtcgcgatcaacacttgaggcatctagtttggtcatagctttagcaatgaagttggttttccacctctgaaggaaccatacaaaagacagaacaaatgcacctctccatgcctgtggaaggtaagttgatacgcttggtgcaataagtgttgccctatggaagagaaactaccacaaatataagcatctagaatagaacattatatgtgccactttttcaccagaccataattactaacgtcatggtagagaaaaaaacattttgtgcaccagcatggcaacattaataaacaaacatgaatcaacaaggtaaaaaaacaatgtatattgtgatggaacttatacaacattgaagacacatcaatttcataatgcttattctggtagcagttgcatatct

SEQ ID NO: 44454 - DNA, 469 bp, Zea mays
  unsure (1)..(469): unsure at all n locations
tatgaagattcttcatcccaacatgagctagtcggcggtgccagagccaacccatgttagtcttagcaattaagcaagtgtcgagttcagctctatcaaaatctaccaagtatagctaaccctctaacactcccttaaatgctattgaatcatcacttcttctaaagacagtgacacctatatcagtgaatagacagttgtagcccatttgacataattgagatacagaaagcaggttgtaatctaaagaatcaacaagaaaaacattggaaatggaatggtcaggagatatagcaattttacccaatcctttgaccaaaccttgatttccatccccgaatgtgatcgctctttggggatcttggtttttctcgtaggaagagaacatcttcttctcccctgtcatgtggtttgtgcacccgctgtcgagtatccaacttgagcccncggatgcataaacctacaaaac

SEQ ID NO: 44455 - DNA, 469 bp, Zea mays
  unsure (1)..(469): unsure at all n locations
tatgaagattcttcatcccaacatgggctagtcggcggggccagagccaacccatgttagtcttagcaattaagcatgtgtcgagctcagctctatcaaaatctactaagtatagctgaccctctaacacacccttaaatgctattgaatcatcacttcttctaaagacagtgacacctatatcagtaaaaagacacgtgtagcccatttgacataattgggaaacagaaagcaagttgtaatctaaagaatctacaagagaaacattggaaatagaatggtcaggagatataagcaatttacccaatcctttgaccaaaccttgatttccatccncgaatgtgatagctcgttggggatcttggtttttctcatatgaggagaacatacttttctccccggtcatgtggtttgtgcacccgctgtcgagtattcaacttgagcccccggatgcataaacctacaaaac

SEQ ID NO: 44456 - DNA, 360 bp, Zea mays
  unsure (1)..(360): unsure at all n locations
tctcagggagaacacgtgataaggttgactaacgtacaatttctataagatagaccttgtgcagcttgtctagcaagtaaacacgtgggaggagcgcatcacagctagaatgtgatgaccacttcaagacccctggagctgctgcatatggacctcttcngacccgtcgcctatctgagcatatggggaagtaagtatggtctagttattgtcgatgacttttcccgcttcacttgcgtgttcgttttgcatgataaggtctgaaacccaacggaccctcaagcgcttccttatgagagctcataatgagtgtgagctcaaggcgaagaagataaggagcgaccacgggtccgagttaag

SEQ ID NO: 44457 - DNA, 486 bp, Zea mays
  unsure (1)..(486): unsure at all n locations
tcgcacctctgaactaactcgtgtgcatcacttttctccatcttccaatagaatcctgacctgaagaccttcccgactagtgtccgggatgctgcgtgtattccacattgtccagcatggacctcatctagaagtcgcttcccagtagatgagagaatgcatttcatgaggacgcctgatgcaccccttctgtatagtgtctccccaatgagtgtgtagtgagctgactgtctgacgatgcgctcggctgcatttttgtcatctggttcctcttcattctttatatatctgatgatcggccttctctagtcatcagaatctgactctggttgattcatgatattacactcttctgcctgatccattgagatgcttggctgtggtatttcttgtacaaagactccacgtgggacctgagttcgactggatcctagcttgacaatacatcggcttgcgtgtntcgatctctttctacatgatgaaaat

SEQ ID NO: 44458 - DNA, 481 bp, Zea mays
  unsure (1)..(481): unsure at all n locations
gacctataaaactcagcttgtgagattcttcatcccaacatgtgctagtcggcgatgccttagccagcccatgttagtcttagcaattaagcaagtgtcaagttcagctctatcaaagtctaccaagtatagctgaccctctaacactcccttaaatgctattgaatcatcacttcttctaaagacagtgacacctatatcagtgaaaagacagttgtaacccatttgacataattgagatacaganagcaaattgtaatctaaagaatcaacaagaaaaacattggaaatggaatggtcaggtgaaatagcaattntacccaaacctttgaccaaaccttgatttccatccccgaatgtgatcgctctttggggatcttggtttttctcatatgaggagaacatctttttctccccagtcatgtggtttgtgcacccgctgtcgagtatccaacttgagcccccagatgcataaacctac

SEQ ID NO: 44459 - DNA, 410 bp, Zea mays
ggaacataaaactcagcttgtctacaacggacgcgatcatgcctcgggcgatctcggtctctagcggaaacagtagtcccggacgaatgcacgtgtcgcccgagggtctcctcatgcagtgagcacacccccggctcagccaaaggcaagccttgtcgtgcaagcgaccttggccaaatcgccttaccagccgaccgtattgcatgcacatataatgctgggatcacctgacaccttatactgacacgcgtgcctcagtcgacaaggtcgaagtgaccacggtcacttcgccctttcacttactgatctgacaggaaaacaacgccgcccgccccgctccggctgttgtgccaaccacccatgtgaagacgacaacagccaagatcagcctcgacgcaacagtaagctct

SEQ ID NO: 44460 - DNA, 369 bp, Zea mays
gaacttcagtgcgactctgaaatttttagaacatcaatgcctcatctttagtaattgaatctaagtctagcttctcacatgataattcttgcacacattgtgccaaatatcatgcttcttggtgtctaactaaccatgcacggaagaataacccacaggtgaaggtcaaagaaattttgaaaagatgctctatcaatgatgggttaaagaaagttgaacccaagtacaaagtccttatacccaacaatggaagaagggggcttgggttcaacttattctaggaagaccctagcacagtgcataaggggtggagatcctccaagctcataaagggaaccaccctatatgatgccttgtggaggattcact

SEQ ID NO: 44461 - DNA, 414 bp, Zea mays
  unsure (1)..(414): unsure at all n locations
tgtaaggttcttcatccncacatgtgctaagcggcgatgcctcagccagcccatgctagtcttagcacataagcatgcatctagatcggcctcctcttttgcaaaatcaactaaatacagtttgccgtctaatacacccttaaaagctaatgaaccatcacttcttctaaagacagacacatctacatttgtgaataaacagttatatcccattttgcataattgactaacggatagcagattatatccaagagactcaactaaaaacacattagaaatagagtgctcattngatattgcaatcttgcctaagcctttcaccttgcctttggtcccatcaccgaatatgattgagtcttgggaatccttgttcttgacgtaggaggtgaacatcttcttcntccccgtcatgtg

SEQ ID NO: 44462 - DNA, 411 bp, Zea mays
  unsure (1)..(411): unsure at all n locations
tatgtaattaacctgataggacccaacactagttggggacctattctccaagcctaaattccttccagatttatgtatctgtgggctcaagctggattattgatagtggatgcacgaaccatatgacaggggagaagaagatgttcacttcctacgttaagaataaggattcccatgacatgaccatttttggagatgggaaccaaggcagggtaaaggggttaagcaagatagcgattactaccgagcattccatctctaatgtgtttntggtagaatcgcttggttataatttgcttttctatagtcaattatggcatataggttataattgtttatttacaaacgttgatgtaaatgacattataagaagtgatggttcattagcatttataggtgtgttagacaaca

SEQ ID NO: 44463 - DNA, 397 bp, Zea mays
  unsure (1)..(397): unsure at all n locations
cacaagtcgcatcnaaatggcgaggatattaagaagatgaggagcgtggtctactacnacaccgatacttcatcaccttccgcctccagctccgacgcgtcatctattacttctaagcgccatgagcgcaagaagtttagtaaaattcccttacactatcctcgcatntctagacatactccattactttccgttccattatgcagaccgccaacctttgacggtgaagattatgctacgtggagtgatttgatgaaatttcacctaacctcactccacaaaagtatatggaatgttgttgagtctggagcatatgtaccatccgtacgggatgaagattatgatgaggacgatgtggcccanatcgagcactttaactctcaagcaacaactatac

SEQ ID NO: 44464 - DNA, 429 bp, Zea mays
  unsure (1)..(429): unsure at all n locations
actcaagctcgtagcacacaaatatntncatngcaaccatcatatatatatgcatagcactcttgcaccgngggccccacgatacagaaggcttcgctattatagcgaggagaaggtgtttttccataccctcagctaaaggtcttcgttcgttcacaatcttgaattgttacaaaggaacaaactaatactgcaaggcgctactaatgtgggccttcgtctttcaaagatcctcaataacacggctaaccatttgttttagcatattattaagcattacatgagcttcattaccagaagagctttggcatacatcaatggaaatacgacgaagcacgcttcgatatgttgacacaagaaggcgacgtagggagaaagtgtcgttcaagctgctaagtgcaaatggcaatattgtccctctgacatttg

SEQ ID NO: 44465 - DNA, 445 bp, Zea mays
ccacctaggagaaatttagacaacaagtcggtttttatacttatacgcgcgatgtcagcaggaagcaattgactcatatccacactgaacgcatgagacattagccgttggctctccacaggactatcggtcgatgcttaatagcatcgctggagaatatgtgtgccatgggatgatactctcgctttacttgggtatcttttaccggaaaatatcagacccagagacctaaagagattcttgagacgagctcaaatgagtccggatgagaatcaagagattaatgtgggggcactttgcctccgaggtcctaaaaacatgagtaacaatgttctagagtgtaaacatgagtagtaccttcgactcaatcaaaccacagtgtgagaacaccaacaatacaaggttgacgctaagcgaagcttacgcacgggagctctacatgata

SEQ ID NO: 44466 - DNA, 435 bp, Zea mays
  unsure (1)..(435): unsure at all n locations
ctcagctcctcctgcttcccagccgagcgccgagaagtccctgcgcgctagctatctggtggccacgtgcgaagctctctgttcgctgtcaaattgcttgcttgctgtttacaccgtcgaagatacctcgccgtgcgctctagcgtcggctgccgacgattccgccattaaactttcaagctcgccaacgctccagctcgttgttgtcgccaagtccgaatatcacatctcgttctagtgaccgtgagttcttccctgtgcacgcgcgagctcctctgcttggcctgtcatcgntctccagctccataccacactcggctgttcgtcgtcatcgctcggtcgtgcgacaggctgactgcgtgtcgtatgtcgcacatcctaggtactcgtcgacacgatgttcgtcttcgcactgtgtgccacagaatcgtcgtt

SEQ ID NO: 44467 - DNA, 426 bp, Zea mays
  unsure (1)..(426): unsure at all n locations
ccttaaataccagctcgcgctaaacacccttaaggctagtgaaccatcatcttttcttaagacagacacatctacatttgtaaaaagacaattatatcccatattgccatagtgactaacagatagcaaattgtaaccaagagactcaactaaacacacatnggagatagagtgctcattagacattgcaattttaccaaacncgtttaccttgccttgatttccatcaccgaatataattgaatcttgggactccttattcttgacgtaggaggtgaacatctttcttctcccacgtcatatggtttgtgcatccgctgtcgataatccagcttgaacccccggatgcataaacctgcaaggcaaatataggcttgggtcttacgtacccaactcatgttgngtcctacaaggatagtgcaaata

SEQ ID NO: 44468 - DNA, 381 bp, Zea mays
atgcacatgattctatatttggtggacactacctctcagaacaatgagacggtaaatggggaaagatcgccactctatattaatgtgcgactaatttagcatgattgtagaaaccacacacgatacttctagcatgacatgactttgcaagagctggactaaaacactaggaatacatagcactattgctgaaatgacacctctcttggttcacagagtactctcaaataatcaattagctgtatgcataactatacatacgatgagcttctttgataatgggagctctatataaaacgttaccaagaactgtacatcaagcggatacatagtcttcttacaagctcctggcctctgtctaacgcacatggtcatactaaa

SEQ ID NO: 44469 - DNA, 383 bp, Zea mays
  unsure (1)..(383): unsure at all n locations
ggacccgtatncactttcacgtatagatcatattgtggattctacctacgggtgtgacctctcgtgcttcttagatgcttactctggtttccatcanatccagatgtctagggaagataggaatcatactgcttttgtaacagtggatgggctttactgcgatgtcgtaatgccttacggtctgaaaaacgccttgccgacatttgtgcgggcgatgagtaagactttctgtgacctgattatggacaaggtggaagtgtacgtcgatgacatcgtagtcaagactaagagagggtcgaccctagtggaagacttaaccctggtctttgacaagctgcgggcaacacgcacaaagctgaacctggacaagtgcatctttggtg

SEQ ID NO: 44470 - DNA, 309 bp, Zea mays
  unsure (1)..(309): unsure at all n locations
gaagatatcgagtatcctaaccatgtgtataaactctctaaggcgctgtatgggctcacgcatgccccaagagcatgcgatgaatgcctaagagattatgatatactaatggcttcaaagtcggaaaaacaatcctactctcattactaaaacaattgcaaatgatatgtctgtatgccnaattatgttgatgatattatattgggtctactacaaatctacacgtaagagattntatgatcatgggcaagaatctagatgtcaagatggtggagtgaatattttcttgaattcagtaacgcactcaaa

SEQ ID NO: 44471 - DNA, 434 bp, Zea mays
  unsure (1)..(434): unsure at all n locations
ctcagctctaagggagacacgtgatnggttaactaatgtgcaattctaaatagatagacctggtgcagcttgtcaagcaggcaaacaggtgggaagctctcatcacaccaaaaatgtgatgaccacatcaagaaccttggagatgcttcacatggacctcttcggacccgtcgcctatctaagtataggaggaagtaagtatggtcttgttatagttgatgactnnttccgcttcacttcgggtattcttttgcacgataaatctganacccaagggaaccctcagcgcttnctaaggagagctcacaacgagtttgagctcaaggtgaanaagataaggagcgacaatgggtccgagttcaagaaccttcaagtggaggagtaccttgaggangaaaggatcaagcacgagttctccgcttcctacacaccac

SEQ ID NO: 44472 - DNA, 452 bp, Zea mays
  unsure (1)..(452): unsure at all n locations
cttatcacatggacgtganaagtgctttcctcaatgggccaatttangtttatgtctatcgtgagcaaccttccggctgtgaagacagtgagtatcccaaccatgtctataagctctctaaggcgctgtatgggctcaagcaagccccaagagcatggtatgaatgccttagagatttccttattgctaatggcttcaaagtcggcaaggccgagcctacactcttcactataactcttgacaatgattagtttgtatgccaaatttatgttgatgatatcatatttgggtctactaacgaatctacttgtgaggaatttagtaggatcatgacacacaaattcgagatgtctatgatggnggagttgaagtatttcttatgattccaagctaagcaacttcaacagggcaccttcattattcaaacgaagtacactcaagacattctaaac

SEQ ID NO: 44473 - DNA, 398 bp, Zea mays
  unsure (1)..(398): unsure at all n locations
ctcattttttggttgcataatggtttaccctcagggcgtcatagtcaaggtcggtggggagcatcgcttcagccccatagaccataaagtaggcgtatacccgattgagtgatctacgggtgttattaagctctataggaccgctgttagtgcctccaaccatcgttagccaagctgcttgaggcacatgaaaatctgatatttgaggcattgcattatcattcccgtggctcgttaacctgcccgcttgcgcggtggtgagccatgacaacccaatctatatggatgcagtacattgcaggactctatgaactngtttccagtgaactatgtaccattgttcgttatgatcgagttgtgtacccaacaccgtgaatgatgttggtgataaaatttat

SEQ ID NO: 44474 - DNA, 442 bp, Zea mays
  unsure (1)..(442): unsure at all n locations
gtctgagcagttcgaacgagagaagcatgatctttatgcataacttgaagccgaagctcagcanaattcggatttgagaatattactgacaaatcttcaagaaaaatgtctggaatttagcaacaagtgcattcaatgactaagaaagatttnttactcggttggagctagcagcgaaaaatttaccccctcagctgaagatctaccaaaaaccttcgaacacattgaggtggagattgacgagctcgacgaagtcatagctgggcatggtgacttctgtgcctgggtggcttctcgagggactgctgcagccttcatgaaggctggctgtgatcatgggannaatgtcaataggccaaattntactttgtaccatcaatcctggatgacatccctgatctcgcccgaagcatctcgaatcgattttgtaaaatgatatgga

SEQ ID NO: 44475 - DNA, 479 bp, Zea mays
  unsure (1)..(479): unsure at all n locations
tcgcacctctgaactaactcggctgcatcattctntgctgttggccaatagaatcctgacctgaagactntcccgactagtgttctggaggctgcatgtattccacattgcccagcatggacctnctccagaagttgcttcccagtggacgggagaatgcacttcatgaggacgcctgacgcaccccttctgtataatgtctccccaatgagtgtatagtgagccgactgtctggcgatgcgctctatcgagttcttggcgcctgggtcttcttcattctttatatacttgatgattggccttctncagtcatcagagtctgactcgggttgatctataatgttgcactcttctgtctgatccgttgagatacttggctgcagtatttcttgcataaagactccaagtgggacctgagctcgactggattctagcttggatagtacatcggctggcgtgttctcatctctttctacatg

SEQ ID NO: 44476 - DNA, 315 bp, Zea mays
catcatccgtacaagaacatcatgacgactgacaggccactggaactcctacacatggacctattcagcccgattgcttacataggcatcgataggagtaagtactgcctaattattgcggatgactattctcgctcaccttgtgttttctttttgcaagacaaatctcattcccaagagaccttaaatggattcttgagacgggctcacaatgagttccgattaatgatcaagaaaattataagcgacaacgggacggtgttcgagaacttaccaaatgaacgctctcttgaggaggacggcatcaagcatgag

SEQ ID NO: 44477 - DNA, 385 bp, Zea mays
  unsure (1)..(385): unsure at all n locations
tattaccatgatgcacctcattcacagctggacaataagtggtctgcgtcgntngcgttcatttactgtccaagatggaatccgtagctcaagtagctctggttcttctaactattcgactggacaagacccagtctataacccttatgcatggcaatggcaaccgagtcagcgaacctatggacccgctccaccattaggcgaagcaccaccatggatcatgtatgggtattgtgacggaaccttccaaggtangcccacctacagtgtccttgtcctaagtgaaagggaattatgcttacacctatttcctaattgattttggtggctgaattgcccaacactaataattggactaactagattgctctagtctataagttct

SEQ ID NO: 44478 - DNA, 433 bp, Zea mays
  unsure (1)..(433): unsure at all n locations
cttggtactctggacgaagctgcaatctgagcgctgagaatctcacccttatcattctcctgggtcttgcacttgcgcttnctgtcaacaaaaacagccacttctacttctttagactcagcagctctcagtgaatttcttctggaacgcctcaaagggacaactgcgcccacctctacagaaccggcttgagcagacatncaccttgtcttggcacaacaggcgaacaggtgacctgggacctcagttcacagtcttgagcctcagcacatagcgagtttctgctggactgcctcacaaggacatctgcgcccagcgaattcctcctggacccgctcacagggacatgtgcgcccagcgaattcctcctagacagcttcacagggacatcttcgcccacctctacatnagaaccttcttcgtctcgtcagca

SEQ ID NO: 44479 - DNA, 267 bp, Zea mays
  unsure (1)..(267): unsure at all n locations
cacacccacctgtgtggttatatagtgctgcacgtaagaaagtgaagcggtggaactgttacaccaagcgcgcagtaactcatacccgctgtgcagtggaccgctaagaccaaacaagtactttacaaagtgggcttggcacgcgctctgaagtcngatcgtttcttcgcaacgagctcagggaagggtgtttttggaccttcggctttccgaagctgaagaggttnttttcacgggccaagctcgttacgaagaacgatctagcac

SEQ ID NO: 44480 - DNA, 239 bp, Zea mays
ttctttgaacatgttctacagctggccacataaccttatattaaagattctctattactagacggaacgtcctcagctctttgtaacgcatatcctcctttaggacaccctatgctcacaacctacaactgtgactattaatgtcaaaggcaaactgttgaccttcaggttacctgagtttcttgctatgcccgtgacaagatcttcttctgctactaacgcccactgttaaccaacag

SEQ ID NO: 44481 - DNA, 278 bp, Zea mays
  unsure (1)..(278): unsure at all n locations
gtaaaaaaagactatcactcgcctcgaaacaagattctaactccagcaacagatggtttattggcagaagctgaacctcaaagttccaaagtgaataccaagctcctttcacagttcgaaagccttatctaggaacagcacaatgtccgcgactcgaattatgggtaccctcaagactgctaatctcagctggtaacccccatcaacacaaagctgctaaggcctgatgggcgctctttangtcaaggctccgtccactcaaaggacacgatctctcc

SEQ ID NO: 44482 - DNA, 475 bp, Zea mays
  unsure (1)..(475): unsure at all n locations
acaagaaactcagcttacatgtctcgtatgattcanaatcaaacgaagcttattgcttatcttaatgaagcttcttcatgcgattctcacttatatgacccaaacgacagtgccacatgtaggtaggacttatatcattaggccgaggccttttagcactaatattacagataggtgcatcatcaagatttaaaatgaataacccattcataatggatgcaaaagccacaaacatgccattcttatagatcacacaaccattggtttcactcgcaaatgaataaccatccttcatcaaacatgaaggagacataatgtttcgactcatactaggaactagataacaattatttaacaccaaaataaatcctgatgggaggtggagttgcatcgtcccgacggtcaacgcagcaactcttgcattattgcctacccgganatcaacttctcctctttttacgcttctacttcttat

SEQ ID NO: 44483 - DNA, 489 bp, Zea mays
  unsure (1)..(489): unsure at all n locations
tctanagggagaacacatcttatgagtaacagatgttcattttgataaagacaggacttgtagcgcatgccaggcatggaagcatgttggagtccatcatccacacaagaacatcatgacgaccgacaggccgcttgagctactccacatggatctattcggcccgattgcttacataagcatcggcgggagtaagtattgtcttgtaatagtggatgattattctcgcttcacttgggtattctntttacaggagaaatctcanactcaagagaccttatagggattcttgagacgggctcaaaatgagttcggcctaaggatcaagaaaataataagcgacaatgggatggagttcaagaactctcacattgaatgctctcttgaggatgacggcatcaagcatgagttctcttctccctacacgccacaacacaatggtgtagtggagatgaagaatcgaacttctttggacatggcaagaaccat

SEQ ID NO: 44484 - DNA, 482 bp, Zea mays
  unsure (1)..(482): unsure at all n locations
ctcagctaaccaagtcgcttcggtaagtctctggaaccaaacgcatgttccatagctttntaaactgaacggcagattctcgaaggaaaactaactgtcaaattcttttccatgtactggttggttcctcagagctggtctcgggaggagaaggaccactgcctggaggagacggagaagtcgttctcttactcaggaggcctcctccgccatatattcacctgatctatcattgccggntgatccagtctcaaacactgtaaatacatagtcctcttgactgttaaaactttattactggtgagggggatctcctcccccaggtacggtttacctgcattcaagttgcccagtgtcttacttgatttctggtgtttggtgtttctgtgatgcaatctgtattctgtaggtcgttacatgactaatagagtcgaccccttccaatgtcgtcaatggcaagagctcttccaatcaacatgcct

SEQ ID NO: 44485 - DNA, 460 bp, Zea mays
  unsure (1)..(460): unsure at all n locations
tncacatttacattgattacataggtgcgatcttttctattcttagtttagaatatttaagattggaaccttggttgcataactcctcttttactagagatagcaacacttagacaaaatctagtttgcactttattgtttagttatctggataggttttgtttacgagaattatttgtggcctatattagcgcgaaaaatagaagtcctaattcaccccctcttaagcttctgtgttcctttcaattggtatcggagcccggtttggctcatttagaactttttagcttaaccgctaatcaagtcgatgctttttagagagaagggatggatacccatangccaccatacttttacgacactaacttactgagagcacctagaggggggtgaataggtgatcctgtaaaacttataacttacaccacaacttgataagagtagaatatgaatcagtgtt

SEQ ID NO: 44486 - DNA, 361 bp, Zea mays
  unsure (1)..(361): unsure at all n locations
tgagtcaaccatcttgcaaggatcattgctgtatctataagattatctgngcatgaagcacatacgagantagatcagggctggaacaacccaatgttttatagaagatgatcaaggggtgttcatggtcaataactgcatagtagtgccgaagaacgatgaactccgccagcaaattttagatgaagcgcatcttagtcgctattctattcatcccggaagcactaagatgtaccaagaattaaagcaacattactggtggacgaagatgaagattgacattgcacgctatgtggctaagtgcgacacttgcagacgcgacaaagacatacacctgaaaactgctggtccattgcaatct

SEQ ID NO: 44487 - DNA, 437 bp, Zea mays
  unsure (1)..(437): unsure at all n locations
tactggattgcttctgctttagattagaaattcagaacgagaagttccttgacagcacnattgttttatgcttctgctttagattagaaattcctttccagatgctcactatttagctttgatgtctttcacagngctctggtcttcctccgatgtctgaagctgaggctcatgcttttgaagtcaactcttttggcctctacaatgaattatcagagcttggtgagttaggaggtgcggataacaacttaaacaccagcaatgtggaaactacagattacctcatgttgccacctgacagagaactgtcggctaatgattacatggaactaaacgatctccttgctcttgacccaagcttctccagtgaatnttctgctcaggacaatcaatatatgcagcatcctcttgctcagtacaatggacattatgatctg

SEQ ID NO: 44488 - DNA, 482 bp, Zea mays
  unsure (1)..(482): unsure at all n locations
gagtctattcatgattgtcacgctcgagggataatgaggatgcacaatttatgcacctatgttctccgtatcccctgcgatgttgacactgaagggttacgagagtacatggccaagtttggacccctagacgattgtgtcgtcatgaaggtttgccataattcacatttaaattgaatggcacgtgctatactggttatgttttcttacccttaganttgtgccattacaattcctgaagtactatgtcttatattccaataatattganaagtatagattgtttattttctccaagaatagtttgcttatgaatagaagaatatgtgtggccatatgcctgtgtcctcttagctatatcttatcttgtattttcgactggctcgaaattacttattttttttaatatttgtggtgttcaatacaagtaattcctactcatttttgacacaggcatgcaatattaccatttttgtatgtca

SEQ ID NO: 44489 - DNA, 473 bp, Zea mays
  unsure (1)..(473): unsure at all n locations
ctaagctagaccttatgcccctntctttgatgggtgcataggagcctnattattcacacacattgnagctcatgtatgtcatgagtcgaggcttgaacacataaatagaaaatggtggcctagctacaatgtattagctatagtggacatggatatgcgcttaactttgtaggtgtagggttgcctggatcttgccatgacatggcagtgctcacgaattgcattcatgcattacgatgtagaagatctttttctgggattattatgttcgtacaatggaggtattatctagtggatgctggntactcaattcgcgaagggtacttgccaccatatcatatcagagacatcacttataagattctaatcaaacaggagtatagagtgtgcangagaaatttaatttccatcactcgagtcacatgatgtagtngaacgggctattggactactcaaatcaaggtggcatgtgc

SEQ ID NO: 44490 - DNA, 381 bp, Zea mays
  unsure (1)..(381): unsure at all n locations
tgagctcttgcgcttggatcgcttcttttctttggcattctttcttgtgatcaaacactccattgttatcaaggcaagaggcaccaattgtgtggtggcccttgcgggaaggttgattcccaagtgaattgagaagagaagctcactcggtccgagggaccgtttgagagagggaagggttgaaagagacccaacctttgtgtgctcctcaacggngagtaggtttgcttgaaccgaacctcggtaaaacaaattcgcgtgtcacactctttatttgcttgcgatttgntntgcaccctctctcgcggactcgtttttatttctaacgctaacccggctcggtagtgtgttatatttgtannattcagttcgcctatcacc

SEQ ID NO: 44491 - DNA, 478 bp, Zea mays
  unsure (1)..(478): unsure at all n locations
tatatccagcttgagcatcaggcaacgatgctcttgttgatgaantactttatccgtctgctgaaccaacatgaaattatcctggataaagcgacccttaatgaaggcattctggtttggagagaccaaatcgttgagccttgaagccaatcgagaagccaatatctatgtgattagtattgcaaagctgtgacaaggctgatatgtctaatatctttgacttgatcagcattatctctctttgggattaaagtgataaaagcagaattcaacttatgaaaattatcaaattgtctggttcaaatcgcactcaccgcagccatatagatcctctgtaataatggaccagcacattttgtataatctaccagtcaattcatcccgtccatgagaattatcagaggacagagaacttatagcattgcacacttcttgctcattagtggagctgtccaactcgatcacatatggagatgga

SEQ ID NO: 44492 - DNA, 268 bp, Zea mays
gagaaatgggaagaccgataccgcggagaagaaaatgaacataaattactgattcgtgggtatcctctgtccggacagtgaccccatgcagattcttcagacaaagctcctccgggaagacccaatggtactatgtggagaacgtaagctctgagacaacagacatatggttacctgcgaatggcaactggctgttgggatcgatggggggaatcaccacagcggatgaactcgatgcctttcgcttgagcgccatctcaactctact

SEQ ID NO: 44493 - DNA, 471 bp, Zea mays
  unsure (1)..(471): unsure at all n locations
nggatgctagagactgatagatacatatctagttgtggtggctaaggttggtaaaagagttggctcctgcgttagctctgagcttcatttatataacgcctatgaccggagttcataaccatgggaggatttgcacccttgtaggatgtattatttgagtttgactcagtcatttgaccggtttcgatgacatattgagtatagtgttcaatccattgagcgcaaatggatttttaagaaaaagataagcatagatgaaaatgttcacatccataagcacgatcagtaatgaaaggtttcaagctggattaaggtgttgattatgaggaagacctttggtccatcattatgctaaagtctatttatagggctggatatcgagccagatcggttcggctcgtccgagatagctcgttaagctaacgagttggctcggctcggctcgttaagctaacgagccatagagtcagt

SEQ ID NO: 44494 - DNA, 488 bp, Zea mays
  unsure (1)..(488): unsure at all n locations
caagaactaagctatatctggacccattgaattggtccttgatattattgtaagagccttgagtacccacacaatccttattgtggcctttctctttgtgcacgcaaccacatatacttgacaaccatcttacatggtttcaagtcaatatttaatcacatagataaaaactagagttaagaataggagccttttctccttttattaatacatcattgtgtcgccttcttgatgatgaacctaccttgactttgggtgcacctagcttatcaagggtagtcgcacaagcattcatatcataaagacaagttatgcatggaatttacaacctagtgatcgaattcaatgtgaagcatatggatactgattgaagtagatttctaagatattaaaatattggtttccaaaatttagagagtatggatcactaattgtacctttatagtttaaaatcatatncatgtcacgcatatgatgtcatgatatta

SEQ ID NO: 44495 - DNA, 473 bp, Zea mays
  unsure (1)..(473): unsure at all n locations
tatatntacctactgacctgggtgaatatgttgaacctctctgtccactctattnaagtagnttgtacctcttattccataatatgcttatagatcagaacaatacaatatgtaatttataccatgaaccacatagcacccctatttttggtatgatacttatttaatgtagttcactggagaaatatatcatacccgcggttagcatgaaataagtaagatacctttctaatgaataaaatagggataacctagataaaccctacaaaataaccccaaggtaaatacacccccacacttgggataacaaatgttctattgataagaacttatgaaaaatataaaatctgctgtttgcatttttcacatagtatgtagtagaaagtgcgcttttgacactatacttacgaaaatcataactaattaaccaccccttagtttctgtatctttagcacagaagcctattttatta

SEQ ID NO: 44496 - DNA, 487 bp, Zea mays
  unsure (1)..(487): unsure at all n locations
tcatcattatctattaagcttcggctgtgtgccctttagcttcgtcatcttgctcctcagcttcgtcatcctgtacatattcaagtattgtaaggaaaattcaagtttaaaggaaaaggtaagcacaagatatgattntgttaccggcttaagatgacttcgagcttcgttaccagctatgcttcgtccacccttcgtccatactagttttataaatatgtttcctatgcttcgggcaagactgggaatatcaaccagatctgttggtgataaactaaagttgggcctattgacaatttttccatgtgtgcaaccagattttatgaaggcgacagttgtgccccgagaagctaccatggcacagaaatcaccatgtccggctataatttcatcaaggtcatcaacttcaccctcgatatgttcgaaggcccctggcaggtcttcaaccgaattgagatatgcttcagcggtgtcacatcgttactga

SEQ ID NO: 44497 - DNA, 473 bp, Zea mays
  unsure (1)..(473): unsure at all n locations
tatcctctcttagcaaggcttcttcgcacgttgtatgttgatataaacccagatgaatttgataatcacgcttctgcaatgcataatattcttccttttccctttattggtaattgaaccttacaattacatagaatggatgataaatggagtgtgcattgttgttgaactgaaattagtagcttttccattntttatgatggcatatgcagaagtgtactaaagtccaatgaattttgggtgcatatatattcatatatagtcttattcatgctntagatggctcatcccatggtagtgtgcttccatgctgctgtattctcatgtatgatatcttgtcatgattagttctgtcaaatagtcctcaaatgtgtaccttgaagatatttgtttgctcattgtttcacgtcatatatgacgttnttacgtgatgtatgtacaaactcacgtatgctctctaattcactcatcct

SEQ ID NO: 44498 - DNA, 488 bp, Zea mays
  unsure (1)..(488): unsure at all n locations
gacaagatgatccacaatgagaggccgtatacaatanggacctcaacctgcatcaactgaacaagggaatggttctaaaaggagacatgacttgagatccttgttttaagcttaggtacattttatgtccaataaggaaattgtctacgcatttatttgtatgggctttgacatggagtgataatggaccattcaaaatctggggcatggttcactaaataagaacatggcctaatttttggtttaaacaaataggtcacaaccttctatcggcacatccagtacaagggaaaacacatatgacacctaaatagattatctaaagaacggaggacagctatttcatcgaagtccataataccgcattacaccacattatctacaatcaattggtgctggaataaagatgagagaagcattttgggtgtatatgtgacanacatgatgcaacaatcaggatgcatgctcgtnctattcgtcctcactga

SEQ ID NO: 44499 - DNA, 347 bp, Zea mays
  unsure (1)..(347): unsure at all n locations
cagcttgtcaagcagggaaacaggtgggaggagcgcatcacagcaagaatgtgatgaccacttcatgacccctggagctgctgcatatggacctcttcggacccgtcgcctatctaatcatatggggaagtaagtatggtttagttattgttgatgaattttcccgcttcacttgggtgtcctttttgcaggaaaannctgaaacccaaaggaccctcatacgctttctcatgagagctcaaaatgagttngagctcaaagtgaataagataataagccacaacgggtccgatgtcaataaccttcaagtggaggagttccttgaagaggaagggatcatgcacgag

SEQ ID NO: 44500 - DNA, 348 bp, Zea mays
  unsure (1)..(348): unsure at all n locations
catataattgtaccgtcatcatatcctctgaacgacataatgagaaacagagaagctataggaagaattggaaaatgggctgcggaactcaatgaattcactattgattatgtacatagatcctcaattcaatctcacgcgctagcagatatcattgctgattggacgccacgggctaatggagaataagcgaataaagatgtctaagcctacacagaattctatgacggntcttcgggaccttctgcgaggagcggctgctgtctagagcgccctttaaaacaggacatgctacgcacaagactggactttatttgataaatacattgctgaaacgaagccctctat

SEQ ID NO: 44501 - DNA, 196 bp, Zea mays
taaaaccagcccgaaggaaaacggaaggaagactaagctattttttataaatagaccgcgcgcaacctggcaagcatgtaaacaggtgggaagctcacatcatgcccaaaatgtgatgacaacatcatgacccttggagtgacttcagttggacctcatctgaccccgcgcctatctaagtatacgaagaaccaag

SEQ ID NO: 44502 - DNA, 427 bp, Zea mays
  unsure (1)..(427): unsure at all n locations
cctatctcccactgaacgctgatagaagggttgttacttatagaacacccggncacccactgcaaactgtcgatccgtgcgtcccttgtcagccttgcttttcatacggtcttgtgcacgttggagatgatacttgacttgttgtaacatctgctgatggctgtgcaaccaagtactcatgtcaggcactgaacactgatcaacagactccaaacacagcttgcatggagcatgaaccatataacacctcaaaggggatttacccactgctgtatggtaacatgtgttataccagaattcagccagcggtaaccacgaataccactgtcgagggcatgaatggacgaaacagcgaacgtatgctttgttcacacgctctgtctgaccgtccgactgatgatgatatgcgctgctcatgcacaactga

SEQ ID NO: 44503 - DNA, 420 bp, Zea mays
  unsure (1)..(420): unsure at all n locations
ctacaggagaaggagaagatatgaagctgtatgggtgcttgttatagtcaattcaattntattaactcaagctatcaatctttaatgatctatatgtggcggaaccacccgaattatttcaacttaagtgcctaagtcctgccttagaggctagaccacacttatatgggaataacacgtcagttcctcggatctagtccgatgaggccactaacaggatcaagtaccacatactcactcgatggtgaggcacagagcaaatacaataaagcatatatccacacattaaagagtattacatttattacatcatcatcgagttttggcacaagtagtcatcattggtcggaatgtagctaaataaaactaacgataaataaatagagagatggggaagcctattccatcactcctcatgct

SEQ ID NO: 44504 - DNA, 408 bp, Zea mays
  unsure (1)..(408): unsure at all n locations
cttgaataaaagagccaactaacatgcgccatctctttttttgtggcattaacctgccagatttgtggttatcagcaaataacaaacatgatatttttcgttggagcttaaaataaagaagagagatctgtacctcattacaagtggtctatttccagacttcctttcttacttggatagcagcaagcataaccctaatagttttaactgctgacttgaactgtccacgggaagcttgaatttgtgctttcagtctcaaaatatccaactgatcatttttttcagcctcgtccattgcaaaatctgctactgcttcagcttcttgcaaatnctgctgtgcagataatacaagaattatgtacttctatgcactaacagaaccatcccatcaccatctcagacattctg

SEQ ID NO: 44505 - DNA, 447 bp, Zea mays
  unsure (1)..(447): unsure at all n locations
ntagctgattcaaagtcccttgttggattatccccaggnttttcttttccatctcttgacacaaagtgttctcggaggtcttcgccataagacagtgacaggaagtcttacgactcagtgcatctgccaccacattggctatgcctgggtgataatggatctccagttcatagtctntaataagctcaagccatcgtctttgcctcatatttaattctgactgggtgaagatgtacttcaaactcttgcgatctgtatatatgtgacagatatttcccagcagatagtgacgcctaatcttcatggcatgaaccacagcagctagctccagatcatgagttgtgtaatgctcctcatgtcggcacaactgccttgaagcatatgcaattactcggccctcttgcatcagtacacagccgagcccactgccagatgcatcacaatata

SEQ ID NO: 44506 - DNA, 366 bp, Zea mays
  unsure (1)..(366): unsure at all n locations
ttagcagcttgcttcgacgtctcgtgtgccactgatccctctgcataccgattacctctctccatgtaaccacgtnctgcacctcctgagaatcctcgtcctcgatttgtattcttccacgntctttcccttcctctgtatgagggaaaaccttcctctggcgcgacactcatagccacgcccttgtccacctccatatcctgggtgaaaatgctggtgttgaaacgagtcccggctgaggaaggacgagtgtcccctgccgcgaatcgcttctcttccagcgcccnccgactcacgattatcagcctccatctccattgccctgcgtgccacctgagcgtacgtaccanagaagctcgatctcgt

SEQ ID NO: 44507 - DNA, 317 bp, Zea mays
ctaccggtgcataggtttcaccaaaatccaaaccttcgacttgcgaatatcccatggccacaagtctggctttgttccttgtcaccacaccatgctcgtcttgcttgttgctgaacacccatttggttcctacaacatcttgattatgatgtggaactaaatgccatacctcattcctcgtgaagatgtgagctcctctgcatcgccccacccaatccaatcttgtagtgcttctctgcctgttggctcaaagataaacaaaaagtaatgctcacaaaatgtgcaacactagatctacgggtacccccttataatgt

SEQ ID NO: 44508 - DNA, 419 bp, Zea mays
  unsure (1)..(419): unsure at all n locations
gagaacacgtgatagggtggactaacgtgcaatgtcaattatatttacctngtgcagctagacaagcatgttaacaagtgagaggagcgcatcacagcaagaatgtgatgaccacctcaagacctctggagctgctacatatggacctctttcgacccatcgcctatctaagcatatgatgaagcaagtatggactaattattgtcgatgacgtttcccgcttcaccttggtatcctttttgcaggaagagtctgaaacccacaggaccctcaagcgcttcctaacgagagctcataatgagttngagctcaacgtgaagaacataacgagcgacaacgggtccgaattcaagaatctttcagtggaggagttccctgatgaggaggggatcaagcacgagttctccctccctaacacc

SEQ ID NO: 44509 - DNA, 371 bp, Zea mays
  unsure (1)..(371): unsure at all n locations
cgcctcagtgtaccacccgcaatccaacggagttgtgtaactcgcatatggcaaaattntcacagccgtcaagaagatgctcctcgacgacaaaaagggcaagtgggccgacctgttacctgaagcggtctgggcactgaacacgactgagtgcacggcaactgggttcacccctttccgccttctatatggatcggaggccatgaccccgcaagaaataaaacatgggtcaccacggacagtcccgtcagttcgtcccgacgtggacgagcccacttcgaaggacctcatcgacggagaccgtgtcttcgccctacaggctctaaaataataccaagctcaaacaaaagcatggcgcgaccacacagtca

SEQ ID NO: 44510 - DNA, 247 bp, Zea mays
ttttgcgtcccacatatacacgctgcagcacattatatttttatttccacactcttgctcatcgcattatgcacgtaatcgtgctatatgaacatattgttgtttaattaaagcaacgtgatcatgaatagcatcaacattaacatctctacatctagtactgtcggcgattcgagacagaggggacccttatccaactagtgagtgtgctgcgtgccccatctcatataggtcaagcgcgtgggct

SEQ ID NO: 44511 - DNA, 416 bp, Zea mays
  unsure (1)..(416): unsure at all n locations
ctcaagcttgagtcaatcattctgcacaacataagtgatgcgtagtatgattatctttgtatgaagcacataccacagaagattatggctggaacagccaacatgcttcaatgaagactatcaatgtgtgatatggtttataaaccgcatagtattgccaaagaactaaaaactccgccagccaattctcgatgaagcacatcatagacgttattcaattcatcccggatgcactaagatgtaataagacttacaacaacaatatnggnggacaaagatgaaaatcacaattgcacgctatgtggctaactgagacactngcagacgtgtcaaggccatacacatgaacattgctggtccattacaatctcttgcaatcacaacatggagatgggaagacatcagtatggacctta

SEQ ID NO: 44512 - DNA, 220 bp, Zea mays
  unsure (1)..(220): unsure at all n locations
attctcccnccggggatgtgtctgaacccanaacaccgcaaacaaggaggggagttttttcggcccccgggggctaccgaagcgcgcagaaaaaaaccagggcggaccaatggacagcggagaaaccagaccgcgggacaatataagggcccgaaaaggggccgggcaatctacagggcgagcgcgagaaacgcgcacgacaaacggcagcaacccccaa

SEQ ID NO: 44513 - DNA, 391 bp, Zea mays
  unsure (1)..(391): unsure at all n locations
acctatgaaactcagcttcgcaaactaatacttttcgacagagtactgataaccttctctccagtntggnctcggaggcatccaaagctttcgtcgtcaataccgccgaagagtaacgctcctggtttgtaaccacaagatatagcataatctctcatctcctctttttcagccttcgataactcttgaccaattatgttttgaaaatcgaaatccttttcatccgaagtatcttcggcgatctcccttccttttccaggcactgtggccagcgactcttcggcgggtgcagcagcttcttccgcggccatattcaaaagcattctattaatatcagaaaatgtgccctccagatatgtatcttccgccgttgcagcttcagcagttgcag

SEQ ID NO: 44514 - DNA, 378 bp, Zea mays
cgttgtctttctcccgggactgcagttgccttctatattactattacaagaaataacacttgaaaacaagtattagtctcaaagacttagattatagagtaacctccccctgaaagtgtgcatacaagttttgaatacttggaggagacacgcacttttatttgatatcaagaggggcaaactatctataatccgagctttggcacatataaattaaatgatatcaattgaagtattataccactagtagtatcattttgtagtatatgtcatatggaaataccaattgatgtatcattttcttaggaatgttaaataagctatgtgccgtgcttaactaaacatattataccatgtaggtgtgctcacaaatatgaa

SEQ ID NO: 44515 - DNA, 507 bp, Zea mays
  unsure (1)..(507): unsure at all n locations
gaattcgaccactactatacattaatatatttactatttagatatgttatgtgagaattatattagcagattcatcatcaagtgttcttcattactgtttaattagctnttgttagtatgtatacttanaaacaagagtagtcaaaggtgtctacatgaggctgtgtccatttcctaattggaaagtaaattggaatgcacatagtggcagtttcataaatatacaataaaacacgtggtgggtatgaatgcggtctaaacccaagatacaatcccctatacaatcccctattaggctattacgtaaaaaaatactattctgtaagcaaaatatagttgctaaaacaaccaatggaactttctatcgcanaggtncttgacgtagtatataattctacagaaatataatatgatcagattttgtacgatcccctataggctattacgtaaaaatacttatctgtaagcaaatataagtgctaaaacatcaatggaacttatatccaa

SEQ ID NO: 44516 - DNA, 394 bp, Zea mays
  unsure (1)..(394): unsure at all n locations
aacacttacaattcaatcagcccttcctctcaactntatcaacctcacttttgttttgtagctttgtatctcacttctacttcttgatgtgttggactcttagcatatataaagtgtcttcaatattactttgtaatgtcttctatgaatcttataatgtattctttaaagtgtgcatccttagagcctcagtccaatccacttcgcatcctgtgaacaaatacttgngaaatacattagtccacaggttatgttgatcatcaaacaccaaaacctattgagctaaatggcccggngctcattttcttacacatctcccctttttggtgatatatgacaacacaaccaaagcangcaaataatacaattattcgaatgataatatgcaatctac

SEQ ID NO: 44517 - DNA, 484 bp, Zea mays
  unsure (1)..(484): unsure at all n locations
gcctaactaatcctcttccagaacgtgaaacgctcttcttctacaggaacacttagaggactcattatcacctacaacaacatggggtcgaaaaccctgagtaccgagtgtactttcgcaagtcttacccgactaatgaaaaatgactctcaaggatatgctggtttagtaggaatcaaggacgaggctttatcaagaatcaacatagatacttttgcagaaatagcttactacagtgagtccttactttcaatattntaacgccagagtaaatattaatagactctggctgcatctagactaatttcaccatctcatcaatacaacatcatttttattcataatgtatacatactgacttaggttgcatggcagcgatcaagtcttcactcttcgtggatataaccgcgatccgaatccattactcagctgacgatctttaccacacgacatatgtagcacttaacccttgatatgtcaccat

SEQ ID NO: 44518 - DNA, 332 bp, Zea mays
  unsure (1)..(332): unsure at all n locations
ctaagcttcgcgatgggtaaaattttgcagcaaacagtgcaatagtatgtatgctgtggnnacttcacacctactcgtctgtttatatagtactgcacgtaagaacgcgaagcgccatgatttttacaccaggcggacacccgcttgcactcgctgtgcggtggaccgcagagaccaaacagtaactctgcaaggtgggaccgctacgccctgggaaattgaattcgttctcgacaaccagctcacggaaggggtttttggaccttcggctccccaaagcctaagagactttcttcacggatcaagctcgttacgataaatgatctatcacc

SEQ ID NO: 44519 - DNA, 456 bp, Zea mays
  unsure (1)..(456): unsure at all n locations
tctcctgacgagtgctgacttaccgctgagtgcgaagctgctcttatattaacagcggagccactggcgttggtggagttagtgttgatacgtctatcaaatattgcttcacttttcaaagctctctgctagactggtccccactgagaaacttcacttgattatactacttcgaagaatggtaagtttctctctgctgatctacatataaatctcgtgagagaagtcacccttctgtcaatctttgagccgcttcttgtacttggtggtccattcaaagatagctcgatttgttggatagcttcatccttttgtgagactaacaccaaaaattccttttttctccgaaaccattntctgggtaacttaaacacctgctaaatatcgaagctctgcaatcacatggatatttgttcggcttttcatgaatcataactaagtacacattctgctatt

SEQ ID NO: 44520 - DNA, 445 bp, Zea mays
  unsure (1)..(445): unsure at all n locations
acagacattacccagcatgattttacgccagatctttacggcatgaaccaccgcagctagctccagatcatgagtaggataatgttcctcatgtcggcgcaactgccttgaagcatatgcaattactcggccttcttgcattagcacacagccgagaccactgcctgatgcgtcacaatacacatcaaagggcttattaatatctcggtgagccaataccggagcaatggttaataatatcttcaattgctcataagcttcattacactntgaagaccacattgaattaatatcattcttcaataaactcgtgattggcttcacaagcttagaaaaatctggtatgaatcggccgtaatatccagccagtccaaggaaacttcggacctgatgaacagtagtcggggggttccactccanaatgtccttgactttgctgggatct

SEQ ID NO: 44521 - DNA, 435 bp, Zea mays
  unsure (1)..(435): unsure at all n locations
atataacgaatatataatatcatatgtattatcacataatatnttgtaggattcgcataacaccatgactggatgtgaacatgcattaacaataataacaactggtaaccaggtacatattaaaataatattgtttatttgtctaaaatgaaaatataattctatgctgcatgtaaatgttgatgtatttgggttgggctttaaaggaggacaacatgaaaatttcacatgaggttggtgatacaagttctccgtgtcacgtagcacatgaacaattggaaaatattgctgcatcgtcagaagctaaaaaggtgagcattgataaatgaatctactgattggataaatatatgtaatatgcatatacttaatagaacgtctattattatcagaggtgaatttaatgtggatgtataatctgagatgccgatcggc

SEQ ID NO: 44522 - DNA, 432 bp, Zea mays
  unsure (1)..(432): unsure at all n locations
agcttcggaactaaactnttcacagagtactgatatcttgttcattttggctcggagcatccaagcttcgtcgcaataccgccgaagagtaacgctcctggttggtaaccacaggatatagcataatctctcatctcctctttttcagccttcgataactctcgaccaattatgttttgaaaatcgaaatccttatcatccgaagtatcttcggcgatctccttccctcttccaggcactgtggccagggactcttctgcggttgcagcaacttcttccgcggccatattcanaagcattttattaatatcagaaaatgtgccctccagatttgtatcttcggacgatgcagcttcggtcagtgcagcttctgaggtggtggtggcagcttctgtagctgcagcaacttctgcagcacggcgtatctttgtc

SEQ ID NO: 44523 - DNA, 321 bp, Zea mays
  unsure (1)..(321): unsure at all n locations
tgtctcangagggtntgactctgttgttaatgtctgtggattcttcaatggtagttggaagctggagagtgctcttatctctgacatgcacacagattgtgtgagggatgtcgcctgtgcaccagttttgggattgtccaagtcgaccattgccagtggttcacaagacgggaaggttgtcatctggaccaagggaaaggatggagacaagtgggagggaaagctcatgcgtgacttcggttccnctgtctggagagtgtcgtggtccttgactggcaacatattatgcatagctgctggcgagaacaacataaccctctg

SEQ ID NO: 44524 - DNA, 450 bp, Zea mays
  unsure (1)..(450): unsure at all n locations
agctttgagctccgctttgaaacagtttttattgtttccgaagatgtctgaagctgctaagaaagctgctgctgagatgaagctgagtcttgatgaacagaagaacttatggtttcttatagcaatgtcgaagaccaacacagaaaagatcaccagggaaattctggaagggctgtctgaagatactggtgacagtgaacagtttggtgtggacagcggtggcgaagacttcgaagatcgcccctggcgaccaagccattcagtttatggtaaatcaactatcaaagagaatcatcttgttaatatgagaggaaggtatntccgggatctgtccattgtgagggcggacgaaggggaaaagactctgccagaccccgaagaanatgaagtcgtggtatttcgaagctttttgaaggctgggctgcgattgcccttgagcagcttcgtcgt

SEQ ID NO: 44525 - DNA, 426 bp, Zea mays
  unsure (1)..(426): unsure at all n locations
tgggaagctatccgaaggctcggatcgagctgagatgggcggggatggtctagccacgactggcgccctcgggcggctctggcgggtcgcggggaggtcgccggagctgcgggcgagctctggagaggtaggcgcggtgcanaggaggcaacagggaagatggtcgtgcacgagggtgggctntatagccgctcgcgggcacggtacgggcgtgggcacggnggtggctgaccatacgcggnggcgcgcgcgacagcggccagtgcgcgctcggccggtcagacaaggcatcgagcacgtggcagcatttgttctggtcatcttcaagcgtcgattggcccgtgatctcttcgtatctatccaanatccctgtataagatttcttccttgttgtataccctctgtatctcatgcagtgctcgagtg

SEQ ID NO: 44526 - DNA, 416 bp, Zea mays
  unsure (1)..(416): unsure at all n locations
cttgagcccctcaggcattcgaagatnacaatatgtaccactggnggttatgaatctggtctttggctcatcttccttcttcatccaganttggtggtagcctgaataacaatctagtagactcatgagctctgacgaagctgctgcatctactagagaatctattcttggtaatgggaactcatcctttggacaagccttgttcagatcagtaaaatcaatgcacattctccatttaccatnggccttcttcaccataacagtgttggctaaccattctgggtattttacttctctgatgacaccagcactgagaagtatttntacttcgtttcgagcaccttcggctntatcgtcagacattttccgaagcttttgctttctgngtctgaaggatggatcgacattgagtgaat

SEQ ID NO: 44527 - DNA, 336 bp, Zea mays
  unsure (1)..(336): unsure at all n locations
ctagcatttgcgtaatgaggactctacggagaagcctcgtattgagaccctggccattcacctatgaagtgaatacgggtctagctaaaccgggctagaagggaatagcgactcatgggtaaagatgtgccacctctgcagagtgtaaaactgatatatcagtcgtgctcacggttaagagcagcctggactcctcacatgataattgaacttgaagatggaaataaatcgagatccgatgatctgccaatatnttgcttaagtggtttcacttaagtgtgtttaatatactattgtacctatgtttaatgggaatacttgngattcacacttatt

SEQ ID NO: 44528 - DNA, 451 bp, Zea mays
tttctggcagctttctgacttacatgaatagcaatgggcccttgatccgaagatatcttcatgcataaatatgctggatgaagaatatcttcgaatgcattgagtgtttcacgaccaatgattgcattgtaagaatattccatgtcaacaatatcaaacacaacctgttcagttcttgtattgtggacaaatccgaaggtcactagcattgtgatcttgccaagtgctacaatctgtctttctccaaaaccacagagagggtgtgtggcatcatggatcgtatcctctggctcttgcatctgtctgaaagccttagcaaatatgatatccgctgcactgtctgtatcgaccacaacaatgtggactaaaatctcttgagacacacgatagaccatagcatcatgtgagggaatccttggctgaaattcctttggagaagaattggatgtga

SEQ ID NO: 44529 - DNA, 329 bp, Zea mays
  unsure (1)..(329): unsure at all n locations
taagcttctacaggagaacacgtgataggtctaacttatgttacatttcttatattatataccntgtgcagcttgtcaagcagggaaacatgtgggaggctctcatcacaccaaaaatgtgatgaccacatcaagacccttggagatgcttcatgtcggcgtttcgagacaggagggtccctaagccgacgagtgagtgtgctgcgtgccccaacccaaatgggtcgagcgcgtgtgcgatcgcgaatgtgggagaggcgaggcggtcggtaccgaccgtgagagacgtggaagtcccgcggccttcttgttcgtcccgcgcccaggtc

SEQ ID NO: 44530 - DNA, 414 bp, Zea mays
  unsure (1)..(414): unsure at all n locations
tgtgaaggttcttcatccncacatgtgctaagcggcgatgccacagccagcccatgctagtcttagctattaagcatgcatctagaccggcctcttcttttgcaaaatctactaaataaagtttgccgtctaatacacccttaaaagctagtgaaccatcacttcttctaaagacagacacatctacatttgtaaatagacagttatatcccatattgcataattgactcacagatagcagattatatccaagagactcaactaaaaacacattagatatggagtgctcattagaaattgcaattttacctaaaccttntaccttgccttgattcccatcaccgaatataattgaatcttgggaatctttattcttgacgtaggaggtgaacatcttcttctcccccgttatat

SEQ ID NO: 44531 - DNA, 466 bp, Zea mays
  unsure (1)..(466): unsure at all n locations
ggggctaccaccatgcagccggagtgcggaggtgatctcttatgaacgtncatggaagtacaagagggagaccccgctcggacaccctcnggggctgggtcataatttgcgctgcccacttgagccggatcatctctagcagtaccctcgatggctgagcagtggcttgcgcttcccacccaagccgagtcatccncggcaacatccttcggggctgggcaagtgtcaacaccgtccttgagaaccaagttctctgcaatagccgcctctaatgctgatggacccttagttacttccatgggaccaggacgatccaagtcagtctcctgaccctcgagaccgcgctctaatgtcgacgaggcacgggatgacctcaatccagcgtcgagcacatcagcacaaacctccatcacaacatcatctgccggctcgataacagattctctgaaccatattctaagagtct

SEQ ID NO: 44532 - DNA, 442 bp, Zea mays
  unsure (1)..(442): unsure at all n locations
atactcaagctcgccttcgctncagtctatcatccgcagtgcaacggtgtcgtttatctgccaatgggataatctcacagctgtcaagaagatgctcctcgacgaacaaaacgcaaatggagccgattattaccggaggcagtctgggcgctaaacacaactgagtgcacggcgaccgggttcactcctttccgccttctatactgatcggaggccatgaccccgcaagatataaagcatgggtccccgcgtacagttccgtcagccgtccccgacgtggacgagccaacttcataagatctcattgacggagaccgggtcttcgccctacaggccctaaacaaataccaagcncagaccaaaacatggcgcgagcatgcagtcatcccgagggagttcagcgagggggacctcgtacttcgtccaacagcttggacggagt

SEQ ID NO: 44533 - DNA, 339 bp, Zea mays
  unsure (1)..(339): unsure at all n locations
ctgatctctntggtattttctgtcactatgtcgaactcgtctgcaatctgcatcgcagatgatcactacagttcaccctcgactcttgtgttcccattgtaggtctagatcgtttttttttttttgcctcacttggaagagatgggaatctggaggagtaagttgctttaaaaaaaaaactctgtttgatccctccctatacacagataccgnttattcttcttctgtgtcatgtattgccccgctgcacatggtgccagaggatgaggtgcagcctgcgtgcgtgctgcattatgctgcctcgcccatcacccacggacatgctctcatgtgggtttg

SEQ ID NO: 44534 - DNA, 477 bp, Zea mays
  unsure (1)..(477): unsure at all n locations
agtagcatatgcaagtaaaatgcgaattgattctatcctagctacgggtgcataagtttcaccaaaatccaaaccttcaacttgtgagtatcccttggccacaagtcgggctttgttccttgtcaccacaccatgctcatcttgcttgttgcggaagtcccacttggttcctacaatattttgattaggatgtggaactaaatgccatacctcattccttgtaaaattgttgagctcctcttgcattgccaccacccaatctgaatcttgaagtgcttcctctaccctngttggctcaatagaggaaacaaaagagtaatgttcacaaaaatgagcaacacgagatcgagtagttacccccttntgaatgtcgccgatgatggtgttcacggcgtgatatcgttgaattgcttggtggactctcgggtgtggcggccttagaacttgttcatcttcctcatcttgatcatgggcatc

SEQ ID NO: 44535 - DNA, 391 bp, Zea mays
actgaactctattagtttgtgagactaaacaatatctctttacataaatggggtttgaacatgacttgcatttacaagagacgggcaacacaagaaactgcatgtaagtgtgagaaggatattgtagcttacaaaccactccagaaacaaatacatttttaggggttgttctattaagtaaattatattaaaattatagctctcgctactacatagcttactttcactacctggtcctaatttaaaatataaaatagataggggtccttataaacctgcagtgaaggttcatatcactgttggctcaaccaacacaccaacgatgatatatcactaccagtttaagttgtgagactacagtgatactgaggttatcaagctagcagtgata

SEQ ID NO: 44536 - DNA, 409 bp, Zea mays
  unsure (1)..(409): unsure at all n locations
ttggttggacatgttctatgaagacccttataagcaccagtgcgtagtgggattctaaggtgcgatagcaatgggaagagatgaagaggaagatcacagttgacatgggaagaggcagtaaaaggagactctgaaagatggaatatacctaaagaattagcgaggagtgtatggaaaacactattcatgtgttcgttccttgacttgtgggtcttgttgggtttaactctagcctacactaacttacttgggactaaaatgctttgttgtcgtttgtataagtggttgatgttcggccaagactcatgctctagtggcctattgggcttattgtattntcccctcttaagatgataagattagtatcactcaccccttatacttttgtgaactgcagctagcatgtttg

SEQ ID NO: 44537 - DNA, 371 bp, Zea mays
  unsure (1)..(371): unsure at all n locations
gcttatgacttatcatgattagtgtagggaggtcttcttgctatgtacatcatgggtatccatagntgttcctagaaaagtgtcttgattatgattaagggttatcatgaatattgtagaagcttctaaaaacttggntatgcttattatatgacaatttgttaagtgagggtttgcttgcatattttcaatgggcaagtgatggccttcgggaaaagtgtcttaatcgatgctgaggtcataacttatatagtntaagaatgactncgagggaggaagaggtcgaagatcatggcatgctcacctacggctcaaatcgacagtgatggcttgttctctggtttgagaataangcaagtgttgtcggatgt

SEQ ID NO: 44538 - DNA, 496 bp, Zea mays
tgtatttcaccatggtaaattcttgaaaacgtctgatgcctgcccgccatagcgcacactaggcagagggagcccactaccacctgtggcaaaacacatgcgtaaagaaatcgtaagcctgcctctagccgccttggcttttgtgcatcctagcaagccccacctacaccctatgccctgatacagccttgtcgtgcacaccaagctgctatattaaagtgtcaggttgcagaccttgaagtgatacctcagtgcagagagccactccggcaagacctcgtgcacccgcctgagcacccgccagtcacttgtcacaatcacaactaaatgaatgccccaccatgagccaagttaccctgccaacctcaggatgttgcgactgcactgtggcaacgtcaccactcacagtacgctggtcaagactccattataaaccgcgttcctccgcctataaatactgacgcccttgccgcggaacctcacagtccagccacca

SEQ ID NO: 44539 - DNA, 399 bp, Zea mays
  unsure (1)..(399): unsure at all n locations
gcttgtatcctcgggattgtaataacattaatcagactctgtatccatntgaagtaatgaatgtgggtactagcctcctgggactagtaattgtatcacatttgagtcccaaaggatcgaaatgcttcacgtggtatcaaagcctgtatgactggccgtagaccgcagccctgaccttaataaagtgccttaacaagaaaacacctcttacccccaagaaacactctccccttttcccgatattaacataccccttcttttcttctaccagatggaagactcctgggttattaagacatcctattgctcangggaagaaagattccctgacctcttacggagttgcgcgctatgcatggngatccgtaagaagcctgaatatgtctggaaggaatacca

SEQ ID NO: 44540 - DNA, 449 bp, Zea mays
  unsure (1)..(449): unsure at all n locations
ttaaagggagaacatgtgatanggttaactaacgtgtcattcgaataagatagaccttgtgcagcatgtcaagcaggtaaacaggtgggaggagcacatcacagcaagaatgtgatgacaacatcaaggcccctggagctgctacatatggacctcttcggacccgtcacttatctaagcatagggggaaagaagtatggcttagtcattgtggatgattnttcccgcttcacttgggtattctttttgcaggataagtctgagacccaaggaacccttcagcgcttcctaaggagagctcacaatgagtttgagctcaaggtgaagaagataaggagcgacaatgggtccgagttcaagaaccttcaagtggaggaataccttgaggaggaatggatcaagcacgaagtcctcgctccctacacaccaccacaaaaatggtgtggtag

SEQ ID NO: 44541 - DNA, 521 bp, Zea mays
  unsure (1)..(521): unsure at all n locations
cgacactctcaatactcaagcttcggataccccatgttatccatcatttcgtggcaaacattgatttccttacaatatggtagacagtagaggaagtcatcaacattatctcctccgtatactaaggatccctaggggtactttagctccttagcataatgatgtgtttcagcatcttgctctgccgatagctgctttcccgaagcatgtcgaacaatgtaattcaaatcactctgagaaggtgcttcgggagcacgtgttgtgggtctttctggaaggttctctttcataagtttttctggcgcagcttctgaagatcccgcttcaacgtgaatagaagaaatgtatgcagtaatcacttctctggcatcttncaatttcttgccagaagcttcggcagaagtaggaggtggcgtcttcacatattccagaacagcatccaaaacactagccatcctcctcttcctcggagttgctgtcgctgccagcaccttcggctgctctactgccttctctgattc

SEQ ID NO: 44542 - DNA, 262 bp, Zea mays
gaaacaattatcaactatatattcattatttgatatgtctttgtagagcatgaaaccttcgtacatatcgtttttgagccgcatgcgaataaataccttcccttattttcacgctccatagagatacgaatcctcttatgtgtcgaaacaccttattatactcgaaggtcgtgccatagataatgcatgagtatcgctgtctaatgcacgcatcttgtataagaatacccgtgtcgaacgcatatatcttgcattattgata

SEQ ID NO: 44543 - DNA, 367 bp, Zea mays
ctacacaacggacgtgagaagcgccttcctcactggaccactcaatgaggatgtctatgttgagcaacctcccggctgtgcagatagtgagtaccctaaccatgtgtatagactctctaaggcgctctatgggctcaagcaagccccaagagcatggtgtgaatgcctaagagatattcttatcgctgatggattcaaattccgagaagccgatcctactatattcactaaaactattgcaaatgaattgttcgtatgccaaacttatgttgatgatatcatatatgggtctactaacaaatctacttgtgaagaattcagtaggaacatgattcataaattcgagatgtccatgatgggggagttg

SEQ ID NO: 44544 - DNA, 509 bp, Zea mays
  unsure (1)..(509): unsure at all n locations
actcggcttctnagggagaacatgtgntaagactaaccgatgtctgttttgataaaggcacaccttgngcagcgtgccaagcacggaagcaagtaagaacaagtcatccaagcaagaacgtgatgacgacatcaagaccactggagcttcttcatatggatctcttcggacccgttgcttaccttagcatcgggggaagtaagtatggtcttgtaattgttgatgacttttcccgcttcacttgggtattctttttacaggataaattcgaaacccaaggcacgttatagcgctgtctatagcgagctcaaaatgagttcgagctcaaggtaaagaagattangagcgacaatggatcagaattcaagaaccttcaagtagaggaatatcttgaggaggagggcatcaagcatgagttctccgctccctatatctcacaacanaatggtgtagtggagaggaagaaccggacgctcatcgatattggcaggacgatgctaggagaatac

SEQ ID NO: 44545 - DNA, 456 bp, Zea mays
  unsure (1)..(456): unsure at all n locations
gcttgaccacactatttgacattgtacataatatttctgatatcaagaatatttagatcattcctcaacatgcaaaagcgggtcttatcaagtggcttagtgaaaatattcgctaattgatcttccgacctcactccttctaagatgatatctcctttagcaacatgatctctaaggaagtgatgacggatatcaatgtgtntggtgcgagagtgttgtacaaggttattagcaattttaacagcactctcattatcacacaacaaaggtaccttttctagaactacgccatagtctagaagagtttgtttcatatataaaatttgtgtgcaacaagcacctgcgacaatgtattccgcttcggcagttgacaaggcaacactattttgctttttggatgtccatgaaactagtgatctaccaagcagatggcnatccccagaagtactttttcta

SEQ ID NO: 44546 - DNA, 496 bp, Zea mays
  unsure (1)..(496): unsure at all n locations
ctggtatatctnttggatggggttgttnntgccttttatatctaatggtagccgttacaatgagaactagtatcctactagggtggagttcggtctctcgtttctaggtctcgtagcccctatggtgtcgtgcgccgccatacccccggtatggtgtcgtgtctcgtccgttcgtcaatgggttcctgtaactgttccgatatatacgtaatggtgcttgttgggtccggctgagtcagctggaggtgaggtttaaggatatcttcagtacatcttcatcttccgtcacccccttagcgtcacctttaatcatgcgtangcatatgcttcgtacgcgcgtattgccccgtaccttctggcgtacgggtcaaagtagagaccccgatgctgaggtccnctgcggctagggttgtctggtcccactagtccgcggggatacacatcctgcgtcgtgtttgataaagaccctttggtaccacttccacagtctggacat

SEQ ID NO: 44547 - DNA, 329 bp, Zea mays
caattttctctgctgtcggactcacatcctggggctcggctccagctcgaaagaaaatgaaacttggcaggcggtgctctctattaactgggaacacttcattctgctggctaccttgcatcacagaaaacttacttgctggctgcactccgcgcacttcaaggagtaagtatacgcttccttcggtcgaacaataaggtctgtctcactgttggactcgaagtatcatgggctctttcccatctaacatatgtgtgctccggaccaacactcgtttcatcgttgatctcctaatcccactgggaactcttagtaagctgcagctcatc

SEQ ID NO: 44548 - DNA, 361 bp, Zea mays
  unsure (1)..(361): unsure at all n locations
ctttcttaacaggtggtactacatctaatgggctatactcaacgctccgcgccttggcgggctctttctattatttaccgaaacacacaaccaccaccaggaagatacaaaacctcttttttacaatatgggaagttggcccaatagtccctccaatttgaagtgatcaagccaccactggtaccaggagggaactggtactaccacctcctccagctctagctgagctctccagatcttctacatcagtgagttgcaatgggagcatctcaacatcctctggtagaatctgtgtgattcaagccttctgggacatcatccacccgcaactgctntctctcttgcagctctttcatagcaa

SEQ ID NO: 44549 - DNA, 362 bp, Zea mays
  unsure (1)..(362): unsure at all n locations
gcaagcttgctggacgtcaccctcatacctgagactactgtgtttcagcccccgacatgactntatcgccgctcgtcgaccaagaggtaccgaccgattcccgtcccacgttatttggattcagcctcaacccgcctagcaaccccgctttggcgggcgctctcgtagaggcgagtccaaaccctctatggttccgcatgcggtcgccttgggacccgctgacggacgtctcgacctacgggccctctaggtccgaggaagacgagcccagcatctgctgggatttctctggacttggcaaccccagtgccatgcgggacttcatgaccgcatgtgactactgcctcttcgactgatccgac

SEQ ID NO: 44550 - DNA, 438 bp, Zea mays
tctatagggagaacacactttaggattaacaaatgttcattttgataaagacaggatatgtagcgcatgccaagcaggaaagcaagttggtgcccatcatccacacaagaacatcatgacgaccgacaggccactggagctcctacacatggacctattcggcccgatcgcttacataagcatcgacgggagtaagtactgtctcgttattgtggatgattattctcgcttcacttgggtggtctttttgcaagagaaatctcatacccaagaaacactaaagggattcttgagacgggctcaaaatgagttcggcttaaggatcaagaaaattataagcgacaacgggacggagttcaagaactcacaaattgaaggctttcttgatgaggagggcatcaagcatgagttctcttcttcctacaccccacaacaaaa

SEQ ID NO: 44551 - DNA, 385 bp, Zea mays
  unsure (1)..(385): unsure at all n locations
atcggtagttacgaaggtggcagctaagcaacttcggcgggtgcctatcattcctccgctgtcaaggctgttcctcaacacacgaaataactctgcatatgacgtggccaaagaatggtgtacgtctcgtcactgatccagacataatggtccattcctctgaccgtgatgcgtggaaagcatttgacgagtttgatccccaatttgcaacgaccctacgagtgtacgtgcttggtctatcgactgacggattcacaccttttaataccagtgcaagcccttactcgtgttggcctggcttcattgtgccatnatatacttctcctgaagtggtccattaagaagagatcatgttccttgcactagtcattccaagccccgagca

SEQ ID NO: 44552 - DNA, 496 bp, Zea mays
  unsure (1)..(496): unsure at all n locations
agcttgaagccatggtaagtagtaatatgtgaattgactcaagcctagctacaggtgcataggtttcaccgaaatccaaaccttcgacttgtgaatatccttggctacaagtcgggctttgttccttgtcaccacaccatgatcatcttgcttgttgcggaatacccacttggttcctataacattttggttaggacgtggaacaagatgccatacctcattcctcgtgaagttgttgagctcttcttgcattgccaacacccaatccgaatctcttaatgcatcttccaccctgtatggctcaatagaagacacaaaagagtaatgttcacaaaaatgagcgacacgatatcgagttgttacccncttatgaatatcgccgaggatggagttcacggngtgatctcgttgtatcgcttggtggactcttgnngtgtggcggttntgaccctgttcttcttgatcatcttccttttcttgatcattatcatctccc

SEQ ID NO: 44553 - DNA, 366 bp, Zea mays
tctaaaggaagaacacagtttgtgactaaccaatgttcattatgagaaagacggtttttgttgcgcatgtcatgcatggaagcaaggtggtgttcatcatccacacaagaacatcatgactaccgatatgcctcttgagctactccacatggatctttttgggccgatcgcttacataaacatcggcgggagtaagtattgtcttgtaaatgtggatgactattctcgcttcacttgagtgttctgtgtgcttgaaaaatcacatacccaatagagcttaacgggattcttgagacgggctgaatatgagcttggctgtatgatcactatgaatacaagcgacaatgggacggagttcaagaactc

SEQ ID NO: 44554 - DNA, 162 bp, Zea mays
tcttgtggttcatcttgcatcaatccatccgggcagggacacgcaatattaaattcactaatcggttgaggggtcccgtgggtcccaaacactgatagaaatataatgcaaataagttcaaaagtccttcataaagggatgcagaacttataccaccgaaat

SEQ ID NO: 44555 - DNA, 478 bp, Zea mays
  unsure (1)..(478): unsure at all n locations
tcattctcaggtgtaatttctccatttcttggcataatgggatgtcagaagtctttactgtaagacaatggcaggaagccttacgacttagtgcatctgccaccacgttggccttgcctgggtgatagtgaatttctaattcataatccttaatcagctcaagccatctcctctgcctcatatttagttctaactgagtaaaaatgtacttcaagcttttatgatctgtatatatatggcagatatttcccagcagataatgacgccatattntaagggcatgaaccacaacagctaattctaagtcatgagttggataatgttcctcatcctggcgcaactgtcttgaaccatatgctataactcggccctcttgcattaagacacattcgaggccactggctgatgcgtcacaatacacatcanaaggctnttcaatgttcggttgagccaataccggagcagtggtcaataatac

SEQ ID NO: 44556 - DNA, 415 bp, Zea mays
  unsure (1)..(415): unsure at all n locations
agaacatattgtgggactaacatatgttcattttgagaaagacaggatttgtagcgcatgtcacgcacggaagcaagttggtgttcatcatccacacaagaacattatgacgactgacaggccactcgagctcctacacatggacctattcggtccgattgcttacaaaagcatcggcgggagtaagtactgtctagttattatggatgaccattcttgcttcacttgggtggtcttcttgcaggaaaaatctcatacccaagagaccttcataggattcttgagacaggctcaaaacgagtttggcttaaggatcaagaaaaatataagcgacaacgggacggagttcaagaactctcaaattgaaggctttcttgangagganggcatcaagcatgagttctcttctcctaca

SEQ ID NO: 44557 - DNA, 483 bp, Zea mays
tctttgcgcgtctctactcgccctacattcgtcggactatagccagcgccttgctgccctcgccaaataccagcgcctctatctggtgtccccttgccctcgccgaatgccacacagtcaccgcgccattgttatggcttgttgtactcgtcgatcgtgcctcaccaatcgtcgccatgctccattgctgcctgcacgcactgcgtcggtatctgttctcgccgttgacgctgctgacaatgaccgctgtgccaagtttgccgaagcattctacgtctacgagtcctctcgctggagtgcgctgccgtgccggttacttgcccaatctcgatcccaccagcagcagacaccattcttcgctagcaaccttcgtagctcgtcgaggcctgtgcacatcgtcagaacctcgcgccgtcgacccattcctcgccagttgaagctgctactcgcgccttgctgcgtacgccatcgtcgtcgtcagga

SEQ ID NO: 44558 - DNA, 394 bp, Zea mays
  unsure (1)..(394): unsure at all n locations
tggagaagcagaagtccctgaagtcttgtgctgtcaaatgnttgccattgtcaactgtgagctcggacgggactccgaatcgacaaacaatggtttgccagaagaatttctgggcagtcttcgatgttatcgtggatactgctcttgcctctatccacttggtgaaatactcgacggcgacgaaagtgaacttgaggttcccttgggccgtgggtagcggnccgacaatgtccaggccccagcgctgaagaggccacgtgtgggctattagctttgtgaactgcgaagggtttcccgagcgtggagaaaatttctggcaggcttcgtaggacctcatcacccgattcgcggcgcanatcatagcangccaatagaagccttgacggatcacctt

SEQ ID NO: 44559 - DNA, 347 bp, Zea mays
ctaggaagggcttaagccgcagtgacaatttttatttctatccagcccatgctagtcttagcaattaaacatgcatctagaccggcctcctcttttgcgaaattaactaaatacagtttaccgtctaatacacccttataagctaatgaaccatcacttctttttaagacagacacaattataattgtgaatagacaaatatattctcatattgcataattgactaacagatcacagattatattcaagagactccactaaaaacacattagatatagagtgctcggatgaaagagcaatttagctaaccctttaaccttgccttgattcccatcatcgaatattat

SEQ ID NO: 44560 - DNA, 460 bp, Zea mays
  unsure (1)..(460): unsure at all n locations
ctcaagcttctctgcccatctgagcagtntgagcaagaaaaacaggaacttaatgctattctctattccgaagctcaacanaattcagatttgataaaactattggtgggccttcatgaaatatgcttggaatttagcaacaaatgcattcagcgactaagaaaaatcttccactcacttggagccagcagtgagaaattcaccccctcagctgaagatttaccgaagacctttgaacatattgtgggtgaaattgatgatctcgacgaagttatatctgggcatggtgacttctgtgcctgggtagcttctccgggcactgctgtagccctcctaaaagctggctgcgatcatggaaagattgtcaatatgcccaatttcactttatcaccatcaatcctagatgacattcctgatctcgcccgaagtatctccaatagaatttgtaaaatgatatgga

SEQ ID NO: 44561 - DNA, 306 bp, Zea mays
tgcattctggaatgcataaactgtcatgagcattacacttatcctatgacacaatgcacttcacattctatatgaattagatatgctctcattaacctatatatgtgcaattggcatattatgccacactatgtgttctctccatgcacatatttaaggggagcaatctatgttgcatagaactatgatcatgcttaattgacatatctcttgatcatatctctgtcattttggtacacatgcatatatcctattattccccgaccatgactacgactaatatgtttccaagtatactactatgct

SEQ ID NO: 44562 - DNA, 495 bp, Zea mays
  unsure (1)..(495): unsure at all n locations
acttagttgatttgcaaaagaagaggccggtctagatgcatgctttatagctaaaactngcatgggctggctggggcatcgccgcttggcacatgtggggatgaagaaccttcacaaacttctaaagggagaacacgtgataggattgactaatgttaaattctaaaaagatagaccttgtgcagcttgtcatgcaggtaaacaagtgggaggagcacatcacagcacgaatgtgatgaccacttcaagacccctggagctgctgcatatggacctcttctgacccatcgcctatctgagtatatgaggaagtaagtatggtctagtaattgttgatgacttttcccgcttcacttgggtgttctttttgcaggataagtctgaaacccaacggaccctcaagcgctttctcangagagctcataatgagtttgagctcactgtgaagaagataatgagtgacaacgggtccgagttcaagaaccttcaagtgga

SEQ ID NO: 44563 - DNA, 473 bp, Zea mays
  unsure (1)..(473): unsure at all n locations
ttgcaggaganagagatgatatgaaaccttggggtgcttgagagagtcatgtcaattcttgttaactcaagctatcaatcttcaaagatctatatccatgattgacccacggttatttttcaatttaccatatcttanattcatatcatctcgagggaagatattgatgttgtaggaaataaagaattatcctatgccaaaaagtcaagacctacaacatggaggaaagacaaaggatggtagcatttatggcttttaagtgcaagtaccttacaatatcatttcttatgtgtcttgtgtagtcacatagaaaaagaaagcacttcaaatgtttttaaattatgtcatcattctttgaagaaactcctctcatatggtagattgtatattcaccatttccatanttatggcatctacatgctttatattattgcacgttccccatggcatgttttacactaattatcttatta

SEQ ID NO: 44564 - DNA, 336 bp, Zea mays
  unsure (1)..(336): unsure at all n locations
ctactggaacactaccccacttagaaaggatgagggtagatctcttgaatcttggggatttgaactccttgaagtacctcataacaagggtgttacggggccttcttctgttgttgctgcttgagcangctgcggagagatgactgacacggggttgattctgggacaaccttcttcttatcttctcttcactatcttcttttcactgacactttctttctctattgctcttccactagaggattctatcaaagagtattaccatcacacattggagataccatagactatgaaccatgtacaacagtctttaacccaagaatcaccaaacattgt

SEQ ID NO: 44565 - DNA, 495 bp, Zea mays
  unsure (1)..(495): unsure at all n locations
atgagaatgacctaacaatctcttatacttaataaacagatcttataccattctcaatgaangtttcatgagtttcatgacattaattaatatgtcacatatcattnttgatgacatggcactacatttattatgaaataggtgaaactatcatttaagtcacatgttatcctataaaattgtgatataaaactcttcattgagagggtatatttcgttcttcatttcatctatgtggcaacattgaaaataaagttatgaaacaaccactgaaaatgtctaaggactcangttgtacgtgcccttatgcaccatggtttcttaattatttcattaattagaagcacaagtcttaagcgtaacgagtacttactgagagcacctagagggggggtgaataggtgaatcctgtaaaacttanaactcaaggccacaaacttgattaagtgttagaataatgaagccaagtggctagagaggagttctctttaaaca

SEQ ID NO: 44566 - DNA, 322 bp, Zea mays
ccatcacactggtactgaatattcagtttagggattgcctgacagctcgacttgggaccaaattatctctaatttattctcaacaactatgcttacacccttaagcaaaggtggtctcctttgataggtctataaattttgatgtggtgacctacggcgaaatccctaaaattgaaagttacatagctcaaaagatgagcccataacacctatttctagacttagagtggaatcacaattggggtcttattgcaaacttgtccaaactgacggttggcttgcatatcacacatttgtgaacaaatgacttatgatcttattt

SEQ ID NO: 44567 - DNA, 491 bp, Zea mays
  unsure (1)..(491): unsure at all n locations
tctaaagggagaacacgtgataggttngactaacgttcaattcgaataagatagaccttgtgcagcttgtcaagcaggtaaacaagtgggaggagcacatcacagcaagaatgtgatgaccacttcaagacccctggagctgctgcatatggacctcttcggacccgtcgcctatctgagcataggaggaagtaagtatggtctagttattgtagatgaattttcccgcttcacttgggtgttctttttgcaagataagtctgaaacccaagggaccctcaagcgcttcctcatgagggctcanaatgagtttgagcttcaggtgaagaagataaggagcgacaacgggtccgagttcaagaaccttcaagtggaggaattccttgaggaggaagggatcaagcacgagttctccgctccctacacaccacagcataatggtgtggtagagaggaagaacaggacgctcatcgatatggcgaggacgatgc

SEQ ID NO: 44568 - DNA, 424 bp, Zea mays
  unsure (1)..(424): unsure at all n locations
agcttgtagtctgtgttaaggtcaatacggtatttatcaatatttccatattggccaatacttctgaatgtctctgcgtaaggattntcccttagcaagtttgctaatttggtcatcacattctgatctttagctttgaagacttcgtcacgcgcaagacgcattcaatgcgataaaagaggatcatcatcgtagaagtacaactccaggtggtttggatcactttctcgacgaccaaaagagtgtatccggtgatatacctgaccatgtgctntgaatgtataaacaccatctcttgaacttgcaagaatttggtcatactcacagctgaatgtggtgaatgaaaagtgaccattaacaaatctagtgttatccaaaanatggtgtgaatcagcgtncctagttgtgtacaacaagtgaagct

SEQ ID NO: 44569 - DNA, 434 bp, Zea mays
  unsure (1)..(434): unsure at all n locations
gaccttgaaactcagctttaaggggaacacggaaggctaactatggactttcattttatgnacttggcagcttgcaagcagggaaacggtgggaagctctcatcatgccaaaaatgtgatgacaacatcaagacccctggagttacttcatatgggcctcttcggacccatcgcctatctaagtgtaggaggaagtaagtatggtcttgttataattggtgatttttcccgcttcacttgggtattctttttgcaggataaatctgaaacccaagggaccctcaagcgcttcctaaggagagctcaaaatgagtttgagctcaagatgaagaagataaggagcgacaatgggtccgagttcaagaaccttcaagtggaggagtatcttgaggaggaaggaatcaagcacgagttctccgctccctacacaccac

SEQ ID NO: 44570 - DNA, 349 bp, Zea mays
aaatatcaacatgttctacacaagaattggatttgtgtgctacttctaatatagcatttaaatcattgttgacacctttcaaagtagaaatgtgttcatgactagtagatagttcaaaagaaagcatttcatttctcttaacttctaaagcataggatatttgtgcctcaacaaatttatatgctcttcatacaacacaatctcttgcttttctaagagtatattcttttcattcaaggcatcaattacatcattaatcttggctatcttagatctatctaagcccttgaacaaacatgaataatctacttcatgctcatcactagaattcgcctcacttgaagaacat

SEQ ID NO: 44571 - DNA, 476 bp, Zea mays
  unsure (1)..(476): unsure at all n locations
cctataaaatcagcttctaaggctatattttagatgggtcgagcanataatcaacgttgacctaacgttctacagcagcaggcaaatattatcttcatatatagatgagtataagcgtagagttggaataaaaacagagtgaatggtactactgtgcattcaagcacctacatgattgcaatataattaggtagcatttaagtagcatttcagcagattatgacagtcttctacgatctgtgtaaaggagaaaataagcacgtatgctcatgaataaattcagaagtcacaataagattgaaagaacatagaaaacacatagcttgattattaagacaaatatattgagatgtgtgctatgagtagtgttggagactttgtctcatatgctaagagttaagaacaacgcaacataaaaagtgttaaatggtagagtccttcttccttcaagacaatatgtcccttctgatattatg

SEQ ID NO: 44572 - DNA, 335 bp, Zea mays
catgcaagctctcctggacagtgctgcacttacctctgagtgcgaagctgccacatataataacaaaggagcccctggcgatggtggagctaatgttgctagatctatcaaatattgcttcagattttcgaaggctctctgctggactggccccattgaacaacttcggctgacatcagcacttcgaaaaatggtaaatttctctctgctgatctagatatgaatctgatgagagatgccagcctttcctgtcaatctttgagaccccttcattgtactttggggttcattcgaagtatagcttcgatcttgctaggatagcctcaattcccttt

SEQ ID NO: 44573 - DNA, 393 bp, Zea mays
  unsure (1)..(393): unsure at all n locations
gaaatccctatgtataatgtttacaagtctggctaccagctggtcgagtgagaggggcgaccaggcgactaatcacgattagggcgatgattagtcaacctaatcggtcctggtcgacctctggtcgtccgttagtcgtcctatggatctaacgacaatgtatatgtatataactatatattaactatattaacactgcatttctgcaataatataggcataattagtagcatactagcagtaattcagtaaaagtgtanaactgaatccatccaaagtccaaactgaaagtaatattggcataattacttgcagtaattcagtaaaaactaaaaagtactgcatagtatgcattacctgctggctgctacctggacggctggagcacttgga

SEQ ID NO: 44574 - DNA, 506 bp, Zea mays
  unsure (1)..(506): unsure at all n locations
tactaagcttcttcatacacatccgtggatatcttgaggaggtagagcaatgtgtcttctccttagttgctntgctttcttggtcctttctttatttatgagcaacttttcttttgatcctgcagcttgatgctcattcaaaaattggctttcttttgagcaacggnggttagcacatggtgatatattatctaaatgtgcatgtgtgcaagaatgaggttcacatgaatntaagttcgcaattacaacctcatgagcaacatcaagcatgatatgtctatccaaaagattatcatgataataagacaacacatcatatntttcagtaagagcacgcttatcatgacttagcaattctacttgcctctcangcatgacattttcaatnttaagttgagcaacacaagatanagcattatttctttgctcacataanantgaatcataccggtggaccaaatcatcatgagagcaccttagctcctcatgttctttggtcatcttct

SEQ ID NO: 44575 - DNA, 365 bp, Zea mays
  unsure (1)..(365): unsure at all n locations
agctnntaccaatggacgtgaagagtgccttcctcaatgtaccaatcaaagaagaggtctatgttgagcaacctcccggctttgaagacagtgagtaccctaatcatgtctataagctctctaaggcgctttacggactcaagcaagccccaagagcatggtatgaatgcctaagagatttccttattgctaatggcttcaaagtcggaaaggccgatcctacactcttcactaaaactcttgaaaatgacttngttgtatgccacatttatgttgatgatattatatttgggtctactaacgagtctacttgtgaagaatntagtaggatcatgacacaaaagttcgagatgtccatgatgggg

SEQ ID NO: 44576 - DNA, 507 bp, Zea mays
  unsure (1)..(507): unsure at all n locations
ctaagcttctaagggagagncacatttgcgactaaccaatgttcatgttgagaaagacagggtttgtagcgcatgtcaagcagggaagcaagttggtgttcatcatccacacaagaacatcatgacgactgacaggccgcttgagctactccacatggatctattcggcctgatagcctacataagcatcgatgggagtaagtactatctaattattgtggatgattattctcgcttcacttgggtgttctttntgcaagaaaaatcacaaacccaagagaccttatagggattctcgagacgggctcaaaatgagttcggcttaaggatcaaaaagattagaagcgacaacggaacggagttcaagaactcaaaaatagaaggctttcttgaggacaagggcatcaagcatgagttctcttctccctacacgccacaacaaaatggtgtagtggagaggaagaatagaactctacttgacatggcaaggaccatgctngatgagta

SEQ ID NO: 44577 - DNA, 299 bp, Zea mays
  unsure (1)..(299): unsure at all n locations
cgctgagcttgattttctatttcaggttctatttcgaacaaattagttttgaacgctaaatattataccctcaatatttattaagtcataggtccaaacatgttagagttttctaatttttggactcttttaaatatttttatccattaaagtaattttggtatctaatatgattatttaatctttaaatagataccatgatcctacgagaagaaaatcaccgtaacctctccacccatacataatctctccctccgcatattcccgagcagntacacaattgtnctatctttttctct

SEQ ID NO: 44578 - DNA, 469 bp, Zea mays
  unsure (1)..(469): unsure at all n locations
tgagcacattagcctccacactactgaatntaccaaatgtgcttacaatgatgattggttgtcttggtaatcagaatgatatccataaaggatatgatgaatctgtgatagattcgaaaaatttcagatcattaatgaccatcaacaatgaattgtcatttccaactggttatggttggagtcaagaattttgcacgctcctgacttgtgattaactgcatgtactgcatgtacaagttcccctatggtttttagtacgtgggaatccaagaaagatttcccatgcgtacattgggtatgttcccaatctcaccaccgcagcgtacatatatgggcacacagaaaactgnggatctatgtgagaattcattctccgtcgatcattaagttntagaatctcttcatgagaatctatttatggcccgtacgctngcttgaatcatgagcttttncaggcattagggggaga

SEQ ID NO: 44579 - DNA, 484 bp, Zea mays
  unsure (1)..(484): unsure at all n locations
tcgcatctctgaactaactcggctgcgtcgctctttgctgtcggccaatanaaccctgacctcgagacctttccgactagtgttctggaggctgcatgtattccacattggcctgcatggacttccttcagaagttgctttccagtggatgggagaatacacttcatgangaacccccgatgcaaccccttctgtataataatctcccaatgagtgtgtagtgagccgactgtctggggcaatgcgctcttgntgagtttcttgtcgnctggctcttctttcgtctttatgtacttaatgatcggcctnctccagtcatcagagtctgactccngttgatctacgatgttgcactcttctgttnggtctattgagatacnntcgccgtgtaatttctgtacgaaaactncnggtgggacctgagttcgaccggatccgagcttggatagtgtatcagctgctgtgtttcgatccctttcacatg

SEQ ID NO: 44580 - DNA, 499 bp, Zea mays
  unsure (1)..(499): unsure at all n locations
tcgctgctgactctgcagatatccacctgcaatatagtgataaataatagaacatttgtgagatgtcgnggtgccctatcatgctttctttgctttccttcaaattcttcctatgatatggctaacaaaatgaaatggtagattcaggtgacttcacaaccttttgatgtttaggttaaaacagtgtgatggtcaagttgtaaaaatggttgcaaaaatgctgaatacatgttgaagaaatggttgcacatatgattgattctggaagaaatgaaatcactagagagaagaaaataggcgctggaatggtaataggaacttgaagtttgtccttttcagacttctacccagaaaatgattntgtttcgttttccttgcttaatattcctaaatttttgactgactaaattagtgctctattgaacactgaatgctgaatgactgacactggattattatttctcgtagcacagactctcgcgaagcgcgaacaatctac

SEQ ID NO: 44581 - DNA, 469 bp, Zea mays
  unsure (1)..(469): unsure at all n locations
ctgcagcttgtatctgnaggcagttgccttggagataagatataatctcggttctccaatcttcactaagaacaagagatatattgagcactgctctttcaaaaagttccaccgaaggtgctcttattgtctcaaagaatacttctgaaggtaaaggcagcccctgtgccgctgacttggctagcagatcagcatgctcattttctcctcgtggaataattttgacagaaaacccttcgaaagaagcttcaagccttggaactgtatctaggtatttttcaagcttcgggtctcttgctctacaactcttgtcaacatgaccagaaataacttgggaatcagttttaaggaccgcccttcttatccncattgccgtttaacttccgaagccctaaagcaaagcttcgtattcagcaatattatttgtgaagctaanatcaagttctatctgcatagcatgtctgacttt

SEQ ID NO: 44582 - DNA, 443 bp, Zea mays
  unsure (1)..(443): unsure at all n locations
taagcttcggctgtggttaaaactttaacagcacaacagtgcgatggcnatgaatgttgttgtaacttctcaccaacctgtctgtttatatagtgttgcacgggaagaaggcaaaccgccacaccgcctacactggctgagcggtggaccgttcgacgttcaaaatattttaatcgtttttcgacaacaagctcatggaatgtgtttttcggaccttcggtattctgaagccttcgtgtttttcgcggatcgagcctgttacgaaaaatgatctagcaccgcgaaggggctactgttgggggtcttcttctccacctaaggtcctcaaggaagaaacaccttcggcaaaatgatacataggatcgccgaagccaccttcagcctctgtttagctcctcaagacgaanactctatgtagaggcaacagtgcgagatgccgaagc

SEQ ID NO: 44583 - DNA, 393 bp, Zea mays
  unsure (1)..(393): unsure at all n locations
cattctcaccacggagtttcatactactgcgtctaaagactggtgtgccaacatttatcctggattccgaatttcattctcgtaaaattctctcatctcttataaaactcttcggatctcttttccttaaactggatgacatggtatttaacgagtactaatctactacacgtctgtgctaacgatatggtatcgtcccaaagaaagagtggccggccgcgacgactggagagtagagcgacagatgagagagggagttactgtgcctgcagcggtggaaccatgctcttttattagggtcagaccnctgtaactntctgaattctagtggaaaacattgtattaatgcattctatgttggattcattcagaataggatgacccataaatatt

SEQ ID NO: 44584 - DNA, 503 bp, Zea mays
  unsure (1)..(503): unsure at all n locations
tgctctggctcttcggtccaagagaatcgaccggacttccgcactttttttataaggcagcgccctctcagccagcctcgaaatgaagcggctaagggcggctaatgaccccgtaagcttctagacgtctttgatgcgggccggaggcctcatcgcttcaatcgccttgatcttctccgggtttgcttcaatgccccggtacaaaaccaggaaccccagcaacttccctgcggagacaccaaagacgcacttgtccggattcagcttcgtgcgggttgcccgcaacctgtcgaagaccagggttaagtcttccactagggtcgaccctctcttggtcttgactacgatgtcatcgatgtatacttccaccttgtccgtgatcaggtccccggaagtcttactcatcgcccgcacaaatgttggcaaggcatttnttagaccgtaaggcattacgacatagcagtaaagcccatccactggtacaaaagcggtatgcttcctat

SEQ ID NO: 44585 - DNA, 492 bp, Zea mays
  unsure (1)..(492): unsure at all n locations
actcaagcttatgaagattcttcatcccaacatgggctagtcggcggtgccagagccaatccatgttagtcttagcaattaagcaagtgtcgagttcagctctatcaaaatctactaagtatagctgaccctctaatactcccttaaatgctactgaatcatcacttcttctaaagatagtgacacctacatcagtaaatagacagttgtagcccatttgacacaattgggaaacggaaagcaagttatagtctaaagaatctacaagaaaaacattcgaaatggaatggtcaggtgatatagcaattttacccaaacctttgaccaaaccttgatttccatccccgaatgtgatagctcgttggggatcttggtttttctcgtaggaggagaacantttcttctcccttgtcatgtggtttgtgcacccgctatcgatgatccaacttgagcccccggatgcataaacctacaaaacnaagttagttcttg

SEQ ID NO: 44586 - DNA, 436 bp, Zea mays
  unsure (1)..(436): unsure at all n locations
gcacgctggcacatcatctaagccatcttcggagagtagctgttggataaaactngggctaactacaaatgtcaaaaagacgagggagctcacgagagaccgtagaacatgtctnttgagtgagaagacaaaaatactctccagggattgtaaaaaactcgggggaaataccgctcccacgggtttatattaagaaaaagttcaatcggaaccccgaccgagaaaggcacgaaaagtgcccctcgtgcagtatgagggtccgttcggncagatctttactcgtncttcgatccctcccatccnctacacgaggatccgccccccatcggacagtctatcttatatgcatacaaccagggtaaccaatgcgtgaactcttntaaccttatcctgaaattcggcccactgggattcgaactcatgacatgagtggtac

SEQ ID NO: 44587 - DNA, 421 bp, Zea mays
  unsure (1)..(421): unsure at all n locations
tcagaaatcacgattacctcgtactactgtagtgccgtctncgtggtagcccggcggatacctacgccgagcacaggataagggcgcagcccctgccccttgccccccgcccgctgcaatctggccttcggcggaggaatcangaggccgtagccgacgagacgatgtcacgaccctggtattcctgctactgctacttatgctggtaatggttagtctttgattaagtcactctgagaagaaaggattatagagggattacttgtgaccatcacggttctaagtcttgtaatagatccagaccattaggctcatattagagtctataaatatttataatcacatctggaagagactatgaaatggaatatagaacacacttcaccaaaacttgtatttatctaagcgcacctatggaagt

SEQ ID NO: 44588 - DNA, 440 bp, Zea mays
  unsure (1)..(440): unsure at all n locations
actcagctttccgaggcggacggcgcgggatggcttgctgtcgttttggtggcanagggttggcagacgcggactctctgcgcgcgggctaacggcgacgagctaacttctgctaggtgtggagggtgtgcggaatggtgtaaccgaaacctgcgagggctgtataagctcgggcgcgggccacggcgcgggtttggctcgggcgccgtgcggtgcatgctatggcgcgcgcgagcgtgctctggcgcgggcagaaggcgtcgaacacgtggcagtgagtttcttccaatgttcaaacgcttccagagatcgcatacgtgcgaatctcgtcatgaatccggcgcagacctccttctggcacctatggctatctcacatgtgtgagtttcaagggatgatacgccctagagagggagatagacgggcgccaaatctggctt

SEQ ID NO: 44589 - DNA, 399 bp, Zea mays
  unsure (1)..(399): unsure at all n locations
ccgaagacccgcgtcaccggaatagctttatcgtgctcgccggagttcaaaaacccgccggcgcacgtggacctggtaagcctgtgcaccttttcccaattcgttgcgcgcatggcctctacatcacccagtggagctcctcgtgcaccttaattgaactataccgccatggtttggccggaacaggagccgccgacgacccccgccgcctgtgctcgtggccagtgtagctncgaccaccttcgacgccgacctgcacaccgacgtgaccgtcgtgacctcccggacgtcactgaccaccccgccggagctctactgccaccggttagcctcgccgccgtaatctatgccgcaggtattggttaagtcagtcacggagcgcgggttagatntcggtta

SEQ ID NO: 44590 - DNA, 469 bp, Zea mays
  unsure (1)..(469): unsure at all n locations
cccattcctttaacgttgggaataccctattggcttattactcctgaactaaatccctagtaccaatatgctcagacacaactctaaattcgcccacagcatctatgcatgatgcccccggcgtcatgttgcactgaggcctattcaacccgaaggttagctccagcgggctctgaacaagcttctcctttttctcatcaatcttaacataaaaccattcagttttccaaccggtcggccatttggtgtggtagctaaccacaggtgttntcatgtctttgcggtaagcaaaattatagcaaccgaagttctcgtgcagtccatcttctctangccttgtctgatagtgaagttcgtgtacccgacagaaggcttcggcaagcggctccactccttggcttctgagagcccagataaagacgctgagcctaacgatagcgttaggagtcagctgatgaagataaatctc

SEQ ID NO: 44591 - DNA, 312 bp, Zea mays
  unsure (1)..(312): unsure at all n locations
catggcacaggataacgagggttacatcttatatcctgctggctatcttgagcataaaattaggagaattcatctangaagtcttattctggttctcatcatgcttttatgtataagaatgagacatctagctctaggcattctacccacgtcaaaatgcctaaaaagaaatctctcattgcatcaaatgaaccgaatgtttcatttaagacttttgatgcttcatatgttataactaacanatcacgcanagtagttgccanatatgttgtgggcaaacacaagggctccaagacttgtgtttgggtaccc

SEQ ID NO: 44592 - DNA, 485 bp, Zea mays
  unsure (1)..(485): unsure at all n locations
ttttctgcgcatagcttcgagatcatcttatccttcgntattattgtcttccgtcctattcaagcttcggcttgaccatattcctgtatactcgtggcccacattcgaagatacctgttcacatatttcacttggaaaacattgtcaaatcatatttttgaggaccttcggaagccgaaggcccccaacaataagctctctaaggcgctttatgggctcaagcaagccccaagagcatggtatgaatgcctaagagatttccttatagctaatggcttcaaagtcggaaaggccgatcctactttatttactataactcttgacaatgatttgtttgtatgccaaatatatgttgatgatatcatatctgggtctactaacgaatctacatgtgaagaatttagtaggatcatgacacacaaatttgagatgtcaatgatggcggagttgaagtatttcttacgatttcatgtgaagcaactaca

SEQ ID NO: 44593 - DNA, 471 bp, Zea mays
  unsure (1)..(471): unsure at all n locations
agcttatgtcaaaaatagagcatatcatgcgtaaactatttatagaacatggactaaacactgcttcaataaatgtgatatgtgaatatgtgattaaaaaggaaatgacagtgtagagggaaagttaatgtttatattccaagtattttaaaccgcttaacctaaaaggccaaactatatttatgatagagttcacttgtctgaacatctctgcactttgaccatccctatatcttggtgccattactggctgagtttcttagagaagtctccaagatacacagttntattactcattagcaacagcatgatgtataggacttcacaccatagatcatactaatgcttcatcttcatggntgcacttgtaaaaaaaatggatgcagaaggcattgccagaactgggtgagcagaaagtagaaaactatgtttacagaagaaactcaaagttagaacaataattcacctgag

SEQ ID NO: 44594 - DNA, 455 bp, Zea mays
  unsure (1)..(455): unsure at all n locations
actaagctctccccttttgtgcaatncgctggactgatgcatttggccttatagtggacctttgctgagaagtagtactttggttgcttcgctcggggcgaatcctgatgatgaacggcaggtttattttgaagtgcctctgaaccccagtgatgctgacataaatgacatgcttgatctgttagctgaggattcgtccgatgctgctcctgatggtaccttggcagtggtgccccttccagagggtgatacatacttgaatgtcccgaaacctatcagcactcgcccgaggcgctctatccgaactaatcagcccgagccttctgctgatgagcaaaagaaaaagagaagacgccttctgcgagtatccagatttgatgaggacgccggcactttagctcctgctgctgaagaagtgcctgccattggtcttactgacactgataccaatgggt

SEQ ID NO: 44595 - DNA, 52 bp, Zea mays
aaaaaagggggagggaaaagaaaagtttataaaaaggaagagaagaggaaag

SEQ ID NO: 44596 - DNA, 325 bp, Zea mays
cacatttcttctcaaaattagaaagtccgcttgcctttcttaaaatataacatttgcaaccgaataccctaaaatatgagatatttggctttctaccaatgagcaattcatatggagttttcttcacagcttgtgacaatatagtctatttgatgaatgacaagcggtatttattgcctctgcccaataagaatctgatatactatattccgctaacataaacctagccatatcaatgagagttctattctttctttcacaataccgttttgttccggggtatatttggaagagaattcatgtttaataccctctgcatcacaat

SEQ ID NO: 44597 - DNA, 384 bp, Zea mays
  unsure (1)..(384): unsure at all n locations
tctagcaagctcctgactaccatgaacagaaatgggttcttgctcccaaggtatcttcatgcatagatatgctggatgaagtattgcttctaaagcattgagtgttccacgaccaatgattgcattgtaggggtattccatatcaacgatgtcgaacacaacttgttcagtccttgtaatgtggacgaagcacaatgtcactggcatcgagattttgtcgagcgttgcaatcttgcttcctccgaagccacacagagggtgtgtagcatcatgaatcttgtcctctggctcttgcatctgcctgaaagccttaacanatatgatgtcagctgcactgcctgtatcaaccaanacattatggactagaaatcccttgatgacaca

SEQ ID NO: 44598 - DNA, 395 bp, Zea mays
  unsure (1)..(395): unsure at all n locations
actaagcttttccaggcgtctcgagcccgcctccgctcgatggctcgggccttctctgtgttcttctttntcttcttctcctccgcggcaacccaccgcgctgctcggtccaccgcgtcctgcgggacccgtggcagggaaggcttgtgccaccccacctcctgaagaagggggaaaatcccaatcgtaagaaccaggagcaacccgatgcaagagaaaggaaggagcagacactcaccagagtcacgcacccttggtctgggcgcatcanaagctgggagaaggcgctgggatccggtttccccaacgcgacggccacccgcccatggaggacgtctaagggaagagggtccgaggacatccgcgagccctccaagtcagcctccggtgtcatc

SEQ ID NO: 44599 - DNA, 499 bp, Zea mays
  unsure (1)..(499): unsure at all n locations
tgcaagcttggatatttgaagttctcttatcagctgactcctaacgctatcggtaggctcagcatcttcatctgggcccttcgaagccacaggatggacccaaatgctgaagctttctgccgaatgcatgagctgcattaccaaacgaaggccagagaagatgggctacatgaaaattttggttgttataactttgcgtatcgcaaggatacaaaggctctggtcctcagctatcgcaccaagtggccaactggctggaagagcgagtggttntatattaaggctgatgagaagaanagagggaaactaatgacaatggtgatgagcccactggctttgagcttcgggatgaccagacccttgtgcaacatgaagccagngtcagcatgtccgctggtatagcagaattagagtggtggttgacaaatcacaccaatgtctagtgcagaatcctggccacagggtactccaacgtgagtgctggagatgcgagctaaag

SEQ ID NO: 44600 - DNA, 480 bp, Zea mays
  unsure (1)..(480): unsure at all n locations
aatgcagnatatttcctatctatataacatgtctgcaaaataaagagcaagatgttaaggcaaggcaatatcaataaaaaatgtattatgtgtggctagataacagcaaataaacagtcgcacatttatttgaagttcaatatatgcatcagcctacttgcaacataagtttgagagtaaacagtaatccaagctacattatctttttctgattttaaaagttcaaaatttacatgaagaggactttaatgaaattttgagttgtccacctaanaaattgtctcagcttgttgcattctactcagcaacgcttttgcaaaaataaggatgaaatggttggtatatactatatggcagtgagttgagggcatatagaaccagtatggcggtagccgggtggttaccgtcaaccaattgtgctggtatggactgctaatgattacagaagaccaaatcanactgttattgtgacgaanacat

SEQ ID NO: 44601 - DNA, 364 bp, Zea mays
  unsure (1)..(364): unsure at all n locations
gcttgcactacacacctgttcaacacttagcacacatgttatttctntaattgggntatcatccaaaccaccaatacccacaagaaagatttcattaattagcgaaagggggagattagagctccccctttcgcggggggaaattctcctcccccttcacttgtaggtcctttgagggggactggtggacgcatncaaggcgtctgcctttaccagcaactgataggggaagcaagtcaaggacccattggagctggccttatggccatctaacacttttaattagcaagaatgatcaaagactcgaaggcccatanggccctatggtgcttctgacatcaaaagaacattcttagccatcgag

SEQ ID NO: 44602 - DNA, 480 bp, Zea mays
  unsure (1)..(480): unsure at all n locations
ctaagcttcattattggacttctctactaatggggaagtcaagaaaaaaacaagcaccgctnttagacgttgtcgtgcagcgccacttctcaacccggtgcgtggtatcgggcaaacatggatgggcacggatccaaactttcccaaaacctgtcggtcccgaaccttttgacagctatacgcgggcaagccttggaaccatatgggagtgggtacaattggccacagcacgatctcacgagcgcgcggaaggccgtcgtcacccggagtaggtggcctgctgcttgcgctccgggctcgagcggcgtccggccacgcggggcaagatgtgggtggaccacgggagggtagagatggcaacgggtacaaactcgcccgggtttgctatcccaaacccgtacccgtgaagaatatttacatctattataaaacccgtacccatgacgggtttgaaattntgcccaaacccgtacccatcgg

SEQ ID NO: 44603 - DNA, 437 bp, Zea mays
  unsure (1)..(437): unsure at all n locations
tatttctattttcagttttacaaagaggggagacctatgccttatattacactttatacccaaactttctaaaggccaccctaatataaggctttgcctgtttatgtgaaaactttgcctatgcttatgagagattattaattaaaaagagaagggttaaggctcctatcatatggctacctatacaactatttattttattttattcaacaacctcgagagaatgtcattgtattaatcttgcagtaacaattgcccaaaataaagtatattaggccttatagctagtggaaatnttctctatgaagtagacanntataaaatgagagaaggatatattctcatgccataagagattgactcaacanatatccaagtaaacacaccatgtccaactcaatatatatgaggaagggactaatgcatanaacgtctct

SEQ ID NO: 44604 - DNA, 461 bp, Zea mays
  unsure (1)..(461): unsure at all n locations
tcaagaaagtaatcacatagatggtatctataccatacttgtgaaggggtgctcactgtgattctaacagcgctaatgccatggtcacgacacccgacagacctgcggtggagcttcatcccggtgaggaattcatcaaccgagatcgtcgcgctttgcctgatgatgcaacgcgcaccattcccgactaccagcgaataccctactgcccttgccaggttcgtacgacagcgtgtgcatgcctagtcatggcggcggacagcagatctctctgcaccatgactccttgtggcgaaaatagtctgagctatatgcgaagggtgtttccgaaagggctcggtgtccgattttatagaggagcaacctggtgtccagggctccaaccggacccgcaacaaccggcggatcacacgagttattcggcgagaacgacgcgcgcgtgagctangagataagtctga

SEQ ID NO: 44605 - DNA, 335 bp, Zea mays
  unsure (1)..(335): unsure at all n locations
gacccaacaagagttgggtacctaagacccaagcctaaaattgccttgcaggtttatgcattcggnggctcaagctggattatcgacagcggatgcacaaaccatatgacgggggagaagaagatgttcacctcctacgtccagaataaggattcccaagattcaatcatattcggtgatgggaaccanggcactgtgaaacgtttaggcaagattgcaatatccaatgagcactctatctctaatgtgtcttagttgagtctcttggatataatatactatctgtcagtcaattatgcaatatgggatataatngtctatttacacatgtagat

SEQ ID NO: 44606 - DNA, 424 bp, Zea mays
ctaagctggccagaagagaacatctagaccaaaggaggaggccgcacttcacctatgataagctgaaagcttataatgcagtgcaggagaaacagcgggacaagcaagctgcggctgaggcgaagctatagaagctgcagcaggaactctccgacaaggccagtgatattgctcgcgttgagggaaacctcaaggcgagggaagcttccctggcgaaacgaacaactgacctcacttggcaggaggaggacctcgtctttatggaggagatgtgggcaaggcggaacaagctgctggatgagcttgagctctaggcagaggagaaagtgaagcgtctataagggaaagtgcggacgctggatgggcaggtccgtcagttccaggcagcgcatgcgacacagtcggtcccgggcccccacgcagt

SEQ ID NO: 44607 - DNA, 392 bp, Zea mays
  unsure (1)..(392): unsure at all n locations
tgcagctttcaggcccagtctatggctgtcccatcaatttttacagcctggcaagggctgtttctaacaaaatggcctggcaaccgctttggattaatagctacttaattaatccgggtcaggattaatcatcataagatatccgcggcccacgcctctcgattctttatggttttcgcggggttccgtgccgctctgcagactgtgctgtcaccacaactggtgagagagagagagagaccgataggagaacgtgagagcgagaggagagagtggataaaagcatcggcggtttggagttnggacttgtgtctagacagcgaaagggaccgcagatggaggagagggctcanaccgtctgccttgctgcctgcaccccgcgcacactccac

SEQ ID NO: 44608 - DNA, 409 bp, Zea mays
  unsure (1)..(409): unsure at all n locations
atgcaagncntagccattaagcatgcatctagaccggcctcttcttttgcaaaatcaactaggtaaagcttgtcgtctagtacacccttaaaagctagtgaaccatcacatcttctaaagacagacacatctacatgtgtaaacaaacagttatatcccatattgcataattgactaacagatagcaaattatatccaagagactctactaaaaacacattagagatagagtgctcatttgagattgcaattttacctaacccttttaccttgccttgattcccatcaccgaatattattgaatcttgggaatctttgtttttgacgtaggaggtgaacatcttcttctcccccgtcatatggtttgtgcatccgctgtcaataatccagcttgaacccccggatgcat

SEQ ID NO: 44609 - DNA, 325 bp, Zea mays
  unsure (1)..(325): unsure at all n locations
tcagtagacacttcatatatgttaacaagtttctttggagatatgcttgacgatttaattggcttcaaaacatctaacacattaaccattctttttcttttctgggtcacttgtggacccttcntggcttttcctgtctcaatttttgctgaaggacttaaaacttctaatgcttttgcttcttcagaccttggttcttctatcttttctgttgctggcactttggccaactcttcgatttctggcagcagagttgattctttagcttcggtggccgaagaggtctcaccggcgaactcangcactgtggccagttcaatataac

SEQ ID NO: 44610 - DNA, 76 bp, Zea mays
ggtgtgtcttgtatttaatgcctagctcttgtaagtggttggaagtgtgaaaacttggatgacttgaatgtgcggt

SEQ ID NO: 44611 - DNA, 486 bp, Zea mays
  unsure (1)..(486): unsure at all n locations
ccatgaatctgatgctctttgatagggtgcctataattttngcacctacacgattgcggatgcatcctataacttctttgtccaccccaccaaagagcatggaccccgactagtagccgcagttgatagcaaaatccttcaactctgccatatcctcttcggaaagctgctggccacccaggtgccgtaggtcgaagtctgcctctttcgaagagatttctttagcctccttccccttgtctgaaacttctgcggccacctccttctccacagccacgtctgatataatattgtcaatatcggacatggtagctgtgagatcccgccttcagttacagtggtagcttcagcatcagtaggtttgacagtcttgtctgccacagctaggggcggngtttgctcaatcgcttgcattatagtcatcatacgtcgnttattctgtccctcgtatcttccatcggtagccgaagggatttcctctttctg

SEQ ID NO: 44612 - DNA, 358 bp, Zea mays
  unsure (1)..(358): unsure at all n locations
tggacgtgagaagtgccttctttttgttcaatcaaggaagaggtctatgttgagcaacctcccggctttgaagatagtgagtatcctaaccatgtttacaaactctctaaggcgctctatgggctcaagcaagccccaagagcatggtattaatgcctaagagaatttcttatcactagtggctgtaaagtcggaaaggccgatcctactttattcactaaaactcttgacaatgatntgtttgtatgccaaatctatgttgatgatattatatgtgggtctactaacgaatctacatgtgaagaatttattaggatcatgacacagacattcgagatgttcatgatgggggagttga

SEQ ID NO: 44613 - DNA, 464 bp, Zea mays
  unsure (1)..(464): unsure at all n locations
tcttcagcttctgctctgccagcatctttagattctgcaggaattgctgctttcaccgccaaagctgaaggcgacgatttctcaattgcttggatcacgttcacaatccgccgattcttttgccctccaaccttcttctccgtagccgaaggcaccttcatcttctgtaaaagggtggtcagttccaatctcagaggacttatcagcttgaatggtggggattcagtcattaccttcagaaattccgccacctcaacagcagtgggcggcgaaaggttcaaggactccttcatcgttgcatctaccttcggttcggcagaaggtatctcatcaagatttcttttcttaggggcttgcgccttcggctccagtgtcactatcaccttcttcagagccttttcgtctgctntcacggaccangcaacttctatgctcagaatgctgacaactctntttctcttttc

SEQ ID NO: 44614 - DNA, 322 bp, Zea mays
catatatggatctgccacatacatcgtagctgagaacttcgtttacttcctctcgttcttggagtagaaccttaggaccacatagaagacgagtcggtagagcacgccccaggctaggagaattgcaacgtctatccagatgttatcaattgctatgtccatggtggaaagcacattttggcctaccaaggggcatggcggtgaagtggaattcatgttactgacttggtccagaggtccaggtgaaagttggtttgtgtgccacatagcattcgcttctttgactcattccaatcaatgcctgaatggtatttatggcgag

SEQ ID NO: 44615 - DNA, 426 bp, Zea mays
  unsure (1)..(426): unsure at all n locations
tcttctctgtctctccgaagtaaccgagcttcatcatcatcggcatatcggtctcggagacagcagattntccaaaatctaagtgggtgggctntgatgggactagaatgttgtagtcgtcctcttcatcagcattttcttcctcgacatcaacttcttcagcctcagcagtatatacatcttcctcaacaatcacctctgtcacaaccaatccagattgcttcataacttcggaaatcggggctggttcggtgggttcagcctcctctccgtcacgggtcactctagcagttgaacgtactttggccatcatgtgttgaaattctcgcagttcttgagaatgttgatgagttttatgggttagacgaagcttcctcatatgcggaagctaaatcaaaatgatgctttgcttgagaatgtgatgac

SEQ ID NO: 44616 - DNA, 364 bp, Zea mays
ctcaactattcagcctggtggcagggtggtcgaccaagtcacaccaacaaccattttcttaatcgaaatacctgaaaaagagggtgctagaagcaaggctgagtatactaatactcagcgagacttctcggtgcgtggaaactactccactacctctagacacatgagtggttttggctaacgggatttggttgccaaagcgagttgtaattatttaatcaagttttagcttcatattctagtcgattcaattaatctaagtttgcatccttctagcaatcatggtagaaacaattaagtcaagcataacttaatatcaaactcacttacatcttactaagcagacattgatcaacgctcatta

SEQ ID NO: 44617 - DNA, 392 bp, Zea mays
  unsure (1)..(392): unsure at all n locations
taaaaccctntgaagcagcagaggctaaaagaatcctaatggcctctaaacaggcaataggggcaaagatctcctcataatcaattgcctcattttggcaacaccctgcggcaaccaacctcgccttgtttctcactaccaacccatcctcactctgtttgtttnttaaaacccatttggtaccgatgggatggcagttaaaaggaggtggcactaaaacccaaacctgatttctttcaaaattntcaagatcctcatgcataccattaacccagttaggatcagataaagcgtgtccaacatccttgggatcaaaagtagcaacaaaagttgagtgagcaaaatgagaaatctgctatgacctagagcgagtgactcgctcgagaagttct

SEQ ID NO: 44618 - DNA, 375 bp, Zea mays
  unsure (1)..(375): unsure at all n locations
gcttcggaaaccaacactctntgacagagtgcttattaccttcactctagttcgaactcgaatacatcctaagctttcttcgctaattccgctgaagagcatcgctcctggctggtagccacaggatatagcatattcctgcagctcctctttctcagccttagataactcttgaccaattatattttgaaaattaaagcctttttcctccgaaatatcttcggcgatctcctttcctttttcaagcactgtggccagngtttcttcggcagttgcagcagcttcttccacggccatatccaagagcatcttatcaatatcagataatgtgctcttcagaatggtttcttcggcagttgtagcttcagcagtatc

SEQ ID NO: 44619 - DNA, 499 bp, Zea mays
  unsure (1)..(499): unsure at all n locations
tctanagggagaacacgtgataggtctaaccaatgtacatttcgataaagatagaccttgtgcagcttgtcaagcaggtaaacaagtgggaggagcacatcacagcaagaatgtgatgaccacttcaagacctctggagctgctgcatatggacctcttcggacccgtcgcctatctgagcataggaggaagtaagtatggtctagttattggtgatgactcttcccgcttcacttgggtgttctttntgcaggataagtctgaaacccaagggaccctcaagcgcttcctcaggagagctcaaaatgagtttgagctcaaggtgaagaagataagaagcgacaacgggtccgaattcaagaatcttcaagtggaggagttccttgaggaggaggggatcaagcacgagttctccgctccctacacacctcagcaaaatggtgtggtagagaggaagaacaggacgctcatagatatggcgaggactatgcttggagag

SEQ ID NO: 44620 - DNA, 501 bp, Zea mays
  unsure (1)..(501): unsure at all n locations
ntntccagagctggagaatgtgtctcagctgttaaccatctgcagtgtgcactgtgcagcagagttaagggtgaatggagagatggacttctatggagtccttcaagtggaggaaggtgctgatgaagccttgataaaaaagcagtaccgcaagctcgcagtttcacttcaccctgataaaaattgttttgtgggtgctgaggcagctttcaagttgattgctgaagcttattctgtactatgtgatcctgcaaagcgaaatgattatgacctgaaaaggagcaatgtatttagaaatgtgccaaagctagccaaacagcaaccatcaaagtggactaattcacatagacagagcatgcctggatttagaagaaacatttggactgtatgcccaaattgtcggatccaataccagtactacagcagtatcctgaacatcatggtccactgtctgaactgtaaaagggagtttattgcatacaggctgaatcaacagcccat

SEQ ID NO: 44621 - DNA, 312 bp, Zea mays
  unsure (1)..(312): unsure at all n locations
accaatgggcaaaaagcatgccaaatgagctcgtggtgtgctcttatttattcgccctgatacgttgaaaacaggagggccccgcttgtcattgactggtgctattctaacaaagggaagggtgtttttcggaccttcngcttaaggacttcgtctgtatagcaatctgaatttatcattctaaccattaatatngcgagtggcttactgtgggggccttcagcttccgaaggtcctcaaaacatgatttacaatgtttctgagtatatacatgacacgaccttcgacttaatcctcggactggatcaaacc

SEQ ID NO: 44622 - DNA, 393 bp, Zea mays
  unsure (1)..(393): unsure at all n locations
tcagtcttagcgttagtctcgggcttagntagtcttagttagacttgtgtttttgctatatcctgtgcatttatgtttgtcatgatgaactatgtttggtttggatctttgtaatgactgttaccagagtgtgggtatcccctgcattntggtttacctattatgttaataaagttagttatatagttgggaaacccattattctcctttcctctttttctgagaagctgtgtggtctgtgttggagatcagtgaagatgctcacctgctcacgtgctgtgaagaattctattctcttttcttatgctgcaagatctgcaagatcagttctgatgtgtggttgcattctgcagatgtcaaagaacaggcgcagaggatgaaggcgtgctcatc

SEQ ID NO: 44623 - DNA, 343 bp, Zea mays
tgcagcctcttgaagcacgcagatccctgatggtggtattctggttgataacatctgtccaagtcacagaacctcgtcttgggatacttgtatcttgcgacgatgatgatccacgtccgacatcgtgaagtggtggctcctctccaatatggtcaaggagttactagcgtcacggtatagcctgtccagattatcgcgagaggctgcgagtgctcgtttctccttctacgaacaagaagcaacgttcagtacccaatcaacaataacatggcatagtcaaccaagggaagttacctcatgcgccattctttcagagtcaagctgggcattgagggaggaattc

SEQ ID NO: 44624 - DNA, 368 bp, Zea mays
  unsure (1)..(368): unsure at all n locations
taaaggagagaagaaagagggngagcttgtgcgactaccctatcattatatattcaagaaatattctaaggcaccctaccaagaatggctcgatacaatcgaaataatgagtactgaaattcttggaaattactcttaaaaaagaggaccaattgatgacagcagcctttggcacccggccgaaacgaaggctaaacagagtacttgatgctatangctctgaatattctgactatgggcgactgggtggagatgctggcggcccgaagagaaaaagaattgccagtgccgttgacgaagagagcaccaaagtgaccaagaagaaaaaggagatttctgaaaagctgagtccttgaaagttgagccct

SEQ ID NO: 44625 - DNA, 448 bp, Zea mays
gcaagcttgaattgtctgtgaatgtatgtgaactacatatatcttgggagccattgggttattgacagtggatgcacacaacatatgacaggcaacccacggatgttcaccttattagatgagaatgttgatggtcaagattaaatcacatttggagaccactcaaaaggaaaagtacaaggacttggcaaggtggccatctcaaatgacttatcaatatcaaatgttctcttagttgcacctttgagcttcaatttattatcagtaggacaactctgcgatcttggacttcaatgcttattcactccatcagaggttattgtaacaaaaatggatgatgaatcaatggtattcaagggaattagatacaacaacctctacttagtggagttcacttcagaagatgcagacttaagaaacttgcctctcaccaaagcttctcttggat

SEQ ID NO: 44626 - DNA, 379 bp, Zea mays
  unsure (1)..(379): unsure at all n locations
ctcaagcttctaaagagagagcacattntacgagtaacaaacgctcattgtgagaaagatattatttgtagcgcatgccaagcacggaagcaagatgcgactcatcatccacataataacatcatgacgacttacaggccactggagctgctacacatggacctattcggtccgatagcttacataaacatcggcgggagaaaagactgtctaggtattgtggatgattatactcgcttcacttgggtgttctttttgcaggagaaatactatacctaacaaaccttacagggattcttgagacaggctcaaaatgagttcggcttgaggatcaagagaattatatgcgacaacgggacggagttcaagaactcacaaa

SEQ ID NO: 44627 - DNA, 431 bp, Zea mays
cttcttcgaaagacagacacatgtatatttgcgaataaacagttatatcccatattgcataattgactaacagatagtaaattatatgccagagactcaactaataacacattaaagatagagtgctcattggatattgcaatcttgcctaaacctttcaccttgccttgcgtcccatcaccggatatgattgaatcctgagaatccttattcctgacgtatgaagtgaacatcttctttctacctcgtcatatggtttgtgcatacgctgtccataattcagcttgagctccccgatgcataaacctgcaaggcatatttacgcttgagtcttatgtacccaactcttggtggatctacaagttagtacaattccttaggacccaatgcagcttataccttgcatttgcctattgctacaatcactttta

SEQ ID NO: 44628 - DNA, 423 bp, Zea mays
ctgctgcgtgcttgcttactagctttctacttgacatatagatggaacctgttacatcctatgtattataatgtaatctaacatttgttaaatgagtcagttcatatgagctaaacttctgcaccttactcaggaaaaatatcagttacgtctaaaagtactataagatggactaagagggccaccaagtggctctattcgtccacctactgaaggaaagagctttagcaatgtcccttcccgccggttgtcactcggtggagctgataatatatcaagattgtctcctaatgggttattggcaaggcgatctccttctttaattcaagatcatctcttacgtcaaacagcagcttggtcctgaagcatgctagaggcacttcatagtcatttgatggcggaactaggtcactagatatgaga

SEQ ID NO: 44629 - DNA, 486 bp, Zea mays
  unsure (1)..(486): unsure at all n locations
gttacctgcggcatgcaagcttctanagggagagcacattgtaggattatcttatgttcattttgagaaagacaggatttgtagcgcatgccacgcgggaaagcaagttggagttcatcattcacacaagaacattatgactaccgacaggccggttgagctactccacatggatctattcggcccgattgcttacataagcatcggcgggagtaagtattgtctttgaatagcggatgattattctcgcttcacttgggtattcttttacaggaaaaatctcaaacccaagagaccttaaagggattcttgagacgagctcaatatgagttcggcttaaggatcaagaatataagaagcgacaacgggaccgagttcaaaaattctcaaatcgagggcttcttgaggaggaggcataagcatgagtctcttctccctcacacctcaacaaatggtgtattgagaggaagatccaacttattgaca

SEQ ID NO: 44630 - DNA, 375 bp, Zea mays
  unsure (1)..(375): unsure at all n locations
agctcttaagnacatatttatagaggccgttcacattgcactgaatacgtggttcatgtattgaattgtattgcaggctgcagccagatatccaaatggacatttttgtctggatggaacatactaccagtagagtggagcatagcttaccagtacaaagtggacgttgaacaccacaagaaaagagagctagtcttctcactgcgccttatatttagaaatgatcctctcctctatatgcttcagcgttggcctttagaccatgctctaagtataaaggaggctcattcattatctctctatttaaattatctaagcgcttgttngcctgcttggtttagcagctaccttgtaatgtctttaagatttagagac

SEQ ID NO: 44631 - DNA, 368 bp, Zea mays
  unsure (1)..(368): unsure at all n locations
agctaccgcatntgaagcatgatcgcttccctttgtttagtcttgctcggctgtccattgcgaccctttagcaccgtcttgaagcgcttaatgatgagagccatttcttcatcattaagcccgaccgcctcaatttgcgccaccttgcttggtagtgcctccttgctcctcgatgccttgagagcaatgggttgaggctcgtggattggaccgttcaacgcgtcatcgacgtaccttgcctccttgatcatcatccgcccgctcacgaattttccaagtacttcttcgggcgtcatcatcgtgtacctcgggttctcacgaatacttgtcacgagatgaggatcaagaacggtaatgatctgagcatt

SEQ ID NO: 44632 - DNA, 394 bp, Zea mays
cgccttaaactcactttaaggaaacacggaagctaccatgtattttaaaaatgacctgtgcactgtaagcagtaacagtgggaaagcactccagcagaatggatgaccacgtcagaccttgagctgagctatggacctttcgacccgcgctattgacatagagaagaagatggctaatattgtgatgacttttcccttacttggtgttcttttgcggatagctgaacccaaggccctcacgcttctaagagagctaaagagttgagctcaaggaaaaataagacgaacgggccgagtcaaaacttaagtgaggaattttgagagagggataaccgagttcgtcctaccacacacaaagggtggaaaggaaacgacctatgattgaggacactga

SEQ ID NO: 44633 - DNA, 386 bp, Zea mays
  unsure (1)..(386): unsure at all n locations
aacttcngacctaatgaacagtggtcggcggtttccactccaaaatgtccttgactntgccggngtctaccgcaatccctctggcagatagaacatgtcccagaaattgaatttcctccagccaaaacgcgcacttgctgaacttggcatacaactgatgttctctcagggcgcgtaatacgatccgtaaatgttgggcgtgctcctcttcattcttggagtatatcaaaatgtcgtcaatgaagaccaccacaaacttgtctagctcgggcatgaacaccgagttcatcaaatatgtgaagtgggctggagcatttgtttacccanaagacattaccagatattaaacaacccatatcgcgtagtgaacgcggtcttggtatatc

SEQ ID NO: 44634 - DNA, 369 bp, Zea mays
  unsure (1)..(369): unsure at all n locations
agcttcagccttagcggtagtctcagtcttattttgtcttattcagacagggtagnttgctatatcctgtgcatctatgtttgtcatgatgaactatgtttggtttggatcttttgtatgactgtcaccggagtgtgggtatcccctgcattttggtttacctattatgttaatggagttagttatatagtggggaaaccttttactccactntcctcttattctgagaagttgtgtggtctgtgttggagatcagtgaagatgctcatctgttcagtgctgttgaagaattctattctctcttcttatgctgcaagaattgccagatcagttctgatgtgtggttgcattctgcagatgtcagagaat

SEQ ID NO: 44635 - DNA, 467 bp, Zea mays
  unsure (1)..(467): unsure at all n locations
agcttatgaagattctgcattgcaacatgggctantctgcggngccagagccaacccaagttagtcttatcaattaggcaagtgtcgagttcagctctatcagaatctaccaagtatagctgaccctctaacactcccttagatgctattgaatcatcacttcttctaaagacagtgacacctacatcagtaaatagacagtcgtagcccatttgacaaagtcgcgaaacggaaagcaaattgtgatctaaagagtctacaagaacaacattggaaatagtatggtcaggtgatatagcaattttacccaaacctntgaccaaaccttgatttccatccncgaatgtgatagctcgttggggatcttgcgttttctcatatgaggagaacatctttatctcccctgtcatatggctcgtgcacccgctgtcgagtatccaacttgagcccncggatgcatacaccta

SEQ ID NO: 44636 - DNA, 339 bp, Zea mays
gctgataagactgctgaacttgataagcggataggtattgctaattgcttttactttatgttgtatttctgtgacttcggacttacttatgttttatatcgcagtcaaactattctcctccctcggagccccttcgagtcaatggccgaccccgaagcacaaaaaggaagatgaaattactaagatggccgaagctattatggacgaagttgttactcgactactaaacgaagctgtgaagcagtttaaaaaaagaatagctattattgtaaaacattcggaatataatgtaatatctgctgaacaaagttgtaatatttatagttttgaatgaaatat

SEQ ID NO: 44637 - DNA, 356 bp, Zea mays
ttgatgtcgatgatgttgcgggtggtgcctgttttgacgaggatgagcaccaagttggcatcttccacgaacatggtgtgtcgaccacacgcacactagagtcttgtggctgatcatcatcatgaggccagggtcgacaccgtcgttggcatgacgagcgtgatgtctaacaagtgcttgcacttgtggccacaggcaaagggttcgtcacagttgaagcatagcccaatgcaatgacgctccatcatcatctctgttgtaaagggcttgaaggggtgaggtggtgtatccggcgtaggtgtccgatgaccccggtgtatcgaagcggatagggttgttgatggcacctttgaatc

SEQ ID NO: 44638 - DNA, 217 bp, Zea mays
tatgccgctttaatggcatccacgaagctatggcagtattctcatgcatacaatatgactagtgcttctttccagccgttgaaggatataatgagaaatagagaagctactggacggattgggaaatgggctgcagagctcaacgaattttacattgattatgtgcatagatcttcgatccagtctcaagcattggcagatttcattgccgactgga

SEQ ID NO: 44639 - DNA, 388 bp, Zea mays
  unsure (1)..(388): unsure at all n locations
agcttccnctgcacgccgaggatacagagatctctttctgtatgtcacaagaatattaccccagcagcaaattgaaagggaagtaggctttcacctacttcccaaataattttggtggttgaattgcccaacgcaaatctttggactaactagtttgcccaagtgtatatattatacaggtgttaaaggttcacattcagtcaataaaaagaccaagtgttggattaacataggaacaatgaggcaaccgagggcacctctggctggaggcaccggactatccggtgtgcaccggacagtgtccggtgcgcccagaggacaccaactcaaactcttcgtcctcgggaattactcgaagccggcgcgctataattcaccggactgttcg

SEQ ID NO: 44640 - DNA, 500 bp, Zea mays
  unsure (1)..(500): unsure at all n locations
tcggcatgttcgcagaanagggaaccgacttaaagatgaaaaggccatttatacctcgatagattgctatggaattatcaccaaatgtaaagggcatgtatgtaattttgtatgggttgtattccgtgcctataaataggtgaacagtacccccgtactgttcacgctgacttggcatttgcttttgcgtcacgctgacttggcatttgcttttgcgtcacgctgacttggcatttgctttttcgtcacgcttgtactttttatcttctctcaggaccgaaggtacatttgtaatttgaaatcatttctattnttccatgttaataaaatagaaatgattctatgatgatgcttatattatatttcatgctttatatgaatccttccgcattacttgttatgttcacgaaggtatgtctcttatgaccttcgtccgaagctcattatttcccgaagggacataatgcttcgaaggacgaaggactntaacacttaacact

SEQ ID NO: 44641 - DNA, 344 bp, Zea mays
  unsure (1)..(344): unsure at all n locations
gcttgtgaagccaatcacaagtttatcgaagaattttgtatttcaattggtcttcaaagtgtgatgaagcctttatacaattgaagacattactaaccactgctccggtattggctcaaccggacatcaccaagcctttcgatgtatattgtgatgcatctggcagtggactcggctgtgtattaatgcaagagggccgagtaattgcgtatgcttcacggcagntacgccgacatgaggagcattacccaactcatgatctggagctagctgctggtggtcatgccctgaaaanttggcatcactatctgctgngaaatgtctgtcatatctatacagatcat

SEQ ID NO: 44642 - DNA, 466 bp, Zea mays
taattcttctgatagttgactttctttcgcttaatcactaattcaggtccaaaaatttctctttctccaggctaagacgagctgagggtattcgacaccttcttccatatagggattcaaagggtgccatctttaagctggattgataactgttgttataagctaactctgccaaagagaggtacttatcccagttcttgccgcaatcgattgcacaagcccttagcatatcttcgagaatatgattgacccttttggtctgaccataagtctaggggtggtaagctaaactccttattagcttggttcccacagactcttgcaactgctcccaaaatctggcaatgaattgtgctcctcggtcagaaacaatggtccagggtaacccgtgcaaacacacgactcggtcaatataccaatttgcatacttctgagccttatcggtggtgtgcacaggaagaaaata

SEQ ID NO: 44643 - DNA, 288 bp, Zea mays
  unsure (1)..(288): unsure at all n locations
cttggaacttgcccgttccaatctgcctgagccggaactatatgagcttgtcatgtgcccccgttcctgtcaaccatgaccaacacccaacataagacttccctagttatttagccaagactatagccatgatagctctcatggtagcactgttttcccgggtggtcactccatgttccaattaatatgcacatatcnttgttaaccatcgggttaacaacaataatggcaacttactctttggaacattaatatcataagccggagtgactacactaaattaaagtt

SEQ ID NO: 44644 - DNA, 358 bp, Zea mays
taccatgtctgggccacacttcggactgccatgacgaaagacttcgccatgactacagtattgccctcgtacgaagatatagttgcttcgtatctcatcaggaactgcttccgatttgagtgcccatcatacatggggagctgatgtggcttgtatgatggggggcatggtgtagcctgcaattttgctgattgaggagaagcatcatcacaagcaaaatctccatgatggaaatcatcgtaccaatcatcatcattgtagaaattgtcttgacgaagctctctttgtggaggtcttccgtcctagtcatcttgagtaagatgacgtatttctttagcagcttcattgatcttcttct

SEQ ID NO: 44645 - DNA, 328 bp, Zea mays
  unsure (1)..(328): unsure at all n locations
cgggaaaatctataatgaatcgccggtagtgaccagccagtccattgaatcttcggacttgatgtacagngggtgggccgttccactacaatatatcctcgactttgctggaatcaccgcaatcccttggcagaaatacatgttccaaaaaatggatcttcttcagccagaacgcgcacttactgaacttagcatataactggtggtcccttaagtgcgttaataccatccggaaatgtcgagcatgcttctcttcatttctagaatatctcaagatattatcaatgaataccaccacaaatttattccactcgggcatgaaatctga

SEQ ID NO: 44646 - DNA, 344 bp, Zea mays
  unsure (1)..(344): unsure at all n locations
ctccacctctcctcatagtaattgcttatatcatgtctatggaaagaatcttggaggtaccgacgaactggacaaagaagagtattcatgttattgtggtcactaatggtgagcacattttacgcctgcgatatctaggttgtcaggttagttatattgtccaaccctttttggctcatgaatcatccgtgcatctgaatttttggctaactgtggagattgttgcttataaccttttctgtgtgggatcatttatgcatctattntcttggttaagtgtacagcttaatcttctctgtgtgaaatgtgtatagggcatgggaattccttgagaaagcttgcac

SEQ ID NO: 44647 - DNA, 459 bp, Zea mays
  unsure (1)..(459): unsure at all n locations
tgtgaaggttcttcatccncacatgtgctaagcggcgatgccactgtcatcccatgctagtcttagcaattaagcatgcatctagaccggcctccccttttgcaaaatcaactaaataaagtttgtcgtctaatacacccttaaatgctagtgaaccatcacttcttctaatgacagacacatctacatttgtaaaaagacaattatatcccatattgcatagttgactaacagatagcaaattatatccaagagactctactaaaaacacattagagatagagtgctcattagaaattgcaattttacctaacccttntaccttgccttgattcccatcaccgaatataattgaatcttgggaatccttattcttgacgtaggaggtgaacatcttcttctcccccgtcatatggtttgtgcatccgctatcaataatccagcttgaacccccggatg

SEQ ID NO: 44648 - DNA, 257 bp, Zea mays
gtggcccgcggcgctcttgtcgcactgggggctggggggtccccgagcaacgctggtcggcgatccgcgagtacgagggatacgggaagcaccgacctgggcggttatagccggcctagccggcgcggtcaccgtggccaccgggcaccggccgcccggcggcttgcagctaacgccaacaggggcgtgttcgccggtcttcttgtgacgcagcgacaattagccacgctaggaactttctgactaggtccattatg

SEQ ID NO: 44649 - DNA, 455 bp, Zea mays
  unsure (1)..(455): unsure at all n locations
tgacagaactcaatgcctcatctgtgttaccatacatgagttctatcatctctggtgaaatatgttgaaacctcacactgatgacctgtgaaacaagaatactggattaacaaaacaaagcatactatcatgtaataaaactggctaacaaacaccaatcttcatgagatgaagtgaagtgatatctaaatctcagcttataaatctagtagtcataaaccaagtgaggcaaagagtacaaaaacatcacaggaatttcacagaaatcggttcatttcacaggaaataagcaaggaacacgaaaatntctggcgttccaaaggggggctaaatattagacggatcctctatagccacatgagttatgcatgtcatatacaaaacagaactaccgcctgatcaattcagaactacaccaacaaggagacaccttgagctcttcgaatggagttcac

SEQ ID NO: 44650 - DNA, 439 bp, Zea mays
  unsure (1)..(439): unsure at all n locations
agcttgacaccatggtaagtagcatangcaagttatatgctaattgactcaagcctagctacgggtgcataggtttcaccgaaatctacaccttcgactcgagaatatcccttggccacaagtcaggctttgttccttgtcaccacaccatgctcatcttgcttgttgcggaatacccacttggttccttcaacattttggttaggacgtggaacaagatgccatacctcanttctcgtgaagttgttgagttcctcttgcattgccaacacccaatctgaatcccttaatgcgtcttccaccctgtatggctcaatagaagacacacaagagtantgctcacaaaaatgtgtgacacgagatcgagtggttacccccttatgaatatcgccgacgatggagttcatggcgtgatctctttgtatcgcttggtggactc

SEQ ID NO: 44651 - DNA, 477 bp, Zea mays
  unsure (1)..(477): unsure at all n locations
tcanaggggggagcacatttgggactaacaaatgttcattttgagaaagacagggtttgtagcgcatgtcaagcaggaaagcaagttggtacccaccatccacacaagaacatcatgacgaccgacaggccgcttgagctacttcacatagatttattcggcccgatcgcttacataagcatcaccgtgagtaagtattgtcttgtaattgtggatgattattctcgcttcacttgggtattctttttacaggaaaaatcatagacccaagagaccttaaagggattcttgagacgggctcaaaatgagttcggattaaggatcaagataataagaagcaacaatgggacggagttcataaactcacaaatcgaaggctttcttgaggaagagggcatcaagcatgagttgtcttctccctacacacctcaacaaaatggtgtagtggagaggaagaatagaactctactggacatg

SEQ ID NO: 44652 - DNA, 419 bp, Zea mays
  unsure (1)..(419): unsure at all n locations
agcttanaaaagtctggtatagatctgctgttatatttatccagnccaaggaaacttctgacctgatgaacagtggccggnggtttccactctaaaatgtccttgactttgctggngtctaccgcaatccctctggcagatagaacatgtcctagaaattgaatttcctccagccaaaatgcgcatttgctgaacttggcatataactgatgttccctcaggcgcgttaacacgatccgtaaatgttgggcgtgctcctcttcattcttggaatatatcaaaatgtcatcaatgaagaccaccacaaacttgtctagctcgggcatgaacatcgagttcatcaaatatgtgaagtgggccggagcattggttaacccaaaagacattaccagatattcaaacaacccataccgcatagt

SEQ ID NO: 44653 - DNA, 499 bp, Zea mays
  unsure (1)..(499): unsure at all n locations
cganatgtgntttcctccattcattgttgatatgcaagtacacctattcatacatctcgnggatcagataaaaatattatggccactatatttacatcatatgtttcagttggagcgatacctgcgagtattaaaaggttatgtgcgaaatcgcgctcacccagagggttcaatcatggagggatacactacagaagaagtgattgagagctgtatagattacatcagtgacggaacaatgataggtgtgcctgtacctaaacatgagggtaaactatgtgggagagggagaatgggcaagaaaacttttcgcgttgaggagtacaagctagtacattgtgctcatggtagtgtactacaacatctcacgatagccgagccttacatagaggaacacctggatgagctttgtanagaaaatcagaaccgcatagaggactggatcatgatggagcacanacatcgtttcagcgaatgggttatggacaaaaacattcca

SEQ ID NO: 44654 - DNA, 191 bp, Zea mays
  unsure (1)..(191): unsure at all n locations
agcttgngctaccaccatgcagacggaatgttgaatccattccgcatgaacgtccatggaagnacaagagggagaccccgctcggacaccctctggggctgggtcacagattgcgctgtccacttgagccggatcatctacggcagtacccttcagggctgggcagtggcttgcactttccacccgagccg

SEQ ID NO: 44655 - DNA, 360 bp, Zea mays
  unsure (1)..(360): unsure at all n locations
tcatattcgagagcacgtnttcagcacctgcgaagatgtctcattataaaatagntgttgctggagcgaaactgagcctttcttaagagaagaaacatgggtttcttgaattaatggccaagacaaatacagagaagattaccacggagattttggaaggcttgtctgaagatactggtgatagcgacagtcttgatatggaaaagtggggagaggactccgaagatcgaccctggcgaccaagtcatacagcttttggaaaatcaactattaaacagagtcatcttgactatatgaggggaagatattttcgggacattattattgtaagggttgatgatggagagaggactgtgccta

SEQ ID NO: 44656 - DNA, 364 bp, Zea mays
  unsure (1)..(364): unsure at all n locations
cttcatcccaacatgtgctagtctgtgatgtttgatccagcccatggtagtcttagcaattaagcaagtgtcgagttcacctctattgaaatcaactaagtatagctgatcctccaacactcccttatatgctactgaatcatcacttcttctaaagacagtgacacctacatcagtaaatagacagttgcagcccatttgacataattgagaaacggagagcaaattgtaatctagtgaatcaacaaagaaaacattggacatagaatggtcaggagatatagcaattntacccaaacctttgaccaaaccttgtgttccatcctcgaatgtgatagctcgttggggatcttgcgttttctcg

SEQ ID NO: 44657 - DNA, 490 bp, Zea mays
  unsure (1)..(490): unsure at all n locations
tgtggaacattgaacattatctcatattctcattcaatgtctattatgctatcactctgtactataatcgcactttgaagttagcatccagctatctgcattggatcactaatctgtactagactgcccccgcttgcgaatcccacccgccactccgcctcccacgcctgcgaataccacccgccgctccgcctcccccgccgcggaacccgcaccccgcctgcggagccgctcctcaatctcccatgaatagcccgccactccttccagccaaatctcgcacgcgtncctcgttgtcccaactgctccatccgcgcaggccatccacatgtcgtgcatggcggtcgcacctccccctccacgccggagcacgcgcccaacggcgttcccctcacccaactntcatccccaactatcccgcccgtcgatttcgccccattcgtgcaggccagccacgtgccgaacaaccactccgccaagcgcaagcccc

SEQ ID NO: 44658 - DNA, 459 bp, Zea mays
  unsure (1)..(459): unsure at all n locations
tgcagcttatctncgatccgcatacaaatgatgaatctctcttatgagaaatacaagatgagtctgctgaggatgatgtcttcctaacaaagatagagggcaatatgttgacagagatggcgcctcgaggcattccagatatcaacaaagtgttcatcaaagaagggaaggtcaataccttctatcaagatgacggtttcaaagcagctaatgaatggatgcttgatacacaaggtgtgaatctttanctgtcatgtgtcacgaggactgtgatgctacaacgacaacaagtaaccatctgattgaagtgattgatgtacttggaattgatgctgtccgtccatctctctttgatgagcttcgggtggtgatatctctccatgggtcatatgtgaactaccggcatctggccattctttgtgatacaatgacatacagacgccacttgatggctattac

SEQ ID NO: 44659 - DNA, 512 bp, Zea mays
  unsure (1)..(512): unsure at all n locations
accttagatactcagcttgagcggtctaagactaagtcgagaaaattagatttgctatattattgaacgatctccaagagaaatgcctaaatctcggcaacccatgcgtgcagcggctgaaggacgtatttcattctatcggagccagttctgaaaaaatttcacctttcagcgaaaacctgcccagcaccttggaacatattgaacgcgacgttgatgctcttaacgaagntattggtgggcatgccgacttctgcgccctggtagcttctcgaggcacagctaccgcttttctgaatgctggctgtacgcacggaaagattgcgaataggccaaacttcagcttgtcagcatcagatttggttgatattccaagcttagcgcgaagcatcggaaatagatttatgacccacaattgggtaaatggcgggcgaaacatggctggtgacgaagctcgaagccaccttaagccagtgagaaacttatatgtgttacttttaccttctccttga

SEQ ID NO: 44660 - DNA, 314 bp, Zea mays
  unsure (1)..(314): unsure at all n locations
aaccgagaagctactggaaggagtggaaaatgggctgtcaagctcactgaattttgtattgaatatgttcatagatcttcgattcagtcacaggcgctggcagactttattgctgattgtacgccaggggctcttgaggaggaaaggaatatagacaacgaagcctgtacagtgctntgtgatggatcatggtgaaaccttcggagcaggagctgctgctgtgttagcttcaccttctaaagacaaaacttgttatgcggcaagcttgatttaactgacaaaaacattgtgagacgaacattgatttaggcttt

SEQ ID NO: 44661 - DNA, 515 bp, Zea mays
  unsure (1)..(515): unsure at all n locations
ctcaagctnntcatcggttgtgcatgtacattgaagctgacacaccaactcatattttatattgattcgaaaattacactctacatcggacacacaaataagaggagaaatacccttacctgcatgttctggaccacatctgtagtggacggcccataccccgcagcagtgtgccgcacgcacccactgacgggtggagcccgccatgaaatccgcaccttttcgctcatggactctgacgcatgggtccgagacgtcagatctatatcctccctcaccacgctgagactcgttagttcaatcgcgagatgtctgtcgaatattcttcatcacgagtataaattttaggcgcccacaatcctcggccatcgtgcatcttgaccatgcgccatgcctagatagcagagccgtcaatgaggagcacatatgtaatacccactttgtacaataaacctacgatgagagtataatccttcatctatatgtgagtcagatctctactcaccatcacatgc

SEQ ID NO: 44662 - DNA, 93 bp, Zea mays
  unsure (1)..(93): unsure at all n locations
ccgggacagttgctgactatcttgcccatggcgctgcgtcaacctatattggaccagaggatacggatcaatatnagtggattaaggactcat

SEQ ID NO: 44663 - DNA, 381 bp, Zea mays
accggagaggacgttagatgtattgtaactcatacatactgatgtgtgccgaccaatgagtacgacagctaggggaggattccaatacttcataaccttcactgatgatttagtagatatgggtatgtctacttaatgaaacacaagtctgaatccttacataagttcaaagaagttcagaatgaagtacaaaatcagcgtggcaagaaaattaaagcactgcgatcagatcgtggtggtgaatatttgagtcatgagtctagcattcatctaaagagttgtggaattgtccacagcttacgccgtctggaacgcctcagatgaatggcgtgtctgagcgacgtaatcggactctattggatatggtccgatcaatgatga

SEQ ID NO: 44664 - DNA, 493 bp, Zea mays
  unsure (1)..(493): unsure at all n locations
ggaagccatggnaagnagcatatgctaataatatacgaatttgcttattcctaactacgggtgcataggttacaccgatatccaaaccttcgacttgggagtattccttggccacaagtcgggctttgctccttgtcaccacaccatgctcattttgcttgttgcggaagacccatttggatcctacaacatcttggttaggacgtggaactaaatgccatacctcattcctagtgaagttgttgagctcctcttgcatcgccaccacccaatccgaatcttgaagagcttcctctaccctgtgtggctcaatagaggaaacaaaagagtaatgttcacaaaaatgtgcaacacgagatccagtagttacccccttatgaatgtcatcgatgatggagtctactgcgagatctcgatggatagcttggtggactcttgggtgtggcggtcttggctcttatacatcttgtcttcttatttgcatctcccttga

SEQ ID NO: 44665 - DNA, 233 bp, Zea mays
tgtgagttaaactttgctagcgcgtgactcatatgcttcttcttgcagtattatatgtgttgcatcatatggactagttgcttgcgctgatatgaattaatcggcatctatagcgttctttctgaaatagatagtcataaagacaatagtgcatgcggttagatagtcatgtggatcatggcgcttaatattgtttaaacaattgtgcttgtggctagatagtatgtgataat

SEQ ID NO: 44666 - DNA, 363 bp, Zea mays
  unsure (1)..(363): unsure at all n locations
cataaagaacgcgatatcgagaggtatacttgatgcatatccactttatttgttcccttgtatgatgtactgcctgtttcccaatttgaatggatgaatgtatgtatgcttgcaatcgcatagagaacgaaccggccgaagagccctatgaactcgcacgagaagcccctgatcagcactcggttgagggaggccagtgccctctgaactatctctggcctattcattctttaattcacctttcgctttacacatttatacctaatgattgactaactcttgctatgcatgtccttgattacctatttgggctgtattattattacctaactttatgctatngctcaactttaatcaatgaca

SEQ ID NO: 44667 - DNA, 419 bp, Zea mays
  unsure (1)..(419): unsure at all n locations
aggcaggtaaacaagtgggaggagcacatcacagcaagaatgtgatgaccacatcaagacccctggagctgctacatatggacctcttcggacccgtcgcctacctaagcatatggggaagtaagtatggtttagttattggtgatgactttcccgcttcacttgggtattctttctgcaggataagtctgaaacccaagggaccctcaagcgtttcctaaggagagctcataacgagtttgagctcaaggtgaaaaagataatgagcgacaatgggtccgagttcaagaacctacaagtggaggagtaccttgaggaggaagggatcaagcacgagttcttcgctccctacacaccacaacacnatggtgtggtagagaggaagaacacgacgcttatcgatatggcgaggacaatgc

SEQ ID NO: 44668 - DNA, 340 bp, Zea mays
  unsure (1)..(340): unsure at all n locations
gcttgatctacgccatatgatagaggaagccatttttatttttggnctcttaccactatatccagttgccaagtccgacatcaatgctgaactcgagtggtcactaagatatttcggagaatacaaacatttccatgtctcaccacaagtatgggatctcactgatacatctacgtccctaacagcaagtctaatgatatagcccacatccggctttatgattgtgccatgctagagaacacgccgtgtctagcctctccatttctctttcttccacatcaccacaaatgtgatgtggcatatcctgtagcccacctacaccaccttattatacttgctc

SEQ ID NO: 44669 - DNA, 446 bp, Zea mays
  unsure (1)..(446): unsure at all n locations
tagcgacctataaaactcagcttatattcagcaaggaacacctcctttgttatttcagaaccgttatatatttatattgcttccgtagccttatttacttttgcttctcaaaacccaatatcattgctacatgcatttgattttcagtgcttaattgcaggatgagaggagcaagagttggcgagtccaagcantcgcagttgctcctgacaggttcgagagccgaaaggctctgccagagaagtggaggggcatgagagacgacgaactttcagcagaaaccggcatccctggctgtgtgtttgtccacatgagtggcttcattgtgggcaacaagacctacgagggagcattggaaatggcgagagctgctctgaaattctgattcaaccaaagcatattacccgtgttaccattatatcagtaaacacatcagtaacacatga

SEQ ID NO: 44670 - DNA, 359 bp, Zea mays
  unsure (1)..(359): unsure at all n locations
agctntanagctatgtgagtatctttcacaaacttgtgtaaaatgccaaaattngaatgcattctagtgctaagatttnttttgtgctcaactggcttgaccagctgaactntctagttcagctggaggaggccagctgaacttatcagctgaacttcagctcagctgtttttaatcagttcttaccaggaccatcctggttaaaaccggttgaaccggtctctgagcggcctgtccgcgcaggtctgtcacctgctaatttttcagtcgcgcagcaccttttttaccgcgcgcaggtctgtcacctgcccttttttgtcgcgctgcacctttttcttttgtcgcgcagccattttgtg

SEQ ID NO: 44671 - DNA, 513 bp, Zea mays
  unsure (1)..(513): unsure at all n locations
acctatgatactcagcttctatcatctctgggtacctgcacaacttattaagtacattttggtacccatctttggatgggtccatcaagggtagccaataaggacttatgcacccaaatagccttggtcctagaatgtggtgaactcatcacctttctatcacaagagtcaaatttaggtctcctaagcatatatgaattgtattgacaaggtaggcttatgaattttaccctttggacaaaccttgaatatatgaccctnttcacggcaattgtaacaaatgcggtgcttgtccttgcaatgcatttgccttttgctttcatccttattgatggacatctttctcgatcgtgcaacgtttgngttcttcatgtgggggcatgaatcgacttcatggcccttctccttgcattcatagcacctcctatcgcttctctttgatctttctttggtgaagcacatacgtacatctgtagagcanatcatatgagcattaatttctcacatggattt

SEQ ID NO: 44672 - DNA, 377 bp, Zea mays
atgcgacgtggagtgcgtggagtacgccgaggccctcaccgaatccgaggccctcatcgtcgacctggagaacctcttctatgaggtgccagatgcgaagcgccacactggcaacttcgagccaccagagacggttaagttcgtccctctcgaccctagcaacgacacctccaagcaagtccagatcggcttcgagctcgaccccacataggaagtagtgctcgtcgacattatccgcgcaaacgccgaggttctggcgtggagtccctcatacatgcctggcataccgagggatgttgccgagcactcgctggatatccgaactggagcccgacccgtgaagaacctctgcgccattctactaacaaagcgcagag

SEQ ID NO: 44673 - DNA, 246 bp, Zea mays
gcgctcaccggagttcaagaactcgccggcgcacgtggaccgggtaaacctcttcaccattttccgattcgatgcgcgcatgggctctgtgtcatcccgtgaagcttctcgtgcccattaattgaacatctcccgccgtggtttggtcggagcacgcgccgccgttgatccccgcccgcttgtgtcgtggtcagaggagctccgaccacctttgacgccgacccgcacatcgacgtgaccgtcgcg

SEQ ID NO: 44674 - DNA, 330 bp, Zea mays
  unsure (1)..(330): unsure at all n locations
agcttcgngaaatattntctgaagctataaaatagttttgtgttgcgtttccgatgaggctacacttcatctcgatttgtcttgtgccttagcacgattttctcttttccaaaatatgttccgaaggtcaacactgtatccccttcttgttccagatgcattatgctgtatgatgcttatgttatgcaaaaatgatgtgataatgttatgttatgcaaaatgatatttgtgtcgcagatacatatccctgtaataaagcacacacactttttatatcagcgctgacttttcgctgtaaagcctccttaagagcttcttcgccttttactt

SEQ ID NO: 44675 - DNA, 421 bp, Zea mays
actgtgtagaatgttcatcccaacatgggctagtcggcgatgccagatccaacccatattagtcttagcaattaagcaagtgtcgagttcagctctattgaaatcaactaagtatagctgaccctctaatactcccttaaatgctattgaatcatcacttcttctaaagacagtaacacctacatcagtaaatagacagttgtagcccatattgcataattgagaaacagaaagcaaattgttatataaagaatctacgagaaaaacattggaaatagaatggtcaggtgatatagcaattttaccaagtgttttgaccaaaccttgatttccatccccgaatgtgatagctctttgaggatcattgtttttctcgtaggaggagaacatcattttctccccaaatatgtggtttgtgcac

SEQ ID NO: 44676 - DNA, 318 bp, Zea mays
atcctcttagtcacctgatgctgcagcctggggctaattgtaattttacgaagttccgtctcacgtctataaatagaggaataatgttatgcataagacatgctctctttatgtgccaaaaattgactcactccatctacgaaagttatttctgtttctaccttcgcattactattcatcaaacctaaggtacaattggaatcatttggatattatagaaaatggagataatgcttaattgagatgagatatacaatatatctctatacttcaatcttttacccttcatttattttctcaacccttttctttaattat

SEQ ID NO: 44677 - DNA, 437 bp, Zea mays
tgtgaaggttcttcatccacacatgtgctaagcggcgatgttctcattcatcccatgctagtcttagctattaagcatgcatctagaccggcctcttcttttgcaaaatcaactaaataaagtttgccgtctaatacacccttaatagctagtgaaccatcacttcttctaaagacagacacatctacatttgtaaatagacagttataccccatatgacataattgactaacagatagcaaattatatccaagactctctactagaaatacattagagatagaatgttcattagaaattgcaatgttacctaacccttttaccttgccttgattcacatcaccgaatataattgaatcctgtgaatctttattcttgacgtaggaagtgaacatcctcttctcccacgtcatatggtttgtgcatccgctgtcgat

SEQ ID NO: 44678 - DNA, 181 bp, Zea mays
  unsure (1)..(181): unsure at all n locations
agcttgtcttggctcatcctcctttntcatccaatatttgatgataacccgagtagcagtccaatagactcatgagttctgaagaagctgctggatctacaagggaatctattcttggtaaagggaactcatccttcggacatgccttgttgagatctgtgaaatcaatgcacattctcca

SEQ ID NO: 44679 - DNA, 138 bp, Zea mays
ttcgcatcgcggtgggaaggggaaaccgacttaaagatgaaaagccaaacttgacctcgaagaattactatagggttattgataaatggacaaggcattattgtaattttgcatgggctgcgacccgtgcctataaat

SEQ ID NO: 44680 - DNA, 422 bp, Zea mays
  unsure (1)..(422): unsure at all n locations
agtagtgagagagatttgtggtgttcttttgatctcttgcgctaggattgcttctttctttcattctttcttgcaatcatctcaattgtaatcgaggcaagagacaccaattgtgtggtggtccttgcggagaagtttggttcccgtttgattgagagaagaagctcactcggtccgagggaccgtttgagagagggaaagggttgaaagagacccggtctttgtgaccacctcaacggngagtatgtttgcgagaaccgaacctcggtaaaacaaatccacatgtctcactctttatttgctcgcgattttgtttgtgccctctttcttggactcattattatntctaacgctaacccgctttgagttgtgattaagttgcatattcagattcgcctattacccccctctagcgacttcat

SEQ ID NO: 44681 - DNA, 444 bp, Zea mays
  unsure (1)..(444): unsure at all n locations
taagcttcttcagcacatcagcaatcatattattcaaagggaatctgtaaccatctttgaagaaactcttaanactactatttcatcttttcctggcttcggagtagtttcctctccaccaaagcgaaccaactctttcttttcttcgttaaaatagcccaatttcaacatcttgggtaggtcacctttggagactgtggattttccaaaatctatatggctgggtttgctcggcaccacgctgctataatcatcctcagaatcggtctcctcaacatcaacttgctctgcttcagcggcagggacgtcctccgatgttaccagcctagaccacttcatggcttcagaaatcggaacagtctcagcagcttcggtctcatctccctcacgaccaaccctagcagtggagcgaactctggccatttgattatgactctcttgaaa

SEQ ID NO: 44682 - DNA, 375 bp, Zea mays
tatagagggagagcacattttgtgactaaccaatgttcattcttgtaaatacagggcttagcaacgcatgtcatgcatgaaatcacgtcggtggtcatcatccacacataaacatcctgacgaccgacaggccgcttgagctactccacatggatctattcggcccgatagcttacataatcatcggcgggaagaagtactgcctagttattgtggatgattattctcgcttcacttgggtgttctttttgcagaaaaaatctcaaacccaagaaacattaaagggattcttgagacgggctcaaaattgagtcggcttaaggatcaaaaagattataagcgacaacgggacagagttcaagaactcacaaatcg

SEQ ID NO: 44683 - DNA, 100 bp, Zea mays
  unsure (1)..(100): unsure at all n locations
ggatccttaagttaactgcaggctgcagcttctnagggagaacacgacagggactattctttgttcatttgataagacagggattgtagcgcatgtcatg

SEQ ID NO: 44684 - DNA, 444 bp, Zea mays
  unsure (1)..(444): unsure at all n locations
ttgcctcgggcagactaataccagaataagacatctcgctttgggagtggagagatggcgagagtagcgtgtaccctccgtggcaagaggctggacagaggtgtatctgtgctctcggttggcgtgaacctgatctggtcttaataaccccggtggcgagttgacatatgcaagggttaagtgctacatatgtcgtgtgattggagatcctcagctgagtattaatcgattcggatcgccgttacttcttggacatgaagacttggtcactgacttacacgtatcaatccagtgaactgaagggttgataaaaagacgactaatatacgcccagtgtttgaactacgatataaagaactcttgatgcaagtgactttacttaacctgacangataaactagattgttatgaatccactattagtaagcatttctgcaaacagag

SEQ ID NO: 44685 - DNA, 305 bp, Zea mays
acatgtgctttatctgtgatgccacaaccagcccatgctagtcttagcaattaagcatgcatccagaccggcctcttcttttgcaaaatcaactaagtaaagcttgccgtctaatacacccttaaaggctagtgaaccatcactttttctaaagacagacacatttacatttgtaaaaagacaattatatcccatattgcatagttgactaacaaatagcaaattgtaaccaagagactcaactaaaaacacattggagatagagtgttcattataaaatggcaatttaactaacccctttacct

SEQ ID NO: 44686 - DNA, 456 bp, Zea mays
attacggaactttaaactaagcttgctatggagccctctgttgcattctgaagattatgggtttataggaagggaaaagaaacagacatgaacaccacaaattctatgatgagtatgcaagcgctatcataataacaagcctattagatatgttggggcattgaatacacaaatctaacaaatttatctccatattgcaaattcaacacaactcacctataatattatggggtgttcaagatgacttcagtttcagctccagtgtggagctgtaaattatattatcaatttaatagcttcaaaaaaattcaaatattaatcaaaataacttatctatatatcttttaaaagcttacaagtccagatccacgatctttctgaagcacctaatgatctgctccatcaactctaccaaatttcgtggagctgtagttatcacaaacagggccttaatct

SEQ ID NO: 44687 - DNA, 409 bp, Zea mays
ggtgcacacctccgtgaggctccccgagcaaggaatctgtgttttcttctccggagaagccagtccacgctcgccggagctctgacccccgccggagcacgtggaccgggttagccactccaccatccttcgattccttgtgcacacagtcgttgcgtgaccccgtgatgctcactgtgccctcggattgcgccaggtcgacgtagtttgggcggtgtactcgccgacgacgaggacacccgcctgcacgcgtggaccgggcgattcctgccacctccgacgccgagccgtacctcgacgtgaccgccagagtctccccgagccgaccccacccttcgacgaaccttactcgacgtcggtaagccgtgcgcgccttttctttcccgcggttactgtgtcagtgaaggga

SEQ ID NO: 44688 - DNA, 403 bp, Zea mays
atccttgagtcacctgctgcatgcaagcttgccgggcaactatcatgtgataaattctatctatgcacatttataaggaaaatacatgagaattatagatgattgcattatttactctgcccatataacaaactacgtatgggtatgggtaaccgacactcattatagcccattgcatatacaatcatatcactggctcgactggcggccattcaagcttggaagtatgtatagtacctgaactaagtgcatgctcttagccgaagcgcacgagctgtcaactgcaccagacaccacaacgacatgcatcatgcatgcagagccagacacacgacaaaacaacacgtgcaggagacaaacttagctagtgtgcgccagctagtcagacgttcgtaccactacg

SEQ ID NO: 44689 - DNA, 433 bp, Zea mays
tgacttatatgctacgtctaaataaccaatagatattgtttaatcagatagagatgaaacatattgctctcaacgatgatttcacgcgctttctaataccttggaaaaggattgacacgatgaaactagtttcacctttttctaataaatacagtatcatatcatcaaaaatctcatgtgacatactaatttatattatgaactctcccataaaactctcattgagaatggcataacgctctgtttggtttgagggactccattttacacaatttagtctctaaattatcaaacggtggaactaaagcaatgactatactatcttagtttctagtctctcaaggggtgaataaaaaaagctaaatcatattaatttcaccttttgcccctcatttatttcagctgcactaatgacggaagaatactaagggta

SEQ ID NO: 44690 - DNA, 381 bp, Zea mays
cgaattctgaacattgtctgttgttaagaaagacgctgccgaaacgaagttgagtctttctgtaaagatgcatctgggctttcttcgatctatgtcgaagaccaatacacagaagatcacttaagaaattttggaaggattatctgaagacactggtgatagcgacagttatgatgccgatagtggtggtgaagactccgaagataccccttggcggccaagccatgcggtgttcggcaaatcaagtattaaagaaaaccatcttgtaacatgacgggaagatattctgggattcgcctgtgaagggccgacaacgatagaagacttgcccactcccgatgaagagaagttgaatatttcgaacctcctgaagctggatac

SEQ ID NO: 44691 - DNA, 321 bp, Zea mays
  unsure (1)..(321): unsure at all n locations
agctngacccgagtganaccgtgtctgttgatgtgtttcacgcagtgcaaacacagcgtctgatatggacgctcaaacacgcgtatgacaatgtgccgatgtatcggcgcatattcgacgcagcaagcgcacatcctgatgatttcagggaactttcagacctgcgtaaatttccctgtaccaccaaacaggatctgcgcgacaactatccctttgacacctttgccgtgccaatggaacaagtggtgcgcattcatgcttcttcaggaaccacaggtaaaccgacagttgtcggctatacgcacaacgatattgattact

SEQ ID NO: 44692 - DNA, 451 bp, Zea mays
  unsure (1)..(451): unsure at all n locations
ntagtgactagtgagagagatttgtcgtgttctattgagctcttgctcttggatcgctttcttctttctcattctttcttgtgatcaatactcacttgtaaccaatgcatgagacaccaattgtgtggtggtccttgcgaggaagttttgttcccggttgatttgagaagagaaagctcactcggtccgagggaccgtttgagagagggaaagggttgaaaaagacccggcctttgtggcctcctcaacggtgagtaggtttgcgagaaccgaacctcggtaaaacaaatccttgtgtctcacttgcttattcacttgcgatttgtttttacgccctctcttggactcgattatatttctaacactaactcggcttgtaggtgtgattaactntgtaaatntcagtttcgccctattcacccccctctatgcgaattttacaagtgccgaa

SEQ ID NO: 44693 - DNA, 264 bp, Zea mays
  unsure (1)..(264): unsure at all n locations
agcttnctcttgggtactcccttcgtcccccgctcttctgacgtgcctctccatcctcctcctncagagatcaacgagtggtaccagcaggtatacagggtgccttttatgacagcagacgacgtcgaagaagaagaagaagcttattttgatgatcgtgagcagtttgtcccacctccgtatcacggggaatcgggccaatcattctctcaccctccgccccaagatccgtctggcaatgctcctcccccggatcagtctggg

SEQ ID NO: 44694 - DNA, 410 bp, Zea mays
agtggctaaaggctatattcacaaagaaggagaagacttctctgatacttatctcacctgtgctagaacgaccactattcgagttctactttctttggctgcctcgtaaggtctccttgttcatcagatggatgtaaagacagcttttcttaatggagagctggacgacgaaatctatatggaacaacctgatggatttgcagtaaagggtcaatatagcatggtgtgcaaggtattgaaatctttgtatggtctgaagcaagcaccacaacaatggcatgagatgattgacactactctaacgtctgcaggctatggcacttatgaggcagacaggtgtgtatattatcactgtggtggtggcgacggagagatattgagcttatatgtcgatgatatattgatatttg

SEQ ID NO: 44695 - DNA, 439 bp, Zea mays
tctaaagggagagcacattctatgactaacaaatgttcattttgataaagatagggtttgtagcgcatgccaagcggtgaagcaagttggtgttcatcatccacacaagaaaattatgacgactgacaggccactggagctcctacacatggatttattcggcccgatcgcttacataagcatcggcgggagtaagtactgtctagttattgtggatgattattctcgcttcacttgggtattatttttgcaagaaaaatctcaaacccaagagaccttaaagggattcttgagacgggctcaaaatgagttcggcttgaggatcaagaaaattagaagcgacatctggacggagttcaagaactctcatattgaaggcttccttgaggaggaaggcatcaagcatgagttctcttctccctacacgccacaacaaaat

SEQ ID NO: 44696 - DNA, 456 bp, Zea mays
  unsure (1)..(456): unsure at all n locations
agcttctanagggagaacatatgttgagactatctcttgttctttttgagaaagacagggtttgtagcgcatgtcaagcagggaagcaagttggtgttcatcatccacacaagaacatcatgacgaccgataggccgcttgagctactccacatggatctattcggcccgatcgcttacataagcaccggcgggagtaagtattgccttgtaattgtggatgattattctcgcttcacttgagtgttctttctgcaggataaatctcaaacccaagagaccttaaagggattcttgagatgggctcaaaatgagttcggcttaaggatcataaagattagaagcgacaatggaacggagttcaagaactctcatattgaaggctttcttgaggacgaaggcatcatgcatgagttctctcccccctacacaccacaacanaatggtgtagtggaga

SEQ ID NO: 44697 - DNA, 440 bp, Zea mays
taactaaagtcatctaagagtcggctagctagaacaacgataccgtccgctatacagcatacacgtcggcttgcctattattatcacaattcgagacaccacatacactacaacatttttataaacattcatattcacaagtattttgcacaccgaccaaatcatacaaatcgtaaactactagtctccaactcacaatcaccatgcatttactccccgatcatgaacacatacatgtttatcatacgaacagagcatttcaataattatcctaaaacaattaactccattacacaacttataccacaaacctacttgacttgcttgaagtgtctactcgaatccgtcagcacaatgacacattatatgcgaagcataatttaacgaacacataatacgcatcgactcgattcgacttataaatatcgagaaagcgatga

SEQ ID NO: 44698 - DNA, 443 bp, Zea mays
  unsure (1)..(443): unsure at all n locations
agctataaagggagagcacattntatgactaacaaatgtttatttttagaaagacagaatttgtagcgcatgccaagcatgatagcaagttggtgtgcatcatccacacaagaacatcatgacgaccgacaggccgcttgagctactccacatggatctattcggcctgattgcttacataagcatcggcgggagtaagtattgccttgtaatagtggatgattagtctcgcttcacttgggtgttctttttgcaagaaaaatctcaaacccaagaaaccttaaagggattcttgagacgagctcaaaatgagtttggcttaaggatcaagaaaatcagaagcgacaacgggacggagttcaagaactctcaaattgaacgctttcttgaggaggagggcatcaagcatgagttctcttctccctacacgccacaacaaaatg

SEQ ID NO: 44699 - DNA, 122 bp, Zea mays
  unsure (1)..(122): unsure at all n locations
cctcccgngatccttaagtcaccgcngctgcagctcggcaagtcactcgactgattttgtttattcccgcctcgctgcaacatgacacccgttagtgcaacacaacaagcaatggatgaatt

SEQ ID NO: 44700 - DNA, 443 bp, Zea mays
  unsure (1)..(443): unsure at all n locations
tgttntagagttnttattaaactattctggacaagctntcttattcgttattgttgcttatttagtatacttcaatgcctaagccctgattttatatttttcatagtcttttgccccttttcttcaattctacttaaagagctcaattagggttggtattagggtttcaacattttgctctttttgaaaatcttatttgtttggaacatgattctttagatatacacttagtagatcttttattcttaagttaatttgatgcctcatgcttaatttggttcacataaaatgatggttcttgggttagcacttgagagaaaccctatgtgacactggggtgtcacatccttccccccttaaaggaatctcgtcccgagattcgggtcagagtccctcccgtgtgaagcaaanggtgagacttacacgaagtgggtgctctatta

SEQ ID NO: 44701 - DNA, 171 bp, Zea mays
cgatgacagagccagcccatattagtcatagcaattaagcatgtgtctagtttatcccggttatcattaaaatcaactaaatatagctgcccatctaacactcccttaaatgctattgaatcatcacttcttctaaagacagtaacacctatatcaataaaaaagacagtt

SEQ ID NO: 44702 - DNA, 392 bp, Zea mays
ctatgacaatgtcgtgtggcaggcaaaagtacgtatagtgcttgacaaagtcactgtgagacaactatttaactcctcataataattgttagcattaatctactcacatgtgatataactgtttctaataaatcgtttgtgtggctttagtcaaagttggatgtcgatgttaagaatgagggaccaagcaaagatgcatgctcagatatcataaagaggggagtgaggcagacgatgtttaacctgaaaaggaagtacttcgacgagtcacttacaaaaaacagttggtgccatgcaacctcccctaaaataataaaatgattgactggctgttaatattgtgtgaccaaaatcaggtattactcatttctgctttgtacttgcatgaacta

SEQ ID NO: 44703 - DNA, 343 bp, Zea mays
  unsure (1)..(343): unsure at all n locations
atcctcttagtcacctgcggatgcagcttctcacgctttcccagtggtcggcaatcttgtctgaatggctctctggtaagtcgctctagcgttttgaggccaaacggcatggaggtatatcagaaagctccaaacggggtgatgaatgttgttttttcctcgtcttcctttgccaggctgatctgatgagagtagcaatccaagaaggacaacacagaacacccggcggtcgagtctaccacctggtctatcctaagaagtccgaaaggatccttcngacagtggttggtgagatccgtatagtcgatgcacatgcgccaatccactttattctttttgagta

SEQ ID NO: 44704 - DNA, 431 bp, Zea mays
tcggtgttatagcgtatccgaagatgaaggaacttaccgtcttaaagatggaatgaccttttagtccataagggtctgagtcattgttgtaaacttttataaggggtatgattgtaattccttacaggctgtgtcttgtgcctataaatagtgaacagtattcctttactgttcacgcaatccggtaactgctaacgcattactctggagttattgttctttgtcaaggcaaaggtacaaatgtagtcaaacatcaagttttaatatctgagttaatattgtaatatgagtaaataatgttattcattcgtaatattctttaatgttttatgcttcatattttattttgcattattttacttttgactacgaaggtaataccttcgtagtctatgaccttcgtccgaagctcattaaattctcatggaaat

SEQ ID NO: 44705 - DNA, 410 bp, Zea mays
  unsure (1)..(410): unsure at all n locations
agcttgcctcggccaaagagtctttagtatcttcaatagagaacacagcttcggcttgggccagaatcttcacatgttcgcatcctgccttctccaaaatagccgcaattcccctggcacctgagaaggcgtagacatctccacggccactcaaaacttcctcaaaagcttcggcttcaccattgatccagtcgattggaccttcgggatcgcctagtacgaagttgtcttcattcaaatatgcgccaatattggcgaagctggtttttatcctttgtacacatgctacatatttttcatagcatctttcttttgaagaacgaagctccacaactgtttttcccagtaattnttccagtagtcaatggcgtctcagtcagcttcgacaattgcacattntaatttttctt

SEQ ID NO: 44706 - DNA, 401 bp, Zea mays
  unsure (1)..(401): unsure at all n locations
tgacatatcanaagctttcgattccatcaactgatcatatctgttataggtattgagagctctangtttttcccataagtggagaaattggattcccacaatattatgctcttcctcttcaaaaatcatcatcaatggtcaacaaacaaatgcaattaatcacatgcatggcgtacgtcatggtgattcgctatccccgttcctggttatcctatcaatgaaccctctgcagaggatgattgaaatggcggcagatgctgggcttctggggcgggttctaccaaaaaaggctaaatggtgctgttctctttatgcatataatgcaggagtgtttgttagagccaataaagagaacttgaaagttctgaaaaggatcctaaaaatctttgaaagggtgttta

SEQ ID NO: 44707 - DNA, 122 bp, Zea mays
ccgacggatcttaagcactgagcagcacttgaaaatgagacttttttttcttcccggttaccaaccgccttaaaaccttgtgggttggaccattagcgcggctcggtggttttatcaaaagg

SEQ ID NO: 44708 - DNA, 440 bp, Zea mays
tctaaagggagaacatgtgttaggtctaacaaatgtaactttcgaaaaagatagaccttgtgcagcttgtcaagcatgaaaacaagtgagaagtactcatcacatcaagaatgtgatgactacatcaagacctctggagctattgcatatggacctctttggacccatcgcctacctcagcatcgagggaagtaagcatggttttgttattattgatgatttttctcgcttcacttgggtattctttttgcaggataaatcaaaaacccaagggaccctcaagcgctttctaaggcgagctcaaaacgaatttgagctcaaggtgaaaaagatcagaagcgacaacgggtccgagttcaagaacctgcaagtggaggagtaccttgaggaggaaggaatcaagcacgagttctccgcttcctacacaccacagcataatg

SEQ ID NO: 44709 - DNA, 407 bp, Zea mays
ctacacttgacaatccatttacccgatgaagcaatccttagaggtccagtgcaatatggctggatgtacccagtagaaagacgtttatatactttgaaacattctgtgaggaacatggctcatcctgaaggttcaattgcagaatcatatgttgctactgaatgcttaaccgcgtgttcgaggtattttgatgatcttgatacacgacacaacagggagggaagaaacagagagcgtgttgatttgaccaaaggcgagttgtctgtttttcaacatggtgttcatttacttggagcccctacgattacatatgtagaaaaagtatttgaaaagatggtttggtacgtgctaaacaattgtccggagggtgagccatatatagtgtatgtactcccatgtacatgttt

SEQ ID NO: 44710 - DNA, 443 bp, Zea mays
  unsure (1)..(443): unsure at all n locations
tcgtattattccggtatgctgcaatgccgtctntagtctgatggtacctgttcacacattgtactacacaaatactgttaaatcctgtttttgaggaccttcggacgccgaatgtccccatcagaagccaatgccatccttgatgcccgggtgtctcccattataaagcatgctacgagcaaatttaaatttctcattctctatgttgtgctcggcaattttagcatctagttttgctatatgatcattttgttgtttaattaaagccatatgatcatgaatagcattaatatcaacatctctacatctagtacaaatagtgacatgctcaatggtagatgtagacggtttgcaggaattaagttcaacaatcttagcatgaagaatatcattcttatctctaagatcgaaaatagtggcattgcaaacatcataatctttac

SEQ ID NO: 44711 - DNA, 414 bp, Zea mays
  unsure (1)..(414): unsure at all n locations
acttgacctccaggatntattaacagcaaatgattctccttcttggtctgatatcaatttgagggtaaattttcagacgggagatgaaagagaagtaattggtggggactggataaataaagttgtagtgaacaacaataattcactcggtgactgggagggtgacaatgcaactttacctgacttcttttaccaaagatatcattcacgtatgagggagaagcagttccagaggaataacacaagacaaaatgatgaccatgagtatgaagagcaaaggtctcgattttactctaccaatactgatgattctgatgacattgacatggcaacaagtgattcctcataatcagatgcgctatggcagcagctcaatgtccaaagcatggataactctattattttgagcggttc

SEQ ID NO: 44712 - DNA, 339 bp, Zea mays
agcttgtgaagattcttcattccaacatgggctattctgcgatgctagagccaacccatgttagtcttagcgattaagcaagtatcgagttcagctctattgaaatcaactaagtatagctgaccctctaatactcccttaaaagctactgaatcatcacttcttctaaagacaagaacacctgtattcgtaaagagacagatgtagcccattttacataattgggaaacagaaagcaagttgtaatctaaagaatctaccagaaaacattggaaataaaatagtcaggtgatatagcaattttacccaatcctttgaccaaccttgatttcatccccg

SEQ ID NO: 44713 - DNA, 444 bp, Zea mays
  unsure (1)..(444): unsure at all n locations
ctgaatacattgaggaatanatgctggtctcatgtggagcttgtacattatntattttgcgtcggatagtggacctgttctgcttctgccgctgcgacacaacatatctctggtttgattacccaaaggttcctgctccattgcttgcttggctaaacgcacagtacacaaacgaagttcacattggtggcagccatgtgaggacgatggggctccggacgacgtggacgccagccaggacgccgtggctccacctttgaactctgtaacctaaccttgacacggtaatggtagtatggtacgtcgaggacgacggacccgacgttcgtcacggtgcgacgcaccgtcagcgcaacatatggacggataattcaagtcaccaagcgaactgaaagtgtgcttgcatgtcttgctcgagttctttgggaaagacctgaactgcaa

SEQ ID NO: 44714 - DNA, 183 bp, Zea mays
ttacttatttgtccctggtggaggctgttggttccaaatgaaagggagggagttgtttgcctccaaccacaaaaaaaaaaccgcgtaaaaaaccttgaaaccccaggaaaaaccccctgaacaaactgttgtggggaggaaagtcccttgaccaaattagggccaatcattttttttaacccc

SEQ ID NO: 44715 - DNA, 422 bp, Zea mays
gaacttatatactaagctttccaggttatgagggtttcctgcacaatactgatctatatgttctgagtgaagccctttaatcatggcatcaatgacaatttcattgggcactatatgcgcttgttctctcagacgtaggaaccttctgacatacgcctgaaggtactcctcgtggccttgcgtgcactggaacaaagcctgagcagcgactggctttgtctataatacttggaagctggtgattagcatatccttaagcttctgccatgatgtgattgtccctacccgaacagaacagtaccaagtttgtgcgacacttttgactgccatgacgaaggatttcaacatgacttgagtgttgcccccataagaagatatggttgcctcgtacatcattagaaactgcgttcggtctgagtgcc

SEQ ID NO: 44716 - DNA, 394 bp, Zea mays
gtcacctgaggcatgcaagctagagcagtaactagcttcgtctgaaacccttgtatactggttatcaacatatccttcagcttatgccaagaggtgattgtccctggccgaagagaggagtaccaggtttgagcgacactcttgacggccatggcaaaagactttgccatgactgcactattgccaccatacgaagatatggttgcttcatagctcatcaaaaattgcttctggtctgtatgaccgccgtacatggggagctggggtggcttgtaacactggggccatggtgtagcctgcaattctgttgatagaggagaagcatcatcaaaagcaaaaattccatgatggaaatcttcataccaagcgtcctcattgtagaatccttcctgat

SEQ ID NO: 44717 - DNA, 52 bp, Zea mays
  unsure (1)..(52): unsure at all n locations
tgacacttacaaactaagcttgcacctaacacactangatagcagatcaagt

SEQ ID NO: 44718 - DNA, 423 bp, Zea mays
  unsure (1)..(423): unsure at all n locations
ngaaggccaagtcaagaagtaggccccaatatatgttgtattcgaagttcttagtttatcaaagaaaaattatacagaattggagaaagtactgtatgctgttttgatggcctccatgaagcttctgcattattttcaagcttacaacataattgttccttcttcacaacctttgaaggatattatgagaaaccgagaagctactggaaggattggaaaatgggctgcagagctcaatgaattttgtattgattatgtccacagatcttcgattcagtcccaagcgttggcagatttcattgctgactggacgccatgggctcacgaggaagaaatgaataaagatgccgaagcatggacagtgttttgcgatgggtcttggggaaccttcggagcaggagcagctgctgtgttggtttcacc

SEQ ID NO: 44719 - DNA, 444 bp, Zea mays
  unsure (1)..(444): unsure at all n locations
atcctctaagcaccgcggctgcagcttctctatcccttttttaatataagacctaacatctattctttacttcaagcagagcgcgcgctgcagctctacgtttttgtccttgcctcgcccttattaagagagaatgcacaaaggttgctaagttcctaacagtttgcttcactcatctcaagagttagttcctagctgaacaaagaaatggataacaatctttctattctccggcaacttatcagttntaagacagaatgcaaatggtgaaatttcagagaagaattgtaattctcttttcatagagggtcaatatctttgaatccattggaaactattgaaactctttatgcgttataatggataggcacaaccaaaactagtagaagagctcagcagcaggcaactcagacacgtgcatatatgtatgtcggttattttgct

SEQ ID NO: 44720 - DNA, 429 bp, Zea mays
ggcgggcggcctggaagcacacccacatgttcacgtgctcgacgagccactcgaccttcgtctccctgatgagccgctccacgtggcccggcacgcacagcgacagcgcgtccaggaacctgctgaggtccctgcggtcggcgccgtcggccatcccatctggaacggacgccagccggatcccgttcagctgcgcgctgccatcaccggcagggcccggcgacgacgaccgcatggcgtcgagcacgatggcgtggacgggctcggtgctgacgaatgtgacctggaagccgcggtcgacgaggcggtgcgacagctccatgagcggcgtaacgtggacctgcgccgggaacggcagcaccatgacatggggcgccgcactgggcgtgcccatggccactgtcgtcgctctctgaaatattccttcat

SEQ ID NO: 44721 - DNA, 427 bp, Zea mays
  unsure (1)..(427): unsure at all n locations
tcggcatatttgcttgtccactcttcgtgagcccttatcttccaatcagcgatgaaatctgctagcgcttgagattgaattgaagatctgtgcacgcagtcaatagtgaattcattaagctccacagcccattttccaatccttccagtagcttctctattcctcatgatatccttcatgggctgtgatgaaggaacaattatgtgatatgcttgaaaataatgtcgaagcttcctggacaccattaacacagcatacaacaccttctccaaatctgtatagtttttctttgataaactcaaaactttggagacgaagtatactgggacttgctctntagcttgtcctttaagtttctcttgtacaagcgccgcacttactgcagagtgcgaagcttgcacatacaatatcaatggagccccttaca

SEQ ID NO: 44722 - DNA, 443 bp, Zea mays
cgtaaaatatctggatatggttcgaagagtcgattcttctctttataggttttctgtcaaaaatatccctcgaggacaaaatgagcatgatgatttgctagctaagtcagcagcacaggggctgcctttaccttcggacgtgttcttcgaaacaataaaggcaccttcagtggaactccttgaaagagcagtcctcaatatatctcctatttatagcgaagattggagaactgaaatcatttcttaccttcagggtaaattcctttcagatgacgaaacttataacaggaggatagaggcaagagctcgtccatatgtcatgatagaaggggagttgtacaagcatggagtttgtgctcacgtgcttaagtgtttatctagaaccgaatgcatagagttgatgaaagaaaacatgcatgcctgtgtggatcccacattggatc

SEQ ID NO: 44723 - DNA, 360 bp, Zea mays
  unsure (1)..(360): unsure at all n locations
agcaagctgtactgagtgtaagcctgaatgacttgatgtctttttctcttctntgagttcacgtcgcatgcctccccttttatagttcaaggagggcatgtacaagggttctgagccccgacacgtgggcccagggacaaatggaaggatggaactattgcttgccatgcccgtgtaatcttcgtacgccctgacacccgagatctgcgttgtctcggtgcgcaagggaagcttttcgtatataggatgagcacagtgcatcgcgcaacacgggcacattgtcttgacaatggacttgataagtgcgccgtctgcacggggccctgtgcccctgccaccgattgacatgaccaataaatg

SEQ ID NO: 44724 - DNA, 418 bp, Zea mays
ctaagcttcgcggatgcagataggaaaccgacttatttatatttgctattcagacctcggtggattactatagaattactaccaaatgtaaagggcatgggtgtaattttatatgggctgtgtcccgtgcctataaataagtgaacagtgcccccgtactgttcacgctgacctatcattttgctctggcgtcacgcttgtactcttttaccttcctttaagccgaaggtacacttgtaattggatatcatttctatttttccataatagtaatataaaaatgagttgataatgattgtttatattgtcccttatatttcatatgcttttttctcttattaacatatactgcaattatgaaggtatgtccttcataaccttcgtctgaagatcattatatcctaagggaaataatgct

SEQ ID NO: 44725 - DNA, 369 bp, Zea mays
ggtctctgtgaatggctggtcgcggtggccggcgctctggtggctctggcgggcagcgcataactcgccagagctaatgaccgggtctggtcagtgagggtaagtgtggagtgaggtgtggcgcgtccggggtggtctttaagggcacaggcgatcatgaccgagggtggctctgacacgagctcatagggtgcgtgggcgagcgccagtgcgtgctctggcgcctgtgcacggggtcgagcacgagccatcgcatagagtggtcaagttcaagcgcgggattgctccaaatcttcttgattatggccatgatcccgttgagagatctcttcacctgaccttccttttgtcgttatgtgtggaggctta

SEQ ID NO: 44726 - DNA, 441 bp, Zea mays
tatgaagattcttcatcccaacatgggctagtctgtggtgctctatccaacccatgttagtcttagcaattaaacatgtgtcgagctcagctttatcaaaatctactaagtatagctgaccctctaacacacccttaaatgctattgaatcatcacttcttctaaagacagtgacacctatattagtaaaaagacagttgtagcccatttgacacaattgcgaaacagaaagcaagttgtaatctaatgaatcaacaagaaaaacattggaaatggaatggtcaggtgaaatagcaattttacccaaacctttgaccaacccttgatttccatccccaaatgtgatagctcgttgggggtctttgtttttctcatatgaggagaacatcactttctccccggacatgtggttagtgcacacgctgtcgagtatccaacttg

SEQ ID NO: 44727 - DNA, 449 bp, Zea mays
agcttatcggtaatccagctccagatgtctttgctgttattgaagactggataaactgtttgtgaagttcttcttcccaaatctgcttttctgacagcatgattctgcaaaaaagaattaggaagtggtaaatgagataattctacagtgttctaaatagtcatcgatcttcacaataaaggataatcaaaccttataacttcagacaaagattcctatatttccaaacaccttcccagttttattaatctaatatgaaatgtaagaaacatataactagtgaaaaggtgtatttatgttgtgaagaattcaagaagaataagaaaaggcaatctactaaggacaatacctctgaatctacaataaattgacagtcttcagcagcgtgataaaatgatgaagctgggcgcaaaaatttggctgactcaaactttccatcctcatagcct

SEQ ID NO: 44728 - DNA, 462 bp, Zea mays
acgtgacacttaaaactcagcttgccatccgcctcactatgcggacacgggtgtcatatctcttgaagattgctccagcagccaactattgctgttcaaggcttacatccattgtgctcctgggcccacatgtcgggctcagcgctcttatacacgccccccttgtgctatagaagggggagcatgtaacgttacataggggctcaatctagaggcttggactctcaagtttgcacagcattccaacacacagtggagtagggtgttacgctccggcggcccgaaccactctaaatcctcgcgtgttcatgtgcttgatgttcgcttatcaagacagacaaaacgcttaaaccccttcctcatcttagaatttaagacggatgcactccgccacccggccggagaattccctctccgaccgagtggatatcgtacaacggtgtaagtagcgttttagaatcc

SEQ ID NO: 44729 - DNA, 377 bp, Zea mays
tcaaggcttcacctctacacaaaggatgtttatggaacttgtgtgagtagtcactaccaagatcaaaagatataagaccacacatgaaagtggtatgccctcttgatccaatggaaataacagatgttgcttgatctcttcaagacaacatatagagtgtttcaaggataagtcaatggaagacaacacatcagcgtaattccataatggatcatgactagagacctcgataccgacatgcgccaagcagcaaaatcctgtgtgcacattcataggaggctctcagcttctccgcggtaccataagttcttaaccatgtcaccaatagattgagcaagggtgattatacacaacgaaatactccactaataaagatg

SEQ ID NO: 44730 - DNA, 441 bp, Zea mays
  unsure (1)..(441): unsure at all n locations
agccttgagtggaatagcgagattattctatctctcttgtgtgtctagaattgaatgctacagctcttgtaagtcgttggaaggtggaaaacttggatgacttgaatgtggggtggctcnnnntccnccctcctccctccctccctttcttcatctccctcctccacctctcctctctactcttttcactcccctcattttacatctctttcttctcctccctcccctccatctcttctctcttactcttctcgtctttctctctctccttcctctccctccttttttcctctcttccatctcccctctcccttccccctttcccttcctctccttctctctctctttcttctctcttttcacactttcctccctttcttcttcttccctttcctctccactcctctacttctttcacttatctctccttcttatcctctc

SEQ ID NO: 44731 - DNA, 439 bp, Zea mays
tcagctccatctatgttatggatcgcctttgtttccgtctctctccttcagccctcctggcagctttttgactcccatgaatagcaatgggcccttgttccgaaggtatcttcatgcataagtatgctggatgaaatattgcttcaaaggcattaagcgtccctcgaccaatgattgcattgtatgggtactccatgtcaacaatgtcaaagacaacttgctcagttcttgtgttgtggatgtaaccgaaggtaactaacattgttattttgccaagtgccacaatatgtcttccttcgaagccacaaagagggtgtgttgcatcatgaatcttgtcttctggttcttgcatctatctgaaagcctttgcaaagatgatgtccgctgcactacctgtgtcaaccagaacattatggaccagaaatcccttgatgacaca

SEQ ID NO: 44732 - DNA, 434 bp, Zea mays
tcaccgagcaagcgaagcacggataaacgcaagtgaagatattgtcgtgtaactggaagacgccagacatggtcgaagcaagctccatgctagaagacgttggacatggtcgaaaggaagcagctcgacgaaaaaacaaacatacatcgagcacgtaaaggaaatgtgagtgtagagaatattgtggaagtggaagacaccggataaagccgaatcaagaatccccaagctaggatacgccggatagcgaatatggcggaagtaaataacttggaaaaaaaggaacattggaaaaaaacttgacgaggaagctgagacgacaaagaaactgatagaaacgaagcatgtgtagaaatgggcacatggaaacctcataacatatccaccaaaacagatcggaccagttaagagagctcgaggggaaaatatgtgtc

SEQ ID NO: 44733 - DNA, 411 bp, Zea mays
gacacttagatactaagctaccgcttgaagctgatcgcttcccttgctttggtttgcttggctgcccttgcgacctttaagcaccgtcttgaatcttttgatgatgagagccatctcttcatcattaagtccgaccgcctcaaactgtgccaccttgctaggtagcgcctccttgcttcgtgttgctttgagagcaaggggttgcggctcgttgatcggaccattcaaggcgtcgtccatgtgccttgcctccttaatcatcattcgcccactaacgaatttcccaagaacttcttcgggcgacatcttggtgtacccgcgattctcacgtatattgttcaccaaatgacgatcaagaacggtatatgaccttagcattatgcggacgacgtcgtggtccgttcatcgcgt

SEQ ID NO: 44734 - DNA, 443 bp, Zea mays
  unsure (1)..(443): unsure at all n locations
cgcgggcgtgagaacattgttgtgttgttttggaacgcgtccacagcggaggcgtgggcgagaggttaaggaagctgaaggggcttgacatgtggggtccatggggcagcgaggggaaatccacgaacgggcagtcaacactgacggaaagggcccactgcacagtgggagatacggtgcgcgagcgcgagataatcgacgccgacaggactggcccaccgggcagcgggagggagagagagaatgggcgcgtgggctggcaccgacaggcggngtccgcctgttatgggctgatggcgtgcaagcgcgggcgcgcgcgtgaagctaggcctgctgggccgacttgggctaaatgggggttttttcatttttagagaattactaattgcttctctattattttctctaaggtttcaattcaatcaaatcaagttcaaattcat

SEQ ID NO: 44735 - DNA, 422 bp, Zea mays
  unsure (1)..(422): unsure at all n locations
tcttgngccaagctcacggtctcaccatgaagctgttcgagtgtttgtttcgttcggagggggaccggaaaggagttggcacggctgtggcgctcgggcggcactggctgatcgctgggaggtcgccggatgcaacgcgctggctcaggcgacgttggcgtgctacggaggaggtaacgggggaagcaaccgagcgctggggcgggttttataagcgcggacacagccggtgcgccggctccaccgtttggcgcgacacgggcactcggtgcgcgcgcgcgggcgtgctctggcgagctcatatcgcgtcgaacacgtggcgcgttgcttcttgccgtgttcttcgctctgctgatcggccaggcgtacgaatcttgccctaccgcctgtgggagatttcttccctgcacctatggctacct

SEQ ID NO: 44736 - DNA, 461 bp, Zea mays
  unsure (1)..(461): unsure at all n locations
agctntangaggctaccccatacaaagttacatgatgcttatgcacctaaatgtctgcatgcttactagtttaatatccacaacaaaaggctaccaaatcatgttctatggctaccgggtacggagacaagtaaaagcttagtactgccctatcaacatccgcttttgaccataaacagaagctaccggatttttcttcatcctgccgctcgggaatacctgtattcaacaacactgactttactgcttgtagactgtagtacaagacttgtagtacaagacatatttacattgagaggaagttcatgccctctgtctctctaacagtgttctctgaatggtattctaaatatataggacaatgttgaatcctctctatatacagnttctctctcatctgctctatccattataatactttaaacataagtaaaatgtgtctctaatatagttatatgtat

SEQ ID NO: 44737 - DNA, 420 bp, Zea mays
ctataaaactaagctatgaagattcttattccaactgggctagtcggcggttttgtttctaccacaagtagtcttagcaatcaagcaagtgtcgagttcagctctatcaaaatctaccaggtatagctgaccctccaacgctcccttgaatgctattgaatcatcacttcttctaaagacagtgacacctacatcagtaaataaacagttgtagcccatttgacataattgagatacggaaagcaaattgtaatctaaggaatctacaagaaaaacattggaaatagtatggtcaggtgatatagcaattttacccaatcctttgaccaaaccttgatttccatccccgaatgtgatagctcgttggggatcttggcttctctcatatgaggagaacatcttcttctcccctgtcatgtg

SEQ ID NO: 44738 - DNA, 455 bp, Zea mays
  unsure (1)..(455): unsure at all n locations
agctnganataatgccgaagcttcctggatgctatcttttcagcatataacaccttctctaattctgagtagttttctttgatatactaagaacttcagatacaaaatacaccgggacctgcttcctgagttggccatcatgcttctcctggacaagtgctgcacttaccgccaagtgcgaagctgccacatataataacaaaagagcccctggcgtaggtggaggtagtgctggtagatctatcaaatactgcttcagctcttcaaaggccttttgctggataggtccccattgaaagacttcagctgacttcagcacttcgaagaatggtaagtttctctctgctgatctggatatgaatctattgagagatgccagccttcctgtcaatctttgagcccnnctttttgtagttggtggctccatccgaagtatagcttcaatcttacttgga

SEQ ID NO: 44739 - DNA, 450 bp, Zea mays
tcttgcagctgctgccaacaatgatatgtgaactgcggttctcgatctgacactatcttcttcggcacaccatgaatgcagactatccgtgacatgtataactcatctaacgttgctccggtgtatgttgtcttcacaggtatgaaatgggccacctttgttaagcggtccacgaccacccaaatggaatcatatctggcccgggtgctaggtatgccaactatgaaattcatcccgatctgatcccacttccactgaggaatccacaatggctgcaacagtccggcaggcctctgatgctctgctttggttctctgacagctatcacagatggcgacatattctgcgatctcccttttacaccataccaccaaaacctcctttttaaatactgggacattttctcactccctgagtgtatcgagtaagctgtctcatgagcttccttga

SEQ ID NO: 44740 - DNA, 419 bp, Zea mays
  unsure (1)..(419): unsure at all n locations
ttatcaaatggacgtgaagagcgccttcctcattgtttttatctaggaagaggnatatgttgagcaacctcccggctttgaagatagtgagtaccctaaccatgtctataaactctctaaggcgctttatgggctcaagcaagccccaagagcatggtatgaatgccttagagatttccttatcactaatggattcaaagtcggaaaggccgatcctacactctttaccaaaacacttgaaaatgatttgtttgtatgccaaatttatgttgatgatatcatatttgggtctactaacgaatctacatgtgaagaatttattatgatcatgacacaaaaattcgagatgtctatgatgggggagttgaagtacttcttgtgatttcaagtggaacaactcctagagggcaccttcatta

SEQ ID NO: 44741 - DNA, 431 bp, Zea mays
  unsure (1)..(431): unsure at all n locations
tatgaagattcttcatcccaacatgggctagtctgtggtttcntagccaacccatgttagtcttagcaattaagcaagtgtcgagttcagctctatcaaaatctaccaagaatagctgaccctctaacactaccttaaatgctattgaatcatcacttcttctaaagacagtggcatctacatcagtgaatagacagttgtagcccatttgacataattgagaaacggaaagcaaattgtgatctaatgaatcaacaagaaaaacattggaaatggaatggtcaggtgaaatagcaattttacccaaacctttgaccaacccttgattgtcatccccgaatgtgatcgctctttggggatcttgcgttttctcatatgaagagaacatcttcttctcccggtcatgtggtttgtgcacccgctgtcgagta

SEQ ID NO: 44742 - DNA, 443 bp, Zea mays
  unsure (1)..(443): unsure at all n locations
gcaagctnttgtgtactgccatactacacattgatattatattatattantactatcttaaaattctcaatatcaactatgttcagctggcagccgccgacatatgtgttgcgtgtttggcttttcagcaagggttctagggtagcaatctcgctggatgcctcttctttttttggaggatggatgctagagaccaacctctattcggtggtgtgtctaattgatgacagcaatgtccgtgtgcacgtactgtttataagtattgataggagaacaacgcacactcggataggtattgatggcatcttcaattaacatcaagatatgcatgcaagctctcccgctatcatgattacgtgcctcattggctcccctaataaaacagctacgatggattatgcggtgtaacatatagtatcactatactacacattatacaccat

SEQ ID NO: 44743 - DNA, 442 bp, Zea mays
tgtcgaggatgagatgaagattaaactatgcgtgtttattctcgattcattgtgttgggctattcatcaagtatgaagaaatggaaaagaaagagcaatcagttcactattcaccaggtttctctacccggtttctttctctgccttaccagaagtgttcagactttagagcttacctatgctcttagaatatagtactggtctcaaaatgcacatacagatctaagccagtacaaacctatgctatttttatcgaaccatgggtcaccctgaaaatatattgggagatgagtgttagaccaacatatgttattcacgtgacattggacgagttccagatttgatgagtgttttatgtttatttatatggcattaggaccatgggattaaggtgctatgagaactattggtatgccagcttttataaagcatgctaactctg

SEQ ID NO: 44744 - DNA, 428 bp, Zea mays
agcttctccaaagttagaggaggcttactgttttatatttatatgacggacctggccgaagccccttgatcatggcctcgatgacaatttcactgggcaccgttggtgcctgtgccctcatacgcaagaaccttgcgacatatgcctgaacgtataattgctgggcctgagtgcactggaacagagcctgatcagccaccggtttcttctgaaattcctgaaagcaggctaactacaaatactttagcttttgacatgaagcgatcgctcctggtcgatgggaggaataccaagtttgagcaacacttctgacaaccataacgatagatttggccatgactgaagcatcgtcaccgtacaaaaacactgttgcttcgtactcaccaaaactgcttcggtctgatggcattatacgggagctgagcggt

SEQ ID NO: 44745 - DNA, 405 bp, Zea mays
  unsure (1)..(405): unsure at all n locations
tccgacttgaaggagncaccaggcgaagttctatcttgtattcagctactgccagaaaaccctccactgtgtgaagttcgaaatccttcttttcaagagctgctgcatgaacttttattttgctatctaaaccttaaaatataacctcatgcttttaagtcttgaaggtcaagttgcattttcaaagctttactcaatagcatactctatgcaagaacaacctttgtcagaaaatcctgtgccggctaaacaatgaaaagccgaagaaaagctgttaccttgaaattagaatagaacaaactaccgacgatatgctatcgtcggtagcggctgatatcggcctcaagctcccggaaaccaatgccgccgaagagcagcgctcctggtctgaaccacaggatatag

SEQ ID NO: 44746 - DNA, 468 bp, Zea mays
  unsure (1)..(468): unsure at all n locations
cgaccggatcttaagtcacctgangctgcaagctgaaatcagagtctaaaagcccttttctaattgtgtctgagttgtaacgttgcatgcctccccttttatagctaaggggggcatgtacaagagtactgagccccgacatgtgggcccaggaacataacagatgtagtacttggagctactaatgtttgctgctggagcaatcttcttgcgccctgacacccgagatctgtgtatcatcggcgtgcaggggaagcttctcgtataagggatgatgagcacagtgcaccgcgcagcacgggtgcactgtttcgacaatggactggacaggtgcgccgtctgtatggtggccctggcgccgcctgccattggagtggacaggacgcaatatatgctgagggggcacatcgcctgtcagcaaggtggataggcggcgcgtcctctccgcaataaatgcaaagaccgtgt

SEQ ID NO: 44747 - DNA, 444 bp, Zea mays
  unsure (1)..(444): unsure at all n locations
ntgtgaaaccgacactctctgatagagtgccgattatttttgccccagcacgatcgagaatacatcctaaggctccttcgtcaattccaccgaagagcatagctcttggctggtagccacaggatatcccatattcctgtagctccttcttctcagcctcggacaattctggacccaccaggttccgaaagtcaaagtccctttcttctgaagcaacatcagcaatctttttcctttgtcaggcactgcggccatgaccttctctacagttgccgatatctcttctgcagccatatccgaaagaagtttgtcgattcctgacagcgtactttcaagattggcagcttcggcagcagctgcagctttggcagaggttntagcttcggcagtggcctcgacacttgcaatacgtggtattctggatgctgacgccaacggtggtgt

SEQ ID NO: 44748 - DNA, 438 bp, Zea mays
cgacttatatgctacgtctatataaccaatagatattgatgatacagatagagatgaaacaaattgctctcaacgatgatttcacgcgctgtctaataccttggaaaaggattgacacgatgaaactagtttcacctttttctaataaatacagtatcatatcatcaaaaatctcatgtgacatactaattaatattatgaactctcccataaaactctcattgagaatggcataaggctctgtttggtttgagggactccattttacactctttagtctctaaattatcaaacggtggaactaaagcaatgactagactattttagtttctaatctcttaaggggtgaaataaaaaagctaaatcatattatattcaccttttgcgcctcatttatttcagctgcactaatgacggaagaatactaaaggtattttg

SEQ ID NO: 44749 - DNA, 420 bp, Zea mays
  unsure (1)..(420): unsure at all n locations
agcttcttcctcagatagcnttttccccgaatcatgtcgtatgatgtaatcatgcatgccggcaggtgcttcggggatgacggtgcccgtttcttcaactaatattggttccggaatttttactgctccggcttcaaaaggttgttctttgaaaggctctgaaggcccagcttcagcctcagcttgttgagccgaagcttcagtagaaccttcagcaacatcaacacttttttttgaaattgtacttgaagacttaatcgtctccaagacgtctagtacatttaccattcttttcctttttggggtcactaatggccccttttggtgttttgctgtcccaacgattgctgtatgactcanaacttctaatgttttggagccctcaagtgcttctcttacttccctcaatttttctgtgag

SEQ ID NO: 44750 - DNA, 434 bp, Zea mays
tgtaccttataacaggaggatacaagaagctagagtggttgttctgaagcttttgaactgcttgaagcattagtgtagctttggtgcttttgtgactgatcaactctggagcagctagagtgatgtagttgtgggcttttgaacaatagctggagtgatatgaaacattattgatgtagttgtgggcttttgaactgcttcaagctggagtgatgtcgtgtggtgcttttgtgactgatcatctctggagcttttgtgaatgatctaactagcgatctgtaaatgatctagttgtaaatgatattataattgtgatgcttttgtgaatatataattgtggtgctcttgtgtttatgtgatggatctatgactgtggtatactaattaactgtgtatgtctttatgatatgtgtataaaaaactgtgatttgtgg

SEQ ID NO: 44751 - DNA, 447 bp, Zea mays
tagtacatgcgtgtagattaatgaatgcaacgtagtatgttatatatctctaatatacaaagttacattgtaggtgatcaaaatggatcaaactcgtttcgaccaattgttgatgctaatgaacgtaagaggcaaagagataaggaaagatatgccacgatgtctgatgaacagaaaaacgagaaaaacaaaaagcgtcgagaagcacgtctacggaataaagagttgaataaaaagcgtcctgaagcaagtcaacaaaatgattgccaaaatatgatgcccaacgcgccaagaagtgatgaaattcgtcaactttagagtaatgtttctgtgcataaacctactactgaaagtaatgtgttcatatttcgtatgtggagacgaaaaaataaatgttgatccatattatgattcccactgggtgcatatcaattatacattacagtc

SEQ ID NO: 44752 - DNA, 422 bp, Zea mays
acttcttgtcacttgtcgtaccacttaaattctctgtccttctccatatcgatgccataggcttagcaatcttatgaattccttctatgaatgtcccagaatatactgctagtcccaagaaactgcgaatctcagttactgtagcgggtactctacactccattatctccttaaccttagcaagatccactgatattcctccattagaaataaatgaccaagaaatggcacctcgccaatccaaaactcgcacttgctaaacttgtgatatagatgattatctcttatgttctgtagcaccaatctcaaatgttcctcatgatcgctatcactcttggaatagataagaatatcgtcgatgaatactacgacgaatctgtccaaatactccataaacaccttgttcatcaagttcataaaat

SEQ ID NO: 44753 - DNA, 420 bp, Zea mays
agcttacacatcgttaaatctctaagttctccttttatctattttattaaataaataaaaatacatcgacattagttcatattcaatcctacaaattagagtgtgcagacattaagtggaaccattttatttaaatagagaataattctatgaacatcttgccatttgaatcactaaatttggagttcatatgctaaagttatgaaataaacaaagttgggaattcaaaatatgaaattagggctaattctgtgaatatttaaaagtccagggctaaatctacaagattacaggggcctgcgcgcgaaaaccagggacggcgggttgatttctattaaaccgaaggtctctttaagaaaactacagcgtgaaggggtatcgggtgaatcttaccgtttgatctagaaccaacgaatgaga

SEQ ID NO: 44754 - DNA, 444 bp, Zea mays
tatgtgatgatgtagtgatcaagacaataaactcagaaattttattgttgattacagatggccttcaacagtctacggcgatatcgatggaagcttaacccagagaaatgtgtctctggagtaccaacgggaaaattactcggatgtattgtcagccaccaacgaattgaagccaacccagaaaaaatcgaggctatcatgaagatggaagtgccacggtcgcagaataaagtacaaagacttattggatgcatgacagctttaagcagattcatatcaaggttaggagagaaaggcttgccgttctacaagtttcttaaaaaggtgtgcaaattccagtggacctcagaagctcaagaagctctagatgcactgaagaaattcctgacaacgccgccagtactgatgccactgcaccgagccacgccaagtcatccgggtgaa

SEQ ID NO: 44755 - DNA, 452 bp, Zea mays
  unsure (1)..(452): unsure at all n locations
agctnttccaattatattttctctgattctagcacttatacaaacatgttagtacacacaaaccaatgtactaagtctagaatcataccttngtattgatttgcaccttatccatcatttggcatagtttatcacttaagcacttgtgttggacactaaatcaccaaaatacttagaagtggcccaagggcacatttccctttcaatctccccctttttggtgatttatgccaacacaacataaagcaactaatagaagtgcaacatcaatgcaaacaagaatacaaatttgttttgattcaaatttggcatatttggatcattctttgccaccacttggtttgtttttgcaaatcaaactcaatttcctatctctaagtcaaattcacttgttgaggcatagagaaagatattccaagagaaaatgatcactgattcataaactcccccta

SEQ ID NO: 44756 - DNA, 438 bp, Zea mays
  unsure (1)..(438): unsure at all n locations
tctatagggagaacacgtggtaggattaactaatgtgcaattcgtataagatagaccttgtgcagcttgtcaggcaggtaaacaagtgggaggagcacatcacagcaagaatgtgatgaccacatcaagacccctggagctgctacatatggacctcttcggacccgtcgcctatctgagcatatgagggagtaagtatggtctagttattgttgatgacttttcccgcttcacttgggtgttctttttgcaggataagtctgaaacccaagggaccctcaagcgcttcctcaggagagctcaaaatgagtttgagctcaaggtgaagaagataaggagcgacaacgggtccgagttcaagaaccttcaagtggaggagttccttgaggaggaanggatcaagcacgagttcttcgcttcctacacaccacaacaaaa

SEQ ID NO: 44757 - DNA, 452 bp, Zea mays
ttaagtcacctgcggcatgcaagctatacagtggtgagggatcatgcctggagctctatcttgtgaagcccggcagcagtggcggacccagaaattgtctatgacccgggccacatcgaccataatctctaatagtcgcatataaagaaaaattgtacggcgaaacatcggtctcataaatgttaaagatgacatacaagctatgatgtagctccttccaaatgtattatgtcaacataaacatcagcgtttcttgctccagaactttgaaggatatcatattataaacacgacttaaaagggaatgctgaataaacttaataatatgagtaatcggtacataacactagtacgacgtatattcctacgggttctcatgccttgaaaataatctaatatctgtgcatcctcaatgcttgtaaatatatccttctaatataacacaccatatg

SEQ ID NO: 44758 - DNA, 422 bp, Zea mays
  unsure (1)..(422): unsure at all n locations
cttccgctcttttcatgagtaagagcatgctcatcttgttcttcttacttaagcgagcgaagaatgtttgaagatcatcctcatcttcactatcactttcatgctcctcctcatactcactttcgctttcactgtcactctcattatcaacaaagcacatatgagaagtggatttgaaagacgaaccttgcgaagaggtggattcgaccgttggtctccatcgatcattttctacttcttcaataatggtcttcgcctcatcttccttcattttgaggaacatcctttcggcgattctcatggcaaggtctattgccctatgatcaacatctgcaccaatagatgaagtcgaggcaacctcaactntttcaagcttataaacactttcgtttcttaatccccccgacatgtattttcctcac

SEQ ID NO: 44759 - DNA, 409 bp, Zea mays
tgtcagtagcatatacttgagcttctgccacgattatttttcttctgccgaagagaagaataccatgttggggccacatttcgaactgccatgactaaagatttggccatgacagctgcattgcctccatatgaggatatggttgcttcataactcatcagaaactgcttcggatccgaatgcccatcatacataaggagctgaggtggcttgtatgatggatgccatgggatatcctgcagtccttgctgccaggaagaatcatcatcaaaggtataggtatcatgattaaaatcatcatatcattcatcctcattgtatatgccctcttgatgaaactctctgtgttgaggacttcaatcctgttcgtcttgagcaacatggcgtacttcttcagtggcttcccaat

SEQ ID NO: 44760 - DNA, 430 bp, Zea mays
  unsure (1)..(430): unsure at all n locations
tccttgcgcgtagcatcagagctggttcaaccttcgtccttaccatgcttttcatattgtgtacagcttcattccgagtctgaagggtcctgtacatatattacacttgagaaacattgttaatcatgtttttgaggaccttcggaagacgaatgcccccaatagtagcccctcgcagtattaatttgttataacaatgaatttagactgcgacatgaacgaatgccttaagccgaatgtccgaaaaaacaccttccctttgctagaatatcaacagtcaatgacaaacggggtctaccaagttgcaaagcactgggtgtataaatatgaaccatagaggcagcatttgatacgccatttctgccatttgtgttattttctcaaacttttagctcttgttcactagctcttgcctgattntcaagctttt

SEQ ID NO: 44761 - DNA, 392 bp, Zea mays
  unsure (1)..(392): unsure at all n locations
tgcgctgnaagtcctggccggagccccttgatcatggcctcaataacgatctcattgggcattgtatgtgcttgagctctttgccgcaagaaccttcggacatacgcctgcaagtactcctcctggtcctgcgaacactaaaagagagcctgggcagtgatcggcttcatttgaaaaccctaaaagctggtcactaacatattctttagcttttgccatgacataattgcccctgaccgaacagaggagtaccaagtttgagctacgcttttgactgtcatgacgaaagacttcgccatgactgcagcattgcccccatatgaagatatgggtgcttcgcaactcattatgaattgccttcggtctgagtgggcgtcatacatggggagctg

SEQ ID NO: 44762 - DNA, 441 bp, Zea mays
tggcgacacagcaagcgctgtctctgagctagagatcatttttgaccccaccgctatactggcatctttgtgcttctatgagatcgacattcgacaaggtacacaactttgattcgatcataaaaaacttaacaatatgtttgtttcttttactcatacaattttattctttgaacttgtaccatatattgatatgaaacttgaattctatacagcactggctttttataatctcgctcgattttgtcacatggtttttctggcccccatgaattcttggtctgcatccgccactgacccccatatgcctaaagtttcaaggggcgccgacgtgcataacccactgtcaccacactcctttattctcgtcaccctgccactggatctcccacgccaccacctgctgcatccgtaaacttttacgtatctcatgacactccc

SEQ ID NO: 44763 - DNA, 422 bp, Zea mays
  unsure (1)..(422): unsure at all n locations
agctngacantgactaccttatcgaagctcatgttctttcttatagcacggcgtctcccactatttagcatactacgagcaaatttaatagtttcattgtctaactcatgctcggcaaatttagcatctgattttgctatatgatcatcttattgtttaatcatagctaggagatcatgaatagcatctacattaacatctctacatctaatgcaaatagaaacatgctcaacggtagatgtagacggtctgctatcatttaattcaacaatcttatcatgtaaaatattattctcatctctaagattggaaatagacgcattgcaaacatctaaatccttagccttagcaattaatttatcattctcaaacttaatgcttacaggagattcactcaatttgtgcatcttatcaatcgattt

SEQ ID NO: 44764 - DNA, 397 bp, Zea mays
tcagctgtctgtagaatccacgaagcgcagcgggatgtctgtttcttatgaacaaaatatcaaagtctcacaagcgcataattgaatggccagagtccgctctaccgtcatggtggagcgcgagggggaggaaactgaagcatcggagactctccacatctccgaagccatgtcacgatcgggtctagtgacttcggaaaagatccctcatgatggtgcagacaagcagaacaagcaatcgctgaagcacacgaaaatgatattgaggaaactgatttcgaagacgattatcgcattgccatgccaagcaagccgagccacttggacttcggaaaatctactgattcaaaggctgatctgtccaagatgggaaaatcgggctgtttcactgaaaatc

SEQ ID NO: 44765 - DNA, 435 bp, Zea mays
tctccttgtcgtcatcaactttgacatagaaccattcctatttccagcctgccggccacttgcttcgatagctgatcacaggaaattatgtagttttccgatatgcaaagttgtaacaaccaaaattttcatgtagcccatcctttctggccttaatttggtagtgtagctcgtgcactcggcagaaaccttcggcaaatggctccactgcttggcttcggagagcccaaatataaacactaagcctaacaataacgtttctggccttagtttggtagtgtagctcgtgcactcggcacaaacacttcggaaatggctccactgcttggcttcggagagcccaaatataaacactaagcctaacaatagcgttaggagttagttggtgaaaatagatcccaaatttcttcagcacatcggcaatcattctattca

SEQ ID NO: 44766 - DNA, 383 bp, Zea mays
  unsure (1)..(383): unsure at all n locations
agctntacagtacacatgagcgggcatgtcaattgttatccagtggatatgctgacattctttaagaatctactgtcacaaacattgagaaggtcaactattgatcaaagaacctttgaattgcaccagttgaatagtgtttttttcttaagttatatgcctcacattgaattgtctcattcattgatgccattcgattatatgcatgttatattcctattgtacaattcattcaaagtgtcttctcatttttctacacttctaaatctacttgctaacgaattatgcataagttattttcctctcaccgcactcacaaatccaaaccaattttctatttgtccatgactgattaaattaatagtaattaatggaagggactt

SEQ ID NO: 44767 - DNA, 427 bp, Zea mays
  unsure (1)..(427): unsure at all n locations
tctaaagggagaacacgtgataggtttaactaatgttaccttcganaaagatagaccttgtgcagcttgtcaagcaggtaaacaagtgggaggagcgcatcacagcaagaatgtgatgaccacatcaagacctttggagatgcttcacatggacctcttcggacccgtcgcctatctaagtataggaggaagtaagtatggtcttgttatagttgatgacttttcccgcttcacttgggtattctttttgcaggataaatctgaaacccaagggaccctcaagcgcttcctaaggagagctcaaaacgagtttgagctcaaggtgaagaagataaggagcgacaatgggtccgaattcaagaaccttcaagtggaggaatatcctgaggaggaaaggatcaagcacgagttctccgctccctacaca

SEQ ID NO: 44768 - DNA, 440 bp, Zea mays
tcgtccactcaagggatgtgatctcgcctcgcccgagccctttctcgggcttgaacagtactcctagacgaatccacgcctcgcccgaagacctgttcaagcaacggacgcaccctcgactcgctcgaggcccagctcgggcaggcttcacagtgaagcaaccttggccagatcgtctcgccaaccgaccgtatcacaggagcattcaatgcgaggatcgcctgacaccttatcctgacacgcggtcctcattcgacagggccgaagtgaccgcagtcacttcgcccttccactgaccgacctgacatgaaaagcagcgccgtctgccccgctccgactactgtgccacccgccagggtgaggctgacatcagctaactccagccttatgcgccgtatgatgctccgcctcgcccaaccccagggctcggaccctgcctc

SEQ ID NO: 44769 - DNA, 392 bp, Zea mays
  unsure (1)..(392): unsure at all n locations
taacgttcgatagctcttctgccgaaacgataatgtgagttttctctactatatcgataacagaatccaacggacgagtaatagtacacgtaagcggcatggccgaccgagccgatggactcctacgccttcgggatacggatacctcactcatcgccttccgtgataagaaactcttgctcggataagcaattctgttaccgacgaacaagtcctgatactcgaaacaaggggaaaagaaacgcagatctacaacacgacgacgatatgtntgggccttggcagccgccaaaaaacatacacacactacagataaactgttcctgcatgatcggacatcagcagggggagctgctcaccctcggcatcaactccacctttggctgagtccg

SEQ ID NO: 44770 - DNA, 335 bp, Zea mays
tctcatgtggggactcaatggggaatactgaatttgagaattctgaatttcttaccttgagccaaagatcaagcgtgttcaccttgagccctaactcattacctaatggtcccattaacaatattgtgcctaactaacccctctgtggagtgctataagatggaattgggacgcgagcccttaacacaacataaccctggatttgcctcgggtttgatcaaggagacagaccggatttccgggctccatatctctgctgcgagtaggctcaatcctttgagccccacacaagattgttatcttgtatgaaagagaagaggttttgtgcactgacc

SEQ ID NO: 44771 - DNA, 438 bp, Zea mays
  unsure (1)..(438): unsure at all n locations
agctngaaggggaaaagaagaagagggaactcgttcttctgccctaccattataaattcaagaaatactntatagtaccctgccaagaatggcttaatacgattgaaataatgagcaatgaaattcttgggaattactctaagaaagaggaccaactgatgacagcggccttctgcacacggccgaaacgaaggctggacagggtgcttgatgccatatgctttgaatatgctgactacggtcgactgggcggagatgctgggggccctaagcgaaaaaggattgctagcactactgacgaagaagtcaccaagacagcaaaaaagaaaaagaaagattctgataacattagtgctgaagagttaaatcctgatccgaaggcggctacggcaaaaaagagaaaagtgcatccccagagccggaaacgccggtccaaga

SEQ ID NO: 44772 - DNA, 446 bp, Zea mays
cggaacataaatactaagcttgtagcaacatgagagcataatacgacccttggttggcggtgttttcgctgcgcgtaagcggtggaactgatgacacaaatagtgacggcgacattcgtcttcctgacgatgtgtgtgtgccttacagtgggagtgacagcgatcttgacaacctaatagacttcgctttcccaaatctcaatgaaaatatgtctgattccacctacatcacttcaagggcgatactgtcaacacgtaatgactgggtggatatgataaatgctaagatgattgatcgttttcaaagagagcatatggtgtaccatagtttcgatagcgccatggatgatccccataactactacccacctgagttcctaaacacattgacgcctaatgggctgccccctcatgttttgaagctcaagattggatgtcctgttata

SEQ ID NO: 44773 - DNA, 251 bp, Zea mays
tacgactcactacgctttctgaaagtttttctcactctatcagtgagtgattttttctcattacgttatgagcatccgcaacatggggaatattatatgatattttattgaggttactacaagttaaaccaaagataaacaagcccaaactttgacttctggagttacctagataacttaaagaaaccgttctgtgaagtaatacaactgtgtacttcaacacaaacaggtgaaaaccataatcgacgatg

SEQ ID NO: 44774 - DNA, 376 bp, Zea mays
taatctaagctgtcgcattgagacaacacgcatatagtgccggcttctttttgtcttctgagccgccttgggcacctccacgggcaccaccctcatcatgttctcgcgcccctgactgggcgcctactcgcgccttgtgcgggttgccgcgtttgtggactcctgtcgaggaggactcccccttcttctggtaccctggctgcctccatgctccctatgagatgatcttccgccatagtgtatgcccataggacctgtggtcgtctcgtcaccacttgaacaacatcgctcttgatatatcgggagaggttagcaagattatcgacgacgatctgtgtatttaggagcacaaaaactttaacaactttctatgttg

SEQ ID NO: 44775 - DNA, 354 bp, Zea mays
ggatcttaagtcaccgctgctgcactgactcgatgtaggtgtttttttatttagggacgtcattgtttaaaaggtgaagcggggccacacaataatattgggatacctgtggtgttgcgggctttttttaaagggtaaacccaacgtggggcctggaagtttcgttttttaccggttaacctttcttgcggccctctttggccctattaaaattttgaaaaaagcccggtgtaacttcccccaaaaaattttggctaatttaaaataccaaaaaaggtcaaaaagaactcccaaaaaaaccctcccaaccactatgtggaaccccccccccccttttcctcatggttttttttt

SEQ ID NO: 44776 - DNA, 444 bp, Zea mays
  unsure (1)..(444): unsure at all n locations
tangataaatactcccgacataacgcgatactgtctctcattgtgtcacagccttccccccttaaaagaatctcgtcccgagatttgaatgacgatctttaagggtggagaagcatgtaactcccaagctgaagatagatgcaaattcatgagatgtcatctgacaagatactgaagatagatttggacgtaatatcgtgacatattgagacaaaatgccacgaccactttgagagaatgtccacaaaagatagcacatcagtatagtctcgtaatggatcactactattaaccgcgataccagcgcgtgccgagcagctcaaccatgtgtgcaccatagtatgctctcggtttcgtcgcggcaccatcggtcgttagtcataataccattaccaaacgcaaccaatgataaatccacgtgatataaatatgatggagcccatg

SEQ ID NO: 44777 - DNA, 248 bp, Zea mays
gtaaaaaagaagagttttttagaaaatgaaggaggaaaggaagaaaagaaataaagaaaaagataagggaaaggaataagaagaggagaaaaagaaaagaaaaaaagaagaggagaagagagaaaaaaaggaaaaatataaaaaggagggagagagaaggggaaagagaaaaaagggggaaggaaaaaaggggtaaaaggggaaagaaaaagagaaagaggaaaagagggggataaaaagagggaaaa

SEQ ID NO: 44778 - DNA, 365 bp, Zea mays
taagtatcctacactacggtcttatatgcaaaatgccataacaatacaacttggttgaaatttctacctagtgaatgcatccttggtgtatcaaacatatgaaatgcttatgttgatgatgtcatgctcaagttttagtaacagtaacaccacgggtgttacatcctttcccccataaaagaatctcgtcccgagactaaaagccctaaggtaagtaatggaaaaggaaacacgtcatactttatttccttatttctagtacaaagcaagggtggtttgcggatctacttctttatacagcgactatacatactctacacattacatgaggctataaagcttgggaaatttctttgttaaaagtc

SEQ ID NO: 44779 - DNA, 415 bp, Zea mays
actaagctttataaatggatgtaaaaagtgcatttttaaatggcttcttatatgaacttgcatatgtagagcaaccacccatgtgtgaagaccctatatatcctaatcatgcttacatgttgtccaatgcgctatatgtgctaaagcaagctccaaaggcttggtatgaacgtcttctcaacttcctcatcgaaaagggcttcaagatcgggaccatcgacacaactttatttcaaagaaacataacggtgatattttcatttggcaagcatatgtggatgatataatctttggctcgacaaatgattatcattgcaaggaatctggtgagttgatgtccaaagagattgatatgtcaatgattaatgagctaacagacttccttggctttcaagtgaagcaaatgaaagatggg

SEQ ID NO: 44780 - DNA, 82 bp, Zea mays
taatactgaacgacataataaaaaaacgagaaatgaacgatgcatcaaacaaaaaaaagggagcaagttacaaaaagagggg

SEQ ID NO: 44781 - DNA, 449 bp, Zea mays
  unsure (1)..(449): unsure at all n locations
agcttctaaagggagaacacattttaagattatcttatgttcattntgagaaagacaggatttgtagcgcatgtcaagcagggaagcaagttggcactcatcatccacacaagaacataatgacgactgacaggccactggagctcctacacatggatctattcggcccgatcgcttatataagcatcggcgggagtaagtactgtctagttattgtggatgattattctcgcttcacttgggtattctttttaccggaaaaatctcaaacccaagagaccttaaagggattcttaagacgggctcaaaatgagttcgccttaaggatcaagaaaataagaagcgacaacggaacggagttcaagaactctcaaattgaaggcttccttgaggaggagggcatcaagcatgagttctcttctccctacacgccacaacaaaatggtata

SEQ ID NO: 44782 - DNA, 445 bp, Zea mays
  unsure (1)..(445): unsure at all n locations
gtgtcaccatgtatagcatgcttaatgaaacttcgtagtatgatgcagnttaatacgaaaacttggtcatcaagcagactgttgaccttctgaccagtcagcactaaagtaggtcggctgcctttctggtaaatttgggctgtgtttggttgggctgtgagctgtgaaaaaagctgctgtatgctgtgggctgtggaaaagctgctgtgagctttcagctctgagaaagctgaaagccgtttggctgaaacagctgtgaaacagtagattcggtaagaaatgcctgtaatgcccctgaaggacaggagagacaagttatatgcaaattaatcgtaaaacaaattgttgttcacatatttacatgtaaatggccattntatgaaggtgaacttaactttttcaaattttgcatccatcactaccatatggtccacattaatacaat

SEQ ID NO: 44783 - DNA, 440 bp, Zea mays
  unsure (1)..(440): unsure at all n locations
tgtccactacagccaaacaggatacttgctgagtatgtttatgtgtactcacccttgctctacacaccatacccccccatccccaggttgtcagcattgctaccactgctcangcgaagatgaagctgtggaaggagacttccacgagttccaagactacgacgagttctatgcgtgggttagcggcaacccccagtctgctgcctgtgaatgccgcggttatctacgtttcttttccgcactttgatttattgtaaggactatatggacgtctcagacgtatgatgtaatcgactattatttcccttttaatactattttgagcactgtgtgatgatgtccatgttatgtaactgctgtgtacgtgaataactgatcctggcacgtacatggttcgcattcggtttgccttctaataaccggtgtgacatatgtggtat

SEQ ID NO: 44784 - DNA, 449 bp, Zea mays
agcttgtgaatggctagccgaagcaacagaatctgcttgatggttgttcacatactctggtatgtaaggagaatgacacgaagcagtgtgcaagacttgcttcggctgattctaccgagcttcggcttctgctatctctttttgcttctggatggtgacatggcacattcttgtagtatggcccttgtcctcaccatagaataagcagtagatctttctaggctgatccccaaaccatcctccgaagcccctggtgcctctgccccttatggttggtggcctaaaggagctttgctgttgtcccgaagattgtgaggtatattgtgacctctgagactgacttcctttatcatcactttgagtggaattgtggattgaccggacgtgtcttggatggattcttcctctgaagcccctggtcatttcagagaatctgtaagcttcctccc

SEQ ID NO: 44785 - DNA, 397 bp, Zea mays
  unsure (1)..(397): unsure at all n locations
taatcttacacagattgttccatacattccaactatcattacaataaaacctactcctctgtaagacctttctctgcaacttcattcagtaatttgttaacaacttcgtcgacaatgaattcagccatgtttatgatattcaacgcctctttcatttttggatcagctaggggatcgtacggttcaagcggcggagataattcagctgaagtaggaaaaattaattactctgaagccacataaacaaatgtcgaagctaaaaaccaaaaaaaatataatacctatacgtttttcacgctctgtagcttcttcagtatgtcttgcttctgttcgggcgtcatgggtgtacttttcacttttctttatatntcatgggccatttttcggccaccattca

SEQ ID NO: 44786 - DNA, 449 bp, Zea mays
tgtgtgacaagtgtacaaactgagttcacctagtgttacatagatagtatatttcaaatgtctttaacactacaatcagcattctgtgcaaaggaaaacgcaccccatcctacttcatctgcttcgggaagaggaacaatgctttctcccccatccctcactatagatataccatggaaatatttgcccttcatcgcttcaatttgtccttgtttgacatttgatttcccgaaaacaacatggcttggcctccacggccgatctttggcatcctcattaccaatttccacatcaaagctatcactgtcactggaatccccagatagcccagccaacatctcattagtgatttttcaacgttggtcctttccattgcttcgtaaaaaccagcaagtgtggggtctacagtcttcttatcttcagccatttcgacgatgatcacaacaaat

SEQ ID NO: 44787 - DNA, 412 bp, Zea mays
tgtgcgtctcaaggtacctgacctttgcttcgaggaggacttcactgacgtaatacaccgccttctggatggtccagacacgtgcagttggtcctgagccctcaaactctcgacctttcatcaccatcgaggtggttggaccaccaccttctgctaggggaactatccgactcccctgaagatgatgtgtcgtgctttcggtgactaacaccatgctcaccgcctctgtagccgctgcaaatgtataagtacaactgctcccctggctctataactaccagtattggtagggacaccaggcgctatttcatctcttgaaaggctccgtctgccccctcagtccaagagaatgtgccggacttccgtaatatcctgaacaaaggtagcgccctctcagacagacttgagatga

SEQ ID NO: 44788 - DNA, 463 bp, Zea mays
agcttatagccacaaaaactagatgagtgtgagctcactaaaatccaaggggctagaaaggagtctcaacaaaacacagtaccacaagagatcaatcacagagatgacacagtggttgatcccgtggttcggccaagaccaacgcttgcctactccacgttgtggcgtcccaacggacgagggttgcaatcaacccctctcaagcggtccaaagactcacttgaataccacggtgtttttgcttgctttttctcaatcccgttcgcgaggaatctccacaacttggagcctctcacccttacaatcgaagttcacaaagaacacagagcaaagggggaatgagcaacgcacacaagactttaaaagatcagagcaacaacacgcacacgagtctcaacatgagctcgcaacacaactcatagagttcgcaactcaacaagagctctagatgctatcacaatga

SEQ ID NO: 44789 - DNA, 434 bp, Zea mays
tctaaagggagaacacgtgatatgtctaaccaacgttcatttcgttaaagatagacctcgtgcagcttgtcaagcatggaaacatgtgggaggagcgcatcacagcatgaatgtgatgaccacttctagacccctggagctgctgcatatggacctcttcggacccgtcgcctatctaagcatatggggaagtaagtatggtttaattattgttgatgatgtttcccgcttcacttgggtgttctttttgcacgataagtctgaaacccaaaggaccctcaaacgcttcctcatgagagctcaaaatgagtttgagctcaaagtgaaaaagataagaagcgacaacgggtccgagttcaagaaccttcaagtggaggagttccttgaagaggaagggatcaagcacgagttctctgctccctacacaccacagc

SEQ ID NO: 44790 - DNA, 445 bp, Zea mays
agctttcgtcgaataagtgacaagccacaatttcatcatcgccactcaccaccaaatccaaatcactgccaccagcaccatcgtctatcgtcgccacacgcctctcgaatcaaatccccccaccaccgtcaaaagccaaactgaaagggaaatagggtttaaccttttcctataaataattttggtggttgaatacccgacacaaataattggactaactagtttgctgtagattatatattctacaggtgctaaaggttcaacacaaaccaataaaagatcaagttagggttcaaaataaaggagcaagagaaaccgaagagaaccctggtctggggcaccggatagtgtccggtgcaccaccggacagtgtccggtgcaccactggacagtgtccggtgcaccaggggccgtacagtctgaactcttcaccttcaagtttctc

SEQ ID NO: 44791 - DNA, 434 bp, Zea mays
ggcacacatagctcatttgaatacctctgatcatatctcttctatatgctatgactaatgtgttttcaagtctatttcaaaccaagtcataggtatattgaaagggaattggagtcttcggcgataaaaaaggcttccactccgtaactcatacttcgccaccactccgagcaactctctcttctttgggggagaaatgagcatcaaggaaaaggacttcatccttgggggagagagtaaaagctcaaacgcacaaggaccggatttcgtctttggtataatcttaactcattcatttatgaccaaagaggaggaaccttcttcgagggctctaatgattccgttcttggcgattcatgccaaaaagggggagaaatgagcccaaagcaaaaggatagcaataggaccgcaccaccaccaccaaattcaaaaac

SEQ ID NO: 44792 - DNA, 381 bp, Zea mays
ggatctgaaaaggaaatgtgcctttgggccatttctaagtattctggtgattaagtgccaacacaagtgcttaaatgtgaatctatgcccatggttgaacaaagtgcaaatcacaagtaaaggtatgtttctaagccttactacattggttttgtgtactaatatatttgtctaagtgttagaaacaaagagaagaagataaggagaatgttggctgtgtacagccaacaagctgtttcagtctggggcaccggactgtccggtggagcaccggacagtgtccggtgcgccaggctgcctcgacctgaagacgccgctctcgggaattggccgacggcgtacggctaaaattcaccggactgtccggtgtgcaccggactg

SEQ ID NO: 44793 - DNA, 420 bp, Zea mays
tcacgcctttcgccttgagacatcggaatgtctcttctatgtcgcgaaggaggtcggaggccttcctcgtcttgactacgatgtcatcgacgtaagcctcgaccgttcggtcgatgtgttcgccaaacacatggttcatgcatcgctggtacgttgcccccgcattccacataccaaacggcattgttacatatcagtacatgccgaagggtgtgatgaatgaagtcgcgagctggtcggactctttcatcctgatctgatgataccctgagtaggcatcgaggaaagataggggttcgcacccagcagtggaatccacgatctgatcgatgcgaggcagagggtatggaaccttttcacatgctttgtttataccagtgtagtctacacacatccgacatttttccctatctttctcac

SEQ ID NO: 44794 - DNA, 463 bp, Zea mays
tacggaactattaaactaagcttgctcaggccttcttctttttctacatagcaggtaccttactggaatactaccccactttaaaagaatgagggtagaactcttgaatattgaggatttgaactccttgaagtacctcataacaagggttttacggggccttcttctgctgctgcttgagcaggctgcggagagatgactgacacagggttgattctcggagaaccttcttcttatcttctcttcactatcttcttttctcttctcactgactctttctttctctttgctcttcccattggaggattctatcaaagagtattaccatcacacattggaggaaaccaaagattatgaaccatgtacaacagtcttcaacccaagaatcaccaaacattgtgatctcatgggccacggagtggaaaatggatttgctttgcatttggagaaggtattttatcta

SEQ ID NO: 44795 - DNA, 281 bp, Zea mays
  unsure (1)..(281): unsure at all n locations
agctntcaatcatcaacataatacaatattatttcatatctacaatggactctcactactctgttcccttccttagatggcacaagagatctatgtgtcactccattaacatagaggagtataaggcgagccacatttaaaagaaacctagatctccaaaaataacacacgcaccctaaccaaaaaggggggggggggctctatgcatgaccctgacttggacaacaaaacctcttagatattataacaactggaccctaacgacattttttctcaaatac

SEQ ID NO: 44796 - DNA, 461 bp, Zea mays
tacggaacttaaaactaagcttgccatacttgtcaaagcaactacatctaccatcacagtttctgcagaccataccagtaacttggcctttcgcatgttatggactggatatgattggacctttcaagatagctcaagggggatacactcatgtattggtggcgatcgacaaattcactaaatggatagagttcaagcccattgcttttttaacctctgctaaagccgtggaattcatacaagacataatattcagattcgggataccaaacagcatcataactgacttatgatccaacttcacaagttcagaattcttcgacttctgcgagcaaaagagcattcagatcaagtatgcatctgtagcacatccaatagccaacgggcaggttgagcgagccaacgggatgatattggaggcactcaagaaaaaggtcttcgactagaatgaaaaattcgca

SEQ ID NO: 44797 - DNA, 475 bp, Zea mays
  unsure (1)..(475): unsure at all n locations
agtcacctgctgcatgcaagcttanctccaaagtcgatcctaaggtgatgcttagctgaaataccacctatctaaaaagtgaagagactccaaagtcgttcctaaggggatgtagagtctgggtgtgtcttcgtgtggattctatctttggcataaacatcatattgcatcataccatcacatcatatcgcatagcatcgcatcatacatcattttgcatcagcaaaaaagctatggaaaaggaaaatgctcctttgaaaacacctgttggatcgtgaaagaatgtgctgaagcacaaagtataccttcggcagatatattcttacacaacaagggaatcttcatcatcagtatcactatacaacaaccatgggaaaacacgtggtattcaatccgtagatgggacaatttctcttcgtgaagcatgaaaagaagggaatgtgttctttcgccagcggctcataaactggacata

SEQ ID NO: 44798 - DNA, 392 bp, Zea mays
tctcgtacaataatagctaccatgccagtgtgtttatgtctccgtttgatgctctatatggcagaaaatgcaggactccactgtattgggatcaaactggtgaaaggcagtactctgggcctgaacttattcaagaggcaaaataacaattgcgaatgataagagagaatttgataactgcacaatcaacgcagaagagctatgctgatatccggagaagactaccggagcttaaggatggtgatcacgtggatctgaaggtgtcacctatccctggtctgataagatcttaagttaaagaggaagtgtcccctcctttcattggaccttcctagatcttaaagcgagtgcgaaaagttgcatatcaactataactacccgatcatattgcg

SEQ ID NO: 44799 - DNA, 428 bp, Zea mays
  unsure (1)..(428): unsure at all n locations
gcagcttcaccgcagatgcagaccccacctgtccgccgtcctagtaacctccaagagttatgcaactcgtgacctccgaaacaaacgtgtgcacccctcgctcctctcacgccgtcgacctccacaattgtcgctcggcaacgccgcaacccacccgcctgtcgccccatccgtccggcgtcccctaccagcacgctaaccacctcctgcctgcaacgcccgcctcgctccagcccccatataacacgccaacgtgacctcttcttcgccttcacctccaccccgctaatcaatcatcatccgcgacctcaccaactatgtcgacgcactcgaggtcgtgatcgccaccgtgcacacccnctcacaactccatcgtcttctagtagcggataggcgagtctcatggagaggtgtctgcaatcgtcgct

SEQ ID NO: 44800 - DNA, 445 bp, Zea mays
  unsure (1)..(445): unsure at all n locations
tgacaacgaggaaatggcgctcatcatcataagctttcttctaatcctcaagcanaggagggggaaagactacaaaccctgctccaaaagggtgtgctacaaatgtggtaagcctggtcattttattgctaaatgtccaattttaagtgatagtgataggggcaacgacaagagggggaagaagaaggagaagaagagatactacatgaagaatggcggcgatgcccacgtatgtctggaatgggactccgacgagagctccaccgactcctcctccgacgaggatgacgccaacatcgccgtcaacaatggactcctcttccccaacgtcggtcacaagtgtttcatatctaaggactacaaatagaagaaggtacaatctagaaccacccncaagtataccacatctagtgatgagggtatgtctagtgaaagtgaagatgat

SEQ ID NO: 44801 - DNA, 244 bp, Zea mays
  unsure (1)..(244): unsure at all n locations
agctngacaacgaagaaatggcgcttatcatctaaagcttttcgccaatcctcaagcaaaggaaggggaaagactacaagccccgttccanaatggtgtgctacaaatgtggtaagccggtcattttatcgctaaatgtcctatttctaatgatagtgacaggggcgacaacaagatgggaaagaaaaaggagaagagatactacatgataaaggcggggatgcccacgtatgtcgggaatggg

SEQ ID NO: 44802 - DNA, 432 bp, Zea mays
tatgaagattcttcatcccaacatgggctagtctgcggtgctagagccaacccatgttagtcttagcaattaagcatgtgtcgagttcagctctatcaaaatctaccaagtatatctgaccctctaacacacccttaaatgctattgaatcatcacttcttctaaagacagtgacacctacatcagtaaaaagacagttgtagcccattttgcataattgagaaacggaaagcaaattgtaatctaatgaatctacaagaaaaacattggaaatagaattgtcaggagatatagcaattttacccaatcctttgaccaaaccttgatttccatccccgaatgtgatcgctctttggggatcttggtttttctcgtaggaggagaacatacttttctcccctgtcatgtggtttgtgcacccgctgtcaatta

SEQ ID NO: 44803 - DNA, 450 bp, Zea mays
agcttgccgtctaatacacccttataggctagtgaaccatcacttcttctaaagacagacacatctacatttgtaaaaagacaattatatcccatattgcatagttgactaacagatagcaaattgtaaccaagagactcaactaaaaacacattggagatagagtgctcattagaaattgcaattttacccaactcttttaccttgccttgattcccatcaccgaatataattgaatcttgggaatccttattcttgacgtaagaggtgaacatcttcttctcccccgtcatatggtttgtgcatccgctgtcgataatctagcttgaacccccggatgcataaacctgcaaggcaaatttatgcttgggtcttatgtacccaactcatgttgggtcctacaaggttagtcacaattgtcttatggacccaaatgcaagctttattacc

SEQ ID NO: 44804 - DNA, 375 bp, Zea mays
tgcattgctctaaatgatcaatacctcaatcaaatatgttgtatttggtgacaagagaataacgtgagattgaaaaggattggcggagaaataaactaaggtggaattgggtccgaagcgtggcccatgcaaatgtatatggatagatgcagatgggcattctggattaaggttcgcatttcagaaaaaaaaatgcacaacgctgctcgatgcagccgttggggcgccatggatcgactgtcggtagcggcacgggccaaggctcacgttgactgttggccgcacgatgactcgacggctgtcgctatgggctcaacctcgacgctcggtatgtggacaggaactggcctgctatagtgcgatccgcatggatca

SEQ ID NO: 44805 - DNA, 322 bp, Zea mays
  unsure (1)..(322): unsure at all n locations
agcttagctgatggcgggttgctatggcttgaatggcggtggagctgctgtgaagctatagaaagatgagtctatggttgatgccttgaggtcttatgatatatttatataggctaggaggtcggtggttacataatagatctagggcctgcctnttnntccccccntcttcaatcttgctttcctctcccctctcatgccatcctcctcctttccttatttttcctctttctccattctaccccttatataatatccttcccccgcaaccaccgcgcccttctctacttcacctgtcctcctatcccccatctccaccatg

SEQ ID NO: 44806 - DNA, 327 bp, Zea mays
  unsure (1)..(327): unsure at all n locations
cgacacnatgaaatggtgctcatcatcaagagcttccgccttatcctcaagcaaagatgggggaaggactgcgagtcccgatcaaagagggtgtgctaccggtgtgttnagtactgccacttaatagcaaattgtacaattcatagcgatagtggtacgggcgaatactaaaaatgtaagaagtacgagatgaagatactttcattataaatgtatgctatgcgcttctgtctctcgtattgtgacttatatagagctctactattactctctcgactatgacttgttacatagcttcacaagggactcttctttctacaacgtcgc

SEQ ID NO: 44807 - DNA, 469 bp, Zea mays
  unsure (1)..(469): unsure at all n locations
gagctngaatgttcaaaatcaagaacttcaagtgctacttgtaatatgcaagaacatcaatgcctgctctttagtatttgaatctaagtctagctctaatgattattcttgcaagcattgtgccaaatatcatgcttcttgttgtctaactaaccatgcaaggaagcatagcccacaggtgaaggtcaaagaaattttgaaaagatgctctagcaatgatgggttaaagaaagttgaacccaagtacaagtcccttaagcccaacaatggaagaagggggcttgggttcaactcatccaaggaaaaccctagcacagtgcataaggggtggagatcccccaagttcatagagggaaccactctatatgatgccttgnggaggatccactcctcanatgacaagtcatctcacgtaaaggttaacttgagttccacaaagagtaagatgaatgaagtgggatcctcaagt

SEQ ID NO: 44808 - DNA, 432 bp, Zea mays
aagctggcgggctactggcggagctagccgaagcactggctatcccatatgatggctggagtgggctggccacggtggccgaagctatggcggcaatggcgggctgaattgagctcgccggagctaatggaaagtggctggccggtgagggtgagtgcgaggcgaaatggggcgcgcctgtgaaggctatatatgcacggcgcggtgcactggcggtcgtggaccggcatgtgcgctcgggcgtgcactgggaggcgtggtgcgcgaacgggcgtgaacacggggtgtcagccacggtcgaacacgtgttcaccgtgcctctgcccctgttcaagcgccgattgtgagcaaatcttcgcgaatatgggcaagatcgctgtgaaggatttgttcaccagaccaagctttgtctattgtgtatggaccacgtgc

SEQ ID NO: 44809 - DNA, 497 bp, Zea mays
gatcctcagagtcacctgcggcgtgcaagcttacccatattatctcttatctcatgcactatttcatactatactctatgaacagaggaggctatagtgcaaaatatcgttatgcacgaccatatgcacgatctgttggagataacctaacagttctcgaaaggaaacaacaatcattaccatgttgtcttgtgagcgagagagtctctatttttcaccccaaatatattcatccacttaagcgtctcaactttcaagcgaattgcaatgatttgggcctttaaatcctgcttgtggaacaaaaacattgtaaagagaatatataccaaatgtaaatgcaacataatgtccttacaaaggcatatatcatacattatgatacagtccaggtcgcatcacacaactcaattagatacaagatgtgcacatgtcatatgcactcatacatacagagaacgagatgtgagggttcataccactgattcttcatgtaacat

SEQ ID NO: 44810 - DNA, 463 bp, Zea mays
  unsure (1)..(463): unsure at all n locations
agcttcctngatcttgtagggtccaatgtaacgaggagctaactatcccttgatcccaaatctctggacacccttggtgggtgacaccttaagataaacatgattccccacctcaaactgtaaaggcttccgcctcttatcatgatagctcttttgtctggcctgagcagcttctaggttcttcttgatgattctgacttttgcttctgcttcaagtaccaaatctggcccaaaaatttccctctctccggcttgagaccaatttagtggggtctacaccttctcccatataatgcctcaaaaggtgccatcttcagactggactgatagctgttattgtaagaaaactctgccaaggaaagacacttgtcccaattctttccgtagtgtagtgcacatgcncgcaacatgtctttcaaaatctggttcaccctttcngtctggccatcggtttggggatgat

SEQ ID NO: 44811 - DNA, 391 bp, Zea mays
  unsure (1)..(391): unsure at all n locations
ctggcggagctagccgaagcactggcttgcctataggatggctggagtgggctggccacgatggccgaagctctagcggcaatggcgggcggaattgagctcgccggagctaanggaaagtggctggccggtgaaggtgagtgcggtgcgaaatggggcgcgcctgggaaggctatatangcgcggcgcggtgcacgggcggtcgtggaccggcgagtgcgcgcgggcgtgcactgtgaggcgtggtgcgcgaacgggcgtgaaccggtggtgtcagccacggtcgaacacgtgttcccgttgcctctgcccctgttcaagcgccgattgggagcaaatcttcgcgaatttgggcaagatcgctgtgaaggatttgttcacctgaccaagc

SEQ ID NO: 44812 - DNA, 471 bp, Zea mays
  unsure (1)..(471): unsure at all n locations
agctntaagccacatgagcaccaagcatcaacacaaccatcgtccgatggccaatccactaacggaggggcccaacaacatcccttgttcccatgacgggcgaccacaagggggcaccgacactgtgccctcctcaggacccaacattgtggaaggagccaacatctttgtctataacgcgttcacctatgatccttaagttcgatgttgatcaaacatcgcaacaacaacttctcaatgttggtgtgctaacaccacacacgcagcaagagaaacagcgacagtgtcttggacgcctgcaaccctagagagagataacaacaacgactcatacgataacctctagcaaaccatccccttcatatatatatagatctttgctaatagtcttttgctgcaacctcattagcgttgtcatgaattatggtctcttggacatatattaaacagcattatcgtaaatgcttaacg

SEQ ID NO: 44813 - DNA, 483 bp, Zea mays
cgtgaagaatgccttcctcactggaccaatctaggaagaggtctatgttgagcaacctcccggctgtgaagatagtgagtaccctaaccatgtgtataaactctctaaggtgctatatgggctcaagcaagccccaagagcatggtatgaatgcctaagagatttccttatcactaatggcttgcaagtcgcgaaagccgatcctacactctgtactaaaaccattgcacatgatttgtttgtgtgccaaatttacctcgatgatatcatatttgggtctactaataaatcttcttgtgaagagcttagtatgattatgattcacaaattccagatgtctatgatggtggagttgaagtattttctacgatttcaagtgaagcaactacaagagggcaccttcatcagtccaactaagtgcattcaagacatacttaccaagttcggaatgaacgatgccaagccattcagacacccatggga

SEQ ID NO: 44814 - DNA, 426 bp, Zea mays
  unsure (1)..(426): unsure at all n locations
ctggctaaatactacgctgatggtcctgggcgaagccccttgatcatagctctaataacaatctcatttggcaccattggcacctgagctctaatacgcataaaccttctaacataccacgttattggtcccggccgaagagaagaataccatgtttgagccacactcctgactgccatgacgaaggacttcgccatgacggcagtgttgccccatatgatgatatggttgctgcgtaactcataaggaaatgcttcacgtcggaatgtccgtcatacatgggaagtgggaagttgtggcggtttgtatgaaagtggccataaggtagcctgtaactctgctgctaggggagaagcatcatcaaaagcaaagntaccatgattgaaatcgtcataccattcatcatcatagcttgggcttttctga

SEQ ID NO: 44815 - DNA, 432 bp, Zea mays
aagacagggtttgtaacgcatggcaagcacgaaagcaagttggtgcccatcatccacacatgaacatcatgacgaccgacaggccgcttaagctacttcacatggatctattctgcccgattgcttacataagcatctgcgggagtaagtattgtcttgtaatagtggatgaatattctcgcttcacttgggtattctttttgcaggaaaaatctcaaacccaagagaccttaaagggattcttaagacgggctcacaatgagttcagcttaacgatcaagaaaattagaagcgacaaccggacggagttcaagaactctcaaattgaaggcttccttgaggaggagggcatcaagcatgagttctcctcttcctacacgccacaacaaaatggtgtagtggagaggaagaatagaactctatttgacatga

SEQ ID NO: 44816 - DNA, 440 bp, Zea mays
  unsure (1)..(440): unsure at all n locations
agcnttgaaagactgactgggcttttcatttctatctaatctagcgacctacagggacattgctgtgataccacttctgtcacacccggatctagggggtagaaccgagtgcataccatatgtgcgccaggatctatttccacacatatgttgacgccacaagtgtaatatatcaaaagaacaatgcataaaagcgtgaataaagattatattaacatattacacttcgaacagacataatgtcttaacctttattcatcaaaggacagcgaaacaaggacatccatccacaggaagatgaccggtggtatcactagactagcatccatggagctcagcattatatcttcatctgcaaacttctgatcaatattaaacaagggtgagctcacttatggtcggggcttagcaagtggtggaaaaactaatgcaagtttaac

SEQ ID NO: 44817 - DNA, 334 bp, Zea mays
ggctggaacgtagcttccgcatgtacctacatgctatgtctgcttgtgccaacttgcttggacaacctggggcgactaaataagcccccaacagcagataaccctcctcgtttggggttcacggaaggccgtcagctatctgcgctaacacttctccgactacactccgcgtgatcaatgctcgaacgatgtccgtgtacaggtcttgagcgagaatagggttctctcgacggagtctggcatactgttcaactacgtcccgctctcgttcttgagcctgtcgaccatcgcggacgccgtagatgcgtctatcttggcgtactcgttcaccagg

SEQ ID NO: 44818 - DNA, 402 bp, Zea mays
agcttatgctacatcgattgagattgtttggttatattcaacgaagacctgaataggcaccagtgcttatcataataattacgcgcgccgagaatgtgaatagaggttgatgtcgaccaaccttgacgtgtactgatgcattgaacatggacctgactgagtggcatattgatacttagctccccgtgtataagaaggggtggaattgtgctattcacgtgccacaaccttgattcatatttccgcttttcctccttaatcgtttgactttctcttgtgcccatttatacctcgctgggtctcgcgggttttatctctcctatgtgttcccccgttatatcgttttgcgtagtactttcctttgtctcccctgttttttttggggtcgagctctgacgtttt

SEQ ID NO: 44819 - DNA, 396 bp, Zea mays
gattatatgaaacattatggctctctgataagctaaattatagcaaccaaaatcgtcatgcaatccatcatttctagccttcttctgatagtgcagctcgtgaactcaataaaagctgttcgcaaactgctacaccgctcggctatagaggggctacatataaacactaaccttaacatagcgttaggagtcatcttgatgaagtatatccaaacctataagtacctctgcataattccatgatggggaatcttatgcaatctataaaagctcttgaaacgatatttattctttactgttctggggtgttcttactcccccccccgaacgtacaatttttctgacttactataaaaccactttacattttgagagaaatctttgacatgaaatttc

SEQ ID NO: 44820 - DNA, 430 bp, Zea mays
  unsure (1)..(430): unsure at all n locations
agcttgccaaggacaagcggaagcaccgattctttcatacccccaaacccagactcggcgtgtcactctntacttaaggactaatgtttcggtcaaggcggctgagaaatacagctgccgagtcctttgcaaaagtgacaatttttcaagcaccagcattcatcacacgcacgcacgccctctgcacctgaaactgccgggtggttttcctggctggcgacatgtctgtcactctccactcacacccactgttgctgccactggcactggcagctgcgggtactgcgggtacgcgctgaacctgagcttctcggcgcgggacacagagggcatcgtgcccaagtaccgcaagcagatcaggaagggcgtcgtcgccttcgtctgggtcgacgagagccggttcacgctggtccacgagctcacctgcacg

SEQ ID NO: 44821 - DNA, 377 bp, Zea mays
  unsure (1)..(377): unsure at all n locations
atgagacagatggttaaactctgtatatgcttctggctctagtggacaagctctgtttgtacgtggccgcactgatcacaaaaagttcaactcacgtggcgaaggaatcgggaataacccacagggtcgctccaagtctagggggccattccgattaattaatttgtcaatactgtcagaagacgaaccatgtaatttagaactgttacaaactgcttaacaatgagaagaggaacaaggagaanggttagactggaagtactgtctctgttgcatccgaaaaatattctgataatggtgatgttcttattgcctttgctcggtgtgctgctgatgatgcccaatggtttctccattctgcttgctcatatcatgtt

SEQ ID NO: 44822 - DNA, 217 bp, Zea mays
  unsure (1)..(217): unsure at all n locations
tatgtagagcaaccttcccgcattgaagacagagaggaccctaacacatgcgaccagctgtcaaagcgctgtattggctcaaccctgccctcagaccatggtactaatgattgccacacttccttatctctaaatggctcatagagggtgaagggcagcccctcctttaactcagggctgnatggactaggctaaagtgccacacttttcctaagtt

SEQ ID NO: 44823 - DNA, 451 bp, Zea mays
agcttatcaagttgagccggtttctattaagtttagcggtcccaaacacccctatgattcctgcattgtaaaggaaccggtggtgttgggagttttctgaaccggcattgatatatggcgagatctagcgttgatttggtctgatacagagacaaattagcataataaattttaaaagcaacagtttacttgtagtgagcgtgttgattaaaattatctaaaaatttatgagaacaactgttgtgcaaggagtctttctttgcaagcgtgcaagcaaacaatctgatccattagattacgatccaaccgtaggtcacgtttaacactactcttccactatcagctcaataatctttataaaaaacccctaacaaactatggttgtatctgtggttggatcgtaatctaatgaatcagatgtttctcttgcacgcttacaaagaaaaactgc

SEQ ID NO: 44824 - DNA, 376 bp, Zea mays
tataaaggttgctgtcttattttatcctcaatggaacataacacccttctttgttgattcagttagtgagagtacaatgaagttggcaatgatgggtttgcctcgtgccgatgacgacgacgacgagttgtagcccgcaatgcgtgctttgagagaggagaaactcacgaggcatgctcgtgcgagtggtggcatgtatgagacgggtggtggctccttccatatgcggtgttcatggcatgtttgggagaactccctctatgaaggagaagccacacatgatccagccaaggattgattacggcccgttttcgaaagcacgacagaatgtggtccatttcattggtaagcaatatgctaagtagatctatgttga

SEQ ID NO: 44825 - DNA, 453 bp, Zea mays
agctagaaccgattgataccgcgtctgttgattatatacttgcgttgtatacacagcgtctgaaatggacgctcaaacacgcgtatgataatgtgccgatgtattggcgcaaattcgacgcagcaggcgtacatcctgatgatttcagggaactttcagacctgcgtaaatttccctgtaccaccaaacaggatctgcgcgacaactatccctttgacacctttgtcgtgccaatggaacaagtggtgcgcattcatgcttcttcgggaaccacaggtaaaccgacagttgttggctatacgcaaaacgatattgataactgcgccaatatcgtagcgcgttctttgcgtgcggcagggggctcgcccaaagacaaaattcatgttgcctatggttactgcctggttactggtgggctgggtgcgcactatggtgccgaacgtctgggcgcta

SEQ ID NO: 44826 - DNA, 457 bp, Zea mays
  unsure (1)..(457): unsure at all n locations
gcttggatgcgtcgantggatgtcgacacggttgttacattcttcttcttcacctccggtgctttgaatgcaaccggatgagcttcagatgtggtggcatcatcaagctcgttgatcttcctcgagcctataatcatgctttcaaagctcacaanatttcctaatacttcctcgggggtcattttggtatatctacgattaccacggattaattgaacttgagtagggctaaggaaaatacgtgatcttagaataaccttaaccacctagtggtcatcccactttacgctcccgatgttgcgcgcttggttcaccaaggtcctgagccgaccgtacatgagttggggctcctccccttagcgaagcctgaaccgaacgagctctccctcaatcgtatccgctcggtgatcttgggagctcatacctttagcgcggcttgaaaaaaccaaatctcctg

SEQ ID NO: 44827 - DNA, 461 bp, Zea mays
  unsure (1)..(461): unsure at all n locations
agcttntaaagggagaacacattttaggattattatatgttctatttgagaaagacagaatttgtagcgcatgccaggcacggaagcaagttggagtccatcatccacacaagaacataatgacaagtgacagaccactggaactcctccacatggatttattcggcccgatcgcttacataagcatcggcgggagtaagtactgtctagctattgtggatgattattctcgcttcacttgggtattctttttacaggaaaaatctcaaacccaagagactctatagggattcttgagacgggctcaaaatgagttcggcttgaggatcaagaaaataagatgcgacaacgggacggagttcaagaactctaagattgaaggcttccttgaggaggagggcatcaagcatgagtttacttactctacacaccttcaacaaatggtgtagnagagaagaaga

SEQ ID NO: 44828 - DNA, 143 bp, Zea mays
tgtcatataaagcaatgatgttaataatgagttggcattggataatgaaatgcttaaagaagatattacgaaactcaagcttgagaaagaacatcttgcactagtgtgcataaggtgcggaacgagtttcaatggctaatgtg

SEQ ID NO: 44829 - DNA, 454 bp, Zea mays
  unsure (1)..(454): unsure at all n locations
agcttctaaagggagaacacnatttaggattaacaaatgtttattttgagaaagacaggatttgtagcgcatgccaagccgggaagcaagttatcactcttcatccacacaagaacatcatgacgactgacaggccactggagctcctacacatggatttattcggctcgattgcttacataagcatcggcgggagtaagtactgtctagttattgtggatgattattctcgcttcacttgggtgttctttttgcaggaaaaatcacaaacccaagagactttaaagggattcttgagacgggctcaaaatgagtttggcttgaggatcaagaaaattagaagcgacaatgggacggagttcaagaactcacaaattgaaggcttccttgaggaggaggacatcatgcatgagttctcttctccctacaccccacaacaaaatggtgtagtgga

SEQ ID NO: 44830 - DNA, 440 bp, Zea mays
agtgcggaggagaagaccctacgtgtacatccatggaagtgtgagagggagaaccaactcggacaccctcgggggctgggtcatagctcgcgctacccatccgagccggatcatccccggcgacacccttcggggctgggtaagcgctagcgccatccttgagggccgaactctctgtaacagacacctctaaggctgaaggaccttcacccacttccatgggagcaggacaatccagaccagcctcctgacccttaagaccacgctctaaggtcgatgaggcacgggacgctgctcgagataactccagcccggcatcaggcacatcagcataaatatacatcattccaccatctgccggctctgacaacagatcttctgggaccatgtcttcaagagtctgatcaaagtttgccagagacaattcttgcagaccaatg

SEQ ID NO: 44831 - DNA, 399 bp, Zea mays
  unsure (1)..(399): unsure at all n locations
agcttgtgcagctatgtctgtttaggtntgagctatactttaagtgattgcaaagtatttgctccatttagcatgaaactctagctatactataatttgtttgcttcttgcttcgaaggcaaggggtatgcattacaggctaggtaataaccctatagatcttatttctaaatacccgacaattattttatgatgtaccataagattcaagctgctcaataatagctaacaagtataaaccatgttccacgtatatgatactagcaacatccacagtatcaacattcgtgaagtatatattctatgttagtgacatgctaatggaaggtcaatgggagaaaaaggcagtgtatacattttactttggtcgtgagctatatgtgacttttcgcaacttca

SEQ ID NO: 44832 - DNA, 368 bp, Zea mays
tccttgtgggtatgttatcacgctcaggctgtggtatggttatagtgggatgcaccatacaatgtaccatgaccttaatcatggtgatagtgtactttcttgaccataataccatccatcgtgtctaatatggtggatcaaagccctatcgtgtctacaccgtaccatgtgaccctcctaatcacaatgcatgtggcgctagtgccatacctcctaataaggtcgatctaccatggacgcatatttgtgtaggaccatcccatcccacgggcatcttgaggaatgttcgagagtccttggatgtgggccccggtctatagggtcctcaaacttggctgagctaggggcttgatccccaaatgaggaac

SEQ ID NO: 44833 - DNA, 473 bp, Zea mays
tagcttgccataaacaataggtctttctgaaagctattctaaacacttatgcgaaatcaataggcctcatagtcaattatcacaagtctcaacgtatactcctttgaacattatctatacgacaacaatggaacctcgctgagctatatactcttatcaatagccagaataggatattttcccctttacatacttgggactgcctatggggcacacaatgctaaagctagaagctctctccctctgattcataaagtggagcgtcgcttggcagccacatccatcttcctttcgcctactggcagggttcagatggttaatgcagacctcacgacgttgcccacgtattgcatgtgcaccctgatgttaccagctcttgtgatcaaacatatcgacaaactcagaagacaatgtctctggggaggactagacgacacttctataaaaccactgctagctacatgggcccttga

SEQ ID NO: 44834 - DNA, 367 bp, Zea mays
  unsure (1)..(367): unsure at all n locations
cgcgacaagtcctggattatataactacgaaatagagtgctatgtcgcgcgcctcgccgtacgacaatccttctattcaccatcatctgcttataatgattagacatgaaacatgactttactttatgctaaacctaccgtctgtattaacgccttntcattgagcgagtggtttaatacatgaatatgtaacgtgatcggtcctcgactgtctatttctctttctctcttaccttaactgcgagccaccatggaacgtccgttacttactgcattctattgtatggtgtaacgttcgttcgattaaatgtgcgacgaatgatgcttgcactcgcatagagacgatccacatgaaagctccaaaact

SEQ ID NO: 44835 - DNA, 441 bp, Zea mays
ccacatgtgcttatttgtgatgccacagccagcccatgcttgtcttagcaattaagcatgcatctaaaccggcctcctcttttgcgaaatcaactaaataaagtttgtcgtctagcacacccttaaaagctaatgaaccatcacttcttctaaagacagacacatctacatttgtgaataaacagatatatcccatattgcaaagttgactcacagacaacaagttatatccaagcgactcaactaaaaacacattggaaatagagtgctcggaagatatagcaatttttcctaaccctttcaccttgccttggttcccatcaccgaatatgaatgaatcttgcggatccttgttcttgacgtaagaagagaacatcctcttttcccccgccatgtaggttgtgcatacgctgtcgataatccagcttgagcccccggatg

SEQ ID NO: 44836 - DNA, 463 bp, Zea mays
tatactacgaggatagaagcatgagctcgaccatatgtcatattataaggggaactatacaagtgtggggtctgttccccgttactcaagtgtttatccagagccgaaggcgtagaattgatgaaagaaatacacgcaggcctgtgtggatctcacattggatctaggcctatgctcggaaaggttattcgtcaaggattttattggccaaaggcagcttctgatgcagcggatttagtccaaaagtgcgaaggttgtcagaaatttgcaagagatcaaaaacaaccttcgtccttaactcaattaatacaacccacttggtcgttgcaaaggtggcgcctttgattgctatgtccattaccaccagcacaggtgaacttaagatatgttgtagtggcagtggaatctttatctaagtggattgacgcaaagcctctagccacaataacttccgatactattc

SEQ ID NO: 44837 - DNA, 396 bp, Zea mays
agcttcacaggctactggcggagcttgtcttttactggcttgcccggaagatggctgaggtgggctggccacggtggccgaagctctggcggctatggcgggcggaattaagctcgctggagctaatgggaagtggttggtctgtgagggtgaatgcggggcgaagtgtggcgcgcctgcgaaggctttatatgctcgacacagttgcacgggcggtcgtggaccggtgagtgcgcgcgggcgtgcattgggaaagcgcggagtgcgaacgggcgtgaaccggtggtgtcaaccgcggtcgaacacgtgttcccgttgcctctgcccctgttcaagcgccgattgggagcaaatcttctcgaatttgggcaaaatcactgctatggatttgtcacc

SEQ ID NO: 44838 - DNA, 460 bp, Zea mays
  unsure (1)..(460): unsure at all n locations
agcttgccatcctgcagtgctaccttgaacgctgtcagagcaaggagcctggagcagcagcgcagccagagacggagcctggagctgccgctgctacttgagagtttgctgcctgcctgctatcctttttgcgcctttttccccagggagggaaggtaactgttgctgcttggtactactctagtctaggtgtatgctacgtnggcagatgatgcaccattatagagtaaatttcagaaacagcatggcagttacacaagtctcaacaacattaaactattaagttactagacatcaaatctggtggaaattggatacattcttcataattggttcgatttgtgcgtatttctgctgttccactggtggtgaaactacaactgttccttatctgtctagcaccgttgttattctgggctatccaaccccttctgttactgttggtaatgtgatccctctt

SEQ ID NO: 44839 - DNA, 386 bp, Zea mays
tgaaccgaggacccgcgtcactggaatagcagaaccgtgctctgtcggagttcataccacctccggcgcacgtggaccgggtaaatcactgagccattttccgattcaatgcacagatagcctctatatcatcccaggaagctcaccgtgccgttggattggactatgacgccgtggtttggccggcacacccaccgccgatgagggtacccgcctgcgcgcgtggaccgagcgattctggccatccccatcggcgagccgtacgttcgtgtgaccgccagaacctccccgagccaaccctacccctcgccggacttctctcatcgtcggtaagccgcgccacccctttcttctctacggatactgtttacacctgtgacggaccg

SEQ ID NO: 44840 - DNA, 418 bp, Zea mays
agctagccgacgtgccggaccacgatatttttgtttctaacttaggctatatgtttttgtgtgtgtcgtgtcatgtccatatatctatatcaacgttcagtgaatgagtggaatgtacacaggggcagacccaaaagggtcctggtgagccgtggcacactctaagccagcccactcataactagggatggtaacaaagaattcaccgtcgggtttagctctccatcctcgtccccgaaaactgtttcccgccaggatccacacgaacgcttgcgggggacatttctttcccatcctcgttacccgcgaggataaatcccccgggtttcccgtcaccgcttaaaatataatcatatcgtacttcatttgtattaatgttaatatttcacttatagacattggtaatggaaaatattat

SEQ ID NO: 44841 - DNA, 250 bp, Zea mays
cacacaccggatacccttatactttccagttggaaattatgtctatctgaaggtcttcccatagaagggtgtaacacgttatggggtcatagggaagcttgcaccatgatatataggtccttttactatccttgagagatacagaccagcggcttaccgacgtcagttacccgaaaccttgtctgcaagacataatgtgttccacgtgtgacaaattaagaagtgtcttcagggttccgatcgaccattt

SEQ ID NO: 44842 - DNA, 459 bp, Zea mays
  unsure (1)..(459): unsure at all n locations
agcttggtggttcgttgtacgagtagaatgttttatgcacgggttntaatagtattgattttccaaagcgaagtactgctagcagtagtcccgactcccagtctcccaccatcaacgggataggacagcacacgacacaaaaccatggaacattggaagcagcccctagtttgttgagaaaaccagaaacccccagttttagtttgggagtacaaaaacgaagagtatcaaaatggttaaaatccttttttttatttaaaatgaattaaaaagtaaattntagtatctctaatcctcttcgaacgatgacaagagaggactttctttgttctttcttcagtatattagtgtatcatgcgcgctcatgcgcgcgtgttgcatagtaaatcagagtggttatagattattactggtggtggttttgatactgtggtagaatcacaattaagctaacaatga

SEQ ID NO: 44843 - DNA, 391 bp, Zea mays
  unsure (1)..(391): unsure at all n locations
tatgcaccagatcctcttatgctatttacgtgtgtntctggggcctgtttggtttgtggctaactatgccacagtttgcctaaggttagtcgttcgaattgaagaactaaccttatgcacaaaaatgtggtaaaatgtggcaaattaagtagcgaaccaaacgggcctgaagttcatcgcgcgaagcgcagatacgcctggagacgtttcccaatcggctagaggatttatgaaagtacgccgtacgtctccttttgttacatccctttcgtcaattttttaactgatttgttcttgattgcattggtttctagtacatcttctgnggccgcatctgttccacctcccccgattcatcttttgttcttacgcgtacgtctctcgttctcgc

SEQ ID NO: 44844 - DNA, 463 bp, Zea mays
  unsure (1)..(463): unsure at all n locations
agcttctcctgtccggaataatctacggtattccagacaatcgacttagaatagttgtagatgaacttatgcacctgagaaatgatcaactaggcaaactagttagtccataaggtttgtgatggttgtcaaacaccaaaattgattataggaaatgtttaagtccatttcgatttcagatgatcaacatagcctgtggactaatgcgtttgctagtattngtatttctagttcatttgatgcaaagaggattggactaaggcattgaggatgcaagaccttaaaagaagacataaaagaagcgtagaagtctaagactcaagaacaaaagaagcccacggaatcagcgaagaaatccacgaagtggacagtcagccagcacgctggtggtgcaccgaacagtgaacagtacatgttcggtgggacaccgcgcagtctatgtatagaggcccacaacgggtgc

SEQ ID NO: 44845 - DNA, 494 bp, Zea mays
  unsure (1)..(494): unsure at all n locations
tcatgcaactgctacanaaaatgagaggtgaactgagtgcctctatctgatactatcttcttcggaacaccatgcaagcacacaatccgagacatgtatagttcggccaacactgtactgttgtaggtggtcttgactggtatgaaatgggtcgcctttgtcaaacggtccactactacccagatggagtcataaccagtacgagtgcgaggcaaaccgactataaagtccatcccgatctcatcccatttccactgagggatctgcaatggctgcaacaaacctgtaggcctctgatgttctgctttaatcctctcacaactgtcacatacaaccacataccgtaccaccagaatcgtttcttcaggtcttggtacatcttctcgctaccaggatgtatagaatatgttgtctcatgaacttccttgagaatcagttctcggatcgattngatgtcgggaacacanagtctatccttgaaccataccactcct

SEQ ID NO: 44846 - DNA, 450 bp, Zea mays
  unsure (1)..(450): unsure at all n locations
agcttcgagantagnnctgatattnttgctgtatcttccgtccagaagccttcggctgcctggagctcaaagttctttttctcaaaagcatctgattgctcctttattttgatctctaaattttcaattatagcttcgtgcttcttatcttctagatcttgctgcatcctcaaagctttgcttagaagcatgctctacaaaacaaccttcgttaaagaatattgccattattaaaaaacaatagaagttagggagaaggatgtttaccttgaaatttgaataatataagctgccgacgatatgttgtcgtctgtagcggctgatgtctgtctctagcttcggaaaaccgatactctctgatagagtaccgatgaccttatctccagctgagtcccggatgcagcccagttgttcgtcatcaatgccctcaaatatgagggcacctgactt

SEQ ID NO: 44847 - DNA, 472 bp, Zea mays
atctcgcactcctgcaggaaagggaagcgccggacttccttgtgtttgctggcgtggcggctctcatagccacgaaatgctgctgcctgctgctgctgctggagcccacatggattcggtgagtgatgtgatatggactctcctcggtttcatcacccccggcggtcagctcgcctccagtcttggatgcgcaaatggtgagaatcgcgtgcctgatcaattgggaagaaatgtcgatcacgtgacataactgataaattgattctgtgcgccgcttcatacaatgtgaatcagaatctttattgcagttctatatgccaatctgctggcaattgtgttggaagtttgagactcatatacatgccagtctacaagtggtgaagctacaagtagcttgactataacacattgaaggcaaagaacatacacatctaatcttctttactcaaggcttaacagaccttcactaata

SEQ ID NO: 44848 - DNA, 441 bp, Zea mays
  unsure (1)..(441): unsure at all n locations
agcttaaggtagatgactaccagntggggtctttaaactttgacattngcatcggntagaggcatcaatcgggacttaatgctctctacnaggacgcggcggtattgatgcatgtatcaacattggtcttgagcgaaagcctcgttctaaagtattatcgatgtttgttcgagaagatgacaataactttataggctatttgtccaatttagccatctatgagagaatgagacgcggcaactgaaacaaaagcgccatgattcaaacaataagacttgaaacactttgttcttgtgtctcttgcttactgagtttgagcgaattggacatttatgtacctctctcgagatctggtccaccttcaagaaattccatgtgggaaatgatcatgtaaagaccaaactcttttgaacgtaccggtgagagtactagaattttgtg

SEQ ID NO: 44849 - DNA, 485 bp, Zea mays
  unsure (1)..(485): unsure at all n locations
aaccgcggcatgcactacatcccttgaagaatatgtctgtgatttgaggatcgccatgangaggaaacaaaagatgaaattcaacacctccttcaaaagcctcaaccacgcctccacaaaaggtaacatccaaggtaatgatcaagccacacttcacattaagaggtgtagtgaatgctttgaagtggggcacttgattaggtcatgtccctatattaatggcttgattattaacaaggatgatagactcttttttaaatgctccaagaagggacacttacttagatcttgttctcatttaaaacaaagaggcatagggttagaaaagaaaanttttactaaccatgtagcatgcaacacgcaatgaaagaagaanacttattactttgaaaacgcctatgctacacatgccgaagaagggacatcaatgcaaggattgtccattggtacaaattcacttctagcttgcaataattatcatgtac

SEQ ID NO: 44850 - DNA, 467 bp, Zea mays
  unsure (1)..(467): unsure at all n locations
agctntgctgtataacatgttatgactntagaatgggcatctaggacagcagccgctcctgcaccgaaggttccccaggaaccatcgcagaacactatccaagcttcggcgtctttatttgtttcttcttcctgagcccctggcgtccaatcagcgatgaagtatgctaacgcctgggactgaattgaggatctatgcacatagtcaatactgaattcgttaagctccgcagcccattttccaatccttccagtagcttctctgttcctcattatgtccttcagaggctgtgacaaaggaacaattatatgatatgcttgaaaataatactgaagcttcctggaggtcattaacatagcatacaacacattctccaattatgtataatttttctttgataaacttataacttcagagaacaaagtacactggagcctcgttttgatttggccatctagcttctcttg

SEQ ID NO: 44851 - DNA, 375 bp, Zea mays
  unsure (1)..(375): unsure at all n locations
tcagcagaatgacagcgaaggttcttcattctcagataggcagaaatgtgctaacttatgttgatgatatcattggtaagagcacgaagcacgataatcacattgctgatctgcaggagaccttcgctaattntagacaggccggtttaaagttgaatccataataatgtgtcttcggagtgaagaaagggaaatttcttggctgtctagtttcaacaaaagggattgaggctaatccaaataanattgaagctatccttcgaatggaaccaccaagtacaaaaaaggcggctcatagattgacaggaagactggcatctcttaacagatttatatctagatcagcagagagaaatctaccatttttcgaagtgc

SEQ ID NO: 44852 - DNA, 462 bp, Zea mays
agcttacgaatgaactcaatatccttgattcttataactttgattgaaaacttgcacacatagcttatttatatatctttgatcatgtctctctcatttggtacaaatacatatttcttattcttcttgtgccaaggctgggactaatgtgcttccaagtgtatttctatgcttaatcttatattgaaagggaaatggagcattctgtaaaggcaaagcttccacaacaactctatcgggatcatttatcatttgccctcctcatgaactttcattcatatcctatctcaaaagggagagagagtaaaaagcctccacttctctttgtttttgacccttaatgccaaagggggagagaatattatgcccaaaacaaaaggaccgcaccaccaccctgctctctaatactgtttcaaaagggagagagattattatattgcaaaaccctcttgaagctaattg

SEQ ID NO: 44853 - DNA, 422 bp, Zea mays
tcttggaggcacgcaactccttgatggcagaatctttggaggtcaataacttgtcgagtcgggacacttcatccgcggatgcgttcaactcattgcgatggtggtccaaatccgacatagtaaaacgatggctcctctccagaatggtcaaggaggtgctggcatcgcgatacatcctgtccagattatcacgagaagcaacaagtgctcgtgttttctcctgcaagcaagaacaacactaagcattgaagcaagggaagcacaatagaagcagccaagagagtatacctcatgtgtcatcctctcggagtcgagttgtgcattcagacaggagttcaaggagcgagcaccgtcaagaaagcagaacgttggcttcagacggcctggctctatgtatacttctcttcaataacagagcaccg

SEQ ID NO: 44854 - DNA, 473 bp, Zea mays
ttaaagtcacctgcggcatcaagctttatgattagtgagagagatatgttgtgttcatttgagctcctgcgcttggatcgcttctttctctcattctttttgcgatcaactcatttgttaccgaggcaagagacatcaattgtgtggtggtccttgctgggaagtttggttcccgtttgattgagaagagaagctcactctgttcgacggactgtttgagagagggaaagggttgaaagagaccccgtctttgtgaccacctcaatggtgagtaggtttgcaagaaccgaacctctgtaaaacaaatcctttgatctcactctttatttgcttgcgatgtgttttacgccctccctctcggactcgttcttatttctaacgctaacccggcttgtagttgtgtttaactttgttaatttcagattcgccctattcaccccctctatgcgactttcactacattgtgtagataa

SEQ ID NO: 44855 - DNA, 390 bp, Zea mays
aggctcaatgttgtgctctcagtcagccttaggtctgaactttcagtaacactgatagtggatgaacttacagctcgattttgagtaatatcccatgactatttgatggtgaacattgtaacacaagttaagctggttccgtaggctacaactttgatgcaaagagatggtcggatcactacataaaatatggagcaaatcaaccccaaacatgctttatcataacgactaaaggagctgtgtgatggtatactaaccagatcagatcgccagctcagtaaactcaccaccggtgatccccgcgcgtggatttatgccaccacagtgattcttgctcggtgcagatggataacacagagggagtaagacatatcaccagtggatgaactc

SEQ ID NO: 44856 - DNA, 458 bp, Zea mays
  unsure (1)..(458): unsure at all n locations
agcttgaccgncgattcctcaaagctcgaaaacggatcgcattctattcgcgacatgcagcgaatacgaacaggcacaagcaaacaaacatatacaagtataaaaacatcacaccatacaaaggaaaacaatataagaacgtgcaatacaaaataaagctcccttctatggtcacgcgaggaaaaaacgcgatcgtcgaagctacggtctagaagnttataacgttacgccacgcaagtaatagccaggacatttaattcgacattataaaatataaattataattgctatgtagtttgattcaatctgctacactaacagctgtcaaataaataactaatataattagcacgagagattctaagcgagataagtttacgatgcgtgaaacagcacgccagcttgcgaacgacacgcgcgacatagcgcgcggacgacgcacgatacagcacgacagt

SEQ ID NO: 44857 - DNA, 422 bp, Zea mays
  unsure (1)..(422): unsure at all n locations
taatcctgagaagtgtgtcttctgggtaccccgacgcatgctcctanggttcatcgtctctgagcgaggcatcgaagccaacccggagaagattgcggccatcaccagcatgggacccatcaaggacttaaaaggggtacagagggtcatgggatgcctcgcggccctgagccgtttcatctcacgcctcggcgaaagaggtctgcctctgtaccgcctcttaaggaaggccgaatgtttcgtttggacccctgaggccgaggaagccctcggcaacctgaaggcgctccttacaaaggcgccagtcttggtgccgccggcggacggngaaaccctcttggtctacgtcgccgcgaccactcacgttggtagcgccgcgatngtggtcgaaaggcaggaggaagggcatacattgcccgttc

SEQ ID NO: 44858 - DNA, 435 bp, Zea mays
agcttgtgctgtatatagggagaccttgttctcttgatatccacgacgacatagcagcataactgtgcaataagattgcgattgcacataggctattcatactgtctcgctggcatatcttgtgaaactgggacgtgatacgatggcgcgtactgacaggcattgtctggcactctctgaatgctttcctgtcggaataactggtcggtttgatgctattatggagttgtgcgccgcaaacccgataccgcctcctgtgtctgctgccacaccccctctcatgcagcgttgactgctactaatgcgatttatccaaattttaacaataaatttgcgagggacacagaagcttggtggacccagttgctgccttaaaaaattattcgcgcgctactatctaactcctcctgaggagatgtcaccctttttgggatg

SEQ ID NO: 44859 - DNA, 438 bp, Zea mays
agcttctaaaaggagaacacgtgataagtttatcttacgtgcaattcgaaaaagatagaccttgtgcagcttgtcaagcacgtaaacaagtgggaggagcgcatcacagcaagaatgtgatgaccacctcaagacccctggagctgctgcatatggacctcttcggacccgtcgcctatctgagcatatgaggaagtaagtatggtctagttattgttgatgacttttcccgcttcacttgggtgttctttttgcaggataagtctgaaacccaagggaccctcaagcgcttcctcaggagagctcaaaatgagtttgagctcaaggtgaagaagataaggagcgacaacgggtccgagttcaagaaccttcaagtggaggagtttcttgaggaggaagggatcaagcacgagttctccgctccctacacaccacagc

SEQ ID NO: 44860 - DNA, 376 bp, Zea mays
tcctgtcatcatcaaccttgacatagaactactccgtattccattctgctgctccattgcttcggtaactgattacaggaaacattgtggttcttcgactagcaaaattatagcaaccaaaattatcatgcaatccatcttttctagccttcgtctgatagtgtagctcgtgaactcgacaaaagctgttcgcaaacggctccaccgcttggcttcggagtgcccagatataaacacttaacctaacgatagcgttaggagtcaactgatgaaagtagataccaaatctcttcagtacctttgcaataatcccatgtagggggaatcttaatccagcctttacaaagctcttgaagatgactatttcatccttctc

SEQ ID NO: 44861 - DNA, 451 bp, Zea mays
  unsure (1)..(451): unsure at all n locations
agcttgcacctagtcacaccagcataccaaattatataccttctgaagtggtagnttgtgtgcacctgttcgttgtcgtagttaaaatccccatgctatttccattcatcaatgtaatcacggcggtgggtctcgaaggccatgaccttcttctgtctctgtctattgaacctcgccaagatacaaacatatattagtaactcattcaatatgtgaattattagttagaataacaagtgcatgtagacactcacttatgaagttctattgaagcccagaatggctccaccggaaactcctgtcgcaatccgaactgtcgagcaacttttgggggcaagtggtactcaacaacctataaacagatgaggggacacctcattacgtagatgtcctcgtctattgagcacatgctgctcaactgtatgctggcgaaatatgctgtcggtgttat

SEQ ID NO: 44862 - DNA, 508 bp, Zea mays
  unsure (1)..(508): unsure at all n locations
tctcttgaacaagtgctgcacttaccgctgagtgcgaagctgtcacatataataacaaaggagcccctggcgtacgtggagttaatgttgttagatctatcaaatactgtttcagctcttcaaaagccttctgctggattggtccccattgaaagacttcggctgacttcagaacttcaaagaatggtaagtttctctctgctgatctggatatgaatctattgagagatgccagccttcctgtcaacctttgagccccctttnttgtacttggtggctccattcgaagtatagcttcgattntacttgggttggcctcaattccctttgttgaaactaagcaaccaaggaatttccccttctttactccgaagacacattnttctggattcagctntataccagcctgtctaanattagcanaggtctcctgtaaatcagcaatgtggttatcctgcttcgtgctctntacaatgatatcatcaacataagtgagtacattcctgcc

SEQ ID NO: 44863 - DNA, 464 bp, Zea mays
  unsure (1)..(464): unsure at all n locations
agcttgcattgcatgtataaattccttggattgcatctatggcttgtctaaccaagttgagataaccgccaacaaagcgagtgaataagcttaactcgggtcaaacttgacaagtcttattattaagcttttagcacttaaattcttacttgttatgcaattgttggttcttgaaatatgcatgaggtactacacttagggggagtattcaaaactcaaatcactcatgaaaacccctagtgcaagccaaaatgcaaatttcaccatttgcctattntctctaanaattatctagcctatggcaaaatatcttaaaaagtatatgagggtgccaatacctgtcccaacaagagttattttgtgtgattataagttgggatttggtttggttggaaaataaatagaaaaattcaattttccacactcctctctgtctgggctcaccggacagtccggtgtgcacc

SEQ ID NO: 44864 - DNA, 485 bp, Zea mays
  unsure (1)..(485): unsure at all n locations
gatatgtccgtgcgttgtagtagtaagaaagtacttatgttcacagttaaaaagtgtggaatgagaaccgacattaaaatatgagaatatatataatgtggttctcatacatatgttctatgtttcacatctaccaccgaaggccaagtacattttgatatactagcctaaaatgttccgctgatctgatatactagcctaaaatgttccattgatctgattttttgctacaccctgctgccctctacatatggattgtctgtatcatcattctaccatttaaaagtaacctactggctaagacctttccattccctccctttcatgtgcagcattgccagtcactaatagatatgttctttggtttttgtccttttatagacttgngttacataaatgtgtttcaggtgtacacatctgacttaacatcacttttcttatggacctgttcaacgtgcacaggctacacaaaggttngttcttcc

SEQ ID NO: 44865 - DNA, 459 bp, Zea mays
  unsure (1)..(459): unsure at all n locations
agcttctaagggagaacacgtgataggtctatctaatgtaactttcgaaaaagatagaccttgtgcagcttgtcaagcaggtaaacaggtgggaagctctcatcataccaaaaatgtgatgactacatcaagacctttggagttacttcatatggacctcttcggacccgtcgcctacctaagcttaggaggaagtaagtatggtcttgttatagttgatgattttgtaacaccccaggtgttactcagggtgtccacccagggctacaccatttaaacctactatcacatgtgggttagtttgagcaaagtacatcaaacctagaattcaaggtcctaagcaagtgcaacccatcttggatatcataccctaacttatcatgcacantctaaagggagaagtttccataaccctatagcaaacccctttggacaatgggaaccctagatgtaagtatg

SEQ ID NO: 44866 - DNA, 447 bp, Zea mays
ctaagcttagcaacacgggctgccgcgctgcagccgctggaccccaacctttataccctctctctttgggaggcccgaagccagaagaggaaggccaccagtccaacgcctcatgaggacgacttggatcaagagatcagaaatatggagatgctccatcagcaggtccaaaggatgaaggaaaagatggccaagctagctgacttgcagaggcagatagaccaagcctctgaagaagttcgtcatcttactcaagatgagcagaaccgaaggcctcagcacagagagcttcatcatgagggcttcttcaacgaggatgactggtatgagaattttcatcatggaaactttgcttttgatgatgcttctcctctgtcagcagaactgcaggctacaccttggcctccgtcttacaagccaccttcactccctatgtacgacggacat

SEQ ID NO: 44867 - DNA, 470 bp, Zea mays
  unsure (1)..(470): unsure at all n locations
agcttccncaagcgcctacaggctcacaacgcctaatggcgaggacctggagcactcctggaacatcgacaaccttcgcaaattttntgtttgatccacttagggctgatttcgcccttgtaattcaccacaaacaatactgtaccggcccgcactcttttcctcccggggggtgaggtttttaacgaggcggagccatgtaatatatgtgagaaaaatcccccgcaaaaacaagtgtcgaataaagaccgcgacaacggtcttcggcattcgaccaattcgaggtcaccgcgaggctaagcgctagccaccctcgcgtgcgacaagtccgcgcagaagtcgcctaagggtgcagccggacttagcacaacaagtgcgaaaaaattccgacgtctatcgcgaagactatccgcgcagaagtcgcctaagggtgcagccggacttatcacaacaagtgcgaanaaattccg

SEQ ID NO: 44868 - DNA, 420 bp, Zea mays
  unsure (1)..(420): unsure at all n locations
agcccgcaaaggcaaaggcatctatgctctaaagacaaaggatggttaccgtgactgaagtgattgaaacaacaccaccaagagctccaactctgaagatgccggcaatggaaatcatgacagctactgaagctgtaccttcggaggttgccgcagaagaggccagagccgaagatgctaactccgatggtattaatttagagagcatagccgctaatatagataaaatgctgctgaacatggccgctgaagaaactgctgcagccaccgaagagaccatggctgccaaacctcgaaaaggaggaataaccgaagatacctcggaaggtgaaactttngacttccgaaacttagttggccaggagctgactgaagctgaanaagaggaattaaaagggtatgctatatcttgtggatatc

SEQ ID NO: 44869 - DNA, 441 bp, Zea mays
accggatccttaagtcacctgcggcatgcaagctatataggaagatgtagatgccggggtcgatgaattattggtgtctttccattgaatggatatgttactctatatgcgtcgcaattgcttatcctgtttcttctcgtcatttctacgcttgtgcttgttcattcatcgtcttgctcatgcgattcatgcttaccgaaccgaatggaaagtgtatggccgcgtaattttggatcgttcgcatcacagctgtcagcatgcacttgtaacttttattttttgagtattatatatttacattatacgttttcctcctccggtcagcggccttagcatgtacacaaagcataagggcttgttcgtttctgtcggattggtgggtcggaacgattcctgaccggatttcttctctaatttatataaactttgattacctggaac

SEQ ID NO: 44870 - DNA, 439 bp, Zea mays
  unsure (1)..(439): unsure at all n locations
tnccatgaacagctaaacatgcaattcttacattntctagggttatcatngtggaaaacaaaaggcacatgcaattcctattntactattgtcggngaccataattaggggtaccctcaagacgcctaattctcagctggtaacccccatcagcatagagctgcagaggcctgatgggtgcgattaagtcagggatcagtccatacgagcgactcgatcacgcctcgcccgagcctagcctcgggcaagggcagccgaccccgaggggtttccgtctcgcccgaggcccccctttataacggcggacacatctacggctcgcccgaggccttgccttcgctaagaagcaaccctgactaaatcgccgcgccgaccgaccgagtcgcaggagcatttaacgcataagtagcctgacacctttattcttgacgcgcgcccc

SEQ ID NO: 44871 - DNA, 424 bp, Zea mays
  unsure (1)..(424): unsure at all n locations
agctngaagccatggtaagtagcatatgccaataatatgcgaattgactcaagcctagctacgggtgcataggtttcaccgaaatccaaaccttcgacttgggagtatcccttggccacaagtcgagctttgttccttgtcaccacaccatgctcatcttgcttgttgcggaagacccatttggttcctacaacattttgattaggacgtggaactaaatgccatacctcattcctagtgaagttgttgagctcctcttgcattgccactacccaatccgaatcttgaagtgcttcctctattctgtgtggctctatagaggaaacaaaagagtaatgctcacaaaaatgtgcaacacgagatctagtggttacccncttatgaatgtcgtcgaggatggtgtcgacggggtgatctcgttgga

SEQ ID NO: 44872 - DNA, 434 bp, Zea mays
  unsure (1)..(434): unsure at all n locations
catgaacataagcaagtcaacaagtgtgctattcacatcacttcattnntgtaattcatatagtatggtaatgttggagtgccctgaatacaagtcttacactacagatgtactagcttatgtaactttgtctccctgtaggagcataggaaagaaacaatatatatggcagtcccaaaatattggtcagtttttcaagtggaaattgctttcacaaacatagtattctttaaccttttggttaattcgcctggcaattctgacacaacattctttcaccttttggtttggggcacctctatcctggggcacacatgtcgtcttttgctgattggtgaaagaggtgagcagcatagtgcataagaaatgaagaaagagcttcaatagtgtgatcattntangagcttggtgcttatgggttgcaagaaatctag

SEQ ID NO: 44873 - DNA, 433 bp, Zea mays
agcttcggaactacaacatatccgaagacgaatggccaaaccgacttaaagatagaatgatcttttagtccataagggtctgagtcaatgctgtaaacttttatgaggggcatgattgtaattcctcacaggctgtgtcctgtgcctataaatagtgaacagtattcctttactgttcacgcattcctgtaattgctaacgcatcactcgggaattattgcttgtcaaggcaaaggtataaatgtatttaaacgttgtattcaaacatcttaaattcatataataatatatgtgaataagatcatttgtttttcaatacatttatctttaatatttcatgctataactttactttgtattacctttataagcttaattacgaaggtgaaaccttcgtaatactatattcgtgaccttcgtccgaaattcatta

SEQ ID NO: 44874 - DNA, 485 bp, Zea mays
gtaagtagcataggccaataatatatgttttgactcaagcctagctacgggtgcataggtttcaccaaaatccaaaccttcgacttgtgagtatcctttgggcacaagtcgggctttgttccttgtcaccacaccatgctcgtcttgcttgttgcggaagacccatttggttcctacaacattttgattaggacgtggaactaaatgccatacctcattcctagtgaagttgttgagctcctcttgcatcgccaccacccaatccgaatcttgtagtgcttcctctaccttgtgtggttcaatagaggaaacaaaagagtaatgttcacaaaaatgcgcaacacgagatctagtagttacccccttatgaatgtcgccgaggatggtgtcgacggcgtgatcttgctggattgcttggtggactcttgggtgtggcggcctttgttctcatcctccttgcttgacatttgatctccccttgatca

SEQ ID NO: 44875 - DNA, 64 bp, Zea mays
gaagccccacgggggggagttttctcgaggacgcgcaagaaaacaaccacccactgaaccgcaa

SEQ ID NO: 44876 - DNA, 459 bp, Zea mays
agcttgcaggacgctatcagttaatgcgccgtcgtgcatatgatgccgactacaatcctggcacagattcagaggcccaatcctcagctaggggcagtgtgtcaatggatacagaggatgcacctcatgctcatcctaacttcccaattgatgtcacagggtggacttatcccaagagaagattttctatggctgagtactgtttcatgaggataattaatcagtatgctctgccctctgacacaaacattcagttctttcatacccaacttcagtttgatgtcttctagggaactctgatggggacaaactttcacaagcactatgttattgattgcgattacatgttgagccagtatgttatggaaggtttgatccctaagcttcaggcatgtggcttgtatgagcttatgggacagaggatagaccttattgagatggctgcaaacaattcttggc

SEQ ID NO: 44877 - DNA, 395 bp, Zea mays
tcatctatatcgtctcagactggtgaaaaccagctgttagtcttctatgaagttttccgaattctccgttttgattaccacatcatctacgtaagcctccacactcttgccccagtgatcagctaagcacgtttgaatggctctctgataagtcgctccagtgtttatgaggccgaacggcatggaggtataacagaaagcaccaaacggagtgatgaacgctgatttctcctcgtcttcctttcccaaactaatctgatggtattcggaatagcaatccaagaaagacagcacagaacatccagcggtggagttcaccacctgatctatccttgggagcccgaacggatccttcggacagtgtttgttgagatcagtatagtcgacgcacatgc

SEQ ID NO: 44878 - DNA, 230 bp, Zea mays
agcttgagagtaaggagtgagaaagataagattgccctgccaagcaaacaagagcaacaagaaacacaagtgatcctctcacaagtcctatagcactataattgaattggggactttgatcggatcggtgtctttgatttgtgtcttggagtgatgcactttgctcttgtattgaatggagagcgttgaatgcttgggatggtttgagtggaggtggttggtgggaaata

SEQ ID NO: 44879 - DNA, 450 bp, Zea mays
  unsure (1)..(450): unsure at all n locations
tctaaagggagaacacattatacggctaacaaatgttctatttgagaaagacagggtttgtagcgcatgtcacgcagggaagcaagttggtgttcatcatccacacaagaacatcatgatgactgatatgccactcgagctcctacacatggacctattcggcccgattgcttacataagcatcggcgggagtaagtactgtctagttattgtggatgactattctcgcttcactagggtgttctttctgcaggaaaaatctcatacccaagaaaccttatagggattcttgagatgggctcanaatgagttcggcttgaggatcaagaaaataagaagcgacaacgggacggagttcaagaactctcagatcgaatgctctcttgaggaggagggcatcaagcatgagttctcttctgcctacacaccataacaaaacggtgtattgag

SEQ ID NO: 44880 - DNA, 441 bp, Zea mays
agcttgctacaagccttcttctctttctcatatcacgaaccttaccggaacactacctcacttaaaaagaatgagggtagaactcttgaatcttggggatttgaactccttgaagtacctcataaaaaggtgttacggtgtcttcttctgctgtcgctacttgaacaggctgtggagagacgactgacacagggttgattctatgggaaccttcttcttatcttctcttcactatcttcttttcactgaccctttctttctctttgctcttcccactggatgattctatcaaagagtattactatcatacattggaggaaaccaaagactatgaaccatgtgcaatagtcttcaacccaagaatcaccaagcattgtgatcttacgggccagggagtgggaaatgtggttgctcgcgatattacaaaagggattatctgga

SEQ ID NO: 44881 - DNA, 356 bp, Zea mays
ctggcagctttctgacttccatgaatagcaatatgcccttgattctaaggtatcttcatgcatagatatgctggatgaagaattgcttcaaaagcattgagagtaccacgaccaatgattgcgatgcaagggtatttcatgtcaacaatatcaaataccaacttgttcagttccttgtgttgttgataaatccgaaggttactagcatcgtgatcatgccaagtgctacaatctgccttcctccgcagccacaaaggtgatgtgtggcgtcatggatcttatcttctggcctcttgcatctatatgaaggctatagcatatataatgctcgatgcactgctgtgtaacacaaaaca

SEQ ID NO: 44882 - DNA, 422 bp, Zea mays
  unsure (1)..(422): unsure at all n locations
cgacccgngatcctcttagacacctgcggcatgcaagcttggacaaccatcatatattatcctgatttttaattngcgcttattaataaaattaaacctttctatatgaagagagtggctcttcactctcatcggattgacaaaaagtgagtcttatgttttcttatttgtttgactcacgttggcgtgatattttgtaaacagattatgcatatcatagcgacgtttgtcatttcgtatctatacgtgtatgctaatttttaactctcgtggcaacgcacgggttcgtacctagtatatatatattttaaaaaaacgttgttgacttgacgagctgacttctgctggcttgtcgtgccagcacactcagacaaccagtgctggtataatcgagatgtctcatcaacaaacgctcatgcaga

SEQ ID NO: 44883 - DNA, 497 bp, Zea mays
  unsure (1)..(497): unsure at all n locations
tctatagggagaacacattttaggattaacaaatgttcattntgagaaagacacgatttgtagcgcatgttaagcagggaagcaagttggagtctatcatccacacaagaacatcatgacgaccgacaggccgcttgagctacttcacatggatctattcggcccgattgcttacataagcatcggcgggagtaagtattgtcttgttattgtggatgattattctcgcttcacttgcgtattctttttacacgaaaaatctcaaacccaagagaccttaaagggattcttgagacgagctcacaatgagttcggcttatggatcaagaaaataagaagcgacaacgggacggagttcaagaactctcaaattgaatgctttcttgaggaggacggcatcaagcatgagttcttctctccctacacgccacaacaaaatggtgtagtggagagaaagaatcgaactctaatggacatggcaagaaccatgcttgatg

SEQ ID NO: 44884 - DNA, 447 bp, Zea mays
  unsure (1)..(447): unsure at all n locations
agcttctagtggaggagtagtatattnttatttatcttattttatccacaatattcttattttcttctcttttctaaattctacaattccttttagattctagattntccttttgaattaatatatttcttgtctctctatttttatattgtcacaaaatgcacacacaaaaataatatccagcatgatgcataatttaatggcatatattcttttattacctattngttttttaatatggtgttcacatgtgatgatgagtatagatcacaaaatcttgggctctcctctatttccactatttacatttttgggtattacagtcctcatcttgaattggtggatatgattgtatggaagatgatggttgatcctgtgcttgtgaaggctctntgggttcttgtggacacacatctncaatggacatgtttcttatcgtgatgcacg

SEQ ID NO: 44885 - DNA, 490 bp, Zea mays
  unsure (1)..(490): unsure at all n locations
aagtcacctgcggcatgcaagcttgangaaagtggcaagaggcgcctgcctatatatttctaaaaccgacacgggcattattaaagacagaccgcgcatgcacagtcaccatggatcaaaagggtgacagtccatgggaagaagaagaagaaaaggagaaccactgctcgcgctttgcaccagaccactatctccgagaagcggcatgcaggcaggcactcttacaaatcagcaaagccgggacacatgatatatatatataatatataaaccgagagagcacagagccaacccaagagagcagctgagcagccagccgtggaggaagagatgtacccataccgcatgagcaacgtgatgatcgggtacctgaacctggccacgctcctggcctcgctccccatcatacgtgcggggctgtggctggcaaggagtagctactcctcctcctccaccacgtgctcgtcgatcctgcagacgccgctcctcg

SEQ ID NO: 44886 - DNA, 356 bp, Zea mays
gttagcgactgagatcctgcttccacaccatatgaccccagtgtgctattaataaagaatcggacaatagctagggatcaattgacatactcccagatcattggctcgctcatgtaccctgctagggcaacaatgtcacacatctattatgctgtgagaaagccaagtgcgtttgtgtccgaaccacgagatgatcactggcgtgctcttgagagaagtgtgcggacattgaaaggtctatgacatacgcggttcattataccagaaacccaaaagtgctggaaggctcttgcgatgccaactggagttcagatgctgatgagctctatgccacatcgcgtaatgtgttctgttgg

SEQ ID NO: 44887 - DNA, 463 bp, Zea mays
agcttcagccaaaggactgaggcttgccgtgcatgtggtgtactgcattgcctggctgcctgccgtgccttgtggaaagcaagtgctgtttatcatgcgttggcctccctctgcccgccagccatggcgttggtctcctaggtcgtgtttgtgaccctgtccctgtccagctcagcccattcaattggtccaggctgaggctagcctgtcccgactactgcaactcactttgtttacgcacttataccatatgagcctggctcagacgagctggtatttgtcacccaatatgcagacaggctagaagaccaaaactacctaaacgcggaatccttgcgccacgagcagccaggctcccagaaaacggaccttgagctcgtttctgtggagccaggctcagaggctcaatttgcacgtgcacagcctggcttccaagccgaccaggcgacacatacacaggagc

SEQ ID NO: 44888 - DNA, 490 bp, Zea mays
  unsure (1)..(490): unsure at all n locations
caccttacacaaaggatgtaaagggaactatattatgtttcactaccaagatcaaaagaaataagaccacatatgaaagtggtatgcccttttgatccaacggaaatgacagatgttgcttgatttcctcacagacaacaagaaattgttttaaggaaggagtccacagaagatcacacatcagtgtagtttcacaatggatcatgaccagatacttcgataccaacatgcgccaagcagcagaatcctgtgtgtacattcacaggaggctctcagtttcgctgcggtaccataagttcttaaccatgacaccattacaaaactggcaccaataatggatctcaagtaataagaacaattngcgtagggataacatattgatataatctcataatggattatgacttctaactgtgatacaagcgtgcatctagcagcacaaccttgtgtgtatacccacaagaggccctcggttttggcgcgcatcatc

SEQ ID NO: 44889 - DNA, 441 bp, Zea mays
  unsure (1)..(441): unsure at all n locations
agctnttccaaaaagtttagtgatgtttggagttattaatcaatttataaaattctaggagtataggttntggctattttaaatactccataattccttatttggactaaaaatcataaaactatttttattaaatactataggaacttaggaatataacaaaattggtctggtatttttcgcatttttctacaattttctatgaattctctaatcctggaagaaaaagaaaagggaaaagtatgaatagtattgggccgggactggcccaagtcagcccgtgaacaggcaaacgcgcccgcgcgtgcggccgcggtgggcagtttgcaccgaggtccccaggggtttgaataactagcgaagaaccccgcgcactatttcaatgggtcactgacatttacaccgaggcccttcactttctaattctttacaacccgcggt

SEQ ID NO: 44890 - DNA, 461 bp, Zea mays
  unsure (1)..(461): unsure at all n locations
tactaagctttctgacatagcttcgtgatcgtcttatccttcatcatgatcgtttttcattccagtcaagcttcgtcttaaccatgctcttgtatatttgcgacctgactccgaaggttcctgttccgaaggtgcctgttcacatattacacttggaaaacattgtcaaactatgtttttgaggacctttgggagccgaaggccccaaacagtagcccctcgcaatatcaatttactataaagataaattcatattgcgacatggacgaaggctttaagccgaaggtccgaaaaaacaccttccttttgctagaatagcaacagtcattgacaagcggtgccctccagttttcgacatactgggcgtataaatacaagctcaccacgagtttatttggcacgctcttttgccatctgctntttactcacccagcttttcagcctgcgcgcaacatcatttg

SEQ ID NO: 44891 - DNA, 462 bp, Zea mays
agctttatcaatatttactgagacgatgtcttttccatgttgtgctccaatgcaatggaatttcaaggtgcatatctcaccagtcaacctgcgacacaaatatattctaagctaacaatgactaaaatagtgtttgtaaaagatttcattctacaattaagaggtatgaaaacaatatactataattatgatctgcgccaaggccaaagcagtagagaacaatatgagtagatagatttttacttgtcaggaagatcaaagaagacgttcttcccgaccataatctcgtccacaattcgtgtaccaagttggctaccattgtcggtggcgcacatattatcttcattgcttgtcggctgcaaacctccttgagttctcatcatatgtcaggaaaatagatgctgacacggcagggaacacacaaaacatgttagtataacaatatattggcttatggattat

SEQ ID NO: 44892 - DNA, 397 bp, Zea mays
  unsure (1)..(397): unsure at all n locations
tacttgtcanagcaacaacatctgccagcacatcaattgcttaccataccagtgacttggcctttcgcatgctggggactggatatgattggacctttcaagaaagctcaaggaggatacactcatgtattggtagcaatcgacaaattcactaaatggatagagttcaagcccattgcttctttaacctctgctaaggccgtggaatttatacaagacataatattcagattcgggataccaaacaacatcataactgacttatgatccaacttcacaagttcagagttcttcgacttctgcgagcaaaagagcattcagatcaagtatgcatctatagcacacccaagagccaacgggcacgttgagcgagctaacgggatgatactagaggcac

SEQ ID NO: 44893 - DNA, 440 bp, Zea mays
  unsure (1)..(440): unsure at all n locations
agcttctccagagatagtgggggcttcctggctaaatactacgctgttggtcctggtcgaagccccttgatcatagctttaataacaatctcatttggcaccattggcacctgagctctaagacgcagaaaccttcgaacataccacgttattgttcccggccgaagagaagaataccatgtttgagccacactcctgactgccatgacgaaggacttcgccatgacggcagtgttgccccatatgatgatatggttgctgcgtagctcataaggaaatgcttcaggtcggaatgtccgtcatacatgggaagtgggaagttgtggcggtttgtatgaaggtggccatatggtagcctgtaactctgctgctatgggagaagcatcatcaaaagcaaagttaccatgatnganatcgtcataccattcatcatcatagct

SEQ ID NO: 44894 - DNA, 499 bp, Zea mays
  unsure (1)..(499): unsure at all n locations
ctaaagggagagcacattntatgactaaccaatgtttatttttatatagacagggnttgtagcgcatgccaagcatgaaagcaagttggtgcccatcatccacacaagaacatcatgacgaccgacaggccgcttaagctactccacatggatctattcggcccgattgcttacataagcatcggcgggagtaagtattgtcttgtaatagtggatgattattctcgcttcactctgggtattcttttgcaggagaaatctcaaacccaagagaccttanagggattcttaagacgggctcaaaatgagttcagcttaaggatcaagaaaattagaagcgacaacgggacggagttcaagaactctcaaattgaaggcttccttgaggaggagggcatcaagcatgagttcttctctccctacacgccacaacaaaatggtgtagtggagaggaagaatagaactctattgacatgacaagaaccatgcttgtgagtac

SEQ ID NO: 44895 - DNA, 460 bp, Zea mays
  unsure (1)..(460): unsure at all n locations
agctntagcaggatgactgccaaagtccttcactctcaaattggcagaaatgtgctgacatatgttgatgatatcatagtaaaggtcacaaagcaagaaaatcatgttgctgatttgcaagaaacatttgctaacttcagaagggctgtcttaaactaaatccagagaaatgtgccttcggagtgaagaagggcaaatttcttggtttctttgtaacaacaaagggtatcgaagctaatccaagtaagatagaagttatacttcggaaggagccaccaaagtcaagaaagggtgccctaaggttgacagggaggctggcatcattgaacagatttatttcaaggtcagcagagaggaacttgccattctttgaagtgctgaagtcagccgaagtctttcaatgtggaccaactcagcaaaaagccttcgaagaactaaagcagtacttgatagagctgac

SEQ ID NO: 44896 - DNA, 418 bp, Zea mays
  unsure (1)..(418): unsure at all n locations
ntaaagatgcaacaagacgatgaagacaggagaacgatatctctatctatggcttagaggataaggtcaaagaactcgaagactctntgaaggagaaagacaaaatgctatgttcagccgaaggatcgcttgccgaagcacaaactcagaacatgaagttaagcaaagacctgtcaagcgctcaagcacttttgaaggaaaattctaatcagttcaaataggagaacgaagctctaaaggcaagacttaaggttgaatctgagaaaaatatgaagcttagtgaggcgctgaaggctctgaaagagagatgcttggagtttgcaagccaatgcaccactcgattgaaaagtattttcaattcagttggagctgcatccagagaaaccagcctctttgccgaagatatacccggcgcact

SEQ ID NO: 44897 - DNA, 430 bp, Zea mays
  unsure (1)..(430): unsure at all n locations
agctntangcattattaattgctatataatttctgattgggactaanaaccttggaactatttttattaaatactaggggaatttagaagcctagtaaaattggtttcatgattttatcagttttctaaatttctgatgaatttcaaaacttaattagaaaaagaaaagaagaaatcatcaacagtactggaccgaaaccggcccaggccggcccattaccgggcgaaacgtgtccgcgcgcccatgatgtccaatttgtgtagaggacctcggtcattcaaataaccggtaaagaaccctatgcactattcatctgtgtctcagacattcacacttaggcccctgcacttctatttcttcgcagtgccaagtccacgacggtgaaccacgacgagcatgcctccggcgaacttgtactggtcggaatac

SEQ ID NO: 44898 - DNA, 469 bp, Zea mays
  unsure (1)..(469): unsure at all n locations
tataccttcaatgcatattgttttctcngtctgtgccaaggatntcacatgttcgtagcctcttctctccaagatagcggcaatccccctagcacccgagaaggcgcatatgtccccgcggccactcaaaatttcttcaaaagcttcagcctcgccgctaatccagtcgattggaccttcgagatcgcccagtacgaagttgctttcatttgaatatgcgccgacgctggcgaaactagtcttaattttttccacacatttcatagatgcttcataacatctttcttttaaagaccgaagttctgcagttgctttttcccaatgattnttcgagtaatcgctggcgtctcgatcagcttcggcaattgcacactttaatttcgcttcagctagctggttctgaagatcttcaattatgcacttctgggcttcagcttgggccttggaagtagctttgcttctttattta

SEQ ID NO: 44899 - DNA, 443 bp, Zea mays
  unsure (1)..(443): unsure at all n locations
tcagctagagtgctcactactgccggagcaagtcttttatggtgagngcacgtgactctagctcgtattctaccgggtcgtgcatgggggcctcgtgtttgtgtcacacccggatttattgaacaaagctgagtgcatcttatacattctgcaaagaagacaacatatataataacagagtgtgttagaaaatgtcacataacctcgaatagtattacattgcggagatcctaccacataaaggatatatataatacgaactaaggatcatccttggcgccataaagtcaactgggagacgccgcctagatcaaaacaaactcctcgttgtgtggctccttctgaaccacctgttcttctcctatggcgggtgtgagacagccagggtgagctcacacatgatcatagctcaacacggtatgaggaaccaacgtgcatgaact

SEQ ID NO: 44900 - DNA, 357 bp, Zea mays
tgtgaagatctttattcaacatatgctagtcggagatgccttatccatcccatgataggtctagctatcaagcaagtggtgaagttagttctatcataagttactatgtatagctgaccctataacactcccttaaatgctactgaatcatcacttcttctgatgacagtagcacctatatacgtaaaaagacagttgttacccattttacataattgtgaaactaaaagcaagttataatctatagattctacaagagatacattggagatggaatggtctggtgatatacctattttacccaatcctttgaccaagccttgattatcattcccgaatgtgatcgctatttgggga

SEQ ID NO: 44901 - DNA, 460 bp, Zea mays
  unsure (1)..(460): unsure at all n locations
agctngggagaaagaaagctagctaatatatattagggcctttagtccttataggactaaagcccctgtttggtccaacagctagggatatttggttctagttggtggcatcatttgggactaaaggtcaatttttatttatactactctattaagaacctaatgtgggcacccggtgctttcaccctccgcgctgacactctgggcctgtcccacgcgtcccgactcagcgtcgtgccctatgggccccatgcccagcgcctgcgcagcgctctctcagctactgcagcgcccgcacagctaactactgcgtctgtctagcactcgaccccgcccctgcaactaccacaccgcacaaaaaaatagtgccccctgctccataaatttaaggctaaccaccaaaccgcacgaatcttagtgtgtaaaaataaacaataattatatttaaataaatattatt

SEQ ID NO: 44902 - DNA, 482 bp, Zea mays
cgcttcgagcgaggcgtccttcgtatcatccatagagaaagcttcttctgcctgcgccacagatttaacatgttcgcaccctgctttctccagaatagctgcaactcccctcgcaccagataacgcgcagacgtccccgcggtcgctcaaaatttcttcaaaagcttcggcttcgctgctaatccactcaattacgccctcatgatcgcctcttatgaagttgtcttcgctcgagtacgcgcccacgttggcgaagctagttttcatcttgttgacgcattctacagatttttcataacatctttcttttgatgagcgaagctctgcaactgttttttcaaaataaattttccagtactcactagcatctccgtcagcttccgcaataacgcaattcaatttggcttcggtcagtgtatagaacgtttacatctcattcctttggattcagattggccttgaattagcctcaccaccttact

SEQ ID NO: 44903 - DNA, 386 bp, Zea mays
  unsure (1)..(386): unsure at all n locations
agcttctacagctcagggtctttgntgaatttctcgacaggaaanaaatcatcaatctccacgagattttgggtatttatagcttgaacttgaagtatcagcatactgctactggccttgagtatatcagctgttaacgaatcaatttaatgggagcttagatttatacagttaccaatgttaaaattttatcgtaattgtgttcctctatgccaatcaataacacatttgttgttcagagtaaacaataatttgtatttcaactgatatggccagtgggctggcactgaccatgatcgttatttctgccgcacagcagattaggattagtttgttcaagtatgttagcagataagactatttacttgcgtgggagagatttgtta

SEQ ID NO: 44904 - DNA, 414 bp, Zea mays
  unsure (1)..(414): unsure at all n locations
gaaaccgtcgtccatgttatgattaccaacctgtggaanaaagaaatgcgcaaacgccgtccggcacaaagagcctatggcccactatgtaaaagcacaccggaatgctaagcagtctgtaaaaacgcatcgagatagatattcagccttcttcttgttacagtaagtattacacatatcatgcgtgacaaactcttttctgaatcctgacacattatacaatccattgataacctgaactacaaagctatattaatctttcaaactcccttgagacatatatgccattactttgcggcatggatgacggtatgatgaagcttgtttgttaggcacaaaagctttcgtaccttcgctcctggtgatttcaagtccgcatatatcacacagagaattcagctccgacttctaaac

SEQ ID NO: 44905 - DNA, 447 bp, Zea mays
agcttaacgccccttctaaaagattgtctaattttgttaagggcaaggctcccatgcctcaggataacgacggctatattttatatcctgctggttatcctgacgataagattaggagaattcgtgccaagaagactcattatgtttctcaccatgcttttatttataagaatgaggcttctagctctaggcgttctacccatgttaaaatgtctaagaagaaatctcctattgcatcaagtgatcataacatttcatttaagacctttgatgcttcatatgttttaactaacaaatcaggcaaagtagttgccaaatatgttgtggccaaacacaagggctcaaagacttgtgtttggttacccaaggtgcttgtttctaggggtgggcattttaaaaccgaataccgaacccgaacccgaaccgaacccgaatagaccgaattat

SEQ ID NO: 44906 - DNA, 432 bp, Zea mays
tgtgaacagtacatattcagaagggagaaagcagtcttagcttatcagccgaagcccatgctcttatgtgaggacatagcagagcagaaggtgctcgtgggctctcaattatccgaagaacacgagaaaaccttgataaggtttttgttcaacaacaaagatgtttttgcatggtcagccaatgatctttgcggagttaacagggatgttattgaacactcgctcaatgttgacccattcttcagacccagaaagcagaggcttcggaaaatgtctgatgacaaggccgaaggtgctcgtaatgaagtcaaaagactcctcagtgcatgagttatcatagaagtaaagtacccagaatggctagctaacactgttatggtaataaaggccaatgacaaatggcgaatgtgtatcgattttacagatcttaac

SEQ ID NO: 44907 - DNA, 450 bp, Zea mays
  unsure (1)..(450): unsure at all n locations
agcttcgtaaaacatccatgctgtgtaaacaatggaactcttcttttgcagcagagctgatgagactatatttctcagcttactttgtgccttagcacattntcatttttacaaaacattctccaaagatcgacttcgtattcaattcgtgtcattagtgcgatatgatgtatgatgtgatgctatgcgggatgatgtgatgatatgatgcaaaatatgatgctaatgtcgaaggcacacactcacacacccacattgaaacacacagtctctgcgtccctttaggaacggtcgatatctctntgtcgtttatttttcggcttcaccgctaatttttcagtgtaagttctgcatccccttaggaatgtattatgaacttcttcgccttctatatcggcggtataagttctgcatccccttaggaacgtcttntgaacttctttgccttat

SEQ ID NO: 44908 - DNA, 443 bp, Zea mays
  unsure (1)..(443): unsure at all n locations
tncctgctcacatcttcggcgctgtatcaaccttcgtattattttggcttctcctactgggatatcgactcgagtccgaagatacctgttcacacattatactccagaaacagtgttaaatcttgtttatgaggaccttctgaagccgaaggcccccaacagtagcccctcgcaatattaatttgttagaataataaatttagattgcgacatggacgaaggccttaagccgaatgtcccgaaaaacaccttccctttgctagaatagcaacattcactgacaagcggngtctttcaatttttaacgcactgggcgtataaataagagcataccgcgagctcatttggcacgctctcttgccatctgctctcgctcactcaattnttagctcttgcgcaccaagatttacttagctntttaagttttgaagcttcggagttga

SEQ ID NO: 44909 - DNA, 433 bp, Zea mays
agcttgtcaacaatataagcacaaaagagagattgctgcttctgcagatcagccgaagcctatgctcttatgtgaagatatagcagatcaaagggtactgctaggatctcaactatctgatgagcaagaaaagactctgctaagatttttgttcaataataaagatgacttcgcttggacagccaatgatctttgtggtgtcaatagagatgtcattgaacattcacttaatgtggatccatctttcaggccaaggaagcaaaggctttggaagatgtctgaagataaagctaaaggtgctcataacgaagtaaagagacttctcagtgctggtgttatcagagatgtaacatattcagaatggctagccaacactgttatcgtgaagaagcttatggcaatggagatttacagatctcaacaagcatgtcaa

SEQ ID NO: 44910 - DNA, 501 bp, Zea mays
  unsure (1)..(501): unsure at all n locations
gtcgcgcacttagtgaaacaccatgctgctggcttcgtcttcttctgattcttgngatttcttgatgacgcgctgaacgacaacgacacatgagggtgacgtatattgagctgcacacgcgacgcgacgatgaacgatgataaccggcgaaatcgacgacgcgatgggaattaatgccaagcgagccgatggggcgcgctagcgaataggaaactgcgcgagcacaagacagggaaaacgaccggctcgacaacacgcgaagctatcaccagcgacgacagtcgaatctgcaacagagcgttggcgaaatcgatgaacacgaccacagtcacgtgctgacacggtcaagataactgtggctaacgagcttgcgacagaagtgatgatggcatggcacgacaaactgaaacagagacgcgacaacatggtgcttgacccgacgaacagcgactctgagagcatagcgaggttgctgtcgggtggactctgacacaagcacac

SEQ ID NO: 44911 - DNA, 459 bp, Zea mays
agcttatgaagattcttcattccaacatgggctattctgtggtgccagagccaacccatgttagtcttagcaattaagcatgtgtcgagttcagctctatcaaaatctactaagtatagctgaccctctaacacacccttaaacgctattgaatcatcacttcttctaaagacagtgacacctacatcagtaaatagacagttgtagcccatttgacataattgagatacagaaagcaagtcgtaatctaaagaatcaacaagaaaaacattggaaatggagtggtcaggagatatagcaattttacccaaacctttgaccaaaccttgatttccatccccgaatgtaatcgctctttggggatcttggttcttctcgtaagaagagaacatattcttctccctgtcatgtggttagtgcacccgctgtcgagtattcaacttgagcccccggatgcat

SEQ ID NO: 44912 - DNA, 448 bp, Zea mays
  unsure (1)..(448): unsure at all n locations
agcttccattatatcatgagagctgatcatacctatcaattctatatcaatataaatggtcaagtaacttcatataaaatcatctcccattttatttcatagatgtgttttgataagtcttgtagctaaaaggatttctcattgattgcagttgagactagaagggtgaccattaatcttaataacctcataaaccattgatacatggaacttttacataatttgaaaaagactttttatcaaaacaacaagtgatcgtaatgtatttggctctaaatggttgtatactcaaggcgaagcatcaaattcgtcgcacagacaataactatccagtgacaactntggactgaaattcaatgaatttgatgtttcanaaatacaataattttttacttggattgagaaatatattttgaccaaaggaaatcctatgtttcatattgtgtgt

SEQ ID NO: 44913 - DNA, 434 bp, Zea mays
  unsure (1)..(434): unsure at all n locations
tctaaagggagaacacgtgataggtctaactaatgttcaattctaaatatatagaccttgtgcagctggtcaagcanggaaacaggtgggaggctctcatcacaccaaaaatgtgatgacgacatcaagacccttggagatgctgcatatggacctctttggacccgtcgcctatctgagcataggagggagtaagtatggtctagttattgtagatgacttttcccgcttcacttgggtgttctttttgcaggaaaagtccgaaacccaagggactctcaaacgcttcctcatgagagctcanaatgagtttgagctcatagtgaagaagataatgagcgacaacggatccgagttcaagaaccttcaagtggaggagttccttgaagaggaatggatcaagcacgagttctcggctccctacacaccacagc

SEQ ID NO: 44914 - DNA, 430 bp, Zea mays
  unsure (1)..(430): unsure at all n locations
agctttctcanaaggtggcggagccggaaatatctaatatatccaaagcgaagaggcaaagaattattgccgtaacagaagttattgacaagacgccaccgagggcgtcaattcagaaaacaccagctgttgagggcacagaaaatgtcgaagtcgcaccttcggaggtcgcggctaccgaagccgctacagccgaagatgtaaacttataatctactattgaagacatcaacaaaattttaacagacatggctgcagaagaagctgccaccactgctgaagaaaccatggccacagtgcctgtgaaagggaaagaaatagccgaagacacttcggacgacgaagcctactcatttcataatttaatcgggcaaaaactgtcgaaggccggaaaagaagagcttaaggaatacgcccaatcttgccgata

SEQ ID NO: 44915 - DNA, 462 bp, Zea mays
  unsure (1)..(462): unsure at all n locations
acgacaaagacgacgaagtgctggtggcagagtttgacttgtatgagatcaagtcgactatgcatggatgggggatattcatggaccggcgccctgaactatacaaagtgctactgacgttggatggcgagaaacaatcataaaccccggtctcacgcttaatagtggtaaggcacaggcaggctccagctccacatcaatggtgagatttttttttctcctttttaccctgtccaacgatgccatgcctgcatttgtacaagccatctgcgcgtgttcaccatntcacattcagcaaaatacataattttcgtgcaatgtcatctatgtccggggagaatttaaagctccagttcatgactgcatcaatggttcctcggttaacnttgatttatgggtagcattggtctatcaaagtaggaagggcatacctggcagaacgtgcggaatcagcatatttga

SEQ ID NO: 44916 - DNA, 451 bp, Zea mays
tagctatacctaatggacgtgaagagtgccttccttaatggaccaatcaaggaagaggtctatgttgagcaacctcccggctttgatgatagtgagtaccctaaccatgtgtataagctctctaaggcgctttatgggctcaagcaagccctatgagcatggtatgaatgccttagggatttccttatcactaatggattcaaagtcggaaaggccgatcctactttattcactaaaactcttgaaaatgacttgttcgtatgccaaatttatgttgatgatattatctttgggtctactaacgagtccacatgtgaagaattttgtatgaccatgacacacaaattctagatgtctatgatgggggacgtgaaatatttcttatgatttcaagtgaagcaactccaagagggcaccttcctaagccaaacgaagtatacttcagatatct

SEQ ID NO: 44917 - DNA, 484 bp, Zea mays
  unsure (1)..(484): unsure at all n locations
tctagtggtggtccaagtccaatccatgcatggccggatatttatttcttcgactggtcgcgaaataaagacacctgttgtctagtgcaggagcaggaccgagacgatccatgacgcagacgcaacaactcgtcttctcgctagctctgctggatttatcttttccccagtccacgaataacggtggtatcatatcgaaagagaaagagggaaattactgctcgcgacgtgtactacatgcatgtcgtaaatctttaaatttattttaaactttttaggatgtaaatatcgttaataatcttttttcaatagaactaaaaaaattaactgatataaatattattgcgtcaattatgcgaggataaggggagtaataatatcgtaagctctcaactatcagtttcactttcaacgggccatgcaagcaaaaggcattggtcatgcatgtagtccanagatcgatgtagacacatgctcagctcac

SEQ ID NO: 44918 - DNA, 476 bp, Zea mays
  unsure (1)..(476): unsure at all n locations
ggatcttaagtcacctgangctgcagctttaacacattgggtgtacctattacatcttgttctatgacttccacctgtanatcagaaatatttggtgaaagatacaaaagggataactatcaattgatgtgtacatttaccaaactttctatgaaattatggattttctagaattcatgtgcctaaatttaaatataaatgcatactacgaagcgagttatggggagataataaaatnttgcttacctgaatatatgaggtaccacaagaagttccagtgtctcccagcttagctcttcaagttccttgtgtttgcagagaatttctccatacttgggcacatgttttgaaacaggctcttcattagattcatcagctggtgccagaaattcttcaatctaacaaaggggcatgaagatatacgcatgttcacatcttaagagaactgnttaaaaatgcactgatgataacataca

SEQ ID NO: 44919 - DNA, 296 bp, Zea mays
ctcgactggttatatagtgctgcacgtaacaaggcgaatcgccagagtatttacaccaagcgcacacccgctcgcgctcgctgcgcggtggaccgcatggacaaacagtaaactctgcaaggtgggaccgctacgtgctgggaaattaaatcggtctcgacaacaactcagggaatgaggttttcggaccttcggctccccgaagcttatgagacttgtttcacggatcaagctcgttacgaactacgatctagcaccgcgaaaggtgctactgctgggtctatgcttcgtcgccg

SEQ ID NO: 44920 - DNA, 443 bp, Zea mays
  unsure (1)..(443): unsure at all n locations
agcttactgaaaagactgaacttgtgtatatgttatgggcaccaaccgatcatattctatagctatctcttatcatatctcttatctcatccttcattttaaacttcactatgtaaaaagtatcaaacaatggcatctacaattttgcattccttattatacatgatctacctgtcggtgttcagacccgagggcctaatcaaccaatgaaataatgttgtgtatgccctaactcagatggtgatacaagttgacacgagttttttatcctcatacgggaaaaaagagatcctacttccaacagagggggatgagacttatattatttgctcctaagtgcttgcagtanggaatacaagctgagcgggagagggaaggatcccaagttcctgtgattgattgagacaagtgtcaataccgtggtggaagagaaaaccgtgaag

SEQ ID NO: 44921 - DNA, 482 bp, Zea mays
  unsure (1)..(482): unsure at all n locations
tgagttattntattacagaccagagctaagagtgagtgcttattatttatattatacaaaccaagggaggcacaaactcctcccgataagttataaacaaaagatcctatgtggaggaccgagtcctcccgcacttcagtcttgtttttcctcatttggtaccaccttggagcaaaagcaacaaaaaattgtcgctttctcacctaaaaacaacaaaaggataaaccctgagtatggaattactcatcaagtcttacccgactaaggaaaagactctcaagggtatgctggataaataggagtcaaggagaggctctagcaaaaatcaacttatacntttgcagaagtagcttactaaagtgagtccttactctcaatcttttaacgccatgttaagtattaatagactctgtttgcatttagtctacattcaatcatctcatcaatacaacatcattnttatccatagtgttcacattctg

SEQ ID NO: 44922 - DNA, 365 bp, Zea mays
  unsure (1)..(365): unsure at all n locations
ggaccttaagtcactgcngctgcaagctagnaagagactcgctgatatgatttttatgggagagatcctccaatcctctctgccggaagagggccgagacactaacataagagccttaaaaacataagataggagtgactctaatgccactatgctctatatgagagccaacaaatgaaaatggcaccatcttagcacgaatgataatatatcgtggtgacatcaggagatgagtcctcatcaactattcgctaagatccaacaacatgagtctgacgaagctcctaccaagacaagggattcttatgccttggttgcaaatgaacaagaatcttccataaagagttagatgggcatagatcaca

SEQ ID NO: 44923 - DNA, 307 bp, Zea mays
aagcgtgtatgtcagcaggagcacgatgttcggataaaaaaggtgcttttaaccagatcaaataactatgaagaggactccgaaggatcaacctgcattatggttatctgtaacccacttacatatggattcagggttcagaggccaaacagctcaagctgccatactaacttcttgctttgccaattcactagagaaaacgtatgtactacgagcaaatagaacactatagaatacgagtagctcgatccctaccaactgacaagaacgtgctcatctagatcacaagcaatatggataggaacac

SEQ ID NO: 44924 - DNA, 451 bp, Zea mays
  unsure (1)..(451): unsure at all n locations
agctntcctgggcttggatcctgaattaatgtgctggtgcattgcatagtgtgatgggaagcgttgctgggacgggcgaggattcatgtaataatcctcctcaaaagactcatgtgcggactgtccggatacgtacccggaccgtccgtggttatatgcggaccgtccgtcgttgtatgcggaccgtccgactgggtagcttgggttctgtgccgtgtgtggtggctcgggcgcatatctatgtaactcattataaatatgcccgactgttgctggcccggacagtccgcgctcacatgcggacggtccgggcatgtgcagatcggctgatatactgccgatttgcggttgctcaaggtatgtgtccatcggcatcccatacaggggttgtgactggtcgtgacaacctgtagccgatgtattactcgtgatacctcctaacttatcctcg

SEQ ID NO: 44925 - DNA, 491 bp, Zea mays
  unsure (1)..(491): unsure at all n locations
tccgctgcacgccaatactacgcagaccgcggatatcttggttaaatgagatcgcactggtgacgggattagttgcttcaagtattacatctgttatgtccctggcccgcatgtcggtgcttagtatccttgtacgtgcccccttgagctataaaagggagggcacatgacgttacaaaggagactcagacacacttatacccagctcaggctcaaaagttcatacaagctctcaagctcaatacatcacacatcggagtagggtattacgctccagcggtccgaaccactctaaatccttgtgtgtgtttgtgttcgttcatcgtttagtagacatgcaaaacgcttaggcccctcctcatcttatggnttaaggtgggtgcattccgccacccggccggagaatttcctctccgacagtcctattagtttcttctagatttcactccagaatcgttgcagtcgatcaaaacttatattatatagacaag

SEQ ID NO: 44926 - DNA, 478 bp, Zea mays
  unsure (1)..(478): unsure at all n locations
atcctctaagacacctgctgcatgcagcttatgaaaggaaccttttgccatcatatatcaacagattcagccgagagccgtttctttctacaagaccttctgcgacgaagcatagtcccaacacatttaacatttctatgttgccttggtcttaattcatagcatttgagaacaagtccccaacattggcgcccacctccggtgaactcacttccactgttctgagctgatggcttcgntcaacgatcaagctggagctacttcggacccgaagctggtgctcccgattacaggtggttcgtgctcagaaccagccaatataaagcagaagatagatgcgcatagaagggtacaacatgttggagtgcaaggaccctttatcaagtcaaggtggtctcacattccaatcaccttctctcaggaggaccttcagctcaaagatttttctcataatgatgctatggttacttcttgcgta

SEQ ID NO: 44927 - DNA, 426 bp, Zea mays
  unsure (1)..(426): unsure at all n locations
ctcgcatcaaatntctgttcttctagatcgaagctttctgactttgtgaggacgtcactattcaatctggcaattttagcttgtgcttcgtccagttagccctccattgattgaagttcataatccttcttctcagggcagcttcgtgatctcttattttgctctctaagcctttataatctcatgttttttattttcgaggtcctgttgcatcctcaaggctttacttaatagcatactctgtgcaaagcaacctttgtaagacaacaccttccgtgttaaaacaatgaaaagccgaagaaaaaataattaccttgaaattagaatagaataaactaccgactatatgctgtcgtcggtagctgctgatattagcctcaagctctgtgaaaccatactctttgcagagaactgataacctcgctc

SEQ ID NO: 44928 - DNA, 451 bp, Zea mays
  unsure (1)..(451): unsure at all n locations
agcttggaggcgtcgatggggagcctacttgatgtanactcttctttcttatcctccgtcgctttgaaggcgacgggttgcacctcgggtgtggaggtggcgcctctctcgatgatttgtttggagcctttgatcatcaattcaaagctcacaaactttcctataacctcctcaggagacattagcttatatctaggatcaccacgaattaattgaacttgagtaggattaagaaaaatgagtgatcttagaataaccttgaccatttcatggtcatcccattttgtgctcctgttggagacttgttctcaaatgctaagagttaagaacaaggcaacatgaatagtgttagtgtaaaagtccttcgcctttaaacattatgtccctctgggaaataatgagtttcggacgaaggtcataagagacataccttcctaaacgtaacaaataa

SEQ ID NO: 44929 - DNA, 441 bp, Zea mays
gacgtgaagagtggcttactcaatggacctatcaatgaagaggtctatgttgagcaacctcccggctttgaagataatgagtaccctaaccatatctataaactctctaaggcgctttatgggctcaagcaagcaccaagagcatggtatgaatgccttaaggatttccttatcactaatggattcaaagtcggaaaggccgatcctactttattcacttaaactcttgaaaatgacttgtttgtatgccaaatttatgttgatgatattatatttgggtctactaatgagtctacatgtgaagaatttagcaggatcatgacacaaaaattcgagatgtctatgatggtggagttgaagtacttcttatgatttcaagtgaagcaactccaagagggcaccttccttagccaaacgaagtatactcaagacattctaagc

SEQ ID NO: 44930 - DNA, 444 bp, Zea mays
  unsure (1)..(444): unsure at all n locations
agcttangcctgatggttcatatagagaggtactatgctatgcttcgtggccacaagatatacctcaaaagagggtgaagtatttctatgatacctactcaccagcggctcgattgactacaaattccacattaatagccgtggcatcctcttatggacttatcattcatcacatggatgttaagatacctttcctatatgtagaggttgatgacgagatctatatggatcatccgcaagggtttattgctgatggtccagagaacaacgtgcgcaccgtgatataaacattgtatggcctaaaacaagcacctaaacaatggcatgaaaagtttgataatactcttacaacacctggctttgttgaaattaatttgaacgtgtgataccaatcggatgcggcgggaatcacgtagcttgccttaatttgtgacatttgatctt

SEQ ID NO: 44931 - DNA, 482 bp, Zea mays
  unsure (1)..(482): unsure at all n locations
gacgtgaagagtgccttcctcaatggaccaatcattgaagaggtctatgttgagcaacctcccggctttgaagatagtgagtatcctaaccatgtttataaactctctaaggcgctttatgggctcaagcaagccccaagagcatggtatgaatgcctaagagatttccttatcgctaatggcttcaaagtcggaaaggccgatcccacactctntaccaaaacactttgaaatganttgtttgtatgccaaattcatgttgatgatattatatttgggtctactaacgaatctacatgtgaagagtttagtaggatcatgacacaaaaattcgagatgtcgatgatggcggagttgaagtacttcttaagatttcaagtgaagcaactccaagagggcaccttcattagccaaacaaagtatactcaagaaattctaaacaagtttgggatgaaggatgccaaacccatcaagacacccat

SEQ ID NO: 44932 - DNA, 368 bp, Zea mays
cccatcatccacacaagaacatcatgactactgacaggccactggagctcctacacatggatctattcggcccgatagcttatataagcatcgactggagtaagtactgtctagttattgtggatgattattctcgcttcacttgcgtattctttttgccggaagaatatcatacccaagagaccttatagggattcttgagacgagctcaaaacgagtgctgcttacggatcaacaatataagaagcgacaacgggacggagttcaagaactctcatattgaaggcttccttgatgacgagggcatcaagcatgagttctcttcttcctacacgccacaacaaaatggtgtagtggagaagaagaat

SEQ ID NO: 44933 - DNA, 449 bp, Zea mays
agcttggcggatagtgatgaagtgatgaagctgaacacactgctatgaaaaagctctagagaaattcttgaattaaccttgtaaaaaatattgtaatttatgaatcaaacactactctgtaaatttgtccataccttgtaatatatttttacctttccatccatgtatgaactgctttgatgtggacggaacttgtattttttgagcttaaggcgaaaaacaccttcccttcttttagtacacaacgaagcatagatctgcttctttttgctctcgctgaagccttgtcattagagccgaagcaactgtctgaacttctgtgatatgatgatgatgatcctatgaatgtctaaatgaatgtatatgaatgcaatgaatgatgcgatgtattgtgcaaatgaatgttcagacacacgcttagaaagccacatccagactctgcatttcct

SEQ ID NO: 44934 - DNA, 513 bp, Zea mays
  unsure (1)..(513): unsure at all n locations
ctaagcttgtaaccctactacgagcacnccggtgcaagagaatataagcctcatcctccctctcgtgtntcatcttgcatcaacccatctgggcagggacatgcaacgtcaaattcactagtcggttgagggtcctcgcgggtccaaaacgctgacaatattgatagcaacatgaaattaaattctatcatacatttatagacgtgtttacaaccatcacacagtttatacatcaaaggtttcacctaagttctaaaaactatcacggctaagagatagtctactaatttttgtgagtactttaaactatggcctagcaaatgtatcggtagcatcgtgatatttttcttcaatggaaatgacatatttcaatatgagtgtgcataggtccttaattattccatacaatgcaccttcggtcatttcctcgttgaaaaatttctatataagaagtgtatacacatcatatatgtacactcgatgacacatttatatctataatgacatagatac

SEQ ID NO: 44935 - DNA, 418 bp, Zea mays
agcttgtgaaggttcttcatccacacatgtgctaagcggcgatgccacaaccagcccatgctagtcttagcaattaagcatgcatctagaccggcctcttcttttgcaaaatcaactaagtaaagcttgccgtctaatacacccttaaaggctagtgaaccatcacttcttctaaagacagacacatctacatttgtaaaaaagacaattatatcccatattgcatagttgactaacagatagcaaattgtaaccaagagactcaactaaaaacacatttgagatagagtgctcattagaaattgcaattttacctaacccttttaccttgccttgattcctatcaccgaatataattgaatcttgggaatccttattcttgacgtaggaggtgaacatcttcttctcccccgtcata

SEQ ID NO: 44936 - DNA, 490 bp, Zea mays
  unsure (1)..(490): unsure at all n locations
tctanagggagaacacattntatgattaacaaatgttcaatttgataaagacaggatntgtagcgcatgccangcagggaagcangttggagtccatcatccacacaagaacatcatgacgaccgacaggccgcttgagctactccacatggatctattctgcccgattgcttacataagcatcggcgggagtaagtattgtcttgtaatagtggatgattatactcgcttcacttgggtattctctttacaggagaaatctcacacccaagagaccttatagggattcttgagacgggctcaaaatgagttcggattaacgatcaagaaaataagaagcgacaacgggacggagttcaagaactctcaaattgaaggcttccttgaggaggagggcatcangcatgagttctcttcttccttacacacctcaacaaatggtgtagtggagaggaagaatcgaactctattggacatggcaagaaccatg

SEQ ID NO: 44937 - DNA, 429 bp, Zea mays
  unsure (1)..(429): unsure at all n locations
agcttgtgatttatccaatgtattaataagcactatctcttaacatagattntctatggataaactcaacacaagagatggcattagtattgagagtgggaggtgtttcttatgttagaaatggagttcaaatcgtgctcacttgtatggggagagaggtaggagtgagtatatgtaggtggggcttcaaaactagccgtttgagccaaaacccggtctaaaactggttgaaccgcccctggcaggcccggtagatagtctgccagtctgactggttgactgctgcgcacactggtcaagttgaccaaaaccggttgaacctatnttgaaaaccggttgaacctctttggcagacctgtcagcatgtctgtcagtctgactcgcagactactgtgcagtctggccaagttgaccacaccggttgaatcg

SEQ ID NO: 44938 - DNA, 435 bp, Zea mays
  unsure (1)..(435): unsure at all n locations
tctaaagggagaacacgtgatacgtttgactaacgtgcaatttcttaatatatagaccttgtgcagcttgtcaagcaggtaaacaagtgggaggagcacatcacagcaagaatgtgatgaccacttcaagacctctggagctgctgcatatggacctcttcggacccgtcgcctatctaagcataggaggaagtaagtatggtttagttattggtgatgactattcccgcttcacttgngtgttctttttacaggataagtctgaaacccaagggaccctcaagcgcttcctcaggagagctcatnaatgagttgagctcaaggtgaagaagataaggagcgacaacgggtccgagttcaagaaccttcaagtggaggagttccttgaggaggaagggatcaagcatgagttctccgctccctacacaccatagc

SEQ ID NO: 44939 - DNA, 453 bp, Zea mays
  unsure (1)..(453): unsure at all n locations
agctttgtcttttgtgtatggacgacgtgcggttttatgctanggacagggagttgtatcgtcaccaaagtgccagtgtcagaatgcctggtcccgaggttgagctgcgccaaaaccgtgtcaaatggatgtggtttgagttcaaactttcccagaatgtgttcaaggtaatttggcacgactttgatatttggatcttctggctctgagtttggaaaagcagagaacacagatgatctttgagaagaggtctgaaattcagaaattcagaaatctgaatttctctaagggttcattgatcaagggctgttttggggatttaattgagttattttggctaaaccttcttaatctttcttgttacttagtaaatatactttaacttatataattggctcaactcaaaattttaaactttcattctctttttcacatttccttgaattttgtcat

SEQ ID NO: 44940 - DNA, 423 bp, Zea mays
  unsure (1)..(423): unsure at all n locations
tcgcccgactgcacncttangcggctgatgtgcggatagtttttgcggaagacttcganttttcgcgtttctggtgctagtccggctgcacccttacgcgacttttgcacggatagtctttgcgtaagacttcgatggttcgcaattgttgtgctagtccggctgcactcttaggcgacttttgcacggatagtcttcgcggatgacttcaatttttcgcacttgttgtgctagtccggctgcacccttaggcgacttctgcgcggatagtcttcgtggaagacttcgatatttcgcacttgttgtgctagtccggctgcacccttaggcgacttctgcgcggatagttttcgtggaagacttcgatgattcgcacttgttgtgctaatccggctgcacccttangcgacttctgcgcggata

SEQ ID NO: 44941 - DNA, 401 bp, Zea mays
gccacagccagtccatgcaagtcttatccattaagcatgcatctagaccggcctcttcttttgcaaaatcaactaaataaaagttgccgtctaatacacccttaaaagctagtgaaccatcacatcttctaaagacagacacgtctatatttgtaaatagacagttatatcccatatgacataattgactaacatatagcaagttatatcctagactctccactagaaacacattacagatagaatgctcattggagattgcaattttacctagcccttttaccttgccttgattcctgtcaccgaatataaatgaatcttgggaatcgttattctcgacgtaggaagtgaacatcttcttctcccccgcatatggattgtgcatcgatgccataatccac

SEQ ID NO: 44942 - DNA, 510 bp, Zea mays
  unsure (1)..(510): unsure at all n locations
acacatagaatactaagcttctaaagggagaacacattntatgattaacaaatgttcatttttagaaagacaggatttgtagcgcatgccaggcagggaagcaagttggagtccatcatccacacaagaacatcatgacgaccgacaggccgcttgagctactccacatggatctattcggcccgattgcttacataagcatcggcgggagtaagtattgacttgtaatagtggatgattattctcgcttcacttgggtattctttttacaggaaaaatctcaaacccaagagaccttaaagggattctagagacgggctcacaatgagttcgccttaaggatcaagaatataagaagcgacaacgggacggagttcaagaactctcagattgaaggcttccttgaggaggagggcatcaagcatgagttctcttcttcctacacgccacaacaaactggtgtagtggagaggaagaatcgaactctcttggtacatgcaagaaccatgc

SEQ ID NO: 44943 - DNA, 460 bp, Zea mays
  unsure (1)..(460): unsure at all n locations
agcttattacagccacagaagaaatatgctatggatactgctgaagcanaggcagagaaagggccttctgcacccggtggggggaatgcccataagaagcgtcatatgatgaatgtgatgagggttgttcttgataccccaccaccgtcaattcaaaagaagattgcaccctatgtggctaacgaatggcctcaacaagctgaaagcaatggtggtcccatcataacaactctatcagaaattgatagacttattgccaacatagcgcctgagaagaatatcgaggggtctattgcaactgagacttcagcgtcaaagggaaaaaggactgaagaagcctcttctgaagataaaagcttcaacttacaacacctgaggggccaacagctttccgaagagcatatatctaaattaaaagaatttgttgtgtctggcggctaccactctggatctgttctct

SEQ ID NO: 44944 - DNA, 451 bp, Zea mays
ctcagcttccggtggctggtgaagaattccacgaggtcgagctctttgtatggctgcagcgtgtcataatcaccacagaactcaacctttatcactcaggtgcttcacctcgccagcgcactgcagcaccgagctgatggcgccccagcttcactggacgccgcgcagcgagagatggttcaactacgggagctttcccatctccacatgatacacactacctaaaatatccacatttttgaatattactatcaggcaatgtgatacggaccacaatctgtttctgcggtgggacgcaaagagacctgcggaccgtaccagtgttcttggagattgtgagatgtttgagacggttgccaccttgcagatagatcaatgagaagccctggacctcaagggacgagacgcgcggcgcggctaacctgagagaagtgttgctgagccgacaaat

SEQ ID NO: 44945 - DNA, 59 bp, Zea mays
ttttcgattgaatataacatcccataatgtctctttactacacatattaagaacacggt

SEQ ID NO: 44946 - DNA, 452 bp, Zea mays
agctcgagctgactgtgttagtgtacgaacctcttcatataaaataatcaatgcgttaggttgcctgcatctgcgcgtgcttgcatcgtggaatacaggtagttgctgtttgtgtgctgtgacccacgctatgtgcgtgcgagctctgtgtttggttgcctgcatgcatatctggatccaggctcgcacgatcctcaaagcactctggggcaggctcaccagatactagtagattggtcgcatctgtggagccaggcttcatcggtcctggctcacacagccaggttgcctagagaaaccaaccaaacaggttgaatatgtatataacaatcatttctagctaagtttaaactaatttaacaatagacaataataattatatctatagtttcacagaccacatgaatgtaacaccaaattagcacaactcatcattcatcaattcacataca

SEQ ID NO: 44947 - DNA, 445 bp, Zea mays
tgtagctaaggtaatgagctccatctgattgggagcaccctctctttttctacagcatgagaatccgccttctacgagaagaggtctaccacaccgaatctctgaaaacagagtctagatagcagagaaatttctgccccaaaacaattggaatgtaggggaaaatgaacatgaacagagtagcactttggcaattactcgtcagacattgttgaatattgcacatctaagattgaaacaacacataatcacaaggtcacatgtataccagagacaacaccctttctcaccagcaacacagattactcaatattagtacccttcataaccataacctgttcgaagctactttggcagccgaatgttggtgagaaacgtaatttgaaattttgacataacaacataaagcaatgtacaagcatatggatgtatcatgacaatcaca

SEQ ID NO: 44948 - DNA, 417 bp, Zea mays
tgcatgcagctgacccgtgggaggagcttatctttgtcttggataacttgtacgtggactgcatttcattgcatgagagaattcatgaattgtattctgcactgcatcctgatgtacctgcagaccctgtctgaatgtgagctggatcctctggaacagcaagtgaatcattttggggggaactggatcttttcaagcccactcctttaatgaacctggctgatgaatggactcctacacccgacaacgaagctgttaatgataatatggactatctgttgtatagtttacaaatggatttatgtaaacacgttatgtagcatgttgtacattgagttcttcattacctttaagtaatgaaatgaggcatgtatcacatgtgatatttccacatattcttgcttagatgcatctcaa

SEQ ID NO: 44949 - DNA, 336 bp, Zea mays
cacaagtcgagctttgtttcttgtcatcacaccatgctcgtcttgcttgttgcggaacacccatttggttcctacaacattatgattaagacatggaaccaaatgccataccttattcctagtgaaagtgttgagctcctatacatcgccccacccaatccgaatcttgagtgcttctctacctgtgggctcatgaggaaacaaagagtatgctcacaaaaatgtgcacacgaatctagggtaccccttataatgtgcgagatgggtacgggtgactcttgatgctggggacttggtgggggactggtctactctctgtggacattgattccactg

SEQ ID NO: 44950 - DNA, 385 bp, Zea mays
  unsure (1)..(385): unsure at all n locations
agcttgcgctatggtaccccattggattcactttttgtattnaacagagaatattnncgactgcccgagttgtgcatgggctgtaatgattgatagtaaagagcacatcacagacttgttatgttttggggagattcctgttgtcttgggcttcaaagaaacaaaactcagtagccctttctacactgaagccgattatattgctgcacgccatttgtcacatccggttttagaaggcataccgaatgccaaccatgtacgtgctatgatcagcaattcacgtacacaacaattacataactagacaccagctcacagtgctcatataatgacataaaagagggtataatagtcgattacataatgatgtccgagacatacacat

SEQ ID NO: 44951 - DNA, 481 bp, Zea mays
  unsure (1)..(481): unsure at all n locations
tctgcaccatcagcatcatcatcgccctacatatagaaatgtatgtgcattagtacactagatagaaaaagagagcaacaaatgtcacatataatggtttagagtttacctcaaccatatgtctttagcttctgctccagctatttcctttccttccttcatccaaattagtgtaataaattgactagccacgttcatggcatccctagttggtgagttatatcatccagtgatatatcanaagttacctttccaataattttaacttatgtgcatctagtttttttccaaaaccaaagttgtatgatgggatgtaaccattgcgcagaagtcaccttgngtgcttatgacctcttaaaaggcatccattntttctgcaatccattttaaagctccaggtaaatcgtgatagcatatatagatgtccccaaagtgtgccgatagaataaaatatatcacacagccgctgccaacattggga

SEQ ID NO: 44952 - DNA, 466 bp, Zea mays
agcttaacttgcggactgacgttcttgacctttatatgttcacgaccaactgatacaattgttgaggatctcttgggccggttggttaggacccacacgcgctctctctatggcactctgatcttattggctgatgtcgatcgcattgtcttcattggggttagcgactaacccacttaacaggagcgttgatatgcacttggtgaagatgatgtctgctctgatcttgactgattaaaagatgatgtaggatgccaaccagacaggtgcaaaagggaagagtatagatagaaaacgtaagatagaaaaggtaagcatagatggcttatagagagagaagggagagcacccacctacttaactctatggcactcagctagtaaacggatgccattgcagacccaggggccactacacaccaacactcaccacagagaagctaatcagtcataacacatagacaaac

SEQ ID NO: 44953 - DNA, 353 bp, Zea mays
  unsure (1)..(353): unsure at all n locations
gcggcgagacactatattctatgctcgcatacagaagctgcgttagacggtcttttttgacaatcaccatacaggtttgccgtctagtacccccttatgagctagtgaaccatcacatcttctaaagacaggcacatctacatgtgtcaatagacaattatataccattttgcataattggctaacagataacagattgtatccaggtgactcatctgataacacattagaaatagagtgctcatatgaaagagcactgttacctaacccttttaccttgccttggttcctatcaccgaatattattgaatgctgagaatccttgttnttgacctacgaagagaacatactct

SEQ ID NO: 44954 - DNA, 498 bp, Zea mays
  unsure (1)..(498): unsure at all n locations
acatttggatcgactngagaagatccttgacacttatatgaatattggtagcacctanaacaaatgtctgagtgcttgaaacataccttttcttcaatctgctttctaaacacctatgctcatgctcataggaggagtgttagttgtaagtaatgtgttgagcatttaatcaccaaaacaactggaaatggcccaagggcacatttcactttcaatctccccccttttggtgattcatgccaacacaccataagcaacttaaaaagtactaacataaccaaatatgagccaacttttacaaattgaagtcaagtcaaacaccgatagaataagtataggatttggcacattnggatcattatgccacttgcgttatttatgcnaacaaattcatattcttacctcaaagtcaaaacactttagatttgtagattaaaccaatttttcaagacagtgttgatcaagaagctcaaagcttccccttttccataataatga

SEQ ID NO: 44955 - DNA, 256 bp, Zea mays
gcacagcggcggctcttggtcagcacttgccggctagagtgatgtcgccagatgcatatggctggctcgggcgaattcggagcaatactgacgaggatattgtgaaagcaaccgagcactgcggcgggttttaaaagctcggacgcggactgtgcgccggctcaacacgtttggtgctactcggtcacactgggcgcgcgcgcgggcgtgctctgtgtagctcataacgcgtataacacgtggcgcgttgcttttg

SEQ ID NO: 44956 - DNA, 450 bp, Zea mays
  unsure (1)..(450): unsure at all n locations
agctntaaaggttaatcttcacctaaaagaatgattatgaatgctcaaggcaaaggtatggaacaaattgcttcaattggtagttgatcaatagtagttccttccaagtgacattctttcaattggtaataatatattctatggaaaggaatttcaatatgaaggttaaattccttttggcttaaatttataaattagtgcatattgtgaattcactgctccatgtgcattaacttaaaaggaatttaatttatgcctttacgcctcataaatgatgatttgtttgccattcatatatagatatcatcattcattaaatacttccttgtactaataatacctctcttcaaagtgtttatcgactagttttaanaggaaaagagataacaaagaaggaagtcttcacaaatgatgaaaagaagaatactaatgtgacaccaccacagatag

SEQ ID NO: 44957 - DNA, 410 bp, Zea mays
ggctgtatactgcttgcacgtgcaactgttagctcggacggtactccgaagcggcaaacaatgttctgccaaaagaatatttgggcagtctttgatgtgattgtggaaacagccctcgcttcaatccatttggtgaagtattcgacggctactaaggcgaacttaaggttcccctgagcggtgggcaagggcccgacaatgaccaggccccaccgctagagaggccatgtatgggcaatcaactttgtatattgagaggggttgtctgaccgaggagagaacttctggcaggcttcgcaagaccttgtgactcgatttgcggcgcacatcattgcatgccagtaaaacccttgcctgatcacctttgcagccagggcccttggtccctcgtgcgagccgcacgtgccact

SEQ ID NO: 44958 - DNA, 421 bp, Zea mays
agcttctgcaccatgtcgcttgtattcttattgttgcagctacctccatcaatgatcaaacgatatgaacgctccttaatgacacactgtgtttgaaacaacatatgtcgctgatactgctctgccatctccatttgcgcactaagcacacgctgtacaatgaggctgtcataatgctctgcatcatctgcaccaatctgttctttcgggggttcctatatgcctgcatcatcatccgcatgcaaagcaagtgtatatgtatccaaatcactattagaggaatacccaccatcgtcttttaccaccaaaacacgctgattatgacaaacacgttgcacgtgtccatagcccttgcctcgattacacagaacatctcttgttctacctgtggaagctactgaagaggcactacctgcgggtt

SEQ ID NO: 44959 - DNA, 415 bp, Zea mays
actcgcgaccggaccaaaaaggctgcagcatgcagcttggctgtagcgacatatcttttgtagacggaaaaccgtgtgagcttctcatgacctgtctgatatagatgcacagaacgatgataatgaggctctggaattcataatgcaactaccttcagatacggctccaggaccagatggagacacatgtagaatttaatacagttagatggccaattattaaaagggatgtgatggctagctattgctgcaatataggtgcagaaaatatgggccgcttggaagacttaacactgcatgtgttactcttatccctaacaaggacggggctcaagaggtaaaaaatattccacctatcagtttggacacagcattgctaaacttgtcaccaagttgaggcccacagattggccaa

SEQ ID NO: 44960 - DNA, 335 bp, Zea mays
tgttatcatggttatcctgagaagttgattattttctctctctctcaagagataagcggcgtcttagacatacaacttcttcctcgaacactctactaactggcgcgaccgaaatatcactaattactggaattgctagctcaatggaagataggcattgttgagagcaacatttgttatcacaagataatatacgttttatttgagtacatgcgcatatgcgaggttggcctgataccacattagttaacacatcctcatgagccagctctaacatgatatgtgaatctataaatttattatcatagcacacatgcctatcatgcatattatgc

SEQ ID NO: 44961 - DNA, 448 bp, Zea mays
cggatcttaagtgactgagctgcagcttagtgattgagttcatgctgattttttcagttcaacttttacatttcttggcataacgtgatgtcagaagtcctcacggtaagacaatgactgaaagccttacgacttgacgcatctgccactacattagctctgcctaggtgatagagaatctccaattcataatgctttatcagctcgagccatctcctgttgggggccttcggcttccgaaggtcctcaaaaatgtaatttgactgttttccaagaaaaatatgtgaacaggcatcttcgaagtcagattgcgagtatacaacagcatggttaagacgaatctagactatgacggccatcacgacgaacgataagacgatcgcgaagctatgtgcataagagcttctacataacggcgggaaggggagaccgacttatagatgataag

SEQ ID NO: 44962 - DNA, 290 bp, Zea mays
gtcgatcgactaccgcgaggtaccacttcactccagcaagaatctttttgagcgcatatagtctacttttctatttttgctcgggacttgaaccctaatttgggtacattcgcttcttgcctttagacgcagatgcaccacactcttcctctcgatagtctctcttcgtcttgtacctactagcaccacacttcgtgcagctctccaagactttataatcatcacctcgagtaacgatgcagtgatttctacacgcgcggatcttctccatgcccatagcgagtggactg

SEQ ID NO: 44963 - DNA, 461 bp, Zea mays
  unsure (1)..(461): unsure at all n locations
agcttcgttttctatgtgtttcagtcaacttgtctttaccgncttatcttcttccactttctgcccatttcctatttcataaatatcaatgtggtccctgtaactacttcataagcatttgtcagtttgataacaatgatcatctgaccttatgccacatacaacacttcataagcaatctggcaacatctacgatgattgggatattctttctccaaagaaaatcaaagaccctgaaggcaagaaggtgatgtttagacaattcttcgtgcctttgctaaatactttaaaatcttggttgaactcttttcaccgaggtgcttcatgttgcacggtttatggttgcaaccagaagactatgacgacagggaatttagatgatttatatcagtattgtggctttagattatggtcaaaattccatattagttgagctcggcacaatagtttgggtcatattt

SEQ ID NO: 44964 - DNA, 438 bp, Zea mays
  unsure (1)..(438): unsure at all n locations
ggtgaggggagaacacgcgatatgtctaactaatgttctattttaataagatagaccttgtgcagctggtcgagcaggttaacaagtgggaggagcgcatcacagcaagaatgtgatgaccacttcaagacctatggagctgtcgcatatggacctcttccgacccgtcgcctatctgagcataggagggagtangtatggtctacttattgtagatgatatatcccgctacactcgggtggtctttttgcaggataagtctgaaacccaagggaccctcaagcgctctctcaggagagctcaaaatgagtatgagctcaaagtgaagaagataatgagcgacaacgggtccgagttcaagaaccttcaagtggaggaagttcttgaagatgaacggatcaagcacgagttctctgctcctacaaccacacaaaatgg

SEQ ID NO: 44965 - DNA, 390 bp, Zea mays
  unsure (1)..(390): unsure at all n locations
agcgttacaacgtttggagcggtggctctatattcttatctcangcgcatgggtgacgttctagtcgtaggattgacatccattaagaatgtgctcaccatgctctttttcttttctctttttctttcttgtctacgctgtgtgcatcttattgttgcagaggccgggagacgatttgtatcaaacttttacatgcagcgaaaaatcttccttatcaaaaaaaaatgttcaaaaaaaaagtgtgtcacagtttgatcaaagcatgcttatttggtttcacttcatgaatcatgagggtgaacaatgtttttttttctaaatgcgagttcaaatgctgctagtatattaaaaagcttttgactgctttggaacgtctgcgtacctttctta

SEQ ID NO: 44966 - DNA, 389 bp, Zea mays
acctgtaaagcaacagtacatgccagcacagtagctactatccataccagtaacttggcctttcgcatgctgtggattggatataattggacccttcaagaaagctcaaggaggatacacccatgtattggtggcaattgacaaattcactaaatggatagagttccagcccattgcctctttaacctctgctaaagcccgggaattcatacaaagcataatatatagatttgggataccacacagtatcatcactgacttgggatccaacttcaccagttcagaattctttgacttctgcgagcaaaaaagcattcagatcaagtatgccttctgtacccattcaagagccaacgggcatgttgagcgagccaactgaatgatattgg

SEQ ID NO: 44967 - DNA, 456 bp, Zea mays
agcttcatcgatggagaggcatgttccttggagcatggatgaaaacgggacggatacagccggatatagggctatcccgtatcctaccctaatgtatttctttcggatacgggaccggatacgggtagttaagattcgggatggatacaagacgggaccgggtaataatccgggcgggttagaaacggattacggatactacgcgggtaggtaccggatagttgtcgggtagttcgtaccgatgacattaattgcccaaccatccaacatacacataaattaagccatacataatcatttatatgataatcaaatgtaggaaaagaaacctatgtaaataacatcatgcagttcacagttactaatcacaaggacattgtgcagcgtgtcccctattttaggcgtaatccacaagtatataacagatagttagatagtgacattaattaacatgtt

SEQ ID NO: 44968 - DNA, 407 bp, Zea mays
tactaagcttgcagcacatgcactggatgtcacgtcaaaatatatatgatctatagcgactcgaagtacataaactataagaaatggaccttatgggccactaattaagttcagatgttggtttttatgaataacatcaccgtttgaactaatgttgtttgcaagaatacaaagatataaagatataattcaaacgaatgcaagatggtcttgtacttaacaagtgacgacctgcatgatcaacatatcaaacaaaacatcacatggcatattgaagatctacaaatatgtacaaacagtctagatggaagaagtctgaaagaagacacacgaagaaatgaagaaaaatacatgcatctcggtagtaccagacacatgaggcacctcatacatgccaccgaacaata

SEQ ID NO: 44969 - DNA, 362 bp, Zea mays
tagctttgccttgcagcccatagccttatctttcttgctgacctgaaccactgaaagaatatggcacgagattctgaccaaccataaacaaaggcttgcgtcattttaatcttggccgacagagtaactacccagtcgatgtcagctaagctacacagaatccctttctatgcttgatcaagtgattgatcaaactcggttgccaacagatcaatcccggtcctcagtccagataacaagtttgttataccttcctgcaccacagatctgacatcttcatccatcataaccagagcagtttcatcgtgttcatggatcataaagtcagttagctcctgagctgaagtcttgaggtcattcac

SEQ ID NO: 44970 - DNA, 388 bp, Zea mays
tctaaagggagaacacgtgatacgaataactaatgtgcaattctatataagatagacctcgtgcagcttgtcaggcaggaaaacaagtgggaggagcacataacagcaagaatgtgatgaccacatcaagacccctggagctgctacatatggacctcttcggacccgtcgcctacctaatcatacggggaagtaagtatggcttaaataattgtcgatgacttttcccgcttcacttgtgtatctcttcttgcacgataagtcttgaaaacccacgcactcctcaagcgtttactaatgagagctcacaacgagtttgagctcaaggtgagaatgataacgagcgacaatgtgtccgagttcataacctacaactggaggagtacct

SEQ ID NO: 44971 - DNA, 397 bp, Zea mays
ctggaatgaatcggcggtagtaaccatccagtccattgaaacttctgacttgatgtacagtggttgggggttttcactccaaaatatccttgactttgctgggatccaccgcaatccccttggcagataatacatgtcctagaaattggatctcctccagctaaaacgcgcatttactgaacttagcatataattggtgttcccttaagcgcgttaatacgatccgtagatgtcgagcgtgctcctcttcattcttggagtatattaagatatcgtcaatgaataccaccacatatttgtccaactcgggcataaataccgagttcatcagatatgtgaagtgggcaggagcatttgttagtccaaaaggcataaccaaatattcaaataatccata

SEQ ID NO: 44972 - DNA, 451 bp, Zea mays
  unsure (1)..(451): unsure at all n locations
ncagctngcaccccgatacataggacctttccttatacttgagcaatgtggaccagtggcataccgactcctactacctgaaaccttgtctactgtacataatttgttccatgtgtctcagttgaagaagtgtcttcgggttccagatcgaaccattgaagtgacagatattgtccttgaactagacttgacatattccgaacatcctattcgagtcttggatcaaaaggacagggttacccggagaaaaactctcaagttttataagatacggtggaaccaacatttcgaagatgaggccacatgggaaactcaagactttttagacaagaattcccacgctttttagcctcttgtaatttgtatagagtacacacgtgggtgtaataaaagagtgagtcccacaccaccccttgccttgtccaagaataaggaaataaagacatgacgt

SEQ ID NO: 44973 - DNA, 486 bp, Zea mays
  unsure (1)..(486): unsure at all n locations
aaaactcagcttctctggtggctatattanaagctcttctttgttgccaatgttatccactttggctaccatctcttgacacttgcacatacacgtgaagcttctttatatgttgcttagaccgaacgtcaacttcgtctgggcatagaaatgtacctgaaatacactcgcttgtgccgaagctaaatgttgaatgaggatattctgctatcaagcccccaatagtagattttttgttcttctaacaggacaaacaaaaacatggtcataatcctctcctcatccctttgcttctgcaattgcacctcctgttgcctcacctcaacaagaagatttatgttgtgaacatgttcttgttcaagagccattgctatgttgaacatgtcttcttttctgacctcattatcaacatctatttctttcttttgtgcgcatatgttgtctaaggctgatgtgacacctacttttatcttgcaccagaccatc

SEQ ID NO: 44974 - DNA, 408 bp, Zea mays
aacctctgcaccatgtgatcacggatatctttataatgttgggcaatgccattcccttttagttgtgacaagctcctctttagcctcttattttcttctttgagcttttgatatgaatcatcatttgctccctgcgaagtctagctcaaaggaggatttgcttggtgacaaactacaggcattagcacatggtaatatagtatcaattcgaatacatgcgcatgagtgagggtgttgggaatttaaactttctatcacaacctcatgagcaatgtgtaatatgatatgatcatctctaacatttcatgagagcataggagcatatcatatctttcttgaaaagctagattgtcaatttatagcttttccaattgggccttaagcaatggattcctatttactaattga

SEQ ID NO: 44975 - DNA, 404 bp, Zea mays
gaaaatcaggggtaaatctgcgataatacccagctagttcatgaatctccttactcggcgaacagtcggtggaggtctgcactctcgaatatctttgaccttgctaagatctaccgcaattcctttagctgataatacgtgccccaaaaattgaatttcttccagccagaacgcgcacttgctgaacttggcatatagctgatgatccctcatgcgcgtcaatacaatccggaggtgcttagcatgctcctcttcattcttagagtatatcaaaatatcatcgatgaagaccaccacgaatttgtctaactcgggcatgaacaccgagttcatcaaataggtgaagtgggcaagagcattggtaagcccgacagacattactaggtattcacacaacccatacc

SEQ ID NO: 44976 - DNA, 493 bp, Zea mays
actaagctttcttttgccggccttgcctgaggcacttgtggccgacgttggtgtatagaagtcccttggtgacggcgatggtggcggtgtcctcgacggaggagtcgctagagctttcgtcggagtcccactcgcgacaaacatgggcatcgacgcccttcttcttgtaggaccttttcttctcctttcttctacccttcttgtcgacgcccctgtcactgtcactagatagtggacattttgcaataaagtgaccgggcttaccatacttgtagcaaaccttcttggagcggagctcgtaatcttatcccctcctttgtttgaggatttggcggaagctcttgatgacgagtgtcattttctccgtggcgagctctgaagcgtcgatcggatgtctacttggtggagacctcctcttcttgtcctccctcgccttaaatgcgaccgattgtgcttcggatgtggagggatcatctagctccgtgattttctt

SEQ ID NO: 44977 - DNA, 314 bp, Zea mays
acccgatatttctgaatttcatgacccgccaccaaacaagccgggggaagaacaatatctaaaatttggtgctattcctttgtgaccgctctgatgcagaaccctgtcccacgtttgagcaatacttgttgaagggagatgaaagatatattacgtccaatacactcgttcgctctaaagcctcgatggaatagaaaattcaagctgctgttccttcacactggtgcatcattgcccaaaatggtcaaacatataattcaagatcccctgttacaagggaatgcaaagaacacttactcagcaagggctgttat

SEQ ID NO: 44978 - DNA, 484 bp, Zea mays
  unsure (1)..(484): unsure at all n locations
gagaacatgtgttatgactaaccgacgtctgttgtgtgaaatacaaaccttgtgcagcgcgccaagcatggaagcaagtgggaagcactcatcaaaacaagaatgtgatgactacatcaagaccactggaactcctacacatgcatctctttgggcccgtggcctatctcagcattcggggaagaaagtatggtcttgttatagtgatgattttaccgcttcacttgcgtgttatttttgcaggataaatctgaaacccaaggaacactaaagcgcttcctaaagagggctcacaatgaatttgagctaaaaataaagagaataatgaccgacaatgtatcatagttcaagaaccttcaagtcgaagaatatcttgaagaggaaggcatcaagcacgagatcttcgctncctacacaccacaacgaaacggtgtggtagagaggaagaacatgacactaattggtatggctatgacaatgcttg

SEQ ID NO: 44979 - DNA, 445 bp, Zea mays
  unsure (1)..(445): unsure at all n locations
agcttcgtcagttgcggccccagagaacttatcagcttgataggtaaggattcggtcattacctttagaaattcttctactctagcagcagaaggcattgaaggagtttcctcttctatctcagctgcttttggctctggagctgcagctnttctcttcttctaaacagccatcttcggtttaggactgggatttctctttttctgagtttcttcatccgctttcaccatcctagcagcttgtctgctcagaacactaacaatcatttttctcttttgcccttcgacacccttgtttaatcgttcatagttagggtattcaaagtttaaagcatccattacctgattcaaccttcgttttggtcgggtgccgaaggctgcagtcatcagatgatcttcttttttagtgtaattgccccaaattcgttgacatagtctcatcatct

SEQ ID NO: 44980 - DNA, 356 bp, Zea mays
  unsure (1)..(356): unsure at all n locations
caccaaaaccatactcaagccagaacatttgatgatgcccagggacaacacggtgtccaagaggaaaaaccactatcaaaactcctccctacttattgaacatatgcactatcacatatatgccaaaagaataatacttccttttgcacctctaccatgtaggagtggacttccccacctggaaagtatttaaatctctcgagaacttctccacacttgcgcctgattctttatcctaacattttattggtgctcagacaccaaacttaaaacaagttaatagtattggcacacgaagaaacttccattctaaagaatatcaaaagatgtccantgaggagactatcccgctacta

SEQ ID NO: 44981 - DNA, 417 bp, Zea mays
  unsure (1)..(417): unsure at all n locations
agcttcggcagccgatgcgtgcagcggctgatggatgtgtttcattctatcggagccagctctgaaaaatntacaccttcagcagaaaacctgcccagcacattagaatatattgaaggcgaggttgatgctcttgacgaagttattggtggtcatgccgacttctgcgccctggtagcttctcggggcacagctaccgcttttctgaaggctggttgtacgcatggaaaaattgtgaatagaccaaacttcagcttatcatcatcagatctgatagatattccaagcctagcccgaagcatcggaaatagatttatgacccagatttgggtaaatggcgggcggaanatggcgggtgacgaagctcgaagtcatcttaagccggtaagacactttatattatttactttaccttct

SEQ ID NO: 44982 - DNA, 401 bp, Zea mays
tagagctcgaccatattctattattatagggagtatacaacgcgcggtgtgttgcgcattactcaagtgcttatacagatccgaaggtatagaagtaatgaaggacatacatgcacggctgtgtggatcacacattggatctaagcccttgcttggaaaaggtttttgtcaatgattctattggccaaaggcagctctggatgcagcgcgattagttcaaaagtgcgaatgtagcagaaatgtgcagagatcaaaaacaaccttcgtctttaactcaggtaatacaatccacttgggcggtgcaaaagtggggtctggaattgctaggttccataccaccggcacacgggaacttaagatacgtggtggtggcagtggaatattttatcaaatggattgag

SEQ ID NO: 44983 - DNA, 317 bp, Zea mays
gtaccaattaattctgctattggttcatatcgcgatcgtgttgactgtgatgttgcgcctatggatgcttgtaatattctgctaggtagaccatggcaattcgattcagattgtatgcatcatggtagatcaaaacaatatgttcttttacaccatgataaaaaaattattttgtattccatgtccactaaggctattgtgcgtgatgatggtgctacagctaccaaagctaaaactgagaacaacatgaatattacagctgttggtataactaagatgggataaactcgaaggacattgcttgcttgcaccaaaac

SEQ ID NO: 44984 - DNA, 425 bp, Zea mays
agcttaacactatagagtgcactgccttttgttttcctctttgagggatcgacatatctggacaacaatccctgaagagcccttctccacacatgcaaagcatcctctttatcttagctgtttcctgccaatgataaagagaatatccccgacttgcatgggcacaccctttagattaatctaatgaatcatccccattacctttccaaagcgtcggacctgttctttgtccttggaagatgatgttgaggcttgatcatcatcatcgtaatgttcttcttcttcactggagcttggagccttcatcttgccctttaatctctgtgtaatcatcacacgcaaaaacatgtggctttgaaaaaacaggcttctcttgttgcccattttccacgacatctcacatgtcgcaatcttccaacacaatc

SEQ ID NO: 44985 - DNA, 314 bp, Zea mays
  unsure (1)..(314): unsure at all n locations
tgatgaatacctgagaagcatcccataagctcatgagggccaaagtagctgttgcatccacaagggaatctattcttggtcatgattattcatccttcagacatgccttgttgagatctgtaaagcaatacacattctccattntctgttagctntctttaccaagatggtgttagccagccactcttggtatggaacttatctgataacaccggcacttagaagtcttttcacttcatttcgtgcaccttcgactttatcatctgacattttctgacgcctctgctttcttggtctcaacgatgggttcacat

SEQ ID NO: 44986 - DNA, 460 bp, Zea mays
  unsure (1)..(460): unsure at all n locations
agcttagaaaaatctggtatgaatctgcgattatacccagctagtccaagaaaactccggacttggtgaacagttgttgggggtttcgactccaaaatatctttgaccttgctaggatctaccgcaattcctttagctgataatacgtgccccaaaaattgaatttcttccagccagaacgtgcacttngctgaattggcatatagctggtgttccctgaggcgcgtcaatacaatccgtagatgttgagcatggtcctcttcattcttagaatatatcaagatatcgtcgatgaagactaccacgaatttgtccaactcgggcatgaacaccgagttcattatataagtgaaatgggcaggagcatttgtgagcccaanagacattaccaagtattcaaacaatccatatcgcgtagtaaacgcggtcttcggtatatcctcgggccgaatacggattt

SEQ ID NO: 44987 - DNA, 477 bp, Zea mays
  unsure (1)..(477): unsure at all n locations
gcggctncatctatgttatggattgcttgtgagtttgtcctattgccttcggcccttcttgcagctttctgacttccatggatagcaataggtccctgatccgaacgtatcttcatgctaagataagcatgatgaaggattgcttctaatgcattgagggtaccacgaccaatgattgcattgtaagggtattccatatcaacaatgttcaatacaacatgctcagttttagtgttgttgatgaacccgaatgtcaccgacatggtgatcttgcccaatgctacaatctgtcttcctccgaagccacagagaggatgtgtagcatcatgaatcttatcttctggctcttgcatttgtctgaaggccttagcacatatgatgtcagctgcactgtctgtgttaaccaagacattgtggaccatatattctttgataacacaagagataaccattgcatcattgtgtgggtatctttga

SEQ ID NO: 44988 - DNA, 426 bp, Zea mays
  unsure (1)..(426): unsure at all n locations
agcttcacatgtctcgtatgattcanaatcaaacgaagttaaaagcccatcagaatgaagcttcttcatgcgattctcacttatatgacccaaacgacagtgccacatgtaggtaggacttanatcattaggccgaggccttttagcactaatattacagataggtgcatcatcaagatttaaaatgaataacccattcataatggatgcaaaagccacaaacatgccattcttagagatcacacaaccattgttttcactcgcaaatgaataaccatccttcatcaaacatgaaggagacataatgtttcgactcatactangaaccagataacaattatntaactccaaaataaatcctgatgggaggtggagttgcatcgtcccgacggtcaacgcagcaactcttgcatattgctacccgga

SEQ ID NO: 44989 - DNA, 426 bp, Zea mays
  unsure (1)..(426): unsure at all n locations
gggagagggaggagctactgcanaattcacttgtggtgcttgttantggacngggccgaggtcgcgggcgagtggcgatggctggcggtgaagggttagttggaggccgaaactctcacagcaggcaaggcaaggcaagacgacccgagccgagctttatgaggctggactcgcacgagttgggctcgttgaccccttccttccatgggaggctgggcagggctaccaaaccgagtagccccccgatgaatggataagcctcttcctcagccgctcgttgcttctcagtccgacagaacagcacgtgaaagcccaggcctccctccctccctctacccacctgctggaatccgcggccgcttgcttgcagggtgaccttgcttgagcccgtcttccttctttctcagctaggcacccgtgcccatc

SEQ ID NO: 44990 - DNA, 330 bp, Zea mays
  unsure (1)..(330): unsure at all n locations
gtaccgcactgtcgtccatacaaaactataaatggtgccatcttaatactttcttgataactattgttataccaaaattctggccatggtaaacattcatcccattctttgtggaaatctaaaatgcatgcctgcaacatgtcttcaaatctttgatttactctctcaatctgcccaccttgtttggggatgataagccaaactgtggagcaacttagtacccagggacttatgtagttctttccaaaacttggatacaaattgttgtccgcgatccaacactatngtctttggaactctgtcagactaagaatagagcaatatataact

SEQ ID NO: 44991 - DNA, 481 bp, Zea mays
  unsure (1)..(481): unsure at all n locations
cgcagatgaaatacgaagtcgaagctgccgagaatactaagctgcaacaatctttgaaagaacttcggaacatgtgtctggattntggcagccgctgcgtacaaagactgaagaaggtttttaactcagttggggccaacgctganaaagttatcccttcgaccgaaaacatatcaagcaccttcgaacatattgaaggcgaagtggaggcgcttgacgaagtaatagccgggcacggtgacttatgtgccctgctagcttctcgcggcatagctgcaacatttctgaaggctagctgtacgcatgcaaaaattgtaaataggccaaacttcagcctatctccgtcagatttggttgacatcctcagtaaagcctggagcatatggagcagatttataacacatatnttggcaaagggtggtcgagagttggctagtgacgaggtccgaagcttgcttaagccggtacaatgcttaaacct

SEQ ID NO: 44992 - DNA, 302 bp, Zea mays
acttcctctagattgaactttttttgaaagttggtcagcctaagactaaatgagcctcattgataatcatgattacaaaaaacttgtcttcatgaaagcactttttgaatcaaaggccatttgcttctatgtaacaagagttgtgtttctgctcaaaggttcgtttacctttgtagttgtaagtttatatactcaactgcattcctatacctggagggccatgcttctttgagagaatgcatgagtgatcgaggtctttctgcatatagagctcttttcttgtccttgcacatatttgaagt

SEQ ID NO: 44993 - DNA, 445 bp, Zea mays
  unsure (1)..(445): unsure at all n locations
aatatgtctatgtgtcatgttgaaagtttgaacaaaataacaagtctagtattatcaaccaacattacattggtcaagcgtgacagtacttaaaatggtcagttcgcaaacaactacgagtaacaacaacaaaaatatggttcagaaacatgacggttttctcgaaaacaaataacatgactggcctcaccactaacatgacttcctcaaccattcacttgcttgacgacgaggttccagtaacccttgtccatatctcttgttgcttagcctcgtagtattgtcgaagtagggggttacatttagtcagatccatgctcaatatcatgacctcctcctccttggtctccttcaatntctgccattccatcttaagtttctgtaaagttagctntcctcttcatgatgagtttctggctctccgtttttgtcatggacttcaact

SEQ ID NO: 44994 - DNA, 405 bp, Zea mays
  unsure (1)..(405): unsure at all n locations
gaaggaggatatggtcctgtctatatgttatactaactntcactactgtgagtggtgtgtgagtgtacacatgatattatgttaatattnggcttaatgataatgaaaatcatgaaccactacagggaactttaccttggggagaagtagctgtgaagaggctttgtatgaattcacgttcaggccttgaataattcaagaatgaggtcatacttaatgcaaagttctagcaccgcaatcttgtaagattactagggtgctgcatacagagggaagagaatatccatgtgtacgagtacatgcctagcaaaagtctagatgcattcctcttcagtatgtgtccttcacttttcgcgcatctcatttctcaatatgaaccgacaaatatgttgattgggttctgac

SEQ ID NO: 44995 - DNA, 319 bp, Zea mays
ttgtaatcagcgtttcaaaatacaggttgtatgttagcctcatatatgatacatgccctcatttaagacttgtatttttgtggtggctggtcctaggtgtattgagacgcgacctctgatcaaatgggcgcgcaacactgtacctcacaggacatatggcattcgttgctggtggacaataaaatatctatcatagcctgagagggcgtaacacaaccaccttccctgtcctgcccttagtgccctgtcaaggatatgttaagcaatgcgttgcccaattccacaggccacgtcacacgtggtgcggctctaaccgtat

SEQ ID NO: 44996 - DNA, 420 bp, Zea mays
tctacatgaacaactccaatgaagtgctcacatggtcttcccaatgcatcaacataacacaagcaaagagctagttgttctttgtgtgatatgtcactagactcagccagtaaaattgcaaatggctcttccccaagctcttacattattttatttctaggttctatagcgcgacactgaataatctgattttgtatctttgggctagttaaagtgcattacttggagcgttgttaaaaacatacttgttgacctcctcactatttacagcaagaaagttcaagatttcaataaagttttctctgttgtagactcttcactctcatcatgtccatgaattgacaatccttgatgcgaaagaaacttacaacatcgaagtgactatgtcagccttatcttatagagattgtgatcatcatc

SEQ ID NO: 44997 - DNA, 335 bp, Zea mays
  unsure (1)..(335): unsure at all n locations
ctcagcttcagtagaagcttcagccactacaacactactgtttggagatgtgcttgatgacttaattgccnccaagacatctaatacgggtaccattcttttccttatcggggtcactgttggaccctttaggttttgctgatcggcattngctgcaggactcataacttctgatgctctatccttaaacggcttttacacttcttccaatttttctgaagatggngctttggccatacctgcaatatctggcaacaaaggttggctgctcagcttcagcggccgaacatcgttcttcggtaaactcacgcaccgaatctggatcaatattgcgt

SEQ ID NO: 44998 - DNA, 438 bp, Zea mays
  unsure (1)..(438): unsure at all n locations
agctngaagccatggtaagtaacatatgctttaatatactgaatgactcaagcctatctacgggtgcataggtttcaccgaaatccaaaccttcgacttgggagtatcctttggccacaagtcgagctttgttgcttgtcaccacaccatgctcatcttgcttgctgcggaacacccatttggttcctacaacattttggttatgacgtggaactaaatgccatatctcattccttgtgaaggtgttgagctcctcttgcattgccaccacccaatccgaatcttgtagtgcttactctaccctgtgtggctcaatagaggaaacaaaagagtaatgctcacaaaaatgtgcaacacgagatctagcagttaccctcttatgaatgtctgcgaggatggcgtctacggagcgatctcgctggattgcttggaggactc

SEQ ID NO: 44999 - DNA, 410 bp, Zea mays
  unsure (1)..(410): unsure at all n locations
aactcaagctttatttacataacaaaacatanaagactgcgactctgatctgtcgaatctttattcacataacagaacataagagactgctactcttatacacaacgattcataaaaaaccacttcttcgaaacctttcttttacataacgaatcataacaaaccatctattcgaaacttttttctgtgccgaagcaanccattaagaacacaaatgctatgaaagaatgcctatgcatgcaaatgccatgatgtaatgtgcaaatgaatgtccgaagcgtatgtacgaagccacactcattcatcattttcttaggagcacacacacgtcagctctgcatatccttaagaaccactatggagcatctttgccttttacttaagcagtatcatcgctgacttttcgctgt

SEQ ID NO: 45000 - DNA, 285 bp, Zea mays
gaacggtgtgtacactaagagagcgagggaaggagatacggctatcttggggagagagagaggtcctggctcggccgcatttatagaggggagacggtatgggagaggtcgagcccgggtataatatacggaggtcatcacaggctctaacggtgacatttccaccaataatggatagaggaatggtagagggagaactgactgagttaagctgcattaaactcgctaaacggtcggtgtctggacggagagctaaggctcacggatttctgtgttgacgcgtat

SEQ ID NO: 45001 - DNA, 443 bp, Zea mays
  unsure (1)..(443): unsure at all n locations
actaagcttanaaagtctggtataaatctgcggtaatatccagccagtccaaggaatcttcggatctgatgaacagtggttcggggtatccactccaaaatgtgcttgactttgctgtggtctaccgcaatccctctggcagatataacatgctccagaaattgaatttcctccagccaaaacgcgcgattgctgaatttggcatacaactgatgttccctcacgcgcgttaatacgatccgtaaatgtcaggcgtgctcctctacattcttggaatatatcagaatatcatcaatgaagactaccacaaacttgtctagcttgggcatgaacatcgagttcatcacatatgtgaagtgggccagagcatttgttcacccgaagacattaccagatattctaacaacccataccgcgtagtgaaggcggtctttggatatctt

SEQ ID NO: 45002 - DNA, 442 bp, Zea mays
  unsure (1)..(442): unsure at all n locations
caagcttggcatacaactggcaanctcttattattgaagtaccttactcaaatgtgcctgatgttcgtgctcattttgngaatatataagaatatcatcaatgaacaccactacaaacttgtcgaggtagtccatgaacacactgttcatcaggtacataaagtaagctggtgcattcgtcaatccgaatgacataaccatgaactcatatagtccatacttgatgatgaatgttgtcttccgtatatctgcaggtcggattctgagctgatggtaacctgacttcagatctatctttgagaacacactggctcctctcaactgatcaaataaatcttcaattctgggcagggggtacttattcttgacaattacttcattcaatgctctgtaatcgatgcacatactcttcgtgcatccttatttacacaaaaacactggg

SEQ ID NO: 45003 - DNA, 451 bp, Zea mays
agcttctcctggacaagtgctgcacttaccgctgagtgcgaagctgccacatataataacaaaggagcccctggcgttggtggagttagtgttgttagatctatcaaatattgcttcagttcttcgaaggctctctgctggactggtccccattgaaaaacttcggctgacttcagcacttcgaaaaatggtaaatttctctctgctgatctagatatgaatctgttgagagatgccagccttcctgtcaatctttgagcccccttctttgtacttggtggttccattcgaagtatagcttcgattttgcttggattagcctcaattccctttgttgaaactaggcaaccaagaaatttccccttcttcactccgaagacacatttttctggattcagctttaaaccagccctgtctaaaatagcgaaggtctcctgcagatcagcaatgt

SEQ ID NO: 45004 - DNA, 498 bp, Zea mays
  unsure (1)..(498): unsure at all n locations
actcagcttcttgaagcctcanaggctaaagtgcatgaaggtaccaatgtgagcatactgccagnnggaacacgtctcatggcgatgaagtcaaagtacaccttctccaacaactgttacaatgaatttgtgaaattgattattgatatcatcccaccgaatcataacatgccgaaagacttgtaccattgcaagaagctcgtagctggtctcggcatgaactaccaaaagattgatgcttgcgaggacaattgcatgttgttctggaaagagcatgaaaataccacacattgcatccactgcagtaagtcaagatatgcagtggtgctagatgaggatggaaacgaggttacgacaaaggtgtcgatcaagcaactccggtacatgcctatcactccacgactgaagcgtctctttctaaatcaagagatagcanaagcanatgaggtggcataaagaaggtggtcgtcagggtcaagatctagatgtcatggtgca

SEQ ID NO: 45005 - DNA, 457 bp, Zea mays
  unsure (1)..(457): unsure at all n locations
agctngggattatccaatataaaacaagctctatctcttatcacagaatttctatggagaaactcaacacaagagatggaattagtagcacaagcactagtttcttatttagcaaccctttatatgtggaaggcaagcgagttgctaaaatacagaaacctcataatatggactaaatttccttgaaccctcatgcacaatatattttgaatgacatggataatatgcatggttgctcaatgaagactaaaagggctgacttaatccatattatggtaagtggctaataacgaagaatcaaatccaaattaactagatagagaatacgtcacataattttggataggcaccatatgataatattcattcatcttgcaataagacctttatttcataatcaacaactggatgatattcttaagggcttcttcttccttagtggctacacaagacacaa

SEQ ID NO: 45006 - DNA, 372 bp, Zea mays
  unsure (1)..(372): unsure at all n locations
ctcgatggcgtgagtggatttccatcctttttgggtccgccttagctcgagccctcctcaatggccgacaaggagcatacatncaacacatgaagggggttaggcagggagaccccctttcccctatgttgttcatccttgccattgaaccgctgcagcgtatcctgtaccttgcagccagaaatgggatcctttcccccattccgctaactacagcaaaactgaggacttctctctatgccgatgatgctgctatctttatcaacccctctagagaagacctcctggcggtcaaagacatcctacacgctttnggctgtgcctctggcttggtcaccaaccttgagaagagctctatccacccgataagat

SEQ ID NO: 45007 - DNA, 456 bp, Zea mays
  unsure (1)..(456): unsure at all n locations
agcttgtangggttgtgatgtcgccactttcttgatgctaacaagtaacaagacatttccttcaccaaagccatcttcaacacttcgcccataaaaaagatcaattctcattttcaattgcctgtctgcaagacaagtgataattacaataagtaaattataatctacatctatataatctagactaccaaacagctacatatagtagattataatttggattatataatttagattataatctagattatataatctataagctgaaacaaatgggtcctaaggcaatgcaggcacgataaattcaacataacataaaggcagtttttcaaccatcagagagcacaatattctcagtcagctccctttaacacaacaaaatcttaaacaagagcttcctggcttttgcagatctctatccttcacaagccggtcatgatacaacattacacactt

SEQ ID NO: 45008 - DNA, 467 bp, Zea mays
  unsure (1)..(467): unsure at all n locations
tggtgccgatggagaagcaagaatccttgaagtcttggctgtctaactgcttggcgctgncgactgttaggtcggacgggactccgaagcggcaaacaatggtttgccagaagaattttgggcagtccttgatgttattgtggagacagtccttgcctcaatccatttggtgaagtatttgacagcgacgaaggcgaacttaaggctcctctgagccgtgggcaggggcccgacgatgtctaagccccagcgctggagaggccatgtgtgggcgatcagctttgtaaactgcgaacggctgcctgatcgacgggaaaacttctggcatgctctccatgactttgtgaccccatttgcggcgcagaacattgcgggctagtagaatccttggcggataccttaacagctatggcccttgcgcctgcgcgagagccgcacgtaccactgtggacttcgcgtacgatctg

SEQ ID NO: 45009 - DNA, 370 bp, Zea mays
gagggctgcttggatggccactcggaaacattctgcggcgccttggaagtctgcgcgcacagctatgattccatgcagtcctggcatcttcagtatcatgtatgtatagtgtggaatggccatgaacttatccagccccgggctcccaatgatggcgttgtacccgcagtcgaagttcgccacctcgaacctcatgaactcggttctgtaattcttctgagtttcgaacgtgactggcatgtagatgtggcccaaccggtattccccttccgtcggcacgatgccgaagataggagtgtccgactcgtggagctctttgagtgaactctccaaccttgaagtggcccggggaaagtgactttgatgctgc

SEQ ID NO: 45010 - DNA, 454 bp, Zea mays
  unsure (1)..(454): unsure at all n locations
ctcgctcccgcacatatcgtancggagagatattgattttatctctattcgaancaaggacggcccgtgttgtgaattgagctcaagccctctcctgtgagcgtgggagcgctacgatatgtgacttgtgtgtgacgctcatcccaaccttacttcgcgctttcattgtgaactctgttggaaaggccagagaccccaatcttgtggagatgtctcacaaacggtaaaaatcaactagaggaaaaatcgcggtattcaagctgatcatcggattactagaaacgcgctgagtgcaacactccgccattgtgacgccacaacgtggaagtaggcaagtcgtacttgccgaaccacgggataaaatccggagtctcttgcgactgatatctctatgaatgctcttatccacaacaactcgatcctcaactacctagttgcactaacactcctataa

SEQ ID NO: 45011 - DNA, 437 bp, Zea mays
  unsure (1)..(437): unsure at all n locations
taaagggagaacacaatatgngactatcattggtcattttgagaaagacaggggttgtagcgcatgtcacgcagggaaacaagttggtgttcatcatccacacaagaacatcatgacaactgataggccactcgagctcctacacatggacctatttgggccgatagcttacataagcatcggcgggagtaagtactgtctagatattgtggatgattaattctcgcttcacttgggtgttctttntgtaggaaaaatctcatacccaagagaccttaaagggattcttgagacgagctcaaaacgagttcggcttaagaatcaagaaaattagaagcgacaacgggactgagttcaagaactcacaaatccgaggcttccttgaggaagagggcattaagcatgagttctcttctccctaacatcacaactaaatg

SEQ ID NO: 45012 - DNA, 264 bp, Zea mays
cactttcacgagatgagtcttgaaaccgcaaaggcacaccttcgggcctcatggacctaatcatccttccaggtgactttatgatactatagcaaatctgatctctcaatatcatagaacacttgtttttaacgacgccatgatactggttaacatggaaagcaccaattccaaaaacaactttgtgaaggtaagaacatctttattaaataaaaataaacggcgtggtaaatatagtacatatcgtcaatcttgtttttattg

SEQ ID NO: 45013 - DNA, 456 bp, Zea mays
agcttgcattgcatgaataagattcttgtattgcatctatggcttgtctaacctagttgagataaccgacaacaaagcgagtgaaaaagcttaactcggatcaaacttgacaagtcttagttgtaagcttttagcacttaaattcttactttctatgcaattgttggttcttgaaatatgcatgaggcactgcacttagggggagtattcaaagctcaaatcactcatgaaaacccctagtgcaaggccaaaatgcaaatttcaccatttgcctattttctctaaaaattatctagcctatggcaaaatattttgaaaattatgagaaaaatatatgagggtgccaatacctgtcccaacaagtgttattttgtgtgtttataagttgggatttggtttggttgtgaactagataaaaaaaattcaaaaatccaaattttccgtctgctgggctca

SEQ ID NO: 45014 - DNA, 483 bp, Zea mays
  unsure (1)..(483): unsure at all n locations
ctcaagctcggatcccgacatcnaccggggaccgtactgcgaagctctataccctgtacccagaattggagagcgaatatgttctctccaagtctatcgcaggacactcaaagtttgttggccgattggcttggatgcctccttcagaccattttcctgaaggttgaatcgtctcaagcggaatggacacattcgttctttcttctacgatctcgcaaaaaaggagaagttgccgagacaatgaaggggcacagttcgcaagtcactcgacttgctgtggacactaacagngacctaatctcttcccccatggattgtacctgaagaagttggagaaatggcaatgctatagatgttttggaagcgcacaatgttgcagtgcaaactgttctaaagctgcccacaggngaactctccactcgttcaaagtattccactattaagctatggaaaggaaagatttgcctacagactttttcagga

SEQ ID NO: 45015 - DNA, 374 bp, Zea mays
  unsure (1)..(374): unsure at all n locations
agatttcagatacttgaatgtatttgctctttggacatgnttgagtacgtaacccaaaaccctagctccataaggtaaaaatgcctaaccactaagggaccgagcttataaaagaagaccatagttatcctagcgcaccatgaaggaaagtagtattcaagatacaacttgatgcatcctttctatcatagcattgtcataagcactacattagcattcatagttatttatggctatatatagagatccaacaataagtgacttgttgaaaggaagagcctactcctgtaacagaaaatccacctccatgaactatttttactttgacatatagtggacaagagcccactcacgtatcacacaagggaagccct

SEQ ID NO: 45016 - DNA, 325 bp, Zea mays
taagcccttcgccccaaggtattttcatgcatagatatgctggatgaagaactgcttcaaaagcattgagtgtcccacaaccaatgattgacttgtaaggatactccatgtcgacaatatcaaacacaacttgctcaggccttgtattgttgacaaatctgaaatgtactggcatcgtgatcttgccaagcgctatgatctggcttcctccgaagccacaaagagagtgtgtagcatcatgaatcgtatactctggctcttgcatctgttcgaacgccttggcaaatataatatcacgtgcactgtcttgatcaacacaaacatt

SEQ ID NO: 45017 - DNA, 464 bp, Zea mays
  unsure (1)..(464): unsure at all n locations
agctgagagctgagagtctaagtttttgtctaacataacctgtgttgtaacgttgcatgccccccttttatagctaaggggggcatgcacaagggtactgagccccgacatgtgggctcaggaaaataacggatgtagtacttggggctactaatgctccccgctcgagcaatcttcttgcgccctgacatccgagatctgcgtagcatcgtcgtgcatgggaagcttctcgtataagggatgatgagcccagtgcgtctcacaacacgggcgcactgnttgacaatggactgaataggtgcgccgtctgcaggatggccctggcgccgcctgtcatcggagtggacaggacgcattaaatgctgagggggcacatcgcctgtcaacatggtggacaggcggcgcgttctctccgcaataaatgcagagaccgcgcggactataagtcttacgtcaggctcccg

SEQ ID NO: 45018 - DNA, 503 bp, Zea mays
  unsure (1)..(503): unsure at all n locations
actcagcttcagcaacgcatcgtgtgctagaagaggaaaacatggtccatatactttanttgggaagtcttatcaagatggagtatgagaagtctattcatgaagtgaagaacaggtactatgaaattgttgaggtctccgacaaaacacttctggagctggaagaacggattagattctttgagcagaaatttgcatgcatggagcacgagctcatggaaatgtttaatcaagagaaagcagatcggtatacactaatagcagagaaagaaattgcaatttctgatattcaacaaactgttgaatctgttcaggttgacatcgagcaccttcttgaggctgcagcaacaaaagtggcagaagttgagctagaggtgaatcaactttatggttttgcagaaactctgaattcacttaacgtcattcaagggcatgatactggtttcaaggatatgctcattgcagagtgcgaaagagaacttgactccctgcacgtgagttta

SEQ ID NO: 45019 - DNA, 305 bp, Zea mays
gctgaagcagacgggtattttataccagatggagacacaagacttgagctcttattggcctttcgacatccctaccttacattaggaagaagtatggcttgtatgtgagatttccgcttacttgggattttttgagaaaatcaaacccgggaccctagcgtttaagaagctaaacaattgagctagggaaaaatgaacgacacgtcagtcaaccttaggaaagtttgggagagataacacatttcgtcctacacaacaaagtgtgaaagaacagactatactggagacactgaatcaacccacat

SEQ ID NO: 45020 - DNA, 448 bp, Zea mays
  unsure (1)..(448): unsure at all n locations
agcttatgaagattcttcatcccaacatggtttantcggtggtgccagagccaacccatgttagtcttagcaattaagcaagtgtcgagttcagctctatcaaaactaccaaggatagctgaccctctaacactcccttaaatgctattgaatcatcacttcttctaaagacagcgacacctacatcagtaaaaagacaagtgtagcccatctgacataattgtgaaatgaatagcaaattgtaatctaatgaatctacaagataaacattggaaatggaatggtcaggggatatagctattatacccaaaccttngaccaaaccctggtttccatccccgaatgtaatagttcgatggggatcctggtttttctcgtaggaggagaacattcttttctccgctgcatgtggtttggcactcgctatcgataatccacttgagctctc

SEQ ID NO: 45021 - DNA, 474 bp, Zea mays
tcgctcacaccaacagaagagtctgggtggtttattgttctcaggcagatagcgaaaaagacgaaacactcattgccgagaattatctaccgattatacggactgcagcacaacaatgagccaatgagtacaatagcaactttacaaagcgaaagaaaaccacataaagatgcaccttatgaaagtaaaagaaaatgaaacccatattatgagtgggtccacgactccttggctctgaggctggcttcaacaaggtcccctaaagggttctctaccctaaatgtagaggaccaaacggtcctctaagctctccaacaacgtcctctaaacgatcttttaaagttagaggacgctgatggatccatatatatagagtttctctaaacgatcctctattcatttgactactttagataatcgggttagcaaaactaaaatatgtacaatatatttgagagtatgatagatacgtat

SEQ ID NO: 45022 - DNA, 432 bp, Zea mays
  unsure (1)..(432): unsure at all n locations
cctgcagcatgcagctctgcatattattagatgccaacatatataacccttaggacagaacccacccctagctaagagttnattacaaagcggccatctacacactttatattttgccagagcaagccatttattttgaccgaaattccagacaggcatattgacaagacagccatggattttacagaatttcggaatagaaatcaactgtgacgtcaaacctacaatataatttataaatagaaaatacagaacagggaagatgaataatggaaattagtgccatcctaaaaccctatgtaaattgcccactgaaatatataaagggaataccaatccactatgctgatgcttaacaacaagctaaacctagagtgataagcttaaacactaaaagccacgatgaccaagaacccttaattggtaactaac

SEQ ID NO: 45023 - DNA, 429 bp, Zea mays
  unsure (1)..(429): unsure at all n locations
aaggagaccatttggacaacaatgtccttttttgtaagaccagatccggagcgcatgccaagcacgggaactagttggcgctcatcatccacataagaaccatttgacgactgacatgccactctagcaccttcacatggacctattccgcccgatcgctaacataagcatcggcgggagtaagtactgcctaaatattgcggatgactattctcgcttcacttgggtatttctnttacaggaaaaatctcaaacccaagagaaccttaaagggattcttaagacgggctcacaatgagatcggcttgacgatcaagaaaattagaaacgataatgggacggagttcaagaactctcaaatagaaggcttccttcangacganggcatcaagcatgagttctcttctccctacatgccacaacaaaatg

SEQ ID NO: 45024 - DNA, 451 bp, Zea mays
  unsure (1)..(451): unsure at all n locations
agcttgccttcgcttcagtctatcatccgctttcatcggagtcgtggagcgtgccaatgggaaaatcttcacagccatcaagaagatgctcctcgacgagaaaaagggcagatggaccgacttgctaccggaggcggtctgggcgctgaacacaaccgagtgcaaggcgaccgggttcactcctttccgccttctatacggatcagaggcaatgaccccgcaagaaataaaacacgggtctccgcgcacagctccgtcagccacccctgacgtggatgagccaacctccaaagatctcattgacggagaccgggtcttcgccctgcaggccttaaacaaataccaagcccagaccaaagcatggcgcgaccgcgcagtcatcccaaaggagttcagcgcggnggacctcgtactcatccgaacagctcggacggagtccaagggcaagctg

SEQ ID NO: 45025 - DNA, 305 bp, Zea mays
aatgactcttctttggttaattcggcttcgagctctcatttgtgtaaagccgaaagtattgcatgtaacgtttatcatattgtaaggaataatatttgaagcggattcacaggttagtcagatttatcctttattattcgcactttccattatgattaacagatatactagccttctggttgtcattttcttcgtccatttaacgtccggatcaaggttaaatgaagggaggaacatgcaatgtgctaattcacattgtggtattccgaaaagtttatctccaattcttgtctagagctattatc

SEQ ID NO: 45026 - DNA, 503 bp, Zea mays
  unsure (1)..(503): unsure at all n locations
tgaatgtncaatatcaagaacttcaagtgcaacctgaataatgcatgaacatcaatgccaccactctagtatttgaatctaagtctagctctaatgataatatccgcaagcattgtgccaaatatcatgcttcttgatgtctaactaaccatgcaaggaagcaaagcccacaggtgaaggtcaaagaaattttgaaaagatgctctaagcaatgtatgggttaaaagaaagttgaacccaagtcaaattccttaagcccaacaagggtagaaaggggcttgggttcaactcatgcaatgaaaaccctatcacagtgcataatgggtggagatcccccaagttcatagagggaaccactctatatgatgccttgcggaggatccactcctcaaatgacaagtcatctcatgtaaacgttaacttgagttcacaaagagtaagatgaacgaagtgagatcctcaagtggacaaaaatctaatgcttccatttcccactcatatct

SEQ ID NO: 45027 - DNA, 428 bp, Zea mays
gctcttactaatcctcgtaaggcttcatgctatataagcatatgtgagagttaagcccccggtcaggtaactctatagatagttagggtcttctcccacgcgtatgtgatgtttcactttatacctctctcggatgctctttgtcgtctccattatcaagcttttgggtgaaacataacgaaccttgttctcaccggtacacggtggcaatcacacctcagcacagtctatgtaatctcgcaatatatagtctctcttggtataatataatgatgctagcatgtcaagggatactatactatagtgcgcataagcactaacggttgtgaggtgtctattcctcactactatctactagggatatctatcgaagattatttgttagtgaaatggggtagacaagggatacaatgttgcacataccgaca

SEQ ID NO: 45028 - DNA, 473 bp, Zea mays
agaagccctggaagtagcataggccagtaatatacgaattgtctcaagacttgctacgggtgcataagttccgccgaaatccaaaccttcgacttgtgaatagcccttggctacaagtcgggcttttgtccttatcaccacaccatgctcgtcttgcttgttgcggaatacccacttggatcctacaacatctttgttacgacgtggaacaagatgtcctacctcattcctcgagaagctgtagagctcctcttgcattgacaacacccaatctgaatctcttaatgcatcttccaccttgtatggctcaatagaagacacataagagtaatgttcacaaaaatgagtgactcgagatcgattggttacccccttatgaatatcgccgaggatgaagttcacggcgtgatctctttgaatcgttgatggctcttgggtgggcgtctttgacctgtctactgacctcttcttgc

SEQ ID NO: 45029 - DNA, 464 bp, Zea mays
agcttctaaagggagaacatgtgataggtttgactaacgtgcaattcgaaaaagatagaccttgtgcagcttgtcaagcaggtaaacaagtgggaggagcgcatcacagcaagaatgtgatgaccacatcaagacccctggagctgctacatatggacctcttcggacccgtcgcctatctaagcataggaggaagtaagtatggtctagttattgttgatgacttttcccgcttcacttgggtattctttttgcaggataagtctgaaacccaagggaccctcaagcgctttctaaggagagctcaaaatgagtttgagctcaaagtgaagaagataagaagcgacaacgggtccgaattcaagaaccttcaagtggaggagtttcttgaggaggaagggatcaagcacgagttctctgctccctacacaccacaacataatggtgtggtagagaggaagaac

SEQ ID NO: 45030 - DNA, 442 bp, Zea mays
  unsure (1)..(442): unsure at all n locations
tcggagaccgtccctatctccgaagccatgcaacggtccgggctattgatttcggaaaagattcctattgatgatgcagaacaagcaatcgctgaagcagaaggagaagaagctgaggaaacaaactccgaagatgattatcaccttgccacaccaagcaaacccagccatttggacttcgggaaatctactggttcgaaggctgacttgtccaagatggtaaagtcaggctattttactgaaaatcaaaagaagctactacgcttcggaggagaagagactaccccaaagccggagaaagatgaaattgttatttttaaaagcttcttaaaggctgggttgagattcccccttcacgggattattgcagagantattgaataatttggaatctattntcaccagctaacccctaacgctatcgttaggcttagtgtttata

SEQ ID NO: 45031 - DNA, 415 bp, Zea mays
  unsure (1)..(415): unsure at all n locations
agcttgtggacccgttgcctatcaactgaatgttccacccagcttgtcagctgctcatgatgtattccatgtatctcaattgcggaaatgtgttcgcctacccactgaagtgctgcccgaaccggacatagagatagaaccagacttatcctaccaagagtaccctgtcaaggtattatatcaaaaagaaagatcaactcgggcaaggtccgtcagaatgtataaggttcagtggagtcaccattcagcaaaagaagctacatgggagactgaggaatttctacgctctcgctttcccgactttatgtccaaaggagtctgtacgtaaccccaaaaccccacccccacctgccctctgaattcaagcctaagataaacttagataacaacgatagactaaggtgnggatttaact

SEQ ID NO: 45032 - DNA, 465 bp, Zea mays
  unsure (1)..(465): unsure at all n locations
tactaagctcttagctttgaagcttcggctttgacaacagtcttttagtgattccgaagatgtctgaagctgctaagaaggctgctgctgaaatgaaactgagtcttgatgaagagaagaacttatggtttcttatatcaatgtcgaagaccaacacagaaaagatcaccacggaaattctggaagggctgtctgaagatactggtgacagtgaaagttatgatgtggacagcggtggcgaagactccgaagatcgcccctggcgaccaagccattcagtttatggttaatcaactatcaaagagaatcatcttgtttatatgagaggaaggtatttccgggatctgtccattgtgagggcggacgaacgggaanagacttgtccacaccctgaagaaaatgaagatgtggtgtaacgaagctttnttgaagccggattgcgattcccttgagcagcttcgtcgt

SEQ ID NO: 45033 - DNA, 326 bp, Zea mays
  unsure (1)..(326): unsure at all n locations
tttcaagtcggtcatataccttgcattctactcctacacaactaaagcttaaccgtcaaggaagggtcagcctttgcttaggcacagcccgaccctccctcggggctagaaggggggaacacnctctgcgtcaaaatattcctcaaaacaagtctttctgccagaacgcctttcgcgcttttcaactgcttcgatagcatgattctgaaaacgacatagagtacacatgtagcggctaggccgaccaaaccgagggactcctacgcctcctggatacggatccctcactcgtctacttccgcgataatgaactcacgcctcgataa

SEQ ID NO: 45034 - DNA, 430 bp, Zea mays
  unsure (1)..(430): unsure at all n locations
acctgcggcatgcaagctatcacgtgcaagaagacattttcatatataatgatgcctngctactgatgattcgcgccacagaataaataattgaaatgaagaaacatgtttaattatttatttttcagccaaccacttgcatgcaatgctaaacgacattattttcttagccacatccgcatgcatgcatgcatgcatgcagaggagttgcggacgcctgctgggcattacgtctcttttgaccatcgtttggccccacatgacatattgctggcgaaaaggataagcacaagcaaatggtacgaacgctgagcgccagctatatggtcaggcaatcaccgtctgatacggtttcgacacgttcaacgcgactatcatatagggtattcgatggctcgatccctagaggngggcgaggtcgtacccgtgc

SEQ ID NO: 45035 - DNA, 352 bp, Zea mays
agcttcttccattccagaatctatctgtctgtttaaaatatggggggtctgtctgttgtaatgcatcgtctcggtgtttcggttgcagggcgttggacaagacgatatccgacatcgagatgcgcctggctgcggctagagccgcccaggcgatgagccagggcatgtcaccgggcgactcggactcggagggcgaccagggaaccgcgcggcgtaggatgtcttttgtcatggtgcgtttcaccactcttgctaaccggaagcggagagattcaataaggcagacgtggatgccacagggcagatgcctttcccttccattttgtactgtggagcttttgttcattttttt

SEQ ID NO: 45036 - DNA, 432 bp, Zea mays
  unsure (1)..(432): unsure at all n locations
ctatcagatttttgcagccaaggccacctaacccgcagcgcccagctcatgatccgaagatcactaatacccagacccctcaggtccttgggtctagtgactttgggccaagtcagcagacaatggccaccattcacctccttcctccctctccacagaaagcctcgtctaagcttatcaattgctttaaaagcccaggaagggatgtccaacgccagagcagcatanatcattcttgatgtcatcacaaattgaacataaatggctctaccagcctttgtcatcagatcagctttccacccaggtaactgtgctgcagttntatcgacaattgcttgaatttgacttctcctaagctttccaagagaaagcgggaggcaatgtactgacagggaaattccgatatggaacatggaatgagctcctgaacac

SEQ ID NO: 45037 - DNA, 404 bp, Zea mays
  unsure (1)..(404): unsure at all n locations
ctgaaccccctgacgaagatgcacgcatgttgccaatctgctgcgacatcggctttcgttcccttgaaacaatcaatgttgatgcggttttaacgtacaggcgcagtaatgctgaatcagaccataataattacatcagaagtattttatatataaagcgcgcatggataattaactggcatgaggaaatatataagtaccattaatttcgctgcgaaatataatttcattaatatcactagcggacacagcttccttgccgaaaaacactcagcgaacggattgcaaatatgactctncgcaaagattctcgacgaactatacatagacaatgggttctttgccgagtactttttgtcaggcacctcggtaagccttttgccgacattaccagatactcgaca

SEQ ID NO: 45038 - DNA, 346 bp, Zea mays
  unsure (1)..(346): unsure at all n locations
agcttctaaagggagaacatgtgatatgtcctacttatgtgcattncgaanaagatagaccttgtgcagcttgtcaagcaggtaaacaagtgggaagtgctcatcacatcaagaatgtgatgactacgtcaagacccctggagctgctgcatatggacctcttcggacccgtcgcctatctaagcataggaggaagtaagtatggtcttgttatagttgatgatttttcccgcttcacttgggtattctttttgcaggataaatctgaaacccaagggaccctcaagcgcttcctcaggagagctcaaaatgaagttgagctcaaggtgagaagataaggagcgac

SEQ ID NO: 45039 - DNA, 433 bp, Zea mays
  unsure (1)..(433): unsure at all n locations
tacttaattgtaaagctagtccacaaggaataagatattcattgagctccacggcccctacatgagtgcttcaagtgtttgaatgagttgtccaatgcacttagccaatatctgaacttgagaggcccatttcacacctttgctaaaaaaaatgaagattattttcaagaattgaacttatgaaagcaatactcatggcagatgagtcacattgatggatcatatatatataagtcatatgtgatgagagttccaacaatatatttcaaagtcaagccttcagtgcatctccatgtacctatatggttactacggtggaacatgtattttgagtacctccttcggcaaaaaaaaaaacaaactgtatgctcgctcgagcttcaaatttgcccccanattcgtatggatcgtactgctccagtacacacaaaac

SEQ ID NO: 45040 - DNA, 443 bp, Zea mays
  unsure (1)..(443): unsure at all n locations
agcttgcccaaccgtgctgtctacttgaccttccccgaggagactaaggagattcagcgccaggtccaggaccttctggaccgcgggtacattcgtgagagccttagtccttgttctgttccagttcttttggttcctaagaaagatggcacttggcgcatgtgtgttgattgtagagccattaataacatcacaattcggtacagatatcctattcctagattggatgacatgcttgatgaattaagtggttctattgttttctctaaaattgacttgcgtagtggataccaccagattcgtatgtctttaggtgatgaatggaaaactgcatttaaaactaagttcggtctttatgagtnggtagtcatgccttttgggttaactaatgcgcctagcactttcatgagattgatgaacganggtttacgtgattncatcgg

SEQ ID NO: 45041 - DNA, 454 bp, Zea mays
  unsure (1)..(454): unsure at all n locations
cgtgcattgcatccttcttaatagagtggctatcctatacttcaatttaaaatattaaataaatttaagcatctaagtggatgttcatgtcatttagtaattagtggttccaccatcacatgtattatcctccttttcatttaacctgcttgtcaataagataaatcttatttatgttctaattgcattgacattatcattaaaacacataactagatcttgattgcacttgtanggtcttcaactttgatgaactcaagaatatagttctccttatgctgcaatgataaaacacgtcacctaaggaagctagctactgctcccactacagctagccctaacttcttcaatgctctatttgctcatgggattggatagtattcctatcaagcccataaatcattttcgaccactgagcatttangacaagggagtaactcgtggcttctggact

SEQ ID NO: 45042 - DNA, 483 bp, Zea mays
cccgggatcctttgagtcacctgcggcatcaagcttgacacatagctcttttgaatacctttgatcatatctcctttatatgctatgactaatgtgttttcaagtcgatttcaaaccaagtcataggtatattgaaaggaaattggagtcttcggcgaagacaaaggcttccactccgtaactcatgcttcgccatcactccgagcaactctctcttctttgggggagaaatgagcatcaagaaaaaaggacttcatccttgagggagagagtaaaagctcaaacgcaaaaggacctcgtctttggtataatcttaactcacttatttatgaccaaaggggaagattgcacttccagggctctaatggttcccgttttggcgattcatgccaaaaagggggagaaatgagcccaaagcaaaaggaccgcaccaccaccaccaccaaattcaaaaacttagtgcttttcaaaagtccttatcat

SEQ ID NO: 45043 - DNA, 426 bp, Zea mays
  unsure (1)..(426): unsure at all n locations
gctttggagagtgagctcgctagatatgattgttctaanggtgagtcacttcaatcactctttgatcggttaatggtgttaataaacaaaataagagtgcttggaagtgaagattggagtgactccaaagtcacaagactattcatgagagcatacaaagaaaaggacaagagtctagcaaggatgataagggaccgtgatgactatgaggaaatgacgcctcatcaattatttgcaaagattcatcaacatgaatccgaagaagccccagtcaagacaagagactctcatgccttgatctcaaatgaacaagacaccctcaagaagaacaaagaccataaggcaaagaaagtggtcaagacatctagtgatgaagatagctcaagtgatgaagacacagctatggtcatcaaaacattcaagaaa

SEQ ID NO: 45044 - DNA, 513 bp, Zea mays
  unsure (1)..(513): unsure at all n locations
ctataaaactcaagctggtcatttatggctaactgtcctgataatgatagtgaccaggaaaaggggaacaagagggaaaagaagaagcattacaagaaggcaaagggcgaggcgcatctatgcaaggagtgggactcggattgctcctcgtccgactccgacaatgaaggactcgccgccaccgccttcaacaaatcaaccctcttccccaacgagcgtcacacatgccttatggcaagagagaagaaggtatgtactcgcaactctacctatgcttcttcgagtgaggacgaatctagtgatgaggatgaagtagattattcatgtttgttcaagggcttagatagatctaagatagacaaaattaatgaattaattgatgccttgaatgaaaagaatatactnttagaaaagcaagaggatntgttgtatgaagagcatgataaattngttgaggcacaaaaatcctatgctttagaangtaagagaaatgaaatgctttcttttgaacta

SEQ ID NO: 45045 - DNA, 459 bp, Zea mays
agcttcggctatgggtaaaaaatgttggcagttttattattgctaatagcaatgaatgctggtggaacttcacacctactcggctgtttatatagtgctgcaggtaagaaggcgaagcgccaagatttttacaccaggcggacagccgcttgcactcgctgcgcggtggaccgcagagaccaaacagtaactctgcaaagtgggaccgctacgtgctggaaaactaaatcgtttctcgacaacgagctcagggaaggtgttttttggaccttcggcttcccgaagcttaagagactgtttttttcatggatcaagctcgttacgaaaaacgatctagcgccgcgaaaggggctactggtgggactatgcttcatcgccgaaagtctttgaggaagaagcagtttcggctgaagctgttcgtatgagatgaccgaatgttcttttatgatgcttccgaat

SEQ ID NO: 45046 - DNA, 491 bp, Zea mays
  unsure (1)..(491): unsure at all n locations
aactcctncctgggatgggccgctcatcatcgccaaagatctttatcccttgacatacaagctggccaacgatcaaagcgaggtctacagcaacgctaggaacatcgaacagtcgctattacccttaaagcgtttcaagtcgttcatgtatctcgatccctctacatgtataaataaaaagtctaaccgtcaagggaggatcggccttgccttcacaaacatcgaaccttccttcggggctagaaggggggaacaccctctgcgtcaaaacattcctcagaaaagttttctaccgaaatgatattcatgcctttcgactatatcgatagcggaatcctaaaaacgagctagagggaccttgaacggcaaggccgatcgagccgagggactcctacgccttcgggatacggatacctcactcatcaccttccgcgaaaagaactcacgctctgataagtgagtctgctatcaaacaagtcctaatgcccgaa

SEQ ID NO: 45047 - DNA, 341 bp, Zea mays
ggacagagaaggatagataaaattggggcagctttttacaggcgagcaggaaggtacctgccctttatttctataacaagccacaataagcgaaacatgagcaactgaaggcattgcagatccaacagcctatatgacataacattaccacaaacatacttatgaagtggagggagtccaattatgaagaacaagatcatagaagctagagtattaactttgtaaaccagagcttggcgcaaagaatttgggaaaagatcttccgctctgtaacaaaatagaaggatcttcgtacttcaagaaaggcactatgccaacattcataaggcgattgaacatag

SEQ ID NO: 45048 - DNA, 474 bp, Zea mays
taccattataatgggtgcgttggagtcattgggcatcaacattagtttgctcatcggtcctgttatctggacgttatcacctgtctgcagatcacctgcattatgatatgagcacgcacaggggaacaagctatatcagatattctggtgccaatcaagtcagatcaggatttgtagaagaagattgtgtgctgacctaccgcggcggccgcattcccgcccttatactcctatctgatggcacgcggctcccgcctctcctccgaccctcctccgtctccgcatcatcgtccgagccacaccgtctggggttctcggtggagcataacaacgcctatcgcgccccgtccctgccagcaaagcgcagacacgatggggactgcgagcccaagcggagcgctggtgaaccaccaagccgaagcgcatagggcatggcagcgactgcgtcattgaccgtgagtgagagcctgggca

SEQ ID NO: 45049 - DNA, 449 bp, Zea mays
  unsure (1)..(449): unsure at all n locations
tcttcaaggcttgcggaggcttacttgcaaagtattacgcctgtggtactaatctaagccccttgatcatagcctcgatgacaatactattgagcactatangcacctgagctctcaagcgtaggaaccttcggacatacgcttggaggtattcttcctgatcctatgtacactgaaacagagcttgggcagtgattggtaatgtttggaaaccctggaagttagtgaccagcatgtcttttagcttctgtcacgacatgattgtccctggccgaagagagtaccatgtttgagccacgcttctactactatgacaagacttgcatgacgagattgccccatatgggatatggttgcttcgtagctcattaaacatagcttccggttaagtgcccgcatacatgggagctgggtggctgtaaaccgcggcacgggtacctgaatttgtg

SEQ ID NO: 45050 - DNA, 195 bp, Zea mays
  unsure (1)..(195): unsure at all n locations
gcttgctattncgatgaggcagggcttcgatctcctcnctgagaagcttcacggctcctcggggaatctgtccaatggctcggatgaggctgagggtctctggaaatggctatccgtgagggccggcgctcgggtggcgcatagctctcctgaacttaagactgtgtctggtccacgaatgtgaatgccgagtga

SEQ ID NO: 45051 - DNA, 434 bp, Zea mays
  unsure (1)..(434): unsure at all n locations
actcaagcttcgaacaacgatgagtgggttgataactctctctggttgttattacaccttctgttaccccctgtatccttttctcttgcgctctcatctctgattcgacggcgttccgacgctgaggagaggtgtgttcacagtcaagccaatctgaatcacgtttctgcattcttggatggtgctcgagccatgaactcttccttgaatgctcagcttgattcacagaggagagctcatgaggtaaattcttttgattgttcacagtaccttgtgtcgcgctnttgcttggatgttcagtattcttcttgtctgtatgaggatatgcggaaacttcttgattcttgagacaatctggacaaactgtaccacgatgtcacgcgtttccttactactttgtagaggagtcattgttttactatgtccgagcttga

SEQ ID NO: 45052 - DNA, 422 bp, Zea mays
  unsure (1)..(422): unsure at all n locations
agctnanacgacctatgcatcactatttatataaacaacactcacaccatcattacagactaggaggtcggcatcccgacagtgcatangtccaaccttaacgggggcaagatggcacctcatatgagagacaacgacataacttttacagcccactaaaccgctagccctattggaaacactaagggtgtgtttgtgtagagagtggagccgctccgctcaaattttctagtgtgtggatacgtgtcgacccagagcagagtggctcttggaatctcaagatgccaaaatacgtctgattccaggatgagctcgctcggcaaaaatgaccggacgcgaacactcgcgttctttcgcgcgacctccctctgctccattctctctcgcacggaccagcctccctgtgctcctccatcccgacg

SEQ ID NO: 45053 - DNA, 411 bp, Zea mays
  unsure (1)..(411): unsure at all n locations
agcttgtgaagattcatcattccaacttgttctagtcggcgatgccaaagccagcccatgttagtcttagcaattaagcaagtgtcgagttcagctctatcaaaatttactaagtatagctgaccctctaacactcccttaaatgctactgaatcatcacttcttctaaagacagtaacacctacatccgtaaaaagacagttgtaacccaatttacataattgcaaaactgaaagcaagttgtaatctaaagaatctacaagaaaaacattggaaatggaatggtcaggtgatattgctattttacccaatcctttgaccaacccttgattcccatcctcgaatgtgatagcttggtggggatcttgggtnttctcgtaggaggagaacatcttcttctcccctgcatat

SEQ ID NO: 45054 - DNA, 439 bp, Zea mays
  unsure (1)..(439): unsure at all n locations
agaaagacagggtttgtagcgcatgttatgcagggaagcaagttggtacccatcttccacacaagaacatcatgacgaccgacaggccgtttgagctactccacatggatttattcggtccgatcgcttacagaagcatcggcgggagtaagtattgtcttggaattgtggatgattattctcacttcacttgggtgttctttttgcaggaaaaatcacaaacccaagagaccttaaagggattcttgagacaagctcaaaatgagttcggattgaggatcaagacaataagaagcgacaacgggatgaagttcaagaactctcacattgaaggctttcttgaggatgagagcatcaagcatgagttctcttctacctacacaccacaacanaatggtgtagtggagaggaagaatagaactctacttgacatgccgag

SEQ ID NO: 45055 - DNA, 399 bp, Zea mays
  unsure (1)..(399): unsure at all n locations
ggaatgcgaaaaagtagcattcaattctgttttgatgctgcgacacccgctattgggcttgtgggccgtgtatcgtgttggagcccactagaggtacctccaggattgtgcacgcccctaacctcttatttaacagtagccggcgccacattaggttttgggttttgcttagatcatatgtcatcgcacagttcgtcgttcctcagtttgtgagaccccaactcgtaattaatacagttttggttgtgttctacctgttcttgcttgtgttattgatctcatctacaaaaccgatcttaaccaatcctatnttatcttatcatcacgtccttaacagattaggctttgtccagttctgttatttgagcataaatctcgcatacgaactcagaaattatt

SEQ ID NO: 45056 - DNA, 395 bp, Zea mays
  unsure (1)..(395): unsure at all n locations
tcattccaacatgttttcntcggcgatgccagagccccccatgttgccttaacagttaagcatgtatcgagatcatctctatcataatctactaagcatagtcggacctctaacactcccttaaatgctattgaatcatcacttatcttaaagacagtaacacctgtatacataaagagacatatgtaacccagtctacatagttgccagactgaaagcaagttataatctaaagaatctacaacaaaaacattggaaatggaatgggcatgtcatatatcaatattacccagacctttgaccaaaccttgattcccatccccgaatgtgatacctcgtaggggatctaggatgttctcataatacgagaacatcttctattctcctgtcatgag

SEQ ID NO: 45057 - DNA, 439 bp, Zea mays
  unsure (1)..(439): unsure at all n locations
agcctgcagccatagcaagnagcataagcccacaatatacgaattgtctcttgcctagctaccggtgcataagggttaccgaaatccaaaccttcaacttgggagaatcccctggccacaagtcgagctttggtcctctgtaccacaccatgctcatcttgctctgtgcgaaagacccatttgtgtcctacaacattttgattaggacgtggaactaaatgccataccttattcctagtgaagttgttgaactcctcttgcatcgccaacacccaatccgaatcttgaagtgcttcctctatcctatgtggctcaatagaggaaacaaaagagtaatgctcacacaaatgtgcaacacgagatctagtggttacccccttatgaatgtcgccaacgatggtgtcgacagcgtgatctcgatggaattcttggtggactc

SEQ ID NO: 45058 - DNA, 478 bp, Zea mays
  unsure (1)..(478): unsure at all n locations
ntccaaaaagtcttggatcactctntatggcgatctaaatattaagttatggatgtttaaagtctgaagactgaatctgtccaattctagacagcaaagccttctagtgtcttttgtccttagttaaatattgaatcaccttgagatgtttataaatgatatgtagaacaatttattacctttccgtaaagtctaggatcaatttgtttggatgtctgaacctgtagttatggattattaaagtcgcaagtctgaatctgtccaaatctggacagagctgctgtgtntacgcaattcggccttgctaagagtctaaccatgctgaggtaaaaatataaaagttgtagaacactttttaaactttccagaacatcctagtntggataatttgaactaatatttgaagagttatgattaaaaccaaaactactgtgctgcttgcctanatatgttagacgtgattgattactctactcta

SEQ ID NO: 45059 - DNA, 253 bp, Zea mays
aaggcagctttttcgcccaaaaaaacagggggccactggggccgaaaaaaagcccaaacgatgcccgacagaaaatgacgaagaaagaacggaaactaggccacaaccggagcgaggacaaaagggggcagggacccgatcacaaagaaaaagatagaaagcaagccagaggaaacgaaccacatccatgagaaactgacaacgaacggagctcgccaacaacgagaaaagacccctaacactacaacccaga

SEQ ID NO: 45060 - DNA, 472 bp, Zea mays
  unsure (1)..(472): unsure at all n locations
tcngcatagtaacatgtctcaatatgaagtgagtaaactcgctctaaagatgaaatgaccaataaacccatgatagtttgtgtcatgatagtaatcgaatgtgaagggcataaatgtaatttcacacaggctgcgccctgtgcctatggccctgtttggcacagctgctgcttgttgaanaagcagcttatctgataagctggtaaaaagcagcttctgcttgttgtctgcttttagttcattttgagaagcagctgaactgataagctgttgtagaagctgtctgtttggtagaacttctgcttaaatttgtaaagaagctgaaaataagctgtgccaaacagggcctataaatagatgaacagtacccctgtactgttcacgctatcttagaatcgctcgcgcgaacactttggtttttgcctttatcaagtcgaaggataaatgtacttaatatcgtatttaatatcca

SEQ ID NO: 45061 - DNA, 433 bp, Zea mays
  unsure (1)..(433): unsure at all n locations
caagctttgatataatttatcactggttgaacaagtcgntttacaatatatgtaaaacgatacataatatgctaacagaaaagtagatagacccacacagcatacaattgtttgtgcgtaacacagccaggttagccaggaccaactttggggatatcatagtgctcgctgaggttagccaggtattggttgaagtcctgcatgcggtccttgtacgacttgtttgcgactttggccatcttcttcatgtcgatcttctgcttctgttccatgtagcggcgctctgatcgtgtgagatgatcatagtcagaatgtgggttcttttggtctccattcttatcagattcagtctgagacgactcctcacgctggtacttcttcttctttttctttactccaccatccttcacgtccagcgctttacccttcagct

SEQ ID NO: 45062 - DNA, 347 bp, Zea mays
  unsure (1)..(347): unsure at all n locations
tccaaatgagctcgcggtatgctcttaattatacgcccagtgcggtaaaaattgaaagaacccgcttgtcaatgaatgttgctattctaacaaagggaaggggttttttcggaccttcngcttaaggcctttcgtcatgtcgcaatctaaatttattattattctaacaaattaatattgcgaggggctactggtgggggccttcggcttccgaaggtcctcaaaaacaagatttaacagtgtttctggagtataatgtgtgaacaggtatcttccgactctagtcgatatcacagtaggagaagcccaaataatacgaatgttgatacaacaccgaagatgtgggc

SEQ ID NO: 45063 - DNA, 436 bp, Zea mays
  unsure (1)..(436): unsure at all n locations
agcttagaagcactttcaatattaggccttttgtttattnttcctcgngtggttaagcggtaaaacaaggattacactctgctaccaatcgaaagttgcctagagggggggtgaatatgcaagcataaatattttcaacaaaaactagaaataaactgagtaaaatcggttcaataggtgttaaaactggttcaaccggtttgaacgagctcaactaaagaatgagatataaaaatgaattgatctcaaaattcaccaagttaactatgcaaatgggatgtcctagatgatccatatggttaaaagtagtagatcagagaaggacacttctcataatccacacaccaaatagataagaacaattattccacagaatgatgagagaacgaagaacgcgaacaaacacaatgagctagaacacaacagatataagatt

SEQ ID NO: 45064 - DNA, 485 bp, Zea mays
  unsure (1)..(485): unsure at all n locations
ctaagcttctaaggggagagcacattttacgaataaccaatgctcattttgagaaatacagcggttggagcgcatgtcaagcaggaaagcaagttggcactcatcatccacacaagaacatcatgacaagtgacaggccactggagctcctacacatggatttattcggcccgatcgcttacataagcatcggcgggagtaagtactgtctagttattgtggatgagtattctcgcttcacttgcgtattctttttgcaggaaaaatctcatacccaagagaccttaaagggattcttgagacgggctcaaaacgagttcggtttaaggatcaagaatattagaagcgacaacgggacggagttcaagaactcacaaatagaaggcttccttgaggaggagggcatcaagcatgagttctcttctccctacaccccacaacanaatggtgtagtggagaggaagaatcgaactctattggacatg

SEQ ID NO: 45065 - DNA, 457 bp, Zea mays
  unsure (1)..(457): unsure at all n locations
agctcgagcacttttcggaatactttggactttagtgtgatanatggcaattcttcttcacgaagcatgaaaagacaggaaggtgttgtttcgtcaaagactcaaaaacggtatgtgtaaagattcatgcatcgtaaagaattgagtaacacaaatagatatattacatttggggttacaaaatgttacactatattacatttcagaagttttttacaaaaatgcttaatcctctctcaaaacgacttatgcagcctcattcaggagccgattaacgacctcgtccataatatcttcggccatctttataatttcgtcgacccccttccgctgaaggcccaaagacgctttagtcagatctgaaacacaatacagctacattgctatcacaaatcgcaaacacatcttaaaacctaagattacaacacgattaacatcattaggtaatacctaattg

SEQ ID NO: 45066 - DNA, 445 bp, Zea mays
ctcagcttcttgagaaaggatacatagtgcgctgcctggcacaggctcactgttcaccagcgcctgctggatgaccttgacgccgcctgccagtggatgggacgggactcattaaatgctgaaagggcacgtcgaccatcatcgtagtggcaggcggcgcgttctctcctcaataaatgcaggcgctgcacggatttacatcaagctcagcccgatggcttatgtcatgggccacaagctgcgggtctccgcttgagcgggaagtgaagggcaaggcctggacacatgtcggcaccggacccctactcacgccagggtcctcctcgctccggcactttgctgaggtccggaccttactctgaggctccggacttatacgtataggggtgcggtatccttctcggagagtcggacccgcacaatacactctgagatgtgttgcttt

SEQ ID NO: 45067 - DNA, 461 bp, Zea mays
  unsure (1)..(461): unsure at all n locations
tgcagcatgcanaacttgccgattgctgggaggaaatacttcctgagccaaaagaggacggagttatcgttttcaacagcttcttcaaagcaggacttctgttccccttaaatgacatgatataggaagttataaagaactttgagatataccttcattaattgacacccaatgctattgttaggctcacagatcttatatgggctctccgaagccaaaggatggacgctaatgctgaacctttcttctgggtacatgaactgcactatcagacgaaggctatggcaaatggccttcataagaacttcggctgctacaactttgcgtatagaaaagacacaaaagctccagtgattggctatcgcaccatatggccaaccgggtggacaaatgaatggttntatgcgaaagcctacgagaagagaagggagaagctgatgactatggtaatgaagcccatg

SEQ ID NO: 45068 - DNA, 405 bp, Zea mays
caggtttgtcttatcacggcaacgtgactctaccaactcgcgatgccatatgtcgagcccgctaaatacaaacgatttgaacatatacagagccattatacaagatattttgagataacaaatgaatatacacatgcctggatgacaggcttttcagtaagatgcactgtttctgctccgtaaggaacacataatagtctagcaatgtgtcctgctacatacaaccttttctccggagatgataatgaagcaatgaaaatgtccacaggctagaatattacaaaataaagagacaacggtgctcgagatgcctggaagaccacagtgtttatttcacaatgatggaacaataacaacatagacatgtaaatcttcacatgtgtcataacagcgtgagtgatattc

SEQ ID NO: 45069 - DNA, 420 bp, Zea mays
agcttcccttataccccagaacgtgatactttcttcattggtgaaactttcagggagacataatctccaactagaaagatcaagggtatccgacgtttgtctgcgtaactcttctgtcgggcttgagcttccttcaaataatgaattattcattgaactttctcttctgtatcctttaccatatcaagcctgaagaaatttctttcacctggttcagaccaggttaacggagtacgacactgtcgtccatataaagctttgaagggtgccatcttaacgctttcttgatagctattattatatgagaactccgctaatggtaaacaatcatcccatttctgtgggaattccagaacacatgctcgcaacatgtcttcaagtatctaatataccctctcagtctgaccactagtttgggga

SEQ ID NO: 45070 - DNA, 427 bp, Zea mays
  unsure (1)..(427): unsure at all n locations
tcgtatctcatgactaggggcgcaactcaaatgtttcttcatacaatcttagctcatacatgaatataaatagagcctgattcgatccatcttagatccatccagtttcttatctgagtcgatccctacattttataggatagaatgtagagggcaacaaccagttgtccccctgacccgccatatagtaactactgaaagctagcaacaacgaatccaacttgttggttgctgcgaaataattacaaatagttcacaaatgattagaaatagagaccgaacctaatctaatctgatccttacagtttatagcgtaaaatttacagagcaacaacgattgtcacccctgaccggccatatagtaactacttgaagctagcaaccacgatatcatgctngtggttgctgcgaaataaactctgatact

SEQ ID NO: 45071 - DNA, 447 bp, Zea mays
agcttggggggtcctcgggtgtcctgtcgttttctaagtaccaagtctcccacctggaagcctcggggtcggacccctcgggcgtgtgagcgtcgtaaagactgctgataccacaccgagtgtagtagggccacgttccaagcttcttcgagctggtccagtgagtcttctcggctggtctggttgcttcagtcgtcgtacgcctttgtcctcgcgaaccgtattctaagtctgtgggtaagatagcctcggccccatagactagaaataacggcgagaaacccatggctcggcttggcgtcgtcctcagactccagaccaccgagggtagctccttcatccactgcttgccaaatttgttgaggttgttgtagatcctcggtttaagtccctgcaaaatcataccgttggcacgctccacctgcccattcgtcatggggtgagcta

SEQ ID NO: 45072 - DNA, 394 bp, Zea mays
catataaggaagttctcgggtcgaactgctgcgatgacttttcagatgagggattcctatgcttccttcttcctgaatccatagtggtgtttctcgaactagtggaactctggaaaggccttctagtgctaccctgcctcgcctcctcggtagaggtgtatggattcatgaccctatggcagatgggtaacatgacttgtgggtaaagatgtgtaacatctgccaagtgtaaaactggtatatcattcgtgctcacggttatgagcagctcggacactcacatgattaactaatggaagctaacttaatatgtcaatcgcattgcattgtgcgctttattactaattgtgatctcttatttattacggctggtatatacttatactcactaatt

SEQ ID NO: 45073 - DNA, 294 bp, Zea mays
gacttttgccaggaactaccgcaatccccctggcagatagtacatgtcctacaaatagaattgcctcaaccaaaacgtgcacttgctgaacttggcaaataactgatgtcacctcaagcgcgttaacacgatcgcgaaatgatgggcgtgcccctcttcaatcttggaacatatcaaaatatcgacaagcttgcccaactcgggcaagaacacccgaggtcatcaaacacgtgaagcgggcaagagcatttgccaatccgaaagacattaccagatattctaataatccatacc

SEQ ID NO: 45074 - DNA, 271 bp, Zea mays
ctcatcttgcttgttgcggaagacccaactggttcctaccacatttggttaggacgtggaactaaatgccatacctcggtcctcgtgaagttgttgagctcctcttgcattgccatcacccaatccgaatcttgtagtgctttctctaccctgtgtggctcaatagaggaaacaaaagagtaatgctcacacaaatgtgcaacaacgagatcgagtggttacccccttatgaatgtcgccgacgatggtgtcgaccgcgtgatctcgttgg

SEQ ID NO: 45075 - DNA, 405 bp, Zea mays
  unsure (1)..(405): unsure at all n locations
taaaactcaactgccgccaaaaccctaaaagcagggacatccattttctaagaagaccatctatattgtaacaacaggtatatccaattgcataactgccaacagatacaattatatcaagaactctactaaacacatagagaagagtgccatttgagatgcaatttacctaacctttaccttgcttgattccatcaccgaaatgatagatctgggaatcctattcttgacgagagggaacatctctttccccgcatatggttggcatcgtgctataaccagctgaaccccgatcataacctgcnagcaaatatgctggtcttagacccaccatgtggtcctacagataggcaatatctaggaccaatgcagttgctcctgctatgcctaattcaacacatttct

SEQ ID NO: 45076 - DNA, 445 bp, Zea mays
  unsure (1)..(445): unsure at all n locations
ggagaaatacctggatacagttcgaaggctggaagcttctttcgaagggttntctgtcaagaatattccacaaggagaaaatgagcacactaatctgctagccaagtaagcggcacatgggctgcccttaccttcgaaagtattctttgagacaataagagcaccttcggtggaacttcttgaaagagcagcgctcaatatatctcctgttcatagtgaagattggagaaccgagattatatcttttctccaaggcaactgcctttcagatgacgaagcttataacaagagaatagaggcaagagcccgtccatatgtaataataaaaggggagttatacaaatatggagtcagttctccactgcttaaatgtctatccagagctgaaggcatagaattgatgaaggaaatacatgcaggattgtgtggatctcacattggatct

SEQ ID NO: 45077 - DNA, 412 bp, Zea mays
agctatatgcccactagtaggtgtttacacttcagatcatgtctaggacatttcttcttcttcgaagaaggcaagcgaatgtatcggtggttgcttccgttctgacctgttatttctattgcctacactctaatattcaaaagtatcagattctttcataattggactctatggtgatgctttacttgcttggcatatactgatgctcaatcatatattgatgatgattatgaattgagtatgactcacgagattaattcacatatctgaaggtaaatgaagtattatttgaggttggtattgcatctgaaggtaaatgaagtattaattgaggtttgtgttgtatctgaacgaagtgaagtttattgattaatgtatcatgccatatacattgcatgactcattgcatatg

SEQ ID NO: 45078 - DNA, 442 bp, Zea mays
  unsure (1)..(442): unsure at all n locations
tgtgaacaatacaagttcagaagggagatagccgcttctgtttatcagccgaagcccatgctcttatgtgatgacatagcagagcagaaagtgctattgagatcccaactgtccgaagaacaggagaaaaccttgataaggtttctgttcaacaacaaagatgtttttgcatggttagctaatgatctttgcggagtcaacagggatgttattgaacacttgctcaatgttgatccatccttcagacccanaaagcacaggcttctgaagatgtctgatgataaggccgaaggtgctcggaatgaagtgaaaagactcctcagtgccggagttatcagagaaggtaaatacccagaatggctggctaacactgttatggtaaaaaaggcctatggtanatggaggatgtgtattgattttactgatctcaacaaggcctatc

SEQ ID NO: 45079 - DNA, 463 bp, Zea mays
  unsure (1)..(463): unsure at all n locations
agcttctanagggagaacacattctaggactaacatatgntcattttgagaaagacaggatttgtagcgcatgccaggcagggaagcaagttggagtccatcatccacacaagaacatcatgacgaccgacaggccgcttgagctactccacatggatctatttggcccgattgcttacataagcatcggcgggagtaagtattgtcttgtaatagaggatgattattctcgcttcacttgggtattctttntacaggaaaaatctcaaacccaagagaccttaaagggattcttgagacgggctcaaaatgagttcggattaaggatcaagaaaataagaagcgacaacgggacggagttcaagaactctcanattgaaggcttccttgaggaggagggcatcaagcatgaattctcttctccctacacacctcaacaaaatggtgtagtggagaggaagag

SEQ ID NO: 45080 - DNA, 483 bp, Zea mays
ctaagcttctccgccagtctgagcagttcgaacgagagtaacaagatctctatgcataacttgaagccgaagctcagcaaaattcggatttgagagaactactgacaaatcttcaagaaaaatgcctggaatttggcaacaagtgcattcaacgactaagaaagatttttactcagttggagccagtagcggaaaatttaccccctcagctgaagatctggcaaaaaccttcgaacacattgagggggagaatgacgaactcgacgaagtcatagccgggcatggtgacttctgtgcctgggtggcttctcgagggactgctgcagccttcatgaaggctggctgtgatcatgggaaaattgtcaatacgccaacatttactttgtcaccatcaatcctggatgacatccctgatctcgcccgaagcatctcgaatcgatttgtaaaaatgatattggcaaaaagtggtcgagagaaagcttg

SEQ ID NO: 45081 - DNA, 454 bp, Zea mays
agcttatacaagagaatagagacaagagctctatcttatgttataatagaaggggagctgtacaagcatggggtctgttctccactactcaaatgtttatccagagccgaaggtatagaattgatgaaggaaatacacgcaggcctgtgtggatatcacattggatctaggcctttgctgggaaaagtttttcgtcaaggattttattgtgcaaaggcagctttagatgcaacgaaattagtccaaaagtgcgaaggctgtcagaaatgtgcaagagatcaaaaacaaccttcatctctaacccagttaatacaacccacttggtcattgcaaaggtggggccttgattcgttaggtccgctaccaccagcacaagggaacttaagatatgttgttatggcagtggaatattttttaaatggattgaggcaaagcctttagccacaataacttc

SEQ ID NO: 45082 - DNA, 317 bp, Zea mays
gatacctactcaccagtggctcgattgactacacatcccacattaatagtcgtggcagacttttatggtcttatcattcatcagatggatgttaagacagctctcctaaatggagagttcgatgaagagatctatttggatcacccccaaaggctcattggggtaggtcaagacaacaaggcgagcacgccgataaatcatggatgggctaaaacagcacctaaccatggcagaaagctgattatactctaagcactggtttgtgtaataatctacactgtgtatactatcgatgggggggaatcgtatccggcctt

SEQ ID NO: 45083 - DNA, 451 bp, Zea mays
caacccagatcacccccaaagaggcgagcgttgttctctcaacctctttacggagaaggcacagctattcatagcagatatggcagaacaacctgctcctaaatcagcttgctctactcgaaacccaacgcaatagagtacgtcctcttaaacaccatttacaactagtgaaccatcccctaatttaaagactaatccgtcaacagtagtgtatatacaacaatataccataatacagagttgacggagggaatataaagtcactgcctacgggctcactaagatcacgggatagagggagagcgaacatgaaatagcgagcacaactagaccactaaacttgactaggaacccatactgaagacctcgcatatagggacccttgccttgacttaagagaaaaatactaacaacgccgcgaggggcatgtgctcaccgagatatccagatg

SEQ ID NO: 45084 - DNA, 267 bp, Zea mays
atgatgatgcaaacatgtgatacagaagacaagcataccgattctgagctaagctcaccaaattgaaacttctacatattatacaagttctactaaaaaaaacatggttgatcagtgatcaccatacataatggcatctagctgcgtgcctgtgccaaaagacagcagcatcacagtgttcacgtaccgcacatcaaaagataaaactatatacagtgcagcgtcttttttcctaacatattgcaagtcttgaacttatgagaatac

SEQ ID NO: 45085 - DNA, 233 bp, Zea mays
gaatacgacgaaacaaatgggtctcaagatgacagcgagacctccatgaggctgggggaactcaattgataaatgcaacgaaaaccaaggccattggcgaaataaaacccacggaagatgaggatgaaaatagcgtggttgtcattccttcacccccaactctagatgaaaaagatcaccaacaccaacaacataatgaaaacatgacaactcacgatccagggacctcaaga

SEQ ID NO: 45086 - DNA, 431 bp, Zea mays
ttatcgctaactgtccctataatgactttgaccaggaacaagggaacaagagggaatagaagaacgcttacaagaaggctaagggcgaggcacaccttggaaaggagtgggactcggattgttcgtcgttcgactccgacaacgaaggactcgccgccatcgtcttcaacaaatcggccctcttccccaacgagcatcacacctgcctcatggcaagggaaaagatggtaagcactcataatactagtacttacgcttcctcatgtgatgaagaatctagcaatgatgaaatagactattcatgtttattcaagggcctatatagaactaagggtgataagattaatgaattaattgatgcattgaatgataagaataagttattacaacagcaagaggatctcttgtatgaagaacatgataagtttgta

SEQ ID NO: 45087 - DNA, 444 bp, Zea mays
  unsure (1)..(444): unsure at all n locations
ggcatgcaagcntatgagtagcatagtatgtgagggggctctctctaagacatggccggacagcaaaaaacataactggagtgaacgccacgctagctcgctggctcctctcggcgagctggaataatcatcaaggtgcatatgagaaatcgcccccataagatcggtcggatgtctccgatgacaatgatcggttatcttaactgtcgcgagaacgagcatctcagacttaggccctgcttgggagacatcactataagaaactcaattcggtcgacttcttctacccaaataggtccaccttcactaaccttatgggtaaaaaaaattgaaactagaggcccgtttcatataattcatgaagctccctaaagggtgcgttaaatacactgtttttatatgccctcatgaagctgtcaaaaatacccactatgcactggtacg

SEQ ID NO: 45088 - DNA, 265 bp, Zea mays
  unsure (1)..(265): unsure at all n locations
aaactanacttcccacccttagcaataaattggcattctcatttgtaaggttggaaatttattgncggcgtttcgagaccggagggtccctataccgacaagtgagtgtgccgcgtgccccatcccacattggtctagcgcgtgtgctagcgcgaatgtgggaaagcgatgtggacccactcgggcgtgagataagtggaaatctcgcggcctttttgtctttctcgcgcccacgtccggtgcgcttgcatatgggttacaagcg

SEQ ID NO: 45089 - DNA, 373 bp, Zea mays
tgacggacgaatacccagaggtaaacagtttgttgactcttttatctactggcagattctatgacttgggtacatgttaatgcatctcatgacctgatcgataaacactccatgcaagcgtcagatccttatatggacactcaaccagaggggtatcgggccttatgcaggggagagggctaccccagatttccataccatctccgaatggaataggggaaaccatggtaccgagaccatccactaactacgcgggtgatagacatgtgcacttggctaacggaatggtactctatattatggtcgaacttccactaaatataacctgcaattcaacttgtatgtcaagtgccaaatcctgactagcccatga

SEQ ID NO: 45090 - DNA, 473 bp, Zea mays
  unsure (1)..(473): unsure at all n locations
gttatcactaagtactctacactataagataataacatcgaggcgactacatgcaatataatatatgcaaccaaacatgatattaccaaacgtagcttgcttgtgcaaggtaaccaaacgccttggcattgcatatgtttatgttggtttgggctgtgctgcgtaaggtctaatgcaagcaagcaatcacacccaatatgcaaatgttaccgatgttgaagcttgagactgtganactttgcagaaattagtaaatacattgtgactaatatgcatgagatatcgcagggaatgatacagaaggtagacatattcataagccatccagtatatctaaagtatgcttggctatcataccatcaaactgatccaccattttttctgtctaaactagaagtcaaatcaatagccacattattcagaaaagggtatactagtaaatgacacaatgacatctacaattaacaacagta

SEQ ID NO: 45091 - DNA, 264 bp, Zea mays
ttgaaagccctcccgaccacagttctggacgctgcatgtattccacaatgcccggcgtggatttcctcctacaattgctttccaatagccaattgaatgcacttcatgaggactcctgccgcacatcttctgtacagtatgccccctatgatgttgtagtgggctgactgccttatgatgcattccattgatatgggggacagatatcccccgggtcctctggaatggtaaaagacctcacgaaaaggccatgggcgcaataat

SEQ ID NO: 45092 - DNA, 396 bp, Zea mays
atatgggaaatctaactttttttatgctgtcaggcttgcaagatcagttctgatgtgcgattgcattctacagatgtcagaaaacaggcgcagatgaggaaggcatgctcatcaggagcacgcagccccgccagatgaggcaccccgtcatagctgccacccccgctcccgatgaccatcgagcagatgttcttaatgctgacttaggcagttcaagccatcggtcatactctggccgccattcatcagcagcagcatccaccacctcagcctcaaatgcccaaggacaagcgtgctataatcatgagaagtcaccccccggtgttcgctcactcttctgatcccatggatgctgaagactggctgcgcactgtggagagggagttgccaccactc

SEQ ID NO: 45093 - DNA, 210 bp, Zea mays
accgcagaggacagtacattttatggaactcatacatactgtggtgtgtcggccaaagactacgactggtaggggacgtatacaaatctcatgcccttctctgatgattttagaagatatgggtatgtatacttaatgaatcacacatgtgaatacttcgaacagtgcaaagagtttcacaatgaagctgaaaatcgatggggcgtgaaa

SEQ ID NO: 45094 - DNA, 446 bp, Zea mays
  unsure (1)..(446): unsure at all n locations
tcgtcatctgaaagacaattaccttgaattatagatataatctcagtcctccagncntcactatggacaggggatattgtaagcactgctctttctaggagttcaaccgaaggtgctntaattgtctcaaaaaatactttcaaaggtagaggaagcccctgtgccgctgacttggctagcaaatcagcatgctcattatcccctcttggaatattcttaacaagaaaaccttcgaaagaagcttcaagccttcgaactatgtctagatatttctcaagcttctggtctcttgccttgcaactcttgtcaatatgactagagataacttgagaatctgttttaagtactgcccttcttattcccattgcctttagctttcgagccccaaagtagagctcttattcagcatattatttgtcaactgaagtcagcctttgcgcatatca

SEQ ID NO: 45095 - DNA, 459 bp, Zea mays
  unsure (1)..(459): unsure at all n locations
agcttctaaagggagaacacattatgggactaatctatgttcatttctagaaaaacaggggttgtagcgcatgtcatgcagggaaacaagtcggcgttcattatccacacaagaacatcatgacgactgacaggccactctagctcctacacatggacctatttggcccgatagcttacataagcatcggcgggagtaagtactgcctagttattgcggatgactattctcgcttcacttgggtgttctttgtgcaggaaaaatctcatacccaagagaccttanagggattcttgagacgggcttaaaatgatgtcggcttaaggatcaaaaagattagaagcgataacgggacggagttcatgaactcacaaatcgaaggctctcttgaggaggagggcatcaagcatgaggtcttttctccatacacgccacgacaaaatggtgtagtggagagga

SEQ ID NO: 45096 - DNA, 503 bp, Zea mays
  unsure (1)..(503): unsure at all n locations
actaagctgggtttgccacacaagagcatccccatcattatctcattattggtttaacaacattaataagggcaagggaacaaatacaacaagggtacacttttcattggttcttatcatcactttgttgattttgatgtggtaatcgtggatgcttgctctcttttattaggacgttcttgggagtttgatattgatgctattcaccatggaagatctaataattatactntgatgcataaggaaagaaatntttgttccttcttatgactccctgaaggaccgacgaggcgaccagagaagggtgaattttgaccaacttaataataaaatttacttatacttaataattgctacataaaatttgaccaactntaaaagcaatgctcagcttcaaccatctccttagataagccttacacttcacgtgagctcccacctttgacgagttcatgcacattattcctcacaacttggtgagcgatgaacgtatgtgagctcac

SEQ ID NO: 45097 - DNA, 465 bp, Zea mays
tgcacgcatgcaagcttaccctgtcccatattcagggcatgtgtgttttaagatagtccttgatcaacaggcctacatacgcattcattccttaattgacccggacggaacatcacctgttcatcgcccaagtcccgatttaagtacttccacccttatgattgtttgtgttccttatgatgaaaagagcattatagggaactctgtagtaagatcccaccacgctctcaatgaaaatattcttgcaggtagaagccatctttcctcatgataacccctgagcaaggccttaacgcataagacaacctctatccacaagatctgagcagggctaagcatttttgtaaatcatattctgatactccatccgaagtatctataaaggtatggatatcaaggaatgcaatgcattatagggttccacgcaacttctataaacctaatgcacatttcactagacttaaa

SEQ ID NO: 45098 - DNA, 464 bp, Zea mays
  unsure (1)..(464): unsure at all n locations
aactcagcttccttctaaccccaaacgcganactnctttcattggtgagactttcttgttaacatagtcttcttccacgaaatataagggcattcgctgtgtgtctgcataactcttctgacgagcttgtgccttcttcattgttggggcgaaggcaaagacgccacccttcgctcgaggccttcgctgcagccgctggtccgacagagacaaagcgggcagggacacccttcgcaagactcggcacgttgactaatgcctgcggcgacggtctaccacggcgcgtcctcgttcagtcccaaggcccacgtgcgatctggcccattgtaacaggcctcgcgtggcccgctctgtattacaggcctgacttgtaaaggagtactctgaattaccggctgtaaccctgctttatgggaatattctggggataaaataagtgtctgagggcacatgcgtccttaaca

SEQ ID NO: 45099 - DNA, 450 bp, Zea mays
  unsure (1)..(450): unsure at all n locations
gcttcngctccatctatattgaggatggcttttgttttgtccagtttctntcggctgttctagcggctttctgactcccatgaacagcaatgggcccttgttccgaaggtatcttcatgcataaatatgttggatgaagtattgcttcgaaagcattgagtgtcccacgaccaatgatcgcattgtaggggtattccatatcaacgatggcaaacacaacctgttcagtccttgtgttgtggacgaagccaaaggtcactgccattgtgatttttccgagtgctgcaatgtgcctttctccgaagccacaaagagggtgtgtaagatcatgaatcttgtcttctgcctcttgcatctatctgaaagccttagcaaatatgatatccgctgcactgcctgtatcaaccagaacatggtggaccagaaatctcttgatgacacaagatatga

SEQ ID NO: 45100 - DNA, 492 bp, Zea mays
  unsure (1)..(492): unsure at all n locations
gacaagaaagataagccaaacagatccaacctccttatgatatcacctctgcgggagtgaacaagcctatggaggacgaaactatgatttgtaggctatatcacacagaaggtcacaagtctttccaatacaaggcgaagaccggngataagcaaaggccaaagctcaagcaaaagagatatgggtgggttggagctataaatacacctccaaccagcccatctaatacacaagagctaagcaataacttcaattcattagagtaagactcccaaatagattaagcctctcaagtgtcataaaagagataattgagcaaagagatagtctttggagggatggattcggatcagatacgcatgaaaacggatccaaatgtcactgtttaccatattttaattcgaatacgaatacaaatactatcggatacgaatacaaaacggatatttcgaatttcggattacattcggatacttatttgatttggacata

SEQ ID NO: 45101 - DNA, 383 bp, Zea mays
  unsure (1)..(383): unsure at all n locations
caccgcggctgccacttataagaattttttcctcatgatttttatgccagagcccacccatattagtcttaacaattatgccagtgtctatttcagcattatcattatggaaatcaactaaatatagttgaccatctaacactcccctaaaagctagtgaatcatcatttcttctaaagacgataacctcaacatcagtaaataaacagttgtatcccattntgcataattgagacacagaaagcaagttgtaacctatagattttactagaaatacattagaaatggaatgttcaggtgatattgaaagtcgcctagagggggggtgaatatgcgaaacctggaattacaaacttaaacacacactatggcccggggtagcg

SEQ ID NO: 45102 - DNA, 490 bp, Zea mays
  unsure (1)..(490): unsure at all n locations
tgcttcaactgaagggtcctttgtgtcatccacggataaggctgcttcngctggggccagggtcttgacatcgtcgcaccccgccttcttcaggatggccgaaattcctctcgcaccagagaacgcacagacatccccgcgatcgcttaaaatttcttcaaaagcttcggcctatccacatatccattcgataacaccttcagggtcacctcgcatgaagttatcttcgttggaataggcatcgacgttggcgaagctagcctttatttttttccacgcagcccaaggatttttcaaaacatatttctttggatgcgtgaagatcttcaattgttttatctaaatggcttttccaatattcactgatatctcgggtagcttctgcaagaccgcatttttcttttggcttcngtgcaattgtttccgaagggcttcgatttcaatcttctggagttttagcctgagtcttgaaactagcctcatcttcttt

SEQ ID NO: 45103 - DNA, 452 bp, Zea mays
  unsure (1)..(452): unsure at all n locations
agcttgcacttacgaccaaaccgcactcgtattcatatcacattcaatggctcaacaatagtggtaaggtcaaggtaaccaagctggtacgaattaattatgctattggatcatatcgtgatgttgttgactgtgatgctgtgcctatggatgcttgtaatattctgctaggtagaccatggcaatttgattcagattgtatgcatcatggtagatcaaatcaatattctctcatataccatgataagaaaattattttgcttcccatgtcccctgaggctattgtgcgtgatgatgttgctaaagctaccaaagctataactgagaacaacaagaatattaaagttggtgggaataacaaagatgggataaaattgaaaggacattgcttgcttgaacanaaactgatgttaatgaattatttgcttccactactgctgcctacgccttgg

SEQ ID NO: 45104 - DNA, 445 bp, Zea mays
  unsure (1)..(445): unsure at all n locations
tgctctatgttatntggtagaccatggcaatttgttaatgatctccgtgcatcatggcaaaacaaatcactactcttttatgcataatgagaagaagcttgtattgcaccccatgtcccccgatgctattttgaaggatgaagttgctagagctttgcaagagaaaaataaatctgttcataataaaaatctaggtgctgcacaggagttggtacaacataagagtgacaattctaaatctactcaagtgaggaagacagaaatacaactgataagtgcttgatttcttgcttccaaatctgatttgctcgaattaaatgatgttgcttcaatctgctatgtatttatttgcaaagatgctntgttctcacttcacaacataccatctactttgccttctactgtcactaatcttttgcaggaatatgctgatgtatttccaaac

SEQ ID NO: 45105 - DNA, 400 bp, Zea mays
  unsure (1)..(400): unsure at all n locations
gcttagcttcaaacatagtttcagtttgttcatcgatcaaatgaagattatgatgtttacatgtagacaatccatataattgtacgaaggaaccatacggaacctaaattctgtacctgcttgacagactcatcgatctctggcccgatgccatcgccgggaaagagcgtggcacgaatggtctccccggactccgatgaaaacggcgccacggccggtgccaaattcctgccgattatccgcggcaggacgcttccctgcagcagcctccggagcgccatgcctgccccacacagccctgcgacagcaaacagacctgatcgtcgcgggacggaaagacgcctgcatggtgcctaacaactcanactatacacgaaaccacccgtcctcacgagcggga

SEQ ID NO: 45106 - DNA, 493 bp, Zea mays
  unsure (1)..(493): unsure at all n locations
cntgcacgaaaacgagaagatatgaagccttgaggtgcttgatatagtctagccaattcttattaactcaagctatcaatcttcaaagatctatatccatgattgacccaaggttattttttcaaattactatgtcttaaactcatatcatctcgagggaagatattgatgttgtaggaaacaaagaagtatcatgtgccaaaaaaatcaagacctactacaaggagganagccaaaggatggtaacatttatgcttttaagtgcaattatcttacaatatcatttcttatgtgccttgtgtagtcacatagaaaaagaaagcacttcaaatgttcttaaattatgtcaccattctttgaagaaattcctctcatatgatagattgggtatccatcatttctatattatgacaggctatatgatttaaactggtggaagtaccccatggcatgcatttcaataatcatcttattattgccatgaatctagata

SEQ ID NO: 45107 - DNA, 459 bp, Zea mays
  unsure (1)..(459): unsure at all n locations
agcttctaaagaatgataggaaggattaagaatagtttgtgagagnganggngatatggctctatttgtaaggaaattcaacacactcatgaagatgaaaagaggtcaacctataagaggtcaaacatcaagaagaaatgctttcaatgatagaaaatgttttgagtgtggggaacctggtcacattgccatgaattgccctaacaagaagaagaaaggcaaagatgaaggtgataagaagaaaaagaaattctacaacaagaagaaagatggcaaagcctacctagttgaatgggactcggatgatagctcggatgatgatgatgatgacacctcatccaagcttaatgccggaatttccatcaaggaagctccctcactcttctcatctccccattgtctcatggcaaagggagatgctaaggtaaaaatcatcaccgatttatatgatataaatga

SEQ ID NO: 45108 - DNA, 402 bp, Zea mays
  unsure (1)..(402): unsure at all n locations
ggagttgtacaagcatggagtttgtgctccgctactcaagtgtttatccagaaccgaaggtatagagttgatgaaagaaatacatgcaggcctgtgtggatctcacattggatctatgccgctacttggaaaaattttccgcccaggaatttattggccgaacgcagccttctgatgcagcggaattagtccaaaagtgcgaacgttgtcagaaatgtgcaagagatcaaaaacaaccttcgtccttaacacagctcatacaacccatttggccgttgcaaaggtggggccttgacttgttaggtaccgtaccaccggcccaagggaatctaatatatgttgtattggcggtggaatattnttctaaatggattgaggcaaagcctttagtcacaataactt

SEQ ID NO: 45109 - DNA, 370 bp, Zea mays
ctcatgtacatgtattgtcatgtatagacaacaatgaagatactgttgttgaagaagaagatgtactgaagctgagaatccttcagccgagaacaacttctacttcaacatctacggagtggaccctgaacctcctacaacacaaggcaagcctcggcgcattacccctttccttggtgtgttaaaaactttatcaccttatatgatgccttatgtgataagagttgtgtgcccaacaatcgatgcattcccttccttggaaactgattaccattccttgttcctaatttacttaaaggtttctgatgcttagccttgctctataaaacttcacgtgcatatatcatagtggccgagtataataaactaa

SEQ ID NO: 45110 - DNA, 406 bp, Zea mays
  unsure (1)..(406): unsure at all n locations
agcttggacagtgttttgcgatggttcttgtggagccttcngngcaagagcagctgcgggcttagtggcacctctctaagtcaaaacatgttatgcagtcaaactggatttcagttgcacaaataatgttgctgagtacgaagcacttctattggagacaataaaagcaccttcagttgagctcatggagagagcaatgcttactatttcttcagtacacagtgaagactggagaactgaaataatatctttccttccaggcaattgtcttttaagtgacgaagcttataacaagagaatggatgcagaacaagaccatatgtgtaatataaggggaattgtataacatggaggttgttcaccactcttaagtggttatcagaactgaaggtatggaattgatgaa

SEQ ID NO: 45111 - DNA, 368 bp, Zea mays
tggcacttgcctctaatcaattcagccaagaagctttttgtatttgtacctataatacctagaaataggtcagaagacaaccattatcttagtggtttgaggaccttctaaagaaagagacccccaaaagtagccccttgcggtattagttcgtttttttgcaacaagctcttatcccgaaacaaatgaaagtcatgtgccgaaggtatgaaaaacaccttttccgagcttaataacgaacaatgaaagtgattcgtaagagtcaatgggggacccatttataacgtggcttgctgaaattataaacagccagcaaagcgcaagcgccggcgagctgagcatccatgacggacgacagcaggatcgat

SEQ ID NO: 45112 - DNA, 394 bp, Zea mays
atcttgccaatacttgttttatctcagcatatgccaacacagcaactacagaccatacgagtatcctggtctttcgcatgctggggactggatatgattggacctttcacgaaagctcaagggggatatactcatgtatcggtggcgattgacaaattcactaattggatagagttcaagcccattgctcttttaacctttgctaaggccgtggaattcatacaagacatattattcagatttgggataccaaacagtatcatcactgacttatgatccaacttcaccagttcataattcttctacttctgcgagcaaaagagcattcaaatcaagtatgcaactgtatcacatccaagagccaacgggcatgttgagctagccaactgaatga

SEQ ID NO: 45113 - DNA, 482 bp, Zea mays
  unsure (1)..(482): unsure at all n locations
tacaagttcatgaaattcacgtctaaatgaggaatcatacgttgtacatgatgctttctcaagagaagtacttagggcatcagaaataaaagttgctacaagaaagaacagaagtccataggtgatctgcaatgataaagttagtaactttgtgtatcaaaatcagattatacagatgcacacaaacaacatgtcaacaaccatcatgtcattccagagtaatttgttcaaacttcaaacctggagctccacactgctattttgatttgcttcagctgcacagtctttcaatattgaaaatacatccttaacctctttgcggcctaaatgaaattgaataaagcattagtgcttgcttcccataaattggaatgtccaanaggttaaacaagcacagtatgaaggctcatgccactggaacaataacattacctgggcagcgctaggaatanaaggccaatctgatagaggcaatttaacac

SEQ ID NO: 45114 - DNA, 331 bp, Zea mays
gacactactctattcactaaaagaattggtaaagaattatttgtttgtcaaatctatgttgatgatattatttttggatctactaatgaattattttgtgaggagttcggaaaaatgatgttaaaagaatttgaaatgtctatgataggagaattgagcttctttcttggccttcaaatcaaacaattgaaagatggaatttttataagtcaatcaaaatatttgaaggacatgctcaaaaagtttggtttataaaatgctaagcctatcaagactccaatgtgaacaaatggtgaattagacttagatgaaagaggtactatggttgatc

SEQ ID NO: 45115 - DNA, 440 bp, Zea mays
ctgcaagcttggctgtcttatgcggctagcatatatatatattattcctacatttaactcggccgaaaagtctaagtgccatgtgtgtgttgaatcaaaacaaccccgcaagcctcataatgctgttgaggcgatgagtttgacacctctataacttgttcattctgatctgtgcgagatgaatggaattctgaccacaagtggtaaaagatactttctcacttttatagatgacttcactaaaatttgttatgtgtatctcttagaaacaaaagatgaagcggtcaattagtttaaggcctataaagctgaatgtgagaaccaacttgagaggagataaaaacgtttaaaggccgaccgatgtggagaatatttttctaatgtgttccatgagttctgccgggaacatggtattatatatgagacgacaccgccctttc

SEQ ID NO: 45116 - DNA, 274 bp, Zea mays
  unsure (1)..(274): unsure at all n locations
tgccctcacaagaatggtgtcanatgatatcactagaatgatatttaaataaaccatctgaatgataccagttgataggaactcctcctaaatgagtgttctctttagaaagaagtttctctccctttttagagatgaagaaatactccccctgacagagatcctctacttatgaaaaagcatgttgaaattagaggtgcaagacatgatttgaaaagactaacttcccttatgctatgtaacagaatatgattaactacttatgctttttgca

SEQ ID NO: 45117 - DNA, 422 bp, Zea mays
  unsure (1)..(422): unsure at all n locations
ctgcagctttggccactggggaagatgaagactctttgcattctcgttttccagcagctgccgcttgnggtcaagcggcctctcaagggagggggactgtcaccgaccctgttcgtcgctcgactgaagatgaggcagcgcttcatgaatcaaggcagccattgggccgactggtgcgtatgcccaatatccgtgtgacacggaaagactgggcacgctgatgaggcatgcgtgtaatacatactagctgaattgatatttcgcacaggaagaacatgaacaaagttgtcccatctttcccagtttcatagattctatccgctcttcttcctcgcttctatccttccacggctggctcaacgactccaggcttacacaacaacagatgtgtgtgtcacacaatggtctgctcataatacatc

SEQ ID NO: 45118 - DNA, 472 bp, Zea mays
  unsure (1)..(472): unsure at all n locations
tcgacctcactttctacctttcaacggagaagatgctgtctgtattaactaaaatgattgtttgacttgcctctctgaaagtgtcgcatctatcggaaaaaatatacatccaggatgcaaaaccatctctctgcatcctctcacatccatcacttgtagattaaacagaaaaaaaaagtgaccaagcagtagtctttgatttctgtttgtatggacttgtagatgatagatgtgagaggctacaaagagacagttntgcatccggatgcatataattttcccccaccatctcctttgtctacattttgttacctctcatttacaccacttacattgtgttaaagatttcaattgggcaagtactntcgcatatccctccctccaaattaagatgttggatatgcgtcacagatgacagtcctaccttttagtagcttccaatatcanatgcagggcccaactatgtgttcag

SEQ ID NO: 45119 - DNA, 113 bp, Zea mays
  unsure (1)..(113): unsure at all n locations
agctatgtgtggagttgggagaagataagatctctatgttgtgtcctaatgaacgtaatagctcttgtaaggtgtanaagtgtaaaaacttggatgccattatatgtggggtg

SEQ ID NO: 45120 - DNA, 477 bp, Zea mays
  unsure (1)..(477): unsure at all n locations
ntaggattntctcagaagtggaggaattggattgccgcaattttgtgctcttcctcctccacaatcttaatcaatggccaacaaacatatgcaatcatgcacatgcgtggcgttcgtcaaggggacccgctatcgccgctcctgtttattttagctatggacccgctacaaaggatgattgagatggcggcagatgttgggtttctggggcgggttctgccacgagcggcaaagcttcgctggtctctttatgctgacgatgctggagtgtttgttaaagcagattaagaggattcgaaagttctgaaaaggattctggaagtttttgaaggatgttcagggctgaagatcaattttgattaaactgaaattttcccaattcggtactccgagtctctctggtcagaactgatggaggtgtttcctggcaaatactcataattaccggcgaagtatcttggtctggcgcttcatttc

SEQ ID NO: 45121 - DNA, 443 bp, Zea mays
  unsure (1)..(443): unsure at all n locations
agcttgaaggacaattgaataagcaagctctagtatacttcgttttctaagttctcagtttatcaaagaaaaactatacaaaattggaaaaggtgctgtatgctgttttaatggcctccgggaagcttcgacatttatttcaagcataccatataattgttccttcatcacagcctttgaaggatattatgaaaaacagagaagctactagaaggattgaaaagtgggctacagaactcaacaagttcagcattgattatgtgcatagatcttcgattcaatcccaggcgctatcaaactttatcgccgactggacgccannggcttaggaggaagaagccagtaaatatgcccgagcttggacactattctgcgatggttcctggggaacctttggggcaagtccagcttgccgtttaattgcaccttccaaatcagaacat

SEQ ID NO: 45122 - DNA, 357 bp, Zea mays
  unsure (1)..(357): unsure at all n locations
tgagaaaatntagacacggnccgaaggattgaagcttcctttgaatggttttctgtcaaaaacattcctcgaggagaaaatgaacatgctganttgctagctaagtcagcagcacaggggctgcccttaccttcggaagtattntttgaaacaatataggcaccttcgattgaacttcttgaaagagcagtcctcaatatatctcctgttcatagtgaagaatggagaactgagatcatttctttccttcanggtaatttcctttcagatgacgaagcttataacaagagaatagaggcaagagctcgaccatatgttataatagaaggggagctgtacaagcatgggagtctgttc

SEQ ID NO: 45123 - DNA, 404 bp, Zea mays
  unsure (1)..(404): unsure at all n locations
agctcgncgcatacatctacaatttgtaacttagtggtcttaaatgagtacactgattccggttcactagtatccacaaccccatcagtcactagactgcgaatgatgtcaacatgtgtctcgatgactctaactgagctctcaaccatgtcaagtggctctttctccatctataaaactgaaaacggccgagtttcactataaatggagataagaacaagtcttataacatagggagataataacattgccatggctatgtactctcatgatgtatgtggccataagcactaaaaatagacttgttgccccaatcactatggagattttctaccaagaaggggtcctagtagttgcatcaactattcatgacacaaatcttattagcataatgaccaacattt

SEQ ID NO: 45124 - DNA, 223 bp, Zea mays
  unsure (1)..(223): unsure at all n locations
cgctctcactacttggccatacaaaatataacctagagtgttatggatggaatcattcccccaactttnttgtggtgtgttcatagagcctctggacctacatgttcaattttggcatatttatcaaagtgtttgctatacctattaaatttaattcatttaattgaatttctttagataattcaaatttgaactacaagntactaaaaactgaaaaacaatg

SEQ ID NO: 45125 - DNA, 362 bp, Zea mays
  unsure (1)..(362): unsure at all n locations
agcttgtgaaggttcttcatccccacatgtgctaagcggcgatgccacagccagcccatgctagtcttagctattaagcatgcatctagaccggcctcttcttttgcaaaatcaactaaataaagtttgccgtctaatacacccttaaaagctagtgaaccatcacttcttctaaagacagacacatctacatttgtaaatagacagttataccccatgttgcataattgactaacagatagcaaattatatccaagagactctactaaaaacacattagatatggagtgctcattagaaattgcaattntacctaacccttttaccttgccttaattcccatcaccgaatataattgaatc

SEQ ID NO: 45126 - DNA, 123 bp, Zea mays
tggtctggcgcaccggactgtccggtgtgccaccgtacagtgttcggtgcaccagggtggatcaactcaaactcctcagcttcgggtttctggaaaatgctctccgttataattcaccggact

SEQ ID NO: 45127 - DNA, 197 bp, Zea mays
cgacccggagccataagcgccgcaagctgtcacccgcagaacagtcgtatacaccggttctgtgacgggctagcgttagcgaactacactccgacctatattattcaggaaagggacccattccccccccggttctactgtgtccggccagcatacactgacagccctactaaacgcctcgagaaccggtcgcaccc

SEQ ID NO: 45128 - DNA, 467 bp, Zea mays
  unsure (1)..(467): unsure at all n locations
tcggcgacggttnnnaaatttggtagcagaacagtgcatatagcagtaaatgttgtggtaacttcacacctactcgtctgtttatatagtgccgcaggtaagaaggcgaagcgccagaagttttgcaccaggcggacacccgctcacactcgctgtacggtggaccgcagagaccgaacagtaactctgcaaggtggggccgctacgcgcagggaaattgaatcgtttctcgacaacgagctcagggaaggtgttttttgagaccttcggcgctccgaagcttaagaaacttttttcacggatcaagctcgttacgaaaaacgatctagcaccgcgaaaggggctacntgtgggtctatgcttcgtcgccgaaggtcttataaaaagaagtgatcctcggatgaagctgtttgtgtaagatagccgaaggttcctctttctaaagcttcggcattggaaaccgactt

SEQ ID NO: 45129 - DNA, 295 bp, Zea mays
gaccttaagcacctgcagctgcaacttgcaacccatttgcatttaaatttattctgagacagttattcaatcatcctcacatgcaaagcgggtcttatccagtggcttacagaaaatatccactaattgaacttccgacctcactccttctaaaatgagatctactttccgaacatgatctctaacgaagcgataacggaaatcaatgtgctaggtgcgagagagttgtacaaggttcttatcaattataacagcacttctattgtcacacaccaaacgtatcttttctaaaact

SEQ ID NO: 45130 - DNA, 394 bp, Zea mays
ggaagccatggtaagtagcataggccaataatattcgaattgactcaagcctagctacgggtgcataggtttcatcgaaatccaaaccttcgacttgggagtatcctttggccacaagtcgagctttgttccttgtcaccacaccatgctcatcttgcttgttgcggaagacccatttggttcctacaacattttgattaggacgtggaactaaatgccatacatcattcctagtgaagttgttgagctcctcttgcatagccaccacccaatccgaatcttgtagtgcttcctctaccctgtgtggctcaatagaggaaacaaaagagtaatgctcacaaaaatgtgcaacacgagatctagtagttacccccttatgaatgtcgccgaggat

SEQ ID NO: 45131 - DNA, 343 bp, Zea mays
  unsure (1)..(343): unsure at all n locations
agcttgactntaagaaacttcgtagccagtaagattgcgccagccgcaatatggtgccggttaaattgcaggcaaagtgaagtgcggagcctgcacaccccttttaagggatagtaagtaggcatgtttgtggattactatttgcagtgatgaaaagtaattttagcatacccatcattgacaaaattccaggcaacttgcgcaagtgcattttgagcaacctcaaattttttattgcttaaccaagggcttgtaaagatggttcacattaaaatcaaaaccaagtgttacaagaacaacacgtttcccaagtaaaataagttccttctgttgttcatatact

SEQ ID NO: 45132 - DNA, 466 bp, Zea mays
  unsure (1)..(466): unsure at all n locations
ntggtgctgacagtggcgcaccgaacactgtccggtgcccatgccaagcacttcacgaactggccactctcggttntttccgagggatgctatgttataaatcaccggactatcttgtgtgcaccggacagtgtccgatgagccaacggagcaacggtcaaatgtgccaacggtcgactacgtgaacagtaaaaggcgcacaatgcagaagtcagaagtcggagcagcgaagtcagtacgcaccggacatgtacggtgtgccaccggactatccggtgcagcaaaaggacaaaagacttcaacggtcaaccgctccaaaccccaacgggcagctgacgtggcacacaccggacaatgaacagtaccatgttcggtgcaccaccggattgtccggtgtgccatcgacagcaacggctagaaaaatggtggaggggtataatacccccaccaccttcatcaagccatc

SEQ ID NO: 45133 - DNA, 165 bp, Zea mays
tcatgaagatttgctcgtttatttattggtgctcaaagttgtgccaatggatccccggacctcacaagtccatgtgcgagtgatgcacatattttaggggagaagtgctacaacttgaccccttgagactaacaattgtgtgtgagtttacttaatgtagtctca

SEQ ID NO: 45134 - DNA, 367 bp, Zea mays
agcttgtgaagattattcattccaacatggtctagtcggcgatgccagagccagccgatattagtcttagcaattaaacaagtgtctagttcagcttgattatccttgaaatcaactaagtatagttgaccatctagcactcccttaaaagatattgaattatcacttcttctaaagacagtaaaacctatatcagttaaaagacagttgtagcccattttgtataattgagaaactaaaagcaaattgtagtctaatgaatctataagaaaaacattggaaatagaatggtcacgagatatatgcaatttacccaaacatttgacccaaccttgatttccatctccgaatgtgatagctctttggg

SEQ ID NO: 45135 - DNA, 390 bp, Zea mays
  unsure (1)..(390): unsure at all n locations
cgctctggagcaccgaagaagacttcggaggcttcttttgttaatatctgtagaaacacttttggaggttctttgtacaagaaaatgtatcatttggcaaagaattgtaactgaatgtgaatagattcttgtaaatatttgtaaatgcttcgtaatgctgctttaccttttattcgactattgtctgctttgcggtcgatgaaaccaccgctcgcagctttttgagtcgaaggcgaanaacacctttccttcttttcgttcacattgaagcacctttgggccaaaatcaaagaatgggcccctcatatataacaaagcatttcctttttttaaaagcaatcttcatttgaaacaaagcatctttcgtcacaacgaagcattttcttggtg

SEQ ID NO: 45136 - DNA, 420 bp, Zea mays
  unsure (1)..(420): unsure at all n locations
agctctaccaaatggacgtgaagagtgccttcctcaacggaccaatcaaggaagaagtctatgttgagcaacctcctagctttaaagatagtgagtaccctaaccatgtgtataaactctctaaggcactttatgggcttaaacaagccccacgagcatggtatgaatgccttanggatttccttatcactaatggattcaaagtcggaaaggccgatcctactttattcaccaaaacacttgaaaatgancngnttgtatgccaaatttatgttgatgatattatatttgggtctactaacgaatctacatgtgaagagtttagtaggatcatgacacaaaaattcgagatgtcaatgatgggggagttgaagtaattctgggatttcaagtaaagcaactccaagagggcaccttcat

SEQ ID NO: 45137 - DNA, 345 bp, Zea mays
  unsure (1)..(345): unsure at all n locations
tctanagggagagcacattntaggattaacaaatgttcattttgagaaagacaggatttgtagcgcatgccaggcgggaaagcaagttggagtccatcatccacacaagaacatcatgacgaccgacaggccgcttgagctactccacatggatctattcggcccgattgcttacataagcatcggcgggagtaagtattgtcttgtaataatggatgaataatctcgttcacttgggtattctttttggaggaaaaatctcaaaccccagagaaccttaagggattcttgagacgggctctaaatgagatctgcttgagaatcaagaaaattagaagcgacaac

SEQ ID NO: 45138 - DNA, 403 bp, Zea mays
  unsure (1)..(403): unsure at all n locations
agcttgaaggggccaggcaaggggagatggtcgtgcctgtacgtgtggctggcccacagcgacactcgcacgctcgcatggctagcccgcaacagcgacggcgcttgcacggcgcccgtgctctctgccgcggctaggcaaacgtgtgtgcatgaggcaccacaacagatgcaatgaggcgagggcgccatatctggngcacggaggcgggggcgccagagaagacctaactcttataccatgtgacagattgagattacacttccattgcatagagaatggttacatatatacacctatggaaaccctaatccaatagagaatggttacatatatacacctatggaaaccctaatcctaatggagcggcaaccacatacatggataatataggaacacacta

SEQ ID NO: 45139 - DNA, 188 bp, Zea mays
  unsure (1)..(188): unsure at all n locations
ctatgatactaagcttcgtcttaaccgnggctttgtatacccgcaatctaacttctaatgtacctggttgcatatttctcttggaaacattgttaatatgtttttaggacctttcaagccgaagccccacactttatagcagactttgttgatgtatgtgcagactgtaccagtgtgtcaaattctat

SEQ ID NO: 45140 - DNA, 386 bp, Zea mays
  unsure (1)..(386): unsure at all n locations
agcttaacgcgacgtacacatatagagagatctggcgtttacgaagtgaaccaagcaaagccaccaagcgcttgcttatcctgttccggcacatacaaatccgtgcaccacgtgtgtatgctctccacaaacgcgagggcgatccgttgttaaatatgggtagtatatacgctacaggctaaaaccgaactacataatacagaatcatataatatatactatcttgtagtgacgggcctagaaaatttcaagagcatatggtcaaagattaanaatagatagaccttgttcaattgttgtccacctcaaactatatattactcgtgatatacgtatatgtagcagttgattatggcataagaagcccgtacgtctgacgcagacag

SEQ ID NO: 45141 - DNA, 408 bp, Zea mays
  unsure (1)..(408): unsure at all n locations
tggcattgggtccctaagggaaatgtgactcaccttgtaggacccaacaagagttgggtacctaagacccaagcctaaatttgccttgcaggtttatgcattcgggggttcaagctggattatcgacagcggatgcacaaaccatatgacgggggagaagaagatgttcacttcctacgtcaagaataaggattcccaagattcaatcatattcggtgatgggaaccaaggcaaggtgaaaggtttaagccagattgcaatatcaaatgagcattctatctctaatgtngttttaggtgagagtcttggatataatttactatctgttagtcaattatgtaatatgggatataattgtctatttacaaatgtagatgtgtctggctttagaagatgtgatggttcact

SEQ ID NO: 45142 - DNA, 423 bp, Zea mays
  unsure (1)..(423): unsure at all n locations
agcttggatccagtcggactcaggtcccacctatagttttcgtacaagaaatactgcatccgagcatttcactagatcgggtggaggaatgcaatgctctgagccaaccagagtcaaattctgatgactggagggagccgatcatcaagtacataaaaaatgaggaggaattagattacaaaaatgcagcagaacgaattgcaaggcagtcagctcattatactctcattggggaaacactatacagaagaggcgcatctggagtcctcatgaaatgcattctcttagccactagaaagcaactgctagaagaggttcatgctatgcaatgcgggatacacgcagcatccacgaccttggttgggaaggtcttcangtcgggtntctactggccaacagcaaagagtgatgcagccgagttag

SEQ ID NO: 45143 - DNA, 470 bp, Zea mays
  unsure (1)..(470): unsure at all n locations
cgtgaagattcttcatccaacatgggctagtcggcggtgccatattcaacccatgttagtcttagcaattaagcaagtgtcgagttcagctctatcaaaatctaccaagtatagctgaccctctaacacttccttaaatgctattgaatcatcacttcttctaaagacagtgacaccaatatcagtaaaaagacagttgtagcccattttgcataattgagaaacggatagcanattgtaatctaatgaatctacaagaaaaacattggaaatagaatggtcaggagatatagctattttaccaagacctttgaccanaccttgatttccatccccgaatggaatagctcngtggggatcttggttnttctcataggaggaagaacatttcttctcccctgtcatctggntcgtgcacacgctgtcgatatccaacttgagcccccgatgcaaaacctacaaacaattta

SEQ ID NO: 45144 - DNA, 434 bp, Zea mays
  unsure (1)..(434): unsure at all n locations
agcttctaaagggagagcacattttgngactaacaaatgttcattttgagaaagacaggatntgtagcgtatgtcaagcagggaagcaagttggtgttcatcatccacacaagaacatcatgacgactgacaggccacttgagctactccacatggacctattcggcccgatagcttacataagcatcggcgggagtaagtactgtttaagtattgtggatgattattctcgcttcacttgggtgttctttttgcaggaaaaatcacaaaccgaagaaaccttatagggattcttgagacgggctcaaaatgagtttggcttaaggataaaaaagaataaaagcgacaatgggacggagttcaaaaactctcaaatgaaggctttcttgtgacgaggcatcaacatgagtctcttcttctacacccacaacaaa

SEQ ID NO: 45145 - DNA, 309 bp, Zea mays
cttgacagagcgcatgatcagcgtcgctcctgtctgatctccgacgcatcctacgccttcttcgttaatttcgccgaagagcaatgcacccgcgtggtttccacaagatatagcacacgtctacagcttctctctttcaaacttacataagtcttgaccaatcatattttgaaaattaatgccttttcctctgaagtatcttcggcgactgccttcccctttataggcactatggccacgtgtatttgggcggctgcagcagattcttccacgaccatatgcgagagtatgttatcaatatcagataat

SEQ ID NO: 45146 - DNA, 281 bp, Zea mays
ggccaacaaatactctctccgccccaacattgctagccgctcacaaccactatttcttcatctgcaaacggatgaccatgaatttactgatctagacgcgtgtataaaacacatacattaaacattggatgaatccattcacacccttaaacgaatactattttgagaccgaggagacataattctcgaacatgtcagtctagtgtgattatcatacggactggatcaacagattcaaggtttgctcaacttgtataacagaatcaacttacaagggaaaa

SEQ ID NO: 45147 - DNA, 342 bp, Zea mays
ggcgggaccaagatcacagcccggcttgcttctccccatctaggggctggtggtcaccgtcttgggtgaccgccggcggatgggtgcaaccgggctgcatgatgaaaatccttgaagccgaacgatggctgaaaggtaccaactcccgcggagttgcgttcctccaaagacaaggcggaaggactgcgggcatccctcatccgggggctcggaaggtggaaagacacgatgcataagggagcgcgaagacatggtcgtctttcaagggggtcaccctccttttaaaggcgactctccctatttgtgttcccagccgtcgtgggctgagtcttctccaacacg

SEQ ID NO: 45148 - DNA, 367 bp, Zea mays
ctctgaactaacttcgctgcgtcactcttcacttgtgtgtcatagaatcctgacctgaagaccttcccgactagtgtcttgtatgctgcatgtattccacattgcccagcatggacctcgtccaaaagtcgcttcccagtagacgagagaatgcacttcatgaggacgcctgatgcaccccgtctgtttaatgtcttccccatgagtgtggagtgagccgactgtctggcaacacgctcggctgcatttttgtcatctggttctcttattccttatatacccgatgattggcctcttcagtcatcaaagctgactctgttgatcacatattaccttctatcttgaccattgaaagtcgctgaatatt

SEQ ID NO: 45149 - DNA, 360 bp, Zea mays
  unsure (1)..(360): unsure at all n locations
agcttagagcntcaaaattgtgctttaaatttcactcttatgtaagctttaattgtgttgccatcaatcaccaaaaagggggagattgaaagctctcttgtgggttttggtgtttggatgacaactcaattaaaggaccaacaagtgtactaagtgttgaataggtgcttaatgtaaagctaacagggttcaacacaagtgaacaagtgtgatggtccaaggactagatgatggatagataatgggcatcacaagtaagatggacattgcataaagtgagactcgggtgcgtagctcggagacaactgatcaagccaaggatggaggcaagaagagcttcgaggtaccaagtgcacagga

SEQ ID NO: 45150 - DNA, 489 bp, Zea mays
gacctataaaactcagcttcggcataaactgtgttctgttatccacagtaatggccttctgcactccgaagcgacaaacgatattttgccagaagaatttctgaatggtaaccgaagttattgtggctaaaggcttcgcctcaatccacttggaaaaatattctactgctactacaacatattttaaatttccttgtgctggtggtagcggacctaacaaatcaaggccccacctttgcaatggccaagtgggttgtattaactgagtcaaagacgaaggcttgttttgatctcttgcgcatttctgacagccttcgcacttttggactagttccgctgcatccgaagctgcctttggccaataaaatccttgacaaaaaacttttcccagcaaaggcctatgttcaatgtgagatccacacaggcctgcgtgtatatccttcatcaattctataccttcggctctggataaacatttgagtagtggag

SEQ ID NO: 45151 - DNA, 292 bp, Zea mays
tggttgtagcgacgtggggagcacctgaccaccgtgaagtgccatccatggcggaatatcaacctcggcgaagaaattcgcacgccatatccgctgattccgccaggtgggggcacacacatcattcccgcataacggcgatgctccaggtcttctttccacgacaagagacgcattcccgaccgatgcacaaagcggcggcaatcttcttctctctcccttccgcctacggttcacttggtgactgggtgttcgtccagatggttaagggagttatagcgggcgggtttta

SEQ ID NO: 45152 - DNA, 409 bp, Zea mays
ggaaccgaggacccgcgtcaccggaatagcgaaaccgtgctcttcggagttcattcccccgccggcgcacgtggatcgggtaaatcactgagccattttccgaatcaatgcacagatagcctctacatctccccagggagctcaccgtgccgttggattggaataggtcaccgtggtttggccggtacacccgcccccgacgaggacacccgcctgcgcgcgtggactgagcgattccggccatccccgccggcgagccgtacgtcgttgtgactgccaaaacctccccaagctaaccctacccctcgccggacttctctcgtcgccggtaagccgcgccacccctttcttctctgcgggtactgtttacacctgagagggaccgcatgtgagaagaagagaaagtcaa

SEQ ID NO: 45153 - DNA, 293 bp, Zea mays
  unsure (1)..(293): unsure at all n locations
agcttcctggatgccattagaatggcatactacaccttctccagttctgtataatttttctttgagacactaaggacctcaaatacaaaatatactgggacctgcttcttgatttgtccatcaaacttctcctgcacaaatgccgcacttactgctgagtgcgaagctgccacatacaacaacagaggagcccctggcaatggtggagttaatgttgttagatctatcangtattgcttgagttcttcaaagctttttgtgagctgtgccccattgaaagactcagctgattt

SEQ ID NO: 45154 - DNA, 454 bp, Zea mays
tcattaaccccagtggaacttattgctatcttcggatgcttgaggggctcaagaatgctagaggaagcttcagtaggatgacttccaaggttctctgcactcaaattggcaagaatgttttgacatatgttgatgatatcatagtcaaaagcacgaagcaagaaaatcacattactgatctgcaagaaatatttgccaatttcagaaaagctggcctcaagttaaacccagaaaaatgtgttatgcagccagactggaattcaattgtacaaacaacattacagaatacgaagttgtccttttggggcttcgaaagcttagtgccatggggataagaagagtagtgcttaaatttgactctcaagtcatcacaggccaggttgataaaagtagtaaggcaagagacccgaagcttgaaaataccttgcacagtccaaggatggaagcctctttg

SEQ ID NO: 45155 - DNA, 216 bp, Zea mays
tcacccttaaagctttgtaccatcacttgtgtaggacagaggctttacattgtcgaggcacagtatgttccatattgcataactgactcaaagaagcacatttcttccatagactcgcctaaaacacttagattggagtgcccttagaaatgcattcacctaacctttaccttgcttgactccataccgatataatgaacttgggattttattttg

SEQ ID NO: 45156 - DNA, 269 bp, Zea mays
gagagagatatgttgtgttttttgagctcttgcgctcggattgcttctttttctcattctttcttgcgaacatctcaattgtaatcaaggcgagagacaccaattgtgtggtggtccttgcggaaagatttggttcccaattgattgagaagagaagctcactctgtcccagggatctttttagagagggaaaaggtttaaagagacccggtcttcgtgaccaccttaacggggagtaagtttgcgaaaaccgaacctctgtaaaacaa

SEQ ID NO: 45157 - DNA, 323 bp, Zea mays
  unsure (1)..(323): unsure at all n locations
tgctgagcaaccctcccgctttgaagatagagagcaccctcaccacgtctataaactctctaatgcgctctatgggctctagcaagccccacaagcatggtatgaatgccttatagatttccttatcactaatggattctaagacggaaaggccgatgctacactctttaccataacactgtgaaatgaatcgtttgtatgcgcaatttatgttgatgatattatatttgagtctactaacgacactacatgtgaagatgttagtangatcattgaccacaaatcctatatgtctatgatgggggagttgaagtacttcttgg

SEQ ID NO: 45158 - DNA, 328 bp, Zea mays
agcttctaataacgcagagaagaacggtctgtacgaggcgtggttgggcttcggtggtcggcgctgctcaaggacctggcgcggggccgggatcgggttgcgcagatgggcgcgtgtaggggcgtcgggtcctcctggtgccggggcgagtggctgcgggcgcgagcggctgcggtgtcgcgggtctgggcgccggcttgctcggctctggcggctcgtgctgcagctgggaaggggaggggagagggaaaggccgggtggggcccacgccgcagggaagaaggagatttctctctgtcggcggctggaaaagcatgatgggaggggg

SEQ ID NO: 45159 - DNA, 342 bp, Zea mays
  unsure (1)..(342): unsure at all n locations
tggtgtagactccttcttcttttcttccgtcgctttgaatgcgatgggttgcacctcgggtgtagaggtgatgctctgctccaagttgacaatgtgtttggagtctttcatcatgagttcaaagctcacaaacttgccaataacttcctcaggagacattagtttgtatctaagatcccaacgtattaattgtacttgagtaggattacgaaaaacaagggatcttagaataacattaaccatttcatggtcatcccatttggtgctcctgaggttgcgcacttggttcaccatcgtattgagtcnggtgtacatggcttgccgctcttctactttgttgag

SEQ ID NO: 45160 - DNA, 455 bp, Zea mays
gagcttattgggcttcgtagtgtacacctaatttcttatgctagacaccacttcttcttctttctcattgttgagggccttcggcttccgaaggtcctcaaaaacatgatctaacaatgtttctatagtataatacatgagcagttaccttctgacttgagtctttcggacttaggtcaaaaccacagtgtgaagaagcacatgagatacgaagagtggagcacagccgaagctatgcgcacgggagcttcaggatgatagcagaaaagaagaccgacttatagatgaaaaagttatttagacctggatggattattatagagttattagcaaatgtaaagggcatatgtgtcattttacatgggttgctgtccgagcctataaatagaagaacagtggccccgtactgtctacgctgacttggcattcgcttttgcgtcaccttgtacctttat

SEQ ID NO: 45161 - DNA, 479 bp, Zea mays
  unsure (1)..(479): unsure at all n locations
gaccttgatactaagctgagcagtaccggcttcgtctganaccctaggaaactggtgatcaacatgtccttcagcttctgccatgatgtaattgttcctggccgaagagaggagtaccaggtttgcgcaacattcttgactgccatgacgaaagatttcgccatgactgcgttattgcctacatatgaagatatggttgcttcgtagctcatcagaaactgcttcgggtctgagtgcccatcatacatggggagctggggtggcttgtaagatgggggccaaggtgtagcctgcagttctgctgacagaggagaagcatcatcacaagcaaagtttccatgatggaaatccgcataccattcatcctcgttgaagaagccctcttggtgaagctctctgtgctggggccttcggttntgctcatcttgagcaagatgacgtacttcttcagtggcctcatcaatctgcctttgtaggtc

SEQ ID NO: 45162 - DNA, 411 bp, Zea mays
  unsure (1)..(411): unsure at all n locations
agctntagaagatgcttcgggaataggtgtggagattttctcagataaaatctcttctatagattctttgtccgtttctttttcaatttacaagaattccctcttggtagactctgaaagcccagtttcagtttccgcttgacctttggcagcttcggcctcagtttgcgtctgtggaatttccgcagctatcttcgaagtagagcttgaagattatatcggttccagcacatctagcacgttaaccattcttttcctcttgggggttgatataaggtctttttgtgccctcggcattggcacctcaacttctgctaaaggacataaaggctncgatgtctttgtctcttcagccgtcggtcttatatttttccatctccggattagggacgctcttcataatcggcaggg

SEQ ID NO: 45163 - DNA, 352 bp, Zea mays
  unsure (1)..(352): unsure at all n locations
aaatttcttgtattgcatctanggcttgtctaacctagttgagataaccgccaacaaagcgagtgaaaaagcttaactcgggtcaaacttgacaagtcttagttttaagcttttagcacttaaattcttacttgttatgcaattgttggttcttgaaatatgcatgaggtactgcacttatggggagtattcaaaactcagatcactcatgagaacccctagtgcaagccaaaatgcacatttcaccatttgcctattttctctaaaaactatctagcctatggcaaaatattttgaaaagtatatgagggtgccaatacctgtcccaacaagtgttattgtgtgtgattat

SEQ ID NO: 45164 - DNA, 406 bp, Zea mays
agcttcacgaaatggcaccttcggcatcacgtacgatctgcttcagccgaagctgtttctttctgcaggaccttcggcgacgaagcatggtcccaacagaccattaagcgcgtcgtctacatattgggcttctttcaccatcatgcgcccgctcacaaactttcctagtatctcctcgggggtcatctttgtgtacctgggaatttcacggatgaggttcacaagatgagggtcgataacggtaaaagacctgagcataagtcggatgacatcgtggtccatccatctcatggctccatagctcctaatcttggtgaccagggtcttgaacctgttgtacgtctgtggtggctcctcttccctgatcatggcgaaccttcccagctcgccttccaccaactccatt

SEQ ID NO: 45165 - DNA, 449 bp, Zea mays
  unsure (1)..(449): unsure at all n locations
tgcgaganccttccccgtctctttctagccatgtccaatgcaatatcgtatgtcatattctatgcatgtttaatctacttgttctcttgtatggagtactgtttgtttcctaatttgaatggatggatgtctgtatgtttgcactcgcataaagaacgatccggtcgaagagcccgaagaactcgcaggagaagcccctgagcagcagtcggttggtggagacaagtgtcccttgacctatctctgtcctatacattctttaattcacctcccgcattacacatttatacctaaggattgactagcttttgttatccatgtccttgtttacctatttgggttggattattattgcttagtcttatgctattgcttaactctaatcaatgaacatgatgagaatgatctatgatacgttgttntccctcttttattatgatgttatactt

SEQ ID NO: 45166 - DNA, 385 bp, Zea mays
  unsure (1)..(385): unsure at all n locations
agcttaaaacaggagaatccagtaaatatgctactttaatagtgaagggtacaatccttgataaaggtgacattacttttaccaatatggattgaaatgtagaagcatacttcatgagaaacttattctcatacttgagactatgtgagattactaagatgaagaattagtctcaatatatcaagatatagaaatatgctccccctaaagtcatgcatcaaggtttgagagaactggactcacttttaaagacaaatagggagaagcattattcatcttgatcaaggcttataagatttgcaataaataacttatgcctagttattctcacaatgaanaagaattagaatgcttataaccacatcatgattgttttgaaatctca

SEQ ID NO: 45167 - DNA, 258 bp, Zea mays
ctggatgcttgatgtattccacattgacctgcttggacttcctccagacatagtttcccggcggacggaagaacgctctttatgaggacgcccgacgcgcccactctgattaataccttctcaatgagtggatagtgagctgattgtctggtaatgcgctctgccgaagtcttgacaattggtgctcatcatcccttatatacctaatatacgcttgtctccagttatcatagtcagacctgtggtgatctatgatga

SEQ ID NO: 45168 - DNA, 390 bp, Zea mays
  unsure (1)..(390): unsure at all n locations
agcttcttaaggctggacttctgttcccttcgagcaagtttgtagttgaagtgctaaaaatctaccagatcttcctccatcatatcacccctaaagctataatgagaatggggatttttgcctgggttgtgaggagtcaggggctagagccgaccgcgaagtgtttctgcagtatgcatgaactcttatatgagatgaaggctattggcaaaaaacagtaccacaacaacttcggttgttatggatttattgctcgccccaacgcaagccacccggtgccaaggtttcngaagcgatggcccggagcctggatggaagagtggttntatgtgaagaatgacttatagggcacggaatacattatagaagtaatcatgcgccccatctggt

SEQ ID NO: 45169 - DNA, 369 bp, Zea mays
gacctataaaactcagcttctaaggcggagcacattgtacgaccaaccaatgttcattcttataaagacagggtttgtagcgcatgtcaagcatggaagcacgttggagttcatcatccacataagaacatcatgatgaccgagaggccacttgagctactccacatggatctattcggcccgattacttacattagtatcggcaggagtaagtattgtcttgttattgtggatgattattctcgcttcacttgggtgttctttttgcaagaaaaatcgcaaacccaagagaccttgaagatattcttgagacaagctcaaaatgagttcggattgagaatcaagaagaatagacacgacaatggaacg

SEQ ID NO: 45170 - DNA, 234 bp, Zea mays
  unsure (1)..(234): unsure at all n locations
aatcaagtcacacttcatacaaatagaaataacaagtgtagtgaatgctctgaaaaggggcacttgattaaatcatgtccctatattaaaaagggcttgattattaacaaggatgataaactttgttntaaatgttcaaagaagggacactctattaaatcttgtccccatttgaaacaaaaaggcatatggctagaaaagaaaatatttactaaccatgtagcaagcaagaaa

SEQ ID NO: 45171 - DNA, 487 bp, Zea mays
gacctatgaaactcagctcggttaaaagttcggtgaatattgggattataaattactctataaaattccagaagtatggactttggctattttaaatgccccaaaattccttattagaactaaaaatcctgaaactatttttataaaatactatggaaaattatgagcctagtaaaattggtctggtatttttagcatttttcttcaattttctagaaattcttaaaccctgacagaaaaagaaaaggaaaagcaatgaatagtgttggaccggaactggcccaagtcgacccatctacaggcggaagcgcgcgcgcccgcgcccgcggtgctgactttgcgaaaaggcgctcgctatttcaaataactcggaatgcgttcccgggactatttccagagtcactgacatcatacaaaaatgccactctagttctatttcttctccgaattggtccaaatccacgacgcgctcaccgtcgatgatcct

SEQ ID NO: 45172 - DNA, 448 bp, Zea mays
  unsure (1)..(448): unsure at all n locations
agcttgacattgtctccctattggaagccgatgccatccttaatgtcagggcgtctcccactatagagcatgcttctagcaaatttaaatttttcattttctaagtcatgctcattgattttagcagttaatgtagctatatgatcattttgttgtttaattaaagcaaggtgatcatgaatagcatctatattaacatctctacatctaaacatgatcaatcgtagatgtagagggtttacaatcatttaattcaacaatcttagcatgtaaaatatcactctcatctctaagattggtaataacatcattgcaaacatttaaatatttattcttagcaattaatttttcattttcaatcttaaggctagaaagagaggctnntcaattttcaatctttagtatcagactatcattatcatttctaagatggtaattgaatcatcac

SEQ ID NO: 45173 - DNA, 381 bp, Zea mays
  unsure (1)..(381): unsure at all n locations
gcacaccgtctagaccgtcagtgccacctacggaccggcctccggctctctggctttaatatctggttctcgtcccttgagtggggacgcaaacgagagccttccggcagcagcgcccgtcctgggaccatcgctgctgctgcagaggtcgccgacgagtcaccaggagtttgtcgccccgcaggctctccgatgtggaggttgttcgtacccgcggggcggaaccgaagttccgtttgtaatggcaccttgagtgatggtgtctgttcattgtggttgtcggggcctaaacatgtattttggcgtgaagccatggttcgtcctcatttcgagcactangactcgcctgtcggctagctgaaccgcttaactaagtgtgag

SEQ ID NO: 45174 - DNA, 257 bp, Zea mays
agcttctcctggacaagtgtcgcactcactgcagagttctaagctgccacgtacaacagcagaggagcccctggcgcgggtggagttagcgtcgctagatctatcaaatactgcttcagttcttcgaaagctttctgttgagctgatccccattgaaagacttcggctgacttcagcacttcgaagaatggtaaatctttctctgctgatctagatatgaatcggttcaaagatgtcagtcttcctgtcagccgctg

SEQ ID NO: 45175 - DNA, 473 bp, Zea mays
  unsure (1)..(473): unsure at all n locations
cgatggctngccatgctcttcgtcatgatgaaggttgtcgtggtcgtgaggtctcctgaggtgggcaccaatgttggtcacttgttttcaattgttgtatgaaatcaaaaacaagccaacacaaggttttaaaaaattagaaaccttcatccttgtgatgttatttctttgggataacaactcaaggatgaaggtttgatgtaatcaaatgaaatacacaaagcatgatgaagtaagatatgagaagtcatctcatgagccttagtatcttatttctcttcgcatacaaaanaatttacaatcgtaccttcggcttcttgatgcaagatagcatgaaggtgtttcanacgatgagttagacaaagttgtagcacttggttaaaggtactttatgtggngtactgttcatctatttataggggagatgaaccgacttagtataggattacaattgtgccattcattgtttacat

SEQ ID NO: 45176 - DNA, 305 bp, Zea mays
agctagtggcaccctcgggcgttctgccgtagccgaagtaccaagtctcccacctggaagtctcggggccgaaccccttgggcgtgatagcgtcgcagagactgctgataccgcgtcgagtgtagtaaggccacgtcccgagcctcttcgagctggtccagtgagtcttctcggctggtctggttgcttcggtcgtcgtacgcctttgtcctcggggaaccgtattctaagtctgtgggcaagataacctcggccccatagactataaagaacggcgagaaacccgtggctcggcttggtgtcgt

SEQ ID NO: 45177 - DNA, 318 bp, Zea mays
  unsure (1)..(318): unsure at all n locations
tatcctctcccnaggaacaagaagtttttcaatatagagcaaaatcccctggactaaaccatccaggaatctcaacagttttccactggttttcattttctaaaatagctactggacttcccgtccaccatagctcacggctcaaccgccgggccttttaaaaaccacttttctcaaacgcaccttttttgaaaacaaaacactaattttcataccacaccagactcgtccattcctgtggacacagactattcaaataggtttgaactatgcacagaggggaacactttacccactagtccggctctgcgatctcat

SEQ ID NO: 45178 - DNA, 128 bp, Zea mays
cacctatatctgtaaaaagacagttgtagccaatcttacataattgcgaaactgaaagcaagttataatctaaagagtctacaagaaaaacattggaaatggaatgggtaggtgatatagcaatttta

SEQ ID NO: 45179 - DNA, 403 bp, Zea mays
  unsure (1)..(403): unsure at all n locations
tcacttaagcacggcgatccaccctctaacagacgattagtctaaggttgtccacacagcggctgattggttggactgttgcccgtggcctgcctcangcgagcatggcccgtgcgaaacagaagtttagcgtacccgcccatgcagcctgaagagatatatttttgccagcgttgcatctgccggtacaacttgatctcgttttatatgcacttaaccaaacaaaggctagcgtcgggtcaacgcacgcgctcaaacgggacggacatgtgcagcataccaatcagaaggaaagtgatggtcatgtatctccattgcgccacggaggactgttcgtgcacctagattgacaggcttccttcggtaaggtattgctacaatacttcgctcccatggaactact

SEQ ID NO: 45180 - DNA, 433 bp, Zea mays
  unsure (1)..(433): unsure at all n locations
agcttcgggataacaacatanaaaacgaagagggaagctagaacaaaagtcgggaggtgttcacatattctggcgaccagatgatagacctaaaggaaactgctacccttatcatatttaatagtctaaatgtttaagcttcagggtataattgttaattctatcgaagatgtatttcgcacctataaataggtgaacagtgctccacacaatggggaccttttttatgtgagatctcaaatttgttatatctgttctgtgaagtgtcttcgtgctactttacacatcaaaaacagaaggtacgtttgtaaacttgtttgaacaagaaaagggaagatggaataaaatactgaaaaacatgtgatgagttnntaatttatattcaatggttcatttatngttctatttaaatggnnnttgtttatcttctttc

SEQ ID NO: 45181 - DNA, 400 bp, Zea mays
  unsure (1)..(400): unsure at all n locations
tcggcgaccaagtgatctagctcttcgagttccacgaagttgaagaccctgagcatctgnttggtgaaggcaagtgtcctctgacccattatgtcccatttactttataatacactgtcccgcatactatgaacaacctaaggatttactagctttctatttaccttgtccttgatttaccttttgggttactatggttagctacatgctagcgctttactttaatcaatgaacatgatgagatacaatgatgatactatgattttattctggatatgatgatatacttgtggcatttaggggactcgagctgtttctcgagtacccctncgtaaggacctgttcgttgagagaccacccgggataacagtgcaaccatgagggtgaaatgggatgccct

SEQ ID NO: 45182 - DNA, 445 bp, Zea mays
  unsure (1)..(445): unsure at all n locations
agcttgtgaagattcttcattccaacatgggctagtcttcgatgccagagccaacccatgttagtcttagcaattaagcaagtatcgagttcagctctattaaaaatcaactaagtatagctgaccctccaatactcccttaaatgctactgaatcatcacttcttctaaagacagtaacacctatatccgtaaaaagacagttgtaacccattttgcataattgagataccgaaagcaaattgtaatctaaagaatctacaagaaaaacattggaaatggaatggtcaggtgatatatcaattntaccaagtcctttgaccaaaccttgatttccatccccgaatgtgatagctctttggggatcatcgtttttctcgtaggagaacatactcttctcccctgtcatgtggattgtgcatccgctatcaatggtccaacttgag

SEQ ID NO: 45183 - DNA, 468 bp, Zea mays
  unsure (1)..(468): unsure at all n locations
tctatagggagaancacatttgggactaacaaatgttcattttgagaaagacaggatttgtagcgcatgccaagcaggaaagcaagttggcactcatcatccgcacaagaacattatgacaagtgacaggccactggagctcctacacatggatttattcggcccgatcgcttacataagcatcggcggaagtaagtactgtctagttattgtggatgattattctcgcttcacttgggtgttcttnttgcaggaaaaatctcatacccaagagaccttaaagggattcttgagacgagctcaaaatgagttcggcttaatgatcaagaaaattagaagcgataacgggacggagttcaagaactctcaaattgaaggcttccttgaggaggagggcatcaagcatgagttctcttcttcctacaccccacaacaaaatggtgtagtggagaggaagaatcgaactct

SEQ ID NO: 45184 - DNA, 444 bp, Zea mays
agcttaccgcatttgaagcatgatcgctttcccttggtcttggccttgcttggctgtccctttcgatcttttagcgccgtcttgaatcttttaatgatgagggccatctcttcatcattaagaccggctgcctcaatttgtgccaccttactgggtagtgactccttgctccttgttgcctttatagcaatgggttgaggctcgtggagtggaccgttcaacgcgtcgtcgacgtatcttgcctccttgatcatcatccgcccgctcacgaattttccaagtacctcctcgggcgtcatcttcgtgtacctgggattctcacgaatacttgtcacgagatgaggatcaagaacggtgaatgacctgagcagtatgctgacgacgtcgtgatccgtccaacgcgtgcttccgtagctccttattttgttgataacggtcttgagc

SEQ ID NO: 45185 - DNA, 421 bp, Zea mays
  unsure (1)..(421): unsure at all n locations
ntcaccagatcctcaagcaaaggaaggagagagatacaagccttgttccaagaaggtctgctacaagtgtggtaagcccggtcattttattgcaaaatgtccattatcaagtgatagtgacaggggcgacgacaagaatggaaagagaagagaaaagaagaggtactacaagaagaatggcggcgatgcccatgtttgccgggagttgaactccgacgagagctgcaccgactccttctccgacgaggacgccgcagacatcaccatcaccaaagggcttcttcttcccaacgtcggccacaagtgcctcatggcaaaggacggcaagaagaagaaggttaaatcaagatcctccactaagtatgcaacttctagtgatgaggataattctagtgatgatgaagataacttgctcactctt

SEQ ID NO: 45186 - DNA, 349 bp, Zea mays
agcttggaggcgtcgattggatgacggcttggtgaatactccttcttcttctcctccgaagcttagaatgcaacgggctgggcttcggatgagtacccaagctcgctgattttcctcgagccttctatcatgcactcaaaacttacaaaatgcccgataacttcctcgggggtcattttagtttatctaggattaccacgaatcaattgaacttgagtgggattaagaaaaatgagagatcttaatataacatttaccacttcgtgatcagcccacttcttgctcccgaagttgcgcacttggttcaccaaagtcctgagccggttgacatgtgttgggggctctcccc

SEQ ID NO: 45187 - DNA, 347 bp, Zea mays
  unsure (1)..(347): unsure at all n locations
tggagttgngacaagacancatctctttggtgtgcctcttatttaatgctcactcctgtaagtcgttggaaggaggaaaactctgatgactctaatgtccgggtgtcatataacaactttactcctatctattacaccctctcgcaataccaacttaacattgccaaactctatatccaactcttccccaactacctcatatctaacacctcactctttacttctatccattcacatgattagtaccagctccattccaacctctttatcacgacattatcaattaattttgccccttacataaacaaacttttctccattacactcccctacaccccctactacaa

SEQ ID NO: 45188 - DNA, 443 bp, Zea mays
  unsure (1)..(443): unsure at all n locations
agcttctaaagggagaacacattttaggattaacaaatgttcattttgagaaagacaggatttgtagcgcatgccacgcaggaaagcaagttggcgcccatcatccgcataagaacataatgacgaccgacaggccactggagctcctacacatggatctattcggcccgatcgcttacataagcatcggcgggagtaagtactgtctagttattgtggatgattattctcgcttcacttgggtattctttttacaggaaaaatctcaaacccaagagaccttaaagggattcttaagacgggctcaaaatgagttcggcttaaggatcaagaaaattagaagcgacaacgggacggagttcaagaactctcatattgaaagctttcttgaggagganggcatcaagcatgagttcttctttctctacacttcacaacaaaat

SEQ ID NO: 45189 - DNA, 468 bp, Zea mays
  unsure (1)..(468): unsure at all n locations
tcatgatcggaatgaataacanactcttttggccataagtagtgctgccatgtttcaagcgctcggaccaaagcatacaattctttgtcatacacagaataatttaattgagcacctcccaatttttcactaaaatatgctataggttntccttgttgcattaaaactcctcctatcccaatcccactagcatcacattctacttcaaaagttttagtgaaatcaggaagaataagtacaggtgcttcagtcaaacgtttcttcaattcttgaaaagcatcttcttgtgagtttccccatttaaattcaacacgtttctttgtcaattcatttaaaggagaagcgatagtactgaaatctcgcacaaatcttctataaaacccagcaagaccatganaacttcttacttgacttacattcgttggagctggccaatccttgatggcttcaccttggattcatcacctc

SEQ ID NO: 45190 - DNA, 354 bp, Zea mays
agcttctaaagggagaacacgtgataggtctaactaatgttacttcaagtgaaaccttgtgcagcttgtcaagcagggaaacaggtgggaagctctcatcatgccaaaaatgtgatgacaacatcaagacccctggagttacttcatatgtacctcttcggacccgtcgcctatctaaacataggaggaagtaagtatggtcttgttatagttgatgatttttcccgcttcacttgggtattctttttgcaggataaatctgaaacccaaagaaccctcaaacactttctaaggagaagctcaaacgagtttgagctcaaggtgaaaaagataatgagcaacaatgggtccgaa

SEQ ID NO: 45191 - DNA, 319 bp, Zea mays
  unsure (1)..(319): unsure at all n locations
tagagaggagtttctaaaattcagaacatgttacagntttatctactgtagtttccaaagatatcagatttgttgctttcaagcatgtagttttccaaaaccaaagtatattacaaaactgttctatttcttttatcaaaagctggaatgcagccctgcatccgaataggacattactatgataaagctacttctccatgctttagttttatatgctatgatattgaatgtgacatgggatacaccacagtacacaaactgctgcatatttcctgtgntgggaccccggatcctggaatttaattaccgacttatattg

SEQ ID NO: 45192 - DNA, 382 bp, Zea mays
agcttctaaagggagaacacgtgataggtttaactaacgtgcaattcgaaaaagatagaccttgtgcagcttgtcaagcaggtaaacaagtgggaggagcacatcacagcaagaatgtgatgaccacttcaagacccctggagctgctgcatatggacctcttcggacccgtcgcctatctgagcatatgagggagtaagtatggtctagttattgttgatgacttttcccgcttcacttgggtgttctttttgcaggataagtctgaaacccaagggaccctcaagcgcttccttatgagagctcaaaatgagtttgagctcaaggtgaagaagataaggagcgacaacgtgtccgagttcaagaaccttcaagtggagga

SEQ ID NO: 45193 - DNA, 325 bp, Zea mays
gcgatgaagtctactaacgcctgcgagttgaatgtagatctgtgcacctcctacatggagaatttattaagcttcgcggcccactttgcaacccttccaggaacttctctggtcctcataatatacttcagaggctgcgacgagggaacatatatatggttagcttgataattatgccgaagcttcctggaggccagtaatacaacatacaacaacttctccaattctattgtgatttctctttgataagcttaatacttctaagacaaaatatactgggacttgcttttaatttggccttcaagcttcttctggtcaaacgccg

SEQ ID NO: 45194 - DNA, 374 bp, Zea mays
  unsure (1)..(374): unsure at all n locations
agcttctaaagggagaacacgtgatatgtttgactaacgtacaattcgaaaaagatagaccttgtgcagcttgtcaagcaggtaaacaggtgggaggagcgcatcacagcaagaatgtgatgaccacttcaagacccctggagctgctgcatatggacctcttctgacccgtcgcctatctgagcatatggggaagtaagtatggtctagttattgttgatgacttttcccgcttcacttgggtgttctttntgcaggataagtctgaaacccaagggaccctcaagcgcttcctaaggagagctcaaaatgagtttgagctcaatgtgaagaagataaggagcgacaacgggtccgagttcaagaatcttaag

SEQ ID NO: 45195 - DNA, 418 bp, Zea mays
  unsure (1)..(418): unsure at all n locations
nggtgccgatggagaagcagaagtccctgaaatcctggctgtctaattgattgccattgtcgattgtgagctcggacgggactccgaatcggcaaacaatgttttgccagaagaacttctgggcaggcttcgatgttattgtggatactgaccttgcctcgatccacttggtaaaatactcgacggcgacaaaagtgaacttgaggtttccttgggccatgggtagtggcccgacaatatccagcccccagcgttgaagtggccatgtgtgggcaatcatctttgtgtattgcgaaaggttgcctgaacggngtgaaaacttctggcaggcttcacacgaccgcgtgactcgattggcggcgcagattatagcgggccagtataacccctgacggatcaccttggcagcgagggccct

SEQ ID NO: 45196 - DNA, 416 bp, Zea mays
  unsure (1)..(416): unsure at all n locations
agctnggtcattntattgctaactgtcccgacaatgatagtgatcaggacaagaagaactataagaaggcaaagggcgaggctcatcttggcaaggagtgggattcggactgctcttcgtccgactccgacaatgaaggactcgccgccactgccttcaacaagtcatccctcttccccaacgagcgacacacttgcctcatggcaagggagaagaaagtaagcactcataatactagtacttatgcttcttcaagtgaggatgagtctagtgatgatgatgagatagattactcatgcttattcaagggattagatagaaccaaggtagacaaaattaatgaattgactgatgccttgaatgataggaatatacctttagaaaagcaagaaggattgttgtatgaagaacatgat

SEQ ID NO: 45197 - DNA, 468 bp, Zea mays
  unsure (1)..(468): unsure at all n locations
tcggcattattntcaggcatataatattattgttccttcttctcagccgntgaaagatatcatgagaaataaagaagctactggccgaattggaaaatgggctgcggagcttaatgaattttacattgattatgtgcacagatcctcgatccagtctcaagcattggcagattttattgccgactggacgccaggggctcagggcgaagaagcgaataaagatgccgaagcatggacagtgttttgtgatggctcctgtggaaccttcggagcaggagcagctgctgttttggtttcaccgtccaaggttaaaacttgctatgcagcaagactggacttcagctgcacaaataatattgctgagtacgaagccttgctcctgggtcttcggaaactaaaggcgatggggatcaggagggcgatccttanaactgattctcagattgtttcgggtcatattgacaaaag

SEQ ID NO: 45198 - DNA, 348 bp, Zea mays
  unsure (1)..(348): unsure at all n locations
agcgtaacacacatgaccagctgtactactgtacctcttaaaggaacccgaatggaggtgggaagagatnactatggatttcactaccgggttgtctcgtacctcaaaggggtatgattctatatgggtgatcgaggacagattgaccaaagcacctcacttcatttcagtcaatattaacttataaggatcatcattggccaagatatatatggaatgaattgtgtgatcacacggggtaccgaagaagatagtttctgaaacagtctcatatcttacctgatgactttggaaaaccttcatgagaatatggatatggatttgagtttatttcaccctgtcgtcctc

SEQ ID NO: 45199 - DNA, 364 bp, Zea mays
  unsure (1)..(364): unsure at all n locations
tcagcttcgtggctgatccattcaatagagccctcgggatctcccattatgaaattttcctcgcttgaatacgcgccaacgttggcgaagctaatatttattctcttcacacaatccatagatttctcanaacatttttccttggatatacgaagctcttcaatgttttctctaaacattttgtcctttgatcgctaatttctcgtttagcttctgcgacagcacatttttctttaaattcgaatagctgttttcgaagatcttcgatctcctgtttctgagcttcggcttgcgctttggaaacagcttcgtcttcttttattttactcaacaatgagtttaatatcttatctttttcaagacc

SEQ ID NO: 45200 - DNA, 310 bp, Zea mays
agcttacatcgcttgcccctatcgcctcttctatctgtgaaactgctggtgtcgggaatagctatgggtggacactcttttaccataaaccgaaaaccgaaccgaaccgaaatttcggtttttcagtagttcggttcggcttatgtatctaagaagtctgattttcggtatcggaatacggtatcaccgtataccgaaccgaaattccaaacaaaccgattacgaaactttatcgattttcaaatttgactataagattatgtgaactaaatgtgtgatacacatacattatctttcacctatttgtatg

SEQ ID NO: 45201 - DNA, 402 bp, Zea mays
ctcagcttagtttaaaggcatcatagttcataagccagataatatatgtagaattatccaacacaagttgcacaagatagtttaataaacttatggccataacagaattatccatcagagctagttcatacaattgtagccttcagtaaacaagaatagagaatcacatattaaacaagcatgacatagaggatagggctaaggcggcactttttgtctattgttttctgggttgcatatctcggttgcgtgtctaaaataggaaagcacgaatatctcggtaaaaataggatttcggaaatatggacggaaaagcagtgaacctttttcattcctggtactgtaatataccatcatgttttcgtctcgttcctatttttcatgtaaatacgaggacaatcc

SEQ ID NO: 45202 - DNA, 344 bp, Zea mays
agcttagcacagcatatgtctaatgacatattcacgtagtcacatctacgctagaaggatgcattggtcaattctaaaacagggaccaaattaagactgcacgtaactataaaaaataaaatgatcatcaacggaggcatatctggaggtaccttttatctgtactaactagcgaaagggcctctagccaagttggttaggtggtctgagtagtactcctcaggtcttgagttcaactccccatggaagcgaatttcagaatatggttaaaaaaatcctcctcatctgtcccacatcaaagcacaagtctaaggcccggtcgcggacgtgttctacatgggtta

SEQ ID NO: 45203 - DNA, 396 bp, Zea mays
gagctctggaatttggatatgatgttcgtgcatttgtaaataaatcaagatcgatagacctactgctcggcctaagtgtgtggtaattcaacatttgagctatttattgatttagatgcagctgatgaacacgtaaataggtacagctatgctattattcatataactttgctttcaaatatatcaatacacggcgtatcctaatccctatggtcatggtctaatttagcatgccgatgcgagttccaaacaatctattcaagtggaattaaaggaaaggccagtctatctccaaagaaattaagctgatgatctaagacccccttttgatgcaattcttatatgcataccgagccacgcgttagaaagatagcgcctaccaatgaatgtgagtac

SEQ ID NO: 45204 - DNA, 328 bp, Zea mays
agcttcggaccagctaaaccggccctttatacgcgggaggcactgggtggtggtccccacctgccaggcaaagatttctttttctgtttctcttcctcaccgcgcatctcgggcgtatggttgaacccgcggcaccttcgctaaccgcgactgcaccctgactcggcttcaaaggcgggccgaagaccctcctcgcttcttccctcgaccctctcttctcatcgcgcgtcagtcgttctcatcgtggactggggttgagagagaaagagagagacatccaggggcagagagatttgggcgccgccaccgcggttctggccgactatgc

SEQ ID NO: 45205 - DNA, 360 bp, Zea mays
tgtatgttccgggcttcaaaatcttggtgacgatgaacggtccttcccagggaggagtgagcttgtggcgcccttgggcatcttgtcgtatccaaagcaccaagtcgcccacctggaggtctcaggaccgaacccctcaggcgtggtagcgtcacagagactgctgataccgtgccgagtgtagtaaggccatgtcccgagcctcttccagttggtccagtgagtcctctcggctggtctggttgctttggtcgtcgtacgcccttgtcctcggggaaccgtattctaagtctgtgggaaagatagcctcggccccatagactataaaaaacggcgtgaagcccgtggcttggcttggcg

SEQ ID NO: 45206 - DNA, 346 bp, Zea mays
aacccaccagcagcatgcaagcttctaacgggagaacacatcttgggactagcaaattgtcattttgagaaagacagtgagtgctgcgcaggtcaggcagggaatcttgttggtgctcctcatctacacatgaccatcatgacgactgacaggccactctagctcgtacatatggacctatttggcccgatatgcttacataagcattggcggcagtaagcactgtctaattattgtggatgattattctcgcatcactagagtgtcctttcgcaggaaaaatctccacccaatagaccttaaagggattcttgagacgggctcaaaaagagttcggcttaatgat

SEQ ID NO: 45207 - DNA, 370 bp, Zea mays
gcttaccgcacttgaagcatgaacgcttccacttgatcatagtcttgctctgctagccattgcgaccctttagcaccgtcttgaatctcttgatgatgagggccatttcttcatcattaagaccggctgcctcaatttgcgccaccttggtgggtaatgcctccttgctccttgtggctatgagagcaaaaggttgcggctcgctgatcggtccattcaaggcgtcgtccacataccttgcctccttgatcatcattcgcccgctgacgaatattcctaggacttcttcgggcgacattttggtgtacctgtgattctcacgcatattattcaccaattgaggatcaagaacggttaatgacctgaacat

SEQ ID NO: 45208 - DNA, 455 bp, Zea mays
  unsure (1)..(455): unsure at all n locations
agcttgcatatattgtgattgcggagaaactttntattttcctgagtccctttagccactcgacaaaaaatgttacgcatcaccaacagtttgctttcctttggcctctagttgcctccatattttatgtaggcccctgataatcaagttcccacatagttctgtgacatttaagcccgttattagtcctatgactaaaatttatgtcagagactaaaatttattccctacactgtttggttgcaagggctatacatattttaaatgcattaaatacaacacataaagaccaaaataccccttttcttgtttcacgccagttttctatacaatggcaattggagtaaatgtagttctttagtcccttttagcacccatgtgagggactagagactatacccaattagtctctactctagtcctttccgtttggtatatatacactaaacatgact

SEQ ID NO: 45209 - DNA, 432 bp, Zea mays
ggccaatacttgtcaaagcaacaacacctgccagcacagcatttgcttaccataccagtaacttggcctttcgcatgctaggaactggatatgatcggacctttcaagatagctcaagggggatacactgatgtattggtggcgattgacaaattcactaaatggatagagttaaagcccattgcctctttaacctctgctaaggccgtggaattcatacaagacataatattcagattcgggataccaaacagcatcataactgacttatgatccaacttcacaagttcagaattcttcgacttctgcgagcgaaagagcattcagatcaagtatgcatctgtagcacatccaaaaccaacgggcaggttgagcgagccaacggaatgatattggaggcactcacgaaaaaggtcttcgataagaatgaaa

SEQ ID NO: 45210 - DNA, 444 bp, Zea mays
  unsure (1)..(444): unsure at all n locations
agcttagaacataaaaacaaaccaccaggataaatgcatcaggattnttcatgtaaaatgaaaagataatgctaatcaatacaatagcatttttataatgtttaacatgaagtatggttggctgcccctggcctgcttatactaacaaacttgaccactttggttaaaaccagcaaaacatcttattatgctaggtaccaggttaacatttcaagaatgaccaaattttgtccatgacaaatggtataattaatttaaaattcaacttttagataggttcataaccaataacccagacatgtaataagttgttaataagtgaaacaaaattctaaacaaatcataagaccgaatcgccgaacatatggaatttgcaatgcgatggtaaaatctcttcttgatatctgcatttntcagcaatgagctattcattgtagaataata

SEQ ID NO: 45211 - DNA, 422 bp, Zea mays
tccatcgatatcgccgtagactggttgaaaccagatgtaagtcttcgatgaagttctccaagttctccgttttgattaccacatcatctacgtaggcttccacacgcttgccccagtgatcggctaagcatgtttgaatggctctctgataagtcgatccagcgtttctgaggtcgaacggcatggaggtatagcagaaagcaccgaacggagtgatgaacgctgtttttcctcgtcttcctttgccaagctaatctgatgatatccggagtagcaatccaggaaagacagcacagaacatccagcggtggagtctaccacctgatctatccttgggagcccgaaaggatcctttggacaattgtttgtgagatccgtatagtcgacgcacatgcgccaattcactttattcttttgagtac

SEQ ID NO: 45212 - DNA, 410 bp, Zea mays
agcttcagcatgacgaggccattatgcaacatgcaactcgcctccccatgccaactagccgaagtagaattcagagttgtggccgagcacatcagtactcagaacttagttcaagaatacttggcttacaagacttttcccacgttaggtgggtggggaatgctgaataaaaaagacgaaggaaagaaatttgaacttgtgagacttccataccgctttaagttttagaaaacctttagtggcccttatgtcgaatggttggaggtcattgaaataatgtgcaatgaaatccttggaaattacactaagaaagaggaccagctgatgactgctgccttcgacacatgagagaaatgaaggttaaaccgagtgatggatgcccttggtttcgagtatcctaattatgatag

SEQ ID NO: 45213 - DNA, 461 bp, Zea mays
tgccaagcgccacactcactgcagagtgcgaagctgtctcttacatagtaatggagcccctggcgcaggtggagttaatgttgttagatcaatcaagtattgcttcagctcttcgaacgctttctgttgagctgggccccattgaaaaacttcggctgactttagtatttcaaagaatggcaagtttctttctgctaatctagatatgaatctattcaatgaagccagtcttcctgccaaccgttgggccccttctttgtgcttggcggctccatccgaaggatagcttcgatcttgcttgggttagcttcaactcccttcgttgaaactatacaggcaaggaacttacccttcttcacttcaaagacacttcttctggaattaatttcaagccagcttgcctgaaattagcaaatgttcttgcagatcagaactgtgctcttcttgcttatgcttttact

SEQ ID NO: 45214 - DNA, 450 bp, Zea mays
agcttctaaagggagagcacattttacgattaacaattgttctatttgagaaagacaggatttgtggcgcatgccaggcgggaaagcaagttggagtccatcattcacacatgaacattatgacgaccgacaggccgcttgagctactccacatggatctattcggcccgattgcttacataaatcatcggcgggagtaagtattgccttgtaatagtggatgattattctcgcttcacttgggtattctttttgcaggaaaaatctcaaacccaagagaccttagagggatttttgagacaggctcaaaatgagtcctgctggaagatcaaaaataatagaatcgaccactgagacggagtttcaaaactctcacattgaaggcttgcttgatgaggaaggcataagcatgagttctctttccctcacacactcacaaactgggtttgg

SEQ ID NO: 45215 - DNA, 437 bp, Zea mays
tctaaagggagaacacataataggtctaacaaatgttactttcttataagatagaccttgtgcagaatgtcaagcaggttaacaggtgggaagctctcatcatgccaaaaatgtgatgacaacatcaagacccctggagttacttcatatggacctcttcggacccgtcgcctatctaagcataggaagaagtaagtatggtcttgttatagttgatgatttttcccgcttcacttgggtattctttttgcaggataaatctgaaacccaagggaccctcaagcacttcctaatgagagcccaaaacgagtttgagctcaaagtgaagaagataaggagcgacaacgggtccgagttcaagaatcttcaagtggaggagtatcttgaagaggaaggaatcaagcatgagttctccgctccctacacaccacaacaaa

SEQ ID NO: 45216 - DNA, 419 bp, Zea mays
  unsure (1)..(419): unsure at all n locations
agctntccctttaccccgagacacgatacacctttcattggcgagacctttaagtagacgtagtctcctttcaggaaatataggggcattcgccgtgtgtctgcataactcttttgacgagcttgtgctttcttcaaattatgaataattttccgaactttatcctcggcttctttcaccagatcaggtctaaagaagcacctctcaccaggttcagaccaatttagcggagtccgacaccgtcgtccatataaagcttcaaagggtgccatcttgatactttcttggtagctattattatatgaaaactccgctaaaggtaaacattcatcccattttaatgagaaatccaggacacatgcccgcagcatatcttcaagtatttgattcactctctcagttcgccactgggtgaggat

SEQ ID NO: 45217 - DNA, 308 bp, Zea mays
tacaattgttacttttaaagacctgatatgccacaacagctttcttacaggtcataactcagtacaatttttgtcacagtcatatgccaatcaaacaaaccctatgtggtccatataatagccatagttttttggaatatttataagcggaatttatgcttttattattgcaacgttaacgttagtaacaacctatataggtgaatctgccgatggtcatcattaaattatctagtttttaaaagtcttttcttaagttagcctagttcgaatatgggttcgaataaactattgtcaaaaactaatac

SEQ ID NO: 45218 - DNA, 387 bp, Zea mays
  unsure (1)..(387): unsure at all n locations
agctntatatggacgacgatgtcgtactccgttaaattggtctgaacctggtgaaaggtacttcttcaggcctganttggtgaaagaaaccgaagaaaaggttcagaaaataattcataatatgaagaaagctcaagctcgttagaagaattatgcagacaaacggcgaatgcccttatattttcttgaaggggactatgtctacctgaaggtatcaccaatgaagggtgtatcgcgttttgggataaaagggaagctngcacccaggtacattggtccattccctatacttgaaagatatgggccagtggcatatcgacttcaactacctgaaaccttgtctgctatacataatgtgttccatgtgtcacaattgaagaaatgtct

SEQ ID NO: 45219 - DNA, 391 bp, Zea mays
aatggacgtgaagagtgccttcctcaacggacctatctatgaggaggtctatgttgaacaacctcccggctttgaagacagtaagtatcctaaccatgtctataggctctctaaggcgctgtatgggctcaagcaagccccaagagcatggtatgaatgcttaagagatttccttattgctaatggcttcaaagtcggcaaggccgatcctactttatttactaaaactcttgcaaatgatttggtcgtatgccaaatttatgtagatgatattatatttgggtctactaatgaatctacatgtgaagaatttagtaggatcatgacacagaaattcgagatatcaatgatggcggagttgaagtatttcttacgatttcagtgaagcaac

SEQ ID NO: 45220 - DNA, 339 bp, Zea mays
agcttagagctcacaattagtgctttatatttcactcttatgtaagctttaattgtgttgccatcaatcaccaaaaagggggagattgaaagctctcttgtgggttttggtgtttggatgacaactcaattaaaggaccaacaagtgtactaagtgttgaataggtgcttaatgtaaagctaacagggttcaacacaagtgaacaagtgtgatggtccaaggactagatgatggatagataatgggcatcacaagtaagatggacattgcataaagtgagactcgggtgcgtagctcggagacaactgatcaagccaaggatggaggcaagaagagctt

SEQ ID NO: 45221 - DNA, 405 bp, Zea mays
  unsure (1)..(405): unsure at all n locations
tcggcatcaaactgtgttctgttatccacagtaatggtcttctgcactccgaagcgacaaacgatattntgccagaagaatttctgaatggtaaccgaagctattgtggctaaaggcttcgcctcaatccacttggaaaaatattctactgctactacaacatattttaaatttccttgtgctggtggtagcggacctaacaaatcaaggccccacctttgcaatggccaagtgggttgtattaactgagtcaaagacgaaggctgtttttgatctcttgcgcatttctgacagccttcgcacttttggactagttccgctgcatccgaagctgcctttggccaataaaattcttgacaaaaaacttttcccagcaaaggcctaggtccaatgtgagatccacac

SEQ ID NO: 45222 - DNA, 350 bp, Zea mays
  unsure (1)..(350): unsure at all n locations
ngcttcngcataacggcagaaaatgggaactgacttttagatgaaaagcccaattagacctcgaagtaatactatagagttatctgtaaacgtaatgggtattaatgtaattttgcatgggttgcgactcgtgcctataaataggtgaacagtattcctgtactgttcacgttgatgtggcaattgcgtttgcatcacacctgtattcacattccttcaagccgaaggtacatttgtaatataccgtcgtttacataagtaatgtaagtaaaaaataaattaataacagtgtttacagagattatgttatttcctgattctgtgttgaatattctctatcttctatcatg

SEQ ID NO: 45223 - DNA, 469 bp, Zea mays
  unsure (1)..(469): unsure at all n locations
tcttanaggcgggtcttcggtttccgttgagcaagtttgtggttgaagtgttgaagatatatcagatcttccttcatcagattacccccgaagctataattagaattgggatttttgtctgggctgtaagaagtcagggactagagccaagcgcgaagtgcttatgcagtatgcacgagcttttatatgagacgatggctactggcaaagaacagtaccacaacaacttcgggtgttatggttttatttctcgccccaatgcaagccacccggtaccaacatttcgaaaaaggtggcccgggtcctgctggcccacgcggagaaanatctgggcggctggggaaaaaatcggggaaggggatagagatggaggctgcgcggtgacanataaaatcccaggggctgagataatttctcccctttttatttctcttttttacacaagcaatacaaatatccacaaatttga

SEQ ID NO: 45224 - DNA, 416 bp, Zea mays
agcttgatcctccttgcatgtatgtgaactacaaggtggtgggagtcattgggtaatagatagtggttacactcaacatatggatggtgactcatggatgttaacctcacttaatgaaaagtggatgataaagaaaagattacctttgggaacaattcaaagggcaaagtaaaagggttaggcaaagtatccatatcaaatgaccacttagtttcaaatgttatcatagttgcatatctaagcttcaacttgctatccattaatcaattatgtgatcatgtatatcaatggttattcatggagaaagaggttattgtgtctaaagtggatgatcttcaacttatattcaaaggggtataatacacattctatatttagtggatttttacctgtgaaaaggcttacatgaggacttg

SEQ ID NO: 45225 - DNA, 459 bp, Zea mays
tgtgaagggtcttcatccctacatgtgctaagcggcgatgctacagccagcccatgctagtcttagctattaagcatgcatctagaccggcctcctcttttgcaaaatcaactaaataaagatggtcgtctaatacacccttaaaagctaatgaaccatcacttcttctaaagacagacacatctacatttgtaaatagacaattatatccgatattacataattgactaacagatagcaaattatatccaagggactcaactaaaaacacattagagatagagtgctcatttgaaattgcaatcttgcctaagcctttcaccttgccttggttcccatcaccaaatatgattgaatcttgggaatcctttgttttgacgtaggaggtgaacatcttcttctcccccgcatatgggttggcatccgctgtcgataatccagcttgaacccccggatgca

SEQ ID NO: 45226 - DNA, 403 bp, Zea mays
  unsure (1)..(403): unsure at all n locations
gcttaaattccttgcatgtttatgcatcttgnggctcaagctggattatcgacagcggatgcacaaaccacatgacgggggagaagaaaatgttcacctcctacgtcaagaacaaggattcccaggatacgatcatctttggagatgggaaccaaggaaaggtcaaaggattgggctagatatccatcaccaacgagcactccatatcgaatgtatttctagtagagtcgcttggttacaaccttctgtctgtaagtcaattatgtcacatgggttacaattgtctttttacaaatgttgatgtatctgtctttataaggagtgatggttcattagcttctaaggctgtattagacaacaaactctacttagttgattttcaaaagaggaggcgatctagatg

SEQ ID NO: 45227 - DNA, 440 bp, Zea mays
  unsure (1)..(440): unsure at all n locations
cgccatcatttncaactaagctaagtnggnttgaatcattctgactgtctggctcatcaaacagcgaacaaaggtgggcctcagcagttatgaaaccatcaacgtgaagacgcataacattttcagtaacctgacatgggtaggtacaaaccaatgtcataaaaccgccatttcaacaaaaagtggagggtagactaacatgtggagataccaggaaataaagctcttgatggatgctgcatgttgtgttttttttcatctanaaatagaggtacacacaaacacagaagagataagagcaggggagagtgccaaacatgttgccatttgcactctcattngcgggctacaaatgcaaggaggtaagggggggatgcctacatngtattgcatcatacctcacacgccatgtggaaccatttctcaagagggcatacact

SEQ ID NO: 45228 - DNA, 406 bp, Zea mays
  unsure (1)..(406): unsure at all n locations
agcttgtggaggaccatatcaccgaagcttataagnttctggatgagaagtggtcacccaagttccattgatgaagcactcaattatatgtttgcagagatggcatgaattgtctccataacttaacaagtcgataacaaagtttcttcgacgaatctttgtatcatatgcataagacataagagaacaaaatcgataacaaagctcctcacaagaatctctgcatcctatgcacaaggcataagagatctaaatgtcaaattttgtactacgtatttatatcattctatatctatgtttaattatggattttgccgtcactattgtactcacgccgctcgtcgtcgggaccctgagctgttgaagactcatcaatctgtgtttcgtgacatcacacgaggacata

SEQ ID NO: 45229 - DNA, 261 bp, Zea mays
tcaatcctgccgcgggtatttaactaatgtactctgataactataaaacggatacctgtatgtgatgcgcaatattcctttctttgctggtgtctgtatgtacaaggcgtgtgttattattcattgcctgttattattatattcaactggggtaaaaaaaaatatcatgtactctgtctccctttctccctctttctcaaggatgcatttcactccatctctttatgtctaactaataactaataggtaattgctttcttt

SEQ ID NO: 45230 - DNA, 451 bp, Zea mays
  unsure (1)..(451): unsure at all n locations
agcttatcagatgatgatgaagccgaaagcctggctgtgaaaaaactctagaaaaactcttgtattatcctttgtaaagaatattgtaatttgagaatcagattctactctgtaaatttgtccataccttgtaatatatttttacctttccgtcaatgtatgaagtgctttgatgtggacgaaacttgtattttttgagccgaaggcgaaaaacaccttcccttcttttcgtacacaatcaaagcataaatctgcttccgaagctgtatgcttagagccgaagcaactgtctgtatctgtataatatgatgatgatgatcctatgtatgtctaaatgaatgtttatgaatgcaatgtatgatgtaatgtatcgtgcaaatgaaggcccaaagacacacatacgaagccacatncataaccttcatccccttaggaatgactgaagtctctt

SEQ ID NO: 45231 - DNA, 430 bp, Zea mays
gggttgtttctgcgtccaggcgttgggccttgcatatgatgtcttctattattggcttgacttccaggctaccgttgtctcccagacatgcatttagctgagctgattctttcttccaatcttccaaaaagtttgctcctttaaccccgaaaggttttctgctgagggcgtctgctaccacgttggcctttccggggtggtagtggatttcgaggtcatagtctttgatcaattcgagccaccttctttgacggaggttgaggtccggctgcgtgaagatgtactttaaactcttgtgatcagtgaagatgtggcatttgttcccaatcagataatgcctccaaaatattaaggcgtgcactatggcttgccaattcaggtccgtgggtaagatatttctgttcgtgcggcttgagcaaacgggatgcat

SEQ ID NO: 45232 - DNA, 385 bp, Zea mays
  unsure (1)..(385): unsure at all n locations
ngaagtcacattttacccagccagagcttaatatgagacagtgtagatggctcgagctgattaaagattatgaattggaaattcattatcacccaggcaaggccaatgtattggcagatgcgctaagtcgcacggcttcctgttactgtcttacgatgaagacttctgacattacactgtgccaagaaatggaaaaattgaacctgtgaatgattcaatatggaacttccgatcacttgaagcttgagtcagttcttctgcaaagaataattgatgcacaaaggaatgatgagggtatgaaacaccttcatgagaaaatggaggccaataaagccaactgcttcagaaaagatgatcaaggctgtgtatggtttaacaaccgcat

SEQ ID NO: 45233 - DNA, 428 bp, Zea mays
  unsure (1)..(428): unsure at all n locations
agcttagcaagagacaccaagtgtgtggtgtgtccttgctgngtcttagtgacccgtgtgattaagggaaggctcactcggtctaagtgaccatttgagagagagggaaagggttgaaatagacctggcctttgtggcctcctcaacggggactaggttcgttggaaccaaacctcggtaaaacaaatcatcgtgtctactcgttttgattctcacttgatttgtttgccatctttcctctctctaacgttttcttgctagtattgatttgagtttgctcccatacgtcatctgcatcctttgagcaactcctagcaagagaaacaatctttcggacttgaatttaattctaacgctgaccccggccctagtgtgtgtttaagtttataaatttcaggtttcgcctattacccccctttaagcgactt

SEQ ID NO: 45234 - DNA, 457 bp, Zea mays
  unsure (1)..(457): unsure at all n locations
tactaagcttatcagttgtggccctagaggacttagcttgcgaggtaaagattcggtcattacctttnaaatttcctccacgtcagcagcaggaggtgttgaagggatctcttcttctatatcagtgggtttttgcttcgcggccgaagcttttcttttcttcggaacaaccaccttcggctcagggctggttctttctttttcgaagctttctcatcttcttctatcattctagcagcttgccttttcataacactaacaactctttttcgctatggtccttcagtacccttgcttaaccgttcataggcagaatattcaaacttcagagcattcattactcggttcatccttcttttccggcgattgccaatgccgcggtcatcaattcatcttctttctagtatagatgcccaaaattcattcgcatatcttaatcattccacactttcttgca

SEQ ID NO: 45235 - DNA, 440 bp, Zea mays
  unsure (1)..(440): unsure at all n locations
agcttgccaatacttgtcaaagcaacaacacctgcctgtacagcaactgcagaccataccagtaacttggcccatcgcgtgctggggactggatatgattggacctttcaagatagctcaaggaggatacactcatgtactggtagcaatcgacaaattcactaaatggatagagttcaaacccattgcttctttaacctcagctaaggtcgtggaattcatacaagacataatattcagattcgggataccaaacagcatcataactgacttaggatccaacttcacaagttcagaattcttcgacttctgcgagcaaaagagcattcagatcaagtatgcatctgtagcacacccaagggccaacgggcagggtgagcgagccaacggaatgatattggaggcactcangaanaaggtcttcgataaaaatgaaaaat

SEQ ID NO: 45236 - DNA, 454 bp, Zea mays
  unsure (1)..(454): unsure at all n locations
tactcagcttcatatatctctgggtacctgcaaaacttattaagtacattttggtacccatctcatgatgggtccatcaaggttatccaataaggacttaggcacccaaatagccttggtcctagaatgtggtgaactcatcacctttctagcacaagagtcaaatttgggtctcctaagcatatttgaatgtattgacaagttaggcttaggagttttaccatttggacaaaccttgaatagatgaacctttttacggcaattgtagcaaatgcggtgcttgtccttgcaatgcatttgccttttgctttcatctttcttgatgatcatctttcttgattgtgcaagggtcttggttcttcatgtggnggcatgaaccaatttcatgacccttctccttgcatccatagcaccttctatcgcttctctttgatctttcttttgtgaagcacat

SEQ ID NO: 45237 - DNA, 466 bp, Zea mays
  unsure (1)..(466): unsure at all n locations
gtctgcanatggccaaaggtacataaataagatagattaattcattctccagacttgatattttctccccctgtttcaaatgctattcctttgacttaaacaaaactccccctcaatgaaattctcctcttagtgttcaagaaggttttacagattattgaagatactttctcctctttttgaacacaataagatatcaatttgaaaaacttcatttttaaaattcggtgatggtgcgcgccttatgctttgggctcatactttctccccctttggcatgaatcgccaaaaacggatacttttgagtgaaatataagccctttcactttctcctcaatggtaaacaaataaatatgagtgaagattgaccaatgtggagaactatatggaataccgtgatataccaatgaagttgagtggaagccgtcgttctgctgaatactccatttccctctcaattctatga

SEQ ID NO: 45238 - DNA, 393 bp, Zea mays
  unsure (1)..(393): unsure at all n locations
agcttagaagcactntcatgtcttagacccttgacatgatcttttcctcacgcggttaagcgttagaacgaggattaggctctgataccaattgaaagttgcctagaggggggtgaataggcaagttaaaactttttcaacaaaaactagaagcaaactgggtaaaactgaattgatctcgaaattcacccagttaactttggaaatgagatgttctaaatgatccacagggttcaaagtagtaaatctgaaaatggcacttctcaaaatccacacaccaaaaagatataaacaaatcttttacggaatggtgagagaacgaagaacacgaataagcacaatgaacaagaacacatgagacacaagatttatcccgagggtccgtcacaccac

SEQ ID NO: 45239 - DNA, 284 bp, Zea mays
aggccaatgtagtggcagatgcgctaagtcgcaaggcttcctgttactgtcttacgatgaagacttctgacattacactgtgccaagaaatggaaaaattgaacctgggaatgattcaatatggaacttccgatcacttgaagcttgagtcagttcttctgcaaagaataattgatgctcaaaggaatgatgagggtatgaaacaccttcatgagataatggaggcccataaaaccaactgcttcataaaagatgatcaagggcgttgttggtttacaaccgca

SEQ ID NO: 45240 - DNA, 408 bp, Zea mays
agcttgaaagatatctagacatggttcgtttagtcgaagcttctttcgaaggattttctgtcaaaaatattcctcgaggacaaaatgagcatgctgatttgctagctaagtcagcagcacaggggctgcctttaccttcggatgtgttcttcgaaacaataaaggcaccttcagtggagctccttgaaagagcagacctcaatatatctcctggttatagcgaagattggagaactgagatcatctcttaccttcagggtaaattcctttcagatgacgaagcttataacaggaggatagaggcaagagctccgccatatgtcatgatagaaggggagttgtacaagcatggagtttgcgctccgctactcaagtgtttatctataaccgaatgtatagagttgatga

SEQ ID NO: 45241 - DNA, 402 bp, Zea mays
  unsure (1)..(402): unsure at all n locations
tgctatatagcttcgccaatcgccactggctgcggcactgcttgattattatctgcaactatgcaatgctttccggtgcaagcaaagccaaaccatcatggacttggacggttggaccacacactagctcaattttgcgtgcacagaacctttgatgcggaccgtcgtcagtggagcgtgtacgcacaagccaggccaaaactaacatgccacagagacgagtaaacgagctgcgttcttctgctcgagaaatttctaggaacagtacgtacgcatagtgatacgtcanngttggaaggggcaaatgcaaatatcttnttatgtcgatgaagatatagattaagctattatgaattcttgatgcgacaaataacagtattagataacggcaaccgatggata

SEQ ID NO: 45242 - DNA, 367 bp, Zea mays
  unsure (1)..(367): unsure at all n locations
agcttctatgtatatatattatgtatnaattatcagttttaactctaacganctatgggtctagaggtatcttggtcttgcagtctgagttgccataagactggtgtccacgccgatgtgagcggtacatgtgctgagtcccgactggagcgcgggaaccatccttcatgtgacgacgttctgcgcgctcagctcacagccgggcgatctcagcacgagccctactcagcttgtccaatgcatggtccagctccgtgtctagcacagcggctatgttgactgtgctgctcaacctaagattgtcctcaccgagaggtgagacaattactcctcctgtgctgtcatattaactgctggggttattact

SEQ ID NO: 45243 - DNA, 318 bp, Zea mays
cggtgccgatggagaagcagatatccttgaagtcttggttgtttaattgctcgccgttatcgactgtgagttcggacgggactcctaagcggcaaacaatgttttgctagaagaatttctgggctgtcttcgatgttatagtggatactgccctcgcctcaatccatttggtgaaatactcaacggcgacgaaggtgaacttgaggtttccctgagccgtgggcaggggcccgacaatgtccaagccccaacgctgaaggggccatgtgtgggcgattaacttcgtgaactgcaaagggcgtccggagcgtggagaaa

SEQ ID NO: 45244 - DNA, 409 bp, Zea mays
  unsure (1)..(409): unsure at all n locations
agctagtgaagattcttcattccaacatgtgctagttggcgatgccagagccagcccatgttagtcttagcaattaagcaagtatcgaattcagctctgtcaaaatctactaagtatagctgaccctctaacactcccttaaatgctactgaatcatcacttcttggtaagacagtaacacctatatccgtaagaagacagttgtaacccattctacataatagcgaaactgaaagcaaggtgtaatctaaataatctacaagaaaaacattggaaatggaatggtcaggtgatatagctantttacccaatcctttgacaaaccttgagttccatccccgaagtgatagctcgttgggactttggtgtttttcgaggagggaacatcttcttctccctgtatatggtt

SEQ ID NO: 45245 - DNA, 435 bp, Zea mays
cgcccacctgtgcccgtgcccttcgcaggtagcgataggctattcttctttggtcctaggggacttatagtggaaatgagtataggtcaagtcattacttcaacaatacgagtacaacctagcgacgaaggagaagcacttgccttcccttgctcttgcgtaggtttcttcttggactttgcctccgcaattctaactgtattttcttcggaggggtggcctttcttgaaggtgactcttcggcaccctcagattcatcatccttcatctcatcattagtagccccaacttgttagtctttcttggaggatggcttacctaataccttagaactgcctcttattttatgcaacttcggcgctggtcactggttttgtggtgttagagtattcacatccgatggtattcatggctctgttcaccttaatttctcgc

SEQ ID NO: 45246 - DNA, 377 bp, Zea mays
agcttgtgaagattctttatccctacatgtgtctagcggcgatgccagagccagcccatgttagtcttagcaattaagcatgtgtcgagttcagctctatcaaaatctactaagtatagctgaccctctaacacacccttaaatgctattgaatcatcacttcttctaaagacagtgacacctacatcagtaaagagacagtcgtagcccactttgcataattgagatacagaaagcaaattgtaatctaaagaatctacaagaaaaacattggaaatagaatggtcaggggatatagctattttaccaagacctttgaccaaaccttgatttccatccccgaatgtgatagctcgctggggatctctgattttctc

SEQ ID NO: 45247 - DNA, 354 bp, Zea mays
accgtgctccgaacgagcaggtgctgctctcttccactggatcatccctgggaagcgcgttcagactctcagtcgactcaaccttccagtctgctctcggacaccctccaacttccgaagggagaccctgacgttcgaagtgggcggattccgaggaacctaccacgccgtgttagggaggccatgctacgcgaagctcatggccagccccaactacgcctaccagtagctcaagatgccgggccccaactgggtcatcaccggtggccacacgtcgaacacgcgttcgaatgcgacgtggattctgtggagtacgccgaggtcctccccgagtccgaagccccatcgacacct

SEQ ID NO: 45248 - DNA, 397 bp, Zea mays
  unsure (1)..(397): unsure at all n locations
agcttgcacatttcttgataccttggatatantttancgnngaaatgggagttngtatcgctatcatacttgagctcttgcatttatttcgttacctttgattatgtgctttatattattaacttagtcatagtgaagggaaatggacttaaacattttctataatcgattttggtgtttgacaaccatcacaaaccttatggactaactagcttgcctagttgatcatttctcacgtgcataagttcatctacaactattctaagtcgactgtctggaataccatagattattccggacaggaagaagttttttgaataacacctatgcgcggaccgtctgggcccttactacggtctgttcgcgacaccagggtgagcctcagatagaaatacta

SEQ ID NO: 45249 - DNA, 390 bp, Zea mays
  unsure (1)..(390): unsure at all n locations
cgtcatgaggcctatagnacatatctttcataatagcccctgaggtctattcgaccgagtcattaattcagacaaatgatactcttcttgtgaatctcctcgaatgacttgaattattatgtttgtgtaaaaatgtccttagtcgagtgcccgacttattccagtagcccttgagtgatagagtcagtacgaagctcgagacttgtccatttattaatccaacgctttaggttcaatgatcccacttctctaggcctctataaaaaaagaaaaccctcacatcgctcagcttccatgaaccagcagcttgatacccatgatacatacttcctccgtgtctttttagttggtgctggatagttcaaatttgcactattcagcgacaactaa

SEQ ID NO: 45250 - DNA, 433 bp, Zea mays
  unsure (1)..(433): unsure at all n locations
agcttctccgaaggcaggacggngtcggtgatggctctgctggccggtctacggnggcagaggggttgggcggccgcggactcgctgcgcacgggctaacggcgacgagctaactccggcgaggtatggagggtgtgcggaagggtgtagccgaagcctgtggggatttataagctcgggcgcgggccacggcgcgggtttggctcgggcgcggcgcggggcatgcgagggcgcgcgcgagcgtgctctggcgcgggcagacggcgtcgaacacgtggcagtgagtttcttccaatgttcaaacgcttccagagatcgcanacgtgcgaatctcgccatgaatccggcgcagacctcctcctggcacctanggctatctcacatgtgtgagttccaagggatgatacgccctacatagggagatagacgggcg

SEQ ID NO: 45251 - DNA, 327 bp, Zea mays
  unsure (1)..(327): unsure at all n locations
tctgcgcgtcgatccgtcctccgtccgagcaggtgctgcgttcttccacgggatcatccctgngaagcgcgttcagcccctcgggcgactcgacctcccagtctgcttcgggacaccctccaacttccgaagggagaccctgacgttcgaagtggtcgggttccgaggaacctaccacgccgtgttagggaggccatgctacgcgaagttcatggccgtccccaactacacctacctgaagctcaagatgccgggccccaactgtgtcatcaccgtcggtcccacgttcaaacacgcgttcgaatgcgacgtggagtgcgtggagta

SEQ ID NO: 45252 - DNA, 410 bp, Zea mays
  unsure (1)..(410): unsure at all n locations
agcttgaatgttcaaaatcaagaacttcaaatgcaacttgaaaattgcaagaacatcaatgcctcatctttattgattggatctaagtctagctcctcaaataataccttntgcaaacattgtgccaaatatcatgcttcttgttgtctaactaaccatgcaaggaagaagagcccacaggtgaaggtcaaagaaatattgaaaagatgctctagcaatgatgggttaaagaaaattgaacccaagtacaagtccctaaagcccaacaatggaagaagggggcttgggttcaactcatccaaggaaaaccctagcatagtgcataaagggtggagatcccccaagttcatagagggaaccaccctatatgatgccttggggaggattcactcctcaaataacaagtcaac

SEQ ID NO: 45253 - DNA, 433 bp, Zea mays
  unsure (1)..(433): unsure at all n locations
ngaggaaggagaaaccgcagcaagggtcaaactccttgaataagatgttcctaaagcaataagtgaagcaatcaacatgatacaggaaaaaggtaatgattcaattaatcatgttatttgcactaataatttctctatgtcatctaaaagtatcaagagaagaggaaaacggagatgcttcaagtgcaaagcattatgccacctcatcgcatcctgtccatacaaagacaaggacgaagggataaggagatgttttggatgcaacgacaaggaccacatgatcacttcatgtccggtcatgaagaaccaaggatgtgcattctccaagatgactctcaccaaggaaaatgacaaacagcaagcgtcatgtcaggttgagcgacgtttctgctacaagtatggtgagcanggtcatctatctaaggtatgtaat

SEQ ID NO: 45254 - DNA, 418 bp, Zea mays
agcttcggctccatcttattatgaatagactttgaatctgtccattttccttcagcctttctggcagcttcctgacttccatgaatagcaataggcccttgatccgaaggtatcttcatgcatagatatgctggatggagaattgcttcaaaagcattgagtgtcccccgaccaatgattgcattgtaggggtactccatgttgacaatatcaaacacaacttgctcagtccttgtattgttgacaaatccgaaggtcactggcatcgtgatcttgccgagcgctacaatctgccttcctctgaagccacaaagagggtgtgtagcatcatgaatcttatcctctggctcttgcatctgtctgaaggccatagcaaatataatatccgctgcactgcatgtatcaactagaacattat

SEQ ID NO: 45255 - DNA, 472 bp, Zea mays
  unsure (1)..(472): unsure at all n locations
actcagcttgaagatttgaagggcaagccaaactgaaccgtcgccatgctcaatgggttgagttcatcgagacattntcatacattgtgaaatataatgaacatttccatacattgtgaaatataaggtaatgacaatatggtcgctgatgctttgtctcaaaagaatgtgttgtcgaatcaactagaggtaaaagttttgggtctcgaaaatttaaaagaaatgtataatgatgatcctgaatttttagaaccatacaatcattttaaagatggaaaaggttgggaaaatatcacatacatgacggattttttctagagctaacaaactttgtgttccaaaatctttgattagattgcttttattccgggagtcacatggaatatgtatggcaggtcattttggacaaaagaagacttacgatctgctcagtgatcatttctatttgcccaagatgaggagagacgtcatc

SEQ ID NO: 45256 - DNA, 378 bp, Zea mays
  unsure (1)..(378): unsure at all n locations
agcttcggctcaatgctcttcggcttcgttatcctgttcacatcaaagtattataaggtaaattcaagtttcaaggaaaaggtaagcacaaggtatgagtttattaccggtttaaggtgacttcgagcttcgtcaccagccaagtttcgcccgccctttgcctaaatttgagtaatgaatctgtttctgatgcttcgggccaggccggggatgtcatccaagtctgctggtgacaggctgaagtttggtctgtttacaatatttccatgtgtacagccagctgttggaacttgctctctggtgcaagttgatccaacggnggagtgtagcaacgcaaacaggngttttgcacgagatggcaatagctctgtttatcta

SEQ ID NO: 45257 - DNA, 451 bp, Zea mays
  unsure (1)..(451): unsure at all n locations
tctatctcgcgcgtgctgtcatcgctgctgccccccacgcacgatctctcccatgccaccgtgccgcttcggaagacaggggggcctcgacgccggtggctacagcctccatctccttcctctctcacagaccactctccgcgcggcgactcccacgcgtgagtgctccacggacccaatcacaccgtagtttactagagcctcgcgggaccgaccaccaccctgtacgagtcggccttggggatctccttcgtattactcgtagtcgacgacaacttcacccgtggcatcgcatgaagcgactttagcatgtactgctgttcctcaggtgtcgtcaacactagttcaatcatcaccaagctctctcagtagcacacgttnttcattatagcgagaaaacgagctgtttcattttcattttatttgttctcgcccctgcaantctattctg

SEQ ID NO: 45258 - DNA, 370 bp, Zea mays
agcttcggtataatgtcatgtctcaagactaatggattcaccgacttaaagatgaaatgaccgactgatccatgagggtctatgtcataattgtaatattttgtgaaaggcatgaatgtaatatctcacaggttgtgccctgtgcctataaatagatgaacagtacccccgtactgttcacgctgacttatattcactcgcacgtcacactcagattctcaccttctgtcaagccgaaggtataaatgtaattcaatattatccatgtttattcatgattatatgataaaaatgatcatatgatatcatatgattattcatgttttctatgtgtcatatgatcctgcttttcatcgcatattgagatgat

SEQ ID NO: 45259 - DNA, 273 bp, Zea mays
tacacgcggtagagaagaggatatagccaagagtgagggaagtattacatcgctctcatattgagattggagattggagactttagagaacggacatagtgtattcaccaaggtcagatcaagagatgagaaaggtaaaatttatacccaatcggagcacaacaaaggatggagttaaaaactcgcatgcgacaaggaaagggatactaccaacggaaaataggtaacctttaacttttaaaattgagacgaaagagaaagatttttgagcac

SEQ ID NO: 45260 - DNA, 448 bp, Zea mays
  unsure (1)..(448): unsure at all n locations
agctngaccgtcgattcctcgaagctcggtaacagatcgngacctattcgcgatgcgcagcaataacaaacaggcatttacaaacaaacatatacatgcataagaacattacaccatataaaggaaaacattataaaaatgcatgcaatacgagataaaagctcacttctatggtcgcgcgagtaaagaggcgccgaaatcgggactatggttaaaacaatatggttttcgaaaggtttgcataataaacatgtaaactatgttctaggtcaattttaattaatataaatcatttgcggaagatacttcaaagaaatatctaatgtggcattaatccaaattgtaattntgattgaaaatcgtacttttaaactagtcagattatactcatgaacatgtagaatatgacttattgtgtttaaacatgtactanattttatagatgaca

SEQ ID NO: 45261 - DNA, 478 bp, Zea mays
  unsure (1)..(478): unsure at all n locations
ngaagaagatgagaatgcctcgacttcatctttgtgtgcatatgttgatcctacggcaatagatcttgccatgagaatcaccgaaaggatgttcctcacaatgaaggaagatgaggcacagaacaaaattgaagaagaaaatgatcgatggagaccaaacgacgaatccacctcttcacaaggttcgtctttcaaatccacttctcatatgtgctttgtcgctaatgggagtgacagtgaaagcgaaagtgaggatgaggaggagcaagaaagtgatagtgaagatgaggattatcttcaacaattcttcgcttagctaagcaagaaacatcggatgagcttgctcaaactcatganaagagcggaagaagcaaaagaaatgcttcataagcaagaagacttcctcatcagaaaaatcgaagacttatagaagttgaccaaagagcatgagaagctaaagtgctctcatgatgatttg

SEQ ID NO: 45262 - DNA, 443 bp, Zea mays
  unsure (1)..(443): unsure at all n locations
agcttattcaaaggtttagatataactaaatttgacttaatcaatgaattgattgatgctttaaatgaaaagaatagacttttagaaaagcaagaggacattttatatgaagagcatgataagtttgttagtgtacaaaaatctcttgctttagaggttaaaaggaatgagatgctttcttctaaattatctgcttgtcatgaaactgtgtctaatttaaagagtgttaatgatgatttaaatgctaagttagaagaagcaaataagtctagttcacatgtagagcatgttgtcatttgtaatangtgtaacggatttgatgtcgatgcatgtgttgaacaccttacttctattacaaaattaaatggtgaagtggcaagtttaatgcccaacttaagactcgcacaaatgaatttggttagttaaaatttgtagggatgcta

SEQ ID NO: 45263 - DNA, 472 bp, Zea mays
  unsure (1)..(472): unsure at all n locations
tctagagggagagcacattntaggattaacacatgttcattttgagaaagacaggatttgtagcgcatgccacgcggtgaagcaagttggagtccatcatccacacaagaacatcatgacgaccgacaggccgcttgagctactccacatggatttattcggcccgattgcttacataagcatcggcgggagtaagtattgtcttgtaattgtggatgattattctcgcttcacttgagtattctttgtacaggaaaaatctcaaacccaagagaccttanagggattcttgagacgggctcacaatgagttcagcttaaggatcaagatnataagaagcgacaacggaacggagttcaagaactcacaaatggaaggctttcttgatgaggagggcatcaagcatgagttctcttcatcctacactccacaacaaaatggtgtagtggagaggaagaatcgaactctattg

SEQ ID NO: 45264 - DNA, 434 bp, Zea mays
  unsure (1)..(434): unsure at all n locations
agcttctgatttaactgagacttctccttatatagtgaaccggctgtattcctagcacatccccgaaggattgatgcaaggctctaatttcaccttgccaattatccactaccgaaattcccattgtatgtggatgccaaaacgatgcaaccatctcgcgcaaaccatccctagtaagccatcccaactcaaatttaaacaaaggctgattacccaactgtgagacaattctatcattgagtaatagagcagtattgttggtcacttattctcaaatgctgtgaattaagaacaaggcaacacaattgttaaggattaaagaccttcgtcctccgaagcattatctccccttagatataatgatcttcagacgaaggtaggacatgccttcatcacttatngaatgaataagaatacacagagatagtgaatgt

SEQ ID NO: 45265 - DNA, 381 bp, Zea mays
tatgtccgacagcctgtctgccagccgtcggacataatcttatgtccgacggcctgcctgctagccctcggatgtccagcattatgtctgacggccgtcagtagccgtcggatataagcttatgtccgacggtctcctaggtggccgtcggatataaacgagccgtcggacttgtactgttttattgtagtgagtccactttatcgccatatatgtaccatattttatgaacttgcagacaacctcttttctgtgagttgtagatgtctttagactaagacttttgaacggactgagtagtttgcatgatgagctgaaccagatagctatggccagacagcgatgcataactcgaagctgtcttatgacgcccagctggtg

SEQ ID NO: 45266 - DNA, 447 bp, Zea mays
  unsure (1)..(447): unsure at all n locations
gcttccttatcttttaaagggtatgtgctttctagtcttaaagggatnngnttaattctaatcaatcccgtagaagtaacccccctaaattatttcgaagtaacttattattcaactagaatctctcctaattacatagacttttggtatatcacttagtcggacttatattgagactaccatttgattacttcaaaatntaatacaaaaattctaacagataataatttactataatcctttaccacataaatttaaaaggttttggacccatgtttttactacataaagtaataagaaatgatgtagaaaacaaattgatctacttttaaatactaaaccagtcaaacaataaataccctatttttcttataccctactgagtctaatatcatatcataaaaaattacacagacaattcctttataactctttttctattggttc

SEQ ID NO: 45267 - DNA, 351 bp, Zea mays
  unsure (1)..(351): unsure at all n locations
ttctcgactaagtcngngacagggcctcatggacgggtgaaagtactcgtaagcggcaaggccgaccgagccgagggattcccacgcctctgggatacggatacctcactcgtcccttccgcgaaaagcaactctcgctcacacaaacatccctgttaccgacagagtccagatgctcgaaacaggaggaaaaaagacgcagcttcgcgagcgcggcgagggcgtgttcttctggcctcggcggccgcagaaagcacacgctacaagatgatctgatcctgcaggctcgggtcttcacgccgaaaggagccgtagcaccctcggcatcgacgacgtcttcagcaaagcccg

SEQ ID NO: 45268 - DNA, 340 bp, Zea mays
agcttcgcgagagagggaacgggccctatttctcctgtggagtctagtgttgcgaagtggagctcgatgtttgagtgagtccgtctccgtcgttcttgctgcccttgctctccttcctctccttcctttttctctaaggccctgagcatccccttttatagacacaatgggatggtccagctgtacatatgggggtgtagctatgtgctaatgtgtccgacgaagaggtgcttgagccctgtatgaagcgtagctggcggtgcggccctgggtcctgctgacatttctttgccttcgtagagagcttgtggactattgacgtcatggacgcatgcgggga

SEQ ID NO: 45269 - DNA, 376 bp, Zea mays
  unsure (1)..(376): unsure at all n locations
ctacgcatagcttattattaagagcagagcagcgaagcgttctccgatcctactggacaggccaacacactttttatggatcattctgctctgcctacctcgcttcttttgtgtaccggcctaccgggacctacatctacgtacactcgagtctcgagcgagtcttggtccgttttcctccagctntgtttgctcctgactgagctttcgctgcagtcagtaacccatagtagttgagcttaacagctctttccttgggggggttactgtaatanatacggctcttgtgggaaccatggactcgacaaggcatgggcagacagcgtctcgctttcactgcactcanggagggggccaatccaattcatcatgagca

SEQ ID NO: 45270 - DNA, 397 bp, Zea mays
  unsure (1)..(397): unsure at all n locations
agctngctcaagcttgaaccgaggacccgtatcaccggaatagcgcaatcgtgctcgccggagttcaagaacccgccggcgcacgtggaccaggtagcctctgcaccattttccaattcgttgcgcgcatggcctctacatcaccccgaggagctcctcgtgcaccttaattgaactatatcgtcgtggtttggccggaacaagagccgccgacgacccccgccgcctgtgttcatggccagggtagctccgaccacctccgacgctgacccgcacaccgacgtgaccgtcgtgacctcccggacgtcactgaccaccccgtcggagctcttctgccgccggtaagcctcgccgccgtaatctatgccacggatacttgttaagtcagccaggagcg

SEQ ID NO: 45271 - DNA, 412 bp, Zea mays
tcggcttaacagtgtgaaatgaaaccgacctatagtggaaaatgctgactagtcctcgacagattactctttaggcaatagtaaatgtcaaggatattgatgtaatttcacacaggttgtgccctgtgcctataaatagatgaacagtagcatcgtactgttcacgctgacttgtaatcactcgcacgtcacacttggatccttaccttctgtcaagccgaaggtacaaatgtaattcaatattgttaatgtttattcatggttattcaataagaatatgaataatctaatgatttaagatgattatttgtattctttatatgtaaatcattcttctgcttttcattacatattgagatgatgaaggtatgcccttcatgaccttcgtctgaagatcattatatcctgagga

SEQ ID NO: 45272 - DNA, 336 bp, Zea mays
  unsure (1)..(336): unsure at all n locations
agcttcaactcttcgaaccatatccagatatttntcaagcttcagatccttagctctgcaacttttgtcaatatgacccgaaacaacctgggaatcagttttaagtatggctcttctgattcccattgcttttaacttccgaagacctagaatcaatgcttcgtactcagcaatgttgtttgtgcaattaaaatcaagctttgccgcataacaagttttgactttggaaggtgaaaccaacacaacagccgctcctgctccgaagattcccaagatccatcacaaaacactgtccaggcttcgctgtctttatttattttccccttctgagcccct

SEQ ID NO: 45273 - DNA, 373 bp, Zea mays
  unsure (1)..(373): unsure at all n locations
tgccactgttgtgacaaccgtcttctcgtgccggcttcttgttgccgacggcgtcgcctttggcgcctccgcgggcaccaccctcagcttgtcctcgcgctctggcctgtgcgcctccgcgtgtcttgcgcggcttgccgcgtttgcggccccgtgtcgaggactcccccttcttcttgtcacaccctggcaggcctcccactgctcccgagtgagatgtagcttcccgctgatggtgataggcccanagagggcctgtggttcgttgccgtcgacgaccttgagacgaccaatcgcttcttcgttcgtcatcgtggagaggtctagtagagactcgattgagcgagcgatctgcttgtcttctcgaggatgc

SEQ ID NO: 45274 - DNA, 434 bp, Zea mays
  unsure (1)..(434): unsure at all n locations
agcttggaggcgtcgataggaagcctacttgacgtanactcttctttcttttcttccgccgctttgaatgcgacgggttgcacctcacgcatggaggatccgccttgctcgacgatttgtttgaagcctttgatcatcaactcaaagctcacaaactttcctatcacttcctcgggagacattagcttatatctaggatcaccacgtattaattgaacttgagtaggattgcgaaatacgagtgatctaagaataaccttgaccatttcatggtcatcccatttggtgctcccgaggttgcgcacttggttgaccaaggtcttgagccggtttacatggcttgtggctcctctccttggttgaggatgaatcgaccgagctccccctcgatcgtttcccgcttggtgatcttggtcacctcatccccttcgtgc

SEQ ID NO: 45275 - DNA, 292 bp, Zea mays
  unsure (1)..(292): unsure at all n locations
ttaagtcacctgcggcatgcaagcttgtgaaggttcttcatccncacatgtgctaagcttcgatgccacagccagcccatgctagtcttagctattaagcatgcatctagaccggcctcttcttttgcaaaatcaactaaataaggtttgccggctaatacaccttaaaagcctagggaccaataccttcttctaaagacagacacatttacatttgtaaaaagacaggtatatcccatatggcataatggactcacaaatggcaaattatatccagaatttcttcttaaaa

SEQ ID NO: 45276 - DNA, 477 bp, Zea mays
  unsure (1)..(477): unsure at all n locations
ctcagctntggcaacggcgggggagcagccacggcgggcgccggtggctttcgttcctggccaggacggtctcctgagcgcgaggcggcggcgactgctctgtgcggagaggctgggacgggtccacgaggagggggagggacggcggtgagtcaagctggaagggcgtggcgtcgccgccgccgacgggccggccgtgatcgaggccgcggctggaactggcatgctgcggccccgtaaagtttgacgagctgtgccttttcttttcttttttctattgctgtatttgtttattgttaggagcattttcgtgatatataagctgccagagtttcgcgacactctatttatctatctagcttttattctagtacctttctgcaaagattgattccgctggtccgtagatatgattctgtgggattgatgattactgacgataagagaagaactcactttggtctccctgccgtcttt

SEQ ID NO: 45277 - DNA, 100 bp, Zea mays
agcttgagatccatctatgtcaaggagagctttcgtttcttttttttccatcgcccttcttgcaaattcctgacttccatggataaccatgggcccctga

SEQ ID NO: 45278 - DNA, 383 bp, Zea mays
  unsure (1)..(383): unsure at all n locations
agctnggctgggagtctatttcaactcctttctcgtttgagttagccacaccttggcttggagtctatttcaactccttcctccgtttgctcagatctgtcagtgcgacaaatagagccttccactatgttgatatcagttacaacgatgtcgtggctgcttacaatcttctcgacagcactccgatagagtaacaacgcgctcaaggttttgctctagctctcagcaccacttcccctctctctaaaggcttataacttcgcctctacacaaactcgagagatacacaagagaggaagagaaagaattgatccaaatgatgtatggacttgttggctgcacttgtgtacttgtttgaggcgtctaggggtcccttttatagc

SEQ ID NO: 45279 - DNA, 476 bp, Zea mays
  unsure (1)..(476): unsure at all n locations
ctgtgaagattcttcatcccaacatgggctagtcggtgatgccatatccaacccatattagtcttagcaattaaacaagtatcgagttcagctctattgaaatcaactaagtatagttgaccctcgagtactcccttaaacgctactgaatcatcacttcttctaaagacagtaacacatatatttgtaaaaagacagttgtaacctattttgcataattgagaaactgaaagcaagttataatctaaagaatctacaagaaaaacattggaaatagaatggtcaggagatatagcaattttaccaagtcctttgaccaaaccttgggttccatccccgaatgtgatagctcttttggggatctatgnttttctcgtaggaggagaacatccttttctcccctatcatgtgggttatgcatccactatcagtgatccaacttgaggccccggatgcataaacctacacaacaatta

SEQ ID NO: 45280 - DNA, 385 bp, Zea mays
  unsure (1)..(385): unsure at all n locations
agctcgaggctgtgtatagattaccgccctcttaatgcggnaactatcaagaacaagtatcctttgcctcgtattgatgttctctttgaccagttggtcggggccaaggtattttccaagatataccttcgctctggctaacatcagatcaagatacgagcaagtgatattccgaagacggcattctcaaccagatatgggctatatgaattcttggtgatgtcattcgggctgacaaatgcaccagcatatttcatgtatctgatgaattctgtttttatgccggaattggacaagttcgtggtggttttcatcgatgatattttggtgtactcaaagaacgaagaaaaacatgccgggcattngcatgtagtgcttcaacgtc

SEQ ID NO: 45281 - DNA, 446 bp, Zea mays
  unsure (1)..(446): unsure at all n locations
cttgttcaatgtagagattanggatggcaatgggtactggtatgggtaaataaccgcgaataattatccattggatatgggtatggtggaatttggtatccgcacgtacaattatggatataataaggtatccgcggataaatttttcgcgggtatggatttctaatatccctaccccctaccccatggatatcttaacatgtgagccaccggaatttaataatattctcaaatctaattttttaaattttatttatgacaaggtgaaatggcgcggagaaccatttgatgatgatggaatgataattgttttcgaaaattgataaaattgttgttcgatgttgaatgctaaaattataatgggcgggcggggaaccggtattcnactcttttgcgtttccctcctattcttaatagtatgaaatccttctctccttacaatatta

SEQ ID NO: 45282 - DNA, 420 bp, Zea mays
agcttgtccttgaagagaggattttctcctttttgttctcaaaggggaggggttccttaagtatctctatatcttgatgttaataatgctaatattggtgatattgatgatgtctttcaatgaatcaaagacagtttctaaaccagagtctaacacaaaacacttcccaaacaagtgaaggcaagcattaactcaaaacctaaactataggggtttagaggagaagaaacaaatcaaagcaaataccatcaaatttgcacaagataaaacaccacgaggtacattcgtatgctcccctatggtttgcttaacaaagcactgcttaaccacatggttaccggtgacagctttgaagcattaattggatcaaaaactggtaatgttgttctttgtcggtgccttcatttccatgcttgagtt

SEQ ID NO: 45283 - DNA, 397 bp, Zea mays
actcagctcgactaggttagatctagaattgttgatctgttgcctaacattcacagacctccctcaagctaaagacaaaatcaaaccaatcaggtgaaaagaattcacctactaagaaacaagcggacctaacataaatgcacatccaagtctggcaccatccatcaatctaaataaacaaatcactgaacagctcaactcacaaagggatgttataaccggtgtcatgtacgaatgccagaaatgcccacatggctaggcggagattctcttagatatgcatagatatgtattactttatttccctttgttttattagattggaatatagattgatgtgttaggaggggataaaaatacatcagcctattaagtgagataattaagcataacaaca

SEQ ID NO: 45284 - DNA, 437 bp, Zea mays
agcttgatgtaagcaggacccatagacgtctctatttctctcagttcaattgcgcgagccacttcattctatcgacgaacatgttccaacaccagaagacagcgatcagcaagcgcgtttacatggttttagggaaggcaacgcatctgcaggaaggaatatgataggtacctccttgagcttcttgttaataagatcggatacgagatgggagatgaaaccaccagcgacagacagcagctgcacaacccgggtggcgacggccctaggacgcttgccccagtaggctgatatgatttcagggctatacacaagaggcaggccctcattgttgtccgcggattctaccttgaaccaatgaaggtaggggggaaaaacggaattcaatacaacctagctgtgcatagattaattgatgttgtggagttgtgtgctgg

SEQ ID NO: 45285 - DNA, 483 bp, Zea mays
  unsure (1)..(483): unsure at all n locations
gacctatgatactcagcttaaccaatttaatattgtaatctattgtggggcgtccgattgacgtgtgatggtctagtgaaagcaaaacatctgtgtaccttaaacatgaaacttaatcccaacccattttcctagaagatgcaagcgcctaaagaagagaaaatatatttgttgagcgcgtcaagattgcataaacagaaaccatccctcctgcatcaaatgtgcaaggaaacatggactacagcgggaaagatcgagacgtgcgggagatgcccaaatccagactaataaaccaaccgactgttcgccaaggaactctagacatggagcacacaaatcagccaaagaaatccttgtaaatcccanaaactctcatgtttcacggcgcanaacaaatccaaacacgcagagaagcggaccagaacatgaacctctttctaccgaaccataaccagagcaatttgaacgaaatatagcactaaa

SEQ ID NO: 45286 - DNA, 396 bp, Zea mays
  unsure (1)..(396): unsure at all n locations
agcttgggcacacctacgtgatgtttccttatttaagaaanggagccnccctcggcggagaagccagtccacccacgccggagcacttacccttgccggagttcgtggaccgggtaatccactcagacattctttgattccttgcgcacacagtcgctacgtgaccccgtgaagctcaccgtgcgcgcggattgaaccaaatccgccgcgattggcccggatactcgccgccgacgaggatacccgcctgcgctcgtggacccagcgattccgggcaccttcgacgacgagccgtacctcgacgtgaccgccagagcctccccgagccgaccccacccttcgtcggaccttccttcgcgacgggaagccgcgctgacttactttcctacagatact

SEQ ID NO: 45287 - DNA, 473 bp, Zea mays
  unsure (1)..(473): unsure at all n locations
gatactcagcttataaanaatatagctgctagataggtagtacatttgttatatcattacaaatacctcttgactgaccaaacacgatcagcagatgagctcctttctggatcgagagcaccacttgcccaactgataagaacatgaaacaatacttatcaaacataaacttcatgtgcatctgcagtattttggataatatatataatggtgattcaaattgaagaatagggtccgaaaataccactacaggccataaccaatgatatactattattattgtaaaaaaggcatgttcgtgtctattaaagttccacagataaaagactattaacctccatttaaaggcctgcttccgtcagcacgagcgagatcattctacgcttgtatcccaaaccgtccatggatctacatacccaacgtatctagtggtcttataatacaatggagacggtgtcatacaacctcttcta

SEQ ID NO: 45288 - DNA, 395 bp, Zea mays
agcttcttagagggtgcttcaaatacactttttttatatctcctcgtgaaggtgtgcgaaaattacccaccatgccactggttacgcaacatacaagttccgttctctctggcgacaacccactaatcatcaaggataatcaaggaaacccacacaaatcaattgtactatagaagttggagcccagagggggaccaaacgctcctggaactcaccttaacaatttgctggagctgttttatagtgaaactggaaaaccaaagctgaagttgttgaaacaaagctctcaaacaagccctatattgaatgtattactttaaagtatctcttaacatgtttagatgtgagtgagatgtgggtatatcgtggttatcaattctttggcactttgatgc

SEQ ID NO: 45289 - DNA, 411 bp, Zea mays
tcatactcggctgcattggtagaggccgggaatagcaattggagagcatacttgaggtgctcgcctccaggtgcggtgaagagaattcctgctcctgctccctgcagcttcagcgagccatcaaaatacattcgccatacttctgcggtttctggattatccggcacttgctgttctgtccactctgatacgaaatcgaccagtgcttgagttttgatggcagtgcgaggtcggaactcgatatcatgggatcccaactcgcaagcccacttggctattcggccaatggcttccttggtgtgaagaatgtcccctattggaaaaccagtaactactatgactttgtggtcgtcaaagtagtggcgcagcttgcgggcaggtagaagtactgcatataatagcttctgaact

SEQ ID NO: 45290 - DNA, 304 bp, Zea mays
  unsure (1)..(304): unsure at all n locations
agctctacactagntgtgctctagtatactcatcatcggggtttcgtacctccgtccgtcaaataaatttattgtacatgttccgggctccggagggtgtgtgcggagggcacaagatttatactggttcaagcagaatgtccctacattcagtcattggtagcttgcgctaccgacaccattcatgatcaaactcctagtatgggctacaagtagtcgagagagggaggagaggcttccaggtcttttatcaaggtggaagtggagcttataacctgcaaggtggagtcctgtctaaatcttg

SEQ ID NO: 45291 - DNA, 427 bp, Zea mays
  unsure (1)..(427): unsure at all n locations
ttcagagacatgagagatccaaagataactacaacatccattttatccacatggatatgccatttagagataagttgataaaacaagcgtcatgattctcggagaaagagcatgagattgactaggaataagagatttatgcagatcaacatctgatacttgagaacgggttatggcagataacccagataacagggcagaatcattaagggatccagagattcggatgatatagccaacatgattcacaaggaaagagatcaccaaatccatgcaaaaggagaggtaggcaaacaggatcatctatgatgattaacagaaatgctatgaagttttangggcaaggatttatggaaagaaacatggcttggacattggtttgcgcactagacacaaacgatagttttttttgacataaccacgtgct

SEQ ID NO: 45292 - DNA, 372 bp, Zea mays
agcttgaagctggactctgcgctatgactattgaccatcttgcagatagtcttgcatataatagtctgaacgtatgagaactgtatatttagaaatttataattttcaaatcattcttttatttttattctaattcttgtatatatacggtttaatattgagcaacgcgctgagagcgcaaaagaatgccgaagacgagagctatgatattgctttcaacaatctacgatcagaggttattaagctgaagaacgaagctctggaaaaagataaaattctgcttacattggtggacaagataaaggaagacgaagctacctctaatgctcaagctgaagcccacaaacacgaaattaaagatctttagaaaca

SEQ ID NO: 45293 - DNA, 319 bp, Zea mays
  unsure (1)..(319): unsure at all n locations
agcttgatgccagctagcttgaacagatctctccacacgacactaggtcacggtcactgactatcgacgtgggaaacccatgaaggcatacaatcttggcaaagaaggcccacgcgatggaggagttggtgtanggtggcctatcataatgacgtgagcatacttagagaagcaatcaaccatgtcatcgtcgagcgtgatgttggaccatacctgtgtgggcacatctagcgtctggacgagactggccaagcggaggtgaaagtcgcctagagggggggtgaatagggcgaatctgaaattaacaacttaagcacac

SEQ ID NO: 45294 - DNA, 436 bp, Zea mays
  unsure (1)..(436): unsure at all n locations
nnttgacttacttaagggatctggtattctggtgcatgttntaaataatggcttatgctattgcaggacttaagaatatatgctatgtcctacaatccttacttatttntttttaaaaaaagagttaataaaatatacaataaacacaagagtttcaacttatcttgaggagagagagaaactatagtcgtcaataaaaataaactttagaaataatttaaattcatggctctataggatacatgaagcaacaagagctaccatgattaatggtaatattttaacgtaattacatatntaaaatatctagagatgctacaaaaataaaaaaaacattcatttgaaaaaagtaattaataagtttacaaaacttatatagatataaagatctatatgttaaacaggaaatatatattaatataagtagttttataat

SEQ ID NO: 45295 - DNA, 432 bp, Zea mays
  unsure (1)..(432): unsure at all n locations
gcaagcttgtgactagtgggcatgccgaggtgttcggtgcacactttacatgcactgttngatgtccggtgcaccggtatgggcagccctgacgtctgcgcgcgctgcgcgcgcatttaatgctccgcagggagccgttggcgccgcacagagccgttgctccgctggcacaccggacagtccggtgcacaccggacagtccggtgaattatagcggagcggctgtcgtgaaaacccgaggatgacgagttccggaggccgcggttcgttggcgcaccggacatgtccggtgcacaccggacagtccggtgaattatagcgcgccggcctccgcgaattcccgaaggcgaagggttgaagtcgaagtcctctggcgaagggtagaanacgaagtctactggcgcaccggacactagtcggtgcacaccggac

SEQ ID NO: 45296 - DNA, 364 bp, Zea mays
  unsure (1)..(364): unsure at all n locations
atgcaagcttctctcttcctcgccagagcccaccctgccagccggtttctaacgcggcgntaatatctcccctcccttccctcttctggtctccgccccgctccttgcctccgatccccaattcctccttcggatctcgcattcagcgcagcgcaggtgagcccgcctccgatccactcctctccctggatccagatctgagtcccctcgcgctctcagatccctctcccccgatctcctctccggccgccgtgcgcggtagatctccgcccgttggcgcgtgatctacccgaccgacccgcgcgactgcggttggatcatctcggtccagatccgcggcgccgtcgcctggatgcgctgggga

SEQ ID NO: 45297 - DNA, 389 bp, Zea mays
  unsure (1)..(389): unsure at all n locations
tcggcgacgggaaaaatatnggcagcaaaacagattttatttctatgaatgctgcgggaacttcacacctactcgcctgtctatatagtacagcacgtaagaaagcgaagcgccacactttttacaccaggcggacacccgcttgctctcgctgtgcaggtggacccgcagagaccaaacagtaactctgccaggggggaccgctacgcgctgggaaattgaatcgattctcgacaaccaactcacggaagggggtttttggacctttggctccccgaagcctaaaagacttttttcagaatcaaacctcgtacgaaaaacgatctaccaccgcgaaaagggctactggtgggcctatgcctcgtcgccgaagtcctaatagaagaaac

SEQ ID NO: 45298 - DNA, 437 bp, Zea mays
  unsure (1)..(437): unsure at all n locations
agcttaatcaatgatgatgaatggtacgactanttttcaccatggtaactntgctttcgatgatgcttctcctttggcagcagagttgcaggctaccccgtggccaccatcttacaagccaccacagctccccatgtatgatgggcactcagatctgaagtagttcctaatgagctacgaggctaccatatcctcgtatgggggcaatactgctgtcatggcaaagtccttcatcatggtagtcagaagtgtggctcagacatggtattcttctcttcgaccgacgccaattatgtcgtggcaaaagctaaaggatatgctagtcaccagcttccggagcttccaaatgaagccagtcactgcccaagccctgttccagtgcacacaggaccatgaggactgangagtacctgcatgcgtatgtcccacggttcttg

SEQ ID NO: 45299 - DNA, 342 bp, Zea mays
gaagcattattcaacctgaccaatgcctataagaattgcaataaacaacttgtgcctggtattctcaatgtcggggaccataattagggggacccccaagactcctaatctcagctgggaacccccatcagcacaaagctgcaaaggcctgaagggtgccaataaatcaaggcttggtccactcaagggacacgatctcgcctcgcccgaacccagcctcgggcaagggcagccgaccccggaggatttacgtctcgcccgaaggccccctcaagcaacggacacaccttcggctcgctcgaagcccagccttcgccaagaagcaaccttggccaaatcgcc

SEQ ID NO: 45300 - DNA, 407 bp, Zea mays
  unsure (1)..(407): unsure at all n locations
agcttatgaacattcttcatcccaacgtgggctagtcggcgatgctagagccaacccatgttagtcttagcaattaagcaagtgtcgagttcagctctattaaaatcaactaagtatagctgaccctctaacactcccttaaatgctactgaatcatcatttcttctaaagacagtaacacctatatccgtaaaaagacagttgtaacccattttgcacaattgagaaacagaaagcaaattgtaatataaagaatctacaagaaaaacattggaaattgaatggtcaggtgatatagcaattttaccaagtcctttgaccaaaccttgatttccatccccgaatgtgatagctcttttgggatcatggttnttctcgtaagagaacatncttttctccccagtcat

SEQ ID NO: 45301 - DNA, 382 bp, Zea mays
taccctttgattctattcttgtcgttctgaagaggatggggtctccttctgtaaattctttgggaacgacgactttgtctctccaactctttgttgatgtttggtatttatttaatgcgtcgagggcttgaactcggtctccatcgaggaggtattttgttggtagctcatcgatgtctggttgcattggggtctgaccaaggttggccatgcttaagttcctgcggagtcattgactcggctccatacattagcctgaatagtgtgaaccctgtcgcgcgagactccattgtatttaaggcccagagtacttcatgtaattgttccgcccacttagcattcttgtcttcgagtagtcttttttaattgtagtgaagatttt

SEQ ID NO: 45302 - DNA, 438 bp, Zea mays
  unsure (1)..(438): unsure at all n locations
agcttctaaagggagagcacactttaagattaacaaatgttcantttgataaagaaaggatttgtagcgcatgccaagcagggaagcaagttggtgttcatcatccacataagaacatcatgacgactgacaggccactggagctcctacacatggacctattcggcccgatagcgtatataagcatcggcgggagtaagtactgtctagttattgtggatgattattctcgcttcacttgggtattctttttgcaggaaaaatctcatacccaagaaaccttaaagggattcttgagacgggctcaaaatgagttcggcttaaggatcaagaaaattagaagcgacaacgggacggagttcaagaactctcatattgaaggcttccttgaagaggagggcatcaagcatgagttctcttcttcctacaccccacaac

SEQ ID NO: 45303 - DNA, 390 bp, Zea mays
tggaggcgtctattggttgtcgacttggggtagacttcttcttcttctcttccgtcgccttgaatgcgacgggttgagcttcggatgtagatggatcatcaatctcgttgatcttcctcgagccttcgatcatgcactcaaaacttacaaaatgcccgattacttcctcgggggtcattttagtatatctagggttaccacgaattaattgaacttgagtagggttaaggaaaataagagatcttagaataaccttaaccatctcatggtcatcccattttacgctcccgaggttgcgcacttggttcaccaaggtcttgagccggttgtacatgtgttgtggctcctcccctttgcgaagccggaaccgaccgagctccccctcgatcg

SEQ ID NO: 45304 - DNA, 107 bp, Zea mays
aaagacacgttttaacaattattccaagctattacccaaacagtactcctctcaaaagggaaataccagaatgagtaggtataatcatcaccatataacataatcat

SEQ ID NO: 45305 - DNA, 308 bp, Zea mays
aaaaccaacgcgagcagcgaagccacagcgaaaatttttcaatcgactcacacccagccacaggtgcgccaggtgacaccgaaaaccaaaccttccacttggcaagaacatcagggcacacaccccgctatgctccccggcaccacaccaaggccagcaaccaccgacgccgaaaacccaagagcctccacaagatacagaatgaagaagggggaaccaaaagccaaacctcactaacagcgaacacggagagccactcaagcaccgccccacccaaaccgaaacaagaagggcgcgcccaaacccgc

SEQ ID NO: 45306 - DNA, 370 bp, Zea mays
  unsure (1)..(370): unsure at all n locations
agcttgtgaagccaatcacaagtttgatgtttaatgacatctaaccncaagggggcctactaagtgcaatgaagcctttgagcaactaaagacactattgaccactgctccgggattatctcaaacggacatcactgaaccttttgatgtatattgtgatagcaactagcactgggctcggctgagtactgatgcaagagggccgagtgattgcgtatgcttcaaagcagttgcgccggcatgaggagcactatccaactcatgatctggagctagctgctgggggtcatgccctacagaatggcgtcctatctgctgggtatatctgcacataggtcagatcttaaagactgagtcatcttaccagaca

SEQ ID NO: 45307 - DNA, 384 bp, Zea mays
agcttagcgccaccatttgcacataaaatcttgctttattattttacacgcagaaaaccgaataatgagcaagctcagtcttatctgcacaaaatcgattacaaagtacaacttccaaacaaaaaatcaaaccgccacaaatcctatgtgtagaacttcaatggtatcctcctcctaacatggggaggaggggattattggttgtaaaaaaaccaaatcaatactatagtttctttcccttaaattttacaactcaagcattataccccacccccaccccaccaaaaaaaaaacaaacagaagccacgccgaactatgaccaatagtattcgatccacacttcgtttaaaactgttgctaactaactttaaccagctaactgat

SEQ ID NO: 45308 - DNA, 404 bp, Zea mays
  unsure (1)..(404): unsure at all n locations
agctatggcgtggtagcatanaaggaaatcttcttaaagatgaaaaggctattcacacctcggtggattactatataattactaccaaatgtaaagggcatggatgtaattttatatgggctgtgttccgtgcctataaataggtgaacagtacccctgtactgttcacgctgacttggcattctcttatgcgtcacgcttgtatttttcccttctttcaagccgacagtacatttgtaatgcgatattatttctacttttctataataataatacagaaatgagttgatataatacataatagtctatgctatgttttgtgtccaataagactcttcttcattattatatgttgaacttatgaaggtatgtccttcataacttcgtctaaaaacattatgtct

SEQ ID NO: 45309 - DNA, 386 bp, Zea mays
tcagctccatctatgttatggattgcttttgtgtctttccagtttccttcggcccttctggcagcttcctgacttccatgaatagcgatgggtccttgatccgaaggtatcttcatgcaaagataagcagggtgaagaattgcttcaaaagcattgagggtgccacgaccaataattgcattgtaagggtattccatgtcaacaatgtcaaacacgacttgctcagttctagtgttgttgatgaacccgaaggtcactgacatggtgatcttgcccagtgctacaatctgtcttcctccgaagccacagagaggatgtgtagcatcatgaatcttatcttctggctcttgcatttgtctgaaggccttagcaaatatgatatcagc

SEQ ID NO: 45310 - DNA, 124 bp, Zea mays
tcaacggtcggaatccaacggaactggtgtttttgttggggcaccggactgttcggtgtgcaccagactgttcggtgcgccatcaaacatacagtcttcaccaacagttaagttggtggtgtcc

SEQ ID NO: 45311 - DNA, 276 bp, Zea mays
  unsure (1)..(276): unsure at all n locations
agcttataaagattcttcatcctaacatgtgttagtcgggggtgccagagccaacccatgttagtcttagcaattaagcaagtgtcgagttcagctctatcaaaatctaccaagtatagtggaccctctaacactcccttagatgctattgaatcatcacttcttctanagacagtgacacctacatcagtaaaaagacagatgtagcccatttgataaaatggcgaaacagacagcaaattgtaatctaaagaatctacaaaaaagacatttgaa

SEQ ID NO: 45312 - DNA, 378 bp, Zea mays
tgtgaagggtcttcatccccacatgtgctaaacggttatgccacagccagcccatgctagtcttagcaattaagcatgcatctagaccggcctcctcttttgcaaaatcaactaaataaagtttgctgtctagaacacccttaaaagctaatgaaccatcacttcttctaaagacagacacatttatatttgtgaataaacagttatatcccatattacaaagttgactcacagacaacaagttatatccaagcgactcaactaagaacacattagaaatagagtgcttggatgaaatagcaatttttcctaaccctttcaccttgccttggttcccatcaccgaatatgattgaatcttggggatccttggtcttga

SEQ ID NO: 45313 - DNA, 457 bp, Zea mays
  unsure (1)..(457): unsure at all n locations
agctngaanatgatgaaggtctntgacaaatgttagttaataagaaatacatgaagggtaaacccttatgtgttttttttttttttaaaagcaaggagaagttctggaggggtgttcttgacattaaggatgtacattgcaccaacagaaaaatgattattggaaatggatgctctactagtttctggtgtgacacttggtgtggagatacccccttcttaatgaaatataaccgactttttgagttatctcttaataaagagataaatgtgaattgagctctgagctcggactgtaattccttaacctttagaagaggttatttggagatggggctaacagttggaagaattggaaaaacaagtatgaatcgtctgtttatgacagggatgataacctcttggtgctaatagaaggatttcgtgaagcatgttcaaactcaaaaaaataccaactc

SEQ ID NO: 45314 - DNA, 393 bp, Zea mays
tacccttgaagcctggaacaagctacagaagaaaccttttcattcgctcagtcaaaaggatcgaccgtgagaatcaaagcactaccccgagtcaaagtaaacaggaaaagaggacagaaggagttattaccatacagagaggcaaagattcttggaaccagagaccacaaacatcagggtcatcgaccccaccactcacccgtgcccctcgcacgcgtgcccgcctccatgcgcactactaccgccccacgccccccttttgcagcacactaccaccgccccatgccccctttgcagcgcacccaccgtcaccattatcgtcggcaacaccaagccccctccccttgtctcacctcgtggcgcgtaacacctgcttcatcaacgccactccgg

SEQ ID NO: 45315 - DNA, 232 bp, Zea mays
ccaaccgcggctttttttttatcctgccccgcgaaagagcgcgacctttccaaggcaccggactggctcgcttcgtgctcacgctaaaaacagactcgggaccgtcttgtaacatatatgctggcgatacatgttaggctatcacatcaaggatgagggacacctactgtgactatcttgaggatggcttgcactcccttaatctggaagaacatgtgggcattctacccgg

SEQ ID NO: 45316 - DNA, 205 bp, Zea mays
aaacccttttcactccacccattaaggggtacgaccctctcctcaggctcatagggcatctgagcctttgaaccgtttatataaacctccctggtaaattccccttttgggaatccacaacatgccccaacagctcaatttgaatatctccatcgtcattgttgagagaagtaatgtggacactataccaggatggactctctaa

SEQ ID NO: 45317 - DNA, 405 bp, Zea mays
ctgcagcatgcaagcttataaatggtagcgtggggccggagctcgggtggttttacgtgagccgcgcgttatgcttgcgtattttgccgtgattggctgcgtaaattcggcgcgggtcgacgtggcagttggtgggactacccacgcatgcatcgattctaggtggcgcgattatgcatacggaatttgaatgaaaaagatgcataaatggtaacgagggtacgggggtcgggtgtgcaaacgtgggacgcgcgttatgggtgcgtattttgccgttattggatgcgtaaattcgcatctaacgggacgagagtggtctgatcggttagtggggtgacgcgcgcgtcgatcgcgaacgtggggcgtgcgcacgatggtgtgatgcatgtttatggaaatgtacac

SEQ ID NO: 45318 - DNA, 384 bp, Zea mays
aagcttctatcttgttgcactggggtgctcgcactcgggttattattttttttagagagggtgtcgccctaaagtgagccgtctgagttaaccccccctcgcccttggctcagctttcgccccccttgggaaggccttgggcatccccttttatagatacaaggggatggcccaactgtacatatgggggtgttgctatgttctaacgaggctggcggaaaaaagcttgagacctgtaataacgtaactggcggaacggccctgggacctgatgacgtttctttgccttcatagagagctgagaacaatccacgtcatggactcatgcaaggaaccatcattacctgttgtcggaggaatctacatgtgacactggacttgccc

SEQ ID NO: 45319 - DNA, 121 bp, Zea mays
tccgcacagatgcgtccctgacctctcacgtctcaccgtcctttgcatatcagatcataacgggaacacaaaaaatagtgtgtgtgcagctcgtgcaaacattcttctttttacatcctta

SEQ ID NO: 45320 - DNA, 365 bp, Zea mays
  unsure (1)..(365): unsure at all n locations
ttagtgactagagagagtgatttgtagcgtttattttattctttgcgcttggatcgcttcttttctttggcattctttcttgtgatcaaacactcacttgtaattgaggcaagagacaccaattgtgtggtggtccttgcgggaagtttgttttccaagtgagttgagaagagaagctcactcggtccgagggaccgtttgagagagggaagggttgaaagaaacccggcctttgtggcctcctcaaccgggagtaggtttgagagaaccgaacctcggtaaaacaaatccacgtgtctcacttcattattcgcttgcgattntgtttcacgccctctctcggactcatttttattttctaacgc

SEQ ID NO: 45321 - DNA, 372 bp, Zea mays
  unsure (1)..(372): unsure at all n locations
aactataaatactcagctttgttggacgacggtcgactccgtatttttgttttacttngagaaagatggcttctcaggcctgatatggtaaaagaaacagaagagaatgttcaacgaataatacataatttgaaagaggcccaagctcgccaaaagagttatgtatataaacgacgccaacccttgtactttcaagttgaagattatgtctacctaaaagtctcaccaatgaagggtgtatctcgttttggggtaaaaaggaagcttgtaccccgatacatcgggccttttcctatccttgaaagatgtggaccactggcatactgacttctactacctgaaacattgtcggcagtgcacaatgtgtccaca

SEQ ID NO: 45322 - DNA, 354 bp, Zea mays
  unsure (1)..(354): unsure at all n locations
agctatagacatcgcgtgtatcatctcctttaattccatctgagagacacactcatcatcgntaagtttaagccccttgtccttatccattagattctttggtcctgtcattgttagcacaaaacagagacaaaaaggcaacaaacaatgtgaaccctacaactatctctcacggtggtggtggaggtggtggaatacaaattatgaagcatcttaccccgctcttacaacagttttaccaacactgcaggtggcaaacggtgaccggtgtgactgttcacgagcgtgggtgtgattgcaaaagagtacatgttctgctcgagagaaaactgagctatggaacgctgactaata

SEQ ID NO: 45323 - DNA, 356 bp, Zea mays
taaaactaagctcgttaaaagatgtagtgcaatcgaaccaatggtttttatcgatctcttgcaaatcacaataatcacagagaaagatagcataagagacacgggggtttatcccatggttcggccaagtataacacttgcctacctccacgttgtggcgatccaatggacgagggttgcactcaacccctttcaagtgatccaaagatcaacttgaataccacgacttttcttccttatatctcttcccgtttgcgaggaatcttcacaagttggaacctctcgcccttacaagattaatcacaaagaaagcacaagagttaggttggggagcaacacacacaaatccgcaacac

SEQ ID NO: 45324 - DNA, 297 bp, Zea mays
  unsure (1)..(297): unsure at all n locations
cctgcngctgcagcttcttaccacggattctgntatctatacaagggtgagccatgcatttcccttttagttgtgtcaagctcatttttagcctctcatcttcttctttgagattctgatatgtatcatccgctgttcctgcaaattctagctcaaaagaagatttgcttgttgacggacaacaagcattagcacatggtaatatagtttcaatttgaatacatgtgcaagagtgaggttgttgagatgttaagttttctatcacaacctcatgagcaatatttaatatgatatgat

SEQ ID NO: 45325 - DNA, 201 bp, Zea mays
gcaggaaagccagatgggttccatcactcacacaagaacaccatgacgaaccgcaggccacttgagctactccacatgggttattcggcccaaccgcgtacataagcactagcaggagtaacgatcggcctgcaatagtggacgagcattcccgctccactcgggagggcccttttgcaggaaaaatcccaacccaagaaa

SEQ ID NO: 45326 - DNA, 426 bp, Zea mays
  unsure (1)..(426): unsure at all n locations
agcttaattcattggtcaccttttcagattttatctgagcatgaagagtggagttcagcgtgttggcatcattcaaagaagcaaaaacctatgccaattcagtctgaccttgagaatatttttcttcaagatcagaataccgttgtaccatatctatcaagaaacagtcaggcaagggtgttcagccaaagagcagatcagtcaagcagccaaagaagaagcaaagagcactaaccagcattcgccatctccaaatcagatacccgctgccgaagcagcactggattccaacatgtcagagacaaagctccttctgggacagaggcaccctgcaatctcagctgaccagccatctcgtcnaccaatgcatgacatntaaaacagatgagtacaagaacagtagtctacctggagtaaagtcagacc

SEQ ID NO: 45327 - DNA, 278 bp, Zea mays
agcttgagaagtatcttcatctctacatgtgctagtcggcggggccagagccaacccatgttagtgctagcaattaagcatgttgtgagttcagctctatcaaaatctactaagtatagctgaccctctaacacacccctaaatgctattgaatcataccttcttctaaagacagtggcaccttatataactaaaacaaacagatgttggggggcctttgttttccgagggttctcaaaaacgtaatttgctattgttttccaagagaaatatgtgac

SEQ ID NO: 45328 - DNA, 271 bp, Zea mays
agcttgagaatgttcttcatctcttcatgttgctaacggggaggccacagccagcccatgctagtcttagcgattaagcatgcatctagactggtctcctcttttgcagaatcaactaaataaaggttgccgtctagtacacccttaaaagctaatgaaccatcacttcttctaaagacagacacatctacaattcgggaataaacagttatatcccatattatcaagttggactaccagataacatgttatattccaagcgactcaacta

SEQ ID NO: 45329 - DNA, 398 bp, Zea mays
catgcaagcttggaaccgatcgcgtgctattagctttactcagcgtttcaaatatacatataaacgcgtaagaacatcacaacatacatgggaaaacattgttaaaatgtgcaatataaaatagagctcgcttctacggtcacacaaagaaaagaaacacaatagttggagctacggtcgcggtgttactgcgtatatgcttcgagaatcttaaccacaatatttttgttcgacctaatcatattaaccggtaattatattatgcttaaatagaattagcatttagtttcaactaattgattgtgacggaacctcccaagttattatgcccacctacagttgtcctttgtcatcggaccttggacaaccttgtagatcacctgatcacttgaaagttc

SEQ ID NO: 45330 - DNA, 393 bp, Zea mays
  unsure (1)..(393): unsure at all n locations
aagctttcatgttcgttattttctttatcccttactggttctctctttgtttggtacgtcaccctgcctcctaattccattaattactggaatgatttaaacagtaaatttcatgaccatttcttttccggggaatatgaattagggttagctgattcagcttcagtccgacagggacatgaagaatcggttaatgattatattcggaggttctgagacactagaaaccgatgctttcggatccatgtcgcagacaaagagctagcanggctggcttttaatgggttgctatcctacataagagacaaattagatagtgcctaattctttttaataactcagctacatcagcgggctttggcctatgaaagccaatttaaagagacatcaaat

SEQ ID NO: 45331 - DNA, 300 bp, Zea mays
aaggcaacaatccaggcgcaacatatagaatttttttttttcagaacaccagacgaggggggggttaaaagcaaggactcacctccactaaaggtatgcgacggataaaaccggcacaatgatcacacccaaagtcctgcattccagcaacaacgctctacacgtgtcaaccttcgataaaggaatcaggagaggtaatctcgaacacggtacaaataccgtcctgacctggagggacccaaaaaaaatagccggttgctgtgcagggcgcggacacgcagaaagcacactcctgggagc

SEQ ID NO: 45332 - DNA, 364 bp, Zea mays
catgcaagctttatcacatggacgtgaagagtgccttttttattggactactcaatgatgaggcccatgttgagcaacctcccggctttgaagatagtgagtaccctaaccatgttgataaactctctaatgcgctctatgggctcaagcaagccccaagagcatggtatgaatgccttagagattttcttatcgctaatggctttaaagtcggataggccgatcctacgttatttactaaaactcttgaaaatgacttgttcgtatgccacatttatgttgatgatattatatttgggtctactaacgagtctacatgtgaagaatttagtaggatcatgacacacaaagttcgacatgtcta

SEQ ID NO: 45333 - DNA, 331 bp, Zea mays
gccgcaccggaagaacttgaggaatatgtcaaatcttgcggacatcagccatgagcactcctctttgggggaattgacgatgaaaaattgaactgtatccgagaccatactggagctaagatcatcggtactctatcaaagagtatcggttttccgaagctggaaacggacatcagccgttaccgacgacaacatatctgtggtaggttactttattctaatttcaaggtgaatactttttccctgacttttattgttttggataatgaagacttgtctaacgaaggttgtattcgcgcatcagatgctgatgagcaaagctttgaaaatg

SEQ ID NO: 45334 - DNA, 377 bp, Zea mays
  unsure (1)..(377): unsure at all n locations
atgctagctgaatcggcgccatacaacactttctatacattgttcctagatgcggtaatataaagcacactaccaattattgagcgaaaaagttnttgatcaaccatagtacctccctcatctaagtctatataaccatttgttgccataggtgtcttgataggctttgcattctctaagccaaacttcttgagcatatccttcaaatattttgattggcttataaagatttcatctttcaattgtttgcattgaagaccaaagaagaagctcaattctcctatcatagacatttcaaattcttgtgacattcattttccaaagtgcacacaaaacaattcattagtagatccaaaataatatcatcatcatgaatt

SEQ ID NO: 45335 - DNA, 369 bp, Zea mays
agatttgcctattcacccgcgcctctatttttctttcaattggaatcaaagcccgggacttcattaagagcctaactgctcgaagtgatgtccggagctcacaccaagaaagagatggtgaccggcgagaagcccgccacaagccacgggaaggcttcatcgggagagtctagcaacaagaagagggaggaatcaccttcccgcgtgaagtcgcaccggagtggcgacaagaagaaaaaatgaagaaagtggtctactatgagaccgattcttcgtcgccctccaccttcggctccgacacgccttccgtcacttctaagcgccatgagggcaagaagtttagtaagatccccttacgctatcctcgca

SEQ ID NO: 45336 - DNA, 451 bp, Zea mays
  unsure (1)..(451): unsure at all n locations
gcagcatgcaactactcctcctagaaagccatcattatcgctatttctgaattcgggcatacaagctggcaacgatcaagcgaggtctacatcaacgcttggaacatcgaacaactacctcgcttcttcccttaaaatgtttcaagtcgttcatgttccttgttttctttacatacataaataaagtctaaccgtcaaggaaggatcagccttgcctctgctaagcccgaccctccctctggggctagaaagggggaaccccctctacgtcaaaattttcttcagaaaagttttctaccacaaaaaagtttctaccaaaacaactctcgtgcctctcgactatatcggtaacgaaaccctgacaacgagcgtgagagaccttantcggcaaagtcgaccgaaccgagggactcctacgcctccaggatatggatacctcactcgtaacctt

SEQ ID NO: 45337 - DNA, 313 bp, Zea mays
tttaagcttcctatcaagactcctctcttcttgcttgaagatttctgattttaagaagagttaatcgttcactctagtcaactcggcttgcgcctctgccaccgaaccctccatcggtcgaagaacaaaatctttcttttcaagagcagctctatgatctttaattttgctttctaagccttcaactataaccccatttttcttatcttcaaggtccattgccttctccagctttacttagaccaaactctatgccaaaaaacctctcggcaatccccttcacataaaacctgaaaagctaatgaaaaattta

SEQ ID NO: 45338 - DNA, 281 bp, Zea mays
gtcacctgcggcatgcagcttagaggatgaatattttatcaagtttatgagctccctcaagaggagtccaatgatcaaggtggagatgttcatgatctatacaatgaagatgatgagggttcaagacccccacacccaagagtccaccaagcaatacaacgagatcaccccgtgaacaccattctccgcgatattcataaaggggtaaccactcgatctcatgttgttcatctttgtgaacattactccttgtgtcttctattgagccatacagtgtggaa

SEQ ID NO: 45339 - DNA, 371 bp, Zea mays
tatgtccgacggcccgctttggccgtcggaagttgtttcttttactgtagtggaagttctagttctgaagtataaaaccatagcagttaaatactatagaaggttatgtggtgtgataatattggagcaaagtatttgtgttacgtaatcctgtattctatgatagaaaaaagcgtgcttttttcgatcaggtggttggtggatccaccaaagctttatccgtaagattgttagaaaaatctaagcacaactagtcttagaggtagttaagacgattcagggaatctgttaagaagagtagtgtataagatgagaagtatcaatcctgtagaccgttttgattctaaacagaatagaatgtattaaaatct

SEQ ID NO: 45340 - DNA, 277 bp, Zea mays
atgcagcttcgcagttgcagtcttgtggacttatttgctcgataggtgaggattcagccattacctttaaaatttcttctacttcagcaccacaaggtgttgaaggagtttcctttttctatcttagctatttttggctccggagttgcaccccttctcttcttcgaaatagccaccttctgctcaggattggattttttctatttcagagcttcttcatcctctttcaccatcccagcagcctgtctgctcagaacactgacaacccttttctctt

SEQ ID NO: 45341 - DNA, 375 bp, Zea mays
gagaacacgtgataggtttgactaatgttcatttcttaaaagatagaccttgtgcagcttgtcaagcaggtaaacaagtgggaggagcgcatcacagcaagaatgtgatgaccacttcaagacccctggagctgctacatatggacctcttcggacctgtcgcctatctgagcatatgagggagtaagtatggtttagttattgttgatgacttttcccgcttcacttgggtattctttttgcaggataagtctgaaacccaagggaccctcaagcgcttcctcaagagagctcaaaatgagtttgagctcaaggtgaagaagataaggagcgacaacgggtccgaattcaagaaccttcaagtggaggaatttc

SEQ ID NO: 45342 - DNA, 321 bp, Zea mays
agcttctaaagggagaacacgtgataggtttatctaatgtaactttcgaaaaagttagaccttgtgcagcttgtcaagcaggtaaacaggtgggaaactctcatcatgtcaaaaatgtgatgacaacatcaagacccctggagttacttcatatggacctcttcagacccgtcgcctatctaagcatatgaggaggtaagtatggtcttgttatagctgatgatttttcccgcttcacttgggtattctttgtgcaagataaatctgaaaccaatggaccctcaagcgcttcttaaagagggctcacaatgagtttgagct

SEQ ID NO: 45343 - DNA, 370 bp, Zea mays
tgtggaggaccagatcatcgaaggatataagtttctttattagaagtggtcacccaagttttgttgatgaagcaccacaagactaatcaaggaaggaatccatatgggagttcgcaagaagaaggtttgcgtgttggcatcgatgcttcttcaataagctagttgccaagcgaaagctagaagcctgaagatgatcttgagtagccagaatcagcgtttgcaatcagcagccggatgctccgcaagggccagattttgttgaagttccatctcctcgaagagttgcaaagtgaagatatgtcgctgaagtaaagctatacacataatccttctaagccgaatctcgaggatgagattccttttaagtggg

SEQ ID NO: 45344 - DNA, 398 bp, Zea mays
  unsure (1)..(398): unsure at all n locations
agcttaataatagcaagaataatggttgtattatttaactaaaggtagaaaaatttagagaagttattatctaccttctgacctagttaaaaatattaaacacctctgtccactccatttaagttagttttacccttttattctataatatgcttaaagataaggaaaatagaaaatgcaacttaattaatgaaccagagagtacttctatttttgttaggttacttattcaatatagttcactggaaaaatatatcataccctggtttagtacaacataagtaagatatcttttattttaataaaacaaggataacttataataaccctacaaatatgaccccaaagtaanacacccccacccttgggaataactatggtttattagaaagaaccta

SEQ ID NO: 45345 - DNA, 362 bp, Zea mays
gttgagcacgaaatcttttttgttacggcaaagagtggaaccgacttaaagatgaaaaggctattcacacctcggtagactactatagaattattatcaaatgtaaggggcatgaatgtaattttgtaagggctgtgtcccgtgtctataaataggtgaacagtatccccgtactgttcacgctgacttggcattcactttttgcgtcacgtttgtactgtcatctccttccaagccgaaggtacatttataattcgatattgtctctattcctctttgatgatataataaagtcaaatgaataatgttatatgattattcatgctatcttttatgttcatatgctccgcctttcattaatg

SEQ ID NO: 45346 - DNA, 367 bp, Zea mays
tgatgttgctttggctcccttgctggaagccaatgctatccttaatgccagggcgtctcccattataaagcatgcttcgagcaaatttaaatttttcgttctctaactcatgctcggcaattttagaatttaatttagctatttgaacattttgttctttaatcatagtaatgtgatcattcatagcatcaacattaacatctctacatctagtgcaaatggtgacatgctcaacagtagatgtagatgggttgcaaacattcaattcttctatcttagcaatcaaaattattattctcaattccaagacaagaaaattgaatcatcgcatatactaaagctctttgggaaaaaattcactattttc

SEQ ID NO: 45347 - DNA, 371 bp, Zea mays
tatagaaactcaagcttctaaaggagagcacattctgggactattctttgttttttttgaccaagacagggtttgtagtgctgtcaatcaaggaagcaagttggtgttcatcattcacacaagaacatcatgacgccctataggccgcttgaattactccacatggatctattaggccccatcggttacataagcatcggcgggagcaaggattgtcttgtaaattgtggatgaatattctcgccttacttgggggttctttttgcaggaaaaatcacaacccctagagacattaaagggattcttgaaaccaactcaaaatgagttatcttaaggtctaaaagattagaagcgacatcggggacggagtt

SEQ ID NO: 45348 - DNA, 361 bp, Zea mays
agcttcctccagcattcttgagcccctcatgtatccgaaggtaacaatatgttccgctaggggttatgaagctggtttttggctcatcctccttcttcatccaaatctgatgatagcctgaataacagtccaagagactcataagttctgatgaagcggctgcatcaactagagagtctatccttggcaatggaaactcatccttcggacaagccttgttgagatcagtgaaatcaatacacatcctccatgtgtcgttggctctttttaccataacagtgttagccagctattctggatatttcacttctctaatgactccggcactgaggagtctttttacttcatttcgagctccttc

SEQ ID NO: 45349 - DNA, 391 bp, Zea mays
tctatgtccctacagcacgcacgccgttgcccctacccccatggtcggccgacctcgtcagtgagcccctggcgctaccctgcaactcgccctcaagcctagggtctcactgttttcctttgccccacgcggatgctgtagccgggctatgtctctccctgtcgtagcagcccgcaaatgttttgttcgtcgccggtgagagctgatgtttgttctctttttaattcgtattgtcatccttttccgtattatgattatgtatgtttatgcatataaaatatgtggagtaaaaaccctaggtttgtcgtggaagaggaaagtccatttggcgcgctctacgtgtttggcaaaaagcttaaaccagaaatcgtcatcgcccttacacatattg

SEQ ID NO: 45350 - DNA, 519 bp, Zea mays
  unsure (1)..(519): unsure at all n locations
acctgcngcatgcaagctngngaatgttccaataatatnntgatatcattcccagtctccctgcccactcacttttatcagagctctttagttcacttagatcttgtggtacttcattcacttatcagagttgttgcttaaagaatcccagatcacaaatttcattatatggcaatagcttggccttctccttttgtcttgagcttggacactatagtatgaaagctgagaattggtgtgattttaccactacactggctcaattgtttctagggttcttgagagatgggattgtgtgattttacctatctatcgtttacttcaagaatgttcatacaatgtagtaacttattcttacatgatcaaatgtttacagctgactgtactagaaggttccttttgcaacctcaaattgagatttaaaggagaactaccaccataggcagtatacatatcataattgatccncagaaataaaggtgtcatgatagtaagggtgacatgtgtcttagactatta

SEQ ID NO: 45351 - DNA, 96 bp, Zea mays
ctttgcgtctgagtggacggttgcacttgatcaaacacggtgattaggctgcagcgactatttggatcactcgcattgttcgcaggtctgtggaaa

SEQ ID NO: 45352 - DNA, 287 bp, Zea mays
ctatgaatgcaacgggttgcaccttcagagtataggcggcaccttgctccaagttgacaatatgtgtggtagttttgatcattaattcaaagctcatacttgcccatcacttcctcgggggacattagtttgtatctacgatcttcatggattaattgaccttgagtatgaattaccaaaaatgagagatcttataataaccttgaccagtttatggtcactccatttggtgtccccgaggtggccatcttgatgaccatcgtactaagcctggtgtacatcgcttc

SEQ ID NO: 45353 - DNA, 309 bp, Zea mays
tttttttaaccaatcatccaactgctcctgttgaggggtaaaaaatcaacaagatacttctttgtcctatggcatgctttaatcaggatgcccaccttactgcttctgctgctgacgaagtgctagtgaccgatttttctcaagctgaacccaatgggggttacccgactgatgccaaacccaatgggtgtgaccctgatgatgttgaacccaatgggtgttatccggccaaagtctcatccctatgggtgtaccgtccgctattgatgaaaatgacgaagaggaagaggaaatttcttctattcggaa

SEQ ID NO: 45354 - DNA, 307 bp, Zea mays
  unsure (1)..(307): unsure at all n locations
cagcatcaagcttctagnatatatatgtagtattaatttcaatatgcaactctaccgatctatggctctagagtcatcttggtcttgcacaccgagttgccataagactggtgtccactccgaggtgagcggtacacgtgctgagtccctacaggagcgggggaaccatccttcatgtgacgacgtatcgcgcgctcacgctcgcactgagcgatcttagcacgagctctactcacctcgtccaatgcatggttcatcttcgtgtttagcacggccactaaggtgactgtgctgctcacctacgatt

SEQ ID NO: 45355 - DNA, 402 bp, Zea mays
actaaggttaatactatgaagggttcaccttcgtaattaaacttttttatattacacatagtaaagttacatctgaaacattaaagataaattcattgaaaataaatgacatcattcacgtatcctattatctgaatttaagaaatttgaatacaacgtttatgtacatttatacctttgccttgacaaacaataatttccgagtgatgcgttagcaattacatgaatgcgtgaacagtaaaggaatactgctcactatttataggcacaggacacagcctgtgagaaattacaatcatgcccttcataaaagtttacaacaatgactcagacccttatggactaaaaggtcattctatctttaagtcggttccacccttcatctttggatatgctgtaata

SEQ ID NO: 45356 - DNA, 177 bp, Zea mays
  unsure (1)..(177): unsure at all n locations
gtcccggacctcaaccgccgctgctgcactagagacaaatgtttttccttttcaanctctcacccgagaggctcgaagaagattttaactttctcatcacatgagacaagatccgaagacctaatgtcatcacatgaaagcctaggttatagactcacccctgccttcggatagtat

SEQ ID NO: 45357 - DNA, 282 bp, Zea mays
gaaactcagctcgcaatgaggaatggcgctcgtcatcaatattttttgtttatcctcaaacaaaggagggggaatagactacaagtcccgctccaagaaggtttgctacaaatgtgggaagcccggtcactctattgctaaatgtccattatctattgacagtgatcatgggcgacgacaataatgggagatcaacggagaagaagaggtcctacaaaaggaaaggctgcgatgcctatgtttgtcgggagtgggactccgacgaaagctcaagcgacttct

SEQ ID NO: 45358 - DNA, 311 bp, Zea mays
  unsure (1)..(311): unsure at all n locations
agctagctctntatagattttctattccttttcctttctctctatgcgagagtgtctgctgtcttttattcataattattttgaatccaattttaatttgaatataagtttcacctttgaaccaaatatacaagttcaaaccctaatgtaggaatatatttttatttccttacctttatctaagcactattcgtttgctcgtcttttctaaattctaggagtcccttttaaaattctaaattacactttgagactgtagtaaatttcttttccattattctatgttgcacaaaatgcacacaagataaaat

SEQ ID NO: 45359 - DNA, 378 bp, Zea mays
  unsure (1)..(378): unsure at all n locations
taactntgcaatcaagttgatgcctaagcaaatgactagtttctctagtagacataacactcaatgtacatttgcaccagtgacacttaccaccatacctgatcctcttgccgcctacagtcttatatagtggttcaaaatcctgccacactttagatgtgcaaattcttttatgcttcttaccatcaacattttctgaagtattcgcatctctggaaccattgtttgtagtagcaccctcctctatgttaataggggcggcactgctaccattgttaatggattgagatggaccattctcatcagagggcataatnctcagatcattgttgatgaactgagatggactctttttaccaccaacatcttgttcattac

SEQ ID NO: 45360 - DNA, 341 bp, Zea mays
  unsure (1)..(341): unsure at all n locations
agctagacaattnctattatatgtgcaactttttgtcagcacagcaactgcagaccatacccgtaacatggccatttgcgtgctacgtgactggacatgattggaccgttcaataaagctcagagaggctacactcatgtgttggtccccattgacaaattcaccaactcgatagaatacaaacccattgcttctttaacttcagccaaagcagtggaattcatactagatataatcattacgtttgcgataccgaatagcatcataaccgatctgggatccacttcactagctctgaattctttgatttctgcacacaacggagcatgtcgattaaatat

SEQ ID NO: 45361 - DNA, 383 bp, Zea mays
tgaaaaagttgaggttgcctcgacttcatcttttgtttcttatggtgatcctagggcaatagaccttgccatgagaatcgccgataggatgttcctcaaaatgaaggaagatgaggcgaagaacaagattgaagaagaggaaaatgatcgatggagaccaaacgacgaatccacctcttcacaaggttcgtctttcaaatccacttctcatatgtactttatctctaatgggagtgacagtgaaagcgaaagtgaggatgaggaggagcaagaaagtgatagtgaagatgaggatgatcttcaacaattcttcgctcagctaagcaagaaaaatcagatgagcttgctcaaactcatgaaaagagcggaagaacaaaaagaaa

SEQ ID NO: 45362 - DNA, 358 bp, Zea mays
accgctcctctgaatcccattgcccttaacttccgaatgcccaaaagtaaagcttcgtactcagcaatgctatttgtgcccgtaacatcacttctcgctgcgtagccagttttaactttgtagggtgcgaccaacacagcggttgcttctgctccgaagggtcccaagaaccatcgacaacaccgtcctgcttcaccactttactcgcctttcaccatgagccctggcgctagtcagaatgaagtagttacgcctggaccgaacaaggactggaccaaccccggcaactcttaagtcgacccctttcacgctcaaagctcttattttcaaatgcctcacggtggagaaggactatttg

SEQ ID NO: 45363 - DNA, 430 bp, Zea mays
  unsure (1)..(430): unsure at all n locations
agcttataaagtgctctactaacttggtattgtcatcacaaggagactagacacttaacaaggttaaatagtgttaacacaacagctctgtccagatttggacagattcagacttgcaacttcaaaaattcacaactaaagattcagacatccatataaattgatcctagactttctggaaagataataaaattgtctacatatcatttataaacatctcaaggtgattcaatatttaactaaggacaaaagacactacaaggatttgctgtccagaattggacagattgagtcttcagacaaaacatccataacttaatcttcagatcaccaaaaagagtgatccaaaactttttggaaagcttataanaagaaatacatactcttataatcaccaagaattgattctatgctgaactaaatcaaacaa

SEQ ID NO: 45364 - DNA, 388 bp, Zea mays
tatctgagatgttttgtgcagtcctgtcctagactatggtcttcttggctatcccttgctgaattttggtataatacctgttatcatacagctctgggaaattctccttttgaagtcttatatggtcatgccccttctcagtttgggttggtttcacgagagcagtgctcagtgccagagttacaagacttgttgtctaaccggcaacatatgttacaacaagtgaagatgcatttgcaaagggcccagaaccgtatgaaaaagcaggctgacaaggtgttggaacttgctctcagttgcaaggggatccaacaaaaatgaacaatgacctaagcagggttctcgcgcgtgtgggtaatagctcttgtaatctggcctctcacgggca

SEQ ID NO: 45365 - DNA, 381 bp, Zea mays
  unsure (1)..(381): unsure at all n locations
tgacttangacaaaaactaaagcaacttacaatttttatgtatgaagtagctatttgcattgttgatctatataaagcttttagactgtgtttggtttgtggcacctcctaaccaagccactatttggccatcagataccaaattggtggccatggatttgaccaactttggccaccaaaatgaactaaggtggccaaaggaggaggctgccaagccaaaatttgacatccaataggattggttaaattagcgaaaatttggcttgactagcttggatgctaaactaaacacacccttaagattttcttagtatgtactgcatgcttgcattaaaacatttcacaactgtatcaagtctcagtctctttcttataggaaat

SEQ ID NO: 45366 - DNA, 431 bp, Zea mays
  unsure (1)..(431): unsure at all n locations
cttaagncacctgcggcatgcaagctcacgaaaggaccctctgctatctttgtcttcagcttcagccgaggaccacttctttctataagaccttcggcgacaaagcatatgacccaacaaccatgttgtctgtagaggtgctgtatataaaagttgtagccaacttcttcatcttacttgtgtgaacatttcatgaccataagtctagtagtttgggagttaagattttctcaagtctaatcttggaatctgtccagattttgacagattttaaaactaactctggttggccaagttaaactttgaatcagtcttataaattataagaaggggagtacttccttaaatttcaacaaatttgataaccttttggggactataattaactcacttgttaaaggaatttgatcttccaattgacacaaaccttt

SEQ ID NO: 45367 - DNA, 376 bp, Zea mays
  unsure (1)..(376): unsure at all n locations
tatggagttgtagaaacagcactcaatttatgcagtatccttatcagagcggntcggccacggacgggctattcttcacgggacggcggaccgatttaagggaaaatggcgccgcggcgttcacgggtggaactgagggcggggctttggggctatacggctataaggggttctagttttgctgcacacaaccaatttgggaggagggggcagaggcagcacgaatttctgcttcggttcaacctacggtgtgcgcgatgctcatacctcgccgcggagcatgggctatntatagccgcgccggcccggtggtcaccttgcggccgaggataacatcactatggcatgtcgaccacgtcggtaaaaagtacaggga

SEQ ID NO: 45368 - DNA, 384 bp, Zea mays
  unsure (1)..(384): unsure at all n locations
acctgcngcatgcaagcttataagggtttctgtattgagccaatttattttgacccttttcatataattcggaagacttgggctcctccgaaatctaagtttttcatgtgggtggtcgctcataacaaggtgtggacagctgataggttgcaaaaaagaggtatggatcatccggagagatgtccattatgtgatcaggatcaggaaaccttgaatcatatgctgctgggctgtgttcttgctagagaattttggttcaagctgcttcttcttgtaaatctacaacacttggcccatcagtcctgtgaaggggtttttatggattggtggcaagacttgagcaccaagattcctgtggttgcaagaaatgagcttaattctctt

SEQ ID NO: 45369 - DNA, 396 bp, Zea mays
  unsure (1)..(396): unsure at all n locations
ctgaaanntaagctttatcaaaggacgtgaaaagtgccttcctcaatggacctatctatgaagaggtctatgttgagcaacctcccggctttgaagacagtgagtatcctaaccatgtctataagctctctaaggcgctttatgggctcaagcaagccccaagagcatggtatgaatgccttagagattttcttactgcaaatggattcaaagtcggaaaagcctatcctacacttcttaccaaaacacttgaaaatgatttgtttgtatgccaaatttatgttgaagatatcatatttgggtctactaaccaatctacatgtgaagaagttatttcgatcatgacacacaagttccagacgtctataatgggggaatataaacactctttacgat

SEQ ID NO: 45370 - DNA, 424 bp, Zea mays
  unsure (1)..(424): unsure at all n locations
agcttgagctttggcaaacaccaaccttctttttggatccctttgatagtaagacgattcgtatactcaagttaaataaaatataattaattaaactccttgagtaatacgtgtctcatgtgtgatatttctctatggtgttgcttcataatgatcacaaacatctttgtctcaccttttgaagaaaacacaaatcaagccatgtgacttaaacattttatcatatatgagttcaaatcatggtttcaagtcaccttactgatgcatcaacataatataactctccatagctgattagcttatcgacttagtgcaggtactctcttcttcaccttagccatggtacctcggtccacaagttgtcgcttggccttcacctttccttagtccctcgaagtcacactnagtacaattgtctctatac

SEQ ID NO: 45371 - DNA, 357 bp, Zea mays
ggagaacacattttgggactaacaaatgtttatttttagaaagacaggatttgtagcgcatgtcaagcacggaagcaagttggtgttcatcatccacacaagaacaacatgacgactgacaggccgcttgagctactccacatggatctatttggcctgatcgcttacataagcatcagcgggagtaagtattgtcttgtcattgtgaatgattattctcgcttcacttgggtgttccttttgcaggaaaaaactcaaacccaatagaccttaaagggattcttgagacgggctcaaaatgagttcggcttaaggatcaaattgataacaatcggcaatgggacggagttgaagaac

SEQ ID NO: 45372 - DNA, 401 bp, Zea mays
tataaccttttgatgttttatttccaccactgactcaaacttgattagtggataatgaatcacttagtatagtcctctactccagacctagggaacaccagagtgcctatcccttttcaagtatgaacttgtgacctctctctgctgcatatgttaggtatattgatcgttgttgttattttcccaagcgcatactgtgaatgattgctttacgcatacaacgagcagtctgtgtttcccgaagcagttgcagaggaagtccctgagcagcaggtttggtgaaggcaagtgtcctctgtgccactatgccctattcatttataacttactaacgcgcattactcacttgaaacctaaggattgactagcgttacactctactttgtccttgatgacctatt

SEQ ID NO: 45373 - DNA, 362 bp, Zea mays
ttggtataaagctcatcagacgacggtttttattttattccttcaacacaaatatgggaacagaaatgcaaagagaacaattactgattacataatgatactattcgcatttcataaaacatgtatgaatattaacagttttaatattacattgatacctacggcttgctccaaagagaagacacgatagagcgattacaattcagtgggattagtacagtgttactgttcatctatttataggcacgggatgcagcccgggtaaaaatacattcatgacctctaaccgttatctacagacaacctgaaatacgaaggtctatctggtcttttcttctacttgacttgaacccaagctgaat

SEQ ID NO: 45374 - DNA, 455 bp, Zea mays
  unsure (1)..(455): unsure at all n locations
agctagtggcgcccttgagcgtcttgtcgtttccggagtatttaatctcccacctggaagcctcggggctgaacccttcgggcgtggtagcgtcgcagagactgctgataccatgccgagtgtagtaaggccacgtcccgagcctcttctagctggtccaacgaatcttctcggttggtctggttactttggtcgtcgtaagcctttgtcctcggggatccgtattctaagtccgtgggtaggatggcctcggccccatagactataaacaatggcgagaaaaccgtggcccggctcggcatcgtcctcagactccaaaccaccgagggtagttcttttatccaccgcttgccgaactcgttgaggtcgttgtagatcctctgctttagtccctgcanaatcatactcgttggcacgttccacctggcccattgtcattgggtgagctaccacgg

SEQ ID NO: 45375 - DNA, 398 bp, Zea mays
atactccgctttagtaggatgtgtattagcaacttgcttcccagcttgtctttctctacaaggcctgtccttctcaaataccacatcctttaatcctctaactgaaagggaattaggcttacacctatttcctaattgattttagtggttgaattgcccaacacaaataattggactaactagtttgctctagtgtataagttctacaggtgacaaaggttcacaaaaagccaataaaaagaccaataaatgggttcaacaaagagagcaagggataaccgaagtgtgccctggtctggcgcgtgtccagtgcaccagggaaccccaagctgaacgcttcaccttcgggaattctcagaggcgcttcgctataattcaccggactgtccggtgtacca

SEQ ID NO: 45376 - DNA, 473 bp, Zea mays
  unsure (1)..(473): unsure at all n locations
agcttcagctncatctatgttatggattgttattgagtcatttcttttgccttcggcccttctcgcagcttcctgacttccatggatagcaatgggtccctgatccgaaagtatcttcatgcatagataggcaggatgaaagattgcttctaaggcattaagggtaccacgaccaataattgcattgtaagggtattccatgtcaacaatgtcaaacacaacttgctcagttctagtgttgttgatgaacccgaaggtcactgacatggtgatcttaccgagtgctacaatctgtcttcctccgaagccacagagaggatgtgtagcatcatgaatcttatcttctggctcttgcatttgtctgaaggccttaacaaatatgatgtcagctgcactgcctgtgtcaaccaagacattgtgaccacaaatcctttataacacaatagataacacggcatcctgtgtgggaatct

SEQ ID NO: 45377 - DNA, 389 bp, Zea mays
  unsure (1)..(389): unsure at all n locations
tgggaagattcttcattctaacatgtgctagtcggttatttctgagccagcccatgttagtcttagcaattaaacaagtgtcgagttcagctctatcaaaatctactaagtatagctgaccctctagcactcccttaaatgctactgaatcatcacttcttctaaagacagtaacacctatatccgtaaaaagacagttgtgacccatttgacataattgagaaactgatagcaagttgtaatctaaagaatctacaagaaaaacattggaaatggaatggtcaggagatatagcaattttacccaatcctttgaccaaacctgtgtttccatccacgaatgtgatagctcgttggggatcttggantttttcataagaagagaacatc

SEQ ID NO: 45378 - DNA, 205 bp, Zea mays
tttttctccaccaagggccacttggtgcggatcctatcacagcctttgatcttttcgtatgtgagttgtagcatcgaaatttttgtgcaaccgcagcccttgccttcgctggtaatgaagttaagtgccccgagaacccttcgcgttagactttttccttggcttcggaggcccatatgtgaacctgagtttactaaggcttagg

SEQ ID NO: 45379 - DNA, 399 bp, Zea mays
  unsure (1)..(399): unsure at all n locations
agctagagacgggaacaaccgcggcatgctctacatttcttgaagaaaatgtcaaggatttgaggattgccatgaggaggaaacacaagatgaaattcaacacctcctccaaaagcctcaaccacgcctccacaaaaggtaacatccaaggtaatgatcaagccacacttcacattaagaagtgtagtgaatgctttgaagtggggcactcgattaagccatgtccctatattaatggcttggatgctaacaaagatgataaacattgttttattcgttccaagaagggacactcacttagatcttgtccccattaanacaacaggcataaggtagaaaagaaaattttacttacctggttcacgcacaaacaggaagaaaaatgatcttcaaatttga

SEQ ID NO: 45380 - DNA, 376 bp, Zea mays
ttgcgggaaaaggtgaaagaagctgatagcaaggatatttatgagatcaacatcagggacgtccactccgaatccgttggcaaaatcgtttggagtagcccaaagagaatctgtcgatatggaaattaccaaatttttatgtgccaacggtattccattcaatgtgttgaggagccctcaattttcacaaatgataatggcaataaaaaatggtccaaaagattataaaggtccgtcgggtgaaaaggcaaggacaactctcctagatgcatgcaagagaagtgtggagaccgacttagcaccacttaaaagtacatggtaagttcttaattttattgccttttcattgtatggttttgtcacaaaaactcacttt

SEQ ID NO: 45381 - DNA, 364 bp, Zea mays
agctagtggcggcggacttctgctgcatctttatccgggcagcgggcgacgccgcgacgcattctgccatcctcgttcggccaggtatcacctgattgccagctgccagcttcttgccttcttggcttcttcttcctcatccggcccggcactccacgatttcgtgcccgctaccatcaaatccagctaagcactcgctgtcagcccgccaccagctccgcactgggcactctcgctccacggttttgcctggtgcgcgctgcaggtcaataacgcgcccactccttggctctggcacaagcacaactacgcgacctcgcacgtgagttgtgtcatgctaaagcgctctgtgcacggcgcacag

SEQ ID NO: 45382 - DNA, 377 bp, Zea mays
  unsure (1)..(377): unsure at all n locations
tcttctttactccaaatctttgtatgcccttcatttgtgataccttaagattcacaaagtctccaacttgaaacgtaagtggtcttcatctttggtcatcataacttttctgacgatattgcgttgctttcatattctggcgaataactcgaaccttctcttcagcttcaacaattaagtcattcccatagaattttcgttctctgacttctacccaatttagtggtgtcctgtatcgtaggacattgacacacgacaaggttntactagaggtgaaactttccttttaccctaatgttatgctcctttctaagagaagctagctatctgtaaccacctcccccttgatctataaaatggggagggttagccttaag

SEQ ID NO: 45383 - DNA, 168 bp, Zea mays
accccaagcgactgcggcatgcagcgtgggcgactgcgagagggcgacttcctgcatgaagcccacacacatcggccgcgcggcagaagctgaagacggaacccccgaaaccgctcgaatcaaccaccaaccacgagtcagcggccgcacacgacgaaataggcccac

SEQ ID NO: 45384 - DNA, 443 bp, Zea mays
  unsure (1)..(443): unsure at all n locations
ttatgtgtcttcgaggggaagctacctaccgggctttatatcttattgtgaagaggacagcggaatgcggtcaagccacggttggttaggcccgcgcggcggcttctgagcaggtgtcgtgcgaaaggtactgccgggagctatagggctgagcctctcgtgggatgtttcggcacgcgggcataaggagtgctatacggtggacagacatactcgcggctactagtgacgcggtcttttatagcncggtggcagcgcggcagtggctcatcgggccggcgcaccgggcagcggcggggtgttctgcgcactgggccgtgcttcttgagcgccgcccctcgagttgtcaaacccgcgtctgaacacatgggaagcttgtctcctgccatgggtcaacggcagaattgagcaccttagcgtgcatatcttggccaaaccactgt

SEQ ID NO: 45385 - DNA, 434 bp, Zea mays
agcttagaacttcggagataaagtatactgtttcttgttttttgatttgtccttctaattactcctgcacaagcgccgcactcactgaagagtgcgaagctgtcacatataatagtaatggagcccctggcgcacgtggaattaatgttgttagatcaatcaggtattgctttagctcttcgaaagctttctgttgagctgggccccactgaaagacttcggatgactttagtatttcaaagaatggcaagcttctttctgctgatctagatataaatctgttcaatgaagccaatcttcctgccaaccgttggcccccttcttcgtacttggcggttccattcgaaggatgaccttgatcttgcttgattgccttgcatcccttcgtgaaataggcatccaggaacttaccttcttactccaagaccatttta

SEQ ID NO: 45386 - DNA, 369 bp, Zea mays
tattattactattatatgccaacaaaaataacccttatgacagaacccacccctagttaagagttgtagtacaaagtcgcccatttacacaacttttgttgtttttgtccaaagcatagcctttttattttgaacctcaaattcctagaacaggctatagtgacaaatggcaacccactgtaatttttacagaatttttggaaaaagttaattcactgttgtagttcaaacctacactagaattcataaatagagaataaagaaagggaaaatgaatgatggaaattagtgtcatcctaaaaccctttgtaaattttccactgaaatatataagggaaatgccaatccactatgcttacccttaacaaa

SEQ ID NO: 45387 - DNA, 230 bp, Zea mays
  unsure (1)..(230): unsure at all n locations
acggacttaggacgagctgcactgtgtgagaatattttttgggctgacggtatcactttactagcttaacttaatgttttttctaatgaccagtatttgaggatatactaataacactnacaaaatgtgtgaggataagatatcgtgtgaactactcactgggaagcaggagaccttgtttatgcagttcaatattctgggctggagccataaagagcctaaagtttaat

SEQ ID NO: 45388 - DNA, 381 bp, Zea mays
ctggaagatgtcagatgataaagccgaaggtgcattaaatgaatttaaaaggctcctcagtgctggagtgatcaaagaagtaacatacccagaatggttagccaatactgtgatggtaaagaaggcccatggaaagtgaagaatgtgtattgatttcacagatctcaacaaggcctgcccgaaagatgaattccccttgctaagaatagaccctctaatagatgaggcaaccactttggagctcatgatcctggtagactgttactgaggctatcatcagatctggatgaagaaggaagatgagcccaaaacaagcttcataacctctaatggaacttattgctatcttcggatgcctgaagggctcaagaacgctggagg

SEQ ID NO: 45389 - DNA, 397 bp, Zea mays
  unsure (1)..(397): unsure at all n locations
agcttatttatgctgtactcgttgcgnccattgaagtcgcgccactattttcaggcacacaaggtcgtggtggtgaccttctttccgttaagggccatcctccacaactctaacgccacatgcaacatcgccaagtgggccgcggagctcgctgaattctagctggactttcagccttcccacaccgtcaagagccaggtcctggctgacttcatcgtggagaggacacctccccagagcgcttcttggggttcggatcccgattcggatcccacacctacggtgcccagagatctggtcttccctagccccactgacactcttctcnacagatccgcccgtagcaagttggcgggctttggtggtctcatcacccaaccgagaacaatgaagacat

SEQ ID NO: 45390 - DNA, 379 bp, Zea mays
tggtcattttattgctaactgtcctgacaatgatatcgatcaagatcaagggaacaagagggagaagaagaagaactattagaaggcaaagggcgaggcgcatctaagcaaggagtgggactcggactgctcctcttccgactccgacaatgaaggactcgccgccaccgccttcaacaagtcatccctcttccccaacgagcgtcacacatgccttatggcaagggagaagaaggtgagtactcaagactccacttatgcttcttctagtgataatgagtctagtgatgatgatgacataaattattcatgcttattcaagggtttagatagatctaagatagataaaattaatgaattgattgatgccttgaatgat

SEQ ID NO: 45391 - DNA, 473 bp, Zea mays
  unsure (1)..(473): unsure at all n locations
agcttgtgaagattcttcattccaacatgtgttattcggctatgccagatccagcccatgttagtcttagctattaagcaagtgtcgagttcagctctatcaaaatctactaagtatagctgaccctctaacactcccttaaatgctactgaatcatcacttcttctaaagacagtaacacctatatctgtaaaaagacagttgtagcccattttacataattgcgaaactgaaagcaagttataatctaaagagtctacaagtaaaacattggaaatggaatggtcaggtgaatatagcaatttacccagtcctttgaccaaaccttggtttccatccccgaatgtgatagctcgttggggatcttggttttctcataggagaaaacatcttcttctccctagcatgtggttngtgcacccgctatcgatgatccaactttgagccccgatgcataaaccttctttcttttg

SEQ ID NO: 45392 - DNA, 382 bp, Zea mays
ttaaatatgacaatcaaggttgaagctaagaagaacctgttacttagtgaaacgcttaaagctcttaggaataaatgcttcagctttgcggatcaatgtactgctcaactaaaagatatcttcaattctgtcggagccatgtccgaagaagctgatctctctgctgaagatatccccggggcactcgaatgtattgaaaataagttgacgtccttgatgaagtcataactggccacggtgatttctgtgcgctagtagcttctcgtggtacagctgctgctttcataaaagctggatgcaatcatgcaagagccatcaacaggccaaactctagcctatcgccatctgaccttatcgacattccgaccgaagcccgaagtat

SEQ ID NO: 45393 - DNA, 460 bp, Zea mays
  unsure (1)..(460): unsure at all n locations
agcntttgagggagatttgagtgaccgcggttactgtctgttctttctctggcgcgaggaggttgcacccgctttggagaaagcaagttgcgaacatgttaaaaccttggcccaggccgaagctgccttttctgtcgacgacacgaaagacccctcgaccgaagcaagtttattaggcggcaaatttttcactgatatctgggaaaatggcggccgagggatggctcatgaaataatgaagaagagcgaaaaagatattcatgacgctcgagaagcaacgaaagaagctgagaaagctgcggaactcgaaagaccgatatgtattacttaatggcctttagcttaactgtttattttcgcgattccaactaattgatgcttctactgcagctgaactactcctcaccagagcattgaccactgccgaccacaacaagaagctttgaatataaataccgac

SEQ ID NO: 45394 - DNA, 394 bp, Zea mays
  unsure (1)..(394): unsure at all n locations
ctatnaatactcagcttgtaagggagaacacgtgatatgtcttacttatgttttttttttaaaagatagaccttgtgcagcttggctagcatgtaaacaggtgggaagctctcattatgcccaaaatgtgatgactacattaagacccctggagtttcttgatatggacctcttcggacccgtcgtctatctaagtataggaggaagtaagtatgggcttggtataagcgatgattttttccgcttcacttgggtattctttctgcaggattaatcagaaacccaagggaccctcaagcgctttctaacgagagctctataatgagtttgaactctaggcggaataacattataaccgacagtgggtccgaattcaagacacttcaagtggagg

SEQ ID NO: 45395 - DNA, 360 bp, Zea mays
accccatgagcttttcttgtttttagatgtgtcaggcaaagctggtgatacctatctaatctatattccatctaatctaatatgatcccatctaaagtgagttatctaatagattagttagtactagtgaaatagattacacctcactcctataaaaatgttctaagttaaatcggtgccctacattaacttgaccatattcaactacctaatcgtatgcaactaccttaaccatccgagagttgcataacccctctgttttaatctatcagcagttctgacaccatccatatctatcttaaccatattcctccaactccgatgatatacactaacctctaattaatgagatcaatgccg

SEQ ID NO: 45396 - DNA, 479 bp, Zea mays
  unsure (1)..(479): unsure at all n locations
agctttctgttctagaatgctgtcacagtctatttttttatttagtctgggccttaagttagattgttgcggttgctcttctaatgaaagtttttcagctgtaatcagtccttcaaggaaatggttgcgatgtgcttggtgaaagatcaaacgaagaggccaacagctgaaaaattacttaagcattcttttttcaagaatgcaaaacctccggagctaactgttaagaacattttaactgatttgccccctctttgggaccgtgtaaaggcactccaggttggtttctatgatttgtttctcatttatttttttacacaatgcttgtgatagtgtttcttagtgagtgactctgtattttcagctaaaggatgcagcacaactagctttgaagagaatgccttcttcagaacaagaagcactttctatggttcgtgaaagcgacccttgctattntctctactcacaacttttttctg

SEQ ID NO: 45397 - DNA, 390 bp, Zea mays
gctctatcaaatggacgtgaagagtgccttcctcaatggtacctatcatggaggaggtctatgttgagcaacctcccggctttgaagatagtgagtaccctaaccatgtttataggctctctaaggcgctttatgggctcaagcaagctccaagagcatggtatgaatgccttaaagatttccttattgctaatggcttcaaagttggcaaggccgatcctactttgttcactaaaactcttgacaatgatttgttcgtatgccaaatttatgttgatgatattatatttgggtgtactaacgaatctacatgtgaagaatttagtaggatcatgacacaaaaattcgagatgtctatgatgggggagttgaaatattttctaagatttc

SEQ ID NO: 45398 - DNA, 415 bp, Zea mays
  unsure (1)..(415): unsure at all n locations
catgcaagcttgacanacagagagtcggagctacgtcttctcaagaattattatttgtgagaaaggagaggctctggaccacggcgctcgtgtgtcattgtcctacggttacggttgctggctgtgaagggcgtggtactgctcacgggatgaacagttactcgtggtgaacagtatacacaggaaaagggggaagccgaccacgatgatctgcttgcttaatctttcattgatgaaggggtacatctatacggctaagaaagcaaccgtccttacttaatatcttaacataccaaatccttatctatctaaacaaactcattatccctatccatctcaacaaactaactgatacttattcatctagacagactaactcgattattagggctggtaggctcgcggcataaaactc

SEQ ID NO: 45399 - DNA, 348 bp, Zea mays
atactcagctcgggaacagtacaaattcagaagggagaaggcagcttctttatattagccgaagcccatgctattgtgtgaggacatagcaaagcacaacgcgctgttgggctcgcaattatctgaagaccacgagaaaaccttgataaagtttttattcaacaacaaagatgttgttgcatggtccgctaatgatctctgtggaataaattgggatgttattgaacattcgctcaatgttgacccatccttcagaccccgaaagcagaggcttcggaaaatgtctgatgacaaggccgaaggggcttccaatgaagcaaaaagactcctcactgcaagagttatcag

SEQ ID NO: 45400 - DNA, 289 bp, Zea mays
  unsure (1)..(289): unsure at all n locations
agcttctatagggagaacttgtgataagttttactaacttgccattcgaanaagatagaccttgtgcagcttgtcaagcaggtaaacaagtgggaggagcgcatcacagcaagaatgtgatgaccacatcaagacccctggagctgctacatatggacctcttcggacccgtcgcctatctaagcatatgaggaagtaagtatggtctagttattgttgatgacttttcccgtacacttgggtattctttttgcggataagtctgaaacccaaaggaccctcaagcgct

SEQ ID NO: 45401 - DNA, 383 bp, Zea mays
ttaactgattcagagctccttggtggaccattcccatttttttcttctccatcccttgacataaagggttgtcagaggtcttcatcggtaaacaatggcacgaaaccttacggcttagtgcatctgccacaacattggctttgcctgggtgataatgaatctccagttcataatccttaataagctcaagccatcgtctctgcctcatattcaattctgactgggtgaagaatgtacttcaagcttttatgatctgcataaatatgacaggcatttcccaccagatagtgacccccaattttcagggcatgaaccacagcagctaactccagatcatgaatcgggtaatgctcctcatgtcagagtaactgccttgaagcata

SEQ ID NO: 45402 - DNA, 451 bp, Zea mays
agcatccatgtacaatagttatgtcctcctattatttcatcgggcttgcggagcagagggtgcgcttgcgcatactgcatccacaggagtcacagaggtctaccatacacattctcataaaccagctcctaaacataattggatgcacacatattaaaataatacatcaacagtaaaatgttgttcggtcataaaatgtaaagcaaatggtaatggtaataattcacactcgaataccggcgataacagatttgaataagacagtgtcaacttatagcgtagtatcgattgccgctgatttaagcaaacataatttaacgctatccgtcatccattacattatcaatacgtgagccgaccggccctaattacaacggctaaccaatgtctattgcctagctactagttgtcgactggcctgtgtatctacaactttctcattcacatacac

SEQ ID NO: 45403 - DNA, 378 bp, Zea mays
ctgcagtgccagagttagctacattaacaagagtttttatcatcaagacttgtacaaaagtataaattatagaaaacagtaaagaaattgtgccacgaaccacctttcgatgcttcagcctcctttgactgagcaagagccctttcctcttcagcaagctgaaactcataatatttgtagtctggacagtgtttgtcaaatagaaacctgcaaatgattcaatatttttatatataccaataattgaaagtaaaattgactcattaagaaaaaacaccacaccgtaaaagagttggtaagaaaaaatttgtgaagtcgtacttgaatggtgtatctccaggattcctctgccgtgtgatattctcaaactgtctcccg

SEQ ID NO: 45404 - DNA, 317 bp, Zea mays
caagcactgagctgcagcttaagaaccattttctaaagtatgttgaagttgttatgacgccacagcatgaaaacctcctctccttcagttagattagtattctatccttactgggatgtaccataatatagttcaattcactgcaatataaaatgttcaatagtgcatattactttgacatcaaccatatatgtgcactaatttaaaataatttaatctaccctcttgggctctaagaatgatgattcattcgccatcctcatataaagatcatcattagtgaaacccttctttgtgtttctaaagctctctttcta

SEQ ID NO: 45405 - DNA, 375 bp, Zea mays
  unsure (1)..(375): unsure at all n locations
tgaagccatggtgagtagcatacgctagtannnntcttataggaagaagcctatgctcgggtgcctacgggttaccgaaatacaaacctaccacttgtgaatatcccttggccacaaggccggctttgttccttgtcaccacaccatgctcatcttgattgttgcggaagacccacttggttcctacaacattttggttaggacgtggaactaaatgccatacctcattcctagtgaagttgttgacctcctcttgcatcgccaccacccaatccgaatcttgaagtgccttctctaccttgtgcggctcaataaaagaaacaaacgagttatgttctcaacaatgaccaacacgagaacttattagttacccct

SEQ ID NO: 45406 - DNA, 378 bp, Zea mays
agcttgaaccgaagacccgcgtcaccggaatatcgaaactgtgctcgccggagctcattcccccgccggcgcacgtggaccgggtaaatcactgagccattttccgattcaatgcacagatagcctctacatcaccctaaggagctcaccgtgccgttggattggaataggtcgccgtggtttggacggtacacccgccgccgacgaggacacccgcctgcgcgcgtggactgagcgattccagccatccccgccggcgagccgtacgtcgttgtgaccgccagaaccttcccgagctaaccctacccctcgccggacttctctcgtcgccggtaagccgcgccacccctttcttctttgcggtacttgttacacctg

SEQ ID NO: 45407 - DNA, 394 bp, Zea mays
tcaagctttagtaaataaaccttccttaaccttgtctactatgttgtttattaattttaaacagtgtaactactaggttagggtctccactatttttattaaccctggtctaacaacatttctatttttcccttcattaatgaattttgggcagttttcttatttaattcaaaattctataaaacattacaggaactatggggtttattatttttgcctgaaagattatatttcaaaaagtctagcaaaattggtttgactaattttggatgattattcttcaagttatgcatttattaagttctctgcaatatttaaaagaaaagtatttttgaaatggaaaagaaatacagatttgcgctgaagtccctgggttttctcccccttttctctc

SEQ ID NO: 45408 - DNA, 379 bp, Zea mays
tggtcattttatcgctaactgtcccgattatgaatgtgaccaggaaaaggggaacaaaagagaaaagaagaagccatacaagaaggcaaagggcgaggcgcatctaggaaaggagtgggactcggattgctcctcctccgactccgacaacgaaggactcgccgccactgccttcaacaaatcggctctcttccccaacgagcgtctcacatgtcttatggcaagggagaagaaggtgagtactcaagactccacttatgcttcttctagtgatagtgagtctagtgatgatgacatagattattcatgcttgttcaagggcttagatagatctaagatagataaaatcaatgaattgattgatgcattgaatgaaaag

SEQ ID NO: 45409 - DNA, 453 bp, Zea mays
agcttaaggggcagtggacaactgcagactatgttgagctagaatcgtcttacgacgaagacactacgttcgacatagctgctcggcacgggtcccaaattgaagctgctccaatccttgacagagtggtacctatttctttactaaaattagagatttcaattcaatgctttatgtctagttttgtgcatcctaatgttctaacttgtgaatagggaaactctatgctcgtatctgttgttgaacttgagcgtatctcacagagaacttcagacagtactacactttcgttactatcagtgagtatcagtgagtatcaatggttaaaagaaaacttgtttattttatatctaacatatgtctgtactcatcttcattacagaggtatatgtcgcttcgcgtcaacaactgtgtgatgccgctctaccagcgtgactgcagtgctgtgctcta

SEQ ID NO: 45410 - DNA, 385 bp, Zea mays
ttataatttgggtattacatcaagggcacaacttgccttatactcgagattcccatgtacctcactaagctggtcttcgggtttcttgtgacctcactactactcgtgtcaaaacatgcagaccttgcataggagaaattaacatcacaccaaacatatgaacaaacagcgtaagaatactctacgcactgctacaagatcgtaagttcgagaataactaaaagcagaattaaggttgaaaagatatagcgtttggaaaatctatgtgattaactatgaaaaactatgtttccaggttgattaatataaatcatatgagaaagacatcctagagaaataactaagtcaatcgcaatccatcttatgactttattagagattatag

SEQ ID NO: 45411 - DNA, 372 bp, Zea mays
  unsure (1)..(372): unsure at all n locations
agctntgatggctgaaccattgcaaatggtactggctttttgtagaactgccatcagagctctcctgctcgatcaagagacccaaattttcagttgcagaacttctagaatacctacagggtacaagtggttcttatgttgagacaacatctttggcttgtttcttgtgatgtcatctcatgattcgcggctatgagacaagactcctagcctgtgaatatctgtaataatttattgcggtcacaccaacacaccttagctaaacattgtaagccaaagtttctttcttccgagaagaaaacaatagctattctatgatacatgagtattgatagtgatgaccccttacagcatgctaatgactgaacttct

SEQ ID NO: 45412 - DNA, 462 bp, Zea mays
  unsure (1)..(462): unsure at all n locations
atgaagntttacggtgccctgtgtgagcaaaagctttcaagaacattatctacgtcatatgcatgggaacgtggagtttatagacagatctgtgtgtggaattgaccgggttagttaaacagttaccattatgtcgctcttgcgatcctggagtattctggcagcccccaggccctataagcattgacgtgtgcgcgtcgagtccgcaagcgtgcattatcccactctcctggcccttgtgttcccagtccaccagctcctatcaaagagcaatgttataccgggggtaaggtttatcttttttccggtcaaaggtgcttccccgatgtatgagaaaagttaatggcttgactctctggttatttngntttcgggattatggttcctcccggctcctaagacaactccagcagcactcgcatgcgggtcggatccgtattttgcgagtctgcacactattca

SEQ ID NO: 45413 - DNA, 294 bp, Zea mays
  unsure (1)..(294): unsure at all n locations
tacatcactctnattgggccgctatatatttcactagcggtgacgatacacgcttcattaacaagaaataagatttcctagcagaccttgcagaaacattcacaaatacacgagaggtcaaactatgcctagacctagaaaaaatgcagcttcatagtttgcaagggaaaaatttttggaatatctagtatcgccaagggccatcaaggttaacctcaaaaaagtcatgacaacaacaaatataaagaccccatagatagtaagggacgtccaacagctaacattaagaataac

SEQ ID NO: 45414 - DNA, 161 bp, Zea mays
gagatcgaaccgtagagactgatcaccggtatatctgatatgtgctcgccggagctcatttgcccggcaggacagcggatcgggcacataatgcaccattgtacgatttgatgcacagatagcctcttgatcaacctaaggaggttatagtgccgctggat

SEQ ID NO: 45415 - DNA, 288 bp, Zea mays
acatccccgcggatcagactaaaatattatggccactatatttacatcatatgtatcagttggagcgatacctaggagtattaaaaggatatgtgcgaaattcgcgctcacccagagggttcaatcatggaaggatacactacagaagaagcgattgagagctgtatagattacatcacggacggaacaatgataggtgtgcctgtacctaaacatgagggtaactacttggccaaaggaaattgttaaaataactttgccatcgaagagtacacttcttatacatta

SEQ ID NO: 45416 - DNA, 368 bp, Zea mays
  unsure (1)..(368): unsure at all n locations
agctagagaagggtccttatttcncacatgatttaagcggtgatgccacagccagcccatgctagtcttatctattaagcatgcatctagaccggcctcttcttttgcaaaatcaactaaataaagcttgccttctaatacacccttaaaagctagtgaaccatcacttcttctagagacagacacatctacatttgtaaatagacagttatatcccatgttacataattgactaactgatagcatattatatccaagagactctactaacaacacattacagatagagtgctcattagacatggcgatgttacctaacncttgtaccttgccttgattcccatcacagaatataatcgaatcttggg

SEQ ID NO: 45417 - DNA, 373 bp, Zea mays
ggaaaaattttcaccgacatctgggacttttgttgccgagaaatggcccaagaaattattcataaaagcgaaaaacgcatccatgatgctagaaaagtagcagaggccgctgagaaaagcccaaagcccgaagggcaaataggtattaattaagggtttttgactcttcgatgtaattttttgatttcgaacttgctcacggtttgtaatagtaatatatttgtatcttctcttccctcagaacctgctgagctatctccgggcccccacacgaagggggatgacgaaattatacaaatggccgaagccatcatggataaagttgttgatcagctactaaacgaagctgcagaagtagtcctaaaggaagatt

SEQ ID NO: 45418 - DNA, 346 bp, Zea mays
agcatactatgctcgtggagctagcttgaacccatcaaccggctttgatagcttataaatatgataagggtgcttactatcttcaaaacctggatgtcgcttaacatatacctcttctttgatatggcactgaaaaggactcttcattacattgataagctaaaccatgttagagccaaggccgtcatatacaattgcttatgctacttccaggctaggttatcaatccaaaccttgtttgagataacctttgtaatacgctgctttgtctataccaaccacgtactttctgttgacgaaccccctggtactacaacatttggtcggaccgggactacatctctac

SEQ ID NO: 45419 - DNA, 284 bp, Zea mays
atgagccagcatgtatgtctgcttggatcctttcggccaacagatcatcggagtatcgtcagtccgtcaagcatgttggtcatcggctggatatgttgtatcttgcaagtatatatattttgcaattaaataagatatgttaagttgttaaataatgtgaagtcaattgtatatatatatatatatcactatatcagagtctatatacgtggatttactcatttacctctggtgaaagcttatttatcttgcttaaatggggctacagtatcaaacaacttata

SEQ ID NO: 45420 - DNA, 441 bp, Zea mays
  unsure (1)..(441): unsure at all n locations
agcttctaaagggagaacgcattttatgactaacaaatgttcattntgagaaagacagggttngtagcgcatgccaagcatgaaagcaagttggtgccaatcatccacacaagaacatcatgacgaccgacaggccgcttgagctactccacatggatctattcggcccgattgcttacataagcatcggcgggagtaagtattgtcttgtaatagtggatgattattctcgcttcacttgggtgttctttttgcaggagaaantctcaacccaagaaaccttanagggattcttgagacgagctcaaaacgagttcggcttaaggatcaagaaaattagaagcgacaacgggacagagttcaagaactcttatattgaaagcttccttgaggaggagggattatgcatgagttctcttctccctacatgccacaacaaaa

SEQ ID NO: 45421 - DNA, 342 bp, Zea mays
tctcttggatggcttcggcatacgaggtttgtcttttttgaatgagcactctcaagaaagtattaaaaaaggatatggttagaggattaaaggatgtggtatttgaaaaagacaagccatgcagtgcatgtcaagctggaaagtaagttgctaatacacatcccactaaagctttcatgtcaacatcaaggccactggaactacttcatatggatttatttggacctacaaattatgtcagtgccggtggcaacctctactgtctagtgattgttgatgacttctcaagatacacttgggtgttctttcttcatgacaaatttgaagttgcatctatattta

SEQ ID NO: 45422 - DNA, 134 bp, Zea mays
agcttctaatgggagaacacattttgtgattatcaaaagcacactccgagaaagacaggatctgtatcgcatgttccgcagggaagcaagatggagttcatcattcacacaagaacatcatgaccactgacagg

SEQ ID NO: 45423 - DNA, 388 bp, Zea mays
agaatacttagcttctaagggagagcacattttaaggtttactattgtttctttcgagaaagacaaggtttgtagcgcatgccaagcagggaagctagttggtgttcatcattcaccccagaacatcatgacgagctgacaggccactagagctcctacacatggacctattcagcccgatatcttacataaccatcggcgggagcaaatactgtctacctattgtggatgattattctcgcttcacttgagtgttcttgttgcaagaaaaatttcatacccaagaaacattaataggattcttgagacgggctcaaaacgaggtccggtttaggatcaagaaaattagaagcgaccacgggacggagttcacgaactttcaaattga

SEQ ID NO: 45424 - DNA, 403 bp, Zea mays
  unsure (1)..(403): unsure at all n locations
agctntcacacttccaaccacttacaagagttatgcattcaattctagactcactcaagagatcaaatcctctcccaaattccacacaaagttntggtgactagtgagagagatttgcttgtgttcttttgagctcttgcgcttggatagctttcttctttcttgattctttcttgcgataaaactcacttgtaattaaggcaagagacaccaatcttgtggtgcgccttgtaggaactctgtgttccaagtgattgataagagaaagctcactcagcccgagggaccgtttgacagagggaaagggttgaaagagacccggtctttgtgaccacctcaacgtggagtaggttcgcgagaactcgacctcggtaaacaaatccgcgtgcacaccccttattgc

SEQ ID NO: 45425 - DNA, 388 bp, Zea mays
tgccttcgcctcagtctatcatccgcagtccaacggtgtctgggaacgcgccaatgggaaaatcttcacagctgtcaaaaagatgctccttgatgaaaaaagggcagatggaccgatatgctacctgaggcagtctgggcactaaacacgactgagtgcagggcgactgggtttactctcttccgccttctatacggatcggaggccatgacccccgcaagaaataaagcatgggtccccgcgaacagttccgtcagctgtccccgacgtggacgagccaacttcaaaggatctcattgacggagacctagtcttcgccctacaagccctcaacaaataccaagcccagaccaaagcatggcgcgaccacacagtcatcccgagggag

SEQ ID NO: 45426 - DNA, 369 bp, Zea mays
  unsure (1)..(369): unsure at all n locations
agcttgctcataactgagccatcaacttgtgtgtttcagacttagctaacnggctaatcctgaattttagtaaactttagccatgtttggacctttgtagtggctaacctgtaaggaattaaattaagtctcttatagcaaagcaatagaactatagtagaagaccaggtttggttaaaggccataccctagaagctatttggaattggaaaaaaaggttggctaaagttggaccgtcagactgtacataactgaattttggtattcagttctgaaaactgaattacagcacgatgcctacgttggaactcatttgtgactgattcatggtgctgtggattaaaagttccatagcaaatctggagacca

SEQ ID NO: 45427 - DNA, 217 bp, Zea mays
gcgcaagtttcaaactgacggttgtctcccaacccacttctcataaagggttttctgttctttgcccatacgaactctatctagaacatgacacgaagtcaggactgcctttccccaccatgccttagataaaccacaactgtgtaacatggcattcaccaggtcatccaacgtacggcttttccttctcgcaatctcacgtgactcgtgtgaatat

SEQ ID NO: 45428 - DNA, 369 bp, Zea mays
gggcaggtggaaacaaagggaacaccaaggattagatatttcacaaagtacctgagcgagagacgcacgccgagtcaacctctatcaaaccactaagatgaccgggaccctaacaaatttcaaatgcagtagaataatcaattaaagtgaaagacagtgacacctacataagaagagaagacaggcgtagcccattgtgcacaatcgagagaaagaaagcaaatcggaacgtaaagaatttacactaaaaacatcgaagaagaatggccaggggatataagtaatgtaccaagactctagaacaaaccttgacttacatacatgaaagtgacagctagcaggggaacataggtctccacgcaggaggag

SEQ ID NO: 45429 - DNA, 444 bp, Zea mays
  unsure (1)..(444): unsure at all n locations
agcttctaaagggagaacacattntaggacttacaaatgtttattttgagaaagacaggatttgtagcgcatgtcaagccgggaagcaagttggaatccaacatccacacaagaacatcatgacgaccgacaggccgcttgagctactccacatggatctattcggcccgattgcttacataagcatcggcgggagtaagtattgtcttgtaatagtggatgattattctcgcttcacttgggtattctttttacaggaaaaatctcaaacccaagagaccttatagggattcttgagacgggctcaaaatgagttcggattaaggatcaagaaaataagaagcgacaatgggacggagttcaagaactctcaaattgaaggcttccttgaggaggagggcatcaagcatgagttctcttcttcctacacttcacaacaaaatg

SEQ ID NO: 45430 - DNA, 391 bp, Zea mays
  unsure (1)..(391): unsure at all n locations
taaagccatggtaagtagcataggcaagtaatatgctaattgattcaagcctagctacaggtgcataggtttcaccgaaatccaaaccttcgacttgtgaatatcccttggccacaagtcgggctttgttccttgtcaccacaccatgctcatcttgcttgttgcggaagacccacttggttcctacaacattttggttaggatgtggaactaaatgccatacctcattcctagtgaagttgttgagctcctcttgcatcgccaccacccaatccgaatcttgtagtgcttcctctaccctgtgtggctcaatagaggaaacaaaagagtaatgttcacaaaaaagagcaacacgagatcgagtagttaccccctnttgaatatcgccgac

SEQ ID NO: 45431 - DNA, 356 bp, Zea mays
agcttaaagatgataataaagtcttgattgttatgtatgacatacttgtcaaagctagcgatgaaaataagtccttgattgctaagtatgcccccaatattcacttatgatcgtaatacaaatcattaatgactaagtagtctttttcctcttcggtcggcactatcatcatactttaatttatctgcattacgagccgaagctgtcaatctggcgatagcttcggcgttgattctttgtatccttagatcacatcttcatctcgtatgccttcatcataaggaaaagacttgcatcctgaagacgaagctctctgtaataacttatgttgaaacaactagttaattatatttttg

SEQ ID NO: 45432 - DNA, 123 bp, Zea mays
ctctcgaaggtatttctgtgaaacatatccccacggagagaatgagcatgccgatttattatctgaatcagcggcagaggggctccctttgccttccgaagtatttattgaaacaataaaagc

SEQ ID NO: 45433 - DNA, 356 bp, Zea mays
agcttggcgcgacctaagttgtaggcgagttcatgtcttcgccactgcctagaggatcacgtccgccgagctttctatcgtgggcggtgcacctacgcccaatgacaacgaccttcgtgcttgtcgtcgtagttgctgccatggtccgtgagtgttggtggactggaggtttcacggataaagcgaaggcgaatgacatgcgaacttgttgtttcgtaccccaccggccagacatttaattattacgaagcatgaatggggggaggatatgcgaggtgggaccccccgactgtgtcatctcaatcactggacacgcttccccatgtggcatgcctttcagtcgagcaacagcatgc

SEQ ID NO: 45434 - DNA, 371 bp, Zea mays
ggagaacacattttagataacaaatgtttttttgagaaagaaggatttgtagcgcatgccatgcaagaaagcaagttggagctcattatccgcataagaacaaaatgacaaccgacaggccactggagctcctacacatggacctattcggcccgattgcttacataagcatcggcgggagtaaatactgtctagttattgtggatgattattctcgcttcacttgggtattctttctacaggaaaaatctcaaacccaagagaccttaaagggattcttgagacgggctcaaaatgagttcagcttaaggatcaagaaaattagaagcgacaatgggacggagttcaagaattctcaaattgaaggcttt

SEQ ID NO: 45435 - DNA, 410 bp, Zea mays
  unsure (1)..(410): unsure at all n locations
agcttaaagtcngcatattcatcaaagatgtttcttcactctcctcatctccacatagtcttatggcaaagggagacgctcaggtaaaaataatacatcacttatatgatattgccccatatcaaagaattaggagcttgccccctctctcactcagcttgtaacccctactatgagtaattaggtgccggtagcaccaagcactgaagactggagtatggacatttctcttaaactagtataaactattgtattccactaggacaccatctgtgtccaaaaacgcgcatacaaatttactcgctggtgcttgttcgaaaagaaacactagccttgtacaacttcataacattatttctcctaacttgagatcactactacttgttgtgaccctttcccttcattgactc

SEQ ID NO: 45436 - DNA, 400 bp, Zea mays
  unsure (1)..(400): unsure at all n locations
agcttatctataacaccccggttatttctttctttactatatcaatagcagccgatgggagaccaccatctctttgtcctatcataggtgaggctgtttggacattagtttgttgtcttccccccattggtttgagttatgtggtgcattaccatttgcccgatatggttcataggattgaccattcctttctgaccttctagatggagccagaaagtactcgcccccatgggcttgggattctgtattaatgggctggtgcattgtatactgtgatgggaagtgttgctaggacaggtgaagatttatgtaacaatccttctcaaacaaccctatgtcagaccgtccggtctgatacgcggaccgttcggtcgaatatgtggactgtncatgatcatat

SEQ ID NO: 45437 - DNA, 377 bp, Zea mays
tgcttaagtgaagtcccaactcttccgagtcttagtgttatgatgctcaaaataatagtttattctgtatttcaagggaatctctaaaatgcctagagcgcttgggatgctgagctacaatttcaggtgtcagtgtcggattcaaataccttttttgaaatagagattagcatcccactatatggccacaggcctcatgtggctacctatttcctgcatccaaaatgtagacagaatatccttcttaccctacaacagagtcaaaccaaacccatcattctagtatggcttcatcaacgggaacccacaaatcgagggctaatgatttgtctctaatgatttgattactgatgttcatatactagagagaaaatttg

SEQ ID NO: 45438 - DNA, 369 bp, Zea mays
tgtaagggaaaacacgtgataagtgtttcttattttttattcgaaaaagatagaccctgcgcagcttgtcaagcaagttaacaagtgggaggagcgcatcacaacaagaatgtgatgaccacttcaagacctctggagctgttgcatatggatctcttcggacccgtcgcctatctgagcataggaggaagtaagtctggtctggttattgttgatgacttttcccgcttcacttgggtgttctttctgcaagataagtctgaaacccaagggaccctcaagcgcttccttaggagagctcaaaatgagtttgagctcaaagtgaagaagataaggagcgacaacgggtccgagttcaagaacctttca

SEQ ID NO: 45439 - DNA, 356 bp, Zea mays
  unsure (1)..(356): unsure at all n locations
agcttcacagtgaagcaancttgttcatattgtcttccaaccgaccgcatcgcaagagcattcaatgcaaagatcgcctgacaccttatcctgacgcgcgttcctcagtcggcagggccaaagagaccgcagtcacttcgcccttccactgactgacctgataagaaaacagcgtcgcctgccctgcttcgactactgtgccacccgccagggtgaggctgatagtcaccgagtccagcctcaagtgccataagaagctgcgtcttacccgaccccggagctcggcccccgcctctggctcggagagtggctncgcctcgcccgaccccaaagctcggcctaacctctactctgaa

SEQ ID NO: 45440 - DNA, 329 bp, Zea mays
  unsure (1)..(329): unsure at all n locations
gacacnannagaatactcagcgggatcaaatggacgtgaaaagcgccttttttaacttttcaatcaacgaagaagtctatgttgagcaatctcccgactttgaagactgtgagttttctaaccatgtctataggctctcttaggcgctttatgggctcaatccaaccccaagagcatgggatgaatgcctaaaagatttccttattactaatggcttcaaagtctgcaaggccgaatctactttatttactaaaactctcgccaaagatttgttcctatgccaaatctatggtgaaggataaataattggggctcctaaccaatcttca

SEQ ID NO: 45441 - DNA, 337 bp, Zea mays
  unsure (1)..(337): unsure at all n locations
agctttatcaaatggacgtgaannagtgccttctcaatggaccaatcaaggaagaggtctatgttgagcaacctcccggctttgaagacagtgagtatcctaaccatgtctataagctctctaaggcgctttatgggctcaagcaagccccaagagcatggtatgaatgccttagagattttcttattgctaatggcttcaaagtcggaaaagccgatcctacactctttactaaaactctngaaaatgacttgtttgtatgccaaatttatgttgatgaaattatatttgggtctactacacctcatggaaagttatangatatgaccaaaattca

SEQ ID NO: 45442 - DNA, 429 bp, Zea mays
  unsure (1)..(429): unsure at all n locations
gtagcataggctaataatatatgaattgtctcaagcctagctacgggtgcataggtttcaccaaaatccaaaccttcgacttgtgaataccccttggccacgagtcgagctttgttccttgtcaccacaccatgctcgtcttgcttgttgcggaagacccacttggttcctacaacattttggttaggacgtggaaccaaatgccatacctcgttcctcgtgaagttgttgagctcctcttgcatcgccatcacccaatccgaatcttggagtgcttcctctaccctgtgtggctcaatagaggaaacaaaagagtaatgctcacaaaaatgtgcaacccgagatcgagtggttacccncttatgaatgtcgccgaggatggtatcgacggggtgatctcgttggattgcttggtggactcttgggtgt

SEQ ID NO: 45443 - DNA, 418 bp, Zea mays
agcttatgtccaacggcttatctggcagccgtttgacatattcttatgtccgacggcccgcctgtcagccctcggatgtcagaaattatgtctgacggccgccagtagccgtcggacttgtagcgttttactgtagcggtcgaggttgtcacattcgtagttagggccagctcacgtgcttctcaaggctgctctggctgcccaaccatcaaccctgttatcggcgcagtgcatcgacgccgttggtgttctaggtctcgcccgtcgcggaggtggcgcatccgaaacaagggttggcgtacacgcagaggcgtaatgtctactcgaccagcattctagggctgtgggtcacccatcctatctaatcatatggatgacggattgcggggttatcttattaagcaaatcctctaattga

SEQ ID NO: 45444 - DNA, 436 bp, Zea mays
actcagcttgcgttgactcgccgaagcaacagaaactgcagggcgattgttctcttttctgggatgtaaggcgaatgatacgaaccagtatgcatgacctgcttcagctgagctcgctgcgctgctgcttcggctatttccttttgcttctggatgcgaacatggcacattctggtggcatggcctttgttctcaccgcacaacaagcataagattcttcttggctgatctccaaatcttacggcgaagcccctggcgcctctgtctcttggagctggaggtccgaaagagccttgctgttgccccgaaacctgtgaggaacactgaggcctttgctgctggctccctcgatcatcactttgggtagagttatgaattgatctaacgtgcctcggataaaaacctcctccgaagcccctgcgcattctataaaaac

SEQ ID NO: 45445 - DNA, 424 bp, Zea mays
  unsure (1)..(424): unsure at all n locations
agctntcttggcacttctcatcccacttaaattctcttcctttttccaaaagcgatgtcataggcttagcaatcttagagaacccttcaataaatctccgatagtatcctgcaagccccaagaaactacgaatcttcgtaactgtagtgggtactctccactccattatctccttaaccttagcaggatccactgctattccaccattagaaataatatgtccaaggaatggcaccttgtcaatccaaaactcgcacttgcggaacttagcatagagttgattatctcgcaacttttgtaacaccaaccttagatgttgntatgagtcactttccattccttagaatagatgaagaatatcatcgataaacaccacgatgaatctatccaatactccataacaccttatcatcaagtcataaat

SEQ ID NO: 45446 - DNA, 471 bp, Zea mays
  unsure (1)..(471): unsure at all n locations
gacctatgaaactaagcttctcatctgaaggagatttccctgaagatgagagatgatctcagttctccaatcttcgctatacacaggagatatactgaggactgccctttcaagaagttccaccgaaggtgcttttattgtttcgaagaatacgtccgaaggtaaaggcagcccctgtgctgctgacttatctaacaaatcagcatgctcattttgtcctcgagggatatttttgacagaaaatccttcgaaggaagcttcaactcttcgaaccatatccaaatatttttcaagcttcggatccttagccttgcaactcttgtcaatatgacccgaaacaacctgggaatcagntntgagtatagcccttctgattcccattgcttttagcttccgaagacctagaagcaaggcttcgtactcggcaatgttatttgtgcaactaaaatcaagctttgccgcataacaagg

SEQ ID NO: 45447 - DNA, 353 bp, Zea mays
  unsure (1)..(353): unsure at all n locations
agcttctccgagggcaggaccgngttggggattgctctgcttgccggtctacggnggcanaagggttgagcggccgcnggctctctgcgcacgggcaaacggcgactggctaactcttgtgaggtgtggaaggtgtgctgaaaggtgcatccgaagcctgggagggatttataagctcgggcgcgggccactgcgcgggtttggctcggcgctgcccggcgtgcaaggccgcgcacgtgcttggccggcaaagcgcaacactgcaggagttttccagtcaacgcttcaagattgaactgcgaatctcgccatgaatccgcgcagaccttcctctggccctaggctatctacat

SEQ ID NO: 45448 - DNA, 451 bp, Zea mays
  unsure (1)..(451): unsure at all n locations
tagacgaagctttcttgggagagggaagaaagaggtgaatggtgttcattgtctgctgacttggcccaaagtcactacacccaaggacctgtggggtctgggtattagtgatcttctgatcatgagctgggcactgcgggctangtggccttggctgcaaaaatctgataggactaagccatggtcggacttccagattcaaacttgcgacattgtgcaaagcttgttggctgcggctgttatcactcatttgggagatgggtctgatactctgttttggaaagatcgttggctgaatggcaaatgtattaaggaggtggcacctgctgtcttcggtatggtgcccaagcgtattgcttctagacgcctggtcaatgatgccttgcctgatctcaattggttggctgatctgagaggggctatttctgttacagaccttgctaatctcatg

SEQ ID NO: 45449 - DNA, 307 bp, Zea mays
  unsure (1)..(307): unsure at all n locations
agcttgngaagaatattgtggcctttgctgctgactccctctatcatcagttngagcagagngatgaattgacctaacgtgcctcgggtgaaatcttcctccgaagcccctggtcattttagagaacctgaatgcttcctcccttctttggcggaagtcattgtcagctcgaatgtattcgtccatcttttggagtagcttctccaacgtttgtggtggcttcctggcaaagtactgcgctgaaggtccggccgaagccccttaatcatggcctcaatgacaatttcattgggcactggtggcgctt

SEQ ID NO: 45450 - DNA, 450 bp, Zea mays
ggccagtacttgtcaaagcaacaacatctaccagcacaacaactgcaaaccataccagtaacttggtcgttcgcatgctggggactggatatgattggacctttcaagaaagctcaaggaggatacactcatatactggtagcaatcgacaaattcactaaatggatagagttcaaacccattgcttctgacaatcgcagccgcccccaggcttcgccccactggaatgcgcggacctcaccgaggacggtgaagtcctcggcgtctcagcggaagaacagctacagctgcgcgccctgcgtctcaagaaccgcaatctccagaggcagaaagagatactggaagccaagcgccagcgtgtgtccgcactatccaaagtgcggcaaatgatacgcgacgaggaacagaaggcccaagacctcgagcgtgagatcgcgctgatgcagcgcg

SEQ ID NO: 45451 - DNA, 306 bp, Zea mays
tcaaaaacaatctatcttcccacaatatttgtatcccgactttttatcctatataaaaacactaaaaagaatacattgctccacttcaatttctagaaaacaaatccacactgtccttggcttgaaatagtgaacctcgcactcttgttccctttgcctagcgggactgaataaaaaatgaatagattcacaaggggattccaccttacccaaccatatatcagctctatatgttctcataccacaaaaatgtactgaaatgcccatttgaacatatctatgcttgtaagaatcttgacattggga

SEQ ID NO: 45452 - DNA, 431 bp, Zea mays
cttgatactttcttgatagcgattattatatgaaaactccgccaaaggcaaacatgcatcccatttctgtgagaagtccagaacacatgcccgcagcatatattcaagtatctggttcactctctcacattgtccactggtttgaggatggtaggccgaactgtggagcagcttggtacctaaggatttatgaagttcttcccagaatttggatacaaattgtggtccacgatccgacactatagtctttggaacaccatgcaaactgagaatactggcgatgtacaactccgcataggtaatgacgggatattttactttgacagggaggaagtgggcgatcttggtaagtcgatcaatgataacccaaatagagtcatacccttttgcggtcttatgcaatcccacaatgaagtgcatacttatgtctt

SEQ ID NO: 45453 - DNA, 366 bp, Zea mays
agcttctgtatgtggaaaatgtttgttgtacctcttatcttcaaaattatatatcctatcttgttttatatgctcaggtagatatcgagctcaaacagtttatcaaaggctactcagaagccttacaacctgaattagggatgaaactgctaattgcacatggaagtcaccaagaacttggttaaggtgattcaatgacaaatctaatgattaacatgtgccatgtggtaagtttggtcttacttcagtttcacttcaaagttctggttagaattgagcgctttgttttcatgacggcgtgatactgagattttaagacaaagtacaacccaaaggtaagctattgttctctgtagtcacatgtat

SEQ ID NO: 45454 - DNA, 454 bp, Zea mays
ggaggctggattatgtgctatgacgaaggaggatcttgttgatagtcttgcgtacaatagcttgaaggtatgggaattggatgcttacaaattttataatccgtaactcattcttttattcttacaccaaccttttttacatatagggtttaattttaagcaacgcattgagagcacaaaagagtgccgaagatgagagctatgaaattgcgttcaacaacctacgatcagaagttattaaactgagaaatgaagctctagaaaaggataaaattctgcttacattggtggacaagggaaaaaaggacgaagctacctcaaaggcctaggccgaagcccaaagacgtgaaattaaagatcttcagaaacaactagctaaagctaaagaagagcgtatatttgaagaaacaaaacgcgagcttagtgatcaactggccaatcacttagagctgag

SEQ ID NO: 45455 - DNA, 398 bp, Zea mays
  unsure (1)..(398): unsure at all n locations
agctagagaanatatttcctccttctttcttttatgtgatgctgcatttggctatgcatttacctgacgaggcaatcctaagaggaccagtgcaatatgggtggatgtatccggtggaaagaaggttgtatacattgaaacgttttgtaagaaatatggctagacctgaaggatccattgcagaagcatatgttgctaatgagtgcttgacagcttgctcgaggtacttcgatgatgttgacacacgacacaatcgggagggtaggaacaaagagcgtgttgatttgagcagaggcaatatttatgtttnntagatgaagttgaactttcttggagcaccaagaattacatacctccaagatgattatgataagatggtttggtatgttctaaacaat

SEQ ID NO: 45456 - DNA, 447 bp, Zea mays
ctgataccaattgagagtagcctagaggggggggggtgaatatgctacacctaaaatttttcactaaaaacttcgagataggttaaattaaagttgcactggtgcaaaccggttcatttgattttgattacaactgaacaagtttgaacctactcaacttagattagataatctattaaacaaatatgaagtagtgaagaattttgctaaagacttgccctacacaaaatctactcgaatagataatatgaaccaaccaacgaatttaaagcgcttaacaagaacacacaagaacacgcaatataacccgaggttcggcaactaccacaaaggtgtcctactcctcgttgaggagcccacaaagggccgggtcttttccaaccgtaaccctccacaagccgaccacaaaggtcaaggcaatctcttctatatatgctcaaagagcgg

SEQ ID NO: 45457 - DNA, 405 bp, Zea mays
  unsure (1)..(405): unsure at all n locations
agcttctaaagggagaacacgtgatttgattatctaatgtgcaattcnaaaaagatagaccttgtgcagcttgtcctgcaggtaaacaagtgggaggagcacatcacagcaagaatgtgatgaccacatcaagacccttggagctgctacatatggacctcttcggacccgtcgcctatctaagcatatgaggaagtaagtatggtctagttattgttgatgacttttcccgcttcacttgggtgctctctctgcaagataagtctgaaacccaagggaccctcaagcgctttctaaggagagcactaaatgagttgctctcaatagtgaaagatagataagaaagcgaacaacggatccgagttcaagaaccttcaagtggaggaatttcttgaggaagaaggg

SEQ ID NO: 45458 - DNA, 429 bp, Zea mays
tagagatgtcttcagtatagcttcatcttctgtcattccctcttcttcacctttcatcatgcattggcgtatgcctggtacgacgtattgccccgtcccttctagtgtatgggtcactgtagagacctcgatgatgatgtctccgaggttggggttgactggtcccaccagtcagtggggatactctctagaatgtgtccgacgtcatgcttgacagaggcccttcgacactgttaccatggttcggtcgtggcttggttatgatctgtctcatcgtgtcgtcatggcttgatagtactaggtcacctcttcccttctatagatgtgttcgctagagagtcagctgtcgtcttgctacgttgctcggcaggcaggttgatcggcggccccgcctcatcgggttgctcatcagtgttgctcagcaagctg

SEQ ID NO: 45459 - DNA, 381 bp, Zea mays
agcttgaaatatatattcactcagaaagaactcttgtactcaacctaagacagagaagatggcttgagttgatcaaagactatgatttggaaatacaatatcacccaggaaaagcaaatgtagtggttgatgctttgagccataaaggtcaagtgaacaacatcactactcatttgatgtcacaggaattgtgctgggaaatggagcaactcaaccttggtatgctcaataatatggaagcaacggttatggaagttgaatctactttggaagaagagattcgtaaaggacaagaatctgatgagaaaattaatgagataacacgttgattgggttgggtaaagccccacatttcacagaagataacaacgcacagtatgg

SEQ ID NO: 45460 - DNA, 435 bp, Zea mays
  unsure (1)..(435): unsure at all n locations
tagaacttcgaagacaaagtatactgcggcttgctttttgatttgtccttccaatttctcctgcacaagcgccgcactcactgcagagtgcgaagctgccacatacaacagtaacagagcccctggcgcaagtggagttaatgttgttatatcaatcaagtattgcttcagctcctcgaaggctttctgctgagctgggccccattgaaagacttcggctgactttagtatttcaaagaatggcaagtttctttctgctgatctagatataaatctattcaatgaagccaatcttcctgccaaccgatgggcccccttctttgtgcttggtggttccattcgaaagatagcttcgatcttgcttgggttagctntaatccccttcctcgaaaccagacaaccaaggaacttgcccttcttcactccaaagacaca

SEQ ID NO: 45461 - DNA, 219 bp, Zea mays
  unsure (1)..(219): unsure at all n locations
agctatctcgactaattctgtgacatggccttatgaacgggcganagtacgcgtaagcggcaaggccgaccgagctgacggattcccacgcctctgggatacggatacctcactcgtcccttccgcgagaagcaactctcgctcacacaaacattcctgttaccgacagagtccagatgctcgaaacaaaagaaaaaaaaagacgcagcttctcaagca

SEQ ID NO: 45462 - DNA, 414 bp, Zea mays
tgtgaaggttcttcatccccacatgtgctaagcggcgatgctacagccagcccatgcaagtcttagccattaagcatgcatctagaccggcctcttcttttgcaaaatcaactaaataaagtttgccgtctaatacacccttaaaagctagtgaaccatcacttcttctaaagacagacacatctatatttgtaaacagacagttatatcccatattgcacaattgactaacagatagtaaattatatcctagtgactctactaaaaacacattagagatagagtgctcatttgaaattgcaattttacctaacccttttaccttgccttgattcccatcaccgaatatgattgaatcttgggaatccttattcttgacgtaggaggagaacatcttcttctaccccgtcatat

SEQ ID NO: 45463 - DNA, 430 bp, Zea mays
  unsure (1)..(430): unsure at all n locations
agcttggatgaggtgtcatcatcatcatccatgctatcatccgaatcccattcaactaggtaggctttggcatcgctcttcttgttgtagattatcttcttcttcttatcatctccatctttgcccttcttcttcttattagggcaattcatggcgatgtgaccgggttccccacactcaaaacactntctatcattgaaggcatttcttcttgatgtttggcctcttctaggttgacccctcttcttcttcatgaatttgttgaatttctttacaaatagagccatatctccatcattatcgctttattttcttcatcatcacctatcttctctttcaatngccttagaagctttagctttgagagagattgattcattcttcactttctttgccaaactatagcatcgactcgagaattcttgaatat

SEQ ID NO: 45464 - DNA, 342 bp, Zea mays
gcgtgccaaatgagtttgcggcatgaccgtatttatacacccagcgcgctgaaaattgaaagaccccgcttgtcactgaatgttgctattctatcacagggaaggtgttttttcggaccttcggcgtaaagccttcgtccataccgcaatctaaatttattgttttaaacaaattaatattgcgaggggctactgttgggggccttctgcttactaaggtcctcaaaaacaagatttaacagtatttctggagtttaatgtgtgaacaggtatctttggactcaagtcggtatcacagcagaccacaataatacgaaggttgatacagcgcctaacgtgtga

SEQ ID NO: 45465 - DNA, 422 bp, Zea mays
  unsure (1)..(422): unsure at all n locations
agcttatgcatctttggttnttgtaacagagccttcttttatgaaaagctttaagttgcaacaagagagcgaagatagaaagaatgagctcattgtcaacaatttggaaaataaggtgaaggacctcgaaaacttattagaagaaaagaattctaagatcaaggctatcgaagcagatcttgccaaagcttaccttcacaatgagaatcaaattattcaaatttctcatcaaaacaaacagttggaagggttgagcaaagagcttgaaaaagtgaggttgacttttaaagatattgtaagtcggatagctgaaccgaaaacaagcaaaggcaaagtgaagaaaaaagttcagttgccgaactttcaaggttcggacactgcttcgttacaactcatgtcttaggatatgggaatcttaactc

SEQ ID NO: 45466 - DNA, 455 bp, Zea mays
  unsure (1)..(455): unsure at all n locations
ngagataattagtcatataaggtgagtatccaagggtaggatcctaattgtcaagataagatagtctacatgatgtaggttaaaagtttgtttgaggttaggtggggatagacagattatacaatccatcatgactctattggttgggttagctcttttgctcatggttgagttggtctaatgcactagtttaggttttaagtgcacgaggggagaacaaggtttataggagtaggatctagtttatttcactagtgctcacttgttaagtgactctcattagattccatgattccatttaagaataccgtttagttgagcttatcaagctgactntatttttatgaaattccagtatatatacatatctttatatatttttgagtggaacttccaattagtatatattttctttaaatttttcatgtcattaacacgtggggcatagaaaacaa

SEQ ID NO: 45467 - DNA, 399 bp, Zea mays
  unsure (1)..(399): unsure at all n locations
tctaagcacctgagctgcaactgcttatatgggagaagctaccaagtctcatttctatcaagtcagctntctaacgcatccaaccccacgtcatttggacattcctaggagaagttattatcaaagtactgaaggctgcgcagaagtcaaacagccacacggaatttagctctgcagatctcccaaagaggccccttcacattagcacgttaaaatactttcttttcatgtttatacctctctaaggctggttggtgctagtataaatacccctttatgtctatgatgtaagacaactttggatgatctaaaaatagaacctttgtcagtgggtgctacaatattgaagtgacttacccttgtcttggaatcttatgggatcaaagcgagttatcgtcc

SEQ ID NO: 45468 - DNA, 448 bp, Zea mays
  unsure (1)..(448): unsure at all n locations
cgcaccctgntacattggtccttntcctatcctcgaaagatttttttctttggcataccgactccagttacccgaaaccttgtctactgtacataatgtgttccatgtgtctcaattgaagaagtgtcttcgggttcccgatcaaaccattgaagtaacagatgttgccttataaccagacttgacgtattctgaacatcctattcgagtcttggatcacaaggacagaattacccgaaggaaaactctcaagttttacaagatattgtggaaccaacacacggaaaatgaagctacttgcgaaactcaagactatttagacaagaatattccaggctttttatcttcatgtgaattgtaaagatatgtacacttgttataggaatgaaccccataccacccctgcctcgtaccanaaataaaggaataaaagtatgacacgctttct

SEQ ID NO: 45469 - DNA, 298 bp, Zea mays
ttccttttctatttgtccgttttactgaagatatatgaaatcttgcttgatcaacttactcccgaagccatcataaggatgggcatcttcgtctgggccatgaagagccaatggttagaaccaaatgcaaaaagtttctgccatatacatgagttattgtatgagacaaaaccctggggtaaagagcagtatcacaacaattttggctgctacagcttcggtgcccggtctgggtcaagctgtcccgtgccaacctttcgaaagaggtggccccgcgactggatgatggaatggttta

SEQ ID NO: 45470 - DNA, 454 bp, Zea mays
  unsure (1)..(454): unsure at all n locations
ctataaaactaagctttggagacccatatntttagccatctcccggcaaacggatattttcttgttgtccgggagacagtataggaaatcatcttcgtccgtgccggtgaacactaaggcccctttcggatatttcagttcccgggtgtagtgtctggcttccatgatttcttcttcagataactttttcctaaagcatgacgaataataaagtcagaatcttcggatggtgcttcgggagtaggagatttagcttttctgggcgcatccttctccagagccatgccagtatctggagattcttgctcggctctctcagatgtagcaggctctacctccacgggcgctgagggctcagcttcggtttcagcatgagctgccacagcttcggcaacctttcttgtaggcgcaggagtcaatgcccttgtcgtctccataacagcgtncaacacgc

SEQ ID NO: 45471 - DNA, 449 bp, Zea mays
  unsure (1)..(449): unsure at all n locations
agcttaacaacagggttaatagcctcatgtgttttgcaagattaaagttcattttcaacaagaagattgtcatgatcaaatntaatttgagtatagtcttccttgatcttaactagtctattttgcaactccctattagcttcatttaatttgtcatatttctccttagcatcttttagggagtttgtgagctcatttacagntgatgacatagntttattttcttcttttatttcatcactagccttcataactatgtcatacttggcatttaaagattcattttcatttttcaacctatcacatttagcttttgactnttatggatttgagtatattctttaagtaagtcagctaactcatcatatgaaggtgaagcaaattcttcatcactatcactatcactagcatcatcaatattaatatcattttggtacctttcgttcacc

SEQ ID NO: 45472 - DNA, 436 bp, Zea mays
tggtgaccatctcttcttatcacccatgcaaggtaaaatcatagtctataccactttctttgagcaaggattagggtgacccacatttgattccatgttaggtttgttgaattactatttgatcaccctcaatcatctcaatcccaactttatcacccatctttctatcttcatccatttctacaaagtttttcttagaattcatctaagtttttccttcttttgttatctcttccaccttgatagtcacgtagatggaagtgaataggtaaaacttgaaactcacaacttacacaaaaacatggtccaaattaagtgttagcgcagaaacagatcaagaaaagaagagaaattcttgcacttgattgctctcacaagattacagaataaacttgagcaatatcacaagtgaagaatgaagcaagaactggagaat

SEQ ID NO: 45473 - DNA, 424 bp, Zea mays
agcttaagttattgggataatgtaggcaatttacttatacacttaaatattaatgcaggggtaccaaaagctcagtgcatgcctatacaggccattctgctgcttatggacaaactttgaccttgttccaccaagcataaaagcaaaaaactatgtttatgatcatccccatgtatcatttttgccatgtcatgagtcaagaagagctaaaatattcatgtaagcaaacaagaaactatacatagtacagctgaagaaagcacatcatcatttacagaaatacacataaatcacgattaccttccatctgagcatccagtagctaaacaacgaggattttgaagagcctgcagaaagaacttgccaagctatgacactgacacatgatatgtgagcttgcaaaaccccgatgagcattgatact

SEQ ID NO: 45474 - DNA, 404 bp, Zea mays
  unsure (1)..(404): unsure at all n locations
aagcttgcgaagattcttcattccaacacgggctaggcagcgaggacatatttcttcccatattagncctagaatttgagcagatgtggagttcatctctattgaaaacaactaagaatagctgaccctctaacactcccttaaatgctattgaagtatcacttcttgtaaagacagcaacacccatctcggtagaaagacaattgtagcccatacaacctaattgtgaaacaaaaagcacgtttgtatctaaagaatctacaagaaaaacattggaaacagaaaggacgcgagatataacaattttacccagccctttgaccgcaccttgatttctatgcccgaatgagatagcactttggggatcctgcgtattctcataggacgagaacatcattgtctcc

SEQ ID NO: 45475 - DNA, 417 bp, Zea mays
  unsure (1)..(417): unsure at all n locations
agctntangttnttctccattngtatcttgttttacccttcagaaccctatttagggttaagtaccctactctagggttgtatttgcaaaatgccatatcaatacaacttgtttgaaacttttgcctagtgaatgcattctaagtgtatcaaatatatgaaatactaatgctgatgatgttatgctcaagttttagtaaagtaacaccagnggtgttacatcccttcccccataaaagaatctcgtcccgagattaaaagtactatggtaagtagtggaaaaggaaaatgcttcacattttcttcctgattttggacaaagcacggtggttgggctcctccttattcagcattatatacatatacaattacataggctaaagccgtgaatctttctaaaagctgagctccatgacct

SEQ ID NO: 45476 - DNA, 453 bp, Zea mays
ctcagctccatctatgttatggattgcttttgagtcagtttctttgccttcggcccttcttgcagcttcctgacttccatggatagcaatggttccctgatccgaaggtatcttcatgcaaagataggcaggatgaaggattgcttctaaggcattgagggtaccacgaccgataattgcattgtaagggtattccatgtcaacaatgtcaaacacaacttgctcagttctagtgttgttgatgaacccgaaggtcactgacatggtgattttgcccaatgctacaatctgccttcctccgaagccgcagagaggatgtgtagcatcatgaatcttatcttctggttcttgcatttgtctgaaggccttatcaaatatgatgtcagctgcactgcctgtgtcaaccaagacattgtggaccagaaatcctttgataacacaagagataaccat

SEQ ID NO: 45477 - DNA, 387 bp, Zea mays
  unsure (1)..(387): unsure at all n locations
tgcggcatgcaagcttatcccgaacgcactactggtaactttaacttaacgtacgcgctctagttctgcttagcctcaataataaggattagctacatgcactaatgtaagcgtgaccacttttagtagattaacattaaacgagatatacaattaactatatggattaactaacgtaaccgaattccaaattgagttttccatttattaattacataacacgaattgctacgcacagaatacacggngggtagacgggtggctagggggtagacgatcgttgttggggacttgttctcatatgcttagaattaagaacaacaacataaaaaagtgttaaatgttagactccttcgtccttgaaaacattatggtccttcggatata

SEQ ID NO: 45478 - DNA, 433 bp, Zea mays
tgtgaagattcttcatcccaacatgggctgttcggcgatgctttagccaacccatattagtcttagcaatgaagcaagtatcgaggtcagctctattaaaatcaactaagtatatctgaccctctaatactcccttaaatgctactgaatcatcacttcttctaaagacagtaacacctatatctgtaaaaagacagttcgaacccattttgcataattgagaaacagaaagcaaattgtaatctaaagaatctacaagaaaaacattggaaatagaatggtcaggagatatagcaattttaccaagtcctttgaccaaaccttgatttccattcccgaatgtgatagctctttggcgatcttcgtttttctcgtaagaggagaacatccttttctcccctgtcatgtggttagtgcacccgctatcaattat

SEQ ID NO: 45479 - DNA, 442 bp, Zea mays
  unsure (1)..(442): unsure at all n locations
agcttgaagccatggtaagtagcatatgctaatattattctaattgactcaagcctagctacgggtgcataggtttcaccgaaatccaaaccttcgacttgggagtatcccttggccacaagtcgagctttgttccatgtcaccacaccatgctcatcttgcttgttgcggaaaacccanttggttcctacaacattttgaatatgacgtggaaccaaatgccatacctcattcctagtgaagttgttgagctcctcttgcatcgccaccacccaatccgaatcttgtagtgcttcctctaccctgtgntggatataagggaaacaaaagagtaatgctcacaaaaatgtgcaacacgagatctaactggtaccccttatgaatgtcgccgaggatggtgtcgaccgcgtgatctcgttgatcgcttgttgactcttggtgt

SEQ ID NO: 45480 - DNA, 449 bp, Zea mays
  unsure (1)..(449): unsure at all n locations
gtactcctactcctacgctgganaggcagacgataagtgttctatctatcggaaaattcaagttcctggtggatgattgaacagctatcggggagctgtggcgtcgtctccggtccggtcccatgtagcgatcgtaggattcggtcagcaaagcagccgcagacacagccacctgaaaagcaattgatgctttgtcacttcgctggcaagtgaaattctttgatgccaatggctgggtggcggaggtatcactcgatcgggcccctttgtcttgtttcctttagagagacacacggaaaaggacagccttacgggttcattaataagtgttcatctattagactaaaaatgtaccattacgatgatgtatatccacggaacggccggtaatattattataggccctggactaaaattcaaaagagatcatactttatagaagaaatata

SEQ ID NO: 45481 - DNA, 425 bp, Zea mays
  unsure (1)..(425): unsure at all n locations
agctatgngaactatgcccgtatccaatctgtctgagccggaactataagagcttgccagatgccctcattcctgtcgaccacgaccaccacccaacataagacttccctagttatttagccaagaccagagccatgatagttctcatggtagcactgttttcccgggtggtcactccatgttccaattaatatgcaataatcttgtttaaccatcgggttaacaacaataaagtaaacttaccatttggaacattaatatcataagcgggagtgactgcataaagttaagttgtagcaatagcatagctacttggtaatcataatcccaggttaaacaaggagtaaagttggaaaggtatctaaataggtaacccgtcaaattatgcatatatactcaanagaataaactttattaaatgtatt

SEQ ID NO: 45482 - DNA, 448 bp, Zea mays
  unsure (1)..(448): unsure at all n locations
nggatattattcatcagagcaccacgaatattgttgtgacaaatggaaattattcttcacgaagcatgaaaagaagggaaggtgttttttcgtcaaagactcaaaaacggtacgtatgtaaaatttcatgcatcgtaaagaattaaataacaaaagcaggtatattacattcagggctacaagatgtcactcatattacatttcagaagtttaatttacaatagtatttaatcttctctcagaacaacttctgcagcctcattcaggagccgattgacgacttcgtccataatggcttcagccatctttttaatttcgtcgtctcctttcggctgagggcccggagacgctttatcaggatctgaagtaggacaggatacggctacattgctattataaatggcaaacaaagcttataaccaaaaattacaacacaataaaaactatt

SEQ ID NO: 45483 - DNA, 368 bp, Zea mays
agcttatgaaggttcttcatcccaacatgggctattcggcggtgccagagccaacccatgttagtcttagcaattaagcatgtgtcaagttcagctttatcaaaatctactaagtatagctgaccctctaacacacccttgaatgctattgaatcatcacttcttctaaagacagtgacacctgtatcagtaaaaagacaagtgtagcccatttgaataattgggaaacagaaagcaagttgtattctatagaatcaacagcaaaaacattggaaatagaatggtcaggagattacaatttaccaagtcctttgaccaacttgatttcatccccgatgtgatgcttcgtgggatcttgttttttaatt

SEQ ID NO: 45484 - DNA, 449 bp, Zea mays
  unsure (1)..(449): unsure at all n locations
tgcaccacgatatattggtccttttcttattttggacagatatgggccagnggcataccgactccaactacccgaaacattgtctgctgcgcataatgtgttccacgtgtcacaattgaagaagtgtcgggttcctgatcaaaccgttgaagtaacagatgttgtccttgaaccggacttgacatattctgagcaccctattcgagtcttggatcaaaaggacagggttacccggagaaaaactctcaagttttatatgatacagtggaaccagcattctgaagatgaggctacatgggaaactcaagactttntagataagaatttcccaggctttttagcctcttgtaaactgtaaagcctgtataattgtgtaataaaagaagtgaaccccacaccatcccctgccttataccaagaataaggaaataaaaatatgacatgtttcc

SEQ ID NO: 45485 - DNA, 416 bp, Zea mays
  unsure (1)..(416): unsure at all n locations
agctntcgatgagagaatccanatatatcttttgtcganttttaactataattagtacatacaagatgtaccactgcctatgacaccaaattntntaaactatataatctgctagtgcattcacttaacgcgtagatattcatataccagactggttagtcagtaacttatgacagggactttaacaactataacttctctatgtttttgttgcaaaaaacttggccaagattagaaagggttaactcagtggaaagcaccacacaggagtcaaactggcacacaaaacactactcccttcgttcaaaaaaaaatgcaattattcgattctttatgagtcaaacgatgccaagtttccgcgaattcataaagaanacttgtaacatntgtgatactaaataagtatgataataaat

SEQ ID NO: 45486 - DNA, 306 bp, Zea mays
aaaactcgctggaagatctatcaatgagcttatgtactttgaacgacgtgggctgagcgtactcctggacaccgacagccgggaatatatggaaacatttcaaacccgactgagagtggaggattcttgggcaccgacactgtcgggggcaccggacagtcgggcgcaaccaggaccttcgtggttgtctttattgaacctttgactttatggttggtgactttgacccgtaaatatatcaagcaactagtgccattgttggtggcatcacctcaaacttagaaagttgactattcttctcaaatt

SEQ ID NO: 45487 - DNA, 428 bp, Zea mays
  unsure (1)..(428): unsure at all n locations
agcttcttgtaactgctgccaaaaatgagatgtgaactgcgttccttgatctgacactatcttcttcggcacaccatgaaggcagactatccgtgacatgtataactcggctaacgttgctccggtgtatgtcgtcttcacaagtatgaaatgggccacctttgttaagcggtccacaaccacccagatggaatcgtaaccggcccgggtacgaggtangccaactataaaatccatcccgatctcatcccacttccactgagggatccgcaatggctgcaacaatccggcgggcttctgatgctctcttgtgttctgacagctatacagaggcgaatattctgcgatctctttttatgcctacaccaaacctcttttaaatctggacatctttcctcctggtgatgagaagctgctatgacttttga

SEQ ID NO: 45488 - DNA, 433 bp, Zea mays
tggaggcgtcaattggttgtctacttggtgtagactcctcctccgttgccttgaaggccacgggttgcgcctcggatgtggaaggctcatcaagctcgttgatcttcttggagcccttaatcatgcattcaaaactaacaaaattcccgatgacttcctcgggggtcatttgtgtatatctaggattgccacgaattaattgtacttgagtagggttaaggaaaataagggctctcagaataaccttaaccacttcgtggtcatcccattttgtgctcccgaggttgcgcacttggttcaccaaggtcttgagccggttgtacatgtcttgtggctcctccccttggcgaagacggaagcgaccgagctccccctcgatcgtttcccgcttggtgatcttggtgagttcatcaccctcatgcgccgtcttgag

SEQ ID NO: 45489 - DNA, 371 bp, Zea mays
agcttgactgcagctatgtgaccgtgatgagtgtgaccttgtccctcttttttaaccatacttggtcgccaagcagctggatttcaccgatattattatatattatattctaacgacgtgcttgcttacctcttatctatcttccgttccttaattcataaggaacacatatatacacacctacccgcctgttggttttggctttagctgttcttttttccaaatcattcaactctctaaacgtatacgatgatctctagatagataaatcttacatgaatcgtacgaggaaggatcacacgagtgtattatagatatgttggtgacaacttacgccagcagttattaatgattaaaagggggccaaattg

SEQ ID NO: 45490 - DNA, 448 bp, Zea mays
  unsure (1)..(448): unsure at all n locations
cgacattgtctccctgttggaagccaatgccatccttaatgcttgtgcttctcccattatagagcatgcttctagcaaatntaaattattcattttctaagtcatgctcattaattntagcactaagttgagctatgtgatcattttattgtttaattaagcaaggtgatcatgaatagcatcaacattaatgtctctacatctagtgcaaatagtcacacgctcaatggcatatgtagagggtgtgcaaatatttagaacatcaatcttagcatgttaaatagcatgctcattcttaagacaggcagtagaaacattgcaaacatctaaatctttagccttagcaattaatcttttattctcaattttaaggctagagagtgatgcattcaacttgtcaattttagttatccaactagcattatgatgtctaagactagcaattgaa

SEQ ID NO: 45491 - DNA, 380 bp, Zea mays
  unsure (1)..(380): unsure at all n locations
agcttctaaggggagaacacatttgggactaacatatgttcattntgagaaagacagggtttgtagcgcatgtcatgcagggaagcaagttggtgttcatcatccacacaagaacatcatgacgactgacaggccactcgagctcctacacatggatctattcggcccgattgcttacataagcatcgacgggagtaagtactgtatagttattgtggatgattattctcgcttcacttgggtgttctttttgcaagaaaaatctcatacccaagagaccttaaagggattcttgagacaggctcacaacgagttcgggttaagatcacagaaatattagaaagcgacaacgtggacggagttcaagaactctcaaatcg

SEQ ID NO: 45492 - DNA, 429 bp, Zea mays
taatactaatgaaccatgacgttttctatatatagctacatcaacatttgtaaataaacaattatatcccatatgacataactggctgacagagagaaaattataaccaagcgggtataccaaaaatatattacaaatagagtgctcagtagtaattgctatcttacctatcccctttaccttgccttggctcccatctccaaagatcgtgtcatggaaatccttattcttgatgtacaaggtgaacatcttcttctcccccgtcatgtggtttatgcatccgctatcaatgatctagcttgagcccctagatgcataaacctgcaaggagtttaagcttggggtttaagtccccaacttgtgttgggtcctgtcacgatagtgacataagactttggaacccacatgcaagtcttaccatttttgcat

SEQ ID NO: 45493 - DNA, 447 bp, Zea mays
  unsure (1)..(447): unsure at all n locations
agctngtcaccagcatgtccttgagcttctgccatgaagtgatagntcctagccgaagagaagaataccatgtctgggccacattcttaactgccatgaccaaggatttggccatgacagctgcattgcctccatatgaagatatggttgcttcataactcatcaaaaactgcttcaggtcaaaatgcccatcatacattggaagctgaggtggcttgtatgatgggggccacgagatagcttgcagttctgctgccaaaggagaagcatcatcaaaagtaaagatatcatgattaagatcatcataccatccatcactcgtgacaacctctcttgatgaagttccctgtgcttgggccttcggtcttgcttgtcttgagcaaggtgacgtacttcttcagtagcttcgtcaatctgcctttgaactcagctagtcgagccatcttc

SEQ ID NO: 45494 - DNA, 447 bp, Zea mays
  unsure (1)..(447): unsure at all n locations
tccncatcctcccttntatttactgttagttaatttccactgtatctagaacaatggttactacttttgcaaaactccgatgatgttgtaataacattaagtactcctttaatttatggttttatgctttattgtattttctctgtgcctcaccttcgagtgagtatgtggtacttgatcctgttagtggccttgtcggactacatccgagggactgacgggttattcctcactaaatgtggtctagcctttaaggcgggacttaggcacttaagttggaataacttgggcggttcagacacagctggtatctgagcttgtaccaccttagagaaatctataaatcatatctacctaccttttctaatgtaaaaaaattacttagaaaccaagttggatatcggtcagaacgataatggtagacctatgacgtgaagccttatgata

SEQ ID NO: 45495 - DNA, 415 bp, Zea mays
agcttgtgaagtcaatcacaagtttattgtagattgatattaaattcaatcggtcttcacagtgcaatgaagcttatgaacaattgaagatattattaaccactgctccggtattggctcaaccgaatattaataatccatttgatgtgtattgcgacgcatcatgcagtggcctcggttgtgtgctaatgcaagaaggccgagtaattgcatatgcttcaaggcagttgcgccgacttgaagaacattattctactcatgatctggagctagctgcggcggtttatgccctaaagatctgggcattatctgctgggaatgtctgcatattatacagacataaagcttgaatatatcttacccatcaaatgatatagacaaagcgaggctcagctgacaagatataattaaaatc

SEQ ID NO: 45496 - DNA, 419 bp, Zea mays
ctcgcattatttatcgtatcgagctttggctgataatccccatgatgatcaagacatagttctctgagttgaagaaaattctcatgtgatgctcttttgccaacaatctctgcttcaactccgatcacattcttattttctgagccatactctcatgggctccatctgtctgtgctatgtggatttctgattggttgcgtctggtaatggtattatggctagcaactgatggtgccgcgacgaaaccgagagcctcctgtgggcgcgcacacatggttgagctgctccgcacgcgctgtgtatccggctaatagtcgtggtccattaccagactatactgatgtgctatcttttgtggatattctctcagagtgatcgctgcattttgtctcacatgccgcgatattctattcccatct

SEQ ID NO: 45497 - DNA, 388 bp, Zea mays
agcttgagacgggagaaaccgcagcatgtgtttatctccataagaaggatgttcctaaagcaataaatgaagaaatcaacatgaacaaggaaaaaggtaaaaattcaattagtcatgttgtttgcactgatcatctctctatgtcatccaagagcaaaaagggaagaggaaaaaggaggtgcttcaagtgcaaggaattacgtcacttcattgcgtcttgtccacacaaagacaaggatgaaggaatgaggagatgtcttggatgcaacgataaggaccatatgatcacttcaagtccgttcataaaataaagacgtgcccctccagatgacctactaagcaaaagacaacacaagtgtcagtaagttgacgaccttctgtacatggt

SEQ ID NO: 45498 - DNA, 448 bp, Zea mays
  unsure (1)..(448): unsure at all n locations
ntctcaacctttcttggtgcttaataaatatacttcaatgtttattattggctcaagccatgatttttaatttttcatatccttttccctattttctttaattttgctcatggggctcacttagggtttttattagggttgcaacattattacctttttgaaagacccatttgttttgatcatgatacttttaggtatatgcttggtggattctttactcttaagtcaatttgatgctcatgcttaatttggttcacataaaatgatggttcttggtttggcattttgagagaaaccctangtgacactggggtgtcacaaccttccccccttaaaggaatctcgtcccgagattcgggccagagtcctcccacggtgaagtgaagggtgagacttaaaggaaatgggtgattattgtcattattatggtaaatctactcttcgaatg

SEQ ID NO: 45499 - DNA, 427 bp, Zea mays
  unsure (1)..(427): unsure at all n locations
ctgcctanacctcattatatcacccgcagtacagcggagttgtataacgcgccaatggaaaacaatctcacagctgtcaagaagatgctcctcgacgaaaaaagggcaggtgggccgattcgttacctgaggcggtcagggcgctaaacacgactgagtgcatggcgactgggatcacccctttccgcctcctctatggatcggaggccatgaccccacaagacataaaacatgggtccccgcacacagatacgtcagctgtccccgacgtggatgaacccacttctaaagatctcatcgatggaaaccgagtcttcgctctacaggctctaaataaataccaagcctagacaaaagcattgcacgaccacgcactcatccggagggaatccatcgaaggggacctcgtactcggctgaatagctcg

SEQ ID NO: 45500 - DNA, 378 bp, Zea mays
  unsure (1)..(378): unsure at all n locations
agcttctanagggagagcacattttatggttatccaatgttcatnttgagaaagacagggtttgtagcgcatgccaagcagganagcaagttggcactcaccatccacacaagaacatcatgacaagcgacaggccactggagctcctacacatggatttattcggcccgatcgcttacataagcatcggcgggagtaagtactgtctagttattgtggatgattattctcgcttcacttgggtattctttttgcaggaaaaatctcatacccaagagaccttaataggattcttgagacgggctcaaaacgagttggcttaaaggatcaagaaatattagaaagcgacaacgcggacgggagttcaaagaacctcat

SEQ ID NO: 45501 - DNA, 405 bp, Zea mays
ccgcttcggctgaggggtccttcgtatcatcaatagataaagcagcttctgcttgcgccaaagttttcacatgttcgcaacctgccttctccaaaatagctgcaattcccctcgcgccagagaaggcacagacgtccccacggtcatttaaaatctcctcaaaggcttcggcctcactactgatccattcaattgggccttcgggatcgcccgtacaaagttgtcttcacttgaatatgcgccaacattggcgaagctagtatttatctttttcacatattctacagatttttcataacatctttcttttgaggagcgaagatctacaactgttgttcctaataattcttccagtaatcactggcgtctcggtcagcttcggcaatagcacatttcaatttttct

SEQ ID NO: 45502 - DNA, 299 bp, Zea mays
  unsure (1)..(299): unsure at all n locations
agctnggtctggtgaacaaatcccttgcagcgatcttgcccaaattcgcgaagatttgctcccaatcggcgcttgaacaggggcagaggcaacgggaacacgtgttcgaccgtggctgacacccctggttcacgcccgttcgcgcaccgcgccttccagtgcacgcccgcgcacactcgccggtccacgaccgcccgtgcaccgcgccgtgcctataaagccttcccaggcgcgccccacttcgccccacactcaccctcaccggccaaccactttcccttagctccggcgagctcaat

SEQ ID NO: 45503 - DNA, 379 bp, Zea mays
agcttctctatgctgtacttgttgcgtccaggatgttgcgccactattttcaggcacacagagttgtggtggtgaccgccttcccgttaaagaccattctccacaactctaatgccacgggcaacatcgttaagtgggccgcggagcttgctgagttccaactggagttccagccccgccacgctgtcaagagctaagtcctggcggacttcatcatggagtggacccctcccccgagcgctcttgggggttcggatcccgattcggaccccacacctgcggagcccaaggctccggttcatcgagccccactggacgctcttcttgacggatcccgccgcacaggctggggtgtggagtggtcttatcgaccaacgga

SEQ ID NO: 45504 - DNA, 361 bp, Zea mays
agcttcaacggagaggccagtccacggtcgccggagttcacattcccgccggagtgcgtggaccgggtaatccactgaaccaatttccgattccttgtgcacacagtctctacgtcacctcgtggagctcaccgtgcccttggattgaactatatcgccgagatttggccggcacacccgccgccgacgaggacacccacctgcgcacgtggaccgagcgattccggccatccccgccgcctagccgtacatcgctgtgaccgccagagcctccccgagccaaccccgcccctcgccggacctatctcgtggccggtaagccgcgccacccttttgtttcttgcgggcactgtttaaacct

SEQ ID NO: 45505 - DNA, 342 bp, Zea mays
tcgccgcatgcaagcttcggcgatggttaataattttggcagcataacagcgcaaatagcaatgaatgctgtggtaacttcacaactacttgtcagtttatatagtgctgcacgtaagaaggcgaagcggcggaattgttacaccaggcgcgcagtaacttgtacccgctgcgcagtggaccgcaaggatcaaacagtaactctgcaaggtgggaccgacacgcgctcggaagtcggatcggttcttcgcaacgagctcagggaaggtgttttttggaccttcggcttcccgaagctgaagaggcttttttcacgggtcaagtcgttaccaaagaacgatct

SEQ ID NO: 45506 - DNA, 390 bp, Zea mays
  unsure (1)..(390): unsure at all n locations
ngagcagtaactggcttcgtctaaaacccttggaagctggttatcaacatatccttcagcttctgccatgaagtgattgtccctggccgaagagaggaataccaggtttgagcgacactcttgacggccatgacaaaagactttgccatgactgcagtattgccaccatacgaagatatggttgcttcatagctcatcaagaattgcttcgggtctgtatgaccatcgtacatggggagctggggtggcttgtaagactagggtcatggtgtagcctgcaattctgttgatagaggagaaacatcatcaaaagcaaaattttcatgatggaaatcttcataccagtcgtcctcattgtagaagccttcctgatgaagctctctgcgcgga

SEQ ID NO: 45507 - DNA, 424 bp, Zea mays
  unsure (1)..(424): unsure at all n locations
agctatatgggctcacagaatatctaaacatagtgctactaaagtatcttcttttaagcttgtctatgggcaggaagtagtgttgcctgtggaaataagtttgaatgctgtcaggttcgccagacaaaatgatataaccgtcattgattattataattcaatgatggataatattgatgaggtgaccgacaagagggtgatagctttgggagcaatagaaaaggacaagattatggtagccagggcctacaacaagaaggtcaaagcgaagtcatttcaagtaggggacctagtgtggaagaccatcctgcttaaggaataaagaccggaagttgggaaatggttgccagctgggagagtcttataaagaaaacaggtatgtctgtaacgcctattactacaacattacaggcaangattaccc

SEQ ID NO: 45508 - DNA, 388 bp, Zea mays
  unsure (1)..(388): unsure at all n locations
ngatggccaagtcaagaagcaggttccagcgtattntgtatctgaagttcttagtatatcaaagaaaaacgatacagaattagagaaggtgttatatgctgttttgatggcatccaggaagcttcggcactactttcaagcatacaatattgttgttccttcttcgcagtcgttgaaggatattatgagaaatagagaagctactgggcggattggaaaatgggctgcagagctcaatgaattttgcattgattatgtgcatagatcttcgatccagtcccaagcgttagcagacttcattgctgactggacgccaggggctcangatgaagaaacaaataaagatgccgaagtatggatagtgttttgcgatgggtcttggggaacc

SEQ ID NO: 45509 - DNA, 430 bp, Zea mays
  unsure (1)..(430): unsure at all n locations
agctngccaacgaccaattcaaggtctatagcttctcttgtaacatccaacagctacgtcgcttctacccttaagatgttttaagtcgttcttgtacctcgtttacatacataaatagagtctaaccgtcaaggaagggtcagccttgcctcggcaaagcccgaccctccctcgggggctagaaggggggaaccccctctgcgtcaaaattttcctcggagaagttttcaccaaaacgacttttgtgtttcccgactatatcggtaacagaaccccgcaaaacgaataaaagcgcatgtaagcggcaagtgcaccgagccgagggactcctacgccttcggatacggatcctcactcgcacctttcgcgaaaataactctactcggatagcattctgctctgacaacgagtcgatactcgaacagaagaa

SEQ ID NO: 45510 - DNA, 414 bp, Zea mays
  unsure (1)..(414): unsure at all n locations
tgacacattgtcaggacagtagtcacccttatgatgaggggtgtttccgacgaaaacacataaagaggagcaatgagtgagtttatgagcggtggtggaaaggttgggtagcatcgacagtccaaaacacggngatgagggatccaaagagagcgagatggggtttgaaaatatcaaggaggagcgtagcggtgttaagcgccatgacccaatatctggtgttaaggagcgaacaactttattgatggtgcaaagcataccttcaacttcaccatttgaggcaaagtataggggcaagacatacgaagcttgatgtcattggagtggaagaaagtgcatgcactttggttgtcgaatttgtggccattatcgcactggatgccctgaatgggaacgtcgaattgtgtggcgaca

SEQ ID NO: 45511 - DNA, 462 bp, Zea mays
accgagctgcagctgatccagatgaaatatggaagggctgtattgtgcgagcaagagtgcgaaggccatatttggagaagcttggcaggccaataagagatggcagaagaggcctaatccaaccttttggtacaatggctggggaaacaattcttttagccgtccacttaagctgccattgatggtgggaacttaaacagactcccttttattggaaatcatggttctgtagggcgtcactttagaaataaacgaaggaatatcttgctaaattgcattcttgatggtcatcggtcaccgccacaacttcctttgaagccatgccaagagtctcgactttgtatatataagaagtgcgtcgggtaagtagtgcatagacgggttagagccgccttgttcttaatcaatatcaattattattaactcacacattatgcatatgccttatccttaataaatccc

SEQ ID NO: 45512 - DNA, 450 bp, Zea mays
  unsure (1)..(450): unsure at all n locations
tgtgcatgtcatagttcagctgtcctaggaagcagaggcagtatgtgactccgctcatcgntgcactgatcaagaggttcaagtctccaactgttcagaaaaaaactgtcaaaagtattcaaaaatttcaaaaatactaaatgacaacatgatttctgtaaacactaagaagcaaattcattgtttgaaatctagtacagatcaaatgccagcttgttgttttatttcgacagcaagtgacaccgctcatcgttgcactgatcaagtggttcaagtctccaactgttcagaaacaaactgtcagaagtattcaagaatttcaaaacactaaatgacaacatgatttatgtaaacactaagaagcgaaatcattgattgaaatatggtacagatcagatgccagcttgttttttatttctgcagccatgtgtatataatctgctaacaata

SEQ ID NO: 45513 - DNA, 375 bp, Zea mays
  unsure (1)..(375): unsure at all n locations
agctnngtcagaatgttttgaagaactcaagataaggttattctctgcaccaatattggtaatgccagacatccacaagggatttgatgtgtattgcgatgcatcacaccttggacttggatgtgtgctaatgcaagaaggaaaagtgatagcctatgcttcaagacagttgagaaagcatgagaagaattatcctacgcatgatttggaactagctgccgtagtgcatgctttgaagatttagaggcactatatgattggaaacaagtgcaagatcttcacggatcacaaaagcttgaaatatatattcactcagaaggaactaacctaagacaagagaaagatggcttgagttgattaacgactatgatttgg

SEQ ID NO: 45514 - DNA, 451 bp, Zea mays
taatgccggaattgccatcaaggaagctccctcactcttctcatcctcccattgtctcatggcaaagggagatgctaaggtaaaaatcatcaccgatttaaatgatataaaagatgatgatgatatcgatgatgttgatgatgatggctattcatatgatgatcttgttagaatgttaggtgaggccgatgactacatgcacaaagaaaaagaaaaatttaagaccttgaaggaattgtataaaaacctccaagtgtcttttgaggagctcaagacctctcacaatgacctaaaagaaaattgtgagaagcttgcggatgctcaaaaatcatctattgtgcatgaagttgaggtggtcactaaggatgttggagtcacttgtgacttacttgatagtcttacaagtgaaccactacctactaactctatttgtgataaatgcaaaatttct

SEQ ID NO: 45515 - DNA, 341 bp, Zea mays
  unsure (1)..(341): unsure at all n locations
acatgtgctaagcggcgatgccacagccagcccatgctagtcttagcaattaagcatgcatctaaaccggcctcttcttttgcaaaatcaactaagtaaagcttgccgtctaatacacccttaaaggctagtgaaccatcacttcttctaaagacagacacatctacatttgtaaaaagacaattatatcccatattgcatagttgactaacagatagcaaattgtaaccaagagactcaactaanaacacaattgagatagagggctcattagaaattgcaaatttacctaacccttttactgccttgattcccatcaccgaatataattgaattttggg

SEQ ID NO: 45516 - DNA, 445 bp, Zea mays
tgacattgcttccctgttggaaaccaatgccatccttaatgccagggcgtctcccattataaagcatgctacaagaaaatttaaatttttcattttcgagctcatgcttggcaattttatcagttaatttagctatgtgatcattttgttgtttaatcatagcaaggtgatcatcaatagcttctacattgatatctctacatctagtgcaaatggaaacatgctcaacagtagatgtagagggtttgtaagtttgtagttcttctgtcttagcaattaatctaacattctcatctctaaaataggaaatagaatcattgcaaacattcaattctttaatcttagaaactaaactagcattttcatttctaagactagaaattgaatcataacaaaagctaagctccttagataaattttcatatttttctacttcctgagcata

SEQ ID NO: 45517 - DNA, 428 bp, Zea mays
agcttcgctcaacacacacagtcttatttgatattactcaaagctataagcttcagcacgaagaagctttcacgcgacgaaggccaatacttgtgtatcaaaggagggagaaaatacaatattgccatgatgtcattcgtaaataatgtgtgtaaaatctcgaggggcatgattgtgattttttatgaaggtggttcgtcttccctataaatagataaatagtgccatgtataacgtaccttctaagggttgtagcttcgtgtagcttagccttcgaagaaccttcgtgtcaccctgcattaaaagcgaaggtatgctcgtagactcatttgatatacaggaaaatagaataaaatgctaggcacagagatatttctacaatgcttacttgctttatatctttattacacttctttgaaacctcatct

SEQ ID NO: 45518 - DNA, 362 bp, Zea mays
  unsure (1)..(362): unsure at all n locations
gcttcggaacggtgtcttcggcatcatgttcaagcagcttttttctaagctgnttctttccgcaggaccttcggcgacgaagcatggtcccaacaagccacctcagagcactcgggcttcgcgcccactactggtcagaggttcgaaggttggcccctcggaagggttcaacggacgcctcaggccactcgggctccacgcccactactgatcaggggttggtagactggcccccgcaaggttntgacagccgcctcacagcacgcagagcgagggatgaccctgggtacgttcgatacataaccaaggctcacgctacgctcctgaggtaacctatgacatttctgagacccacgggaatg

SEQ ID NO: 45519 - DNA, 422 bp, Zea mays
  unsure (1)..(422): unsure at all n locations
agctatatagagttatgggtatatgttatccattccttctagccatctaggttcttttaagcagatagtttgaattggtcattggagctctctagagttnttggtgggtatgttttctatgtaataagcttatagcaccttgtttcttgagtgggattataaatataggttgtggttgggcttttagatctcatagtacttccatttgatatgcacaccatgtagaacacaaccaatatctccactcacatctgcttagttgatattgcatttgggtgagcttgaagttcatctagtagcactaagtatgtgttactatagattttttttatactcttggtggtgcatgacctgatagcttaaagtatgtgaccccataaacattgaagntttgagtcatttctattggcaggcaagaacac

SEQ ID NO: 45520 - DNA, 426 bp, Zea mays
tattagaaatggtcataagatatcacctttaatggactttgatatcaccaaaaccctagaagtaccaaaaaccctaatagacccctggaaaaccctaagttgaaaccctagggggttatatgtaaattttgcacacttttggacccaagtgcaaaaaccaaggtattagggtacctcaaatcatatggttcacacatatgaggatttccaagtcaaaagatgagatttggggcttatttgcaaaaagccactctacacctctcatgtgactaagtctcaaaatcagtgaacagggctgactttggagctctgtagttccaaaaatacaaagaatttgcttagggtcaacacatcaaaagtctagagctatgataggagaacaactttgcttaagtaactaagctttgatcacatacaaagtttgga

SEQ ID NO: 45521 - DNA, 420 bp, Zea mays
  unsure (1)..(420): unsure at all n locations
cggatccttaagcaccgcngctgcagctaccgattgaagcagatgttcctttggtttggcngcttggtgccctgcggctttaacaccgtcttgaatcttttgatgatgagagccatctcttcatcattaagtccggccgcctcaatctgtgccaccttgctaggtagcgcctccttgcttcctgttgccttgagagcaaggggttgcggctcgttgatcggaccattcaacgcgtcgtccacgtatctcgcctccttgatcatcattcgcccgctaacgaatttcccaagaacttcttcgggcgacatcttggtgtacctgtggtttcaccgaatattgtttcaccacaatggaggatcaagatcgggtaaatgaccttagcattacgcggacgacgtcgtgattcgtcatcgcatgctc

SEQ ID NO: 45522 - DNA, 309 bp, Zea mays
gctctcatcgccgacatcgaaccaccccttgccaggtctcttgttgcccctgccaggctagacacgccccatcgcccactccttcatcgccttcgatggatctgtcgctgcatggccttcccggtcggattcaccgtcgcggcagccatcccggctagatctgacgaccctttggtcggatcgccgtcttccagactggatccatcgttgttgtggccttcttggacggatccaccattaacccttctattctgttatgggcgcgggcaccgtctccatgaaccgcgcagacacgtgcgatgaccatgg

SEQ ID NO: 45523 - DNA, 384 bp, Zea mays
  unsure (1)..(384): unsure at all n locations
tcaccggcagatggnccagcatttcacagacttctacttgttctttattctagcaattcgaaccattatggtcaagcatgtctcttgatcttgcccaccgatccatataatattatggtaatgagctttgtcatcgcaataggcaattataatgacaacttcgatgtacttatttgatcaagatatcacaagttggtcattgaaaagtacatatggactcctcatctatatatgtgcagaaaacttatatcatcccatctaggatagaacatatttgtcaaaacagatgatgccatttatgggcacaattgaggggatcactcctgcatgcagggacatgacggcgatttctgttgttgctatgttgtacaatgacgcttccta

SEQ ID NO: 45524 - DNA, 340 bp, Zea mays
agcttctatgtacactatatatgtactcaatcgaaaaagagcaaccaaataggtgactcgtatggcgcaattaaacagtgcctcagcaaattcctttctgcgtggctacgcactgacaaagtggcagctaccagctagaaaccaggtgtaactgaacattgtcatttttcaatttacagagctccagcacaaacccatgatggttgtattagtatgactgctagaaagatgtatgtagattaatatgatccgatcatcaacagctatttggtggtctcctgacttgcgtagaccttaaactaccaaatacacacaacaaaacaccgttcactaccaagct

SEQ ID NO: 45525 - DNA, 400 bp, Zea mays
  unsure (1)..(400): unsure at all n locations
gcttctgttataatatgcgagtctattcttgagcagttnttttttcattagttctctttttgcaaagcatctgtgtaagtcaatttattgctaaactgaacagttctcattagaagttcttaattctccctccatttaaaattaaaagttgttttaactttacagaatttgctagtagagtcagtataatcgttcaggtaactacgtacacatgaacaggacttatactggtggtcaccggctctgacgacttatttggacctattctctgtgatttcgtcttaagccttgttcgtttgtgtcggattggtgggtcggaacgattcctaaccggattgcttctttaatttatataaactttgattagctggaacgattccgggtgcaatccgatagaaac

SEQ ID NO: 45526 - DNA, 346 bp, Zea mays
  unsure (1)..(346): unsure at all n locations
gcaagctgatgggcgggangatttacaatgatatctaggtgaatggtggtcgagagatggcccaagaaattataaagaaaagtgaaaaaggcacccatgacacccgagtagaagcgagacaactgaagaagctgcaatgcgcgaaaaacgtataggtattggttcttggcttttagcttcgacattcggttttatggcttcagactgattaactttttcctacttcaattcgatcccctggcctatccagaaacgaaggaagcattggagatcattaatatggctgaatctattgttgacgaagtcgtnataattgctaaatgaaggtgcgaagaaaatcctgaaa

SEQ ID NO: 45527 - DNA, 415 bp, Zea mays
  unsure (1)..(415): unsure at all n locations
nggagctccgccgtgcggccgccgcgttccaccgtggccaccatcaaccagacaccgattcatggtatggaccgtaactatctcgttcgcctttccttctagcgtcatgtagggtagttcgaatggggtttgggtgtcgaattcgggcgggcagcgttggcaccgcttcaaattggtgctctgccgtgggcaggggccagtgcttgatggcagctgcaatcggttggtgaaatagattcagggggtcatcggtttggcgagggatgaattaattcgggaatagtgctcggattgatcggattcacatgcgcgacggactcgccgtcgtggtcacgggcgccgccgtgcctgttggcaatttgtgaagatgaagtcgcgaccgctagatcagtagctgacggttgggattngatct

SEQ ID NO: 45528 - DNA, 435 bp, Zea mays
  unsure (1)..(435): unsure at all n locations
atccttagagtcacctgaggatgcagctgctcagaaccatcattgttgtgttataggcagcttaaaacaaatactacttaagccatcacaaagtttgacaacaaatactccaaagccatccgggatgtcagacgagtcagaaatgatctataacaacataaaaggattttgcaccaacacattcttagcactcgtgtcatttgtgacccttatgagatnttttgaaccatggagctaaccaaagggtgaatatttcattttagaacttgtcgcctgactagaataaacacgaaattaaagtaattagtctatccttagttgcacctctgactaagttcataagcaccttataaagctcctaagattagcaactaagcagtcgagctangtaatctacatatatagtctagtagtaaggcacacaaaaatatgtac

SEQ ID NO: 45529 - DNA, 365 bp, Zea mays
  unsure (1)..(365): unsure at all n locations
acctgaggcatgcaagctatcaagattacagactctattgcagaatagcttctataagtggatccttaagaattcagattacttattaggttacgtagctacctatatctagatttctttctattctagatcaagcacttgacctatactagccatcttttatcattcgttcagctcactttgggctatgtgtaggtcagtgaccaagtgctcatatccaagaattaacggtgatgagaatcgattaatacctatctggagatctccaaccacacgacatatgtagcacttaacccttccatatgtcaactcacacccagtntttaagaccagaatgggttcacgccaaccgatagcacaaatac

SEQ ID NO: 45530 - DNA, 264 bp, Zea mays
agtgtattgcaagaatatgcgaattgtcttttcctagctacgggtgccttagctgggaacatgcctatagatcggactgggaataaccattagacacaaatagagctttgcgccttgtgcacacatcatggctaatgagctttgactgcttctacagatagagacatttacatttgtgagtaagacatggtactaaaagccgtaaattatctcttggaagacgaagatatctattgactctgctcaaaaaaaatcagaaatata

SEQ ID NO: 45531 - DNA, 361 bp, Zea mays
agcttgtccgtgaatcgaccaaggcggctgctgttgacactcaccctaactctacacggtaacttggtgcttgatgtcgcgcagcgaaggaaaggtggaggacgggattcggctccaccatttatattcgccacgagggtcggttgggacgcccgctctgggttccaagtcaacggcgcgcatccgccatgaacgggtgaggtagttgactggcggctcgggaagaaactgtggacgcggcggatgcttctctcccgcccacatcaccaggatccccgagcggtgcgccacgcggacccgataaacccggcttgtgggtgcgaggtggtccaagccaattgtttgcgcgccgcgggatctg

SEQ ID NO: 45532 - DNA, 412 bp, Zea mays
tccactgcaaatctacaaatagttctatgtctcacatgactactagtggtatcatttacatgtcttctccaggtgttattagactatatttcatatcctacgcttcccatgttgctaaatgcatattgtgtcgaaatatatttgttacctatgcataacggaagtcgatctaatcaaatcatgtcttacctctatttctcgcatgctttctactaagtacaagatccctgacagggggagtatttcttcgtctatgacaaagagggagaatattctttctaagggagaacactcgtttaggggaggaatcttttaatgcttcaatttaccaatcttgtaagagggcaacgcttatggtgcgtcctatatgcttaaaaagtctccttctcggtgagtgatgccgaagggggag

SEQ ID NO: 45533 - DNA, 378 bp, Zea mays
  unsure (1)..(378): unsure at all n locations
agctngagggccaagtcaagaaacatgctccaatatatttcttacccgaagttcttagtttatcaaagaaaaattatacagaattggaaaaagtactgtatgctgttttgatggcctccaggaagcttcggcattattttcaagcttataacataattggtccttcttcacaacctttgaaggatattatgagaaatcgagaagctactggaaggattggaaaatgggctgcagagctcaatgaattttgtattgattatgttcatagatcttcgattcagtctcaagcgttgtcagacttcattgctgactggacgccatggctcatgaagaaagaaacgaaataaagatgttgaagcatggacagtgttttgcgat

SEQ ID NO: 45534 - DNA, 447 bp, Zea mays
  unsure (1)..(447): unsure at all n locations
nntctaacatttcttggtgcccattaaatattctctaattctcataattggctcaagtcataattntaaaattttcattccctttttcttattttcttgaattttgctcatggggctcacttacggttcttaattatggttgcacatttttatcttttcaaagactcaattgttttgatcatgttacttttaagtatatacttggtgaattctttattacttaagttgttttgatgctcatgcttactttggttcacataaaatgatggttcttggtttggcatttgagaaaaaccctaagtgacactggggtgtcacagccttccccccttaaaggaatttcgtcccgagattcaggccagagtcctcccagcgtgaagcgaacggtgagactgataggagaaagggtgatgattgttattattanggcaaaactgctcttcgaat

SEQ ID NO: 45535 - DNA, 454 bp, Zea mays
  unsure (1)..(454): unsure at all n locations
agctgttccgaagtactgaagactcttgaacttctttttttatctatctatagaaagacttcgaaactttntacatcatttggcaaaaattgtaattgacagttgaacaaaatattgtacttatttgtcaataccttgtaatataattttacctttctgctcatgtgcgaattgctttgttgtggacgaaaccaatgcttgcaatcttttgagccgaaggcgaaaaacaccttcccttcttttcgttcacatcaaagcattttttcattaaagacgaagcaccttccattcttttgtctgagacgaagcatcttcgtattcacaagcattttgtcactgaagacatgcatcttctgtctttcctattaatgttngtgcgttatgtcatgatgatgatcctacgaatgtctaatgaatggttgtatgaatgcacatgatgatgtgatgaattatg

SEQ ID NO: 45536 - DNA, 443 bp, Zea mays
tatgttgagttaccacacactctccggtgtgccttgcatctttcttgcatgcctgtcctcttttctcaagaggacgaaatcaatctggctagtgtgttggccactactgaaggtcacacacgtgggattgcctcttcttaaagaaagtgtttgctataaacatgtcatatgctacggcaaagctcacgatttcctctccttcttgattcctggtcccaaagccgaagccttcatgtacaccctcgaaactggtgctagatgtacccacatggccattgagatctcctcctatgaagagcttctcgccaactggcacactactaaccatgtcctccacgccttcccagaactctctctttgagttctcattaaggcctacttgatgagcatacgcgctgataacattgagaaccaagtccccaatgaccagcctgactatgatg

SEQ ID NO: 45537 - DNA, 383 bp, Zea mays
agcttctaaagggagaacacgtgatatgtctatctaatgttaccttcgaacaagatagaccttgtgcatcttgtcaagcagggaaacaagtgggaagctctcatcatgcacaacatgtgatgacaacatcaagacccctggagttacttcatatggacctcttcggacccgtcgcctatctgagcataggaggaagtaagtatggtctttgtatagttgaagaattttcccgcttcacttgggtattctttctgcaggataaatctgaaacccaagggaccctcaagcgctttctaaggagagcgtaaaaaaatttgagctcaaggtgaagaagataaggaacgacaatgggtccgaattcaagaaccttcatgtggaggagt

SEQ ID NO: 45538 - DNA, 434 bp, Zea mays
  unsure (1)..(434): unsure at all n locations
agcttgaagatgctgatgccagatatgggcttcttcaagattctntacagaggttccattattaccttgtatcgatatcaagtgttatcgctattctcttagcttatattttgttcccattggtttagacatgaagacaatatggcaccactggaaacttcgctgagatctgaaaggcagcaaaatgatgcaatcatgaaacaactagctgaatctcagggggaaataggagagctgcatacgaagcttgaagatgctgatgccagaaatgggctttttcaagattctttacaaaggttccattattacttgtatcgatatccagtggttgtcgctattctcttagcttatattttgctccattggntanacatgaagaaattggcacactggaaacttcttgaatctgaacgcgacaaatgatgcatcatgaa

SEQ ID NO: 45539 - DNA, 437 bp, Zea mays
  unsure (1)..(437): unsure at all n locations
tanagccatgataagtagcatacgcaagtaatatgcgaattgactctttcctagctacgggtgcataagtttcatcaaaatccaaaccttcgacttgtgaataacatttggccacaagtcgggctttgttccttgtcaccacaccatgctcatcttgcttgttgcggaatacccacttggttcctacaacatttaggttaggacatggaactaaatgccatacctcattcctcgtgaagttgttgagttcctcttgcattgccagcatccaatccaaatctcttagtgcatcctccaccctgtatggctcaacagaggacacaaaagagtaatgttcacaaaaatgagcgacttgagatcgagtggttacccccttatgaatatcaccgagaatggagttcacagggtgatctctttgaatcgcttggtggactctt

SEQ ID NO: 45540 - DNA, 305 bp, Zea mays
  unsure (1)..(305): unsure at all n locations
agcttcggaggaagatatggagatcttccattgttgctgtnctggttgatctggggtgaagacaaagggcataccacaaggacatgccaagttacaattgagaaacagaatgaaattacccacgctgaagcatgtgagaaccagccaaagcaagtcctgcataccgctctatgctattctctttatgtcccaaaatatgtaggcaatcaacagcctacgacctctgtcgcttcggcaagccattcttaagcttcttgggcccagatgccaccaccaccgctagctctagttcatagtcagcagtc

SEQ ID NO: 45541 - DNA, 406 bp, Zea mays
  unsure (1)..(406): unsure at all n locations
acaccaagtaccttgccaccgttctggttctccgcacacaaagcgacataggtgcgcccactgttcccatacctgccacagtctctcttgtgtagttcatactctgagctctatttcttcctaccgagatgtagggttcggccaatgcactcggaaaatcagatgcatagtaatttctttattgcggtcttagagaaatacaccaagatcacttttatggtatctatgaaacttccgaagctatagcatcactcgagttatggcatggaacttatcatacagtacgactttcatgttgcttacgcaatctaatatgagaatatccgttcgacagatactgctcagcgcacttaactgtcaacgacgatganatctgggaaggagtggcacctattgagtttggaac

SEQ ID NO: 45542 - DNA, 356 bp, Zea mays
  unsure (1)..(356): unsure at all n locations
agctngngaagggtcttcatccncacatgtgctaagcggcgatgccacagccagcccatgctagtcttagcaattaagcatgcatctagaccggccttctttttggcaaaatcaactaaataaagtttgtcgtctagtacacccttaaaagctagtgaaccatcacatcttctaaagacagacacatctacatttgtaaatagacaattatatcccatattacataattgactaacagatagtaaattatatccaagagactcaactaaaaacaacattagagatagagttctcatttgatattgcaatcttggctaaccttcaccttgccttggtntccatcaccgaatatgatt

SEQ ID NO: 45543 - DNA, 386 bp, Zea mays
  unsure (1)..(386): unsure at all n locations
agcttancctttatttgtggagcctcacattctttaacatgctagaatagcaaatggcaacccactgtgattattacagaaattntggaaaatattaaaccactgtcgtagttcaaacctacactagaaaccatatgtagaaattaaagaaaggaaaatgaataatggtaattaatgtcatcctaaaatccttgaaatttgtccactgaaaggtataaagacaatacaaatccactatgttatcatcaacgaaaacctaagcctaaaaagtaataagcctaacccactcgaagccccgcatgactaagaaaccctaattcttcttgacttagtttctttttagcataatgttattaaatcctgcataatcatgacatacatgttca

SEQ ID NO: 45544 - DNA, 444 bp, Zea mays
  unsure (1)..(444): unsure at all n locations
ntcgtctttcttcttcacaaatagtgctggacatccccaaggcgaagtgcttgggcgaataaaacccttatccagcaactcttgcaattgcttcttcaattctgccaactcagcgggtggcattcggtagggcctcttggaaattggggccgatcccggttgcaactcgatggcgaattcaatatcctggtccggtggcattcctggcaattcatcagggaagacatctgcatactcacagaccactgggatcttcttcacgggtaactccgtcatagagaaagcacatgaccgagtagaaccctgactgggcagaattaaagtgaaattcccgcagaacggagaattaacttccacggtacgactggctatatcaagcacaacttggtgcaaggtcatccaattagctcctagaataatgtccacattttccaatcccaacac

SEQ ID NO: 45545 - DNA, 320 bp, Zea mays
  unsure (1)..(320): unsure at all n locations
agcttgatgactgccagttcgacctctgaaattagtactacatggccacatgagccgctgtgtatgacaagctccaacgcagccgccacttggactcggtccagagtgtctgcaccgtgttgtccatcgtcaagcagggggacctcatggtcgttgacaacgtcggcgactctcgggttgttctgggcaccgcattcaacgacggtaccatcacgccggctagctcatcatccatctgaagcccaacctgccatgtaaatcgctactgaccggncataaattcttgtgcgtggggacaacgccgtgctgatgttgtgtga

SEQ ID NO: 45546 - DNA, 394 bp, Zea mays
  unsure (1)..(394): unsure at all n locations
cagcaaacaggcaatattatgaatgctgtggtaacttcacacctacccatctgtttatatagtgctgcacgtaagaacgtgaatcgtcaggatttttacaccaggcaaacagctgcttacacccgctgcgcggtggaccgcaaagaccaaatagtaaccctgcagggtgggaccgctacgcgctcggaaactgaatcgtttctcgacaacgagctcagggaaggtgtttttcggaccttctgcttcctgaagcctaagagactttnttcacggatcaagctcgttacgaaaaacgatctagcaccgcgaaggggctactgttgggaccatgcttcgtcgccgaaggtcttgcaggaagaaacagcttctgctgaagctgtctgcacgtgatgac

SEQ ID NO: 45547 - DNA, 308 bp, Zea mays
  unsure (1)..(308): unsure at all n locations
ngcttaaattgacttgcatgtttatgcatccattggctcaagctggattatcgacaatggatgcacgaaccacatgacggaggagaagactatgttcacctcctacgtcaaaaataatgaatcccaagattcgatcatctttggagatgggaaccatcgctaggtcaaaggattgggaaagattaccatcccatccgagcattctatctctaatgtgtttttagatgaatcgctcgcgtatcaattggtatctgtgagtccattatgtcacatgagttataattgtttattcacaatgtagatgtatt

SEQ ID NO: 45548 - DNA, 357 bp, Zea mays
  unsure (1)..(357): unsure at all n locations
agcttcgccgccgccgcctggtccttccctttttgctcttcgcttccgtacccggctccggaggcttgagctgccccgtctgaaagagaaagattcctctacctctacaggcgccaccacccccgcactatagatgagcaagcgctacgcggagggttctcggctacttatggcgggcggcggccgcatgtccggcgtcgtcaacccatcgcagctcatatgttccnctcgcaagggcgcagccttcgctaatcgcttctccatgttctcgatccgcttttcgcagatctgggacaaccttggncgttattaacccgaacccggacgacgacctggtcaccggctacgacacaggga

SEQ ID NO: 45549 - DNA, 366 bp, Zea mays
  unsure (1)..(366): unsure at all n locations
ggacccagagcacctgangctgcagctatgaaattcttatcccacagggctgtcagttggccgaaccaaccatgtaggctactattaagaagtgccattcaaccctatgaaatccaccagtatagggacgggaaaattcgcaagatgccttgaatattgccttgtctaaaacagtgacacctactaaatgaaaagacaagcgaacccattttgctaattgagatcagaaagcaaatagtcatcgatgaatctccagaataacttgccaattaatgggaggagatatgcagcttaccaaatttgacaaccctagggttcatcccaatggaaacctggcgggaattggttttttgaggagagacattt

SEQ ID NO: 45550 - DNA, 421 bp, Zea mays
  unsure (1)..(421): unsure at all n locations
tcaccacatcgcaataagccgctctagatagctggntctttgtcggtaagcctgccacggtgaaagccacgcatctcttgcgccagtgctcctgcccctctccggccgccagcgcgccattccaaattcaagagccaccgccctcgggtcctataaattgagcatacctctagctctgttgggttatcataaagccagagcacctgctcctacctccaattagccaccatagctctctaattcttcattctccccaaatcggttttctgcaccgtgaacacctcgtcgtggccagacgtctacaggttagctcgtgttcttctgtgggatgttctagcctccctcatgttccatgttgctcacaacacaatccaattgaattagaccgccttgaatcacccagaacacgttaagttatctc

SEQ ID NO: 45551 - DNA, 412 bp, Zea mays
  unsure (1)..(412): unsure at all n locations
agctttgttatcaacatccgttgctaggttcttatgtaccattacaatgtggctgactcaaggctaagccatcatatagaaaagggcaacgatgatgggctntacattagcagcgtggcttcctcggcaaacctttgggcactcatcatggacgcaagaactggtttctgttctcaggtttatgagctctcaccagttttccttcacaaggtacagtattatactatctgagtgaagcctgacgaccatacctaataattaattgatttagccaggaagcgtaactctgtttctgattatacacatgactagataatggagacgggagaaaagctactacataacggcgattgctggatcaatcaacgggagctcattggttgtcatgttcaaaagtcttgatttgaccttt

SEQ ID NO: 45552 - DNA, 447 bp, Zea mays
ctaaactactccacaaataaatccctagagcgaaacctatgcttatattcaaactagaatgtgcaaactaggttttgtctaagtgttgctatctctaccgcaaaggctaagtttcaatctaaacaatataagtgtaaagacaagatttaaacttaaatgcttatggcaaacaaatcaagcgagaatcaaagtgcgtgaacaccgtgatttgttttaccgacgtttggttccaaagaacctagtccccgttgaggaggccacgaaggctgggtgtatttcaaccctttccctctctctcaaacgatcacttagaacgagtgagccttctccttaatcaatcgggtcactaagaccccgcaaggaccaccacacacttaggtgtctcttgctaggggaaggaaggaacgccatccaagcaacaagagcacaaatgaacacacaaactct

SEQ ID NO: 45553 - DNA, 407 bp, Zea mays
  unsure (1)..(407): unsure at all n locations
agctnntgtctagtgtactcaggatcatgaagaatacctttctgcgtatagccgaaaggtcttacgactgagggcacaggcgccaacggtgcctaatgaaatcggtattgatgccataattaaggggcttctgcctagacctacagcccaatactttgccaagaaaccccctcagactcttggagaaactgcttcagaagatggatgaatatatccgagcagataatgactttcggcaaaaaagggaggaagcttacacgttctccgaaatgaccagtggctcttgagggagaattgtcacaccccgctttaaatgcgaatcactccaaccattgtcctgccatgatcatgttattacgttcacagcaagtccttatatggacctattacacagtgcttaaatagta

SEQ ID NO: 45554 - DNA, 447 bp, Zea mays
  unsure (1)..(447): unsure at all n locations
tanagccatggtaagtagcataggcaagtaatatatgaattgactcatgcctagctacgggtgcataggtttcaccgaaatctaaaccttcgacttgtgaatatcccttggctacaagtcgggctttgttccttgtcaccacaccatgctcatcttgcttgttgtggaagacccacttggttcctacaacattttgattaggacgtggaacaagatgtcatacctcattcctcgtgaagttgttgagttcctattgcattgccaacacccaatctgaatcccttaatgcgtcttccaccctatatggctcaatagaagacacaaaggagtaatgttcacaaaaatgagcgacacgagatcaagtggtttcccccttatgaatatcgccgaggatggagttcacggggtgatctcattgtatcgcttggtggactcttgggtgaagcg

SEQ ID NO: 45555 - DNA, 372 bp, Zea mays
  unsure (1)..(372): unsure at all n locations
agcttgcactcattgccccaactgaaagagaattaatgggattacagagagctgcaattctatcagctctgttgtcacgagctttggatgctcctcttcttccttcttatcccaggtactcccatactaaggggcctatcatctgaagtctgctcctagtattgagtacaaatcgctacttgtccaaatgaaatattgaaatatgtgtttaggatgagaatcttacaattctacctaattgtcaagtgcacatatctacagctgcctagatctatgtttgctcctagtaatcaagatcttttttttttntttttgcactcaggcaatccagaacatgacaagccaccggcagagttcttcgagcagatcgac

SEQ ID NO: 45556 - DNA, 447 bp, Zea mays
ttaccaaatggacgtgaaaagagtcttcctcaatggaccaatcatggtagaggtctacgttgagcaacctcctggctttgaagatagtgagtatcctaaccatgtatataaactctcaaaggcgctttatgggctaaagcaagccccaagagcatggtatgaatgcctgcgagattttcttatcactaatggcttcaaagtcggtaaagccgatcctacactctttactaaaactgttgaaaaagacttgttcatatgccaaatttatgttgatgatatcatatttgggtctactaacaaatctacttgtgaagagtttagcaggatcatggtttaaaaattcgagatatctatgatgggggagttgagatatttcttatgatttcaaattaaacaactccaggatggcaccttcatcagccaaaccaagtgcattcaagacattct

SEQ ID NO: 45557 - DNA, 374 bp, Zea mays
  unsure (1)..(374): unsure at all n locations
agcttgagcttctttcaagttgtgtcttatcctttgaactttttccttcgnttgtttaaccatgtcaggcctaaaaaactatcgntctccaggttccaaccaatttaagggtgtttggcatctgcgcccatacagtgcttcaaacggtgccatcttaatactctcttggtcactattatttatagaaaattctaccaatggtagacaatcatcccacctctggggaaattctaggacacatgctcgtaacatatcttcaagtatctgggttaccctctcagattgcccactggtctgaggatgatnaccgaactgtggaagtatttagtacccaaggatttgggcaacttctcccaaaacttggatacaaattg

SEQ ID NO: 45558 - DNA, 463 bp, Zea mays
taggacctataaaactcagcttacatctctggactaactcggctgcgtcactgttttccattggccagtagaaaccagacctgaagaccttcccaaccagagtcctggatgttgcgtgtatcccgcattgcccagcgtggatttcatctagtagttcttcccagtagctgaaagaatgcatttcatgaggactcctgtcgcgccccttctgtacaatgtttccccaatgagagtatagtgagctgactgccttgcgatgcgttttgctgcatttttgtcactcgactcctcttcattctttatatatctgatgattggctctctccagtcatcagaacctgaccctggttggttcaaaacactgcactcttctgcccgatctaaagaaatacttgggtgtggtacctcttagacgaaaactccaggtgggacctgagtccgactggatcctagttttgacagc

SEQ ID NO: 45559 - DNA, 353 bp, Zea mays
  unsure (1)..(353): unsure at all n locations
agcttcatggattgaatgctcaatggagtgatgtataaaaacanagctacatacggcatgcgattcgtgaatataacattcacaaaactttggttcatccaaacattgtcaggctatgggatatatttgagattgatcacaatacattctgcactgtcctagaatattgcagtggtattatatngttttatgaccttctaaatcctgattgatatgacaatgacaacatagataagtcagggtttatttgttcgctggtgcggatacctaatccagaggatttcattctgtaaccatgctagcattaattgtaatttcaaaagtggtagattgatatcatatcactgaccttt

SEQ ID NO: 45560 - DNA, 436 bp, Zea mays
  unsure (1)..(436): unsure at all n locations
ctctcaacttgngctaggttntacccctttaatctctatttatggttaagttccctatccaggggtctatttgcaaaatgctataacaatacaacttgtttgaaatttttacctagtgaatgcactctaggtgtgtcaaacatatgcaatgccaatgtttatgatgccatgctcaagttttagttgtagtaacaccctaggtgttaagcgccactaagatttaagcatgacataatcttgagcatcaacatcccatgtgattattccgaaaaggttaatcatgtgtgcattcactttaaaataatataacttgtaatgcttatgcatggtttgtgatgaaaatgtgtgtcgctttgttaaaagccgtatttaagaatcaaaaatttattntatgttctcacgtaaaataaaactggagaaagctttatctttattt

SEQ ID NO: 45561 - DNA, 252 bp, Zea mays
agcttatcactaatgaaaatacttggcactttcctgcattaacaatatcgcggccacacaagaggttagctatgatgcagagatagactactttgtggtctcaaaaaagcaggacttacatatgattccctctcactcacagacaatctataagaagatgacggcaagaaaatatggcgtggacaattagacatcttgcaatgtttatcaaggtcttttacaataagcaagccgcattttgagagaacaagc

SEQ ID NO: 45562 - DNA, 450 bp, Zea mays
cgtctgttagaaacgaacgaagctccagtttgaaacttgcttctgaggaagaaaatcttaaagtttcacaagttcataattgaatggccagagtccgctctaccgccagggttgagcgcgagggggaggaaactgaagcttcggagactctccccatctccgaagccatgcaacgatcgggtctggtgacttcagaaaagatccctcatgatgatacaaaacaagcagaacaagcaatcgctgaagcagaggaagaagatactgaggaaactgattccgaagatgattaccgcattgccatgccaagcaagccgagccacttggacttcgggaaatctactgtttcgaaggctgatttgtccaagatggtaaaggcgggtttttttactgaaaatcagaagaagttgttgcgcttcggtggagaagagactaccccgaagccagagaacg

SEQ ID NO: 45563 - DNA, 343 bp, Zea mays
  unsure (1)..(343): unsure at all n locations
agcttctaaagggagaacatgtgataggtctatccaatgttcatttcgaanaagatagaccttgtgcagcttgtcaagcagggaaacaggtgggaggagcgcatcacagcaagaatgtgatgaccacttcaagacccctggagctgctgcatatggacctcttcggacccgtcgcctatctaagcatagggggaagtaagtatggtctagttattgttgatgacttttcccgcttcacttgagtgttctttttgcaggataagtctgaaacccaagggaccctcaagcgcttcctcaggagggctctaaatgagttagcttcaagtgaaaaagataaggagcg

SEQ ID NO: 45564 - DNA, 406 bp, Zea mays
  unsure (1)..(406): unsure at all n locations
tggatactgttctgcgacggcttctggggaaccttcggggctcgttcatctgctgttttggttgcaccttccaaagtcagaacatgctatgcagtaaaacttgattttagttgcacaaataatattactgagtacgaagctttgcttttggggcttctgaagttaaaggcaatggggataagaagggcggtccttanaactgattcccaagttatttctggtcatgttgacaaaagttatagaccaagagacccgaagcttgagaaatacctggatacagttcgaaggcttgaagcttctttcgaacggttttctgtcaagaatattccacgaggagaaaatgagcacgctgatctgctagtcaagtcagtggcacaggggctgcccttaccttcagaagtatttt

SEQ ID NO: 45565 - DNA, 366 bp, Zea mays
  unsure (1)..(366): unsure at all n locations
agctngctgaaatcacatcacgaacagctttttatgaaccactggatggttgcagactgtcgtagcaagaacagcacacgcgaaagtgcggatagaaggtatgtcttcttcccctaacccagccccttcccccgaccccaacccctactcttcctccaacggtcaccacagaccctcgacggctgttactccggcgccggagaccacacactcatgcctgttctctaggcttttgcacctctcatgtggggtggtccaagcaccagcgatgggatgacaacgcttacggatcctcctctggtggtgcggtgcactccttaaacacgccccttcttatcttttattaccgccaccttccttggagtt

SEQ ID NO: 45566 - DNA, 440 bp, Zea mays
tctaaagggagaacacgtgataggtctaactaatgtacatttctaaaaagatagaccttgtacagcttgtcaagcagggaaacaggtgggaggctctcatcacaccaaaaatgtgatgacaacatcaaaaccctcggagatgcttcatatggatctcttcggacccgtcgcctatctgagtataggaggaagtaagtatggtcttgttatagttgatgattattcccgcttcacttgggtattctttttgcaggataaaactgaaacccaagggaccctcaagcgcttcctcaggagagctcaaaatgagtttgagctcaaggtgaagaagataaggagcgacaatgggtccgaattcaagaatcttcaagtggaggagttccttgaggaggaggggatcaagcacgagttctccgctccctacacacctcagcaaaatg

SEQ ID NO: 45567 - DNA, 410 bp, Zea mays
agcttatgaagaatcttcatcccaacatgggctattcggcggtgccagagccaacccatgttagtcttagcaattaagcatgtgtcgagttcagctctttcaatatctaccaagtatagctgaccctctaacacacccttaaatgccattgaatcatcacttcttctaaagacagtgacacctacatcagtgataagacaggtgtagcccatttgacataattgtgaaactgaaagcaaattgttatctaaagaatctactagaaaaacattggaaaaggaatggtcaggagatatagctatttacaaagaccctttgacacaaaccttgattttccaatcccgatgggaaagctcgtggggatcctgtttttctctaggaagagacattttcttctccctgtatgtggt

SEQ ID NO: 45568 - DNA, 443 bp, Zea mays
  unsure (1)..(443): unsure at all n locations
ntatcacacacgagtgctacctaagggacccctgaactctttctctaaagtgtccccaaattccttgagaaggtcatcaaggctggccagggacatgtcctcggtgtcggactggtttctgggagggttttcttcctgctgctcagtctgacatccttggcttttggtcttcttgcgggttttccttgcgggggcgagcttcttcagtaccttgtcgtagtccattttgagggtgcggtaggcttcacgggtgttggtctcttcgccttcagctaacgagaggctctcttggagggacgctctttcttctgaaagttccctgactttctgctccaggctttccacctgngaggttatggaggtgcactggagggcgaggtcatcatattggttatcaacggtatgaagatatccacccatgtagacaatggtgggatcattct

SEQ ID NO: 45569 - DNA, 415 bp, Zea mays
  unsure (1)..(415): unsure at all n locations
agactacgataattgtagggttttttggtgcatgtattaatatattttacatggtgttcgaatatatgtatatgtttgtgtttaatcttcattcatgtaatatgtgatatatgaaaaccgtagcaacgcacgggcatctaactagtatatatatatatatatatgtcggggaccataattaggggtaccttcaagactcctaantcttagctggtaacccccatcagcataaagctgctaaggcctgatgggtgcgattaagtcanggatcagtccattcgagcgactcgatcacgcctttgccgacctaccttggacaagggcagccgaccccggaggattntcgtttccccgaggccccccttcgatgggaacatatttcgggtcgccgaggcctgctttcttaaaacaacct

SEQ ID NO: 45570 - DNA, 404 bp, Zea mays
  unsure (1)..(404): unsure at all n locations
nggtgccaatggagaagcagaaatccttgaagtcttggctgtcaaactgtttgccgntgtcaactgtgagttcggacggtactccgaagcggcaaacaatgttttgccagaagaatttctgtgcagtctttgatgttattgtggaaacagccctcgcctcgatccatttggtaaaatactcgacagcgacgaaggtgaacttgaggttcccttgagccgtgggcaggggcccgacgatgtccaggccccagcactggagaggccatgtgtgggcgatcagttttgtgaattgcgaagggctgcctgatcgaggagaaaacttctggcagtcttcgcaggaccttgtgacccgatttgcggcgcagatcatagcgggccagtagaaaccttggcggatcaccttt

SEQ ID NO: 45571 - DNA, 307 bp, Zea mays
  unsure (1)..(307): unsure at all n locations
agctngagacnggaacaaccgtggcatgcactacatcccttgaagaanatgtcaaggacttgaggattgccaagaggaagaaactaaagatgaaattcaataccttctccaaaagcctcaaccttccctccacaaaaggtaacatccaaagtaatgatcaagccacacttcacactaagataaataagaagtgtagtgaatgctttgaagagggacacttgattaggtcatgtccctacattaaaaatggcttgattattaacaaggatgatagactttgttttaaatgctcaaagaagggacactt

SEQ ID NO: 45572 - DNA, 425 bp, Zea mays
tcacgcctttcgccttgagacatcggaagtcactttatgtctgaaaggaggtcggaggctctcctcgtcttgactacgatgtcatcgacgtaagcctcgaccgtccggccgatgtgttcgccgaacacatggttcatgcaccgctggtacgtcgcacccgcattcctcaagccgaagggcatggtgacatagcattacatgccgaagggtgtgatgaaagaagtcgcgagctggtcggactctttcatcctgatttggcgataccctgagtaggcatcgatgaaagacagggtttcgcacccagcagtggaatccacaatttgatcgatgcgaggcagagggtagggaaccttcggacatgctttgttgagaccagtgtagtctacacacatccgccatattccttctttctttctcacaaacac

SEQ ID NO: 45573 - DNA, 420 bp, Zea mays
  unsure (1)..(420): unsure at all n locations
cagcttcctccactctgacggctntagctaacatgtccacattgcaccaacggngctgaggagttactacgaccccaaaagtttctcattgatctgttcagagctagccctttattatccaatccaaagtaattacatgctgaaattgctgccaaaaggtcacaccatcagggtttagccccttctcttgccttgagtagaatagggacaatgcacttttgcccaaaccatgctgaccaaaaccagaaattatggttgtatatgagacagtgctcttctcaatcatatcatgaaagacatgttctgcagtataattttnnaactttggagtacatgtatacaagaacagtacctacgaatacaatggtgttccaacagcggcgctaagcaaactatggatctggttcccgcacacaacct

SEQ ID NO: 45574 - DNA, 258 bp, Zea mays
ttacgccctaaaaaccgctggggaccaccagacccgcgcgatttcatccggcccgaggcagccgccgacctggccgccatatcccccacacatgataggccacccggactaaccgtggagtctcggccgaagtgaactatgcccgggaagacaatgctagcgcgcgagatacccccgaacgggccggcgatctggcacaccgagcgacagacccctggacctgaaaccccaaacacccgcctcgacgaacctgagcgg

SEQ ID NO: 45575 - DNA, 324 bp, Zea mays
  unsure (1)..(324): unsure at all n locations
ctctaagacacctgaggcatgcaagcttgtaattagatcgagttcaaatactaatgatacaatatcntaaattatggttcggggctcagtctcacacagcaggaagcaaagagaagaggtgggcatacctggtggatgctcgtcgctgttgaatgtctacctgggcacctggcctatgcggcggcggcggcctacggtcgcccacccacctcgttgacacgatagagagagaaagagcgcacggcactggggtggcgggggtcgcccactcgacgccacggtcctagagagagagagagagagagcacgcgggatgaatgtgag

SEQ ID NO: 45576 - DNA, 439 bp, Zea mays
tctaaagggagagcacattttgagactaaccaatgttcattttgtgaatgacaggatttgtagcgcatgccaagcagggaagcaagttggtgttcatcatccacacaagaacatcatgacgattgataggccactggaactactccacatggacctattctgcccgatagcttacataagcatcagcgggagtaagtattgtctagttattgtggatgattattctcgcttcacttgggtattctttttacaggataaatctcaaacccaagaaaccttgaaaggattcttgagatggtctcaaaatgagttcggcttgaggatcaagaaaataagaagccacaacggaacagagtttaagaattcacaaattgaaggcttccttgaggaggagggcatcaggcatgagttctcttttcctacatgccacaacaaaatg

SEQ ID NO: 45577 - DNA, 457 bp, Zea mays
  unsure (1)..(457): unsure at all n locations
acctgaggcatgcaagcttgacattgnctccctgttggaagccaatgctcatccttaatgcatgggcgtctcccactatagagcatgcttttagcaaatataaatttctcatttgctaagtcatgctcattaattttagcactaagttgagctatgtgatcattttgttgtttaattaaatctacgtgatcatgaatagcatcaacattaatatctctacatctagtgcaaatggtaacatgattagtggtagatgtagagggtttgcnaacatttaattcatcaatcttagcatttaaaatagcattcctattcttaagaatgaaatagaaacatgacacattctaatttttagccttagcaattaaattttcattctccattcttaggctagaaaatgatgcattcacttggccatcttagaatcaaactacattatatttttaaactacaatcg

SEQ ID NO: 45578 - DNA, 453 bp, Zea mays
ggttcgtttcagccaggatggaagacaggtctgatagctgcagcgcataccattctatgcattgtagttcaattcgtttccattccatgcagtcaaaccagtgcaaaaccagagcagcataccattgcgccatcctagaatcctaaaattgcaggatttcagcacatgtacacaatcagaatgcactcaatttcttcaaatcaatttaatacatacagtaataacaaaaagacctgcaattattcacgcatactcgccaagaaacaattatataagtaatcagctatataagcaaatacaataataacaatggtcacacatacggagttgtcttcccaatacttgacaatacacataacaaagttgctaagacataacatagctgctaagaacagcaattcaaagctgctaagacatcaaagtttgacttcccaatactcgacaatacacatt

SEQ ID NO: 45579 - DNA, 475 bp, Zea mays
acctgaggcatgcaagcttctcgccgctgacgagctcgcccgcctgcgctcgatgtcataccagctccagccaccacaggcgacgagccgaccatcgacgtgaccctcgtgacttccccgacatcaccgaccacgccactggaacttcaccgtcgccggtaagccgtgccgcgacgttttccctttctattactgtttccgcgaactaaggaccgcgggttagatgccagaaaatgccagggggttaagtgttaaaccacagactcagttgaattgtagaccgaggactcgtttgtaggaaagaaaaaagttttaaccacggacccgagtgcaaagatattctctttgctttccgaattataaagtattttaaatctgcggcaacttgatgaatgcctaacttggagagtattcattccaaattggtcaaatcaattgtgatggactgagtcaaatatgagactttcaacaaaaa

SEQ ID NO: 45580 - DNA, 462 bp, Zea mays
  unsure (1)..(462): unsure at all n locations
tctctattactaagcttatgtcttggtgtataacacgtggatcacacatctttagacatatcaccctcccattataaccatctacttgtgacgctttagaaaagtgaacgctcttttcgttaggctttcttttatctatacgtatgatgaatatggtatgtgattgagtggagtttgtttcttcttgattgtttgtgtgatattcagtgattgatctaatagttgagaatcaagatctattcctatccgcggaagaacctcaagttttcaataagcaaggtgagaggacttgtccctctgcatactctgtttgatccccaacaatacatttaatacagattattcttttggatatatatgcataatttgatgagttacctatttagataacctttgcaaccttatttcttgatcaaacctgggaattatactttaccttcgcagntatgctattgctacaac

SEQ ID NO: 45581 - DNA, 444 bp, Zea mays
  unsure (1)..(444): unsure at all n locations
agcttgagaaccagatcatccgggtatataagtttctagatgagaagtgaccacccaagttccatgtatggagcattagaaggtcaatcgaggaaaggatccatgggcaagtttgtatgatgaaggtttctgcgttggaatttgttgggggccttctcgtgccaaagctcctcaaaatattgatatatatatggtttttaagtttgtttcagaatcttcaagtagtgatgaagctaaccttcatttgaaagccttcggttgagtggtgtactcacaaacgctgagccaggaagcttcagttatatggncttgcattgtagcatataagttaaacgacgacgaaggggagatgcccataagcttactcacatgtctatacatgaaaaaccatgatactcttgagaagtgtatagtcttgatatataggacatgaagacatatttg

SEQ ID NO: 45582 - DNA, 450 bp, Zea mays
  unsure (1)..(450): unsure at all n locations
tctatagggagaacacattntatgattaacaaatgttcattttgagaaagacaggatttgtagcgcatgccacgcagggaagcaagttggtgcccatcatccacacaagaacatcatgactaccgacagaccactggagctcctacatatggatttattcggcctgattgcttacataagcatcggcgggagtaagtactgtctagttattgtggatgattattctcgcttcacttgggtattctttttacaggaaaaatctcaaacccaagagaccttaaaaggattcttgagaccggctcaaaatgagttcggcttaaggatcaagaaaataagaagcgacaacggaacggagttcaagaactctcaaattgaaggctttcttgaggaagagggcatcaagcatgagttctcttctccttacacccctcaacaaaatggtgtagtgga

SEQ ID NO: 45583 - DNA, 423 bp, Zea mays
  unsure (1)..(423): unsure at all n locations
taagctatatcgactccaaagttcatcagaactcactgtcatgccaattttcagtcttcagtggtgactgacagtccgacttcaggctcatttatctctaatttttgcacagcaccaatgcttacgcacttaatcaaagttgtactcctatcatggctctacaagtttgatgtaatgacctagggtaaaatcctcatgaattaaaaaatacaagactccaaagtcagcttaatttcactgaaattttagagttagccacataggtattcttgggaatttttgcaattaagtccaaattgctccataatacttgaatttctccaatgtaaaaagtcgcttggctttntatgttctatcacttttatatatacactttaattcaaaagtgtatagaacttggaattaccccctatgggacaagtt

SEQ ID NO: 45584 - DNA, 459 bp, Zea mays
gacctataaaactcagcttcgagtgtttagctttcttttgatgtccaaatctctaatgtaatgtgcgctaaaggttaaagccaactctagaccacctgatgcatataaggaagaatggtccacatgcaccattctctgtggcatatcaaaatcgagctcgatatccttgaagattgagccagataatattactcagtactgaatttaatgctaaagacctgttcgtcatggataggataataatggatatgttacacgttggtggtttcttggatgaatatgctagtgcatacggttaggcctcgcaggagaaacacaacacgattgggttttgtagctctcctcccctcatctctgcatgggattggaatatatataactctgcgagttcatatggaaagcagtgaagaatatctatggattatattctctgctctcctgtcctctctatgccatatt

SEQ ID NO: 45585 - DNA, 427 bp, Zea mays
agcttctaaagggagaacacattttgcgactaactaatgttcattttgagaaagacagggtttgtagcgcatgtcaagcagggaagcaacgtggtgttcaccatccacacaagaacatcatgacgactgacaggccaccggagctactccatatggatctattcggcccgatagcttacataagcattggcgggagtaagcattgtctagttattgtggatattattctcgcttcacttgggtattctttttgcacgaaaatcacaaacccaagagactttgaaggattcttggacgggctaaaatgatccccttgggatcaagaaaataagaagcgacaacgggatggagttcaagacttaccaattgaaagctttttgacgacgagggcttaagcatgattctcttcttctaccgccacaaaaaa

SEQ ID NO: 45586 - DNA, 338 bp, Zea mays
aagttggtgcccactatccaaaacatcatgacaaccgacaaggcactggagcacctcacatggatatattcggcccgagcgctcacaaaaacatcggagggagtaagtactcgttcattattgtggaggagtattctcgcttcacttgggtgttctgtttggaggaaaaatctcacaccctagaaaacttatagggattcttgagacgggctccaaatgagttcggcttgacgatcaagaaaattatacacgacaatgggacggagtttaagaacgtcccaatagaatgcttccttgacgaggagagcatcaagcatgaggtctgttctcctacaccc

SEQ ID NO: 45587 - DNA, 75 bp, Zea mays
acacctgtcaaggggtccagggagcgcctatgtaagccattaggaggaaggacatcaaaggaaaaggaagaaaac

SEQ ID NO: 45588 - DNA, 434 bp, Zea mays
tagcccggcccgaagagcgtgccaggctcgacaggaatttgatcctcttgggctggcccgagcacggcccgttatcagccgggcctttaaaccggcccgttcacagaactcccctcccaacggccccacaaataatgggttgcctcccaacggcccaaatagcgcactccgcaaccgcacgcccgcagtccctcccacaccgtgttatttagtccatgagcaaagacaccgtggtaaccctaaccctctctcgctcatgcgtcctctacgtgtggcggctcccggatccagctctcgctctcagtctctctcgctcctgtgtgcggctcctgtgctccggtgctctcgctctgtgcgcggctgcctccggtgctccctacttcttctccggctcgagagctccggtactctctggtcccttctcctcgcgcgag

SEQ ID NO: 45589 - DNA, 435 bp, Zea mays
  unsure (1)..(435): unsure at all n locations
agcttctaaagggagagcacattttangactaaccaatggtcattntgagaaagacaggatttgtagcgcatgccaagcagggaagcaagttggcactcatcatccacacaagaacataatgacgactgacaggccactggagctcctacacatggatctattcggcccgatcgcttacataagcatcggcgggagtaagtactgtctagttattgtggatgattattctcgcttcacttgggtattctttttacaggaaaaatctcaaacccaagagaccttatagggattcttgagacgagctcaaaagagttcggcttaaggatcaagaaaataagaagcgacaatgggacggagttcaagaactctcaaattgaaagcttccttgaggaggagggcatcaagcatgagttctcttctccctacacgccaca

SEQ ID NO: 45590 - DNA, 442 bp, Zea mays
  unsure (1)..(442): unsure at all n locations
ntagagagcctganatacaaagcgcggtggaagaaaaactatcccaagccataggcagaactgggtgcagacacagcccccttctagtcgagcatagcagaaaagaagtcttcagctgctgaaaaacataaataaatctaggtgaatacactaggtattccacaagcccatcccgcccgtaaagagaaagggacctatataatacatgctttatatggagttgaagtcactcttcttttttagaaaaagacaattctttgatggttttccgcaaagaaggcagtaacacattttcccactcaaccaccactgagcttcctgctcccatggcattgtttatttccaaaaacacacccactcacacatttcctggttcgcggaggtttcaaacactaattgtcataccacaccagactcgtccataccagtggacacggactat

SEQ ID NO: 45591 - DNA, 436 bp, Zea mays
agcttgtcaattcccgacattgtggttacaagttttgaagcttcagcagcagcctcggctttggcactcgcagtagtaaccaatttggtcgctgaggctgaaggtggtgttcgctcaatagcttgcatcacattgactattcttcttttcttttgcccttcagccttctccttagcagccaaaggttgctctttcttctgtaaaaatttcgtcagttctggtcctagaggacttagcagcttgatgggcagggaatcagtcattacctttaaaatttctgctacttcagtagcaaaaggtgttgaggagcttcattctgtttcacccacctttagctcagcaaaggaagttgtatcgagccttcgtttttagaacgcgtcgccttcggctcacgagcctgtttcgctttctttgaaaatttctcatcttcttttat

SEQ ID NO: 45592 - DNA, 398 bp, Zea mays
  unsure (1)..(398): unsure at all n locations
tgggaccgcgactctgcgaccattaaaatctttgttgcaaatgtttatacctgtcgagctcattatgagtgactattaatacagctgccttttggattatatcaagtggactaactgccatgtgagtgtatgcaccaagtctttttgtctcatggagtgccggtggagtatgaaatggcggccgaccaccacgctaaagatcatacgggtccgtgccgatagatagcgagcggtgaatgactaatgctttctcttgacagatggacagaataaaccgcatgactaactatggtggctaacatgtatgctcaccgacacgcgtgaggacacgttggaaccaattatactttccacgtggntgacgactgatgggacacatgaccagcacctagaggaca

SEQ ID NO: 45593 - DNA, 378 bp, Zea mays
  unsure (1)..(378): unsure at all n locations
ncaagcttataccgttttcccgtagcatctcctgcgttggggttgaaccggagaaacgtgttgtctggttgggctccagtggtgcgccagcgccaccatggggggacctgcgccaccggcctgtgctctaaaggtggaagaacgacgctagtgtgtcgatctggaaacaaacggaccggattagagatgggagtattttgatcgtgatcattggattcattccgatggccacgattatatggtggataccctttcggcccgtcgatccttgngcgttggatcgggatcgggcgatcgggattggcgcagacgtgtgagccttgcangccatggatccacgatccgatgcccgaggatggttctgggatgagtttaatc

SEQ ID NO: 45594 - DNA, 438 bp, Zea mays
  unsure (1)..(438): unsure at all n locations
tctnagggagaacacgtgataggtttgactaacgtgcaattctaaaaagatagaccttgtgcagcttgtcaagcaggtaaacaagtgggaggagcacatcacagcaagaatgtgatgaccacttcaagacctctggagctgatgcatatggacctcttcggacccgtcgcctatctgagcataggaggaagtaagtatggtctagttattgttgatgacttttcccgcttcacttgggtgttctttttgcaggataagtctgaaacccaagggaccctcaagcgctttctaaggagagctcaaaatgagtttgagctcaaggtgaagaagataagaagcgacaacgggtccgaattcaagaatcttcaagtggaggagttccttgaggaggaggggatcaagcacgagttctccgctccctacacacctcagcaaaat

SEQ ID NO: 45595 - DNA, 443 bp, Zea mays
  unsure (1)..(443): unsure at all n locations
tgcaagcttcatcatcttctatgatgcttcaagacaaggtttggtgttcgtacttatgcaaaatgagaaagtcatcgcctatgcatctcgcctactcaagcctcatgaacagaattatccaacccatgatttggaattagcagccatagtgcatgctcttaagatatggagacactacctgattgggaacaaatgtcacatattcacatatcacaagaggctgangtacatcttttcccaaccagatctcaacctccgtcagcgaagatggctagagctgattaaggattatgacatcgagatccactaccacccccgaaaggtacaatagtaggctgacggcctgatagttcgcctagagggggggggtgaatatggcgatactgaaatttacaaatataaaccaacttccagccggggttgcgttttaatattaacgagtc

SEQ ID NO: 45596 - DNA, 390 bp, Zea mays
  unsure (1)..(390): unsure at all n locations
agcttcggaattgcaaaccgacttanaagtaatatgaccttttantccacaagtgtttgagtcattggtgtaatcttttatgaggggcatgattgtaattcctcacaggctgtgttttgtgcctataaatagtgaacagtattcctttactgtncacgcctttctgtaattgcaatcgcatcactcgggaattattccttgccaaggcagaggtataaatgcatttaatattgtattcgaatacatcaaacttatataatatggaaatgatgttgcttgcctatagcttacttgtctttaatgctttatatctcacattanttacattacttctcttgagaaatttaattattgagaaattcaacctttcgtaattgtgtccgtttaacc

SEQ ID NO: 45597 - DNA, 474 bp, Zea mays
  unsure (1)..(474): unsure at all n locations
acactatanaaaactcacagctctgatacacggattaaacatcgccatatcactgggtgtcttgatactgatggngtacggagattctctgggagtcatcagtcagataaacaacgaatgggattgttcaagtgattcaatgggaagatactgcgccgccgtccgaaagctggaagataaattcgaaggtctggagtttcatcatatagaaagagatcggaacacggcggctgatatactgtccaagctctgatccggtcggactcaagtcccacccggggttttcgtgcaagaaattctccagccgagcgtctcgacggatcaaatagaagagtgcaacatcatagatcaacctgagtcagactctgatgactggaggcaaccgattattaagtatataaagaatgaagaagaaccagatgacaagaactctgcagagcgcattgccagacaatcagctcactatacactcat

SEQ ID NO: 45598 - DNA, 435 bp, Zea mays
  unsure (1)..(435): unsure at all n locations
accttgagacacctgcggcatgcaagcttggngagaacccattcgagggagtccggccacaagcataaggaggaatcctcttcctccatcaagtcacaacggagaggtgacaagaagaagataatgaagaaagtggtctactacgagaccggctcttcgtcgccctccaccttcggctccgactcgtcgtccactacttataagtgccatcagcgcaagaagtatagtaagatgctcctccgctactctcgtatttctaagcgcactccattactctctgttcccttaggcaagccaccatcctttgatggtgaggattattctatgtggagtaataaaatgatgctcatctaacactctctccaccaaaagtctttgggatattggtgagtatggagtgcaagtcctaaggtggggacaagactccaatccgat

SEQ ID NO: 45599 - DNA, 432 bp, Zea mays
  unsure (1)..(432): unsure at all n locations
cgctgccaggcaatctctaagattcaatcgctaccaggtggtagcatgcttgccttatgcaataccgtggttaaggaagtcttcgaccttacaggttatgacagggttatggcttacaagttccatgaagatgagcatggggaggtctttgctgagatcaccaaacctggtattgagccctatctatgcctgcactatccggccactgatatccctcaagctgccaggtttctcttcatgaagaacaaagtcaggatgatctgtgattgccgcgcaagatcggtgaagattattgaagatgaggcgctctccattgatattagcttgtgtggntcaactcttagagcaccacatagctgtcaccttcagtatatggaaaacatgaactcgatcgcatcccttgtcatggctgttgtggttaatgaaaatgaa

SEQ ID NO: 45600 - DNA, 338 bp, Zea mays
agcttcaattccatatatattatggattgcttttgagtctgtccaatttccttcggcccttctggcagcttcttgacttccatgaatagcaatgggcccttggtccgaaggtatctttatgcaaagataagctggatgcagaattgcttcgaaggcattaagagtaccacgaccaatgattgcattgtaagggtactccatgtcaacgatatcaaacataacttggtcagtccttgtgttgttgatgaatccgaaggccactgacattgagattttgccaagtgctacaatctgccttcctccgaagccacagaggggatgtgggatcaagaatttta

SEQ ID NO: 45601 - DNA, 445 bp, Zea mays
  unsure (1)..(445): unsure at all n locations
ntgngaaaccaatactcttcgacagagtaccgataaccttcactccggtttggtcttggagacaacctaagctttcgtcgtcaatacctctgaagagtagcgcccctggttgatacccacaggatatggcatagtctctcaattcttctttctcagcctttgacaattcttgtccaattaagttttgaaagttgaaattttcttcttctgaagtatcttcggctatttacttctctttcccaggcactgtggccatggtctcttcggcggctgtagcagcttcttctgtggctatgtccagaagtattctatcaatatcagaaagtgtgctttctagatttgcatcttcggtagttgtagcttcagcaggtgcagcttcggtagttgtagcgctctcgacagctggtgcctttaacgctgaagctggtagtggtgtttcttcaat

SEQ ID NO: 45602 - DNA, 447 bp, Zea mays
  unsure (1)..(447): unsure at all n locations
agcttggcatcatcaatgtcattatcacttgatctctcttcttctagnatcactctcgatttgtccttattctcttgatttgcttcgagagccaaatgcttcttatatgaagaagaattgtgttggtcatggatgtgcatgtacatattatgagcattgatctctcccaacattgtgttggtgtagttttggaaatatctatttgacaatgtactctgacaatgtggttgtacttcttgattgggagcacactaagaatttttctcacaacatctggttgtccaagttgtgtgagtctcacaccatttatcatcaaggatatttagctgtgagtacatgtcatttgcattataatgatgaagcatttcaaaagaacttaattttctcatgacaatgtgataacactccttacactcactcttgatttcctcatgtaatgcacaaatg

SEQ ID NO: 45603 - DNA, 440 bp, Zea mays
  unsure (1)..(440): unsure at all n locations
tcatgcaactgctgcanaaataagaagtgagttgtgttccctgatctgatattatcttctttggtactccatgcaagcatacaatctgggacatgtatagctctgctaatactacactattataggnggncttgactggtatgaaatgagccgcctttgtcaagcggtccactactacctagatggagtcataaccgactcgagtgcgaggcaaaccgactataaagtccatcccaatctcatcccatttccactgaggaatctgcaacggctgtaacaaacatgcgggcctctgatgctctaccttaattctctgacaactgtcacatatggcaacatattctgcgatctcccttttcataccgtaccatcagaatcttttcttctggtcttggtacatcttctcgctgctacggtgtatggaataagctggctcatga

SEQ ID NO: 45604 - DNA, 420 bp, Zea mays
catgcaagcttgtcgacaagcgaaacctagaagcctgattatgatcctcgaggagccagaagcagcggttgctatcggcaaccagatgctcctcaaaggccaaaattcgttgaagcttcatctccccgaatagtctattaagtgaagatatgtatctgaagtaaagctatacccattacccttctaaaccgaatctcgaggacgagatttctttttagtggggtagatttgtagcatcccaaaaattcaaatcctgaaatttcttaaactcgctctaaattcaaacgaatttcagatctcatttcaaaatgtttgtttggagttgatattcagcaaataaattatagtggtctatatactctctaaaatcctcctcaaaatatcctacaaatatttctccagtgatccccctcaattctt

SEQ ID NO: 45605 - DNA, 448 bp, Zea mays
agattcttcatcccaacatgtgctagtcggcgatgccttatccagcccatgttagtcttagcaatgaagcaagtgttgagttcagctctatcaaaatctaccaagtatagctgaccctctaacactcccttaaatgctattgaatcgtcacttcttctaaagacagtgacacctacatcagtgaaaagacagttgtagcccattttgcataattgagatacagaaagcaaattgtcatctaatgaatctacaagaaagacattggaaatagaatggtcaggagatatagctattttaccaagacctttgaccaaaccttgatttccatccccgaatgtgatagctcgttggggatcttggtttttctcataggaggagaacattttcttcctccctgtcatgtggtttgtgcacccgctgtcgatgatccaacttgagcccctggatg

SEQ ID NO: 45606 - DNA, 371 bp, Zea mays
  unsure (1)..(371): unsure at all n locations
agcttctaaagggagagcatattntatgactaacaaatgttcantttgagaaagacatgatttgtagcgcatgtcaagtagaaaagcaagttggagtccatcatccacacaagaacgtcattatgactgacaggccacttgagctactccacatggacctattcggcccgatcgcttacataagcatcggcgggagtaagtactgtctagttatcgtggatgattattctcgcttcacttgcgtattctttntgcaagaaaaatctcaaacccaagagaccttanagagattcttaagacaggctcataatgagtcgaattgtgaatcaaataagaaaaagacgcgacaatggaacaggagttcaagaact

SEQ ID NO: 45607 - DNA, 454 bp, Zea mays
  unsure (1)..(454): unsure at all n locations
tactaagcttacgcgctgntatgaaaggcttanggatttcttgctttccaaatacttcaaaattgggaaagttgacactactctatttactaaaagaattggtaaagatttatttgtttgtcaaatttatgttgaagatatcatatttggatcaactaatgagctattttgtgatgagtttggtaaaatgatgtcaaatgagtttgaaatgtccatgataggagaattaagcttctttctcggtcttcaaatcaaacaattgaaagatagaatctttgtaagtcaatctaaatatttgaaggatatgctcaaaaagttcggcttggaaaatgcaaagtctattaagactcctatggcaacaaatggtcatcttgatttagatgagggaggtaccattgttgatcaaaaactcttttgttcaattattggtagtttgatctatattaccgcatct

SEQ ID NO: 45608 - DNA, 409 bp, Zea mays
  unsure (1)..(409): unsure at all n locations
agcttcngcttcgnctatgaggttgattgcctctgaatctngccaacaccctttagcccttctagcagttatttgactttcgtggacaacaatgggcccttgttctgaagtatattcatgcacaagtatgctggatgacgtattgcttctaaggcattaagtgttcctcgaccaatgattgtattgtacgggtattccatgttcacaatgtcaccgacaacttgcttagttcttgtgttgtggacataactcaaggtaactgactatgngatnttgccaagtgccacaatttgtcttccttcgaagttactaaaggtgtgtagcattatgaatcttgtcatttgtatntgcatctggctgaaagcctttgcaaatataatatctgttgcacggctgtgttaaccaaaca

SEQ ID NO: 45609 - DNA, 444 bp, Zea mays
tgggagcaatacaagttcacaaaggacaaagctgcttctgtttatctgccgaagcccatgctcttatgtgaggacatagcatagcacaacgtgctattgcgatctcaactatcctaagagcaagagaaaaccttgataaggtttttgttcaacaacatagatgatcttgcttggtcagctaatgatctttgcggagtaaacagggatgttattgagcactcgctcaatgttgatccatccttcacaccaacaaagcaaaggcttcggaagatgtctgatgacaaagccgaatgtgctcgcaacgacatgaaaagactcctcagtgctggagttatcagagaggtaaaatatccagaatggttggctaacactgttatggtaaagaaagccaatggtaaatggagaatgtgcatcgactctactgatctcaataacgcctgtttg

SEQ ID NO: 45610 - DNA, 388 bp, Zea mays
  unsure (1)..(388): unsure at all n locations
agctatccaanaagtcttagatcactatttttgttgatctgaagaataagctatggatgtttaaagcctgaagactgaatctgtccaattctggacagcaaagccttctagtgtattttatccttagttaaatattgaatcaccttaagatgtttataaatgatatgtagacaattttattacctctccagaaagtataagatcattctttttggatgcctgaatcttcagttatgaattnttaaagtcataagtcggaatctgttcaatttggacagcgctgttgtgttacaccttttgaccttgctaagattaatcatgctgtgatgacaataccaaagttgtaaaagcagtttcaagccttctagaaaagcctaagttactattt

SEQ ID NO: 45611 - DNA, 446 bp, Zea mays
  unsure (1)..(446): unsure at all n locations
cgcattgcatatttaaattccttgtattgcatctaggacttgtctaacctagttgagataaccgccaacaaagcgagtgaaaaagcttaactcgggtcaaacctgacaagtcttagttttaagcttttagcacttaaattcttactttttatgcaattattggttcttgaaatatgcatgaggtactgcacttagggggagtattcaaaactcaaatctctcatgacaacccctagtgcaaaccaaaatgcaaatttcaccatttgcctattttctctaaaaattatctagcctatggcgaaatattttgaaaaatatatgagggtgccaatacctgtcccaacaagtgttattntgtgtgattataagttgggatttggtttggttgggagttagataaaaaaattcaaaattttccaaactctgctctatctgggctcaccgga

SEQ ID NO: 45612 - DNA, 376 bp, Zea mays
agcttggaaattgatactatgtgttcactacttgcattaatgacaaagtctttacacctagtacaaatgttaacatgttctacacaagaattggatttgtttgctacttctaatttagcatttaaatcattggtgacacctttcaaagtagaaatggtttcatgacaagtagatagttcaaaagagagcatttcatttctcttaacttctaaagcataggatttttgtgcctcaacaaatttatcatgctcttcatacaacaaatactcttgcttttctaaaagtatattcttttcattcaaggcatcaatattcattaattttgtctatcttagatctatctaagcccttgaacaaacatgaataatctacttta

SEQ ID NO: 45613 - DNA, 441 bp, Zea mays
tgctcctgcattcttgagcccctcaggcatccgaatgtatctatacgtgccactaggagttataaagctgggctttggctcatcttccttcttcatccaaatttgatgatagcctgaataacagtccaataggctcatgagctccgaagaagctgttgcatccacaagggagtctatccttggcaatgggaactcgtcctttgggcatgccttgttgagatctgtgaaatcaatacacattctccatttaccattagccttcttcaccataacaatgttggctagccattctggatatgttacttctctgataacaccagcactgagaactctctttacatcgttccgagcaccttcagctttatcatcagacatcttttgaagtctttgcttccttggcctgaaggatggatccacattaactgaatgctcgatgacatc

SEQ ID NO: 45614 - DNA, 439 bp, Zea mays
  unsure (1)..(439): unsure at all n locations
agcttcngcatcgaatgcttcaatatgcacttcggaagtttcaacaatnttcttcggagttgtgcttgaagactntattgtctccaaaacatccagcacattaaccatcctttntcttttgggggtcactgctggacccttttggctttttgatgcttcaatttttgctgaaggacttanaatttcatatgtccttgtttctatagtctccggttcttctaatttcttcatttccggcattatgattggctcttcaacgttcggtaagggaatcgactccttggcttcggtggccgaagaaggtttacacaatattcaaggcacttgtggcccggatcaatatagcgtggccggtgagtaagaacctttatctttttcctctctggcgctggctcactgggagcggctgaacaaacttctttgctgaacagtatttttc

SEQ ID NO: 45615 - DNA, 451 bp, Zea mays
  unsure (1)..(451): unsure at all n locations
tatgaagattcttcattccaacatgggctagtcggcggtgccatatccaacccaagttagtcttagcaaccaagcaagtgttgagttcagctctatcaaaatctaccaagtatagctgaccctctaacactcccttaaatgctattgaatcatcacttcttctaaagacagtaacacctacatcagtaaatagacagttgtagcccatttgacataattgggatacggaaagcaaattgtaatctaaagaatctacaagaaaaacattggaaatagtatggtcaggtgatatatcaattntacccaatcctttgaccaaaccttgatttccatccccgaatgtgattgctcgttgaggatcttggtttttctcatatgaggagaacatcttcttctcccctgtcatgtggtttgtgcacccgctgtcgagtatccaacttgagcccccgga

SEQ ID NO: 45616 - DNA, 399 bp, Zea mays
  unsure (1)..(399): unsure at all n locations
agcttanggntntctcntattgtgtcttgctttacccttcagatccctgtttagggttaagtatcctatactaaggtcttatttgcaaaatgccataacaatacacttgtttgaaatttttacctagtgaatgcatcctaggtgtatcaaacatatgaaatgctaatgctgatgatgtcatgctcaagttttagtaacagtaacactaggggtgttacactccgcctctcagagttacaaaagaagatcgacgacgcaatcgaagaaatgtgccattgcatagaccatagagcagctagaacactagcccaacacagcggatcgtcggaatgaagaccacaaccaagatgaccttcggtacgaagctttcaaccataatgatnttctctatgatgatgc

SEQ ID NO: 45617 - DNA, 441 bp, Zea mays
tgtagggttgtagctaccagagatgtggcatcaggctcaaccgcttgggtgctcggtggcttatcacggaagaaagggaggaaggaccgaacgagagagggtgcacataaccggtggtgggtgctcgtcgccctgccaacaaattccagtaagaaccgattgaaccaaggatgaaacatggcattcacttgatctagattttgaggtggaacttgagatctggtgactgggtacgaggtgggcggccaccgtatgcctcaagacagtagccgtcgggccgaggaacatgccgaggtgcgcgaccaagggcgggatgcgcaggggcaaaagcggaagtccttcacgccggagcagggctaggcgacagtctgcacatctggtacacgagctagagcgtcgggaattagagcagcaagggatgcataccggtgcgtgcacccg

SEQ ID NO: 45618 - DNA, 451 bp, Zea mays
cacttatcaatgactgaaagtgcttccttatgtgccaatcaacgaagaggtctatgtagagcaaccttccggctttgaagatagtgagtattctaaccatgtctttaaactctccaaggcgctttattggctcaagcaaaccccaagagcatggtatgaatgcctaagagatattcttatcgcttatggctccaaagtcataaaaaccgatcctactctctttactagaacaattgctaaagcttggtagtatgccaaatttatgttgaagatatcatattcgggtctactaactaaactatcttgtgaacagatcagtaggattattgatcataaattcaagatgtcattgataggggagttgaagtatattctacgctttcaagtcaagctactccaataaggctccttctttatccaaactaagacattcaatacattcttgcaagtt

SEQ ID NO: 45619 - DNA, 412 bp, Zea mays
tctcaagggagagcacattatgcgactaacacatgttcattcttataaatacagggttcgcaacgcatgtcaagcacggaagcaagttggtgctcatcatccacacaagaacatcatgacgaccgacaggccgcttgagctactccacatggacctattcggcccgatcgcatacataagcatccgccggagtaacgactttctagctattgtggatgactattctcgcttcactttggtgttcttcttacaggataaatctcatacccaagagaccatatagggattcttgagactgcttccaaatgggttcggtttatggatcaaaaagattagaaacgaacaacggaccgagatcaagaacttacacatagaagacttccttgaggacgagggcatcaagcatgagttc

SEQ ID NO: 45620 - DNA, 436 bp, Zea mays
  unsure (1)..(436): unsure at all n locations
atcttcagaagcttacacattctatcttctatctcatctcatggttcaaacttcaatctctgaacatgacagtctacagtgtagaaaatgtttcgggtgaccatatccggtacatgttggacaccgtcttagactattacccgcaacggtactcatctcacctattatttcaaacctcgctctgtaaccgtgcacggccatatgcatggtctactaagcataagcttagtcctagtngaagccctcgcaataatgccccacgccagtatgtaagctcttcggttgagtaaaatcggataacatgtaagagggtcttcataatatcctctnttgtatcgctccatgccatcttcactattgagtctttgatcgaaacatagagagtcttgttcccttcagcacgttgttgatatgatctctcaaactaccaaccctt

SEQ ID NO: 45621 - DNA, 283 bp, Zea mays
  unsure (1)..(283): unsure at all n locations
tctanagggagagcacgtgatangtctaacttatgtaactttctaataatacagaccttatgcagcttgtaagcaggtaaacaggtgggaagctctcatcatgctcaaaatgtgatgacaacatcaagacccctggagtgacttcatatggacctcttcggacccgtcgcctatctaagtatacgacgaagtaagtatggtcttgctatagctgatgatatttcccgcttcacttgggtattctttttgcaggataaatctgatacccaatggaccctcatgc

SEQ ID NO: 45622 - DNA, 397 bp, Zea mays
  unsure (1)..(397): unsure at all n locations
agcttctanattgtcgaggtgacaaatgatgacggtgaattggttgttactaaggtcgcagctaagcaacttcgtctgttgcctattattcctcggctttcaaggctgttcctcaacaaggaaatatctctgcatatgacgtggccaaagaatggtgtacgtctcgtcactgatccagacataatggtccatccgtcggacggtgatgcgtggaacgcatttgacgagtttgatcccgaatttgcaaacgaccctaggagtgtacggcttggtctatcgacggacggattcacacctttcaataccagtgcaagcccttactcgtgatggcctgtcttcattgcgccattataatcttctactgagatggacaattaagaagagttcatgttccttg

SEQ ID NO: 45623 - DNA, 476 bp, Zea mays
  unsure (1)..(476): unsure at all n locations
ctgagcatcagctatatactattaaaccacaaaattcttatgtttatccaccctaataagagtcgtggggcaaatgtgccaatcacaccactcttcgttcatattagtcatagagcactagccntttgcaattgaatctcatagatctaggattagctatattgaccaaaggcaagatcttgtaattttcacaaaatgtttggataaacttaaaccaatgtagtagtctcaatctacacttgaaatcatgaattgaaaatactaaatgaattgatatggaattaggtcatctaaacctttataattgacactaatatatgtatatggatatacccaatccactaatgcttatcgcttaactaacacttaatacctcagagtgataactcttaaacntactaatagcccacatatgactcaagaaaccttcaagtgactcaataacgtatgttctcctccttaacataatgatatta

SEQ ID NO: 45624 - DNA, 417 bp, Zea mays
acctactctgtggatatccactgcgtgccaagcacgaatcatggtgaccggcgcgagcgcaagatcaccggctgcgagggggggttgtatttgtgatctatgtcaagcactgtactgtgacaccccagtgtcacctagggttcttccctaagctaaccccaacctattatcacatgtgaatttagtataaggttgaacatcaaacgagaatttacagcaaaggtttataatgaatcttcttaaaactctccttaatcttggcatgaaccttgagagagaaagactctcaaactctaataaatctaagtaagccaagttaagcatatagggtaattgggagaagtcatggtgggacaatgccaatttagatatgatcaaattacataagtttagttcatcaaataactaacaaatcat

SEQ ID NO: 45625 - DNA, 365 bp, Zea mays
atcaaaccaccgagatcagctctaagggaaaccatttacgatgaataatgtttcttttagacagacagggttagtagcgcatgccaagcatggaaacaagttggtgttcatcatccacacaagaatatcatgacgaccgacatgccactggagctcctacacatggacctatttggcccgatcgcttacataagcatccgcgggagtaagtactgtctacgtattatggatgaatattctcgcttaacttgggagttctctctgaggacaaatctcatacccaagagaccttaaatggattctagagacgggctcaaaacgagttcggcttaatgatcaagaaagtgagatgcgacaacacgacc

SEQ ID NO: 45626 - DNA, 433 bp, Zea mays
agcttattgtagaacctctgccatgtactatcacttaattcagtattggcattacacaccaaactaaaagataatgatagcagaatcacatgctacacagactaaaatgaatctctgtatggctcttcccatattatccaaaatgtacatcttgtgttcaaccaagtggaaaaccagaacttcagaagaaaaggtcacaagaccatacatgacatatgttaacacccatcacgtcaactgaggggccacgcatcatgtattttgccttgtcgtttatatgaaaagaaccaataaccttttatagttccctgactccatgaacctaaatatggtaactagctattcttctgagaacactagaaccaagtatgtagacattagctcacatagaaggggcacgtcttaaaccataaattagctgttaataatacac

SEQ ID NO: 45627 - DNA, 428 bp, Zea mays
gtaaccctactacgagcaccccggtgcgagataatataagcctcatccttcctctcgtggttcatcttgcatcaacccatctgagaagggacacgcaacgtcaaaatcattggacggttgaggatcctcgcgggtccaaaacgctgacaccactagatctacatgaaagaggaagacaaggccagcacaagctttataacacccttcggcacatactgcttcatcagaatgccggaatgactaataaatgtcgggtcaaccttctctcacctcacaaaaggatccttgacagtcaagtatgccgcagcgctatcacctacgtggacgacattgtcgccgtgaacaaaaacaaagaggatcacctggtcgaccttgcccaaacctttcgtaatatgcgggatgcacgacttctgctcaaccccaaaagt

SEQ ID NO: 45628 - DNA, 398 bp, Zea mays
  unsure (1)..(398): unsure at all n locations
ggacctctaagcactgcagctcaacttgacccgctattcatacgtganagacttctacntctangcgtgggagacgatgggagtggcatgtatcctcctatcataataactggatggtagggtaatgtgctcctgggtagcgcggagtccccataccaagatgcacaaagtatgggctattaagctttaaggcactttaatggttattatgcactaaaaatggattctatggactttattgcaaatatcaaggaccctgatgtaattactttacacagactatggatggcgggttgataatccacctttttggggtcttcttgcaaaatgtctgagccgatagggtttgcacatgtcttcgacgatggattagattcgagcgggcataaaacaatcta

SEQ ID NO: 45629 - DNA, 313 bp, Zea mays
actcacttcgtttaaaacgtttttacgcttcaaatgttgttctgcttaaagctgctgctgagatgaactggtcttgagaaagacaacctaggttcttattcgagtcgaagccacacgaaagattccaagaaatttggagggtgctgaaaactgggacgtgaaagttgatatggacaccggggaaactccaagatcccctggcgacaaccttcagttatggaatcacttttagaaatatttgttattgaaggacgatttcgggactgccattggaggcgacaagggaaatactgtcacccctgaaaatgagttg

SEQ ID NO: 45630 - DNA, 388 bp, Zea mays
agcttgagtgggacggaaggcgatcatgacgaatgatatgatgatcacgaagctatgcgcagaatagcttctgcatgacagcagaaaaggggaaccgacttaaagatgaaaagccaaattagacctcgaagaattactatagagttattgataaatgtaaaggacattaatgtaattttacacgggttgtgtctcgtgcctataaatagatgaacagtactcccgtactgttcacgctgacttggcattcgcttttcgcatcacgcttgtacctttacttttcgtcaatccaaaggtacatttataatttgtcattatgaattcgataatgcacataaaaataagttgatgataatatctgcactattattcgtacttcatacatgta

SEQ ID NO: 45631 - DNA, 312 bp, Zea mays
  unsure (1)..(312): unsure at all n locations
tcagcttgctcccccatatattggncattatcctgttcttgaacaatattgtacaccggcatcccgactccagttacccgaaaccctgtctgcagtatataatgtattccacgtgtcttaattgaagaagtgtcttttggttcccgatcgaaccattgaagtaacatatgttttcttataaccagacttgacatatttagagcaccctattctagtcttggatcaaaaggacagaattacccttatgaagactctctatgtttacaagatacaatggaaccaacacactgaagatgaggctacatgggaaac

SEQ ID NO: 45632 - DNA, 102 bp, Zea mays
gctcattattcacactagaacctcatgacaactgacaggccggtcgagccactacacatggatctattcggcccgattgcttacataagcatcgacagtagt

SEQ ID NO: 45633 - DNA, 420 bp, Zea mays
  unsure (1)..(420): unsure at all n locations
tccacgtgttcgacgcgagctgacatccgggggcgcgctcatagcacgcccgtgcgcgaaccctcgcgcgcccgcggtcgtccgtgaccacgcccacgccacggctataaagcccgccccagtgcttggctgccttccacgatgcctcctccgtacctcgcctgacttacccgagccaaccattagctncggcgaccatcccgcgacccgccagtgccgcccgagagcaaccaccgtggccagcccctcttccgttctcctncgttcgatccaagccctcagatagcttcctggtgatgccgtgagacttgctcaagcttgaccacgggacccgcgtcaccggtatagcccaatcgtgctcaccggagttcaagaacccgccggcgcacgtggaccgggtaagcccctgcacacgttttc

SEQ ID NO: 45634 - DNA, 374 bp, Zea mays
agcttatgaagatcttcatccaacatgggctattcggcggggccagagccaacccatgttagtcttagcaattaagcaagtgtcgagctcagctctattaaaatcgactaagtatagctgaccctctaacactcccttaaatgctactgaatcatcacttcttctaaagacagtaacacctaaatctgtaaaaagacagttgtagcccattttacataattgagaaacagaaagcaaattggtatctaaagagtctacaagaaaaacattggaaatagaatggtcaggagatataacaatcttacccagtcctttgaccaaaccttgatttcatccccgactgtgatagctccttggggatcatgcgctttctc

SEQ ID NO: 45635 - DNA, 437 bp, Zea mays
  unsure (1)..(437): unsure at all n locations
tacccatgatgaggcatgtgaccagataaaaggtccacgatcagcatgcctacatcgacacggtccttaattgacatagatggagacactacaccgagactctcttctcatgcaagtcacccgcctggtctcagctttatcatttcaatccaaagtttggtacctgccagaggtacatctttttcgatgttgaacccatcatggccatgatggatccatcatcaagttatatttttgaaaacatcccatcccacttgaagcatcatcttttgcaaaacaaaacattntgtttttctagagcaagactaagcatcagaaaaaccttnttataaaacaggtgatcaaggaaaagtaatcaactttccaaggaaggaaatgcatcaattgtttagcacacaactcctatcacctaatgcatcaaacaagtgagaaagatt

SEQ ID NO: 45636 - DNA, 347 bp, Zea mays
tcacctttttatcctttctacaaaatgcaaatgaagcattgcgagtatgaaaaattgtagaagggtcattggttactttcctaggaacatgaataatatttctcctatgcatatgattaataacatttctcctagccaaatttctatcatgcataatagaagaactagaagccaccatggcatgagaatcaaaagcatcataacttctataaacattcctagaatgtctcctatcatgatacatgaaagcatggttcttttgcacactactagccataggggccttccctttctccttgacggagatggaagccttatggcttggtaagttcttgacttccctcttg

SEQ ID NO: 45637 - DNA, 450 bp, Zea mays
tcgcacctctgaactaactcggctgcatcattcttcgctggtggccaatataatcctgacctgaagaccttcccgactagtgtgctggatgctgcatgtattccacattgcccagcatggacctcctccagaaggcgcttcccaatagatgggagaatgcacttcatgaggacgcctgatgcaccccttctgtacaatgtctccccaacgagtgtgtagtgagccgactgtctggcaatgcgctcggctgaattcttgtcatctggttcctcttcattctttatatacttgatgattggccttctccagttatcagagtctgactcgggttgatctataatattacactcttctgtttgatccattgagatgctcggctgtagtatttcttgcacaaagactccaggtgggacctgagttcgactggatcctagcttggacaatacatcg

SEQ ID NO: 45638 - DNA, 460 bp, Zea mays
agctggtgaagattcttcatcccaacatgggctagtctgtgatgccagagccaacccatgttagtcttagcgattaagcaagtatcgagttcagctctattgaaatcaactaagtatagctgaccctctaatactcctttaaaagctactgaatcatcacttcttctaaagacagtgacacctgtatccgtaaaaagacagttgtaacccattttgcataattgaggaacggaaagcaagttgtaatctaaagaatctacaagaaaaacattggaaatagagtggtgaggtgatatagcaattttacccaatcctttgaccaaaccttgatttccatccccgaatgtgatagctcgctggggatcttggtttttctcgtatgaagagaacattcttttcttcccagtcatggtgtttgtgcacccgctggcgatgatccaactcgagccccccgatgcat

SEQ ID NO: 45639 - DNA, 484 bp, Zea mays
ttcttgacatttctcatcccacttaaattctcttcctttctccataatcttgtcatatgctcggcaatcttagagaacccttcaataaatctccgatgatatcctgcgagtcccaagaaactctgaatctcagtaactgtagtgggcactctccactccattatctccttcactttagcaggatccacagctaatcctccattagaaataatatgaccaacgaatggcacctcgtcaatccaaaactcgcacttgctgaacttagcgtagagttgattatctcgtaacttctgtagcaccaaccttagatgttgttcatgatcactttcattcttagaatagataagaatatcgtcgataaacaccacgacgaatctgccaaatactccataaacactctgttcatcaaattcatgaaataagctggtgcattggttagtccaaatgacataacagtaaactcatataatccatatcgagtcta

SEQ ID NO: 45640 - DNA, 397 bp, Zea mays
  unsure (1)..(397): unsure at all n locations
agcntctcctgtacaagcgccgcactcactgcagattgctaatttgtcacatataatagtaatggagcccctggcgcaagtggagttaatgctgttagatcaatcaagtattgcttcagctcttcgaatgctttgtattgagctgggccccattgaaaaacttcgatcgactntagtatttcaaagaatggcaagtttctttctgctgatctaaatatgaatctattcaatgatgccagtcttcatgccaaccggtgggcccccttctttgtgcttggcgactccatccgaaggatagcttctgatttgcttgggtagctacaatcctcttcgttgaaactagacagccaaggaacttacccttcttcactccaaagacacatttttctggatttaa

SEQ ID NO: 45641 - DNA, 344 bp, Zea mays
agtatgctacagtgtggatagcccggtcatattcattgctaaatgtccattatctagtgatagtgacaggggcgacgacaagaaggggagaagaaaggagaagaatatgtactacaagaaaaagtgtcgcgatgcccatgtttaccgggaatgggactccgacgagagctccaccgactcctccttcgacgaggatgctgcaaacatcgccgttaccaagggtcttctcttccccaacgtcggtcacaagtgcctcatggcaaaggacgacatatggaagaagggtaaatcaagattctccactaaatatgaaacctctagtgatgaggataattgtagtgatg

SEQ ID NO: 45642 - DNA, 423 bp, Zea mays
  unsure (1)..(423): unsure at all n locations
gcttgtacagagtccacttgaattgaccttcggagaaaccctttctcagtgccacatgttaccagagggtccgactcataaagcaatgtatgaattcaaaataattgcagagaatatcagtacaagggacctggtccaggaattcttggctttcaaggttttccctagtgtaaaagagtgggaaatgccgaagctggagggggaaaagaaaaaaggtgaacttgtacgtttgccttactancttaaatttaagaaatactttaaaactccttgccaagagtggctggatacgattgaagtgatgtgcaacgaaatacttggtaattattccaaataagaagatcaattgatgaccgcagccttcggcacccgtccaaaacgaaggctgaatcgagtgttggacgccttggngttcgaatactc

SEQ ID NO: 45643 - DNA, 377 bp, Zea mays
gaatgctgtggtaacttcacacctacccgtctgtttatatagtgccgcaggtgggaaggtaaatcatcaagtctttcgcactggacaaacagccgcccgcacccactaaacggtgggccacagagcccgataaggagaatcgctaggacgtgtgtaactgctgcatggcagggccacctcgcgctcggaatattttaatcgtttgtcggcaacgagcttatggaaggtgtttttcggatcttcggcattccgaagcctaagagactattttcacggatcaagctcgttatgaaaaacgatctagcaccgcgaaggggctactggtgggggtatgcttcgtagccgaagatcctgaggaaagaaataccttcggcaga

SEQ ID NO: 45644 - DNA, 236 bp, Zea mays
  unsure (1)..(236): unsure at all n locations
ccgcaggcatgcaancccctcgaaanactctccagagctataaagaattttatgttgttcttttaaagaagcgacacttctactcaatttatctcgtgccctagcacgaatttctctttttcaaaacattctgcgaagatcaatactgtattcacctcttggtccacatgcaatatgatgtatgatgcttatgttatccaacatgacgcgatgacgtcatgttatgcaaaatgata

SEQ ID NO: 45645 - DNA, 205 bp, Zea mays
agaacacgtgatacgttcgactaacgtgcaattattattattatatactcttgtgcaccttgtcaagcacgtgaacaagtatgatgagcgcatcacaataagaacgtgattaccaccttaagaaccctggagctgcttgatatggaccctctattgaactgttcgctatctgatcatatgaaggaataagtatggcttaactatt

SEQ ID NO: 45646 - DNA, 461 bp, Zea mays
  unsure (1)..(461): unsure at all n locations
tgcaagcttgggccagcagcaaagttcttttcggccgtcagcgccaaggggcagaggcgccaggggcttctgtggaaggtttggagaccagccaagaaaaatttactgcctattctgtggtgaagacaagggccataccaccaggatgtgccacgttaccatccagaaacagaaggagatagcagaagcagcagcgcaacaaagtcagccgaagcaggtcatgcatactacttcgtatcactcgccttatattccagaatacgtangcaaccactctgcagcttctgttgcttcggcgagccaaccccaagcatcttggcagcagccttcaccgccaccgccgacccagcgagggcagcagccagaagggagtcagcacaatcaccttcagagggatntcagagaggagtctgaagctcgcacagtcaatagcactgtgccagagtcgaagcacatttatt

SEQ ID NO: 45647 - DNA, 443 bp, Zea mays
  unsure (1)..(443): unsure at all n locations
aagcttctaagggagaacacgtgataggttngactaacgtgcaattctaataagatagaccttgtgcagcttgtcaagcaggtaaacaagtgggaggagcacatcaaagcaagaatatgatgaccacttcaagacctctggagctgctgcatatggacctctntggacccgtcgcctatctgagcataggaggaagtaagtatggtctagttattggtgatgacttttcccgcttcacttgggtgttctttttgcaggataagtctgaaacccaagggacccttcagcgcttcctaaggagagctcaaaattgagttgagctcaaggtgaagaagataagaagcgacaacgggtccgaattcaagaatcttcaagtggaggagttccttgaggaggangggatcaagcatgagttctccgctccctacacacctcaacaaaat

SEQ ID NO: 45648 - DNA, 419 bp, Zea mays
  unsure (1)..(419): unsure at all n locations
agcttgagtagtgtgtaagcctggacgacttgtctccttgtaacgtcgcatgcctccccttntataactgaagaggggcatgcacaaaggtgctgagccccgacatgtgggcccagggacataatggatatagcacttggagctacaaatgttcgctgctggagcaattttctcgcgctctgacatccgagatctgcttatcctcggcgtgcaggggaagcttcttgtataaaggatggtgagtacagtgcgctgcatggcacggatgcactgtttgacaacggattggacaagcgcgccgcctgcaggatgacccctgacgccatctgccagcggagtggacatgacacattaaatgctgagagggcacatcacctgtcaacatggtggcagacagcgcgttctctcgcaataataca

SEQ ID NO: 45649 - DNA, 371 bp, Zea mays
  unsure (1)..(371): unsure at all n locations
tnctacccagggttctatttgcaaagtgctataacaatacaacttgtctgttattttacctagcgnatgcactctaggtgtgtcaaacatatgaaatgccaatgtttatgatgctatgctcaagttttagttacagtaacaccaggggtgttacatccttccccccatataagaatctcgtcccgagattaacagtcctagggtaagtaatggaaaaggaaatgtgtcacattcttatatccttatttttggtacaaggcacgggtggttcgggaatcactcctttattacaacagctatacatgctttacaaattacaagaggctaataagcctgtgaaattcttatctaanaagtcttgagtttccatg

SEQ ID NO: 45650 - DNA, 288 bp, Zea mays
  unsure (1)..(288): unsure at all n locations
agctttgtctccatgttatgaacttattattgctcttcgctacttgntcaatctgaataaaatccctgaaaattcctattgcaccaaattctttccaaacaaatcctatggtttgatggttagtgggttagtacacgtccttattttttgccttcatatgattactttactactcccttcgttccaaattataagatgttttgcctattttagacacattcctttactatgtctttagacatcgacacatcgtgtatatctaattgcatagaanaagctatttagggg

SEQ ID NO: 45651 - DNA, 394 bp, Zea mays
tcgaacatgagagaatttacgtgatactagcaaacacaaatagaaactcgcgacgatggcattctatcttcgtaggctcttggatggctcgagaatagtggcaagcacaaattccgcatatggtcgatccttctaacggtcgcacagttaacatagttacaggattgagctcttatacaaccttgtgtaaaaatttattttaattactatgctgtgtacattgttgacatttcgccatgcaaacatgccatatacttcttctcttagccaaggtgtatttcactggctgtcgaccggcgccgggcctctcgctgccactcacccattcttggtttctcacacccttcggcccaacatctcggagcagcaagtatactctctcctagctggtttg

SEQ ID NO: 45652 - DNA, 331 bp, Zea mays
agcttgtgcatgaccagatcatcaaagcatataagtttctggatgagaagtggtcacccaagttttgtcgatgaagcaccagaagaccaatcaaggaaggaatccatgtgagagtttgcatgaggaaggtttgcatcttggcatctgttggggcgaaagcgaagacgctacccttcgctccagccttcgcttttctcgccgcgccaacggaagcagaataactggcgaggtccacccttcgccttgtacacaacgagacgaaggcctacgacgacgtcgccccgtcccacgtactcactccgccttgaggcccacgtgggattcggcccat

SEQ ID NO: 45653 - DNA, 452 bp, Zea mays
  unsure (1)..(452): unsure at all n locations
tcagcttcatctatgntatggattgcctttgagtctgtccagtttccttngacccttctggcagcttcctgacttccatgaatggcaataggtccttggtccaaaggtatcttcatgcaaagatatgctggatgaagaattgcttctaagccattgagagtaccacgaccaatgattgcattgtaagggtattccatgtcaacaatgtcgaacacaacttgttcagtccttgtgttgttaatgaatccgaaggttactggcattgtgatttttccaagtgctacaatatgccttcctccgaagccataaaggggatgtgtggcatcatggatcttgtcttccggctcttgcatctgtctgaaggccttagcanatatgatatcagctgtgcttgctgtantcaaccaaacattatggaccataaatcctttgatcacacangagataaccat

SEQ ID NO: 45654 - DNA, 256 bp, Zea mays
  unsure (1)..(256): unsure at all n locations
agcttcaacgacttaagcctgtgaagataaaaatatatatatatttttcttgtggcaaagaacgaaactattacatgaaatttgaaaaatgtcctttattacacagaanataaaactgaatgaaaaaggctgctatcaaggtaagatatttgtcaatagatgtgctttgactctggcacagtgctgttgactgtgcgagcttcggactgttctctgaagtccctttggtgtgggccatattggctcccttctggct

SEQ ID NO: 45655 - DNA, 382 bp, Zea mays
  unsure (1)..(382): unsure at all n locations
tgactctcggaatcaaacgaagctccagtttgaagcctactttttctgaagaaaaagcttctgaagaanaagtacttacttcccaaaaaattcagaattaaatggccagagtgcgttctaccgctagggttgagcgtgagggaggcgaagcttaaggatcggagactgttcccatctccgaagcgatgcaacgatccggactggtaacctcggaaggaattcgtaccgctgagacagagcatactgtcctcatcttcgaaattgctgccgacgcggaggaaggaaatattgaggaaactgattccaaagatgattatcatattgctatgccaagtaagcccagtcacttggacttcggaaagtaactgtctctaggctgatc

SEQ ID NO: 45656 - DNA, 217 bp, Zea mays
  unsure (1)..(217): unsure at all n locations
gagtcgcggtattgactccgcaatcaaggaggcgcggtantggcgtgagtggcggtgcagttgctcacacgtagcgaccggcgcaccggttgcatgacgcgtgggcctggacctccatgctggggcttgtggagtcgaagggcgcgcccacttggcacggntacatgccgcctgcatggccgtccgccctttcacccgctggtctgggcgaaagtgg

SEQ ID NO: 45657 - DNA, 411 bp, Zea mays
  unsure (1)..(411): unsure at all n locations
tagagtatgcattgattntcgcaatttanatagagcaacttctttatatgagtatcccatgcccatagccgacactgttgggggccttcggcttccgaaggtcctcaaaaacatgatttaacaatgtttctggagtatgatatatgaacaagtaccttcggacttaggtcataaccacaatatgaagaagcacaaagaatacgaaggatggcgcagagccgaagctatgcgcaggggagcttcggcgtgataacagaaaaggaaaccgacttaaaggggaaaaggctattcagacccagatggattactatagagttatcagcaaatgtaaagggcatgggtgtaattttacatgggctgcgtcccgtgcctataaatagatgaacagtgctcccgtactgttcatgctga

SEQ ID NO: 45658 - DNA, 351 bp, Zea mays
  unsure (1)..(351): unsure at all n locations
agaagaagaagcactacaagaaagccaagggcgaggcgcatctangcaaggagtgggattcggattgctcctcctccgactcctacaatgagggactcgccgccaccgccttcaacaaatcggccctcttcctcaacgagcgtcacacatgccttatggcaagggagaagaaggtatgtactcgcaactctatctatgcttcttcaagtgaggacgaatctagtgatgaggatgaagtagaatattcatgttgtcaaggttagatagatctagatagacaaattatgaataatgatgcctgatgaaaaataactttagaaagcagagatttgtgataagagctgataattg

SEQ ID NO: 45659 - DNA, 267 bp, Zea mays
  unsure (1)..(267): unsure at all n locations
tctaaagggagaacacattntgggactaacaaatgttctattttagaaagacaggatttgtagcgcatgtcaggcagggaagcaagttggtgttcatcatccacataagaacatcatgacgaccgacaggccactcgagctcctacacacggacctattcggcccgatagcttacataaacatctgcgggagtaagtactgtctaattattgtggatgattattctcgcttcacttgggtgttcttnttgcaggaaaaatctcatac

SEQ ID NO: 45660 - DNA, 462 bp, Zea mays
  unsure (1)..(462): unsure at all n locations
gcttgatgatgacccagctntgtggatagaaaatcttattagcttgtccaatgatagttctggagaacatgatggttgcatgctanggtacaggactacctaacactgagttgcgatggtccgttcatcttatttggagtaattattcatatattccaggatcaacttcattagtctttctttccttatttttgttaggtagtcttatgtttgcattccctctggcaaccagtatttgtgacaagcataagagaccaccaattgcagttgcttgttcttcgtatataaaattgtctgtgaaaggtttcaatatagttcaactaaccagattatgtatctntnttcacatttaaatgtgtccccgaaactaactngtattaactaattntgttgagaattacttgtgtgttggtgaaaatgttaatcaagaaacttgagatctcatgaaatcactatcacaag

SEQ ID NO: 45661 - DNA, 483 bp, Zea mays
tacttggtaagatgaccaatgcgccattcacgggtttaccggataggacgttttatttatcggaactcatacatatactgatgtgtgcggaccaatgagtactacagctaggggaggattccaatacttcataaccttcactgatgattttagtagatatgggtatgtctacttaatgaaacacaagtatgaatccttagaaaagttcaaagagtttcagaatgaagtagaaaatcagcgtggcaagaaatataaagcactgcgatcagatcgtggtggtgaatatttgagtcatgagtttagcaatcatctaaagagttgtggaattgttccacagcttacgccgcctgtaacgcctcagaggaatggcgtgtctgagcgacgtaatcggactctattggatatggttcgatcaatgatgagccagtcggacctacctttgtcgttttgtggatacgctctagaaacagcagctttcacact

SEQ ID NO: 45662 - DNA, 427 bp, Zea mays
  unsure (1)..(427): unsure at all n locations
gctttaccctgtagttgggactataagttggatacgttaggtgtactctatgcagtttgaccatttccagcatttgcataatgaggactctagggaaaagcctcgtagtgagaccctagccattcacctcggaagtgaatacgggtctagctaacctgtgctaaaagggaatcgtgactcatgggtaaagatgcgctacctctgcagagtgtaaaactaatatatcagtcgtgctcacgggtatgagcagcctggactcctcacttgataattgaacttgaagatggaaataaatcgagatccgatgatctgccaatggttggcttaagtggtttcacttaagtggttttgatatactcttatacctttgtttaatgggaatactanggattcacacttattagtaagacatgtgttgtaataaaat

SEQ ID NO: 45663 - DNA, 476 bp, Zea mays
ctcggacccaaccggacttcaccggaggcccgatatcgatctcaccggacttcggtcttccgccgccgcgcgtggaccaagccatccagtgagtctccgcccgattcctttcgctcatatcttctctggcatcccgtggacctccctgacctgtttgattgaactatctcgccgtgaccaggccggtctcctcgccgccgacgagcatccccgcctgcgcgcgtggaccgaccgactccggccatctacgacggcgttccgcacaccgttgtgatccccgcgacctccccttcatcctcgaccacttcaccggagcagtctcgccgccggtaagcccctccgcccttttcttcgccgcggctactgtttaaggtagaagaaggacctcgggttatgttctgtagaacccgagggggtttctgtaatgtcagcgactcatgtgaatagtaacctaaggactgattcgcgacgaaaac

SEQ ID NO: 45664 - DNA, 309 bp, Zea mays
gaggggctggccacggtggttgctcacgggcggcactagcgggtcgcggggaggtcgccggagctaatggctggctcgggtaagtcacgcgaggtaccgaggaggcaacggcgaatgcaaccaagcactggggcgggctttatatccgtggcgcgggcgtggtcacgggtggccgcgggcgtgcggcggttcgcgcacgggcgtgctctgagcgcgccctcggatgtcagctcgcgtcgaacacgtggaagctcgcttttgccatggttcaacggcggattaaagcgtcctagcgtgcgtattttggca

SEQ ID NO: 45665 - DNA, 417 bp, Zea mays
cttttgcgaatcacttgaagcgttagtactttatgtgaatgatattgttaagtgttagcaaatatgtgcaaaacataataacatgtgtaggttatgtgaatgattttgatgtggtgcttgttgatggtttatgtgatgtggatctatcattgtgcaatactaattaaatttgtatatctatgtgattatgtgtataaaaattggtgatttgtgatgctattatatatataacagttgttgaatgctaattaatggtatattatcattattaacgactataactaggggcaactttcttgtggttgctaaatgtatagtataacgactcacgaatggttgctaaatctatagtacaacaacccacagttggtcgctaatatataatatatctacgaacggtcggtcgctaaaaagatg

SEQ ID NO: 45666 - DNA, 470 bp, Zea mays
  unsure (1)..(470): unsure at all n locations
agcttgcttctgccatggttcaacggcggattagagcaccatatcgtgcgtatcttggcaaagtcgctgtgtacggtcgcttctctgctccatatcctacctttntattgtgagttccaagccaagatacggtcggtgtagggagatagagggggaagaagtttgctgtgtcagctaggtccgagccgagacaaaagtggtgtcaagtcgtgtctagcgccctagggtaggtgtcatctctttccagggtgttctagggttaatttggcgccactttgtcaattgggtcgaagggttttgaaatttggattaaggtgaacatgtggagtctttgnntcagggttagnttttatacttaggcaaaatctgaagtctcccttgagctgaaccttangtgatctttntagtgactttctgaaaacctttttggggtacttccttactattaattgacgttacgaagtatatta

SEQ ID NO: 45667 - DNA, 484 bp, Zea mays
  unsure (1)..(484): unsure at all n locations
cttggcttcatctatgttatggatagcctntgaatccgactgtcggtgactcatattaggggtaccctcaagacgcctaattctcagctggtaacctccatcagcataaagctgcaaaggcctgatgggtacgattaagtcagggatcagtccacacgagtgactcgatcacgctttacccgagcctagcctcggtcaagggcagccgacctcgagagactttcgtctctcccgaggcccccctttttaccgtggacacaataccggctcgcccgaggccttggcttctctcagaagcaaccctgactaaatcgccacaccgactgaccgagttgcatgagcatataacgcaaaggtggcctgacacctttattctgacacgcgcacctcctgcagagccgacgtgaccgccgtcactccaccgcttcactgaccagtctgacgaaggacagctgccgctgcgccactacgactgctggccact

SEQ ID NO: 45668 - DNA, 96 bp, Zea mays
tctactcttatttgatgcgacctaagaatgtaaccttaatctttacattagcaacctttcttataacatagagaacatctgaagcaaatgggcttg

SEQ ID NO: 45669 - DNA, 231 bp, Zea mays
aaccatttagactacacagccatttgtgattatttgtattgtagcgcatgtcaagcacggaaacaagttggagctcatcattcacacaagaacatcatgacgaccaacaggccggttgagctacttcacatggatctattcggctcgatagcttacataagcatcagcgggagcaagttttgtcatgcaattgtcgaagagtattctcacttcacttgggtattcttttac

SEQ ID NO: 45670 - DNA, 352 bp, Zea mays
gatgtgttcgccgaacaacatggatcatgcaccgctggtacgtcaccgcccgcattcctcaagccgaacgacatggtgacataacagtacatgccgaacggcgtgatgatagaagtcgcgagctggacagactctttcatcctgatctgatgataccctgagtacgcatcgaagaaagacaaggtttcgcacccagcggtggaatccacgatttgatcgatgcgaagcagaaggtagggaaccttccgacatgctttgttgagacctgtgtagtctacacacatccgccatatccaccctttatttctcacaagcacagggttggcaaccaatccggatggaatacctcttt

SEQ ID NO: 45671 - DNA, 217 bp, Zea mays
agacctgacccacacgaggacgacaataagctgaagccgggccgtaccatggagcgcgtcttctaaaaatgcaggcaacgttactagtcgccaggtacgatggcaaacaaggctcctgtaggacgaacaagctgcaggtagatcgacctacaccacgcctatgttggaccgcgggtggacaacgggtcgactgagacgggctggactcgggagcgct

SEQ ID NO: 45672 - DNA, 407 bp, Zea mays
  unsure (1)..(407): unsure at all n locations
agcttctccgagggcaagacggngttggggatggctctgttgttcggtctatggnggcagaggggttgggcggccgcggactctctgcgcacgggcaaacggcgacgagctaactccggtgaggtgtggagggtgcgcggaagggtgtattcgaagcctgtgagggctttataagctcgagcgcgggccacggcgcgggtttggctcgggcgcggcgcggggcatgcggngacgcgcgcgagcgtgctctggcgcgggcagaaggcatcgaacacgtggaggtgagtttcttccagtgttcaaacgtctccagagatcgcaaacgtgcgaatctcgccatgaatccggcgcagacctcctcctggcacctagggctatctcacatgtgtgagttccaagggatgata

SEQ ID NO: 45673 - DNA, 468 bp, Zea mays
tggagactgtcagttcgacctctaaaagcagtcttacgtggtctcatgcgcctctgtgtacgacaagctcccgcgaagccgccgcttggacgcggtccatagcagctgcaccgcgctgtccatcgttaagcaggggggcctcatggttgtcggcttgtcgccaacgtcgatgactctcgggttgttctggacaccgcatccgacgacgatgccatcacgccgtcttcacctgaagttcaacctgccacgtaagtcgctactgaccggacatgaattcttgtgcgctgggacgatggacgttgctgacgttgtgtgagtgtcctcgaacatgatgtatgtagtggaatagcgcattcggtggtgcaacggtcagtggtactacctcgctgatgagcccggggtgcacttcgtttggcagccaaccaaaatcatcggtactcgtcatgtcgctgcgtgcgacgactacta

SEQ ID NO: 45674 - DNA, 408 bp, Zea mays
  unsure (1)..(408): unsure at all n locations
gcttgaccgtgacgaaggatgctgtctctccgtatctgtatgaaaggaagcttcngctaaatcacagaaaggggaaccgacttaaaaggaaaaaggttgttcactcctcatagattnttctataagtcaatagtaaatgtaaagggcataattgtaatttctcataggctgtatcctgtgcctataaatagatgaacaatacccccatactgttcacgctatcctgtaatcgctcgcgtgccacacttggatttttgccttctgtcaagccgaaggtataaatgtaattaaatattatattntatatacaagtttatatgatgaataaatatgaataacattatgngtctgttcatataatcttttatggttcatatatntcatctttcattattttataaccatgat

SEQ ID NO: 45675 - DNA, 207 bp, Zea mays
tatcaatttctgacattgtggctgcgagatcttcagcttcggctctcatcaacatcttcagtatccacaggaattgttgctctcaccggagaagctgaaggcagcgtttgctcaatagcttgcattacgttcacaatccgtcgtttcttttgccctccaaccttctccttcgcagccgaacactacaggaaatcaattaattcccgt

SEQ ID NO: 45676 - DNA, 355 bp, Zea mays
  unsure (1)..(355): unsure at all n locations
agcttgtgaaggttcttcatccccacatgtgctatgcggtgatgccacagccagcccatgctagtcttagcaattaagcatgcatctagaccggtctcctcttttgcaaaatcaactaaataaaggttgtcgtctaatacacccttaaaagttaatgaaccatcacttcttctaaagacagacacatctatanttgtaaatagacaattatattccatattacataattgactaacagatagtaaattatattcaagagactcaactaaaaacacattagagatagagtgctcatttgatattgcaatcttgcctaaacctttcaccttgccttggttcccatcactgaatatga

SEQ ID NO: 45677 - DNA, 436 bp, Zea mays
tggtcattttattgctaactgtcccgacaatgatagtgatcatgtatcaaggaacaagagggagaaaaagaagaactataagaaggcaaagggcgaggctcatcttgtgcaggagtgggattctgactgctcttcttccgactccgacaatgaaggactcgccgccactgccttcaacaagtcatccctcttccccaacgagcgacacacttgcctcatggcaagggagaagaaagtaagcactcataatactagtacttgtgcttcttcaagtgaggatgagtccagtgatgatgatgaaatacattactcatgcttattcaacggattagatagaaccaacgtagacaaaattaatgaattgattgatgccttgaatgataggaatatacctttagaaaagcaagaggatttgttgatgaaaacatgataattt

SEQ ID NO: 45678 - DNA, 396 bp, Zea mays
  unsure (1)..(396): unsure at all n locations
agctngntcattatttcttgggtttctgggttcctgtttctacaacttcatttatctggtatgtagctaggctagctagttatttttaccctaatctacctggaaactagttggtaactttttgctttggtgaggctcttccctgcagtgcagttgcttggtgtggaaaactgaatgcaattgcttgcgcttcagagacttgtgcacgtattccaaggttatatttccttcacctttctcagataggttttgtttcttgattgccttgcacatgtgtcatgtaaaatgtttaaactatgagggctgtcttagttaagggagcttgtggtaggaaaacactgtttctttacttgagcagaaatattanggcaatagtcctactggtaaaatataact

SEQ ID NO: 45679 - DNA, 321 bp, Zea mays
ttctcatcgcattctcaagcaaagcgatcatttgatttagcttttgtttaagaaggagcttcgtcaaaactggtaaaatcatcaacattcgtaagaacagcaagagattcaacacctgatggccagagtacgttcaactgctatagtgacccgtgacggagaggaggccgaagccgccgaaacaaccccgatttccgaagttatgaagcaatctagattggttgtgacagaggggactgttgacgaagatgtacatactgctgaggctgaagaagctgatattgaggaagaaaatactaatgaagaggaagactacaacac

SEQ ID NO: 45680 - DNA, 248 bp, Zea mays
  unsure (1)..(248): unsure at all n locations
aaagacataaatttcaggtntttttccttccttttcttgngngaacaagatctacacttcctaacttttttcccttctctttttggaatggttttcattttcttttttcttggtgcaaaaaaaagtagatgatgcaaccagctgggtgtgagtgtgacgccccatcaccttgtcttatcagcccattgtcngatgctagcangtcccgacagttcatatttgcatacagggcatgtcttgtgtttttt

SEQ ID NO: 45681 - DNA, 357 bp, Zea mays
  unsure (1)..(357): unsure at all n locations
tctaagggagaacacgtgataggttngactaacgtacaattcttaaaagatagaccttgtgcagcttgtcaggcaggtaaacaggtgggaggagcgcatcacagcaagaatgtgatgaccacatcaagacccctcgagctgctacatatggacctcttcggacccgtcgcctatctaagcataggaggaagtaagtatggtttagttattgttgatgactattcccgctacactngggtgttctttntgcaggataagtctgaaacccaagggaccctcaagcgcttcctcaggagagctcanaatgagtttgagctcaaggtgaagaagataatgagcgacaacgggtccgagttc

SEQ ID NO: 45682 - DNA, 326 bp, Zea mays
  unsure (1)..(326): unsure at all n locations
cttagtgcaagcgtgtggtatggaaagacaacgtatcttangtgnatgtatggcttgagtgaagggcaaggtggaacggagggaaaacaggatgaggcgcgcggcgacaggcgtgaaggctgttccgtcttgcgtctgggctgaaaacgaggtgttcgtcatggcgcacgggccgaaaaccgatgctcgggcacgaactcgaaaataagctaagttcaagcatgtggaaagacaccgaacatacagtgtatgtctttggtgaagggcacagtggaacggagggaaaacgacacggaggcacgcggcgacgggcggcatggctgttc

SEQ ID NO: 45683 - DNA, 389 bp, Zea mays
tattttctgggtcgtgcccgggcctcagttttctgtctctgcgtcatgggcgaacccctcattttcggcccagacgcaaggtcgaacagccatgctcgccatcgtcttgcgcctccgtgctgttatccctccgttctcgcatgcccttcacccaagacatacatattaccttcggtgtctttccacacgcttggacttagcttattatcggggccatgcccgaacctctgttttccgcccctgcgccatgggcgaacccctcgttttcggtccaaacgcaaggccgaacagccatgccgccccgtcgtcatcctgcccttcacccaaggcatacgtcgcagcttttgtgtccttgcacacgcttggacattggttttttttggtcggca

SEQ ID NO: 45684 - DNA, 477 bp, Zea mays
  unsure (1)..(477): unsure at all n locations
gcttcccaacaatccaacacacagnggagtatgttattacgctctggttttccgaaccactctaaatcctcgcgtgttcatgtgcttgactatcgcttagctaaacaggcaaaatgcttaagccccctcctcatcttaagacttaaggcgggtgcactctgccacccggctggagaattccctcccaacatttggcgcgccaggtagggggcctaggctngaagtttttgcttgttttctcgctcagcatgatggtgcanatcgttgagtaccgcgccgagacttcggtggatttcgtggtggaggaagaagctgcttcttccacgccacaggttcccaaccgccctgtgccgggcactgccgttgtgcacgctgtatgacagcatacagctgcacaaacatcccggacttcgttagaatggccccggagcattgcagcaacaagagagttgtacgtacccttcagctcacggctcc

SEQ ID NO: 45685 - DNA, 279 bp, Zea mays
gatcactcgcgtgtgtcttgtattgaatgcctatctcttgtaagtggttggaaggttgaatacttggatgtcttgaatgtcaggtggttgggggtatttataaccccaaccaccaaactagtcgtttggtggaggctgctgtcgcatggcgcaccggacagtccggtgagccaccggacagtgttcggtgcgccagccactgtaacaggcctgtgggtttcgaccgttggagcactgactgctgggcctcgctggatgtccggtggcacaccaaacatg

SEQ ID NO: 45686 - DNA, 483 bp, Zea mays
  unsure (1)..(483): unsure at all n locations
agcttatgaagattcttcatcccaacatgggctagtctgcggtgccagagccaacccatgttagtcttagcaatcaagcaagtgtcgagttcagctctatcaaaatccaccaagtatagctgaccctctaacactcccttgaatgctattgaatcatcacttcttctaaagacagtaacacctacatcagtaaatagacagttgtagcccatttggcttaattgagatacgaaaagcaaattgtaatctaaagaatcaacaagaaaaacattggaaatggagtggtcaggtgaaatggcaattttacccaaaccttngaccaaaccttgatttccatccncgaatgtaatcgctctttggggatcttggtttttctcatatgaggagaacatcttcttctcccctgtcatgtggtttgtgcacccgctgtcgagtatccaacttgagccctcggatgcataaacctacaaaaacaatttagtt

SEQ ID NO: 45687 - DNA, 507 bp, Zea mays
  unsure (1)..(507): unsure at all n locations
tcttnccttcgctggtggaaatcattatcagcctagatgtacttatccatcttctgaagaagcttctccagggtctgagggggcttactggcaaagtattgagccgtaggtcctggtcgaagccctatgatcatggcctcaatgacaatttcattgggcactgtgggcgcttgtgctctcagacgcaagaaccttcggacatacgcctggaggtattcttcgtggtcttacgtgcactggaacaaagcttgagcagtgaccggcttcgtctagaacccttggaaactggtgatcagcatgtcctacagtttctgccatgatgtgattgttcctggccggagagaggagtaccaggttcgtgcgacattcttgactgccatgacgaaggaattcgccatgactgcagcgttgcccccatatgaagatatggttgcttcgtagctcatcagacactggctcagatctgagttcccatcatacaatgggaagctgggtggcttgtatgat

SEQ ID NO: 45688 - DNA, 423 bp, Zea mays
  unsure (1)..(423): unsure at all n locations
agcttacccatgacgaggtatgtggctagataaaatgtcctatatcattatgccaacaatcggtacgggccttaaacgactcagacggagacactacaccgagactctcttctcgtgcaagtcacccgcccggtctcagctttataatttaaacccaaagtttggtacctggcagaggtacatcttttccgatgttgaacccatcacggccatgatggatccaacatcaagttttatttttgaaaactttccacccactgaagcatcacttttgttttaaaacaaaacatttttgtttggtaaagcaaggctaagcatcataaaattctttttcataacaggtatcaaggaacagtaatcaactttcaaggaaggaaatgcatcaattgtntaacacacaacttctatcacctaatgcattat

SEQ ID NO: 45689 - DNA, 288 bp, Zea mays
  unsure (1)..(288): unsure at all n locations
ttcgcatgctggggattggatatgattggacctttcaagaaggctcaaggaggatacactcatgtactggttgctatcgataaattcactaaaaggatagagttcaaacccattgcttctctaaccttagctaaggcagtggaattcatacaagacataatatccaggtttggaataccgaatagcatcataaccgacctgngatccaatttcacaagctcagagttcttcgatttctgcgagcaaaagagcattcagatcaaatatgcctcggttgcacacccaaga

SEQ ID NO: 45690 - DNA, 404 bp, Zea mays
tcggcctgcggagatcgaacgatgaaatgaatgaagctgccgaataatgccacatagccttcggagttatttgttcttttattggaacgagagaattggtccaagagcatattgccttcagagtatggccgctcgcggaaaaatgggaaatgccgcaagagaccataaaggaggctgacgaaggtggacttatcaggctgaagtatactttcaagtttggagataaattcgttgagccagatgatgactggctaaaaagcattgaaaatttaagtgatgaactacttggggcttattcgaaggccgaagatactgcattgtcagcagccttcggaggccggaaaaagaaaagactgaaccgagtgtttgacgcaatcgggttcgtctaccctgacctatcgtat

SEQ ID NO: 45691 - DNA, 395 bp, Zea mays
agcttcctatacaatcttttattgattcctggtttctatttccgctctctcttcacggatagcatacgagcaatctgaagataataatgtgattgaacagagaattcttaatacatggttaactggaaaggaaaagtgggaagtgcaaaatcaacattaacttgacaaattcctttgatcagaccatgtttgacgaacaaacggtttgatctatctgcagtgaattgtttgttctagttctaggcatgcatatgtctagtccagttaacagaaagtgacaagtcactttaaacaaagatagcgataatgtgattcctaatcatttcgttggaagacatttgtttctatgcgctgcatgtctctctcatatgctgtgaacaatatccgtatcattc

SEQ ID NO: 45692 - DNA, 374 bp, Zea mays
taaaccacgtacacagtatctcaacaagctcaaccacttgttcctgtatgacattgatcaggtcaacactgatctgaacaacagaaattgctatatgatgggcctcaatgaccggctgcagtggaagatggtcacctgccttgacctctcctatagcagggctcgcagcacgacgctggcacgtgaagccaaatatgcatgcccaggaaagtcaaagggctattgaggtgatatgtccaaccaatggcctgagaagcgacaaaggatggcgatctgaccttttaatcacagtccgtcctcaccacgtccacccccctacccctttaaacaacctgtcattattcgccctgccactggccccactataacaaatc

SEQ ID NO: 45693 - DNA, 392 bp, Zea mays
gtgatgaagatctagatgattataatgttccttgaatgctatgaatggttcttattgtacttgctccgtaatgttttgtgaccttgcgaacttgagattgtggacttgtggctatgtgaactctatgatgaacttgttatatcgtgtacttgtggtctttgtgatcaacttatcatattgtgaacttgtgatctatgttatcaatttgtaatattgggaacttgtgatatttgtgatcaaactgttatattgttaacttgtggtctttgtgatcaactctttatattgtgaattgtgaactcgtggtctttgtgatattcgtaaactctgttgtattgtgaacgtgttatattgacatattatcatattgatatgggtaccgattgtattta

SEQ ID NO: 45694 - DNA, 361 bp, Zea mays
  unsure (1)..(361): unsure at all n locations
tcggcgacgggttaaaatattggcagcaaaacagtgcttattgcaatgaatgctgtggtaacttcacacctactcgtctgcttatatagtgctgcaggtaagaaggcgaagcgccaggatttttacaccatgcggacacccgctcgcactcgctgcgtggtggaccgcagagaccgaacagtaactctgaaaggtggggccgctacacgctgagaaattgaatcgtttctcgacaacgagctcagggaaggtgttatttagaccttcggcgctccgaagcttaagagactnttttcacggatcaagctcgttacgaaaaacgatctagcaccgcgaaaggggctactgttgggcctatgct

SEQ ID NO: 45695 - DNA, 377 bp, Zea mays
  unsure (1)..(377): unsure at all n locations
agcttcgcatctctgaactaactcggctgcatcgttcttcaccgncggccaatagaatcctgacctganaaccttcccgactagtgttctggatgctgcatgtatcccacattgccctgcatggacttcctccagaagttgtttcccagtggacgggagaacgcacttcatgaggatgcctgacgcgccccttctgtacaattcctccctaatgagtgtatagtgagccgactgcctggcaatgcgctctgccgagttcttgtcgtctggttcttcttcattctttatatacttaataatcggtcttctccagtcgttagaatctgactcgagttgatctatgatgttgcacttcttctgttgatccattgagatac

SEQ ID NO: 45696 - DNA, 481 bp, Zea mays
tcttctggacaagcgccgcacttactgcagagtgcgaagctgttatatacagcagcagaggagcccctgacgctggtggagttagggttgttaagtctatcaaatactgcttcagctcttcgaagactttttgctaagctgatccccattgaaaaacttctgctgactttagcacttcaaagaatggtaaatttctctctgctgatctggatataaatcgattcaaagatgccagtctacctgttaaccgttgagcccctatttttgtgcttggcggctccatccgaaggatagcttcgattttatttggattagcttcgatcccttttgttgaaaccaaacaaccaaggaaatttcccttctttactccgaagacacatttttctgggttcagcttcagaccagcttgactaaaaatagcgaatgtctcctgcagatcaagcatatgggtttcttggttcatgctctttactatgaaatc

SEQ ID NO: 45697 - DNA, 419 bp, Zea mays
agcttgacgtcgtcgatggcagcgtccaccctctgtcgccaggcttccagctcggtagccgaagtcttcaacgcccccaagcgttcccccttggtgatcgccatcttcgagaaccgctgctcccacttggcgtccagcgccgaaatcttctttctccatctcatccaagatgggcttggtgctgtcgtccatgaaggcgtggcggcgtttggatcgagtgaagtagccgtgacaaggaggaacaagctccagatcggccaaggatcgaacgaatccgataccaaattgttaacaaaattgacgtagagaaactctgataggagaaggtgaaggtggtttgagttgaagaattcgatgaatacagtttgtatgtcttttttttgataccctgactcccaactgatgctttaacccctgtt

SEQ ID NO: 45698 - DNA, 392 bp, Zea mays
  unsure (1)..(392): unsure at all n locations
cacattntcaccatttctgaagagaagatgtctcaagattattaaattgctgctgagacgatgctgagcgaagaggagaagctccttgaggagaagactgctgganttattgaatctatagcaaagacaaataccgaaaagattactaaggagattctagaacgcttatctgaagatactgatgacagtgacagttatgatgcggaaagtgggggcgaagactccgaagatcggccctggcgaccaagtcatgcagttttcggaaaatcaactatttaacagagtcatcttgataatatgagaggaagggtatttcgagatatgtctattgtgagggctgatatcggagacaggactgttcctgttctcgaagaaaatgaagtcgtgatcta

SEQ ID NO: 45699 - DNA, 325 bp, Zea mays
agcttgaacacgggacccgcgtcaccggaatagttcaatcgtgctcaccggagttcaagaacccgctggcgcacgtggaccgggtaagcctctgcaccgatttccaattcgttgcgcgcatggcctctacatcaccccgtggagctcctcgtgcaccttaattgaactataccgccgtggtttggccggaacaggagccgccgacgacccccgccgcctgtgctcgtggtcagggtagcttcgaccacctccgacgctgacccgcacaccgacgtgaccgtcgtgacctcccggacgtcactgaccaccccgccggagctctact

SEQ ID NO: 45700 - DNA, 191 bp, Zea mays
gtctgctcagtctgggtgcaccggactgtcctgtggtgcaccggaccgtgttcgttgcgccaggcttgctctggtgaaaaggttgccctctggaaatccgccgcggcgtaccggttaaattcaccggactgttcagtgagccaaccgtctggcgggccaacggtcggacgcgcaattcgcgcgtgacgcgt

SEQ ID NO: 45701 - DNA, 384 bp, Zea mays
  unsure (1)..(384): unsure at all n locations
ttatcaaatggacgtgaaaagtgccttcctcaacggaccaatcaatgaagaggtctatgttgagcaacctcccggctttgaagatagtgagtaccctaaccatgtgtataaactctctaaggcgctntatgggctcaagcaagccccaagagcatggtatgaatgccttagagatttccttattgcaaatggattcaaagtcggaaaagccgatcctacactctntaccaaaacacttgaaaatgatttgtttgtatgccaaatntatgttgatgatatcatatttgggtctactaacgaatctacatgtgaagagtttagtaggatcatgacacacgaaattgagatgtctatgatggcggagttgaagtacttcttatgatt

SEQ ID NO: 45702 - DNA, 388 bp, Zea mays
  unsure (1)..(388): unsure at all n locations
accggacttaacacgagctcactgggatatgtttagtatatcagtaaataaatgcagatgaaaactttgggtagtcaaaactgttgactttggggggacagatagattatgccattcatcatgactctatgggttgggtatagctcttatgctcatggttgggttgatctagtgtgctaagttaagttaacacctggctagaagggtccaagtatcactaatctgtttaagcagaccacattggattagatcacactagattccataatcctatttaaaaataccatttagttgagcacatccggctgactttatctntatgaaaatatatatattatntttnttatctcagtggaacttccaaatagtatatatttttatacaccta

SEQ ID NO: 45703 - DNA, 402 bp, Zea mays
  unsure (1)..(402): unsure at all n locations
taaagggaaaagaaagagggggaacttgttcggctaccctattattataagtttaagaaatattntaaagcaccctgccaagaatggctcgatacaattgaaataatgagtaatgaaattcttggaaattactccaaaaaagaggaccagctgatgacagcagccttcggcactcggccgaagcgaaggctgaacagggtgcttgacgctataggatttgaatatgttgattatggtcgactgggtggggatgctggaggcccgaagcgaaaaagaattgccagcgctactgacaaagaggtcggcaaggtagccaaaaagaaaaagaaagatttctgaaaacttagccctgaagagtaaaccctgagccaaaggtggtactancagaaagagaaaagtgca

SEQ ID NO: 45704 - DNA, 207 bp, Zea mays
atatttctgcctttatatcaaaaggttttttacgcatgtgtctagccgagtctagtgctttaggaggtccctaatttgactcgatagcagagcgaacgatacaattaagattctcagcgcatgtacatttctaaaggagccactgtacatgtgtttgtgtggatgtataatacgagatgacttgaggcactctcatgtatatggtgt

SEQ ID NO: 45705 - DNA, 444 bp, Zea mays
  unsure (1)..(444): unsure at all n locations
ctcagcttctttagttgctgccaanatgagaggtgaactgcgttcctttatctgacactatcttcttcggcacaccatgaaggcagactatccgtgacatgtataactcagctaacgttgctccggtgtatgtcgtcttcacaggtatgaaatgggccacctttgttaagcggtccacaatcacccagatggaatcgtatccggcccgggtacgaggtatgccagctataaaatccatcccgatctcatcccactttcattgaggaatctgcaacggctgcaacaatccggcgggtctctgatgctctgctatggttctttgacagctatcacagatggcgacatattctgcgatctctctnttcatgccataccaccataacctcctttttaaatcctggtacatcttctcacttccagggtgtatggagtaggctgtctcat

SEQ ID NO: 45706 - DNA, 474 bp, Zea mays
  unsure (1)..(474): unsure at all n locations
gcttctaaatgtgtcgaggcgacaaatgatgatgtttaattgtgttttatgaaggtcgcagctaagcaacttcgtcggttgcccatcattcctcggctttcaaggttgttcctcaacaaggaaataactctgcatatgacgtggccaaagaatggtgtatgtctcgtcactgatccagacataatggtccatccgtcggacggtgatgcgtggaaggcatttgacgactntgatcccgaatatgaaacgaccctaggagtgtacggcttggtctatcgacggacggattcacacctttcaatacactacaactttctatgccttctgtgacattaacattatgtcacanacaatggaatttttgcataccttaaatgttggtgacgtcatcgtgacgaaaagtacattgtcacagaaggtgcgtgttaaatggagtactatgacgaataacaaaaagatgcataacagtttatg

SEQ ID NO: 45707 - DNA, 426 bp, Zea mays
  unsure (1)..(426): unsure at all n locations
ggagaacacgtgatatgtctgactaacgtgcaattttattaatatgaccttgtgcagcttgtcacgcaggtaaacaagtgggaggagcacataacaacaagaatgtgatgaccacatcaagacccctgtagctgctacatatggacctcttcggacccgtcgtctatctaagcataggaggaagtaagtatggtctagttattgttgatgactattcccgcttcacttgggtattcattntgcaggataagtctgatacccaagggaccctcaagcgcttcctaaggagagctcataatgagnttgagctcaaagtgaagaagataagaagcgacaacgggtccgaattcaagaaccttcaagtggaggagtntcttgaggaggaatggatcaagcactagttctacgctccctacacaccacaac

SEQ ID NO: 45708 - DNA, 439 bp, Zea mays
gcagcttgattaattatagttggccacagctttattattaaagaataatcagtggattattcgactagggttagaaaaatttggagaagtttatacctacctactgacctgtttaaaaatgttaaacctctctgtccactccattaagtttgtttttaccccttattttataatatgcttaagggtaagaaaaatagaagaggtgaattaaatactgaaccagagggcacccctatttttgtaagatacttatccaatgtagttcactagaaaaatctaccctcccctggtttagtataaaataagtaggataccttttatttgaataaaacaaggataacttagaaaaaccctacaataataaccccaaggtgaaaacacccccacccttgagatagttaatgttttgttattaagaacttatgaaaaatatgaaatc

SEQ ID NO: 45709 - DNA, 442 bp, Zea mays
  unsure (1)..(442): unsure at all n locations
tttacgagtgatcaaagcaggaggagacagtaagaaatctgtctttcccaaattatctgcaagctggacctgggatctttgggctgattacctcaaaatcaacccaaagatcggtggcttgtgggggacagatatcctccgggtccacttgaagagtaaaagacctcacgaaaggcccaagggcccaataaatcgtaaggtcattctttcgtgtgcctggggagggacaatcagcaaagcaggatgacacgaggctggattggtgcaagcccggacggcccacaacgttgagcgagcgaccacaacagagatccgactttcccgcgctggagccctcatgcaacggagccatgcgaggataggtcggcggaactatagggagataaactcaaacagttcactatcttntagttacacattgttatcatatccacgtgtattg

SEQ ID NO: 45710 - DNA, 399 bp, Zea mays
  unsure (1)..(399): unsure at all n locations
actgcagctgcagctgggcnanggaactcatggccgttcggcttctccttgaacaagcactcatgacagtttcaccaaatttggaataattcgatctcaagaacggccaaaattggagcctattaaagccttatttgacattaagagaatgcaaactcgacaatcgttctcgatctataaatctcgtctaaagctcatttaatcaactctcggtagaagctagtcgatctgtgtccgagtctgtgtacttgtcacacctacaagggaaatgtgcctttgcgccattactataatgttctggtgattaagtgcccaacacataatctttaagccctaatgtggcaaagatggaaaagtacaaatcaagacatgacggatgttccaacacttagtacattt

SEQ ID NO: 45711 - DNA, 456 bp, Zea mays
  unsure (1)..(456): unsure at all n locations
tgaactgacctgcagagggctggccacggcgaggtgttcacgatggctcgtaaacccgatatggnggaagaaaggaataggggcgctacggtggctaatcggaggtgagggcgggtgcactgggcgcataacaagcttctactttctctggccgccagcgcacctcctccaaattggacgccaccgttgttggcttctataaatggaatgatcgaccgggtgagctattacggctggtaacgacgtgttgaaagggtcacgacgtggcgcaatcgcggtgaatggtgtacattccggcgatgaccgctcgaccacgtcgccggcaagtgaatgggcgacagagcggccacagtgctccgagttcatccacgacgagatcttttcaccaggggtcgttatccgcgcgttactgggcgcgaatcgcagcgccagcgcgaatacaagcgcgtgggtcac

SEQ ID NO: 45712 - DNA, 133 bp, Zea mays
gaacacagacacaaaacacacgatgaacgcccgggggcacaaaaacgcaaaaaagacgcgaccggaaaagggaaaccctgcctgcccagcaaacaagtaccgcagcggcccacacaacgggccaaaaccgacc

SEQ ID NO: 45713 - DNA, 444 bp, Zea mays
atccttaagtcacctgcggcatgcagcttgctctagactccccagagatcccattttttcatatagtcatgtcatcttctattacaatggattttccaaattcaagatgactaggctttgccgagttcagaatgttgatatcctcttcgctgtcattatcactctcaccctcaaccacagtttgtacagcttctgcattgggagcaccttcgttagaagcttcccctagcacaactaggcctgatcgcttcattacttctgatatggtgtcacacccggttttagaaggcataccgaatgcgaaccatgtacgtgccaggatcagcaattcacgtacacaacagttacaaaactggacatcatcacacagtgctcaaataatgacataaaagagggcataatagtcgattacatcatgatgtccgagacatccacatagtcttt

SEQ ID NO: 45714 - DNA, 394 bp, Zea mays
  unsure (1)..(394): unsure at all n locations
acatgtgcttagcggctatgccactgccagcccatgctagtcttagcaattaagcatgcatctagaccggcctcctctattgcaaaatcaactaaatacaggntgtcgtctaatacacccttaaaagctaatgaaccatcacttgttctaaagacagacacatctacatttgtgaatagacaattatatcccatattgcataattgactaacaaataacaagttatatccaagagactcaactaaaaacacattagatatagagtgctcggatgaaatagcaattttacctaacccttntaccttgccttgattcccatcaccgaatattattgaatcttgtgaatctcttgttttgacatacgaggtgaacatcttcttttcacccgtcatat

SEQ ID NO: 45715 - DNA, 419 bp, Zea mays
  unsure (1)..(419): unsure at all n locations
ttattgctactgtcccgacaatgatagtgttcattttcatggaacacgagggagaagaagaagaattattagaaggctaagggccgaggctcatcttggcaaggagtgggattcggactgctcctcgtccgactccgacaatgaaggaaccgccgtcaccgccttcaacaagtcattcctctttcccaacgagcgtcacacatgccttatgggcagggagaagaaagtatgtgctctagactctacttatgcttcttcaagtgacgacgaatctagtgatgaagatgaaatagattattcatgtctatttaaaggcctagatagaaataaaaatgataaaatcaatgaattgattgatgtcctgaatgaaaaggataggcttttagacnagcaagaggatttgttgtatgatgaacatg

SEQ ID NO: 45716 - DNA, 341 bp, Zea mays
  unsure (1)..(341): unsure at all n locations
cttggtgagttttctctttgcatcngaagaaataattgatcatcctcatcatctaattcctcatcttcagaagcacaatattcttcattgtcttcctcatactcagcagcaaacttgttcctcatcaccttaagaaacacaatttcatagcatattccaagaaatctacaaaattacgataatccacatgaatgaaaatattgaataccttatgttgaaacgaacgatagccctgatgtgacgggggctcttcacttgcccggcactggtgagctctttgctcaatttgagtcttgtactcacgtacacgcttgtcctaaagcaggccttctcacttttga

SEQ ID NO: 45717 - DNA, 329 bp, Zea mays
  unsure (1)..(329): unsure at all n locations
actagcttgagaaactangacgcggagaccggccttttcttctacaggacgcacaatctggaaaaataactgcgacacgctaagctgcacacccaaaccgaggctgtctttactgcggagaaccgagagcacctacagggggggcgaatacgtgaacctgtcaaaactcaaacctatagccacaaaacttagattacagcgtagcacaataaatgccaagaggctagagagagagccaaacacgataaccacatgaaagcaacaccgagttgacccgggggactccgtggtccggcagacaaaactgcctatacacgttgggcgcccac

SEQ ID NO: 45718 - DNA, 370 bp, Zea mays
  unsure (1)..(370): unsure at all n locations
agcttgtgaaggttcttcatccncacatgtgcttaacggcgatgccacaaccaacccatgctagtcttagcaattaagcatgcatctagaccggcctcctcttatgcaaaatcaactaaataaagattgccgtctagtacacccttaaaagctaatgaaccatcacttcttctaaagacagacacatctacatttgtgaataaacagttatatcccatattacaaagttgactcacagacaacaagttatattctagcgacttcactaagaacacattagaaatagagtgctcggatgaaatagcaattntttctaaccctttcaccttggcttggttcccatcaccgaatatgattgaatcttggggat

SEQ ID NO: 45719 - DNA, 288 bp, Zea mays
  unsure (1)..(288): unsure at all n locations
tcttagggagaacacattntatgagtaacacacgttcattattataaagactggatttgtagcgcatgccacgcatgaaagcaagttggagcccatcatccacacaagaacatcatgacgaccgatatgccgcttgagctactccacatggatctatatggcccgattgcttacataaacatcggcgggagtaagtattgtcttggtatagtggatgaatattctcgcttcacttgggtattctttttacacgaagaatctcagaacccagagacctttaagggattc

SEQ ID NO: 45720 - DNA, 424 bp, Zea mays
tatatgagaactcagcataaggtagacttttatcccaacttcctccatgctgaagtgcacaagctctcaacatatcctccaaaacttgattggtcctttcagtctgtccatcagtctgagggtgataagccgtactgaaattcaactccgtactcatgttctcatgaaagcttctccaaaatcgtgaggtaaactgcgagcctcgatcagacacgatcttctttggtactccatgcaaacacacaatccgagccatatataactctgctagctgagaacctttataagtagtcttgacaggaataaagtgagccactttagtcaacctatccacaatcacccatataacatcatatcttttctgggtgcgagggcatccagtaataaatacataccaatctcttcccacttccactcgggtatc

SEQ ID NO: 45721 - DNA, 421 bp, Zea mays
  unsure (1)..(421): unsure at all n locations
ttatcanatggacgtgaaatgtgccttcctaatggaccaatcattgaagaggtctatgttgagcaaccatccggctttgaagacagtgagtatcctaaccatgtctataagctctctaaggcgctttatgggctcaagcaagccccaagagcatggtatgaatgcctaagagatttccttatcactaatggattcaaagtcggaaaggccgatcctacgctctttaccaaaacacttgaaaataatttgtttgtatgccaaatttatgtngatgatattatatntgggtctactaacgaatctacatgtgaagagtttagtaggatcatgacacaaaaattcgagatgtctatgatgggggagctgaagtatttcttaggatttcaagtaaagcaactccaagagggcaccttcctaagca

SEQ ID NO: 45722 - DNA, 263 bp, Zea mays
accaatatatatatatcccatgatcaagatgaataccatcaattcctgacctcgcgcgagtgctagattaatcactcgatcttctcccgaagatcctgattaataaagcaggttactcgatcctagcatactagtattcattttaataaggagatctaagttcatgcaactagaggtgtcaagcaactcttacacttaagtgcacattacaggtctaacaagcattaagtgttgtaaagtagcactatataacatggatatgc

SEQ ID NO: 45723 - DNA, 444 bp, Zea mays
  unsure (1)..(444): unsure at all n locations
gacacttaaaactcagcttggaagtctcatcccacaggcctatgttatccttgacgccctgcagtcttagcgataagcatgctctacaccgcctctctttgcataataactaaataagtttgtcgctattcacccttaaagctatgaaccgtactttttctacagacagacacatttacctttgtgaataaacagttatatctcatattacacagttgactcacagacaacaagttatatccaagcgactcaacttagaacacattccacatatagtgctctgatgagatatcaattttcctaaccctttcaccttggcttggttcccatcaccgaatatgatagaatcttgcggatcttgtcttgacgtagaagnaacatcctttttccccgcatgtggttgtcatccgttgtgattaacagctgagccctaatgcataacct

SEQ ID NO: 45724 - DNA, 472 bp, Zea mays
  unsure (1)..(472): unsure at all n locations
agcttaaaacaggagaaatccagaaatatgctactttaataatgaaagctacaatccttgataaaggtgacattactttaccaagatggattgatatgtagtagcatactttatgagaaaattgttctcatacatgagactatatgagattattaagataaagtgttagtctcaatataatcaagatatagaaataggctccccctaaagatatgcatcaagaaattgaatgagttggatagatgtactcactttttaaagtcaaatagggagaagcattattcatcttgatcaacgcttacaaaanttgcaataaacaatttatgcctagtattctcacaatgaanaagatttagaatgcttacaaccacaccattgattgtntgaagatctattatccaagaggggttgttgtcttgatgcttccttttcatttgatgccctcctttatagtgactcttttcttcaaact

SEQ ID NO: 45725 - DNA, 362 bp, Zea mays
tcgtatcaacatttactggtcatatactatctttgttatctatagactgtggccgcaaaagttcaaacaagcggaacaacccagaattcccctgcctgccgcttgctgccttcttgggaagaatcgtatgccgtgattctgtcctggatgagcaaggccaaacctgtcgtcgagggcggccggtcagatagaaccgaggctttcgttcgccgtccccacgccggtcagagggaatgaccagtagtactgaccatgagtgcgtcgtctccgcgcgctgaacgcgccacgcgagtacgcgacgatcgatcccactccactcgtacgccggtcctgattgagatactgtggcgtggcctcaccag

SEQ ID NO: 45726 - DNA, 335 bp, Zea mays
gcagcaagctggagaacttcaacaacatggctatctggatgccaaccaaccagttatcttagcaataaacaagtgcaaagtcagctctatcaaaaactactaagcatagctgaccctctaacactcccttaaatgctactgaatcatcacttcttctaaagacagtaacacctatatccgtaaaaagacagttgcagcccattttacataattgcgaaacggagagcaagtcataatctatagaatctacaagaataacattgggaaaggaatggtcacgtgatatagcaaatttacccaatcctttgaccaaaccttgatttccatccctaaat

SEQ ID NO: 45727 - DNA, 307 bp, Zea mays
ttgaagacactattaaccactgctccggtattggctcaaccggacatcactgagccttatgatgtatattgtgaagcatctggcggtgggctctgctgtgtactgatgcatgagggccgagcaattgcgtatgcttcaaggcaattaccgctgacccgacgagcattgcccaactcatgatctggatctagctgctgcgggtcatgccctgaagaatcggcggcagtatctgctgggaaatatctgccgcatatatacagatcatacaagtttgaagtacatactgaaccattcagaattaaatatg

SEQ ID NO: 45728 - DNA, 428 bp, Zea mays
  unsure (1)..(428): unsure at all n locations
ancttcngcgcgaacgcgaccacaggcgcatccctcatgcctactanttccatgcgacaatatcaaagcatcatccttactctagtcactatttcctctcgagtttacactacgtaatgttgtagtggcttgatcggttagctgcgccacccccacaccaaacatattatatagagagcatgagtgtcaatcatatcataactacacataacgtatgtagcggtagcgtacgtcttttatgtgaacaataaagatgtctaagaaaacccaactctcttgtcatccataaaacttatgtatcatcttacttataccgattactagccttaaagaagcgtctacattaatcctaatgtgtgctacacaaacatttgggctttgatagactctaatcctcatccacagctatttcaacgaatctattcttt

SEQ ID NO: 45729 - DNA, 508 bp, Zea mays
  unsure (1)..(508): unsure at all n locations
gggtggagacagaggtctccgcaggagagcgtgaggagggcatgtggaatcaaacactacctttgttctacaagtggtggagttgagtcatggtggaaactgacaggagggcgacgctaggtgaggaagccggtggggtggcggtgagaccgcaggggaaggggagaggtgaagctggcggcgcggtgaggaattggctggagtggcgtggcctgcacagatgggacccgacgttgagcgccctagacgaaagcacatgtacatgaccgtcgatgccacacgcgtatatagatgcttgtggaacaggcgctaaatcgctttagaaatctaaatcccaagttctttctaataaaaggtaatataacacatattttagtcgtggaaagcatatttcgcatgttntgacaaataaatagagatataataaatattctaataagtgcaacacagtgagacataagatataatacatattctaacaaataatacgataccgaagtgagtaaaa

SEQ ID NO: 45730 - DNA, 466 bp, Zea mays
  unsure (1)..(466): unsure at all n locations
gctcagatcatggtacatcttggggcttcccggatgcatatagaaattggagagatgagcctcatccaaaattttcttcttgagatcctggtccttaggaattaccaatctgcttttgaaccataacacacctttctcatcctggcggaaacaatcatacttctcaaccttctgatggagattcttcttgataatctgcactcccttgtcactgagctgggccatgataatctggtcttgcaaagctggctcaacagaaatgtgagacaaagaaccagaaggaatcacttcaatttgcatcttgctcaactcatcacacaaggtgttaacacgagaatccatcagaatacagttgcattgcaacttccgactcaaggcatcagctaccacattagctntccctgggtgataatgtacctncaggtcataatccttgatcagctctagccatcttctctgcctcatg

SEQ ID NO: 45731 - DNA, 396 bp, Zea mays
  unsure (1)..(396): unsure at all n locations
ccacatgtgctaagcggcgatgccacagtcagcccatgcaagtcttagccattaagcatgcgtctagaccggcctcttcttttgcaaaatcaactaaataaagtttgccgtctaatacacccttaaaagctagtgaaccatcacttcttctaaagacagacacatctatatttgtaaacagacagttatatcccatattgcacaattgactaacagatagtaaattatatcctagtgactctactaaaaacacattagagatagagtgctcattagaaattgcaattntacctaacccttttaccttgccttgattcccatcaccgaatatgattgaatcttgggaatccttattcttgacgtaggagggtgaacatcttcttctccccgtcatat

SEQ ID NO: 45732 - DNA, 467 bp, Zea mays
  unsure (1)..(467): unsure at all n locations
tgcaagctngtgaagattcttcatatcaacatgggctattctgcgatgccagagccaacccatattagtcttagcaattaagcaagtgtcgagttcagctctattgaaatcaactaagtatagctgaccctctaacattcccttaaatgctactgaatcatcacttcttctaaagatagtgacacctatatccgtaaaaagacagttgtagcccatattgcataattgagaaacaaaaagcatattgtaatataaagagtctacaagaaaaacattggaaatggaatggtcatgtgatatagcacatttaccaagtcctttgaccaaaccttgattccatccccgaatgtgatagctctttggggatcttcgttttctctcgtaggaggagaacatccttttctcccctgtcatgtggcttgtgcatncgctatcaatgatccaacttgagccccccgatgcataaa

SEQ ID NO: 45733 - DNA, 149 bp, Zea mays
  unsure (1)..(149): unsure at all n locations
ctaagctttaagggaaacactgaangttgactaacggcattctatattatgacctgtgcgcttgtcagcaggtgaacaagtgggaggagcacactccatcaagaatgtgatgaccacttctagacctctggagctggtgcatatggacc

SEQ ID NO: 45734 - DNA, 405 bp, Zea mays
  unsure (1)..(405): unsure at all n locations
gctgtgaagagngttgtggcctttgttgctgtctttctcgatcatcaagttgagcagagttatggattgacctaacatgcctcgggtgatatcttcctccgaagcccctggtcatttcagaaaacctgaatgcttcctcccttctttggcggaactcattgtcagctcgaatgtattcgtccatcttctggagcagcttctccaacgtttatggtggcttcctgacaaagtactgcgctgatggccccggccgaagccccttaatcatggcctcaatgacaatttcattgggcactgttggcactttgccctcaggcgcagaaacctccggacatacgcctgaatgtactcttcatggtcctgggtacactgaaagagagcctgagcggtgactggcttcgtctg

SEQ ID NO: 45735 - DNA, 466 bp, Zea mays
agcttcggcgtggcaacaaaaagtgatatcgacttaaagatgataaggctatttagacctcgataaattactatagaattattatcaagtgtaaagggcatgaattgtaatttgtatgggttgtgtcccgtgcctataaataggtgaacagtacccccgtactgttcacgctgacttggcattcgctttttgcgtcacgcttgtactatcatctccttcaagttgaaggtacatttgtaattcaacgatatttctatttatacatgataataatatataattggttatgttgtcttttatattccttacactttatccttcgtcactgtataatgaatttatgaaggtacgcccttcataaccttcgtccgaaaaccattatatcctaagggaaataatgcttcgaaggatgaaggactttaatgaataacattttctatgttgccttcgtcttaactcatagtat

SEQ ID NO: 45736 - DNA, 413 bp, Zea mays
taagcccttctgatttacaaatatacaaaaatgaagatgcttatcaaatgctttctttcatcataattcacaattgatagaatgagagttgacgacccacatcttcatcgttaaacaaaaggaagctactgtctaatgtttgcaggatgaatattacatgattctgaattctagatgacaccacgcaatgatatagagcataaacttgtacaaaaaaagcttttgagcatataatactgaaattattaaattaggagaggacaccgaacaattgatgcattagtgaagaaaaatccctgccacctttaatcgttatcgtatagtatgttcatccctgttgaagtaccatcaatacatcatcaattttcaacttgtgatgcatacacaaaaatatatatatatatatatatata

SEQ ID NO: 45737 - DNA, 450 bp, Zea mays
  unsure (1)..(450): unsure at all n locations
cttaagtcacctgcagctgaagctatgaagattcttcatcccaacatgggctattctgcggtgccagagccaacccatgttagtcttagcaattaagcaagtgtcgagttcaactctactaagtatagctgaccctccaacactcccttaaatgctactgaatcatcacttcttctaaagacagtgacacctacatcagtaaaaagacagttgtagcccatttgacataattgagaaatggaaagcanatngtaatctaaagaatctacaagaataacatttgaaatggaatggtcaggtgatatagcaattttacccaatcctttgaccaaacattccccgaatgtgatagctcgttggggatctcggtttttctcgtaagaggagaacaccttcttctccccagcatgtggttggtgcaccgctatcgatgattcaacttgagcccct

SEQ ID NO: 45738 - DNA, 431 bp, Zea mays
tgtaaagggagaacacgtgatacgtttgactaacgtgctatttctaacaatgacagaccttgtgcagcttgtcaagcaggtaaacatgtgggaggagcgcatcacggctagaatgtgatgaccacttcaagacccctggagctgctgcatatggacctcttctgacctgtcgcctatctgagcatatgagggagtaagtatggtttagctattgttgatgacttttcccgctttacttgggtattctttttgcaggataagtctgaaacccaacggaccctctagcgctatctcaggagagctcacaatgagtttgagctcatagtgaagaagataacgagcgacaacgggttcgagttcaagaaccttcaagtggaggagattcttgaggaggaacgatcaagcacgaggtttgcgcttcctacacacca

SEQ ID NO: 45739 - DNA, 380 bp, Zea mays
  unsure (1)..(380): unsure at all n locations
tgcaactttaaagggagaacacattgtaggactaacatatgttctatttgagaaagacaggattngtagcgcatgccaagcaggaaagcaaagtggtgcccatcatccacacaagaacatcatgacgaccgacaggccgcttgagctactccacatggatctattcggcccgattgcttacataagcatcggcgggagtaagtattgtcttgtaatagtggatgaatattctcgcttcacttgggtgttctttttgcaggaaaaatctcatacccaagaaaccttaaagggattcttgagacgagctcaaaacgagttcggcttaatgatcaagaaatttagaaacgacaacgggacggagttcaagaactctcaaattg

SEQ ID NO: 45740 - DNA, 397 bp, Zea mays
  unsure (1)..(397): unsure at all n locations
ntaagctcttngacaagaaaatcacttcacccagtccttatattatgcatcaatgcataaatgaaatgcttgagagggttaactacatatgaatcaaggatatgcatagacatgctttctcttccttatatgaacgatatgccaaaaatgtatataatatgaagatttacgtacatgtataaatgagagtaagtagattacccttttgtacctttacatagagacgctcttttcattgtgctttgaccttagtcttggttacttaagacctattttcaagacaatgtatggaaaaatattgcacaagagagagttctacaactagcgatccttttctaaatcattattgtcatatataacgcataacacaaatcgcataagttgatcctgaattctt

SEQ ID NO: 45741 - DNA, 336 bp, Zea mays
agctcttctggcacaaaagatctatttcggcggatgtgggttcctgcccttcttccggagctacaaaatctggaggatcggatccctcttccgctagcgaacatagataaggaacaatacatcaatcatggtgagttggtggggtgtgccaattgttagccattattatatttgtgccctataatttgtgtacactattatttgggcataaaatattcatatatgtttatatatcaaaactggagaagaaaagaggtaaaagaaaaagaaagggagtttctctactagcttggccgtggggaatttttgccaaccaaacgcgggcatgcgggccac

SEQ ID NO: 45742 - DNA, 238 bp, Zea mays
  unsure (1)..(238): unsure at all n locations
tgcattgcatatttaaattccttgtattgcatctagggcttgtctaacctagttgagataaccgccaacaaagcgagtgaaaaagcttaactcgggtcaaacctgacaagtcttagttttaagcttttagcacttaaattcttactttctatacaattattgattcttgaaatgtgcatgaggtactgcacttanggggagtattcaaaactcaaatcaactcatgaaaaccccgagt

SEQ ID NO: 45743 - DNA, 410 bp, Zea mays
  unsure (1)..(410): unsure at all n locations
cttgctgcacccatatacttgtacctcncttcttgggccctggtccaactggtatattacattttctaggccagcaactaggacgagtacttggaacacttattcaacattgctatctgttactgacttgtgtgtcacatatatatatntaatcagccttcccagggctccagctttctctcgagcagaacaggtaatcctttgcaatcacacccacgctcgttggacagtcacaccggtcaccgtttgccacctgcagtgctggtaagaaccttgtaagagcggngtaagatgcttcataatttatattccaccaccaccctgagagatagttgtagggttcacattattngttgcctttttgtctctggtttgtgctaacaatgataggaccaaagaatcaaatggac

SEQ ID NO: 45744 - DNA, 386 bp, Zea mays
  unsure (1)..(386): unsure at all n locations
atacttattctttctaccactacctaagccaggatttcagggtgggatacttgcattgtgagcaaatagatagcccgcattaacatgtcttttggctacgagatgtgggaaagaggacaatatgttactttaaataaggtttcttttaaaaaaagaatgtgtgatgaagggtattcaccctcatcaccttaagagtgggatgatcaggaactccctggtttaggggagggcctaagggtttggctcagctggtttaggcgtgagcagaaggattgtcccctcatataagaaccagtttgtcatcttcactacctgtactctntaatagtacaaccactcgagactgtgtgggcagtcactcaatctaaactcgtgcggtccaaccc

SEQ ID NO: 45745 - DNA, 323 bp, Zea mays
  unsure (1)..(323): unsure at all n locations
gaaaaggggaacaaaagagaaaagaagaagctattcaagaaggcaaagggcgaggcgcatctatgaaaggagtgggactcggattgctcctcctccgactccgacaacgaaggactcgccgccactgccttcaacaaatcggctctcttccccaacgagcgtctcacatgtcttatggcaagggagaagaaggtgagtactcaagactccacttatgcttcttctagtgatagtgagtctagtgatgatgacatagattattcatgcttgttcaagggcttagatagatctaagatagatnaaatcaatgaattgattgatgc

SEQ ID NO: 45746 - DNA, 494 bp, Zea mays
  unsure (1)..(494): unsure at all n locations
ggacggtagctgctgcacagcaatcgcatgaggtgacggttctgttccattgtagaactagagaagtacgtatatataattatatgtactagaacattagacgcccttcgggcgcccaataataatttgaagacaatagttttggctaaaattatgaagtttataacagaatgaaacaaaagactgttttttcctggtatgacaatagtgaggagttcaaggatgtcactcattntacataatccaagtgtcgcctagtaactataggcacatatataaaaactaaatgttttttgtttgaaatttaattaatgagtaggtgatagatgaacataactgttgtgtcctatgcaaacaaattatctaatgctatcactaacacaagaccgtaagtattgctgagacaatatagtattgcagagtagtcaaactcacaagccataaagctttttccataaactggagaggcagaanatcaggtggaagtacataag

SEQ ID NO: 45747 - DNA, 428 bp, Zea mays
  unsure (1)..(428): unsure at all n locations
agctngccgtctagtacacccttaaaagctagtgatccatcacttcttctaaagacagacacatctacanttgtaaatagacagttatatcccatattgcataattgactaaccgatagcaaattatatccaagagtctctactaaaaacacattagagatagagtgctcattagaaattgcaattttacctaacccttttaccttgccttgattcccatcaccgaaaataattgaatcttgggagtccttattctcgacgtaagaggtgaacatcttcttctcctccgtcatatggtttgtgcatccgctgtcnataatccagcttgaacctccggatgcataaacctgcaaggcatnattaggcttgggtcttaggtacccaactcatgttgggtcctacaacggtagtgcaaatatccttaggga

SEQ ID NO: 45748 - DNA, 473 bp, Zea mays
  unsure (1)..(473): unsure at all n locations
taatggttcataattttaccaactatttgtattgtcctttaagccctgtttatctgaatatttatatacggttaaaccatacttaaaccctgtgaatctgtgttaatctacgtcctgtgatatgatctatccctcagttgaaaagagcatcccctgttagaggaaagtctaacaattgatcttgctgtggaggtacaaaaaacttgtgagctggcactaagacgaatagaagagcaatagatcaattgaggtatcatttccaacgcatgcatgtaccagctcaagtntaagtttgacccatgtttntaattatgacttgttttctaactaggccaagatcaacacaacattgtcagagagctgatgaaattcagaaccatacatatgatacatgtcattatctgcaccaggcttcactaccaacgaggcatgcaaggagctctctcaatgtgcattcttggctcgtatccatc

SEQ ID NO: 45749 - DNA, 366 bp, Zea mays
  unsure (1)..(366): unsure at all n locations
acagagagggggggagagatgacatgtgtggagccagcanttatcggtgcaatcgctaacttggcggccccggtcctgcctatagccattaaagggatacaaggtgcactgaaaaaacggcaagtccgtgacagtgatgttgaaaccctgaaatcccagcttagctacatccaaggcatcatccgtgatactcggaagactatcaggagttcccaagacccgtccgacaggctacaatcctgngctggatacctcagatgcttggcgtacgacatcgaatacctaatagaatgccgccgtgccggaaccatgacaggtgcgaagcttaatggcaagattactatcatccaggatttaatcagatgt

SEQ ID NO: 45750 - DNA, 445 bp, Zea mays
  unsure (1)..(445): unsure at all n locations
taaatacgagaatccagtatatatgctacttgaacaaagaatgctattatccttgatagaagtgatattactctaccaaattggattgattntagtagcatactttatgagagatttattctcatacatgagactatatgggtttacaagagaaaatgttagtctcaacataatcaagatatagaaatgggactcctcctaaagacatgcatcaagaatnttaatgacttggttagatgcacttttcctttatagaatatagaggaatncattgaacatcttgatgaaggtatgtaatatttgcaataatcagcttatgtctcgtattcttanaaatgtaaaaggtttagaatacttacaaccacaccattgattaatttgaagatcttactatctaagtatgcgttgttgtactgatgtcttcctttcatttgagtgcctccct

SEQ ID NO: 45751 - DNA, 369 bp, Zea mays
  unsure (1)..(369): unsure at all n locations
taagcactgagctgcagctggaggcgagatggatgctacttggtgtatactcctnctcttcctccgacgcactgaatgcgacgggttgagcttcagatgtggagggatcatcaagctcgttgatcttccttgagccttctatcatgcactcaaaacttacaaaattcccgttacttnctcggaggtcattagtgtatatcttgggttgccacgaattaattgtacttgagttggattaagagcaataagagatcttacaataagcttaaccatttcgtagtcatcccatttcttgctcccgaagttgcgcactcgattcaccaaggccttgagccggttgacatgtgttgtggatctccccttgcgaac

SEQ ID NO: 45752 - DNA, 472 bp, Zea mays
  unsure (1)..(472): unsure at all n locations
tggagtgcaattatgtgcttactggatgataatctctgtagttttgttgctcaccattaaaccactgactgtacactgtactttattattatctgtatagtacactgacaggcagtaccatcttaattatgcttaagtatatttntgttgctactgcatggacttttaaacacctgctttctataatatactgatttagtcatatctccttnttgtggtaggttgctcttatggcatcttgatccatcaattattatgcttgatctctcagtgatgctcaaggaggtaattaaaaggcccttgctttgcctgagaaaggaattatataatatgatggaatggcgtatcatcataatttgcccggattgctccccaactgtatatatggagatgagatcactattacacttctgtgttcaaggaacgtaagttcacaccttcaacactcatatggaatgccctatactatagc

SEQ ID NO: 45753 - DNA, 357 bp, Zea mays
  unsure (1)..(357): unsure at all n locations
gcttatcgcatttgaagcatgatcgcttccccttggtcttagtcttgctcggctgtccattgcgaccctttagcaccgtcttgaagcgcttaatgatgagagccatttcttcatcattaagcccggccgcctcaatntgcgccaccttgcttggtagtgcctccttgctcctcgatgccttgagagcaatgggttgaggctcgtggattggaccgttcaacgcgtcatcgacgtaccttgccttcttgatcatcatccgcccgcttaacaaatttccaagaatttcttcgggcgacattttggtgtacctgtgattctcacgaatattattcaccaaatgacgatcaagaacatgta

SEQ ID NO: 45754 - DNA, 442 bp, Zea mays
tagtggtacctattgttaccttcgaatgcctgaggggctcataaatgctggaggaagcttcagcacaatgactgccaaggttcttcactctcaaataggcaggaatgtgctgacttatgtcgatgacatcatagtgaaaagcacaaaacaagaaaatcatgttgctgatttgtaagagacgtttgccaatttcagacaagctggtctcaagttgaacccagaaaaatgtgttttcagagtaaaaaagggcaagtttcttggttgcatggtatcaacaaagggcatcaaagccaatccaagcaagatcaaagctatccttcggatggagccaccaaattcaaagaaaggggctcaacggttggcaggaaggctggcaatcgtgaatagaattatatcaagatcagctgagaggaacttaccattcctttgaatattaaagtcg

SEQ ID NO: 45755 - DNA, 405 bp, Zea mays
atccttaagtcacctgcggcatgcaagcttcggtacactacgacttcattttcttcagggttcggacaaagtctttctcctttcgtggccctcacaacggacaagtcccggaaatatcttcccctcatgttgacaagatgattttctttgatacttgatttgccgaaaaccgcatggcttggtcgccaagggcgatcttcggagtcttcaccacctctatccacatcataactgtcgctgtcatcagtatcttcagacaaaccttctaaaatctctttggtgattttttctgtattggtcttcgacattgctataagaaaccccaagtttttctcttcagagagactcagcttcatctcggcagcagccttcttatcttcagacatcttcggaaacactataaaa

SEQ ID NO: 45756 - DNA, 202 bp, Zea mays
tacctacgcctgtgccgcatgcgtcactcggcccactctgccgcgctgtttatcccatagaggctggctgattcgtgcgcccgcggatactatcaagcgaggcctatgggtcggtcactgccacgctgcacttgtgctttctctgccgctggcgtgtggacccggggaggtatttctctttctccgaacgaatgccgtgcat

SEQ ID NO: 45757 - DNA, 468 bp, Zea mays
gctatgaagactcttcatcccacatgggctactcggcggagcccgagccaacccatgttagtcttagcaataaagcaagtgtcgagttcagctctatcaaaatctaccaagtatagctgaccctctaacactctcttaaatgctattgaatcatcacttcttctagagacagcgacacctacatcagtaaagagacagttgtagcccatttgacataattgagatacggaaagcaaattgtaatctaatgaatcaacaagaaaaacattggaaatggaatggtcaagtgatatagcacatttacccaatcctgtgaccaaacctttggttccaatcccgaatgtgatagctcgttggggatcttgggttttctcgtatgaggagaacatcttcttctccccgtcatgtggttctgcactcgctgcattatccactagagccccggatgctaaacctacaaacatgtta

SEQ ID NO: 45758 - DNA, 471 bp, Zea mays
  unsure (1)..(471): unsure at all n locations
tttattttattacagcggcctgatgatctcatacgccttaatctaactggacagctgcaggtctgggaacctcgtgatgtacactgctgtctataacaccttctaagtcagaacatgttatgcatccaagtatgattgtacgttgacatataatattgccgaatacgaagcactcttgttggggcttcggatgttaatggcaatgggaataataaaggctattctgaagactgattctcaagtcatttatggccatgtagataaaagtatcatggcaagagattctaaacctgaaaaatatctggatacagttcanaggttcgacgctatcttcgaacgtttctctgtcaagaatattccaagaggcgaaaatgagcatgcatatctgttaaccaaatcagcggctcatgggctccctctaccttcggaagtattcttatgaacaatatacgcaccttcagttgaactcat

SEQ ID NO: 45759 - DNA, 251 bp, Zea mays
tccgcgtcttgaatgcgacgagtgagcctcggatgtagatggatcatcaagcctcgtgatctttctccagcctttgatcatgcactcaaaacttacaagactcccgatgacttgctcgggggtcaatttaatgtatttaggactaccacgaattaattgaacatgagtttggctaatgaaaatgagtgatcttataataagcttaaccacctcgtgggcggaccactttatacttccgaagtagcgcactt

SEQ ID NO: 45760 - DNA, 417 bp, Zea mays
  unsure (1)..(417): unsure at all n locations
ttctttgtccagaacaccctatgaaaaagtacatcaaattagtatattgttgctacatttgcaaataaanatacacgtttgatgccttatctacctccactagacggtgttgcagccttatgcaccaaattcagctggtgcaatcaaggttaatcatcattaagttgatggctcatataaatctaaacataaacaagataagatatagacttactttcttgtacggccatgcaactgacatcatgtaagcatcagccatatactgatcgcattttgattaaggaaacatattggtcacctaaaatggggcaataaccctctttcttgctccacacctttgtgtcactatatgtgtgtggagaaaccaattcacacttatgtgctacaagaatttgtagtcaaatcatgaatatagag

SEQ ID NO: 45761 - DNA, 377 bp, Zea mays
atgcgacgggttgagcctcggatgtagatggatcatcaagctcgttgatcttcctcgagccttcgatcatgcactcaaaacttacaaaattcccgataacttcctcgggggacatttaagatatctaggattaccacgaattaattgaactgagtagggttaagaaaataagcgatcttaaataaccttaaccacctttgggtcagccactttatacacccgatggtgcgcacttgggtcaccaaggtcttgagccggttgacatgtgttgggctcttccctttgcgaaccggagccgccgagctcccctcgaccgttgcgcttgagaacttgtgactcattctcttgggcccgattgacacatccaaacctcttgg

SEQ ID NO: 45762 - DNA, 492 bp, Zea mays
  unsure (1)..(492): unsure at all n locations
ctctttgtccagaacaccctagaaataagacgtcatattagtatattgttgctacatttgcaaataaaaatacagacttgatgccttatctacctccactagacggtgttgcagccttatgcaccaaattcagctggtgcaatcaaggttaatcatcattaagatgatggctcatataaatctaaacataaacaagataagatatagacttactttcttgtactgccatgcaactgacatcatgtaagcatcagccatatactgatcgcatgttgattaaggaaacatattggtcacctaanatggggcaataaccctctttcttgctccacacctttgtgtcactatatgtgtgtggagaaaccaattcacacttatgtgcacaaagatttgctagtaaatcatgaatatagagtccaaatcagaccgcagntacttagaattcttgaataacacatgccaagtacgaggagtcaaaatgattgaccacct

SEQ ID NO: 45763 - DNA, 256 bp, Zea mays
gcttaacttctgcgacagtttcggtgacataacttatgcatcaacttcaccttcggcatcctacataaatcaaagaatcgtgagtcaaaatcaagtgccaagaataaggttagtaccaagtattatcttttactggctcaagatgactttgtgcttcatctccagccttctctcgcccagcctttgtccataccatttgtataaatctattggagatacttcgggcgaggtctggcatatcatccagaattgatga

SEQ ID NO: 45764 - DNA, 461 bp, Zea mays
  unsure (1)..(461): unsure at all n locations
catgcatatattggtccacatctcttgatgggttcatcatagttaatcaacaaagatctaggaacccagatgtcctttgtgctagaacttgataaactcattacctttctagcacaaactgcaatattggattgcctaattacatatgaatcaattgacaacttgggggcaggatagttactaataggacaatccttacattgatgtcctttctttcgacatatgtatcaaaggcgatcttcatgtctcgaagatttcttcttttcttggtacttgctagctacatggttagcgcatattttcttttctaaaactatgcctttatgtttacatagggacatgacttaactaaatgtcccttcttagagcatcttatacaatgtttatcatccttataataatcaagccatctctttatatatggcatgagctaataagtgccattatcanggcttactaca

SEQ ID NO: 45765 - DNA, 450 bp, Zea mays
  unsure (1)..(450): unsure at all n locations
agctntatgggctcacagaatatctaatcatagtgctactaaagtatctccctttgagcttgtctatggataagaagtagtgttgcctgtanaaataaagttgaatgctgtcaggttcgccaagcaaaatgatctaaccgtcattgattattataattcaatgatgaataatattgatgaggtgaccgacaagagggtgatagctntgggagcaatagaaaaggacaagatcatggtagccagtgcctacaacaagaatgtcaaattgaagtcatttcaagtaggggacctggtgtggaagatcatcctgccactaaggaataaagaccggaaagttgggatatggtcgccaagctgggagggtcctttataaagtaaacaggtaatgttcggtaacgcatatttactacaaacattacaaggcaaggatntacccatggctttgaatgg

SEQ ID NO: 45766 - DNA, 368 bp, Zea mays
  unsure (1)..(368): unsure at all n locations
tctanagggagaacacattntatgactaacacatgtttatcttgagaaagacagggtttgtagcgcatgccaagtagggaagcaagttggtgctcatcatccacacaagaacatcatgacgaccgacaggccgcttgagctactccacatggatctattcggcccgattgcttacataagcatcggcgggagtaagtattgtcttgtaattgtggatgattattctcgcttcacttgngtgttctctttgcaggaaaaatctcaaacccaagaaaccttatagggattcttgggacgagctcataacgagttcggcttaatgatcaagaatattagaagcgactacgggacagagttcaagaactctc

SEQ ID NO: 45767 - DNA, 364 bp, Zea mays
  unsure (1)..(364): unsure at all n locations
cacatatggcgcctctccccttctaagaagtacacgagctcaacctatgcagtcacctttcaaggctcggtgacctttgagccaagggagcgcatttggaaggcttgggcaccgcctaaatggttttttttctcgaacacgcaggagagctgcgcattactatattaagaaaaaaaggggaaaaagaaccccgaacagacagtacaacccacacaaaaacacagacacacacacacaaacacacacacacctatacacacacacacagagccccacctggagcanggcatggacagagcgtctgtcagctgacagccaccccaagactataacagagaaaaactaaaccacccgactttgagct

SEQ ID NO: 45768 - DNA, 402 bp, Zea mays
  unsure (1)..(402): unsure at all n locations
tgaggctgtgtatagaattaccgcctcttaatgcggtaactatcaagaacangtatcctttgcctcgtattgatgttctttttgaccagttggtcggggccaaggtgttttccaaaatagaccttcgcttctgctaccatcagatcaagatacgagcaagcgatattccgaagacggcattctcaactagatatgggctatatgannatttggtaatgtcattcgggctgacaaatgcaccagcatatttcatgtatctgatgaattctattttcatgcctgaattggataaattcgtagtggtgttcatcgatgatantttggtgtactcgaagaacgaagaagaacatgcacggcatttgcatgtagtgcttcaacgtctgcgagagcaccacctttatg

SEQ ID NO: 45769 - DNA, 394 bp, Zea mays
ttagagccttaagacaggatatgaatcaaatgatagagaaaatggatcaaatttatcaaatgatggtagcagctcaaggggtgcaacatatagaaagcccatcacaacatgggtctaattctcgacaggtgatataatattgcatatgtttagccagtgtagcatatatcgagcagttcgccgtctatcttgttaattacgcttgtttcctttatctcactaacacttcttccctttatatttatctttagaactcaacggtgcatcggtcagatgaggtggcacatggttacaatggtaatgaccattcaccaaatatggttgaagatgactcgcaacttactatgcaagttgcagcactatggccgtccaagaatcgtgataatgttatact

SEQ ID NO: 45770 - DNA, 376 bp, Zea mays
  unsure (1)..(376): unsure at all n locations
ttcagaccttggcttctcacggcccatactatgatattcagccttatgaatgcctcggcggtaagttggtgaagatagacttctaagattttcagcacttccacgacgaagctgctcaagggaaatcgcagtccagctttcaaaaagcttcggtacactacgacttcattcccttcagggtgtggacaagttttttccccttcgtcggccctcacaatggacaaatccctgaaataccttcctctcatgttgacaagatgattctctttgantagtgatttaccataaactgaatggcttggtcgccagggacgatcttcggagtcttcaccaccactgtccacatcataactgtcactgtcaccagtatcttcag

SEQ ID NO: 45771 - DNA, 396 bp, Zea mays
  unsure (1)..(396): unsure at all n locations
ccgatggaaaaacacaattcttgatatcttggcttgtcaactgctcgtcgttgncaactgttagctcggacggtactccgaagcggcaaacaatgttctgccaaaagaatntttgggcagtctttgatgtgattgtggaaactggcctcgctacaatccatttggagaagtattcgacggctacgaaggcgaacttaaggttcccctgagcggtgggcaagggcccgacaatgtccaggccccagcgctgaagaggccatgtatgggcaatcagcnttgtgtattgcgaggggtcgcctgaccgatgagagaactattgacatgcttcacaggaccttgcgactcgatttgcggcacagatcattgcaggccagtaaaaccgcttgtcggatcacc

SEQ ID NO: 45772 - DNA, 404 bp, Zea mays
  unsure (1)..(404): unsure at all n locations
atccttcttctcttgttcgaagctgtntgatttcgtggagagatcactgtttaatctagcaatctcggcttgggcttctgccagcgaaccctccattgtttgaagcacaaaatccttcttcttcagagcagcttcgtgaatctttaatttgccctctaagccctcaattataatctncgttttcttgtcctcgaggtcttggtgcatcctcaaggtttgacttagcagtagactctgaaaaaataaccttcattagaagtaaccttcatcttgaaaacaataataaagtaagggtagaaccttaccttgaaattagaataaaacaagcaaccggcgatatgttgccacctgtatctgctgaggtcggcctcaagcttcggaaagcaacactcttcgatagagta

SEQ ID NO: 45773 - DNA, 486 bp, Zea mays
  unsure (1)..(486): unsure at all n locations
ctgcagcttgccatgtctctagcagtagnttatctagaatattaacaaatttaggattatgggcattactaatgtactcttgaaaagcatcaaactctccanaccatagaggtaggtcctctttaactatcaatcgacagagtttaggacgtgcaatagaaggagaatactcccaatggttcaaggaaccatcaggattacacttaagcacagattgaactataccatcgtgctgttgttctntcttagctaagcaattatgatgaagccagtgaccaggtccagaactagatttaccacttaaagtcacctcgcagtacttaaaaatggcgccataccttaccctattaccattgacgatgtgattcaattcatcaaagtcctaccacactttagatctatgaggacacttactaaaactagtggcagtagtgcttgtactcgtcagtgtcnggctcgtggagcttgtgcccgtctgaccacccg

SEQ ID NO: 45774 - DNA, 401 bp, Zea mays
  unsure (1)..(401): unsure at all n locations
cgcaattcttatctcaagctatcaatcttacattgtctatcctttaagattgacccatagatgaattgaattgttatatcactaacttcatattcatctctagcaagaacttgtgttgtatggaataaggattaacctttgtgggaatcaagcaaaaggcctacaaccaagtgatatccaaaggatggtaacaattagatcttatgtgcacattgcatttaattattactattccttgtgtcttttgtagccacatangaaaaataaagctcatgagaatgaacttaaaatattttaccgtgccttggaaaagttccaatcatatgttagatagcaacgttatatttctatattatgacaatctatatgctctacattggatgtatgtatcttgtggcata

SEQ ID NO: 45775 - DNA, 401 bp, Zea mays
  unsure (1)..(401): unsure at all n locations
tgcaagcttccataattggtccttattaaaaagaaattattctatatgcgataagctgctggcngggtaggatatttgtcaagaaatatgctncgactctggcatagtactattgactgtgcgagcttcggattcttctctgaagtcccattggaggtgagtgtgctgactcccttctggctgctggcctcattgcgttggtggtggaggtggaggttgttgccaagatgcctgatggtggcttgccgaagcaacaaaagctgcacggtggttgcctacatactctggaatgtaacgcgaatgatacgaagcattatgcatgacttgcttcgtctgactctgttgtgctgcagcttctgctatcttctttttcttctggatggaacatggcacatcctggt

SEQ ID NO: 45776 - DNA, 438 bp, Zea mays
  unsure (1)..(438): unsure at all n locations
taagtcacctgaggctgcagcttntaagggagaacacgtgatacgtttgacttacgtgtctttcataaaagatagaccttgtgcagcttgtcaagcaggtaaacaagtgggatgagcgcatcacagtaagaatgtgatgaccacatcatgacccctggagctgctacatatggacctcttcggacccgtcgcctatctgagcatatgaggaagtaagtatggactagttattgttgatgacttttcccgcttcacttgtgtattcttttgcaggataagtctgaaacccaagggactctcaagcgctttctaaggagagctcataatgagtttgagctcaatgtgaagaagataacgagagacaccgggtccgaatcaagaatcttaagtggaggagttccttgggaggaggngtcaacacgagtctccgtcctacca

SEQ ID NO: 45777 - DNA, 488 bp, Zea mays
  unsure (1)..(488): unsure at all n locations
tggacgtgaagagtgccttcctcaatggaccaatcaatgaataggtctatgttgagcaacctcccgactttgaagacagcgagtaccctaaccatgtctataggctctctaaggcgctttatgggctcaagcaagccccacgagcatggtatgaatgccttaaggatntccttatcactaatggattcaaagtccgaaaagccgatcctacactctntaccaaaacacttgaaaatgatttgtttgtatgccanatttatgttgatgatattatatttgggtctactaacgaatctacatgtgaagagtttagtacgatcatgacacagaaattcgagatgtctatgatgggggagttgaagtacttcttaggatttcaagtgaagcaactncaagagggcacctttctaagccaaacgaagtatactcaagatattctaagcaagnttgggatgaaggatgccanacccatcaagacacccatggga

SEQ ID NO: 45778 - DNA, 98 bp, Zea mays
ggacttaaaacaccgcgctgcacttttaccaggatacggtattgttaggggggcatcatacctttagtggagacccttcttacctccattctctcttt

SEQ ID NO: 45779 - DNA, 443 bp, Zea mays
  unsure (1)..(443): unsure at all n locations
agctttggtgaagaggcaagttcttaagtctgcatcttctgaagtgaaatccactaagtagagattgttgtatctaaatcctttgaacaccattgattcatcatccatttttgatacaataacctctgttggagtgaataagcattgaagtccaagatcacagagttgacccactgataataaattgaagctcaaaggtgcaaccaagagaacatttgaaattgataaatcatttgaaattgccaccttgccaagtccttgcactttcccttttgaattgtctccaaatgtgaatttgtcttgtccatcaacattctcatcaagtgaggtgaacatccgtgggttgcctgtcatatgttgtgtgcatncactgtcaataacccaatggctcccaccggtcttggtagtcacctacattcacagacaaatcaagcttgagtttg

SEQ ID NO: 45780 - DNA, 457 bp, Zea mays
  unsure (1)..(457): unsure at all n locations
tcatgaanaggaaccttcggccatcccatacaaacagtttcagtcgaaagccgcttcttcctacaagaccttcggcgacgaagcatagtcccaacaactaggttctttggaaccgaacctctgtaaaacaaatcatcgtgttcactcgccttgattcttgtttgatttgtttatcactctcttcggacttgaatttaattctaacgctaaccccggcttgtagtgtgtgtttaaagatataaatttcaggtttcgcctattcacccccctctaggcgactttcaattggtatcagagccaatgcttcattaagagcctaaccaactcgaagtgatgtctggagatcacgccaagagggagatcatgatcggcgaataggccgcatgcttgtggaggactctctcaagggagtccggtcacanacacaaagaggaatccttttcttcatcaagtctca

SEQ ID NO: 45781 - DNA, 316 bp, Zea mays
atggatcttatgtcacattgataccacaaaatggataatccaacttagaaaatgacttcaagccaatatctttgctcaattctttagtcaaactgataactaagattcttagcagatagacttcaaacagttatgacaaaattaattcattcaaaccaatatggcttcataaaaggtagaacaatttcaagattgcattatctgggcttttgaatatattcattggtgcaagctctcgtgcaaagaaatagtgattatcaagctagaatttgaaaaggctttggacttggtggaacatcaactagtaatcgacatg

SEQ ID NO: 45782 - DNA, 419 bp, Zea mays
cgtggaagatgatatatggtgactgtgagtctgggtacaagcagctacctgttcttttaaatgcaatgaaggcgatcaatccagacatgcattatgagtacatccctaaaccaaatgcatggattgatgggagacagatattcttccgtgcgttctggtgctttccccagtgtgtggatgccttccggcattgtcatcctgtctattcaattgaatatgttgtaaactaatattgttatgaatatgtcgtaaactaatatgtctttggcatgtagcgtttatctaggcgcctacgtggaactgctgctcgctgtggctgcaggactaatgttgcacatgacgttcatgtaccatcgtgtaccgacacaacaatgccctccacaggaatgggtgctggcttctactacgatcacgacgag

SEQ ID NO: 45783 - DNA, 287 bp, Zea mays
  unsure (1)..(287): unsure at all n locations
caataagtaccactgggagttatgaagctcgtctttggctcattctctttcttcatccaaatttggtgatagcctgagtagtagtctaataagctcatgagctccaaagaagttgctgcatctacgacggagtctattcttggtaaaggggagtcattcttcagacatgccttntttaccataatagtggtggccaaccacttnggatatggtacttctctgataaaatcggcactgagaagtctctttacttcatttcgtgcaccttcggctttattctcgacata

SEQ ID NO: 45784 - DNA, 376 bp, Zea mays
gagaagagatccgaaaatatcaataagatgtataaataattatcttcagtcttagtatgtttaattgcaaaaaaatagagcttataaaagaggatccacataagtttgaactaattcaaatttggtttgaaaatatagaaaatagaaagaaaaaaaattaaaaaagaatatgtgaaaagaatagcaatgctacctgggccgaacaaccccatttcggcccatctcgccaaatcgccgctacgcgtgcagtccaaacccttccaggcgccgacacccggggccccctttgcagcctctgctcccgcgcgtgcaatctacaactctcgctgcgcggcgggaccctatcgtcagccgagaagctcctcgcgtcgcgcat

SEQ ID NO: 45785 - DNA, 337 bp, Zea mays
  unsure (1)..(337): unsure at all n locations
ttgtcttgatacactctagtggacagagtacaaggttntggaaatcattatttcacattattcattttcctttatttaattttccatttaaggtttctaaggtaggtttgaactacatcatggttttaataatttctaaaaattctgtaaaaattacagtgggttgtcacttgttgttttagcttgttntaagaatttgagacttaagtacaaaagctaggatttaaacaaaaaaataaccacagttgggcaagatgggccattttacactacacctcttagttaggggtacgctctgtcctanaggttatattttgtggcatcctatggtaataat

SEQ ID NO: 45786 - DNA, 338 bp, Zea mays
  unsure (1)..(338): unsure at all n locations
ngccagtacttgtcanagcaacaacatttaccagcacagaaattgcagaccataccagtaacttggcccttcacatgctggggactggatatgattgaacctttccagaaagctcaaggagggtacactcatgtactggtagcaatcgacaagttcaccaaatggatagaattcaaactcattgcttccttaacctcagccaaggccgtggaattcatacaagacataatattcagattcggaataccaaacaacatcataactgacttgggatccaatttcacgagttcagaattcttcgatttctgcgagcaaaagggcattcagatcaggtatgc

SEQ ID NO: 45787 - DNA, 329 bp, Zea mays
  unsure (1)..(329): unsure at all n locations
ctacttcgccagaagaataacttcggtagaaatagcatttatttcccaaaaaattcagagttaaatggctagagtgcgttctaccgctacggttgaacgtgagggacgcgaatctgaaggatccgagactggtcccatcttcgaagcgatgcaacgatccagactggtaaccccggaagaaatctccactgctgagacagaacaggcgactgctcaaacggaagatggaaacattgacgaaactgatttcgaagatgattatcgcatngccatgccaagtaagcccactcacttggacttctgatagtcgactgtttcgaaggctgatc

SEQ ID NO: 45788 - DNA, 396 bp, Zea mays
tgcaagcttcgcacctctgaacttacttcgctgcatctttcttcgatggtggccaataaaatcctgacctgaagacctttccgactagtgttctggaggctgcatgtattccacattgcccagcatggacctcctccagaagttgcttcccagtggacgggagaacgcacttcatgaggatgcctgatgcaccccttctgtataatatctccccaatgagtgtatagtgagccgactgtctggcaatgcgctctaccgagttcttgtcgtctggttcttcttcattctttatatacttaatgatcggccttctccagtcatcggagtctgacttcgggtgatctatgatgttgcactcttcctgttgatccattgagatactcggctgtagaattt

SEQ ID NO: 45789 - DNA, 398 bp, Zea mays
  unsure (1)..(398): unsure at all n locations
tgagcaagtctcacggcttcaccaggaagctaactgagggcttatatcgaacggaggangacgggagaggggctggccacggtagttgctctcgggcggcactggcgggtcgcggtgaggtcgccggagctaatggctggctcgggcaagtccggcgaggtacggaggaggtaacggtgaaggcagccaagcactgcggtgggctttatagccgtggcgcgggcgtggtcacnggcggccgcgggcgcgtgggggttctcgcacgggcgtgctctgagcgtgcccccggatgtcagctcgcgtcgaacacgtggaagcttgcttctgccatggttcaacggccgattagagtgccatagcgtgcgtatcttggcaaagtcactgtgtacggtcgcttc

SEQ ID NO: 45790 - DNA, 191 bp, Zea mays
ctgtttacattagctgctctaacggctcttttgaaacgctataagtgcgctatacctaaagaggacctatttttaagcgaactacttgaataacaattcattgctatgatacaaacagtttcaagatactaacctttaaaaggtatgaaacattacttcttctgctgatcaacaatatgatgatctgttgc

SEQ ID NO: 45791 - DNA, 387 bp, Zea mays
  unsure (1)..(387): unsure at all n locations
tcttgctaatgtctacaacccttttagctgcttgtcgngcctatattattttttggaaagttagtatgtacataccccgtgaaaggtaaggatgaaggtaacacagtacataccttctccctgttctttacagattcttcaatgcttaattctttnttgccccctttctaaattntagaanagggtttttagaccactctaaagcttgacagtcgatcttcggacatggtcagcagaaactctgaaatcggggtctgtgcaagccctcacatgattgcaccagactttcagcaaaaccaaagtagtgcttcgggcacctatctaagcacaatagttctctcgtggcgagagaacacttttgaaagcacgtgtcttactaataaccca

SEQ ID NO: 45792 - DNA, 362 bp, Zea mays
  unsure (1)..(362): unsure at all n locations
agcttgccttcgctttagtctatcatccgcagtccaacggagtcttggtcgtgccaatgggaaaatcttcacagccatcaagaatatgctcctcgacgagaaaaagggcagatggaccgacttgctaccggaggcagtctgggcgctgaacacaaccgagtgcagggcgaccgggttcactcctttccgccttctatacggatcagaggcaatgaccccgcaagaaataaaacacgggtcttcgcgcacagctccgtcagccacccctgacgtggatgagccaacctccaaagatctcattgacggagaccgggtcttcgccctgcangccttatacaaataccaagcccagaccaaagcat

SEQ ID NO: 45793 - DNA, 308 bp, Zea mays
  unsure (1)..(308): unsure at all n locations
ttcatccttcttcttcacaaatagtgctggacatccccaaggcgaagtgcttgggctaatgaatcccttatacagcaactcttgcaactgcttcttcaactctgccaactcagcgggtggcattcggtagggcctttctggaaatggggccgttcccggttgcaactcgatggcgaattcaatatcccggtccggtggcattcctggcaatttatcangaaagacatctgcatactcacagaccactgngagtcttctcaggggtaactccgtcatatagaaagcacatgactgagaagaaccctgac

SEQ ID NO: 45794 - DNA, 340 bp, Zea mays
  unsure (1)..(340): unsure at all n locations
actaaaaactcaactgcagacgagtaaggccttaaaaaaactccctttctataggaaaagcncaagacacgaaaattatcaaaactcgatggggtaataaaaatgtttcaaacatgttttgcgcttaacaatactatgcgacgacatacccaattcaaccttatgaatcattctagtgactcgtactaaaatacaatatataaaactctaacgtttgattctaaaccactcagatcttatcaaagtaaactaaattatgacagattttgtcgatcaaaaattaggcgtatcacaatactactgcactatggcgattgatcgacaacgaccgccacgtctg

SEQ ID NO: 45795 - DNA, 344 bp, Zea mays
  unsure (1)..(344): unsure at all n locations
gctacctaagggcttatatcgagcggaggaggcgggtttctgtttgccatggnggatgtgctcgggcggctctaacgggtcgcggagaggtcgccggaactatgggcgagctcctatgagtttggcgcgggacaggggatgcaacggggaaaatggccaggcactggggtgggctttatatccgtggtgcgggcgtggtcacgggcggacgccgacgcctgggggttctcgcacaggcgtgctctgagcgcgcccccgagtgtcagcccgcgtcgaacacgtgtgtgtttgcttctgccatggatcaacggccgattggagcaccatagcgtgtagatcttggc

SEQ ID NO: 45796 - DNA, 261 bp, Zea mays
  unsure (1)..(261): unsure at all n locations
ttngattgttctatgtcgctaagtcattatggggctggactgctactaagtatgccactaagactagcatatgttgtaatgtggacgtgcacctgctgtgtgcctgactgcttgtgcttgcttgctgctgctattttattcccaccaatgtattgtgggtttaatttgatataccttacttgctggctgctgctgctattntatgccttacttngctgtttgctatgtaaatattcgtatgtgaatgtagcttgcagcttg

SEQ ID NO: 45797 - DNA, 427 bp, Zea mays
  unsure (1)..(427): unsure at all n locations
tgccagcttaatgcccctcctaaaagattgtctaactttgttaagggcaaagctcccatgcctctggataatgagggttacattntataccatgtcggttatcccgagcacaaaattaggagaattcattctaggaagtctcactctggctctaatcatgcttttatgtataagagtgaggcatctagttctaggcaatcaacccatgctaaattgcctaagaagaaaactcctattgcatcaaatgaacctaatatttcattaaagacttttgatacatcatatgttttaactaacaaatcaggcaaaatagttgccaaatatgttgggggcaaacacaagggatcaaatacttgtgtttgggtacccaaggtgcttgtttctaatggtgaaaggacccaataccgttgggtacctaagaacaagt

SEQ ID NO: 45798 - DNA, 328 bp, Zea mays
  unsure (1)..(328): unsure at all n locations
ttactcaagagaatcattactattattgaacggcgntgggagaaacagatggatcacccattgtatggggctgcaatgtatttgaacccaggaaagctgcatcctctcataagaaatgatgatgatgctactgttggtcagctaagaggttgcttccttgatgtgcttgcaagaatggtagatgatgaggaaactagagacaagatcaattctcaagcaatggattacgagtttcttagaggagcagctttttcaaataagatggccaaagataacctacaaactatgaccccacgtaagtgtttgggctgtactagttactactact

SEQ ID NO: 45799 - DNA, 196 bp, Zea mays
  unsure (1)..(196): unsure at all n locations
ttatcactaatggcttcaagtcagaaaggccgatcctactttatttactaaaactctcgcaaatgatttgtttgtatgccaaatttatgttgatgatataatatttgggtctactaacgaatctacatgtgagggaattagtaggatcatgacacananattcgagatgtctatgatggnggagtngaagtacttc

SEQ ID NO: 45800 - DNA, 403 bp, Zea mays
  unsure (1)..(403): unsure at all n locations
tggtgccaatggagaaacagaaatccttgaagtcttggttgtcttattgcttgccattggcaactgtgagttcagacgggactctaaagcggcaaacaatgttttgccagaagaatttctgggcggtcttcgatgttattgtggatacagccctcgcctcgatccatttggtaaaatactcgacagcgacgaaggtgaacttgaggttcccctgngccgtgggcaggggcccgacaatgtccaggccccagcgctgaagaggccatgtgtgggcgattagcttcgtgaattgcannggcttccgagcgtggagaaaattactggcaggcctcgcaggaccttgtgacccgatttgcggcgcaggtcatggcgggccagtagaaaccttgatggattacctttg

SEQ ID NO: 45801 - DNA, 324 bp, Zea mays
  unsure (1)..(324): unsure at all n locations
agctttatcaaatggacgtgaaagngcctttctctatggaccaatcaaggaagaggtctatgttgagcaacctcccggctttgaagatagtgagtaccctaaccatgtctataaactctctaaagcgctttatgggctcaagcaagccctaagagcattggatgaatgcctaagagattatcttatcgctaatggctttcaagtcggaaaggccgatcctactctctttactaaaacacttgcaaatgatttgtttgtatgccacaattatgttgatgacatcatatttgggtctactaacgaatctacatgtgaagagttaat

SEQ ID NO: 45802 - DNA, 330 bp, Zea mays
  unsure (1)..(330): unsure at all n locations
tctgctattaggacctatgaaactaagctttggtggggattgaccttttaggccccctcttctattatgttggtcgattagtggtctcctacgcccgacgacgaagctaccaggagcaacaggaagcaggagtagtatagtgtagtagtagaaatagtagtgatgtataatagggagtgtaatgctgttgtaaaattcgagtctgtaacattactctttttagtaatgtaaaatggatggttttctttggcatgtcatattgttttcaaatgtttgttgccacagatgccttcccggactcgtgctcangacggggctagtacctcccgt

SEQ ID NO: 45803 - DNA, 471 bp, Zea mays
  unsure (1)..(471): unsure at all n locations
gcgaatcattgaccttcggctntgtcatcctatacataacttagcagtataaggtgaatagaaatctcgggagaaggtatgtaacaatacaagtttaatgccggcttaagatgacttcgagcttcatcaccagctaagttccgccaacccttcgtccaaatttgagttatgaatctatttccaatgcttcgggccaggctggggatgtcagttaaatccgctagtgataggccgaagttgggcctgttcacaatttttccgtgcgtgcaaccaacattcataaaagctacagctgtgcagcgagaagctagcagggcacataagtcaccatgcacaactataacttcgtcaagcgcatcaacttcgccctcaatatgttcgaaggtgctggactggtcttcaaccgaaggttcaaaatttcagagatggctccaactgagtngaagacctgcttcagtcgntgcacacacc

SEQ ID NO: 45804 - DNA, 413 bp, Zea mays
  unsure (1)..(413): unsure at all n locations
tgatacagagtcgaaggtggtgagcangaaagctttcgcgttcagcaaagagtggaaccgacttanagatgaaaaggctattcagacctcgatagattactatatagttattatcaaatgtaaagggcatgaatgtaattttgtaagggctgtgtcccgtgtctataaataggtgaacagtatccctgtactgttcacgctgacttggcattcgctttatgcgtcacgcttgtactgtcatttccttccggttgaaggtacacttatagttcaataatatttttgtttatgttcaataataaatgaatgttcatgtgttcttttatattctttatantttatccctccgcattggttgatgaaattatgaaggtatgtccttcataaccttcngtccgcagtcattatatcct

SEQ ID NO: 45805 - DNA, 280 bp, Zea mays
  unsure (1)..(280): unsure at all n locations
tcngcaccaaaggcttcgatttgcacttcgggaagttcgacaattttcttcggagtagtgcttggagactttattgtcttcaatacatccagtacattaaccatccttttccttttgggggtcaatgctggacccttcntgcttntttgtacttcaactnttgctgaagggcttaaaaattcagatgtccttgttctttagcccttgggtcttctatnttctctatctccggcattatgaccggctcttcaatattcggcaggggagtcggctcccttgc

SEQ ID NO: 45806 - DNA, 451 bp, Zea mays
  unsure (1)..(451): unsure at all n locations
tcatttgcanagaataatcgatgctcaaaatgattatctgggtatgaagcacatacgagagaagataagggctggagtagcccaatgtttcaaggaagacgatcaaggtgtgatatggtttaaaaaccgcatagtagtgccaaagaatgaagagctccgccagcaaattcttgatgaagcacatcttagtcgttattctattcatcccggaagcactaagatgtatcaagacttatagcaacattattggtggacgaagatgaaaatcgaaattgcacgctatgtggctaagtgtgacacttgcagacgtgtcaaggccatacacatganaactgctggtccattacaatctttgtcaatctcaacgtggaaatgggaagacatcagtatggactttattgtgggacttgccaggacgataaaagggtatgactctatttggttataattg

SEQ ID NO: 45807 - DNA, 266 bp, Zea mays
  unsure (1)..(266): unsure at all n locations
gttatcatgaattgaccgtttctggatgaaggcgttctgagcaantgatacgatctcgttcattctcagtgcaagcctgtttgccaaaatttttgttatgattttcatgaagctattgataagactgattggtctaaattagtctattgtgtcagagacctctctcttgggtagaagaatgatgtttgcctcattaactangtgcaagctcctgcattttaagtgataaaagtcgttaattgctttggaaaggtcgtctttaccac

SEQ ID NO: 45808 - DNA, 334 bp, Zea mays
  unsure (1)..(334): unsure at all n locations
tggagaagcatcgtcngaggcaggcgatggatgggctctttattgtgtcatctccggagacacctgacgacgacgatgatgatgatgacgacgaagacgacgacatggcggcccgacttggcctcaacccggacctgatgctgggccaggggtcactgagctagcctncaagtgggctggcaccatcagtgcctatggccgggacaccaaggtcccaatccgaagagcggaggcaagtcgagggggtacttgaccccttggccgagacagttgtcgtgactccggggggtcaagccgatcccgctgtcccccaagagcatgtgcccgtgctggc

SEQ ID NO: 45809 - DNA, 270 bp, Zea mays
  unsure (1)..(270): unsure at all n locations
ctctatcaaaatctacctaggatagctgaccttctaacactcccttanatgctactgaatcatcacttcttttaaagacagtgacacctacatcagtaaatagacagatgtagcccattttgcataattgagaaacagaaagcaaatcgtaatctaaagaatctacaaaagaaacattggaaattgaatggtcaggagatatagcatatttacccaatcctttgaccaacccttggttccatccccaatgtgataactcgttggggatct

SEQ ID NO: 45810 - DNA, 345 bp, Zea mays
  unsure (1)..(345): unsure at all n locations
tctcatgtccggaataatctacgatattctggatgccgtttagtattttgtagatgaacttatgcacctgtgaaatgatcaactgggcaaactggttagtccacaaggtttgtgatggtcgccaaacaccaaaatcgattataggaaatgttgagactatttccctttcaatctccccctttttggtgattgatgccaacacaaaccanagcaaatacaaagtgtagaaatgtaactagtttgcattttgacagatgtgcataagttattttgaaatgaaagcatntctaagcatataagtttgatttgatatatctaacattttggaccacatttgcaccactc

SEQ ID NO: 45811 - DNA, 309 bp, Zea mays
agaaacaaaaataaattcacaccttctcaaaagcctaaccacgccttcacaaaagtacatccaggtaatgatcaacccacttacattagaagtgagtgaatctttgaaggggcactgataagtatgtcctattaatggctgatgtaacaagatatagacttgtttacttctcaagaaggacactattaatttgcccctttaaacaaaagcataggtaaaaaaaattttatacctgtgcagcacaaaagaaaaaaagacttaaattgaaacccttctcactccaaaaggactaagcaaatgccgtggaaa

SEQ ID NO: 45812 - DNA, 437 bp, Zea mays
  unsure (1)..(437): unsure at all n locations
tgtcgaccaatgagcaacaacaatgcanagactacatatgttatgttattgaggaaatcttgccagaattcacggtggatcgccaccagaaggttgtcaaatatggagagatcgaggtcgcatctcttctttcttcgcttcaaatccccaatgtgagtaaacccgacaacatccaatatattaaatagtatgtagatcagcaacagaatcaaatgaaacaacatattagagagttagaagaatcaattagaaaattaacacgttcgttggagaaatctgttgctcctagctntccatcattngaatctagtaacaagatgtctatgtctaatacatcggcaacaaatggngattcatggccctaaccattatatggtatgctaatgaactcatatccagngcaaataccaccatagtcatccctacttggcagatcg

SEQ ID NO: 45813 - DNA, 363 bp, Zea mays
attcttgatctcttgaagaaggcattgggcatgggctttctttatgcgatcatcccccacacatgcttttcaccacctcgcatgcctcattaaatgtcttcttactcccagcatcgctaatatctccctaagtagggatcagaacggatggaaacaattggtaaacactcaaaccatttctgttttcatttttctaatcgaaaatggtaactttagaaacagaaacaatatcaatatttcggaaacatggataacaaaaattcactacggaacatacactagtaacggtcgaaatctaaaatatgtttggtaatcatatcaatatagaaatgtctcaatataaaaagctcacagtatgacaag

SEQ ID NO: 45814 - DNA, 519 bp, Zea mays
  unsure (1)..(519): unsure at all n locations
actaagcttcatcattgctgggcgaattgatcaagcggagnatttgcatcgtcatgtgcacntttgacaagcctgttcatgctttcgctacgctgtgtagacaacattagaccacaataatgatttttgaaaaaagcaggcacccaatccttacgtattccatacagcttatcgagagtaatgttatcgtgcagatgaaaatcttcaagtagcattgaccatgcagtctcaaactccaactcantcaaaggatgatgtattatagattgaaaccgtgtcttatagtccatttcctcaaatcttgcatacaactcgtttagaaaaggcatatacctattttgcacatgtcatagacataaacgatgtattgtgtgtgggaaaaccctctcgagggctactggcattgcaggatcttgatctgcanacatatatgacannaatgtacgaatcttattccatgttatataaagaaaataatatcacaattaagccatattctatgtatatacatttaattca

SEQ ID NO: 45815 - DNA, 201 bp, Zea mays
ccaacccgggtaaggtaatctctccctaactatcctaattacttggccaagggacgtccattccacccttgtggtagcactgctttcccgagtggttctccatgttccaattaataatatgatcttatcatgaacaataattaaacaacaacataattgaaacatgatcataatataacactaagtttccaaaccacgtaa

SEQ ID NO: 45816 - DNA, 360 bp, Zea mays
  unsure (1)..(360): unsure at all n locations
tcagtcttgcatttgctcanaatgttagttttttatggaagcagtcttgcctgttgcacgtctgtcgcctacttgcctccttactttgatgtatcacgctgttaatttgttggatttttatgttctgatgaaagtgacatgtatactactgataacctacggatgttagaagattagcattgagttctcataacaattatgtttttgggctctggacttgtaattccttgaagagagagaacacaattgtcactgctacattacagacttatacatcataaaaaaatgtctctgctaccttggctcctgcagcacttggacaataagaaccggagatgtgttattntaatgtcacggact

SEQ ID NO: 45817 - DNA, 165 bp, Zea mays
  unsure (1)..(165): unsure at all n locations
cagaagaataaagcagagcttttttatgtttaatagaatgggagttatacaagcgcggggtctgttccccattactcaagtgcttatccagatccgaaggtatagagttaatgaaggacatacatgcaggtctgtgtggctcacacattggatctangcccttgc

SEQ ID NO: 45818 - DNA, 319 bp, Zea mays
  unsure (1)..(319): unsure at all n locations
tgagaccttcgtccgaagttcattaaatccttatggagataatgcttcgacggacgaaggacattgatatttaacattttatgttgccttgttcttaattcaaagcatttgagaacagtccccaacaccggctatagtggggtgaatagacggtttttcaactaaaaacaaggacactagagaaatttaatcaaaacaacaagaaatataaattttctagctttgatagactaacaaaatatgatgagcaattnttatcaatactacaaatgatagacaatacacaaatcactaactacttgcaagtaatgagtaaaga

SEQ ID NO: 45819 - DNA, 300 bp, Zea mays
  unsure (1)..(300): unsure at all n locations
ctctatttgggtcttgctttacccttcatatcttgtttanggntaagtatcctatactaggatcttatttgcaaaatgccataacaatacaacttgtttgaaaattttacctagtgaatgcatnctacgtgtatcaaacatataaatgctaatgctgatgatgtcatgctcaagttttagtaacagtaacaccagggatgttacatacaagaaccaaagattgtctacaatatatacaaagctaaagtgcatgttcgagaatataaaaagccaatgaaagaaaaatcatctttgacagat

SEQ ID NO: 45820 - DNA, 298 bp, Zea mays
  unsure (1)..(298): unsure at all n locations
atagaagcaagagctttttatatgtcataatagaaggggaattatacaagcgggggggtctattccccgttactcaagtgtttatccacaaccgaaggcatataattgatgaaggaaatacacgcaggcctgtgccgatctcacattggatctangcctttgctcggaaaagtttttcctcaaggattttattggcccaaagcagcttccgatgcagcagatttaggtcataagtgcgaaagttgtcagaaatgtgcaagagatcaaaaacaaccttcgtcattaactcaattaatac

SEQ ID NO: 45821 - DNA, 478 bp, Zea mays
  unsure (1)..(478): unsure at all n locations
tatgaagattcttcatcccaacatgggctagtcggtggtgtcatagccaacccatgttagtcttagcaattaagcatgtgtcgagttcagctctatcaaaatctactaagtatagctgaccctctaacacacccttaaatgctattgaatcatcacttcttctaaaaacagtgacacctacatcagtaaagagatagttgtagcccattttgcataattgagatacggaaagcaaattgtaatctaaagaatctacaagaaaaacattggaaatagaatggtcaggagatatagcaattttacccaatcctttgaccaaaccttggtttccatccncgaaagtgatccctcgntggggatcttgngttttctcgtaggaggagaacatcttcttctcccctgtcatgtggntngtgcacccgctgtcgattatccaactngagcccccggatgcataaacctacannnacaagttagt

SEQ ID NO: 45822 - DNA, 491 bp, Zea mays
  unsure (1)..(491): unsure at all n locations
tagtcgaaggcgccttcggtatggtagccgggtcttcattcttctgtacaggaggagtaggctcctttggtgcagcagctgaagaagtttccccgccaaattcaggcactgtggccggttcaatgtagcgcggtcggtgggtaaggaccttcagtttttcctcttcggtgcaggctcgcttggagcagctgaagcagcgacttttccagaagttgtaccctttcttttctgcccccgtggcgggtagcggtagtcagggtacacaaatctaatagcatcaaaaactctatntagccttttctttnttcggctcccgaaggctgcagataatgcattatcttcagacttggagtatgctccaagtagctcatcactagtactntcaacacacttcaaccagtcatcatctgtgtcgacaaactgggtctcanatctgaaggtatattttagtcaaaccagaccaccttcgntagtggtagggatggtttcct

SEQ ID NO: 45823 - DNA, 373 bp, Zea mays
  unsure (1)..(373): unsure at all n locations
ntaagtgggacatggactcccataggtaagacatcctgttttaagacgcgaccacttgagcccttgaccctttacgaacaactggcaagacctgtctgaaatctccaccgaagacaatggttttaccaccaaatggtagtgcggggcgacccattatatcgcgcatgctattgtccagtgcctccacgacttgtctcttagtcatagaagcctcgtcccagataatgagagatgctttccgtagcaactctgctgttccactctgcttcgtgaagctacatacagcgccatcgtcaatagtgagtggtatctttgagcgtgaatgggcggttcttctcangcatnatggaagccgcaacgccagatgtagctg

SEQ ID NO: 45824 - DNA, 278 bp, Zea mays
  unsure (1)..(278): unsure at all n locations
ttatcctttgattcacgcaacaggacctgcatgatttataccgggaagctaattcatgtgtccggaccccctggatcacaactccaattactatggcacccgtcacagagtggtggagcgtgtangcttatggtacnggaccaggacaagcggctacacagctccggaccaccccaggggacgtgtgttcgttctctataaccggaccccaggttgctgggcccacagaactatagttccaaatactatggtacccgtcacagagtggtggagcgtgc

SEQ ID NO: 45825 - DNA, 423 bp, Zea mays
  unsure (1)..(423): unsure at all n locations
gctattacggacctatgaaactcaagctgggccgatggaaagcaaagccctgaattctgctataaactatntgccattgtcgattgtgagctcgacgggactccgaatcggcaaacaatgttttgccagaagaacttctggacagtcttcgatgttattatggatactgccctggcctcgatccacttggtaaaatattcgacgacgacaaaggtgaacttgaggttcccttgagccatangtagtggcccaacaatatccagcccccagcattgaagtggccatgtgtgggcaataagcttggtgaactgcgaagggttgcccgagcagggagaaaacttctggcaagcttcacacgacctcgtgactcgattcacgacgcagattattgcaggccaataaaatccttgacagatcaccttg

SEQ ID NO: 45826 - DNA, 345 bp, Zea mays
  unsure (1)..(345): unsure at all n locations
agcatcctntgtggtggtctagagaccatgttacagctgtttgaactatagagtctgaatctgtccaaatctggacagcaatgtttgtttgtattaactgacttcgatacacattgaattaacctgngatgtttataaataaattatagacaattctactagctttctaaaaagtctagaatcaccggatttgaatgtctgaaactccagttatgaatttttgaagtaagtagtcgaattctgtccaaatctggacagaatttacgtttagcattgtttaccattctaagtgtcaagtctcactgtgatgataatacanaagttgtagatgacttcttaaacttt

SEQ ID NO: 45827 - DNA, 217 bp, Zea mays
  unsure (1)..(217): unsure at all n locations
actgctatgntgntatgctatatggtcttannaaacgcctgcctacatttgttctatctatgagttagactntcggggacctgattanggacaaagtggtagtctacattgatgacatcgtggtcaagaactaagagagggtcgaccctagtggaatacttaaccctggtcttcgacaagcttggggcaacccgcacgaagctgaacccagacaaat

SEQ ID NO: 45828 - DNA, 415 bp, Zea mays
tgggctaccaccatgcagccggagcgcggatgcgatcccgctttatctttcatggaagtacaggagggagaccccgctcggataccctcgggggctgggtcatagtttgcactgcccacttgagtcggatcatccccggcagcaccctcgggggctgggcagtggcttgcactttccacccgaaccaagtcatcctcggcaacatcctcgggggctgggcaagtgtcaacaccatccttggggtccaagttctctgtggtagccacctctaaggctgatgggccctcagttacttccatgggaccgggacgatccaaatcagtctcctgaccctcgagatcgcgctctaaggtcgacgaggcacgagatgagcctcacccagcatcaagcacatcagcgcaaacctacatcacac

SEQ ID NO: 45829 - DNA, 287 bp, Zea mays
  unsure (1)..(287): unsure at all n locations
atagcaatgaacgctgttgttactttttacctactcgnctggttatatagcgccgcaggcaagaaggcgaagcgccagaatctttacaccaagcgggcacccgctcgcactcactgcatggtggaccgcagagaccgaacagttactctgcaaggtggggccgctatacgctgggagattgaatcttttctcgacaacgagctcacggaaggtgttgtttagaccctcggcgctccgaagcttaagagactttcttcacggatcaagctcgttacaaaaaacgatct

SEQ ID NO: 45830 - DNA, 401 bp, Zea mays
  unsure (1)..(401): unsure at all n locations
tgacattgtcttcctggtggaagccaatgccatccttaatgttgttcatctcccactataaagcatgctacgagcaaatttaaaatnttcattctctagttcatgctcggcaattttagcatctagtttagctatatgatcattttgttgtttaatcatagcaatctgatcatgaatagcatcaatattaacatctctacatctagtgcanatagaaacatgataaacattagatgtagatggtttgcaacatttaattcatcaatcttagcatgtaacatggcattttcatttctaagattggaaatgacatcattgcaaacattcaaatctttagcctcangaaataatcttgcattttcatctctaaggctagaaagtgtaccgtcaatttatcaatc

SEQ ID NO: 45831 - DNA, 430 bp, Zea mays
atgccagcttatacttctggaattttagaaactaatttattatttcaaaaatcaccaaactttttatgtaatctttaaatattatttaaaagcctgggtaaagtttggcatgatttggaccatgtttggtacctaaaaccaaaaaccctagtctcctgctctatgaacttcactatagactccaaaaaccctagtttcctggagatccgtgaggagaattatattccagacctaagataatatacttttattatctttgcattttcatgagcattacatgagcattcatgattataaatggctatatagaaaacgaagaagatatagaagttgaagaaagcaggactacaccaccaccttgagaaccacaggccggaaactacttttactttgacatctgtggagcaaagcctgactcacctatttacac

SEQ ID NO: 45832 - DNA, 491 bp, Zea mays
  unsure (1)..(491): unsure at all n locations
tctcctgtccggaataatctacggtattccggacagtcgatttattatagttatagatngaaccttggcacctgtagaacatataatctagagcaaactagttagtccaataattngtgttgggaaattcaaccaccaaaattaattagaaactaggtgtaagcctaattccctttcagctactatgattaatattgttggtcacttgttttcgatcactatacacaataaanaataaggcaacacaatattaaagagatagataaccttcatcatgaaggagttatcccttcggngcaactcctttagttacgaaggtaggtgttaagtggataaatgaacatgcaatgaatataaaagaagttgaatatgataattcaatcaagatatcttcatgatatatntgtccttttgtaaataactntannaatgaccttcgacactctgagaaagaagtacaatgaagatgtcgtagagaaagaatacacatc

SEQ ID NO: 45833 - DNA, 347 bp, Zea mays
agcgatgtagcgggattgccatacgcactctgcaagcctgttgcggttttttcactcatacactgaacagtgaccctcccaaccaagtcaggatacattgtccacacatctttcacatggctcacgtggttacaccacatggggtcattcttcttctcagcacggaagagtcccaaggggtgcatcaccatctccaagggatggtatccacaaaaggtgtatggtaaccggcggaagtaagcacttcccacaagatggaaggaaagccatcgtgagaaaggaagtcatatctgatacgagtgtctcctacactggcgagggtgggtgaatacatctgcggaagggta

SEQ ID NO: 45834 - DNA, 399 bp, Zea mays
gagactctatatgcagaaatgcttactaacattgtattctctaaaacccaggtgtattatcaagctaagtcattacctgcatctagagttctttctatcctagttcaatcaataggcctatgctagcccgcttttataaccccttcactgtactggattgctacatgtagggcagcgaccaagtcttcatatccgagaagtaacggcgatccgaatcgatcgatacccagctggggatctccaaccacacgacatatgtagcacttaacccatgcatatgtgagctcgccaccggttttctcaagaccagaccgggttcacacataccgagagcacagatacaccaccgttcagcctgttgccacaaagagtacacactactcttgccatctctccact

SEQ ID NO: 45835 - DNA, 374 bp, Zea mays
  unsure (1)..(374): unsure at all n locations
actagcttataatggaggaaagtgcttcctaatgtccgttcttgaagaggnctatgttgagcaacctcccggctttgaagatagagagtaccctaatcatgtntacaaactctctaaggcgctttatgggctcaagcaagccccaagagcatggtatgaatgcctaacagatttccttatcaataatggcttcaaagtcggtaaagccgatcctacactctttactaaaaccattgcaaatgatttgttgtatgccaaatttacgttgatgatatcatatctgggtctactaacaaatctacttgtgaagagtttagtaggataatgattcaaaaattcgagatgtctatgatggcggagttgaagtacttcct

SEQ ID NO: 45836 - DNA, 364 bp, Zea mays
  unsure (1)..(364): unsure at all n locations
tagtgctattattactccaccccatttctctatttctctatcctgtacctgctgaattagcctgttntacctacctgaaaaatcatcctagtaatttttcatgtgaggatggtgcgggctgagcttgaagttaaactattgatattcaaccaaaagagcaggacttgtgtgcttgacagtgttcgtattgcatcttctaagctgccttaaatagattggagttccaattgctatgagtcatgagttttgacttacttatccttanggcttgtttggaaacacagcaatccccttaatccatacagtttggaagggcttgactgttgtggtggaaaagtagtccgttttccactccaattatgga

SEQ ID NO: 45837 - DNA, 350 bp, Zea mays
  unsure (1)..(350): unsure at all n locations
tgtgaacagtacaagttcaggagggaaaaagcagcttctgttgatcattctaagcccatgctgctgtgtgaggatatagcagagcagaaggtgctattgggctcgcaattatctgaagatcaagagaaaaccttgataaggtttttattcaacaataaagatgtttttgcatggtcagccaatgatctttgtggagtgaatcgggatgttattgaacattcgctcaatattgacccatccttcagaccccgcaagcagaggcttcggaaaatgtctgatgacaaggccgaaggggctcgcaacgaagtataaagactcctaagtgcangagttatcagagaagtgaagta

SEQ ID NO: 45838 - DNA, 411 bp, Zea mays
  unsure (1)..(411): unsure at all n locations
tggtgaattggtggtatttggatataggagcctcctgatatattataaaataccaaccagactcttctaaaatccagagtcgcgtaggatgcataagtagagcaagttcttaaaggaaattgtgcttgtccaataaaaaaagtgtgctgatccagttctttccatacagccacacacatgcactgtggacccaaaaacataggataaagttcctcaccctctttgtccctgccatgatctttcccccctttggaatttaatccatgtcccaagttgcgatagaattatagactggggggcaacttggccccctgctgatgcttcctctacagccaaggcccaagagcaccatatctggactaaaccctactgtctttgaataactcaaaccgatgatctgaacanagtact

SEQ ID NO: 45839 - DNA, 429 bp, Zea mays
  unsure (1)..(429): unsure at all n locations
tggcttgaccacacgtncacggtcacatccataccacattttgtggatcaatgattcacgccaggttaaggtaacacacatggtacgagtgcatttctccatttgtatgtattctgattatgcggatcgcgatgtagtacctatggaagcttgttctcttttgttgggtagaccttgggaatatgatactgatgcatgtcaccatggtaggagtaatacatacacttttaggcataaagataaaaacattactntgctaccttcgactcttgctgaaattgtacaagctgataaagatagagctgcaaatacccataatgaaccaactaatgagacagaaattcagcaacaaatttaaattgaaagctcatgtcatgcttgctactaaatctgatcttcttgaaactcatgctactgatgcttggtgct

SEQ ID NO: 45840 - DNA, 376 bp, Zea mays
actcagcttagataataatagaagccttgggtaaagttggtatgatttggacaatgtttggggcctaaaccccaaaaccctaatcttctagtgatgcctgccctaggaacttcagttctaactccaaaaaccttagtttcctggagttccgtgaaggagaattatattcaagatctaagataatatacttttattatctttgcattttcataagcattacatgagcattcatgattatatatatgtgatatatagaaaacgaagaagaagtagaagttgaagaagcaagagctacaccagcacctgaagaaccaccggtcgggaactgcttttattttgacatctgtggagcagagcccgactcacctataacaca

SEQ ID NO: 45841 - DNA, 309 bp, Zea mays
gccattctttttgtcggcggtgatgatatatgtgagctgttgaagaccacaaattaatatttaataatagtcaatgctaaaggcacactttaatgctacggtgtactaatactttggtaacataccgaaagttcaagtgtcaattcaattaacttaaataggtggaccattggtgcatcaattgagaagcttggaaaatgatgaaggatttgtacgcgcgcgccgccggccgggccaaacgcctagagtgatgaccgtccattactgtcgtacgtcactgaccgcttagctattaactgacgtcactga

SEQ ID NO: 45842 - DNA, 290 bp, Zea mays
tatcatcatttgggttgggaatatggatagttctgacatacctacggggagtcttccttcgaagccctagccatcttagatacctgtaagctcctcccttctcgcgaaaatattgcactagatgtctcatctctttgagagctctcaagttgtggggttcttgaaaatgtatgtcgccttcaaccctgacatgttatacactatagaccttggccgcttgatcaaatctcacgtcctcagctctatgctgctctaataactgcagatactcttgacctgactgatacttc

SEQ ID NO: 45843 - DNA, 347 bp, Zea mays
  unsure (1)..(347): unsure at all n locations
agcttcagctncatctatattatttatgttcttctaatccatccaactccctttagctctcctggcagcttcttgactttcgtgtaccacaatatgcccttgttccgaaggtatcttcatgcaaagatatgttggatgaagtattgcttcaaaggcaataagcgtcccccgaccaatgattgcattgtatgggtactccatatcaacaatgtcaaagacaacctcgtctgttcttgtgttgtgaacatatccgaaggtaacctgcattgttatcttgcccagtgccacaatctgtcttcctccaagccacaaaaggatgtgttgagtatgtatcttgcctctagctc

SEQ ID NO: 45844 - DNA, 451 bp, Zea mays
  unsure (1)..(451): unsure at all n locations
ntagcagtgcgagttctggatcagcgaagttctgttcttttgtcatattataaacgggatggactagctgtggatcaaagaaggtagcagtgaatctggacaagaaagcaccaaaagatgttcgaggaatcaagagtttcaatggaatggctggttattattgacgtttcactgaaggtttctccaagattgccagaccaatgacagccttgctagcaaagaaggttgaggtcaagtggaccccaacgtgccaagaatcatttgagatgttgaagcagaagttgacaacagcaccggtattggttctgctagatgttcacaagccattctcagtatattgtcatgcttcatacaatggactgtgatgtgtngtaatgtangaanggaaagtagtggcatactcatcctgacagttgaagttcatgagaagaataccccactcatgatctgg

SEQ ID NO: 45845 - DNA, 490 bp, Zea mays
  unsure (1)..(490): unsure at all n locations
agaacacattntaggactaacaaatgttcattntgagaaagacaggtattgtagttcttgccaggcaggaaagcaaagtggagcccatcatccacacaagaacatcatgacgaccgacaggccgcttgagctactccacatggatctattcggcccgattgcttacataagcatcggcgggagtaagtattgtcttgtaatagtggatgattattctcgcttcacttgggtattctttntacaggaaaaatctcaaacccaagagaccttatagggattcttgagacgggctcaaaatgagttcgccttaaggatcaagaaaataagaagcgacaacgggacggagttcaagaactctcanattgaagactttcttgaggaggagggcattaagcatgagttctcttcttcctacaccccacagcanaatggtgtagtggagagaaagaatcgaaccctattggatatggcaagaaccatgcttgatgag

SEQ ID NO: 45846 - DNA, 487 bp, Zea mays
  unsure (1)..(487): unsure at all n locations
catgcaagcttggacagtattctatgatgggtcatggtgaaccttcngcgcaggtgcagctgctattctaatttcaccatccaagggcaaaacctgttatgcagccaggctggagttcaactgcacaaataacattgcagaatacaaagcccttctcttggggcttcgaaagctcaaggcaatgggaataagaagggtagtcctcaattctgtttcacaggttatcacaggccatatncaataaagcagcaaagcaagagatccgaagcttgagaaatatctagatacagtccgaagaatagaagcctctttcaaaggcttctcagtaaagaatatcccaagaggagaaaatgagcatgcagatntattagctaagttagtgtcacaggggctcccactaccttcagaagtattctttaaaacaataaaagcaccttcagtcgaactcatggatcgagccgtgcttacaatctcaccagtgcacagt

SEQ ID NO: 45847 - DNA, 391 bp, Zea mays
  unsure (1)..(391): unsure at all n locations
taaggctatgcatagattactgcccactcaatgcggtgactatcatgaacaagtatcctttacctcgtattgatgttctttntgatcaattggtcggagctaaagtgttntccaagatagaccttcgctccggctatcatcaaatcaagatacgagcaagtgatattccgaagactgccttctcaaccagatatgggctgtatgagtatttagtgatgtcatttgggctgactaatgtgccatcatacttcatgtatctgatgaattctgtcttcatgcctgaactggacaagttcgtggtgggtttcatcgatgatatcttggtgtactcacagaacaaagaagagcatgcgggtcatttgcatgtagtgcttcaacgtcttcaagaaca

SEQ ID NO: 45848 - DNA, 412 bp, Zea mays
  unsure (1)..(412): unsure at all n locations
tgtgaaggttcttcatccncacatgtgctaagcggcgatgttctattcagnccatgctagtcttagcaattaagcatgcatctagaccggcctcatcttttgcaaaatcaactaaataatagttgccgtctaatacacccttaaaagctaatgaaccatcacttcttctaaagacagacacatctatatttgtgaatagacaattatatcccatattacataattgacttacggataacaaattatatccaagagactctactaagaatacattggaaatagagtgctcatttgagattgcaatcttgcctaaacctttcaccttgccttggttcccatcaccgaatatagttgagtcttggggatccttgntcttgacgtangaagagaacatcctcttctnccccgtcat

SEQ ID NO: 45849 - DNA, 371 bp, Zea mays
  unsure (1)..(371): unsure at all n locations
gcttctaaagggagaacacattntanggctattttatgttcattntgagaaagacagggtttgtagcacatgtcaagtaggaaagcaagttggagccaaccatccacacaagaacatcatgatgaccgacaggccgcttgaactactccacatagatctattcggtccgatagcttacataagcatcagcgggagtaagtattgtcttgtaattgtggatgattattctcgcttcacttgggtattctntttgcaggaaaaatctcatacccaagagactctaaagggattcttgagacgggctcaaaatgagttcgggataacgatcaagaaaataagaagcgacaacgggacggagttcaagaactctc

SEQ ID NO: 45850 - DNA, 468 bp, Zea mays
  unsure (1)..(468): unsure at all n locations
nggtcgttcggtgtggcctacaatattttatttctatggattgtagttgtagtagtctgtaggcagccgaacaaactatcaccgagccttcgtggcacctagctcatgacgtcgagctcgcaaaanatacaataataaccatttaaaatntaatatcattctattgtttcatgtcttaacaataggtatcaccagatntcagtcgagcctaatacacgccgcaacacatggtgtggccgcgaagagcggcccacaagagcagaatggtgtttcccgcgcgagaacatctcgagatagtcagccataaaattagcgctaataangtagcttaagaatagaagaataaagttgtctggtacactagggttggagagtcccctggacggtaaatatgtattcgtcattatggtgatcgtaaaccatcacaccgtttgcgacaacaaagttttgcgcatcgccgcaactatt

SEQ ID NO: 45851 - DNA, 477 bp, Zea mays
  unsure (1)..(477): unsure at all n locations
tgacatttgcttcctgttggaaaccaatgccatccttaatgccagggtgtctcccactatagagcatgcttctagcaaatttaaacttttcattntcaatttcatgctcattgattntagcagttaattgagctatatgatcattttgttggttaattaaagcaaggtgataatttatagcatcaatattaacatctctacatctagtacaaatagaaacatgttcgacagtagatgtagagggtttgcaagtttttagttcctctatcttagcatataaaatgacattctcatttctaagacatgaaatagaatcattgcanacatttanatatttagccttcgaaattaaactatcattttcagntctaaggctaaaaaattattcatttcatntatcaatcttagcattcannactagcatttcatttctaagatttgtaatgaatcatggcaatgctaagctcttaatcagtc

SEQ ID NO: 45852 - DNA, 322 bp, Zea mays
tcctattggcaaaatattaatacaatacaacatgtttgaaatatttgcctagagaatgcactctacgtgtgtcatacatatgcaatgccaatgcttatgatgccatgctcacgttttagttacagttacaccaggggtgttacaagtttgatgagcccaacgatgagtggttgagcaatattgaggcaaccagagatgaattgcttgggcctatacaagagccgaagatgatgtaatgaccttggccttccaggccgaagcaagaaaagattgaatagatttttgactcttcggttcgataccctgatatagctatcctcac

SEQ ID NO: 45853 - DNA, 359 bp, Zea mays
  unsure (1)..(359): unsure at all n locations
nttcttgaagttatntcttgactatatccatggttttctttttgtttcttggacctgatacaaccatgaggctaaaactatgtgcaagtaattgtccatccatcaacactcatgtgtttcttcttggagctgggcatccttgtgatgtttcctttttggaatactttgcaattcatcaacttacaatgcattaggtatgagagactctgctattagttgttcacggggagacatctgtctttttatgctagaaaataaaatctggttcttctgttttgtagtttcactttcgttngtactgatctagcgacaaggaatttcatagtactcacaacaacaacatgttcaaggtcacttgt

SEQ ID NO: 45854 - DNA, 502 bp, Zea mays
  unsure (1)..(502): unsure at all n locations
gtgggcacgcatctgaagttcagttcagcttatcatccgcttatcttatggtcagaccgaaaggaccaaccaaattcttgatgacatgttgagagcctgtgcgttgcaagatcagtccggatgggataagagattgccttatgcagagtcttcctataacaacagttaccaggccagtttgaagatgtcaccatttcacgcgctctatggaagggagtgtagaactccngtgcaatgggatcagcctggagaaaagcaagtgtttgggccagacattttgcttgaagccgaagagaacatcaagatggtccgagagaatctgaagatagcgcagtcgacgcagcgaagctatgcagacacaagaagaagagagctgagtttcgaagtcggagactttgtctatctgaaagtgtcaccgatcataggagtcagaagattcggagtgaaaggcaagctagcacctcgctacatcggtccgtatcagattcttcaagacgtggag

SEQ ID NO: 45855 - DNA, 445 bp, Zea mays
  unsure (1)..(445): unsure at all n locations
atgcaagcttgtgaagattcttcaaccctacatgtgctattcggcgatgccagagccagcccatgttagtcttagcaattaagcaagtgtcgagttcagctctattgaaatcaactaagtatagctgaccctctaacaactccttaaatgctactgaatcatcacattcttctaaagacagtgacacctacataagtaaatagacagttgtagcccaatttgcataattgagatacggaaagcaaatggtaatctaaagaatctacaagaaaaacatttganatggaatggtcaggtgtgagagcacctagaggggggggtgaataggtgatcctgtaacacttaaaaacttaagccacanaacttggttaatcgttagcacaataattgccagtggctagagaggagtcaaacacactaaccacacgagatcatacacagagat

SEQ ID NO: 45856 - DNA, 410 bp, Zea mays
  unsure (1)..(410): unsure at all n locations
tcngccttcggaggccgaaggttgaaatgaatgaagctgtttaagaatgccagagagccttcagcgttatctggtcttttattggaactagagatttagtacaagagcacattgccttcanggtatggccgctcgcggagaaatgggaaatgccgcaggaaaccataaaggaggtcgacgaaggtggacttatcangctgaagtacacttttaagttcggagataaattcgttgagccagatgatgactggttaaaaagtattgaaaatttaagtgatgaactgcttgntgcttattcgaaggccgaagatactgcaatgtcagcagccttcggaggccgaaaaaagaagaggcttgaatcggtattttgatgcaatcggttngtctaccctgactatngctatcccatt

SEQ ID NO: 45857 - DNA, 306 bp, Zea mays
cgtataaaacatattggactaagatgcatcgggacactgaatatctcgccattggtgacacggatagcaacaacctttttcttccaccccatttttagctactcagcaggcgctgctctgatttcatgttccaagccctctatgatccacgaatagtgtgatccagatgctatcatcggcatctcaaactaaacactaatggtgtactacaagatgcaggagttcaccaaggcaccaaccatgaagaaatgcataaatgcatacctgagagccgtgcatttgttatggatggtactctgagataag

SEQ ID NO: 45858 - DNA, 391 bp, Zea mays
tcgcacctctgaacttactccgctgcatcactcttcgctggtggcccatacatatctgacctgaagaccttcccgactagtgtcctggacgctgcatgtattccacattgcccagcatggacctcccccagaagtcgctttccagtagatgggagaatgcacttcatgaggacgcctgatgcaccccttctgtacaatgtctccccaatcagtgtgtagtgagccgactgtctggcaatgcgctcggccgcatttttgtcatctggatcctctctattctttatatacctgatgataggccttctctagtcatcagagtctgactcgggttgatatataatattacactcctctgctcgatccattgagatgctcggctgtagtatttctt

SEQ ID NO: 45859 - DNA, 303 bp, Zea mays
taaccccgaaaatgcgtcttcggcgttctctgttagataagtactccggtctattgtcgtcctccggagaattgaagctaatccagataagatctcagctatcatgaacaatggaggcacccgcgatcacaaaagaaagatcaaagacttaccggatgtatggcagccctgatcagattcatattcacgctgggagaaaaaggcttaccatcttataaactactcaagaaggtggataagtttcagtggacattagaagcacaggaagccctacacacattataaaagatgttgacaacacca

SEQ ID NO: 45860 - DNA, 365 bp, Zea mays
  unsure (1)..(365): unsure at all n locations
gcttatgcctctncaaaccttgcactatcataagtctagtactattgttggtgggtctatgaaattatggtgccatcaatattacttgactagataagtatgtatcggatacgaactacataataggttgggtaacttaaacaacagtcacttaatggttcaggactttgaggcataatgcttggagcctagacatagagatgttccccaacaacacgagtcatatatatgatatgattagcaacgagttgcttaccgatctaccttgtcttctaacggagatgctaaagatcactattagacttgatagttgtgggttctgaatgacttagtatcaatcgagggatattgatattagtgggagt

SEQ ID NO: 45861 - DNA, 482 bp, Zea mays
  unsure (1)..(482): unsure at all n locations
tgacaacaccatttgacatcttanataaaatgtctgagatctagtatatttaattcattcctcaacatgcataagcgggtcttatcaagtggcttagtgaaaatatccgctaattgatcttccgacctcactccttctaaaagtatgtctcctttagcaacatgatctctaaggaagtgatgatggatatcaatgtgcttggtgcgagagtgttgtacaggattattatcacatttaacatcactctcattatgacacaacaaaggtaccttttctagaactacgccatagtctagaagagtttgtttcatatataaaatttgtgtgcagcaagcacccgcggcaatgtattccgcttcggctgtngacaaagcaacactattatgctttnggatgccatgaaatagtgatctaccaacagatggcatcccagaagactttcctataatttgcaccgactatccgatataatagcattaatc

SEQ ID NO: 45862 - DNA, 359 bp, Zea mays
  unsure (1)..(359): unsure at all n locations
accctaatctttttatccttcggcgccacagaaatgggcgaagnagcagcgtttcttttctttctctactttcgcgagggatagttggtatttgggtatatgaaaccaataacgtcaaaaactctatttaacattttcttgcctcgcccttcgaaggccagggcattgcatcatcttcggcccttgtataggccccaagcaactcgtcgctggtcacctcaatacaagtcaaccattcatcgtttggctcgtcaacctcacctctgtatctgaaggtatatttcagatagaccaaaccgccctgactagacccggcagcagctttcttcggcatctccagtctctcactaaagccacac

SEQ ID NO: 45863 - DNA, 472 bp, Zea mays
  unsure (1)..(472): unsure at all n locations
ctttatttacttcctacatgcctttaatgtcttccttttctgtggttgatgccaaagggggagaagtttatgggccaaagcaatgaatactatatcaaacaccaaacaccaccaatttaaaaatttatatctacaaatgactctttaagtggttttggttatttggtccaaaaataggaagtaagtgaattatggagttagggggaggcttaagtccataatgtcacattgtggggacaatcatgcattctagcaagtagatcgcactctttaattcaaatacttgtattatntgcttgctttggttgtgttgcatcaatcaccaaaaagggggagattgtaggaaaatggacccgggccttttggtaaatgagtttgggtgttataacaacacaaccgtgaacaataaggttctagtgttgtgttgtagtcaagatgcaaatgattgacangcatgagatcacacttaatg

SEQ ID NO: 45864 - DNA, 182 bp, Zea mays
accacatagggacataagctgacacatgcttgccccagagatcggctaagcatgtttgaatatccctctgataagacactccatcgtctttgaggccgaacggcatggatgtatatcgtacagcaccgagtggagtgatgaacgctggagttacctcgtcttctttcgccaggctaatctga

SEQ ID NO: 45865 - DNA, 402 bp, Zea mays
  unsure (1)..(402): unsure at all n locations
tctgcattacggacctatgaaactaagctctctaagggagaacacaatntatgattaacaaatgttcatttngagaaagacaggatttgtagcgcatgccacgcagggaagcaagtcggagcccatcatccacacaagaacatcatgacaaccgacaggccactggagctcctacacatggatctattcggcccgattgcttacataagcatcggcgggagtaagtattgtcttgtaatagtggatgattattctcgcttcacttgggtattctttntacaggaaaaatctcaaacccaagagaccttaaagggattcttgagaagggctcanaatgagttcggcttaaggattaagaaaataagaagcgaacacgggacggagttcaaaaactctcaaatc

SEQ ID NO: 45866 - DNA, 347 bp, Zea mays
  unsure (1)..(347): unsure at all n locations
cattacggacctataaaactcagcttgtgaggttcttcatccncacatgtgctaaacggcgatgctccaactagcccatgcaagtcttagcaattaagcatgcatctagaccggcctcctcttttgcaaaatcaactaaataaagtttgtcgtctaatacacccttaaaagctaatgaaccatcacttcttctaaagacagacacatctatatttgtaaatagacaattatatcccatattacataattgactaacagatagtaaattatatccaagagactcaactaaaaacacattagagatagagtgctcatttgatattgcaatcttgcctaagcctttcacc

SEQ ID NO: 45867 - DNA, 427 bp, Zea mays
  unsure (1)..(427): unsure at all n locations
tctcccttatgatgaaggcacacaagatgaagtcttatccttttaggataagagtaaatgtcgaagctatcactatatggacaacttcggctagcaatgaagacgatggacaatgatgactaccgaaggaggaaaagactacttagtccttaataacttgtattacgatcatgtataactgttgaggacataaatgtacttttgcttgggctgtgttccgtgcctataaatagatgaacagtaacaccgtactattcacgctggattgtattcactttctcgcatctgcaccttcgagcaagccgaaggtatcaatgtaatattaacattgntgacattcatttacgtcttattggatgcaaagatatatgaagtaatgagttgcagttatcattgttattctttcgcaattctactcacatactta

SEQ ID NO: 45868 - DNA, 380 bp, Zea mays
  unsure (1)..(380): unsure at all n locations
tgttctttttttactggaagatatggtctctcttgacactatgaaatgtcgcagataggctctcacctctgctttgcttcagtacctgtctttnttcccatgtccctaaattataagctatgtgtggtgtgagctgtgcctgcttccaacacttgggttaggttcagtgtcaagtatgtagattatacttaagcacacgacatgttcttcctctcctcatcgcaatatgttgattggattaaatttcattctggcatatttttataatatttgtcttgctggcaacaccatctggaaccctttcgtgaaccagcatgagtggacaacactggtgggtagccacatgcacaaaaaaggaagaaatgcgctttttccttcat

SEQ ID NO: 45869 - DNA, 292 bp, Zea mays
aaaaacctaaatttgacaattgacttggcaagttgacttgccttcaaactcttcgtgcttgttggtaactaagaccattatatgctgctgttgacatataattcaatccaggctgctttgtggcagaggcaccatgccccggcggtatagattgcatcgtgttatatttatcagttactgcagcttatctagaaagaaggtactgtcaattctatacaacatcaacttttgagtagggtactaactgacaatgatggttcttatttcggtcaaaaaaatccgtccaaaatga

SEQ ID NO: 45870 - DNA, 338 bp, Zea mays
  unsure (1)..(338): unsure at all n locations
attacgtgaactatgaaactaagcttggcataacattaagcagttnnttgaaatgaagatcactttggatggtccgcttcgaaatgctgtctcggataccaccataaattctttccaccctaaattttccaaaaaaaaacaaagcaacatgaaaatctgtcaaatttgtgaggtgaactgaaacatcagtgtcaaattattgtgtttgctgttgtgatgggccttggcccggctcatgtanttccctctgtgaaatatatacaacagcacaccttgttttcgggttagggtttccaacatgttatctagccagcaatttctcctctcttagccatcgt

SEQ ID NO: 45871 - DNA, 166 bp, Zea mays
catctaacactcccttagaagcgatcgaatcatcacttcttctaaagacagtaacacctatatcagtaaaaagacacgtggggcccatttttgcataattgggaaatagaaagcaaattgtaatataaagaatctacgagaaaaacattagaaatggaatgggtag

SEQ ID NO: 45872 - DNA, 356 bp, Zea mays
agacacttcagagacataatcttcaactctgaagtacaatggtttgcgtccctttgctacataactcttttggcgagcttgggctctctttacaatatgtattattcattgaactttctcttctgtttcttttaccatatcaagcctgaaaaaccattgcactcctagatcagaccagtttaacaaagtacaacaccgtcgttcatacatagcttcaaagggtgccattttgatgctctctcgatagctattattgtatgagaactccgctcatggtaaacagtcactccatttctgtgggaattccaagacacatgctcgcaacatatcttcaagtatctggtttactctctcag

SEQ ID NO: 45873 - DNA, 492 bp, Zea mays
  unsure (1)..(492): unsure at all n locations
tggctttganataaatgtaagattatgtaattctcttccttatttctntatctccgatgttctgtaatgtctgcaagacgggtgaaacgttcctggttaggtaatgaaagataccgaacttgtcaagtgacttatgaacatctacagggtgtctgatgttcgttggacaatgacaactgtatgtgggcctaattacttgngaggttccgtcacacctttggattcaatttgatgaactgactaatacataaataatatgaattcaatttgatgaacggattaatcacgcttatattactagttatggacacattgaaatataagtctattaatagatcattggacaattaattaatctattgattatacttagtttcaaattaggaacatatgatctacatcatctgaaagaagactgtatacactattattnntataaactctangcagtatatttatatatatcgaacttgaatatgaaactaactatat

SEQ ID NO: 45874 - DNA, 305 bp, Zea mays
  unsure (1)..(305): unsure at all n locations
aactgaccagcggggccattctgccagaaggagcgagcgcgcaagagagagggcggctgacgggtggtgacaccttgccagcgagagggatgtggggtgtggagcgggctggcgcgcgcgcggaggcaggccgaatatgggccgatagagattgagctccggcgcgtgggaaggggaggtcgcgggtttgggcctggattcggtccancanggagaggagaaggctttctcttttcttttacttttaatcctattcccatctgcccttttctttgaacaaatatttgggatacttaaggttaaaa

SEQ ID NO: 45875 - DNA, 60 bp, Zea mays
tctcgctcggtgttacgtcagtgtcgatatgtttcctgtaagggctactgtgggggtctg

SEQ ID NO: 45876 - DNA, 354 bp, Zea mays
  unsure (1)..(354): unsure at all n locations
cttcgtcaagacctagatcattccaagatcttggaatgcagatgagccttcggagatattatgtgtaaactatgtaattttcttacttttccctatggcacccttttcctttcaggaggggagaaagggttttaatggggccataggttgtaattttcattttttcctatgcagccctgtgcaatacaagggccaaattcccccatatgtaaaatgtaaaatctgggattacaccatcgagtgtaaaaaagtatgaagaagctcanagtcatccttatgggatgcagagctaagatgccacctaagtaaaaggtgaagaagctcctcaatcattcctaaggggatgcagagctt

SEQ ID NO: 45877 - DNA, 336 bp, Zea mays
  unsure (1)..(336): unsure at all n locations
agtgcaaagagttcaaaccttgcaaagtcattgaatgaacttcaagataaatgtctgaagttcggcacccgttgcgtgcaacgattgaagcagctcttcaactcggntggagccagttctgaaaagtttaaaccttcagctgaagacctgccaggcatcttcgatcatattgatggcgaagttgatgctcttgatgaattcatagttgggcatggtgacttctgtgatctgttagcttctcgtggcacggctgttgcttttatgaaggctggttgcacgcacgggaatattgtaaaccggccaaacttcagcttatcactagcggactngaatgac

SEQ ID NO: 45878 - DNA, 446 bp, Zea mays
  unsure (1)..(446): unsure at all n locations
tagcagatcacagtgtgcaagagcctaaaaatgaatgagctagagtggttggtcataaagcgtgcaaaataagtttgcggtatggccgtatttatacgtttgatgcgttgaaagttgaaagaccccacttgtcattgagtgttgctattctagcaaagggaaggtgttttttcggaccttcggcataaagccttcgttcatatcgcaatctgaatntattatttcaaacaaattaatattgcgaggggctactgttgggggtcttcgtcctccgaaggtcctcaaaaacataatttgacaatgttttccaagtggattatgtgaacaggtatcttcggactcagaattacgaacatgaagtgcggtcaggacgaagcctgaaccatacgaaggacnggcttgataccaagctccacanaggatggtgcacagccgaagctgtatgc

SEQ ID NO: 45879 - DNA, 295 bp, Zea mays
  unsure (1)..(295): unsure at all n locations
agaaaaaatggcaaaactcttaatagaagagcttaaagagtatgcccaatcttgcgggtacaagccaagagcactccttttctgagggattgatgatgagaaaataaattgtatcccaaaccaaactggagccaaagttatcggtactctgtcaaagagtatcggttttccgaagctagaaacggacattaaccgcttccgacgacaacatatcgttggtagtttattttattccaattttcaggtgaactatttntcccttaacttttattggttttaataataaaaacatgtc

SEQ ID NO: 45880 - DNA, 256 bp, Zea mays
ctttagttttgaagcttcgactttgagaatagtcttttagtatctctttatatgtccgaagataagaagactgctgctgagacgaagctgagcctcgacgaaaagaaaatttggggtttcttatatcgatgtcaaagaccaattcagagaaaatcaccaaggagattctggaaggtttgtctgaagatactggtgacagtgaccgctatgatgtggacagtggtggtgaagactccgaagatcgtccctggcgacc

SEQ ID NO: 45881 - DNA, 402 bp, Zea mays
  unsure (1)..(402): unsure at all n locations
ctaagcttcgcctatgtggccccagtggacttagtttgacaggcaaagattttgtccttacctttgagatntcctctacttcggtagcagagggtggtgcagaagttcattcttcttcgtcagttgctttttgcttcggagttgaagtttttctcttctttggtcggctcagacatctagtttttcttccttggttgatcttcatcgtctttattcaagacaccggctactcttttcctctttggccttcggcacccttgcctagccgctcataatcaggatattcaaaacccagggcatctatcactcgggttagccttcgcttcggacgggtgccgaagaccgcaatcatcaattggtcttctcttttagagtagattctgagtatttcattgcacatta

SEQ ID NO: 45882 - DNA, 347 bp, Zea mays
tccgttgctggttcccagatgtcttcatggatcgcgctcactaagctgactagtatctccattgatggagagctagcgtcaaagggcggtgctcgcaattttttgactagtgagccggagaagtttctataagaatctggtttttagcaggagcttctctagtactactgtcctatgtcgtcatgggatggacgcacgtcgacgtgaagtgactccacgtgtccttttgactagtcccacttgtgctaatgctttgagatatgatatgatgaattgcgtgagaaagagaacgacacacagacgcggcagaacaagacaaaaagattttgcatgattgaccgctgcat

SEQ ID NO: 45883 - DNA, 273 bp, Zea mays
aattcccaaatcagccctttgaccatgaacccttggagaaattcagatttctgaaattctgaaattcagaccttctttcaaagatcaactgcgttctctgtttttcgaaactcaaaactagaagattcaaatatcaaagttgtgccaaattcccttgaacacgtcctggaagaggttgaactcaaaccaaattcatttgacacagttttggcgcagtttgaccttgggaccagacattctgacactggcacctttggtgacgcttacaactcc

SEQ ID NO: 45884 - DNA, 410 bp, Zea mays
  unsure (1)..(410): unsure at all n locations
taaccncatatatagctagtccactttagccaaacgggacatttgctgagtacgttgatgtgtactcacccttgcttataaccccaaacactatgttgtccccattgcaaccagtgctcatgagaagatgaaggcaacgtggaggactttcaggattttcaggacttcgacgagttctagattagattagcggcaaacccccagtcagctgcctgtgaaggccttatcgtactgtgtttcattcaacactctgattatggcttaagttaatggctctgtggatgtttcagacatcgtgatgtaataaaatacttatttccgctattantttgagcaatgtgtgatgatgtccaattatgtagtccctgtgtacgtgaatttctgatcctaacacatacatgattcacatt

SEQ ID NO: 45885 - DNA, 110 bp, Zea mays
  unsure (1)..(110): unsure at all n locations
tgtgtggagttgggagaagatntgatctctntggtgtgtctcgtattgaaagctataactcttgtaangtgtacaaaatgtataaactcggatgccattgaatgtggggt

SEQ ID NO: 45886 - DNA, 402 bp, Zea mays
  unsure (1)..(402): unsure at all n locations
tatctttttccaaggacagtggattgagtctctcttggatatgcttcgngtagcataacatatagacttttagtagctaaatctgaagttcctgatgtgtatgctgatactattatggaatcacgtgatgctactttctttgagcatatatttctcatgaaagacattcatagcaattctagatactcttctgagataattcctgaacatatatacacctactgagagttctgaacagccacatgaaactgtcctatacgaggatgacaatgatgctcctataaggagcaagagaccaaggggtgaaaaatcctttggtaatgatatcattgtgtaccttgaggacgatactcctactaccattgcagaagcatttgcttcttcagatgcagatgattggaa

SEQ ID NO: 45887 - DNA, 390 bp, Zea mays
  unsure (1)..(390): unsure at all n locations
ntgatacacggattaaacatcgccatatcactgngcgtcttatgatngatggtatatggagactctctggtagtcattagccagataaacaaagaatgagattgttcaagtgattcaatgggaaaatactgcgctgctgtccgaaagctggaagataagttcgagggtctggaatttcatcatgtggaaagggatcgtaacacagcagctgatacactatccaagctcggatccggtcgaactcaagtcccacccggagttttcgtgcaagaaattacacggccgagtatttcaatagaccaaacagaagagtgcaacatcgtagatcaacccgagtcagactctgatgactggaggaggccgatcattaagtacattaagaacgaagaa

SEQ ID NO: 45888 - DNA, 383 bp, Zea mays
  unsure (1)..(383): unsure at all n locations
ntgggtcttggaatgcttacaacactgccatatgaatntaatagacaacttgagttcaaatgcccctatgcggcgtggctagagactatcaagcaatgtgcaatgagatagtggggaactatctcattaaagaggatcaagcaacataagaggcctttggaactcatgagaaatgaaggttgaacaaagtctttaatgccctatggtttgagtacctagactaccccaagctggccaagatgccgaggctagggtaaagaggtagaggactatcatcataatgancagggaggctacaagagatgtgaanggccaaaagcagaaagccaaggccacttataagccgaagatcgtggggagtgatgatgaaaggaattctattc

SEQ ID NO: 45889 - DNA, 133 bp, Zea mays
agcttcgttcgtcggcgtatacgttgtggtttttctcagagacacaaaggtcacgccgtcggagtcggagagcatcacaattatacatgcatatggttggctcatcatcatcatcatcatcatcagaacatta

SEQ ID NO: 45890 - DNA, 330 bp, Zea mays
  unsure (1)..(330): unsure at all n locations
tctanagggagaacacatcttgggactaacaaatgttcatttngagaaagacatgatttgtagcgcatgtcatgcatggaagcaagttggtgttcatcatccacacaagaacatcatgacgactgacaggccactcgagctcctacacatggatctattcggcctgattgcctacataagcatcggcaggagtaagtactgtctagttattgtggatgactattctcgctttacttgggtggtcgttttgcaggaagaatctcatacccaagagaccctaaaaggattcttgagaccggctcataatgagttcggcttaatgataaaaaa

SEQ ID NO: 45891 - DNA, 309 bp, Zea mays
ttgactcaagcctagctacgggtttatattgtgttcaccaaaaacaaaccttccacttgtgaataccacttggccacgaggcgagctttgttccttgtcaccacaccatgctcatcttgcttggtgcggaagacccatttggttgctacaacatttagatccggacgtggaactaaatgccatacctcattcctagtgaagtatgtgagctcctcttgcattgccatcacccaatccaatcttgaagtgcttcctctaccctgtgtggctctatagacgaaacaaaagaggaatgctcacaaaaatgtg

SEQ ID NO: 45892 - DNA, 383 bp, Zea mays
  unsure (1)..(383): unsure at all n locations
attagtagatctataagaggttggttgtgtagttatcaacgacgccagatcannatgtcttccttcgagccgatgatgtgtccatcggaggcaccactggttctccttctcgagttggtcgtcgacgtgcttaacagggttggttttgtctacgctcgtcccagcgtcagcgacggacaggtcacccaaatcgttcatctttccaactcaccccttggtgcgggatgttgtccttagtgattctctcaatcatgtttgacgatggtggattgaattggagatgaggctctcggtgctgggagccatgttttcatcatacattatgtttgtggcagcggtntttcattgtagaatntgtgtaacatgttctaactatgtattat

SEQ ID NO: 45893 - DNA, 371 bp, Zea mays
  unsure (1)..(371): unsure at all n locations
acatgtgcattgtgtcgaacaccatacagacgcgaggtaaggcacgtgttttgngagaatgaatcanctccaaaacagctgtagcattcttgccaaaggcttaggttgctgcctatgaacagcttgtccagattgtcctcctccgggaataggctccaaagtagacgaacacggacgtggcgaggcagccgccgctccacgagggcgccggatgtncatgcacgcggccgggtccttggcctcttangcgtggaggaggggctgctgcagcaagccccgtagcgcggccggcgagccgtcggaagggccgcgcgacgccgcctcaccatctgctatgcacgcacctaaagcagaagcgaacagaacggagt

SEQ ID NO: 45894 - DNA, 377 bp, Zea mays
  unsure (1)..(377): unsure at all n locations
aaattgtctaacttgctgctgcacggggatactcatatctatccacggtcgagttggatcggtcttctctagccagagccacttagcctgcagtgcccaactcatcaattggcaattaggaacaccaagaccccctaagcttagtggccttgtcacactttcccagggaacaatacaacttccaccattcacctcatttcgccctttccaaagaaaccctcttcgaatcttgtcaattgatttaataactcatttgattatcatgaatcgatcttcctctgataaaagcactttgattagattctaccaattcatgcagacgagggcccaaacgattagcgagtaattntatgaccaatttagcaacactatgaatt

SEQ ID NO: 45895 - DNA, 245 bp, Zea mays
tgaagctgagtcttgatgaagagaagaacttacggtttcttataacaatgtcgaagaccaacacagaaaaagatcaccagggaaattctggaagggctgtctgaagatactggtgacagtgaaagttatgatgtggacagcggtggcgaagactacgaagatcgcccctggcgaccaagccattcagtttatggtaaatcaattatcaaagagaatcatcttgttaatatgagaggagagtattt

SEQ ID NO: 45896 - DNA, 370 bp, Zea mays
  unsure (1)..(370): unsure at all n locations
actcagcttatgaacccttttagctggttagatcatcaaaatgagtacggctccaaactcgatagattntaattaggcacaggactcgcaaatctttagaacaattacgttccgcatttcacgtagacttatgaatagtctaaatagacagaaacatacgcgatatttaaatcgtgataggcgaagatgattaaaatttagcatctgttttatccactgatatatgtgcttaaatccatactcgttgtcgagcagaatataaacaccaggggtgttacaaccctccccctaaaaagaatctcgttccgagatttagaacgaaagacttcttagagtagagaagcatgttacccatgttcatatcagcgat

SEQ ID NO: 45897 - DNA, 409 bp, Zea mays
  unsure (1)..(409): unsure at all n locations
gggtgccgatggagaaacannaatccttgaaatcttggctgtcaaactgcttgccgntgtcaactgttagtttggacggtactccgaagcggcaaacaatgttttgccagaagaatatttgggcagtctttgatgttattgtagaaacatccctcgcctcgatccatttggtgaagtattcgacggctacgaaggcgaacttaaggttcccctgagtggtgggcaggggcccgacaatgtccaggccccagcgctggagaggccatgtatgggcaatcagctntgtatactgcgaggggctgcctgaccgaggagaaaacttctggcaggcttcgcaggaccttgttgacccgattgcgacgcagatcattgcgggccagtaaaacccttggcggatcaccttggcagc

SEQ ID NO: 45898 - DNA, 336 bp, Zea mays
  unsure (1)..(336): unsure at all n locations
gtcaagtctggcccaatcaagcacttggttgtttgatatcctacctctaagatacctccatgtgctacgtcgctgcgattatcaactaagaacaagttatgtatatctacttctaataccttggaataattgtcgcttctatcagaaaggaatatatcgtcttcacagacttacaaagctcaaaaattgtccaagcctcaaagtcgctcctaaccgaatgtaggagctccataacggccgaaattacaaaccagtccgttccctaaggagcgcaacgctagatctgtctaagctacaanaaagtcagtcctaacggagcacagtgtatcttttctt

SEQ ID NO: 45899 - DNA, 126 bp, Zea mays
cttaattggcccgccgttcttatactcataattaatagtgattaattgcatatcaaacgaatataaatgaggggtactattattaaatcatggataaggaatatgcggactataaattcattatac

SEQ ID NO: 45900 - DNA, 275 bp, Zea mays
aaaaagatagaccttgtgcagcttgtcaagcaggtaaacaggtgggaggagctcatcacagcaagaatgtgatgaccacttcaagaccccttgagctgctgcatatggacctcttctgacccgtcgcctatctgagtatatgaggaagtaagtatggtctggttattgttgatgacttttcccgcttacttgggtgttctttttgcaggataagtctgaaacccaaaggaccctcaagcgcttccttaggagagctcaaaatgagttcgagctca

SEQ ID NO: 45901 - DNA, 293 bp, Zea mays
  unsure (1)..(293): unsure at all n locations
agcaacctcccggctttgaagacagcgagtatcctaaccatgtttataggctctctaaggcgctttatgggctcaagcaagccccaagagcatggtatgaatgccttatagaattccttattgctaatggcttcaaagtcggaaaagccgatcctacactctttactaaaattcttaaaaatgacttgtttgtatgccaaacttatgttgatgatacttatattgggnctactaacgagtctacatgtgaagagttattacgatcatgacacagaaatncgagatgtcaatga

SEQ ID NO: 45902 - DNA, 215 bp, Zea mays
ggtaggggggcgaaaggtagcgacaactcgagcttttaccggaaaaactatgttgtcttttactttctttgaattgactttctacttgtattggaaacagagacaacctaaatgccagcgaagtggcgaaacaaaaacaacctttccggacctaagttgttaaatgcttccgcaaattctggcaaaaaattgaaaacttttgaaattggccaacc

SEQ ID NO: 45903 - DNA, 368 bp, Zea mays
  unsure (1)..(368): unsure at all n locations
gngnnataagcncatcnttcttcttgatccagatntgatgatagtctgaatagcaatccaatagactcatgagcttcatagtagctgctgcatccaccaaggagtctattcttggcaaaggaaactgatccttcggacatgccttgttgagatccgtaaaatcaatgcacatcctacactttccattggccttcttcaccatcacagtattggctagccactctagatatcgtacctctctaataactccagcacttacgagtctcttgactttgattcttgcacctcccgctttgacgttggacattctccgaagcctttgtttcttggcctgatagccagatctacataaagtgagcgctcaatga

SEQ ID NO: 45904 - DNA, 458 bp, Zea mays
  unsure (1)..(458): unsure at all n locations
taagcgtagtagcaatccacacagttgccacatatgtacatgcgtgcctatccttagacgtggcaacgaaccagacatagtactaaccttagtcgcctatcccatatcatacggaattntgagggtgagttagatagttttccttatataatgtataaagtctctgactctctttgagaggatcggctcagggtaataccctagacgctgacactttgtatcaacttcttaacaattccgatgttacttttcttgtgggatccacaattgccggtgggaccgaatcgttttgagattaaagtcaactgttcatactgttgcagctgtaatttataaagataaaacactgtataaattgtagaatctagcattggataaatccatatatgacgtccgagcccgttcgcttgagtttttagtccactggttggaatattatagctgtaatttattaaaac

SEQ ID NO: 45905 - DNA, 277 bp, Zea mays
attctgacctgatgaacagtggtcgggggtttccactccaaaatgtccttgactttgctgggatctaccgcaattccccttgcagatagtacatgtcccagaaactgaatttcctccagccaaaacccgcatttgctaaacttggcatataactgatgttctctcaagcgcgttaacatgatccgtaaatgttgggcgtgctcctcttcattcttggaatatatcaaaatatcgtctatgaagaccaccacaaacttgtccaactcgggcatgaata

SEQ ID NO: 45906 - DNA, 353 bp, Zea mays
tagagacatgcacaaatttatgattatgagaagttctaatgtagtggtcaaatgcaacattttcacccaaactaataggaatttctagcctagcaagcaatcgaaccaattcattacgtgcaaccataggacaagtactcccagtacgcatactaccatcaggattaaaagatatttgagactgagacatgcggagtttttcacgcctcctgtgacatctatccctatgtcgggtgaggtggccagtgccaccactagagagagcagaatattgcttagagcaatgtatgcacttagctgcataccttagcttcttaccggtcacgattttgagaagtttctcaaaatctaac

SEQ ID NO: 45907 - DNA, 282 bp, Zea mays
  unsure (1)..(282): unsure at all n locations
ctggcaagcaggtaaacaagtgggaggagcacatcacaacaagaacgtgatgaccacttcaagacccctggagctgctgcatatggacctcttcggacctgtcgcctatctgagcataagaggaaagaagtatgggttaattattgttgatgactcttcccgcttcacttgggtgttctttttgcaggaaaaatccgaaacccaagggactctcaaacgctttctcaagagaagctcaaatgagtntgagctcacagtgaaaaagataagaaagcgacacgg

SEQ ID NO: 45908 - DNA, 393 bp, Zea mays
  unsure (1)..(393): unsure at all n locations
gacctataaaactcagctaccgattgaagctgatcgcttccttggcttagtttgctggctgccattgcaccctttagcaccgctgaatctcttgaaataaggccatntttcatcgtgagtcagccgcctaattgtgccactgctagtagcgcctcctgcttcgtgtgccttagggcgaaggtgcgctcgtgatcgaccattcaagcgtcgtcactatctcgctcttgacatattcgccgctacaattcccagacttcttcgcgaatttgggtcctggatttacgatatgtcaccaggagacaaaacgaaagacctacatagcgacacgtgtgtcgtctccggctccgactctactgtgaaggtctgaccatgatgtgcgtgtctcccctatat

SEQ ID NO: 45909 - DNA, 396 bp, Zea mays
catttctatattggtttagtgattaaatgcacaacacattatatttagaataacatgatgattgaccaaaggtacatgaagcaaattgagctcaaaagaggacataatacaaatttatatggaccaagtaaaaaggtaagctctggacacttagttaattgttgtgtgtgctaatcatatttgtctaagtgctagggactttataaaaggagcaaaagagaacaaggaaaaaaggagaaagtgtgctggactgcatagcaccagacagtccggtgcacggtatggccaactgcctgctctcgataattctagcctatgtcggctataattcaccgcaccattcgcgcggagcgccgaacagttcggtggtgccagcgccaacgactaactgcacat

SEQ ID NO: 45910 - DNA, 341 bp, Zea mays
  unsure (1)..(341): unsure at all n locations
gccacgagaaagctncatcgggagagtccggcnacaagaaagagggaggaatcatctccccgtgtcaagtcgcaccggagtggcgacaagaagaagaaaatgaagaaagtggtctactacgagaccgattcttcatcgccttccacctctggctccgacacgccgtccgtcacttctaagcgccatgagcgcaagaagtttagtaagatccccttacgctatccttgcatttccaaacgcactcctttactttctgtcccactaggcaaaccacccggttttaacggtgaagattattgtatgtggagtgataaaatgaggcaccatctaacctcactcca

SEQ ID NO: 45911 - DNA, 359 bp, Zea mays
  unsure (1)..(359): unsure at all n locations
ttaggacctatagatactcagctttccttgtcgtcatcaaccttgacatagaaccactctgacttccagcctgctgtccatntgcttcggtagctgattacaggatactttgtggttttccgataggcgaagttatagcaaccaaaattgtcgtgcaatccatcctttctagccttcgtctgataatgcaactcgtgaacccggcaaaagctgtccgcaaatggctccactgcttggcttcggagtgcccagatacaaacactaagcctaatgatagcgttaggggtcagctggtgaaaatagatatcgaacctctttagtacctctgcaataatcccatgtagggggaatcttaaacc

SEQ ID NO: 45912 - DNA, 322 bp, Zea mays
  unsure (1)..(322): unsure at all n locations
catgtaattcaataagaacaacttatatgagagaaatttccatgcatattttcactactctataagaacctaacgtagaccgtggcgcacagatctggctcctcacggcacatacgattcacatgttagtgtcttccttcttccncgtgcgcgccctctcccctctacccctgcatacgcatggtcctcgccgcaatcccctgaccgatcaatgcctcagccatggaaggaaaaatcccgtttctgccacagaaagaaacacataccctcgccgctattcacgcctcgcagcaatccagcacgcaggaatcccatcggcgac

SEQ ID NO: 45913 - DNA, 362 bp, Zea mays
  unsure (1)..(362): unsure at all n locations
tactaagcttgggagattcttanttcaacatgggctagtcagtgatgcttgatccaacccatattagtcttagcaattaagcaagtgtcaagtttagctctattaaaatcaactaagtatagctgaccctctaacacttccttatatgctactgaatcatcacttcttctaaagacaagaacaccagtatcactaaaaagacagttatagcccattttacacaatcgagatacagaaagcgcaattggattctatagaatctataagaaaaatattggaaatagaatggtcgggagatatagcaattttaccaagttctttgaccaaacctcgatttccatccccgaatgtgatagctcttt

SEQ ID NO: 45914 - DNA, 357 bp, Zea mays
aggcgtatttccaaaggttcttgcattttttagcacaagcgcccacagtgcccaatgaaatcgtcattgaggccatgatcaaagggctccggccagaacctatggctcaatacttcgtcaggaaaccccctcagactctggagaagctgcttcagaaaatggatgtgtatatccgggtcgataatgaattctgccaccaaagggaagaagcttataggtattttgagatgactaagggcctcggaggaagaatccaccctaggcatgtcagatcaatcacaacttcagtcaaagtgatgacagaggaagccagttcacaggccacaacatagctcacaatctttatggaacagcaaa

SEQ ID NO: 45915 - DNA, 429 bp, Zea mays
  unsure (1)..(429): unsure at all n locations
tctaatgggagagncacatttgggactaacacatgttcattttgttatagacagggattgtagcgcatgtcaagcagggaagcaagttggtgcccatcatccacataagaacatcatgacgactgacaggccactagagctcctacacatggacctattcgccctgataggctacataagcatcggcgggaggtagtactgtctagttattgtggatgattattctcgcttcacttgggtattcttttgcaggaaaaatctatacccagaaaccttaagggatcttggatggctcaaaatgatttggttaagatcanaaacttataacacacgggacggatcaagaatctaatcaaggttcttgggagagggataaactagtttcttcttaccccacacaaaggtgtgggaagaaaataacttttgact

SEQ ID NO: 45916 - DNA, 459 bp, Zea mays
  unsure (1)..(459): unsure at all n locations
atgccagctngcctctgaaactgaagtgctcggncatgtttctgaaatgcattgctttgtcgtgctgaaatgttgtggtcatgctgtttatgcagagacttgtagcaaactgtggacttgtagaaactgtgttgccgctgtttgaactgtgatgcangaatgctgtttatgcagagatgtcactgctcggtagtttctgaggtgtgtcactagctgcttaaatgatgcttaaatagtatctctttggttctcaatcagtaacatttatgtagcctagtggtctgttgctgctaggtagtatctaaggtgctgggttcaaatcctttgccgttgcccttntttggcatctttttttttggctgcaaacaaactagccgaaaccatggccctctttccaccttttttttgcttctataatcctctgatattttatctcagcatctaggaccaattatgact

SEQ ID NO: 45917 - DNA, 345 bp, Zea mays
  unsure (1)..(345): unsure at all n locations
tctacagggagagcacatcttaggactaacacatgttattttgataaagacaggattgtagcgcatgccaagcangaaagcaagntgggtcccaacatccacacaagaacatcatgacgaccgacaggccacttgagctactccacatggatctattcggcccgaatgcttacataagcatcggcgggagtaagtattgtcttgtaatagtggatgattattctcgcttgacttgggtgttcgttttacaggataaatcccatacccaagagaccttaaagggattcttgagacgggctcaaaatgagttcggttaaggatcaaaaaattaaagcgacacgggac

SEQ ID NO: 45918 - DNA, 450 bp, Zea mays
  unsure (1)..(450): unsure at all n locations
tctgtgcccttctgagaaaacttcgtcagttccatctccatcggacttaacttgacacgcaaaggttcagtcattaccttcataatctcttccacttcggcagcagaatgtgtcgcaagagattcctcctcccgggccgatgtctttggatttggagatgcacgctttggagatgcatcttttcttttctttaaaacagctaccttctgtccaagactcacgtttttacaagattctctttccttcatgggcaatttggtgctttctttgtacacggcgctggcaatcctctttctctacgggccttcggtatctccgcccagatgctcataatcaggttaatcacaattcaaagcatctagcacacgattcaatcttcgcttttgacgagtgccgaaagctgcagtcatcaacctgatcttctttctatgntaaatttcgatgatatca

SEQ ID NO: 45919 - DNA, 362 bp, Zea mays
  unsure (1)..(362): unsure at all n locations
tgagtcagntcttctatagagaattattgatgcccttataatcgacgagggtatgaaacatattcatgagagaatagaagccggcaaagctaattgtttcagaaaagatgaccaagtnataatctggttcaatgatcgcatagttgtgcccatagatgctgaagtccgccaacaaattttggatgaagctcatcttagtcgatattccattcatcctggaactactaagatatatcaagacttaaaacaacactattggtggacaaaaatgaagattgagattgcacggtatgtggcaagatgtgacacttgcagatgtgtcaaggcagtgaatatgaaaaccgctagaccattacaatcct

SEQ ID NO: 45920 - DNA, 322 bp, Zea mays
  unsure (1)..(322): unsure at all n locations
agcttcgtattattccgatctgctgcaatgtttactttattctganggtacctgttcacacattgtactacagaaatactggtaaatcctgtttttgaggaccttcggacgccgaaggtccccaacagtagcccctcgcaatattaatttgtttgaaataataaatttagattgcgatatggacgaaggctttacgccgaaggtccgaanaaacacctttcctttgctagaatagcaacattcaatgacaagtggggtctttcaactttcaacgtaccgagcgtataaatatggccataccgcaaactcattttgcacgctt

SEQ ID NO: 45921 - DNA, 336 bp, Zea mays
  unsure (1)..(336): unsure at all n locations
actaagcttgccagcccctcgacccgatcggacttcaccggatgcccgatatcaacctcaccggacttcggtcttccgccgccgcgcgtggaccaagctatccagtgagtctccgcccgattcctttcgctcatgtcttctctggcatcccgtggacctccctgacctatttgattgaactatctcgccgtgaccaggccggtctcctcgccgccgacgagcatccccgcctgcgcgcgtggaccgaccgactccggccatctncgacggtgttccgcacacccgtgtgatccccgtgacctccccttcaccctcggccacttcaccggaacagtc

SEQ ID NO: 45922 - DNA, 393 bp, Zea mays
  unsure (1)..(393): unsure at all n locations
ctattacgtgaccttagaaactcagcttctaagggagagcatattctgggactaacaaatgttcattttgagaaagacagggtntgtagcgcatgtcaagcanggaagcaagttggtgttcatcatccacacaagaacatcatgacgacttacaggccacttgagctgctccacatggatttattcggcccgatcgcgtacataagcatcggcaggagtaagtattggctagttattatggatgattattctcgcttcactagggtgttcttcttgcaggataaatcacaaacccaatagaccttagagggattcttgagacgggctcacaatgagttcggcttaaggatcataacgattagaagcgacaacgggacggagttcaataactca

SEQ ID NO: 45923 - DNA, 469 bp, Zea mays
  unsure (1)..(469): unsure at all n locations
ntacagganaaggagatggtatgaagctctcgggtgcttgatagagttaattcaattcttgttaactcaagctatcaatcttcaatgatctatatccatgattgacccaaggctatttttcaaattactatgtcttacactcatataatctcgggaaagatattgatgttgtaggaattaaggaattaatcctatgccaaaaagtcgaggcctacaacttggaggaaagccaaaggatggtaacatttatgtttttaaatgcaaagtatcttagaatatcatttcttatgtgtcttgtgtagtcacatacgaaaaagaagcacttgagatgtttttaattatgtcaccattctctgaagaaattcctctcatatgggagattgcataatcatcatttctatattatggcaatctacatgctttanattgntgcaagttcccatggcatgttntactctaattatcatat

SEQ ID NO: 45924 - DNA, 406 bp, Zea mays
  unsure (1)..(406): unsure at all n locations
ctaagcttcgcttctcgccacaacacgagacaccctctggttcgtctccagnccctctggttcacccggtccacgctcaccgaccttttcaccgtgcagctgggagctcgccgncatcgacccaaggcatccttgcgtnctcgacgttgctcaagcgctccagagtcccctctcgaggtgaagcaactccccatgcccttaatttctagtgtattgtcctgtttgtccgcataatcgctcgccggagtgaactgcgacgccgttgggctgctccatcgcanaccgcgccctttgatgcctctatggctatgcgcttgtgtcgtgtccataactgagtccgcccgtgatagtcgcctagaggggggggtgaatanggcgaaactgaaattacaaatataaacacaac

SEQ ID NO: 45925 - DNA, 370 bp, Zea mays
  unsure (1)..(370): unsure at all n locations
cttgagcctcattagctgcatgtaatttgtaataataangggatcataatacatggaagccaagctacaacaacaacaacagtggatggcttcacacgtaatatcaatctcatcaagttctagcctaacagaatggaataccagcgaaataatatagttgaacgtaccatggaacacagccaaatacaatatttcacaagctcacacaatatgagtagacaaagcgacatgtaaacaaactgacagaacttattcacgtttatgggcggagttatggcgggccacctatcttttacccgacagttatttctcagaaattatactgtctaatcgtctatacatactgatgcagagatatgttctacatgga

SEQ ID NO: 45926 - DNA, 361 bp, Zea mays
  unsure (1)..(361): unsure at all n locations
ctcagcttctccttctttggagaagtcggtgtcagcctagatgttctcatctattttctgaagcagcttctccagagtctgtgggggcttcctggcgaagtattgagccatatgtcctggccgaagacccttgatcatggcctcaatgacaatttaattgggcactgtgggcgcttgtgccctcagtcgcaagaaccttcagacatacgcctgaaggtatcctcatggtcttgcgtgcactggaataaggcctgagctgtgactggcttcgtctgaaagccttggaaactagtacccagcatgttcttgagcttctaccacgacgtgattgtccctggccgaanggaagaataccatgtct

SEQ ID NO: 45927 - DNA, 380 bp, Zea mays
  unsure (1)..(380): unsure at all n locations
tgcaagcttctaaaaggtgaacacattttatgacttaccaatgttcattntgagaaagacaggatctgtagcgcatgccaagccgggaagcaagttggtgctcatcatccacataagaacatcttgacgactgacaggccacttgagctcctccacatggacctattcggcccgatcgcttatataagcatcggcgggagtaagtactggctagttattgtggatgactattctcgcttcacttgggtattcttcttacagaanaaatctcacacccaagagactttatagggattctcgacgggctcaaaatgagtttggcttgaggatcaagaaaattagaagcgataatgggacggagttcaagaaatcacaaattg

SEQ ID NO: 45928 - DNA, 414 bp, Zea mays
  unsure (1)..(414): unsure at all n locations
gtctattttgggggatcccgtccaagaacagaagatatgaaataataattttatcatgtggggagctcagatgcaactgaactctttattaatttgccacanactgaactcagatgcaactgaaccgaatcgagaactactctaaacataactaccatgtagggctagcgcacacattaaagataaaggtcctancggcttctacaagtgatgttcaattgccattttatgtcatcagagccccacaggcacaacaacagcagtgtctaataaataccatatcttcatctatatctataccactatagtatccatcaggtaaaaattttgcaagaacccatccaatcaaatcacctcacacccataacatacactagatncactcaacgatttcacacatactttacacaacat

SEQ ID NO: 45929 - DNA, 273 bp, Zea mays
aaaaaaggggaagggggaaggaaagtttatggggaaaaggggggagagaaagcagacactgaaaaatgaaaaaaagcgggggaggcagagaaaagagggcagagaagagaaggggggaagaaggggaagaagggagggggggagaggaagaggagatcgaaaggaagaagaaggggaagaaggaaagcgaaggggaggagaaagaagaagagaggcgagagaactaaagagggaaaatgcagaagggggggaaggggggggaaagaaaagagg

SEQ ID NO: 45930 - DNA, 438 bp, Zea mays
  unsure (1)..(438): unsure at all n locations
tctaaagggagagcacantttaggactaaccaaagttattttgataaatatatggtttgtagcgcatgtcaagcatggaaacaagttggtgctcatcatccacacaaatacatcatgacaacagacaggccactggaactcctccatatggatatatacgaccccatagcttacataagcatcggcgggagtaagtattatcttggaattgtggatgataaatctcacttcacttgggtgttctttttgcaggaaaaatcacaaacccaagagaccttaaaggaattcttgggacgggctcaaaatgagttcggattgagaattaagaagataagaagcgataacgggacggagttcaagaactctcaaatagaatgctttcttgaagatgagggcatcaagcatgagttctcttctccctacacacctcaaaaaaat

SEQ ID NO: 45931 - DNA, 460 bp, Zea mays
  unsure (1)..(460): unsure at all n locations
actcaagcttctnagggagaacacgtgatatgtttgactaacgtacaattctaaatagatagaccttgtgcagcttgtcaagcacgtaaacaagtgggaggagcgcatcacagcaagaatgtgatgaccacttcaagacccctggagctgctgcatatggacctcttcggacccgtcgcctatctgagcatagggggaagtaagtatggtctagttattgtcgatgacttttcccgcttcacttgggtgttctttctgcaggattagtctgaaacccaagggaccctcaagcgcttccttatgagagctcaaaatgagtttgagctcaaggtgaagaagataaggagcgacaacgggtccgatttcaagaatcttcaagtggaggagttccttgaggaggaagggatcaagcacgagttctccgtccctacacaccacagcaaatggtgtggtaagagga

SEQ ID NO: 45932 - DNA, 438 bp, Zea mays
  unsure (1)..(438): unsure at all n locations
agccttcgcctcagtatatcacccacaatccaacaacgtcgtggagcgcgccaacggtaaaattntcatggccatcaagaaaatgctcctcgacgacaagaagggctaatgggccgacctgctacctgaagcagtctgggcactgaacacgaccgagtgccgggcgactaggttcactcctttccgcctactatatggatcggaggccatgatcccgcaggaaatcaaacatgggtcaccacggacaagcacttcatccatccccgacatagacgaaccaacttccaaggatctgatcgacgaagaccgtgtcttcgccctgcaggccctcaacaaataccaagctcaaacaaaagcatggcgtgaccacatagtcgtcccgagagaattcaacgaaagggacctcgtactcgttccgacagcttggacagagtcacg

SEQ ID NO: 45933 - DNA, 454 bp, Zea mays
ttcatccccacatgagctaagcggcgatgtctcatccagcccatgctagtcatagctattaagcatgcatctagaccggcctcttcttttgcaaaatctactaaataaagatagccggctaatacacccttaaaagctagtgaaccatcacttctcctaaagatagacacatctatatttgtaaatagacagttataccccatatgacataattgactaacagatagcaaattatatccaagactctctactaaaaatacattagagatagaatgctcattataaattgcaattttacctaacccttttaccttgccttgattcccatcaccgaatataattgaatcctgggaatccttattcttgacgtaggaagtgaacatcttcttctcccccgtcatatggtttgtgcatccgctgtcgataatccagcttgatcccccggatgcataaa

SEQ ID NO: 45934 - DNA, 325 bp, Zea mays
gccagcaccatttgtagcatcggcttttgttttggtcaatagcaaccttaatgacagggtctgggaataccatacgttcaagcactacaggctagtctgggtcacagagtgttacaccagtaatcgtgtctttcagaccagcaagcgctactatgtcacctgtcacagcaactggtatatcttccttactggtagcgagcatctcaagaagccttccgattctctctttcttgtgtatatttgcattgagaacataagaacccgctatcaatttccggagcatatgcgaacaaatgttagtgaccccaccaaccgatcagtcatg

SEQ ID NO: 45935 - DNA, 279 bp, Zea mays
tgtggtgtcctctggcgtcctgtcgcatccgaagtacctagtctctcacctggaagcctcggggccgaaccccttgggcatgggagcatcggagagacttctgataccgcgccgagtgtactaaagccacgtcccgagcttcttcgagctggtccagagagtcttcttggctggtctggttgcttcggtcatcgtacgccttcgtcctcggggaaccatattctaagtctgtggggtagatagcctcgggcccatatactagaaagaacgacgagaaac

SEQ ID NO: 45936 - DNA, 432 bp, Zea mays
  unsure (1)..(432): unsure at all n locations
tctaaagggagatcatgtgttaggactaaccaatgtctgttttgagaaagacagaccttgtgcagcatgtcaggcangaaaataggtgggaagctcacatcacggcaagaatgtgatgacaacatcaagaccactggagctccttcacatggatcttnttggacccgttgcctatctaagcatcgggggaagtaagtatggtcttgtaattgttgatgatattcccgcttcacttgggtattctgtttacaggataagtcagaaacccaagggaccctaaagcgcttcttgaagagagctcanaatgagtttgagcttaaggtgaagaagataaggagcgacaatgggtccgagttcaagaatctacaagttgaagaagttcttgaggaggaaggcatcaagcacgagttcttcgctccctacacaccacag

SEQ ID NO: 45937 - DNA, 451 bp, Zea mays
  unsure (1)..(451): unsure at all n locations
acattcaagtaactttccgagccttttcgtcccatactcaaaagcactgcgtattctaaagaaatttcctgcaaaaccgcaacttttcactgaacgcatcttcttaaaagactggacgtagttagcaacaaaaggataagaagacaaagtaatgacaagagttcttttgcatgtaaagagcacaaggaagaattgtcatatttaagtattaaataatcaagtatgctgcccttaattagcatactcaaaaggccaatatacatgcaagagtgaatataacaccagtacaaaaactggctatagtcctgatttccaaccaggactatggatctgggactaaagggcatggtcttgtagtcccggatgcctgaacagggactaaagggtctgcgtctctgcagggccttannnaaaatggcacanactcccaccatgcgatcatgggactcac

SEQ ID NO: 45938 - DNA, 320 bp, Zea mays
  unsure (1)..(320): unsure at all n locations
tcatcatcatcatccgagctatcattcgattcccattcaactaggtaggcgttgccatctttcttcttgttgtagaatttctatttcttcttgtcactttcatctttgcccttcttcttcttgcttgggcaattcatgacaatgtgacccggttccccacacacaaaacactttctatcattgaaagccattcttcctgatgtttgacctcttctaaggtgacctctcttcatctccatgaatntattgaatttcccttacaatagagccatatcaccataactctcactttcaatttcttcatcattactaatcttctt

SEQ ID NO: 45939 - DNA, 417 bp, Zea mays
tatagtcagcgggcacatgaccatcgtcatcagtttccccctcttcttctcattggccttgatataaaaccattcacctttccagccggttggccatttgatgcggtagctaagaactaaagccttcgtatccttgcgataaacaaaattgtagcagccaaaattttcatgcagaccgtctggcctggccttcgtctggtagtgcaactcatgcactccgcagaatgctttggcatctgggctcatctcttggcttcagagggcccagatgaagacactaagcctaacaatggcgttaggggtcagctgatgaagatatatttcgaaattgtttaagacttcccctatcatatcattcagaggaagtcggagttctgctctgaataaactcttgaaaccactacttcatcatctttc

SEQ ID NO: 45940 - DNA, 409 bp, Zea mays
  unsure (1)..(409): unsure at all n locations
cgacattgtctccctgttggaagccaatgtcatccttaatgctatggcgtctcccactatagagcatacttctaacagatntaaaattgtcattttctatctcatgctcattaattttactagttagttgtgctatgtgatcattttgttgtttaattaaagctaggtgatcatggatagcatcaacattaatatctctacatctcatgcaaatggtaacatgatcaacagtagatgtagagggtttgcatgcattcaattcatcaatcttagcatgtaagatagcattctcatttctaagattggaaatagaaacattgtaaacatttaaatctttagccttagatattaatttatcattctcaatcctaaggctagaaagtgattcattcaacttgtcaatctttgc

SEQ ID NO: 45941 - DNA, 463 bp, Zea mays
  unsure (1)..(463): unsure at all n locations
ntagaaccatggcttaattaagtaatgatcatgatagaatgaataccctatcttttcatgtgtctccaccttggagagagatgctcaaaccctatttccccctcttgagccattatacccccaagcattggattaaggggagaactatgcaaaggaccaattcatgatttaaacccttgaccaaagctgaagtacatttatatatctacaagatataggaagggaagtattacataaaggtcctacaaaaacccccaaatcaagcccccaagtggagagcaccctagagcaatcaaattcttctctaagtcaaaaatcagcccacttccaaagattggagatgttcattaagttgctggcgccaaagccttatggtccaaataacaaaaaggagccaaactacccaaggcacacccctgaaaagtgtgaacccaaaccagaactggttgacacggtttgacat

SEQ ID NO: 45942 - DNA, 466 bp, Zea mays
  unsure (1)..(466): unsure at all n locations
ntctagatcctgaaccatttggactacttcatcttcctatgcacgtaatccccatgatactcagattctacccacagccgaattctcagaaaagctggtcagaaaaaagctgaaccaaatagacccaacattgaagagtacgaagcggtattgctagggcttcggaagctcaaagccatgggagtaaaaaggtgttgggctcttggattagagaccttcgtcctccgaaacatcatctcctttcggatataatgatcttaagacgaaggtcatgaagggcgcaccttcatcattcacgagaataacaattcatagagatgataatattatccagtcatatatcaattcatatatntatttcatgataaacatatggacattaataagatttatattacattgataccttcggcttgttcgaaggtgttgacgcgagagcgattacaatccagcgtgaacagtacgt

SEQ ID NO: 45943 - DNA, 383 bp, Zea mays
tgtgtgggacattcaagcgactctccgagccgtttcgcgctatacgcaaaagcactgcgtattctaaagaaattttctgcaaaaccgcagcttttcactgaacgcatcgtcttagaagactggacgcaattctcaaccaatggataataagaccatgttctgaccagagttcttttgcctgtcaagagcacacggaagaatcgccatatgtaaatattaaataatcaagtatgctgcccttaattagcatactcaaaacgccaatatacatgcactagcgaatataacaccagtacaaacactggctatagtactgatttacaaccacgactatggatctgggactaaacggcatggtctgttagtcccggatgcctgaacag

SEQ ID NO: 45944 - DNA, 166 bp, Zea mays
tctaaagggagaacatgtgataagtctaacatatggtcatctctaaagagacccacctcgtgcacctagtcaagcatgacaactaagtagatgaccgcatcacatcgagaatgtgatgacccctttcagacccctgcaacacctgcatatggacctattctgacct

SEQ ID NO: 45945 - DNA, 453 bp, Zea mays
tagcggatggtgatgaagccgaagacattgctgtgaaaaaactctagagaaactcttgaattatgcttgtgaagaatattgtaatttaagaatcagatactactctgtaaatatgtccataccttgtaatatatttttacctttccgtccatgtatgaactgctttgatgtagacgaaacttgtatttttttgagccgaaggcgaaaaacaccttcccttttcgtacacaacgaaccataaatctgcttcctttcctttcgccgaagccttatccttatagccgaagcaactgtctgtatctatatgatatgatgatgatgatgatcctatgtatgtctaaatgaatgtatatgaatacaatgaatgatgcgatgtattgtgcacatgaatgtacagacacacgcttacgaagccacatcagaactcctcattccctatgaatgactgaaatc

SEQ ID NO: 45946 - DNA, 469 bp, Zea mays
  unsure (1)..(469): unsure at all n locations
tgaatggtcaaaatcaagaacttcaagtgcaactttgaaaattgctagaacatcaatgcccccactttagtatttgaatctaagtctagctctaatgataattcttgcaagcattgtgccaaatatcatgcttcttgttgtctaactaaccatgcaaggaagcaaagcccacaggtgaaggtcaaagaaattttgaaaagatgctctagcaatgatgggttaaagaaagttgaacccaaatacaagtcccttaagcccaacaagggtagaagggggcttgggttcaactcatccaaggaaaaccctagcacagtgcataaggggtggagatcccccaagttcatagagggaaccactctatatgatgccttgnggaggatccactcctcanatgacaagtcatctcangtaaaggttaacttgagttccacaaagagtaagatgaaggaagtgggatcctcaagtggac

SEQ ID NO: 45947 - DNA, 474 bp, Zea mays
  unsure (1)..(474): unsure at all n locations
ctaagcttctaagggagaacacattntatgactaaccaatgttcatttttagaaagacaaggtttgtagcgcatgccaagcacgaaagcaagttggtgcccatcattcacataagaacatcatgacgaccgacaggccgcttgagctactccacatggatttattccgcccgattgcctacataagcatcggcgggagtaagtattgtcttgtaataatggatgattattctcgcttcacttgggtattctttttgcaggaaaaatctcaaacccaagagaccttatagggattcttgagacgggctcaaaatgagttcggcttaaggatcaagaaaataagaaacgacaacgggacggagttcataaactctcatatngaaggctttctcgaggaagaggacatcaagcatgagttctcctctccctacacgccacaataaaatggtgtagtagagagaaagaatagaactct

SEQ ID NO: 45948 - DNA, 458 bp, Zea mays
  unsure (1)..(458): unsure at all n locations
tcggcttatctatgttatggatggctttngaatctgtccaatttccttcagcctttctagcagcctcttgacttccatggatagcaatgagcccttgctccgaaggtatcttcatacataagtatgctggatggagtatagcttcgaaagcattgagtgtcccttggccaatgattgcattatatgggtactccatgtcaacaatgtcaaaaacaacttgttcagttcttgtattgtggacatagccgaaggtaactggcttgtgattttgccaagtgccacaatcttccttcctccgaagccacaaagagggtgtgtagcatcatgaatcttgtcttctagctcttgcatctgtctgaaggccttagcaaatatgatatccgctgcactgcctgtgtcaaccagaacattatggaccagaaaccccttgatgacacaagatatgaccatagcatcat

SEQ ID NO: 45949 - DNA, 399 bp, Zea mays
  unsure (1)..(399): unsure at all n locations
ngatagaagagatacataactnttatgatcaccaagaagtgatttcaggtttaatcaaatcaaacattacagttttcgaaatatgttctcacagtggacagaacacatcaaccagtttgcaaaattcataactcctaaactctcaggcctatggctatgaaattttaacacaagccagatagccgaaacatctacaatattcttataacaaccatgaactgattgccacaataaattgagcaaacaattcaggttctaaaatctgtacagaatttggacagattcagttactgaatttggaaaaagcataacccctaaacaatcaggtttatggctgctcaattttagtataagcaagataataacggtatctacaacgcttatataggactcttctac

SEQ ID NO: 45950 - DNA, 350 bp, Zea mays
tatgaaggttcttcatcccaacatatgctagacgacgatgccacatctagcccatgctagtcttagcaattaagcatgcatctagaccggcctcctcctttgtaaaatcaactaaatagagtttgtcgtctagtacacccttaaaagctaatgaaccatcactccttctaaagacggacacatctacatttgcaaataagcaattgtcacccatattacataattgactaacggacaacaagttatacccgagcgattcaactaaaaacacattagatatggaatgctccgatgaaatagctatctttcctagtcctttaaccttgcctttgatcctgtcacccgatatg

SEQ ID NO: 45951 - DNA, 467 bp, Zea mays
  unsure (1)..(467): unsure at all n locations
gcttctaagggagagccatnttaagactaaccagtgttcattttgaaaaagacagggtttgtagcgcatgccaagcaataaagcatgttggtgcccatcatccacacaagaacatcatgacgaccaacaggccactggagcttctacacatggacctattctgcccgatcgcttacataagcatcggcgggagtaagtactgtctagttattgtggatgattattctcgcttcacttgggtgttctttttgcaggaaaaatctcacacccaagagaccttaaagggattcttaaaacgagctcaaaatgagttcggcttgaggatcaagaaaattagaagcgacaatgggacggagttcaagaactcacaaattgaaggcttccttgaggaggagggcatcaagcatgagttctcctctccctacacgccacaacaaaatggtgtagtggagaggaagaatagaact

SEQ ID NO: 45952 - DNA, 336 bp, Zea mays
tgtccaaggatgagttcccgttaccaagaatagattatctagtagatgcagtagcttcgtcagagctcatgagtctactagattgttattcaggctaccaccaaatctggatgaagaaagaagatgagccgaagactagcttcataacccccagtggcacatattgttatcttcggatgcccaagggactttaaaatgttggaggaagcttcagcagaatgacagccagattccttcattctcaaataggaaggaatgtactgacttatgttgatgatatcatagttaaaagcacgaagcaagaaaatcacattgctgatttgcaagagacatttg

SEQ ID NO: 45953 - DNA, 380 bp, Zea mays
attcaagatacaaatactctgtttgcacagaagcttactatgattggatccttgaaaaggccatttgtattattacgctaagtaggtacctacatctagagttatttctatcctagatcaaacacttgacctacactagctgtgttttagcatctcttcaattcactagattgctgagagtaaaacagtgaccaagtcttcatgttcgataaggaacggcgatccaaaatcattaatacccagctggggatctcccaccacacgacatatgtagcacttaacccttgcatatgtcaactcggcatcggttttcctaagaccacaatggggttactccaaccgagagcatatatactgcactggccacgctcttgccacgg

SEQ ID NO: 45954 - DNA, 476 bp, Zea mays
tagctttgacggcaagaagctgaacaaacccaaacaaagagacccatcatatatccagtcaaacagcatggaaatacaaagcccaaacgaattggagccaacatacgctaagtcgcccaaaggaattagggagccaacatcacggcagcaacagggtaaaccaggacctagagatagttttgactcctaaataacacaatatattgtacccaataaaacattccaaaatcatagtacaacgttacaaaaatgtgtagtcacaggaaaataactaacaacattttaggtggacatagtaacaacatatttagccttgttcatctaggactcctgcaaattaagttggtcgcccaagaccaaaattcatggcttctttcttttcttcttggccgaaacaataacaatcaacactcatctgatctcgcaaattatacagctcaaaattggctggtcctcaattccttgacacctaaact

SEQ ID NO: 45955 - DNA, 457 bp, Zea mays
  unsure (1)..(457): unsure at all n locations
tgtgtaaagtgcacatgtcgatgcagacactctgctacatcaattcgccaagcaaatgatgaaacttctacacagtgggaagatgaaagaatcaaaagaagcagtgtgaagcatggtgagtacaaaaatgttatgaaatatatttatatattatataagtgtcatctaatctgaattatatacgacacaaggtcaaaaggaaacaaacacgctatatatgtttgagataagggttgcaagatgatacacaagggttgtgatgaataaattccaggagtctttgaaatatgcaactacgttcaagatgatgcatgatcaagaaaggggtgcaaatgattgggtagtgcaacatacaacaagatcgaagaanattatgtgggggacaacaccaattcaaagtgacagctaatgaagaatccgganagtatacgtgtgaatgcaaacattgggaacatac

SEQ ID NO: 45956 - DNA, 357 bp, Zea mays
  unsure (1)..(357): unsure at all n locations
tgtgaagattcttcattccaacatgtgctagtcggcgatgccagagccagcccatgttagtcttagcaattaagcaagtgttgagttcagctctatcaaaatctactaagtatagctgaccctctaacactcccttaaatgctactgaatcatcacttcttctaaagacagtaacacctatatctgtaaaaagacagttgtagcccattttgcataattgangaaacggaagcaaattgtaatctaaagaatctacaagaaaaacattggaaatggaatggtcaggtgatataagcaatttacccaatcctttgacaaaccttggttccatccccgatgtgattgctcgttgggatc

SEQ ID NO: 45957 - DNA, 467 bp, Zea mays
  unsure (1)..(467): unsure at all n locations
tcggatgacagntctatcagattntccctagaaggggtttctttctttacgaagcatgaaaagataggaagggtgtttttcgccaaggctcaaaaagcggtatgtgtgtacgtttcatgcatcgcaaagaaataaattacaacaatttacatattcgattcaatgtcacatacatcagatgttacatagttttgttacaagagaagcttaatcttccttccattgttccatacatcaagcgtttcaaagtattattacaataaaatctattcttctttaagaactttntctgcaacttcgttcaaaagcttattgacgacttcgtcgataatggaatctgccagacttataatttccagtgcttccttcatttctggatcagctaggggatcgtacggctccagaggcggngatagttcagctgaagtaggtaaacagattagttcgaagccacaaagcaagtaccg

SEQ ID NO: 45958 - DNA, 449 bp, Zea mays
  unsure (1)..(449): unsure at all n locations
ntgacgccagctccgtcaccggattgtacgtcggtcttccttttccctcgggatgtctggactctgaggaggaagacggtccaagctttggcctatacttctccgaactgcgagatccagagtccatactgtaattcctgtatgcatgcgacgagttactctccgacagctcagagggctacaacaccgatggggggagctatgacccgacctggagtgcttccacattgaccatgggatcctcaacgaaggaaatcaactcggcatgccccgggaagatgaccagacacccacacgcgtctaggaagcaggggagccaggcgaggcccagacaccacctaggatccatgcggtcaatgacttgggcattgccatcaaactatgagtctgacgtctagatgttcgggggactcccaactcatcattgaccaggtcatgaagagctcgag

SEQ ID NO: 45959 - DNA, 428 bp, Zea mays
ccccgaaacgcgatacacccttcattggtgattcttttaagtagacataatcgtctaccagaaagcatataggttgtcgtcgtcggtctgcataaactctttgtcgagtctgagctttcttcatattatgaataattctctgaaccttttcttcgacctctttcaccatatcaggcctaaagaagtatctttctccaggttcagaccaatttagcggagctcgacaccgtcgtccatataaagcttcaaaaggtgccatcttgatactttcttgataactgttattgtatgaaaactccgctaggggcaaacattcatcccatttcggtgagaagtccaggacacatgcccgcagcatatcttcaagtatttggttcaccctctcagtctgcccactgggttgaggatgataagccgaactgtggagt

SEQ ID NO: 45960 - DNA, 344 bp, Zea mays
tctgcagcaatccaacacacagtggagttaggtattatgcttcttgtgcccgaaccactctaaatcctcgcgtgttctggtgttcggtcatcgcttatcaagacaagcaaaacacttaagccccttcctcatcttaggatttatggcgggtgcactccgtcacccgggcggagaatgccctctccgacatttggcgcgccaagtatggagctaagcattacgttcttgcttgttttctcgctcaacatgatggtgcaaatcgttgagcaccgcgccgagacttcaacggatttcctggtggaggaagaagctgtttattccatgccacaggttcccaactgccc

SEQ ID NO: 45961 - DNA, 352 bp, Zea mays
ttcttcggcggcacgatcaacgtctatgcttgccgaaggtgttcaatactcaaaaagtgcaaggcagttcaccgcatgaggacgcccatgttggcgactcgtactcaaatgctgaaagttaagaacaaggcaacatcaaaaatgttaaatattaaggtccttcgctcttcaagccattatgtcccttcggatataatgaattctggaccaatgttgccaaggaaaaaccttcgtcagcacaatatgtgataaggaataattcatgtactagataaaagattatatacacactactatcaactcgttgttatttgcaatatcatattcatacataacccactagagatgtacc

SEQ ID NO: 45962 - DNA, 426 bp, Zea mays
  unsure (1)..(426): unsure at all n locations
ataaatactctgcgtagaactttatcagcttcattctctgatggcatatcttattgtttggatacccaactataacgggtcggatnttcttccaagagttggctagcatccttcagttctttactcacgctttcaaagtgtacatcctgatttgaaatcagaatgtcttgcttctcattttgaatccgagcttcagcaatgtgacaccccggggtccaccaacacctcggaatgctactaaacaacacttctgacatctatatataaaatatcggcagcactcccgcctaaaacaatcgcagaaatgacgtggcaacagtgtataaacatatatcatgacaaaaacacactcaagattattaatccgctagcatagatcatttaacatacgacatgaagagaacaactactgcgcacgactagtta

SEQ ID NO: 45963 - DNA, 438 bp, Zea mays
ctcaatccttatctctttctatcaatcatacattgactatcctgtaagatagagccaaagatgaattcaattattatatcactaacttcatattcatctctatcaagaacttgtgttgtagggaataaagattaacctttgtcaagcaaaatgcctacaactaagggatatccaaatgatggtaaaaattaaatcttacgtgcacattgcttttaattattatattcctttgtgtcttttgtagccacataggaaaaatgaagcatatgagaatgaacttaaaatattctaccttgctttggaaagaatccaattatatggtagatcgcatatttgttattcttatatgtggcaatctacatactttaattgatgataattaatgcgtggcatatttcacatgaattatcgtattatagccatgacctacacataaag

SEQ ID NO: 45964 - DNA, 460 bp, Zea mays
catgcaactgctgccagaaatgagatgtgaactgcgtttctctgtctgacactatcttctttggcacaccatgaagacaaacgatccgagacatatacaattctgccaatactgcactgttgtagctggtcttgacaggtatgaagtgggctgacttggtcaaacggtccaccactacccaaatagaatcgtagccggctcgagtgcgaagcaatccgactatgaaatccataccaatctcatcccattttcactgagggatctgcaacggttgcaacagtccagcaagtctctggtgttctgccttaattcttcgacaactatcgcacttagccacatgctctgcgatttccctcttcattccgtaccaccagaatttcttcttcagatcctgatacatcttctcactggcagggtgaatcgaataggctgtctcatgagctttcttgagaatcaactc

SEQ ID NO: 45965 - DNA, 440 bp, Zea mays
  unsure (1)..(440): unsure at all n locations
tccaattcatcacttcttgcactctctcaggatcaactgatatcctatcctgagaaatggtgtgacccanaaatttaatttccctcagccagaaatcacatttggacaatttagcatataagtgatgatcgcatagtctctgaagtattgtatgcaagtgcttagtatgctcctattcatattttgaatataccagaatgttatcaatgataaccaccacaaacttgttcagttctagcatgaacactgaattcatcaaatacatgaaatatgcctgggcattggtcagcccgaatgacatcaccaagtactcataaagttcgtatcttgtagagaaagttgtcttcggaatatcactagcgttgatcttgatttgatgatagccagagcgaatgtctatcttgaaaacaccttggctcccaccaactgatcaacaacac

SEQ ID NO: 45966 - DNA, 345 bp, Zea mays
tcaccgattagcttaatgagaataactgcggattgtgttactctatctatttcacggttcaaggtggagactacatcttattgatctcacgctcaaaaatatccatgaaatgagttcacactagctatatcctgaacctgctctacctaagcaaccaggaacaattgcaactgctctacaaggatattggatgagggaaaaactggcttctggctcccaactgatggctgtctaaaatgttgttcagctggttttaattttcaaagttcagaatttgagggataatatattatcaataaagactgatcagtacaatatattgtacgcaagcgatcgattctcatt

SEQ ID NO: 45967 - DNA, 440 bp, Zea mays
tgtgaagcccatcacaagcttattaaagaatgataccaaatttaattggccttcaagaagcaatgaagccttcgagcagctgaaggtgttattaaccactgctccggtattagctcaaccggacattgaaaagccatttgatgtgtattgtgacgcatcacgcagtggtttaggttgtgtcttgatgcaagaaggccgagtgatagcctacgctctaaggcagttgcgctggcatgaggaacattatccaactcatgacctggaattagctgttgtggttcatgccctagaaatatggtgtcattatctgctgggaaatatctgtcatacttatacagatcataaaagcttgaagtacatctttacccagtcagagcttaatatgaggcagaagagatggcttgagctattaaagattatgaattggaaattcattatca

SEQ ID NO: 45968 - DNA, 447 bp, Zea mays
  unsure (1)..(447): unsure at all n locations
tatcaaagaaaaactatacagaattggagaatgtgttgtatgctgtcttaatggccttcaggaagcttcgacattattttcaagcattccatataattgttccttcatcgtagcctatgaaggatatcatgaggaacagagaagctactggaaggattggaaagtgggctgcggaactcaacgaattcagcattgattatgtgcatagatcctcaatccagtcccaggcgttagcagacttcatcgttgactggacgccaggggctcacgaagaagaagcaaataaagatgccgaagctnggacaatgttatgcgaatggtcctggggaaccttcgaggcaggtgcgtctgctgctttagttgcaccttccaaagttagaacatgctatgcaataaagcttgatttcacctgtacaataacattgctgatacgaagcttacttttgg

SEQ ID NO: 45969 - DNA, 453 bp, Zea mays
  unsure (1)..(453): unsure at all n locations
nggctagctaccaaccaatggctggcttgngaacgtgtggttggcagtgaggagctcgccctcccagcccccaactatttatagtcggctacaactacaactcgggggcggtggcggttgcagaactccctcgggggcgtgccgtgcgtgtatgtgcctatgtgcatgtaaatntctctgcggtttggtgcaacgaaaggcagaaaacaaaataaaaagaatcgcgggccacggccacacgcacagacacagacgcatgcagggaccgagagagaccaccgtccacgcctccacggagcagttaatacgagcaaatcgggcgcacatgcgagcgctctctgccgcgcccgcgcgtaacagggcaccaactgcacgcgtgtcccgggccccgcgagcccaactcctccacatggctcggcagattgtccagccttctgtagttctgtgaacgtg

SEQ ID NO: 45970 - DNA, 377 bp, Zea mays
  unsure (1)..(377): unsure at all n locations
gctttgattccgtcaacatgagatgattggagaagttttaaagaattntgagatatactttcatcagttgacacccaatgcaatcgttagacttagtgtctacatatgggctctccgaagccaaggtatgagtcctaatgacgaagctttntgttgagtgcacgagctgcactatcaaacgaaggccaaagcggatggccttcataagaacttcggatgctacaactttgcatatcagaaagatacaaaggcctcggtgattggctatcataccaagtggccgaccggttggacaagcgaatggttttacataaaagcggacgagaagaaaagggagaagctaatgaccatggtcatgagtccattgaaattgagct

SEQ ID NO: 45971 - DNA, 426 bp, Zea mays
  unsure (1)..(426): unsure at all n locations
tgtgagcaatacaagttcagaaaggaaaaagctgcttcngctgatcagccgaagcccatgctcttatgtgaggacatagcagagcagaaggtgctattgggatctcaactgtccgaagaacaggagaaaaccttgacaagggttttgttcaataataaagatgttttgcttggtcagctaatgatctttgcggagttaacagggatgttattgagcactcgctcaatgttgatccatccttcagacccagaaagcagaggcttcggaagatgtctgatgacaaggccgaaggtgctcggaatgaagtgaaaagactccttagtgccggaggtatcanggaggtaaaatacccagaatggttggcttacactgtcatggtgaagaatgccaatggttaatggagaatgtgtatctgatttactgatc

SEQ ID NO: 45972 - DNA, 461 bp, Zea mays
  unsure (1)..(461): unsure at all n locations
taacattgactgcctgatggaagccaatgccatccttaatgcattggtgtcttccactatgaagcatactacgagccaatttaaatttttcattctctaattcatgctcggccatttctgcatataactgtactatatgactattgtgttggataatcataacanagagatcatgaatagcatctatatcaacatctatacatctaacgcaaatagaaacatgctcagcggtatatgtatagggtttgcaaacatttaattcaacaatcttagcatgtaaaatggcattctcatctctaagattggaaatataaacattgcaaacatctaattccttattcttagcaattaattcttcattctcatttctaaggctaacaagagaggcattcaattgttcaatcttaccaattaaactagcattatcatttctaacattggcaatagaatcatcacaaata

SEQ ID NO: 45973 - DNA, 465 bp, Zea mays
actcaagcttgctagaaaatggatcacggaacttccatacgtggtctgtgtcctgcgaactcaacccacgcgagctctgcatgaaaatacctggttcttcatggatcatgggtcagaagcagtgctgcctgtctatctaatattccgggcgccaaggatgactttctaaaacataaccgtaagctgaagcaactaggctggaagacattgatgtgctggaggaagcacgaatgaacacagtaattcagtcggccaggtaccagcagaccttgaggcgctaccacgacaaagttgtgcgacatcaatcttttgcagtgagagacttggtccgtgagggacgacacaagctatcaccaccatgggaaggaccgttcattgtattagaggctacacgaccaggatcatatccgcttactcagatggacgacacataagtggggaactcgtgtaacatacaacacctca

SEQ ID NO: 45974 - DNA, 451 bp, Zea mays
  unsure (1)..(451): unsure at all n locations
ntcacagtgngtaaagattcaaacaggactccaacaagtgtgcatgaggtatatacacaatttgatctcccaatagtcaagaaatgttatagtctagtgtcttggtgatctcaaatattgtgttaaatgtatttgtctaaaacattcttgcagctggttgtacctatttgttccctggaaactggagtgcttggaaagagaatcaaaaggtctctaactggtgggcatgagatgcagtctacccaggacaagtgatcagggaggctagcatggtaaacttgacatttctcctcataaattatcataagtcgcacataactcaatcctacaaaataaatatgttcatcttataactaacatcaccgctgcatgacagcatgaatggtgagctgtaattntccatgaaaatgctgcangtgaaggaagcaatactccaacatgtcaagttaca

SEQ ID NO: 45975 - DNA, 442 bp, Zea mays
tctcctcaattggcgccactcctactctctctcgtatgttatcattccggactcggtctctccttgtgtggccacatatccagcgcaacatacgcatctctgccacacacagttgttggacatgtcgtcttttaatgggccaacattctgctccatacaacatagccggccggattgctgtcctgtagaatatgccttttaatttgtgtggcacccgggggtcgcataagacacccgccgcttgccgtcacttcaaccatccagctttaattctatgactgacatcctcatcgatgtctccatccttctgaagcattgatcctaagtaacgaaaagtgtctttcttgggtaccacttgcccatcaagactaacatcgccatcttcataccccatggcactgatatcacacttcatatactccgttttagacctactaagcct

SEQ ID NO: 45976 - DNA, 376 bp, Zea mays
  unsure (1)..(376): unsure at all n locations
tctgccacgacgtgatagtccctggccaaagagaagaatatcttgtttgggctacattctggactgccatgacgaaggacttcgccataactgcagtattgcctccacacgaagatatagttgcttcgtagctcatcagaaactgctttggatttgaatgcccatcatacatgggaagctgaggtggcttgtatgacgggggccatggggtagcctgcanttctgctgcaagggagaagcatcatcaaaaggaaaggcatcatgattaaaatcatcataccatccatcttcattgaacaagccttcttgacaaactccctttgtggtgggggtctcgatcctgttcgtcttgagcaagatgacacacttcctcaat

SEQ ID NO: 45977 - DNA, 418 bp, Zea mays
  unsure (1)..(418): unsure at all n locations
tntgggcattaacattcttggatattacatggctcccaatgttatgtgggctcctcccttccacctaaccacatgaaataacacgtcatatgtgcaagtacggagtcagggccttggtaacaacctgggtgttactaaaaaagtccaagacacatattcggaaaattcctaaacacaatcccggtaatattcgacaaaaacccggaaccgaaagaaatagtccgtaaaacacctcaccgattccgataaagaaattccgaaaaccgattccgttttaaaaaataccgctccggtgaatcgatcgaaaatttcaaatcggttcccgaataccgaaaaaatgcgaaaccgtgtttatccctatcaaacatactatccaacaaattacacatatgtacagtacacaagggcaacatatata

SEQ ID NO: 45978 - DNA, 437 bp, Zea mays
  unsure (1)..(437): unsure at all n locations
ctggtcgatgttgtgcatgtgtatgtatatgtgtcanaaaatgtattggtatggattgaagattgtggcgaaagataacgagttataaagagggctcggatgtttttaagtttcagtaagaatgtatttgatgtgtggtttgctgtgaggataatttttaaaatgtggattatgtgttggggaatgcatcgataggtgtctacgtgaaaagtgtatttgttttatgcatgtgatcgatgattgggatagtcgaggcgaatgaggagtatgattaatcctattagagtcactatgttgttgatgccttgtgctacgtgggagcacgtatgtgcgtgtctgccgtggtgtattatagtggtggtggcgtaagatatttgattgagatgtgcgggtatatgtcgcaatatggttatactcgcgacaaggaatgatgtatg

SEQ ID NO: 45979 - DNA, 282 bp, Zea mays
  unsure (1)..(282): unsure at all n locations
gacactataccacactancgcttatctaggtggtatctcccagtcagcttgatggcgctaaagaataatacttagctctctttattggtctcatttatttttttttgtaagacttctgctatgtaataatgatatttgggacaattatctttatacactggcattatatgtgatggtcttctttggcacacatatgagacgcacccggctttatcccttaaatccgggtgtgacacctctggaatgagcagagtgtctcatcgctttggtgctttatggact

SEQ ID NO: 45980 - DNA, 471 bp, Zea mays
  unsure (1)..(471): unsure at all n locations
gacactatgaaactaagctgngttcgcccttgggaggagtgcggtgcatttatgaaacctaacgggcggctacagccttggggaatctttgntaatgctacgtagtgatgccctgctgggccacctangtagtggtcaatggggagtagctctctccgggcagaaagggaatcacggcttgtgggtaaagtgcacaacctctgcagtgtgttcgaaaactcatatatcagccgtgctcgcggttatgagcggccaatggagctccagtgattagtggtacttgatcagagacattcggattacaggtggcaacgaggttgatggttcttggtaatgactctagtaatggttagtggtactctgtccgtttggaaaggagtacgtctgggttaatgacgtgggctaaatctaaaacttggctctctctactagtaataataatctgaccaactaaaagcaactgcttgactt

SEQ ID NO: 45981 - DNA, 425 bp, Zea mays
  unsure (1)..(425): unsure at all n locations
tccaatctctncaagttccacaattgagacaagtgatcattagtgattagcgacttgagaaagaaagtgatccgtgtaatatttgtcgctcttggtgcttggcttttgcaatcgtgctttcttcatcttctcccattcttattctcaagacacttgtaatcaaagcaagagacaccaagttgtggtggtctttgtgagggtctaagtgacccatttgtttaaggagaaagctcactcggtctaggtgaccatttgagagagggaaagggttgaaagagacctggtctttgtgaccacctcaacagggagtaggtttgcaagaaccgaacctcggcaaaacaaatcaccgtgtcactcgtttgatttcttggctgatttattntcgccctctctttcggactcggntntatttctaacgctaaccc

SEQ ID NO: 45982 - DNA, 442 bp, Zea mays
  unsure (1)..(442): unsure at all n locations
aacacctttcctgagctcgttgtctataaacgattcaatctccctgcgcgtagcgggcccaccttgcaaaggtactggtcgggctctgcggttcaccgtacaacgagtgcgagcgggttgtccgctggtgtaaaacttctggcgcttcgncttcttacctgcggcactatattaacagatgagtatgtgtgaagttaccacagcatttactgctatttgcactgttttgctgccaaaatttttaaccgtcgccgaagcttgtttgtcagaatcgaacgaagctccatcttgaaacctgcttcggaggaaaaaagtattaaagtttcagaagttcatagtttaatggccagagtccgttctaccgccagggttgagcgtgagggggacgaaactgaagcttcngagactgtncctatctccgaagccatgcaacgatccgggc

SEQ ID NO: 45983 - DNA, 461 bp, Zea mays
  unsure (1)..(461): unsure at all n locations
ntagtgattagagagagtgantttgtgtgttcatttgagctcttgcgctnggatcgcttcttttctttctcattctttcttaagatcaaactcacttgtaattgaggcaagagacaccaatcgtgtggtggtccttgcgggaacttcatgttccatttgtttgagaagaagaagctcactcggtccgagggaccgttcgagagagggaaagggttgaaagagacccggtctttgtgaccacctcaacggggagaaggtttgcaagaaccgaacctcggtaaaacaaatccgcgtgtcacactctttattcacttgagatttgttttgcaccctctctctctcggactcgattatatttctaacgctaacccggcttgtagtttgtgaattaagttgtaaattctagattcgccctattcacccccactctaggcgactntcacttttcaagaagggcatga

SEQ ID NO: 45984 - DNA, 429 bp, Zea mays
  unsure (1)..(429): unsure at all n locations
tctaaagggagaagcacatttgngactaaccaatgttcattttgataaagacagggtttgtagcgcatgtcaagctgggaagcaagttagtgttcatcatccacacaagaacatcatgacgaccgacagggcgcttgagctactccacatggatctattcggcccgatcgcttacataagcatcggtgagagtaagtattgtcttggaattggggatgattattctcgcttcacttgggtgttctttttgcaggaaaaatcacaaacccaagagaccttaaagggattcttgagacgggctcaaaatgagtttggattgagaatcaaaaagataagaagcgacaatgggacggagttcaagaactctcanaatgaaggctttcttgaagatgagggcatcaagcatgagttctcttctccctacacacc

SEQ ID NO: 45985 - DNA, 432 bp, Zea mays
aaaactcagcggtcactcccgcggggctcataggaggaggatatcttttttgggttgcctctcttggattcaatgccctgccaaggcggccacctcttgcgtaatcgctcattctgcataggatctcgactgaacatgtttctataacaggattcttgaatgaacgtgattgaaagggtctgaagcatctattaaatcacagctagatagacaagaatctctcttaataactctcagtggtgcaactaagtatacttatgcgagtgctacagacgttttctatcttagtagctagcacagttttgcgtctgctgagaatctccattatccgtaacaagtgctcaatagcttttggagagcgagcttactgagccatgacttgtcataatttacataatgcctcatcactagctgtggtgggtcaccagactc

SEQ ID NO: 45986 - DNA, 300 bp, Zea mays
  unsure (1)..(300): unsure at all n locations
ntctacaagcgcacgtactatctacacgtaccccggtcgctgtcggccttatttgatgcagcacgcgtgcatgcaccgcgcgccggtgccgtgtacgtgcctgccgccgcgcacatggatggccacgcacgacgacgacgacgcagagcatgcaggcaggcatcaggcgcggacacggccggtcgatcgagcgttaggttacgtgcgcgcgcatgcatatacttggcagttggcgcgcacacgcggcacggcacggcaaacgacggcagagagagcgggagcgagacgactgagcggagg

SEQ ID NO: 45987 - DNA, 450 bp, Zea mays
  unsure (1)..(450): unsure at all n locations
agtctttaactgttgagacaggacgaatccaatcgttnttgttggtttctacttgctctgaagctntagaaaccatgatttgaggaagtaaacgtgtgctatagttagtagtggctgcggcggcggcggttctgtattgacagaagttgtctgtctgacagggagtttgagcaaatgggaacaatattattcgaattctgaattgctgttcatatttaccttgccctttgctcatctgctgtctaatacctgacgttctttaatgcacacacaattggcaacgttttaaaagtttctggtgattctgtggtacacacatgaacaggcctgctagatatactatgaaatgcactgcaagaatttaaaaccttttgaaaaaaaattgtttgctggagacgtcaatgatgggagcgaggctacctaccatgttggttgaatctgagctccact

SEQ ID NO: 45988 - DNA, 332 bp, Zea mays
  unsure (1)..(332): unsure at all n locations
tagccaanataactcaaataaaatcccacatcaagcctctcattgtgggacttaatgggaattctgaatttcagaattctgaaattcagaccttgagccatagatcacggatgttcaccttggttcctaactctaattctgatggccccattgacaaaattgtgtctaactaaaccctcttgcgtgtgccagaagatggcattgggacgcgagccctatacaccacaaaacctttgatttgccttgggttttggcagggagacagaccggattttctggctccatatctctgcgaccaataaggcaaatcctatgacccccacacaaaaatg

SEQ ID NO: 45989 - DNA, 446 bp, Zea mays
  unsure (1)..(446): unsure at all n locations
ctcaattattatctcattnttcttatcttcaaaatcttgctgcattcttaacgctctgcttagcagcatgctctacaaaaataagttaaggttataatatttttacccatcacaaagataacaagaatctatgcaaagattntaccttgaaattggagtaaaataagctgccgacgatattgtgacgtccgtaaccactaatgtcggattctaactttgggaaaccaacactctttgacagagtgtcaattatttttgccccagtgcgggtgcggatacatcccagaaattcttcgtcaacttcgncnaaaaacatagatcccggctgatagccacaagatattccaaattcttttagcttctctttatctaccttggacaatttctgaccttcaggtgctgaangnnnaatctttctcttctatagagcataacaacttctttcc

SEQ ID NO: 45990 - DNA, 478 bp, Zea mays
  unsure (1)..(478): unsure at all n locations
tattaggaactatgaaactcagcttaaagggtgccattntaatgctctcttgatagctattattgtacgagaactccgctaatggtaaatagtcatcccatttctgtggaaactccagaacacatgctcgcaacatatcttcaagtatctgatntaccctttcagtctaaccactagtttggggatgataggccgaactgtggagcaatttagtacccaacgatttgtgaaggtcttcccaaaattggatacgaattgaggtccacgatccgacactatagtctttggaacaccgtgcagactgaggatgcgagcaatgtacagttccgcatatgcgattattggatactttactttgactgggaggaagtggggaatctttgtaagtcgatcaatgatgacccagatggaatcatacccttttgctgtcctgggcaatcccacaatatagtccatgcttatatnctnccatttctat

SEQ ID NO: 45991 - DNA, 311 bp, Zea mays
cgtcatgcatatgttggtccccatcttttgatgggttgtaacatcccaaaatctcaacccaaggattggaaccctaatctcctaaacccccccttatttctatttcccccctaaactccacccttatgtcatctcgtcatatgcatacacttggattgttacgaacacctcacatagattatttacaacacttaagattatttagcaaattgtcgattcaaaagaaaaggaaataaaaagaaacaaaaatagaaaatggaaaagtgaagtagaaaactgaaaaataaaaaggaaaaaacccttccccccct

SEQ ID NO: 45992 - DNA, 468 bp, Zea mays
  unsure (1)..(468): unsure at all n locations
ntccgaatagctgcaatgaatgccacattttgattacatgtatatgacatttacttcataagttataatgggaacataaattttattttaagagttttgttcatatacttacgttcaaaatgatgggtgctgtgatggtacggattgaagtgtattgctgtataatcagatgactcgaggtactctatcgtagaacattaaagttatcattaccaatcattaaacgaaaattactaatgacatatgggcatgaaaagacgtatgttaatattgtaccttgccttctaaatcgccgaaacattgtcccaattattatgccataattctcattagccaacgcccaacggaatgcattcttgtttagtaagtcaccccaaactttaatagtgtgtatagaccacctagcatccatgacaacaatctttctgacattaccccacattgtgtgttgaactgtatctaagcgga

SEQ ID NO: 45993 - DNA, 465 bp, Zea mays
tgtgaagattcttcattccaacatgtgctagtcggcgatgccagagccagcccatgttagtcttagcaattaagcaagtgtcgagttcagctctatcaaaatctactaagtatagctgaccctctaacactcccttaaatgctattgaatcatcacttcttctaaagacagtgacacctacatccgtaaaaagacagttgtagcccattttacataattgagaaacagaaagcaaattgtaatctaaagaatctacaagaaaaacattggaaatggaatggtcaggtgatatagctattttacccaaacctttgaccaaaccttgatttccatccccgaatgtgatagctcgttggggatcttgttttttctcgtaggaggagaacatcttcttctcccctgtcatatggttggtgcacccgctgtcgatgatccaacttgagcccccggatgccataaacctac

SEQ ID NO: 45994 - DNA, 355 bp, Zea mays
ttaatttaacttggtcaaaaagtctaagtgccatgtgtgtgttgaatcaaaacaaccccgcaagccacacaaggctgctgaagcgaggagtttggcacctctaaaacctgttcattctgatctgtgcgagatgaatgcgaatttgaccaaaggtggtaaaagatactttctcacttttatagatgacttcactaaaatttggtatgtgtatctcttaaaaacaaaagatgaagccgtcaattattttaaggcctattaagctgaagttgagaaccaacttgataggaaaaaaaacggttaaaggtccaccgaggggaaatatttctctatgtgtttatgaattctgcgtggacat

SEQ ID NO: 45995 - DNA, 411 bp, Zea mays
  unsure (1)..(411): unsure at all n locations
ntcctcgtcttgactacgatgtcatcgatgtaggcctcgatcgtgctgccaatgtgttcgccgaacacatggttcatgcaccgctggtacgtcgcacccgcattcctcaagccgaacgacatggtgacatagcagtacatgccgaaaggcgtgatgaaagaggtcgcgagctggtcggactctttcatcctgatttgatgataccctgagtaggcatcgaggaaagacagggtctcgcacccagcagtggaatccacgatctgatcgatgcgaggcaaagggtatggaaccttcggacatgctttgttgagaccagtgtagtctacacacatccaccatttcccccctctttttctcacaagcacaaggttgtgaagccagtcgggatggaatacctctttgatgaaccct

SEQ ID NO: 45996 - DNA, 422 bp, Zea mays
  unsure (1)..(422): unsure at all n locations
gagtaaaagctatatttatatgataaatggagttcatgctcaaagatacagacaataagagatagagctccacaagttaaaggagtggacaaagaaccacctaacctgtctaattatctaaaatcttgagcatcacattggaatttctaactttaaaatcctctgaacttaattcatcgtgacttaatgagtgcatgctgttacacattatttggttattaacattagatcattttgtgatagcagtgtctttcagtacttctaaatcactacttcggtgtactttcatgtagtaggctgctgttcaatttcaagtgcacgagnnnnnnngaaaancaacaagcgaactctcttcccagctaatgaggcaagcactcgcttccttgcacagtggtcttcagaatggccaatgcatncctatt

SEQ ID NO: 45997 - DNA, 449 bp, Zea mays
  unsure (1)..(449): unsure at all n locations
ntatcanatggacgtgaanagcgccttcctcaatggaccattcaatgaagatgtctatgttgagcaaccttccggctttgaagatagtgagtaccctaaccatgtgtataaactctcaaaggcgttgtatgggctcaagcaagccccaatagcatggtatgaatgcctgcgagatttccttatcactaatggcgttaaaatccggaaaaccgatcctacacaccttactaacactattgcaaaatatttgtatgtatgccaaatatatgttgatgatatcatatttgagtctactaacaaatctacatgttgaagaagttagtacgaacatgacacacaaaattgagatggcctatatgggggagttgaaccatttctaagatttcaagtgaagcacctccaaacggtaccttatcagtcaaacaattacttcaaacatactaacaagt

SEQ ID NO: 45998 - DNA, 398 bp, Zea mays
tcccttttatcccgaaacgcgatactcccttcattggtgaaaccttcaagtagacgtagtccccttcaagaaaatacaagggccttcaccgtttgtctgcataacccttctgacgagcttgtgctttcttcatattatgagtaattttctgaaccttttcctcggccttcatcaccatatcaggcctaaagaagtacctttcccctggttcagaaccaattagcggagtacgacaccgtcgtccatataaagcttcaaagggtgccatcttgatactttcttgatagctattattatatgaaaactccgccaaaggcaaacattcatcccattttggtgagagtccagaacgcatgctcgcaacatatcttcgagtatctgaataactctctcagtct

SEQ ID NO: 45999 - DNA, 456 bp, Zea mays
taaagccatggtaagtagcatacgccaataatatacgaattgtctcaagcctagctactggtgcataggtttcaccgaaatccacaccttcgacttgagagtatcctttggccacaagtcgagccttggtccttggcaccacaccatgctcatcttgcttggtgcggaagacccatttggttcctacaacaattttgattacgacgtgggactaagtgccatacctcattcctagtgatgttgttgagctcctcttgcattgtcaccacccaatccgaatcttgtagtgcttcctctaccctgtgtggctcaatataggaaacaaaagagtaatgctcacaaaaatgtgcaacacaagatctaatggttacccccttatgaatgttcccgaggatggtgtcgacggggtgatctcgttgaattgcttggtggactttgggtgttgcggccttggtc

SEQ ID NO: 46000 - DNA, 426 bp, Zea mays
  unsure (1)..(426): unsure at all n locations
tctaagggagagcacattntatgattaacacatgttcatttttataaagacaggatttgtagcgcatgctagacaggaaagcaaggtggtgctcatcatccacacaagaacatcatgacgactgatatgccactggagctcctacacatggacctattcggcccgatagcttacataagcatcggcgggagtaagtactgtctagtcatcgtggatgattattctcgcttcacttgcgtgttctttttgcaggataaatctcatacccaagaaaccttatagggattcttgagacgggctaaaatgagttcggcttatggatcaagataataataagcgacaacgggacggagttcaaaaacttacaattgaaggctacttgaggaggatggattaagcatgagtcttttcaccctacacccacaa

SEQ ID NO: 46001 - DNA, 451 bp, Zea mays
  unsure (1)..(451): unsure at all n locations
ctattaggacctataaaactcaagctgacatgaggagatggcgctcgtcatcaagagcttccgccatatcctcaaacaaaggagggggaaagactacaagtcccgctccaagaaggtttgctacaaatgtggtaagcccggtcattntattgctaaatgtcctatatctagtgacagtgaccgaggcgacgacaaaaaggggagaagaaaggagaagaagaggtactacaagaagaagggcggcgatgcccatgtttgtcgggaatgggattccgacgagagctcaagcgactcctccgacgacgaggacgccgccaacatcgccgtcaccaagggactcctcttccccaacgtcggccacaagtgcctcatggcaaaggacggcaaaaagaaggttaaatctaattcctccactaaatatgaatcctctagtgatgacaatgctagtgat

SEQ ID NO: 46002 - DNA, 456 bp, Zea mays
  unsure (1)..(456): unsure at all n locations
gtntcttgaagatccattagcaacctataggttgtcatccataatgatggtcaacgacctcccaagctccattaaacataatagattccatctcactccttactgcttccttccataagtcagcatcaggagacgaatatgcctcactaatggtacttggagtgtcttccacaaagtacactataaagtcattaccaaaggattctgcaaccctctgtctcttgctctatcgagtgaccatagtgtcatcctcctcagggatgtgcacgtgagaattctcagcatgatctataggaatcaacaattcgagtcatggggaattatagtctcatgacttgtatcactaagtgtattcttcatgggaaactcattcttcaaaaatgttgcgtctcttgaatccatgatagtatcaacatacatatcaagcgcatcagattttataattaagaacctata

SEQ ID NO: 46003 - DNA, 469 bp, Zea mays
  unsure (1)..(469): unsure at all n locations
ctaagctagtgcaatggtggcaacaagggaagaagtgaagggtgtattgctgaagaatntaaatataaagagatatcagccttcacgagtgtatactttgcagaagaacacaatgtaaatgcacctacattaaggtataatgttgatcaagctggtccatgcagtaaactcaaaattttgtcattcgagggaaggacagttggagcatcaactgaatatcacattggacgtgaagaaaatttggatgcattactctacatgtatgaaaacatggaagagatgactccatacttcaagtaagcatagattttcaaatttaagagcaacatgtgctcattactcctcgtaactcttttatttacttttttttcaacagagagtacgaacgacagaataagggtaaactgtcgacgaggctgtatgaaatcatgcttcgcgaaggaaaagaaggcactcccaatttcattaa

SEQ ID NO: 46004 - DNA, 434 bp, Zea mays
  unsure (1)..(434): unsure at all n locations
taccgacattgaagcatgagcgcttcccctttgtcttggtcttgctaggctgtcccttgcgacccttaagcgccgtcttgaagcgcttgatgatgacggccatctcttcatcattgagccctgccgcctcaacttgtgccaccttgctaagtaacgccttcttgcttctcattgccttgagagcaacgggttgaggctcattgattggaccattcagtgcgtcgtccacgtacctcgcctccttgatcatcattcgcccgcttacgaattttccaaggacttattcgggcgacattttggtatacctgggattctcacgaatattattcaccaaatgtggatcaagaacggtaaaggaccttagcattaggcggacgacatcgtggtccgtccatcgcgtgcttccgtagctccttatnttgttgataagggtc

SEQ ID NO: 46005 - DNA, 448 bp, Zea mays
tcttctttttcttcataagaaccttactggaacactaccccacttaaaaagaatgagggtagaactcttgaatcttggggatttgaactcctcgaagtacctcataacaagggtgttacggggccttcttctggtgctgctggttgaccaagctgcaaataaatgcctgacacaaggttgattctgggacaaccttcttctcatcttttcttcactatcttcttttctcttctcacttctcacttttcactgcatctttctttctctttgctcttcccactcgaggattctatcaaagagtattactatcatacactggaggaaaccaaagactatgaaccatgtgcaacagtcttcaacccaagattcaccaagcattgtgatctcatgggcgagggagtggaaaatggagttgctttgcgattggcagatggggttttatctggag

SEQ ID NO: 46006 - DNA, 242 bp, Zea mays
  unsure (1)..(242): unsure at all n locations
cnggggatacaccaaatagaattttagtcccatgaagacaaaatgctgatttctaaagcacaacatgaagagctttgaatgtgatattcctaacatccactcaaagctcgagggctacacccattgggtgtttcagttccgatatacaaaaccattatacaaatctactcctccatataagatcaatattattcttgcgtctagatatacacatatacaataaccctacatccctattttcc

SEQ ID NO: 46007 - DNA, 448 bp, Zea mays
  unsure (1)..(448): unsure at all n locations
ctcagctgagcactgggctacagcttgctccgctggactctttatgagactctctcccttcaggaggcccgaagccagaagatgaacgctgtcaacccgacaccggcagatgatgagctataccaagatatcagagacatggagatgctttatcaacaggtgcagatgaagaaggataagatggccgacctagctgaactgcactggcagatagacgaagcctctgaagaagttcgtcatcttactcatgatgagcagaaccgaaggccttatcataaagaccttcatcatgagggtttcttcaacgaagatgactggcatgagaatttctaccatggaaactttgcttttgatgatgcttctcctctgtacgccgagctgcaagctacagcttgaccttcgtcctacaagcctnatcatcttcccatattcgatggccattgagacc

SEQ ID NO: 46008 - DNA, 447 bp, Zea mays
gtaccaaatggacgtgaagagtgccttcctcaatggaccaatcaatgaagaggtctatgttgagcaacctcccggctttgaagatagtgagtaccctaaccatgtctataggctctctaaggcgctttatgggctcaagcaagccccaagagcatggtatgaatgccttagagatttccttattgctaatggcttcaaagtcggcaaggccgatcctactttgttcactaaaactcttgacaatgatttgttcgtatgccaaatttatgttgatgatattatatttgggtctactaacgaatctacatgtgaagaatttagtaggatcatgacaaagaaattcgagatgtctatgatgggggagttgaaatattttctaggatttcaagtcaagcaactccaagaggggcaccttcattgtcaaacgaagtacactcaagacattct

SEQ ID NO: 46009 - DNA, 326 bp, Zea mays
  unsure (1)..(326): unsure at all n locations
ggtcgtgcgctgcactcttagtaactgatgcacggatagtcttctcggaagacttccgattttcgcatttgttgcgctagcccggctgcacccttatgcgacttctgcacggatagtcttcgcggaatactacgatttttcgcacttggtgtgctggtccggctgcacccttaagcgacttctgcacagatagcctctgcggaagactacggattttcgcacttgttgtgctagtccggctgcacccttaggcgacttctgcacggatagtcttcgcggaagactacgatttttcgcacttgtngtgcttatccggctgcaccctt

SEQ ID NO: 46010 - DNA, 382 bp, Zea mays
  unsure (1)..(382): unsure at all n locations
gccatccttcttctttacaaagcgaagtacttgngcgaataaatcccttgtccagcaactcttgccagtgcttcttcaattctgccaactcagccgggggcatccggtaaggcctcttggaaaagggtgacgttctcagttgcaactcgatggcaaattcaatgtcccggtctggtggcattcctggcaattcatcacgaaagacatctgcatattcacagaccactggaatcttcttcaagggtaactccgtcatagagaaagcacatgactgagtagaaccttgattgggcaaaaacaaggtgaaacctncacatatcggggaattgacttccacgatgcggctggctacatcaagcactacttggtgagggtcatcaat

SEQ ID NO: 46011 - DNA, 426 bp, Zea mays
  unsure (1)..(426): unsure at all n locations
gtgagcttcgacgacaacttcggcgacatatcctatgcatcatcttcacctttgtcatcctacatgagtcagggaatcataagaatcaagcccaaaggaaaaggtaagcacgaaatgtcatttcatactggttcaagatgacttcgggcttcgtctccagctttctctcgcccgccctttgtccataccatttttataaatctattggagatacttcgggcgaggtcgggcatatcatccaggattgatgaagataaggtgaagttgggcctgttgacaacctttccatgttcgcagccggccttcagaaatgcagcagcggtaccccgagaagccacccatgcacagaagtcgccgtgcccggctataacttcgtcaagctcttcgatttcagcttcaatatgatcgaaggcctgnggtaaattt

SEQ ID NO: 46012 - DNA, 378 bp, Zea mays
  unsure (1)..(378): unsure at all n locations
ttggtaggcggaccactgcaattcaggaggatgtattctattaaaagggcgttcgaaaagctcanggcgtctagtctcaacaaggctatagtctaagggtgtattgcggaggcttttgcacttaaagagatatctctattctcaaccaggtatttcgctcgagccaacaatgtgtttgctcctctcagtgcgacttcatgtctaaaatgaatcgccccaaagcactcttcaaaattttgcgaatccgggtaaagcagttgtaaaaaggagtgtacgtcacattgaaggatcagatttgaacacgctaatgctatatatgtatatcaactattacagcacacgctactgctcatgtttgtaggtcatgggatgacttga

SEQ ID NO: 46013 - DNA, 267 bp, Zea mays
tctatagggagaacacgtgataagtttgactaacgtgcatttcgtaaaagatagaccttgtgcagcttgtcaagcaggttaacaagtgggaggagcacatcacagcatgaacgtgatgaccacttcaagacccctggagctgctgcatatggacctttttggacccgtcgcctatctgtacataagagggagtaagtatggcttagttattgttgatgaattttcccgcttcacttgggtgttctttttgcaggataagtctgaaac

SEQ ID NO: 46014 - DNA, 174 bp, Zea mays
  unsure (1)..(174): unsure at all n locations
gatgctttgagccctaagggtcaagtgaccacatcctactatttgatgcacagaaatggctggaaatggaccactcaaccttggtatgctcaataatgtagaagcaacagttatggaagttgagtctactttggaagaagagattcgtanaggacaagagtccgatgagaaaat

SEQ ID NO: 46015 - DNA, 305 bp, Zea mays
  unsure (1)..(305): unsure at all n locations
aattgcgagatctccggcctctgcgaatcttttgggtgtgctgtccgatgacccggaaccgtttctggtggattgttcgcacaatcgcggcttcctcgccgttgaattgctcgcccacgcatcaattttaccgtcaggccgcactacatcgtgggcgggcctcttcaccactcgaccgccggtgagtagtacctcatcatctccgccatctctttctctatgtgtagcaccgctcggggtggctatcggagtactgagccgtcaacnggtgctcgtcggtgagcacgccgtggagctctgctcat

SEQ ID NO: 46016 - DNA, 327 bp, Zea mays
  unsure (1)..(327): unsure at all n locations
gcacccaagatcaccaataatatctttatgcgtatgtcccaaggctcttacgccgggaggcacaaacgccaacagtgcccaatgaaattgtcattgaggccattattaaagggcttcatccaggaccttcagcccaatactttgccaagaagccccctcagactctggagaaattgctttcgaagatggacgaatacatccgcgctgcaatgactttctacaagaaaggaggaagcttacggttctccgaataaccaggggcttcggagggagaattcatcctagacatgtcagatcaatncattccactcagaatgatgacagggg

SEQ ID NO: 46017 - DNA, 341 bp, Zea mays
  unsure (1)..(341): unsure at all n locations
gcttgtgcacacctctgtgaaagctcccgagaaaagaatcggagtttccttcgccggagaagccagtccacgctcggcggagctctcacccccgccggagcacgtggaccgggtaagccactccaccatccttcgattccttgtgcacacaagtcgtgcgtgaccccgtgatgctcaccgtgccctcggattgcgccagttcgccgtagtttggccggtacactcgccgccgacgaggacacccgcctgcacgcgtggaccgggcgattccggccacctccgacgccgagccgtacctcgacgtgacccccagagtnctcccgagccgaccccaccctacg

SEQ ID NO: 46018 - DNA, 264 bp, Zea mays
  unsure (1)..(264): unsure at all n locations
gggaccactagcataccgacttgggttacctcaaacattgtctgttgtgcataatgtgttccacgtgtctcaattgaagaaatgtcttcggatttcgatcgaaccattaaagtaacgtatgctgccttagaaccagacttgacatattcagaacatcctatccaagtcttggatcanaatgacaggattacacgaagaaaaactctcatttttacaagatacagtggaaccaacacacggaagatgaagctacttgggaaactc

SEQ ID NO: 46019 - DNA, 356 bp, Zea mays
  unsure (1)..(356): unsure at all n locations
accggatcttaagtcggcgcngctgcaactggngcgttattggttgcattttgtgttactcctccttcttttcctgggtcgccttgaatgcgacgggttgagcttcngatgtggagggatcatcaagctcgttgatcttccttgagccttcgatcatgcactcaaaacttacaaaattcccgattacttcctcgggggtcatttgtgtatatcttgggttgccacggattaattgaacttgagtagggttaaggaaaataagagatcttagaataaccttaaccacctcgtggtcatcccactttttgctcctgaggttgcgcacttgattcaccaaggtcttgagccggtgtaca

SEQ ID NO: 46020 - DNA, 459 bp, Zea mays
  unsure (1)..(459): unsure at all n locations
atccttgagtcacctgcngcatgcagcttcgtaaaacatccatgcttcgtataatcatccatgcttcgtaaacaagggatcccttcttttgcaataaagctgatngaaatgtatttcttagcttactntgttccttagcacattttcanttttataaagaaatctccgaagatcgacttncgtattcaattgtgtcattggtgcgatataatgtatgatgtgatgctatccggcatgatgtgatgatatgatgcgaagaatgatgctaatgccgaagacacacacccacacacccataccgaaacacacaatctctgcgtccccttatgaacgaatggaacctctntgccatttatttttcggcttcactgcttatntttaggtgtagttctgcatcccctangaaacgtctttgaactctttcgctatattcaacagattggctctgattccctttga

SEQ ID NO: 46021 - DNA, 342 bp, Zea mays
  unsure (1)..(342): unsure at all n locations
acactaccggaatctagatctttgtctagtgctaggaggattgtcgagtgctttttgtctggcactcggcaaataagcctttgccgagtgccacactcggcaaagtcctgctctcggtaacgacagtatttgccgagagcaggactctcggcacaggaatacactcgacaaagatttctttgccgagtgcgaaacactcggcaaagggccatcagccgccgtctaatactgacggccgttacctttgccgagagccgagtgccccccgttggacactcggcagagcaagctttgtcgagtgccgcagttggacactcgacaaagtatattnnttatttttta

SEQ ID NO: 46022 - DNA, 391 bp, Zea mays
  unsure (1)..(391): unsure at all n locations
agctntgtcgatgatgtgatctaccttctcataatgcaatcctccgccgcgcacagacttcccaccaattcatccacaaagagttgttttanatcacaaaacatgtcaattgttaccactacctgngtgaatcgtgcaggaaccacgcggagaaatttcttgacgacgcgaacatcctccacaaaaagccgagtgctcggaggttgctgacgaggttggtgattctcatcccgaaatcctcgacagattcaccgtctttgaatttggtattctcaaattctttgagcantttttgggcgttcacctccttcacccgatcagcgtcgagccgcatcagaatcatttgcctccacgccttcttcgcagtcggccgacacctaacgattgcaca

SEQ ID NO: 46023 - DNA, 328 bp, Zea mays
  unsure (1)..(328): unsure at all n locations
agcttcngattacaaaccgacttaaatatataatgaccttttagtccataaaagtctgagtcaatgttgcaagcttttataaggtgcatatttgtaattcctcacacgctgctatgaactaaatcattangccgaagccttttaccacttatattacagatacgngcatcatcaagatatataatgaataacccattcataatggatgccaaagccacacacatgccattcttatagatcacaccaccatttgttttcactcgcaaatgaataaccattccttatcaaacatgaaggagacataatgttttgactcatactaagaact

SEQ ID NO: 46024 - DNA, 297 bp, Zea mays
  unsure (1)..(297): unsure at all n locations
tgcagctttgacaattgacagtgaatcttttgtatttatatttcacagaaggaatcgcttgtgtccttgacccttgacttatatgtactatgcctgtgtcccttagctattaaactagggttatccatggagcgtcttgtaattcgagacggcagatgtggttacactgtataggctagctagctatgggggcgcaatcatccaatttattntttcacaactcctgattgaaatatcaatttcaaaacatccaattttgcattgcatgattntcttatttatattattactaggtag

SEQ ID NO: 46025 - DNA, 210 bp, Zea mays
gtgcccatcatccacacaagaacatcatgactactgacaggccactggagctcctacacatggatctattcggcccgatagctgatataagcatctgcgggagtaaatactgcctagttattgtggatgattattctcgcttcacttgcgggttctttttgcacgaaaaatctcatacccaagagaccttaaatggattcttgagactgg

SEQ ID NO: 46026 - DNA, 406 bp, Zea mays
  unsure (1)..(406): unsure at all n locations
gctttaatgaacttttaacttacgaaattataagcgctgttagtcctcatgcaaatgcaactacgggatgctctatgaggcactgagttttacacaggtctaagtcattgacccctcttaatagtacggctatctagcctactaatccggtcaggtatcttctctaaactcctcaagaccggcaaaagtaaaacctatattataccttngccttcatctgatccacaaccaatgcgtatgactcttcaacatttcatttctatgtggtccaaccctgcattcttattactccaagaatcgttagtccacaagtagttgtcattaattaccaaaacattatcaaaggggcctagatgattcacaatctcccnctttttggtattgatgaaacaccacatagtatatt

SEQ ID NO: 46027 - DNA, 304 bp, Zea mays
  unsure (1)..(304): unsure at all n locations
actatgtgaatgataccacttgaaggagtcctcaatagattactcctccttaatgagtattctgctttagaaagagttcttctccccctttagagatgaagaaatactccccctgacagagatcctctacttaggaaaaagcatgtgtaaaactagaggagcacgacatgatttganaagactaacttcccttatgcataggtaacagaaatatgagtaactacttatgcanttatagcaacatggaagcatatgatatgaaatatagtctaatcaaatattggagaagacatggtaatgatac

SEQ ID NO: 46028 - DNA, 270 bp, Zea mays
  unsure (1)..(270): unsure at all n locations
aggtggtgtacatcattcacacaagaacattatgacgaccgacaggccactggagctcctacacatggacctattcggcccgatagcttacataagcatcggcgggagtaagtattgtcttgtaatagtggatgattattctcgcttcactcgggtgttctntttgcacgataaatctcaaacccaagagaccttatagggattcttgagacgggctcaaaatgagttcggcttaaggatcaagaaaataagaagcgactacgggacgga

SEQ ID NO: 46029 - DNA, 485 bp, Zea mays
  unsure (1)..(485): unsure at all n locations
gtcatctgaggctgcaactgacagtggtcacccgatctttgatcttactccgcnttgtagtcactttcctcttcctcttcttcgaatcctaaaccattttgggatatcaggatagaagaaaccaatagcaccgaaaacacgaatcaatcgatgtgtgtttcgtgccacaatagcactgttgcaaagcctttggctttggtttactatagttaccaagtgttacattgcactttacttgaatataatctaaccatccatcactaggctggccaaactcatcttcaaacttatacttgtagctaagtctgatcaacccaggcttttgagcatctttttcggacatcttcgtcatcttccaattaaccgctagtggccatggtttaaatgctataaacacctaaacgagtcctttgattcatatgtgtacaacaacatgaagcactatagcacctgacttcgagtgatatacatggtggttttacttc

SEQ ID NO: 46030 - DNA, 347 bp, Zea mays
  unsure (1)..(347): unsure at all n locations
gcgccttctttatgcttgcacaatttcagctgcaaacaaaagattcagaagccttttgattgaggcctacaaggttccctatttccttgtgaaatctaagagtcagtgttttggttgaaattttgacactgcaacatacagacagatcggtcgaaaagcctcaacagcatctgtatctggcttcctttgggattaagagccatgttagatctgttgatcctctcgggcttgacggactgactcccaagctgccaaatagcaggatggaccgaatcccttctggccttgngcccctggtgcatgcgctgcgcctgttcactgaatgcagggctgatttcacttcatgt

SEQ ID NO: 46031 - DNA, 370 bp, Zea mays
  unsure (1)..(370): unsure at all n locations
gaaacgatgacgttatgaaacacattcatgataagatagaggccgacaaagcaagctgcttcacataagatgatcaaggcgttgtatggtttaacaaccgcatagtggtgcccaagaatgatgagatccgccagcaaattttagatgaagcacatcttactcgctattctattcatcccggaagcactaagatgtatcatgatctaaaacaacactattggtggacgaagatgaaaattgaaattgcacgctatgtggtgagatgcgacgtgtcaaggccatacatatganaactgctggtccattgcaatcgttacctatcccaacttggaaatgggacgatataagcatggactttattgtgggactg

SEQ ID NO: 46032 - DNA, 432 bp, Zea mays
  unsure (1)..(432): unsure at all n locations
atcctntgagtcacctgaggctgcagcttgtcagagcgtatccttgagcttctttctctaagtaatagnccctggtcgaagagaagaataccatgtttgggccacattccgaactgccatgacgaaagaattggccatgacagctgcattgcctccatatgaagatatggttgcttcataactcatcaaaaactgcttcagatccgaatacccatcatacatagggagctgaggtggcttgtatgatggaggccatgggatagcctgcagttctgctgccaagggagaagcattgtcaaaggtaaaggtatcatgaattaaatcatcataccactccatcctcgtgataagccctcttgatgaagcttcctatgctgggccttcgtcttgtcgtttgagcaagatgcgtacctctcatagctcatgatctgc

SEQ ID NO: 46033 - DNA, 371 bp, Zea mays
  unsure (1)..(371): unsure at all n locations
tgctgagctgggccccatttaattatttagctgattntagtacttcgaagaagggtagatatctttccgctgatctggatataaatctggtaagagatgccagtctttctgtcaatctttgggccccctttcttgtggttggtggctccattcgaagtatagcttctattttatttgggttagcttcaattccctttgttgaaaccaagcatccaaggaacttacccttctttactccgaagacacanttttctggattcagcttcagaccagcttgtctgaagcttgcgaaggtctcctgcagatcagcaatatggtcttcttgcttcgtgccttttacaatattgtcatcaacataggtcaacacattt

SEQ ID NO: 46034 - DNA, 421 bp, Zea mays
  unsure (1)..(421): unsure at all n locations
tacccgngatccttaagtnacctgaggcatgcaagcttcncacctttgaactagctcggctgcttcttctttgctggtggccagnagaatcccgacctgaagaccttcccaactagtgttctggatgctgcatgtattccacattgcccagcatggacctcctccagaagttgcttcccagtgaacgggagaatacacttcatgaggactcctgatgcaccccttctgtataatgtttccccaatgagtgtatagtgagccgactgtctggcaatgcgctctgccgagtttttggcgnctgggtcttcttcattctttatatacttaatgatcggcctcctccagtcatcagagtctgactcgagttgatctataacgttgcactcttctggtaatncattgagatactggctgtggattc

SEQ ID NO: 46035 - DNA, 368 bp, Zea mays
  unsure (1)..(368): unsure at all n locations
agcttgcgccgtagaaagcttcaggcttaatgacatcagaactggaggccattacaacaattggttntctggattgttgtaatattagagaaataagtgacatgcttccattatacttaaatatattaaatattttaattccgaataaaacaggcatataactcagataaatgccatatgaaattatagcagcaatgaacagtagcaattctaagacatgtaaacatgtaaaatagctgctcaggtccatttcaaaactaaacatggcttgcagattaaacacataaacacaattgtttatctttntatattgctctcaatatagcgggttggtgaataaacaacccttcaacactaaatggtgatca

SEQ ID NO: 46036 - DNA, 425 bp, Zea mays
  unsure (1)..(425): unsure at all n locations
agcttattanagggttagatataacttatattgataagatcaatgaattaattgatgctttgaattanaagaatagattgttagagaagcaagaggatcttttatatgaagagcatgataaatttataagtgcgcaaaattctcttgctttagaagttaaaagaaatgaaatgctttcatgtgaattatctgcatgccatgaatctatttctagcttanagagtattaatgataacttgaataccaagttaggaatagctaataaatcaagctcttgcgtagaacatgttgtgattngcaatangtgtaagaaatttaatgttgatgcttgtagtgaacacttaatttccatttcanaattatatgatgaagtggctagtctaatgccaacttaagactatgcaggatgacttttgataactgaa

SEQ ID NO: 46037 - DNA, 379 bp, Zea mays
  unsure (1)..(379): unsure at all n locations
agctnttatgatctgtatagatatgatatatattccccggnagataatgacaccacgattttagggcatgaaccactgcagctaactccagatcatgagttggataatgttcctcatgccggcgcaactgccttgaagcataagctattactcggccttcttgcattaatacacagccgagaccactgtctgatgcgtcacaatacacatcanagggtttttcaatatctggttgagccaataccggagcagtggttaataataccttcaactgttcaaaggcttcattacactttgaagaaccaaataaattagtatcattcttcaataaacttgtgattggttcacaagcttggaaaatctgtatgaatcgcggtat

SEQ ID NO: 46038 - DNA, 312 bp, Zea mays
  unsure (1)..(312): unsure at all n locations
acctcnctagggctaggtcaccaattctttcttaagtatactggcaaccagcctcgacacgtcgagcctacatcctatggggccaggcaccagggagaaggtggtaacaatgcacacaacaaagacaaatagcatacagataagttctgtcactgttagattaatacttcccaaaagtatcttacaaaaaacattacaagccacaccctagcggaaccctggacctatctctacagatctggctgctaatcatcggtaggatcccactggaagcgctcggccaccacctncacagtatcttgtatgccctcc

SEQ ID NO: 46039 - DNA, 314 bp, Zea mays
agctcacttgaaccatattacctttctttacaatatcttgtgcgggagagttaaagcatctgctggccatgaactagctccttcgacttaatcccgcatggatacctaaaatctcttctcaatatcttttcgagcatgctatataaattgagcctgaggatcttgggcacaggcacttttaccaatgcttgcttttgtttggttcagggattatttcagtttaagccacttatttagtgtgtcaattacacaggttaccccttagattatattttgaggactgaaatatgtcaactaccatacatttttttgac

SEQ ID NO: 46040 - DNA, 276 bp, Zea mays
  unsure (1)..(276): unsure at all n locations
taaaataagttgaactatgtntatatacttgtaagtaacacttaggggaataataacctatctccaaatgaaagtgatttcggttatggttcatgttatacctttgaattcagtatcccttacctaatattggtcatttaagatgtgtccaatgcttgacatgtttggtgtgatgtttattgtacttccaatgtatgaatgctgctcgtttattagacaacgagtagccgaggtcctgagtgtgttgtggaatngngtggaaacagccactcggtc

SEQ ID NO: 46041 - DNA, 380 bp, Zea mays
  unsure (1)..(380): unsure at all n locations
gaactccagccttgctgcgtagcaggttctgattntagatggtgaaattagaatgacagctgctcctgcaccgaaggtttcccatgacccatcacaaaacactgtccaaacttcatcatcttttattctttcgtcgtcctgagcccctggcgtccaatcagcaatgaaatctgctaacgcctgagattgaattgaagacctatgcacataatctatggtgaattcattcagctctgcagcccacttcccaactcttcctgtggcttctctgttccttattatatctttgagagggtgagaaaaggtactatgatatggtatgactggaaatagtgccaaagctttcttgaagccccatcatatacatatagtaccttctc

SEQ ID NO: 46042 - DNA, 331 bp, Zea mays
  unsure (1)..(331): unsure at all n locations
atgccacagccagcccatgctatgtttagcgattaagcatgcatctagaccggcttcctccttcgaaaatcaactaaatagagtttgtcgtctagtacacccttaaaagctaatgaaccatcacttcgtctaaagacagacacatctatgtttgtaaataagcaattgttacccatattacataattgactaacggacaacaagttatatccgagcgattctactaaanacacattagagatggaatgctcggaagaaatagctatttttcctagtcctttaaccttgccttgttcccggcaccgaatatgattgagtcttgggaattttg

SEQ ID NO: 46043 - DNA, 328 bp, Zea mays
  unsure (1)..(328): unsure at all n locations
caagcttggtcccatggagaagcatatatccttgaagtcttggctgtcaaattgcttgccattgtcaactgtgagttcggacgggactccgaagcggcaaacaatgttttgccagaagaatttctgggcagtcttcgatgttattgtggatacagttctcgcctcgatccatttggtaaaatactcgacagcgacgaaggtgaacttgaggttcccctgngccgtgggcaggggcccgacaatgtccaggccccagcgctgaagaggctatgtgtgggcgattagcttcgtgaattgcgaagggcttcccgagcgtggagaaaatttc

SEQ ID NO: 46044 - DNA, 341 bp, Zea mays
  unsure (1)..(341): unsure at all n locations
tctttcattntgaaattgctcgatagaagattnttaacttcctcaatcacattgagaattgatccanagatcaagatgtcatcaacataaaggcacagcataacagactcaccccaccataccgataatacacacacgtgtcagattcatttacatcaaaaccagcagctgtaagagtattatcaaacttttcatgccattgcttaggtgcttgttttaggccatacaatgattntatcaacctgcacaccttgttctcttgaccatccgcaatgaacccttctggttgatccatgtagaatctctcatccaactctncatttangaaagctgtcttaaca

SEQ ID NO: 46045 - DNA, 410 bp, Zea mays
  unsure (1)..(410): unsure at all n locations
ctgaggcatgcaagctaacgagttcagtattgattattacatatatcctcaatccagtcccaggcattagcagacttcattgcttgatggacgccangggctcaggaagaataaaccaataaagacgccgaagcttggacagtatcctgcgatgggtcttggggaaccttcngcgcaggagcagctgtggttctagttgcgccttccaaaatgaaaacatgttatgcaacaaagcttgacttcagttgtacaaataatattgctgaatacgaagaacttctgttggggcttcgaaagttaaaggcaatgggtataagaagggccatccttaanactgactcaagtcatttctggtcatgtagacaaaagtagtattgcgagagatcaaagctcgaatatatttgatacag

SEQ ID NO: 46046 - DNA, 313 bp, Zea mays
  unsure (1)..(313): unsure at all n locations
atcctcagagtcacctgangcattgcaagctgacattgcttccttgtttgaaaccattgccatccttaatgccagggcgtttnccattatagagcatgcttctagcataatttaaattttcattctctgtctcatgctcattgattntactagttaattgagctatatgatcattttgttctttaattaaagctaggtgatcatgaatagcatcaacattaatgtctctacatctagtacatatagttacatgaccaacagtagatgtagagggattgctgacatttaattcatcaatcttagcatgttaaat

SEQ ID NO: 46047 - DNA, 349 bp, Zea mays
  unsure (1)..(349): unsure at all n locations
gcttctcatcggacttcttcgagttctacacctatatgaagcaacacaagaagaagacggcgacgaatgcaaaggcgaatgggtgatggctgtctaggaggangcggaagaagatgccgggctgccgggcgggttcgcttcacttccagatctagaagcacgagcacgatcgatcgtgcagtgcatgtcctgatgtgaggcggcactgtcgtacgtcagtggtgttaactgccagaagaacccatgacccattttcaagcttcaattgttggggggtcgatcggtgctgggattacgttttgcgccttctctttctcttccttctggaaataggacaagtggatgtcat

SEQ ID NO: 46048 - DNA, 414 bp, Zea mays
  unsure (1)..(414): unsure at all n locations
ctgcagctctcagatgcttgctatttcaacatggttcttataattctttaattcattgctagaatagttatgggtctagctcaattaatccaacggtccttggtcaccaaaatcatgtatataattccttcaaaaagagaatactttgctatggttttctgagaccaaaagaaaagaaaaaaccttcaaaaatacaactcttgaaggctacatgtgcaatgtgatatacatggttctggccttggcaatatgtcctctataaggagagtcttgcattgctaaacgataacttgatgcttttgtgttatgccaacttctggatttcctgaatgattangtctttctcctcatcgagttcatcgtcgcctgtataaagganggaaaaatgacgatcttanatacttatataattca

SEQ ID NO: 46049 - DNA, 310 bp, Zea mays
  unsure (1)..(310): unsure at all n locations
cctacacgccacaacaaaatggtgtattggaaaggaagaatataactctattggacatggcatgaaccatgcctgatgagtacaagacttcngatcggttttgggccgaagctgttaacaccgcttgctacgccatcaaccggttatatcttcaccgaantctcaagaagacatcgtatgaactcctcaccggtaaaaagcccaatgtttcatattttagagtctttggtagcaaatgctttatacttgttaaaagaggtagaaaatctaaatttgctctaacgctgagaaggattttactagatatgat

SEQ ID NO: 46050 - DNA, 425 bp, Zea mays
  unsure (1)..(425): unsure at all n locations
ggatccttgagtcacctgctgcatcaagcttgtatactattagatgccacttatattcccttangacagaacccaccgctagttaagagttgtagtacaaagtggcccatttacacaacttttgttattcttgtctaangcatatttntttatttgtgaacctctaactcctagaacaggctatattgaccaatggcaagtcacagtaatttttacagaatttttggaacaaagtaattcactggtgtaggttaaacatacactagaattcataatagaaattaaagaaaagggaaaataaataatggaaattagtgccgtcctaaaaccctcttgtaattgtccactgaaatatataaatggaataccaatccactatgcttatccttaacaaaacctgaacctagaatgatgagcgtaaccac

SEQ ID NO: 46051 - DNA, 360 bp, Zea mays
agcttgatgatgcccgttgcaacacatggtctttatactatcatatatagaagtctgcatggtactgattattgcaatgtagtggtgaaatagctatattaaaataacaaaatttatgtatggctaggatcaccaatggattgcgaatatatttgctcataacagtataacacatatttgtacataagttattgtgtattatataatcatgttgcaacgcatggacacttacttaactatactactatgaagaaggtaagggataggctgaccctctctggttctacctctcctatctccgacagatggattcgacacttggtagaaccacccacacccgaccttctccacctttccccg

SEQ ID NO: 46052 - DNA, 317 bp, Zea mays
  unsure (1)..(317): unsure at all n locations
tgcaagctggtggagatggaggtctcgtctttcttgtctaagaggctcaccttctgcttccactccatccccatggtggcgggaggcgagagacgacgggtggtccttgtctcatgaggcangagagcatgatgagggtgggcaaagcaaaacctacctttgttctgtaagtggtggagttgagtcgtggggggctaccgacaggagggcgacgctgggtgatgaagtgggtggtgtggcgacaacaaccgcggggaagggggagaggtgaatctagcggcgccgggaggaatnggctggagtggcgtggcctgcac

SEQ ID NO: 46053 - DNA, 323 bp, Zea mays
  unsure (1)..(323): unsure at all n locations
gctnctggcccagcttcactgcttccatcattgccacctgctcttacccatagccagcagccagaagggcgcnctcaacagcaacgcgacttcagggaggagtccgaagctcgtacagtcaacaacactgtactagaatcgaagcacatttattgaggaatatcctactatttgaagtactttggccttttatatcatgttacttttttgtatgagaaacaagtaatggaaaattcagtttcaatttcttgtaataattttgtaaacaccagaatgaaatatatcttcttcatagatttacgaagctcgaaagacgactctta

SEQ ID NO: 46054 - DNA, 392 bp, Zea mays
  unsure (1)..(392): unsure at all n locations
agctngaagccgaagtcgagaaaagttcgaatctgtcaaaatccttaaaagagcttcagacagatgcttgaacttcggcatccggtgcgtgcaacggctgaaacaggtcttcaactcaatgggagctagctctgacaaatttgaaccttcagttgaaaacctgccaagtaccttcgaacatatcgagagcgaagttgaggcgcttgacgaagttatagctgggcatggtgacttctgtgccctgctagcttctcgcggcacagctgtagctnttatgaaggctggttgcacgcacagaaagattgtaacaggctgaacttcagcctatcaccagtggattaactgacatccacagtctggcccgaagcattggaatagattataacataaat

SEQ ID NO: 46055 - DNA, 354 bp, Zea mays
  unsure (1)..(354): unsure at all n locations
agcttcgggagcaagagttgttatcttttctatttgaaattgctctgggatcttttcttctgtggcccacttcttcaatttggcagactctntctcagcaggctctgaaggcccagtatctattctagcctcaatcgttgcagcttcaaattctatctgcttagtatcagcttcagtttgcgctttgacagcttcggcaaccttctttatgggagtggngctnttggaatccgttgtttccaaaaatatctaatacatttaccatcctttttcttctaggggttatggcagaactcttttctgccttctgcactcgttgcttctgtgaaagacttanaatcccgggcatctttg

SEQ ID NO: 46056 - DNA, 343 bp, Zea mays
  unsure (1)..(343): unsure at all n locations
agcttcgcatctctgaactagctcggctgcatcattcttcgccgtcggccaatagaatcctgacctgaataccttcccgactaacgttctggatgctgcatgtactccgcacttgccagcatggacttcctccagaagttgcttcccggtggacgggagaacgcacttcatgaggacgcctgacgcgcccctcctgtataatatctccccaatgagtgtataatgagccgattgtctggcaacgcgctctngccgagttctggcatctggttcttcttcattctttatatacttaataatcggttgcctccagtcatcagagtctgactncgggtggtctatg

SEQ ID NO: 46057 - DNA, 319 bp, Zea mays
  unsure (1)..(319): unsure at all n locations
gatagtgagtaccctaaccatgtttataaactctctaaggcgctctatgggctgaagcaagccccaagagcatggtatgaatgccttaaagatntccttatcactaatggattcaaagtcggaaagggcgatcctactttattcactaaaactcttgaaaatgacttgtgtgtatgccaaatctatgttgatgatattatatttgggtctactaacgagcctacatgtgaagaatntagtatgatcatgacacataagttcgagatgtctatgatggnggagttaaaatatttcttatgaattcaagtanagcaacttc

SEQ ID NO: 46058 - DNA, 376 bp, Zea mays
  unsure (1)..(376): unsure at all n locations
atggacaaagttcgtctgactagcttcatcacagtgaaacgggtagacaacgtaatggcttcgacataatggaaaggaagtacgaccaagcacgcttcatcaagaaggcttcgacacgaacaaaacaaggagacagtgcaaggagaaggtatttgttggggacttgttctcaaatgctatgaatcaagaacaaggcaacatanaatgttaaatatcaaagcccttcgtccttcanatcacttatttccttcggatataacgaatttaggacgaaggtcatgaaggatgtaccctcatgattacgataaatatggagaacattcaacaagtcagaaagaacataattctgtaacattatataatgatttcattatat

SEQ ID NO: 46059 - DNA, 365 bp, Zea mays
  unsure (1)..(365): unsure at all n locations
tttggattaatatttgaagagttatgattgaaacgagtgactgctgtgttgctgtcccaaaaattctgctagtgcttatttgattggtagttcacccttttggctaaaaatgcttagttagcacttaacagacttagacttgtaatgtctaaacttaagttaacatgtgttccatgattcatgtgcttgcttgttgtgtcctctgttaaacttgtgtttgggatgctttngtatgatcactagaagaactaatganaagccgtattcaaataaataaaatgcgcgtacttgtgatgtcgtagttaggttgcgtaaataaataaaatgttgtcgtcttttaatggtggtgatgtgaacaccgatac

SEQ ID NO: 46060 - DNA, 377 bp, Zea mays
  unsure (1)..(377): unsure at all n locations
tccttaagtcacctgagctgcagcttatanatggacgtgaaaagtgcctttctctatggaccaatcaaggaagaggtctatgttgagcaaccttccggctttgaagatagtgagtaccctaatcatgtttacaaattctcaaaggcgctttatgtggctcaaacaagccccaagagcatggtatgaatgcctgcgatattttcttatcactaatgacttcanagtcggtaaagccgatcctaccctctttactaaactattgcaaaagatttgtttgatgccaaaattatgttgatgatatcatatgtgggtctactaacaaatcaacttgtgaagactttattaggatcatgaattagaaattcnagatgtctatg

SEQ ID NO: 46061 - DNA, 397 bp, Zea mays
  unsure (1)..(397): unsure at all n locations
agctggtcttcggctcatcctcctttttcattctatttcgngatagcctgagtagaaatccaataagctcatgagttntgaagtagctgctacatctacaagggaatctattcttggcaatgaaaattcatccttcggacatgccttgttgagatctgtaaagtcaatacacatactccattttccatttgctttctttaccatagctgtattggctagccactctatgtatgttacctctctgataacaccgacacttagaagtctnttcacttcatttcatgcaccttcggccttgtcatcagacattntccgaagtctctgcttccttggtgtgaaagacgagtctacattgagtgagtgctcgatgatgtccctattaacaccgcatagatca

SEQ ID NO: 46062 - DNA, 347 bp, Zea mays
  unsure (1)..(347): unsure at all n locations
catgaagcttctcacctgtcggtctagttctattgtgcagctacctccatcaatgatcaaacgacatgaacgctccttaatgacacactntgtttgaaacaacgtatgtcgctgattctgctctgccttctccatttgtgcactaagcacacgctgtacaatgaggctctcataatgctctgcatcatctgcaccaatctgttcttcgggtggttccttagtgcctacatcatcagccgcaagcaaagcaagtgtagcttcatccaaatcactagcagaggaatacccaccatcgtcttttaccaccaaaacacgctgattaggacaataacgctgcacgtgttcat

SEQ ID NO: 46063 - DNA, 382 bp, Zea mays
  unsure (1)..(382): unsure at all n locations
agctntatcanatggacgtgaagagtgcctttctcaatggaccaatcaaggaggaggtctatgttgagcatacctccggctttgaagatagtgagtaccctaaccatgtctataggctctctaaggcgctttatgggctcaagcaagccccaagagcatggtatgaatgccttagagatttccttattgcaaatggcttcaaagtcggcaaggccgatcctactttattcactaaaactcttgacaatgatntgtttgtatgccaaatttatggtgatgatattatatttgggtctactaacgaatctacatgtgaagaaattagtaggatcatgacacagaaattcgagatgtctatgatgggggaagtggngtattttct

SEQ ID NO: 46064 - DNA, 314 bp, Zea mays
caacttattgtatatgcagatatatagtgcttatatgtgaactcaaatgggaccccacgtcacccgtccgtcacaatctggacagacaccaaacaccaatgaaacacaggtataaggtttgtagtatatttactttcatttacaattataatcatgcatcgttttatctggttatagggttctgagaccggacaaggaaatccacagatggacatacagtggtcgatgccctctagaggacagattcttcctcctccacaaccaggtatgggatattggccgccaccaccatggggatatcctacacattcaat

SEQ ID NO: 46065 - DNA, 312 bp, Zea mays
  unsure (1)..(312): unsure at all n locations
gtcacctgangctgcagctatgctcaccaatagtttactacatcttttgganagaccccagtgaagcacccccactcaagggcattgatgtcatcccaaaggcatgtatggtctcctggacaaaggcaagcttctcttccaatagcaactcgtcagtgtcagatttgcacaccgttcttagttgagtagaaacctcttcaatgtattcctttataagcttaagaacctgcactgcgacagatcagtcgtgttactggtatgatggtgatgctgaattcagagtttcagcaatctttggccatgctgaatttc

SEQ ID NO: 46066 - DNA, 367 bp, Zea mays
  unsure (1)..(367): unsure at all n locations
atccttagagtcacctgaggatgcagcttgacgatgaagatgtgtgccctctcttgtctgtgcctgcggaggcgttgtgtactttgtctggtatatattgttatgctgtgctggtgtggttatagtcggtcttgacgcggacggtttgatgttgtcgcttctgctgttgttgtactagttcggctgcgccttttangcggcctctgcgtggatagtcttcgcggtagacttcgggttttttcgcacttgtgctattccggctgcacccttgggcggcttctgcgtggatagtcttcgcgatagacttcgtgttttttcgcactcgttgtgctagtccggctgcacccttatgcgacttctgcgcgga

SEQ ID NO: 46067 - DNA, 292 bp, Zea mays
  unsure (1)..(292): unsure at all n locations
agcttatgaagattcttcatcccaacatgggctagtcggcggtgccagagccaacccatgttagtcttagcaattaagcaagtgtcgagttcagctctatcaaaatctaccaagtatagctgaccctctaacactcccttaaatgctatggaatcatcacttcttctaaagacagtgacaccaacatcagtgaatagacngnngnaaccacattgacataattgagaaacggaagcaagttgaatctaagaatctacagaaaaacatggaaatggaatggcaggagatatac

SEQ ID NO: 46068 - DNA, 370 bp, Zea mays
  unsure (1)..(370): unsure at all n locations
gtctatcatccgcagtccaatggagttatggaatgcaccaatgggaaaatcttcacagctgtcaaaaagatgctcctcgatngaaaaaagggcagatggaccgatttgttacccgaggcagtctgggcactaaacacaactgagtgcagggcgactgggtttactcctttccgccttctatacggatcggaggccatgaccccacaagaaataaagcatgggtccccgcgaacagttccgtcggccgtccccgacgtggacgagccaacttcaaaggatctcattgacggagaccgagtctttgccctacaagccctaaacaaataccaagcccagaccatagcatggcacgaccacacagtcatcccga

SEQ ID NO: 46069 - DNA, 301 bp, Zea mays
  unsure (1)..(301): unsure at all n locations
ggtggacaacaactggccaagtcgagatacctcatcgtgagatgtctgcaactcgtggcgatgatggtctaagtcagacatggtgaagtgatggctcctctccaggatggtcaaggagttactagcgtcacggtacagcctgtccaaactgtcatgggaagcaacaagtgtttgtttttcttcctgcaagcaaagaacaacattcagcatcgaagcaaggagagcaaagtaggatcagaccaggaagtttacctcgtgtgccatcttcttggaatcaagttntgcattcagaggggaattc

SEQ ID NO: 46070 - DNA, 323 bp, Zea mays
  unsure (1)..(323): unsure at all n locations
atgatctctaccaancgatacactgcttgaggatcccttggacctgtgggttaagacccacacacgctttcgctgcgccactttgatcttgtcggttgacgttgatcgcattggcttcattggggctagcgactaaccctcttaacaggagcattgatacgcacttgatgaagatgcagccgacttcgatcttgatccactaagagaggttggaggctgccaagtggataggtgcaagaggcaagggtatagatagaaaaggcatgcctatatggattaaaagagtaaatggagaccacccaattacctaactctattgcact

SEQ ID NO: 46071 - DNA, 372 bp, Zea mays
  unsure (1)..(372): unsure at all n locations
gcttggcatggatcatggatgcatgtgtccatgttccaaaaatacatgtgccatcccacagcctagaacgtgagcacaatcctcgaactccatgcgccaccgttcaaactctgcatgaaagacgctaacagactcagcacacaccgagggatgaacgcgcaggaacaccacgacatgctgacaacaaacccttctaaacttagacactaagtgcaaaagattatctttgaaactctcccctttaatctttgtgctctggttcgatactggtgacaccacttcaaaaccgcaactcatgaaggcactcgcgtgtaagtggtttcgtgagcaaatcttccatctgatctctncgtcgggacaaatcatcttcaa

SEQ ID NO: 46072 - DNA, 384 bp, Zea mays
  unsure (1)..(384): unsure at all n locations
gtcacctgangcatgcaagcttcaaagggagaacacattgtangatttacatatgttcattntgagaaagacagggttggtagcgcatgccaggcgggaaagcaaattggagcccatcatccacacaagaacatcatgacgaccgacaggccacttgagctactccacatggatctattcggcccgattgcttacataagcatcggcgggagtaagtattgtcttgtaatagtggatgattattctcgcttcacttgngtgttctttntgcaggacaaatctcatacccaagagaccttaaagggattcttgagacgggctcaaaatgagttcggcttaaggatcaagaaaattagaagcgacaatgggacggagttcaagaac

SEQ ID NO: 46073 - DNA, 386 bp, Zea mays
  unsure (1)..(386): unsure at all n locations
tatgcaagctnnaacttcatctatattatggatttgtcttgtgatcannccaacttccttcgggccttctggcagtattctgactcccatgaatagcaatatgcccttggtccgaaggtatcttcatgcaaagatagctgggtgaagaattgcttcaaaagcatttatggtaccacgaccaatgatggcgttgtatgggtattccatgtcaacaatatctaacataatttgctcagcccttgtgttattaacaaatcccaaggctaccggcatggtaatcttcccgagtgccacaatctgccgccctccgaagccacatagagggtgcgtagcatcatgaatcttgtctaaggctcttgatctgtatgaaagtttggcaatataat

SEQ ID NO: 46074 - DNA, 436 bp, Zea mays
  unsure (1)..(436): unsure at all n locations
ngctngtcaagcacaatttggtacccatcgcttgatgggtccgttaaggttagtcgacaaagatctatgaacccaaaagtcctttgtgttagcactaggtaaactcattacctttctagcacaagttggcaatttgggttgcctagttacatgaaaatcaattgacaagttaggagtggaattgttaccaattggacaatccttgcattgatgtcccttctttcggcatgtatagcataggcgttnttcaagttttgaagttttcttctttccttgtttgttgcttgctacatggttagtaaaaactttcttttctaaccctatgcctttntgttttaaatggggacaagatctaagcaagtgtcccttcttggagcatttanaacaaagtctatcatccttgtaataatcaagcattttaatganggacatgact

SEQ ID NO: 46075 - DNA, 340 bp, Zea mays
agctaatcttctcatctctaattgctacgatattattctagggctggacaaacttgaagaacaaagggatttatttatccaggagagaaatatgagatatctcatcaagtcccatactaccaggcttttaaaatataagaaatactattggaggcatagatacattgaaagatggataaaatttggagaggaatgcacacacaaaattcatgttgtacgacaaatagatatcgacataacaccatcactatgctcacaaataatgaaggggcctcattctatgggaatgataaaaaacaacctatctttgggaggaatttcaaaaaaagaatgggtgtct

SEQ ID NO: 46076 - DNA, 366 bp, Zea mays
  unsure (1)..(366): unsure at all n locations
tatgtaagctgatatcaggacaactatctggaagaagcttacaaaatgaggaatgtccttcaagagtttgtaggcatcctacggacaaagctccaactatccttgggttaagagagcatatcttcactggaaggtctgtaatcttacaacacacatctttcatacatgatttgtctcttggaagataattatgatactattatttgtgcagggattcatctcttgctggcttcatgtcatatcaagagacaagctttgttacaattggaccaagaattcttgctgaaccccctaagtganacatgcttttattctatctattacatataaataatgccaaactacttctttatttgagttctattc

SEQ ID NO: 46077 - DNA, 368 bp, Zea mays
  unsure (1)..(368): unsure at all n locations
agcttgcgagtggttagaactaccgtgtatatgtatttttgaacttcgggatacttgcattttgagggtccgagaacttcgctgatgaagtaaaccggatgttgcaccggatatgtatgtccttcctccacccgctcgactactaacgcggtgcttaccacatgagtcgtgcaagatatgtataacaacagatcttctgccggctgattcgggtgtggctcagcgtggtggtttgagtactagtggcgtagtcaggaactttntcagtgcctctagagcttcatgtgcctctgtggtccactcanacttgtccacctttttgagcagtttggagaatcgcatgcctttttcgcctagtcttgatatga

SEQ ID NO: 46078 - DNA, 419 bp, Zea mays
  unsure (1)..(419): unsure at all n locations
agcttgtgtcgttgggtggtcctcatatnttactgtcaaacctcagtactactccctaccttctaaacaataataagggcgtttttggcctttgtagatacattatttttattatacatctagatgcattatagaactaagtctaattattagaaccgagggagagtagttcttattggtatagtaagttctgtttctcacgtgctcaatttactgttgcaggttctggttcatcctcatataacagaggactagaagacatccacacgtaccatcaatcaaattgcaaatctctgaatttacctcanaatcggacgtgcttgttgtcataccagaagcaattgataacttggagctgtagtagtctaccggactctctaccgaaacagtagtatggctgaccctccagctttccacat

SEQ ID NO: 46079 - DNA, 312 bp, Zea mays
  unsure (1)..(312): unsure at all n locations
gagtctacaccaagtagacaaccaatcgacgcttcaaagctcgacaacgaggagatggctttgatcatcaaaagctntcgccaaatcctcaagcaacggaagggaaaggattacaaatcccgttcgaagaaggtttgctacaagtgtggtaagcccggtcactttattgctaaatgtccattatcaagtgacagtgacagggataacgacaagaatggcaagaggagagaanagaagaggtaccacaagaagaggggcggcgatgcccacgtgtgccgcgaatgggactccaacgagagctncaccgacttc

SEQ ID NO: 46080 - DNA, 355 bp, Zea mays
  unsure (1)..(355): unsure at all n locations
tctacactactgtattttctccatgtgcctacaatgatgattggttgtcttggtattcanaatgatatccataaatgatatgatgaatctgtgatagataaaaaatttcagatcattaatgaccatcagtaatgaattgtcatttccaactagttatagttggagtcaagaagttttgcacgctcctgacttgtgattaactgcatgtactggaggtacaaagtcccctatggcttttagtacgtgggaatccgtgaaagatttcccatgcgtacattgggtacgttcccaatctcaccactgcaacatacatatatgggcacacagaaagtggagatttatgtgagaattattc

SEQ ID NO: 46081 - DNA, 327 bp, Zea mays
  unsure (1)..(327): unsure at all n locations
gtcaagcagggaaacaaagtgggatgctctcatcacaccaaaaatgtgatgacaacatctagacccttggagatgcttcatatggatctctcggacccgtcgcctatctgagtatacgaggaagtacgtatggccttgccaaattgatgattttcccgcttacttgagtattctctttgaagaaatactgtaacccaaggaccttaagccttcatacgagagctaaatgagttgaactcacgcgaaaaaataagacgacaccggtccaatcaaaattntagggaggagtctgagaggaggacaaccgagtttcgtcctaaccctaca

SEQ ID NO: 46082 - DNA, 289 bp, Zea mays
  unsure (1)..(289): unsure at all n locations
atctttgctccaacacgatcagggatgcaccctataatttcttcggtaacaccaccaaagagcacagatcccggctggtagccaccagcaatagcgaactttttcagttcagagatatcttcttcggagaagttctggccacccaagtgtcatangtccaattctttactcttcgaagaagctccttccaattctttcacctttaagggtgtaaccctaccagcggtcacttcatccatttccctctcangaaccacatcagctataatcctgtcaatctccggcattg

SEQ ID NO: 46083 - DNA, 372 bp, Zea mays
  unsure (1)..(372): unsure at all n locations
acccggctattccatacatgaaaagtcnatctctcactgagcgtggagagatggcgagagtggcacgtaccctcctggcaacggatcgcctaanaggggtggtgtactctcgggtggcgcggacctgttcatgcagtggaggatccgtgggaatagtagacatcaaggtttacgagaaacatatgtcgtgtggttagaaatcctcagctgagtaaatcgattctgatcgccgttatatccccggacagtggagacttgagctccgacctacaacctatgtcaggaggtgaacacgatggataaaaacgatgttgtcttgatgtgatgtgaaattagactagatgcgaatagagtctattaatacttaatatg

SEQ ID NO: 46084 - DNA, 338 bp, Zea mays
gagaacgagagaccttgtgcagcatgccaggcatggaatcaggtgggaactattcatccaagcaagaacgtgatgacaatgtcaagaccactggaactcctccatatggatctcttcgagcccgttgcttatcttagcatcgggggaagtatggtcctataattattgatgatttttctcgcttcacttgggtattatttttgcaggataaatcataaacccaaagtacactaaagtgcttcctaaggagagcccaagatgagtttgagctcattgtgacaaagatcagtagcgacaatggatctgaattcaagatcttcaagtgaaagagtatcttg

SEQ ID NO: 46085 - DNA, 317 bp, Zea mays
tgcagcttctgcagcagcttacgcctccaccttcattgcagcaaggtcaacagccagaagggagtcaatacgctccacagcagagggacttcatagaacagtccgaagctcgcacagtcaacagcactgtgccagagtcgaagcacatttattgacatatcctacctttgatagcagtctgttctattcagttttattttctgtgaagcaaaaaacattgatagtttccatgtaataatttcgttgtttccacgggataaatttatttgattcacaggcctaagttgccgaagcctataaattcttccgttaccaag

SEQ ID NO: 46086 - DNA, 324 bp, Zea mays
gtaactgtcctaagaagaggggactacagatcacctccgagatgaagctatctcagtcttcagacatagaacatgaacaaaaaatgcacaaaaactccaaccaacaacgtaaagacaactccaccatgtaacttatcaagtcgtgcttgctttggctgtggtgataccggccatcttgttaatagttgtcctaagaacgatgtggagatcaataaggtccaaaagaaaagacaacaccctcaaactcatgcatcaacaaagaataaacaacggaaaaagtccatatgaatgataagttatgctgtgacaggaaccattccatat

SEQ ID NO: 46087 - DNA, 209 bp, Zea mays
gccaaactcacgcaccacgctcggttcaatatagcgtggccggcgggtaaagaccttcaactttttgcccttcggcgcatgttcggtcgaggcggccacatcagtagctttccttttctttccttgcccccacaacgggtagcggtagtcgggatatacgaaaccaatagacgtcaaaaactctgttcaatctcttctttcctcgactt

SEQ ID NO: 46088 - DNA, 405 bp, Zea mays
  unsure (1)..(405): unsure at all n locations
atcttaagtcacctgangctgcaacttaagccaactacaagctgttgttatcgttagaaataaaagcgagtccgaaagagagggcaaaaacaaatcacaagcgaataaggcggatgacacggtgtattgttttaccgaggttcggttcttgcaaacctactccccgttgaggtggtcacaaagaccgggtctcttccaaccctttccctctctcaaacggtcacctagaccgagtgagcctttctcttcaatcaaatgggacactaagtccactacaaggaccaccacaacttggtgtctcttgttttgattacaagtgaattaaacacaagaaaaaatgaagaagaaaagcaatccaagtgcaagagctcaaatgaacacaaatgtctctctctctagtcacta

SEQ ID NO: 46089 - DNA, 399 bp, Zea mays
  unsure (1)..(399): unsure at all n locations
atccttaagtcacctgaggcatgcaagcttcggtcttatccttgaacttttgtaatatgacccgaaacaatctgagaatcagttntaaggatcgccctcctgatccccatcgcctttagcttccgaagacccaagagcaaagcttcgtactcagcaatattatttgtgcagctgaagtccagtcttgctgcatagcaagttttaaccttggacggcgaaaccaaaacagcagctgctcctgctccgaaggttccccaggagccatcacaaaacactgtccatgcttcggcatctttattcgcttcttcgccctgagcccctggcgtncagtcggcaataaaatctgccaatgctcgagactggatcgaggatctgtgcacataatcaatgtataaatca

SEQ ID NO: 46090 - DNA, 390 bp, Zea mays
  unsure (1)..(390): unsure at all n locations
cttatgcatgacgcataattaatcaaactgttactctacaaaagtacagatgttgtaggtaaaatgtgtgacctctgcagacgaatgaaactgatatatcagttgtgtcatgttatgagcgaccttgggagctcctttgattagagatacagatggttcgagatgctatggttctatttatggttntggttacgatgatgataatgacgttccttgatgaggaaatgattcacaagttggttattgcttataacttgcttctactaatattaaatacctgacgaattaaaagcaattgctgtgatcctaaccncacataaagctagtccaccttcaccaaatgagaacattgctgagtacgttgatgtgtactctgtaacaccctagtgt

SEQ ID NO: 46091 - DNA, 309 bp, Zea mays
  unsure (1)..(309): unsure at all n locations
gcactcatcagttgatcttattttttggtataattacccaaaatttcgttgcacatagtttcaatcatttctagccactcttggcaaggctctntgaattttttctcaaatttgaagcgatagggcaatcgaacaagttcattcttcttccttgtccccttcagcttcggcatactccattcactaaatgttggagacaccctgttggccaggtattcttgcactagatctctagtgctgatctattcagccaccaccctgaattctactacagctaagtgacatggttaccccgacgtcatgctgcac

SEQ ID NO: 46092 - DNA, 291 bp, Zea mays
cccatgcaagtcttgggcattaagcatgcatctagaccggcctcttcttttgcaaaatcaactaagtaaagtttgccgtctataataccctctaaagccagtgaaccatcacatcttctaaagacagacacatctacatttgtaaacaaaccagtatatcccatattgcataattgactaacagatagcaaattatatccaagagactctactaaaaacacattagagatagagcgctcatttgagattgcaattgtacctaacccttttaccttgctttgattcccatca

SEQ ID NO: 46093 - DNA, 301 bp, Zea mays
  unsure (1)..(301): unsure at all n locations
ggctttgaagatagtgaataccctaaccatgtctataaactctctaagacgctttatgggcttaagcaagcactaagagcatggtatgaatgcctaagagattttcttatcactaatggcttcaaagtcggcaaagccgatcctactctctttactaaaactatngcaaatgaattgtntgtatgccanatttatgttgatgatatcatatntgggtctactaacaaatctacttgtgaagagnttagtaggataatgattcacaaattcgagatgtctatgatggggggagtgaagtatt

SEQ ID NO: 46094 - DNA, 311 bp, Zea mays
  unsure (1)..(311): unsure at all n locations
agcttggaggcgtcgattggttgtctacttgttgtggactcctncttcttttcttccgtcgccttgaatgcgacgggttgagcttcggatgtggtgggttcgtcaagctcgatgattcttctcgagccttcgatcatgcactcaaaacttacaaaatggcgcgattactttcctcggggtcattttagtatatctaggaataccacggattaattgaacttgagtagggttaaagaatataagagaacttagaataaccttaaccatctcgtgatcattccattttaccgctccgaggttgcgcacttgat

SEQ ID NO: 46095 - DNA, 303 bp, Zea mays
  unsure (1)..(303): unsure at all n locations
catgcaagcttctaagggagagcacattttatgatttactaatgtcatttcgagaaagacaggatttgtagcgcatgccaagcanggaagcaagttggtacttaccatccacacaagaacatcatgacgaccgacaggccactggagctcctacacatggatctattcggcccgattgcttacataagcatcggcgggagtaagtactgtctagttattgtggatgattattctcgcttacttgcgtattctttttgcaggaaaaatctcatacccaagagacattaaagggattctcgagac

SEQ ID NO: 46096 - DNA, 382 bp, Zea mays
  unsure (1)..(382): unsure at all n locations
ccatggaaatgcaataacgcatgtcatattctatgcatgtttaatctacttgttctcttgtatggtgtactattggtttcctaatttcaatggatggatgtatgtatgtttgcactcgcatagagaacgatccggttgaagagcccgaggaactcgcaggagaagcccctgagcagcagtcgggtggtggaggcaagtgtnccttgacctatctcttgtctattcattctttaattcacctcccgcattacacatttatgcctaanggttgactagcttttgtactcatatccttgttacctatttggttggatattatgttagcttatgtatgctaactctataatgacatatagatattatgatcgctgttccctttcta

SEQ ID NO: 46097 - DNA, 112 bp, Zea mays
  unsure (1)..(112): unsure at all n locations
catgcaagcttatggtgcttgcaatgctctatcattgttangagtaaatgtgggcagcaagacaatcaatatggtgggtggaggaggtttccttctctctccatcacctcac

SEQ ID NO: 46098 - DNA, 376 bp, Zea mays
  unsure (1)..(376): unsure at all n locations
gctttaaagggagaacacattntatggcttacaaatgttcattntgagaaagacaggagttgtggcgcatgccaagccgggaagcaagttggcactcatcatccacacaagaacatcatgacaagtgacaggccactggagctcctacacatggatttattcggcccgatcgcttacataagcatcggcgggagtaagtactgtctagttattgtggatgattattctcgcttcacttgggtgttctttttgcaggaaaaatcccatacccaagagaccttatagggattcttgagacgggctcaaaatgagttcggcttaaggatcaagaaaattagaaagcgacatgggacagagttcaagaactcacaaatag

SEQ ID NO: 46099 - DNA, 460 bp, Zea mays
  unsure (1)..(460): unsure at all n locations
gcttcccagagtttggggttctttctgtttaaatactacgcttntggtcctggtcgaagtcccttgatcatggcttcaataacaatctcatttggcaccgttggcgcctgagctctaagacgtaaaaaccttcgaacatatgcttgtaagtattcctcgtggtcatgtgtgcattggaatagagcttgagcactcactggctntgtctgataaccttggaagcctgtgactagcagatcctccagcttctaccacgacatgattattcccgaccgaagagaagaataccatgtttgacccacacttctgattgcatgacgaagacttaccatacagcggtgtgccacatatgatgaatggtgcttctactatgaagattgttcggcaaatgtcgcatactgggagctggggattgacgaagcgcatgggaccttgattgtctagggacatatcaatcagt

SEQ ID NO: 46100 - DNA, 247 bp, Zea mays
  unsure (1)..(247): unsure at all n locations
tctcggtccgggtcaagctgccccgtgccaacctttctgaagagatggcccggagactggatgacagaatggttctatgtgaagaatgatctgacaatatgagaagatatcaaaggtataattatgcgccctatntggcaaagcttctgccttcggaggccgaaggttgaaatgaatgaagctgccgaagaatgccagagggccttcggcgcagtctgttctttcattggaacgagagacttagtac

SEQ ID NO: 46101 - DNA, 254 bp, Zea mays
  unsure (1)..(254): unsure at all n locations
tagaacatcacctattcctagcccacagtcccgattaagtactttcatccctaagattgtttatgttcctaggatgaaaagagcatcaaagggaactctgtagtaagatcccaccacgctctcaatgaanatattcttgcaggtagaagtcatctttcctcangataacctctgagctangcagtattgcaaaagacaacctctatctccaagatctaagcacggctaagcatttttgaaaatcatattttgat

SEQ ID NO: 46102 - DNA, 408 bp, Zea mays
agcttctaaagggagagcacagtgttagaatttatcttggtcattttgagaaagacagggtttgtagcgcatgcgaggcatgaaagctagttggagcccatcattcacacaagaacatcatgacgaccgacaggccgcttgagctactccacatggatctattcggcccgattgcttacataagcatcagcgggagtaagtattgtcttgaatagtggatgattattcccgctccacttgggtgttctttgcaggaaaaatctcatacccagaaaccttaaaggattcttgagacactcaaacgagttcggctaacgatcagaaattatagcgacacggacggagtcaaaactctaatcgaggcttctgatgggaggcataagctgagtctctctcctaccccacata

SEQ ID NO: 46103 - DNA, 70 bp, Zea mays
acggctcacacttgcgcttggtatactatgccatgtgaaacggggcataatgtcctttgccaggtaatta

SEQ ID NO: 46104 - DNA, 445 bp, Zea mays
gcatgcaagcttctatagggagagcacattttatgattatcttatgttcatcttgagaaagacaggatatgtagcgcatgccatgcggtgaatctagttggagtccatcacctcacacatgaacatcatgacgaccgacaggccgcttgagctactccacatggatctattcggcccgattgcttacataagcatcggcgggagtaagtattggcccgttattgtggatgatcattctcgcttcacttgggtattctttttacaggaaaaatctctaacccaagagaccttatagggattcttgagacgagctcataatgagttcggcttaaggatcaagaaaataaaaagcgactacgggacggagttcaagaactctcaaattgaatgctgtcttgaggaggatggcatatagcatgagttctcctctccttcactccacaac

SEQ ID NO: 46105 - DNA, 205 bp, Zea mays
  unsure (1)..(205): unsure at all n locations
agaacatgtgataggtctgactcatgtgcaactccaaatatatatattctgagcctcntgccaagcacgtgaaccagcgggaggagcgcatcacagcatgaatgtgatgaccacctcaagacctctggagctgctgcatatggacctcttctgacctcgtccctatctgagcatacgaggcgagaagtatggtctagttattgtt

SEQ ID NO: 46106 - DNA, 400 bp, Zea mays
  unsure (1)..(400): unsure at all n locations
agcttanattatctacttctttattgcttgatctttcactttagctttgcttttcttcccatgatttgctttgagagccaaatacttattcttttatgaataagatccatctttattattgatgtgcatgtacatctcataagcatttatcttctccaagatttaagttggagtagtggtggatagatcaatttgatgaagtacaatgacgatgtggccatacttatcgattgagagaacactcaatatctttctcacaagatccagtttgtgtgaattgtgtgagcaccaatcaatttacttcgtctacaagaatgtttagttgtgagccatgccatttatattttcacagagacaaatctcaaaataatttaatttctttgaaccaaacgattatgct

SEQ ID NO: 46107 - DNA, 383 bp, Zea mays
  unsure (1)..(383): unsure at all n locations
tcaccatgcctattattatggcagaattcacggtggtagccgagcagatcatcactagagatctagtccaagaatattcggcctataacgtgttcccgacgctgagtgaatggaacatgccgaagctaaacgggacaaaggagaagaaagaacttgtacgactgccctatcggttcagaactgagaaacagttcacagggccatgctcagaatggttagaaatgatagaaactatgtgcaacaaaattgtgggccaatacactaaaataagaaggatcagcttgatgaactgcaggctcttagctatccngacccgaaccgaaagttgaatcgcgtgatggatgcattgacatttgaatatcctgactatgaccgattgaaca

SEQ ID NO: 46108 - DNA, 477 bp, Zea mays
  unsure (1)..(477): unsure at all n locations
agcttatagaaagagcacgaaaggagcaactttcggacctcaggacagatagtcaaggagccctctggttcaaggatcgcctgtgcgtgccagtgggagaaacacgagagaccctgctcgatgaagcccacaactcagcttactctatccacccagggaccaccaagatgtacttagaccttaagaccagatattggtggaaagggatgaaaagggagatagcacagtatgtggcccgatgtgacacctgccagcgaacaaaggccgaacatcagaagcctgcaggcctgcttcaacccctcccaatacccgaatggaagtgggaagaaataggcatggatntcgtcaccggactgcccagatcacaaagaggaaatgactccatatgggtaatcatcgaccgtctcaccaaggtggcccatttcattccagtaaagaccatctttggaggagcagccctcgcccgatatacctaag

SEQ ID NO: 46109 - DNA, 441 bp, Zea mays
  unsure (1)..(441): unsure at all n locations
ngatcagtaaccggcttcatctataacccttggaaactggtgatcattatgttcttcagcttcttccatgatgtgattgttcctagccgaagagaggagtatcaggtttgtgctacattcttgactgccatgacaaaggatttcgccatgactgcggtattgcccccatacgaagatatggttgcttcgtagctcatcacaaactgcttcggatctgagtgcccatcatacatggggagctggngtggcttgtatgatgggggccatggcgtagcctgcagttctactgacagaggagaagcttattcaaagcaaatttccatgatggaaatcacataccattcatatcatcgaggaattgcgctacaaactctctgtgttaagtcttcatcctggcatcttgagtgagatgatcattactaccaggttatcatcttcttt

SEQ ID NO: 46110 - DNA, 425 bp, Zea mays
  unsure (1)..(425): unsure at all n locations
ctttgtctttctgctcattatttccatgttctcagtgacaaattgtcttatggttgtagctttcttgttcaactttcagatgtcaaaaatcaatatgctaaggtcatgctaaggaagtgtttactggatggcacctgatgtaaaagttacagtttaacttctgagtgacattcttgcaaaagacaagaaaccaatggaaaatccgcaatagccccttaacattcttattacttttgtgtgactattattctttgtattgaaaattatctatttcaatgttatttttcacaagataatactngtgtatctcttgcctggaacataccttgtcattttcagggtattaatcctaataagatgtatgggccttcagctgatatatggagccttggctgcaccgtgctggaaatgctacnctgcatata

SEQ ID NO: 46111 - DNA, 455 bp, Zea mays
  unsure (1)..(455): unsure at all n locations
gcttcgcaggctttgactaccgccacacacgtgtgtgtgtgtgcttgtttactanaaagatggtttggtttggtagcaatagcgacggtgaattngagataatgacatctgctgctgtctgctaaaaaagactggtcagtgactctgaataaaagaacctgcatacatgcagctagatataaaagaanagaaacgttgaagcgtcgcatacctacttgtgcttgcgttacctacctttacccctgttggctgttggaaggctgaaacgggagatcgagctatattattattagtgccgtctcttgcgctgatgcactcctcctncgtcaggcaggagctgatctagccgcgtatttgtatttggacgaagtgcttgtctagatacgtaagtagctctaaacgaatgatcttgttcagaacgtacgggacgagcagtgtagtattctctaaccctg

SEQ ID NO: 46112 - DNA, 461 bp, Zea mays
  unsure (1)..(461): unsure at all n locations
agctntgaagacgtactagatattccttcattatatcactcccgaagcagttattagaatggggatcttcgtctaggctgtgaggagtcaaggtctagagtcaagtgcaaaatgtttttgcagcatgcacgaacttttgtacgagacgaagccctgtggtaaataacaatatcataacaattttgggtgctatagcttcgttgctcgctctggcgcaagctacccggtgccaacgttttggaagaggtggcccggggcctggatggaagagtggttttacgtgaaaaatgatttgaaggcgagagaagatattaaagaaatcatcatgcgccccatctggtcccgcttctgccttcgaaagccgaaggtagaaattgatgatgcagtcgaagcatgtcgaatggccttcaccacagtttgctcttttattggaacaagagacttaattcaagagcatgtat

SEQ ID NO: 46113 - DNA, 498 bp, Zea mays
  unsure (1)..(498): unsure at all n locations
tgtgggcgccctcggcgtcttgtcgcggccgaagtaccaagtctctcatttggaagcctcggngccgaacccttcgggcgtggtagcatcgtagagactgctgatatcgcgccgagtgtagtacggccacgtcctgagcctctttcagctggtccaacgaatcttctcggttggtctgggttctttggtcatcgtaagtctttgtccttggggaaccatattctaagtccgtgggtaggatggcctcggcctcatagactagaaagaacgacgagaaacccgtggcccggctcaacgtcgtcctcagactccaaaccaccgagggtagctctntcatccatcgctcgccgaacttattgaggtcgttgtagattcttggctatagtctctgcaaaatcatacctgtggcgcgctccacctgctcatttgtaatcggtgagcgacggctggccagtccacatggatggcgtggtctttcagaagtcaggaacttttcca

SEQ ID NO: 46114 - DNA, 467 bp, Zea mays
agctttaggtttttgcttggttccttgctcattatgatggtgcggatagttgagcaccgcaccgaaacttctatggatttcgaggtggaggaggaagctgcttcttccacaccactggttcccaaccgccctgtgccgggcgctgctactgtgcatgccgcacggcagcatacggctgcacagacatcccggactccgtcgagggcgactccgggagcattgtcagcagctagggagttgctgcaacaccctccaagctccacagcctcaccaggggccatgaagcaatggcaggacgacgtcgaccgactgctcggcatggcacactcacctcgaccaggtcgaggccacggtcatcccggcgtcaacatgaggcatcggcatctgtgcgctcaccctcagtgaggggcgcacagaccaatgaccttcgagcagaactcgaccgcatgcgtgtgggagaggatgtc

SEQ ID NO: 46115 - DNA, 297 bp, Zea mays
  unsure (1)..(297): unsure at all n locations
ngcatcgcataatntaaatacctgcattgcatctagggcttgtctattctatttgagataaccgccaacaaagcgagtgaaaaagcttaactcgggtcaaacccgacaagccttagttttaagcttttagcacttaaattcttactttctatgcaacaattggctcttgaaatgtgcatgaggtactgcacttatggggagttttcaaaactcatattactcatgaaaactcccgagtgcaaaccaaaaagccaatatcaccatttgtctatattctctaaatattatctaagctat

SEQ ID NO: 46116 - DNA, 463 bp, Zea mays
agcttgttgcccctatatggttgtcattcatcatggactggttaatccaggatcagcaaattacatattattgacctcagttgcctattttcatgatccttttcttataagttctagcctacattttttgtccatttttaaggtgggtctggcacttgtggtgaatggaaaggtaacagttggagtgatgggatgtccaaattggaccaacgatgacatagtcaacaagaaagatgatagcgttgctgcatgtaatggtcgtggtattcttatggtctcccatattggctgtggcacatggtctaggcgtctgtctgctgatattggtcagttcaatacagctcacgatatttggaaaagatgttttgtggacactttgtcgatcgcacacatggcacactattgcattccagatagccaaacatgggatatgataccgttatctgctacctacgattcaaca

SEQ ID NO: 46117 - DNA, 444 bp, Zea mays
  unsure (1)..(444): unsure at all n locations
tccttttgtcacatggctntcttggctgatccaccatgcttgtctattctagaaccacaaaaatattgatcttctttcacagggtgcaatgtggatctgaaagggaattatgcttacacctagtccctaattaattttggtgggtgaattgcccaacacaaacaatcggactaactagtttgctctagtgtataagttatacaggtgctaaaggttcacacttatccaataaaaagaccaaaagtcgggttcaacaaaagagcaaagggccaaccgaaggcactcttggtcttgcacaccggactgttcggttgccaccggacagtgtccggtgaccaccggaatgaccggggaccagaggactccactcaaactcgccatcttccggaatattcggacgtacttgcgctataattcaccggactgttcggtgtacatcggaca

SEQ ID NO: 46118 - DNA, 85 bp, Zea mays
tctgaccttcagcttaaggccttcgcacatatcgcaatctgaacttatcattctaacaaattaatattgcgaggggctactgttg

SEQ ID NO: 46119 - DNA, 390 bp, Zea mays
agctctgcaagatgtcagatgaaattatatattccgccaaggcggaggtgcatcgccttctggaggctaaattcatcgagccggtggcttaccccacgtggctctccaatgttgtgatggtgcagaagaaaagcggaaaatggcgcatgtgcatagacttcaccagtctcaataagtcctgcccaaaggacaattttccgttgccacggatcgacaaaatagtcgatagcgcggccggatgcgaggtcatgtccctcctcgactgcttctccggctatcaccagatatacatgaaggaggaagacaaggccagcaccagctttataacacccttcggcacttattgctttgtcagaatgccggagggtctcaagaatgctcggtccacct

SEQ ID NO: 46120 - DNA, 457 bp, Zea mays
cgacaatgaggagatggcgctcgtcatcaagagctttcgccaaattctcaagcacaggagggggaaagactacaaattccgctccaagaacgtttgctacatatagtggtaagcccggtcattttattgctaaatgtcctatatcaagtgacagtgaccgaggcgacgacaacatagggagaacaaaggaaaagaagacgtactacaagaagaagggcggcgatgcccatgtttgtcgggagtgggactccgacgaaagctcatacgactcctccgacgacgaggacgccgcctacatcgcctgcatctaaggatttctctgtccaaacgtacgccacaagtgcctcatggcataggacgtgcaaaagaagaaggtaaaatcaagatcttccactaaatatgacatctctattgatgaaaatgctactgatgaggaggataactcgcgtctcctttt

SEQ ID NO: 46121 - DNA, 385 bp, Zea mays
  unsure (1)..(385): unsure at all n locations
atcctctaagcacctgcngcatgcaagcttaagttattttattacagaccagaactattattgtgagtgctgagtagtaatattatacaaaccaagggaggcacagactcctcccgataagctaaaagcaaaagatcctatgtggaggaccgagtcctcccgcacttcagtcttgtttttcttctttgggaaccaccttggcacaaaagcagcaaaaatctgctacttcctcacctaaaaacaacgaagggataaaccctgagtatggaattactcagcaagtcttacccgactaaagaaaagactctcaagggtatgctggttgtatgggagtcaaggtaaggcttttcaataatcaaagactctgttttgcagaaatgcttac

SEQ ID NO: 46122 - DNA, 465 bp, Zea mays
  unsure (1)..(465): unsure at all n locations
agtgaagattctntatcccaacatgggctagtcggcgatgccagagctaatccatattagtcttagcaattaagcaagtatcgagttcagctctattaaaatcaaccaagtatagctgaccctctaatactccttaaatgctactaaatcatcacttcttttaaagacagtaacacctatatccgtaaaaagacagttgtaacccattttgcataattgagatacagaaagcaaattgtaatccaaagaatctactagaaacacattggaaatagaatggtcacgtgaaataccactctaccaagcctttgctaaacttgatttcatcctcgaatggatagctctttgggatcttcgttttctctaggaggagaaatcctttctcctctgcatgtgagttggcatccgctataataatccaattgagccctggatgataaacttgcaaacagtttatgccttgtc

SEQ ID NO: 46123 - DNA, 489 bp, Zea mays
  unsure (1)..(489): unsure at all n locations
atcctctaatcacctgacgctgcagcttaacacttttaggatacttcggatattgttgtgtataatgcgaattcttcttcacgaagcatgaaaagaagggaaggtgttttttcgccagactcaaaaacggtacgtatgtaaagtttcatgcatcgtaaagaattgaaccataaagaanaataaaacaaacatattacatacaggattacaagatattacacatgttacatttaaaatgtttttacaatagcatttagtcttccctaagtaccacttctgcagcttcgttcaacagtcgatcgacaacttcatccataatagcctcagccatctttntaatctcatcgtcacccctaggccgtgcacccggagatacttcagtaggatctgaggaaggacaggacacggctacattgctattacaaatcgcaaacaaattttaaagcctaagattacaacacgataaaaaccattatntaatacctaatt

SEQ ID NO: 46124 - DNA, 473 bp, Zea mays
  unsure (1)..(473): unsure at all n locations
tgatgtgaaagcaatgacaggttcacgtgaacagtacagacgtactgtttatctacttataggcacaggtcgcagnctgtgacaagttacaattatgccccttgcgaaagttacagcattgactcagacctatatgtataaaaaggtcattctatctttatgtccgtttaaaacgccgaagctccataaaaagggaccttctgacctctcttggagaccacttcaggcgaagctgcttgttcgtgtgagaccttcggcgcaccgaaagacagaaccaacaatactctcttcaagaggaaatagcagagagcataattttaccattatcagtaatcattctcataaagcaactaagttttctaattaagaggacctaaggcgctcttaaccgcgagcaccgttgaaaaccggctttacactttgaaggcgacacttactcaaagcgtgagtcatttgtcgaaagagccactcat

SEQ ID NO: 46125 - DNA, 458 bp, Zea mays
agcttgtcagttaacctacacagcagggaagcttcttaccgagggtgaggaactgaaagatgtcaaagggtttagtgtaaaaaataatcacacaggatcttcttacacaccctaatagtactattactaccattgataacgtttttcacttctcagagctctggactgaaatgtatggacgaagtatgtaaaacaatattttattaaaaaatggcatgtcaaaatcataaaaaagcattgggggcatgcaaaatcactgtatgacttgcaagaaagcagctccctacccgatagattctgggacaccagaattgaacaaacggccaaacgacggtaataatataggccatgtaaaacaatattttattgaaaaatggcatgtcaaactcaaagatgcaataaaagcattgggattaggcgtgcaaaatcacctctctctctctctctctctacctatc

SEQ ID NO: 46126 - DNA, 560 bp, Zea mays
ccccccccccctccttttgattattacttctcttcctcccccccccccttgtgcttatctgtcccttcaaactcactttaagggacacatttagatactaagccattcgagaataacatgattgtagcgcatgccaggcagggaagcaagttggagtccaccatccacataagaacatcatgactaccgacaggccgcttgagctactccacatggatctattcggccccgatgcttacataagcatcggcgggagtaagtattgtcttgtaatagtggatgattattctcgcttcacttgggtattctttttgcaggaaaaatcacaaacccaagagaccttacaaggattcttaagacgagctcaaaatgagttcggctttacgatcaagaaaatttaaagcgacattgggactgagttcaagaactctcagatagaaggctttcttgatgaggagggcatcaagcatgagttcttctctctctacacgcttcagcaagatggtgttgtagagaggaagaatcgaactctattcgacatggcaagaaccatgtctgat

SEQ ID NO: 46127 - DNA, 443 bp, Zea mays
  unsure (1)..(443): unsure at all n locations
agcttctaaaggagaacatgtaataggtctaacaaatgttcatttcgaaaaagagagaccttgtgcagcttgtcaagcaggtaaacaagtgggaggagcacatcacagcaagaatgtgatgaccacgtcaagacctctggagctgctgcatatggacctcttcggacccgtcgcctatctaagcatatgaggaagtaagtatggtctagttatcgttgatgacttttcccgcttcacttgggtgttctttttgcaggataagtctgaaacccaagggaccttcaagcgcttcctaaggagagctcaaaatgagtttgagctcaaggtgaagaagataaggagcgacaacgggtccgaattcaagaaccttcaagtggaggagtttcttgaggangaagggatcaagcacgagttcttcgctccctacacacctcagcaaaatg

SEQ ID NO: 46128 - DNA, 456 bp, Zea mays
  unsure (1)..(456): unsure at all n locations
agcttgagggaaactgtacccgtacccgaaatgtgattcgacgaggtgctatagagttcaggtcgcattcagatttcagaaccgaacctgttcagaatttcagagttactcacgcatggctttcctgtttgacaggttgtctgaggtttgctgctcaagaaggcacaccctgaagcccagcgttccctgatactgcaacaggggatgaccaagcagtccagatggccccgaaaggaaaggtagaggccgaggacgaagaggtcaaatggatcagaactgattcagagtgtatttgtagcagtgtgtaaacataagataggaccatgcatctgacatatccttttcattctccagacatcgtgctagagatcctgattccttgtacacttctgnttggtacacgcctctctgcatatgatcttatcagatggccttcgaagccagcgaaaacaatat

SEQ ID NO: 46129 - DNA, 447 bp, Zea mays
  unsure (1)..(447): unsure at all n locations
catcagcgacactatgaaactcaagctctatatgtcnggttcggcctagagctagcccaggtaaatntactgtcagagagctccagttcccgaagattaagagattctatgcaggcattaaacaagttcggccacctgttatcaaaacggccactactattttccgccgggtttcttataatattaaaatctcctcctaccaaaattgacattgtctctgtactgatgacattgactaactctgtaagaaaacggactctatgttcaggttgcgctgcaccacatcctccttctggtacacagaaccggaatgcccggtctgtcggcggccttgtgcgtcgcactacgtgctccagctggtacttggcgcggtggaagtcgcggcggctgttggacagcagcactcgcgcgcagtctcactcggtccggaagaaggcgttgaggatg

SEQ ID NO: 46130 - DNA, 217 bp, Zea mays
cgcatgccaagcagggaagcaagctggtgtctatcatccacacacgaacatcatgacgactgactcgccactggagcttctacacatggatctattcagcacaatagcctacataagccttggcgagagtaagtactgcctacttattgtggatgattattctcgcttcacttgggcgttacctttgccggaaagaacttttactccagacacctta

SEQ ID NO: 46131 - DNA, 460 bp, Zea mays
  unsure (1)..(460): unsure at all n locations
tcaagcttgcctcggacagactaataccataattatataacacgcaatgggagtggagagatggcgagagtaatgtgtaccctccgtggcaagaggctggacggtggtgtatctgtgctctcggttggcttgaacctgatctggtcttaaaaacccagtggcgagttgacatatgcaagggttaagtgctacatatgtcgtgtgattggagatcctcagctgagtattaatcgattcggatcgtcgttacttctcggacatgaagaactggtcactgccctacatgtagcatttcagtgaacaagaagggttgaaaacaaattggctagtataggtcaagtgcttgaactanggtagaaagaactctagatacaggtaactttacttaacctgacaattaaaacttggattttaaggatccactactagtaagcgtttttgcaacatagtcttgattctc

SEQ ID NO: 46132 - DNA, 506 bp, Zea mays
  unsure (1)..(506): unsure at all n locations
agatactcagctaccgcattgaagatgagccgcttccctaggtcttggtcttgcttggctgccccttgcgaccatttagcgccgtcttgaatctcttgatgatgagagccatctcttcatcgttgagtctggccgcctcaatttgtgccaccttgctaggtagcgcctccttgcttcgtgttgccttgagagcgagaggttgcggctcgttgatcggaccattcaaggcgtcgtccacatatctcgcctccttgatcatcattcgcccgctaacaaatttcccaagaacttcctcnggcgacatcttggtggacctgggattttcacgtatattgtttaccaagtgaggatcaagaactggaaatgaccttagtattaggcggacgacgtcgtggttcgtccatcgcgtgctctcgtagcttcttatcttgttgataaggcgcttgagttcgatgtatgttcgcgttggcttctcgctccttatcattgcgaacccgtcaagcttg

SEQ ID NO: 46133 - DNA, 487 bp, Zea mays
cggatccttaagtcaccgcggcatgcacttgcatactctgatagttatcctttgtgcagaataaagcctcatgcctcctactatcaatgaaacaacagcaagcttatggccatctagagaagcagctggctcaaaacagttagttgcggcactaaatctccatgctaaaatcctcccagcctgcaccaagcaacaaaatagaattgaaacaatgaagaatttgaagtttcacaacaaaacaaagataaacccaaaatagggggaagcttacttgtgttgcagcaaagagtaactcactggcaacggcgagtgcatagacttgcccagttggtccagtaaggctcatttacgctgctgtttgcatattccaaacctgaagtaaaagactatatattcatgcatgcagaacaccaatggtgataaacttcatcagaaattaaaaagagctaagggagcagcggcgatgtctaatgtacaatcagatgat

SEQ ID NO: 46134 - DNA, 440 bp, Zea mays
agcttgtggcgccctcgggcgtcttgccgcatctgaagcaccaagtctcccacttggaggtctcggggccgaacccctcgggcgtagtagcgtcgcagagactgctgatatcgtgccgagtgtagcaaggccacgtcccgagcttcttccagctggtccagtgagtcttctcggctggtctggttgctttggtcgtcgtacgcccttgtcctcggggaaccgtattctaagtctgtgggcaagatagcctcggccccatagactagaaaaaacggtgagaaacccgtggctctgcttggtgtcgtcctcagactccagaccaccgagggtagttccatcatccaccgcttgccaaacttgttgaggtcgttgtagatcctcggcttaagtccctgcagaatcatgtcgttggcacactccacctgcccatttgtcatggg

SEQ ID NO: 46135 - DNA, 453 bp, Zea mays
  unsure (1)..(453): unsure at all n locations
ntgcacctctgaactaactcggctgcatcacttttcgctgctggccaatataatcccgacctgaagaccttcccgactagtgtcttggatgctgcgtgtattccacattgcccaccatggacctcatctagaagttgcttccccgtagatgagagaatgcatttcatgaggacgcccgatgcgccccttctgtatagtgtctccccaatgagtgtgtaatgagctgactgtctagcgatgcgctcggctgcatttttgtcatctgagtcctcttcattctatatatatctgatgagcggcctctctcagtcatcagaaactgattctggttggttcacgatattaccatcttctgcctggtctattgagatgctcggatgtggcatttcttgtactaagactccaggtgggactctgagtcgactggatcctagctcggacaatatatcagct

SEQ ID NO: 46136 - DNA, 454 bp, Zea mays
  unsure (1)..(454): unsure at all n locations
agctntccaaaaagtccaagatcatcataatctgagttcggagctaaaagttatggccacaatacgaagtcggaattgctgaaaaaacaagagcagcatatgggatgtccggtgcacgccggactgtccggtgtgccaaatttgctcaaactggtatggcttcaactctgggatgtagagaatttcataagctttccaaaaagtacaagatcatcgaaatcggagttcggagctaaaagttacggccaaaaatacgacaagcggacatgggctgtccggcgcacaccggactgtccggtgcgccatgtccggtgcgccatcttcggaagctcaaacggctacttttaacggctagtacacgtggcatgtccggtgcacctgtccggtgcgccgcagaaagctgcagaactgctttccaacggctattattgagttggggcctatatatacttca

SEQ ID NO: 46137 - DNA, 450 bp, Zea mays
cgtgtagtctacttcatcatcactagactcatcatcacttgaagatgcctacgtaatagtaccttgagtacttaccttcttctcccttgccatgaggcaagtgtgacgttcgtttggggaagagagaccatttgttgaacgccgcggcaacgagtccttcgtcatccgagtcagacgaagaacaatatgagtctcattcttttccaaggtgtgcctcgcccttagccttcttgtaaaccttcttggtctctctcttcccattctttccttgccctgggcactatcattattcggacacgtagcaatacagtgacaatcttaccacactgagcacgacgcttcccttcgcttgctcttgtgggaagtccttggaccttgagcgtcgcttgagtgttgatgaggcctttatcctatttacccggccgctaacttgacaccttgtacgagccc

SEQ ID NO: 46138 - DNA, 433 bp, Zea mays
  unsure (1)..(433): unsure at all n locations
cgaatagtgagaggctaaagtttggcctgttgatggctcttacaagattgcatccgacttttatgaaagcagcagccataccacgagaagctactagcgcacagaaatcactgtggctagttatgacttcatcgaggacatcaactcctttttgaatacattcaagtgcttcggggatatcttcgacagaaagattggcttcttcgaacacggctccgatagaattgaagactacttttagctgagaagtacattgggtcgcaatgctgaagcatttattcttaagagctntaagcatttcactcagttccaggttcttctcagcttcaaccttgagtgtcatatttaaagctttcgattcacgggtgaaccggcttggagtctcttccaaaagtggttgagttccttcagccctgtgctaattttcactctg

SEQ ID NO: 46139 - DNA, 457 bp, Zea mays
ttaacctctgcgagacctcttcccatctctgtctaaccatggtgaatgctatatcgcacgtcatattctatgcatgtttaatctacttgttctcttgtatggtgtactgttcgtttcctaatttcaatggatggatatatgtatgtttgcactcgcatagagaacgatccggttgaagagcccgaacaactcgcacgagaagcccctgagcagcagtccgatggtggaggcaagtgtcccttgacctatctctgtcctattcattctttaattcacctcccgcattacacaattattgcctagcgattaactacctttgttattcataaccttgcttacctatttgggttggatcattattgtttagctctatgctattgcttaactctaatcaacgaacatgatgagagtatttatgatacgcttgtttcctcctcctcaataagatgtcatactt

SEQ ID NO: 46140 - DNA, 455 bp, Zea mays
agcttgcacaattggtgcttagcaaattcatgtactgtctcccaacggaagacaaagccgatacattatactttagcatagattgttgcctagtgcgaccatgcaacctcttgcatttaagaatgtggtgagccaaatgatcaatacctatcgaagaacgagcgttgaactcttttttgcagtaatgacatttatcacctactcttatcatcgcgtcattttcattggcgtggactttctccatgtcgtcccagacatcagaagtgcatttcctattccacctcccaccaccagtaacggctaaatcgtcatcgcctatgcttccattagcatcaccattccccacaacattatcatcatcgaggtcaatcggagcctcatgaatgacgctagagcccaaaagatcgcccagaccaacatcatacacatcgcccacgcgtagacacatgagcatg

SEQ ID NO: 46141 - DNA, 427 bp, Zea mays
  unsure (1)..(427): unsure at all n locations
tcactcccaccccgatanagagacttgggagccctctcctcctctctagtcctcttgtgaccattactacgagttgcgatcatcaatggtgccggtagcgcaagccgtcgatgactagaagtagggacattntgcccgactagtataaatcttgtgccctccacgcacactctctggagctcacaacgaacataataaatctacttgtcggagcgaggttccaaacaccgatagttggtgcgtcaggtatgggtcttgcgcgttccgcgatgagatcctccaagctccagatggctacaaatgaccgttgccgtagcatgcgccccctagagcgactcgcttgctttgcgaatcccgatgacgttgaaagtccgctacaggcggggaatatgtcaatcttacacttatatactttaagcataactac

SEQ ID NO: 46142 - DNA, 418 bp, Zea mays
  unsure (1)..(418): unsure at all n locations
agctngtataatgcctcattgcctcctagntntgacatcccaacgaagggaactatctgcacaatcaactgtctgaagctacagctcaggaacgtactgtaagaaatatctgaatgtatagttcaaactttgtgcgtttttcagatcctcccggttagcatcaagagccttggcggaagcatcgcaacactggccaactggctgacatccttcgccataacaatgacgacgaacttgatgctcacgtggagtgttggaggtccacacaacacctttgtgcttcagctctgacgtctgaataggataggattatgaaccatggaagctgatgcagttttttcttttcttttctgggcaggcacttttctctcgtacatggntgtgagcgccttcaccatcgttttttgtgtcctttggg

SEQ ID NO: 46143 - DNA, 474 bp, Zea mays
actcagctatgaaattcttcatcctacgagggctagtcagcgatgccataaccaacccatgttagtcttagcaattaagcaagtgtcgagttcagctctattgaaatcaactaagtatagctgaccctctagcactcccttaaatgctactgaatcatcagtttttctaaagacagtaacacctatatctgtaaaaagacaattgtcgcccattttgcataattgagaaacagaaagcgagttgtaatcgtaagaatctacaagaaaaaacattggaaatagaatgttcacgtgatatagcacatttatcaagtcctttaaccaaaccttgatttccatacctcgatgtgatagctttttggggatcatgggttttctcatatgaagagaacatccttattttcccagtcatgtggtatgcgactccgctataatgatccaacttgagcctccggatgcataaacctacaaaac

SEQ ID NO: 46144 - DNA, 491 bp, Zea mays
  unsure (1)..(491): unsure at all n locations
ctgaggcgtgcgagctcgaagtcacctcgagtcggtaataaagtcttatcttgtgcttaccttntccttgaaacttgaattttccttataatgctttaatatgtacaagatgtcaaagccgaggaacattgagccgaagcatagcagacgatccgaagctcaacagatgatgatgaagccgaaaacctagctatgaaaaaactctaagaaaactcttgtttaacctttataaagaatattgtaatttaagaatcagattctactctggaaatntgtccataccttggaatatatttttacctttccgtcaatgtatgaagtgctttgatgtggacgaaacttgtattttntgagccggaggcgaaaaacaccttcccttcttttcgtacacaacgaagcataaatatgctntntgaagctgtattcttagagccgaagcaactggctggatctggatgatatgatgatgatgatcctatgtatggctaaat

SEQ ID NO: 46145 - DNA, 358 bp, Zea mays
acatgtgctaagcggcgatgccacagatagttcatgctagtcttagcgattaagcatgcatctagaccggcctcctctcttgcaaaatcaactaaataaagtttgccgtctagcacacccttaaatgctagtgaaccatcacttcttctaaagacagacacatctacatttgtgaatagacaattataccccatattacataattgactgacagatagtaaattatattcaagagactctactaataacacattagagatagagtgctcattggatattgcagatttgccaaacctttcccttgccttggttccatcaccgaatatgattgaatcttgggaattcttattcttgacgt

SEQ ID NO: 46146 - DNA, 457 bp, Zea mays
  unsure (1)..(457): unsure at all n locations
agctggaggcgtctattgggtggcgactgggtgtatactcctccttcttttcttccggtgccttgaatgcaacgggttgagcttctgatgtgtcgccaagctcgntgattttcctcgagccttctatcatgcactcaaaacttacaaaatgcccgataacttcctcgggggtcattttagtgtatctaggattaccacgaatcaattgaacttgagtgggatttagaaaaatgagagatcttaaaataacatttaccacttcgtggtcgtcccacttcttgctcccgaggttgcgcacttggttcaccaaagtcttgagccggttgtacatgtggtgtggctcctcccctttgtgaagccggaaccgaccgagctcccccttgattggttccgcttgtgatcttggtgagctatcccctcgtgcgcagttgagcacatccaatctctttgattttca

SEQ ID NO: 46147 - DNA, 183 bp, Zea mays
ggaggaacctaatttttgaagctattctaaccttggtaaggaaaattagcaaggcagtctgacaatttggccaaatagtaatataactcattttaaggaactgttaagacctagaaaccaatcttcctagaagaaaattagctttaattttagtcaaataactattaaatcattgttattgaa

SEQ ID NO: 46148 - DNA, 436 bp, Zea mays
  unsure (1)..(436): unsure at all n locations
agcttgcacttacgaccaaaccgcacccacattcatatcacattcaatggctcaacaatagtggtaaggtcaaggtaaccaagctggtacgaattaattttgctattggttcatatcgngatgttgttgactgtgatgttgtgcctatggatgcttgtaatattctgctaggtagaccatggcaatttgattcagattgtatgcatcatggtagatcaaatcaatattctctcatataccatgataagaaaattattttgcttcccatgtcccctgaggctattgtgcgtgatgatgttgctaaagctaccaaagctaaaactgagaacaacaagaatattaaagttgttggtaataacaaagatgggataaaattgaaaggacattgctttgcttgcaacaaaactggatgtaatgaattatttgcttccactac

SEQ ID NO: 46149 - DNA, 337 bp, Zea mays
  unsure (1)..(337): unsure at all n locations
tttcttaccgagacaattcctggcttttctgcccatggtgctgcgtcaccctattttggcccaatgggtcgtgtatcaagttaagtccattagggacgcattctatggtttgagcacgaacccaatacccttgtggtcgtcctcccatggttataaaccccctagccgccaccaagaacagtcggtgtttgttagaacaagtttagctctcgctacttgcttgcaagcgcgcgtgctagntaagccgcccgatttctggttttggaacctcatatattggaggttgatcttaaacctacatttagaactggaattcagacttggttacttgtcttgc

SEQ ID NO: 46150 - DNA, 471 bp, Zea mays
  unsure (1)..(471): unsure at all n locations
agcttgtgaagattcttcatcccaacatgggctattcggttatttcatagccaacccatattagtcttagcaattaagcaagtgtcgagttcagctctattgaaatcaactaagtatagctgaccctctaatactcccttaaaagctactgaatcatcacttcttctaaagacagtaacacctacatcagtaaatagacaggtgtagcccatattgcataattgagaaacagaaagcaaattgtagtctaaagaatctacaagaaaaacattggaaatagaatggtcacgtgatatagcaatttaccaagtcctttgaccaaacattgatttccatccccgaatgtaatagctcgttggggatcttcatntttctcgtaggaggagaacatncttttctcccctgtcatgtggtttgtgcacccgctatcaatgatccaacttgagcccccggatgcataaacctacaaaa

SEQ ID NO: 46151 - DNA, 461 bp, Zea mays
  unsure (1)..(461): unsure at all n locations
agggagagcacatataggtactttctatgntcattnngagaaaaacaagatttgttgcgcatgtcaagcagggaagcaagttggtgttcatcatccacacaagaacatcatgacgactgacaggccacttgagctactccacatggatctattcagcctgattgcttacataagcatcggcgggagtaagtactgtctagttattggggatgattattctcgcttcactcgggtattcttttgcaggataaatctcaaacccaagagaccttaaagggattcttgagacaggcttaaaatgagtttggcttaaggatcaaaaagattagaagcgacaacgggacagagttcaagaactcacaaatcgaaggctctcttgaggaggagggcatcaagcatgagttctcttctccctacacaccacaacataatggcgtagtggagaggaagaatagaactgt

SEQ ID NO: 46152 - DNA, 228 bp, Zea mays
gctatgaatcgacccggcgtgcctcgggtgaaatcttcctctgaagcccctggtcattacagagaacctgaatgctttctctcttctctggcggacagtattgtcagcacgaatgaactcgtccattctttggagcagcttctccaacgctcgaggaggattcctggcaaagcactgcgctgaatagcccggcccgaactccttaatcatggtctcaatgacaaatct

SEQ ID NO: 46153 - DNA, 477 bp, Zea mays
  unsure (1)..(477): unsure at all n locations
gtcacctgcngcatgcaagcttcaataggccgatatcaattattagtgttctatctgattcttggtggaataaaacaaatatgatttaacgttatcacttactcatacgttataaatatgtgaaccaaaaggcacataaatgtccaatataacttactccctctgtctcataatataagtcataaacattttttattcttatttcataataatatgtgctctgtacacacgtacattgatacagtggcatatcaagaattaaatatatttntttatatctaaaccaaaggtggttacgtgttgtcttatatactgcgatgaagggagtaaaatatgtgaaaatgaaatatatcactctcaataatgtttcacaccgtttncaagaccttgttttatccccataatgtttcacacgttttccgagcaacgttcaatgacgcctcgggtaacgtgacaccatgtgtcatgcggagctcg

SEQ ID NO: 46154 - DNA, 273 bp, Zea mays
tgtgcgtctcatagtacctggcctttcgctcaaggaggaccttctttacgtattatatcgacttctgtatgggtcggacccctcggctggccctgggcctcaaagtctgtggtggtcggaccaccaccttctcctatgggaacctcctgactcccttgcgaacgtagctcccgcctttcaatgaccaacaccatgctcaccgcctctgtaaccactgtaatgtacaagtacagcggtttccctggctaccgagctaccagtattggtaaggac

SEQ ID NO: 46155 - DNA, 467 bp, Zea mays
  unsure (1)..(467): unsure at all n locations
agcttcttcgatgcgttctttctggggaaatttctgcagacaattaaccagaagaacacgtgggagctaggcctaatcgatcatctcagcgagatcatccaagcgggggtggacgaggacgaggagaccaactttcagaaggtaccgacctgcaaagatctcccatttcctcctctctttgtagccttcttagtacaaatttgtctagagggagattcgtctactgtattngaatttgttggcaataatgtggtacttttatggaacaggcaagctgcacactggaggcggnggtcaagatatattcacttcgtgtggattcagtgcactccgaggcttacaaggtgcttggtgggataaaccgtgccggaaggagtgaagaggctggtgagggtgcactggaatttaatggattctgatgtgaccactntgattgcagtttacttctttatanggagctgatccag

SEQ ID NO: 46156 - DNA, 276 bp, Zea mays
  unsure (1)..(276): unsure at all n locations
ntacatatcttcttgagccataagtgcctcggtcataagcttatattatattttcgaacgaatcaattagtcctctgaattaagtgttttctgcatgaaaactggcggcacactatacatcattcgccacccttatcttctgcgtgatactcacagaggtaccttgactcaccacttcctgacacattatatgtctgtattgcccatcaatctgcattgttaaaacgcatctgtacatcaactactctttgtgccattcagtcaaaactaaattac

SEQ ID NO: 46157 - DNA, 451 bp, Zea mays
  unsure (1)..(451): unsure at all n locations
agcttgtgagcagtacaagtttacaagggtgatttctgcttctgccgatcagccgaagcccatgcttttatgtgacgacttagcacaacacaatgtgctattgggatcccaattgtctgaagaacaggagaaaaccttgataaggtttctgttcaacaacaaagatgtctttgcatggtcagctaatgatctttgcggagctaaaagggatgttattgaacactcgctcaatgttgacccatcctttagacccagaaagcccaggcttctgaagatgtctgatgacaacgccgaatgtgctcgaaatgaagtgaaaagtctcctcaatgccggagttatcagagaggtaaaatacccagaatggctggctaacactgttgtggtaaaaacgccatcgaaatggatatgtgtatgatntactgatctcacaggtctgtccaatgacgaattt

SEQ ID NO: 46158 - DNA, 278 bp, Zea mays
tctccacacgcattaagcggctatcttatcgaggatgctcttgtcttcttgttgccatccaaaataaatcaagtacatgggttcactcttgctcatgaacaaactcatatgctaccactaggttcaatcaacgaaaataacaaatagtggtagaacatgaatttaaatatctcattaaatatgcatgatactattaagtatgtactatatgcactaaccacatactagtaggggatgatatgagcatgcacatcacaatgatacctttgctatgttgg

SEQ ID NO: 46159 - DNA, 479 bp, Zea mays
  unsure (1)..(479): unsure at all n locations
tctanagggagaacacgtgatacgtctaactaatgttactttctataatgatagaccttgtgcagcttgtcaagcaggtaaacaggtgggaagctctcatcataccaaacatgtgatgaccacatcaagacccttggagttgcttcatatggacctcttcggacccgtcgcctatctaagcataggaggaagtaagtatggtcttgttatagttgatgatttttcccgcttcacttgggtattctttctacaggataaatctgaaacccaagggatctctcagctgctttctaaagagagctcaaaatgagtttgagcttaaagtgaagaagataaggagcgacaacgggtccgagttcaagaaccttcaagtggaggagtaccttgaggaggaaggaatcaagcacgagttcttcgctccctacacaccacagcacaatggtgtggtagagaggaagaacaggacgcttatagacatg

SEQ ID NO: 46160 - DNA, 459 bp, Zea mays
  unsure (1)..(459): unsure at all n locations
agcttncacagcaatccaacacacagtagagtatggtattacgctccggcggcccaaaccattctaaatcctcgcgtgttcatgtgctcggtaatcgcttagcaagacaggcaaaacgcttaaaccccttcctcgtcttaggatttagggcgggtgcattccgccacccggctggagaattccctctccgacatcttatttaaatgacactccttaagattactactcggggaaatgacaaagatcctaaagcccagttcgtttcgttagaattgagtttcattctaataattataatttaaacaaaactaattatgttaatatatttgtatatctaatttatttgtatattattctaaatcatacgagagatagttataaacctacatttatgtatagaaacacaaatagaagagtgtgctataagttgtacatcaaaaaaagagcatttaatatata

SEQ ID NO: 46161 - DNA, 481 bp, Zea mays
  unsure (1)..(481): unsure at all n locations
ntgcggcagatccagcgttgccacgctatatcttctccaaacacccatgaagccacgacttggacctgacgggtgcccatcaggatcatgttccctcccgcctcaacacgtcagagcgatcatcagaaaaaataaaagaagcgtggcggtggagtttgcccataaccacaagcaacaaagcaaaggcaggctggctggctggcagcagatcaaaagatggttgccatgtcacgtttgctcgtgcaacttaagctacctncacgcgctgcccttagcgagggaggaatggtgaagtttgtttacggctcctgagctatttgttggctcgtttcaaaactcacgctggttatggtaatgtggtggacagacgtacagcactgaacatctttgaactattgatgcatgcagcggtagatcttttacatgctgcggagacagggacatttgtcacgatgcgctggagtaagccagaaacggagct

SEQ ID NO: 46162 - DNA, 443 bp, Zea mays
  unsure (1)..(443): unsure at all n locations
agcttgcgttgaccaacagcgctgtcgctgttcatctgtttggatcttctcttcacgactacgaaataggagtgccaccaacatccggtctagtgggacgtgctacgaacaaatagtcttcgttttggcatatgacagtgcttttaactgcatttcatatgactgttgcatgctacttcagctcaggattgccaaccatactgctcacgattttccatctcaaaatctgatatgccaaaagtgtgatatctcatctcaaaaatataaaaaaaaggcgtaagagctagtgatggagtctgttggacacttggcctcgcttacaagcttgattgactgttcctttataaatgcagtacatcttcgatatctatgttcattgtattaccaatnggcaacttattgcatatagttagagactaaagaacctatgctatnggtagttc

SEQ ID NO: 46163 - DNA, 501 bp, Zea mays
  unsure (1)..(501): unsure at all n locations
gcgacactatgaaactcagctctaagggaaacacgtgatagtttgactatgcgctttcaaaagatagaccttggcagcttgcaagcacggaaacaagtgggaggctctcatcacaccaaaaatgtgatgacaacatcaagacccctggagctgctacatatggacctcttcggacccgtcgcctatctgagcatagggggaagtaagtatggtctagttattgttgatgacttttcccgcttcacttgggtgttctttntacaggataagtctgagacccaaggaaccctcaagcgcttcctaaggagagctcaaaatgatttgaacttcaagtgaagaagattacgagcgacaacgggtccgagtttaagaaccttcaagtggacgagtntcttgaggaggaggggatcaagcacgagttctccgctcctacacaccacacaaaatggtgtggtagagaggaagaacacgacacttattgatatggcgaggatgatgctt

SEQ ID NO: 46164 - DNA, 435 bp, Zea mays
  unsure (1)..(435): unsure at all n locations
tgcaggcgtgctgcggcatgcaagcttccacagcaatccaacacacagtagagttttgtattacgcnncngccggacccagtatatccttgatgacagagaacgtctggaacaaaatatggtgctgctgcagcccgaaagtctatagcttatctctgatgacacgcttaacaatgatgcttccgaaattctgtgttgaaaaatcaccatcaatgcgagcattaactgtagcatcatcacattgatcatcatcgtactgcacataagactcactaccgtacccatcatccgtaacattggaccatccgtggcatggacaatccttcttcatgtgacctagaacatggcagcggtggcactagaatgttgaagtgcgtccactggaatgcgccgacgattctggtttttggcacgtcctgaaaagatatgtacctat

SEQ ID NO: 46165 - DNA, 499 bp, Zea mays
  unsure (1)..(499): unsure at all n locations
ctcaagctcggatgacgtgtcatcatcatcatcattcgagctatcatccgagtcccattcaacttagtacgctctgccatctctcttctgtatacgatactttttctcctcacactttcatctttgcccttcttcttcttgctngggcaatacatggcaatgtgaccaggttccccacactacaaacactttctatcattgaaagcatttcttctagatgtttgacctcttctacgttgacctctcttcatcttcatgaatttattgaattcccttacaaacagagccatgtaccctcactctcactttcaatttttgaacacaactatcttccttctcaaaagcctttaacgctctagcattgagaacaattgagtcatttttcacctctcttgcccaacttaaagcatcggctcgcgacttcttaaatatatcttgagtgagagtatctctcaatactttggctggagaagttgcagatagaacactctctactaac

SEQ ID NO: 46166 - DNA, 373 bp, Zea mays
gcgcctaccattatagagcatgcttctagcaaatttaatcttttcattttcaagttcatgctcattaattttagcactcaatttagctatgtgatcattttgttgtttaatcatagcaaggtgatcatcaatagcttctacattaatatatctacatctagcgcaaatacgtaacatgatcaacagtagatgtagatggattgcaagtatttaattcttcaatcttagcatgtaatatagcattctcatctttaagacaggaaatagaatcattgccaaccattaaaattttaaccttataaactaagctagcactttcatctctaaggctagaaatcgtatcattcacatcatcaatcttagccattagact

SEQ ID NO: 46167 - DNA, 406 bp, Zea mays
  unsure (1)..(406): unsure at all n locations
ctaagcttctnagggagaacacgtgatacgtntaactaatgtgcaattcgaataatatatatcttgtgcagcttgccaacaggcaaacaagtgggaagctctcatctaaccaaaaatgtgatgaccacatcaagaccttcggagatgcttcacatggacctttttggacccgtcgcctatctaagtatacgaggaagtaagtatggtcttgttattgttgatgacttttcccgcttcacttgggtattctttttgaggataaatcttatacccaagggaccctctagcgcttcctagcgagagcttaaaactagtttgacttaaggtgaaaaagatacgagtgaaattgcgccgagttaagaactttagtggaggagtccttgaggagaacggataagtcgagttt

SEQ ID NO: 46168 - DNA, 465 bp, Zea mays
  unsure (1)..(465): unsure at all n locations
agcttgtgaaagttcttcatccccacatgtgctaatcggtgatgccacagccagcccatgctagtcttagcaaataagcatgcatctagaccggcctccttttttgcaaaatcaactaaatagaagttgccgtctaatacacccttaaaagctaatgaaccatcacttcttctaaaaacagacacatctacatttgtgaatagaccattatgtcccatattacataattgacttacgggtagcaaattatatccaagcgactcaactaagaatacattaaaaatagagtgctcattngagattgcaatcttgcctaagcctttaaccttgccttggttcccatcaccgaatatgattgaatcttggggatccttgntctcgacgtaggaagagaacattctcttctcccccgtcatgtggtttgagcatccgctgtcgattattcagcttgatccgcacgatgca

SEQ ID NO: 46169 - DNA, 467 bp, Zea mays
  unsure (1)..(467): unsure at all n locations
actcagctnagcggatgtgattagcacaagctttcagcttgaatgcacttgttgacttgtcttcttcaaaaaccacatccgttaatcctctaaccatatgcttcttcaatacctctctgagtgtgctcactccaacatgtgcaagcctcctatgccaaagccatccaatagaagctctggtgaacaggcaagttcttaagtctgcatcttctgaagtgaaagccactaagtaaaggctgttgcatctaaatcccttgaataccattgattcatcatccatttatgctaccataacctctgatggagtgaataagctctaagttcaagatacacagacgctcactgataataactgaagttaagggtgcactaatagaacattgatattgaaagcatttgaaatgcaccttgtcagccttgactttccttagagtgcttcaacgtatttatttgacatcacatctatt

SEQ ID NO: 46170 - DNA, 213 bp, Zea mays
  unsure (1)..(213): unsure at all n locations
ntgataaatagatatgagcgcaagttaatcaagtctatgacgcgagctcttgttaacacaaataatcaccgagagagcaatcacaagagacacgcgattttatccagtgggtcggcccagtaacactagcctactttcacgatgcggtgtcccaatggaccagggttgcactccacctcttttaagggatccaaagatcaaccttgagaccat

SEQ ID NO: 46171 - DNA, 478 bp, Zea mays
  unsure (1)..(478): unsure at all n locations
agcgacctatagatactcaagctngatataatagatattaacgcaagttaattaagtctatgacgcgagctcttgcgaacacaaatgatcacagagagagcaatcacaagagacacgcgattatatccagtgggtcggccaagtaacacttgcctacttccacgttgtggtgtcccaatggacgagggttgcactcaacctctttcaagtgatcccatgatcaactcgagtaccatggttttcctccttatagtcttctttcccggttgcgaggaatctccacaagatggagcccttcgctcttacattttgatcaccaaaaacgcacaagagtaacgttgcgaagagcancatataaaagacttaaatacccagcataaccacgcacacaagtgatgaagtgagttcgaacactacacacggagttcacacttacatggagcttacatcactagcacaaagaatcgaatgtgtgaag

SEQ ID NO: 46172 - DNA, 490 bp, Zea mays
  unsure (1)..(490): unsure at all n locations
atcctcaagtcacctgccgcatgcatctaacattgctccttgtagcaccgtttttaatgtcttcttggcgngagacatcttatcttcggaactgacgaaaatatgtccttaaattcgaagcttggaaaatttaagaaactaagcaactgatggaaagcaagagctaagaaatcaagcaaagcaaagcatgtgtaccaaatgtgctcggggtgagttcttatatatacgcccagcgcgctccaatttggagggccccgtctgtcattgactgttgctattctagcaaagggaaggtgtttttttggaccttcagcttagggccttcgtccatatcgcaatctgaattcgttattctaacaaattaaccttgcgaggggctactggtgggggccttcgtcttccgaacgtcctctaaaacatgatntaacaatgtttctggagtataatacatgaacaggtaccttcggactcggatcagaaccacaatgtg

SEQ ID NO: 46173 - DNA, 372 bp, Zea mays
atatcacatggacgcgaaaagtgccttcctcaacggaccaatctatgtatatgtctatcgtgagcaacctctcggctctgaagacagagagcatcctaaccatgtatataggctctctaaggcgctttatgggctcaagcaagcccctagagcatggtatgaatgccttagagatttccttattgcaaatggcttcaaagttggaaaggccgatcctactttattcactaaaactctcgacaatgactcggttgtatgccaaatttatgccgacgataacatatttgggtatactaaccaaattacttgtgaagaatttagttcgatcatgatacagaaattttagatgtctatgatggcggagttgaagta

SEQ ID NO: 46174 - DNA, 472 bp, Zea mays
  unsure (1)..(472): unsure at all n locations
cattagtgacactatgatactcagctatacttagagtatatgttcaaacacatgggtttttcaaaatatgctaaatgtgcaaccccaataaaaaccctaattgagccctataaacaaattcaagagaaagggccaaagagtatgaagaatatagaatcatggcttgggccaattataaacattaaagtatactaaataaacaacaacaaagattatggaagcttggccaaaacaatttaaataaaaccctaaacaagcctctcaagtgagatttcattagggaattctgaatttcagaccttgagctcaagatcaagcgtgttaccttgatccctaactanatcctaatggccccattgacaaaaacgtgcataactaacctctctgtcttgtgccagaagatggcatctagacgcatgccttggacatgtcaaactagagatattctctctatgtgcggcagtgagacaaa

SEQ ID NO: 46175 - DNA, 436 bp, Zea mays
  unsure (1)..(436): unsure at all n locations
agcttcgtgaaaacattctccgaagcttttatatagttttatgtcggctctctaatgaagctacacttcttctcaatttatcttgtgccttagcacgattttctctttttcaaaacattctccgaagatcaatactgtatccccttcttgttccacatacaatatgttgtgtgatgcttatgttatgcaaaatgatgtgatgatgttatgttatgcaaaatgatatttgtgccgaagatacacacattcctgcaatagagcacacaatctntttatatcagcgctgacttttcgctgtaagcctcccttaggagcttcttcgccttntacttcagcggaatcagcgtttatttttcgctgtaagcctcccttangagcttctctcgcctttactttcagcggaatcagcgtttatatttcgctgtaagcctccctt

SEQ ID NO: 46176 - DNA, 462 bp, Zea mays
  unsure (1)..(462): unsure at all n locations
agcttnctgggctcagcttccaccaccaccgttatcacctacaccgacccgaagccagtagctagaagggcaccagcacgctcaacagtagcgcgatttctgggaggagtccgaagctcgcacagtcaatagtactgtgcctcaatccaagcacatctactaaagaatatcctacccttggagtatctttattttttctgtcattttatttttcttgtatgataaataaatcacgaaggactaaattctgatttcatgtaataattgtcagtatcattaagtaaaattcttcctcctaacaaacttccgaagctacaaaagtngttcctaagggagcgcagagtaaatatcgaagctacaaaagccattcctaagggagctcagagtaagttccgaagctcaaaagtcgttcctaagggaatgcagagccaaaataccaccaaaatagaaggtaaagaagct

SEQ ID NO: 46177 - DNA, 259 bp, Zea mays
tctaataggagaacacattctacgaataacatatgttcattctgatattgatatgacttgtatcgcatgccaagcacggaagcaagctggctctcattattcgcataagaacataatgacgaccgacaagccactggagctcctacacatggacctattcggcccgatcgcttacataagcattggcgggagtaagtaccgtctattcattgtggatgaatattcatgcttcacttgggtattctttttacatgaaaaa

SEQ ID NO: 46178 - DNA, 455 bp, Zea mays
  unsure (1)..(455): unsure at all n locations
agcttgctctctgtcacgctntcctctctcactgcgcccgcacaccgtcgccagagctcgtgctcgccaaccggactgtctgcacccatcccgaccacctcgaccgagccccgaccggcgacccgcagccgcgccgcacgcccgccatcgagtccctgctcgcatagtgcccgtcgccatcattgcccgcgcagcaccccggcgaccgtgctcacgtcgttcaccatccgtggagcccggccggagttcgccgtcgtgcctcgccggagacgtaccggaccccgtccaagcctcaccgatcccactgtgccttcgtctagtcgcgcgctcgagcccgttcgccgtcgtccgttcacccaaggttgaagacaacctcaacccgttaatttattgtctaaatcatgtgttgaattaatatatgaatttatngaatatcagtgtaatattatgatgat

SEQ ID NO: 46179 - DNA, 502 bp, Zea mays
  unsure (1)..(502): unsure at all n locations
tctanagagagaacacattttaagactaaccaatggtcattctgagagagacagggtttgtagcgcatgccaggcacggaagcaggttggagtccaccatccacacaagaacacaatgacgatggacaggtcgcttgagctactccacatggatctattcggcccgatcgcttacataagcatcgacgggagtaagtattgtctagttattgtggatgattattctcgcttcacttgggtattctttttgcaggaaaaatcttatacccaagataccttataaggaatcttgagatgggatcaaaatgagttcggattaacgataaaaaagataagaagcgacaatgggacggagttcaacaattctcanattgaaggatttcttgaggaagaagggatcaagcatgagttctcttctctctacacacctcaactaaatggtgtagtggagaggaaaaatagaactctactggacatggcaagaaccatgcttgatgagtat

SEQ ID NO: 46180 - DNA, 441 bp, Zea mays
  unsure (1)..(441): unsure at all n locations
catgcgcgcgcgtgcgaacttccgcaacagaaagctctgtctattcgtataaacgcacaattatccaagtgacagatgttattcatcagacaccgccaccggtatcggcgtcaaaaattgttattgccgagaccgccaaagccgaagccgccgcagccgaaactaccggggccaaaaccactgaagttgcaatcaccggagccgaagctaccggagccgaagccgccgaaactaccggagccgaagctaccggagccgaagccgggaccaccgaagattcaaacctagaaaccacacttgaagttattgacaatatacttctgaanatggctgaagaagaaagctgtgtggctgcggtgaacacggctactgaanagggaaaagaacaggttgaagacattttggaggaaggaaattttaactttcaagatntacttggac

SEQ ID NO: 46181 - DNA, 432 bp, Zea mays
  unsure (1)..(432): unsure at all n locations
nttcttcanacggggcccctagtctatcacgtatatcctcattccagactcgatcgcacgcatttctgcaacacttatntgttgaacatgtcgtctttttgtatgccaacattgtgcactatacgacataggtcacatagcaggtctaaacgtaatcctataaaacttgccttttagcttctgtagtaccctcttgtcatataggatgccagatgtttgacgctactccatccaccctgctttgattctatgactaacatcttgtcatgtacggacgcttgtacgccaggcaacgttacccctcgtgacgtgcgccgcgctcaagagcgcgcggagcgtcaggaacgcgtggagcgtgatctgggagatccagaggagcacatggaaagtactggctatgaacgaaagtangaattgattacctttgtacta

SEQ ID NO: 46182 - DNA, 343 bp, Zea mays
gcagcttgctctttacttaacttatgttctatttcttcttggagatggtccacactctcctgacctctcgcgtcggcacccttcgcattcccccaccttatcaagctcctttttagccagttgtggtggaagaagatcctgaggagctgtaccaccctgttggagggaatgtgattgtggaggactattctgaggagtttctggcgacacccacccctgtaccagcacttcatgcctttgttgctggagcttcttctttagcaccacatgtgccaatcgcccaagcccctgcccttgttggtgatgatcatgatgattcaggtgatgatgaaggcaatgatga

SEQ ID NO: 46183 - DNA, 433 bp, Zea mays
  unsure (1)..(433): unsure at all n locations
tctgaagggagagcacattctaggagtaacaaaagttcattctgatataacaggatttgtagtgcatgccaagcacggaagcaagtnggtgctcaccatccacacaagaacatcatgacgaccgacaggccactggagctcctacacatggatctattcggcccgatcgcttacataagcatcggcgggagtaagtactgtctatgtattgcggatgattattctcgcttcacttgtgtgttctttttgcacgagaaatctcatactcaagagaccttacagggattcttgagactggctctaaatgagtcctgtctaaggatcaatataattagatgtgacaactggacagagttcaagaactcacaaattgaacgcttccttgaggaggagggcatcaagcatgagttcatatctctctacactccacaac

SEQ ID NO: 46184 - DNA, 424 bp, Zea mays
ttcacaactatagcttttgttatattatgaagagcttatggtgctcaactctggccctaccgatggtgaaatgagtcgtatgaccgtagactacagcaagaagccgttatctgttgatgcaacctttagggagcagtttggtcagcgccttgccgccattggacagtatctggaacagaagtttggaagtgcccaagatgtggaaggttgcctggttggccccgatatatttatagttcagagcaggccacaaccacaataaacaaaaagttttgtgtgggttacctgctagctgaataaaaatggatactggctgaagaaatatatggacttcgtagcacgcgtagcagtgatcgagtctattgtaatatgctatctcaggtaaaataataatttattggcacaggtttagccattcactaac

SEQ ID NO: 46185 - DNA, 470 bp, Zea mays
  unsure (1)..(470): unsure at all n locations
tcacctgcacgatgcatgctttgngaactatgcccgtatccaatctgtctgttctttaactataagagcttgccagatgcccccgttcctgtcgaccacgaccagcacccaacataagacttccctagttatttagccaagaccagagccatgatagttctcatggtagcactgttttcccgggtggtcactccatgttccaattaatatgcaataatcttgtttaaccatcgggttaacaacaataatgtaaacttaccatctggaacattaatatcataagccggagtgactgcataaaggtaaagttgtagcaatagcatagctactaaggtaaagtattattctcatgtttgatcaaagaataaggttggaaaggttatctaaatangtaacccatcaaattatgcatatattcatcgaagaatacacgttattaaatgtattggttgcgggcaaacagagtatgc

SEQ ID NO: 46186 - DNA, 292 bp, Zea mays
tacacatactcagccttaatgtgccgcataaacaccatagacggagagaatgatagtgcattcattcctattgtgagttctggtgatttggataacaacacatttaacggtctcactacgttgctaagtgttgaacacgaaacttaccatgatgaacatacttgaatagtctataatgattagtgaacgaacgttcaacacgacgcttaataacccatgagacaatgctcatggacattttctcatttcatagtcgttttaatattggacaagacccgacaatcactacttc

SEQ ID NO: 46187 - DNA, 459 bp, Zea mays
  unsure (1)..(459): unsure at all n locations
agctntaccaaatggacgtgaagagtgcctttctctatggaccaatcaaggaagaggtctatgttgagcaacctcccggctttgaagatagtgagtatcctaaccatgtttataaactctctaaggcgctttatgggctcaagcaagccccaagagcatggtatgaatgcctaagagatttccttatcgctaatggcttcaaagtcggaaaggccgatcccacactctntaccaaaacacttgaaaatgatttgtttgtatgccaaattcatgttgatgatattatatttgggtctactaacgaatctacatgtgaagagtttagtatgatcatgacacaaaaattcgagatgtcgatgatggcggagttgaagtacttcttatgatttcaagtgaagcaactccaagagggcaccttcattagccaaacaaagtatactcaagaatatctanacaagt

SEQ ID NO: 46188 - DNA, 477 bp, Zea mays
  unsure (1)..(477): unsure at all n locations
agcttactcctccctaggaagggccgntcatcatcttcaagattttgaagcccgggacatacaagctggccaacgatcaacgaggtctacaacaacgctttgaacattgaacaactacgtcgcttttacccttaaaatgtttcaagtcgttcatgtatctcgctttctttacatacataaataaagtctaaccatcaaggaaggatcagccttgcctcggcaaagcccgaccctccctcgggggctagaaggggggaaccccctctgcgtcaaaattttctttggaaaagtcttttaccagaatgtctttcgtgcttttcgactgcgtctataacagaattctaaagacgagcgagagagaccttgaacggcaaggccgactgagctgagggactcctacgcctccgggatacggatacctcactcatcaccttccgtgaaaggtagctcacgctcggacaagcaattctgctgccg

SEQ ID NO: 46189 - DNA, 456 bp, Zea mays
  unsure (1)..(456): unsure at all n locations
ntacctagctgantntgcacaagaagaggccggtctagatgcatgcttaatggctaatacttgcatgggctggctgcggcatcgccgcttagcacatgtggggatgaagaacctccacaagcttctaaagggagaacatgtgataggtctaaccaatgttcatttcgaaaaatatagaccttgtgcagcttgtcaagcagggaaacaagtgggaggctctcatcacaccaaatatgtgatgacaacatcaagacccctgtagctgctacatatggacctcttcggacccgccgcctatctgagcataggacgaagtaagtatggtctagctattgctgacgactcttctcgcttcactcgggtgctctttttgcacgataagtctgaaacctcaaggaccctcaagcgcttcctaaggagagctcaaaatgagtttgagctcaccgtgaagaagat

SEQ ID NO: 46190 - DNA, 416 bp, Zea mays
tatccctcaggaccttcggcgtgacgaagcatacatccaacaccatctaaacagcatacaataccttctccaattgcgtataattattctttgatagactaagaacttctgatacgaagtatatcggggcttgctttttgacttggacttcaagcttcttctggacgagtgctgcacttaccgctgattgcgaagctgtcacatataataacagacgaccccctggcgctggtggagttagcgtcgttaggtctatcaaatattgcttcagctctatgaaggccttctgctgaactggtccccattgaaaaacttcagcttatttcagtacttcgataaatggtaagtttctctctgctgatctatatataaatctgatgagagatgcctgtcttcctgtcaacttttgagcaccc

SEQ ID NO: 46191 - DNA, 134 bp, Zea mays
taatcacacaccggctaaaaacacctcaacaagcacatgataatctttttaaaggtcctacttgctaaccaccacgttgattgcaccggggcgtctctctagatccaataaagacaccttcactttctttgcaa

SEQ ID NO: 46192 - DNA, 464 bp, Zea mays
  unsure (1)..(464): unsure at all n locations
agcttccaacatctcatctgtactagctactatctcatctttaccatgcaaaagagccaacaagaggactatccaaatggtagtaagcttgaccacgagacaaaaggttttagagaagtagatgccaggacgttgagtgaatacgcgttgagtgaatacgcgaagaacccatcacactttatagcgctcaagagaactattagtgcaaaacttgtgtttcaacacacacttccatgtcactacattggaatgcggnggctaaggaatgagatcccaagtgttgttcccaacgcgggcatcatacttctgttccatatcagcacgctaatgtggatcagngagagcagcacagtagttgcgtggaactggagaaagtgtcgatgcttcgaagagtgctgggaaccgaagaccgtgcttgccgcaggtttcatgctgtgttgactgaccgcagaggcatgacaact

SEQ ID NO: 46193 - DNA, 336 bp, Zea mays
gcatgtcaagcagggaagcaagttggtgttcatcatccacataagaacatcatgacgaccgacaggccacttgagctactccatatggacctattcggcctgatagcttacataagcatcgacgggagtaagtactgtctagttattgtggatgattattctcacttcacttgggtgttctttttgcaggataaatctcatacccaagagaccttaaagggattcttgagacggactcaaaattgagttggtttatcgatcataaagatcacaagcgacaatggaacggagttcaagaactcacatatacaacgcttttttgaagaggagggcatc

SEQ ID NO: 46194 - DNA, 463 bp, Zea mays
  unsure (1)..(463): unsure at all n locations
gcatgcaagcttgacattgtctccctattggaagtctatgccatccttaatcccagggcgtctcccactataaagcatactatgagcaaatttaaatttttcattccctaattcatgctcggcaattttagcatctaattttgctatatgatcattttggtgtttaatcatagcaatgtgatcatgaatagcatcaatattaacatctctacatctattgcaaatagtaacatgctcaacggtagatgtagaaggtttgcaagtttttaattcaacaatcttagcatgtaaaatagtgttctcatctctaagattggaaatagcatcattgcaaacatttaaatctttagctgtagcaattaatttttcattctcaatcttaaggctagaaagagatgcattcaatttgtcaatctntagcattaaactagcattatcatttctaaattaataattgaatcat

SEQ ID NO: 46195 - DNA, 470 bp, Zea mays
  unsure (1)..(470): unsure at all n locations
agcttgtggaggaccggatcatcgaagcttataagtttttggatgagaagtggtcacccaagttccgttgatgaagcaccagaagaccaatcaaggaaggaatccatgtgggagttcgcaagagaaaggtctgtgtgttggcatcgatgcttcttcaataagctagctgtcaagcgaaagccagaagcctgaagatgatctttgagtagccagaatcagcgtttgcaatcagcaaccagatgctcctcaaaggccagattttgttgaagttccgtctcctcgaagagtctgcaaagtgaagatatgtagctaaagtaaagctatacccataacccttctaagccgaatctcgaggacgagattccttttaagtggngtagatntgtagctgtaacacccggggtttangggtccaaaacccatgcgctaacatatacaccaggtgtgctgtgaccaagtctcacacatat

SEQ ID NO: 46196 - DNA, 456 bp, Zea mays
  unsure (1)..(456): unsure at all n locations
tgaggaatccgcaacacaggactnttgggcagcctgaaatcttntgcttatggcatcagaaacttctggaaaaatctgtaaatgtctctcttattggccgtcgcctagcacgcttggtcctcgtggcttcatcaatttctaaagctatggtcactagaccgtgcatatgacggtgcatcacactattntacgctgcaaactatacggtttgcagagtggagtttgaaaatggaggcgagatgagtaaagtatctggagatagcctaatcggactaaatattgagatggctacagaattgataactttgccctttgtaaaggtttgcgatacacggccaatttgtaaagctctttttatgcgatacaactaatgtcaacttctcgctgtggcactttgataaagctagatacaaggattattggtactgccctgttgtgctggtggtcaacttgtgt

SEQ ID NO: 46197 - DNA, 294 bp, Zea mays
ccgagggactcctacgcctccgggataccgatacctcactcgtcaccttgacacggggcgactcacgcttaatgaagcggttcacacaaccaacaggcgagttttagtgctcgaaaataaggaaaaaacacagctctgcgccaaaattacatacatgttcaggcctcgacagccacgatgaacaaaaacactggcattcaaagtgccattacaaacggaactccggttcctcctccgcaggtacgaacaaccccactccatgggggagggcctgctgagcaacagaagaccgac

SEQ ID NO: 46198 - DNA, 271 bp, Zea mays
  unsure (1)..(271): unsure at all n locations
ntagcccaaataattcaagagaacccctcaaatcaacgctatattgtattgactcattgtgaatactgaagctcagaattctgaaatccacaccttcgaccaaagatcagggatgatcacctcgatccctaactcgaagcccaatggccccattgacaaaactgtgcttaactaacccctctgncgcgtgccagaagatggcattgggacgcgagccctaaacacgacaaaacctagggattcgcctcggcgttgggcagggagacagacc

SEQ ID NO: 46199 - DNA, 346 bp, Zea mays
ggatcttaagcacctgagcatgcactggtgggatgatgattttttttctaccaatgggcaacttctccacaactcaatatcttaaaataccccacatggtgataaggtgattacaacctctgttgccgcagttgggatgacagtgtaaaacacactttgtccattaaccacagtttcaaatgactaaactacatacctataaacatatttggcccctgccacccaattatgaaacaatacacatggaactttagttgtatgggataaggcatttgaaacacatacacaaaacttcctccctttgttagcaccaaaaatcataaattccaggccagacagaagaata

SEQ ID NO: 46200 - DNA, 180 bp, Zea mays
accaatcaagaccgacgagaacaatgtgacagagaagcgccgctcagtgagcaccgctatgccacatcgcccatggaatgggaggagtggagctcgtgccggatcacaacactagtgagccaggagatgagaacttggtccctaagggcgacgaggaggttcatagttggctggactcca

SEQ ID NO: 46201 - DNA, 445 bp, Zea mays
  unsure (1)..(445): unsure at all n locations
agcttcaggagcatgagtagcgaccttttcgttctaaacttgctctatggccttttcttttatcaccctttctacaatttctgaaggttttttctcggcgagttctgaaggcccagcttcggcactagcttggattactgtagcttcaatttcggccggctttgtttcagcttcggtttgcatttttgaagcctcgacaattttccctgaaggagtagagcttanagcctttactgtttctagcacatctagcacatttgccatccttcttcttttgggagttggcgcanaacttttttgtgccttcggcactgttacttctgccgaagggcttaaaatttctaacatttttgttccttcaacttttggctcttcggccttatctttatcggtctttgactcagctagctcggatgaaggtaccttcggcatcatagccggatct

SEQ ID NO: 46202 - DNA, 460 bp, Zea mays
  unsure (1)..(460): unsure at all n locations
tcaacaacttaagcctgtggagaaagatatattttcctcgtagcacacttatataactattacatgaaatctaaacaatgtcctttattacacagaatataaaactgaatgaanaagactgctatcaaggtaggatatctgtcaatagatgtgctctgattctggcacggtgctgttgactgtgcgagcttccgactggtctctgaaatccctttggtgtggagcatattggcttcctttttgctgctggcccttgtgcancggcggtggaggcngacgctgttgccatgaagcttgaagtgactctccgaaccacaaaaactgtcggtggttgctacatactacggatgtaagcgaagatatcaacactggcataactgttttgctgacctgtgtgctgcagttcgtatttctttgctctggaggaacatgcaattctggggatggctttgtttacaca

SEQ ID NO: 46203 - DNA, 390 bp, Zea mays
  unsure (1)..(390): unsure at all n locations
agcttgagtcgaggcattgtctcaccggagatattttatcttctctcccggacttngggcgcccgccaccgcgcatagaccgagctgtctggtaagccattcttcaattcctcgcgcctacgccttcccagatccctagttaagatcactgacttgtttaattgaactctaccgccctggataggacggagccctcgccgccgacgagctctcccacctgcgctcgtggaccatcctactccgaccatccccggcgacgatccgcacattggcgtgaccgtcacgacctcccctacaccctcaaccacctcaccgaagcaatcttgccgccggtaagcccctccgccctttcctccaccgcgggtactgtttaattgtgagaacgacctc

SEQ ID NO: 46204 - DNA, 420 bp, Zea mays
  unsure (1)..(420): unsure at all n locations
agctntacagcctcccagggaagctacctaggggctttgatcaagcggaggagggcggngaatggtttggccacagcggttgtcctcgggcagctctggcgggtcgcggagaggtcgtcggagctagggacgagctccatggtgttgggcacgggacaaggcatgcaacggggaagaggttgggcactggggcgggctttatagccgtggcgcgggcgtggtcacaggcggccgcggacgcgcgggggttcgcgcacgggcgtgctctgagcgcgcccccgagtgtcagcctgcgtcgaacacgtgtgtgtttgcttctgccatggntcaacggccgattggagcaccttagcgtgaagatcttggcanaaccactatgtacggtctcttccctgcaccgtatcctaccttttttatgtg

SEQ ID NO: 46205 - DNA, 425 bp, Zea mays
  unsure (1)..(425): unsure at all n locations
tcaatggatcaatcaacgaagaggtatatgttgagcaatctcccgactntgaagatagtaagtactctaactatgtttacaaactctctaaggcgctttatgggctcaagcaagccccaagagcatggtatgaatgcctaagagatttccttatcactaatggcttcaaagtcggaaaagccgatcctactttatttactaaaactcttgacaattgatttgttgtatgccaaatttattgtgatgatattatatttggatctactaacgaatctacatgtgagaaaattattacgatcatgatacagagattccagatgtctatgatggcggaagtgaagtacttcttggattttaagtgaagcaacttcaagagggcactcttattagccaaacgaagtacattctagacattctaaacaagt

SEQ ID NO: 46206 - DNA, 431 bp, Zea mays
  unsure (1)..(431): unsure at all n locations
agtctgtgaagattcttcatccgaacatgggctatntttgttgttccagagccaacccatgttagtcttagcaattaagcaagtgtcgagtacagctttatcaaaatctaccaagtatagctgaccctataacactcccttaaatgctattgaatcatcacttcttctaaagacagtgacaccaacatcagtgaatagacagttgtagcccatttgacataattgggatacagaaagcaagttgtaatctaaagaatcaacaagaaaaacattggaaatggaatggtcacgagatatatcaattttacccaaacctttgaccaaaccttgatttccatcctcgaatgtgatcgctctatggggatcttcggttttctcatatgaggagaacatccttttctcccctgtcatgtggtttgtgcacccgctgt

SEQ ID NO: 46207 - DNA, 451 bp, Zea mays
  unsure (1)..(451): unsure at all n locations
cccatggttcatgataatgagggatactatttatatcctgctggctatccccagcacaagattaggagaattcattctacgaagtctcactctggctcttatcatgcttttatgtataagagtgaggcatctagttctaggcaatccactcatgttaaattgcctaaaaagaaatctcctattgcatcaaacgaaaccaatgtcttattcaaaacctttgatgcttcttatgtgctcactaacatatcaggcaaagaagttgccaaatatgttgtgggcaaacacaagggttcacagacttgttgttgggtacccaaagcgctttcttctaatgtcaaaggacctgagactcgttgggtatctaataacaacgcctacatttgttttcgacgattatgcatcctgcgtctcaagtnggataattgatagtgggtgcacacaccacatgact

SEQ ID NO: 46208 - DNA, 473 bp, Zea mays
agcttgagaaaaccatagtacaataacttatttttattaacggccacaaatttgtattaagtcatgtgtaaacacctaaaagccagcacaaataagtattagagaattacccactgctaaataatagttgtagttcaaagcaccccttctgccctaaaatatgataattctgtccagagaaaactattcactttctgatccccaagtttgagatagagaaatatacaccagtaccaagccactgtaatttttacagaattttgggaattctatttaaagcaacttgtagttcaaacccactccaaaacattaaagagaataaaagagaaggaaagaagaaatacacctcaccccaataagtctaacttgagtacttatcaattcttactaaggcttaaaaagaattcagtggaacctcagaaataaacctaccacttaccttatataaagttcgacccaacttaccaagtata

SEQ ID NO: 46209 - DNA, 450 bp, Zea mays
agcttaataacgcaacctatagtgagctttatttatctagtttaacaatattgcctatggtgggcttaaaacctctatagccatcactaaaacattcatataatggtgttaactataaggctgactcttaaattactattttgtcttttcggcttttatctttatattttggagctcgtgtaacagctgactcttgtataagagcccacttctcctaattatttatctctctcttccacgtaagaaaaaatgtcgtgtaagcaggcctgtagctataataactctctcacgataaaaactgcacatttaatacttcgtcaaactctctcttttatagagtctatctactaatgagtaatctgaatttctctctctttatttctctatctttcacaacattataatttggtatatcatccctcgcacgccactacatcatctaatatattt

SEQ ID NO: 46210 - DNA, 450 bp, Zea mays
tagacatgtatgagggatcgtcatacttatatcaacgcacacaacgacatatatgcaatatgaacaagtacaacattaagaatggcattcacacaacagttgtgagtctgtatggcttgctgtcagatggtgaaccccatcttcaataatatgtccatcacaatgatctacatctccatgatataggcatgccatccttcaggtgatgagttcttcaagacctatctaatgtatgctggtaaagaaattacatatacgctcttgatcatcacatgttgacacgcccgttattacaataaattaggaccaaacatgtgggtccagcccgattgccttggcacgacacgcacgcatgaataattcataatatgcatatatacacataatagcataccgatacaagatgtcttgcaaaacaggtatacaatacgctttatatgtttgcactac

SEQ ID NO: 46211 - DNA, 456 bp, Zea mays
agcttgcggtcgtagcgaaggtgagtcatcatatttcgctcaacgtggcatttactggggtagtaactaaccatcttgcatgacactttgcgacgtggtaacatggtcagtaacgtggcggatccggggtaacggcgaccatcacagcgacgaccgcacggccacgtcgcggggcaagtgggtccgacgaagctggctctatgcactctccttcggatctcccccccccccccacgactatccactcgccacagagcacgaatcgtagcaccggcgcagatcacagcgcggagatcaccggcggtgagattcactgaatctggtgatcttgttcagtccactgttcgtcactgaacgccactccgagctgcctgacagaccaagtttgggagcaatctactccaaatattgtatagcaccacgccaatctcaatataacagagtttgtcactaata

SEQ ID NO: 46212 - DNA, 507 bp, Zea mays
  unsure (1)..(507): unsure at all n locations
tataagaacttattaaatgtaagatgactctcggtacacaacatatttatctctagctctcaataacacacattagaacaatcagatacagcgcacatagttaggagcatttgtaagatacaatattgtttgaacaaacattatgcagctagcatgctgagaagtgggacaacttgattgcaacagctgtaaccaagctcaagatacacactcagtttttcatgagatntcatacccgtcaagactgaaatccattcaaataaatgtagagaatgcgcgcataaaaacctctaagaatattcaagttctgcacttcaaaaagataatgaagaatcgccacagtctattgatgcctccttcattgctaaactgcaaatgctcgaacgaccatgagtgatcaacagatactatgccactcgtttcaagactgtttactaatcgcgaatagtcgggcaggacacgatcaggtccagcgatctgaacacgagagctagctcgtctgatgct

SEQ ID NO: 46213 - DNA, 464 bp, Zea mays
  unsure (1)..(464): unsure at all n locations
tagcttcagaaaacgaagccttcatgttccactttttatttggagacaaactgtcaaaagctgaaatagaagaacttaaagagtatgccaaatcctgcggatacaaacctggagcactcctcttcggaggcattgatgatgaaaaattagattgtattcgagatcaaactggagccaaagttatcggtactctgtcaaagaatatcggttttccaaagctagaaacagacatcagccgctaccgacgacaacatatcgttggtagtttattntattccaatttcaaggtgaactacttttccctctacttttattgtttctaataatgaaaacatgtctgacgaacgttgttttcgtgcacagtatgctgttgagcaaagccttgaaaatgcagcaagatttctaagataataagcacgaagttataattggaaattggaaagcaaataatgagcactacatgc

SEQ ID NO: 46214 - DNA, 462 bp, Zea mays
  unsure (1)..(462): unsure at all n locations
agctgccttctagatgggttgttctttttctttgtctttcttaagcnncagtatgtgcattgacacaaatttagtttgacattgatagctgctactggatgaaaatatgtcattgcttttttcatacagacttaacactatttttttccttataggttaattcaaatccggtacaatgcatgactttccacgtctagttaaccatttgaatcaaatcaacaaaatgagtagagaatacctcaccagaattacagttctttctcagacatggcatgataatgattaattaaagcttggatctttntctacaataggcccaaactcacctccagagcaaggtcgaaatgagaaccagctgagcactcccccgtgaggccggtgcgcctggcattgctctagcgaagcaagatggtatagggatggaactggcaaagcacaaccactcgtgatggcaaatctctg

SEQ ID NO: 46215 - DNA, 229 bp, Zea mays
agaacatgtgatacgtctaaccaatgttcattttccataaatatataccttgtgccgcttgtcaagcacggaaacaggtgggaggagctcatcacatcaagaatgtgatgaccacttcaagacctctggagctgttgcatattgacctcttctgacccgtcgcctatctgagcatatggggaagaaagtatggtctagttattgttgatgactatttccgctttacttg

SEQ ID NO: 46216 - DNA, 373 bp, Zea mays
  unsure (1)..(373): unsure at all n locations
agctngatggtgatgagaatatatatttatgtgggttttccaattattcttactaatcctaataattcctttatcttttcttttatctttattccttaaaaatttagaacagctcccctaagcagacgccccgcatgcgtgttggaccgcgaggcgtgcccaagcatcagttggcctcccatacagtggagaccggcagtaacagtcgtacacctctcgtgcagacagacagtggctgttgtacaccccagtcgtaggtggagcagctgcagtagaatctaaatgcgtccttcaatgagcggtgcctcgacgcagctcatattctggagctactggcggaaaagaagcagcttcagaaggagttagctgagca

SEQ ID NO: 46217 - DNA, 302 bp, Zea mays
cgagcttggcctatctgttatgtcgaaggatgatcttacagatagcctcgcttataatagcttgaaggtatatcttattgtaaaattaactatatttgtagcttttcttgctatcattatgttctcatatatttttattattagggcttaattctaagtaaggctttaaaggcccaaaaggaagcacaagacgagagctgtcggatagctcttgggaatcttcggacatacgtcatttcactaacgaatgaagctctcgagaaggataaaatattcgtttccttagtggataggctgaaaac

SEQ ID NO: 46218 - DNA, 469 bp, Zea mays
agctctttcttatcgtcatcaaccttgacatataaccactccgatttccagcctgctgcccatttgcttcggtagctgatcacaggaaactttgtagttttccgataagcaaaattatagcaaccaaaattgtcatgtaatccattctttctagccttcgtctgatagtgcagctcgtgaactcggcaaaagctgtccgcaaacggctccaccgcttggcttcggagtgcccagatataaacactaagcctaacgatagcgttaggggtcagctggtgaaaatagataccgaacctcttcagtacctctgcaataatcccatgtagggggaatcttaacccagcctttatggaagctcttgaaataacaatttcatccttctccggctttgggtagtctcttcttccccgaagcgtaatagcttcttctgattttcagtaaaaaagcctgactctaccatcttggacag

SEQ ID NO: 46219 - DNA, 347 bp, Zea mays
tatcataagagaatagcggcaagagcccgtccatatgtaataatagaatgggagttatacaagcatggagtttgttctccattactcaaatgtttatctagaactgaacgtatagagttgataaaagagatacatgcacgcctgtgtggatctcacatcggatctatgactttgttgggtaaagtttttcgtcaaagattctattgtccgaaggcagcttctgatgcagcagaattagttcaaaaatgctaaagttgtcaacaatgtgcaagagaacaaaaacaaccttcgtctctaacttcattaatacaactcacttggccattgcacagatggggccttgattt

SEQ ID NO: 46220 - DNA, 472 bp, Zea mays
  unsure (1)..(472): unsure at all n locations
agctntggctntggtggaaggaggcacatgacttctctcagccctgctagggtaattgctttcttctgtaatgttagccccagtgtgtttttcaatcattccagaaatagctaactttggggaccattcaagaacatcatcaattatgttagaaaccttcttttggtacctaacaagagagaaaaaacaataaaaaagttaataaagtgattcaaaacatcgaatcaaacttcattgctggtaacaatttacggaggtcaaacatcattaaccatgttaagaatactcacacggcatgagttaccatctaanatcatgtgacaggtccataaattagattgtagtaagagaaacaccatcttatcgatagctatatgatttgctgaanattggacaagacctatagcaatttttgaagtanaggcgtagtagtttaaattttggtagtataaactagtgaatgtcacatatt

SEQ ID NO: 46221 - DNA, 474 bp, Zea mays
  unsure (1)..(474): unsure at all n locations
tctcttgcactactctntgctaattccatttagtgttgctttaagttatactctcatttagtgaagcaacacattgcaagagagaacttgtgttattgctcttctcgcctaaaaccttcttgctttattctcatagacttattagtagtagtgatttatcaattccgcattatttaaaagcaatactctntacaagcaagaacttagtttttatactccgattattatatatcttgttctaaccactaatcaagggatctagttgggggataaagtcttaattttcaggttcggctatacaccccctcctctaggcgactatcaattggattaaagctaggcacttcatattgagtttaacaacttgaagtgatggctcaaagaagatctcaaaagaacaagaacacaactttaaaggagggaactcttgagatattatttcccgaatggctaactatgagtcatgggcatcta

SEQ ID NO: 46222 - DNA, 444 bp, Zea mays
agctttgcaatatacatgaattattatacgattcgtatccctggggtaaagagcaatatcataacaactttggttgctacagcttcggtgctcgctctggatcaagttgtctcgtgccaacctttcggaagagatggcccggagaatggatgaaagaatggttctatgtaaaaaatgatttgaaggtccgagaaaatattaaggatgttatcatgtgccccatctggcagcgcttcggactccggaaaccaaaggtagaaatggatgaagtagccgaagaatgccaacgggccttcggcgtagtctgctcttttattgggacaagggacttaatacaagaacacattgccttcagaatgtggcctcttgcagataattgggaaatgccgaaagaaactggtaaagaaactgacgaaggtgggctagtcaggctaaagtatatat

SEQ ID NO: 46223 - DNA, 479 bp, Zea mays
tatcaatcggaggagagagagggattgaggtgcgccgccgtgtgggatccttactggtgttctctttcggggctggcgatcggtcaagggctcctatcaagcatctgtgccatattgtggggtttggcggtgaggacggacgatatcggcgaccgtaatccttcaccgacgtcgtgacttcaccgcgcgccgtaacccgagctaggcactgccagaacctgtgtaagaaatcgctcttcgagttcgccatccacttaatttcaatacgcacccgagatacataggaaccgcgtaccgattagtggtggatgcatctcagccatggggggccaccgtatcgctaggcacgatcgccggagttggcagcatggtaaaagaacgctctctcatctgtgatgcgaggatggacgcgtgagaataggcctcgcgtaccctttacaccgtttgatctggtcgttgattggatcgaccgaataata

SEQ ID NO: 46224 - DNA, 415 bp, Zea mays
  unsure (1)..(415): unsure at all n locations
ctttagggaacactttagacttctttgtttatttgagaaagacagggtttgtagtgcatgtcaagcacgaaagcaagttggtgcccatcattcacacaagaacattatgacgaccgacaggccgctcgagctactccacatggatctattcggcccgattgcttacataagcatcggcgggagtaagtattgtcttgtaatagtggatgattattctcgcttcacttgggtattctttctacaggaaaaatctcaaacccaagagacctttaagggattcttgagacgagctcaaaatgagttccgcttaaggatcaagaagattagaagcgacaacgggacggagttcaagaactctcatatcgaaggcttccttgaggagganggcatcgagcatgagttctcttctccctac

SEQ ID NO: 46225 - DNA, 448 bp, Zea mays
  unsure (1)..(448): unsure at all n locations
agcttcanaaggtgccatcttgatactttcttgttatctattattatatgaaaactccgccaagggcaaacattcatcccatttttgtgagaagtccagaacacatgctcgtaacatatcttcgagtacttgattaaccctctcagtctgtccactggtttgaggatgataggccgaactgtggagcagcttggtacccagggatttatggagttgttcccagaatttggatacaaattgtggtccacaatccgacactatagtcttcggaacaccgtgcaaactgagaatgcgggcaatgtataactccgcataggtaatgacgggatattntactttgacagggaggaagtgggcgatcttggtaagtcgatcaatgataacccaaatagagtcatacccttttgcagtcctgggcaatcccacgataaagtccatacttatgtct

SEQ ID NO: 46226 - DNA, 237 bp, Zea mays
tctagttctagcctgccaagctcaacctgaccgagcggagaggggcttaatccttctattcctatcttagcgacgacgacggacgacccatccaaagaactacgtggagagaattatgaggtcgacaagctataaggctataataactagctaagtaagtacgatcggagtccgagaaaacaagccaacgagtccgccgtggggatgtgcaatcgggtgtgtgggcccaccttggga

SEQ ID NO: 46227 - DNA, 430 bp, Zea mays
agcttgacacaaggagaatgctcttatcatttatattttaccgcaaatcctcaagcaaaggagagggaaggagtataaaccccgctcgaagagggtttactattggtgtgtcacacccagatttaaagggcatacccaagtgcgtctcatatgtgtgccaaataagatcaacacatataatgactcagagtatacggacgaatgtcacaaactctattacataacgaaaatgtattacaatataactaataataaattaaacgaactaatattattattccatggtgccatcaagctgattgggagacaacaccaagacctcgtcgaacttcccgtagtaatcctggcacctgctctctaccttggggggtttcacagagtgagctcacaaaagatcatcgctcaacaagtgtggggaataatgtgcatg

SEQ ID NO: 46228 - DNA, 271 bp, Zea mays
  unsure (1)..(271): unsure at all n locations
tataaatactcaagcttcgctgctgactgtgcagatatccacctgctatatagtgatcaataatatatcatttgtgagatggcgnggcgccctatcatgctttctttgcatccttcaattcttcctatgagatggctaacaaaatgaaatggtagattcatgtgacttcacaaccttttgatgtttacgttagaacactgtgatggtcacattgtaaaaatggttgcaaaaatgctcaatacatgctgaagaaatgggtgcacatatgaat

SEQ ID NO: 46229 - DNA, 270 bp, Zea mays
ctagcgaaaaagatagaccttgtgctgtagcccccgagtgaactcgtgggaagctctaatcacatcactttggtgaccgacccataacagacctctggagcgacttcacacggacctctgtacccaccgagactaccttagcattgggggaggtaagtatgggattgataacgtcgaagaacactccacttgtggtagcgaattacgtgggcaagacataacagacaccgataggacccttaaacgctttgtaatgacagctcaaaatga

SEQ ID NO: 46230 - DNA, 470 bp, Zea mays
  unsure (1)..(470): unsure at all n locations
agcttacccttgaagcctggaacaagctacattagaaaccagtccagccgctcagtcaaaaggaccgaccgtgagaatcaaagcactgcccctgagtcanaagtaacaggaaaagaggacagaaggagttattaccatacagagaggcaaagattcttggaaccagagaccacaaacatcagggtcatcgaccccaccactcacccgtgccccccgcatgcgtgcccgccttcatgcgcactagcaccgccgcccatgcccctttgcagcgcactaccgccgcccactcccctttgcagtgcacccaccgccgccatcatcgccggcaccaggccccccccttcctcttcgttgcacctgttgccacgtagcaactactccatcaccactactccgcaaccgaacaccaacgctcgcctatataccccncacaccagtcccctcaaactccaacttgctcaaagcacact

SEQ ID NO: 46231 - DNA, 506 bp, Zea mays
  unsure (1)..(506): unsure at all n locations
tctcaagtgtgagaataaagtagcatcaggatcatatggcgacctgtgtgtgttttgtgctagttatcatgggagaaaatccttttgaggttttcttcatagttcacttaacaatatgtttttgtttccagttaccggggtacatattgcagtcaagatgttgctattaaagtgctgaaacctgagagaataaatgcagacatgcaacgtgaatttgctcagcaagtatatattatgaggtggttactacactcaactctgtttcaccttgtattacaagatgggttcttattgtgatattggtagtctggcatgctaaataaatatacttttgaagtctttgaggttgcacttggcttcttgttattntacctcatttcacttagtcttatttcttctgcaatgattatcctacagtcacttcaaatcatcatttatgtcgagatctctttgctgcatttacttcccaacatagtatggtaccaatcctttatcttattatctgc

SEQ ID NO: 46232 - DNA, 439 bp, Zea mays
agcttctaaagggagaacgcggatagtgttttttctaatgttactttcgaaaaagatagaccttgtgcagcttgtcaagcagggaaacaggtgggaagctctcatcatgccaaaaatgtgatgacaacatcaagacccctggagttacttcatatggacctcttcggacccgtcgcctatctaagcatatgaggaaagaagtatggtcttgttatagttgatgatttttcccgcttcacttgcgtattctttttgcaggataaatctgaaacccaaaagaccctcaagcgcttcctaaggagagctcataacgagtttgagctcaaggtgaagaagataagaagcgacaatgggttcgagttcaagaaccttcaagtggaggagtatcttgaggaggaatgaatcaagcacaagttctcctctccctacacaccacagc

SEQ ID NO: 46233 - DNA, 492 bp, Zea mays
  unsure (1)..(492): unsure at all n locations
tctcctctcttccnncccctatacggacccaatgatgcttctatctattaggacctaagatactcagcttgcacttttattaatcattctgtcaatccgagagagaaacttattgtcattatatgagtcacttacccatgataagcaaatgctatttttcattacgagtacagaactgctacacgtttgacactttatctattaatttctcaactgcttgataattgatcatgttatcaatttgatcattgcggcgtttttccaatgatacaatgaagaaccatacaaatatttaatctagctagcaaaaagttattgccttcttagtgcatctctagccattctatttttgcctacaccataccacgcaattctcactaaggttgaccaatgacctaggttcatcaagcatttagttcattatatactatctttcaggctaatataagtaacctatcaaactgcatgacctataaaattctgaggaataat

SEQ ID NO: 46234 - DNA, 352 bp, Zea mays
cctgcagctgcagcttactcaacagatactctgggttatttttttgtgttagaaaacacctacggtgctcaaaacaataaaaagtcgaagaaaagttttaccttgaaattagaatagaataaactaccgacaagatgttgtcgtcggtagaggcttatgtcactttcaagcttcgggaaaccaatactctttgacagagtaccgataaccttcgctccgatttgatctcggacgcagcccaatttttcatcgtcaacaccgccgaagagtagtgcccctggttgatacccgcaagatatggcgtattctcctaactcttctttctcagcctccgacaattcttgctcaatta

SEQ ID NO: 46235 - DNA, 324 bp, Zea mays
aaatagcttggggcggtcataagaggactctttctgagggtattattctctctattcacgaaaggatgaaaggcgatgtatacacacactggttatataagcatgtccaaaaggtccctatccccttgctcaattcatcacataattgactccactgcaggacgcgaaactctattcttccttgatgcctactttggctattaccacatcagatgaaagagctgtacaccttggttttgaaggcaaaccacatgtgaaccatgtaccggccatgaacaaaaatcacatacacagcgatttaataattggacatcattacacatt

SEQ ID NO: 46236 - DNA, 465 bp, Zea mays
agcttatcagcagtataagcatataagaaagattgctgcttcagcagatcaaccgaagcctatgcttttgtgtgaagacataggagagcaaaaagtattgttgggatcctacctgtctgatgaacaggaaataactttgttaagattcttgtttaacaacaaagatgtttttgcttggacagccaatgatctctttggtgtcaatagagacgttattgagcactcgctaaatgtggacctgtccttcagaccaagaaagcagaggcttcggaaaatgtacaatgataaagttgaaggtgcacgaaatgaagtgaagagacttctaagtgtcggcgtcatcagagaagtaacatatccagagtgactggccaacactgtcatggtgaaaaaagctaatgggaaatggagaatgtgcatcgatttcacagatcttaacaaggcatgttcgaaggatgaattcccact

SEQ ID NO: 46237 - DNA, 476 bp, Zea mays
  unsure (1)..(476): unsure at all n locations
ngacaacaccatntgacatcttagatcaaagttctgagatcaagtatatttaattcattcctcaacatgcaaaagcgggttttatcaagtggcttagtgaaaatatccgctaattgatcttccgacctcactccttctaaaatgatatctcctttcgcaacatgatctctaagaaagggatgaccgatatcaatgtgcttggtgcgagattgttgaacagggttattagcaattntaacagcactctcattgtcacacaacaaaggtacctattctagaaccgcgccatagtctagaagagtctgttcatatatataatttgtgtgcaacaagcacccgcgacaatgtattccgcttccgcggttgacaagacaacactattttgctatttggatgtccatgatactagtgatcttccaagcanatggcactctcctagaagtacttattctatcaattntgcacccgcataatct

SEQ ID NO: 46238 - DNA, 465 bp, Zea mays
  unsure (1)..(465): unsure at all n locations
agcttaagggaaattaaattcatatcatgatgttttcttgtttnttgaacctacctgctttatatctttccaaagggatacaaaaaagggaaactatgcttgggttaatatctacatctctttttgagcttattcatgaaaatcactgaaaagagattatgcttgttcaaatttgtcactcttcaactaaaagtaagaaaacaattgctagaggcaaagcatatggcttggaaggctaatcaaggtggttataaatggagctttattggtagtgctagctactcgattgatataatctaaagattgatcaagaaagaaagcaagcaacacattcaaaaccaagcaaagcaatcatggttgatttctcaaaagtggtttgaagttgggcattcatatgatgaaacatctaaatcggtccttcctacacacttcataaccatntattttcaatcccaatttaatttg

SEQ ID NO: 46239 - DNA, 422 bp, Zea mays
  unsure (1)..(422): unsure at all n locations
cttacgcgcgcaaatattgtctaatgatgtttagggcaacgctcctattgttcangataatgagggctatattttatatcctgacggttatcccgaacacaagattatgagaattcatgcaacgaagtctcattctgtttcccatcatgcttttatgtacaagaatgaggcatctaactctaggcattctacccatgttaaaattcctaaaaggaaaactcctactgcatcaaatgagcctaatgtttcatttaagactatccatgcatcttatgctttaactaacaaatcacgccaaatctgttgcaaaatattatgggggcatacacacgggcttcaagacttgtgtttggatactcaacgtgcttggttcttatgtgaaaggacccaataccgtttggtacctaaaactaggcctaaat

SEQ ID NO: 46240 - DNA, 469 bp, Zea mays
  unsure (1)..(469): unsure at all n locations
atcttatgctatatgagagctgcacttaccgctgagtgcatagctgccacatataacaacagaggagcccctggcattggtggagatagtgttgataggtctatcaaatattgcttcagctcttcaaacgctctctgatgaactggtccccattgaaatacttcggctgacttcagcacttcaaaaaatggcaaatttctctctgcgtgatctagatataaatctattgagagatgccagtcttcctgtcaatctatgagcccacttctttgaacttggnggttacattcgaaggatagcttctatattatatggattagcttcaatcccttttgttgaaactagacagccaagatatttccctttcttcactccgaatacacatattactggattcaactatacaccagcctgtctaaaactagcgaatgtctcgtgcagatcagcaatgtgaaaaacttgcttcatg

SEQ ID NO: 46241 - DNA, 462 bp, Zea mays
  unsure (1)..(462): unsure at all n locations
agctntggcgcatataagttaaatgataccaattgaagctattttgttcattataccacttatagtatttcaaaatatcaattgatgtatcatttactttgtaatgttaaataagctatgtaccgtgcttttcattctaaaccatgtaggtttgcttaagagtatgaatcgaaagtgagcaatcctaccatatgaatagcttagtatgcatgcatttctaatcaaaagtaaataccaattggaatactacgtatgaaaggtacaactagatataagagaatagatacgcatatctaaaaacaggaaatactataaatcaagttaccttagtcatgggtggggaatntgggtccaaactatacactaacccacttggcaatacttgattcactatgatgcatcctatgatatacatcccaaatttgccaagtctccaaattcctcgacatccttcggactcct

SEQ ID NO: 46242 - DNA, 263 bp, Zea mays
  unsure (1)..(263): unsure at all n locations
ctatccatactaaagcatactgctcgctangcaagggctgtcattatcgccaagatgtcggagcccggaacataccaactagccaacgatcaatgctaggtctacagcaacgctcggaacattcaacatctacgtctgctctacccttaaatcggttcaagatgatcatgtacctcactttctctttacatacacaaataaagtctaaccctcaatgaaagatcagcctttactcggcgaagactcaccctccctcaggggct

SEQ ID NO: 46243 - DNA, 341 bp, Zea mays
  unsure (1)..(341): unsure at all n locations
agcntttatntactccctacatgctcttaatgtctttcttttcggngggtgatgccaaagggggagaagtttatggaccaaagcaatgaatactatatcaaacagcaaacaccacacacttaaaattttatatctacaaatggtatttcaagtggttttggttgtttggtcctaaaataggaagtaagtgaattatggagttaggggaggcttaagtccataatatcactaagtggggataaaacatgcatcctagcaagtagaatgcatattttcattcaaatgtttgttatatttgcttgctttggttgtgttgncatcaatcaccaaaaagggggaga

SEQ ID NO: 46244 - DNA, 492 bp, Zea mays
tagcaagtgcgagtttaggattagtcaagttctgttcttgcgccatcatataaaccgagatggattagttgtggatccaaagaaggtagcagctattctggactagaaagcatcgaaagatgtccgaggaatcaagagtttcattagaatggccgactactatccgtgtttcattgaaggtttcttcaagatcgtcagaccaatgacaaccttgctagcgaagaaagttgagttcaagtggaccccaacgtgccaagagtcctttgagaaactgaagaggaagttgacaacaacaccgatattgaatctcgccagatattcacaagccattatcagtatattgtgatgcttctgataccggactgggatgcgtgtttatgcacgaagggagagtattggcgtagtcttccccacagttgaagaatcatgagaaaaattaccctactcatgatctggagttagcagcagtggttcatgcactgaagacctgga

SEQ ID NO: 46245 - DNA, 387 bp, Zea mays
  unsure (1)..(387): unsure at all n locations
agctngaaggccaagttaagaggcaggcccctttatatttcgtatccgaagntcttagtttatcaaagaaaaattatacagaattggagaaggtactgtatgctgttttgatggcctccacgaagcttcggcattattttcaagcctacaacataattgttccttcttcacaacctctgaaggatattatgagaaactgagaagctactggaagaattggaaaatgggctgcagagctcaatgaattttgtattgattatgtccatagatcttcgattcagtcccaagcgttggcagacttcattgctgactggacgccaggggctcaggaggaagaaacgaataaagatgtcgaagcatggacagtattntgcgatgggtcttggg

SEQ ID NO: 46246 - DNA, 313 bp, Zea mays
tcttaagggagagcacatcttaagattaacaaatgttcattctcgataaagacaggaatcgtcgcgcatgccatgcggcgaagcaagttggagttcatcatccacacaagaacatcatgacgaccgacaggccgcttgagctactccacatggatctctttggcccgattgcttacatacagcatcggccggaataagtattgtcttgtaatagtggatgattattctcgcttcacttgggacttcttcttgcatgagaaatcttataccccatagaccttatagggatttttgagacgggttaaaatgagtt

SEQ ID NO: 46247 - DNA, 420 bp, Zea mays
  unsure (1)..(420): unsure at all n locations
agctngaataattcgggcggttccgccacaggaattgcattaatataaaacataccaatagcgatgtcagctccgtcagcgatagcatcagcactgacttgattaaccctggcaatgttgaaccccttgcaagaacctggagtttgctgcttgttttgggcgggggtactggcaatcctctatggacatacattggcatagtgcccagtctgaccgcacttgtaacatgtagtgcctgcactctgtcctgagaacctcaccggggttctagtgggggcagcctaacgagactgtggagtctgtggagtcccctgtggtgcaaactgagctgggcactgacctcctacagtacgagccggtgtactctatggtggaacatagcgaggatgaacactactgcctccctgaccctaggtgatc

SEQ ID NO: 46248 - DNA, 397 bp, Zea mays
cgatacattcgaatgatcaacgctcacatactgtatggcagcataatgtgtttactaagttgcttgatctccaatactcagtctcttacaagaaaggcagcgacaatcgggtggctgacgctctctttcgcagagcgtcacatgagtccagtagtgctgctctgtcagcagtgacaccctcctgtgcagatacagtggctaattcctacttacaagacacccaggctcatgacctctctggcaaactcggcgctggacagttcatcagttccacattctttcctcaaagatggcatccttcgatacaagagcataatcttggcgtggctttgactctctcctctcctctccacataagctggtagcgcatttcatcaaagctcagttggaggctatt

SEQ ID NO: 46249 - DNA, 456 bp, Zea mays
  unsure (1)..(456): unsure at all n locations
agcttatgttcgacggctntggccgtcgaaagttgattcgtttactgtagtgattgcaaatatagatacgaagaacgaaaccatctaggtacgtaaccagcaagttggtaattaaaatagacagacccccagcgccattgccctaatcaaactgcaaagatgagagaactgaatcgtaactcttgttaaaaacaatcagccatagcttaagaaccatcagactggtacgtagattctctagattctgtgtaaagaccttctgtttataaggctagtcacagtgaggatttcatgtctctgtttccaaaaatgccacatcagctntatggatgaatgaaacaccatctcttaatagagagtttcatctcactatttcatatgtcaacatatttcttaaatgctgcatataaataaccaataggatntactcaattatatgaagatgaaacanaacac

SEQ ID NO: 46250 - DNA, 368 bp, Zea mays
  unsure (1)..(368): unsure at all n locations
tactcagcttctgagggagaacacgtgatagatntaactaacgtgcaattcgaaaaagatagaccttgtgcagcatgtcaagcaggtaaacaggtgggaggagcacatcacagcaagaatgtgatgaccacatcaaggcccctggagctgctacatatggacctcttcggacctgtcgcctatctaagcatagggggaagtaagtatggtttagttattgtggatgacttttcccgcttcacttgggtattctttatgcaggataagtctgaaacccaaggaaccctccaacgctttctaaggagagctcaaaacgagtttgagctcaaggtgaagaagataaggagcgacaatggatctgagttcaa

SEQ ID NO: 46251 - DNA, 379 bp, Zea mays
accacacaaagttgatcaaacacatagaagacacagatttaacgtggaaaacccctccaaagtgaaggggaaaaaccaccagcgccggtcaacaataatatcactatttttcgggtggttacagatcacacgagatttacaatggtattactatctcatgtggattacaagtgtatttatagaggtgaaaccctaaggtgagtagggaacgatttgtacacggtgagcgaacccacccccccccccacacacacacacccctaggcatcctgatcagtcgccaacttggccgccttctttagaagttggatcacaaactcaatattcatggtgctcaaagtcctcgatattatgaaggatggcgttggagctctcatat

SEQ ID NO: 46252 - DNA, 283 bp, Zea mays
ctattagcgacactatagaaactcaacttccctttaccctgatacgagatacacccttcattggtgagactttatgtatacataatcttcaacttgaaagtacatgggttggcgtcgtttgttgttagaacttgctctctcgtgcaaggggattcaacggtggtgttgtatgacctaaacagggttctctgcatgagatggcaaatgctctgttaatctagcctctcaaaggcactgtgcacgggtaattataggtatctgagtacccagcgtgctgcgttaa

SEQ ID NO: 46253 - DNA, 452 bp, Zea mays
  unsure (1)..(452): unsure at all n locations
agcttctaaagggagagcacattttatgattattaaatgttcattntgagaaagacaggatttgtagcgcatgccaagcagggaagcaagtcggtgcccatcatccacataagaacatcatgacaactgacaggccactggagctcctacacatggatctattcggtccgatttcttatataagcatcgacgggagtaagtactgtctagttattgtggatgattattctcgcttcacttgggtgttctttttgcaggaaaaatctcacacccaagagaccttaaagggattctttgagacgggctcaaaatgagttcggcttgaggatcaagaaaattagaagcgacaacgggacagagttcaagaactctcaaattgaaggcttccttgaggaggagggcatcaagcatgagttctcttctccctacaccccacaacanaatggtgtagt

SEQ ID NO: 46254 - DNA, 435 bp, Zea mays
  unsure (1)..(435): unsure at all n locations
gcatgtcagatcaatccacaactccagccagagtgatgatagaggaagccagcttcaaaggccacaacatagctcacaatcctcacggcaacagcaaagctctttcaggccaccagccccaaggggcagaggcagcacgggctaccgaggaaggtatggggatcagcccagaacgctctattgtttattctgtggtgaagacaacggccacactacaagaacatgtcaggtcaccattcaaaaccagaacgagattgccgaagtagaggcatggtagaatcagccgaagcacgtcctacatactgcttcgtgctattctccctatataccagaatacgtgggtaatcaacctgcagctnttgttgctctcgcaagtcattcacaagctatctggccccaagctccattaccaccaccattgccacctactcacac

SEQ ID NO: 46255 - DNA, 388 bp, Zea mays
catgcaaacttgtacaacccatgccatacacacttataatcatatggtttaaaacttccaggcaatgagtcatctgcatcaacaatctatctacgattgaatccgcgaaaaatctgtccacgaaggcatttgtgagctctacataaacttgccccctatagtacctgtcagcgcaatcctaaacctggtttaaaaccgtcattagctaacatttgcccgtgaacgaacctgtcaaccatctttatctaagtctattcacgttgagcaacaataaaacacttcatgaatcatttatttagttacttattcaaaaaacataatattgtttcttagtcattgatactccataattaataccaaccaaactctgagttcagtgtgggtacct

SEQ ID NO: 46256 - DNA, 230 bp, Zea mays
tacgctatcaatgcgcgactgatccacgcttctcatatagacccacggtcactataatgtatcgtatgccaaactcatatcatctctgagagactttaacgttgcacgaaatatagaatcatcatgtgcggaatatcatagctcacaacatggaggatactccaaggacggtaatattgatagtctcaactgcaactatcttaaaccgtcgactgttttgcgtgatacat

SEQ ID NO: 46257 - DNA, 418 bp, Zea mays
  unsure (1)..(418): unsure at all n locations
ancttctttaccagagcgtgctttctttctattggatcaatgctaccaccaccactggcctcatgccttgaagctaatagatggcgacgcactcccattggaccggtagacttgcacgcggtttttcttgtgcgtggcggcatatctgcatcaacgggaaaatcttattactatagattttatcatgatgcatgtataaacacagaaatcaccttattgattcaccaccttctatacattgcactctactatctagtcttttaacataagctcttcataaggtagttacataagaaggaaagaatcttctagatacgtcttgaaaattctttctgacaatgctcaaaatatttgagaggagggctacgctccgataccagctgtgacagaacctcccaagtcattacgcccacctaca

SEQ ID NO: 46258 - DNA, 380 bp, Zea mays
agctttattagaatgacagccaaagtccttcttctctattatatacagaaatgtgctaacatatgtcgatgatatcatagtaaaaagcacgaagcaggtacagtcacattgctgatctgcaggaaacatttgctaattttaggcaagctggccttaaattaaatccagagaaatgtgtcttccgagtaaagacaggaaaattccttggttgtctagtttcaacgaaagggatcgaagctaatccgaacaaaatcgaagctattctttggatggagccgccaagcacaaagaaggggctcaacggcagacaggaagactggcctctttgaaacgattcatatctagatcagcagagagaaatttaccattctttgaagtgc

SEQ ID NO: 46259 - DNA, 232 bp, Zea mays
gaacttcttcctttcggcaggtcccttggtccacgtaatctaaccacccattcatcgatttcttgcacacacacactccccaccactcaatgaagcaccctgtctggtctaaatgaactatattgccatggtatggtcgatacagacatcgccgatgagactcacacgctaagtcttggtcagaccgactcctggcaccatctacgccacctgtaccttcagaggctcccca

SEQ ID NO: 46260 - DNA, 266 bp, Zea mays
acttttggaacatcgtgagtctgtgaagaaagtttattatatcatgacaataacgaagctattacaaaaaattgaaaacaacaaaagaactaggcttttgaatgattatttcttattaaaaaaaatgatgacgaatgcaaaaactattttaaaggtaggatatctcttagtagatgtgcttcaattctggcacagtactattgactgtgcgagctttggactgcttcctgaagactcgatgctggtgagtgtgctggctcccttct

SEQ ID NO: 46261 - DNA, 282 bp, Zea mays
  unsure (1)..(282): unsure at all n locations
tcagagtcacctgcggcatgcaagcttnngctcatttctcgtcagcatcgntattctgtacatattaatatggnatgagagaagtgcacacttctatgagaaggtaaagtcacaggcataaattttttaccggcttatagtggcttccagcctcgtcgcctgccatttttcgcccgcgcttttacacaaaatttgagttaatgaatctantttctatactccgagctaggctagggataacaattaaatctgtcggagataaactaaaaatggacctgtgac

SEQ ID NO: 46262 - DNA, 488 bp, Zea mays
  unsure (1)..(488): unsure at all n locations
aaactaagctttccttgttggtaaattatgaactcagctaactagcttagtgtccatctggagtgaataatgagaagtccaaatgtacagtatggatgatcctatacgaaggacttgtatataatggcatctttaagttatctttcgattatttttttaaattttgtttgatgtacgcatttgtaggaactactactcacctggctcaagaacactgtacttcgatagacgttcactatgcgtgaagccaatggaggtggtatttgacagtggtagcacctatacttattttactgctcaaccataccacagctgtgtttctgcggtatgtttcaaccacgatttgttctgatttccatgatttttgtcaagaaacaacactgaacttttgataccctggccttgcagcttacaggtggtctcagcanatcacttaaacaggtgtcagatcccactctgcctctgtgctggaaagggcagaaagcatt

SEQ ID NO: 46263 - DNA, 236 bp, Zea mays
aaaaacgccctttttattaggacacacttaggagcgaccaaaccaacaaactaacacggcgactaaaacctctaaaaacaacaaactggacagcaacatggaataaaggaactctgctccaaaagactagaaacaagggaaagaaaaactccccaggcacttcaaaaatacaggaacaagccagagaatacaatagctaaaacgaacccgaaaggcttagccagagccgttgaaaa

SEQ ID NO: 46264 - DNA, 364 bp, Zea mays
  unsure (1)..(364): unsure at all n locations
ccaganaaagacttgaccctcttaatagaccgctatctttctactaatctggtcacgcaacttctctaaactcttctagaccggcgaaaacaaaacctatattatacctttgcttccatctgatccacaaccaatgcttatgattcttcaacatttgctgttctatgcgcgccaaccctgcactcttatgtcttcaaaaaccgctaggccacaagcaggtatcattaattaaccaaacattacccaaagcgcctacatgaatcacaacagggacaccgtcggcgttgacctcccgcctgagacaagacgagcgccgttcccccaacacgccaccgcaacacacggacgacgccacacgctcgcg

SEQ ID NO: 46265 - DNA, 325 bp, Zea mays
  unsure (1)..(325): unsure at all n locations
atgccacagccagcccatgctagtcttagcaattaagcatgcatctagaccggcctcctcttttgcaaaatcaactaaataaaagttgccgtctaatacacccttaaaagctagtgaaccatcacttcttctaaagacagacacatctacatttgtaaatagacaattatatcccatattgcataattgactaacagatagcaaattatatccaagagactcaactaaaaacacattagaaatagagtgctcatttgagattgcaattntacctaacccttttaccttgccttggttcccatcaccgaatattattgaatcttgg

SEQ ID NO: 46266 - DNA, 395 bp, Zea mays
gtacatagacatagccccgattggaactataatattcacgtgattagattctgcaatggcaaacagacaatatgtacctaacatcattagatttgatgtacgtataaatatagacatctacggttccttttctggtctttacttatgaaccaagattaaaatttgttgacacggattatattgacgactggcgagcaacctgatagaatatcatacggacagtgaggatgatggcgccgctgataagctgcggtaggtgaggagggccaagacgaacatgctcgcgttactgccacattggaaacaacacgcttgccgtgttgacaggtgaccagcacatcgcggcagcgcctccacgctgcatcttatatcttaacatctcaaaactacaatac

SEQ ID NO: 46267 - DNA, 269 bp, Zea mays
gacagtcgaattaatataggtggagaggaacctttggcacctgtagaacatacaatctatagcaaactaggtagtccaaatatttgtgtggggcaaatcaaccaccacaataatttatgaaggaggggaagcctaattccctttcaatctccccctttttggggattgatgccaacacaaaccaaagcaaatataatagtggataattgaactaatttgcataatgtgagtgcaaagggtgcttggaattgagccaatctaaaaaccta

SEQ ID NO: 46268 - DNA, 383 bp, Zea mays
  unsure (1)..(383): unsure at all n locations
tggagagaagagatacgatgaaattatacgtagtatcttcttagctcgtcaacattccatgatcttggaatcttggtttcttccatatctcttaatctatatgaccctggtctattcaaagctgaaaccagaaaaaggactgcccactttacttgcaacttgcctactgtatccgggttagccacccttcggagcaccaagtgacctggtgatatgtttttgagcttcacttttctgtatcgccatcttattgtttctgattgatacttncttatgtgctcaattgcttcgagtctagattcttcttttgcatcttttgaaaaaatttcattgttctcattttcagccgaagccatgacccttgctgagcccaacttaacttc

SEQ ID NO: 46269 - DNA, 306 bp, Zea mays
aacgctccttaatgacacactgtgtttgaaacaacgtatgtcgctgattctgctctgccttctctatttgtgcactaagcacatgctgtacaatggggctctcataatgcttgcatcagccgcaccaatctgttcttcgggtggttccttatcgcctgcatcatcagccacaagcaaagcaagtgtagcttcatccaaatcactagcagtggaatacccaccatcgtcttttaccaccatgacacgctgattaggacaatcacgttgcacgtgctcatagcccttgcattgacaacactgaacatc

SEQ ID NO: 46270 - DNA, 437 bp, Zea mays
cggaccatctgaccctagagtagactatccggcaactcaccttggactgttcagagaaccgccagagcatctgatttttcacactcagatcggtacaatatgcacaacacgcaaccacaatccatgacgcagtagcactaccctccaccttgggtgcatcaaaacttaagcattgccacacttatgctgaataccactcagagttagatgggctcacaccacaacatatagctcatcctcataaccaacaagcaatattcaactacctaagcctcacatcgtgggatccattctagagccactagctactatggataaaatttatgaaaaataacaaaattattccaaaacatgctaggtatgattagctcaaggtcatcatatcggaagccatattatccccaatttgacaccatttcatacccataagggactag

SEQ ID NO: 46271 - DNA, 459 bp, Zea mays
agcttcggcatctttatttacttcttctttcttatctctctggcgtccaatcagcgatgaagtctgctaacgcctgcgactgaattgaggatctatgcacataatcaatgctgaattcattgagttccacagcccacttttcaattcttccagaagcttctctgttcatcatgatatccttcagaggctatgatgaaggaacaattatatggaatgcttgaaaataatgccgaagcttcctggaggccattaagacagcatacaacaccttctccaactctgtataatttttctttgataagcttagaacttcggagacaaagtatactggggcttgctttttgatttgtccttccaatttctcctgcacaagcaccgcactcactgctgaatgcgaagctaccacatacaacagtaacggagcccctatcgtaggtggagttaatgttgtatatcaat

SEQ ID NO: 46272 - DNA, 375 bp, Zea mays
actttaaactccactctatagtcaagtgactttagccttaaagagtgagcttccctacataagcgagtcgacattggtgaatccatgtgttttgttggcgccgcggagagctaccatcagaggctcaaagctaaacataaataggtgccattggagttgttgcttcctatctccaatggcctctctaccgtactgaccatttcaaacttcactttataaacaatgcaatctacaatgcaaaacattattttgtacgaccatatgcacactctatactgagcacacgacctaagagcacctatatctcagtgaaaaatgatgctttgatgttctctctctcggtgaaacatcaatttaatgactgggactaccaat

SEQ ID NO: 46273 - DNA, 342 bp, Zea mays
  unsure (1)..(342): unsure at all n locations
tgaaattttgagagttatacttgtatgaagcaggatatgcatcacatgcttctctccttttatatagagtgcaagaatgttagaagagaaagagtttacccttttgaccttacatagagacctctcttattgngcttgccttttcttagtgcttagacctatttcagacaggatggaatatttgcacaaagaggtctacaactagtgatctttttagcattgtataatatatcagtaacacaattgcataatgatataattctcttttactacgctatcagaagatatcatgaaatattgaggcctagaacatatggtattgagtttcatatcaacaataca

SEQ ID NO: 46274 - DNA, 294 bp, Zea mays
caacatctttacttatgtagaccacattgtcgttgcgagcaaaaaccaagagaaccacttggccgacctcgctgagacattcgtcaacatgcgcgaagcaagaatcccgctcaacccaaagaagtgtgtccttcgggtatgccaggggaaaatactaggttacccggtatcgtactgaggaaatcgagcccacccacccatgatcccagaaattatcgacatggaacctccgcagtccacctaagacctccagcgacttaaagaagaagggcggcctgaacaaatcatcttcaa

SEQ ID NO: 46275 - DNA, 392 bp, Zea mays
  unsure (1)..(392): unsure at all n locations
tcttgagcttcggnttaaagtcacgttatcaccatgtncgttgaataaatatccaacgaaaagaagggtggtgtgaagacgaaatttactgaagagaccaaacttgttgatgagaaaaaagttgtggatccttatattgctggattcgtcgagtcaattggaaaaacaaacaccgagaagatcactaaagagatactggaaggtttatctgaagatactggtgacagcgatagctatgatgtggaaagtggagatgaagattctaaagatcggccctggcggccaagccattctatcttcgacaaatcgaccgttaagcagagtcatcttgagaatatgagaaacaggtactttcaagacatgtctattgtgagggctggcggagacaacaa

SEQ ID NO: 46276 - DNA, 403 bp, Zea mays
  unsure (1)..(403): unsure at all n locations
gatctcagagncacctgcggcatgcaagcttatgctccatgacaatattgatcagtgtcttcttttcctcttgctcgcactaatcccagagcaggccacagatctcactgtgcacagtgcgtaaggatgggggaccaagtaatctggggcgtctgaatcgttgaagccatcgtaaatggcgacgaacacccagccttgctccttggacaccacgatatatacgcggttctcggcagccctcccctgcacccactgtagcacagcagaactgacgctaattgggtatgagataagaagataagaatatgttacaattatgggtgttcggtatttctttttggtcaactcttggaaacgaaatgtagtccttttgtttgctgacattactgctctctacataatg

SEQ ID NO: 46277 - DNA, 360 bp, Zea mays
  unsure (1)..(360): unsure at all n locations
ctcagcttcgcatntctgaactaactcgaccgcatcgttcttcgccgtttccaatagaatcccgacctgaaaaccttgccgactaatgttctggatgctgcatgtatcccacattgccctgcatggacctcctccagaagttgtttcccagtggacggtattacgcacttcatgaggatgcctgatgcgccccttctgtacaatatctccccaatgagtgtgtaatgagccgactgcctggcgatgcgctctgccgagttcttgtcatctggntcttcttcattcgttatatacttaatgatcggccttctccagtcatcagagtctgactcgggttgatctatgatattacactcttct

SEQ ID NO: 46278 - DNA, 457 bp, Zea mays
aagcactgagctgcaactgaagcctggtagagcaacgcttttttatttatattgctcaagcctagctacgggtgcataggtttcaccacaatccataccttcgacttgtgaataccccttggacacgaatcgagcttagttccttatcaccacaccatgctcgtctatgttgttgcggaagacccatttgggttcctacaacattttggttaggacgtggaactaaatgccatacctcatttctagtgaagttgttgagctcctcttgcatcgccaccacccaatccgaatcttggagtgcttcctctaccctgtgtggctcactagaggaaacaaaagagttatgttcacaacaaatgtgcaacaccgagatctagtagctacccccttatgaatgtccgcaaagatggtgtcgactgtgtgatctcgtcggatagctcggtggactcttgggtgt

SEQ ID NO: 46279 - DNA, 476 bp, Zea mays
  unsure (1)..(476): unsure at all n locations
tgacaaccaccattgacatttcacataagatttctgagatcaagaatatttagttcattcctcaacatgcaaaagcgggtcttattaagtggcttaatgaaaatatccgctaattgatcttccgacctcactccttctaaaatgatatctcctttagcaacatgatctctaaagaagtgatgacggatatcaatgtgcttggtgcgagagtgttgtacaggattattaacaattntaacagcactctcattatcacacaacaaaggtaccttttctagaactacgccatagtctagaagagattgtttcatatataaaatctgtgtgcaacaagcacctgcggcaatgtattccgcttcggcagttgacaaggcaacactatnttgcttttggatgccatgaactagtgatctccaagcagatggatccccagaatacttttctatcaatttgcaacggcataatcaatcgaatac

SEQ ID NO: 46280 - DNA, 307 bp, Zea mays
agcttgtacagtcaatagtactgtaccggatttgtatctcatattctgagcgatatcctacctttgaaatgctttcgtgttttatgccattttgctttttaatacggaacaagtaatgtaaatttagttttaatttcttgtaatgattttgcttatatcaaaatgaaatatatcttcttcacagaattacgaagaccaaaatcttcttcacagaattttgaagctaaaaagtcgttcctaaagggaatgcagagccaaaattgctgaagccacaaaagtcgttcctaatggagcgcagcgtaagttt

SEQ ID NO: 46281 - DNA, 386 bp, Zea mays
  unsure (1)..(386): unsure at all n locations
accagctaagccctgtgctgtcctgtgatttagtacctaagaaagatggatcttggaggatgtgtgncganngcacagctataaataatattaccattcgctatcgccatcctattccacggctagatgatatgcttgatgaattaagtggttccacaacttttactaacattgattcgagaagtggataccatccaataagaatgaaaactggagatgaatggaagactacatttaaaacaaaatttgggttgtatgaatggttaagaatgccctttgggttgactaatgctcctagtacctttatgagagtaatgaaccatgtcttaagaactttcattggaaaatttggtggtggctacttcgatgatattctaatttacagc

SEQ ID NO: 46282 - DNA, 349 bp, Zea mays
  unsure (1)..(349): unsure at all n locations
tcgcactgggagtggagagatggcgggagtancatgtaccctcctggcatagtagcacgccttggagggtaatgtgctctcgggtggcgcggacctgatcatgtagtggtggactccgtgggaacggtcgacatatgcaagggttaaatgctacatatgtcgtgtggttagagatccccagctgggtattatcggttcgaatcgtcgttgctcctcggntatggagactcatcccggtgaccatcatcgtaggtagcaagtgaaatatgagaatgaataaaatggagctagtataggccaagtgcttgaactagatcatgcaaatatagattcaggtaataacctaact

SEQ ID NO: 46283 - DNA, 313 bp, Zea mays
  unsure (1)..(313): unsure at all n locations
tcgcgggagaagggttggccttggagagagccgtctgagttatgctcctttgcgntcgccctcctcctctactttgggaaagccctggacatccccttttatagatacaaggagacgatccagctgtacatatgggggtgtagctaagcgctaacgtggcaggcggagaagtgcttgagccctatagaagcgtatctggcggtgcggccctgtgtcctgttgccggagtaatctagatgggacaccggtcttgttctttcgtagcctaaggcagctagctaggggtagggtaatgatgtatcccctgtggcgt

SEQ ID NO: 46284 - DNA, 393 bp, Zea mays
  unsure (1)..(393): unsure at all n locations
aaaagacagtttgcaaagcttgctgtgctgggaaaggggccttccttttgcttaacacctacagggagttgaagatatatggtgggagtcaaagtggtggctactcagcactcacagatagttntgtgtgcaaatcgtgctgcagtgaaattatcaaacgtgcattgtatgtggattatgtccgggttctttatagtttgcgcagaaaagatcgttcagagaaagcagcactgagtgctgtgaatcacgtctgccaactggagtacaagaaagcatctgatttatctcanagtattcaatttggtcagagacaatngaagcagatccttgatggtgaagaatcccttgcagaatntncatatgcaaacttttacaaatggtattctcaacttt

SEQ ID NO: 46285 - DNA, 374 bp, Zea mays
tgtacaaagcccgctggaattaatcttcggagaaacccgtcttctctgttttatgacacccgaaggtccaacacaacaagcaatgagtgaatttataattattgcagagcatatcagcacaagggacctggttcaagagtttttagcattcaaagtttttcccagtttgaaagaatgggaaatgccgaagctacaaggggaaaagagagaaggtgaactcgtacgtttaccttactatttcaagtttaaaaagtactttaaagcaccctgccaagagtggcttgatacgaatgaagcaatgtgtaatgaaatacttggcaattattccaaaaaagaagatcaattgatgaccgcagccttcggcacccgtccga

SEQ ID NO: 46286 - DNA, 423 bp, Zea mays
tgcggcatgcaagcttacattgcttccctataggtttcctatgattttcttaataccagcggtgtctcccattatagagcatgcttctagcaaatttaaacttatcatttttaaggtcatgctcattaattttaggagttaattttgctatgtgatcattttgttgtttaatcatggcaaggggatcatccatagcttctatattaatatctctacatctaggacaaatagaaacatgatcaaccgtagatgttgaggatttcaaacatttaattcttctatcttagcatgtaatacggcattctcatgtcttagacaggaaatagaattattgcacacatttaaatcttaaccttagaaactaggctagcattatcatctcttatgctagaaattgtatcattcaaatcatcaatcttaaca

SEQ ID NO: 46287 - DNA, 409 bp, Zea mays
actaacataactagttctcatcgtagtcctggaactccttaaagtccttcatgttgccagcatctcctcctgagcactaaatacagtggggacaacctatggtgggggtggtttttaaagcaagggtgagtacacatcaacatactcagcaaatgtctcgtttggctaaagtggactagctttatgtggagctaacggtaaataactggtcttagttggtctagtatctattactaatagagagccaaattctagtaataaacccagttactaccacatatcataattaacatcatcattattaaccatcatcataaaagtatcacaaggctgctcttaaccatgagcacgggcgatataccacgttataacactctacagaggttacacactttacccacgagtcatg

SEQ ID NO: 46288 - DNA, 351 bp, Zea mays
  unsure (1)..(351): unsure at all n locations
ctaagctggccttgngaaggctctgggcatctccttttatangcacaattatgtgatccacctgtacacatgggggtgtagctatgcgctaacgtggacggcggagaagtgcttgagccctgtagaggtgtggctggcggtatggtctgtgcctcgaggtggccttgaagattatgtcctgctgacgcttcttcgactttgtagagagctgaggacagtcgacgtcatgggcgcatgccgggaatcatctttacctgttactggagtaatttgatgtgacaccaatcttgtttcttcgtagcctgaggtggctagctatgggaaagatagagttgtattccctgttcgcgt

SEQ ID NO: 46289 - DNA, 459 bp, Zea mays
  unsure (1)..(459): unsure at all n locations
cgcaagctgggaaggttcttcatccttcttgttctttcggcgatgccacagccagcccatgctagtgttagctattaagcatgcatctagaccgacttcttcttttgcaaaatcaactaaataaagtttgacgtctaatacacccttaaaagctagtgaaccatcacttcttctaaagacagacacatctacatttgtaaatagacagttatatcccatattgcataattgactaaccgatagcaaattatatccaagagactctactaaaaacacattagagatagagtgctcattagaaattgcaatttacctaacccttttaccttgccttgattcccatcaccgaatataattgaatcttgggaatccttattcttgacgtaggaggtgaacatcttcttctcctctgtcatatnggttgtgcatccgctgtcgataatccagcttgaacccccg

SEQ ID NO: 46290 - DNA, 411 bp, Zea mays
  unsure (1)..(411): unsure at all n locations
aactaagcttatgcaactgtgccagaatgagagtgaactgttttttctgtcttcactatcntctntggccaccatgaagacaaacgatccgagacatatacacatctgccaatactgcgctgttgtagttggtcttgacaggtatgaagtgggctgacttggtcaaacggtccaccactacccaaatagaatcgtagccggctcgagtgcgaggcagtccgactatgaaatccataccgatttcatcccattttcactgagggatctgcaacnggtgcaacaatccaacaaggctctggtgttctgccttaattcttcgacaactatcgcacttagccacatgctctgcgattttcctcttcattccgtaccaccagaaattcttcttcagatcctgatacatcttctcac

SEQ ID NO: 46291 - DNA, 352 bp, Zea mays
  unsure (1)..(352): unsure at all n locations
gacctctaagcactgagctgcagctttagagagaactgcaactatatggttctatagaccaatnngcagcagctccgcattcggagtcaaatgaactttgtcgaagagctaatggcattattatgacaggaataatgaagtttatcttcaaccaccccatggggaagtggccggacgaattaatcacagtggtgtggagccaccacacaacaatatcaaggttaacagggtttacaccattcaaattgctgttgggtgacgaagcaataaccctataataagcttaagcgggatcaataagaacagtggcttttgcaaaggacgaagctgattattctgtggcgaaatatgc

SEQ ID NO: 46292 - DNA, 358 bp, Zea mays
tgccaacgggaaaatcttcacagctgtcaagaagatgctcctcgatgaaaaatagggcagatggacacgattattaccggaggcagtctgggcgttaaacacaactgagtgtatggcaaccgggttcactcctttccgccttctataccgatcggaggcaatgaccccgcaagatataaagcatgggtccccgcgtacagttccgtcagccgttcccgacgtggactagccaacttcaaaagatctcattgacggagaccgcgtcttcgctctacaagccctaaacatataccaagctcagaccatagcatggcgcgaccacgcattcatcccgaggagttcacgagggggacctcta

SEQ ID NO: 46293 - DNA, 372 bp, Zea mays
  unsure (1)..(372): unsure at all n locations
agcttgcttgtaaatggtagctatggtgggatttgctgacacnangagaanactgatggcgccttaatggtctagtgtttccattcaagagatcaaactgaagcacgaagatccgcaatagttcattcattgcttttgccgggtccattttagggcctgttcataagcgatctccttcatgctctccgactgttttcgcgctcagtccccttctcttttagatataagtcatgggcccggttcaatgcatcgggtaaattgggcccaatctgttcgccttaactggcttccaccaaccaaaccagatgcaatcatgccccccgtttcttttctgcagcaaacaaaatgcagagctactcacctctaaaagag

SEQ ID NO: 46294 - DNA, 441 bp, Zea mays
  unsure (1)..(441): unsure at all n locations
tcgggaaatcgatactctctgatagagtaccgattaccttttctccggtctgatcccggatacagcccatcttttcatcatcgataccaccgaagagaaatgcccccggccgatacccgcaagatatggcatactcttttaactcttctttttcggccttggtcagatcttgcccaactaagttttgaaaattaaaaatttcgtcttccgaagtgtctttggctacttccttctttttctcgggctctggggccgaagtctcttcngtagctgttgtagcttcttctgtggccatgtctagtagtattntatcaatatttgcaatggtgggttctaactctgtatcttcggctgtggcagcttccgcagctatagccctcgaaagtgcagctttggtagccggtatggtctcaacagctggcgcctccgagctaaagctct

SEQ ID NO: 46295 - DNA, 423 bp, Zea mays
  unsure (1)..(423): unsure at all n locations
gcttcccgccagtctgagcagttcgaacgatgataacaagatcttaatgcaaaacttgaagccgaagctcaacaaaattcagatttgagaaaactactggataatcttcaagaaaagtgcttggaatttagcaataaatgcattcaacgattaagaaagattttttactcagttggagccagcagtgaaaaattcaccccctcagctgaagacctaccgaanaccttcgaacatattgagggggagattgacgagctcgacgaagtcatagctgggcatggtgatttctgtgcctgggtggcttctcgaggcactgctgcagctntcctgaaggctggctgtgatcatggaaagaatgcaataggccaaatttcactttatcaccatcaatcctagatgacattcctgatctcgcccgaagta

SEQ ID NO: 46296 - DNA, 287 bp, Zea mays
  unsure (1)..(287): unsure at all n locations
acgtacaattcgaaaaagatagaccttgtgcagcttggcaggcaggtaaacaggtgggaggagcgcatcacaagcagaatgtgatgaccacatcaagacccctggagctgctacatatggacctcttcngacccgtcgcctatctaagcatatgaggaagtaagtatggtttagttattgttgatgacttttcccgcttcacttgggtgttctttntgcaggataagtctgaaacccaagggaccctcaagcgctttctcaggagagctcaaaatgagtttgagctc

SEQ ID NO: 46297 - DNA, 390 bp, Zea mays
cttatcaaagcaacaacatttaccatttctattactgcaaaccatacccgtaacatggccatttgcgtgctggggactggacatgattggacccttcaagaaagctcagggaagctacactcacgtgttggtcgccattgacaaattcaccaaatggataaaatacaaacccattgcttctctaacttcagccaaggcagtggaattcatacaagatataatattcaggtttgggataccgaatagcatcataaccgacctgggatctaatttcactagctctgaattctgtgatttctgtgaacaaccgagcatccagatcaaatatgcctccgtagcgcatccaagaaccaatggccaagtagaaagggctaatggaatgatactgga

SEQ ID NO: 46298 - DNA, 202 bp, Zea mays
agcaatgtccactggatttagaaaatcaaagatctcaggtgcacatctagctaacaatgagatctggacaaaacaatgctatattattacataaatttggccaaaagtaataaaacatattacacaacatctccacctaatgatggaacacgctaacttcgactacttatggctctttctgtcaccgattaatgaaacaagc

SEQ ID NO: 46299 - DNA, 406 bp, Zea mays
ccccttaatgctactaaactacacatttaacattcatatataaaatttcgacagtgtctcctttgaaaattgcataaatggggaagcaacaaaggtttaatagatattatggatagaaaacataatagatatttataatctgctagcaatgggaagacgaccaatacgacatgaactgaattaaccagtgcgcacgactagttaaaaacaaacatcatttgacaagaagtttctaattaaatcatgactacgcctgggcagcgttattatgagagtgaaagtgtatgtgctgctacttttcactccccttgatgagcaacaacacctgcattgagtaatgcaagagtgagatgaaacatctcagcaagctaattgttttgcgagatatttaaccacattgaataat

SEQ ID NO: 46300 - DNA, 452 bp, Zea mays
  unsure (1)..(452): unsure at all n locations
tttggtttccttattgtaaaccaataccatccttaatgccagggcgtcttccattataaagcatactacgagcacatcttaattattccttctctagttcatgctcggcaattttagcatttaatttacctatgtgagcattttggtctttaatcatagcaaggtgatcattcatagcatcaaattaacatctctatatctagtgcaaatagtgacatgctcaatagtagatgtagagggtttgcaagcattccattcttcaatcttaccaattaaactaacatattcaggtctaagacaagaaattaaatcattgtcaacattaagctctttagacanattgtcacaatttttcacttcaagagcataagcatcttttagcttaacacactnttattctccttaacgagcaagtccttcttggatttcaagatatcatccttctccgtaat

SEQ ID NO: 46301 - DNA, 447 bp, Zea mays
  unsure (1)..(447): unsure at all n locations
agcttaatcccgaanagtgtgttttcagggtaccagaatgaaagttactcgggttcattgtcagccaccggggaattgaagctaatccaaaaaaaatcgaagctatcatgaggatggaggcaccacgatcacagaagaaagttcaaagacttaccggatgtatggcagccctgagcagattcatatccaggctgggagaaaaaggcttaccattttataagttactcaagaaggtggacaagtttcagtgtacttcagaagcacatgaagccctagacgcattgaaaaagttcttgacgacaccaccagtgctgaaaccaccacgtcgagccacgccaactcaaccagctgaagatctgctgctatatatctcttgcacgactcacgtggtgagcaccgtgttggtagtcgagcgagcagaaaaaggacacacatacttaactcggg

SEQ ID NO: 46302 - DNA, 350 bp, Zea mays
  unsure (1)..(350): unsure at all n locations
tatatttcgtatccgaagttcttagtttatcaaagaanaattatacagaattggagaaggtactgtatgctgttttgatggcctccaggaagcttcgacattattttcaagcttacaacataattgttccttcttcacaacctctgaaggatattatgagaaaccgagaagccactggaaggattggaaaatgggctgcagagctcaatgaattttgtattgattatgtccatagatcttcgattcagtcccaagcgttggcagacttcattgctgactggacgccaggggctcangaggaagaaacgaataaagatgccgaagcatggacagtattttgcgatgggtct

SEQ ID NO: 46303 - DNA, 395 bp, Zea mays
  unsure (1)..(395): unsure at all n locations
catgcaagcttngaaggaccaaatcatcgaagcatatatatttctggatgataaaaggtcacccacgctctgttgatgaagcaccccacaaccaatctaggaaggaatccatgtgggagttcgcaaaagaaaaggttgcgtgttggcatctatgcttcctcaataaactagccgcccagcgaaagctataagcctgaagatgatctttgagtagccagaatcaaccgttgcaatcagcaaccggatgcttctgaaaggccacactttgttaaaactccatcttctccaagaagtctgcacagcgaagatatgtagctgaagtaaagctatacccataacccttctaagccaaatctcgaggacgagatttcatttaagtgggggagatttgtagc

SEQ ID NO: 46304 - DNA, 324 bp, Zea mays
cgagcttgaaccgaggacccgcgccaccggaatagcgcaatcttgctcgcccgagttcggaaccgcgccggagcacgtggaccgggtaagcctctgcaccattttccaattcgttgcgcgcatggcctctacatcaccccgtggagctcctcgtgcactttaattgaactataccgtcctggtttggccggaacaggagccgccgacgacccccgccgcctgtgctcatggccagggtagctccgaccaccttcgacgccaacccgcacaccgacgtgaccatcgtgacctccccgacatcactgaccaccccgccggagctct

SEQ ID NO: 46305 - DNA, 415 bp, Zea mays
  unsure (1)..(415): unsure at all n locations
ggaacttaagncacctgcngcatgcagcttaaaacacttctgatcttttttcttctacatgatcctttcctcacgcgggtaagcgttaaaacgaggattatgctctgataccaattgaaagttgcctagaggggggtgaataagcaagttaaaactttttcaacaaaaactagaaacaaactgggtaaaactgaattgatctcgaaattcaaccagttaactttggaaatgagatgttctaaatgatccacagggttcaaagtagtagatctgagaaggacacttctcaaaatccacacaccaaaaagatataaacaaatcttccacacaatggtgagagaacgaagaacacaaactaacaccatgagcaagaacacaagagacacaagagttatcccgatgttcggtcacacca

SEQ ID NO: 46306 - DNA, 322 bp, Zea mays
tagcctacaagttacattatgaacaacatgtcagtacatttgcaactgaaaactagaaaagagatatagtttaatctgttatccagctacatcccataccagatttgactcctttttctttcatttcgttaaatagaatatttgcttcctgtatctatccacctttgacaaggccatcaatcaatatgcagtatggcatctggacacagtacaaaggattatggaatcatgatagcatgtaatgtcggttaatttcaagggaccatgcaagtgtgcacattaagtacttctttttgtgagaccacatgttttacctcatcct

SEQ ID NO: 46307 - DNA, 415 bp, Zea mays
  unsure (1)..(415): unsure at all n locations
agcttcataccatctccttctctgctagctttgtattcatantnnggcacccatcgcttgatgggttcatcaagggtagtcaacaaagatctaggaacccaaaagtcctttgtggtagcgctaggtaaactcattacctttctagcacaagttgcaattttgggttgcctagctacatgtgaaataattgacaagctagaagtggggtttgtaccaatgggacaatccttgcattgatgtcccttctttcggcatatgtagcacaggcgatctttaagttttgaagatttcttctctccttgtttcttgcttgctacatgggtagagaatattntctcttctaacactatgcctttttgtttaaatgaagaaagtcttaattaaatgtccttccttgagcaattgatcatcttgt

SEQ ID NO: 46308 - DNA, 458 bp, Zea mays
  unsure (1)..(458): unsure at all n locations
gcttgagaagggacaaccgtancatgcacaagacccctttattttaataccatgcttttcaagaagggcatgagcaaaatccatggtaagaaaattaatgctcatatgatttgctctaacaatgtacctatgtgcttcaacaaagaaagattaaagagaagcgattggagatgctatggatgcaaggagaagggccatgaaattgattcatgcccccacatgaagaatcaagaccttgcacgatccagaaagatgaccatcaaaaaggatgaaagcaaaaggcataagcattgcaaggacaagcatcgcatttgctacaattgccgtgaaaaaggtcatctattcaagggttgttcaaagggtaaaactcctaagcctaacttgtcaatacattcaaatatgcttaggagacgccacattgactcttgtgctaganaggtgatgagttcaccacattc

SEQ ID NO: 46309 - DNA, 341 bp, Zea mays
ccacagccagcccatgctagtcttagctattaagcatgcatctagaccgccctcttcttttgcaaaatcaactaaataaagtttgccgtctaatacacccttaaaagctagtgaaccatcactttttctaaagacagacacatctatatattgaaatagacagttataccccatgttgcataattgactaacagatagccgattataaccaagagactcaactacaaacacattagagatagagggctcattagaaattgcaatattacctaaccctgttaccttgccttgattcccatcaccgaaaattattgaatcttgggaatccttatttttgacgt

SEQ ID NO: 46310 - DNA, 384 bp, Zea mays
  unsure (1)..(384): unsure at all n locations
tcggcacaatgttgagcgcgcaatgcccataccatcaaagtattctacgtacatgatgttgagaccactccttcatccatcaacatcttgatgaggcgctttgaccccacaatcaactcgacgatgaggggttacgtcccaagatgtgggatcacatcgaggtggtcgcagcggtcgaagactatcgagaattctaaccaccgtaggtaccacgggacgacgggctccacgacaaacacctctctttgagccaccttgtggcggtgtcaatctccttatgcttctcccnccgaagatcatgaggcatcctatggtctcagggaattcttcaatggggacttcctgttctaccggcttcgtcggctctttcttcttttgcttttt

SEQ ID NO: 46311 - DNA, 405 bp, Zea mays
  unsure (1)..(405): unsure at all n locations
nagcttatgaagatanttcatcccaacatgggtctttctttggtgccagagccaacccatgttagtcttatcaattaagcatgtgtcgagttcagctctatcaaaatctactaaatacaactgaccctctaacacacccttaaatgctattgaatcatcatttcttttaaagacagtgacacctacattaataaagagacagatgtagcctattttgcataattgagatacagaaagcacattgtaatctaatgaatctactacacaaacattggaatagaatgggcaggagatctaacaattttacccaatcctttgaacaaacctttgttttcatccccgaatgtgatagctcgcttgggaaccttgattttctcataagaagagaacatcttcttattccct

SEQ ID NO: 46312 - DNA, 444 bp, Zea mays
  unsure (1)..(444): unsure at all n locations
tcgactgcttgcccatgacctaagccggtgccgcctacacctttacattccgcgcactcctctatcgcgccggcaccgaccacccccatattctgcttccccaccgctcgcttacgttgggatcgtccgtcctcccagaccgcgtgggcgcttcttcttcggaatctccgtgggccgagtggcgctgggctaaggattctggcccatggcgtggcggcgcgtcctcacccaggtgagagttctgcctgaccttttcttcgttaccgcgctttattggtgtattgagataccgtggtggcctcaaatcttcnatcttgtgtgtctgggcgggattgcgagctgcgttgttaggctctgcgcatacgaacaacgtctgcagatgtctggtcgtatacatggctatcttgngagctgtctgtgaggatgtctctgctgatgaaacat

SEQ ID NO: 46313 - DNA, 366 bp, Zea mays
  unsure (1)..(366): unsure at all n locations
agctntacccacaatgatgtccaattatagtttacttcttcacatcacggtcagatacgatggtcttgggcactccatgtagcctcaagatttcactgaaaaacaaattggcaacatgtgaagcatcgtcgctcttattgcatggaataaaatgagccatttttgaaaatctatcaaccacaacaaaaatagaatctctcttttttgagtcatcggcagccctaaaataaaatccatgcttatgtctttccaaggaactttatgagtgggtaaaggagtatataaaccatgagggttcacgtttgacttagccttgtgataggtgatacaacgcttcacaaatctgatgatgtctctcctcatctt

SEQ ID NO: 46314 - DNA, 419 bp, Zea mays
  unsure (1)..(419): unsure at all n locations
gacacatataagttaaatgataccaattgatgcatatattttattattataccaactgaagtatatgtcatatgaaaaatatcaattgatgtatcattttcttacgaatgttgtcacacctggatttaatggataaagccgggtgcgtctcatatgtgctgcccagaaaacaacacatataatgacaaattgtatagagataaatgtcacaatatcataatagtaattattacatagtggaagtattacagaaataattggtaaatataaagcgaactaatgttcatctatggcggcataaaattgactgggagacgccacctagatcaacttgtatgcttcattgtanggcgactactcttcgaccacctgctcttcacttgtgggagggggggttatatctcgcaagagtgagctca

SEQ ID NO: 46315 - DNA, 338 bp, Zea mays
tcacaatggacagatcccggaaataccttcctctcatattaacaagaagattctctttgatagttgatttaccataaactgaatggcttggtcgccaggggcgatcttcggagtcttcgccactactgtctatatcataactttcactgtcaccagtatcttcagacagcccctccagaatttccttggtaatcttttctgtgttggacttcgacatcgctataaaaaaccctatgttcttctcttcatcaagactcagcttcatctcagcagcagctgtcttagcagcttcagacatcttcggaagcgcctaaaaactgttttaatagcccgagctt

SEQ ID NO: 46316 - DNA, 306 bp, Zea mays
ctcggacccggcagaactttaccggatgccctatatcaccctcgccggacttcggtcgcccgcctccacgcgtggaccgagcattccggtaagccattttcaaatttcttgcacccacgtcttccctaacacccagtggagctctctgacccgtttgattgaactatcacgccatgagtaggccggattcctcgccgccgacgagcttctccgcctgcgcacgtggaccggccgactccgaccatccccgacggtgacccgcacatcgctgtgatcctcgagacctctcctacgtcctcgaccacc

SEQ ID NO: 46317 - DNA, 353 bp, Zea mays
tacatttcaaagtgccctgccaagaatggctggacacaatcgaagtgatgtgcaatgaaatactcgggaattattctaaaaaagaagaccaaatgatgactgcagccttcggcacccgtccgaagtgaaagctaaaccgagtgatggatgctatatgttttgaatatcctgactacgaacggctaaacaagggtgccgaaggccaaaaaaggaagagagtagctagctctctaaacaaagacgatgaagatcaacccgagaagaaatatcaagagtctgaggcaaaaacaggtattcccaagaaaataaaggctttgactccgaagcataacccaatgatgaaaagaaggact

SEQ ID NO: 46318 - DNA, 384 bp, Zea mays
  unsure (1)..(384): unsure at all n locations
ctatgtcaccatcctttcaaacaccatgaagaaacatgttctatacgtttagctgtttaaaacaccaaccttgagagactacaagtgacgnnntaagtcgtatagtaacaaccttaacaacaatactaaaaatatccttataatcaataccatatcttggttaaactcttctgaactaataatgctgtgtatatgttagcacaccatctgctcttttcttaactctataaatccacttacaatcaatgataatcttncatttttgggaaaacacaaggtgacatgttttgttcttctgtattggctcaaattccacatccatgacttaaacctaatttggatcacgngaatgcttcatctattgaatggtggtcttcactataa

SEQ ID NO: 46319 - DNA, 430 bp, Zea mays
  unsure (1)..(430): unsure at all n locations
gctttggcttctcggtcccaagcaatggaacgtgagttgacagttcaatcgagtgccaaatctcngtcggcaagctcgtcttgcagatgtcggatgtcagatcttaactcatttatgcgttgaccatcctcgacccacacactattcctgtgacgtagctccgtacgaagctgctccacctaggcttctagatctccaatgggatcattattgtcgctgctgctatcctcatgccttggagccagctggtgatgaggcacgccaatcggtccaatggacttgcacgcagtttttctcgtgcgcggcggcatatcttcataagggggaaaatcttattagtataattnttaacatgatgcatgcataaatacagaatcaaccttaggtgatcacaaccttctatatatngcactctactatctagtcttta

SEQ ID NO: 46320 - DNA, 329 bp, Zea mays
  unsure (1)..(329): unsure at all n locations
cctagttgagataaccgccaacaaagcgagtgataaagcttaactcggatcaaacttgacaagtcttagttttaagtttttagcacttaaattcttacttactatgcaattgttggttcttgaaatatgcatgaggtactgcacttatggggagtattcaaaactcaaaacactcatgaanacccctattgcaaggccaaaatgcaaatttcaccatttgcctattttctctaaaaattatctagcctatggcaaaatattttgaaaattatgagaaaatatatgagggtgccaatacctgtcccaacaagtgttattttgtgtgatta

SEQ ID NO: 46321 - DNA, 472 bp, Zea mays
  unsure (1)..(472): unsure at all n locations
cacctgaggcatgcaagcttctccctcttcatctcggcagctntcatttaaattcaatcatttgtccaggcagacagccactttgtgtgataaccaatcacaggagccttggtatcctttcggtatgcacaagtgtagcatccaaagatcttgtgcagcccatcagctctagccttcgtctgatagttgagttcatgcactcggcaaaacccttcaacattggcactctttccttggctttggagacttcatatatacacactaagtctaactatggcattggggtcagttgatgaaggtaaatcttcaacttctttaaaacctcaccaatcatctcatgtagggggaaccaaagtcttgccctgaagaaaactttgaagactatgacttggtcatatatttggtctggaatcacctcttccccacaaaccgaactagtgcatcatcattctctccaaaatatgctagtttt

SEQ ID NO: 46322 - DNA, 420 bp, Zea mays
  unsure (1)..(420): unsure at all n locations
actaagctaatctgagaccctatttcataggcctgaactgtcttaatttatgactctgcaacccaaattagtctagctctactctcgcttggtggacctaacaatgttactttaacctttccatttgcaacttttcttagtacatagtgagcattgaatgcaaaaggttttgagtgctttggcaacggagatggtggtgtggctatggaattgtgggcaaagagtgcttgttttccacactcataacacttgattggcttacgactattgttaaccctgtattgattcgctgctttcttttgcacaaaagaattgtatccaataccactctctgtatttttcatgactgtgttcatgaggagctcattctgaacgtattggcgcttgntgaactcttgcacactagatggcaaaatgttc

SEQ ID NO: 46323 - DNA, 255 bp, Zea mays
cactggagggtaacaaaaagcctcgaacggggggaagaaagctggttttttcttgtctcctttcgcccaaataatctgaagatacccacaggaaccattcctagaaagacaactcagaacacccggtggtcgaagacaccacctggtctattctatgaagccccaagggatcctttggacaggggctattgagatcccgatagacaacgcatatgcgcccatccacttatttttttgaaacaaaaacaggatatc

SEQ ID NO: 46324 - DNA, 306 bp, Zea mays
gcgtccgaaggcacacgcaccaacggtgcccaatgaaattgtcattgaggccatgatcaaggggcttcgtccaggacctacgacccaatacttcgccaagaaaccccctcagaccctggaaaagctgctccaaaagatggatgaatacatccgtgctgataatgatatttgtcaaagaagagaggaagcttacaggttctccgatatgaccagcggcttcggagggagaatccacccaagacatgtaagatcaatccattccactcaaaatgatgatagaggaagtcagcaacagccgtcataata

SEQ ID NO: 46325 - DNA, 305 bp, Zea mays
atgcagctttacatagcaaaacataaaagactacttcttccttctgtcgaagcttttacatagcaaaacatgaaagactactttctctttctgcccgaagcctttacttttacacaacgattcataaaaaaccaattctcttttttgccgaaacaaccacttttgtacataaatgctatgaatgaatgcttatgtatggcaatgccatgatgtaatgtgcaaatgaatgtgcgaagcgtatatccgaagccacactcattcctcattttcttaggaacagaacacaacgtagctctgcattccct

SEQ ID NO: 46326 - DNA, 457 bp, Zea mays
  unsure (1)..(457): unsure at all n locations
gacactatgaatactaagcttctaaaggagaacacgtgataggtctaactaatgtaactttcaaaatagatagaccttgtgcagcttgtcaagcaggtaaacaggtgggaagctctcatcatgccaaaaatgtgatgacaacatcaagaccccaggagttactttatatggacctcttcggacccgtcacctatctaagcataggaggaagtaagtatggtcttgggtatagtgaatatttttcccgcttcactngggnannncttttgcaggataaatctaanacccaagggaccctcaagcgctctctaaggagagcccaaaacgagtttgagctcaaagtgaagaagataaggagcgacaatgggtccgagttcaagaaccttcaagtggaggagtatcttgaggaggaaggaatcaagcacgagttcttcgctcctacacaccacaagcaaat

SEQ ID NO: 46327 - DNA, 462 bp, Zea mays
  unsure (1)..(462): unsure at all n locations
agcttgccagtacttgtcaaagcaacaacatttattagcacagctactgcagaccataccagtaacttggctgttcgcatgctggggactggatatgattggacctttcaaaaaatctcaaggaggatacactcatgtactggtagcaatcgacaaattcactaaatggatagaattcaaacccattgcttctttaacctcagctaaggccgtggaattcatacaagacataatattcagatttggaataccaaatagtatcataactgacctaggatccaacttcacaagtttagagttcttcgatttctgcaaacaaaagagcattcagatcaagtatgcttcggtggcacacccaagagccaacgggcaggttgaacgagctaacgggatgatattagaggcactcatgacnaaggtcttctataaaatgaaaagtcgcaggacatggataaggagttg

SEQ ID NO: 46328 - DNA, 417 bp, Zea mays
  unsure (1)..(417): unsure at all n locations
gtagcaacctcatgtgatgnattggttcaagaagagctttctattctacatgctgaattgactgaaaaagttgaagtcctgactttagacaatncaaaattgaagaattatttgactgatgcaactactagaggaaaagttgctattgagaacaatgatttcaacaatgagttggcagtggataatcaaaggcttaagaatgaggtcaagaaattaaaaagtgaaaatgaacatcttgcaacaagtgtgcaaaagttcaacaagggtcaatacctccaaaatgagctgcttatgaacactgctatgaaaaataacaagagtggtattggatcaatgcttttgtgcaaaagaaagctatcactcaacacaagccaatgcagactcacaagcctatcaaatgctctgagtgtggaaatg

SEQ ID NO: 46329 - DNA, 362 bp, Zea mays
  unsure (1)..(362): unsure at all n locations
agcnttacaaaagggaatatccattttccatctgaacgctagaacatttntaaatgttcctaatcaacacaatatttagccagtaaggctatctctagtagcctcatacccgtattcaaactccactctgcgaacagtgcattctacagtgcaaaacagtgttttgagtgaccatatatgtgaactgctggacacggacaaaaaggatctttatttaacgctccaaagaggatatgatagtgaacaaatacacatacctatctcatcatagtagtcgcctttgtcgtacccataaggatcaaaaacatatttactgaaacaggtccctatctgatcaatttcttggtatcccacagcatgct

SEQ ID NO: 46330 - DNA, 490 bp, Zea mays
  unsure (1)..(490): unsure at all n locations
actcagcttgaggcgtcattggtggctactcgggtagactccttcttttttcttctgcgccttgaatgcgacgggttgagcttcngatgtggtgggttcatcaagctcgttgattttcctcgagccttcgatcatgcactcaaaacttacaaaatgcccgattacttcctcggnggtcattttagtatatctaggattaccacgaattaattgaacttgagtagggttaacgaaaataagagatcttagaataaccttaaccatttcgtggtcgtcccactttatgctcccgaggttgcgcacttggttcaccaaggttttgagcccggtgtacatgtgttgtggctcctcccctttgcgaagccggaaccgaccgagctcccctcgatcgttttccgctcggtgatctttgtaagctcatctncctcgtgcgcggnnttgagcacatcccaaatctccttggcgctcttcaacccttgaaccttgtata

SEQ ID NO: 46331 - DNA, 379 bp, Zea mays
agcttgggaagattcttcattccaatgtgggctagtcggcgatgccagagccaacccatgttagtcttagcaattaagcaagtgtcgagttcagctctattgaaatcaactaagtatagctgaccctctaacactcccttaaaggctattgaatcatcacttcttctaaagacagtaacacctgtatccgtaaaaagacagttgtaacccattttgcataattgagaaacagaaagcaagttgtaacctaaagaatctacaagaaaaacattggaaatagaatggtcaggtgatatagcaattttaccaagtcctttgaccaaaccttgatttccatccccaaatgtgatagctcgttggggatcttggtttttctcgt

SEQ ID NO: 46332 - DNA, 467 bp, Zea mays
  unsure (1)..(467): unsure at all n locations
cgtacatggatgataatagngtattcttagtcatactaatgtattcaaaacgtngctttacaaaattcaatcgaatacttttcggtctagaatactacaatattctaatatatcatagtattgtatgaaattctaaataaacatcattaccaaacatgtccttattactaataaaactattaaactgatttaatttgtgtgaacaaagaattattaaataaaccatagtaagaaaaaggaaggcacattgatcccctagccgaaccaagagatggtaatggactcgattcttcacgagaaattcctccattaagggatagaaataaacaaggttcttccctgatgggaatgtaaacgggaaaatctcccacttcgacgggtaaacagagacgggatggggaagtattccccatcttccgttcacgtggggaccattagaattacatgtgacgatgctcgtatataat

SEQ ID NO: 46333 - DNA, 281 bp, Zea mays
agcttgtggcgccctctggcgtcttttcgcattttaattaccaagtctcccactcggaagcctcggggccgaacccttctggtgtggtagcgtcacagagactgctgataccgcgtctagtgtagtaaggccacgttccgagcctcttccagctggtccaatgaatcttctcggctggtctggttgctatggtcgacgaaagcctttgtcctcgaggaacaatattctaagtccgtgggtaggatggcctcagccccatataatagaaagaacggtgagaa

SEQ ID NO: 46334 - DNA, 471 bp, Zea mays
  unsure (1)..(471): unsure at all n locations
tcctccagcattnttgagcccctcaggcatccgaagatagctatatgtgccactcggggttatgaagctagttttcggctcatctttcttcttcatctagatttggtggtagcttgagtaacaatctagtagactcatgagctctgacgaagctgctgcatctactagagaatctatccttggcaatgggaactcatcttttgaacaagctttgttaagatttgtaaaatcaatgcacattctccatttaccattggccttcttcaccataacagtattagctagccactctgggtatttgacctctctgataactccagctctaagaagcctctntacttcattccgagcaccttcagctttgtcatcagacattntccanagcctttgttttcttggcgtgaaagatggatccacattgagtgaatgctcaatgacataactgttgacaccgcanagatcattagctga

SEQ ID NO: 46335 - DNA, 371 bp, Zea mays
  unsure (1)..(371): unsure at all n locations
agcttcngcttatcgcaagggcggtgatggtttattgtactgacttaatgggaaatatactacttagtcctcgactgattactccttagtcagtagtaagtgtcaaggacatggatgtaattttacccacgctgtgtcctgtgcctataaatatatgaacaagaacatcgtactgttcacgctaaattgtaatcactctatcgtcactcccgctttttcaccttccaccaagccgaaggtataaaatgtaattcaatattattaatggttgttcatgggtaaataatgagaatatgaaaaggctaatgagttaataatcgtattattcgtgttccttatcatgtttcatatgtctcttccctttctattac

SEQ ID NO: 46336 - DNA, 360 bp, Zea mays
  unsure (1)..(360): unsure at all n locations
tgagtcaatcattntgcaaagaataaatgatgctcataaggattatcttggtatgaagcacatacgagagaagataaaggctggagtagccaaatgtttcaaggaagacgatcacagtgtgatatgtgttaaaaaccgcatatttctgcaagnnaannaagagcttcgtcagcaaattcttgatgaagcacatcttaatcgctattctattcatcccggaagcacttagatgtaccaagatttaaagcaacattactggtggacaaagatgaagatcgaaattgcacgctatgtggctaagtgtgacacttgcagacgtgtcaaggccatacacatgaaaactgctggtccattacaatc

SEQ ID NO: 46337 - DNA, 430 bp, Zea mays
  unsure (1)..(430): unsure at all n locations
agcttagtcagcaaacctctggtggtccctgtttcctgaactctatcgggagagctgctgtagcaatccccgaagccgtgtgccgtttatcttgtcgggcatactttatttgccgagttgcagttattaagcacagggaggtgcggaatgcacttcgggcgtcgaagatatttttgctcagattccttgcgtctcaataattgtccttttgaatcccagatattatcaccggccacatttctgtttgtactgctactctacccctgaaagaaatagatttctagactaaataatatttcaaaataaatcaaattttgcgtcataaccatctattagaatagatttctatacaatctggttcaaaataaaaataaaattttacgtcttcaccatctattagacatttantcttatgagttacaacggcaac

SEQ ID NO: 46338 - DNA, 259 bp, Zea mays
atgcttctgctgagtctgggaatatattaagagtttatcattgaacaccactttcaacttgtctaggtgagtcatgaacacactcgttatcaaatacattgaagaagctggcgcatttgtcaaaccaaatgacatgaccatgaactcctatatcccatatttggcgataaaggctgctcttttggatgttctaaagcccgttcttatctgatggaaccttacctcacatctatctttgagaacacccccactcctctca

SEQ ID NO: 46339 - DNA, 427 bp, Zea mays
  unsure (1)..(427): unsure at all n locations
tgtaccccgctattccatacatgaaaagacaatcgcgcactgttgcgttgagagatggcgagagtggcacgtttcctcctgtgcacggaacgtcctaatagggtggtgtactttcgggtggcgcggacctgttcatgcagtggaagattcgtgcgaatagtagacatcaacgtttacgaataacatatgtcgtgtggttagaaatccctagctgagaatatcgattctgatcgccgntatatccccggacagtggagacttgagctctcacctacaacctaagtcaagatgtgaacactatggataaaaatggtgttgtatctatgagatgatgaaattagactatatgcaaacagagtctattatatatttaatctggcgttcatatattgacagaacgactcactttagcaagctatctcttgca

SEQ ID NO: 46340 - DNA, 390 bp, Zea mays
gcttcttctcatcgtcgatgagcgacgccaacgcgagcgcctcctgccagtggtgtttgtttggggtttccaagtaagaaacatggattcatctttggccgtggcttatgaaaatgactcacaagtcagatccatggaaaaaatattatggagaataaatgtcacacatataaaaaaggaatttaagttgaaaacttattcaaacaaaagaaagtgcatgcaagactcttctttaaatactactctctccatccaaaaatataattcgggaatctcgttgataattatctactactacacattgtgcaagggtagcaggtgagctttgggagagatgtagatatttttactgtaacagatattgacataaacatgtgatgtagtggtagc

SEQ ID NO: 46341 - DNA, 243 bp, Zea mays
cttctcctccggtgccttgaatgcaacgggttgggcttcggatgagtcgccaagctcgttgaatttcctcgagccttctatcatgcactcaaaacttacaaaatgcccgataacttcctcgggggtcattttagtatatctaggatttccacgaatcaattgaacttgagtgggatttaaaaaaatgagagatcttagaataacatttaccacttcgtggtcgtcccacttcttgctcccgag

SEQ ID NO: 46342 - DNA, 394 bp, Zea mays
  unsure (1)..(394): unsure at all n locations
ttacgtctcaaagactcatgttatagagtaatctcactctgaaagtgtgcatacagctttggatacctgtangagacatgcacttcttattgatatcaagaggggcagattattcataattcgagctttggcacatataagttaaataataccaattgtacgatataacatttgaagcattagcgccatttacttaaggatgttaaattaactatgtgtcgtgcttaattaaatattctacaccacgtaggttcgctggtgactatgacatgagaacgagcaatcctaccatgtgatttaccttgtatgcatgcattgttaatctaaagtaagtaccatatgaaatactatgcatgataggtaaactacatataagacaatagatacgcatatc

SEQ ID NO: 46343 - DNA, 220 bp, Zea mays
  unsure (1)..(220): unsure at all n locations
tcaagctgctttaaaataaatgtaagattatgttattcgcttccgcatttcttcatctccgatgttctgtaatgtctacaagacgggtgagacgttcctggtaaggtaaggaaagataccgaacttgtcaagtagtcaggggcacctacagggttgtctaaagtccgttggacaaggacaactgtangtgggcctaattacttgggaggttctgtcacac

SEQ ID NO: 46344 - DNA, 346 bp, Zea mays
tctaagggagaacatgtgatagggctaactaatggtcatttcgaaatagatagaccttgtgcagcttggcaagcacggaaacaagtgggaggctcttatcacaccaaatatgtgatgacaacattcagaaccctggagctggtacatatggaccttcttggacccgtcgcctatctgagcctaggaggaaagaagtatggtctagttattgttgatgacttttcccgcttcacttgggtggtttttttgcaggataagtctgaaacccaagggaccctcaagcgctttctaaggagagctcacaatgagtttgagctcaaagtgaaaaaaataaggagcgacaacc

SEQ ID NO: 46345 - DNA, 333 bp, Zea mays
  unsure (1)..(333): unsure at all n locations
agcttgagcgctcanagtctatgtctaagtttgtctttatagacctcctctgtaacgntgnatgtctccccctttatagctaaggggggcatgtacaagggtactgagcctcgacatgtgtgtccaggaacataacggatgtagtacttagagctagtaatgttcgctactggagcaaccttcttgcgccctgacattcgaaatctgcatcgtatcaccgtgtaggggaagcttttcgcataagggatgatggacacagtgcgccgcgcatcacggtcgcatttgtaatggacacagtgcgccacgcaacacgggcgcactgtttgacaatgg

SEQ ID NO: 46346 - DNA, 447 bp, Zea mays
  unsure (1)..(447): unsure at all n locations
ctaagctcctaaagggagaacatgtgataagtctaaccaatgttcatttcgaaatagattgaccttgtgcagcttgtcaagcagggaaacaggtgggaggagcgcatcacagcaagaatgtgatgaccacttcaagacccctggagctgctgcatatggacctctttggacccgtcgcctatctaagcataaggggaaagaagtatggtctagttattggtgatgacttttcccgcttcacttgggtgttctttttgcaggataagtctgaaacccaagggaccctcaagcgctttctcaggagggctcaaaatgaagttgagcctcaagtgaanaagataaggagcgacaacgggtccgagttcaagaaccttcaagtggaggagttccttgaagaggaagggatcaagcacgaagtctttcgctcctacacaccacagcaaaatg

SEQ ID NO: 46347 - DNA, 357 bp, Zea mays
  unsure (1)..(357): unsure at all n locations
agcttgctggcttctcgagctatatacacttgtgcccctctctttcctcaatnactagcccgcaatctctctgctagggtttcgcttgctccgttccctgtccacactaccgccgtcggtcatggtctggcacctattaacacgtgtgcctctttcgttcctcattcaatcgcctgcaatctctctgctaaggtttcgcctgctcggttccctatctgcactgctgccgtcagtcatggtcccgcacacgctttggcggatggtcgcaacgcactgtctgagccacgtccctgtcgacgaggctaacgtgtttgtggtcgcggcgcactgctggagggaatattgtgtctaaaagtt

SEQ ID NO: 46348 - DNA, 458 bp, Zea mays
  unsure (1)..(458): unsure at all n locations
aagcttaccgtacnatggtataagttggtaatggagatagagtgttttttatattattcagncttctggccattgagaaccaaacactaaacatacttggccttctttcaattttgttcataagggaaagaaatctctaactttatggttagtgagccccataggtataccaacgtaagtgaagggaaatgagtcaacctgacaaccgaatactctaacaagctgagtagctttggaagcatccaaattgattggaaggaggcaagattttttgtattcaacttctacccaatggaagtagtgaaagagtgaagaattcctaaggcacaacaagtcatgttgtgatgctcttatgaccaaaagtgtgccatctgcatattgaactattgaanattgatttgccatcatggtctaaaggtatgaaatcaccccatttgagcagttttgttgacatgtat

SEQ ID NO: 46349 - DNA, 366 bp, Zea mays
ggaccttaagcactgagctgcacttatgtacatcagccctgtttcttatatgatattggcctacaatatgaaggccggggcacctcactgctaggatgggagacttctcaaaacacttggggttcttctcatgacaattgaagtgctcttatttagaagtacctttagacaaactatgcgttatagtcacaagcaatgattcacgcacggaagaactgctattattgacaatgactctatcaagaggtataagatatgagaatggcatgctacaattgtttgttgacagaccactctcaacttggtatcggacattagactatgaaaaggaaaactgcgattataacacccttgctacacaataat

SEQ ID NO: 46350 - DNA, 340 bp, Zea mays
  unsure (1)..(340): unsure at all n locations
caaataagcaagtgtcgagttcagctctatcaaaatctaccacgtatagctgaccctctaacacttccttaaatgctattgaatcatcacttcttctaaagacagtgacacctacatcagtaaaaagacaagtgtagcccatttgacataattgtgaaacggagagcaaggtataatctaaagaatctacaagaaaaacattgtgaaatgagtggtcacgagatatagcaattntatccaaacctttgaccaaaccttgtgttccatccccgaatgtgatagctcgttggggatcctggttttcttataggaggagaacatcttctttctccctgtcatg

SEQ ID NO: 46351 - DNA, 446 bp, Zea mays
  unsure (1)..(446): unsure at all n locations
agcttctgccatgacgtgaatgtccctggccggagagaatagtaccatgtctgggccacacttcggactgccatgaagaaggacttcgccatgactgtggtattgcccccgtacgaagatatagttgcttcgtagctcaataagaactgcttcggatctgattgcccttcatacatggggagctgaggtggcttgtatgatggggccatggggtagcctgtagttctgctgatagaggagaagcatcatcaaaagcaaaatttccatgatggaaatcatcataccaatcatcatcattgtaggaattatcttgatgaagctctctntgtggaggtcttcggtcctggtcatcttgagtaagatgacgtatttctcagtagcttcatcgatcttttctgtagatcggaaagacaagcattttctctctcttcttttgactgctgatg

SEQ ID NO: 46352 - DNA, 358 bp, Zea mays
  unsure (1)..(358): unsure at all n locations
tgggaagggtcttcatccccacatgagctaagcggcgatgtttcattcttcccatgctagtcttagctattaagcatgcatctagactagcttcttcttttgcaaaatcaactaagtaaagtttgccgtctaatacacctttaaaagctagtgaaccatcacttcttctaaagacagacacatctacatttgtaaatagacagttatatcccatattgcataattgactaactgatagtaaattatatcctagagactctactaaaaacacattagagatagagtgctcattagaaattgcaattttacctaacccttntaccttgccttgattcccatcaccgaatataattgaatc

SEQ ID NO: 46353 - DNA, 347 bp, Zea mays
agcttccttgaggaggagggcatcaagcatgagttctcttctccctacacgccacaacaaaatggtgtattggagaggaaaaataaaactctattggacatggcaaggaccatgcttgatgagtacaagacaccggaccggttttgggccgaagcggtcaacaccgcctgctacgccatcaaccggttatatctttaccgaatcctcaagaagacatcatatgaactcctaaccggtaaaaagcccaacatttcatactttagagtttttggtagcaaatgctttattcttgttaaaagaggtagaaaatctaaatttgctcctaaaactgtagaaggctttttact

SEQ ID NO: 46354 - DNA, 468 bp, Zea mays
atagatagggagatctagtctatcaatcttactataatcctagtgacaaacactgtcatcgatagtgaactaaagaagagatggagattagtgaaggttttcctttgtttcttggcataccttgatatgtcgtaagagatggcccatgcccatagaagaatgagcaaggctaacatggccacaatgaaagcatctgacaccggttcttaccctcttaccattgatgtcctcgtagatctttttgaagtcattccatgttatataggttgtcatctagggcctcttgccgctgcttacggtggcaaaatcaccacctgaacatcttcacaaacaccatcaccgacattgagaggattagaatcaacttcaatgtcactctcatcatcaccatgcaggacacacattcgaaggtcatcattaatggagtggtcgtggtcctcatcgtcattgcccatcactgaagctctg

SEQ ID NO: 46355 - DNA, 244 bp, Zea mays
  unsure (1)..(244): unsure at all n locations
accaagacacgcagcatgcaancagcgggaaaaaaaaaattttaacaaaaacaacagaccgtggcgagcaacccgtcggaggaaaccaaccgaaagcacgctccccgaaaggcttcctgaacgatgaaccaatggtcaccacaaaaaaataataaaagaaccgaagaatgaccccaacacaacgccaacaaacacaaaaaacgcccgcggaacagggacgccaccacccctataagaagggaaa

SEQ ID NO: 46356 - DNA, 439 bp, Zea mays
  unsure (1)..(439): unsure at all n locations
cgtgcaaagcccactggaactgaccttctgagaaatccgttttctttgccacatgttaccagagggtccaactcacaaagcaatgtacgaattcaaaataattgcagaaaatatcggtacaagggacctggtccacgaattcttggctttcaaaattntccctattgtaaaagagtgggaaatgccgaagctggagggggaaaagaaaaagggtgaacttgttcgtctgccttatcactttaaattcaagaagtactttaagaaaccctgcaaagagtggttagacacagttgagacaatgtgcaatgaaatcttggggaattactcccaanaggaggatcaattaatgacagcagcctttggcactcgaccgaagcgaagactgaaccgagtattcgatgccctgtgcttcgagtacccagattatgagcagttgaat

SEQ ID NO: 46357 - DNA, 396 bp, Zea mays
  unsure (1)..(396): unsure at all n locations
agctngagcaaagtaaatagcttctgttgatgatgcagtatacaagcttcggctttggtcaatattttggcagcaaaacagcgcaatagcaatgaatgttgtggtaacttcacgcctattcctctgtttatttattgccccaggtggaaaggtgaatggtaaaggctttctgttccggacaaacagccacccgcactcactgaacggtgggccacagggtccgggaaggtgaatcgccacggcgcgcgtaactgctgcaagatggggccacctcgcgcgcggcttattttaattcgtttctcgccaacgagctcaaggaaggtgtttttcggatcttctgcatcccgaaacctataagactttttcacggatcaagctcgttacaaaaaacgatct

SEQ ID NO: 46358 - DNA, 409 bp, Zea mays
  unsure (1)..(409): unsure at all n locations
cgctgcatacatgggncttcntattctctttctccatggtttttatcttactagaacactatcgcacttaanaagaatgtgggtagaactcttgaatcttggggatttcaactccttgaaatacctcataacatgggtgttatggggcttcttctgttgctgctgcttgagcacgttgcggagagatggctgacacaaggttgattttggggtaaccttcttctcatcttcgctatcttattttctcttttcactacctctttctttctctttgctcttcccactgaagggctctatcaaagagtattaccatcacatagaagaggaaaccaaagagtatgaaccatgtagcacagaattcacccaagaatcaccagcattgtgatctcanggcgagggagtggaaaaa

SEQ ID NO: 46359 - DNA, 58 bp, Zea mays
ctataaaactaagcttgctgcctagcgtcactctaagaaccctggtctttctctattc

SEQ ID NO: 46360 - DNA, 352 bp, Zea mays
  unsure (1)..(352): unsure at all n locations
cgaccggatctttatcgacgagctgcgcttaccaaaaactaaatttaccctttatcagcccctcatgtggggactcattgggatttctgaatttcagaattctgaaattcagaccttgagccaaagatcagggatgttcaccttgatccctaactcgaatcctaatggccccattgacaaaattgtgtctaactaacccctctgtcgtgtgccaaaagatggcattgggacgcgagccctanacaccacaaaacccttggatttgcctctggtttgggcagggagacagaccatattttctggctccattctctgaaccagtatgcaaatcctatgacccccacacaaaatg

SEQ ID NO: 46361 - DNA, 377 bp, Zea mays
  unsure (1)..(377): unsure at all n locations
acaatatgttgcaaatggatctacaagatgaaacatgactccaaagaggatgtggaaagatttaaagcaatacttgtagctaaaggtttcaattagagaaaaaaatgattataacgagacctactcacctattttgacaaaagattactttagagttattatggttattggcgcttattatgatttaaagttgcatcatatggatccaaagacaacattccctaagggattgtttggttttatgctaatccatgtggattggtattgagtcggtttaaatccatagcaagtcaaaattcatcctaatccattccaatacactccaatccacatgtaattagaataaccaaacanagcctaagtaaaaaattatttat

SEQ ID NO: 46362 - DNA, 394 bp, Zea mays
  unsure (1)..(394): unsure at all n locations
acagacattcttctctatttgcataagagcaagacagagacgcacacttagatttctctaataacgtacccttcagaatatggatgttttcttccaaattccagacactgcttaatagtgtttaccgaacttattttcaatgaccttcacactctcataaaccacatgtccacacctgcgtgatggagcctttttattttcaatactcccatcaaatgcatcaacaattcttcggtatggatgatttctgcgtgtccacctacgatgtcccaggtatacaatgtttctactgctnttagataacgactcttcgaattctcttgacaaatatagcacgctttgtatccctgagtggataatcctgcaatgtttacaacgcctttatagtcatgga

SEQ ID NO: 46363 - DNA, 335 bp, Zea mays
  unsure (1)..(335): unsure at all n locations
tgcggcatgcaagcttctaaagggagaacacgtgatagggttatacttattctctatncgaaaaagatagaccttgtgcaacttgtcaagcagataaacaagtgggaggagcacatcatatcacgaatgtgatgacctcatcaagacccttggagctgctacatatggacctcttcggacctgtcgcctatctaagcatatggggaagtaagtatgggttagttattgtggatgacttttcccgcttcacttgggtattctttctgcaagataagtctgaaacccaatggaccctcaagcgctttctaaagagagctcaaaacgagtttgagctc

SEQ ID NO: 46364 - DNA, 236 bp, Zea mays
  unsure (1)..(236): unsure at all n locations
ctaccaccgcagcccgtctggcattcttcagcgatgcatatccatcgctgaatgccangagctcttacaagaaatacactccgcgggttgcggtcatcacgcagcggctcgagcccttgttggaaacgctttccgacaatgtttttactggccgaccgcggtggtcgacgccactataattgtccgcatctgccaaaggtgtcaattctatgcaaggcagacgcacctacccgctc

SEQ ID NO: 46365 - DNA, 340 bp, Zea mays
  unsure (1)..(340): unsure at all n locations
agctnnggcgatgggtaaaaacttcggcagcttatcatgtcatattgcagtacatgctcgggtaacctcacacctactcggctgattatatagtgccgcagggtagaaggcgaagcgccaagagttttacaccacgcggacacccgctcgcactcactgtacgggggaccgcagtgaccgaacaataactctgcaaggtggggccgctgcgcgcagggaaatccgatcgtttttcgacaacaagctcagggaaggtgttnnttgagaccctctgtgctccaaagcttaagaaacttttatttcacggatcaagctcggtacaaaaaacgatctaacaccg

SEQ ID NO: 46366 - DNA, 342 bp, Zea mays
atgcaagcttgacctgaagtaatagacaactatgcttctacttaaatattgaataagggagttatgctacaatccagttatgcaggcatattaattcagtattccctagacaaatataacaagcttgactttaactcaacttgtttaatatttataaatgaagggtcacatcctgatagtactaattttcaaggggggcagaaacaaatgagatgcagcccgacagaatatttccgaattccaacttctgacagaagttatgtgcagtaggtgtttgtttggtcattgcgagaagtatgaataagccactgagaaaaaaaattaactatgttaaatggcatg

SEQ ID NO: 46367 - DNA, 184 bp, Zea mays
aagctttgacttggggcccgcctggtgtccggtgacaccggacaacttctgttattgtccggtgcgccggaatgggcgcgcctgccttctgcgcgcgcagagcgcgcattaaatgcgcctgaagtaacccgttgcgccgaataaccggtgcttcggagtcgcaccggacagtccggtgcacacc

SEQ ID NO: 46368 - DNA, 435 bp, Zea mays
  unsure (1)..(435): unsure at all n locations
agctcttaatgagcatttcaaacttaataggtctgctgttctaacttctaaccacttgaagacagcgaagaagaagtacgttaagattaatcaacttatggctgaaagtgggtctggttgggatgaaaaattatttatggttacaatggaccatgagcagtacacaacccactttgcgggaatatattaatggtggttttatccttcttttgcttggattattgctgtcatgtgagtactaacatgggtgtttcatgctagaatgacacgaacaaggcggatgatgagtacatcaaccaaccattaccttactatggcgatntaacaacaatatatggtaatagtacaacaacacgaaggtttgtgaagacctcaaatgaccctctttgagtagatgaagttgataccccacaagaaatggagaacatcgggaca

SEQ ID NO: 46369 - DNA, 435 bp, Zea mays
  unsure (1)..(435): unsure at all n locations
ctaagcttcaaagggagaacacgngataggtctaactaatgttactttttgatttatatataccttgtgcaacttgtcaagcagggaaacaggtgggaagctctcatcatgccaaaaatgtgatgacaacatcaagacccctggagttacttcacatggacctcttcggacccgttgcctatctaagcatgggaggaaagaagtatggtcttgttatagttgatgatatttcccgcttcacttgggtattctttttgcaggataaatctgaaacccaagggaccctcaagcgcttcctaaggagagctcaaaacgagtttgagctcaaggtgaagaagataaagagcgacaatgggtccgaattcaagaaccttcaagtggaggagtatctngaggaggaaggaatcaagcacgagttctncgctccctacacac

SEQ ID NO: 46370 - DNA, 398 bp, Zea mays
  unsure (1)..(398): unsure at all n locations
agcttgtcagatgatccgaagcttatcgaatgatgatgaagctgnaaaccttgttgtgaaaaaactctagaaaaactcttgtattatccttgtaaagaatattgtaatttaagaatcggatactattctgtaaatttgtccataccttgtaatatatttttacctttccgtccatgtatgaactactttgatgtggacaaaacttgtatttnttgagccgaaggcgaaaaataccttcccttcttttcgtacacaacgaagcataaatntgtttcctttcctttcgccgaagccttatgcttagagctgaagcaactgtctgtatctgtatgatatgatgatgatgatcctatgtatgtctaaatgaatggttatgactgcaataaatgatgtgatgt

SEQ ID NO: 46371 - DNA, 490 bp, Zea mays
  unsure (1)..(490): unsure at all n locations
ctaagctttcctttttctttntagcagaactttgagaaactgtttattatggtatgaaattcctaanaatatgagaccaattctcttagaaccctaatttactgtagtaattaataaaaataaactcatgattttaaggggaaataagaaattntgaggcatttaaaatagcttaaactaacagttctggatttttaaaaattaaatgataatcccaaaattgccaaaactttttatgtgagcttttcacattatttagaagccatgggtagagtttggtttgatttgaacattgtttgataactagaacccaaaacccctacccctgccctttgaactcctttaccgactccggaaaccctaagttcccggaactccgtgaagaaaagttgtactcaagacatagataataagtttatatntatcttgcatcctcatgagcatcccatggcatccattcttatacttgtgaatggtatgaatagaacgt

SEQ ID NO: 46372 - DNA, 315 bp, Zea mays
gaccaagcacgcgcgcaccgcagaaaagggatagtttgcataaaaccaagggagatccaggcaggcaccgcgcgcgcagcctctcagggccgcgaccacgcggacttactcccgacagcccaaaggcgtgccacgtggacagcggcggcagctatgaccgggaagatcacaccgagacgcatgcagtgcccggccgcggtcggcacagtggagccagcatgaatgcagcaaaaggggcgtatagacgtgccgtggcacgcacagaccaaccatggatgtacgaggggccacgcgccttgccacgcgcgacaaaaa

SEQ ID NO: 46373 - DNA, 479 bp, Zea mays
  unsure (1)..(479): unsure at all n locations
aatacacanantctccccctntgacagcaaacaccatatttcattctcagcaagaacatatgatgatgtctagggacagcatggtgttaatgagaaaaacgactatcaaaactccccttacttattgaacatatgccctatcaacatatatgcaaagagattaatacttccttttgtacctttaccatgttggagggtacttcccatcttgaaagtatttaatctctcgagagcttctccacacttgtgcctgattctttatcctaactttttttgttgctaagacaccaaacttagaacaagttatagtattgcgcataagaagaaacttctattctaatgattatcaaaagatgtcaaatgaagcatactatcacagctaccatatgaaagataccaattgcaagttcatctattatcatggctccatgatatttaagaaaagcatctatatcaccagatgagccatctaagatata

SEQ ID NO: 46374 - DNA, 287 bp, Zea mays
aacttaagcaccgcggctgcagctctcagacaccagtattgtgttttttatacatttccccgctgtctattgtcgtgacagaatcattgttgcccatttgattttggtctaaagaaaccgcttactaaccaagaatcgataatcattaaagccgctcttatgcgcggcacattgatgggataccaaactaaaatgttggagatggaggggcggtgtaatctgaagggaataggcttcacctagtcctaaatattttggtggtgaatcgccaacacaatattggactg

SEQ ID NO: 46375 - DNA, 304 bp, Zea mays
  unsure (1)..(304): unsure at all n locations
gcctatgcttntcgccatctctcggcagactgatttctctttgttatcaggccagcagtatcagaagtcatcttcatttgttccattgaatattactggcccctttcggatatttcagctcctttgcattaaggctggcctcatgaggttcttcctcagatagctctttcccccaagcatgtcgtatgatgtatacatgcatgccggcaagtgcttcggagatgacggtgtccgcttcttcaactaatattggctccggaattaaactgcttccgatcaaaaggttgctcttcgaagggctctg

SEQ ID NO: 46376 - DNA, 351 bp, Zea mays
  unsure (1)..(351): unsure at all n locations
agctntggccccacctgcaggctcgtatgctcttctgttgtgggcttagggccactgtcagtacctgaaactagggtaccccttactactgtataaagacacagtatccacgcggctatctttattcccatggtaaaagagctgtatgtgggaccaagccatgactcgccccagcctcgggtgactactctaggccaggaacagcgcctgaccccaccacatgggcgcgggtctggggccgtcacgtgtccagagaaagtgatttactccgaggcatcaacagtgagtccgaacccccatgggaaagagccggacccctggatatacaagtcggacctccaagtttggtcc

SEQ ID NO: 46377 - DNA, 347 bp, Zea mays
  unsure (1)..(347): unsure at all n locations
gattattattanaaacagattcaacaaataagaacataaattgaacaattctcatttcatcccttacctgcaacaatgagagtatcatcaagcatatattttagtctcttcttgatcactctaattattctattgagaagatctttctctttacttaaattaccacgtatttgagccatggctgtcatcatctttggaagaaatctagctatagttgcatttntttgttgatcagcatagcgaagcacaatataaattggtgtgacaacattcaacaccaattccatgtcactccaccatcttctatttaacaaacaatcattngtaaatgcatgaactgcttcatc

SEQ ID NO: 46378 - DNA, 377 bp, Zea mays
  unsure (1)..(377): unsure at all n locations
tgaggctgcaagcttctaagggagagcacacnttatgatttatctatgttcatttngaaaaagacagggattgtagcgcatgccaagcatgaaagcaagttggagcccatcatccacacaagaacatcatgacgaccgacaggccgcttgagctactccacatggatctattccgaccgattgcttacataagcatcggcgggagtaagtattgtcttgtaataaaggatgagtattctcgcttcacttgggagttctctttgcgggaaaaatatctaacccaacaaacctttatgggagtcttgagacgagctcataacgagatcggcttacggatcaagataattataagcgacaacggggcgaatttcaagaac

SEQ ID NO: 46379 - DNA, 434 bp, Zea mays
actaagctgcttcactcggacacaccaagcaactgtgtattgttttttcctaccgccacaatttcacagccgccaagaaaatgctcctcgacgacaaacaatgcaagaggtccgaccggttgcccgacaagggctgggctctgaacacaactgagtgcatggcgactgggttcacccctttccgacttctatacggatcggaggctatgactccgcaagaaatgaaacatgggtcgcctcggacagctgcgtcggtcgtgcccgatgtaaacgagccgacttcgaaggacctcatcgacggagaccgcgtcttcgccctatatgctctggacaaatacccagcccagacaaaaacatggcgcgaccacacagtcatcccgagggagttcaacgaaggagacctatactcgttcggaagctcggacagaatccca

SEQ ID NO: 46380 - DNA, 412 bp, Zea mays
agcttctagcggttcagcaacaatttcattgttatatctctgatgacaaatataaagcttagaggtaaagaaaagaaccaattaactattgtaagaaataattatggatttatgacttgtagacactatatagtaaaacatggttacttcaatttgcactcattttgaagcaaagaaacatggttcatttattttgcaaggcaagtacttttaacaataaaatattattctccttcctttatttcaaagtataagacttgacttttccgggtacaaagcaaaagcaaaaaactatgtacgtagaaactttgtagaaaataatttgagatggaaggttacagaaaataaattaagatcatctagataaagacaactcgatcaaagagggtgaagtagttgcaacaattggtcg

SEQ ID NO: 46381 - DNA, 442 bp, Zea mays
  unsure (1)..(442): unsure at all n locations
tggatattattcattacaacactaccgatattgttgtgactatataacattcttcttcacgaagcatgaacagaacggaaggtgtttttcttgtcaaagactcaaaaacggtacgtgtgtaaaatttcatgcatcgtaaagaattgaacaataaaaacaggtatattacattcagggttacaaaatgttacacatattacatttcagaagtttttacaatggtacttaatcctctctcataacaacctctgcagcttcgttcaggagccgattgacaacttcatccatgatagcctcagccatctttttaatgtcgtcgtctcctttcgggtgaaagtcggagacgcttancacgatctgacgaggacggatatgctacttgctatacaaatgcaacgagttaaatccaaattcaccaataagacattagtatactattgcc

SEQ ID NO: 46382 - DNA, 338 bp, Zea mays
agctcgaagataaaagaagaagtgacttattctgttgccttaccattacaaattcaaaatacatttcaaagtgccctgccaagaatggctggacacaatcgaagtgatgtgcaatgaaatactcgggaattattctaaaaaagaagaccaaatgatgactgcagccttcggcacccgtccgaagtgaaagctaaaccgagtgatggatgctatatgttttgaatatcctgactacgagcggctagacaatggtgccgaatgccaaaaaaagaagagagtatctagttctcttaacaaagacgatgaagatccacccgagaagaaaaaacaagagtctg

SEQ ID NO: 46383 - DNA, 473 bp, Zea mays
  unsure (1)..(473): unsure at all n locations
acactatacaactactcagcttgcaaacataggagggatgagggcgatcttcattcctatgttgttgnctcatgcacactctcactctcaaaacaccatgaagaaacatgttctatacgtctagctgtctaaaacaccaaccttgagagactacacgtgacaaaataagtcgtatagtaacaaccttaacaacaatactaaaaatatccttagaatcaattccatatcttggttaaactcttttgtaactaataatgctttgtatatgttagtacaccatctgctcttttcttaactctatagatccacttacaatcaatgatattcttccattatggtgaaaacacaaggagacatgttttgttcttctgtattgcttcaaattccacatcatgacttaaaccaattacgatcagtgaatgcttcatttattgattgtggttctccactataaaaatatacactattttatt

SEQ ID NO: 46384 - DNA, 349 bp, Zea mays
  unsure (1)..(349): unsure at all n locations
agcttcngatttgagagcactttctcagcgtttgcgaatatgtctgaagataagaaagttgttgctgaatcgaagctgagcctttctgaggagatgcatctcgggtttcttcaatcaatagcaatgaccaatacagagaagatcactagggagattttggatggtttatctgaagacactggtgacagtgacagctatgatgtataaagtgggggtgaagactccgaagatcgaccgcggcgaccaagtcacacagtcttcgaaaaatcgagcattaaacatagtcatcttgataacatgaggggaagatattttctaaacatgtctactgtgagggcagatgacgggg

SEQ ID NO: 46385 - DNA, 447 bp, Zea mays
  unsure (1)..(447): unsure at all n locations
tcgcnaggtgaacgaacatagagatttggagaatggagttatggttctagtgagtcaggttgatgtgataaaaatcaaggatgccacggaataaatgagatatgggaaggccgacgccgcgaagaaagaaaggagtgtaaaccactgactcgagggtatcttcngttgggacaatagtcccgtggcaagcacgccaagagcagaagttccgtggagggagaacaccgatggagacaaggcggagaaactcaacttcagaaatcacagacatatggttacctgcgaagggtaactgactgttggggtcgatggcggggatcactgcagcagacgagttcgcagtcttcctctttgggcgccatttgcttctcgctggcgaaacagaacatgaggcgagtggcatangatactcatatgcagaaatgcaagatctanggcacggaaagc

SEQ ID NO: 46386 - DNA, 410 bp, Zea mays
agagacacctgcagcatgcagctttaggatttccggatcaaatggtatatatattcttcttgcctcagtcagacatccggagtcaaatggactcgttgaaagagccaatggcctcataatgacaggaataatgaagttaatctctcatcaaccctagggaaagtggccagatcagttaaccaaagtggtgtggagccataattcaacaatcgtaaggtctacaagctttactccatttaagatattattcggtgacgaagcaataacttcagaagaagctaaaactggatcaataagagtagtaacttcggcagcatcaaattccgaagctgcttattctgcggaaaaagatgctttacaacgcatcatggtgcaagccgtgtagaacatcaataatttcaagccgaaac

SEQ ID NO: 46387 - DNA, 399 bp, Zea mays
  unsure (1)..(399): unsure at all n locations
ctcaagcttaaagccatggcnagtagcatacgccaataatatgtgaaatgactctatctctatctacgggcgcataagtttcactgtaatccacaccttcgacttgcgagtatccctctaccacaagtcgagctttgttccttgtcaccacaccatgctcatcttgcttgttgcggaacacccaattggcttctacaacattttgattatgacgtggaactaaatgccatacctcattcctagtgaaagttgttgagctctctttgcatcgtcaccacccaatccgaatcttgacgtgcctcctctaccctgtgtggctccatagaggacacaaaggcagtatgttacaaacatgagtacacgagatctagtggttaccccttataatatcgccaagat

SEQ ID NO: 46388 - DNA, 350 bp, Zea mays
  unsure (1)..(350): unsure at all n locations
tcaagcttggaagggtcctaccttcctgctattgtaataagttatgctctttgaggatatcaggacttgtaataaatgtaactcttcctacgtaataaccttcagttttagaaataaaaagaatgttttgtaaagtcttccgctcttatctctgaagtgtgtgtctatcgaatgtgattactttaatatgcatgtatggtgggaaatccttgggatgatgagttcaagttgttgaactcgtgataaccttggtaagttacctggtacacgtgcataaccatctgaggccattaagccaaggattggtgcctgtggacccgataacttgggagtgctgncacagctttatc

SEQ ID NO: 46389 - DNA, 483 bp, Zea mays
  unsure (1)..(483): unsure at all n locations
tcactgtaacaccctcggtgttagtaaaacttaaacttgccatggcaccgtatgcactggcatcattatgtgtgatacacctataatgcattcactagaataaaaataatctaagtgagatgttgccattaacagagagtagaaaacattgtttaaaaaactctagttttgaccccaaaagtggaatttgtgatctagcaaaattttgccaaaagtcaaaatatcaaagctatcaagttctcctaatcaaacaaccttcatgtgttgagatttcaagtttatagaagaaaatggagaaaaactcaaactttagttttgcctacggttggatttctgagaaatgttatcaactagctgtctttgggactctgtaacttttgatctatggacaggttgaagatgatcactgtancacaagtgtagagctacactatgtgtaccaaattggttgggtactcagccctaagcatatgaactatgtgt

SEQ ID NO: 46390 - DNA, 459 bp, Zea mays
  unsure (1)..(459): unsure at all n locations
agcttcgtgaaatattctccgaagctataaaaaagtnttgtgttgccctgctaatgaggctacacttcgtctcgatttgtcttgtgccttatcacggttttctcctttccaaaatattctccgaagatcaacattgtatccccttcttgttccacatgcaatatgctgtatgatgcttatgttgtgcaaaaatgatgtgatgatgttatgttatgcaaaatgatatttgtgccacagacataagtccctgtaatagagcacacatactttttatatcagcgctgacttttcgctgtaagccttccttaagagcttcttcgccttttactttcagcggaatcagcgtttatttttcgctgtaagcctcccttaagagcctcttcgccttttacttcagcggaatcaancgttatttttcgctgtaagccctccttaagagcttcttcgccttttactttc

SEQ ID NO: 46391 - DNA, 367 bp, Zea mays
  unsure (1)..(367): unsure at all n locations
tatgaatnntgaattaatcttttgttcttatgctaactcattcattcttttgaatagggcttaatactcagcaatgccttaagggcacagaagaatgccgaagatgagagttgcaccattgctctaaacaaccttcgaacagaggttatcaggctaagaaacgaagccttggagaaggaaaaaattctgcttacgttggtggaaaaaatgaaggaagacgaagctagctctaaaactcaagccgaagctaagaagcgcgaaatcgaagatcttcggaaacaactagctcgagctaaagaagaacgtattcttgaagaaacaaaacgagaattaagtgatcaatgggcaaatcatttggaagtaaatg

SEQ ID NO: 46392 - DNA, 446 bp, Zea mays
  unsure (1)..(446): unsure at all n locations
ctaagtcacctgaggcatgcaagctttaaccctcgcgagacctttccccgcctctttctatccatggtaaattcatcatcngatgtgacattctatgcatatttactttatttgttctcttgtatggtgtactgtttgtttcctgatttgaatggatggatgcatgtatgcttgcaatcgcataaagaacgatccggttgaagagcccgacgaactcgcatgaaaagcccctgagcagcagtcggttggtggaggcaagtgtcctttgacctatctctgttctattcattctttaatccacctcccgcgttacacatttatactcaaggattgactagcttttgttatccattaccttgtttacctatttgggttggattattattgtttagctttatgctattgctcaactataatcaatgaacatgatgagaatatctatgata

SEQ ID NO: 46393 - DNA, 354 bp, Zea mays
tactattcaactaaagtaagatgaagctgataagaagtctttgttgttaacttcctctccttcacgtgctgtagtattctatccttactgggatgtaccataatatagattaatttcattgcgatataaaatgttcaatagtgcatataactttgacatcaaccatatatgtgcactaatttaaaataatttaatctacccttctgggttctaagaatgatgattcatttgccatcctcatataaggatcatcatttgtgaaaccctcctttgagtttctaatgctctcttttctaagagtatcaataaggtccttccaagcgctttcaatatgaattcaaaatctatggatat

SEQ ID NO: 46394 - DNA, 381 bp, Zea mays
cttttatttaggccggtaagtcttgctgaggaattgcgtactcacggttttattctcattattgctgcaggagagactattaacacttttgagttttgttaaactcatactggagacttttacttatgttttgtttatgtgtgggctgcaggaagagaatttcttcccagatgttgcaataagttaacacttgaacctacctcaggcatgtgataatatacacttcttgggttgtaaacttaaaggtgtgctaatgtatattatcttatctgtaagacttccgctcaacttcctatgttaaagattatgtccatgttttgttattataatatttgcaactattggtgaatgggtcctggaaatgaacaagtcatcaaactc

SEQ ID NO: 46395 - DNA, 471 bp, Zea mays
  unsure (1)..(471): unsure at all n locations
tgctatangccttcttcttcttctctataggtgagaccttactataacactaccccacttaaaaaggaatgagggtagaactcttgaatcttggggatttgaacttcttgaagtacctcataacaaaggtggtacggggccttcttttgctgttgctgcttgaccaggctgcagaaagatgactgtcacagggttgattctgggaaaaccttcttcttatcttctcttcactatcttcttattactgactctttctttctctttgctcttcccactggaggattctctcgatgagtattaccatcatacagaggaggaagccaaagactatgaaccatgtacaacagtcttcaacccaagaatcaccacgcattgtgatcttatgggcgagggagtgggaaatggngttgcttgcgattatgacagaggggatttatctggagtgtgctttgctatgagcaagatgggagt

SEQ ID NO: 46396 - DNA, 411 bp, Zea mays
  unsure (1)..(411): unsure at all n locations
agcttggaaaaanctggtatanatcggcggttacaactctccacccaaggaaacttcggacttgatgaacagtggttgggggtttccactccaaaatgtccctgactttgctgggatccaccccaatccccttggcagataacacatgtcccaaaaattgaatttcttccagccaaaacgcgcacttactgaacttggcatataattgatgttctcttatgcgcgtcaatacgatccgtaagtgctgagcatgctcctcttcattcttggaatatattaaaatatcatctatgaagaccaccacaaactcgtccaactcgggcataaataccgagttcatcacataagtgaagtgggcacgagcattgggcacgtccaaagacattaccaggtattcacataatccatacc

SEQ ID NO: 46397 - DNA, 459 bp, Zea mays
  unsure (1)..(459): unsure at all n locations
cttcatcgatatcgncgcagactgctgaaaactaggtgtatgtcttcgatgaagttntccgagttctccgntttgattaccacatcatctacgtaggcttccacacgcttgccccagtgatcggctaaacatgtttgaatggctctctgataagtcgctccaacatttttgaggccaaaccacatggaggtatagcagaaagcaccgaatggagtgatgaacgctgttntttcctcgtcttcctttgccaaactaatctggtggtatccggaatagcagtctaagaaagacagcacagaacatccagcggtggagtctaccacttgatctatcctatggagcccgaanggatcctttggacaatggttgttgagatctgtatagtcgacgcacatgcgccaatccactctattctttttagtacaacaatagggttggctaacactcgagatgaacacc

SEQ ID NO: 46398 - DNA, 360 bp, Zea mays
ttggaaatctgtacaaaattgtatatttatgtgttaaatggcaaaccaattttcctagggtccttattttccatagtatttaataaaaataggttatgatttttaagtcaaatagggaatttttgagcatttataatagcctaaaacattgtttcttgatttttagaaaatatagaatgataccatgtcacacccggttttggaaggtaaaccgaatgcgaaccatgtacgtgccaggatcagaactcacgttcacagcgattacatatatgaacatcttcgcacaatgctcgaataataacataaaagagtacttaacgtattacatcacagagtcatagacatccacatattcatcgt

SEQ ID NO: 46399 - DNA, 447 bp, Zea mays
  unsure (1)..(447): unsure at all n locations
tgtgattttaccaatngaaagagcacaatctctacttatgaattttcatgagagatcctataagagaatgtgttattaacacgagcaatagtttcctatttaacaacctctactatatgaatgacaagaaggttactaaaacaaggaaacctcatgatatgaactaaattacccttacaagcattatgcataacatcaattgttaaaaaagatgaaagtagcatgattatttaattaagtttacatggcaagtttaattcatagcattgtgagtgattaatgtataagactcaaaaccaatttaaacaagaatgaatacatcacatagtattggttcgatcttctttgaatgttgaatggcacacttcatttgggaaacacattctcatgttgtgagactacatacacacttagatagaaacattagtctcacaactctagtcatat

SEQ ID NO: 46400 - DNA, 362 bp, Zea mays
agcttaatgcccctcctaaaagattgtttatctttgtttatggcaaagctcccatggctcaggataacgagggctacattttgtaccctgccggttatcccgagcacaaaattatgagaattcatgcaaagaagactcattctgtttctcaccatgcttttatttataaaaatgaggcttctagctctaggcattctacacatactaaaatgcctaagaagaaaactcctattgcatcaaatgaacctaatgtatcatttaagacttttgatgcttcttatgtgctaactaacaaatcaggcaaagtagttgtcaaatatggtgggggcaaacacaagggctccaagacttgtgtttgggta

SEQ ID NO: 46401 - DNA, 356 bp, Zea mays
ttgattgagcactatgtgaggtcgacacgtgaacctctatttctgtgcaaacgaatccacacgcacggaatgattatgtgggtgcaccatgaacaagtggtataggtaaatactacgtacgcattattgtattgtatagattgaacacttataaagtctgcgcgtgcaggaatcataaccaacgcagtgatcaaggatgcaattattgaggcagcgagatgctctttactctggcgggcgagagaacacaagcaccaaacacctgtgtcaaagcttagattattgcaccagccggtcctaatcacatgcttgtatgcctatacatacctattggcctcgatctgtatactaatctc

SEQ ID NO: 46402 - DNA, 271 bp, Zea mays
ttctgaagctctcagtttatccaagaaaaactataccgaattggagaaggtgctgtatgctgttttaatggcctccaagaagcttcgacattactttcaagcataccatataattgttccttcacatagcctttgaaggatattatgagaaacagaaaaactaccggaaggattgaaagtgggctgcggaactcaatgagttctacattgattatgtgcatagatcttcgattcagtcccaggcgctagcagatttcatcgctgactggac

SEQ ID NO: 46403 - DNA, 452 bp, Zea mays
  unsure (1)..(452): unsure at all n locations
tctgaacaccttcataagggganaatgactaagctggagatagtctaagcatgtcacttcacgtccgtttgacaagttaatggaatgaaaggacaancttgccctaacatgcatgataagtctacatgtataagcttgaggatgtaaatataattctaccacaactataatctgggtttataaatagaggaacaatatcatgcatttgaacaactttcaatcggtgtggggcggattgtcctcgcctacatagttgtcattcttcctttgtcttgtaacctttaccaagttgaaggtacacctgtaatatttaatttaatattggaaatagaccgtggagagtaaaaaagcttgcagattactcgatatgtttcatgtccatgcctcatggattctactttcttcatattacattctcttgttcacatatatattgttattataatcatacc

SEQ ID NO: 46404 - DNA, 335 bp, Zea mays
agcttagcaaaagaaatttctagaatcaagtttattgagctcatgcctaaggctggtaaaagaatggtcatcaagtggcttggtaaagatatcggctaattgatctttagtattaatgtaagaaatcccgatatcccccttttgttggtgatccctaagaaaatgatacccaatggctatgtgcttattgcggctatgctcgacgggattgtcggccattttaattgcactctcattatcacatagcaaaaggactttggttaatttgtaaccgtagtcccgcagggttttgctcatccaaagcaattgcgcgcaacaatgtcctgccgcaatgt

SEQ ID NO: 46405 - DNA, 353 bp, Zea mays
  unsure (1)..(353): unsure at all n locations
atggngatgatgagtacctatagtgtctcccacatcgatatgttggatatgtgatgttggctattcacctttatggcgagatccattctgtttttgaaattatggccaagcacagggtagtggagacctaagcattggttgcgggatgttccttgaatatattagcccagagaccactgctttcagcagcaaaagttctgcccactactgggagatctactccattgttcattacatggagattatctaccgtgcgtacaccacatttcacaaatctttggacactntatgtgaaccctggattctccacatataaagaatggatatctgcgggagattggaccacaatgaaa

SEQ ID NO: 46406 - DNA, 373 bp, Zea mays
cggagcattcaaggcgcgttcaagcgaaggagaagaatgtctctcaacccatctgcgtagagtgaatgtctttttttcctctaactcacgggatatgtcctccaccacctctgggggatggaagttggtgtgttagtgggtgatctatcgcactatggtgatgcgcaagctagcttcaatgttcctacccaaagggacgagttggctagtggtcctaccgcgctcgcaacattcctagagattcgcgcgaggccgtcagaaccgagcatgatgatgggggagcggcgcgagtggcaccattcctgctagcattctctacgtcgcctatgcaccgcatggggatggagcccatggaagattcctcccttatcgc

SEQ ID NO: 46407 - DNA, 233 bp, Zea mays
  unsure (1)..(233): unsure at all n locations
caaaccacttnggctgcagctgaaacttatacgaaccaaaattttgtttatatcgcctaccgtaaccggtggaaggggttcctcaaatcccacacatacacccgaacataagtggaagcctgggtgccaagaggagctactccataatgcgtagcctactgccgcttctatcggaaactgttgcctctgataatgaatggcaccgaaccctgggcgccggccgctacatttat

SEQ ID NO: 46408 - DNA, 418 bp, Zea mays
  unsure (1)..(418): unsure at all n locations
cacctgcggcatgcaagcttaagctctttgacagttaaatcactttatctagtttcaactttgatgcattcaagcgtgaatgaatatttgagaagttaaactagatatgaagcagggataatacatgaacctgctttctcttccttttatacaagaaatgccaagaatgtgtagaaaaggaagaattacgtacaagctttaatgaaaggagaatagtttacctttatgtacctttacatagggacgctctcttcattgtgctcgtccttagtcttagatgcttaagaccaattcttaatgacaatatatggaaatatntcgcacaaaagagagtctacaactagaatctttcaaggtcttgttagcatatatcaaatggaacataagttgcatanatggatcatgattaatcctttaa

SEQ ID NO: 46409 - DNA, 423 bp, Zea mays
tcctattggaagccaatgccatccttaatgttcttgcgtctcccactatatagcatgcttctagcacattaaattttcattttctaaggcatgctcattaatcttagcactatgttgagctatgggatcattttgttgttaattaaagctacgtgatcatgaatagcatcaacattaataattctacatctaatgatataaaacatgctcatggtaatgttaggttgcaacatttattcataatctacatgtaaatacatttcattttagatggaataaaatatgcaattttaaatttaccttacaataattttcattctcaatttaaggcagagaagagcattcacttgcaatctagtatcaaatatactatcattctagaatacaatgaatatataaacattactttcacacttacattat

SEQ ID NO: 46410 - DNA, 400 bp, Zea mays
agcttcagcaaagtgcgctgtagatcttggtgagtttgcaccttgcatctgatgaaatatttgatcatcctcatcatctaattcctcatcttcagaagcacaatattcttcattgtctacctcatcctcagcagcaaacttgttcctcatcaccttaagaaacacaatttcatagcatagtacaaggaatctagaaaattaggataaagcagcatgaatgaaaatattgaatatcttatgttgaaatgaagtaaagccgcgatgtgacatgggctcttcacttgcccggtctggttgagccctttgctcaatttgagtctgtagctcaagtacacactgttctaaagcagccttctcactttgaacctttgtacgagcaaaaatctccatttgtagtctt

SEQ ID NO: 46411 - DNA, 410 bp, Zea mays
  unsure (1)..(410): unsure at all n locations
tggtgccgatggagaaacannaatccttgaagtcttggctgtcanactgcttgtcgntgtcaactgttagttcggacggtactccgaagcggcaaacaatgttttgccagaagaatttttgggcagtctttgatgttattgtagaaacagccctcgcctcgatccatttggtgaagtactcgacggcgacgaaggcgaacttaaggttcccctgagcggtgggcaggggcccgacaatgtccaggccccagcgctggagaggccatgtatgggcgatcagctttgtatactgcgaggggttgtctgaccgaggagaaaacttctggcaggcttcgcaagaccttgagacccgatttgcggcgcagatcattgcgggccagtaaaaaccctggcgggtcaccttggcagct

SEQ ID NO: 46412 - DNA, 457 bp, Zea mays
  unsure (1)..(457): unsure at all n locations
agcttgacttgaaancctttatatactactatatcataaaattcagactgctaaggggattcaaacaaaacctgaatatataaataaatgggtttaccctccatgcatgtcgatccaaaatcatttactttcactctagctgatgtttttacactgcaaaagtcaccacttagtcatcaggccacaagatgccaacattggcatcgagaagaattaactcatgttggagctataaggattgttctggttttagatcacattgaataatgccagcatctttcatgataatcaaggcatccaatatctgaaagaatatacacatcacatattgtaacagatacatcatgggttgtcaccaatatttgaaagaatattcaatatcttcaaagcgatgtaggcaagttaacctaagtggactacaaagaaatatattcatcatgggttttcaccaacactg

SEQ ID NO: 46413 - DNA, 436 bp, Zea mays
  unsure (1)..(436): unsure at all n locations
tcctggagcgcgcnacggacgaagggaacacccaatcgtgtgatcctgtgaccatcgtacttccagcacatgcgctactctgtattctgcagcagggcaatcaagctgcaactgcaaatagtaactcaggaatgttcatagctcgcttggcaacaaggccacatgtggaatgaagccaggaacagtggaatacaatccaagatcccatgtgctaaactttcacaaggtgctaaaatttagttctttcacatagagagctaaagtttgaatacaattactaatgtttagcacatacatacacaaagacatttatgccctgtttggaacacagattttccaaactgcagtttttcaaatactaaaatatactctagtcatgacattactacagcttacaatgcttcagttttcgaatacaacagtatccaatacatca

SEQ ID NO: 46414 - DNA, 344 bp, Zea mays
agcttctctccggttcgatcctttctcatctgctctctacccctctctctatccttgtccggttggaggtcgtcgtcctcaacgccctctctctatctttcacatttggcgctcgagcgtcttggtcttccagcgggcgcggcggttctggaaccagacgacgacctgacgcggctgcagggcgaggtcgcacgcgatgaggtcgccgcgcgcccgccggccactgccagggccagcttgtcctcgtcctcgtccatctcggcctcgtcgtcgggctccatcttccgcgccggcagggcctcttccaccgcgaacgtcagcttctcccctgcaataggcgtatg

SEQ ID NO: 46415 - DNA, 413 bp, Zea mays
  unsure (1)..(413): unsure at all n locations
taatcctgagaagtgtgtcttcggggtgccccgaggcatgctcctatggttcatcgtctccgagcgaggcatcgaagccaacccggngaagattgcggccatcaccagcatgggacccatcaaggacttaaaaggggtacagagggtcatgggatgcctcgcggccctgagccgcttcatctcacgcctcggcgaaagaggtctgcctctgtaccgcctcttaaggaaggccgagtgtttcgcttggacccctgaggccgaggaagccctcggcaacctgaaggcgctccttacgaaggcgcctgtcttggtgcccccggcggacggagaagccctcttggtctacgtcgccacgaccactcangtggttagcgccgcgattgtggtcgaaaggcaagaggaanggcatgcat

SEQ ID NO: 46416 - DNA, 323 bp, Zea mays
tttcttagtgctaactgaccatgtgaatgactcaagagcaagtttagagcagtaagcaagttccactcatgaaattggtatcccgaaccgacgtttcccacacttgaaaacagcaccccgaccttccgagcccttcatgagctgactccgtggcctgtcaccagcaccgcggccgttgacttttctgctttaattccccatccccagctcccgaattcttcgtctcgtctccacacgcaacagcacccgagcagagagaagccagagagcaattggcagcgagccagcgagggcaggaggcaaagaagaaacggcgtcggcgt

SEQ ID NO: 46417 - DNA, 275 bp, Zea mays
  unsure (1)..(275): unsure at all n locations
tggatacttattttcgttatgatattagctgatgtggattatgattattaantattatgatataggggcgaggacaagtggtatcactaacgtgattaaggagtttctacaatcatgtgcttgagatactgtcagtgcaaaaatttgtgcatggtttcaatttggagttntggacagtgcacctctttgagaccgtagactgtaacaccaaactgtttgtctaagttcccctgttttgagtcctcttgacgtcgtgttatggagttaatgtgttt

SEQ ID NO: 46418 - DNA, 379 bp, Zea mays
  unsure (1)..(379): unsure at all n locations
tattaccatctcagcgaaggcactatctagtgctccntgatcaaacctccaagtggcaggaactctcccatgacatgccagcaacagagccttgctttgagtcccttgtgaaaacatgaggattgcgtttgcatgtaccaaaagggtttcttcaacgcagatgattcatgccccctttggtcagccttgaaattacggtggcaatatttgcacctttcaacctttatagaccctctgtcattcttgattataataaaatgttgccacatctcagaccttgaaaccatacccctcctctcgactttctctttctccttgtcttccacattatgaccaattttttattgacggcagttatgccttgcacttgagcctctac

SEQ ID NO: 46419 - DNA, 391 bp, Zea mays
  unsure (1)..(391): unsure at all n locations
agctnggctgcataacatgttttgactttcttatgtgccactcggacaacagctgctcctgcaccgaaagttccccaagaaccatcgcaaaacactgtccaagcttcggcgtctttgtttatttcttcttcgtgagcctctggcgtccaatcagcgatgaagtctgctaacgcctgggactgaattgagtatctatgcacataatcaatggtgaattcattaagttctgcaaccccatttccaatccttctagtagcttctctgttcctcataatgtccttcagaggctgtgacgaaggaacaattatgcgatatgcttgaaagtaatgccgaagcttttggaagccattaacacagcatatagcaccttcttcaattctgtattattttt

SEQ ID NO: 46420 - DNA, 460 bp, Zea mays
  unsure (1)..(460): unsure at all n locations
acactatannannactaagcttcatgaagagaaaccatcngctatctgatacgaacagctttattctaaagccgcttctttctacaagaccttcggcgacgaagcgtagtcccaaccggctgctagaaactggctatggcgtccactggcgggaccaaccctggaattgggctgccgaggccatgagccgggctgatgtcctccgggttcagctggctgatgctaccaaacggccggtccagcccgctgcttgggccgggatcctggaagagaccctggcggcgattggccaagcgcggtgctgacatctttctttgaggtggagatccttccaaccgtgttgccggtccatgccgggtctgattacgccgaatgtggagtcgacgcctaaggtgctgctgtcccccccattgatgtctgaacctgaagatcagtttgttatagtatgcgtacggttttt

SEQ ID NO: 46421 - DNA, 245 bp, Zea mays
  unsure (1)..(245): unsure at all n locations
cgacccggacctctaagtcacctgcggcatgcaagctttnggctagattacggatagttacgagttgacactggactcgtgtggacactaggcactcagagtcaaagccagagggattgcccactgtagtatttagagtctcatggaaccttcttcactaatctggctgggaaaagcaccaccgcatgttgcgcgaccgcacattatatgggcagttaaaacactattttggtccctaaaaactg

SEQ ID NO: 46422 - DNA, 375 bp, Zea mays
  unsure (1)..(375): unsure at all n locations
ctttatctcaaaaaatttgaaattatgggttgtttgnaacctntgctatgggcgtaatatgttcctcccctttggcattaatcgccaaaaacggagacttttgagagccctttttacttttctccccattggtaccagtatataaaaatgaaggattataccaattgagagtgtggaggaacaacggcaagggtaaatgataccgtcagaattggagtggaagcctttgtctttgccgaagatttcatttccctgtcaatctacgacttagtatagacattgtangaaacgggtgatgcctaagagggggggtgaaataagacttctaaaacttttactaactaggcacaattaaatcctagagcacacctatgc

SEQ ID NO: 46423 - DNA, 315 bp, Zea mays
  unsure (1)..(315): unsure at all n locations
ataccatttctctgtggttccaacaaacatcattctcttggtgtgttttcaaataaaatttcctacaatatgcttatattcaatctttctccaagcttcactctcgggtgctattgtggctaaataataacgtcttcgttgtttcataatagaacccaatatgaatatagtagctttaatttagagaaacttcattaacatgggcatacatgtgttatgatcctataaaattcattanttggtgtgacgctcgacagttccacttctgcgcaacggcatggtaaggaggaaaatacgtgctacttattaacatgt

SEQ ID NO: 46424 - DNA, 371 bp, Zea mays
agcttgagacatttcttctgtcaaagattattgatgcacaaagaagtgataagggtatgagacatattcttgagaaaatataagctgactaagcgaattgtttcagaaaggatgatcaacgcatagtatgggttaataaccgcataattgtgcctaatgacgatgaagtccgccagcaaattttggatgaggctcatcttagtcgatattccattcatcccgaaagcactaatatgtatcaagaattaaagcaacattctggtggacaaaaatgaaggttgaaattgcacactatgtggcgagatgtgacacctgtagacgtgtcaaggtcatacatatgaagactgttggttcactgcaatctttgccca

SEQ ID NO: 46425 - DNA, 408 bp, Zea mays
  unsure (1)..(408): unsure at all n locations
tcacagtgaagcaaccttggccagatcgtctcttcaacatatcgtatcgcaagagcattcaatgcaaggattgtctgtcaacttatcctgacgcgcgttcctcagtccgcagggccgaagtgaccgcaatcacttcaccccttctctgactgacctgacatgaaaacaaggccacctgccctgcttccgcccttgagagccatctacaccctagaatggtgctgcgagaaacttcactcttacactactactaatcatgttatatgagacggttggcttttagtattaaagcgctcatgaagngtctaatttaatggacccgaaagatatcccacattacgatggtttaaatcgcctaaacgatatattatatgacatttctttaatttattaccgacaaaagtattt

SEQ ID NO: 46426 - DNA, 359 bp, Zea mays
ctgcagcttaaacgaaaggccatggtgtagctgtttctggtgatggcacaaacgatgccccggcattgcacgaggtgacatggtcacctcaagacattgatgaggcattacatattgcaccttctctttgcattgatgagcctaccagttctaattgctgccgtgcctcctcaatttgttgggctacgccgatataagtctttcaaagtgcatttccgggacagaagttgcttataaaagctctgacattataatcttggagatgacttcacctcagttgtcaaggtttgtttggtagaattattcaagaggacctaactgagctcatcactgattttctcttcttgtaaaaataattc

SEQ ID NO: 46427 - DNA, 394 bp, Zea mays
  unsure (1)..(394): unsure at all n locations
ttaaatgggatgtgtgaatctgtcaacagtctggacagcaatgtttgtttgtattaactgactttgatccacattgaatcaacctgaaatgtttataaaccaattgtagaccattgtattatctttctaaaaagtctaggatcacctgtttttgatacctaaatctccagctatggagttctgaagtaaacaatcgaattctgtccaaatctggacagcattattgtttgtactggttgacctttctaagtgtcaaatttcgttgtgatgaaaataccaaagttgtagaggacttcttaagctgtccagaaaggtctagttcattatttctggatgaataccctgtgagttatgagcanaaccggtgactgctgaatgctgtccataaaatctg

SEQ ID NO: 46428 - DNA, 349 bp, Zea mays
taagctcgtagccgctactgcaagcacaccggtgcaagataatataatcctcatccctcctcttgtgtttcatcttgcatcaacccatctgggcatggacacgcggcacaaaattcactattcggttcggttgatggtcccacgggtccgaaacgctgacaattggcgcgctatgtagggggttcgctgcgtgtaaacaacacttttccgtgaggttgcagatggacaatcttgagcaacctcttcagcctgtgacagagctacgctttgggagtctcgagttcatgtacctcgacagcagctacaatatggtactcctccccccgcagcacgacaacaacgacggtcg

SEQ ID NO: 46429 - DNA, 311 bp, Zea mays
taagcttctgaagataacgacttcatcatctctgggagtcggcacagttttttctctggcatctgctcttacaatagacatatgccgataatatctccccctcatgttttcaaagtgactttgcccgatagttgatttcccgaagactgaatggcttggtcgacatggccgatcttctaaatcttcacccacactatctgcgtcataactgtcactatcaccagtatcttcagattaaccttctaaaatctcccttgtaatcttctccgtgttcgtcttcgctattgactcaagaatacccagatgcatct

SEQ ID NO: 46430 - DNA, 337 bp, Zea mays
  unsure (1)..(337): unsure at all n locations
cttctgtaactgtttatgaggcacatgggactgggcatcctccaacagatcctagcagggggagctgcatttggagggatcttgatangaacagtttccatattgggttccatgaatacagagagagcacccgacaacagataaattttggcccactcataagaatccggcctcaaaagcagacccataagaaagctgcccatgattttggtacagggatgaagtctgaattgggggcaaaactgggcccacgaggaacaacagtttctcgccatgaaatcttcatatgcaagatcatggatgggctgtatcaagtgaagcatgccacccacaatga

SEQ ID NO: 46431 - DNA, 437 bp, Zea mays
tggacgtgaagagtgacttcctcaatggaccgatcaagtaagaagtctatgttgagcgacactccggctgtgaagatagtgagtatcctaaccacgtgtataaactctctaaggcgctttatgggctcaagcaagccccaagagcatggtatgaatgccttagagatttccttatcactaatggattcaaagtcggaaaggtcgatcctacactctttaccaaaacacttgaaaatgaattgtttgatgccaaatatatgttgatgatattatatttgggtctactaacgaatcgacatgtgaagagtttagtaggatcatgacacagaaattcgagatgtcaatgatgggggagtttgaagatttcttgggaattcaagtatagcaactccaagagggcaccttcattatccaaacacagtatactcaagatattc

SEQ ID NO: 46432 - DNA, 296 bp, Zea mays
agcttggatgtgcatcgactacaccaacctctatatgcctgtcccaaggaccaatatccgcttccacaaatagatcaaatcgtggattctacctccgggtgcgacctcttgtccttcctagatgcttactctggtttccatcagatccagatgtttaggcaagataggaagccataccgcttttgtaactatggatgggctctactggtatgttgtaatgccttatggtctgaaaaatgccttgccacaatttgtaccggcgatgagtaaaactttttgtgacctgattagggcag

SEQ ID NO: 46433 - DNA, 396 bp, Zea mays
tctccaccatgtcgctgctagccaagttgttgcagctacctccatcaatgatcaaacgacatgaacgctccttaatgacacactgtgtttgaaacaacgtatgtcgctgattctgctctgccttctccatttgtgcactaagcacacgctgtacaatgaggctctcataatgctctgcatcatctgcaccaatctgttcttcgggtggttccttagtgcctacatcatcagccgcaagcaaagcaagtgtagcttcatccaaatcactagcagaggaatacccaccatcgtcttttaccaccaaaacacgctgattatgacaataacgctgcacgtgtccatagcccttgcatcgataacacagaacatctcttgttctacctgtggaagctactg

SEQ ID NO: 46434 - DNA, 481 bp, Zea mays
tgaagaagcttctgaacaaagcatatctgaatctaataaccaggagctcttggatgttgattcagaaacgagtaagaagggtgaacatgacactggtatattttatgccaacgaaaggacaaaatatgcagaaaatctcattcatccagaggacaaccatggatcttctaattgtgatatggctcatgtacatgaagaaaatggtgctgttgcaatgattaattctaaagactctgtaattacttgtgccaacagtagcactgtagagacatattacatttcagatgcagctcctcatgttcctgttcccagttcataatgccacaaactggaatgttttactgatgcgggcagcactgtggattcaaaatctgcatcgcacagctaccagaatggttgcgaaaatgagcttggaaggtcatatcaaatgttcgttcagatcaatgctatgaaactgacacatcacatattatcaaaaatc

SEQ ID NO: 46435 - DNA, 372 bp, Zea mays
  unsure (1)..(372): unsure at all n locations
agcttgcagcataagaaaagagtatataattcttcaaccgcactgaacagatgagcatcgtgactgatctccaacacagaccacacagcttctcagataaagaggaaaggagaataatgggtttcccaactatataactaactttattgacatagtatgtaaaccaaaatgcaggggatacccacactctggtgacaatcattacaaagatccaaaccaaacatagttcatcatgacaaacataaatgcacaggatatagcaaactaccctgtctaactaanactaactaagaccgagactaacgctaagactgaagcttccatgtatatatntatttcgtattaattacaagaatccactctaacgatcta

SEQ ID NO: 46436 - DNA, 255 bp, Zea mays
aattaagcatgcatctagaccggcctcttcttttgcaaaatcaactaagtagagcttgccggctaatacacccttaaaagctagtgaaccactcacttttctaaagacagacacatctacatttgtaaatagacagttatatcccatatgacataattgactaacagatagcaaattatatccaagactctccactaaaaacacattagagatagaatgctcattggagaatggcaatttaccctagccttttac

SEQ ID NO: 46437 - DNA, 351 bp, Zea mays
  unsure (1)..(351): unsure at all n locations
attaacaaatgtgtcatttttaaaaacacaggatttgtatcacattggaggcatggaaacaagttggcacccatcatccacaccagaacatcatgacgaccgacatggcggttgagctgcttcacatggatctattccgcccgattgcttacataatcatcggcgggagtgagtattgtcttggaatactggatgattattctcgcttcaccttggtattctttntacacgaaaaatctcanacccaagagaccttatagggattcttgagacgggctcataatgaattcggcttaatgatcaagaaaataagaagcgacaacgggacggagtgtcaaaactctcaaattg

SEQ ID NO: 46438 - DNA, 349 bp, Zea mays
  unsure (1)..(349): unsure at all n locations
cccttggtgagccttcatggttagcgctacnaggtctatgcatggccactacgggagagacgatccatcgatctctcgtggaaataacaacaaattgttacatgtgtaacatgtggcaatggtgggtaaataccctttaaatctacgactacatacaacaaatgaatactaggagcatctcttttgntgttctaccaaaatggtggagttgccccccaactccacgtttttttgagcagagttgctagagttcagcgtggttggtaaccaaatcatggagcgaagtatcataacatggagtgggagcgacggcgacgacctctcttaggaccgaacagtggcagtgaca

SEQ ID NO: 46439 - DNA, 418 bp, Zea mays
  unsure (1)..(418): unsure at all n locations
tactaagctnggtactgatcatcccggntggtgataggtgctcatgtgttggccactttgttcttacttaattgtttattggaaactatatatatgacatgacttccttgttttttttgtcatgcagccaatgggatgacatgtctttcgacggccgaggtcaccatagacaggttaatcaagtcttaagtaacctctgtcgtctacataatccatgaattgtcaccgacccgaaaggtgtggtggttccttgcactatctggtcgcacttcgcactagctccacatgctacatatggaacaattcaaggcaccatgaagcacgacttttgggtataagagtaatgtttgaaactatcattntatgattngtttgaaactgaatntattttcgatgttggacagagacactatcgtgt

SEQ ID NO: 46440 - DNA, 396 bp, Zea mays
taagcttgagaacttaaacctatggggaagatatatattctttgtggcttacaatgaaactattacatgagatgtgagaaatgtcttttattggacagaatataaaattgaatggaaaagactattatcaaggtaggatatttgtcaataaatgtgctttgactctggcacagtgctattgactgtgcgagcttcagactgttctctgaagtccctctgttgttgagcatattggcccccttctggctgctggccttgttgcatcagtggtggaggcgggggctgttgccatgaaacttgatgttgactcgccgaagcaacagaaactgcatggtggttgcctacatattctgggatataaggcgaatgatacgaatcaatgtgcatgatctgctt

SEQ ID NO: 46441 - DNA, 423 bp, Zea mays
  unsure (1)..(423): unsure at all n locations
tacatgccttcttatttttctccatgacaggaaccttattgtaacactaccccacttaaaatgaatgagggtagatctcttgaatcttggggatttgaactccttgaagtacctcataacaaaggtgttacggagccttcttctcctgttgctgcttgagcangctgcggagaaatgactgacacaaggttgattctgggacaaccttcttctcatcttctcttcactatcttcttttctcttctcacttttcacttttcactgcctctttctttctctntgctcttcccactcgaggattctatcatagagtattaccatcatacagaggaggaaaccgaatatgttgaaccatatacaacagtcttcaacccaagaatcaccaatcattgtgatcttatgggcgaaggagtggaaaaatgg

SEQ ID NO: 46442 - DNA, 406 bp, Zea mays
  unsure (1)..(406): unsure at all n locations
cgcatgcagctttcctggacagtgctgcctgactgttttttctnaactttcacatataataacagaggagcccctggcgttggtggagttaatgtctgttaatctatcatatattgcttcaattccttcgaaagctatttgctggcttggcccccattgaaaaacttcggctgatctcaccactttcgaagaatggagaaattctttctgctgatctggatatatatctattatgagatgccaaccttcctgttatatctttgggcccccttttttgtagttggtggctccatccgaagtatagcttcaattttacttggattatctgtaatatcctttgttgaaaccaagcatcccatacatttccccttctttaccccgaagacacattttacttgattcaact

SEQ ID NO: 46443 - DNA, 280 bp, Zea mays
ttggatggtcactacgtacgtacgtgttgcaactgcctgccgttggactcaacgctgcatgctaagcgaagcagtgcaacagatccaaagcactcgaatcatgtacgtggattcgtcctccgagacagcaatgcgcgctgccgtggtctggagtttggaaatcaagctaacagatacaggatggggaatgggaaattcgcgtgccttgcggtaagtggtgccgtctggctccaatgttcatacggccttctcgcacatagccttgagcacgtctgtgttg

SEQ ID NO: 46444 - DNA, 329 bp, Zea mays
tacgcagatctcgaatgacatgtcgcgagaagaatgcaccagtggcgaatatctgtagctccaagtgctatatccgttatgtccttgggcccatatgtcgaggctcagtaccattgtgcatgcccccttcaactataaaaggggaggcatgcaacgttatgacggacttatacccaagtgattctagacaactcaagctctcaagcaatacatcacacagtggagtatgttattacgctccggcggcccaaaccactctaaatacttatgtgttcttgtgttcttcccatttccaactaacaagcaaaacgcttatacccctcatcatc

SEQ ID NO: 46445 - DNA, 417 bp, Zea mays
  unsure (1)..(417): unsure at all n locations
cacgcgatatgtttgactaacgttcaattctgaaaagatagaccttgtgcagcttgtctagcaagtaaacaggtgggaggagcgcatcacaacaagaatgtgatgaccacttcatgacccctggagctgctgcatatggacctcttctgacccgtcgcctatctgagcatanggggaagtaagtatgggctagttattggtgatgacttttcccgcttcacttgtgtgttctttttgcaggataagtctgaaacccaatggaccctcaagcgcttcctaatgagagctcaaaatgagtttgagctcaatgtgaagaagataatgagcgacaacgggtccgagttcaagaatcttcaagtggaagagctccttgaggatgaacggatcaagcatgaagttctcgctcctacacaccac

SEQ ID NO: 46446 - DNA, 305 bp, Zea mays
gatctgtagatcttctcgaatggtgggcccatcgagaaagacgcggtgtcatgcgacctctccgacagagagtcaacgcttgctattttgctaagctcgccgtctgtctgcgatgggtcgcatcttcgcgacgagcgatatcatgcatgctggactggccgatgtctcaacaaggacgagcatggtggggacgttcatgatgggtcagagtcggacaacaacacacatcgggaatgtgacaacatcatgcatcgttgggaatggggcatcatgacagattaattcgggtgacgttgagaataatg

SEQ ID NO: 46447 - DNA, 377 bp, Zea mays
  unsure (1)..(377): unsure at all n locations
ttaatgcttaacttaagactagcaacaacgaattngtcaagctacaatttgcaagggatgcctacacgatcggttgacacccctcattaaggatggacttggcttccaaaaggaaaccaataacttatcaagccataatgcttctatctccgccaaggagaaagggaaggctcctatggctataaatactaaaaagaaccatgcttttatgtatcattgatatgagacaaactaaatatgcttataggagttataatgcttatgatgattctgactctcatgccatgttcgcttctatttcttcctacatgcatggtngaaatatgtctaggagaaatgctattcatatgtgcctagaaagaatattatcatacttt

SEQ ID NO: 46448 - DNA, 341 bp, Zea mays
actttatactatgcttgtcaaagtccactcgaattaatcttcggagaatcccgacctctctgcaatatgacacccgtatgtccaacacaacaagcaatgaatgaattcagaattattgcagagcatatcatcacataggacctggttcaagagtttttggctttcaaagtttttcctattgtaaaggagtgggaaatgccgaagctgaatggggagaagaaagaaagtgaactcatgcgcttaccttactacttcaagtttaagaaatacttcaaaacaccttgccaagagtggttggatacaattgaagtgatgtgcaatgagatacttggcaattattc

SEQ ID NO: 46449 - DNA, 364 bp, Zea mays
  unsure (1)..(364): unsure at all n locations
agcttgacatatatctcaatgttgttccacctttatattctgtcangttggcttgtgtgtacgatcgacatgcatgctaaatccttccttctgccgcaaaaaaaaaaaaaaaaatacccaggtctctggcaacatcacatattgtggccatccaatttcagagttctatccatagaggactagcgcatatgttggtcagtatgatctccataacgccgagatgactgtaagagagacgcttgatttctccaggcggtgcctaagcgttggtgccagatatgagatgattgcagaacttgctagaagggagcgggatgcaggcattaagccaaatcctgagattgatgctttcatgaaagctact

SEQ ID NO: 46450 - DNA, 285 bp, Zea mays
  unsure (1)..(285): unsure at all n locations
tatctatgaatggtgtggtaacttcacacctacccatctggttatataatgctgcatgtgggaaagtgaatcgtcaatgtcttccgcaccggacaaacagccacacacactcactgaacggtgggccacagaatccgagaatgtgaatcaccatggcgcgcgtaactgctggaagatggggccacctcacgcacggattattttaatcgtttcttgccaacgatctcanggaaagtgtttttcggatcttgggcattccaaagcttataagatttttcactgatc

SEQ ID NO: 46451 - DNA, 321 bp, Zea mays
  unsure (1)..(321): unsure at all n locations
agcttgtagcttcgtcttatcaatcgtgacatctgcacatcatctcanacgaaggtgtctttcagcatttaccctgtcacacctaaaatagactcatgaataactgataagtcaatgctttgagaaccttcgtgatagacggcgaagctcgatcctccatgaggtaagataatttgattgggtggagatcttgacattgatgatccaaggctcgaagcgaacagattctcgcaatcactacaccactcctccattggttatcacccgtgacacacgagtgaccttgccacgaaggcttatacctgcaagcgcaatcaagaa

SEQ ID NO: 46452 - DNA, 305 bp, Zea mays
  unsure (1)..(305): unsure at all n locations
tctatagggagaacacgtgatttgtttaacttatgtgcaattcgaaaaagatagaccttgtgcagcttgttgagcatgcaaacaagtgggaagctctcatcacaccaaatatgtgatgaccacatcaagacctttggagatgcttcacatggacctcttcggacccgtcgcctatctaagtatangaggaagtaagtatggtctcgttatagttgatgacttctcccgcttcacttgggtattctttttgcaagataaatctgaaacccaagggaccctcaagcgcttcctaatgagagctcaaa

SEQ ID NO: 46453 - DNA, 354 bp, Zea mays
agagcacatcttatgatatatctatgttcattttgagaaagacaggatctgttgctcatgcgaagcatggatacaagttggtgtccatcatccacacaaaaacatcatgacgactgacaggccactggagctcctacacatggatctattcggcccgattgcttacataagcatcggcaggagtaagtactgtctagttattgtggatgaatattctcgcttcacttgggtgtatttttgcaggaaaaatctcatacccaagagaccttatagggattcttgatacgggctcagaatgagttcagcttaatgatcaaacaatataagcgaaatgggaggagttcaaaactacaa

SEQ ID NO: 46454 - DNA, 415 bp, Zea mays
  unsure (1)..(415): unsure at all n locations
ctaagctntctcaccanaccatcccacaaatcaggggtgacggggaaggtgttggctctgcgtgctctantagtgcccagcccatcatacactgaatctggaaccattactacacacttgcttcttcagtgctggctgcggagacttttcaagctccctttttaattaattattcaagctccaaaattcgtgttttctgttgcgtcacgaccttcaattcctactgaataatgtagtatacaagcacaggttctccgtggattatcttatcgatgcggtctcgtgagtttatttttcttcgtggtcgtggagataagaatgagatntccgtgataactgcacgtctatatcatcatcaggcatcagtgtcttcgacctatccgggccattttgggtgcggaatcgacgtggacgt

SEQ ID NO: 46455 - DNA, 334 bp, Zea mays
  unsure (1)..(334): unsure at all n locations
cagcttggcacccttgggaggctggatcatccttagctctctancncggnggtctgggttatccgcagcggcacctttagaagcggaaacaccctctgtcgtacccatatgtgccgggtgaccctggccttgaacgtcaagagctagtgtgttcccgcgagctataccgccctccaaggtctaaaaagcatgaaaaactgtccgtgtaattcttgcccacacgattaccaccaagggacgcattcggacctctgacggacgacaaacttcatctttgtagctcaatgaaagcttcagaaaattacttagacatggcaatggcagaatatcaccc

SEQ ID NO: 46456 - DNA, 368 bp, Zea mays
ctaagcttatactcggctgcattgttagatgctggaaacagcaactggttggcatatttgaggtgctcgcctccaggtgcggtgaagataattactgctcctgctccctgcagcttcaatgagccatcaaaatacatcttccatacttctgccatttctgggttctctggtatttgttgttcaatccattctaataacaaatcaaccaatgcttgagatttatggcagtacgaagtcgaaattcgatgtcatgagaccccagttcacaagcccacttagctattcggtcaattgcttccttgttgtgaagaatatcccctatcagaaagccggtgactactatgactttgtgatcatcaaagtagtga

SEQ ID NO: 46457 - DNA, 353 bp, Zea mays
  unsure (1)..(353): unsure at all n locations
ctccaatatattttgatctctttttcttagnttatcaaagaaaaattatacagaattggagaaagtactgtatgctgctttgatggcctccatgaagcttcagcattattttcaagcttacaacataattgttccttcttcacaacctctaaaggatattatgagaaaccgagaagctactggaaggattggaaaatgggctgcagagctcaatgaattntgtatggattatgtccatagatcttcgattcagtcccaagcgttggcagacttcattgctgactggacgccatgggctcatgatgaagaaacgaataaagatgccgaagcatggacacgtgtttgcgatgggt

SEQ ID NO: 46458 - DNA, 467 bp, Zea mays
taagctcatcagggccaattcaactgccgctgaactgacagaaacgtctcatattatatgttggtctcggagcgcacacgctttccagcagtaattgcatccttgaacattctgtcgatgttcttccccatgcctgcactattttgcccacttctcacaacttgtgtgacttgagcaaggatttgtccttcaccgagaaccaaagagttcaacccatctgatacctcgaacagatggcgtgtagcatcactgtcacgcagcatgaataggtgctccttaagctcagaaacatgaataccacttttctgtgaaatcgcataacagaaacactcatttacgaatctctcctaatatttctgtgagcagccaagatactgcggcatgaagactgagcagaaagagttgatcgaatggttctcacctttgacatccaatcaactacttctctgatacctctgttccatgat

SEQ ID NO: 46459 - DNA, 375 bp, Zea mays
  unsure (1)..(375): unsure at all n locations
tgtacttgtcgctccctatatcctgacagaccagaactcactataaaaccaacaaaacttggttagggtaatatagctacacactcacaatgacagattcgccaccccctacggaggacaatcgccatgactttgccagtccacggatgaattacacatgttctggccacttccatcacgtataatggagaatagtctgtgccttacgagcatacaatctaacatagactctctaaggtcatgacttcattgcacaagttatggtcacgatgcctagatataacggtggactattctggcccggagagngagctatacattcccactggtgaactattcacagtgcaaattttcacactcatatttaagagattt

SEQ ID NO: 46460 - DNA, 388 bp, Zea mays
ccttgtaacgaggataagctgcctctgttccaaagatggatggtccttaagcctctttgaaatccttaagggtaagtgcttaaaatgtttataacatgctttcataaagtgcataaactgtcatgagcatcacacttatactatgacacaatgcacttcacgttctgtatgctatagatatgttctcattaacctaattatgtgcaaatggcatttaatgccaaaatatgtattcctcaccatgcacatatttatggggagcaatctatatcatatagcactatgattatgcttaattgatatatcttttgatcatatctctttatgtctacgactaatgtgctttcaagtgatatctatgctaagtcgtagattgaaagggaaatgg

SEQ ID NO: 46461 - DNA, 335 bp, Zea mays
tgtacctggcagcaagtggatcaagtgatcatagggacgcgcatgcgcctgtgatgctcgtcgaaaactgcacaatactattagaggatgcgagtcttacaacggttggtggtggtcaccggtgatggagcatagcaccggctgtggtgtgtcgtctcgatgggagcctatgcccttctataggacgcgttgatcacccctccagaataccatgtttaggacctcgaaatcccatatgatgggccccaagctctatatgtagtcgatgtccaagacgaggttgaacccatctatgtggatgtcgaagcagctggtgatgaactcctaaccacaca

SEQ ID NO: 46462 - DNA, 436 bp, Zea mays
tctttgccaagtgtcagggccacaacacttgacaaagaatctttattggtgcccaagtgttgcttctctgccgagtgctatggccctgacactcggcaaaatcacctttttgccgagtgttacactcggcaaagtgaccattatacacctttttaatttgtttttgctattccatccaaacaaacaaaagatatgacatatacatcacagatatcacataatcatcacatatataacatatacatcacataactcacaaacaccatatatcaaacaagttctcacaacattaccaacatgttcggacacaaacataagtatgcaacactcaagaacataagtctcaagtatctcacaaagcaataccaacatctaacaagttcagaccgtggtatctcacatagtatgaacaatactaagaaagataatatctcat

SEQ ID NO: 46463 - DNA, 433 bp, Zea mays
agctggttgattcttgcccggttacagaccatcagcgggcaacgcaaccaagatagcactgtttgccaaatcaaggtcgaagttgagctgcctggcctgctgctcggtgagctcatacgcggccctgggttataccatggaagtcttgaccatcccagacccattccctttctaacaggtggatggcaaggtggatggaatgctatatttgttgaaaatggaagttacatgtggttggatcgaagatatttctcacattgagatcaaggaatcataacttatatgacagaggtatttctcacattgagatcaagaaatgactgctgtttaacagcatctctcttcgtaatcatttcagctcactgattggtctcaacttcatagttcttctgaataatggtgtcatgacatataaaatcaaattattttgatg

SEQ ID NO: 46464 - DNA, 390 bp, Zea mays
  unsure (1)..(390): unsure at all n locations
caacctcgtcggggtcataccgaggagctcatgggcgtgcgcggngctcgtcgtcctggctttcgtatcactatgtacgcgcaccccttctctcgagttcttgatattttgcttttgtactgggatgcaatcaagttacgggacctaactgagtatcagcctatgtgttcgacgaaatgcctccggccctggttatgttcattgttgtcccgatgtgtccaggacgatggtgggtctctctgaatgggagaagcacttcatccaccgcggcattgcgcacgacatttccactaatggatggatgtgactgtagttccagtccctttctaaaaggagtattagtttagaagtacctgatggatggttttgatgctggctcttgatttacct

SEQ ID NO: 46465 - DNA, 368 bp, Zea mays
  unsure (1)..(368): unsure at all n locations
acactcagcttctccagttccatatccactccaacaaatagtgtcttgagagagagatntgcccatgttctttgagctcttgttcttggatcgctttctttttcctcattcttgttctcaagacattgttatcaaagcaagagacaccaagttgtggtggtccttgtgaggggtctaagtgacccgtttgattaaggagaaagctcactcggtctatgtgaccgtttgagagagggaaagggttgaaagagacccggtctttgtgaccacctcaacggtgactatgtttgcaagaattgaacctcggtaaaacaaatcaccatgtcactcgctctatttcttggttgattttgtttcaccctctcttt

SEQ ID NO: 46466 - DNA, 443 bp, Zea mays
  unsure (1)..(443): unsure at all n locations
catgccatctgtttcagtgggcgcgagatgaaagtgaagaatagaactgacagctcacgaacaggcacgtatcacatttcacgtgtagaggttgcagacactaaaagtaccactaagtcgtaagtccctcttatcagcagcagggccctgaaacaagctaaggtgcaacgttacatcttattctttcaacaactatcagcaaggaagtgcattatttaatactcttactcctagtacagcatcaaaagccaggttcgggtgaactttgacatgtaccgagtatgtcataccggtagtttctttttttctgaatggtaaaatctgtgaaaggtgaagcaatgaaatccctctcgaacaatggcgtgtgcgcccncaaagcggaagaatcaccatgcaggtgcttntgacttctcacaagaatgatccttcattcactcagtctc

SEQ ID NO: 46467 - DNA, 364 bp, Zea mays
  unsure (1)..(364): unsure at all n locations
agcttctttgaatccttaagggtaaatgcattttatgtttataacatgctctctgaagtgcgtagtccttgatgagcatcgcgtttatgacatattgcacttcacaatttctatgatatagatatgttctcattgacctcattatgtgcatttggcatttaaggccaaattatgtattcctctcaaggcacatatttagggggagcaatctatattgtatagaattataataaagcttcgttgacataccttntgatcttatatatctctttcatatttttgcttataccaaagttcaatgtgtagaacttgcatcctcatgcctcacaagtcctaaggtgcattggtctacaagtattcatca

SEQ ID NO: 46468 - DNA, 372 bp, Zea mays
  unsure (1)..(372): unsure at all n locations
ntgcanggaaaggagatgatattattctctggatgtgcttgataggatcaattcaattcatattaactcaagctatcaatcttacaatgatctatatctctaagattgacccaaagttattttgagttattatatctactcatatcatctcgagcatgatattaaagttgcaggaattaaagcattatcctgtgtggaaaaaccaaagcctacaacttggagaaaagccaaaggatggcaacacttatgtctttaagtgcaaatatcttcaattaccatttctcttgtgtcttgtgtagtcacatagaaaaaggaaacacttaagaatattatcaaattatgtcaccgttccttggtaaagttcctctatat

SEQ ID NO: 46469 - DNA, 181 bp, Zea mays
gaggaaaaagcttcaaaagcaaggcagccattagcagatggactcgatgtctgtcgatcacataagatcccccaccgcttacaataacctttccaacacggaaatgcctatgaggaaaaagatgactcacttactatgcttttaggagaaatacgaagagatagaatttgtgtcagctaat

SEQ ID NO: 46470 - DNA, 324 bp, Zea mays
  unsure (1)..(324): unsure at all n locations
cgatgagaaacctttggttgttactggacgctgattgtttttgcaacattcacgaattatcttatcaaacgaatgccactgggaaggagcagtataataacaacttcggatgttatagcttcgtgtatcagtctgacactacgtgtcatgtgctaacctttcagataaagtggccaggctcgtggatgaagcaatggttttatgtaaaaaatgattngagtgagagggaggatgtgaagggagtaattcagcgccctatacgatcgtgcttcggtattatgagaccttcgatagcaggtggttacaaagttcaatcatgcatgt

SEQ ID NO: 46471 - DNA, 374 bp, Zea mays
atgcgatatcgaatgtcatacttgatgcatattctctttatttgcacccttgtatgatgtactggttgtttcccaaattgaaaggatgaatgtttgtatgcttgcaatcgcatatagaacgatccggtcgaaaaacccgacgtactcgcaggagaagcccctgagcaacatccagttgttggaggcaaatgtcctttgacctatctcatgcctattcattatataattcaccttccgcattacacatttatacctaacgattgactagcttttgtagccatgtccttgttacacatctgggtaggataataataatattatataacgttatgctattgctcaactctaattaatgacaatgatgagattatcta

SEQ ID NO: 46472 - DNA, 409 bp, Zea mays
  unsure (1)..(409): unsure at all n locations
tcgtgaagatattntccgaagctatacttccgaagatcaatttttgtntcttcttgtgacattatgatttttccctttgttcaaaacgttcttctgtagattaatattgtgtccacctcttgtgccatatgcaacatgatgtatgatgcttatgctatgcgaaatgatgcgatgatgttatgttatatgaggtaatgtttactccgaagatgcacaagcatccctgcaatataacacataatcttttggatcagcattgtctttttactataagcctcccttatgagcttcttcgccttttacttcagcggaatcagcgtttatttttcgctgtaagcctcccttatgagcttcttcgccttttactttcagcggtattcgcgttgacttttcgcgcttcgccttttac

SEQ ID NO: 46473 - DNA, 255 bp, Zea mays
agactatcatacacgtgctctagacaatctccagattatattttgcaactattgtatacctaacatagctgtgcctaatcgaaccctgtcatacctcgctatatattctcaccccactgtggaggcgctccgatgtggaccaaatcaactatttgagcccaaggcgaaacaacacctttccttctttctgtgcacaacgaatcataataggccgcttcctctttatgcagaagcctttccttacttaacagaaca

SEQ ID NO: 46474 - DNA, 284 bp, Zea mays
ttaagaaccatttagaaacaatttatttataaacaattgaggagtcacagaaacagtgcctatatccacaaacttgacacatagcatgggtctcaaggattatcgctgatctacataactcgcggagaatatgctatatgggtacattaggtattggatttttgcagaatacaacccaaacttaagatctgaacgtcaatagtcgtggaaaaagaaaaacacatgacgagcaactaaaaaagatttggaaggtaactgatttttctaaccacaaaggtggaaga

SEQ ID NO: 46475 - DNA, 383 bp, Zea mays
tgggaatggtttaccgaagcaacagaagctgtgggttggtgattgcccacatatcttgggatgtatggggagtaacacgaagcagtgtgaatgacttgcttcggctgactctgtcacgcctcaacttcgacaatttccttctgcttcaaaattgtgacctgacatgtccttgatatgtggcccttgtcctcgccgcaaaaaagacagtacagtttcctgtgttggttgccaaatcttcctccactaaaacttcttcctcctctgccccttggagccggtggtctaaaagaaatcatgcttgaagactggagaatttgatgactatgctgagcattgctggccctttcatcattggcatttggagtatgaatggaccagacatg

SEQ ID NO: 46476 - DNA, 274 bp, Zea mays
  unsure (1)..(274): unsure at all n locations
ttgagtggagttgggagaggatctgatctctttggtgctctttgtattgaatgctacctcttgtaaggtgtagaagagtggaaaacttggatgccaatgaatgtggggtggnttnnnnnttatcaacattatgtcatattctttatccttcccaaattattccaatattcttttctatttcaacgaatgtttattcctaaattctaattcttatttttttaatctaataccaatctgattccattctatttttaccgtattcttacctttatct

SEQ ID NO: 46477 - DNA, 370 bp, Zea mays
tgctgcttcaagctttagccaggccataaacaggcgcctttttgatctgttcctaaccccgactaccatcccctagtactctgtggaaacaaagcctgaactgtggctcgcggactaccggctggcctgccacctgggaggaacggacgatgacaaccttatcatccgcaaccttccacttgttctctctgactccgcccgagtctggctggagcatctgccccctgcgcagatctccaactgggacgacctggtcatagccgtctgcggcaacttccaatgcacattcgtgcgcgctgggaactcctgtgatcttccaagctgccgtcatctgtctggagagtccctgcgggactacatgcggcgattt

SEQ ID NO: 46478 - DNA, 368 bp, Zea mays
  unsure (1)..(368): unsure at all n locations
tctaaagggagaacacattntatgattaacaaatgttcattttgagaaagacagtgattgtagcgcatgccatgtatggaagcaagttggagctcatcatccacacaagaacatcatgacgaccgacagaccactggagctcctacacatggatctattcggcccgattgcttacataagcatcggcgggagtaagtactgtctagttattgtggatgaatattctcgcttcacttgggtattctttgtacaggaaaaatctcaaacccaagacaccttatagggattcttgagacaggctcataatgagttccgcttaaggatcaagaaaataagaagcgacaacggaacggagttcaagaactcac

SEQ ID NO: 46479 - DNA, 433 bp, Zea mays
  unsure (1)..(433): unsure at all n locations
agcttctattcagttacatgcaaattaaagggattaacatatcaagaanaaaatataaaactaaatatatccaaacacgaaagacctcaagaatttacatgttgaccaacgtcgatgacatggactgttcgtgaaagagctcgatgaggctaggcacccatcattcttctcatcccatggatgaaatcattccttctctgttatcacagaccaaatgcaacccattattctcaagaaagtacttgaggtataaaccattaattcatatagaccaacaaacaagtaacaattatatcataccagctacctggtagctaaaagaaaaatgccagaatcttaaatcacttaaatggcccattgttggagactcatgttgtggaattactccccattggtaacccaagtgcccaagtggtccaacaagctgtcacta

SEQ ID NO: 46480 - DNA, 255 bp, Zea mays
  unsure (1)..(255): unsure at all n locations
cagtctggtccgtatggaggtgaaacgtctggcatcaacccgaatgtcagccgcagtgttcggttcaagagttgagttgatgcaagtagtatatttatgttggacatggaatgagttgtctctggtcttaacttggcattttctttattttttgtttgcatgtcattcgaacgcataaactccagaatttgtcttacggtattagatgagtancaatttgctcgcgaaaaatatcattatcaccgttgcctgtgt

SEQ ID NO: 46481 - DNA, 487 bp, Zea mays
ctaagcttaggcagctggatattgtccagaaatggtgggtgttctcctatgactggcagcaaacgtgcatgcaagtgttaagccttcaagggctcttcttgttatccatatgggtgatatcgtccatatcctccagtgaagcttcccctattcatgtcaggtgtgctagcagatccataaccacctagcgtatgatcatatgccccaccatatgcggtgccactaaagccagaactactatggccaccaaagctctcttcagcatcaccaccaaacccatgattaccaccatgggcaccgaagctctcatcacctccaccgcgtctatagccacttaagtcagcaccagcataagatccaccaaaacctcctccatataacccatagcgaccaggataaccaaacgaagacgcggctgcatatgcccctcctaatcctgcatagtaacgaccatatgcaccaccaatatcacctaccccaccatatc

SEQ ID NO: 46482 - DNA, 348 bp, Zea mays
  unsure (1)..(348): unsure at all n locations
atgaatgaatctgcctatattgttctaggccttctgcgcaatctgctctttattggaacaagatacctatttcaagagcatattgccttcanggtatggccacttgcggagaaatgggaaatgccacatgaaaccgtataagaaaccgacgaatgtgggcttatcaggttgaagtacaactttaaatttggagataaattcgtcgagccagatgacgactggttaaaaagtattgaaaatttaagtgatgaactgcttggggcttattcgaatgccgaatacactgcaatgtcagcagccttcggaggccgatagaagaagaagctgaatcgggtattcgatgcaatc

SEQ ID NO: 46483 - DNA, 446 bp, Zea mays
  unsure (1)..(446): unsure at all n locations
agctntctctccctctcagtggcgctgctgctttgctgaaaggagttgtggctcaagtagaaggcgatagggatgtatcacgggttttatacccnnnanacnaggggaanttccctccagccttccgaaaagcgcgcgcagagatctctgcgaaggccatagcgcccgcacgagtttgttacggagttcgcgcaggtgatgaatattctgacgcgggggtcccacctggcggggagtaatgcgcgtgcgcacgatatctgacgtcgtgggcccatttggcagcgcacttgagtacagcgacagtaaggtgggccggttttggtgcattttaatccacgcgaccgccccccttcctttttcttttctgatttacttttctcatattgaagttaaatatcagattcaaatccctgtgacaaaattgggacttatgtctaacatgatat

SEQ ID NO: 46484 - DNA, 319 bp, Zea mays
  unsure (1)..(319): unsure at all n locations
ttaccctaacctagtggctacactgtgtaaaattcattaacaccccagtatacaaggttaaagaaggtttattcactttagcttgcttatgctccaacttacgaaaattaagaaaagggattgagaatgagaaccagacggcaaccatatcttttctatcatgccttaattatgtaatgcacaagaaaaatctgttgaaccatattccattgtaaagaaattgcactcacaattattcatgacaaacagacaatactttganaggtcataataaaataatcctaacgagaacacacccctaccttatgaatgaatattc

SEQ ID NO: 46485 - DNA, 145 bp, Zea mays
gaaccatttgattgaaatatctcgccgtgaccaggccgggattctctcagtctacgtcattcccggataacgcgtggaccgaacgcttccgcatttacgaagagtccgcacacctttggatcccgagaactcccttcgtctcgac

SEQ ID NO: 46486 - DNA, 452 bp, Zea mays
  unsure (1)..(452): unsure at all n locations
actcaagcttaacctctatagataacaacgaatagaacattcttttgtctttgtaacaattggactgaacgtggcatcataatcaatgatatatcttcgtttaagaacattcaccaccaatctagccttatattgatctaaactgccatcttgcgtcaatttagatttataaaccacttgtatgttacaacatgactacctttcacgatgagaataaatggtatgccttatttctaataagagcataaaattctaatctattacaactttcaaatctttatttgttaatgctccaacaactcaattagattcatcaacgggagttaataaactacgtttatgattgtaccataagggngtcgctctgtagattctgggttgcacaataccatgttgagactntgtataagacactgagcatcatcaactcctacttatgtactcgatgctct

SEQ ID NO: 46487 - DNA, 321 bp, Zea mays
  unsure (1)..(321): unsure at all n locations
caatgaatgctgtggtaacttcacacctactcgtctgtttatatagtactgcaggtaagaatgcgaagcgccaggatttttacaccaggcggacacccgctcgcactcgctgcgtggtggaccgcatagaccaaacagtaactctgtcatgtggtgccgctacacgctgggaaattgaatcgtttctcgacaacgagctcanggaatgtgttgtttagaccttcggcgctccgaagcttaagagacttttttcacggatcaagctcgttacgataaacgatctatcaccgctaaaggggctactgttgggtctatgcttcg

SEQ ID NO: 46488 - DNA, 472 bp, Zea mays
tcacctgaagcaccaagcttctaaaggagatcacattgtacggctatccactgttctatctgagaacgacagggtgtgtatgcgcatgccaagcgagaaagcacatttgagccactcattcacacaataacatcatgatgaccgacaggccggttgatctcctccacatggatatattcgacccgattgctgacataagcatcgtcaggagtgagtctagccttgcaacaatggatgattattctaggtacacttgggtatattcttcgcatgagatatatcaaactcaacacacattataaggattcttgccacccgctcaaaatgaggtccgcttatcgatcattaaaagatgatgccactaccggacggtgttcacaaactctcaattgaaggcttctttaagaagaagcatcaagatgagtcttctttcctcctgcaaacaaatgtgtgggaaagaaaataactcttt

SEQ ID NO: 46489 - DNA, 365 bp, Zea mays
  unsure (1)..(365): unsure at all n locations
tatggtggctntaatttatagagatcgatcacgagttcagtgttattgagcggcggattgcgataggtatgaactgtgtgagtcactggtggccgcgcaacgtggctattaccgtggctgctcctccggtgatcaccggacgtgcgtagcacaattagccgcgacgtggtaaagtgtttggacacgcggcggacgacagtgaatgatcaacggcggtgagatcctacccgagcgatcggtgaacaatggggaggtacggcggctaaccggattggtgtccagctcaacggcggtgatgatctttctaaccgagatgttatccacttaccccgagaacgaatcgagacgccggcgacacgaatcac

SEQ ID NO: 46490 - DNA, 444 bp, Zea mays
  unsure (1)..(444): unsure at all n locations
ctctatatatgtcgaggtgacatatgatgatggctgaatggttgttacgaaggtcgtatcttatcaatttcgtcggttgcccatcattcctcggctttcaagggttgtcctcaataatgaaatagctctgcatatgacgtggccaaagaatggtgtacgtctcgtcactgagccatacataatggtccatccgtcggacggtgatgcgtggaatgcatttgacgagtttgatcccgaatttgcaaacgaacctatgagtgtacggcttggtctatcgacggacgaattcacacctttcaataccagtgcaagcccttactcgtgttggcctgtctttgttgtgccatataatcttactcctgagttggtcaatatataagaagtcatgttccttgcactagtcatcccatgccccgagcattcatggccntagctgaatatgtc

SEQ ID NO: 46491 - DNA, 367 bp, Zea mays
  unsure (1)..(367): unsure at all n locations
agcttgacctatggacccgcgtcaacggaatagctcaatcgtgctcaccggagttcaagaacccgctggcgcacgtggaccgggtaagcccctgcaccgttttccaattcgttgcgcgcatggcctctacggcaccccgtgaagctcctcgtgccccttaattgaactataccgccgtggtttggccggagcaggagccgccgacgacccccaccgcctgtgctcgtggccagggtagctccgaccacctccgacttcgacccgcacaccgacgtgaccgtctcgacctcccggacgtcgctgaccaccccgccggagctctactgncgccggtaagccccaccgncgtaatctatgccgcgggtac

SEQ ID NO: 46492 - DNA, 177 bp, Zea mays
cattttacagcttacggcgttaaacgccacaacacgacgttgtacggaggcataatgatgttttaagcctattcttgtaacatttcatcgactatggtagcaatagacatgacatggttctttcttatcaataatctaatttcttttttctgtctcttgagatacccgctttttaat

SEQ ID NO: 46493 - DNA, 439 bp, Zea mays
  unsure (1)..(439): unsure at all n locations
gttcttagtatatcaaagaaaaactatacagagtcagagaaggtgttatatgctgttttgatggcatccatgaagcttcggcattactttcaagcatacaatattattgttccttcttcgcagccgttgaaggatattatgagaaatagagaagctactgggcggattggaaaatgggctgcagagctcaatgaattttgcattgattatgtgcatagatcttcgatccagtcccaagcgttggcagattttatcgccgattggacgccatgggctcatgatgaagaaacaaataaagatgccgaagtatggacagtgttntgcgatgggtcttgtggaaccttctgtgcatgagcagctgctgtgttggtctcgccatccaaagttaaaacttgttatgcggcaagactcgatttcagttgtacaaacaatattactg

SEQ ID NO: 46494 - DNA, 179 bp, Zea mays
gctagtttaatgctaacgctcttttgcaatatataattgcgctaacactaaagtagaccagtcttagaaacccttcatgtaaaacaattcaaaatattgctaaatgaatttcagatactaaactaaaaaggtattgaatgatcgctcctcacgctgtcaccaaagagattggactgttg

SEQ ID NO: 46495 - DNA, 345 bp, Zea mays
tactaagcttctcgactagtcgtgacagggcctcatggacgggtgaattttctcgttatcggcaaggccgaccgagccgatggattcccactcctctgggacacggatacctcactcgttccttccgcgaaaagcatctcttgctcacacaaacatccctgttaccgacgaagttcagatgctcgaaacacgaggaaaaaaggcgcagcttcgcatgtgcagcgagggtgttttcttctggcctcggcggccgcaggaagcacacgctacaagatgatcggatcctgcatgctcgggtcttcacgacgaatggagctgtagcaccctcggcatcgacgacgtctt

SEQ ID NO: 46496 - DNA, 447 bp, Zea mays
  unsure (1)..(447): unsure at all n locations
tactaagcttctaagggagaacacattgtgggactaacaaatgttcattttgagaaagacagggtttgtagtgaatgtcaagcagggaagcaagttggtacccatcatccacacaagaacatcatgacgaccgataggccgcttgagctactccacgtggatttattcggcccaatcgcttacataagcatcaacgggagtaagtactgtctagttattgtggataattattctcgcttcacttgggtattcttttttgcaggaaaaatcacaaacccaagagactttaaaggggttcttgagacgggctcaaaacgagttcggattaatgatcaagaaaataaaaagtgacaacgggacagagttcaagaactctcanattgaaggctntcttgaggatganggcatcaagcatgagttctcttctccctacacaccacaacaaaa

SEQ ID NO: 46497 - DNA, 360 bp, Zea mays
ccccgtacattggtcctttccctatactggagcaatgtgtgccattggcataccgactccaattacccgaaaccttgtctgctgtgcataatgtgttccacgtgtcacaattgaagaagagtcttcgggttcccgatcgaaccattgaagtgacagatgttgtccttgaaccagacttaacatattccgaacatcccatttgagtcttggatcaaaaggacaggattacccggagaaaaactctcaagttttacaagatacagtggaaccaacatttcgaagatgaggctacatgggaaactcaagaacttttagatatgaatttcctaagctttttggcctcatgtaatttggaaacat

SEQ ID NO: 46498 - DNA, 429 bp, Zea mays
ctaaatggagaacacattgtgggactaacaaatgttcatttttgataaagacacgatctgtagcgcatgtcatgcatgaaagcaagttggtgttaatcatccacacaagaacattatgacgactgacaggccactcgagctcctacacatggacctattctgcccgattgcttacataagcatcggcgggagtaagtactgtttaatcattgtggatgaatattctcgcttcacttgggtgttctttttgcaagaaaaatctcatacccaagagaccttaaagggattcttgagatgggctcataacgagttcggcttaagaatcaagaaaataagaagcgacaacgggacgaagttcaagaactctcaaatcgaacgttccttgaggggagggcataagcatgagttctcttcttctacactcacaac

SEQ ID NO: 46499 - DNA, 391 bp, Zea mays
  unsure (1)..(391): unsure at all n locations
tactaagcgtgacacatagctcatttatacctttgatcatatttctnttatatgctatgactaatgtgtgttcaagtctatttcaaaccaagtcataggtatattgaaagggaattggagtcttcggcgaacacaaaggcttccactccgtaactcatccttcgccatcgctccaagaaaaagaccttgtctttgggggagaaagtaaaagcccatagcaagaggaccggacttcgtctttggtataatcttaactcatttacttatgaccaaaggggaagatagtacttcggagggctctaatgattccgtttttggcgattcatgccaaatggggagaaagtatgagcccaaagcaaaatgaccgctccaccaccaatgtcaaaaactt

SEQ ID NO: 46500 - DNA, 331 bp, Zea mays
acacaccacaaggatgtgtcatgtcacgatccataagtagaatgaaatcggtgaagccgtagcacgacagaacccgccgaagcatgtcttgcatactgcttcgtgctactctccgtatatgtgggcaatctacaacctacggcttcctttctttcggcaagtcactcccaatctccgtgggctcatgtgccaccaccaccaccgatggtacctaccctcgtttataaccaacagccagaatggcatcgcaagctcatcaacagcgcgaccttcgggaagagtccgaagctcgcacagtcaatagcactgtgcctgaatcgagacatatcta

SEQ ID NO: 46501 - DNA, 500 bp, Zea mays
  unsure (1)..(500): unsure at all n locations
agcttctaaagggagagcatattntatgattaacaaatgttcattctgagaaagacaagatttgtagcgcatgccaagcaaggaagcaagttggtgctcatcatccacacaagaacatcatgacgactgacaggccactggaactcctacacatggacctattcggctcgattgcttacataagcatcggcgggagtaagtactggctagttattgtggatgattattctcgcttcacttgggtgttctttctgcaggaaaaatctcatacccaagaaaccttaaagtgattcttgagacgggctcaatatgagttcagcttaatgatcaagaaaataagaagcgacaacgggacgcgagttaagaactctcatattgaaagcttccttgacggggagggcatcaagcatgagttctcttctctctacaccccacaacaaaatggtgtagtggagaggaagaatataactctattggacatggcaagaaccatgcttgat

SEQ ID NO: 46502 - DNA, 373 bp, Zea mays
tacactcaagctttctatcctcaactcccactgtcaccaccattgtcttcttctcatacccgaagcctgcagccagataggcaccagcatgaccaacagcagcgcgactttagagaggagttcgaagctcgtacagtcaacagtactataccagagtcgaaacatatatactgtggaatatcctactgttgatgtacctttatcttttatgttattttattttctccgcgagaaacaagtaatgaagaacttaatttcaaatttcttgtaataactgtgcctacaccaaagataaatctatcttcctcatggattttcgaagctcataagtcgttcctaatggaatgcagagccaaaaattacgatctgaagc

SEQ ID NO: 46503 - DNA, 445 bp, Zea mays
  unsure (1)..(445): unsure at all n locations
agctntccgcgagcgtgctggcatcgtccgttttctcggtgatggcgtgtcgnggggagacggcgctcgtctgagagcacctagagggggggtgaataggtgatcctgtgaaacttgaaaacttaagccacaaaaacttgattaagcgttagcacagtaaatgccaagtggctagagagaagtcttagcaaaaacacagtaaccacaagagaacaatcacagagatgacacagtggtttatcccgtggttcggccaagaccaacacttgcctactccacgttgtggcgtcccaacggacgagagttgcactcaactcctctcaagtgatccaatgatcaacttgaataccatggtgttntgcttttcttttcttatcccgttcgtgaggaatctncacaacttggagcctctcgcccttacactttttgatgtcacanagaatca

SEQ ID NO: 46504 - DNA, 348 bp, Zea mays
  unsure (1)..(348): unsure at all n locations
tgactagtgagagagatttgcttgtgttctttcgagctcttgcgcttggattgctttcttctttcttgattctttcttgcgatcaaactcacttgtaattgatgcaagagacaccaatcttgtgatggtccttgtaggaactttgtgttccaagtgattgagaagaaaaagctcactcggtctgatggaccgtttgagagaaggaaggggttgaaaaagacccggcctttgtggcctcctcaacggtgagtatgtttgagagaacagaacctcggtgaaacaaatccgcgtgtctcacttcactattcgcttgcgatttgtntgcaccctctctcgcggactctatta

SEQ ID NO: 46505 - DNA, 413 bp, Zea mays
  unsure (1)..(413): unsure at all n locations
agcttgtcacaagtaccaatatcacttacaatgtgtgcactagctatatctaacaaaatactgtcccctgcagcattatcttgattactgacaccactgtcgctgatgctcatcatgcttattccttgctcacagtttggctcaggtgctacattatgaatatctgaaacgaaggaccatattctagaaagttctgcagacgatggacatcctgaatagcaatntatagtctgccttttgtgtccggcagatgaggatcctgcaatgtggccattccaatcacaattttggcaaagcgaggcattttctgctagacagcggaccatagcangctgtgaagcacaccggtcacataaaagtgtccttgtatgacgccgagaaaaagcatatctgaatgcacattacngtcacat

SEQ ID NO: 46506 - DNA, 299 bp, Zea mays
agaagattctgtattgcaacatgtgctaatctgcgatgcctaagtcaacccatattagtcatagcacttaaacaagtgctgagtgcagatgtgtcttcattaaaatcaactaaatatagctgaccctctaacactcccttaaatgctattgaatcgacacttcttctaatgacagtaacacctaaatgtgttaaaaaagacagttgcagcccactctatatatgcgagaaacggaaagcaaactgcaatctaaagaatctatgagacaaatattggaaatagagtggttacgtgatata

SEQ ID NO: 46507 - DNA, 313 bp, Zea mays
ctctctgcagacatacatggtgtgcattggtcataacactaataatgttgtggacttattaactattataccattgcgaccttgatcacattccacttgtatgtaagcataaacctcgaaagttagattggtcctactccacacttatacttgttatatactccttttatttaatttttttcaacatcagggaacccttgtgatttagtgtaagacctttgacttatgaatactaaagcctaatctctgctctggacgtgcgggattacttattcaaccattgtgtgttggtgacaagaaaatatgatgattt

SEQ ID NO: 46508 - DNA, 433 bp, Zea mays
  unsure (1)..(433): unsure at all n locations
ctaagctggtgctgtgttgctggcatttcatataccggccggcagcactctctgccatgccatcttgggagggagccgttcgtccagaggatagactttntggtgatttaacaagacagacatgaatcattctacccctttctctttccccaaccgaaaccatgataccctttcagaccactaataaggcgcattatactatttatgttgacctcagaaccaataaaaagagagagaggaggctcaattattagcacttgttttctcggaggcccatgtcatacggtcggtggttcacatcatcacagtcgtcgttgactctcctcgcgtgaaagtatacggttcttcagcaagctattaattattgcataatccagatgtgtgtgtgttgtgttgtgtgtgtaaacgaccgaccttgtagatcaattaccat

SEQ ID NO: 46509 - DNA, 486 bp, Zea mays
  unsure (1)..(486): unsure at all n locations
cgagacctttccccgtttctttctaaccatgtgttattctatatcgcatgtcatattctatgcatgtttagtctacttgatctcttgtatggtgtactattggtttcctaatttcaatggatggatgtatgtatgtttgcaaccgcatagagaacgatctggttgaagagcccgaagaactcgcatgataagcccctgatcatcactctgttggtggaggcaagtgtcccttgacctatctctgtcctattcattctttaattcacctgccacattacacatttatacttaatgagtgactagctgttgttatccattaccttgcttacctattggtgggattattattatttagctntatgctatngctcaactataatcaatgaacatgatgagattatctatgatacgctattgtcccacacttcttcttatgatgntctacttgtggccttaagggggctcgagcggttctcgagtcctctc

SEQ ID NO: 46510 - DNA, 260 bp, Zea mays
  unsure (1)..(260): unsure at all n locations
tctgggaatacattactcgnggagaaaatgaatatgccgatgtactatatacttacgagcacaacgggtgcccttacctatagaagtatgaccacattcactaaaaccaccttaagttgaccctctataaatagccatactaaggatatgcgacgccaatactgaacactggataacccgaaacatgtctctggttcaagcgaacattctttcagaagacgaaggctataacaagatgatagaggcaagagctcgaccat

SEQ ID NO: 46511 - DNA, 328 bp, Zea mays
actaagcttcgaaaggtctcccaggcccacacccatcacgggcccagtctctgtctggcacccacaggtaccggctccgtcgcttcaactgacatctgggcccgcataacgcgcgtcccgctcgtcagtgagagtgtgcgacggctacttgaaacccgagtaattttgtgcgacgagatatctgggaaaaccatctactgacgtgtgggaccggagcagataacaaatccagcgcctcaaatctaagcaccccgacgaaatcgcctaatccaaaccgcctatgcacgttggctggccctactaaacggagaagccccaccacatacgc

SEQ ID NO: 46512 - DNA, 396 bp, Zea mays
tatgcccatagagtcttcaacaaaactcatggtattattgaagaagcttatggtgttgtattcgatgaaacaaatgggtctcaagatgagagtgataatcctgatgatgttggtagaactcaattgataaatgcaatgaaaacaatgaccattggtgaaataaagccaaaggaagatgatgatgaacatagtgtggttgtcattccttcatcctcaactctaaatgaggaagatcaccatagccaacaacatgatgaaactatggatactcatgatcaaggtacttcaagacattcggttccttctaatgcttcaactagcaattatcaaacggtattaagaattcatcattccattgtgaaggatcacctggttgatcaaattgtgggtgatatt

SEQ ID NO: 46513 - DNA, 429 bp, Zea mays
  unsure (1)..(429): unsure at all n locations
tctcaagggagaacatgtgatatgtctaaccaatgttcatttctaataagatagaccttgtgcagcttgtcaagcagggaaacaagtgggaggctctcatcacaccaaaaatgtgatgacaacatctagacccctggagctgctacatttggacctcttcggacccgtcgcctatctgagcatatgaggaagtaagtatggtctagttattgttgatgacttttcccgcttcacttgngtgttctttntgcaggataagtctgaaacccaagggaccctcaagcgcttcctaaggagagctcanaatgagtttgagctcaaggtgaagaagataaggagcgacaacgggtccgagttcaagaaccttcaagtggaggagttccttgaggaggaanggatcaagcacgagttcttcgctccctacacacc

SEQ ID NO: 46514 - DNA, 444 bp, Zea mays
gcacctagtcacaccagcataccaaatcaaatacctccggtagtggtagtttgtgtgcgcatgttcgttctcatagttaagatcccccctgctgttcccattcatcaatgtaatcatggtggtgggtctcgaaatccgtgaccttcttctgtctctgtctgtcgaacctgcaaaagttagaaacatatattagtaactcattcaatatttgaattattagttagaataacaagtgcatgtagtcactcacttatgaagttctattgaagtcgagaatggctccaccggaaactcctgtcgcaatctgaactgtcgagcaactctgtggggcaagtggtactcaacagcataaaaacagatgatgggacacctcattatgtagaggtcctcgtctattgagcacatgctgctcaactgtatgcttgggaaatatggatcaagata

SEQ ID NO: 46515 - DNA, 266 bp, Zea mays
tcaactgttcgatctgtctgtactgcgaaacggcaaactatattctgtgctaacaattattaggctgcctgtgatgcgattggggaaacaaccctcgcgttaatccatttgtggaagtattctacggctgcctatgcgtacggtattgttgccctgtccggtgggcaggggcccgactatgtacaagccccagcgctggagaagccatgtatgggcgatcaactattgatatcgcgacgggctgactgaccgtagatagaacctat

SEQ ID NO: 46516 - DNA, 376 bp, Zea mays
  unsure (1)..(376): unsure at all n locations
tcgtgtaaatatcttccgaagctatactctgaagatcaatattgtttctccttgcgacttaacatgatttgccctttttcaaagcattttctcgaagatcgatattatgcccccttcttgtgccatatgcagcatgatgtatgatgcttatgttatgcaaaatgatgtgatgatgttatgctatgtgagatggtattcattccgaatgtacacgcacatccgtgcgatgaaatacatcatcctttnttgaatcaacgttgatttttcgctgtaagcctcccttatgagcttcttcgccttttaacttagcggaatcagcgttgacttttcgctgcaagctctgcattcccttatgaacgtatgtggagcttcttcg

SEQ ID NO: 46517 - DNA, 390 bp, Zea mays
agcttggccaagagttctctttcaggtctttttctttcaaacgagtttgctgaccctgccagaaaataagaattaggtaagacctactcacagtttgtttcattccccatataatggcaggaaaaaacaagaacaattgacataggattgtgatatggtttactataattctgcttccttctgctacaattatttcggggatgtaccatccatgcaaacctcacaaacaattcagaatacacacacatggctgcataaaaacataagcatcaacaacagtttgatgtgacccgtcaaatatgcactttgtgacaatccctagtaatccacctacctaccttcatattgccagatatcatttcaggaaggttgttcatgtcaaccaaacct

SEQ ID NO: 46518 - DNA, 306 bp, Zea mays
  unsure (1)..(306): unsure at all n locations
gataaaatacgcatattatggaacccaaatatatgcaagctacaaagcttatcatggattctcaagtntggcttgatcaggaaaattgtaaaaaatgtatgcaatgataaaaacaggcatattatgaaacccaaagctaatatatcaattggtccattatagcattgtaataaagcaatggtctcaatatgttgaatatgccttggtcaaaaaataccatgaagacaacattgaattcggtatctacgatcactaaagtaaccatatcatgaacaatgaatcatgaaatgtgatgacatcatcagc

SEQ ID NO: 46519 - DNA, 273 bp, Zea mays
tattcatcgtattctcagtcaaatgatcactttgctctaacttcgtgagaagagggagcctcatcaaaagtactcaacttcgcttaaacacaagaaattcaacattaaatgggcagagtgcgctcaacatctatggttacacacgacagagaggaaactgaagcttctgaaactgctctgatctccgaagttatgagacagttaagactaattgtaacggagggcgctcctgactaatgcgcccctgctagtgaagcggagcatgcaagcatt

SEQ ID NO: 46520 - DNA, 345 bp, Zea mays
  unsure (1)..(345): unsure at all n locations
cgcggatggcgcccacnatctcgtcggcggagaaacctttctccggctgctgcgaccacagcaccgacggcggcgtncacctgtccgccaacaccgcaccaacaaagcgccggtcgccccgatacgcaccggcaggtcctcactcctgccctcgccgaggacgccccaaaacatgagcaccgccctcgcggtgtacgacgtgctgggcaaccctctggcgtggctgtcggcgcgaggaagacctggacgtggtcgggccgtacgcggcgcgaccgccgcccgggcgaaggacggaacgctgcaccctgcgaaagaagcagcagttcgccttcccccgcatgactg

SEQ ID NO: 46521 - DNA, 163 bp, Zea mays
gcaacaatgctggccacttggccagtatgtgcgttgcccacttgtcagtcctctctaaatttgaatgcatcatgtgctgcagttatttggttgcaaaagaagaataaatgcggatttaaagaaaatataagcaatgatgtggcatgaaagattaccctgtgcc

SEQ ID NO: 46522 - DNA, 427 bp, Zea mays
  unsure (1)..(427): unsure at all n locations
tactaagctgtgtggtgattgcttgctacagagcatcctcagtctaaaccaccacgtgtgctgagatccagtcttagaaataccgtccaggaatcgcatatcagcccaagtcaagatcatgctccacacttcctcggcgaatggacaatctttacatatgtgtgccgctgtctccggagctacattacaaaaagaacaattttgattgcaaggccatccccngttttgcagattgtctgaagttaaaattttgttgtgcaacaatgtccaagcaaagaaacgacattntggttcagtttttgctttccaaatggggttgatggtgaatttacagaagttcgttgtgaactgaattttgtatgcgctacttgaactgtattccccatctgcagaccatctgcaagaaatggtgtcttcaagatcattg

SEQ ID NO: 46523 - DNA, 246 bp, Zea mays
tcccaccgtgccgagctggcccaagcatagtctctgggtaagtgacccattcccgctcccattttgcgccaattccgcttgatcatggtgaatcccatctcgtcagagccccactttgttagaccaacgtttttacgggcgtcagtcacttgaaacccttcccgagcccaaactcatgcctatggcaccctctcgcgttccccgtaacctatgccgggcatagagcgacggattaacccccactgt

SEQ ID NO: 46524 - DNA, 430 bp, Zea mays
  unsure (1)..(430): unsure at all n locations
tgattgtagggaaagttcactgttcaatctagtgatctctgcttgttcttctcccactgaaccttccatcatttgaagcacgaagtatttcttttctatggcagcttcatgatctttaatcttcttctctaaaccctcaattataactttgtttttcttgtcctcaaggtcttgttgcatcctcaaggctttgcttatcagtaagctctgacaaaataaccttcatcagataacatcttcatatcaaagcaataaaaagttaagggaagaactttaccttaaggttagaataaaacatgctatcgacgatatgctgtcgccggtatctgctgagatcgagttttagcttcgaanaaccaacacttttcgacaaagtgctaacaaccttcgcggtcccgaaggcatcctatactctcttcggcaacaccac

SEQ ID NO: 46525 - DNA, 349 bp, Zea mays
ttactaagctaccattattgttcctcatacaacctctaaaggatattttaagaacatagaagcttcttggatgagtggaaagtgggccgcggagctcaatgtattcaccatcaactacgtgcacagatattcaattcaatctcaagcgctatcagacttcataactgactggacgccattggctcactaataatggacaatcatggataccgaatcttggaccgtgttctgcgatggatcttggggaacacttagtgcatgatcatctgcagtactagtggcaccttacaaagtcaaaacatgtgttgtagtcaaactggatttcatttgcacaaataatattgctgat

SEQ ID NO: 46526 - DNA, 248 bp, Zea mays
cttacacgcggcatttttttttctaatttttccacacttgtgggttttggtgaccatgctaagggccgtgaggacgcgggtatccacgacgggcactccggaactcccctatccacagcattacacacttactttatgtgtcactcgttcacgcgtgtgtgtgtactgagctacacggaaatcctcggcgcatgcggggtattagtaactgtgcccgaacacatgaaccaccgcatgtgtgtatatct

SEQ ID NO: 46527 - DNA, 243 bp, Zea mays
agcttttgagtatattggactttcattcacggtaccatcaaatattgatgaagaatgaatatgagccaaaaacacacttcatcaccccaagtgtgacctattattactcttcaaatgccacgagggctgcaaaatgtcggggaagcttagtacaatgatggaaaagtgctgatacgtatataacacgattgttttgactatgtttatgacattatatcatgagtacaagcatgggaccacatt

SEQ ID NO: 46528 - DNA, 465 bp, Zea mays
  unsure (1)..(465): unsure at all n locations
acacattgtgggactaacaaatgttcattttgagaaagacaggtattgtagcgcatgttatgcatggaagcaagttggtgttcaccatccacataagaacatcatgacgactgacaggccactcgagctccgacacatggatctattcggcccgattgcttacataagcatcggcgggagtaagtactgtctagttattgtggatgactattctcgcttcacttgggtgttctttttgcaggaaaaatctcatacccaagagaccttaaagggattgttgagacgagctcaaaacgagttcggcttaaggataaagaaaataagaagcgacaatggtacggagttcaagaactctcaaatcaaaggcttccttgatgagganggcatcaagcatgagttctcttctccctacacgccacaacaaaatggtgtagtggagaagaagaatagaactctattggacat

SEQ ID NO: 46529 - DNA, 274 bp, Zea mays
taactccgcaaactaacaagagggagactcaccctttatagtggccaaattgaaccggcattacctaagccatgctatatgtgacaggcactccgaagaagagagataaaaatctcaaaaaggcgatccagtttcggaatgattggaactatgctctttcgcagagcgcactacatacaggtttttcaattgccaatgttggaagtcgaaaaaaagtaattaaccctaatacaatttgaaggtccttaaaaaaattgttttttgacttatccaa

SEQ ID NO: 46530 - DNA, 430 bp, Zea mays
tgctaactcttggaatggtgggcctcattctctaatcactctcagattatatgtccctataatatgaccattaatgcactatggtagatgtcgtgttcatgcaatcatgcttttaagattatatgttgttgtctatctaaagtactgaaacacatgtcacaccaatatatgttgcatttctttttccactaaccattgacatttataagcattgagacaacaattgagacttgtgagataatgttttcataaatatttccgcttcgtgctatttgtcaatgcttctcggcccaatggtttatggtcaatctattaagctgagtttgtccttctgtgttctccttttatctatccccaaggtaattgagaatgtgaacaagatgaaagaagagagagatgaaatgtggtggtccatgggcgttctctcgtc

SEQ ID NO: 46531 - DNA, 378 bp, Zea mays
gagaaagacagaaagttgtagcgcatgccaagctcggaatccagttggtactcactatccacactatatacattatgaccagtgacccgcctctggaacttccactcatggatatattcggacctggcgcttacataagcattggctggagtaagtactggcaattcattgagggagactattctcgcttcccttggatattcttttggcacgaaaaatccatacccagagaccttaaatggattttgaaccggcgcaaatgagtgcgcttaggacgaaataattaaacgacacgggcctagttcagaactctcatatgaggcctcttgagaggaggatcaactgagtctttcttctcactcacacaaatgggtttga

SEQ ID NO: 46532 - DNA, 397 bp, Zea mays
  unsure (1)..(397): unsure at all n locations
tgacaacaccatntgacattntacataaaatttctgagatctttaatatttagttcattcctcaacatgcaaaagcgggtcttatcaagaggcttagtgaaaatatccgctaattgatcttccgacctcactccttctaaaatgatatctcctttagcaacatgatctctaaggaagtgatgacagatatcaatgtgcttggtgcgagagtgttgtacatgattattatcaattttaacagcactctcattatcacacaacaaaggtaccttttctagaactacgccatagtctagaagagtttgtttcatatacaaaatttgtgtgcaacaagcacctgcggcaatgtattccgcttcggcagttgacaatgcaacactgntttgctttttggatg

SEQ ID NO: 46533 - DNA, 364 bp, Zea mays
  unsure (1)..(364): unsure at all n locations
agcttgactcaagtatccacacattaatccttaattcatttntcccgtctcatggacaaggcatcctccctggatccaagtccatagaccaacatagatcccgttatcaagatgaatacaatcaattcctgacctcgcgcgagtgctagaaaatcactcgacttctaccgagatcctgattagcaagcagctactcgacctagcatactagtattcatctcaaaaaggaatcctaagttcatgcaactagaggtttcaagcaactcctacacttaagtgcacattacagtcctacaagcactaagtgtagtaaagtagcatatattaacagggttatgcataaaaccggggcttgccttcaact

SEQ ID NO: 46534 - DNA, 333 bp, Zea mays
tcagcagaatgacatcgaagggtcttcattctcagatcggcagaaatgtgctaacttatgatgatgatatcattgttaaaagcacgaagcacgataatcacattgctgatctacatgaggctttcgctaattttagacaggtcggtctaaagctgaatccagaaaagtgtgtcttcggagtaaagaaagggaaattccttggttgtctagtttcaacaaaagggattgaggctaatccaaataaaatcgaagctattcttcgaatggaaacacctatcacacagaaaggggctcaacgactgacgggaagacttgcatctctataccgattca

SEQ ID NO: 46535 - DNA, 356 bp, Zea mays
  unsure (1)..(356): unsure at all n locations
atgacattaagttcaattggtcctctaagtgcaatgaagcctttgagcaactgaagacgctattgaccactgctccggtattagctcaaccggacatcactaaaccttttgacgtatattgtgatgcatctggcaatgggctcggctgtgtactgatgcaagatggccgagtgattgcgtatgcttcaaggcagttgcgccgacatgatgagcattatccaactcatgatctggagttagctgctgtggttcatgccctaaagattnggcgtcactatctgctgggaaatatctgtcacatatatacagatcataaaagtttgaagtacatcttcacccagtcagaggtaaatatg

SEQ ID NO: 46536 - DNA, 467 bp, Zea mays
  unsure (1)..(467): unsure at all n locations
cccggatcttaagtcacctgcggcatgcaagcttgtcttggtatcccttctttctttcctctgttccaacacctcttcttcatctgccttcaccccaataaagatcaacccatagttgttgggggcattgggattctgctctatgccaactagcaataccttgattatcctttcaaatcttcccaacaattttggtacaagcactagttttatcgtggaaatcatgagcccaaacttctagaattcttggtacaatgacctatccctcgacatanatggatgagagaccctccaccaagacactctctaaactaggaattcttgggcgcanaaaccaaagaaaccagggtcttaaatacaaaagagccatctttgtcctcttatcaccctcatctgctcacggtcgtcggcatacagggggtcaccagagtngcgatcttcatggcatgggtatgaaatcaacgaca

SEQ ID NO: 46537 - DNA, 431 bp, Zea mays
gggcaactgccagttggacctttcgaaacagtcctacgtggccgcatgcgccgctgtggacgacaagctgcggcccatgcgtgtttggatgctgtccatatcggctgcactgcgttgtccatcgtcaagcatggggacctcatggtcgtcgtcaatgtcggcgactcccgggttgttctatgcactgcatccgacgacgacgccatcacacctagagatggcaatgggtaaatacccaccgggtattactaccctatactcatacccacgacaaaataataatcccaccgggtcacccatatacactggtgggtatggatttatccccatacccacgtgggtatgggtcacccatctggtcaccgtacccacaaaataaatattaacatctatcaaatatatattattccatatcaagtttttcatctaat

SEQ ID NO: 46538 - DNA, 102 bp, Zea mays
ctcactgcgcactgctagacactctgtctttgcttaacatggtgagctgggaggaccgcaccgcgcacaattgctctgaatatgccctacaattcagactct

SEQ ID NO: 46539 - DNA, 375 bp, Zea mays
cctgctttgcgtctgtcatataaaagctgacagattctcaatgtgtaaatgtcaagctgatgtcgcacatgatacatgaggatcttatgcacatgcaaccattgtcaccttggtgtgacaatcgaagcctgcatggatctacagcctcatctgcgcctcaagcccaagagggcgacatatgatctgtttagctctcattgctaggctacatataatcttgctgtgataaccaactttgccaaatcttgtcccagaaatatcatatggtggatctgactaatcttgaaacgatggtgaactttatgtgagctgcccttgtgcctttgcgttttgttgtgcgttactacgctttgaacctggcacatcctgttgtac

SEQ ID NO: 46540 - DNA, 199 bp, Zea mays
  unsure (1)..(199): unsure at all n locations
aacaagaatgcagtgcagggcgtcctgactttaagcttgacanatcgattggaggtcatcacaccaatattatatatacatacagatcgatattaactataaatatatgttgcttatgtataatacaatgaattactaagcctctctattaatctaaaatctcacattgggacaggctctattattgacaatatcacac

SEQ ID NO: 46541 - DNA, 346 bp, Zea mays
tattggcatgaatactgccggggaattactcttgctaggtgctatagttttctaatactttcccgactggatatgatatgctgcgcaggctgaatacggtcgttttactaatggtcgatttactgtcgttaaagtgtctgaggttaagcacttactacttgggcaactcaaaattagatcacacttttgttggttaactatcttcaaaatatactaccatttcttcggatgcgccttgattgtgcactcatgataacttactttcgacgtttatcttttggtgcgtccaatcattgcaagtgtgtattggcaagtccgatagacacgtaatgtcgggagctacttt

SEQ ID NO: 46542 - DNA, 364 bp, Zea mays
aaccactaagcgtacaagcagagaccaaaatgcctgtgaccataccttctcgatcaagggctctatccatcactttccagagacttactaaacatctacatggactgtattctgtgtataaggatttgtacaagttggtgaccagcgtgcacgactttattcaggtctcctgagatgcgtgaggcgcgactggcccattcgaggccacgcacataccaagtcatataatagacaactagtagaggagccacgccgctatctgtatttgtgctgctctcccgtgtgtgtgtgtctgcactctccctctcgtgcgatgctgccttgcttgtgtctgccttttgccttcatccgtgtgctgtgtact

SEQ ID NO: 46543 - DNA, 90 bp, Zea mays
cacccaaatgaaatagatagcccgccacagcgcgactcaaatacgcctaccttttcgtgtaaaccgctttagtgggagcgcttttggcaa

SEQ ID NO: 46544 - DNA, 157 bp, Zea mays
  unsure (1)..(157): unsure at all n locations
taagtgcattatcaccttaagtatgaccatcatttaaacgaccttcattgaataacatattccattgctatgatacnatacaatatatcacactcctaaaccataaataaggctcttgaaacatttcctaccttactgcttgtcatacgaatatgat

SEQ ID NO: 46545 - DNA, 140 bp, Zea mays
tttacactgtgtatttgtgcgcaatatcgacgaacttcactatgttgagcgtgttcgatgctgtgctttcaagtgtccgggcgaaccctttagcctggccctcattaactccatatggatactgagtgcagcttggatct

SEQ ID NO: 46546 - DNA, 404 bp, Zea mays
  unsure (1)..(404): unsure at all n locations
ccatgcgtacttcgagaccatagcaacttctatcagcatatgtctgacactgaataactctgccgatacaagtttacttggaaggaaccaccacactgtctatcgaagttctagaccatgaaacatgcctgctcgcatttattcttcttctctgtccctacgtcagtcacatgaagctgcaaccttggactgatcgagattatggcntataatcaaattattggctctgagccatctcatcctcacaagttctcgtttatatacttacagttgaaacgatgatattgagctgaatatgccactctgagcataacactacgcttctcatctgtatttttgaactaactcgtcaaattggctgttgatactaacttcgcatctgctacgtagcactccttaacaga

SEQ ID NO: 46547 - DNA, 326 bp, Zea mays
cctatatctgctagtttaacataagtcttctaaaggggcttttttatctgaaagatattgaagttcttgatttttgtcatgagggttgaaatttttataatgataactccaccaattattagactaaatccaaggaccatttaaatgtattcaatagtgcctgctaaataatagttgaactgtattcatgatgctggtgctacatctataacgctgacgttccacgcttactgcatctctcaaactgtcaagataactcctctatgtaaagattatgtaaatgtgcagtatacataatgattactgtgtgattagtaatacatatg

SEQ ID NO: 46548 - DNA, 259 bp, Zea mays
ggcggcacgtagctttgacctttagcaggccaccagcccaggcagcacacccggggccctgcggacagtccgctcgcgcagcacatcaacctgttttgttgccagtcacccaagtgaattccattgctatctgcagatgtcccaaatttcttgtggatacgtggagcaatcgaaagaagcaggacagaatccactaaatgtgtaattcggtagatgcatagtgattgtattaataaaatactgaggtatcattattatc

SEQ ID NO: 46549 - DNA, 346 bp, Zea mays
  unsure (1)..(346): unsure at all n locations
actcacttcaccttcaaacntaagctcgacttaccttgactctgtcatatgaccgaacacttgcgatagtctagatggcctctatccatgcttacttcgaactaagcaagttgactcgatgtatgtcacaaacaattgcgctataattacttggaggaccaccagaccgtctgtccaagtcccaaacatccaaacatgcatgcttgggtttattgtctctctgacctgcgcagcacatagttgtaccctgactgacaaaatatacattcctgaactctgacttgacctttcaatttcaacttcgtctatattctcagtggagagacattttactgaatagcagttt

SEQ ID NO: 46550 - DNA, 208 bp, Zea mays
ggtgatggtacactgtagtggctaaagataatcgcacaattaataaccatctgcgtttctatcatctaaacctaagttctacttaccattgggcagataatgatgccttggaaggcctgactgcagctcttagcgtgcatgatttgcttctctgatgagatactgctattgtgccgccaagatatttggtattgcattcaaacctttt

SEQ ID NO: 46551 - DNA, 242 bp, Zea mays
tggcccgatcatctactgagagcggggtataacccggcatatacaacgcccggagactctatgctatcatcccgcgatctatctactcaattgtggatggtgacgacctataattgtgctctcttgtcatctctgtacaaccacgcacacctcatccgaataacatagtcggaatcgatccccaatcgtgtacgcgcgagaattccgtgtaagtttgagaacgcgcactgggtgttggtcat

SEQ ID NO: 46552 - DNA, 277 bp, Zea mays
ctggtgcacctccgctatgtagtgttacttcgtctgccacctgtaacctgtgcactgtgctgtggaatattgtgacttattctgggcaagatggcgtgaaaatgaccttctgatacatacactgtgcgtgcaaggagctgtaaattgtacatcgcaatcattttttgattgtcctgaatacgagtgttttactcttctatggagacaacatatacatcgtgcggatctctagaggtcatctttgtgactcttttgtttggacattctcctcttttat

SEQ ID NO: 46553 - DNA, 268 bp, Zea mays
tctcggaggcttatgcaattaccggctcacggcctagagctagcgtggatacatactgtttactaagttagcgtatgattgcttttactctaataagtacctcaggagaagctgctcgaagcccacctctcgggctaaggaacccttgtaaattctgaaagcttacaacattccctttatgtataaatcaaacaaaaactacgagcccgacagatcactcgatcgactataactcgaagacagctgacatttcacacactaatttcaa

SEQ ID NO: 46554 - DNA, 387 bp, Zea mays
gcttgtctacgcaaaacaaagatcttcgtgatgcaatttctcgaccctggacttgctttgggctgggtcgaagacttgctgtgcccgacctggagagatgggcttgtgtgactcttatatatttgagaaatgtaatgactgctgctcggaaacttctcgagccctggcattaatactgagctctcttttgcaaatatgcctcatgatcgcatttgacacttcacgtggtgctctgcatctgctacgctgcgacctgatactatgattatggctggcctgcctatcaaactcgcttctagcttatgctggctgaaactacatcgtctgactgacaatacactatttcaagagctcaaaaacataactacgtcagttctaggtgcgcaa

SEQ ID NO: 46555 - DNA, 331 bp, Zea mays
acaagatggctctgtagcatggaatgcgatgactgcgtgctcagtaggggctagtatctaattacctttgtcaaacaataagaggaatgctatgctgatcttaagcacagcatactcttgacgctcagcgaacacttacatctggctcgaaaagtgatagtacttggtctccacctgttctaacagaaagaatgtttcttctgctaataaacagctattacagctaaacatcatatgaggatccttccaatgtcgtcttattgccccaacataagtcaagcactaagggcctcattctctacaaaaggtgtccttatgacccttcattaga

SEQ ID NO: 46556 - DNA, 81 bp, Zea mays
cggcggatgctgggtgttcaagtgttctacgcgtgccccggccaagatgtggaatgcctgcagtacggacggcatcgcagc

SEQ ID NO: 46557 - DNA, 175 bp, Zea mays
aattctacttgcacacatttatttactcatctgaaagccacttgatgttttctctctactcttagcacggttatttgaattggctatggttatttcacacttgacattactatgtttgtgtatccatctagactgtccttagactcaactactttatctccacctatacagtgac

SEQ ID NO: 46558 - DNA, 351 bp, Zea mays
  unsure (1)..(351): unsure at all n locations
tattgcatccaagcagtacaggtacaagcagtagatatgacttatccattctaattagcaattctcgacccttgcgctgattctgcatgatntctgctcacagcgcgtcgggcgttcgctaccactgtgcccgtcgcgcgcatttatggttcgacacgtatcgagcacacctcacccgcatctcatgagcatccgtcagtacagtgtcattacgctcttgtagctgatgccttaccgccctaagttgatccacagtaggcttcgctggctgtggtctccgttagcgaggtcgtcggctcttgtcgctgtatggatacgcctcttctcacaccctggtctcgcgctatgcac

SEQ ID NO: 46559 - DNA, 395 bp, Zea mays
  unsure (1)..(395): unsure at all n locations
cccccccctagtgcctnatgccctctcggacttaacaccactcactacacggcgacttgacgtgacaaagaatttcccgaaccagcaaagagcgaccgcctggagtactacaaatcaactgagcttccagcaagaaagaagagcactctactgcagaaaacaacttaaatcgcttctagagacaccaacctaccaacttatagagtctacaatacgagaattccagattgctgagacttcttgcctacgagcacctgccccctacgccatcattgagctcaccacattaaccaaacgttcatggcacggctgaacttttgtgagagttactgatccctacaacacttgaactagtggacatcagtaacacgcgactactgcaacaactaggtcag

SEQ ID NO: 46560 - DNA, 316 bp, Zea mays
tcagttgacacgccaatacttttgcaagcgcgagaaactacttgaacctaccaactgctcgctagctcaccatgagaagatcgtcatctattgagctgattctctaactcaagaatagtaccccatagtatgtacctagaacatacttgcctgagctctattgcctgtagacaaactagcttctgttccatggtttttggtgttaaaccgcaacattgctacttctgataagagctatggcaaggctacctttcaggcttgatgtgggagacgcgctatggtgcacaccattggccttctgtcttccaaccttgtg

SEQ ID NO: 46561 - DNA, 92 bp, Zea mays
agatactagttaactggtatttgactaacgtactttatgactgatttctccgacctcagactacagaagcaagattaaatatactgcaacat

SEQ ID NO: 46562 - DNA, 352 bp, Zea mays
  unsure (1)..(352): unsure at all n locations
gcactactgaagctacattcttttttacctccttcgtcacttttagctcagtgattagacgacaaatattattatggcaccgattgactcaacttgcttgtccatatagtgatgacaccagtaactaaagctaatanaaaataatgtagttantaataaatattgtgctgtctatttcactcgaaccaaagactgcggaggaggtaaaataatagtaatgtcttcttagtactttgttactatggctcattttacctcatttgtaagcaactaatctctgtgctcttattaaaaaaacacatagggttttaaggattcttcaattttactttaatcggaaaaaatgtctatc

SEQ ID NO: 46563 - DNA, 203 bp, Zea mays
  unsure (1)..(203): unsure at all n locations
acatgtattgacatccataacaccaaacatttgaccataattacacgtaatgaaccatatatagacaaactctatggtgcaccanaatgctntcaactctgactcanataggagctcaaccttgacttcatcataacaattaagagtggtacaatngatctacaactaanggtgtactacaacaacatagttgcaacatttca

SEQ ID NO: 46564 - DNA, 215 bp, Zea mays
ctcttgtagagacttgttagttgaaattttacccttcactattttcacttacttttgagctctgaaatgatttaaggttactctttggtctccacgggagaacttacattgcgagctagctcctgtttcatttaactgagtacacatatggcacactcataagatcgttactaagtgctgaacaacagcaagtcgcttctgaaatccatgatggg

SEQ ID NO: 46565 - DNA, 241 bp, Zea mays
gtaacagatggttttacaaggacgctggatcatcagccccgcaatagtaatattaatgatcacttacactactgtttttcaaatattaataaacgatttttagagtttattatacattatgcttactgcttctttatacccaatagtttgtaatgcatactattcgtgcaacttgagctatcttgctgctttagtggtgtgaacttactgacgtctgctgtttaactacatgtgcttgaag

SEQ ID NO: 46566 - DNA, 129 bp, Zea mays
ctctgtgagcagacagacactgctgttcatttgacacctggggacctagaaacatgtcccttaacgaagctcgcttgcatgaactttgctgctgacttttagtctttgagacctgacttgcttgttaag

SEQ ID NO: 46567 - DNA, 452 bp, Zea mays
  unsure (1)..(452): unsure at all n locations
ctgagatgagctatcatttcaccaacgggtgtatcctgcattcatactcttttctatacgtngntgcagctgtgtagttcgagaatattctatatcctgcaatgatgagttcttcaaaaataatagaccggagttttatataacctcgatctaaccagccacttcatgaactacctatagttatctgatccaatcacgaactcatcctggaatccacccaaacactgcacaacaaaccattgggctatcgtcactagctgtatgcaaaacaccccccaattttacttactctcccacaccaaaccagagaataaccaccccatacattgaccacatctactgggacctgaacacgtcctgtagcctgatgtttgtgtgtagaaatatgtactacatagaatattgtagccgtgtactatgtacgcttcttccgagcaaacaatagacttatg

SEQ ID NO: 46568 - DNA, 209 bp, Zea mays
  unsure (1)..(209): unsure at all n locations
gtctaatacagatcttgtcgtattctaactatgactagttgtggatagagtgtatctttattattgacttccttcactacatctgtcacttcngattgaggcccttcggagcacttctctgaacaacaacccgaccttatactttgaatggatgctcgcggtcagctctctcttatgaaacctacacaattacctcccttggttcagtc

SEQ ID NO: 46569 - DNA, 372 bp, Zea mays
  unsure (1)..(372): unsure at all n locations
ctcactgctgtctgtgagcagctctatgcggcgtcattaacaacttacaattaagttatttagctctatattacctagtgacttggacttgtgtaatacctngtacatgtacatcacatatgcttacttatcaataaacatctcacgtgatgaatggtgcacattatatatctatatgacaggtctatataatgaataaaatgaatataatctacctagcataatatttttatctaggttaaggatctcactgcatttaatcaactctatatttgagtgcagaatatacaacatactccactacatatacatctattagtgaatatatgcagcactatatattcatttatctactacttactatgttgtcta

SEQ ID NO: 46570 - DNA, 316 bp, Zea mays
atgctactcctaattagcacgcagcatggatctccatggatatttgccgaactattagctcgcggagagtctgcagaatgtgagacatttgttactgggtctttgagaaattaaccaaactaagattgatgccaagatgtagaaaaaaacaccgcgataactcatcagttttgaagctcctattttctccccaaaatggggaagaaaactttgctgagctcttacaatcgcgttgctagaaccctgtttatgtactcactaaatttactcttgaacagttttagtgtcactttgaaaggatattcaggagtttgta

SEQ ID NO: 46571 - DNA, 235 bp, Zea mays
actaatactggtgaaccactatacaggatgtaggtactctaccttcaaatctctggggactgcgtagttgcactcaaccgatctctaagggtgaaccgattgggataattttttaatgctacaataggtacttatctttaactctttttcttcataagtatgcattaggaggatatattatttgccacctattagcatgaagtgatatgtgacctaatatctttgttatccatgt

SEQ ID NO: 46572 - DNA, 253 bp, Zea mays
gaaactattccttgtggaccaaaagaccagttgctagcgttctacgatgcgcttatgcttatatactaaagattgtatgacgacccggtgcttcacatgccacgacggattctacttgcggaacacattttttaccatacagatcaacgagccagcttcttgctccccacgtaaacacataaggcagtcaccctgtacattaattcgcaggatctggagatcccagagtgcgaagctaaaacttcgtctgcgt

SEQ ID NO: 46573 - DNA, 139 bp, Zea mays
tgtcatcaaaattcttgccttgtacggacagggagtcttccaaagggacctaactggactgttgccttgacccctttactaggaaattgtatttgtgaacttccctctgggtctttagaagccaacccagacctcacct

SEQ ID NO: 46574 - DNA, 133 bp, Zea mays
ctgacagtaacacttcggttctcctctgagacttttcttgtctaaaaaaatctgcagtaacatctagattgatacacgatcgaccttcaactaatgcatatgttctaacagcatccggatacatccatacctc

SEQ ID NO: 46575 - DNA, 170 bp, Zea mays
agtgcgagtcagtctataaatctacaagttactgaccttacatcctaatgtatgatatactcttaaacagaccctactagaataacagtgacccatgactaatggaacgaagcaatgtatcatgaacgcaaaaacatgaatggatggcagaatatacattaccaacctta

SEQ ID NO: 46576 - DNA, 324 bp, Zea mays
tcgatttgctactcacaaacctcgtgtgactgagctttttcatgcacaatagtcttatttgtctaatttcatatactctgcttatctcaatttgtcatttaagctgctaagatcttggacaaagttcgtaaaaattctcccaataaagataacccatgtacttaataataatactgcgcatatgtgcacgcacgtgttccttacttggacctactttgaaaaccacactccaccgtgctgtcactacctctatatcacaaaaacgcccgcaatccaaataaaccttatcttttactccactctgcacattcgacaattattcag

SEQ ID NO: 46577 - DNA, 422 bp, Zea mays
  unsure (1)..(422): unsure at all n locations
aaccactacacggcctacttatccttcgtggagcctatacttaggattctctcttgtggcgcangaggagacattggtatgtgtatacagtgagtgtacttgttggtaccggagatgtgttagatagtctatattcgtgtgtgtctgtcacgtcagtcatcatgtggttgttctttctcttacgtaagactgtgcgggctgagtgctgatctgtgtgccaaatgaaagttctgttcttaaatagcttatcagaatcagggactgtcttggcagataatggttctgaacctcaccctaaactaatcttagtgatcaaatctatctaatttaatagttcgaaaaccttaaattacttaatttactaatatactcaaaaatatcactagagtgacagtattgtgaaccaatcaatagtttttcac

SEQ ID NO: 46578 - DNA, 503 bp, Zea mays
  unsure (1)..(503): unsure at all n locations
catgcgtactctactaacacaacatatacaccagacaacgtacgtaacgccttcgtgagcatagtctaatgtgcgaaggcacacaacctcatcatacaagccattacatatgcacaagcgaaggcatcacaccttacatcggctcaaccttcagataatntccatctcctatagtaaacaacatattctcactcctcactcgcaaaagacttccagctcccctacctgaactacagtggccggaaagacaacagtctgcttgcagccttgtacacaaaagcgacagcgtcgctactatctacgtttggaccgccttcgcgctgaccacactcgacangccactcagatccgacatgagcaacctcgcgtgcaatcaagcgaagatcaagctatcacactttatcatacaactccaatacaactganataatcgatatcatatccgctccgcagcgcaaatacaacgtgtgcagcaattgactggcacagtacaattcaattta

SEQ ID NO: 46579 - DNA, 344 bp, Zea mays
  unsure (1)..(344): unsure at all n locations
actggtgacttctgcacctctatgaagcaactgcctcttattagacctgcctgtgagtacgcgtagattataatctgttactttaagcttctgtactacccatgaagactcgcgattacacttcaagatggaaattctctctgtgattaattaatcgataagatgcactctgcaccgctgacccttntggcttgcgctcatcgaaaatggttaatntgttggatacttcatcctttgtgaactaacacagattgcctttatcgaacactttctgataactagccctgctaagacaatgtctgaacacatgatattgctctcttacataatacacaatgtacaca

SEQ ID NO: 46580 - DNA, 207 bp, Zea mays
tagcactcgctcacttaaagttggacaatgcacagatcttttatcgttactcgacaaggctgcgaaacatgattatacgaagagtatttatccccagaagtgcaataatatcaatggtgacccatcacatttagcacagttcacattaatgtgtggacaactaccaagacaaacgatataacatgtcgcagaaatattttgaaactt

SEQ ID NO: 46581 - DNA, 402 bp, Zea mays
  unsure (1)..(402): unsure at all n locations
acacctgtctacatgcatcgtcttatgcaaaanggttagtaaatcaggcaagccaacactggtgcactgcaaggctgctgatggctgaaagaacttatgtctgaatcaccaagacactctttttaacattatcaagcttgtatacacaaactgcaattcataaaccacagcaaagcttactcttcatataggtngcaccaactctaattacctataactatcactatatactgcaatgcatacttacaaagctgagtattcatgtctgtgaacaacgtcatgtcaagctatgtctccaaaataaactacctttacagcggagatgtctaaccgtcaacagcaccatacccgggagctaactccttagttgacagacagaacatcaaaatagcaatgtgatta

SEQ ID NO: 46582 - DNA, 58 bp, Zea mays
actacccttgcttcttgagccggggcgtggctgttgagctactgttgacagagatggt

SEQ ID NO: 46583 - DNA, 167 bp, Zea mays
tctctttctctagagacctccttacactacccctaaaagatgagtgactctgatctgcgattgactcttgagacctatacaaggtgtacaggcttcttgtgttgtgttacagctgcgaaagacgcacggtatttggaaacttctctatctttctcacatctctttac

SEQ ID NO: 46584 - DNA, 179 bp, Zea mays
  unsure (1)..(179): unsure at all n locations
ctataatatcatacanggacgagtggacatcatttttcatttttatatccatatattatctatanaccatctaaaactacttaagatgtanntatacaagtatatcactaacttaatcatacatgtaccacaattcatgagattttaccagtcactaagcattacacagaaggtctact

SEQ ID NO: 46585 - DNA, 429 bp, Zea mays
  unsure (1)..(429): unsure at all n locations
tacatttatactctgccgttatcccgagcacaaatggagaatcacttagaagctcctctgctctcatatgctttatgataagagtgnacatctagtatatgaatcactatagctaatgctaaaagaaactctatcgatcnatgacctatattcattaaactntgatcatttatgtgctactacanatangcaagagatgccaattgtggggcaacacatgggcaagactgtgttgtgacccaagtgttgttctatggtaagaccacacgttggtctaaacaggccaatgttgggtatgctcggtagtgaatatcgtgccacttatggaaagagttctttaaaacaatcacactcatcggtgaaagtgcagtggaatgtatctccattcagttgattaacatcttgtaatcaggccgttcgtatttgtaa

SEQ ID NO: 46586 - DNA, 234 bp, Zea mays
ggctggacaaaagtgactgcgatcactgttttgtgttatcatgactccttctgctgtgccgtcctgggtcatactatatgcccacatctgcactgaaattatccagcagcacaaatggtgctgtggcttgcggaagctatcactattctgtggttggtcgatctgcatcccggtaagactctgatcacatctatgggtgcttcacacataaatcacatgcgctttctcagaatt

SEQ ID NO: 46587 - DNA, 239 bp, Zea mays
aaccagcttagtgctcagccgtgggccgcggtcactatggtgtaccccatcttgcgtgatggcgtggcgggctcgccagctcgacacctgtcgctgccgccacgtcgcacgctggccgcgtccgcgagtattcgaacgctctgcgcactctgaccaccggggagagtctgaacccctcggtctgcgcagcacaagaccgggacggtatacccactgcctctggcatactggaggagcga

SEQ ID NO: 46588 - DNA, 150 bp, Zea mays
  unsure (1)..(150): unsure at all n locations
tgacaagatgttgatgtttgcnccagtgtcttgcacttgcggtccgaagacgcgtcttggcactctgggtggcctgaaggatcacgaaaagtgtctggcgcttaactaggggctgccgcttctgcccgagtctccagctcttacccccca

SEQ ID NO: 46589 - DNA, 355 bp, Zea mays
cacgtgctaggtgaatctctgggaataacttaacctatgttctgttctgcactggtccagattatgctcaagctagccagccacggtgcagttaatatgatgggagtaactctgttctactgcaatctagcacacatgtctctgctgacccatcacctggcactgctaataatgtaacctttctactgctaccacacgggggataacttcttaatgacaactctgcctgtgccattatttttttctcaagcgagctggtacatctaaaatctattaactcatatactgcagcaaaactcgctcgactgaagtatctcagctattctattacagagctgttctctaaagatgcaga

SEQ ID NO: 46590 - DNA, 331 bp, Zea mays
acttagcactgcgctcactacgcttgcaactaccacactgccgacgaatgtgaggctatccgggcaagctggggtgcggggggccgtctcagcaatcgtgcttggtgcagatgaacccggagacgcgacctggactttagccggcggccgcgctgatgcacgcccggctccgtgggcgtccactgctaccgctgtatggcaactgaccggttgcggttccttgccattcatgcaactgagtgccgcttgtgctggggagtgcgtagtgaagatgactccagacatgaacacgatcaacactgcaacggtaagttgtgatactacaactgta

SEQ ID NO: 46591 - DNA, 342 bp, Zea mays
ttggatgtcccttgagatctcaagatctccctaatagtgctcttagaaagtttctcccttaaataaaaactccctgcaggtgcttctaggaaagctgtgaaataaggcagactattgaagactcttctttctagtcaacttagtacactatctttgcactgagcttattaaatactatcaatggaaacttatgactagtgttaagatcatgaacatgcactgaactaatctgaattgggaatgtgtttcggctattctcatgattctaaaatgaaggtgctcagtattagactcctaggctcagttatctggactcttgtataaggattctacactgcttat

SEQ ID NO: 46592 - DNA, 405 bp, Zea mays
agttaaacacattttttggctggactcttcccgacaatctctttgctcctaaagcacttatactacctatacttgtatctaacttcaactctatgtggttaatgcttgcctctatcttatccatttctcatgcactggtgttcacacagtggtcttgtaaacgccaactctattgtcaatcgacattagggtcgctattcatacctacctgggggaccattgcattatatatctgagtttgaatatacttttcacttctcacacaatcaaggctcttggcaagaactccttgtatttgccaacgcaacagagtggactcctcctgtttcgtgcgaaaatgagctccgcacgctgccctaggccacaagatgtggctcctgatattcgaaccgagttgctgtcaca

SEQ ID NO: 46593 - DNA, 345 bp, Zea mays
actaagcttgcggtgaccacctatgttcccgtgcgacatgtgcgtgcttccttgccgtccagggctgtgttaactatctgtgctgttccggcgccgaagggtggatattctggaggcatgacacgtggtcacccgacactgttagaaaaagctgtaatggcaggtacaccgtggaaacccccctatgcgcgctcacctcgcacattgagatcacgatattggctgggactgttagccgcgataagtactggcgttaggactgaccatagcattgcctttcttatattctttctttctattttttattccatcattgatcactaatcaactaggtatgtacactat

SEQ ID NO: 46594 - DNA, 309 bp, Zea mays
  unsure (1)..(309): unsure at all n locations
atacattcgatgtcacaagttgtacaacacactaacattgntaccgtgacacttggtgcatgatgatcaactgtatttattacaaaataaggagatcacatatacttctaattttcagactttttnaaaacttcacctgaacatgatgaagcccttgtggcttcacaggcaactaatgttttacttgctatatgggaagaacctcctatgttcctttaaatatactcagaactgatcctgtgcccagcttataattctgaacaacgctagtgtcacgcactgttcatcactccgacacctcttgttgct

SEQ ID NO: 46595 - DNA, 126 bp, Zea mays
aaacgggtgctgagcgcccttgtctctttctaacgcaccaggttgagtttgaccctgcgacgtgaacaggagggactctcccgtgatataatgtactcgccctttgtgggtagaaaagcattcagc

SEQ ID NO: 46596 - DNA, 220 bp, Zea mays
agtaagaactgacacatatgtcttttattaaaattgccggggatattactccaactgctgtgctatggccctgtcatgaaaggttagtccgtaccgtaggctgttgctgaccactacttgattcattatttgaaagcagcaccaaaatctattcaatctgaccctcgaaagtctgaacaacttaataatcagttacttgatgagcgtttggaaaataccc

SEQ ID NO: 46597 - DNA, 59 bp, Zea mays
aatgtgtgcccatactacttgggatgtgaacgactctcgaccgcacgactagtgatgag

SEQ ID NO: 46598 - DNA, 198 bp, Zea mays
attaaaattatttacaagacttcagtggttgtattgccaaatagagtatgatatgatagggagctatctaatccatgtggtatatcttacagaatgtattataaactgtatgtgttgtgggctaccaaaggaatgagaaagccacctcctatattgtgtaagtacactggataatgtgatgtatatttcagacaaatg

SEQ ID NO: 46599 - DNA, 219 bp, Zea mays
acataaatacttaccacttacaaatcagtatgatgtgagtgtactagttgagaaggtatgctgactgctttctcttttatcatattcaagaagttggaaggagattagtcagtaaatgagaagtgttaccttgacttactaaaccttctcatggcgtgcttagctaatctaaactatctaaacattatgatatttgcagaagatctcactaggaccttt

SEQ ID NO: 46600 - DNA, 308 bp, Zea mays
gaatatgctcaaatcaccatactcttcttgggcatgtgacttgctttgggtaatttgtgagataaattatagtctgtttgacctcgtcttattttcattcgctatatgctttacatcgaggatcgtctgcttgggcaaagttacactattagccttgcggtattacggcgtagaaacttactttcttcgcctgctatggatgtagcctcctgtaacattttctttaccggtgaacgttcggaaaaccatgtaactgtagttctctcgtcagcgtgtgcaacttgctattacacatatcttgctaatta

SEQ ID NO: 46601 - DNA, 68 bp, Zea mays
gactaacactagccgccaaagagacggtcttgcaacatatttgtccctaaaaatcaaaacatcgcatc

SEQ ID NO: 46602 - DNA, 200 bp, Zea mays
  unsure (1)..(200): unsure at all n locations
tatagtcttagcaaataagcaagtgtcgagttcagctctattgaaatcaactaagtatagctgaccctctaacactctctngaatgctactgaatcatcacttcttctanagacagtgacacctacatcagtgaatagaccagtgtaacccatattggcataatgagaaactganagcaacatgtaatctaatgaatcta

SEQ ID NO: 46603 - DNA, 166 bp, Zea mays
tcctgttgctgtgagcttcactaaccgctgatttgaagagggtatatttatcacgccatggcccctgtgacctcttgtatgtgctaacaggtagtttacagctcaggctcattcgtctaatactcgtaaatcaactccgccttttacgattaaatgacaaagaaac

SEQ ID NO: 46604 - DNA, 194 bp, Zea mays
  unsure (1)..(194): unsure at all n locations
cactgngctcagctcaaatttatgactattaaatcatgtaattggctaccaattaatttatgcttaccttttattacaaactataggtgataggtcacacttctttgaaaatattgtgacagatcttaattcttatagctttctctaatattatctatgcaattgctaaaaagtgaatgggacactaaaaccta

SEQ ID NO: 46605 - DNA, 219 bp, Zea mays
atatcaatcactaatttaagtaaggttactggtgactacaatcacctaccgtaatgtccaccactgcatgaaataatggataataacgaataactacaagtctattgaactaaagctcaattactatgcgtactgtagaatcttagtgtgaatgaaactaatacctatattaccaattgcaatcagtggagcctatttcccatgtcgtaatactatcac

SEQ ID NO: 46606 - DNA, 345 bp, Zea mays
  unsure (1)..(345): unsure at all n locations
agcttgttcctgatctggcgatagctcggtcttttcatatttctggcaggatttagagaacatgtacaaatttttttctgagatagttagtcacggattacaatggctgggtgtgcgaacccattttctatgcgcgattcgaattatgatttgcactcatctgcttttgtatatatacttactaccttctatcattaggctgattatcttgctttgttcattggctatgtcgcatgctacaccatagtattggactgtcgttgcagagttattttcaatgaattattgaagtgacanatttgtgcgatttcttggacatttcagattgtgtggatttggtaaagg

SEQ ID NO: 46607 - DNA, 399 bp, Zea mays
  unsure (1)..(399): unsure at all n locations
gcttggctatnggctaacgatgtgactatcttctaattaccaaaatacaccacctttcaccatttntggataacttgcacgacacacagctattgtaatacatcacaagtacattcaaccccaccagtagagcactagcacatttcagaaaatttctagagactacgacgacaaggcacccatggagcagggaagggcgcatgcatggggcgctcggatgggggggaggaaganagccggctggagatgcgatgccctagaggagaggaggagctgagctccctgcttgctgctcgccatggacagcagagggagggaggaagggcgccatgggagggagctcgtggggagaattcctgcgccatgaacaggggaaaggagatgagtggcatgtgggag

SEQ ID NO: 46608 - DNA, 357 bp, Zea mays
  unsure (1)..(357): unsure at all n locations
ctaagcttgtnttgaaattcgtacctagtggatgcactctaggtgtaacatacattatgaaatgctaatgcatatgatgccatgccaaagttttagttattgtaacactagaggtgtacatccttccccccataaaagaatcgcgtcgcgagatttaaggctctanggtaagtaatggaaaaggaaacacgtcacaactttatttcctattttctcttacanggcangaggtgggtgtgggggttcgttctaactttacaataaagtacataaactttaaagattataggaggctaaaaacttatgaaaatggttctctgagaagtgtcgagtctcccaggaagcttcttcttcgat

SEQ ID NO: 46609 - DNA, 389 bp, Zea mays
  unsure (1)..(389): unsure at all n locations
gtagcatagacaagtaatatactaattgactcaagcctagctacgggtgcataggtttcaccaaaatccaaaccttcgacttgtgaatatcccttggccacaagtcaggctntgttccttgtcaccacaccatgctcatcttgcttgttgcagaaggcccacttggttcctacaacattttggttagtacgtggaactaaatgtcatacctcattcctcgtgaagttgttgagctcctcttgcattgccaacacccaatctgaatcccttaatgcatcttctaccctgtatggctcaacaaaagacacaaaggagtaatgttcacaaaaatgagcaacacgagatcgagtagttaccccttatgaatatcaccgangatggagttcatg

SEQ ID NO: 46610 - DNA, 453 bp, Zea mays
  unsure (1)..(453): unsure at all n locations
aaaactaagcttcttagggagaacacgtgataggtttgactaacgtgcaattttatttgatataccttgtgcagcttggcaagcaggtgaacaagtgggaggagcacatcacagcaagaatgtgatgaccactttcagacctttggagctgttgcatatggaccttttcggacccattgcctatctgagcataagaagaagtaagtatggtctagttattgttgatgactttttccgcttcacttgggtgttctttatgtaggataagtctgaaacccaagggaccctcaagcgcttcctcangagagctcaaaatgagtttgagctccacgtgaagaagattaggagcgacaaccggttcgaaatcaagaatcttcacatggaggaagtccttgaggaggaagggatcangcacgagttcttctgttcctacacaccttagcaaaatggtgt

SEQ ID NO: 46611 - DNA, 464 bp, Zea mays
  unsure (1)..(464): unsure at all n locations
ttngatgctgataattagtaccatcccaacatataatattattactggatttactttaccttttggtgtggcaactaagctagttttgcttcttcccttatattgtcctcgcctgcccttgtacgggtcatgcacccagagtgatcaatgggttcaaacttcaaaccccgcttcaagtttcccaggatcagagtgtccaccgaattcaaaccctgctttcagtttcccagacatgacctgctctaaaatcttgctgaggacaagctctacactagggttagctccaatgctccattgagcacaatatntgtgcagtgcttccacacagtccagtttcccaggatcatagcattcattctcttgatcccttctaccttgggtatttgattntctagnttgaattgtcctctttctccttagaatacacacatatgtaattgctatatcagtggggtctatgtgtg

SEQ ID NO: 46612 - DNA, 472 bp, Zea mays
  unsure (1)..(472): unsure at all n locations
agcttcaccccgcgaccaaatccactccaataccgatcttttcaccccctcggtactatcatgcccgagtcctgcacgaatcaccgcgatcagcgcanatccttgcacggaggtcaccggcagcgagggggatgaatctgaagatttttttagtactgtaccatggccaccacctttagtcgttctgacagcctaagttgaggagcaatcttctccaatttttatgtgatagctcactaatcttcctgtatcaaagttattgatctataatccatcttcaattttgatatagcaaccttgatcatttacttactcaatcgagcttgaatcaggtttaaagttcatcaaaacttactgtcagatccatttcgggtttcagtggtgactaacagaccgactntagtcctatttctctcccatttctgtacaatactagtgcttagttacttaacaaaacttgtaccgctaacat

SEQ ID NO: 46613 - DNA, 465 bp, Zea mays
  unsure (1)..(465): unsure at all n locations
tgacacttcganactcaagcttgaatgtgctttcttcatcattatntgatatgcaagtacacctaatcatacatctcgtggatcagataacaatattacggccactatatttacatcatatgtttcagttggagcgatacctgtgagtattaaaaggttatgtgcgaaatcgcgctcacacatagggttcaatcatggagggatacactacagaagaagtgagtgagagctgtatatattacatcactgacggaacaatgataggtgtgcttgtacctaaacatgagggtaaactatgtgggagagggagaatgggcaagaaaactcttcgcgttgaggattacaagctgagacattgtgctcatggtagtgtactacaacatctcacgatagccgagccttacatataggaacacctgaatgagcctcgtaagaaaatcagaaccgacagaggactggatcatg

SEQ ID NO: 46614 - DNA, 375 bp, Zea mays
agcttgcttctccgcgaagcctgccctatctgggcctcgggcgagtcgaaagtgcgcccgttgcttgtggaggccctcgggcgaggcatgaatccaccttggtctactgttcctgcccgaggctgggctcgggcgaggtgagatcgtgtcccttgagcggatagagttttgtccagtattgcgcccatcaggcctttgcagctttgtgatgatggtggttaccggccgagtctaggagtcttgggggtacccctaattatggtccccaatagtagcccccgagccacaatctggttgttccctcatgcgaactggtcgtaacccgggtgcataatcaagttccgagctctcgggctggtatgttgacgctgtcat

SEQ ID NO: 46615 - DNA, 472 bp, Zea mays
  unsure (1)..(472): unsure at all n locations
gctttccagattcttggccccagccatcacccaacatgctagctcatcaaacagggatctctgcacttttccaatggtaggagattcaccatcaaagacagcccggtttctttgcaaccataagcaccaagctcctaaaatggtgacactattgaagccctttctccattccttatgtactttgctgctcacctctttccaccaataagcaaaagacgacacatgtgccccaggagagaggttccccaaaccaaaaggtaaaagaatgatgtgccagaaatgcaagaagctagaagatgttgagtggtttcctgttcatggtcgcagagagggcaagcatccgggtgctccagccctcttctctccagtctatcagcaacacagttaaaccatgtgcttactgataactcanaacatgctcatcattgctttcgtgcacagaanaatgtaaactactaccaactgatgagcc

SEQ ID NO: 46616 - DNA, 473 bp, Zea mays
  unsure (1)..(473): unsure at all n locations
cttgacacatatctatacatggttcgaagagttgaagctttcttctaatgattttctgtccaaaatattcctcgaggacaaaatgaacatgttgatttgctagctaaatcagcagcacaggggctgcctttaccttcggatgtgttcttcgaaacaataaaggcaccttcagtggaactccttgaaagagcagacctcaatatatctcctgtttatagcgaagattggagaactgaaatcatctcttaccttcagggtaaattcctttcagatgacgaaacttataacaggaggatagaggcaagagctcgttcatatgtcatgatagaaggggagtcgtacaagcatggagtttgtgcttccgtgctcaagtgtttatctagaaccgaatgcatagagttgatgaaagaaatacatgcangcctgtgtggatctcacattggatctanngccgtacttggaaaagtttccgt

SEQ ID NO: 46617 - DNA, 325 bp, Zea mays
  unsure (1)..(325): unsure at all n locations
acgagcagcatcagaagaatcctcggctaacatatcaagcatggtacttatntctgcatcactgggatccaaaggcacctcaaagtgaacctgccgttcatcatcaagaatttcttcaagcgaagcaaccaaagcactaacttcttcggcagagggtcgcactctaaggcccaaaccaccattaccagcaggaggatttgacacaaaatgaataaaggccttggaaggaggcaggttccaagccgagtatgcaacaagggcgccaacatttgaacccttgctctgagtatcatttcagcccactcaccaatccacagcaaaaatt

SEQ ID NO: 46618 - DNA, 388 bp, Zea mays
agcttggagcgaatatgtgttcgtttgcgtttgtttgccgcgaagcggaatcgcgatgtctgtctcgtcgtgtgaaagaaactcgtgtatcggattttcgtctgtcgtgacttggtcgctagaactctgtcgtggtcagttgtgttgcgcttgcgcttgggtcgaagttgatagatggcctctttgatgaactagcttggaataaagatcagtttgggttggggaatgccaccgccatggcaattcagttgtcggtgtcgatttagttaaaatgcgtcgatatgttgctgcagtatgatcgcacttgccaagatatgttgaacttatcgtggctatgttcatttcctcagcgtgaaaatcaccaaactgagttacgacccgtttgttg

SEQ ID NO: 46619 - DNA, 399 bp, Zea mays
  unsure (1)..(399): unsure at all n locations
gccgatggagaaacacacatccttganatcttggctgtctatctgcttgccgttgtcaactggtagctcggacggtactcctaagcggcaaacgatgttctgccacaagaatttttgggcagtctttgatgtgattgtggaaacagccctcgcttcaatccatttggtgaagtattcgaccgctacgaaggcgaacttaaggttcccctgagcggtgggcaggggcccgacgatgtccaggccccagcgctggagaggccatgtatgggcaatcagctatgtatattgccaggggctgcctgaccgaggagagaacctctggcaggcttcacaggacctcgtgacccgatttgcggcgcagatcattgcgggccagtaaaacccttgtcggatagcttg

SEQ ID NO: 46620 - DNA, 395 bp, Zea mays
agcttgactcctttcgccttgagacaccggaatgtcacttcaaggtcggagaggaggtcggaagcctttcttgtcttgactacgatgtcatcgacgtatgcctcgactgtgcgaccgatgtgttcgccgaacgcatggttcatgcaccgctggtacgttgcgcccacattcctcaaaccgaacggcttggtgacatagcagtacatgccgaacggcgtgatgaaagaagtcgcgagctggtcggactctttcatccggatctggtgataccctgagtaggcatcgaggaaggacagggtttcccacccagcggtggaatccactatttggtcgatgcgacgcacatggtagggaaccttctgacatgctttgttgagaccagtgtattctacaca

SEQ ID NO: 46621 - DNA, 376 bp, Zea mays
atcgaacgaagctccatcttgaagcctgcttcggaggagagaagtattaaagtttcacaagttcataggtaaatggccagagtccgctctaccgccagggttgaacgtgagggggacgaaatggaagcttcggagactgttcctatctccgaagccatgcaacgatccgggctagtgacttcggaaaagattcctattgatgatgcagaacaagcaatcgctgaagcagaaggagaagatgctgaggaaactgaccccgaagatgaatatcaccttgccacaccaagcaaacccagccatttggacttcgggaaatctactggttcgaaggctgatctgtcccagatgtaaagtcaggctatttactgaaaatcaa

SEQ ID NO: 46622 - DNA, 430 bp, Zea mays
actcactttaaggaaaacggatagttgacaacgtgcatttttaaaagaagaccctgtgcagcttgtcaagcacgtaaacaagtgggaggagcgcatcacagcaagaacgtgatgactacttcaagacccctggagctgctgcatatggacctcttcggacctgtcgcctatctgagcataagagggagtaagtatgggttagttattgttgatgatttttcccgcttcacttgggtgttctttttgcaggataagtctgaaacccaagggaccctcaagcgctttctcaggagagctcaaaatgagtttgagctcaaagtgaagaagataaggagcgacaacggatccgagttcaagaaccttcaagtggaggagttccttgaagaggaagggatcaagcacgagttctccgctctctacacaccacagc

SEQ ID NO: 46623 - DNA, 418 bp, Zea mays
tgatactaatatacttgtctaagtatcagaaacagaaagaagaagaaaagagaagagttggctgtgtacagccaaaaggctgtttcggtctggggcaccggactgtccggtggtgcaccggacagtgtccgttgcgctaggctgcctcgagcgaagtggccgctctcgggaattcgccgacggcgtacggctaaacttcaccggactgtccggtgtgcaccggactgtccggtgagccatcggtcggccgagccaacggtcggccgcgcgatctgcgcgggacacgtggccaagccaacggtcggaagggggcaccggactgtccggtgcgccaacggctccaaatctgccaacggtcggcttcgccatttaaggaaagaaatctggcaccggacagtgtccggtgtgcaccggactg

SEQ ID NO: 46624 - DNA, 223 bp, Zea mays
atatggaaactaaaatagagttttaattagtttatatatttgcccatttaatgactaaaatggaataaaatgtcactagaaaccaaacatcttcttaatctactattaaacatatctatagatggtcaaaccgaccgtccgggaggagagaacctagtgtttgtcttgggatgtggcaggccacccaagatgtctctagacaacatagagttacagagatgtg

SEQ ID NO: 46625 - DNA, 474 bp, Zea mays
  unsure (1)..(474): unsure at all n locations
agcttgcaagggaaaggagatgatatgaagctttgtatgtgcttgagcgggttaattcaattcttattaactcaagctatcaatcttacaatgttttatatctctaagattgacacaaagttattttaaattattatatctaaaactcatatcatctcgagcaagatattgatgttgtagggaataaaatattatcctgtgtagaaaatcaaagcctacaacatggagtaaagctaaaggatggtaacacttatgtctttaagtgcaagtatcttcaattatcatttctcttgtgtcttgtgtagtcacatagaaaaggaagtacttaagaatattggtaaattatgtcaccattctttagagaaagttcttctcatatggtagatngcatatntatcatttctatattatggcaatctacatgctttaaatagttataagtacctcatggcatgctttacattaattatccta

SEQ ID NO: 46626 - DNA, 402 bp, Zea mays
gacacttcaggttggagccccctccgcgtatcgcgcggctggtggccaaacgcgtgctgacacctgggccttgacctcggacccggaaacattattcgctttggttctgagctataccgggtgtccgtgccctcacactcttacacatacgttctctcggcggacagctggcttcctcgaggcacatgccttcgcatgctccgctggcttaactattacccctctacctcccctgttgccgcgagcccgcgatgtggccctttctcaacgctgtccacttcggcgccgctgtcacctcccgcttcgtcaccgcgctacacgagtataatgccagagatgacagagagaggtgagaagtgaccaacagtacctagctatctctctatttcttcgcccagtcta

SEQ ID NO: 46627 - DNA, 435 bp, Zea mays
  unsure (1)..(435): unsure at all n locations
tcttcatccctacatgtgctaagcggcgatgccacagccagcccatgctagtcttagctattaagcatgcatctagaccggcctcttctttttcaaaatcaactaaataaagtttgccggctaatacacccttaaaagctagtgaaccatcacttcttctaaagacagacacatctacatttgtaaatagacagttataccccatattgcataattgactaacagatagcagattatatccaagagactctactaaaaacacatcagatatggagtgctcattagaaatagcaattttacctaaaccttttaccttgccttgattcccatcaccgaatacaattgaatcttgggaatctttattcttgacgtaggaggtgaacatcttncttctccccgtcatatgggttgtgcatncgctgtcgataatccagc

SEQ ID NO: 46628 - DNA, 443 bp, Zea mays
  unsure (1)..(443): unsure at all n locations
atatgcctgcacagcagttgtttatataccaataacctggcctttcgcatgctggggactggatatgattggacctttcaagaaagctcaagggggatatactcatgtactggtggcgattgacaaattcactaaatggattgagttcaagcccatttgttctttaacctctgctaaggcccgggaaatcatacacgatataatattccgattccagataccaaacagcatcatcactgacctaggatccaacttcaccagctcagaattctttgacttctgcgagcaaaaaagcattcagatcaagtacgcatctgtagcacatccaagagccaacgggcaggttgagcgagccaacggaatgatactggaggcactcangaaaagagtcttcgattagaatgaaanattcgcacgaaagtggataagagagctgcttatgt

SEQ ID NO: 46629 - DNA, 442 bp, Zea mays
  unsure (1)..(442): unsure at all n locations
caagcttaaggctttcagacgaagccggccacatctcatgctctgtttcaatgtacgcaagaccatgaggagtttcttcaagcattcgttcgaaggttcttgcgtctcagagcacagacgcctacagtgcccaatgaaattgtcattaaggccatgatcaaggggcttcgtccaggacctactgcctagtatttcgccagaaagcctccatagactctggagaagttgcttcaaaagatggattagtacatcagggctgacaatgacttccgccaaagaagggaggaagcttacaggttctctgagatgaccaggggcttcggaggaagaatccacccgaggcatgtcatgtcaattcacaacactcanaatgatgatagaggaagtcagctgcagaggccgcagtattcttcacaatcttcggggcagcaacaaagctctt

SEQ ID NO: 46630 - DNA, 174 bp, Zea mays
aatagtggcggttgcaggttgggactcggttgttttcgcctaggcctaaatcaacagttcagcaatggttaagccaaataatctgatcaaccttttgggctttgactaggatgggataaaggcatctaaacgattaatatgtgctgggataagatagccaaccagctgaaaatt

SEQ ID NO: 46631 - DNA, 290 bp, Zea mays
ggatacttaagtcagcgtcgcatctagcttaaggggggttataaacttctttttactatccaaaccaatgaagaagaaagactctagcggctgttacaaccaaaatgctgtttctgtctggggcaccggactgttagtggtgcacctgacagtgctccgatgctcttaggtgccttcagcgaagtggccggtcttgggaattcgccgacggagtacggctaaacttcatcggactgctcggtgtgcaccggactgttcgcggagccattcgtcggccgaaccaaccgtcg

SEQ ID NO: 46632 - DNA, 393 bp, Zea mays
acatgtgctaagcggttatgttttattctgaccatgcgagtcttagctattaagcatgcatctagaccggcctcttcttttgcaaaatcaactaaataaagtttgccgtctaatacacccttaaaagctagtgaaccatcactatttctaaagacagacacatctacatttggtaatagacagttataccccatatgacataattgactaacagatagcaaattatatccaagactctctactaaaaatacattatagatagaatgctcattagaaattgcaatttacctaacccttttaccttgccttgattcccatcatcgaatagtaatgaatcttgtgaatccttattcttgacgtaggaagtgaacatcttcttctcccccgtcatat

SEQ ID NO: 46633 - DNA, 368 bp, Zea mays
ttttctgaagcgccttctccagagtctgcggaggttttctggcgaaatattgggccataagccttggacgaacacccttgatcatggcctcaacgacaatttcattgggcattatgggcgcttgtgctctcagtctcaagaacctttggacatacgcctgaaagcattccttctggtcttgagtgcactggaacaacgcctgagctgttactagctgtttctgatagccttgaaaactggtaaccagcatgtgcttgagcttatgccatgacatgattgtccctggccggagagaagacaccatgtctggccacatttcggactgccatgacgaacgactttgccatgacaaatgtggtgctccatat

SEQ ID NO: 46634 - DNA, 458 bp, Zea mays
catgaagcttctaagggagagcacatcttgtgactaaccaatgttcattctgagaaagatagggtctgtagcgcatgtcaagcagggaagcaagttggtgcctaccatccacacaaaaacattatgacaacaaataggccactagagttactccacatggatctattcggcccgaaagcttacataagcatcggtgggagttagtactgtcttgtaaatgtggatgactattctcgcttcacttgggtattttttttacaggaaaaatctcagacccaagagaccttaaaaggattcttgagatgagctcaaatgagctcggattaaatatcatgaaaataagaagcgacaacgagacggaattcaagaactctcatattgaaggctttctagaggaggacggcatccagcatgagttctcttctccctacacacctcaacacaatggtgtagtggag

SEQ ID NO: 46635 - DNA, 314 bp, Zea mays
  unsure (1)..(314): unsure at all n locations
tcgtcatctgaaagaaaagataccctgaacgaaagagatgatctcttttcttcagtcttcactataaacaggagatatgttgaggactgctctttcaagaaactcaaccgaaagtgcttttattgttttgaaaaatacttccgaaggtaatggcagcccctgtgctgctgacttagcttataaatcagcatattaatttctccaccaggaatatttctaacaaaaaacccttctaaggaagcctcaatccttccgaccgtgtctaaatattnttcgagcttcggatctcttgctttataacttttgcaatatga

SEQ ID NO: 46636 - DNA, 407 bp, Zea mays
  unsure (1)..(407): unsure at all n locations
ccatgacccacctagacctccactaaccaaggcgaatgcacacttagcacgcacccactacttggccacagaactcagatacatttgtagcaacagagttaatgtggatttccttaaaacctttgccagccttaaccccccntcctcatcgagtcaacaaaaccacggagaacaaacccagacattacaggagcccacctaagagcaagcctagccccctgaccagcaacctcatagaccatgtcagccatagctggaacaagtaaaagattatggggagatagagatcacgggggagatagagattatgggggagatagtagaagaacatatccgaagtcgcatagaagactaacaaaatacgccaacgtgcgtaagaacagtcatcattgctaagccacaatggc

SEQ ID NO: 46637 - DNA, 473 bp, Zea mays
  unsure (1)..(473): unsure at all n locations
ctcagcttctaagggagaacacgtgataggtctaaccaatgtttctttctataaatatatacctcgcgcagcttgagaagcaagatacaatggggacgaacgcatctcagcattcatgtgatgaccacatcaagacctctggagctgctacatatggatctcttcagacccgtcgcctatctaagcatacgaggaagaaagtatggtcttgacatatttgatgactattccaacttcacttgtgtattctttttgcaggataaatctgaaacccaagggaccctcaagcgcttcctaaggagagctcaaaacgagtttgagctcaaggtgaagaagataaggagcgacaatgggttcgaattcaagaaccttcaagtggaggagtatcttgaggaggaaggaataaagcacgagttctacgctncctacacaccacagcataatggtgttgtagagaagaagacatgacacta

SEQ ID NO: 46638 - DNA, 271 bp, Zea mays
ctgtttgctgacccgtggccagtatgggcacacctgccttctgcgcgctcatagtgcgcaattaatgcctcttaggtagccgatggcgcgagttatctcgatgctcctgagatgcaccggacagtcctgtgcacaccggacatgttctgtgaattataacggactatccgttggagtataacgaaactggcgagtatgtggggccgaactcccttggagcaccgtacactgttcggtgtacaccggacagtatggtgaattatatgggagt

SEQ ID NO: 46639 - DNA, 381 bp, Zea mays
  unsure (1)..(381): unsure at all n locations
agctatccacattgtatttaaacttccaaatctgatatgatatgtatccgcggtggcacaaacgaaccacagatgtctttggtgatgcgggatttcctggcgaccaaaacgtggtagaactcaaaactctaaaggaataaactaagaccagcaactcgacacaaccgatgcaaccaaaaactcaacaagctctaactaagtagtactagtaaatgctcaatggtttataggattgcggcaaaactaatctactatnttttggctttttctggactataggagataagaaaacagcgaagaaaagtatatctctcaccgataaaccttgctctgattaccaactgatgtgcacccgttgggtgattggccgatctttcgatg

SEQ ID NO: 46640 - DNA, 408 bp, Zea mays
cttatctttcaaagtgctgaacgctaccttctgtttatctctccaagcaaacggcacatctttctttgttagctcatgtagaggcgctgcaatggagctaaaatcacgaacaaatctgcggtagaaaccggcaagtccaagaaagctcccaatttgtgtgaccgtcgtgggtgtaggccactcccgaatggcagcaatcttgctgctattcacctcaatgccctgcggagtaaccacataaccaagaaacgagacacgttgcgtgcaaaatgtgcactttttcatgttaccaaacaagcgagcagcacgcaaagcattaaaaacagcacgcatatgttctaaatgcacctctatagacttgctgtaaataaggatatcatcgaaataaacaacaaccaacagacctat

SEQ ID NO: 46641 - DNA, 428 bp, Zea mays
  unsure (1)..(428): unsure at all n locations
gtctgcgatgtcagagccagcccatgttagtcttagcaattaagcaagtgtcgagttcagctctatcaaaaatcactaagtatagctgaccctctaacactcccttaaatgctattgaatcatcacttcttctaaagacagtgacacctacatcagtgaatataacaggttgtagccccattttgcataattgagatacagaaagcangntgtaatctaatgaatctacaagaaaaacattggaaatagaatggtcaggagatatagctattttaccaagacccttgaccaaaccttgatntccatccccgaatgtaataactcgttagggatcttggttttctcataggaagagaacactttcttcctccctgtcatgtggtttgttcacccngctgcgataatccaacttgagcccccggatgcat

SEQ ID NO: 46642 - DNA, 472 bp, Zea mays
  unsure (1)..(472): unsure at all n locations
tgcagcttggaagctcttatccacacatgtgctaagcggcgatgccacagcgagcccatgctagtcttagctattaagcatgcatctagaccggcctcttcttttgcaaaatcaactaaataaagtttgccatctaatacacccttaaaagctagtgaaccatcacttcttctaaagactgacacatctacatntgtaaatagacagttatatcccatattgcataattaactaaccgatagcaaattatatccaagagactctactaaaaacacattagagatagagtgctcattagaaattgcaattttacctaacccttttaccttgccttggttcccatcaccaaaaattattgaatcttgtgaatccttatttttgacgtaggaggtgaacatcttcttctcccccgtcatatggtttgtgcatccgctgtcgataatccagcttgaacccgcggatgcataaacct

SEQ ID NO: 46643 - DNA, 413 bp, Zea mays
  unsure (1)..(413): unsure at all n locations
tgataacgagggttacatgttatactctgccggttattccgagcacaaaattatgaaaagtcattctatgaagtctcactctagctctcatcatgcttttatgtataagagtgaggcatctagttctaggcaatccacacatgttaaattgcctaaaaagaaatctcctattgcatcaaatgaacataatatttcatttaagacttttgatgcttcatatgttttaactaacaaatcaagcatagtagttgccaaatatgttggggccaaacacaagggctcanagacttgtgtttgggtacccaacgtgctctgttctaatgtgaaaggacccaagaccgattgggtacctaagaacaatgcctaaacttgatatgtaggtttatgcattccggggctcaaagtggatcatc

SEQ ID NO: 46644 - DNA, 472 bp, Zea mays
agcttcagcaacaagggctgccgctctacagccgctggatcccaatcaggatgccctttctcttagggaggcctgaaaccaaaagaggaaggccaccagtccaacgcctcatgaggacgacttggatcaagaaatccaaaacatggagatgctccatcagcaggtccaacggaagaaggaaaagatggctcgtctagctgacctgcaaaggcagatagacgaagcctctgaagaagttcgtcatcttgctcaagatgagcagaaccgaaggcctccgcacagagagcttcatcacgagggcttctgcaacgaggatgactggtatgaagatttccatcatgaaaattctgcttttgatgatacctctcctctgtcaacctgcaggctacaccttggcccccgtcttacaagccaccccagcttcccatgtacgactgacattcagacccgaagcaattcttgatgagtaatg

SEQ ID NO: 46645 - DNA, 383 bp, Zea mays
tgaaagctaccaagcgctagtaagcacaagttgttaaaatgataatacttatgaaatggcacgagcagtgtatcaagtgcagtcggtgtgagttcctatttatacgcccagtgcgccccaaattggaaggccccgtctgtcattaactgttgctattctagcaaggggaaggtgttctttcggaactttggcttaaggcctttgtacatatcgcaatttgaattcgttattctaacaaattaatattgcgaggggctactgttgggggccttcgtctttcaaaggtcctcaaaaacatgatttaacaatgtttacggagtgtaatacatgaacaggtaccttcagactcggatcagaaccacaatgtgagaagcacgaacaat

SEQ ID NO: 46646 - DNA, 467 bp, Zea mays
  unsure (1)..(467): unsure at all n locations
agcttatgaagattcttcatcccaacatgggctattcgacggtgccagagccaacccatgttagtcttagcaatcaagcatgtgtcgagctcagctctatcaaaatctactaagtatagctgaccctctaacacacctttaaatgttattgaatcatcacttcttctaaagacagtgacaccaatatcagtaaagagacagttgtagcccatttgacataattgtgaaacagaaagcaagttgtaatctaaagagtctacaagaaaaacattggaaatagaatggtcaggagatatagcaattttacccaatcctttgaccaaaccttgatttccatccncgaatgtgatnagctcgtggggatcttggtttttctcatatgaggagaacatcctcttcttccctgcatgtggtttgtgcacccgctgtcgagtattcaactttgagctcccggatgcataaaccta

SEQ ID NO: 46647 - DNA, 283 bp, Zea mays
  unsure (1)..(283): unsure at all n locations
gctttgtgtggagcttggagaggaatctatctctattggtgtgctttgcaatgaatgctagctcttgtatctnggttggaagctggaaaacttggatgcaatgaatggtggggtgagctttaccacttcncatatttggcttatattatataccgcgtccaccatagtttgatctaacttccttcacttccagctttgcgcgaattcctttattacaataccacaactctcgttttttaccatccatcatcaaaactttccatatcttgatcaatttttttgc

SEQ ID NO: 46648 - DNA, 428 bp, Zea mays
tttaagggagaacacgtgataggtctaaccaatgattatattttattagatagaccttgtgcagcttgtcaagcaggtaaacaagtgggaggagcacatcacagcatgaatgtgatgaccacgtcaagacctctggagctgctgcatatggacctcttcggacccgtcgcctatttgagcataggaggaagtaagtatggtctagttattgttgatgacttttcccgcttcacttgggtgttctttttgcaggataagtctgaaacccaagggaccctcaagcgctatctcaggagagctcaaaatgagtttgagctcaaggtaaagaagataaggagcgacaacaggtccgaattcaagaatcttcaattggaggagttccttgaggaggatgggatcaagcacgagttcttcgctccctacacacc

SEQ ID NO: 46649 - DNA, 429 bp, Zea mays
  unsure (1)..(429): unsure at all n locations
gatgcattgcagccactggacattaatcaagaaacattacgcgaagctaggagctagaaaaggaaggctaccagtccgacacattaggaggaggagttggaccaagaaatcaaggaccttgaagccatccatcagcaggttcaaaagaaaaaagaaaatatgcttcgtctcaccgatcttcagaagaagattgatgaggccgctgaggaaatgtgtcatctcacccaagatgaccaagaccaaaggcctcaacacatagagcttcgtcaagacaatccatacaacgatgatgaatggtatgatgatttccatcatggcaattntgcttttgatgatgcttctcctctagcagtagagttgcaggctatcccatggcccccaccatacangccacctcagctttctatctatgatgggcacttagacccg

SEQ ID NO: 46650 - DNA, 417 bp, Zea mays
  unsure (1)..(417): unsure at all n locations
taacagacgacgaagtcgaagctcaatggatactaatgaagcttgtatagatagctgtgaaaaaactttaagaactcttgtaataacctttataaagaataatgcaattaaattttactctgtgaacgttgtccataccttgtaatatattcttacctttccatcaatgtataaagtgtttcgatgtgaacgaaactagcatttttgagccgaaggcgaaaaacacattctcttcttttcgtacacagtgaagcataaaactggttccctttcttattgtcgaagccttgtctttagagccgaagcaaccgcctattgtatgatgatgatgatcctatgtatgtctaaatgaatggttatgaatgcanantatgatgtaatatgtcgtgcacataaatggtcaaacatacgcatatg

SEQ ID NO: 46651 - DNA, 457 bp, Zea mays
  unsure (1)..(457): unsure at all n locations
agcttctagagggagagcacattntatgattaacacatgttcattttgagaaagacaggatttggagcgcatgccangcagggaagcaagttggagtccatcacccacacaagaacatcatgacgaccgacaggccgcttgagctactccacatggatctattcggcccgattgcttacataagcatcggcgggagtaagtattgtcttgttattgaggatgattattctcgcttcacttgggtattctttttacaggaaaaatctcaaacccaagagaccttaaagggattcttgagacgagctcaaaatgagttcggcttaaggatcaagaaaataagaagcgacaacgggacggagttcaagaactctcaaattgaaggcttccttgaggaggagggcatcaagcatgagttctcctcgtcctacacgccacaacanaatggtgtagtggagag

SEQ ID NO: 46652 - DNA, 466 bp, Zea mays
  unsure (1)..(466): unsure at all n locations
tcaccccgcgaccaaatccactctcccgcgagagctttntactttctctttgatatccactgggcacctagcacgaatcacggcgaccggcaaagaattctggagcaaggccaccggcgacgagggggatgaatctgaagatcttttgcgcactgtaccatggccatcatcttaagtttttctgacagcgtgatttgtggagccttgttctccattttctatgtgacaacttactaatcttcctgtaacaaagttattgtcctataatccagctttaatcttgctatagcaaccacactcaaatactcactggatcataatcaaaatagctcccaaacatggtcctggttcactggtagtccagtttcagagctacactcgactgacagaccaacttcaggtctaattttatcccgcttctatgtagtgctaggacttactcacttaatcaaantntgtctcttta

SEQ ID NO: 46653 - DNA, 367 bp, Zea mays
  unsure (1)..(367): unsure at all n locations
ttttttgtgatctctgctaaaaatatgggcgagtgtggctccatggccctaaattaccaaacaaatggactacaacaaagaataactcattcatggtatgtgtggttcgctgcctaacttaccacatttngcctaactattctgtcttttctaactaaggctagntctttaattcgaacgactaaccttagacaaagtgtgactcaattagccatgaactaaacacgcccttaatctctattccctcaaggcttgatcaaaaaggtgtcaacagttccttttactgtcaatgccgctcctttattgngttgtacaagtaccaagcagagaagggtggttgattgaaggtcatcctttattgcactat

SEQ ID NO: 46654 - DNA, 427 bp, Zea mays
tgaagccatggtaagtagcatgggcaagtaatatacgaattgtctcatgcctagctatgggtgcgtaagtttcatcaaaatccagacctccgacttgtgagtatccctttgccacaagtcgggctttgtttcttgtcagttgtcaccacaccatgctcatcttgcttgttgtggaatacccagttggtacctacaacattttgattaggacatgaaactaaatgtcatacctcattccttgtgaaggtgttgagctcctcttgcatatccaccacccaatctggatctcttagtgcatccttcaccttgtatggctcaatagaggacacaaaagagtaatgttcatagaaatgagcaactcgagatctagtggttacccccttatgaatgtcaccaacgatggagttgacacggtgatctctttgaa

SEQ ID NO: 46655 - DNA, 435 bp, Zea mays
  unsure (1)..(435): unsure at all n locations
agccatggtaggtagcatatgcaagtaatatgcgaattgtttcaagcctagctaccggtgcataagtttcaccgaatccaaaccttctacttgtgaataacccttggccacaagtcgggctttgttccttgtcaccacaccatgctcatcttgcttgttgcggaatacccatttggtacctacaacattttgattaggacgtggaactaaatgccatacctcattcctcgtgaagttgttgagctcctcttgcattgccaacacccaatccgagtctcttagttcattctccaccctgtacggctcaatagaggacacanaagagtaatgttcataataaaatgagcgactcgagaatgagtagttacccccttatgaatatcaccaagaatggagttgatggggtgatctctatgaatcgcttggtggactctt

SEQ ID NO: 46656 - DNA, 341 bp, Zea mays
  unsure (1)..(341): unsure at all n locations
agcttctaatgggagaacacgtgataagtctaactaatgttactttcgaaagagatagaccttgtgcagctcgtcaagcagggaaacaagtgagaagctctcattatgccaaaaatgtgatgacaacatccagacccctggagttacttcatatggacctcttggaacccgtcgnctatctgagcatangaggaagtaagtatgggcttgttataaatgatgatttatcccgcttcacttgggtattctttctgcaggataaatctgaaacccaagtgagagcacctagagggggggggtgaataggtgatcctgtgaaactngaaaacttaagccacaaa

SEQ ID NO: 46657 - DNA, 331 bp, Zea mays
actcagcttggcgggcgggactcctggcatctcgcacgcttatttgtagcatcatcggccttgctgacgccgcagcggacggccaggcgcgctagctggtcgcggtggcggctcctctgtacatagcttctttcccggcatgggccggccggggccggactcgagattacccgaggtacggggacggcggggatgtcgcacggaacgggcttaactctcgggccaacgttctgtcatcggggctggcgacggccacgtctgatcgcccgggacgcggctgcttcttttggcactctccgaacaaggctgatttacagtgacaattgaggaa

SEQ ID NO: 46658 - DNA, 378 bp, Zea mays
gcttgaaccgaggacccgcgtcaccggaatagcgaaatcatgctcgccggagttcttccccccaccggcgcacgtggaccgggtaaatcactaagccattttccgattcaatgcacagatagcctctacatcaccccagggagctcaccgtgccgttggattggaataggtcgtcgtggtttggccggtataccccgccgctgacgaggacacccgcctgcgcgcgtggattgagcgattccggccatccccgccggcgagccgtacgtcgttgtgaccaccaaaaccttcccgagctaaccctacccctcgccggacttctctcgtcgccggtaagccgcgccacccctttcttctctgcgggtactgtttacacct

SEQ ID NO: 46659 - DNA, 329 bp, Zea mays
  unsure (1)..(329): unsure at all n locations
tccggctggtgttcttcggggacacctaactgaggcttctgggccgccggcccaacccgcttgctcggtccggttcctggaggagaccctggcggcgatgacccgggcgtggtgttgacgtcgtccttcggagcggagatcctccgaccgtgttgccgtccgcggcttggtcggacttcgccgaaggtggagttgacgccgagggtgctgctgctcccctgcccttgacgtctgaacctgcangatcggttcgcctgtagtatgcatatgntttttgcggccgacgaggcccanacatattgtcgtcgcgttgtaaagctgcgtttctt

SEQ ID NO: 46660 - DNA, 458 bp, Zea mays
agcttctaggataccttgatggatccaatgttgcacctttaagcagatcactgcgacgatcgcaagtgccactgaagtccccaatccagtgtatgcttgctggtatgatcaagaccaacaagagttgagtgaacttttattgtcgatgactgaggaagtccttcatgatttcatcaatgtcatgtcttttaacgaggtctacgactccctccagaaaaaactcaactcgtccaagaaggtgtgcactatacaaatatgcgtggaacttgctacgtcgaagaaagatgatctgcccactactgacttctttcgtaagatcacaaggctctcgatcgagcttaccatcaccgacgctgctctacgtgatgaggaggtccttgtctatctattggtggggctcccagctagacctgataatgggtcacccgacccgacccgcctgagaaaaccctgacctg

SEQ ID NO: 46661 - DNA, 358 bp, Zea mays
acaagtgggaggagcacatcacatcacgaatgtgatgaccacgtcaagacctctggagctgctggatatggacctcttctgacccgtcgcctatctgaacatacgaggaagtgagtatggtctaagtattggtgatgacttgtcccgcttcacttgggtgttctttttgcaggataagtctgaaacccaagggaccctcaagcgctttctaaggagagctcaaaatgagtttgagctcaaggtgaagaagataaggagcgacaacgggttcgaattcaagaaccttcaagtggacgagttccttgatgaagaaaggatcaagcacgagttcttccgctcctacacaccacaacaaaat

SEQ ID NO: 46662 - DNA, 470 bp, Zea mays
  unsure (1)..(470): unsure at all n locations
gctttgcacgacggagacgatgacggactttatctctatgatggcgagctctctgctgagcagacgtgcacgccgccctacaagattgggtacccgtanggactctcgggcacgaacgccgtcatggaaccacgggccagccaatccaaccaatcggggcctcacatggcttctggtaatgctaagcggatctagtgtgaaacttgactcttatctctcgggtagtccctaatcctaaaagcatatcagtatttntttggttcatgattactatgatttgaaatcaacacacccaaaatgcttcattagcaatctactgaaggatgacagagcacgtatgtttagccgtcagttcaactttctatggtactgtatcgaatattgaagatcagtgaaccacaaatgttcaagtacgaagaatctcagtaagatggtacttcagtggtgatggattcttctagtgaaatgat

SEQ ID NO: 46663 - DNA, 393 bp, Zea mays
ggaaatgttgctgggacgggcgaggattcatgtaataattctcctcaaaatacttatgccccgactgttcggatacctacccggaccgtcccgggttatatgcggaccgttcgttcttgtatgcggaccgtccgactgggtagtttgggttctgtgccgtgtgtggtggctcgggcgcatatttatgtagctcattaaaaataggcccgactgttgctggcccggacggtccgcgctcacgttcggacggtccgggcattgtgcagatcggctggtttgctgacgaattgcggttgcttagggtatgtgtccatccgcatcccatacaggggttgtgactggtcgtgacaacctgtagccgatgtgttacacgcgttatctcctaacccaacc

SEQ ID NO: 46664 - DNA, 432 bp, Zea mays
catgcaagcttcttgtagctgctcgccaaaatgagacgtgtactgtgttcctcgatctgacactatcttcttcggcacaccgtgaaggcagactattcgcgacatgtataactcagataacgttgctctggtgtatgtcgcctccacaggtatgaaatgggccacctttgtttagcggtccacaaccacccacatggaatcgtagtccgcccgggtacgacgtaggccaactatgaaatccatcccgatctcatgccacttccactgaggaatccgcaatggctgcaacaatcccgcaggcctctgatgctctgctttggttctctgacagctatcacacatggcgacatattctgcgatctctctgttcatgccataccaccaaaaccttctttttaaatcctggtacatcttctctcttcccgggtgtat

SEQ ID NO: 46665 - DNA, 379 bp, Zea mays
tctctggcctcgctacttttgtcttcttgaccacagatgacttgagaattacttttaacaatggcccttcttattcccattgccttcaacttacgcaggcacaacagaagtgcttcgtattcaacaatattgattgtgcaactgaagtcaagccttgctgcataacatgttctgactttcgaacgcgcaactaggatagcagcctgtcctacaccgaaggttccccaagaaccatcgcagaaaactgtccaagcttcggcgtatatgtttagttcttcttactgagcccctggcgtccaatcagtgatgaagtctgctaacgcctgcgactgaactgatgatctatgcacatatgaaatactaaatacgtaacgctcgt

SEQ ID NO: 46666 - DNA, 389 bp, Zea mays
  unsure (1)..(389): unsure at all n locations
tcgtctaccagggacgcgatctcgcctcgtccgatcttctgtctttgcgggaacagtagtgtcggcgtttcgaccccggggggtccctggaccgacgagtaaattgtcgccgcgtgttccagcccatatgggtctgcgcgatgcggagcacgacagggggtagaagagaggagaaaacccgcggcctccgtgttgtcctgcgcccaggtctggtgcgcttgcagtaaggggttacaagcgtccgcgcgcggagggggggggtgggtgnattgttataatctttcctatgcatttctactgatttcgtagttcgttccatgttttgtctacttctctttcgatttaaacccttttgtagtggtcttttgtatatgatcttctcttttttg

SEQ ID NO: 46667 - DNA, 434 bp, Zea mays
  unsure (1)..(434): unsure at all n locations
catgcaagcttcttcagccacagcttcngatctagattgtcntttcttctcctcctcgcgcacgccaagtccctcaccggcgcgcgggtctcctgcggcagcggcacggaggtgccggcgtccgcgctggtggccgccgccaagaggcaagtggactacatcctgtgcgccaacccggcggtgatgtactacatggtggagttcggggcgcggtacccgcggcacgtgcaccaccgcggcgcgtccatgccatcggtgcgtgaccaccccacgcgcatcggctgcgacgaggggttccggtacctgcactcgccggaccccgacgccaacgtgctcgtgggcgccgtcgtcagcgggcctgactgcagcgacgacgccttcaccgacagccgcgacaactacgcgtagacagaaccctncacctacaccaacgc

SEQ ID NO: 46668 - DNA, 414 bp, Zea mays
  unsure (1)..(414): unsure at all n locations
tagaaaagtctggtatgaatctgcgataatacccagctagttcataaaactccggacttggtgaacagttgttgggggtcttcactccanaatatctttgaccttgctaggatctaccgcaattcctttagctgataatacgtgccccaaaaattgaatttctttcagccagaacgcgcacttactgaacttggcataaagctgatgttcccttagggcgcgcaatacaatccgtaaatgctgagcatggtcttcttcattcttagaatatattaagatatcgtcgatgaagactaccactgaattgttcagctcgggcatgaacaccgagttcattagataagtgaaatgggcaggagcatttgtgagctcgaaagacatcaccaagtattcaaacaatccataccgcgtagt

SEQ ID NO: 46669 - DNA, 449 bp, Zea mays
  unsure (1)..(449): unsure at all n locations
tacatagacgaacagcgagaacagttgcaacgtatcttatttggttacataatgatcataaaaggctagtgcgcgcgcttgataaatctactatggcaaatctttcttctcacgaggttgaattgagggaatacacacataattcatcggctacaggttgtcacgaccagtcacaacccctttatgggatgccgatggacatgtaccctgtgcaacgatagcctcccacgcacatcgacgatnaatttaccgatctgcgcatgtctggaccgtccgcacgtgagcgccgactgttcgagccagcggcggtcgatcccatttttagaagcgaattaccgagacctgcacccaagccgtcacatgccgtgcaaaccctatatatcccattcggaccgtctgtgtatggtgccagacagttcgaatacaatgtcggactgtccgcgcacatg

SEQ ID NO: 46670 - DNA, 486 bp, Zea mays
  unsure (1)..(486): unsure at all n locations
tctcagtcacctgccgcatgcaagctcgcggaggaccagatcatcaaagcatatatgntctggatgagaagtggtcacccaagttctgttgatgaatcaccataagactaatcaatgaaggaatccatgtgggagttcgcaagagaaaggtttgcgtgttggcatcgctgctcctccaataagctagctgccaagcgaaacctataagcctaaagatgatctttgagtatccagaatcagcgtttgtaatcgacaaccagatgctccgcaaaggccagattatgttgaagttccatctcctcgaagagtctgcaaagtgaagatatgtagctgaagtaaagctatacccataacccttctaagccgaatcttgaggacgagattccttttaagtggagtatatatgtagcatcccacacattcaaatcttggaattttctccactcgccctatattcaaatgaattcatatttcatttaaaatgtt

SEQ ID NO: 46671 - DNA, 432 bp, Zea mays
tctaaagggagaacacatattgtgactaacaacaggttatattgataaagacaggaattgtagcacatgtcacgcacggaaacaagatggtgttcatcatacacacacgaacactttgacggctgacacgccactcgagctcctatacatggacccattccacccgagtgcttacataagcatcagcgggagtaaagactgtctagctattgtggatgattattctcgctacacttgggtgttctttattgcaggaaaaatcgtatacccaacagaccgtaaagggattcttgagaccggctcagaactagtttggcttaacgatcaaaaagattataagcgacaaccggacggagttcaagaactctaaaaatgaaggcttccctgatgaggagggcatcaagcatgagttctcttctccatacacaccac

SEQ ID NO: 46672 - DNA, 444 bp, Zea mays
  unsure (1)..(444): unsure at all n locations
agctcttacttcctacatgcttttaatgtcttccttttcggnggttgatgccaaagggggagaagtttatgggccaaagcaatgaaaactatatcaaacaccaaacaccaccaatttaaaattttatatcttaaaatggctttttaagtggttttggttatttggtccaaaaataggaagtaagtgaattatggagttagggggaggcttaagtccataatatcacattgtggggacaatcatgcatcttagcaagtagattgcacatcttcattcaaatacttgtattatttgcttgctttggttgtgttgtcatcaatcaccaaaaagggggagattgtaaggaaaatggaccccgggcctcttggctaattgagttttagtgtttgatgaacaacacaatccgtgaactaataagttttctagtgtttgtgtttgtagttc

SEQ ID NO: 46673 - DNA, 483 bp, Zea mays
tcaccgaagaagactctatatgaaaccttcgaagtttcaccgtggaagactctacacgacaaagtttcattgagaaaagccgtatctttagaaagtgaggcgaagctactaaatagtctttgccgaaagcgaaccctcgtccgcaaagaccgattaccgacgaagattcaagaactgataaaggcaatgactgatcaaatcggcaaataattataacactatagtttatggagagctagggcattacataagtgtttacaaagatagagacctctattaatacctcatgacatgtattattaacggtcatgaaaacgatattaaactaagttggtgatcaatatttcgtctgtgtagataattcattctccaacaatgcgtagctagagaaaagttgcacgacacccaaccgctgcaagtagccacctaatattagtttatgggtatgtgggctattatccaaccaactatgaatataagtgg

SEQ ID NO: 46674 - DNA, 388 bp, Zea mays
agcttcacacctctggactaacttcgctgcattattcttcgccgtcggccaatagaatcctgacctgaaaacctttccgactagtgttctggatgatgcatgtattccacattgccctgcatggacctcctccagaagttgtttcccagtggacgggagaacgcacttcatgaggatgcctgacgcgccccttctgtacaattcttccccaatgagtgtatagtgagccgactgcctagcaatgcgctctgccgagttcttgtcgtctggctcttcttcattctttatatacttaataatcggccgtctccagtcattcagagtctgactcgggctgatctatgatattgcactcttctggttgatccattgagatacttggctgaag

SEQ ID NO: 46675 - DNA, 391 bp, Zea mays
  unsure (1)..(391): unsure at all n locations
taggaatgagctaaatatacttgattctcagaactttgattgaaacattgcacactctgctcatttatatacctatgatcatgtctctttcatttggtacacatgcacatttcttaattttcttgtgccaaggctaagactaatatacttccatgagtatctctatggttagtcttagaatgaaagggaaatggagtaattcggcaaaggcaaggctttcactccaactctgtcggtatcatttatcctttgccttactcataaacttccatttggtataaactntcactcataccctttattttccaaagggggagaaaatacgccacaacgcggaaaattaaaaggcctcttaagttcttcgtatttggcaattaatgccaaaggggga

SEQ ID NO: 46676 - DNA, 436 bp, Zea mays
  unsure (1)..(436): unsure at all n locations
agcttctaaagggagaacacgtgatatgtttgtctaacgtgcaattcgcaaaagatagaccttgtgcagcttgttatgcaggtaaacaagtgggaggagcgcatcacagcaagaatgtgatgaccacatcaagacccctggagctgctacatatggacctcttcggacccgtcgcctatctaagcataggaggaagtaagtacggtcttgttattggtgatgacttttcccgcttcacttgggtgttctttttgcaggataagtctgaaacccaagggaccctcaagcgcttcctaaggagagctcanaatgagtttgagctcaaggtgaagaagataaggagcgacaacgggtccgagttaagaaccttctagtggaggagttccttgaggaggatgggatcaagcacgagttctcctgttcttaacaccacaac

SEQ ID NO: 46677 - DNA, 468 bp, Zea mays
tgccttcgcctcaatatatcacccacagtccaactgtgttgtttgtcgtgccaatggaaaaattttcacagctgtctaatagatgctcctcgacgaacaaagggcaagtgggccgatttgctacctgaggcggtctgggcgctaaacacgactgagtgcaaggcgaccgggttcacccctttccgccttctatatggatcggaggccatgaccccacaagaaataagacatgggtccccgcaaacagttccgtcagccgttcccgacgtggacgagcccacttcgaaggatctcatcgatggagaccgagtcttcgccctacaggctctaaataaataccaagcccagacaaaagcatggcgcgaccacacagtcatcccgagggaattcatcgaaggggacctcgtacttgtccgaacagctcggacagagtccaggggcaagctggagcccaagtggagggccctt

SEQ ID NO: 46678 - DNA, 466 bp, Zea mays
  unsure (1)..(466): unsure at all n locations
cagctgcagctgctttgaaataaatgtaaagttatgtatttttcttccgcattttttcatctccgatgttctgtaatgtctgcaagacgggtgagacgttccttgtaaggtaaggaaagataccgaacttgtcaagtagtcaggggcacctacagggttgtctaaagttcgttggacaaggacaactgtaggtgggcctaattacttgtgaggttccgccacactgcacgtcgagggggagcaaagcggcgtcacgcctgatcaaaactggcagaccccgtacctgcaatatctccaccgaggagagctacccctcgaccgagccaaagctcgacggttggcgcggcgcgccaagtcgtttgtcttgctgggagatgggaaggagctctaccaccgcagcctctcatgcattcttcagcgatgcatctcgatcaccgaaggtcangaactctctcgagagatacac

SEQ ID NO: 46679 - DNA, 470 bp, Zea mays
  unsure (1)..(470): unsure at all n locations
taaaactaagctntcttcggtggcatgaccaaggtcagtgcttgccgaacgtggttttatagagttcaccccacggcgggcgccaatgttggggacttgttctcaaatgctatgagttaagaacaaggcaacacaaaaaatggtaaacgttaaagtccttcgtccttcgaagcattatttcccttgggatataatgattttcggaccaaggttatgaaagacataccttcatcagcgcaacatataataatgaagagagaatcatatgaaatataaaagataacatgaacaaatatgtattattatcaactcatttctattttatcattatggaaaaatagaaatgacatcaaattacaaatgtaccttcggcttgaaagaatgtaaatgtacaagcgtgacgcaaaagcangatgacaagtcagcgtgaacagtactgtggcactgtacatctatttatatgcacggga

SEQ ID NO: 46680 - DNA, 457 bp, Zea mays
  unsure (1)..(457): unsure at all n locations
agctttatacctctgttaatataagggtatgtgctaatctatacaggcatataatactatntcgtttaaaaaaatatttttatgctatattgattacagttcaaccggggaaccagtgctatgcaacactatgttgcaatacgaccaatgtttattgatgtggaaatcatgaacactgatattcaagttgttctgggtgatgaggggttgcaagctgattgcgacagtattgcagatggtctctctacattgtataaggaaattgcaggtatttatgagctgcactctttgcaatttttgtttctaaactatactttgatgattttcaattttggcactctgatatatcatacttgtcttcagatactgtgaggaaagaggcagctacaataacggctgtctttccttctccgaatgaggtcatggcaattctcgtccaggtatgtttttcaatgga

SEQ ID NO: 46681 - DNA, 447 bp, Zea mays
  unsure (1)..(447): unsure at all n locations
tgatggtcaagtcaagaggcaggccccaatatattatggatctgatgttcttagnttatcaaagaaaaaatatacagagctggagaaggtactgtatgctgtcttgatggcctccaggaagcttcggcactatttccaagcttacaacataattggtccttcttcacaacctctgaaggatattatgaagaaacgagaagctactggaaggattggaaaatgggctgcagagctcaatggaatttgtattgaatatgttcatagatcttcgattcagtcccaggcattggtagacttcattgctgactggacgccaggggctcangaggaagaaacgaataaagacaatgaagcatggaccagtgtttgtgatggatcttgnngaaccttcggagcgggagcggctgctgtattggtttcaccttccanagtcanaacttgttatgc

SEQ ID NO: 46682 - DNA, 476 bp, Zea mays
  unsure (1)..(476): unsure at all n locations
agctntatatggacgacggtgtcgaactccgctaaattggtctgaacctggagaaagatacttctttagacctgatatggtgaaagaggttgaagaaaaggttcagagaattatccataatatgaagaaagctcagactcgacaaaagagttatgcagaccgacgacgacaacccttatgttttctggtaggcgattatgtctacctgnacagttcaccaatgaagggtgtatcgcgtttcggggttaaagggaagcttgcacccaggtacattggtccattcctggtgcttgagcaatgtggaccagtggcataccgacttcagctccccgaaacattgtctgctgtgcataatgtgttccacgtgtcacaactgaagaagtgtcttcgggttcctgatcgacaccgtgaagtgactgatgttgtcctggaaccagatntaacatactcggaacatcctattcgagttctggatc

SEQ ID NO: 46683 - DNA, 420 bp, Zea mays
  unsure (1)..(420): unsure at all n locations
ctagaatcaagaatattgagctcatgccttagtctggtaaaagattgttcatcaagtggcttggtaaagatatcggctaattgatctttaatattgatgtaagaaatctcgatattccccttgtgttggtgatccctaaaaaaatgataccgaatggctatgtgcttaatgcggctatgctcgaccggattgtcggccatcttaattgcactctcattatcacatagcaatgggactatggttaatatgtaaccgtagtcccgcagggtttgcctcattcaaagcaattgcgcgcaacaatgttctgcggcaatgtactcggattcagcggtggaaagagcgaccgaattttgcttctttgangcccaagacaccaaggatctttccaagaactggcaggttcccgatgtgctcttccta

SEQ ID NO: 46684 - DNA, 455 bp, Zea mays
  unsure (1)..(455): unsure at all n locations
agcttaccgcgagtgacgaagaataaattcatttgaatgttagagaanaaattgcttgtatggatctcttagcctagaaagttctaatcagatatttactttgaaaccctaatgatgtttggctaaaattgcataagatttttgacaacacatcaaatgtccgtgagcaaatatattgtctagctttgaatgagtataattcttttgtaatgaaagataatgattttgttagagacatatattcacgtttaaatcgtgttgttaatgagctcaactctattggcgttaataagctagacgatgtggacactgtgaggaagatcatatccttgctaccttaacaaaaatatgggagcatcatcatcatccttcacaacttggaggatttgagccaaatgacctcgcgctcttgatcaggaagatcgtgacatttaagatgtcacgcaagatgtgtg

SEQ ID NO: 46685 - DNA, 380 bp, Zea mays
cttggatattattcatcagaacactatggatattggtgtgacattattttattcttcttcacgaagcatgaaaagaagggaaggtgttttttttcgtcaaagactcaaaaacggtacgtgtgtaaaatttcatgcatcgtaaagaattgagcagtaaaaacaggtatattacattcagggttacaaaatgttacacatatttcatttcagaagtttttacaatagtgcttaatcttctctcaaaacaacttctgcagcttcgttcaggagtcggttaacaacttcatccatgatagcttcagccaatcttttaatttcctcgtctcctttcgggtgagggcccggagacgctttagtaggaactgaatgaggacaggata

SEQ ID NO: 46686 - DNA, 404 bp, Zea mays
  unsure (1)..(404): unsure at all n locations
agcttccaacaacagcctacgcctttatctcttttgcaacaaggccagcagccagaagggagccagtatgctccacatcagagggacttcacagagcagtccgaagctcgtacagtcaacagcactgtaccagagtcaaagcacatctactgacaaatatcctaccttaatagcaatcttcttcattcagttntatcttttgcaatacaggacattgtttaggtttcatgtaaatagtttcgttgattcccacaaggaaaatatatttctcacaggcttaaatcgttgaagtttaaagacttgtgataacaaagaggaccttcgaactatcgaaaactcttcgaaacaacaaaaagtcgttctaaggaacgcagagtaagtttgccgaagtcacaaaaaagtct

SEQ ID NO: 46687 - DNA, 472 bp, Zea mays
  unsure (1)..(472): unsure at all n locations
aaaactagctgcatagacaaggaaatctccttcagccggttttattaatatccgcaattacaaccgcataagaccctgaataaggccccaactctgcaattgcttcacatacatccttcctcaccaatcctctaaggccagcgggtatgattctctgtacgaatatgtggcaagaatgtgttttcagatttacaaccacctttgaaccatcttcacttatgtatcttgctaggtcatccgcaaatccatcaagaaacttgataacgttgaggaacttgcaaaactcgactatctgatccttccccaacacatatggagcacgtggaaccctacacgctgaggtgccatcttgntgcacgtgcaattcaagtcttatgcccatatcatacaaatatagccttgcattatgtgtgtccttagactcgcctgctatactaagtagtgtgcatagaatattttcacatacactttt

SEQ ID NO: 46688 - DNA, 409 bp, Zea mays
  unsure (1)..(409): unsure at all n locations
gagcctcataaaggaaaggaccggaggagatgtccaactaaccgagtgcgagcgaggagggggcgctcgtatactgcccgcagcgcctcatactgtcttcagcgcatgccgcgccctttcccctcccctttgactgtgcaccgttagggtaacgagatgggtgcagcggccacctctaaaccttctcctacaagcaacagtgatagcgctgggagcagtgctccgctagatgtggagggctgtggcaagccctctaaacactgtgctngtactgctgaattaattgtcacacaataaaattgataggaggtgaacagcaggtatataaaatgatatttttatggttgcagtggcgtgtacgggaagaatttacacggaacccgctgtcacggtggagatataaggagaa

SEQ ID NO: 46689 - DNA, 274 bp, Zea mays
cgcattattcgaaaggtatactctttactagcacgaacttagtttttatactccgataattggtcatcttgttctaaccactaatcaaaggatctagttgggggataaagttctaattttcaggtttcgcctatccaccccccctctaggcgactatcaccccgctcggagacgatgaaccccaagagcatgcctcggggcaccccgaagacgcacttcttgggattgagcttgacgcccttcgccttgagacaccggaatgtcagttctaggt

SEQ ID NO: 46690 - DNA, 455 bp, Zea mays
agcttaaagccatggtaagtagcatatgctaataatatgtgaattgactcaagcctagctacgggtgcataggtttcaccgaaatccaaaccttcgacttgggagtatcctttggccataagtcgagctttgttccttgtcaccacaccatgctcatcttgcttgttgtggaagacccatttggttcctacaacattttgattatgtcgtggaaccaagtgccatacctcattcctagtgaaattgttgagctcctcttgcatcgtcatcacccaatccgcatcttgtagtgcttcctctaccctgtgtggctcaatagaggaaacaaaagagtaatgctcacaaaaatgtgcaacacgagatcgagtggttacccccttatgaatgtcgccgagaatggtgtcgacggcgtgatctccgtgtattgctggtggactcttggtgtggcggcttgg

SEQ ID NO: 46691 - DNA, 428 bp, Zea mays
  unsure (1)..(428): unsure at all n locations
gagcacactttgggactaaccaatgcttatttttagaatagacaagggttgtatcacatgtcaagcacggaaacacgttggtgttcattatccacacaagaacatcttgaccaccgacaggccgcttgagctactccacatgaatctattcggcccgatcgcttacataagcatcggcgggagtaagtattggcttgtaaatggggatgattattctcgctacacttgggtgttctttctgcaggaaaaatcacaaacccaagagacatttaagggattcttgagacgggctcaaaatgagttccgcttaaggatcaaaaagattacaagcgacaacgggacggagttcaagaactcacaaatcgaaatctttcttgaggaggagggcatcaagcatgagttctcttctcctacacgcacancaaaat

SEQ ID NO: 46692 - DNA, 466 bp, Zea mays
  unsure (1)..(466): unsure at all n locations
agcttnaacgctagagcctctgcattgttggtatattgaatattgaactactggagagaatacacaaacaatttacggatgataggtactacatatggtgagttctcacactctgatgtcagagttggttggtcacctgttctttgttcatggactcatcagactaatgcttgcttattcctatgtataagcagatgatgcaactggccatggcatatatgttgcttcgacctgtgcagtttatggatgaagacgaagctgacctgcagatgtaaactttgttttctatggaccacgtcttgtatatccaaattgaacggattgttctaataaatatatcacaaaaagataaagtataatatttgttcttgtgcgttgttgcaatgaattntagtgaggtaatacgaacttatattcatctttcagatatattctacgttctaaccaactggtccaaaatgtcaca

SEQ ID NO: 46693 - DNA, 281 bp, Zea mays
tgctgcatatctgttaactaacagaacgaacgcgatgcatcattatctatgaggccggattgcgggatctcccttggaataactaaatgattctcatgtgcttatccgtgttccacgcctgccgatgcagacataggaaggatcctattgaactgaggcttctgaaatttcagatcctgatctgccgtatatcttaatgccacagaaccaaaaactgccttgctgatctatgcgatgcaagtggaactgttctatctgcatgatgactaaaatctgaatat

SEQ ID NO: 46694 - DNA, 262 bp, Zea mays
cttcagactcttcctatatataggactgtcgaatactcatttcactggcaggctggacactggagcggccataaattattatcttactaaagacaggcttatttttattcctgagggttatactttcaaattaacggtatctcacgtggcggggaattatttggcaatctggccccaacctaaaattctgatcattgttacctgaaacttttttgaattgaactaactcttgaagcaattatgtgattgaatattctaaacc

SEQ ID NO: 46695 - DNA, 279 bp, Zea mays
atggttgatacatttgtttaaaacaacctggcacagccagcaggaacagggactactccccagtaaacgatacacgcagaccacgcctctcattggactttcggccgtctattacatcggaagtagttgcttgaatattgagatttcccttactggatatttgccgaaataaaccatgtactaaagttctagaagccaacagttactcagctgaaagacagggcatggtctgataaacctaggaaagtttagagagatagctagtttgtcctctgctaa

SEQ ID NO: 46696 - DNA, 321 bp, Zea mays
agcttgacacatgtgtctattgtgtgaaaatgataacgattgttagcatcctgagtaggcaagctactgggctattgaaggaagatgaaaaagttttgaagaaaacaaaacaactcatgagccaaagacaacaatctttaaaaagtgaaagcttgacacagcgccctcttctgagccgaagatagatgagacatgataagaagctcctctgacgccctctgcctccgaagtagccgaaattctgaaggtaatgactgaatccccgcccttgaagctgctaagtcctctaggatcagaactgacaaaatttttacagaggaa

SEQ ID NO: 46697 - DNA, 464 bp, Zea mays
agcttcggcatagtggcatgtctcaagacgaatgactgtaccgacttaatgatgaaatgatcgattgatcgatgagagtctgtgtcataattgtaatcttttgtaaagggcatgaatgtaatatctcacaggctgtgccctgtgcctataaatagatgaacagtacccccgtactgttcacgctggcttgtattcactcgcacgtcacactcagattctcactttctgtcaagccgaaggtataaatgtaattcaatattatccatgtttattcatgattatataataaaaatgtctgaatgataccatatgattattcatgttttttatgtgtcatatgatcctgctttccattgtatattgagatgatgaaggtacgtccttcatgaccttcgtctgaagatcattatatcctaagggaaataatgcttcgaaggacgaaagggtcttaatcatttaacttt

SEQ ID NO: 46698 - DNA, 421 bp, Zea mays
ctggctgtcaaattgtctgccgctgtcaactgtgaggtcggacgggactccgaatcggcaaacaatgttttgccagaagaatttctgggcagtcttcgacgttattgtggatactgaccttgcctcgatccacttggtaaaatactccacgacgacgaaggtgaacttgatgttcccttgggccgtgggtagtggtccgacaatgtccaggccccatcgctgaaggggccacgtgtgggcgatcagctttgtgaattgcgaagggttgcccgaacggggggaaaacttctggcaagcttcgcacgacctcgtgactcgattcgcggcgcaaatcatagcgggccagtagaagccttggcggatcatcttatcagcgagggccctatgccccgcgtgagagccacaagttccactggtgact

SEQ ID NO: 46699 - DNA, 393 bp, Zea mays
  unsure (1)..(393): unsure at all n locations
cttccgcgttgtctgctcttttatatgaacaacggacttantaccagagcatattgccttctaggtgcgggcgcttgccgagaaatgggaaatgcctccacatacccgtaaagaggccgaccaaagtggacttgtcaggtttaagttcacttttaaaattgaagaataatttattgacccacacgatgagtggctgaaaagcattgacaatttaagtgattagctgcttgggacatactcgaatgccgaagatactgcaatgtcagcagccttcggaggccgaanaaagaaaaggctgaatcgcgtatttgatgccatcgggtttgtctaccctgactatngctaccccattcaacgcagaagagataaatacatctctgcaaagaaaaacta

SEQ ID NO: 46700 - DNA, 449 bp, Zea mays
agcttctaaagggagaacacgtgataggtctatctaatgtgcatttcgaaaaagatagaccttgtgcagcttgtcaagcaggcaaacaggtgggaagctctcatcacaccaaaaatgtgatgaccacatcaagacccttggagatgcttcatatggacctcttcggacccgtcgcctatctaagtataggaggaagtaagtatggtcttgttatagttgatgatttttcccgcttcacttgggtattctttttgcaggataaatctgaaacccaagggaccctcaagcgcttcctaaggagagctcaaaatgagtttgagctcaaggtgaagaagataaggagcgacaacgggtccgagttcaagaaccttcaagtgaaggagtatcttgaggaggaagggatcaagcacgagttctccgctccctaaacaccacagcaaaatggtgtg

SEQ ID NO: 46701 - DNA, 434 bp, Zea mays
tgaaccgaggacccgcgtcaccgaaatagcgaaaccgtgctcttcggagttcataccccgtcggcgcacgtggaccgggtaaatcactgcgccatttttcgattcaatgcacagatagcctctacatcaccccaggaagctcaccgtgccgttggattggactaagtcgccgtggtttggccggcacacccgccgtcgacgaggacacccgcctgcgcacgtggaccgagtgattccggccatccctgcgggcgagccgtacgtctgtgtgaccgccaaaaccttcccgagccaaccctacccctcgtcggacttctctcttcgccggtaagccgcgtcgcccttttcttctctgccgatactgtttacacctgtgagggaccgcgcgggagaggaagagaaagtcatggggttttgcgcattgtcagtcacac

SEQ ID NO: 46702 - DNA, 398 bp, Zea mays
agctctgtactctggtgtagcgctactggttcttgacagcttcctcatgattttcggatgcatgtcttactaacttctgcaatctggtggtcaatttggatttgcgacaatagaatgtgctttgataaaacctcgtcaaccatccgcttgaggtgaatataaaatcttgctctcttcttaaatgttggtaggtctcttcaacgatggcatgaaggaaaaggtgtccaacagtgcaccaagataatcttattgttcatcacctttcacatatgattgcagcttcgaaggggcatcaactgcacataacctctatggaagaagaggttgatgacaatgacaaagatcatgagacccataagaactgacgtgctagctgtagatggagtatacattttatg

SEQ ID NO: 46703 - DNA, 413 bp, Zea mays
gtgatctgaggttcacggttgatgccaatgacccatgagcaactgatggagtcaaaatggtctcagtagcagcgctttgtgtggcataagtgccatctgcaagaacaacatgccgcctggaagatacagtgacagagttcaccactgcctgtgctggcttatcagaatcagttgcctccccttcatcagatacagtgtagaatggtagatccccaagacattgtttaatggtagcaatggcacttacaacctctgatagagagagggagtactccccaagaattcagagagcacatgagcagacccgggatgctcgaatctggtaaaatctattaaatagcctcttgatcatggaaacacgcagctttggattggtctcaatgatctcacgtacaaacagaacaacatcaaca

SEQ ID NO: 46704 - DNA, 392 bp, Zea mays
  unsure (1)..(392): unsure at all n locations
agcttctaaagggagaacacgtgatttgtctgtcttacgngcattttcgaaaagatagaccttgtgcagcttgtcaagcacgttaacaagtgggaggagcgcattacagcaagaatgtgatgaccacctcaagacccctggagctgntgcatatggatctcttctgacccgtcggctatctgagcataggacggagtaagtatggnttaattattgctgatgacttttgccgcttcacttgggtattctttttgcaggataagtttgaaacccaagggaccctcaagcgctttctcaggagagcttaatatgagtttgagctcaaggtgaagaagataatgagtgacaatgggtccgagttcaagactgtccagtgaggaggtccttgagga

SEQ ID NO: 46705 - DNA, 448 bp, Zea mays
tgcggcatgcaagcttcttgaccaaatctgaactcaccatattattgtagcttccaccatcaataataacacgtgcacgccgattctcgatggcgaagaaagtctggaacaaattatggcgttgctgcttctctgatgattcaggctgagcactaagaacacgctgcaccatgatgcttcgaaggttcaccgtagcatcagcaccaagcatagcatcatcatcagcaacatcactggagtcatcatcgtcattctcaccgtcggaagcactaatgtagccatcatccgtagcaatgtatgttcgccgactcgggcaatccttcttcacgtgaccaatcccatgacagcgatggcaaacaatacccgaagaacgaccactggaaggtgctgcaggtgctggtgaattcttgttcttagcgggtacctgccgaggaagttaccaacatgt

SEQ ID NO: 46706 - DNA, 455 bp, Zea mays
taagtagcatatgcaagtaagatgcgaattgatttatgcctagctatgggtgcataggtttcaccgaaatccaaaccttcgacttgtgaatatcccttggccacaagtcgggctttgttccttgtcaccacaccatgctcatcttgcttgttgcggaaaacccacttggttcctacaccattttggttaagacgtggaactaaatgtcatacctcattcctagtgaacttgttgagctcctcttgcatcgccaccacccaatccgaatcttgaagtgcttcctctatcctgtgtggctcaatagaggaaacaaaagagtaatgttcacaaaaatgagcaacacgagatcgagtagttaccctcttttgaatatcgccgaggatggtgttcacggtgtgatctcgttggattgcttggtggactctcgcgtgtggcggttatgaatatgtcatcta

SEQ ID NO: 46707 - DNA, 390 bp, Zea mays
agcctgatccagtctgttatatgaagacgactaggactgaccgaaactccaagatgaagcattggaaaagtccctatctgacaatcaaatatattggcatattgcctattaatgtcctcgtctccatcaatcccaaagatctcgctcttcataaaattgatcttcaaacctgccaacttctcatagatgttcatgagcattttcaggttcctcgccttaattcgcctttttttcttagtttcatgaaggatctcatgcaggatcataaccccagtcataatattcctgcctttgataaaggcgatctgttgctcactaatcaacttttgcgcatatggttcaatccttactacagtcaggactttagtgatcagcttatacaagtagttc

SEQ ID NO: 46708 - DNA, 395 bp, Zea mays
gaatgctcaagaggattacttgagtggggctgtacattatgctaattctgcatgggaaatggaaaaaacgataatacgacttaggctcattgatggctcacataatggtgaaaacatatctgagagaatatttgaagggtgtaaaagaatatggtgcttaatgataaaaccttttctgtaaccctggacaatgcttctgctaatacctctgttatgggtagacttactcctctacttaatggctatgttggggatgtttgtttgcactcaaacgcgtgcatgtcataatttgaatatgattgttagactcgtttaaaaggattcaccttatctagaatatttataactgtatatcattattgactctttaataacgcatgcttatacaaacattt

SEQ ID NO: 46709 - DNA, 187 bp, Zea mays
gactaacacgagctcactttgagtgaagttttgcaatgaaaccaaagggagcaccaggcgcagtggatgttaaagcagataaaagcccaaagtaataaactccctggaatatctcgaaaggatgacagctgagacattattctgaaaataaacattacctatacaaaactactgaactgctaatatt

SEQ ID NO: 46710 - DNA, 425 bp, Zea mays
ctaagcttgcacttcccaatattttaatgcagatgcttctgaatgtattgattaagcaagttaggcattttactggtttgggaaatacccctatgacttacagccttgggcctgtcattgaataaatacacacgtctgccgaagatagtggtggcagaccaacttttaagatgtgcttggggatgctcaagttcatgagaaatcgctcggatcacaactttgttgcttatagaaaggtatgccttcagcgacctattaactcaaggtcatttcttgtgtcttttggacacatttggtgcatctttttctagggtcttggtgttgatcgcaacaaaaaggtggatttggtgtaatgactatgttgttaattctttggggacgataccttaggtttaatattatccattttactctagatcgagtgc

SEQ ID NO: 46711 - DNA, 448 bp, Zea mays
  unsure (1)..(448): unsure at all n locations
gcctctaactctatgaattttgaaattcacaagtggttggctgatccatctgctgtggccttaatgtctccccctttggcattaagcaccaaaactggagaacttttggccctttaaccccattgctttaccaaaatgtcaaataagcgcaaaaggcaatgagaacacaagtacgaacttgggacgagatacacttatacccgaatgccatggaagccctttctttgtccaagctcacttttccctttcaatatgctacttgagattatttcaagaatactcgacaactaagttagtctcaagggagtcaagttgtaacacatcctccccctaaacatgtgcattatttgcatatggacttgtgaggtccggtgatgactcttaccacctgagcaccanaaataatcaattaaagacattaatcatgatcaaaggcatagaacacatg

SEQ ID NO: 46712 - DNA, 440 bp, Zea mays
  unsure (1)..(440): unsure at all n locations
ctgctttgaaatanatataagaatatggaagtcgcttccgcatttctttatctccgacgctctgtaatgtctgcaagaccggtgatacgtttctggtaaagtaaagaaagatacctagcttgtcaagtatttcaggggcacctacaaggttgtctgatgtctgtgagacaaagacaactgtaagtgggcctaattacttgggaggttccgtcacaatgaactcagtgtttatgccaaaattaaacaagttcgtgggtcgtttcattgatgatattctggtctattccaagaatgaggccgagcacaccaaacatttgcatactgtactttagagactgtgtgaccatcagttgtatgctaaattgtctaaatgtgaattctggctgaaggagaataaattcttatgtcacacaatttctcangatgggataccagatgat

SEQ ID NO: 46713 - DNA, 428 bp, Zea mays
agcttctgcaccatgtcgctgctagccaagttggtgcagctaccttcatcaatgatcaaacgacatgaacgctccttaatgacacactttgtttgaaacaacgtatgtcgctgattctgctctgccttctccatttgtgcactaagcacaccctgtacaatgaggctctcatagtgctctgcatcatctgcaccaatcaattcttcgggtgggttcttagtgcctgcatcatcagccgcaagcaaagcaagtgtagcttcatccaaatcactagcagaggaatacccaccatcgtcttttaccaccaaaacacactgattaggacaatcacgctgcacgtgtccatagcccttgcatcgataacacagaacatctcttgttctacctgtggaagctactgaagaggcactacctgcaggtttctgggc

SEQ ID NO: 46714 - DNA, 362 bp, Zea mays
ctcctgttgtgctcgaacattccaatccgagcccgcatctgtctcgtggtgaccgacacaagttggtgttcttctgcagtccgaatccagcatgttcaaatccttatccctttcggtcttcttcctgattcctaagcaaaacaagagtgcacgggtctccatggtctaaatatgatggacatgaactcaagagtgtaatcacctgatggttgagttgacgagcactagcgcgagtaatgggaccagaaattgtgacttgtattggtatagatgcgtcagtaatgtggatgtcttcatcagcaacgaaattgtgcgaaaccaccccaaacatgagtgttggagctaaagtacgggattgggca

SEQ ID NO: 46715 - DNA, 471 bp, Zea mays
  unsure (1)..(471): unsure at all n locations
gcttcngcatctntacttgcttcttcttcctgagcccctggcgtccagtcagcaatgaagtctgctaaagcttgggactgaatcgaagatctatgcacataatcaatgcagaactcattgagttccgcagcccactttacaatccttctagtagcttctctatttctcataatatccttcaaaggctgcgaagaaggaacaattatatggtatgcttgaaaataatgtcgaagtttcctggaagccatcaaaacagcgtacaacaccttctccaattctgtatagttattctttgataaactaaggacttcggagacgaagtatattgcggcttgctttttggtttgcccttcaagcttctcttggacaagtgccgcacttaccgctgagtgcgaagctgcgacatataacaatagaggagcccctggcgctggtggagttaatgtncgtagaattatcanatactgcttc

SEQ ID NO: 46716 - DNA, 467 bp, Zea mays
  unsure (1)..(467): unsure at all n locations
nttgaggaaatcttaagcggccgacgagatgtatgtgcattttctggtgcgcgcgggatatcagcaatcttggagaatgcggggtgcaatcacatcaaaaccatggcccatgccgaagctgccttctccgcggacgtcacgaaggatccttcagctaaagcaaccttaatgagcggaaaattttataatgatgtgtgggagaatggtggtcgagaaatggctcataaaattatgaagaaaagtgaaaaagacatccatgaggctcgagctgaagcaaaacgagctgaagaagctgctcagcgtgaaaaacgcataggtattgtttcgcggcgtctaacttacggcattgttttcgtgacttcgaactgaattggtttttctaccgcagttgaattatctcctccaccggagctgttcaaccccctggccaacccagaaacanagaaagccatagaaatcatcaatat

SEQ ID NO: 46717 - DNA, 78 bp, Zea mays
gcaacgcaaaaaaaaaggccacaaaccaaaaaagagaatttttttaccaaaagaagagggaaacaaaagaaaggctaa

SEQ ID NO: 46718 - DNA, 471 bp, Zea mays
  unsure (1)..(471): unsure at all n locations
gctttgtttcctaggacgaaaggatggatcgacattgagtgaatgttcaatgacgtccctgttgacaccacagagatcgttggctgaccatgcaaaaacatctttgttgttgaataaaaaccttatcaaggttttctcctgctcttcagataattgggatcccagcaataccttctgctctgctatgtcttcacatagaagcatgggcttcgactgatcagccgaagcagccttctctcttcggtacttatactgttcataagcttcggctccatctatattgtggattgctttcgagtctatccaacttccttcagcctttctggcaacttcttgacttccatgaatagcaataggcccttggtccgaaggtatcttcatgcatatatatgttggatgaagaatngcttcgaatgcgtcgagtgttccacgaccaatgattgcattgtaggggtattccatgtcaacaat

SEQ ID NO: 46719 - DNA, 143 bp, Zea mays
aagcggtcccacttttgcccagtatataagttctgcaactcgcaaaatatggtagaaacagccaatctcgtagtcaattaggttagtagggcatcgctttgaatggctcccattagaagcgcacgcctagagctaaaaagatg

SEQ ID NO: 46720 - DNA, 427 bp, Zea mays
  unsure (1)..(427): unsure at all n locations
ggcttctgactggctggacggctggctctatgaacgcatctagcgtgagcggagagagcatagcgcgagagatggtgagcttgcgcgaaatgaggcttggcttagagagcgggtgcgatcgatgctcaaaatggagctacggcgcgtgggcagcaacttggctggggctctcgaagagcgagcgctctgtgatcacagacgctctacgatatggttgatctgactgtgggccccaccgtgcatatagagggacccgccacctggcagcagtgggggtgggggatatcctcacgatatggcatattcttttaattcttctttttcagccttccgtaactcttgtccaactaagttttgaaagttgaaaatttcctctctcgaagcatcttcagctattttcttncccttttcaagtactgtagccacg

SEQ ID NO: 46721 - DNA, 97 bp, Zea mays
tgaaaaatagcagtgtcttaaaatctgtgatactgatatgaggtggagctgctaaaagttgtcttaaggctaaaatctgtgatagttccagttttct

SEQ ID NO: 46722 - DNA, 411 bp, Zea mays
  unsure (1)..(411): unsure at all n locations
agcttgtggcatggttcaatgatagacacacccacgcagttggattgcagaatgagggagagagatgggctccaaagcctaagacctttctagagaaggcaaagganagggcaaacacacacactgttgattgttttgacttacagtcagggacatatgaggtattccttcaagctggtactacttctgacggcgagtcacaagagtcgaggaagcatgtggttgtccttaatgacttgtcatgtacttgtggcgcacccaagcaataccatattccatgttctcatctaatcgcagctgctcgagctcgtaactttgacttagagaggaggatacctcaagagtttactattgataaactagtggtgacttggagtccaagaattattccttatcgtgacgcgggtgagt

SEQ ID NO: 46723 - DNA, 310 bp, Zea mays
aaactaagctagaaggggaaccgacacccctatatccgcacaaatatatttttctactgacccctacggctgcgtaagactaatctgactacacatctcacacatgcgagaagcattctgccacatgtcctgcctggcgtggtgcaccctactataataccccgatggtccaaccaaccaccccctaaagcaaggacgcctttaacaagacagagaagtcattaaagagcgtgaactgttgccgcctaccgcttgatgtccttcttctggtagaggaggcactcgaggatgcactccttacagaatgtgt

SEQ ID NO: 46724 - DNA, 400 bp, Zea mays
gatccttaagtcacctgcggcatgcaagcttgatggaacagattcatctacatctatgtcaacagtattggattgggttggaattgggttgcggggaggattttggtgacccatgtgctggtccatacattttggttgatccgtcaagatcgcccaacaatgcaagaaatggaagggcttcttttcaatagtagaaaacctagtggatgcaagagaagtctacacaaaacatgattagcgagctacattaaaaactaaggccattgggtgcaagagaagtctataaaaacacatgattaccaagtcataccttgtctgcattatcaaggccactagggttctatctaagcacatcactcatgtaaccagcatagatagagcaatgtgtcttgatattatc

SEQ ID NO: 46725 - DNA, 419 bp, Zea mays
ataaaactcagctgcgcatcttgctgtcccctctcggagctcctttcgtttattttgatgaaaactcctaacgctagagatgtattgaagatctgtgcacgtagtccatagtgaatacattaagctcccgggcccattttccaatgcttctcagagcttttctattcctcatgatatccttcacgggttgtgatgaagaaacaattatgtgatatgcttggaaataatgccaaagcttcctggatgccattaacacagcatacaacaccttctccaatattgtatagttattctttgataaactcataacttcggagacatagtttactacgactagctttttagctggtccttcgagcttctcttgtacaagtgccgcacttactgcagaatgcgaagctgtcacatacaatagcaat

SEQ ID NO: 46726 - DNA, 301 bp, Zea mays
gcttggtgccgatggagaaacaaaaatcctctaaatcttggctgtcaaactgcttgccgttgtcgactgttagctcggacggcactccgaagcggcaaacaacgttctgccaaaagaatttttgggcagtctttgatgtgattgtggaaacacccctcgcttcaatccatttggtgaagtattccacggctacgaaggcgaacttaagggtcccctgagcggtgggcaggggcccgacaatgtccaggccccagcgctggagaggccatgtatgggcgatcagctttgtatattgcgaggg

SEQ ID NO: 46727 - DNA, 451 bp, Zea mays
  unsure (1)..(451): unsure at all n locations
tgcacacatagctcttttgaatacctttgatcatatctcttttatatgctatgactaatgagttttcaaggttatttcaaaccaagtcataggtatattgaaagggaattggagtcttcggcgaagacaaaggcttccactccgtaactcatacttcgccaacactccgagcaactctctcttctttgggggagaaatgagcatcaaagaaaagaacttcatccctggggaagagagtaaaagctcaaaagcttcgctttttggtataatcttaactcatttattttatgaccaaaggggaagatagcacttagagggctctaatgattccgtatttggcgattcatgccaaanagggggagaaatgagcccaaagcaaaaggaccgcaccaccaccaccaaattcaaaaactagtgctttcaaaagctttatcattggtacctatgtgtc

SEQ ID NO: 46728 - DNA, 433 bp, Zea mays
  unsure (1)..(433): unsure at all n locations
agctntactcagcagcatactctatgcacaagctaccttcgttagaaaacaccttcgttgttcaaaataatgaanagtcgaagaaaagtttttaccttgaaattagaatagaataagctaccgacaagatgctgacgtcggtagcgacttatgtcggtctcaagcttcgggaaaccgatactctctgatagagtaccgataaccttcgctctggtttgatcttggacgcagcctaacttttcatcgtcaacaccaccgaagagtagtgcccctggttgatatcctcaggatatggcatattcttttaattcttctttttcagccttcgttaactcttgtccaactaagttttgaaagttgaaaatttccttcttcgaagcatcttcagctattttcttccccttctcaggtactgtagccacgacttcttcag

SEQ ID NO: 46729 - DNA, 368 bp, Zea mays
accctgtgacctgatacagggtgttttgctccaaaccacttttattaattcatctggccacttccctttccgctgaatgaagaatgacttcatttttcctgttattatgaatccatttgccctttctaccaacccatttgactctgggtgcctcactgatgcaaggtgtattttcgtgccaatttggctacacaaagttttaaagttttagcatttgaatgaggtccgttatcaaccgtgatagccttcggtacgccaaagcgacaaactatgttctggcacaaaatttttgcaatgtggccgaagttattgtagccaaaggcttcacttcaatccacttagaagtgattccactgccccacaacata

SEQ ID NO: 46730 - DNA, 364 bp, Zea mays
  unsure (1)..(364): unsure at all n locations
agcttaatgctcccaagaaattgtccaattttgttaagggcaaggatcccatggttcaggatagagaaggctacattntatatcatgtaaactatcctgagcacaagattacgaaaattcatgctaggaaacctcatcatgtctctcatcatgcatttatgtataaaaatgaggcttctagttctaggcattccactcatatcaaaatgcctaagaaaaaaattcctaatgcatcaaatgaacaaaatatttcattgtggagcttggaggggattgaatgctttgattgtgtctttggagtatttgtctttgctctagtattgaatatgaggatgtgaaagcttcaattgcatgaatggtggtg

SEQ ID NO: 46731 - DNA, 376 bp, Zea mays
  unsure (1)..(376): unsure at all n locations
tggaggcgtctatnggatgacgacttggagtagacttcttctttttttcttccgtcgccttgaatgcgacgggttgagcctccgatgtagatggatcatcaagctcgttgatcttcctcgagccttcgatcatgcactcaaaacttacaaaatgcccgattactttctcgggggtcattttagtatatctaggattaccaccaattaattgtacttgagtaaggttaaggaaaataagagatcttagaataaccttaaccatttcatggtcattccactntacgctcccgaggatacgcacttggttcaccaaggacttgagacggttgacatatgttgtggctcttccctttgcgaagccggaatcgaccgagct

SEQ ID NO: 46732 - DNA, 376 bp, Zea mays
agcttcttgaccaactcaacattcaccaagttggtgcagctaccaccgtcaatgatggtatgtacacggcagtccttgatgatgaggaacatgttgaagaggttgtggcactgcctgtctgtcgtcgtcactagccgtggcactcaaagctcgttgcaaaatcaaggccttataggtttcggtcgctgttgtaccaagaacctcttcatcaccatcataagtctctgcaatgttagctccaacagtatcttcatcttcaacatcagaagcactaacatacccaccatcaccagtagcaatgtatgcccgtttgctggggcaatctcgctgaatatggccaagtccctggcaacggtggcacttgatgtctgaagag

SEQ ID NO: 46733 - DNA, 438 bp, Zea mays
ttttccagacctagtgcgcctactaatccctgtacggttggtgtaaaatctaaacagacatcatatttgctatcaaggtttgattgaaaattaacccacagcagtgcaagggagcatatttctcttccaaattaaccttctacgtaccatctgatccggaaaatcgacctcacttgagatgtatcctcttctagtctttcaagatatctcatgagtacatcaaaatcagaactatcgcacacatctgaatgcctttattctctttttactttcctggactttatattacaatactactccctccggtagtgatttaattgacgttctgacgtgtagagctatgaatctaaagattgacgtcctgacgtttttctctcatttgggactaaaatacccttcataatcgatcattacattctaagaacaagcagacacatg

SEQ ID NO: 46734 - DNA, 267 bp, Zea mays
  unsure (1)..(267): unsure at all n locations
atatgcgagatgactcaagcctagctacgggtgcataggtttcaccgaaatccaaaacttcaacctgggagtatactttggccacaagttgagctttgattcttgtcaccacaccatgctcatcttgcttggtgcaggaaacccacttggctactacaacatttatggtacgacggggaactaaatgccatacctcatntctagtgaacgtgttgagctcctgttgcatcgncaccacccaattcgaatattgtaatgcgttctcta

SEQ ID NO: 46735 - DNA, 397 bp, Zea mays
ttatttctgtgtacccaggaccacgaagaataccttcatgcgttcgttcgaacggttctacgtctaagggcacaagcgccaacagtgcccaatgtaaatgtcattgaggccattattaaggggcttatgccgggaccttcatcgcagtactttgtcaggaagccaccacaaacgtttgataaactgcttcaaaagatggacaaatacattcgagctgaccatgacttccgccaaagaagggaggaagcattcacgttctctgaaatgaccagcggcttcggaggaagatttcacccgaggcacgttatgtcaatccataactctgctcaaactgatgaacgacggagtcagcagcataggccacaatattcttcacaagcttctggccagcagcaaa

SEQ ID NO: 46736 - DNA, 384 bp, Zea mays
gcttatctacaactattctaagtcgactgtgcggaataccgtagattatttcagacaggagaagttttttttgaaaaacaccaaacgcggaccgtctggcctcaggcgcggaccgttcagtcgttgtaaaaccaaaaaacccgaaggtgacgggttctgtaaaattcacttttagcgtcctcgtggactgtctggggtgcactaccagaccgtccgcgacttctttatctgacatctgacgacgcattaaatgcactatagtcgttgatatagctgttactgctgaccgttgcgatttcagccgttgatgtgcacgggcggaccatccggaccaggggcgcggaccgtctactgtcgacagaaaaagagcaacgtctaagaagt

SEQ ID NO: 46737 - DNA, 464 bp, Zea mays
  unsure (1)..(464): unsure at all n locations
tctccggtgaactcatgcaccgaagctggtcaatataacgcggtcgatgcgtaagaacctttatctttttccttttcggttctggctcgctaagagcagctgcagcttcttctttngcaaagattgtgttttttctcttctgccttcgaatgggatagcagtaatcagggtagacaaacccaatggcatcaaatacccgattcagtctcttcttttttcggcctccgaaggctgctgacattgcattatcttcagccttcgagtaggtcccgagtagctcatcacttaaattgtcaatgcttttcaaccactcatcatctggctcaataaatttatctccaaatttgaaggtgtacttcagtctcacaagcccaccttcgtcggcctcttttatggtttcttgtggcatttcccatttctcagcatgcggccacaccctgaaggcgatatgttcttgtactaag

SEQ ID NO: 46738 - DNA, 461 bp, Zea mays
  unsure (1)..(461): unsure at all n locations
agcttgtgaagattcttcattccaacatgagcaagtctgtgatggcagagccagcctatgttagtcttagcaattaagcacatgtctagttcagcatttttatcattgaaatcaactaagtatagctgatcatctagcactcccttaaaagctggtgaatcatcacttcttctaaagacggtaacatcaacattagtaaataaataggtgtagcccattttgcataattgagaaacagaaagcaagttataatctagagaatctacaataaaaacattataaatggaattgtcaggagatatagcaattttacccaattctttgaccacaccttgatttccatccncgaatgtgattgctctttggggatcatcatttttctcatgtgaggagaacattcttttctcccttgtatgtggtttgtcacccgctgtaattatccaacttgttcaccggatgat

SEQ ID NO: 46739 - DNA, 462 bp, Zea mays
gcttgattccctttatttataattctttttctttttcacttactcttatccgtacacagatgacttcttacggatcctctgaaggagggaacacacatttccacacggatggacttgcacgaaatggttttccccgtatcttgtgggaggtactttatggagcaggttacacgatgccttcccagtatatggtgcagctattctagaagcacctggtgccccgctgtatggtgaagatgaccctggagcctcatcccctataaccaggctggcgttcgttggacttctagtccttctaataccgggctgatgatactatcgaggccattgctctccacgggctgaccaccttctgtggtattcaccccttggagctgtctactcatcccattggcttgttcaccgctgaataggaggacgacccaatgtggaaagaccgagtggagcatgctaatgatatat

SEQ ID NO: 46740 - DNA, 470 bp, Zea mays
agcttcataatgactgaatctacacatcttatctatgtgctcttagtcaaatccttccctgcaaatagtagtacctcttagcttttagtaaaatcctttacattatctaatacacacagtatgcttgttcttatctatcttgcaagtagttcaacatgagcgaactgcttatgagagaagacgggataaacaagtggaggagaatataaagaagatgcaagatttgggtctgaacaaatatacttctgttctaaataattctgtctcaccatctgcatcaacaaaggggaaacatgcagcaaacaagataaataatagttcagattcggattcatatgtctctttctatctccttgacgatgatgatcaaggagatactgatgatgacagtgaatattatgagcaaccaaaacccctggcaatgaaggtgctccttctatcttcatagtagtggatgccaaatagttgca

SEQ ID NO: 46741 - DNA, 221 bp, Zea mays
acctatgaaactcagctttctggtggcttggcattgaggttgccatgtggaatgagccactcagaaggtttaaagaagatatgttgaggattaaagatgtggatttgaaaaaaaagcatgcatgcatgtaagctgaaagcacgttgtaatacacatccactaagcttcatgtcaacatcaggccactggactacttccatggattaatttgacctcaaata

SEQ ID NO: 46742 - DNA, 352 bp, Zea mays
  unsure (1)..(352): unsure at all n locations
aaatgcgaattgactcaagcctagctatgggtgcataagtttcaccaaaatccaaacctttgacttgtgaatatcctttggccacaagtcgggctttgttcctggtcaccacaccatgctcatattgcttgttgcggaatacccacttggtgcctacaacattntagttaagatgccgaactaaatgtcatacctcattcctcgtgaagttgatgagttcctcttgcatagccaacacccaatgttgatctcttaatgcatactccaccctgtatggctcaatagaggacacaacagagtaatgttcacaataatgagcaactcgagatctagtggttacccacttatgaat

SEQ ID NO: 46743 - DNA, 381 bp, Zea mays
gattacgacttcattctcttcatgaacgggaacatttctgactccgttgtcaaccctcataatagacatgtctcgagaataccttctgaaaaggaaatgtgcccttgggccatttctaagtatattggtgatcaagtgccaacgatggtttaagtgtgaaactatgccaaatggtggaagaagtgcaaatcaacacagaggtatgattctagacttagtacattggtttttgtgtactaacatatttgtctaagtgctagaatcagagaatagacaataggaaaaagagttggctgtgtacagccaactgctgttcagtctgggtgcaccgaactgtccgatggtgcaccggacagtcgtcgctgtgccggactggctctg

SEQ ID NO: 46744 - DNA, 355 bp, Zea mays
gcttgtgtgtcttaagagaacctagccttgcctcatggaggacctcgctgacgtagtagaccggcttctggatggttcggacccccgcagccggtctcgagtcctcaaacttctggccttccatcaacatcgtggtggtcggaccaccaccttctcctaggggaacttcctgactcccttggggatgttgtgccgtcctttctgagagcacctagagggggggggggtgaataggtgatcctgtgaaacttgcaaacttaagcccgagtcgctgtcgtagtagacgatctccttgatgcgccttgtcttcttcttcttcccgtccttgcgcttgtggctcgagcccgagtcggta

SEQ ID NO: 46745 - DNA, 460 bp, Zea mays
  unsure (1)..(460): unsure at all n locations
tctaaagggagaacacgtgataggtctaaccaatgttcatttctaataagatagaccttgtgcagcttgtcaagcagggaaacaggtgggaggctctcatcacaccaagaatgtgatgacaacatcaagacccctggagttgctacatatggacctcttcggacccgtcgcctatctgagcataggaggaagtaagtatggtctagttattgttgatgacttttcccgcttcacttgggtgttctttttgcaggataagtcggaaacccaagggaccctcaagcgcttcctaaggagagctcanaatgagtttgagctcaaggtgaagaagataaggagcgacaacgggtccgaattcaagaaccttcatgtggaggagtttcttgaggaggaagggatcaagcacgagttctccgctccctacacaccacagcaaaatggtgtggtatagaggaagaac

SEQ ID NO: 46746 - DNA, 438 bp, Zea mays
  unsure (1)..(438): unsure at all n locations
agcttctaaagggagaacacgtgatatgtctaaccaatgttcatntcgaanaagatagaccttgtgcagcttgtcaagcagggaaacaggtgggaggctctcatcacaccaaaaatgtgatgacaacatcaagacccctggagctgctacatatggacctcttcggacccgtcgcctatctgagcataggaggaagataagtctgaaacccaagggaccctcaagcgcttccttaggagagctcaaaatgagtttgagctcaaggtgaagaagataaggagcgacaacgggtccgagttcaagaaccttcaagtggaggagttccttgaggaggaagggatcaagcacgagttcttcgctccctacacaccacagcaaaatggtgtgcgagagaggaagaacatgacgctcatcgatatggcgaggacgatgcttgga

SEQ ID NO: 46747 - DNA, 357 bp, Zea mays
acaaaatgagcatgctgatttgctggctaaatcagcagcacaagggctgcccttaccctctgatgggtgcttctaaacaataatagcaccttcagtggaacttcttgaaagagcagccctcaatatatcccctgcctatagtgaagactggagaactgagaacatctcttatcttcacggtaacattctttcagatgacgaaacttataacaggaggatagagggcagagctcgttcatatgtcatgatagaaggggagttgtcaagcatggaagttgtgccccattactcaagtgtgtatcttgagccgaaggcatagaattgatgagagacatacatgcacgcctgtgtggatct

SEQ ID NO: 46748 - DNA, 444 bp, Zea mays
agcttgcttctgagataaatgtaaagtttatgttattcgcttccgcatttctttatctccgatgttctgtaatgtctgcaagacgggtgaaacgttcctggtgaggtaaggaaagataccgagcttgttaagtagttcacgggcacctacagggttgtctgaggtccgttgtacaaggacaactgtaagagggcctaattacttgtgaggctccgtcacacaacataaccgagaaaggccggtcccctagcaaataagtgcgacataagcctccaagcgagtatcatcactcccttcgaggctcgggggctactgtcggggaccataattatgggtacccccaagagtcctaatctcagctggtaacccccatcatcacacagctgcaaaggcctgatgggtgcgattaatttaacactcggtccactcataggacacgatctc

SEQ ID NO: 46749 - DNA, 416 bp, Zea mays
tacacctagctggaccaataccacaaaggctggcccgtaatgtgagttgatagatgaccagaatatcgcgtgtgcacctcgcaagaagctggatggcggggcacatgaactctctgatggcggcgacccattctggtcttgagaaaccccggtgcgagttgacataatgcaagggttaaatgctacaatatgtcgaggggtacgagatccccatctcggtattaatataatttggtcaccgaacttctcggatattaagactatatcattgactcctatcgtacataataagtgaaactaactttgatacagaagctattgacgagaagataatgctcttattaggcaatctagatcacgctaatgaccactactacattcttctgcaaaatgagtcttgaacttgatgagcctac

SEQ ID NO: 46750 - DNA, 405 bp, Zea mays
  unsure (1)..(405): unsure at all n locations
agcttcanattatatttttaaggcaatcggggtatttcctcgacattttcatggcatggacccttaataacttttgttgtagagttgatatagagttgtttgagtaagatgacaaggttttgttgaatttcaaaatttgcatttgttcagaggagtagtttcaagcaagtataggatttatcttttcatgtgagtatttgctttaaacttctagaattctctagaatacacttgatagatagagatgaattatgatatagggaaaacaagtcgagttgcataagaattaattagaggttcgcataatagagattctgctgaagaatgcngattccgcctaagtatttggacgtagaccgactatcgagaaagcggattctgacaccgattggattacataacaac

SEQ ID NO: 46751 - DNA, 460 bp, Zea mays
tcatccctatgaactcttgccttctccagataaggtagtggtttactaacttggaaaaaccttcaataaatcttctatagtatcccgccaatccaagaaaacttctgatcttggacgcatcctttggttgcttccaatctagtatctcacttatcttttctgggtccactttaattccaccatcggtaacaatatgccctaagaaagcaacttccttcaaccaaaaatcacacttagagaactttgcgtacagttggttgtcacgaagtatttgtaggactagccttagatgatcctcgtgtgtttcttcattcggagaatatatcagtatgtcgtccataaatacgaccacaaactgatccagatattccatgaataccttattcatcaagttcataaagtatgctggtgattagtcagtccaacgacatgaccgaaaactatataatcatatctcgtc

SEQ ID NO: 46752 - DNA, 293 bp, Zea mays
  unsure (1)..(293): unsure at all n locations
tgttgaccaaatctgaactcaccaaantatggcagcttccaccatctataataacacgtgcacgctgattctcgatggcgaagaatgtcttgaacaaattatggcattgctgctttgatgattcaaggtgagaactaagaacacgctgcaccatgatgcttctaaagttcaccgtagcatcaacaccaagcatggcatcatcattagcagcaacatcactggagtcatcatttgtaccctcaccgtcggagcactaatgtagccatcatccgtaacatggatgtttgctgact

SEQ ID NO: 46753 - DNA, 378 bp, Zea mays
  unsure (1)..(378): unsure at all n locations
agcttgcccccgggtttttgtatcataatctttcaaanaacaatttcatatatgtattggtgttgcgaccaaggagacagatcaaagtcaataatctgtcatcattgcacccaccaggttcacaaagaactgcatatgtacatttagcagtcgatgtggccattctcgtatgcatcataaaggggtgctagtcacatactaccacagctcaccatatgtaaagcgacagttacaaaaagaagtgtggcgaataaattgaacacacctatgacaaagtttatccaaaaaaagagctatgaacggggcgcagggatacaaagcttgacgtacaacttatgtggnctgaactaaacatatattatgactaagaaactgtga

SEQ ID NO: 46754 - DNA, 220 bp, Zea mays
tctaaagggagaacacgtgatatgtctaaccaatgtttatttctataaagatagaccttgtgcagcttgttcagcacggaaacacgtgggaggctctcatcacaccaaaaatgtgatgacaacatcaagacccctggagctgctacatatggacctcttctgacctgtcgcctatctgagcatatgaggaagtaagtatgggctagttatcgttgatgac

SEQ ID NO: 46755 - DNA, 446 bp, Zea mays
  unsure (1)..(446): unsure at all n locations
gcttctaagggagaacacgtgatacgtttgactaacgtgcanttcgaaaaagatagaccttgtgcagcttgtcaagcaggtaaacaagtgggaggagcacatcacagcaagaatgtgatgaccacttcaagacccctggagctgctgcatatggacctcttcggacctgtcgcctatctgagcatangaggaagtaagtatgggttagttattgttgatgacttttcccgcttcacttgggtgttctttttgcaggaaaaatccgaaacccaagggactctcaaacgcttcctcaggagagctcaaaatgagtttgagctcaaagtgaaaaagataataagcgacaacgggtccgagttcaagaaccttcaagtggaggagttccttgaagaggaatggatcaagcacgagttctccgctccctacacaccacagcaaaatggtgt

SEQ ID NO: 46756 - DNA, 462 bp, Zea mays
  unsure (1)..(462): unsure at all n locations
tgtgaaggttcttcatccccacatgtgctaagcagcgatgtcacttccagcccatgcaagtcttagcaattaagcatgcatctagaccggcctcttcttttgcaaaatcaactaaataaagtttgccatctagtacacccttaaaagctagtgaaccatcacaccttctaaagacagacacatctacatttgtaaataaacaattatatcccatattgcagagttgacttacagataacaaattatatccaagtgactggatattagaaatagagtgctcggacgaaatagcaattttacctaaccctttcaccttgccttggttcccatcaccgaatattattgaatcttggggatccttgttcttgacgtaggaagagaacatcctcttctctcccgtcatgtggtttgtgcatccgctgtcgataatctagcttgagcccncggatgcataaacctgca

SEQ ID NO: 46757 - DNA, 365 bp, Zea mays
  unsure (1)..(365): unsure at all n locations
agctntaccaaatggacatgaagagtgccttcctcaatggactaatcaaggaagaggtctatgttgagcaacctcccggctttgaagatagtgagtaccctaaccatgtttataaactctctaaggcgctttatgggctcaagccagccccaagagcatggtatgaatgccttatggatttccttatcactaatggattcaaagtcggaaaggccgatcctacactctttaccaaaacacttgaaaataatttgtttgtatgccaaatttatgttgatgatattatatttgggtctactaaccaatctacatgtgaaaagtttaataggatcatgacacaaaaattngagatggctatgatggga

SEQ ID NO: 46758 - DNA, 474 bp, Zea mays
  unsure (1)..(474): unsure at all n locations
nganacaagataacgatttataccgatttgtactcaacatatttgtccagctgatgtagtgtcttgtccaggtaatcatcaaggacagcttgatcataactctgaggagacttgttgtggcattcattatcctcaaagatgagcagagcctaaataagcataattactgtgtcatataaatctgtaggtaaagtattgtaaaattaggtggatattaatgaaaggttacatacaccaacattgacgtccagtacaagtctgttgttgttcatggacgggcgatgatttacatcatcctcgcgaaaacactgaatcaaacactacatgaaaacattatcgagacacatcccatctccaaatgattgttgaatatcgagacaatttccaatacattcaccgaattctatggccttcctatataataatgtaaaaacatatatgttagtcattatttatgtaagaaacaacctacat

SEQ ID NO: 46759 - DNA, 350 bp, Zea mays
tgagcggtcctgactgcctccagctgtgtttcgcggcacccaacttcgcaaccccaagcttgacggtaccattcctgaaggggcgggactgaccgacgcgcgcaattgacgcgcgagcagcttgcactggcgaacatcaacgatgcgacgattcttgccggacgaattgagggctgcctcggcatcgagctgagcgcgccccgcattgagccgagctatccttgatgatcggaaccgcaccgaaccgacgcgacgccgaatcaccgattgggacgaattttagaactcgtacttcaacgtcagcgcccggcacggtgttggctttcggccccaattcccaatcgcctggc

SEQ ID NO: 46760 - DNA, 358 bp, Zea mays
ttcttgaacacccatttactcccaatgggcttacacccataaggacgctcaaccacctcccaagtttcattagacctaatagaaaccatctcactccttattgctttcttccaaaaggcagcatcaagagaggaatatgcattttcaatggtacttggtgtgtcatccacaaaatatacaatgtaatcatcaccaaaggactttgcaatccttggtctcttactctttcgagttgatacattgtcatcttccacagcattatatatatgggattcctcagtgtgttctacccgaataaaatgctcatgtggtatcgatagctcatcattagacgtatcatgtgtagctttcatggaaa

SEQ ID NO: 46761 - DNA, 461 bp, Zea mays
  unsure (1)..(461): unsure at all n locations
tgtgaacagtacanattcagaagggagaaagcagcttcagcttatcatccgaagcctatgctcttatgtgaggacatagcagagcagaaggtgctgttaggctctcagttatccgaagagcaggaaaaaaccttgataaggtttttgttcaacaacaaagatgtttttgcatggtcagccaatgatctatgcggagttaatagggatgttattgagcactcgctcaatgtcgatccatccttcagacccagaaagcaaaggcttcggaaaatgtcagatgataaggccgaaggtgctcgcaacgaagtcaaaagactcctcagtgcaggagttattagagaagtgaagtacccagaatggctggctaacactgttatggtaaaaaaggccaatggcaagtggcgaatgtgcatcgattntacagatcttaacaaggcttgtccgaaggatgaattcctact

SEQ ID NO: 46762 - DNA, 345 bp, Zea mays
  unsure (1)..(345): unsure at all n locations
atccttagagcacctgaggcatgaagcttctaagggagaacacgtgatagntctgactaactgtgctattccanaaagatagaccttgtgcagcttgtcaagcacgtaaacaagtgggaggagcacatcacagcatgaatgtgatgaccacctcaagacctctagagctgctgcatatggacctcttcggacccgtcgtctatctgagtatatgacgaagtacagttggcctagtattgttgatgacttttcccgctacacttgggagatccttttgcaggataaatctgaaacccaaaggacccctcagcgcttcctaaggagagctcataatgagtttgagct

SEQ ID NO: 46763 - DNA, 455 bp, Zea mays
  unsure (1)..(455): unsure at all n locations
agtgatggctgactggctgccncatgactcctgctatctccctccctcttatcttccttctacctgccacagcttttgcactcctccctgctataatcaaaatggtgacaagggggctcaatttgttccttgatggctcaactgcaccagcagtccagcgctagccaacagcagtaggctgattcatgctcactcctgactacttcgtacctcttgtcactcaccctttgcagaaaagatgcgtgggtgctgttctgaatacagcagcgttctgtccatttgtcaggcatgcccgttttttaacatgcacgaggctgtgtattattatagtaaagaaggacaaatgagtaaagaacgcttggtttggggtaataatggatcacgatccacatgcttctcacaaaatggtatgtgaaatggtacggccctaaataaattttagtccacaaataaat

SEQ ID NO: 46764 - DNA, 390 bp, Zea mays
agatcttcaaagattgatattcattgtttattgtgcttctctggggcggtatttgctccgataccagctattgaaaaccgcccaaattattccagcttaagtgcctaagtcacgccttaagggctgtaacacacttaaatcggaataatccgtcagtccatcagatctagtctgataaagccacttaaccaagatcaaataccacaatctcactctaaggtgagtcccacaaaaaatacaataaaacatgaaacctcaaacttaagtactggagttattacaataaccgaagttttttaatagctgagataagtccacaaaataaaatgcagcagattatcgattacgtcgaaaacgaggattcgggcaaggcctagcccactactcctc

SEQ ID NO: 46765 - DNA, 408 bp, Zea mays
tgcttgatctcgacggtccaatgttacaggagcttacttgcccttgatcccaaatctctggacacacttggtgggtgataccttaaggtaaacatgatctcccacttcatactgtagaggctctcgcctctggtcatgatagctcttttgcctggcctgagcagcttctaagttctttgtaataaccctgaccttttcctctgcctcaagcaccaagtctggcccaaatatttccctatctcctgcttgagaccaattcagcggagttctgcatcttctcccatataaagcctcaaaaggtgccatcttcatactggactggtagctgttattataggaaaactcatccaaagaaagacacttgttccaatcctttctgtaatgcagtacacatgcccttaacatatc

SEQ ID NO: 46766 - DNA, 363 bp, Zea mays
  unsure (1)..(363): unsure at all n locations
agcttgtgaagattcttcatcccaacatgggctagtcggcgatgccagagccaacccatattagtcttagcaattaagcaagtatcgagttcagctctattaaaaccaactaagtatagctggccctctaataccctcttaaatgctactgaatcatcacttctaaagacagtaacacctatatctgtaaaaagacatttgtagccatcttgcataattgagaaactgaaagcaaattgtaatctaaagaatctacaagaaaaacattggaaatagaatggtgagtgatatagcaattntacccagtcctttgaccaaaccttggattccatccctaatgtgatagctctttggggatcttcg

SEQ ID NO: 46767 - DNA, 465 bp, Zea mays
  unsure (1)..(465): unsure at all n locations
tcttgcatctctacgctcgcctaagccaagaagataaggtggtcatgctcaaacttctagaaagagcgagagagcaaagcgaagctcgtcaaaggctagaagatgttctctccatcaaaatgcaatactttgatgagttgactaaagaacatgaggagctaaagtgctctcatgttgaattggtccaaaggtatgaaactatttcaattgagcaagataactctttacattgtatcgctcaattagtaaataaaaatgccttgcttaaggaccaagtagaaaagctaaaaatagaaaatctagcttttcaagaaaaatatgatatgattctatgttctcatgaaaatcttatgggtgatcatatcatgttaaacattgctcatgaaggtgtgattgnaaacttaaaatcccaacaaccacactcatgcacatgtattcaaatggatactatattaccatgtgcta

SEQ ID NO: 46768 - DNA, 259 bp, Zea mays
gatcaggatccagggaactagagggagaaaaagatgaactattagaacgccataggcgaagctcatcttggcaaagagtgggattcggactgctccttgttcgactcatacaatgaatgacttcccgccactggcttcaacaagttatccctcttccccaacgagcgtcacactttgcttatggcaagggaaaaaaaagtaagcacttctaatactagtacttatgcctcttcaagtgaggatgaatctagtgatgatg

SEQ ID NO: 46769 - DNA, 465 bp, Zea mays
  unsure (1)..(465): unsure at all n locations
tgcgtanctctgctactgccttatcccttagattttcttggggnncagcctcgcgctccataaccgctgtcatttttccaacattcatagccacaccctttagatcaccttggacttcatttaacatgtccaaaagagggtcacttgatccactcttctccttcccagatgtcctcctcctcttcacacttgatgatgctgaatcagtagaccacctaggggttctatagatctcatgccctcctcttcttcatgatcattaccatacccagtagcaagctcttgttctaagttcccaacggcttcatcaatcccttccgcaccttcaccggtagctatatcatttccatatatggtcgacaatgcatcanaatatgggaatgcgacgtcatatangcctctagcttcaggatgtnttctgcaaataaaacagagcaaaggaatccaataagatgctaccattaa

SEQ ID NO: 46770 - DNA, 389 bp, Zea mays
  unsure (1)..(389): unsure at all n locations
agctggggttntaggtacccaactcttgttgttttctgcaaggttagtcacaatagtctttggaacccatatgcaagttttgtctcccttgcatttggatcccaacttcctagccactacttttgcattcttacatgaaagaataaaagaagtgttgcaagtttgaaaaacagtagtgggttcattgcacatttttctgggcacatgagacacaacattatttctcctaggcgcatgagacacaacatgattgcgcctaggcctatttctactacaatcataagtagaactggaagcaatcatagcatgatcataatctttataagtattcctagaaaattttctatcataaatgtaggcatgacatctttgagaactactaaccatat

SEQ ID NO: 46771 - DNA, 455 bp, Zea mays
  unsure (1)..(455): unsure at all n locations
gggatattattcatcanaacactacggatattgtcgcaatatataaaaagtcttcttcacgaagcatgaaaagaagggaaggtgtttttttcgtcaaagactcaaaaacgatacgtatgtaaaatttcatgcatcgtaaagaattgaataataaaaacaggtatattatatacagggctacaagatgttacacatgttacatttcagaagtttttacaatagtacttaatcttctctcagaacaacctctgcagcttcgttcaggagccgattaacaacttcatccataatggcttcagccatctttntaatttcgtcatctcctttcgggtgagggcccggagacgctttagtaggatctgaaggaggacaggatacggctacattgctattacacaatggcgaatgaaagtcanaaaccaaaattacaacacaataaaaaccatttagtaata

SEQ ID NO: 46772 - DNA, 395 bp, Zea mays
  unsure (1)..(395): unsure at all n locations
ctgcggcatgcaagctttatcaaatggacgctgaagagtgcccttctcaatggaccaancaaggaagaggtctatgttgagcaacctcccggctttgaagatagtgagtaccctaaccatgtgtataaactctctaaggcgctttatgggctcaagcaagccccaagagcatggtatgaatgcctaagagattcccttatcactaatggcttcaaagtcagaaaagctgatcctactctctttactaaaactaatgcaaatgatttgtttgaatgccaaatttatgttgatgatatcatatttgggtctactaacaaatctacttgtgaagagtttagcaggattatgattcaaaaattcgagatgtctatgatggnggagtcgaaagtatttct

SEQ ID NO: 46773 - DNA, 355 bp, Zea mays
tatctgcgcatagcttcgtgatgatctttttcttcgtcacaatcgccttccgtcccacccaagcttcgtcttgaccatactcttatatactcgtaatccaattccgaagatacctgctcacacatttcacttggaaaacattgtcaaatcatatttttgaggaccttcggaagccgaaggccccctacaccagcatttgaaaatgcttcggatgatcacgaccttcatttcttcggtagtacgaccagtctttgctccattgacatacctcaccacagacatatcttgcaaatcttttccttcatattatcgatatgacttcgcgtaatagctgattttcaaaattgtatgatct

SEQ ID NO: 46774 - DNA, 368 bp, Zea mays
  unsure (1)..(368): unsure at all n locations
agcttgtgcaggttaatntgaaatggttgtgttgagtttntataanaatatgacatcggacgagttttntataaaaatatgacatcggacgaaccgtgaaactggtgctttaagtatagtatagatatattatgtctattggaatctctgctgctaagtgatttactatgacattaccataaatgtttctatgaatatttctacgagttacagtaacacatttgtggtaataaatagaggcatctatagaataataacgactataggagtgtttgggttctangggactaatgttagtccctatatnttatttcattttagtatctaaattactaaatatagaaactaaactctatttaattttcata

SEQ ID NO: 46775 - DNA, 469 bp, Zea mays
tgtggcaccctctggcgtcttgtcgcagccgaagcaccaagtcttccacttggaagcctcggggccggacccttcgggcgtggtagcgtcgcagagactgctgataccgcgccgagtgtagtaaggccacgtcccgagcctcttccagctggtccaacgagtcctctcagatgatctggttgcttcggtcgtcgtacgccttcgtcctcggggaaccgtattctaagtccgtggggaggatagcctcggccccatagaatagaaagaacgacgagaaacccgtggctcggctcggtgtcgtcctcagactccagaccaccgagggtagctccttcatccatcgcttgccaaacttgttgaggtcgttgtagatcctcggttttagtccctgcaaaatcataccgttggcgcgctccacctgcccatttgtcatcgggtgggctacggcggcccagtccacacggatgtg

SEQ ID NO: 46776 - DNA, 306 bp, Zea mays
  unsure (1)..(306): unsure at all n locations
agctttgggagctngagcggtttaactcaattcttatctcaagctatcaatcttacattggctatcctttaagattgacccaaagatgaattgagttgttatatcactaacttcatattcatctctagcaagaacttgtgttgtagggaataaggattaacctttgtgggaatcaagcaaaaggcctacaaccaagtgatatccaaaggatggtaacaattaattcttaattgcacattgcttttaattggtatattcctttgtgtcttttgtagccacatacgaaaaatgaagcacttgagaatg

SEQ ID NO: 46777 - DNA, 480 bp, Zea mays
  unsure (1)..(480): unsure at all n locations
ttagtgttaagtgagagtggattgttgtgttctttngagctcttgttctnggattgntttcttctttctcattctttcttgagatcaatactcacttgtaaccgaggcaagatacaccaattgtgtggtggtccttgtggggaagttttgttcccagttgatttgagaagagaaagctcactcggtccgagggatcgtttgagagagggaaggggttgaaaaagacccagcctttgtggcctcctcaacggggagtaggtttgcgagaaccgaacctcggtaaaacaaatccgcgtgtcacactctntattcgcttgcgatttgttttgcaccctctctcgcggactcgattatatttctaacgctaacccggcttgtagttgtgattcaatttgtaaatttcagttccgccctattcacccnccctctangcgactttcaattggtatcagaacccggtgcttcattagagcctaaccg

SEQ ID NO: 46778 - DNA, 242 bp, Zea mays
  unsure (1)..(242): unsure at all n locations
agaaagacatcgattgtagtgcatgccaagcccggaagcaaggtggctctcatcattcacacaagaacatcatgacatgtgacatgccactggagctncttcacatggatttattcggcccgatcgcttacataaacattggcgggagtaagtactgtctagttattgtggaagagtattttcgcttaacttgggtgttctttttggaagaaaaattccatactcagagaccttaaagggat

SEQ ID NO: 46779 - DNA, 463 bp, Zea mays
  unsure (1)..(463): unsure at all n locations
ngaacacatggttagggtctttggggtcctcataaccgggatgttgttcaacatacactagttcactaatcttaccatttagaaaggcactctntacatccatttggtagagcttgatattgtgtgcacaagcataagcaagtagaatccggattgcttctaatcttgctacgggagcaaatgtctccccaaaatccaatccttcaatttgagtatatccttgtgcaactaatcttgccttgtttcttactaccacaccatcttcattgtgcttgttgcgaaacacccattttgtaccaataacattgtggttctttggtctctcaacaagctcccaaacttcatttcgagcgaagttatttaattcttcatgcattgcattcacccaatcaacatcaagtagagcttcatctacacnggtaggttccatacaagataccaaagagaaaatgtcacaaaatga

SEQ ID NO: 46780 - DNA, 336 bp, Zea mays
  unsure (1)..(336): unsure at all n locations
tgctctatcggtctaactatggattaagaatgatccttccaagaaataaaaggttatgagttactccattttaatcagatgttcatggcttgtccttttcatcaagcagcaggttcagatttgttctcttggcgacagtaaagccatgctcgctctcttcattaaaacgatgcatgttggggaaaaatatgccttgcaagataagaacatctcaacttcaattgaattatcataaaatacacatctatacaacagggtaagttggacccccaagaanatggtatgctcaccctattatagatcagagtcacaacaaattattatagtttctggaac

SEQ ID NO: 46781 - DNA, 260 bp, Zea mays
ccttggctatggtcaaattttggcagcaaaatagtgcaatagcaattaatgctgtagtaacttcacacctacccgtctatttatatagtgccgcaggtgggaaggtgaatcgtcaagtcttccgcaccgaacgaatagtcgcccgcacccactgaatggtgggccacagaacccgaaaaggtgaatcgccaagacgcgcgtaaccgctgcatggtggggccacctcacgctcggattattttaatcggttcctcgcaatg

SEQ ID NO: 46782 - DNA, 293 bp, Zea mays
aagcaccgcagctgcagctctagcaatttccagtttcacttcttttctagcttttaactacagctttgtttcttataaaaatcctctggaatccagagtctccttctataatagcacctatcattcatcatttttttctgtacatgtaaggtggccaaaaaggtaaccaaatatcctcatcttcactagagctaccctcatcactagatgttgtgtatttagaggaggctctagattttacctttcttcttttgccgtcctttgccatgaggcacttgtggccgacattggga

SEQ ID NO: 46783 - DNA, 393 bp, Zea mays
  unsure (1)..(393): unsure at all n locations
tgttaccaatatgaggggcaaaaacgaccctcggtttgcggtgtatttgctgcgtgtaggcgggggaactgaggacacaaatactgacggcgacatccgtcttcctgacgaggtatgtgtgccttacagtgggagtgacaacgatcttgacaacctaatagacttcgttttcccaaatctcaacaaaaatatgtctgattcgacctacatcacttcaagggcgatactgtcaacacggaacgaatgggtggatatgataaatgttaagatgattgatcgttttcaaggggagcatatggtgtaccatantttcgatagcgccatggatgatccccataactactaaccacccgagttcctaaacacactgacgcctaatgggctgccaccaca

SEQ ID NO: 46784 - DNA, 292 bp, Zea mays
tattcttaacaagaaagtcaagaggtcaaagtttgctcctagagtggacgagggcttcttgcttgggtatgcatcaaatgcgcatggatatcgtgttttcaacaataccaccggtcttggtgaaatagcgatagacgtgacatttgatgagtctaatggctcgcaagggcatgttcttatgacactgcaagacatgaagaccaccttggaggcctaaaaaaactccatacgtgaggtgagacctcagaagggatatgaaaaagaccttatggagaccaatgaatagtgatgt

SEQ ID NO: 46785 - DNA, 475 bp, Zea mays
  unsure (1)..(475): unsure at all n locations
taaaactcagctatgagatcttcatcaacatgggcagtcggtttgttttatccaacccatgttagtcttagcaattaagcatgtgtcgagttcacctctatcaaaatccactaagtatagctgaccctctaacacacccttaaatgctattgaatcatcacttcttctaaagacagtgacacctgtatcagtaaacagacagttgtagcccatatgacataattgggaaacagatagcaagttgtagtctaaggaatcaacaagaaaaacattggaaatggaatggtcagagagatatagcaattttaccaagtcctttgaccaaaccttgatttccatccccgaatgtgatagctcgttggggaatctctgctttctcatatgaggagaacattcttttctctccagtcatatggcttgtgcacccgctgtcgagtatccaacttgagcccccggatgcatanacctacataac

SEQ ID NO: 46786 - DNA, 351 bp, Zea mays
  unsure (1)..(351): unsure at all n locations
agctntggcacaaagacaaatctcaagatgattgatcgattctacttaaagatgaattgacttaaagacccatgatgttttgtgtcattattgtagtcgattgtaaaggacataaatgtaattttgcgtaggttgcatcctgtgcctataaataagtgaacagtatcctggcactgttcacgcgatcatgtaatcacgggcatgttacacttgaattattgctttccgccaaagcgaaggtataaatgtgcccgaacattatgttttaatatttatatattcatataataaaatatatgaatatattctatgctttatgtttcatttctcatcgnttggtattacaaatat

SEQ ID NO: 46787 - DNA, 472 bp, Zea mays
tctacccggagaacacgtgataggtctaaccaatgtacatttctaataagatagaccttgtgtagcttgtcaagcagggaaacaggtgggaggctctcatcacaccaaaaatgtgatgacaacatcaagacccctggagctgctacatatggacctcttcggacccatcgcctatctgagcataggaggaagtaagtatggtctagttattgttgatgacttttcccgcttcacttgggtgttctttttgcaggataagtctgaaacccaagggaccctcaagcgcttcctcaggagagctcaaaatgagtttgagctcaaggtgaagaagataaggagcgacaacgggtccgaattcaagaatcttcaagtggaggagttccttgaggaggaggggatcaagcacgagttctccgctccctacacacctcagcaaaatggtgtggtagagaggaagaacaggacgctcata

SEQ ID NO: 46788 - DNA, 301 bp, Zea mays
  unsure (1)..(301): unsure at all n locations
tcttcagctcggttatggtgctccacttcgggaggcctgagttcatgtcccgcgacggcagctactacatggtactcctcccctcgcagcaaacaacaatgaccgtccgccgctcgcccggcggaagcaaactcgatgacggcatctccccgcggcaaaagaggaacatcctggtnttgccccgccaccctccttgctggaggaggaaaagatggagcaaccgtggctatggcagaggcggcacctcttctgttgtcggaccaaagcgagccgacgacgccggcacccctacggtggacat

SEQ ID NO: 46789 - DNA, 461 bp, Zea mays
  unsure (1)..(461): unsure at all n locations
ngcacttgtccattcacttatctcttgctgtgcctttgctatttcaaagttntcattagcttcggcaagctntttccgaagatctttgacttcggctgtatgcactgcggactgtgaaaaaagtttggcttcgctgacctttactctgtctattaaggaaagtagaactttatccttttctagggattcattccttagtttgataacctctgtctgaaggttcccaagggctatttggcagctttcgtcttcagcaatcttttgtgcccttaaagcattgctcaagattaagccctacaaaaaaggggcgtgggggatcaacacaataaaaaaagggggtacaaaaataatctgtttataagtcaaagcatctttaccttaagactgttgtaagcgaagttgtctgcaaggtcatccttcgacattgcggagaggccaagctcgagcttcggaaaccccca

SEQ ID NO: 46790 - DNA, 307 bp, Zea mays
  unsure (1)..(307): unsure at all n locations
naagctgatgtatagaatgacatcatttactcctatatcttncatcncgaaactgctcgatagaagactattaacttcctcaatcacattgagatttgatccagagatcaagatgtcatcaacataaaggcacagtataacagactcacccccaccataccgattgtatacacaccgtgtcaatacattttcaacaaagcccgctgctgtacgaaattatcaactttacatgcctttgttatggctcgtttatgccatacgtgatttataacctgcacccttgtcttttgccatacgcttaaaccct

SEQ ID NO: 46791 - DNA, 386 bp, Zea mays
tcgcgagagagggaacggatcctacgtctctcgagaggtctattgtttgtggagaggaggctgatgttgagtgagccgtatgagtcagccttcatagcgtgtcgtgggaaggccttgggcatctccttttataggtacaagaaggtgacccagctgtacatatgggggtgtagctatgcgctaacgtggccggcggagaagtgcttgagccatgtataagcgtggctggcagtgcagccctaggtcctgctgacgtttctttgccttcgtaaagagctgaggacagtcgacgtcacgggcgcatgactagaatcatcattacctgctactggaataatttgatgtgacaccggtcttgttccttcgtagcctgaggtggctagcta

SEQ ID NO: 46792 - DNA, 419 bp, Zea mays
  unsure (1)..(419): unsure at all n locations
agcttagaaaaatctggtatgaatctgcgatattatccagctagtccaagaaaactccggacttggtgaacagtggttcggggtttccactccagaatatctttgaccttgctaggatctaccgcaattcctttggccgataacacgtgccccaaaaattgaatttcctccagccagaacgcgcacttgctgaacttggcatacagctgatgttccctcaggcgcgtcaatacaatccgtagatgctgagcatgctcctcttcatttttagaatatatcaagatatcgtcgatgaagaccaccacgaacttgtccaactcgggcatgaacaccgagttcatcaaatatgtgaagtgggcaagagccattgttagcccanaagacattaccanatacttcaaataatcataccgcgtagt

SEQ ID NO: 46793 - DNA, 414 bp, Zea mays
  unsure (1)..(414): unsure at all n locations
ngaagggttcaacaaagttcctatcatagcagaatatatgtttcgtctataaaattgccaaatcatccattccgtaaaacaaactggtagagagccacaaggtaaagattgtaaacggtgttcaaaagtgagcagtcagtcatgtagaattgcaacaacggcgacaactcctgtacatagccaagaagagaagggcaaatgggacactgacaccgacacctcctgcacacaactagcacacacgccacgtctgacatcagttgttagggtaggtaagatgctgagctcacaagatgaccgccgatggagggttgtttatgatttcatagcacttcttccctaaagatgaaagtaacgtggctcaaagtccacgaagcatttanttacctgagtgctcnatgcctaatgatgaca

SEQ ID NO: 46794 - DNA, 417 bp, Zea mays
  unsure (1)..(417): unsure at all n locations
gcttctcagggagtccatgtgaatattctaatactaacctcaaactgagtacatanttgcactaattttagtagtttagaaaaaaataatctcagggttgcaacatgagaagctacaaagtatctgtgtagctccctaatgtaaaaaattaccagctaatcatctgcactttcaatctttttacattttaatatanttgntggtatgacataaaaggtgtatttgtttgtccagtggcctcagagaactatctagcatccaatcattgatatccagctatgtaatagatatgcaatcctgaatagcaagcctgaacctgctgactatttaatacagaggctactactaattggatgaaacataacctcaaagcaatgaactgtagcaacttaacaagaacatacttgtactcgatgg

SEQ ID NO: 46795 - DNA, 457 bp, Zea mays
  unsure (1)..(457): unsure at all n locations
aagtctgnatcactcctttggtgatcttatgattaagnnatgaagggttaaagtctgaagagggaatctgttcaattctggacagcacagccttctagtgtcttttattcttagataaatattgaattaccttgagatgtttataaattatatgtagacaattgtattacctttccagaaagtctaggatcaatttgtttggatgtctgaacctgcggctatggattattaaagtcgcaagtctgaatctgtccaaatctggacagagctgttgtgtttacgcaattcggctttgctaagagtctaatcatgctgaggtaaaaataccaaacgtgtagagcactatttaagctntccagaaagtcctagtttgctattgttggactaatcattgaagagctatgattaaaacanacaactactgtgctgctgtcctaaatgtgttagaagtgattga

SEQ ID NO: 46796 - DNA, 355 bp, Zea mays
  unsure (1)..(355): unsure at all n locations
agcttgtgaagggtctttattctcacatgtgctaagcggcgatgccacaaccagcccatgctagtcttagcaattaagcatgcatttagaccaggctcttcttttgcataatcaactaagtaaagcttgccgtctaatacacccttaaaggctagtgaaccatcacatcttctaaagacagacacatctacatttgtaaactaacagttatatcccatattgcataattgactaacagatagcaaattatatccaagagactctactaaaaacacattagagatagagtgctcatttgagaatgcaattntacctagaccctttaccttgccttgattcccatcaccgaaaatta

SEQ ID NO: 46797 - DNA, 360 bp, Zea mays
tgacaacgaggaaatgacgcttatcatcaatagctttcgcctaatcctcaaacaaaggaaggggaaggattacaaaccccgttccaaaagggtgtgctacaaatatggtaagtccgatcatttcattgctaaatgtccattatctagtgatagtgacaggggcgacgacaagaagagaaagaggaaggaaaagaagagatactacaagaagaagggcgacgatgcccatgtgtgtcatgaatgggactccgatgagagctccaccgactcctcctccgtcgagaacgccgccaacatcgccgtcaacaatggcctcctcttccccaacgtcggccacatattcttcatggcaaaggacga

SEQ ID NO: 46798 - DNA, 466 bp, Zea mays
  unsure (1)..(466): unsure at all n locations
gctatgaagattcttcatcccaacatgggctagtctgcgatgccttatccaacccatgttagtcttagcaattaagcaagtgtcgagttcagctctatcaaaatctaccaagtatagctgaccctctaacactcccttaaatgctattgaatcatcacttcttctaaagacagtgacacctatatcagtgaatagacagttgtagcccatttgacataattgagatacggaaagcaaattgtaatctaaagaatctacaagaaaaacattggaaatagaatggtcaggagatataactattttaccaagacctttgaccaaatcttgatttccatccccgaatgtgatagctcgttggggatcctggtttttctcatatgaagagaacatcttcttctcccttgtcatatggttngtgcacccgttgtcgagtatccaacttgagcccccggatgcataaacctac

SEQ ID NO: 46799 - DNA, 478 bp, Zea mays
  unsure (1)..(478): unsure at all n locations
tctaaagggacagcacattntangattaacaaatgttcattntgttaaagacaggatntgtagcgcatgccaggcagggaagcaagttggagtccagcatccacacaagaacatcatgacgaccgacaggccgcttgagctgctccacatggatctattcggcccgattgcttacataagcatcggcgggagtaagtattgtcttgtaatagtggatgatttttctcgcttcacttgggtattctttttacaggaaaaatctcaaacccaagagactttaaagggattcttgagacgggctcaaaatgagttcggcttgaggatcaagaaaataagaagcgacaacgggacggagttcaagaactctaagattgaaggcttccttgaggaggagggcataaagcatgagttctcttcaccctacacacctcaacaaaatggtgtagtggagaggaagaatcgaactctattggacatg

SEQ ID NO: 46800 - DNA, 474 bp, Zea mays
caatactcaagcttgcgaaggttcttcatctccacatgtgctaagcggcgaggccactgttatcccatgctagtcttagcaatgaagcatgcatctagaccggcctcctcttttgcaaaatcaactaagtaaagtttgtcgtctaatacacccttaaaagctagtgaaccatcacttcttctaaagacggacacatctacatttgtgaataaacaattatatcccatattgcataattgactaacagataacaaattatatccaagagactcaactaaaaacacattagatatagagtgctcggatgaaatagcagatttacctaacccttttaccttgccttgattcccatcaccgaatattattgaatcttgtgaatccttgtttttgacgtaggaggtgaacatcttcttcttccccgtcatataggttgtgcatacgctgtccataatccagcttgaaccccggatgcat

SEQ ID NO: 46801 - DNA, 366 bp, Zea mays
  unsure (1)..(366): unsure at all n locations
agctngtacaacaactatacatatctcgctatttatatcacgcgtgtgccaacaatagtctggcatttcccccactcgaaattcaaaagtcccaataaattacttggtcgtgacactagcccaaagtgctatttttttataaggccccccaattcccaaagtgcattgctgagtggtcagatgagagggagtgctttctaattccagtctaaaccagcaaagcgattgaactattttcctcctgtaacattgtcaaaggcagtagggacccggctctggagtttccagctcgaattcaaaatccagtacttatagaaaacccatgttcagattagccaaattctaatatatagagatattggacat

SEQ ID NO: 46802 - DNA, 346 bp, Zea mays
tctcgtctgaactcctaacttggctcggtttctaaagacaacttctttctatttttacggacaagccgaaagagaaactcattatttggtagattttttgaagaagttgttggaagagcctttaaaaaaggcatactaaggtcccctttggtagggcttatttttcagcttcggctctggctcatgcaaaagttgtgccaaacacctctttttcaaatggcttcaccagtgaagtgcttttccaaaatgaactagagggcatgagccaaaaaaaagtggctcacccggcttcagctcacgtcatttttgcacaatagccctcccacaagtccaaattattaatttt

SEQ ID NO: 46803 - DNA, 344 bp, Zea mays
acctgaggcattgcagcttgcccttcaagcgaccgggaaaggcaactgatgtatttcttcttctaaggatcttcacatgcacatctgataataaacaattataacccattctcacaaagtgtgaaacggacaacaaattatagcttaaagaatctaccaataaaacatttgaaagtgattgttggtcacaaataggaattttaccaataccaatcaccttgctcttgccactatctccaaacacaatttcttgtgcttcttgagttagttgcaatgtatgaaacatgtctttctccccggtcatgtgatatgtacatccactgtcaagcacccaacttgaccca

SEQ ID NO: 46804 - DNA, 452 bp, Zea mays
tgcggaagaccccagatcatcgaagcatataagttcctggatgatttgtggtcacccaagttttgttgatgaagcaccagaagactaatcaaggaaggaatccatgtgggagttcgcaaaagaaaggttgcatgttggcattgttgcttcttcaaaatgctagctgccaagcgaaagctagaagcctgaagatgatctttgattagccagaatcagcgtttgcaatcagcaaccggatgctcttgaaaggccaaattttgttgaagttccatctcctcgaagagttgcaaagtgaagatatgtagctgaagtaaagctatactcataacccttctaagctgaatctcgaggacgagaattgttttaagtgggatagatttgtagcatcccacaaattcaaatcttggaatttttctaaactcgctctatattcacaatgaatttcacatttc

SEQ ID NO: 46805 - DNA, 315 bp, Zea mays
  unsure (1)..(315): unsure at all n locations
tgcaaaactaaagtgttttgacttagaagtaagaaaatgtaatttgttctgcaaaaataaaccaagtggtggccaaatgatccaaatatgccaaatcctatacttattctatcggnggttgacttgacttcaatttgcaaaagtcgactcacattcggtcatggtagtacctttaaattgcttttggtgtgttggcatgaatcaccaaaagggggagattgaaaaggaaatgtgccctgagtaatttccagatgttttggtggtaaatgttcaacacattactaagaactaacactcctcttatgagcatgaaca

SEQ ID NO: 46806 - DNA, 445 bp, Zea mays
tcgagagcaggagtctcgatctttaaggagcagattgctctatctctttttcttcaagcgcggcaggctccatctcggtgagcattgaagacccagctttggcttcagcttgagcttgcgtagcttcagcttctgcttgtctagtttcggcttcaacctgtgatttggcttcagcttgagcaattatctttgcaggagcacggctcaacgcctttgtagtctccagcatagcatccagtacgttggccatccttctcctcttgggagtggcggcagaagctctttgcatcttcggcagatttgcctctgtcggagggcttagaatctttggcatttttattatctcttcaaccttcggctcttcagccttatcaaccttatcttctactcactcaactgtatgcgtcttcgacattacagttggttcttcagcgctctatgcgat

SEQ ID NO: 46807 - DNA, 400 bp, Zea mays
gaacttaagtcacctgagcatgcaacttggaaggtctcatcccacttgtgtttatcggcgatgccataaccagcccatgctagtcttagctattaagcatgcatctagaccggcctcttcttttgcagaatcaactaaataaagtttgccgtctaatacacccttaaaagctagtgaaccatcacttcttctaaagacagacacatctacatttgtaaatagacacgtataccccatgttgcataattgactaacagatagcaaattataaccaagagactcaactcaaaacacattagagatagagtgctcattagaaattgcaattttacctaacccttgtaccttgccttgattcccatcaccgaatataattgaatcttgtgaatccttattcttg

SEQ ID NO: 46808 - DNA, 446 bp, Zea mays
tcacacctctaaactaactcggctgcatcattcttcgctgtcttccaatagaatcctgacctgaagaccttcccaactagtgttctggaggctgcatgtattccacattgcccagcatggacctcctccagaagttgcttcccagtggacgggagaacgcacttcatgaggacgcccgatgcaccccttctatataatgtcttcccaatgagtgtatagtgagccgactgcctggcaattcgctctgccgagttcttgtcgtctggttcttcttcattctttatatacttaatgatcggccttctccagtcatgagagtctaactcgggttgatctatgatgttgcactcttctgttagaccattgagatactcggctgcagaatttcttgcacgaagaactcgggtgggacctgagttcgactggatccgagcttggacagtaca

SEQ ID NO: 46809 - DNA, 415 bp, Zea mays
  unsure (1)..(415): unsure at all n locations
ctgaggcatgcaagctnggcgtacaactgacactctcgtagcctttgaagtattatcctcagatgttcctcatgcttttgctcattctgggaatatataagaatatcatcaatgaacaccactacgaacttgttgaggtaatccatgaacacactgttcattatgtacatgaagtaagttggcgcattcgtcaaccgaatgacataaccatgaactcatataatccatacttattgatgaaagttgtcttcggtatgtctgcaggtcggattctgagctgatggtaacctgacctcagatctatctttgagaacacactggctcctttcaactgatcaaataagtcttcaattcgagacagggggtacttgttcttgacagtgacttcattcaaagctctgtaatcgatgcacat

SEQ ID NO: 46810 - DNA, 471 bp, Zea mays
  unsure (1)..(471): unsure at all n locations
tcatcggggtggagttgatgctaggggacctcanaattgcttatctgttcaattcctccgtcgtgtgccgcctcatgccgtgagtcgtgcaaccaccaccgtagtttcgggtaaggatccctgcacctgattcgtgatcctctccgcttcatatgggcttatccgcgactgtgttagggcatcagcacgtgggagcatcaactccagcgatggtgccaccgcctcgttggtgcgcgctaccgctctgctcggctgtgggaggagggtcttcagaccgttgattccatcgtgggcagtgtagattagaaggatgaataacccttcggttaattaaatcgtgatcgatgatccaaaggctcagatgcgatcaacgcgctgtcgtattacgagtcgtggatcccagatccggtggcccgtgttgaatactagttcatcacgttaaggggcttttaatcttgaatgttggtctat

SEQ ID NO: 46811 - DNA, 279 bp, Zea mays
  unsure (1)..(279): unsure at all n locations
tctctggctctggagctatgatcagagtggcatgtttattaattgtgagacacgatntgaggacgtggacttctatatttccattgccgttaagcgttcccaatcccccgaaagaagaatcttcggactctgcgaatgttattatgtgcaggtgaacttccaatcctggccgcatagcatggttagatcttggatggtgaaattagaataccaactgcgcttgcaccgaaggtttctcatgatccatcacagaacactgtccaagctttggcggttggt

SEQ ID NO: 46812 - DNA, 248 bp, Zea mays
aataacgttctgaagaggatggagctaactgccggagggttcggccttcttatataagaatatcccatctttagctcccttattgaggattggcacttaagctagcatgtatttgaaaacctataaatatcttatacattctaaaatgtaattcttttgaatcactttcttttgtaatcactccgataattgcataatggaaacttattgtaacatgtaatcaatttgcaaaaagaatttatttccgc

SEQ ID NO: 46813 - DNA, 410 bp, Zea mays
  unsure (1)..(410): unsure at all n locations
gttcacacgctngccctagtgatcggctaagcatgtttgaatatctctttgataagtcgctccagcgtgtttgaggccgaacggcatggaggtatagcagaaagcaccaaatggagtgatgaacgctatcttttcctcgtcttctttcgccaggctaatctgatgatacccagagtagcaatccaagaaggacagcacagaacatctagcggtggaatctaccacctgatctatgctagggagcccgaaaggatcctttggacagtgtttgttgaggtccgtatagtcgacgcacatgcgccaatccaccttattctttttgagtacaagaacggagttggctaaccacttgggatgtaacacctctctaataaatccagccgcgaccaagcgagccagctcaacacgaa

SEQ ID NO: 46814 - DNA, 415 bp, Zea mays
  unsure (1)..(415): unsure at all n locations
agctntgctccatggcaaagctaagttccttttttcttanaaaaacggcggtggtttcattagttctaatagaccctctatggactatgcttcatattattatgtggaatgactctaaacatttttgtcacaacttcaacatcttcgcttgtaggtgttcagtagacccacctgaccatgtcaacctgcttgccagttggcaacagctcaatatacatcacgtggtttttgtcacctgggtgctcgttgggtcacatatttgtaacgtaatacgtaacggataacgttaaatcatgtttgttttaatccacccgaatcagatatcacactaaaatttgttacagcctattcaaatttgtacccgcagtaatcaaccgaaaccttaccattgcgttcattttttgaacaaacaata

SEQ ID NO: 46815 - DNA, 460 bp, Zea mays
  unsure (1)..(460): unsure at all n locations
tctaagggagaacacgtgatagggttgactaacgtgcatttcttaaaagatagaccttgtgcagcttgtcaagcaggtaaacaggtgggaggagcgcatcacagcaagaatgtgatgaccacttcaagacccctggagatgctgcatatggacctcttcggacccgtcgcctatctgagcatagggggaagtaagtatggtctagttattgttgatgatttttcccgcttcacttgggtgttctttttgcaggataagtctgaaacccaagggaccctcaagcgcttcctcaggagaggtcaaaatgagtttgagctcaaggtgaagaagataaggagcgacaacgggtccgagttcaagaaccttcaagtggaggagttccttgaggangaanggatcaagcacgagttctccgctccctacacaccacagcaaaatggtgtggtagagaggaagaaca

SEQ ID NO: 46816 - DNA, 470 bp, Zea mays
  unsure (1)..(470): unsure at all n locations
tgtgggcgccctcggcgtcttgtcgcagccgaagtaccatgtctcccacttggaagcctcggggccgaacccttcgagcgtggtagcgtcgcacagactactgatatcgtgccgagtgtagtaaggccacgtcccgagcctcttccagctggtccaatgagtcttctcggctagtctagttgctttggatgtcgtaagtctttgtcctcggggaaccgtattctaagtccgtgggtaggatagcctcggccccatagactagaaagaacggcgagaaacccgtggcccggctcgacgtcgtactcagactccaaactaccgagggtagctcttttatccaccgcttgccgaacttattgaggtcgttgtagatcctcggctctaatccctgcanaatcatanccgtggcgcgctccacctgcccatttgtcattgggtgggctatggcggcccagtccacacggatgtgg

SEQ ID NO: 46817 - DNA, 375 bp, Zea mays
  unsure (1)..(375): unsure at all n locations
tgtgaagattcttcattccaacatgggcttgtctgcggtgtttaaaccaacccatgttagtcttagcaactaagcaagtgtcgagttcagctctttcaaaatctaccaagtatagctgaccctctagcactcccttaaaagctattgaatcgtcacttcttttaaagacagtaacaccagtatcagtaaaaagacagttgtagcccattttacataattgggatacggagagcaaattgtgatctaaagaatctacaagaaaaacattggaaatagtatggtcaagtgatataacaattntacccaaacctttgaccaaaccttgatttcatacccgatgtgatagctcgttgcggatcttggtttntctcatat

SEQ ID NO: 46818 - DNA, 442 bp, Zea mays
  unsure (1)..(442): unsure at all n locations
gcttctcgtgcccttggatngaactatatcgtcgtggataggctggagcacccaccgccgacgagctcgcccgcttgcgcatgtggaccgaccgattccggccatcaccgtcgtcaagccgtacctcgccgtgaccgcaaggaacttccggagccaaccccgcccttcgccggaccttcctcgccgctggtaagccgcaccgccctatttacttccgcgggtactgttcaaaaggggggagggaccttggggaagaaagaaaagaagtcgggggggttttttgaattctcagagacctagatgaatagtttgtgaggggcataaagttaaaagntggtttangaaaacctacggttcctcgtgtaaactggtttttagaaaacctttaaacatttctcattaaaacaaacagagcttgtaaattcataactcagtttattca

SEQ ID NO: 46819 - DNA, 477 bp, Zea mays
  unsure (1)..(477): unsure at all n locations
ggacctganagccggctaccaccagatnttgttacagcatggtgaagagtacaagaccgcgttccaaacgcatatcggtcacttcgagtttcgggtcatggccttcggtctctcgggagcacctaatacatttttgagtgccatgaacgacaccttagctccggtgttaaggaagtcagccattgtgttctttgatgatatactcgtgtacagtgctacttttgaggaccatttggaacatttgaagcaagtgttacaactgctgcagcaagatcactgggtggtgaaactttccaaatgcgagtttgctaagactgagatttcttatctaggccatgtcatcagtcatatgggtgtggctactgatccttccaaggtggcggtgatcgctcactggcctacaccttcttcagtaaaggaactgcgtagctctttgggattggccgggttntatcgcaaattcgtgaggcatttcgg

SEQ ID NO: 46820 - DNA, 454 bp, Zea mays
  unsure (1)..(454): unsure at all n locations
agctttggctagcatgatgatgagtgatgattatgttcttcatctttcaccaatgttccttgataattgcagaatcaaccaagctttgatcagcatgatgttgagtgatgattatatgtccaatgcaagcacacagtctggcaacaggttttgttaagaaaaggagctggtaacttctggtttgtaccatatctaaaagtgtaccaagtttctaattttggtaactgaaatgttgaaccttcaatggcatgttagcaactttttctataaacaaagtatctcanaacataatgatcattgtcatgataggatgaacataacttttacttattgttgtcgctgttcagattgacaaatatgcatctatgatcgtactgaactattgggcacgatccataactattattcaatgtgattttgtgggcaagttcattttgggcatctacctattgat

SEQ ID NO: 46821 - DNA, 344 bp, Zea mays
  unsure (1)..(344): unsure at all n locations
acctataaatctcagcttgagaattggganagccgctcctctataattcatcggactgttctgtgtgacaccggactgcccggtgtgccagcggagcaacggctactttgcgccaacggtcgtctgcaaaggaacagtgaaacgctatagtgcgcgcctgcgtgcgcagaagtcagagcacgcgtcagaaggcgcaccggactgtccggtggccccacatgtcagagctccaacggtcgaaccctaacggttgggtgacgtggttggcgcaccggacagtgtccggtggcgcaccggactgtccggtacgccatactacagcatcccctcccaacggccacttt

SEQ ID NO: 46822 - DNA, 457 bp, Zea mays
  unsure (1)..(457): unsure at all n locations
agctngcgctcaagaccggatattgtcaatatactaaatacgccaccgtcaacagaacctagaataaagagaaaactaataactaatagcagggtgaccggctcagaccgggtgtactcgtcttttaatactgagactcatagaaaataacttgtaggttggctgtatcggaactttgcgatttcatccaaaaagagcagaacactacgagactacctccttctctccaagtcgttgtcttcttcggttcttcctagcgtctccccgttcttctcttcgtagtagctaacagtatagtgtggcctcgcatggagactttccctcctcgctggccccgcatctggcccggattaaccgccttgggctcccttcccagaatgccccacccaccgtcagcctcgtcaggtatgtttcgtgttccctaaccttgacgcttttcccttctcggcgcctgttt

SEQ ID NO: 46823 - DNA, 399 bp, Zea mays
  unsure (1)..(399): unsure at all n locations
actgacctcagggcggatgctgctgccaggaggcccncgcccactacaaaactcgtgaggcaaggacgggcagaaggccgtagagttggaggtcagtccgtggccggccccggctatctcgccggcagcagaacctcttcaagctgctgtggtggatgccggcaccgcgagcggctccgaagccactcgcgcccganagccaggcacgctgcagctgccagcgccacggacgacggccgcccctccctccgatcactgagtgaaggagcgggccaccgcccgcacaggggccgaccccaactcggcactctcccctccccagccttggtgatgaaaatccttgaggctganggaggggcagaggccgcagcccggctcgctttcccccaccatcaagcc

SEQ ID NO: 46824 - DNA, 394 bp, Zea mays
  unsure (1)..(394): unsure at all n locations
agctcataagccacaagaagattataacgatcaactttaaattttgtgtaatcctattttatctcgacaagcatatcatttagatccatatctatttcatccaacgtttcacttttntcttttgcaatttaagggaggccttaaggtcattactagtggatgacaaagcttaatttcttccttcatttcatcactagctttgactattatgtcatatttagcaatcaaagatttattttcatcttttagcttatcacatttttccttagattttctaatgacttgagtgtattccttaagcaaatatgctagctcagcataagtaggggaagcatattcttcatcactatcactaccacaatcattattaataggttcataaatttgtaccttc

SEQ ID NO: 46825 - DNA, 421 bp, Zea mays
tttgagttgatcaagtgaaactgatgttgtgctcttgtttgctctttggtgaagaaatgtgccaattgagattctgagggcacatattgaagatcaatagtcttctgttgacaatgagattgagtaaatgatgcatcgacaccaatgtgtttagtaagttcatgcttgattggattatgagaaatctgtatagcactcatgttatcacataacagaggtgtaggagtgtcacaagggacaccgagatcagccaagagccagcgcaaccaaataatttcagcagtggtagtagcaagagcccgaagttccgcttcaggcctagaacgatatatgcccgcttgcttcttggatttccaggcaataggagaggacccaagaagaatacagtaacctgtagtagaacaacgctcaacaggatcac

SEQ ID NO: 46826 - DNA, 195 bp, Zea mays
  unsure (1)..(195): unsure at all n locations
tgtgtctagaattgaatgctagagctcttgttagtagttgaaaggtggaaaacttggatgacttgaatgtgggggtggttggggtatttatagccccaaccaccaaactaatcgttnggtggaggctgctgtcacatggcgcacccgacaattctgtgcgccacccaacactgtccggtgcgccagccacgtcac

SEQ ID NO: 46827 - DNA, 434 bp, Zea mays
  unsure (1)..(434): unsure at all n locations
tcggccgctctntntcttctctggccctcagcatccttgttcatctgcgcataatcaggatattcgaaacccagtgcatcaagcactcggttcagccttcgcttcggacgggtgccgaaggctgctgtcatcagttgatcttcttttttcgaataatttccaagaatttcattacacatcacctcaactgtatccaaccactcttggcagggcttcttaaaatatttcttgaatttgaagtggtaaggaagccggacaagatccccttccttcttctccccctttaactntggcatttcccattttttcagagtagggaagactctgaatgctaagaattcttgaaccagatccctggtaccaatatgctctgcaatgatcctgaattcatccattgcccgttgagtttgaccctctggtgtcatgttgcagtg

SEQ ID NO: 46828 - DNA, 397 bp, Zea mays
agcttgccaatacttgtcagagcaacttcacttgccaacacagcaactacagaccataccagtaacctggccttttgcatgctggggactagatatgattggacctttcaagaaagctcaagggggatatactcatgtattggtggcgattgacaaattcactaaatggatagagttcaagcccattgcttctttaacctctgctaaggctgtggaattcatacaagacatcatattcagattcgggataccaaacagcatcatcgccgacttaagatccaacttcactagttcagaattcttcgacttctgcgagcaaaagagcattcagatcaagtacgcatttgtagcacatccaagagccaacgggcaggttgagcgagccaaccgaatgata

SEQ ID NO: 46829 - DNA, 463 bp, Zea mays
ctcagcttagccttatttaagactttatcggcagcttcgttcattattctgttgacagcttcgtcaatggcctcgttagcaattctaattatgtcgggtaccccttcagagatggatcagcttctggatcatatggctctagagggagagaaagctcagctgcatcaaaatacaattatctgttattaccaaagctacaataatttacgaagctaagctgtaatggatatacctataagtctggcgcgttcagcagtttcttcagctccgttagcctcttctaaggcgtcgagagactctttctaatttcttctaatagcttcgtcagctatctctcggccgcctttcagtcatacttcggaatagaactttccgcttaatgcagtagtgtatgccaaagaggttttaatgtcatcagctgatagcgagaatcctgactgaaccacagccttatcatgttcgc

SEQ ID NO: 46830 - DNA, 370 bp, Zea mays
agcttgacaatgaggaaatggcgctcgtcatcaagagcttttctcaatcctcaagcaaaggagagggaaagactacaagtcccgctccaagaaagtttgctacaaatgtggtaagcccggtcattttattgcaaaatgtccattatcaagtgacagtgacagggataacgacaagaagggcaagaggagagaaaagacgaggtactacaaaaagaagggcggcgatgcccatgtttgtcgggaatgggattccgacgaaagctcaagcgactccttcgacgacgaggacgccgccaacatcgccgtcaccaagggacttctctttctcaacgtcggccacaattgcctcatggcaaatgatggcaaaaag

SEQ ID NO: 46831 - DNA, 447 bp, Zea mays
  unsure (1)..(447): unsure at all n locations
gggcgggtggcgcggcgcgccaagtcgttcgtcttgctggtagatgaaaaggagctctaccactgcagcccctcaggcatcctccagcgatgcatctccatcaccgaatgtcaggaactccttcgagagatacactcgggggcttgcagccatcacgtggcgcctcgagcccttgtcgggaacgctttccgacaaggcttctactggccgacggcggtggccgacaccactagaattgtccgcgcctgcgaagggtgtcagttctacgcaaggcagacccacctgcccgctcaggctctgcagacgatacccatcacctggccctttgcagtgtggggtctggacctcgtcggtcccttacagaaagcacccggnggctacacgcacctgttggtcgccatcgacaaattctncaagtggatcgaggtctgacccctaaacagcatc

SEQ ID NO: 46832 - DNA, 422 bp, Zea mays
tgtagtaggggttacaagcaggtgagagagggaggatatgttctcaagtctcttatcatggcggagggggagctaaatgttacagagtggagaccctaacaaagtcttgtcttagcgacagggctctggcttctaggtcctcgtcagtgtgtcctccccctgttcgttgatccatcgtcttcgcatcttgtaacacccaaaatcctgatttcagatatagtagaatctttctaaaacaatgataacaatagtaatatgatgttagttgaaacaaaatgaaaacaaaaaaatgccttgtaaacttcaataaaacaagggatttaaatgaaaagaaaccccaatgggattaattattctttgcattgaatcctatacttggaagaaatgttagttaaaaaaaccctttaatggtgatcatacct

SEQ ID NO: 46833 - DNA, 335 bp, Zea mays
accattcagcgagtgcaggtggactagcggttcgccttcccccctgtagcactatataaatagaccggtaggtgaagagttaccacaacattcattgccattgcactgttgtgctgtgaaaaaaatctaaccatagtcgaagctttctgcactacactttcaagcgaacacttcatcgtttaaagttagcttcgtcaaactgtaaaaatccatcaaaatggccagagtgcgatcgactgcaagggtgtctcgtgagagggacgaaaccgatgccactgaaacggcaccaatttcagaagtaatggaatgatcacgtctagctgtgacagagggag

SEQ ID NO: 46834 - DNA, 352 bp, Zea mays
  unsure (1)..(352): unsure at all n locations
tgccttcgcctcagtctatcatccgcagtccaacagagttgttggggacttgntctcaaatgctatgaattaagaacaaagcgacataaaatgttaaatgttaatgtccttcgtccaacgaagcattattcccttggggattaatggaccttggacgaatgttgatgacaatacgattacgaaaggtaaatcttcgtaattgaattctaatagatcgtataagataacatanaatatccagtttcaaaggtaaatgaatcataaacgacccatataatatctactcatatttttgaaacattgaatacagtaatacctctaccttgccaagaattggtcccgaatgatgcaa

SEQ ID NO: 46835 - DNA, 222 bp, Zea mays
ctacatatccccgtccaagaaagtttgctacaagtgtggtaagcccggccactttattggttaatgtccattatcaagtgacagtgacagggacaacaagggctagaggaaggagaagaataagtactactagaagaagggcggcgatgcccatgttttgtcgggagtgggactccgacgaaagctcaagcgactcctccgacgacgaggacgccgccaaca

SEQ ID NO: 46836 - DNA, 410 bp, Zea mays
  unsure (1)..(410): unsure at all n locations
tctaaagggagagcacattgtaggactaaccaatgttcatttttagaaagacaggatttgtagcgcatgccaagcagggaagcaagttggcactcatcatccacacaagaacataatgacgactgacaggccactggagctcctacacatggatctattcggcccgatcgcttacataagcatcggcgggagtaagtactgtctagttattgtggatgattattctcgcttcacttgggtattctttttacaggaaaaatctcatacccaagataccttataaggattcttaagacgggctcaaaatgagtttggcttaaggatcaagaaaataagaagcgacaacgggacggagttcaagaactctcatatngaaagcttccttgaggaggagggcatcaagcatgagt

SEQ ID NO: 46837 - DNA, 380 bp, Zea mays
gcaagcttctaaagggagagcacattttgggactaacaaatgttcatttttagaaagacagggtttgtagcacatgtcaagcaggaaagccaagttggtcccatcatccacacaagaacatcatgacgaccaacaggccgctcgagctactccacatggatttattcggcccgatagcttacataagcatcaacgggagtaagtactgtctagttattgtagatgattattctcgcttcacttgggtattctttttgcaggaaaaatctcaaacccaagagatttatagggattcttgagacgggctcaaaatgagttcaaattaagaatcaaaaagataagaaacaataatgggacggagttcaagaactcacacatcg

SEQ ID NO: 46838 - DNA, 422 bp, Zea mays
ttaattgtgtttccattcaatcaccaaaagggggagattgttatctcccttgtgggttttggtggtttggatgacaacccaattaaaggactgatatgtgttgctaagtgttgaacatgtgctttgtgcaaaacttacaaggttcaacacaagtgaccaagtgtgatggtccaaaggctgagatgtacatagcttgaagacaattggtcaatccaaggatggaggcaagaagaacttcgaggtatcgagtgcatgggaggaggtcaaggaggctaaggcacctaaagccaggggtgaagaagaaggcttgcaaagtcaaggttgatcgagttgaaaagagctatggtgcatcaaggatcactacctaagaacatgaattacaaccaagaaagttaagacctatgattatgtggtgtaagtca

SEQ ID NO: 46839 - DNA, 448 bp, Zea mays
gcttcttgcacgacatatttctagccgttttatgttactgtaacatcgaccactcatgagccgagctacattgactcatcatcgctcacatgcctaaaatggcaagggaaacactccaatgaaccactttggaagaatagacatatgaagatactaggattcatggtcaactattaccctatcaagtgttgaatacctttagacttgaccaacagtctatccactggtatggtccttgacaacattgttgtgactaatacaaccagagcctcactttattgctcaaccaagtccacaatcacagtcctcatgctcgcccaatctctcattattatccatgcatttcctagtccatgtgatagcagtaccactacacaaggacctatctctattagtaacatccataataaactttaccatagtcccataattggcaactgagtatctt

SEQ ID NO: 46840 - DNA, 289 bp, Zea mays
  unsure (1)..(289): unsure at all n locations
aacatactaagctgctaaatgccattntcactcctgaattgggtgccttattacttctgaatgcagcttctatgcacccatggaaacaacagcatcactacaaaatccgattctgttcaatggatatatgcagttactaaagacgtgtgaaatcgtgaaaccattacatgaatggtggatatgtacctggcggtctaacctatgtgactatgtgacccataagatacaataatctggtgcacataaagattgcaacagggcccatccccaatggggagttcatggggga

SEQ ID NO: 46841 - DNA, 405 bp, Zea mays
  unsure (1)..(405): unsure at all n locations
tcggcttcaggttcgctataattaccaaatattaataacatcttgcttctttataancnaaccacccgtcgctaggatctaaaaattcatcctcaaatttatacttgtaataaagtctgaccaacctatgcttggcatccgaagcggctattttaaaaatctttggcatttcccactcagccgctaatggccatgtcttaaaagctaaaaactcctgaacaagatccattgttccaatatgtgtgcagacagcattaaaagcaactataacagcccgagcttcaaagttgatgtaacacgttagctctttatatcagaaacttataacaataggagtctgaataattctctttatatcaataccgtcattccaatcattcttcatgcaaaatcatttcttcggcc

SEQ ID NO: 46842 - DNA, 349 bp, Zea mays
  unsure (1)..(349): unsure at all n locations
agctttgagccataaatccttcaattataagctgtaatttcgagccaatgcgagaggttgacaactctagtggttgtattacgatcctatttttatggcagaaccgaaaaacatggcagccacatgcacgcggttatacagatccaaaaatttaagaaatttatgaaaacatggcagtcgcatgcacatggcaactcttatagtcaaacatgttcccttgtatgcgcgtaaatataggaaagatgtgtgtggcggattctgttttaaatgctttatttcctccataaatttaagatcgctgcaacagccatgcagctagactcgtaatgaccattntatgatatatact

SEQ ID NO: 46843 - DNA, 431 bp, Zea mays
  unsure (1)..(431): unsure at all n locations
gacctatgaaactaagcttctaagggagaacatgtgttaggtctaacaaatgtgactntcttaaaagatagaccttgtgcagcgtgtcaagcaggtaaacaagtgggaaatgctcatcacagcaagaacgtgatgaccacatcaagacccctggagctgctacatatggatctcttcggacccgtcgcctaccttagcatcgggggaagtaagtatggtttagtaattgttgatgatttttcccgcttcacttgggtattctttntgcaggataaatctgaaacccaagggaccctcaagcgcttcctaaggagagctcaaaatgagtttgagctcaaggtgaagaaaataaggagttgttggtacttgctctcccgagcaagttgatccaacgagggagtgagagcaacgtanacaggtttcagttcgag

SEQ ID NO: 46844 - DNA, 124 bp, Zea mays
  unsure (1)..(124): unsure at all n locations
cgcacatcngaaacgaatgggacctcgactgttcctcatccgacttcgaagatgaaggactagctgcctcggccttcaacaagacttcacttcttcccaacgaacgacacatgtgccttatggt

SEQ ID NO: 46845 - DNA, 377 bp, Zea mays
  unsure (1)..(377): unsure at all n locations
ntgttccagtgcacgcaagaccacgaagaataccttcaggcgtatgtcctaaggttcttgcgtttgagaacacaagcgcccatagtgcccaatgaaattatcattgaggccatgatcaaagggcttctgccaggacctatggctcaatactttgccagaaaaccccctcagaccctagagaagcttcttcagaagatggatgagtacatctgggctgataatgattctgctagagaagggaagaagcttatacgttttatgagatgactaggggcttcggaggaagaacccaccctaggcatgtcagatcaatccacaactccagccatagtgatgacagaggaagccagcttcaaggccacagcatagctcacaat

SEQ ID NO: 46846 - DNA, 440 bp, Zea mays
  unsure (1)..(440): unsure at all n locations
gcagcttggagaagcatggtggctgtgtggcttttatatctgagaccttatgacagccgagttgatcaccacccatacccacagggaaccaggatactcgaattcgtaaaaattccgggtgatcaaggaaagaacacgcgcgaacacataggctagtttttagcacaattaggagaattggccgacacggaggcatttcgcgtacgtttattttcactatctctaacaggaaccgtgtttgcatggtatgccactttacctnctaaatccatttcatcatggtgggagctagaccaaaaatttcatgatcattttttctccggtgactacgagttggatttggtagatttagtgtcattgcgacagacaaaagatgaatcggttatgattacatccggagattccgagatacaagaaaccgaagctttcaaattcattta

SEQ ID NO: 46847 - DNA, 466 bp, Zea mays
  unsure (1)..(466): unsure at all n locations
ggaccgtcgattcctcgaagctcggaacgaatacgatctttctcaacgcgaagcgaagacgaagaggcacaagaaaacaaacatatacatatgcataagaacattacaccatacaagataaaatgttctaaaaacatgcagcctaaaatagagctcgcttctactgttatgcgagaataagaaacgcgtctgtcgaagctacgtttgacaagttataacgtttacgctacgctagtaatagtcaggacatttaattagacagtatcaaatataaattataactgctatttagttctaattaaatctgttacactaacagctgtcaaatacgtaatttaataaaaacgagagattctaagctatgcgaatttatgacgcgcgaaacagcacgacagcgtgccgaacgacgtgcggacacgcaaacgacgcacganaccatgcgcgaccagcgcgaacgacgcgcgaa

SEQ ID NO: 46848 - DNA, 372 bp, Zea mays
ctgcagcttgcttaagccttcatctttatcacatatcacgaatcttgctagaacactaccccacttaaaaagaatgagggtagaactctcgaatcttggggatccgaactccttgaagtacctcataacaagggtgttacggggccttcttctactgttgctgcttgagcacgctgcggagaaatgactgacacagggttgattctgggacaaccattttctcatcttctcttcgctatcttcttttctcttctcacttttcactgcctctttctttttctttgctcttcccactacaggattctatcaaagagtattaccattacacagaggaggaaaccgaagactatgaaccatgttcaacagtcttta

SEQ ID NO: 46849 - DNA, 440 bp, Zea mays
ggagttatttttattacagaccagcctaaaagtgagtgcatatagttatattatacaaaccacggaggcaaaaacttctcccgagaagacaaaagccaaagatcttaagtggaggaccgagtcctcccgcacttcagtcttgattttcttcttttggaaccaccttggcacagaagcagcaaaagtctgctacttcctcacctaaaaacaacaaagggataaaccctgagtatggaatactcagcaagtcttacccgactaaagaaaagactctcaagggtatgctggttatatgggagtcaaggtaaggcttttcaatattcaaagactctgtttttgcagaaatgcttactaaagtggatccttaaaaatccagttttatttggcaagttaagtaaaattacctgcactagagttctttctaccctaattcaatcact

SEQ ID NO: 46850 - DNA, 374 bp, Zea mays
  unsure (1)..(374): unsure at all n locations
ggccatgcccatatacggacacacccacagatagagagagggtgagagaaatgcctattattagccatggcgatcaacccaacggagcatcacttagacatacgggtcaatcgaactatctagcgtgcgctggtgaaatcaggccactagaactgggaaacgggccgcaaccaacacttattggcagggatgaaaacggtcgggaaacactaaaatcataaccggtntcatatattcttatcgaaaacaaactcgaaaaccggaactccggaaacggaaacgatatcggaattccgaaaccatcaaaacgaaagtttggggcgggaaaaacaccggcaaccggggggaaactaaaaaccaaccggacacacatc

SEQ ID NO: 46851 - DNA, 464 bp, Zea mays
tatgaaactcagcttacaggttctctatcttcactttgcattgaagaggcttgtatttcttgaagaattccatgaaaagcaggagcaggttagtttttctagaaatcagtctcctatttacattacaaaatggaagcttccagtacacatcagaatagtccctctactctggtaaaaaaatacttgacacatttgacttatggtcttcaatgcatatgaatatattcttaaaaactttcaaatttatgagatgttgcaagcatttttttactaaaatactacacatgtaacatgtttcagtctagatcatttaatagctattaatgttggtattttataaggtttgactacatatcgtgctaaacaacatgtttttatgccggaagggaggattagggaacatagtaagtaaagaactaggggttcaggactgagaatacactcaattcatgaactagatggct

SEQ ID NO: 46852 - DNA, 358 bp, Zea mays
  unsure (1)..(358): unsure at all n locations
agcttggacaatattatgtgatgggtcatgttgaaccttcggcgcangagcagctcgctgtttaatttcactgtctaaaatcaaaacgtgctatgcagcaaggttggacttcaactgcacaaataacattgcaaagtacgaggcccttctcttggggcttctaaaacttaaggcaatgggaattagaatggcaattgactcacaaatcatttcattgtcacgtgacaaaagtagtaaaacaagggacccaaagctcgagaagaatctggacacaatctaaaagatggaagcctctttcgaacgtttctattaaaaacatcccaagaggagaaaatgaacatggcaacttgttagctat

SEQ ID NO: 46853 - DNA, 410 bp, Zea mays
ctgtagaggactttactaactttcccaaacatggattgtggtgtgttacaaatcctaccccccttaaaaagaatctcgtcccgagatttgtaagacatgggatatagaaagtcaaaggcttatgttgcagtttagcttcgattttttttctaagtggctttaagcacaaatgttttcataataattttttttataaggaattgattacacatgggtatatttatgtatatccactttactatgtagggtaaaaaaaatgtctttaaagcatagataggtctgggtaagaaaaagtggggtaaggaaagactccatccaagattgtggatcttgactcttttgaagatctggcttgaatcttatccttccttgatttgatgaggggcggcatcttcgatctttcgttttga

SEQ ID NO: 46854 - DNA, 378 bp, Zea mays
cgaccggatcttaagcacctgagcatcaagcttgcaatgaggagatgacgctcatcatttatagtgtccgccatatcctcacacaaaggagggggaaggattacaaaccccgctccaagaaggtgtgctacaagtgtggtaagtccggtcactttatagctaaatgtcctatatcaagtgaaagtgacaggggcgataacaagaagggaaagaggaagaaaaagaacatgtctacaaaaagaagggcggcgatgcccacgtgtgtcgggaatgggactccgatgagagctccactaactcctcctccgatgaggatgccgccaacatcgccgtcaacaaaggtctcctcttccccaacgtcggccacaagtgcctcat

SEQ ID NO: 46855 - DNA, 463 bp, Zea mays
  unsure (1)..(463): unsure at all n locations
tatgaagattcttcatcccaacatgggctagtcggcggtgccagagccaacccatgttagtcctagcaattaagcaagtgtcgagttcagctctatcaaaatctaccaagtatagctgaccctctaacactcccttaaatgctattgaatcatcacttcttctaaagacagtgacacctacatcagtaaagagacagttgtagcccatttgacataattgagaaacggaaagcaaattgtaatctaaagaatcaacaagaaaaacattggaaatagaatggtcaggagatatagcaattntacccaatcctttgaccaaaccttgatttccatccccgaatgtgatagctcgttggggaatcttggtnttctcgtaggaggagaacatcttcttctcccctatcatgtggttngtgcacccgctgtcgatgatcaacttgagcccccggatgcataaacctac

SEQ ID NO: 46856 - DNA, 373 bp, Zea mays
ctgcagctttgcaaacaaaactctatttctattttaaaatctctcaagtggtagctgatccatttatcactctggcctttattttctccccctttggcatcaagcaccaaaacgggatcaatcttggccttctaaccccattgcttcaccaagatcttcaataagaatacaaaggcaataagattgcaggagatgaacttggaattagttaccctctcatcggagtgcagtggaagtctttcatggtccaagtccaccttttccctttcaatcctccttcgagactaaatcatcaaactcaagcacatggttagtctcaaagggtcaagttgtaacacatctccctctaaacatgtgcatcacttgcaacgga

SEQ ID NO: 46857 - DNA, 56 bp, Zea mays
gctattacggacctatgaatctcagctattactaacatagataaacaatatctaat

SEQ ID NO: 46858 - DNA, 262 bp, Zea mays
gacaaaacattaaccgaatttggagtaacaaagtatcaacattcctctactctatgtggttgctttgctgctatgatttcagatattttcgtcgatagtatgtgtgtaccgatgttgtcaaaatggaacattgtgcccttccttggaatggagaatcctaaaggaataacaccctaccgaaactggttggcacttaatatcgaggttatctgcgtgtacacacacacagttggtggtcgtgatgcgcttgccgttgcaccct

SEQ ID NO: 46859 - DNA, 467 bp, Zea mays
cattacggacactatgaaactcaagcttaggaacacgtaggtccggtggaattactattggttcataccatgattatattgattgtgatgtggtacccatgcaagcttgctctatgttatttggtacaccatggcaatttgataatgacaccgtgcatcatggtaaaacaaatcaatactcttttatgcataatgagaaaaagcttgttgtgcaccctatgtgccccgatgctatcttgaaagatgaagttgctagagcatgcaaagagaaaaacaaatctgttcataataaaaatctatatgttacaaaggaattggtacaacctaagagtgataattctaaatctgctcatgtaaggaaaaatgaaatacaactgaaaagtgcttgttttcttgcttgccaatctgatttacttgaattaaacgatgttgattcaatctgctatgtgtctatatgcaaagatgct

SEQ ID NO: 46860 - DNA, 367 bp, Zea mays
agcttcttcagaaaatggatgagtacatccggtctgataatgatttccgacaaagaagggaggaagcttatagattttctgagatgactaagggcttcagagggagaatccaccctaggcatgtcagatcaatccacagctccaatcaaaatgaggacagaggaagccagcttcagaggccacagcacacctcacaatcttcgggacaacaacaaagctccttcaggccaccaactccaaggggcaaaagcggcaggggcttcggaggaagatatggggatcagcacaggaaaatatattgcttattctgtggtgaggacaagggccacactacaagaacgtgccagatcactattctgaagcaaaa

SEQ ID NO: 46861 - DNA, 342 bp, Zea mays
ggacctaagatactaagctaggaagttcttatgctcacatgtgctaagcggcgatgccacagtcagcccatgctagtcttagctattaagcatgcatctagaccggcctctacttttgcaaaatcaactaaataaaagtctgccgtcgaatacacccttaaagctagtgaaccatcacttctttctaaagaacagacaccatctacatttgtaaattgacagctattatcccatatgacataattgctaacaaaataccaaatattttccaaaactctttcctaaaataccatataaaatagatggctcattgaaaatggcaatttaacttacccttttcac

SEQ ID NO: 46862 - DNA, 454 bp, Zea mays
agcttgtgaaggttctccatccccacatgtgataaactgtgatgccacagccagcccatgctagtcttagcaattaagcatgcatctagactggccttcctctttgcaaaatcaactaaataaaggttgtcgtctaatacacccttaaaggctaatgaaccattacttcttctaaagacagacacatctacatttgtgaataagcaattatatcccatgttacaaagttgactcacagacaacaagttatatccaagcgactcaactaagaatacattaaaaatagagtgctcggatgaaatagcaatttttcctagtcctttcaccttgccttggttcccatcaccgaatattgatgaatcttgggaatccttgtctttgactaagaaaaaacatcttcttctcccccgcatgtggtttgtgcatccgctgtcgatatccaacttgatccccc

SEQ ID NO: 46863 - DNA, 474 bp, Zea mays
  unsure (1)..(474): unsure at all n locations
gtgccaaatagggcgcataattatacctttgatatcttctcgtattgtcagatcattcttcacataaaaccattctgtcatccagtcgtcgggccatcttttccgaaaggttggcacggngcagcttgacccggaccgagaaacgaaactgtagcagccaaaattattgtgatactgctccttaccccaaggttttgtctcgtatgataattcgtgtatattacagaagctttttgcatcaggcttcagaccttggcttctcactgcccacacgaagatattcaactttataattgcttcggggataagttgatggagatagatttcgaatattttcagcacctccacaacgaagctgctcaagggaaatcgcagtccagctttcaaaaagcttcggtacactacgacttcattctcnttcggatgtgggcaagtttttttcccttcgtccgccctcacagtggacaaatcccg

SEQ ID NO: 46864 - DNA, 274 bp, Zea mays
  unsure (1)..(274): unsure at all n locations
taagcaccgcngctgcagcttacttttcgaaatgagctgctttcttttagttgttcacaccattttctgacgcatattagttggaccctacatgctattcaatgattgtggaggtgcacttgaagagacaaaattcacaggcttggattttggaccctggcctaaatactaactttcatagttgttttatccatgcaatattcatacagtggtaatagagaatgaagatgaccctgataggttagagaatatagcttttgagctgaatgctcta

SEQ ID NO: 46865 - DNA, 461 bp, Zea mays
  unsure (1)..(461): unsure at all n locations
ntatcttgttgatttacaacaagtaaagtgacgcctgagacttgtttagtggcaaagtccgacaagggttggctatggcatcgccggctagcccatgtcggtatgaggaatttggccaaacttcaaaaggataatcacatcattggactaacaaatgttgtatttgagaaagataggatttgtggcgcatgccaagcaggaaagcaacatggagtcccgcatcaatcaaagaatgtggtcacaacaaagaggccattggagcttcttcacatggacctcttcggacctgtggctcattggtggtagtaagtatggtttagtcattgttgatgatttttctcgattcacctgggttctctttgtaagtgataaaggtgaaactcaagagatattgaagaaattcatgacgagagctcaacatgagtttgagcctcaaatcaagaaagtgagaagtggatatg

SEQ ID NO: 46866 - DNA, 410 bp, Zea mays
  unsure (1)..(410): unsure at all n locations
agcttgaagcaagtcataagactgaggtcgagaaatattcatatntgcaaaaatcattgaacgatctccaagagaaatgtctaaatntcggcagccgatgcgtgcagcggctgaaggacgtatttcactctatcggagccagttctgaaaaattttcaccttcagccgaagacctgcccagcaccttggaacatattgaaggcgaggttgatgctcttgacgaagatattggtgggcatgccgatttctgcgccctggtagcttctcgaggcacagctgccgcttttctgaaggttggttgtactcatggaaaaattgtgaatagaccaaacttcagcttgtcagcagcagacttgattgatatcccgagcctagcctgaagcatcggaaatagatatatgacccatatt

SEQ ID NO: 46867 - DNA, 484 bp, Zea mays
  unsure (1)..(484): unsure at all n locations
tctttaggaccttaaaactaagctgagagctngatgaacttgtgaatctgagagtctaagttgggtctaagtgaacctgcctttgtaacgttgtgtgccttcccttttatagctcaagggaggcacatacaaggatactaagccccgacatgtgggcccaggggcaaaatggaaggaaataactaatgcctataacgcctgtgcgatcttcgagcaccataatgtccgtagtccatacaatattgatatgtcgtggttgcttcctcggtaacgcgcgagtcatgatgagtgtagtgcatgcggcaatatggatgtgccgcctgccaatggaatggacaggcacgcctcctacgggatggtctggtcgccgactgccagcggagtggacagggctcattaaatgctgaggcngcacatcgcctgccagtagaatggacagagctcattaaatgtcgaggcgacacatcacctgccagtggaatgg

SEQ ID NO: 46868 - DNA, 312 bp, Zea mays
  unsure (1)..(312): unsure at all n locations
acaatgtcagtgactcagatgaatagtatcctctgacccgtctgtaaggagcgcaaggaaaatacgctagggacccaagcacaaagtggatntccttttccattttagagatcaaatcctttttaaatcaacagcagatttagaaaaagcataacttgagtattattcatccaagatttatcaaaccaattttgctcaactctgcataatataatctaccaagcaaaaatagtagaactcatatttcttatattactttttagagttttgatttacatagaaaaaccacttaaaccttgcaaatgaggaaaa

SEQ ID NO: 46869 - DNA, 345 bp, Zea mays
  unsure (1)..(345): unsure at all n locations
tccacaccaagaactatcatgacaatgtgacaaggccatctggaagctcctacagcatggatattattctgctccgatcgcttacataaagcatctggcgggatgattatatctcgcttcacttggtgtgtttcttttgcaggaaaaatcccatacccaagagacctttaagggattcttaagaccggctcaaaatgagttcggcttaaggatcaagaaaattaaaagcgacaacgggactgagttcaagatctcttatattgaaagcttccttgaggaggangggatcaagcatgagttctcttctccctacactccacaacaaaatggtgtagtggagaggaa

SEQ ID NO: 46870 - DNA, 253 bp, Zea mays
gacattcaccttcataattgcctcgcgggtatgttgatggagatatacttcgaatatcttcagcacctccacaacgaacctgctcaagggaaatcgcactccagcttcataaagcttcggacactacgacctcattctcttcgggatgtgggcaaattttatacccttcgtccgcccctacaatggacaaatctctgaaataccttcctctcatattgaccagatgacattctttgatagttgatttaccata

SEQ ID NO: 46871 - DNA, 339 bp, Zea mays
  unsure (1)..(339): unsure at all n locations
gctacttatcctattcatgctcttcttgctaaagattgtttgactggtcctgcttctaccatatcttcagaatctaactttagtcttgttggcagggtgctcgaggagcgacgacgacgactaataacagatatggttgaggtcttatcctgtattaaggattgggagctagctgacaagcatatgcagaatactgtcgaaaacgatacgaaagaacttgaagcaacctataagaacatgtaccttgatgttgaagacagagacaaggacaaagatggagaatcaagatctggaagaagttgagtttgtaactgtctntgccanggtgtccattttcat

SEQ ID NO: 46872 - DNA, 428 bp, Zea mays
  unsure (1)..(428): unsure at all n locations
ctagaaagttggaataggactccgtatacatagaataccatgatattatatgtttctcgaattctatgttgattctttagaaataatatatacgatattgtaatgtgtgctcgacatcaattgattttatttgagttgacgtatttataataatattatatatttatattgtcacacagattttacatatcatattgatatttgttatttcatatctatgttttacactattgtttaacttatgtggcaagtatgaataattgaaagattaatataggtttgattggatgccgttgcaacgcacagacacctatctagtaataaaataagtttatattntaaataacacctaaataatatttcatctgtaagacacatgttgaaaatagtggattatcgcccgtttacataattacattcggcgaaac

SEQ ID NO: 46873 - DNA, 379 bp, Zea mays
tcacgagagaggcgttggccttgaggagagcgcgctgagttatccctcttttttctccctctcctttctccttgggaaggccctatgcatccccttgtatagatacaaggggatgatccatctatacatatgggggtgtagctatgtgttaacgtggccggcggagaagtgcttgagccctgtataagcgtaactggcggtgcggccctgagtcctgctgacgtttctttgccttcgtagagagctaagaacaatcgacgtcatggacacatgcagggaaccatcattacctgttgctggagtaatctagatgtgacaccagtcttgttccttcttagcctgaagcggctagctaatgtagggtaatgatgtattcttt

SEQ ID NO: 46874 - DNA, 394 bp, Zea mays
agacacctatctctttcttgatttctttcacttcgtgccgccatacaagaattgtggaaataccatcctttgctgagttatatttgctatcaccaacacctagtcatccgacgatcttgggtagacactcatctttattccggctcttttaaaaaaactcctctctttcacctcaattagagaaggggaaggtacccatctggctcttggacggaccctctccttctccatttgcaggttctgtcataactccatcctttactggatttatatcgctcgacttatgcctatttacctgcactcatacatccctgtgcgtaaaacctttaataaaacccttgcataactataccctcacttcatgcttacttcaacctacctttagagcctctat

SEQ ID NO: 46875 - DNA, 301 bp, Zea mays
acctatgaaactcagcttgctccctctcactatagcgacaactctagcgaggaatttctcatcgtccgttcatcttttgggacaacccagaacatcattgtgaccggcttggcgagagctttgtcaccgtgctttcggtccgtcgatcggatctccacttcatcgtaaaaaatcgagatgtctagcagtagtgtgggatccaacgacttgattggaaggtaaggtggtggtacattatgggtctcttcgacgttataggcttgacgctcttcaccagatagatgagcactaccacatacac

SEQ ID NO: 46876 - DNA, 345 bp, Zea mays
  unsure (1)..(345): unsure at all n locations
agcttgagtcaatcattgtgcagaggataatttatgctcataaggataatctgggtatgaagcacatacgagagatgataaggactggagtatccaaatgtatcaaggaagacgatcaaggtgtgatatggtttaaaaaccgcatagtagtgccaaagaacaaagaactccgccagcaaattcttgatgaagcacatcttagtcgttattcaattcatcccggaagcactaagatgtatcaagacttanagcaacattattggtggacaaagatgaanatcgaaattgcacgctatgtggcttattgtgacacttgcagacgtgtaaggccatacacatgaaaac

SEQ ID NO: 46877 - DNA, 407 bp, Zea mays
gtacccaggagatgtgcattaaacaaggcatgataacagttttatctacaactaatattaaaaaggcatcataacagaaatatgcataattttttacattctattatagtcaatcttgggatcgtggccatagtacatttcgtacttgcaaaattaatcagttctgaacattagaactggttgcagctgtcatgctgtcattgagttctcatgctgttcagttatccatgctgtcaacctgtcattgagttctatgctgttgcagctgtcatgcagcgaaaaataaaacgccactaagtcctcatttcagatgaactatctgcatagttggagataaaatgtttctttttaaagagaccagatcatgcagtggaaaaaacataagcccgatatattgtatgagaaca

SEQ ID NO: 46878 - DNA, 329 bp, Zea mays
  unsure (1)..(329): unsure at all n locations
agcttaataatagcaagaaaaattgttgacttatttaacaaaggtagaaaaaattggagaagattatatctacctactaacctaggtaaaaatgttaaacacctctgtccactccatttaagttagttttaccctttattctataatatgcttaaagataaggaaaatagaaaatgtaacttaattaatgaaccagagagtacttcntattttgttaggttacttgttcaatagagttcactggaaaaatatatcataccctggattggtacaaattaagtaaggtatcttttattttaataaaacaaggataactaagaaaaacccta

SEQ ID NO: 46879 - DNA, 415 bp, Zea mays
  unsure (1)..(415): unsure at all n locations
agcttgaaatcgagctctcatgctatcactttttataacattgggcctagatgcgtgtatgtaaagaaaactaccaattattgagcgaaaatagttttaatcaaccattatacctccctcatctaagactacatgaccatttgttgccataggagtcttgataggctttgcattttctaagccaaaacttctgagcatattcttcagatattttgattgacttataaagattccatctttcaattgtttgatttgaagaccgagaaagaagctcaattctcctatcatagacatttcanattcctttgacatcattttttcaaattctcacacaacaattcattagtagatccacaaataatatcatcaacataaagttgacaaacaaacaaatctttgccaatgtttaatgaat

SEQ ID NO: 46880 - DNA, 403 bp, Zea mays
  unsure (1)..(403): unsure at all n locations
tcgtcttaaccatgctctcgtatattcgcgacctgactcctaatgtgcctgttccgaaagtgcctgttcacatattacacttggaaaatattgtcaaactatgcttttgaggaccttcaagagtccaaggcccccaacagttggaatacccacaaattttcttaagttcagtacagaagtaaaactaattttccttaattaaacaaggtttggtccagttctatctttaattntaaactctaaaatttagaacatagagcatacggtttatcatttttaaatgatagatcataatatttacgacttagccaaattagtttgacaactttatattaaaaattcatcatggtatggggtttctaagttctctggtcttttaaaaaataacaaaattgatttaatg

SEQ ID NO: 46881 - DNA, 344 bp, Zea mays
tccgcaatgtgagtggagagatggcgagagtatcgtgtatccacctggcaagaggctggatggtggggtactgagctctcggttggcggggacccgttctggtcttgagaaaaccgtgggcgagttgacatatgcaagggttaagtgctacatatgtcgtgtggttggagatccccagctgggtattaatcgattcggatcgccgaacttctcggatatgaagactggatcttcgaccttcagcgtagataacaagtgaaattaaagttgataaaatgaagctagtgtatgacaagtgaatgctctagaccagacaaatctagattcaggaaaagtacttaatt

SEQ ID NO: 46882 - DNA, 387 bp, Zea mays
  unsure (1)..(387): unsure at all n locations
ntntgaaagctggactgcgatttcccttgagtagcttcgttgtggaggtactgaaaatattcgaagtctatctccatcaacttacccccgaggcaattataaggctaaatatcttcgtgtgggccgtgagaagccagggtctgaagcctgatgcaaaaagtttctgcaatatacacgaattatcatacgaaacaaaaccttggggtaaggaacaatatcacaataattntggctgctacaatttcgtttctcggtccgggtcaagctgtcccgtgccgacctttctgaagagatggcccggcgactggatgacaaaatggttttatgtgaagagtgatctgacagcgcgagaagatatcanaggtataattatgcgccctatttggc

SEQ ID NO: 46883 - DNA, 355 bp, Zea mays
acctaagcacgcagcgcagctaaacaagactgcaagtggacctagtttctttttcactcgcttgatggcgggtatgtcaactagggtagaccagccctatatgcaatacagggaatttaaatatgcaatgcatgcttaacaacaccatttgatattttacataaagtttctgagatcaacaataatttagtccattcctcaatatgcaaaaacgaatcttatcaagcggcttaatgaaaatatccgctaaatgatctttcgacctcactccttctaaaatgatatactctttagcaacatgatctctaaggaagcgatgacggataataatgtgcttggtgcgagagagttgtac

SEQ ID NO: 46884 - DNA, 134 bp, Zea mays
cccaaagcgggacgtggactaacaacatggaacactatggcatcacacatcaaggcaccacctacagatggtgaggtacccctcatgctgtctacactgaatgaatcctagaactaggcattccttgggataac

SEQ ID NO: 46885 - DNA, 430 bp, Zea mays
tactaagctttgcgaagtccggcccattctctcggaccgaagaggaggaacatgcctttcaagagtcgaagcagcacctggtgtctctaccaatactggtagctctggagccaaaggagccgctgtacttgtacattgcagcgactgcgaaagcggtgagcatgctgctggacgtcgaaaggacagagcaagcttctctatgctgtatctgttgcgtccatgaagctgcgccactattattaggcacacaaggttgaggtggtgaccttctttccattaagggccatcctccacaactgtaaaccctcaggcaacattgccaagtgggccgttgagctcgccgagttccagctatacttctagcctttgcacaccaatcagagccacgtgctggctgacttcttcgtggagtggacacctcccccgagcg

SEQ ID NO: 46886 - DNA, 384 bp, Zea mays
ggacctagcaccgagctgcagctgatctgagcttgcacgaagctcttttgtaaaagcactcacaacttcggcctccgggcttgccacactaaacaccgtcagtcattatgggccaataagagtaatatcgccctagatacaaagttcagctccaacttatctagcccctatacagaagtctaacataaccaattgtcaaatatacgacacatcttacaaatgataagattgtaactttataaaaatactaccattgcatggcaaaataagaagagcagtccatgtaaactatacatcctacattgacagaatttgatctttgataaaggaaatgaaattactaaggctacttgcttcagagttcaaaacgatgttgtgaatatg

SEQ ID NO: 46887 - DNA, 382 bp, Zea mays
  unsure (1)..(382): unsure at all n locations
tcgactatggtcaaatnnttggcagcaaaatagtgtaatagcaatgaatgttgtggtaacttcacacctactcgtctgtttatatagtgccgcacgtgggaaggtaaatcgtcaattcttccgcaccggacaaacaaccgcccgcacccactaaatggtgggccacagagcccgagaacgtgaattgtcagaacgtgtgtaactgctgcatggcggggccacctcgcgctcggattattttaatcttttctcggcaacgagctcagggaaggtgtttttcggatcttcggcatcccgaagcctaagagactttntcacggatcaagctcgttacgaaaaatgatctagcaccgcgaaggggctactattggnggtatgcttc

SEQ ID NO: 46888 - DNA, 398 bp, Zea mays
  unsure (1)..(398): unsure at all n locations
gcttggacttntacctaactagtagtgaatgctactttcctctcntntcacaaaagccggacaccatgttgttaaaaacatatatagagagatgtgcatcgatcacactggaatccattatttgtttgaaagcttttatagtagcatcttattaggctatctccattatcttacacaatcacatacccatatatactagagtgaattcactaccatgttctaactttaaaattcttacagcatcaattgtttttttggaaacgagtaataatgataatatttcaatttatgcgtagcactatagctagattcatctgtgtctcatcttacaagtcgaaccttaaattaaaacgctgtgtttatactttaaaattttcacaaaagtaatcgatcttttt

SEQ ID NO: 46889 - DNA, 467 bp, Zea mays
aacatactaagcttaactaagtcatgtagcaagctgattaaccaaaggaatggcatatttcttcatacgacatacacgtcggcttgactattattatcgtaatccgagacaacacatatataacgaacacttaacgaaattgactcctatttaacatgagttggctaatcacagtagaagacttagcgaaccattttagacatcgcaactcaaaacatgggtgggagcaggttacttaatgtttcttaaccctttctcaacttaaactggacaacacacaagtcacttaaaacaccatattttagggggtctaacatagaggcattaacacatggaacaaaacttcataagacttacatttgctaatgaaagtcctaaagcactgatgtgcatatcttagcgagttggtcttcaattttaacaaggaccgacttatgtacgtaactcgcttaaaaatattattggga

SEQ ID NO: 46890 - DNA, 367 bp, Zea mays
  unsure (1)..(367): unsure at all n locations
taagcctcaatcgccctcatgtgaattaacttgcatcaatccatctgggccaggacacgcaacgataattcactactcggntgaagagccccgtcggtccaaaacgcagacatattgcacagaagtgtcaagagtattcttaaattggtgaaataaattcacttcttacattagtattaattattagttcacaaggaatcaaactattctattttataaactagacaaaatgtaaatgatgagaagactatagactacactctttatcataccaaataatctattaagtaatgaagtcatgggtgtatagtacaataatatacatgtttgctggtggaaactaatatgattgactccaaaaaacttg

SEQ ID NO: 46891 - DNA, 443 bp, Zea mays
  unsure (1)..(443): unsure at all n locations
ctcagcttagtgtaagtgagagagatttgttgtgttcttttgagatcttgcgctnggattgctttctttctcattctttcttgcgatcaaactcacttgtaattaaggcaagatacaccaatcgtgtggtggtccttgtgggaactttgtgtttcaattgattgagaagaaaaaatctctctttccaaggaccacctgagagaggaaaagggttgaaagagacccggtctttgtgaccacctcaacggggagtacgtttggtaaaaccgaacctcgggtaaacaaatccgcgtgtcacactctntattcgcttgcgatttgttttgcactctctctctcggactcatttatatttctaacgctaacccggcttgtagttgtgataaactttgtaaatttcatttcgacctattcacccccctctaggcaactttcaattggta

SEQ ID NO: 46892 - DNA, 422 bp, Zea mays
  unsure (1)..(422): unsure at all n locations
agctntgccgcataacaagttttgactttggtaggtgaaaccaacacagcagccgctcctgctccgaaggttccccaagatccatcacaaaacactgtccaggcttcgttatctttattcgtttcctcctcctgagcccctggcgtccaatcagcaatgaagtctgctaacgcctgggactgaatcgaagatctatgaacatattcaatacaaaattcattgagctctgcagcccattttccaatccttccagtagcttcccggttcctcataatatccttcagaggttgtgaagaaggaacaattatgttgtaagcttggaagtagtgccgaagcttcctggaggccatcaagacagcatacagtaccttctccactctgataatttttctttgaagacaaaaacctcggaaacaaatata

SEQ ID NO: 46893 - DNA, 369 bp, Zea mays
tcttacttggtcgacaccaaattctacccctggcgaccctaatccctctaccaattgcaaaattctagctcaaaatctctctatcaacgatgccggcaaaaaccgaggacaacccgaggtgttcccggtgatctagcatggtctagttcaattggctagaccggtaaacatccttagcataccagggtgctgaaacgagggtaaggaggatgtgaacggacctggaaacggcggttcatgacgtggtggttcacggcggcgcggagaaccaaattgggggaagtttgaaattcgtgagctacggtggctaatcggaggcgagggttggtgcactgaatgcataacaacctaacggagctcactggggca

SEQ ID NO: 46894 - DNA, 291 bp, Zea mays
tatacatagaataatgatgctaaatcgaatctgagggatcataactcatgaactgaaacatgcatgtttagagaggcatgcattccatcaattacactgtgttattctgttctagaatttcatgaacttgaaaccctgttatagaggccctcaatcaatttgactgggatttatttctgctctaaaaatatcttcgcacatttatcaattcctttgagtactgtatactactccctccgcacgtaaatctccgacatatgagcgttttgcgcttttctactaaacttcatc

SEQ ID NO: 46895 - DNA, 328 bp, Zea mays
tgactatggcgacatagtggcatatggtctggccatgctcaccaggcctggaggtagaaacctccacaacctgtatcataagtattttatgaaccgtatcttacagacacacacagtggggcaactacgagtgtgcgatatgacttaagagcaaggaaattcccaatggtttcaggcacatactcatgaactgttggtgatatatcactcatatctatcacaagcttactatcaatttatgagaatacaatgacgccctgaaattaagtcggggatgataccacagaagactttgcatgtttacagttaaaaagacaaacatgtttgg

SEQ ID NO: 46896 - DNA, 442 bp, Zea mays
ctaagcgacgcagcatgcaactccatctagcgtagcgcggtcttttttcttattacacagggaagtttgccatatcctgtgcatttatgatcgacatgaagaactatgtttggttaggatctttgtaatgactgtcaccagagtgtgggtataccctacatattggtttaccccttatgttaatggagttagttatataggtgggaaacactttattccactttcctctttatctcaaaaaccgtgtggtccacgttggagatcaccgaagatgctcatttgttcaaagctgttgaaaaaattatactctttcttatgctgcaagagttgcaaatcaattttatgtgggttgcatttgcgatgcacaaaacagcgccaagaagaagcgtctttcaagacgacccctcaccagagagggccccacaacaaactgccgcccccc

SEQ ID NO: 46897 - DNA, 343 bp, Zea mays
cttattaatgtctctcgatataaacctgagacttcaacttatgtgcatgggaacaagagaatcttttcttcttgagaacataccaatatcttatttgcacaaagtgaagaaacaacatatctagatgaaatagaaattctatgcacaagaaatgggcctatgttgttgtacttgccagcaatataaaatatatcatgagaaggacatggtatagttgatctacccaataaaatattttccaaattaccgagctcaaaaagatcatcaaattcaatatagccccaagtatttaaagaagagagcaacattatttcttcagtatcgttggccatacaaattacat

SEQ ID NO: 46898 - DNA, 451 bp, Zea mays
  unsure (1)..(451): unsure at all n locations
gagcttgtgaagattcttcatccctacgtgggctagtcggcgatgccagagctagcccatgttagtcttagcaattaagcaagtgtcgagttcagctctattaaaatcaactaagtatagctgaccctctaacacccccttaaatgctactgaatcatcacttcttctaaagacagtgacacctatatctgtaaaaagacaagnttagcccatnttgcataattgagaaactgaaagcaagttgtaatctaaagaatctacaagaaaaacgttggaaatagaatggtcaggtgatattagcaatttaccaagtcctttgacccaaccttggatttcattcccgaatggtataactctctggggatcatggttcttttcgtaggagaacatccttttctncccagtcatgtgggttgtgcacccactatcaattatccaacttgagcccccg

SEQ ID NO: 46899 - DNA, 451 bp, Zea mays
  unsure (1)..(451): unsure at all n locations
tgacattgtctcccagccaatgccatccttattgtcagagcgtctcccattatagagcatgcttctagcaaatttaaatttttcattttctaagtcatgctcattggatttagcactaagttgagctatgtgataattntgttgtttaattaaagctaggtgttcatgaatagcatcaacattaatgtctctacatctagtacaaatagtgacatgatcaacactagatgtatagggtttgcatgcatttaattcatcaatcttagcatgtaaaatagcattctcattcttaagattggaaatagaaacattgcaaacatttaaatctttagcaattaatttatcattctcaatcttaagggctaaaaagtgattcattcaacttgtcaattttagaaatcaaactagcattatcatttttaagtttgacaagagaatcatcacacacatt

SEQ ID NO: 46900 - DNA, 422 bp, Zea mays
  unsure (1)..(422): unsure at all n locations
ctgcagctcagtaaataatattttcttcacagcttataggatgatggatgatagcttaagagatatgaatggccaacgaatacatactgcgacaagaatactcccagcctacacagcattcgttccgaccctccatgctgtntggacagctgttatcatatatgtagtgttaatagaataacagaacctatatttcattgcgttaagaaaagcaaatcaccatatattgctccgagtcctaggaggataataaaaaaactacagaggcatccatagaaatataagtgacccaacatgaaggcatcatggacaaaatcaacgatgagtcattaggcaagtcaatattcggtatagtaggcaagacaatattcgcactgagtacggtttgccgctcggacttgatgcttggtcctaaaccctga

SEQ ID NO: 46901 - DNA, 472 bp, Zea mays
  unsure (1)..(472): unsure at all n locations
tattacgtgcactatgaatactcagcttacacctctgaactaactcggctgcatcattctttgctgttggccaatagaatcctgacctgaagaccttaccaactagtgttctggaggctgcatgtattccacattgcccagcatggacctcctccagaagttgctttccagtggacgggagaatgcacttcatgagaacacctgatgcaccccttctgtataatatctccccaatgagtgtgtagtgagccgactgtctggcaatgcgctctaccgagttcttgtcatctggttcttcttcattctttatatacttaatgatcgaccttctccagtcgtcagagtctgactcacgttgatctatgatgttgcactctttctgttgatccattgagatactcngctcgtggaattcttgcatgaagattcaggtgggacctgagttcgactggatccgagcttggatagtaca

SEQ ID NO: 46902 - DNA, 212 bp, Zea mays
  unsure (1)..(212): unsure at all n locations
agcttctctcagctgatgcactagtacatttcttaaataatatccggggaacgatcgagatatatggatatgaatccatntgccgaacatacttaaagatctncatagaagacattggactttcatgtaaacttagctttaagcagttgaagccgtgacctgtgctgagatttcgtgaacaggcagctcaacacgactggggaccaggcata

SEQ ID NO: 46903 - DNA, 355 bp, Zea mays
  unsure (1)..(355): unsure at all n locations
agcttatgaagattcttcatcccaacatgttagtgacagagccagcccatgttagtcttagcaattaagcaagtgtcgagttcagctctatcaaaatctaccaagtatagttgaccctctaacactcccttaaatgctattgaattatcactcctaanaacagtgacacctacatcagtaaaaagacagntgtagcccatttgacataattgagaaacggaaagcaaattgtaatctaatgaatctacaagaaaaacattggaaatagaatggtcaggagatatagctattttaccaagacctttgaccaaaccttggattccatccccgaatgaatagctcggtggggatcttg

SEQ ID NO: 46904 - DNA, 395 bp, Zea mays
tcacgagagaggggttggccttgaagtgagtcgtctaagtagcgtcctccgcctttttcccctctctctgcgtgtcgtgggaaggccctgggcatccccttttatagatacaaggggatggtccagctgtacatatgggggtgtagctatgtgctaacatggccggcggagaagtgcttgagccctgtagaagcgtagctggcggtgtggccctgggtcctgctgacgtttctttgccttcgtagagagctgagaacaatcaacgtcatggacgcatgcagggaaccatcattacctattgccggagtaatctagatgtgacaccgctcttgttcctttgtagcctgaggcggctagctaggggtagggtaatgatgtatcccctatagcgtaat

SEQ ID NO: 46905 - DNA, 435 bp, Zea mays
  unsure (1)..(435): unsure at all n locations
accttaagtnacctgcggcatgcaagcttcgngaagatggtctccgaagctacacttccgaagatcaatagtggatctgcctgcaacttagcatgatttttccctttcaaaacattcttccgaagatcgatggcatgtccccttcttgtgccatatgcagcatgatgtatgatgcttatgctatgcgaaatgatgcgatgatgttatgttgcgtaagatggtggttattccgaagatacacacacatccctgcgataaacacatagtctttttgaatcagcgttgtctttttactattagcctcccttaggagctttttcgccttttacttcaacggaatcagcgtntatttttcgctggaagcctccctatgagcatcttcgccctttactttcagcggagttcgcgttgacttttcgcgcttcgtcttttact

SEQ ID NO: 46906 - DNA, 466 bp, Zea mays
tattcatcccggtctgttttctgtttcaacttgaaaatattacttattgtccatagttggtgtcagcaactaatgtacataatacttagttccttaaactagcaatacaccagtcttacgattttagggctcgtagtggatcataacacccttcttcccgtgcagtggtcgtggcagcaatgctgatgatcctactcaggatgataggtaaataatggagagtggtcatgtgcattaacttcttagcttatctgttgaagtattccttctaagttctgtttcctgtgatgataggcctatagagcgaaagctttctaaccagcaaaattcttcaccaccaccgaactacgaagatgtcacaagagatggccaggacaatcttcacgatgacaggtcgggattattagttggatgctttaatttcttgcctgagcaatgtctggatgtccccttcggctgaaatctc

SEQ ID NO: 46907 - DNA, 387 bp, Zea mays
acaaagttctatgaaggatccattcctcgcgcagctttactcctggttttcttcttttgataccaccttagaacagaagcaacaaaagttggttgcttcctcacctaaaaacaacatgggacaaagccctgagtacgaagtgtactttcgcaagacttacctgaccaagtaaaaagactctcacagatatgctggatttaggaatcaaggagaggctttagcaagaatcaacttaaatacttttgcagaaaaagcttactaaagtgagtccttactttcaatattttaacgccagattaagtattaatagactcttgttgcatatggtctacttttacaatctcatccatacaacatcatttttattcatgaggttcacatcctgac

SEQ ID NO: 46908 - DNA, 418 bp, Zea mays
  unsure (1)..(418): unsure at all n locations
tcttcttcattctgatgaanaccaaaccctttgaccacttcatctaaacaaatgttccaactccgagatgcttgcttcaacccataaatggatttctgaagtttgcatatctttccagcattgatcggatcgacaaaaccctcgggctgtatcatatacacgtcctcatctaggtttccattaaggaaagctgttttgacatccatctgccaaatctcatagtcgaaatatgcggcaatagctagaatgatccgaatagatttaagcatcgctactggcgagaatgtctcgtcatagtcaactccttgaacttgtcgaaaaccctttgcaacaagtcgagccttatagatgtgaacatttccatccatgtctttcttcttcttatagatccatttgcattctatgggtctaacaccat

SEQ ID NO: 46909 - DNA, 359 bp, Zea mays
  unsure (1)..(359): unsure at all n locations
agctntagctctgagagcgattgagtcattcttcactttctttgccaaacttatagcatcgacttgagatttcttgaatatatctngagtaagaattccccccaatacttcggttggagaaattgtagatagatcacttcttaccaacatggtcacaatagtctcatacttctccagaagagatctaacgaacttatgagtgaaatccacattcggtacattaaaaccaagtcccttgagctcattcactatctcatttaaccggntgaacatatcggatacactttcatcttctgtcataatgaagtgctcaaattttccttgcacacatatagctttgcactcatcacagatggagt

SEQ ID NO: 46910 - DNA, 365 bp, Zea mays
  unsure (1)..(365): unsure at all n locations
tctaaagggagaacacattntaggactaacaaatgttcattttgtgaaagacaggatttgtagcgcatgccaagcagggaagcaagttggctctcatcatccacataagaacataatgacgaccgataggccactggagctcctacacatggatctattcggcccgatcgcttacataagcatcggcgggagtaagtactgtctagttattgtggatgattattctcgcttcacttgggtattctttttacaggaaaattctcaaacccaagagactttaaagggattcttgagacgggctcaaaatgagttcggcttaaggatcaagaaaataagaagcgacaacggaacggagttcaagaact

SEQ ID NO: 46911 - DNA, 390 bp, Zea mays
  unsure (1)..(390): unsure at all n locations
catgtgctaagcggcgatgccacagccagcccatgctagtcttagcaattaagcatgcatctagaccggccgtcttctttgcaaaaacaactaaataaagtttgccgtctaatacacccttaaaagctagtgaaccatcacttcttctaaagacagacacatctatatttgtaaatagacagntatatcccatattgcataattgactaacagatagtaaattatatcctatagactactaaaaacacattagagatagaatgctcattagaaattgcaattntaccntaaccctttaccttgccttgattcccatcaccgaatatgattgaatcttggaatcctttatcttgacgaagaggtgaacatcttcttcttccccgcatatgg

SEQ ID NO: 46912 - DNA, 455 bp, Zea mays
  unsure (1)..(455): unsure at all n locations
cattacggacctataaaactcagctttaaaggaacacggaagngctacttatgtactttcgaaaaagatagaccttgtgcagcttgtcaagcagggaaacaggtgggaagccctcatcatgccaaaaatgtgatgacaacatcaagacccctggagttacttcatatggacctcttcggacccgtcacctatctaagcatatgaggaagtaagtatgttcttgttatagttgatgatttttcccgcttcacttgggtattctttttgcaggataaatctgaaacccaagggaccctcaagcgcttcctaaggagagctcaaaacgagtttgagctcaaggtgaagaagataaggagcgacaatgggtccgaattcaagaaccttcaagtggaggagtatcttgaggaggaatgaatcaagcacgagttctccgctctctacacaccacagcaaaa

SEQ ID NO: 46913 - DNA, 363 bp, Zea mays
atatcagcatgctgaacagatcaaatgcttgctgtatcttactccgttttttgtgattgcgaaaccactgtgtgcaaccactcccagactgtggttgtgtgcccaggctgccaaactgttctgtgccaacctaccggtgggaaggccaggctcaccgaggggtgcttcttccgtcgcaagggcgattatgtcctgcttctcttaacgtgagaagagatatattttgggttttgcaactttctcacgatatgtactcggtgaggattttgttaattattatggctggtagcgtggcctgacaatgcttgtgtaaacctgcactctgtttgagcgtagtgacagctaatatggtgttgtttggct

SEQ ID NO: 46914 - DNA, 403 bp, Zea mays
  unsure (1)..(403): unsure at all n locations
agtgggggcccaganagctgcaaccaaatcttaccatctgtttcacagattaaaaaggtcatgagacacgtgtaattgtggtggaatgactaacatttgcagctattctgtggcagaccgacaaagatatctacgacacaccaccctatatagcaagattcttctttaactagattacgaaatcaaaataggtgacattctcaacattgtaacgttcattacgcatattatatcgatatctcaaccagacatgtaagctatacttgcacgtccaggaaagaggagatcgttgtaaacatcaccgatgcagtaccatcggcanttttgctgtggtcccatgctcttgaccaccgaacctatgggtcggcacttcaccaaagcaagcgaatcttattgactacat

SEQ ID NO: 46915 - DNA, 423 bp, Zea mays
tgcagcttccaaggcatgcaaggggaatcacctatcaattgctcatgagacgaaagccagccgaggagactaggtgtgcccagctagcaaaactatcagctaactcgcgtgtgaaaatttaagttttttggaatttggataaaaatgagtactgctttgagtttggttctaagaggttctgcgtttctgctgtcttgttgggtctccgtctattttgaagttaggtgaaataacagtgctgtcaaacctttgacagaaaaacatcaaatgcaaacatttcatgttgatattcactagcattttcagaaaaaagaaatactattgcgcaatcaagtttctcgtgccatcgtcgtaccattaaactaccaaaaatcatgaaaatcttaaaatatagatgtacttcttatttactctaccaatata

SEQ ID NO: 46916 - DNA, 449 bp, Zea mays
  unsure (1)..(449): unsure at all n locations
ntgaccacttgatgaacttgaaagaaccagaaggggagttgagaatagctccgttgttgaagacacgcaacgccgcttgctcattttgcatgataataatgaagtcttcaggcgctgaacggtgaactgaaaaacttgcaggatcaaaatcatactccgctgcaacttctgccgccaaaagctcagctgacaccggcggccgcgaaccaatgaccatgacaaacagagcacaccgccgaagattgttctccaccagagttaaatcccttgcacgctcaaggacgcaaaccggtcgtgtcgccgaacctgcagacttcaccacggccggctgatgggagggtagccgagcaaagcaaaaatcatccactggtggcacgctagcagcgcccccagaacggngccttctccccctggtgcgatgacgacccttctttgcacgatgcaacgac

SEQ ID NO: 46917 - DNA, 397 bp, Zea mays
tcgaccggatctctaagcacctgccgcatgcaagcttcgacgccgacgactgcatatatgtacatggtcggcagccggcgtcagacaaactaggtgtttatacacagaacaatccatggcactatggcaggctttaatttgctgcaccgatggacggaatggggctgtactgtacgtctgtacgacgcacgcaagctgcgggataaatacaatctgcatttgggggaagaggtataccgtatgcccaagtgagctagctctgcgtacacgcaccactacttacccggctcgcgttccggcggcgtgaggactcatggaggagcgcctggagcttggagatgagctcgttgatctcgtcgtcgctgatcctgccacgtcgccccgacgacatattttc

SEQ ID NO: 46918 - DNA, 435 bp, Zea mays
  unsure (1)..(435): unsure at all n locations
tgtggtgagccacgaganaatcatgaaagccctaatatcatcttataagagaagagatgaagcacactgagccaaagaaagtggtccaaagagatccgtctagattgcactatgaagtggttattcatgactttctcaatggagacttgcagctcttgtggagacctgaacttcgtagaggtttacttttgggtgattcaccccgatctacttgttcctgtgttctctgttgtttgttttgcaaagaatcaattcactagatgcatatctatctttgataacaagcatattcaataattattatatatataaactttgttgatttaagattgtatgttacccagatttgttttttttactctaggaggttcaaaaaatcgatatatttttaggcatactaatgtaacccactctagacgacatctcaatcccaat

SEQ ID NO: 46919 - DNA, 376 bp, Zea mays
  unsure (1)..(376): unsure at all n locations
agcttgcctgcgctcgggttcactcttggcttgtatcaatgtaacatgaatacatgatcatgtagagtttatactaactctagcaactagataactccattcctttgtgtttgagacactttattgctaaaatttctggacgcacacacaaccttggactcttcattgtccatataattaatttcgaacttatgaagggtaaggctgtacctacatacaagagaatgggtggnctgagcttgtgcatgatctaccataaccgttggtcctatataccacttgcctgactcatgtagaacttttggtttctttatacagatgtacatatacccttttatcttagatgacagaagtctcattatacatttgtcatatg

SEQ ID NO: 46920 - DNA, 442 bp, Zea mays
  unsure (1)..(442): unsure at all n locations
tagcagatcacagtgcacaagagctaataattgagtgagcttaagtggttggccagaaagcgtgctaaatgagtttgcggtatggccgtatttatacgctcggtgcgttgaaaattcaaagaccccacttgtcagtgaatgttgctattctagcaaggggaaggtgttttttctgaccttcggcgtaaagccttcgtccaggtcgcaatctgaattcgttattataaacaaattaatattgcgaggggctactgttgggaacctttggcatccgaaggtcctcaaaaacaggatttaacagtatttctggagtacaatgtgtgaacaggtatcctcngacaagtcggcattgctgtataccggaataatacgaacgttgatacagagccgaaggtgtgaccggaaagcttcgcgtgacaccaagagggaaccgacttaagat

SEQ ID NO: 46921 - DNA, 466 bp, Zea mays
  unsure (1)..(466): unsure at all n locations
ggagggagctaggcgagctgcacgggaggagcactcatggaggtacgccggcgagggagcacgagagagaatggagtggctgcgcgcggcgaggaagctctagagaactgccatgggagctcagcagagaggaaacacacgggatgggagacgcgctggcatgggaggaaactgggggtcgcggcatgggtgatctggaacaagcgagcagaggggcgtggtccgagcgccgggcgccgggcggagtctagggcgtgaccccaggcgagcgccggctggaagaagagcagcgcgcactggaaataacgacggccgggcggtgggattnttcttcacacgttgagcggcacggccaggaagatcagcgatcggcggtgggagataagctccatggctgaatccagagcacgctggagaatcacggctgaagattgaagcctacgggagagagacgcgtgggaggatg

SEQ ID NO: 46922 - DNA, 284 bp, Zea mays
  unsure (1)..(284): unsure at all n locations
aaacatgacacacctcttatcggngaaactttcacgtagacataatctccaactagaaagtacaagggttgtcgtcgcttgtctgcataactcttctgacgagcttgagctgtctttcaaactatgaattattcgttgaactgtttcttcggtctcctttaccatatcagggctgaagaaattctttcacctggttacactagttaaacgagtacgacaccgtcatccatatagggcttcaaaaggggccatcttaatgctttcttgatagctattattatatg

SEQ ID NO: 46923 - DNA, 352 bp, Zea mays
  unsure (1)..(352): unsure at all n locations
tagagagtagaatatgcaatttgcacgtactaaatcaatctaaattaganagagaactctccaaacaagcacataataaggattgactgctgtgatgagctagtgtctttaatatatagctattatatattgctcttttcagtagctgtgcttgacatacagaagcatctgtacttcttgatgaggcatgcagcggttaaagtgagcgagtgagcaaagggaatttatatataagcatctctgctctcctgcatgcactcgtggagctggaataataaatataaataaaaaaccccatagactagggctaatagtaacatttaccagaaaagttgatgggtgattcgatccc

SEQ ID NO: 46924 - DNA, 363 bp, Zea mays
  unsure (1)..(363): unsure at all n locations
agtatggccctagcttatccctatcacggcgacggtgaataccggatacaaatccaagcgttccggttgattgagtgtggtcaagcataaagggttgagccgatgagtatcgcgagtatgcacgggtgctaaaacatgattaaagagagcatgagcagacctgngagcgactggccacggagcgcggagaattctgctcaccggcatctgagaaaggggaaatcggtgccgcgacgggctctggtggaattgggaggtgaggttgggctatacggtcacaaaaggctactgattcaccgtgcaccactaatttanggagaggtttaaagattccgtgaatttgtgcttcaaccgagctcactg

SEQ ID NO: 46925 - DNA, 491 bp, Zea mays
  unsure (1)..(491): unsure at all n locations
tctagagggagagcacattntaggactaacagatgtccattttgagaaagacaggatttgtagcgcatgtcaagcaggacagcaagttggagtccatcatccacacaagaacattatgacaactgacaggccgcttgagctactccacctagacctattcggcccgatcgcttatataaggatcagcgggagtaagtactgtctggttattgaggatgattattctcgtttcacttgagtattctttttgcaggaaaaatctcaaacccaagagaccttaaagagattcttaagacgagctcaaaatgagttcggattgagaataacaaagataagaagcgacaatgggatagagttcaagaattcacaaattgaaggttctcttgaggaagagggcatcaagcatgagttctcttctccctacacccctcaacaacatggtgtagtggagaggaagaatagaactctactggacatggcaagaaccatgc

SEQ ID NO: 46926 - DNA, 375 bp, Zea mays
gcttagctaggcacacagatgctctattctgtctgtgtgctacaatgtacgtgctggatgatgtatagcatatgaaaacaagacttggcgtgtgtgagcagccgagtatcttggtaggcgtgtcgacgtacagtcaggcacatatatggatcggacagcatgcaggatgatcgacataagtttgcatcgtcgtcgttcgtccgtgcatgcacgtacgtatagtgtagtagtagacgccatctttctgggacggaaatttcctggaaacaaaggcccggccggcagccgcagttcgtctccttttgcttgaaccgcggcgtgccccgtgaaaagcaggcagatcactgactcacatggcgaccacacatggatatg

SEQ ID NO: 46927 - DNA, 376 bp, Zea mays
cttaatcaacacaaaccgacgaccatgtcaactcatcgtctgatatcgatgtattcaaaccatcactaccggaatgcgaagctttgccgagtgccttttgccgggcactcggcatagaccgctatgccgagcgccaccctcggtaaagttaggctctcggcgaagagcctctttaccgagtgctggacactaggcaccgggccccactcggctaagactgcttcgccgagtgtcaaacactcggcaaagcggctctcggcaagggacggcgtcacaacccgttttagacggcagaccgaatgtgaaccatgtacgcgcccggatcaggcattcacgtacacagcagttacataatatggacatcatcacacagtgc

SEQ ID NO: 46928 - DNA, 480 bp, Zea mays
  unsure (1)..(480): unsure at all n locations
gatccttaagncacctgcggcatgcaagcttctaattaaatcatgactgcgcctaagtagtgttattattagagtgaaagtggatgtgttgctacttcccacnttccttgatgagcaacaagcacctgcattgagtaatgcaagagtgagatgaaacatctcagcaagcgaattattttgacgagatatttaaaccacaaattgaattcatcaacattttaaaagagtcacaattaanatcagaaatacttgtagatatagaactcagtagtcccactataaccaataccatctcatttcctcgaacaaccacaataggttctataacacttccctgcgtcaacaatacctgcaaatatcacttcaatgtatgcataggaatgcaatgtgtaggtactctatcttcatacctctgagggtataaaaccacatcattcgcaaatatcacttcaatgaatgcatatgaatgcaatgcatatg

SEQ ID NO: 46929 - DNA, 470 bp, Zea mays
  unsure (1)..(470): unsure at all n locations
nttcacagtntatacggatgcttcttgaattggtcttggctgtgtgtngatgcangaaggcagagtgattgcttatggctcgaggcagctgaggaagcatgaggggaattatccaactcatgatcttgaattggccgcggtggtttttgctctaaagtcgtggaggcattatctntatggcgagtcttgtaacatttacaccaatcataaaagtctcaagcatattttcactcagaaggagctgaatttgaggcagcgtcggtggcttgaattgattaaagattatgatttgtccattcattatcacccgcggaaggcagatttggtggctgatgccctaagcatgcccggggttccaaaagtggcctcgccgttgatcgctgatctggaccgtctggggatcgctttgtgctatgtcggcaccactagtgaggagactccgatgctnattcaatcttccctcatggaga

SEQ ID NO: 46930 - DNA, 494 bp, Zea mays
  unsure (1)..(494): unsure at all n locations
agcttactcctccctgagaaaggcccttcatcatcactaatattntgaagcccgagacatacaagctggccaacaatcaaggcgaggtctacagcaacgcttggaacatccaacagctacgccgcttntacccttaaaatgtttcaagtcgttcatgtatctcgctttctttacatgcataaataaagtctaaccatcaaggaaagattagtcttgcctcggcaaagcccgaccctccctcgggggctagaaggggggaactccctctgcgtcaaaattttcctcggaaaaatcttttaccataacgtctttcgcgcttttcgactgcgtcgataacagaatcctaaagacgagcgagagagaccttgaatggcaaagccgaccgagccgagggacttttacgcctctgggatacggatacctcactcatcacctttcgcgaaaataactcacgctcngataagcgaatctgctactgaacaagttctaacact

SEQ ID NO: 46931 - DNA, 499 bp, Zea mays
  unsure (1)..(499): unsure at all n locations
aagctntatcanatggacgtgaagagtgccttcctcaatggaccaatcaatgaatatgtctatgttgagcaacctcccggctgtgaagatagtgagtaccctaaccatgtttataaactctctaaggcgctntataggctcaagcaagccccaagagcatggtatgaatgccttagagatttccttatcactaatggcttcaaagtcagaaaagccgatcctactttattcactaaaactcttgaaaatgacttgtttgtatgccaaatttatgttgatgatattatatttgggtctactaacgagtctacatgtgaagaatttagtaggatcatgacacanaaattcgagatgtctatgatggcggagttgaagtatttcttaggatttcaagtgaagcaactccaagagggcaccttcctaagccaaacaaagtatactcaagatattctaagcanagttgggatgaatgatgccaaacccatcaagacacccatgg

SEQ ID NO: 46932 - DNA, 483 bp, Zea mays
  unsure (1)..(483): unsure at all n locations
ttacagcacctgaggctgcagcgtggaagtcttatcccacatgttctttctgttatgttacagccagcccatgcaagtcttagcgcattaagcatgcatctagaccggcctcttctttcgcaaaatcaactaaataaagtttgccgtctaatacacccttaaaagctagtgaaccatcacttcttctaaagacagacacatctatatttgtaaacagacagttatatcccatattgcacaattgactaacagatagtaaattatatcctagtgactctactaaaaacacattatagatagagtgctcattagaaattgcaattntacctaacccttttaccttgccttgattcccatcacagaatatgattgaatctcgggaatccttattcttgacgtaagatgtgaacatcttcttctcccacgtcatatggattgtgcatccgctatcaataatccagcttgaacccgcggatgcataaa

SEQ ID NO: 46933 - DNA, 462 bp, Zea mays
tagcaagtgcgagttctggatccgtgaagtcttgatcttgtgtctcattataaaccaagagggattggctgtagatccgaagaagataacaactatcttggactggaaagcaccaaaagatgtccgaggaatcaagagtttcatcggaatggccagatattatcggcgtttcattgaaggcttctccaagaatgccaagccaatgacagccttgttggctaagaaggttgagttcaagtggaccccagcatgtcagaagtcctttgaaacattgaaggagaagttgacaacggcaccagtactgattctaccagatgttcacaaaccattctcagtatattgcgatgcttcatacatcggactgagatgtgtgttaatgtatgaagggagagtagtggcatactcgtcccgacagttgaagattcatgagaagaattatcctactcatcttctagaattagc

SEQ ID NO: 46934 - DNA, 428 bp, Zea mays
  unsure (1)..(428): unsure at all n locations
cttcatccccacatgtgctaatcggcgatgccacagccaggccatgctagtcttagctattaagcatgcatctagaccggcctcttcttttgcaaaatcaactaaataaaagttgtcgtctaatacacccttaaaagctagtgaaccatcactccttctaaagacagacacatctacatttgtaaatagacagttataccccatgttgcataattgactaacggatagcaaaatatatccaagagactctactaaaaacacattagagatagagtgctcattagaaattgtcaatttacctaacccttttaccttgccttgattcccatcaccgaatataattgaatcttgggaatccttattcttgacgtaagaggtgaacatcttcttctcccccgcatatggttaggcatncgctatcaataatc

SEQ ID NO: 46935 - DNA, 400 bp, Zea mays
tctgacatgtgggccctcctgtgtgtccggtgcacatctgttagctactgttccttgtccggtgcaccggtatgggctcgtctgacatctgcgcgcgcagagcgcgcattatatgcgcggcagagagccgttggcgccgactagccgctgctccgtggacgcaccggacagtccggtgcacaccggacatgtccggtgaattatagcggagtggccttcgaaaaatccgaggctggcgagttccagagccgcgcctcctttggcgcaccggacactgtccggtgtacaccggacaagccggtgatttttagtgcggcggctcctgaactatccgacgctgatgagtttgagcgcgagttcccctggtgcaccggacactgttctgtgcgccaccggacag

SEQ ID NO: 46936 - DNA, 358 bp, Zea mays
  unsure (1)..(358): unsure at all n locations
cagcttgtggaagaccaaatcattgaagcttataattttctggatgagaagtggtcacccaagttttgttgatgaagcaccagaagaccaatcaaggaaggaatccatgtgggagttcgcaagagaaaggtttgtgtgttggcatcgatgcttcctcaataagctagctgccaagcgaaacctagaagcctgaagatgatccttgagtagccagaatcagcgtttgcaatcggcaaccagatgctcctcaatggccagatnttgttgaagttccatctcctcgaagagtctgcaaagtgaagatatgcagctgaagtaaagctatacccataacccttctaagccgaatctcgaggac

SEQ ID NO: 46937 - DNA, 223 bp, Zea mays
aacaaatctgaactggtgtatatgtgtgagcactgtactcgacgtctcgaacgaacatgttgcaaaaatttggcgcttgatgtatgaaaacgcctcttgacattggagattcacgtacaagcacttagtccttgacgggcagggcccattcagccccctgaagcagttgcatacttgtactggaggtgcgacagaaaacttgagttcagacttggaccatacg

SEQ ID NO: 46938 - DNA, 478 bp, Zea mays
  unsure (1)..(478): unsure at all n locations
agctngcaaaggcgatttatgtccaaacgccttcaggcagacgattcagactataaccctgccacaaactctgaggctcaatcatcagctggaggcagtgtttcattggatactgaagatgctccccaccctcatccagactatcctattgatattacaagatggacatatcccaggatgcgaatttccatggctgagtattcctctaggaggaccgtggatcaattntcacttcccaatgacaccaacatccaatacttccatactcatttacagtttgatgttttctggggtactctgatggacataaaatttcataagcatcaagttattgactaggactatatgcagagtcaaacaattatggaagggatactcgctaagttccaggcatgtggtttgtatgagttcatgggtcaacgaactaacttcaataaactaactggcnagtagtttcttgcaactgctgaaatgaata

SEQ ID NO: 46939 - DNA, 480 bp, Zea mays
gggtggtgcccttcatgacttccgtcactataatgatttcttgcttattcggcctagctgccttcttcgttttttcgggctccttttccttcttaaaaagcttcgtcagatgtggacttagcttgacaggcaaagattcagtcattacctttaagatttcctccacgtcggtggcagagggtgttgcagcagcttcttcttcttcatcaattgccttctgcttcggagatgtagcttttctcttcttcgaagcatatgttttcggctcaggcttcagctgtttctttgtcaattgttcttcatcgtcttccgtcgattcagtagcttctttattcaaagcaccagccactctctttctcttctgcccttcggcatgcttgtctagccgctcgtagtcgggatactcaaaatccagagcatccattactcggttcaaccttcgcttcggacgggtgccgaatgctgcagtcattagttgtc

SEQ ID NO: 46940 - DNA, 498 bp, Zea mays
  unsure (1)..(498): unsure at all n locations
agcttctaaagaggagaacactgtgatatggttttatctatcttgcatnttcgaaaaagatagaccttgtgcagcttgtcaagcaggttaacaagtgggaggagcgcatcacagcaagaatgtgatgaccacttcaagacccctggagctgctgcatatggacctcttcggacccgtcgcctatctgagcataggagggagtaagtatggtttagttattgttgatgacttttcccgcttcacttgggtattctttttgcatgataagtctgaaacccaaaggaccctcaagcgcttcctcacgaaagctcagaatgagtttgagctcaaagtgaagaagataaagagcgacaacgggttcgagttcaagaaccttcaagtggaggagttccttgaggacgaaaggatcaagcacgagttctncgcttcctacacaccgacagcaaatggtgtggtagagaggaagaacatgactcttatcgatatggcgacgacaat

SEQ ID NO: 46941 - DNA, 392 bp, Zea mays
  unsure (1)..(392): unsure at all n locations
tgacattccctatgctgttcagcaagtatgtttacatatgcatgatcctcgggaaccacattatacgtcgatcaaacgtattcttcgctatctgcatgggacattggatcatggcttacatcttcgccccacagatgtttctgctctggttgcctactctgatgctgattgagccggttatcctgacacccgtcgttcgacctctgggtatgtgttattcttggtgataacctcatcccttggtcatccaagcgtcagcctactggtttccgttcaagtgctgaagcagagtatcgtgcagtggccaatgccattgctgaagctacctggctangtcagctccttcaagaaatgcattctcccctgaagcacgccactgttattctctgtga

SEQ ID NO: 46942 - DNA, 485 bp, Zea mays
  unsure (1)..(485): unsure at all n locations
agcttctgtaatatacacgaattatcatatgttacaaaaccttggggtaaggaacagtatcacaattaatttggttgctacagttttgtttctcggttcgggtcaagctgccccgtgccaacttttcgaaagagatggcccggcgactggatgacagaatggttttatgtgaagaatgatctgacaatacgagaagatatcanaggtataattatgcgccctatctggcaaagcttcggccttcggaggccgaaggttgaaatgaatgaagctgccgaagaatgccagagagccttcggcgcagtctgctctttcattggaacgagagacttagtacaagagcatattgccttcagggtatggccgctcgcggagaaatgggaaatgccacaaganaccgtataagaggccgacgaaggtggacttatcaggttgaagtacacttttaaanttggagataagtttgttgagccagatgatgactg

SEQ ID NO: 46943 - DNA, 485 bp, Zea mays
  unsure (1)..(485): unsure at all n locations
tagtatgcttactgagttcattaatgagaatatgtatgcttgctatgaatacttcattatgggtgacataaacttgtatgtcatgcttctatgtatccataaacaaggcactttgggaatacttcattttaggtgatatgaacttgtatgtcatgctaattgtattcatgaacatggcactttggattatatgagtgttgtgatgactcgtggtttatatgttatcatgtcaaatatatgcatgttgtgatgaacttatatgtcatgctaatgtctatttcagtgactcttcaaccaaacaaaggatggagccattctgttctagttcactctgcaaccaaacaaaaaatagatctgctctattctatgttaccaaatacagaacagagcggcttcgttcctagaatcanggatggaacggcttcgttctacttggcttctcaaccaaacactaccttaatcaagttatcacatgtttctacttc

SEQ ID NO: 46944 - DNA, 381 bp, Zea mays
ctttggctggattggctccgggagagactttataatctcctcctgagtatagctcaagctgaccggtctgagttcagtgttgaagattgccttgtgttgggttaaccaattcatacccaaaattacatctatatcctagcctttcagaacaatcatgttagcaagaaagttccgtccggccattggtactggcacttcataggccacttctctagtaaaaatgtgtcccccaggtgaatgaagtttaaatccctcttttgattcatggcatgcaatgtgatgttgctccacacatttcttgctaatgaaagtatgcgaagcaccagaatcaaaagaataattgcaaggtgactgcgcacgggaacgtacccatcatcaccc

SEQ ID NO: 46945 - DNA, 458 bp, Zea mays
  unsure (1)..(458): unsure at all n locations
cttcatccccacatgtgtttatcggcgaagccacagccagcccatgggagtcttaacaatgaagcatgcatctagaccggccttctcttttgcaaaatcaactaaatagagtttgccatctaatacacccttaaaagctaatgaaccatcacttcttctaaagacagacacatctacatttgtgaatagacaattatatcccatattacataattgacttacggataacaaattatatccaagcgactctactaagaatacattagaaatagagtgctcatttgagattgcaatcttgcctaagcctttaaccttgccttgattcccgtcaccgaatatgattgaatcttgagaatctttattcttgacgtagaaggtgaacatcttncttctccccgtcatgtggtttgtgcatccgctgtcgataatccagctagatccctcggatgcataaacct

SEQ ID NO: 46946 - DNA, 359 bp, Zea mays
  unsure (1)..(359): unsure at all n locations
tgcaagcttgagcagtgaccggcttcgtctgaaacccttgaaagctggttaacaacaagtccttcagcttttgccatgaagtgatcgttccangtcgaagggaggagtaccaggtttgagcaacactcctgacagccataacaaaagatttggccatgactgcagcattgccaccatacgaagatactggtgcttcgtagctcatcanaaactgctttgggtctgagtggccatcgaatatgggaagctgaagcggcttgtaagacggaggccaaagtgtagcctgcagctcagcggacagaggagaagcatcatcaaaaacaaaattcccatgataggaaatgtcataccagtcatct

SEQ ID NO: 46947 - DNA, 429 bp, Zea mays
  unsure (1)..(429): unsure at all n locations
taagcttntcaccatgtcgctgctagccaagttgttgcagctacctccatcaatgatcaaacgacatgaacgctccttaatgacacactntgtttgaaacaacgtatgtcgctgattctgctctgccttctccatttgtgcactaagcacacgctgtacaatgaggctctcataatgctctgcatcatctgcaccaatctgttcttcgggtggttccttagtgcctacatcatcagccgcaagcaaagcaagtgtagcttcatccaaatcactagcagaggaatacccaccatcgtcttttaccaccaaaacacgctgattaggacaataacgctgcacgtgtccatagcccttgcatcgataacacagaacatctcttgttctacctgtggaagctactgaagaggcactacctgcgggtttctgggc

SEQ ID NO: 46948 - DNA, 401 bp, Zea mays
  unsure (1)..(401): unsure at all n locations
aatcacatttatacccctgagataccagaaaccctaattggagccctggaaaaccctgaaaccaaactctaggggcttatgtgcaaaagtgatgaaactttggactaaagtggtaaaactaccatgtttaaacatataaagtcatttggttcacaaatatgtggccttgaaagccaaaccctaagttttggacttaaatgcaaaatggacctcaattgagttctattctaagtctgaaaatcatagaatnggctcaactttggagctttgcatctttcaaattataagggttttgccctatgtcaccacatncaaaatgtagcccaattataggagaacaactttgctaaagagtgtgagctcacgtgtaagaaaaaattggagataatatgctcaaactt

SEQ ID NO: 46949 - DNA, 483 bp, Zea mays
  unsure (1)..(483): unsure at all n locations
tcggcacgatggcaganaatgaaaccaacttataaaggaattggctattcagacctcgatgggttactatagaatcattagcaaatgtaaagggcatgcggtgtaatttatatgggctgcgtcccatgcctataaatagatgaacagtgctcccgtactgttcacgctgacttggcattttcttttgcgtcatgcttgtactcttaccttctttcaagccgaaggtacatttttgtaacttgatatcatttctatttttttataataaataaatagaaagtagttgataataatacataattgtttatgttacctcttatatttcatatgattccttcttcattattatatgttgtgctgatgaaggtatgcccttcattaccttcgtccgaanatcattatatctcaagggaaatattgcttcgaaggacgaaagacttaacgttaacatttcttgtgtgccttgtcttactcatacattga

SEQ ID NO: 46950 - DNA, 387 bp, Zea mays
  unsure (1)..(387): unsure at all n locations
taatattttcctagcttacttatgcaacagagaacctatgaaaaatacagagaccattaatttggaccagtttttaattaagatgctttaattagcctcatatagactgaaaatcaattattagaattgcaaagctataaccaaagtgattaataaacatccagtgaacttataaccaccagagccccactacaaaaatatagagcaccccagcccaactctttaagaaaggaaattaaatgcaaagtgataataaggcattttccaaataaatcatgaacaacctctattaatgtgataatgggcaaccaanaattagctaagtccctgatgggacaatccaccagagaanaatgctaacccatgaagaagaagtaactcatacct

SEQ ID NO: 46951 - DNA, 126 bp, Zea mays
atgtctctactttcgtctaactaagactggctattgtcataacattacactactatgtattagacctataaactactgtactattaagcactattactataagctttttatggctgattgtgacat

SEQ ID NO: 46952 - DNA, 500 bp, Zea mays
  unsure (1)..(500): unsure at all n locations
agcttctaaagggagaacacgtggtaagtttaactaatgtgctattcgaaaaagatagaccttgtgcagcttgtaaagcaggcaaacaggtgggaagctctcatcacaccaaaaatgtgatgaccacatcaagacctttggagatgcttcacatggacctcttcggacccgtcgcctatctaagtataggaggaagtatggtcttgttatagttgatgactttttccgcttcacttgggtattctttntgcaggataaatctgaaacccaagggaccctcaagcgcttcctaaggagagctcanaacgagtttgagctcaaggtgaaaaagataaggagcgacaatgggtccgagttcaagaaccttcaagtggaggagtaccttgaggaggaagggatcaagcacgagttctccgctccctacacaccacagcanaatggtgtggtagagaggaagaacacgacgcttatatacatggcgaggacaatgcttggagagt

SEQ ID NO: 46953 - DNA, 488 bp, Zea mays
  unsure (1)..(488): unsure at all n locations
tcaagtttgttccaatcaacatttatctccatgttntgtttggaagtggagaccccaacacttatgttgtgggtgtgaatttccttcttgttatactatataaaccagggtattgattttttaaagtagttcatccaatccaaatatcctcccaaaatatcacctctgatccactcatgatgttgaaagttccaaagcgaagaanatcttgctttactctcatcaggctaaaccaaaaatgtgagtctcctgatttccactcagcttgaaccaaaggttttgatgcaatgtatttatttctaagtagttgttgccaagtgccatgagttgtaagcagcttataaagccatttacttagcaaatcgacatttttaatctttaggttatgaattcccagaccaccttggtctctanggtggctaaggatatcccacttgtcaagacgatattntgttattctcatcgcttgcaatagaaatgaaataaaa

SEQ ID NO: 46954 - DNA, 408 bp, Zea mays
  unsure (1)..(408): unsure at all n locations
caagctggtgccaatggagaagcanaaatccttgaagtcttggctgtcaaactgcttgccagtgtcaactgttagttcggacggtactccgaagcggcaaacaatagtttgccaaaagaatctttgggcagtttttgatgttattgtggaaacaacccttgcttcgatccatttggtgaagtactcgacaacgacgaaggcgaacttaaagttcccctgagcggtgggtaggggcccgacaatgtccaggccccagcgctggagaggccatgtgtgggcgatcagctntgtatactgcgaggggctgcctgaccgaagagagaacttctggcaagcttcgcaagatcttgtgacccgatttgcggcgcagatcattgcgggccagtaaaagccttggcggatcacctt

SEQ ID NO: 46955 - DNA, 486 bp, Zea mays
  unsure (1)..(486): unsure at all n locations
tactaagcttctnagggagaacacgtgataggtttgactaacgtacaattcgtaaaagatagaccctgtgcagcttgtcagacaggtaaacaggtgggaggagcgcatcacagcaagaatgtgatgaccacatcaagacccctggagctgctacatatggacctcttcggacccgtcgcctatctaagcatangaggaagtaagtatggtttagttgttgttgatgacttttcccgcttcacttgggtgttctttntgcaggataagtctgaaacccaagggaccctcaagcgcttcctcaggagagctcaaaatgagtttgagctcaaggtgaagaagataaggagcgacaacgggtccgagttcaagaaccttcaagtggaggagttccttgaggaggaagggatcaagcacgagttctccgcttcctacacaccacagcanaatggtgtggtagagaggaagaacaggacgctaatcgatatg

SEQ ID NO: 46956 - DNA, 477 bp, Zea mays
  unsure (1)..(477): unsure at all n locations
gctttatatcataccatgatgcatattcgagtatgatacngatggcttccagtcgagcaactggtgcaaaggtctctccaaaatctaagccttcaacttgagagaattctttngcaacaagtcttgccatgttccttacaatcacgccttgatcatcttgtttgttcttgaacacccactttgttccaatgattcttgcatcttgtggaggcttctccagcgtccaaacttggttatgggtgaagttgtttagttcttcatgcatggcgttcacccagtccggatcctgtagcgcctcatctatacatgtaggctcaacacaagaaacaaaggagtgatgttcaataaaagaagcatgtctatgtgatcgagtaataacctcttgtgaaagaactccaatgatntggttntgagggtgagcttgaagtagtgatgaattctnctatcaccacttggaagaaaaatctgacatcacat

SEQ ID NO: 46957 - DNA, 444 bp, Zea mays
  unsure (1)..(444): unsure at all n locations
ctaagctacttactgccnatcgaatacatctccacatgtatcttgtgtacagcttcttcttgatctgctagttcagtacatgtcatcaaaaagtataataagacaataaacagggaagtccaataacttgaaacaatagatagaaacaaaggccagccaaataaagattctaaaaggttaactttaagagattactcattacagctttagcattgcagatactattcaacaacccttgtgtgactcaaagaagtaaaaagtacgagagcaaatgaacgtgacaaattaatctgatgttaccttttcaaaaaagatatgggatgtatgggcataaaacaaagcatctcatacaaatggtttaatttttttgtaaggctataaatgtcgcaaatttacagtgcacattggcagtgcagacctagtgccaaaggcacccacatgagt

SEQ ID NO: 46958 - DNA, 331 bp, Zea mays
  unsure (1)..(331): unsure at all n locations
agcttaaaccaggagaatctagtaaatatgctacttgaatagtgaaagttacaatccttgacaaaagtgacattantttaccaagttggattgaaatgtagcagcatacttcatgagaaacttattctcatactcgagactttatgagattactaagagaaaatgttagtctcaatatgatcaacatatagaaatgaaactccctctaaaggtatgcatcaagaaattgaatgcacttctcttttaacgacaaatagggagaagcattattcatcttgatcaaggcttataaaatttgcaataagcaacttatgcctagtattctcacaat

SEQ ID NO: 46959 - DNA, 446 bp, Zea mays
  unsure (1)..(446): unsure at all n locations
tctaaagggagaacacgtgatagggttgactgacgtgcatttcgaataagatagaccttgtgcagctggtcaagcaggtaaacaagtgggaggagcacatcacagcaagaacgtgatgaccacttcaagacccctggagctgctgcatatggacctcttcggacctgtcgcctatctgagcataagaggaagtaagtatggtttagttattggtgatgacttttcccgcttcacttgggtgttctttttgcaggaaaagtccgaaacccaagggactctcaaacgcttcctcaggagagctcaaaatgagtttgagctcaaagtgaanaagataaggagcgacaacgggtccgagttcaagaaccttcaagtggaggagttccttgaagaagaagggatcaagcacgagttctccgtccctaccaccacagcaaatggtgtggaga

SEQ ID NO: 46960 - DNA, 436 bp, Zea mays
  unsure (1)..(436): unsure at all n locations
agctttcttcggcgacatgacgaaagtcagtgctttgccgaaagtggtcggaaaaagggttcaccggaggtgggcgccaatgttggggacttgttctcaaatgctatgaattaagaacaaggcaacacaagatgttaaatgttaatgcccttcatccttcgaagcattattccccttaagatataatgttcttcagacgaaggtcatgaaggacacaccttcatcatcgcagtatatgttaaataaaagaagaagcatatgacatataagaaacaacataaacgatcatataacattattaactcattcttattatataatcatggagaaataggtacaatattaaattacaaaagtaccttcggctcgatagaaagcaagaaagtacaagcgtgacgcanaagcaagtagaagtcagcccctctaggctactttc

SEQ ID NO: 46961 - DNA, 465 bp, Zea mays
  unsure (1)..(465): unsure at all n locations
ntcatccttcttcttacaaacagtgctggacatcctcaatgcgaagtgcttgggcgaataaatcccttgtccagcaactcttgcagctgcttcttcaactctgccaactcagcgggtggcattcggtagggcctcttggaaattggggccgttcccggttgcaactcgatggcgaattcaatatcccggtccggtggcattcctggcaattcatcaggaaagacatctgcatactcacagaccactgggatcttcttcaggggtatctccgtcatagagaaagcacatgactgagaagaaccctgactaggcagaatcaaagtgaaattcccgcagaaaggagaattaacttccacggtacgactggctacattaagcacaacttggtgcaaggtcantccaattgctcctagaataatgtccacattntccaatcccaatacaagaagaagtggtttgacaatg

SEQ ID NO: 46962 - DNA, 341 bp, Zea mays
cttcatccccacatgtgctaaactgcgatgccacagccagcccatgctagtcttagcaattaagcatgcatctagaccggtctcctctttagcaaaatcaactaaataaagtttgtcgtctagtacacccttaaaagctaatgaaccgtcacttcttctaaagacagatacatctacatttgtgaataagcagttatatcccatattacatagttgactcacaaacaacaagttatatccaagcgactcaactaagaacacattcgaaatagagtgctcggatgaaatagcaatgttttctaaccctttcaccttgccttggttcccatcaccgaatatga

SEQ ID NO: 46963 - DNA, 358 bp, Zea mays
  unsure (1)..(358): unsure at all n locations
tctanagggagaacacattntgngactaacaaatatttattttgagaaagacagggttcgtaacgcatgtcaagcagggaagcaagttggtacccaccatccacacaagaacatcatgacgaccgacaggccgcttgagctactccatatggatntattcggcccgatcgcttacataagcatcgacaggagtaagtattgtcttgtaattgtggatgattattctcgcttcacttgggtattctttctacaggaaaaatctcgaacccaagagactttanagggattcttgagatgggctcaaaacgagttcggattaaggatcaagaagataagaagcgataacgggacggagttc

SEQ ID NO: 46964 - DNA, 412 bp, Zea mays
agcttgaaccaaagacccgcgtcatcggaatatcgaaaccgtgctcgccggagttccttcccccgccggcgcacgtggaccgggtaaatcactgtgccatttttcgattcaatgcacagatagcctctacatcaccccaggaagctcaccgtgccattggattggactaggtcgccgtggtttggccggcacacccgccgccgacgaggacaaccgcctgcgcacgtggaccgagcgattccggccatccccgccggcgagccgtacgtcgttgtgaccgccagaacctccccgagctaaccctacccctcgtcggacttctctcgtcgccggtaagccgcgccacccctttttttctctgcgggtactgtttacacttgagagggaccgcgggtgagaggaagagaaagtc

SEQ ID NO: 46965 - DNA, 434 bp, Zea mays
atgacaggggaggagaactgagaaggcatgcatatggtgacatggtgttggttggacggacgtactgttggcccgcccgaggacaccggaacggaacacgcagagttttgggatctgggcgcggacgcgtggtcgtccgaccgcgaggttgtccggcggggttaaaaatgagcgaaaggacgaaggaagccgtgggctacggcttacctaaacggtgtgcgagtgcgaggtcgaatcggcgagcttgcttttgtatggcacattgcttttgtgcgatgctcggtgtgctcgccttttccacgcgcctcgccgtgtctcctcctcctgtcgtcgtcatgtccttggctttacgtactggccgggcagctttcgcggtggatccagccacacgctggcgctgcgacaaacaaggcaacgtaactgacaaggtctcg

SEQ ID NO: 46966 - DNA, 419 bp, Zea mays
cgcttcagtttatcacccgcattccaacggaggtgtggagcgcgccaatggaaaaatcttcacagccgtcaaaaagatgctcctcgacgaaaagaagggcagatggaccaaattattacccgaggcggtctgggcactaaacacgactgagtgcagggcgaccgggttcactcctttccgccttctatacggatcggaggccatgaccccacaagaaataaaacatgggtccccacgaacggctctgtcagccgtccccgacgtggacgagccaacttcaaaggatctcatcaacggagaccgagtcttcgccttacaggcactaaacaaataccaagcccagacaaaagcatggcgcgaccactcagtcatcccgaaggagttcagcgaaagagacctcgtactcgtccgaacagctc

SEQ ID NO: 46967 - DNA, 477 bp, Zea mays
  unsure (1)..(477): unsure at all n locations
tctaagggagaacacattttatgattaacaaacgttcattttgagaaagacaggatttgtagcgcatgccaagcagggaagcaagttggctatcatcatccacacaagaacatcatgacgaccgacaggccgcttgagctactccacatggatctattcggcccgattgcttacataagcatcggcgggagtaagtattgtcttgtaatagtggatgattattctcgcttcacttgggtattctttttacaggaaaaatctcacacccaagagaccttatagggattcttgagacgggctcaaaatgagttcggcttaacgatcaagaaaataagaagcgacaacgggacggagttcaagaactctcanatcgaaggatttcttgaggaagagggcatcaagcatgagttctcttctccctacacgccacaacataatggtgtagtggagaggaagaatcgaactctattagacatt

SEQ ID NO: 46968 - DNA, 372 bp, Zea mays
ccgtatcaccgtccgaagcctggccagattccaccgaaggtggagacgacgccgagggtgctgctgctccctcttgtgatggctgaacctgcaaggagagtttgtctgtagtgtgcgcatgttttttgcggccgccgaggcccaaacataatattgtcatgttgtaaagctgcgtttcctttcctcttgtttcgagtatcaagacttgttcttcggtagcagaatcgtttatccgagcgagagttacttttcacggaaggtgatgagtgaggtattcgtatcccagaggcgtaagagtccctcggctcggtcggccttgccgcttacgtgcactcttactcattcgtaagattctgttatcgatatagttga

SEQ ID NO: 46969 - DNA, 483 bp, Zea mays
  unsure (1)..(483): unsure at all n locations
tctcctatacaagtgccgcactcactgcagcgtgcgaagctttcacatacaatagtaatggagcccctgacactggtggagttaatggtgttagataaatcaaatattgcttcagctcttcgaagactttttgttgagatgggccccattgaaaaactttggctgactttagtatttcaaagaatggcaagtttctttctgctgatctagatataaatctattcaatgaagccagtcttccttccaaccgttgagcccccttctttgtgcttggcggctccattcgaaggatagctncgatcttgctttggttagcttcaatccccttcgttgaaacaagacagcaaaggaacttacccttctttactccaaagacacattnttcaggaattaattntaggccagcttgcctaaaattagcaaatgtttctcgcagatcagcgatatgaatttcttgcttcgtgcttnttactatgatatcat

SEQ ID NO: 46970 - DNA, 452 bp, Zea mays
gccctcagacccggccggacttcaccggaggcccgagatcgacctcaccggacttcagtcttccgccgtcgcgcgtggaccgacctatccagtgagtctccgaccgattccttgcactcatatcttctctggcaccccgtgaacctctctgacccatccaattgctctatctcgccgtgaccaggccggactcctcgccgccgacgagcatccccgcctgcgcgcgtggaccgaccgactccggccatctccgacggcgacccgcacaccgttgtgatccccgagacctcccctacgtcctcgaccacttcaccggagcaacctcgccgctggtaagcccctccgccctttcttccgccgcggttactggttaaggtagaagaaagaacctcggttaagatttgtagaacccgaggagtttctgaacgtcagtgactcatgtgaatagacct

SEQ ID NO: 46971 - DNA, 464 bp, Zea mays
  unsure (1)..(464): unsure at all n locations
ctaagctactcctcctgggaggggccattcatcatcgccaagattttgaagcccggaacatacaagctggccaacaatcaaggcgaggtctacaacaacgcttgtaacatctgaaagctacgtcgctnttacccttaagatgttttcaagtcgttcatatacctcgttttctatacatacacaaataaagtctaaccgccaaggaagggtcagccttgcctcggcaaagcccgaccctccctcgggggctagaaggggggaccccctctgcgtcaaaattttcctcggaaaagtattctaccaaaacgactttcgtgctttccgactatatcgataacagaatcccgcaaaacgaataagagcgcacgtaagcggcaagggcgaccgagccgatggactcctacgccttcgggatacggatacctcactcgtcaccttcagcgaaaagtaactcttactcggat

SEQ ID NO: 46972 - DNA, 484 bp, Zea mays
  unsure (1)..(484): unsure at all n locations
agctntacatctcacactagaaggcatgttatttttagtatatttaaaatcgcgaaacacctctaattcagtcagtcctatctctcaactttgccaacttcacttttgtttatgcctttgcatcccacttctatttcttgatgtgttgaactcttagtatttataaaaggtcttgaatatgactttgtaatgtattctatgggtcttataatgtcttctttgaggtgatgcttcctcagtgcctcagaccttgtgattttgcatcctgtgaactacaaacacaaacactagcaaacacattagtctataagttatgttgaccatcaaacaccaaaatcatttattaaaatggatcaaggtccattntacttacaatcccnnccgttttagtgattgatgacaacacaaccaaagcaagctaatataacanagacttgatgtgaatatgcaatccacttgttaggaactccataatgcacatact

SEQ ID NO: 46973 - DNA, 490 bp, Zea mays
tcatgatcagaatggattatggattctttacgtaacaagttatgttgcctaacttccaaaacgcgaactaaggcataatgttctttgtcataaaccgagtaattcagatgtggaccatttagcttttcagaaaagtagactacatgtttaccttcttgtagcagtacaccttctatgccaataccacttgcatcacattcgatctctaatctcttaccaaaatcaggaagttgtagcagcggtgcttgacaaagctttgtttttagcgtatgaaatgcttgatcttcatcatgtccccacttgaatggaacatccttctttgtgagattgttaaggggtgcagcgagagtgctgaaatctttaacaaaacgcctatagaaacttgcaagaccatgaaagcttcgaacttggctcacatttaccggtgtaggccaatcctttattctttaaccttctcttcatcaacctgaataccatttgcataaacaac

SEQ ID NO: 46974 - DNA, 392 bp, Zea mays
  unsure (1)..(392): unsure at all n locations
aagcatcttcttagcctctcattttcttcttagagctcttgatatgaatcatcatttgttcctgcaaatactagctcaacggaagatttgcttgtcgacaaacaacaagcattaacatatggtaatataatatcaatttgaatacatgtgcacgagtgaagttgttgggattttaagttttctatcacaacctcatgagcaatgtntaatatgatatgatcattcataagattttcatgagaacatagaagcatatctatattttcttggaaagcctaaatttcaactcttagcttttctatttggcccttaagcaaggtattcctattcactaattgattgatacaacgtaaagcgctatcatgctcaattgaaatagtttcatacctttg

SEQ ID NO: 46975 - DNA, 412 bp, Zea mays
agaatgaagaagcttatctaccttagacaatgttgacttggcaatattgactggacgactaaagaaaatatattactctgttggagccagcagtgggaaatttaacccttcggcggaaaattaaccccacgccctcgatcatattgaagctgaaatcgaacagctcgacgaagttatagacgggcacggcgactcctgagcctgtgtagcttatccgggtaccgctgctgcatttctgaaggccggctgagaacatggaaaggttgccaacaggcccaacttgaccttatactcatcaatcctggatgatatgcccgacctcgcccgaagtatctcaatagagttataaaaacggtatggacaaaaggcggccgagaaaagctggagacaatcccgactctcttaaccagaa

SEQ ID NO: 46976 - DNA, 452 bp, Zea mays
agcttaaacttttcgtaataaaatttcagcggatattattatataacatacaataaaaggtatgagaaggacatataaaacatgtacaaatcacattataattacttaatatattgaattatcggatacagaaatacctttgccttggcaaagggttgaattccgacagatgcgatcgcaaaataccagaatgcgtgaacagcaacggaatactgttcactatttataggcacaggacgcagcctgtgaggaattacaagtatgccccttataaaagcttacaacattgactcagaccttcatggactaaaaagtcattctatctttaagtcggcttatactgtcgaagcttcatggaaaggaaccttcggtcatctcatgcaaacagcttcatccgaaagccgcttctctcttgaagaccttctgcgacgaatcatatacccaacagccga

SEQ ID NO: 46977 - DNA, 482 bp, Zea mays
  unsure (1)..(482): unsure at all n locations
taagcttccgaggaggtangntccaagccgagtatgccacaggagctcctttatttgaaactttacccctgaggatcatttcaagtcggtttaccaagtcaacagaatgaattctcctattggtaacccgagttgagtcggccagccctcgatacagatatgccggataggccctgtctttcagtggctgaatgttcttgaaaacaaaatcagtgaccacagcttcggcagtcagacctctctctttcagtaatctgacttcagtaagcagcacgcctgcctcggccacttcctgatctgtgggagactcagtccaactcggagtgcgaacgtctggctgtcttcctgaccgggaggggagagaatntccataattatcaactataaaccactccagacgccaccctttaatgctatctntgaggggaatctcaagatactcggtcttccgcgcactgcgcatctccaaactggcaccttcg

SEQ ID NO: 46978 - DNA, 421 bp, Zea mays
gtcacctgcagcatgcaagcttgagtcggttcttctgcaaggataatgatgctttttaatcgatgagggtatgaaacacattcatgagaaaatagaggtcagtaaggcaaactgtttcagaaaagatgatcaaggctttgtatgatttaacaaccacatagttgtgcccaagaatgatgaagtccgccagcaaattttagatgaagcacatcttagtcgctattctattcattcaggaagcactaagatgtatcatgacctacagcaacattattggtggacgaagatgaagaatgaaattgcacgctatgtggtgagatgcgacacttgtagatgtgtcaaagccatacatatgaaactgctggtccattgcaatcattacctatcccaacttggaaatgggaagacataagcatggact

SEQ ID NO: 46979 - DNA, 445 bp, Zea mays
actaagcttgcatacaactggcaatctcgtagcctctgaagtaccttcctcatatgttcctcatgctcttactcattctgggaatatacgagaatatcatcaatgaacacttctacgaacttgtcgaggtagtccatgaacatgctattcatcagatacatgaagtaagctagcgtgttcgtcaatccgaatgacataatcatgaactcgtatagtccatacttgatgatgaatgttgtctttggtatgtctgaaggtcagattctgagctgatggtaacctgacctcagatctatctttgagaacacactgctcctctcaactgatcaaataggtcctcgattcgaggcagggggtacttgttcttgacagtgacttcattcaaagctctgtaatcaatgcacatcctcttcgtaccatccttcttttccacaaatagcattgg

SEQ ID NO: 46980 - DNA, 317 bp, Zea mays
agcactgcagctgcacttctgacacctacgacatcatttttgcactaccacgcaaagaggatgacacacagcctcgcataggaacagtgaaagtcgggcctgctgtggcgcgcattaccgggactaaagctcgtgcacaacaagctatagtccggcgctgtgaccaaaaccttcatacataaagcttgcatgtaccccaaatacttatctcacataaacctacaaccacacacagacaagagcccttgcggcaactcctaaatgacagcctgcacggggactgagcgagacgctggaaaagggccacagttgtgaca

SEQ ID NO: 46981 - DNA, 356 bp, Zea mays
acgacttcatctgaaagccgtcgtcatgtaactaccaaatcgagttgtgatgtggtgagccgattcactatttttattatcggttttatgatcgtctaataagacacttcgtatacgtatacgattaagttagaaattctagtaatgcgaggtgtgcacttggtaattatggctagattcgttattatgtcgttagggtgtgtgatattatggagtcgatgatagaagtgaaattctagttgttgtgcgatgatgggaaagacgttgttcatcgccgtgcctaatgtttgatggatagtatgaactgatatcatcgctgttctcacgaattatgtatcgactagtaaaagtacact

SEQ ID NO: 46982 - DNA, 470 bp, Zea mays
  unsure (1)..(470): unsure at all n locations
gcttatgaagattcttcatcccaacatgggctagtctgcggtgctagagccaacccgtgttagtcttagcaattaagcaagtgtcgagttcagctctatcaaaatctaccaagtatagctgaccctctaacactcccttaaatgctattgaatcatcacttcttctaaagacagtgacacctacatcagtaaatagacagttgtagcccatntgacataattgcgaaacggaaagcaaattgtaatctaaagaatctacaagaaaaacattggaaatggaatgggcaggtgatatagcaattttacccaatcctttgaccaaaccttggtttctatccccgaatgtgatagctcgttggggatcttgtgttttctcgtaagaggagaacatcttcttctcccctgtcatgtgggttgtgcacccgctatcaatgatccaacttgagccnccggatgcataaacctacaaa

SEQ ID NO: 46983 - DNA, 444 bp, Zea mays
  unsure (1)..(444): unsure at all n locations
tacaacaatntatgtgcacagacaaaactccaatatgaattcataagtantaattttgttatttattatcccttttagcaattgttctcaacatacaagccataaagattatttttaggagaaataaattataatgtgtaaccttcattaaaaggtgattttacttaccctccttaagaatgtccctcaaccatattagtaaaaagaaatcttattcatatgaagatctttccactttctttgatttctttatttatttattttctatttgcataaaccaatgccattagttaagtatgaaagaaggaaatcaagaaatccctaaaacacccaattatttatttatttattttattattattattattccttataccaattttgggctttacactactcttttgtttcctcttttgagccacacacggtagaggaagcactaca

SEQ ID NO: 46984 - DNA, 438 bp, Zea mays
  unsure (1)..(438): unsure at all n locations
agcttctaaagggagaacacgtgatttgtctatctgatgtttctttcgaaaaagatagaccttgtgcagctagtcaagcagggaaacaggtgggaagctctcatcatgccaaaaatgtgatgacaacatcaagacccctggagttacttcatatggacctcttcggacccgtcgcctacctaagtataagaggaagtaagtatggtcttgttatagttgatgatttttcccgcttcacttgggtattctttntgcaggataaatctgaaacccaagggaccctcaagcgcttcctaaagagagctcaaaacgagtttgagctcaaagtgaagaagataaggagcgacaatgggtccgagttcaagaaccttcaagtggaggagtatcttgaggaggaaagaatcaagcacgagttctccgctccctacacaccacagc

SEQ ID NO: 46985 - DNA, 462 bp, Zea mays
  unsure (1)..(462): unsure at all n locations
ggcttctatgatagagataatgtntgtctttntagtgcttcttatcagattttcacaagcctgggtatggtttacatgtatgcaaatgagaaagctcaagtcaataggccaaaggaactaatatccactgacccttccctcgttttgtcaatcattatagtctttagtacttatttcagaactcatattaatattccatttattgcaggtgaggacagtgaaggtcaccaatgtctctcttagtgcaactgtgcaagacattaaggagttcttttcccttttaggagatattaatcatgtggagatgcaaaggttcgtaaaacctgtccaactaggctgccccttctgttttcatgtccatactnaattaaattgtaccgcaggttagctagatctctacatcagtgcttgatttgatttgtttaactttccatcgtannaagtgctcagatctctacgtca

SEQ ID NO: 46986 - DNA, 481 bp, Zea mays
  unsure (1)..(481): unsure at all n locations
gcttctaaagggagaacacgtgatatgttttactaatgtgcaattcgaanaagatagaccttgtgcagcttgtcaagcaggtaaacaagtgggaggagcacatcacagcaagaatgtgatgaccacttcaagacccctggagctgctgcatatggacctcttcggacccgtcgcctaattgagtataagaggaagtaagtatggtctagttattgttgatgacttttcccgcttcacttgggtgttctttttgcaggataagtctgaaacccgagggaccctcaagcgcttcctcaagagagctcanaatgagtttgagcttcaagtgaagaagataaagagcgacaacgggtccgagttcaagaaccttcaagtggaggagttccttgaggaggaagggatcaagcacgagttcttcgctccctatacaccacagcanaatggtgtggtagagaggaagaacatgacgctaatcgacatg

SEQ ID NO: 46987 - DNA, 440 bp, Zea mays
gcgttaagttccaaaccttggcttctcgcggcccactctaagatgttcatccttatgattgcttcggtgataagttggtgaaggtagatttcgaatgtcttcaatacttccacgacaaaactactcaagggaaatcgtaatccagctttcaagaagcttcggaatatcacgacctcattttcctcgggagttggacaagtcttctctccttcgtcagccctcacaacagacaagtcccgaaagtatctccctctcatattgacaagatggttttccttaatgatcgacttaccaaaaactgcatggcttggttgccagggtcgatcttcggaatcttcaccaccactatccacattgtaactatcactgtcgctagtatctttagataaaccctccaaaatctctctggtaatcttctcccgattagtcttcgacattga

SEQ ID NO: 46988 - DNA, 347 bp, Zea mays
  unsure (1)..(347): unsure at all n locations
ntaanagagagcattgattacatcattcaccatgcttctttaaaggactntctcangaagataaacgagaagcacaacattatgcccaaaaattgaaatacccgaaggggacattagtgtttaatggcagtggggaagaacattttctgtactgtctcccggataataaagatatatccgttcgccgggagataggtagaagcatcagattcccgaagctagaagatggcctttcaatattatcaaaggatgagctcgctgacaagttggcgtataatagtataaaggtataaaagctaatcttgtattttgaaaacgaaatattttatttgtgtatacttaattct

SEQ ID NO: 46989 - DNA, 424 bp, Zea mays
  unsure (1)..(424): unsure at all n locations
agcttgcaatgaagagatggcgctcgtcatttatagcttccgccaaatcctcaaacaaaggagggggaaagactacaagtcccgctccaagaaggtttgctacaaatgtggtaagcccggtcattttattgctaaatgtcctatgtctagtgacagtgaccgaggcgacgacaagaaggggaaaagaaaggagaagaagaggtactacaggaagaaaggcggcgatgcccatgtttgtcgcgagtgggactccgacgagagctcaagcgactcctccgacgacgaggacgccgccaacatcgtcgtcaccaaaggacttctcttccccaacgtcggccacaagtgcctcatggcaaaggacggcaaanagaagaanggtaaatccaactcctccactaaatatgaatcgtctagtgatgataat

SEQ ID NO: 46990 - DNA, 407 bp, Zea mays
  unsure (1)..(407): unsure at all n locations
ctatgttgagcacctcctagctctaagatagtgagtaccctaaccatgggtataaactctctaaagcactntatgggcttaaacaaaccccacgagcatggtatgaatgccttaaggatttccttatcactaatggattcaaagtcggaaaggccgatcctactttattcaccacaacactttgaaatgatttgtttgtatgccaaaattatgttgatgatattatatctgggtctactaacgaatctacatgtgaagagtttagtaggatcatgacacaaaaattcgagatgtcaatgatggcggagttgaagtatttcttgggatttcaagtaaagcaactccaagagggcaccttcattagccaaacaaagtatactcaagacattctaagccagtttggaatg

SEQ ID NO: 46991 - DNA, 392 bp, Zea mays
ttttccagtgtattcccatatggataaacaagcccagaatgcgagaacaaattggtgaaaaccgattggggaaaaggctaaagtcttcaaaaaaaggaccattatatagggcatttggaaagaagatgacacgggcaacaagtggaaaaaaatggcaacttgcattcggaaggtggcctcaaaggtgtgtggagtaacaaaagggagtggaggtaaaagttaagatacttggtggtggaataaagaagtccaaagggctattaaagagaagaaagaatgctacagagctctataccatgatagtagtatgcacaacatagagaagtacaatgtagaaaagaagactgcatagcaagttgtaagtatggctaaaggtacgacatatgatgata

SEQ ID NO: 46992 - DNA, 484 bp, Zea mays
  unsure (1)..(484): unsure at all n locations
tctnagggagaacacgtcataggttggactaacgtgcaattcgaaaaagatagaccttgtgcagcttgtcaagcaggtaaacaagtgggaggagcacatcacagcaagaatgtgatgaccacctcaagacctctggagttgctgcatatggacctcttcgaacctgtcgcctatctgagcataggaggaagtaagtatggtctagttattgttgatgacttttcccgcttcacttgggtatttttttgcaggataagtctgaaacccaagggaccctcaagcgctntctaaggagagctcaaaatgagtttgagctcaaggtaaagaagataagaagcgacaacaggtccgaattcaagaatcttcaagtggaggagttccttgaggaggaggggatcaagcacgagttctccgctccctacacaccacaacaaaatggtgtggtagagaggaagaacatgacgctaatcgatacggcgaggac

SEQ ID NO: 46993 - DNA, 355 bp, Zea mays
  unsure (1)..(355): unsure at all n locations
agcttgccgagcgatccgcgaaccatggctgcagagacctatgcggagatgctcctccgatccagaaactgtgcttagaacaaggtcgagcggagtttttttctggctcaataaaagagcgagccagntcagctcgcgagctggctcgaacaacaacattnttgttatantaaatttaattagcatatattataggtactaaatagatgattaatttatatttttagattactgtacaaaattaacttattttctatattatatgatatatatttattttactaatttaagacgtgtcacttaaattatntttgagactntatattatattttggagactgatttcatgcttatg

SEQ ID NO: 46994 - DNA, 495 bp, Zea mays
  unsure (1)..(495): unsure at all n locations
ntctgattagaacggttcttgacaagtggaaccagcgattgtacaacatcagccattaatggcctgtagtcagcctctggttgaacacacatggcagcaatagcagccacttggacagcatctttcaaggagtattgaccttccaatgctggatccaagatccgcacaactttttctcggtcagtgagcataggcaatgcctgcagtaattcaacaagtgacaggttagatatataagcaatgttgaattaccaccacacaggctgatgttttccaaccaagtacaagagaagcaggtgcattctaattaatacatgtcatgactttgtacatgaaaaatcgaagtatagaagcaaggaagaaaatgaagttctatgacagcacggaactgaagtaaatgttctcattgaagaactgaagaacatgcaaatatccaattcactcgtcataaccaacctttttttttgcagttcaaggagaacactgtgtacagtc

SEQ ID NO: 46995 - DNA, 397 bp, Zea mays
  unsure (1)..(397): unsure at all n locations
agctnggtcattntattgctaactgtcctgattatgatattgaccaggacaaggggaacacgagggaaaagaagaagcattacaagaaggcaaagggcgaggcgcatctaggcaaggagtgggactcggattgctcctcgtccgactccgacaatgaaagactcgccgccaccgccttcaacaaatcaaccctcttccccaacgagcgtcacacatgccttatggcaagagagaagaaggtatgtactcgcaactctacctatgcttcttcaagtgaggacgaatctagtgatgaggatgaagtagattattcatgtttgttcaagggcttagatagatctaagatagacaaaattaatgaattaatcgatgccttgaatgaaaagaatatactttt

SEQ ID NO: 46996 - DNA, 451 bp, Zea mays
  unsure (1)..(451): unsure at all n locations
tgtcgcgcaagagctagaggccgctcaaatggctatcaagttcttttatattaaatgtgtcngcctgaaggctcagcgcgacagggctatggataaagtcgttcgcgctgggcggatcctgatgagaagacccggcgtcgtagtgtccgatgatattcttgttgatgttaatgccgcacctgatgccgcaagccgtccatcctcttgtgttgcccgtgcgaaagatgttgtctccaaagatacttcgacgtagtgatttcctgtgaaacactctatttatcaagttaccatttctttagagaaaagatgtaatatgaattctgcatgcgcgcaacagttatgttagaacttgattattccttgggcatggtgctggangacacccctggcacttgtaagtgagatatttcttttttcgaagtactctcaattggagctggttattctacta

SEQ ID NO: 46997 - DNA, 387 bp, Zea mays
  unsure (1)..(387): unsure at all n locations
gtcccatcaccgggaagaagatccagggggtgggtgattactttgtaaggcagctctactctgcttttgtcttcactgcggattagtgtagtctcgggtgcttggtacaatattgaagtaattggtgtgaattagtagatcttatccattggttgcttaaatggtttacagtgtattttgtcctctgatggtattcaaagccgttccaatccctggagaaaatttntgccatcctaccctaccctatttctctctcgattccgctcaaatccgagcagtcgggagaaccatattcgaccgggagctatttcacgtcgacctcgatgatgcacccgtcttcgacgccgacactgacaacctcaacgccgaacccgtctttgacgacgt

SEQ ID NO: 46998 - DNA, 491 bp, Zea mays
  unsure (1)..(491): unsure at all n locations
tgaagccatggtaagtagcataggcaagtaaaatgcgaattgtttctatcctagctacgggtgcataggtttcaccgaaatccaaaccttcgacttgtgaatatcccttggccacaagtcgggctttgttccttgtcaccacaccatgctcatcttgcttgttgcggaagaaccacttggttcctacaacattttgattaggacgtggaactaaatgccatacctcattcctagtgaagttgttgagctcctcttgcatcaccaccacccaatacgaaccttgaagtgcttcctctaccttgtgtggctcaatagaggaaacaaaagagtaatgttcacaataatgagcaacacgagatcgagtagttacccccttttgaatatcgccgaggatggtgttcacggngtgatctcgttgaattgcttggtggactcttgggtgtggcgggtttggaacttgttcatcttcctcatcttgatcatgggcatct

SEQ ID NO: 46999 - DNA, 499 bp, Zea mays
  unsure (1)..(499): unsure at all n locations
agctntcaacagaataataattctataacacatatacaatatataaaaatatatggagcataaagttcacacatatatctatttgcatcaaattaaaggaaaaccttctaattcaaaattttcaaaagaccaagaaaactttgtaaccctacgaggtaagagtatcaaattgctaaaccttctcaataaatatgtgcttgaagacttcaaaaatgtttttgtaaaaaaataggtcacacatataccaatttgcaactaaatacaaaccaactaatttcaaaattttaaaaagacaataagactttgttaccatacaaaatgagatgatcaatttgctaaccttttttgataattggataagtgcgaccttcaatagaatatcttcaattttttgataacgtatccctaagaatggctatgaatagagcatgaacatgactcctctatgttcaagacattagagaaagaagccattanataatgaactggagtatcagta

SEQ ID NO: 47000 - DNA, 499 bp, Zea mays
  unsure (1)..(499): unsure at all n locations
cggacctataaaactaagcttcaaaggtgacatcttcagactggcctgatagctattattataatagaactcagcataaggtagactcttgtcccaacttcctccatgctgaagggcacaagctctcaacatatcttccaatacttgattagtcctttcagtctgtccatcagtctgagggtgatatgttgtgctaaagttcaacttcgtattcatattctcatgaaagcttctccagaatcttgaggtaaactgtgaacctcgatcagacacaattcttcggtactccatgtaaacacacaatctgagccatatataactctgctagttgggaacctttataagtagccttgacaggaatgaagtgagctactttagccaatctatccacaatcacccatatagcatcatattctttctgggtgcgaggcaatccagtaatgaaatccataccaatctcttcccactttcactcangtatcttcagtggatgcaatag

SEQ ID NO: 47001 - DNA, 195 bp, Zea mays
accccatacttctaaccatctttctgtatacagattattctttggtggctgggaggcagtataagaagtcatcttcgtctatgccaatgaatactaagggcccctttggatacttcaattctcgggcctaatgattaagcttaaaaatctcttcttcagataatcttttttccgaagcatgtcatacaatataat

SEQ ID NO: 47002 - DNA, 482 bp, Zea mays
acgttgggccgctggtatgtcagcagcctcgccacgctgctgctcgcgtctgggcggaacggccgcccggagccggcgaacccgtccagaaggtgtaggtacgcctccaagtcgtggcagcacgctggccccgcgtctggacgcaggcacggcgagtcgctgctgtgcagtctcagctcagcgccacccgcgtgcacataccctttccgcgcgatcggcgccggtacgcgcgtcacgacgtcgcccgcgttcaccacccgcaggacgttcacgcctcgctcgcgctgtagccgctccgcgaacgcgcggtttccggtcttggggccaccgaatgagaccaccgcgatcggcggcgggcggtgatctgtggtgccgtctgtgtcggcagccaggcaagtgctgagctcgtcagcagcgatgagggccagcgacgcgccaaagctgtggtcgacgatggtgatgctgagctcctccccttgtca

SEQ ID NO: 47003 - DNA, 365 bp, Zea mays
cacgcaatgggagtggagcgatggcgagagtagcgtgtactcctccgtggcaagaggctggacggaggtgtatctgtgctctcggttgacatgaacctgatctggtcttaagaaccccggtggcgggttgacatatgcaagggttaagtgatacatatgtcatgtgattggagatcctcagctaagtataatcgattcgaatcaccgtacctccgctggtatggagacttggtcactgacttatacgtagaactccagtaaagattaaaggttgttaagaaattggctagtgcatgtcaagtgtttgaactatggtagaaagaactctagttgcaggtgaccttacttaacctgacaaattaaaa

SEQ ID NO: 47004 - DNA, 456 bp, Zea mays
  unsure (1)..(456): unsure at all n locations
tagcaagtgtgcattctggatcagcgaagttctattcttgtgtcatattataaaccgagatggactagctatggatctaaagaaggtagcagcgattctggactagaaagcaccaaaagatgtccgaggaatcaagagtttcattggaatggccgattattatcggcatttcattgagggcttctccaagattgccagaccaatgacagccctgctagcatagaaggttgatttcaagtgaaccccagtgtgccaagaatcatttgagatgttgaagcaggagttgataacagcaccagtgttggttctgccagatgttcacaagccattctcagtatactgtgatgcgtcgtacactggactatgatgtgtngtaatgcaggaagggaaagtagtggcatactcgtcccgacagttgaaagttcatgagaagaattaccccactcatgatttgga

SEQ ID NO: 47005 - DNA, 407 bp, Zea mays
  unsure (1)..(407): unsure at all n locations
agcttatgaaattatctacaacttcttttacttatctaaagtttaattctggtggataaaatgactaaatcttaagagaacagattatgtacagaattgtgacactgaaaaactgctataatcaaactgcaataactttctgatctgatatccgattgaggtgttcttcacggccacagaaagatctacaaattatctacgactcatatatatactntntatttttttgaggcaactaagaccatggaaaactggcatgaacagaaactgtcgaatctgccattctgcaggaaactaaattcgagatcaaaacctaaccccacatctaatccaacctctaatccaacctctaatcctttaattcccatgatccacaacctccacaagcacataattacagggaggaa

SEQ ID NO: 47006 - DNA, 463 bp, Zea mays
  unsure (1)..(463): unsure at all n locations
taatgatgaactggctagtcttaatgctcaacttatgactatcaagaatgatttcgataagctaaaatttgcaagggatgcctacacaattggtagacacccctcaattaaggatggacttggcttcaagagagaagctaagaacttaacaagccataaggctcccattcccgccaaggagaaagggaaggcccctatggctactagtgctaaaaggaaccatgcttttttgtatcatgatagaagacaaactagaaatgtaagtcatgatgcttatgattcatatgtttatgattctcataccatgtttgctcctagttcctcttatgtgtatgatagaaatgttactaggagaaatgttgttcctaaaagaaatgctattcatcatgtgcctagaaggaatgttattcatgctcctangaaaatagcaaatgaaccttccacaatttattatgctttaaat

SEQ ID NO: 47007 - DNA, 435 bp, Zea mays
agcttctaaagggagaacacgtgatatgtatttttaatgtgcaattcgaaaaagatagaccttgtgcagcttgtcaggcaggtaaacaagtgggaggagcacatcacagcaagaatgtgatgaccacatcaagacccctggagctgctacatatggacctcttcggacctgtcgcctatctaagcatagggggaagtaagtatggtctggttattgttgatgacttttcccgcttcacttgggtgttctttttgcaggataagtctgaaacccaagggaccctcaagcgcttcctcaagagagctcaaaatgagtttgagctcaaagtgaagaagataaggagcgacaacgggtccgaattcaagaatcttcaagtggaggagtttcttgaggaggaggggatcaagcacgagttctctgctccctacacacctc

SEQ ID NO: 47008 - DNA, 485 bp, Zea mays
  unsure (1)..(485): unsure at all n locations
nttccttatcgtcatcaaccttgacatagaaccactctgatttccaccctgctgcccatntgcttcggtagctgatcacaggaaacttcgtagtttttcgataagcaaaattatagcaaccaaaattgtcatgtaatccatcctttctagccttcgtctgatagtgcagttcgtgaactcggcaaaagctgtccgcanacggttccaccgcttggcttcggagtgcccagatataaacactaagcctaacgatagcgttaggggtcagctggtgaaaatagataccgaaccttttcagtacctctgcaataatcccatgtagggggaatcttaatccagcctttaggaagctcttgaaaataacaatttcatccttctccggctntggggtagtctcttctcccccgaagcgtaatagcttcttctggtcttcagtaaaaaagcctgactntaccatcttggacagatcagccttcgaaacagta

SEQ ID NO: 47009 - DNA, 450 bp, Zea mays
  unsure (1)..(450): unsure at all n locations
agcttgtagtctgtgttaaggtcaatatggtattcattaatatttccatattggccaatacttctgaatgtctctgcgtaaggattntcccttancaagtntgctaatctggtcatcacattctgatctttagctctgaagacttcgtcacgcgcaagacgcattcgatgcgataaaagaggatcatcatcgtagaagtacaactccaggtggtttggatcactttcttgacgaccaacagagtgtatccggtgatatacctgaccatgtgctttgaatgtataaacaccatctcttgaacttgcaagatnttggtcatactcgcagttgaatgtggtgaatgaaaagtgaccattaacaaatctagtgttatccaaaaaatgttgtgaatcagcgtccctagttgtgtacaacaagtgaagctcttcgggtggatgtggcatcacaagt

SEQ ID NO: 47010 - DNA, 472 bp, Zea mays
tcaggtgccctcaggagccactgtccatcccatcttcctattatcacaactcaagctgtccaaaggtgacaatcatgtcagtgctaccttgcgtgcgactgacagttctctcctagatcctcttcaagacatggacagacgcgtgatatcacgaggaggcagtccagtgcagcaggtgcttgtcacgtggtcacagtcggatgccgcatcggattcatgggaagatgaagaagctctccgtgcaaaatttcctaaagccaacgcttgaggacaagcgttctttcgaggagaagggaatgtcagctctcctggaatggctgaagggcattctgaagatggagcatgggagacaacgctggatgggccacaagacaagatggtgggccgacgcactatgaagcccagctccaaaacttctggtgccgaatggcattcgtaaggcccgtattaaatagtggttgtatagaataat

SEQ ID NO: 47011 - DNA, 473 bp, Zea mays
  unsure (1)..(473): unsure at all n locations
agctagtgaagaatcttcatcccaacatgggctattcggcggtgccagagccaacccatgttagtcttagcaattaaacatgtgtcgagctcagctctatcaaaatctactaagtatagctgaccctctaacacacccttaaatgctattgaatcatcacttcttctaaagacagtgacacctatatcagtaaaaagacagttgtagcccatttgacataattgggaaacagaaagcaagttgtaatctaatgaatcaacaagaaaaacattggaaatggaatggtcaggtgaaatagcaattttacccaaacctttgaccaacccttgatttccatccccaaatgtgatagctcgttggggatctttagtnttctcatatgaagagaacatccttttctccccggtcatgtggttggtgcacccgctgtcgagtatccaacttgagcccncggatgcataaacctacaaaac

SEQ ID NO: 47012 - DNA, 490 bp, Zea mays
  unsure (1)..(490): unsure at all n locations
tcttctcgtcgtcgatgagcgacgccaacgcgagcgcctcctgctagtgatgtttgttcggggtttccaagtaagaaaaatggattcatctttggcgttggtttatgaaaatgactcacaagtcagatccatggaaaatatattacgaagaataaatgtcatacatataaaaaaggaatttaagttgaaaacaatattcaaataaaaggaattgcatgcaaggctctttnttaaatactactccctccatacaaaaatataattcaggaatctcgttgataattatctactactacacattntgcaagggtagcaggtaggctctgggagagatgtagtagatattctactgtaatatatattgacataaatacacatgtggtgtagtggtagctacaagcatatttgcttgaggggtcacacgttcgaatcccattgngggccacattatgtntttntaatttaattntagctaggcatgtgatgcacg

SEQ ID NO: 47013 - DNA, 334 bp, Zea mays
ttcgaatttctcctgcacaagcgccgcacttactgcagagtgtgaagctgctacatacaatagtaacggagcccctggcgcaggtggagttaatgttgttatatcaatcaagtattgcttcagctcttcgaaagctttctgttgagctgggccccactgaaagacttcggctgactttagtatttcaaagaatggcaagtttctttctgctaatctagatataaatctattcaatgaaaccagtcttcctgccaaccgttgggccctctctttgtgctcgacggttccattcgaaagatggcttcgatcttgcttgggttagcttcaatcccct

SEQ ID NO: 47014 - DNA, 483 bp, Zea mays
ctcagcttctaagggagaacacgtgataagttgactatcgttcaatttgaaaaagatagaccttgtgcagcttgtcaagcaggtaaacaggtgggaggagctcatcacagcaagaatgtgatgaccacttcaagaccgctggagctgctgcatatggacctcttcggacccgtcgcctatctgagcataggaggaagtaagtatggtctagttattggtgatgacttttcccgcttcacttgggtgttctttttgcaggataagtctgaaacccaagggaccctcaagcgcttcctcaggagagctcaaaatgagtttgagctcaaggtgaagaagataatgagcgacaacgggtccgatgtcaagaaccttcaagtggaggagttccttgaggaggaagggatcaagcacgaagtctacgctccctacacaccacagcataatcggtgtggtagagaggaagaacacgacgcgtatcgatat

SEQ ID NO: 47015 - DNA, 429 bp, Zea mays
  unsure (1)..(429): unsure at all n locations
gacatgagatatccaagatttagcaacatccattaatccacatggatatgccatttagagataagttgataaaacaagcgtcatgatcctcggagaagggggtatgagaatgaccagaaatgagagatttaggcaaatcaacatctgatgcttgagaacgggttatagcagataaccagataacagggcagaatcgatgaaggatccagagattcggatgataaagccacaacacgattcacaaaggtaaagatttactatatctaagtgaaaagagaggtcatcaacccagatggcttctatgttgagcagaagagaattaatgaggattttggacaaggtttccaaaaagaatttgaggctagacatgtnttgcgtgaacagacaataaactcaattttttatatacacaagtgcacaaagaaactt

SEQ ID NO: 47016 - DNA, 456 bp, Zea mays
tcggcatgacagcagaaaaggagaaccgacttatatatgaatagccaaattagacctcgaagaattactatagagttattgataaatgtaaagtgcattaatgtaattttacacgggctgcgtcccgtgcctataaatagatgaacagtattcccgtactgttcacgctgacttggcattcgctttttgcatcacgcctgtacctttacttttcatcaattcgaaggtacatttataatttgtttatatggatttgataataaaaagaagttaatgaaaatacctgtattattatttgtatttcttatatgtgttcttcttcatcatctatcgaacttgcgaaggtctttttcctcgtaaccttcgtccagaattcattatatccgaagggatataatgtttataaggacgaaggactttaacatttaacactttttatgttgccttgttcttaat

SEQ ID NO: 47017 - DNA, 410 bp, Zea mays
agcttatgaagattcttcatcccaacatgggctagtctgtggtgccagagccaacccatgttagtcttagcaattaagcaagtgtcgagttcagctctatcaaaatctaccaagtatagctgaccctctaacactcccttaaatgctattgaatcatcacttcttctaaagacagtgacacctacatcagtgaatagacagttgtagcccatttgacataattgagaaacggaaagcaaattgtaatctaaggaatctacaagaaaaacattggaaatagaatggtcaagagatatagcaattttacccaatcctttgaccaaaccttgatttccatccccgaatgtaatagctcgttgggaatcttgagttttctcataggaggaagaacatctcttctcccctgcatg

SEQ ID NO: 47018 - DNA, 465 bp, Zea mays
  unsure (1)..(465): unsure at all n locations
agcaaaaggggcaacaacctatggtgcatctctggatttcaaggaagtgtatactctcaatgattnttaaatatctcttgcattcacatagcctcagcctcatatgtatgtggtcatgaacagaattgatggataatatctatccaagcactgtgctccacaatatcttatcttggcaccttaacatatgacggccctaatgtgagtcctaggcctgttcagaaattacaagcccccagttctgcagaaatataaatgatgtactatcttttactttcatttggcaaaggaacttgcaatgtttgaagtattttatcatttatagttattttccatacttacaactatctgtgcaaatgctgggcatataaaaagtgaagaacaccaaattntgactgaagacgttggcatggaatcttctgtgccaataggagcaaataatanaacaggtgaagatgacacaaa

SEQ ID NO: 47019 - DNA, 497 bp, Zea mays
  unsure (1)..(497): unsure at all n locations
tgcagctggatccgtcttgacagatgcgctttgcctcttaaaggtgctcctcccgtcgctgacctcttcgggcaccgcgacgaacacctcgtgtgcggccagctcgtcctgcagcaaggagcttggggtggcggcggngctgcatcgtgcgctccgcagcggctcccactcctccatttgcttgccgcttctctcttacggtccgaagaanaagaaacgcgctggagctcgatcggtggtgtgacctcgtagaccgtagtatccggccggcctgtatatgatgagtatgtatctgtattctgtagtgaaagaaaatgggagggcaaaagaaaaggaacgtggcgtatccaccctaccggnggtgacgcgagactgtgcgtctattcgtgcttgctgcattgacccgccaattaactaccccaaagtcatctgcacgatgcagcgcctgcattagcagcaagcaatacgcgagcatgtcgagctcatgtcatacgtac

SEQ ID NO: 47020 - DNA, 435 bp, Zea mays
ctggctcggagcagccaagagtctgctcagtctgggtgcacctgactgtccggtggtgcaccagacagtgtccggtgcgccaggctgacatctgcgaactggctgctctcgggacttcaacggcggcgtacggctataaatcactggactgtccggtggtgcaccggactgtccggtgagccaacagttggtcgggccaacggtcggccgcataatccgcgtgcaacgcgtggcaagagccaacggtcagaaggggcaccggactgtccggtgtgcaccggacagtgtctggtgcgccaacggctccaaagcgccaacggtcggcttcgccaaagaaggaaagaaatctgcaccggacagtgtccggtggtgcaccggactgtccggtgcgctatgcgacagaaggcaagaattgccttcaggaatgctctcaac

SEQ ID NO: 47021 - DNA, 495 bp, Zea mays
  unsure (1)..(495): unsure at all n locations
agcttctaaagggagaacacgtgataggtctatctcaatgtacatttcgaanaagatagaccttgtgcagcttgtcaagcaggtaaacaagtgggaggagcacatcacagcaagaatgtgatgaccacttcaagacctctggagctgatgcatatggacctctttggacccgtcgcctatctgagcataggaggaagtaagtatggtctagttattgttgatgacttttcccgcttcacttgggtgttctttttgcaggataagtctgaaacccaaaggaccctcaagcgcttcctcaagagagctcaaaatgagtttgagctcaaggtgaagaagataaagagcgacaacgggtccgaattcaagaatcttcaagtggaggagttctttaaggaggaggggatcaagcacgagttctccgctctctacacacctcaacanaatggtgtggtagagaggaagaacatgacgctcatcgatatggcgaggactatg

SEQ ID NO: 47022 - DNA, 490 bp, Zea mays
  unsure (1)..(490): unsure at all n locations
ngcgcttttattaattggtacattgactntcgccatgcactctcaagtgcgcaagtatgaaagtgatggttntctcccaacccacttctcataaggggttttctcttctttgcccatacgaattctattcagaacatgacatgaagtcaggactgcctccccccaccatgccttagataaaccacaagtgtctaacatggcattcaccaggtcagtcaacgtacggtttttcctttcagcaatcccgtttgactcgggtgaatagggaggagtcctctcatgaataatgccatgttctgcacagaaatcatcaaagactttgggaaagaactcgccaccacgatctgatctaagacgtttgatctttctctctagttggttntcaacctcagccttatagattttaaagtagtctaaagcctcatctttagttnttagcaagtatacatagcanaatctagacgcatcatcaatcaatgtcatgaagtat

SEQ ID NO: 47023 - DNA, 435 bp, Zea mays
  unsure (1)..(435): unsure at all n locations
agcttctaagggagncacatttaggactatctttatgttcatttgagaaagacagggtttgtagcgcatgtcaagcaggaaagcaagttggtgcccatcatcaccacaagaacatcatgacgaccgacaggccgcttgagctactccacatggatctattcggcccgattgcttacataagcatcggcgggagtaagtattgtcttgtaatagtggatgattattttcgcttcacttgggtattctttntacaggaaaaatctcaaacccaagagaccttanagggattcttgagacgagctcaaaatgagttcggcttaaggatcaagaagattagaagcgacaacgggacggagttcaagaactctcanatcgaaagcttccttgaagagganggcatcaagcatgagttctcttctccctacacaccacaac

SEQ ID NO: 47024 - DNA, 413 bp, Zea mays
  unsure (1)..(413): unsure at all n locations
tanagccatggtaagtagcataggcaagtaaaatgcgaattgactcaagcctagctacgggtgcataggtttcaccgtaatccaaaccttcgacttgtgaatatccattggccacaagtcgggctttgttccttgtcaccacaccatcctcatcttgtttgttgtggaagacccacttggttcctacaacattttggttaggacgtggaactaaatgccatacctcattcctcgtgaagttgttgagctcctcttgcattgccatcacccaatccgaatcttgaagtgctttctctaccctgtgtgctcantaagaggaacanaagagtaatgggtcacaaaatgagcaacacgagatcgaagtagtacccccttatgtatatcgccgaggatggtgtcacggggtgatctcg

SEQ ID NO: 47025 - DNA, 376 bp, Zea mays
  unsure (1)..(376): unsure at all n locations
agcttacttgggtcgtgaaccttccagtggtcttgtgtattgagcgcccgttgtcgttgctgctgctgctgccgaccctgctgccgctgcccccgcggtgacgacggccggtgtgacataagtggcggtggtggtggtgtctaacctgaaagaggtggcggcagagggctcacgcctctctgcccgccatggacccgaagatcggcctncttatccccaccagccgtcttctgacgcttctggggggagtccaaatcgaggggaaggtccgagacaagggacccatcggcgcgacgcagtcggtgtcgccttactcccttccgacctccggcggcgtncagagtggaggagttgcatgcatgccccttgcccttgt

SEQ ID NO: 47026 - DNA, 461 bp, Zea mays
tcgtagaaacattcttcagagctatacttcagagatcaatattgtttctccttgtgacttggcatgatttgcccctttttcaaagcgtttccccgaagatcgatatcatactcccttcttatgcctcatgcggtatgatgtatgatgcttatgctatgcaaaaaatgatgtgatgatgttatgctatgtaaggtgatattccgaaggtacacgcatatctgcgcgacaaaacacaatctttttgtgaatcagcgttgacttttcgctgtaagcctcccttaagagcttcttcgccttttacttcagcggaatcagcgttgacttttcgctgtaagctctgcattcccttatgaacgaacttggagcttcttcgccttttacttaggcggtatcagcgttgacttttcgctgtatgctctgcattccttttggaacgactttggagcttctttcgcttttac

SEQ ID NO: 47027 - DNA, 430 bp, Zea mays
  unsure (1)..(430): unsure at all n locations
gtcacctgcggcatgcaagcttcatactcggctgcattgttatatgcctttattagcaactggagggcgtacttgaggtgttcgcctccaggtgcggagaagagaatccctgctcctgctccctgcagcttcagcgagccatcaaaatacattcgccatacttttgcagtttctggattatccggtacttgctgttctgtccactctgatacganatcaaccagtgcttgagttntgatggcagtgcgaggtcggaactcgatgtcgtgggatcccagctcgcaagcccacttggctattcggccaatggcttccttgttgtgaagaatatcccctattggaaaaccagtgactactatgactntgtggtcgtcaaagtagtgacgcagcttgcgggcagttagaagtactgcgtataatagcttctgaa

SEQ ID NO: 47028 - DNA, 457 bp, Zea mays
  unsure (1)..(457): unsure at all n locations
tcgagatcgaacgaagctccatcttgaagcctgcttctgagganaaaagtattaaagtttcacaagttcatagttaaatggccagagtccgttctaccgctagggttgagcgtgaggtggacgaaactgaagcttcggagactgtccctatctccgaagccatgcaacgatccgggctagtgacttcggaaaagattcctatcgatgatgcagaacaagcaatcgctgaagtagaaggagaagatgctgaggaaactgaccccgaagatgattatcaccttgccacgccaagcaaacccagccatttggacttcgggaaatctactgtttcgaaggctgatctgtccaagatggtaaagtcagggctatttactgaaaatcaaaagaagctattacgcttcggtggagaagagactaccccatagccggagaaagaatgaaatggttattttaagag

SEQ ID NO: 47029 - DNA, 429 bp, Zea mays
  unsure (1)..(429): unsure at all n locations
agcttgcagctactgaaatcgaaactgttatttatagtagatgttattctcttctcagaaaacaaggtgttatgatatgagcattcagattgagaggccataaacagttcatattgtaaagatgaatattttaaataatcacatattntgctctaaacaatgtagttatatattgaaagctatacattgtgtgctgattgttcgagttttcattatagtatctatgtgtgtgtatttaataaattntataatagttctaatatctcccaaattctaataactgaaactaaaatttaacttattgttttaagggcctgtttgaatacacttgagctaataattagttggctaannaatgctagtgtaattagctagctaactattagctgattntagctaggtgaaatcagttaatgaactaatggacag

SEQ ID NO: 47030 - DNA, 453 bp, Zea mays
  unsure (1)..(453): unsure at all n locations
agccgctgcgttntcccgaggctggcgagttccggaggccgttgttccttggagcaccggacactgtccggtgtacaccggacagtccggtgaattatagccgagcgcctctgaanattcccgaaggtggcgagtttaagttcgagtcctttggtgcaccggacactgtccggtgtacaccggacagtccggtgccccagaccagaagtgccttcggttgtccttttgctcctnntgtgaatccaatacttgatctttttattggctaagtgtgaaccttttgcacctgtaagacttatacactaaagcaaactagttagtccaattattggtgttgggcaattcaatcaccaaaattattaggaactaggtgtaagcctaattccctttcaccgacacatccaatggggaagcacgagtcaacactangcatggaccgggacaggccatgct

SEQ ID NO: 47031 - DNA, 482 bp, Zea mays
  unsure (1)..(482): unsure at all n locations
gcttgtatagatagaatgatagttttatgattnggctattggatcaaggggtgttgcgtgcagaagatgtccaagggatgaggagcgagccatggtcgccgccaggcatgaggagcaagccatccttgttgagtgcaaggcaaggtctccacctccatgtgggaaacggaaggaccgggccaagtcaccggaggggagcgcaagggcatgcacatgcccgaacacactcccgaccaagtcaccaagagggttgtttccatatcctgttnttatattaattacaacatgagttccctaatttgttcttagatgtgttgcagagttcatagtttgctattttttgtgacacatgtgtgcgatttgaaaacacatgtcttgtctagtgctttcctgcattgagaacaatgtaatagaatactatatcttttctataatacaatgtaatatatgatcttactatagcactcgaataagctaaacat

SEQ ID NO: 47032 - DNA, 453 bp, Zea mays
  unsure (1)..(453): unsure at all n locations
tgatcgtcgatctgacggtgaagatatcgtaccgcttcgcttaaatgagtggtgtaatctgaggcgcataatcctaatccaacggcctggatagatctataccccttcgtgggtctaattttcacttgagcccctcggtttatgtcaaaacaacccgcggtccacatataggagattctgagtctagagatttattacaccagggcccctggactttccagatattgacgcccactccagagctcatgacaatcaaataaataaattcagacatggattgttaatataaaaacaattccgagaacttatttaatccatagaaaatccatttntagtccaaatcactccatttcagttgctagaattttgtaatattgttctctatcatttagtgtctctgtttggtcatgaaaatagttagaaaattaatttatcatttaatcctatctcaag

SEQ ID NO: 47033 - DNA, 347 bp, Zea mays
gatgtacgaagggatctggatcatacgctaggaagggctaccacacgtgcagttgtcacgcgaccttggacacaaccggaacattgcggataggcaaaacccaactacagatcaatcaagacaatgctgaatctataattcgcaggtagactcccgagcacctctcggaaagccctgtcagggaggagcgtgtggaggatgtcatagtatcgacaagaccacctagaacgatgccaaaactcacgagagacgtgataaagagcaagatagtgaagaacaatgggatatgcgatgtaatctgatccatcgatgctggatatcttaatcggcacgatcctctatatata

SEQ ID NO: 47034 - DNA, 485 bp, Zea mays
  unsure (1)..(485): unsure at all n locations
tatcaatcatcgcatccatagcagatagcttgggttctgtgacacccctactcattcccaacttagnttcattgcctgaaagtggagattatcaataatcaatctcctgcgtaagctgaaatttaaaataaatccatgtcacaaaatctgattcatatataaaaagggtcagactgaaaaacaaattgtcagctactctgcatattactataataccattgaaactaagtttgtaggaggtgtgtgagcaaaaaaaaaattaataataatgtgttctacatgattgttgtaacttgtaagactaaacagcattatatttactgattactgaaagcctgcaaactatttaaatttctgcaatcaaagcactaaagcacaatttcactgagtacagccccttttcttgtctcagtgtgcaatgaagccctttcaangtcagcattcttgaataagcccgttactattaggcagacaatatatgtatc

SEQ ID NO: 47035 - DNA, 476 bp, Zea mays
  unsure (1)..(476): unsure at all n locations
gcttgtgtttacaagaaagaaagtgggagctcggntgtatttctgatcttgtatgtgcatgacatattattgattgggaataacattcctatgctggagtccatcaaggcttcactggaaaaagagtttttctatgaaagacgtaggggaagcagtatatattctgggcattacgatctatagtgataggttgaagaggcatatagtattaagatacatacattgataaagtgttgaaatggttcaacatggaatagtctaagaaaggattcttacctatgtcacatggtatacactntagctagaagcaatgtcctacaatggctaatgagcaggagcgcatgagtaaagtaccatacgcctcggtaactggatcaatcatgtatgccatgctaagtatgcatctagatgtntcataagctataaatgctatgagtangcaccangctgatctatgtgatggtcactagacaatg

SEQ ID NO: 47036 - DNA, 428 bp, Zea mays
ttgcctcgggcagactaatacaagaataagattacactctatgggcgtggagagatggcgagagtagcatgtaccctccgtggcaagaggctagacggtggtgtatctgtgctctcggttggcgtgaacctgatctggtcttaagaaccccggtggcgagttgacatatgcaagggttaagtgctacatatgtcgtgtgattggagatcctcagctaagtataatcgattcggatcgccgtaacttcgcggatatgaagacttggtcactgacctatacgtagaaatccagcaaagatgacgggttgttaagaaattggctagtgcaggtcaagtgattgaactacggtagcaagaactctagttgcaggtaatttcacttaacttgacaaataaaactggattcttaaggatccactattagtaagt

SEQ ID NO: 47037 - DNA, 375 bp, Zea mays
  unsure (1)..(375): unsure at all n locations
agctntgacagccagtcgtgtcttttctagcttctgtgcgacgagtctcttcaaagcacgaagatctttaatggtcaaatccttggccgataactgctgtccaagccgctaaacttcatcctgagatacttgcagctcgtaactatgatggtccaggtccgacatagtgaagcagtggctcctttccaaaatagttaatgaagtgctagcgtcacgatataacctgtccagattatcacgagaggccataagtgctcgtctctcctcctacgaacaaagatcaatattcagcacccagtcagcaataagcatggcaaagtcaaccaagggagtttacctcatgtgccatcctttctgagtcaagctgagcattga

SEQ ID NO: 47038 - DNA, 340 bp, Zea mays
  unsure (1)..(340): unsure at all n locations
tgtgatgttgngatgtgcctgccgctgtgccccatatccttatccaacagagcggcagcatctatttctaggcaacaacagagtgacaagcagttgcgtgaatccccgacgtgcgtggcgtggcgtctataattcgtagggccatcgttattcctgcctcgcccccacctgtcagccagcgcccgccctcctcctttataaggatcgagaggacggacgtggcgctgcagcctgcaggataaggagcgaagagagagagagacgcangaccgccggcgacgatcgaggagggaggaaccagatacccggcggcggcgatcgatggctccgcgcagctcat

SEQ ID NO: 47039 - DNA, 478 bp, Zea mays
catgcaagcttgctgcaagaagaagaactaactggttcttatatcctacatgtacgttataattatccttttcgctgggtgatatagtgtacagtacagcttgtatctacccaagacactatccagtgcatagctgaagttgacgctctcaaagtttatttcacaatcaaatattgacacattctttttgttcttaaagggctcttcacctgagatttgaaaaagggatggtggcgctttctttctgtgactttgccggcacacgggaggagaaagcaatgatggcggcttataggcagaaagaatggccaaggcgcttcaaggtgactcggactggactagatacatctgttacattggactgagaaagaatccctatgagaaatgaagcaccgacactaactatacgcgctagttcgggaacaccgtcttttacgagattttattttccaagaaaactatttcattttttacgaaa

SEQ ID NO: 47040 - DNA, 491 bp, Zea mays
  unsure (1)..(491): unsure at all n locations
cgatggccaagtcaagatacaggtcccagtgtantttgtatctgaagttcttagtatatcaaagaataactacacagaattagagaaggtattatatgctgttttgatggcatccaggaagcttcggcactattttcaagcttacaacataattgttccctcttcacaacctctgaaggatattatgaggaaccgagaagctactggaaggattggaaaatgggctgcagagctcaacgaattntgtattgaatatgttcatagatcttcgattcagtcccaggcgttagcagacttcattgctgactggactccaggggctcaggaggaagaaacaaataaagacgccgaagcatggacagtgttttgcgatgggtcttggggaaccttcggagcgggagcggctgctgtgttggtttcaccttccanaagtaaaacttgctatgcgacannagctngatttagttgcacaaataacattgccgagtatg

SEQ ID NO: 47041 - DNA, 419 bp, Zea mays
  unsure (1)..(419): unsure at all n locations
cggaagaccgtcgactttatatgttgaagaaatgcgatctaaaggtgcgctggcaagcctacgacggtctccggtgagggcacgattgccgcttaacccaagcgcgccaccgaggtaacttttgccacgatacccagtcactttaccacagccaacgacgaccggtcacgccgcgatggcgttcttatcgccggcggagatgtcctgatccataacgcgatagtaactgatgacgatgaacagtgcctctgatccaatacacaacttgactgacagaccaacttagagcccatttttctctcaattttccatagtgacataagttaagctctgcagcaaacttgtagagtatggtacccactacaaactcgctatggcaatcatangtatatntacacaggatcatgtctcaaacccac

SEQ ID NO: 47042 - DNA, 365 bp, Zea mays
  unsure (1)..(365): unsure at all n locations
tctnagggagaacacgtgataggtctaaccaatgttcctttctttaaagatagaccttgtgcagcttgtcaagcagggaaacaggtgggaggctctcatcacaccaaaaatgtgatgacaacatcaagacccctggagctgctacatatggacctcttcggacccgtcgcctatctgagcattgcaggaagtaagtatggtttagttattgttgatgactttttccgcttcacttgtgtattctntttacaggataaatctgaaacccaagggatcctcaagcgcttcctcaggagagctcaaaatgaagttgagctcaaggtgaagaagataagaagcgacaaccggtccgattccaaaacctt

SEQ ID NO: 47043 - DNA, 452 bp, Zea mays
  unsure (1)..(452): unsure at all n locations
agcttagcaagtgcgagttctagatcagtatatttctattcttgtgtcatattataaaccgagatggattagtcgtggatccaaagaaagtagcagcgattctagactggaaagcaccaaaatatgtccaaagaatcaagagtttcattggaatggtcgtttactatcagcttttcattgagggtttctccaagaatgccaggccaatgacagccttgctagcaaaaaaggttgagttcaagtggaccccagcatgccaagaatcatttgagatgttgaagaagaaattgacaatatcgctggtatttattccgcgagatgttcacaagccattctcagtatatagtgatgcttcgtacaccggactgggatgcgtgttaatgcaagaaaggagagtagtggcatacttgtcccgccagttgaagattcatgagaaannataccccactcat

SEQ ID NO: 47044 - DNA, 364 bp, Zea mays
  unsure (1)..(364): unsure at all n locations
actaagcctccaggttaatcttcacctaacagaaagattaagaatgctcaatgcaaatgtatggaactaattgcttcaattggtagttgatcaatagtagctcctttcaagtggcatactttcaattagtaataatctaatttatgataagaaatgtcaatatgaaggttaaattccttttggattaaattcgtaaattggtgcatattggtaatttactcatacatgtgcattgacttataaggaattatattatgcctttatgcctcataaatgatgacttatntgacattcatatataaatatcatcattcattaaatacttcattgtactactaatacctcttttcaaagtggttttttt

SEQ ID NO: 47045 - DNA, 523 bp, Zea mays
atcctcagagtcacctgaagctgcaagcttggaaggttcttcatccccacatgtgcttagcgtctatgccacagccagcccatgctagtcttagcaattaagcatgcatctagaccggcctcctcttttgtaaaatcaactaagtagagtttgccgtctaatgcacccttaaaagctagtgaaccatcacttcttctaaagacagacacatctacatttgtgaatagacaattatatcccatattacataattgacttacggataacaaattatatccaagcgactcaactaagaatacattagaaatagagtgctcatttgagattgcaattttgcctaagcctttaaccttgccttgattcccgtcaccgaatatgattgaatcttggtgatccttgttcttgatgtaagaagagaacatcctcttttcccccgtcatgtggtttgtgcatccgctgtcgataatccagctagagcccccgaatgcataaacctggaagggcaattagtcttgggtcttag

SEQ ID NO: 47046 - DNA, 489 bp, Zea mays
tacacagtaacacgggtgccaatctttccaagtctgcaacctctgtccgagataactcttttgtacaaagctgatggaagaaataattcaactctgaaagcgctagccagacatgctcagggacatagcctcgaaccatcgcaggaagaatccgttcaatccatatgtgtaagtcatgactcttcatccctaagactcacatagtagataagttcacccccctactcatgttagctgcatacccatcagggaacatcaacatcttgatccactgaagtacttccttcctctgggccctgcttaggacaaaatcggccttaggccttctccacgtctttccgccacttggcggcttcatctctaggtttggtctatcacataacgctgccagatccactcttgccttcacgttatcctttgatttatcaggaatgtccataattggtgcccacagtgcctcgacaacatttctttcagtgtgcatcacgt

SEQ ID NO: 47047 - DNA, 475 bp, Zea mays
  unsure (1)..(475): unsure at all n locations
gcttgacatagtctcgaagacagatgcctctatatatttcaagtcttctaaagctattactttttgtgacacttcattgacaaagtaacacaagcgtgtgatgacaactctgacatgctctctntcgagggctcttaccgcaattgggaggaacaccgtcatcatcacatggcagtcatgagagttgtagccaaatagagacaagtccttcatcctgactagtttgctgatattggatgagaaacctgtgggcactntgaccccacgcaaacatttgcaaatctttgttctctcctcgactgacaagttgtagctagctgggggaagaaggcttccctttgaactatccactggatgaagtttcggtctgatttgaagatctactagataattgtgtgaattaagtccgtccttcgtcttactcggcatgcccagcaagggtccaatgatgctgtcaaaaacatttttgtacatg

SEQ ID NO: 47048 - DNA, 454 bp, Zea mays
  unsure (1)..(454): unsure at all n locations
ctaagctntcagagaactctgtgatcaaattggcacgaagattcatcttgcatctgtcacgcatccggagtcaaatggacttggtgaaagagccaatggcatcataatgacaggaataatgaagttaatcttcaatcaacccaggggaaagtggccagatcaattaatcaaagaggtatggagccacaacacaacaacatcaaggtcaacaggctgtactccattcaaattattgcttggtgacgaagcaataactccggaggaagctaaaactggatcaataagagtagtatcttcgacagaatcagattctgaagctgatcattctgtggaaaaagatgctatagaagggatcacgcttcaagctgtggagaacatcaataaatatcaagccgaaacaatcaaatggtgtgatagaaaggttcggctaaagaatattgagccaggacatttg

SEQ ID NO: 47049 - DNA, 431 bp, Zea mays
  unsure (1)..(431): unsure at all n locations
agcttgctacaagtcttctcctttttctctatgtatgaaccttactggaatactaccccacttaaaaagaatgagggtagaactctngaatcttggggatttgaactccttgaagtaccacataacaagggtgttacaggttcttctgctgctgttgctgcttgagctggctgcggagggatgactggcacacggttgattctgggagaaccttcttcttatcttctcttcactatcttcttttctcttctcacttttcacttttcactgcctctttctttctctttgctcttcccactggaggagtctatcgatgagtattaccatcatacagaggaggaaaccaaagactatgaaccatgtacaacagtcttcaacccaagaatcatcaagcattgtgatcttangggcgacggagtgggaaaatggag

SEQ ID NO: 47050 - DNA, 481 bp, Zea mays
  unsure (1)..(481): unsure at all n locations
cggacctatgatactaagctanactacgagaatccagtacatatgctactttaatatataaagctacaatccttgataaatgtgacattaatttaccaagagggattgatatgtagtagcatccttcatgagaaaattattctcatacatgagactatatgagattactaagataaagtgttagtctcaatatgaacaagatatagaaataggctccccctaaagatatgcatcaagaaattgaatgagttggatagatgcactcacttttaaagacaaatagggagaagcattattcatcttgatcaaggcttataaaatttgcaataaacaacttatgtctagtgttctcacaatgaanaagatttagaatgcttacaaccacaccattatttggtttgaagatcttattatccaagtaggtggtgttggtcttgatgtcttccttnttcattgagtggcctctctttgtagttgtctc

SEQ ID NO: 47051 - DNA, 385 bp, Zea mays
  unsure (1)..(385): unsure at all n locations
agcttgttcacgccatatcaatntgtttatatatattgtaagttgnttgtaactcctttgggttccattcccctttgccaatgtgaatgatacactaaggcatttttatttacttcatgtgccacagaacttatgcctgcttgcttctttcagcactttgaaaagctattccaattcgctcggaaaatngaggaattaatgtacaacatgagccctgaggaggtgagtcacatgatttggttctgcgctgtcttcctgaatgtttatgccatgtagtgacctaatctcagagctggactattttctctggtaaattcattggccttgttctagcttggactntgtggtattaaaatatattcattagtgtntatataatgatccc

SEQ ID NO: 47052 - DNA, 485 bp, Zea mays
  unsure (1)..(485): unsure at all n locations
agcttgtggagtaccagatcatcgttagatattagtttctggatgagaagtggtcacccaagttttgttgatgaagcaccaaaagactaatcaaggaaggaatccatgtggaagttcgcaagaagaaggtttgcgtgttggcatcgatgcttcctcaataagctaagcgaaacctagaagcctgaagatgatctttgagtagccagaatcagcgtttgcaatcagcaaccggatgctcctgaaaggccaaattttgttgaagttccatctcctcgaagagtctgcaaagtgaagatatgtagctgaagtaaagctatacccataacccttctaagccgaatctcgaggacgagattcattttaagtggggtagatttgtagcatcccanaaattcaaatcctgaaattttctcanactcgctctannatcaaaatgaatttcanatntatttacaatgttggttgcgagtgatatcaacaaaaaa

SEQ ID NO: 47053 - DNA, 458 bp, Zea mays
  unsure (1)..(458): unsure at all n locations
tgtggaagaccccagatcatcgaagcatataagttcctggatgnagaanggncacccaangtttggtgatgaagcaccagaagactaatcaaggaatgaatccatgtgggagttcgcaaaagaaaggttgcatgttggcattgctgcttcttcanaatgctagctgccaagcgaaagctagaagcctgaagatgatctttgattatccagaatcagcgtttgcaatcagcaaccggatgctcttgaaaggccaaattttgttgaagttccatctcctcgaagagttgcaaagtgaagatatgtagctgaagtaaagctatactcataacccttctaagctgaatctcgaggacgagatatgttttaagtgggatagatttgtagcatcccaaaaattcaaatcttggaattttcctacactcgctctaaattcacaatgaatttcacatttcatttca

SEQ ID NO: 47054 - DNA, 462 bp, Zea mays
  unsure (1)..(462): unsure at all n locations
agcttgacaacaccatttgacatcttacatattatttctgagatcaagaatatttagttcattcctcaacatgcaaaagcgggtcttatcaagtggcttagtgaaaatatccgctaattgatcttccgatctcactccttctaaaatgatatctcctttagcaacatgatctctaaggaaataatgacggatatcaatgtgcttggtgcgagagtgttgtacaggattattagcaattttaacaacactctcattatcacacaacaaaggtaccttttctagaactacgccatagtctagaagagtttgtttcatatatagaatntgtgtgcaacaagcacctgcggcaatgtattccgcttcggcagttgacaaggcaacactatnttcctntttggatgtccataaaactagtgatctaccaagcagatggcatccccagaagtactcttctatcaattt

SEQ ID NO: 47055 - DNA, 466 bp, Zea mays
  unsure (1)..(466): unsure at all n locations
taatatatgtacaggaaccttcagactcacgatgaagctatacacaatatgaagagcagggtcggaacgaaggttgaaccagcgccgaagcagagcgcaagggagcttctgctcaatagcagaaaaaggaaccgacttaaggaggaaaaggttatctagtccccggtagattgtttttaagtcaatagtgaacatgaagggcatgaatgtaatttcacataagctgcgccctgtccctataaatagatgaacaatacccccgtactattcacgctgacttgtactcgcccgtgcgtcacgcttgtacttttgtcttctgtcaagccgaaggtacaaatgtaattctgtattgttcttatttatccatgattatataataaggatatataaatgatgctatgtgactattcatgttatntctcatgtttcatatgcttcttctctcatcaatgtaaaatatgatgat

SEQ ID NO: 47056 - DNA, 434 bp, Zea mays
  unsure (1)..(434): unsure at all n locations
agctagctgacgccgcggagccggtcgtctctttctctctgcccggntaaaaagaaaatgtggcgggtaacggcaggctcgttcccgcctccaccgcggagccggcgcgcacctcgatggactttttatgtttgtttaanaagcaaagcaaaaaaataaaaaaagaagaaggtggcgttatctatttgatggcatccatcgcttattgtactgcanagccttcctttattagcagtgccttattactagcttacttggatttggatgcatgcgactggctggtagtagtaggatcaaacgaaaggccaacgacattagtctagctaggagagagagccagcatcatcagagcatcagagacaggtcatgtatatgcagcaaaatctgataccgttgtggatggatcgatcgataggaataaacaggataacatg

SEQ ID NO: 47057 - DNA, 483 bp, Zea mays
  unsure (1)..(483): unsure at all n locations
ggtgatagaattttgatatatttctggtttgccactctgttttcttgttcttntgcatgttttgaacttgttttattattgttaggtgaagcttcaattgatgatatattcttgtcagtatgctctttttgtgcaccttgtttttaatctctggcagaggagaccttcacctaaaaaacaaagatatatgttgaaatggttctttttaaaagattgcaacgtgatccgggtgtcagagattcagaaggtcttggacatcgccgacgagcgtagcctcattgacaccatcttcttctgctacctcgggtgcaatgcaaggtatgcttatagtctgaactcgcttatggtctgaaatctgaactcgcttaaggtctgaactctgtaccatacacaagatggaccgattatgaatgaaaattcaaatatgtatacaaacattttggtngggcatttgaaatacttattatgctgtgatgtatgtat

SEQ ID NO: 47058 - DNA, 381 bp, Zea mays
  unsure (1)..(381): unsure at all n locations
agcttatgaagattcttcattccaacatgggctaatcggcggagccagagccaacccatgttagtcttagcaattaagcaagtgtcgagttcagctctatcaaaatctactaagtatagctgaccctctaacaatcccttaaatgctattgaatcatcacttcttctaaagacagtgacacctacatcagtgaatagacagttgtagcccatttgacataattgtgaaacggaaagcaaattgtaatctaaagaatctacaagaaaaacattagaaatagaatggtcaggggatatagctattttaccaagacctttgaccaaaccttgatttccatccccgaatgtgatagcttgttggggatcttggttnttctcatat

SEQ ID NO: 47059 - DNA, 454 bp, Zea mays
  unsure (1)..(454): unsure at all n locations
ggcacacatagctcatttgaataccttcgatcatatctcttttatatgctatgactaatgtggtttcaagtttatttcaaaccaagtcataggtatattgaaagggaattggagtcttcggcgaagacaaaggcttccactccgtaactcatacttcgccaccactccgagcaactctctcttctttgggggagaaatgagcatcaaggaaaaggacttcatccttgggggagagagtaaaagctcaaacgcaaaaggacttcgtctttggtataatcttaactcacttatttatgaccaaaggggaagattgcacttccagggctctattgattccgtttttggcgattcatgccaaaaagggggagaaatgagctcatagcaatatgaccgcaccaccaccaaattcataaacttagtgctttccanaagtctttatcatttggtatcctat

SEQ ID NO: 47060 - DNA, 402 bp, Zea mays
  unsure (1)..(402): unsure at all n locations
aaatatccctcgaggacaaaatgagcatgctgatttgctaactaagtcagcagcacaggggctgcccttaccttcggatgtcttcttcgaaacaataaaagcaccttcggtggaacttcttgaaagagcagtcctcaatatatctcctggttatagcgaagattggaggactgagatcatctcttatcttcagggtaaatttctttcagatgacgaagcttataacaggaggatagaggcaagagctcgtccatatgtcatgatagaaagagagtngtacaagcatggagtttgtgctccgctactcaagtgtntatccagaaccgaaagtatagaagtgatgaaagaaatacatgcangcctgtgtggatctcacattggaatctaagccgtacttggaaa

SEQ ID NO: 47061 - DNA, 483 bp, Zea mays
  unsure (1)..(483): unsure at all n locations
ntatcatagttctacaatatagaatgctctccctaagtatgtgcatagagaggaatacatatttaggccttaaatgccaaatgcacataatgaggtcaaagagaacatatctatagcataggaattgtgaagtgggatatgtcataatataaacatgatgctcatgatagactatgcacttaagaaaacatgttataaacatttgatgcatntacccttaagggttcaaagaagattaaggaacctccacctttggaacaaaggtagcttatcctcgttataaggttacgctttaagctctttgacaaaaatattacttctcccagacttaacaaaaattgcaacatagcagaattgatatctcgaaaggttagactaggtatgaaggaggggttatgcatagacatgcctataattcctactgtaactaaagacatgcaatatatagaattattntgcacaagagaggatcttacaactagt

SEQ ID NO: 47062 - DNA, 408 bp, Zea mays
  unsure (1)..(408): unsure at all n locations
agctnngtactattatttttaccttcaagtatcactaatataaagatctccgtataagcatcaatcattgagttggagagatctctacacctcaacattagtgattntttgccaagaccttttagcagcaaattataggtaattataattgtagtactccactatttttcatcttctcaaccaaacgaaaagcctgctcagcgtcatatgactctatataagcatcacggattgagttgtacacatgtgcattcggtgcaacatctttgtatatcatatcaaccaagatagctatagcttctgccagttcttgcaaaaagccttgacaactaaacgaaaagagataacatttgactntatccttttctcttccatatcagacagaacagtgaaactggtatgccctct

SEQ ID NO: 47063 - DNA, 360 bp, Zea mays
  unsure (1)..(360): unsure at all n locations
ctaagcttctaagggagaacacgtgataggtttaactaacgtgncatttgataaagatagaccttgtgcagcttgtcaagcaggtaaacaagtgggaggagcacatcacagcaagaatgtgatgaccacttcaagacctctggagctgctgcatatggacctcttgggacccgtcgcctatctgagcataggaggaagtaagtatggcctagttattgttgatgacttttcccgcttcacttgggtgttctttttgcaggataagtctgaaacccaagggaccctcaagcgcttcctcaggagagctcaaaatgagtttgatctcaaggtgaagaatatagagagcaacaacggctccaa

SEQ ID NO: 47064 - DNA, 466 bp, Zea mays
  unsure (1)..(466): unsure at all n locations
agncttttgcgttaggtttcagaccttggcttctcgtgttttacacgaagaaatctagccttataatggcctcggtggtaagtcgatggacatagactttgaatattctcagtacctctcacaacgaagctgctcaaaggaaatcgcagtccagctttcaaaaagctctggtacactacgacctcattctcttcaaggtgtgggcaagttttttccctttgtcggccctcacaatggacaaatcccggaaatacctccctctcatattaacaagatgattctctttgatagtcgatgtaccataaactgaatggctaggtcgccatggacgatcttctgagtctctcgcaccactggccacattatagctgactctgtcaccgctatcttctgacaaaccttccacaatctccttgtgaagtatgttcgtgtcgagtctcgacatcgctatagaaaccccatattt

SEQ ID NO: 47065 - DNA, 381 bp, Zea mays
tgaagccatggtaagtagcataggccaataatatacgaattgattcatgcctagctacgggtgcataggtttcaccgaaatccaaaccttcgacttgggagtatcccttggccacaagtcgagctttgttccttgtcaccacaccatgctcatcttgcttgttgcgaaaaacccacttggtacctacaacattttgattaggacgtggaaccaaatgccatacctttgttctagtgaagatgttgagctcctcttgcatcgccaccacccaatctgaatcttgtagtgcttcctctaccctgtgtggctcaatataggaaaccaaagagtaatggctcacataatgtgcaacatgagatctagtggttacccccttatgga

SEQ ID NO: 47066 - DNA, 493 bp, Zea mays
  unsure (1)..(493): unsure at all n locations
ttacagcacctgcggcatgcaagcttagctggtgatgaagctcgaagtcaccttaattctgtaataaactcatacttggtgctgaccttttccttgaaacttaagtttaccttataacgttttgttatgtacggaacgatgaagccgaagagcaatgaaccgaagctttttgcggatggtgataagtgacgaagctaaagacactactatgaaaaaactttntagagaaattcttgaattatccttgtaaaaaatattgtaatttaggaactagacactactctgtaaatttgtccataccttgtaatatatttttacctttatgtccatgtatgaactgctttgatgtggacgaaacttgtcattttttgaaccgaaggcgaaaaacacctttccttcttttcgtacacaacggagcataaatatgcttcttttntctatttgccgaagccttgacattagagccgaagcaactgtctgtacttctgtggta

SEQ ID NO: 47067 - DNA, 480 bp, Zea mays
  unsure (1)..(480): unsure at all n locations
tgtaccactatatagaaatcaataaatcataattactgacttttcataaatgtgaaaacttgcctagaaaccattatcagttatgctgncaagacgatcaggatagccctaagacatgaagccttatgatactagatgggtagctaggtggctaattgaatatgccatacacgctactatgatatagatggggaatttctatacccctatgcttgatgagaggacgcttataatgagcatgcatgcatcgtttttccatccttttggtcaaatgttattatcaataagaagttacataaaataacgagtcacccgtaataaaattctaaaaatttataacggagatctcaacttaatcctagaaaagccaaatcctcaaagatattttttctagtcttttgcactacctccttgtgttattggttcttttgtctcgcttacacttgaccttgcatagatgacttnccacgtacccactga

SEQ ID NO: 47068 - DNA, 319 bp, Zea mays
  unsure (1)..(319): unsure at all n locations
caccgactgtgcctgcttcaagcggagagactaagcaacagcgcgcgaaatgctgggtcgcggctggaacagcgctgggcggggctcccgccccgtgctgaagccaanggagggcgcgggaatgggggttgctggggggagattctgggtccgggcgcggaccgctanggtggacggaaggagtgagcgggaggaagtaaaagcacggagggaagcgatgatctgcgcgggtgacggcgaagtaaccctatcgagcgagcgagcgggcgggcgatcgggcgggcgatattganggggagcggtgagaggangggatggt

SEQ ID NO: 47069 - DNA, 490 bp, Zea mays
  unsure (1)..(490): unsure at all n locations
tgtagaatgctcccnctaaatttgtgcctacattaaaatcttatctttggccttaaatgccaaaatgcacatacttaggctaaatcgaagcattgctacaccttagcacctgtgggatgcgtataacacacaaatgcacagaatcagagttaaacaccattcaattgagtggatatatcacaggaatatcaacctaccactattcaccattaagatactaatttaaactaagataccaaattaaagcaatcttaaagcaccattaacccattaaccacatgcaccattacccatatgaatatctattacagaatgaacacaatagatgccaattaattcatagcaacggaagcactagtccataatactgcaagaagcatatgataagaattatcaataacacaataacacactagcaaagctcaaactaacacatcaccccttatgataagctnntctctcaggttgagataagctttaatgcacaact

SEQ ID NO: 47070 - DNA, 365 bp, Zea mays
agcttgagtttgaaggccctatatagcataagacctgttactctctcaattaaagactttgccacccagaattgtctaggtctactcttatttggtggacctaggaatgtaaccttaatctttccatttgcaacctttcttagaacatagtgagcattgaaagcaaatgttcttgagtgcttacgcaagggagttggtggtttagctttgcagttgtgggcaaaatgaccttcatttccacactcaaagcatttgataagcttgtgaatctgctttggctcgtattgagtgatagctctcttttgcacaaaagcattgtatccaataccactcttgttatttctataacagtgttcataagcagc

SEQ ID NO: 47071 - DNA, 475 bp, Zea mays
  unsure (1)..(475): unsure at all n locations
ctaagctntccacttgactatgaaggggccctcccactagggctccatcttgttcttggactccgtccgagctgttcggatgagtacgaggtcctcctcgctgaactctcttgggatgactgcgtggtcgcgccacgctttggtctgggcttggtatctgtttagggcctgtagggcgaagacccggtctccgtcaatgagatcttttgaagttggctcgtccacgtctgggacggctgacggaactgtacgcggggacccatgctttatttcttgcggggtcattgccttcgatccgtataaaaggcggaaaggagtgaactcggtcgccctgcactcagttgtgtttagcgcccagactgcctccggcaataaatcggtccatctgccttttctttcatcgaggagcatccttttgacagctgtgaagattttcccattgcacgctccacgaccccgttggactgccgatgat

SEQ ID NO: 47072 - DNA, 410 bp, Zea mays
agcttatgaagattcttcatcccaacatggtctagtcggcggtgccagagccaacccatgttagtcttagcaattaagcatgtgtcgagttcagctctatcaaaatctaccaagtatagctgaccctctaatacacccttaaatgctattgaatcatcacttcttctaaagacagtgacacctacatcagtgaatagacaggtggagcccatttgacataattgggatacggaaagcaaattgtaatctaatgaatcaacaagaaaaacattggaaatggaatggtcaggtgatatagcaattttacccagtcctttgaccacaccttgatttccatccccgaatgtgatcgctctttggggatcttaggttttctcatatgaagagaacattcttttctcccctgtcat

SEQ ID NO: 47073 - DNA, 418 bp, Zea mays
  unsure (1)..(418): unsure at all n locations
ntaccaaatggacgtgaagagtgccttcctcaatggacctattaatgaagaggtctatgttgagcaacctcccggctttgaggatagtgagtatcctaaccatgtctataaactccctaaggtgctttatgggctcaagcaagccctaagagcatggtatgaatgcctaagagattttcttatcactaatggcttcaaagtcggtaaagccgatcctacactctttactaaaactattgcaaaagatttgtttgtatgccaaatttatgttgatgatattatatttgggtctactaacaaatctacttgtgaagggttagtaggatcatgactcaaaaattggagatggctatgttgggggagttgaagatattttttggatttcaagtgaagcacctccaagaaggcaccttcttga

SEQ ID NO: 47074 - DNA, 400 bp, Zea mays
  unsure (1)..(400): unsure at all n locations
agctttatatgctcaaaacatatgcctatatatgctttgtcgccttcaacggtattatcaaagcttttatgtgctcctggtatacgtgtgaatgtcagccatcatgctgttacttttatttgcaggttttggaaacctccccgtgcaggggaggtgttgccgaatttttttgttgacagacttgtttatntttttgcagaggtcttcctagccgctgcgggtctgcctcgcatcgccactgcaccgacgcgccacagccccactaggctgactccaccgccaccctangtataacctctacatccgcatcatggtcgtagatcacgtaaccctgttaggcgtcttccgttcgaaagagatacggtgtagatatgcagatctttgcatatctacaaatgta

SEQ ID NO: 47075 - DNA, 465 bp, Zea mays
  unsure (1)..(465): unsure at all n locations
tggcggtacaagctgatgacggcggcgagagtgaatgggcaatgtccacggccgcaagccgctccggcaagttcgtcgttgagcacacgagcagcatggaagagcagccggtcataatgagagaaattatgtggtataacgaggggaaaattatattttacatttttatcattttattaatgagtcttttttaaaaacacgactaagggtataggtgagcacaccaccaaaactaaaggcaccaatttaaaaaactcaactggacggaacggtgattggaggaggatttgatcctgtcgtaactgcactatttgttacacggacttgtagcaggttgttacgctattgttcaggatgctattactccgctaactagataactatagatccgatcttatctacatgtaatcctcatctcttgtacctatgtattgctcagctaatggcgctatantaacacataac

SEQ ID NO: 47076 - DNA, 489 bp, Zea mays
  unsure (1)..(489): unsure at all n locations
agcttctaagcgagagccaattatgatttacaatgttcattntgagaaagacaggatttgtagcgcatgccaagcagganagcaagttggtgctcatcatccacacaagaatatcatgacgactgacaggccgctggagctcctacacatggacctattcgacccgattgcttacataagcatcggcgggagtaagtactgtctagttattgtggatgattattctcgcttcacttgggtattcttcttgcaggaaaaatctcatacccaagagaccctaaagggattcttaagacgggctcaaaatgagtntggcttaaggatcaagaaaataagaagcgacaacggaacgaagttcaagaactctcatattgaaagcttccttgaggaggagggcatcaagcatgagttctcttctccctacacaccacaacaaaatggtgtagtggagaggaagaatataactctattggacatggcaagaaccat

SEQ ID NO: 47077 - DNA, 483 bp, Zea mays
  unsure (1)..(483): unsure at all n locations
cttctacaaactcggtcaccgatctacctgataaggcatataatctccacgttcagaataagaaggggggaatgcatatggtctcaaacaaaagggtatctgtatctgaaattgttgatctgggtactggttattgatctttcaacaaccttggcctgttccgacgttgtagattccaactttgcctggctgagctttaccgagagctatgacatgggcatctacaaggtctgtgacatcgatgtagtccctaatacaagttccatctgcagtggagtaatcagttccacgaacctgaaggagaaaaggaatcacatatatacggtcgntattcatataaaattaatggatgcagctacttatacagaagtaaaaggggaatcgatggcactgaaatgagcatgtagaatacctttagccctggaatgattctcacagccgcatcanagcaagcaccggatatccgccatgctcgcgagctct

SEQ ID NO: 47078 - DNA, 389 bp, Zea mays
atctatcggaagataccggagccgcgcgcgcgattcgcattcggcgagcgagctgggagcctgggcctacccattggcgacagcagccaacgtggcgcacctgcgtagcgcgactggctccaacgcctactgagatgcgcgatagacggaaccagcagaagacccggggctgggctctcactcgtcaggggcgaagtcgccacgcgcggaagatctgccagcgcacgatcgagacatgccggggaaagaagaatgccctgacagacaggacccagtgacggtgtagcagcggagaagcgaagggtgagaagtgggccatgcggaatacaagaggagatgggccacaaaggacaaagccggcccacgcatatagttggtcttctatttct

SEQ ID NO: 47079 - DNA, 374 bp, Zea mays
ggcgcagccctcggacccggccggacttcaccggatgccctatatcaacctcaccggacttcggacttgcgccgccgcgcgtggaccggactaaccagtgagtctccgaccaattccttgcgctcatagcttctctggcatcccgtggacctccctgacccatttgattgaactatctcgccgtgaccaggccggttttctcgccgccgacgagcatacccgcctgcgcgcgtggaccgaccgacttcggccattttcgacggcgttccgcacaccgttgtgatccccgcgacctccccttcaccctcggccacttcaccggaacagtctcgccgccggtaagcccctccgcccttttcctcgccgcggctact

SEQ ID NO: 47080 - DNA, 441 bp, Zea mays
  unsure (1)..(441): unsure at all n locations
agcttggtcatggctttcttctgcagatcagactgtaactgctgatctccaagataagtcagagatttgtgatcttgtttaatcacaaaggcacccctctgcaaatattgtctccacctgtccactgctaagatcagagccaaaaactccttctcantaaatgaaaggtgtttgttcttctcacccaatgccttgctgatgaaagctatgggcctgccttgttgcatcagaacagcccccaatcctatatctgaagcatcagtttctaccgtaaatggcaagtcaaatcttggtaaagccagaactggagtagaggccatagcttgtttcaagttttcaaaagctatctgagcttcttctgaccatgcaaacccttgcttgttttgcaacagccttgtgagaagttaaccaacaacccatagttcttcacaaatcttctat

SEQ ID NO: 47081 - DNA, 466 bp, Zea mays
  unsure (1)..(466): unsure at all n locations
tgtgaaggttcttcatccccacatgtgctaagcggcgatgcctcagccagcccatgctagtcttagctattaagcatgcatctagaccggcctcctcttttgcaaaatcaactaagtaatagttgtcgtctaatacacccttaaatgctagtgaaccatcacttcttctaacgacagacacatctacatttgtaaaaagacaattatatcccatattgcatagttgactaacagataggaaattgtaaccaagagactctactaaaaacacattagagatggagtgctcattagaaattgcaattntacctaacccttttaccttgccttgattcccatcaccgaatattattgaatcttgggaatctttattcttgacgtaggaggtgaacatcttcttctcccccgtcatatgggttgtgcatccgctgtcgataatccagcttggaaccccggatgcataaac

SEQ ID NO: 47082 - DNA, 404 bp, Zea mays
gaatagcatgcaactggtgggacacacgtcgatcttctcatatgtcatcccaagaccagccaacatcttctttgcgaagtacatattctttggcaacttatgattctccgggagaacctcgcccattagttggacgatgtcgttgtaagcactatttgaaatgttgtgcttcgactttatcgccattagtcttgtgagagtcccaagaactgacatctgagtgtgctcgtgcagtctctcttctcccgcggcgagtagccggaagaattcctgagcatcgcgtggaagctgccccggctcctcagcgttcaattcaacctccctaccaagatcatgcgacatgtcgtccatgctatcatgatcatcatcaagttccacctctgcgttaacgtgtctaatacact

SEQ ID NO: 47083 - DNA, 469 bp, Zea mays
  unsure (1)..(469): unsure at all n locations
tgctattacgggacaatcaacaatataatcgagattacatttgctggaaataagcctttagcgctagttttctttgagtgtnaatggtatgacccgaagtattataggaccgaatttgggatgacacagatccaacctgagaaattgcttcaaggacacgacacgtatatccttgcccatcaagcagaccaagtttatttctcgacatatccatgcaaaaagttgtctaaatggagggttgtgtacaatgtaaatccncgcgaacgcctatatactcctggtgaggacgaatatcaaattggtcaccttgagcaggttgatgaggtgtttcaagaagaagagttgccaactagttttcatattgatcctgcaccggcattagattcactagtcgcagacgttaacgacctaacttttcccgagaggcggagaagacaacctggtatgagaaaagttacatggcgacctc

SEQ ID NO: 47084 - DNA, 415 bp, Zea mays
agcttatgcatccctgaagatattcgtagtatttatctacacttagttgaacttgttctctgcttcctttgatgcttataagttataacctttcacctcaagaagcatatactacctgattgagagaggagctaagagatcaactcaaagaaatccatatgctgatctataagtagtgaggcttatgtcagtcattgcgtgcagcactaggcatgcattttttgattctatacattcttaatttgcctcgtactctttatttcaggttgttagagataagaggactggcaaaactaaaggctatggatttgtgaagctttcaaaccctactgacctgtctgcagcaataaaagagatgaatggtttgtatctctaatatgttctgcagattcagttgctggcttgctgtacttat

SEQ ID NO: 47085 - DNA, 429 bp, Zea mays
  unsure (1)..(429): unsure at all n locations
ngtataaggttaatgtcactatatcagtgaccggcattctatttatgcctaacaatatattggtgaatgactcggccatgttactacactggaactcatatctccatccacctaagtcgtgagctctcgtccacttctccaaatccggcatcaatccattcaaccaatctctaccttcggcatttgttgcgactctgagcttttctaacttttctctaaagaacttgtcttccagctgtcgacatgtctcctggaaaagctcatagttatccttgacaccatccttacgcagaagattctcatgcaggtgtcgagtacaccacctgtgatgcaaatgagggtacccatcgatctgctcacggaccgcgtngagtattccctggtgccgatctgatattacaccaacttcccgtcctgtgccaccacatg

SEQ ID NO: 47086 - DNA, 484 bp, Zea mays
  unsure (1)..(484): unsure at all n locations
agcttcttcttcattctgatgaanaccaagcctcttgatcacttcatcaaaacgaatgttccaactccgagatgcttgcttcaacccataaatggatttctgaagtttgcatatctttctagcattgatcggatcgacaaaaccctcgggctgtatcatatacacgtcctcatctaggtttccattaaagaaagctgttttgacatccatctgccaaatctcataatcgaaatatgcggcaatagctagaatgatccgaatagatttaagcatcgctactggcgagaaagtctcgtcatagtcaactccttgaacttgtcgaanaccctttgcaacaagtcgagccttatagatgtgaacatttccatccatgtctatcttcttcttatagatccatntgcattctataggtctaacaccatcaggcgggtcaaccaagttccaaacttgattntctcccatggaatctatctcggatctcatg

SEQ ID NO: 47087 - DNA, 490 bp, Zea mays
  unsure (1)..(490): unsure at all n locations
nttatntacataacanaacataaaagactgctactcttatacacaacgattcataaaaaaccacttcttcgaaacctttcttttacataacgaatcataacaaaccatttatccgaaacttttctctgtgccgaagcaaccatttaggaacacaaatgctatgaatgaatgcttatgcatgcaaatgccatgatgtaatgtgcaaatgaatgtccgaagcgtatgtccgaaaccacactcatccatcattntcttaggagcaaacacacgtcagctctgcattcccttaggaacgactttggagcatctttgccttttacttaagcagtatcagcgttgacttttcgctgtaagctctgcatccccctaaggacgtctttggagcttcttcgtcttttacttagacggtataagctctgcattcccttangaacgactntggagcttcttcgccttttactttcggcggaatcagcgttgacttttcgct

SEQ ID NO: 47088 - DNA, 438 bp, Zea mays
  unsure (1)..(438): unsure at all n locations
agcttcatagngaatccctagccattcacctttttagtgtttaaaggtcttgcaagcccgggctagagagggaatcacggcttatgggtaaagtgcacaacctctgcagagtgttatgaaactgatatatcagccgtgctcacagttatgagcggccaaaggagctccatagattagtgatacttgatcagagacattttggtacaagtggcaatgatattgatggttctgattatgattatggtaatggtaagtggtattcttttcgtttggaaaggatacattgggctaataacttgggttaatgttaaaacctggctctctactagtaagtaataacctgaccaactaaaagcaactgcttgacttatccgcacataaagctagtccactacagccaaacgggatgcttgctgagtatgttgatgtgtacttacc

SEQ ID NO: 47089 - DNA, 488 bp, Zea mays
  unsure (1)..(488): unsure at all n locations
tgaagccatggtaagtagcatacgctaataatatacgaattgactttagcctagctacgggtgcataggtttcaccgaaatccaaaccttcgactcgtgaataccccttggccacgagtcgagctctgttccttgtcaccacaccatgctcatcttgcttgttgcggaagacccatttggttcctacaacattttgattaggacgtggaaccaaatgccatacctcattccttgtgaagatgttgagctcctcttgcattgccatcacccaatccgaatcttggagtgcttcctctatcctatgtggctcaatagaggaaacaaacgagtaatgttcacaaaaatgtgcaacacgagatctagtggttacccncttatgaatgtcgccaatgatggtgtcgacggcgtgatctcgttggatagcttggtggactctcgtgagaggaggtcttggttctcatcctccttgcttgatcattgcatcttcc

SEQ ID NO: 47090 - DNA, 449 bp, Zea mays
  unsure (1)..(449): unsure at all n locations
agcttccnccagcgcttacaagctcacaacgtcttaattgttatgtttctggagcactcctggaacatcgacaaccttcgcaaatttttcgtttgactcattaaggctgacttcgcccttgtaattcgccaaaaacaatcttgtaccggcccgcactcctttcctcccgaggggtgagggttttaacgaggcggagccatgtaatatatgtgtgaaaaatctcccgcaaaaacatgcatcgaaaaaagaccgcgacgacggtcttctacattcgaccaattcgaggtcaccgcgaggctaagcgctagccaccctcgcgtgcgacgaatccgcgcagaagtcgtctaaaggtgcagccggactagcacaacaagtgcgacaaacacgaagtctatcgcgaagactatccgcgcagaagtcgcctaaaggtgcatccggactaacacaac

SEQ ID NO: 47091 - DNA, 433 bp, Zea mays
  unsure (1)..(433): unsure at all n locations
tcgacgaaggcaagtncatctcttccttgatgcattatatacctatttctctctaccactgcctatgcctggattatgcgatgggaatcgaattgcatggtgagcatgatagagcccgcattaactattacttcgattaaaagatatgggacaagtgataatgagtataagcgaaatgttctccaaaagagtgcgatgaagggtgctcaccctcatcacctggtgaagtatgatgatcagggactccctggtttaagggagggccttaggctcagctggtttacgcgtgagcagaaagatccgtctctcatataacgaccgagtacgcattcttcattacctgtactctcacaagtacaaccactcgaggctgtgtgggcagccactcaatctatactgtacggccaaccccaggttataatgctgcgtacac

SEQ ID NO: 47092 - DNA, 473 bp, Zea mays
  unsure (1)..(473): unsure at all n locations
agcttatgaagctgcccctgaagctaaaaatatcggttgtcctcttggaaccacaatgtcagagattgacaagattatagctgatgtggtacctaagagggaaatggctgaagtgaccacttatagggcttcacccttaaagatgaaagaattggaggtagcttcttcggagtatatagagttagacctatgacacttgggcggccagaaactctccgaagaggatatttcactattgtcggcggttacaagcctggatccatgctcttctgtggcgtcgacgaagagattctagggtgcatccctgacagtgctggatcaaaattgtcaatactttatcaaggagcatcggattcccgaagctagaacgagatcttagcaattacaggaggcagcatattactgagagctctcgtatattcgaatttaaagtataaactntgacgttntcctcttcgacttaattaacttta

SEQ ID NO: 47093 - DNA, 463 bp, Zea mays
  unsure (1)..(463): unsure at all n locations
ntatcatatggacgtgaagagtgccttcctcaatggaccaatcattgaagaggtctatgttgagcaacctcccggctttgaagatagtgagtaccctaaccatgtgtataaactctctaaggcgctttatgggctcaagcaagccccaagagcatggtatgaatgccttagagatttccttatcactaatgaattcaaagtcggaaaggccgatcctactttatttactaaaactcttggaaatgacttgtttgtgtgccaaatttatgttgatgatattatatttgggtctactaacgagtctacatgtgaagaatttagtaggatcatgacacaaaaatccgagatgtctatgatgggggagttgaagtatttcttaggatctcaagtaaagcaactccaagagggcaccttcctaagccaaacgaagtatactcaagatattctaaccaagtttggaatg

SEQ ID NO: 47094 - DNA, 338 bp, Zea mays
  unsure (1)..(338): unsure at all n locations
catttccaaaaagatagaccttgtgcaacttgtcaagcaaggaaacaagtgggaggctctcatcacaccaaaaatgtgatgacaacatcaagactcctgaagctgctacatatggacctcttcggacccgtcgcctatctaagcataagaagaagtaagtatggtttagttattgttgatgacttttcccgcttcacttgggtgttctttttgcaagataagtctgaaacccaaaggaccctcaagcgcttcctcaagagagctcanaatgagtttgagctcaaggtgaagaagataaggagcgacaacgggtccgagttcaagaaccttcaagtgga

SEQ ID NO: 47095 - DNA, 460 bp, Zea mays
  unsure (1)..(460): unsure at all n locations
tgttcattccttgcatcacctgcgttcgtacaaccactcttatgtatagntcattctaacacgtcgtgtctccttgaataggcacatacaactgacgacggcatggagtgtgacgatgagttcaatcaatttgtaatgaatgattgagttcaatcaatatgtaatgagtgaattaattgatcctcgtctttcgatgatgacaacaatctagtttgaatgaattgttatgccacacaagaagttgtaatcttgcaaatataactgcaaacaccttttcagactgtcgatttcatactaacccagagaaaccagccacaccaaaaaggagagaaaggcactctgcaaccataaaccaataatttattattgaaccttatactagtacgaggttaaaccattgcaagatgaactataaacagaatcataacacaacatagtgaactgtaactagacattctat

SEQ ID NO: 47096 - DNA, 407 bp, Zea mays
gcttgcagtccatgatgcctgctggtatgttatgtcctctgaatgctgccttgaattcggctcattccaccacatggtcaactagctgcatagcgaggaagtgatcccaccatgtccgcgcgggtccgcaaagctgctgggtggcgaaacagaccttatccacatctgaacaaactccattaagcagtgggaatttggattccaccactctgagccatacatcaccatcaaggggatcctctgcccgagtgaacaacagcggctgagtgctgaagaactcctgttaagtggccgctgctgggggacgctgatggtgatcaccaccaccatagtgctgaggtggtggctgacgctgagccaactgtcgcagaatctcattctgctgagccattaattcttgcatggta

SEQ ID NO: 47097 - DNA, 374 bp, Zea mays
tcgggcagactaataccagaataagataactcacattatgagtggagagatggagagagtagtgtgtaccctccgtggcaagatgctggacagcggtgtatctgtgctctcagttggcgtgaacctgatctggtcttaagaaccccggtggcgagttgacatatgcaagggttaagtggtacatatgtcgtgtgattggagatcctcagctgagtattaatctattcggatcgctgtaacttcgcggacatgaagacttggtcactgatttacacgtagcattccagtgaatacgaagggttgataagaaattggctagtatggtcaagtgcttgaactatggtagatagaactctataactcaggtaatgact

SEQ ID NO: 47098 - DNA, 515 bp, Zea mays
  unsure (1)..(515): unsure at all n locations
tcccggacctctaagtcacctgaggcatgcagctaaacaagttaaatctctaaggttcttcttctatttattcnactaaataaataaaactacatctacattagttcatatttaatcataaaaattagaatgtgcagacagtaaatgaaaccattttatttagatagagaataattctacgaacattttgcaatgtgaatcactaaatttggagttcatatgcaaaagttatgaaataaataagtttgggaattcaaaatatgaaattagggctaattctgtgaatatttaaaagtccagggctaaatttgcaagattacaggggcctgcgcgcaaaaactaaggacggatggttgatttccagtaaatggagggtctctttaataaaactaccgcgtgtcacacccgggtttagaaggcacaccgaatgcataccatgtacgtgccaggatcagttattcacgtacacagcagttacataacatggacatcatcacacagtgctcaaatagtat

SEQ ID NO: 47099 - DNA, 447 bp, Zea mays
  unsure (1)..(447): unsure at all n locations
ngaaggtgcgtagatgcagcggactctagctgctgtcggactgtccagctgagcagttaaaccatccgtgtgtgtaccagaccatccatgtgtaatacccaacttgtaaataatgaaagaatggtattaatcttcttataggtatggtctttcattcatgatgaattctatagagcctaattaaagtaaacaaagtaatctatgaagcaactaacatacacatcatgttggagattatttgttaggcatttactaataatgataatattgataaagatacgctaattctgaaagtgccggctaactcaatttgaagtcaagatagtgaaaatgacatatagaaccaagcaaaattggaccaactaaaaggaaaagaatatcaaatatcatccgtgcttgagctgtatccttgtcacagtccattgcggtctcttcctctctcgcccg

SEQ ID NO: 47100 - DNA, 383 bp, Zea mays
  unsure (1)..(383): unsure at all n locations
agctnganaggaacaccgttcatcataatggttctcgtcagtcatctcagaaaaaaaaagagattattgctcactatgaatcattttttacgaaattggtaaatgcagctatgtattcctcgcatgttagtctgaagttctctattatgatgaaatgcagatgttggcaaaagaaaacaatggtggtgtcggtgcaagtacaagcagccagatgttgctttactcggcagagcgtgcaaccgacaaatgaaacggtgcgtgcatctgttgctaacggggcggtgccggtgccgcatactattgttgtgtagctgaagtttgtcaaggtggctgctggcaaggttagccgaagaagtggagttcaataacaggatgcggaaact

SEQ ID NO: 47101 - DNA, 466 bp, Zea mays
  unsure (1)..(466): unsure at all n locations
ntgacattctcgatggtggacctttccttgctagcataacgatatgatcgccttgctaacctccttgccagtccccgcggagctctcctcttcacgtttatgtgttgacctgtcctcggcaagaccgttgtgccactgaaagctaagggcatgtttgtttcagcttatagattatataatctggattataatctaaattatataatctagactacaatctagatatattataatctacatgtagttgtttgatagtttagattatacaaatgtagattattcacaaagacaacaatactcttgtttgtttatttgaggtgagaaaagaatgattgtatatattgtaatttctatttacataaccatgggtagtgagtcttttgccaaaataatctcaaataagctactcttacagagattatcataatctaggctntagattatataatctgaacccataatctag

SEQ ID NO: 47102 - DNA, 362 bp, Zea mays
agcttctaaagggagagcacattctatgactattccatgttcattccgaggaatacaaagtttgtagcgcatgccaagcaggaaagcaagttggagcccatcatccacacaagaacatcatgacgaccgacaggccgcttgagctactccacatggatctattcggcccgattgcttacataagcatcggcgggagtaagtattgccttgtaatagttgatgattatcctcgcttcactagagtgttccttctgcatgaaaaatcttacactcaagaaactctatatggattcttgagactagctcaaaacgagtttggctctaagatcaagaaaattagaagctacgacgggacggagtca

SEQ ID NO: 47103 - DNA, 478 bp, Zea mays
  unsure (1)..(478): unsure at all n locations
tctaaagggagaacacatcttatgattaacatatgttcattttgagatagacaggatctgtagcgcatgccacgcatgaaagcaagttggagctcatcatccacacaagaacataatgacgaccgacaggccactggagctcctacacatggatctattcggcccgatcgcttacataagcatcggcgggagtaagtactgtctagttattgtggatgattattctcgcttcacttgggtattctttttacaggaaaaatctcaaacccaagagaccttaaagggattcttgagacgggctcaaaataagttcgggttaaggatcaagataataagaagcgacaacgggacggagntcaagaactctcaaattgaaagctctcttgaggaagagggcatcaagcatgagttctcttctccctacacacctcaacaaaatggtgtagtggagacgatgaatagaactctactggacatg

SEQ ID NO: 47104 - DNA, 483 bp, Zea mays
  unsure (1)..(483): unsure at all n locations
agcttctaaagggagagcacattntatgatttacaaatgttcattttgagaaagacaggatttgtagcgcatgccaggcaggcaagcaagttggcactcaacatccacacaagaacatcatgacgaccgacaggccgcttgagctactccacatggatctattcggcccgattgcttacataagcatcggcgggagtaagtattgtcttgtaatagtggatgattattctcgcttcacttgggtattctttttacaggaaaaatctcaaacccaagagactttaaagggattcttgagacgggctcaaaatgagttcggcttaaagatcaagaaaataagaagcgacaatgggacggagttcaagaactctcacaatgaaggctttcttgaagaagagggcatcaagcatgagttctcctcttcctacacgccacaacaaaatggtgtagtggagagaaagaatcaactctattgacatggca

SEQ ID NO: 47105 - DNA, 441 bp, Zea mays
  unsure (1)..(441): unsure at all n locations
tcacttgaaggccaccggatacatatcaccaccagtttggataggagatgataatgcaaccgtaagtatgtactactaaaatgatcaacgccttattntgcaattgtagggcaactaattgcccatgctattaaccaactcatcggggaaggactgctatatagtccaaatactaattattctataaccaaaaatcaacaatactacctgaactaaaccaccaaacctccgttagccttaaatcagtcactccaactaatcccaatcatccccaaataccgaagcataatccaatttgatcagcacatccaagtccaaatactatttgattgaaacccttctactcctacttcacanaggcgccgtttccccaccccggacatctcanaagctcaaccgaatcgaataanaaatcgaagctccgtaccgtgatgtggccat

SEQ ID NO: 47106 - DNA, 376 bp, Zea mays
  unsure (1)..(376): unsure at all n locations
agctgtcgagctacgcgcaaccaaacacattaagactatcttcaacggtggacgctagcgtccncctcccctctctgtgacggctacaggccacccctaaacgctacaacggttgcccctaccggtgctatagtactagcggcgggtggatgagcacgctacatcaaggggtacccccaagggctccccttgcctcggtttgtgtgtacagcagtatttattagttgagaaaaaaatgataatagatggtgaatatgtatggaaaatggcattttatgattatagtggggtatacgggaaggaattatggggaaccgttgtacatgatanagatatagggggaacagaacgctgacgtggcacgtgagtgtgatat

SEQ ID NO: 47107 - DNA, 411 bp, Zea mays
  unsure (1)..(411): unsure at all n locations
agcttgcacatagnctcgatgatgtatgcctttatatagnccaaggcttctaaagctatggctttttgtgaaaccgcattgaacaagtaacacaagcgtgtgatgacaactttgacatgctctgtttcgagggctcttaccacaattgggaggaacaccgtcgtcatcacatggcagtcatgagagttgtagccaaatagagacaagtccttcgtcctgactagtttgctgatattggatgagaaacctgtgggcactttgaccccacgcaaacattngcaaatctttgttctctcctcaactgacaagttgtagctagctggagggaggtaatgcttccctttgccactatccactagatgaagttctggtctgatctgaagatctactagatcattgcgtgatttaagt

SEQ ID NO: 47108 - DNA, 434 bp, Zea mays
  unsure (1)..(434): unsure at all n locations
cttgcatcanaatccttcttctcttgttcgaagcttctctatttcatggagatctcactgcttaatttagcaatctctgcttgggcttctgctagtgaaccctccattgtttgaatcatgaaatctttcttctccagagcagcttcgtaatctttaattttggcctctaagccctcaattataatctcatttctcttgtcctcgaggtcttgttgcatcctcaaggttttacttagtagtagactctgaaaaaataaccttcattagaagcaatcttcatctcgaaaataataaaaaagttaaggtaggaactttaccttaaaattagaataaaacaagccactggcgatatgttgccgccggtatctgctgaggtcggcctcaagcttcggaaaaccaacactcttcgatagagtgctgacaaccttcgcttc

SEQ ID NO: 47109 - DNA, 427 bp, Zea mays
tgactaacactggcggtaagagggcgcggagcttttggccaatcttctctttaacgatgcgtcttgctctgtctgtatagaactgccgcggaacaacgccgcgcgcgacgacgtacctgcgtctctctcttgtgtgagccacgcggctgtcagaactgcactgcgggagatctctggatcatggatgatgtcgattctaccgggcaattcatagtgatattgacgatggcggccgggcgagagcccaaccaagaatggcgtttagttttgcgtgctccggtgcatactgcgagctacgatcagcagcacataccaagcgggcctgcaagtgggaactatgcgctcggaactcaatatgtgtgaaagaatgctgagtatgttgcctccaacgaatttggctgtgtctcgacgggaaggatcgtattag

SEQ ID NO: 47110 - DNA, 120 bp, Zea mays
cttgtccttagggacctaatatatcacttgaggaactctagcttcgcagaataagcaggaaaataaatcaatcttaattgcagcttacttggcacgtgtattgttggctcaatgtcctgc

SEQ ID NO: 47111 - DNA, 110 bp, Zea mays
gctgctcccatcaccgtatatctcatcaatctcagaaacatcatataactctaccgtaaagccacattattttaagtttggacaatctcttctataaagagagaatctaa

SEQ ID NO: 47112 - DNA, 231 bp, Zea mays
  unsure (1)..(231): unsure at all n locations
atactccgcgcgcacactgacctattattcaagcagagcatattgtgctacatccacacacgtacttacngagatctaactcgacatcaatatactgactgaacaagacatatatggcatatctgtttgaaactgtatttcacacatttgctttgataggacaacaagaaattagtttattctggatgattgatttcaaaggacaatcttcaaattatgattaaatcgtct

SEQ ID NO: 47113 - DNA, 140 bp, Zea mays
attgtgtttgttcagaccactgaggcttttttcaactggatccataagagtgacataaccaaggggtaaggccgaatactaccgacttacgaacaagtaggaaaggcacaccttcccaaacaccaagccgtatctgcgca

SEQ ID NO: 47114 - DNA, 322 bp, Zea mays
tactttacaataacgtattaaggtacagaattctcacagtttctcttaatcactctctgacctttctgggaaaaataaatctaatttactaaggagatggtgctgatacacatagtacactggatatattcaatctcactgtccattaagtgatgatcaatattaccacctataccttctaagaatgaatctatatataactcacaatagtctctgagatattcagtacttctcggcttactactttttctatgcaattgaagaaaacttattccatgaagttcacctgacaataataacattactcatgtttgcacttcag

SEQ ID NO: 47115 - DNA, 236 bp, Zea mays
taacactgtagcacgctacgggcgtcggcgcggacattttgtcttccctcattctgtagtctcacttgcttactcagccacggtcaccaagcggcttaggtaccactgctttacgacgggaccacgacaggctcttctaaactgcggtccagacgaggtatctctgacacagttcaagcagtaccacacaatttcaatatcactccctggatgttatatagtacctggtacttaac

SEQ ID NO: 47116 - DNA, 117 bp, Zea mays
ccaaccaggtttggttttaccccacatagatactagcgccatacgcacaacaaccttcaaccctcctataggggatttaacctgaagcacaatgttgaactttgctccacttaagcc

SEQ ID NO: 47117 - DNA, 139 bp, Zea mays
ggactcattacatatctcttgcttaaaagcatgtccctgatgatgtaagtcctggttggggtaaagatttatgtgtatagactagggcactgccctgagatgttttatgaaagtaacgatggactgtgcctgtgatatg

SEQ ID NO: 47118 - DNA, 55 bp, Zea mays
ttctcatcatgcttctatgtataagaatgaggcatctagctctaagcattctaca

SEQ ID NO: 47119 - DNA, 71 bp, Zea mays
atgaactgcgggagatgcgaccatacacagatgagcccccttggattaccgggcttcatggatgatggcaa

SEQ ID NO: 47120 - DNA, 333 bp, Zea mays
  unsure (1)..(333): unsure at all n locations
gaagcatgtgctctctgttaacgagcctactgttgtttagccttgctacacccaactgaaagctaaattcttgtaggttaacgagcgacatttataactgaatgtgtgaaatgaattatgcctcaatctgaataagctaccaataagcaatggataatttgtcagacatcaaggcttttcacattcttacttacagtgagagaccacctaaccctgacatgaattactaccaagtaacgcacaagatcgcataagtatattctatgcttacgacttttcgtctgtcaatcacactnatcctcgcaaactgatgtaccatggtgccggccatat

SEQ ID NO: 47121 - DNA, 402 bp, Zea mays
gctatatactataatcacaaatacttagacaacacctatttattttctaggccttccccctgttttgctacatgctttaatgaccaagctagaacttatgacaagagcatgatttcaaatttgaaagtaacaatgtgagtcactcctaatctatgaataaatgaagatatgaatggtctctaactgtatgtataatataacgaaacacattctactacaaactaactatgaaccaacctaaacctgtgacaaaccagtacataactatttttgtactagataattctacagacactgcatcatcatacgactctacgagctcctcgacagacgtaagacccgtcaacactgcaagatctcactgagcaccgttctatgttactttcacttagaatatgctat

SEQ ID NO: 47122 - DNA, 225 bp, Zea mays
atctatatttccgcatgacagatctcttatcatcataacactaatcgtataaagaatcacatctgactcccgatgtgaaaacactcatttaccagatctatacagcactctcactactacatattattaaagatccagtatcactaagttagcactcacctaggccatgatctcacataggagtaaacaattatacgatctaaacggctgctaatctggctggga

SEQ ID NO: 47123 - DNA, 94 bp, Zea mays
taactactgttaatatttaggctcgagagcgagataatactgtgttataactgacctcacgagagaaacttgtgttcttattcgatgtcaagac

SEQ ID NO: 47124 - DNA, 74 bp, Zea mays
tgagcgtctatgactctcgacctcgctattactagagagtagatgttagtatgtgagatttccgttattgggtc

SEQ ID NO: 47125 - DNA, 129 bp, Zea mays
gatgatacccttcaacctgactgtgatatggcctctcgactgcgctattgactagagggaagatggcagtatgtgtactttcccttactgtggtctttgcagaagctaaccaagacctcgccttctaga

SEQ ID NO: 47126 - DNA, 235 bp, Zea mays
actagttacaggcggagaggctctatgccacacgagagcatgtggttcttcgcttaaatacagatctacctgttataactcttatggcttatgtctcagcaagcccacgacatggttgaatgccaaagattcctatcgctatggctcgattcgatagccgatccacactcttatcagacacttgaatatatctgttgtatgtcaattcatggtatgatatatattgcgctactac

SEQ ID NO: 47127 - DNA, 138 bp, Zea mays
acatcacagcatgaatgtgatgaccacgtcaagacctctggagctgctgcatatggacctcttctgactcgtcgcctatctgagcatatgaggaagtaagtatggtctagttattggtgatgacgtttcacgcttcac

SEQ ID NO: 47128 - DNA, 74 bp, Zea mays
agatggacgcacagccattgggtgggcttcttttctgtcgcgatgcgcgaaaagcacgactagatgggtcccgt

SEQ ID NO: 47129 - DNA, 205 bp, Zea mays
  unsure (1)..(205): unsure at all n locations
agtatcactntagcaatgtgcatctaacttgtgatgacattatctagtcctgcgccatacactcgtcacttggttgaccctgtagcttacactagcacctgtcaacactcacacacttgtagtcttcatagagtgtatccaacaccaaactacatgaagcttcaaccggtgtataagaagagatctatgtactctctccatttct

SEQ ID NO: 47130 - DNA, 317 bp, Zea mays
aactacttagaacattgaacaggcttaaaaagttgacttcatcggacagtggcattcctaactctaatgagccaacactcctgttatcgccgactactactcgcgataaacgctgttgggaattctctactggtttttcgaaattaaccaaactacgatttgacgctcaatagtcgctgagatagaatagatcacatggacgagccgacaccaataagcttttagagaggatacctatctctctcttccccacaatggtggaagaattactatgcatgagctgtgtatcaactaatattgcaggcaacgtgtcctat

SEQ ID NO: 47131 - DNA, 128 bp, Zea mays
ataactctatggaactaccgagaaatgatttattgacaatcaagaaagtcttttacgaaggaagtcatcaattacctcggaaacacatggtgctatggaaatgaaagacgctctaaggaggctgtttg

SEQ ID NO: 47132 - DNA, 310 bp, Zea mays
aacagctgactggacattaacactatgattacttccacttctgagggttaaatcctaacaggatatgagtcaatcatgtaccaccatccaagtaatctacaggaataagatctagcatgaaccaaagttaattggcactgaactgctgaggtgcaatgcactaaattttgcaatccagacgtgcatgcactggtctacgcggattaggaccagtaacccccaatttaaaagtcttattggtagggtttgcacgcatttgtagcactttctcctcggggacctcccttcttgcgtatttgttccctttttt

SEQ ID NO: 47133 - DNA, 432 bp, Zea mays
taactagctgctcagtgcatctcacctcgagacttctaatgtctatgctctgtctttaaatgatagatatctcatgacactctcacttgcaggtgtcatgacacatgtcatagtcatgaatagctgccattctcaaccaagactgacggaatctcagtcatctgggatgaagtgtttcgatatcgaggtcaattgactgtggacctgaccgatttttcaaccctggtcttacgacaaaactattttgggggctgtttgtgatcatcagactgtgcatgcatcctttgcaccttttccaatacctgagtgcaaggagactcgctgttaacttctcgcactatcattactttgagtcacacttgtcgcctatagtttggataggcggctgatactttgaatcactcttagtgctactgatctggacattgattg

SEQ ID NO: 47134 - DNA, 440 bp, Zea mays
agcttcgcacctctgaactaactcggctgcatcactcttcgctgttggccaatataatcctgacctgaaaaccttcccgactagtgtcttggacgccgcatgtattccacattgcccggtatggacctcctccagaagtcgcttcccagtagatgagagaatgcacttcatgagaacgcctgatgcaccccttctgtataatgtctctccaatgagtgtgtagtgagctgactgtctggcaatgcgctcagctgcatttttatcatctggttcctcttcattctttatatacctgatgattggccttctccagtcatcagagtctgactcgggttgattataatatacactcttctgcttgaccgttagatgctcggctgagtatttcttgacaaagactcatgtggacctgagtcgaccgatctagctggacacacatc

SEQ ID NO: 47135 - DNA, 319 bp, Zea mays
  unsure (1)..(319): unsure at all n locations
tcgatgctcttagttcatcaaagagaaattatacagagctggagaacgtactgtatgctgtcttgatggcctctaggaagcttcngcactattcttaagcttacaacatagttgttccttcttcacaacctctgaaggatattatgaggaaccgagaagctactggaacgattggaaaatgggctgcacaactcaatgaattttgtattgattatgtacatagatcttcgattcagtcccaggcgttagcagacttcattgctgactggaccttagggcttatgaggaacaaacaaataagacgccgatacatgacagt

SEQ ID NO: 47136 - DNA, 381 bp, Zea mays
agctggtgaagattcttcatcccaacatgggctagtcggcggtgccagagccaacccatgttagtcttagcaattaaacaagtgtcgagttcagctctatcaaaatctaccaagtatagctgaccctctaacactcccttaaatgctattgaatcatcacttcttctaaagacagtaacacctacatcagtgaatagacagttgtagcccatttgacataatcgggatatggaaagcaaattgtaatctaaagaatctactagaacaacattggaaatggtatggtcaggtgaatatagcaatttacccaatcctttgaccaaaccttgatgtccatccccgaatgtgatagctcgttggggatcttggtttttctcatat

SEQ ID NO: 47137 - DNA, 312 bp, Zea mays
agcttgacaatgaggaaatgacgctctttattattattttccgccaaatcctcaaacaaaggagggggaaggattaccagccccactccaagaacgtttgctacaagtgtggtaaacccggtcactttattgcaaaatgtcctatttctaatgacagtgacaggggcgacgacaaaaaggggagaagaaaggagaagaagagatactacaagaagaggggcggcgatgcccatgtttgtcgggagtgggactccgaagaaagctctagcgactcctccttcaacgaagacgcccgcaacatcgccgtgacca

SEQ ID NO: 47138 - DNA, 287 bp, Zea mays
tgctggtgtatgggagccacgtcccctctgtccagaaaatgcagagctcgagcacacctctctacttccattcatggtgccccaaatctccaaccggagctccgaaggtcggctccctggtgcacctccccagtagcagggatccttttcctctaccatggcgcgcaagccgtgagcttcctcacgtgcgcttcctttcccaggcgcaggcgtagaaagctctcattcacgcagtccaactccaggccagatccaattcgcccaacccctgctctgccagagctcct

SEQ ID NO: 47139 - DNA, 402 bp, Zea mays
  unsure (1)..(402): unsure at all n locations
agcttctacagataagaaatctgtttgtctcaagcaaataacccacaagggtcttaaatgttcaaaactcaaagacaatgacaaaaaaaccattatttctgatatgaaggataacaattacataagatcaattcaaaattcaatggtcccatatttcatgatgaacttgacatgggttatcatgcacttgattatatcacgacataatataganaacattgaccatgcctaaagattattgaaacatatgctagtaagcagaagtttgacaggaaattgccaccagatcagcagtaagaaacagcctttccattagaaatgactgatttctcatttcatttntgtaacatgatgccattctttgagacagcatgataagtagacaccccatggccatgatgg

SEQ ID NO: 47140 - DNA, 429 bp, Zea mays
  unsure (1)..(429): unsure at all n locations
agctnttatttacttcctacatgcttgtaatgtcttccttgttcggggatgatgccaaagggggagaagtttanggaccaaagcaatgaaaactatatcaaacaccaaacaccaccaatttcaaattttatatttacaaatgacttttcaagtggttttggttatttggtccaaaaataggaagtaagtgaattatggagttagggggaggcttaagtccttaatatcacattgtggggacaatcatgcaccttagcaagtagattgcatattttcactcaaatacttgtattatttgcttgctttggttgtgttgtcatcaatcaccaaaaagggggagattgtaaggaaaatggaccccgggccatttggctaattgagttntggtgtttgatgaacaacacaatcattgaaactaataagtttcta

SEQ ID NO: 47141 - DNA, 432 bp, Zea mays
  unsure (1)..(432): unsure at all n locations
agcttgtgagcaatacaagttcagataggagaatgcttcttcggccgatcagccgaagcccatgctcttatacgatgacatagcagagcacaaggtgctattgtgatcccaactgtccgaagaacaggagaaagccttgataatgtttctgttcaacaacaaagatgtttttgcatggtcagctaatgatctttgcggagtcaacagggatgttattgaacactcgctcaatgttgatccatccttcagacccaganagcagaggcttcggaagatgtctgatgacaacgccgaaggtgctcggaatgaagtgaaaagactcctcagtgcctgagttatcagagaggtaaaatacccagaatggctggctaacactgttatggtaaacaagaccaatggtaaatggaggatgtgctattgatttactgatct

SEQ ID NO: 47142 - DNA, 493 bp, Zea mays
  unsure (1)..(493): unsure at all n locations
agctngngctaccaccatgcaaccagagtgtggatgagatcctgcgtgaacatccatggaagtacaagagggagaccctgctcggacaccctcgagggctgggtcatagtttgtgctacccacttgagtcggatcgtctccggcagtaccctcgggggctgggccgtggcttacgctatccacccgagccaaatcatccccggcaacaccctcgggggctaggtaagtgtcaacaccatccttgagggccaagttctctgcggcagccgcctctaaggctgaaggtccctcagttacttccatgggagcaagacgatccaagtcagtttcctgaccctcaagaccgcgctccaaggtcgatgaggcacgtgacgctgctcgggatgaccccaacccggcgtcgaacacattagcacaaacatccatcgcgtcaccatccgtcggctctgataacagatcctctggaccatatcttaagagtctgatcaaagtc

SEQ ID NO: 47143 - DNA, 370 bp, Zea mays
  unsure (1)..(370): unsure at all n locations
agcttctctntatcatcatcaaccttaacatatttatcattttatttccaccctgctgcccattagcttcggtagctgatcacaggacactatgtagttttccgataagcaaaattatagcaaccaaagttgtcatgtaatccatcctttctagcctttgtctgatagtgcagttcatgaactcggcaaaagctgtccgcaaacggttccaccgcctggcttcggagtgcccaaatataaacactaagcctaacgatagcgttaggggttagctggtgaaaatagattccaaaattattcaatatctctgcaataatcccatgaagggggaatctcaacccagcctttaagaagctcttaaaaataacaa

SEQ ID NO: 47144 - DNA, 391 bp, Zea mays
  unsure (1)..(391): unsure at all n locations
gagacacctgcngcatgcaagctntgaagatatggaggcattacctaattgtttacanatgtcacatcttcaccgatcacaagagtctgaggtatatcttcactcagccagatctcaatctccatcaatgaagatggttggaactgatcaaagactatgaccttgagattcattatcaccccggaaaggcccacgtggtagcagacgccctcagcccaaaaccttttcgaataaaaggaacccactctttacaaaattggaagaaggaattagctcaactgaatgcatgtttgggaaacaacgacagtctcaaagtccaaccaatgctagaagacctcatatgcaaagctcaatgcctagactcagagacagcaagacttgtggaaaaagc

SEQ ID NO: 47145 - DNA, 349 bp, Zea mays
aatattcacagctgtcacaaagatgcttctcgatgaataaaaaggcaaatgggccgatttattaccggaggcagtctgggcgctaaacacaactgagtgcaaggcgaccgggttcactcctttccgccttctatacggatcggaggcactgaccacgcaagaaataaagcatgggtccccgtgtacagttccgtcagccgtccccgacgtggacgagccaacttcataagatctcattgaccgagaccgggtctgtgctctacatgccctaaacaaataccaagctcagaccaaagcatggcgcgaccacgcaatcattccgagggagttcagcgagggggacctcgta

SEQ ID NO: 47146 - DNA, 363 bp, Zea mays
gccgcttcctgcgcctataaacagtgaacagcattcctttactgttcacgctttttggaaattgcaatcgcatcttccgggaaccagcctttgtcaaggcagaggtattattgtgtccaatgattcaatatattaagtgaatataatataattcggctatgagttatttacccttttacacccctttgtctatgatatcttataccacttattgaaattttattacgaagacttgagcttcgtaaattatattctcatcaaccttcgtccaaggctcattatgcttaaaggaataatgtctcatggacgaatgacgttaacacttaacattttatgttgccttgtgcgtaattcatatcatct

SEQ ID NO: 47147 - DNA, 382 bp, Zea mays
agcttatgaagattcttcatcccattatgggctattcggcggggcgagagccaacccatgttagtcttagcaattaagcaagtgtcgagttcagctctatcaaaatctaccaagtataactgacccactaacactcccttaaatgctattgaatcatcacttcttctaaagacagtgacacctatatcagtgaaaagacagttatagcccatttgacatatttgagaaacggaaagcaaattgtaatccaaagagtctacaagaaaaacattggaaatagaatggtcaggagatatagctattttaccaagacctttgaccaaaccttgatttccatccccgaatgtgattgctctttggggatcttggtttttctcatatg

SEQ ID NO: 47148 - DNA, 398 bp, Zea mays
  unsure (1)..(398): unsure at all n locations
tattgttgctacgttntgccataacaatacagttttgatgccttgtctaccttcagtagacagagatgcactcttatgcaccaacttgatctggtgcaatcaaggttaatcatgattaagtagatggctcatatgaatctatacgtaaaaaaagataacatatatacttagtttcttataccgtcatacaactgacatcatgttagcatcaaccatagattacacattggcacagtggcgaagcagaaatgtatctacttttagcacacaagttacaataacttcacaatattgcctttcaaggatctggcctgcaactgttgtgcttgcgttagttgaaacaatagtgctttagccacacgcgaactaaatcttgacatatcatatgatatgacatc

SEQ ID NO: 47149 - DNA, 369 bp, Zea mays
  unsure (1)..(369): unsure at all n locations
acctgaggcatgcaagcctggctgacgacattaccgctgttctcgcttgtctaccaccgncattactgccggcccattattggccgtattgaccgtcgcgcctggctggcactgatgggtcgtacgcatggttgcctcgaatcgcggctctggttccgcagtccaagaagtatggcagtggtgctagtggcggtgcaaatgcttgcacatagcgaccggcgcgcctatcgcatgacgcgtgggcgtgggcccccatgctgggtgcgttggaagtcggaggggcgcgcccacttggcgcggatgcatgccgcatgcatggctgctcgctcttcagaccgttggctgggctaaagcggagaaatgctcgca

SEQ ID NO: 47150 - DNA, 439 bp, Zea mays
  unsure (1)..(439): unsure at all n locations
agcttgtgaacaatacanattcagaagggagatttcagcttcttcagatcttccgaagcccatgctcttatgtgaggacatagcagagcagaaggtgctgttgggctctcaattatccgaagaacaagagaaaaccttgataagatttttgttcaacaacaaagatgtttttgcatggtcagccaatgatctctgcggagttaatagggatgttattgagcactcgctcaatgttcatccatccttcagacccagaaagcagaggcttcggaaaatgtcagatgataaggccgaaggtgctcgtaacgaagtcaaaagactcctcagtgcaggagttatcagagaagtaaagtacccagaatggctagctaacactggtatggtaaaaaaggccaatgacaagtggcgaatgtgtatctgatttacagaatcttaacag

SEQ ID NO: 47151 - DNA, 467 bp, Zea mays
  unsure (1)..(467): unsure at all n locations
agctcgaccgaaggtgcttntattgtttcgaattatacttcttaaggtataggcagcccctgcgctgctgacttggccaacagatcagcatattcattttttccacgaggaatatttttgacagagaaaccttcgaaggaagcctcaatccttcggactgtatctagatattttcaagcttcgggtctcttgctttatagcttttatcaacatgaccagaaataacttaagaatcagttntaagaatggcccttctgattcccattgcctttagcttccgaagacccaagagcagagcttcatactcagcgatattatntgtgcaactaanatcaagtcttgccgcataacaaggtttaactttggatggtgaaaccaacacagcagccgctcctgcttcgaatgtccccaagaccatacaaaacactgccatgctttgcatcttatgcgttctttctctgacccct

SEQ ID NO: 47152 - DNA, 427 bp, Zea mays
  unsure (1)..(427): unsure at all n locations
catgcaagcttcngcagaaagaagaaggagtcttttatgttttgtcattanagaatagcttccgcagaaagaagaagtagtcttttatgtgttgtacaaaaaagaaaagcttcggcagaaagaagaagtagtcttttatgttttgtacaaaaaagcaaagcttccgcagaaagaagaagcagtctttaatgcttcgttgtgtacgaaaagaagggaaggtgtttctttcgccttcggctcaaaatattgatttcgtccacatcaaagcgtcttaataaaagggtaaggatatattacaaggtatgtacaaagttccttgagaacgggttaattgtatttacaacaacgtgctacaacatttcctcagtattttctagcctactactactaatcttcttcacgcttccgcttcggcggcatattcttt

SEQ ID NO: 47153 - DNA, 441 bp, Zea mays
acctgcggcatgcaagcttcacttctgccacccgccacatcacccactgtccccgttcgtagaggatgaagacaccaaccatgcattctggtgtgccacgagactttctctaacgcctcgccgaagatgtggacacaccacaatccctcattctggttcgcactattccccgacgaccatggcttctctcaatccagtggcatggtgaacatggcgagatgaggcgaggtgcgaagggcggctttagatatatatatggccagggctacatcgcgccatgggttgatgcgccatgcgcggagtccgttcgacggtgcctagcacgcaaggtcaagcagatctacgcacgagaatcctaggcaaattctggtggtaccagcgattccgccgcagagtatgcgcccaactctggagagggtggacctggccgtctggcacatc

SEQ ID NO: 47154 - DNA, 453 bp, Zea mays
gctatgaagatattcatcccatttgggctattcggtggtgccagagccaacccatgttagtcttagcaattaagcacgtgtcgagttcatctctatcaaaatctaccaagtatagctgaccctctaacactcccttaaatgctattgaatcatcacttcttctaaagacagtgacacctacatcagtaaaaagacagttgtagcccatttgacataattgagatacggaaagcaaattgtaatctaaagagtctacaagacaaacattggaaattgagtggttaggtgatatagcaattttacccaaacctttgaccaaaccttgtgttccatccccgaatgtgatcgctctgtgaggatcttggtttttctcgtaagaggagaacatcttctgctacccgagcatatggtttgtgcatccgctatcgataatccaactcgagccttccgatg

SEQ ID NO: 47155 - DNA, 351 bp, Zea mays
  unsure (1)..(351): unsure at all n locations
gcttagtgaagaataaaaacagtgaaatctcttatgtaattcaaccattcaactcatgctaggaacagatgatacttattaacttcttgcaaatatgcaaaccctaacagatctataaataaatctaaactaattgttaatgccacaaatgtgtggatgtgcatgtctccacaaatacaatgttttttcaaagtttagcataacagcaaataattggtcagagatcgccaccaagttgtgactaccatcaatatcctcactaagccctgngatgaatatactagtcctgttgacaactccgaatggcataacagcatcaacatttgatcaccctcatattaatctaaaact

SEQ ID NO: 47156 - DNA, 456 bp, Zea mays
  unsure (1)..(456): unsure at all n locations
agcttaaaggatactattcaactattgttagatgtagttgataagacgccaaggtatgaaaacttcctctccttcagttgttttagtattctatccttagngggatgtaccttagtatacgttaaattccttgcaatataaaatgtttaatagtgcatataactttgacatcaactatatgtgtgcactaatttaaaggaatttagtctatccttttgggtttcaataatgatgattcatttggcatccacatataaggatcatcatttgtgaaaccctctcttgtgtttttaatgctctcttttctaagtgtttcaacaaggtccttccaagtgctttcaagatggattcaaaatctacaaatataagagtcttggttctttcaatcattgagtttcatgggtctcatattagcatgatcgaccaagcaagatgatgaagtcagatccttgttga

SEQ ID NO: 47157 - DNA, 378 bp, Zea mays
gagctagtagatacgattacttgtgggagcgatgacggactctgagcatgggacccggctgcttgtcctgctattgtagacgaggctcggtacaagagttgtgctgctgctgcggacaattaagactgccagtaccgtgccaagatatgcccactgcatctataccggcacacagacgattggacttgctctgagtgcctctaccagggcaggacctaacccggcgcccaggatgaatgccgaaccaacaactccacggagccgagcagagaatggcaagatggccaacaacgagacaggtgtatcatttatcttgaagcttcacattgaagagactggatgccttgtcaaccagaatctgtgaggatctcccaagat

SEQ ID NO: 47158 - DNA, 380 bp, Zea mays
  unsure (1)..(380): unsure at all n locations
agcttaccctgtcccatattcagtgcatgnggttagntaagatagnccctgatcagcaggcctacatacgcatccaatccttaatcaacctgtgtagaacatcacctgttccaagcccaagtcccgatttaagtactttcacccttaggattgtttgtattccttaggatgaaaagagcatcaaagggaactttgcagtaagatcccaccacgctctcaatgaaaatattcttgcaggtagaagtcatctttcctcaggataacccctgaactangctttaatgcaaaagacaacctttatccacaagatctgagcacggctaagcatnttttgtaatcatattctgatactttatcagaagtatctatataggtatgga

SEQ ID NO: 47159 - DNA, 358 bp, Zea mays
agcttaatcctgagaagtgtgtcttcagagtgttccgaggcatgctcctagggttcatcggctccgagcgaggcatcgaagccaacccggagaagatcgcggtcatccccagcatgggacccatcaaggacttaaaaggggtacagagggtcatgggatgcctcgcggccctgagccgcttcatctcacgcctcggcgaaagaggtctgcctctgtaccgcctcttaaggaaggccgagtgtttcgcttggacccctgaggccgaggaagccctcggcaacctgaaggcgctccttacaaaggcgcctgtcttggtgcccccggcggacagagaagccctcttggtctacgtcgccgc

SEQ ID NO: 47160 - DNA, 417 bp, Zea mays
agcttgtcaccagcatgtccttgagcttctgccatgaagtgatttttcctggccgaagagaagaataccatgtctgggccacattcttaactgccatgcgaaggatttggccatgagagctgcatttcctccatatgaagatatgattgcttcataactcatcaaaaactgcttcgggtctgaatgcccatcatacattggaagctgaggtgacttgtatgatggaggccacgggatagcctgcagtttcgctgccaagggagaagcatcatcaaaagtaaaggtatcatgattaaaaccatcataccatccatcgtcgttgaacaagccctcttgatgaagttccctgtgctggggccttcggtcttactcgtcttgagcaaggtgacgtacttcttcagtagctttgtcaatttg

SEQ ID NO: 47161 - DNA, 373 bp, Zea mays
  unsure (1)..(373): unsure at all n locations
agcttgagggtgacttgccgaagctacagaagcttctnggtgtgttgccatgtattgggggatataaggcggatgatacgaagcggtatgcatgacctgcttcggctgagcttgttgagatgcagcttccgctatttccttttgcttctggattgtaacatggcacgtcctagtggtatggcccttgccttctccacagaacaagcaaaacagtctccttggctgatctccgaatctttcgcgaagcccctggcgcctctgcctcttggaactggtggccggaaggaagattgttgttgccccgaagcctgtgaggagcactgcggtctgttctgctgactccccttatcatcattctgagtgttgtggatgg

SEQ ID NO: 47162 - DNA, 467 bp, Zea mays
  unsure (1)..(467): unsure at all n locations
agctggaagctcttatccccaatgtgcttatcggcgatgccacaaccaaaccatgctagttttagcaattaagcatgcatctagaccgacctcctcttttgcaaaatcaactaagtaaagtttgtcgtctaatacacccttaaaggctaatgaaccatcacttcttctaaagacagacacatctatattagtgaataaacagttatatcctatattgcataatngactaacagataacaaatcgtatccaagagactcaactaaaaacacattagatatagagtgctcggatgaaatagcaattttacctaacccttttaccttgccttgattcccatcaccgaatattattgaatcttgggaatccttgttnttgacgtaggaggtgaacatcttcttctcccccgtcatatggtttgtgcatccgctgtcgataatccaactttgaacccccgggatgcataaac

SEQ ID NO: 47163 - DNA, 427 bp, Zea mays
agcttcagctccgaaggccccagctattgagagtacaacatctactgaagctacaaatgccgaagctgccggagccgaagatattaatttagaaagcatggttgctgatatagataaaatactattaaacatggccccggaagaagctgacgcagaagaggctgccgcagccaccgaagagactactgccccaaagcccgagaaggagaaagaaatggcggaatacacttcggaagatgaagctcttaactttcagaacctagttggtcaagagctgacgaaggcggaacaggaagagctaaaggagtatgccatatcttgcggatatcggacgggagcgcttctctttggtggcatccatgacgaaacggtgcgctgcgtgtgggatcaaactggtgcgagcgtatcggtactctattaaagagta

SEQ ID NO: 47164 - DNA, 275 bp, Zea mays
  unsure (1)..(275): unsure at all n locations
gaagcttgtggagttcttcctagattttggatgcatatggtggcccacgggccgacactatgatcnttggaattccgtgcaaactgagaatacgggcaacatatagttccgcatatgtggccacggtatacntttacttgactagaagaaagtgggcgatctttgtaagtcgatcaattataacccagatagaatcaaatccctttgctgtcctgggtaatcccacaatggaattcatgctaatgtcctcccatttccaagtgggatgggcaaga

SEQ ID NO: 47165 - DNA, 425 bp, Zea mays
agcttgtggcggagtcccttcgatggcttctgttactgcaatgatcctctgctcttctggcttagctgctctctgtcgtatttcgggctccttatccttctgaaaaaagcttcggcagttgtggcccgagtggacttaacttgacaggcaaagattcagtcattacctttgagatttcctctacttccgtagcagagggtgttgcagcacattctacctcctcatgaattgctctgtgcttgcgagttgtagctctgctcttcttcgaaacatctgttttcggctcaagctctgactttgtcttcttcgcgtgttcttcatcatctatagtcagagcaccagctactcttttcctctattgaccttcggcatccttgtctagccgctcgtagtcagggtactcataatccagagcatgcattaca

SEQ ID NO: 47166 - DNA, 478 bp, Zea mays
  unsure (1)..(478): unsure at all n locations
agcttattaacatgttgcgccgagccaaaccatatatgtgcttcttctctaaccatccccacccaaactacatcaacctagaaacaaaaaccgatccaggccatccggtttgacccaaaccaattccagcttcaactctactaggtccttgatttaattntgtgtcactatgataattacatattttaatgaagaagttccagtagcttgaaatgaaatatagctcttacgcaacattgaactgaaattgatgaacaataagatagcattttagaaaaacaattgtggtggactcatgttgatgacgcaaaaataattgaacaccatgtgttatactatcatatataggaacatcgtaaacttcttaggggtccaagagtctaanacaataaaccacaatgaggggattacagtgaacttacatcatgatatcatcctgaactgagttgaagcgtcgtgatgttgaaatgagcatata

SEQ ID NO: 47167 - DNA, 446 bp, Zea mays
  unsure (1)..(446): unsure at all n locations
cacctgcaggcntgccagcttcacnggctactggcggagcaagccgatattctggctctacttgaggatggctggagtgggctggccacggtggccgaagctctggcggcaatggcgggcggaattaagctcgtcggagctaaggagagggggctggccggtgagggtgagtgcggggcgaagagaggtgcgcccggtgaggctntatatgcgcgggcgggcacggccgagggcgtgggcgcgcggcggacttgaccggacgccggaacgagcgcgcgcgcgggttgggcgagctctggcgtgccgaccagggtcgaacacgtgtgcccgtgcgttctgcccaagttttggcgcgtgtggtcgctcatccgagcctgctctcgccttggtcagtgcacaaaatctcttctacctcctacaagctaccattcttgtgtgggggtcat

SEQ ID NO: 47168 - DNA, 316 bp, Zea mays
  unsure (1)..(316): unsure at all n locations
acctgagctgcagctggtgccatggaaaacaaaatccttgtatcttgtttgtaaactgcttgccgctgtcaactgttagctcggacggtactccgaagcggcaaacaatgttctgccaaaagaatatttgggcagtctttgatgtgattgtggacacggccctcgcttcaatccacttggtgaagtattcgacggctacgaaggcgaacttaaggttcccctgagcggtgggcaggggcccgacaatgtccangccccaacgctgaagaggccatgtatgggcgatcagctttgtatattgcgaggggttgcctga

SEQ ID NO: 47169 - DNA, 393 bp, Zea mays
  unsure (1)..(393): unsure at all n locations
agcttgtttcataaattgtgactaaatagcaatgtgccaaatctaagaatcatgctcactcctgagattgccaactagcatatgtaggatgtgttgaaatccatttttctaacatgtcgatgctagcttgatatgccatttcctccagcgacacactttcttggataaactctaaacaaattgtgctaaaacttgaatcctagataagcgatatataagttcaagatgggtatgcacttacacatatcactctatcgatacttcttctaattgcacctaagataaacttgggtaatgtagtgttagacaaaaaccatggctttaagctctgatagataatctatcatatngcttcacttggtgaaagtttgggaaagatatacacaacctgtc

SEQ ID NO: 47170 - DNA, 411 bp, Zea mays
atggaacatattgcttcaatcggtagctgatccatgccattcctttcgaccggcattctttcaattggtaataatatattctatggaaaagaatgtcaatatgaaggttaaattccttttggcttaaattcgtaaattagcgcatattgtgaattcactgctccatgtgcattaacttaaaaggaaattaatttatgcctttacgcctcataaatgatgatttgtttgccattcatatatagatatcatcattcattaaatatttgcttgcactactaatacctcttttcagagagctttatcgactagctttaccaggaaaagagataacacagaagagagtctccatatatgatgaatagagaatactaaggtgacaccccacagatagtaagatctgtcaattggtat

SEQ ID NO: 47171 - DNA, 404 bp, Zea mays
  unsure (1)..(404): unsure at all n locations
gcaagcttgtgaagattcttcatcccaacatgggcttgtcggcgatgccagagcctgcccatattagtcttagcaattaagcaagtgtcgagttcagctttgttattattaaaatcaactaaatatagctgaccctctaacactcccttaaatgctattgaatgatcacttcttctaaagacagtaacaccaatattactaaaaagacagttgtaacccattttgcacaattgagaaattgaaagcaagttataatctaatgaatctataagaaagacattagaaatagaatggtcaggtgatatagcaattttaccaaaacctttgaccaatccttgatttccatccctgaatgtgagagctcgttggggatcttagttnttctcgtaggaggaaaacattct

SEQ ID NO: 47172 - DNA, 354 bp, Zea mays
  unsure (1)..(354): unsure at all n locations
agctgaaggactgcttcggcaggagagcttcctaatgtgatgactcgttcggnccacggagtcgctttacccgagcgcaagttacttatcgcagaaagggacgagtgaggtatccgtatcccggaggcgtaggagtccctcggctcggtctgccttggctgcttacgtgtacctcgtcgtttccaggatccgctttccgaagtagtcaagaagcacgaaagaaatcctgctaaaaagagatcctttttcgaggaaaaattcgacgcagagggggtctccccccttttagcccccgagggagggtcgggctttgccgaagctacgccgacccttccttgacaactaaactttgcg

SEQ ID NO: 47173 - DNA, 378 bp, Zea mays
  unsure (1)..(378): unsure at all n locations
agcttatcatgtgcaagaagacatttttttatgtttaggcatgcattattctattcattatttttggcagaagaatagaataaaataaatatacatagcatgcctacattgtaaaacgtgcgcacaaactaatgaataaattccaaaaaatatttaagtgcaacaataataacaggaattaatgtagaaattaattctacataaaacaaccaattagtaaaaagctctttcttctttcttttttgattggttttctcttttcctcacgtttgcatgtggcagtgagagatgagcgacgagcgcgagtctcgatccaaatcgcggcaataaaaaaataaaagaaatcaggtgcatccgatttatcatncctggatgatg

SEQ ID NO: 47174 - DNA, 401 bp, Zea mays
  unsure (1)..(401): unsure at all n locations
agcttaacggaagccgaagccgaatccgaagctttagctcaatggaaactgatgaagcttgaataggtaactgtagaaaaaactctaaaaacccttgttataaccttngtaaagaataatgtaattaattcttacttgtaaagaatattgcccataccttgtaatatattcttacctttccatcaatgtataaagtgctttggtgtgaacgaaattagcatttttgagccgaaggcgagaacaccttcccttcttttcatacacagcgaagcatataaaccgcttccttttctttttgccgaagccttatctttagagccgaagcaactggctgtgttatgatgatgatgatcctacgtatgtctaaatgaaatgctatgaatgcanatgtatgatgtaat

SEQ ID NO: 47175 - DNA, 283 bp, Zea mays
ataagtctcatcctccctctgcaggaagtagggccttcttagctcgaaccatgataaaccttgtgtttcatcttgcatcaatccatccgggcagggacacgcagcataaaattcactagtcggttgagggcctccccgggtccgaaacaccgacatcaagtattaaggttttcaccaaaatttcaagtagtttaagtaaaggatgcatgcatgctcgtcctaaatgaccttatttcaactcagagggaatagggaaaagctcccatcccatatagtagcctgt

SEQ ID NO: 47176 - DNA, 472 bp, Zea mays
  unsure (1)..(472): unsure at all n locations
gcaagcttacacacatctctgcaataaaatacataatcttttttgaatcagcgttgactcttcgctgtaagcctcccttaggagcttcttcgccttttactntagcggaatcagcgttgacttttcgctgtaagctctgcattcccttaggaacgtctttggagcttcttcgccttttactttcggcggaatcagcgttgactnttcgctgtaagctctgcattcccttaggaacgactttggagcanaaaacttacacntgcgctcctttggaacgactntntatttcttcgaagaattcataccgtgtctattgcaaattaataatccgaaggtcctccttgctattgcaaattttcaagctccgacaacttaagcatgtgtagaagatatgttntccttgtggcagacaacanaactattacttgaatttanaaagtgttctttatacancagaaataaaactgaatgg

SEQ ID NO: 47177 - DNA, 410 bp, Zea mays
agcttctaaagggtgaacacattgtgggaagaactaatgtttattctgagaaagacaggatccggaccgcatgcccatccgggaagcatagtggcactcatcattcatacaaaaacatcatgaccactgacaggccactggagctcctacacatggatttattccgcccgatcgcttacataagcatcggtgggagtaagtactgtctaattattgtggatgattattctcgcctcacttgggtattctttttgcaggaaaaatctcaaacccaagagaccttaaagggattcttgagacaggctcaaaactgagtcggcttaatgatcaacaagattagaagcgaccacgggacggagttcaagaactctcacattgaacgcttccttgacgaggagggcatcaagcat

SEQ ID NO: 47178 - DNA, 263 bp, Zea mays
tgaatctcaccccttgagccaaagaccgagcgcggacaccttgaccccttgctcaaggcctaatgaccccattgacaaaattgagcctaactaacctctctaccgtctgtcagaagatggcaaagggacatgcgccatggatacgataaacccgccatcgtcaatctgtgtgaggcagcgagacaaaccaaatatctcccctctctatctcttgatcccagtagcaaaaccttcaagccttcacacacacatgacaaaggaat

SEQ ID NO: 47179 - DNA, 258 bp, Zea mays
ctagcacaaagtggtatcacgtaacctcgcagtaaggcaatggcaatactctatatgacttaaggcatcagccactacattagcttttcccggatgataatgaatttctaaatcataatctttaattagctcgagtcatcttctgtgactcatgttcaactctggctgggtgaaaatgtacttcagactcttatgatcagtatatatatgacatacatttcccagcagataatgatgccaaatttcaaggacatgaac

SEQ ID NO: 47180 - DNA, 318 bp, Zea mays
  unsure (1)..(318): unsure at all n locations
caatcaacccanaaagttgtattgtctttattgtggcgaggacaagggccacacaacaagaacatgccatgttacaattcagaagcagaaggaaattaccaaagctgaggcgcgatagagtcagccgaagcaaagcctccacactgcttcgtgttattccccatacatcccagaatacgtacgcaatcaacaacctacggcttatgttgcttcggcaagccattccccagcttcctggccccagttgccaccaccaccaccactaatccacaattaacagctagaatggcccaatcatattcagcagcagcgcgacct

SEQ ID NO: 47181 - DNA, 296 bp, Zea mays
cagcatttgcgtaatgaggactctatggagaagcctcgtagtgagaccctggccattcacctcggaagtgaatatgggtctagctaacccgggctagaagagaatcgcgactcatgggtaaagatgcgccacctctgcagagtgtaaaactgatatatcagccgtgctcacggatatgagcagtctggactcctcacatgataattgaacttgaagatgaaaataaatcgagatccgatgatctgccaatggtttgcttaagtggttgcacttaagtgtttctgattactcttctc

SEQ ID NO: 47182 - DNA, 386 bp, Zea mays
  unsure (1)..(386): unsure at all n locations
agcttgaagccatggtaagtagcatatgcaagttatatacgaatngactcaagcctagctacgagtgcataggtttcaccgaaatccaaaccttcaacttgtgaatatcccttggccacaagtcgggctttgttccttgtcaccacaccatgctcatcttgcttgttgcaaaagacccacttggttcctacaacattttgattaggacgtggaacaagatgccatacctcattcctcgtgaagttgtttagctcctcttgcattgccaacacccagtccgaatcccttaatgcgtcttccaccctatatggctcaatagaagacacaaaggagtaatgttcacaaaaatgagcaacacgagatcgagtggtaaccccttatgaata

SEQ ID NO: 47183 - DNA, 366 bp, Zea mays
agcttatgaagattcttcattcctttatgggctattcggcggtgccagagccaacccaagttagtcttagcaactaagcaagtgtcgagttcagctctatcaaaatctaccaagtgtagctgaccctctaacactcccttaaatgctattgaatcatcacttcttctaaagacagtaacacctacattagtaaatagacagttgtagcccatttgacatagatgggatacgacaagcaaattgtaatctaatgaatcaacaagaaaaagatttgaaatggaatggtcaggagatatagcaattctacccaatcctttgaccaaaccttgatttccatccccgaatgtgatagctcgttggggatct

SEQ ID NO: 47184 - DNA, 231 bp, Zea mays
  unsure (1)..(231): unsure at all n locations
tacatgaaaggacacacggtgagctgctcgcatgaaagatattaggatggttattacacattctcctaggagcatgagacacacaatttctcctatgcctaccattaaaattggaacttgaagcgaacataacatgtgaatcataagcatcataaacatatctcctattatgactagcgcttntcctatcatacatgaaagcgtgattcttttgaacgctactagcaatag

SEQ ID NO: 47185 - DNA, 315 bp, Zea mays
  unsure (1)..(315): unsure at all n locations
agcttggntgtttcaacaaaatcaaaatnggatctataacttcaattcttctatcttctacatcatataactcanatctagagttgcgaacatctgattcctttgtttttctaattggctacttaggataaaatgatgaaaaaatagacttactcaatatctaaggatctaagatattggtttttgaatcatgtcgtttggaaacctgaacttgacaaattagtcaaccaaactgagcttgaacacagtgtagaattttaagaatggttcacctagatagcaagttattgtctgccgtggagtgtctgatgtgct

SEQ ID NO: 47186 - DNA, 428 bp, Zea mays
  unsure (1)..(428): unsure at all n locations
agacttggtgtggtattaatcgatctgttataatcaaactcaatatgtggcaaacattcctcccacaacctcaaattatccttcaaaatagcccgcaacatggtagataaagtgcgattaacaacctctgtttgcccgtcagtttggggatgacaagtagtagaaaacaacaactttgttcccaatttaaaccacaaagttctccaaaaatgacttaaaaacttagcatccctatcagaaacaatagtatttggcacaccatgcaaatgcacaatctcagtgaagaacaaatcagcaatatgtgaagcattatcggttttgtgacagggtataaaatgtgccatctttgaaaaacgatcgacaatgacaaanacactatcactcctctctttgttctanngcatcccaaaacaaaatccatagaaata

SEQ ID NO: 47187 - DNA, 392 bp, Zea mays
  unsure (1)..(392): unsure at all n locations
agcttaaagccatggtaagtagcataggcaagtttatacgaattgattcaagcctagctacgggtgcataggtttcaccgaaatccaaaccttcgacttgtgaataccccttggccacaagttgggctntgttccttgtcaccacaccatgctcatcttgcttgttgcggaagacccacttggttcctacaacattttggttaggacgtggaactaaatgtcatacctcattcctcgtgaagttgttgagctcctcttgcatcgccagcacccaatccgaatcttgaagtgcttcctctaccttgtgtggctcaatagaggaaacaaaagagtaatgttcacaaaaatgagcaacacgagatcgagtcggtacccccttatngaatatcacc

SEQ ID NO: 47188 - DNA, 419 bp, Zea mays
  unsure (1)..(419): unsure at all n locations
agctntctcaatctttcttggtgcttatcaaatatactctattcttatataattggctcaactcanaattttaaacttttcattccctttttcttatttccttgaattttgctcatggcgctcacttagggtttttaattagggttgaaaaatttttatctttcaagagactcaattgttttgatcatgacactcttaagtataagcttggtgacttctttattacttaagttattttggtactcatgcctactttagttcacataaaataatggtccttggtttggctttttaagagaaaccctaggtgacactgtggtgtcacacttagatatatagtcgctacgccttgtttcgggatctggtatccaaaggggtctacctttgacttgattgatattagactccgctatgctgat

SEQ ID NO: 47189 - DNA, 434 bp, Zea mays
  unsure (1)..(434): unsure at all n locations
catgcaagcttgcacatagnctcgatgatgtatgcctatatatagtcttagtcttctaaagctatcactttgtgtgaaaccgcattgaaaaagtaacacaagcgtgtgatgacaactttgacatgctctgtttcgagggctcttaccgcaattgggaggaacaccgtcatcatcacatggcagtcatgagagttgtagccaaatagagacaagtccttcatcctgactagtctgctgatattggatgagaaacctgtgggcactttgaccccacgcaaacatttgcaaatctatgttctctcctcaactgacaagttgtagctagctgggaggaggtaaggcttncctttgccactatccactggatgaagttccggtctgatttgaagatctactagatcattgcgtgatttgagtccgtcttttgtcttact

SEQ ID NO: 47190 - DNA, 401 bp, Zea mays
  unsure (1)..(401): unsure at all n locations
ngctntatctaattagcctaccaccgcatgcattcttggttatgaatgcacatggcgggccataccgcatggngccatttacctcgtgcgttgtgtcgcctaggtgagagttccctttccccagcaacaggatcaggatgttgcctagagggggtgaataggcgaatcataattaacacacaaaacttagaacttcttatgctactcaaagtctgattgcggcagaataaagaacacatcgagtaggtcacagcggaattgaagttcctgtctcaatctagcatgtacttcaagaacaacttataacaaagataactggtgaagtgcaaatagtcaagttataaaaaatagagagagaacaccacagaacanagcacacaatagacacaatgatttatcct

SEQ ID NO: 47191 - DNA, 327 bp, Zea mays
gaggcatgcagcttctaagggagaacatgtgatatgtctaacttatgttcattccgaaaaagagagaccttgtgcagctcgtcaagcagggaaacaagtgggaggctcacatcacaccaaaaatgtgatgacaacatcaagacccctggagctgctacatatggacctcttcggaaccgtcgcctatctgagcatatgaggaagtaagtatgggttatttattgttgatgacttttcccgcttcacttgggtgttctttttgcaggataagtctgaaacccaagggaccctcaagcgctttctaatgagagctcaaaatgagtttga

SEQ ID NO: 47192 - DNA, 450 bp, Zea mays
  unsure (1)..(450): unsure at all n locations
agcttattattactggtagatgctttcataaataacccttaggacagaacccacccctaattaagagatgtagtgcaaagtggcccattttacacaacttttgttatttttgtctaaagcatagcctttttactttaaacctcaaattcctagaacaggctataatgaccaatggaaacccactttaatttttacagaatttttggaaaaagttaaaccactgttgtagttcaaccctacactagaaaccataaatagaaaataaagaaagggaaaatgaataataggaattagtgtcatcctanaacccttattaacctgtccactgaaatatataaaggcaataccaattcactatgcctagccctaacaaaacctaaacctagagtgataagcataaaccactaaaagccacgtatgacccagaaaccctaaagtactcattaactt

SEQ ID NO: 47193 - DNA, 392 bp, Zea mays
  unsure (1)..(392): unsure at all n locations
agcttgagcagngactggctgcgtctgtttctctnggaagctagttatcagcatatccttcaacttctgccaagaagtgattgtccctggccgaagagaagagtaccaggtctgagcgacgctcttgatggccatgacaaaagattttgccatgactgccgtattgccaccatacgaagatatggttgcttcatagctcatcacgaattgcttcgggtctgtatgaccgtcatacatggngagctggggtggcttgtaagactggggccatggtgtagcctgcaattctgttgagagaggagaagcatcatcgaaagcaaagtttccatgatggaaatcttcataccagtcgtcctcattgtggaagccttcctgatggagctctctgcgtg

SEQ ID NO: 47194 - DNA, 352 bp, Zea mays
agcttgagcagtgactggcttcgtctgaaacccttggaagctagttatcagcatatccttcaacttctgccaagaagtgattgtccctggccgaagagaagagtaccaggtctgagcgacgctcttgatggccatgacaaaagattttgccatgactgccgtattgccaccatacgaagatatgggtgcttcatagctcatcaggaattgcttcgggtctgtatgaccgtcatacatggggagctggggtggcttgtaagactggggccatggtgtatcctgcaattctgttgagagaggagaagcatcatcgaaagcaaagtttccatgatggaaatcttcataccagtcg

SEQ ID NO: 47195 - DNA, 413 bp, Zea mays
  unsure (1)..(413): unsure at all n locations
agcttatgaagaaactttattncnnaatgtgctatacggcagtgctagagccagcccatgttagccttagcgattaaacatgcatctagatcggcattctctttagtgaaatcaactaaataaagcttgttgtctaatacacctttaaaagctaataaatcatcacttcttctaaagacagatatatcaatatttgtaaacaagcaattatagcccatatgacataattgacttatagaaagcaaattgtaaccaagtgattctactaagaatacattggaaattgaatgctcggtagtgatggctattttacccaaagctttgaccttgcaatgattcccatctccaaagataatccgatcttgggaattcttgtcttgacgtagtaaatgcacatcttcttccccgtcata

SEQ ID NO: 47196 - DNA, 423 bp, Zea mays
  unsure (1)..(423): unsure at all n locations
agctngagtgatgctcttaagtcatttacaatcttgattaacacatgggctccaaggttcttatgttcttctcaagttttctaccacatgtgatcacagtcattatggcatagatgtgctctagccagggtaacacttgaggtgttacagcccttcccccttaaaggaatctcgtcccgagattttatgcagagtcctcttagaggggtgctacgaaggcacgttggtgcggtgttccttcttttgttcaagcttctctagttaactgctcttcgaatgtcattctctttgcaacttccgaaggaagaccttnttaagttaaatctgccacttagactattcttgctatctaagtttttcttataattgtattaaagggcacgtggcggtgggtggtttggagtacgtaccgacttctttggc

SEQ ID NO: 47197 - DNA, 471 bp, Zea mays
  unsure (1)..(471): unsure at all n locations
agctngacaaccaccattgacatcttacataaaatttctgatatcaagaatatttagttcattcctcaacatgcaaaagcgggtcttatcaagaggcttagtgaaaatgtctgctaattgatcttccgatctcactccttctaaaatgatatctcctttagcaacatgatatctaaggaagtgatgacggatatcaatgtgcttggtgcgagagtgttgtacatgattattagcaattttaacagcactctcattatcacacaacanaggtaccttttctagaactactccatagtctagaagagtttgtttcatatataaaatttgtgtgcaacaagcacccgcgtcaatgtattccgcttcggcagttgacaaggcaacactattntgctntttggatgtccatganactagtgatctaccaagcagatgacatcccccagaagtacttttcctatcaattttgcaatc

SEQ ID NO: 47198 - DNA, 379 bp, Zea mays
agcttaagtccataatatcattgtgtggggactctcatgcattctatcgagtagttttaattcaaatgtttgttatatttgcttgctttggttgtgttgtcatcaatcaccaaaaaaggggagattgtaaggaaaatggaccccgggccatttggctcaatagattttggtgtttgatgatcagcataacctgtggactaatgtgtttgctagtgtttgtgtttgtagttcacacgatgctaaagttacttgaactaagggattgaggaaagcaacacctcaaaagaagacattgtgaagaccataagagaagatcaacaagtatcaagcaaagtccaagaaacgaagaatggtgttgccacggtgaactgtccggctg

SEQ ID NO: 47199 - DNA, 419 bp, Zea mays
  unsure (1)..(419): unsure at all n locations
cctgcggcatgcaagctttcgcttcttagaaatcgccattntntgctcttatgttgttcttggtttcttcaaagctntntcatcttcatttatcaatcgggcagccggcctactcagaatgctgactattcttttctttttatccattcggccccttcgtcgagcctctcatagtcaggataatcgaaatttaaggcatccataacacggtttagccttcgttttggacgggtgtcgaaggcggcagtcatcaattgatcttcctttttggtataattaccaagtatttcgttgcacatggtttcaatcatctccagccattcgttgcaaggtttcttgaattggttctcaaatttaaagcgatagaggagtcgtataagctcatacttttcccccttctttcttcttcgacatccccc

SEQ ID NO: 47200 - DNA, 369 bp, Zea mays
  unsure (1)..(369): unsure at all n locations
agcttcgtcttaaccgtgctttngtataccctttatctatctttgaaggtacctatntacatatttctcttggaaaatattgttaaatcatgtttttgaggaccttcagaagccgaaggcccccaacatgcgtcatgcttcggcgccacttccacagggcccggccgcccgcggagggtggcaaggccagcgacgacgacaagaaggaagatcaccaggcaggagagttccccgaggtctgcgactgcttcatgatctatggtgggcaagcggcgaacgcctcagctcggcaccgcaagcaacagtgccgggaggtctgttcggtgaaggtggtggcgccagtctacctagactggtccgacaagccca

SEQ ID NO: 47201 - DNA, 289 bp, Zea mays
accttatcactgagctcctcatagcgtgccctggaaaattctctcgtcgcgcatgtcaggatggtcatccgaggtcagacggcaaggaacaagtctcgtgcaacatggcgtccaaggtgaagcatctaacatggcaccccgcagaaaacttcatcgtttgcgcagccaatagcagcttgtacatgtaccatacataagcacgctcatgttatgtgtgcagagtgcaaatcacagaacagcgttcgtagctatatagatttgagccagacaagaagatactctttccatg

SEQ ID NO: 47202 - DNA, 318 bp, Zea mays
  unsure (1)..(318): unsure at all n locations
ctcaggctatctatcttcgcttcatgtccacgactaacccanggctattccaatttactatatctaaaattcatatcatctcanggaagatattgctgttgtacgaaataaagaattatcatgtgcgaaataccaaagcctacaacatggatgaaagccaaaggatggttacttctatgcttttaagtacaaggaatcttaaacgattattcatgcttattttatgagttaaaattaagcataacatcatctggataatctagttcatgctatgaagattccatgttgtagtaatctagctttccatccttataaaaa

SEQ ID NO: 47203 - DNA, 339 bp, Zea mays
  unsure (1)..(339): unsure at all n locations
agctntatgtntgtagaatagagtttatcatttatgatgtctatgttattactattggcttcttagcctcactcgagtttagcgtttatacattttaggtcatttgttcctaaaagtgtggtgatagagttatgcagtgtttagtaatactctacatactaaatcaaggaaatccatgaaaccccgtgataaagttgtataaatgcattaggttgttgagattgtgatttggtggggttctatgttttgatcatgtttatttaattagtatattatgtgggtatgtccggaaaaggagcttanggagctagttagggtgtttctattcacattcggaat

SEQ ID NO: 47204 - DNA, 391 bp, Zea mays
tgcagcttgcagatgggcgaatatttataaccgtgctctcatgtcaccctcagaacgatgtgtcccagtgggaaaaagaactctattctcgtaccggttggtgatgaactctgtaatattcaccgtgcaagtgcaacttaaaacatctgtgatacgagctctttttttttattgtgtgcggttgtgcttcccttatttagaactcacaaatcagatctcacgagtacgatcatgcacgcacgcacggtatggccctttaattaggagtctgtttggatcccaagagctgaagagaagtgactaaactttaatcactttagaaactaactaaagacctgaacaatatatttgtactattttaagtacttttagttatttctggttggaattt

SEQ ID NO: 47205 - DNA, 344 bp, Zea mays
agctctgagaatgcaacaagatcttgaagataataaacatgaagttataattgagggcctagaaagcaaaataaaagatcaagccgctgctcttgaaaagaaggatttcgagcttcagacaacagaaggtttattggcagaagctgaagctaaaattgcaaagttaaatacagagcttctctcaaagtcagaaagcttcgaacaggaaaagcagaagttaaatgccaaatttaagactgaggtcgagaaaagttcaaatttgcaaaaatcattgacaaagcttcaaaacaaatgtctggagttcagtagcctatgtgtacaacggctgaagcagatcttcaatt

SEQ ID NO: 47206 - DNA, 339 bp, Zea mays
  unsure (1)..(339): unsure at all n locations
agcttgtctcaaagatgacaattcacccagtgtaatagaagcaaatgaggaagcccaagctcaagcattacttgctcccttcctcagttntgttgccttattgctcagtctcagcttgctctcatcatgaacattcaaggctcattccaatagctggtttgatcccctacgaatcactaagttcaagtatcatctcttcgaatgtatcattgactttcttggctttgccagctttgcagagcccattcaaatttgagttgtatgtgataacatcaggagcaatgccatacattcacatcctttcaacaagctgaagtgcactatctagctttaatctct

SEQ ID NO: 47207 - DNA, 454 bp, Zea mays
  unsure (1)..(454): unsure at all n locations
agctttgagttcttctcaaattcagcaagcatggcctcacttcttcccatgcgcgtcatcttttgaaggcgaagaaaaaaatattcaaacttgagtacaagaatacgtatcaaaggcaagtattattactgaaaaaatataccaatataataccatatgccgactgattcaagtattattcaaagtttcctcactgatctattattatgtctatttaagttcacatgaactgctaaacatattcagtatacgcactcagagtaggtgtcaagtaacagtcttggacatccaaataaaagatatgtaggtttggaacagataaaaagatattgcagtttggaacatattcagtatatgcagttntggaagagataaaagtaacagtctgcacatctgaataaaagtatatatatgcagtcagagtacaagcaaaggagaataatctaaacattgt

SEQ ID NO: 47208 - DNA, 422 bp, Zea mays
cacaacatatgtgggaattgaaatgggaagacaaaccttttggagaggtggattcatcgtttgatctccaatgatcaatttcttcttcttccttcaaagggttagtttcacatggactaaaggaagtagaagcatcatatgaactaacatgtttgtactcattaaatttacttttaattctagtccaaatatcatgcgcatcatgaatagattcattataattcattatgaacgcatgataatcttctttgctaagagaattacttaagatgtcataagcaagatagtttaagcgaatacatcgttgttcttcctcggaggcattattcccattataactagagggtctaatactcttgctaaaaatttgtctaatcggaagctaggttctaaagcattatccactatagacatgaacatat

SEQ ID NO: 47209 - DNA, 421 bp, Zea mays
  unsure (1)..(421): unsure at all n locations
agctngcagttatgccagagccggacgcaggtctttgtctccttgctgcaaagagtagggcaggcccatgtgtgttacccaacgttntctgatcgtccgattaatcgcgattaatcggcgattaatcgactgatcagcatcacgcatccgataaggagtaccgacgcgatcagggcgattagaaacctgatcgttcgattagtcgacgactaaacgcgattagtcgtccgactagatcgcggacgatcagtttggcccgcttcgttttcactgttcgatactttcatttcggaccactcactgccactacagcccagcccactacagcagtacagcccactcagtcactcactcagtacagcccacttacacttagtcactcacagccactcacgcatgcaagagcagcacggtcgccagt

SEQ ID NO: 47210 - DNA, 388 bp, Zea mays
  unsure (1)..(388): unsure at all n locations
tcttatgtcttctctagagttcacatcaattttcacataaaaccattctgtcatccagtcgccgggccatctctttcgaaagggtggcacgggacagcttgacccagaccgagaaacgaaattgtagccgccaaaattattgtgatactgttccttaccccnaggttttgtttcgtatgacaattcgtgtatattgcagaaacattttgcatcaggttccagaccttggcttctcgcggcccacacgaagatattcatccttatgattgcttcacgggtaagttggtgaagatagacttcaaatattttcagcacctctaccgcaaagttgctcaggggaaatcgtagtccagcttttcaaaagcttctgaacactacgacttcattt

SEQ ID NO: 47211 - DNA, 415 bp, Zea mays
  unsure (1)..(415): unsure at all n locations
acatgagggcacagagcgacctctttttgcttaatattgggtgcgcgtcggtggtggaactgatgtancgaacaacgatggtgatgttcgtcttccagatgaggtatgtgtgccatatactggtaatgatcgcgaccttgatagactgatagatgatatttaccccaatctaaatgaagacatgtctaacacaagctacatcacttcaagagcaatattgtctacacggaatgactaggtggatatgataaatatgaggatcatcgatcgtttcaaggtgagcagatgatgtaccatagttttgacaccgcggtggatgatcctaataactattacccatcggagtttctaaacacgctgactcctaatggactaccccgcacgttctgaagctcaaagttggatgcccaatcat

SEQ ID NO: 47212 - DNA, 366 bp, Zea mays
ggatagcttctttttctcattctttcttgcgaacattctcaatgtaatcaaggcaagagacaccaattgtgtggtggtccttgcgggaaagttggtttcccgttgattgagaaaagaagctcactccgtccgagggaccgtttgagagaggaaagggttgaaagagaccccgtctttgtgaccacctcaacggtgagtatgtttgcaagaaccgaacctctgtaaaacaaatcgtcgtgtctcgctcattattcgctcacgatatggtttgcgccctctctctcggactcgtttatatgtttaacgcctacccgacttgtagttgtgattaagtttgtaaatttcagattcgccctatcacccccg

SEQ ID NO: 47213 - DNA, 453 bp, Zea mays
  unsure (1)..(453): unsure at all n locations
gcttgctctangtgaagagtacgatgtgttgtcatattctcataataaaagggatgatgaccatatcatgcttaatgttgctcatgaggttataattgcgaacttaaattcatgtgaacctcactctcgcacgagtgcgcatttgaattgtatatcaccatgtgctaactcctgctgttcaaaaaaaagccaatgtttgaataagcatcaagatgcacggtcacaaaagaaattgtgtgggaacaagaagcaaagacaactaaggagaagacgcattgctcaactctctcaagatatccacgggcgcgtggtgaagaagcttgagaaaggaaaaactgcagcaagtgttgagcttcataaaaagattgttcctaaagatgaagaaatcaacatgagcttggaaaaaggtaaagatttatttaatcatgttgtttgcactgaccttttctctat

SEQ ID NO: 47214 - DNA, 301 bp, Zea mays
actcacttctgagatttttcgaactcacttcgagataatagtgtatctccttacgacttaacatgaatttcttctttttcaaaacaatcttctgaagatcaatattgtgtcccctctttgtgtcatatgccagatgaagtatgatgcttatgccttgcgaaatgatgtaatgatgttatgctatgtaagaaggtatttattccgaagacacacgcacattcctgcgataaaacacataatcttttgaatcaccgtgactttttgctataagcctcccttaggagcttcttcgccttttact

SEQ ID NO: 47215 - DNA, 282 bp, Zea mays
cacatttgagtcccaaaggacgggacgcttcagcccactactggtcagaggctctaaaggctggccctcagaagggatcaacggccgcctcaagccactcgggctccgcgcccactactgatcaagggtttgtaggctggccctcgaagggttcacagccgcctcagacacagagcgagggatgaccctgtgtacgttcgatacataaccaacgctcgggctacgctcccgaggtaccctacgacatctcccagaccagcgggaacgatcttgtaacggaat

SEQ ID NO: 47216 - DNA, 350 bp, Zea mays
tgtggcgccctcgggcgttttgtcacagacgaagtaccatgtcttccacctggaagtctcgggaccagaccattctggcgtggtatcgtcacaaagactgctgataccgtgccgagtgtattaaggccacgttccgagcttcttctagctggtccagtgagtcttctcggctggtctggatgcttcggtcgtcgtacgcctttgtcctcacggaaccgtattctaagtctgtgggtaaaatagcctcggcctcatagactagaaagaacggcgagaaacccgcggctcggctcggcgtcgtcctcatactccaaaccgtcgagggtatctctttcattcaccgcttgccg

SEQ ID NO: 47217 - DNA, 404 bp, Zea mays
cttcttccgccgaagctttgcttttttgtacaaaacataaaagactacttcttctttctggcgaagacttttcttttttgtacataacggaacataaaagaccgctttttcctcttgccgaagctttttcttttttgacataacggaacataaaagaccgcttcttcctcttgccgaagctttttcttttttgtacataacggaacataaaagaccacttcttccttttgccgaagcaaccacttaggaacacaaatgctatgaatgaatgcttatgaatgcaaatgctatgatgtaatgtgcgaaatgaatgtccaagcatataaccgaagccacactcaaccattatttccttggaatcaaccacacatcagctctgcattcccttaggaacgactatggag

SEQ ID NO: 47218 - DNA, 440 bp, Zea mays
  unsure (1)..(440): unsure at all n locations
agcttctattgagacacttacagttaaatgtttgctcggcgaanaattccagtctttactggagaagctcagcaatggcggcggatgaaagccatcctaaatctgagtgtctcatcagtggcggtcctggcgcaggacacgggagttcagttgaacccaaacaagtcctgcgacttcgatcttgagtgccggagaagtaaccaaaccacggatgcacacacacacacgcagctctcaaatccacgccgacctgaacgtagagagcaaaggggagagatttggatctgaatgcgaagaagaacggaatccgtccaagaaaaagcaagcgaggagcttttgcttactggccaacagcaatgggcaaagacggaaggcaatccacgtacggatgcgcggatctgcacttcaccaccaccggcaccacccaccactggacgacg

SEQ ID NO: 47219 - DNA, 351 bp, Zea mays
  unsure (1)..(351): unsure at all n locations
tctctggacacccttggtgggtgacaccctaagataaacatgatctcccacctcaaactgtagaggctttcgcctcttgtcatgatagctcttttgcctggcctgagcagcttctaagttcttggtaataaccctgaccttngcctctgccttaagtaccaagtctggcccaaaaattttcctctctcctgcttgagaccaattcagtggggtcctacaccttctcccatataaggcttcaaaagtgccatcttcagactggactgataactgttattgtaagaaaactctgccaaagaaagacacttgtcccaatccttacccgagtgtagtgcacatgctcgcaacatg

SEQ ID NO: 47220 - DNA, 380 bp, Zea mays
ctgctacttaccacttccctggatgaacaacaatcacctgcattgaataatggaagagtgaaatgaaacatctcagcagcgaattgtttgacgagataattaaaccacaaattgaattaatcaacattttaaaagaatcacaattaagaacagaaatacttgtagatatagaactcagtagtcccaatataaccaataccatctcatttcctcgaacaaccacaataggttctataacacttccctgcgtcaacaaaacctgcaaatatcacttcaatgtatgcatacgagtgcaaagattaagtactctgtcttcatacctctgagggcataaaaccacatcatctgcaaatatcacttcaattagtgcatataaatgc

SEQ ID NO: 47221 - DNA, 435 bp, Zea mays
  unsure (1)..(435): unsure at all n locations
caccgcagcatgcaagctaacaagctgctgtgctaaatatattgttattgaatgtacctgatgccgcaagctataatacttggagcactgaacccggctttcggatgcctctttggaaatatgagctacacttttgggggtatatcaagggctctgcctgggttaatatcacattgtattgaaataacataatgggttgcgggtgctgcaaatcttccttagtaatggctgaacccaatggggaaaccagacctggcagacactangcgggcgaagctcccgagcccgccgaaccggtttatgtagctcgtgccattaccgagccgagcctaactcggctcgtcatacaccgagcctgacccaaccgagcttcggtcagaatctttacacccctataccatgtcgggctgagcaaaacgttgctcaatttgtacc

SEQ ID NO: 47222 - DNA, 116 bp, Zea mays
gagtattcacaactcaaatactcatgaaaccctagggcaacctaatgccaattcaccatttgcctattttctctaaaaaatatctagcctatggaaaaatattttgacaaatatat

SEQ ID NO: 47223 - DNA, 439 bp, Zea mays
  unsure (1)..(439): unsure at all n locations
agctntcttgatgcagcagaagctgaagttatgtccctcatttccttatacgctgaagtggtgagtcgctgccataaaaagtatgtacctatttntctgttcttggtatagattctgatatttaatcttgcagggaaggaacgctgattcgctagctcagtattttggtgaggatcctgcacgctgcccgtttgaacaaggtatattttagcgtttattctatttaaacgttttactagacattagctcattggtctattggttacacacatgtacatcagtacatcatccatgctatcccatctggccatctgaacatgtagtgatggaagtcaataccaatcatttttttaatatgatatttaagcaaaaaatcacctgagtaatctaatcttgattaccccactagaccaccatatgcttcagccttgagtacttg

SEQ ID NO: 47224 - DNA, 430 bp, Zea mays
  unsure (1)..(430): unsure at all n locations
tcatgtgatgacttgattcangattatcttactattctacatgctgaattgactgaaacagttgtagttctgactttatacaaccaaaaatcgaagaattacttgactgatgcaactactataggaaaagttgctattgagaacaatgatttcaacaatgagttggcagtggataatcaaaggcttaagaatgaggtccagaaactaaaaagtgaaaatgaacatcttgcaacaagtgtgcacaagttcaacaagggtcaataccttcaaaatgagctgcttatgaacactgttatgaaaaataacaagagtggtattggatacaatgcttttgtgcacaagaaagctatcactcaatacaagccaaagcagactcacaagcctatcaaatgctttgagtgtggatatgaacgtcattttgcccacaact

SEQ ID NO: 47225 - DNA, 431 bp, Zea mays
atcttaagcgactgcagctgcacttgtgcccaataatctatgttttttcacaagttagggcaggtgcacgatttgcatattgtgcgccgttacctgtgcccatgtctcgagcacatctgcacccacgtatacgcaatctaagctcacgacaacgaaccagaacagggccacatggccatgtataagtgtaatcacgaaaactagtggaaatcgtaaataactctgccagtcgcacaagaatcttctgtccgattcgctcgctcgtggccggggcagagcagacgtgatccctccgcgatcttctaggttcagtgaacttgagagagtgcctctgctgacctagtgtgaacggcatattatttggcgcacactgagccagcacggtttccaggcccaggccatatccccgtatccgctatatcccgggtggg

SEQ ID NO: 47226 - DNA, 402 bp, Zea mays
ccttgttgctctttcgatcgcatattggctgatcattaaacaacttcgattattacttatggttcttagcgccctcatgtaaattcaatatgatctcaattggtaattttaattgacatctatcttgatatgcactaacgaaaaaggagaattcatgattcatttatgcaactcgtgaaccatttgatatatgctaacaataacttgaaaaaggtcacttgttgtagaactctctcttgggcaaagatttccatatattgtcattgagtataggtcttaagccacctagactaacgacaaagcacaatgaaagaacgtctctataaaaggtcaaaaaggtaaaccacttctttcattaaacttggacctaaacttcttttatatcttctttgctatctatat

SEQ ID NO: 47227 - DNA, 395 bp, Zea mays
  unsure (1)..(395): unsure at all n locations
attgctagcgagctattggtgtgatattgacaattcttatcatatgcttcttgcagaatatatggactaatgccttccctgctatgaaataaatggcatctatagcgtaatagatattcatggtgttaatggtgcatgtggttaatggattaaatggtgctttatagaaggtattgctttacataggtattctggatcctaatggtgaatagcggtacgttgaaattcctgtgagatatccattcatttgattggtnggtaactctgattttgacatttgtgtgttatatcatcatggtttgatctttgacacaatgcatccaaaacgtgctaatgagtaaaaatgcttggatttgcctaatatgttcatattggcatgtaacgccaaattatta

SEQ ID NO: 47228 - DNA, 453 bp, Zea mays
  unsure (1)..(453): unsure at all n locations
ttagtgccttcactttccaatntaacatatatggtaagtaggacacaagtgtgctcctttggccagtgccttgggtaacacctggggtgttacagccctcccccttaaaggaatctcgtcccgagattgtgtagggatcctttagtggggtgccaagaaggtgcgtgttggtgtatttgtggttcccttttggtcaagattctctagtaaactgctcttcgaatgtcattctctntgcaacttcagatggaagtccttcttgatttagtttcacaacttactctgctcttattaactatgtttctcttatatttagattcaaagggcaggtgggggttggtgttttgggttatgcaccgattcctttaggtagaaaatcggngaagctagagcgcagaaaatcctatgttntcccatgttcttctgaatggttgctccactgaatcttataca

SEQ ID NO: 47229 - DNA, 295 bp, Zea mays
  unsure (1)..(295): unsure at all n locations
ggacaactcagcaggcacacgatcattgtatgtttgttctgtgatcgccatggaccaatgagctcacacaactcgagttttgaactctgtcagtgtatgcttcttggaacaggatctcgccaccgcaaatcggtgccgttggcagcctgaccgtcaacccgcttaaccgcatcttctttggctgacttcgtgtgagcaccgtttgtctggagggtgagtgatgctctccatacgctngattggagttctactattantgtgtctggggctcgagctcgtcagaccgaggagctta

SEQ ID NO: 47230 - DNA, 454 bp, Zea mays
  unsure (1)..(454): unsure at all n locations
gcttggtcccctgngtggaagcccaaaggttctatctctctggtgacgttcttgcttgtgagcttggagaacttggaatctcctcttgaggtgccctttttctttctcttttgccctttccacttgaatggctttgctggagaggtgaaaaaagttgaggaagtcttggctggcgaggatggtcttaagctcgggtcttagtcctttcagaaaacgggccatctttctggactcggtgctgacatcgtcagacgcgtaacgggccaactctgtgaacttgtgcacatactcactgactgttctcccgccttgagttagctcccggaattcatcctccttgagttggactatcccctggggtacatggtgctcacggaacgctgttttgaattcttccaagtaacatctctgacggcctcactgaaggtgtcccaccatgctaaagccattcctg

SEQ ID NO: 47231 - DNA, 463 bp, Zea mays
ggatcttaagcactgggctgcagcttctaagggagaacacgtgataggtttgactaacgttcaattcgaaaaagatagaccttgtgcagcttgtcaagcagggaaacaggtgggaggagcacatcacagcaagaatgtgatgaccacttcaagacccctggagctgctgcatatggacctcttcggacccgtcgcctatctaagcatagggggaagtaagtatggtctagttattgttgatgacttttcccgcttcacttgggtgttctttttgcaggataagtctgaaacccaagggaccctcaagcgcttcctcaggagggctcaaaatgagtttgagctcaaagtgaaaaagataaggagcgacaacgggtccgagttcaagaaccttcaagtggaggagttccttgaagaagaaaggatcaagcacgagttctccgctccctacacaccacagcaaaat

SEQ ID NO: 47232 - DNA, 453 bp, Zea mays
  unsure (1)..(453): unsure at all n locations
agcttcttaccacgcgcccgtggatatctttagagagttgagcaatgtgtcttctcctcagatgtctttgcttcttgttcccacacaatntcttttgtgaccctgcagcttgatgcttattcaaacattggctttcttttgaacaacaggggttagcacatggtgatgaattatctaaatgtgtacttgtgcaagaatgaagttcacatgaatttaagttcgtaattacgacctcatgagcaacttcaagcatgatatgtctatccaagagattgtcatgataacaagacaataagtcatatttttcagtaagagcaaggttatcatgacttaacaattctacttgattctcaagcatggcatttctcattctaagttgagcaacacaagataaagcatcatcatttctactctgctcaattagaattgaatcataccgttggaccaagacat

SEQ ID NO: 47233 - DNA, 179 bp, Zea mays
aacttaatttagccagctatttaaatatctttaaaaaagtattttctgttccctcataaatctaaattagaaatttttaaaaactataaatttgcttagatctgacgatcatcacgtcagtatagacattctgaggctgaaacgatgctcactacaaaacagttatactcattgtagga

SEQ ID NO: 47234 - DNA, 481 bp, Zea mays
ttctccggacccaagcgacgcagctgcagcttagcaacaggggctggcaccctgcagtcgcttgatcctaatcaagacgtcctttctcttatagaagctcgaagccagaagaggaaggctgtcagtccaacacctccggaggatgacctagatcaagaaatccaaaatatggagatccttcaccagcaggttcaacgcaagaaagaaaaaatggctcgtctagctgatctttagagacagatagatgaagcttctgaagaggttcgtcatcttgttcaagatgatcaaagccgaagacctccacgcagagagcttcatcaggaaggcttccacaatgaggatgactggtatgaagaattccatcatggaaactttgcttttgatgatgctttttgtaacacccggattttatggatccaaaacccggggttaacataaacaccaggtatgctgggaccaagtctcatacatatgatgtata

SEQ ID NO: 47235 - DNA, 343 bp, Zea mays
  unsure (1)..(343): unsure at all n locations
ctagatgccccangtgcgaatgaccctagaggcttatgctgttttatgccctacggcatggacggccctaggacttatactgatggatgccctacgtgcgagaagcctctatagctcataccattagatgccctaaggagcgagggaccttggtggcttatacgtaagatgtcctgataggcgagaagtttacgggcttatactctcatatatatgccccatgccatgagatgccgtggaggcttatttggtaagtgtctcaaggtgcggagggccctaacggtcttttgtcgttatgcggcctggagagcaaggnggtctatgggtttacttctgtacgctt

SEQ ID NO: 47236 - DNA, 452 bp, Zea mays
  unsure (1)..(452): unsure at all n locations
gcttgaagctggcctctgcgccattatgtatgatgatcttgcgggtagccttgcatataacagtctgaaggtacaaatattgtgtatttggaagtttatgaattttgaattattcttttgttcttatattaacccattcattcttttcatatagggtttaatacttagcaacgccttcagggcgcataagaatgttgaagacgagagttgcactattgctctcaacaaccttcgaacggaggttatcaagctaaggaacgaagctttggaaaaagacaaaattctacttacattggtggacaaagtaaagggggatgaagctaacttcaaggctcaatctgaaatccaaaggaatgagatngaaaaccttcaaaaccaactggccgaagccaaattgaaatgcgctattgccgaagctgaccgagatgccagtgattactggaaaaattatt

SEQ ID NO: 47237 - DNA, 262 bp, Zea mays
tatatactgctggttatccccagctcacgaatacgagaattcactctatgaagtctcactctggctctcatcatgcttctatgtataagagtgaggcatctatttctaggcaatccactcatgttaaattgcctactaagaaaactcctattgcatcatatgagcctattatttcatttaagactatcgatgcttcttatattttaactaacaaatcacgagaagtagttgccaaatatgttggggccaaacacaacggctc

SEQ ID NO: 47238 - DNA, 427 bp, Zea mays
  unsure (1)..(427): unsure at all n locations
agcttctgcttatctctcgacagacataaattttcttgntgtcgggaagacagtacaagaagtcttcttctccactgccattaaatattaatgctcccttcggatatttcaatttttgggcataatgctgggcctcttgttcttctttttctgaataatttttccccgaagcatgacgaanaatataatcacgagtcttgggggatgcttcgggggcaacaacactagattcttcaatagttggctttgttattttctctgtctcactttccaaagtttttgcgggctctgagggtccagcttcggctgaaatctcttgctctggagctgtagaaccagagatttcagctgttgtttcaggagtaacagcagctttcttcggaggtgtgctcgaagatttgatcgtttccaatacgtctagcacatt

SEQ ID NO: 47239 - DNA, 388 bp, Zea mays
  unsure (1)..(388): unsure at all n locations
ctcagctttagccgaatgacagccagcgtccctcattcccaaaattgctataatgtgctgacctatgctgatgatatcatagtcaaaagcacgaagcaagaaaatcacattgctaatttgcaagagacatttgccaatttcaggcaagctggtctgaagtaaatccacaaaagtgtgtatttggggtgaagaaaggcaagttccttggttgtctagtatcaacgaacggaattgaagcccacccaagcaagagtgaagctatccttcggatggagccgccaaatacaaagaaaggggctcaacggctcgcaggtagattagcatcattanatagattcatattcagatcagcagagagagatctactattctttgagatactgaagtc

SEQ ID NO: 47240 - DNA, 410 bp, Zea mays
agcttttcgctcaagccgaagctcattatgtttatgtacaagatctaaagagaaacgttgctgaagcaactaaaaaatttgaagttgaagtggtgaagcatgagatatgcgaaatcaaaagatcaagagtgcaaaagaatgccgatgagctttgtgctgccaaagaaaaatgttatgagatatccatggaatgcgcaaaaaaattaaagagcagctttgctaaagttggagccttctgaaagttgcctagagggcggtgaataggcgaaacctgaaatttataaacttaaacttgcactaaggccggggttagcgttagaattaaatcggagttagaaagattgttctccatgcttagagttgctccaatagatgcagataactctgggagcaaactcaaaaacaatatg

SEQ ID NO: 47241 - DNA, 341 bp, Zea mays
aaactcctttgcaatgacatacatgtagcaattaggtaagcagatacaatgaccatacaatcgaatgcacttacattatctgtgcacaaagctttggagtattatggacgccctgtatcatacaacgagtaagaaagcagggttcccgataatgatgccacctttatgcaaactaggagcttgacaggttcatgtggcttttaggctccttaacagctatgggaatctcctttgctaacttaatcatcatggcaatgtttcccttatagctccttggtcttcttgtgctcgctggtagagctcaaaataaattacattatgaataagaatgtttgtttatg

SEQ ID NO: 47242 - DNA, 282 bp, Zea mays
aagaactcttatgatccaatccttggctgatatcagctatccaagacgctgaacctcatcttgggatacttgcagctcgtgacgatgatgggccaagtccgacataaggaacggtcgctccttatcaagatagccaatgatttcctagcgtcatgaaataacctgttcagagtatcacgagaggatacaacaactcggttgctcctccaccaaacagaataacatttagcacccagtcaacaataagcctggcaaagccaaccaacggagttacctcatgtg

SEQ ID NO: 47243 - DNA, 424 bp, Zea mays
  unsure (1)..(424): unsure at all n locations
agctngcacacatagctcactggaataccttttatcatatctctcccatacgctatgactaatgtgttttcaagtctatttcacaccaagtcatacgtatattgaaagggaattggagtcttcggcgaagacaaaggcttccactccgtaacttatgcttcgccatcactccgagcaactctctattccttgggagaaatgagcatcaaacaaaaggactctatccttgggggagagagtaaaagctcaaaagcaaaaggaccggacttcatctttggtataatcttaactcgttacttatgaccaaaggggaagaacttacttcaagggctctaatgattccgcttttggcgattcatgccaaaaagggggagaaatgagccccaagcaaaaggaccgcaccaccaccaccatcatcaaaaac

SEQ ID NO: 47244 - DNA, 363 bp, Zea mays
ctcattagcatacaacccctacagcctcggtatctaaggaaaatactgcaagaactttgctggcttcttcttatataccgttgctttatgttgcttcacccttcttttttctttctgcccaacgagaagtgctgcatatatagcacagttcttgtttcccctggtcaccatataaaagcatgcagacctttggacatgcatgaatcctaacataatcaagacctagtcctccgattattatctttggtgcatggatgtttttggtaagatccctcttcacggaggctgcagaagaacaccaaaagtgatgaaaggactctgagccttcatgtaccattcaatgaaaatgggacacaaagaaac

SEQ ID NO: 47245 - DNA, 444 bp, Zea mays
  unsure (1)..(444): unsure at all n locations
gcttagatctcctaacattctcaattccatgtctttagatcaaagaagtttctgggtccttttatttatggatgtatttttgtttctttggtttcgaccaccgtaatgggggtcttcttgtactgatccattttggatccttttctcttccttcttaatgaaaagatgtgcatgtctcttgcgcgttcgagaaaaaaaagtacttggaaagaagctatccacgtgcccgaaccgtgattaggcccgtgaataagactttttncttttagggctctcaaaagcttcccccctttctctctctttccccttttggtgacatcttgttgagttttaactctagcctaccccaacttgnttgggactaanaggttatgttgatgttgatgtangcaataaacctaggcctaatgggccttaacactatagacagtacagtatatttgc

SEQ ID NO: 47246 - DNA, 290 bp, Zea mays
  unsure (1)..(290): unsure at all n locations
ctctaagcgactgcagcatgcaacctctgttactagaaatgttgtctatgttgtacaccgngcaaagggcaaggtccattggtatgcaaatggccaatattctatctcttcacaatattcataaaagccaaaataatgcatccttatttttcttgatttttagtttaattaatcttccactttgaatggcaagtggaaaaccattggtggaacttaatagagtactgatgcccggaggatatttcatttgggctgctgatataactgaggtgcccgatctttttgcgagt

SEQ ID NO: 47247 - DNA, 380 bp, Zea mays
  unsure (1)..(380): unsure at all n locations
gataatggatctccaagtcataatctttaattaactcaagccatcttctctgcctcatgttcagttctgactgggaaagatatatttcagacttttgtgatccatatataaatgacaagtatttcccacagataatgaagccaaatcttganggcatgaacgactgcagctagttccaagtcatcaattgggtagtgttcttcatgccgacacatttgtcttgaagcataagctatgactcgtccttcttgcatcaagacacattcgagtccactgcctgacgcatcacaatatacatcanaagacttttcaatatccggttgggccaacacagggcagtggttaataacaccttcagctgctcaaaggcttcattgcat

SEQ ID NO: 47248 - DNA, 340 bp, Zea mays
ctaagcttgccatgccctagcagccatccttgaccacaccgcagaccaaatggtggtgacagccaaggatggcggcagacgccggatctctggatctctctctatatattttcttcataggcacgactttgacgcaaatgttcatgcgggcgagggcacggggtccgtttttattacataagcgagggcatggggtctgtttttattgcacaggcgaggtcaattctgtcgattctgcccccccccaattcggcccactgattactgtcgcgaggaaggtgcatgcgagtcatcctcaatgacgagcgcccaggtcaatcggagtcatgggtgcggaaat

SEQ ID NO: 47249 - DNA, 412 bp, Zea mays
  unsure (1)..(412): unsure at all n locations
ttttctactcaaccttggagccacagtttaccatcactccatacatagaaaccgcagtagccaaataagtcttaccagaattggattgggcttccaatagcccaaagaatgaccttatgaatctctcctccggtgacaagaacccgtgaagtcttccttccaatcttgaggcagttcacattggacgcatgcgccacaaactcctctacaccaatcgcaagtcaaggcatcgcaatgtggcacatttagcagcccaatctcctccgataactaacatcatttacatcaatgaccacttcagacatttccacaaacacggaatgccaccaatggcactcctcgaataatcaaaagcanatcataaccgctgctcgatagtcaccggcagctaaatgtgacccgcccgcccatc

SEQ ID NO: 47250 - DNA, 353 bp, Zea mays
gagtacgcaatatatctttctcatcactagcattatcatcactagagggatcatatttagtggaggatatggatttaaccttctttatgccgtcctttgccatgaggcacttgtggccgacgttggggaagagaagtcccttggtgacggcgatgttggcggcgtcctcgtcgtctgaggagtcgcttgagctttcgtcggagtcccactcccgataacatgggcatcgccgcccttcttcttgtagtacctcttcttctcctttcttcttcccttcttgtcggcgcctcggtcactgtcactagatataggacatttagcaataaaatgaccgcgcttaccacacttgtagc

SEQ ID NO: 47251 - DNA, 324 bp, Zea mays
gctcattgatctcttccaacccttcgatcatgcacctcaaactttcaaattccccgatactttctcgggagtcattagtgtatatctagggttgccacgaattaattgtacttgagtagggttaagaaaaataagtgatcttaaaataaccttaaccatttcgtggtcatcccatttcttgctcccgaggttgcgcacttgattcaccaaggtctggagccggatgtacatgttttgtggctcctcccctttgcaaagccggaagcgacccgagctcccctcgaatcgctcccgcttggtgatcttttgagctcatctctctcg

SEQ ID NO: 47252 - DNA, 440 bp, Zea mays
accttaaactaactaccaggaagaacacgcccgatgacagtgaatcattcttgtctaaagcttacacatgatccaccacctccactctcctatcatttgattatccccgaaaagctacaactccgatcgcttcagctacttttggttgtggctgcatgttccaaactggagaatactgttccagctgaaacgagcaggccggtacatatccctgtgctggtgggtgcaggcataaataggtcttacgaagcacacaggtagtaactgtgggtttaccttggaggtggaggtggcaccgctggctcctggcggggcggcgcttggacagcgcactgcactcctcgacttgagcggaggagcccggacgagggagcggcacacgtagtaacaggcagaggaagtcatcatcttttcttttctttttccctctcgggattctg

SEQ ID NO: 47253 - DNA, 399 bp, Zea mays
atctgagttataaatctatttccaatactattggcttcgctggggatatcaaccaagtctgttggagatagactaaagggtggtttggttattcgttttccgtgcgtacaaccagccttcataaacgctgcatctgtgccacgagaagctagcaaggcatagaagtcaccgtgcccagctatcacttcatcaagcgcctcaacttcgttttcaatatgttcaaaagtgcttggtagatcttcaaccgaaggggtaaaactttcggagctggctccaaccgagctgaaaccttttcagtcgtccacgcagcggttgcaaagtttaaatagacatcccaagctctttaaagattgctgcactttgtatttttgcagcttccgcttcgtattttaatggaaa

SEQ ID NO: 47254 - DNA, 414 bp, Zea mays
atggcgctcgtcatcaagagcttccgccttattcttagacaaagggaggggaaagactacaagtcccgcttcaagagggttgcttcaaatggggtaagcctggtcattttattgctaaatgttctatatctaatgacagtgaccgacgcgacgacaataaggggagaagaaaggagaagaagatgttctacacgaaaaatggcggcgatgcccatgtttgtcgggaatgggatttcgacgagagctcaagcgacttcttcgacgacgaggacgccgccaacattcgcctcaccaagggactcctctttccaaacgtcggccacaagtgcctcatggcaaaggacggcaaaaagaggttaaatcctaattcttcctaaatattgaatctctagtgatgagcatgctagtgatgag

SEQ ID NO: 47255 - DNA, 374 bp, Zea mays
  unsure (1)..(374): unsure at all n locations
tctgatggctctgctccgccgcgggccgtgctgcaccgtggccggtgcccttcacgccgcgataaccggtgagacttatctttttgtgctcgtgatcatcaaggctcaatgtagcaacgttcaaatcgaagattcctccgggttatggattttgggggggggggatcggccatggcaccgccgcgtaagcactggtggcgcagccgttcttagattggtaggtaggagacggccatctggccgttcaatttgtgatgggtggcccagatttgtgctagtgaatcgattggaatcggctgttgtgggctgtccgatctgatcggaggggtaggattaactctcgtttcataanacctcggacgtggattctggat

SEQ ID NO: 47256 - DNA, 325 bp, Zea mays
actaagcttcactgcaatctacagaattttatgttgcagcctgtcttgttatttattggaccgcaatcgacgtgcccctggtgtttttgagactacacttattaacatttacatgtcttctccattatttgattagattatatttcatatcttatacttcccatgttgctataaatgcatatattattaactcatattttgttacctatgcataagggaagttctcctattcaaatcatgacttgcacctccatttctcacatgcttttttctaagtagaagatctctgtcagggggagtatttcttcttctctacagggggaga

SEQ ID NO: 47257 - DNA, 446 bp, Zea mays
ctgcaagctgatcttcgtataaaattgttgtatatattataagataaaatataacgtataagaggaataaatatgtcatagatgaattattttgcatttacttaatatacagaatcattgaatacaataatacctttgccttggcaaagagttgaattccgagagatgcgactgcaattcatcgaatgcctgaacagtaacggaatactgttcactatttataggcacaggacgcagcctgtgaggaattacaagtatgccccttataaaaacttacaacattgacttagacctttatggactaaaaggtcattctatctttaagtcggtttgtgatgccgaagctttacgaagaggaaccttcggctatcttatacaaacagcttcatccgaggatcacttctttctataagaccttcggcgacgaagcatagacccaacacctg

SEQ ID NO: 47258 - DNA, 396 bp, Zea mays
tttgagaaaggaaagccccgacatctaattcccataatttacaatggttgtttatacacctacgtgtctatgcttattgcattaaagtgtaagagttgtttgaaaacaattgttgtattatccttgatcaccattgttatcctatccttgttacctggttaagttaagtatgcttagttgcttaggctggcttagaacggtagaagtcgggtgatttcctatcacctgcgagatataggtggataccttatgcttgattgcatattttcatcaggaaacattaatgcttgtgtgtgaatgttaagctgagaccgggcagagtcttatggggatattaggccatagtgatcccacttgtgtcaataaggaccgtatttgtgtggtccctcgagtcat

SEQ ID NO: 47259 - DNA, 346 bp, Zea mays
  unsure (1)..(346): unsure at all n locations
ctttgatcataagttcaaagctcacaaacttggcaataacctcatcgggggacatctgtttgtatctaggatctccacaaattaattgaacttgagtaggattacgaaaaacgagagatcttagaataaccttgaccattntatggtcatcccattatgtgctcccgaggatgcgtacttggttgaccatttgcttgagtcggttgtacatcgcttgtggctccctctccttgttcangatgaattcgaccgagctctcctcgatcgtcttgcgcttggtgatcttggtcacctcgtcccctttgtgcaccgtcttgatgacatcccannnattattagcatttta

SEQ ID NO: 47260 - DNA, 404 bp, Zea mays
  unsure (1)..(404): unsure at all n locations
ttgctcaagcttcgtaacaagaaagagcttcggctaagtaaagaaaattctcaacttcattcaaaaaacaaaaaattcaatcatcagatggcaagagtgcgttccacagctagggttacacgcgacggagaggaagccgaagatacagaaactacaccaatctccaaagtgatgaagcgctcacggctggtagcatcggaggaaacacctgccactgaaacagaacaagctgatgttgaggagactgggtctgaagatgattatagcacagtgccaagtaaacccagccacctggatttcgggaaatccaccatctccgaagatgatctgcctaagatgtngaatttgggctatttcaatgaggcgaagaaagagctgattctttttggtggggaagagactac

SEQ ID NO: 47261 - DNA, 455 bp, Zea mays
tataagaaacattctcagactccaagactccaacttctctctttctattctttgtgatagtgacatgagcttcatttgaggtgtgaactccgtgcggtatgtttcgagctcgagttgtgacttgtgtgcgtgattgagctgaggatatgaatcttgagtgtggtgctctacccatccttacttatgtgcttatattgtgatcatcaattgtaagggcgagaggctccatattgtggagattcctctaaatgggagaaagactaataaagggaaaattgtggtattcaagttgatcatcaaatcacttgaaagggctagactgcaaccctcgtccattgggacgccacgtcgaagtagtcaaggtattacttggctgaaccacaggataaaaatcgcgtgtctttgtgtgctttctcttcgattaatctgtgtcacaagaactcgcttcaagctac

SEQ ID NO: 47262 - DNA, 451 bp, Zea mays
  unsure (1)..(451): unsure at all n locations
agcctatgaagagataatggagcacatttctatactctctaaaccaccaaagtgcctattggagttgaagtcctagttgactgtaaccaaaatatttgcacataactttcaattcaaggcttagtccatacttcaagttgtgaatgggtgtagcttaatcttctaaatagaagtttcaaccttaataagtttctattgaaacactaatatattaaacaacagtgggttgaggcaaagtcatgatgaaactttgagatcgggtgaggccattagaattatctatgtctagcctatttaaattcagaataatccttagaaaatatcacaggcttggtcatgcaaggtgcatcgcaaatatttagtcccaccttaattgttaaggtggacggaacacaatntatatagttagaagctctctgtggtcttccaatatttggatgagaagaaagaa

SEQ ID NO: 47263 - DNA, 308 bp, Zea mays
cgttttaccaacctttactggcatctggtgctagcaggagaaccaacaagacaatgtcttgccaacacacacatgattattcctgagcgtatcaaataccctgcagcacgaaaacagaatcatccgtttataattacgaaatgcatgaatcacttcattatccgattataataaacaagaacttacttgatattcttgaaagctaacaaattcttgtcaaatagagaagaacgtccaacaaattgaaacattggaacaatcagtattgcatcaaataatggcaactccttcaatcaatctatccatct

SEQ ID NO: 47264 - DNA, 452 bp, Zea mays
  unsure (1)..(452): unsure at all n locations
agcttcaaggtcatcatatgacgtgtatctttatattgcctgctgtacgacatcacccacattctcaattgctggaggtgtaacagtaccctctgcttctgctttatccaagaccctcacatcacactggttcaagtagtcacatcaacatcgattaggcaaattaaacatnttnaacaaaacaataaccagcaacacatgaaataagcaaaatggacctgctacaaatgtatagaatgggcacaaaacagaatatcagcattatcaatggctgaaagtatagtatgtttgttaactacacacgcataaagttagctttaccgatagggctttagttttccactggccggacttcctatgttaagtttattcttcatcttatctctgctttctcagtgggtttcagtttgcttcctaacaaagaagagctaantttcaaataccatgaaaca

SEQ ID NO: 47265 - DNA, 437 bp, Zea mays
cacacgacacaaaaactcagctacagtgggcccacattataaagctcaattctttatgatctacttctatgacatgctcatgaattattaacccatgaaatttctagccggcaccccaaaggaacatttgtgtggattcgtctttaaaccataccaacacatcttcttataaggaattatgcaaatcatctatatgagaatcaaattctacagatttcactactatatcatcaatatagatttccacaatgtttcataacggctcatggaaaatcaaattcatggcccttcgataagtagtgtccgtattctttattccaaaactcatgacagcccactcaaatacaccaataaaacctagacataaaaaggtaattttagacgtgtttctttggccaaaatatttgatatatctgataccatcaaaaagctatgac

SEQ ID NO: 47266 - DNA, 417 bp, Zea mays
  unsure (1)..(417): unsure at all n locations
agcttgcaaccatcggatttatgatggatgtctgcgattanaagcctcataccgattcgaggggacgaaatccggaccattgagcagcttacgaacagacaggattagatctggcaaagtgctggccctcgaccatcgatcttgcggtggatggcgtagattagatcatgcccctttaaaatcagaaccgtccgttcgtaatccggtggtccagatctagccataccctttcgctgtgccaaacttacaaaagagcccctgaagttntagaataacaacccgccgtcctgngcggctattcattgagtctgggcttatttgcgccagagtccctacccttttacaaatttgaggcccaatccagtgctattttaaacttgataaatgaatcgngaaatggatttttattatataaat

SEQ ID NO: 47267 - DNA, 334 bp, Zea mays
tgccatacctgtcaaagcaacagcacatgccagctctgtatttactgaccataccggcaactaggcctttcgcgtgctggggactggatatgattggacctttcaagaaagctcaaggaggatatacacatgtattggtggcgaatgacaaattcactaaatggatagagttccagcccattgcttctttaacctctgctaaagccgtggaattcatacaaagcataatattcagattcgggataccaaacagtattataactgacttgtgatccaacttcaccagttcagaattctttgacttctgcgagcaaaagagcattcagatcaagta

SEQ ID NO: 47268 - DNA, 444 bp, Zea mays
  unsure (1)..(444): unsure at all n locations
tgcaagcttgacattgctccgctgtttggaaccattgttctccttaacgccagggcgtctcccattatagagcatgctacgagaaaatttaaatttttcatttttgagctcatgctcggcaattttagcagttaatatagttatgtgatcattttgttggttaatcatggcaagttgatcatcaatagctttaacattaacatctctacatctagtacaaatagtaacatgctcaacagtagatgtagaaggtttgcaaatattcaattcttctatcttagaatttaatctagcattctcatctctaagacagataatagaatcatggcgagcattcaaattttcaaacttagaaactaaactagcattctcacttctaagtctagaaattgaatcattacacatgcttagctnttagataaattttcattcttctctacttct

SEQ ID NO: 47269 - DNA, 282 bp, Zea mays
actcagctttcatttcgagaccttttgcagagagcttctatttttgttcctagccagtttatttcacaagttatgatttactgctatagattgtgaaagtgcctagaggggggggtgaatacgcaatttaactttctaacaaaactatagacaacatggtaaactgaatgatctcaaattccccagtaactttggaaatagatgtctaaatgaccacaggttcaagaatagatctgagaacgcacttctcaaatcacacccaaaagatattacaatctccac

SEQ ID NO: 47270 - DNA, 423 bp, Zea mays
gcgagctctgcgcttattcacttttcacgtacctttcagacgttcctcgccttcacgggcacgccgcggcggatgcccacgtccggccatgccgcggtgatggacgcggagcgcgtggccccccggttgagcagcagcaccgccttcctgtgccccgagagctgccctgcccatacctgcaattgaccaaacgcgccatgggatcgaccaggattaattcgttcccgagcgagacgcgtgctgcttgcgatgggcgatcggtttggtagctgtaagatatagtatctctgtacctcgagatcgttgccgtacttgctcactttctgtccttggacacccagccgatctgcgtccgacacaagcaagcaatataattggcacacacacgaagactacaagagtcaagaactgatgcgaaagggt

SEQ ID NO: 47271 - DNA, 237 bp, Zea mays
  unsure (1)..(237): unsure at all n locations
cccctggcgtgggtggagttagcgtcgttaggctttctgctgagctgatccccaatgaaagacttctgccgacttcagcacctcanagaatggtaaatttctctttgctgatctagatatgaatcgattcaaagctgccagtcttcctgttagcccgtgagcccccttctttgtgcttggcggctccatccgaaggatagcttcaattttatttggattagcttcgatcccttttgt

SEQ ID NO: 47272 - DNA, 407 bp, Zea mays
tgacgggtgaggatccagtgtcccccttctgaactgccctctccatctaatgggacagtccctccactttctatgcatgccacctatactctctatcgtaccagaaaatctcctttcctcccccttagctaacaattgtccaagacggtcaatagtgggatgagaattgtacgtctattcgaaatatgaaataacacctctatacaatagaatgctacagaacgcaagcatgcatagggaatccgtgcacttttggtggggggagaaaccattatggttgagtacatcagtttgaatagtgagggaggtggagtgctcacccaccctctctaaaaattgaagaggctatccttagcatgtggtaccttcaactaaagaagaaccgcgggtagatgcatgagtcattg

SEQ ID NO: 47273 - DNA, 391 bp, Zea mays
  unsure (1)..(391): unsure at all n locations
atgctgataacgctgctgcaagagctattgcgaaagatgctttcatcaataaggtatgttctgtaatcctttctcggtcttgaatactgataatgatgttctctttgatgtggctaacaaattaagtgttgaattaagttcttcatttaatgatgcagttgaagatttaaacctgattaaatctttagaactgtctagaaaaaacttagtggttcaatctgttaaaattaatgttgataattctaatgctgactgtatttgttctgatgatgattatatcatgcataaagataatcttgaggatgatttttctgatctcgaagatgttatgattcttataanaggtcgtaaattcaacacaggaaaaaaactgtgagaaaaaaaacaatag

SEQ ID NO: 47274 - DNA, 376 bp, Zea mays
tatgctcttatgtgaggacatagcagagcagaaggtgctgttaagctcttagttatccgaagagcaagagaataccttgataaggtttttgttcaataacaaagatgtttttgcatggtcagccaatgatctctgcggagttaatagagatgttatcgagcactcactcaatgtcgatccatccttcagacccaaaaagcaaaggcttcggaaaatgtcagatgataaagccgaaggtgctcgcaacgaagtcaaaagactcctcagtgcaggagttatcagagaagtgaagtacccagaatggctggctaacactgttatggtaaaaaaggccaatggcaagtggcgaatgtgcatcgattttacagatcttaac

SEQ ID NO: 47275 - DNA, 355 bp, Zea mays
atgactggtacagtacttatgtactatagtgagaaatgggatacggagctaacggcgccgtcgcaaattcagctaatcagcagctggttggttttaacgtgtgggggggtagatcgatagtgtccgtccctctctctggtttgaaacaagacgtgcaaagtggcatgagatttagatctttacgaagtctctggatattaatttgaccgccgtcgaactgcatagatcgagagaatctttgacctccgatcctaataagcttctcgtgttgcttgaagcaattaagcactctagacagcaggtgatcatgcatgtgagttctattggagctgcaagctcgtcaagtgtgtggatg

SEQ ID NO: 47276 - DNA, 404 bp, Zea mays
  unsure (1)..(404): unsure at all n locations
ctaatcttcttgatccttaaggcgaactcattttgagcacgtctcaagaatccctttaagggctcttgggtatgagaatcttcctgccagaagaacaccccagtgaagcgagaataatcatccacaataactagacagtacttactcccgccgatgcttatgttagcgatcggaccgaatagatccatgtgtaggagctccagtggcctgtcacttgacatgatgttcttgtgtggatgatgagtgccaacttgctntcctgcttggcatgcgctacaaatcctgtctttctcaaaatgaacatttgttagtcctaaaatgtgctctccctttagaagcttatgaagattcttcatcccaacgtgggctagtcggcgatgccagagccaacccatgttagtctt

SEQ ID NO: 47277 - DNA, 442 bp, Zea mays
ctcagcttctaagggagagcacttttgtgactaacaaatgttgattttgataaagacagggcttggagcgcatgtcaagccaggaagcacgttggtgttcattatccacacaagaacatcatgacgaccgacaggccgctcgagctactccacatggacctattcggccccgatagcttacataagcatcggcaggagtaagtactgtctagttattggggatgattattctcgcttcacttgggtattctttttgcaggaaaaatctcaaacccaagagaccttaaagggattcttaagacgggctcaaaatgagttcggcttaaggatcaaaaagattagaagcgacaatgggacggagttcaagaactcttatattgaggcttccttgagaaggagggcataagcatgagttctcttctccctacacgcccaacaaaat

SEQ ID NO: 47278 - DNA, 451 bp, Zea mays
  unsure (1)..(451): unsure at all n locations
agcttggtgcccatggagaagtagaagtcccttaagtcctggctatcaaactgtttgccattgtcgactgtgagctcggatgggactccgaatcggcaaacaatgttttgccagaagaatttctaggcagtcttcgacgttatcgtggatactgcccttgcctcgatccacttggtaaaatactcgacgacgacgaaggtgaacttgaggttcccttgggacgtgggtagtggcccgacaatgtccagcccncagcgttgaagtggccatatgtgggcaatcagctttgtgaattacgaagggttgcccgatcggngagaaaacttctggcaggcttcgcacgacctcgtgactcgattcgcggcgcagattatagcgggccagtagaacttttgatggatcaccttggcagcgagggccctangccccgagtgagagccacaagttcagc

SEQ ID NO: 47279 - DNA, 397 bp, Zea mays
ccatataaaatccgcgggaaatgaattatggattggctccactcaaaaacgatatgtcaatctctacttatctctatgaagaacgctgtctataagaccactatggataggtataaacaccaaacaaaactttacttcgcacattctcgttgaacatgtttaaataactcttatttaaacaaggcatatgttatgtcataacaacgtataggtacctaacttactactatgaacaaggtaaggcgtacgctgaccctctctggatctggccttcctatctccgacatatggactccacacttttggcaaaaccatcacgcatggcctcctctggctcttcccgtcttttgattcaatcgcgcagcgctcccgatgccacggtcttcaaccacatgcc

SEQ ID NO: 47280 - DNA, 412 bp, Zea mays
tcattgtctttcttgcggcgccgaaggggagcctacttgacgtagacttctttctcttcttccatcgctttgaatgcgacgggttgcacctcgggtgtggaagtggcgcctcgctcgatgatttgtttggagcctttgatcattaactcaaagctcacaaactttcctatcacttcctcaggagacattagtttatatctcggatcaccatgaattaattgaacttgagtagggctaagaaaaacaagtgatctaagaataaccttgaccatttcatggtcatcccattcggtgctcccgaggttccacacttggttcaccaatgtttcgagccggctgtacatggcttgaggctcctccccttggcgaagcatgaatcgatcgagctccccatcgatcgtctctctcttgg

SEQ ID NO: 47281 - DNA, 332 bp, Zea mays
  unsure (1)..(332): unsure at all n locations
ctctaaaagaaatgttaattatggtaagggcaatgctcccatgcctcacgataacgagagctatattatatatcctgctggttatcctgaggataagattatgagaattcatgctaagaagactcattctgtttctcaacatgcttttatntataagaatgaggcttctagctctaggcgttctacccatgttaaaatgcctaagaagaaatctccaattgcatcaaatgatcataacatttcatttaagacctttgatgcttcttatgtgcttactaacaaatcangcaaagtagttgccaaatatgttatgggcaaacacaacgggtcaa

SEQ ID NO: 47282 - DNA, 385 bp, Zea mays
  unsure (1)..(385): unsure at all n locations
agagttaagctccttcttagcctttcaacttcttncttgagctctttattttcttgtgtcatagaaatatcactaattcctgaaatttctagctcaatggaagattgactttcttgagagcaacatttgttagcacatgataatatagtttctacttgaatacatgtgcatatgtgaggttggtatgatttcaaattagttaacacaacctcatgagccatttctaacatgatatgtgaatccataaatttattatgagagcacacangcatatcatgtttttcttgcaagctagatttcaatatttagcccttctatcgtgtcttgagctagcattttatntctattgacaatatatgtgaatgataacaacttaatttgctca

SEQ ID NO: 47283 - DNA, 449 bp, Zea mays
  unsure (1)..(449): unsure at all n locations
agcttacagatattctgagatgactatgggtcttttatgaacgctccacccaacgcatgtcaagacgaaacacaatcccagctcaagcgaagacagaggcaatcatacccaagggcattaacacaactcctaatcatctgggacacaacaaagctcctttagatcaccagccccaaaaggcagatggggacgaagctttggaggaagattcagctcacaaccaagaaggtttttctgcttgttctatggagaagataaggggcacacaactacgacatgacaagttacaatacagaagcaaaaggagataactgatgccgaagcacggcagaatcaaccgaaacaagtccgacatattgcttcgtgctattttccatacattgctaagtatgtgggcaattaacaacaattntcacaacccaaagtgtcagtagcttctgcaagccact

SEQ ID NO: 47284 - DNA, 461 bp, Zea mays
  unsure (1)..(461): unsure at all n locations
tactcagcttcttccaatggatnttctctgattctagcacttagacaaacatgtttatacacaaaaaacaatgtacctagtctagaaccatacctttgtattgatttgcaccttatccaccatttggcataatttatcattaaagcacttgtgttggacactaaatcaccaaaatacttagaaatggccccagggctcaatttcctttcaatactccccttattggtgatttatgccaacacaataaaaagcaactaagagaagtgcaacatcaatgcatatgaaaactctaatttgttttgattcaaattggcatatttggatcattcattgtcaccacttggtttggttttgcatatcaaactcaatttcctatctctaagtcaaacacacttgttgagactaaagagagttgttccatagaaatcgtcaaagattcaaaacttccccctttccataat

SEQ ID NO: 47285 - DNA, 443 bp, Zea mays
agcttctaaagggagaacacgtgataggttttatttatgtgcaattcgaaaaagatagaccttgtgcagcttgtcaaacaggcaaacaggtgggaagctctcatcacaccaaaaatgtgatgaccacatcaagacctttggagatgcttcacatggacctcttcggacccgtcgcctatctaagtataggaggaagtaagtatggtcttgttatagttgatgatttttcccgcttcacttgggtattctttttgcaggataaatctgaaacccaagggaccctcaagcgctttctaaggagagctccaaacgagtttgagctcaaggtgaaaaagataaggagcgacaatgggtccgagttcaagaaccttcaagtggaggagtaccttgaggaggaagggatcaagcacgagttctccgctccctacacaccacaacaaaat

SEQ ID NO: 47286 - DNA, 395 bp, Zea mays
ctcctgaagttctgtaaaggatgtctgcaaatatgagtatttatccacttcagctctcaggctggtttcaaaatatttcttttcttgctcgaatttttctgattgacggagcaattcattctttaatttgtcattttcagtttggacttcagccaaagagccctccatggtctgaataacaaaatccttcttttctaatgcaccttcgtgctctttgaccatgatttcaagatcttggattgcgaagtctttctttttcagattggcttcgtagttttcaaccttttcagccaaatcttgaatgacggctttatttttctcttcctccagatcttgttgcattttcagaaccttgcttaataatatgctctgtagaaatgatcttcgttagaaca

SEQ ID NO: 47287 - DNA, 337 bp, Zea mays
acactctcccttccaaagaattaagctctttattagcctcccaacttcatccttgagctcttcattttctggggcgaaaaaaaaatcactacaatcctgaaatttctaactcaatggaagattggctttcttgaaagcaacatttgttaaccatgataatactagttatatttgagtacatgtgcacatgtgagggtggcatgaattcaaattaaataacacaacctcatgagccattctaacatgatatgtgaatccatcaatctattatgagagcacacaaccatatcatgttcttcttgcacagatagttttcactatttatcatctttatcgg

SEQ ID NO: 47288 - DNA, 442 bp, Zea mays
agcttggcaagaccaaataactcaaaacccttatgaagaacaataaaggggagtgaagaaaaggttattaaattgggagcaaaaggtacaaagaatatgaccaggaaatgtcagaagtgtggagttgctgatggtcacaacagcacgacatgtttgtcaatggaggaaaatagacaaaggttggcaagccttgctggacgtaagagaggacgacctccaggatctaggaacaagggtggcagtaaagctcctgattggaatgagacaacaacatcaaaaaaacacgcaaatgatttcgatagtagtgagtcagacagtgattacactgttgtatgagatacgattaatttgtttttacaataaaccttgcatgtttggaactgatttatatagaggtggatattgatatataataaatggtgtgtatattgcttaataatgt

SEQ ID NO: 47289 - DNA, 454 bp, Zea mays
tcaatagcacattcattcttggcatatgagtgtatggtgttttgttctaagtacatagaaggtttcgctagcaagcctaataaaccatcaaggaacaatgatagtttggaccatacccaatcgaagatggttggaccagattcatctttatttcccttcaatagggaaatcattgggaaaaccagccaatcttgaattaagtcatctatagaaattgcaagcgcatagatatgtgttgtacaattgtgatgttgttaatccatatctaaagttagtgttttagttaactaatgaactatgcatatagaatatgaactatataattatatggtaatcatggtatacggaacatgcttctaatctgaaacgaaagagacgcgaccgtcgcctaactcctaatgatattgagcagatacagaataaagaatttccagaatggtttacacaacatgta

SEQ ID NO: 47290 - DNA, 401 bp, Zea mays
  unsure (1)..(401): unsure at all n locations
gaacgccctccctacctgtcccttgattaatttcatatatataggtcctctttttgttggtgacattntaatataatttgatgcatgctgaggcgctatataataacacaaacgaagttttgttgtagacaaggtagatcaatctcgtgtatcaaccttcgtgatgtggcgtcacttgtactactgtgaaaggttgattgtgttttgctacctcttgcataaatgctaatggttctgttcctgttgtgcanggattcangaaggtgaatccagatcgttgggagtttggaaacgagttattcctatcaagccagaagcatttgctaagaagcatcaagaggaggtgcgcgtncaaagtccaaacctcgggtagaagcaccgtcaagaaacagcgcaagtgc

SEQ ID NO: 47291 - DNA, 388 bp, Zea mays
  unsure (1)..(388): unsure at all n locations
ctaagcttaagtgcaaggttntcgtatgcccacgtcttctatgtcaagcctatcatttatacctatccttgtcttcccaggaatacctagtaatgtaccacagaattgactcacatatatattttcgatatgcatgacatcaagttatgttgtagcttcaaacttgtccagtatgcaaatcccacaaacattgaccttttcttcaacaatggccatcatttgcatcccctttctcttcctgttttgaagatgctttcctggtttaacatccttgaccctatcccactgctgctttaacttatcttcactaaatgccctttggcttgtacaagtttcaaactttccatcaaagtctttcttatttattcatgggtgatccttttaagga

SEQ ID NO: 47292 - DNA, 402 bp, Zea mays
cctgagctgcagctaatcccgaacaagcgtgtgtgggttcttcatgatatgtactcggatttattgtcagccaccggagaatttgtgcttatccggataagattgaaactatcatgaaaatggaagcaccacgatcaccaaagaatgtttaacgacttactggatgtatgcagctctgagcacatttatatccaggcttggagaaaaagggttaccatattacaagctactcaatacagtggataacttttagtggacctcggaagccaggaagctctatagcattaaaaaaattttgaaacaccaccagtactgaagccgcacggggagccacgttactcaaccactgaagatctgctggggatatctcttgcacgactacgtggtagcaccgtgttggta

SEQ ID NO: 47293 - DNA, 449 bp, Zea mays
gcttggcggtactggcttcgtctgaacccctaagactggtgaccaacatgttcttcatctttcgccatgatgtgattgttcctagcccgagagaggagtaccaggtttgtgcaacatttttgactgccatgacgaaagatttcgccatgactggtgtgttaccgccatatgaagatattgttgcttcgtaactcatcagaaactgcttctgatcttgagtgtcggcatacatggggagctggtgtggcttgtaagacggaggccaaggtgtagcctgccattctgctgacagaggagaagcatcatcaaaagcaaaatttccatgatggaaatcctcataccagtcatcctcgttgaagaagccctcttgatgaagctctctgtgctgagggccttcggtttgctcatcttgagcaagatgacgaacttcttcagaggcttcgtctatc

SEQ ID NO: 47294 - DNA, 406 bp, Zea mays
  unsure (1)..(406): unsure at all n locations
tggtctgagcgctccgcaatcatcgtagaaatttctggactttctatattaacaagatttgtttaatctgatttaaaggggttggtaacaatatctttattggttgggttgtcatagtgaaaaaaaagggtttacgccccttgcaaaaaaaaacagaagaagatgaaaaaaaacgaatttaaaagaaaaaataaggaaaagaagaagaagggggctgaatctctaaatcttgttgttctctttgtgctgngctagttgttctttttcagagactacctttgtgcctaggctcacgtctctagcctggtttagcctaggaccagcacagtaccaccgttgaacgattattcagcttgcttttgtaactaacgtggtactagtgtattccttgcttcagcccacctac

SEQ ID NO: 47295 - DNA, 448 bp, Zea mays
tgccgcagatgtgacagtcgtcgtctcgtgccggcttcttgttgtttacggcgccgccttgggcacctccacgtgcaccacccttagcatgtcctcgcgccccggcctaggcgcctccacgcgccttgcgcttgttgctgcgtttgcggcctcgtgtcgaggaggactcccccttcttcttgtcaccctggtaggccatccactgctcccgagtgagatgtagcttcccgccgatagtgataggcccagagggagcctatggttcgttgccgtcgaccaccttgagacgacctatcgcctcttcgatcgtcatcgtggagaggtctagcagaaactctatcgagcgagcaatctgcttgttcttctcagggatgcaacggaagagcttctcaacagctctcttctcatcgtaggtgtcgtcgctgaactacaccattttctacaacat

SEQ ID NO: 47296 - DNA, 54 bp, Zea mays
accatcggtaacaagatgccctaagaaacaacttccttaagccaaaaatcacac

SEQ ID NO: 47297 - DNA, 430 bp, Zea mays
  unsure (1)..(430): unsure at all n locations
tcatctatctgcctctgaaggtcagcttgacgagccatcttcttcttctttcgctgcaccgctgatggagcatcttcaggttttggatttcatggtccaagacgtcctctggaggcgttggactgatggccttcctcttctggcttcnggcctccctaaaagaaaggacgttctgattggggtccatcggctgcaaaatggcagcccctgtcgctgaagcttttttcggcggcatgacgaaggtgatgcttgccgaaaatgttcaagctcaagaaatggaagtgagttaaccggaggtgggcgccaatgttggggacttgttctcaaatgctatgaattaagaacaaggcaacataaaatgttaaatatcatagcccttcgccttcgaacattattccctttggaataatgaatttccgacgaaaatatg

SEQ ID NO: 47298 - DNA, 447 bp, Zea mays
  unsure (1)..(447): unsure at all n locations
agctnggtgccaatggagaaacanattttcttttattcttggctgtcaaactgcttgccggtgtcaactgttagttcagacggtactccgaagcgacaaacaatgttttgccagaagaaattttgggtagtctttgatgttattgtggaaacagccctcgcctcgatccatttggtgaagtactcgacggcgacgaaggcgaacttaaggttcccctgagcggtgggcaggggcccgacaatgtccaggccccagcgctgtagaggccatgtatgggcgatcaactttgtatactgcgaggggctgcctgaccgaggagaaaacttctggcaggcttcacaggaccttgtgacccgatttgcggcgcagatcattgcgggccagtaaaagccctggcggatcaccttagcagctagggcccttggccctgcgtgcgagccgcacgtg

SEQ ID NO: 47299 - DNA, 422 bp, Zea mays
  unsure (1)..(422): unsure at all n locations
gtcttcctgttggaagccaatgtcattcttaatgttttgcgcctaccactataaagcatgctaccagccaaattaaatttctcattttctagttcatgctcggcaattntagcatctaattttgctatatgatcattttgttgtttaatcataacaaggtgatcatggatagcatctatattaacatctctacatctagtgcaaatagaaacatgctcaacggtagatgtagagggtttgcaatcatttaattcaacaatcttagcatgtaaaatgacattctcatctctaagaatggaaataaaaacattgcaaacatttaattccttagccttagcaattaatttctcattctcattcttaggctagcaagagatgcatttaatttatcaatcttagcaatagactagaattatcatttc

SEQ ID NO: 47300 - DNA, 426 bp, Zea mays
  unsure (1)..(426): unsure at all n locations
agcttcgncatctgaaaggaatgtactctgatgattttagatgancncagctctccaatcttcgctgtaagcaggagatatattgaggactgctctttcaagaagttccaccgaaggtgcttttattgtttcgaagaacacatccgaaggtaagggcagtccctgtgctgctgacttagctagcaaatcagcatgctcattttgtcctcgagggatatttttgacataaaatccctcgaaggaagcttcaactcttcgaaccatatccagatatttttcaagcttcagatctttagccttgcaactcttgtcgatatgacccgaaacaacttgggaatcagttttaagaacagcccttctgattcccattgcttttagcttccgaagacccagaagcagggcttcgtactcagcaatgttgtttgt

SEQ ID NO: 47301 - DNA, 319 bp, Zea mays
tcgtgaaatatttccgaaacttaggaagagggtgtgttgttgttttcgatgaggctacactacatctggatttgtcttgtgccttaacacgattattctcttttccaaaatatattccgacaaccaacactgtatctccttcttgttccacatgcaatatgcctgatgatgcttatgttatgcagaatgatgtgatgaagttatgttatgcaaaatgatactcgtgtcgcagatacatatacctcgaagagagcacacacacttttatctcagcgatgactctttgctgtaagcctcccttagagcatcttcgcctttt

SEQ ID NO: 47302 - DNA, 379 bp, Zea mays
tgacatcaacaccaacacgagcacatgtacaccagcagcaccttctccaggccaggcgccacccctttcacctgggccagtgactcgggcccgtgcaagagaaatgaactacatcatggtgttaaagaaccaaggcccggaagaatagacgaccagcccaattgcggcccataatggacgacctatggttggccgcccctaggggctgcgccccctctctatttattcaagagctgcgcctcctttatttcctgagatttgttttacgttagccttagctactctcgaacacgcgcaaatctgcgttgctttctgtattcagaactccaccctcgagtaatagaatagaatgctcgcaatttggtcttggtcggtcttc

SEQ ID NO: 47303 - DNA, 319 bp, Zea mays
  unsure (1)..(319): unsure at all n locations
ctttcttgttgcttaaagagtaaacttcaatgtttataattggcccacaccatgattttaaatttttcatacccttttccccattttcttgaaatttgctcataaggctcacttagggcttttattaaggttgcaacattattacctctttgatagactcattntgtttgatcatgaaacttttaagtatacgcttggtggattcttcattcttaagtcaatttgatgctcatgctcaatttggttcacataaaatgatggctcttggtttagcacctttagagaaacactatgtgacactgtggtgtccaacccttcc

SEQ ID NO: 47304 - DNA, 440 bp, Zea mays
agcttccttgatctcgtagggtccaatttttctatgagcctaactgcccttgatcccgaatctctggacacccttgggtggtgataccttgagaataacatgatctcctacctcaaactgtagaggcttccgcctcttgtcatgatagctcttttgcctggcctgagcagcttctaggttcttcttgatgaacctgacctttgcctctgcctcaagtaccaagtctggcccaaaaatttccctttctcctgcttgagaccaatttagtggggtcctacaccttctcccatataaggcttcaaaaggtgccatcttcagactggactgatagcttgtattataggaaaactcagccaaggagagacacttgtcccaatccttcccatagtgtagtgcacatgctcgcaacatgtctttcaaaatctgattatcctttctgc

SEQ ID NO: 47305 - DNA, 376 bp, Zea mays
taatgatgaactggctagtcttaatgctcaacttaatacttcttgaatgatttcgaaagccacaattgcaagggatgcctacacaattggtagacacccctcaattaaggatggacttggctttaagagagaagcttataacttaacaagccataaggcttccattcccgccaaggagaaagggaaggcccctatggctactagtgctaataagaaccatgcttttatgtattatgatatgagacaaactataaatgtaagtcatgatgcttatgaatcatatgtttatgattctcataccatgtttgctcctagttcctcttatgtgtatgatagaaatgttactatgagaaatgttgttcctaaaagaatgcta

SEQ ID NO: 47306 - DNA, 439 bp, Zea mays
  unsure (1)..(439): unsure at all n locations
tcttgggtcttcggaagntaaaggctatgggaatattaaggcggttcttaaaactgattcccaggttatttctggtcatattgataaaagttataaagcaagagatccgaagcttgaaatatatttagacacagtccgaaggattgaggcttcctttgaagggttttctattaaaaatattcctcgtggagaaaatgaatatgctgatttattagccaagtcagcagcacaggggctgcccttaccttcggaagtatttttcgaaacaataaaagcacctttggttgagcttcttgaaagagcagtcctcaacatatcccctgtctatagtgaagactggagaactgagatcatctctttccttagggtaactttctttcagatgacgaagcttataacaggaggatagaggcaagagctcgatcatatgttataatag

SEQ ID NO: 47307 - DNA, 267 bp, Zea mays
  unsure (1)..(267): unsure at all n locations
gtaacttcacacctacccgtctgtttatatagtgccgtaggtgggaaggtaaatcgtcaagtcttccgcaccggacaaacagtcgccttgccccactgaatattgggccacagagcctgaaaaggtgaatcgccaggacgtgcgtagctgctgcatggtggggccaccttgcgctcggattattttaatcgtttctcggcaacgagctcanggaaggtggttttcggatctttggcactccgaagcctagaagactttttcatggat

SEQ ID NO: 47308 - DNA, 387 bp, Zea mays
  unsure (1)..(387): unsure at all n locations
aataggctgtttggtttggggattgaactaatccatcatcttctcactcctcactttttntgttggtttgtggaatggaatgaatcaatccatcatcacctctttacttatagttagntagtactaatatgaggaatggggtcatcccaccaaatttgaggaatggacacatgatgtaccaccatattttggataaagtgattcctcaaactaaacaccctctaagtctctttgaaatccttaagggtaattacttaaaatgtttccaacatgctttcataagtgcatagtctgtcgtgagcatcacactnttattataacacattgcacttcacattntctatgatatagatatgttctcattaacctagttatgtgcacttggca

SEQ ID NO: 47309 - DNA, 428 bp, Zea mays
  unsure (1)..(428): unsure at all n locations
gaagtacttgtatcactgtcgccctgggatggccggaggacaacatcaattggttgggggtgctagcttggagatgcgccgcangaggaagactgagtatctcgaaatccctctcaaagacagtatcaagggatggcacttggagtggttcattgttgagaattatggaaactctctcccccctcgatcgggaagacagccggacgttcgcaccccgagttggaccgagtcccccacagatcatgaggtagttgaggcaggtgctttgctagctgaagttggattgctggaggagaggggtctgactgccgangctgtggttgctgatttcgtcttcaagaatattcagccgttgaaagacanggcatacccggcttatctgtatcgaggcctagccgactcaacatcggttaccaacagaagaattc

SEQ ID NO: 47310 - DNA, 452 bp, Zea mays
  unsure (1)..(452): unsure at all n locations
agctttagcgagtcaccccttgtacactcttatgggttaattctaatggcacagnaacataaacctctcttgattagattaactttatgcttaacaaattctaagcctaacgggagatattaattgtaagggctgaaaaaagttgccttgatgcgacaacccccaatcaaacggtgttaaacctcagcgaatcaaaaaaagacaagctattgtgctgcttatactgcaacaaggatgtattcatattaatggtctagtctggacctcatcgacatcagtcgcttgatcataaaacatagtctaagcaccgacccagcaatacgccccaaaaagcaaaaaaatacgcaaaaatatccgatgagaagatgaaagcagcgaaggcagaagtccaccgtctgttgaaagcaaatttatcgagccaatcgactacccaacttggctccccaacgttg

SEQ ID NO: 47311 - DNA, 362 bp, Zea mays
cgtaaagagtgccttcctcaatggaccaatcatggaataggtctatgttgaacaacctcccggctttgaagacagtgagtaccctaaccatgtctataggctctctaaggcgctttatgggctcaagcaagccccaagagcatggtatgaatgccttaaagatttccttattgctaatagcttcaaagtcggcaaggccgatcctactttattcactaaaacacttgacaatgatttgtttgtatgccaaatttatgttgatgatatcatatttgggtctactaacgaatctacatgtgagagaattagtacgatcatgacacacaaaatcgagatgtcgatgatgggggagttgaagtatt

SEQ ID NO: 47312 - DNA, 391 bp, Zea mays
  unsure (1)..(391): unsure at all n locations
gagaaagacagggattggagcgcatgccaagcagggaagcacgttggtattcatcatccacaccagagcatcatgacgactgacaggccactagaactcctacacatggacctattcggcccgatagcttacataagcatcggcgggagtaagtactgtctagttattgtggatgattattctcgcttcacttgggtattctttttgcaggaataatctcatacccaagagaccttataaggattcttgagacgggctcaaaacgagttcggcttaaggatcaagaaaattagaagcgacaacgggacggagtttaagaactcacaaatcgaaggcttccttgaggaggagggcatcaagcatgaattctcttctccctacaccncacaac

SEQ ID NO: 47313 - DNA, 435 bp, Zea mays
  unsure (1)..(435): unsure at all n locations
gattcttcatcccaacgtgggctagtctgtggtgctagagccaacccatgttagtcttagcaattaagcaagtgtcgagttcagctctattgaaatcaactaagtatagttgaccctcgagaactcccttaaaagctattgaatcatcacttcttctaaagacagtaacacctatattcgtaaaaagacaattgtagcccattttgcataattgagaaactaaaagcacgttataatctaaggaatctacaagaaaaacattggaaatagaatggtcaggtgatatagcaattntaccaagtcttttgaccaaaccttggtttccatccccgaatgtgatagctctttggcgatcatggtttttctcgtaggaggagaacatccttttcttccagtcatgtgtgttgtgcacccgctatcaatgatccaacttga

SEQ ID NO: 47314 - DNA, 371 bp, Zea mays
tgctcagcaggagcgagccgctccgcaggatgaggtgccccagcagcagcacctgccgccctcgcccccgatgtcgatcgagcagatgtttctgatgcaaactcatggcagtcaagccatcggtcagactttggccgccattcagcagcagcagcagcagcagcagcagcaagcaccaccccagcctcagatgcctcagatgcctagagataagcgtgctgaattcatgagaggtcatccaccaacgttcgctcactcttctgaccccatggatgctgaagattggctgcgcaccgtggagcgggagttgcataccgctcagtgcgatgaccgggagaaagttctgtatggtccccgtctggtgagaggag

SEQ ID NO: 47315 - DNA, 447 bp, Zea mays
  unsure (1)..(447): unsure at all n locations
cgctgcagaaactatggttcanaagcacctagaacaggcactacacagctccaaaactgcactaaaaatactgatttcagaatttcagttctgaatagactaagtcaccaaccacctgacagtcaaactttgagcagctgttacaccactttttatgtgggatcatgtccattatcctttaataaagttgttcaccattaggtggtatttagttcatttataaaaacctcagtccaaaaccttatataacaaccacaaaagggctccaaacttggcaccatacaacanatttcagatttcagaactgaaccaaatgcagttaaagcactgtctgtcagtccaaccttgagcaagctntctctcaacttttgtgtggatcaaaccaaagtcctttanggagacttattcaccatcatatggtatttaatacctctatatattctacag

SEQ ID NO: 47316 - DNA, 214 bp, Zea mays
ttgcttaaatgttcattatcaagagatagtgataggggcgacgacatgaaatggagaagaaaggagaagaatagatactacaataagaacggcggcgatgcccatgtttgtcgggagtgggacttctacgaaagctcatgcgactcctcctacgacgaggacgctgccaacattcgtcgtcaccaatggacttgtcttacccaacgtcggccac

SEQ ID NO: 47317 - DNA, 397 bp, Zea mays
tgcaactttcactgcagaatacaagaattttttttgtgttcacaagtggttccatcccacaaatggtatgctttacatgctttcctccaactttgataagactaaattttatatatcttgcttcccatgttgctataaatgcctatgttgccaaaatatatacttttcctatgcattaggggagttagtctaattcaaccatatattgcacctctctttcatgtgttttttctaactagataatcttcggcatggggagtatttcttcgtctatgacaaaggggaagaatattattttaaaaatggagaacactcttttaaggggagtaatcttttacatggcaagtcttattttatttctatatgctattaatgtctttctttcggtgggtgatgc

SEQ ID NO: 47318 - DNA, 395 bp, Zea mays
tacttactctacattagatcataaaagattagatagaatatagaatatcgctggtacgactagattaaactagttaagatctcaatattttggattacgacctggcgggtactttaggatcagataaatatagtgggtaggaaaaaatgaatctttcatgataagatgaatctattaggataagagagtctcttaagaataagatgaattggttagaacgggatcctttacgataagaaaaatctctaaactagatatattccaaggggataatctaggttgcttagtttataaatatttttatacctatgcgtatatgtagatgtatttgcggacattactccacaacctatcacactcaatcaaagatccaaatccgacagatatcataagaa

SEQ ID NO: 47319 - DNA, 348 bp, Zea mays
ccactaatgattgaatatatttcaacgacaggtccaatcaaccattaacgaggcccgattgaagtttcaagaaatgcaggtcgatacagaaccaattccgatgaacatgatcagcttctacgaaaaagttctagttcgacctaatacaactgataagggcaaaggcaaagagatcaacatcggtgacccagagagatcgatgagaacaccaaaatttcttgcaggaaagtggttgcagagaagacccggatggaggggagacattgaagatcaccattacaacctccaacgttgggggacaggcgggcggccaggtgcaacaccttgtcctacgcactataaacggtc

SEQ ID NO: 47320 - DNA, 374 bp, Zea mays
acactataaatactacagctggacagtgttctgcgacggttcctatggaaccttctgacatgtgcggctgctatcttaattgcacctttcaaagtcagaacatgctatgcaataaagcttgaattcaactgtacaaataataatgctgaatacgaagctttacttttggggcttcggaagttaaaagcaatgggaataaaaagggcggtccttaataccgactctcaagttatttctggtcatgttgacaaaagttgcaaggcaagagatccgaagcttgagaaatacctggacacagttcgaatgcttgaagtttctttcgaagggttttctgttaagaatatctcacgaggagaaaatgatcatgctgatct

SEQ ID NO: 47321 - DNA, 302 bp, Zea mays
  unsure (1)..(302): unsure at all n locations
agatcaacaacagcaacaggctaacagaagtggacaacttttaccaccttgcgcaacaatgggtctggaatccaccatcgggagctctctaccctgcaaaacataaggagtggaagctacctctgaagcgaccgtcatacttgtttatctggctatctgcacaaggacctaaacttggatatgaatttatgtcgcctcaactgtggttagctactcctgtcaccccatctcactgaactagaaggtnttgaacttgacatgatggagtattgcttccttcacctggcagcaattcatggaaa

SEQ ID NO: 47322 - DNA, 393 bp, Zea mays
caaacaaatatctggctgtacagtggatatttcatattcaatatggctaggcttgctcggactcaagatgccatcctcttctttgtcatcactggtagcttcggcaataaccacaatctttctttagaacagacccttctccttttggacaaccaacccagaacgtctcatccttctgacatggtggctgcctcagtagcctcaatctcttcacctttgtttgttagcctggtagtagacctgactcaagccattttagttcttgaagatgaagctcaatttcactaatttcacgcttgttcaaaggtcacacaacaagtgcaaagatgacaacaagcttcggctttagtaaaaatttttacagcacaccgtgcattacaatgatgttgtgga

SEQ ID NO: 47323 - DNA, 440 bp, Zea mays
  unsure (1)..(440): unsure at all n locations
agctngccgtctagaatacccttaatagctagtgaaccatcacatcttctaaagacagacacatctacatttgtaaacaaacagttatatcccatattgcataattgactaacagatagcaaattatatccaagagactctactaaaaacacattaaagatagagtgctcatttgagattgcaattttacctaacccttttaccttgccttgattcccatcaccgaatattattgaatcttgggaatccttattcttgacgtaggaggtgaacatcttcttctcccccgtcatatggtttgtgcatccgctgtcaataatccagcttgaacccccggatgcataaacctgcaaggcaaatttaggcttgggtcttaggtacccaactcatgttgggtcctacaaggttagtgcaaatatctttagggacccaaatgcaag

SEQ ID NO: 47324 - DNA, 279 bp, Zea mays
  unsure (1)..(279): unsure at all n locations
gttctggatgctgcatgtatttcacactgcccagcatggactttcttcagaagttgcttcccggtggacgggagaacgcacttcatgaggacgcctgacgcgcccctcctgtataatacctccccaatgagtgtatagtgagccgattgtctggcaatgcgttctgccgagttcttggcatctggtgcttcttcattncttatatatttaataatccgcccgcttcagtcataagagtctgactacggttgatctatgatgatgcattcttctgtttga

SEQ ID NO: 47325 - DNA, 401 bp, Zea mays
agcttctaaagggagaacacttgatattgttttcttatgcgccattcgaagaagatagaccatgcgcagcttgtcaagcacgtaaacaagtgggaggagcgcatcacaacaagaatgtgatgatcacatcaatacccctggagctgctacatatggacctctttggacccgtcgcctatctaagcataggaggaagtaagtatggtctagttattgttgatgacttttcccgcttcacttgggtgttctttttgtaggataagtctgaaacccaagggaccctcaagcgctttctaaagagagctcacaatgagtttgagctcaaagtgaagaaaataagacgcgacaacgggtcccaattcaagaacctttcagtggaggaggtttttgatgacgaagcg

SEQ ID NO: 47326 - DNA, 368 bp, Zea mays
agtcttagccaccaagcaagtgtcgaggtcagctctatcaaaatctaccaagtatagctgaccctctaacactcccttaaaagctattgaaacatcacttcttctaaagacagtgacacctacatcagcaaaaagacagttgtagcccatttgacataattgggatacggaaagcaaattgtaatctaaagaatctacaagaaacacattggaaatagtatggtcaggagataaagcaatttacacaatcctttgaccaaaccttgatttccatccccgaatgtgaaaagacgttggggaacgtgggtcttctcataagaggagaacatctatctcttccctgtcataagggatgggcacccgctggc

SEQ ID NO: 47327 - DNA, 443 bp, Zea mays
  unsure (1)..(443): unsure at all n locations
cagcttctaaagggagagcacattttgggacttttctatgnttcatttgagaaagacagggtatgtagtgcatgtcaagcaagaaagcaagttggtgttcatcatccacacaagaacatcatgacgaccgacaggccgcttgagctactccacatggacctattcggcccgatcgcttacataagcatcgacgggagtaagtattgtcttggaattgtggatgattattcacgcttcacttgggtgttctttttgcaggaaaaatctcatacccaagagacattaaagggattcttgagacgggctcataacgagttcggcttaaggatcaaaaagattagaagcgacaacggaactgagttcaagaactcttaaatagaaggcttccttgaggaggagggcatcaagcatgagttctcttctctctacacgccacaacaaac

SEQ ID NO: 47328 - DNA, 357 bp, Zea mays
aacaacatgacttcatggaggagtctgaagctcgtacagtcaatagcactataccagaatcaaagcacatatattgagccatatcctacttctgaaatacttttattctctatgccatttttgctttctatataaggaacaagcaatgaaaacttagttttaatttcttgaagtgattctgcccttaccaaaatgaaatatatcttcttcacagatttacgaaactcgaaagtcgttcctaaaggaatgcagaagccaaattcatgaagctaccaaagtcgtcctaagggagcgtagtgtaagtcttgctcaaaagttgatcttaagggaatgcagaaccaaaaatcacgaagctac

SEQ ID NO: 47329 - DNA, 455 bp, Zea mays
  unsure (1)..(455): unsure at all n locations
gcttaaaacaatttatgcgcacataccaaatcttctatatgaattcaaaagcgtaattttatttatcatcccttttagcaaatgttctcaacatacaagccatgaaatttanttttttttggaaaaataaattctaatgtgtaaccttcattaaaaagaagattttacttaccctccttaagaatgttcctcaaccatattaggaaaaaaaatctaattcataggaagatcttttcactttctttaatttcttcatttatttattttctatttgcataaactaatgccattagttaagtatgaaagaaaggaatcaaggaatccctaaaacacctgattttaaatttatctatttatttggttttttattattattattttataccaatttctttgggcaaacctttatgaatctccacaattaggaattttgggtgtacaagaaacacactgaa

SEQ ID NO: 47330 - DNA, 417 bp, Zea mays
  unsure (1)..(417): unsure at all n locations
ggccttaatctcactgaaagaaactccncaggtagctcatagaatatgtcccaaagctataaatgaagaaatcaacatgaacgaggaaaaaggttaagattcaattaatcatgttgtttgcactgaccttttctctatgtcatctaagaacaaaaagagataaaggaaaaagaggttgtttaagtgcacaagtcatgacacctcatcgcatcgtgttcatacaccaacaaggtgaagggataaggagatgctttggatgcaatgacaagaaccacacgatcacttcttgtcctctactgtgtggtgagcacggtcatctatcgaaggtatgtaataaaggtgaggtctctaagcangtaaaattgtctcaatctcattcgcttaggagaaccanatcatacacctgtgctagatcta

SEQ ID NO: 47331 - DNA, 354 bp, Zea mays
ggctggccactggggccagaactcaacggcaaaggcgggcggaattaaactcggctgagctaaaggaaagtggccggtcggcgaagaataatgcggagctataagatgcgcgcccggtgagaacttatatgcacggacgggcacacgcagaggcaaaggcgcgcggcggacttgaaccaacgcctgggcgagcgcgcacgcgggttgggcgaactctggcgtgccgaccatagtcgaacacgcgtgcccgcgcgatctgcccaagaattaggcgcgtgtggtcgctcatccgaaccctgcctcgccttggtcagggcacaaaaccttttctcctccctacaaactaccgatctt

SEQ ID NO: 47332 - DNA, 404 bp, Zea mays
taaccggcttcgtctgaaacccttggaaactggtgatcaacatgtccttcaacgtctgccatgatgtgatggttcctggccgaagagaggagtaccatgtttgcgcaacattcttgactgccatgacgaaagaattcgccatgactgcggtattgcctccatatgaagatatgggtgcttcatagctcatcagaaactgcttctgatctgattgcccgtcatacatggggagctggggtggcttgtaagatgggagccaacgtgtaacctgcagttcttgctgacagaagagaagcatcatcataagcaagatttccatgatggaaatcctcataccattcatcctcgttgaagaagccttcttgatgaacctccctatgttggggccttcgctcttgctcatc

SEQ ID NO: 47333 - DNA, 445 bp, Zea mays
  unsure (1)..(445): unsure at all n locations
gcaagcttctaagggagaacacgtgataggtttgactatctttgcattcgaaaaagatagaccttgtgcatgctgtcaagcaagtaaacaagtgggaggagcacatcacagcaagaatgtgatgaccacttcaagacccttggagctgatgcatatggacctcttcggacccgtcgcctatctgagcataggaggaagtaaagatggtctagttattgttgatgacttttcccgcttcacttgggtgttctttttgcaggataagtctgaaacccaagggtccctcaagcgctttctaaggagagctcanaatgagtttgagctcaaggtgaagaagataagaaacaacaacgggtccgaattcaagaatcttcaagtggaggagttccttgaagaggaggggatcaagcacgaagtctccgctccctacacacctcagcaaaat

SEQ ID NO: 47334 - DNA, 447 bp, Zea mays
  unsure (1)..(447): unsure at all n locations
ctcagcttgttgacatccaaggttgcttgaaaggaagaaactctattccacccatantagggtgcagtgcctttggcacctcgacgccgtccttcttttgttaaatatctccacgaataccaacaagaagggtctctccttcagtgtgcagtcaatgggtagagtttctagccataatgaaacaannactggcttgtgacctgcntnncatcattcattgttcggagaatgttaaagattcagcaattagtaatattttagcccactctgggtgaaggtgctgagagcaatgacacatctacaataatctacgtggcacagaaccttttacctctttctggccatacccaattccaagtctccttgactganagtcagtgcagtttgaacaggatactaactctcggaaggtctttgatgcagggaaccatgctttcaaatcatatt

SEQ ID NO: 47335 - DNA, 444 bp, Zea mays
  unsure (1)..(444): unsure at all n locations
gcttcccctgcacgccaataccacgcagatcattgatgttatggtgcaagaagattgctcctggaactcaaagtattacatccattatattcctgagcccacatgtcggggctcagcacccttgtacgcacccccttgagctataaaagcggaggcatgcaacgttacaaagggagacacacagactcaagcacacttagacctagctcatgctctcaagtccatacaagctcaatacattacacagtggagtaaggtgttacgctctggcggcccgaaacactctaaactcttgtgtgttcttgcgttcttcccattttccaactaacaagcaaaatgcttaggcccctcctcatcttaggattagggcgggtgcattccaccacccggccggagatatcctctccgacaatagcnattctaatattgataaacaatcatata

SEQ ID NO: 47336 - DNA, 346 bp, Zea mays
tatgcgaatggactctagcctatctacggtgcataagcttcaccgaaatccaaactttcgacttctgaatatcccttggccacaagtcgggctttgttccttgtcactacaccatgctcatctttcttgttgcagaatacccatttggtacctagtacgtacaacattttggttaggacgtggaactaaatgccatacctcattcctcgtgaagttgttgagctcctcttgcattgtcagcacccaatctgagtctcttagtgcatcctttaccctgtatggctcagtaaaggacacaaaagagtaatggtcacaataatgagcgactcaagatcgagtgggtacc

SEQ ID NO: 47337 - DNA, 402 bp, Zea mays
tatggcgagcatatcttttatcttgtgacgaagctcgctctctctctcgctctttttagaaaggtgagcatgaccgccttatcttcttggcttagatgagtgtagaggtgcatgaatcttgtttcatcctcctcatcctcatttgtgcttccactatcaatttcattagccacacaacatatgtgggaattgatatggaaagacaaaccttttagagaggtggattcatcatttggtctccaactatcattttcttcttcttcctttaaagggttagtttcacaagaacctaaagaagtagaagcatcaaatgaactaacatgtctggactcatcaaatttacttttaattctagtccaaatatcatgcgcatcatgaatagcgtcatcatatctaattatg

SEQ ID NO: 47338 - DNA, 279 bp, Zea mays
acacatcactagctactttgcttctagaagcatgtagaaaaagagaatataacttggagtatggcttgacaaacagccagcaaatttatacatggaacactcaaatatgtccactaaaataattacctgggtagacctgagtcctaatattggaggatggatgtaacaacgttgaaaatcctatagccaacaatatatacttacatctttttcctacacccttacttggtaagtgagcatactaggaaccccaccctagatgccctagtttaaccctat

SEQ ID NO: 47339 - DNA, 444 bp, Zea mays
  unsure (1)..(444): unsure at all n locations
tgcagctgcaactttgcaatcctaagcacttgtagtgtatgatctaccaacccgttccaagaaggtgtgctacaagtgtggtaagcccggccactctatcgctaaatgtccattatcaagtgacagtgacagggataacgacaagaagggaaagaggagagaaaagaagaggtaccacaagataaacggcggcaatgcccatgnttgccgggagtgggactcggacgagagctccaccgactcctcctccgacgaggacgccgccaacatcgccgtcaccaagggacttcttttccccaacatcggccacaagtgcctcatggcaaatgaccgcaaaaagaagaagtaaaatcaagatcctccactaaatatgaaacctctagtgatgatgatgatgctaccaatgaggatgataacttgcgcattctttttgcaaccttacat

SEQ ID NO: 47340 - DNA, 234 bp, Zea mays
  unsure (1)..(234): unsure at all n locations
gccctgtgatctacatacatgttctcattctgggcataattaagactgagaccaaaaggcatgaatatttacagctgacatgtatgcacttatgtatctgagcatgtaaattcctctatagcaatgcttttcaaatgtcacaccttgtgagttgtgacaataacatangacaatgaattattcatactagttttctgcctaacatgctcatatattggatattttacttcatgc

SEQ ID NO: 47341 - DNA, 428 bp, Zea mays
acaatacatattcagaatggattattcagcttcagcagatcagccgaagcccatgctcttatgtgaggatgtaccaaaacagaaagtgctgttgggctctcaattatccgaagcacaagagaaaaccttgctaaggatctttgtcaacaacaaagatgtttttgcatggtcagccaatgatctctgtggagttaatagagatgttattgagcactcgctcaatgtcgatccatcctttatacccagaaagcaaaggcttctgaaaatgtcagatgataaagctgaaggtgctcgcaacgaagtcaaaagactcctcagtgcaggagttatcatagaagtgaagtacccacaatggctatctaacactgttatggtaaaaaaagccaatggctagtggcgaatgtgcatcgtatttacagatcttaaca

SEQ ID NO: 47342 - DNA, 389 bp, Zea mays
  unsure (1)..(389): unsure at all n locations
ctggcggagctagccgaagcactggtttggctgtatggtggctggaatgggctggccaccgaggccgtatctctggcggcaatggcgggccgaaatgagctctcctgagctaatgaactgtggctggccggtgagggtgagtgctgcgcgaacagaggtgcgcccggggaggctatatatgcgccggcgggcaccgtcganggcgttggcgcgcggcggacttgaccggacgcctgtgtgagcgcgcgcgcgggttgggccagctcttgtgtgccgaccactgtcgaacacgtgtgcccgtgcgttctgcccaagctctggcgcgtgtggtcgctcatcccaacctgctcttgcctgggtcagtgcacaaaacctctttttctccctac

SEQ ID NO: 47343 - DNA, 302 bp, Zea mays
  unsure (1)..(302): unsure at all n locations
cgcactccaatcttttctgaaaaataccccccccgnatgtaactgaaccacnaacacgagcgcacgaaggtgcaacaaatcttcgggaccaaaacggggaggagggcaaacggaaacgtcgcgacgcacctacagaacctagccaaaaggaaggacgctgaggggccggcccccaaaaacaagagccggtgaccaattccgaagcccgcgccacccgagcagggcaagactgcgcacaaacgagagcgggccaacggtcttgacacgaaaaggatacacacagggactaccgacccacacaa

SEQ ID NO: 47344 - DNA, 379 bp, Zea mays
  unsure (1)..(379): unsure at all n locations
agcttcgacaaccttcgttgcttcttttcctctgagccccggcggccaatcagcaatgaaatctgcttacgcctgagattgaattgaggatctgtgtacataatcaatggtaaattcattaaattctgcggcccattttccgatccttcttgtagcttctctgttcctcattatgtctttcaagggttgtgatgatggcactattatatgatatgctcgaaagtaatgtcgaagcttcctataggccatcaatacagcatacaataccttctccaattctgtgtaagttttctttgataagctaagtactctagagacaaaggatatcacggcttgtctttttacttggncatcttgctttttctatacaagtgccgca

SEQ ID NO: 47345 - DNA, 386 bp, Zea mays
ctataaaactaagcttgatcaatgaaggaaagaatgatgtcgccaccagtattgtttatgcccgacctacaaaaaggagttgatatctattgtgatgcatgtggccaacgcttaagatgtgtgcttatgcaagaaagacatgtgatcgcctacgcgtctcgtcaagttgcggaaacatgaattgaactaccccacgcatgacttataacggacagccgttgtgcatgcgcttaagatttggagacattatatcatgggaaccaagtgtcaagtgtatacacggatcataagagtttgaagtgtatattcatttataaggatctcaaccttatgcaacgccgttggttgaagcttattaaggattatgatttggaattcactatcac

SEQ ID NO: 47346 - DNA, 307 bp, Zea mays
  unsure (1)..(307): unsure at all n locations
caattcgaagaagatagaccttgtgcagcttgtcaagcacggaaacaagtgggaggctctcattacaccaataatgtgatgatgacatcaagacccttggagatgctgcatatggaactcttcggacccgccacctatctgagcataggaggaaagaaagatggtctagttattgatgatgacttttcccgcttcacttgggtgttctttttgcacgaaaaatccgaaaccccaaggaccctcaaacgctttctcaggagagctcataatgagtttgagcttcaaatgaaaaaaataangagcgaca

SEQ ID NO: 47347 - DNA, 326 bp, Zea mays
aactcaagctaccacaattgaagcatgagcgcttccctctgtcttggtcttgcttggctgccccttacggcctattagcgccgtcttgaatactctgatgatgagaaccatctcttcatcaataagtccggccggctcaatttgtgccaccttgctaggtagcatctccttgcttcttgttgccctgagagcaaagaggatgaagctcattgattggaccggttagagcgacgtcacgtatctcgcctcctttgatcatatccgcccgcttacgaattttccgagtacctcctctggcgtcatcatcgtgtacctgggattctcac

SEQ ID NO: 47348 - DNA, 435 bp, Zea mays
  unsure (1)..(435): unsure at all n locations
agcttatatgcaacaactaaattacattctctatgtgtnactcagatcatacgaaaattaccgtcccattgtatcataattcggtccatcaagatacacgtctgttcaaagaaaactcatgtttagcagctcacaaacgagtttttgtattgtaaaaaagaaggggtttctcatacccaagtatgaaacatataacggtaaatcatgtgaaaaccacatcgctgtttacaatattcagagcacataatttcaaagcagtgtttcaaagaacgttttgccaatattttaaataagtcccaacagaacagtgagaacacaatctggcgaggacacatcagacatttaattctctcttggccttctttggagcatctttcttggtggtgatgtaatgacctcttgagagaaagaacctctctgagatatgccttcttc

SEQ ID NO: 47349 - DNA, 327 bp, Zea mays
atatatatcatctgccacatgagacatattcctactaatggtattcatagacctttcgaacatgtctctaatatggcgtgtcacttggtgggaaccacaagcccataagaacatcccaaatgccttacatgacttcagcccttgtgttgaccttaacccgcgatacctcaccaaagtatcatgcaattctatataagcatctggagtcatacgaaaaatgtcatgacacttactaaagtccctcaaattatgttccacccattgtcgtactatcacgtgccgcaatggaggatgaggattaattatttgagcaactgctcactaatg

SEQ ID NO: 47350 - DNA, 400 bp, Zea mays
  unsure (1)..(400): unsure at all n locations
gactgcggctgcagctngggcatgctaaaacagcataacatatttttctcaaacgatatcttggttgagcagtcttcaatctcaagaacaaatagtccacaacatgctcctttcctccagccctcctaagtcggaacaattccgataactttatcttcaactggcaatgataacatgaacgatactccactctttgagtctttggtgctgtcaatactggaaccgaagacaaatagcttttaataagatcaaaagcttctagctattctgtccgcctagtgaaatcaacattatttctaagcccaagaataagagtgaanacatcaatctttttggctaaggtagaaataaacctttgcaataatatactttgccgaaaaattctgcatttcaagcctac

SEQ ID NO: 47351 - DNA, 417 bp, Zea mays
tatacctttgatgtcttctcgtgctgattaagtcatttcttcacatataaacccattctgtcatccaatccccgggccatctcttccgaagggtggtacgggacagcttggcccggaccgagagacgaagctgtagcaaccaaagttgttatggtactgttctttgccccaaggctattgtttatataataattcatgaacattacagaagcttcttgcgtcaggcttcagaccttggcttctcgcggcccacacgaagatatttagccttataatggcctcgggagtaagttgatgaagatagacttctaagattttcacaccttcacgacgaagctgctcaggggaatcgcaatcagctttcaaaagcttcgatacaccacacttattttcttagggttggacaagtttttccct

SEQ ID NO: 47352 - DNA, 406 bp, Zea mays
agattcggtcattacctttaaaatttcttctacgtcagcagcagaaggtgttgctagtcaagccggtcactcggcgtggacgctttgggtgggcaccttcgggttttctagttctcaccttttcaccaaattcttgcccatttgtgatggccatcggctcgttgcgggtagagtcagatgattccccacccagcaggctaagcacagcatctatctcagtgtcatcagtgctggctggcatctcaaagagagtctgcctctcatcctcgggaagaccccaaagtggagcaatcaaagcctcaatatcctcaggagagggtcgcactctatgacccaagctaccctcacgagcaagagggttggatacaaactcagagaatgtgctaagccgcggcagggtccatgc

SEQ ID NO: 47353 - DNA, 408 bp, Zea mays
  unsure (1)..(408): unsure at all n locations
catacaagctcgccaacgatcaaggcaaggtctacaacaacgcttggaacatcgaatagctacatcgcttctatccttaaaatgtttcaaggcgttcatgtatctcgctttctttacatgcataaataaagtctaaccatcaaggaaggatcagccttgcctcggcaaagcccgaccctccctcgggggctagaaggggggaaccccctctgcgtcaaaattttcctcggaaaagttttctaccaaaacgacttttgtgctcttcgactatatcgataacggaatcctaaaaacgacgagaggaacacttaaatggcaatgccgaccgagccgagggactcctacgcctccgggatacggatacctcactcatcaccttccgcanaaagaactcacgctcggataagc

SEQ ID NO: 47354 - DNA, 365 bp, Zea mays
  unsure (1)..(365): unsure at all n locations
tgactttcaattggtatctttgagactacatttagtatcatttacaagtcttctccaatatttgattaaaaagtatttcataacttcccatgttgctacaaatgcagatattgttgactcaattttgttacctatgcataaggggaagtagtctattcaaatcatgtcttgcacctccatttctcacatgttttttcctaagtagaagatctctgtcaggaggagtatttcttcgtctctaatgggggagaaaattcgttctaaaggagaaaactcatttacgaggagttataatatcaagttcttcaattggcgataatcttttatgaggacaagtccttatttgctctctacatgtntttaat

SEQ ID NO: 47355 - DNA, 393 bp, Zea mays
aaacacacctatttctatgattctaaagagtccatgctcccaacataattatggaattgagtgcttttcgggcttgggctgaaacagcagcagatacacttttccaccagtcatcaaacctttcgtcacccagctggggacttaaattttgcaacccactcttccgcaacaggctgaaccataaatctcggacaaaggcacatgacaacagcaaatgattaatgctttcttctacctgatcacaaagaggacatcttgcggggtgtggaaggccgcgttttgccaatcggtcagctgtccaagttcagcacctatccctaacgccacaaaaataagcggcatttgccaggtgcccatgacttccaaattctcttctcagatctaaagatgact

SEQ ID NO: 47356 - DNA, 236 bp, Zea mays
  unsure (1)..(236): unsure at all n locations
agcgtttcttctacagcaaaataactcattcaaatccagcgtgaataaggcgaatcacggttctgtaagttaccttttcggaatcaagccgagcgtgaagagaaaaactcagagcgttggcatcatccaaagcagcggagacctgantcagttcagtctggctctgagaatacttatcctcgaagtcagcacaccgttgagccatttcagcttgatctcgggaatgtttttcctca

SEQ ID NO: 47357 - DNA, 367 bp, Zea mays
  unsure (1)..(367): unsure at all n locations
tntgagttgatcaagtgaaactgatgtngngctctcgtatgtacgctcgtttgtactttggggaagaaatctgccaattgagattctgagggcacatattgaagatcaatagtcttctgctgacaatgagataaagtaaatgatgcatcgataccaatgtgtttagtaagttcatgcttcactggatcatgagaaatttgtatagcactcatgttatcacataacagaggtgtaggagtgtcacaagagacaccaagatcactcaaaagccagcacagccaaataatttcagcagttgtagtagcaagagcccgaagtttggcttcagcactagaacgagatatggccgcttgcttcttggattttc

SEQ ID NO: 47358 - DNA, 431 bp, Zea mays
  unsure (1)..(431): unsure at all n locations
agcttgctacactctaagttaatgcttcctacatagagctacaagtggtgtgggccctaaggtaaatttactatcttgaaagttgcacagctctaaagatgagccctcaacactgaatatcagacttagctctagaacacaaatagggtccttttgcacataggtccaaaatttagggtttaacttgcaaactcacatatttgtgacccaagtgacttaagatagttattcaacttggtttttgcactctagtccaaaaatggactaattttgcacataggtccctagggcttggttttagggattttcagggttccaattagggtttctggtatcccangggtataaatgtgatccaactttatatttggggatattttataactatttccctaaagcctctatgttctctcattttgggttaagtctta

SEQ ID NO: 47359 - DNA, 420 bp, Zea mays
tttggtggtgagatggaccttctcaggccctctccttctatgaggatgagtgatgactggacaccctcacccgacgacgaggctgtcatgagcaacatgaagcatgagtagtggtgtaatagtagaaatagaagtagcgttattgtatattacgtagtgttattgtataataagtagtgtcatcctatcgtaaaaattccagtctataacattactcttcttattaatgtaaaatggatggttttcttaggcatatcatattggtttcaaacgttcgttgccacagatgccttcccggacttgtgcacatgacagggctagtaccttccatgggagggaggcaacaccaaacccacctccagtcactccacacttgccgaagctatgtccccttggtaacacgacagcggataatactca

SEQ ID NO: 47360 - DNA, 384 bp, Zea mays
  unsure (1)..(384): unsure at all n locations
taggctctttgaatccttaaggggtaatgcttaagatgtttacaacatgctttcataagggcataaactggcatgagcatcacacttataatacgacacaatgcacttcacatnttgtatgatatagatatgtcctcattaacctaaatatgtgcaattggcatttaaggtcaaaatatgtgttcctctccatgcacatatttagggggagcaatctatgttatatagaaccatgatcatgcttaattgatatatcctttgatcatatctcttttatgtctatgactaatgtgttttcaagtgtattctcatgcttactcatggaattgaaagggaaattgagtattccgcaaaggcgacgcttccactcaactccatcggtat

SEQ ID NO: 47361 - DNA, 390 bp, Zea mays
tacctatcaaagcaacagcacatgccagcacattagtttcagaccataccagtaacttggcccttcgcatgctggggactggatatgattggacctttcaagaaaagctcaaggaggatatacccatgtattggtagcgatcgacaaattcactaaatggatagagttccagcccattgcttctttaacctccgctaaagccgtggaattcatacaaagcataatattcagattctggataccaaacagtatcattactgacttgggatccaacttcaccagttcagaattctttgacttctgcgagccaaagagcattcagatcaagtacgcatctgtagcacatccaagagccaacgggcactgtgagcgagccaacggaatgatatt

SEQ ID NO: 47362 - DNA, 318 bp, Zea mays
ctcagctcttgttgagtctaactcctagacctgctctctaacccgttaattgaactagactgccctggatcaacaagaacacactagattgatctcgaattttgccatagcccgtgaacagaaggattccacgctcaaatcgtgcaattgataaacggattacggtcgccgggttggaaataggtgtcaaacaaaggataagcctacccggtgtgttttctggacagaacgagtacctcggagatgtgctcttcgccgtccacctgcgtggacatggcgctgcgaagaaatataagtgcgacggcctaactgattggt

SEQ ID NO: 47363 - DNA, 398 bp, Zea mays
ataatcggctcgagccataattataaacatttcatcccctttttcttattttcttgaatttagctcatggtgctcacttatgtgtttcattaaggatgtacattcttatctttttaaaagactcaattgttttgatcatgatacttctatagatatacttggtgaaatctttatttcttaagttaatttgatgctcatgcttactttggttcacataaaataatggttcttgggttggtatttgagagaaaccctaggtgacactagggtgtcacagccttccccccttaaaggaatcttcgtcccgagatttgggccagagtcctcctcatgtgaagcgaagggtgagacttataggaaatgggtgagtgttgctattattatggtacaactgctct

SEQ ID NO: 47364 - DNA, 431 bp, Zea mays
  unsure (1)..(431): unsure at all n locations
cctgccggtatgtgatgccctctgtatgctgtcttgaaatctctccattccaccacgtggtcaactggctgcatagcgaggaagtggtcccaccaagtccgcgcgggtccgcaaagctgctgggtgccgaaccggaccttatccacatctgaacaaactccattaagcagtgggaatttggattccactaccctgagccaaacatcggcatcaagtggatcctctgcccaagtgaacaaccgcggctgagtgctgaggaactcctgttaagtggccgctgccggcggatgctgatggtgatcaccaccaccataatgctgaggtggcggctgacgctgagcccactatcgcagaatctcattctgctgagncatcagttcctgcattgtatgaggccggggcgggggtggaggaatgctctcattctgtca

SEQ ID NO: 47365 - DNA, 439 bp, Zea mays
  unsure (1)..(439): unsure at all n locations
cctgcggcatgcaagcttgaatggaagcacgcgggccagatgttttttgttaagaacnnngngctagcttttcagtgttacgaacttattcttactcattaacaatacactttgctacttttaggacactgagggagattctgtgcatgaggataactttgaggccttgtcaaaattaatggttgcggtgacaatgctctttctttatcctctatctttctcaggctactgcagattattggttatcattcaactgttccagtatgtaattcatctcctttttaccaggttaaggacttggtgtcccctgttaacgtgcatcttggacagcactttactaagccaccatcacgttattctgagggtgcattggtcagcaataacctaccatggattatttttcacttgttcgctttgagcatcgcccatttttgcaata

SEQ ID NO: 47366 - DNA, 442 bp, Zea mays
  unsure (1)..(442): unsure at all n locations
agcttgtgaatcataacttctatagttatttctagcatgnctcttattatgatacataaaagcatggtttttagtactacttgccataggagccttccctttctccttggcggngatgggaaccttatggcttgntacgttcttggcttccctcttgaagcttattatgatacataaaagcatggtttttagtactacttgccataggagccttccctttctccttggcggggatgggaaccttatggcttgttacgttcttggcttccctcttgaagccaagtccgtccttaattaaggggtgtctaccaatcgtgtaggcatccctcgcaaattttagcttatcaaattcgcttttgctagtcttaagttgagcattaagactagccaattcatcattaagtttggaaattgaaactaggtgttcactacaagcatcaat

SEQ ID NO: 47367 - DNA, 437 bp, Zea mays
  unsure (1)..(437): unsure at all n locations
ctgatggtagcagagatcttggaggaggggcggtttatatattgtgtagtgaccccggccgccgggccccctgcagctagcacactcagcaccattttggtcctgatcgacaacagccagggagattgaataagctaataagctaagctagctaggaaacgagataaccatcagcatgacacaaagtggcacatgcaacgtgcgctttccttttgtgctcgcaatcccttgtcctctcactgcactgttttttttttttttttttttgcgagagattgcacagcacagcaagttggtgtgtacattccaccaggtacgtactttatgtaggcggccctcgctctatatacagtacatgaatgggaaggtcacgtacgttgcatctcatttcttaatttaaactctactctatanaccatataatttatacatatagt

SEQ ID NO: 47368 - DNA, 383 bp, Zea mays
  unsure (1)..(383): unsure at all n locations
agcttgcattgccgaattaaatttcttgtattgcatctacggcttgtctaacctaagtgagataactgccaacaaagcgagtgaaaaagcttaactcggatcaaactttacaagtcttagttttaagcttttagtacttaaattcctacttttatgtaattggtggttcttgagatatgcatgaggtactgcacttagggggagtattcaaaactcaaatctttcatgaaaacccctagtgcaatgccaaaatgaaaatctcaccatttgcctattttctctaaaaattatctagcatatggcaaaatattntgaaaattatgagaaaatatatgagggtgccaatacctgtcccaacaagtgttattttgtgtgattataag

SEQ ID NO: 47369 - DNA, 424 bp, Zea mays
tggtagttccaaaaatcataaaattttttggataagcttaatttgataattagagcctttgggtaaagtttggtatctttgggcattgtttgatcccaaaaccccaaaaccctaacttcttaggatagaactgcttaaccctactaaggtgttaacccagaaaaccctagtgacttatgagtaccgtgaaggaaagttgtattcaatatacaacttgatatatctctattataattgcctattcagagcatcacatgagcattcatgtatatatatggttatgtatagaaaacgaagaagtaattgtcgaagaggaagagactgcaccaccaactgagtttccacctgccaggaacaattttattatgatatttgtggaactgatctcgaatccctaaacacaagcaagccccgtgctttactt

SEQ ID NO: 47370 - DNA, 370 bp, Zea mays
tatccggagacccaaaggtgaccggcatgtaaatgtgtccgagaggatattctccttcaggtggtacgaatccaaagaaaggagtgtctgactcggggagctctttgagtgcgactcccaagcctaagagtgtctgggggaaggtgatgttgatgctgctccccccgtccactaacaccttctttaccctactctctcagatcaccagatcgacgaggagcgggtacttgcccggatgatcgaagttgagccactgatccgcccgagtgaaagtgatcgggtgctcggaccatcggtacggagtgggaggaccggtggccgctaccagaatctgacgggtcgtgagcttctgctggctcttgctctcttg

SEQ ID NO: 47371 - DNA, 311 bp, Zea mays
atttgttacgcatgtccagcatggaaacaagttggagttcatgatcgacacacagaacatcatgacgaccgagaggccgcttgagctacttcacatggatcaatttggaccgaatggttacataagcatcggcgggagtaagtattgtcttgttattgtggaagactattctcgcttcacttgggtggtctttttgccgaaaaaatcacaaaacccaagaagaccttaaagaaattcttgagacagctcaaaatgagttctgattgagaataaaaagattagagccgacatggaacggagttcagaacact

SEQ ID NO: 47372 - DNA, 178 bp, Zea mays
ggcactaaactactgactgggcttgagcatgctcttatgcagagttccttattagctgctttagcaattgagggtgtatttctaggtatgctcattaatttggcctaattgaccttgaatcattttttgttaatatagcatgtgacatgaatacctcaacttaatatcttacatatag

SEQ ID NO: 47373 - DNA, 383 bp, Zea mays
ctactatgacttaaaaagaaaccgtgtgcactgcagcagtaacaggggagcttatatgcaataggatgacactcaaccctgagtactcattggcctttcgacccgcgctattatatagagagtagatggctgtatattagattttcgttacttggtatttttgcagaaaatgaaccaggaccttgccttctagaagccaacagtgactcaaggaaaatagacacatggtcaatcaaacctagaaggtatttagagaagaatatacagtcttgtctccaccacaatggtggaagaaaagactctactgagcatgtgtgataacccacgttgcgatctacagttgcctaaggtacttccttaaataatattacgacacaggtttt

SEQ ID NO: 47374 - DNA, 285 bp, Zea mays
aagaaccgtgcacttgtacaaattttgcatgcacagaacggggtttcacaaagagcaacaacttgagccttgccttacctgtatgctaagatattgtaaatgtggacttcgtatgggttttggaaaccaccagattacctctaaactaatatcactcaggaaaagacgcgtcatcaactatgaatttaagaggtaccattttctaccacaattggtaaaacggttttttagcactagtttaccttttagataacttttgcaagtattccttaaatattctaaaaa

SEQ ID NO: 47375 - DNA, 138 bp, Zea mays
  unsure (1)..(138): unsure at all n locations
cttagcaattaagaaagtatcgagntcagctctattaaaatcaactaagtatagctgaccctctaatacttccttaaatgctactgaatcatcacttcttctaaagacagtaacacctatattccgtaaaagacaatt

SEQ ID NO: 47376 - DNA, 321 bp, Zea mays
attgcaccactgtaaaagcactatcagatgacttcttttaaacgacaattactggtctccataactttgaaacaatccatgtgtttctcaccacctgtgttatgacatgaaaacacattatgcatgcccttatgccaatcttcatcaaatcctctgtatcctaattaagaaatctgacataacactggaccccctaaccacccaataaaagatctctttaaccccttggcaacattatatctctgactggtcactatacaaccaccacgaaacctcatcagtcaacgaaacttctctaaacaccaattccctacccactta

SEQ ID NO: 47377 - DNA, 441 bp, Zea mays
actaactttctgcccatgctggctattaacactcacataggctcgtgatatcattgtcatacattaggtgcgcagtgatgaccaactctaacatataatattgtcggctctgcactgttctacatatgggtgtcactctggcattccaatcacgtatagtcgtgtcaacaactgtctcatggagatactcaacagaagtgctgacttgtcaaaaatgtcaatctgttacaaaccaagcagaccggtaacattctcggcaaactttagcctgccgattctacacagcttggacactatttcttatattctgagaaggcgacctcgtctcgatcgccgattgattctcgtgggagtaacaaataccaagttgccacttcttcacttacaccaaacagtactctgtgccactgtctgccaaagttctttctagtatcactgtgt

SEQ ID NO: 47378 - DNA, 334 bp, Zea mays
  unsure (1)..(334): unsure at all n locations
ctatctactggttagactttgctgacggctttaattgtcttgcccaattgctagtcactctattggtggactagaatgtaccttatctttcatttgaacctttcttagaacatagtgagcattgaaagcaaatggtcttgagtgcttangcaacggagttggtggtttagctcttgcagtgcgggcaaaatgaccttcatttccacactcaaagcatttgataggctcgtgagtctgctttggcttgtattgagtgatagctatctttcgcacataaacattgtatccaatgccactcttgttattnttcataacagtggtcataagcagctca

SEQ ID NO: 47379 - DNA, 278 bp, Zea mays
  unsure (1)..(278): unsure at all n locations
cagctctatcaaantctactaagtatagctgaccctctaacactcccttaaattctattgaatcatcacttcttctatagacagtaatacccacatctgtgataagacagatgtagcccatcttgcataattgagaaacggagagcatgtngtaatctagagaatctacaagatacacatttgggaatggaatggtcacgtgatatagcaattttaccccatcctctgaccaaacctttgatttcatccccgaatgtgatggcttgttggggatcttc

SEQ ID NO: 47380 - DNA, 216 bp, Zea mays
agagagaggattcataaccagacatctctagaaagacacattgtatcaagatgtgatgcatagtgtccttctcttgatcataaggagtacatttggcaagatgctctatcgcccgacgagccaaatgatctgatgctcacatcggtgtagagaggctaacagatatagattgtacatcttgtggtgccaacttttcaaatctttcgctagtcaagt

SEQ ID NO: 47381 - DNA, 165 bp, Zea mays
  unsure (1)..(165): unsure at all n locations
ctcggatcaggggaaacttttctaaagggaggcctttttgtggatcttctaagacctggcatactcgtaaaagacatggacacaatgacattccaagatcttgaatgcattgagcttanagatattatgggaaatttgaaattctacttttctcatggacctttc

SEQ ID NO: 47382 - DNA, 308 bp, Zea mays
  unsure (1)..(308): unsure at all n locations
atgtgttcttcgaaacaataaaagcaccttctgtggaacttcgtgaaagagcatgccttaacatatctcctgtttttagcgaagattggagaaccgagatcatctcttatcttcaaggtaaattcctttcatatgacgaagcttataacaagatgatagacgcaagagcttcgtcatatgtcatgatagatagagagctgcacanacatggagtttgtgctccgctgctcacatgtntatccagaactcgaggtatagagttaatgaaagaaatacatgcacgcctgtgtggatctcacatcagatct

SEQ ID NO: 47383 - DNA, 249 bp, Zea mays
  unsure (1)..(249): unsure at all n locations
ttgatctactttatcttctgtgttataaaacttaactatatatggttttctcaaatntaaactcttcattccctctngcttattatctagaattctgctcatgcggctcacttatggttcttaattacggctgcacattcttatcctttaagagactcacattgcttgatcatgacactcttaagcatatactcggtgaattctttcttacataagttacatcgatgctcatgcttaccttcggtcaca

SEQ ID NO: 47384 - DNA, 289 bp, Zea mays
  unsure (1)..(289): unsure at all n locations
ctcaacttcagtcctctatgtatggatggcttngagtcagtacaattgcttcttgccttctagcagctnnctgacttacatggatagcaatgggtccctgatccgaatgtatcttcatgcaaagatatgcgtgatgaatgattgcttcgaacgcatttagagtaccacgaccaatatatgcattgtaaaggtattccatgtcaacaatgtcaaacacaacttgctcacttctagtgttggtgatgaacccgaatgtcactgacatggtgatcttgcccaatgctacaat

SEQ ID NO: 47385 - DNA, 178 bp, Zea mays
ctccgaagatgtctgaatatataatactgctgctgagacgaagctgagcctcgacgaagagaataacttgtgggttctcatagctgatgccaagaccaatacagaatatattaccaatgagattctggaatgtttgtctgaggatactggtgacagtgacagctatgatgtggacagt

SEQ ID NO: 47386 - DNA, 176 bp, Zea mays
  unsure (1)..(176): unsure at all n locations
gagtcgaatgggctcgttgaaaaggccaacgacattattatgacatgaataatgaagttaatcttcaatcaacccacgggaaagtggccagaccaattaaccaaagtggtgtggagccacaatacaacagcatcaaagtctacaggctttaccccanttaagatattattcggaga

SEQ ID NO: 47387 - DNA, 116 bp, Zea mays
acttatggacctaccgccccgaggaacgattgaactggtgaggatccatacctgctacgtacacagctgacctaagaatgactgaatgaaaatggacgttgtaatgatctaatgtc

SEQ ID NO: 47388 - DNA, 281 bp, Zea mays
  unsure (1)..(281): unsure at all n locations
ctagagtcctagatgccgcgtgtatcccgcactgcccgacatggatctcatctagcagttgctttctagtaaccaagagaatgcacttcatgatgacttctgttgcgctccttctgtacagtgcatccncaatgaaggtgtgatgagctgactaccttgcgatgtggtctgctataggcttngcatactggttcctctctgttcttttgatctaatgatgggctccctctagcatagagtctgactcgtctaacccaaacattgactctttgcttgatctg

SEQ ID NO: 47389 - DNA, 167 bp, Zea mays
tatcgagttcaactctattgagatcaactaagtatagctgaccctctaatactccattaaatgctactgaatcatcacttcttctatagacaataacacctatatccgtataaagacagttgtagcccattttgcataattgagacactgaaagcaattgtaatcta

SEQ ID NO: 47390 - DNA, 236 bp, Zea mays
  unsure (1)..(236): unsure at all n locations
cgtatgtttgtaaattgtctcttggtatctatggtaatatgctctcccaatatttcatgtgttgtctgttagtgtgtctaatcatttcaaagcccttacaaatgccttactttaggctttcttcaaagatgtcanttttgtcactgataggtacctncatagtccacattgtgatgtcatctactcgctagaaattttgattttgtgatcaggaagcttatttctgtatacaactg

SEQ ID NO: 47391 - DNA, 260 bp, Zea mays
  unsure (1)..(260): unsure at all n locations
acacccgacgccttcaagctcgacaacgaggagatgacgctcatcatcaagagcttnncgacaatcctcanacaacgaaaggggaaagactactaaccgcgttccaagaaagnttctacaagtgtggtaagcccggtcatttcatttgctaatatccattatctagtgatagtgacaggggcgacgacnagaatggaaagaggaaggataagatgaaatactaaaagaagaagggcggcgatcccatgtatgccgggagt

SEQ ID NO: 47392 - DNA, 293 bp, Zea mays
accacttgcaaactattgtgggtgtcgacatcactttgttctacttacgagcactaccatttgaacattccttaataaagggttactactacctggtgctttctccttgaatacagtcttgcttgactcatccttatgactcgtgccctatctaccgttggttttctcttgccttaacaacctaagacagttttcctttagaagacaccattataaatgacatatacacaatgttgtgtgatgctgtctgctgctctgggatacgattgctctttatatgtgatgtgtgggct

SEQ ID NO: 47393 - DNA, 294 bp, Zea mays
  unsure (1)..(294): unsure at all n locations
tgatctaacgacatgaacgctccttaatgacacactctgtttgaaacaacgtatgtcgctgattctgctctgccttctccatttgtgcactaagcacacactgtacaatgaggctctcataatgctctgcatcatctgcaccaatctgttcttcgggtggntccttattgcctgcatcatcagccgcaagcaaagcaagtgtagcatcattcatattactagcagaggaatacgcaccatcgtctgttaccaccaaaacacgctgantaggacaatcacgctgcacgtgtccat

SEQ ID NO: 47394 - DNA, 261 bp, Zea mays
  unsure (1)..(261): unsure at all n locations
agcccatcatccacacaagaacatcatgacgaccgacaggccgcttgagctactccacatggatctattcggcccgattgcttacataagcatcggcgggagtaagtattgtcttgttatcgtggatgattattctcgcttcacttgggtattctttgtacaggaaaaaatctcanaccncaagagaccttaataggattcttgagaacggctcanaatgagttcgccttatggatcaagataataagaagcgacaacggg

SEQ ID NO: 47395 - DNA, 174 bp, Zea mays
  unsure (1)..(174): unsure at all n locations
acgaagcatggtcccaacagtaaccncttcgcggtgctagatcgtttttcgtaacgaggttgatccgtgaaaaaagtctcttatgcatcgggaagccgaaggtccgaaaaacacctttcctgagctcgttgccgagaaacgatacagtttccaagcgcggagcggtcccaccat

SEQ ID NO: 47396 - DNA, 330 bp, Zea mays
  unsure (1)..(330): unsure at all n locations
caactgcttgggctttttttgtccttcttcatatcgaagctttctcacagcttgaggccangtcaacttctggatactggagtttatttggcggcttgttcactaggttgcctttaagctcgcgatttcctgagagagagctaagctctatgtctacacattgtcataccatctctctttagagtgcgcaaacgtttgtcctcgcctctcttcgtgaggctaaatttacgtgtgttttaaattggttcaccttattctcacttactactattaccagcttctcgatttctgtctagcttatgtgagagggcttgtcacacgaaattccca

SEQ ID NO: 47397 - DNA, 222 bp, Zea mays
ttcaatttcccgtgtggtgtaaaacgatcgatcacattaacagccaccccacacgtgttttacatgcatgcccgctccaccaaccatgtctgctgcgtaataatacgcgaacggcggtcaattggtttatcgaccattgcaccggatggctgctctggagagagaggcgcgccccggcgctgggtgccgaccgatccgacgcatgacgactgtgctcacccg

SEQ ID NO: 47398 - DNA, 383 bp, Zea mays
ctggctcatcactcttcttatccacatatgtgatagccctagtttctttctcataagctcataagctctgaagaagctgctggcatctacaaaggaatctactctctggtaagggaactcatccttcggacatgccttgttgaggtctgtgaaatcaattcacattctccatattccattagctttcttcaccataacggtgttagcctaccactgtgaatatgttacttctctgataacaccaacactgataagtctcttaactgcatattgtgcaccttctgctatatcatcatacatattccgaagcctctgctgtcttggtctgaagatgggtcccactgagcggatgaccatgacgtctctatagcaccacatagatc

SEQ ID NO: 47399 - DNA, 345 bp, Zea mays
  unsure (1)..(345): unsure at all n locations
tctgcagaataagtgacaaaatcacaatgtcagattgtaccagactatttaacgatcaagaangtgattgtgtgcctcaaaataaaaacggctgccagacaacttatagacacacaacacacaaagtgtgcagcaaataattcttcatagataataataatcaaacaacagattcaagtatgtaaaaaatatacattattgtcagaagacaattaatcagtgatttgtaagaatggatggtattcaaagaatctaagatataagacaatcatgaatgaagagatgttccatatgacaatgatgcctttttgtcaggctctaaaaatgatagatacatgccatgct

SEQ ID NO: 47400 - DNA, 126 bp, Zea mays
ctagctgatataaactatatgaatatagacgacgagagattactgcttatgctgccttgttaaaatatcatcatcatgctgacagaatcccctctatattggagaagagaagttcttttcaaataa

SEQ ID NO: 47401 - DNA, 317 bp, Zea mays
actctatcatatatcactcaagatatgctaccctctaacactgccttaaatgctattgaatcatcactatttctaaagacagtgacacctacatcagtgaatatacatgtgtagcccattgtgcataattgagatacagatagcaacattgttatctaattgaatctacaagaaagacattgggaaatgaattgtcacgagatatatcattttacccaacctttgcctaaccttgatttcatctcgaatggatagctcgtgggatcttgttatcttgtagagagaaatcttctctccctgctgtggttgtgcaccct

SEQ ID NO: 47402 - DNA, 228 bp, Zea mays
tactagcttaatgtattagaaccttggttagtcgtatgaatggacatgttttgtcctataacccacaaccttagtcttctgccctatgaacgtcatatctgactccgaacactcttattgtctgtggtcgcgtgtaggatagatgtattcaagacctaagataatgtgctttctttgaatctcatgagcaacacataagcattcatgagtatctatggctatattata

SEQ ID NO: 47403 - DNA, 101 bp, Zea mays
ctccctttacccgtatgttaaaccccctttagacgccaggagcaaggcccagacgcggtacaaacgggaacaaaaagggcgaccgggaataccaccaaaag

SEQ ID NO: 47404 - DNA, 151 bp, Zea mays
  unsure (1)..(151): unsure at all n locations
tcattaacaagccttcacgataaatggttgaattntagcaacaactgtatccaacaactaaagaagatcttttactcaggtggagccagcagcgggaaatttaccccttcggatgaagaattaccaagagccttcgatcatatcgaagctg

SEQ ID NO: 47405 - DNA, 119 bp, Zea mays
ctggaatattgaaaccctcttccatgcttcacttcaagccaaagcaagttctattaacaatttatttgtgaactgaaataagttcactgcgtacatgtctgacctgaaggtgcaataaa

SEQ ID NO: 47406 - DNA, 268 bp, Zea mays
  unsure (1)..(268): unsure at all n locations
ttatctaagaggcagaagagaaggttgctttgattcgcaagagactcctttgagcctagagtctcgcaaagagctatgctgacaataggagaagggaactcagttntcaagaaagagaatttgtctatctcanagttttcccaatgaaaggtgttataatggttcaagcaagatgaaagttagccccgcgctatgtcggcccctatcctattatctgcaatgtaggaaccacagcttaccgcctctagttaccaatcaatgtcagata

SEQ ID NO: 47407 - DNA, 139 bp, Zea mays
tctcagttatctgatgagcatgatacaaccttgattaaatatttgttcaacaacaaagatgtctttgcttggtcagccaatgatctttgtggggcaacaaagatattattgaacattcactcaatgtggagtcatcttc

SEQ ID NO: 47408 - DNA, 185 bp, Zea mays
  unsure (1)..(185): unsure at all n locations
tagcttagatcacagacttgaacaaaataatctattaagctggaaacaaacaaatgtgacttcctgaaagactcctttcacatggaggtccttgggacttcaagctgaaatgctcactaacgggatctttncagacccaacacttaagagaaaatgagaggcttctacaggagacaaggaactgc

SEQ ID NO: 47409 - DNA, 402 bp, Zea mays
acacgtgctaagcggcgatgccacagtcagctcttgctattcgtagcaattaagcatgcatctagaccggtctcttctatagcaaaatcaactaagtagagcttgtcggctaatacacccttataagctagagaaccatcacttcttctaaagacagacacatctacatttgtaaatagacacgtatatcccatatgacataattgacaacagatagtaaatattccaagactctcactcgaaacacacttgagatagagtgttattgtaattgaatttacctacctttaccttgccgatgcattaccaaatagtgatttggaatcttatctgacgtagaaggaacatttttatcacgtctatggtgacatcgctggataatcactgaccccgatgataacc

SEQ ID NO: 47410 - DNA, 112 bp, Zea mays
ccagcaaagcttatttgggtaacttcggggagttaagccggcacattacattgtcacgctgaaagaatggtttttcagccataaaaaaggaaagtgaacatatctacccctg

SEQ ID NO: 47411 - DNA, 260 bp, Zea mays
ccactttacgaaagacacttttgctcacgtcaagtgggtggctgtcgcgactcacacccaataccacaggaccaacttcgtgcaatgcagactaggcctacttctcgtaaactacacttgtcccccatgacactatcttcttcacataaggagactgccttttaaagtgccgccgacagacgaaagcctttggcgtcttcctaccctacctgtacccactagccacgactgccacaacaggcgggatcctttaataatcg

SEQ ID NO: 47412 - DNA, 136 bp, Zea mays
  unsure (1)..(136): unsure at all n locations
atcattcacacaagaacatcatgacgactgacatgccgctngagctacttcacatggatctatttggcccgatagacataagcatcggcgagagtaagtactgtctacttattgtggatgactattctcacttcac

SEQ ID NO: 47413 - DNA, 217 bp, Zea mays
tataactcttaggccttatggctcaacagcccaagacatggatgaatgcctaggtttcttatactatggttcaaatggagagtgatctacttttactaaactttacatgacttgtgatgcaattatgtgtgaatatattggctactacagctacttggaaattatagacatgaccaagtaaatgcttatgggatgagattctagattaagaacactc

SEQ ID NO: 47414 - DNA, 313 bp, Zea mays
  unsure (1)..(313): unsure at all n locations
cccactggntagaccttgtggctcagagaccatttgtaaattttttgctctgccaggccatgtacacactttgtttaataacaagaaatcagtttaacatattgcatatgttctagcgaaagcacgatggcagttttcactacttagagtatcccggctatatatgtcttgcagcaaaaactgttaccttctagggcctcaaattgctgctaaaaactgttttgctgtaaatgcattctagacctcttctgtgaaaaacttgtgtagttgccttgaacactctaaagggtcacggagtcccaattatcagttc

SEQ ID NO: 47415 - DNA, 330 bp, Zea mays
cccaacactgtcttatgggaacatactttacacaagaaattggctctacatttaatgttgcagtagctagagttaccttgcgacttataagactttacgaatgacaaagcggtatcttcatcatgctttgttctctttaggcattttgacgcaactgtcttattggcgataataaacctctgctcaaacttatattttgatttgtaacaagcatctacaaataactattctctattgctccttgactgatctgagggtctccgtgccttactttcaattgttgaagacgactctatataccttactttttgactgtttaaaaattcaata

SEQ ID NO: 47416 - DNA, 233 bp, Zea mays
tatttaatgtatactaactaatctctcaggaatgtggtgagaaaaaaatcttgcaaagcaactcattgagaagccagatgacacttcttaatgcaggctactatcttctatggtcttgagcactaaaaagaacctaaaatttaatatgtcctcttgaaaacccctatgaatgaatctcttttataacacactcttaatgtgtttccggagaccaaatcatatgctgcaataaa

SEQ ID NO: 47417 - DNA, 218 bp, Zea mays
aacactatcacagactggatttcgctttgtatctgatgctgactctcagctcgtggttaatcggactacactctatgtgggaaggtcattatgttatgggggcgatgtggttgacatacctaaaacgtgctacccaagagtgcgatgcattctctaatggttgtgctcgtttgtactcttgttgcattgtaacattacgcatttggtcatcctctgtt

SEQ ID NO: 47418 - DNA, 98 bp, Zea mays
ctcagctgacacacttacatatgattaatatgtcgaaatgcttgctttgtttcacatatcatagaaatacaatttatccattgagctaatctaactgg

SEQ ID NO: 47419 - DNA, 264 bp, Zea mays
attttcacggcacgagcgactttttttttttttcagccagcgaataaacaagaactacttcctctaagtatgacaccttttaaataacattataaaaatgggcattgtatgaacaacaatgataaattcaaaaatgaaaatggtgattttttttaacttacaactatcctccaagaaatcgggtctatttttgagaaaactttcctcgtgtggccgttattcactgaacgagtacacaaaatagctgttgccccgtggcttcaa

SEQ ID NO: 47420 - DNA, 257 bp, Zea mays
  unsure (1)..(257): unsure at all n locations
cttaaatttatttttttttttnnnnggttcttgcttcagacttacactagtcactaccattagtataactcatattcttttctctaacaggaagagtcctcgcgcgacactatctgggtctgttttcattcacacaacaacctagcctctatttagataggggtgcctcgcaccgcgaaattcttcgacgtacctaacagtgactcttcttgttccggtattaacccgtagacacacacatagtgctttgtttctac

SEQ ID NO: 47421 - DNA, 124 bp, Zea mays
ttagcactggctgacttatgttttgttttgcaagtgcttggggtatcttttggaaaggggcttaatctttcatctttgaagattttatgtatagggttactcaaaaattagtgttcaaacacca

SEQ ID NO: 47422 - DNA, 156 bp, Zea mays
atctgaacatgatatctcatttgtcatactctgtgaggataacatgtaacagatccaagtgaccctgtataatgagctaagggcactagaaacttgtatgtaatattgaatgccctgccagctgcttttttaatgctcatgattattgctccatta

SEQ ID NO: 47423 - DNA, 341 bp, Zea mays
  unsure (1)..(341): unsure at all n locations
tgtttttcggctattctacagacttctttttctcanangatttcgaagctagaatcatcaccccctgatgggctcaattgaactgtgaacatccttgttgttaaaggaatttttcacttgcttactaaaacatgtgattatttgactaggtcccaaaatacttttatcattgatgcttgtacgagcgaagttgatataatatcacatctgtgctgtgagcgaactttatgcgtgtcgacatgattagatggagttttttatctctactaacacttccctcacgactttctgcaaaaagaaaaaaaaaggtagctcccttgttctcaaggcctgcgcacttt

SEQ ID NO: 47424 - DNA, 250 bp, Zea mays
agacggcctaaacacactgcgttcgtcggcggctgccagcacgacgatggcttgattcgcgcgcggtgtggcttgctcctctttttatgttctgtttactgcccttgctgtgcggcacacacctcccagacccccgagttgatgccgccgcggataagctgaaaaatctgtaacaaatgcgcggaagtttgttctaaccgttggaaaacaccgagaaccagcgtgctaattggtgcacaaccagtgcgtt

SEQ ID NO: 47425 - DNA, 230 bp, Zea mays
gatcaattcctggagtctggcagcacttgtctgaccactgctttgtgtggaaccatgtctccattatagaggataagctccttcaggaggtgctcctgtccacacatcaatgaggtcttatatgggtatagaacaagagtcaatgcccaacattcccttagccagaggtcgggattgtgtggactggggctgcttcctgtgatgcccctgatcgatgggctgtgctctta

SEQ ID NO: 47426 - DNA, 123 bp, Zea mays
attactggactgcagagtacatgggacctcacagatggtacactcaacttgactgtgtaggacctcgccgcccattattagagagagatgctgtattgtatactttcccttacttggatcttt

SEQ ID NO: 47427 - DNA, 142 bp, Zea mays
ttaaaaaacaaagaaacccagctcacatgatacacaacaatcaatgtttgattaggaaaataagttttccaacactggtactcaatcggggctacatacactttgttggtctgatgaaacatctaatcactatgacctacgt

SEQ ID NO: 47428 - DNA, 171 bp, Zea mays
actgggaacatgcttctgttaaaaagaacagcagactccaaagattgatggattatctattaattgttacagcagctaatatttatgtcaatttacacaagtgttagatcactatcataatgcatggcgaacatatgtacataagatactgtcataaataagcagctggat

SEQ ID NO: 47429 - DNA, 71 bp, Zea mays
acaataacaaggcgagtcagttataaatctacagatactgaccttacatcctaatgcatgatatacttttt

SEQ ID NO: 47430 - DNA, 266 bp, Zea mays
ccaagccccatccgcaataagcaaatcaaactctaggagaactcccaaatacggaccaaaatcacaaaattatgtctaggaccaatggttagggacgttgatctatttctaatatgattatgtctcattctttacatatactctgacagcactcgagcttaaagaaaccagccaagtaatcatttcgttaggagagctttcaacttattcaggaattcagtaattttcacaaaagaggttccagtaacgtctagttctcaacatca

SEQ ID NO: 47431 - DNA, 174 bp, Zea mays
tctcgatcttgggattgactcttgagacctatacatgggttcgggcctttttgctgtatgttgacagctgggaagatactggacacggtgatctggggaacctttcttatttctttactatcttttactaccttctttcttgtctccctcagattataaagattcttctcctga

SEQ ID NO: 47432 - DNA, 231 bp, Zea mays
tcttttcttcgtctgttctacactattgggtgcagctaagaaaagcaattgtggtccagattcaatctgccaacctaagaacacactggacatattatagaattacaatagcttgacaatacccttcttcgaagccctggaacttctccaccctccatgtatctataaacttgtgcgcccaatacacgttattcccctaataagcgtgtagaccgaacttcctggtataca

SEQ ID NO: 47433 - DNA, 369 bp, Zea mays
caagcgacactgctggcgtctactgacacttggcgatatccaataatcacatagtcacgattggcgatatccattgtcaaccactggcattatccactatcgtcatataacactgaaaagggcgcatccttattacacagacttggacgaagatgacaagctaagcaatcagtgtacacacctccgtgcatactgtttatggcacagctgcagatgctcccatcatacttcactatatacgctgagccgaagaccccttctcccctatgatcagagttgcggagctgtctcgcgacttactgctttagaagtacacacatggtgacgcagagagatagacattgtcttcttctagtaatatgaccctag

SEQ ID NO: 47434 - DNA, 189 bp, Zea mays
accacaaacctaatgaccttgacaataaaaagcgaaattgaaataaaatgtggcattaaatgaaatattatacacataagatgggaagttggcagatattaataaacccaacagcttcatgtggactatagaatttgaatcaacttgccaaataacggttactttcctactaatctatgaccgaacaaa

SEQ ID NO: 47435 - DNA, 389 bp, Zea mays
gatgactgactgctagcgtccacacgactgcgagtatttttattcagaaacttttgctttatgtttacacaaggttctacaagtgctgccaatattgtataactttaatgacagattgaataaactaagttatggcgtaaacaaaaagataacctgtttgaaaagattactaacacaagtatgcgactactaatgaagtattgagttttaatcaagtaacgaagcagtatgcattaacgagagaagtatttaaaatgcagactaacaagtgatatctatgcacgcgaaactatcgtgacctgtaatatctatgaacccggctaacacaggatagctaaaaaccgctggatggctgattggcacgctctattccgaatgtacattttccc

SEQ ID NO: 47436 - DNA, 156 bp, Zea mays
cacgagctcactcgatttgtgtctctcgacctgcgcgcgttatttgttgctaatgatgaactatccttcagggaatattacttgcgccattcaccttagactcttgtctataatctcaagtggagaggaaattatgtgccaaaaatgcgacttctg

SEQ ID NO: 47437 - DNA, 336 bp, Zea mays
catacagcgaacgctttttgaaacacaataagtgcgcaatcacctatagcaggaacaactttttaaacaacacttcattgaataacataatccaatgaagtggcaaaagaatgtgcaagatactaaacataagataggcctaaatgcattactaccttacttgctgatcctacgatatgactggaacttttgcgagaggactttttccgctagtggcacctataacactgacccgtgcactgaggaatagctgatagaccactgtggcacagtagcatctaggccagcattgtctgttgccatctaaattctcttcatcagagttagctaggaaga

SEQ ID NO: 47438 - DNA, 307 bp, Zea mays
  unsure (1)..(307): unsure at all n locations
actgcgaacactacacactatatatgttcggtaatagtggtaactatgcttttaggaccttcgaacacgaaggccccacactatgtactaaaaatgatattattattgtttgatatagatctaataacaaatattcatgtgtttataatgaaataaacatagtacttgtcatatctctgatgaagtcactcacgcaatatcatactctcataataggtgtaacatatgatatatatttacataacatngtaacattattactatataaatatgttataacgtatacttataccctatctaactcact

SEQ ID NO: 47439 - DNA, 341 bp, Zea mays
gaaaacaatattagttcatattgaggcaaataattaccagacgtctgcattataagtttttgttagtcgtctatgcaatacaaaaaatcatgtgtaacatgccaaaaatgatttaggaactagttgaggtaattacattttctaacctacattactaattgttttttcctaaagaagcgtacggctccaggaggtacagcacgagagagataaaaaaatcatttgtagcatgcaaaaatgatttaggaacttgtttagataattacattttctaacctacattactaattgtttttccctaacgaagcgtacggctccaggaggtacaacgcgggagagat

SEQ ID NO: 47440 - DNA, 380 bp, Zea mays
  unsure (1)..(380): unsure at all n locations
ctccgatccttcccgctgtattatcgtcccccacgcctggggtggtagcctcggcgcaccttctcgtcgaggtgggctcgacggtcgcgacggtggtgctcgttgccgaggcgacctgnggccacaggcgctgagttccgcgttcgcccggtgtggaccgaggcttcccgcatgaaccgggaagtcgtgacgcgatgctccggngggtacccctgccttcgggaggcagagctctcggcccgtcggaccgcgacatcttccaggagattcttgagctctccctggatacgccgcccctcggtggtggatggtttcggcatcgctcggagtagtatcgctgctgcagccaggttctggccgaccccactggaagccggggg

SEQ ID NO: 47441 - DNA, 403 bp, Zea mays
  unsure (1)..(403): unsure at all n locations
cggatcttanatcgactgcggcatgcaagcttgtgagcagtataaatatatatttgtagaaggctgcttcggccgatcagccgaagcccatgcttctatgtgaagatatagcagagcaaaaggtattgctgggatctcaattatctgaggagcaggagaaaactctaataaggtttttgttcaacaacaaagatgtcttcgcatagtcagccaacgatctctgtggtgtcaacagggatgtcattgaacattcgctcaatgtcgatccatccttcagacccagaaagcagaggcttcggaaaatgtctgatgacaaagtagaaggtgctcggaatgaagtgaaaagacttcttagtgctggagtcatcatagaagtaaaatacccagaatggctagccaacac

SEQ ID NO: 47442 - DNA, 433 bp, Zea mays
  unsure (1)..(433): unsure at all n locations
cttctttctcattctttcttgagatcaatactcacttgtaaccgacgcaagagacaccaactgtgtggtggtccttgcggngaacgtttattcccggctgatttgagaagagaaagctcactcggtccgagggaccgtttgagagagggaaggggttgaaaaagaccccggcctttgtggcctcctcaacggngagtaggtttgcgagaaccgaacctcggtaaaacaaatccgcgtgtcacactctntattcacttgcgatttgttttgcaccctctctcgcgaactcgattatatttctaacgctaacccggcttgtagttgtgattaactntgtaaatctcagtttcgccctattcacccccctctaggcgactttcacttagtacttcacatttcttcagctactaatcataggaatcatgtaagatac

SEQ ID NO: 47443 - DNA, 361 bp, Zea mays
agcttgaacgaagtaacgattattatcatatacccattacctcggattgaagatctatttgatcagatgagaggagctaaagtattctcaaagatagatctaagattaggctatcatcagttgaagattcggactgaagatatacctaaaacaaccttcaccacaagatatggactatatgagtttttggtcatgtcttttggactgactaatgcaccagcttactttatgaacttgatgaataaactattcatggaataccttgaccattttgtggtggtattcgtcaacgacatactcagagtgaagaagcacatgaaggtcatctgagattagttctatagaaactttgagacaatca

SEQ ID NO: 47444 - DNA, 382 bp, Zea mays
ctcagcttcggaaactgacactcttcgatagagggccgattaccttcgtcctgttatggtcacgcacacatcccaaggcctcttcatcgattccaccaaagagcatggctcctggctggtagccacaggaaatgccatattcctgtagctccttcttctcggcctcagatagttcttgtccgaccaagttccgaagatcgaaacctttttcttccaaagcaccttcggcaattcctttccctttgtcaggcactgtggccatgacctgttctgcagccgcagatgtttcttttataggcatacccagtatcaatttataaatcccagataaggtagcctccaagttggcaagctttggtggcagtgcagcttctaccgatgt

SEQ ID NO: 47445 - DNA, 360 bp, Zea mays
agcttctaagggagacacgttattgtctaactaatgttcaattcgaaaaagatagaccttgtgcagcttgtcaagcaaggaaacaggtgggaggctctcatcacaccaaaaatgtgatgacgacatcaagacccttggagatgctgcatatggacctttttggacccgtcgcctatctgagcataggagggagtaagtatggtttagttattgttgatgatttttcccgcttcacttgggtgttctttttgcaggataagtctgaaacccaagggaccctcaagcgcttcctcaggagagctcaaaatgagtttgagctcaaggtgaagaagataaggagcgacaacgggtccgaattca

SEQ ID NO: 47446 - DNA, 385 bp, Zea mays
tactaagctgagcctggaagtagctaggctaatatatgcgaattgattcatgcctagctacgggtgcataggtttcaccagaatccaaaccttcgacttgtgaatacctcttggccacgagtcgagctatgttccttgtcaccacaccatgctcgtcttgtttgttgcggaagacccacttggttcctacaacattttggtcaggacgtggaactaagtgccatacctccgtccttgtgaaattgttgagctccttttgcattgccatcacccaatccgcatcttggagtgcttcctctaccctgtgtggctcaatagaggaaacaaaagagtaatgctcacaaaaatgtgcaacacgagatcgagtggttactcccttatgaat

SEQ ID NO: 47447 - DNA, 376 bp, Zea mays
  unsure (1)..(376): unsure at all n locations
agcttgataaagttgaggttgccttttctttatctttnggtgcagatgttgatcctagggcaatagaacttgccatgagaatcgccgaaagggtgttcctcaaaatgaaggaagatgaggcgaagaacagtattgaagaacaataaaatgatcgatggagaccaaacgacgaatccacctcttcacaaggtttgtctttcaaatccacttcccatatgtgctttgttgctaatgagagtgacagtgaaagcgaaagtgaggatgaggaggagcatgaaagtgatagtgaagatgaggatgatcttcaaaaattcttcgctcaactaagcaagaagaaccggatgagcttgctcaaactcatgaaaagaacggaaga

SEQ ID NO: 47448 - DNA, 403 bp, Zea mays
  unsure (1)..(403): unsure at all n locations
gcatgacttagttcgaggcttgaaagatgtgaagtttgaaaagaacaaattgtgtagctcttgtcaagccggtaagcaagtggcanatactcatccaaataacagtcaaatgtccactcatcgaccttcggaattacttcacatggatnntattgggcccacatcttttgtagtattggtggaattcttattgtcttgtgattgtggagactattcaagattacttgggttattttctacgagacaatccatgtgttgagacatcagtatttgtatatgctcaaatcattgattcacatcaaaggtaaagtatatgggcggaataaaatgaaaatgacatatgtatacanggataactgatctttcaaatactcgacaaaggatgtgaagaaataactctatg

SEQ ID NO: 47449 - DNA, 287 bp, Zea mays
tcctatgcatattttgtgctgactgcctgactcatccttcaaacactctatcttcttatgttatttgttcgactgattagtcaacattagatattacgagactccatgcctcctttcaaacactgaggagtgcatggggtacaaagcgggtaaattagattctaacttagggcttcttagtcttcttgttgacggatcatggtgatgtaggacctctctatcatgtatgagggtgctgagagtggtgcaacttcacttaacatcccttcggcactctcgggcttgat

SEQ ID NO: 47450 - DNA, 331 bp, Zea mays
cacacataactctgatggcaactcgagcaaacttttttttctcaccggaatatcttgaacaagctgggacaaaaacgggctgctttgatgacaaacttttgacaaccttctaccctccggcaactgccatatattaagacccggctggggatcggtgcgacatcaaacgacagttcaagctcgtgatggccatgagactcgcgatacctcaaaggaatttctgcgatgataatatgagagcatttctgcattacccttttgatgggtatcaaaagtcatactgatgtaatcttggaacactcgaatcctttatcaaacatttgatattaca

SEQ ID NO: 47451 - DNA, 387 bp, Zea mays
agctgcagcatgcaagcttataaagggagaacactttttatgactaaccaatgttcattttgagaaagacaggatttgcagcgcttgccaagcaagaaagcaagttggtactcatcatccacataagaacataatgacgaccgataggccactggagctcctacatatggatctattcggcccgattgcttacataagcatcggcgggagtaagtactgtctagtaattgtggatgattattctcgcttcacttgagtattctttttgcaggaaaaatctcaaacccaagagaccttaaagggattattgagacgggctcaaaatgagttctgcttaaggatcaagaaaataataagcgacaacgggacggagttcaagaactctca

SEQ ID NO: 47452 - DNA, 359 bp, Zea mays
  unsure (1)..(359): unsure at all n locations
tagcgcaagccttcgatgactcggttttttatctttctgccgaaccagtataaatgttgcgcccattgtgcacaccatccagagcccgaacacgcacaacaaatgtacttgttggaccgaggttcgaaacaccgacaagttcgataagttcttggccgctgtcgctctggtcaacctgcctatggcttatgatcaagatcagccgcgtcttcgtgatcattatttaggtaattttgtaaagaaattataccaatataataaaagttgtgacactatttgttatacacggagtcattatatacatggaattngatcctaacatacgtacgagatgcatatggatttctctttaatctgga

SEQ ID NO: 47453 - DNA, 366 bp, Zea mays
agcttctgctcaatagcagtttttgaaccgacttaaggaggaaaagactacttagtcctcgatagattgttcttaagttaatactaaatatgaagggcatgaatgtaattttacacgggctgcgtcctgtgcctataaatagatgaacaaaacccctatactgttcacgctgacttgtacttgctcgtgcgtcacacttgtactttcaccttctgtcaagccgaaggtacaaatgtaattcaatattgtttctgtttttccatgataatataatgaagatgagttaataatgttatgtgatggttcatgttgtttcttatattacatatgcttcatctgttattaacatatactgcgatgatgaac

SEQ ID NO: 47454 - DNA, 380 bp, Zea mays
  unsure (1)..(380): unsure at all n locations
tagcttggcgtanagacgaagatggagaatgaaaccgtcttatattggaaaagacagcttanccctcgatagcttactgtttagctagtgcctatatatagatgaacagtaacaccgtactattcacactgacttgtaagcactcgtacgtcactcttggattcttacattgtctcaagccgaaggtacaaatgtaatttaatatcatcaatgtttgttcatgatcatatactaagaatataggtaatctaatgatgtaatataattattcatgttctttttgtgtttcatatgtttctgcttctattcttacatattgaaatgatgaaggtatgtncttcataacccttcgctgaagaatcattatatctaatggagat

SEQ ID NO: 47455 - DNA, 363 bp, Zea mays
agcttggtgccaatggagatgctttttatccttgaagtcttggctgacaaactgcttgccggtgtcaactgttaattcggacggtactccgaagcggcaaacaatgttttgccaaaagaatttttgggcagtctttgatgttattgtggaaacagcccttgcctcgatccatttggtgaagtactcgacaacgacgaaggcgaacttaaggttcccctgagccatgggcaggggcccgacaatgtccatgccccagcgctggagaggccatgtgtgggcgatcagctttgtaaattgcgaggggctgcctgatcgaggagaaaacttctggcaggcttcgcatgaccttgtgacccgatttgc

SEQ ID NO: 47456 - DNA, 342 bp, Zea mays
catctcgggccggagctagcgccctaccttcagaacatatattatgattataaatcctccaatcctctctaggggaaccattatacgtataacctgatcgtatcatcgccgaacacgagaaccaaattctggtatcagtgtataaagaaaaaaaagcctacataaccctcaacctttaaagtatagcctaatttatcttctcaacttcataaccacattgttcaatccccacaactgtacgaaaccagacagataactctctgatcagttttagttggtgggtttgatgacgtgatattgatttacgtgacaccaattatctaatttagttctgtgatgcag

SEQ ID NO: 47457 - DNA, 376 bp, Zea mays
agcttagcaaaaggaacacatattttttataatcaccaagaagggattccatgtttaaccatgtcaaacaatttagtttccgaaatctattcagatagtggacagaatacaacaatcatcttatgaaattcataactcttaaacaatcaggcctatggttatgcactttttacacaagaaagataagaaaagcatctacaactttcttataacaaccataagatgattgtaacattaacttaagcaaaaatgcaatctctaaaatcggtacagaaattggacagattcagttactgaatttgtgaaaagcataacttctacacgatcagacttatggctgtcaaattttaacacaagtaagataataaagttatat

SEQ ID NO: 47458 - DNA, 412 bp, Zea mays
  unsure (1)..(412): unsure at all n locations
ntgaatctgtaggggcctctattcagctgggcgttcagacgttatactgcctccccgatcggtaagggagggactntntgtggttctccatggtaaaccactcgaggcgccatcccttaatactgtccttcanagggatatcaagatactcaactttcgtgcctcggtgaagttctaggctagcactgccaacaagctgatgatgtcctccagccatcctgngccgacagtggtagaggtacttccaaagcccacaatgaggaagaattccaaggaaagcttcacaagatgaacaaacacggcaatttggagaacagaattgtggtttaaatgagtaagaatcatattataaaagtcgagaaggccgcggaagaaaggagaagctggcagctctagtcctcgaatgagaaat

SEQ ID NO: 47459 - DNA, 360 bp, Zea mays
ctgcagcatgcagctgggaagatctttttcttaatgggctagtcggcgatgctagagccaacccatattagtcttagcaattaagcaagtatcgagttcagctctattaaaatcaactaagtatagctgaccctctaatactcccttaaatgctactaaatcatcacttcttctaaagacagtaacacatatatctgtaaaaagacaggtgtagcccattttgcataattgagaaacagaaagcaaattgtaatctaaagaatctacaagaaaaacattggaaatagaatggtcaggtgatatagcaattttaccaagtcctttgaccaaaccttgatttccatccccgaatgtgatagc

SEQ ID NO: 47460 - DNA, 283 bp, Zea mays
gaccgagccgagggattcccacgcctctgggatacgggtacctcactcatcccttccgcgagaagtaactctcactcacacaaacatccctgttaccgacagagtccagacgctcgaaacaagaggaaaaaagacgcagcttcgcaagcacggcgagggtgtgttttctggcctcggcggccgcagaaggcacacgctacaagacgatctgatcctgcaggctcgggtcttcacgctgaagggagccgtagcaccctcggcatcgacgacgtcttcagctatg

SEQ ID NO: 47461 - DNA, 343 bp, Zea mays
agctttatcaaatggacgtgaaaagtgccttcctcaatagacaaatcaaggaagaggtctatgttgagcaacctcccggctttgaagacagtgagtatcctaaccatgtctataagctctctaaggcgctttatgggctcaagcaagccccaagagcatggtatgaatgccttaaaaatttccttatcactaatggattcaaagtcggaaaggccgatcctactttgttcactaaaactcttgaaaatgacttgtttgtatgccaaatttatgttgatgatattatatttgggtctactaacgagtctacatgtgaagaatttagtaggatcatgacacaaaa

SEQ ID NO: 47462 - DNA, 335 bp, Zea mays
tatctgcgcatagcttcgtgatgatcttttccttcgtcacaatcgccttccgtcccattcaagcttcgtcttgaccatactcttatatactcgtaatccaattccgaagatacctgctcacacatttcacttggaaaacattgtcaaatcatgtttttgaggaccttcggaagccgaaggcccccaacaaagcaacacaattttctttcccttatgcattaaagtatatttattagatctaccatggtgaatagcatcagtatcaaactctcaaggatgtcccaacaaaagagagcaagcatccatagtcaccacatcgaaatcagcaaagtcat

SEQ ID NO: 47463 - DNA, 373 bp, Zea mays
gctctaagggagaccacgttttatgtctaaccaatgtacatttcgaaaaagatggaccttatgcagcttgtcaagcagggaaacaggtgggaggctctcatcacaccaaaaatgtgatgacaacatcaagacccctggagctgctacatatggacctcttcggacccgtcgcctatctgagcataggaggaagtaagtatggtctagttattgttgatgacttttcccgcttcacttgggtgttctttttgcaggataagtctgaaacccaagggaccctcaagcgcttcctcaggagagctcaaaatgaatttgagctcaaagtgaagaagataaggagcgacaacgggtccgaattcaagaatcttcaagt

SEQ ID NO: 47464 - DNA, 440 bp, Zea mays
  unsure (1)..(440): unsure at all n locations
ccgacttaaagatgaagagtcatactagatcctgaagagttactatagagttactgataaatgtaaagggcatcaatggtaatttacacgggctgcgtcccgtgcctataaataggtgaacagtactcccgtactgttcacgctgacttggcattcgctttttgcatcacatctgtacctttacttttcatcaattcaaagggacatcttataattgttattatgaatntgataaatagaaataagttaatgataatatctgtattattattcgcatttcatatatgtattcttctccatcatttatcgaacttacgaaggtcttttctttcgtaaccttcgtccagaattcattatatctgaagggacataatgtctntaacgacgaaggactnctaatattaacactctntatgttaccttgttcttaactcttagca

SEQ ID NO: 47465 - DNA, 347 bp, Zea mays
  unsure (1)..(347): unsure at all n locations
ggtccaagatgagactaccttctgngggccaggtcaccaattctttcttaagtatactggcatccagcctcgacacgtcgagcctacatccgagggggccaagtaccagggaaaagttggtaacgacacacacagcanaggcaaatagcgtacagataagttctgtcaccgttagattaatacttcccaaaagtaccttacaaaaccagaaaatattacaagccgcaccccagcggaactcttgccctgtttctgcagatctagctactgatcatcggcaggatcccactggaagtgctcggccacgactttcacagagtcttgtatgccctaacgggcggcgtctt

SEQ ID NO: 47466 - DNA, 520 bp, Zea mays
  unsure (1)..(520): unsure at all n locations
ctaagctatgccagattanacatgggcaattgatttgaatcatgcttattatgcgtgcgattaaaataataataataatgtgtggcttgtgtagtgaggtgatgacatgccgtaagtagtcatcgcttcctctatatctttgagtcgggtcaatgcgcattatgtgttcatcgagatacacttcgcacctagtgtaaggttgtgttcacgacgctgagtagacgcttcaaagtatcaagtaggaggtcggtgcattaagtgaatgttatatatatgttgtgtctcggatggcgataataaaggcaagccgacgtgtatgtcgtaatagctggctatgtcgttgctctggttcgccgacttgttagatgggttgggtaagctcgtaatcacgatgaatcgcttattgtggtctaaattcatatgggtatggtcgcgggtaaaaatttgtagtgttcatgtgatgtctatggtaaaatgcaaaatattgngtgaaaagcgcatcgatatanacacatatacc

SEQ ID NO: 47467 - DNA, 258 bp, Zea mays
ttgtgtgaactgcagattttttttcaccggtgcgccagcacgaggattagctctgtacgtgctaaacttgaaacctggatctcttgaatgtgccgtggctggggggatttataacgccaccacccaactaaccctttggtgaaagcttcttgtcgcatggctcaccggaccttccgtgcgcccccggacacatgtgtgtgcaccaagcacgtcaccattcacgttggattccaaccgaaggacctctttttagggcct

SEQ ID NO: 47468 - DNA, 387 bp, Zea mays
  unsure (1)..(387): unsure at all n locations
ngacacaccattgacatcttactaagagtgctgagatcaattatatttatttcatttctcaacatgcaagagcggcgtttatcaataggcttagtgaaaatatccgctaattggatttccgacctcactccttctaagatgatagatcctttaacaacatgatctctaacgaagtgatgaccgatatcaatgtgcttggtgcgagagtgttgccaggattattagcaattgtaacagcactctcattatgacacaaccaagggaccttatctagaactactgcataatccataagagattgtttatatacaaacttgtgtgaacacgcacctgctgaatgaattacgttcagcagctgacatcgaacactattatgctttttgatgt

SEQ ID NO: 47469 - DNA, 350 bp, Zea mays
tatatgtggatttgcttttgaatctgtccaatttccttcagcctttctggcagcttcctgacttccatgaatagcaataggcccttggtccgaaggtatcttcatcatagatatgctggatgaagaattgcttcaaatgcgttgagtgttccacgaccaatgattgcattgtagggatattccatgtcaacaatatcaaacaacctgttcagttcttgtattgtggacaaatccgaaggtcactggcattgtgatcttgccaagtgctacaatctgccttcctccgaaaccacagatgatgtagctgaggtgcccgatctttcggcgagaggagataattccgatttggc

SEQ ID NO: 47470 - DNA, 252 bp, Zea mays
actagcgtgtaccgcgaagcgaaggtgtattcaagatacaacctagtatgcttctattatataactacatattgatagcatcacacaagcattcatgtatatgtattgctatgtatagaaaacgatgaagagactgtcgtctaacaagaacgtggcacgatgctgagaatctcaccggtgagaacaacgtatagtttgcatttgtggacacacccagaaccacctaaacacatgcaagcccggtgcattacc

SEQ ID NO: 47471 - DNA, 428 bp, Zea mays
  unsure (1)..(428): unsure at all n locations
agtcttagcaactaagcaagtgtcgagttcagctctttcaaaatctaccaagtatagctgaccctctaacactcccttaaaagctattgaatcgtcacttcttctatagacagtaacaccaatatcagtaaaaagacagttgtagcccattctacataattgggatacggaaagcacattgtaatctaaagaatctacaagaaaaacattggaaatagtatggtcaggtgatatagcaattttacccaaccctttgaccaaaccttgatttccatccncgaatgtgatagctcgttggcgatcttgngtttctcatatgaggagaacatcctacttctcccggcatgtggtttggcacccgctgcgagtatcaacttgacncccgatgataaacctacaaacaatttagttctgacttaggtaccaac

SEQ ID NO: 47472 - DNA, 289 bp, Zea mays
agttcaaaaccccgccggcgcacgtggaccgggtaagtctctgcgccatcttccgattcactgcacagatagcctctacgtgaccccgtggagctcaccgtaccgcctaatcgaactagatcgccgtgcgtaggccggagctctcaccgtcgacgtactcacccgcctgcgcacgtggaccggccgattctggccacctccgccatcgagccgtacaccgctgtgaccgctaggacctcccggagccaaccctgcccctgaccggacctctctcgccgccggtaagccg

SEQ ID NO: 47473 - DNA, 376 bp, Zea mays
agctttaagataatcaactctacttctagtacggtaaatgcgagttttggattggcgaagtgccatttcttggacatatcatttcgaatggagggatatcagtggatcctgctaaagtcaaggagatagtggtgtggagcatacccactacggttacggaagaccgaagtttcttgggacttgcaggatattattggagatttattgaaggattttctaagattgctaagcccatgacatcgcttttggagaaaggaagagaattcaagtggaatgagaagtgccaagagagctttgatcaattgaaggagagattgatgtctccaccagtattgattatgccagatctgcagaagggatttgatatttactgtga

SEQ ID NO: 47474 - DNA, 502 bp, Zea mays
  unsure (1)..(502): unsure at all n locations
gagatattagcgcaagttaatcaagtctatgatgcgagctcttgtgaacacaaataatcacagagaggaacaacacaagagacacgcgattttntatcccatggttcgcccaagtaacacttgcctacttccacgttgtggcgtcccaatggacgagggttgcactcaacccctttcaagtgatctgatgatcaacttgaataccacggtcttttcctttcaagtgttttcccgtttgcgaggaatctccacaatttggagcctctcgcccttacaatagatatcacaaagaaagcatagagtaagggttgggaagagcaacacacacaagactcatatacgcagcacactcacgcacacaagtgaagactcgagctcaaatgaccacacagggagttcacgactcgaatggacctcanatctctaacacaacgaagcanatgcgcgggagcagagtctagatgctttagaatactcaatgaatgctggggtaactcctcat

SEQ ID NO: 47475 - DNA, 310 bp, Zea mays
  unsure (1)..(310): unsure at all n locations
ccggatccttaagtcacctgcggcatgaagcttgaatgcgacctgnatttttttctcccgtttcgcatggcagagtgcgtccgactcaatcgtggattgcggtgaagatgtggtgggccagggggtggctacctgttgttgaaggggaatggtggctccgtggctggatacgattagggtttacggttgagggggtgcctacctgggcctaacggttgaaacctgcgcctaacggttggaacagacgccgctcgactcagtcgtaaccacgggcaacgcctgccttttaaggcccgcttgtttaacccca

SEQ ID NO: 47476 - DNA, 302 bp, Zea mays
gatgtaatatttcgtacaaagagtgcctgatatcaataaaggtacaattctccaaaaaaccagctatgccgtagcgatatcttcgagcgcgaaacaacgaaattatcaaggggtcagttttctaaaacctccagtacgaaggtaagatccatcacccactaattgtgaaaaaagctccgaagtcgttcctaaaggaatgcagagctcaagtgtgattcacccagtaatggtgaaataagctccgaagtcgttcctaatgaaatgcagagctaaagtgtgattcacccacctatgggtgaaaa

SEQ ID NO: 47477 - DNA, 363 bp, Zea mays
agcttagcaaatcacagggcactttatctaaaaattgagtgagcgggagtggttggccagaaagtgtgtcaaatgagtttgcggtatgcccgtatttatacgccaagagcgttgaaaattcagagaccccgcttgtcagtgattgttgctattctagcaaagggaaggtgttttttcggaccttcggcgtaaagccttcgtccaggtcgcaatctgaattcgttattataaacaaattaatattgcgaggggctactgttggggaccttcggcatccgaaggtcctcaaaaacaggatttaacagtatttctggagtacaatgtgtaaacaggtatcttcggactaaagtcggcattgctgta

SEQ ID NO: 47478 - DNA, 329 bp, Zea mays
actaagctgcagcctcgacccaccggcttaccggggcctgagttctatctcaccggacttcggtcttccgccgccgcgcgtggaccgagctatccagtgagtctccgcccaattcctttcgctcatgtcttctctggcaaaccgaggacctccctgacctatttgattgaactaccttcccgtgaccaggccggtcttctcgtcgccgacgagcatacccgcctgtgcgcgtggaccgaccgactccggccatctccgtcgacgttccgcacacacgtagagattctcgcgacctcctcttcaccctcgaccactttaccggaacagtc

SEQ ID NO: 47479 - DNA, 363 bp, Zea mays
agctttaattggttcaaggtattttgttgaatcattcccaggtttaacttctccatttcttgacataatgtgatttcagaggtctttactgtaagacaatggcaggaagccttgcgacttagtgcatctgccaccacgttggcctttcctgggtgatagtggatttctaattcataatccttaatcagctcaagccatcttctctgcctcatgtttagttctgactgggtaaaaatatacttcagacttttatgatctatatatatgtggtagatatttcccagcagataatgacgccatattttaagggcgtgaaccatagcagctaattctaagtcatgagttggataatgtttctcatgc

SEQ ID NO: 47480 - DNA, 487 bp, Zea mays
  unsure (1)..(487): unsure at all n locations
aagacagctctttggacctgaaattattcaagaggcagaagaacaagttcaaatgattanggagaacttgataatatcagagagagagcgggtgtgcatgggtaacggttcggcgcactgacgaggcgggcccgctaggcacatgggaagaagggcgcgagggcagangaaactggtgccgacagcccgatcctactatgcanatagaaggagagagagcgcgccgggatgggaacaccgctgacaagtggaaccacctgttaggcggcgcgggcgcgcggcctatctgggccggctggagctgcttggctatttctttttcccctggaatactaattggttttccatttctttttctctaggggtttcaattcaaactcaaaccaagtttcanatccaactaattcaaacatgtgcatcaattcaaggaagtatctagctcaacatgatgcaacatttcatgactcataatttttagtaataaata

SEQ ID NO: 47481 - DNA, 372 bp, Zea mays
agcttagccatgacaaatctatgtgaatttagtgccaaccaatcatttttagccaaaagggtgaactaacaattaaatgattgcttgcagatttttgggacagcaacacagcagctacttgttttaatcataacttttcaaatattaacccaaaaatagcaaactaagattttatggaaagcttaaaaagtgctctacaacattggtattgtcatcacagcacgattaaacacttagcaaggttgaattgtgcaaacacagcagctctgtccagatttggacagatgcagacttgcaacttcaaaaattcacaacaaaagattcagacatccaaacaaagtgatcctagactttctggaaagctaattaaat

SEQ ID NO: 47482 - DNA, 340 bp, Zea mays
  unsure (1)..(340): unsure at all n locations
agctcccatgcctcaggataacgagggttacattttataccctgccggctatcccgagcacaaaattaggagaattcactctaggaagtctcactctggctctcatcatgcttttatgtataagagtgaggcatctaattctaggcaatcaacccatgctaaattgcctaggaagaaaactcctattgcatcaaatgaacccaacatttcatttaagacttttgatgcatcatatgttntaactaataaatcaggcaatgtagttgccaaatatgttgngggcaaacacaaggggtcaaagacttgtgtttgggtacccaaggtgcttgtttctaatgtc

SEQ ID NO: 47483 - DNA, 359 bp, Zea mays
agcttgattaaaaatttccatgcttagagattcatacaagtaatttttggctctagcattcaaatgaacttccttttcttcactcgtggtgagcttttcgggatttttaggtggtttcatcccgtcacgagtgactctccaaacacctagatcaacgacctctaggtaacaagccattctagcactataatatgagaagttagtgccgttgacgtgtggtggcctatgggtatccatccccttcctctaaaaagcgttgactcttttagcggtgaagctaaaacgtttcaaatgagccaaaccaggctctgatactaattgaaggaaacgatgatgcctaagagggcgaggggtgaatt

SEQ ID NO: 47484 - DNA, 338 bp, Zea mays
  unsure (1)..(338): unsure at all n locations
ngaagccatggtaagtagcataggctaataatatactaattgactcaagcctagctacgggtgcataggtttcaccgaaatccaaaccttcgacttgggagtatcccttggccacaagtcgagctttggtccttgtcaccacaccatgctcgtcttgcttgttgcggaacacccacttggttcctacaacattttgattaagacgtggaaccaaatgccatacctcattcctcgtgaagnntgtgagctcctcttgcatcgncaccacccaatccgaatcttgtagtgctttctctaccctgtgtggctcaatagaggaaacanaagagtaatgcaca

SEQ ID NO: 47485 - DNA, 374 bp, Zea mays
gctttgatcaattaaaggaaatttgatatcaccactagtgttggttatgccagatctacagaagggatttgacatttattgtgatgcatgtggccaaggattgagatgtgtgctcatgcaagaaggacatgtgatcgcctacgcgtctcgtcagttgcggaaacatgagttgaactaccccactcatgatttagaactggcagccgttgtgcatgcacttaagatttggagacattacattatgggaaccaagtgccaagtgtacacggatcataagagtttgaagtatatattcactcagaaggatctcaaccttatgcaacgccgttggttagagcttattaaggattatgatttggagattcactatcacc

SEQ ID NO: 47486 - DNA, 368 bp, Zea mays
  unsure (1)..(368): unsure at all n locations
gcttatcaactctacgctcatctaagccaagaagataaagcggtcatgctcaaacttctaaaaagagcgagagagcagagcgaagctcttcacatgctagaagagattctcaccataaaaatgcaatgctttgaagagttgactaaagaacatgaggagctaaagtgctctcatgttgatttggtccanaggtatgaatctatttcaattgagcaagataactccttattntgtgtcgctcaattagtaaataggaatgccttgcttaaggaccaagtagaaaggctaaaaatggtaaatctagtctttcaagaaaaacatgatatgcttctatgctctcataaaaatcttatggatgatcatatcat

SEQ ID NO: 47487 - DNA, 369 bp, Zea mays
gcttatcgtagagttgtatcaaatttttatgaaaaacgacggctcgccgattaaccctaaaaaaaatagagtctttttttgttgagagctagagcactaaaaacctggtttttatcggctccacctatatttttcccatacataattagaaagaaacgcggagagaatctattttatcaaacaagtagcaaaatggctccgatcccttaaaaaatctagagtccgaactgtttttgaggaactagagctcggcccaacggaggcctacatgtcaaggaccctgcttctgactcacatgttaggaaccgtctggtctgattcttcttgctgtcaagagttgtctaataactatattgtactaatctacta

SEQ ID NO: 47488 - DNA, 490 bp, Zea mays
  unsure (1)..(490): unsure at all n locations
gaaaatggctggtgacgaagctcgaagccatcttaagccagtgagaaacttatatttgttacttttaccttctccttgaaatatgcaccttattctgttctttaacatgtgcaggatgacgaagctgaagtatgacgaagctgaagtatgacgacctgaagcttaatagttgttataatagactnttcctgcaaaaattctggagagatccttgtaatataattatggaaaaaacttatgtaaatttgtacataccttataatatatcttgtctcctttatccgtgtagaatctgctttgctgtgaacgaaactacacttttgagccgaaggcgaaaaacaccttcccttcttttcgacacaacgaagcatgaaaaaatttctctntcttcannagttttcctcattgccgaagcatctatctctntgtgtggtatgatgatgatgaatctatatatgtctaaatgaatggttatgaatgcaaatgacat

SEQ ID NO: 47489 - DNA, 367 bp, Zea mays
agcttcgctatctaatactattatgtctaaataatatgttttttgttgtgtacaatacgaatatgaatttagtagctctaattaagataaacttcgctcacgctgacatacatatgctaggatcctataaatatttattctttggtgcgacacttggtaattccgcttcagcgcagcgaggcatggcagggagaaaaataggtaccatatattaacatgtgttataaaaggactagaatagatatgctgatttttgggacccttaatttttttgaggccctgcctgggcctagtcacccggttggtcggctaatgtctgcatgtattatttatgtcggcctcagcgatctcctggaaccgaagtttt

SEQ ID NO: 47490 - DNA, 413 bp, Zea mays
  unsure (1)..(413): unsure at all n locations
ctaagctgggagatctcatccaacatgggctagtcggcggtgccagatcctacccatgttagtcttagcaattaagcaagtgtcgagttcagctctatcaaaatctaccaagtatagctgaccctctaacactcccttaaatgctattgaatcatcacttcttctaaagacagtgacaccaatatcagtaaatagacagttgtagcccatttgacataattgagatacggaaagcacattgtaatctaaagagtctacaagaaaaacattggaaatagaatggtcaggggatatagcaattntacccaaacctttgaccaaaccttgatttccatccncgaatgtgatcgctctnntgggatcttggttttctcgatgaggaaacatcctttctccctgcatgtggttggcac

SEQ ID NO: 47491 - DNA, 371 bp, Zea mays
tgccagcttatcaagtctactttcatatggatccggaattatagtcatatctgttctgaggccgccgtaatcattgttttcttatcgagacatttcctgccttttctgcccatggtgctgcgtcaccctattttggcccaatgggtcgtatatcaagttagatccattagggacgtatcctagggttgcagcacgaccccaatacccttgtggtcgtcctcccatgtttataaaccccctagccgccaccaagaacagcgggttttgtttagatcaagtttagctctcgctacttgcttgcaagcgcgcgtgctagttcagccgcccgtcttcttgtcttcggaaccccaccatattggagttcgatcttt

SEQ ID NO: 47492 - DNA, 384 bp, Zea mays
  unsure (1)..(384): unsure at all n locations
tttctactacatgtcatcctcanactgatggtcaaactatagttgtgaatagaactntgtctactatgttaagggcagttctaaagaagaatattaagatgtgggaggactgtttgcctcatgttgaatttgcttataatcgatcattgcattctactataaagatgtgcccatttcagattgtatatggctngttgcctcgtgctcctattgatttaatgcctctgccatcttctgacaaactaaattctgatgctactacgcgtgctgaattgatgttaaaactgcatgaaactactaaagaaaacatagagcgtatgaatgctagatataagtttgctagtgataaaggtagaaaggacataaattctgaacctggagatt

SEQ ID NO: 47493 - DNA, 369 bp, Zea mays
agcttgctggcttgctgcagtgttctctataacactataattagcacagcagcagcacttcagagttcagacttaagtactgaatatacaaccacatagttgctggcttgctggcaggactactgccttgtttttgctggttgcacattgcactagcactagcacctgaatacctgatcaagaaacacaataaacaaccacatatgacatataagcattttactaaccatttataagtactgaatataagtattgaattgcaatgtatattactagttgctctccacaaagctttttggaaatgagatagtctccatgtcatcctcatcaggtacctgttaaaaaaaatacaagctccaatcaaaatct

SEQ ID NO: 47494 - DNA, 487 bp, Zea mays
  unsure (1)..(487): unsure at all n locations
ctcagcttagcggaatggacctgctagacctacctacgttggctgtctttcaacactggcagtggaagncaaaaaatgcagaacacggaaaaacaaagggatatgcatgagagaggtcaaatcaaggacctaagaagagaacgaggttggtgatccgaccttntaatcaaaatcgttcttcacctcgcccaccttcatatccattcaagcagcctgtctttattcgtcctactgctgcccccgctcctaccaatcagccgagtgcccctggtactcgtttccctgcccttcccagttcttccaatgggtgcttcaattgtggaaagtacggacacttcatcaaggactgcccatacccaaagccaananaaccaactnttagcagaactctgggaantaaaccaaggaaggggaacacgaccaatacttcaacgggcaacaatttcaagaaaatcggacagaattattatacccaagtggctactac

SEQ ID NO: 47495 - DNA, 367 bp, Zea mays
agcttggcagagcgagccgtatacaccgagccccattaacggcacgacggctaagagaactacaccccggatcctctaattcattttgagctctccttaggaagcgctttagggtcccttgggtttctgttttatcctgcaaaaagaatacccaagtgaagcgggaaaaatcatcaacaataacaagaccatacttacttcccccgatgttgaggtaggcgacgggtccgaagaggtccatgtgaagtagctccaaaggccttgatgtggtcatcacatttttgctatgatgagaacttcccacctgtttacctacttgacaagctgcacaaggtctatatttttcgaaagttacgttggttagacc

SEQ ID NO: 47496 - DNA, 314 bp, Zea mays
tcatcaccgtcggccctacgttcttacacacgtacgaatgcgacgtggagtgcgtgaagtacgccgaggccctcgccgaatccgaggccctcatcgccgacctggagagcctctctaaggaggcgccagacgtgaagcgccacgccggcaacttctagccagcgaagacggttaaatccgtccctctcgaccccagcaacgacgcctccaagcagatccggatcggctctgagctcgatcccaaataggaagcagtgctcgtcgactttctccgcgcaaacgccgatggcttcgcgtggagtccctcggacatg

SEQ ID NO: 47497 - DNA, 375 bp, Zea mays
  unsure (1)..(375): unsure at all n locations
agcttatgccgagattantttttgtcttttcaaaacgaaaccatgcttatctagacgtgaggataaataataaataattctcggcattgagtataagaggagtgtgacaatgcccgaaacacgtcatcactttcctcttatgttttctaaagtcaaagtcaacaatgccgggggtactaagtagtaactctaggcaacgcaggggttccaaaatagataaaatcgggtgatgtggtacttgtcaagcatgatacaggttgagtcacttaggatataaattgacgctcgacatgtgaggtctcctaaaatattgtgtttaaagtgactngtgctttgtccaccttaagttgataaaatggttaagaaaaacttatt

SEQ ID NO: 47498 - DNA, 375 bp, Zea mays
agcttaaccttgtaacgaggatattttacctttgtttcaaaggtggagggtccttaagtctctttgaaatccttaagggtaattgcttaaaatgattccaacatgctttcataagtgcataagtctatcatgagcatcacactttttattacacattgcacttcacagtttctatggtgacgatatgttctcattatgtgcacttggcatttaaggccaaaatttgtactcctctcaaggcacatatttaggggaagcaatctacattatatagaactgtttaagcttatttgacatatcctttcaaccatgtctctttcctttggtacatttgcatatttcctatctctattgtgccaaggctaagacttatat

SEQ ID NO: 47499 - DNA, 506 bp, Zea mays
  unsure (1)..(506): unsure at all n locations
ctaagctctccgcagcgagcgttcgacaaganaacaagatctctatgcttatcttgaagccgaagctcagcanaattcggatttgagaaaactactgacaaatcttcaagaanaatgcctggaatttagcaacaagtgcattctacgactaagaaagatttttcactcagttggagccagtagcgaanaatttaccccctcagctgaagatctaccaaaaaccttcgaacacattgagggggagattgacgagctcgacgaagtcatagctgggcatggcgacttctgtgcctgggtggcttctcgagggactgctgcagccttcctgaagggctggctgtgatcatgggaaaatgtcaacaggccaaatttcactttgtcaccatcaatcctggatgacatccctgatctcgcccgaagcatctcgaatcgatttgtaaaatgatatggacanaaggtggtcgagagaaagctggagacgaagctcgtagccaccttgatccagt

SEQ ID NO: 47500 - DNA, 346 bp, Zea mays
gcttcgacagtcgatctacggacattgtcagcagaaactctgaaattggggtatgtgcaagccctaacatgattacacctagcttttagcaaaactgaagcagtgcttcgggtgcctatccaagcacaacagtcctctcgcgctgagagaacacttttgaaagcacgagtctcgctgagcacccacctcatcaggccttccaagtcacgatctgaaaaaattcttctctttagataaagccctggtagaggagaaggttttcagcaactcattatgacatttattgtcgagggtgtgacagttgaccagcaggattcggtagttttcattaagtcccctcacatga

SEQ ID NO: 47501 - DNA, 450 bp, Zea mays
  unsure (1)..(450): unsure at all n locations
ctanagactacaacttcgtcatctntcggctctggaatacctcttttcatcaaaccgaactagcttgtcatcattctctccaaaatatccctaatttttcattaaaaccaaatcttcagccgtaactgtggatttcccgaactcaatatggttgcgtttgcttggatttaaaatgtcgtcatcatcctcgtcttcactgtcagcttcggcagtggttggttcaacttcgtcatcagcaacatcttttgttgggtctatttctttntcatcttgaacaatcaacccggaacgcctcatcatttctaagatggnggttgtctcagaagtcccaacctcttccccttcgcgtgttaccctagcaatggaccatactctagccatttcagttattgacaaacgaagattaaatgatngaacatntgtccaaagcttgagcaacaagttcacagg

SEQ ID NO: 47502 - DNA, 366 bp, Zea mays
  unsure (1)..(366): unsure at all n locations
agctntaaccatgggcaagaactttttgccaagcgtgagccgactcctccatcggaggagtttggtgactcaaaatactcggaggaagagttctcctccgagcccgaggggtctccggctcccgtctctcccccggcgtcgtccgatgactcggacgactcccaggggatagccgcggaggtctggacctatatccgggccgtcgagcgcgccgggctcgaaggctcggatgagtcggagtactcctcggatgaggaggactcggacggcggcgacgagggtgaagacgacgacgacgacgatgacgacgacgacgacggcgacggcagtggcagaggcggcggcgacggcagcagggacagcacc

SEQ ID NO: 47503 - DNA, 421 bp, Zea mays
cgattctctaagtacctgtagcactctatgatcatagactatcctcacagacaaacacgagtcttttgtgcgcactttgttctcactcatgtacacctgagaaaacttctcggtcggtcacccatcccaagattactctatgccaagcacgcttaacctataggttctttcgagataggcttcttaaaaagaagatatgccttgtttgtatgagtactctattaattgtattaagcattggaccaatatatcacataatccatctgtgctaggatatcataacccttccttcttagaagatcgacgtcctcgccggtcaaacccaaacaaggaacctttcctcttggcacacatgtgtctagtgttctcatatgccatgccatgtaaccacttcaggcccacatgcatcatgcgccatata

SEQ ID NO: 47504 - DNA, 334 bp, Zea mays
tatttttcgtctttagctcaaaagactagttagatctggtttcacaagcaacaaagcatctagagtaaaataaaaaaacatgatgaaaagaaaaacattatgttacaataaacaattgttcaactacataaatcttcgtttcaaatgtacagaagtcccttcaacctaatagttcagctaatgcttggacactttcttaattcttcatcttatttatcttcttcttcgcttatttgctctaccaagagagagaagaagtaagtattaaagaaagtttttgaatacagcttagacaatacaagtttaaagacaaacctttcacatgtatgcttcg

SEQ ID NO: 47505 - DNA, 399 bp, Zea mays
tgctatctaatcgagagatgtctaaagactattccaaagaaatgtagaaataaatgcaaaatcgaggctttcatcgcataggcatacattctagaagaggtgtcaaacttcacaacaacttaatgtggtgacaaactgttgagcgtgcataatccaccctctcattacaatgatggcgacaatgaattgaacctcagcatatttcgagggcaactcaaaagcgcaagtggtttgaccaccaacaacctgatacatgaagagtggcgccatatcatgctatatgtattgacccaaccttgaagaagtgatgccatacatggaacaatgtcttcatgaattctggcgacgatcaagggacgcgactccatatgaatatgatactcttcttataaaggatgt

SEQ ID NO: 47506 - DNA, 373 bp, Zea mays
agctttctggaggccatcaattttgtatatagtaccttctcaagctcagggtaatttctttttgacggactaagtacttcagagatgaagtacactaggacttgcttcttcgcttggccattgtttctcctgcactagcgttgcactgactgcagcgtgggaagcaactacataaaagcaatggggctcctgatgaaggtggagtcaatgttgtcagttctattagatattgcttcagctcttcgaaagccttttgctgagttggtccccattgaaagacttcgactgattttagcacttcgaaaaatggcaggttcttctctgctgatcttgagatgaatctatcgagggatgccctccttcaagttaatat

SEQ ID NO: 47507 - DNA, 443 bp, Zea mays
  unsure (1)..(443): unsure at all n locations
ctcagcttaccatattcccaaagccatatatccttgagagtctttttcttngacnggaacactcgtgaaagtacactccgtactcanggttttcaaacccatatttttgtaggtgatgaaactgctgagctctgctgtttctgttccaaggtggttcccaagcaggaggaggaaaactaaggcttacctgngaaggtgtttttccttccagtgatgtaataataagtttatacccgtatatgtaataatcaactctctctatattntacttatgaatgtgaactatgttattgtaatcctttccgcttactacgatgatatgtaatgcctgtgtgatggattaagcgctcttgggcggtatcatagatatataggaaatcggacctgccgggtcattgtgcgcaccttgcgagatacatgangtcctcatgacaaagacatat

SEQ ID NO: 47508 - DNA, 329 bp, Zea mays
aagaatttggagcccgggacatacaagctggccaacaaatcaagagcgagggcctacaaacaaccgccttggaaccatccaacaagctaccgtcgcttttacccttaagacgtcttcaagacgttcatatacctcattatctatacatacacaaataaagtctaaccgtcaaggaagggtcagccttgcctcggcaaagcccaaccctccctcgggggctagaagggggaaccccctctgcgcgtcacaattttcctcggaaaaagtctttctgccagaacggctttcgcgcttttcgactgcttcgatagcggaacctgaaaacaatg

SEQ ID NO: 47509 - DNA, 523 bp, Zea mays
  unsure (1)..(523): unsure at all n locations
ctaagcttcgcatggcccactctntcataggtgggaatactctatatgcttagatttcttgcactaagtccctagtgccaatgtgctccacgagaactctaaattcagctagagcaatttgcgttggaccctctggtgtcatgttgcacggnggtctggtctctccgaagatcaattctaacagactctgcaccagcttctccttgtcatcgtcaactnttgacgtaaaccattcagatttccaaccagctggccacttgcttcggtaattgatcactggaaattntgtagtcttgtggtaggcaaagttgtagcagccaaagttttcatgtagcccatcacctttagccttggtctgataatgaagctcgtgcactcggcagaaaccttcggcaaatggttccaccccttggcttctgagagctcanatataaacgctaagcctaacgaatagcgtaggagttagctaatgaaggtagatccanacttcttcacacataacaatcatctattcaatgggatc

SEQ ID NO: 47510 - DNA, 368 bp, Zea mays
  unsure (1)..(368): unsure at all n locations
agcttctagatagtggnaccttttttttgatatggctataagaaaatatggttttgaggaaaataaggaagataattgcatttatgcaaagtttaagaatgcaaagtatatcttcctagttctatatgtagatgaaatgctattggctagtggtgataagaacctactgcaagtgacaaagaagtttctttcctcaaattttaatatgaaagacataggagaatcctcctatgtgctaggaatagaaatccatagagacaaaacaaagaaattttaggacttccatagaaagcatacataatatactaaagatgtatggtatgcacaagtgtagaccattgtctacgccaatagtcaaggatgataac

SEQ ID NO: 47511 - DNA, 365 bp, Zea mays
  unsure (1)..(365): unsure at all n locations
ctcaagcttattatcagacagaaacaacttggaaggagcaacatctcttcttcttctactgttacaactttgcatactggaaagacgctcggtatcgtgccctggcataccgaagcaagtagtcgatgcttggacaagggagtggttctatgtaaagaatgatctagaaaagagggaatacaacagagatatcgtctagaggcctataaaaccacacttcagcataaagagaccagcatgtgtcattgatgacgaagctcaagctgctgtgatggattntaacatcgtgtgcagttggtacaagggatcttgtgcagcagcatctggcatttagcatgtgaccactttctactaattgngaatgg

SEQ ID NO: 47512 - DNA, 365 bp, Zea mays
  unsure (1)..(365): unsure at all n locations
agcttcatatcatcagcatcttctgttagctnggcaagcatattttggcacccatcgcttgatgggtccatcaaggttagtcaacaaagatctaggaacccaaaagtcctttgtgttagcgcttggtaaactcattacctttctagcacaagttgcaattttgggttgcctagttacatgtgaaataattgacaagctagaagtgggatagttacccatgggacaatccttgcattgatgtcccttctttcggcatatgtagcaaaggcgatcttcaagttttgaagatttattctttccttgtttcttgcttgctacatggttagttaataatttcttttctaacactatgcttttttgtttta

SEQ ID NO: 47513 - DNA, 478 bp, Zea mays
  unsure (1)..(478): unsure at all n locations
tcagcccaacagcagagttcttntcggccgcctgcgccgatggttattatctccatnggcttcngnggaagggttggagaccagccaagaataatatattgcctattctgtggtgaagacaagggccatactaccaggatgtgccatgttaccatccataagcagaaggaaatagcgcaagcagcagcgcaacagagtcagccgaagcangtcatgcatactgcttcgtatcactcaccttatattccagagtatgtaggcaatcaccctgcagcttctgttgcttcggcgagtcaatcccaagcatcctggcagcaacctccaccgccaccgccgacccatcgagggcaacagccagaatggagtcaacacaatcatcttcagagggatttcatagaggaatccgaagctcgcacagtcaacagcactatgccagagtcgaagcacagttatttgacaatatcctacctcaatagca

SEQ ID NO: 47514 - DNA, 374 bp, Zea mays
  unsure (1)..(374): unsure at all n locations
agctttgggcttctcttgggggaattggtcaccgncacggccgtaccggagggggtgcggaggatgcggccgcaccgggcccccaaaaacatagggcctcttagtcactggacgctagcactttttcctgttaaacatatctattctaaacacaaatacgcaaagagcgatacgctatcgaccagtttcgtttagattgttaaactaatgtctcaattccttatcgaatactccatccgttttaaaatagtatttgttttagctcttgatttttatgtttatattcaactatataataatgaatccactaaagaagcaaaacaaattctattttgatatagagagagtattatttactatacacatgatggttg

SEQ ID NO: 47515 - DNA, 379 bp, Zea mays
  unsure (1)..(379): unsure at all n locations
tattatacaaaccaagggaggcacaaactctctccgagaagttataagcaaaagatcctaagtggaggaccgagtcctcccgcacttcagtcttgtttttcttcctttggaaccaccttggcacagaagcagcaaaagtctgctacttcctcacctaanaacaacgaagggataaaccctgagtatggaattactcagcaagtcttacccgactaaagaaaagactctcaagggtatgctggttatatgggagtcaaggtaagtcttttcaatattcaaagaccctgttttgcagaaatgcttactaaagtggatccttaanaatccaatcttattngtcaagttagggtaaaatacctgcactagaagtctttctacc

SEQ ID NO: 47516 - DNA, 366 bp, Zea mays
agcttatgaagattcttcatccctacatgggctagtcggcggtgccagagccaacccatgttagtcttagcaattaagcatgtgtcgagctcagctctatcaaaatctactaagtatagctgaccctctaacacacccttaaatgctattgaatcatcacttcttctaaagacagtgacacctacatcagtaaaaagacagttgtagcccatttgacataattgggaaacagaaagcaagttgtaatctaaagaatctacaagaaaaacattggaaatagaatggtcaggagatatagcaattttacccaatcctttgaccaaaccttgatttccatccccgaatgtgatagctcgttggggatct

SEQ ID NO: 47517 - DNA, 422 bp, Zea mays
  unsure (1)..(422): unsure at all n locations
tctatttaatacgactatacttaaacatctatntcgaatcttgttaaatatgataactattaaaaaggtcattntaaagttagaaacaaattctctaattctttaataagaaacctatatttaccaatataactataaatttctttattaggaaagcatgggtgcctaattaagtcattttaacataataaaattctattctttcgattntctccttaaatagaatntatacgtatactaaaaattgtttatttaatttctttgacattaatattctaagaagtaattgtaaattactaaataagacttttaataacataatcatgtaattatttatctaaatggttttgttactaaaaaggtgatctactatntactcttactaatttagaaaactcacacgtgaatngattataaatata

SEQ ID NO: 47518 - DNA, 364 bp, Zea mays
agcttgtcaagcacattttgtttcttcatcgcttgatgggtctgttaaggttagtgaacaaagatctaggaacccaagtgtcctttgtgctagcgcttggtaaacttgttacctttctagcacaagttgcaattttgggttgcctagttacatgaaaattaattgacaagctaggagtggaattgttaccaatgggacaatccttgcattgatgtccctttcttcggcatgtgtagcataggcgtttttcaagttttgaagttttcttctttccttgcttgttgcctgctacatggttagtaaaaattttcttttctaaccctatgcctttttgttttaaatggggacaagatctaagcaagtg

SEQ ID NO: 47519 - DNA, 354 bp, Zea mays
  unsure (1)..(354): unsure at all n locations
cttatntacttcctacatgcctttaatgtcttccttttcggttgttgatgccaaagggggagaaagtttgggaccaaagcaatgaatacatatcaaacaccagaccaaagcaatgaatacatatcaaacaccaaacaccactaatttaaaattctatatctccaagtgactttttcaagtggttttggttatttggtccanaaaaataggaagtaagtgaattatggagttagggggaggcttaagtccataatatcacattgtggggacaatcatgcatcttagcaagtagattgcatatcttcactcanatacttgtattattngcttggctttggttgtgtgcatcaatca

SEQ ID NO: 47520 - DNA, 342 bp, Zea mays
ccagccacaagaggcagaggcgccaggggcttctgcggaagattcggagatcaaccaagaagaatcttttgcttgttttgcggtgagaacaaaggccataccaccaggatgtgccatgttaccatccagaagcaaaaggaaatagccgaagccgcagcacagcaagctcagccgaagcaggtcatgcatactgcttcgtatcattcaccgtacatcccagaatatgtgggcaatcaccctgcagtttctgttgcttcggcgagtcaacctcaagcttcctggcaacagcctccgccttcaccttcgctgcaacaaggccagcagccagaagggagccagtat

SEQ ID NO: 47521 - DNA, 509 bp, Zea mays
  unsure (1)..(509): unsure at all n locations
ggggactgaatcgaagatctatgcacataatcaatgcagaacttattagtttcttatcccactttccaatccttccagtagcttctctgtttctcataatatccttcacaggctatgatgaaggaacaattatatggtacgcttganaataatgtcgaagcttcctggaggccattaaaacagcatacagcaccttctccaattctgtattaattttctttaacaaactgagaacttcggaaacaaagtatactggagcctgctttttcaattgcccttcaagcttctcctgaacaagtgccgcacttaccgcagagtgcgaagctgccacatataacagcagaggagcccctagcgctggtggaagttaaagtgttaaatctatcanatactgtntcagttcttcaaagggcttttgctgagctgatccncattgaaaaacttcggctgacttcagcacctcacaaaatggtacatctctctctgctgatctggatataaatcaatca

SEQ ID NO: 47522 - DNA, 316 bp, Zea mays
actctcccgaccataaggagttactcggtgtccttgtactctccacctcccaacagagacctcatttctcgccaacgcgtattcgacgagtcggatttccttttttcctccacacccactggctctctcaccgagctcgacgagttcttcgaacccgaacctgtgttccccatccgtaccggttcgatcacttcgtcgactagagcggacctgcctgcgccggccacccccgcactgacacgtgcggcctaagggccctttgtgctgctctcccccgcacagccacgtggcggacttggagttcccatgtcgactc

SEQ ID NO: 47523 - DNA, 334 bp, Zea mays
actctcttgaacactacgacgagatctcatcgacggggacgttcgttttaaccaacggaaaagcttcttatacacgtggagaaaatttcatatcttgaaaatgcttcgcaaaatcctattcattaacctctggctatttgctataagactttgatatagattattaaagaattgccaatacaaacaagtggcccatcgtggcccaaatgttaaaatacagaaacatcctgcatatttatagtaaatattgctcattcaaacacctttgccttcatatgcaacagtcaatatgccttctatttgctctgcttggtggcatcataccaaaatggga

SEQ ID NO: 47524 - DNA, 365 bp, Zea mays
  unsure (1)..(365): unsure at all n locations
agctttctcaacattacttgcttctcatttaatatnctttaatttccataattggctcaagtcataattttaaacttttcattccctttttcttattttcttgaattttgctcatggggctcacttaaggttcttaattagggttgcacattcttatcttttcaaagactcaattgttttgatcatgttacttttaagtatatacttggtgaattctttattacttaagttgttttgatgctcatgcttactttggttcacataagatgatggttcttggtttggtatttgagaaaaaccctgagtgacactggggtgtcacagccttccccccttaaaagaatctcgtcccgagattcgggcca

SEQ ID NO: 47525 - DNA, 333 bp, Zea mays
  unsure (1)..(333): unsure at all n locations
taccttngatcatgtctctntcatttggtacaaatgcatatttcttattcttcttgtgccaaggctaagattaatgtctttctaagaatatttccatgattagtctaagattggaagggaaatggagtaatcggcaaaggccaggcttccactatgactgccggtatcatttatcctctgctctactcatgtatttacattcatatcttgtacaaggcctctaattctctttngttttggcgcttaatgccaaagggggagagagtaatacgcccaaagaanaaggaacgcaccaccaccctgtttttctgttttccaatntcaaatcatttg

SEQ ID NO: 47526 - DNA, 368 bp, Zea mays
  unsure (1)..(368): unsure at all n locations
agcttatgaagatgcttcatccttttttgggctagtcggcggtgccagagccaacccatgttagtcttagcaattaaacatgtgtcgagctcagctctatcaaaatctactaagtatagctgaccctctaacacacctttaaatgctattgaatcatcacttcttctaaagacagtgacacctatatcagtaaaaagacagttgtagcccatttgacataattgggaaacagaaagcaagttgtaatctaatgaatcaacaagaaaaacattggaaatggagtggtcaggtgaaatagcaattntacccaaacctttgaccaacccttgatttccatccccgaatgtgatagctcgttggggatcttt

SEQ ID NO: 47527 - DNA, 398 bp, Zea mays
tcttaagtcacctgctgcatgcaagcatgtaccctcctgcatgcactgtttttttcttcatgattgctttcatccgatttatgacaatgtgaataatgcaggcgattgttgagaacgctgagaggagtgatatccctgacctcgactagaaaaaggcagttctcatcttttctaagtcatttataactgctatacaactatgctcacctttaattgtctatgggttaatgctggtggcttcgctaccgttttgctgatataaatgatggcaatagctgccatatattctgcattatgttgggctgccctaatacaaacttgcaacagtattgcatcgtggttccagctactagtctatataaaaaaacttggtcggtaggggaaagaccatccccatg

SEQ ID NO: 47528 - DNA, 424 bp, Zea mays
  unsure (1)..(424): unsure at all n locations
atgatctctgtgcagcttatgacattgcttttcttcttcctaaaacctgaccaccctcatgggacattgttggctggttactttgctaaggtacttttcgcatctgtttatttctggaacaaaaatctctacttgcacgactcaaaatgtaatttgctgattcttgtactgacatcctanatgatcatgttcttaattttgcaggtagtaatatgtttggcgatgaggaagacacttcaactagttcattatgtgcangttngagtagctcttttatcacgatttagctcttctattgctcatctagattctctgtgacacactgatataccctttgtttgtcattcgtcttgtaatgcattgctatatctaataatgcttactctgactatacatataatgaacaccactactccttgaacat

SEQ ID NO: 47529 - DNA, 312 bp, Zea mays
cctttgatatcttctcgcgcggtcagatcattcttcacataaaaccattctgtcatccagtcgccgggccatctcttccgaaaggtcggcacgggacagcttgacccggaccgagaaacgaaattgtagcagccaacattattgtgatattgctccttaccccaaggttttgtttcgtatgataattcgtgtatattgtagaaactttttgcatcaagcttcagaccttggcttctcacggcccacacgaagatattcagccttataattgcctccggggtaagttgatggagatagacattgaatactttc

SEQ ID NO: 47530 - DNA, 444 bp, Zea mays
  unsure (1)..(444): unsure at all n locations
ctcagcttcgtattacanaccgacttanagatagaatgacgctgtagttcatttagtctgagtcaatgttgtaaactcttataaggagtatactngtaattcctcacacgctgcgtcctgtgcctataaatagtgaacagtattcctttactgttcacgcattctggtaattgcaatcgcatctttcgggaaccaacctttgccaaggcagaggtattattgtattcaataattcaatatattaagtaaatataatataattcgtctatgatttatttacccttttataccctgtattttatgttatctcatacaatctattgaaattgtattacgaagaattaagcttcgtaattatattctcatcaaccttcgtccaaggctcattatcctcganggaataatatttcatggatgaaggacgttaacatctaacattttatg

SEQ ID NO: 47531 - DNA, 281 bp, Zea mays
gccaagccaacccatttagtctagcattaagctagtgtcggttcagctctatcaaatctacaagtatagctgacccttacactccttaaaagctatggatatcacttcttctaagacaggaacctatatataaaaagacagtttgtagcccatttgacataattggaaacagaaagcaagtgtatctaggaatcaacaagaaaaacatggaatagaatggcaggagatatacaatttacccaatctttgatcaaccttgatccatcccgaatgtgaagctc

SEQ ID NO: 47532 - DNA, 443 bp, Zea mays
  unsure (1)..(443): unsure at all n locations
aactcaagcttctanagggagaacatgtgataggtctaactaatgtgcaatncttatattatagaccttgngcagcttgtcaagcagggaaacaggtgggaggctctcatcacaccaaanatgtgatgacaacatcaagacccttggagatgctgcatatnggaccttttggacccgtcgcctatctgagcataggaggaagtaagtatggtttagttattgttgatgactnttcccgcttcacttgggtgttctttttgcaggaaaagtccgaaacccaagggaccctcanacgcttcctcaggagagctcaaaatgagtttgagctcatagtgaagaagataaggagcgacaacggatccgagttcaagaaccttcaagtgaaggagttncttgaagaggaagggatcaagcacgagttctncgctcctacacaccacagc

SEQ ID NO: 47533 - DNA, 368 bp, Zea mays
  unsure (1)..(368): unsure at all n locations
agctttgtatcaacatgaacttgtcnattggttggataactaaatgtgcgctattttgtttgaatgttgcatctacttcaatttttaactacatctaaaactttccaatgaaatacatgcaatccaaacaagcactaaacttgcccttatagcttcatcagagtggaacttatccaaaggctaaacaggtaatgactattgtcggcgcaaacaaattcaacgttcaatctagtgtatttgtatagttgaagactactatataaataacaaccataaggaaatgtcatatcacaaacaacgaggcaacatgccacagagtttcaagcactcctacggaataaaaacactatatcttcaaatcaagatgt

SEQ ID NO: 47534 - DNA, 366 bp, Zea mays
  unsure (1)..(366): unsure at all n locations
ctagcattaagcatgcatctagatcggcattctctttcacaaatcaactaaatagagcttgccatctagaacgctcctacaagctagtgaaccatcactccttctaaagacatatatatctatatttgtgaataaacaattataacccatcttacataattgactcataggtaacaaattatacccgagtgattcaactaaaaacacattacagatagaatgtttggatgtgatgactatctttcccaatcctttgaccttgccttggttcccatctccaaagatgatcgaatcctgggaatccttngttntgacgtangaggtgaaacatttcttctctnccatcatgtggtttgtgcatcccct

SEQ ID NO: 47535 - DNA, 387 bp, Zea mays
ggatccttaagtcagctgcagcatgcaagcttatgaagatcatcatttttttttgtgcaggcggcgatgctagagccggcctatgttactcttagccactcagccagtggcaagctcagtctctattaaaaccaactaaggttagctgactctccaacacctccttagatgctatacaaatcatcatttcctccaaagacagcaacccctatatctgtaaaaaagacaattgtggcccattttgcataattgagaaactgaaagcaggttgtaatccaaggaatctacaagaaaaacattggacattgcatggtgcggagatatagctattctaccaagtcctttgaccaaacctttatttccattcccgaatgtgatagctctttg

SEQ ID NO: 47536 - DNA, 360 bp, Zea mays
agcttgcctcggtttatccttctttatatcccactcatacgggagcctccggccatgggtctatgtgaaaacattcactcctctatacagggaatattggaatacgcaagaagatactagaatacaagggatggtcagaccacatggctcaagcagtattatggtattgaaaagggaaattaggacatgatataggggttgggacgaatggggaactagattcattcttatccagaacaatgatacaaggcatccttacaatagtggatcttgggtcctcccaaatccataactctgataatcattcctaaatgttagaaagtgtgttctctgtgtgtgggccggaaccactgttgggtt

SEQ ID NO: 47537 - DNA, 433 bp, Zea mays
  unsure (1)..(433): unsure at all n locations
accgacttanagatagaatgagctgttattctatattatgttgagtcgctgntgtaaatatttacgaggggtatgattgtaattgctcacaggttgtgccttgtgtctataaatagtgaacaatattcctttactgttcacgcattctggtaattgcaatcacattactcggaaactattctttgtcaaggcaaaggtataaatgtatctaaacattatatttgaatatatcaagtttatataatgggtaaatgatgttatttactctaatttacttgtcttaaatgctntatgtctcgtgttattttatattatctctgagagttcaattacgaagataaaatcttcgtattataaccttctttcgaagatcattacatcctcggggaaataatgcttcagcgaacgaaggacattaatatntaacatctat

SEQ ID NO: 47538 - DNA, 317 bp, Zea mays
agctttaagtgggacatgttcttttatatgtaagacattcgtagcgaagacgcgaccacttgagcccttgaccctttacgaacaacaggcaagacctgtctgaaatctccaccgaagacaatggttttaccaccaaatggaagtgcggggcgacccattatatcgcgcatgctattgtccagtgcctccacggcttgtctcttagtcatagaagcctcgtcccagataatgagagatgctttccgtagcaactctgctgttccactctgcttcgtgaagctacatacagcgccatcgtcaatagtgagtggtatctt

SEQ ID NO: 47539 - DNA, 343 bp, Zea mays
  unsure (1)..(343): unsure at all n locations
ctaagctgctcggccttcttctttctcctagcggaactttcttattactaccccacttaanaagaatgagggtagatctctngaatcttggagacttgaactccttgaagtacctcataacaagggtgttacgggaccttcttctgctgttactgcttgagtaggctgcagagaaatgactgacataaggttgattctgggacaaccttcttctcatcttctcttcgctatcttcttttctcttctcacttttcactgcctctatctttctctttgctcttcccactggaggattctatcaaagagtattaccatcatacagaggaggaaaccaaagactatg

SEQ ID NO: 47540 - DNA, 366 bp, Zea mays
agcttgacaatgaggatttgtgcttttgtcatcaagagcttccgccaaattctcaaacaaaggaggggaaaggactacaaatcccgctccaagaaagtgtgctacaaatgtggtaagcccggtcattttatcgcaaaatgtccattatctagtgatagcgacaggggcgacgacaagaaggggagaagaaaggagaagaagaggtattacaagaagaagggtggcgacgctcatgtatgccgcgagtgggactcggacgagagctcctccgactcctcctccgacgaggacgccgccaacatcgtcgtcaccaagggacttctcttccccaacgtcggccacaagtgcctcatggcaaaggacgac

SEQ ID NO: 47541 - DNA, 325 bp, Zea mays
  unsure (1)..(325): unsure at all n locations
agcgcatgccaagcatggaagcaagttggcactcatcatccgcataagaacataatgacgaccgacaggccactggagctcctgcacatggatctattcggcccgatcgcttacaaaagcatcggcgggagtaagtactgtctagttattgtggatgattattctcgcttcacttgggtattctttgtacaggataaatctcacacccaagagaccttataaggattcttgagacggcgctcaaatgagttcggcttatggatcaagacnattagaagcgacaacgggacggagttcaagaactctcatatcgaaagcttccttg

SEQ ID NO: 47542 - DNA, 368 bp, Zea mays
  unsure (1)..(368): unsure at all n locations
agcttggcggagcttttgtaagtaatttatattttctagctttggtacctacaatcttctgtacttccccatttgtctgatgcttcaagttggtctttttttctgtaggctcccaagccatcttctggacctcacaagtccagggagtgcctgcctctgatcctcatcatcaggaacatgctcaagtatgcactgacgtattgtgaggtcatttctatcctgatgcaacgccatgtacttgttgatggcaaggtcaggactgacaagacctaccctgctgggttcatgggtatgcctaaatctctattaatgcataaagatacctatacacatattntggttgctgatttatggcgtcatttttttgc

SEQ ID NO: 47543 - DNA, 384 bp, Zea mays
  unsure (1)..(384): unsure at all n locations
tgcaatgaagcctttgagcaatngaagacactattgaccactgctccggtattagctcaaccggacatcactaagcctttcgatgtgtattgtgatgcatctggcagtgggctcggctgtgtactgatgcaagagggccgagtgattgcgtatgcttcaaggcagttgcgccgacatgaggagcactatccaactcatgatctggagttagctgctgtggttcatgccctanagatttggcgtcactatctgctgggaaatatctgtcacatatatacaaatcataaaagtttgaagtacatcttcacccagtcagagttaaatatgaggcanagacgatggcttgagctcattaaagactatgaatnggagatccattatcac

SEQ ID NO: 47544 - DNA, 333 bp, Zea mays
cagcttcattggagaggcgctgaaaatattcaaagtctatcttcaccaacttacccctgaggcaatcataaggctgaatatcttcgtgtgggccgagagaagccaaggtctgaagcctgatgcaaaaagtttctgcaatatacacgaattatcatacgaaacaaaaccttggggtaaggaacagtatcacaataattttggctgctacaagcttcgttctcggtcctggtcaagctgtcccgtgccaacctttcggaagaggtggcccggcgactggatgacaaaatggttttatgtgaagaatgacctgaagctccataaaatattaaatgt

SEQ ID NO: 47545 - DNA, 288 bp, Zea mays
  unsure (1)..(288): unsure at all n locations
gaccgagcnatccagagagaccccgcccaactccttgcactcatatcttctctggcatcccatggacctccctgacccatttgattgaactatctcgccgtgaccaggccggcctcctcgccgccgacgagcatacccgcctgcgcgcgtggaccgaccgactccggccatcttcgacggcgtcccgcacaccgttgtgatccccgagacctccccttcgtcctcgaccacttcaccggagcaatctcgccgccggtaagcccctccgcctttcttccgcgcggtact

SEQ ID NO: 47546 - DNA, 306 bp, Zea mays
atgcgaacatcccatcaacactacattgaagttggtcatgacctactacatctaatagtagactatcccatccaccttcgttctatcaatgaagcatgcagaatatattttacaagctcatttatcaggagcctaggacacaatcacctaaaaaacggaaaaaaaaattatgtacatccccggatgcaaacacgctcctttacagcccctcacattcatcacttgaaggcccacaaaaacatattaaaattttcaacttaaccttctagcaatctgattttcttctatttatatggaccaccaggt

SEQ ID NO: 47547 - DNA, 368 bp, Zea mays
  unsure (1)..(368): unsure at all n locations
gaagatagtaagtattctaaccatgtctataagctctctaaggcgctttatgggctcaagcaagccccaagagcatggtatgaatgccttagagattttcttattgcaaatggattcaaagtcggaatagccgatcctacactctttaccaaaacacttgaaaatgatttgtttgatgccaaatctatgttgatgatatcatatttgggtctactaacgaatctacttgtaaataatntagtacgatcatgactcagaaattctagatgtcgatgatggcggagtcgaatatttttacgattcatgtgaacaacccaagacggcaccttattgccaaacgaagacactcagacatctaacaaattgga

SEQ ID NO: 47548 - DNA, 388 bp, Zea mays
  unsure (1)..(388): unsure at all n locations
cttaagcaccgagcagcagcttccatctttgaactaattctttttgtatcgntctttgccgnnggccaatagaatcctgacctgaaaaccttcccgactagtgttctggatgctgcgtgtattccacattgcccagcatggacctcctccagaagttgcttcccagtggacgggagaacgcacttcatgaggacgcccgatgcaccccttctgtataatgtctccccaatgagtgtatagtgagccgtctgcctggcaattcgctctgccgagttcttgttgtctggttcttcttcattctttatatacttaatgatcggccttctccagtcatcagagtctgactcgggttgacctatgatgttgcactcttctgtttgatccattg

SEQ ID NO: 47549 - DNA, 151 bp, Zea mays
gaatgggtggatacaattgagggtatgtgtaatgaaatcttgggcaattatacgaaaaaagaagatcaactgatgacagcagccttcggcacccggcccgaactaaggttaaactgaataatggatgcttttagaatttgaatacccggac

SEQ ID NO: 47550 - DNA, 236 bp, Zea mays
agcatgcgtcgttagcagcattgtcttgttattatggacgtttagacggtcgaggtgttgttattgacacggaattcaagttctcttctaggaggttgctgaaactaacggctacagtttactacttccaagtatcttatttaatatttttctttataagaacttctaatgtcgccattgatattgtgcaggatgattgagattgggcaaaaaagcttttcttaaatatttctaca

SEQ ID NO: 47551 - DNA, 515 bp, Zea mays
  unsure (1)..(515): unsure at all n locations
ctgcagcaagtgtcaagctcaataagaaaagtgnctctatagatgaagaaatcaacatgagccttgganaaaggtaaagaatcaattaatcatgttgtttgcactgatcatctctccatgtcattcaagcaccaaaagggaagagggaaaaggaggtgcttcatatgcaaggagataggccacctcatcgcgtcttgtccgtacaaaaacaangatgaanggacaagaagttgttttttatgcaacaataaggaccacacgatcacttcatgtccggtcatgaagaatcaaggatgtgcattctccaaggtgaccctcaccaaggaaagtgacacacagcaagcgtcatgtcacgttgagcgacgcttctgctacaaatatggtgagcaaggtcatatatccaaggtatgttataaaggtaagattcctacgcaagtgaatttgtgtcaatcttattcgcgtacgagacccanattatacactngtgctagatctataacgagatcacctagaat

SEQ ID NO: 47552 - DNA, 364 bp, Zea mays
  unsure (1)..(364): unsure at all n locations
acctgcagcatgcaagcttgtaacatataagtcaatagataaacgctgcttcggcagagcagncgaagcctatgctcttgtgtgaagatataacagatcaaagggtaccgctggtatctcagttatctaatgaacaagaaaagactctgctaagatttttgttcaacaacaaggatgtcttcgcttggacagctaatgatctctgtggtgttaacagagatatcgttgaacattcactcaatgtggatccatctttcaggccaaggaagcaaagacttcacaacatgtctgaggataaagccaaaggtgctcggaatgaagtaaaaagacttctcagtgttggtgttatcagagaagtaacata

SEQ ID NO: 47553 - DNA, 383 bp, Zea mays
  unsure (1)..(383): unsure at all n locations
ctcagcttaagggtgcctctngngctctctgatagtagtgtttgttatatattctgccaanggngaacagtcatcccatttctgtgggaactctaaaacacatgctcacaacatgtcttcaagtatctggttcactctctcagtcttcccactggtttgaggatgatagaccgaactgtggagcaacttagtacccaaagacttgtggagttcttcccagaatttggatacaaattgacgtccatgatccgacactattgtctttggaacaccgtgcaaactgagaatacgagtaatatatagttccgcatatgtggccactgtatactataccttgactgggagaaagtgggcgatctttgtacgtcatcaatgattaccca

SEQ ID NO: 47554 - DNA, 378 bp, Zea mays
  unsure (1)..(378): unsure at all n locations
agcttgtggatgtaagcgattttttgtttgatggagcnctgggaggaacccttccaatgtgctggacctgacacctttgtgacgactgtcactatctcggtcttggaagagcattttttactagttgccaggagaaaaagttctcaaccatgttggcatcttctatgaataatattaagttaaaaaaatataggtgtactataaacattattttttaaaaatttctttattctaaattataaaactttttagcttatacaaatacatgattagctcttgatgtctatataaatatacattatgataggatataaaattaatacttataattataacagatggagtatttgtatataatgatacttattgcgaatcata

SEQ ID NO: 47555 - DNA, 367 bp, Zea mays
  unsure (1)..(367): unsure at all n locations
agcttctcacaatactcttttagttcgttgngagaggtcttgagctcctcaaaagacacttggaggtttttatacaattccttcaaggtcttaaacttttctttttctttgtgcatgtagtcatcggcctcacctaacattctaacaagatcatcatatgaatagccatcatcctcaacatcatcaacatcaccatcatcatctataccatttaaatcggtgatgatttttaccttagcatctccctttgccatgagacaatgaggggatgagaaaagtgaaggggcttccttgatggcaattccggcattaagcttggatgaggtgtcatcatcatctgagctatcatctgaatcccattcaacta

SEQ ID NO: 47556 - DNA, 336 bp, Zea mays
acatgtttatagatatttggtgagggcatgaatgtaatttccaccgggctgcgtcccgtgcctataaatagatgaacagtaacccccgtactggtcacgctgacttgtattcacttgtgtgtcacacttggacttttgccttctatcaacgccgaagggtacaaatataacatcgatattgttcatgttcatttatgatgacataataaagatatattaatgatgtcatatgattatacatgttatttctcatgttctatatgcttcttctttcattaatatatactgcgatgataaaatacgtcttcatgacattcgtccgagatcatatattct

SEQ ID NO: 47557 - DNA, 368 bp, Zea mays
cagcttccaaggttgctaaactttttttattagcgcacaagatctggtcgaatgtgcgcaagaacaagatgagtaccttcaagattacatcgttagattccatcggctctaggcttaggcactgactataccaaatgaagtttttattgaggcaatgatcaagggacatcatctagacccatcgactcgatacttcaccaaaaaacctcatcaatgcctatagaagttacttcagaaaatggatgagtatataagggtagacaatgatttttgctagagaagagagaaagcccaagtatacatataaatggctaggggcttcggagggaggtttcattcgagacacatccgaagcatccacatccaag

SEQ ID NO: 47558 - DNA, 337 bp, Zea mays
  unsure (1)..(337): unsure at all n locations
cttacagattaaaggatatggacgacaacgacattcctagatcttggaatgcggatgagcttcgacgatactatgtgtgacttgatggtaactttttattttttacctatggcaccctttttctttctatagggggagaaagggttttaatggggccataacatgtaattnttcttctcttattcagctctacgagagtaagattccccaaaccatgtaaaatgtaaaatctgagcatgcaccatcgagtgcagagaaagaaaagaaatagggagaagctcgaaagtcgtccctaaggggatgcagagcatgacgaagctacaaaaaagtcgttccc

SEQ ID NO: 47559 - DNA, 355 bp, Zea mays
agctttattctagtgtacccattttctctaagaataccttcaggcgtatgtccgaaggtttctgcgtctgagggcacaagcgccaacagtgcctaatgaaattgtcattgaggccatgattaaaggacttcggccgggaccttcagcgcaatactttgctaggaagccaccacaaactttggagaagctgctccagaagatggatgagtatatccgagctgacaatgacttccgccaaagaagggaggaggcattcaagttctctgaaatgaccaggggcttcagaggaagatttcatccgaggcacgtcaggtcaattcataactccactcaaagtgatgatagagggagccca

SEQ ID NO: 47560 - DNA, 371 bp, Zea mays
  unsure (1)..(371): unsure at all n locations
agatcttacccatttgtaacatctttcctgattgagtgctaatatggatattcgtntgagttcattttccaacttttgagtattaaccacgagtgccaatatgtccttcatggaaaatgttccatcagtcatggatgaatctacctgatctggttatacgtagccacaactaatataacgggttttttttgttgacataaaggtgcatttattggtgtctcattagaagggaatctagttgccacacggatggatgctaatctgcggttntatggtgacccatatctaacaaccagcgacattctcacggggaatgtggaacaaccaaatgctggcaaatttctttacactgcactggataatctatactc

SEQ ID NO: 47561 - DNA, 368 bp, Zea mays
agctttatcaaatagactttatatgtgccttcctcaatggaccaatcaaggaagaggtctatgttgagcaacctcccgactttgaagatagtgagtatcctaaccatgtgtataaactctctaaggtgctttatgggcttaagcaagccccaagagcatggtatgaatgcctaagagattttctgatcactaatggcttcaaagtcggaaaagccgatcctactttatttactaaaactcttgacaatgatttgtttgtatgccaaatttatgttaatgatattatatttgggtctactaacaaatcaacatgtgaggaatttagtaggatcatgacacaaaaattcgagatgtctatgatgggggag

SEQ ID NO: 47562 - DNA, 255 bp, Zea mays
  unsure (1)..(255): unsure at all n locations
atctcaactatgttatgcaagtcctagatgcaatacatggaatttaaatatgcaatgcaagtgacaacaccatttgacatttcacataaaatttctgagatcaagaatatntagttcattcctcaacatgcaaaagcgggtcttatcaagtggcttagtgaaaatatccgctaattgatctttcgacctcactccttctaaaacaatatctcctttagcaacatgatctctaaggaagtgatgacggatatcaat

SEQ ID NO: 47563 - DNA, 358 bp, Zea mays
agcttgacattgacgtttattttttagccaaggccatccttaatgagggcgtctcccactatagagcatgcttctagcaaatttaaatttttcattttctaagtcatgctcattaattttggcactaagttgagctatgtgatcattttgtttcttaattaaagctaggtgatcatgaatagcatcaacattaatgtctctatatctagtgcaaatagtaacatgctcaacggtagatgtagagggtttgcaagtatttaattcaacaatcttagcatgtaaaatagcattctcatctttaagattggaaatagaatcattgcaaacatttaaatctttagccttagcaattaatttt

SEQ ID NO: 47564 - DNA, 378 bp, Zea mays
  unsure (1)..(378): unsure at all n locations
tcacagtgcacaagagcntaaaaatgagtgagcangtatctgtggccagaaagcgtgcaaaataagtgtgtggtatggccgtatttatacgcgtgatgcattgaaagttgaaagaccccacttgtcattgaatgttgctattctagcaaagggaaggtgttttttcggaccttcggcataaagccttcgttcatatcgcaatntgaatttattatttcaaacaaattaatattgcgaggggctactgttggggaccttcggcgtccgaaggtcctcataaacaggatttaacagtatttctgtagtacaatatgtgaacaggtaccctcagactataatcggcattgcggcagaccggaataatacgaagcttgatac

SEQ ID NO: 47565 - DNA, 367 bp, Zea mays
agcttaaagccatggtaagtagtttttgctagtaatatacgaattgactcaagcctagctacgggtgcataggtttctccgaaatccaaaccttcgacttgtgaatatcccttggccacaagtcgggctttattccttgtcaccacaccatgctcatcttgtttgttgtggaagaccccttggttcctacaacattttggttaggacgtggaactaaatgacatacctcattcctcgggaagttgttgagctcctcttgcatcgccagcacccaatccaaatcttgaagtgcttcctctaccctgtgtggctcaatagaggaaacaaaagagtaatgttcaccaaaatgagcaacacgagatcgagt

SEQ ID NO: 47566 - DNA, 417 bp, Zea mays
  unsure (1)..(417): unsure at all n locations
ctacatccncttntgtgatgaacataggctggactcaagggtaggaaaaccatcgctggaccatgccttaatggtaactgaacatgggcaaccatctctgaacttatataagactcagtggggaaatgttctgggaacgccagcagtgcagggctcatacatgtggcattcatgctcagctccatacaagttcacagccacactctgaacctggacagttttactcagacaagggcaaacagataagtttgcatttgttaatatgcacacaacagtccacacctgatatttctgataggagagaacctctagatcttagtcattcactccacccttatctcacttnggcacagaagtgaagcacagtanggagagaaagatcttcttcactttcaacccaatctctgaaatcgactg

SEQ ID NO: 47567 - DNA, 368 bp, Zea mays
catgcaagctggataaactagcactgtttttcttctgaagtactttcctcagatgctctttatgctcttggtcattctgggaatatacaagaatatcatcaatgaacactactacgaacttgtcaaggtagcccatgaacacactgttcatcacggacatgaaataagttggcgaatttgtcaaaccgaatgacatgaccgggaactcatatagttcatacttggtgatgaatgctgtcttcggtatatccaaaggtcagattctgagctgatggtaacctgacctcagatctatcttcgagaacacattggctcctctcaactgatcaaataggtcttgaattttaagcagggggtacttattcttg

SEQ ID NO: 47568 - DNA, 357 bp, Zea mays
  unsure (1)..(357): unsure at all n locations
ctaagcttgngcgaaagcttagctgacngagaaaggagaactgtttatatatgataaccagatagacctcgaagaatactatagagttattgataaatgtaaaaggcattaatgtaattctgggtgggctgcgacccgtgcctataaataggtgaacagtattcccgtactgttcacgctgactgggcatttacttttgcgtcacgctcgtacccctgttttccttcgagccgaaggtacatttgtaatttgttattattgatacagtaacgcaaataaaaatgagttaataataatgattaaagcgtttatattaattttcatttcttgtgtatgaatccttcttcatcattcatt

SEQ ID NO: 47569 - DNA, 364 bp, Zea mays
  unsure (1)..(364): unsure at all n locations
agcttgtgaagccaatcacaagnctantttttaatgagactaaattcaattggtcttcaaagtgtaatgaagatttgagcattcgaagatattattaaccactgctccggtattggctcaaccggacattaataatccctttgatgtgtattgtgatgcatcaagcagaggtctcggctgtgtattaatgcaagagggccgagtaatcgtgtatgcttcaaggcagttgcgccggcatgaggagcattatcccactcatgatctagagctagctgcagaagttcatgccctgaagatctggcgtcattatctactgggaaatgtctgtcatgtttatacagaccacaaaagtttgaaatacatc

SEQ ID NO: 47570 - DNA, 412 bp, Zea mays
  unsure (1)..(412): unsure at all n locations
gatgaagctgagtcttcgatgaagagaagaatctggggtttctcataacactgtcgaagaccaatacagaacaaatcaccatagagattttaaagggttgtctgaagatactggtgacagcgacagttatgatgttgacagtggtggtgaagactccgaagatcgcccttggcgaccaagccatgcggttttcggcaaatcaactatcanagacnatcatcttgtcaacatgagaggaaggctattccgggacttgtccgttgtgagggccgacgaaggaganaanacttgtccanaccctgaagagaatattcgaagactccgaagtgtaccgaagcttcttgaaagctgagactacggttcccctgagcaactctatcgtagacgtgctgaaaatattcgaagtctatct

SEQ ID NO: 47571 - DNA, 338 bp, Zea mays
gatctaggtgcatgtttaattgctaagactaacatgggctggttgtggcatcgtcatctaacacatgttgcgatgaagaactttcataagcttctaaagggagaacatgtgttaggactaactgatgtctgttttgagatagacagaccttgtgcagcatgccagacatgaaagtaggtgggaacaagtcatccaagcaagaacattaagactagaatcaccctcatcatcagaactcaaagaaacatacatttgttgccctatccaccaccgaggccgagtatgttgctgcaagtcagtgttgcgcacaacaactttggatgaggcaaaccctccgg

SEQ ID NO: 47572 - DNA, 318 bp, Zea mays
  unsure (1)..(318): unsure at all n locations
gtacanaaccaacgaanaccaatagagagtatgcgacanagtcgagtaaattacagtttcaaatcgacatttcttagtcanttgggcagtgttgaatggcatctgaccacagaaatatatctcactagatataataacagttgtagacatggtacaaaacacacaaaccctntcacccgactgtttaagtatcccaaataataccaaccactggaccctcacgtttcctggcatgtaacaactctgaaagtatagctctatggaaaagagactggtttcagcggaagccgccttctgtccaaaatgtgccaccggatg

SEQ ID NO: 47573 - DNA, 393 bp, Zea mays
  unsure (1)..(393): unsure at all n locations
ccgtgatccattaagncacctgcagcatgcaagcttaggcagtttcgattatcttaccctgagcccctagcgtccaatgagcaatgaagtctgcaaatgcttgagattgaactgaggatttgtgtacataatcaatggtaaattcattaagttccgcggcccattttatgatccttcctgtagcttctttgttcctcattatgtctttcaggggttgtgatgaaggcactattatatgatatgcttgaaagtggtgccgaagctttctggaggccatcaatacaacatacaataccttctccaattctgtgtaatttttctttgataggctgagtacttcggagacgaagtatactggtgcttgtctttttacttggccatcttgcttctcct

SEQ ID NO: 47574 - DNA, 351 bp, Zea mays
  unsure (1)..(351): unsure at all n locations
gggacttggagatatggcgctaagtatgtatgtggcgtgttatattgncgggaggcagccgcgnggccagaatgagcgcgttcctccaccggcggcaccgtctcccactctacaggagctgatggctcagcagaatgagatcttgaggcagctagctcatcgtcagccaccacctcagcactatggtggtggagaccatcagcgtcaccccgcggcagctacctaccacgagttcctactacccagcccccattgtncacaacggcagaggacccacttgatgcagatgtgtggttgcgagtggtggaatccaatttcccactactccatggagcttgcntataagtcact

SEQ ID NO: 47575 - DNA, 369 bp, Zea mays
agcttgtcgtagctgacttttttttaagattcgtttacaacggaataaacataacaaggtcactagaatgaagtggtggaagcttaaaggggatgtggcctaaactttcaaggagagagttatcgaggagggcccttgggcagaagagggacgcaaacatcatgtggaggaagatggcaacatgcatccgaaagatagcttcagaagagtttgggttgagtcaaggaaacagaacggaagttaaagacacttggtggtggaacgaagatgtccaaaaggctatcaaggagaagaaagattgctacaaacacttacatcatgacaagtgtgcagacaacatagagaagtacaggatagcgaagaagtctg

SEQ ID NO: 47576 - DNA, 359 bp, Zea mays
  unsure (1)..(359): unsure at all n locations
ctgtaacaatgagcatgctcagccacacactctgatatgtttctagtgcagctcctatagatctgcttcacatgacaacaaagcgacaaccttctgtttttgtgaagaccaagtcactaagttgtttcctatgaagaataagatcctagatgtgctttttctgtgaacaaggtctactaaacagtcacaatctgtgtagccgactaagccatgatctgaagctgtacccttcttgtattttaccccaaaatcaagtgtaccagccacatatgtaacaatcagcagcagcagtccacagactcctgattnttcccctggagttcctttaatgtacagaaatttgagtgatctaatggatg

SEQ ID NO: 47577 - DNA, 369 bp, Zea mays
agcttatgaatataaaaatttctaaatgggctctgaaatcagcagttgggaacattatatgttatcaaatcccagttcccacagaaactaataaattaaaccacacactaactagagagcgcacaagccaacagaggccatagcagcacttgaagataattgcttaaggggtgggcggcaagatataaatacatatagactgaatttgtttttgctcacatctacatggtaaaagttgcgttttctaaaaaaaacttctgcggggctccacccctgaactaaaacaaagtagatgaatgaaattatttcatatttaccccaccctggatcagcagttgagctccatccaatctattgcaatatcctatg

SEQ ID NO: 47578 - DNA, 386 bp, Zea mays
  unsure (1)..(386): unsure at all n locations
tgtcgagttcagctctatcaaaatctactaagtatagctgaccctcttacactcccttaaatgctactaaatcatcacttcttctaaagacagtaacacctatatccataataagacaagtttaacccatgttacataattgcgaaactganagcaagttgtaatctaaagaatctacaagataaacattggaaatggaatggtcaggagatatagcaattttacctaatcctttgaccaaaccttgatttccatccacgaatgtgatagctcgttggggatcttggtttttctcataggacgagaacatcttcttctcccctgtcatatggttcgggcacccgctgtcgatgatccaactngagcctccagatgcatanacctac

SEQ ID NO: 47579 - DNA, 337 bp, Zea mays
taaaaaacttcaatttctataatttgctcaagtcataaatttaaacttttcatcccctttttcttattatcttgaatattgctcatggggctcaccttagggttttcattagggttgtacattcttatctttttaaaagacttaattgttttgatcatgatacttttaagtatatacttgggggattctttcttacttaagttaatttgatgctcatgcttactttgattcacatgaaataatggttcttggtttggcattttaagagaaaccctaagtgacactggggtgtcacagccttccacccttaaaggaatctcgtcccgagattcgggcc

SEQ ID NO: 47580 - DNA, 381 bp, Zea mays
  unsure (1)..(381): unsure at all n locations
ctcgggcggctctggcgggtcgcggngaggtcgccggagctatgggcgagctcggggaagttaggcgcggttcggagaatgcaacggggaagacaaccgggctctgggacgggctntatagccgtggcgcgggcgtggtcatgggcggccgcgggcgcgcggtggttcatgcacgggcgtgctctgagcgcgcccccgagtgtcagcccgcgtcgaacacgtgggagcttgcttctgccatggttcaacggcggatttgaataccttagcgtgcatatcttggagaaccactgtgacggtctcttcctgctcattcctacctttgatggagtccagccagatctgtcgggatgagataaggtgaaagtgctactattctgc

SEQ ID NO: 47581 - DNA, 373 bp, Zea mays
agcttatgccgagatttataatattggcaagttaaattgaaatcatgcttatctagacgtgtggttaaataataataattttggcttgtgtagtgaggtggtgacatgccgaagtagtcatcacttcctctatgtttttaagtcaagtcaaaatgcggggtactagtagtacgctaggcaggcggtgttccaaatagataaatcgggtgatgtggtacttgtcaagcatgatagaggttgagtcacttaggttataaattgatgctcgacatgtgaggtctcctaaaatatggtgtttaaagtgacttgtgcgttgtccagtttaagttgagaaaatggttaagaaaaactaattaacctgctcccacctatg

SEQ ID NO: 47582 - DNA, 426 bp, Zea mays
  unsure (1)..(426): unsure at all n locations
tgtgagcaatacaagttcagaagggagtaagctgcttctgctgaccatccganacccatgctcttatgtgaggatatagcagagcagaaggtgctattgggatctcaattgtccaaagagcacgagaaaaccttgataaggtttttgttcataaataaagatgtttttgcttggtcagctaatgatctttgcggagttaacagggatgttattgagcactcgctcaatgttgatccattcttcagacccaggaaacagaggcttcggaagatgtcttatgacaaggccgaatgtgctcggaatgaagtgaaacgactcctcagtgccggagttattagagaggtaaaatacccagaatggttggctaacactgttatggtgaagaaggcaatggtanatggagaatgtgaatcgatttactgatct

SEQ ID NO: 47583 - DNA, 358 bp, Zea mays
agcttttaaagacaacttttttattatccttcggctccagaatcacctgctcgctagcaaaacgaataagtttactctcagcctccccagagtagcccaatttcttcatcataaccatatcgtcttccattacagtagatcaaccaaattcaaggtggctaggttttgctgggctcagaatagtgtaatcctcttcaccgttgttatcactccctccaactgcgatctgttcagcttcagcaatcgaggtaccttcggcaacagcctcctcgggcacaacaagacctgattgcttcatcacttctgagataggcgctgtttcggcagcttcgaccttatctccctcacgagacaatct

SEQ ID NO: 47584 - DNA, 347 bp, Zea mays
  unsure (1)..(347): unsure at all n locations
gcttcttccctatctccggccgccgctcatctgcatccatattgagttccaccgcccgcgaacactataaatagagcctctgggcagctgcgctaggtcatcccgaagctattgcacccgctcccaccctcaatcctccaccagcacgctccaatntctagtttcccccaattctgttctgaagcaccgccggatcgagctcaccgcggccagctcaactcacgttagttcaagctgcactgttgctagttctaacatccctaggcttttcacatgctctctgaccattttgattgaaccaagccaccatggattacccggaacaccttcacccattcgcatggtct

SEQ ID NO: 47585 - DNA, 338 bp, Zea mays
acaccccccacaaacacacagcgccacaagggccccggcggctcaccaaccacccttttgcccttgggcaaaagtctggaacccaccgggaaaactaaaccaacacaaaaagagaacgtgggaagtggtccacaaaaaaaatcctggaccttggaaggcagaattgctccgtgatctgccttcccaatggtatcttcgaaccgactgtgacgggtgttccaggaggagctccttccactccaggaaccaacaaaacttctccaatgacaatactacttagtcggcaatctttttttccccttatcattgctgcatgaattccattcttcagcaatatt

SEQ ID NO: 47586 - DNA, 375 bp, Zea mays
  unsure (1)..(375): unsure at all n locations
actcagcttcgaagatacaacttcattctcttcgggagtatgcacggtcctctctncgtcatcatcctttacaatagacatgtcccgaaaatatcttcccctcatattatcaagatgactctgcttaatagttgaatttccacaaactgtatggcttggtcaccanggtcgatcttcggagtcttctccaccactttccacatcataactgtcgctatcgccagtatcttcagacaaaccttccaaaatctccctggtaatcttctctatatttgtctttgccattaattcaagaaaaccaagattcttctcctcggaaaggctcagcctcgacgcagcgacagctttcttgtcttcagacatcttcgaaaatgc

SEQ ID NO: 47587 - DNA, 319 bp, Zea mays
tactttgcttcgacattgtatgattgacgatttgcacgtcgattcaccgcgtctgctgacgcacccaccgtcaatctaccttaggtcatgccaactgccatatctatcctcgcggctaactgacccgtggcccccacgtctggtggtttcgtcgggccacacgcagggcgcctcgataccactgcattggttttataaaattaccttctgtcttctgtcgcggtcccgaggaggcgcactactggcgcgtgcggtggttcgctctttccgcactcgggatccggcacccaaggagtatgacccgtgggcctgggccctt

SEQ ID NO: 47588 - DNA, 431 bp, Zea mays
  unsure (1)..(431): unsure at all n locations
tctcagcttacgggctactggcggagctagccgaagcactggcttgcccatatgatggctgtggtgggctggccacgatggccgaagctctggcggcaatggcgggcggaattgagctcgccggagctaagggaaagtggctagccggtgagggtgagtgcggngcgaaatgaggtgcgcccggtgaggctttatatgcgcgggcgggcacggccganggcgtgggcacgcgacggacttgaccggacgccggggtgagcgcgcgcgggttgtgcgagctctggcgtgccgaccagagtcgaacacgtgtgcccgtgcgttctgcccaagttctggcgcgtgtggtcgctcatccgagcctgctctcgccttggtcagtgcacaaaacctcttcttcttcctacaagctaccattcttgtgtggaggtcat

SEQ ID NO: 47589 - DNA, 283 bp, Zea mays
atgagctgcgcctaactaccttcttatattcttggatggacgtgagatggatatcaaatgcgctcgatctggtatgagtcacgcgtgggtcggattctttgccattagcaggtctataccgaacccaccctccattgcacccactgatatcattccattgaattccaatgaagcaatatcggcttctactgctgctagattattttttgtctctgcacctgcaccattgcacaactggatttaatcccagaatccccgcttatatgtcgataccaacaacccc

SEQ ID NO: 47590 - DNA, 426 bp, Zea mays
  unsure (1)..(426): unsure at all n locations
ctaagctatagaataatgtttgaccaactatgttatatcgatggttattatatattaaaaataaactgctgagaatgtggtatgagaaacatacactnttaagtcaatcggaacaccggttcgaattgtatgttctcacttaataatatcctatgtccatccataacgtttcttgtcgtaggcaaccttatatttctttgaggccatgataatcacttatgtgaaactcttgtatggcatgtgcttacaccaatcttgagtcagtgtaaagtcaataaaagtcacgtgcttcttaacatgatcgattatgaaaagagcgttgaatgtcgcctagagggggtgaataggcgtgtcggtaccctgaatcangggtaccctcttctacagtatgaagacactgtacacatacgacgtctccaggccaca

SEQ ID NO: 47591 - DNA, 383 bp, Zea mays
acctgagctgcagcttcatctagatacttacttttctatttcagaacaaagatagattagatgatgaagatattaaaaaacaatagagaataaatgaagggaataaaagacagatgctaggtgatgtaatattcgaaacatataattcaatcttatgaatcttacttccttcttttaatatttaacatggggtgacaagaatacctttgactccttagagttacaatgtgaaggtaagagagagatacaacttcgtaggcggagcgagataatctttcctggatagaaaaagtgtgtctaatgcatagcattgttcatctatatataggcgttaggtacaacttcaataaaattacaattatgcccttgaatctatacatttg

SEQ ID NO: 47592 - DNA, 451 bp, Zea mays
  unsure (1)..(451): unsure at all n locations
ctaagcttgcagacacaacatngacgacttaactcatggtaagtcgaggttatgacttgtagaaagtttctggttctagggacctctgagttgtttttaagttagctcgaagctcgagggctacacccattgtgtgcacctaggcggtgcacacgatggagagaagcatcaaagaaagagtacttctgttaacttggcagagggtgcaatcattggtggtcttcataccacgagtcaagggttttctttagagcctcgagtcaattgttctcaaaattaactcgagccttgggagcttgtgggggatatatatcccctatgtcctctagcgtggattctgtgcatgggtccttgaagggtctaagtagtcccggcggctgatatcattggccgaccgaccaactcatgcccatagatggcaagaaggcttgttgatcaagacagagcgaca

SEQ ID NO: 47593 - DNA, 373 bp, Zea mays
agcttgtgaagccaatcacaagtctattgaagaatgagactaaattcaattggtcttcaaagtgtaatgaagattttgagcatttgaagatattattaaccactgctccggtattggctcaaccggacattaataatccctttgatgtgtattgtgatgcatcaggcagtggtctcggctgtgtattaatgcaagagggccgagtaatcgtgtatgcttcaaggcagttgcgccggcatgaggagcattatcccactcatgatctagagctagctgcagtagttcatgccctgaagatctggcgtcattatctactgggaaatgtctgtcatgtttatacagaccacaaaaggttgaaatacatctttaccta

SEQ ID NO: 47594 - DNA, 484 bp, Zea mays
  unsure (1)..(484): unsure at all n locations
tactcagcttcgcactgaaacagnttttagtgtntccgaagatgtctgaatataataaggctactactgagatgaagctgagtctcgatgaagagaagaatctggggtttctcatagcaatgtcgaagaccaatacagaanaaatcaccaaagagaatttagaaggtttgtctgaagatactggtgacagcgacagttatgatgtggacagtggtggtgaagactccgaagatcgcccttggcgaccaagccatgcggttttcggcaaatcaactatcaaagaanatcatcttgtcaacatgagaggaaggtatttccgggacttgtccgttgtgagggccgacgaaggagaaaaaacttgtccaaaccctgaagagaatattcgaagactccgaagtgtaccgaagctttttgaaagctggactacgngtttccctgagcaactttatcgtagaggtgctgaaaatattcgaagtctatcttc

SEQ ID NO: 47595 - DNA, 361 bp, Zea mays
aactcgtccgccttgctttttttttggagacccgccatttcgcgaaggaagcgggtgttatcggctgttgcattgactaaagcagcgatagcctcaactaaagttgggggtactgtgtggcggattatgagtagtttccctcccacgggaggttcccgcaccatcctgtccactagttgtggacgacatctgaggcaaagaacatttggaaaatataatatgccatagcacaccatcattgtacattacttaaaaggtaatgatacagactctaatttacacaggaccacattacctattatacattatcctatctataccacactactctggctttttatacgtttcggaagcttcactc

SEQ ID NO: 47596 - DNA, 255 bp, Zea mays
  unsure (1)..(255): unsure at all n locations
atctattattnggatatagatacgtgccatgcatatatctctactactatgaagaatctaagactggttgcaatggttcactattggcctcccctaccctaatcctgtagctcgcgtaagggctacagagcaactcttcaacccgcaacgatgtcctctacagtgccccctaggtggcgctcctctctctctcacgccagatcaagaggaacactgttctcccccgacgctgcttcgtggagacacctacggtcg

SEQ ID NO: 47597 - DNA, 372 bp, Zea mays
tgcagcatgcagcttgggaagaatcttcatttttttttgtgctagacggcgatgccagagccagcccatgttagtcttaacaattaagcaagggtcgagttcagctctatcaaaatctaccaagtatagctgaccctctaacacccccttaaatgctattggatcatcacttcttctaaagacagtgacacctacatcagtaaaaagacagttgtagcccattttgcataattgagacacagaaagcaaattgtaatctaatgaatctacaagaaaaagattggaaatagaatggtcaggagatatagctattttaccaagacctttgaccaaaccttgatttccatccccgaatgtgatcgctcgttgggg

SEQ ID NO: 47598 - DNA, 361 bp, Zea mays
  unsure (1)..(361): unsure at all n locations
aacacgtgataggtctaaccaatgttcaattctttaaagatagaccttgtgcagcttgtcaagcaggtaaacaggtgggaggaacacatcacagcaagaatgtgatgaccacttcaagacctctggagttgctgcatatggacctcttctgacccgtcgcctatctgagcatatgaggaagtaagtatgggttagttattgttgatgactattcccgcttcacttgggtgttctttttgcacgataagtctgaaacccaagggaccctcaagcgcttcctcaggagagctcanaatgagnttgagctcaacgtgaagaagataaggagcgacaacgggtccgaagtcaagaaccttcaagt

SEQ ID NO: 47599 - DNA, 241 bp, Zea mays
cactttgccacgatttttttcaaaaaaatcctggggctcattcgctgctgacaagactttcatactgagattcctctacagattattgctctgctattgaactgtttgattaatgcccatctacctgaactgagggtgttgaccggccatggacctgcatttgtgcaggaaacaatcaaataagctatgataaatatctccccctttttgatagccttctataactcctggtgggcttgtt

SEQ ID NO: 47600 - DNA, 347 bp, Zea mays
tgagaggtgaactgcgtttctctgtctgacactatcttctttggcacaccatgaagacagacgatccgagacatatacaactctgccaatacggcactgctatagttggtcttgacaggtatgaagtgggctgacttggtcaaacggtccactactacccaaatggaatcgtagccggctcgagtgcgaggcaatccgactatgaaatccataccgacttcatcccatttccactgagggatctgcaacggttgcaacaatccagcacgtctctggtgttctgccttaattcttcgacaactatcgcacatagccacatgctctgcgattcccttctcattcgtaca

SEQ ID NO: 47601 - DNA, 370 bp, Zea mays
agcttcagtgatctggacctcttttatcttgctacaggccttcttctttgtctccatagcaggaaccttgctagaacactaccccacttaaaatggatgagggtagaactcctgaatcttgaggatttgaactccttgaagtacctcataacaagggcgttacaaggccttcttctgttgttgctgcttgagcatgctgcggagaaatgactgacacagggttgattctgggagaaccttcttctcatcttctcttcactattttcttttcacttctcacttctcactgcttctttctttctctttgctcttcccactggaggattctatcaaagagtattaccatcatacagaggaggaaaccaaagac

SEQ ID NO: 47602 - DNA, 393 bp, Zea mays
aagatagaccctgtgcagcttgtcaagcaggtaaacaagtgggaggagcacatcacagcaagaacgtgatgaccacttcaagacccctggagctgctgcatatggacctcttcggacctgtcgcctatctgagcataggaggaagtaagtatggcttatttattgttgatgactattcccgcttcactcgggtgttctttttgcaggaaaaatccgaaacccaagggactctcaaacgcttcctcaggagagctcaaaatgagtttgagctcaaagtgaaagagataagaagcgacaacgggtccgagttcaagaaccttcaagtggaggagttccttgaagaggaagggatcaagcacgagttctccgcttcctacacaccacagcaaaatg

SEQ ID NO: 47603 - DNA, 331 bp, Zea mays
tgagcatgaactgtgccttcaaaataagataatctccttcttagccttccaacttattccctgagctctttattgtcttgagcgatagaaatatcactaattcctgaaatttctaactcaatggaagatgggctttcttgagagcaacatttgttagcacatgataatatagtttctacatgagtacatgtgcatatgtgaggttggtatgatttaaaattagttaacacaacctcatgagccatctctaacatgatatgtgaatccataaatttattatgagagcacacaagcatatcatggttttcttgcaaagctagattttcaatat

SEQ ID NO: 47604 - DNA, 374 bp, Zea mays
agctttatcaaatggatgttatatgtgcatttttaaatggcttcataaatgaacttgtatatgttgagcaaccacccgggtttgaagaccctagatatcctaaccatgcttacaggttgtccaaggcgctatatggattaaagcaagctccaagggcttggtatgagtgtcttcgcgacttcctcatcgaaaagggcttcaagatcgggaccgtcgacacaactctattcacaaagaaacataacggtgatattttcatttgtcaagtatatgttgatgacataatctttggctcgacaaatgactatcattgcaaggaatttggtgagttgatgtcgaaggagttcgagatgtcaatgattggtgagctgatg

SEQ ID NO: 47605 - DNA, 475 bp, Zea mays
  unsure (1)..(475): unsure at all n locations
tctagaggggagagcacatttaggactgacaaatggtctatttgagaaagacatgatttgtagcgcatgtcaagcaggatagcaagttggtgcccgccatccacacaagaacataatgaanacggacaggcctctggagctactccacatggatctattcagcacggtagcttacataagcatcggcgagagtaagtactgtctagtaattgtggatgattattctcgcttcacttgggtattctntttgcaggagaaatcacaaacccaagagactttataaggattcttgagacgggctcaaaatgagtttggattgagaatcaagaagataagaagcgataatgggacagagttcaagaactcacaaatagaaggatttcttaaggataagggcatcaagcatgagttctcttctcctacacacctcaacaaaatggtgtagtggagaggaagaatagaactctactggaca

SEQ ID NO: 47606 - DNA, 356 bp, Zea mays
agcttggtcattttattgcttactgtcccgacaatgatagtgatcaggatcaaggaaacaagagggagaaaaagaagaactataagaaggaaaaaggcgaagctcatcttggcaaggagtgggattcggactgctctttgtccgactccgacaatgaaagactcgccgccaccgccttcaacaagtcatccctcttccccaacgagcgtcacacttgcctcatggcaagggagaagaaagtaagcactcataatactagtacttatgcttcttcaagtgaggatgagtctagtgataatgatgagataaattactcatgcttattcagggattagatagaacccaggtagacaaaa

SEQ ID NO: 47607 - DNA, 342 bp, Zea mays
  unsure (1)..(342): unsure at all n locations
tccgtctcccgacgccgtagacattttcctgtcgtccttgtaatatatctntgaaaactcacgtgtgaacgttttggcaaaactcttatgggcgccttgttttgatgtggttaattcttcgaatcgtggtgaagtaaagcgtcttgggacgcttcctccccagcccccgagcaggacgtggcaacctggtcgtcacgttctgctttttggtcacaaagtcattgttggtcttgagtttgttagtcatgggtaaaattctcttagatcttctatgttccatgagttagtcagcaggttacccgtgctgtctctgagttcgtatgctcctagacagataatttg

SEQ ID NO: 47608 - DNA, 370 bp, Zea mays
agcttgatagcacaaaaaatattttatcacaatcctcatatatatactcatatatatatatatatatatgcaaagcactactgtagagtggcccccacaattcaaaaagtttcgctattctagcgaagggaaggtgttttttcggacctttggctaaaggccttcgttcgtttcgcattctaaattcgttacaaagaaacaaactaatactgcgaggggctactgttgggggccttcgtcttccgaaggtcctcaaaaacacggtaaccatttgatatcagcatgttaataagtgttacaggagcttcgttactaaaaaagctttggcacagaacaatggaagtgcaatgaagtaagctctatcacgatg

SEQ ID NO: 47609 - DNA, 389 bp, Zea mays
  unsure (1)..(389): unsure at all n locations
ccttatctgacctttttcgatgccttngttcctcacgacgtcatagggttttcaactcgattgatagattggttcgcttacttgttactcttcctgtttcaactgctagtgctgagcgtgctntttctagcttgaagataatcaagacaaggttgcggaataagatggaagatgagtatcttgctaatagtttactagtacatatagaaggaggaatcgtgggaaactacagctatgatgatataattaatgattttaaggatcttaaggagagaaaagtggtgttctaacatgtgtttaagctagtataatgacatgctngtattctggtatattcaagtaaaatgctctactatgtactgatacactcattatcaatattatattat

SEQ ID NO: 47610 - DNA, 440 bp, Zea mays
  unsure (1)..(440): unsure at all n locations
gatccttagagncacctgcgggctgaagctttggctgagctgggccccggctttttgtttgcccgctgncgncgatgaggaacacgctctgcaggtcctcctcctcctcctcccagnagttcctttgctgaagaatttcagttttttttccccgtcaggattcccagtgattcattcgattcttcagctctatcctcaagcatcctcaactggagctcacctgcaggtttgtgccggccgttccgtcctggaaaccgaactgcccgccggtagcctgggacagagccaggtccagcgggttcaggccgccgcacgggttctccaggccgttcgggacgaaggactggaacacgtcctcttgcccgccgaacgggaaccccgggctgcagctctccagcgagaagaccgagctcgccgaagcgccgcaggcctggaacatc

SEQ ID NO: 47611 - DNA, 481 bp, Zea mays
  unsure (1)..(481): unsure at all n locations
cttgatgacaagcatcatttcctcgttgtcgagcttggaggctaatatgggtgttctacttggggtagactcctccttcttctcctccgtcaccttaaatgcgaccggttgtgcttcggacgtggaggggccgtcaagctcgttgatcttccttgagcctttgatcataaactcaaagctcacaaaattcccgattacttcctcgggagtcattagtgtatatctaggattgccatgaattaattgtacttgagtagggttaaggaaaataagtgatcttagaataaccttaaccacctcgtggtcatcccatattttgctcccgaggttgcgcacttaattcaccaaggttntgagccggttgtacatgtcttgtggctcctccccttggcgaagacggaagcgaccgagctccccttcgattgtttcccgcttggggatcttggntagttcatcaccctcgtgcgcggtcttaagcacg

SEQ ID NO: 47612 - DNA, 409 bp, Zea mays
  unsure (1)..(409): unsure at all n locations
agctntactccaaaacttttagagctatatattctatatgagtggatctaaacaggccctaagcgagcacaagacaagatatccaaaattgcactacacagtgactatccaccctgcagntctttgccgaacaacagtttcaatctacactactcgatcacattaccgtatctgcactacgcaatgtcactactttctggaaatgctacattgatatattcatacctgatgtcgttttatctaaatactgtcggacattgattatctgtgttagctatctctccttccttccgctgtctttcctggccgaccatcgtttgctgatgcatttgtgttttcgattcgtgatgatgatacagtgtgtagactgcaactgcgcctgggactgaagacctgcagaaaccaacgc

SEQ ID NO: 47613 - DNA, 407 bp, Zea mays
atcctggcattggaccacgggtactaatatcaccaagatcaagggctacaacataaagcctacgcagactcagaactaccccgccaggactgcggggtggttttggataaagggaaggtctcttgtgctattctgccatggcgaaggggtatcggcgatccacagccggtggatcaaaaccgacagccaatattagatctggcgctcaacgaaccggaatgcgctattggccgcgggatccaaatccgatggcccagattctatgaaccctgatataaccaaaaccgcatgatctgagatctatggctcccgcaaactggtatggtctgcactaatccacgtcggtcatcaagggacggacggcgcacacatgacttccacaacacagaagtctgcatctaccccta

SEQ ID NO: 47614 - DNA, 372 bp, Zea mays
gccccagtttatatgcataatcgtattattatgtgctactttactatacttaatgcttataagaatgtaatgggcacttaagtgtaagagttgcttgaaacctttaattgcatgaacttaggattccattttgagatgaatactaatatgctaggtcgagtagctgcttgctaatcaagatctcggtagaagtcgagtgatttttctagcactcgcgcgaggtcaggaattgattgtattcatcttgataacgagatctatgttagtctatggacttggatccagggaggatgccttgaccatgagacgggaaaaaggaattaaggattaatgtgtggatacctgagtcaacttttgaacgtactaagcaca

SEQ ID NO: 47615 - DNA, 465 bp, Zea mays
  unsure (1)..(465): unsure at all n locations
ntgccaaatagggcgcataattatacccttgatatcttctcgtgctttcatatcattntttacatagaaccattctgtcatccagccgctgggccatcttttccgaaaagttggcacggtgcagctngatccagaccgagaaacaaagttgtagcagccaaagttattgtgatactgttccttaccccaaggtattgtctcgtatgataattcgtgcatattgcagaaactttttgcatcaggcttcagaccttggcttcgcacggcccacacaaagatatttagccttatgattgcctcgggggtaagttggtgaagatagacttcaaaaatcttcagcacctccacgacgaagctgctcaagggcaatcgcagcccagccttcaaaaagcttcggaacactacgacttcattctcttcggggtgtggacaagtcttcttcccttcgtcgccctcacaacggac

SEQ ID NO: 47616 - DNA, 383 bp, Zea mays
  unsure (1)..(383): unsure at all n locations
gactgcagcaggcaagctaataatgagcttatctcactccttacgcttattttgngttcctactgancgatcaagagctccgcatcgtgagttccaatactatacttatcatgacaaacctagcaatataaatacttcaatgtaatgatctaaaattaaatgctcaaagtaaaataaggactaaaaacacccatatcgaactctacactagtcttcacaggagcacacatgcaagggtatcactcccacttgatccgcgaggatgaagcgctctggtccctgatactatggtatggcgaacgtccataatcatcactaaaccatctagatggtgccgtccaagagcaacaagcaagaactctcacttcacctatccaagacta

SEQ ID NO: 47617 - DNA, 391 bp, Zea mays
ccagcggcaacactgcaggcactgtacgtaaatcacgagacgctccgcgaagctaggagccagatgaggaaggctactatcccaacacctcaggaggaggagtcggatcaagatatcatggacctcgaagctatccattaataggttcaaaagaagagaaaaatgctacgtctcgccgatctccagaggaagattgatgacgtctctgaggaaatgtgtcacctcacctaggatgaccaagaccgaaggcctgaactcaatgagcttcgacaagagaattcatacaacgatgatgaatggtatggggatattcatcatggagatttgctttccatgatgcttctcctttggcagcaaaatatgaggctacccatggccccataatacaacc

SEQ ID NO: 47618 - DNA, 360 bp, Zea mays
gcagcttattacttctaatgctttttttctttttttcgtggctgatgccaaagggggagaagtttatggaccaaagcaatgaaaactatatcaaacaccaaacaccaccaatttaaaattttatatctacaaatggcttttcaagtggttttggttatttggtccaaaaataggaagtaagtgaattatggagttagggggaggcttaagtccataatatcacattgtggggacaatcatgcatcttagcaagtagattgcatattttcattcaaatacttgtattatttgctcgctttggatgcgtggcatcaatcaccacaaagggggagattgaaggaaaatggaccccggccattt

SEQ ID NO: 47619 - DNA, 297 bp, Zea mays
cgaacacatccaataccgtggtgcacacacataatatacataccctggccctgagacatgccagcattaatgtacggacctcggcgatacactaacaacttccctctatataaacaagcacaaactgcacggcaatttgcatcacaaaaggcaaaacacaacctgcactgcacgagatgaggacggcgcactccacagctgctggcatttgcatacttcttctcatgggcatggactgcaccctcatgacgacacccacctgcgcagcaggtatacatacactggatatataaacgc

SEQ ID NO: 47620 - DNA, 379 bp, Zea mays
  unsure (1)..(379): unsure at all n locations
cttagaggaggctgttccgccggtatgcctgtgtttcttataggacaccttgcccctaaggatcagttttagaccgctcacccagtctgctgaagggattctcttgttggtaacccgagttgagtcggctaacccttgatacagatatgctggataggccctgtctttcagtggctgaatggtcttgaaaacaaaatcagtgaccacggcttcggcagtcaaacctctctctttcagtaattcgacttcagtaagcaacacgcctacctcggcaacttcctgatccgtggggggctcagtccaactcggagtacgaacgtctggctgtcttcctgaccgggaggngagagaatttccataattctcaactataaaccac

SEQ ID NO: 47621 - DNA, 395 bp, Zea mays
  unsure (1)..(395): unsure at all n locations
tcagatgacacagtggcactggcgcttagtacagataaacacatatgcacacctgacgcatcagcaccactcataacatcatgcctagccaataacatattacaagcgcatgtgtaattctagcacaatccaattggcagatgacagtacttaaaaggcattgcttggagcaatatatttgctcaaggtctaacagagcaactatccaaaggaacctccaaacagttcttacgtcataatagccaaagatgatattgatgcacacataccttcagtctttaacataaaccagtgcaagaacctgcatgccgacaatatcaaaatagatacaaattagctaggtttctcacaagaaaaagtacacggntcatagtcaatattaactttggagcata

SEQ ID NO: 47622 - DNA, 346 bp, Zea mays
agcttctcctgtacaagcgtcgcactcactgtatagtgtgaagctgccacatacaatagtaatggagcccctggtgcaggtggagttaatgttgttagatcaatcaagtattgttttaactcttcaaaagctttctgttgagctaagccccattgaaaaactttggctgactttagtatttcaaagaatggcaagtttctttctgctgatctagatatgaatctattcaatgatgtcagtcttcctgtcagccgttgggcccccttctttgtgcttggcggctccatccgaaggatagcttcgaccttgcttgggttagcttcaatccccttcattgaaactagac

SEQ ID NO: 47623 - DNA, 456 bp, Zea mays
  unsure (1)..(456): unsure at all n locations
ntcctgtgcacagcttcgngatttccttgtccttcgtcataatctgtcttttgtcttgctcaggcttcatcctgaccatgctctgtatgcttatgatctgaatccgaagatacctgttcacatatttcacttggaaaacattgtcaaattatgttttgaggaccttcggaagccgaaggcccccaacagtagcccctcgcaatatcaatttgttagagtgataaattcagattgcgacatggacgaatgccttaagccgaaggtccgaaaaaacaccttccctttgctagaatagcaacagtcattgacaagcgggaccctccagttttcaacgcactaggcgtataaataagagctcaccacgggttcatttggcacgctttcttgccatctgttcttactcacccgacttttagctcttgcgcaccaacacttgcttggctttntttaaaaaaa

SEQ ID NO: 47624 - DNA, 282 bp, Zea mays
tttaacttcctcaaacacattgagatttgatcccaagatcaagatggcatccacataaaggcacagcataacagactcacccccaccataacgataatatacacacgtgtcagattcatttacagcaaaaccagcgggtgtagagaattatcaaacttttcatgtcattgcttaggtgcttggtttaggccaaacaatgattctatcaacctgcacaccttgttctcttgaccatccgcattgaacccttctggctgatccatgtagatctcctcatccaac

SEQ ID NO: 47625 - DNA, 462 bp, Zea mays
agatgtggtggaaatgcccgaaccaacctttttatttgcctaagtcccgccttagaggctagaccacacttaaatgggaataacccgtaagtccctcggatctagtccgacacggccactgacaggatcaagtaccacaatctcactcgatggcgagtcacagagcacatacaatacagcataaaaccatgcattaaagagtattaaattattacatcatcatcagagttctgcaaaagtagtcatcattggtcgaagtgcagcggaataaaactaacggtaaataaacagagagatggggaagtctgtcccaacactcctcatgctccttctcagccgaggtagggtcccactcgacagtccaacccggtggcaagatggacggacaagtcactccaacaaccatgtcctgcagagaacctcgtaaattatgccacaagcaaggctgagtatactaatact

SEQ ID NO: 47626 - DNA, 330 bp, Zea mays
atggaccaaacaaggaagaggtctatgttgagcaacctccaggctttgaagatagtgagtaccctaactatgtgtataagctctcaaaggcgctttatgggctcaagcaagccccaagagcacggtatgaatgcattcgagacttccttatcactaatggcttcaaagtcggtaaagccgatcctactctctttactaaaactattgcaaaagattcgtttgtatgccaaatttgtgttgatgatatcataattgggtctactaacaaatctacttgtgaagagttagtaggatcatggttcaaaaattcgagatgtctatgatggggga

SEQ ID NO: 47627 - DNA, 440 bp, Zea mays
  unsure (1)..(440): unsure at all n locations
tctanagggagaacacgtaataggtttgactaacattcaattctataaagatagaccttgtgcagcttgtcaagcaggtaaacaagtgggaggaacacatcacagcaagaatgtgatgaccacctcaagaccactggagctgctgcatatggacctcttcggacccgtcgcctatctgagcataagaggaagtaagtatggtctagttattgttgatgacttttcccgcttcacttgggtgttctttttgcaggataagtctgaaactcaagggaccctcaagcgcttcctcaggagagctcaaaatgagtttgagctcaaagtaaagaagataaggagcgacaacgggtccgagttcaagaaccttcaagtagaggagttccttgaagaggaagggatcaagcacgagttctccgctccgtacacaccacagcaaaacg

SEQ ID NO: 47628 - DNA, 449 bp, Zea mays
ctgaggctgcagcttggcattttacttgttcttgctcttgtgtcctgtctttcagtcagcgatgaaatctgctagcgccttggactgaattgaagatctatgcacataatcaatgctgaactcattgagttccgcagcccactttccaatccttccagtagcttctctgtttctcataatatccttcaaaggctgtgatgaaggaacaattatatggtatgcttgaaaataatgtcgaagcttcctggaggccattaaaatagcatacaacaccttctctaattctgtatagtttttctttgataaattgagaactttagaaacaaagtatactggaccctgttttttcaattgcccttcaagcttctcctgaacaagcgccgcacttactgcagagtgtgaagctgccacatacagcagcagaggagcccctggcgctggtggagata

SEQ ID NO: 47629 - DNA, 436 bp, Zea mays
  unsure (1)..(436): unsure at all n locations
ccgcagctgcagcttgctacgtatccacacattaagcttattttattttcccgacacacggacaaggcaggctcccctgattccagtccatagaccaacataaatcccattatcaagatgaatacaatcaattcctgacctcgcgcgagtgctagaataatcactcgacttctaccgagatcctgattagcaagcagctactcgacctggcatactagtattcatctcaaaaaggaatcctaagttcatgcaactagaggtttcaagcaactcctacacttaagtgcacattgcaatcctacaagcattaagtgtagaaagtagcatataataacatggttatgcataaaaccggngctttccttcaattgctggggctgcggcgagaatcttaatagcagcctctgaagcctgctcctggtccttctcttggaca

SEQ ID NO: 47630 - DNA, 490 bp, Zea mays
  unsure (1)..(490): unsure at all n locations
acactatacatacnncagcntnctcaccatatatagcatgcttaatanaacttcgtagaatgatgctatttttatactaacacttggccatcaagctgactgttgaccttatgaccagtcggcactaaagtacgtcggcatgcctttctggtatatgtggataattcagctttagaagcattggaaactagacttcaagagcttttcaaaaagtacttatgggccttcatagcttttgggaatcaaaagatatgactgtttcttctggacggttcttgtgcgctggactgacttggatatagttcttgctgattcgcacttgagatgattcgtacttcctctttggtgaacctaagtaatatcaacatacactacttacgtagcataaaattctcattagtgattaaatgaaatatataagatagcgcgagcacctctagctgtagcttcttagctcagatacgtgtaattggtccatcaaagacttggg

SEQ ID NO: 47631 - DNA, 410 bp, Zea mays
  unsure (1)..(410): unsure at all n locations
agcttatactcnctccgtttctttataattgttcttttatagttcaattntgcactatccagcgacaactgaaacgaaacggagggagtataaattagataagcaatccggctaggaaccgtacatggcatcggttccgtgctaagtgctaaccgaaggggcactgaatggatacatctctatcttaggtagtcgtcgatgtgaaccaatttttcaatcgttctgtgataaaagcctaagattgataatgtttcaaagatgcaaatggatgaaaagcgaanattagaanaacttgtctttgcaatccttcattatggtagatggactactttacctcatcactatgaaaaatcatgcatactagctacaagagctctacagcanaaaaaaacaaaattcttttagtttca

SEQ ID NO: 47632 - DNA, 431 bp, Zea mays
  unsure (1)..(431): unsure at all n locations
tctanagggagaacatgtgataggtctaaccaatgttcatttcgaataagatagaccttgtgcagctggtcaagcagggaaacaagtgggaggctctcatcacaccaaaaatgtgatgacaacatcaagacccctggagctgctacatatggaccttttcggacccgtcgcctatctgagcataggaagaagtaagtatggtctaattattgttgatgacttttcccgcttcacttgggtgttctttttgcaagataagtctgaaacccaagggaccctcaagcgcttcctaaggagagctcaaaatgagtttgagctcaaggtgaagaagataaggagcgacaacgggtccgagttcaataaccttcaagtggaggagttccttgaggaggaagggatcaagcacgagttctccgcatcctacacaccac

SEQ ID NO: 47633 - DNA, 275 bp, Zea mays
  unsure (1)..(275): unsure at all n locations
aatgacaattcttgcaaacatcgtgccaaatatcatgcttcttggtgtctaactaaccatgcaaggaagaatagcccacaggtgaaggtcaaagaaatcttgaaaagacgctctagcaatgatgggtcaaagaaagttgaacccaagtacaagtcccttaagcccaacaatggaagaagggggcctgggttcaactcatccaaggaaaaccctagcacagngcataaggggtggagatcccccaagctcatagagggaaccaccctatatgatgc

SEQ ID NO: 47634 - DNA, 412 bp, Zea mays
ctaaccaaccttgggaatcagaacgccttgtggaaagaaaattgcagaggccgtttcaggaagagtagctattcctcatacaataccaatacgtcttcagtctagaacctacttttcttgctcgctgaagcaagaccagatgacgatactctaaatgcactgtctgtaggagccagtaacattcatgggtggtgtgattgctggcctcttgaggcttgacctgaatgaggatcctctcaaggaatggataagtcggacagtggaggcttctggaatagctgaggaaaacagctctgaagaatcaagtgaggcagatcaaaatgatgcacctcagcatattgagattgagtgaggtgcattggctacttttgtccacttgtcactgttccgtcgtaacttatcctgaatatat

SEQ ID NO: 47635 - DNA, 271 bp, Zea mays
  unsure (1)..(271): unsure at all n locations
ccaccgagagagacgattttttcagcggacggcgccggaggagaacgcgaagcancccttcacccacgaacaccacacgntccagaagaacaaggacatccgcatccagcgccgccgcaagcgctaccgagggcagacgccgcaccacgaccgcgccaaggacgacgacagaacgcccacgcactactacaaaggcgccgagccccacgacgagaaccgcaacgccgcctgaagtaacacgacgggagggggagggggagccaccccagca

SEQ ID NO: 47636 - DNA, 420 bp, Zea mays
  unsure (1)..(420): unsure at all n locations
agcttggaaccataaacacaaggaatactttatctatttaatattatcnttatgaactacataaaaatgcactccttaaaaaatgaaataacttatgggaaaaatattgtgtgggtggcataattggatcatttttttctttgcatgaataaatgaataaattaattaatataagttatacccgcaccatgttggagtttgtttgtgcatctaacttaaaaatttgaaattcaaacctggatttgaattgaaatagaaaacaggaaatacaatagaaaaaaaataaaccctacctgtacctgngccggttctctcattcttggcccattcgcgccccttgccaccttggtccggccccagccgcgcgtaggctatcatttgggcccaggacaaaccaaccacacgacccacttccctgag

SEQ ID NO: 47637 - DNA, 387 bp, Zea mays
actacagatcacctccgaggggaagctatctcagtcttcaaacatggaatatgaacaaaaatgcacagaaacttctaccaacaacataaagacaactccaccatgtaactcatcaagtcgtgcttgctttggctgcggtgataccggccatctttttaatagttgtcctaagaaggatgtggagatcaataaggtccaaaagaaaagacaacactctcaaactcatgcatcaacaaagaataaacaacggaaaaagtccatggaaaggataagttatgcagtgacaggaaccattccatatgacaatgcagtaatttttaaaacactagtcattcacacaactatcgcaaccgtgttgtatgatcctcgtacaacacattcctttat

SEQ ID NO: 47638 - DNA, 217 bp, Zea mays
caaaaaccaccggaaaagaaacccgacatggcaaatacaaccagggcgccaaccacggaaggaaccagaacaaaaaacacccccgccagccccgaaaagcaacccaacaatccccgctaaggaagacggaaaacgaatatccctccccaggaaattttttcgacgacaaccaaacagaaaagagcagagccgcatagcaaaaaaagggagcaaaacg

SEQ ID NO: 47639 - DNA, 387 bp, Zea mays
actcagcttgcaagccctcggacccgaccggacttcaccggaggcctcttatctacctcaccggacttcggtcttccgccgccgcgcgtggaccaagctatccagtgagtttccgcccaaatcctttcgctcatgtcttctctggcatcccgtggacctccctgacctatttgattgaactatctcgccgtgaccaggccggtctcctcgccgccgacgagcatccccgcctgcgcgcgtggaccgaccgactccggccatctccgacggcgttccgcacaccgttgtgatccccgcgacctccccttcaccctcgaccacttcaccggaacagtctcgccgccggtaagcccctccgcccttttcttcgccgcggctactgtttga

SEQ ID NO: 47640 - DNA, 368 bp, Zea mays
  unsure (1)..(368): unsure at all n locations
anatgggactggctaccaccaccaccaactatggcaccttatcttgattctacaacagcaactagaagggcatgcgcaaacacaataacgagacctgcgcgcagagtctgaagctcgcacagacaatagcactgtgcccgagacaaggcacatttactaaagtcatacaggggcattattacaaaatcttcagacctgacgaattcttgaccatctaagccttatatccatcccctttgaagacaatacaagaaggtttaacctttgtcctgtcgtaaaaaatctatggatacaccatcgacgtgaacaagaacggtgatgaagcaccaaagtcattcctaacggaatgcagagctaaaataccacct

SEQ ID NO: 47641 - DNA, 378 bp, Zea mays
agcttacaagacgaagggagaattaccgctctatataatggactatctgctctttcaccgatcaaaagacccccccaaatgcatggcagtgttcctctatttataggcacaaagtatggctttggtaaaattacatttacaccctcaatcctatacatttgatctatttactattggaagaataataatgtcttttccttctatcatcttgacaaacaaactcttgaagacatgcttcgtcttcttccagcttcatcctttgcccctttatggtgccgtccaaagcttgcaccttcatctattactgattcatccaaagatgcttctagtaagtgtacctataacacttagagatataccagagaacaactattatct

SEQ ID NO: 47642 - DNA, 462 bp, Zea mays
  unsure (1)..(462): unsure at all n locations
tacacanatgaacaaaaacagaaacttgcagaatggaattgtgatttatatgggttagattcaagtgatagaaatcaaggagaccgcggaagaaaggagaaatgggaagagcaaggtcgcggatgagaaaaggaacgtaaataacagattcgtgggtgtcttctgtcggaacagtgaccccacggcagattcgccaagaacagagctccttcggaggaagaactccgatggatacgagatgaaaaaggtcggattcagagacgacaaccatgtggttacctgcgaaaggcaactgactgttgggatcgataggaggaatgattgcggcatacgaactctaggatttccgcttgggcgccatctcaaccttgctggcgaacagagtggaagtagtattgcaagagagcagagaaggcctgtatgcagaanagcanaactagggcacataatgcagaggcatgc

SEQ ID NO: 47643 - DNA, 369 bp, Zea mays
  unsure (1)..(369): unsure at all n locations
agaaagacagggnttgtagcgcatgccaagcaggaaagcaagatggggcccatcatccacacaagaacatcatgacgaccgacaggccgcttgagctactccatatggatctattcggcccgattgcttacataagcatcggcgagagtaagtattgtcttgtaatagaggatgattattctcgcttcacttgggtgttctttttgcaggaaaaaatctcaaacccaagagaccttaaagggattcttgagacgagctcaaaatgagttcggcttaaggatcaagaaaattacaagcgacaacgggacgaaggtcaagaactctcatatcgaacgcttccttgaggacgagggcatcaagcatgagttc

SEQ ID NO: 47644 - DNA, 346 bp, Zea mays
gactgttagctcggacggtactccgaagcggcaaacgatgttctgccagaagaatttttgggcagtctttgatgtgattggggaaacagccctcgcttcaatccatttggtgaagtattcgacagctacgaaggcgaacttaaggttcccctgagcggtgggcaggggcccgacgatgtccaggccccagcgctggagaggccatgtatgggcaatcagctttgtatattgcgaggggttgcctgaccgaggggagaacttctggcaggcttcgcaggacctcgtgacccgatttgcggcgcagatcattgcgggccagtaaaacccttgacggatcaccttggca

SEQ ID NO: 47645 - DNA, 358 bp, Zea mays
  unsure (1)..(358): unsure at all n locations
agcttctncttggcgccatcaacctttacattattcactccgacttccaacctgctgcccatttgcttcggtagctgattacaggaaacttttgggttttccgataagcaaaattatagccaccaaaattgtcttgcaatccatcttttctagccttcgtctgatagtgcaattcatgaactcgaccaaagctgtccccaaaccgctccaccgcttggcttcggagggcccagatataaacactaagcctaacaatagcgttaggagtcaactgatgaanatagataccgaacctcttcaatacctctgcaataatcccatgtanggggaatcttaatccaccttagaaacttttgaa

SEQ ID NO: 47646 - DNA, 461 bp, Zea mays
  unsure (1)..(461): unsure at all n locations
tttaacccnncccccncgcgagaccctttctctgttttttcttaccataangaacgcgatattggatgtcatacttgatgcatattcactttatttgttcccttgtatgatgtactgtttgcttcccaatttgaatggatgtatgtatgaatgcttgcaatcgcatagagaacgatccggtcgaagagcccgaggaactcgcaggagaagtccctgagcagcaatcggttggtggaggcaagtgtcctttgacctatctctgtcctattcattacttaattcacctcccgcattacacctttatacctaaggattgactagtttttgttatccatgtccttgtttacctatatgcgttggattattactgtttagctntatgctattgctcaactctaatcaatgaacatgatgagattatctatgatacgctgttttcccctctcttattatgatgttat

SEQ ID NO: 47647 - DNA, 436 bp, Zea mays
  unsure (1)..(436): unsure at all n locations
agcttncggcaaatcctcaaacaacggaaggctgatgactattaatcccgttccaagaaggtttgctacaagtgtggtaagcccggtcactttattgctaaatgtccattatcaagtgacagtgacagggacaacaagggcaagaggaaggagaagaagaagtactacaagaagaagggcggcgatgcccatgtttgtcgggagtgggactccgacgaaagctcaagcgactcctccgacgacgaggacgccgccaacatcgccatcaccaaaggcctcctcttccccaacgtcggccacaagtgcctcatggccaaggacggcaaaaagaaggtaaaatcaaagtcctccactaaatatgaaacatctagtgatgaggatgatataaatgaggacgataacttgcgtattctttttggcaaccttaacatggaac

SEQ ID NO: 47648 - DNA, 480 bp, Zea mays
  unsure (1)..(480): unsure at all n locations
gcttcaaagggagaacacgtgatagggttgactaacgtgcatntttatttgattgattttgtgcagctngtcaagcaggtaaacaagtgggaggagcacatcacagcaagaacgtgatgaccacttcaagacccctggagctgctgcatatggacctcttcggacctgtcgcctatctgagcataggagggagtaagtatgggttagttattgttgatgacttttcccgcttcacttgggtgttctttntgcaggaaaagtccgaaacccaagggactctcaaacgcttcctcaggagagctcaaaatgagtttgagctcaaagtgaagaagacaaggagcgacaacggatccgagttcaagaaccttcaagtggaggagttccttgaagaggaagggatcaagcacgagttctccgctccctacacaccacagcanaatggtgtggtagagaggaagaacaggacactcatcgacatgg

SEQ ID NO: 47649 - DNA, 279 bp, Zea mays
  unsure (1)..(279): unsure at all n locations
gcagctnaaaaaggaccgagaggccttttttggaccaccacgaaacgccacgggagcaacctcccgacaagaaaaacgagaccccaaccatgtctaaagccctctaggcgcgtgagggcccaacaaccccaacagcaggatgaaagcccaaagaaaccctacgcaatggataaaagcccgaaaggccaacctacactcttaccaaacacttgaaatgatctgcacgcagccacagcaaggcgataaaaaaaatcggtccacaaccaacctacaaggaaa

SEQ ID NO: 47650 - DNA, 398 bp, Zea mays
cagcgcacgccaagcagggaagacagtgggcactcaccatccgcacaagaacataatgacgaccgacaggccgctagagctactccacatggatctatccggcccgactggctacataagcatcggcgggagtaagcactgcctagtcattgtggaggattattctcgcttcacacgggcgttctatttacaggaaaaatctcatacccaagaaaccttaaagggattctcgagacgggctcacaacgagttcggcttatggatcaagaaaactacaagcgacaaccggacggagttcaagaactctcaaaacgaaggccttcctgaggaggagggaatcaagcatgagttctgttctccctacacgccacaacaaaatgggggagtggagaggaaga

SEQ ID NO: 47651 - DNA, 260 bp, Zea mays
cctgagccggcccttcttgaaaccgacaatgctgacctgcatgctagcatgaccaacatcaacaaacgcgaacgttagctggtcatgctctgggaggtcagacttataaatgccataagccaacgccgtggcagttgtctcatggaataagccgcaaaggccggaggccggcaataggagcagcatcaagaacagccctgcgctgcaaatcagtgaacgacacagggatgccaatgcagcaatcaacaaccgcagtcttc

SEQ ID NO: 47652 - DNA, 425 bp, Zea mays
  unsure (1)..(425): unsure at all n locations
agcttttgcttggggcccctgcgcttccaccgcatattgttagtaacattgntacgnngccatgcgaccacttagagcttgctggcaaattctgatccaagaatctaaggtaacgagttagcatagtagtagactgaaatagtgaattaactgacatgggtagtcaaaggtcaccacggctacagcatctaatgcgtcctgcaccatcttcttccaactagcagaatcaatcgtgagtttagcacatcacaatacaggcaccgcttncacaggagatgaatgtttcacaaagaacgtaatcacaatatcctattgaccgcttgggcgagaaccggagacagcttactggaccatccagtcggaggaggaaggggcaccggcgccgtgggcgaagatgacaaccggctgaagtttgctttccgcaa

SEQ ID NO: 47653 - DNA, 348 bp, Zea mays
tgcagcttacttattgtttgcaaagaagatgtctgtctagatgcatgcttaattgctaagactagcatgggctggttgtggcatcgccgcttagcacatgtggggatgaagaaccttcacaagcttctaaagggagaacacgtgataggtttgactaacgtacaattcgaaaaagatagaccatgtgcagcttgtcaggcaggtaaacaggtgggaggagcgcatcacagcaagaatgtgatgaccacatcaagacccctggagctgctacatatggacctcttcggacccgtcgcctatctaagcataggaggaagtaagtatgggttagttattggtgatgacttt

SEQ ID NO: 47654 - DNA, 457 bp, Zea mays
  unsure (1)..(457): unsure at all n locations
ctaagctntaccanatggacgtgaagagtgccttcctcaatggaccaatctatttgttgtctatgttgagcaacctcccggctttgaagatagtgagtaccctaaccatgtttataggctctctaaggcgctttatgggctcaagcaagccccaagagcatggtatgaatgccttagagatttccttattgctaatggcttcaaagttggcaaggccgatcctactttattcactaaaactcttgaaaatgatttgtttgtatgccaaatttatgttgatgatatcatatttgggtctactaacgaatctacatgtgaagaatttagtaggatcatgacaaagaaattcgagatgtcgatgatggnggaagtgaagtattntctaggattccaagtcaagcaactccaagagggcaccttcattagccaaacgaagtatactcaagatattctaagc

SEQ ID NO: 47655 - DNA, 416 bp, Zea mays
  unsure (1)..(416): unsure at all n locations
agcttgacaacaccatttgacatgttagataatatttctttgataaagnatatttaattcattcctcaacatgcaaaagcgggtcttatcaagtggcttagtgaaaatatccgctaattgatcttccgacctcactccttctaaaatgatatctcctttagcaacatgatctctaaggaagtaatgacggatatcaatgtgcttggtgcgagagtgttgtacaggattattagcaattttaacagcactctcattatcacacaacaaaggtaccttttctagaactacgccatagtctagaagagtttgtttcatatataaaatatgtgcgcaacaagcacccgcggcaattgatttcgcttcggcggttgacaaagcaacactattttgcttttggatgtcatgatctagtgatc

SEQ ID NO: 47656 - DNA, 393 bp, Zea mays
  unsure (1)..(393): unsure at all n locations
tttcttgcgaacaactcaattgtaaccgaggcaagagacaccaattgtgtggtggtccttgcggngaagtttgctcccgtttgattgagaagaagaagctcactctgttcgagggaccgtttgagagagggaaatggctgaaagagactcggtctttgtgaccacctcaacagggagtaggtttgcgagaaccgagcctccgtcaaacacatccgcgtgtcacactctttattcgcttgagagttgttttgcaccctctctctcggactcgattatatttctaatgctaacccggcttgtagctgtgattaagtttgtaaatttcagattcgccctattcacccacccccctctaggcgactgtcagtcacactacaggaacatgtcagatca

SEQ ID NO: 47657 - DNA, 297 bp, Zea mays
acactcgaaggtccaacacaacaagcaatgagcgaatacagaactattgcagagcatataaccacaacggacctggttcaagagtctcaacatacaaagtccttcccactacgagagaacgggaaacgccgaagctacagggggaaaagaacaaacgcgaactcgcacgtccaccccacaatctcaagtttacaaagcactctaaaacaccctgccaagagtggctagatacgaccgaagcaccgcggaatgaaacacctgccaattactccaaaacacaagatcaatcgatgaccg

SEQ ID NO: 47658 - DNA, 453 bp, Zea mays
tgtggtgagggaacaccacacatacattccaacctatttgtttctgtcatgaacgaacttgtgatgtagctgtgagctgtcacagaacacagagacatatatcacaatctgtaaactgtaatcagctaaaaatgaacaaactaactaaaggcagtaaagcacaggcacacattcacccatagcagtgaagcactctggatctatggctatgcagcagcaaacttgcagagcacaaaacacaagtgctggactgctgggcacctagcactagcagtctaggacaagcaggcggagcagttcacaacttcacatccaggcacaagcaggtgcatcacagcagagcagacacaagctggaggggcaatgcaacgttcaagcaacaaccataagagggaggtgtatgagagagagagagatacatgtgtgcccatgagaatgtgacaacatgctaat

SEQ ID NO: 47659 - DNA, 417 bp, Zea mays
tcaaaccctagggattctaatggaaggatgctcttttgttgctgtgcttcaccatgtgccgctgtggtgtcacacccggttttaaggaacaaagccgggtgcatctcatacatgcgccaagaagacaacatatataataacagagtgtatagagataaatgtcacaataatcagagtatttattacatagcggaagtcttattacaaaataaaagaataaatataaaacgaactaaggatcatcattggcgcagaagtcaactggggaaacgccacctatatcagatcaaactcctcgccttgtggctcctcctgaaccacctgctcttctcctgtggggggtgtgagacagcaagggtgagctcacacatgatcatagctcaacaagttgtggggaaccagtggacatgaactcac

SEQ ID NO: 47660 - DNA, 425 bp, Zea mays
  unsure (1)..(425): unsure at all n locations
agcttaagcccttgtgctgttcatatgattttattacataagaaagatggatcttggaggatgtgtattgattgtagagctataaataatattaccgttcgctatcgccatcctattccatggctagatgatatgcttaatgaattaagtggttccaaaatttttactaaaattgatttgataggtggataccatcaaataagaatgaaaactggagatgaatggaaggctgcatttaaaacaaaatttgggttgtatgaatggttagtgatgccctttgggttgactaatgctcctagtacttttatgagattaatgaaccatgtcttaagaactttcattggaaaatntgttggtgtctacttcgatgatattctaatttacagcaagtctttcgatgaatatgtgaaacaatttcgacaagt

SEQ ID NO: 47661 - DNA, 463 bp, Zea mays
  unsure (1)..(463): unsure at all n locations
tcagcagaatgacagcgaaggttcttcgttctcagatatgcttatatgtgctaacttatgttgatgatatcattgtaaaaagcacgaagcaagataatcacattgctgatctgcaggagaccttcactaattttagacaggccggtttaaagttgaatccagaaaaatgtgtcttcggagtgaagaaagggaaatttcttggctgcctagtttcaacaaaagggattgaggctaatccaaataaaatcaaagctatccttcgaatggaaccgccaagtacaaagaaggggctcaaagattaacaggaagactggcatctctcaacagatttatatctagatcagcagagagaaatttaccattnttcgaagtgctgaagtcagccgaagtgtttcaacggggaccagtccagcagagagccttcgaagagctgaagcaatatttgatagatctaacaacacta

SEQ ID NO: 47662 - DNA, 413 bp, Zea mays
  unsure (1)..(413): unsure at all n locations
tgcaagcttattattactgggagatgccttcattttatttcttanggcagaactcacccctaatttagagatgtagtgcatagagacccattttacacaactcttgttatttttgtctaaaagcatagcctttatattttaagcctcaaattcttaaaataggctagaataacaaatggaaacccactgtaatttttacagaatctttggaaaatattaaaccactgtcgtagttcacacctacactagaaatcataagtaggaaataaagaaagcgagaagtgaataataggaaattagtgtcatcctaaaaactctctataacttgtccactgaagtttataaaggcaataccaatctcctatgtttattctcaataaaaacctaaaagtgataagcataatcccactaaa

SEQ ID NO: 47663 - DNA, 423 bp, Zea mays
  unsure (1)..(423): unsure at all n locations
cgaagcaacaaaaagtcgntctaaggaacgcagactaagtttactgaagtcacaaaaagccgttccaaagggagcgcagtgtaagttttctgctccaaagtcgttccaaagggaatgcagagcttacagcgaanagtcaacgctgataccgcctaaagtaaaaggcgaagcgcgaaaagtcaacgcgaataccgctgaaagtaaaaggcaaagaagctcctaagggaggcttacagcgaagaataaacgctgattccgctgaagtaaaaggcgaagaagctcctaagggaggcttatagcanaaagtcgacgctgattcanatagattatgtgttttatcgcagggatgtgtgcgtgtcttcggaataaataccatcttacatagcataaacatcatcacatcatttcgcatagcataagcat

SEQ ID NO: 47664 - DNA, 353 bp, Zea mays
  unsure (1)..(353): unsure at all n locations
gcttgacatcaccattntctaattaagtaatatttatgaggtccagaatatttagctcattcctcaacatacaaaagcgagttttgtctaaaggctttgtgaaaatatccgctaattgatcttccgatctcactccttctaaaataatatctcctttagcaacatgatctctaaggaagtgatgacggatatcaatgtgcttggtgcaagagtgttgtacaggattattagcaattttaacagcactctcattatcacacaacaaagataacttttctagaactacacatagtctagaagagtttggttcgtataaagaatttgtgtgcaacaagcacccgccgcaatatatt

SEQ ID NO: 47665 - DNA, 465 bp, Zea mays
  unsure (1)..(465): unsure at all n locations
agcttgtgaaggttcttcatccncacatgtgctaagcggttatgccacagccagcccatgctagtcttagctattaagcatgcatctagaccggctcttcttttccaaaatcaactaaataaagtttgccgtctaatacacccttaaaagctagtgaaccatcacttcttctaaagacagacacatctacatttgtaaatagacagttatatcccatattgcataattgactaactgatagcaaattatatccaagagactctactaaaaacacgttagagatagagtgctcattagaaattgcaattntacctaacccttttaccttgctntgattcccatcaccgaatataattgaatcttgggaatccttattcttgacgtaggaggtgaacatcttcttctcccccgtcatatggttggtgcatccgctgtcgataatccagcttgaacccncggatgcat

SEQ ID NO: 47666 - DNA, 470 bp, Zea mays
  unsure (1)..(470): unsure at all n locations
ggacatgttgtgagtcgcatcgtgcatagaaaaataacatatcttatgtgatcttacgangaaatgcctagagcaaatcgaacgatcatcattttctagacggcgtggacacactttacacatgccagacgtaattctcagttgtctattaaaattaattatttattattttattattaattattatctatactcctatataaagcaccacttcaatctttacaacaatcacccaaacaattgtgcatcatagtgtttatctcatctaaatacacccaaccaaatgcaccgagaaccatcccacctttgaaaccaagagacgagatcaatcgaaatctctcctttttcttactcactcaaatccaatgccctagctnttttggatcatcccttactcatcatcaaccatgccttcacccacgatcccctcacatgctactgactcctcattatcctaacccgccaccgcc

SEQ ID NO: 47667 - DNA, 470 bp, Zea mays
  unsure (1)..(470): unsure at all n locations
ctgcaggatgcaagctttaattgtgttgccatcaatcaccaatattgttgagattgaaagctctcttgtgggctctggtggttggatgacaacccaattaaaggactaacaagtgtgctaagtgttgaacaggtgctttatacaaagcttatatggtttaacacaagtaaacaagtgtgatggtccaaagactgaattatttatagataatggacatcacaagatagatggacatcgcttaagtgagactcgatgtgcataacttatagacaaccgatcaagccaatgatggaagcaagaagagcttcgaggtactgagtgcatgggagaaagtaaggagaccatgaaccctagccacgggtgaagaagaagatngcagaatcaacgtgatcgagttatggtgcatcaaggaacactacattacgacatgacttatcacacatgagggaacatctactaatatgtggtgt

SEQ ID NO: 47668 - DNA, 394 bp, Zea mays
acatgtgctaagcggtgaggccataatcagcccatgctagtcttagcaattaagcatgcatctagaccggcctcttcttttgcaaaatcaactaagtaaagcttgccgtctaatacaccttgaacagctagtgaaccatcacttcttgtaaaaacagacacatctacattcgtaaatagacaggtatatcccatatagcataattgactaacagatagcaaattatatccaagagactctactaaaaacacattagagatagagtgctcatttgagattgcaattttacctaacccttataccttgccttgattcccatcaccgaatattattgaatcttgggaatctttgtgtgtgacgtaggaggagaacatcttattctcccccgtcatat

SEQ ID NO: 47669 - DNA, 439 bp, Zea mays
gcagcttatgaaatcctctacatcccaaaggtgttattttatcattttgagcaaatttggcacaccggacagtccggtgtgcaccggacagtcccgtgtgcaccggacatcccatatgctgctcttgttttttcagcaattctgactttgtattgggggcataacttttaattccgaactcttgatttgatgatcttggactttttggaaagcttataaaattatctacatctcagagttgaatccatgtcagtttgagtagaattgatgttgtgaaacacttccaattcagtcagcccttcctctcaactttgtcaagttcacttttggttctgcatcttgtatctcacttctacttcttgatgtgctggactcttaacatgtattaagtgtcttcatatgaacttgaaattctatatgggattataatgccttgttg

SEQ ID NO: 47670 - DNA, 434 bp, Zea mays
  unsure (1)..(434): unsure at all n locations
tctaaagggagaacacattntaggattaacacatgttcattttgagtaagacaggatttgtagcgcatgccaagccgggaagcaagttggcactcatcatccacacaagaacatcatgactagtgacaggccactggagctcctacacatggacctattcggcccgatcgcttacataagcatcggcgggagtaagtactgtctagttattgtggatgattattctcgcttcacttgggtgttctttttgcaggaaaaatctcatacccaagagaccttatagggattcttgagacgggctcaaaatgagttcggcttaaggatcaagaaaattagaagcgacaacgggacggagttcaagaactcacaaatagaaggcttncttgaggagganggcatcaagcatgagttctctctctccttacactcacaac

SEQ ID NO: 47671 - DNA, 303 bp, Zea mays
  unsure (1)..(303): unsure at all n locations
ctatgttgagcaaccttccggctttgaagatagtgagtaccctaaccatgtctataaactctctaaggcgctttatgggctcaagcaagccccaagagcatgggatgaatgcctaagagaatttctcatcactaatggcttcaagtcggaaaagtcgatcctactctttttactaaaacaactgcaaatgatntgtttgtataccacatttatgttgatgatatcatatttgggtctactaacaaatctacttatgaagagtttagtacgatcatggttcacaanattgagatgtcaatgatg

SEQ ID NO: 47672 - DNA, 347 bp, Zea mays
  unsure (1)..(347): unsure at all n locations
tcgtcggccgggcctggtcgggtcgtccactggcgggaccaactccttagtcaagttgccgaggccacgagccgggctggtgtcctcggtggacagctggctgaggcttctgggcggccggccgagccgtctgctcgggccgggttcctggaggagaccctggcagcgatggcccgggcgtggtgctgacgtcatccttcagagcggagatcctccgaccgtgttgccgtccgaggctcggtcggacttcgccgaaggtggagttgacgccgagggtgctgctgctccccccttgacgtctgaacctgcaggatcagctntgtctgtagtgggtgtatgttttttgc

SEQ ID NO: 47673 - DNA, 398 bp, Zea mays
taaaacaagcagcatcacggaaagctgaacactacaagccatatatgttcctagctggcgctactgacgagcgcgtccttgtaagacaccggcggcggaagcggtatcacaaggcccctccggacgccgtgtccgtgcttcatgatgagacggaccttgccctcccgctccaaggccagacgctcctgcgtgccgacgcgcagcttctacaggccccgcgcgcccatctgctgcgtcttgaacaccttgagcaggtacagcacgccgccggcaaggaagacgaggcttccgaacaggcagaatcacgcccagctgctcctctgcacacaccagtgacgacccagagaacaaatacgccagcttgctctactgtcaaattactctagaaaacacaaatt

SEQ ID NO: 47674 - DNA, 457 bp, Zea mays
  unsure (1)..(457): unsure at all n locations
cttaactctcgcgagacctttgcccattcctttctaactatgttgaattcattatcgnatgagatattctatgcatatntactctatctgttctctcgcatggagtactgtttgattcctaatttgaatggatggatgtatgtatgcttgcaatcgcatagagaacgatccggttgaagagcccgaggaactcgcacgagaagcccctgagcagcagtcggttggtggaggcaagtgtcccttgacctatctctgtcctattcattctttaattcacctcccgcattacacatttatacttaaggattgactagcttttgttatccatatccttgtttacctatttgggttggattattattgtttagctctatgctattgctccacttaatcaatgaacatgatgagattatatatgatacgctgttttccaccttcttattatgatgttgtactt

SEQ ID NO: 47675 - DNA, 465 bp, Zea mays
tatgtccgaaagagtactggaaagtccaaggtagagaggatgctcgtggctattggaacattcttaaaatgtcacatgaaggagattccaaagccaagagacttatggatgaggccttcttgcttggttatgcatcaaacgcgcacagataccgtgttttcaacaattccactggtcttgttgaaatagcggtagatgtgacgtttgatgagacttatggatcgcaagggcacatttctagtgatgttgcaggaaatgatagatttccttgtgaggctatcaaaaagctagaaattggtgaagtaagaccactcgagaaggacgatgataatgaaagggtttggatgaccaatggggccactgttgggggtacaaaggtggtagatgatgaatcttccagtcaagtaaacccaacaacctcaagtcatccaactcttgtggaacttcttcaaccacaaaatatgc

SEQ ID NO: 47676 - DNA, 455 bp, Zea mays
  unsure (1)..(455): unsure at all n locations
agcttcctccagcattcttgagccccttttttttttctaagataacaatatgttccactaggggttatgaagctgggttttggctcatccctctntcttcatccaaatttgatgatagcctgaataacaatctagcagactcataagctctgacgaagctgctgcgtcaactaaggaatctatccttggtaatggaaactcatccttcggacaagccttgttgagatcagtaaaatcaatacacatcctccatttgccattggccttatttaccataacagtgttggctagccattctgggtactttacttctctgatgactccggcgctaaagagtctttttacttcattccgagcaccttcggccttggcatcagacatcttccgaagcctcttgtttctgggtctgaaggatggatcaacattgagcgagtgttcataacactcctggtgac

SEQ ID NO: 47677 - DNA, 418 bp, Zea mays
  unsure (1)..(418): unsure at all n locations
ntggccncacctgtaggctcgcatcctcccctgaggtgggttcggttgccactgtcggtaccctgaaactagggtaccccttactactgtataaagacgcagtacacacgtggctatctttagtcgtgtggtacaagagctgtatgtgggaccagaccatgactcgtcctagcctcgggcgactactctgggccagcaacagcgcctgaccccaccacatgggcgggtctgggacaacacgtgtccagagaaagtgatatactccaaggcatcaacagtgagtccggacccccatgggagagtgccgaacccgtgccggacccctgtatatacggtctatgccttcaagtttgacttggcccaagacctccacgtgtgcgaaccagacccctagaatgggatccagaccccccgtatg

SEQ ID NO: 47678 - DNA, 451 bp, Zea mays
  unsure (1)..(451): unsure at all n locations
cggctcagtttttcatttttctaattacagggatgggaattgttacgtgcaaatgtattacatggttaattattcagaaggggacgtcgttgacgcctctccatgaaacatgtctagtggtcagtggatgtgttctggctgcctctgcctctgaagctgtactgtagcagtgtgaatccgggtagacaaatttcacaagaattggtttactaaaccagcctcgttgacctaaatcgtcggagtttcaaatatgactgcatactagatacttcaatctctttacagattatccacatggttaatgttagggtttgtctaacttagaaagtcatcaacgataaatgagattagttgaatcgggagagacccatgaagtagaggatgattatgaggatagtatagagctgacgatcgatcttgatcccanaattcttccagtggacacagatgg

SEQ ID NO: 47679 - DNA, 459 bp, Zea mays
  unsure (1)..(459): unsure at all n locations
acctgcggcatgcaagcttagncaaagatatttctagaatcaagtattctgtttctatgcctaagtccgcgaaaagagtgttcatcaagtggcttggtaaagatatcggctaattgatctttagtattaatgtaagaaatctcgatatcccccttttgtgggtgatccctaagaaaatgataccgaatggctatgtgcttagtgcggctatgctcgacgggattgtcggccattttaattgcactctcattatcacatagcatagggactttggttaatttgtaaccgtagtcccgcagggtttgcctcatccaaagcaattgcgcgcaacaatgttctgcggcaatgtactcggcttctgcggtggaaagagcgaccgaattttgcttctttgaagcccaagacaccaaagatcttcccaagaactggcaaagtcccgatgtgctcttcctattgatt

SEQ ID NO: 47680 - DNA, 354 bp, Zea mays
gcccatagggtcgagctctctggtttcgttcttgctgctgagctcggagaacttggaatttgctcttgaggtgccctttttcttcctcttttgccctttccacttggatggctttgttggagaggtgagaaaagttgaggaagtcttggctggcgaggatggtcttaagctcgggtcttagtcctttcaaaaaacgggccatcttcctggactcggtgctgacatcgtcaagcgcgtaacgggccaactctgtgaacttgtgcacatactcactgacagttcttccaccttgagttagctcctgaaactcatcctccttgagttgaactatcccctgtggtacatggtgctcac

SEQ ID NO: 47681 - DNA, 342 bp, Zea mays
  unsure (1)..(342): unsure at all n locations
gcaaaatgaacatgctgatttgttagccaggtctgcagcacaagggctgccgctaccttcggatgtattcttcgaaacaataaaggcaccttcagtggagttacttgaaagagcagttcttactatttctcctgtgtacagngaagattggagaactgaaataatttcttaccttcagggcaaattcctatcagatgacgaagcttataataaaagaatagaggcaagagctcgtccgtatatcattatagaaggggagttatacaagcatggagtttgtgccccgctgctcaagtgcttgtctagagccgaaggtatagagttgatgaaggagatacatgc

SEQ ID NO: 47682 - DNA, 320 bp, Zea mays
  unsure (1)..(320): unsure at all n locations
ctcttcgtcgcttacgggtcgccgccgaccgcattacaacgtggctgggaactttcgcaccgtaatcacccgtaagggtcttctaaatcttctcacatactttggtagaccatgtangatcgatcggagttaggatcggggctcttgggtgtctgctcggccaacttcggtgatggcgcggccgtggggaggctctgcgccgtcgtggcttggtcgtggggttgaaggcgctcgctggccgtccgatcggtgcggacggctgagaatatgttagagaatccccttcgtgggattcggtcttgtccaccggatcgcgatcg

SEQ ID NO: 47683 - DNA, 137 bp, Zea mays
acaccgaagcaactgatggccccccaaaccaaaacaaggagaccccaacagtgccccagacgcacactagaggggaccaggcaaaccagccgaagacaagccaaaggggcccacacgatcaactaggacacaaagag

SEQ ID NO: 47684 - DNA, 429 bp, Zea mays
tctttgagcccgatgatgaagctacacagcttgccacactcttttttgtgggtgtgaatttaccgtaggtggatgccaatattggtcacttgttttttattcctaataaatataaaaacaaggcaacacaaataaaatattccctttcacccatttattaatcttccaagaggggattcatgaatgggacaaggtgtaaaaaggtaataaaaacttggcaaaatgaaattgtattggcccattttgttattcattatttcatattgaaatgattacatacgtgaaagggaaatagggtcaaaccttttcctaaatgatattggtggttgaaatgcccaacacaaataattggactaactagtttgctctagattatatattctacaggtgctaaaggttcaacacaaaccaataaaaagattaaagtta

SEQ ID NO: 47685 - DNA, 429 bp, Zea mays
  unsure (1)..(429): unsure at all n locations
cctgaggcatgcaagcttgtgaaggttcttcatccccacatgtgctaagcggtgatgccacagccagcccatgctagtcttagctattaagcatgcatctagaccggcctcttcttttgcaaaatcaactaaataaagtttgccgtctaatacacccttaaaagctagtgaaccatcacttcttctaaagacagacacatctatatttgtaaatagacagttataccccatgttgcataattgactaacagatagcaaattataaccaagagactcaactaaaaacacattagagatagagtgctcattagaaattgcaattntacctaacccttttaccttgccttgattcccatcanccgaaaatattgaatcttgcgaatccttattcttgacgtaggaggtgaacatcttcttctcccccgtcat

SEQ ID NO: 47686 - DNA, 466 bp, Zea mays
  unsure (1)..(466): unsure at all n locations
tcggcattacttgcaagcatatcatataattgttccttcatcgcaacctttgaaagacataataaggaataaagaagctactgggaggatcggaaaatggctgccgagctcaatgaattttctatagactatgtacacaggtcctcaattcagtcccaagcgttagcggatttcatcgctgattggacgccaggggctcatgaagaagtaacaaaggacgccaaagcctggacaatcttctgtgatggttcttgnggaaccttcggcgcaggagccgttgctatcctagtagtgccttctaaagtcagaacatgctacgcaacaacgccggactttagttgtacaaattacattgctgaatacgaagcccttctgttggggcttcggaagctaaaggcaatgggaataagaagggcgatccttataactgactcccaagtcatctctggccatgtagataaaaagc

SEQ ID NO: 47687 - DNA, 382 bp, Zea mays
gcagctgggggcagacgacgccggccggccactcttatatggtttctataacagacgctttagaaaaggtctccgattctaaaccctctctagattataaaaactacatgaatactccctccgtttcattatagatgccgctggatagtgcaaaacttaactatccagtgataactaaaaagaaacggagggagtaccatcgtactcctcgaatataagcactccattccaatctataatccactttaatctataactccgcgtgactcctttatcataagcctgaccggctgcatcactaaaacgctccataatattggtaagattcgtcgcgaatgggctagccgaaacacatactctgaacacgcgcttgctttccatt

SEQ ID NO: 47688 - DNA, 411 bp, Zea mays
gtcaacaaaaggggctgggccaacggtcgtgcttcagcagtgaatgtaagctggggtgcttggttttcatggcaaactcccgtgaattctggctcgggcggggcttttggtacaccagtgcaaacggctaacggctctggtggcatttataggctacggcgaagtgcaaacgcgcggtgcggtgcgaccacgcgcggggcgcgtgctgccgtggccagtttgcgctcggtcggcctgacacggcgacgagcacgtggctctttgcttctgcccgagttcaaacgctcataggttggagatcttcgcgtatttgggcatgatcattgcactagatttgctctcccgatagagctttgtcgtttatgtgtggcagacaagcgcgtggcggctgtgtacagagagttgtcccgt

SEQ ID NO: 47689 - DNA, 54 bp, Zea mays
gccaccaacccgaggagacgacacacaccccaggggcatgactgaaccccaaac

SEQ ID NO: 47690 - DNA, 375 bp, Zea mays
cgcctcgaaccaaaagcatacaatgtctttgtcatacacagaataacttaatcgagcacctcccaatttctcactacaatatgctataagtgttcacttgctgcattaaaactccacctatcccaatcccactagcaacacattgtacttccaaagttttactgaaattcagaagaacaagtacaggagcctcagacaaacgtttcttcaattcttgaaaagccatcttctgtgagattcctcaattaaattcaacaaccttctctgtcaattcatttaaaggaaaagcgatggtactgaaatcttgcacatatcttctataataaccagcaagaccatgaaaacttcttacttgacttacattcgttggagctg

SEQ ID NO: 47691 - DNA, 409 bp, Zea mays
ctgcagctgacttgtcccctggtggaagcatgtctttcttgatgccacggcgtcttccattatatgagcatgcttctagcaaaaataaaatttttattttctatttcatgctcattaattttactagttaggtgggctaattgaacattttgttggttaattaaagctaggtgatcatgaatagcatcaacattaacatctctacatctaagggcaatagagacatgggtaacagtagatgtagaaggtttgcatgtatttaattcatcaatcttagcatgtaacatggcattctcatttctaagaatcggaaatagaatcatctgcaatatttaaatctttagcttttgaaattgaacacccagtttttttataaatacaagaggaaaaaggcattcctatattttat

SEQ ID NO: 47692 - DNA, 434 bp, Zea mays
tctacagggagaacacgtgataggtttaactaacgtacaattcgtatatgatagaccctgtgcagcttgtcaggcaggtaaacaggtgggaggaacgcatcacagcaagaatgtgatgaccacatcaagacccctggagctgctacacatggatctcttcggacccgtcgcctatctaagcatagggggaagtaagtatggtttagttattgttgatgacttttcccgcttcacttgggtgttcttcttgcaggataagtctgaaacccaagggaccctcaagcgcttcttcaggagagctcaaaatgagtttgagctcaaggtgaagaagataaggagcgacaacgggtccgagttcaagaaccttcaagtggaggagttccttgaagaggaagggatcaagcacgagttctccgctccctacacaccacagc

SEQ ID NO: 47693 - DNA, 204 bp, Zea mays
tctccgccggctcgtttttcccacctctcttttccggcgtctttgcccactcattcttgagcccctcctcgcctttttggccattccaggcgccacccccctatttctgcccgtccggcgtgccgctacgtcgttgcgacctaccggcgcccgccgactcctgtcgggcctccgtgccaccttccttatcttgtgccccccgac

SEQ ID NO: 47694 - DNA, 463 bp, Zea mays
  unsure (1)..(463): unsure at all n locations
tggtgcccacagcactatggagactctcccagaatttggatacttatttggagtctcgatcagaaacaatagacttaggtaccccgtgaagcctgactacttccttcatatacaagggaaccaaatttgaagctgaatttgtggtcttcatgggaataaaatgcgcagacttagtcaagcgatccactaccacccaaatagcatccctgccacgaggggaatgaggtagacccaccacaaaatccatggtgatatgctcccatttccactctggaatttctaatggcttcagcaaacctacaggccgcttatgctcggccttcacgtgctgacatacttcacaggcggccacatacttagaaacgtcaaccttcatccgcttccaccagaagttntgcttcaaatctcggtacatcttggtttcgccaggatgtacggtgtaaggcgttntatgagcttctct

SEQ ID NO: 47695 - DNA, 334 bp, Zea mays
ctcggcatctatgacctgatcatcgccgccatcatctctgccgggatcaaccccaaggcccaagccaagccctacttcttagacgggtacacacacctctccttcgaactcgcatgcagccttgctggcctcgctgccggcatggccatcagcatcgtcagagacaccacagtcaggtattgtactactctgattgcagggtgtatgcttgaacatatatgaataagcacagctgcaacattctttcatcagaaaataagcaagccaaactgatctagaatacactggttttgagaaataagcacaacaaaagatgctatgtgccccttcttca

SEQ ID NO: 47696 - DNA, 467 bp, Zea mays
  unsure (1)..(467): unsure at all n locations
tcggcggaaggttcagctcccaaccaagaaggttggtttgcttattctgtggagaagacaaaggacatgcaacaaggacgtgccaagtcacgatccagaaataaaaagaaatagctaaagacgaagcatgacataatcagccgaagcagggcctccatactgtttcgtgctattccccatacatccccgagtatgtgggcaaccagcagtccacaacatcagttgcttcgacaagccattcacaagctgaatggccccagctaccaccaccacccatggctccaatcctgcctcataatcaaccggcagaagggcatcgtcaggcactatagggtgatacgcgtgaagagtctgaagcttagacagtcaacaacattgtgccagagtcgagacacatatactgaagcaacacaggggctcgatcaaacattntccatattcaatggaataatttgctctaaatatct

SEQ ID NO: 47697 - DNA, 449 bp, Zea mays
  unsure (1)..(449): unsure at all n locations
ttatcanatggacgtganaagtgccttcctcaatggaccaatcaatgtataggtctatgctgagcaacctcccggctttgaagatagtgagtatcctaaccatgtgtataaactctctaaggtgctttatgggctcaagcaagccccaagagcatggtatgaatgcctaagagattttcttatcactaatggcttcaaagtcggaaaggccgatcctactttgtttactaaaactcttgacaatgatttgtttgtatgccaagcttatgttgatgatattatatttgggtctactaatgaatctacttgtgaggaatttagtaggatcatgacacagaaattcgagatgtcaatgatgggagagtngaagtacttcttaagattccagtgaagcaactccacgatggcaccttcattagccacacgaagtatactcaagacattctaac

SEQ ID NO: 47698 - DNA, 431 bp, Zea mays
  unsure (1)..(431): unsure at all n locations
gcatgcaagcttccagaaccactagagacatcaacagtcntgtacatataataaaacaacctttctaccaccaatacatacaaaaaaaggccgggaaaataattgacttactaaataaaaggctgttgagtttcttgaacagtttcagggtcgacgaagtaaggtacgggcactgtaaataccattatcttgttctccaaaactgtctgtgcactgtggagggtaaagtgcaaatgatgggacatggacactagcatttgtagaacctggcattgcaagttcaaaatgaccaggaagaacatggagcatataaaccactggagcagaataaccaccggtgcatgctgaacaccatgatcaagacagagttagcgagactcacaggcacgaggaagacttgcagatggagatggtgctatggtatgttaccc

SEQ ID NO: 47699 - DNA, 422 bp, Zea mays
  unsure (1)..(422): unsure at all n locations
tcctgcattattgtatactacacgtatatgcgtatgtacgtttcgttttnttntttgnatgcatggcgcgctggagtgactctatcgagcagttcggaacgcgtacggtattgacctgcggtgctgatctagacagctttttatccggaacagagcaatgatggaggagggtcggcgctgcaagcaacagcgggtaggccaccaacacttccgagacgtgcatgtcgctgatgcgtacgtgtacgtcgatcaatcgaccgcggcccgcattgatgtcaaagcggctcatacggaatagaataagacagcgcgaccgtaacccgggcgcgtacggctcatacgtatgcctatcgtaantgtctgggcgacgctgacacttgcggtcgttctttctccgatctaatcaacggacacaggtccct

SEQ ID NO: 47700 - DNA, 321 bp, Zea mays
  unsure (1)..(321): unsure at all n locations
caatcgaagggattacagccccccgcgaagacaaaggcatccactccgtaactcatgccccgccaacactccgaagacacgcccattccttggggagaaatgacaagaaagaacaggacttcaccctcncacgagagagtacaacgccacaaagcaaaagaccgcattccgcctctgggataatcctaacccatcacctacgaccaagggaacaactacctcacgggaccaaacgaaaccgctttggcgacccaccccaacaaggcgagaaaagagcccaaacaaaggaccgacccccccccaaaacaaaaccagggcccc

SEQ ID NO: 47701 - DNA, 431 bp, Zea mays
  unsure (1)..(431): unsure at all n locations
ctaccctacacaaggattaaggggcgaagactgaatccaacttgagaaaatctaaatactctaggataatagtgataaaatatccccaaaaacaaagttgaaccacaattatacccctgggatactaaaaaccctaattggaaccctggaaaaccctaaatccaaaccctaggggcttatgtgcaaaattagtccacttttggactaatttgcaaaaaccaagttaaataagtatctaaagtcatttggggcactcatatgtgaatttacaagccacaccctaagttntggacttaaatgcaaataggacccccaattgagatttctctaagtctgaattttggaatagtaagctcaactttgggcattggatcttccaaattattgagaatttgccctacgtcaccacatcaaagttgaagactaaacat

SEQ ID NO: 47702 - DNA, 446 bp, Zea mays
  unsure (1)..(446): unsure at all n locations
ttatcaaatggacgtgaagagtgcattcctcaatggccctatctatgaagaggnctatgttgagcaaccttttgactttgaagatagtgagtaccctaaccatgtgtataagctctcaaaggcactttatgggctcaagcaagccccaagagaatggtatgaatcctgcgagacttccttatcactaatggcttcaaagtcggtaaagccgatccttgaagcgccctagatcctctgggactcaaatgtgatacaattactagtcccaggaggctagtaaacacatttatacatcagatgattctagatctgcttaaacgatacaaacctataaaggtggcgatcaaaattaagagttggtccacaactcgggacatatcatcagagtggngctaaagcagcccgatatacgcagcgaagcaaatcagcggtccacagccacatgc

SEQ ID NO: 47703 - DNA, 386 bp, Zea mays
gcctctaagggagaaccgagaaggacttttctagtcccttcgaaaagaagacactggcaagctgacaacaggaaacaaggggaggagccatcacgcaagaagcgaagccacgtcagacctctggagctgctacatatggacctcttcgacccgcgcctactaagcataggaggaagaagcacggtcaactattggaacgactttcccgctcacttgggatactttctgcggacaaattgaacccagggacctcagcgtcctcagagagtcaaagagtcgagccaaggaaaagaaaggacgacacgggccgagtcagaccccaagggggagtcctgggaggaggacagcacagtctcgctccaacacacacaaatgggcggaagaga

SEQ ID NO: 47704 - DNA, 466 bp, Zea mays
  unsure (1)..(466): unsure at all n locations
tgtgaagattcttcattccaacgtgggctagtcggcggtgccaaagccaacccatgttagtcttagaaattaagcaagtgtcgagctcagctctattaaaatccactaagtatagctgaccctcgagtactcccttaaatgctactgaatcatcacttnttctaaagacagtaacacctatatccgtaaaaagacaattgtagcccatttgcataattgagaaacaaaaagcaagttgtaatctaaagaatctacaagaaaaacattggaaatagagtggtcaggagatatagcaattttaccaagtcctttgaccaaaccttgatttccatccccgaatgtgatagctctntggggatcatggtttntctcatagaaggagaacatccttttatccccagtcatgtggtttgtgcacccgctatcaattatccaacttgagcccncggatgcataaacctacaaa

SEQ ID NO: 47705 - DNA, 251 bp, Zea mays
cgcagcatgcactaaccacaacgtaggcacgtattttttcggatattcgctgagaacgcttgatgtgaactcacccttgcttaaaaacaccaaacccaaggtatacccaatgcaaccagtgttcaggagagacgaaggcaccatggaggactttaaggagttcaggacttcgacgagatttagaataaatcaggggcaacacccaagttaacagccgggaaaggctcaacaaacgtgggtaggtccaccct

SEQ ID NO: 47706 - DNA, 444 bp, Zea mays
  unsure (1)..(444): unsure at all n locations
actaacatatgttcatttttatatatacgggattcgtagcgcatgtcaagcagggaagcaagttggagcgtgtcatccacacaagaacatcataacgaccgacaggtcgcttgagcaactccacatggatctatacggctcgatcgcttacataagcatccgcgggagtaagtattgacttgttattgtgaacgattatactcgcttcacttgggtattctttntataggaaaaatctcaaacccaagagaccttaaagagattcttgagacgggctcaaaacgagttccgattaagaatcaaaacgattagaagcgactatagaacggatgtcaagaactctcaaattgaagcatttcttgagaaggaacgcctaatgcatgagttctcttctccctaacacatcaacanaatggtgtagtggagagaaagaatagaactcta

SEQ ID NO: 47707 - DNA, 412 bp, Zea mays
  unsure (1)..(412): unsure at all n locations
caaccctggcaactcgacctcagaagacctgtgtcatatgcttctcatgctcnagcncattctgggaatatacgacaatttcatcaatgaacaccactacgaacttgttgaggtagttcatgaacacactgttcatcagatacatgaagcaagctggggcgttcatcaattccaatgacataaccatgaactcctatagtccatacttggtgatgaatgctggcttcagaatatctgagggacggattctttgatggtaacctgacctcagatctatctttgagaacacactggctcctctcaactgatcatatacgtcttctattcccggagggggtacttgatcttgatagtgactctattcaaagctctgtaatcgatgcacattctcttcgtaccatccttcttctca

SEQ ID NO: 47708 - DNA, 446 bp, Zea mays
  unsure (1)..(446): unsure at all n locations
ttcttcactgacatctgcgagaacggctactgttatatggtgcacgagataataaaaaaagtgaagaagattctcatgatgcaaaagaagcaatgaaggcagctgagaaagctgcggaacatgaaaggcggataggtattgcttaattgcttttgactttgtgttttatntctgtgacttcgaacttatttatgttttatattgcagctgagctatctcctcctccggagcccttctagccaacggccgacccataagcaaagagagaggaagaaatctgtaaaatggccgaagctattttggatgaagctatttctcaactgttaaacgaagctgcagaagtatgtttaaaagaagaatagctgctattgtcaaaacatttggaatgtaatatttgctgaacaaagtgtgcagcatttttattaatttgaatgtaaatataagct

SEQ ID NO: 47709 - DNA, 351 bp, Zea mays
tctctctaagctccatatagagacgagcgattttatttttagtgactcgacagatagaagagcgactgcgtatattgtccctttgcgcttggcattgcacccgctttttcttttccatcttattccaaagtgactttgattaaaagcaagagacaccatgcgtgtggtggtccttgaggggtctgagcgacccatttattaaggagaaagctcactccgtctaagtgaccgtttgagagagggaaaaagatgagagagacccggtctttgtgaccacctcaacggggactaggctctttggaacccaacctcgataaaacaaatcaccgtgatcatcccgcttattttctt

SEQ ID NO: 47710 - DNA, 421 bp, Zea mays
  unsure (1)..(421): unsure at all n locations
agcttaagctcagagggctcatcaccagtgtcttcagcttctcccttcttttctcatcagccttgatataaaaccactcacttttccaaccagttggccatttggtccgatagttgaggaccggggccttcgtatccttgcgatacgcgaagttgtaacagccaaaattctcatgtagcccgtcttctctggccttcgtttggtaatgtagctcatgcactcggcaaaaagcttcgacatttgggtccatttcttggcttcgaagagcccagatgaagacactgagcctaacgatagcgttaggggtcagctgatgaagatagatttcataattatccaaaacttccncaatcatctcgttcacgggaaactgcaaccccgctctgaataaacttttgaacaactaccacctcatcatctt

SEQ ID NO: 47711 - DNA, 361 bp, Zea mays
  unsure (1)..(361): unsure at all n locations
ctatcacaccatncaacatatgctacattactggacaaataaagcgactcaaatgagctaatgcatcataggaagctcaactagctcaggtgattgtcggtatggatgtatacccaaactacccaagataaagctctcatcaagagcaaactccgggtgacctatcttctctcttaaatatcaatgcacacccacgatcctccttaggcatggtacacaatggctatacagacatctcacatattctgtataaattgcgacaataggtgcaactgactcattatccactctgacacgggtagttacaggtacaacctgcgtggttcctgacttttgctagtgcattcatattgttaaacca

SEQ ID NO: 47712 - DNA, 442 bp, Zea mays
tctggatatgggtcgaagagaagcagcttccttctattggttttctggcaaaaatatccctcgaggacaaaatgagcatgctgatttgctagctaagtcagcagcacaggggctgcctttaccttcggatgtattcttcgaaacaataaaagcaccttcggtggaacttcttgaaagagcagttcttaatatttctcctgtttttagcgaagattggagaaccgagatcatctcttaccttcaaggtaagttcctttcagatgacgaagcttataacaagaggatagcggcaagagctcgtccatatgtcatgatagaaggggagttgtacaaacatggagtttgtgctccgttgctcacatggttatccagaaccgaaggtatagagttaatgaaagaaatacatgcaggcctttgtggatctcacatcggacctaggccg

SEQ ID NO: 47713 - DNA, 437 bp, Zea mays
  unsure (1)..(437): unsure at all n locations
ctggcccagcgtgcctatggcgcgcggctatgagctcgtgctttcgctctgccccaacgtgcgcacggctagtgcgtggcgtgtgcgtgcggccatccgcgcgcgcccgcgtantgcgcgtgccttggcacgacccgtcgtgccccatcttcccccacacaccccgtctaccccccttgtcctatgcacgctaaacccatgtttatattaatatggatacgagtctcatattggaaattggctacgttagctaatttgtataactaatcatctatctcgctcatggtaatctactaaaagtggtcgccgatacattagtggctgtatctaattcgtttgggtagaaccaataatactagagcacgtgacgggttgtcctttgtttacccgagtgcgccttagcctaagctttaacccctcgagacctctctggttct

SEQ ID NO: 47714 - DNA, 435 bp, Zea mays
  unsure (1)..(435): unsure at all n locations
agcttatgaagattcttcattccaacatgggctattcggcaatgccagagccaacccatgttagtcttagcaattaagaaagtgtcgagtccagctctatcaaaatctaccaagtatagttgaccctctaaccactccttaaatgctattgaatcatcacttcttctaaagatagtgacacctacatcagtaaaatgacagttgtagcccatttgacacaattgagaaacagaaagcaaattgtaatataaagaatctacaagacaaacattggaaatggaatggtcaggtgatatagcaattntacccagtcctttgaccaaaccttgatntccatccccgaatgtgatagctcgctggggatcttcggtttctcgatgagaacatcttcttctccctgcatgtggttggcacccgctgcgatgatcaactgag

SEQ ID NO: 47715 - DNA, 445 bp, Zea mays
  unsure (1)..(445): unsure at all n locations
cttgcatgagtctgtatcaagaagatcattacgttttcttgttgttatccctccattgctttatgagtgttgcacattttatctcttttgagaggagaaaaaaagatgttatatgtcatgagcaccatttgcttcacgtcaacaaaatagttttggagatttctattagttggattctagtgtaataacaaccatgttttatagtgcttgagatgggtatgtcaggtgttccatacattgtcgatacatggatgtttgaccttagtggcgttaacaaacgaggatgttgaatttcttgattgttgtgcttagtgttctaacctatttggtagagttttatttaaagactntgtggagttgcatcccaatttgatagtggaaaatcctagtgttgattgaccttgcagtgccttgggttcattttatattttttttattgtggtaa

SEQ ID NO: 47716 - DNA, 237 bp, Zea mays
acagcgcttcaagattgcgtccgacactcagaacaggggaccccaacagcagcaagggagatgggtgatccgaccacagcagcaagcagcaggcacccaaccgcgcctagtttccagctcagaggaacaatcagcagcagcaacagtacccgcaggcaaatgacaacaggtgttctacatgtggcaacaccggacactatgccaagaattgctccagtaaccagcagatgcacgggt

SEQ ID NO: 47717 - DNA, 334 bp, Zea mays
  unsure (1)..(334): unsure at all n locations
cctcgcgccctggactaagcgcctccgcgcgccttgcgcggattggccgcgtttgaggccctgagccgaggaggaagactcccccttcatattgtcaccctggcaagccctccactgctcccgagtgagatgtagcttcccgctgatggtgaaaggcccacatagggcatgtggttcgttgccgtcgaagaccttgagatgaccaatcgcttcttcgattgtcatngtggagaggtctaccagagactccgatgaacgagcgatctgcttgacttctcgcgatgcaacgaaagacttcttggggctctctcctcattgaagtgtcgtccgaacc

SEQ ID NO: 47718 - DNA, 475 bp, Zea mays
  unsure (1)..(475): unsure at all n locations
actaagctgccttgcctcacataccacccgcagtccaactaagttgtggtttacgcttacggcanaattttcacagctgtcaagaagatgctgctcgacgataaaaaaggcaagtgggctgaattgttacctgaagcagtctgggcgttaaaaacgactgagtgcagggcgactgggttcacccctttccgcctcctatatggatcggaggccatgaccccgcaagaaataaaacatgggtccccacggacagtcccgtcagctgtccccgacgtggacgagcccacttcgaaggacctcatcgatggagaccgggtcttcgccctacaggccctaaacaaatagcaggcccagacaaaagcatggcgcgaccacgcagtcatcccgagggaattcagcgaaggagacctcgtactcgtccggacagctcggacagagtccaggggcaagctggagcccaagtgggagggccctt

SEQ ID NO: 47719 - DNA, 469 bp, Zea mays
aatcacgctctgaacgattgaaatcagctgatagacttcaatggtgtccttctcatcaacaagcatttcaagagctcaagcattatgtgatccaactcacaattccatttacaccttcgctagaggctcctttgatgttatacgtctctgcttcttggtctattgtaagtgttgctttggtacatgagaagctaaaaggtggaaataaaaaacaaatgtcagcatacttcatctttgaagtacttggaccttccaaacaaaattattcaaaaatggagagtcttgtgcgaaatactgatggcttccaggaagctttggcgttactttcaatcataaaacatcatcgcgcctttggctcaaccattagaagacatcataacaaatagagaagctactgttcgagttgaaaagagggccgccgaactcaatgagcttgttattaactttgtacattgttcatacatctaga

SEQ ID NO: 47720 - DNA, 418 bp, Zea mays
aagacccgtataacgctcgtgagcaaggcacgaggatttcttcctctacattacttattgcacccaaataatacattcaataagattcacttttggatatgtgcataatttgatgggtttttcttaaataggattaactagaaataccaaccttattccttgattaacctgcgtttaatattatgcttagtaactacgctattgctcaattttatcactatggtgtcactttttaatataatattgttccgaagatgaaatttatactattgttgttaatccgatgattaaacaagagtattttgtattaaacctaacatggagtgaccacccaggaaaatagtgcaaccatgagtgctatcatggctctggctttggtaaatagctttatagacttagtgcttatcaaccttacctg

SEQ ID NO: 47721 - DNA, 277 bp, Zea mays
  unsure (1)..(277): unsure at all n locations
gctttaaagcataaagcgttgggaaaaaagagtaccgaaaaaaaagctccatcccggattgtggatcatgaattctttgaagatctggcctgaatcttaacattccttgaatgatgaggtcgaacatcattgaactttcgtcttgaagtcgtcatcccaattaaggacatgtagttacgataactctgacgtaacgatagatggttaacaggtcggcggcaaagataagtgattatggcaacatctatgaagngatggatggtcaccatgaatatgc

SEQ ID NO: 47722 - DNA, 472 bp, Zea mays
  unsure (1)..(472): unsure at all n locations
acactatacaatatctaagcttagccagaagtatcggaaatagattcatgacccagatctgtgatttggctgacggaaaatggcaggcgacgaagctcgaagccatcttaagccggtaagaaacttatgttntgttacttttaccttctcctttgaaatttatacctttcttactctgttatttggtacatacaggatgacgaagctgaagattgacaatgctgaagtttggcaaaactgaagacgaagctttagctgaagcttaaagttgcttataatatgctttcctgcaaaaattcttggagaaactcttgtaatatagatatggaatatcttatgtaaatttgtacataccttgtaatatatcatgtctcccttatccatattcaatctgcttcgctgtggacgaaacttctcttttgagccgaaggcgaanaacaccttcccttcttttcgtacacaacgaagcata

SEQ ID NO: 47723 - DNA, 261 bp, Zea mays
  unsure (1)..(261): unsure at all n locations
agcacgaagcacgataatcacattgctgatctgcaggagaccttcactaattntagacaggccggtttaaagttgaattcacgaaaaagcgtccttgagtgagaacagggaattccttggatggctagttcaacaaagcggatcgaggcaagtctgaacaacaaagtattcttcaatggaaccgcaagacaagaagggctaaagataacaggagactggatctctcacagattatattagacagcagagagaaataccatt

SEQ ID NO: 47724 - DNA, 163 bp, Zea mays
agaacacatcgaccggaggcaaaaaatacgaccaaccatacaagaccacacatacaatcataaaagaacgagagataagacagcccactaagcctcagccaataaaaaagacaaaaacgaacaaacgacgctaactggcgggaaacagaccgaacgtcgctct

SEQ ID NO: 47725 - DNA, 410 bp, Zea mays
agctcggtgaactaatgagctctggctcttatcgtctgacactatccctttatcggcactcccgcttttcatggagatcaatattccacaaggttcggtcaacaagaactttgtgatatggctgcttcttttgatcatataggtttcttctttcaacttgtgtcgggtattaatataaacttgaattcatctggaagtagccttttacggacttgcttatattttttgagcaatcttctttggcgccccataaaatctcgtcctgcgtctatcccgtcagcttctcttacggtgtcgttggttggatgtacatgccaaaatggaagagagcggctaccattttatagtgtttggatgacagttacgtatgggcgagatgaataccggagtatatttggcgacgtgatcct

SEQ ID NO: 47726 - DNA, 451 bp, Zea mays
  unsure (1)..(451): unsure at all n locations
tgccaatacttgtcanagcaacaacatctgccagcacagcatctgttgaccataccagtaactnggcctttcgcatgctggggactggatatgattggacctttcaagaaagctcaagggggatacactcatgtattggtagcaatcgacaaattcactaaatggatagagttcaagcccattgcttctttaacctctgctaaggccgtggaattcatacaagacataatattcagattcgggataccaaacagcatcataaccgacttaggatccaacttcacaagttcagagttcttcgacttctgcgagcaaaagagcattcagatcaagtatgcatctgtagcacatccaagagcaaatgggcaggttgagcgagccaacgggatgatactggaggcactcatgaaaaaggtcttcgacaagaatgaaaaattcgcaggaaagtgga

SEQ ID NO: 47727 - DNA, 235 bp, Zea mays
tgagctgcacttgaaaattgaacgggttttttccaacctcttccaagatttcttgcaaatatcctcgagacaaatgacatgctaattgttactaagtcacaacacagggctgccttaccttcgatgtgtacactcaaacaataaaagcacctttggtggaacttcttgatagaacactcctcaatatatctcctcgttatagccaagactggagaacccgagattatcttcttac

SEQ ID NO: 47728 - DNA, 436 bp, Zea mays
  unsure (1)..(436): unsure at all n locations
actcagctcctcagggagaacacattntgtgactaacaaatgttcattttgataaagacagggtttgtagcgcatgtcaagcatggaagcaagttggtgcccaccatccacacaagaacatcatgacgaccgacaagccgcttgagctactccacatggatttattcggcccgatcgcttacataagcatcagagggagtaagtattgtcttgtaattgtggatgattattctcgcttcacttgggtggtctttttgcaggaaaaatcacaaacccaagagaccttaaaaggattcttgagacgggctcaaaatgagttcggcttaatgatcaaaaagattagaagcgacattgggaccgagttcaagaacttacaaattgaaggctttcttgaggacgagggcatcaagcatgagttctcttctctctacacacc

SEQ ID NO: 47729 - DNA, 436 bp, Zea mays
  unsure (1)..(436): unsure at all n locations
tcggccttcggaggccgaagggtgaaatgaatgaagctgtctattattgccanagggccttccgcgttatctgttcttttattggaacgagagacttactacaagagcatattgccttcagggtatggccgctcgcggtgaaatgggaaatgccacatgaaaccataaaagaggccgacgaacgtggacttatcatgttaaagtacactcttaaatctggggataaattcgttgagccatatgatgactggttaaaaagcattgaaaatttaagtgatgaactgtttggggcttattctaaggccgaagacactgctatgtcagcagcctttggaggccgaaaaaagaagacgctgaatcgggtatttgatgcaatcgggtttgtctaccctgactattgctatcccattcgaacgccgaaaagaaaaacacacct

SEQ ID NO: 47730 - DNA, 345 bp, Zea mays
caagcttgcgttaataacccttatttgttttgaaccatcacttcttctaaagacagacacatctacatttgtaaaaaagacaattatatcccatattgcatagttgactaacagatagcaaattgtaaccaagagactcaactaaaaacacattggagatagagtgctcattagaaattgcaatattacctaacccttttaccttgccttgattcccatcaccgaatataattgaatcttgggaatccttattcttgacgtaggaggtgaacatcttcttttcccccgtcatatggtttgtgcatccgctgtcgatatccagcttgaacccccggatgcataaac

SEQ ID NO: 47731 - DNA, 366 bp, Zea mays
  unsure (1)..(366): unsure at all n locations
tccctagcaacgtacaagtcatgatgaccatggcgcgcgcggcggtatgggcgtactgcccactgtcttattggacaggcacgccgcctgtanggtggcctgttcgtctcctgccagcggagtggacggggcacattaaatgtcgaggcagcacatcgcctgtcatcagggcggacgggcggcgcgtcttttccgcaataaatgtagagatcgcgtggcccagatgccttacatcangctccgcccgctggcttatgtcacgggcaataagccatgtggcagcatcgggtctccgcctgagcggggagcgaaagcgcactggacaaagccctgacaagtatctgcgctggagccctgtacgtccct

SEQ ID NO: 47732 - DNA, 321 bp, Zea mays
  unsure (1)..(321): unsure at all n locations
gtcagatgacgtgaaaaccacgttngacggataaacactgtcataggatgtttggaattccaattgaggcacgaaacgatatggaattgatccgatacttcacgactaggtttatatatgtgaatatgagtgaagtgcgcgcttggtttgaatctacgcgaanaaaataatagaatttgtgcacacggctcggaaacgatcgctcaaatcgggaaatttggtaaaaattaagcctggaatctcggattggcgtgtaatttggcaagtacgttactggaagtgttgtgaacgtgcctgaataatttgtgttcaattggagca

SEQ ID NO: 47733 - DNA, 320 bp, Zea mays
actgctaagcatacgatataggaattttattattttctcacaggggacaatattcgcctccatttacaaaccttggttgagatataattgccccttgctttctgccgaggtgaacaaaacgctgccctttctccacagattgcctcagtcgaagcaccaccaattgagggtctattctgtacctgacatgttctgggctacaaaccaaatggttcaaaaatgttgttttcaaagggtgagattgcgaaggatgggcaagactgatcacttacattaagatggaactttgcacacagaccacactcaatattccagtcgtg

SEQ ID NO: 47734 - DNA, 360 bp, Zea mays
tgagcatgctacttcttagggagacaccatttagacttcttatgttcttttgagaaagacaggatctggtacgcatgccaaacatgaaagcaagttggtgctcatcatccgcataagaacaaaatgaccaacgaccggccactggagctcctacacatggatctatttggcccgaacgcttacattagcatcggcgggagaaagtactgcctagttattgtggatgaatattctcgcttcacttgggtattctttttgtaagaaaaatctcagacccaagagaccttaaagggattcttgagaccggctcaaaatgagttcggcttaacgatccagaaaataagaagcgacacgggaccg

SEQ ID NO: 47735 - DNA, 420 bp, Zea mays
  unsure (1)..(420): unsure at all n locations
ctcagcttgggagggtcttcattcccacatgtgctaagcggcgatgccactttcagcccatgctagncttagctattaagcatgcatctagaccggcctcttcttttgcaaaatcaactaagtaaaggttgccgtctaatacacccttaaaagctagtgaaccatcacttcttctaaagacagacacatctatatttggaaatagacaagtggaccccatgttgcataactgactaatagatagcaaattataacctagagactctactaaaaacacattagagatagagtgctcattagaaatggcaattntacctaacccttttaccttgccttgattcccatcaccgaatatgattgaatcttgggaatccttattcttgacgtaggaggtgaacatcttcttctcccccgtcatat

SEQ ID NO: 47736 - DNA, 474 bp, Zea mays
  unsure (1)..(474): unsure at all n locations
taaatattaagcttggttcattcgcaacgctnttttattaaagttatatcggttctctctattaaaatccanagctatactctagagcaaaagagctacttccccgtttcttttttatttgtcgngggttaatttacaaataaactagcagacgacaaatattcaagaatatagacgtagtatcaagtaaagtaactcaaaacacattatatcatatcactctctctaaatccggccaccatgtcctataaaaacaaacatgtacaatacatgccatcaatttttttatatagttctttcggtctaaattataagtacttctaacttttctgtacacaccttctaatataaacatacatgatctttcggcaagagacacgatgatttagacaatttgggctttacgctctcaatgtgagatatcaccctacatcatgtgtgacgttggccattctctatgtaatgcatcagata

SEQ ID NO: 47737 - DNA, 352 bp, Zea mays
ctggggtctatctagttgtctccaccagagtatgaacctccagcgaagacatccttcaggtccccctccggtgactgatacccgaggtcccgcttagccgcgaccacctcgccgatgtccaccttttctttgtcaggttggcgacggggtggggagctgtctttggaagactgctcgcgccgctcactgatgcgtttcgtgaggtcaatgatctcgtgacactccgcgacgctgtggcgaccgttggtgtgcacaaggcatgaaccgctgtacccctctgcggctgtggcgtttgttacagtcgcctggcctcccgtcgccgctgcgaccactatagcggtggaccgtggct

SEQ ID NO: 47738 - DNA, 348 bp, Zea mays
catagacagcggactgtaattcgaagtacacacgcacaaaacacactatgaccaagatcacatgaagaaattgtacctctcgatgaggaagagctctattatcttctttactctctgtggaatatgccgtatattacgaactatgggctttgttgtggacgttacctttccaataactggggcaatttcttgctgctgaaagaactgactcttctaaactatatttaagaagaaggtcctacgggacccatataacaaaagaaaactttaaggtagtggctaactgatatgaatgataatgatgcccagcagttatattaatgaaaacacttccattcccatctcaaa

SEQ ID NO: 47739 - DNA, 212 bp, Zea mays
agaccctggccattcacctcggatgtgaaaaccggaccagctaatccgggctagaagcgaagagcgacacatgggaaaagatgcgccaccactggagagcggaaaaccgatacatcagacgcgctcacggttatgagcagcccggactcctcacaagataattgaacacgaagacggaaacaaatcgagatccgacgatcagccaatggctc

SEQ ID NO: 47740 - DNA, 356 bp, Zea mays
ggacctctaatcacctgggctgcaagctaatccgaaaatgagtgtcggagtccattatgaaagatgctcgggtttattgtcacccactgaggaattgaagccaatccagaaaagatcgaggctatcatgaggatggaagcaccacgatcacaaaagagagttcaaagacttaccagatgtatggcagctctgaacagattcatatcaaggctgggagagaaaggcttaccattctataagttgctcaagaaggtagacaaatttcagtggacttcaaaagcacaagaagctctagatgcgctgaaaaaattcttgacaacaccacaagtgctaaaaccgtcggccgagccacgccg

SEQ ID NO: 47741 - DNA, 467 bp, Zea mays
  unsure (1)..(467): unsure at all n locations
tctgccatgacgtgatagtccctggccgaagagaagaataccatgtttgggctacattccagactgccatgacgaaggacttcgccatgactgcagtatttcccccatacaaagatatagttgcttcgtagctcatcagaaactgctttggatctgagtgcccatcatacatggggagctaaagtggcttgtatgatgggggccatggggtagcatgcagttctgctgccaagggagaagcatcatcaaaagtaaaggcatcgtgattaaaatcatcataccatccatcctcgttgaataagccttcttgacgaagctccctctgttggggccttcgatcttgttcatcttgaacaatatgacgcacttctttagtggctttgtcgatctttctttggagatcagccagtcgtgccattntctccttcttcctttgtactgctgatggatgatctccatgtccctga

SEQ ID NO: 47742 - DNA, 177 bp, Zea mays
gaaagacgactgaagtttaacaacaattggtaccaacaactaaagaatatcttctactcatatgggaccagatacgggaaatataccccttacgaatgaagaatcacccaaacacctctcgatcatcatcgaaatctgaatattgaacgaacatcgacaaacgtgatagctggcgca

SEQ ID NO: 47743 - DNA, 424 bp, Zea mays
actcagcttcgcgaggtcgctacctcaatgggccgccagtaagatggttgtctctccccacgacggtacgtgcaaggatgtacgtagaccgtgcgtcatgtttcttggacgcgcaagatatactgcatcccgaaatctcagatcccagtgtgttgcttgctcctaacgttgtctacgactctcactagctaggcagcttagtactagtagtacatcttttggcatgagacgagaattggccatgataccgacgataaaagatctgttctcgatcgaccatcaattaatagaataattggcgctgcttgctccctttgattacataatttaaaataaaaagaattggcattccattaacaccgaatattgtcgatcatgcttcaccctggagagaggtgggttgtccttatcctgacgctttatt

SEQ ID NO: 47744 - DNA, 445 bp, Zea mays
  unsure (1)..(445): unsure at all n locations
tctctagagatagtggagggtctcctgacacaataatgatctctattttctaaccgaagccccttgatcatggccccaatgacaatttcattatgcactatatgcgcttgtgctcttagacacaggaacctttggacatatgcctgaaggtactctctaaggtctttcttgcactgatacaaaacatgagcagtgactggnttcgtctaaaagccctggatgctagtgattatcatatncttgagcttttgccatgatgtgaatgtccctggccggagagactactaccaagtttgcgctacacttttgactgtcatgacgaggattttgtcatgactgcattattgccccatatgaagatatggttgcctcataactcattaagaactgcttttggtctgagtgctcatcatacataggaagcttaggtggcttgtatgatggg

SEQ ID NO: 47745 - DNA, 329 bp, Zea mays
  unsure (1)..(329): unsure at all n locations
agcttccacaacaatgcaacacatattttgtttatggtattacgctctggcggcccgaaccactctaaatcctcacgtgttcatgtgctcggtgatcgcttataaggataggtaaaacgcttaagccccttcctcatcttatgatttagggcgggtgcactccgtcacccggtcggagaattccctctccgacattttggtgcgccacgtaggggaccagacattanggttttgcttgtttcctcgctcagcatgatggtgcaaatcgttgagcaccgcgccgagacatcaacggattttctagtggaggacgaaactgtttctttcac

SEQ ID NO: 47746 - DNA, 267 bp, Zea mays
  unsure (1)..(267): unsure at all n locations
tcgacagcttnagaggcttcttcttgctgagccccttgcgtttattcagcgaagaaatctgctagcgctcgtgactgaatcgaacatctatgcacatcatcaatgcagaactcatttggtttcgcagcccacttttcaatccttacactagcttctctggttctcataatatcccttcaaggctgtgaagaaggaacaattatatggtatgcctgaaaaatatggtgaaagcttcttgaggccattaaaacagcatacaacaccttt

SEQ ID NO: 47747 - DNA, 279 bp, Zea mays
ccatattagtcttagcatattagcacgcatctagttcagctctattaaaatcaaataagtatacctgaccctctaatactcccttaaatgccactaattcattacttcttctaaagacagtaatgcctatatctgtaaaaagacagcttgaatccaatttgcataatcgagaaattgaagcaatgtataatctatagaatctactagacaaacaattgaaataaaatggtcaagagatatatcacttttaccaagacctttgacacacccttgattcca

SEQ ID NO: 47748 - DNA, 440 bp, Zea mays
  unsure (1)..(440): unsure at all n locations
ccggtcccagcggacttagcttattaggtagatattcaatcattacctttaacatttcttctgcgtcagtgatagaaggtgttgacggaacttcttccaaatcaactttcggcttcggagctggagcctttcttttcttcaacacagccaccttcagctcaggactggattttttttcttttttgccaaattctcatcttcttttatcattctggcagcttgtctttgtataatactgacagccctttttcactatggcccttcagcacctgtgcttaacctttcgtagtctgggtattcaaatttcaaagcgtccattactcggtttaaccttcgtttcagccgagtgccgaaggctgctgtcatcagttgatcttctttnttcgtataattgcctaagatctcattgcacataacttcaattgatccaaccattcttt

SEQ ID NO: 47749 - DNA, 291 bp, Zea mays
gcttgaccagccatatatatacgaagctgatcccgcccctggctccccaaaccattgcttagattgtcggcattggtggatcacgtgcctgcgcggagagggtctgtggggtccctacgccgccaccaatcgcatgagccccttccggattcctcgccaaccgcctcttaaccctgagtatacaacccgaggccgcgaccctcttcgtctcgctcgaaagcccctggtcgctggaatccccgtgcccactaccaccattgctgcggatagatagccaccgtcgtgagcctg

SEQ ID NO: 47750 - DNA, 328 bp, Zea mays
tcggcatcaaactacgttccattgtccacggtaatggtctttggcactccaaagcgacacacaatattttgccagagaaacttttgaacagtgaccgaagttattgtggctaaaggttttgcctcaatccatttagaaaattattctactaccactacaacatatcttaaattcccttgtgctagtggaagtgggcctagcaaatcaaggccccatctttgcaatggccaagtgggctgtatcaattgagttaaagacgaaggctttttttgatctcttgcacatttttgacaaccttcgcatttttggactaattttgctgcatctg

SEQ ID NO: 47751 - DNA, 253 bp, Zea mays
  unsure (1)..(253): unsure at all n locations
ttactctcttctgctatgtgtgtttgatctacgagacaagcagagcctgcactatctttgcacctatcgcctctctgngagaaatggattctaancataatcctactcactcagccatctgtctacctcatgtctttctgactgcgacaatatattcaactttatgactgctataatggagatattccaccataagaccctatcttatggatgacactgccctagtctagcatgattgtaatctctcatccgc

SEQ ID NO: 47752 - DNA, 213 bp, Zea mays
  unsure (1)..(213): unsure at all n locations
gctctcatcatgccacanatgtgacgacgacgtcgagacccctacagtacttcatatggacctctnctgacccgtcacctatctaagcatatgaggaagtgagtatagtcttgttatagttgatgattgatcccgcttcacttgggattcttcttgaggataaatctgaacccaaaggaccctcaacgcttcctatgagagctcaaacgagtt

SEQ ID NO: 47753 - DNA, 214 bp, Zea mays
  unsure (1)..(214): unsure at all n locations
gatatctggagtatctggttaagatncatatactgccacaatgttaagtcgccacanattggcgaagctatctattcgatattcattcatctggagaactaaggatcaaacttaacacatattgtgactaaataagatgaattgcccttgtggcaaggtaccttcaacatgtcagcatctatgaagtgtggccttcatcttgcatccaactgaa

SEQ ID NO: 47754 - DNA, 79 bp, Zea mays
acatactcagcactcttcacacgagacgccgcacatcgcgtaccaaggtttttcccacgtcgccaatgctatgcaagac

SEQ ID NO: 47755 - DNA, 219 bp, Zea mays
  unsure (1)..(219): unsure at all n locations
actggtgtgacttattctctttcaagggagcagtcaccggaggggcgcatgtgngactatttcaatgcttagtaaacaagaaccaaatgtatagtaatccttctcctctagcatattccttagaataagacttaacaagcataagacaacttatatacaggatataagaaaaaactataattaatatacagaaatcttcatataaaattttaaatcttt

SEQ ID NO: 47756 - DNA, 422 bp, Zea mays
ctcagctcagtcataccggcgccccgtggggccgcgtcgcactgctcacagcatttgcctgctctgtggctggtgctgcttcctcgcgcggaaaggcgatactcaagtgtttcaccaccggaaacttcattcgcacgcgcggctgcgcgcatgtcctgccgcgctgaggagatatgtgactgcgcgagactactaaactccaacggaccgctagtggaggtgtgaactgcttgactgcgaagtgtgaacccacagcctactgcgcatgcgctttaaccggggctgccacatatgtccgtccaccaatggtaccatcacgcagagaacagcgcgaacgctaaagggatccgctggtctccccagcgtgctgtagggcactcacgaagagacgtcacacctgtgcttccgcgcacttaagctgc

SEQ ID NO: 47757 - DNA, 217 bp, Zea mays
  unsure (1)..(217): unsure at all n locations
gcttctcgggcgtgtccgctctctcttcgcgcgtcgcatctcgcatatctcttctatcgcggaatcgctcttcggtgccgtgcttgaatgtggtgctacaatctacatcatgaacatctgcanagccaggttctacacngagtggggtcgcagtgttgctcgagctgtctcagtgatacatctcactcgatggagggagatcgccgacttctcacta

SEQ ID NO: 47758 - DNA, 220 bp, Zea mays
  unsure (1)..(220): unsure at all n locations
tcgatgtaatatacaacaccatcgagaatngtaatggacgtacttanntctcgacgtgtcaatggctctatnttcattcttttcncattataaannaaatgagtacaaatataccttcatcttaacagccaataacatgaaggtgaanggagtacatagttntgtangcagagcgatacaactcactctggtctatagggcatccgaatacatggcacta

SEQ ID NO: 47759 - DNA, 58 bp, Zea mays
taactcagctgctgcgatcacagctcctgaccgttgagaaattaagttcagtctataa

SEQ ID NO: 47760 - DNA, 228 bp, Zea mays
tttaattttttactggcagagaccatgccagagcagattgggctgtgaacatgcatgttctttaacgagacaccagcctcttagaaatttactgcggacgggattctgtcttgccctgttatacttgaatagtgttgtgctctcttttccgttctatgcctaggccggggcgcccacctgtagaggcaataatgcggcagacgtctccctaatggtctccgcctctct

SEQ ID NO: 47761 - DNA, 213 bp, Zea mays
ttgctacgtgcatcaaaataacctggctttttctgttgtaactttttgatgaccatccagcagatgtgagacactgagaccgtgactgagctatggcctttcgaccatcgctattgacatagatgagtagatggttattattgtgatgactttcccttacttggtgtcttttgagatagctgaaccaaggacctaacgctctcagaagctaaa

SEQ ID NO: 47762 - DNA, 191 bp, Zea mays
cctcaggcctggacatttctggtctcaatggctcacaacctaccagatgatataccgtgggctgattggtcatgctcttgggagaagaagaatataaatcccggggaaagtcaaacgattcatcagctgcctctgatgacatcggattgaacatatctgaaaacaacctcctgcatgagtcggatgtcatg

SEQ ID NO: 47763 - DNA, 318 bp, Zea mays
  unsure (1)..(318): unsure at all n locations
tgcaccgacatcagctctgacctgctgctactgcactgctcctctattatccttnccggtgcatanatacaagcatacagcttcttcttcaattgaaaccactatcagcagcacatgctgccgcatcanactagcactcaccttcctttctctctgctcaatccttcaacatgatgagaggtgtatttctgacgcaaaacatagagaaactacatgtaaatgatttctgagcagcctccactctctgagtgttaatcttcttaagacatttctgttacaattgccaatgtcttctcctcaccgatagcctaaaaaaaa

SEQ ID NO: 47764 - DNA, 224 bp, Zea mays
caatcgacaaatactcgaatgatcgaacggactgtatggaaactacataacaatctacccacagatgtcttccatcacatcagctcatccaaagtcacaaccatctgtcactatattgcatcctctcctgtcactctaatatacacacacacgtagctagacacgatgtcatccattcatcagctcacaccaattcatctagctgacctatatgattctgtcct

SEQ ID NO: 47765 - DNA, 185 bp, Zea mays
tgtacccatccttctggcctacgttggtaggagctcgtgtctcggcgaaccttcgcaatggctcatgctggttcgagaaccaaataacctaacctacatacgtaggagagtgggaaaaaccaattttcacctcgcatatctatcaatgaatctaaccacttgagaactctaaaatactattcatc

SEQ ID NO: 47766 - DNA, 305 bp, Zea mays
  unsure (1)..(305): unsure at all n locations
cttcccctctctcgtacttctcctcctgatgcatctatggcgtttttgttctactcctancnggcgctctctcccagtaaatgacagcactctctcctctcttccacgccgagctcttcttcctcttcatacgcatgctcgctctccaagctatctcgtgttcactggtcgcgttgtgaaccgaagccgcatcagcgccctactcgccgacggagctcgtcgtcgtgtctcgccggagacgtccacgaacaccgtccatacctcgtcgcccgtctaatactctctctcgtnacgntcatcacttc

SEQ ID NO: 47767 - DNA, 61 bp, Zea mays
actgccgcgttacacgtggactggagaacctgcgtacccacttaatcccttgcacacatcc

SEQ ID NO: 47768 - DNA, 238 bp, Zea mays
gctacgattgagctgaccttcctggctgcctgctgtgtcttcttttttcgccgccgaacttaagagaggcactttatattaaaccgggctcatttggcccctgctggtagcgactctgctcttgtagcttaagcatgggtgagtcgggagggaccgtcaagcgctcacgatcttgcttctgacatcatcgccgtcacaatttcaagacctctcggcgtatcttcggacctggatctac

SEQ ID NO: 47769 - DNA, 189 bp, Zea mays
  unsure (1)..(189): unsure at all n locations
acggntggcgtcgcgcgatgcgaaactactttttttttgctacgccacataaaagcgtgcaatttaaccccaacctgtctgggaatatgactaggctgccgaagaaccactaccaactagcagagatttatataaagacgcgcataaaatgaaacgtttttacccaagaaaactgccccagacggggcc

SEQ ID NO: 47770 - DNA, 143 bp, Zea mays
cacgcctggccatgagcgctaagagggacagccactaattaaattaaaaacttaaccagtacgtgactaatagctggaaagggaacaacataactcacgtgctgggattgttactagtggtccaaccaatccgtgaggccaaa

SEQ ID NO: 47771 - DNA, 344 bp, Zea mays
gttaccgaccaactcactggatcctggccagtcacttgtcttgacccaccgctcgctgctgtgcgaagaccattggtcctacacatttgataggcgtggacatatgcacacctcatctatgaagtgtgactctttgatcgcacaccaaccgaatttgaggttcttacctggtggctaaaagaacaaaagaatgtccaaatgtgcacacaactatagtaccctttaatgctctagatgggcatggggatcttgatgctgggacttggggcggctgactatccctgctgaatgtttcctcgaatgccatctgaggtattgtgacttctatactgccctctattagt

SEQ ID NO: 47772 - DNA, 129 bp, Zea mays
agttgtgaatgaccatgcacttgagggtgcagatacttttatcgactcaactagaaactccgacatataccactgattttcaaatttggaaagtaacactgtgtagtaaccacctaaatctaattaaaa

SEQ ID NO: 47773 - DNA, 210 bp, Zea mays
  unsure (1)..(210): unsure at all n locations
tgtgtccgagagtatgcaccttcagcatgagtctctgatgtgtgaagcagatcttncagctncagacttatntactgaactgaatgcgctcgntcttgatgctctgaagcattatcagtcagctccttgacttctttgctaaactgaatacgctctgtcagcaacactatntcttcacttgatgcgactaagttattctcaatctcactg

SEQ ID NO: 47774 - DNA, 187 bp, Zea mays
  unsure (1)..(187): unsure at all n locations
ttctgatcgangaccagcttgattgggacgaatataacggtcagataggctgaaaaaagccgcatctctgcagtgctcacagagagctgcactgcaggcactctcccaccgttaatttgcgccgccgtcttctcacatgggatcctgctactgtctgtgcgcgaccatagcaaataagaggcgtaga

SEQ ID NO: 47775 - DNA, 174 bp, Zea mays
aaagtgggtttgtcggtgtctcgaaaggccttgacgcccacaagattacgcggcagagcattaacacacctcatctagaccaggaatcggctgagtatgttgcgatcaggaatgcatttttgcaccaccttaacgaattctcggtgaggttactctgatcaaggaggaacagct

SEQ ID NO: 47776 - DNA, 350 bp, Zea mays
  unsure (1)..(350): unsure at all n locations
tagtggaaaacgtgtgtgaactgaaaattcacagttttatcatgcacttactgtactcctcagggagagagtcttcattaatgatgtactcaacgcctaaaactatggcatggttgtataaaacaattgaagggctcgctaaaattaatacaaagaacatcgtcacgcctgtctntcaaggaacacatgcatgcctacttccgatattcacagccctatttgaattaatgttaatggagggaaactgangaccaccacatactgtcacaacgacaatgagactgtttcttactgttacacatgagaatagcantttctgtaggaacttatttatattgcgtgaatttgtg

SEQ ID NO: 47777 - DNA, 362 bp, Zea mays
  unsure (1)..(362): unsure at all n locations
gtacacctaatcatacatctcgtggatcagataaaaatattagggccactatatttacatcatatgtttcagttggagcgatacctgngagtattaaaaggttatgtgcgaaatcgcgctcacccagagggttcaatcatggagggatacactacagaagaagtgattgagagctgtatagattacatcagtgacggaacaatgataggtgtgcatgtacctaaacatgagggtaaactatgtgggagagggagaatgggcaagaaaacttttcgcgttgaggattacaagctagtacattgtgctcatggtagtgtactacaacatctcacgatagccgagccttacatagaggaacacct

SEQ ID NO: 47778 - DNA, 308 bp, Zea mays
aagcatgcatctagaccggcctcttcttttgcaaaatcaactaaataaagtttgtcgtctaatacacccttaatagctagtgaaccatcacttcttctaaagacagacacatctatatttgtaaacagacagttatatcccatattgcacaattgactaacagatagtaaattatatcctagtgactctactaaaaacacattagagatagagtgcgtcattagaaatgcaattttacctaacccttttaccttgcctttgattccatcaccgaatatgattgaatcttgggaatccttattcttgac

SEQ ID NO: 47779 - DNA, 260 bp, Zea mays
  unsure (1)..(260): unsure at all n locations
ctcatgagtctctnggactgttactcaggatatcatcaaatctggatgaaaaaggaagatgagccgaaaactagcttcataactccaagtggcacgtattgctatcttcggatgcctgaggggctcaaaaacgctggaggaagtttcagcagaatgactgcgaanggtctccagtctcaaataggtagaaatgtgtagacttatgttgatgacattatcgtcaaaagcacgaagcaagaggaccatattgctgatctgca

SEQ ID NO: 47780 - DNA, 376 bp, Zea mays
ggatcttaagtgacgcagctgcagctatgtgagatcttcatcccaacatgtgctattcggcgatgccagagccagcccatgttagtcttagcaattaagcatgtgtcgagttcagctctatcaaaatctactaagtatagctgaccctctaacactcccttaaatgctactgaatcatcacttcttctaaagacagtgacacctacatcagtaaatagacagttgtagcccatttgacataattgagaaacggaaagcaaattgtaatctaaagaatctacaagaaaaacattggaaatagaatggtcaggagatatagcaatcttacccaatcctttgaccaaaccctgatttccatctccgaatgtgatagctc

SEQ ID NO: 47781 - DNA, 390 bp, Zea mays
cgtatcttcttcggtaagggggtttttctcttgttaggggggtaatgtgaggatggaagcataaggtgaggattagctctaatttctgttctgtctttatacaaaacatctctgttagtgcaatcaaccacaagtgacggtttggtgatttaatgacaaaacatataagggtactaacagtgtttgttcacaatgtatgattagaatgaacaggaacttaatgaagcaccaatgacttcatgcaacagacgtataaatttgtgtgtgaaatcttgagttgcatgatgtaattcttacttattcttttccgcacatgtacaggtgtttgctatagctcaagtccccatattcaaaagctatgtttgaaaaccaataatcactttaacattc

SEQ ID NO: 47782 - DNA, 351 bp, Zea mays
  unsure (1)..(351): unsure at all n locations
acaaaatgactcaagcctagctactggtgcataggtntcaccgaaatccaaaccttcgacttgggagtatcccttggccacaagtcgagctttgttccttgtcaccacanccatgtcgtcttgcttggtgcagaacacccatttggttcctacaacatnttggttaggacgtggaaccaattgccatacctcattcctagtgaagttgttgagctcctcttgcattgccaccacccaatccgaatcttgagtgcttcctctactctgtgtggctcaatagaggaaacaaaagagtaatgctcacaaaaatgtgcaacacgagatctagtggttaccctcttataaatgccc

SEQ ID NO: 47783 - DNA, 446 bp, Zea mays
tctataaaatcaatgcacattctccatttgctggtggccttcttaccatattttgttggctagccattctggttatttcacctctctgataacaccagcactaagaagtctcttcacttcatttcgagcacctttagctttgtcttcagacattttctgaagcctttgttttattggcctgaaggatggatccacattgagtgaatgttcaatgacatctctgttgacactgcaaagatcattatctgaccaagcaaagacatctttgttgttgaataaaaatcttagcaaagtcttctcttactcttcagatagctgagaccccagcagtaccctttgttttgctatgtcttcacaaaggagcatatgcttcggctgatccgccgaagcagccttctctcttttgtatttatactactgacaggcttcggctccatctatattat

SEQ ID NO: 47784 - DNA, 471 bp, Zea mays
aagtgtgagttctggatcagcgattttctattcttgggtcatattataaactgttatggactatctgaggatccaaagaaggtagcagcgattctgtactagaaagcaccaaaagatgtccgaaaaatcaaagttcattggaatggccggttattatcaacgtttcattgaaggtttctccaagattgccagaccaatgacaaccttgctagcaaagaaagttgagttcaagtggactccagcatgccaagaatcatttgagatgttgaagcagaagttgacaacaacatcggtgttagttttaccagatgttcacaagtcattctcagtatattgtgatgcctcgtacaccggactatggtgtgtgttaatgcaagaaaggaaagtagtggcatactcgtcccgacaattgagagttcatgagaagaattacctcactcacgaattggagctagcaacagtggtccatgc

SEQ ID NO: 47785 - DNA, 483 bp, Zea mays
  unsure (1)..(483): unsure at all n locations
tccaccgtcttctgcctgtacgggatacatctatgctacgttttgtgtaatggngcgcgtgttanaaatcggtgggacgtatggggcagtcccggtgaccttgtcaagatcgcgacgatgaatgtggactgatgcgtgaggttgctgatagctgtgacgatggtcgtggagttcgtcagcttcatggcaagcactatcaagttctggtttatcgcgattctgcatttgtgcgagcaaaaagatgatgataatttctggcaagaactagcaagttccagtcgctgctctgaatatgagatgcagtttaagaataaaagaaactaaaatagagtgactaaaaattagtgtctaaaaactaaactcctctaagtgatgttgtcgtcttatacgtaactgtttggttgcatgttatcttcagcagatcgtgttataatcataaaaatattgtttacacatatactatatgtcagagggaataagtta

SEQ ID NO: 47786 - DNA, 351 bp, Zea mays
  unsure (1)..(351): unsure at all n locations
ctgtgaatcaaccatggcggctgtgtcgggcacggatgtaatggctagagacgggcgctcgggtntgatggggagaaaatagaggggaagatagagctatatactgngggaagtgcttcggccaaccaccgggtcacgagcgccggtagtcccgccccggaccgcgccattcacggcgagagatgtgactgacggctcaaggttacacgcgatgtccgcttcggtcgttgggggagaagaagccctgtcagaggggtaaggcggcggcacgactcnacttataccattagcgatttgaccgcccgcacatggcgctcggngtcgtgctacgatctccgttcttcgcggttc

SEQ ID NO: 47787 - DNA, 258 bp, Zea mays
  unsure (1)..(258): unsure at all n locations
tgtgtctgggaggcagtataggaagtcatcttcgtctgtcccattgaacactagtgcccccttcggatatttcaattccttggcatagtgattagcttcaaaaatctcttcttcggataatttcttccccgaagcgtgtcgcacaatataatcgtatattttggaaggtgcttcgggggcagcagtgtcaatttcttaaaccaaaattggctctgacattnttattnttttggctgcctttgcaattntcgtttcttc

SEQ ID NO: 47788 - DNA, 381 bp, Zea mays
  unsure (1)..(381): unsure at all n locations
atctgcacgcatgctatcttgcatacaccagattggagacttctgttgccccgcggtcgtcgatgtatttattntcttcttangggtgatattggatcaacttaaatatttgtagatacagaaggagttgagcactccataggaggaaattagatttagtaagtcgagtgtgacgccatggtgtagaagcagtgatgtccgatatggaggaggaagaggaggatgaagaatgcatgtggngaattagaaatttttccttggctctagtaccatggtagattcgtgcaagacaatgccctacctatattagaggacacaacctatgccttgtcatggcagatagcagcattgtcatgattatggtcatgggtcgcgatgggc

SEQ ID NO: 47789 - DNA, 327 bp, Zea mays
  unsure (1)..(327): unsure at all n locations
tgcttggtcgcattgagcctcttcatgttcttcttctatcccctagcctggattgcaaaataataatgatcaacataagcgcaacaaattccagtatggcattcataggtgactcatccagattgctttagctgttaaaagtaacagcaactacacactacttgaaaacaaaagacccttttcatacatgtctatctctattacttatatatgagcagtgctatcgtcagcacctcctgtatgtatacctangacgacatcagctggcgatgggcgcggtgacgcacatgcgtcttggacgggctcaccctattaacacactataac

SEQ ID NO: 47790 - DNA, 283 bp, Zea mays
gttggagcccatcattcacacaagaacatcatgacgaccgacaggccactttgactactccacatggatctattcggcccgattgcttacataagcatcggcgggagtaagtattgtcttgtaatagtggatgattattctcgcattaattgggtattctctttacaggaaaaatctgcaacccaatagaccttaaagggattcttgagacgggctcataatgagttcggctcacggatcaagacaatacgaagcgacaacgggacggagttcatgaactctc

SEQ ID NO: 47791 - DNA, 318 bp, Zea mays
gcagatgcgatcagtcacaacatatttgttgtgtgggctgacacatgtgagtgaacatgaccggacagcctaaatacaatttctgcgcgcgctgcagctgaccggatgcgaccgggcaagccataataactgcgcgcactgacactagagcgcggctgtaaccggacaaaaaaaaggttctgcatggcgccctgacactgcttgcttggctgtgacccgacaatcgcaaaaaaatctgcgtgccctgcaagatgcgaccggtctaaaagaagaaagattctgcatggcttgctgcgcagaaaaacacacaaaaatact

SEQ ID NO: 47792 - DNA, 235 bp, Zea mays
  unsure (1)..(235): unsure at all n locations
gaagatacacttctgaagacaattttgtantctcttgggacttagcatgantgtcccctttgtcaaaacattcttctggagatcgatattgtgtccccttcttgtgccatatgcagcatgatgtatgatgcttatgctatgcgaaatgatgtgatgatgttatgttatgtaagatggtggttattccgaagatacacacacattcctgcgataaaacacatagtctttttgctat

SEQ ID NO: 47793 - DNA, 416 bp, Zea mays
  unsure (1)..(416): unsure at all n locations
tagtcttgcctatcttatgcggntagcaaatcttattctaattcctaaatntaacttggtcaaaaagtctaagtgccatgtgtgttgaatcaaaacaatcccgcaagcctcacaaagttgctgaggcgaggaatttggcacctctagaacttgttcattatgatatgtgcgagatgaatggaattttgacaaaaggtggtaaaagatagtttctcacttttatagatgactccaccagattttgctatgtgtatctcttaaaaacaaaagatgaagtgtttagttattttaagacctataaagctgaagttgagaaccaacttgagaggaaaataaaacggttaaggtctgatcgaggaggaaaatatttctctaatggttttgatgaagtctgcgtggacatggtattattcatg

SEQ ID NO: 47794 - DNA, 359 bp, Zea mays
tcaacgaacttgcctggcttcttatggatgatatgggtggtttctaacatctttcaaggggtgttggaattcactccctagatctcgcaacttctcgttgtggtatgactgcgttgtctgatcagaagcatcgccaaagagtgaccaatagattgatggaaattttgaatatgtatagtccattatctgcacaaatggttaatctagagaaatctgtcattttctttgctaatttatggtgagcagccaatatctgcacaaatactgcactcactatatctttaaagtgggagttgcttcataccacgcgaggaaaacaaataatgagtggcgccacacgggttcatatttgggctgat

SEQ ID NO: 47795 - DNA, 409 bp, Zea mays
  unsure (1)..(409): unsure at all n locations
cttcattattctcaacaactactggaggtttttcggaagagcatgaacctggagnnttatatgtttctgattcttcgggtagttatgcacatgtagttaattccaggaatactacattgaatgctttagcacatatgcaataggataaataagaaatgaattcaggtataccgcaaggtgcttccacttttgttcgccgacatactttacctcanaagttttccacaggtgtcgagtcatcaactgcccctagcactaataatcttggttgcacttcaatatctgatgttctgccttcattatgtttgtcatctgattatgctcgcaataggaggatcgaagctacagagaagagaacttctaatgcagaaagttcttcaagatcaaggggaataagtgaataatctga

SEQ ID NO: 47796 - DNA, 351 bp, Zea mays
tactcaagctgagctactttatgttccctatttggtgtctctcattgtgatcttatacagaagatattgcaaatatacctctggaatagtgactctacttcaaatctacttgctgagataagtcgtgaattgcctaaagtgggccatctcttcttctcgagtgatgctctaagagacatctcatttagcatatagttgtagatatgaactacatgatcctttttttgccttagaatactccttataggttcttattccatgttttaaggaacctttgctcataacaaaagataaccaagatgtatcgtatggttgtccaacattgtgttcctccactattacctcttggta

SEQ ID NO: 47797 - DNA, 397 bp, Zea mays
  unsure (1)..(397): unsure at all n locations
cgtacaattcgaataatatagaccttgtgcagcttgtcaagcatgtttacaggtgggaggagcgcatcacagcaagaatgtgatgaccacttcaagacccctggagatgctgcatatggacctcttcggacccgtcgcctatctgagcatanggggaagtaagtatggtctagttattggtgatgactnttcccgcttcacttgggtgttctttttgcaagataagtctgacacccaagggaccctcaagcgcttcctaaagagagctcaaaatgagtctgagctcaaggtgaagaagataacgagcgacaacgggtccgagttcaagaatcttcaagtggaggaattccttgaggaagaanggatcaagcacgagttctccgctccctacacacca

SEQ ID NO: 47798 - DNA, 373 bp, Zea mays
catcgtctaaaatctattggtcggttacgcatcacatcgatcatggttgatgattgaacggcaatctccccgaaatgtgacgtataatccaagcctggcgttcatgtcatcaagcaaaggcccccaataagcaccttttcatattagcctatatgtacatttccaagcactgcactgttgataccatattcatgcagcgaacaaacatggatccctacagatcgcagtgcaatgcattcaagtaatatccactgccacagtgcaaaccgccaagttgaagtattgaataagaactgaagatcgactatgaaacggctacgtggcgtttttttttacagagagtatatgatagcagaacacgcgtatttgtagt

SEQ ID NO: 47799 - DNA, 378 bp, Zea mays
  unsure (1)..(378): unsure at all n locations
gtacttaatgaaatgttttttgtttatgaaaaatagttacacttgtacccctgtgctgttcctaaaccaagtcttcaacttatgcccttgcggaactattcatatgagactctgactattcaaacccccccgacttcttcttctttctccccgacatccctcaccccttgaaataataactgtggaagtaaacagggtgtgacggcttaccggcggcgagggaggtccggcgaaaggcggngttagctctgggaggttatggcggacacgtcagggtacgactcatcgaaggtgatggccgganatcggcgggccacgtgcgcaagcgagcgggctcggcggtggtagaagtcaatccaatggcacacggagcttctc

SEQ ID NO: 47800 - DNA, 162 bp, Zea mays
atgaggaatgaagaaggggggtttaccaccatactgaggtgcatgcacatccgccacatacactgtcactattattcccttgcgggcacaaacaagtggcacccctatacccccatagcctatactccaactgtctgtacaacgattcactcacgcataatt

SEQ ID NO: 47801 - DNA, 516 bp, Zea mays
  unsure (1)..(516): unsure at all n locations
gatcctctnagtttatctgcttcgtgcaaccttctatatggacagcacattttangattttcttatgttcattttgagaaagacaggattcttagcgcatgccaagcatgtaagcaggttgggactcatcatccacacaagaacatcatgacaactgacaggccactggagctcctacacatggacctattctgcccgattgcttacataagcatcggcggaagtaagtactgtctagttattgaggatgattattctcgcttcacttgggtgttctttntgcaggaaaaatctcacacccaagagaccttaaaaggattcttgagacgggctcaaaatgagttcggattaatgatcaagaatattataagcgacaacgggacggagttcaagaactctcaagttgaacgcttccttgaagatgagggcatcaagcatgagttctcttctccctacacnccacaacaaaatggtgtagtggagaggaagaatagaactctattggacatggcaaga

SEQ ID NO: 47802 - DNA, 322 bp, Zea mays
  unsure (1)..(322): unsure at all n locations
gcgtgtcaaatgagattgcggtatgcccgtatttatacgccatagcgttaaaattaaagaccccgcttgtcattgattggtgntattctagcaaaggcaaagtggtttttctgacacttctgcgttaagcactcgtccaggtcgcaatctgaattcgttattatagacaaactaatattgcgaggggctactgttggggaccttctgcatccgaatgtcctcaatacaggatttaacagtatttctggagtacaatgtgtgaacaggtatcttcggactgaatcagcattgctgtataccggaataatacgaatggtgatac

SEQ ID NO: 47803 - DNA, 384 bp, Zea mays
cagcatttttttgcacaacaactgcaaaccataccatgttcctggcctttcgcatgctgaggactggatatgattggacctttcaagaaagctcaagggggatatactcatgtactggtggcgattgacaatatcactaaatggatagagttcaagcccattgcttctttaacctctgctaaagccgtggaattcatacaggatataatattcagattcgggataccaaacagcatcatcactaacttatgatccaacttcaccagctcagaattctttgacttctgcgagcaaaaaagcattcagatcaaatacgcatctgtagcacatccaagagccaacgggcaggttgagcgagcctacggaatgatactggatgcactc

SEQ ID NO: 47804 - DNA, 423 bp, Zea mays
actattttgagctcgtctcaagaatccctttaaggtctcttgggtttgagatttttccttgtaaaagaatacccaagtgaagcgagaataatcatccacaataactatacagtacttactcccgccgatgcttatgtaagcgatccggccgaatagatccatgtgtatgagctccagtggcctgtcagtcgtcattatgttcttgtgtggatgatgagtgccaacttgcttccctgcttggcatgcgctacaaatactgtctttctcataatgaacattggttagtcctaaaatgtgctctccctttagaagcttatgaagattcttcatcccaacatgggctagtctgcgatgccagagccaacccatgttagtcttatcaattaaacatgtgtcgagctcaactctatcaaaatctactaa

SEQ ID NO: 47805 - DNA, 395 bp, Zea mays
  unsure (1)..(395): unsure at all n locations
cctaactgtcggggtctataattaagggtaccctcaaagctcctaaatctcagctggtaacccccatcagcacatagctgcaaatgcctgatgggtgcgattaagtcatggatcggtccattcgaaggactcgatcacgcctcgggcaagggcagccgaccccggaggatctccgtctcgcccgaagcccccctccagcgatgaacatacttccggcttgcccgatgccctgtcttcgccaagaagcaaccctgaccaaatcgccgcgccgaccgaccaaatcgcaggagcatttaatgcatatgtggcctgacacctttatcctgacgcgcgcncttcagtcgacagagccgaagtgaccgcagtcacttcgccgctccactgaccgacctgac

SEQ ID NO: 47806 - DNA, 165 bp, Zea mays
  unsure (1)..(165): unsure at all n locations
tggggcttgggaattttttacatgtatgtatatgtttattctanaatctaaataacatgacaaagcactaataatcttacccagtccattaacctacgaactgaactgattacanaaagaagagaaaatctcaatgaggaagatgctccagactcttaccgtcct

SEQ ID NO: 47807 - DNA, 382 bp, Zea mays
  unsure (1)..(382): unsure at all n locations
tacccaacttgtaacaccctgaanttgggggtataaatttcttctctaaatgcctaccaaattcaagtgttacctcttgtctctctgtctagacttcctctctcttccttttgattagagttaagttaattaggtgagggattaattatntattttatcaaaacttatgtgagtcatgaaatgttgcatcatgctgagcctaaattgttctttggtttgttgcacatgtttgaattggtttgaattctgaatttggtttgaatttggattgaattccctagagaaataaaggaatagcatttcataattcggaaaaactcaattcagaccattgggtccaatccagcctagctaggccgcgcgcgcgcctgcgtcgtctaac

SEQ ID NO: 47808 - DNA, 294 bp, Zea mays
  unsure (1)..(294): unsure at all n locations
cttggctttaatgtctggctctcatcccctgagtggagacgtgaacgagagccttccggcggtagcgtccgtcctgtgaccatcgctgctgctgcataggtcgctggcgagtcgcctggagttcgtcgttctgcacgctctccgatgtggaggttgttcatacccgcgggagtggaaccggagttccgtttgtaatggcaccttgagtgtcggtgtctgttcattgcggctgtcggngcctgaacatctatgtattttgggtgtaataccatggcttttctcatttcgagtaat

SEQ ID NO: 47809 - DNA, 426 bp, Zea mays
  unsure (1)..(426): unsure at all n locations
gagagcacnatttaggatttaccaatgttcattntgagaaagacagggattgtagcgcatgccaagcaggaaagcaagttggtgcccatcatccacacaagaacatcatgacgaccgacaggccgcttgagctactccacatggatctattcggcccgattgcttacataagcatcggcgggagtaagtattgtcttgtaatagtggatgattattctcgcttcacttgggtattctttntgcaggaaaaatctcaaacccaagagaccttataaggattcttgagacgggctcaaaatgagttcggcttaaggatcaagaaaattagaagcgacaacgggacggagttcaagaactctcatatcgaagggcttcttgaggagganggcatcaagcatgagttctcttcttcctacacgccacaac

SEQ ID NO: 47810 - DNA, 291 bp, Zea mays
  unsure (1)..(291): unsure at all n locations
acaacggcggaggcgagcagctcggcgagcaactcgctgaggttgtccacctcctggtgcatgctcctgatgtatgtgcacgtgtnctgcagcaccctcgccgccgaggccgatgccgtaccctgcgtttattctccgtcgcgttgtccctttgtgagcttgctgcgtatatataaggatcggagaggtctacgtacgacgaggacgacgggcatacgactgaacagcctgctggcggctgcactgcactactagtatagtagtacatcagagctagcgcgtgcttaccct

SEQ ID NO: 47811 - DNA, 340 bp, Zea mays
atgccacagccagcctatgcgagtcttatcagttaagcatgcatctagaccgggcgtgctctttgcataatcaactaaataaaagtctggcgtctagtacacccttaaaagctagtgaaccatcacaccttcttaagacagacacatctacatttgtgaataaacaattataccccatttgacaagttgactaactgaaacagattatatcaagcactcaactaaacacattaaaatagaggctcagtgaaatgcaattttcctaacctttacctgccttggtctatcaccgaaatattgatctgggatccttgtctgacatagaggaactctctctccc

SEQ ID NO: 47812 - DNA, 402 bp, Zea mays
tctatactacacatataacattcatggattaaatttcgatagcgtctcctttgaataatgcatatacgggaaagcaacaaaagttatattgatctcatgattagaaaacataatagacattaatattctgctatcaatgggaagacgaccattacgacatgaacttgatttaccagtgcgcacgactagttaaaaacaaacatactttgataagaagtttctaattaaatcatgactgcgcctgtgcagcattattatgagagtgaatgtgtatgtgctgctactctccactcaccttgatgagcaacaagcacctgcattgagttatgcaagagtgagatgaaacaatctagcaagctaattgtttgacgatatattaaacccattgaataatcaacattt

SEQ ID NO: 47813 - DNA, 418 bp, Zea mays
  unsure (1)..(418): unsure at all n locations
ctctgttgatggagccgagtttttccctgctggttcattgcaagctgcttcgggaggagaccttatgccaggtcatcaattgatctctcacgatctgggagtcccttcgttcttctccaatctccaggtactgtgatatattctggcctgacttttacaccatacgaactgctatcaacacgctcatctggtctccctatcaagcattggtggaccggatggctagtcagctgaggttgcaaggtgcttctgttccagaaagatgcttatctctggcacgtcggaatccggtgtagctccaacatcgtgtctctgatttggaggcgacgaatgctggttagtactctcttgcttctctttgtctatcttatagaactagtntacattttcaactctttttgctcgattgtctcttgct

SEQ ID NO: 47814 - DNA, 345 bp, Zea mays
  unsure (1)..(345): unsure at all n locations
actaatccacctcgttcctcgtggctcatacacaccgacgttttatattctgacggcgtggccgtggtcaagcaccgtgtcgagctccgatagaaaacgacggcttttgaattgcgatggttaagaagcaacgggaatcgcggtctgattgtgcaccatcatcggtcaccgcgccagtgcagtgaacagactatcagaggctagttgtgcccccaaaagcatgttgntttccatcactaagtgctagtgtagtaaacttatttacttttcaaataattcttaatgtctaacgaaaaataaaccttttgtgagaaatgaaaatctctgcgcctgggcacacatagt

SEQ ID NO: 47815 - DNA, 445 bp, Zea mays
  unsure (1)..(445): unsure at all n locations
tagcttctaaagggagaacacattttaagacttattaatgttcantttgagaaagacagggtttgtagcgcatgccaagcaagaaagcaagttggtgttcatcattcacacaagaacatcatgacgactgacaggccgctcgagctactccacatggatctatttgacccgatagcttacataagcatcggttggagtaagtactgtctagttattgtggatgattattctcgcttcacttgggtattctttttgcaggaaaaatctcaaacctaagatacattaaaaggattnttaagacgagctcgaaatgagtttggattaaggatcaaaaagataagaagcgacaaggggacagagttcaagaactcacaaatcaaaggctttctcgaagatgaaggcatcaagcatgagttcgcttcttcctatacacctcaacaaaatg

SEQ ID NO: 47816 - DNA, 350 bp, Zea mays
ttcttgactgagtcggggactggcctcatggacgggtgttatttcgcgtaagcggcaaggccgaccgagccgatggattcccacgcctctgggatacggatacctcactcgttccttccgcgagaagcaactctcgctcacacaaacattcctgttaccgacagagagtccatatgctcgaaacaagatgaaaaaagacgcagcttcgcaagcacggcgagggtgttgttttctggcctcgacggccgcagaatgcacacgctacaagacgatctgatcctgtaggctcggatcttcacgctgaaaggagccgtatcaccctcggcatcgacgacgtcttcagcaaagtc

SEQ ID NO: 47817 - DNA, 121 bp, Zea mays
ggtttttattactgagagccctggtttgctacacactattttcgacgagcagcggacatgcttaatatgcccaacttggccccttatcatggataactgagcgactcccaactctgaaaac

SEQ ID NO: 47818 - DNA, 374 bp, Zea mays
  unsure (1)..(374): unsure at all n locations
actaagcttctaaaggagacacatttaggataacatatgtcattttgataaagacaggattgagcgcatgccangcatggaagcatgttggagtccatcatccacacaagaacatcatgactaccgacaggccgcttgagctactccacatggatctattcggcccgattgcttacataagcatcggcgggagtaagtattgtcttgtaatagtggatgattattctcgcttcacttgggtattctttntacaggaaaaatctcanacccaagagaccttanagggattctngagacgggctcaaaatgagttcggcctaaggatcaagaaaataagaagcgacaatgggacggagttcaagaactcacaaatc

SEQ ID NO: 47819 - DNA, 416 bp, Zea mays
  unsure (1)..(416): unsure at all n locations
agcttgtttgaagtattgtatataatgaatatataaatcaatgtactaagcaaattntattctgtatgatgagcataacaccatgactggatgtgaacatgcgttaacattaataacagctggtaaccaggtatcatattaaaaaaatattgttcatttgtatataatgaaaatatatatttatgctgcatggaaatgttgatgtatttgggttgggctatatatgaggacaacatgagaattccacctgacgttggtgatacaagttctccgtgtcacgtagcacaagaacaaatggaacatattgttgatcctcagaagctaaaatgtgagcattgataaatgaatttactgactggtataaagataatttatgtaaatatgtgtatactaaataataactnctttaatataca

SEQ ID NO: 47820 - DNA, 392 bp, Zea mays
tcagaaattacaacttcgttctcctcagggtcatggacgttgtttgtcccgccagccctcacaattgacaaatcccgaaagtaccttcctctcatattttcaagatgaatctgtttgatggtcgacttcccgaagattgaatgacttggcctctatgaccgatcctcataatcttcgttcccactttccacatcatagctatcgctgtcaccagtatcttcagacaagccctccagtatctctttagtaatcttctctgtatttggttttgccatcgactcgacaaatccagcaatataagaatccacaatcttcttctcctcaaatagcttctcctcttcaatcagcttcgtctaacagcaaccttcttgtcttgagacattttttcttca

SEQ ID NO: 47821 - DNA, 386 bp, Zea mays
gacatcttcagactgaccttataactattattatatgagaactcagcataaggcaaacttttatcccaacttcctccatgctgaagggcacaagctctcaacatatcttccaatacttgattagtcctttcagtctgtccatcagtctaagggtgataagccgtactaaaattcaacttcgtgctcatgttctcatgaaagcttctccaaaatcttgaggtaaactgtgaacctcgatcagacacgatcttctttggtactccatgtaaatacacaatccgagccatatataactctgctagctgagaacctttatatgtagtcttgataggaataaagtgagccactttagtcaatctatccacaatcacccatatagcatcata

SEQ ID NO: 47822 - DNA, 457 bp, Zea mays
  unsure (1)..(457): unsure at all n locations
atttggccaagcttactcaatctggtattttgcttattaaatatactttcatgtttatatttggcccaagccatgattttaaatttttcatacccttttccccattctcttgaattttgttcatagggctcaattanggtttttgttggggttgcatatttttgcctttntgaaaaacccatttgttttgatcatgacgcttttaagcataagcttgttgggttcttttattcttagatcaacttgataatcatgctcaattttgctcacataaaatgatggctcttgngttagcacttgagagaaaccctatgtgacaaggggtgtcacactgagtcttccaaggaacggtccgatgtgacgcttatggtcttcacggttcttggagtagataaggatgtcgtcaatgaagactatgacaaacttatctagctctttcattaataccttattcatg

SEQ ID NO: 47823 - DNA, 419 bp, Zea mays
  unsure (1)..(419): unsure at all n locations
cagttgcttgtcactacagntgactgtggcctcctttagatgttcatactgctgtatcgactntataaatagattcgaatagccaagagattctccagttcgtgaaaggcactgcgctgcttcttgtgcacctcttcttgtagaacagaaaataagtacagacttcccccttgaatgttgcatcagtatatctgtaatctatatttcatttatatttctgcttttgaattgtaaaagtatgattggcatgatgtgcaatgcagctactgagtgaacaaaagatgttacttaccataaataaaactctgcaacctctacaagttcaaacaaacaaacaaaattaagcagtcagcattatataaaatccaactatttggcacaatatgatacaactcacggagaagcagaaccaaatctgt

SEQ ID NO: 47824 - DNA, 366 bp, Zea mays
  unsure (1)..(366): unsure at all n locations
aactcaatccttatctcaagctatcaatcttacattgtctattctttaagnatgacccaaagatgaatttaatggttatatcactaacttcatattcatctctagcaagaacttgtgttgtagggaataaggattaacctttgtcaagcaaaatgcctacaactaagggatatccaaaggatggtaaaaattaaatcttaggtgcacattgcttttaattattatattcctttgtgtcttttgtagccacatangataaacgaagcacatgagaatgaacttaaaatattttaccttgctttggaaagaatccaattatatggtagatcgcatatttgttattattatatgtggcaatctacatac

SEQ ID NO: 47825 - DNA, 447 bp, Zea mays
  unsure (1)..(447): unsure at all n locations
tcttcatcacaacatgggctattctgcggtgccagagccaacccatgtttttcttagcaattaagcaagtgtcgagttcagctctatcaaaatctaccaagtatagctgaccctctaacactcccttaaatgctattgaatcatcacttcttctaaagacagtgacacctacatcagtaaatagacagttgtagcccatctgacataattgcgaaacggaaagcaaattgtaatctagagaatctacaagataaacattagaaatggaatggtcaggggatatagcaattttacccaaacctttgaccaaaccttgatttccatccccgaatgtgatagctcgttggggatcttgatttttctcatatgaggagaacatcttcttctcccctgtcatgtggntggtgcacccgctgtcgattatccaacttgagcccccggatgcat

SEQ ID NO: 47826 - DNA, 429 bp, Zea mays
  unsure (1)..(429): unsure at all n locations
caattcaattaacttcttctatctatctccaacgatctatatccaagattgacccaacgttatttttaattattatatctaaaactcatatcatctcggggaaagatattgatgttgtacgaaataaagaattatcctgtgcggaaaaatcaagacctacaacatggatgaaagccaaaagatggtaacatttatgcttttaagtgcaagtattntaaaatatcatttcttatgtgtcttgtgtagtcacatagaaaaagaaagcacttcatatgttcttaaattatgtcaccattctttgaagaaattcctctcatatggtagatggatattcatcatttttatatcatggcaatctacatgctttatattgttgtatgtaccccatggcattgtttacactaattatcttattattgccatgattct

SEQ ID NO: 47827 - DNA, 439 bp, Zea mays
  unsure (1)..(439): unsure at all n locations
ttcgggaagccgaatgtccaaaaaacactcttcctgagctcgttgacgagaaacgattctttttccgagatcgtgtcggtcccaccttgcagagtcactgtttggtctttgcggtccactgcgcagcgagtacaagttactgcccgcctggtgtaaaaaccctgccgcttcgccttcttacctgcagcactatataaacagacgagtaggtgtgaagttaccacagcatttactgctatttgcactgttttgctgccaaaatttttaaccatcaccgaagcttgtttgtcaggtttgaacgaagctccatcttgaagcctgcttcggagaaaaaagtattaaangttcacaagttcataattaaatggccagagttcgctctacagctatggttgagcgtgaggaggacgaaactgaagcttcggagactgtgcccatc

SEQ ID NO: 47828 - DNA, 256 bp, Zea mays
cttttactccttcgcgggcaacacccttatcttgtccttactccccggtcttggcgccttcacgcctgtttgcgtcgttggggccccatggtgaagaagaggaatcttccttctttttgtcaccctggcaggcctcccactactcccgaatgagatataatcttccgcccatggtgataggcctataaagggtctgtggtccgtcgccatcgatgaccttgagatgaccaatcgcttcttcaatcgtcatcgtgga

SEQ ID NO: 47829 - DNA, 340 bp, Zea mays
cgtatccgaagttcttagcttttttaacaaccattacacggaattggagaaagtactgtatgctgttgtgatggcctccacgaagcttcggcattattctgaggctcacaacataattttgcttattacaacctctgaaggatattatgagaaaccgacaagctactggaaggattggaaagtgggctgcagagctcaatgaattctggattgattatgtccatagatcttcgattcagtcccaagcgttggcagacttcattgctgactggacgccaggggctcacgaagaagaaacaaattaagatgccgaagcatggtcagtgttttgcgatgggtc

SEQ ID NO: 47830 - DNA, 213 bp, Zea mays
agctacctgcatctagagatctctctatcctaggtcaagcacttggcctacactagccggcttttatatcccttcagttcactgggatgctacagtgaagtcagtgaccaagtcttcatatccgataagtaacggcgatcccaatggattaatactcagctgaagatctccaatcacacgacttatgtatcactgaacccttgatatgtcaac

SEQ ID NO: 47831 - DNA, 257 bp, Zea mays
gctacgccgactcaaccggctgaagatatgctgctgtatatctcttgcacgactcacgtggttagcactgcgttggtagtcgagcgagtggaatataggcatgcctatccggtacaacatcatgtgtacttcatcagtgaagttctatgtccctcgaagaataaatatcctcatgttcagaagctattatatgcggtacttctaactgcccgcatgctgcgtcactactttgacgaccacaaagtcatagtagttac

SEQ ID NO: 47832 - DNA, 446 bp, Zea mays
  unsure (1)..(446): unsure at all n locations
tgctatcttctaaagggagagcacattntaggacttacaaatgttcatnttgagaattatagggtttgtagcgcatgtcaagcaggaaagcaagttggcgctcatcatccacacaagaacatcatgacaacggacaggccactgaagctaatccacatggatttattcggcccgatagcttacatagcatcgacgggagtaagtactatctagtaattgtggatgattattctcgcttcacttgggtattctttttgcaggaaaaatcttagacccaagagactntaaggggattcttgagacgggctcaaaatgagttcggcttaaggatcaaaaagataagaagcgacaatgtgaaggagttcaagaactctcaaattgaagggctttttgaggacgagggcatcaagcatgagttctcttctccctacacacctcaataaaat

SEQ ID NO: 47833 - DNA, 374 bp, Zea mays
ggtactcactgtcgaaccgctgctaatccataaatcgtgttatccgaccttcttttctggccctaatgtcctctgctctcgaccctatcgtcaaccaaatatgatgggagcaggcccgctcctctgccaccaagacagctctaacacatcgccagacgaccaagtcttttcctctgtagttgaactccttggtactcaaccccgccgccaagccatgtgtgacgccctgctaggtccaacgcgtcggctcaagattcgcctcctcctacattttcgatgtagtagataggtataaggggctaaccattactagctcctataagacatcgaatgcagctatgattagttccaacttattacgttcgatggagctg

SEQ ID NO: 47834 - DNA, 381 bp, Zea mays
tgcttaagatgccaggccccaacggaaccattatcttctgatccacgtaccgccacgcttacgagtgcgacgtggaatgcgtggagtacgctgaggccattgccgaatccgaggacctcatcgccgacctggattgcctctccaaggaggcgcctgatgagaagcgccacgccggcaacttcgaaccggccgaggcggttaagtctgtccctctcgaccccagcaacgacgctggcaagaaagtcaggattggctccgagctcgaccccaaataagaagcagtgcttgtcgactctctccgtgcaaacgctgaaatttttgcgtggagtctctcggacatgcccggcataccgagggatgtcgccgagcactcactggaca

SEQ ID NO: 47835 - DNA, 427 bp, Zea mays
  unsure (1)..(427): unsure at all n locations
ctaagcttatcatttgacgtgttgtcaacaagagtgaaattttttctaccctgaaactcgaaacaaggatctacaaacgggtggggtgaagtggcggagcccatatatggatgcctgttgggcacgtgcccatacttctgcccaagtactcatatacccagcacacaaggacgtacaaatgcttgtgtgaagaaagcgactctgggatggaaaggaaaagtatgggaggccgcgacgtgtatatcgacagtaacggaagcgtgtggaacagtgaatttgaaatatctcgacgagtggcagataaatatttaacatgtcctatgagaatgttgattntggtgcagtatagatgagtagacggcgatggtgccacggatctacattattgcacttggcactcctgtgcctgtgctaattacttgtgctc

SEQ ID NO: 47836 - DNA, 389 bp, Zea mays
  unsure (1)..(389): unsure at all n locations
tgctatcttgagaaaggagaaaccgcagcacgctgtattactccacanaaagcaagtttctactacaacaagagaagcgaacaagaagaataagaaacaatgtgaaacttcaagtattaatgttgtctgtagtaatgacctttttatgtcctccaagagcataaagaagagaggataaaggagatgtttcaaatgcaaagaactagttcactttattgcctcatgtctacacatggacactaagaatgaagtaagaagttacttcacatgcaacaaggaggatcacatgatcacgtcatgccctctcatgaagaatcaaggacgtgcatccnccaaaatgactctcatcaagacaaagaatgaacaacaagcgtcatatcagactgagc

SEQ ID NO: 47837 - DNA, 353 bp, Zea mays
tcatgtcattttatacctaccctcttgtggggctttttccaatacacagattgcagccatatgctctctcaagagaccgccatattacatctacacttaatgattattgaattgtaaatgaattaccacatacaattattcaaataccgaaactcacttgaataacataatagcatgaagaatatgaaaaatgtttaaattaaaagagcatgctctaagacatgaacaaacgaaatgccaactcacttctccaaaatattagcacttgagtgccagaaagtgtcacgggcttcattggtatcaaacttgaacatttgcaaattgcagtcaccttccaatgtgctacccatatt

SEQ ID NO: 47838 - DNA, 349 bp, Zea mays
  unsure (1)..(349): unsure at all n locations
tatcttggataaatctggtatgaatcgacggttataaccagccagtccaaagaaacttcggacttgatgtacagtgggtgggggtttccactccaaaatatccttgactttgctgggatccaccgcaatccccttggtagataatacatgtcccagaaattggatctcctccagccagaatgcgcacttactaaacttagcatataattggtgttcccttaagcgcgttaatacgattcgcaaatgtcgagcatgctcctcttcattcttggagtatattcagatatcgtcaatgaataccaccacanaatggtccaactcgggcataaataccgagttcatcagatat

SEQ ID NO: 47839 - DNA, 223 bp, Zea mays
ctgacactattttctttggcacaccatgaagactaacgatccgagacatattcaattctgccaatactgcactgctgtagttggtcttgacatgtatgaaatgggctgacgtggtcaaacgggccactactacccaaatggaatcgtatccggctcgagtgcgatgcaatccgactatgaaatccataccaatttcatccccatttcactgatggatctgcaa

SEQ ID NO: 47840 - DNA, 281 bp, Zea mays
  unsure (1)..(281): unsure at all n locations
ataacataatcatatcaatagcaagacagaaatcccatcctacatgtgcagtgtgtcaatttattactactccacttgctaagacctacagcctattcctctgataccaactggaacaccccactggtcacatacaatggataataccacaaaccccacccaccaaacttactcaacacaagagaagttataaagaaagaatatatagcnaaatcccgcagcacctnctttgaaaactagcatgacaaggaggggaaacatgangctcatcccagatataa

SEQ ID NO: 47841 - DNA, 381 bp, Zea mays
  unsure (1)..(381): unsure at all n locations
tgtgttacaagaaagaaagtgggagcgcttttgtatttcttatcttgtatgcggatgacatattattgattgggaatgacattcctatgctggagtccgtcaaggcttcactgaaaaagagtttttctatgatggacttatgggaagcagcatatattttgggcataaggatctatatagataggtcgaagacgcttataggattaagtcaagatacgtacatngacaaggttgtgaaacgattcaacatggaacagtccaataaagggttcatacatatgtcacatggtatacaccttatccagatgcaatgtactgcaactgctgatgatcgggagcgcatgattaatgtatcatacgcctcatcaattggttcaatca

SEQ ID NO: 47842 - DNA, 447 bp, Zea mays
  unsure (1)..(447): unsure at all n locations
agcttgtattccgtgaatcaagcaacggtnttctatacatagcagcgtctgaggcaactttatcacatgagtgaaagatgatcactaatcaacggtttacactcgtatcagcggcgctgagctgggtgaagactggaggccaggtatatgttctttcccctccaaaaaacgaagcaaaaaaaacacacacacacacacacaaatacagatcattagcaagggatcataagtgagacgtacttgttcgtagaattttattctttccgagaaaaaaagacaagcggtttttggttattaacaatgctcgtcatctaattatccacggaaagagcacgtagattntgtaaaattaacagagtatacggacaaagtatatatcttanctagctntgaagcagaagtagtagagtggaggttgggacgagaagaagacatggcaataatact

SEQ ID NO: 47843 - DNA, 439 bp, Zea mays
  unsure (1)..(439): unsure at all n locations
tctatagggagaacacattgtgggactaacaaatgttcattttgttaaagacaggatntgtagcgcatgtcaagcatggaagcaagttcgtgttcatcatccacacaagaacatcatgacgactgacatgatgcttgagctactccacatggatctattcggtccgattgcttacataagcatcggcgggagtaagtactgtctagttattgtggatgattattctcgcttcactngggtgttctttttgcaggataaatcacaaacccaagagaccttatagggattcttgagacggtctcaaaatgagttcggcttaaggatcaagaagattagaagcgacaacgggacgaagttcaagaactcacaaatagaatgctttcttgatgacgaaggtatcaagcatgagttctcttcttcctacacaccacaacaaaat

SEQ ID NO: 47844 - DNA, 252 bp, Zea mays
  unsure (1)..(252): unsure at all n locations
ctactggcggagctagctgaagcactggctgggcttgaaggtggctggagtgggctagccactttggtcgtaactctggcgacnatggcgggcggaattgagctcgccggagctaatgaacgatggctggccgaacatggtgagtgctgggcgaatacatgtgcgcccggcgaggctttatatgcgcgggcgggcacggccgacgggcgtggcgcgcggtggacttgactggacaccccggtgagctcgctc

SEQ ID NO: 47845 - DNA, 157 bp, Zea mays
  unsure (1)..(157): unsure at all n locations
cacacgttagtgtaatgtgtctttgtaattgnacaataatacacgtagattcttgtgcttccattactatgggaagccccaaccacgtatatccatgcacacctgatctggttatggtgttagatacgatggatcccagtgctaaagcgtgagccat

SEQ ID NO: 47846 - DNA, 322 bp, Zea mays
atcgctcggcgctacaacgagactgcggacgagcttggctatatagcctcggggcgaacaacggttcccccggacatcttcttccgggatctgcatcaaccctccgtcaagatcgacgactcgcccgagcccgatgtaccctctgtacattccgaggcaccctcagctcggtccgaggcgccctcggttcatcccgatgtaccctctgcctccgagggcgaggtactgcacgtcgatgaggagcggagcggagccacgcctgatcgaaattggataccccgtacctggaatatttccgtcaaggagagctacccctcgaccg

SEQ ID NO: 47847 - DNA, 474 bp, Zea mays
  unsure (1)..(474): unsure at all n locations
cgatgatcgtctctaactatttgtgcgcactggttaatttagntcattccgttatggntgtcttcccattgctagtagattattaatgtcgattatgttttcttatcatgatatctatntatactttgttgcttccccgtttatgcaattttcaaaggagatgctgtcgaaattttatatatgaatgttagaggtgtagtttagtaccatttcggggtgtttgtggatcccggggtgttacagttggtatcagagcttaagctttatattcttggcaatttgaagataaatttgacacacttgcacatataggaagggtatgggttcaagtatctttgatatatattagtgactttgaagtgcagatgacaataatttcaccccttcctattcctttacggtgatgtggtaagttgtttatggcttaatgcttgatataatttatttctgaaatnttgatattggtttattaat

SEQ ID NO: 47848 - DNA, 352 bp, Zea mays
tcttactttgtagcgctcgctagatttaagctttttgagcttcgttaaaattcgtgtttttaccatgtctatggaaaaaatgtctgagaatgagaagcttgctgaagaaacgaaattgtttgaggagaagaaagctgtgaatccttatattggtggatttggtgagtcgatggcaaagacaaacacagtggagatcacttaagagatactggaaggtttatctgaagatactggtgacagcgatagctatgatgtggaaagtggggatgaggattccgaagatcggccctggcgaccaagccattcttgtttcggaaaatcaaccatttactagagtcatcttgagaacatg

SEQ ID NO: 47849 - DNA, 406 bp, Zea mays
agcttgagtcaaccactttgcaaaggataattgatgctcaaaaagataatctgggtatgaagcacatacgagagaagataagggctggagtagcccactgtttcaaagaagacgatcaaggtgtgatatggtttaaaaaccgcatagttgtgccaaagaacgaagagctccgccagcaaattcttgatgaagcacatcttagtcgttattctattcatcctggaagcactaagatgtatcaagacttaaagcaacattactggtggacaaagatgaagattgaaattgcacgctatgtggctaagtgtgacacttgcagacgtgtcaaggccatacacatgaaaactgctggtccattacaatctttgccaattccaacatggaaatgggaagacatcagcatgga

SEQ ID NO: 47850 - DNA, 277 bp, Zea mays
  unsure (1)..(277): unsure at all n locations
tgccagtacttgtcgaatcaacaacatctaccggcacagcttttgttgaccataccagtgacttggnccttcgcatgctggggactcgatatgattggacctttcaagaaagctcaaggatgatacactcatgtactggtagcaatcgacaaattcaccaaatggatatagttcaaacccattgcttnctttaacctcggctaatgccgtggaattcatacaagacataatattcagattcgggataccaaacagcatcttaactgacctaggatcc

SEQ ID NO: 47851 - DNA, 408 bp, Zea mays
  unsure (1)..(408): unsure at all n locations
ccatggtaagtagcataggcttttaatattcgagtngactcaagcctagctatgggtgcataggtttcaccgaaatccaaaccttcgactngggagtatcccttggccacaagtcgggctttgttcctcgtcaccacaccatgctcatcttgcttgttgcggaagacccatttggttcctacaacattttggttaggacgtggaactaaatgccatacctcatttctagtgaagttgttgagctcctcttgcattgccaccacccaatccgaatcttgtagtgcttcctctaccctgtgtggctcaatagaggaaacaaacgagtaatgttcacaaaaatgtgcaacacgagatctagtggttacccccttatgaatgtcgccgacgatggtgtcgacggggtgatct

SEQ ID NO: 47852 - DNA, 361 bp, Zea mays
  unsure (1)..(361): unsure at all n locations
gaccttatatactaagctatgtccatcaaggcagtgagagaaccctctctcacggtgtgaagacggcgcgcccgtgttccggtcctcgaatggctcgcgcacgcgcaacggacacctcgcgaaccactcgccccgtcgcattaactccgcggcaggacatgcggcgcctctggcaggagaagcaagcgacgcttcgccttcgccataatgaccgcgtcaaaaaaggtacgccacgtcattcgaattcgtatccttttccttttgctctttctctctcttacaacagggactgggaaagggggataccccgaaaaggatccttctccgtgaaggaaacaggccccgagcctncctactgatc

SEQ ID NO: 47853 - DNA, 234 bp, Zea mays
  unsure (1)..(234): unsure at all n locations
ttatcttacnggctactggcggagctagccgtatcactggcttgcccggaagatggctggggtgggctggccactgtggccgaagctctggcggcaatggcgggcagaattaagctcgccggagctaaagggaagtggctggccggtgaaggtgagtgcggggcgaagtggggcgcgcctgggaaggctttatatgcgcggcgcggtgcacgggcggtcgtggaccggcgagtg

SEQ ID NO: 47854 - DNA, 472 bp, Zea mays
tcagtttcatgggtgaatcagttggagttctcttccaaaagcatctaagcctctttcaactccttgctcaatttctcattctaagcctgcgcttcggtaagcaatccttcggctgaatacagcaaatcatccttttcttttaaagaatcttcaagtttcttgattttatcttcgaaacccttgacaacaatttcattctttctgtcttcgtcatcttattgcattttcaaagctttgcttaacaataaactctgtaaaaatgaattaaagttagaatacctaaatcaacacgaaggtatcagcggtaacttgcaaaggaggcttactttgaagttcgagtaaaataagctgtcgatgatgtgctggcgtctgtagcagctgatatctttttcaagcttcgggaatccaatactctgggacagggtgcttgataatttagcaccagcacgatcgcgaatgcatgccacaattt

SEQ ID NO: 47855 - DNA, 446 bp, Zea mays
atgtcgatgatgtggtgatcaaaatttttactcagaaacttcttatagattgcagctggtcttcaatagcctgaggcgatatcggtggaagctcaatccatataaatgtgtcttcggagtaccagcatggaagttgctcggattcattatcagccaccgaggaattgaagctaacccggataaaatcgatgctatcatgagaatggaagcaccacaatcacagaaaaaagtggaaaggcttactggatgcatggcagccttaaagaggttcatatcaaggctaggcaaaataggcttaccattctacaaattgctcaagaaagtggacaagttccagtggaccgcagaagcacaggaagctctcgatgcattgaagaagttcttaaccacgccaccagtactgaagccaccacaccgagccacgctagatcagccagcagaagatc

SEQ ID NO: 47856 - DNA, 301 bp, Zea mays
taatgggttaaccattctatgtatcgaaaagaagttgttgggtgacaatgatatcgaaggtataagcaatgactctgtatcacaaaatgttagaagatatttttagtgatatcagataacacgtaaaggtgatcttaataacttcaaaatcgtgcaaaatccgccagtttggacggttgcatgcggatgcacatgctcgggcgagcccgacaggtctggtacggccatttccgacgtatcctgggatgcaggtaaatggtctcaaattgatttgttttgcatacactcgtgcttatgcgtc

SEQ ID NO: 47857 - DNA, 309 bp, Zea mays
  unsure (1)..(309): unsure at all n locations
catattttattatacanacctgtttattataacataatatttatgtacatttataccttcgccttggcagatagcaatattataagcgtaatgagccagcgattacaagatcgcgtgaacaggacatgggtactggtcacctatgtataagcacagggcgtgacctgtgtatgagtacatttatgccctttacaatcgactacaataatgacacagaataccatggatctttatgtcattgcatctttaagtcggctcaccccttcgtattgagacatgtcactgtgccgaaactgtataggcgataac

SEQ ID NO: 47858 - DNA, 467 bp, Zea mays
  unsure (1)..(467): unsure at all n locations
agctntagaaaatagagaatctttcagtattctcaacttatgtcaaatgatacaccatcacaaaaattaatattgtgcaaaagacatgtcatcagcatatagaattaggagccctgcacaacaaatcagttttgcataaacagtccttccagatcgctccccaagccggtccgaggaacgatggcgggtcagcctcgtcatacagtcgtaactgccatcgtcgctttggtatggtgtgtgttgcctctgggcacagagtttacgctgcacaacattggggctcttggtgatgggtgccccaagcagcatgagggtgtggacgagatggtacatgataaaagttgttctaattatcaatctttgatctagactgttgcactcagaggaaaaaatgtccgtttcaaaggctgtgangggtgaaaattggccgaatntgaccatctaccagtccaccatacaaaccaatc

SEQ ID NO: 47859 - DNA, 451 bp, Zea mays
  unsure (1)..(451): unsure at all n locations
tgccttgtacctttcaatattaccatcaagcctaagctttttcttgaacacccatttactcccaatgggcttacacccataaggacgctcaacgacctcccaagtttcattagacataatagaatccatctcactccttattgcttccttccaaaagtcagcatcaagagaggaatatgcattttcaatggtacttggtgtgtcatccacaagatatacaatgtaatcatcaccaaaggactttgcaatccttggtctcttactctttcgagttgatacattgtcatcttccacagcattatatatatgggattcctcagtgtgttctaccggaataaaatgctcatgtggtatcgatagctcatcattagacgtatcatgtgtagctntcatgggaaaatcgccctaaaacgtagcatctttggactccataatagtaccaaccaacatg

SEQ ID NO: 47860 - DNA, 382 bp, Zea mays
agctagtgaaagttcttcatccccacatgttctaagcggagaagccacagccagcccatgctagtcttatctattatacatgcatctagaccggcctcttcttttgcaaaatcaactaaataaagtctgacgtgtaatacacccttaaaagctaacgaaccatcgcttcttctaaagacagacacatctacatttgtgaatagacaattgtaccccatatgacataattgactcacagatagcagattatatccaagagactcaactaacaacacattacatatggagtgctcattagatatggccatcttacctaaacctttaccatgccttgattcccatcaccgaatatcatagagtatggtgattctttattcttgac

SEQ ID NO: 47861 - DNA, 427 bp, Zea mays
  unsure (1)..(427): unsure at all n locations
tctaaagggagaacacgtgatatgtttgactaacgtgcaattctaaaaagatagaccttgtgcagcttgtcaagcatgtaaacaagtgggatgagcgcatcacagcaagaatgtgatgaccacttcaagacccctggagctactacatatggacctcttcggacccgtcgcctatctaagcatatgaggaagtaagtatggtctagttattgttgatgaactttcccgcttcacttggctatactttttgcaggataaatctgaaacccaatggaccctcaagcgcttcctcaggagagctcaaaatgaagttgaactcaaagtgaagaagataaggagcgacaacggggtccgagtcaagaaccttcaagtggaagagttccctgaggantgaaggatcagcaccaattctccgctcctacacacc

SEQ ID NO: 47862 - DNA, 172 bp, Zea mays
gtgacctgccgcgaacagtgccattcccaacattacacaagcctggctatccagattttgcctgtactacatgggtattgctgataggaaatccttactggatttttcagaaattacccaaactaaggattgaggtaagtttgtagcaaaattatgccgcggtaaaccagag

SEQ ID NO: 47863 - DNA, 352 bp, Zea mays
tataatactaagctgtgtatgtgtctattgtgccatcatccttgtttttatctttgtaacccatttgcataccatgacatttctcacctctggccgaggaacaagatgccatgtattgtttctcaacaatgcttgatgtacattttccatggttgatgccctctattgatcttgaagtgcttcttctactgagctcggtttctcggactgcgcctgtgcattcatgcaccatcatatcggaccatccgtgtactccttgggcttattatcccacgttggagccgattgactgtctttctataactagcagcagcagctggatataatgagtataccataagcttcctctgac

SEQ ID NO: 47864 - DNA, 407 bp, Zea mays
  unsure (1)..(407): unsure at all n locations
ttatcggcatttgttctataaacaacattgtgtcaacaacacacgatgataaaacacgaagatgtatgaagaagatgagcaggaaagaanttttatacttcatcaattagcgctcgagcttcgttcctgatatacttctcaaccacctttgtccagacctgngtattaaacctgttgcctacgctcctggattcagccaaaatgttgttcaggtcagatggggaaatgtcgaaggctggtttattgacattattcaagtgattacacccagccttggcaaaaatagcagccatcccacaggcagccactaatacacagaagtcactctggcccacaacaacttcatcaagatcatcaatttctttttcaatccagtcgagcaccataggaatatcatcaacagagtt

SEQ ID NO: 47865 - DNA, 406 bp, Zea mays
  unsure (1)..(406): unsure at all n locations
tgtgatgacttgattcaagaagagcatactagtctacatgacgaattgactgattatgttgaagtcctgactttagacaaccaataattgaagaattacttgactgatgcaactactagaggaaaagttgctattgagaacaatgatttcaacaatgagttggcagtggataatcaaaggcttaagaatgaggtcaagaaactaaaaagtgaaaatgaacatcttgcaacatgtgtgcaaaagttcaacaagggtcaatacctccaaaatgagctgcttatgaacactgttatgaaaaataacaagagtggtattggatacaatgcttttgtgcaaaagatagctatcactcaatacaagccaaagcagactcacaagcctatcaaatgcttngagtgtggaaatg

SEQ ID NO: 47866 - DNA, 406 bp, Zea mays
  unsure (1)..(406): unsure at all n locations
ctcagctatcacaaccgttttttttgcacgctccacgtatatgtgtttctgctaagaaaccgagcagacatatgattatgccttatgcgtggtgtagtataataaaggtgagtgaatcctttttctcgacgaanaacaaacctgtatgttcggtttttttctgaccgactnttctaagaatctggatgttcggtttttttctgaccgacttttctaagaatctagctgtggagagaatctggttgtagaaaaaaaattgagtattatgtgaattacgtgtaggaagatgaagtgatctaaaaggtttatgatctanaaaacgaatggattcgtgatgactcaaccgattctgtattcatgttgaatttggacgggttttatccaaacgattcttatacaagcggac

SEQ ID NO: 47867 - DNA, 292 bp, Zea mays
catcatccacacaagaacatcatgacgaccgacaggccacttgagctcctacacatggacctattctgcccgatcgcttacataagcatcggcgggagtaagtattgtcttgtaatagtggatgattattctcgcttcacttgggtattctttctgcaggaaaaatcttaaacccaagagaccttaaagggattcttgagacgggctcaaaatgagatcggcttaaggatcaagaaaattagaagcgacaacgggacggagttcaagaactctcaaattgaacgcttccttg

SEQ ID NO: 47868 - DNA, 438 bp, Zea mays
  unsure (1)..(438): unsure at all n locations
tctgcgatgccagagccaacccatgttagtcttagcaattaagcaagtgtcgagttcagctctattgaaatcaactaagtatagttgaccctctaacactcccttaaatgctactgaatcatcacttcttctaaagacagtaacacctatatccgtaaaaagacagttgtagcccattctacataattgagaaactgaaagcaaattgtaatctaaatagtctacaagacaaacattggaaatagaatggtcaggagatatagcaattttacccaatcctttgaccaaaccttgatttccatccccgaatgtgatagctcgttggggatcctaggttttctcataagaggagaacatnctcttctccccagtcatgttggttgtgcacccgctatcgattattcaacttgagccnccggatgcatatacctacaaaac

SEQ ID NO: 47869 - DNA, 407 bp, Zea mays
caaaggaaaagcgcttcacttatcaccgagcctatttcttattgatgacatatcatatcagatagtgctgttaggctctcagttatccgaagagcatgaaataaccttgataagggtgtttgttcaataacaaggatgtttttgcatggtcatccaatgatctctgcggagctaatatagatgttattgagcactcgctcaatgtcgatccatccttcatacccagaaagcaaaggcttcggaaaatgtcagatgataaggccgaatgtgctcgcaacgaagtcaaaagactccttagtgcacgagttatcaaagatatgaagtacccagaatggctagctaacacttgtatgtgtaataatgccaatggcatgtggcgaatgtgcatcgattttacagatcttaac

SEQ ID NO: 47870 - DNA, 335 bp, Zea mays
  unsure (1)..(335): unsure at all n locations
ggctcaaaatgctgttgtcctcctcactttcgntggtacttctgccttcagccacagcctgctcagcttcggcagtagcacctttggcagtagcttctttcggcacaaccagacccgatcatctcaccacttttgatatcgtgttgtttcagttatttcggcatcatctccctcacgggacaccctagtagtggatcttactctggccatttcagtgttcagtttccttaagacgaagctgatcttaagtgacgaagagcgtgttcgaaagcgcaatgcagaaagcctcggctttgggttaaaaatttaacagcacaatagtgcgatgtcaatga

SEQ ID NO: 47871 - DNA, 359 bp, Zea mays
agctgacaagaagatgctccttgacgaaaagataggcagatggaccgatttgctacctgaggcagtatgggcactatacatgactgattgcatggcgaccgggtttacacccttccgccttctatacggatcggaggccatgaccccacattatataaagcatgggtccccgctaacagtcccgtcatccgtccacgacgtggacgagccaacttcaaaggatctcattgacggagaccgaaacttcgccctacatgccctgaacaagtaccaagcccagaccaaagcatggcgcgaccactcactcattccgatggagttcatcgaggtggacctcgtactcatccggacagctcgga

SEQ ID NO: 47872 - DNA, 419 bp, Zea mays
atatgcaggacttcttatagctcgcaagctacgtcactacttcgttttttactaagtcatagtagtcactggttgtccgataagggatattcttcacaacaaagaagccattggcagaatagccaagtgggcctgggagctgggatctcacgacattgaatttcgacctcgcactgccatcaaaactcagacactggttgatttcgtatcagagtggaccgaacaacaagtactagacaacccagaaactgcgcaagtgtggcgaatgtattttgatggctcattgaagctgcatggagcaagtgcaacgattctctttatcgcacctggaggtgaacaactcaagtatgctcttcatctgttatttccggcatctaacaacgcggccgaatatgaagccctgagtcatggactgaaca

SEQ ID NO: 47873 - DNA, 169 bp, Zea mays
gtgcgacctctgcctaccggaacggtgacgctgtatcccacgtgcgctctgattacagcattctcaggaggcggcttgatcatataaacacatgtcacactccttgtgtacatactaatgatgaggggaaacggtccgggtctttacatatgtttccaatctacactta

SEQ ID NO: 47874 - DNA, 391 bp, Zea mays
  unsure (1)..(391): unsure at all n locations
tcttggctttggacaaatttggagggacaacattngagggcttctctcctactctagcactcatgtgctcttgaatggcattccacgacgacatatcgaatatagaagatggctccgacaaggagatcctctctcccccatgctctgtattctagttatggatggtcataggctactggcttgtatagctgaacacgctggtctgctcttggatctctcccccagaatacctctgcatcaggtgtctatgtttgcacatgatgtggcactcttcttacaccctctcgcagcggatatcgctataactctagatattntacatctcattggggaagcttcangtctccgcaacgacgaacaagagtctaatcgttatcccattcaatgtggg

SEQ ID NO: 47875 - DNA, 444 bp, Zea mays
  unsure (1)..(444): unsure at all n locations
gctatggtaagtagcataggcatgtaatatgcgaattgactcattcctaactacgggtgcataggtttcaccgaaatccaaaccttgtcaccacaccatgctcatcttgcttgttgtggaatacccacttggttcctacaacattttggttagggcgtggaactaaatgccatacctcattcctcatgaagttgttgagctcctcttgcattgctagcatccaatctgaatctcttagtgcatcctccaccctgtatggctcaatagaggacacaaaagagtaatgttcacaaaagtgagtgactcgagatcgagtaattacccccttacgaatatcaccaagaatggagatgacggggtgatctctttgaatcggntggtggactcttgggtgtggcagtcttngaccctgaatntcttgctcatcttcctgtctntgtcatg

SEQ ID NO: 47876 - DNA, 437 bp, Zea mays
  unsure (1)..(437): unsure at all n locations
tctcctggacaaagtgtgcacttaccgctgagtgcgaagatgccacatactataacagaggagcccctagtgggaagaagctctatagcaaactcaactntccgctctggtggcatacccggtaagtccttcggaaacacatctgggaactcggacacaaccttgatactctcgatcgggtctgcttcactgctatcaacaactatctgataaaaacttcctttctttggctcaggcgggactaactcggtcaccacttcctctcctagtggggacaccaacttgatggtccttttatcacaactgataactgcctgatacttatctagccaattcatccctaggatgacatctattccctgagtacccattactataanggtggcgggaaacgctatcccccttatttgcacacttatattcaaacaaatgctatc

SEQ ID NO: 47877 - DNA, 340 bp, Zea mays
  unsure (1)..(340): unsure at all n locations
tatctnggatgaagtgccatcatcatcatctattcgagctatcatgcgagttacattcaactaagcatgctttgccatctttcttcttgatatagtattactttatcttcttgtcactttcatctttgcccttcttcttgcttgggcaattcatggcaatgagaccgggtttcccacactcaaaacactttctatcattgaaaacatttcttctagatgtttgacctcttataggatgacctctcttcatcttcatgaatttattgaatttccttacaaataaagccatgtcaccatcactctcacattcattttcttcatcattgctatattctttttc

SEQ ID NO: 47878 - DNA, 355 bp, Zea mays
  unsure (1)..(355): unsure at all n locations
tctaagtggagtggatngatctgacgtgccttgggtggattctccctccgaagcccctattcatctcatagaacctgtaggcttcctcccttctttgacgaaagtcattatcagcgcggatgtattcatccattttttgaagcagcttctccaaagtctgtggaagctttctagcaaaatactgngcagtaggccctggacgaagccccttgatcatggcctcaatgacaatttcattgngcattgtatgcgcttgtgctctcatgcgcaagaaccttcggacatatgcttggagatattcctcgtgatcttgtgtgcactgaaacaaagcctgagctataactgtctctgtctg

SEQ ID NO: 47879 - DNA, 431 bp, Zea mays
  unsure (1)..(431): unsure at all n locations
tagcttcggagactctccccatctccgaagttttgtctcgatcgggtctagtgacttcagaaaagatccctcatgatgatgcagaacaagcagaacaagcaatcgctgaagcagaggaagaagatattgaggaaactgattccgaagatgattatcgcattgccatgccaagcaagccgagccacttggacttcggaaaatctactgtttcgaaggctgatctgtccaagatggtaaaatcgggctttttcactgaaaatcagaagaagcttttgcgcttcgggggagaagagactaccccaaaaccagagaaagatgaaattgttattttcaagagctttttaaaggctggattaagattccccctacatgggatcattggagaggtgctgaagaggttcggtatctattntcatcagctgacccctaac

SEQ ID NO: 47880 - DNA, 306 bp, Zea mays
  unsure (1)..(306): unsure at all n locations
tttcgacactgtgaagaagttattcatattttcacagtgggttatgcacagttacacagttggttactcacagtcactacaattttatttctagttccgaagctcgacggagacatgctatgcagttggacctaagattgatcgccaatctgaggcaaagttatgatgtattatatacattgtgtatgattatttatggaacanatagaatatgaaggtggacatggattcttattatattttgctgaacaaccagccggagtgcaggaccaatatttttgatgcaccgcgcnctggtcccatgcc

SEQ ID NO: 47881 - DNA, 440 bp, Zea mays
  unsure (1)..(440): unsure at all n locations
agctngaatgatgccctctccgtaagccacttctaaggttctacctcttcatgtaatgcaaataatagcactcatatctntgtgcctaaaagaacaaaaggatntgagaaaaaaaatcaaagcagcaaaccttgaaagcaggctcatcccaacaagggaagcagcgccttgcatcatgttggccccagaactttctgtccaggttcacaccagtgctttatgctggaatctagattcagattcgatgtttcgctgctggggctgtcccaaataggtcaagatatatgtatgttcagaaactgtaagcatctgaacatctataggtagatcctgataaagtccaataactggctgtagctttcagtattgactccatgctnntctattatcttaatgcaaatctggtatactctattggtaccagcagctgacatgatgcc

SEQ ID NO: 47882 - DNA, 356 bp, Zea mays
  unsure (1)..(356): unsure at all n locations
ggcggaggaagtgccacaccatatgatgtgatggcttctttgttcaaganagctcgcagganacgagaacgactacgccggaacgtttgtggagatagtcatgcggcacgaggtggaagggagacgctgggtgaaaatcatgagatgggagtttatgagatacagagcagatgcatgaaatgtgctggatgaaatagtggtagaagcattggatggtctcgggatttgttctccctggccaaaaatggccatggcaataccgaatctgtagtagtagcgactgctctgtgtatgataaatgataactgctctaaaatattttgtgctggaaatataaactcttatcatctgcatct

SEQ ID NO: 47883 - DNA, 468 bp, Zea mays
ctagcatacttcgtacccatcagttgatggtgccatcatggttagtcaacatagatctatgaacccatgtagttctttgtgttagcactcggtaaaactcattacctttctaacacaagttgcaattttgggttgcctaactacatgagaaatagttgacaagctagaggtgagaatgtcaccaatgggacaatccttgcattgatgtcccttctttcggcatatgtagcacaggtgatcctcaaatctcgaagatatcttctttccttgtttcttgcttgctacatggttaagtaacatattcatttctaaccttatgccttttattttcaaatagggacaagaactaattaagtgtcccttctttgagcattcgatacacagtttatcatccttgttactaatcaagtaatcttaatatagggacatgacctaatcgaatgtcccctttcaaagcattcactacac

SEQ ID NO: 47884 - DNA, 330 bp, Zea mays
ttttgatagtgactgtctgcttgggcgtgttctgatcaatgggaacagtcttggttgcgtcttggctctgcaactgagccttttcgcgctgattgatggctgggctggcgggcgcggggacctctcgctgggtcgagagacactgtactttcctctgaccaggcacgaagatccgctctatgttgcacgccgtctgctggctgccgtagatcgtgatatcgcctagcggacctggtatcttcatacataagtacagtccgtggatggcagcttctaacttattgatggagccccggcccatgatggcgtttactgatataccatgttaca

SEQ ID NO: 47885 - DNA, 219 bp, Zea mays
cttcacatatgggctcctctcggacgcctcttattgtgttcactatcgagcattctgtcgaatgtcgcgggcctcattccctctggtgcataatggtggccacaccacaaacatagttggtctggtctcgcaagactctcgccctacctcgtacaatggttcaatgactcatgcaaaagtcaatgtgtttgtaggttatcctaacctcactcaatcaac

SEQ ID NO: 47886 - DNA, 392 bp, Zea mays
  unsure (1)..(392): unsure at all n locations
aaatcatatgcttttcagtttcaaccatctntactgccaaacttcgaatatccgtgtaactagaaaaggactaaatagagggtgacaaaaagataaaacacctatatataatgggtatgctggagactaagcctgggcaacagcccaccctgcccgggccttggatccgcccatgattgtaagtatgtgatctggcctaatataacgtgatttcatctgctcaaagatgcagaaagccccttggaggtcacgaacctgacaatagccatttattagagtgttgtagatntctgttgttgggaccacggtttttttcggccgatatttatagaaaattccgatatatcgctgttatcagtggggcctgatttttccatatcggtcaaatattt

SEQ ID NO: 47887 - DNA, 445 bp, Zea mays
  unsure (1)..(445): unsure at all n locations
cgaatgtggcggctgttacactcggtttgtcttgttccgcatgaacttttgttaccaactggtatctaacatataaccattatcacttcctangatggatatgaagcattggtttctagtatcccagaatctctagatcccataatctctagatataatgattaaccgattcatcatgtccctccggagcgatgctagatctactaattctaatttgcactcctcatagaaaaactatgtgtggaatatatgttctaaatgacccaaggaattaatagagctatgaggcaaggcatcataccatgcaaaagcagtaccaataagagacaatgaaaataagcaaacatgataagcttctctatcggctaattcccccaattgtgctaagaattgacctaatgttcatgaatgctcctactgcgctgactgctgactggacggtatg

SEQ ID NO: 47888 - DNA, 364 bp, Zea mays
  unsure (1)..(364): unsure at all n locations
cacatatctntactgnatgcatgacatatatataattttgtactaacaatatnngaatatgaggcttaattcgcattcggtgatgatatattctaaaagacattaatggctcaagattcactctaaagactctgttcaaaaatatacgccttatcttatgggatggacggagtatttacgtatatctcattcttttaaagctctgttaactgtctcttctcatattaactttggtcctcctcttttatgttaacttcagactttctctttctttctcctcattgctagagttccttataatcatactagtggtgtgcccgtgcggtgcaatgagaacttataatattattgatatcttatgtac

SEQ ID NO: 47889 - DNA, 296 bp, Zea mays
caaatctaatatgcctgatggcgtacccaagagccaacgggctagttgaaagagccaacgagatgatattggaagcactcataaagaaagtcttcgacaagaatgaaaagctcacaggaaagtggattatagagttgccatatgttgtctggagcctataaactcaacctagtcgagctttgcatggaaacactcctttctttatggtctatggttcggaggcagtgctacccgctgatctcatagttggggcaccgatattaatcttcaaaaacatagcagaagctgatgctact

SEQ ID NO: 47890 - DNA, 445 bp, Zea mays
  unsure (1)..(445): unsure at all n locations
gtcttagatcactctnttttgtgatctgaagattaagntatggatgtttaaagtctgaagactgaatctgtccaattctggacagcaaagccttctagtgtcttttgtccttagttaaatattgaatcaccttgagatgtttataaatgatatgtagacaatnttattacctttccagaaagtctangatcaatttgtttggatgtatgaacctgtagttgtgatattttgaagtcgcaagtctgaatctgtccaacctggacagacctgttatttttgcacagttcgactttgctaagagtctagtcatcttgagacgataataccanagttgtagagcgtttcccaagctttccaaaaagtatttgttcactatttttggataaatatttgaagagtatgactgaaacaagcactgctgtgcgttgcctaatttattatgttg

SEQ ID NO: 47891 - DNA, 404 bp, Zea mays
  unsure (1)..(404): unsure at all n locations
tggtgaccctacgccacgccatcaattgatctctcatganttgggagtcccttcgttcttttccaatctccaggtactgtaatatatcttgtcttgactttcgcaccatgtgaactgctgtcattacacacatctgttcttcttatcangctttggtggacgggatggctagccagctgatgttgcatggtgcttctgttccagaaagagctttgtctcttgcatgttggaatctggtgttacttcaacaacgtgtctctgacttggaagcgaccaatgctggttagtgcctttctgcttctctttgtctgcattattgaactgctttacatcctgatcctttttgtntgaatggctcctgctagatatgactcggcnaatatccactcttgaagaaaacattc

SEQ ID NO: 47892 - DNA, 453 bp, Zea mays
  unsure (1)..(453): unsure at all n locations
ntcggcatcaaactgtgntccattatccacagtaatggccttctacactccgaagcgacaaacgatattctgccagataaatatctgaatggtaaccgaagttattgtggctaaaggcttcgcctcaatccacttggaaaaatattctactactactacaacatatcttaaatgtccttgtgctggtggtagcggacctaacaaatcaaggccccacctttgcaatggtcaagtgggttgtattaactgagtcagagacgatagctgttttttatctcttgcgcatttctgacacccttcgcacttttggactatttccgctgcatccgaatctgccattggccaataaaatacttgacgaaaaacttttccaagcataggcctagatccaatgtgagatccacataggcctgcgtgtattgcttcataattctataccttcggctctgataa

SEQ ID NO: 47893 - DNA, 413 bp, Zea mays
agcttctcaccacgtcgtgcctagccgcaccatctcaccaattgccgccgtatctcctcaaccggtgatcaccggaggaagcgccacggtaaaagccacccatcccttgctcctgtgtccatgttccctccggccgccaccgcgcttaaccaaaattccctaccaccgcttggagatcctacaaattgaccgcgcccgtagttccgtatggtagttaagtatctcgacgtccagtattgcgccccgtggttcaccgacgagctctaattccacactttccccaattccgtccgccgcaccgtgaaacccagccctcccgtggccagccgattcgggtgagtcgccgttcaattcgcatgctggtttcgtgcctctgcatgccggtgatgctctcggtggcgtctgttcgctga

SEQ ID NO: 47894 - DNA, 315 bp, Zea mays
cattttgagaaagacagaatttgtagagcatgccaagcatgaaagcaagttggagtccatcatccacacaagaacataatgacgactgatatgtcgctcgagctacttcacatggacctattcgacccgatcgcttacatatacatcggcggttgtaattactgcctaagtatcgtggatgattattctcgcttcacttgggtggtcttttgttagaaaaaatcacaaacccaagagaccttaatagggattttaagatgggctcaaaatgagttcagattgagaatcaacaagattagaagtgacaatgggacg

SEQ ID NO: 47895 - DNA, 304 bp, Zea mays
ctcttttgcatattagcttactatgaagggatccttaagaatatattctacctatcagggtaagtaatcacctacatctagattcctttctattcttgtcagccgtttgagacaggggggtccctataccgacgagtgattgtgctgcgtgccccagcccatatgggtcgagcgcttgggcgatcgcaaatgtgggagaggccacgtggccggagccgagcgtgatagatgtgaaagttcggcggccttcgtgttcgtcccgcgcccaggtcgggtgcgcttgcagtatgggggttactagcgt

SEQ ID NO: 47896 - DNA, 361 bp, Zea mays
cggctacagcgcacgggaatcttttgtaatgctacatatagatgccctgctgggtcatcttggtagtgatcaatggagagtcatgatctcccggcagaaagggaatcatggcttgtgggtaaagtgcgcaacctctgcagagtgtttgaaaactgatatatcatccgtgctcgtggttattatcggccataggaactccattgtattatggtacttgaacacagatgttctgtatgcatgtggcaatgagaactgatggatcttggtattgacatctggtaatggtatatggtactccttccggttataaaggagatcgcttggggtaataacaggggtgtatactataacttggctttct

SEQ ID NO: 47897 - DNA, 439 bp, Zea mays
  unsure (1)..(439): unsure at all n locations
cttagtccctccgacatgatcttttcctcacgcggctaagcgttagaatgaggattatgctctcataccaattgaaagttgcctagagggggtgaataggcaagtggaaactttttcaacaataactagaaacgaactgggtaaaaccggtccaaccggtgtcaaaaccggttcagctgaattgcatgagctcaactaaagaatgagatataaactgaattgatctcaaaattcacccagttaactttggaaatgagatgttctagttgatccatagcgtttaaagtagtagatctaagaagggcacttctcaaaatccacacaccatanagatataaacaaatcttccacganatggtgagagaacgaagaacacgaacaaacacactgagcaagaacacaagaaacacaagaattatcccgatgctcggtcacacca

SEQ ID NO: 47898 - DNA, 426 bp, Zea mays
  unsure (1)..(426): unsure at all n locations
agctatcttctgacgccagctccaatatgcatatgcgctangggtttcggaggaatgtttggggatcaacctanaaaaatttattgcttattctgtggtgaagacaanggccatactacaagaatgtgtcatgtcaccattcagaaacaaaaggaaatagcagaggtcgcagctcatcagaaccagccgaagcaagtcatgcacactgcttcgtatcactcaccctacataccagagtatgtgggtaaccatcctgcagcttctgttgcttcggctagccagccacatgcatcttggccacaacctccaccttcgccaccactacaacctgcatatccacgatgtcagcagccataatggagccaacatacccaccaacaacgagatttcatggatgagtccgaagctcgcacagtcaacaatact

SEQ ID NO: 47899 - DNA, 391 bp, Zea mays
  unsure (1)..(391): unsure at all n locations
tgtctcaagatacctggccttcttctatggaggacctcgctgacgtagnagactggcctctgtatggtccgaacccctacggatgggcccgagtcctcaaggtccatggtggtcggaccaccaccttctcctatgggaacctcctgaatcccctgagggtgttgcaccatcctttcaacgaccagcaccatgctcaccgcctttgcagccaccgcaatgtacaagtacagcggctcccctggctccggagctaccagtatcggtagggacacaaagtgctgcttcaactcctataaagcatgtgctgcctcgtcggtccaagagaaaggtctagacttccgtaagagcttgaagaaaggcagcaccctctcatccagccgtgaaatgacat

SEQ ID NO: 47900 - DNA, 383 bp, Zea mays
  unsure (1)..(383): unsure at all n locations
gacaggatttgtagcgcatgccaagcatggaagcaagttggtgcccatcatccacataaaaacatcatgacgactgacaggccactggagctcctacacatggacctattcggcccgattgcttacataagcatcgacgggagtaagtactgtttagttattgtggatgattattctcgcttcacttgggtgttctttntgcaggaaaaatctcacacccaagaaacattaaagggattcttgagacgggctcaaaatgagttcggcttaatgatcaagaaaattagaagcgacaacgggacggagttcaagaactctcatattgaatgcttccttgaggatgagggcatcaagcatgagttctcttctcctacacccacaac

SEQ ID NO: 47901 - DNA, 444 bp, Zea mays
ctaaggctagtctatacctagtgtgataaccgccaactaagcgagtgtaaaagcttaactcgggtcaaacttgacaagtcttatttttaagcttttagcacttaaattcttactctttatgcaattgttggttcttgaaatatgcacgatgtactgcacttagggggagtattcaaaactcaaatcactcatgaaaacccctagtgcaaaccaaaatgcaaatttcaccatttgcctattttctctaaaaattatctagcctatggcaaaatattctgaaaagtatatgagggtgccaatacctgtcccaacaagtgttattttgtgtgatcataagttgggatttggtttggttgggaactaaatagaaaaactcacaatattcaaattttccctctgtctgggctcaccggacagtccggtgtgcaccggacactgcactgt

SEQ ID NO: 47902 - DNA, 201 bp, Zea mays
ccagagagtatgggcgattagcaagttagtcatttctttggggaaaactacttgttcttttgacatatttgtggacttgatgctggtctactccgcagcgggattaattcatgatgacagctagaatttctccatttgatcttatgctggtctagtattacgaggttccccacctacctcactttttattcctttcgcttg

SEQ ID NO: 47903 - DNA, 343 bp, Zea mays
  unsure (1)..(343): unsure at all n locations
cttaagtgccacatgtaccctataacactcaaaaccataatttggtccctaaaaccctaaatagtgccctatagggtgatttcaagttctatgcacttttagtcaaaagtgtatacatcaaagtgatagagtaacaaaagttaagcaactttcatgtntgaatatttccaagttttgtggtgaaacttggagtaaattgcaaaaatatccaagagcatcctcgttttaaactctgaaaacagtgttaacaagccaaattttaatcctctatatctcttgatctatgaggaatttgttatgagtcaccagaacacagttgtagagctactatagtagtacaagt

SEQ ID NO: 47904 - DNA, 445 bp, Zea mays
  unsure (1)..(445): unsure at all n locations
acacgctatcccacaacttcctcngttttttggtgtaaaaagaaagaacaaaattgttgacatgtgaggtctaccccaagagtaaattatgcaatttcaaccaaattgtttctacgtggatctggagtttctacatttggcaaacagttccacggtggatcatatgatctatcccaagagtaaattagacaattccaacaaaattgcccctgcatggatatgttacaattgccaaacagttccacggtgctcaaatccgctagtggagctgctccatagtgaatccagatctagattcacttttttggcagacctgtcccacagaaaccccaaatcttcacatccagatatactacaatctcaggtcaaatagtaattagaattataaggagcagctngatctgatctacacttctgagtaactgaatcggtccctgtataatct

SEQ ID NO: 47905 - DNA, 371 bp, Zea mays
  unsure (1)..(371): unsure at all n locations
atgcttgatagagtctactcaatacttattaactcaagctatcaatctgtgatgatctatatccaagattgacccaacgttatcttgaatcgatctatcttaaactcatatcatctcgaggaaagcgctgatgttgtaagaaataaagaatcatcctatgccagaagatcaaagcctacaatttggaggaaagtcacaggatggttacatttatgcatttaatagtgcaagcatattagaatatcatgtcttatgtgtcttgttagtcacatagaacacgggacgcacttataatgctcttantacaatgtcacccttcctagaagaaatctctcccatatgcgatagttgacatctctcatgtctataca

SEQ ID NO: 47906 - DNA, 332 bp, Zea mays
tttgacatggtcactaaccggcttctccaagatggttgatattcctctcgcaccagaaaatgcacagacagtcccgcgatcattcaaaatttctttaaaagctttggcctctccgcttatccattctataacaccttcggagtcgcctcatataaagttatcttcatttgaataggcacccacgttggcaaagctagactttatcttctccacgcagcccaaggatttttcgaagcatctttctttggacgtgcggaagtcttcgactgtttttcttaaaaattctacatatttactaatatctcggttggctctgtgaaaccacttttctt

SEQ ID NO: 47907 - DNA, 453 bp, Zea mays
  unsure (1)..(453): unsure at all n locations
gagaacacattntgggacttacaaatgttcattttgagaaagacagagtttgtagcgcatgccangcaagaaagcaagttggtgtccatcatccacacaagaatatcatgacgactgagagtccactcgagctcctacacatggacctattcagcccgatagcttacataagcatcggcgggagtaagtactgtctagttattgtggatgattattctcgcttcacttgggtaaatctcatacccaagaaactctgaaaggattcttgagacgggctcaaaatgagttatgcttgaggatcaagaagataagaagcgacaatgggacggagttcaagaactctcaaatngaaagcttccttgaggaggagggcatcaagcatgagttctcttcntcctacatgccacaacanaatggtgtagtggagaggaagaatataactctattggacat

SEQ ID NO: 47908 - DNA, 231 bp, Zea mays
cggagatcaagaacattccggttgtatgtgagtttccagatgtatttccggaagatttgcctggactgacccctgaaagagatgtataattcgtaattgagctaaagcccggtacggcttccatcttccgaagatcgtactgtatgccccctaatgaagtggcggaattgaaaattcaattacaagatctactgaataatggattcatccagccaagctcgtcttcatggg

SEQ ID NO: 47909 - DNA, 282 bp, Zea mays
ccggccagtccaaggaaacttcagactcgatgtacagtggttggcggttctcactctaaaatatgcttgaccttgctgggatcaaccgctatccccttcacagacaatacgttgcccagaaattggattgtctccagcccaaacgcgcacttgctgaacttaacatatagttgatgctcccttaagcgcgttaatatgatgcacaaatgccgagcatgctcctcttcattcttggaatatatgaagatatcatcaatgaagaccaccacaaatttattcatc

SEQ ID NO: 47910 - DNA, 381 bp, Zea mays
  unsure (1)..(381): unsure at all n locations
tctgactatgtattacgtcatgcttcnggtaaaaatctattctgttatagaaaaagagaagctcagttctatgcgcataaattgaaatatccaaaatgggcgctgatattcaacgacagcggagaagaagatttcttgtattgtctccctgacagcaaggagatttctgtctgtcgggagatgagcaagagcttcggattcccaacattataagacgggctctcggtgttgtcaaagaacgagttggccgatagcttagcgtacaatagtttaaaggtgaaaaaatgagatctttgtattatttcttgaaaccaaaattgttcatttgcttaaacttattaacacatttttttgcatggccttatacttatcaatgccctc

SEQ ID NO: 47911 - DNA, 376 bp, Zea mays
tatcttgtgagcaatacaagttcagaaaggattatgctggttcagctgaccatacgatacccatgctcttatgtgaagatatagcagaacagaatgtgctattgggatctcaattgtccgaagagcaagagaaaacactgataaagttttcgctaacaataaagatggttttgcttggtcagctaatgatctttgcggagttaacagggatgttattgagcactcgctcaatgttgatccatccttcagacccaggaaatatatgcttcagaagatgtctgatgacaacgccgaaagtgctcgaaatgaagtgaaaagactcctcagtgccggagttattagagaggtaaaatatccagaatggttggctaacact

SEQ ID NO: 47912 - DNA, 215 bp, Zea mays
  unsure (1)..(215): unsure at all n locations
caaatcaaccctctttcccaacgagcgtcacacatgccttatggcaagggagaagaangtatgtactcgcaactctacctatgcttcttcaagtgaggaagaatctagtgatgaggatgaagtagattattcatgtttgttcaagggcttagatagatctaagatagacaaaattaatgagttaattgatgccttgaatgaaaagaatatacttt

SEQ ID NO: 47913 - DNA, 362 bp, Zea mays
cttcttctgacaatggagggttcattggcagaagcccaagccaaagttgccagattgaacgatgaactccttcgaagatcaaaaaacttcgaacaataaaagaaaagttttggtgcaaggcttgaagccgaagtcgagaaaaactcaaatctgcaagaatccctaaaagagcttcataatgcttgcttaaacttcggcaatcgctgcgtgcaacgactacgacagggctttaactcagtgggagccagctctaaaaaatttgaaccttcggttgaagacttgccaagcaccttcaagcatattgaaagtgaagttgaggcgcttgatgaagttatagctgggcacgacgacttatgtgccct

SEQ ID NO: 47914 - DNA, 458 bp, Zea mays
  unsure (1)..(458): unsure at all n locations
tggtcattttattgctnactgtcccgacttttgttttgaccattaacacgggagcaagaaggaaaagatgaagcattacaagaaggccaagggcgaggcacatatcggaaaggagtgggattcggattgctcctcctctgactccgacaatgaatgactcgccgccactgccttcaacaagtcatccctcttccccaacgagcgtcacacatgccttatggcaagggagaagaatgtatgcaatcaaaacaatgtcacttatgattcttccagtgatgatgagtctagtgatgatgaaatagattactctagtttgttcaagggattggatagaactaaagtagataaaattaatgaatcgattgatgccctgaatgaaaaagatagactcttataataacaagaagaccttttgtatgaagagcatgacaaatttgtagaaacacataagtcttatg

SEQ ID NO: 47915 - DNA, 364 bp, Zea mays
  unsure (1)..(364): unsure at all n locations
gcttatgaagattcttcattccaacatgttctattcggcggtgccagagccaacccatgttagtcttagcaattaagcatgtgtcgagttcagctctatcaaaatctaccaagtatagctgaccctctaacacacccttatatgctattgaatcatcacttcttctaaagacagtaacacctacatcagtaaatagacagttgtagcccatctgacataattgggatacggaaagcaaattgtaatctaaagaatctacaagaaaaacattggaaatagtatggtcaggtgatatatgcaatttacccaatctcttgaccaaaccttgatttcatccncgaatgtgatagtcccgtggggatct

SEQ ID NO: 47916 - DNA, 242 bp, Zea mays
  unsure (1)..(242): unsure at all n locations
agcttcttctgtacaagtgccgcactcactgcatagtgcgaagctgtcacatacaatagcagaagagcacctaggcgtgggtggagatagcgtcgttaggtctattaagtactgcttcatctcttcgaaagctttctgctgagctgatccccattgaaagacttcngncgacttcagcacttcgaagaatgttaaatttctctctgctgatctagatatgaatcgattcaaagatgccagtc

SEQ ID NO: 47917 - DNA, 175 bp, Zea mays
  unsure (1)..(175): unsure at all n locations
catgctcactagtcactcattttttttcattattnctatctcacatggatcgacatcgacacgaacaattcctctcatggcatggctgcatctgggactcgtaccgcttatactatgatctgagtagcgcgtggaaccttgctgaccgcgcgtgcattgcatttgcctaagcact

SEQ ID NO: 47918 - DNA, 236 bp, Zea mays
gaagacgagggggtcacgaacaattttttttctgccgacacgagcagcaattacgtctttctctattacccttctaaaaacagaagacagttctgtcaggaacttagctataatgatgaagcgcatggagctttcttttccctaaccatacctcatcgaatgttggatctatgcacctattctcctcttccctcagattgtctacacccaatcttagaccaaattaacgtgcacaa

SEQ ID NO: 47919 - DNA, 452 bp, Zea mays
  unsure (1)..(452): unsure at all n locations
agctagccaagccctcggaccagaccggacttcttcggaagcccgagatcaacctcaccggacttctgtcttccgccgccgcgcgtggaccgagctatccagtgagtctccgcccgattcctttcactcatgtcttctctggcatcccgtggacctccctgacctatttaattgaactacctcgccgtgaccaggccggtctcctcgccgccgacgagcatccccgcctgcgcgcgtggaccgaccgactccggccatctccgacggcgttccgcacaccgttgtgatccccgcgacctccccttcgtcctcgaccacttcaccggaacagtctcgccgccggtaagcccctccgcccttttcttcgccgcggctactgtttgaggtagaagaaagacctcggattaagttctgtagaacccgaggggttntctgtaatgtcagcgactcat

SEQ ID NO: 47920 - DNA, 340 bp, Zea mays
cgggtctgtacccgcaagatatggcatattccttcaactcttctctcttaacttttgacaattcttgcccaagtatgtcctgaaaattgaagtcttcttcttttgagatatcttcggctttctctttttctttcccaggcgttgtggctagagtttcttcagcaactctagcagcttcttccgcgggctcattcagaagcatgttatcaatatcagcaagtgtggtttctaggattgtatcttccgcggcctcagcttcggcagtgtcagcttcactctcagcttcaatggcttcagcttcaatagcggcagtgctctccacagctggtgtctttgatgc

SEQ ID NO: 47921 - DNA, 475 bp, Zea mays
  unsure (1)..(475): unsure at all n locations
ctgcactactcctcctgagaagggccgntcatcatcgccaagaatttgaagcccggaacatacaagctggccaacgatcaaggcgaggtctacagcaacgcttggaacatccaacagctacgttgcttctacccttaagatgtttcaagtcgttcatatacatcgttctctttacatacataaataaagtctaaccgtcaaggaagggtcagccttgcctcggcaaagcccgaccctccctcaggggctagaaggggggaaccccctctgcgtcaaaattttcctcgtaaaaagtcttttgccagaacgtctttcgcgcttttcgactgcttcgatagcggggtcctaaaaacgacgggagtacacgtaagcggcaaggccgaccgagccgagggactcctacgcctncgggatacggatacctcactcatcaccttccgcgataagtaactcacgctcggataatcgatcctac

SEQ ID NO: 47922 - DNA, 276 bp, Zea mays
  unsure (1)..(276): unsure at all n locations
cccttaaaagctagtgaaccatcacttctgtctaaagacagacacacctacatttgttaatagacagttataccccatgttgataattgactaacagatagtaagttatatcccagagactcaactaaaaacacattatgaaatgagtgctcattngaaattggcaatttacctaacccttttaccttgccttgatgtccatcaccgaatacaattgagtcttgggaatccttatttttgacgtaggaggtgaacatcttcttcttcccgtcatat

SEQ ID NO: 47923 - DNA, 336 bp, Zea mays
agcttaccgcatttgaagcatgagcgctttccctcggctttggtcttgcttggctgtcccttgcgacctttaagcaccgccttgaatcttttgatgatgagagccatctcttcatcattaagtccggccgcctcatactgtgccaccttgctaggtagcgcctccttgcttcgtgttgctttgagagcaaggggttgcggctcgttgatcggaccattcaaagcgtcgtccacataccttgccttcttaatcatcattcgcccactaacgaatttcccaagaacttcttcgggcgacatcttggtgtcctggaatttcacgtatattgtcaccaaa

SEQ ID NO: 47924 - DNA, 432 bp, Zea mays
  unsure (1)..(432): unsure at all n locations
tctaaaggttaacacgtgataagtttgacttacgtgcatttcgaaaaagatagaccttgtgcagctggtcaagcatgtaaacaagtgggaggagcgcatcacggctagaatgtgatgaccacttcaagacctctggagctgctgcatatggacctcttcggacccgtcgcctatctgagcatatgagggagtaagtatggtttaagtattgttgatgactnttcccgcttcacttgggtgttctttttgcaggataagtctgaaacccaatggaccctcaagcgctttctcatgagagctcaaaatgagtttgagctcaaggtgaagaagataaggagcgacaacgggtccgaattcagaaccttcaagtggaggaatttcttgaggatgaanggatcaaacacgagttcttcgctccctacacaccacagc

SEQ ID NO: 47925 - DNA, 405 bp, Zea mays
gcattatgaaatgtctcaagacgtatggtgaaacagacttaaagatgaaatgactggttagtccatgagggtctatgtcacaattgtaatcttttgtaaagggcatgattgtaatatttcataggttgcgccctgtgcctataaatagatgaatagtacccctgtactgttcacgctggcttgttatcctgcttttgcgtcacgcttgtactttttccttctttcgagccgaaagtacatttgtaatctgatatcatttctatttttctatagtaataaaatagaaatgagttgatatataattggttatattatcttttacattttatatgattctttcttcattattatatgctgcatcgatgaaggtatgtccttcataaccttcgtccgaagatcattata

SEQ ID NO: 47926 - DNA, 234 bp, Zea mays
  unsure (1)..(234): unsure at all n locations
tcatattgcattggggtctggtctctccgaagatcaattctaacggactctggaccagcttctccttgtcatcgtcaattntgacgtagaaccattctgatttacagcctgccggccacttgcttcggtagctgatcacaggaaattttgtagtctttcggtaagcaaaattgtaacaaccaaaattttcatgtaatccattctttctggcctctggtttgaatgtaactcgtg

SEQ ID NO: 47927 - DNA, 357 bp, Zea mays
  unsure (1)..(357): unsure at all n locations
acatattctgagactaacaaatgttcattttgagaaatacaggatgtgtagcgcatgccaagcaggaaagcattntggttcccatcatccacacaaaaacatcatgactagtgacaggccactggagctcctacacatggacctattcggcccgatcgcttacataagcatcggggggagtaagtactgtctagttattgtggatgataattctcgcttcacttgggtagtctttttgcaggaaaaatcttatacccaagaaaccttaaagggatccttgagacgggctcaaaatgagttcggctcgaggatcaataaaattagacgcgacaacgggacggagtcaagaactctaaa

SEQ ID NO: 47928 - DNA, 463 bp, Zea mays
tactaagcttgatacttttgtaggagatatgcacttatacttttcatgtcaaaatatcgcttgaagtgtcaaatgaatgcgatcattatatgtaggtgatattaggagtaagtcatctaaaaattgtactttggcacatattagataatcaaaagataccaattgagaacacatcaaatgataaacaattttaaaatatgtaggtctactccaatggtaaagagtgaaactgagcaatcatattcctaccatatgatattcctagtgtatgcaagacaagaatttaaatatgcatatgcaaagctaggtatagaaggaactagatatcatttctaaagaatgtaaaagctagtatcgaatgtaaaatctggttgcctaatatgggtggggaatatgggtatgtagtacttactgactcactctggcataactttgatcaatatgatgcaccccatgatatgca

SEQ ID NO: 47929 - DNA, 416 bp, Zea mays
  unsure (1)..(416): unsure at all n locations
atattggactgagcctttcctcggatatgctncgagtaacataacttatatatatttgctagtaaatctgaagatcctgatgtgtatacagatactattatggaatcacgtgatgctactttctttgaacacatatttccaatgaaaggcattcatagaagatactcttctgagataactcctaagtataatacagatgttgagagttctgaacagccacatgagagagtatgtcaatgatgcttctaaaaaggagcaagagacaaaggactgaaaaacctttggtgatgattccattgtgtacctcgaggacgatactcatgctaccatggctggagcattngcatctccagatgcagatgattggaatgaagtggcttagaatgagatggactgagttctttggaatagtaccg

SEQ ID NO: 47930 - DNA, 334 bp, Zea mays
ccagcccatgcaagtcttatccattgatcatgcatctacaccggcctgttctcttgcgaaatcaaacaaatataggtcgctgtctattacacccttaaaagctagtgaaccatcacatcttttaaagacagacacatcaattatttgaaatagacaagtatatcccattttgcataattgactaacagactatagattatatccaagcgactcaacttaaaacacattggaaatagagagctcagatgaaatagtaattttacctaacccttttaccttgccttggtgccatcacacgatattattgaatcatgggaatcctcatttctgacgt

SEQ ID NO: 47931 - DNA, 370 bp, Zea mays
  unsure (1)..(370): unsure at all n locations
tatcttctaaagggagaacacgtgatatggttgactaacgtgcaattcgaataagatagaccttgtgcagctcgtcaagcaggtaaacaagtacgaggagcgcatcacagcaagaatgtgatgaccacttcaagacccctggagctgctgcatatggacctcttcagacccgtcgcctatctgagcatatgagggagtaagtatgcgctagttattgttgatgactattcccgcttcacttgggtgttctttntgcaggataagtctgaaacccaagggaccctcaagcgccttctcaagagagctcataatgagtttgagctcaaggtgaagaagataaggagcgacaacgggtccgagctcaagaacc

SEQ ID NO: 47932 - DNA, 415 bp, Zea mays
ctatagccatggtaagtagcatatgctaataatatgcgaattgtactcaacctatctacgggtgcataggtttcaccgaaatccaaaccttcgacatgggagtatcctttggccacaagtcgagctttgttccttgtcaccacaccatgctcatcttgctcgtcgcggaagacccatttggttcctacaacattttgattatgacgtggaaccaagtgccatacctcgttccttgtgaaattgttgagctcctcttgcatcgtcaccacccaatccgaatcttgtagtgcttcctctaccctgtgtggctcaatagaggaaacacacgagtaatgctcacaaaatgtgcaacacgagaactattagttacccccttatgaatgtcgccgaggatagtgtcgacggggtgatctcg

SEQ ID NO: 47933 - DNA, 383 bp, Zea mays
  unsure (1)..(383): unsure at all n locations
atgggatgcttttgagtcagaccaattaccttcggcccttcttgcagcttcctgacttccatggatagcgatgggtccctgatccgaaggtatcttcatgcatagatatgcaggatgaatgattgcttncaaggcattgagagtaccacgaccaataattgcattgtaagggtattccatgtcgacaatgtcaaacacaacttgctcagttctagtgttgttgatgaacccgaaggtcactgacatggtgatctcgcccaatgctacaatctgtcttccttcgaagccacagagaggatgtgtagcatcatgaatcttatcttctggctcttgcacttgtctgaagggcctaacaaatatgatgtcagctgcactggctgtgt

SEQ ID NO: 47934 - DNA, 382 bp, Zea mays
tacggacacttaaaactaagctgtaatgttaatcttcacctcaaatgaattatttgaatgttcattgcaaaggtatggaacaaattgcttcaattggtagttgatcaatagtaagtccttccaagtggcattctttcaattggtaataatatattctatggaaaggaatgtcaatatgaaggttaaattccttttggcttatatttgtaaattaatgcatattgtgaattcactgctccatgtgcattaacttaaaatgaatttaatttatgcctttacgcctcataaatgatgaattgtttgccattcatatatagatatcatcattcattaaataccttcttgtactactaatacctcttttaaagtgttttatcgacta

SEQ ID NO: 47935 - DNA, 363 bp, Zea mays
cacataatgaatatagataatatatgacaaatataactcaacaatgctttactagtattctgtgtctgatagcttctttactacttttgcgtgcatgcatcaacacattagaataattatggtattatgtatgacgagtttatataaatttaaataccaaaaaccatattgccattgacgagcttcagaaacttataaatcaatctttaaatgtcatagatcaacatattacattactgaacaaacaccgacttgaagaacacaataatttggctgtcacataagataatgctggtagtaaaacatggtcaagaaaagacggaccgatgaattgaactgtttctcttcttccgacatcggcca

SEQ ID NO: 47936 - DNA, 446 bp, Zea mays
  unsure (1)..(446): unsure at all n locations
tagctntataaattactcataaaagactttcttctgaagtcgcanagagaatgacattcgaagagcagttaactagagaaactcagatcatggaaggagcaacacaccatctcaccttcatggcacccctccaaaggactctacctaaatctcaggacgagattcctttaaagggggagggttgtaacacctcatgtgttacttataggtttcacttaagactacacaagtaagcccatcatcacatgtgacttaacttgagtaaaggaattcaaacttggaaatcaagatcctaaataagtgcaacctatcttatatgtcatgccttggcttaccatgcacatagaaggagagaaattgcccaaaaccctaatgcacactctgtggacaattggagtactataagtaagtatgacccanaaagctttgaataaccacttatcatg

SEQ ID NO: 47937 - DNA, 308 bp, Zea mays
acccgccaccgcgcgtataccgagccaccatgtgaaccattcttcgattccttgcacccactacctccttgacctgacgtgaagctccccaactcactggatcgtgctatgtcaccgtggttatgctggagtcctcgacgccgacaaactcccccgcctgcgcatgtggacccgtcaactccggtcacctccgacgactattcgcacatcgacgtgaccgtcgtcacctacccgacctccctggacacctcaccggagctatctcgcccgcgataatcccctccgccctcttctccgacgtgggcact

SEQ ID NO: 47938 - DNA, 425 bp, Zea mays
  unsure (1)..(425): unsure at all n locations
atcctcttagtcacctgcngcatgcaagcttcgacgaccaagcgatcaaactcttcgtgtctactatgctaaagatcctaagcatctgtttgatgaaggcaagtgtcctctgacctatttatgttctattcacatgataactcatttccccgcattacataattaaaacctaaggattgactagctttctatttaccttatccttgattaccttttgagttattgtggttagcttcatgttattgctntactttaatcaatgaacatgatgagaatatttatgatacgccgatgatatcttgattatgatgatgagcttgtgttattttatgggacttgggctgtttcccgagtacctctctgtaagaacctgttcgctggatgaccacccgggaaaacagtacaaccatgagggtggtattgga

SEQ ID NO: 47939 - DNA, 400 bp, Zea mays
  unsure (1)..(400): unsure at all n locations
ggatccttaagtcacctgcggcatgcaatgctggtgccgatggagaaacataaatccttgtattcttggctgtcaaactgcttgccgttgtcaactgttagctcggacggtactccgaagcggcagacaatgttctgccagaagaatctttgggcagtctttgatgtgattgtggaaacagccctcgcttcaatccatttggtgaagtattcgacggctacgaaggcgaacttaatggttccctgagcggtgggcaggggcccgacaatgtccangccccagcgctggagaggccatgtatgggcaatcagctttgtatattgggaggggttgcctgaccgangagagaacttctggcatgcttgcacgatctcgtgactctatttgctgcgcagatcat

SEQ ID NO: 47940 - DNA, 335 bp, Zea mays
  unsure (1)..(335): unsure at all n locations
actgtctagctnntggggtcctcgcccggagacaatcatcagcgaaactattcatcaggatacctgcaagatcataagcgctggtgaaactattcatcatgtcagcctgcatagtgatttaacatatatatttcatgcgttcaagccctctggtactcctgcggtttcactggtcggtcatctcttggacagcttaattcgattgttataaatatctgactcgcaggcgtagagtataaatatcaatacccncctctttttttttctcgctcactcgcatttgagcaatcgctgagctctcagtgttcatattactgtaccgcactgtggtgatg

SEQ ID NO: 47941 - DNA, 437 bp, Zea mays
  unsure (1)..(437): unsure at all n locations
tgcaagcttctcatgtggggacttaatgggatttctgtatttcagaattctgaaattcagaccttgagccaaagatcagggatgttcaccttgatccctaactcgaatcctaatggccncattgacaaaattgtgtctaactaacccctatgtcgtgtgccagaagatggcattgggacgcgagctctanacacgacanaaccttggatttgcctcgggtttgggcagggagacagaccagatttcctggctccatatctctgcaaccagtaggcaaaatcctatgacccccacacaagaatggtagcttgtagggaggagaagaggttntgtgcactgaccaaggcgagagcatgctcggatgagcgaccacacgcgccagaacttgngcagaacgcacgggcacacgtgttcgacccttgtcggcatgccagagc

SEQ ID NO: 47942 - DNA, 501 bp, Zea mays
  unsure (1)..(501): unsure at all n locations
gcttctctttttgccgaacaacgaagagatcgaaataatgctntatataacaatttggtatataatatgaggagaaatgtttgccttgctggcaacaccacaaataattaattattggtataagttctctctcaaaattattatacctaanaatgttgcattaaccgatacccaatttcagaacggtatgagtaattgggtaaaccatgggcaataataaaatgagctggactatacatctctgcatataaaaatctttgcttggcagcattggcctgatgtcgtgcactttactaccaatataagcacacacactnttcttatgtgcctcanagcacaatacaaccagtgaatgtccttgtgagcgctagaccctgatggtcattttacttgntgatctgaagtcaactaatggcttcaaacgacgaatgatatgcatgaagtccttgaggatccttatgaataaaataatggtgtgcatattagtctaaatcttaatga

SEQ ID NO: 47943 - DNA, 462 bp, Zea mays
  unsure (1)..(462): unsure at all n locations
agcttattattactgttagatgccaacatttattactcttangacttatcttacccatagctaagagttgtagtacaaagtggcccatttacacaactgttgttattnttgtctaaagcatagccttttgattcttgaacctcaaattcctagaacaagctattntgattaatgacaagccactgtaatttttacagaatttttggaaaaaaataaaccactattgtagttcaaacccaaactagaattcataattaaaaaaatgaaaaaggggaaattgataatagaaacttgtgtcaccctagcccaactagcanaaccctttttaaattgcccactgaaacatgtaagaagaaaaatacaaatccactatacttatccttaccanaacctanacctagaatgataagtataaactactaagagccacgtataaccaggagaacctaagttactaactaa

SEQ ID NO: 47944 - DNA, 425 bp, Zea mays
  unsure (1)..(425): unsure at all n locations
catcatcatcatcatccgagctatcatccgagtcccattctactaagtaggctctgccatctttcttcttggtatagnatttctttttcttcttgtcactttcatctttgcccttcttcttcttgcttggacaattcatggcaatgtgaccgggttccccacactcaaaacattttctatcattgaaagcatttcttctagatgtttgacctcttctaggttgacctctnttcatcttcatgaatntattgaatttccttacaaataaagccatgtcaccatcactctcactttcattttcttcatcattgctatcttccttttcaattgcctttgaggccttgctttgagagcaatagattcatttttcaccttctttgccaaacttaaagcatcggtttgtgacttcttaaatatatcttgag

SEQ ID NO: 47945 - DNA, 425 bp, Zea mays
  unsure (1)..(425): unsure at all n locations
ctgcagcatgcaagcttcgantgccaaagatctcatctaatcttatctctgaacgtgttaccgctctcgaagcgctctatatcgtcgctagagctgtctgtctgtgggctcatatagagtaatgcatagagagagaggcacactcataatcagatcatgacgcacgaacaatgctgctaagcgacgagctaaggtctgtccataccggactggataggaggaatacgcgatacgcgcgatccatggcgcgctccacactcggngtgaatacaaccttaagctctactaccgtctgggtcggtgggtgtctccggtctccctctccttaaacgcaagcatggtgggcttggcactcgtgacgtcagctaagacgcccttggcggtggcggctggcaacggagcacgacggtggatctgatgctcat

SEQ ID NO: 47946 - DNA, 395 bp, Zea mays
  unsure (1)..(395): unsure at all n locations
acttnctacatgcgtttaatgtctttcttttcggttgttgatgcccaagggggagaaaattatgggccatagcaatgaatactatatcaaacaccaaacaccaccaatttaaaattttatatctacaaatgactcttcaagtggttttggttatttggtccacaaatatgaagtaagtgaattatggagttagggcgaggcataagtccataatgtcacattggggggacaatcatgcatcctagcaagtagattgcacttcttacatcaaatacatgtattatttgcttgccttggttgtgtgccatcaatcaccaaaaaggtggagatcgtaaggaaaatggnaccccggcctcttggcctaatgaagtttggtggttgatgaacaacacaat

SEQ ID NO: 47947 - DNA, 484 bp, Zea mays
  unsure (1)..(484): unsure at all n locations
agcttgacgacatttggagttctcatagatagatggtaattcctcaacccatcacccctcatatagatgaagttgattgggcatctaaagtttaagtcccttaagaatgagttcattggcttgctcaacttgaccattgctttaaagatgtgctactgaggcaaagtacacaataatttctctgttaacgcaatagtctataaatggctaagaggtgaactgactcccattgtttgtgataagtgtccttggcattgccgaaccaattgaatatctcttgaatgaatttgattatctttgttgtcatgaatttgttaccaacttagcttcaatccattttgtgaaattatctattgctatgaagatatatgcacactctccattanatggcttgaatgtcccacaataatcatgcaccatgtggaacacagccatgtgatgggaatagtatgtaattgagccaccgagatgtgagcttgatgtg

SEQ ID NO: 47948 - DNA, 475 bp, Zea mays
tgaagccatggtaagtagcataggcaagttatatacgaatttgtctctgcctagctacgggggcataggtttcaccgaaatccaaaccatcgacttgtgaatatcccttggccacaagtcgggctttgttccttgtcaccacaccatgctcgtcttgcttgttgcggaagacccacttggttcctacaacattttgcttatgacgtggaactaaatgccatacctcgttcctagtgaagttgttgagctcctcttgcatcgccaccacccaatccaaatcttgtagtgcttcctctaccctatgtggctcaatagaggaaacaaaagagtaatgctcacaaaaatgtgcaacacgagatctagtagttatccccttatgaatgtcgccgaggatggtgtcgaccgggtgatctcgttgaattgcttggtggactctcgggtgtggcgggcttgagtcttcatcccctcttgcttg

SEQ ID NO: 47949 - DNA, 304 bp, Zea mays
  unsure (1)..(304): unsure at all n locations
agcttgaacgcgccggcctcggcctcgtagatagagtngctcaccaccatctccgccagctcatcgntcagcttgttggtccgggtcaccagctcgaagatgatgtgctgcccctcgggctcgccggcgttgttccacgacagctgcgacgagtgcagcggcggcatccccggggcgagctggaacgtctcctgacggactggcagccctgcagaaaggcacgggcacgtcagaaactcagaataatggactggacactggagcacactanaaactctgtttgttcgggtattcctaatccact

SEQ ID NO: 47950 - DNA, 374 bp, Zea mays
  unsure (1)..(374): unsure at all n locations
ctaagcttctaagggagaacacattntatgattaacaaatgttcatttttataaagacagggattgtagcgcatgccaagcaggaaagcaagttggcactcatcatccacacaagaacatcatgacgaccgataggccactggagctcctacacatggatctattcggcccgattgcttacataagcatcggtgggagtaagtactgtctagttattgtggatgattattctcgcttcacttgggtgttctttttgcaggaaaaatctcatacccaagagaccttaaaaggattcttgagacgggctcaaaatgagttcggcttaaggatcaagaaaattagaagcgacaacgggacggagttcaagaactcac

SEQ ID NO: 47951 - DNA, 371 bp, Zea mays
  unsure (1)..(371): unsure at all n locations
agcttctaaagggagatcatgtgttaggacttttcgatgtctngtttgagaaagacagaccttgtgcagcatgtcaggcanggaaacaggtgggaagtactcatcatagcaaaaatgtgatgacgacgtcaagaccactggaacttcttcacatggatctcttcggtcctgttgcctatctcagcatagaaggaagtaagtatcgtcttgtaatagttgatgatttttcccgcttcacttgggtattttttttgcaggacaaaccagaaacccaagggaccctaaagcgtttcttaaggagagctcanaatgagtttgagctaaaggcgaagaagataagaagcgacaatgggtccgagttcaagaatcta

SEQ ID NO: 47952 - DNA, 252 bp, Zea mays
  unsure (1)..(252): unsure at all n locations
atatcttctcgtactggcagaacattcttcacataaaaccattctgtcatccagtcgtcgggccatctcttccgaaagggtggcacggngcagcttgacccggaccgagaaacgaaactgtagcagccaaaattattgtgatactgttccttaccccaagggtntgtttcgtatgataattcgtgtatattgcagaaagcttttgcatcaggcttcagaccttggcttctcacggcccacatgaagatattc

SEQ ID NO: 47953 - DNA, 480 bp, Zea mays
  unsure (1)..(480): unsure at all n locations
tcttatcacctgcggcatgcaagcttggggtagtggtatgctatgtaatgtaatggctcgatgtaatgaattttataactagttaaaaaaaatggcatgtgcataatagtgactctcttcccatggcagatggcttcggatagaaccacgcctaccgcctccgggattggagcaagacttcccctangagctgagggagaggctggcggagaagggggtgagacccacctccccgcacctccagaactaccactagacctagcccaaattctggccaatcaaaccagactcattgaagtcctcactcgaagtctggagaaccagcgcccaggcggtggaaggccccaggacaggatgggagaattcctgagactgaagccgcccacgttcgcggggtccagcaatcccctcgatgcagatgactggcttcgcacgatcaagaggaagttggaagccatcgcttgccctgagaatcaacgt

SEQ ID NO: 47954 - DNA, 465 bp, Zea mays
  unsure (1)..(465): unsure at all n locations
gagtacagtgtgctgcctggcacaatcgtactggtcgtcatcattttctcaggcgcgccgcctgctggatgaccttgacaccgcctgccagtggatgggacgggacatattaaatgctgagaggacacgtcgcccgtcagcgcagtggcaggcggcgtgtcttctcctcaataaatgtacgggctacacgacttcacgttatggttcgacccggtagcttatgtcatgggccacaagcaacgggtctccgcctgagcgggaagcggagggcaaggcttatacacgtgtcagcaccggacccctgctcataccanggtccttctttgctccggaccctactgaggttcggatctacccngggagctccgactcatatgtatggggggtctggtgtgcttctgtggggggtcagacttaccgcgatgtatctgtctttcttacacgtggcgccctttggcttgccat

SEQ ID NO: 47955 - DNA, 420 bp, Zea mays
  unsure (1)..(420): unsure at all n locations
agcttgngggattaataatacgtatgacatatgtttatctctgttctaaattttacgtcacaataaaataaattgaactatgtttaagtacttataagcaacaattaggggaaataacaatctattttcaaataaagtaaatgtatgttatagcttatgttatacttngaattcattatcccttatgtagtattgtgtccttttaagatgtgttccaatgtttgtacataattggcgtgatgttctcttgtactttccaaatgtattgaatgcatgctcgctttatttagacaacgagcagtctgaggtttctgagtgtgttgctggagacctccctgagcaacaacctcgtgaaggcaagtgtcctctgacctattatgtcatacatactttatgattcactgccccgcattactttat

SEQ ID NO: 47956 - DNA, 338 bp, Zea mays
  unsure (1)..(338): unsure at all n locations
cattacgnaatgaggactctagggagaagccttctattgagaccctgtccattcacctcggatgtgaatacgggtctagctaatccgggctataagcgaattgtgactcatgggtaaagatgcgccacctctggagagtgtaatactgatatatcattcgcgctcacggttatgagcagcccggactcctcacatgataattgaacttgaagatggaaaataattgagatccgatgatctgccaatgggttgcttaatgggttcacttaagtggtgttgatatactctatacctttgttaatggaatacttgggatcacacttatagttaacatgtgt

SEQ ID NO: 47957 - DNA, 487 bp, Zea mays
  unsure (1)..(487): unsure at all n locations
agctntaagctctntgacaatagaatcactttatctatttntagcaaagatgcaatcatgcatgagtgaaatnttaagaggttaaactaggtatgaagcagggataaatgcaaagaacatgctttctcttccttatatataaaatatgcaaagaatgcttaaaagaggaagttttaggtacaagtttaagtgaaaggaagtgattttacccttttgtaccttctcatagagacgctctcttcattgtgctttgtccttagtcttagctgcttaagacctatactcaatgacaatatatggaaatactttgcacaagagagagttctacaactagtgatctttctcaagttattgctagcatatatcacatggatcacaagttgcataaatgaatcatgaattcttcttnttccttagtgcatatcaagatagatgatattaaaattacatgacgcactaagaagcataagtgatacttgaagttgtc

SEQ ID NO: 47958 - DNA, 154 bp, Zea mays
acaaaaagaatcctctcacaagtcctaatacgctagagttgaatttggaactttgagcggatcgatcacttgaattgtgtctttggagtgaagtgtatcgctcttgtattgaatgaactgctgtgaatgcttggatggttggagtggtggtggt

SEQ ID NO: 47959 - DNA, 356 bp, Zea mays
gagttcagggcggtagctgcccacattagcactagggacttagtgcatgaatatctggcaaacaaaactttctcaacctctagtggctaggggatgccgaagaacaaggaggggaaaatatgaacttgttcgactctccttccgtttcaaatttgaaaagcaattcaaaaaaccatgctctaaatggttaaaatgatagaagtcatgtgcaatgaaatccttataaattataccaagaaagaagatcaattaatgactgctgtcttcggaaaccggccgaaatgaaggttgaatcgagtaatggatgccctacattttgaatacccagattatgacacgctcgacgaagagtccgg

SEQ ID NO: 47960 - DNA, 397 bp, Zea mays
  unsure (1)..(397): unsure at all n locations
agacngccatgaatagcaatgggcccttggtccgaaagtatcttcatgcaaagataagctggatgaagaatngcttcgaacgcattgagagtaccacgaccaatgactgcattgtaagggtattccatgtcaacaatatcaaacacaacttgttcagcccttgtgttgttgataaatccgaatgtcactggcattgtgatcttgccgagtgctacaatctgccttcctccgaagccgcaaaggggatgtgtggcatcatgaatcttgtcttcaggctcttgcatctgtctgaaggccttagcatatatgatatcagctgcgctgcctatatcaaccaaaacattatggaccatagatccttcgatcacacaagagataaccatagcatcgctgtgtg

SEQ ID NO: 47961 - DNA, 399 bp, Zea mays
  unsure (1)..(399): unsure at all n locations
agctngagaaaggacatactgcagcaagtgtttttctcataagaataatgttcctaaagatgaagaaatcaacatgagcttggaaaaaggtaaagattcaattaatcatgttgtttgcactgaccttttctctatgtcatccaagaacaaaaagagaaaagggaaaaggaggtgctttaagtgcaacaagtgaggacacctcattgcgtcatgtccatacaccaacaagggtgaagggataaggagatgcttcggatgcaatgacaagaaccacacgatcacttcttgtcctctattgacggatcaagcatgtgcagtctccaagatgactctcaccaaggaaaatgacaaacagcaagcatcatgtcacgttgagcgacgcttctgctacaagtgtgg

SEQ ID NO: 47962 - DNA, 293 bp, Zea mays
ctttatactagccatctggggctgcgcattggctgtggagatcttttactgtcgccgcgatggcgggggcgcatcaatggtcgagtgcagttataatgcgcggggcggagaccgagattcagatccctcaagacgcataaaggttgcgctggatggttatatggatattatggaatcttccttctccttaaggaaaaggaaacgtctactccaattgacgatctccccgacaaaaataaccaggcgccgttggttctgggtgattactgaaaaaaggctgatgccaaccgggc

SEQ ID NO: 47963 - DNA, 496 bp, Zea mays
gcagctcagctggacctgacaagtacattttcttatgtgaacccattattgccttgatggatccatcatcaagttctattttcgaaaacatcccacccactttgccacatcatcttttgtgaaaacaaaacattctgtttttctaaagcaaggctaagcatcaaaaatcttttgtaaaacggtgatcaaggaaggtaatgcacgaattagtttagcaatcaactcctatcacctaatgcatcaagcaagtgaaaaagaattttaaaacacaaggaggtggcaaatgcaccggggcttgccttcgtttattggtgagtcaggctcgcatccgcagatgtcaaagtagaaacaattttctgcctgatgttccaaaggtggtggtggtgaagtcttctcttcttctacctcaacttcttcgttttctaaatataaccatatatataagaatgaatgccatgtaatgctcatgagagtgcacagatataagagttattat

SEQ ID NO: 47964 - DNA, 331 bp, Zea mays
  unsure (1)..(331): unsure at all n locations
atggttacatgattcacgtcttctacattgtccctatattctggtatcgaatctgatcactgatttattcatgtacttattgtcatggaattgctttcatgttgagacatgtagacatgtacttttgtcatgttgagaatgttgcttgttgaacgacatgtctatttaaatttttattcaattctaagttgtgtatgatgttgaattgggacgaaaattgactaattatgttattcaatggctgcanatggnttatcatatccgatggatatccgatggatatctgaaacccatgggcatggatatggatatgaatttctacccgtgatat

SEQ ID NO: 47965 - DNA, 477 bp, Zea mays
  unsure (1)..(477): unsure at all n locations
agctntaagcctttagagagtggagataatttgttttagctagagcatggtcttgagcatatcgttactctgccgaagtgctgccaagaagaatgtaagcagccgcggtttctttgtaaccaactcaacatagtggaaggctctatctgtctgactgacagatctgagcaaacggaggaaggagttgaaatagactctaagcccagtgtggctaacttcaacgaggactatgcaagcatttcaggtttggccaaacctcgggataaattcctgtgtccacgtgctctgctctgtgatgtgtgctgattctgtcttattcatttcttacatctgcacttcactgcttacttgtggtactagctttctttgaagtgcangataatctatgccacaccccggttttgagggtaaaccgaatgcgaaccatgtacgtgccangatcagaaattcacgtacatagtcgatacatagatgact

SEQ ID NO: 47966 - DNA, 263 bp, Zea mays
gcttgtcaagcacgttaacaagtgggaagtgctcatcacatcaagaacgtgatgactatgtcgagacccttggagctgctgcatatggacctcttctgacccgtcgcttacctaagcataggggtaagtaagtatgggttagtaaatgttgatgaattttcccgcttcacttgggtattctctttgcaggataaatctgaaacccaagggaccctcaagcgcttcctaaagagagctcaaaatgagtttgagctcaaggtgaa

SEQ ID NO: 47967 - DNA, 443 bp, Zea mays
  unsure (1)..(443): unsure at all n locations
agcttcatcattgtctattaagcttcggatctatgttaagctncttctttgtgctcttcagcttcatcatcccgctcttcagcttcgtcatcctatacatattaaagtgttgtaaggaaaactcaagtttaaaggaaaaggtaagcacaaggtatgatttcgttaccggcttaagatgactccgagcttcgtcaccagctgagcttcgtccacccttcgtccatactagctttataaatctgtctcctatgcttcagacaagactaggaatatcaatcagatctgctggcgataagctaaagttgggtctattgacaatctttccatgtgtgcaactagatttcaggaaggcaacaattgtgctccgagaagcttaccaggcacagaaatcaccattgtcggctataatttcatcaagggcatcaacttcactctcgatatgt

SEQ ID NO: 47968 - DNA, 450 bp, Zea mays
  unsure (1)..(450): unsure at all n locations
actaagctatgctttcataaatagcatatgggtgctttgatttccgtatgcagtatctcatgngngccacctttacgatgcatgcgggtttttggtcgcagntatttactaagtaagacaccttgcggtgaccattaaagaagaaccaatcaccctgggtaggtcaatttttatctgcaagaactgatgaggccgcttggtatgagtaaatcgcttttcctgggaacgatagttggttagcgccgctactgtatgtatattgagataccttaacgattggtcttttggctgccatttggttacatgtatttgtatttggaggcataagtatcgagtaatttgtgttatgactagtgtattgactattgaattatgagaagagctgctttagtngtaagatcacatgacacatccaagaagttccacaaaaatgttcgtagaactaatgag

SEQ ID NO: 47969 - DNA, 478 bp, Zea mays
agcttggagatggatctgattctaatcgcatcttggagcgaagacgaacagacacaagcaagcaaacacatatatgcataagaacattacaccatacaaatacaaacataataaaatatgcaaaacgaaatagagcgcgttaaaacagtcacgcgaggaaaaagaagtgtcgaactcgaagcgtcgatctggaagatatcgcgtttacgctaaataaatattaagtaaaacatttaattcgatattacaaaatataaattataactgctatttagttctaattaaatccgttacgctaacagctgtcaaataaataagtaatttaattaacacaagagattctaagcgatgcgaattgacgatgcacgaaacagcacgacagcgtgcgaacgacgcgcggacacgcgcgacatcgcacgctgatgacacacgaaacagcgcgcgcgacgagcgcgaacgagcacgccatcacgtgcgg

SEQ ID NO: 47970 - DNA, 437 bp, Zea mays
  unsure (1)..(437): unsure at all n locations
tctaaagggagaacacgtgatatgtntaactatcttgcaattctataaagatagaccttgtgcagcatgtcaagcaggtaaacaggtgggaggagcacatcacagcaagaatgtgatgaccacatcaaggcccctggagctactacatatggaccttttcggacccgtcgcctatctaagcatatgaggaagtaagtatggtttagttattggtgatgacttttcccgcttcacttgngtgttctttttgcaggataagtctgaaacccaagggaccctcaagcgcttcctcaagagagctcanaatgagtttgagctcaaggtgaagaagataaagagcgacaacgggtccgaggtcaagaaccttcaagtggaggaagttcttgaggaggaanggatcaagcacgagttctccgcttcctacacaccacaacaaa

SEQ ID NO: 47971 - DNA, 341 bp, Zea mays
  unsure (1)..(341): unsure at all n locations
gtcacctgcggcatgcaagcttctaaagggagaacacgtgataggtttgtctaacgtgcaattcgaanaagatagaccttgtgcagcttgtcaagtaggtaaacaagtggaaggagcgcatcacagcaagaatgtgatgaccacatcaagacccctggagctgctacatatggacctcttcggactcgtcgcctatctaagcatangaggaagtaagtatggtctagttattgttgatgacttttcccgcttcacttgggtattcttttttgcaggataagtctgaaacccaagggaccctcaagcgcttcctaaggagagctcannaatgagttgagctc

SEQ ID NO: 47972 - DNA, 369 bp, Zea mays
  unsure (1)..(369): unsure at all n locations
tgcaccctggtacattggtctgttccctattcttgaacaatgtgggccagnggcataccgactccaactaccagaaaccttgtctgcagtgcacaatgtgttccatatatcccaattgaagaaatgtcttcgggttctagatcaaaacattgaagtgatggatgttaccttggaaccatacttaacatattcagaacatcctattcgaatcctggatcaaaaggatagggttacccgaagaagagttctcannatttataagatacaatggaaccaacatacggaagatgaagctacatgggaaacccaagattttttagaaaagaaattcccaggctttntagcttcatgtaatttgtgagatatgta

SEQ ID NO: 47973 - DNA, 460 bp, Zea mays
  unsure (1)..(460): unsure at all n locations
tcatagtcacctgcggcatgcaagcttgtcactgcctgtgaaccatggtactactgttgttgtccacacactatagacagcagctcaccacgtcaccttacccgaatttgttccagcaattggcaccgttcccctgggcattacgcaaacattgcccatacaacagcataacgttcttcaaaccacaggcgcatgacaacaagctaggtcacacaccaaaactattttttaatagcaccaacaacatgcgtagcaacacgtttgttttaagggcactggcatcaagctttaatagacacatgaattgaacaggtaatcacaaattgacgggacaagcagacacagatctagagatatgattcggactctcttcccagctgggatgatcccaatcagaaacatgtagagcaactgaaagtcaataagcactatcgagactgtngcattgaaacaatcctat

SEQ ID NO: 47974 - DNA, 264 bp, Zea mays
  unsure (1)..(264): unsure at all n locations
tttggcagcaaacagtgcanatagttatgaatgctgttgtaactttacaccctactcgctgtttatatagtgctgcaggtaagaaagcgaagcgccaggatttttacaccatgcggtcacccgctttgactcgctgtgcggtgggccgcagagaccaaatagtaactctgcaatgtgggaccgctacgcgctgcgaaatngaatcgtttctcggcaacgaactcacggaaggtgtttnttggaccttctgctccccgaagccta

SEQ ID NO: 47975 - DNA, 453 bp, Zea mays
  unsure (1)..(453): unsure at all n locations
agctctcgacagnacactccctacatgtnagctcttattattacttaccgaaagaatatatacataccatcaatgccaccctgcataaaaatacttccttaattacttaccaaaagtatatacacataccgctaataccaccgcttacaaaaaaaaaactactttcgatgcatatgtataacattacacacactatttgtttgtacatgtgcttttaaaattatataaactgtatctattgtttcacaggatcaaaaggattctaccgaccaaagtaccccatgaatgatagatgcaaccacataaaacccataaaaatagcccttaccggcagtgtcagctgttgctatcaatcttatcatcttgtaaccaaaatatcacatacaatggatgcatacataacccctcncgagttctactaaatgcagctgatgtgctgcacttatattattt

SEQ ID NO: 47976 - DNA, 456 bp, Zea mays
  unsure (1)..(456): unsure at all n locations
agctntatcanatggacgtgataagtgccttcctctatggaccaatcaaggaagaggtctatgttgagcaaccttccggctntgaagacagtgagtatcctaaccatgtctataagctctctaaggcgctttatgggctcaagcaagccccaagagcatggtatgaatgccttagagattttcttatcgctaatggcttcaaagtcggaaaagccgatcctacactctttactaaaactcttgaaaatgacttgtttgtatgccaaatttatgttgatgatattatatttgggtctactaacgagtctacatgtgaagagtttagtaggattatgacacacaaattcgagatgtcaatgatggcggagttgaagtatctcttangattccaagtgaagcaacttcaagaggccaccttcattagccaaacgaagtacactcaagacattctaaaca

SEQ ID NO: 47977 - DNA, 368 bp, Zea mays
  unsure (1)..(368): unsure at all n locations
agctntgcgcaaactgagtcattggcncatgtttatccttactatgactcctaaaggccagcatatccttgagagtcntttcttttagtcacgtaagactcttgaaagtacactccgtacttagggtttctgaacccatgttgttgtaggcgaagagactacagaatntgttgctttgttcaagatcgttcttaatgaggaggaaaactaagtacgaccttatggaagatgtctaccttctcgtaatgtaataagtagaagcactcagacccttatattgtaataatcactctttcgatattgttactttaacatgttaatgaaattaagctattgaactcttccactttactccattgggtgtatgc

SEQ ID NO: 47978 - DNA, 315 bp, Zea mays
cacacagccaaagcacttcctcgcactaacccgccatattccccctagtctctcatccttcccaagacattaactccttctgaacccaaccacgggctcgaagaatcctccactcaacatctcaccagcgcggaagccaaacacggggcaacgccgatgggaatgccgacacacttgaacgaacccccaagaacgggaaaaggagcaaaggcaggtacgaccccaagaaaagacaactctcaagctccgatggagacccagccagaccaattaccgcgccagttgtgcgacaaactccgtaccaagacgaccaaa

SEQ ID NO: 47979 - DNA, 391 bp, Zea mays
  unsure (1)..(391): unsure at all n locations
acctgcggcatgcaagcttgacgctgactcgccgaacaacatattctgcatgatgactgtctacatattctggaatgtacggcgaatgatacgaagctgtatgcatgacctgcttcggctgagcttgttgtgctgctgcttcacctatttccttttgcttctgaatagtaacatggcacatcctggtagatggcctttgttctcaccgcagaataagcaaaagattcttctcggttgatcgccanatcttcctcaaagcccctggcgcctctgcctcttggagctggtggtctgaaggagctttgctgttgccccgaagcctgtgaggaacattgtggcctctgctggtggcttcctctatcatcattatgtgtagagtatgaattgatct

SEQ ID NO: 47980 - DNA, 419 bp, Zea mays
agctctggctgtcttatgcggttagcaaatatatatctaattcctaaatttaactcggtcaacaagtctaagtgccatgtgtgtgttgaatcaaaacaacctcgcaagcctcacaaggttgctgaggcgaggagcttggcacctctagaacttgttcattctgatctgtgcgagatgaatggaatcttgaccaaaggtggtaaaagatactttctcacttttatagatgactccactagatcttgctatgtgtatctcttaaaaacaaaagatgagacgttcaattattttaaggcctacaaagctgaagtagagaaccaacttgagaggaacataaaacgtctaatgtccgaccgacgtggagaatatatctctaatgtgttcgatgagttctgcgtggaacatggtattattcatga

SEQ ID NO: 47981 - DNA, 278 bp, Zea mays
aagcatgcatctagaccggcctcctcttttgcaaaatcaactaaatagagtttgccggctaatacacccttaatagctagtgaaccatcacttcttctaaagacagacacatctacatttgtgaataaacaattatatcccatattgcataattgactaacagataacaaattatatccaaacgactcaactaagaatacattagaaatggagtgctcggatgaaaatagcaatctttctaaccctttcaccttgccttgggtcccatcaccgaatat

SEQ ID NO: 47982 - DNA, 360 bp, Zea mays
agcttgtgaacagtacaagttcaggagggtgaatgcatcttctgcagatcagccgaagcccatgctattgcgtgaagacatagcaaagcagaaggtgctattgggctcgcaactatctgaagaccaggagaaaaccttgattaggtttttgttcaacaacaaagatgttttcacatggtcagctaatgatctctgtggagtaaatcaggatgttatcgaacattcgctcaatgttgatccatccttcagaccccgaaagcagaggcttctgaagatgtcggatgacaaggccgaacgggctcgcaatgaagtaaaaagactcctcagtgcaggagttatcagagaagtaaagtatccaga

SEQ ID NO: 47983 - DNA, 240 bp, Zea mays
cggcacacaggagcacaccgtggactcaagaccccttaccaaagtcagcgcaaacctgcctacacgaaaagcacctaagaagcaactgctcgaacccacctcccgggaaaggaacccccggcaaattctgaaagcttgcaaagtttccccttcacgtcaagcggccgaacacaagcagagcgagacacaccagactcccctcgaacaaccacatactcggaagactacccgaacatcgac

SEQ ID NO: 47984 - DNA, 381 bp, Zea mays
  unsure (1)..(381): unsure at all n locations
agcttcggctccatctatgttgtggattgcctttatatctngccaactcccttcagcccttctgtcagctttttgacttccatggacggtaatgggcccttgttccaggtatcttcatgcataagtatgatggatgaagtattgcttcgaaggcattaagtgttccttgaccaatgattgcattgtacaggtatttcatgtcgacaatgtcataaacaacttgctcagctcttgtgttgtggacataaccgaaggtaactaacattgtgattttgccaagtgccacaatctgccgtcctccgaagccacaaagagggtgtgtagcatcatgaatcttgtcctctggttcttgcacctgcctgaaagcctttgaaatataat

SEQ ID NO: 47985 - DNA, 348 bp, Zea mays
  unsure (1)..(348): unsure at all n locations
aagcttgacaacgacgaaatggctcttatcaataagactgaaagtctcctatagggggnggataggcgaaacctgaaaattattactttacaccccaactagatcccttgattagtggttagaacaagatacacaattatcgaagtatataaaaactaagtcctctgcttggtaagagtattgctttcaaataatgcggaatggataaatcaatacaactattaaggtcaatgaagaataaagcaagagggcttagataagatgagcaataacacaagttctttcttgcaaagcgttgcttcactagatgagaatttaacttgaagcaataccaaataatattagcaa

SEQ ID NO: 47986 - DNA, 317 bp, Zea mays
  unsure (1)..(317): unsure at all n locations
ctcctccttcctttcttccgtcgccttgaatgcaacgggttgagcatccgatggttcaccaagctcgttgattatcctccgagccttctatcatgcactcaaaacttacaaaatgcccgataacttccttcggcggcaatctagtatatctaggattaccacgaatcaattgaacctgagtgggattaagaanaatgagagatcntacaataacatgtaccacttcgtggtcatccacttcttgctcccgaagttgcgcacttggttcaccaaagtctcgagccggttgacatatgttgcgctcctccctttgttga

SEQ ID NO: 47987 - DNA, 193 bp, Zea mays
cactgcccgggggggactcgatcccaccactgcatttcaccgtctggtaactcatggacttgcgtggctcaaggcatcaaatgtcttcaccctgtattagcaaccggggctgcatactcgtcacacacccgcttactacgacctctcgcccttcttaaaattgacagcctatgatctccgtgtcgctcccagc

SEQ ID NO: 47988 - DNA, 397 bp, Zea mays
agcttattattgatgtcttcctgccgaaccatattatgcctgagaacttgtatcagtctaaaaagattgtctaccatctcggcatgaactatgagaagtttgacgcgtgcgacaataattgcatgttgttttggagggatcacgaaaatgacacgcattgcatgcactgtaagaagtgaagttatgcagtggtggtggatgaggaaggcactgtggtcactacaaaagttcgggtcatgcagctctagtacatgcctattactccgcggcttaaacgctttgttctaaatcacgagacaacgaagcaaatgagatggcataacgaatgggatcgtcaagacaagattcacatatcatggtgcatccatcagatggcgaggcatttcagtcactggac

SEQ ID NO: 47989 - DNA, 491 bp, Zea mays
  unsure (1)..(491): unsure at all n locations
agctttactatttgatgaatatccgagaagataatcnctttcatcattcttctcacattaagagagccagctcctctttctcaaaatataacattngcaaccgaataccctaaaatatgagatatttggctttctaccaatgagcaattcatatggagttttcttcaagagcttgtgacaatatactctatttgatgaatgacaagcggtatttattgcctcggcccaataagaatccgatatactatattccgctaacatagacctacccatgtcaataagagttctattctttctttcaacaatatcgtcttgtctcggtgtatatctggaagagaattcatgtttgatacccttgtcatcacaatattgatcaattcttgcatctttgaacttcgacccattatcacttctaatccttttgatgtcgaaatcaaattgattttgagccatatagcaatgacttgaatgttcaaacacattggattgtc

SEQ ID NO: 47990 - DNA, 370 bp, Zea mays
ttgcgtagctcgcttgtgtgcgcgcccagtctatgtacctctctgcgtgcgcgcgaactccgttgcgagcgccgatctgtacccacaaagtctcgccggtgctcgactggctcggcctgaccgtcaccttgctgtttcatgctctacaccgataaatcgctgttaatcttgtcgcgcatggtgccgctttgaacatgccatgtccgtcgccggtcgacgaccccgccctgctgcttatcccgtcgccaagctgtgtgccgctgttccgtgacctctacggtgcgcaaggtctcttgctacagaaccacattgtcgtcgtggctattggagttcatcgtgacgccctgctgatgatctgtgtattactgga

SEQ ID NO: 47991 - DNA, 386 bp, Zea mays
  unsure (1)..(386): unsure at all n locations
cgatcaaggcaattctacaacaacacttggaacatcgaacaactacgttgcttttattcttaaaatgtttcaagtcgctcatgtatctcgctttctttacatgcatanataaaggctaaccatcaaggaaggatcagccttggccttggaaagcccgaccctcccttcagggctagaatggggaaccccctctgcgcaaaantttctcggaaagtttctaccaaacgtcttcggccgtcgactatgcatagcgaatccaaaacgacgactgaaccttaacggtagggcaccgaccgaggactctaccctcggatcggatcctactcgcacttcagaaatgcgtacctcgataggatctgtacgacagnctacgctggtaaaacact

SEQ ID NO: 47992 - DNA, 384 bp, Zea mays
gacgcgaagagcgcctattttactggaccaatcaaacaggaggtctatgttgagcaacctcccggctttgaagatagcgagtaccctaaccatgtctataggctctctaaggcgctttatgggctcaagcaagccacacgagcacggtatgaatgccatacagattctctcattgcagatggcttcaaagtcccgcaggctgatcctactttgccactaaaatcactgaaatgacctgtccgacgcaaatcacgtgatgatatatatttgggccaccaacaatctaatgtgaaaattagacgatcatgaccaaaaatcgacagctagaggggagtgagatttcagatcgagcagcactccaggggccctcttaccaacgagacc

SEQ ID NO: 47993 - DNA, 338 bp, Zea mays
ctcttgtctcgaataatctacggtattccggacagtccacctataaatgatatagatggacttatcacctaggaataatcgactagaagaactagttagtccataagattcgtgatggccgccaccaccaaatcaatataaaattggtataggccaatttccttttaatcttcctctttttgcgattgatgccgacacaagccaatagcaatataaagtgtagagatgtacctagattgcctctacatagatgtgcctaagttactttgaagcgaaagccagtctaagtatatatgaaagttttatatagtatcattttaggccaatttgcaccactt

SEQ ID NO: 47994 - DNA, 485 bp, Zea mays
  unsure (1)..(485): unsure at all n locations
tcttaagcaccgcagcatgcaactatgaaattcctatccaacatttcttttctgcggtgcctgagccaacccatgtcagtcttagcaattaagcaagtgtcgagttcagttctatcaaaatctaccaagaatagctgaccctctaacactcccttaaatgctattgaatcatcacttcttctaaagacagcgacaccaatatcagtatcaagacagttgcagcccacttgacatacttgggaaacagaaagcacagtgtaatctaaggaaacaacaagaaacacattggaaatggaatggtccggacatatggcaatcttacccaaacctttgaccaaaccttgatttcaatcccgaatgtgatagctcgttgcgaatcttgcgttttctcgtacgaggagaacatcntcttctctcctgtcatgtggctcgtgcacccgctgtcgagtatccaacttgagccctctgatgcataaacctacaaa

SEQ ID NO: 47995 - DNA, 360 bp, Zea mays
  unsure (1)..(360): unsure at all n locations
ctgcaacagcgacttcattccctactgtgagatcagagagttttggtctgttatntacataatataggcacctgctcgtacaaataattgcaccaattttgtcccattatgttataaaatatgatgtgttgctcttagctccatatgcggtaaagtcttcttaactattgatcatctacctatgccttaattcatatacttcagattttcacaataattcttcactgttagtcatgaaaagttgttttatcaaaacaatatcttcatatgcaagtgcatctaacatcaatttgttcaaacatttttcgtaaagcatgaaatgaagtacaagtttcaaggagatgcggattctatggaaac

SEQ ID NO: 47996 - DNA, 401 bp, Zea mays
  unsure (1)..(401): unsure at all n locations
tcagagtcacctgcngcatgcaagcttgcgaggaatactgaggcctctggtgtttacttcctctgtcatcactctgagtagagttgtgaattgacctgacgtgccttggatggattcttcctccgaagcccctggtcatttcagagaacatgtatgcttcctcccttctttggcggaagtcattgtcagctcgaatatactcatccatcttctagagcaccttctccaaagtttgagggggtttcctggcaaagtattgggctgaaggtcccggccgaagccccttaatcatggcctcaatgacaatttcattgggcaccgttggtgcttgtgccctcagacgcaagaaccttcggacatacgcctgaaggtatcttcgtggtcctgggtgcactggaata

SEQ ID NO: 47997 - DNA, 445 bp, Zea mays
  unsure (1)..(445): unsure at all n locations
cttgtnntacttctaatttcactaacccttcttataattatatattgggtgtnatnnnagcaccatatgaaagtacctaatttggggctggaatttttatgaagcaaaggtaataacaatttatgactaatgtataaatctcacatgcccaggttttatattttatttactacaaaaataacaaattgttaatgcaataaagcttgtgagagcaagttaattctaaaattaatctttttctgtggatgtatgaccatattaagcttccttaggctactataatgtcatacaaggatagtggaacatcattntccatttttacatccatatattatgtataaaccatttaaaactacttaaggtacattaaacaagttaaatcactaacttaatcatacatgcacaacaattcacgaaagtttaccagtcaccaagcatcagtcta

SEQ ID NO: 47998 - DNA, 315 bp, Zea mays
  unsure (1)..(315): unsure at all n locations
agcttctaaaggtatttcacgtgatangttttattaacgtgcaactcgacaaagatagaccttgtgcagcttgtcaagcaggtaaacaagtgggaggagcacatcacagcaagaatgtgatgaccacttcaagacccctagagctgctgcatatggacctcttcggacccgtcgcctatctgagcatatgagggagtaagtatggtctagttattggtgatgacttttcccgcttcacttgngtgttctttctgcaggataagtctgaaacccaagggaccctcaagcgcttcctcaggagagctcaaaatgaat

SEQ ID NO: 47999 - DNA, 227 bp, Zea mays
  unsure (1)..(227): unsure at all n locations
gcatatgctaataatatactaattttctcaagcctagctacgggtgcataggtttcaccgaaatccaaaccttcgacttgggagtatccctnggccacaagtcgagctttgttccttgtcaccacaccatgctcatcttgcttgttgcgaaagaacccactggttcctacaacattttggntaggacgtggaactaaatgccatacctcgttcctagtgaaagttgt

SEQ ID NO: 48000 - DNA, 303 bp, Zea mays
  unsure (1)..(303): unsure at all n locations
agcttcgncatncgaatgacaattaccttgtatgaaggatatgacttcagtcctccaatcttcactatgtactggagaaataacaagcactgctctctccatgagttcaaccgaaggtgcctttattgtttcaaaacatacttccgaaggtagagggagcccctgagccgctgatttggctagcaaatctgcatgctcattttcacctctcacaatattcttgacagaaaaaccttngaaagaagcctccaacctttgaactgtatccagatatttttcaagcttcgggtctcttgtcttgct

SEQ ID NO: 48001 - DNA, 347 bp, Zea mays
  unsure (1)..(347): unsure at all n locations
tcaactgttagctcggacggtactccgaagcggcaaacaatgttctgccaaaagaatctttgggcagtctttgatgtgattgtggagacggccctcgcttcaatccatttggtgaagtattcaacggctacgaaggcgaacttgaggttcccctgagctgtgggcaggggcccgacgatgtccaggccccagcgctggagaggccatgtatgggcgatcagctttgtatattgcgaggngttgcctgaccgacgagagaacttctggcaggcttcgcaggaccttgtgacttcgattgcggcgcagatcattgcatgccagtataaacccttgtcggatcacctttg

SEQ ID NO: 48002 - DNA, 415 bp, Zea mays
  unsure (1)..(415): unsure at all n locations
atcctcttagncacctgcggcagcaagcttcggaaatatttcgaacttactttctttatcaatagngtatctccttgcgacttagcatgattttcctccttttccacaacattcttctgaagatcgacattgtgtccccctcttgtgccatatgcagcatgatgtatgatgcttatgctatgcgaaatgatgtgatgatgttatgttatgtaagatggtgtttattccgaagatacgcacacatccttgcgataaaacacataatcttcttgaatcagcgttgactttttgctataagcctcccttatgagcttcttcgccttttactttagcggaatacaacgttatttttcgctgtaagcctcccttaagagcttcttcgccttctactttcagcggtattcgcgttgacttt

SEQ ID NO: 48003 - DNA, 296 bp, Zea mays
  unsure (1)..(296): unsure at all n locations
ccgccaccgagttcgccatgacgttcttttcctctcttgccaattccgacgacctcggagccaccctagcacgcgcctgcctcatttcggtgacctcaccgcaccgggaagagcagcgccgcccgcagccgctcgttcttcctggtctgaatcccctccgtccgatcttcatcacacgacccagatcacagatnacgcttcgcacacgctcgccctgtgctcctgcccgcctgtcagcgcccgtgtccctggcgctgggccgctcgtcagtgtgcnccctctgtactgacacccct

SEQ ID NO: 48004 - DNA, 393 bp, Zea mays
gtcgacctgacgcatgcaagctttccgcgagcgcgcaggcatcgccttctttctctgtatcagcatgtttcggagggacggcgcttgccttcgtctcgaacgcgaggtcgacacccggcgtgccttccgtctgggcgtggggggcgtcgattctctctacggtcgacgaagcgcggccctccgcttggccttggttgccccgcctcctcctccgttggcgcgggagaggacggagcgagctctaatgttgttcttccaccacacggggaagatgtcgtccattcccggcgggcgggttgtcggtcgccattgtcgttgtcgcacggcggcggaaggagtatcatgttgtagctgccgtcgaaggacatgaactcaatactcccgaacggagca

SEQ ID NO: 48005 - DNA, 485 bp, Zea mays
  unsure (1)..(485): unsure at all n locations
agctcaagcagttcagtcagcagtagcacacattttgtatcaatcaatctatgccttaatcaagcagaagcttaatgtaacaaatatggacttcagtgtaaatcacaacacatgctgaaatacatncaagttttcttcctcacttttaatcgattatgcttctgttcattctcatccatgaatcatattgaaatatttaccaagaagaactaggacatcccatcagaacagtgtaatttcagaatcctataagcttcaattatcttcagaaggatcattaagaatgtggggaccaaactgaggccacaggagctgcccatcttggaaataaactgcaaataactctgttgcctctgcataactaaactagcaacttctatgtccaggtaaatatttcgccagcaatactgtgtgcctacttccttgtctacaagtcaactaaacccaactcacagatgaatatacatcaagggaaacatgatatg

SEQ ID NO: 48006 - DNA, 381 bp, Zea mays
  unsure (1)..(381): unsure at all n locations
tgcggagaggttctctatgtttgtgtgagttcttcttcgntgctcgtgatgcccgtgttgccccctttctctccccctttcgaaagccctgtgcatcccctnttataaacacaaagggatggtccagctgtacatatggnggtgtagcaatgtgctaacgtgtccagcgaagaggtgcttgagccctatatgaagcgtanctggtggggcggccctgggtcctgctgacgtttctttgctttcgtagagagcttgtggactattgacgtcatggacgcatgcggggaaccatcattacctgttgctagagtaatctagatgtgactccngtcttgttccttcgtagcctgaggcagctagctagaagaaggtaatgatgta

SEQ ID NO: 48007 - DNA, 384 bp, Zea mays
  unsure (1)..(384): unsure at all n locations
aatattccaagaggcgaaaatgagcatgcagatttgctagccaaaacaacggctcaagggctttcccttccctccgaagatatttttgaagcaataaaagcaccttcngttgagctcatggagagagcagtgcttactatttctncagtacacagtgaagactagagaactganataatatctttccttcaaggcaattgtctttcaagtgacgaagcttataataaaagaatagaggcaagaacaagaccatatgtggtaatagaagggggaattgataaacatggagtttgttcaccactcctcaaactgttatcaagagccgaaggtatgaaattaatgaaagagatacatgcaggtctgtgtggatcccacattggatct

SEQ ID NO: 48008 - DNA, 301 bp, Zea mays
  unsure (1)..(301): unsure at all n locations
gcagaactagaaatctcaccaacaggctattcgggtgtataccacccacgtagcctagcaattaagcatgtgtcgagctcagctctatcaanatctactaagtatagctgaccctctaacacacccttaaatgctattgaatcatcacttcttctaaagacagtgacacctacatcagtaaagagacagttgtagcccactttgcacaattgagatacagaaagcaaattgtaatctaatgaatctacaagaaaaacattggaaatagaatggtcaggtgatatagcaattctacccaatc

SEQ ID NO: 48009 - DNA, 265 bp, Zea mays
cctcatgttaacataactgcatttagtggaacacatgtttctttatgtgtgatcttgccactccagaccattggaatgacgtgtgaaggagtattactttcacattcactattatttatagctctcacactctatgaaggagatgatcataaccattagttgatggcaaatgtactctgatacctcgtgagtagtttctaatttgttcctgcagttactgactataatgactgatattaggggggtctgtcccattattaactgt

SEQ ID NO: 48010 - DNA, 331 bp, Zea mays
  unsure (1)..(331): unsure at all n locations
acctgcggcatgcagcttctaagggagaacacgagacatgttattcttgtcacnttcganaaagatagaccttgtgcagcttgtcaagcagcgtaacaagtgggaggagcgcatcatagcaagaatgtgatgactacgtcaagacctctggagctgctacatatggacctcttcggacccgtctcctatctatgtatatgaggaagtaagtatggactagttattgttgatgacttcttccgcttcacttgggtattctttctgcaggataaatctgaaacactaaggaccctcaagcgcttcctaatgagagctcataacgagcttgagc

SEQ ID NO: 48011 - DNA, 281 bp, Zea mays
gatcctgagttctttgagattgacaagaagcgctcaccatatctatgcgaccagtcgggattgagaatagttgaaggacgcccgtccttagtggactcctcaatggcgacataggctcttcatacccgacactctggaaacacattgcccgtgatgattgtgttgatgcttcgcctgtgaatcggtgcttcttctccactctctagaacacttactagggcttgattctcatattatttgagtagcaccaatgtagttccacactcatccgggcaacttta

SEQ ID NO: 48012 - DNA, 406 bp, Zea mays
agcttgcgaagatacttcattccaacatgtgctattctggagacgccttatcttgcccacggtaggcttagcaattaagcacgtgtcgagctcacctctatcaaaatctactacgtatagctgaccctctaacactcccttatatgctactgaatcatcactctttctaaagacagcaacacctatatctgttaaaagacagttgtaacccattatacataattgcgaaactgaaagcaagttataatctaaagaatctaccacacaaacattggaaatagagtggccgggtgatatagcaattttacccaaaaccttgaccaacccttgatctccatccccacatgtgatacgcttgttggggatcttcgtctttctcgtacaaagagaacatctctttctccct

SEQ ID NO: 48013 - DNA, 298 bp, Zea mays
  unsure (1)..(298): unsure at all n locations
tctaccatgccacctccataccatcatcacattggggagctatcattattggtggagccatgagagccacccttcttgagctactccttactataaaccccatgaaccaccaccaccatcatgtcttatgcccaccactattgataattactactatacctacctttcccttcaaagaagttgcttcttcttcccctctttgtccaagaaagataggtgaanaacacgcttgacaaaaaagagaatactagtagtactactgaaaaaaaaaaaaaagaaaacataaggggtagggggg

SEQ ID NO: 48014 - DNA, 458 bp, Zea mays
caagcttaccaacttaagcctgtggagaatatatgtttccttgtggcaaagaacaaaactattacatgatatttaaaagatgtcctttattacacggaaaataaaactgaatgaaaaagactgccatcaaggtaggatatttgtcaatagatgtgcttcgactctggcacagtgctgttgactgtgcgagcttccgactgtcctctgaagtcccttttgtgtgggccatactggctcccttctggctgtcggccttgctgcaccggtggtggaggcgcgaggtgttgccaagaggctcgaggttgactcgccgaagcaacagaaactgcacggtggttgcctacatattctgggatgtaaggcgaatgatacgaaccagtgtgcatgacctgcttccgctgagcctatcgtgctgcagcttctgctatcttcttttgctcctgatagcacatggcaca

SEQ ID NO: 48015 - DNA, 392 bp, Zea mays
  unsure (1)..(392): unsure at all n locations
tctatattgtggatcgctttttagtctgtccatttaccttcagctctnctagcgacttcctgactctcatgaacagccatgggcctttgttccgaacgtatcttcatgcatagatatggtggatgaagtattgcttcgaaagcattgagtgtcccacgaccaatgattgcattgtacgggtattccatatcaacaatgtcaaacacatcatgttcagtccttgtgttgtgaacgaggccgaaggtcactggcatcgtgattttgacgagtgctgcaatctgccttccttctaagccacaaagagggtgtgtagcatcatgaatcttgtcttctggctcttacatcagtctgaaagccttagcaaatatgatatccgctgcactgtctgtatc

SEQ ID NO: 48016 - DNA, 377 bp, Zea mays
atggaagaatgatgctcatatttattgggcttcacgatgtgctgaaggcttagagcgtctgcaagtgttattgaccactgctccgcgtttaactcaaccggacattgaaaagccctctgatgtgtatagagacgcataaagcagtggtctacgttgtgttctaatgctataaggccgagtaatagcttatgcttcatggcggtcgcgccggcatgaagaacattatccaacttatgacctgaagatagctgctgtggctcatgccctataaatcccggaacattagccgatggggaatatatgtcatattcatacagaccacataaagctagatgtatatctattacccacgcagagcttaatatgatacacatgat

SEQ ID NO: 48017 - DNA, 354 bp, Zea mays
  unsure (1)..(354): unsure at all n locations
agcttgtgaaggttcttcatccccacatgtgttattcggcgatgccacagccagcccatgctagtcttagcaattaagcatgcatctagaccggcctcctcttttgcaaaatcaactaaataaagtttttcgtctagtacacctttaaaagctagtgaaccatcacatcttctaaagacagacacatctacatttgtaaatagacaattatatcccatattacataattgactgacagatagtaaattatatccaagagactcaactaanaacacattagagatagagtgctcatttgatattggcaatttgcctaaacctttcaccttgctntggttcccatcaccgaatatg

SEQ ID NO: 48018 - DNA, 439 bp, Zea mays
  unsure (1)..(439): unsure at all n locations
tcagctggtaccacagaggagagaccccgtggtctcccctctacagccgaggatcaaacacgttgaactcacaccttcgcagggtatccaggaggacctgtgccggcaaggctgggaggagcacggngatcgcctctntgggcacggacgatgccaactcccgcgccttgtgcaggtgagcctccgcaacagatgcgaccttgaaaactgcgtctggcagcctcttgcccgccctgacctccgacctgccaccctcccgtgtgatgagcaggccgcattcctcggccacactatggcccttgttcgttttatcaaatccatggggattgagagggattaaatcccctataagtcanaatccccctcaatcccactctaatcccctcaatccccatggattagggatgaaacgaacaaagcctagctgggatataatgta

SEQ ID NO: 48019 - DNA, 344 bp, Zea mays
agcttcgtcatccgaatgacaattaccttggttgaaggatatgaattcagtcctccaatcttcactatgtactggagaaataacaagcactgctctctccatgagttcaaccgaaggtgcctttattgtttcaaaaaatacttccgaaggtagagggagcccctgagccgctgatttggctagcaaatctgcatgctcatcttcacctctcagaatattcttgacagaaaaaactttgaaagaagcctccaacctttgaactgtatccagatatttttcaagcttcgggtctcttgccttgtaactttgtctacatggccagatatgacttgagaaacagtctt

SEQ ID NO: 48020 - DNA, 257 bp, Zea mays
  unsure (1)..(257): unsure at all n locations
gaaatcttggctggtcaactgctngccgntgtcaactgttagctcggacggtactccgaagcggcaaacaatgttctgccaaaagaatctttgggcagtctttgatgtgattgtggagacggccctcgcttcaatccatttggtgaagtattcaacggctacgaaggcgaacttgagggtccctgagctgtggcaggggcccgacgatgtccaggccccancgctggagaggccatgtatgggcgatcaactttgta

SEQ ID NO: 48021 - DNA, 415 bp, Zea mays
  unsure (1)..(415): unsure at all n locations
tgcttcggtatctctgcttgtcccttcttcgttatctctagcngccaatctgctttgaagtctgctagcgcctgagattgaattgaagacctgtacacgtagtcaatggtgaattcattgagcntcgcggcccactttccaacccttccagtagcttctctgttcctcataatatccttcagaggctgcgatgaaggaacaattatatggtaagcttgaaaataatgccgaagcttcctggaggccattaatacagcatacaacactttctncaattctgtgtaatctttctttgataagcttaatacttcggagactaaatatactgcgacttgctctttagtttgtccttcaagcttctcctgtacaagcgccacacttactgcagagtgcgaaggngccacatacaatagca

SEQ ID NO: 48022 - DNA, 333 bp, Zea mays
tgctgagggggagaaaaagaacaagagacgtcttcatcgggcgtccagcttggatcacggtgcggtccttctgctctgttgctgaggaagtgctagtgcctaaatctactgaaaatgatcccaatgggtgtgacccggctgacgctgaccccaaccggtgtgctgtctgtgttgttgatgacgatgatgaagaagaggacgaaatccctctgattcgcaagaacagccggcgttacataactagtggggaacagagtggtgctccttcttctgccttgtctgccctcaatcgtctgcaagaaatatctcgtgcgaactttgatcaaactcttg

SEQ ID NO: 48023 - DNA, 289 bp, Zea mays
attgcgcccacttgatcagaaactggagttcttcaccacatggacttgacattgctgggggattattttacgtatcctgtcatttttcacacaacaatggtgattcggtccaactgattatttgagcagcttgtatgtggaatttgtaatccaatgtcttcactttggcttaaatacgaaactgaccaaagtatttgaacgcctaattgtgattagctctcttgaccacagaagactaaacatagggtcgaagtttaaggtacaccatgttacccacatcaaagttcat

SEQ ID NO: 48024 - DNA, 410 bp, Zea mays
  unsure (1)..(410): unsure at all n locations
gatgacatcattgtcaaaagcacgacgcaggagaatcatattgctgatctgcaggagaccttcgccagtttcacgcaagctggcttaaagttaaacccaaaacaatgcgtcttccgagtgaaggggaaatatcttggatgctcggtttcaacacagggaattgaagctaatccaagtaaaatagaagctatacttcggatggagccaccaactacaaagaagggggctcaaagattgacaggaagaatggatctctcaatagattctatccagatagcagagagaaactaccattcttcgagtgctgaaacagcgaagttttaatgggaccactcagcagaggccttctagagctgnacagtattaatagatctacaacataactcaccaatgcagggcttcttatatat

SEQ ID NO: 48025 - DNA, 411 bp, Zea mays
  unsure (1)..(411): unsure at all n locations
tgatgtcttactggntctatatgactccgagcttcgtctccagccttttctcgcccgccttttgtccatatcatctttacaaatctattagaaatgcttctggcgagatcaggaatgtcatctataattgatggtgatagagtgaaattgggcctattgacaaattttccatgatcgcagccagcttttaggaaagctgcagcagtgccccgagaagctacccatgcgcataagtcaccgtgcccggctataacttcgtcaagctcatcaatttcaccatcaatatgttcgaaggtctttggtaaatcttcaactgacggggtgaatntctcactgctagctccaactgagtggaagatttttctcagtcgttgaatacattcgttgctaaattccacacatttgtcttga

SEQ ID NO: 48026 - DNA, 481 bp, Zea mays
  unsure (1)..(481): unsure at all n locations
atgcaagcttggtgccaatggagaaacacaaatccttgtattcttgtctgtcaaactgtcttgccgtgncaactgttagttcggacggtactccgaagcggcaaacaatgttttgccagaggaatctttgggcagtctttgatgttattgtggaaacagcccttgcctcgatccatctggtgaagtactcgacggcgacgaaggcgaacttaaggttcccctgagcggtgggtaggggcccgacaatgtccaggccccagcgctggagaggccatgtgtgggcgatcagctttgtatactgcgaggggctgcctgactgaggagaaaacttctggcaggtttcgcaggaccttgtgacccgatttgcggcgcagatcattgcgggccagtaaaagccctggcggatcaccttagcagctanggcccctgctcctgcgtgcgagccgcacgtgccactgtggacttcacgcangatctggat

SEQ ID NO: 48027 - DNA, 474 bp, Zea mays
  unsure (1)..(474): unsure at all n locations
ctccatctatgntatggattgccttagaatctatccaacttccttcagcccttctggcagcttcttgacttccatggacagcaatgggcccttgttccgaaggtatcttcatgcataagtatgctagatgaagtatggcttcgaaggcattaagcgtccctcgaccaatgattgcattgtatgggtaatccatgtcaacaatgtcaaagataacctgctcagaccttgtgttatgaacataactaaaggtaactgacattgtgattttactaaatgccacaatatgtcttcctccgaagccacaaagagggtgtgtagcatcatgaattntgtcctctggctcttgcatctgcctgaaagcctntgcaaatatgatgttcgctgcactgcctgtgtcaaccagaacattgtggaccagaaatccttngatgacacatgatataaccatagcatcgctgtgaagataaatcttga

SEQ ID NO: 48028 - DNA, 435 bp, Zea mays
  unsure (1)..(435): unsure at all n locations
ctgcangcatgccaagcttgggaactatgcncgtatccaatctgtctgatccggttttataatcgctcgccagangtccctgttgcggtcgaccacgaccaacacccaacataagacttncctagttatttagccaagaccagagccatgatagttctcatggtagcactggtttcccggcgggtcactccatgttctaattaatcatgcaataattctcgtttaaccatcgggttaacaacaataatgtaaacttaccatttgaaacattaatatcataagcgggagtgactgcataaagttaagttgtagcaatagcataactacaaaggtaaagtataattcccaggtttgatcaacgaataaggttggaaaggctatctaaatacgtaacacgtcaaattatgcatatatattcaacagaataaactttat

SEQ ID NO: 48029 - DNA, 416 bp, Zea mays
  unsure (1)..(416): unsure at all n locations
ctctttgttacttcctcttcgtgagcccctggcgtcttatatcgatgtatcttgctaacgcctgggactggattgagcatctatgcacataatcaatggagaattcattaagttctgccacccattttccaatccttccagtaacttctctgttcctcataatatccttcagaggctgtgacgaaagaacaattatgtgatatgctcgaaaataatgccgaaaggttttggaggccattaacacaacatatagcaccttttccaattctgtgtaatttntctttgatggactcaaaacttctgagacgaagtacactggagctttgcttttgacttggccatctagcttcttctgtacaagtgccgcacttactgcagaatgtgaagctgcaacatattagagtaatggagcccct

SEQ ID NO: 48030 - DNA, 328 bp, Zea mays
  unsure (1)..(328): unsure at all n locations
atacgaagcgactcaagcctagctgcgggtgcataggtttcaccgaaatccaaaccttcgacttgcgagtatcccttggccacaagtcgagctttgtctcttgtcaccacaccatgctcatnttgcttgtagcggaagacccactcggctcctacaacactttgattaggacgtggaactaaatgccatacctcattcctagcgaagatgttgagctcctcttgcatcgccaccacccaacccgaatcttggagtgcttcctctaccctgtgtggctcaatagaggaaacaaaagagtaatgttcacaaaaatgtgcacaccagatct

SEQ ID NO: 48031 - DNA, 363 bp, Zea mays
cacgcctggggtggtagactcggcgcaccttctcgtcgacgagggctcgaccgtcgcagcggtggtgctcgttgccgaagcgacccggggctgtatgcgttgaggcccgcgtgcgcccgctgtggaccgacgcttcctgcattaatcgggaagtcacggcgcgatgctctcgaggggacccctgccttcaggaggcagagctttctcgccgtcggaccgcgacatccttcaggagattcttgagttctccctggatacgccgcccctcggtggtggatggctcctgcatcgctcgaagaagattgctgctgcaccagatcttggccaccccactataaaccggggcagccttgcctcgcatcg

SEQ ID NO: 48032 - DNA, 436 bp, Zea mays
  unsure (1)..(436): unsure at all n locations
atggctcaagagagagaacgttatattttatacnccgcgaactatcctgagcataacaataggataattcatgctagaaaacctcatactgcctctcatcatgcttatgtgtattcgaatgaggcctctanctctatgcattcaactcatatcacaatgcctaatacgaacactgtcaatgcatcaaataaacatagcattccatttaacacctttgatggcaactaataaatcaagcaaggtacgtgccaaacatgttgggggcaaacacacaagtcccaagacttgtgttcggcgacccaaggtgcttgtttctaatgtcaaaggacccaagaccgcttgggtacctaagaataacagctacaattgttcggtaggttatgccatctgggggtcaagttggattattgatactgggcgcacacaccacatgact

SEQ ID NO: 48033 - DNA, 379 bp, Zea mays
ggcaccaatgttaaatacttgttttcgatagctacatggcgataaaacaaggcaacacaatttatgaaacatggaactttatccttaagtttcaattcttcaagtgatagcttgatgacaaatgtctttagataaaaatgcgaatgatacgatatttaagaacgatgataagcgataaagcatggaactcatctcctgagccttagcactatttattccatcctccttcggattacatgaatttacaaacataccttcggcttgtttgcacaagatagctcgaaggtactttcaatgctaaacgagatgaagcttgaggccgtcacaagttgaagttgtgtatagcattgttcatctatttatagggtagaggtacatc

SEQ ID NO: 48034 - DNA, 480 bp, Zea mays
  unsure (1)..(480): unsure at all n locations
agcttccctgttatacccctgccgngcctanatgnngtgtngctcaagtcgaccgcgccgcgcgtgtcaagtctcggccgtgcgccgtgtggttgtgttagttgtctacaaatctgcgacgcgtcacctaccgatcgacttgctggcttgcttgctgcccctgcgggccggccgctccgctccttgccacgatgcatgtgggtcgctggaaagctccccggccggcgtggctacacttagagatggcaatggtaaaaacccgctgggtattacctcaaactcatatccgcgaagaaaaaatacgctcgctaaacaactcatactcatgacgagtatganattttgcccacacttatactcatgcgggtttcggtacccaacgggttctcatacccactaacatcaacataaaaaataattcatcatataaatgacaatcaatacactaataagctagcataaaaggaacaagtgataact

SEQ ID NO: 48035 - DNA, 360 bp, Zea mays
  unsure (1)..(360): unsure at all n locations
gcgattcttggcttctgtgccagatggagaaatcggattgctgctctcctcgcttcatcatcttctcgtgtgcttatgaatggaaagccgggtatgagaattacccatttgatgggactccgtgcaggtgaccccttgtcccctatgctcttcatcctcgccatcgatccttttcaaagaattattgagcgggcgatccagtcaggaatcctttccaaatcgtccacgaccggcacccttntggctctttgacgctgagatgcgggtattttgtcacaccattgacgcgatctccgcgtctccaatttcctgcaactttcagccttgctcgggcttaatttattctaatagacggaattt

SEQ ID NO: 48036 - DNA, 375 bp, Zea mays
  unsure (1)..(375): unsure at all n locations
gccccctgtgcgctgactcggacctaagcccgcagcagcacccagcactgcgccagaagatagtgatttgtgcacctctatctgacaccatcggcgtcggcacaccatgaagacaaacgagccgagacatatacaatctctgccaatacgacactgctatactcggacttgacaggcatgaagtgcgctgacttggtcaaacggtccactactacccagatggaatccggaccggctcgagtgcgaggcaatccgactaagaaatccataccaatatcatcccacttccactgagggatctgcaacggttgtaacaatccgagncgggctctggtgctctcgctcaaaccttcgacaactataacacatagccac

SEQ ID NO: 48037 - DNA, 364 bp, Zea mays
aagtcacctgcggcatcaagctaaaggtgagaaattatcacataagattctacagctctttctaacaaaatattgacaggtcaactgtggttatcacagatgccaagtgaaaacatacctatgatcctacagaccataataaccaaacaatgtccagtcaactgcagttatcacagttcaagtaattatgacgccatatcatactttgaaactacagaccttaataacccatgttgctgttagtaggacatcattccgtcggaagttgacaatcaatataagttaacactttaacctcttcagtgcgatcttcattcggcatattaacttctctattgaaaactgaatatcacagtactccgta

SEQ ID NO: 48038 - DNA, 473 bp, Zea mays
ccttcggactgcatgcagatactcatctagcttcggttctcgtgccttgctgctcttatccacatggccagcaatgacttgagaatcagtctttatgatggcccttcttattcccattgcccttagtttccgaagccccaaaagaagtgcttcgtactcagcaatattatttgtgcaactgaaatccagtttgactgcaaaacatgttttgacttttgaaggtgccactatgactgcagctgctcctgcaccaaaggttccccaagcttcagtatctttgcttgtcccttcttcgtgagcccctggcgtctagtcagctatgaagtctgctagcgcctgagattgaattgaagatctgtgtacgtagtcgatggtgaattcattgagctccacgacccactttccaacccttccagtagcttctctgttcctcataatatccttcagagggtgtgacgagggaacaattatat

SEQ ID NO: 48039 - DNA, 465 bp, Zea mays
agcttattgaatacattaaaacataaccggtgtaacaagttgtggtgaacatcaacagcgcatggttaaatatacatgatatggaatgtctttctcatggtgacatccaattgtctgatgaagtaagtacatctgtatgtccatattatatacagcaataaagtatatatatttataattatcatattatacagtatggtatacatatttaaagctagcatgtatatttgaattgctaattgtattcttttggtgtacaggccctcagtgcaaatatacactgtatcaggggtgaagagcatttacttcatagagaacgtggacaggtctttttggagaacacattcatctccagtctgcttaagcgtgatggccaccctaagatgctcttatatcgtacgaagacacaattgaaaaaagggtgacaactatttacagtctgacatggttgacctaaaactatct

SEQ ID NO: 48040 - DNA, 403 bp, Zea mays
  unsure (1)..(403): unsure at all n locations
agaagcctgtatctacctactaaaccaaataaatatgttaaacctctctgtccactccattaagttagttnttaccccttatttcataatatgcttaagggtaagaaaaatagaaaatgtaatttaaacaaagaaccaaagagtacctctatttttgttacgatgcttatntaatgtagttcactggaaaaatatatcatgccctgtcttagtataaaataagtatgatccctttcgtgttaataatacaagtgacacttagaaaaactctacaaaaataaccccaatgtaaaaacacccccacccttgggataactaattgtttattaaggagaattcaggaaaatatgacatctgctgttgacatttncaaatataatgtatagaaatgccttttgacctt

SEQ ID NO: 48041 - DNA, 266 bp, Zea mays
gaagagccaaatattgaaggataaaaaatgttagacaatttaagcccttcggcagaagtaacagtgccgaagacacaaaaaagttttgcgacaacttccaagagaagaaggatggctaacgtattacatgtgctagaaacacgaaagacctttgaactcactccttcaaaggaaattgtcgaagcctcgaaggcgcaaactgaagttgaaatagagcagaccgaaattgaaactacagtaattcaagctggtgccaaagctgggcc

SEQ ID NO: 48042 - DNA, 442 bp, Zea mays
tactcagcttctaagggagaacacgtgatatgtttgactaacgtgcatttctaataagatagaccttgtgcagcttgtcaagcaggtaaacaagtgggaggatcacatcacagcaagaatgtgatgaccacttcaagacccctggagctgctgcatatggacctcttcggacccgtcgcctatttgagtatatggggaagtaagtatggtctagttattgttgatgaattttcccgcttcacttgggtgttctttttgcaggataagtctgaaacccaagggaccctcaagcgcttcctcaggagggctcataatgagtttgagctcaaagtgaagaagataaggagcgacaacgggtccgagttaagaaccttcaagtggaggaattccttgaagaggaagggatcaagcacgagttcttcgctccctacacaccacaaca

SEQ ID NO: 48043 - DNA, 411 bp, Zea mays
actgatgggagaatttccttcttcagaaccagaacgataaatgaaccatctatacttcgaaggcagacatctctatgataaatatggtctcataagtcatagaaatcctgtgaaatgacgcgccaccattttctgataaaattgatgttaaatccatcacggcccggcgatttgtctgaagggagcactgcaataatgctatcaatttcttgcttggaaaatggcgaatccaaccattgcaagccatcctgcataattatcaggtctgagagataaaaaacattctccgaaaagtcagaagaacccacacgacatttgaaaatattccacatgagatttgctctatgatcgcgctcagagtaacttgtctcattatcatcggagagcaaaacaactgacgtacgcctatgc

SEQ ID NO: 48044 - DNA, 331 bp, Zea mays
  unsure (1)..(331): unsure at all n locations
ccattcgtgctgttcttgtatactccaacatgcacatagggtgcttgcttgatgcttgttattaaaaccaataactgaagcaaatctcaaaggttcagacttcagagtgctctangcttcaatgggcggctgtgtgatggcagagctctcaactaaatgcccaaatgtacgctttctaggctttttattggaggaaaattgataatccttgatatttcaagctaacttaatgacccaatttatcttccaaagtgtggtttatcatgcctattccctattacttctttntattatctgcatgcgtgatggtgttcatgtttcatttttttgt

SEQ ID NO: 48045 - DNA, 404 bp, Zea mays
agcatgggaagggtcttcatcgccacatgtgctattcggcgatgccacagtcagcccatgctagtcgtagcaattaagcatgcatctagaccggccctctcttttgcaaaatcaactaagtaaagtctgtcgtctaatatacccttaaaagctaatgaaccatcacttcttctaaagacagacacatctgcttttgtgaatagacaaatatatcccattttgcataattgactaacagataagcaagtatatccaagagactcaactaaaaacacattacatatagagtgctcggatgaaatagcaattttacctaaccctgttaccttgccttgattcccatcaccaaatattatagaatcttgcgaatccttgttttgacgtatgaggtgaacatcttcttc

SEQ ID NO: 48046 - DNA, 404 bp, Zea mays
  unsure (1)..(404): unsure at all n locations
tacccctttaaccactatttatggctaagtccattaaccacggttccatttgcaaaaacagtaaaacaatacaacttgtttgaactctttgcctagtgaatgcactctangtgtgtcacacatatgcaatgccaatgcttatgatgtcatgctcaagttctagttatagtaacaccaagggtgttacatccttccttccatataagaatctcgttccgagattaaaatcctacggtaagtaatggtaaaggaaacgcatcacacttttatttctctatctttggtacaagacaagggtgatgtggnggctacttntctattacaacagctatacaggctttaccattacatgacgctatgaagcctgcatactcttattaaaaagcttgggtttcatgtacctc

SEQ ID NO: 48047 - DNA, 459 bp, Zea mays
  unsure (1)..(459): unsure at all n locations
ctccctctatattatggatcgctttagaatctgnccagttttcttcggcctttctggcatcttcctgacttncatgaatagcaatagaaccttgatccgaatgtatcttcatgcaaagatatgctggatgaagaattgcttcaaaagcattgagtgtcccacgaccaatgattgcattgcacgggtattctatgtcgacaatatcaaacacaacttgctcagtccttgtataggtgacaaatccgaactcaccagcattgtgatcttgccgagtgctacaatctgccttcctccgaagccgcaaagagggtgtgtagcatcatgaatcttatcctctggctcttgcatctgtctgaaggccttagcaaatataatatccgctgcactgcctgtatcaaccanaagattgtggaccagaaatcctttgatgacacaagacataaccatagcatcattgtg

SEQ ID NO: 48048 - DNA, 361 bp, Zea mays
  unsure (1)..(361): unsure at all n locations
tgatgatgacgaccaacatgcatgggggtaccttacgtactgcgtcgaaagagctctgccagtactcggagatgctgggctcgctatcagaacgttccttgaacactcatttgtgacatctatcaaaggccatcttctccatnaccctgcatgcaagaacgacaaggtggttcaaaacccaaaatcagacccacggcttgagcacatcattcatgattcacatgcgttcgcatgccccaaaagctcgctatcgctagtacacgacggcaaagcgactgaccaagaacgaccgaccgaccggcgactgactgactgacagacatctagtgagagtgcgtgtgtgtgtgtgtgacacgccact

SEQ ID NO: 48049 - DNA, 367 bp, Zea mays
ttccaatagtaaaatctacttataaaaaaatgcactatgaagttaattccttctggattaacactcgcaattggtgcatataggtaattcactcatacatgtgcactgactcaaaacgaatttatttatgccttatgcctcataatgatgatttatttgacattcatatataaatatcatcattcattaaatacttcattgcactactaatacctcttttcaaagagtcttatcgactaagtttaataggaaaagagattacaaagaacgaagctctcacaaatgatgataaagaagaatactaacgtgacaccaccacagatatgaacatcctgccaaattggcataacaaatggcacactctata

SEQ ID NO: 48050 - DNA, 293 bp, Zea mays
ttgcccaaacggtcctgctggtcgttccatttcccaagtcacttcttgggatctggctggcttctaaaattaaactctcaaaccgctgaataaacataaatctaatgaaggtgctatgttataccatgatcacagaaagaggaaaatgatggccttgaacatgattaaccgtctctccttacctaagaaccgctctaccagcgcgtcgggggcccctgcgtggacggatggtaacggcccctgcgtgcgcgatgcgccggtccgggacggccgctgcatgggctgcggttgcc

SEQ ID NO: 48051 - DNA, 311 bp, Zea mays
ggcacgtacaaggatactgaactcccacatgttggcccagtggccaaatggaaggaagtaactaatgcctgtaacgcctgagcgatctgctagcgccataatgtacgcagagcatacagtatttatatcccgcgctgcttcctcggaaacgctcgaatcatgatgagcgtaatacgcgcggcaccatgggcgtactggccgtgcatggaatggacaggcactccacctgcaagatggtctggccgtcgcctgtcagcggagtggataatgctctataaatgctgacgcggcacatcacctgccaatggaat

SEQ ID NO: 48052 - DNA, 177 bp, Zea mays
ccagtcggcttcgttcttgcaccacaccatgctcaacttgcttggtgcgaaagactcacttgcctcctacaacatcttagttgggacgtggaactaaacgcaatacactcctcctcgtgaaggcgatgacctcctactgcatcgacaccacccaaaacgaatcctgaagcgcatact

SEQ ID NO: 48053 - DNA, 232 bp, Zea mays
accaccaggagctacaacaccaggggaatcacctacaaacaccagatagctgccccgacacgcctgaagcgaagacacaccctcgaaagacagaaccgcaacagagaaacagagagccagtgaatatgggaaccaagcaagagaacgaagaacacacgaaacatggaaaggaaggcggggaaaacagttaccaacacgacaacctgattcaccccgaaggaaaccgggggac

SEQ ID NO: 48054 - DNA, 436 bp, Zea mays
  unsure (1)..(436): unsure at all n locations
gactcggatccttaagacacctgcagcatgcaactagcngtgcgagttctagacagagcttcctgttcttggtcacattataaaccaagagggattggctgtggatccaaacaaggtagcagctattctagactggaaagcaccgaacgatgtccgatgatcaagaagttcattggaatggccggctactatcgatgtttcattgaaggtttctccaagattgccaggccaatgacggccttgttggcaaagaaggttgagttcaagtggaccccatcatgccaagagtcctttgagacattgaagaggaaattgaccacaacaccagtattgaatctgctagatgtccacaagtcattctcagtatactgtgacgcttcgtacacgggtctgggatgtgtgtaaatcgccgacgggagagtagtggcatactcgt

SEQ ID NO: 48055 - DNA, 398 bp, Zea mays
agaattattggaactcatacatactgatgtgtgcggaccaatgagtacgacatctatgggaggattccaatacttcataaccttcactgatgaatttagtatatattggtatgtctacttaatgaaacacaagtctgaattcttataataattcaaagatgttcagactgaagtaaaaaatcatcgtggaaaaaaataaagcactgcgatcagatcgtggtggtgaatatttgatcatgagttaacaatcatctaaagagttgggaattgttcacagctacgccgcttgaacgctcatagaatggcgtgttgagcacgtaatcgacttattgatatggtcaccatgatgaacatcggactacttggcgtttgggatcgctctaaaaacactttaacta

SEQ ID NO: 48056 - DNA, 322 bp, Zea mays
tcatgaaatctatgagcatacgaaaacaaatggatggctctaaaattgatttgaaaagcctatgacaagtaaattggcattcctcataatatgaggagaaaaaagttgggagtctcggcggattgagaataggattggtgtggggcaaattgcctcaaactaatatatctagtcctattcactactcacaaggggaggaagggacccattttcctcattaattggtgctgatggtacttcatatcacaagccaatgaggttgataagccgaccccatatattcaaaggtgtgctgttacatatgctgtgatccatatctatc

SEQ ID NO: 48057 - DNA, 375 bp, Zea mays
  unsure (1)..(375): unsure at all n locations
gaactcaacccactcaagctctgcaccgaaacactcctgtttatatggtttatggatcagaggcaatgctaccccccgacctaattatcagtgcaccaagatcaacttttcaaagcatacccaaagaagaagcacccagcctacaagatatccacgttctgtangaacaatgattgaacacagtaactcatcacagctaggtactagcagaccttgacgcgctataattataaagctgtgcgtcactgtaccttcgcactgggagcacttgccctctacccaaatgtaacggcggaagggaagcacaagttatcaccactatgtgaaggaccgctcattgcatcagaagtcacactgctatgatcataccggcta

SEQ ID NO: 48058 - DNA, 178 bp, Zea mays
accgatactcgagtgtaaatcataccgtgctattacatcacatgctaaccaacttccgatcaaacatgcaagagtatctgctctgtaaaccgacaaacaactgtaaagaaaatttcaagacctccgcttaattctaagaagtactgagaaaaattaatataaactccccaaacttcat

SEQ ID NO: 48059 - DNA, 417 bp, Zea mays
  unsure (1)..(417): unsure at all n locations
agcttctaaaggtatatacacgtgtatttgnttatatctaacgcgccacattcgaaaaggagtagacctctgtgcacgcatgtctaagcaggtataacagggtgggaaggagcacactcancagcaagaatggtgatgactcacatcaagaacccctggagctgctacatatggacgctcttcggacctgtcgcctatctaagcatanggggaagtaagtatgggttagttattgtggatgacttttcccgcttcacttgggtattctttttgcaggataagtctgaaaacgagtttgagctcaaggtgaagaagataacgagcgacaatggatctgagctcaagaaccttcacgggaggagtttcttgaggaggaagggacaagcatgagtcttcgctcctaccaccacaaaaaat

SEQ ID NO: 48060 - DNA, 377 bp, Zea mays
  unsure (1)..(377): unsure at all n locations
acattggttgaatctctatatggtctgaactggtgatggtgtacatcttaacttaattttttattctcacagtatttgagctgtgaaccagacagatgccaccccatctcaccggacaatatatactgccacgtgagtggatttgtcgatcatgaacctacatggctacatatggtgtactctaccaactaccgcgctacaaattgatttcaacaaactgaaattngtctatagaatngacagtcaactaccgaacaaacgaataatcaaccanatgcgaacgcgtgcagacttgttctntagcacagtatcccgcaggttattcataggcattcaaacactattttgactatcataggcatttaaacactattttg

SEQ ID NO: 48061 - DNA, 373 bp, Zea mays
ctcattctacgatcttctaatgctcagtgggagaaagacagaattcgtagtgcatgccaagccgggaagcacagtggcactcatcattcacacatgaacatcatgacgaccgacaggccgcttgagctactccacatggatctattcggcccgattgcttacataagcatcggcgggagtaagtactgtctagttattgtggatgattattctcgctctacttgggtattctttttacaggaaaaatctcaaacccaagagaccttataaggattcttgagacaggctcacaatgagtttggcttaacgatcaagaaaataagaagcgacaacgggacggagttcagaactctcaatcgatggttttttgaga

SEQ ID NO: 48062 - DNA, 484 bp, Zea mays
  unsure (1)..(484): unsure at all n locations
atgttgnctgcatccactgtcgaccttgtgttgagcagttatctgctccaacgtcatgagtacagtcattctcttatgattctcaaagtctcggatgactttgtatttatatccatgtgtgccatatatcgaactgcattatacaaaatgaaaccatgattatcactgttattttccacaatttcaagtatttattaattgagtctcatagcactgattattctatatgcggcagcttgagacaaaataaatctccttgcgcatgtcttcaatcttatggctatttctactcaagctggatcatgggaggaaaagaacctcaactcatggaccaacggcaggaacagaacttcaattcatgggaggacaagatcacttttacgcactaaatacaagcattttatgctagtttagacataatgtctaagcctctttagatggtagacttatatttggataatgtaactaaacaatgccttattat

SEQ ID NO: 48063 - DNA, 463 bp, Zea mays
ctcgagatgggttcttcacaaattttattactgaagactactaatatcaaaagagatataatataacctgaaacattccgcttcgacacttcagtggcacatagctctcgctgttctaagctagaatctcccacaattacaccataactattattcccagaagcctgaagtaagaattgttaaaaaacaataagagaagaacctgagttgattcatctgtaaaaaaagtggcagattttaagaagcttgcaccagaggcctccaaacttgtagcatatttgataacaaattataagtgtcacttagccattcattttcgctctatttcagacattccaatagtgacaactctctgaaaagtagagaaagatgtatacattaaagtcatcaaacacagcttgatgataacagcgtatcctaccacatccatagcaatacatgcatcaagccaccgcaatgtcct

SEQ ID NO: 48064 - DNA, 425 bp, Zea mays
  unsure (1)..(425): unsure at all n locations
ctcgaccgggatctctaatcacctgggcatgcagctcgggntgtctttctcttctaantgatatatcttctgcctgcatcgccatccaaggcgcgggtggatctctccgagggtggagaccgctctgatgtcttagaccatacccagggtgccgctcctcccccgggcgatgctttattctgccggagcagttcgtttcgcgtgccgcgaggcctgaacatatacaagtcgtgtctcttttcctcctgtatcgtgtatccggacttgtccgtcagtagcacgatcgcttacccaagtaagagttatttctcccgcgatgtgacgagtgatgtatccgtatcccggatgcgtaggagtccctctcctcggtctgccttgccgattacatgcactcttattcgcttctcggggttctgctactgata

SEQ ID NO: 48065 - DNA, 297 bp, Zea mays
acatttatgacttactcccgctcattctcagaaagacaggatgtgtgctgcatgccacgcctggaagtcatctggcactcatcatccacacaagaacattatgacaagtgacaggccactgcagctccttcacatggatctattcggctcgatcgcttacataagcatcggccggagtaagtactgtctagttattgcggatgattattttcgctctacttgggtgttctctttgcacgacatatctcatacctcagaaaccttaaagtggattttgatacgggcttaaaaagagct

SEQ ID NO: 48066 - DNA, 273 bp, Zea mays
cttcataaaacctcttaacaaccactacttcgcttgcttcaagaagaggaaccgtactcctctccctagcccttacaatagatctgtcatggaaatcatttcgcttcattcgttctatctgtccttgcttaacaggggactttctcaaaacaacatgacttggcctccatggtcgatcttccacatctttattatcactctccacattggaactgtcagtcactggaatccctatatagcccaaccaacatttatcagcgatcttttcaacgc

SEQ ID NO: 48067 - DNA, 236 bp, Zea mays
tgggaggagcgcatcacagcaagaatgtgatgaccacatcatgacccctcgagctgtacatatggaccttttggactcgcgcctatttacacatatgaggaataagtatgggtacgtattgatgatgactttcccgctctactgggcgtctttttgagcgaaatctgaacccaaggaccctagctcttctcagagagctcaaatgattgactcagggaaaaatacgacgaaacggc

SEQ ID NO: 48068 - DNA, 323 bp, Zea mays
catcataatacgagacaatatgtgatgagatgtatatagcggccaaacttgacatgggaggaggctatcttaaaggactcgaaagaatggtatatctcaaaggaattgtgtttggatagaacagtctggaaagagactatacatgtgcacgtactcgtgattaagcctctttccttttaatgctctaaaaagcttgttcccctcccatctctcttcatcttgttcggtgactacttgttgcgatctaactctagcctatcccaaattgcttgagactactaggctatgttgatgatgatgctagatagtatggcctatcatta

SEQ ID NO: 48069 - DNA, 212 bp, Zea mays
agtccatcattgagttgccaccgtcactgtgatgatcgcaccaccgcgtcactcgcggtacagcgaaaaacggttcctcgaggagcatctcgcttagcatcacgtacagatcgtccccgcagattgatcgggaacttgttccggccgtagcggcacattgctgtaacttgtatctaactgtgccctcccactggtcacactgagacggctga

SEQ ID NO: 48070 - DNA, 89 bp, Zea mays
ctgagctggtttctgttgtgattatgttggactcacttgtctgtctcttatgtgaagaaagtgtgactgttctggttatagcttggaaa

SEQ ID NO: 48071 - DNA, 146 bp, Zea mays
  unsure (1)..(146): unsure at all n locations
tattcaanataaaaaggcggttataaaaattcgataaaccaacactttataaagataaaacccaacaatttaactaaaataagctggaaatgctaacgacagtggactaggcaaccaaccctcttactacttaatcaaactattcc

SEQ ID NO: 48072 - DNA, 100 bp, Zea mays
ggccatgacctgatatgacccgcatgcctttctggtataacttttgatctggatacttactgtaacttcttagaaattgaaaatggcaaatgcattaaaa

SEQ ID NO: 48073 - DNA, 178 bp, Zea mays
cactgagtcgctggctaactgaagagatcgattcttattctcctcgccaaaggcagaggctttattaccactgctctatcattttcttcaatgacttgtcagtgatttttttaagttttactttatatcacacgcgtataagcatcttttttgcttaactgctacatcacggataagt

SEQ ID NO: 48074 - DNA, 377 bp, Zea mays
tgaacttgcaggctcaagatctaaatctcaagaccgtgtgtctgcatgcgcgaaatccaaagaattttgcggtgatagaaagccctcttgcaggtataaaactcaaaccgcgctcagacgagctttttgcagacgctgacggaaactacatgcgtaaagactgaaatcatgcatacgcgcagctctgcaggtgactacaaattgcaggtttatgttgcgggctcagatcgaacgccttcgaggccctacatatgtcaccaaagtacgtgtgcgcatataaaactaactggggggtatttttttggcagttagaacatgtaacatttcacgtgcgtttaaacgctaatcacttgcgtttaaacccaaaattacgttta

SEQ ID NO: 48075 - DNA, 176 bp, Zea mays
acactcgtgactgtgcataagagcaatttgtcggttttttttttttttccattgaacgactgatcttttgtggcttcacactctcatattcactaaaaaatgtctctacacttccgaattagaccaactctgatgatgaatggtcaaccatgatctgatgaatttctaatttcatt

SEQ ID NO: 48076 - DNA, 216 bp, Zea mays
aagaaagtgtgtctttactaacacactgactcctgtccatggcgaaatatattttcaaacacacacctttatcacccttttgagaatactggagtgtctatatacatactctctaccgggcacgctatcaataattcacttgacaagggacattaccatgctacttcggtctctggctctaccacaaacctagggaacatcagttgacgacgcatc

SEQ ID NO: 48077 - DNA, 127 bp, Zea mays
gagcacataatctccacttccattctgggatcgatgtgaatcgagcttagttttgtttacgatcaatgactattgatttcttatctacacaactcttaactacattactcgggtggagtgtatactc

SEQ ID NO: 48078 - DNA, 81 bp, Zea mays
  unsure (1)..(81): unsure at all n locations
cccaccnagtccaagaacaggaacgcatttttttttttgatagggacttggttgcaacctaaaaactaactagtaaataat

SEQ ID NO: 48079 - DNA, 184 bp, Zea mays
cataacagtgcagtcgctttcaactacagtactgccttatactcttaagtctgataccctttttaagaagtgccctcatagaataaagtgacccattgctatgagaacgaagagtgtattaaaactacaaaacatgaaggaggcagaaattgatttaccatctttgacaacctgttcatccgat

SEQ ID NO: 48080 - DNA, 280 bp, Zea mays
tataatttcataacataaacgttattctatatgaatatgctaatgaatacattttgttaataattgccgcttgactctgtaacataaatggtgattcaattgatatgtgggaaatctttataaagatgatgtaaattgtatgaatcaggttattgagtttgaactcattaccatctgggaccactttataggcttgcaaatcctctacttgtttatagaaattattatattgatgctctacgaataaatacgatatcatgaagaaatcttactcccctta

SEQ ID NO: 48081 - DNA, 340 bp, Zea mays
cgtacactaaggagaaaactttcgggtaaatctgtgtattctataccacatctttctggcttattacaccctaaccaaaaccttaacaggagccatactgaacttctcaggatacacgacaagctgaaaataaaatatcatgtataataaagaaactctcagccactaccaatgcaatgaactcaacagtctacgataagtgactgcactgacaaccacatatgaaatattgaaacacgaactcgctcaagaaatgataaatctgatggtgacatcaacattgacgcggattcataacatttatgaaccacgcactctgcaacgagcaattgaattatgc

SEQ ID NO: 48082 - DNA, 122 bp, Zea mays
atgtattcttgaaagccgatttttcacctaaaggttaatacagcacaactaacaaattgccggctctaaaaactctcagcttgtgacacacaaacgttactacgacctctctctaaccgcaa

SEQ ID NO: 48083 - DNA, 197 bp, Zea mays
caaatataataacaattctgtccactacttattgcaacataatatagtttagatagatatatctgcttatatcactaaatcgaggacaaaaatggcggacgtattcctgcgattacaccaaccgtctggaaaaataccatgtaccacacgctgaggataatacaacctccgtggtaatccatggacctcattactta

SEQ ID NO: 48084 - DNA, 190 bp, Zea mays
tttgtgcctactccatgtcacacagttacttactcaaatggtgatgccttgcccaataaccacccatagctcggatatatctattactatcattatcttgatcactacacacatgtcctctgcgcttctccttctgaacatttttgctatttacaaaacgatagccttcacacccgcaaacattcataca

SEQ ID NO: 48085 - DNA, 180 bp, Zea mays
  unsure (1)..(180): unsure at all n locations
cactgngatganctgtaggtttatccactggctagcgcatgcgcgcacttgttttttctatacatgcttgacggctcgtttgaaatcatagtaagtgtcctaacaccttaagtcagaccacgtttctaaacaaccttacattggataacatataccatatgataatgactacgtacaata

SEQ ID NO: 48086 - DNA, 171 bp, Zea mays
ctgcatatgatcgcacgcaacctgtgcgccgtcgatacatttatgttgaactatatctatttcgcatctcgttatatactatcagctacacaacgttaagcccatactgctaaaaatacccccctgcctcatgatctgtgaatataacatctgcaaggagcatccaacgat

SEQ ID NO: 48087 - DNA, 212 bp, Zea mays
actcgacgctctagccttgggtgacatatgcccttgtgtgctgtcacgtggagcgagtggcaaactagtactccactcaacgagtggctctttggttagcagaacacaggagacgtcgtgccgggctattgattcttgttgaggccgaactgggggctgttcacacacaagtctgtatcaatccagctgcttcttgatggcgagctgttcca

SEQ ID NO: 48088 - DNA, 265 bp, Zea mays
tatgtatattattaaaaaaagtatgtgtctcggacaaagggactagttaggagtaccttctttttctcacgcgtgaacaaaaccgtaattcctgacctaggaaaatagctgtatcgcagtttgaccaggtaacctatgcgagcctcttgtaaccccttgaccttgagacttttacactctaacttgacgtagaataacgagacccgtaccaccctagagtgaataaagggaccctcttagaagttcaatataatcctgtaggggg

SEQ ID NO: 48089 - DNA, 445 bp, Zea mays
agcttcagtgctgtgtactctgtagcgtctatagtctgtagcgtgtaaaattgtcaagaacgtactgtaccaccagccagaccacagcgtttggtaagttcgcgatgtaaacgtgttctgtaccggctcgagtacgtatcgcgaatctgcgacgcagatcgatgcttgcaaattacattcagtgagccagtactgtaccatggcatggcatgcacgatatgcagagatgcagatgacacgtccagcgtactttctcgttgcagagataccataccaaaccagcgaacctgcaccggttaataaactcactgaagcgaaatggagggcgaaaaacgagacaaacctataagccaaggctcagcttcaacccacggccaccttaacctgttcatactagttctcaaatcaccaaacaagttgtatgtagagcacacaccactaaaca

SEQ ID NO: 48090 - DNA, 393 bp, Zea mays
  unsure (1)..(393): unsure at all n locations
ctaagcttgatactccagccacgctagtctgctgatgtccactgtatttnttcaatattctcactggacatcccaacttgagtatggctgcttaaattcagcaagtctggatacatcagcaagcaacaataacggagctgcagcctgctatcttcttcacagagattctctgtgtttctgaatccctcacttgagctatctcatcccaccggccttctgatgcgtatgtgttcgacagcagaatggcatctgaaggatggtagtggtcaatggcgtccaactgtgcctgcaccatcctgcccagcttcgcattgccatacactctgcaggcggtaagcaacgctctccacgccgtagcatcaccatgggatgacactctctgtatgagatcat

SEQ ID NO: 48091 - DNA, 439 bp, Zea mays
agcttcgtattattccggtctgctgcaaagcttattttattctgtatggtcctgttcacatattgtactacagaaatactgttaaatcctgtttttgaggaccttccgacgccgaaagtccccaacagtagccctctcctatattaatttgtgtgaaataataaattcacattgcgatatgaacgaaggctttatgccgaaagtccgaaaaaacaccttccctttgctagaatagcaacattcaatgacaagtggggtctttcaactttcaacgcatcaatcgtataaatacggccataccgcaaacttattttgcacgctatctggccaaccgctcctgctcactcatttgttagctcttgtgcactgtgatctgctaagcttttatctttgaagctctcggtttgaaaacagtttctattgcttccgaagatgtctg

SEQ ID NO: 48092 - DNA, 444 bp, Zea mays
  unsure (1)..(444): unsure at all n locations
atccttaagtcacctgcggcatgcaagcttgtcttaagctcagcctccttcttcatacagatttgatgataacctgagtagcagtccaataagctcatgagctctaaagtggttgttgcatccataagagaatctattcttggcaatgggaattcatccttcgggcatgccttattgagatctgtgaattcgatgcacattctccatgttccattagctttctttaccatcacagtattggctagccactctgggtatgttacttctctgataacagcggcactcagaatcctttttactttgttacatgcaccttcggctttatcatcggacattntctgaagcttctgctttcttggcctgatggccgggtctacattaagtgagtgctcaatgacatctctattgacacaacaaagatcattggctgaccaagcaaaaaca

SEQ ID NO: 48093 - DNA, 405 bp, Zea mays
  unsure (1)..(405): unsure at all n locations
gctgggagaagcttcacggcttactgggaagcgatctcagggctatggcgatgctggagttcatataaaagggggtggccaggatggtcgagcctgngcagggatggcgggcgacggtgctcgctnttcacggcgaactccggtgatctttggctcgggcgaggctcggggtgtgcggtgccaacggctaaggcctcttggacacatttatatgcgagggcacgatagaggcgcgcggggcggtgcgaccacgcgcggngcgcgcggncagtccgcgctcggccggtcaggcaagcgatcgaacacgtggctttttgcttctgcccgagttcaagcgcccataggctgaagatcttcgcgaatatgggcatgatcgctgcacaagatatgctccctcgacagagc

SEQ ID NO: 48094 - DNA, 486 bp, Zea mays
catgcaagcttatcgttagactaagactatatcttattgttccccctatattgttcccctaaagctgtactatgcagccacgtcagcaagattccctcccctaaatttactcgttccgcaaccgctccccctaaatattcccctacatatccctctactcattaaatatgcatttccctacaactaacacaactaagtcgatggggaggtttgtttcttttttcaacacgttgtcattactacatgaaacttggttcacaagatagattaaattattactcttaattaagacatacttagtacatactaaaatatcacaatgatggcggaaggacgtgtcgaatgggttattaaccacttcgatctacgtacggccagacatatcgtgctcccttcaaaatgatcttgtcgagcacttatggagtcgccgcggaagtatgtaatacttgagtgtcgcagcagctgagttcgtacttactatcacta

SEQ ID NO: 48095 - DNA, 445 bp, Zea mays
  unsure (1)..(445): unsure at all n locations
aagcttgctcaggccttcttcttttctccatagcaggaaccttactgttactctaccccacttaaaaagaatgaggtagaactcttgtatcttgtggatttgaactccttgaagtacctcataacaagggtgttacggngccttcttctactgttgatgcttgagcaggcagcagagagatgactggcacggngttgattctgggagaaccttcttcttagcttctcttcactatcttcttttcactgaccctttctttctctttgctcttcccactggaggattctatcacagagtattatcatcatacagaggaggaagccaaagactatgaaccatgtgcaacagtcttcaacccaagaatcaccaagcattgtgatctcangggcgagggagtggaanatggagttgcttgcgacttggcagaaggggtttatctggagtg

SEQ ID NO: 48096 - DNA, 427 bp, Zea mays
  unsure (1)..(427): unsure at all n locations
agcagcagcatcgagtttaccgtaccaatcagtaaactctctacctcccccggcacatggcaaccccaaaatgagatgaaccgtatcttttgctatcttaagttctttgccagcccctgagcgtatggtcatgtcatttggatctatattgtccatcaaccacctgataagtgatctgctttccaatgcatcagttcgcatatcaaatatgctataaaatcccaacctagcgacggcatcacgctgccgatcgctcattatccatgatgatacaataacatccaagggaatgcatcggatattcaatttctggaagcataaatgaatattcattaatacagaaagtatatatataggtagaactaatgatactatatttattacaggcttgtnacacctagataaaatactagaaaaaattaacacc

SEQ ID NO: 48097 - DNA, 453 bp, Zea mays
  unsure (1)..(453): unsure at all n locations
aactcaagcttacacatnacatnttgggggaacgatagagcgtaacaagacctttgttttcttgtatgtcaatatgccggaacttgatcctgatgttcaaaatcttgagagcatatataaacccaacaaacaacttactcaaaagcagttggatgacctacgctngaaaggggtacacggtggcccatcctttgtgcagtggttccacgagcatgtaatttcctccatgcctatcttttgtctaacttaagtttagatgttgcatactatncatatntatcggttcctccatattttagtgtaagatacctgaagtcagagtctccaaagacttgctacagatatcacatggtcaattgaccgcaagaaaatatgatcgctatgatattaatggataccgtcntcgaataccaaactagaagagagccgtcatctgccagctacacaaacagc

SEQ ID NO: 48098 - DNA, 370 bp, Zea mays
  unsure (1)..(370): unsure at all n locations
tttagttntgaagcttcngctnntgaaaatagttttagtgtctcttaagatgttcgaagataagaaggctgctgctgagacgaaactaagcctcgacgaagagaaaaatttggggtttcttatagcgatgtcgaagaccaacacagaanaaatcaccaacgagattctggaaggtttgtctgaggatactggtgatagtgacagctatgatgtggacagtggtggagaagactccgaagatcgcccctggcgaccaagtcatgcggttttcggcaaatcagctatcaaagaaagccatcttgccaatatgaggggaaggtatttccgggatctgtccattgtgagggcggaccgaagggaaaggacttgt

SEQ ID NO: 48099 - DNA, 348 bp, Zea mays
  unsure (1)..(348): unsure at all n locations
gaattgcttgtcngtgtcgactgtgagttctgacgggactccaaagcggcaaacaatattttgccacaagaatatctgggctgtcttcgatgttatcgtggatacagccctcgcctcaatccatttggtgaaatactccacgacgactaaggtgaacttgatgttcccctgagccgtgggcaagggtccgacaatgtccaagccccaacgctgaagaagccatgtgtgggcgatcagcttcgtgaattgcaaaaggcttcccaagcgtggagaaaacttctgataggctgtacaagaccttcgtacccgatttgcggcacgaatcatggcgggccagtataaaccttg

SEQ ID NO: 48100 - DNA, 272 bp, Zea mays
  unsure (1)..(272): unsure at all n locations
cacacagtggagtagggtattacgctccggtagccctaaccactctaaatnctcgcatgttcatgtgctcggtgatcgcttagcaagacaggcaaagcgcttaagccccttcctcatcttatgatttagggcgggtgcattccgccacccggccggagaatttcctcttcgacatttggcgcaccacgtaaggggctaggcattatggttttgcttatttcctcgctcaacatgatggtgcaaatcgttgagcaccgcgctgagacttcaac

SEQ ID NO: 48101 - DNA, 439 bp, Zea mays
  unsure (1)..(439): unsure at all n locations
agctttggaaaatctggtgtgaatctatngtttttccagccagtccaaagaaacttccgacttgatgtacagtcggtgggggtttccactccaaaatatccttgactttgctgggatccaccgcaatcgccttggcagataatacatgtcccagaaattggatctcctccagccagaatgcgcacttactgaacttagcatataattggtgttcccttaagcgcgtcaatacaatccgcaagtgctgagcatgctcctcttcattcttggtgtatattaagatatcgtcaatgaataccaccacaaacttgtccaactcgggcataaataccgagttcatcagataagtgaagtgggcacgagcatttattattccgaaagacataaccagatattctaataatccataccgcatggtgaatgcggtctttggtatatc

SEQ ID NO: 48102 - DNA, 445 bp, Zea mays
  unsure (1)..(445): unsure at all n locations
cgaacccgactattccatacatganaaganatcacgctcttttttgtatagatggcgagagtggcacgtactcttctggcaacggaccgcctaaaaggtggtgtgctctctggtggcgcggacctgttcatgtggtggaggatccgtangaatggtagacatgtgcaaaagagttaagggaagcatatgtcatgtggttggagatccccagctgggtattaatcgattcggatcgccgaacttctctgatatgaagactggatcttcgaccctcatcgtatataacaagcgaaacaaaagttggattttaaaagaaagctagtgtaggacaagtgaatgctctatattangtaattctagattcangagaagtacttaacttgtgatcgtgaaatttggcttaaggacccacttctagtaagcttttctgcagaaagagtctttg

SEQ ID NO: 48103 - DNA, 439 bp, Zea mays
  unsure (1)..(439): unsure at all n locations
agctnggcatacaactggcaatcttatgctctttgagtactntcctcaaatgttcctcatgctctttctcatnttgggaatatataagaatatcatcaatgaacaccactacgaacttgtcgaggtagtccatgaacacactgttcatcagatacatgaagtaagctggcacattcgtcaaaccgaatgacataaccatgaactcatatagtccatacttagtgatgaatgttgtcttccgtatgtctgagggtcagattctcagctgatggtaacctgacctcaagtctatctttgagaacacactggctcctctcaactgatcaaataggtcttcaattctgggcagggggtacttgttcttgacagtaacttcattcacagctctgtaattgatgcacatnctcttcgtgccatccttcttctcacaaacaacatc

SEQ ID NO: 48104 - DNA, 402 bp, Zea mays
cccatgctcttatgtgaagacatagcagagcagaaggtgctattgcgatctcaattgtccgaagaacgggagaaaaccttgataaggtttttgttcaacaataaagatgtttttgcttggtcagctaatgatctttgcggagttaacacggagatgtctgatgaacaacgccgaaggtgctaggaatgaagtgaaaagactccttactgccggagttattatagaggtaaaatacccataatggttggctaacactgttatggtgaagaacgccaatggtaaatggagaatgtgtatcgatattactgatctcaataaggcctgtccgaaggacgagtttccattgccaaggatagaatccttagtcgatgcagcagcttcatcagagcttatgagtctgct

SEQ ID NO: 48105 - DNA, 303 bp, Zea mays
agcttaatcttgaaagtagatccacatgtatcttgcgcaaattctgttataaaactgatgtgcatttttgacaatcctgttacagaattgaagctaagttgcttctggagaagctaaggaacaaaaggctggatgttgtgggggaattcctgaatccgaaccagtgggagttcatggtgtgcctggtccaatcagaagcttcatgggacaaaaaagtcccttgcaaaaatgggttttttaatggggtccatcttcaaggatacttactcatcaagcagtgattaccggatacttataaaatca

SEQ ID NO: 48106 - DNA, 352 bp, Zea mays
  unsure (1)..(352): unsure at all n locations
acatgtgctaggctgcgatgccacattcagcccatgctagtcttagctattaagcatgcatctagaccggcttcttcttttgcgaaatcaactaaataaagtttgccgtctagtacacccttaaaagctagtgaaccattacttcttnttaagacagacacatctacattngtgaatagacagttataccccatattacataattgactaacagataggaaaatatatccaagtgactcaactaagaacacattagatatggagtgctcattagaaattggcaatttacctaaaccttttaccttgccttgattcccatcaccgaatacaattgaatcttgggaatccctat
